United States Patent Application Publication US 2019/0348154 A1 - sequence listing, part 135

SEQ ID NO: 511974 - DNA, 729 bp, Stenotrophomonas maltophilia
atgaagatcaccctcaccgacacgcccctgctgaacacccagcagatcggcgagctggcgtccagcctcgacgccatccactcccgcgtcctcaaggccatcgagcgcctgaacaaggacgtcgccaccaagaaggccgaggtcgccgcccgctggaagaactcctccggcttctccggcgccgacgtggcgcgcttcgagcagaccgagaccctggccgccatcgggcagatcaaggacaacagccgcgccgagcttgacggcctgctcaagcaggcgggcgcaccgcacgcccagctcgtcgcgcagcgcccgttctacgacagccccgccaaggtcctgtcccgcgccgcgctcggcgacccgaagcgcaccgagtacctccagcagctccagcacgccggtcccgccgagctcggccacatggcccaggtcgcggccggcaccaagaacgtccagctcgcatccgccgtcctgtcgctgctggacaagatgcccagcaaggaccgtccggtcggccctgccgagctcgcggtcgcaatgaagctggaggactacgagaaggtccgcgagtacatcaagctgggcgacgcgcgcctccagggcatcctggtcgccgtccgcacctggcagtccggccgctcgaacccgctgaacaccgtctccctcgccatgcgcgagcaggagattgaccacgcgctgatcggtggcggcgatggcgacgactaa

SEQ ID NO: 511975 - DNA, 330 bp, Stenotrophomonas maltophilia
atggagtaccgggtcggctccgcctcgttccccgaccaccgccgcctgcccgccgtccgcaggccctccggtgaccacctcgtcggccgcgccatcgtggagcccgagcggtggccgttcgacggggacctgtcccgacgcgcccccgtcctcgatcccaacttcgacccgccccacatcgtgcgccgtgtcggctggctacgctgcatgctgtgcagccgcccccacttctccgaggacgtcgtcggcgtccgcatctgcttcgagtgcggcggcgagggaagcgtccccatcgggcgcctatccgacctcgaggacgagaccccctga

SEQ ID NO: 511976 - DNA, 261 bp, Stenotrophomonas maltophilia
atggcggaagctagaaagctgacggtggccgaggccctggagcacgcggagctgatcgagggcgcgctcgacaggttcgaggagacggcgccgcacgccgtgcgcgccctgggcggtcgcgatgtcctcgccgcgtgctccgagatgacgtgcatcggccccgtgccccggctcgaccaggagacctgggcggccatctcgcgcgagtttcaggagcggcgcgactgggaggcccgcggggagaacgggggcacgaggtga

SEQ ID NO: 511977 - DNA, 516 bp, Stenotrophomonas maltophilia
gtgcaatccgcccccaacaccttcacgcccgaacggcgcgaggtgttcttccaggtcctggaggacacctgctcgccgaagcaggcggccgcagcggcgggcgtcagccgggcgacggccttctaccacaaggccaacgaccccgagttccgcgcccggtgggagaaggcggtcgaggtcgcgctcgacgccctgctggacgaggcgtaccgccgtgcggccgtcggctacgaggagcccgtcatccacggcgggcagctctccaccgtcaccgacccgacgacgggcgagcagcggcccctgacggtccgcaagcacagcgaccgcctactggaggtgctgctcaagttcaggtacggcgaccagatggccgacaggctgcgcgtcaaggtcgaggagagcagcgggctcgacgctgcggcgctcctggccatgccgagcgaggaccgcaaggcgctgacggcactgctggcgaagtacgaggcgaacaaggagcgcgaagatggcggaagctag

SEQ ID NO: 511978 - DNA, 2367 bp, Stenotrophomonas maltophilia
atgtccgcaaaagaaaacgcccacggcggacaagaccgtgggcgcaaggagatgcccgaggagtgcgggcgcaagcatgaacagcaagtcaatcatgccgccgccacctcccgcaggacgccatcgatcgacgccgagggcctgatccgtgcggggctgacgctgatcccgctgcaccgctgggacgcgaaggacgccaggggccgcccgcgcggcaagacgccgctgcacggtgcctggcaggcccgcgactacgacagccggcaggtcctggagctcgccgcccgcgagggaatcaacgtcggcgtgcgcctgccgtccgactggctggtgctcgacgtggacccgcgcaacttccccgagaactgcgaacccctggccgacctggtcagggacacgggcctggacctggacagcgcaccccacacgatcacgggctccggcgggcaccactactggttccgcaagcccgcggacgtgcaggtgctcgactcccacgagagctaccagggcgtcgaattcaagtccgtgggcaggcaagtcgtcgctcccggagcggtccacccgaacggcaacaagtaccgctgggatgacttcgcacccgtgcccgaggacgcgccgccgctgcccgaggcggtgctccgcttgatccgccgcccgacccgcgcgcacggcgaggcggcaggcttcggcgagctcaccgccgacatgctggcggagacgctggagcagctcgaccccgaggacttccgggaccacgacgagtggctgacactgatgatggcctgccaccacgccacggccggcgaggggcggcaggagttcatcgactggtccacgcaggacccggagtacgtggaccacggccggatcatcggtcatcggtgggactcgctgcacgcgaacccgtcgggcggtcgccgcggtcgccccgtcaccgtcaagttcctgcacaaggtcgtgcaggcggtcggcggcgaggtggcgcgcacccggccggaggacgacttcgacgcctacgaagaccccgccgagctcggccagggcgtggacgatgcattgcttcgcgcggagcccaaggccgagggcatcgccgccgtcatcgaggagatgaacgcccggcactacgtcgtgctggacaacggcttccaggtggtgaccgaggagaaggacccgatcttcgacggccgcgtccgctaccagcgcatgtccaagagcgacttccgctcggcatacgagaacagcttcgtcgagcgggacggcaagctcgtgacgcgcgccgacctctggctcaggagccctgaccgcctcgcttacaagggcatcatcttcgaccctgagcggaaccaccctgactggctgaacctctggcgcggctggtccgtcgagccgaggccgggcgactggtcgctgctgcgcgagctcatccgcaacgtgctgaccgacggcgatgccgcctcgttcgagtacgtgctcaactggatggccttcatgttccagcaccccggcgaggtcgccgaggtggcgatcgccttccgcggtgccaagggcacgggcaagggaacgctcggccgcgcgctcgccaagctcgcgggcgcgagcgggctgcacatcagctcgccgggccacctcgtcggccgcttcaactcgcacctccagaactgcgtgtgcctgtttgccgacgaggcgttctgggcgggcgacaaggcgggagaggccgtgctcaagcagcttgtcaccgagcccaccctcacctacgagggcaaggggcgcgacgctgtcatgggcaagaaccacgtccacatcgtcatggcctccaacagcgactgggtcgtgccggccgggatggacggcgagcgcaggttcgcggtgttcaacgtcagcgagcggcggcgcggcgaccgggagttcttcctcgcgctgaaccgccagctcgacgacggcggactcgccggcctgctgcacgacatgctgacgcgggacattcgcgactggcacccgcgcgacagcgtgccgcagaccgaggccctggccgagcagatcgagcgcagccagagccccgaggagtcctggtgggacggcctgctcgacaccggcaagctgccgaactacttggcggaagaagcctggaacgacggcccggtcgaggtggacaaggacgagctccacgccgactacgcagcccacgccaagatgctcggcgcacgtcccaccgataagaaggggcttgcgttgaagatcatgcgcaaggcaggcttcagcgtccgtcaggtctcactcaacgacgggcgccgggtctggcggtgggtgctgccgcagctcgaagacgcccgcgccatctgggccaaaaatctgcgccgcgattga

SEQ ID NO: 511979 - DNA, 258 bp, Stenotrophomonas maltophilia
atgacactccggctcgccacctcggccgccaccctggccgaactccactccctgccagacgacgccctcctcagcacccgcgaggcggccgcgttcctgaacctctcgccccactcgctgaactggtacaggtgcaaccgcatcggcccggactacgtgaagatgggcaccaagaccgtccgctaccgcgtgggcgccctgcgcgcctacgccgactcgctgcgtcccggcatcggccgtccgaagatggagggttga

SEQ ID NO: 511980 - DNA, 813 bp, Stenotrophomonas maltophilia
atgacgctattccagaacccggtcgttcccgcgccctatgaccaagggctgattcaagttcgagacttcctgatcgctaagccagacctcctgggggttgttggacgggcgatccgcaagtcgtttgacgaagtcatcgacgggcctcgaaccgggcgctactgcgtcgagcaactggagaagacagagaagacctacatcggcaccaaggtcgaaattgtgctgcgcacggagttgggcctcgaacgcggccacgtcctggacaaccttatcgtagggcacgaggtggacacgaagttcaccgtcggaagtacctggatgattccaagggaggcgctgggtcagctctgcctactggtgacgggggacgacaacaccggccgctgcggtatgggcattcttcgtatggtgccggaggtcctgaccaacggcgcgaaccaagacggcaagaaaagcgtgtcggctctcggtagagggcaaatcacctggctcgcgcagggccccatgccgcgcaacttcatgctggatctgcccgacgccgcgcggaacgcgatcatgtctgcctccagcggacgacaggctatctgggccttgttcaggcacgcgacgggtcgcctcattcctcgggcggtcatcgaacaggttgcgcaacagagggattcagccaagcgggcgcgagaggcgaaggcgattctcgcagccgaaggaatccaggtgctgtgcgcgacgtacatggaggacagggccgaaatcgtgcggcacggcttcactcatttcaacgacgatgattggctgagcatgccgatgcggtga

SEQ ID NO: 511981 - DNA, 894 bp, Stenotrophomonas maltophilia
atggcgggcttcggccacgaggcactcgtagagattgaacctcccgcctgcgccacgctgcgtgctaaccgcccggactggcgtgtcttcgagcaagacctccgtactttcaacgcgcttcattacaagggcatcgatctgcttgcgggtggtgtcccttgcccgccattctcgaaagctgggaagcagctaggggccgacgacgagcgagaccttttccccgaagcgatccgccttgttgatgagtgccgcccgcgcgccgtgatgttggagaacgtgcggggtctgctcgatgcagttttcgaggactaccgcaacaaggtcgagaagcaactcaagaagctcggctatgttcccggttggcggctcctcaatgcctctgactatggtgtctcccagcttcggccccgtgtgatctttgtcggcattcacaaggacgttgccagcaagtttgcttggcccgagccccaccagattgagcctccgacggtgggcgagcttctgcacgacctgatggctgagcggggctggcgaggcgccgatcgttggaaggaaatggccagttcgattgcccccaccttggtcggcggctcgaagaagcatggcggtcccgatctaggccccacccgcgcaaagaaggcttgggcatcgctcggcgttgacggccacggtatttgggatgccccgcccgagcgcgacttcgtcggcatgcctcgcctcacgacgcgcatggccgctcgcattcagggcttcccggacgagtgggagttctcgggtcgaaagaccgctgcctaccggcagatcggtaacgcctttccaccgcccgtcgctcgggccgtggcgcagcagatctaccaagccatctcggcacgcaaggtattcaaggtcgcgtga

SEQ ID NO: 511982 - DNA, 198 bp, Stenotrophomonas maltophilia
atgcacggctgcccgagcgttcgggttcctaagtccaacgcggactattggcagcccaagctgacccgcaactgcgagcgggacgcacagcatgtcgaggcccttacacagatgggctggcgcgtcttgacgatatgggactgtgagacagccgacgtcgaggccctggagcgtcggatcagggagttcttgaggtag

SEQ ID NO: 511983 - DNA, 5007 bp, Stenotrophomonas maltophilia
atgaatcgcatctatcgtcgtatctggagtgccgccaagcagtgctgggtggttggcagtgagttgagcagtccgcgcggcaagtccgccggaggaagggcactattgctggtggcggcactggtcggcctccctgccgcagcgcacgagcactcagaggaagtggctgagcgcgagcgggaaggaacggactccagtcaactcctgatgccctctccgtggcgcttttcgtcattttcgaaccaggtaaatgctggttacacccagctggctctggtaaatgacagccagtataggaatgccacgatcagcggtgacatgcagatgatcctgggttcacgatcgagcatcagtggctggggatcggtggtctacggcaccgaatcatcgctgtcggggctgggaagtgtgcttgtaggaaattcatcgatcgcgcgcggcgataggaacgtcgtcgttggatacgggtctgaggccaagagcggatacgcgacagtcgtaggcgccagctcgatcgcatcgggaattggtgcaaccgcactggggcatgacgccagggcatactcgaacaattccgttgcggtgggcagcggtgccaggaccgtggatagttcggcgggtgtttcccgtatcgctattggcgggaacgccttcgctggaacggcgggatattccggtgccatcgcgttgggagggaacgcacgtgccgagtacagtggagttgcgttggggcatcatgccatggcgagcgccaatggctcggttgccatcggagcatattccgaggcaacggaaagcaattcggtgtccgttggcagctcatcgacgaagcggcgagtgactaatgtggacgatgcgcgattgagcaccagcagcacggatgccgttaccggaaagcaactccacgccaccaacagcaatgtagcggccgcgcgctcggtcgcggactctgccaagaccaacgctgacagtgcgctggcaaaggccaatacgctctcaggccttctgagtcagacgtctgcctcggggaacgttcgcctaggtgcaagtaatagcggcaccgtactggacgtccgcaacagcgccagcgccaatcgcaggatcactggcgtggcggatgccacgctgagtacgtccagcaccgatgctgtgtcaggaaagcagttgaatgccaccaacagcaatgtcacggccgcgcgctccgtcgccgactccgccaagaccaatgccgacagcgcgctggcaaaggccaatacgctctccggccttctgggccaggcgtctgcctcggggaacgtccgtgtaggtgcaagcaacagcggcactgtactggacgtccgcaacagcgccaacgccaaccgcaggatcacaggcgtggcggatgccacgctgagcacgaccagcaccgatgctgtgtcaggcaagcagttgaatgccaccaacaccaagctggcagatgcacagcgcgtcgcagacgcggcagccgcgcacctgaacgcatccgccccggctatcgggctggcggcagaggcggaggggagcggaagcaccgccagtgtagcgatggggcgctcggcgaaggcctacaacagcaacagcatcgcagttggtgcagatgctcgggccggtgtcgacgccaacggtgacaagagcgccgccaccggtgcagttgctcttggtgctgcaacgcgtagtggcaacggcgcggtggcggcaggcctgcgtgcttcggcagtgggcgatcgcgccgtggccctaggcaatgatgcgacggccgcggcgacccatgccgccgcgctgggctacaaggcagatgcgagcggcaatcaggccgtcgccattggccgggaggccgccgcatcgggtttgtattcgacggcgcttggcaatcttgcaaaggcgggtgccgaaagtgccattgcgttgggcgaccgcgccctggcatcgcacacgggaagtgtggctctgggcaacggctcccagaccaccggcatcaatcaggtctcggtcggcagctccagtatcaagcgcaagatcgttaacctggcggatggcgctgtcagcagcagcagtaccgaggccattacgggcaagcagttgaatgaaacaaatggccgggtaacgactgcacagaatgccgccaacggcgcgcagaccaccgccaatgccgcacaggttgatgccaccaaggccttggctgaagccaccgttctgggtgggctggtcgggcaggtttcggccacggaggctgtccgcctgggtgagaagaacagcggcaccgtactggatgtgcgcaatagcgcgaatgcgaaccgtaagctgaccggcgtggccgatggcgtggtcagcgccagcagctacgaagctgtgaatggcaggcagctcaatgccaccaatgacaaggtgacgacggtggaggggatggccaagtctgcgggtgcagacgctgccgtggcaaagacggatgcagccagggcgttggtcgaaaccgcagcactgggcgggctggtggcgcaggaatctgcgtctggggatgttcgtctcggtgaggagaataatggcacgaccctggatgtgcgtaacagtaccaacgctaaccgaaagatcagtggtgtggcagatggcacgttaagtgggacaagcgatgaggcagtatctggccgacagcttcacgctaccaatggtcgattgtcgactctcgagacggagtttcggtttgtcagtttcggtacggatggacttagtgaagcggcagaatctggccgctttggtgtggcgatcggtgactcggcgaaggctagccccagcagtgaaggtgggactgcggttggagcattcgccaactctcttggcaggaactcagtggctgttggtcgtggatctgtcgtaactgggcgctcggagaatggattcgcactgggcgccgcagctcgagtggaagaggtgggcggcgtggccatcggcgcaagtagcaaggttgcagtgggggcaacgaacgccgtctcggttggcgcggcgtctgaggcgacagaagcgagtaccgtgtctttcgggaattcagttagcaagcgccggttggtgaacatcgcccgtggcaccgccgaccacaacgccaccactgtctcacagctcaaggattccctcgccaccctcggcggcggcgcaggcatggttgccaatggcaccatcatcgctccgacctacgcggtgcagggcggaacgcagagcaccgtcgaagacgcgctgatggcgctcgatggcgctgtgatcaccgcaggccgccgggcggagaaggtggaaggccagctcagctcgatcttccaggattcaccctcgatccgcgccggcggcatgaaccagatcgcgctgaacggcgtgaatggcatggtgctgaccaatcttgctgacggccgagtggcgccaggaagccgtgatgccgtaaccggcagtcagttgtacgccgcagagcagaagatctcgcagaatcggaacgatctggaggcgatgcgcaaggagcgggagatgggtgagcaggccatgcgtggattggatgcgagcggcccgattgatttcggcggtgcgcgtttgactggcgtggccgaggcgaagttgtcggctgatagctcggacgttgtgcgcggaagtcagctctatgagaccaacagccgtgtttcggaacttgaggatgtcgcgcagttcatgagtatcgggtcagcccccttcagtgaacgcgcagaagcaggtgctgcaggcgttgcggtgggaaattcagcaaagacgggactggagggaggaactgcggtagggacatttgcgggggccatgggcaagaactcgaccgcaattggtagagcggcgactgtctctgtggattctgcgaatggattcgcaatgggagtcggtgcacaggtcggtggagacgcgggcggtgcgaatgaaggtgtcgcgattggcgcaggcgcaagagttggaagcggggctcacggatcgctagcacttggaaatggctcccaagcagatgaagagggagtcgcgtcatttggcggtgttggcatcaagcgccgcctcgtaaacatcgccaacggcaccgccaaccacaacgccgctaccgtcggccagctgcgtggcgcgctctccgctctcggcggtgaggtcgatgccaacggcaacatcgtcggccccagcttcaacgtgcagggccagtcccaatccaccctcaacggtgcattggaagcgctcgatggcgcggtcgtcagcaccacctcgcgcgtgaaccaggtcgaatcccagctccgctccgtgttccaggaaactccctcggtccgcgcagacggcacccaccagctcacactggccggcgccaacggtatggtcatctccaacgtagccaacggcctgatcgcggccggcagtcgcgatgcggtcaacggtggccagctgcactcgatgcagcagcagctcaatggccgcatggatgggctggagcagcgcattgacgatcagcctcaggcccgcgccatggccgcagcatccacgccttcgccatccaccgaagagatcgcgccgacgccggaaaccagcggctcgtcgcagattgcctctgccggtgaaggtgacaagccgacgccgcagccgaagtcgaagcaggacgagacgcccaagccgcaggtcgacaccgccgacctggagaagatgctggcccgtgccaacgagtacaccgatggtgcgatcagcaccttcgaacgccgcctggacaagatggacaagcgcttcaaccgcatggccgcgatgagcagcgcacagaccgcgatggcgatgaacaccgccggcctggccacctacaaccgcctgggtgcgggcgtgggctacagcgagggtgagtcggcgatggcagtgggctaccagcgcgtgctgaacgagaagggttcggccactttcagcctcaatggtgcgttcaccaacagcggtgagcgcagcatgggcgtcggcgtgggcatcggctggtaa

SEQ ID NO: 511984 - DNA, 1041 bp, Stenotrophomonas maltophilia
atggccgtctggatcattcccgcttcggattctaaatcccaagagaactacccgaagacccttacatctccggtaagcgctcaacgcagggctgccctgcctcatgacccgctaccacccgagtcccctttgttcgcctggggctttcccaacaacgacaggaacaagaagaacgcccttgccatgaaggctggcgacatttgcctgttctacatgcgcatcaaggaaggaggcagctaccttcgcgcggcgaaggtcttccagatagcgactgccgaccagcagcttttctccagcgcgctctgggattccccagacttcatcccctacttcctggaagagccggtagaactcgcactcaccccacaagaattgggaaagagtctttcctccgatggaacctactggtcatatccgcctcgcggcgcaagtccgatcacggacatggtgcgagcaaagcacgcaattgcgactttcggaagcatcgacaactgggcactgaaactgattggccgtccacagcagtcgaagcccatagcgatcgacagcgctccggtcgctgcaaagggtgcacttccaatagtgacagaccttctgaggacgaccgtgcgacgcgaaaccgacgaacagcctggagcacaggcctcgcgtagattttccagaaatgccaaggccattggagacgcaggagaaaaggccgtcctcactcatcttcaagcgacgctttcggcgactgagcggcagacgctccgctggatagcaaatgagggcctcttccccggatgggacattgaatacgtggaccggactggccagcagatcgctgtcgaagtcaaatcaaccaccggacagttcttcctgagctttgaaatcacagagaacgagcgccgcgctgcagagagactgtgccagaactaccatctgtacctggtcggaagctgcaacgccaatcccaggctgcagatcatcaccgacccctgggccacgttccatggccagttcaccccgaccgcctacctggtcaagctcaccgaaaactga

SEQ ID NO: 511985 - DNA, 351 bp, Stenotrophomonas maltophilia
atggacatccaagcaatccaatcacaactgcaggcgttcgcggacgaaagggactggaacaagttccacaacccgaagaatctcgccatggcgctggcaggcgaaactggcgaactgctcgagctacttcagtggctcacaccggaagaagcctcgcagatccccatgaacgtcgaccttcaggcaaaagttgccgaagagctcgcggacattgcgctttacctgttaaggctgtccgacctcgctggcgtagatctggaatccgccatacaccgaaagatcgaggtcaatgccctcaagtacccggcaagcctggtcttcggctcatcgaagaagtacacggagtactga

SEQ ID NO: 511986 - DNA, 1293 bp, Stenotrophomonas maltophilia
atgcgcattcttgtattcagctatgaattccttccttcggatgcgccgcaggcacttcgtgtctcgcggttgatgcgagagctggtggcctgcggccatgaggtggatgtcatcgctgcgatggggccgacttcagcgttgccatatgagctgcttgatggagtcgcggtacatcgggttaaccctggcggggttgatggtctcgtcgcccgattgaagcaggggcgggcagaacagcctgtcaccgagcggttgagttctccggttcgtgtgcaaaaggggctgaactggaaggggaggtgcatccattccatccggagaatgacagatctgatgctgttcccggattcgcgatcactctggatcagtggcgccctccggtgcgcgcaggcgctggttgcgcgcgtaggagtgccggatctgattattggatcacatgaaccagcggctggagtcatcgctgcgatgcaatttgcacagaaaactgggactgaattggtttctgagttgggagacccgattctcgctacttacactgcgcgtcgatggcggtcacgtgcacttcgtcttgaacgcgaagtctgcgagcaatccgctgcagtggtcttaacatccgccgcgactgcggagcttttcgatgaacggcatggcgccgctgcgaaactacatgtcatttcgcagggtttcgatccgcagcccgatgtgcctcatgaagagcgaattgaaagcagtgtactgcgcctcgtctataccggtcgcttctatcccttccgcgatccgatgccactgttgcaagcggttgcgcaggttcaagactgtgagctcgtgattgcggcgccggagctccctcgccatgtagaggagttcatgaatggaggtgctagtaattgttcatggctgggctccctgccgcatgccgatgcactgcggttgcagagggtggcggatctgcttgtgagtatcgggaacgccggaatgacccaagtccccggtaaggtgctcgagtacatgggaagtggacggcccatcctgcatatccgctcggatgcaggggatgctgcagcggctcttatctccatcgagcactgtggctacgttgtggatggatatgtttcggatatagccagcctgctcggtgatctcacttccatgaagaaacaaggcgcgctggaagatggccttgttcttggcgctgactcgttcgagaaatacagttggcgtcgtctcggtcagcgactgagtgccgtctgtaccagcgtccagcggaacgcttctacccgagctggccattag

SEQ ID NO: 511987 - DNA, 1347 bp, Stenotrophomonas maltophilia
atgaagcgtgcagggctgggcagggcaatgggtgtggttctggcgttggcagcactgccggcaatggcggcggccaacgtgcagcagttcagccacgggcggttcgagcagattccggtgcacatgccggctggcacgccgcagcgtgtggtgatctggttccatgaacccaccgccggtggtgataccagccgccttccgatcgaggccctgcgtgccgatggcgcgatggtggctgccgtggacatcgcgcatctgcgcagcgtcctcaagcgcgaggggaatccgacctgttcgttcggttccggcgacgtcgagaacttctcgcgctggttgcaggcctccctgcacctgcctggctaccacctgccgctggtcggtggtgatggtgaaggcgccgagatggcctacacgctggccgcacaggccgacacccaagtgttcgccggcctgctgaccactggcttctgcccggatcgcagccacgagcgcatggtctgcggcgatggcgtgaagcacaacaagctgcagcctgccgagttgaattccccgtggctgagcgccgccggcgaccatggctgcaaggttggcgaggccagccgcttcgtgcagcaggtggcgatggcacgcgagttcaagcgcaccgcgcgcggtgatgcttcacccggcctggtggcggcggcgcgggtgatcggcgcgcaggccggcgtcagcctggcaccgccaccagccgcgctgaagggcctgccgatagtggaagtaccggcgaccggcagcggcgacacgctggccgtgttcgtttccggcgatggcggctgggctggcctggacaaggacgtggcatcgtcgctcaacgagcatggcgtggccgtggtcggcatcgactcactgcgctacttctggagcgaacgcacgccgaagggatttgccactgacctgcagaagatcatcgatcactaccgccagcagtggcatcgcgacaaggtgatgctgatcggtttctcgcagggtgccgacgtgctgccggccaccatcaaccagctcgatgccgatacccgcgcagcgctggatcgtatcgtgctgttgtcggtaggcaggaaggccgactttgaattccacgtcagcaactggctgggtggtggcggcgatggtctgccgatcgcgccggaagtggcgaagctgccggcggcgaagaccctctgcgtgtatggcgacaaggatgacgacgcgctgtgccccggcctgccggccaacgacggcgtgcagaaggtgaagcttccgggcgaccatcacttcaatggtgattacgaccgattggccgaagtgatcctcaagggcggggcgtag

SEQ ID NO: 511988 - DNA, 171 bp, Stenotrophomonas maltophilia
atgcagcagggggcttcctgcaccaccgacggcgtgagcctgcgcatcggcatcggcgcctccagttccagccagaccagccacgaccagtctgcggtgggcagcagcatccgcagccagggcgacgtcagcatcgccgccaccgcgggtgacctgagcagcgcgatgtag

SEQ ID NO: 511989 - DNA, 228 bp, Stenotrophomonas maltophilia
atgactgagccagtgttggcatttgtgctgctggcggccattgcggccgcctccataggtgccgctcgcatcgtctcgtggctactcgaccggcgtggctacaccgcctcgcagaggttccgcgaagcccaggtcatcgcactcgcaaaggctgagattgccgctaccaagcgcggtgatcttctggccgccgctcgctacgcagaagagcaggagcgagccgcatga

SEQ ID NO: 511990 - DNA, 747 bp, Stenotrophomonas maltophilia
atgactaaggaaacctatttctggatcagactctgcactgcgtggaagagcgtttcgactgtgaacacgatcctcttggcctcgtttctggcgattttgggggtcatcgttgcggggctcttcagcccattcgggctggccgtctttgacgacacaggctctgccgcggattggtttgccgccgtgggcacgtgggtgatcggattcggagccatgcgactggcggcaggtgatcgcgaactcaaacttcatgagcggcgtgagatgcgacttaaggaggcaaaggctgaccgttcgcgactcagggaaatatccagctggcttgtgcctacgcaaaagcaagtgatgggcgttaccaggcggctccgccaagccgagaacagagagccgatcagcgcgcatgcgatgttgaagcgcctggccgaccaaattgcggacatggagtggggggctgagcagcagaatgtcgtcagcgatcccactgcaaatgtcgtggctaaggctcgctacgtacttggcagaatcaaggactttgttgccctctacgacaactctttgcggcaaatgccgagagatcaggggaaatgcgacaagttgcttgacgaggtgttgaagtacggcgaccacgctgaagtcgcgttgaagcagatgcaggacgcacttaacgtagacgcaaagagattcactactctcatcgactcgctggaagcgcgaatcgcgacagaagatcgcaagctcacagactga

SEQ ID NO: 511991 - DNA, 357 bp, Stenotrophomonas maltophilia
atgaccacgcgctactcccctgccccgcaaccgatccaggaagatcccacgagcggccccgcactggaccagaacaccctcattgccctgctgcacagcatcggctcgggcgccgcctccgatggccagccctggccagagcgccaccagatgccgggccgacgcatcgccctggccgacggcgactgcttgctggcgggtcttcgcgtggtgcttgagagcctgctggccgcgcaacgtgcgcgcgagaccggcgagccggagcaggatgtcggcccgcggatcacggaggggctgatcatggccgggctggggctcacgtcacacgccagcgatcggataaggccggagccctga

SEQ ID NO: 511992 - DNA, 675 bp, Stenotrophomonas maltophilia
atgaaggtcatcctttttggtggcagtggcatgatcgggcagggcgtgctgcgcgagtgcctgctggccgaagatgtcgatgaagttttggccatcggccgcacgcagctggcactgagacatcccaagttgcgccagatcgtgcgcgcggacctcttcaattacaccgagatggaagccgaactgcacggtttcgatgcctgcttttttacattgggcgtctctgccagcgaggtggatgaaaccggctacgcgcgcatcaatcgcgatttaccaatcctcgtcgcaacgaccttggcacggttcaatccgagcatggtcttcacttatgtttctggcgcaggtaccgacagtaccgagcggggcagggtgatgtgggcacgggtaaagggcagtaccgagaacgcactgatgcggattccgttcaagggagcctacatgtttcgacctggtgcgatcgtgccggctcatggggaggtgtccaagacccgggcctaccgttggtcctacgccgcgctgggatggggcttgccgttgctgcgccgggcattcccgaatttcatcctgaccaccgagcagatcggtatcgcgatgctgcagacagtgcgagtcggctcagcaaggcgcatcctcgaaactgccgacatcgccaacctagctaaatgcgcaaactaa

SEQ ID NO: 511993 - DNA, 1215 bp, Stenotrophomonas maltophilia
atgagcaaactcgcaacactgcccagcaagcgtcggcgcctgatcgcagttctcgctgctttgctggtcgcaggtctcggtgccgcttgcgttgaggcatggccggcacttgatgccaatgccagtgggtcacgtctagagcgcatgcatcgctcgccacaatggtatgtcgacaggttccgcaacccgcagccattgtggaccaactccggcgacgcgctggcgaaactgttccgggatactcctgacagcatccccaaaacacagatcgaggcattcaagggcggctcgcaactggccacgcctgctgttagcggcctgcgcgcgacatggttcgggcattcctcggcactactcgagatcgatcgcgtctcgctgcttatcgatcccatgtggagcacgcgtccatcgccgctttcgatgatcggtcccaagcgctggtatgacgctcccatttcgctggcccaccttccacgcgtcgacgcggtcctgatctcgcacgaccattacgaccacctcgatcgtaggagcatcgaggtgttgggcgacactacagcacgcttcatcgtgccgttgggcgtgggggcaattctagagcgctggggcatcgagccttcacgtatcgctgagttggactggtgggaatcgacccagatcggagatgtacagattgtctcgacacccgcacgccacgcgtcgggacgactgaatccccaaggcaacgctaccttgtggtcaggctacgcgctcctcggtccgcagcatcgcgcctggtactcaggtgacaccggctaccacgacgacctgtcggaaatcggcaggcgatatggaccgttcgatatcacattgatcgaagccggtcagtacgacgccgactggccagactggcacctcggacccgaacaggcggtcgatgcgcatcgcgcggtgggcggaaaggtcatgctgcccgtccactgggggctgctcaagctggcccaccacacttggaccgaaccggtggaacgcgtgctggctgcagcgcactgccggggcgtaaccgtggcgacgcctcggcctggcgaacccgtcgagcccgcagcgctaagtgcgcaaaccccatggtggccaactaccccatggcagaccgcgtccgaacagcccattgtgtccacccttgcaggggagccagctaagcgccgctcgccagcaagatgtacggacccaactgcgtga

SEQ ID NO: 511994 - DNA, 903 bp, Stenotrophomonas maltophilia
atgtacaacgttcccgaccagcgcggccgccagattgtcgtgaccggagccaatagtggccttggcaaggaagccgccaagcgattggcggccgccggcgctcacgtgatcatggcggtgcgcaacgagtcgaagggcgacgctgcgcggcaggagttactcaaggagattcccggtgcctctctcgacgtccggatcgtggatctcgcgagcctcgcaagcgtgcgggcgttcagcagccagctgcttaaggaaggacgccctctcgatctgctcgtgaacaacgccggcgtcatgatgccgcccaggcgcacgctcagtgcagacggcttcgaactacagtttgcgacgaattttctcggccacttcgcgctgacgaatctcctgttgccgctcctccttgaagcggaatctccgcgcgttacaacgacgacaagcagcgccgccattggggccaagatcaagttcgatgatcttcagagcgaaaggtcgtacaagccctacgcagggtacgcgcagtccaagctggccttactgatattcgccaaccggctaggagagattgcgcgggaaagtggctggccgctgctcagcaccagcgcccatccgggctacacacgcaccgacttgcagacaagtggcccgaacctgggcacatcttcgcgccacaaggccctgatgttctatctgatgccgtcgatgggtgtgaaatggggcacggactcgctcctgaaggcggcagtcgatcctgctgcagcccaaggcgcattctacggcccgcgttttctgctcatcggggacgcgcatgttgtcaaacagccaggatctgccaggactgcggattctgttcgcctgtggcaagtcgcagaggaactgacagggacgaggcccccgctgccgtga

SEQ ID NO: 511995 - DNA, 138 bp, Stenotrophomonas maltophilia
atggagctggattacagcgctgcacttaccgttctggccggtctggcagcgggtgttgccgccatcggcaccgccaagctggcaccggccgcaatcgcggttggctacaagtggttcaaggctgcgatcttcggttga

SEQ ID NO: 511996 - DNA, 669 bp, Stenotrophomonas maltophilia
atgccctcacccggtaggcatagctgccattgccacggctggcaccaaagctgttcccgccaccgttatgcaccaccgtccagccaccaccgttggcactcacgcttacaccttcgcaccgccatccagcgccatgggatacagctcaccttcttcgctgcactcccgcaaaccaaagccccccctgccagccgaaaaatgcggagaatcattgatagccaagctcgtcaacaacagccttgcactgggaatccaaatcgacatgaaatgatttcaactcctcggacggcagttttccgtcgtccgagcgatgcattactgcatatccgcgcagccctgccaccgtcccctcaggagcaatatcgtagacatccccagcccacccccgcgacgactttacatagtcggccaccaccaaaagacagtcgtcatccagccgaccgcttcctatttcatgtagcgaacaaccagcgacagatacaagacatagcactgaagtgcgcgcaaacccttgaagaaccatcgctggtcgtcggcatcgagatgaaattgtggatttcacagcactcccgccacttgtcgagaaactcaggaaggaacaccgtgggccgcgtgtccacccgcttttggagtagtgattctatcaatagcgcgtcagtcactgtttga

SEQ ID NO: 511997 - DNA, 687 bp, Stenotrophomonas maltophilia
atgtttcgggcagcatccgcgaggatgacaccccacgccttctcttctgagatatcggttgactcccgatacatgccgaccttcattgaacagtggagtcttcttttcgcaatccacactcgcagcatctcgacagagttctcgtcctccaaagccgccttaggaatcgggcgctcgttcattgcgaaacctcaccttgccgttgggacaaaaattccgcgttgctgccatctttttggtgccacttcattacgtttattgtccaagccatccttgccgccaccatcattcatccctttctgttccttatactgcctgccgtgcggtctccttcttgtaagagccgcccccttctgtcgcgaccatctaacctatcgcgagcacgactatcgaggccgtccgtcgagtcaatgtagtctttctctgagaatgaaaagctgcgtcgacaaggcttaccaagcgcctgccaccaactcactcgactcagtcgctacaaacccaaatgaacgccttccattaaacccattcgatctacatccactggagcactcggggctctgggagcaccatcgcgattccagcgaaacgtgccggtcactcgcatgtatttctcctctccaccttcaactgaaggaatttcttgaaacgcatccggacttgattctggataggctaccaatgaactga

SEQ ID NO: 511998 - DNA, 924 bp, Stenotrophomonas maltophilia
atgtattcgttggccgggcaggtggtgcatgaagagcgacgaggcaagggcgcctcggagtacatccatgtaggtggtcgactgctggccacccgcagcccgacgggtgttacctgggtgcatgtggatgcactgggcagcccggtcgctgtcacggatggcacaggaagtgttgttgagcgacgccggtttgagccgtatggtgccgagttgggcgggctggtcaaggacgggccggggtacaccgggcatgtgagcgattcggccacagggctgagttacatgcagcagcggtacatggatccgcagttgggtgtgttcctgtcggtggatccggtgacggcgtatgagcagcctgttgggcagttcaatcggtatcggtatgcgaacgggaatccgtacaagtttacggatcccgacggcagacaggcagtccctggccagccgcttgtcttctaccagacaactacgcgtacgacgaccggcagtggggcggtcgatgtcgtgaggacgaatgtttccaattatggaatcgtccatggaacacggacggaagttcgtggaactgtcacccttctacctcagaagtcattgggtggtgcgccagccaatcccggatctgaagtgacgaccaaattgctcaacttcagtgataaatccggcaagaatgtcgaagttactagcggccaaagaacggtggatcaaaatcgaacggtgggtggcgcgagtcggagccagcacctacaggacaacgcggcagatatacggatcaatgggagcacagctaagcagaccgctgatgcggcccatagctccggcgaattcaatcgggtcaatcaatatactgatggacgtggcgtgcatgtagatcttaagcaggatggaacgcagggacgcttcactgactggaaacccaaagaatga

SEQ ID NO: 511999 - DNA, 267 bp, Stenotrophomonas maltophilia
atgtccgacggattggtagatgagaagggaattggcgttggctccacgctagtggcgctgaaggctgcctatccgaacggtcgtcttgtcacgggaaatgaagacggtaggcgctatgccaactttgtcaatcgctccagagtggtcttcgagatggacatggctgggcttcctcatgcgtgtttccaggacgaaagcgcgggatgtgaggcgtccccggacttgcgtgtgcatggcgttgtcgtgcattccggtccaagcacgtag

SEQ ID NO: 512000 - DNA, 1488 bp, Stenotrophomonas maltophilia
atggaaaacaaggcctctcgacgtctggcgcttacggcgaccatggtcaaagagcagctgtccttcacgcgcgtgccggaggtcaacgccgagggcaagatcgtcaagtttgccccgaatacggatcagaagcgctatgtggtgttcgatagccaccgagacgcgccggttggctttggggtggcggtgaacaaaaccgggatgagctacatcttgcagcgccgcattggtgcccgtgtgctcaaagcgacactggggaattgccgggacatcacccttgccaaggcccgtgaagacgccaaggttgctctggcttccatgcaagccagtgggaagacgcccgcccaggccaggcaaatcgacaaggacgagatccgggtaagcctgatgacggttgaggcgtgctttgcgctctatcgccgtcatttgattgagcgtgcaaggcctgccaaggacagcagcctccgggggctggaatacgccgagaagcggcttggccgggctgaggtggatctattgggtctgcctatcggtgacttggtcaacgaacagcggatcctggatgcgtttgacgaaatcgccaagggcaagcgccatctggccgaggggaccaagcgggcgaatgccacaaccacggcgtttgataagccaaccgtcaccaccgcagaactgactttccgttgggccagtcgcgcggtgggctactgcatggatcgggaaaagcgcattgccgccaacgcgggccggtcgccttcgttgcagatcaatccgtttacggtgcttcaccaagaaggccgctaccgaacgcgcgagcagttggaggcggactatgaagcaagccaagcccgtaacccgatgcagcttcgcgacggttcactgggtcgcttcttggcggcgctttgggagcggcgaaaggttgataactaccgcacggcgtgtgactacctgcttttgacgctcctctggggaaccaggcggggtgaggcagccccgttgaaatggcgccatcggatcgataagcgagatctttcgattagctcttgggtggatttggaggccgggtgggtgtcttttgccaatacgaaaaacggctctacccatacgctcccgcttgcgccgggcgctaagcggattttgaccctgcgcgaggaggcgtctcggaagagccagtctccttgggtttttccggctcggagcagcagggcggtgcaaggccactatttggacagtaaggcaatcttgcagggcttgaagaaagctggcgagatcgaggcgcttaggacccacgacctgcgtcggacctttgctacagtggccgaggaagtggcttcgtatgcggtcgtgaaacggcttctcaatcaccgcaacagccgagacgttaccggccgctacactaaagtggacgatgcgcggctgctggaagagatgacgcgaattgagcgagttatgctcgcctcggatccgctgctgttgaccgttctgacctaa

SEQ ID NO: 512001 - DNA, 537 bp, Stenotrophomonas maltophilia
atgggcatcaagtatgtgctcgcgaagctggaagatgtcaccagcatctcggaaggtccagccgagcagaagggagatgagaaatttgccgaactccaagtgacatgggattacggcaccgagcagggcgacgactgtagctttgaattcgtcgaagcaatgagaggggagcttgtctggctgacgtctgctcaggtcaaagaatcaaagaggcttgatccatttgatgctgtgacgaaaaaggcctgggataccctgtcgcggaaatacgaaaaagaagctgaggtaacgacctatcactctagctcgagcgatgggagcttcgtcgttaggcgtgtcagcttcttccttaacgggaaatggattgagcccaagactcactttgtcgtgatgcctcgtcaaggaggccggatctttggcgtttatggtagtgcaacgaaagcactgggcgtggctcaggtcaggatgagggctaacgcagagtttgaggcagccaacaaagatagagccaacgacattaagccgggtagtccttaa

SEQ ID NO: 512002 - DNA, 600 bp, Stenotrophomonas maltophilia
atgaatgacagcagtgacatcccattccgattgacccaagttgcgcaaaagcgcctgaccgctgatcagctcgcggaagtgcgccgccgtttggaagagcgccccgaagacgccgacttcaatgctgtagaagcggcgatctatgtgggcagaagcaccaagaccttgaagcgcgcgatcgatgcaggtgtgggaccggcccgggcgaagaaccctgatgtcagcggtctctacgccactaatcgccatacgcgctaccgcaagggcgacctcgatgcgtggcggtcgagcctgattggctttgcggtcgagttcaagcgattcgacgacctgacctttgatgcgccttggatcgtcacaagcgcgggaaagatctggggacacatcttggatgccgagagcattgatgccgtcttgcgtgcgctgagcgacgacgcggttgtcttcgccactctcaatgaggcgctgagagaggcgtggtcggacatgtctgcgcgtcgggcctacgaggcggtctttgatgaccttgtggggcatgaacgtgctgccattaaagcggcaggtgagcgtgacgcccttcattcggagtttggcatgtaa

SEQ ID NO: 512003 - DNA, 2406 bp, Stenotrophomonas maltophilia
gtgctgcaagccgtgaaggatttgcagcacgtcaatgctatcgcgccgcaccaaagcctggggatgggtgcaactggcttaacaatcatctacggcagtaacgggtcggggaagtctggttactcgcgagttctcaagcgcgcatgtcgtgctcgtgatcaacaagaggacattcatccagacgccaacctcgctgcttccaagtccaccacgccgcaggcgacctttgtcgtgtcgcaaaacggtgtggtcagcgagcttacttggcagcagggcgtcacaccgccagaggagctttcatccattgcggtttttgacgcgcgctgcgctaaggcatatctcgaccaagagggagactttgcctatgtgccttacggcttagaagtgttcgcagcgctcgcaacgctatgtcagcgtctggaggccaaggtttcggacgaacttctcagggcacaggtcgacactacagctttcgcgcctctcctcggtgagacgcaagttgggaaacaaattgctgtgttgtctgccaagaccaagcctgaggtgatcgaaagcttggcgaccttgagcgagaaagagcttgcgcggcacgccgaagtggaagccagtctgaaggaaggcaaccccaaagagaaggcacaacaagttcgtcttcgggcccagcggtttagtgcacttgcagcgaaggtggcagtcgaagaggagcgcctgagcgaagcggcggtgacggtcgtccatcaagcagctgatgcctatcgcaatgcgcaggtcgcagccaagatcgccgctcagttgcatacagagggcggcaaactcttgccaggcaccggtggcgaggtgtggcgagatctctatgaggcggcaaagaagtttgccgtcagtgcgtatccggacaagagcttcgatgaactctcgtcggatgacgcttgcttgctttgccagcagccactgcaagcgggcgccgagcgaatgcggcgcttcgaggcctttgtagaggctgaggcagagaaggcgcgcgatgccaggcgagaggattttcgtgcggtctttgtgccgatgacgaaggaggtcgtcgccctcgggttggatgaggccattcgggtcgagcttcgcgcggaaaacgagcagctggccagcgacgtggaggcgtatgaagaggcgttgattgcgcgccagaaatccgtcaaagatgctgccactgccgatgattggagtgtggtgatcaatgccggggggagtccgaaagcagcactttcgcttcttgctgagcaattgcacagcgcagccaaagcgcttgatgacgcttcggatgaaaaggcgcgcaatgctttgcagagcgagttcaatgagctcaaggcccgcatgcagttggcggtggtcaaagactcggtgcttagcgccattaacaaattttcagtgcaatccaaactgaagggctgcctgccccatctccggacgcggtcgatctccaccaaggctaccgaggttgccgcacaggtggtctcgaaggaactgggtgaagcgctcaatcgtgagtttaagtcactcggggtctcttcactgagcgtgtcttcgcagagtcgatccgctcgtggaaagacgctccaccgacttcgtctagagttgcctcagtcattgtcaccctctgagatcctcagtgaaggtgagcagcgcgccatcgctattggttcgttcctggccgaggtttcactgagtggccaaacgggagcaattatattcgacgacccggtttgctctttagatcaccgtcgtcgtgagcgcgttgccaagcgtcttgttgaagaggcagaaaagcggcaggtgatcatctttacgcacgacatctattttttgaacctactgacggaagctgccgggcgcgcgggcaggcccgtcgtgacccaaagcttggttcgtcaggctcaaggttacggcgttgcaagtcccaatcttccattcgaaggattgagcagttcaaagcgtgtggggttcctcaaaaccgttcacgttgaagcagcgaaggcgcacaagcttggggaggagcagaaacactacgacctcaccgtaggggcttactccaacttgcgcttggcttgggagcgagcagtggaggaggtgctgctccgaaacgtcgttctccggttccgcaagggcgtggagacgcagcgtctatcaggtgtaacggtgacggatgctgattacgcgcgcatcgaagcaggtatggctaagtgctctaactacgcgcacgacaaggcccagttcggtgggatcgcggttcctgagccggacgagctcatggaagacatcgctgacttcgatgccttcatcaaggaggtgaatgcgcgctcggagaagacggtggcatcgcgaaagaagggggcaccggcagcattagcccccgcatga

SEQ ID NO: 512004 - DNA, 1032 bp, Stenotrophomonas maltophilia
gtgaaagagcgggagaagttagaagcagcggtgaaggctggtgacgtgtcgcgtgtattaaagatcgtggctgcgtctccgatcaattctcggctggcttgggaggccgttcaagaagccgttgaagcgaacaacgaagacatcattgatgcactgctaccgtcgcttctgccgacgcaaagtgccttcccgctcgccgttgcggcctcaggagggcaggtgtcaatcctgcgcaagttgatcccggtgtctaaccccagggccgacgagtcgttggcgctatcttgggctgcacgaagtggatctgttgaagccgtagaagcacttcttcctttcactgatcccttggcaagcgactcaaacgcattagttcacgctgcaagggagggtcatgcagagatcgttgcgcttctcattccgctgagcgatcccaaggcgaatggcaaccgtgcactctgggaggctgcaacccacggacacctcaacatcgtgaagctccttcttcccgtctcgtcggccatcgtttgcgcgatgagtatcctgcccgatgcagctgcgcgcggcgcgacggatttcatcaaaatcttgctcaaggccaagctgcccgatgcgggcgatacctatgcaacgggattggatgcagcggcgacgaacgggcatctggatacggtcaatgttctgatccctgcgatcatcaaagccggcgcaccacgcgggtttggcaacaaggccatctatgaggcggcgagagctgggcacacgagcatcgttgagcgtctgattggggtggtgagtcagtcggcgtgttcccacgctctagcggcagccatcgagggaggcaagcgggaaactgcgattgcactgttggacaacgccgatcacattgagaccgagcgatcgctctacggaattgaacgaaagtcgtgtcttgctgagctcatcgctgagcgtcaggcctcccaagcgcggaagcacctagacgatcatacgagcgttcccgcattgaagcggcatcggcctgcgcggatctag

SEQ ID NO: 512005 - DNA, 738 bp, Stenotrophomonas maltophilia
atgaaaactaccgcgacacctaccgctcagccatctgcccccactgagaagccaggccccagcgcattgatgacactggccaccatcgccggcggcttggtggcattggccacgctgcttggatttgttcttcatggctgcggccatgtggcatacagcacttacctcaatgactggggcgtgcaggagggcttgttcccgcaaacagcggattggaaggtcgttcggggctattacgccatcgtgctccaaggcagccagctgatctctgatatcccttggctccttgtcttctacgcgttctgtggcatgaccatagccatctttgtcgcaaacctacccaccgttcaacgcacagcttttcacgattggtttgcagcacgaccattctgggtccgcgagccggtcaaagcgatggtgggatccgccgccgtgctctatgtggcgctaacgatgactttgatcggcacacttctcgccctcatccctgggtggcttggtgaacgggccgggcatcatcaagctttgaaagagcgcaaagcgatcaagagtgaggacggcgccaagcttccttctgctgagctctggcgagatggaaggaaggaggtcagcggcaagatcatcgcctcatctgaggcgctggttgccatctatgaccaagatcttgacttggttcgcacgctcgaacgcactgggtatgagatccgatcagggaaagcgccacttactggcaagtga

SEQ ID NO: 512006 - DNA, 663 bp, Stenotrophomonas maltophilia
atgccaaccctgcactgcaaagccctcctcctagacatggacggaaccctcatcgactcgctggtccttgtcgagcacgtccttggcttgttctcgaccaagcacggcttggactatgaggaagtaagggcaagggctcatggcatgcagaccattgatcttgtcaggcactacctgggcgacaccgacgcggcgcggcaagaagccaagatgttggagcgctatgaggaagaacacgtcgaaggcatcgtcgctacgcctggcgctgctgcactgctccgctcgcttccaccgcatcaagtcgccttggtgacctcggccggccaaaagcttgcgcgaaatcgaatgaacgcagcagggctccaactgccgacgacagcggtcttcgctgaggatgccaatcctggcaagcccaacccgttttgctatcaactcggcgcaaagcggctcggactcgacgccaaggactgtgtggtcattgaagacgctcgtgctgggatcgaggctggccttgccgcaggagccatcgtcttgaacgttggtccgcgacatcccgagcaaagcgctcgcgtcatcgacatagcctcgctggaggacctcaccatcgaggtcattggagattccctcaacattggctatgttgagtgcaacaccaacccatag

SEQ ID NO: 512007 - DNA, 363 bp, Stenotrophomonas maltophilia
atgaacgtgcaaattctcgctgtccatggacagggggactaccagactgagtatgtgacgctgcgggtgctcgatgactgtgacctgggcaaatatcagctctgtgacagcacttacaccgccgagaataccgtttcgaaccggcttcgccatgtctattggttcccggataagcaagtcgtcaagggtgatctgattgcgctttggactaagcccggtaaggaaaccacgggaaagacccgagacgggcataccattcaccacttctactgggatctgaaaacggccgtgtggaacaacgacggcgatgcggccgttcttcagcgcttggccaattggtcgctctttcccgccaagcgctaa

SEQ ID NO: 512008 - DNA, 921 bp, Stenotrophomonas maltophilia
atgcccagaacgctgacacttaatcccgatgttcttaacaatttgttcacatcggagcgactcaacagctacacggctgttttcgccccaagggacgaattcgaactcgttggtgcttatttgtggaactcgcgcgtttgcggtgcgttgcaccctatcctgggagcggcggaaattacgctacgcaactccatcgatggagccgtcagcagtggcccactagggcgattttggtggagctcttcgaagctgcaatggaagtcgcgtggtcaagggcttatcccttatcccgtggctaagctgcgcgagaatttctcaaaagcttcttctcaggtcatccgcgagaagaaggagcgatatcagatcaggggacacattaagcccacccatcacgagatcatctctaagacggatttctcaacttgggagttcgcattggacggagagttcatggggcgcggcttgctttggaacctctatctttcctcagtgtttagtggggattggggcgggcggcgtccaagtgtattgctgacgcacgctcgcaaccttgtcaacgctgtgcgccactttagaaatcgtgtttcccaccatgagccggtatggaagggagctggcattgcaaatccagaagatgcgacgcgacatttggcgcgcaagcttttgcaggtggtccagctcattgagctgatcgaacccgtccaggtgcagattttgcggaagaacggattgcttggcgaggcggagcgcgcttgttcggcgtctgagctccggcgctaccagctcatgactcgagagcgcacgatcacatccaggcgcggtctagccctcgtgatgaagcaatgcgagtcgtcaaacgcctccttctatgtgagacgcagtgtcagttcttcgcgtttcttgcttacccctgtgacctag

SEQ ID NO: 512009 - DNA, 3828 bp, Stenotrophomonas maltophilia
atgctttggattgacgcgctagatgagacgcagggagggcgtggagaccgatcacccgttgacgagctcacgcggaagttggctgagatatcgccccgcggagtgcgcttgtcctgtcgcgcggcagattggttgcagaccaccgacctagaagcgttgaagccttacctccgaaaaggtggggcgacagtcgtggtgcagttgctagcgctcaacaggtccgagcaagctcagatccttacaagcaagggctttgcgaacccaggcagttttctcgatgaagctgagcgtcgagagcacggcgaactccttgggaatgcgcagacgttgcttatgctcgcagctgtctcaggtcagggcgattggcccgccactcgcaccgagctatttcgacaagccgcgttggcgttgctggatgaggccaacgaacaacacgctgatcgcgaacagggcgttgctcatattcctgggactcagctactcgatgcggcaggtgcactctgtgcaatgcgtttgacttctaactgctcggggcttacttggaaagcaaggtctgttgggaaggatattccgagctacaaggagctaacgctagcgccgcaaggtcatcttttggcctgcctcaaaagacgggtgtttgtggcgaccggcgtggacagggtggactacgttcatcgcaccgttgccgaatacttggcagcgcgatggattgctgatcgtgtccagtcaggactgcccatcggccgtgtattggctctgatgggtgttcaggagcgtccaccgacagcgcttagaggactggttgcctggcttacgtctcaactccccgatccatcccccatgctccatttggacttggttggactgctgatgtatggagacttgtctacatggtcctctttcatgaagatgcgcctgctcaacgcgttgattaccgagagcaggaacaatccccttttcttccgcgagatgcacctgcccaccggtgcccatgcgctggccgacccggcgttgctggccatctatcaagagttgttggctagcccaagtgctgaagtctctgccaagctgctggccattgtggtccagaagtcggggaggatgacgcttgggattgagggcgcgttggaacgcctcatcttagatgagacgcaggtaattgtgctccgcatggaagcgatccacgcgttgctagagggcagctcagcgcaccgacaattgctcgtcgctgcctaccagcgactgggaacaagcgctgatgacacgcagcttcgctttcttctggtgcgggctctctatgacagcggcttgggcaaggaggaaattgttgtcctcctcctacattttctccgcatgaacgagcgcatccccatcggagcaagttgggggttgacggatgttgtgacgccagttgatgccgccgaaatccttcgctcagtcgatctgccagtgccaagtgggccgctgctggtcgggcccaatacgagggagtttgcgcatatttatggcgagctctttgccaaggcgctggctgttgaaagcgcggggcgcctgatcttcgattggtatctgatctactgccattatctgagcggtgaaaatccgggcaagtcgctgcttcttgcactctcaggaggtgagggccaagatttaaagctgcttcggagcgtgttgcggcacatcgatttcggtgttggtgtcaatctgccgtgggatcgttttatgcgcctgttcggttccgtcctggatccgcaagtggtgcttgatgagatggagtctgctctgctgcaaagttgcgatccgcgtcgtggccagatctacgcagcgtgccttcggcaggccatacggggtgatgtgtcaccttatcctgttttttggcgtctctacgcgctggcagacaatgacgtagagctaagcgaaatcaggtcgttccattcagttgcctacctggaagtggcgcccgtcctggacattgaagagctgcacaggcaagacagcgaagccgaggctgagcggtggttgcgcgagctcggtgctgagttcacagctaggcgggaggaagttgtcgcgggcaaggcgtccgctttcctggatagcttggcaagagtctatttcggccaatggctgcccattcgattcgccgcatcgcttacgccgctcgcccggctggaacaagttttgggtgcgaacgatgctctgacaaccttgcgtggcttcgaggtattgctctccagcggcgagctaccaagcattggcgcgctgctttcaaagcgacgacgtcaagaggaatttcgctggacagcactgttggcagcacttgatgatcattggcgcagtaacgctcggatcgctgatcttccggaggccgttttgtctgcggggttggcggttgctttgctttgtccggtgtatgtcgaagtagattcgcatccccgcgttctggagcacgtctggtttagcccgctcttagaagccaagcccaagctcgccatccagacatatgagactgttcttgctgctgagctcgcgcttggtggtcacgagcttcgagcgctcagcgctctggaaaacgttgagcttgcaggtcaagatcggggcaaggccattgtccgagtgctccaagcgcacccaagaatggctgagtatgacctgcttcggatgcttcgcttgtgcaaggccgagggctgctggagcgacctcccggccttagcaagagcccaggtggatcagcttttgagtgagcaggacaacgatgccgagcatctaaggggcggcttgaggggcggtttggctgcgtggctttggtgtggcttctcgctcagtccagaagcttactttaatgtgctgcaaggactcagtggtgatcgagaagagtcggcgatgtgggctctgcttgaagacggcggtgaagcatcatggggatctcagaagacgtggacgtatagcctcactcaaattgagttcatcgtgacctgggtggcatcacgctatccccatatgtcgcatccaactggatcatcggtgggaacacgaaatccttgggacgctgcttccatggttaacacgatgcttgcgcagcttggcagcgatccgggtagggcggcaggaaatgctctggcgcggatggcgggtttgccgggcttgatgagttatagaaaatacattttgcaccagcttgcaaaccacaagacggttgttgctgatacggaatacgaaataccgacctgggaaaaggcgatgggaaccttggagaacggagcccccagtagtgcgaaggatcttcatgaacttgtgtgctgccacttgtcgcaaattgccaagtcactttccacacgcaacgatgacccgtttaagcaattttggaatacagggtcgcatggtgagatcgttgagccgaaagtggaggaagttgcccgggattgcctgctcggtatgctgaagccgttgctagccccgcacggcgttcgcgctgagcccgaggggcatatgagcgcggataagcgcgtcgatatcgtcgtgtatggcgataagatcaagagcgtcattgagatcaagcgggactttcatagccaagtgtggacggcggcatcagagcagcttcatggtctttattccgtagatccggaggccagtgacttcggcatatatctggtcttttggtatggagagaagcgaaaagccactcaacctctgccgcccaatagaggagttcgaccagccaccgctaaagagatgcaagcaatgcttgaagacgatcttcctgcgcatctgcgagcgacaacgcgaatagtggtgatggatgtgactggcgcgcgggacgatgcttag

SEQ ID NO: 512010 - DNA, 1032 bp, Stenotrophomonas maltophilia
gtgactcttggccgcagcttgatcggagacatccaaacagcggatgtcagcgccatcatgaaggttgtctctgagtcaactgatagtgggcgcttggcatgggaagtggttcatgacgccatcaatgccaatcgtgaggcggtgattgaagcgttgattcccatgttgtcctccaacgacagagtctttgccttggcgttggcggccgaggaggggcttgccaatgttgttcgtaagcttgttccgctgactgagccaagggcaagaaactcgctagcgctggtgtgtgcagctcgggcagggcacaaagaggtcgtggagctactgttgcccgttagtgacgcgctagcggaacactccgctgcactatacgaagcaagcgcctgcgggcatgcggacgtggtgaagctactaattccgcacagcgatcctcacgataaggatagtcgagctcttgctcaggctgctcacgagggccatcttcgtgtggtcaaactgctgcttccagtgtcgtcatccatcacatgcgccactcagatctttccaacggtagccggccacgggggagcagaggtcgtcaaactcatgcttaaagctaagctcccagacgctgcgcacacgtatgcagctgcttttgacgttgcggcgagcaaaggtcaacttgaggtcgttcagcttatcctgggtgcaattgatcagctaggacgcccgcgtcgtttcggcgagaaggcgatctacgatgcagccagcaacggccaccgagagatcgcggagttgctggcaccgaccgtaggtcaaagcgcgtgtaatgcggcgttggtcggagcagtcggtcacgcgcagcgagagacagcccgagttctcattagccatgcaagcttggatgaggtcagggcgaggctgttcggtcctgagcaccacacgctactggacgagcttgtggctgaggtaactgcacagcgggaccgtgaggccttgaacaagcagacccggctgccaatggggtcgcgatcaaaagcggtgcggctctaa

SEQ ID NO: 512011 - DNA, 1392 bp, Stenotrophomonas maltophilia
atgccctctgatttaccccacttcaaccccgaaacaccgctcagcgccaaagactcacttcaaatcagcagcatcaagctcggcaagctcgaactgagagatgtcgtcgtcaacagtcgccaggctggcatccagctttacgagatcttgcagcttacgatccagcagatcgaaaactctcgacgccgtcgcaatagcacgcgcttcccggacacgcttccaatcgcgagcccttcccggcggctatcagaagaagttgcggactacttagccgacatgacgcgccgcgcgttgcaagacacaacgatcaaagcagctgcgcgctcgttgaagatcttacaaatgacttgtggcgacatcccggtgtcgatgattgaccatcgccacatacatcagatgtggaacctgctgcgctcatcgccgccgaacttgaccactgaccctacgcttcaatgcatgacggttgatgcactgattgccctgggcaagaagctcaacgtgcctgcccccgccgtagcgaccttagagcttcatcgccgaatgctcacaacattcttccaagctctcgtcaacaccaaagccatcccccactcgccgatggccgcgttccgcccggtcaaagcaagtcttttagaaagcggcaagagcgcagagcggctactgagcaccgcagacgtgcagaggatcttcaatccagacacgttcacaccgtgggcatccaagttcccacatcgctggtgggcaacgatgattggcctcttcactggggcacgggtcaacgaagtcgcacagcttaaagttgcagacatcatccaagaccaaggcacttggtgcattgcaattcggatgaccaaagatgctgatcttgctaagagcgacgggcagcaaaccaggcagcggcttaaaggaaaaagcgcgatccgcacgatcccggtgcaccctgccttgctcaacgcaggccttctcgacttcgttgcagacgtgcgagcatgcgggcaccctcgcctgttcccgcagctttcggcaggcctgaacaagtcaacgggcaagaccaacgccagatacagccaggcccttgtcatccagctcagcaactattttaaggacttgggcttccccaagggtgttggcttccatggcttccgccacacgcttgccacagagttggaagctgctggcgtcaatgaggaggacattgctctcatcacggggcactccatctctaagaaggttcccgtgctgcatagcaactacatccaccgctcgccgaagctggtgcgcgagcgtcaaatcgcggcattggcgaaatacaacccgtccgtagtgctcccggtgtatcaacgcggacagttcaaagaaaagctagggaaagaggcgaagatgtatccgtaa

SEQ ID NO: 512012 - DNA, 270 bp, Stenotrophomonas maltophilia
atgagtgacattacggccgatgaggcacgtgaattgcagcagaatgcagtggggagctctgaggagctttgggaagagtatgtgggcgtcattcgcgcaagcgcaacgatcggcaaatcagacgcaacccttggcttgaagccgaagttcactactgtccagatggcggcggctgccgaaatgctccgtcagcgcggtttcagtgttcaggagaagggggaacacctcgaagtctcctgggcagatgtgcagagcgtccacggcctctga

SEQ ID NO: 512013 - DNA, 1203 bp, Stenotrophomonas maltophilia
atgtcacaccttctgacaagtcgtaatcccgccttggccaagctggtccaggaaggctatgagctggagttccgacctggactcttgctcgtccacgccgtgccttatgtcaatgcggccgcacagatcgcctacggcacactcgtgtctgagctttcgatggagagccctgatatcgtcgggaagcctggttcccaccagatgcacttcatcggtgatcatccttgctttgcggatgggcgcatctttgcgcccgtccagcacagctccggcgacttccccttgggcaacggtgtgtctgcccatcaccacttctctcacaagcgcaaggataaggaccgtaactggatcgattatgaggactactacgtcaaggtgaagacgtatgtggatgtgatctcaggtccagcaaagatcatcgatccttctgtcgatgctcgaacacggaaggtcgctacttggagcgatgatacgagcccgttcgtttactccgacacagcttcgactcgagcggggattttagccataaatgagcgtgcttcccaggtccgggtagccatcgtgggccttggcgggacgggcgggtatgtccttgatctacttgcccctacgtatctaccagaaatccacctttttgacggcgaccaacttcaccaacataacgctttccgcgcgccgggtgccgtcccagccgaagcattgggtcggcatctacacaaggtggagtggtatgcggagcattacagcaacatgcgtcgcggagtcgtgcctcactccgagatgatccacgaagcaaacgttcacgagctggctcagtttgactacgtgtttttgtgtgtcgatcgcggacaagctcgggcgttgatccttgatcatctcagaaatacaagcacggtcgtgattgactgcggcatggggatgaacgtcgcaaaggatgggcaaaagctatggggcacaatccggaccacagtcagcacaccggcaaaccgcgatgaagcggccagcttgatgcccttagttgatcgagatgacgatctctaccggtctaacattcagatcatcgaattgaacgcgctcaatgccgcaatggcagtgctacgctggaaacgactgatcggaatgtttgctgacgaccgcttagagatggagggcacctacaacacagcccttaaccagatcggaaacaagccggagccactatga

SEQ ID NO: 512014 - DNA, 747 bp, Stenotrophomonas maltophilia
atgaccattgaactggctgttgaagaagacgttgaacgcgtagtaatggctgggcgcgccgtgagcaatgaagggccttggcgcatccaagtgggcgacgacacgctccaattccgccccatcgtggtgacggaccccatcatgacgggcagccagatcctggccgctgcgggcgtccgagaccgggttgaacatctggtctaccagatgctggccaatgggcttttggaggagatcaaccccgaagaaactactgatatccgctccaaccgcgcggcccgctttttggtgttcaaaaacgaccggtcattccgtttgctggtagacgaccgaacgctggattggggcgcaggacacatttccggcgcaacgctgcgcgcactggcgggacgggatcaggctgatctcttcgtttggcaagacatgcgcaaccaagctgatcttcttgttctggacgaggatcttgtcgatctcaccttgccgggcgttgagcgtttctacctgcgagaggtggcattcaacatcttcgtcaacggatcgcccgagaccgtatcccgccctcgcctggcgtattgggacgtcgtcaaacttggctttcccgatgcgaacgctgccgaggagatcgtttacaccatcgattacacgggcggcccgcaccaaaatcccgagggcacgttgtcagctggccagtccgttcggatcaagcaggggatgaaattctatgtcacaccttctgacaagtcgtaa

SEQ ID NO: 512015 - DNA, 825 bp, Stenotrophomonas maltophilia
atggaggcggcgaagctccaagttgcgcctaaaagtgcttttgatccggcagtgttgtttgcttacatcaaacagaagacgcacaaggctgcggaaacattaaaacgcgcgctcggcaaggttctcggtctctatgactccatggagggcgttatccatatcgaccacggggtcggtcccaccaagcaaacgtttttgaagctgcatgaggctgggcaccacgagatgcccacgcacaagaacgtgttcaagttttttcaggactgtgagcaaacgcttgcgcctgacatcgctgaccgattcgagcgcgaagccaataattttgcccgcttcgtgctctttcaaggcgatacatttcgcaatgctgctgcggatctcaagatgggaatccgtgcgcccattaccctcgccaagcggtttggctcgtccaactatgctgcggcgcgcgagtttgcacgcactcaccatgcgccgtgcgtcgtgtacgtcctaaacccgctggaatttgtcgactcgggtgaatttaaggcggaggtgcgtaggatcgagccgtctcccagttttctgctgaggtttggccggccctccgatctcgttattgatcacaagcacgcgcttgctagcttgattccgattgggaagcgcatgacggcgccgcgcgacttcgtctacgttgatcggaatgggactaggcaccagtgcatcggcgaggggtttgacacgaagcacaacatatttttgctgatttatcccgaggctgagttgccaacgagtgtgttgtttttgccggaaagtgtgagatctccgcccgtggccaagcagtaa

SEQ ID NO: 512016 - DNA, 798 bp, Stenotrophomonas maltophilia
atggccatttactacactcgcgtcaaaacgttcagtcgtaccaaacagcactcagccgtcgcggctgctgcctatcgcggcgcactctgtctcaccgatacactgaccggtatcgttcacaactatcaaggtcgttcaggcgtccagcgcgtcatctgcatcagtcccatcggcgcgcctgagtggaccgaagatcctcagcatttgtggaacgcagtcgaggctgctgagaagcgcaaagacagcacgttggctcgcgagtttgaattggcactccctcacgagctcagtgacgatcagcgctgggaacttgcactggacgtggcccggaagctcgtgcttcgcttccaattcgctctccaagtgagcatgcacgagccgcctaagaatgcggatgcgcgccactactacgcccacctcctggcaacgacacgcagggtggatgcgcagggactcgctcagaagacgcgtgagctcgatggcgtcatcaatggcaagccgcaagtggaatggattcgcgcaaccatcgcccaatcgatcaacgaccaccttcgacaagcatcagacgcagagcgagcggcgctgggtgcggggcaatggaacgttcaacccgcatccccggggcatttgttgtcgaaactcgtcaaagagttcgagagcgcaatgctggctcagaagagaaaggatgtaactcagccgtggtctggttctgacgattcggttgtcttgaacaacaacgatgcagtgctagcggcatggcaaaaagcgaacaacgcaccatcgcagcgcctgtcgtag

SEQ ID NO: 512017 - DNA, 675 bp, Stenotrophomonas maltophilia
atggaaacgatcaatcaatcttgcggttcgatcattgcagatgaggctgcgagtgttgcgtatttccgcagagcaagccttattctttcgcgcgccgacgcttgtgacaagcacttaagagatcgatggtggctgacgtacgagtcaggcggcatcttctggtatgccaatggaagtagtacggtttcgtcactgaccgaggtgtgggagcaatggtggctcaggtgggtgaggatctgttggcatgagtgcgccgcccgcaaatttgctcgcgcctatctagatgggggtgctgcgatgaaggccgaggtcgaggcttggttggttagcggtgcttattccccatcggcaagttcgcaagagacctggccttggcgatcggcacaggccagctttccaggcggccctatccatttggcgggctggccttggcatgagcctatgccatcgtcacgacattgccctgacatgattgaccctgatctgtggatggagagggcccgactcagctcggagatatcgtcccggcagcctgtggccttcgtgtcaaaccttcgccgccatattttgcaggaggagtttttcttagagcgcgatcgcgccatagcctcggcacacgcattgcgcagcgaggtcagcgttgttggcggtggcggctcgatccaacgtctatga

SEQ ID NO: 512018 - DNA, 285 bp, Stenotrophomonas maltophilia
atgaaagagcgcaaaaatccctactcgatcatcaagccctatgtggacctcattgagcctgaatccaacacgccctaccgcccggatttcgttgttaaagctggaagtcgcgagattgcggtggaaacgatgggttacgtggatgaggaatatgtggcaaggaaatcccgaatgcacgaggtcatgcgtagccgctatgacgaagtgatcgagcatcgcccagggatcaacgacgatgatttgcgggccaagatcgagggatttgtcggctataagcctgcctga

SEQ ID NO: 512019 - DNA, 177 bp, Stenotrophomonas maltophilia
atggcagatgatctgagcaagcgcggcccacctgatggcattcgcatcaatgtgaatgaggcctgggaactccgggattggtccaagcacttcaacgtcacaccggcaaagctcaaagaggctgtggcggctgtcggcgtgatgaccaaagatgtaaagcgccacctgggcaagtga

SEQ ID NO: 512020 - DNA, 384 bp, Stenotrophomonas maltophilia
atgaccgtcggcacgttcttcctcctgctcgtcctcggcgccaccgcgcttgtgcttgttggcttgggccgcagtttcaaactgcgcagcgagcgcagcaactttgagcaagattacgcacgaagctacttttcgcgctcgagcgccgtcgcgctgtctgctgagcgattcaggatcaagtttcgcgcccgcaaccagaccaaaatctacactcttgctgacgtgcgcagttgggaaaagcattggcacaacaccaagcgcgaaggcacgctgacggtgagtgtgcgcgacgtcgaccagcctgtttggacgatcaagttcggcaacgaagcggagatgaatcgctggtatgagcttttgaaccaggcaattaacggcaactga

SEQ ID NO: 512021 - DNA, 219 bp, Stenotrophomonas maltophilia
atgcttgtctttgtgaaggccaacgggtctgacgacgctcgcttgaccaagttttctctcgggaagtgtgagcaaggcgacggtggctacaactgccccgtccaggcccgcgtcttggctatgaatggtcgcttcgacgaagacttcaacggtgtcttcaccttcgctgaggtcggcggcgcatggaaggtgatcggcgtggtcagtcgcaccctctaa

SEQ ID NO: 512022 - DNA, 357 bp, Stenotrophomonas maltophilia
atgaacgcgctcgccctctcgatccagacccttatcgcgacccgcatgaaggaggtccgcaaagcgtctggcgtctctcagcgggccctggggaagagcgtggggttagatgacaagcgggcagggccctacatcagccgctatgagagcggcatccatgcgaccgactgggaaacgaccttgaagatcgcccagtccttgggcgtgtccgtggcgtatttggttgccgagacgccggaactagccgagctgatcaaagctgtccaggactacgaacccgaagagcttcgggcactagccgaagaaatccgggttcgccacgctcagattgatcgcacagcgcaggatcagccgtag

SEQ ID NO: 512023 - DNA, 1161 bp, Stenotrophomonas maltophilia
atgacttctgaccaggaagacgcgcgccagccagaccaaacgccgggtgtgcggctcacgcgtgtgattgaccgaagctcggcaacgcggcttgttgagcagatgcaacgcaactcagccatccatgctctccacgcggcccagcagcatccatcgattgccgctatgcgagatatcgagtcacccgctacccgatttgcgatagagctggccaacagcgacgtgctccgtatgtcctcaggcatacgacagaacttggccgaccgcgtgggtcagttgaacgaacatgcagggatggccaggcgatcagccatggcattgcgccagtccctcatgccttggcagccggttgtcagcgaactcgcgatagctgcaagccgaacggcaaatgacattcttgcttggcgcgaccggtatgcgcgccaaagagacgctgccgtcgaggcgatgcgccgactccactcaagcattggacctgtcaggcgcttggctgagcagttcggcgagcagttgcacgtagcagcgcagctgagccaatcgccggcgtttcagtcttggctatcggagatgtccagcgtcgagatgcaagagcgcatggagcagcttttgcaggaggcgtcggaggatacgtcagcctcgtcaccagacatggcaacgccccctgctgcgatgcaggcaacggcagcatctctggtttcatggttagtggggtgtttggctgcgttgcgctcatccggtctaccgcatgctgatcgaatggtcctctacggatatgcgctgacaatcgcttgcttcctctatacggaaataggaagcaatcaagaccacgctgagcacatggccaagattgacgcgcaaagtcaggcgatgaacgccaagcttgacgagcagaatcgaagcgggcatcagatggtcgcgctaaatcaagccatgttggatctagagatggctgatcacacctatctggtcatagtccgttcggctccatttcgggcagaactctctgagccagccacgcattggttgtcttacggtgaggaagtgcaggtcctccgggctgccggcaagtggcgtcttgtccaaacggtggacgacgaaggcgcgttgcggttcggatgggtcctgaacaagcatttgaagcgcctcaccgagccggactaa

SEQ ID NO: 512024 - DNA, 1749 bp, Stenotrophomonas maltophilia
atgcccatcatcggggtcaagatcaaaggtctgtcgtgtttcaccacggagttttgcggcttcgatgagttcaagctgatcaatgtcatcatcgggcgcaacaacactggcaagtctcagctcttgaagctcgtgcagagcctctgctcgccggatcgcaccacgtcgcgccttcttgcgtcgtatcgattcacgggaaccttcgacgaagggacgctggaaggaatttttgccaattctcagcgctctggcgccctacgcgtcccgcctggcgaaaccaactggacgtatcacggcctgcggttcgtcgatatgccagtgagttgggtcgagaacccccacggcctcgtgaatgacctgtcacatcaggcgaaagagaggtctgatgcctggggcagaattctccctcatgaagttaacgaagcgacagaggtggagcttagcaaggcagtaagccgactccggggcccatttgccgacaaagttttccgccacatgctggctgatcgcgacatccgaaatgagcctgccgccgccaagcttgcgctgcgctccgatgggcaaggcgcgacgaacatcatccgtgatcacttgatccgggctgacaacatcatggtgacgcggcgactcattcagagcgacttgcgatcagcgctcaaccatgtcttcggcccggatggctccttctccgcaatttctgtgcatgagcaggcaggcggcgaatgggagatctttctggaagaggttctcaaggggctcgtgccactcagcagttccggcagtggcttgaagactgtgatcttggtgcttctcaatctactcatcgtccccgtgctcgaaggcaaagctgctggcgactacgtatttgcgtttgaagagctggaaaacaaccttcatccttccctgctccggcgtctgctgaaatacatcgatgagttcgccgtcgaaaacgggtgcacgatcttcttaaccacccattccagcgccacgctcgatcagttcagccgctcggaccacgctcagtttgtgcgcgtctcgcatgacgggaccgctgcatcgactcaaacgatctcggcgcattttgaccactcgcaggtggttggtgacctgggtgctcgcgcgtccgacatcttgcaggcaaatggaatcatctgggttgaggggccttcggacgcgatctatctcaaccattggattgagaccttttccgagggccgcctcttggaaggccgggactacgcctgcgcgttctacggcggatcgctgctggcgcgcacaagttttggggatccaaacggacccaatcccgaagaactcattcagcttctccggctcaatcgaaatgccgctttggtctgcgacagtgaccgatcatccaaaggggctgcactaaagcctcgagttatcaaagcgcaagaggagatcgcaaagcttccggatggctacatgtgggtgacggcgggcaaagaaattgagacctatctgcctggctcagtgattggcaaggcgcttggaatgaaagccgatcccgttgatcctgcgcagttcgagctcttctttccaagcgcatctaagtcgaaaaagggtgactcttacgttgaagccaagctcaatcgggccagtatcgacaaagttgagcttgccctcgcctcacgcgagcacaccacatcagccatcatggccccacgctttgactgggccgaacgcatgcgagagctggtggccacaatccgaaagtggaacgattag

SEQ ID NO: 512025 - DNA, 1596 bp, Stenotrophomonas maltophilia
atggccatttatcacgcaacactgaaatcgttctctcgcggaaaaggcgagtcgtctgtcgccgccgctgcttaccgtgccgggtttgatcttgtcgataccgcaacaggtctttaccaccgctactctcatcgtcatggcgtcgcccatcatcagatgctcgcccccattggatcgccaaattggtgctatgacgctcagaggttttgggacgctaacgaagcagccgaaacacgtgctaacgcccgcgtttgccgtgaggtcgaggtcgctttaccccacagcctctcagacacccagcgcaaagccctagctctggatctggggcagctcatggtcgaccgctatcaagtggcggtcctggttgctattcacgcaccttcgaaagaaggcgatcagcgtaatcaccacgtgcacttactgatgtcggcacgaaaggtcgactctagaggactcggcgagcgcgccggattggcgttcgattcgcggcaaggcgggggtgctaaggctattcgggagcttcgaaaagccattgaaggggtcatcaacgcgcatctagaacgcgctggtggcactgatcgtgtggatcatcggactttgagggctcaagcgcgggaagcggcgtcgctgcaagattttgcccgagccaaagagctcagtcgccagccaaccaagcatctagggaaagttcgcactgcgatgatgcgtcaagccaaaaggatgggtgctgaaggcgcgacgccatcgggaagctttgtagagcgaatcgtcagtcggcgcttgcaagccgccgtcctgacgcatggcgtccctgaggggcattcccatcaagccgcgttggcagaccgggccagggaacaggtcgggttagcgcataggtctggagagcgcaccacggccgccgcatcaacttacccaagcggcgagcgcatcatgccaacggctgtgccggttgggatcacccgaaggattagtcgtgtggtgcgcctagcacgctctacgggccgcgacgctgacattcttaacgcagagtccgaactcatcgagcaatggttggaaagccagcgccaagcagcccaggactcgctagacatgcttcgaagtgtcggcggtatacaaatcgaacctcagttccagaaggcctacacgacgctcatgtgtcgtcgtgtcgattcctacgcggccaacgcattcttgtatgaagacaccgagcgcctggcccaagccgtgatgagctatgcgcacgctgtcgtaaggccgcaacgtgcgcgtctcgcttatttctcagctcgggcaaaactgtctgagcatgaagttacgtcgaagtcgcgcgaagcagctcgcgcaaagcaacgctacttccgagccaaagcgcacatcaccaaacgcgcggcggcattgcaggtggccgccattgatcaggcgcggtcagagatggtggaagccagcgtgcatctggacaggacattcaagatcgaggcatcccctgctgtcacatctccgtcaatgctagaggatggtgatcttgtccaaaccgagaagcatgctagcggtgaattggaactgcgacctcgcgccccacggccgcgtatttga

SEQ ID NO: 512026 - DNA, 1116 bp, Stenotrophomonas maltophilia
atggcaaggactgttgatgagcgcatttctgctctgagagcgcgccgccgtggcgaagatcgagcaagcctgatggcggaagacagcgctgctgcggctaagtattttgagaaaattggacagcaggaggcgtgggaaacaaaggcagctaacaagcccaatacgcgctacgcgttgggcgctatgcaggaagtggatgcggactacacccgcatcagcacagagactgctctccgcgtggcaaagcagctggaaagccgcatcgcagggtttaagcttgaatttcacctgcaaggctctgtgccactcaatgtgcatattcgaggcgttagcgatgtggatctcctaaccctgatttcaccgcaatttctgagctacgacccgggcggcctgcgtgcaacatcaggcgcttactaccccacagccctgacctcattgcagcagctcaaagacctacgcgcggaggaagaaccggcacttaagaacgcatttcccgcagccacggtagagacgcgaggaagcaaggcgatcaagatttcaggcggctcccttgcccgatcagttgatgtagtgccttcccattggtatgactctgccgattaccaacgcagtggggcgttgcatgatcgcggggtcatcatcttggacaagagaaacaacgccacgatgaccaactacccgttcaagcacatcagggaagtttcagatcgtgacctggtcgcgatgggctccctaaagaaggccattcgacttatcaagaacctaaaagcggacgcggatcgggagattgcgcttccaagctttgaccttgccgccatcatgttccacgccgacatgaatgctttgcggaatggacattggtatgaacttgccatcttggctgagacgcagcgccatctcgatcacctctatcaccatcctgactacgcgaagcttctgctcgtgccggacgggacgcgagccatctttgatagcccagccaaatggagctccctactgaccctatcttgtgaagtggacaggcttcttgaagctgtcgcaaatgaaaacagcatcggactacccccgaacgaccatagcgagcgacgtaagctcgtcaaatccgttagcctttaa

SEQ ID NO: 512027 - DNA, 624 bp, Stenotrophomonas maltophilia
atggatcatgagtatgtggtgcggggcggggttaatcgggcggatattggcaagtatctgacgcgaacggcttcggtcgtttcaggtctcttggtctgggtgctccttcaagcagtcgaccttgcaaagcagtttgggctcagcacgaacctgccgcccgttgctctctctctgattggtgccggcaccgtctatgccgttctctatctgatcttccgtcgctggatctggcgtatgccccttgtcgccaactggttgaaggttgccgatctttcgggcatctggatctgcgagggccatccttttccacgagctgattcgctcgccgttgattggcagggaacgatgacgatcacccaagattgggacaaggtgcgcatccaccttgatgccgattcgtccaggtccaacagtgatgttgccggactgctgtctgaccccatcgaaggctttgttctcctttacagctatcgcaatgagcccaagcctggccagacagagctcagcgcccatcgtggctttgcaaaactgatctttgccaaggatttgaagactggcaagggcgactatttcaatggtgacggtcgtcactcgtcgggcaccctcacacttcggaggcagtaa

SEQ ID NO: 512028 - DNA, 393 bp, Stenotrophomonas maltophilia
atgaccatcaccctgcagatcgaaggaaccgccatcgatgacattgctggcctgtacgcggagatcaaccgcgtgttcatggccggcgaggactggcagctcgggccgagcctggatgcgctggatgacctgttgcatggcggctatggcgcgttggccggccatgcgcaggccacactgatctggcgcgatatcgcccacagccgcacggctctgggcgtggagaccacccgccaatggctgcaggccaagctggacacaccgggcagcttcaattcgcaggccattgcccgccaactggacgcgctgcaacggggcgaaggtccgacctacttcgagatcgtcatggagatcttcggcgggcaccggcagatcaccctggtcccggcctga

SEQ ID NO: 512029 - DNA, 417 bp, Stenotrophomonas maltophilia
gtgccagcactgatccccgacgactacctgctagacgtgcacacccgtctgaccttgtacgagcgcatcagcagcgcgcgcgacagcgaccatctgcgcgagctgcaggtggagatgatcgaccgcttcggtctgctgccggacccagccaagtacctgttcgccaatgccgagctgaagctgctggccaacacactgggcatccgcaagctggagctgggcgagaatggtggccacatcgtgttcgaggccaagtcgcgcatcgacccgatggcgatcatccggatgatccagaagcaacccgagctgtacaccatggacgggccggacaagctgcacatcaaggtgtcgctgccctttccggaagaccgcttcaatgcggcacgggccctgctcaccaggctcaccccggactga

SEQ ID NO: 512030 - DNA, 846 bp, Stenotrophomonas maltophilia
atgcacaatcattggacattcggtgtcgctgacagggtacggaagcggtggggagcattagggctccttgcatccgtctttcttgcgttggcgccattaaaaaatagcgttgtggaccctaaattccccgcgtggatgtatggggcgttcctgtggagtgcacttgcaattttcctgctcatcgctattgcttgggggttgtgcattctcggcagttaccttgagcgcgacgtcgtagaaaaattcgagtgcgcaagccgtgacgagattcaagaagttgttcctttctatgaccgtgtcattggaactgggcagagaccctcggtcaatcagctgaaatcaatgttctcggcgaacaagtccatttttcgcttctacaagcgaaagtctgttcgtggctcgaggaagattgtagagattaggggattttgtactgtaatccccatgaagagggatgcgggcgttcttctggagaagggcgagctaaatggtctgaagatggacagtactcacatagcaggtgcaaaagagcggtgtgaagtctgctatatcggatcgattggtgcggaaaggaactcggctaaggcggcagtgctgacctatgtgcttggtgtgatcgacgagtacgagcagagaggctgtggtcgcgtgtacacaaggcctacgactgaagatggcttgcgaattgtaaggaagtacgggtttgtcagcgttgagggcggaggcgtccccagaattggtgagctttgctacaaagaactgggagatgggcaagtgcgtagaaggccggtccgagtgaggcgacagtctgtcggccctcttgtggacgcagctgtcgccgcttag

SEQ ID NO: 512031 - DNA, 1014 bp, Stenotrophomonas maltophilia
atgtttttccgcacgacctgcgctttggcgctgctgctgactgcctgcagcgggagcgcccgtgcgcagaccgcagagacagatgcagtgctgttccagaatgatctgcgcgaggtgcttgaatgcagcgcaggcccggatcttcagcagcgcgtcgtcagccgcctgcgcgcggcacgctataccgacgtcgccgaacgcactgcggaactgcgcgactggcgtttcgaggagaaaggggcggatgacgatcaccggatgactgtcatcacactgccacagccgatgacggtccacggtattgatgcgcggcaggtcgttgccgaccccttcggcttctcgattgcgcttgacggtgcacagcgcgagcgcgtcatcgctgcctatgccctgcacctgcagtcgagcacgctgcgtgagccgttcgagctatggtcggcacccactgcgtcggtcattgtgcgcagtgcgggtgatggccatcgactgggatgcaaacctttcacgaaagatggcaaggcaaccgtgcgtcaggtgccggctgttgacgtccaggacctgcaggatgccattcactgccgcgccgacgaaggcagcatgcgccggttgcaggcgttctggcagcggctttccgaacagccgcaattcgaatggccgcaggatgtccgttcggtcaacgaggtgaactacaccgtcgacgatgaagagctgcatctgctgctgatcggtttgcaggcgcccgtccaagcgtacggcgttcccacgcacacgattgcgctggcgttcggtggcttctttggcgtggatctcggtagcactgcggtggcgccagtgcttgccaaggccggcatggatacctcgcacgcggtgggcaaggatgcctggcagcgcttgttgccaccggttgcgttcagcggtggtagttggatcccgcaacacatcgtgatgcgcaccgacgaaggccgcgttgttgccggttgcgccagcgactacgagcgcggtccttcgcgctga

SEQ ID NO: 512032 - DNA, 1587 bp, Stenotrophomonas maltophilia
gtgaccaccatcgaacgaattaccaccccgcgcatccgcatcttcgacaccaccctgcgtgacggcgagcagtcccccggctgcagcatgagcccgccgcagaagctggtgatggcgcgtgcgctggacgaactgggcgtggacatcatcgagaccggcttcccggccagctcgcagtccgaccgcgaggcgatggcactgatcggccgcgaactgcgccgcccgagcctgagcctggcggtgctgtcgcgctgcctgcaggccgatatcgaaacctcggcacgtgcattggaagcggccgccaacccgcgcctgcacgtgttcctgtccaccagcccgctgcaccgtgagcacaagctgcggatgacccgcgagcaggtgctggaatcggtacgcaagcatgtatcgctggcacgctcgtacatcgacgatgtcgaattctcggccgaggatgccacccgcaccgagctggactacctgatcgaagtctcgcgcgtggccattgccgccggcgccaccaccatcaacctgcccgacaccgtcggcttcaccacgccggaagaaatccgcgcgatgttccagcaggtcatcgccggcgtcgccgacgttccgaacgccgccaatgtgatcttcagcgcgcactgccacaacgacctgggcctggccgtggccaattcgctggccgccatcgaaggcggcgcgcgccaggtcgagtgcaccgtcaacggcatcggcgagcgcgccggcaactgttcgctggaagagatcgcgatggtgctgaaggtgcgccaggccttctacgagcaggacagttcgatcaacaccccgcgcatcgtgggcacctcgcagctgctgcagcgcctggtcggcatgccggtacagcgcaacaaggccatcgtcggcgccaatgcgttcgcccacgaatcgggcatccaccagcacggcatgctgcgccaccgtggcacctacgagatcatgcgtccggaagacgtgggctgggaagactcgcagatggtgctgggccgccacagtggccgcgctgccgtcgaagcgcgcctgcgtgcactgggcttctggctggacgaagacgaactgaagctggtgttcgagcagttcaagggcctgtgcgaacagcagcgcgtggtcaccgatgccgacctgcagacgctgatgcagggcggctccaatgcgcagggttatcgactggcctcgatgaccatcagcgatgtcggcagccgcgccaacgcgctggtggaactgtccgacccggacggcaaccgcgtggccgagaccgcacagggcgacggcccggtcgatgcgctgttcggcgcgctgtcggccgccaccggcgtgcagctgatgctggacagctaccacgtgcacagcgtcggcatcggtgccgatgcgcgcggcgaagccaacctgagcgtgcgccatgaaggggtggagtacgacggcaccggcaccagcaaggacatcatcgaagcctccgcactggcctggctggatgttgccaaccgcctgctgcgccagcgccaggctaccgcccacagcagcaccgacgttcccacccctgccaccgcctga

SEQ ID NO: 512033 - DNA, 4323 bp, Stenotrophomonas maltophilia
atggacgccgtgaatgggcgccagctcctgggcgtgaaggagacggcggagcgcgcattggacaacagcaagctggtcacgcaggcatctgccagcgggcagatacgcgttggcgctgagaattccggcaccgtcctggacgtgcgcaaccggtcgaacgccaatcgaaagatcagcggcgtagccgacgcagcattgagcaccaccagcaccgaggccgtcaccggcaagcagctgcacgccaccaaccagcgtgtgagcactgccaccagcaccgccaatgccgcgaaagcatcggcggatgctgccgtaggccgtatcggcgctgcagctgtcgctctgggtcaagcggcggtggctgaaggcagtggaagcacggccagcgccgcattgggatcggcggcaaaggcgtacaacggcaatggtgtggcgatgggtgcagacgcacgtgccggtgtgaatgacaagggcgagaaaagcaccgccgccactggcgcagtcgctattggcgcactcagccgcagtggcaatggcgcggtcgccgccggcttgcgtgcgagcgccattggcgatcgcgcagtggcgctgggcaacgatgctaacgcagcgggcacccacgcaaccgcagtgggctacaaagctaccgccagcgcgaaccaagcgacggctgttggtcgtgaagcatcggcatccggcacgttctccaccgcgctgggcaatctggccagcgcccgcgcggagagcgccgtggcgctgggcgaccgcgccgtagcggcccacaccgacagcgtggcgctgggcaatggctcccagaccaccgcagggaaccagatctcggtgggcaacgacacgctcaagcggaaaatcgtcaacgtcgccgatggcgcgctcaacacgagcagcgccgaggccgtgaccggcaagcagctcaatgcgaccaacgtcgaggtagcctcggtccgtaccaccgccgccagcgcccagacgacagcgggcgcagcaaagaccgccgccgacgatgcgttggccaaggccaatgctctgggcgggctggtcggtcaaacctcagtgaccggcaacgtacgcctgggtagcgaaaacaccggtaccgtgctggatgtacgcaacaagtccaatgccagccgcaaggtgacaggcgtggctgacgcaacgctcagcaccagcagcaccgaggcggtgagcggcaagcagctcaatgcgacgaacacggaagtggcctcggttcgaagtgccgccgccaacgcccagactaccgcaaacgttgcgcagactaccgcggacagcgccttcgccaaagcacgcgccactggtaacgcagtggccactgccgctgatgtcaacgacgcgaacaaggccaccgcgacggggcacctggccatggccatgggcaatgtcgccaaggccagcggcgtggcgaccgttgccgtgggcaacaacgccaatgccgttggcaccaatgcgatctcgatcggtagcgcctccggtgcgacgagccagttcgcgcttgcactgggtggaaacgcgaaggcgacgcacgaaaatgcggtggcattgggcgaaaagtcggtgaccggtggcaccaatcaggtctctattggcaacgcaacactcaagcgcaagctggtgaacgtggctgatgccacgttgagcagcaccagcaccgatgcggtaacgggcaaacaagtattcgccgtcgatcagaaggtcactgcgaatcagtctctgctggccagccacgccaccgagctgactggacacgaggcccgtatcgcaggcaaccggcgggagctggatgacctgcgtaccgagtttgacaacttcgatcccgacctggaaggcgtggtccgctacgcagccgacggttctgtcgatatggacggcggcaaggtacggggcgtggcggcgggcgatatcagttcggcggggagtaccgatgctgtgaacggtggacagttgttcgtcaccaatcagcgtctgtcacaggttgaagagacggctgggtacatagctatcgggcacgatgacgaaagtattgacgccaaggcaggagagttctcagtagccattggtgatggtgctgaggctggtgaaggcactgatggagcaactgccataggagctttctccagagctcgaggaaagggatcggtcgccttagggcgcgcgtcgttcgtcgatagctccgcggaaaatgggtttgctctgggtaccgggtcatcggttcatagcaatgaaggcgtggcgctcggcggatttgccagaattgagtcgggtgcagagtattcagttgcattgggggcatcatcgacggcgaccgaagagaatgtggtttctgttggaaacctgactaggaaacgacgaatcgtcaatctggctcgggggcgcggggctgaagacgccgtcactgttgggcagctcggggactcattggctgcactgggagggggtgcgggcattgacccgggcggaaacattatccttcctacgtacaaaatacagggcggaagccagaacaacgttgaagacgccctcaatgttctcgatggtgctgtcgtagctggaaagaatcgggccgatcggttcgaaaaccaactacgctcggtcctccaggacagccccgccacccgcagcgatggtctgggccagctcaacctcgccggcgccaacggcatggtgctgggcaacgtggccaacggcctgattgcaccgggcagccgcgatgcggtcaacggcggtcagctctacgctgccgaacagaagatcgagcgcaatcgaaatgatctcgatggactgagagagaagttagttgggggcgctgaaatgcaagtcagcgatgccgctggcctgatcgattttgctggcgcacgcttgaccggagtcgccgacggagagctgaatcccggtagtagtgacgtcgtcactggcaggcagctgtacgatacgaatcgaagtcttgagcgtttggctgaaaacagcaacttcctgaagttcggcgattcaattgatagagtgcccgcaagggcggggagattcgccatcgccatgggtgactctgcagaggcctccctggatacagagggagccgtggcgttaggcgcgtatgcagtcgcttccggcacaaattcagtggcgctggggcgagctgcgcacgttcatgaaggcgcggccagaggctttgcgctcggcactgaatctcaagttgctgaatccggtgcaatcgcgattggcgctgcgagtgccgtactaaagggggctgtggagtctgtagcaattggcgcgcagtctgtggcaagagaatcacatactgtttcctttggtaatgacggaatgcagcgccgtttggtgaatgttgcccgcggccgcaacgccaacgacgcggccaccgtcggtcagctccgcggcgcactagcaaccctgggtagtgatgtcgatgccaacggcaacatcgtcggccccaccttcaacgtgcagggcggctcgcagcacaccctgggtgatgccctcaatgcgctcgacggcgcagtgatcaccgctggcacccgggttgatcgggtcgaaaaccaactgcgctcggtcttccaggacagccccgccacccgcagcgatggtctgggccagctcaacctcgccggcgccaacggcatggtgctgggcaacgtggccaacggcctgattgcaccgggcagccgcgatgcgatcaacggtggtcagctgcatgccatggagcagcgcctggacggtcgcatcgatgggctggaacagcgcgttgatgccacgccggagggcagggcgctggcgtcggccagtgcacccacgccgccggccgcgccggaggccgagggccctgccggcgcatcgggtgaaccggcggcggcttctgcaggccgtgccggtgggggcatcgccagtgctgacggcggtggcacgcctgcgccggccgacgcgccggcgccgaccccgcaggtgaacaccgccgatctggagaagatgctggcccgcgccaacgagtacaccgatggggcgatcagcaatttcgaacgccgcctggacaagatggacaagcgcttcaaccgcatggcggcaatgagcagcgcgcagacggccatggccatgaacaccgccggcctggccacctacaaccgccttggcgcgggcgtgggctacgccgagggcgagtcggccatggcggtgggttaccagcgcgtgctcaacgacaagggctcagccaccttcagcctcaatggtgccttcaccaacagcggtgaacgcagcatgggcgtgggtgtgggcatcggctggtaa

SEQ ID NO: 512034 - DNA, 819 bp, Stenotrophomonas maltophilia
atgaagattccaaccattgttatccactccgatccggaagacgtcgtcgcagccgtgctcggggatgttcggggtgtgagtgtgatccatctggacgagctgactcgaaattggcgcgttcaggaggctggaatcattgaacccgtactggaaaaatcgattccgagcatgtgttcttcctacatcatcaacagagtattcgatctctcctgcaccgagattggaaagcgtcttcgtacattccgtctgcatgagcactgggcatacacggctttgggttcggttctgtcgcgagcacacgcactggcacacggaattggtcctcgcggagtgagtagatcgcttctccccttgaatgtgcagtggaagcttatttccgagcgtatcccagaaatcagaacgccacagttcgcttttgggttcggtcatcgaatgcctgatatgtcgcatctggacaagttcgtacagaagtcagtctggtcctacttccggtggaatggtgattccgatgtcgtagaaggggagcagcagtggcatccattcttcgtcgaacaaccgcaaggcaccccaatcatatgtagctatcacggagaggcgttcactctgagtttcccaaaggggcgacccaaggcggatctcggggtttttcccgctctcgtatacgcatgccgggaactgttcgacaacaggatggcggagattctggtgtaccaagaggacgaaagcctgaccttctgtgcctgcagcccatacatggctggagtaggtgagctgagagaaagagagcaacttcttctacgaggagttccgtcgagttga

SEQ ID NO: 512035 - DNA, 672 bp, Stenotrophomonas maltophilia
atgcaggaacacgccttgagcacgacaacaccattgcgcagcgcacgatgctggctgccggcggccctgttgttggcactggcggcgtgctcgccttacgcacaagcagagcgcgatgtcgccgcgggtggacgcggcctggccaagctcaataacgcaccgaagcaggcctatgagctggtgctgacactgagggacgcgccggggccgttcgcgatcgttgagggtgtggcccagtacgacgtcagcaactacgcagattgtggtcggatcctgcctgcgacgggtaccgcgggccgcatcaccagccaggaacccgtcacgctgcaccgggtcggcgaaaacgaataccgcggcacgttctacctcgaccgcatgcaggacgaggactactacgggcgtggcgcctgccattggacgctgacgggtgtcggtgcgatgttgcgtgctacgaacggcgaggcggatacgagattcctgacatacctcaaaaaggaacgcgtgaacgctggatcgccgttgactctctactatccgaagattgcctatcctcgcgcagaacttgctgccaactatcctgcaagtggcaaagaacatccttcaggttacaaagaagatctacgcgacgcgctgttctcaaacaccatcactgtgcagaagctcgcgccatga

SEQ ID NO: 512036 - DNA, 183 bp, Stenotrophomonas maltophilia
atgcatgtgcacgagggcgtgagcgaagccatgtttgtggaactgcgggaggctcgtgatgccacacttccgatgccacggctgatcctgccgtcagtgcaggtcaacatgtgcgccggccatctgcccgagcccgaggaaaacggcgtgcgatatctcaagctgccggtggacctgctatga

SEQ ID NO: 512037 - DNA, 297 bp, Stenotrophomonas maltophilia
atggcgctctacaaggtgcctgatggagggaaggttggtgacaggtacaaggagggtgagtttaccttcgacgtggtagaggtcctctccattcccatgctggccgatgatcgcgaagttctgaaggtggatgtggaaagggatggcgtccacgccaactccttctacttcgatagaaaaaggggagtgatcggcgttggagtcaggaacatcggcaacagcgctattccggagtcggtgttctttctcgagcgaggcaatggcgttttctcaagtgaagagcgcaagccggactaa

SEQ ID NO: 512038 - DNA, 162 bp, Stenotrophomonas maltophilia
atgctggctgaggcagaggctcttgatcagacccgcaaattggtcgcggagctgcatcagatcgttgcagagccggatttgcgcgacttcttttccgttgcatttgcaatcgtgggcaccctcgtgtgggcgcttggagatgttcccttccgcagctcctga

SEQ ID NO: 512039 - DNA, 1893 bp, Stenotrophomonas maltophilia
atgctcgggggcaagacagtggcggacaagtactgcgatctggtcatgaaaggcggcatcaccagcggcatcgtgtaccccaatgcggtactggcgctggcgcgcgagtatcgcttcaagagcatcggcggcacttcggccggcgccatcgccgcggcggtggcggctgcggcagcgtgtggtgatcgccgtcagcaggccggcgagcacctgcccggcgatgccggctatggcgggttgtcggcggtatcggcgcagctgtcgcggcgaggcttcatctacagcctgttccagccggcgcgcggcgcgcgcgcggcctatcggctgctggtggtgctgaccggcaatgccagcctgccgcacaagctgctgtgcctcgccgttgccgtgttcgagatcgcgccgctggaagtgctggtgtcgttggcgctgctgctcggcctgggctggtggggcggtggttggagcggcgtggcggccacactgctgccgtcgctgctgtgtgcatatggtgccggcgtggccggtgccgcgctgcgggtcgcacgtgtggcgcggcgcaatctgctgggcctgtgcagtggactcggccgagatgcgcgcacgccggcactgaccgagtggctgcacgaatgcctgcagcagttgtccggcaagccgctggatgcaccgctcaccttcgccgacctgcacgacgcgccgcgctatgccggcgagccggacagcccgcatgcgatcagcctgcagatgatcaccacctgcgtgtcgcacaacgagccgcgtacgctgccgctgggtggcgcgcagttctggttcctgcgcgaggaattcgagcagctgttcccggccagcgtggtgcagtggctggtgacgcaggccggcccgccgctggaggtggaggggcggcagtactaccacctgccgccgggcccgcagctgccggtgctggtggccacgcgcatgagcctgagcttcccgctgctgatcagcgcagtgccgctgcacgaaccctcgcggcgcgagcgtcgctgcgaaccgactgcaccggcggccgaccccgagcacaacgtggccgacagcatggaagggctgaccagcgccggacaggcttgcggtccggtgatcaccgccttccgcatctgctggttctccgacggtggcatcagcagcaacttcccgatccatctgttcgacgccgcattgccacgctggccgaccttcgccatcaatctggtctacccgcagcacgccgaagaggtgaatcacggcagcagtggccgccagtcgctggaacacgcggtgtttctgcccaccgaaaaccgacacggctggcagcgcacctaccagtcgatcgccacaccgctggcggccgccgagctgggccgcttcctgttcgcggtggtggcgaccatgcagaactggcgcgatctgctgcaggcgcgcgcgccgggctaccgcgaccgcatcgtgcacgtcagcctgcagggcgacgaaggtggcatgaatctggacatgccgcaggaggtgctgacccgcatcgctgacaagggcagcctggccggtgcgcgcttctgttcgttctcgttcgagaaccactactggatccgctggcgcaacctggcgtcggcctatcagcgttacacgctggaagtggcgcgaaccgacgacccggcgcagcaggtgctggcctaccgcgcggcgtacgcgatggttgcccgcggtgaaccgtctccgccctcgtacaagctgggctcggaagacaagcggctggcctcgcagcagctgtgggggttgatggtcgagcagggccgcagctgggaggacctcggccccgacctcactgacggtgcaccacgcccgctgccgcagatgaaggtcacgccgatctactga

SEQ ID NO: 512040 - DNA, 759 bp, Stenotrophomonas maltophilia
atggggagacgggcaagccgccgatggatcgaatgggcttggggcgcgtggttattcgtcctggccccgttttcgttggccgcctctgacctctcgccgttgcgcgcccagtttcaactccccgatgatcgtgtcgattacaccgcctccaagttggaggtggaccgaatcatcgacccgtccaccgacaccgcggccgtgcgccggcaactcgaccaatgggaacgcgctgtgcgcggcaacgtgcccgccaacccgacggcgcgccaggttctcgacgccttgctcaagacgctctacgtgccgggcgagtggaaccaaggcaagcctttcacctacgacctgtcggacccgctgggcaagaacccgaagaacaagcagttggccacctacttggcctcgcgcaagggcaactgcgtttcaatgcccattctctttgcaatcctgggccagaggctgggcttgcctatcgcgttggccaccgcgcccaaccatgtgctcgtgaagttcgccgacgacgagcagcaggcgtgggtgaacgtggaggccaccgccggaggcttcaaatgggattccagctacgaacgcgaaacaggcatcaccgagcaggcgatggataacgggctttacctgcgtccgctgctgccccacgaggccatgggcgtcatcgccagttcgttgatggagcactacggcgccaaaaaaagatgccgaatcattgatggcggtggccgacttggcgctggcagcaaaccctaa

SEQ ID NO: 512041 - DNA, 285 bp, Stenotrophomonas maltophilia
atggcggtggccgacttggcgctggcagcaaaccctaaagactcggtggcgatgatttggaaggcgaacgcctactatctccagattcagcagcgctacaaagcgaagtatcccaacccggcggacgtgcctcctgagcttcacgaggattaccgccgcttgagcaacgagaacctggcgtggttcgccaaggccgaatccctcggctggacgcaaaaaacgccggagcaggaagccagctacctacaatccatccagcgtgaacgcgcgaaaagggagcagtga

SEQ ID NO: 512042 - DNA, 756 bp, Stenotrophomonas maltophilia
atgcgcattaccattccaggactgttgaccgtggcgctgtgcgccatcgccttcaacgcgtcggcgcggttcgtttcaacagaccccgtccaggccgacccgaatacgggcgccaactacaaccgctactggtatgggaacaacaatccctaccgcttcaccgacccagacggacgcttgtcgcgcggcaccggctggacggacaagcagtggaagcagttcgaccgcgcccagcagagcgccgccggcagcttggagaaggcggcgggcaagatcaacggcgcactgaccgaagggggcaaggcacttcagcgcgccgagaagtcgtttgaacgcaacttcggcgccggtactgccacaccggagaatatggccaaggccgcagccgacatgggctcgatggccgcagccctccgcgacactggctccggtgcaattcctgcgaatgcgatgactggccaggctctggctgcggcttaccctagcgtcggtgctgacactttggctggtgtgccgacatccggacccgcgcaggtgttggtgaacatttctcaccccggcttcaacagcccgtccacgcttgcttggggcgctggtcacgaaaccggacatgcggtgctgggctacaaggatcagcggatgaacggtattccggcctacaagttcggtacgccgcagcagcaggaaatcttcaagacgctgccagggcagcagcgattgattaaccccgatcacttgatggatcaggcgcggtga

SEQ ID NO: 512043 - DNA, 432 bp, Stenotrophomonas maltophilia
gtgaatcgcggcctgtctctgctgacattggcggcgctcaccgcttgcgcgtcgtcggcatccatccgctgggcgccgcctaccgacttcgccttggagatagcggacaacccaacccagcaacacttcgtcctcaccctgacttctaaggcggccgaaccgctgtgtctgtccaaggaagcctggccggccgaagccggtctgccactgggtttcgacggcgcaacactcaacacatctaccggtccccaggaactgctagccacgggtagtgcgtattgccctggtggatgcggcgaagtgcgtgtggagtcaggccaatccgtgcgcggcgtcctgccttacgcagccttcggcgacgctgcggccattgctgctgattccacgcgctcgctgtcatttgagattcacccgtacatctgtagcaggtag

SEQ ID NO: 512044 - DNA, 279 bp, Stenotrophomonas maltophilia
atgcagcgcagcatcatctgtccccactgccacaccgcctccaaccacggcgtaagtgtctgcgtgggatgccaggccgaagtccactatggcgcatcccgggaagcgtacgcggttgtctttgtcgccgcccttgtctgcggcgcattcgtcggcagccacctgcaggccactgccggctggatcagcggcggcgtcgtacttgtggcaggaatgtgggcgatggcccagctgttccgtgatcgcgtggtgttcaagcgcgtgtatcgcacccgctag

SEQ ID NO: 512045 - DNA, 1410 bp, Stenotrophomonas maltophilia
gtgagcaaagagaagaaggtcgtaaagaagggccgaatcaagtcgttttccggtgccctgccccctgggatcaagccctctcaggccgtgagcctcgctgctggcgtgaccctccggaccgatggtcaactgcgctgggaggcccgaatcaggcgctccctggacggccaggccctcaaattccccctcaaacgctacccagtcgatcccaaggccaaggccgggaccgagcaccacatcgatacggcaaggctcatggccgaagcctacgtgagccgtgaacacgcctccctcgagctccggcagacccctttcgccaacacggccgacgcctggacgtttggagacctcctgcggcgctatgtggatgagatcgattcgggtgtgatcaaacactcttctgtgaagactgaccggtcgaacatcatgttgtttttgggcaccggcaagggcttggggctgcataaaacaggcatgccgctccttaccagcaagctcgccaaggacctcacgagtgacgatttcctaggcaagcacccgacctccttcgtcaatctctacgtcaaagtcctgaaagacgggtccgttcgcgaaattgtgccagggagcaagaagcgcgccttgactacaattcaaacgatctttaagcatgcttatgacgcttggaagatcgatatccgctcacccattgccacactcaaatccctgaaccaagacgattcgcgatccaggacactcacagaagacgagtggaactcgatcattgatcgcttggaaaaaggacgcacagatccggcaaccattgatgtcatccgtttcgcccgctttactgcggcccgacgctcagagtgcatcaagcttgattggtcagacatcaactttaaaaacaagaccgcacgactgcgaggaacaaaggccaatgatggcaaatatgttgaacggacaattccgctcaacaaagatgcactgagccttttggaagaacggcataagtcgtcctcagaaagaagaggtccggtctttgtatcgagtcgtggcaaaaggtcccggcctgacacgatcacacaggcttgggaccgggcacgttcggacgtcgcaactagccaagacaaccccgacatcttgaccgcgcgaattcacgatcttcgccatacccgcatcaccgaacttggccactatctcaacccagcagaagcggccaaaatttcgggccacaaagacttgaaaatgttcatgcgctacttcaatcccgatcccgtagaactcgggaagaagatcgatgagctcgaaagccggggagatgttgagaccagcatccaggaagtagttcgatccctgcttcttttgagcagtgaagatatgactgccgctatctctctcgccttcaatgcccgcatgaagagcaaatag

SEQ ID NO: 512046 - DNA, 894 bp, Stenotrophomonas maltophilia
atgcgcaaactgctttttagcttactcatactccttgcaccaacaactgcccttgctgctcaagaaccttattggtcaaaactcacttcaacgaatttcatggtgagcccgagcactgcccatgtccgaatttttgatcagggttcaagtggcatcatcttcggatcctcgtcaccattgttctatggagaaatcgtatccgatagcaactcgaacccagccgaaacactgaaacctaccaagaagccacgtggacggatctatcgccttttccatcccggccaagaacgaatttggaaaggcattcatcctgatctcagagaaaagatcgaagcaattcaggaggtgatggaagcggaagggtttgatctacgtcccctagaaggttacagaagccccgaacgccaagccgtcctcctcgcctcagcatcaggagtcaccagtgttggagcctggtcaagctgccacaactatggcttagccctggatgccgccatctatgtcaatggaaagccgagctggaatttgggcgatccacacgtcattgcgggatatcagcggttcggcgagctggctgaaattcttggcttgaattggggcggccggtggacttcacccaaagactacccccatgttgaaatgaaaactgagtgtggtcagtctaagtgggcgagacgacatgggcaaaccctacccaatttcgtcgcgagcgctggcgaaccatcatccttgattcttgaacgagcattggtatcaacctggtgcccaatgggcttggaagccacctgcatcgctatgggtaaagaaagattttctttgtggggctggactgttcaaagccaaaacagggcatgcacagcacgatccaacctctacatctacgctttttcctaa

SEQ ID NO: 512047 - DNA, 627 bp, Stenotrophomonas maltophilia
atgaaataccttctgttaagcgcagcactagcgctatgtccatttgcgtcaaatgcaatgcaagtttcgcccctggcccaaacgattagcccagaaaagaacaatggctcgttgactgtcgtcaacacctcgaatgagagaaaggagtatcagcttcaagcattcaagtggaccctggttgacggaaagcagattcgcacaccaattgatgcgatccgtttcgctccgagctccttctatctcgaagcaggcaaatctcaagtggtccgcttcatcaaaaccgagacatccagcagtgagcttgcttatcgcgtcgtcgtgaaagaaaagaacgtcaagaagctggagacgactggggttgaacccgtcttcaacatgaacttccctattttttggcgtgcatctgatcgagccacggtcaccgcaaaggcttccggttcaaccattgttcttcgcaattcaagcgcgattactgcgcaaatcgccaacatcgattacgggacgtatcgtaaggacggcctcgtcggctatctgctccctggggaggagatggtgatctccaagggcaacgcgacatcggtcaaggctttgatcaatggcgttgccgctgagatcgtgattgagtaa

SEQ ID NO: 512048 - DNA, 2160 bp, Stenotrophomonas maltophilia
atggcctggcgcgcctttgcgctagcccctctcctttggtgttcaagttcatatggtgccgagagcatctatgccattgcgatcaacggcaaaagcgtcgatgaggcacttctagcaaccacaacagatgacggcgatttgctcgtcccatctgccaagctcaaaagctacggcttaatcggcgacttcgcctctatccagagcatgaaagccctcggtgtcggggtggaagtgaacggtgagaagcagctcgtcgctctcacagtgcctggcaaatatttcaagcctcaggtcgtgggatcagcggacgcgcttgtagaagcagaccccgcaccgaagggcatcttgatcaaccaagatctcgccgtcatccgctcatacagaggcgactgggcagcatcttggggttacgacatgcgaacgggtcttgcaggtggtgtgctaatcaacacggggcaattaaacgttcaacctggtggttcttccaacacacgggggatcacgacatggaccaaggactacatcaggaagggactctcggtggagatcggggatgtctttacgccctcgcttggcatcacgtccacgtcgaatttgctgggcttcaaagtcggtacggagcgcgagctcactggagacctctaccccgtcccggtcatcgccggcattgccgatagccggacaactgcggagatctatctcaacaatgagcggcaacgccagctcaacctggaccaagggccctactccattcagcagggatccatgctcaatggcttgaactcgtcgtctgtggtgctgaaagaccaattcggacgcgagcagatcattcagagtgacttctattttaccaaccgtgccctacgcccaagggcatcagaatgggctgtgactggcggccttagccgcttcggagccattggcaacgactatcgggatcttgcactttcaggcttctaccgcaggggcctaagccctttctttacgctcggttcctctgcacaaataatggggcagaacgcgaacctgggcctggatgcaactgtcgttctagggaccgctggtgtcctcactctaagcagtctggcaagccactcagatgggcaaaacgccctttcctacttggctggatacagcttccagacccgtaactggtcggtcaatgctcagacccagaagcgttccacggacagctggcagctcagtgaccaatggcgcggcggatctgtcatcaccaaaagcaacttggcgagcatcgcctacacccatcgcccgatccaatttggattgtcctggtcttcgaacacctactcaacgggggctcagaacgagcgcctgagcgtcaccggacgctactccggtgccaagagcaccctgagcgctcagctctatcgagaccgcgatgagagcggcttctatgtgttctacacccgtcaatttggcacccggcaccgagggagcgtctctttcagtgatgaccacaggagtctggcaatcaatggcagagccggaaagatcaattatggattggggacatctgacacgggctcttacgccaatgccgggctcgacacccgctcagggcgcttccaagcacagtccacgatgcgcgatggtcaaacgagcctgtcaggccggtatgaaggctcagtctggctgggcgaaggtggcgcacttgtcggccgcactctcaatcgctcctttgctctcgtcgaagttgctgacacctctaacgccaagctcaacgccaacgggtcaagacaagtcacgaataagcgtggatacgcattgttccccctgtccgcatatcgaacatcgaacgttggtctagacgtaaggtccctgcccctcgatgcccaggtcaacgagcgcacacagacagcgacgccgccacggttgttcggaagcaaagtgaccttcccaatctcttacaccaaaccgctagaactgcgagcaattttccaaggggaaattgtgcgcggatcgggggtcgcggtcgcagacgacttggaacttccaatcgctgatgacggccgaatattccttccaaattatcacccaagcggaaccatctccatcaagaccgacatcgtcacttgcagtggtgtcctccccatagatcggagcgaaaaacatcttgaagaaattgagtgcgaatga

SEQ ID NO: 512049 - DNA, 519 bp, Stenotrophomonas maltophilia
atgttaaaaaataaaatcactgtcgcaaccggcttagcgtttggattagcgatggcagctgcaaatccggcttttgctgcaaccgacacgcagacaatgaacgtcactgccgttcaagcagcaatctgcactatggctatcccgcaggatgttttcatgcagctcggcgataaagacgagggaagcgtcctggtcgcgctctccgcgatccaggatctgactgtcacctgcaacaaagacctcccctacaccgttgaaatggatacggccgacgcgtccggcaactttgtgatgactgacgccgccacatccaaagagatcaaagcccgggcaagctttggcttgacgggcccatcaaactggcaaccctttagcacgactgcaaacaacgccgcattgagctccgttgggactggcgcagaacaagtgtttagcactcgcatcactgtcaacacggacgcgacatatgcagctgttggcacttacacagcagaacgtcaaatcacgatctcttactaa

SEQ ID NO: 512050 - DNA, 2058 bp, Stenotrophomonas maltophilia
atgaaggccttccgaaaactctcactcgcactgtcgttcgcgcttgcggccatcgcacatccggctatggctgacaccacgggcgatcagatgatcatcaaagggtcccagaacgccacttgtcgggacaacggtgtggtcggctgccttgtccttggcaacggcgcttcggcctggttaacgaccgggggcgtcacagacaactccatcgacgccaacccaatcggaacggccactgtcgttgggaatcgggctaccaatacagacggcggcgttgcctttggcgatacggcctcatctgcctggggcggttcggcaatcggcaatttttctgtcgctagtcagcaagcggtagctctcggatatcgtgcttatgcggggacgattgccagcatcgctatcggatctggtgcggtcgcaaacggcagcatgtttggttctgcaatcgcaattggcggtcaagctactggcgctcgaacaatcgccataggcggcgaagcatcctcccagaacgccgtgtctttgggacatggttcgacagatggcggggccaacaccgtttctgtcggtgacagcagcttgcgtcgccgcattgtcaatgttgcagctggtcaggccgcaaatgacgcggtgatcctgagtcagattgccccgcttgcagcttctttgggcggtggagcgagcttcacgaacggtgctttcaccgctccaagctacgctctttcgaccggcacttatacaactgtcggagctgccttgaccgccctggacaacaagccaagcagtggatcggcctcaccatatttcaaggcgacatcccctgtctctgatggttcagacaccacacaagccacaggtcagtcggtcgtagcagcaggtcccggggccaaggcaaccggcacatacaacacggtgattggcgctgacagcggcgcatcgctctacgggtcaacggtcatcggcagtctcagttcagcgggtgattccgccttcgcaggtggacatcaaaccgttgctggcgactcgtcggtggctttgggtgcttacgcaacggccggccaggactgtattgccattggctacggtgcatcgtgcactgagttaatgaccgcgagctttggcagtgcggctggtcagcccgttcgcttgacgaacatcgcgagcggccaggatgagactgacgcggtcaacatgggtcagctcaacagcgtttccattcaagtcaccaacacccaaaacgctctctcttcgaccaccagctatttgggtggcggtgccaattacaacgcggtcacgaacaccattgtcgccccgagctacgacttcctgagcggtgcgagctacaacacggttggcgatgcgctggcagacctggatggtcgagtgacaggcttggagaacgcgccaggcggtggtggatccagcacacctggaccacagggtccccagggagagaaaggtgaggcaggagcgcaaggagacaaaggagaacccggccaagatgggaaaaacggctcggccaacgtggcagctggcaagaacatcgaagttcagacccaggcagatgggagcacttctgtgagcctctcaaatcacgtcgagctgagcgaagaaggatcgatcaaggtagccaagaccatcatcaatggtgagggaatcaatgccggtggaaaccgggtaaccggagtgggcaacggctcgatctcccaaggatcaacagacgcagtcaatggcggtcagctctatgacatgcagcagcagtggtcagatcgttgggaagacaccacgcggcgcgttggcaacctggaacgtgagatcaagatccagggagctcagtccgcagcatttgcaagcatgatgggtgcacaaacttctggtgtgatcggcgaagtgcatgcgacagcgggtgtgggcttctatggcaacaaagctgctgtggctgtcggttggaaggcccgtgtgagtgacagggtcaacttgtcggcaggcttctccaaaggaatgggtggcggatccatgcagggtggtattggcatctcagtcaacctcggccgctaa

SEQ ID NO: 512051 - DNA, 447 bp, Stenotrophomonas maltophilia
atgtcaagcgacaatagggcaatagcagaggcattggtgcaagctgcatttggtatcagctcgtttgcatatcacggagcaaatttcagcaccaagcttgtggaggcacacttcttccacgagatgtatgaaatacatcacgaagccggcgaactagatcgacatcctgaggtcaagcagtatcttgaaatttacccgcttgaattcgttgcgcagaaggcaattgccgctcaacgggactaccaatacttcatgggcagggcaaggttctttgaactcttaaaagagcagaacccagacgaccagctttacattcgtcgatctgcaatttacagcatccattgcgttctgatgacacgtgattttggcgacttctacgatagccttggttcagggtgtagcggtctgaccaaggaagcagaagccttcgttgagtcaggtgcttag

SEQ ID NO: 512052 - DNA, 198 bp, Stenotrophomonas maltophilia
atggatgacaaggcgggactcgctgtctttgatgagcttaagcaagtcgtcatcgagagctatgtcaatgccggcgtcaacatcaggccccaagatgaaggctacttcgtcaacgcgccttttacggctgagaccatgcccaatggggaggcagacatgctgatcgtgcgtgcacgacaggctcttgggctgctgtaa

SEQ ID NO: 512053 - DNA, 186 bp, Stenotrophomonas maltophilia
atgttgatgctggttttcagcatcatgatgaaaatttgggattccatcccagagaagcagcgggaaagaataatcgcaactatagtcgagagctttacgaaaacattcgaggcattctttgacaagttccacgcatgggttaaaagcgacagcgccgatactgcttcggagatgactcatgaatga

SEQ ID NO: 512054 - DNA, 507 bp, Stenotrophomonas maltophilia
atgagccttcttaccaagttctccaacatcttgagccagcaaaacaaacaagctgtggatcatggactcaatagcattcatggtgaccaggtcgcccaccaagccgaccgagcacgagagtatcgaggacaggcacgcactgcacagttcgagaacgtgcagcttgggatcaatctgggcaacgcaacgagcgagcttgaagtcacgaagaaggcgctcttgaagtccaagtgcgagactgctcggatgcaggggttcgttgagaactacgcagcgacgatgagtgtcatgaaggacgtcattgaagaccttcgtcgcgatgagtcccaattccgtgggcttgatgacaaggcttttgccgaaatgctcaacgacgcggtcgaaaaagtgcgaacttcacctgacggaaagcaactcgggaagcatcgtgtcagtcattttgtggaaggctgtgagttcacaaatcctgatggtggctttatttttgaatatcctcatttcatctaa

SEQ ID NO: 512055 - DNA, 2823 bp, Stenotrophomonas maltophilia
ttgattggaattacaggaatcactgcacagggcaggaacaaagacggcaaggcagtcgttgaatacctgctcgctaccgaaggcctaattcgctactacaacggcgaggttcaagaggtctcggcgtcatattggggcggtaagctcgcgcatgaaatgaagcttgctggcattgcagtagatggcaagcacatgctttcgctgtgcgacggatttcatcctttcactcatgagtcgctttgccagaacgctggcgaaaagccagtcctaaagccaaagttcgatgcgaagggtgctccgctcctggacgaagatggcaaccaggtcatgatcgaacaaggcggccatcgagtgggatacgagctaactttcagcgctcccaagtcgctctcaactgtctacgccttgggtgatcaagaagagcgagagaagatctcggaggttcaaaggttggccgttgaaaaggcatttgcttttatcgagagcaaggttgaaacacgaagggatcacgccggcaagactgttatcgaagttgagggcttgatcgggtcctttcaccagcatctcagttcgagaaatttggaccctcaagtccacacgcacgtcctgatctatgccgttgcgaagggggtcgatgggaagtggggcacatatgacagccacgagatcttcgcccatcgtaaagctgccgatgagatctacaagaacgaactggcagcaggcctcaaagcgcttggctacgccatcgaacagcatgttgaagtcaatgcactcggtgagaagacgggtgttcgcacatgggaaatccctggcacagaacggctttcaaagctctggtcaagtcgtcgcgaagacatcttgaagcatcaggaggagaacggtgggacgatgcagcaagcctctcttgctacacgcaagcacaaggatgaacccacctttcttgagctggttgaagcctggaaacaggatgctattgagttgaagaagcagcaccccgagcttctgacaaccgttgctgagatcaaaaagcaggagatcacgactgaattcgtccctgttactgacgaagagatcttggagcttctccacgagaatgaagcaatctttgatgaaaaggagcttcgctatcggttaggccaagccaattctgggatgatcgactccatccagctggacgtcatggtgtcggacttcatacagcgcaacaatcttgtgcgtgtctgccctgagcgaatccacacggacgacatgggctcaaccttagctcgccggcatacagagcagcgctttgcagcaccctggatggtgtcgatggagcaggagatcctccataagactttgagtcgcgagggcgagatctcccagcacatgccgctcgataagcttaacgacgccatccaagccttcgaagccgcaaaaggcttccagatcagtccagagcagcgtgaggcagttgagcacctcaccatcaatacagggggcgtgggcgtgctctccgggcttgctggaacaggaaagacaacagtgagccagatctatgcagaggccttcaaagccgatgggcgcaccgtgcttggagcctgtgtttcgaacgaggcggccgaaaagcttcaccaggaatcgggccttgtgtgcactagcgttgccaagctgatcagtgatttgggcaagtccaagctcaaactgacggataagcacgtcgtcgtcctggacgaggcaggaatggtggacagccgccagactcgggacctgatggcctattgccaaaaagcaggagcaaagctcatcttgcagggtgaccaggagcaaatccaaccggtgggtgcgggctcgggcatgtccattgcaaaagaggccattggcgacgcaaagctcacggagatccgccgtcagaagaacgcacaggaccgacatacagcagggcttttctacaactacggcgctgatggcaaggtccgaaacgcagacaaagtgcagtcacgcggtgacatcattgagaagagcaagaagatctttcaagcgcttgcagacaacggccaggtagacgagtgggcaactgctgagcaagccaaaaaggcttgtatcaaagcctatttcaacagttctgcacctacccaagagcgtctcattcttgctcactcgaacgaagatatgcaggatctcaatcgacgggttcggcaggaattgaaggcacgtggtcaggtagacaaagaggactgcacgttccgatctattggcaaaaataaggtgtttcgtgaccttgcgttgagccggggtgatcaggtcatcttcaacgtcaaagacgaggaacttggagtgatcaacggaacgaaaggcacggtgaagagcatcaagcggggcagtgctggcggggtgagccttggcattgagatcgagcgcaacggggtcacgaagacgatccgctttgattcgcatgaatacagtgctcttgatctgtcctactgctcgacgatccacaaggcccaagggcaaggaaagaccgatatcttccatctgggccactccgggatgaccgacaaccaaagcgccctggtggcttttacccggctgacgaaaggcagctacaccctgtttgccgactcgatgagcctcgaccagatcaagggaaagcttgggcagcagcggctcaaagagaacgccatcgcggtgaaaaagcccatgcgggcgaagcagccggacctgaaaaacgagtttgagcagctgggtcagcagctggggcaaaaattgaaggtcaattccgatttcgtggcacgtttgaccgctcgtcggaaaagacaagcccgggtggcactaacacgttga

SEQ ID NO: 512056 - DNA, 1377 bp, Stenotrophomonas maltophilia
atggctaggatgagcttgaagctccacccagagttgcatctacctaagtctcactggtcacgacacactctgattcaggggagtgtgggatcaggtaagactcagatcttgcttccgatcatcaagcagatgatcgaggccgaccacaagctctttctctatgacacgaagggcgacttcacgagctacttcaagaagccgatcattgtttgtcccttcgatgagcgatcgtattattgggacatagcggctgactgccgctatccactgcaagccgcaatgcttgccgagatcctcatccctgggagccctgatcaaaaaaatggtgatttctggtcgatggcagcaaggcagctacttgtcgccgctatccgatccctacaagtggaaaagcccgacgtgtggacatgggccgatctggcattgctcaaaaaccagtcggcggcggccatgcttcccatgatccaggagcactttgattctgcgagtagcttggtagagaacacggagagtcagaccacagcctcattgctgtctacgcttgttgctcaaacgaagatgatcgatgacatggccatggcctggcccgtgcgcaaagagaatcgccgctttgccatcacggagtgggctcaggatggctataaaggacgcaagcaagtcatagtgcaaagcgggccagaggaggccatgacgaaggcttacatcagtgccctggtcaaccttgccgtccctgaaatcatctcgcccaagctcccagatgcggagaaggatcgcttcatcggtttcgtgttcgatgagttggcatcggctggcaagatcaacatcggtccattgattgacaaaggccgaagcaaaggagtggtcttcatagggtgctatcagaacatcgcccaagtagcccaggtctacggcgataaattcgccgaaacgatgtcctctatggtcggcgcgcacgtgatctgccagttgcagatgggcgacacgagagacaaggctgctcagcagctagggaagcatcgtgttgcgtatcggacgcatgatgagaaggccacagtgcacgaagagagcagggcgctgatcagcccgggcgagcttacagaccgccttggcccgcgcaaaggcaagcaatacggcccgcataattttggagtgagggcaattgtccaaatgggtggagacccactccttctcgacttcccaggtgtcgtcatgaaaaccaagcgcccaggtcaagttccagctcgatggatgactcaacctcaccagcgcaacactttggcgcttcttgcacctacccaagtcgatgcagctcccagtgctccgcttaagcgtgtcgggatgacgaaagaagagatcgatcagttcttccgggagtga

SEQ ID NO: 512057 - DNA, 507 bp, Stenotrophomonas maltophilia
atgacaagttttgcagaagcacaaaagaggcgcaacgagttctaccagaacaatcctggtccacaggccacaatgactgatcaggtcaagtcatttaagcaagaagagcacaagatcacttcacaagcgggcgatgctctgaaaactgaactcacttcactgtctaagagttcggatcctgagttattgaaatcaacggttagccaggttgaattccaaagcaagctgtcggtctatcgctctgaccaaattgaagaaatcatacatgcgcaaacgcagaacgcggagcgcgtgtcacgcagtcagaacaacgacggctatcagaagcagttcatcaacagagatggcattgacgaagagaagcaacacgaagagaaattcaatgcattcatgcgtgagaagggacgcgttcctgtcgagggcgagatggacaagttcaccgccaagccaacgctgactcagtcagataagccctgggagcaaaagtctaaaaaacagtccatgtaa

SEQ ID NO: 512058 - DNA, 1842 bp, Stenotrophomonas maltophilia
atgatgaagaagcagtggatcgcccaggcattgcgtgcgcttaacgataagtcgccgctcatcccactgggaaaagccactggcttcttgttcaacaagatgtatcgttttgcgccagtcccaggaaaaatgcttgtggcttctctaaaggacacctctcagcacatcctggtgatcggcaagtctggtggcggcaagaccttctggcttcgaaagatcatggccttggtgaagttgacgaaatgggccggggccattgtgggtgacggaaaaaacgtgctcgttcgagaagtaatgagcttgatggatatcgtgattgagcctggcatcaacctatctctaagccaaggaatgaacgctcaacagttggtccaagcgttcagagagttgaagcgcaaaggcaaaatgtcggaggacgagagcagcttctggacaagcatgggtttcatcgtcttagagcacgttgccatgattgttgaagcggcatgcgaagctgagaagtttgttcgcacaaacacggcactattgatctcagacgaagaacagcaattgatcaagttcactgcaattgagcaacttgcggagttggaagatgatcaagagcgattaaagcatgcaagaaatgcgattgctgagaccaatgcaaatatccgcaagttggaagcatctttgaaacagccgcgctcgtgttattggacaattggtcagatccagcgcttcttaaacgtggtcaatcagatcaagcaaacggaaaaaggtttcgagctccacgaagagttccggggcgcgttcgacttcattgaaaaatctggctatctaaatgtggcggatgcagccaaccagatcaaagggtcagtctcgtatttcgcaaacacctgggcagtgatggcacctgaaacccgcaccagcatcacttcgaacatcgacaacgccttgaacgacgtcttccgtgggcgacatctcaaaaacgcggatggagttctgtgggccgacaccgagacaggcatcgacttccaaggtgtattgaccgaaaagctctggatcggtgtcaacttgccaaccatggtccatggcgtgggtggacagatcacagcggacatcgtgcggatgcgcgtttacaacctgatcaaaaatcgccctgtcaattgggctgaccttgaagggcacaaccctgtcttcaacttcatcgatgaggctcagtctgtgatcggtgaagcggagcgtgacttgatcgcaatggcgcgaagcttgggttgctacttcgttttcttgactcagaacatcagctcgttccttgcgaatttcagcgagcatggtgcacacaacttgtttgagctctttgctaccaaggttcttatgcagaacgagagttctcatagcacctacaagtatttccaagaaatgctgggcaaagctaggctcacgccctacaagaccgcgtcagtggggatcaacaaccaggctatgctccagcgctacgccaatagcgccctggtcgatcccgaacatcccgatgctgtcttcatgcagaagttgagagagaaaggagtcggcgcgatacagaactcctatgtccactccgctccccggcaaatcgatgttaaggatgcggcccaccgctttgaagacgttgcacgaatcaagaacttcgatcttgaaacagtgcagggcactgagttgtcctgggtgatggacgatgacgactttgccaacacgctgttccagggccaggcattgatcgtcgtgtcgcgcgccggttcgacgcgaacagagatctgtgaggtcggaggactagaggcagatcaagtggaggatttcatgagagagaacagtagggcctga

SEQ ID NO: 512059 - DNA, 138 bp, Stenotrophomonas maltophilia
ttgaatcgccccatatgcttctacaatggcctgatcttcttcattgacatctaccaggatgttgcttgggactttaacgaagtcatcgaatgcgccgaccacttcatgaatttcttcattggtgcgctcttgtattga

SEQ ID NO: 512060 - DNA, 816 bp, Stenotrophomonas maltophilia
atgagtatcagtgattacgagcgaagaaaattattggaaaaagctgcaaagcttaaagctgaaaaagaagatgggtcatcttttccaactcctctaaacttgcagcaagttcaagatcggaagatggatcagcgcttggaaaagacccaggtcgcggccaaggcaactgcacaagccacgagcggatttgccaaagagcttgcggccaagactgccaagcttgctcaggaacaagcgcagcgtgccaaagcaaaggcagatgcttggaggcaagcacaagatgcgaagcgaacagagcacgaagaggttaatcggatccaggatgctgagcttgatcgggaagagcaaaacccgatcattgaaagctcacgtgatgccatccctaaatcgcaatcgaagctcaccgtcaaagtcctggcttccgtagcggtcatggcttctctttcagtagcaggtgcatggctctgggctcaacacgacagcaaagaggctactgagaagcaccaggtcacaacgacgccacagctaccaacctcagcacctcaggtccaggaagcgcccaaagctcctgagcccgtccaggtcatagagcctgtgcatgagatgtctgtgacgcccagtgtcgaggagcagccaaagtcggttgaaccgaagcttcagaaggtagaccgatcacctgcacccattgcggttgttcgcgcacccaaagagcgatcagcgatgcgacaacaagttgaacaacccaaggaaaagcggagtgattgggtagacaaagctaacaatgatctcgatcacttcgcagagcaattaaagtag

SEQ ID NO: 512061 - DNA, 612 bp, Stenotrophomonas maltophilia
atgagcaaactaaaattaacgatgatcgcaatgcttgctgcctcgctcactggatgcgccaccatcgaccaacttgccggtggaagcgcatctccggttagcaaaggcacagtcgcgaaaggtgcaggaattggctgtgcagctggtggtgcactcggggccatctttgcaggcaaggacggtgcgttgaaaggatgcgctgcgggtggattgattggcgggggctttgcttacaagcaagagctcgcacgagcacgggaagcagctgatgccgctcgcttggcaggcatgaaagcaacggtggatgtgaagtctgagatctccgccgatgggaaggccacggaaaaattccaaggcttagtgatcgagtatgaccccgaatcggtggtcaagccggacgaaaagaccaaagccttcttcgacaagttcagcaagatcttgaagtcttctaagaacgaactgacggtccgcactgagggtggagcggggtgcttagcagtcgtcggcgagttgaacggccgaggtgctttgacaaatcacaagctcgacaaccagtgcggcaaagttccgactcaccgcatcttagtctccccgctgccggagctgaaataa

SEQ ID NO: 512062 - DNA, 192 bp, Stenotrophomonas maltophilia
atgaacgaggcatccgagcggcacatcgaacgaagcactgatctgactaaggcctttgttcgcaatctttcagatgcattgaacggtgagccgatccaagaaaaagcgatgccggcagtgaggtcgagccgagaaatattgaatgggatgcagagtcaaggcgtcaccaaaactaacaacaaccctaactaa

SEQ ID NO: 512063 - DNA, 1077 bp, Stenotrophomonas maltophilia
atggagacagcagacggtattgggattgagcaagtgaacgaagcgaagcaaagttcgcttgatgatccgattgcgaatttcagccaagccatctctgaacgatcggctcgccaatcgttccatctgccggcaaagcttcgtgagcagttgaaatcaatgcagacctgttgcccgatctgcgcgtgtgacttctcccagcaatcatctatcgtcgttgctcagatcgttcccattgagcacggcggcccggatgacttctcgaactgctttctgtgctgtgagcgctgcaatcgaagacgcagcacttcagatttgctcagcatgggcgatgcgttctgcagcccaaccgctgccccacgccttccaccacacggacgcgccatgggcttttccccaacagacctggtgcagcgccgtctggagttgctggcgcgctctgccaatcactggacgccccacacccgaaattcgatgaagaacacagtgttgaagcacctgaccaagcgttgggctgagccgcgctttcgtgtcttcgcacaccactcttctgacctggccctgatcggcttcggggcgcgctcaggtgacgctcagagcttgggtgtcgccaaggtgctgatcaagtttcaaggtgccagcgcggcgatgatggacgatgatgtgagcgtctaccaggtagatccagggaccttcctaaccttgatttggtcactgatcgagctcaacgccttgatggtgccagtgcgagtcccaggcaaaggcgcactggctcctggtagcgagtggcaagacttctggccggaccatgtgcgttcagtcgctacactcagatcccgcttgaggcctgatcatcccagtaatttcggtgagctcgcccgctgccctgacgcaagacgggtgctatctaacaagcctgacgcactgcggaagcgtcggaacagtgccgcgcgggtggagcgaaaccgcagccagcggctcgccctccatcaccaaaagcggctcaaggatgctctccaagacggcgctttcgccgtcttggaggctcggctggcatcacttcacgaccttaagacttga

SEQ ID NO: 512064 - DNA, 759 bp, Stenotrophomonas maltophilia
atgaatgatttgctcccggggcttgatttttccggctacatccaagacagggccgagatctgcaacaggattaggagaggctttgatgaaattgaagatgcgataaaaatggccagggatggcaagctttttgatcgtccattgcacgaaggcgagcgatatttcaagcgcgctgagagcgcactgatcgacacggttgatcgatcagcatggcgctacttcatggaacaaagtggactttggacgtttcttaatgatgcaaggcgcgataaatggacgcgagggttgggtgggtatgatccagttcctgagttcagttcagataatgtagaggctacttttcgccaatactatgaatcaagagcggaaatgcgagacgaaggattaagggatatttatttggagcttagtcgtgatcataagtgcaatgaccatcactatctcgcggaaaagtgcattgttaagttgtctgactggactggtggctttgatcaatcaagtgtcaatgttatcgatgacttggcaagagtcatgtgctcacttgatgggaagccggagttcgatcatcgaatcactacattcaggatgcttaatctgaattgctgggaggacgcgccttggaatgattatttctcattgaagatcttcaaaaacaagaacggacatatcaagtttaagcggctggatctattggaaaggttgaatagtgagattgggagggtcttctccaatgcactgccttccgaaatcaagtcttaa

SEQ ID NO: 512065 - DNA, 324 bp, Stenotrophomonas maltophilia
atgagctacatcaatttgagtgaacttgattcaaccggcaggaataacattctgatggacgtggagcttgcacacgtggtccagaattattcttatggagacgatattcagttggagtattcgcaggttttcatcattgtcagtatgaaagctcttgagcagcttcgatgcacatcggatgagagtgcggacctttcattttccttctatacccaaattgggactgcacttgtgaaaatcaatgtgacggtagttgataacgatgcttttggggagtcgatgaccatgactatcgagttggaggaggtcatgtatgttgagtaa

SEQ ID NO: 512066 - DNA, 1404 bp, Stenotrophomonas maltophilia
atgtatagaaatgctgcggaaattgccgccttaaatgcgaagcaagtctgtgcggactgcctttatgagacctatttggttgcgcagtttccagtcgatccgcacggccgtcgcttgaattgcgactactgtggtgaactgatgatgacggtcagtttggaatgggtcgccaatcactgcgagtctgtctttgcggacttctaccagcccaccgggcacgaaatgaaggtcgttatctatgaccgagatcctgatggtgacgacattcttacgtgtgtcattggtctccttcccgctgcgcacgccgatcttcttgacgatctagcccagctcttactgctacgcctagatcaagaagacgggagcgaccccgatccttactacatccagcgcagtcgccttgggcatgtcttcagcgcggactggcaacggatgtctgacagcctgaggagcgaagcacggctatgtaacccattggcagttcaaaccctagaacgtgttttcgggcctatcgttagagattcgacgttgcaaggcaggcaggtgatcaaggttgctggtcctggtgccgatatgaaagagcttcatcgtgcccgagtttttcagagtttggatgtgttggaagaggccatggagcaccccgaagcacagttgggcccccttcctaaaggaatgggtagggcgggtcgcatgaacgcatcgggggtgagtgtgttctacggtgcaacctctgctgaggtagcacgagcagaggtgcgcccaccagttggcagcaccgtattgctcgggcgatttgccttagtcaggtcgatgcgcctactggaccttgatgcgctgagcgagctagaaccagatcctgcgcttagtctcttcgacccagctgcacgaaccgttcatggccgctgtgacttccttgccaaactcgtgacccgtctcaccatgcctgtcatgccacaggatgaagagaacagctacctcatcacgcaggccattgcggattacctagccactgatgctgatctcaatctggatggcatcgttttccgttctgctcaggtgtcgaagaccgaggaaggggaggttggacgaaatgtcgtccttttccacaagtcgtctagggtggacaaggctgagctgcgctacaagcagaaccgaactgctcaggtcacggaagaggatgaggacggtcttcgctgggagccttacatttggtggggtgcaccaccagatcaagtgacatggtctgatccatcacgaactgaccagcggctcgtgagcttgtcgatcatccacgattcacttgagttgcatcgaattgaagccgtcaagttcactgctgacatctatgaggtcagatccgtccctaatagcttggtggatgctgcggaacatcactcaatctaa

SEQ ID NO: 512067 - DNA, 807 bp, Stenotrophomonas maltophilia
gtgggaacaggggaagtttgtgcagcacatgagcttgctggccgttggggcagacctggcgtcatcagacggacgggccgagatgcggccaccggcctccggccatggagcaagttctgtcgtccaggaaaaggggctgagctcttgaaaccgagctaccgagatcagataaggatcgctgctcagcagaggggtgtggagtgcttgttgcactttacgccactgcccaatttggcctcaatcgtagaacatggcctcctctcgcgagaggcgcagctcgccaaagaggcgttcggctacacgagtagtgcgcatcgccttgacgacaaggatagcgctacgtcgatatcggtgtccgcgatcaaccatgacatgttcgccgccaagcggaaggcctccaggcggaatgactgggtggtgctgttcctgtcgcccgagatcctttggactcactcctgccggttctatgcgagaaatgccgcgcggcgagagatgcgagatcaacgggcattcattggtggaccatgggcattcgaggaaatgttcagtgaaagcgctacacgtgtaggctctagggaggagcatggcttgcccgccgtcctgaccacccatccggacgcggaagttcaggtgttagatccgatatcgccttcacacattcttggggcctgggtcagccagccatcccaacagaaggatgttgagttgcagctggcttgtctgacgcttagagatggacgggcaagagaagttgtcgttcgcgacttttcaccacgattcgtagcgggatctgatgcctggggctaa

SEQ ID NO: 512068 - DNA, 384 bp, Stenotrophomonas maltophilia
atgtctgttctttcagccgtagcgggtgctatcagcaccgcctcactcgtcgccctgattcactatgtctggagtgcccacttccagccacaagcgttcgttcgccgcgccgacatccagtcgggcatgtcacccctaaagtggacctactttggcttggcgtggctgggcgttgctatcttcatctatgggggcaccaaaagcgcattgttttggattccctacgattggggctggacagacgaagacggagatgtgcagccacttagatcctacttcgctgtcgccgcagcagtggtgttgacgtttcctgtgctgggcttcatctaccgtgcggcagcagaccgttgggacgctattgagcggaagagccctggttcctga

SEQ ID NO: 512069 - DNA, 219 bp, Stenotrophomonas maltophilia
atgaacactcaaattaagctcaaagacatcacgaccgctgagcagctgagagagcgcataggcaaagacggtctgggactgcccaagctttcgctggggatctattggaagcgcttcaacggcttgatgaccaccaatcgaaccagccagcagcaaattgagactcgtgtcgagttctgttgctttgacggcaccaaatccgtccgccgtttcgtctaa

SEQ ID NO: 512070 - DNA, 1164 bp, Stenotrophomonas maltophilia
atgactaatgaagagaaactaatccaggcggcgatgtatgggcagctagaaatcgttaaaggccttatcccagtctcaaatgctaaggcgaatgactctgatgcgttgagaagagctgcggaaaaaggcaatagggaaatcgtcaagatgctgattgcagtttctcagccgacagatttaaattccagggccttaactgagtctgcaagacatggccataaagaaattgttgagatgctgctgcccgtatcggagccgcttgcaaacaactccgacgcgttgcgagtagctgcattgaacggaaaaaaagacattgtcgaattgctgctccctgtctccgatccaaagaagcatatatccattttagtgggggcttcaaaaaacggccataaagaaattgtcgccgagttacttttgccaattttttcaagtaacaatagagatgaaaacgctacggcactgagcgaggctgctcgcaacggacataaggacattgttgaaatgttacttccgttctccaatgctaagttttcagattcaggtgcgttgagagaggctttcagaaaggggcacaaagagatcgctgagctgctcatcccggtatcaaatctaagatctgacttcacgagtggttatcgtcgagctgttcactgcggagatagagaaattctggaattgcttttatcgatttccgagccgggcatggttcgcgccgaagacttgaattgttcaattaagcatggaaatagtgaaatagttgaaatgctcattccgttcgccggtccaaaatttgacttcatagaagcattgaattactcaattaagcatggaaatagtgaaatagttgaaatgctcattccgttcgttggtcaaaaatatgacttcatagaagcgcttgattattcaatctatcgcggctttggtgaaattactgaaattctgataccgtttactaattgcgatcaattattagatagtttgtatgagaggggtgattttaaagctgctagatttttgaatgtggcgcagtcaaaattatgtaaggaggagcttaatgcaacaaccgtgcaagttctgccgtcattcaaacaatgcgttgagcaagctaagtctgacagcgagggcgcggtagcggttcaaaaaatccaggtccgaaggctctga

SEQ ID NO: 512071 - DNA, 234 bp, Stenotrophomonas maltophilia
atgaaaatcaatgcaattcaacggctcatctgcaaggctcgtgaggccggggttatttcgatcaaagagggtgtctttctttcaactggagcaagcatcaaggagaaattgcttgtctgggatgaggcagcgtctgcaaatgtcgtagacgaagagctttggatctacacagataaagggctgtttatgccgctgggtcaaacgccagagcgcgagctcaattgctatgtataa

SEQ ID NO: 512072 - DNA, 1407 bp, Stenotrophomonas maltophilia
atgactaatgaagaacaactaattcgagctgcaaagtatggacagctagaggtcgttaaagccttaattcccgttttagatccgaaggccaacgattcgcaagctttgaggaatgcggcgggaaatggacacagagaaattgttgaaatgctgcttcctttctcaaattcaaaggcaaataactcaaaagcactgatggatgcggcaaagaatggccacaaagaaatctttaaaatgctatttcccgtctcagatcctgaggtctgtgactcgctggctctgtgttttgcggcgaaaaatgggcacaaagagatcgttgaaatgctgattcccgtttcagatccaaaggtccgtgcctcgcaggccttgcgaagtgcggcggaaaatgggcacaaagagatcgttgaaatgctgattcccgtttcagatccggaggcgtatcactccgaggcattgtgggatgccgcatttaacgggcacagcaaaattgttgagttgcttattcctgtttcagatccaaaggcaaatgactcaagagcattgataaattctgcatacaaaggttttaatgatgttgtggaaatgcttattcctgtttcagatccaaaggcaaatgactcgtcggccttgcgcaatgcggcttacaatgggcataaagaaattgttgaaatgctccttcctgtctcagacccaaaagcaaatgactcggacgcactgagagatgccgcacgtgggggctatgaggaaattgtggaaatgcttctgcctgtctcagatccagaagcaaatgactcggaagcgctgagagaggccgcatttaacggatataaagaaattgttaaaatgcttctgccggtctcagatccaaaagcaaatgactcggaagcactgagatatgccgcatttaacggatataaagaaattgttaaaatgcttctgccggtctcagatccaaaagcaaatgactcggaagcactgagatatgccgcatttaacggatataaagaaattgttaaaatgcttctgccggtctcagatccaaaagcaaatgactcggaagcactgagatatgccgcatttaacggatataaagaaattgttaaaatgcttctgccggtctcagatccgaacgcagaaggctcagatgcattggcaagcgctgcatctaaagggcataaagaaattgttgaattgttaattcccgtgtctgatgtggaagctgcttgcgaacagcttgatgaatcaggaaaatcacttctaaaagctatggaggcggatttctggatgaaagagcttcaagcctcaactgtccaaatcccacagagcttcaatcaatgcgttgatcaagctaggtctgacagcttgggcactgcggccactcaaagaggccaagcacgaaggctctga

SEQ ID NO: 512073 - DNA, 147 bp, Stenotrophomonas maltophilia
atgttcaaatatcttttcaatcacgaaagctttttaatatcggcaggctcaatggtcacactggctgttcttgctttgctgagctgctacgcggttctctctggcatcggccgcttgatcagcagtgccctgggaacgggcgcatga

SEQ ID NO: 512074 - DNA, 456 bp, Stenotrophomonas maltophilia
atgctagttggagcactgcgtcacgagaagacaggccatttcgagatcgaaatcaacccgaaggtcatggatctgcttggcaatgaagtcatctgcaatgacttggaaagaaaggtcgcactcggaaaaaatcagctggcgctttggctgcacgactacttgtcatctcacagagtgatctatcccgtctcggttgatgagttgcgggttctaagcggctctgaaaaagagctcaagaagtttcgttacgagcttaagaagtctatggccattgtcagcacaggtaacgatcctttggtcaagtcctgggccattaacggcgacgacaaactgacagctgagaagggcgcgacaaaggtagtgttaattcctaagtctaccgaattgaagcttgcccatgccaggaagcgcaacatgattgatcaggcccggaaccaacgggtcaacccactatga

SEQ ID NO: 512075 - DNA, 429 bp, Stenotrophomonas maltophilia
atgagcattgcgcactcgtctcatgcccaggatcttgcgaacttggccttcgataggcccaacggctccgccaagggtttctgcggaccaggtatcgtcgaattcacaggtgttgatcaaaacgcaactgatggccgcgtcgggggatggaactacggtggcgacatggcgattaaggtcacatccgggcggaaggtcatcgcccctcccctgggcgttggacgcattagcgcagcctgtctggaagagtctcggaggactctgcttgtcatcgaggacaaggcacccgccacccgctacttcaaggcctatgatgcagtgagcctcacgccgatcagtgagaaggaaggatgtgacgctgcatgcatggcgcaagctggtgtcaaagtccctcagaagctcgcttcgtttgacccacccattgactga

SEQ ID NO: 512076 - DNA, 240 bp, Stenotrophomonas maltophilia
atgtccttgactgaacaacttgatctgaaagacggcgaaacacttcgcgtagacagctcgcgacaaacgggaccgttggccaacattgacatcaccaactactctgttcttgacgcccgtggcgatgtcgtcggcaaggtcgaatacacagaagatatggcaatcaagggcttcaaagtcacgcataaggccgttagaactgacttggaaggtaagactgtcctgcagaaattctggtag

SEQ ID NO: 512077 - DNA, 186 bp, Stenotrophomonas maltophilia
atgagcacgaaattcttcaaagaagcaaacgagcacttcaccaacatgtttggcatcagcatcgacgaagcgggcttctcagaagccgagttcaaacagcattatggcgatctttcagctctcgaggccgctcaccaaattggccgcgactacgacctggatcgcatcgataccggctggaactga

SEQ ID NO: 512078 - DNA, 219 bp, Stenotrophomonas maltophilia
atgactgatgaagatctgtatttcgaagagacggcgctaacgccagaggatatctacctgcccttcaagcgattcgtcgcagaacggcacggggacgggctgctctttagcgtagcaactgatcagacagaggtcgaagggcattttaacgacttcgagatcatcgacctggtcgatctggctctcatgcaacaccgaagcatttggattggcgcatga

SEQ ID NO: 512079 - DNA, 1041 bp, Stenotrophomonas maltophilia
atgagcaagacagacgactacgcgcgccaatttgctgatctcgtgatccgcagtctggagagccacacagcgccatggacaaagccatggaagcccagcgaggtcccagcggggccccacaatggcgtgaccaatcgtagctaccggggcggcaatttcatgaacttgctcatgacacagcacgaacgcggctatcagtctgctgagtggttgacgttcaagcagatcggggaagccggtggcaaagtgcgtaggggccagaaaggcacgtcgatccagttctggaagacgacagagccaagtgcagagcaactggctgaggacccagcggcaaagaagcgcatgcaggtcttctacttcacagtcttcaaccgcgatcaatgcgatggcttgcctgggccgaaagcccagctccaagttcctgagaaatggcgacatgagaagtgcgagcaactgatgactgactcgggcgtgccgttcaactttaatggcggtgatcgggcctattaccgtcccgatatcgatcagattttcatgccctcgaaagcggcgtttagcagtcctgatggcttctatgcaacagcacttcatgagctcgggcacagcaccggccacaaagatcggttggggcgtgatctctctgggaagtttggtagtgagagctacgccgttgaagagctgcgagccgagatcttctcctacatgaccggcgagcgcttgggtattggacatgaccctggtcagcacacggcctacattaaatcctggatcaaggtcctcaaagatgatcccaaagagatcctccgcgcgtgtgcggatgcagagaagatctgcaatttcttgaagatcgagcgctatcaagagcttgagcagaacaatgtccaggcgcaggagctagcgggtcaagagccccgtcaagaacggccggtgcgtaaagcaaggccgaaacctgtcgatccccttgcacctgagttgctcgacgatcagatcgaagacatgaaagcgcggcgcaaagccaaagaactggcgatagcgctatga

SEQ ID NO: 512080 - DNA, 549 bp, Stenotrophomonas maltophilia
atgaatgaacggctgccacagatccataattcagaccgggaagaaagccggcagtgctacacacagcccgggcaggaaccccgccccgagctcttcgacttcggcatcctgagcccggaatcccaggcaatctatgatgcaagtcgcgccggatcgcggtttgatcacctcattgatcatgccttgcttctcgctcgcatccggggtgacaaagaacagcttgtctatgcgtctgagccagatgacacgctgcctgggactactctactggacgctgtcgagaacgggcgctggaacgaagcccggggccttatccgctcacatgtagacgtcaacgggaccaacgcgtttggacagacagccttgcacctggctgacgaccctggggtaatcgatgccctgctccgctttggggcgaagcaagacatcgtggacgactttggcaacacgcctatgcaaacggctatggagcgcggtgatcacgatgcacagcacttgatgatgaaatacaaatatcagactttgcacggcgtaagcgccaggagataa

SEQ ID NO: 512081 - DNA, 1338 bp, Stenotrophomonas maltophilia
atgacggctgcaaatcgtgtctgcgccaagcatatcggtgaagcatatctggcgggcgtcatcgccagaagcgcggcgtcagtgttgccgtgcagctactgtggtttggttgcaccgacactgactcttgaagagattgcagctcggtgtggcactgtccttgagaacttctacgagccaactggcctggctgagaaggttgtggaatacggtgccgatcctgacggagaccctctaaacgtctgtttggaagaactgctccaatccactgatcctgttgtcagcgacctatcggagctgatcctggacggttatgagtgtgatcctggtgagaaccccgatccattttttattcggcgacatgagctcggcgacaggattagtgttcagtggcgacggatgtcggaaagccttaagaatgaagctcggatgttcaaccctgatgccttggaaaccttggagatggttttcggaacggtaggtgatgaccacacctactacggacaaggggtgatccagcttgcaggtccagggatgccacttcacaggttgcaccgtgcgagagtcctgcaaagcgacgagtcactcgaacatgccctggaacatcccgcacgggagttgggcccgcccccaaaagggaagggcagagcggggcggatgaacgtggccggcgtatcggtgttctacggtgcaacaaccgctagcatcgcactggcagaggtccgcccgccggttggaagcaaagtgctaagcggtgagttcgagatcattcgcgagctgcggctccttgatcttgatgagctgagtatggtggacacgggcactgacatgagcttatttgaccctggcgcacttgagcagattgcgcgttgccacttcctttctgatttgacgaatcggttgaccatgcctgtcatgccggaggatgagggtatgggctacatcgttacccaggccattgctgactacctcgctacgaacagacaactcaatcttgatggcatctactttaagtcggcccaagttcctgctcacggtcatcatagtgaaggaaggaacgtggtgctgttccacaagtcctcacgagtcgcaagagcagagtcaatctatcgagaaggaatgaccgcgtatttgatggaagaagacgaggatggaagcaggattgagccctgtattcattggaatgggaaggagcccgttcgagcagtggattggcgcgagcaagatgtgcgtgaagtcactcttgaggttgacctgaaatcgttggtggtgcgcgagattcgggcagtcaacttcgtcgcgttcgatcatgacgtcacctatgtaaaaacagcatag

SEQ ID NO: 512082 - DNA, 1848 bp, Stenotrophomonas maltophilia
ttggaaccttcggtccagtatcaagtcccgctcttccagcgtccctatgtgtggaagcaggatgagaactggatgcctctttgggaggacatcgaagcgctgttggacaagcatctctaccagggcagtgcccatccgcacttcctcggggcagcagtgtttgagctggcaaccagccagtccggcgctgtgcaaacccgtttggtgattgacggccagcagcgtttcaccacgttgcagctcttcttgatggctgcacgcaacctctccaggaaggtggggagtgagaagcagactcatagacttggcgcgttggttgagaacggtgctctcgatatcgatgaagaggtagagaaatacaagcttctccccacaaatgcggatcgagctgcgttcatggctatccatgcctgctcgtctgacgatgaggtcagagctctggtcaaggctgacaagaccctgaccgagaaccggctggtggaggcttatctcttcttcgctgcgaacattgcggcctgggtcaatggcaatgatgtggatgtggatcgcgccgatgaatttgcgaagactaagccggaagaccgcatcgaatgcatctggaaggtcgtaaccgaagggttgctcctagttgtcatcgaccttaccgctggggatgagagtcagctgatctttgagacgctcaaccaccggggggaaccgctccttcctgccgacctgatcaagaacctcctgttccgtaaggcgatccagcagccaggggctaaggagggagacgttgaaaagctccacgagaagcactggcgtcggatcgattccgattactggcgtgaggaggtgacacagggccggttgaagcggccacgaatcgatctcttcatcaaccactatctgagcatgatgctcagagaagaggtgcgagcaacgcatctgttcaacgaatacaagcgattctttgagaactcggccgatgtgtcggtggtcggcattgatacgccaaagagtccgtcagagcacatcatccagctggcgaagtttggcgacatcttccaggagttctacagcccagatcatcatccagagcttgccctgttcctgcgtcgcttgagtgccatcaacaccgcaactgtctaccccttcctgctctacagctatgcgcggttgatgccggacaaccgagctgagttcaacaagatcctggtagtcctcgaatcgttcctgatgcgtcgatggatcgtcaatctcacgccgaagaactacaaccgattctttgttgacctcatcaaggcagtagaacggtcgggcgaactcacggcaaggtctgtgagcgagcagctgatccgtggtgtcggtgacagtagcaagttccccgcagacgatgagctacgtgtggcggtgtttgagaagccgctctacaccagtcgcactgtcacgaagtctaggacggtcctggaagcgctggacgaccggttccggtcgggcaagagcgaggcgctgactatgcctacaaatctcacggttgagcatgtcatgcctcagtcgtgggagaagcactggccccttcctggttcattgactgatgatgtggagaggatgaagtttgctgcgcggcgcaacctgctcattcacaccttgggaaacctgaccctcatcactggcgagttcaatagtggtctccagcacaaggcctggggtgaaaagaagccggagctgttgacgtattcgaagctcaaccttacccagtatttccacaagatggagtgttggggcgaagacgaagtccgtgctcgcggtgaaatgctctttgctgagatggtgaagatgtggcctgtgccggagggcaccccatga

SEQ ID NO: 512083 - DNA, 642 bp, Stenotrophomonas maltophilia
atgacgagaagccatgacaagtcggtgcaagtcaacgacgccttaaaccgtgcaggcgaaattcgtgggcgattgcagttggctgagcatgcaacccttgctcatcgagttgccgtatcccttcttgctgctgcttatgatgatgcacgagcagccaccctgttgatcgggaactatgggccggacctagttggcagcgcgctgagtctggtgcggcccatgaatgagaagctgaggcgaggatgttggttcttccttggggcgaccgaggagcaggctgaccagttcctcacgcatgatcgacttccgccgtccaacgtgatggtcgaagccatagagcgagaagagccgtttcgaagcttccctatcttttccatgcaacaccaaaacggaatcaaccatctgcatagcttcacacatgggggaaatcagattgcgctgccttacatggtcaccagcgagattggtgcctcatatgcagatggcgatgttttccatgctcttgagagcatcgaagcaatcgggatcacttcggtccttgtgacaatcatggttgcgggtgagagcaaccatgaactggcgcaagaggtgctaaatacgtttggtcgcgagttcaacataccgacggggccgagcggctga

SEQ ID NO: 512084 - DNA, 945 bp, Stenotrophomonas maltophilia
atgtgctactcagcagaagtttggacggactaccaccgctatgtcgatcagttcaatgctgacgtcgacatcaaagagttcgccaagctctacctcgctcgccagagttccccgaaaatcaaaatcccaaagggcatggatcgcggcttcgacaagccgaagaccgatctggaaaagcagatccaacagcttgtgcaggactaccaaagcagcttgatcagcgatagcgaacaagagatgttcaagcaggcaaagcgccttgcggatgccgaaagaaagcttgcggtcaaagagacgaagacggcactcaacgagcagcgcattgcaacgaacaagatcaagcaaatgaagcgatggatcgccgacgctaagcgcgttgagctcgatccggtcaaggacaatcgcatgtggccggactggtatgtgcccgtgctgatttctgagaagggaaagcttgtcgtgcggccaatgcgctatcactgccgtcctgctggaaaacccgctagcgttgaccgcacaaaggatggcaaggtctcgggcacatacaacgctcgccgggacaacttgacccgcttttggcgcaaacaatttggatacacgcacggcctcatcgttgccagccaattctatgagatggtcgaacgggacggtgtcacgcgtgaagttcagttcaaccccagcacgcatgagccgatgttcatcgcgtgcctgtggtcacattggacagaccccaaaggtgaagcgcctgatctttacagctgcgctgctgtgactgacgcaccagagcccgaggttgcagaagcggggcatgaccgcaccgtcatcaacctcaaaccagaacacatcacggcttggctcaatcccgacccaaacaatttaaagagcatgcaggacatcatggacgacaagcaacatcccttctacgaacacaggcttgctgcatga

SEQ ID NO: 512085 - DNA, 456 bp, Stenotrophomonas maltophilia
atgcaccccatcgcccctccaagcctcctgggcgctttcagccccaccgcatctacccaagccctacccgtgctccggatgcgcgttagctgtggcttcccgagccctgcggaggacttcttcggggctgaggacacgctctgcctcaatcagcactgcatcagcaatccagtggccacgttctttgccaccgccgagggggacagcatgactgggctcgggatcgaccagggcgacacgctggtcgttgaccgcagcttggaacccaagcacggagacattgtcctggtgctgtgggaaggggggttcatggtcaagcggcttgccatgagccggaatcgcctggcactccattcgggacacccggaccaccctcctatcctggtgcccccagacattgaactggatgtctggggtgtggtgacttggtcttttaaaaagcagctgaggcgatga

SEQ ID NO: 512086 - DNA, 885 bp, Stenotrophomonas maltophilia
atgcgcgagcgtattgagcagtggaagagcatcttccaaaccgacgagaacagcatctgcaagcagctatccggaatggcttgggaccttgccgtgttcacctgcctagtggaagccatcgaccaagctccagatggccctcaaggcaagcagctaaacggagtcatggtcagcatgcttgccagcggtttttggcacagcgcgttcctgggcgtccgtaaactggctgacaaacatcccattgggggtgcacggggcgtctgctcgattggaggcctcatcgctgatgcgaaggcggctcgtcagctcatcactagacgggtttttgtagaagagattgccggcctcaactatgactacgtagccactcgtgcacggttcgaagagttcgttcgcgctcatcccgctggcacaatcgtctccggccggaggttcgatgaagaactatcgatccgtaggcatctcgagttcgacacgctgagcggaacgaccgagcaaaacagaacggctgatgatgtgattcgagaagacttctttgttgcgctggaacagcgtatggcaaggcttgaaggtgtggttacgcacacgcacatcgacgtggctcatgcggctacggaagcaagtcgggcaggaaggcagttggaaagctggcagcttacggatgcaaaaaatgcattcagggaccttgcgcaaacggcagagatcctaggtagcgccctttgctatgatggcattggctcggtccttccaaggccccagttcgatcagtttgagcacatcgagcaaccacttttcagcggcgaccccgcagttcttcacgcgaagtgggatgagctgtcggctgagatcactcgatggcacgatgtgagcgagatcaggctgtga

SEQ ID NO: 512087 - DNA, 831 bp, Stenotrophomonas maltophilia
atggatgacatggaacgcttccgtattcgcaacctagtgctgaatgacattgaatctcagctaaaaggggatgacagctttcaagttgccagatacaagatgttcctgggcatcaaacatcacatgccgaagtttaagcatgcacgctatcaccggccctttgaaaacgctaaaagcatcccagggacagcgatggtgctcgacaatgccctgtcgagagcaatgagagagattgcaaaccagatcaacggctttggtcagatgatacgcaagcttgaagcatgggatctggtgatcgaaggactggaacacgagcaagtattttcgcttgcgattgagcacattgagccgcttgccaatctcgctatctcggcaacgcaggcaatccgagggcaaatgatctacgccacggtcgagtgtggcgcactgaccaatagcatcatcgggcagccgcttcgctgggacggcagcacccatgtgaccatgaaggttgcaaagtccgtggctgagaattggaaagcgtggccggaattagcagagaagctgaccctccttgaggcccaggaactcaacgaggcaagcggacacttccggaacagctttcagcacggcgcgcctcgccagctcgtcattgggctgacggagcgcactgagtggaccaagcatgctgatggttccttttcatggggaattgggactcaggatcccatcaaactcaaggagatcattccccacttgaagaaggctcacgacgaccttctcacggcacacgaagcgctagtagagctttctaaggaatgggagtgttctgtgatgaatccagttccatag

SEQ ID NO: 512088 - DNA, 726 bp, Stenotrophomonas maltophilia
atgtttggatggtttgctaagaagagcgccaaggcccgggagtttccgagctcatactatgaccaaagtggcacgatcaacgccaatggtcatttgatgacaatactcatgccaaagttcaaggcgtggatcgctcaatttccgggcgaagaaaagcagcgcgttgccgcatgtgaacggttgatcgcggccggatcgctcgaagagttgaaggttgcactagaggaaggtgctttcgttgattgctataccggctatcataaatttcccacgcctttgacgaacgctgcttgctctggcgagcttgatcagatcaagctatttttgaactatggcgctgacatcaatgacatgagcggagatgcttttggctttggcagtcctgtcgatgcggcgtattcccacaagcagtttggtgcagtcgctctgttgttgaaaagtggagcaaattttgaggatgccgagttcttccatctcaagagcgacaatgagcttcatgacttgttggatctttacctccacagcggccccgaggatgaagatcgaccatgcctggaattcttaattgaattcttgcttgataacggggcatgtttggttgcgcgtagcgacgactcttatgatgacttttattcgcttaaagcgacagtagaggaacttcggacgctcccgcctccgcgtttcgaggaatttttgcatcgtgggcacgtcgctactcggcagtga

SEQ ID NO: 512089 - DNA, 675 bp, Stenotrophomonas maltophilia
atgacaaacgagaaagctgaggcagaaggcttcaagaacgcgttggagtcgatcttcgcagataaagaagagcgcaaaaggataaaggcgactcaggactatgcatcggtgcgcaagaagcttcatgagatgggcggtgatgcgttattcactctgtcaatgacagctttcttcttgggtatcacaagcagtgcattgcgagaagcccgaaagaaatatgatgatcctttcttcctgtccaaaagccatacggctcgcaaggatcaaattttgcgatggtgggctacggtcttgaagaaaaagagcgggctagaagaggaaatcgaaggcagcgctggcctcgatcttcaccccaacccaaatctcttcatcgtctttaaagacaggatcacgggtaggccggttgttctttgcaatagcttgatcacttctgtctcagacgagctcttgtcagataccttgcgggctggatgtcgtatcgtcgcccttacgcctgaaaaggcaattgagaagccctgggcgatgcatgaagaaaaggctgcttacatagaggcctaccggaaaaatcttgaaaccaagcaccgggagaagcttctatggctggatcgagagcaggcgcaaagcaaagcgattgctgatcgggctgagcttgatgcttcaacgccgagaagctag

SEQ ID NO: 512090 - DNA, 681 bp, Stenotrophomonas maltophilia
atgatgcgcatggacgtgctcttggcgcgatgcagcttgcagcgcgccctccaatggatactgatcctgtccctgctagggacgctggcaggttgtacaacggccagccgcgcgaccagcgactcattccgcctgctgttgaagcggcaggtggcggcgacgcctgagcaggtcgcagcgaaccgttttccgcaggcacagctgaaagcgcccgatctttctgcagtgatggtgcttggttacgtcgatgcgggtcgccagagctggtatgccgggagcaacgccgtattccatctcaacgatacaggcctggtgacaggcgtctcgagcccaagccggcagatacaggcccgcatcgtaggcgcctcgccttttgcaaggctgcagtcgctcagcgctacgacaaccgtacaccgtgagtacgattggattccaagctatcgcatgggtatcaaggcgaccggcacgctaacccgtggcggcgtcgaatcgatcaagatcctcggcaaggatcggtcgttggtgcgctttgacgagtacatcgaaggcggcttccgcgcgcacaacatctactgggcggacccgggcacgggcttcatctggaaaagccggcagcagctgggtccgtcttacaccgtggagctggtgcagctcaagccttaccgccccgcaaaggattga

SEQ ID NO: 512091 - DNA, 774 bp, Stenotrophomonas maltophilia
atgacattgcgattcctgccgctgctggcagcactgctggctccgggccctgctctggccaacaaatccgctatgtccggcaatcacgaggtcgtcgccgaaggtgccctattggcaccgggaagctacaccgtcacttcaaatacccgactgtcccagcttctcgcgaccacgcagcccgcagcggacgcctacctgcccggacttgcgctgcaccagcagagttcgcgccttcagcaggtgcggttgcgggcgggcctgcaacacgacctggactcgcttgaggtacatcaggatccacacatcgctcaggccgcggctggcatgtcgcgctggttgcaggatcaccctgcatcgggccgcgtaccgctccccatcaacgacatgcgcctgatgcaggttcagaagagcagcgatccgatcctcgaacaaggagacgtgctgcgtgttccgcgtcggccggcaacgatcagtgttgtgggcgcagttgaatcagcgtgcgaacttgcccaccaacctctgcgcgacgcgcatgactacctgcaagactgcgccgtcacgcctgccgccgaccgcaatgacctctacatcgtccagccggacatgacggtgcagaaagttggtatcgcgttgtggaaccgcgccgatccgcatgcggtcgcaccgggcggcatcatcttcgtgcctctgcaccagcatgtcgctgacgcagtcgacagcaacttcaatgccgagttcgcggcgttcatcgctacccaggccctgcaaccgtga

SEQ ID NO: 512092 - DNA, 2163 bp, Stenotrophomonas maltophilia
gtgattcgctccaccctcacgcccaccggcgctgcgcgccccgccgcccttgcattgtcactgcttgccctctccctggcagcagaactgcgcgcgcaacaggcccctcccccaaccgccagcgaatggggtggcatcggcttgctgcagacaccaacagctcgcatggccgaggacggggatatcgcgttcacggcctcgcacaactctccctacagtcgatacaacctgacgctgcagcctttctcctggcttgagagctcgttccgatacattaacgtctccaacatccgctacggcgcctcggacttcagcgggaaccagaactacaaggacaagtcgatcgacttcaaggtccgcttgtggcgtgaaacacgctggacccctgatcttgccttcggtgttcgagatctcggtggcacgggattcttctcaagcgagtatcttgttgccagtaagacatttggaccgatcgacgcgtcgatcggccttgcgactggctacattggcaatcgaggtgatttctcgaacccgctgggtgcagtcgacgaccgcttcaaggaccgtcgaccaattcctggcagcgacatcaatcaggccggcaagtttggactcagcaatatgttcaagggtccagttggcatctttggtggcatcacctaccagaccccatgggacacgctgctgctcaaagtcgaatacgacggcaatgactacaagcgcgaaccgcgctggaatcaccttgaacagagctcgccagtcaatgtgggcctggtctattcccccaaccgcaacgttgaactgacggcagcttgggaacggggtgaggccgcaatgttctcgctcacgttgcgtggcaatccgggtcatgcatcgtctgcgccaaagcccttcgacccaccgccaatcaagatcgagcgtagtgctactgatccccacactccatcagcaaatgcgcagccggattgggcatacattgctggagaactggggcacaatgcaggcttccgagtcgacagcatctctcgccgcggcaatgagctgatcattgatggctatcagaatctctatgccagcgccccgaagggaataggacgggcagcccgtattctgggcaacaacctggatgacagctacgactggtacacgttccggacgacacgcttggggatgcccactgtcgacatgtcactcaagcgtgaaacatttgagagctacctggaggggcgtgtaagcgaggaccatctgcgacgcggcactcagatcagtgcacctgcagatatccggacggacagcctctatcgcgccgcaaatcgcccctggggtggcggcttcagcttcggctatcgtcagaacctcggcggtcccgatgggttcatcctctaccaagtatccgctaacgcgagcggcagcgtcttcctgcgcccgaacatctggcttaccggtgcactcagcgcagacatcatcaacaactatgacaagttccggtacgatgcaccaagcagggtgcagcgcgtccgcacggacatccgtaagtatctggacacttcagaagtcaccatgcccaacttgcaggtcaatgtcgcgggaaagcttggcaaggatctgtatggcattgcgtacgccggttatctggagtggatgtatgccggcgttggcggagagcttctctaccgcccaatgggtcaagcatgggcccttggggcaaatctcaatcacgtacagcaacgcgacttcgatcaacacttcggtctccgcgactaccgtatcacgaccgggcacgcctcgctctattactcctttgatgcacaggaacgtatcgtcggctctctttccgttggccgctacctcgcaggcgattatggtgcaaccattaatgtcgcacgcgtgttcgacaatggcatgagcatgggcgcatacgtcaccaagaccgatatgtcggccaaggacttcggcgaaggtagttttgacaagggaatctacttcagcatccccttcgacagtgtcctgccccgatccacccgtggcagtgcgaccatcaactgggctccgctgatccgcgacggtggcgcgatgctcggccgcaagtacccgctctatggcatcaccggggaacgggacgaacgctcgttctacaacaacatcagatcgatatctgactga

SEQ ID NO: 512093 - DNA, 1224 bp, Stenotrophomonas maltophilia
atgagcaatgtgatcaaggcaaagctgtcggatcggatccttctgtacgcttggattccgctgtcgatcgggccgatgctatggggaatcgagagcgtcggcgggatgcagctgcaccatgtggcggtacttatcgtgtacgcgtatgcattcattctctcctgcatgcgcggaacgatcttgacggttaacaggtaccttctgttccttcttgcctacattctcgttctcgggctggcgctcaacgcggagtcgctggatttctggcttaagtatgcgtcctacatcggcgtcatcgttgttgcgaatcacctggtaaaggcgatgccgttcgaggtttttgtcggacaagttactgttgccatgaaggcgattctggcgatatgcgttgtccttgccctgattgccccagtggtggcatttcatgtcattgatggacagaattctctcaatggcatctatgcacagaagaacacgttcggacgcctgatctactttctgttgttcttcgtgggtttacaggcagtcatgcagtcgcgtcgattgactacgcgcgacatggtgtggatggcgctttgtgccgtcagccttttcttgtccaactcacgtactgctcaggcgatggggttgattctggcgttcgtgccatttgccttccaatggaagatcattcgcctgtctttggtgccggtcctggcatctatcgtgggcctggttgttctgggctttgcaaccagccagatttcgttcggtgaagtaggtagcaatcacgactacatccaggttcttggcgtggaagtgcctttgaccggccgggcaaccatctggcagggcgcgctggatggaatcaacaaggaaggacgttggctgttcggatttgggctggacggcttctatgggagcagctacagatcctatgtttccaatatcgggctcggagttttcgtgcccgaagactcccacaatggctacgttgacctgctgctgaatcttggcatggttggtgcgatcatcttcttcatcatcggcgccaagctatatgtcaatgcttcccggtttccggttagcggggagaagattgcgatcctctcctttctaatcctctatctcggatcgaatctgaccgagtcctacttcgtgaagacgtcgaacatcacatcattcatgtttatggtgatgttcatgtactcctattcctatcgaaggtttcagaatcggacatag

SEQ ID NO: 512094 - DNA, 1014 bp, Stenotrophomonas maltophilia
atgacaacactgtcgatcatcgtgcccgtttacaacggggtcgcgttccttcacccattcatggcctcggtccaggggctgttgaatgaagcgggcgtggagcttgtcatggtcaatgacggctccgctgatggcacggcggagatgctggatgcgattgcctcggcgaacccatcgatccgtgccttgcacgtggagaacggtgggcaggggcgtgccaagaatctgggcgctgcggctgccaatggtcgctatctttggtttgtggatgtggatgatgtctttgagtcctgcgcgccttcacgattgttgaggcggttgcgggaggggcactgtgatctcgttgtcaccggctttcgccgtgtgaacgttgagatgggtatcgagctggaccgctatcagccggcgcgaacttcatatgatgtcaccgctgactcagtacagcagcttgaggcaatggggcatagtgcttggaacaagatcgtcagtcgtgaactgttcctgcgcaggggcatgcagttcctcgagggtgttattcatgaggacttggcggtagtgccactttggatcggcgcctctcggtgcattcatcttgatgcggacgtccgctattgttatggggttcgaggaaactcgagcatccacggcaacttcagccgcggttcggacctattggtcgcgctgtcccacctggtgcaatacggagcgggtgacggcgatcggatcgggcgttgcattgcgaaggaggtctacttttacactttgccgcgttgggcaagtggaatgcggaccggcaggattgcaccagcttcatatcgagactattacgggcggctgacatgtttttgtgagcagcttcctgctgctttccgggaccggcgggcgcagggctttgggcttatggcccgcttctacatggaaatggtccaacgtggggtggtcgggttgccacttgtctactacaaggcgcgcggaaagtttcaggaaattcgcggtaggaaggttccttcatga

SEQ ID NO: 512095 - DNA, 474 bp, Stenotrophomonas maltophilia
atgaacgtggagcctgacacagcgctgcaacttctcagggcgttctcccgaatcgagtttgccctcaagcaaatcccagagttcgtcaatggcgccgtcggggaaaagccggacacgcagtggtcagcgttctacgtccatgtgcgccggcacatccagaatcaactatcacaggaaaacaaggatcttcttttgggcggcggccccaatgacccgcccccgatgaaaatgcagatcagcgcacagcgccgtatcgagttcgtggatgccccgttgggtgacgggcctgagggcgatcgtttaatggatgctgctcgccgggtgcgcaacaacctcgtgcatggcggcaaggagcatgatcggcaacagcgatacgcaggccatgacgataagctggcacgcgccgccattgatgtcatgtttttggccatggcatcgcatcccgaagtgtcccagctcgccttttacgactga

SEQ ID NO: 512096 - DNA, 750 bp, Stenotrophomonas maltophilia
atggcggcgctcgacctttcccagcctgctacgtggcccggcgagctgcgcgaggtcctcaatgagttgcgcccggtgttccgctcgtgggagttggacctagccgaccgcgccgcgcccgcgttcgatgcagctatccgcacgcttggcgaagctctcatgccacatgccatgcgtggttaccacttcacccgcttgaccgaagaagaagcggggcacattcgtgaaaacgggctggaggtgctcagccccgggctgctggaaagacgcattgcggcccaagtcacgcgaggcgagcttgccgaagatcatgcgcaacgtttgcttgcgaacaaccaagtgcgcgatcgcaacaggtccggcaaggcgtggttctgcttttacccagcgcacgaagcgcgagagtatggcgttcgctccctgctcgggcactggggcggtgaagcactctacaacttcaacgccgaagacccgaagcttggccgtgttcttaaatccttgggaagccctgcactggttgaagcggtagtgcctgtggcgttcctttccacgacgaatggcttggcaaaagccgtagcacgacttgacctcattcaccaaggcgtcaggtcaagtgagtatccggacaagtttgaggactactccacacaagccttggaagcctccatggtgcgtcgcgttgtgctccatcctggcagcgagttccttgagctcacccagtgccaacaatggtatgagccgttgacctag

SEQ ID NO: 512097 - DNA, 240 bp, Stenotrophomonas maltophilia
atgaaagctcataccgcagtagtcgccggcctgcttctcagcatgtcctttttcaccacggcgtccgcccatgatccggcccttcatgcgaatccagcccccacggctgcccccaaggccaagccgacgacctgcgaacagcttgcggaccgttcgaagttcaaggtggacctaaatgatgcccagaccaaagcgctgaaggaacgttgcgaagcgcaggcagcgtcgaagaagaagtaa

SEQ ID NO: 512098 - DNA, 243 bp, Stenotrophomonas maltophilia
gtgcgaggcgcttacgagcatatcgatgacgacgtattgatacggattagctatctacttggcatctacaaagctcttcatatccttctgccggactccattcaggcggatggctggataaggcggccgaacatggcacccatgtttgctgggaacaccgtactggagtttctttgccgcggaggcttgagcgaacttagggatgtgcgatcttacttggacgagcaggacgccatcacctag

SEQ ID NO: 512099 - DNA, 1854 bp, Stenotrophomonas maltophilia
gtgtatttggccgagctgactatctcgaacttccgcaagatcaacaacgcagtcctgcacttccaaagcggactgaacgtcctggttggtgcaaataacgcgggtaagactgccattgtcgatgcgttgaggtcgctccttgccgggcacgacgaaccttacccgcggctggactcggaggatattcatcggccgaagacgggatcgcctagcggcagcatcgtgttcaagtacatatttcgaggcttgagccccgatgatgaagctgacttcatgactgccctgaagcctgctaaggatgggcagatggaggcgcatatcaccatcagcttctccgaggcggacaagacggggcgacttagagcaaagcgctggtgcggagaccatgatgatgtcggcctgacagcggacatgatggaaaaccttcgtggggtctatctacagcccctacgtgatgcatctcatgccctaagacccggccgcacaagccagctgtcccgattgtttcagctgctcgttgatgacgatggcaagatcgagatcaataaggcacttaagctcctggatgatgagctcaagacgaaagcgcccattgtgagtacccataaggccatagccacccgccactccgagatgctggggccacagctatctcagctgctcgggctcggggttagcgtcagcgatttccaacgtctggcttcgcgtctctcccttaccgtggacctgttcgagcttgagcagaacgggctcggattcaacaatcttatcttcatggcggtcgttctcagcgagctgaccaagaacccacaagccagctatcgaggcctgatcattgaggagcccgaggcacatctgcatccccaattgcaggctgttctgctgggctactttgaaaagatcaaggcagtggacaaggagaagcctgtccagctgttcgttaccagccactcccccaactttgccagcatcgccaacctcgacagtttgacttgcctggtcgacaccggaatcaaggtggagacgttctttccccgagacatcaagtttgctgtcggaaagcgtgagaagcttgagcgctatttggacgtaacccgggctgagctcttctttgcacgccgggccatcctagttgagggtgctgcggagttggtgcttgtcagtgtgctcgcggagaggtgcggccacgatctacgcaagcatggtgtcagcctcattagcgttgaaggactcaacttcgactcattcattccactgttcggcgagaaagctctgaagattcctgtctccgtgcttacggatgcagacccaacgggtccgagtgaagaggatgaagagcaagaggaagaggaaaaggaagagggcgatggcagcgcagaagcggacgaccatgcgccggaagatgtgacctccagtggaaagaagaaggctgctcctgtctacccttcgattggcgacaaggtgcaggtgtccgccaataccttgagtatgctcaagttcgaggattcatatctcaagatcttccatgggctgaagacgcttgagtatgacttggccttgtacgccagcaatcgcaagatcatgcttgcggcgcttaaggagctacacccgaagatctctgcgaacctggagaagaaggtggacgccgctacgggagatgcagagaaggctcgcgcactgttcagcggaatgttcgagaggaagaacggaaacgtccagaaggggcgctttgcacaagctttggcgtacctgatcgctaaggcgaaagaggaagacttcactgttccggagtacatcaagtctgcagtcgaacacgcttgccagcctggcccgaagaaggctgagggcgaatga

SEQ ID NO: 512100 - DNA, 1311 bp, Stenotrophomonas maltophilia
atgctgacgaagatcaataatggtccgaaggctgccgcggccttgggaaaactaggggcctacacgcacgagctggcacgctattgggtcgaccttaccctccgcagccaacccgagatcttgcgagtcctcgcgcgtcgctatccccacatcctgattgatgaagcccaggatatcggcatcctgcaccaggtgatcattgagaggctcagccaagcaggctctcagatttcccttattggcgatcccaatcaaggcatctacgagttcatgggcgcgaccggctcgttcctgtcaagctaccacagcaaacccggtgtttctgcagccgccctgacccgcaactatcggtccgtaccggccgtgctcgatcttgccaacgcaatctcagcgcgtacagacgatccggataggaccgcgccgtctacgctccatggggcctacttcgttccgtacacgaccgccgatacgaagaaggttttggctgccttccaggcaacactggtctccgccgggttggaccctggacgctcggccgtgctctgccgtgcacgcaagtgggccgacgagctggctgggcatgagggtgcgcctggcgtgggaacgactaagatgcttgcccaggcagccatggtgcgcgatatccactctgactactcaacagcattcagactcgtggcaactgccatcatgggtttgaccgacaacgcgcccaagggcatcgttgctcgcctgactcaggcagccaggtacccagaggaacgagcgcttcgtcgtgtcatttgggctttcacgcgagatccggtctcgggcctgcccagcgcagcgctgcgcgctgttagcgattggcagccggcactgttgaaacgtttaagggacctgatgaccaatctgagcatggcccacggactcaatcacacctcctccacgctcggtgctcggctctcgaagagaagtttgcccaactcgccgctaatgaccccgccggacctaggtgccgatcagcccctgcgggtaaaaatcaataccgtgcaccaggtcaagggcgaaagtctggatgccgtcctctacatggcaacgaagccgcatgtgtctgcgcttctagacgggggttgcactgaggacgggcgaattggatatgtggctgtgacccgggcaagggatctgctgtggctggctgttccggcgacagctttgaagagccttcgtgccgatcttcaagcgaagggcttcaaggacgcaactgctacggtttcggcccctcctgccgggcatggcgtcggtgcccccttgagtgggaagaccggataa

SEQ ID NO: 512101 - DNA, 282 bp, Stenotrophomonas maltophilia
atgatgcccaaagcagacgaatacctatcactaatcacttcgtacattgatggcaagatcgataccaagagctttagcaggatgtatcttgagaagttcaagaatgagagatcggagcttcccgaggatgcctttgagatccttgatcggctgttcggagatgtggattcatacaccgatgacgaagaattgttggcgtcgatgccatccttctatctcagcgccgaacagttgaaagagcaggcggcgatggcggcagctgagcttgccaacggcgtttga

SEQ ID NO: 512102 - DNA, 1212 bp, Stenotrophomonas maltophilia
ttgcttcgcgatgattcgtgccagcagtacgtagttggtctggttgtaggcgaagcgctgcccgggttggcctgggatgttcaaggcaatctctcgctgcgcaacgggcgcaagtacgacttcgactttggcaacaggctgcgcgaggtgaaggaggccgagcgctatgcctacgatgcctatgggcggcgtgccgtggcgtacgatgcccaggggcaacgcctgcgcgcgatgtattcgttggccgggcagctggtgcatgaagagcgacgaggcaagggcgcctcggagtacatccatgtaggtggtcgactgctggccacccgcagcccgacgggtgttacctggacgcatgtggatgcactgggcagcccggttgcggtcacggacggcacaggaagtgttgtcgagcgacgccggtttgagccgtatggtgccgagtcgggcgggctggtcaaggacggaccggggtacaccgggcatgtgagcgattcggccacagggctgatttacatgcagcagcggtacatggatccgcagttgggtgtgttcctgtcggttgatccggtgacggcgtatgagcagcctgttgggcagttccaccgctatagatacgccaacaacagcccctatcgtttcaccgatcctgatggtcggcagagtgtcggagagatgattgattccgcggctgcaggctgtggaccggtctcttgtgcaggctgggcgacattgagtgccgcctggacagttctgggggctgaagggatcagtcagattactgacaaggggtggggctcagtcagtgggggtgacaaggctggggcggggctggagatagcagctgtgcttcccccagtgaagctattgcggggtgtcaaccttctagccaaggaaggtatcatgtcaatgaatttcagccgctctcagctgcagcatgcttttaaacatgctggcgactttggcgtggttggaaatgccaacaataagacgttatcggaattcggctcagccatcgagcgccatgtagcaagcgattcaacagtggccattcagggcacatatcgcggcaaggatgtaacgcattttgtcgatcccgggacagggttgaacgtgatgaaggattcttctggaagctttctctccggctggaagatgaatgaccagcagctgagacatgtgcttgacaatggttcgcttggaggagggaaatga

SEQ ID NO: 512103 - DNA, 1071 bp, Stenotrophomonas maltophilia
atgccgtactatgaaatccagtccaatcggacttctttgtatgggaaacagtatgggacatatttgatggctcgcccgctaaaccgactcaccgcacgggcagttcaaacactcaccattgccggctatcacgccgatggtggtggcctttacctgctgatcaagcactcgggcaccaagtcctgggttcttcgctatcggcgacagggacgacttcgtgagatgggtcttggggccgtccgcctttttggcttgcaggaggcccgtgcagttgcattggagcagcagaaactcttagccctaggaaaggaccccattgaagagcgacgttgcacccgcgttgtcggtgcgacgtttggcgaagcggtggacgcctacattcaatcccatcgaaagggctggaagaaccaagcccaggcggaccaatggcatcagtctctacgcgactacggcccggccagggagatggcggtttcagccgtgactacgaacacggtcatggcctgcctctcgcccatctggacgaccaagacagtgccggccacccgtgtgcgtgggttgccggagtggctggccgttgtgcagtcggcgctgctcaacgaatcggccacgttgttccgccgcaggtactacaccaacggctcgcatgccgggtttatcctctacatgaccgatccgcagccggagggcatggacgtggacgccttgcgtgaagcgctgcgggactcgcgtgggccgggcaatttccgcaacctgttcatgcattcgcccaatggcaagaaggatggattgcagctgatcccgatcagcgaagtggcggccaaggatgagttcaccggcatcaagcgtgtgactcgtgatgacattctggccgcgctgcgcatacccccgcagctgctgggcatcgtgccgcagaatgccggtggcttcggctcgattcgggatgcggccacagtgtgggcgtcgatggaactggcacccctgcaatcgcggttggccatggtcaacgaatggatcggggaacaggtaatcacttttgcccccttcgaaatagaacgttcagtgaactga

SEQ ID NO: 512104 - DNA, 333 bp, Stenotrophomonas maltophilia
atgatcgaccaccaggcggaaaccctccggccattgatcgggaaaaatgtgacactggggatggaagatggcatggctacgatgggtacggacgatggctgggagctgcatatctacaactctttcagcctccatagcgatggcattgcgcagaaccctccgccctcaacgctgagcttggtgctggaggattgtcggttcgatcacgagacaatggttgcgcagttttctagaggggtcacactcacagtcgacttaagtgacgacggctactctggcccagaggcaatgcagttgaatagtccagatggaaccatcgtgatctggaactaa

SEQ ID NO: 512105 - DNA, 1500 bp, Stenotrophomonas maltophilia
atgcgcttgaaaatcaccgacgccggcttcgccaggctggtcaatccacccaacaccggcaccaatgccgtgccgatcaccgagatcggcctgacgtccacggcattcacgccgacggcggggctgaccgccctgcccggcgagatcaagcgggtcaccactttcggcggcaaggccgtgggagatgacacgctgcacgtcacgatccgcgacgacagcgctaccgcctacagcctgcgcggcttcggcctgtacctgggcgacggcacgttgtttgcaaccttcggccagaccgatcccatcatggagaagaccgcagcctcgatgctgctgctctccaccgatacccgcttcagtgaagtcgataccgcgctgatcgaattcggcaatgccgaattcatctatcccccttccaccaccgaagtgcagggcgtggtcgagttggccactacgaccgagaccgaagatggtgcagacacccagcgtgcggtgacaccgcgcgggctgcgtgccttcatcgacaagcgctttggtgccagcgcccccacccagttcgtgcgcacgctgctgtcgatcgcaaccgatgccgcgttccgttccgccctggggctgaaatcggcagcgttgaaggacgagggcgccgacaagggcctggatgccgatctgctcgatggcaggcacggcaaccattacctggactggcgcaacatgaccggcgtgccatccagcgtgcacgtgcccggacaggtgattttgttcgccggtgccactgcgcccaacggcatgctgctgtgcaatggcgccgctgttccgcgttccagctatccggcactgttcgccgccatcggtacccgctacggcgccggtgatggcgcgaccaccttcaacctcccggcaatgcaggaaggcacggtggtcacgcacacgctgaacccggaagcggtcggcagcttcacccagggtgaagtgatccgccatgcccacggtgcaagcgcggcaacggcaggcaaccacagccacgccatttccgtgggcgcaggcggcgcgcactcccacggtgccagcgccagtgccgtcggtgaccacgcgcacggtgcatggaccgactcgcagggccaccatgcgcataccggtggcacctcgtgggccggcgaccaccagcatggaggcgttgttccctccaatcctgccctcaacggctacggcgtctatcgcgaacgcgacaacgatgcgctgtatccggacggcgccacagcacccgccggcggtcacgcccatagcttcagcaccgacggcgcaggcgcacatggccacaacatcggcatgaacggcgccggcggccactcgcacaccatttccatcgcccaggtcggtgaccacggccatgccgcctcggccgccgatgccggtgcacacacccacaccatcgtggtggagaacaccggtggcgaccgcaacctgcctgccggcctgcggatgatctattgcatcgcgtactga

SEQ ID NO: 512106 - DNA, 642 bp, Stenotrophomonas maltophilia
  misc_feature (310)..(319): n is a, c, g, or t
atgacacattgcggcggtccgcccgccacggaaagaaaaaagaagatcaaaagcaaaagcgaaagcagagcttcggccccctcccctgctttagctgccggggtcagatcccttttcctgcggaaaagggatctgacccctaccccacacgcatggcgtggatctaccgtgtcgaccaaggtcgacacctaccggaaatcgcgagttacccgccgtcaccgggaaactgtcgaaggcggggcggtgtcggatggcggggtgtccgcggcatggatgccgcggccaagcccccatggacgggttcacggcnnnnnnnnnnggttcacggcgtccccgccatccgacacctccccgccatccgacacctccccgcctccccacggaacatcccagagccgctttggctttggctttggcttcggcctctgcgggtgcagggcgcagccctgcaaagaaaaaggccgcctttcggcggccttcacttctcattacttcagcttgatctcgcgcaggcgctcctcgaggaagccgtgggcggtgatcggttccggataccggctcgggttctccggggtgatgcaggacggcagcacgtcgatcaggaagtccgggttcgggtgcaggaagaacggcaccgagtag

SEQ ID NO: 512107 - DNA, 873 bp, Stenotrophomonas maltophilia
atgaaattttcacgtaataatagctgcatgggaataacttgggcgttcaatgccttagttaagcatcataccgaaatcaacaacatgtactggtcatttgtgcctgcttggtctttcactaactacatggcgagaaaaaattcagatgctacaccggaggcgcttttccatgcttcgggtccggacgttcatcgattggatcattcaattccgaattttattaggaacagtgaattgctggcaaactgggtgaggttgtcggtcttactctcggccctttcctatttcgaaatatacatgaagaaggtggtgacgctttctcttatgtctgatccggcagtgcgtctcgggaggtcaggagtaatcgagggggtatcttggatcaaaagtggcctccaagatgatcttgatagcttggtaacgccatgcctgaaaggtgaatggaatagtcgaattcaggcgtacaagaggctttttaaggtggctcctgcatcgctagaggcggaaaaggataagctcgacgctatgcgtgtgctgagaaataaagtgggacatagttatggaaggaatctgaaggtcgagattcttgaaacaactatcgcgccaatgtctagccttagtgaggcgggtctaaaggaatgtttggagcttgtcttcaatgtcgctcgagatatcgatgcgcacctgctatctaatcacattggatgctttgaagaggccttgttctttcataggttgcgtggccagcttaggggtattcaatgcctcgacgaagcaaagtatctcaggaaggccatggcacgtgagctggatggcaggacgcctggatcaagctattgcaggggtcttgtttctttctatcattcctgctga

SEQ ID NO: 512108 - DNA, 1197 bp, Stenotrophomonas maltophilia
atggctgacattgatgacgatgacttgctggaagctttgggcgttgaagcggcgcccacgaaggccggcacctatactgcggatcaggagcgcctgatcgccggtttcgaggacatcttgcagttcgtgcagacccatggccgcgcgccccagcacggcgaggaacgcgacatctttgaaagactgtatgcggtccgtctagatcgcctgcggagcatgcctgagacgcttgatcttctggttcacatggacactgccggactactggacaggaagatgactgcagccgtcaatcctgatgaacttgacgaagatgctttgttagccgagttgggggtcgatgcactaactagggaggacgacataacccggctgcgccatgtggcaccctttgccgaacgcaaggcggcggaagagattgccaatcgcacgcgctgcgaggatttcgagaagttccaaccgctgtttgaaggagtagagaacgacctcaagcatgaaaggcgaaagaccttgcggtttgggcgcgacgccagcgttttgcatggcaactttttcattctaggcgggcaaatggcttatgtcgcggacgtcggcgagcccatccgtgcacctaacggagaagccgatgcccgcatacgtgtgatctactccaacgggacggagagcaacttgttgcaacgatcgctgcagcgggcgctgtacaaggacgaaacggggcggcgcattaccgatgcagacagcggtccgttgttcggcgacaccatcgcccccgacgatatcgagagcgggactatctatgtactggaaagtaaatccgaccatcccttcgtcgtcaagcaccgcgagctgatccacaagatcggcgtcacgggcggaaaggtagagacacgcattgccgcggccaaggacgatgccacctacctgttggcagaagtggatgtcgtagctacctacaagctagcccacctcaaccgaacaaagctggagcgtctgttccacaaaattttcgcacctgcgcagctggaactaatcattgaggataggttcggaaaactcgtgaagcctcgagagtggttcctggtgccgctgcaagccattgatgaggccgtaagccgtatccgggacggctcaatcacagactacgcttacgacccgaaatcggcgcaactagtgcctattgagaagcagtcgtcataa

SEQ ID NO: 512109 - DNA, 243 bp, Stenotrophomonas maltophilia
atgaagcacatgaacaccctgcgccgttttggcgcctccaccttcaccaagatcggcgccggtgctggcgccctggttgcatcgggtgcagccctggcctcgggcagcacgtcgcccggcgccgctatcgctgccgaggtctccaagggcaacgtagacatggcaatcgtgatcggtgcgatcgccctgctgctgggcatcctggtggtgtgggccttcaccaagcgcgccgccaagggttga

SEQ ID NO: 512110 - DNA, 1425 bp, Stenotrophomonas maltophilia
atgaactggctagcgcgtgcttttaccgctgcaatccttcgtcgcgttgcggcgctttttgtcgccatcctcctcgcatggcttggtatcggcaatgctcatgcgcagtcgtgtgcgtcgtatagcgacagctgcacgcaaggtggagcgcagtccctggctgctgcttggggtggcgcacaggctcaatgtgtagcgaaagctggcccagaaggtaaggccggtgcaaacaagacaaccctgtacaacgagggagcaggtaggggctattacacagtgcgtgccgcctgcacgtttcgtggtaacgcgcttagtgatgtaacgcctccttttccgcagcaagctcagtggttcttcacccggggatgtgactcggagcccagcaagaccacttcctttttcccgccgtccggctcggttcgttgtgtaaatggctgcgaggtttcatatcgcgataacggcgatgacacgacaacgtattctccaaacggaaagacatgcgaaagaaagcctgactgtgacgcgcaaggtaggaacatggtttggaacgccatgctcggggtctgtcagcctgttgagcccgagtgcccggaaggcaaggtaaaggtcggcaacgcttgtaccaatgagaagccgtgcccggacggtatggcgatcgttgcaggctcatgcaagaaggaggacaacgagtgtcctgcgggcatgatccgcagcccgctcggcagctgcatccctggcgatggtcagtgcgcccagggcgaggtgcgcggcgctgatggaacctgcaagagggataagaacaacgacggccagccggacacggatgatcctgagagtttctccggtggtgacacatgcgaatcgccgccgtcatgtagcggctcgcccatcatgtgtggtcaggcacggattcagtggcgaatcgactgcaacacccggcgcaacaacaacattagcggcggtcattgctcccaatccggcatgcctacctgcacgggcgagaagtgcaatgcgatggagtacacccagctgctgatgcaatggcgatccgcttgcgccgtagagaagctcgcctcaaagcaggacacgcctggacagggcggtacgaacggagatgccaacggcaatggcgtggccgatgtattggagggcaggggagacgtgacgccgattggtgacggcgcggccgacgttgccagcgctaagaagtggggtattgggctttcaacgagcaatctcgatacgagcaacatgttcggcggtggtggcacgtgccctgagcctcccgcaatcacgatcatgggcaagacggtcaacgctgctgatttcccgtacttctgccgcattgcggcgattttccgcgccttgatcttgacattcggcgcatacacggcacttcaaatccttatgggacgggtcttctaa

SEQ ID NO: 512111 - DNA, 687 bp, Stenotrophomonas maltophilia
atgaccagtggcgggcgtgaactgctcaaatggctcgctctggtgctgatgaccggcgatcacgttgtgacggtgtttggcttgggtcacgtgcaagtcgtttcccagctcggtcgggttgcgttccccgtgttcgccctggtcatggcttacaacctggcgcaacctggcgccgatgcggggaagtctgctcggcgcctggcactttggggcttggttgccactcccgcgactgtgctggcattcggccaggcgttgccgctcaatgtgctgctgacgttcgccgccgcggctggttgcatttgggctctggaacggcgtcagtgggcgcttgctgcgctcctttgtctcgttgctccggttgtcctggactacgcttggcccggcgtgtggctcgttctggcggcctgggcgtggttcaagaatcatggaaagcgcatgcactggctgcttggctcctgggactggcgccagcagcggctctacctggtgctgccaatatgggtgtgggcatgcatgggcctgctctgcctgtacaacggcaacggctgggcgttgctagccctgcctgtcatggccttgggcgaactgccggcacgcattccgcgatcaggcagggccttctacgcgtattacgtgggccacctggcgcttttggtcgtgcttgtggctatagtcggcgcatga

SEQ ID NO: 512112 - DNA, 1536 bp, Stenotrophomonas maltophilia
atggcactagccggcattccagtgcacccggccgggcttctcttggctgccgcctacgctattgcctgcgtatccgcccggcagttttccctggaccagtttttccttcctgccggtatccgggtggcagcgcttttgatcgttccacaacgccgatggccttatgtattgctgggagaatggggctatttcgcatatctgcgcatccctacgatcgacgagtacggcctggaatgggtcatcctggcgtccacgctgctgatgccgatggcgatgctgatagttcacctccatctgagaaaaaccatatccgaggcagccaccggattctggctgctgtccctctcaatgtcggcagcagttgcggtcaccggtgtcaacctgagtctttctcgcctgctgtggccagttcctcccccagatacgctgctggatgctgccgaaagagtggtatttggtcattttgccgcgatcattaccatggctccactggcccttctttgggcccggcggcgctccggttctccatggcagaagaggttgctcgttccatccctcgtggccattgccctgatgctggccctggggctgtgcatgcagctgatttcgacgaatgcccattctacccgtacgcaccttgtgctgttggcggcattgcccgccatcaccttgaccttcatgcatggatggcgtggcgctgccatcgcgattccactgttgaaccttccacttcatttcgccacccccagcaccggcctgccggcctcgttcgatctgggcacgttttccacccaacagaacatggcggtgatgagtgtcgcgttgcttgcgctcggttccagcatcagctatcaccatcagcgcgcccgatcccgcggcctggccgaggaaacgacactacgtctggcacgcagttcccaccaaaccagcgaacgtgagctgcgtgaacgggccatccatctcaagcacttgggagaaggcatggacagttcgctcggcgagatggtcaactggctgaaatcccaaggccaccatgcggtagcgagcagcctgctgcacgcctcctccgtgcattcacgccttttccgggagcaggccagcctggtttatccgaccggactggagcaagtagggctctacgtcaccctgcaagcaggtggcgcaagtggagtctggaagaacagcgatcgcgtcacggtgcatgaccttgccggcaacccctgcctgttgagcgtagagcttcaactggcgatctaccgcaccgtgatcgaagcagtatcgattctgctggaattggaatccggtcagatctgcatccgggctcgctgtggcgttgccggacgtcagcgcggcatcgtcgtggtggtgggcctgctcgatcgcagacaagggttgtcgactcacaccatgagtcaggccgttgaacgactctctggccgaatcctgccctacggcggcgcggtgcagtgccgtcacaatcggctccggatcgcgctatctgagcccacacagagaccatcatcgaccgttccttaa

SEQ ID NO: 512113 - DNA, 375 bp, Stenotrophomonas maltophilia
atgcgcgcacggctgatgactctgctgatgctcctgccactgccggcacttgccggcggtggcagcgcaagcagcctgcagtggcagcagggcgaggcccggctggcgctgcactcgaccgaagggcagatccaggtggaggccgcgcgcccggagggccgattcggtgtccgccgtggcgaccgcatcctgcgggtggatgacacgcccgtgtaccagatcgaccacctgtcccaggccctgatcgattcccccgccgcgcgggcctacctgctgctgcggcgggagcgacggctggtgagcgtggcggtggatgcggacgcctggcgccaggcgctggatgctccgccgccgcctcctccgccccgcccctga

SEQ ID NO: 512114 - DNA, 1809 bp, Stenotrophomonas maltophilia
ttgctgggccagggcaataccggtggcgaactgtttgaaagtgtgccgttcaccggcgtgcgtgtggctagcgacgagcgcatgctgcccgattcgttgcgaggctacgcgccggtggtgcgcggtattgccgaaggcaatgcggtggtcaccatccgccagaacggcagcatcattcacgaaagcaacgtggcccctggtccgttcgccattgaggatctgtatcccaccaatttcggtggcgatctggaagtcagcgtcagcgaagccgatgggcgcgtgcagcgcttcaccgtcaatttctccgccgtaccgcaggcgctgcgtgcgggagcgtcgcgcttcgcgttcaccgttggtgaactgcgcgatacaggcacgacgccgcagacgttgcgcttcaccgagggaacctatgcgcgtggcctgaacaaccggcttaccgtgttggggggcgcgcagctgggcgagggctatcacgcgctgctggccggtgccgcggtcaacacggctatcggcgcattcggtgccgatgtcacccactcacgcgcccgcctgcgcggcagcgagaccgtgacgggcaacagcttccgcttgaattaccaacgttatgtggccagtaccggcaccaatttcggcctggccgcgtaccgctacagtacgcgtggcttcctcagcctcaacgacgcagcacgcgtgcacgacgacgactggggctacggccagcgcgcacggcagcgctaccaggtgaatttctcgcagaaagtgggccagcgcagcaacctgtatctcagcggcggtcacgtgtcctactgggacagcgcccgacgccgcaacgacttccagttgggtttccagagcacgctggggcggatgaattacagtgtgtcagcgctgcgctaccggttgggcgatggtcgccaggacacgcgctatgcgttcaccctcagtgtgccgctgggccgcagtgccaatgcaccgcgtgccagcacccagctgagccaggccgacagcgggcggcagtcacagctgggcatcagtggcagcctgggccagtcgcgtgcgctgagttacagcctgtccagcgcacaggacaagggccagaacagccatagtgcctatgccgcgtggcagggcagccacggtaacctcaacgcgggctacagccggagcgggggctaccgcagcctgtcactgggagcgtccggcagcgtggcagtgcatggcggcggtctcaatctgggcgcgccggtgggtgagggctttgcgctggtgcaggcaccgggcgctcagggcgcacgcatcggcagcggcagcctgcgcgtggcccgcaacggctatgcgctgttgccgcatatcagcccctatcgctggaacaccatcgatctggatccctccggtctgccgatcgaggtggaactgctgcagacctcgcatcgcgtggcccccaccgccggtggcatcgtgcgcgtgccgttccaggtacgccgcgaacgcacgctgttcatcgacgctaccgatgcgttgggccagccgttgccattcgctgccgcagtgcagaccgaggacggtacgccggcgggcgcggtcgggcagggcggtgtcatacagctgcgcggcgcgcaggacagtggtgtgctgatcgttgaccccgaaggcaagcgacgttgccgtatcgactaccgcatgcctgacgcgcctgatgcctacgggttgtcgtggagccaagtcgtgtgcatgccgcaaccgttgccaccggaaggactgcaggtgagcacgccggagccggaagcgagcattgctccgtga

SEQ ID NO: 512115 - DNA, 558 bp, Stenotrophomonas maltophilia
gtgaaagtcattgaaacctgtttgtcgggttgcgtggtgattgaaccgaaagtgttcggcgacgagcgcggttttttctttgagggctggaatgctgagcggttcggtgatctgggtttgccgacccagttcgtgcagagcaatgtgtcctcttccagcgagggggtcctgcgcggcctgcattaccaatggccacgcccgcagggaaagctggtgagcgttctcgaaggcgaggtctacgacgtggccgtcgacattcgtcatggctccccgaccttcgggcaatgggaggcggtggtgctgagtgcgcacaacaagcgtcaattctggattccggagggctttgcccacggttttgcggtgttgtccgagcgcgcgcttttccactacctgtgcactgatgtgtatgtgcccgaggcagatgcaggcattcgctggaatgacagcgaaattgcagtgaattggccgctgggctctccaatgctgtctgccaaggacgagcgagcccccttcctgaaggacattcctgaggatcgcctgccggtctacgtgccatga

SEQ ID NO: 512116 - DNA, 1167 bp, Stenotrophomonas maltophilia
atgaaaatcgcaatcgcaggcaccggctatgtcggactttccaatggcgtactcctcgcacggcagcatgaagtcgtggcgctggatgtgctggcagacaaggtagaaaaactcaaccgcggtgaatcgccgatcgtcgatgcggatattcagagcgcgctggcgggcggcgcgctgaacttccgtgcaacgcttgatccgtacgaagcgtatgaaggtgctgattttgtcgtcatcgccacaccgacggactacgatccggaaaccaactacttcaacactggctcgattgaaagcgtcatcaagaaggtgctgtcgatcaatccgtcggcgacgatgatcatcaagtcaaccattcccgtgggttttacccgtcggatgcgtgaacagttcggtgtccagaacatcatcttctcgccggaattcctgcgtgaaggccgcgccctgtacgacaacctgcatccgtcccggatcatcgtcggcgaccattccgaggcggccaagacgttcgcggcgctgctcgaagccggggcggaaaagaaagatgtcccggtgttgttcaccgattcaaccgaagcagaagccatcaagctgttcgccaacacctacctggcgatgcgggtgtcctacttcaacgaactggatacctacgcgcagactcatggcctggacagccgacagatcatcgaaggcatttcgctggatccacgcattggcagaggctacaacaacccatcgttcggttacggtggctactgcctgcccaaggataccaagcagcttctggccaactaccagagcgttccacagaacctgatccgggcgattgtcgattccaacaccacgcgcaaggatttcatcgcagccgatatcctgcgccgcaagcccagggtcgtaggcgtctaccgcttgatcatgaaggcgggctcggacaatttccgttcctccagcattcaggggatcatgaagcgcatcaaggccaagggcgtggacgtgatcgtccacgagcccgttctggatgcgccggagttcttcaattcgcgggtagtcaatgacctgcaggcgttcaagcaggaagcggatgtgatcatcagcaaccgtatggcggattcactgctcgacgttgctgacaaggtgtatacgcgcgatctgttcggcgacaactga

SEQ ID NO: 512117 - DNA, 1317 bp, Stenotrophomonas maltophilia
atgaagtccagccgttctgccatcgaatggagcctgatcgcagccggtgtcgtggtcatcgcattgacccttcaccctgccatcttgggtgatgctgctgtccgctaccagaccatcgagtactggctgggggagggcgggggctattcgaagttctcgatgatccagcccgcgctttccatgccattggcgtggttggccaatgccgtgggtatcgatccggcacacttggtcgcctacttcaacggcctggtttttctggtgatgggagccgctgcctatcccgaactggcccagcgctattcgccggaaacgggccgtacatggctgctcctgatgatggcggcgtcgatgtttccccaccatctgcagcactattacggcgaggtgttgaccagcctgtgcctgttgctggggatcctttggatcagtcatcgttccttgatcgcggtgttgctgctggcgctggcttgtgtcactacgccggcattgcttgtccccttcgccgccgttgctttcgtatggctgctcgtgcgtcgcaatccattgccaatgcttgcgctcttgatcgcaggagcgatctttctgggcgagacgctgatcaagtacggcggctttgactctggctacctctccgatggcgagcacggcttcgcgactgtcctgccgtactcagggcgccccgggttcagctatccgatgttctttggcgtcctgtccctcttgatgtccttcggcaagggactcgtcttctatattcccgcgctggttcttgtcttgagccgtcgcgtccgggagatgctgcagctcgatgcgcgcgcgacgtggattgcgttggctgcattggcgctgcccatcctcttttactccaagtggtgggcgtggtacggcggtgccttctggggtccgagattctttctctatctctgcgcgcctgcttgcctgtttatcgctctggcaatgcaggatcgtgccgtcgcgtggccacggcgattgctggtcacggctatcctggtgttgtctgcctgggttgctgtcgatggctacctgtacggtcaggagcagatggatgcatgctgggctgacaattattccgaggagtacctgtgctggtatgtgcctgagttcagcgcgctatggcggcctttcgtcaccggcagtttctggcacatgatgagcaacgtacgctggccctacgcggcttggaatctgcttgttgtcggctacctgctggctcgtgaactaattggctcgctcgggcgggatcctgcgccccggccgttgtctgtcgcagcaaagaattccgcccttccctga

SEQ ID NO: 512118 - DNA, 2055 bp, Stenotrophomonas maltophilia
atgctgtccatgcctgattccggccaagcgcccggcaacacggcaagcgttgctcggctggtgtggccgctgctgctgctgattgtcggtttctggctggtgccgctggcgctgacctgccagttgcagtgcgtgcccggcgacctgggcgatgcccgcttcaacaatgtggtgctggagcatttctaccgttggttgggcgggcacgaagccagcttggtgagcccgggcttcttctacccgatgcccggtgcgttgaccttctcggacaaccactggggaacggcgtggatctacgcgatcttccgcgcgctgggctgggaccgttaccaggcattcgacctgtggttcctctgcggctacctgctgaatttcgtggcgagccactacgtcttccgccggctgcgcttctcgccgctggccagcgcgctggcggcgtttgcattcaccttcgcgatgccggtggttgcgcggtatggccacgcgcagctgacgtatcgcttcctgattcccatcggcctgctactgtggcagtgcttccgcggagatggacgctggcgatggcttgccgcgctcgcgctcgcggttgcggcacagttctatatctccatctacctgggctacttcatgctgctttttctggcggcatgggcgctggcgcaatggctgctggaagggtgggggcctcgtcaatggttcgagcaatggcagcactacccacagggtgttgtccggcgcgagctgatcctggcctcgctgacgatcgtggccgcagcggtgatgatcgccgtgctgatgtacccgtacctgcattattcaaagctatacggtttccagcgcgctgcggcggagatcgcttcgctgctgccccggccacagagttacctgttggccgattcgtcgggagtgtggggcggtctcagtcagcagttggccacgcgcatgccgatgcgccatgagcaacagattttctttggtctgggtattctggggttgatgggcgtcggcctgttcatgtcacggctgccatcacgatgggttgcgctgggcgcgatcgtcatcgtggtggcgctgaccctgagtgtggggggcgtatccctctatatgctgctggccaagttgccaggtgttggctccatccgcgccatggcacgcatcggcttggtactggccctgccagtcgcgctgcttgttgctgtcggcgtggatgctttgcgaacaaagggaacagcaggactgcttgttgctggtgccttcgcgttggcgatggtggctgaatccgggtcgatgcacacggtccatttcgatatccagacggcacgtctacacgatacaggtctgcgcacccagctgccctcgcagctacccgtcgatgcggtgattttcaatccattgcgacccgaagtgccgttttacgaggatgaactggacggagtgattctggcccaatcgctgggcaggccgacactcaatggctattccggtaacagtccgccgggctacaccgccaacgttgaagcgtcgcccgagcaacaggcagagcaacgaataggggcagccaaggcattctttgcagaaaagctgcatcttgcgttgccgttggaaatggcggactcactggagatcgtgcgccatcctgagccttcggacacaccccgaagccagatgcggttgacggaaatggcgcgtgtgtcgatcgaggtcgttacgctgcggcgtcagtcagatggctattccgtacaggtacgtatccacaatggtggcgatcacttcttgacctccaggtctcacgcacccttcaggctttcatggcagtggtttaccgatgccgaaggccccgattcggcgcgttggaccgaacgcgtggatccgacaggtggggtgaatgttgcacctggctctgatttcatcacgacgttcaagattccggataggcaggaaccaagggcacgtctggcggtaagcggcgtgctggaggggcgtgcctggctgcacgatcatggcatgcaaccggccgtcgccgagcctgatgccgcaagaccaccgaacccctga

SEQ ID NO: 512119 - DNA, 600 bp, Stenotrophomonas maltophilia
atgaacaagtacctgcgcgccatcctggccaccgttgccttcattgccgttctgctgttgacctactacctgcacatgcgctatttccgcgtcaatgtggttctgtacgccagcatcctggatgcactcatcgcgttggtggttgttttcggcacgctgtacctgctcaagtgcttccgtgatttcagtcgcctggaactgatccagctggccgctatttggttgctgggcggatacctgttcgccatttcggtgccgacggtgatcgaccgctcgttgtcgttctacattctggagaaactgcagcagcgtggcggtggcatccgcgaggatgcgttcaggcaggtcttcaccgaggaatacgtacgcgagcatcacctcgtggaagtccgcctgaccgagcaactgcagtccggtacaatcgatatcgagcatggctgcgtgaagctgaccccgcgcggtgagcgccttgcctcgttcagccgcttctaccgccggaacctgctgccgacccaccgactgctgatgggtcagtacaccgacgcgctgacggatccattccgcgacagccacatgagcaacgactaccgttgccgttga

SEQ ID NO: 512120 - DNA, 399 bp, Stenotrophomonas maltophilia
atgcccgccgcacctgagcgcgcgttgggtggccagttgatcaggtacctgatcaacggcgttgtcgctacggtagtgcattacagcgtgctgcgcttcaacatcgaagtgctgcacattcccctggctgggatcgccaatgccatcgccgccgtgttcggcatttcggtgtcctttctgggcagccgctacttcgtgttccgcggccagcagggcagcgtggtgaagcagggctcgctatttctgctggtctacgccgccatcgccgtcctgcatgccctggtgatgtatgtctgggccgatcggctcggctatgactaccgcatcggcttcctgcttgccaccggcatgcagatggccttcagtttccttgcgaacaaattcgtggtgttcaaatga

SEQ ID NO: 512121 - DNA, 939 bp, Stenotrophomonas maltophilia
atgcgcaaggttgtggtgatgccagtgtatgaggacctggaagcttcctcgaagctgttcctggaactggcgcgtacccagggtccggatacctatgtcgtggcggtggatgatggttcagttcgccagccgttgcaggtgtcggccattgaggcagccgcactggaaggcgtggtgatcaagctgcgtcgcaacgtcgggcatcaacgcgccattgccatcggcctaagctacgttgcagagcatttcgatgataatgtgatcgtcatctcgatggattccgatggcgaagacacacctgagagcatcactgaactggtcggtgggctgtcatcgcccgatgtcgacgtggttgtggctacccgcaagagccgggtcgaatcgctgaagttcaagtcgttctacatcgtctacaagctcctgttctcgctgctgagcgggcgcaagatcagcttcggtaatttcatggctgccaagatgccggcggtgcgccgcctgtcttcgatgcaggaactgtggacgcacgtggcggctgctgtgctcggctccaaattgcgcgtgcagacctgcgcactggatcgtggcgcgcgttatgccgggcgcagcaagatgaacttcgttggcctggccctgcatggcttccgcgcgctgatggtatttgccgaggatgtactggtgcgcgtgggcattgcctgcacgctcgtagcgggcctgtcagtggtcggtggcgtggtggcattgctgttgaagacgatgggcttcgctacgcctggctggttctcgttggccttcggcatcctactgctagtgttcctgcagacagcggcacttacgctgatcatcctgatgctgtcgggcatgatccgcagcggcggggtgctggtcgcaggcagttatcgtgaattcgtcgatgaggtacagcatgcccgccgcacctga

SEQ ID NO: 512122 - DNA, 846 bp, Stenotrophomonas maltophilia
atggtggaggaactgcgtgcgcagggctgtcatattgttgcgttgagcgggcagggtgcagccagcgctgctgatgaccatgtcgttgccgatctgacagatgctgcggcggtgacggctgccgtagccgaggcgcgcgcggatatcgtcgtgcatctggccgcgctggcattcgttggccacggtaaggtcgaggacttctacagcgtgaacctgatggggacacgccacctgctcgctgccctggaccaagccgggcatcgtcccgaacacgtcctgctggccagcagtgccaatatctacggcaatcgctccagcggtatcctggacgaggatacgatgcctgagccggccaacgactacgcggtgagcaagctggccatggagcatgtggcgggcctgtggcgtgagcgtttgccgatcactattgtccggccgttcaactacaccggtgtcggccaggcagagcagttcctggtaccgaaaattgtctctcatttcgcccggcggctgccggtgatggaactgggcaacctggaggtctcccgagattttggcgatgtaagggccgtggtttccgcctacaggcagctgttgcaggtgcccgctggggggcaggtggtcaatgtctgctcgggccgtggcctcagcctgaccgagattgtcatgctgtgcgcggaactgaccggccatcagctggagatccgggtgaatccggcttttgtccgacccaacgaagtcaaggtgctgctgggcagcaacgagcgcctgcggggactgataggcgactggcaggttccgccaatgcaggagacgctggcctggatgctgggcgctgccctgtag

SEQ ID NO: 512123 - DNA, 2517 bp, Stenotrophomonas maltophilia
atgatgcggattcttctggacctgcagggcgcccaaggtgaaagccgcctgcgaggcatcggccgatactcgttgtcgttggccctgtcggtggcgcgcaatgcgcgtgaccatgacatccacgttctggtcaatggcgcctttcccgagggcattgatcacatccgtgacgccttcgccgggctgctgccgagggccagcatccacgtactgcacgtgccgctgcccgttgcccagcgtgaaggcgagaatgcgctgcgtcgggcgcaggccgagatcgtccgtgaggcggcgattgcgacgctgcagccggatatcgtgcatgtctccagcctcttcgagggctttgccgacaatgcggtgggaaccatcaaccagcactgccgcgtgccgacgatcgtcacgctgtacgacatgattccgttgatgaatccgaagctgtacctggaccccgatccgcgctatcgcgagttctatcatgggaagctggaacagctggcgcgtgccgacgcactggtggccatctcggaaagctcggcgcaggaagcgcacgaagttgccggtttcccggcagaacgcatcttcaacatgtccgcagcctgcgatccggtgttccgcccgatggataccctggactcccggcgcatcctgacccgcgttgcctttggagtgaccgccggcttcgtgctgtataccggtggcgcggaccgccgcaagaatctgccgcgccttgtggaagcctacgcaggcctggacgcgaaactgcgcgccggcatgcagctggtgttcgccggacatatgcccggaccgcacgtggatgagctgcagcggttggcggcgtcgctgggcctggcggagcgggacctggtcttcaccgggtatgtttccgatgagcaactggtcgcgctctacaacgaatgcagtctctttgcgtttccttcgtggcacgagggcttcggcctgcccgtgctggaggcgatggcgtgcggtgctgccgtcatcgcgtcggacgcttcgagcattcgtgagatcgcaacggaacccaccgcgttgtttgatcccatggatgtcgattcgctccgtgcacgcatggctcattttctctccaatccggaagagagccagcgcctgcgtagctattcactggagagggcgcaggcgttctcgtggaacagggtggcctcggtcttcgtcgatgcatgcgagcacgtggttggactggggctggagcgcacctcgcccgaggcagcgatcaacgtcgcgacgacccgcctgggcgcgctccccgatgtccagaacatcgatctgctgatcgctgcggatgcgcttgatcgcagctgcatggctgagccgcagctgctggttgatgtgaccgagctggcggaaaaggatctgcgcacgggcatccagcgcgtcacgcgtgcggtggtggctgagtgggcgaagcttgcgccgacgggctatcggttgcagttggtgcgcctggatcgcatttccgggcagtatgtctgcgccaacatgtatgcggcaacgctgctgggtctgcagcagcaggctgatgtgccggtggtctgccacgccggtgatgtgttcctggggctggacttgaccggatctgcggtgaggctgggaagcgagtggttccgctaccttcgccgcagtagcgtgaagatcagcttcgtggtctacgacatcctgccggtcaggcatccggaatggtggccgggtggtggtggtcagcaccacgaagcgtggctgcgtgaaatccttggctgcgccgaccagctcatctgcatttccagggccgtggccgatgatgtccgtgcctggatggaagaggagcaggtgcaaagcccggcctccattgactggttccaccttggtgccgatctggatggcagcgtgccgtcgaagggacttccggatgatgcagagcaggtgattgagcggatcgctgccgttcccagcttcctgatggttgggacgatcgaaccccgaaaaggtcatgagatggtgctgtcggccttcgagacgctctgggcggaagggcatgacgtgaatctggtcatcgtcggtcgcaaggggtggttggttgacgcgttgtgcagccggttggctggccatgcgcgactcggtcgccagttgttctggttcgagagtgccagtgacgagtacctggacgcgatctacgccaattccagctgcctgatggctgcctcggaaggtgaggggtttggtttgccgctgatcgaggccgcgcagcgtggtctgtcgatcatcgcccgcgatattcccgtatttagggaagtggcgggtgggcatgcacacttcttctcggggtacggcgacgccccaatcgcgcaagccgtccgtgaatggctgccacttcgggccaagggggccgaaacccgttcagaccgcatgccctggctgacctggacccagagcgccgcacagctgcagcgggtgttgctgcaggatctcgccaccgtggaccggtccctcaccagctcctga

SEQ ID NO: 512124 - DNA, 1404 bp, Stenotrophomonas maltophilia
atgtccaaactcatttcctacgcccagaatttcgaagatgtcatcttgtggcgtgtactgggtcacatcaaaggtggccgctacattgacgtcggcgcgcagagtccggatatcgactctgtcagcctcgcattctacgagcgtggctggcgtggcattcatgtcgaaccgacccagcactactcggatctgctgcgagcgcggcgtccggacgagcaggtgttgcaggtggccgttaccgatgctcccggcgagctacgcttcttcgacgtcgccgacaccggtttgagcacgctggatgagcagatcgctcaggagcatcgcgatgccggcttcaacgtcagtgaagtgcgtgtcccggcagtaaccttggacagtgtgttcgaaatggcgggccctggtgagatccactggctcaagattgatgtcgagggcgccgagcgggaggtcatcgcaggttggaacgggtcgcgtcggccctgggtactggtaatcgagggtacacggccgcagagtccggaactgaaccaccatcagtgggatccgacggtcctggccaagggatactcctatgtgtacttcgatgggctgaaccgcttctatgtaagtgacgcgcaccctgagctcgcggccgtgctgacgtgtggtccgaatgtgtttgatgacttcgtcctggcgccacaatctgcattctgttcggccgccaatgcgcttgctgccgaagccatggctcagcagagagcgtctgccgctgaagcagcgcagcagcagcgggaggccgctgccgaagtcgagggccagcagcgtgcgcagttggccgaagcgtcccggaagattgaactgctggaggtagagctgcaggcaaggcgtgcttcggaggccgccttccagcgcgagaagaacctgatcgtggaagcggccggagagtatcgcgaagagttccagcgggcagtggcacagaatcaggttttcgctgttgagatcggacgtcgcgatgctgaaatcgtgcgcctgaatgaggtcgtgcacgcgcttctgaccagcacctcgtggcggatcacccgaccattgcgcgggctgaagtatctggtcacgcagcccacgatgtttgcgcgtcgcgtggtgctcgcggccatgcgtcgggttgcccagcgccccgcagtcgcgcgtccgctgaacacgctgttgaagcgggtgccgcggctgcatgccaagctgatttcggtggcggtcaataaccggatcatcgcccaggtgccgggagccatgcagcatgcaggcctggtcggcggggttggttcgttcgagggtctcaccgaagtgcaggccctggaacagctgtccatgcgtggacaggcgctctacacggatatcgcagttgccaatcgcagggagcgtagatga

SEQ ID NO: 512125 - DNA, 1242 bp, Stenotrophomonas maltophilia
atgagtggtgagttgcgtgttgaaggcgtaggcaaggcctaccgggtgtggggcagcgaatggctgcgcgcagcgagctggttcggtctgccaacccgcccgcgcgaagagcactgggtcctccggaacgtgtcgttctcaatcgcgcccggcgaagcggtgggtgtgatcggacagaacggtgccggcaagagcacgttgctcaagctgatcaccggcaccgcgcagccgaccgaaggacgggtcacgcggactggccgggtcgccgccatccttgagctgggaatgggcttcaaccaggacctgacgggccggcagaatgccttccactctgcaggcctgatgggatacagccaggagcagatcgccgaagccatgccggggatcgaggcattcgcggagatcggcgaatacttcgacgagccggtgcgcacgtattccagtggcatgcaggtacgcgttgcattcgcggtcgcaacggcattcacccccgacctgctgatcgtcgacgaagccctcgcggtgggtgacagttacttccagcacaaaagcttcgaccgcatgcggcggttccgcgaggaaggcacctcgatcatgctggtttcccacagccccggcgacgtgaaggctctgtgtgaccgggtgatcctgctcgacaagggacaggtgctgaaggacggtgcaccggacgaggtgatcgatttctacaatgcgctgatcgcccgcaaggagaacgagaagctcagcgttgagcagcgtcgtgacgagtcgggttgggtcacgactcgcagtggcagcggccaggccgtggtcagcagcctcaaactggtcgacgcaggcactggcaatgaggttgctctggcgatggtcggacagcagctcaggctggtgctcgaagcagaagtgcgggcgccactgcccagtctggtgctgggcttcatgatccgcgacaagcaggggcatgtggtctggggcagtaatacctggcacaccgagcaggttcagagcaacgtgtcggcaggcgaacggctgtgctacacgctggatttcacctgccgcatggggccgggttcgtactcggtttcgccggcactggtcagcagtgacacacacatgatcgacaacttcgaatgggtcgacaatctactggtcttcgaggtgatgaatgcggatcaccccatgttcattggcagcaactggctggacgccgagttttctgtcgaacgcagcgccgtcttctga

SEQ ID NO: 512126 - DNA, 795 bp, Stenotrophomonas maltophilia
atgagtgacatgatccggtccatctgggcctaccggtatttcattctttcgtcgatcaagaatgaattgcgggtccgcttcatccgcagcaagctcggcgcattgtggatgatcatccatccgctgatgcaggtcgtgatctttgccaccatcctgtcggaggtactgtcggcgaagctgcccggcatcgacaacaagtacgcctatgcgctgtacctgatggcgggcacgctctgctggagcatgttttccgagacggttggcaaatgcgtgtcgctgttcgtggacagcggcaatctgatgaagaagatggcgttcccgcgcatctgcctgcccttcatcgccggtggcacgatgctggtcaacaaccttctgctgctcatcgcgatcttcgtggtgttcgcagtgctcggccactacccgggagcgcaggcgctctggctgccggtcctgatgctgatcacgctcttcttcgcaatgtcgatcgggctgctgctgggggtgttgaacgtgttcatgcgcgacatcggtcaggtggtccccgtcgtgctgcaggcgttgttctggctgacgccgatcgtctacaacatccgcatcctgcctgagcacgtgcagggcctgttcaagctgaatccgttgtatccgctggtgagcagctaccagaacgtcctgctctacgaccaaccgccggtgtgggctgacctggcctggctgattggcgccgcatgcgtgctggcgctggcatcgttgatcgttttccgtcgtgccagtcccgagatggtggatgcactatga

SEQ ID NO: 512127 - DNA, 1356 bp, Stenotrophomonas maltophilia
atgtttgcgtggctgcgcagccaggcgtggctgcgcggtgcctaccatctgttgccgaccggcctgcgcgaaggtgcgctgcgattgttttcgcggcgacttcaggcgcggacgcgcttcgtgcgcaccgcggcctgggagaaaactctgcagcctgccggcgacgtcgttgctggcgcagcagggcgtggagcggacctgcccggagtcaacatcctcggctatatccatggtcagttcggattggccgaagcggcgcgcagctatgcgcgtgcattgatcgaacagggtgtgccggtcgcgcttcgcgacatcgatcttggcctgccgaacgcgcgtggcgatcatgcgcttgatgcctacctcgacgatacgatgccgcatgccgtcagcatcatcttcgtcaacccggattacctggcgcaggccctggcgagtatcccgctggcccgcgggcaggggcgctacctcatcgcctgctggttctgggagctggaacgcctgcccgacagctggttgccggccctggagctggtggatgaagtgatggtggccacaggtttcgtcgagaatgccgtggctcatgccacccgcaagccggtgacgcggattccgatgccgctgggtgtcctcaacgacagtgggctgcagcgtgtggacttcggcctgccgcaggaggccttcgtcttcctgacgtccttcgatttcagttcgcggatggagcgcaagaatcccgaagcggtgatccgcgccttccgcgaggcgttcccggcacagcgccgtgatgtccgcctgctggtcaagagcagcaatggccatcgcttcccgcatctgctcaagcatctgctggccatcgccgacggcgacgagcgcatcatcatccgtgacgaagtcatcgcacgcgagcatctcaatgcactgcagcgttgctgcgacgcttacgtatcgctgcaccgcgccgagggcttcggcctgggcctggccgaatgcatggccatgggcaagccggtgatcgccaccgggtggtcgggcaacatggaattcatggatgccgattcggccggactggtcgatttcacgcttgttccggtgcgtgaaggggaatacccggcgggcaaggggcagcgctgggccgacgcgcaggtgccgatggctgcagcgtggatgcgccggctggccgatgacccgggcttcgccgccgcgctggggcaggcaggacgcacccgcgtcgaagcaatcctatccacccaggccgctgccagcggcatcattgaacgcgttcgccagcttcaggccaacgcacgtaccgcgcaggacaccatgcagacaatgaagcacgaggcaggtaatgagtga

SEQ ID NO: 512128 - DNA, 183 bp, Stenotrophomonas maltophilia
atgctcggctgccgtacgcgaagcctctcagccgagcatggctcggctctacagaagatcattccgatcattctttcgttcatccacgcatgccgtggatctaccgtgtcgaccaaggtcgacacctaccgagagcagcggaaaactgtcgaaggcggggtgagtccggttgtgggggcgtga

SEQ ID NO: 512129 - DNA, 441 bp, Stenotrophomonas maltophilia
atgaagaaccagaagggcttcaccctgatcgaactgatgatcgttgttgcgatcatcgccatcctggccgccatcgcgttgccggcttaccaggactacaccatccgcgccaaggtgtcggaaggcctggtccaggctgacgccgcgaagcttgctgtagctgaaaccgctcagtcgcagggcattctggcgactgccgtgaaggatgcggctgctgccggctatgtcagcaaggccaccacgaacgttgatagtgttggcatcgctaatggtgtcatcaccatcaccaccaaggataccggtgccaaggtgcagccgattctgactctgactccgacccaggccgacgaagattctccgatcacttgggtatgcaacctgtccgctggtgaagcgaagcacgtcccggccagctgccgcaccgccgttaagaagtcgtaa

SEQ ID NO: 512130 - DNA, 417 bp, Stenotrophomonas maltophilia
atgaagaggcaaacaggcttttcgctgatcgagctgatgatcgtgattgcaatcattgcaattctgtcggccgtttcgctggtcgcataccgcgactacaccgtaagagcgcgggtgtcggaaggaattgcactcacggcgccgttcaggaatgccgtagaagaaaatgctgtggagcacgggggcttggatatgcgcgcctgtgctgacgtcccgtcgttacctagtgctacagaaaacgtcgctgcgctttcgtgtggcggggagggcgtcctgagcatgagaaccacggaggtggcgggtgatatctctctcgacttcaggccatcggtcaatgatggaggcatggtggtctggctctgtgagctcaaggtgggtagctctcgccaagtacctagcgtctgtcggacgccctga

SEQ ID NO: 512131 - DNA, 447 bp, Stenotrophomonas maltophilia
atgaaggcgttgatggagtacgtgggctggcgcgatgttcagtcggccatgcgttacctggacgggcgtgacccgttcgcccgggatcgcattgaagcgagcctgcccagcccaaccgcgccagctccggcgatggcgctgccggcgcccgaggtcaaatctgccctgcagctgctcctacgcatggtgctgaccccgtttgcccgcgccggccgcggcgcggccaaggcccggggcagaatcgaagagatctgcttggccccgttccaagcggtgcggctgaacaccgccagcagcgagtaccggttgactgttcccaccgatcccgaccgggatctggatgaaatcctggccacgttgctcgatgacatgcaccgcatggccgatacgcaccagtgtttcctggaagcgtctctcagtacagacgacggccgccactgggattga

SEQ ID NO: 512132 - DNA, 2112 bp, Stenotrophomonas maltophilia
atgcgtagctgggctgttcgcggactggtcctgctgctggccctgctggcgctgccggcagcgttggcgcaggccgttcctggcctcctgccgctcaatcccctgcagcgcgagtacctggccacccatccgagcatcgtcgtggggcagtatgacagcggctggccaccattcgagtcactccgtgatggtcagcaggtgggtctgggcccggattatctgtcgcttcttgcccgtcagttgggtgtgaaggtcgaggcccgtcgttttccggattggacctccgtgcttgatgcggcatgtcgtggcgagatcgatgtggtgatgaatgtcggtctgagtgccgaccgcacccgctgcatggtctataccgccgcctatggcgaggcaccgctggctctggtgggccgccccgacgacctgcgtgcctcggacaatcccgatctggatggactgcgggtggtgatcgagcaggacttcctgaccggtccgcaggtgcgcgcgcgttttccgcaggcccgtcagcttgtcgcaaacagctcgttggcggcactcgagatggtcagagacgacaaagctgatgtctatatcggcaatgcctatgtcgccaccgaactgatcgccacccagcgcctgcagggcgtggtgttgctgcggccgagcgatctgcctcccgaacgcctgcacttcggtgtacccaacagcaagcagccattggccgaagcgctggacctcgcgctggcggcaaccagccagtcgcaacgggacgcgctggcacaacgctggctgccgccgccgcagtggtcggcatcggcgcagctggcgctgagccgggcagagaagcgggtgctggaacagccgttgaagatcggtttcgcaccgaacgcggcgccgctgtcgttcaccgacgagcagggcaagcccagcggcctggccagtgagtacctgcgccgtctgatgcaggctggcgccaacctgcagccggagagcagccacgactggtatgaggtgcgtgagaaggcccgccgcggcgagttgcaggcggtgatgggaatcccggccgattcgcgctacctggggccggactgggtgttcagccagcccttcatcagtgtgccgaacgtgatcgtcagccgcatcgacagcccagccctgctgggcatgtcggacctgcagggcaagcgcgtgctgctgtccgatcccgagcgtgtgcggggctacgtgctgcagcaggcaccgcaggcgcggatcatggcggcacgcagtgcggaacaggcgatgcagcgactgcttgatggcgaggccgatgcctacgtgggcaatctggcgctggtcgactacctgctgcgcagtcgtttccccggccgcctgcaggtcgctgcaccggcaggcttcaatgatcagctggtgctggcggtggagcggcggcatgccgcactggcgaccaccttcgaccgcctgctgctgcagatgacgccgcgcaagcatgaggcgctgcgtggcgactggctggcggtggagtatcgcactggcgttgactggaaaagcgcattgcactggggcctgccactggcgctggtactgctgaccgcgttgttggtgcatggcatcggctactggcgcctgcgccgcgaagtgaccggccggcgtcatctggaacagcgactggccgaggtcaccgacaacctgcctgcggtggtctaccaggcacgccgcagcgctgatggcgtgctcagttttccgttcatcgccggtgatctgcaggcgttgttcgggatcagccggcagcaggccgagcaggatgccagcatgctgctggaacgcattgaagaagacgatcgcgcgcacatcctgcaggccgtcgaacaggccgcgcgccagttcgcgccgctgatcctcgagttccgcctgcgcgccgggggcgaaggcgcgcgctgggtgcgcagcccaggcccatccgtatgccgccgaagccggtgcggtgacctggagtggctactgggtggatgtaagcgaagcgcgtgcacaggccgacgccctggtcacggccaaggccgaggccgagcaggcggcggaagcgaagtcgcgcttcctggcgaccatgagccatga

SEQ ID NO: 512133 - DNA, 777 bp, Stenotrophomonas maltophilia
atggaaaccctttccctgttgcagctcgcgctgggtggactctccggcattctggtgggcttcgtactcgggctggtcggcggaggcggctctattctggctgtcccgctcatgctttacctggtgggcatcgacagtccacacgtcgccatcggtaccagtgcattggcggttgctgccaatgcactttccaaccttttcgttcatgcccgccggggaaacgtgagatggccgtgcgcgtcggtcttcgcgttggcaggcatcgctggcgcctatctgggctccagcttaggtaaggccgtggatgggcagcgactattgttcatgtttgccctgctgatggtcgtgataggcattcttatgctgcgcaaacgcaatgcggaaggtgatgcaagcgtccgcctcagcaaagggaacatgccggcactgctcggattaggggcgttctccggggcactctccggattcttcggtattggcggcggcttcctggttgtccctgggctgatggccgccacgggcatgccgatgctggccgcaataggcagctccctcgtagctgtctccgctttcggtctgacgactgccatcaactatgctcaatccggcctggtcaactggccacttgctgccgcattcgtcgttgctggaagtgcgggcggaatcgccggagcgcgcgcatcagcagcgttggcagagcaccgtggagtgttgaatgttgcattcgcgctactcattttcatgacggcggcttatatgctctggcagatgccctga

SEQ ID NO: 512134 - DNA, 438 bp, Stenotrophomonas maltophilia
atgaatctgcactcacttgcgccgagcttgcatgtgaccgaccaactggttcccaccgacatacctgccttgaaaaaggcgggcatctcgagtgtcatctgtaatagacccgacggcgagcagccggaccagcccgatcaccttgcactgcaggcggcctgctccagggcgggcctgggctttgcctatctgcccgtcgtgcctggcggcatcaccgatggacatgtgcagcagtttggcgtgctgctggaacaactgcctgcacccatcgtcgcttactgcaggaccggcacccgctcgacgtcgctatgggccctatcccaggttcgtaacggcggagctacgcccgaacaggtgctgtccattgccggtgaggctggttacgacctgtcctctcttgcttcgcgcctgcgaggcgccccctcttccgctgcctaa

SEQ ID NO: 512135 - DNA, 441 bp, Stenotrophomonas maltophilia
atgaccctcccctctttggcgtggtactggcccgtcatcggcggcctgatgatcggtacggcagcgggtggatttctgctgctgaccggtcgcattgccggcgtctccggcttgcttgcaaacactcttggcctgtcgtccgctggcgaccgctccttgtcggccctgttcctggcagggctgctggtggcgtccgggctggcgctcgcggtcaagcccatttcgctgccgtcgctttcaatctccgctacgccgttgttggtgttggccgggctgctggtcggctttggaacccgcctcggatctggctgcacgagcggtcacggcgtttgcggcctggccaggctgtcaccacgctccatggttgccacgggcgttttcatgctcatgggcatggcgaccgtggcggttgtccgcatgatgatcggaggcggaacatga

SEQ ID NO: 512136 - DNA, 252 bp, Stenotrophomonas maltophilia
atgtacgtcggcaatgccggagatgcccagagtccagggcaggctctcgtcacccagccagtctcgcagcagacttgctgccagaagcagaatgacgatcagcccaacaaaaccacgatcgccaacggtttgaatggccgcacgatggccagcccggacaccgctgaggtactgagcaaggaccgccatccgaatgccaatgctatccccatggccacgattgccgagcagaccagcgggaccatgctgtag

SEQ ID NO: 512137 - DNA, 2304 bp, Stenotrophomonas maltophilia
atgctgcagcagttggcggagcaactgcctccaatcgatgtaccggtccccaagctcaagcaattccgtgcaatggcccgggcgtatgacgccagcgagttggccgaattgggtgaggacaagcgctatgcgctggccaccatcttcatccgcgcccagcatgccaagacattagacgatgcggcagagttgttcatcaagcaggtgcgcgggctggagaacaccgcgcagcagaagctgctggcctatcagctcgaacatgccaaacgcgccgacttcctcatcggccagctcaaggagatcctgcaggcctaccagctcgacggcagcgatagccagcgcgtggacgcgatcgacaatagtctggaagcggaagtgtccaccttgctggccgaatgcgaagaacatatggcctacgcagggaaaaactacctgcctttcatgctgcaaccttacggcgcggtcaggccgctgctgttcaatgggctggagctcatgaacttgcgggcgaccagccacgatgccggcatggagcccttgatcgcagccgtgctctcgctgcgtaaccaacgccgtgagctgatcgaggtcgctttcctcggtttggacccggaaaaggacttcgactggatgtccaagctctggcgtcagcacgtgttcggcaaacgggccagcgcggcaggagctggctggatgcaccgtaagtacttcgagctggccgtgctggtgcaggtcaaggacgaactgaagtccggcgatctcttcattcccagcagcgagcgctttgacgattaccgcgagcagctggtcgatgaggccaccttggcccaggaactggaagcctatggccaggtgtcaggcctgcccaccgacgccgagtctttcgtggcggggttgcgcgcacaattgacggctttggccgatgaggtcgacgcgcgtttcccggagaacgttcatgcggacatcctggatgggcgcctggtgctgcggaaggggcaacgggccgaagtctccagcgcgattaccaccgtggatcgcctcatcgccgaacgactcccagagtccagcatcgtagatgtcctgatcgatgccagccaatggctggacctgcaccgttttttccgcccgatcgccgggaccgagagccaagtcgaagatctgccccgacgcgtgatcaccacgctattttgctatggctgcaacctggggccgacgcagacggcgcggtcgatcaagggcttcagccggcgccaggtcgcttggctcaacctgaaatacgtgaccgaggatgtgcttgagaaggccatcgtagaggtcatcaatacctacaacaaatttgacctgcctggctattggggcagcggtaagagcgcgtcagcagatggcaccaagtggagcgtctacgaagacaacctgctgtcggagtaccacatccggtacggcggctatggcggcatcggctactaccatgtgtccgacaaatacgtggcgctgttcagccacttcattccctgtggcgtgcacgagggcatctacatcctggacggcctgttggccaacacttccgacatccagcctgagatcgtccatggcgacacgcaggcccaaagctatccggtcttcggcttggcccacatgctgggcatccagctgatgcccagaatccgaaacatcaaggacctgacattcttccggcccgaaccgggcagggcctataaaaacatccaggcactgttcggggacagcatcgactggcaactgatcgccacccatcttcacgacatgctgcgggtggtgatctcaatccgattgggcaagatcaccgcgtcctcgatcctgcgccggctgggcacctacagccggaagaacaagctgtacttcgcattccgggaacttggcaaggccgtccgaacgctgttcttgcttcgctacattgatgacaacgagatccgcaaaacgatcaatgccgcgaccaacaagagcgaggaatacaacggcttcgtgaagtgggtcttctttggcagccaagggatcatcgctgagaacgtccaacacgagcagcgcaagatcatcaagtacagccagctggtggccaacatgatcatcctccacaacgtggagggtatgagccggacgttggctgagatgcggaaggaggggatcgaactgacgcccgagatcctggccggtctgtcgccttatcggaccagccacatcaatcgcttcggcgattaccacctggatcttgaaagggaagtggcgccgctgagctacacagccaaggtgcttgaacagaccccatag

SEQ ID NO: 512138 - DNA, 207 bp, Stenotrophomonas maltophilia
atggcgccggtgccagttgtagtgatgcagccacggcccgagcgcatgggcgcgctgttcggagctgtcataggcgcgtgcgtaggcccactcgcgcagactggtctgcaccaggcgctcggctttgccgttggtgcgcggcgtgtagggccgggtgcgcaggtggtgcataccgagccggcgcacgagacggcggaagctgcgtga

SEQ ID NO: 512139 - DNA, 243 bp, Stenotrophomonas maltophilia
atgaagactgtcacgatgggaaagtcgatcagcggcagccatcttggggttggctacgaggcaaagggcatgttcagcgcaatggggggcttcaaagcgggctaccgcttcaacagcaaggccgactggacgtggggtgacacaaggtttgaaagtcttgctgaggcacttgacgctggctgtgcattggcacgggaagccatttcctccggacggcatgaaacgcaggacagtgcctcttaa

SEQ ID NO: 512140 - DNA, 534 bp, Stenotrophomonas maltophilia
atggcacagcctaaagtccgcaagttcgcaggcgatctgcgtttctgggagcatggcgcgaacggcgcccgcattcccgtcatcccggagccggccgacaagttcggcaaccagccgctggaacagtcgtcgctgacgttcagctacgaagctggcgactcggtggagatcaagagcaagcgccgcgatgcgcgctatcagcagatcatccacaaggattccaaccctggtgtcaccagtgtctcgatcaccgcgctggaagtaccgccggccatcctggcccgcatgctgtacggcacgctggtggccacccaggtcgccgccggcaccgcaaccgacgtttccgtgaccgtgggtagcgcggacacgccagtgaaactgccgcacaacttccttctggccgacccggagccgacgttcaagaagggtgcggtcgacttggtcaagggcacggattacaccctcgactcggcgcatggcctgctgattccgaagtccggcggccagctgcaggctggcgatagcgccgcgtag

SEQ ID NO: 512141 - DNA, 177 bp, Stenotrophomonas maltophilia
atgccgccctgctgcatcgcctggctggtcatgccgtcgctggaggcgccttcgagtaggaacttgttgaccagggcggtggaccagaacgcggtcgagacacggatcaccatgtccagcgcgatcgataccatcgctgccagtaccgccatcgagaacatcgtgccgatgccgtag

SEQ ID NO: 512142 - DNA, 336 bp, Stenotrophomonas maltophilia
atgccatcaatgctcgacagcgccacctgcatccacgccaggctcttgtcgatctggtcttccggctgctggtccttgccggtcaccacgtgggtgatcaggcctttgacgtcctcgttgaggaatttctgcaggttgctgccgaacatcgccatgctggtggcaacactcacaatcaacgccgcgcgcgccatattggtcaccagcaccatcatggagtcgcgactgcggccggtgacgatccggaagccctggatcagtacccacagcgtcatcagcaccagggcaatgccaccgacccaggacatcatgcgccccatcaggtcgatgccgtag

SEQ ID NO: 512143 - DNA, 231 bp, Stenotrophomonas maltophilia
atgagtaagcctatgcgccatttttactacgcctacgagcgcacggacggcgaggtttgctacctgtcgaaacttctgcacgaaggcatccagcgttacccccacaccatctgccactaccacctggtgcaatggttgggggtgtcaaaactactcagtaaggacgaatacaaacggttggcgtggctgggcgcgaaccggccgatggtcaggcaggctgatgttgcttag

SEQ ID NO: 512144 - DNA, 720 bp, Stenotrophomonas maltophilia
atgcgaacctcagacggcccaagtggagttgtcgatgtaagcagcgatgcgagccccgagcagtgtgctcagaggaagcacgatgggtgcaagcatggcgaggatggagatggtcatgtcggcggttccagtcagtggaaagagcgttgcgctcttcctgatccaaaggtagatcgccctggaaatctgtccacggttgtagtggacaaaatcttgactaaaagtaaaaactgcggggctaaggccgcagtttttcctaacatcacttctcgcgccgaaggcgtcacctgctcttttccaccgctgcttctacagatgccggcgcgcagcgaccggtggcggcgttgggccgttggctctacagccttgcccgcgttgcaccgacacctccccgggctgcccatgcctgctccaggtggaccgcgcgttgttcggcttccaccgtggccaccacgtgcggcatcgccgtcttcagcgctggcgtgttccagaacgggctgccccggtgagggttgccgcccagccgcaacagcagcaacgccgtctgttcaagtcggctgcgctcgtcggcgtcgtcgctcaactggtagtccgccgccagcttttctagcgggcgctcgcaccagtggttcctctcttgagggtgcgcaccagcttgcaggagggcttcgacgatgcggggccaggcaagtgcggaatggagcgcaggaccttcgttga

SEQ ID NO: 512145 - DNA, 198 bp, Stenotrophomonas maltophilia
atgaccaccgtcggcgcggtgatggccgccgtcctggctgcaacattcctggccaccgtgctgggcctggccggtatccattgggccaatgcccgccacgtcagcggggcgcttcgtgtgcgttaccgctcgcgcgcccaaatcctgactgggctagtgctggggtgggtgctcaccctggcgaggctgtccacgtga

SEQ ID NO: 512146 - DNA, 429 bp, Stenotrophomonas maltophilia
atgttcgtcggcgtgggtgcagcgcgcgtgcgcgacctgttcgagcaggcccgcgggcaggcgccggccatcatcttcatcgacgagctcgatgcgctgggccgcgcgcgcggcgtcggcggccccatcggcgcccacgacgagcgcgagcagaccctcaaccagctgctcacggagatggacggcttcgacagctcggtcgggctgatcatcctcgccgccaccaaccgccccgaaatcctcgaccaggcgctgctgcgcgccggtcgcttcgaccgtcaggtgctggtggaccgtcccgacaagaaaggtcgcctggatatcctgaaggtccatgtcaagaagatcaccctggcccacggtgtagacctggaacaggtggcggcctcaccaccggcttttccggcgctgatctggccaatctcgtga

SEQ ID NO: 512147 - DNA, 552 bp, Stenotrophomonas maltophilia
atgacccatccccaacgttttttggccgtggccgccgcgtccttgctgtccttttcggcgtccgccggttccatctccgttggccccaccaccctgatggccgatacctcggccaagcacgtcgccttgacgctgcacaacagcggggacgcctcggtgcgttaccaggtgaaagctgtggggtgggatcaggccacagggcagaacgtgttttcccccaccacggagatcgtgggggcgcccaccttcgtggacgtgccaccccaatccaagcgcaccgcccgattgatgcgggtgggcgcattgggcgagcggcgctactaccgcgtgctgctgatgcagctcaaagaccccaacgcccagggcgtccagttgctggtcaaccaagacttgcccgtggcctttgaagccgccaacgcgcccgtcccccaggtgaccgtccaagcggtgcccaatggataccgcttggggacatacgtgatatccccgacccacgccgtcggtccggttccgggggcaaattgccgatccagcaggttgggggcgagctga

SEQ ID NO: 512148 - DNA, 231 bp, Stenotrophomonas maltophilia
atggccgctgatacgatcgaccccatcctcaaaatgcccgcggtggtgaagatcactgctctgtcagaatcctcgatccgccgcggcatgcgcaatggcacattccccgcctgcaagcggctcgggccgcgtgccatcggctggccagaatcggtgatcagggcttgggttgccgggactggcgctgcttctgcttcgccaagtgatcagcccaccggcccatcatcgtga

SEQ ID NO: 512149 - DNA, 171 bp, Stenotrophomonas maltophilia
atggcatggattgaccgccttgtctggcgcatcaccgcgcgcaactggctcagctggccgacggaacgacgccaccggctgactggccgctaccagcacatccgctacaacgagaacggccgttggaaggacggccggctaccgaaggaaggaggcccgcatggccgctga

SEQ ID NO: 512150 - DNA, 603 bp, Stenotrophomonas maltophilia
atgaagcccaacctgacgcgggcgcagaccaaccacctacgcagactcctggcatgggttcgcggcgaagtcggccagacgccgcaggagatggtcgaaacgctcagaggtctcgggcctatgcctgagcccagcgccgaggcaaaggcgcgcctcgtggacagctataagcgggccgaagcggtgcctaagtacgtgcgggccgcagtcaaggcgttggagaagctgctggtcaagcaggagggcgccatcgtggacgttgaagccggccccggcttcgatgtcgggctcgaagtcgtcggcgcgcgccacgtcctgcagccggccctgctcggctcacaaacggctgcagcgccgccgcctgtcctctcgtctccgcagccgtggatggaccaagtgccgacggaaccgggctggtacagattcacctgcgaggaaattgacggcgcgatcgagcgcgtcctggtggtggccgaacgcctcactggtcagctgctcgcggtggacaccgagatgggaacgatggccctacagcattaccacgacggcctgaccaatccgcgctggaagaaggtggagggcctgaccaatggcatggattga

SEQ ID NO: 512151 - DNA, 435 bp, Stenotrophomonas maltophilia
atgatcgagatcatcaccccgaaacagccgaaagctgaccgcggctgggtagagctgccgccgccgccgatgtgggtaactctcgggtatgccgggcgccgattccgccacccagccagggggctgaacgtcatttccgctgtcgaagtggccaccgatccgggcgagcccgacaaagggccggagtatcacatcagtatcagccgtgacgggaagcgctgcagttccagtgatgcaaagcaggtgcttgccgacttcgaaatcgatggcgccgaggaagacaaccacgtcccgaacggagtggtccgcaacttctggcgacctgttgccgaacacctgattgggctcgagtgtccgtgcaaagccagcgagccactgatggctgaggacaagggcgacttcgtttggcgcggtacgccgggaggtgatcgatga

SEQ ID NO: 512152 - DNA, 219 bp, Stenotrophomonas maltophilia
atgaacaattctccccagaaccaaaacgaccgtcccaactcggatggcgagaagaagcagccaggccagcagggtcaggtggacgggaacgagcttggcggtgaagacctcgccggaaagcaaggtcagcaacagcagcagccgggaagcaaggagcgtgagcagtcgacccatggacaggaacaaaagggcactgctggtcgcgatagccgccgttga

SEQ ID NO: 512153 - DNA, 996 bp, Stenotrophomonas maltophilia
atggtcgctgtaaaaaggattttctcgctgaagctggttcgatttaagtctggtagggcgaagggtttcgtaaagcctagattggaagacttagtaaatcagctgtacaaggttgcaacgactgtcggcgagcgtcacgtgccggttcccccgccgccgccgaacaagttggccagcggaatgcactgcctttgcttgaattggagaaaggttcgggccggtaaagatggagtaatggtcgaggtggtgtcttatgtcaatggtgtcgcgccagaacagaccacgcctgacttcgctgcgccttctttgcccatcaaggccataccactcaccgacccggcgaccggaaagacaagcgaagttgttcacgcctacagagtgctcttcttcggcgactgtgccttgatagaaatggagaagggaggaggcggtgttgctactctagctctggcgctgactgcccttttccgcgcccacgtgaatccagcgcttccagccattgaattcatggatgttgttggggcggatctcaagaaatccatcgctgccgctggcggaattaagcacatatctgcttctctcaatactcctgcgaaggacgcaaagaagcagccgctcggctatcgcctgactcagctaaaaaaatgggctggaaagaatgcttccgtcagtgcggaaattgagtttatcgacggggataatattcagaagggtattaaggcgcttgatgaatttgctgcgggagagtcgcttaactctgttgtgctatacttgcgtgacggccagaaaatcactggcgtaggcaaatatgtggagaagaggaggcttgatattaacctcacgccttctaattccttgaatattcttgaagttcaggcggcgctgtggaactacctggatgaagtccgcactcctgacaagaccggatggagactggtggattccaacggcattgcactgggtgctgttcctatcgatggaaagaagaatccatga

SEQ ID NO: 512154 - DNA, 162 bp, Stenotrophomonas maltophilia
atggagtttagtgccttccgtaccaacaccagtaccaactatttcaggcgctgcgtaccaacacattgcgtcggcaagcctacttcccacgagcgcgcagtgccatacggtggcatggcgatcgaggacatgcgtgaaccccccaggcatcgttacagatag

SEQ ID NO: 512155 - DNA, 837 bp, Stenotrophomonas maltophilia
atgtccccgatcggacaaccagaacgcgccacgcaagatcgcgtagtcgcactcttccgcgacgaattgggctggcgctacgcgggtgactggtcggaccgcgagggtaacgccaacattgaagagagcgagctcacggcttggctatcaaagcgaggctctacgcctgcgcagatcagcgccgcattactgcgcctgcgcagcgaggcaggtaaccaccatcgcgcgctctatgggaacaacaaggccgtgtacggcatgctgcgctatggtgtgcaggtattgaccgccgcaggggccaagacgcaaaccgtcgagctgatcgactggcggcatccggaggccaacgacttcgccattgcggaggaggtgacgctcaagggcgaccgcacgcggcggcctgatctggtgctgtacgtcaacggcatcgccatcggcgtgatcgagctgaagaatagccgggtatcggtgggtgatggcatccgtcagtgcctgtcaaaccagcttccgatgttccacgaggcgttcttcagcacggtacagtttgtcttcgcgggcaacgattccgagggattgcgctacggaacggttggaacgcccgagaagatgtttctgaagtggaaggaagatgaagccgacgacagccgcttcaagctcgacaagtacttgctgaaaatctgcgacaaggctcggcttatcgagctgatgcgcgacttcgtgctattcgacggaggagtgaagaagttgccccgcgtgcaccagtattttggcatacaggcggcgcaggcgcatgtacagcagcgcaagggggggcgtcctgtggcatacgcagggtag

SEQ ID NO: 512156 - DNA, 264 bp, Stenotrophomonas maltophilia
atggcggacagcaaagaaatggaagttacgctaccagatggccggaaggctgtggcacacgaagttttggtagaacaggcaaacgagcggtggagcgagtactcccttgctaacggcttagcctttcgtgccaagctcaacatcattactgtctgggctgttgaaggcgagaccgacgctgagggcaagcctttgctcttcatcaatggcataccagtcatcgctttagctagcgcggacggtaaagcacctagggagagctga

SEQ ID NO: 512157 - DNA, 312 bp, Stenotrophomonas maltophilia
atgactaccggttggtttacagagtggatcgacgcgtcgtgggtcgacattggaagcttcgtaactgcgctagtattcttattagtgcagctgtatcgcaagaaaattaatttgtctgaccgcgacaacgtgctggccggcctagccaacggattttcgcttttcccgatgctgataatgttcggtgcattctttgcgtcgaagcttgcgagtgagttgacatctgctagccgcgttacaatggttattgcatcagtggcagcgatatacgccattgtaaaagactcgcctgaggcctcgactacgggttga

SEQ ID NO: 512158 - DNA, 612 bp, Stenotrophomonas maltophilia
atggaaaccacgccacgttggccaaccgctggcaggaggtgctcgtccaacaggcgtttactccttgcctccaataccaatacgcctctggaaaaaaccacttccgagattgccctggctctcgatgctcaagaggcgttgacgcagcaactctcgacgcttaaggcaaggcatccaaacggcaaatgtgtgacgcgctgcgtcatcatccgcttgcgcatttccatctgggtgcttcgatgtgaagaaccttcaccagatgaattacaaatgccagcaaacgtcgaacttcgtatcgccagccaggttcttcaagccttgttgcctgaaaacaacacccgcaacgctgctgagcgtgagttggatgtccaacatgcgctggatgtcgcaagattactgttgcgtcgattcgccgaatcgcagggagtccaaggaggtcagcccctcgcctactctcctacgagaagcactgtatcgcaagcggcgagcgtggaccgcagccaagtgccgatgagcttcccttcacccgatgcttggcgtgcgtctcgcggccttccgccagcgaaaccactgccggctcgaaaaccaccggtgggcaccggcccccattaa

SEQ ID NO: 512159 - DNA, 210 bp, Stenotrophomonas maltophilia
atgatcagcgacatgaagcaattctttagccagttcaccatcgccaagcgagggcagaaggacaccttctacgaggtcaaccgtgacggtgcccttgtgcttaaccgtgatgggcttcttaagtctggccgcatgaagcgtcagctggacgccgcacgtgatcttcgcgccctcaaggttgccaaggaaaagggttcgtcctccaaatga

SEQ ID NO: 512160 - DNA, 1035 bp, Stenotrophomonas maltophilia
gtgaccctggtaccggtcgtctaccgcagcagcgatccgggcgcgcctgttctcaacgggcaagctgggtcgttgcttgcactcctcaatgcgatcctggtgacgggctacggggatggagcatcttcaaagccaggggcaggatggactcgcccctacgccagttcatctgtgcaggtgttccgaaatagcgctacgacaggctctggcacctatttgcgggtgcgcgacgatgcatcggctgcaacgctgaacactggttgtgtggctcagctgcttgcctacagctcgatgtctgacattgataacggtgcggaccaaacgccgagcgccgtgctccaggcgcgcggctcgttcattgcgaaggccccgacgacagctcccgatgcgcgtagctggatggccatagcaacagagattggcttctatctgtttaccgcatggagcaacttcggcaatggccttggaccttactacttcggggaccttgacacggcagtctcaggagatgttttccccttcgcgatgttcggttcgaacgatttgacgttctacaccccggcatggagcgccgacgtctgctcgctgtttttcgcatctacattgggaacggcggtggacggtgttaccgggcgtgatcgatcgtatgtaccgggcggcttcgtgatgcgcagctacagcggcgggcagaatgcccccggtcgcattgcgactaccgggatcgacccgcctgccggtgtctccaacaatcgttcttacggatctggtgcgtaccctgtcggtccagatcgttcccacggtggttacaactacactcgcgccgctgtacgtgaagccgctttcgccctgcgtggacacttgcctggtgttctcgtgccgctgcatgctcggccgcacgcggagggcagcgtagtgcccttcatcgaaggaatcgggctcggccagtggttggtggtgaactacaacgttgtagagcccgatgtcgccgatcgcaacggccaagtgctgttccgcctggatgcgccctggcgatga

SEQ ID NO: 512161 - DNA, 861 bp, Stenotrophomonas maltophilia
atgcccatcaatgtgcggagtgtgcgggatgtgcgggcagttgtgcgggcattgaatggcagcgaatcccttgcagcagtagcgatgtgcgggacgtgcgggactcggcctacatgggcgggcgcgggcgcgggcaggcatcacgccgccttatcacgatgcgtctcgcgtgcgtatacaggtagccgcacatcccgcacacgccgcacatggcctgtgccacagccgctcagcggctacacgctgccaatcgtagtgagcgagcgtgtcgaggaccgccgtttggtggtccaaccgcagatcacaggagagattgaaatcaacacgggcctcacccacgactacccagctggcgaatccctcatcagcaccgccttgcggcttggcgaggcaaatgggtccttggacctgcaggcgcgcgtcgagagcctgttcgatcaggctgcgtggactggagcctggagcaacattccgattggcagtccggcgcctggcacctacaacgacacggactttcctctcgaagtgaccaacagcgacgccatcacggagcgatgggctgtgcggttcaccagtacgacaaactttgaagttatgggggagacggtgggcgtgatcgccactgggagcaccacaacggaccttgcgcccatcaaccctcgaactaacaaggcgtacttcagcatgcgcgctgctggctggggtggtggttggtcggtgaacaatgtcgtgcgctttaatactgtgggaggcctggcgccggtgtggatggcccggactacgctgcctggtacgccggcgggtgcgaccgactccactcgacttatggtggtgggcaacgtcgcgggaggtgcccagtga

SEQ ID NO: 512162 - DNA, 2415 bp, Stenotrophomonas maltophilia; identical to SEQ ID NO: 502531

SEQ ID NO: 512163 - DNA, 279 bp, Stenotrophomonas maltophilia
atgacgaagctgcacaccctgatactgaccggcgccctgcttgcgctgagccccctggcctcggccgagaccgtgaatctgaccaacagtgccgagggtgccaaccgcgatgtcggcatcactgcggtcaagaagaagctgcaggacgcgtgtaccgagcgcaagggctcgcccgacaccgcctcgttcgaggtggtcttcgagaagaccaacccgaacccgagcgtgcccaagccctactacgtggacggaaagatgaagtgcgacctgccgggctga

SEQ ID NO: 512164 - DNA, 1461 bp, Stenotrophomonas maltophilia
gtgaacgccgccctgccccgtctcggcctgatcgttgcgctggccagcctggcggcctgcaagaccgtcggcccggattacgccctgccggaaggctcggccttcaagcgcccgcaggccaatgcggccttcatcgatacgcagaacccgcaggtggccgccaaccaggcgctgcccgaccgctggtggtcgctgtacaacgacccggtgctggacggcctgatcacgcaggcgctgcgtgacaacgtcgagctgaaggccgccgatgcacacctgcgccgtgccgcggcggtgtacgagcaggcgctggacgccggtggcttcgagtacgaggccgaggccggggtcagccgcgcgcagctgtcggccgaatcgttcctgcaggagcacgagctgccggtgatcaacctggccgatggcaagttcgcggtcagctaccagttcgacctgttcggcaagctcaagcgcggcgccgaggcagcgcgtgccgacgagcagtccgttgctgccgcgcgcgacctggcccaggtcagcgtggtcgcgcaggtggccgacagctatctggaaatctgccacgccaaccacgagctgcacgtggccgaacattcgctgcagctgcagcaacgcagccgtacggtcactcagcgcctgatcgcggctggccgtggcacgccgccggaactggcccgcgccaatgcccaggtcgcgctgctggaagccgcgctgccgccgctgcgcgcgcagcgttcggcggccgcctattcgctggccgccctgctcgggcagaccccgggccagctgccggccggcgtgatcgactgtgcacacgcccccggcctggcgcagccgctgccggtcggtgatggccgtgcactgctgcagcgccgcccggacgtgcgccaggccgaacgcaagctggcttcggccaccgcgcggattggcgtcgccaccgctgagctgtatccggacatccgcctgggggcctcgctcggtgccgccggcctgctggaggatttcggcacgccgatgacccagcagtggtcgatcggcccgctgatctcgtggacgctgccgtcgtccggcacgcacgcacgcatccacgctgccgaagcgggcgccgatgcggccctggccgagttcgaccacaccgtgctgcaggcgctgcgcgagacccagaccgcgctggaccgctacgcgcaggacctgcgccggctgcagtcgctgcgcactgcgcaggaacaggccgcattggccgccgagcagaaccgccggctgtaccagggtggccgcacgccgtacctgtccagcctggatgccgaccgcagcctggccaccagcgatgccaccctggcggccgccgaagcgcaggtctcgcgcgaccagatccatctgttcctggtgctgggcggtggctggcaggcaagcgccaccgcgcccaacgcctcgaccgcagcgaagtaa

SEQ ID NO: 512165 - DNA, 192 bp, Stenotrophomonas maltophilia
gtgatcaagccccgtaccccgcccggcacccttgagctgctgccgcgcgagcagattgcgttccagcgcatgctggacgtcatccgccgcaactacgagcgcttcgggttcctgccggtggagacgccggtgttcgagctgtccgacgtgctgctgaccaagtccggtggtgagaccggctcggccacgtag

SEQ ID NO: 512166 - DNA, 639 bp, Stenotrophomonas maltophilia
atgccgtcagggccggtacgcaatctggtggattacgtcgagcgagcgggcgtggttgtcgttctatctgacttccaggcagttggtgtagatggcctgacactgcgtgtgccgggtttgccggtttgcatcttcctcaatcagaacatgccgggtgatcgccagagatttaccctggcccatgagctggggcatgccgtaatgcatcgcttgccaacgccagatatggagaaggaggctgatgcgttcgcggccgcattgttgatgcccgagatggatatccgtcctgcactcttcggtggcatgagtattcagaagctcgcgctgctgaagccgatttggcgggtatcgatgggggcgctgctgtaccgcgcgaagaccgtgggtgcgattacggaatcgcagagtgggtacctttggcgacagatgagtgcagctggctatcgaaagcaggagcctgttgagctggaggttcctgcagaagcgccgagtgtgttgaacgatgtggtccaagcccatctcaaggacctcgattactccgttgaagaactggcccagatgatgcacatcagtgagccctatcttcgggagaagtacggcctccacgtccatcgtcctggcctccggttggtaaagtag

SEQ ID NO: 512167 - DNA, 615 bp, Stenotrophomonas maltophilia
gtgatcaagcgttccaaggctgaagttgagcggttgctgtggccctatttcgacgtaatgattcggacggtcactgacgcttgggaccgttggttgaggtcggaggagcgccagcgctggatgttcgaccgcgagagggctaactacatcttcggacatattgcggcgaacgccgtcgaaatgttcgatgacaagccttcggttcagatcgttcgaaaggacgagacgctcctcttcatcgtcgaccgggtcctggtgttccgcttcaagaaggccgattcaggctacatgtcgcggaacgtgcctacccagcaagcgcttgcgtatcatgcggaagaggcgctttttgacgatctggacagggttgaggttgtctacctgatcaacgatcttggcacctcaatcaaggatatttgcgtagtagcgcgagcggagaatcgggtgttgtggaccattcctctcctgtcagctgcgagcgataatgttgtaactttggcgcccgctccgggcggtcagggtccgcagggcccgatggcgccgcgtgccaagcccaagcttttcgttgtgaagggcgaggggctgaataagaagaacgatacaggcgactctacgtga

SEQ ID NO: 512168 - DNA, 381 bp, Stenotrophomonas maltophilia
gtgcgcgtgcgtctggatgcccgaaagatgtggcagatcaaggaagttccggccgccaccatcgcccagcgcaagcgctacgccgagcgctggtgtgcggtcaggctctacccgcagatgcgcctgcgcgcggctgtgacccggctactggacaccaccccagccgaaccgctcgaaccgttgcccggcctgccgccgacatatgagcagcagcaacaggccttgcgccttgccgaggcaaccgccatcgccagagcgagggtcaaggaagcgttgatgccggcggggcccggggcaaccaagccaagagcgaaggaccagatgaaagcttgggtgagggctggaaacgccaagcgcagtgggcgtctgcaaggggtgtga

SEQ ID NO: 512169 - DNA, 1458 bp, Stenotrophomonas maltophilia
atgagtacaattcagccggctctgactttctcagagatgcagattagccaactctttggccatgaagctgctgagagtgagtctatccagcgactccgcgactattattttaagaacgacacctacgaccaggtgacatctgacctcccggtcaggattgtggtcggccataagggcgttggaaaatctgccttgtttgctgtcgcaatggctgaagctgaagagcaaggccgactggcagtcatgattcgacctgacgacattcttgaacttggaactgactcttcagacttcctcagaacgattagaaactggaaggagggattggtttctattattggcgagaagatcgccacctcgttcggagatacgtcaggtgccctagcaagatcaaagatgattggagggcaagtccttaatgtacttgccacatactttaaagatcacaaggatacaatcaacagaggaaagctggagattctgactcactttgttgaacacaagaaagtttccgtctacatcgacgacttagatcgagggtggcaaggtagagctcaggatattcatcgcatctcagccctcctcaacgcggtgcgtgacctagcctctgacaacccgggcttacattttaaaatttcgctgcgatctgatgtctattaccttgtaaggacctccgatgagtcaactgataaaatcgaaggatccgtaatttggcactcgtggactaatcacgagattttggttttgctcgtgaaacgcataagaacttttttcggagagcaagcttacgaccaagctttggcccaaatgagtcaggagcagctcggacagtcgttagagcgcgtcatggatccgacctttaggggtgaaggaaagtggcgcaacgccccgatcaggcgtgtactgatgtcgctagttcgcaagcgaccgcgagacatggtgaaaattttgactttggctgcccgagaggccagaagcggaaaccgcgattgcatcactactgtagattttaaggctgttttcgacgaatattctcaaggccgcattcaggacacggtgaacgaattccgttctgaactgcctgaagtcgagcgactactgatgaatatgaagccgaatcaaagagagcgaaaagcgggccgcgggtacctctacagcaccgagtcactcctcgtaaaaatcaaagggataatgcagcagggcgccttcaaattcgccaccggaaagactgcggatgagagaagcctggcagcatttatgtataagattaatttcctaattgcaaggaaagggcaaagcggagagaagataactcgacgctattttgaggagaatagatacctatcctccggattcgctgatttcgggtttgattgggaaatccaccctgcttatcgctgggcacttcagccagagagcctagataacatcttccagcagttagatctcacagagtag

SEQ ID NO: 512170 - DNA, 234 bp, Stenotrophomonas maltophilia
atgcggactgacctctgggatcaattcggcgagctggtgaccagcagcccccgattgctggcgaccgtcactgcgcacaacggtgacggcaccagcacgctgaccacttatgacggagtgcagatgcgggcttttggtcagctccaattgcccatcccttacaacgtgtgggttcgggctgggcgcttggtggaagctgcgcccaacctgccgctcatcgaagtgaccgtctag

SEQ ID NO: 512171 - DNA, 900 bp, Stenotrophomonas maltophilia
atgggctggctgagtgtcgcgccagagccacgggctgactgggtagctcgcgcggacgtgaagcgagaggtcttgcggatgagattgaacaaccgccccgctcgcctcggccagtgcactgatcgcatcgaggggcgtgctggcgtcgtagaaccaagcaccagcgggcaccgtccaatcaaccgtctcgtactggctggtgaatccggtatcggccagctcttcggccaccagctgggccatgctcctgtcctcgctggcaaccttgacccttgccggcgcgtacggcgccgcaagcagcgctgtccgcgacctgccgctgagccggactcccccatcggcaaactctcgctgcttctggaagctctcgatgatgccagtccacacatgtccattgagagatacctcaaactggcgcgggccacccgccgtgggcttcagcagcgacagttgcgttgggtcggccagctcaacgtcgaaggtccacccccaggcactcctgctcgcactgagcgagatcctcgacacctcgatgggcgtccgatcagggagccgcacaaacgaaacttcattgatcacgacatacgtcctgcgttgcggtcgcaccacgtagcacgcggtggttccaaggttgaggggcgcaagacctgggacgcccaccaccgagcaacccaagttcagcgaaacggaatgacctggcggaactccgggctctggatctggatcggggtcaggctttaccggagggcggatgacccaaggcaacggcctcgcagagccccaaggcaagcgaccatgacgcctggttgcaccgaggtgcttccagctatcggaccagctatcgcttgccgtgctgggtgctccctgccacgtcaggccccgcttcgcgtggacaggtaa

SEQ ID NO: 512172 - DNA, 177 bp, Stenotrophomonas maltophilia; identical to SEQ ID NO: 511045

SEQ ID NO: 512173 - DNA, 210 bp, Stenotrophomonas maltophilia
gtggacctgacggttcccctctttccgaagccgctgaaggcgggggaagtgggtgccatcatgcctttggatctggtggaggtcgttgctgctgagggcacttggcacgggcaatgcgagtccttgcgcatcgaggttgtgatcgatcagcaggccgttgtgattgaacagaccgctactctggaaaggcactacaccgatgcggactga

SEQ ID NO: 512174 - DNA, 480 bp, Stenotrophomonas maltophilia; identical to SEQ ID NO: 499378

SEQ ID NO: 512175 - DNA, 1620 bp, Stenotrophomonas maltophilia
atgagcgcgccccgtccaacaaaacttgcgcacggcttcggcctggtggaagtgctcttggtccttagcgtcgcctcggccatggccgccgctggctggctggtgttcggtcccacttcagtggccgccgacgtgaaacaaactcagctggattttagcgaaaccgcaacggccatcgatcgttcgctaggaatcgtgggcggcttctctgggctgtccacgtccctcgtgcgaaccgatggactggccgcgcagcggctgcggcacaacgatggtttgcgcaacgcctggggcggtttggtgtcgttcttgccgaacaccgtgaagcgtgggaatgattcgtttttagtcgagacccgcgacgtgcccaaggccgcttgcgccaagctggttgcagcgatggccggtgacccggctgtctgggacgcccaggtcaacggggaaagcgtctacgtgggcaacaaatacgaccccgctaccgccgccgccggatgccaggccaacggcggggaccggatggcattcgtgtatttctcggggttggcctccggctcgtccgtggccgtgtctgccatcgcgctcccgccggccccggtcggcgcgaccccggccagtccagtgacgccagtcgcacccgtcgatggggcgcccagcgtgggcgacgctgctcttggagcccccggcatggtgtcgcctggcatgcctgcggttccgccgccggccgtgcctgtagccccacccgcgccagtggccccacagactccccagccaacgccaacggttctgcctcccagcacgcccacagttttgccggtttgcacggtgccgcctacgcaagcgcaaaacgtgaactgccccgcaggacagattgggactgtgacgcagcagcgcgtgggttactgcggtgaggtgggtgggccctacgaagcctgggccacggggacctatggcccatggtccactgtttctagcacctgcgcgcccgcgtgcgtggccccctccccgacgtcggtggccatcacgcgcgacgcgccggccgaacgtcaaaatgtgggctgccccgctggccaagtgggcgagcactggcaacagcgcagccgcgtcgagaatggcacccgcaccacgtcctggacgtgcccaggggctaccgggtccccactatcgagcacgtcagagagctggagcggcacatacacggctaccagcggttggggaaccacgtccaacacctgcgccacgcaggggctggttgttacgtcgggattcgtcaatctgtctgtggccaatgcctacggaaccgtgggcaaccgcacgttgaccgaagccacgagttggacttatctggcaggccagagctccgagtggtccagcagttggggaccagtgcgcggcaacggcagcattgaaatcacctacaacggagccaccgccacggttgcaggtggtgggaacagcagcaacaccgcacgtccgggaagccccacgtcattcacggctagcaaccaggttctcagcttcaacggtaagcgcgtggagtttgagtttcgtggcaacgcctccactgacaacggctccgtcatacgcggcagcgttgcgttttactaccgcgttctgccctga

SEQ ID NO: 512176 - DNA, 264 bp, Stenotrophomonas maltophilia
atgaccgaactaccaccaaccccttgcgccgacgcgcccccgctctcacgcgagatagcgttgatgctctccgagtccgaaaacccggagttggcaacgagcgcgtgcctgcgctgcgcccactccacaaccttaaccctgggctggccggtggcggacgaccagccgccgagagggccggatttagtcgtgttttgcggacagatgcaccgcgacatcacgaccctcgtccggcggtgctccggattccagtccaactcctga

SEQ ID NO: 512177 - DNA, 309 bp, Stenotrophomonas maltophilia
atgagctaccagcctgtgcccaccgtctcggtgatgaccccgcaagcccgtttcaccctgtgcttttgccttgccgtcctgttgacggggccgtttgggctggtccttgggccggtctcgtcgcgcctgctgcggcggaaggcagaacggcttcatccgggagccgcctatgccgcagcccagcgcagtgcggggcatttcaacgcaggccaactttgggcaatcactctttgtggcatttttggcatcatcggcctcctgatgttgcttccaacgttgctcttcctcgcgctcagcgtcgtcgcgtag

SEQ ID NO: 512178 - DNA, 918 bp, Stenotrophomonas maltophilia
atggcgggaaaaatatgggagttcttcgggtatcgcgctgatgactgctcagcagccgctgtgcaggccgcagactctagacaatgcccatttctaggcgaggtttgcgaaaagcgtctgagcgatggcgagatagcgggcgtttgcactatcaaaccggtaaagtctgagccagtgatctgctgcccgattcgcttatacgccgagaactacaaggtgctgtccgacgtggcgcgcatcgcattcggcggggatctgctgttgtttgctggtgctgaagccgccaagattgcacgacgtgaagagcgaccggtggttgcagtattcggcaaacgctggggtggcgaactgcgtctcccccagaaggacggcataggaagctacttcgtcgattgggttttggcgctgctagatgccaaaggcgctttgcaggagtttatcgccgtcgaagtgcagactattgacaccactggcaactaccgcaacggacggcagtgcctgctgacgccgacacgaacgaacccggcgacgacggcaggtctaaactgggaaaacgtaaacaaacgtatcttgccgcagcttatctacaagggacaggttttgcagcgagaggaactatgccgcaagggcttgttcttcgtctcacccgggcccgtgtatcagcgcatcatgggccggctaggcggtgctgccggcttggtgcgctatgcactacaaccggcttcgattactttccttgcctacgaacacgacatagcgctgaatctgcctgccggcgcacttgttcctttgcgtgcgttaatgccgcactcaacgacggtctacaaggtgcaggaggcgttcaacaacgtgacgctgcccgacgagaatgtctatcgagacgccatcgtggctgcgctgaacgggccacgacgataa

SEQ ID NO: 512179 - DNA, 474 bp, Stenotrophomonas maltophilia; identical to SEQ ID NO: 510958

SEQ ID NO: 512180 - DNA, 894 bp, Stenotrophomonas maltophilia
atgttcaaccctcagacctcgccggataccggcaatgtcacttcttcgccggcatcgccggttggtcccttgcagctcgacttgctgggtggcccgacgaccgcgagctctggaccggtagcgccccgtgccagccgttctccgtcgcgggtaaaggaaaagcccaggatgacgatcggcacctgtggccccacttccttcgcctcatccgtgcccgacggcccgctgtcgtcatgggagaacaggttgcggcggcggttggcaagaactggctcgacggagtgtctgctgacctggaagcagaggactacgcctgccgggcggtcgttgtcccagcttgtgccgtcgacgcgccccatcgccgggatcgactctggtttgtggcccacgccgatggcgcacgaagcgcggctgggctatcagcgtcggcgcggggacacgaagggctcgcaggaatcgctcaccacggtggtggtgaatgtttcggcgccgctggacgatccccgcattgcgggcctgtggccgacgccgaccgcctcgctcgcggacaagggcgtgcgatcgacagagggtgcgatcagggaagcagcacggaaccacgggccggatctggctgcggtgtcgcaggcggcagttgcgctgtatccaacgccgcgggcctcggccaacgagaaccgaacgacgaagatcccgccatcgcagctggacggtcgccacggcctctacctgtcgagcgtggccattggaatggagccagctggctcatcggccacgacggaaaattccggcgcgttgaacccagcattcgtctgctggctcatggggttcctgcccgagtgggacgcctgcgcgcctacggcaatgccatcgtcccgcaggtcgcagccgaagtga

SEQ ID NO: 512181 - DNA, 297 bp, Stenotrophomonas maltophilia
atggctgacccaatgacgcttgtcgcccacggcgcaaaggcaaagcagaacttcgacgctgacccgccgcgctgcatgacgtgcgtgtacttccgccgcgagccgcacacgctgcacgagctgcgccaggtcaagggccgcaggggcaagatcaagacgatcaaggttccaaagcggaaggacgcaatcctgaatcccatcgtggaccgctgcagcttcgggaacttcctgaccaagccgcatgccatctgcgacgagtggcatagccgaactggcgaggtgatcgaccatggctga

SEQ ID NO: 512182 - DNA, 762 bp, Stenotrophomonas maltophilia
atgagcaacctcgttctctcgcaaaccaagagcctcgccacgtccctgaacatgggcgccgccgacgcgcaggagcttgtcgccgtactgaaggccaccgccttcaagggtcaggtctccgatgcgcagatgaccgcgctgctggtggtggcgaaccagtacggcctgaatccctggacgaaggagatctacgcattcccggacaagaacaacggcatcgtgccggtggtcggcgtcgacggctggtcgcgcatcatcaactcgcatgctcagttcgacggcatggacttcgaacaggacgagcagagctgcacctgttcgatctaccgaaaggaccgcagccggccggtgcgcgtgaccgagtacatggccgaatgccgtcgctccaacgccggcccgtggcaatctcacccgcgccgcatgctgcgccacaaggcaatgatccagtgtgcacgccttgccttcggtttcgtgggcatctacgagcaggacgaggccgagcgcatcatcgagggcgaggtggtccgcgccgagcgagctccggccagcagtacccgccagctgccggccgaaccggaagatacgcccgagcgccaggcgctgtatgccagccttcaggagattgcgagtgccggtctggacgcctatgcggaggcgtggggcaagctgacgcccgaacagcgcaagatgatcggccagtccggccacgaaaccctgaaggcggaggcggagcgcgcagaggctgaggaggtcgcgccgtga

SEQ ID NO: 512183 - DNA, 216 bp, Stenotrophomonas maltophilia
atgacccacatctccgatgccaactacaaagctgcgcgtaagcgcttcaaccgttggctgcacaagctgacccacaagaagcgtcgtatcgctcgcccgggcttcatcgtggatgcggagggcatgcggatcctcggccgcacctccgctcccttcctgccgaacctcaagggcatgcgctacgagaaggggaagttggtccccaggcatagctga

SEQ ID NO: 512184 - DNA, 528 bp, Stenotrophomonas maltophilia
atgttcgaactgatcgacgcgaccgccaaggtcgtcaactacaacccccgggccgagaagcacggcgacgaaaacaagatggccggcgacctgaagctgctggccaccaccggtagcgcggtgctggatttcttcaacaaggatctgcgcaagacgctgtaccgcaaacccagccagggcgagcagcaggatctgatcgagggcagcgacggcctcaccgccgtgaagttcccccgcctcggcgcgttgtcgtgggacgaggaatacccgggctatcagctggtcatcggcaccggccttggcctgtccgaaccgatggtgctgtcggaggtgaccctgaagcgctttcgcttcgaggctctggacggcggcagcgtgcaggtcggcgtcagcgccctcttccacccgaccaccgagcaggccggcgccctgtgcgcgctgatccaggaagacgtccagatcaccctgatcccgccgaccaagcaggccaagggcaacaagccgcagcaggaagacctggccgcgtaa

SEQ ID NO: 512185 - DNA, 474 bp, Stenotrophomonas maltophilia
atgttcgagaacctgccacgcagcaccacccggcttggctatgccaccgtccgcgaccaccagcgctgctgcgagctgtcccgcgaagaacggggccttccgctgcacccagccaatgacttcatcacctgtccggactgtgacggcaccggcgaacacgtccgcaacgacagcgccagcggcgatccgcagtgcgagtacggcgtggcctgcggccgctgcggcggcgaaggcgagattgccgacggcctgatcgacccgctcctgctggtggcgaagtaccgcaagggccgcttcggctgggccatgagcgagcgccgcgcagctgaccgccggtaccactacaacctgtaccggatgcgcgccatgcgccactgcgcggggctggatcaggtcgacatgctgttccaactgcaccagtgcgggaacgagctggaacgctcgatcgcctgctggaaggcggtggccgcatga

SEQ ID NO: 512186 - DNA, 435 bp, Stenotrophomonas maltophilia
atgaaagccaaaatcgttatcgcagcaatgctggcagtctcctcgctgccagcgcacgcactgaatgtgaagaactaccggtcgatggaagaaaacgccagagccaagtccggttgggagggcggcatgtacgaatcgtcgttgaccacatacttccagggcgttgctgacacattgaaccttcagcgaccgaatgaccacggcgcaattgtggtgacagaaggggtgtacgtctgtatcccgcccaaggtgaaattgacctcggcactggttaaaagtgccgttcggcaagagatagacgacaacaaggacatttacgccaaagccaacccggcatgggaagaaaccgtacttacgttcttcgccgcgacgggtcttgccaggatgttcccctgcgaggttccaggaaaatctgaacccgccatcaggaagtaa

SEQ ID NO: 512187 - DNA, 363 bp, Stenotrophomonas maltophilia
atggaaagcattggcaagcaacaggacaacctccgccttgtattcggtgtgcacagcgcgccgaaggatgcccctcagaagctgctccgccagatcgaatcggccgctcaggccctggcggtttcgatgcaggccggtggccacaagctggcgacgatcgccgcggccattggcaagtcggagagctacgtgtcgcgcatgcgcaccggtgaacggccgatcccggcccgcctggtgctgtcgctctgcgctgccaccggctcgaatctcatccgccagtacatggaactgcaggcggccctggaacagcccgacccgcgctcggagattgcgcgcctggcggggatgctgaggtccgcctga

SEQ ID NO: 512188 - DNA, 1446 bp, Stenotrophomonas maltophilia
atgagcgcgctgccggactactaccgcgaggaagggctgcgcatgctgccgcaggccatcgaggccgagcaggcggtgctgggcgggctgatgctgcggccgcaggcctggatggacgtgcaggacgtgctgaccgcacagcagttctaccgccgcgaccaccagttgatctggcaggccatcgaggacgtgctgaagaagggccgcgaggccgacgcggtcaccatcggcgagtggtttgaatcacgcggcaagctggaactggttggcgacggggcctacctgatcgagttgtcggccaccacgccgtcgtcggccaacgtccgtggctatgccgagatcgtggccgagacggccaagcgccgcgccctgatcgacgccggccaggagctgatcgacgccgcttacagtcccgagggccgcagcgcgctggacctgatcggctccgctcagacccgcattggcagcctgctggacagcgagccctgcgacctggaatcggtggcgccggtgatggagcgtgtcttccaccggctgggcgagagggcgaacaacgagggcggcatcagcggcctgaccaccggcgaccacgacctggacgagctgctgggcggcctgcagcccggtggcgtgtacgtcctggccgcacgtcccaagatgggcaagaccaccaaggcaatcaatgtcgccgagcatgtggcgttgcgcctgcgtaagccggtagcggtgttcaccttcgaaatgcagcccgaagagctgggcgaccgcatgctggccaatcaggcaggcatcaacggcaccaggatccgcacgggcaagctggacgacgtcgactgggccaacgcatccgaggcgacccgcaggctgtcgcaggcgcccatctttgtgagccgcccgaagcgcgccagggtcgaacacgtgtgcgcgcagatccgccgcatgcacgcgcgcgacccgctgggcctggtggtcatcgactacctgcagctcatggaagtgaagggcgacaaccgcgctgccggtatcggcgatatcacccggacgctgaagctcaccgccagcgagcttggggtgccggtcctgctgttgagccagctcaaccgcgagctggaaaagcgaacggacaagcggccaatcgtcgccgatctgcgcgactcgggttcgatcgagcaggacgcggacgcggtgatcttcatttaccgcgacgagatctatcaccccgacagccgctgggcgggaactgccgagctgatcgtggccatccagcgcaacggcgcgcccggcatggtccggcagctgtaccagcccgagtacttccgcttctcgccgctgcctgagtactggcagcccaagcagaccagcgccagcgcacccgcagccggcaccgcacccaggcagaaacgtggcttcgccggcgttgccgctgcccgccaacaggaggactga

SEQ ID NO: 512189 - DNA, 465 bp, Stenotrophomonas maltophilia
gtgaagaacaacaccttcatcctgcggatcgagaacgccagggacgcgatgaaagccgcgtggctgttcgcctgcgagtacctgcaggtagggcgagctgtccgcgtcacggtcgaggaacacaagccgagccgcagcctcgagcaaaacgccatgttccatgccatctgcggcgagctcgccaaacggaagaagtgggccggccgctacatcgatgatgagggctggaagcggctgctcgtcgatgcctgggcgcgggagtccaaccggcagcagggcgacgtggtcccgtccctcgacggcgccagcatcgtcaacctgtccatccagacccggcgcatgactgtcgcggacatggctgacctgatcacctttgcgcaggcatgggccgtggagaacgacgtgctgctgcgagacgtggcgccgcttcgggaccagcgcctggccgagcaggcggtggcatga

SEQ ID NO: 512190 - DNA, 291 bp, Stenotrophomonas maltophilia
atgaggacgaagaacgccaaggccttcacccgacaggaagaggaccacgtccggctcgtgaagctctgcccctgcagcgtgtgcggcaggccagggccgagcgaggcccaccacatccagcaaggcgaccacttcacgaccgtggcgctgtgcaccgattgccaccgcgggagtttcaacggctggcacggcgaacggcatatgtggctggtgatgaagatgaacgaactggacgcactgaacgtgacgatcctcaacgtgctgctgctgatgaaaaggggacacctatga

SEQ ID NO: 512191 - DNA, 573 bp, Stenotrophomonas maltophilia
atgaccatgcgactgaccttcggcatcgaccccggcctgtccggcgcgatcgccaccctgatcgacggcgagcccggcccggtgctggacatgccaaccatggacgtggacggctggggcgagatcgacgcacgcgcggtgacggtgttcatccgcgaacagcgcgccaaccaccccggggcctacgtgtccgcctgcatcgagaaggtgggtgcacgccccggcgacggcggcaccagcgcattccgcttcggccagggcacagggaagctgcaggccatcctcgaggtgctgggcatcccgaccactcgggcgatcccggctgtgtggaagcgaaccttcggcctcttgaagcaacccaaggacgctggccgcctcctggcctgtgcccggttccctgcggcagccaagaccatgagcaggaagaaggacaacggccgagccgatgctctgcttatcgggctgtggcacgagaacacccagctcggaagccatctgctgggaggggagggggaatctgcccctgctgcgcctcgcgtgcgcgcgcgcgtttgcgacgaagcggcggcctga

SEQ ID NO: 512192 - DNA, 237 bp, Stenotrophomonas maltophilia
atgcggcggctggcgacttaccctgatcgcgtcgactggttccaggtgctgaccgacctgggccggaagggcgtgccggtgctggccgtgtcgtcagccatcggcgtgccgcagtcgaccatccttggatggaagcagggcgcggagccgaagttcgcggacggcgagcggctggtggcgctgtggctgggcctgacggatcgccccatcgagcagctgccccgcatggggaaatag

SEQ ID NO: 512193 - DNA, 537 bp, Stenotrophomonas maltophilia
atgcccgcgcccgaactgaccgtgaaagtccccggcgaaaccgccgacaccagcgccgccgcagccgacaccaccagcaccgcgccgccggacgagcgcctggccgccgtcctgaccctgtccaagcagaccgttgcggtcatcactgaggcgcttccgagcctggtggctggcgacctgatcgccctgcgcgacctcgaggtggcaggcagcaaccgcaagggtgtgctggaagccatcgaggccgaggacaagcgccgcgaggaactggcgcaggcaaccgccgacaccagcgaggcagagcgtgggcaggggccgatcatcgtgccggactacgtgtacgcagccgacgccaaccgcctgtacggcgaagcctatggcgtggattgggcctacgagggtggcgtgcatgtgccgctgcaggccagcacctcccacgcggccggagctgctgcagccagccagccacgcaccgccggccaggccgtgctgaccgacgccggctgggtcgtgcccgaaccgcagccgaaggcctga

SEQ ID NO: 512194 - DNA, 312 bp, Stenotrophomonas maltophilia
atgtgcagcaaggccaagatcatggacccggccgggctgctgaccggcaagaacgccaagtgggcggacccgctcggcgtcaccaagacggccatcggcgaccccacgggcgatatccgcaaggaacgcgcgaaggtggccgcccaggcggcggccgatcgcaaggcccaggaggacgccaagaacgtcctgccgaacgccctggccgatgcccgtcgcctggccgcgcagtccacggaatccaccctcaaccagcgactgaagcggcgtagttccttcgccgtgagtctgctgggctctgcaggaggctga

SEQ ID NO: 512195 - DNA, 231 bp, Stenotrophomonas maltophilia
atgtgtgggaaacccaaggcacccaaggtcgttgaacgcgaccccgtggccgaccagcgcgccgccgaggcgcaggccacgacccaatccaacctcgagctggcatcgcgccgccgccgtcgccgcgagtcatcgctgctcaccctgggggcgcagggcctggttggcggcggcggtggccgctcactgctggccagcgctgtgggcaagtccaccctgggcggtgcctga

SEQ ID NO: 512196 - DNA, 1599 bp, Stenotrophomonas maltophilia
atgagcgccggtgcccgcatccacaagcgcctcggcgagctgaagtcgcgccggcagatccacgaacccacgtggcggcactgcttcgaaatgacgtacccgctgcgtgccgatggcttcgatggccagcagttggacgcccagcagggcatgcgcaagcgcggcgagatcctggacagcaccggcaccgacggctgccgcatcctggcctcggggatcatgtcgggcctgaccccggccaactcgcgttggttcgagctggacgtggagcaggccaccgacgacgaaaaggaatggctcggcgaggccgccgacaccgtctggaccaacattcaccaatccaacttcgacgccgaaggctacgagggctgcctggacgcggttgccgcgggctggttcgtcctttacatcgacgaggcgccggacggcggtttcagcttccagcagtggccgatcgcaacctgctacgtggccagcacccgcgccgatggcctggtcgacaccatctaccgggaacaccggctttcggccgaggctgccgccgcgcagttcggtgtcgagaacctgagcgagcagctgcagaagctggtcaaggacaagccgctggaactggtgagcttcatcacctgcatcgagccgcggcccatgcacgtggtcggcgctcgcctggccaggaacctgcccttcgcgtcctgtgtggtcgaggccaacacgaagcacctggtgcgcgagtcgggctaccacgagttcccgtgtgtggtgccgcgctggatgcgcctgcccaacagcgcctacggcgtcggcccggccttcgatgcgctgcccgacatgcgcatgctcaacgagctgaaggcaatgcagctggctgcggcggatatcgccatcgccggcatgtggatcgccgaggacgacggtgtcctgaacccgcgcacggtcaaggtcgggccgcgcaaagtcatcgtggccaactcggtcgagtcaatgaaggagctgaagacgggcagcgacttccagctggccgagtacatggtgacccacctgcaggccgccatccgcaagatcttcatggccgaccagctgcagccgcaggacggcccggccatgacggccaccgaggtgcacgtgcgggtggagctgatccgccagctgctgggcccgatctacgggcgcctgcaggctgagtaccttcgcccgatggttacccgctgcttcggcatcgccgcccgtgctggcgtgcttgggcagccgcccgagtccctggccgaccgcgagtacacggtgaagtacgtctcgccgctggcccgcgcacagcgcctcgaggaagtgaccgcgatcgagcgcctggtgctgaacatgggtgctctggcacaggccactggcgattccagcgtgttcgaccagctggataccgccgcggccgtccgcatcaccgccgaggggttgggcgttccaccggacgtgctgcgcagccaggacgaagtgctggaagtccagcaggccaagcagcaggcagcggacgagcagcgccaggccgcggccactgagcagatggccatgggtgcagcacagcaggccatgggccagcaggccgccgcatga

SEQ ID NO: 512197 - DNA, 249 bp, Stenotrophomonas maltophilia
atgaacgaccagcgcgagcgagtaacgccggaaatgtatgcccgggtgttcgagaaccacgccgagggggcgctgatcctcgaggacctggtgcggcgctttggcggtaacccctacgtccgcggcggccaagacggccagcgccagacggatttcaacgcgggggcgctgtcggtccccaccttcatcctcaatcagatcaaccaagcgaacggagcagaacccgatgaacatgagcagcaaccatga

SEQ ID NO: 512198 - DNA, 888 bp, Stenotrophomonas maltophilia
atgaacatgagcagcaaccatgaagacacctcgaccgcaggtgcaggcggtaccgatgccgcagcagcagctgccggcgcggcgggcgcgggagacgctgcctcgctactccaacaaggcgcgggagaggaaaccgcgtggctgccggagaagtaccgtgtaaagttcgacggcaaggacgagatcgacttccaggcatcggcccgcaagctgggtgagggttacaaggccctcgaggcgaagctgggcagcggcgccaccggcaccgtgccggagaacgccgacagctaccagctgaccgtgccgaccgatgctgaaggcaagcccctggtcgaaggcgtcgacctcgaggatttcaagggtgacccgatctacaaggatctagccgccaaggcccacgcgaagggcatcagcaacgaggcgatgcagttcttcgtgggtgaatacctgcagttcgcgccgcagctgttcgaggccaacctgcagctgggcgccgacgaggcccgccagaccctgtcggcggtgtggaaggacgaggcagccatgaagtcgggcctccagcacgccgcccgcgccgctcagggcttcgcagcaccggcaggccagcccggcaactacgacaacgtgatgcagaagttcggcaacgaccccgacttcctggcgctgatggccagcatcggcaaggaaatgggagaggacaagccgatcagttcggatccggtggccgcagccgactggcaggagcaggtcgacacgctgaaggccgacccggcctacatggacaagagcaacccgaagcacgccagcgttgtgcgacaggtcggcgagctgtatcagaagcgctacggcaaccagcagcgccagctcggcgcatcagccgttcgctga

SEQ ID NO: 512199 - DNA, 864 bp, Stenotrophomonas maltophilia
atgagccagcagattaccgaagccttcgtgcagcagttcgcggacaacttccgccacgtggcccagcagatgccgtcccgcctcgagtcctgtgtgaccatcgagtcgggcatcgtcggcatgtccaagtccatcaacttcctgggccagcgcaccgcccagcgtcgcctggtccgccacggtgacaccccgatcaacgaccagcagcacggtacccgtttcgtcgacctgtacgactgggaagacggcgacatgatcgacgacctcgacaaggtccgcatgttggtcgacccgaccagcgactacgtcaaggccatggtgtcggccttcaaccgttcgaaggacgacgtgatcattgccgccgcccgcggcaactcgcgcgctaccgccggcaacatcatcctgccggcgacgcagaagatcgcgctcggcggtgtcggcctgagcaaggccaagatcatccaagcgaagggcatgttccgccgcaacgaggcggacgaagagaacggcgaagagctgtacatggcctacaccgctcagatgctgcaggacgtgctgagcgataccaccctgacctccgccgacttcctggccgtgcagatgctgcagaacggctcgctgaagggtaagtggatgggcttcaactggatcccgaccgagcgcctggacaaggtcggcaccacccgttacggcctggcctgggccaagtccggcatcaccctcggcatcggcaaggacaccaccaccgaggtcggcaaggatccgggcaagggcttcaacacccgcgtgtacggcaagcaggccatcggtgcggtgcgctccgaggaagtgaaggtcgtcgaaatcgcctgccaggaagcctga

SEQ ID NO: 512200 - DNA, 516 bp, Stenotrophomonas maltophilia
atggcagtcgtgaacaagctttccgccgcactcgcccagcgcgacggcgtcccctcccagctcaacagcaacgctgcaccgaccaagctggccaccggccgcgtcaaggaatccatcggcgtcatcgccgtggccaacggcgacagcgcggccagcgtgctgcgcctgttctcggttcattccagctggcgcgtgagtgctctcctgctgtcctgcactgcgatcaccgccgccgccgccgatatcggcctgtacgacctgccgacccgtaatgccggcgcggttgtggatgcggacttcttcggcgccgcgcagagtctcgcctccgctgtggcatcgcagaacgtcctggctggcaacgtggtcaccgtggacaagctggaatggccgatctggcgtctgctcggcctggccgctgacccggggctgtactacgacgtggccgcaaccctgaccgccggcgcgaccgctgccggcagcatcgccctgaagggccacttcatcgacggcaactga

SEQ ID NO: 512201 - DNA, 591 bp, Stenotrophomonas maltophilia
atgactgaccccatttcgatctgctccaacgcgctgatgatgctcggcgccaagccgatcgccagcttcagcgagtccgagggcatgggctccaacctcgaccgagccaagctctgcgccggtctgtatccgggcctgcggctggccatcctgcgcggccactactggaacacctgcgcccgccgcgtgctgttgtcaccggacgagcagaagccggccttcggctacgcctaccgcttcctgctgccgggtgactggctgcgcacctggggcgtgggcgaccgcaacacccggggccgcatcgactaccgcagcgaagggcgctacctgctgtgcgacgagccggtgctgccgctgcactacggcgccgacgtgccggaagaccagtgggacacactgcttgtggacgtgatgaccgtcgcagtggctgcgcgcttggcgtatccgatcaccgccagcaccagcgtggaggaagccaagaagatcgagctgcgcgacctgcttcgcgaagcccgcgccaccgatggccaggacgacccgcccgagacgttcggcgacttcccactgctgcagagccggatgaggggctga

SEQ ID NO: 512202 - DNA, 2208 bp, Stenotrophomonas maltophilia
atgcgcctgacccccgctcaaaccaacttcaccgccggcgagatcagcccgaagctctacgggcgcagcgatatcgaccgctaccgcaacgcggccgagattctcgagaacgtcatcatcatggtgcagggcggcgtgcagcgccggccgggcctgcgctacgccgcccacgccaagcaccaggacaagtacgcggtgctggtgccgtatgtcttcagccggtcgcaggcctacatgctcgaggtgggcgacgcctacatgcgcgtattcctcggcaatggggcacaggtgcaggtggagtcgacgccaggcgtgttcgtgccgttcgagatccccaccgactatgccgaggcggatctggccaccatcgactacgtgcagagcggcgacacgatgttcctgttccacccggactacgtgacccggcgcctgcgccgcttcggcgatgcctcatggattctcgaggcggtgccgtgggtggaggagcccttcggcgaagtgggctatgcccctccggtaagcatgacgctggacagcctggcgcttgggccggggcgaaccatcaccaccagtggtgcggcgttcctggctgcggacgttggccgcgagatcgagggccttggcggcctggccgtcatcactgcggttaccagcgcgaccacggccaccgtggacactcagacgccattcccgtccctgaccatcgccgcggggcagtgggtgatcaccggcagcccgctggccgtgctgaccccgacctatccgggcggcactggtaccgatctgccgccggtgggcgcttcggtgaccttgacgcttgacgcgccgggctggcgctcggtggacgctggcaagtgggtagagctgaacgccgggctcgtgcagatcgatgctgtcacctcgtcgactgtggccacggcgacggtgcggcgcgcgctcactgcgctggtggcggtgccggcgctggcgtgggtgctgaagggaaccgtatggggtggccgcaacggctacccgggcacggggacgttcttcgagcagcgcctgtggctggccggctcgcgtgcgttcccgcaaacggtgtggggctcgcgcatcggcgaatacctcaatttcgagctgggcaccaacgacgacgatgcggtgtcgttcgacctggccagcgaccgccagaacctgatccggcacctgacccaggtgaacgccctcgtggcgctgaccaacggcggcgagttcaccctgcagggcagcctggacaagccgatcacacccacgaacgtgcagatccgcaaccagtccagttttggctgcggcgacgtctcgcccgagcgcgtgggccgtgagctggtgtttacccagcgtgccaaccgcaagctgcgcgcactgtcggccgatcgcatcgacactgcgcagtacggcgcccccgaactgaccgtgctggccgaccacatgacggtcggagggatcaccggaagcgcctacgaggccgagcccgattccctgctgcactgcgtgcgcaacgatggccagctggcaacctgcgcgctcgaccgcgaccaggacgtggtcggctggtccaggcaggtcacggaagggcgattcattgcggtggccacgctgccgctcgacgacaaagatcaaacctgggcaatcgtcagccgcaccgtgaacggtgtgcagcagcgctatgtggagcgcttcgaccgcgacgtgatgacagacgcctgtgtcaccgccaccagcgtggccggcgataccacctggctgggcctggggcacctcgaggggaagacggtcaaggtcaaggcagatggcgtggtgctgaatgaccgtgtcgtggccggcggccagatcaccattgaacgggcggccaagcagatcgaggtcggccttgggttcgctccgcgcgtgaagctgctgcggccggaaatgtacagcgattcgggatctgcgcagagcagcaacattcgcgtgtccgagatcgtggtgcgcgtcctcaactcgacggggctggtcgtcaacggccaagtgatgttctcgaggaagaccggcctcggcgtgctggaccagccgccgccgctgctgaccggcgatgagcgagtcgagcagctgggctgggagcttggcgatttccgcatggagatcacccagccgcagccgtatcccttccacctgcaggcggtgattacaaccatgacggtgaacaaatga

SEQ ID NO: 512203 - DNA, 447 bp, Stenotrophomonas maltophilia
atgatccggctcgcaaccgacgacgacatgggcgcgctgctgatcctggcggagcagatgcacgccgaatcggactaccgccggtatcccttcgccatcgacaagatggcgcgcctgtttcagggcctgatggatggcgccggcgtagtgctggtggccgagcaggctggccgcgtggtcggcgtcatggccggctactgcgaagaaagctggttcaccccggccaaggtcgccggcgaatacggggtgttcgtcgagcccggcgcgcgcggcgcggcgctggccgcagggctggtgcgcgccttctgtgcctgggcgaaggagcagggcgccgacctgatccaggtaggcgtgaccaccggcgtgaccaccgaccgcacggcccagctgtacgaaaagctgggcttccgccgcaccggcattgttttcgagttcgaaggagactga

SEQ ID NO: 512204 - DNA, 483 bp, Stenotrophomonas maltophilia
atgggtgttgccgcgatcccaattatccagtggggcgccctggcgctcagtgctggcgccgccgtctaccagggcgagcagcagagcaagtacaacaactacctggcagcgcaggcagaggccgactcgcgcgccgagcgcggggccgcacaggtggaagccgagcgcatcctgaaggcatcgaagcggcagcgcagcgaagcggtggcggcgctggccgcgtccggcgtcgacgtgaacagctcgaccgcgctgaagatcgacgaagagatctcccgtggcgcttccgaagacgcgttcctgaccctgaccggtggcaacgaccgtgctgcaaggctcaacgcagaggccgacggcgcgcgctatgccggccagcaggcgcggaccagcggctacatcaatgcggggacgtcgctgctcagtacgggctcaagcatcgcccgaggctggaagcgcaccagcaacctgagcggggggcgctga

SEQ ID NO: 512205 - DNA, 2079 bp, Stenotrophomonas maltophilia
atggcacgcatcgatatcggccagttcgggcagggcggtggcaccgcgccgctggtgcggtcccgcgtcagtggcgcgggggtaggggaggtcgcgcaggcggtcgggcagctgggcggcgttgctgcgcagcttggcgcatccatggccgccgaagacgcacgggaggctgagggcctggcgcgcgcgaaggcggccaatgcccagctggactacgagctgcaggtgggtgacgtccagcgcaagctcgaggacgacgtggccaccggcacggtgccgtatgccgaggctcccagccgctaccaggaagcagtcggcaagatcgaaaagccggccgtcgccgggctcactcccgatttgcagctggcctacgaccgcggcctccagcgcacggtgaccgctggccagctgggcatcgatcgggtggcgcgcacggccaagcgcgcggactttcgcgggcagttcgacgccgccctggacaagctgggcaagatcgccggcatgccgggcgccgatatcgccgcggtcaatcaacgcgcgcaggcattcgcgccactggccaagcaggccggactgagcgacgcagcggtgggcaaggcgctgcaggacttctacgaccgcacctggacttcgcaggccacgcaacgcgccatcttcaaccgcgaggatccggctggcctgaagtcgctggaaacggacctgtccagcagcgacgggttctatgccgacaagctggaccccgagaagcgcaatgcgctgctgtcgcaggtgatgacccggcagcagacgctggtcgaccgggccgagcgtgctgccgaccgcatcgacgcgaaggcgcagcgggtgctgggacagatcgatcgacagatctccagtggggtccccagcacagcggaaatgtggactgactggtccgacgccatggagggtgccagccctgagctgcgcgcagagtttgaccagcgagtaaaggaagagcgggaggtgcagggcgtgctgcgtatgacggcggcacagcagcagacctacctgcagaaggccgaggcagagctggccactgccggtggcaccgtgcagcgcaaggaaaacctggcgcgcacgcgctcggcgatcgaggcggcgcagaagcagctggacgagacgccgctgctgttcaacgcatcgcgcgaaggtggcgaggttgagccgctgaacctggcagcgctggccagccctgccgatgcctgggaggtgggtgcgcagctgcagaaccgcgcggccaccatcgatggcatgcgcaagcgctacggctcgcaggtccagatggctgtcctgctgccgcaggaagtgcaggcgcttggcgagcagctgaagcagggcaccagccggcagcaggcagaaatgctgtcgcagctgcgcacggcgaccatggatgacaaggtgttcaacgcggccatgaagcagttggcaccggaacagccggtggtcgcctacgccggcatgctggccacgcgcgagcgcgcgcaggtgacgctgcagaaacacatgttcggggccgacgaggcgaccaacggccgggacgtcgccgccaccatgctcgagggcaaccggctgctgcaggggaagggcgattccaagttcccgctgccaccggaaaaggagttccgcgaccagttcacccgcgacaccggcgccctgttcgcaggccgtcctggtgctgctgacgtggccatgcaggccgtgcgcgcgttctacaccgggcagtctgccgccgacggcgaccactcggccgaggtgaacagcgatcgcatgaagaaggcgattactgcatccctcggcgaagtggtcgacgtcaacgggcggggtgaggtgctggcgccgtggggcatgggcgcggacaccttcgaagaccaggcggagcaggcattcaccgagtccgcgaaagcggctggcttgcccgacacggtggtgggtagcttcagcaagtacggcctgcgccagcggagcgaacgcacctactacgtgacccgcgggcgcgagttcctgacgaccaaggacggcaagcccctgaccatcatcatcaccgggagcggccgatga

SEQ ID NO: 512206 - DNA, 2607 bp, Stenotrophomonas maltophilia
atgagcgttttcgatctggacgagcagggccgcaagcagctcgacgaacaggcggtggccaacccgctggatctatcgaaggtgaagcccgggttcttcgaaggcctgggctcgtccattttcagcggcaccatgcgcggcggtgcccgaaccggtgccgccgtgctgactgccggcgcggtgccggtggtggcgcgtgacgactacctttcgtcctttatgaccgacgacgtggccgacttcctgcaggcgcagggcgtggccaacccggcgcgcggggccaccacggcaggccaagatgcctatttcgccgacgtggtggaggggatcggacagcgcgcagtcgacgcctggacgccggaccctaccgaaaccggtaccgctgggcgcgtgctgggcggccttgccgagatcgtgctgccgctggcggcggcaggtggcaaccctgcgttgttggcggcgaatgaaggcctcgagcggccggcctcactggtcaagcagggtgtcggcgccggcactgcgcaagcggtaggcctggcaggttcggtgggcacgctggccgggttcaagctgccggcagcgttcggcaccaccctgtcgcagcggctggccaccggtgccgccggaaacgtgctgctgggtgcaggcatgtcgggagcgcagtacgcggcgctgaaggctggcggcaacgatgagcaggccaaggccttcgatccgctcgacgcggaggcgcggacggtcgacctactcaccggcgtcgcgttcggcgctttggcgcacgccatggccccccgtgtgccgctcgatcagcgcgatgcactgctgacggcgcgcaacgccgaccgcttccagcgcactgccaccgatccgctggtggctgatgaaggtgcggctatccggggccacgacgcgctgcaggatgcgctcgagcagctggcgcgcggcgagccggtgaacgtggtcgacacgatccgaccgtcagacttcctgctgccgctggccgatcaggcagcggcaccggttgcggcgctgtcgggttacccggccttccgccgcgcgctcgagtcaggcggccgtgctgatgcgcgcaacccggaatccaccgcgctgggcatcgatcagttcaccgccggcacttggcgccgaatggtggccaagaccaagccggaatgggcgcagggactggacgacgcgcagctgctggcgatgcgaacggatccggcgcgctcggcggaaatggtggcggcgctcgatgcggagaacaccgcgggactgcaggccgaggggctgccagtcgacgcctacaccctgtatgccgcgcatcacttcggtttggccggtggccggcgcttcgcccgctccgatggcgccaccccgatggaccgcatcctgagccgcgggcagctcgaggccaatccctacctgcggggcctgaccaaggacgaggcgatcgcaaactggaaccaacgcgccaagcgtgccggcgtgctgccggacggggggctggtcgacaccaacccggccgggcaggccctgcgcgagcgcttggtgacggacccggacaagctgctccgcgaatacgccgccctggaagaatctgacggcagccgggtgctgaacaccgacaccgcccgcgagctgtcgccggaatacctcgccgaccgcacccgcagcgcggacgtgcacgaggccgccagcgacaccatcaagctgctgtacgagcagaagctggcccagccgaccccggagggcttcgattcgacggtgttgtttaccgccggcggcaccggggcgggaaagaccagcggcatgaaggccctgggcgattcgatcggacggcccgagatcgtctacgacacgaacatgaacaccctcagttcggccgtggacaagatcgagcaggcccttgctgcaggccgtgacgtcgagattctctatgtgtaccgcgacccggtggacgcgctggtcaacggcgccattccgcgagcccagcggcaggcagagcgcttcggcaccggccgcaccgtgccgctgcgggagcatgcccgcacccatgccggggtccgaccaaccatcgaggctattgcaaccaggtacgcggatgatccccgggtcaccgtcaccgccgtcgacaacagcggcggcaagggcaagcagaaagtggtcgatcttgcaagcctcccccgagtggaggaagatagtctccatggcagcctccaagacgccctcgaccaagcccgtaccggcggactcgctgaagacctctaccgaggattcggcggccctggacgcggcgcaccagcggcgctggcgggagatcggtctggaaatggcccaagccaaggccgagcgcaaggctcgcctggccgcgaagccggcagccgcggcgaagtaacccccgctcccgaaacgcctctcgatgccgcccgacagcttgcggcgcaaaaccctgatgcctcgatcgtagtcggcgccgatgccgatggcggcgccgtgcaccgcactgtcgctgacgaggtcgccgatatcgaggccgatctggcccgagccaccaccgatgccaccgccttccaggcggccgtcaactgcttcctgcggaggggatga

SEQ ID NO: 512207 - DNA, 2448 bp, Stenotrophomonas maltophilia
atgcagcctgcatgcgttcaagaagtggccgccgccattggccgcgagcccaccaccaccgaagtcagccggatcgaggcggatctggccaggcacatgcgccaactggcgcgcaccgatgaccagtggcgcacgctgtcgcacgagcagcgcctgcagcgtgcagcggaagccgcgcaggctgaggccatcgcagatgctgagaaggccgcgttccgccgggcctcgcggctgacggcgcaggttcgggaaactgagcgtcaggccgcgcgtgcggcgcagctggccgcgcagggagcgaagaacccgcatcactccgcgctgttcgagcgcatgcgccaggccgacgactacatttcgggcgtgcgcaacgagtacctgtcggagctggtcgacgccgtacaggctgtggaaccgaagttcctgggcctgatgcacgaccccagctcagtgcgcgcctttgcccgcgcagtggtcgacggggacaccagcgacccgaagatggccaaagccgccgccacctacattgccgcgctcgaggacatgcgcctgcgctcgaacgccgccggcactgacattggccggctcgactacggctatctgccgcagccgcacgacgtgggccgcatcgcctcggccggcaaggacgcatgggtcgactacgtgttcccccgtctgcgccgtgagcagtacctgcgcgaggacggcgaggccatgggcgatgccgaggtgctggacctgctggggaaggcatacgacacgattgccaccgagggccgcaacaaacgcgtgccgggtgcagcagggcagggctcgcgcgccagccgcttcgacgacgctcaccgcgtgctgcacttcaaggacgccgacagccatctggactacctggccgattttggccgcgggtcgatgatggatgcgatcctgggccacgtcggcgccatggccaagaacatcggcttgatggaagagttcggagccaacccgaacagcacctatcgcctgctgaaggacaccgccgagaaggccgacaacgtcaccggcgcccgcgctgcctggcacgagctggcgaccctcgacatgacctgggacacgctcacgggtgtgaccgcacagccagtaagtccagcgatggcgcagttcttccagggcgttcgcaacttcaccgtggcggcgaagctgcagagtgtgatgctgtcctcgatcacggacgccccactacaggtactggtcgcgcgctcggctggcgtgccgacggggggcgcgatgaagtcgctgttttccggcttcgggaagggaaagcggaacatggcgcacgacctggccatcggcatggacgagatcgccggcgagatgacccgctggcaccaggacaacctcgcacagggctggtccgcgaagctggccaacagcaccatgaagctgaccctcgttgaaggctggaccaatagcctgcgccgcgggtacgcgctgattctgtctcgcgttcttgaacggcatcggcagactgcatgggctgatctcgacgagggttcacttcgacgcatggcttccgccggcgtaactgaggccgactggaagatttggcagcaggcgccggcacaggacggaatgctgaccaaagacggtatccgcgcagtcaatgccagtgaggcagatctgaaccgcgcaacggcccggctgctgggctacctcgatagcgaggcccgcactgcgatcctggcgcccgacttgaccacccgagcgagcctgcagcagggcaccaaggccggcacactgggcggcgaagcgcttcgttccctgatgctgttcaaggcgttcccgctggcgatcgtggacaagcacctgcgcaggctgcgcaacatccctaccacgcagggcaaggtcgcctacagcgcggcgatgctgaccagcctgcagctgttcggtgccgtagcgctgcagctgaaggatctgcgcgacggcaaggatccgcgcgacatgaccaccgggaaattctggctggcagctgctgcccagggcggcgggctcggtatcttcggcgacattctctacaccggcatgggcggcgataaccgcggtggacaagccaactggacctcgatgctcggcccggtgttcggcaccgtgatggatgggttcaccatcgcgcgcaagggcgctggctgggcgatcgccgacgagaacaaggccgacgacaagctggacgacctgggcgccgagtcgctgcggttcgtgaaggggaacacccccttcatcaacctgtggtatctgcgcggcgccaccgaccacatggtgttccatgacctgcaggagcagctgagtcccgggtatctgcgacgtatgcgcaagcgcgcgcagaaggattggaaccagcaatactggtgggagccgggcgaggcagtgccagagcgcgcccccaacgtcgcagctgcagcgggagagtga

SEQ ID NO: 512208 - DNA, 396 bp, Stenotrophomonas maltophilia
atgcgcgaggaccaatacctgcggctgcaggccttgagcgaaaagctggccgaggccttcattgaggaagccgacccggccacctggaccggcgctggcaaggcgcccagcgagatggacaaggccgagcgcggcgaccgctactggtgcaagcgcaacgcggcggccactggtgggctgctgctgcgcgttggctcgctggtgtcgatgatccagcgggacagcagcggcaacggtggtgccggtgaggtaggggccgcggacgaccaggacggcgacggcggcctggaagctgaggtagcggcagcggagaaggaaggcagtcgactgctcgaccaggtgctgaagcagcagcgtcgcgcggacgaagtggcgaagatccatggcaagccgtga

SEQ ID NO: 512209 - DNA, 1644 bp, Stenotrophomonas maltophilia
atggcaagccgtgaggtttccttcctgacgttcttcatgatgtgggcacgagtccaggggtggaccgtgcccttgctgcatgtgcgcatctgcacgtggctggaaacctgcacggatccagagcgggtgctgatggtgttccgcggcgcggcgaagtccacgatctacgcggtgttcaaggcctggaccctgtaccgcaaccgcgcgcatcgctcgctggtatggtcggccgacaatgacacggccggcatgctgaccgccgacaccatcaacgtgctgcgcaaccacccgctatgcatcggcatgctgccgcgcaaaccaggtgcaaagcgcttctcggtgctgggctcgcgggacgcccgtaacgccagcatgcgcgctgtgggcgtcacctcgaacgccaccggtgcgcgcgcggacgccgtggacttcgacgatatcgaggtgcccggcaacatcgagacgcccgaggccaggctgaagctgcgccagcgcatcagcgaatcgacccacattgcggtgcctggcgcgcaaaagaccttcatcggcacgccgcacacgcacgacagcatctacccggagcgcattgccgccggcgcgtctacgctgatcatcccgctgtttgcccacgcgacccgatacaaagagacggccagcaagacccggtaccccatcaagttcgtgccggccgaggacgggctgtatgtggtggtcggcatccacaagcacgcccgggtgctggtcgagggcaccgactaccaggtggaccgcggcgaagtggtgttcgccaagccgcccggcgccgtgctggatatctacagcggctgcgcctggccggagcggttcgaccggaacgagatcgagctgcgccggaaggagacgcgcaccctcaacgcgtgggacagccagtacatgctcgaagccaaacccatcgaagagatccgcctggacccggagcggatcaccccctacgccgtcgaggcggtcatcaggaaggccaacggcacggcggccatgttcctgggcagcgtgcagatcgccatggcgtcggtgcgctgggatccggccagcggcaagctcaactccgacgtgtcggccgtcgccgtggtgctgcaggacctgatcggccggcgctacctgcaccgcatggagcagctgaccggcgaggtggcggagttcgatgacaccggcaaggtcatcaccggcggccaggtgtggcagctgtgcgacctgatcgagacgctgaacctgccgcgcgtggtggtggaaaccaacggcatcggcgcgtttgcgccggcggtgctgaaggccgcgctgaagcagcgccggctgcgctgcggcgttgccgttgaacaggccgtggccaacaagagccgtcgcatcctcgaggcctgggagccgctgctggaatcaggcggccagctgtgggcgcacgtgagcgtgctgcgcggcccgttgtgggatcagatgaaggaatggatcccgacggcgccgaaccaggaggacgactacctggacgccggcgcgggcgcgctgaccgatacacctgaacgagtcgggcagatagtcgggaatccgaacatcaccgcgcgggacgattggcgccacagcgcaggggagcatgaggttgtgttcgagcgctga

SEQ ID NO: 512210 - DNA, 258 bp, Stenotrophomonas maltophilia
atgcgacttcttccgatcctgatcctgccgctgctgctgacgtcctgcgcattgctcgggaggcgcacgaccgcgccatacgtgccgcctgccgggtgcagcgaacgagcgattgccctgcggccgccggcaccgccgacagaccgtgattggctgaagtggtccgcggcctatgtgggcgccgtcggcgcctatgaggacagcgagaacaagcgcgcctacaccgccgagtgcctggacgaacaccgcgggaaatag

SEQ ID NO: 512211 - DNA, 459 bp, Stenotrophomonas maltophilia
atgatcggcagcaacatcgagccgcacgagctggaaccgctgctggaactggagctggaaaagcaccatgccgaagccatggcgccgtcgcaggtgttgaccaaggtcgccgacggattgcccggtttcggcatcgtggcggcggtgctgggcatcgtcatcaccatgggttcgatcggcggcgacatcgtcgaagtgggcggccatgtggccggtgcgctggtcggcaccttcctcggcatcctgctgggctacggcttcgtcggcccgatggcggcggcgatggaagcccgcgccgaacaggacagccgcatctacgaatcggtcaagaccgccctgctggcctgcctgcgcggctacaacccgaagatcgcgctggagtttgcccgcaagacgctgccgtcgaacgtgcgcccggccttctccgatttcgagcagcacctgaagacggtcaagtaa

SEQ ID NO: 512212 - DNA, 396 bp, Stenotrophomonas maltophilia
atgctcatcatcgttggattcctggtcgtcatcatcagcgtgatcgggggctacctcggtgcccacggccgcctgggtgccctctggcaaccctacgagctggtcatcatcggcggcgccgcgctcggcgccttcctggtcggtaccccggccaagaccgtcaagcagaccctgcaggccatggtgggcgtgttcaagggcccgcgctacaagcagcaggactacatcgatgtgctcagcctgctctatgaactgctcaacaaggcgcgccgcgaaggcttcatggcactggaagaccatgtcgagcgcccagccgagagcgccttgttcggcaactaccccaaggtgcaggccgaccatcaccgatcgacttcatcaccgactgcctgcgcctga

SEQ ID NO: 512213 - DNA, 603 bp, Stenotrophomonas maltophilia
atgaccgagagcagatctagtcgatgtcctgcccatggctcaggggaatcctggccatgggcacccaatctcatggctttgcactctctatgcggtcttccgttgccactgcgagcagggcgtagcggaggcagatccagcatgtgggcaatgccggcacacttcagaggcattcaaggaaccacgatgttcaagtacgcggtgcgggttgaaggagacggcagggaggtcgtagcaactctggtcgactggcctgaggttactgtgacatgcacggctggaccgccgcatgcactcagagagaagcttctccaggaaatagcggcttgtatgcgtaaccgctcctggatcccggtgcccaaggcaaagccgttgacctcgttctacgtccagctctcaacctccgagtcattgaaggtgttggtgctgaacgagctgcacgccagcggtgtcgatgtacggtttgtagcgcgtgatctgggcgtatcagagagcgaagtcattcgcgccgttgacctcggtcgttcgaccgacgtggatcttctcagcgaaatgcttacggtaatggggaggcggcttctcgcctacactagctcaatctag

SEQ ID NO: 512214 - DNA, 3678 bp, Stenotrophomonas maltophilia
atgagtaccggtaacattgcaatgctgcgctcatcgcgtttgcgacgtgctacgctctatcacgcgctgctgttgggactggccaacaccgtgcaggctgcaccacagcaggtggcagtggattgcggtgtcgagcaatgcagcgctgaaggtgacctgttgttcaccttgcgctcgcgcagctacgacgagcctatgaccgacggcaccaatgctcagtcgggctcgcaggcactgcagcctgaccggagggtcagcatcgcgcttgatgcaccgggcaaggctacggtcagcggtgagttcatgatccgcctgccggaaggtggtgcgatatgggctaccgaagaccctgcaatggggcagccggagctttccgtttcagcgccatcgctggtggcttttgaccagggcagcatcgtgcggccggtcgagttctatgtccgtggcaactacaccgatttcattaagcggctggaagtaagcgtgtaccgcggtagtgatactgatctggtgcaaccgctggcgacgtttgcattgccggtgacggcggtcgggcagggcagctgggatggtgctttgccggcaaccgttgccttgcgtcgcagtgaccggctgacgtatgtgctgcgtgcctatgatgcgcaaggcaacatggacgaaaccacgccgcaatcactgcagctggtgaccttggccgaggtcgagcgcggcaaccagcagttgcgtgacgcgctggaagagcgccgtggaacctcggtggacgcaaaccaggcagcatcgctgtcgctgttggatcaggtgtttgatggcaacagtctgcggctgcagaatattcctgtgcatggttcacgggttcgcctgcgtggtcgtgatctgccacagggcgcatcactgaaaatcaacggagaaagctacccgcttgaccaggaccgcaagtttgctgccgagtacttgatgcccatcggtcatcatgagttcgcagtcagtgtcgagcggcctcaggagccggtaattaatcgcacgctggcggtagatgtcagcggcagctatatggtcggtgttggcctggccgatattaccgtctatcagaacaaggccaccggtgccggtcgcgacatcgcccgtggcgaacgcaatgacgacatgctgagtgacggtcgccttgctttctatctgaaggcgaaaacgcaggggcgctatctgttcaccgcgcaggcggatacgcagagccagccactcgaaaatctgtttagcggcttcaccaatgccgatccgcaggatctgtttcgcagccttgatccggacctgtactaccccacctatggtgacgactcgcagacctatcgcgacgtggacacgatggggcgcttctatctgcgcatggactgggaaaagaaccaagcgctctggggcaactacaacacagggctgagcggtaccgagtacgcgcagtatgtgcgttcgctgtacggcgcggctgtgtcgtggcgctcgcgcggggcaaacgcttggggcgatgcacagaccgaggtgcggttgttcggctcgcaggctgaaaccgcacccggccacagtgagttcattggtaccggcggcagcttgtattacctgcgtcatgccagcattctgcgcggctccgatcaggtggtgctggaaatccgcgaccgcaccacaggccgtgtcgagcagcgcgtgccgcttgtgcgtggagcagattacgagattgatgcgctgcagggacgcattttgctgacgcggccgctggcacaggtaagtcgggaaaatctgcgtcatatcagtcgcgatgtgccgttggatggttacgagcagcgcttgattgtcgattacgaatgggtgccgactggctttgacagcgacgacatcaccgccggtgcgcgtggcaagcattggtttggtgaccaccttgccgtcggcgtcacgtatgtggacgagcagcgtgccggacaggattattcgctgcgcggtgccgatctgacgctgcaggccggtcgtggcacgtacctgaaagtcgagcacagccgcagtgaagcaaccggtgcgccagtgttcttctccgacaacggcggcctcagcttcagccgactcaacccggaggggccgcgtgaaggcgaggcgagcgccgtggaggcgcgggtcaatctgcgtgagttgggctggaccgagcgcgactggagcgtgggcgcgtggtggcggcaggtggaaggcggttattccgttggccgattcgacaccggtcaacgggtgcgcgaacaaggcgcggaggtgctgggatacatcaccgatgatttcagcctgtacgcgcgttatagcgaagcgcgacgcggcaatgaatccctggtccaggcacaggccaccgccgaatggcgcatcggtgacaacgaccggttgtcagccgagttgcgccacgtgcaggaacagcgcggcgcgggcaacaacgccggtctgctggcggcagcgcgttacacccatcgtatcggcacggccctggacctctatggcggcggtcagcttacggtcgacgacgatcatggccgctatgaagacaacaacgccgtgatagctggcggtgcgtatacgttcggcaatctctccacggtgggtgccgaggtaagtgatggcgaccgtggcagcgcggcgcagatcaacgcggagtacaaactgacgccgcagcacagcttctatggtgcgtttacccagtcaaccgatcgtagcgagtacgatccgttgttcagcccgaatgcgcaggatggctggacccttggtcagcgttggcgcctgtctgatcaggtcaacgtattcaatgagagccagttcctgaagtcaggccaggaatcggggctggccaacacgttcggtttggatttctatccggctgtaggttggaatgcaggcttcaccctcagcgacggtaagctcgacactgccaacgggcaggtggatcgcaatgccatcagcctgtccggtgggcgcacatcgcccgacaccgattggcagagcaagcttgaatggcggcgtgacacgggtgccgagcgacgcacgcagtgggtgagcaccaaccggctgagtcatcgcctcaacgacagttggcgcattgctggccgtttcaactatgccgataccgatgatgcgatcaacccgttggctggcgcgcgtttcatagaaggcaacgtcggatttgcttaccggccctggaataccgatcggtggggtgtgttcggtcgctatacgtatctctacgatctgtccacgctcggccaagtcaatggcgtggactacgaccagcgcagccaggtgctctcactggagggcgtataccgcattgaccaacgctgggaagttgcaggcaagctggcacgtcgcgaaggcgaggtgcgctacggtcgaggcaccggtgcgtggtttgattcggcgaccaacttcggtgcagctcagttgcgttacgacctgtactaccaatggcacggattgttggagtaccgcttgctggacgtacgcgagggtggccgtcgccagggcttgctggtaggtgtggaccgtgacatcggccgcaacttccgcgtcggggtgggttacaacttcacagacttcagtgacgatctcacccgctttgactatgaccatcgtggttggtatctgaatctggtcggcaagtactga

SEQ ID NO: 512215 - DNA, 6891 bp, Stenotrophomonas maltophilia
atgaagtcgcgctttggcacgggaggcgctgccatacgtgattgcgctcctcattcccgacgattctctgaccgctggctgggcgtctgcctgttgctgttcgccatgcttttcatgccttccacggtcatggctgcggcatatgcgacaggtggtagcagcccgtaccgcgacaccgtgctgtggttgacttggggcggtggggaacttggtacccacaatatcttgctgaacaatggcgacacgtcttcgttctccatgccggttgctacgggggtgaatctcgatgtgacttgtgggctgtctgacatcagtagcggcacgttgcgcagctaccgccccggcgactattcgggcgacagcctggatgacctttacaacattggcggtaccggaagcgccaatcggctgattgcaggtatcgcgcgatcctcaggtaccacgaacttcaggatcagctgcacctcgacgctgggtggcgttccctatcggctacccggcttggtaatggctgacgcggaaacgctcaacaacgtcaatgagcacgttgaagccagtgccatgggaagctggaacgtcgtggagctcaagaagagcatcggctccggtgcctatcgggtaaccaagtcgcagaatggtaccaacaacgtcatccgctttggtcctggcaactaccagacggcagctgtcacgtttctgagcttcgacgccggtgcatatgcgcctggcgacttgtccgtgaatatggattttgcgatcaggggcggtggttctaccgcgattgcaatcggcctgcttgtgccatatgcagatttcggcgatgcgccagccagctacggtgacgccatgcatgtggtcggtgcactggagctgcgcgacgacaacattcccgacaataccgccaatctggacatcaacacagcaggctatacccctggtggccttgccccgccaaccaaaaactatctgggcacggtaggcccggacaccgagcagcgcagcacctatagcgctgatgcgctgggcgacgacaatttcccggctggtaatcccaatgaagaggacacctggccgcgcaattaccgcttgacggtcatgcaggccggcacagtggtgagccagccggtggcgtgcgtgggcaatggcagtgttgcgggctgggtggacttcaatcgcaatggccagttcgatcccagcgagcgcagcaataccgcggtatgcagcggcggcagtgcggcgttgagctggacggtgccgaacgacattgaagcgggtactaccttcgtgcgcctgcgttatgcgaccgatgccacgcagattcagcaacctaccggcgtcgccgatgatggtgaggtggaagatcacctgatcaccatcattgcgccgtcgttgcgcatcaccaagagcaacaacagtggtgatggaacctggaactacggcgaagcagcaacaacgtacacgttgaccgtcagcaacaccacggacgtgcctaccggtaacccgccttatgtcgcgccgggcactatcacggtgctggacgatctgccggccggtattgtgccgggttggtccagcacggccatcatcaatggatggagctgcgccgcaagcggccagcgggtgacctgcacaaccaatcaggttctgggcgccgtgggcaatgccgatgcgagcagcagcatcgtgctgcctgtcacggtgacggccaatgccaccggcacgctgaccaactacgccagcgtggggggtgggcatgaccccttcaatggtggagcgacaccgccgccaggcgcggcctgtgtcgatgccgatcattgcgcatcgaatgcggtggacgtaccggtgacccgcgttggctatgacaagcgtgccaacacgaccggtccggtaagcgtcggcgacaccatcagctacaccgttgatgtcaccgttgctgatggtgatacgcgcgacgtagtgaccttgaccgatacgctgggtaccgggctcgacctgggcagtgtcaccagcgcgggcgccttcacctgcggtgtggtcaatccgctggtatgtacgctgccggccggtaccgtgccaggcacatacgccgtcacctatagcgcggtggtcaacgcgcaggccagcggtcaggtaatcaacaccgttgttggtacgggcaccgacaacccggtatgcaccacaagctgcaccaccaatacgccggtgggttcaccggtggttactgtgtccaagtccacggcaacaacggggcctgtggttgtgggcgacagcgtcaactacacgctcaccgtggtggtggccaatgcgcgcaccaacggtgtggtgacgttgaccgactccttgggtgccggcctggacatgggcaccgtcaccggcgcgggcgtatttacctgcaacgccaccaatcccttggtatgcaccttgcctgccggtaccgtgccgggcagctatgcaatgtcgtataccgccacggttaacgcacaggccagcggccaggtgcgtaatgccgtggtgcccagcggtccggatacgcccacctgtggcagcaactgtgacaccaccacaacggttgccgcaccgcgcgtcatcgtagccaaggtgagtgccacagccggcccggttgccattggtgatggcatccagtacacgctaagtgtgacggtggcggatgcacgtaccaccggtgttgtcaccctcaccgacacgctcggtcatggtctgaattttggcaatgtgaccagcgtcggtgcgttcacctgcaacgcaaccaatcccctggtctgcacgctgcccgcgggcacggtgccaggcacctacacgatgtcttacacggccagcgtcaatgcgcaggccaatggtccgctgcgcaatgccgtggtgcccagcggcccggacacccccatctgcagcggcagctgcgataccactacgccgctcgtcggcccggaggtgggttacagcaaattagcctccaccggtggcccgttgcgcgtgggtgacagcctggcctacaccctcaccgtcacggtagccaaagcacccaccacggatgtgctcaccctcaacgatacccttggtgtcggcctggatttcgcaggtgtgaccagccagggtgtcttcacctgcaacgcggccaatccgttggtttgcagcctgccggcaggccttgtaccgggcatctacagagttacctacaacgcgacggtgaacgtgcaggcaatcggtcagctgcgtaataccgtggtgggaagtggcactgacacccccatctgcaccggcagctgcgacaccaacacgcctctggcaacaccgggcgtcagttacgccaagtctgtcgacaccgatggtccggtcgttgtgggcgatgtactcacctataccttgacggcgatggtgaacaactcgcagaccacggacgcgcttacgctgaccgatacccagggtgttggcctagacttcggcagcatcaccagtgccggtgcctacacctgcaccgccggcaacccgctggtctgtgttctgccggcgggatccgcaccgggcagctatgccgtgtcgtacaccgcaaccgtcaacgaccaggccagtggccaggtaaccaacgcggtgctcggcagtggcaacgacaatccgtcgtgtgccggcaactgcgataccaatacgccggttgaagcaccgagcatcgactatcggaaatccacctccacgccgggtccggtgaaagtgggcgataccattgcctatacgcttaccgcagtggtcagcagctcgcgcaccatcggtctgttcacgctgaccgatacgttgggtgcaggcctggatttcggtgcggtcagtgcaaccgttggctttacctgtggcgctgcaaatccgctggtatgcacgctgccggccagtaccgtgcccggcacctatacggtcaattacaccgccaccgtcaacgcgaaagcgtcgggcagcgtatacaacgccgtgctgggcagtggcccgggacgacaggaatgcagtaccaactgcagcaccaccacggacgtggtggagacggcagtgagctatcagaagagttcgtccaccgctggcccggtcagtgttggtgacaacgtcgattacctggtggaggtgaccgtcgccaactcgcagaccaccagcgtgctgaccttcaccgacactctgggcgttggtctggacctgccggcagtcactcagccgggcatgtttgtctgcgcgatcggcaacccgcttgtctgcacattggctgcgggcaccgtaccgggcgtctatccgctgcactaccgtgcgcaggtgaatgctcaagccgtcggcagcgtgcgcaatgcagtgctgggcagtggcgcggattcaccactgtgcagcaccaactgcagcaccgaacacgtggtgcgcgagacagaaatcaaggtgcagaagagttccataccggcggcaggcacggaagtgcgtgcgggtgagagcatcagctacacgctcaccgtggatgttctcaacgcttccaccacgcaaccgctgcagctcaacgacacattgggcaatggcctgatgtttgatgcggtgaatgcatcaggtgcgttctcctgcagtgccagtctggtctgcacgttgccggcgggtaccgccccgggccgctatgcggtgacctatcaggcacatgtcatcgcagatgcacgtggccctatcggcaacgtggtggtcggccaaggtggcggtggacaaccgccagaatgcaccacctgcagcaccgaacacccgctggctgagccgcgcgtggtgcttgacaagcagtcagacccggtcagcggcagcacgctgcgtcccggtgatcgcctgcgttacacgctgggtgccaccgtggagcgggccgcgctgcgggccgcactgcagttggttgatacgcccgatgtggggctcaccatcgaaatactgccggccgcgtgtgcatggcagggcggcgacattgtctgcaccttgcccgcaggtaccacgccgggccgtcatgagttcagctatgaagcgctcgtcaatgcgcaggcgcgcattgaagtcagcaatcgtctgcgtggccaatatccggatggtggcccgacaccggaatgcgtcacctgcgaaacccgtcacctcgtggaagccgattttgctctgcgcatcaccaagaccgccaacccgcgtctggtgagggtgggcgacctgattcgctaccagctggtggtggagaacgtcggcggcagcaactggcgtgatggcatcgtgctcgacacaccaccgccgggtttcagttatgtggccggctccatggtagttgcagatgacgatggagcgttcgcactggccagcagccagagcccgcttcgcatcagtgcgatggacatcgccgttggccgcagcgccaccatcacgtacctgttgcgggtgggtgccggcgtgcgggctggcgtctatgtcaacgaggccgttgcccatgacacggacggcaccgcgctgtccaatgtcgccaccgccgaagtgcggatggatgccgatccgctgctggaagacagtctggtattcggtacggtgttcgatgatcgtgatggagatggctggcaggacagtgccgagctcaccggtgtgcgcgtgcagggtggttttgctcctgccgcctacattgcaggctccaccaccatcgaccgtggccaagggcctcagccggtggccgatgccagcgcaccgttgctgcatggaatggtgatcggcacgattgctggacgtaactcgacgtctgacaccgcagaagcgcatcaggtggtggtacgtcagcatctgcgtgagttggcattcactggtgacttcactcttgaaagcgcacaaggactgcaactgcagatggatgcacagggcggtacctcgctgcagcgcagcgacgatgccgcaaagggtttgacggcggccgagccggttgtacatcgtgaaatcgcccgtgtcgccgacggttacgaggttgcttatgtgatcggcaaccaaggcattcaggagcaaggcatcccgggcgtgcgtctggccacggtggaaggtctgttgatcgagaccgatccgtttggccgctaccacttggccgatgtacacggcggcgatgcacgattgggacgcaacttcatcatcaagcttgaccgcgccacgctgccggcaggaagtgaactgaccactgaaaacccgctgctgcgacgcgtgacccaaggcatccccacacgcttcagctttggcgtgcgcctgccatctgcgccgcagacggccagtgagcgtgcggagctcacgctgggcgaggtgctgtttgcaccgggtagcagcgagttgcgtgcagagcatctgccggttctgacgaaagtgtctgaagtcgtggaccgctacaacggtggtgacgtcgtgattcttgccgatggcgaaagcgaggccttggccttcgcccgtgcaaccgcggtacgcgacgcgttgcaggcggaagtagccgaggcatcgcgggccggcatgaccgtgcagctgcgcacgcaggtggatgacccacattcgatgctggtggggctggatgtacacggagcgctgttgggcacggttctttttgaaaccaacaaggctgtcgtacgtgagcagttcaagcctttgatggtggcaatcgcccgccgcctggaggccaatggaggcgggcaggtgagcgtggtcgggcacaccgacgtgcgcggctcgcatacgtacaaccaggcccttggtctgcgtcgtgcggaagctgtgttcgaagctttgcgcagcgagctgagccccgcggtgcagcaacgcgtgcgtgtaatcaatcaggagagtgccgccacccgcgcggcagcagggcaacaggaggcacgtcgatga

SEQ ID NO: 512216 - DNA, 1329 bp, Stenotrophomonas maltophilia
atgctgcagatgttgctgctgctgatgggccttctgcaagcggcatctctggcgcggtcactctggacccctggtggctcacccatcggtcatttcggccttgtgcttgccacctcgaacttggtgatgctggttgggtgcttttcattgctgaggtgcggctacttcaagctggcggcacatctgttcatcgccggcacggtggtgttgctcgcggtcggccatgcgcattggggtttggaggcgcagctccgctatcaggtgactcagacctatccagtgttgattgcgggcctgctgctcaaccggaaggcattgtggttggcggtggccgggctatgcatggtggtggcacttggggcattgcgtgatgtttcggcaggccttttcatcaacccggaaatgtgcgcgctcgacagtgcgtcacgcagctggtttgtattgcttgttatcgcgttgattctggacagggcagtcagtgcgttccatgggggctttgaaaaagcggtgcgccgtggggacgatctggagcgcatccgtgacctgttgcaggtggaaatgcgcgagcgcgaacgcgcacgtgagcagctgattcatgcgcagaaggtggaggcagtggggcgtctggccagcggtgtggcgcatgatttcggaaatctgctgtcgttgattctgggctacgcgcgggtgggcagccgcagtgatgatccggacgcactgaaaaaagcactggcaggtgttgatgttgccgcgcgccgggccaatgccgtcagccagaagctgctcagcttcagccggcaggatgacacccgtatggagctgtttgatgcggccgaagcgctgcagcagatgcaaccgatgctgcgccagcttttcgatcccacagttgatctcgcacttgacgctcacacacagttaccggagatccgtttcgatcgcacgcagtttgagttggtggtgctcaacattgcggccaatgccaatcatgcgatgccggatggcggctgcttccggctgtccgtacgtgcggatgtcgaagcttcatgcgttgagatcgacttctctgataccggagtgggtatcgggcaggagatacagcaacgcatcttcgagccgttcttcacgaccaagccccgaggcgagggaacaggcctggggctggcagtcgccaaggatctactgatacgggcaggtggcaaccttacggtgcgcagcagcatcggggtcgggaccacattctgcatgaccctgccccttcagcagcacggcaatccccgtttacacgaggtcgctgcacccgcgccgtatctgggtttgccacagccttag

SEQ ID NO: 512217 - DNA, 1860 bp, Stenotrophomonas maltophilia
atgcgctcagcaattttagtcacgctggcactgctgccattcaccgcttccgcacagaccgtccccgccgtggatccctacgagccggggctgcgccggtgctttcatcagctgttgggcaacccaagcgcctcattggtagaagctgatcaactgctcgccaagccatcactacccctgattccgcagctgcgtgcgtccgcatgccgagccgaggcgcttgccacgttagggagggctaaggacgccggagctcaagccgaagccgtgatcacgctgctggatgggaatgcactgcccccgtcagaacagttcccggcgctgttcatcagcggcagtgcactgcagcggatcggtcatcatcggcgcgcgcttgagatattcgaacgtgcccatgtactggcaagggaaagcaactccgaaaaggcgcagatcgacacactggccaacctgggaatagtccatgctatgggtttgaatgacccgcaggcaggtgagccgtatctgcgcaaggcagcagagctgagcgagcggcatgacacgccagcactcagcgacatcatgatgctctacaactacggctatgtgcttctcaaactcaagcgctacgacgaggcaatgcgcatgttcgacaaggtgcttgccttgtccgcgcagaacaccaaccaagagttgaatgtttttcgcaccaacagtcaccgtggtgaaatcctgcgccggaccggtaaggttgatgagggcctccggctgctggaagcagcggcatcaatgcaacagaagcttcccgacccacagggcgagtccgtcacactgcagcggttagcgagcctgcacctggaaagcggcgatgcgccaactgcactaccactggcgcagcgtgcgctcgatctagccgagacaggagagtttcctctggagtcactggatgccctgaagctgctcgctgaaattcacgaggcgcaaggtcagacggatcaggccctggcttttacgaagcgggcgcacactctggagatggacagcattcgccagcacaacctggactgggtgggcgaggtccagacaaggctgaaggatgcggtcgccggcgaaggcattgcatggggtaacagggttttccgcgcgaatctgctgcgtaacgtatcgctggctggggtggcgctggcactgctgacagcgacgttcttcattcttcggttacgacgtagccgcaaagcgttgaagcatgaggtcagcgtggactccgtcacctcgttgcccagccagcggcgggcacgtgaacacatcgcgagctggcccgtacacgcaggcacgcagtcggctctgctgcttgtgggaatcggcgacctggatcgcatcaacaacgatttcggccaagccgtgggggacgagacgctgcgggcgatcgccgaatgcgtgcgcaccagctgccacaaggatgacctcgtggcccgctggtccggcgctgcgatactcatcctgcgtccttgcacctcagaagctgctgcgcaggcgcttgccgagcacttatgcagcatgatcgccaacaccccacttgaactacctgaccgttctgatgtcagtctgcctgtgtcgataggtatagcaccctatcctctattcccggaggacacgggggccagctttgagcaatccatccacttcgctgaacgcacgttgcaggttgccaagtcggggacaggcggtggttgggcttcgctctggggtctgcccgccggcaaggggtcgcaactgaaaggggcactgcgacacgcgcagaatctggggttggtcagcctggcaggcagccgatcactggactgggatgagagccgatgggcggtgcccgccgcaggctaa

SEQ ID NO: 512218 - DNA, 717 bp, Stenotrophomonas maltophilia
atgaaactctgcagcttcccatccattcgagtcgcagtcgtcgatgatgacgaacacaaagagctgattacggctgaccttggaagtcgcggatattctgtacaagggttctccactgcggaggcgctgtacaggcatctgagcgttcatagggtcgatattgtcgtccttgacgttggcctgcccggcgaaagcggctttagtgccgccgcgcatctgcggcagttggcatctgtaggaatcattatgctcaccgggcataccagcgccaaagcgatgcagcgtggtttttcggaaggtgccgatatctatctgacaaagcctgtcgactacgacgtgctgggcgctgccgtagcgaatctgcaccggaggttggtggagtttgcgccggcaccttcgcccgttccttcacgttcccgtactccgtccatgcagtggacgctggccgatggtggttggacgttacgtggcccggaggcagctgcgttgagcttgagcgatcaggaacgcgtgctgctttcgctgctgttcgagaagcttggtgagactgtattacgtactcgattgatggcggcgctatctgagcagcctcaggattttgatccgcaccgcctggatgcgttggtatatcggctgcgaaatcgcgtgcggagcgtatgtggtcaagacctgcccctgcgttcagtgcgtgggaccggttacgtcctgaccgcgtag

SEQ ID NO: 512219 - DNA, 1083 bp, Stenotrophomonas maltophilia
atgaagaacaagctgattggcttggtgtactcggcattattgggtgaaataacgtggcagcacttcctcgatcagctggcgctcgtggtacccgatggcagagccggcttggtcgtacacgaaacatcaagcagggacgggtacctcgttataggcggcccgaatgatgttgcggctgacgactacaacacccacttcgccaaactcaatccgttgcaaccggcgcttgcactcagggatatcggcgacggtgcttttgaccatgagctggtcccgcgcaatgaacttgtgcgtagtgaattccacaatgaatacttgctacctcttggcatgagccactcctgtggcgtcaagttcgctcaggtcgggacagagtcgtacgttgtcttttccgcccatggcggcaggactgctgagcctgtccaacgatcacttggcttgttgcgtgagctggcaccgcatctggcacgtgcactcgcccattaccacagcgatatccatgaccgggcgacgggccgcctttgcgcctcgctggctgacgccgccgacatcggcgtcatggtcatcaacgacgacaagcaatgccggttcgtatccaatgcggccaaaagaatgatggaatcaggggcatgcctctatttttcactggatcgccgggttggatttcgaaagcaaagggctcaggccgttctcgagtcgatgctgaaacggcactacgacggccgggtcacggtcgacttcaatctgccgtcaggagggaggttgtccctgatccgcgtgacggaaaactccgtgtcgacctacttcgagggccctaccgtcatcgctctgttcaaatcactcatcaccccagcttccccaagcgacatgcaactgctcagcgatacctaccggctgtcgaagggcgagatacgcgcgcttcttggtatcgcagcgggactatccgccccgcaaatcgcggcgcaagcatcactttcaagggaaaccattcgttcgcagatcaaaagcctctacgcgaaaaccggggctgagaatagaacggacatcctcaagctcgtgcatcgtcgtggcctggctatgtga

SEQ ID NO: 512220 - DNA, 11559 bp, Stenotrophomonas maltophilia
atgggtgagcgtggcgcgaaggcagcggcaatcgtttcatgtgatggtgcagtctggacgcagctgctgcgcggcgggcgtctcattaggtggaaaggcgagattgcaagctgtgcaccgagtgcagccgaagcgattggccgcatctcgatccgcgccctgtccctgtcgttggccattggattgtcgatcggccaggcagctgcggcggactggtattgggatccgaacggcacaatcgtcggacgcggcggtgccggtacctggagcacggcaggttccgcttggagtccgagcggcgatggcgccagtggtccctacagcggttggaacaacggtgcactcgataacgccatctttggcagcacggtaggcacggtgacgctggccgggccgatcactgcccgcaatctcacctttgaaaccaacggttatgtcctaaccggcaacacgttgaccctggccggggtcacaccgacgattacgacgaatacaggaacgacgacgatcagttcggttgtcgccggctccaacggtctgaccaagactggcgcaggtgtgctgcttctcagtggcgcgaatgtcttttctggcgggatctacctcaacggcgggaccctcaatgtcgccaatgatgcggccctgggtgctgtaagcaacaacatattcacggctgcgggtgtctcggtggggctggcggtcggtagcgctgttacgaaccgcacggtcacgatcggtgacgggggcttattgaacctagccggcgccaacgcgggttctgcgctgatcaagggcaatggtcgggtatcggttggaattggcgtcaccatgagcaacgacgccagcgcctataccggcagcacgacgttcaatggcgttaatggtgtcgcctacagttacttcacttcaatcggcaatcttggcgaagcgagctcgcttggtgcgccggtgacggtgagtgatggcacgatcattttcaatcagtccagtcagtattcggacaacgtcatctatcttggcgatggtgacagctccaatcgcaattgggcactttatggtggggcggcgctcgtccgcaatcgtggtaccgggagcctctccatcaccggcgatgtcttcacttccggtggaagcggcttctacgccgaagatgctgacatggagctgctgggcgtactcagtggtggcgactactccttcaacggcaatgccggtcgggccatctcgctgggtggcgctaacacctataccggggcgaccggcatcaacggcgttgtggttcgtggctcttcgctcgccgatgcgggtttggccagttcgttgggtgcaggtgtcggcgcgatcacgatcaatactaacggcgcgttgagctacaccggcgcaggtgacagcagcaaccgcgcttggtcgattggctccggaagtctgttgaacgacggtagcggtgcgctgacgctgtccggcgcggtcgatttcatcgtaggaggcaccagcggcttcaccgttggcggcagtttcggtggggagaacacactgtccggcgtcatcagtggcaagggaagcctgatcagtgatggtgccggtacttgggtactggacggtgccaacacgcgtgaaggcggcatcaccatcaagaacggcacgctgcgcgccggcaatgcctcggccctgggtacgacaaccgatgtcacggtcaacggcggcaccctggatctggggggtttcgacacccacgttacctcgctggccggcaccggcggtagcgtcgtcttgagcgctggggcgttgaccgtggagggcaagaccaacacatcctttgctggcagcattactggcagcggtgagttcatcaagcgcggcaccggtgcgctgacgttgagcggcagcaatacctataccggggccaccaccctcaatggcggcacgcttgcgctggacttctccacagctggtgcgccggtaggtaacatcctttccagcgcatcgacgttgaacctagccggcggcgtgctcaatgttatcggtgcggatagcggggccaacagccaagtcttcaatggtgtcaacctcactgctggcagcaacaaggtcagcgctgcctcggggaccgatggcagcatgacgctgaacctggggggaatcaaccgtaccagcggcatcatcgacttcttcctaccggatagtggcagcatcactaccacgagcaccgtgcttggtggttgggcgatggtcaatggaagcgactacgccaaggtcgtcggcggtgagatcaccgccttcaccgacgcggactacgccgacaaggacgacgcggccaactggttgtctggcgacatcgtgagcgatgctggcggcgctacgaatacggcctatttcggcacggtcggcaacagccagacgctcggtggccttaaatacactgccgcgtctgattcgacagtgacgatcggtgccgggcagacgctcggtgtcgatggcatgatcatcatcgcctcgtcggtgggcagcgccaaccagaccctcaacgggagcggcgcgctgaccggtggtgccggcgggagtacctttggcgtccagcacaacggcacgggcatcttctcagtcaacgcagccattatcgacaacggtggcccaacgggcttcactaagggcggtagcgggcaggtcattctgtctggcaacaacagctacagcggggccacgaccctgagtggtggcacgctcaccatcaacacggtgggcaatggcggcacgggcagcgccattggtgcttcgtcagcggcggcatccaatctggtgctggaaagcggcacgctacgttacaccggtgcgaccaccagcagtgatcgtggctttacgctgatcaacggcggcccgacccgaacgattcaggtcgagagcagcggcgcaaatctggccttctccggccaggtcactagcccggatgatgcaggtttcagcaagatcggcagtggcacgttgacactgtcaaatgccggtaatgactacgtcggtaccaccacggtcaatggtggcaccctggcagtcagcacgttggccgatggcggccaggtcagcagtatcggcatgtccggcagcgatgccgccaacctggttctggccggagggacactggattatctgggtggtacggcaagcagcgaccgcgggtttacgctcggcggcaacgggaccggctatggcggcatcggtgtcgccgatgcggcgggtaccctgacgctggggggatcggcgatcggtaacggtctgttgcgtaaggaaggtgcgggcacgctagtgctttcaggagccaacacctacgccggcggtacaactattaacggcggcacgctgcgtgccggttctacgcaggcattcgggtccacggcaagcccgatgaccatcaatacgggggggcggcttgagctgggtgggttcgatgcagaagccagcatgattgcgggcgctggcacggttgaccttggtggcaagacactggtcacggccgggggatccggtgtctttaccggtacggtgaccggcaccggtggtttcacgcgcggtactggcagttacacgcagaccatgaacggctgcaacaacgattacaccggtgtgaccaccctcagcggcgggctgagtgtggattgccttgccgacggtggccaagccagtggtattggcgcctcgagcaatgcctcggcaaaccttgtgttcaccggcggtgggttggcttacaccggcgcgagcgtgagcacggaccgtggcttcacgctgactgggcagggaacggtcggtgtgaacgatgcgaacactacgctggagttcaccggcgcggtggttggtgccggcaatctcctgcgcaaggacggtgccggcacgctggtgttgtccggggtcaatacctataccggcaatacacaggttctgcgaggtacgctcagggcgggatcggcgcaggcatttggcccttccggtggcatgtcgttggacaatgtcgccggtgtgacgctggatcttgccggctacgacgccagtttcaactacctacagggtggtggcacggcgggcggcattgtgcagctcaatggcgccgacctgaccatcaccaacggcaacaacgcggagtacgccggcatcctcagtggtgtcggtagcctgatcaagagtggcgcgggcctgcagcggcttaccggctgcagcaacgactacactggtcccacgaccgtcaatggcggcgtactagaagtcagttgtttgggtgacggcggtgtcgccagttcgatcggtgtgtcgagtgcggatccgagtaacctcatcatcaatggcggcacgttgcgttacgccggcaccggcgatagcacagaccggcgcttcaccctaggcgcttctgggggcaatgcgctcgatgcctccggtatcggcgccatccacttcaccagcaccgcaccggtgacgttcagcgcggccgagacggcgcaaaccttgacgctgaccggcaccagcaccgccaacaacatgctggccgcgcaactcaccaacaatggcagcggcaagaccgcgctgaccaagaccggcgtcggcacctggatcctcaccaacccaggcagtacctataccggtgtcaccaccatcagcggcggtgtgctcggtgtcgacaaactggccaacggcgggctggtaagcagcctgggagcgtcctcggctgacgcctccaacctgatcatcggcaacggttcgacgctgcgttacaccggtaccggtgatagcaccgatcgtttgttcacgttgtcctctggcgtgacctacattgagtcctccggtaccggcgcggtggtgttcaccgacaccggtccggtgacgctggccggcaacaaccaagcacgcaccatcgcactgggtggcagcaacaccggcaacaacacgttggccggttccattggcgatgccggtactggcaagaccattctggccaagaacgatgccggcacctggctgctgacaggcaaccacacctataccggcaacaccgtggtcaatgacggcacgctggtgatcggtaacaacggcaacaccggttcgatcatcagcgatgtgattgttgccggcggtgcgctggccttcaatcgcggtgacacttaccgctatggtggagcgatctccggtgccggcggcatcagtcagattggttctggcaccaccttgttgaccggcagcaacagttacaccggcaccacccacgtcaacgccggcaccctgctggtggacggcgaccagtccgccgcaaccggccaggtgacggtgctggctgcaggtacgctcggcggcagcggcattatcggtggcgatgtgagcgtggccggcggcacgctcaccccgggcggcagtgacgtaggaacgctgaccatcaacggcgcgctttcgttggatgcgaactccacgctggcgatgcagtttggccaagccaacactgtcggcggcacgttcaatgacctgatcgaggtcaagggcaacctggtactggatggcacgctggaagtgtcggaaaccactggcggcgccttcggccccggtctgtaccgcgtcatcagctatagcggcaacctcaccgacaacggactggacctcgggccgttgccgagtggcaatggcctgatccagacctcggtggcagggcagatcaacctgctcgccgggggcgacaacttcagtttctgggacggcgatgccggtcccaagttcaaccagatcgtcaacggcggcaacggcacctggcaggccagcacaggcaatgacaactggaccgaggccagtggtctgtttaatgccgcctacagtgatggcacctttgccatcttcgccggcgccgcgggcacagtgagcgtggacaacgcgttgggtgcggtgtccgcctccggtatgcagttcgcaaccaatggctatgtcatcaacggtaatccggtgaccctggttggcccgcaatcgacgctccgcgtcggtgacggcaccgcggccggtggtgcgatgatggcgaccatcaatgcgcaactgaccggcactaccgaactggtcaagagcgatgccggcaccttggtactcagcggtaacaacctctacaccggtggaacggcgatcaacggcggcacgctgcagatcgccgcggacaccaacctcggcgcggcggctggtggtctgagcctcaatggcggcacgctgcgtaccacggcagatatcacctccgcacgggcggtgacgctggtcggggccggcacgctgctcaccgatgcgggcactgacttgctcctgacggggccggtcgccggggtgggggcgctcaccaagagcggccccggtacgctgctgctcactggaaatgccacgcacagcggcggtacgaccatcgacacaggcatgctgcaggtgggtaatggcggcactactggcagcattgcaggcaatatcgccaacaacggtgcattggtcttcaaccgtaccaacgccttgacccatgccggtgcggtgtccggcaccggcaccctgacccaggcgggcagcggcgcggtgacgatgaccggagtcagcacctataccggtgcgacagcgattgacgccggtctgctgttgctgaacgccggcggccagatcaatggcacttccggcctcaccgtccgtggtggcgcggcaatgtcgctggatggcgcaggttcgcgcctccttgctgggccgggcaactccgtgattggcaacagtgccggtacggccgccatgaccgtgagcaacggcggcatcgcatcggttgccggctttgaaatggccgccgtggctggcagcaacgcggtactgcgcgtggccgacgccggcacgcagctcagcatcaccgggccggggcacttcggcgtccgcgatctagccacgatcgaagtcataaatagcggcaagatgacctcggcgggcgtgaccatgctgggcgacacgctgcccgcaggccgtgccgaggtttcagtgtcgggtgcaggatcgcgctgggatatcgccaatgccctgcagttccaagggggcacgatggccgtctccaatggcggcgtggtgaccgcggcaacgacggatatcggtgcagcctctgccgagctgaccgtaagcggtaacggctcgcgttttgagagcgatggtgccttcgttatcgccaacaccagtggtatgggcgtggtcacgatcgccgacggcggtgtggtaaaggccggcaatggcacgctggccatgggcaccggcgatgccgtgctcaacatcggtggcgttgaaggtggcgcagctaccgctgccggtacgcttgaggcggcggcggtaacatttgcggtggcgggcaatcgcatcaacttcaaccacaccgatatcggtcacggattcacagccgcgatctcaggcgcgggttgggtcgatcacaacggccccggtgcaacggtgctgagcggtttcaatagctacaagggggccaccaacgtcaatgctggcagcctgtacatcaatggcgaccagtcggcggctaccggcctgaccaccgtcaacagcggtgccacgctgggcggaaccggcaccatcggcggcaacgtggacgtgctcaatgggggtgcgatcaaccccggtggcctgggtgcggcgccggctgcgctgagcctcaatggcaacctcaacctggccgctggcgcgacgctcaacttcaacctcggccaggccaatgtgcccggtggcccgctcaacgacgtcatcaacgtgggcggcaatctgacgcttgacggaaacctcactgtggtgacatcgcccggtggcagctttgatcccggcgtataccgtgtcatcaactatgccggcacgctgaccgacaacgggctgttggccaatgtgccctcgccggatttctatgtgcagacttcggtcgatcagcaggtcaatctggtcaacacggccggtatggcgctgcgctactgggacggtgccgatgtcgccagcaagaacaatggcgggatcgacggcggcaatggtagttggcaggcgttcggcgtggcaccggacaacggcaacgacaactggaccgaggacggcgctgtcaacgcgccattcgccgacgccgccttcgctgtgttcatgggggctgctggcacggtcagtgttgacgacagcaagggtgcggtgaatgccgccggcatgcagttcgtgaccgatggatatgtgatcaacggtgacgacatcaacctggtcggtggccccacctcggtgattcgcgtcggcgacggtaccgctggcggcgcaagcaccttcgctaccatcgattcggtgctgaccggcggcgcccagttggtcaagtccgacatgggaacgctggtcctgagtggtgacaaccgctacatcggtggaacggcgatcaacggcggtacgctgcagattgccactgacggcaatctcggcgatgccgctggggcgctgtccttcaatggcggcacgctgcgcaccacggccgatctggccaccgggcgccaggtgtccctgaccggcagtggcactttcaataccgatgctggcacgcagctgacgctggacgctgcgatcaccggtgccggtacgctgggcaaggacggcgccggtactcttttgttgctgggcgatgctgccagcaccggcggtgtgaccatcacgcacggcaccttgcaactgggcaacggcggcacggccggcagtgtgatgggtgatatcgccaacgacggcctgctgctcgcaaaccgatccaacggcctgacgttgaacggggtgatttcaggcaatggtgccttcacccaggccgggagcggcagcaccacgctcagcggtcacaacacctatgcgggggcaacccaggttgacgacggcatgctgcgcatcaatggtgatcaaaccgccgccaccggtgcaaccaccgttgccagtggtgcggcattggggggggcgggcatcatcggcggcgatgtcgtgattgctgatggcgcacgacttgaaccgggcagtgcggccggtgcggtcagcacgctcaacatcaacggcgcgttgtcgctgggcagtgatgcgacgctggacatgcaattcggtgaagcctatgtcgagggcggtgcctacaacgacctggtcaacgtcgggggcgatctgacgctggatggcaggctggatgtgtcggtttcgccgggtggcgttttcggtgcgggcatctaccgggtcatcaattacggtggtgcactcaccaacaatgggctgacgctgggcaaccagccggctgacagcgagctgtttgtgcagacctcggtcagcgggcaggtcaatctggtcaacggcgctgggctgacactcaactattgggacggcaccaccggccccgcgttcgatcacaacatcgccggtggcgacggtttgtggcagaaccatctgggcaacaactactggaccgacgctgccggcgacatcaatgcggcgtacaccaatggtgcatttgcgatcttcaccggcgctgccggcacggtgaccatcgacaactccctggggcaggtggccgcttccggaatgcagtttgcggtgaatggctaccgcatcgagggcggcgtgctcgcgctgatggggccgcaatcgacgatccgcgtgggggacggcactgccgatggtgccgggatggcggccaccatcacctcgaacctcatcgggacgggcgggctgttgaaggatgatctgggcacgctgattctcagtggcaacaacagctacggcggcggcaccgtgatcaacggcggcacgctgcaggtcgcggccgacacggcactgggcgctgcgagcggcgcgctgtccttcgacggcggcacgctgcataccacggcggatatgggcaacgaacgcacactggccttcgcgggcaagggcacgttgcgcaccgatatcggtaccgcactgacgctgggcggtgtgctttccggcagcggcgctttcagcaagaccggcgaaggcacgctggtactcaacggcagcggtgccggctacaccggcgcgggcagcgtcgatgccggcacgttggcagtgagcagcgtgcttggtggcagcctcgccgtcggcacacttgggcggctggagggcagcggccaggttggcgcgaccaacaacgccggtgtcatctcgccgggctcggcagaggctatgggaaccctgactattcagggcaactacgccggcaacgacggacgactgcaggtggccgcggtactgggtgatgacaattcggcggccagccgcctggtggtgaatggtgcgactctgggcagtacccaggtcgaggttagcaaccgcggcggccttggtgcacagacggttgaaggcatcaagatcatcgaggtgaacggggtatcccacggcagcttcgcgcttcatggcgactatgtgttcaatggcgaacaagccgtggttgcaggtgcctatggctatcgtctctatcagggtggcgtagccaccccgacggacggtgactggtacttgcgatcagcgctacttgaaccaggcacagacacggacgaggagcctgcaccgctctaccagccgggtgtgccgctgtacgaaagccattcagcaaccttgcaggccttcgacaagttcggcacgctgcagcaacgcacgggcgaccggctgtggagcgcacatgccgacggcacgatggaggaaagccatggcgcactggtgcgtgttgaaggctcgcgtaccgagttcaagcccaaagtgtccaccagcaatgcacgtcaccatgccgatacttggaagctgcaggtcggtgttgacgcgatgcttgctgagtacggtagtggcaccttggtgggcggcgcctttgcccagtacggcacaatctcttcgcgtgtgcgatcgccttacggcgttggagacatcgaaaccgacgcccgtggcctgagtgcggctatgacgtggtacggcaagagtggtttctatgtcgatggccagatgcagttcaccatgtacgacagtgatatgcgttcggccacggcagcacgcgatcttgctaccgacgtcggcgggcagggctacgggctcagtcttgagatcgggcggcgtatcgcgctgtccgggaactggtcgctgaccccacaggggcagttggcgtactccgtgcttggcttcgatcctttcgatgatgctttcgatgcacgcatttcgctgggtagcagctacagtgtgctcagccgggcgggtcttgcagccaactacgatgttgagcggttggttgccgacgggacgctacgccgcacgcatctgtacggcattgcgaatgtctactacgactcggcgaacgcggcggcggccaatgtttccggtgtcgatttcactgccaagaacgagcgcctgtacggtggcatcggtatgggcggttcgctcagttggggcggtgacaagtattcgctctacggtgaagtgcagtacaaatcgagtctggaggcatctgagcgggtccagtcgttgaccggcacggtgggcttcagtctgcactggtaa

SEQ ID NO: 512221 - DNA, 267 bp, Stenotrophomonas maltophilia
atgcgcaagagcaagttcaccgagagtcagatcgtcacgacgttgaagcaggttgaggccggacgacaggtcaaggatgtgtgccgtgagctgggcatttccgatgcgacttactacgtttggaagtcgaagtacggcggcatggaagcttcggatgtgcagcggctccgcgacgttgaagccgagcacgccaagctcaagcggatgtacgccgagttggcgatggagaaccatgtactgaaggatctgatcgcaaaaaagctgtag

SEQ ID NO: 512222 - DNA, 252 bp, Stenotrophomonas maltophilia
atgccactggtggccggtgagcagatcaacagcagttggtcgatcgacttcatgtccgacgcgctttgggatgggcggcgcttccgtacgttcaacgtaatcgacgacttcagccgggaggcattggccatcgaagttgatctgaatctgccggctacgcgggtcatccgcaccttggagcgaattgctgcgtggcgcggctatcccacaaagcttcgcctggacaacgtgctaactctggagtcaagctaa

SEQ ID NO: 512223 - DNA, 1278 bp, Stenotrophomonas maltophilia
atggctacccaatctcatcctacgcccgcagcgacctgggtcgcgattgatatcgcaaagcgctaccacgcagtcctcattgaagggcccggcggtaagcagcagcgtttccgcatggcgagttcacgggaggaccatcaacgattggttgaccttctccgcaatatgcctgcgcccgttcgcattgcaatggagcctactggcgattgccatcgcaccttggccttccggttgctccaagagggtttcgaggtctgcctggtgtcctcggtcgccggggcccgctatcgggaagcccttttcaattcgtgggacaagaacgacccgaaggatgcaagcgtgatcctggccatgctcaagcagggcatgaccatgcgctacgtggatccgttgctggccggccatcacgggttacaggagctatccaagacccactaccagatcagcctggccagaacccgactgcagcacagcctgatgacccattacttgcccctgtacttcccggaaatcgaacggtatttcgatggtgcccatgccgattggtttgcccgattcatgcttcgttttcccactgcagcctcgatccgccaacttacctgggatgcttttcgcaaggaagcttgggagctcgtcggccgcaaggtgaacaagcagacctggctcgccgaactcttccaatgtgcgctcgacagcatcggcttagctgtagacgacgattcgattgaggtccagagtttccggctgcagctgcgtcgctatcagctgttagttgaacagcgcgatgctctagctgcgcaagcacaccaagtgctagcagataacccagattacgagtccttgcgttcattacccggtatcggcccggtgcttgcattgactatcctggccgaggccggtgatcttcgtcgatttgctcatcatcgccagttcttgaagtactgcggcttcgatctggccacctgccagtccgggcagtaccgcggacgtgagcgtttatcaaagcgcggtaacgcgcgattgcgcttcgccttctggtttgccgccaccattgcggtacgaatgcgtgagaacagcttccgcgacaagtacgaacggtacgtcaagaacgatccaaataatgctgatcgcaagcgcaaagcactgaccgcagtggctgccaagatggcgagggttgcttatggtctggtaaagcgccaaacccaataccgctgctacttcgaaaatgctttaccccgtggatcgatcccgctcagtggggccattgggacctcatag

SEQ ID NO: 512224 - DNA, 309 bp, Stenotrophomonas maltophilia
atgtactatggccccgagttcatcgctttggcgttggcggaatgggcagagcgcaagaacatcgcgttggatttcatcgaaccaggacgaccgatgcagaacggcttcatcgaacgcttcaatggcagcttccgacgcggcgtgctggatatgcacgtcttccgcaatctcggagaagtacgcgaacaggcagagcagtggctggccgattacaacaccgagatacctcacgacagccttggcgggctgacgcccgccgagttccggcagtaccacgaaccggaaacctctaatttagcctggcattga

SEQ ID NO: 512225 - DNA, 579 bp, Stenotrophomonas maltophilia
atgcgtcggatcgtttccacatggacgtgtggcggtgagatccatgcagacatcgtgcacttcgccaccccccatgccggcaaccgtcatgtggagggtgttctcttctcacgccccgcgctggccgacatgattcagagcaaggagaaattcttctcccgctgggcgatcacgccgcattccaatcccatcgaagcgctcatggccttcgagtacgcgcgcgatgcgtcgcgattcgccggctacgggtacctgttcggctaccccgacgacgccgtccgcttcttcgtggactcctccatccatcaggaggtgacgggcgacttcgtgacgcgcgacttccgcgcaatccctacgttccagcgcgagaccggacagtttacatacgcgatgccaaaagggacggacgtcacggaggctgatctcaagctcaaggaacgagccggcacaatccttaacgcgtacaaggcgcggcgagcgcagtatgttggacccgggaagccaggagtagccgccatgctgcgcgactggttctgccccaccgacgacgaatgcagtcccaccaacgcagcgctttag

SEQ ID NO: 512226 - DNA, 1071 bp, Stenotrophomonas maltophilia
atgaaagctatggtctattacggcgccaacgacattcgtgtcgaagaacgctccgaacccatcatcattgatgcgaccgacgccatcgtgcggatgaccaagacgacgatttgcggcaccgatctgggcatctggaaaggcaagaatcccgagattgaacagactgccaaggagcgcgatggtgcgttcaatggccgtatcctcgggcatgaaggcatcggtatcgtcgaagctgttggtgattcggtcaagaacgtcaagaagggtgacaaggtcatcgtttcctgcgtcagccgctgcggcacctgcgagaactgccagaagcagttgtactcccattgccgcaatggcggtggctggatcctgggctacatgatcgacggtacccaagccgagtacgtgcgcacgccgttcgccgacaactccctgtatctactgcctgagggcctcagcgaagacgctgcagtgttgctctccgatgcccttccgaccgcccatgagattggtgtgcagaacggcgatgtcaagcctggcgatacggtcgccatcgttggcgcagggccggtgggcatgggctgcttgctcacggctcagctgtattcgcccagtcagatcatcatggtcgacatggatgacaaccgcctggaactggccaaggaactgggggccacccatgtcatcaattctgcccatgaggacgccatcgcgcaggtgatggtcttgaccaatggtcgtggtgtggattgcgccatcgaggcggtgggcatcgagccgacttggaacatctgccaaagtatcgtcaaggaaggtggccacttggccaacgtcggcgtgcatggcaagtcggtgagcttcgccatcgaaaagctctggatccgcaacctcaccatcacgactggactggtgaatgcgaataccaccggaatgctgctgaaaacctgctgctccggcaagctggcggtcgagaagatggcgacgcatcacttccacttcgacgagatagaaaaggcctacgacgtcttcaagcatgcagcagatgaaaaggccctgaagatcgtcatcgacctttga

SEQ ID NO: 512227 - DNA, 291 bp, Stenotrophomonas maltophilia
atgcgaaagcatgcaggtctagccgcccagctgctgaaagccctcgccaacgagaatcgattgatgattctttgcctgctcgccgaacgggacttctcagtcggcgaactgcttgtgcgactcgatcttagtcaatcagcgctatcgcaacatctcgcggtgctaagagcggagaagctagtcactacgcgtcgtgaagcgcagatcattcactactcgctgacccccggcccggcattcaaagtgattcataccctgcatagcatctattgcgccgacagtcctgtgtga

SEQ ID NO: 512228 - DNA, 354 bp, Stenotrophomonas maltophilia
atgaaccacaattcttacaccgagctcacgcgcgaaatctcccgcaatctgacagagcttcgcacccacaatagtcctgtgatgcagggattcggtgcgcttagcaaagctgccatggagcctggcgctttagacgaaaagacaaaagaactcatcgccatggctatcggcgtggcgaatcggtgtgatggctgtcttggttttcatgctaaggcgctggtccgtcttggcacgagcccagaggagtttcgagagatgctcggtgtcgccgtttacatgggcggcggcccctcactgatgtacgcagcaaatgccctcgctgcctatagagagttcaatgagtcgaatagctaa

SEQ ID NO: 512229 - DNA, 840 bp, Stenotrophomonas maltophilia
atgacttactgcggggcttctggcaggtggcggcgccttgatgcaaaattaggaatacggcttcagcaattgatagccgctttgttaaggaaggtctggctaatggccgacggaattattgataggaacagcggggagccttacgtacatcgcagctggtgttacacggaacttatgtttcgtggcgaggtcactcagacacgtatgctgcggttgtttcctcgttggttgcaggtcgggtacacccgaaccatgctcgcggcgttgatgtttaatccacgcccggctcgaatcggaatagttggtctggggggaggtgcgcaggtgaagttctgccatcaccatcttccgttcagcaaggttgctgtcgtagagaatcatcccggtgtattggcattgcggtctgcatttcgaattccacctgatgatgagcggctatcgattgagctgggtgatggggctgtttggctggatgccaatcgcaacagtttcgatctgctgttgattgacgcatatgacgtgaatggaatcccgccggcactttctagccgggcgttctaccggtcctgtgctgcggctctcacgcctaatggtgtaatggccagcaacctttacgccaccgacacggcactacacgtttccaggcttaaggaggcgttcgctgggcgggtctatatgcttgcagaaccaaaacaggagaatgctgttgtgttcgcttggcgaggtgcacaacgtaatactgatgccaagcaggcgcttggggccttgccgaggctggcgaggctccagctatttgcgccgatgcatcgtttgaaaagcgggcttgcctctctagattga

SEQ ID NO: 512230 - DNA, 1392 bp, Stenotrophomonas maltophilia
atgagtttttcaaccgtcaatccctacaacggtcaaaccatcaagacttttccggctgccgatgccgctacgatcgatgccgccattgaaagcgcccatgcggccttcctctcctggcggacgaccccgctggcggagcgggctgccgtattgcagcgggctgccgatctacttcgcaaggactcacgccggtttgcggagattctcacccttgagatgggaaagctcattggcgaagccgaggcagaggtcgagctgtcggcgaaaatcctggagtactacgtgaagttcggtgccaagcaactggcaccgcgcgtgttgcaggccaacggcttcgctgacggcgatgttcaattgatcaaggagcctctcggcgtgctgttcgccatcgagccctggaacttccccttctaccaagtcatgcgcatcacagctccgcagacaacggctggtaatgccgtactgcttaagcacgcgtccaacgtgccgcaatctgccctcgctatggagcagttgttccgagacgccggcgcgcccgctgggctgctgaccaacctcttcgtatcgcacgatgatgtcgagacagtgattgccgaccctcgcgtgcgcggtgtggctcttaccggtagcgagcgggccggctcggccgttgccgcattggcaggcaagcacctgaagaagagcacacttgagcttggaggagccgatgccttcattgtgctctccgacgccgatgtcgagaaggctgcaaaatgggcggtattcggccgccactggaatgcaggccaagtctgcgtctcgtccaaacgcatcattgtcgaagacgccatctacgatactttcctggcgcactaccgagccggtgtcgccgagcttgtggccggtgaccctttggacccaagcactactctggcaccactgtcatcacagggtgcacgtgatgggctggccaggcaggtagaaaccgcgatcagccatggcgcaaaggccgagacagtcggcaagccagttccgactcagggcagcttctaccagcccaccctcctgactgatatcagcccggacaacccggcctaccacaccgagttcttcggcccggtaagtcagatctaccgtgtcgccgatgagcacgcagctatcaagctggccaatgactcgccgtatggattgggtggttcggtgttcagccaggatgtcgcccgtgccaagcgggtgggcggacaactggagaccggtatggtctacatcaatcagccaaccggcgtgaaagccgatatccccttcggcggcgtgaaaaactcaggctacggccatgaattgatcgacctgggattgaccgagttcgtcaacgaaaagctagtcgtcgtcagcgatatcgacggttccttctga

SEQ ID NO: 512231 - DNA, 1026 bp, Stenotrophomonas maltophilia
atgcctataaaagatctagagagcaccctttccaccgagacatcggtcgcttggcgaatgtacccctctgaccaacctctggttccaacatcactgaggccatccaaccgtcacgcaaccggaacctacgacagcagcgacaaactacccacaacttctctgttgttcgagcgcctactcgccaggatcagaagcgcgcatgagaacagaaatttcgatccttgcccgttcccagaactttgggagaaggcgtgcaagcagctagaaaagcacggcaacgctaccgaccatgcaaactggaaggtgaggcgcctcctcaagaatcatcaggaattcgcagacctcgatgaccagattgctgaggcgtgggcgggcgttcagctctcccgtattgaaggagagggtgagtattacagacaagtcgcgtacacgaagttgcaacaccttcgactacagcgcgacacgctcaagcccaaagcaaccattaatgtggacgatgcgctggagattgccatcgccttctggattgaagccaggaacgcctacaacgcttcggatgaggctcgggcactacacgcacttctagagggcaacttctacctcggtacgacctactcgcccattaccgaagcagaagcacagcgagcgagaggcaaaaagggaatcgacacaacccctagagatgcgatcgtcgccatagcagtggaagtagtcaactgctacacaatctccagaaacatcactattgccgatgagctatgcgccgtgatcgcagatctgatcgcgctcgaccccaagtactccaatgcagttgcggcttacaagaactggaacagtaaaggcagcgccaccgttacatccgtgagcgagcgcatgcacgaaatgctcatgccgctgatagagaagaagcggggcattggagagaaatccgggttcaggaaggcattcaaagagctacatgaacggaccatggcgcacggcataccaaataagaaaaataaagtaaagaaccccgccggcgggtaa

SEQ ID NO: 512232 - DNA, 375 bp, Stenotrophomonas maltophilia
gtgttgcacaacgctacaactgctaccagcagtcgccccaccgcttcccgtactaaggaagccaacctcgccgcagccagcgctaacacgctgtccatcagcagcgaaaccatcgaacgtctggaggccatcctccagacgttccagcgcagccttgtgctggaccaggcaatccgcctgcccgaggtgctgtcgatcgtcggcctgtctaagagcacctggtatgcccgcctcaatgcgcgcctgccggcgtacgacgcccgcgctccgaagcctttcaagctcggcacctccgaccgttcgcccaccgcttggtggcgctcggaagtaatggcctacgtcctggcctgcgccgtcgcgcagccggcgcgctga

SEQ ID NO: 512233 - DNA, 294 bp, Stenotrophomonas maltophilia
atgaactcggacaacaaccccgtcacgcatgccgatgaccgtctgctggagcagaccactcgctgcacggacgcactgaaagcactgcagcccaagcagcagcaccagaaggcgcagctgttcgcattgctgtacccgaccattgtggagctactgaataagcaggtgagccagaaggcgatcctggaggtgctggagacccagggcctgaagctgcaccccgcccgcttcaaggaactcatggcagcgcaggccgccaccacccacacctccagcaccgacaaggcactctaa

SEQ ID NO: 512234 - DNA, 1467 bp, Stenotrophomonas maltophilia
atgaacaagcgtatccccacctatccgttcccggtgaacgagttctataagtccgtggccctggccattgaggagaccatggagaccatccaggcaccggacgctctggttgccacatcgttcctgaccggcatgtcgatttcatgccagtccgatgtagatgtcatgctgccccatggcgccacgacgccctgcgccctgtatctggcaacggttgctgattccggcgaacgcaagacggccacggataagcttgtcatgaagccggtctacgactacgagctgtcgtacgccaatgtgtacaaggctgcggcggagcagtacgagatcgatcacggcttctgggagatcgagagcaaggcgatcaatcgcctgattaccagcaccatcgcaaagggtgatgacaccaccgaattgcggcagcgcttcgctgtgcacaaggcagccgaaccggtgaagccggcatgcaatcgcatcattgtgcaggacgccaccgagcgcggcttgatcaatgcggtgcagggtgatagcaagtccatcgccatgctcagcgatgagggagcaacgctcctgaagagcggtgcattccgcaactcggcgaccctgaacaagctgtgggatgcgccttcgctgatcatgctggaccgcgccgacgaggtggtccaggtcacggatcctcgcttgacgctcagcttcatgatccaggaggatctgttccaggattttctgaagacgaagaacagcacggcacgcgcatccggcttccttgcgcgcttcgtgttctgccatcccgagtcgacccagggctaccgtgctgccacggagctgactgacgaggagccggtgcacggcgctaacgttctggccttccacaagcgcatgaccgcgctcttggaggcccgagacaagcgccacgccgatggcaactacagcaagaaagtgctgcgtttctccaccgatgccaaggtactgtggaaggacacctacgacatcatcgaaccgaaactcgtcaagggcggcgcctaccacagcatccgtgatgcggcctccaaggccatggagatcgccagccgcatcgccggcatcttccatcactttgagggaatcgaaggtgacgtgattgagcgtgcgacgctgcagcgtgccattaaggttgcacgcttctatcggggagagttcatcgagaagttcggcgatcacaatgaccttccggaagacgagaaggacgcccgggccttgatggcgtacatgcgcacgaagtactggaaccgcggtcgtaactgggcctaccgcaatgacgttcgcaaggacggccctgttcgccatcaggcccgctttgttgccgcattggacctgctggaggaggacaacgtcatctgcgtagtacgtgaacgccgtttcggccgcaccggcaagttcgtgattgatttcaaccccgccttctttgatcgtcccggggcgctctga

SEQ ID NO: 512235 - DNA, 726 bp, Stenotrophomonas maltophilia
atgtcaacatttcatctagaggtaaagactggccccaagggcaaggcagcagggcatagcgcttacatagctcgcgaaggcaagtatcgatcacgggaggacctggtcgacgttgggtgcgggaacttgccttcctgggcagaaggaagtgctcgaacgttctgggcggaggcggatgcgcacgagcgaatgaatggtgccgcatacagggagttcatcgtggcgctacccaataagatcgtcggtcataggtcgaggaagctcgtgcaggatctcgttcgtttcttggcagcagcaaagccctacgagtacgcggtgcatgcaccggaggcgtcactcgaaggagggatcaatatgcaccttcacttgatggtgtcagaccgcatgccggacgggatcgatcgactggcgtcgcagatgtttcgcaggtacaaccctgacaggcctgaagcgggcggatgcaggaaggatgcatgcggaagaaccagcgtgcagctacgtgaaagcttgattgaaacccggcacatggttgcgacgatcatcaacgagcacttgcagcgcaatggcattactgaacgtgttaatcaccggacactgaaagagcagggcatcgaacgccgtgccgagcgccatttgggagcatttcggattcgggggatgtccggggacgagcggctagcctacgtgaatgccaggcaagcgttgcgcgggcgaggggagctttga

SEQ ID NO: 512236 - DNA, 624 bp, Stenotrophomonas maltophilia
atgaaaccgcttgtagtgatatgcgcagggagccttttgctcctggcgcttgcggcatgcaagaaggaagagtcgcttacccagaagggcgatatcaacctggccgggtgcgaggttgcggccggtctgacccccgcgcaggcagaggcacaggaatgcgcccccgatgcagtggagccggcagtcacagaaaagccggtagtagccgttccggataacgctgtgatcaacgaagagctcgctcgtcaggcattcctgttcggcaacgctcaggagaatgtggatgcgcggcataccgaagagggcgacatcaacggagatggtgtcagcgataaggcggtgctgttcatgctcgatgcgaccaacggaagtatgtcgtactcaacccatctagctgcattcgtcagggagggcggtggtctccggcatgtggactcccggctagtagccgggtatggcgaagcggtcgaggagctcggggtacaagacgggatgctaatgatgaagatcctggtacaagggccggatgatccaacatgctgtccatctgtggagaagaacgtcagttatctgcttcacaacgggaagtggattgagaccaagcctgccatagagattccgtga

SEQ ID NO: 512237 - DNA, 948 bp, Stenotrophomonas maltophilia
atgaaaggaatgaaatacgtatcggcggcagcagtcgcccttctcctggctggctgcagtaagcccgtcttggactggcgcaatgccgaggtcaacaacggcttggtctacgcgacgggcgagaatgagccattcaccggcaacgtgacgaacatcccccgtgagcagttgcgtaagccgatttccgcgatagagcgcgtggtcgaatccatgccgcacccggtgccgacgcatgggatcaatgcgcattggcgaccattgggaggcctgatggttcactgccaggtggagttcgacaagggcaagctggtaggggacatgagctgcacctatgaccagaacggggagcgtgcgctggaaactcgcgtcgtcaatggaagtctcgatgagaagctcaagctgtacagcgtctctggacatccgtacatggaaattccgatgaccaaggggaagatcgatggcaatgcacggggctggttcgatggtggtcagaagaagccgatgtttgagatcgactacaagaacggcaagctcaacggcacatccaaggtgttctacgaagatggaagccccgccgtggcaggcaccttctcggaagggcgccaagagggcgagcagttggcgtactaccccagtggcaatatctcggcgagggtagtgggcagtggcggcgtgatcagcgaggagaagtacttcaccgaggaaggtgagcagtacctcaactacacccagtttgaggcattgcatacaaagtactccaagacggatgagccgctcaccgctgaagagaacgtgctgttcactgcatccctgaagaagtatggacaggctctccctgatcgacctgcagagcgggccgcagccgaagccgcacgtgcagccgctgaggaggcagcccatcagcaatggatggagcagcggaagctgccacctcaaagcgcgtactga

SEQ ID NO: 512238 - DNA, 267 bp, Stenotrophomonas maltophilia
atgagccgactatccgcatccctcctgataccggccatcacgctgatgctgggtggctgcaccagcgaactggacaaggtccgtggccagttcatcgatagctgcatgagcagcggcgcaccgaagtccaactgcaagtgtgccatcgacaagctgcaggaccattacggcgagcagggcctcgtggcgatcaacaagcaggggcgtccaccttcggatttctttgatcagctcgccaacgcagctgagcaatgccgtcatcaatga

SEQ ID NO: 512239 - DNA, 216 bp, Stenotrophomonas maltophilia
atgaggtacttgataggcgtgtacggcgtgaccgtactcatcgctgcgatctgcttcgatatctggggccgctatgcgtacaaggggttcttctacaacctgggccaggcgttggtctggcctgcggtgatgttcccctccgtagggaagctgctcagcggggtgatctggatcgtggtgatcctcgggatcctgatcctggtgaagaggcgatag

SEQ ID NO: 512240 - DNA, 684 bp, Stenotrophomonas maltophilia
atgtctgaagaaaaccactacgaagtcctcggggtacgccccgaggcacctctctgggaaatagagctggcctacaagggccggcgaagccaataccaccctgatcggtatgccgcaggagacgcgtcgtctgtcgcatgggcgacggccaagatgcaggccgtcaacaaggcctatgcagtcctcaaggatccggaccaacgcgaacgcttcgaccgcgcccaagcgtcggccggtccgaacccaagctcccaagcggagcagcccaaggctccagagcctccaccgctccgctcactccgagatgcactaggagggctcgagttcgataacgagcccttcgagcgtgtgttcgtggctccccacatcccgagaaaaaagctctttgcggctctggacagctacggggaaggactgcgggcccaggacgttgtcgtgctcatcgacgacaccgtgtttggcggtgccagagagggcgtgctgatcactgaggcccagatccgtggcaaggccaagttcgaagcggtggatacccggctgctgggctgcctaacccagatcactgcccacggcgcccacgtgcgcatccatggcgagccgttcatcagcttgagcattcccaaccctgacgacctgcgcctgctgttcgaggccgtcagtgagcatctgaaacaaacgcactaa

SEQ ID NO: 512241 - DNA, 495 bp, Stenotrophomonas maltophilia
atgaatatctctctgcagaaacaatgcctggaagaactgcctaacgctttgaccgaacgtgacagcgccgtcctcggtcaggcgttggaaattcttgagagcagagcaatggtcagtggcctcctattgggagatcccgatattgccggaaggttcttccgtttgcgcttggggcatgaagtacgcgagcacttcgaggtggcgttccttgatgcccgtaaccgcctgatcgccgtagagaggctcttctcaggctccatagatggcgctgagatccatccgcggattgtcgtccaacgtgccttggctcagaacgcggcagcggtcctgttagctcacaaccacccaagcgggcattgcgagccgtcagaagcggatcgagccatcaccgggcgattgaaggaagtactggcgatggtggaggtgagggtcgtcgaccaccttgtggtgtcggcaagccagaacacttcgatggcgcggctcgggcagatctaa

SEQ ID NO: 512242 - DNA, 957 bp, Stenotrophomonas maltophilia
atgcatcacgttgaaaccatggcctatgcaggccaagtcccatggcatggcatcggaagccagctggctccggggcagtccattgaagtatggcgcgagcgcgccggcatgaactggtccttggaggaagccgaagtgcgattcgccgccgaggctgaagatcagtatccggtgcgggcattccccgggcaaaaggtgctttatcgctctgacaccaaacgaccgctggctgtggtgtccaagcgctatcaggtagttcagccgagggagatccttgagttctaccgtgacctgacacgctacagcgggtttgagttggaaaccgcaggcgttctacgcggcgggcggaagtcttgggctttggcccgtaccgggcagggtgtggccctgaagggccaggatcaggtcaatggctaccttcttctggctacggcctgtgacggaacactggcgaccactgcccagttcacctcagttcgtgtggtttgcaacaacacgctgcagatcgctgttggggatcgaaccggggtcatcaaggttccgcaccgcagtgcttttgatgctgacagtgtcaagagtcagttaggcatcgcggttgagggctggcatggcttcgtggagcggatgcgagtcctctgtgagacaccagtggaccctgattcggtcgatgggatgctgcggaacttgttcacgtatcccgctgctcagagcgggaagacgatcgtgaacgagcaggctgtagccaaggtgcgggcgctgtacgacgggcaggggaggggcgctagcctgaaaaccagcaagggcacggcgtttggcttgctaaacagcatcaccgaattcgtggaccaccatcggcgggcccagagtacggagaaccgcttggacgcggcctggtttggccaaggcgcattgctaaagcagaaagcctggaaggaactggtcggggaggcgccatga

SEQ ID NO: 512243 - DNA, 735 bp, Stenotrophomonas maltophilia
atgattggatgccgggcgatgaagcgcgaaccaaactgcgttggagtggacggggcgaagtcgggttggattgccgtctggtgggcgggagtcgcattgacgcactgcgtgtacagcagtgcacgttctctcgtggatgcacatcggcaggcgcgggttgtcgcggtggacattccaatcggtctgtcggagtacggcgggcgacgggcagacgctgaggcgcgacagtttgtgggaggccgacgggccagcagcgtgttctcctcgcccgtcagaggcatccttgatgcgacctcacagcctgaggcatcgcgtaggcacaaggagattgacgggcgcggttttggttcgcagtcgttcgccatcctgcccaagatccgcgagtgggatgaattgatgcagtcggcccctccgacgcgcgcaatgttgagggaaattcatcccgaggtgtcctttgccgcgctgaatgggggccgaggaaagggactggcgttcaagaagaagtcgcaggacggtgctgccatacgaaccgagttgttgtcgtctgtatttggttccgaacaagtcgcacgacttgtgcaatcggtggtgcgtcggcaggcagccacggacgacgtactcgacgctttggttgctctttggagtgcggaacgcgtcgctgcgggggaggccgtctctttgccgacactacccgtttccgatgccaccggtctggctaccgcgatctggtactaa

SEQ ID NO: 512244 - DNA, 702 bp, Stenotrophomonas maltophilia
atgacactattggaagagatgacggccgctgtggaagggattacgcaagctaggtgggcaacccgccggggtcaggtcataccggatcccgaggatctccggttgggcaatgaagcggtcgagttcgatcgcgccaccgtgctgtatgcagatctcaagggctcaaccaagatggtcgattccgagaactgggagtttagcgctgagatatacaaggcgttcctgcactgtgcagcgaccatcatcaagaaggagggaggcaagatcacctcgtacgacggcgatcgcgtcatgggcatctgggtcggtgaccggcaagctacgccggctgccaaggcaggattgaaaatcaactacgctgtcaagaagatcgtcatgccggcgttgaaaaagcagtatcccgactggacaggggctgtaaagcaagtcgttggaatagacagcagcaccatccgagcagctagaaccggtgttcgaggaggtaacgacatcgtgtgggtgggacgggcagccaaccatgcagccaagctctccgagctggctctggccccgtctacttggattaccaatgaagtatttacacggctggcggatgaggcgaagtacggtggaacaccacggactttgatgtggaaacctttccgctggactcagcaaggcgatcgcagcattcacggttccaattggacttgggctgtctag

SEQ ID NO: 512245 - DNA, 876 bp, Stenotrophomonas maltophilia
atggcgtcgaccttcgaactgctacagggcgtggcatacgaatatcgtgccacgctccattccgccgcaggcggcgggatcggcgaaatctcagtcatccgcccaggcggcgctgtgcatgtatttgccttggcgatcagtatcgccggggagcatgtgtcagccagggaggcacccgggcaccaccaactacccaaattctgccctgaccgccacatcaatcaggaccagagcttctgcttgggctggggggatgaaaatcccgggcggatcaccgatgaagcagcagccaagcactggtgggccaccgtgtatcgattcttggcccatcaggtcaatgcgaacgcacgcagggtctttccaggggcagagaacggccgagcccatggcgacgcagccaagcaccaagccctcgcagagagggcagctgaaaggcttggtacagagttcaagacagccgtggatgctgggctcttcgttgtgcggaaagatgcgcggcttggcaagcataggctggaactctggcgtggcgatcaactacttgcgcgcgtctccatccgtagcaacaccttgatcaccggacacttgctttgcccttgtggatcagagccagagcgcaagattgaggcgtgcggagaccatgccggagctttggttaccttcatgcttgaacgccaccgctgcacgctggctgacacggcctatcttgatcactgcgctgcaacgggagctgcttgctgcgggacgcttgagagatgtggccttcggaaggccatccagcgaaagaaagctacatccacaaagaatgagagccatcaacgtgcaagaacctccagatactggcgaccaccagccaagtcaaagcgaccgcgttaa

SEQ ID NO: 512246 - DNA, 372 bp, Stenotrophomonas maltophilia
atgatcgcaacccggctgcccaagctagacgaattttcagctctgatctcgatcatcggcgtcctcttccttgcccctctcacggtgagcttctggcacctctggtgggggtacttccctgaccttcgcggcgggactgactcgctcatctacttcggtcgagtagcgagcctgagcgagccgaaattcttggacgcttgctcatcaagaagtctgaaagaactggaacaagacattctgagccagtgctggcggaactcgcagatcctttcgctcaaattcgagtcgctgaagcagtcctaccatacaactgcgatagcaatcgccccgtggatggcgcttatttccgtgctgccacctcccccgaagtaa

SEQ ID NO: 512247 - DNA, 300 bp, Stenotrophomonas maltophilia
atggaaatctctcagtatgttgttgaccgtcgtttgtatagcgacgacgtggtcgctagagcggcccatcgttacaccggcaaacacaaggtggaactccgcatcgagggtgacactattgtcgcctccttcgaatctcttagtctccccgaagacattgacgcttcctttgcgcgcgatctcttggacgagcgcctccgggcgcaagtacgtgctgagacagcaggacttcaggaggaactgcttaaggccgcattggcgcaggctcagccgctggtgaaccccaatgtccaggtttag

SEQ ID NO: 512248 - DNA, 1494 bp, Stenotrophomonas maltophilia
atgtccaggtttaggccgcctcaagctttcgctctctccgattcataccaactgctgcccttccgattccggcgcctgccatgggaccaaaatcgagcttttgtttcgtcgatgggcggagactggctccttatgggcatgaaggaccttcagaagttcgttgcccacgagttgccatcagactcttctttgtttgctgatatccaggcgcgccacttggcagtcgcaaatgcggataccagcagcatcgctcccttacttagccaaattcgcactaggaaatcctacatccttggtgggccagccctgcacatcttcgtcgtttcgctgcgatgccatcacacctgcagttactgccaggtatcgcgccaagaaacgacagctgcagatttcgatatggcaaagcggcatgccgagcttgcagtagagcgcctttttgaatggcctagtcaagaattgaccgtagagtttcaaggtggcgagccactgctcaacttcgagcaggttgtacgcatcacggagctgatcgtagaacgcaatcgaaccgcagggcgcagcctacgtttcgtgcttgcctcgactctgcacgacctcaccgaggggcaacttgagttcctagccgagcaccgcttcaagctttcaacgtcgctcgacggtcctgagtggcttcacaacgccaaccgacctcgacccgggcgcgacagctatcggcggaccatcgacggcattgacctaggtcgccgttggcttggagaagatggcgtatccgcactcacaaccctcactaagcgaagcctcgatgtaccagaagccatcatcgacgagtatcggaaggtaggttttcactccatctcactgcggcccctcagcccttacggctttgccacgcgtacaactcggcgaaccggctacacaaccagtgactatctagctttctaccagcgcgcctttcagcaccttatcgcgatcaatcgctcgggctacgccatggatgagtcttacgcatccctgttgctctcacagctcttcacttctttcgggcacggctatgtcgatcttcgttcgccttccggtgcagggcttggcgcagtcatctacgactacgatgggcgtgtctacccatccgacgaagcccgaatgcttgccgccatgggcgatgacggctttgcactgggagacgtatcccaggcagtttcggagtggctagtctcacctgcaatggagcgcctattaagtgctggggtggcagaagcacttccgacctgctctgattgtgcattcgttcctatgtgcggtgcggaccccattgagcactatgcacgccaaggggatccaattggccaccgcccgacgagcgacttctgcagcaggaatatggggctcttcgactttctattggagcaatacgaaaccactgatcagtggacccgaagcctgatgcgctcctgggcaatgcccaagattgttagagagccacccgatgttgccgcttga

SEQ ID NO: 512249 - DNA, 1188 bp, Stenotrophomonas maltophilia
atgttgccgcttgagaccggagcacaactcgcgccttcaaccaaagcttctctactgaaggtcgtcgacctgacagagttcgccaaaacggctctgccctttgaccgtttagccctggacctgcgagacgtcgattccgagagactcagcggaaccctgctagaactcccctggggcgccatacttccaagtaaaacctgggacgggtcagaagcactgccagtggttcgtttggaaggttcgccagacatctgtaagtcaggggacgcgattgaactcaaccctatacgtaagaaggttgcggttcgctatcgtcgcggcgatacaggcaacgtcctcttcgccaccgaacgctgcaatagctactgtctgatgtgctctcagccacctagggaggtcgaagacgcatggcgtgtcggacacctcctagatctaatcgacctgattgacgtcagcgagccctctctagcgattagcggtggcgagcctacgctgctcggcgacggactagtggagatcgtaaagaagtgtgcgacatcactacctggaacgcacattcatatcctatctaacggacgcatacgggatgctgggctacatgccaagtttgctggtgtacatccaaacctaagctggggaattcccctctacggcgatcactacgccttgcacgactatgtggtccagagctctggtgcattttcccagacactgcgcggtttgtatgccatgcaagcagctaaccaacgtatcgagatccgtgttgttctggtgaagccaacagtagagcgtctagctgagctcgctcgatacatctggcgtaaccttccttttgttgagcatgtagccttgatggggatagaacctatcggctttgcgaaagcacatcaccaggagctttgggcagatcccgctgactatgctgaggcactcagtactgcagtagatacacttgccggcagtgggattcctgtgtccttgtacaaccttccactatgctcgctagaccgttccttgtggccttacgcggttcggagcatttcaacatggaagaacgactatcttcctgcctgtagcgcttgctccgtgcgagatcgttgcggcggattcttctcttgggttacgccggcatggaccagccgtgccatctcccccgtaccggagctacaagcatgtccagtgccttaa

SEQ ID NO: 512250 - DNA, 672 bp, Stenotrophomonas maltophilia
atggaccagccgtgccatctcccccgtaccggagctacaagcatgtccagtgccttaatgatcattggcgcaacgattggcgctgttagcacagagccctcaaaggggcagttggatatttcaaggctttcggaaatggatggcaagtatgtaactgtgttgagcacctcgctcaatgctggcagccacaatttgtacgccggccatagaagccatagctcgcatcgatcacacagctcgcatcgatcacactcatccggctcaggcagctcataccgctcttacacgccgcctgccacctatacgccgccgagcacctatacgcccccctcgaccaccagcagcaagggtagtagtggtggtaacacgtcaaacgtgcagagcttgcagccatcgaccagccggccgtcatcgactggcagcaacctcacgctggagccaagctcaactacacgcctcccatcgcagagccgagatgctgacaccctgaagctgctgatcatgcgcgtgcaagctgcgctctactcaaaaggctacgacccgggtgccattgatggaactctttctacggagacacgccaagcgctgcgtatgttccagctagctcacggaatttccgcaacaggaactatgaccacccctacgctcgacgctttgggagttcgactctga

SEQ ID NO: 512251 - DNA, 732 bp, Stenotrophomonas maltophilia
atgattgattgcgataacgtctcagccgagatcatcgatttcgcgcttttgatggcagctcaggccgggcgagtgaccttacgtcgcggctacggaaacaagtccactttaaccaacagctgggaagaggctcttgttagacaagccttcacgccttgccttcagtttcagtacgctgcaaagaagaacacctcagacattgctttagcgctagatgcgctcgaagcacacttcgaccgtcgggcggagactttctgccttgtcaccagtgattccgacttcgcgtacttgtgccgccgacttcgcgagcgaggcgcctcagtcttcattgtcggcgaatccaaaactccagacgcactgcgcaatgcttgcgatcagttctttgagtggaccaaggaggtcggagtcgcggcagagccagttgcagtgagctcatgcaagcccgcagatctagtcgccgtcgagccacatccggcaggtcctgtcgcccccataaagcgccgaccacgtttcgttgttgaagcggtttccctgctcgcagccagcactccagacgggaaagtcacgctcaatgctctaggcacatatctcaagagagctgactctggcttctcacccaacacctatgggcactctggcctgttgaatatgttgaggacctacgatcttcttaccgtcaatcaggagagcagtggcatctggactacaagcctggcggccgagaccgcttag

SEQ ID NO: 512252 - DNA, 843 bp, Stenotrophomonas maltophilia
atgccggtcaacccggtaccccatgggctacatcgcgatcccggacaagtgctctggtacgacccagccatgcccattgtcgaaagccgtcgtgcctgtcaaagcagggcctgctacaaagaacacctacatccaaccttttccattggtgccattgatgctgggcaaagcactttcacaggtgcggacggcgggccggttgttctatcgccaggcaccttggtgttcgtgcccgcgggacgcatgcatgcctgcaaccctgcttctggcagcgcgtggagctaccagatgctgcacttggatgccgagtggcttcgtggcgttcgagatgaatactgtaacgaggccaaagcgaaacgcgagccggtgcgcatcgttacgaacccaagactgtacgctcacttcaatcgactcaactcgctgcttttttctgacgccgatccgagcgacaaggaggctcggcttatcgaattcatcggcgataccgagacagaacaaggcaggtctattggccccgcggacatcccgcaaaagctggtcgagcagataaagcctgcgttggagtatctgcataagatgccatcggagagtatctcgcttggcgagctcgcagggctagtgaggctgagccgctaccagttgatccgggcgtttcgcatcgtcaccggcatgacgccacacgcgtggcaggtcaaccatcgcatcaacctttcccgaacattgctgagagatggagacagcatctcatccgtcgcgctagccctaggcttcgctgaccaagcccacttccaacgcgcgttcaaggctcatacgggagtgaccccgggacgcttctgcacctag

SEQ ID NO: 512253 - DNA, 666 bp, Stenotrophomonas maltophilia
atggaacagtttttgatcattgctgcagcgcatttcctggcgctgctgtctcccggccccgacttcttcctcattgctcgcagctctctctcgaagggctggcgtgtagccagcggcgcttgcattggtatcgcgctggccaatggcttattcattgttgccgcgttcgtaggcaccactgcactgcagccgggcagcggcctcttcgtcaccctacagctggctggctgtatctacctattctatctaggcgtgctattcattcgacatgcgggtggaaccgagttggatgtctctccgacgggcggccccttgtcatcggaaacgaccttcactgactggcgacgggctgcgggcatgggttttttgtcaggcattctcaaccccaagaatgccctgttctatgccagcctcgccgccatgctgacggcaccacacgctagtacaggttggaagatgctctatggcacgtggatgtttagcgcagtgctgctgtgggacctgttgatcgccatcctaatcggcaaccccttcgcgctgcggcatttcacgcgcgcactaccctggctagaacgcgtctccggcatcatgctgatgatgctcgccatcggagtacttgctgtattgacattcactcaaacgggctggacacagcaagctccttag

SEQ ID NO: 512254 - DNA, 954 bp, Stenotrophomonas maltophilia
atggacagattcgatcaataccgcgtcttcgcccaggtggctgagatgggtagcttcattaaggcagcccatgcgttagaggtgccgcgcgcctcgatatccgccgctatccagcaattggaggcacaactaggcgtgcgcttgctccaccggactacgcggcaggtacgggttacgcctgatggggagcaactgcttgatcgcatacgcccattgttgagcgaagttgaagacatcgaccagttgttccaagcaagccatcggcaagcatctggtcggctcatcattgatgcgccaagtcgaatcgctcgtcgcctcattgcgccatcactacccggactattgcgtcgtcacccccggcctcagctcattctgggttcgagcgatcgggccatcgatctagtaaaggaaggcgtggattgcgccgtgcgcgtcggcgcgctcaatgacagcagcctcgtagtgcggccgttggggcatatagccttggtcagctgtgtaagcccaggctatctgcgcgagcatggagagccacagcgacctgaggatctgcccggcggacattgggcggtggggtacgcaacaccgaagtcgcgcaaggggatgccttgggaatacctatccagtgacggcaccgaacaatttctcgacgtgcccagccgggtgattgtgaacaatgcagagagctatatagcctgctgccttgcagggcttgggctgatccagattccacgcttcgacgtccagcacctgctggattcaggccgattggtggaagtgatgccgggctcccgggctgcctcgatgccagtgtccttgctctatccgcatcgccgccaacgttctcgacggatggtcgttttccatgagtggttcgaggcattgatgcagccacatttggatagtcgagatggatttctgcacgttcaacacagagcccccgagactcgctag

SEQ ID NO: 512255 - DNA, 756 bp, Stenotrophomonas maltophilia
atgccagcgtcagatctgaagtttgaaacccgcgttggcgtaaagcgcaaaccgcgccgtatcctggcgatcgtctccaacaccgcacagctgaagggctttgccgtgggcttctttggtgaagagatgacgcgggcgttcttgatgttcacggaagccgggcaccaggtggatcttgcgtctccggaaggcggcgaggtcatgatcgacacgcatagcgatccgcgcacatccggcggtgtctatgccgacgatctgatcaccttgggcttcgttcaccacgccaagttcggcccaatgctcaagcagacattaccgatcagtgcggtgaacatcgaagactatgacgcggtctgggtcgcaggcgggggagggccactgatcacgtttaaggacgccccggcgctacataagctgatcgccgacttctacgagaaggggaaaatcgtcaccttgatctgccacggttcttccctcttgctctggacgcgcctgtcagatggaaggttgctggccgaagggaagaagtggacaggcttcaccgacgaggaggaagaggaggtcaacaagaccttttgcatgacgttgaatgattacactatccaaagcgaggccactagaatcaagggtacaacctacctctgccgaggcgcgaacgaaccgttcgccattcgcgatggccgcttgatcaccgggcagcagcagtacagcagcggccttaccgccgaactggtactcgacgctttggatgagtag

SEQ ID NO: 512256 - DNA, 774 bp, Stenotrophomonas maltophilia
atggcagaccattccatccgaggcaaagtcgcgcttatcgcaggcggcgccaaaaatcttggtggcctgattgcttgtgacctggccgcgcagggtgcgaaagccgtcgcgatccactacaacagcgcagcatccaaggctgatgccgacgcgactgtcgctgcgatagtcgccaagggggtgcaggccgtggcgttgcaaggtgacctgacaacagccagcgcggtcgaaaaactcttcactgacgttatcgctgctgtcggcaagcctgatattgcgatcaataccgtcggcaaagtgctcaagaagtccatggtcgagatcagtgaagccgagtacgacgaaatgacggcagtcaattccaaggccgcgttcttcttcatcaaggaggccggcaagaatctcaacgacaacggcaagatctgcaccgtggtgacatcgctgcttggggctttcacgccgttttatgccgcctatgcgggtacgaaggcgcccgtggagcactacacccgtgcggcatccaaggagtttggcgtgcgtggcatctcagttacggcggtggggccgggcccgatggatacgccctttttctatcctgctgaaggggccgatgcagtggcctaccacaagacagcagcggcactttcgccgttcagcaagaccggactgaccgacatcgaagacgtggtgccttttattcgccacctagtgagcgatggctggtggataaccggccagaccatcctaatcaatggcggttacaccaccaaatag

SEQ ID NO: 512257 - DNA, 183 bp, Stenotrophomonas maltophilia
gtggatgctttctaccgcacagcgctggaccatggcgggcaggataacggcgcccccaacgagcgcacctatcaccccggctattacgccgcttttgtgctcgaccttgatggcaataacattgaggtcgtacaccatggggaggcacagcgcagcgcgtcatcagtggtgatcgatttctag

SEQ ID NO: 512258 - DNA, 228 bp, Stenotrophomonas maltophilia
atgatcgtttttgttcgattgatcaatgaaggcccggatgtgtttcgcccggtcgatgctaggcgactctccgatcacgtgtttgagatcattgaccattgggaggagcaggatgaaatttgggagttctcctgcggtgaccgtgtggtctgcgtcgaccatatctttccggatggctcgcaaggtctgcttgcgatctcagatgcaccatccttacggactagttga

SEQ ID NO: 512259 - DNA, 1029 bp, Stenotrophomonas maltophilia
atgctgaccatcggagagtacccgcttgtctctttggctgaagcgcgcgcggatcgcgaccgagcacgagccttggtcaagaagggggtggacccgagtctcgtggcgaaagtggagcgtgcctccaagcaagaagaggcgggtaacactttcggaagtcttgccgaagagttgatgcttcagcgtgcgaagaaactcagcccaggctcggtcgttcgggagcgacggatgctagaaaaggacctggggggcatcgcagagttgccaattcgcagcatcacagcgccaatgttgctaaaggtactcaggaagatcgaggatcgcggggcggtggagacggcgcatcgcgccagggctgctgctggtctggttttccgttatgccatcgctactggacgtgccgagaacaatcctgcgctcagccttgttggcgctctagctccgacaaagacgacacacttctccagcgtgactgagcctggtgaggtcgccaagttgcttaaagccattcatggctacaaaggctcccctatcgtctccgccgcgctgaagctctctgcgcttctctttgtccgtcccggagagctccgagccgcacgttgggtggatatcgacctagaggcagcagagtggcgctacaccaccagtaagactcgtaccgcgcacattgtccctcttgccaagcaagctattgaagctctggtggaagttcgtccctactcaaggcgcagtgagtacgtttttcccagcgtgcggaccatttcgaagccgatcagtgagaacacgatcaatgctgccctacgaaaccttgggttcgacggcactatgatgactgcacatggcttccgggctatggcgaggacattattggacgaagttctggggtataggcctgacttcattgaacatcagttggcccatgcggtacgcgatcctttggggcgtgcctacaaccgtacgacgcatttgaaagaacgtaagaaaatgatgcaaggatggtcggactacttggacaagctgcgaacctag

SEQ ID NO: 512260 - DNA, 1023 bp, Stenotrophomonas maltophilia
atgaggcggcacgcttcacttattattggtggccaatatttggactcatttatttactccgggaccctttttttgttggatctcaatggggtactctccagctttgactggggaagccttgttggcgacgtcttattgaagcatcggcgaatggatttggttaatgtctttacggattcaaggcttgactcccgggctttatctgatgatggcaacttggatcttgaggttgatgatgagattttatcgaaaaatcttacgggacgaattgatcgctccgtgtggccgaccgatattaatgtgtacgccaatagagtgtatatttctgacgagtctggcgtctattcactcgagtttgattacaaatcaaaatcgataaattcggaatccgtgacgaaactgaagggtggctatgtatactccatatctcccggaggttgggggcgattggcgattgccggggttgatcgcggtctttctctgattcttcccggaaacaaggggggcaaggaggagacattggcagagtccgaagtttatgactgcgattggactggaaatacgctggtcgctaacggcgtgattgaatctgttgtttcaaatttttccgcccttccaaaaagggaggattttcaggatgaattgacttatcgcgaggtcgcgtctgcgatggcgaagataatgccggagacggtaaagctagaccccgatccggatggcgggtatcttctcctgactcctgaaggggagttggttgattcgcgcgcatcagggatttccgagtcccgagtatcagtcattaaggcgaggtcagcgccgtatggttttgtggtagagcatgaagattgcgttcttgttaaattcggctcgtgtagtgagcgggttgctgagactgccccagtgttctggcgaacgtttggacgctcaaccaactatttgaatcacttgcatatttgcgatgaaaatggcctgcagctgagagcttattccatatcctctacaacgatgaaggcatcaccctag

SEQ ID NO: 512261 - DNA, 846 bp, Stenotrophomonas maltophilia
atgcgggtgcgcgcgggcgtcgcgcagtcgggcgacgcaatggcaactcctagcctgtactttggtgcggccggacagggcctgatggacctgcacttctggcaggccaccggtgatggcgcttacctgtcatcggcgatcagcatcggcgaaggcctgctggaaagctcccggcgtaccccgcaaggtcgattctggtcatcgcagggcaaggtcttccttgggttgggtgatggtcaatccgggattgcactgttccttagctaccttggcgtggccagcggcgatgcccgattcctggaggcggcgtcgcaggcgctggattacgatatttcccatggcattcgtgtggccggacggctgttctggaagaatctggctgatgcgcccgccaatgcgagcaactcaccgcacacacgctttggcgcagcgggcatcggtaccgcctgccttcggcactttgctgcaacgggtgaggtgcgtttccgcgagattgccctggagtgtgcgtattcggtccgatcaagggtgaccaacaagttgtggcaggagagcggcaatgccggattcggtgagtacatgctggacctggcttgcgtcttgggggatgagcgttacgcgaatgcggccttccatcacgccgaggcgatcgcacagcacgcagttcccatgcccgtcggggtggcgttcgcgggcccggcacatcaccgggtctgcaatgagtacagcgttgggggcgccggcatcggcatcttcctggaccggctgctgaagcgctctccacgattgctgatgcttgatggcctgctcgaccgacggtccggtgcatcgaggcgacttgcgtga

SEQ ID NO: 512262 - DNA, 1818 bp, Stenotrophomonas maltophilia
atggtcgacacgacggcacggatgtatacgttgttagatgatgttcatttcgagaacatcgaacgctataggccgacggatgagtattcttccgttgctcgtaacctgctccctgccgactggcagttgcagccacgtgggttctggacacactgccggccgccgggatggaagagccgctcccacggctggaagatccacatatcgagcatcccggagaacgccgaagagaccatcgcggtagcgtgcgaagagatcgcggccgcgggtgccatgttcaagttctgctccgatccgcgcatgctggcaatgtcgctgggaaagggatggtcacggttccagcttggaaagttcatcacgctctatccggcaggcgaggcccagtttctcagcctgctggaacggctgcacgtacgtacgcagcacctcggtggaccacacattcttactgatcgcccgtacaaggggagcagtgttgtctactatcgctacggtgcccactcggagggcttccgacccgacatctatggcaacaggcagcagggattccggctggaggacggctcttggcacgacgacgtgcgaggtgcccacttccggctccctccaggctgcacggacccggtggttccgttggagcgtcctgcggtcgatccgcagccggcggagatactgctcaaccagcgctacagggtcctgggcgcgctcaaattcaatggtacaggcggcgtctaccacggcgtggatatggatacaggccagcgaatcgtgatccgcgaggtgcgcggcttcgccggctcaatgcaggcgcttgctccgcatgtgctcgtgggcggtatccagcgtgaggccaggattctgcagaagctgtcgggcactggcttggtacccgagttcgtggcgctgttcaaggagtggaacaattggtttcttgtcgaggaacagctggaggcttcgacactctgggacagcgcaatggacttctacttctcggaggagctgcagacggccgccgatggcttcaggcgcatccgggagaagattgtcagcattgcagaggcgctctccgtcgtgcattcacgtggtgtcgtacttcgcgacctgacacgtagtaacgtaatgttcaccgccgccgggcaggtgaagttcatcgatctcgaatttgcgcatgaaatcggtgttgacgaccgctgggtgaaggggtggacacccggatatgcatcggcggaacagcgtgcgtcgcggcgaccgaccgtgcaagaggatcactatgcgctgggtgtgctgatcctggatatgctcaccttctgtgcctccggtctcgacctggcccgtgggcagatcgtcgacggaaagttacctcaggttctggcagatctgggcctgcccgaggcgctgcgggatatcgtggtcgggttgaccgatcaggatgcaggcaggcgctgggacatcgccaaggcgttgaaagcgctggggaacattgaagtgccatcgccacggcgggtgatgtttccgtcccgccaggagctgctgaccgcgccgatgccggctccctccgggtgccgggcgctccaggacatcctttcagggctcgcggcctatctgcactccgttgtcgacaccgggcgtgatgatcgtctctggccagccggaccgcagctgttcttcaccaatccggtttcgcttcagtttggcgcgacgggaactgcatggttcctgctacggcatgaggggcacctcgacccggcgattcttgactggatccaggacagggcggtcagtgagagcggtgcccgccagggttgtactccggactag

SEQ ID NO: 512263 - DNA, 126 bp, Stenotrophomonas maltophilia
atgaacaatgtacttgccctgcaggcccttgaaatcgaatgcctcgatgtctctgaaacctgcactgcctgcctgtctctgatcagttcggatgcaggcatcgaagatggcatggatcaagcctga

SEQ ID NO: 512264 - DNA, 2652 bp, Stenotrophomonas maltophilia
atgcgagctcatttccgatcgtcccgtcatcctcttgccatcgcgattgcgctttccggtgcgttcgccgccactcccgcattggccgcgcccgagggcgttccgtgtcctgaattcccggatctccaggacccgacctacaagccggtgtcctacctatgcggcatggatgtgctgtccgaggacatgtatatcgccgaatcgctggaagcctacgacgccaccatccgcacccggcgcaacgcccatatcgcgctctacctgcaatggagcaaccgcggctatctggtgatggacaacgtcgacatgctgatgggcgggcgtgacaacagcgccatcgtgttctcttcgaacaatccactgggcgcgaggatcaatgatgtccgcatccgcttgcagggcgatcgcatggtcggcatttccgcaggtgtggccgtaccggacgcgaatggcgaattgaatccggccaatacgatggcgatcagcgacagccggatcgacattgaaggtgccgatggttggggcatgggtagcggtatgcacaatctcatcgacgcgacgcgtctgcagatcgatgtgcggggggatcgtgcccgcgcatacagccaatgggcaggtgaggtgcgcatgcgcgatagcagcgtgtgggcgtcgggcgccgacgctagggcctaccacctggtgtccagccgcttgacctggccgggcaagcccacttacgcctacaccccctatctgttgctggaaggcagcaccgtgactgcacagggagagggcagcgttggcatgctggccgaatacgtgggttcgctgcatgccggcatgggcgcgcgcatccacctggaggacagtgcgatccacgcccatgcgggtgatgcgctgcgcatcaacggtggtgccgccaaccggcttgatcagcgaggcggtgcgctgatggggcgggatgcgggactccacctggtcggcaaaggaaccgtgttgtgggcgctcctgtctgccgacgcagcgattgccagcactgagggagcctccctgcgcctgggggacgagaccgcgcttgatctggaggctgctggcagcaggttgggtcaggcgcgcgatgccaccttcatccgtctgggcgaaggcgcgcgtggacgcttggatgtaagcggttcaattctgcatggtggtgtcgagcgagcggaatccgcgcacctggacgtcaccctgcgtgatggcagccaatggcggatgagtggcgacaaccgcgtcgatcaactgcacattcagggcagcacgctttcgctggcgaacggttccagcggcgacaggctgcgggtgatgggtgatctgcgcctggacgacgggcgtatcctgctggataccgtgcttgccggtgatgatgcggccacggatttcatccgcgtcgacggagatctgagcggccatggcacattgcaggtgaacaacgccggtgggcagggtgcgaacaccgtgcgtggcatccaggtggtcagcgtgggcggggcctcatcggcggacctggtcctggccgggcgggcggttggcggcatctacgaatacttcctgcaccgcgatgcagatgatggtggctggtacctgcgctcccagcagttggagcaggatccttgcctggctgatcccggcctgtgtgttccaccggtggaggatggcggagacaatgctgagggtggcggcctcctgccggaaaccggggatggcggcaggcccgccccgttcgtgacccggccggaggttggcgcctacctggccaaccaggtggagatgcgtcgtctcctcgtatcgcaacgcagtgagcgcgtggctgatgccacgggggcgacggtgacaggctgggtcaatacagggtcgagccaggtgaggtttgctaccaccgaaggccaactgcagatccgcagcgaacgttcacgtgcgcaggtgggaggagacttgggagtgttcgatgaggggcgtggccgtttaggcgtgtcggtcagcagcggacgggccgtgacccgcagtgtctcgcaggtgaccggcttcgatgcacgcggcagcctcaagggcgtggcggcggctgttcatggaagctgggctctgcagcgcttccacctggatggctggctgcagcgtgccaccgtgcgccagggcgtggaggggctgggcctgtctgccgagcgccaacggggccatctgtggcagttgggcctggagaccggcgggcgtctaggcatcggtcacatcggagatacgtcgctgagcctgctgcccgacgtgcagctggtgtacaccgatgcgcggatgcgtacgcacatcgaaagcaacggtactgtggtgcgtggcttgggcggcagtggcttgtccagccgtgttggcctgcaactgcggggcgatgcggtgtccgcgcacgccacgacggtgagtccctatctgctggcgaactggtaccgggaaagacgtcctggcgatgtgacgttcgatgatgtcctgcaacgcggcgttgcgccccacaaccgctatgaaacaggtgcaggtgcacgactgggatttacaggaggatggtcggctcagggatcgctacgcttggtccttggcgattcgggctatcgagaagcccgcggtgaattggcattgagccgacgctggtaa

SEQ ID NO: 512265 - DNA, 912 bp, Stenotrophomonas maltophilia
atgcgccgtcttcttctctgcctgctggccttgggtatgcacctgccttcggcaaccgcccgcggcaggacaccggaagacgtcgtttcccaccatcttcaggcaatgcaggaacgctacgacctcgcactgcagatgcttgtccagcagcgcgaggccggccaaacgggtacaaccgatgttcccgtcgatgctccgcccatggcggtgttgctggcgacctggacgaggaacatcgaacgtcatgtcgatcccatcgatggcgtggatcagccacatcttgcctgggcgctgcaggctctggccaacacccggtgccagccgcaccgaagcgaggtttggcacagcctgaccgaaggcatgcaggttgccgacgtacacttcacctgccgcgtgggcgatgtcgagcgtcttcggtacctgtccgaggccgcggtcttcgatggcggtgagcaaagcgggcagcgcttctggagagcctacatcgcgacgttgcgcgacggtcccttccacgagattggtggcaccacccgcgtggtatcaaccactcaggagcccgcctggcacagcgagaagtcgaggcatccgaatgaagacttcccctccggccgcgtcgaacgtgacatatatgagcttctgaccgaagcactgatcacacagccgcggcacctggaccgcgcgggcacgcatgacgccatcacacagatgacaggcatcgtggcgtgtgacgacctgctgcaacagcatcgtcgctgcatggcgcgcattgcgccgcaggaactcaagggggtgagtgaactggccagcaccctgagcaagcaacgacagcagattcccgaggcggagctgctgcagcaatgcatggccctacgcccaggaatgcaggcgctttggaccgctgagtgccggtag

SEQ ID NO: 512266 - DNA, 1083 bp, Stenotrophomonas maltophilia
gtggcagagaagcggttcaaggacatttttctcgattgcgcgaaagtgcaatccgctctggtggatgctggcgcgactgatttgggcgaacgggtcgtcaaggaagggcgactgattcaccatagcggagagctaaatgggaaacgcttcttggtgcagattttcgccaataacggcggaaagttcaccatcggcaactcgtctgggtttgatgtcgcgacctttgaggttcttggggatgccattaaggatcggtgcgggtatggttctccttcccctctcaatgcgagtctccctcgtttcgaggatgagaaggttgcctttgttttggattacttgcttgagcagggcgtggaaatcaacggcgatgagacgacaaccaactacaggctgattcgtgtggttggcacaaatggcgagcggctgactttcaagcactacaagaatggcacgttccacatgcaaggcgtgcatggaaaggtcgccgggtgggcattggatgcagtgcaaaccatgcttcctgtggacaagatccttgctcaccaaaaggacatttactctgtccctttgtcggtcgagcagatcaagcagaacctcgaggttaagattcctatcgttcacgattaccttcgtgacaccgtccgtatccagttttcatcctcgttggcgctcacgcaggtaggcattgccctggaagattattctgcggtcgcctaccccgcgttgcgaggacttgagggctactgcttccagcttctgggcgaagagggcggtatcgcgctaaatgttagggaaaagctaggtgattattttgatttggaagcacccacgccgagagtcctgtctacctatcaggcgacctgctcactagaagttcagcaaactcttgtcgaaggttaccagctgtggcataaccttcggcaccgtctcttccacatggacggcaacgtggacaccacgcgaatgctaaagacgcgtgaagaggcagtcgccattgtggatgaagtgttttcgcttgtagagagtggccatcaacgaatcagccgttcaaaaggcaaggtatgcgaaagtttgtcgtcataa

SEQ ID NO: 512267 - DNA, 1530 bp, Stenotrophomonas maltophilia
atgagcaatgaagcaaacgactacctgaccttggaagtcatcgccgggacctcattccgttccacttctgatacggatgagctgtctcagcgggtcaaagatcggttgggattcgggtcttacaacatccctgctcgactcgcgatggctcgctcgttggccttgcccggacagccggccaaggcggagggtgaggtgggccggatcatcaagggggacgtgctgtttggcacaggggccgacctggccagctgggtctcgctgctcatcgagcatgccggcagcccgctcaccatcaaagacttgcagagcgcagtccagcgccactgggctcgaggcatgaagatattgtcggaggagctcgacgcatcaggtggtgacacctccgagttctggcgacgtttggcggaaagcgcattgcctgaagtcaccgagaagcggcgcaaccaggtgacctcggtagtggctgaagcatctcgcggcccggttcccgttcgtcttggtgagattggtcgcgacgtggctaccaatgaggaggtcatttggaccctcaacgcgcccggcggtagcccccatagtgccttcatgggcggggtgggcagcggcaaaacccgcacggcggccttcgtccttcggtccatcgccgagcagacgaacgttccgttgttggcgttcgacttcaagggcgacatggctgaccgacacaatgctttggaccgggcatttgatgcccaggttctttcgccgccattggtccctatccccctggatgtgtttgccctgtctgacaggagcaagcacggcatcatctccacggcccagcggctccgtgacagcttgagcaacctcaagcagaccaagtttggtgaccttcagaagcgtcgactcaacgacgccttagaagaggcattgcgcactcgcagcccttgcaccttggaggatgttcgagattgcctagagaacgcctacgcatccgctggggcgaaggaagatggtgcgatcgccactcttgtcgacctctgccgtctgccgctctttgagcctaaaatgtctcccgaggagtttttctctaagtcttggatcatctcgctgccggccaacgtccccgagctggtgagggttaccgtggtggctctgctgacggatgctctggagcgtttcatcaactcgcagccggactcagagactgacagtgaagggaatcgtgcactccgagtcctgtgtgtcgtggatgaggctcaccgggctctggaagcacgccttcccggcctgtccaacctcattcgtttggggcgctcgaagggtgcggcggtcatgcttatctcccagaaaccggacgacttcgagggtgaggacgacgatttcctggatgaaatggggctggtggcttgttttgtaaccaacgcgcgggagtcggcggtgaagcggatcctgggcgctggcgcttccctgacttcgctgaagaagggcgaagcgtttgtcagggctcgaggagataccaagtctcggaaggtgcttgcctggaagtga

SEQ ID NO: 512268 - DNA, 2079 bp, Stenotrophomonas maltophilia
atgcatcttgagtcgattagcctccgagattggaaggcattcgagtcggccacgttcgagttcccgaaacccggcaagactaagaatgtggtcgtcatcggcggccgaaacgggttcggcaaaacctccttgttcgaagccttggcactgggcctgttcggccgcgacggcttgcgcttggtgctgcgagcaggtgtcgccagcgatgaccaaggtcgcgcacaatcgttcaaggacttcatggagcgggccctctttgggaacgccctctccgaaggccgcacctcttgccgcattgagctcaagttcgttgacgatgcagatgagcccatctggattgatcggacttggtatttcaacgaccaaggaaagctcaaggctggcgagtcagcggaacagctgaagatcttccaggggatcggtcggcgcgtggttggccctggtcggactgaagcagacgtcgacggctggtatcgcgactgggtctcgaagacgttcatccccacttctctggccggattcttcctgtttgacggtgaatcagcggccgtgtatgccgaacgcgacatgggttcgcaggtgcgggaaggcattgagggccttttgggcctcaactggctcaagcagcttcaaaaagatctccgcacctacgcaaacaccaagcgaagccaagttcccaaaggcgtcagcaatgaagccattgctgagctggatgcggcagtcagcggcatggaggaggaactttctcgctatgaagcacgactgcaaaccatcgagaccgaaatccgtaacagcgagaccctgcgcgacacgctgacgcgggagttgggttacggggcgggcactagggcgcagctggaagagctcacgcgcgaccaagctgaccacgaaaaacgctacaacaatgctcaagatcagttggtcagtgctgcgcaggcagagttgcctttagcgctggccggtggcttgctgctctccaaagttgaggctcgtcttgaccaagaggcccgactcgaccagtgggaggccgccctttcccaacgagacagccggactgccagcgttctggagttcctgaacgagcaactgccgacggttgagccagagctccttgagcgccaagtggacggtgtgcgagctgccgtggagaaagctctggagcgcttgtggttcccgccgccgggcgatgtggccgactcctttaggcatgcgcacgcgcggggtcctatgcttcagcgcgtgctggatcgtttgcgagatgcaaaggcggtttcatccgccagcatcgtcgagctgcttgagacgatggaaagcagctccgccaagctgcgcgaagtgtcggccgtgattcgttcaacggagggggcgaccccgcaggtcgaggagaagcgcgaccagttgaacgaggtgaataccaaggtgggtttgatgcgcgaggaacgcggctcgctcaccaacatggtcaagtcccggggtgctgaccttgagcaaaagcggcgtgagctgggccgcctgaccggtcacttggaccaatccgagcggccggcccagttggccggtcgtgctgagcaggtggcggagatgctggggaacctcgttgatgaggcgtggccgttgcagtctgaagcggttgctgaagcgatgacgcgaagcgtgcgtgctatggcccaccgcagcgactacctgcgtgaagtgacgatcaacgaagagggtgacgtggagctggcgtccccggatgggcgtgaccttcgtcaatacgacctttcggccggcgagaaacagattttcacccaggcattgttctcggccatcgctgaagtgtccgagcgcaccttcccgctggttgtggatacccctctgggccggctggacgagaaccatcgtttgaatgtgctcaagcacatcaccagccgaaagggtcaggtcatcctgatttcaacagataccgaggtcgtggggcagttccttgcagcgattcgcagcaaggtggccaagttctacatcatccgcaacaaggtcgatggcggtgtagctcgcagctggtgtgaggaaggctatttcgacgggcagggagtttga

SEQ ID NO: 512269 - DNA, 216 bp, Stenotrophomonas maltophilia
atgccacgcgatgttgtgacgcttttcgcccaggaggcgggaaacaagcttattagaaggcactgccgtcagatcggcctgccggtaaacgacctgcgccgactggttgaagaggttgtggataagagcaccatgcagcgtcgtcatggcctgtgggaggcttttgacgaagtgctgggcgaaacctacgaagaggaagccgacaatgcatcttga

SEQ ID NO: 512270 - DNA, 1131 bp, Stenotrophomonas maltophilia
atggatcctgctcttgagcagaagatccaactcatccgtcaggacatccgagaggaatacctgcaggatcatcaacacccctggatcattggtttttctggcggcaaagacagcactttggtgacgcatcttgtgttcgaggtgctgatgtcccttgcgcctcacgagcgcacccgcgatgtccacatcgtctcgaacgacacccttgtggagagcccgctggtcatcactcacattgcatccgtgcagtccgaaatagaccatgccgccaatgcttggcgattgcctattcaggtggtgacgacccggcccgacgatgacgcgactttctgggtgaacctcatcgggcgcggctacccgccgcctaataggtctttccgttggtgcaccgaccgaatgaagatccagcccaccagccgatatatccgccagcaggccgatgtggctggtcaggtcatccttcttcttggtgtgcgccgctccgagagcgcgacccgagcggcgtcggtggcccgttacgacaatggtgagcggctcaatcgccacaacgacctggtcaactgcatggtgttccgcccgattgtggagctttccacggacgaggtgtgggaatacttggcgtttactccgccgccgtggggtggcacgcatggcccattgatccagctctacatggatgccggcgctgccgaatgcccaactgttttgtcccaagacgacgcgcctggttgtggcacttcgaactctcgatttggttgttggacgtgcaccgtcgtggaaaaggacaaaagcctgatgggctttgtcgaggccggctatggcgagttcacccctctgattggcttccgggactggttggccgagatccgaaacgacccagagcgccgcctagcccgacgccgcaacggcaagctcacgatcaccaatgatggagttttcatccccggccccttcactttggaaacccgtcaagaaatcctcgacagggtgctggcgctacaagatgagatgaagaccaagttgattgaagactcggaagtgagccggattagagagatttgggctgaagatgccagcatgtttgccacgcgctccgtagatgaggcgcgggcaatggctggttccaagtaa

SEQ ID NO: 512271 - DNA, 375 bp, Stenotrophomonas maltophilia
atgcagaggaggagcaagtcatgctgtcggcccagcttttcaacattcgttcacgtgcccaagccatctccccgctctttgttcgctgcccgcctcaagcaggccagggaactgcgcggcatcgccagccagcgagcgctgggggttctgatggggctcgataagaagctggcgagcagccgggtcaaccggtatgagaccgaggtcagtgggattgacttagacgggctcgggcgtttggccgaagtgctaggcgttcccatggcctacctcgtagcagaggacgaggctacggcagccgtggtgcttgccctgtccaagttgactgcgagccagcgcgctgcattggctaagaagttggcccaagagctatag

SEQ ID NO: 512272 - DNA, 777 bp, Stenotrophomonas maltophilia
atgaagaagaatcagacaaggatggccgccgtcctggcggccgcgctgttgctgagtggccagagcgcatcggcccaagaagccgcccagcccaacccggagtcagggaagcccggcttcttcaggcagctcgggaagagcttgaaagatgctggcggccagatgattggagtgaagcccaccggggctaccgccagtcaagcccctggcaagcagccgatctacaccccggtcagcggggccggaaagattcaagggctcttcaagggtgacaaccatcagctggcccagcagggacggctcgactggccccgggtgtcgctgacgttccaggagtggggggcgtctctgccctgctggacgattgaagcgcgtgtgtggaccagcccctccgcatcgaccaccgaggtgttccggacctgcgccaacgcggcattgaccgaggtcgacgacttgggcgacatggccgagctcaacaccgccgcccagtggaaaggcagggataccttgactggcgttcgggtgccctccagcaaagccaacacgggggccagccgctccactggccctaacccgcccagccagccgttcgtcctcaacgtgagccgaccaggtgtgtccgaccgggccgtcgacgtggcgcttcgcgtggcctgggtctctgggttcattcggaccgccgacctgcaccctggggcttccgggatcctgactccgttcaaagacggccggatgtggctcgccggcttcaaggcagacgggaaccgcgaccggtaa

SEQ ID NO: 512273 - DNA, 1125 bp, Stenotrophomonas maltophilia
atgacgcttcgaccaaaaaccgtgagcgacttggtgacaactccgacaatccatgactggattttgagtgagctggatgtgtttgagcgaagcccgccagccaactaccttagcgcggcactccagatcgcagttttccacctactccgatctgggatatcaaataatattgatgaagaaagctttaccgcggcgctccttggttcgttctgtgaatcctgccaagtatgtgtggctggtatgccacctaccagcaactcatccttgacatggcggaggcacaacaagagcggtaaaggaaagcttggagagtctgccacaggagcagattttgccttgatcattcgccacagcaatgactttgctcgagcagcggtctttcaagcaaagaatggtcaatcggatgtaggcagcttcaaggcagaacacctctcccctgcgacagaacgttaccccagcgaacaacaattcattcggctaagacgttactgccttagcaccctcgcggacattaagaaactagaggaagcatcactagatctgaagaatatagggtgggcacactatcttatctacgaaaactcggcaacctactgctctcccttgagctctctgaccatcctcaatgatcgaatcaataagaatcagtcacctggcaccgtaagatataaagagcatccttactccaacttcgtcgacgttcttcgggatgggtgcagccaagagcctggagttcaacccgactggcttagccttgaatcgtctcgcgagatttccgctttcgttgaggcagcaaaagatctcttcgatatctacgaggcaagtgtggatcccgcaatggattgggtcccgctaatcgaagaccgcgaaagtctatccaaccaagataagattcgattgataaaggacaatcttctttcgccttcggccaagccatcagtgcaagcgccagcacccgaacaaggattagaatcggcagtcccatctactgtcccaaccccacagcaagccatacgatttccaactctaaaagagcgacaacatcgcaaggcgctcgaaaacgagaaagaagatgggaagttggataggaagaacagctcagggaggaagcctaaaaagtcttag

SEQ ID NO: 512274 - DNA, 300 bp, Stenotrophomonas maltophilia
atgcctgcaatcaagcgttccgaacttcgttatgaatacagctggagagtctctgagggcgacaatcctaagctgatagcggacgacgcccatcacctcagccgcaatgagggctatgagatgctgctctatctcaacagcctgaccggcaaagatggcgtcgacctccctgtcaagacccgtctcattgttgagtggatgctgaaagagcacttcaagtccactgcacccggacgccaaaccgttaccacatgggtggtggacaactggaatcggttgtcgccgcattaccctggatga

SEQ ID NO: 512275 - DNA, 1116 bp, Stenotrophomonas maltophilia
atggcaagaaccgttgatcagcgtattgccgcactgaaagcgcgacgcagtggcgaagatcgagttaacctcatggcgcaggatagcgctgcgctggccaagtacatagagaagatttggaagcaggaggcctgggagacaaaagcaaccagcaagcccaacactcgctatgttttgggtgcgatgcaggaagtcgacgcagactacacgcgcatcagcatagagaccgccctgcgtgtagcgaagcagctaggaaaccgcatcgaacggttcacgcttgagtttcacctacaaggctccgtaccactcaatgtgcacattcgtggcgtcagcgatgtagatcttcttactcttatctcatcgcaatttttgagctacgaccccagcggtccgcgaggaacatcaggcgcctactaccccacaaccctaacttcattgcagcaacttaaagacctgcgcgcacaagaagaatccgagctcgaaagcgcctttccagccgcgacagtagataagcgcgggagcaaagcgatcaagatctcaggcggctctcttccccgctcaattgatgttgtgccttcccattggtatgactctgccgattaccaacgtagtggagcattccatgatcggggggtcatcatcttggacaagaagaacaatgccacgatgactaactacccatttaagcacatcaaggaagtttcagatcgagaccttgttgccatgggttctttgaagaaagccattcgactcatcaagaatatcaaggcagacgcggatcaggacatcatgctcacgagcttcgaccttgctgccatcatgttccacgccgacatggcagctctgcggaccggacattcgtatgagctcgccgtcttagcggagactcagcgccatcttgacgacctgtatcatcgtcccgattacgcaaagcttttactcgtaccggatgggacgcgagtcatctttgacagtccagccaagtggagctccttgttgaccctttcttgtgaagtagacaggctacttgaagccgtcgcaaacgagaacagcatcggacttcctgcgaacaaccacagcgagcggcgccaactcattagatccgttcacttatga

SEQ ID NO: 512276 - DNA, 798 bp, Stenotrophomonas maltophilia
gtgtctttgaacaacgcccaactcaaatgtgaagattttctacaggagcagatccgccgaaacgaggccgaagacatcgttccttcggaaagtgaggtggctcggaatatgctcagccgaggactggaacttcgctcggtctaccaggaacttgagcggtccctgggttttgacggcattgagtggaaggtatttcttgagttctgcgtgctcgccactggagcgcattggacgcccgagaagaacatcgccgatcgttcagcccgcaagcgcttggacaaagtcaatgaggccattgctggcctggcggatcacatggcggaactactggaagaaagggaacagataaacaaccgcggaccgttcagcagtgacaccttgtatcaccctgtcgaagtcatcgaccgggccagcgaatgtaatgggcattacaagtctttcctgaaggaaaggctggaaaacctctgtcagttcgacctgaagtattggccaagcctctcggaaatgattcgggccattgggactgacgcagagaatgccaatgtgcactcccatgacccccgctcggcggccatgtcccagacctcacgcccgtccgtggctgactttgttcgagccattgaagaagggatcgcggagaatcaacacgcaggcttgggtgggcttcctgcgtcgttccgcttgtccgatgaatcgatcgcaaccttggcgaacgtgctgttgaaccttcccgcggagtccgccaaggatgccaagtatgtgaagaatatccgagagcgagatcgtcgacggacctaa

SEQ ID NO: 512277 - DNA, 561 bp, Stenotrophomonas maltophilia
atgaagccagagcagcttgaccacgtcctgcgcgcagtcgatgaggcaaccgggcatgagcaccgattcctactgatcggcagccaagccattttggctcatctcgatcctagatatttttcgtccgatgttttgttcttctccagggaaatcgacatcgccctgttggatgaaccgcaacgagagtcagaagccgttgcggacatcatcgacaagaacttcggcgatgcctcaatttttgaccggacttatggctaccatgcagatggcgtggaagtcgccacagcgatcctagctcctggttggcgcgataggctcatcccataccaatcaggcgatgtcgcacgggatacctttatggcgctttcgtatgaggacctgctgatctccaagctctgtgctggccgcgacaaggacatcgattttgtcaaaggcatggctgccattgggcatcccagactgtcggaggtcgaaaggctcctagagacccttccagactccgctaataagcaccgtgcgatggcttggtggagtgcgttttccgccgtaaacgatcgctag

SEQ ID NO: 512278 - DNA, 2616 bp, Stenotrophomonas maltophilia
atggcaaagagcaattcatcagtgcccacaagtttggaaagctggctgaactcccgccccagctggttacgcatggcagcagatgggctggtaagtaatcggcgtatgccgacagatcaagagatggacgccctcgcctctcactgtttgaaggaggcagctaaaacattggaaaccccgcacccggcgctggcgcccggcgtgattttgggaactccgagcgtaggcgcgctgcgcatcgacgctttgtccgccatccgcggtgtaaacgccatcggcaccaatgccatcttggatctatcccaagggcacatgaccgtcgtttacggggccaacggctcgggaaagtctggctatgcccgtcttatgaaacacatctgcggagccagagcaaaaggagcgatccacggaaacgtatttgggaacgccactgaagccgcttccgcgcaggtgacggtcaccacagcgagtgcgaccgacggaacgctggcaacgaacaccctagactggcacgcggcatctggcccacaccctaagcttgccgccgtgccagtattcgactcagccactgcgctggaacttggagatacggcaagcacggccacccatctcccccgctccatgcgatttgtcggcgcgctcatcactatctccgatcgcgtcagcgaacgcttagaggcccgcgctgcacagcttatctcccaacttcccgtaattccggtggagttggcccagacttcggcttcggttttctttcaaaaactgaagcccacgctcaacgatgaggcaattgtagaagcttgcgcctttccggacgcgttgcttcaggagcggcttgcgctcgaaacagcacttgcccaggccaatcccgccgtcgcacatgcgaaagcaatcaccgatcttgagcggctaaccaagctggaagaaagcgcgtctcaactggcagaaagtctgagtgatgagaagtcaaaggccattgtctccgctcgaacgaacgcgaccctcaagcgacaagctgctaccgcctacgcgactaccttcatcaatggcatgcctttgaagggggttggaggtccggtttgggagacattgtgggaagcagccaaggcctattcaacgggggcggcctaccccgaccacacctaccctcatgtggaggagggggcacgctgcgtcctttgccagcaatcgctcaattccgatggaagggagcgactagccagctttgacgactatctcagtgccaccttacagaccgaagcaaaagctgcagaggacacactcaccacattgatggctgcacttcccaaggaggtggtggagacaagcgctgcctggcaatcgcagtgcgccgcagctggactcaacggcgcacaagccgcgacgtttgcccaagaggtcaatgccaggcttaaggcgctgggtgttgccactgacatggccagcatcccgttgatcaagtggtcggcatggacagaggcactggaccatacgaaagtcgctaccactgcccagcgcgatgcactggccactcttctggatccaagcggacgtgcccagaaggaggcgcgcctccgagagctcaaagccaaggaatggctctgcggccaagttgaagccgtgcgagcggaagtggtgcgtctcaaaaaatttacagttgttaaatccgccattcagctcacccttaccaggtcactcaccataaaaagcaatgagatcggtgaagcagagctagcgaaggggtattgcgatcggttcaacgcggagttgcaggcgcttggcggcagcagcctgccggtgcgcatgaaccacaaggcctcgggaaaaggcatctacagcttctacatcgagttaaaagacgccaagtcccacataaagaaccgagaaatcctgagcgaaggagagcagaggatcgtggcacttgccgcattcctggccgatgcaaccggtgcagatagaggccttcctgcgatattcgatgatccaatttcatcgttggaccaacgttacgaggaggcggttgcaaagcggttggtggatctagcagaacaccgccaagtcgtggttcttacccaccgactatcgctgatggtgctactgaggagtgccgccgaacaacggccctcttttggtctttcgcctgtggaagctcatgtagcttcaattgcacgcgatggcgcatatacgggcatgccagcaacgatcgactcgttttcactcaaacccaagtcaggcttcaacaagatggtcagcgaaataggatccatcaagaaatacgatagccagataagggctatcgcgctcaaagctgcttgcagcaacttccgcatcctcgttgaacgctcagtcgaggacgatctttgctcaggcatcatcaatcgctatcgccgtgagattaaaactctcaataagctcaagcgattaaacgcgatcacgcccgaggattgcgcactgatcgaggccatgatgacaaaatactctgcattcgaacattcccagccaatcgagactcccgcctggctgcctgatcccgatgaactgttgaaggacgtccaaaccatgatcgagtggatcaaaggttttgatgagcgggcacacaaggccgcagctgcgtga

SEQ ID NO: 512279 - DNA, 1056 bp, Stenotrophomonas maltophilia
atgaccgacgaactgccatcctcgaccgtccctcaaagcactaacttggctctcatgaattttcccgaggaccaagaattcgttcagagatttagcgacgaaatgaccgacgccatcatcgcctgtgggcggttccttgacctcgaacgcttggcgggtgttacggtgggatacgacttcgacgccgccctttcctctgttgacctgggctatgaatcagcgatcgctaggcaatacacgaacaatggcgatgttattgccgtagctaaagcaatgaacgtgcggcgggatggcaaagtgatgtcgcacgtggtctacaacgctaatgccatcgatgcattggtagatccgacccacgagcatcatctggatgcgctccacattattgcccacgagtttgggcacgtggccgagctgaagtggcgcgacgaggccatgccgggcttgatgctgactaggccggagggcgaatgggtggactttgccctcttgcagaccatcctcaccgcctgggaagaatacgcggcctgtcggatgacggggatgatcggtgactctgaagcgttaaaacatcgctacgctcaagaattcaaccgggcggcggaatactcattggcgcgtgcccaagagcagataaagcaatatcgcatccacggagatgttgaccgactcctgatcgaggcgggcgagcccatcgccatgccgctcaagatggccggctacctgctggggcacttggacgccattgaggcaacggactcattagaggagctgtgccccgcctacgccaagtcccacctagtcactttgatacccgcccttagagcggcactgcgaaccgtttgggaagaacgcgaggctgggaagggcctggcgatcttcgatccgctgaaggcacttatgattcaaacctactctgcggcgggaatcgaactcaaatcccttgaggagggtgaaggctactacgtccacgtgcccttcactgccgagaccatgccaaatggggaggccgacatgatcgtagcccgtctcagacagcaacttggattcgactaa

SEQ ID NO: 512280 - DNA, 132 bp, Stenotrophomonas maltophilia
atgcccatcaagcctggtccaaagccgattgcaaagtccacggggaagcccgatcagcggcgccgggataacaaggagacacccggcaacacaccctctctcaagcctcacaagcacaagaaaggcagctaa

SEQ ID NO: 512281 - DNA, 216 bp, Stenotrophomonas maltophilia
atgaccacaggcaccatttccgtcaagtgccgttgcggtagcgacaagttcaatattccgagcacccggcgtccttctgacacgatctcctgcgccaagtgcggggctaccggaaggtatggggacgtcatgcgtaccgccgggagccaggcaaaagccgcagtggagaagcagctcaaggacgccttcaagaaggcgggcttcaaactcaagtga

SEQ ID NO: 512282 - DNA, 2898 bp, Stenotrophomonas maltophilia
atgggggttttcgtgggtcgcgcgaagaggcagctttgggcggcactagcagtgggcgctttcaccgtgtcagtggcggcgagcaccccggaagcggcgtcgcacgccccggcggcagtctcgaacccggtggacatcccctttgagcgcttcacgctccccaatgggctgcgtgtcatcgtgcataccgaccggaaggcgcccatcgtggcagttcacctgtggtatcaggtcggatccggtgacgagcctgccggtcgcaccggtttcgcgcacctcttcgagcatttgatgttccgcggcaccgagcattaccgcgacgcctactacggcccgctgcaacgcgtcggggccaccgacgtcaatgccacggttacgcctgagcgcaccaactacatgcaggtggtcccatccacagcactggacctggcgctctggatggagtccgatcgcatggggcatctgctgggtgccatcgaccagaaggcgctggacaccgaacggggcattgtcgagaacgagaagctgcagcggcgtggcgtgccttacggacaggtgtgggagcagctctcccgttcaagctacccgccggggcacccgtaccatcattcgaccttcggatccgcacgcgatctgcaggcggccacgcttgccgacgtccaggactggttccagacctggtatggcccaaacaacgcggtgctggtgctgtcaggcgatgttggcgttgaagaggccaggaagaaggttgagtcctacttcgggcatatcccatcggcgcctgacgtagccaggtcttccgtggacgtcgccaagcgggtttccaccacccgggaaaccttgtccgatcaggtccctcaagcgcgtgttcatcgcacatggaacatcgcagctcgtgggacgccggactttgatcagctgcgggtgttggcttacctcctgggaggaggcaatgcctcccggctgggcaagcgcctggtgcactccgatcaacttgccactgacgtgacggcagaggcaggggggcagctcggatcgcgactcatgatcgttgccaacgtgcgcgacggtgtcgacccgtcggccgtggaaaccgccatcgaggtggagcttcagcgtctgctgaaggaaggtcccagcctcgatgaggtgcaacgtgcgcaggccgcgatgcgggccgagttcgtgaagagcatcgagcgtaacggtgggatggacggcaaggcagaagtgctcgccgcctgtgaggtatttgaaggcgatgcaggctgttaccggaggtccgccgacgtggtggcatcggccacgcccgaccagctggtccgcgtcgctcgccgctggctggggcagggggatcacatcctgacggtcattccggacgcccgcgctgcgttcgctgaggaggccgagccggctgacgcggtgtcccacgcgcaaagcccaggcaaaacccatcgcgctgcggcaccgggcgtgaaccgcagcgcagggccaccgtttcctgaaagctatccggagttgagattccctgcgatcgagcgggcggcgctgtcgaacggcacccacgtgatcctggctcgacgggaggacgtcccgcttgttcgcatgtcgtatcaattcccggtggatcccgcggcaactgcgggtctggcagacatggcgttcagcatgctggcggagggggcaggggattacgatgccctgacgttcgcggcgcgcgctgaatcgctgggggcggagctgggttcaagtgtcgacgtgggcagcggcgcggtgaccctggtcggtctcagagacacgcttgacgattcggttgcgctgtacgcggacatgctgcgccgaccgcgctttgagccggcagcgatggatcgcatgcgtgccgccaaggtgggggcgcttcgggaggaggcggctaacccacagcgcttggccacgagcctgtttcctgcgctgctgtacgggctcgatcatccgtacgcccaggccttcaatgcaccgggcacagtggcctccgttgaggctttgcgccgcgatgacctggtggagttccaccgtgcctggatccggccggagcggggcacgcttgtcgtggtcggggacgcgacgttccacgaactgatcccggtccttgagaggcatctgggcgactggcgcgggtcgggtgggatccctgaggtgcgcatcgacgaccgcctgcccgcgcaggcgaggccacgggtgtatctggtcgacagccctggcgccctgcaggctaccctggtggccgggcaactggtcgcgccgagttcagacccccggacgttggccttcgaggtcgccaattccgtcctgggaggatcgccaagcgcgcgcctcaacatgaatctgcgagaggccaagggctggtcctacggcgtgatctccagtgctgccaatgccccgatagcgcgaccctggcgagtggtggcgtcggtgcagtccgaccgcgtggcggaggccatggcggagattcaccgcgagattgcggagtacgcgtccggaccggcgcctgccaggcaggacgaggttgcacgcttccgggacagccaggtgcggcgtctggcgggcagtttcgagacgcgggaggccgtcgcctcggagatcgcagacatcgtgcggttcgaccggccagacgattggaccacacagcgcagcagcgccctccgacaactcgatctcaacgaggtccgggccgctgccgccgcgctggatgccagcaaattgacgtgggtcgtggcgggtgacttgtcccgtatcgaggcacctgtgcgcgcactgggtttgggagaggtaatggtgatcaatttgcagggttggcctcgggcatcgcagcctgggaaggcggctgcaattccgcaactcgacaggtcacggagatag

SEQ ID NO: 512283 - DNA, 729 bp, Stenotrophomonas maltophilia
atgactctttcgaactctgtgtactcggtgtcgtctccttacagcgtgagaagagtgctgttggttgagggtgacattgaaagcgccggcatacttgaggctcaacttcgaaaggaggggttcctcgtagcggttgctgatgacggagagcatgccttggagttgttcgcccattggcaccctcacatagtgcttctagagacgatgtcttccaggatggctggtaccgatgtgctcgctatgatccgcggaagggcgagcacacctgtgatcatgatttctgcgatcgacgatgagcgggataggctcggtgcgctgcattgcggcgcagatgattacatcgtcaagccatacagtccgcgggaactcgtcgctcgtgttcatgtggtgttgcgtcgcgtttcgcttggatggggaatggatagcatcctccggcagggaaggctgattgcagatggagtggcgatgagggcactggttgaatcagaggcgtctggaccgccggctgtcgtcgacttgaccctgaccgagttcaacatcgtttatgcgctactgcggtccccttccagagcattcacgcgtggagagctgctccaaggcgtcgctgccgatgattcgtccagtcgggttgtcgacacgcatgtccacaatatcaggaggaagctcaagcatcatggcatcaccggagtgctggtgacggttagaggtgtgggataccgcttcaaatga

SEQ ID NO: 512284 - DNA, 771 bp, Stenotrophomonas maltophilia
atgtccgatcgacgccagcccttcaaaggccaaccgaagcctctctatcatgcgctcgcgcagtcaatcaccattgacattgagcgcggggcgcatccagtgggaagtactctgccgtccgagaagaatctcatgtcagttcacggcgtgagccgccaaaccgtgcgccgggcgttggcattgctcaggttccaaggcttgatcgcgtctcgcccaggggttggctcgatggtgcttccggcgccacaggaggtggaggcatttcccccgatcatttctgtagatggccttcgcgagcttctccgaaggacagagcttcaccacgtatctttgggcttgatcaccgtcaatgagcgcctctcggacgttctggagtgccggcgtggtatccagttgtctgaggcttgttttctaagaaggcggtcagctgcttcactgccggcgggcgtcgtgcgagtttacctccatccggactatgcagcggcccagatcaccccgcggatagcgcgtgggccgatctatcagaatctggagcggatgtacggcatagccgtgacggaagttcggcaagaaatgactgctacggttctcgacaaggagaccgccgatctgcttcaagtggcgccaggtgatcccgcacttcaagttgttcgcttctactactccacagccggcaaccctgtcgaagtggccgtcagtcactaccccagttcacgctttcgacagagcattaggtatccgctgcccccggcaagttggcaggcagggtga

SEQ ID NO: 512285 - DNA, 1578 bp, Stenotrophomonas maltophilia
atgcgcaagtcatccgctaagcggcgatctttgcgatgggcacttctccgttcagcgccttttcttctggggatagccgtggtcgcgagcactctggcggcggcccagttggcagtcacgcagcgggctaaagttgaacttgccgactatacggtcgttctcttggaacacgctcaagatgttgcccgtgccggcgttgatgggttgaacaaggcgctgttgatagatgccgcgccctgtggagatgaggacttggccgagctgcgtctcatagcgtttcactcccgctacatcaaggatgttgggagattgagcaacgggcaattgatatgtacagcaatatgggggcgccttcctacgcctgtaaagcttgtcgctccgaatcgcctcgttcgaggctattcgctctggcggagcgtggccgcccctggcgatgggcgcatcaaggtggacctcgcgtcgtacggaaacgccattgtgaccacggctccaacagcgtttgagcgaatggcagtgcccatggatgggggcggagcgttggtggtcacgcgagacggcagacaccggtttcaatcctttggcgcagtgcaggaaatgtcgctgggtacgaacggggcgttgactccatctgccgggcacgtcgctacacgcgcctgcagcagtgagttcgatatctgcgtcgttgcccaaaccgcatccggcagcctatggaacgaaccttcttggacaattacgtccgtccttgcgctggctctggctggaggaacagggttaggggctctactgaaggtcttccaagggcggcgggaagctctggacctaatgttgactcgcgcaatcaagcacggagacatcgacctggtctaccaaccactgcggcgcttgtctgaccgtcagatgatcggtgtcgaggtcttggctcgttggcggacactgactggatccgatgtttcgcccgacaccttcgtacccatggcggaacacctgaaactcggcactgagttggcgaaggtggtgatcgcgaaaagcctagatgagattggatggcgcctacgatgtggggacggcttctacgcaagcatcaacctgtctgcccaggacattctgagcatcggactaagacagtttctggttgcgcagacaaagatttttggcgtttcagcatccgccatagtcttagagctgacagagcgatccactgcctctcagcagctgctgatagaggcgctgcgcgagctggagcaggcgggcttccgggtgtacctggacgactttggaactggctactcaaacttcgcctatctggctgaccttcctctcgcagggctaaagatggaccgccggctcaccagagctgcaggcactcattctccggcgagccatgccgttgaagccatttgcgcaatggctaaggcgctgaagctgccgcttgtggccgaaggcgttgaaaccgagcagcaggcgattgcaatgtgccggctcgttccagacgccgttggtcaaggctggctcttaggaaagccgtgcgaggccggtgcattgcccgcaggtgagaagtttgaagagcgacatctttga

SEQ ID NO: 512286 - DNA, 1998 bp, Stenotrophomonas maltophilia
atggactcgatagtcaaagagagcatggagcgcattcgactctccaaatccatggcaagcgcgaacatgcagatcagtatctcgttgcgtgaactgatcatgctgcaggacaaggatgtccaggcatccttgatgcgaaagatcgccgagcagcggaaggtgtacgacgaggctcgtgatgccctctacgcaacccctgccgacgaggaagggaagaggattcgtgccgtcatcaccgaaaagcgactcgcagcgcgtcgggtcaatgactcagttgtcgaggcggcctcgcagggtgacgtagttcaggctactaagcttctcgcagaaggagatgtgctcctcaatgagtggcaagctgccatctttgccaacgcggagcttcaggagcgcttggcggacgcaagctatcgtgaggcacaagccgcgagcgccagcggtcgcacgatgcttatcacagccgggcttctcgcgatcgtgctcagcatcgcgttggcaattgcgatcacgcgcagtttgaccgttcctttggagcaagccacaagaactgccaatgccattgcattggggggcatcgagaacttaatcaaggtggagggacgagacgagacagcagcactgttgagaagcatgagcgcgatgcaggatcgcatcaaggctctcatcgctgatcaggaggaaatggcctctgctcaggccgaagggcggacgtcccatcgtattgatagctcccgtcatccgggtgcctttggccagctcgcaattgacaccaacgccatggttgagcgctccaacatgctgatcgaacagatcgtcgacatcgctcagcattacgcgataggggacatgagcgtacggatggaggctctgcccggagatcagaccgctatcacagaagctatggagaccacacgaagcaatttgttggcgatcaacgaggagattcgtcgtcttgttcaagccgcggcattgggggacttttcacaacgcggaacttcagatggctttagtcacagcttccgagagatgattgataaccttaaccagatgttcgacgtcagcgaccgaagcctttcgagtatcgcgagtctgctgggggcggtggctcaaggcgatctgacctaccgtgtagccggccagttcagtggcgttttcgccaaaatgcgtgatgccgcgaactcctcctcggagcagcttggcagcatcgtacgaggcatccaggacggagccggagtcattcgggtgtccgccgcggaagtgagcaagggaagctcggacctgtcacgtcgcacggagcagcaggcggcgaacctggaggagacggctgcgtcgatggaggagttgacttccacggtgcgccagaacgcggatcatgccttgcaggctagcaaactcgcttcggacgctggtgaacttgcccttcaggggggccgcgccgttgatcgggcaatggaaaggatggaaaaggttgaggggtcgtctcagcgcatcgcagacatcaccacggtgatcgatgggattgccttccaaaccaacatactagcgctgaacgcggccgtggaggctgctagggcaggggaccaaggtcgggggtttgcagtggttgcaagcgaggtccggacgctggcccagcgcagcgctgaggcagcgaaggagatcaagcaactcattgatcgctcggtccaggatgtggtcgacagctcgaacgaggtccggcagacgggggccaccatccatcaggtcgttgagagcgtccagcgcgtacgcgacatgatcacggagatatccgcagcctcccaagaacagactgcgggcattgaacaggttaaccaggcggtgatgcagatggacgaggtgacacagcagaatgctgcattggtggaagaggcctcagcagcagccggtgccgtcgaagaccaggccgatgggcttgctcaggcagtcgcattctttaaggtaaatactgagttccgcctccgtttggttcacgccagttga

SEQ ID NO: 512287 - DNA, 948 bp, Stenotrophomonas maltophilia
atgaataatgtgaattatgacgttaagtcgagaaatattcttgtattgggagcgggtgagctcggtatgccggtgctgcgcagtctggcgcgtcgtgcgaaggaagttgatggagcaaaaataagtgtcctgcttcgcgaaagtgccgtcaaatcgggcgatccgtccaagcagaaggatatttcagatattcgtaatgcgggtatcgaaattgtgctgggggatttggtggatgactcgatcgatgagttggcttctctcttctcccgctacgatactgtgatcggctgtgctggctacgctgcgggcatcaacacgcctatgaagcttgccaaggccgcgctccagtctggcattccgcgctacttcccatggcagttcggggtggacttcgaggcgatcggtcgtggtggtccgcaggatatcttcgatgcgcagctggacgttcgcgagttgctgcggtcgcaagacaggaccgattgggtcatcatctcgacaggtatgttcatgagctacttgtttgagcccgagtttggcgtggttgatctcgagaacagtgaggtccacgcgctgggtagtcttgataatgctgttacgctaacaacacccgatgatattggccgcctaactgcggagatcgtgttctttgatccaacgattcgtaatgagattgtcttcttggctggcgacaccgtcacctatggtgaagttgcggataaattggaggctggtcttggtcgatccttcaagcgttccgtctggacggtgcctttcctcttggaagagctgaagaacgatcccaagaacatgatgcgcaaataccgggctgcattcgccatcggccgcggcatgtcttggtcgaaggccgggacatttaatgagcgcgaaggcattccggtcacggacgtgtcagcgctgatcgccgctgagctgggaggtgttaaatag

SEQ ID NO: 512288 - DNA, 213 bp, Stenotrophomonas maltophilia
atgcacgccttccaggattggacgttcaacgccaatggcagaatcattaccgccagagtggaggtggacggaagcggaggtggaaccatcactcggtttgagactcgtcctggtcccgctcaaatcggcctttcgatcaaggtcaactctcagcaggaggcggccaccaagctggagcagatccttactgatctattgggcgctggctggtag

SEQ ID NO: 512289 - DNA, 204 bp, Stenotrophomonas maltophilia
atgggcaacgttcgcagcaataagaaagaaccacgcttagctaacgattggcgccaggccaccgaggccataccaatcttgatcgtcgaacggaacgaagcttccgtgatgggcaccgacgcgttgatcgctgcagccaaaacgggcctcaggaacgcctgcgagaactaccggacggctttgatcgagcatcgaagggcgtaa

SEQ ID NO: 512290 - DNA, 879 bp, Stenotrophomonas maltophilia
atgaggataatcatggatttggactcttacatcgcgcaggtccagcagcttattctgaccaacattgacccgcgccgtgggcatctaactgtcgcatcgctcggagagcgccttagtcgggcgaatcttgaggcgtcttggaaggatttccagttcaggtcatttcttcgctttattgaagaacttcagcggcgcggattaattcgcttacttcagacggataagaaggcctgggctgtcgccccaacggacctctcgagcctcccagcctccgtggcgcagaagagctataaccccctgcgcaaggcagtgtgggccgcctttgttttcagcagcccaacaggtcgacgttttttgcatcgagcgactggagcgattcgactcggtctcgaggtctcccccaccccaattgacgaatgggtcgaaattcgtccaattgctgacactgagcaaaaagcttgggcacgcgagttcgccgatgctcatgtctcaaaagatgaacatgttagtctggcgcttgaagggcaagattggcataaatcattcccggtcgctctgagcgaacactcgtcctttaagcttcgcatagagtggaaccggtgcagatctttaaaggtatcctctgcagtcgagacttggggactaagaaactcggttcctctagagcttctgttcgtctcgcctgagatcgattctttgccgcagcccgcccgatccggaagttcgctcggctgcctaagcgaccaagaagcccgtcagtgcatcttgtcagcactagcaaacctgactacagaacaacttctcgctatcccactgccaagcagcgtgctgcttgaagcagccaagaagcattttagtattccgcgcggcttgcattga

SEQ ID NO: 512291 - DNA, 744 bp, Stenotrophomonas maltophilia
atggctcacatcatctacgttgggcatcccgcagaaaacaccatcccggggctagcggcttgcattagcggcttcttcggttcggcagcattcaagaccgccaatccagaatggtcttatcgaatggcatgttacgaggcgaatagcgccttgaagcctacgaatttttgctcgctcgtagggaccaacatcggcccggttctgttaatcaggccaattcgaaatgatgactacgaggagattcagcgccgcctcggaggaagaacgccggtaagtctacatgacgcttacgacagcgattcctttgagcttgcgtggattgacgtaaagcaagcccacgataatggcgaaccgctgttccctgccaatgtcattactgcactacttctcatgaacaagcttgatgcagaaagaaggtggtcgggccacaatgacaaaggctatatgtgggcagatgatctaccgaatgggcggggctttgatgagaagttcactcagtacctgggtcaagttatcaaccttcttttccaatccgggttaattatcaacaagatcagcaaaggaaagaaaaaatgggcacttaacccagaaaaaagacgtcaaatctacaatatattgagaaagcggagctttcaagagttcgacaccgaccttgctggcaagttatctcgaggagcagggagatattctgttcgagagctagactgtcttggagattttttagatcgcgagcagacggactga

SEQ ID NO: 512292 - DNA, 657 bp, Stenotrophomonas maltophilia
atggatgtagccacgccgacacgcgatggacgccatctggtaccgatgggcctcttgatggcgctgacggcctgctcgccttacgcggacgcagagcgtgacgtcgccgcaggtggacgcggcctggccaagctcaacccgtcaccgcagcagggctacgagctggtgctgacactgaaagacgcgccgggcccgttcgcaatggtcgagggcgtggcccagtacgacgccagcaactatgcagcgtgtggacggatcgtgcctgcaacgggcactgcgggccgcatcaccagccaggaacctatcgcgctgcgccaggtgggcgagaacgagtaccgcggcacgttctacctcgaccgcatgcaggacgaggattactacgggcgtggcgtctgccattggacgttgacgggtgtcggtgcgatgttgcgcgcgactggcgacgccgcaaatacccgctttctgacgtttcccaaaaaggaccgcatggacgcaggttcaccgttgactctccactatccgaaggttgcctttcctcgcgcggcgcttgctgccaattaccctgccagcggcagggagaatccgtcggagtacaaggaagagcttcgcggcgcgctgttctcaaccacaaccactgtgcggaagctctcgccatga

SEQ ID NO: 512293 - DNA, 666 bp, Stenotrophomonas maltophilia
atgtcccgatggcaaacgccacgaagcctacgccagagccgatggcggcgatcctggcgcaaatgcttgcaagcattggcgcctgcagcagctcgctggcgtgctgggcaagcgggttgtaacccggcgcgaacagggcagcgacgctggtccagaacaggaaccacggaagcgggagcagacccgcagacagaagaagtcgattgcggcgtaacacgtccagtgatccttgtagcggcctgcgccggtgggtggagtccgttcaaacgccgcagaaccttcctgctgcgggcaggacagttcctggtgactacaacggtagtcagattctgcgtgacgccccacggggtcaataggcagaaagtcactcatgcatggaggcgaattacgcggcatccatcagcgaccgtcagaccaatgctgtcgcatttgccgcgccctacatctctgacggaaggttctgacgactccgttccagaagtgccgctgcgcctagcacaccaaggctctcgcccctttccacgctatgcgacaatgccaaaagcgtctcgggttttggcggcattgacccctacccgttggcattccgaacaacagcaggtaatcgttactgcgccaccgtgcatcggtggtcgggactcgaaaacccgttttgttgggaagtag

SEQ ID NO: 512294 - DNA, 903 bp, Stenotrophomonas maltophilia
ttgggggaggtagactctagccaggagcgcttcgcccgtaaccagaccaattcagccaaaatgaagtgtcgacttccctgtatcaggtgtcttcaagacagtgaaagatttgactacgtcatcgttgatttggagtacttcgatgatcgcctgtcgttgatgaactgtcctaatggtcacaactactatgttcaaatccagaatccaaagtacgaagtgctcttggcatcgggtgcagaagcgctttccgcaggtttcactctagaagcctgcctcacctatggcgcagctctcgagcgctttctggagttcggtctaagggcgatgctcttgaagctgggttgcccatgggatctcgtctccgcacaaattaaggcgatggctgcccagtcggagcggcaactgggcgcgttctcagctgtttatctccaggtctgtggagcggtatttccgtcaccagacactgcttctgagaggaacaagttcgtccatcgaggcgagattcctgatagtcaacgggcaatcaagtactgcagcaaggtctatgaggcaattttcaagattgcaactgagcttaagaggcactgtgagccagagttaaaagccgcagtaacggaagagatgaaggagcgggcggctttagttacgcatgagaattcgcccaccacggcatacttccgcatgatctacagcatctcctctgatgataactgctcaacgtttgaagagtcgtacggtgcgtatctagagcatcagaagggaagtagccaacttcttgatctgccccgggaggctgtccttgaaatgcggctcgccagagcagcgcagcgttggcccaccaacagtcctcttatccagcgcttacagaaggaggaaagtgagtcggatggtgagtctaattag

SEQ ID NO: 512295 - DNA, 597 bp, Stenotrophomonas maltophilia
atgagactggtgagtgaaatgcgcggactgccaccggaatttgaggcagcaaagaaaacgctgcttgcgacagtgcgtgacgcttttcctgtagtcggctcattccggctgcaggtgagtgcgtacgtcttgatgctgcttctgggaatggtgtgtggtgcatggctggtggggctggatgtacttcagcccactgcccaggaattttggagaggtgccacaactgctttgtcggtgctcagcggcttcatggtggcaacaatggtgttcaccggaaagatcgaggccgcaaaaagtctcagcattacggagcttaggcaggtcgctcagaaggttaattacctattgttctaccaagtggtgacgcttgccaatcatttgtttgcgatattgctgttgctggtcgtgccgtttgtggctgcgcgttattccattatgggttcggtcttggcggttgtcggtgtgggtttgatcgttgcatcggtcttgaggagtatgttgataccgatccaaataattgaacttcaccgatttacccatgcggcattactcagagataaaagcaaggaagtcgctgcccaggcggaagaggtgtga

SEQ ID NO: 512296 - DNA, 945 bp, Stenotrophomonas maltophilia
gtgggcacagttaacaggacgttgttgctgaagcgcgtggtacagaagccgtctccacgtttcgcagagctgccaaaggtcgagcttgacgtttggatgaaagaggttttcgaagcgagtgatacggtctgggatcgccattacccacgcagggaaaaggttgtggatggtcggcgctgtatatttttcaagcaggtcgagaggaaggggagggcggtgcttttcaacgcctacttctatgtgtcaggtctaacccccgatcagatttcgttggatgatttggccgagaccattagcgctgagaaaattgtgggagaggacgggacacgccgggatattgctgagagatttgccgttctcgtgatcggcgaagtgatcattatggaggccggacgtattcccggaagtggtgtactggcgattcatgcgatgcgagatatgatcaatcgtcacactgacgcgcacgtacctgcttttgtactggaagacgctccgacacaaacattcaagcagatggcgaagcgacacggcggtgttgattcggtgaccgcacggcttgcacatgactttgttgcagagcaggacacttttgggcacgcaatggagacaatcgttgcagaccaaggatttagcaagttcaaggtcgtcactaccattgaatctgaaagcgatgctggacttgacgtagacaaggttgaggcgattttggacgagagcgagggccaaactggcctttcaggcgtgaccgtcaagttcaaagatgggcgctctttgggtgacatggacaattatcgagagaagctgtctgtcactgttaataccactcgtccaggtgtgccaaacgtcaacgagattgaggcggcgattgtgaagtacttgaagacgcttgttaaagcggacgatgagaattatcaactcatagatggttatgggcaattcacatga

SEQ ID NO: 512297 - DNA, 144 bp, Stenotrophomonas maltophilia
atgcgtgatgcagtgaaggacggcgtattgacccaggacgagcgtttcggactacatggccttaaacatcgaggcgtgaccgacaccaagggcagcaaaaaggaggcaagcgggctcaaggccggcgccatggtgcacctttga

SEQ ID NO: 512298 - DNA, 975 bp, Stenotrophomonas maltophilia
atgagtggcaacagtcagtacagaatgattcctcgcgttccgcttcgtgcgcccgaggttccggaggcacataaggcttataacattcgcgccaagcaaattcctgcctgggaagtccgaaaagagatgcttcgtggatacccgcgccacatgtacaactatctccggtttgagccgacgtcgccagagagcatgcgcaatgtcagtacgatgctggtggattccaagctgtacttgacagaccctgcagggttcaatgatccctttgaattcaagaatcaggtcatcgtcgatcatgacctgatgcttgcccatctgggcaagatgtttgacttcgccacgcaggacatgcagcgtacgccgctagagcggcaaatcgcgatagaaggcgcactcaagcagatcagtgccgacccgtcgggcgctcttaagcaggcattgcggacagacaaacatggtgtccattgcttcacacctgtggcaaagaatctattgatgtggtcgcactacgcagattcacacaggggcatctgccttcaattcactccttccaaggacgtcgccactttcatttgcgcccgagcagttgactattgcgatgagtttccccgcctgcatattccgtctgttccgcaagaggacacgaaggccatgatcatgcgcaaagggaaagtatgggaatacgaagctgagcggaggatcgtcctgaccggaatcgacgggcgattgatgagctttgccccagaatctcttactgccgtcatcttgggctgtcgctttccggatgcccacgcccaaaaaattagacagttgctgaacgaaagagcggaaagaggccaccctcccgtcaccctgtatcggatggcgccaaggaagaactcgtatgcgctctccgcgcgaaagacggccctaatcgatgaagattcaggagagatttccgggtctgaagcggaagaactggtatgggcgaagtaa

SEQ ID NO: 512299 - DNA, 180 bp, Stenotrophomonas maltophilia
atggacgcttggaagaagaccagctatcccctgccgccgctgctggaaagcagccgcctgtccgatggacggaagggcggcctgtacggccttgcctttgcaagcttgctgatcgcagtccccgttctactggcgggcttggtagtgctcgcctttacgggtttcgctgtggcctcgtag

SEQ ID NO: 512300 - DNA, 828 bp, Stenotrophomonas maltophilia
ttgaaccaaacggcacagtaccgaaacgggcccaagcaggtgcaagtaccggaagctcccggtcttgccaagccttggacagagggctccatcaacgtggatcgggcttctagggcgttagctgctgcattcggttgtgggccctgcatggcggtgtcgtggcaggcgtcgtgggtggaggcctcgccagacgaggacggtgctctcgatccttcagggctcgctatcaatacgcgggggcgcgtggtgcaggacgctcgcagatatctcccttcggatgcaacggccaggactgcagccttgcgtggctttaagggggcggctcgttctctggcggaggagtttgatcggaaggcgaacatgcgtgctgacgcgtgcgccacgcgtgtccgacgcgtgcagggctgggacaaccacaggttctctggcgcggtggttattcctgcggtgcggccggtgcggccggtactcctcgcgttgtctgatgcatcgctggacggtccgctggaggcgtggctgatggtctacgcagcccagaagatggaccaatggccaaaggtggaacttcatctgacagcgatgggtcatgcagcggaggtggcgagggaggccgcagccaagctactgggaaagggctgtagctacagggacggagcacgtgcgttcggaatgcgagaggccacgtatcggcagcttgtctccaacgtggaagccacgttgtggagttggttagagagggccagctacgcgttcttggaggagctcggtgaaagctgcgggtgggaggttggcgagggcaagctgtcgcacctgtccggagacgagtga

SEQ ID NO: 512301 - DNA, 279 bp, Stenotrophomonas maltophilia
atgaaccactacgacttccgcgacctgacgattgagcaacgcaggctgttggatgcgggcggatggatggctgacggtacgcaagcggctccctctcggcctgcggcccagcagctcgtgagccgaagtctccttgaggcctacccagcggtccatgaggacgatcacggctcgtttggggtaactgagtactacgtgccgctcaacgtccgcaccgcctggctggctttcaagtcgtacctttcccagcagggtgagctggtggaggaagagccgtga

SEQ ID NO: 512302 - DNA, 933 bp, Stenotrophomonas maltophilia
atgaagagtaaggcgcaagaggcggtgaggctggccgcagacttcggaaaaggccccatggacaacgactgggtacagttgctggacgagatttcgtcaaaacttgtgacagccggaaccggcacgctcgaatccttcgccatccgccgatttcctaagccgaacggcgaggatgggacagagttgatctcagccggaagcgatatccctgatgcggtgctagggctcgcgaactccgcttggcgatggtgtgatggagtgcgcgacgcgaatagggcgagattggttatttctgcatcacgagaggagtttgcccgggctgcattcaactcactgctctggcgcatcggtgcgagcgccgcaggcttgctgggggtaaaaaatagagcggatgaaattcgggagaagttgctaagccttaattgggctgatgctgactattttacccgcgagaatggaactcagctgatgctggacgatgggggcgggggcagcttcttcgaatggtgcgagcagctagattcggagcacgagcaacacgcgcatctccaacgtactgcgtatctaggggctagccctcctatcacatctgcggaactcggcgtagggctggctttgacatggatagaccaagcaatgcagtcccagtcttcgggagtcggcctcattgccgacgccgcccaagtcctctacgacgcgggcttccttgctggctacgagggtcggatcggcgtggaggcagaggatgcaacctccttcgcccagcgcggagctaatgcggcccaccgagagaatcggcaggctaaacagctggtgatcgcgacctatcgagcgggtacctatcgcagtaaggaccgcgctgcagaggaaatggccgggaagcttgttccctactctgtgcgtactgttcggggttggttgaccaaggcctga

SEQ ID NO: 512303 - DNA, 714 bp, Stenotrophomonas maltophilia
atggatcgctgcattatagaacttgcacgtgaacgggcgctcattgcccaaagcgctgtcgaccccatagagcgccttgtcgccaagggtgtgccggtacgcgcgctggtagccttggagcttggtggggtggagtggttggcgctccatcaggatgaacggttccggctctgctattacgacgaaagcggcgcagttgtggtcgaagatgcgaccgccgcaggcctagtcctgcgcgcccaagacttgggttggacagccatgcgggacctgcagccaggtgtcactccttggatattcgatcaagcctcctaccacttccgtaatggcgtccactggtacgcgtctgccaccgatactacggacgcaatgttgccccttggcttgcctgctggggtgctgaagcgagccgctaaggcgcaggaacgaaggatcgcatctactcggaaggctatagaagccaaggcgaaggctgtagctcgctcacgtaaacggatggaccgggaggaccgggcatggctgatcgagtacagcgctcagactcagctggataaggcaaaatcggctggcaagcacctcaccgccgcgcaagccagaaggacggcccgcgagctggtcgatgcggtagcagctcggtccaaagaacgccaagcgacgtctgatttcctggtgacggaaccaatgattgccatcgaggcccaacatgaagagtaa

SEQ ID NO: 512304 - DNA, 438 bp, Stenotrophomonas maltophilia
atgaagaaccagaagggcttcacccttatcgaactgatgatcgtcgtcgcgatcatcgccatcctggccgccatcgcgctgccggcttaccaggactacacctcgaagtcgaaggtcaccgctgcgctggccgacctggcctcgcacaagacccagttcgagatggagaagagcgcgggccgtgatccgaccgaggtgactgcgggcttccaagcgaaggagaccggtagctgctcgaagattgctgttgatgctgatggcatgacctgcaccatccgtgatccgggccgtatcggcaccagctccaccatcgccctgacctatgctgatgcgaaagttgacgcagccacgggcgcgatcaccgcggcgggtggtttcagctgcgtcaccgtgtcggttgacaagaagttccgtccggctggctgcactggtacctaa

SEQ ID NO: 512305 - DNA, 834 bp, Stenotrophomonas maltophilia
atgctggatgacatgatcaaaggaatcagggagtatgtgtctggcaagttcatgagtccgctaggggcagcgttgacaacttcatggtgcgcgtggaactacaagtttctacttgtggtgctctcgggtgaagcgccccttaggaagattcatttaatcaagctcatctatcaggaccagggctacatgtgggggcacatgctctttggccccctggctactgcattattctatgtcttcttctatccatacccttcgaactgggtgtatcggtactcattgcggagagatatggatgccctggcttccaagcgtgctgtggagaaccagactccactgacacaggaagagtcgcgcgccctgcggaaaaaattcaccgcgattgaattacagaacagcgccgagaatctaacgctggccaacaccatcgatggcctaaaggagcagctgagagttgcgatacaggaaaagaacactcttgcggcggaattggcttctgcacattcacagatgagcgagcaggccgctcgcaggaagctttcggaggatgagcctcgagccgagccaaaagagaagtcgcggtacccgggtggcctgagcaagctgcagtgggcatttattgacctggttggaaggtacgatggcccgatgccgcttcagagtctttccgccggacttagtgttggggatggagcggtcctgtttacagcgcaagagctatcgaagttgggctttgttgaagttacagtacagcgcgagctaggtgcgaaggacaccacattcacgagcctcactcccagtggactcaagctgttcctgagctctctggactag

SEQ ID NO: 512306 - DNA, 138 bp, Stenotrophomonas maltophilia
atggatctggattgcagcgctgcattcaccgttgtggccggtctgacagcaggtgtcgccgccatcggtaccgccaagcttccaccggccgcaatcgcggttggctacaagtggttcaaggctgcgatcttcggttga

SEQ ID NO: 512307 - DNA, 216 bp, Stenotrophomonas maltophilia
atggcgcggcacgtctacgaatgcctgcaattcaacgagcagaccggcacctgtgagcaggctggattcgtgccgcgcaccgatatccccgcacttaccactgccgaagtgtcggggctgttgtccatggttgcggtgtgcttcgccgtggcatacgcaaggggatcatcatggatctggattgcagcgctgcattcaccgttgtggccggtctga

SEQ ID NO: 512308 - DNA, 717 bp, Stenotrophomonas maltophilia
atggatggggtcaataaggtgctgggccgtgtttcgctcattcgggccagcgctattgcacttggattggccgctcttggcgttgtggctgctggattcgcctatccgggcggcctggatgtctttcatgagccaggcagtgcggcggattgggtggctgcgattggggcctggatcgcggcctttggtacgtttgtcgtcggtttcggtgcgaacaattacgctcgcgagacccacatccaaaggctgcaagacaaagcgcgagaagatggcgagttccggcagatgctgctgtcgcacatcactgcagcatatgttggcctctctccatacaccagcctcgtaggggagattcagcggtatgtcagtagacccgtgaatgagaggactgaatttctcttgcggtggcttgctaactcggtgcgacggatagcagcttccccgccgattcctgccgaaacgctgccctatctcacaccaaacacggtgcagcttgttgggcgtctgaaggtcgaaatcgcgtcccttgaggacctttttggcatggtcgagcatgtgctcgcgcgcgaaggcttctccggtgagtcggctcaggatgctttgtctggaatattggagttggcattgcgtgtgacagagaacggcgcaggcctggcagcggaaatccaagagtcgatccgtgcgcagttgacggcgtctggcttcgaattgagatag

SEQ ID NO: 512309 - DNA, 2058 bp, Stenotrophomonas maltophilia
atgttcatcaagggtatctcaatcaagaacttcagagggatagaagatattgatgttgatctatcgacgcgcgtcagcgtcatagtaggccccaacgcagcgggcaagaccaccatcttggaagccgtccgcctggtgaaggcgctactcgcgcctcggacgcccaatgaatcttcgcaagttctcttctccctcggagctagttctccacacgcccctcaaaggctccgttttcaggcagttgcaggcgaccctcgaaggccggtggagctgagttgtaggtacgagctctccgctgacgagatagctgccgttgaaggggctaacgagcccattgccagagcaatggttcaagcacaaagcggcaatggagcggtgtctcaagatgttctgattcagtttctcgcttcacctgctgggcaggctcgattagttgctgcccggcaggaaataagcgaagccatcgttgagctgaaaagaacgaagctctgcaacttaggagttgtctggcacgatcagatcggcccgcagagcataggaggcccaatcggcgcgcagattatcggcttcctcgaacgacgcctgcctccgaacaagacggcattcacctattttcctgccgatcgagcgatgcctctaggggagcagcaagtgcagctaggtgggccagactcacaacagcagcttgagtcatacaattcccagccgcagatcaagtttgctcgcctcaagaatctaatcttcaccggcgctttgttttcggctactgagtctcagaatggtgatagtttacagcaacagtttgagaggatctttgctggtgtactgaaggggaggtcgttggatgggattcagatcaatgaactcggaatgctaaatgcgataatcaaagatacagatagcggaagaacttttgatatcgacggcatgagtagtggcgagaaggggctaattttaactttcctaatccttcagcgtgcagtggttaaagatggcattgttctgcttgacgagccggagctacatttaaatcccgcagtatgcaaggacctgctcagctatttgatacaggatttcgttgttccaaaaggactgcaaattctcatctgtagccactccccggaaattttggctggagccttcgatagcgatcagtgcgctgtttatcatcttgcatcacctcgagaacttagtaaggttcgcatacaagacgaggcaaatcttgaggataccctgcgaaggttaggtgccaacgagagtgaaaaccttctctataagggaattgttttcgtagagggcgtagatgacatcgccgtcttagaggctggttttggaatgctacttcggaggcataagctcaagcataagcaggggcgcttcgaggtggaaaaagcaattagacgccttcaggagctagagcaagacggaagcgttaatggtagaacttattttattttcgataaggatgaagcgcctacctctttgcaaagcactggggcagtgaggatccttcaatggaataggcggtgcctggagaactacttcattgatgttgaagccatgtccaatcttctgatgtcctctgaggttttaaagagtccactgaagaatcatggtgaagtaagcactcttctaaagaaggtggctttcgagcaaattccggaaatcgcggctaagcgagtctacgagcgttacggtttcgaaggagtaggggtgcgaagggaagatgttcgacaaaagagtgtcgatgaaatttcatccgcaatgatggccaggttgaggcgcctaaaggagcgtctggccgacgttgatgaaacgacttggcctgacagctttcgtcgctcaattgacgtagagatcgcccagatcaagcaagtgtgggagtcaacatggaaggaggaatgtgacggaaaacgcttgcttgaggatctcttcaaggaaatggatttcaaatcaagcttgcgttcttttaagataaagatgataaaagatatggccttggaggaggcggatggatggaagcagattagggatcaattgagtacaatgctttcgtag

SEQ ID NO: 512310 - DNA, 636 bp, Stenotrophomonas maltophilia
atgcgtggctcgaaatccggtacgcgacttggcccggtgggcacaaggcccccacgcaccgcccgccatagccggccgacggattgccagccggcaccacaaggcgtggtgccggctggcaagcgcaaactacagtcgcgttaccgggatttcgagccccgaccaccggtgcattggtggcagggaaaggaatacgcccgcccatgcgagatgccaaggcagtacggccgatgccgtcaccacattcaacattttcagaatcgttgcatatggcggcagcggggccagatccttgcgctgcaaggctatcggcgatgtgggctctggatgcccgcggactgttggcatccgcccaacgggttcataagtgaggcgaatgcgacagttttgccaggggctatcagcgggtcagtagcccttcagcgcggctttggtccgctccaaccatgctggcgttgtggctgcgcgcgtggcgcgaccagtgctgggcatctcattcaaaccgaatccccttcgcaggccgaattaactgaggtgttctatacccgcttctggcctgaagcgggcagaagcgggcagaagcgggcagaagcgggcagaagcggggcagagattgtgaagattcatcgggggtag

SEQ ID NO: 512311 - DNA, 480 bp, Stenotrophomonas maltophilia
atgcacgaacatcagaatcctatgactggattcaagttgctagagcaggcgtttcagcagggctttcgcatgcgcccggtgcctggcattcaagatttgtttgttgagattgatcaagggctgcgaaccaagcgctatacgtatgcacgtttggaggatttgaaggtccagcagcttgtcgtgcttgacgagaacgagcccctcaatggcctgccgtgcttctgtctcttctacggcactcttgagagtctcaggggtaaaggtctaacagcaccatttatccggcaatgcttggaccagttcgtgaaggatcttccgccacgctatggcgcgaactactacatagagtccttgattgaggtagacaatgagccatcgctcgcaatcgccaagaagctctttggcgacccaagtcatgatggtgctgacgagctgtccggagcgtcgacgaggatctggcagttcaaagagactcgctag

SEQ ID NO: 512312 - DNA, 1866 bp, Stenotrophomonas maltophilia
atgaatgagctgcccgatagcttggtcgacaaatgggtcgatgaggtcattgataagtgtttgcacttggatgccccgcagagcttcttcatgtacgccggcgccggctccggcaagacgcgctctcttgttgaagcacttggaaagctacggctgcgtgagcgggagcgactggtgtacagggggcaacgcatcgcggtcattacttatacaaatgctgcgcgtgacgaaattcttcggagaattgagtttgacgaactcgttgacgtctccacaattcacagttttgcgtggcgcctaattcaggggtttgacgatgaaattagacaatggctgaaggcttccatcgaagaatcgatggcaaagctcgcggatgcgatggggcgcgcacgtggggtgaataagacgtatctcaagaacaaggcggactacgaacgaaaggaaaagcgtctcgagactcttgattcgatgcagtcattcaactacagcccatcgggaacagaacgtctgcgcggatccctgacccatcaggaagtcatcgacatggccggaaatttcctgcagaaagatccgttgcgcggagtcctcgtcgatctctatccagtcatcctcatcgatgagagtcaggacacgcatgaggagatgatggaggcgcttctctcgatccaggcatacgcaggtggtcgtttcgccctcggacttctcggagacacgatgcagcgaatttacacccatggtatgcctcgtctagaggccgcagtaccgggagactgggcgagacctgtaaaggtgatgaatcacaggtctgcagagcgaattgtccgtctcgtcaacaacattcgcgcggaagtggatgggcagcggcaacgtcctcgcgtagacaagcccggcggattcgcgaggctgttcatcactggtcttggcgcagcaaattcgctggagcttgaggaagagatcgcgcgcaatatggctgatatcactggagacgctaagtgggggcacggccccgagcagcgtaagacactcgtccttgaacatcgcatggcatcacggcgtctcggattcgatgacgtcttcggtccattgtacgagaccgagacgcttaagacatcgctcttggacggtgtacttgggcctgtcaattttcttgtggacgatgtgcttcccatcgtggaggccgggctgtcaggcgatgagttcgaactggtcgacagcgtacggacacgctctccgctttttgacgttaaggcgcttgcggggcgagccgatcagttggacgcgatccgagctgcaggcgatggcgcacatcgtctgagtgagcaactgcttggtcgtgatcctccactgcgcgaggttattagtggtttgcgggatagcggccttctagccattccgcatgcacttctcaatgcacttgatatgcaggaacttgatgacgaagctcttcttgaaggcgaccgcgcagcgcaagaattgcttgcgtggcaccgagtgctgcgagcgccgttctctcaagtgcgtgcaatggccctctatgcaaggggtctgtctgcattcgatacacaccaaggggtgaaagggctcgagtttccgcgtgtgctggtcgtcatcagtgacgacgaggcgaacggatttacgtttagctacgagaaggttttcggagtcaaggctgttgataaagacgtcgagaaagaagccgtaggcggtgattcccagcgtgcccaaacacgccgccttttgtacgtaacctgcagcagagccgagcgcagccttgccctcatggtatacgctcagaaccctgaggccgtccgcgatgaggttatccgcaaagagtggttcagtgcggatgaaatcgtcctcatctga

SEQ ID NO: 512313 - DNA, 2289 bp, Stenotrophomonas maltophilia
atgaaaattcgtcacatcgaaatcaccaacttccgcaaactccaagcgattcgcgtcgacctcacggacgacacgactctacttgttggagccaacaacagcggaaagtcctctgcaatgcttgcgctgcgccgctttcttgtatcgcataagagtgcattcaggttgctcgatttcacgctttgccactttcccacgattgatgcaataggacaggaatgggaagctgctccttcgggaagtcagccgcctgtgcctgacccttggatggctatggtcccgatgctcgatctatggctgtctgcagggaacggtgaactccacttcatcaaggatctcattccatccttccgatggcgtagcggacttgtcggtgtacgattccggctcgagccaaaggacattgttgcgctctacaacgatttccgctcggaacgcgagcgtgttcatgcgctggaagcggaggcggccaaagatgttcataaggcgtcgttgacgctttggccgaagaacctcactgattttcttaccaggaggcttggagcgcacttcgaaatgcgctggtaccgccttgacccgtccaagctcgtcaagccggatagagtgacacgtgaggcgctgcctcagcagctcggaccatcgaacgtcccgatgcaggccaacccgctttccggcctgatccgcgttcacgagatcaatgcgcagcgcggattcggcgagctggacgaaagcgaagattctgcttcggtggggcgatcaggacgacggctttccgagcagctccgagcgtactacaagcggcatcttgatccagaacagtcgcctggtccttccgacatcgaggcccttcgggcgatggatgcggcacgagacgcgtttgatgttcggctggccgcgagcttcaagccagccttccaggaagtcgaatcgttgggatatccgacgggcaatgatccaaggatacatgtcacggcacagttgagtgcggcggacggcattagccacgaatcggccgttctctttgaactcgattcagttggcggggcggccggcgcgccaccgcttcggcttccggagacctcgaatggactcggatatcagaacctcatctctatgatctttcgcttgatgagtttcagagacgcttggctgcgaaagagcaaggcggcgatggcatccgatggtcgagtcgttgaaccaatccatctcgtgatgattgaagagccagaggcgcacctccatgcccaggttcaacaagttttcgtccggcatgcctatcaggtgcttaccaatgatccgttgttggagaagtttcccggcctctcaacgcagcttgtggtgagttctcactcgagccatatcactcacgaacttccatacgcttcactgcgctacttcagacgccttccggcgggaatgaatggaaagcgcgtgccggtttcgactgtgtcaaatctcgaggccgtcttcggagacgaaaccagcacgaaacgatttgttacgcgctatttgcgctcgcagcacgcggacgtgttctttgcggacgccttggtgctcgtcgaaggtgccgccgagcgaatacttcttcctcacttcattcgcaatcgattcccacaacttcaccaagcgtacgtgaccctgctcgaggttgggggcaatcatgcacaccgcttgcgaccattgctcgacgccctggggattccgtgccttgtgatcaccgacatcgatgcgcttggcggtaagaagtccgtgccggtcatgcgaaatgcagggcaggttacgggaaacccgacacttggagtctggttgaagtcaaacaacaagacgcgtgaaattgacggtctgctagatctggcagcgaacgataaagtcatcgtttccgatgacctctactctattcgcatggcttatcagaccccggtcaccattgcagtccctgccggggcgccgccggaagaggtgttgccaggaacgttcgaagatgcacttgtctttgccaatttggcccttttctcagctgcaaacggcaagggaatgatgggtgcgatgactcgagctgttgcaaaggcagagagcggggaagccctcgctactgggctatttgaagcgattggcgatggcgacaaggctggatttgcgcttagcgttctctatgaagccgattttaaagatctaaggcctccgagctacattgaagagggcctctcgtggctgcaagagcgggtcataaagaaaaagcacgaaatgcttttggtgtccgttccggcaggggaggacgagaatgaatga

SEQ ID NO: 512314 - DNA, 390 bp, Stenotrophomonas maltophilia
atggcgcaatacacaatttgcatagagctgcatgaggctggttggggcgacttcttggaaatgtacaaacatcttgcggtccaaggcattaagggcattattgcctccggcgaaggtattaaatataagccgccgccagctgagtgcgactgtgaaggtggcgcggcccgtgaagtagtgctggagatggctaaagattcgactcgtaagggggtgcgctcgtgtttcgtattggtaacaaagaccaatgggtacgcgtggcatgactttattggagcgtggcaattaattggggctgacgtggcgttacggttcggctctgttataggattgggtgcgaattggaatttctatcatttcttaaagagtatgcgtacatccctgccatag

SEQ ID NO: 512315 - DNA, 1041 bp, Stenotrophomonas maltophilia
atgaccggcaggggtgcggccgagaacagtgatgtgacgacaggtatcgcccgggtggcgatggccgagatcgtgcacgcgctgttgtcagatgccgaggtggcattgtttgccagattcgcccgcgcatgcaagctccgtgccggacagtggctgttccagcgtggtcaccgcggcgagcgcatgtatgtgatcctcgaaggccagatcgaactggacttcggcgaggacctggtgatcaagacactcgggcagcatgagttcttcggagaactgggcctgctggtcggcgaccacctgcgcagcgcgagcgcgcgcgcgctggtcgactgcgatgtgctggaactggggccggctgatttccaccggctggtcgaatccaatccgggcctggtggcctatttcctgcgccgcacgatcatgcgcgtgctggccaacgaacaggccctgatcagccagctgcgccggcgcaaccacgatctggaaaccgcgctggacaacctctacatcaccacccaccagctgacccacacccgcgagctggtgcgtaccgatgaactgaccggcctgcacaaccgccgtggcctcaccctgtacctgcaggagtgccgcgagcgtgccgaggggccgccacaggcgctgctgctgatcgactgcgaccgcttcaagcagatcaacgaccgccacggccaccaggccggcgaccgcgtgctgcagagcatgggcaacatcctgcgctcgatggctggcgaacaggatctggcctgccggcttggcggcgatgagttctgcctgatgctgcgccgtggcaaccgcgagatcgtgcagcacgctgccgagttcatcctcagcgcggtgcacggcctgctcgagcgcagtcacggcacgccgcatgtaagcctggtcagcatcggagccagcctgttggatgccgacgcgggctggagtgagtggtatgccagcgccgatcgggcgctgtaccgggccaagcgtgatggcggcaactgcctgcgctgggtggatgatccggacggccaatag

SEQ ID NO: 512316 - DNA, 972 bp, Stenotrophomonas maltophilia
atgatccacgtcggagactgcctggaagtgatgcgcggcatggccgctggctcggtgcagacctgcgtgaccagcccgccctacttcggcctgcgcgactatggcgtggccgggcagatcggcctggaagacacgccagccgagtatgtcgcgcgcctggtcgctgtattccgcgaggtccgccgcctgctgcgcgatgacggcacgctgtggctcaacctgggcgacagctatgccaccgacagcaaatggggcggatcgactggcggcaaggctgcggccgccctgcatgggctcggcggcggcggccgcaacaagacggctacaggtctgcctgacaagaacctgatcggcatcccatggcgcgtggcatttgcgctgcaggaagacggttggttcctgcgccaagacattatctgggccaagccgaatccgatgccggagagcgtgaccgatcgctgtacgaaggcccacgaatacctgttcctgctgtccaagtcgccgcggtacttcttcgacatggaggccatcaaggaaccggccgcgggtatcaacaactacccgccgcagggtggccctgtgcccggcgctcctgcgcagtctcggctgcgccccgcggtgccgcgcggcggcttcgatggcaaaaccaatgcgctgccggggcgcgaggccttccgggcgacgtcggaaaagcgccacaagcgcagcgtctggaacgtggccacgacaccgttcaaggaggcgcacttcgccaccttccccgagcagctgatcgagccgtgcattctggccggctcgcccgccggcggcctggtgttggaccccttcatgggcgctggcacaaccgcggtggtcgccgaacgcctaggccggcagtggctgggctgcgagttgaaccccgaatacgccgcaatcgccgaagcacgactccgggtcgcacagcctagcctttcgtttggagacgtcgcatga

SEQ ID NO: 512317 - DNA, 846 bp, Stenotrophomonas maltophilia
atggctgagcgttcggacgaactactagtcagcggcccgattgtctccagccgagtgaccttcatcgttcgattccgcacgcgcaatacggctcgcgtccaccccggagtcaatgatggctttggcgcaagccagacgaaccgactcgagatcctcagacaatacttgggtggcaatacaaagcacctgatagtgctctctagtgttggttcgatcacgcccatcgcgtaccgcagcgccctttcgattgagcgacctgagcatcgcgacacaccgcaccaacgcgggcccaatgggatcatcgaggtaatgaaggcgatcaacaagctgattggttattggaaactccacctttgtaagcctgtcgagcatcgcctgacggaaaatatcatcggtcacgaaaagctcatctgcgagtggcccatccagacgcctatgaatgtcggcgagctctttctggttgtcagtcacttctccgttgatctgaacaagcaccaaggtcttttctcgtccttcgcgcgttttctgtcgcttctcctcgtccgcagcaagcttcagcgcagcgtcgctggcgttgttagctgcgacgcccaaacgataggtgaatacgcccaatacgaccgtggcaattaccgcaccgatcgcaccaactgccgcaaacgcatcccaccaaaccacacagtcgcccagacccggggtcatacaggggctcattccgctccagatctgtgccagcaggccccagtccagaaggtaaaaaataatcaaacacatatcgaactgccgctgaggatcggccggcattctgccacgccatcgctacgaacggaggcagcccatgaatga

SEQ ID NO: 512318 - DNA, 453 bp, Stenotrophomonas maltophilia
atgaaacagcctcagcccagcgacgccaaatcttcaacaccgatccccgacagcgcgattgaagcgttccgcgctgcctacgccattcacggtacccagaagggctacgccgaggccatccgcgccgggctcgccgccgcagcgccactgatcagccatgacgccatgctctcgctcgaggaggatgcgcaggcctacttggtgcgccagctggacattgcactgaatggtgaagcagccgcagcgcgcgagccagtgctggctgatcttctaagccagtgccaggaagaggcttcccgccggcatggccccgtgctgaggacgatgcccgtcagcaccgaaaaccacctgaagtcggtgctgaaagacatggcccgtagcgcgcaccacgccagtgacttcgcgacgacgttgctcaatctgatcaacaccagggaggtgcactgtggctga

SEQ ID NO: 512319 - DNA, 561 bp, Stenotrophomonas maltophilia
atgccgccgaagaagacatccagccgttccctgcgctacgcaaccgtgcaggacatgccggaaggcatgcgccgcctcttgcaggccagtgcgccggcagcggggccagcaccggccgcgccgcgcgcctaccggccaaaagccgtcgatcagctcgccgaaaacgctacccctagcggcaaggcggctcgcggtcgcgtgcgtcatcagatcggggaaatgaacaagaccgagcagtcctacgccgactggttgcacgcaatgagacagcgaggggagatcctgtggtttggcttcgagtgctggacattcaagctggccaaggacaccaggtacacgccggacttcgtggttcagctggccaatggcgagctcttgctggtcgaggtcaaggggcgctcgaaggggggcaagtactttgccgaagacgacgcaaaggtgaaggtcaaagtcgccgcagcggcatttcccatgcttcgaatcaagatcgtctggccaagcgcagacggtggctgggatgaagaacacatcgggtggaaggagccgagccatgatcattga

SEQ ID NO: 512320 - DNA, 528 bp, Stenotrophomonas maltophilia
atgatcattgaagttgaacccgggtacggagtggacgcagctggcgtggtgtactgctgcaggccgatcaacggcaaagggtcgaagcgcgcccagtggcgtgtggttaaaggtctcctctgcagcggtggccgatacctccaggtcgcgatcgatggcaagaagcacctcgtgcaccgtctcgtggcacgggcgttccacggcgcggcgatgcccggtcaagaggtcgcccacatcaacggcgacggccatgacaaccgatcagccaatctgatgtacgtctcgcatgctgcgaacgaggcgatgaagcagctgcacggtacggcgccaaacgggtcgaggaacggcgctgctgtccttgacgaatcatcagtgcggaccatcaggcgcctggtgcagggtggtggacgtggcattcagcggcgaatggctgagcagttcggtgtctcggaggcggcaatttcaatggtggtgaccgggcgccgttgggccggttccgaacaacgggagtgcagcagcgatgaatga

SEQ ID NO: 512321 - DNA, 786 bp, Stenotrophomonas maltophilia
atgtcggcagtagccgcgcccgtggcggccctgacgccgtgcgggaactgcggcagcgacgaagtgcgcatgcgcgcgcggggcagggccagcagccggcgcaccgcgcaggtcgtgtgcgcgcgctgcagcgcccaaagtgagctgtgcgtcggcgcagatgcggaagctcaggcggccaaggcgtggggacacaaacagcacgcgcctccgctgccgccagcagcgagggtggtgcgcgaccgagtgccggtggcagaaccgaccctgcagcgtgacccgctcgaactgatcgcccgcatgctggttggcggaagctaccgtgagccatcgaacggccggtcgtccatacagccattgtcgtccgccgacatcgcaggtgccgtcgggttgatgcgagatccagttgccaagcaggctgctgtagcggttgcgctgcgggggcagggcgtgtccttagcctcgctcgggagggcgctggctaggcgtgtgatgcgacagatccagtgggagcgtcaaaatggagccgagctcgcgcttcgaatggacgagccggcagatcgttggcggatgcgcttggtactgcaggatgctgtcaacgacttggtatggcctgaacgaagggtcgctgcgcaggatgcggcgaaagcagccaagatgcgcaagggggcgtacttgcgggtgcacgcattggcaaccgcagcactacgtcaggctctggaggatggccgacaagagttcaagggacgactgtttggagcacctacaaaaaaaggccccacttag

SEQ ID NO: 512322 - DNA, 657 bp, Stenotrophomonas maltophilia
atgatcacgttaattagttcagcgttcgtaatcgcgctcattctcgcgatctggcacgtgatttttaacgtttaccctcattccgctatcgcgctagcgcgctacaacttgttcgaacttcgagatgagctgttcgatatggccgccgaaggaaagctggacttcaagagtcctggctacagggcatgtaggcagatgattaatggcttcattcgctatgctcacgacatgagccttatgcagatgttcacgactcaacttgtcgcaaagataagaggtcagaagatcagcacaaaggaatgggacgccgctttcgaacgtttggcgcctgatgaacgcaaactggttgattcggttatgcgtaaggctatggtgcacatggtcaggttgctgatcacgaagtctgtgatcctgagtggagtactcaccctggtgctgtctatcgagtacgtctgcaagaagattgctcgactatccgctgctttgagcaccgcgtttaaacgcagccctgatcagacggtcaagctaccagcgagtgatgcagttatccgtgaagtgatgtcgaactccagtgggcgaaagctcaagctcgtgatgaagagagaagccaagcgttacacctcgccaggattcggcatggaactttctccagcctag

SEQ ID NO: 512323 - DNA, 315 bp, Stenotrophomonas maltophilia
atgaatcaggggagctcaccgattgacatgttggaactggccaaacgcttggaaacgcttgagcgcagccacagcaggctgagcgcgcgaacgatggcgctgcagcagatagtcgatgtgctggcatggggctgctggcacgggccgagcgaggtatccaaacgactcctggaatcgggacaaaagtcgctagcagccatcaacacgtggcccgaagagctacaacaggaggcggttaacgtctggaatcaggcttacagacaactggccgacccggatgccggcgcgtcgttcatcgcggttcgccccgagtag

SEQ ID NO: 512324 - DNA, 429 bp, Stenotrophomonas maltophilia
atgttggacccactacgcccttacgctgacctttttaaggcgctggcggccttggcgctggctggtggcctgttcgtcacgggctgccagcacggtagcgatcgtcgagccgccaaggaccaggccaccatagccaaggccgatcaggcgcgcgctgcagcggaagctgacgcggccgagaacctgcgcgcggccaacgcctgcgggctgctgctggaggacgtaaaccgccagacccaggcggccatcgatgagtcggtccgccagaagtccgctgcggatgaggctgcgcgccgggctgaagcggcagcggagcagagcaaacgccgcgcgatccaggtagaggaggccctgcaggtggccaagacccagccgggatgccggcagcagttggagcagaacctatgcgacgccattccgttgctgtga

SEQ ID NO: 512325 - DNA, 297 bp, Stenotrophomonas maltophilia
atgcgacgccattccgttgctgtgatcctggctgcggccttgccgctgtgcgggttcggcagctgcagcaaggccgagaagcccgacctgccgaaggtcgtctatgtgccggtcgagcgcaccgtggctgtacctgcggcactgacggctcgctgccccgccaagcgcgccagctcacgcaccgtggaggctgtcgtcgatgcctacaacgccaacctcctgaccctggaggactgcgacagccgcatgggcgagatccgacagctggccaactccgcgtccgaggctgggccgtga

SEQ ID NO: 512326 - DNA, 366 bp, Stenotrophomonas maltophilia
gtgaccgacgtagtgaagatcagggacggactgctgaccttcaaatgccctggctgcaacctacaccacacactccccgtcgatggcaggccgagtgcatggcgcttcaacggcagcaccgaccggccgacgctggagccgtcgatcttggcgcgtggcggctgctgctatgagcctgactggcacgatcaggagcgccgaaggggtatcgctgagccttgtgacaagggctgccctgacgaggacgggatcagcatgtgccacacctgtcattcgttcgttcgcggcggacagatcgagttcctgagcgactgcacccacgccatggcagggaagacggtgccgctgcctgcagtcgcgccctga

SEQ ID NO: 512327 - DNA, 1518 bp, Stenotrophomonas maltophilia
atgtatccgttactcaagaagccagaccagcccaagatttcagataaggatgcttggaaggatgatccatttgacagaaaaaaggatgcggagatgctgtcgcgcttgatcgcgtcaagcgtcacggacccgttggtcttgtcactccaagccccttggggatccggaaaaacgacttttctaaagcggcttcaggtccacataaacaacgaattcgcaataccatccatctctatcgacgcatggaagaatgacgaatcgcaagatcccttggtaacgatcatttcagagataaagctatctctagaaaaaaaggcgcatcacgagaccggcgccaaagcaaagagcgcaatcggaaaagccatcacggcaatggctgagaatggctctaagctgcttatgcctgctgttgcggtggcagctgagatcatgtttcccgggagcggcgccggaacggccgcggcgggcgcaggagaattgggtgaacgactccttgatgcgcaagacgaaaagcgtaaagcagagccaagtttccgagatgcgctgatagaagctcgagacctactagcacgccgaaagaataatggccccgtgcgaccgatattactcattatcgatgagctggatcgatgccgccccgactatgccattaggatgctggaaagaatcaaacattactttgatatccctggcgtaacgttcctcattgcaacggatcgcggcaacctcccatcagctgtccgaaccgtttacggcgctcacgtcgagggagaactctatcttagaaagttcttcgactatgagtttcatctatctgcgccgtgtagcatcacctatgcgaaacacgttgtcgagaagcacgttatgcccagtgttgaaccactggaacgaaagaagattcggccattcccctgctacatctccaatatagtcgacctcatggatgtagcaccagccgccgagctcaataaatgcgagtatttagagcacttcccggcaatggcctcagcaatgaacttgagcctgcgagacacaggccaagcactgacaatgcttgctgcattcgttcattccagaggcaaggacgctgcaatcattcctattgtagattgctttgtttcatgcttccgatttgcatatccaaaaggcttcagaattctgattgaagaatcggaactgtattcccctgcacagtcggaccctcagtggctgcaggatctgttcagccgtctcgaaaaaaccgaacagtggcaggcgctgattgcattcttcgaaaaggacaactttgggatgcgagcattcatgacgcagagcagcagatacgacgaggacgaaccagagcgatggcataggatgcttggcggcattgatcgaacccagcttactggtccagagcaatgttaccgagcaataatggctatcagagtgcgtgccgccaataacgtcagcccttggaattacgcgcgagagttcgtgcgattgactccgccaattaccgctacatcaacgccgggttga

SEQ ID NO: 512328 - DNA, 387 bp, Stenotrophomonas maltophilia
atgccgatctccccaccagcacatgctgtgctgaacgccgacggttcgtactcgtggacgacgcaccaaggggtgcaagaaaagaacgttccccactatgccttggctctattccaagcagtctgtgaggccattggcacagacgccctaaaccccgctaccacctcagggcttgtggccttggggctcacccgtaaagacgcgctcgcagtgattgcctctatggacggggggatgttctacaagtctatggaagcgttgaagcgcccgggcgtgtggcaggacgtgtatcgcgtaccggtacccagcggtgtgaaggcctacgtcaagctaagcccaatgcacccgcagaagtgtgtggtgatcagcttcaaacctcttctttga

SEQ ID NO: 512329 - DNA, 666 bp, Stenotrophomonas maltophilia
atgaccaacgaagctcacattgccgaactgttcaaggcgttcaacgtacctcaagttgaggccgatcagtgctcgatgtgtggggcgaaaaatgaatgggtgcgtttcgagcaaattacccttccccttgaggcccctggtggttaccgcgtcgaggttgcagggctaagtggcacggtttgcgctgcctgcggcgaagtgatcatggaccctgaaagtggagagcgcttcgcaaatgctggcgatgccttggtgctgcatgctagacatgaagaggcgaagaagctcaaagccgcccgtagaagtctctggcttacacaggaagctgcgggtctattgacggggggcggacataacgccttcagtcgctatgaaacaggacaagctgtgcccgttcctgccgtaggtcacctcatgggactgcttgctaagcatcctgagcttggtaatgaaattccaggggtcgaagtggtagaggtagagacgtcgaagatgcgtccgggccgtgggcggtataggttgatggttgcggagcctaaacaagaatcgcctgaggatgcggccttggctgcagttggcatcgatcatttggttgcggcacaacagtccggcaagaaggattcagtgaggcgtccaccaagaggtcttggaaagagaagccgctga

SEQ ID NO: 512330 - DNA, 372 bp, Stenotrophomonas maltophilia
atgatcgacccggtgttgatcgccggcatggaccaagaccaacggcgcccgatcgccgatgcgttctggaaagagggtgatcccacaaagcagatgggcgagcaggccgaaagcttcgggcagttcgcgagccgagtatccgcgttcatgaccgaccggctcccgctgctacccgacggaacggtctgcttcggtcacggcatctggatcggcatggtggcgtggaagctgttggggttcggcgcagacaccagtgatgacatgcgccgcttccggcgtttccagactggcctgccgctgcccaacggcgcggtctacgcgcttgaggaattggcgcccgctcagtggttactcctcaatagattcgcgtga

SEQ ID NO: 512331 - DNA, 210 bp, Stenotrophomonas maltophilia; identical to SEQ ID NO: 339185

SEQ ID NO: 512332 - DNA, 1530 bp, Stenotrophomonas maltophilia
gtgccgcgcctcgccacatcccggcggcaagccgcgggatgcgcgccactgccgtccgcccacaccggttcgcggtacgcgcgccacgcgcccgagcgcacgctgctgtacgcgttggtagaggcgcactacccggacttcattgtacggatcgaagcggagggccgctcgctgcccggatatgtccgcgaggcgttcgatgcctacctgcgttgcggcgtgctcgagcacggcttcctgcgggtggtgtgcgagcactgccgtgcagagaggctggtggccttctcctgcaagaagcgcgggttctgcccgagttgcggcgcgcgacgcatggccgagagtgcgcggcacctggtcgaggaggtgttcggcccgcggcctgtgcggcaatgggtgctgagctttccgtaccccttgcgtttcctgttcgccagcaagccagaagccattggcccggtgctgggcatcgtgcagcgcgtgatcgccggctggttggccgatcaagccggcatcgaccgcgccagcgcccagtgcggtgcggtgaccctgatccagcgcttcggcagcgcgctgaacctgaatgttcacttccacatgctgtggctcgacggcgtgtacgacgcgaacgtcgagccgccgcagcgcaagccgcgcctgcgccgcgcccgtgcccccacctctgcgcaactgacgcagctcgccaacaccatcgcgcatcgcgtgtgccggcacctgtcgcgccgcggctggctcgaaggcgaagacgaatccgtgttcctgtccgacagcgcgggtagcgacgacggcatggatgggctgcggatgagttcgatgacctaccgcatcgccaccggtcgcgacgctggccgcaaggtcgtcacgctgcaaacgctgcctggcgacgccggtccgctggagggcgacgccggcaaggtcggcggcttctcgctgcatgccggcgtggccgcggaagcacacgagagccacaagctcgaaaagctgtgccgctacatcacgcgcccggcgatcagcgagcagcggctgtcgatctcaccgcagggtagggtgcggtatcagctcaagacgccgtggcgcaatggcaccacgcatgtcgaatgggatgcggtggacttcatcgccaagctggcggcactggtcccgccgccacgcgcgcatctcacccgcttccacggcgtattcgccccgaacgcgaatctgcgcgcgcaggtgacgccatcggggcgcggcaagcggcctgcgagcgatgcagtgccggtggacgtcagcgcccacgacgagccgcgcagccccgagcagaagcgccgtgcgatgagctgggcgcaacggctcaagcgggtcttttccatcgacgtcaccacctgcgcccactgcggcggcgcggtgcggatcgtcgccagcatcgaagaccccaaggccattcgcgccatcctcgcccacttcgagaaacaccgcgcgctggagcaagcgcactaccggcccgcagcgcgcgccccgccgccggccgcgtga

SEQ ID NO: 512333 - DNA, 1065 bp, Stenotrophomonas maltophilia
atgtacgtcgccccccgccccctgcttgccgacgatccgctgttcgcgatccggctggcttttgccgccgcactgggtttcgtgctggcaccgctgctgcagtcctcgatcccggcgctgatggcggcgctgccggtcgggctgatggcaggcaaccgcaaggccttcgatcccaggaaggtgttcggcgcgccgatcgcgtttctggtgatggtgtggttgatgtcgtcgctggtgtcgttgacccggccgatgccgatggtgctgatcgtgctgatgggcgtgctgctgttcctcggcttcctggtgatccagcgcaccggcaatcctctggggatgctgatcgtcatcgtcaccgtgctgatgtcggtgatgggcatgagctcaatcgccgcgatggagatgctgcgcgacgccatgtccgaggcctgcatcgcctcgctgttcatcattccggcgatgtatctgctgttcccggtgcgcacgcgggaaaaggcggtggagcactatgtcccggcaccaggacatcacgtcaaggcggcggcgatccgtgccggcgtgcaactgctgctgtgtttctggctgtactccttcatcgaaccgggcaatatcatcctcgccgtcgtggccaccttcgtcctggtctttccttcgcagcagcgctccctggaagaggccaggcagcgcatggtggccacgctgctgggcgcggcgatggcgttgctcctgctgttctgcttcaccatcgtcgggaacctgtcggtgatggtgctgctgctgttcctggccgggctgtacttcggcacacggatgatgaccgggcgcgagccgccaatggtgtaccagttcggcttctcggccatgctggcgctggtgggcggttcgctgacctccagcgagcccggctacgcggtgctgacccgggtcgtgctgaccctggccggggcgatggcagcggtgctgctgaccgcgctgctcgaagcgctgctcgaagcgctgttcgtgccggaggtggcgcgcaggacgtcgcatgggcagacgggccagacgcttggtcagccgtag

SEQ ID NO: 512334 - DNA, 1182 bp, Stenotrophomonas maltophilia
atgagtccaagctcccagctcccgtcggaccgtgatcccaaggcgccacaggcgtcccccgatcctgatgtgtccaccgatccaccggccccggacgatgccggggccgccgccgcaggccccaacccggccaaaaaggtggcgctgatcgtggccgtcgtgctggtcgtgctgatgacctggtacgtgctgaccgatcgttacgcgccctatacctcgcgcggcacggtcgcgacgtgggtgacccagatcggcccgcgtgtgggcggccaggtcggcgaggtgttcgtccacgacaatcagttcgttcgccgcggcgcgcccctgttcgcgctggacccgcgcccgttcgaggtcgccgtgcagcaggccgaggcggcgctggctcaggcgacccaggggatcgacgcctcttcggcggcgctggcggcctcgcaggcggacgtcgcccaggcccgggtcaatctcgccaacacccgcctcgccaccgcccgcacgctggaactcgagcggcagcagctggtgtcgcgcgccgacggcgacaatgcgcgcgcctcggtgaggacggccgaagcgcagctgcaggcggcgctggccgggctgcgcagcgccgagctgcaactgggcgagggaggcgcggacaacccgcagatccgccaggcgcaggcgcagctcgagcaggcgcagctcaacctgctgtacgccaccgtcgaggcgccgcgcgacgggcttgtcaccaacctgcagctcgccgtggggcagtacgcgagcgcgggcgcccaggtgctgaccttcgtggacagcgacggcgcgtgggtcgtggccgacatgcgcgagaaccagctgggcaacatcaggcccggcgaccgggccgggatcctgttcgatgcggttccaggcaccatcttcgaaggccgggtgcacagcatcgccggggcgatcgatcctggccgcacgttttccggcgggctgctgcagaacgcgccggagacgcgctggttcgagccggcgcggcggattccggtacgcatcgagcttgcgccggaccaggcgtggcccgaacaggtgcgctctggcgcaaaggtcagcgtggtcgtctacaccggtgggcacggcggcccggtgggctggatcgcggcattgctgcatcgcatccaggccatctcctcctacctctattga

SEQ ID NO: 512335 - DNA, 615 bp, Stenotrophomonas maltophilia
atggtgcggcggccttcccctgcctttagtgcttgtgccaggtcggccgtatcagcgccttggtcattgattgaaattaatgtccatggcttaaattcacccataacgagttcacctggcagcacgacatgttcgcctgctaaagcgggggctgtggcgaccataaaacaaaatccaaatgcgatttttctcatattaatgccatcctggtttactgggatttgtgtctgtggcttcggcacgctgttggtgggtggggcatcgttgttgctgtcctcgttctccttaccgcaacaggcggcaggcagtagtgcgactgccttgtgcggcgggggtcaggcgggtctcggtcaacttcgaaaggtgggggctggcattggaaaattggtaagggccatgtgcaaacgcagctctgcatcgatagcaagcttatgcggtgcttgttcaagaggccgaaggacgagacaaggctgttgcactttcgggattacctcctcgggcctgtggcttcttcagatcggtgcttcttcttcgctcatgccattgcgcatgcatcagagtgacgaaaggcgcgcggaccattcattggcttcctgcttgttccgtcctttgtag

SEQ ID NO: 512336 - DNA, 540 bp, Stenotrophomonas maltophilia
atggacagttcatctctcttctatttgcttatttccttcagcttctttgctgttttcccgacagtactcgccctcattgccagattgaaaggccgctcctggctggcatggggcgcgattggtctcgtctgcgcactggttcccgttatcggcctcatcggctgggtgatttcaatcatcgtcctgctggcaggctccacaggcggcgtacccggtaccaaccgggccattcctgcggatttcaacgccacccatcatcatgtcaacgtcgccatcaatgcaaaaaacggcaacgtgtggttgcgtgaaaagtccggcaggacgggtatcgtccatgcctcggagatccagaacgtcaggcatacatgggtcaccaacaacaatgcccaggcgtacagaaacaagctggagatcacggtgaacaatctggacaaacccgtctggatcatcgagttcgattgccacaacgaaaactgggtctacaaaggacggaacaagcaggaagccaatgaatggtccgcgcgcctttcgtcactctga

SEQ ID NO: 512337 - DNA, 759 bp, Stenotrophomonas maltophilia
gtgtttctgtccgacagcgcggcgggcgacgacggcatggacgcgctgcggatgagttcgatcacctaccgcatcgccaccggtcgcgacgctggccgcaaggtcgtcaccctgaaaacgctacccggtgatgcgggttctctggacggcgacgccggcaaggtcggcggcttctcgctgcatgccggcgtggccgcggaagcacacgaaagccacaagctcgaaaagctgtgccgctacatcacgcgcccggcgatcagcgagcagcggctgtcgatctcaccgcagggtagggtgcggtatcagctcaagacgccgtggcgaaatgggaccacgcatgtcgaatgggatgcggtggacttcatcgccaagctggcggcactggtcccgccgccacgcgcgcatctcacccgcttccacggcgtattcgccccgaacgcgaatctgcgcgcgcaggtgacgccatcggggcgcggcaagcggcctgcgagcgatgcagtgccggtggacgtcagcgcccacgacgagccgcgcagccccgagcagaagcgccgtgcgatgagctgggcgcaacggctcaagcgggtcttttccatcgacatcaccacctgcgcccactgcggcggcgcggtacggatcgtcgccagcatcgaagaccccaaggccattcgcgccatcctcgcccacttcgagaaacaccgcgcgctggagcaagcgcactaccggcccgcagcgcgcgccccgccgccggccgcgtga

SEQ ID NO: 512338 - DNA, 867 bp, Stenotrophomonas maltophilia
atgaagcccgccgaagatctcgctgaacgcctgcgcgccatccgcgagtcgccaacgtaccgtcttgcgtacgaagacatcgaactgcttggccaggacgaactgcggccgctgcgactgcagctcgaactactcaaacctgagcgcatcctgcacgagaaaggcatccgctcgacggtagtggtcttcggcagcgcacgcgtgagcgataccgagacggcagaagcccgccttggcgcgctggagcgtcaggcgctcgtcactgcggagaatgccgggctgcggcaagagctcgcgcgagcccaccgccgggtcgaacaggcacgtcattacgagcaagcgaggcgtttctcgggtctgatttcggcgcgttttcagcagcagaaccgacgtgatttcgtcgtcgtcaccgggggtggtcccggcatcatggaggccgccaaccgcggtgctttcgaggttggcgcacgctcgattggcctcaacatcacgctgccgcacgaacaggcacccaacccctacatgtgcccggacctggcgttcaggttccactatttcgcgctgcgcaagatgcacttcttgttgcacgccaagggcttggtggcattccccggtggctatggaacgctcgatgagctgttcgaggtgctcaccttgatccagaccggaaagatgcagcgtattccggtggtgctggtcggccgtgcattctggcgtcgcgtagttgatttcgatcttctgctcgacgaaggctatgtctctccatccgatctcgacttgttcacctgcgtagacgaagcggaggaaatcgtcagtgccctcgaacgcttttacgtcaacagggcggcaggcgatggggcaacatga

SEQ ID NO: 512339 - DNA, 1200 bp, Stenotrophomonas maltophilia
atgattggcatcgacgggtatctctggagcctgcgcggcaccaaggtgcggcagccgatgcagtgcgccgccttgttgattacgggtgcattgttcagcccgattgctgctttcggttccgaagtctcgctctctgcaaatcctccctcctgctcaccagagcaatccctgcgctggcggggcggcactctgcgtctggagaacgatttgttcaccggctccgatcgcaactacaccaacggtgtcgcgctaacagcagtctcacgcgatctgcaaggcgggctccgtccggaatgcctgccccagccgattggcttgtacgcccgcttcatcggctgggctgatccaggcttctggcacgacgccggcgcccactcgtcgtcgcaaaacctcgttgtgcgctttggccaagtcatgtacacgcccgagaacaagacgcgcaccgatgtgattccagatgatcgaccgtacgctggtttgctctacctgggtttggcgtggaatcgccgcatccatccacaagccgcaagctacgaaatccttgacgtgcgtgagctgaccctgggcgtgatcggcccctggtcgctggccgagcaatcccaggatctggtgcatcgggcacgcggcattgagcgctttcgcggctgggacaaccagttgcgcaacgagccggcatttcagatggccatggaacgcaagttcaagccgtacacggagggcgcggtccgccctggatggggcagcgacgtgatcggcggctatgccctgcgggttggaaacatcgaaaccgccgccagtaccggcgtggagtttcgcgcgggctggaacataccgaacgacttcggcagctatccgatccgccctggcgcggagaaccgcccgccctctggtgttgccgatctgcgcacgacaacgccgcaatcggtcctggcgcccaaacctggggcacatgtcttcctgaacctggagggtaaagccgtcgcctgggacttctcactcgacggaaacatgttccggaatagccaccatgtcagccggcggccttgggtcgcgcaagcagctctcggcatcagcagccaatggatcgttgctggacgtggcgtgcggcttgccgtgatgcgcgtttggagaacccgcgagttcgaccagcaggcgggctatcacgcattcggatcgatcgcgctgagtttggaattttga

SEQ ID NO: 512340 - DNA, 462 bp, Stenotrophomonas maltophilia
gtgaaccagcccttgaaacccagatcgttcttcacattttcgctgtccgtgctcttggcaaccttcgccgcggcactcggtgcgcagtccgtagaggcggcaaagccaatggcgcttcgtaccataatggaaagactcgggcgcgacatgcaagccgtcacgggcgcgatctccaaagaagactggccactggtcaccgagctagcaccacgaatcgccaagcatgccgagccgtccatgtcggaaaagatgcgcatccttgcctggcttggggcagacgctggaaagtttcggggtcttgatggacaggtccatgacgccgcgaccgccatgggcgaggctgcccagcggaatgacggccaagcagtcatcgcggctttctccaaaacccagcaaagctgcctagcctgccaccagagttaccgtcgctcgttcgtggaaaagttctatggaagccgctag

SEQ ID NO: 512341 - DNA, 588 bp, Stenotrophomonas maltophilia
atgaccgccgcttgtgctgccgacaccgcgccgcatcctcgctcgcgcctgcgcactcgtatcgtgctggcgggcctgtccgcctgcggcctcgctgcgctggcctgggcatccttcgtgcatccgctgccgcgcctgatctacaacccgtccgacagtgtggcgatcggctggtatcgcgtcgatccgctgggccacggtgccggctcgctgccacgtccgttgtccgtaggcagcatcgtcctgaccacgatgccggcagatgccgccgcgctggctgcgcagcgcggctacctgccggctcacgtaccgctgctcaagcgcgtgggcgccatcgcgccgcaggaggtgtgcatcaccggccgcatcgtccgcatcgacggcgtgccttcggccgccgtgctgcccgctgaccgttggggccggccgctgccatcctggcagcaatgccgtcgccttcaacccggcgaactgttcctgttcagtgtgaccaacccggcgtcgttcgacagcaggtacttcgggccggtcagcgcgtccgccgtgatcggcatcgcgcatccaatctggctggaggcccgtccatga

SEQ ID NO: 512342 - DNA, 213 bp, Stenotrophomonas maltophilia; identical to SEQ ID NO: 339066

SEQ ID NO: 512343 - DNA, 768 bp, Stenotrophomonas maltophilia; identical to SEQ ID NO: 339067

SEQ ID NO: 512344 - DNA, 240 bp, Stenotrophomonas maltophilia
atggcctctccccgtaaaaccatcgccatgctggccgcttgccttgtgtactactccctgctgctcgcggcgttcaccggctacgtgtggttgatgcttggcggcgggagcctctacgacgctcttatcgcagctatcaagctgctttgcgccttcgttgctgcgcttctcgcagctgcgttcttcaacgctgcttggcgacgctacgtcagcaagccgtctgacgggcaggggggctaa

SEQ ID NO: 512345 - DNA, 618 bp, Stenotrophomonas maltophilia
atggccgaaaccggggaggagctggagtcgctaccgtctcaacaccccttgccggccttctttgcccaaggtgcggtggcccagatgtatggctgcggtccgtcaacaattggcgacgccatgtcggattcatttgtcggcgcggtgtacgccgcacggcgcgaactgctgatcaccaccccctacttcgttccagacgaggccctcctacgggcactatgcgctgcgccgcgcaggggtgtaagaaccacgatggtgtttccgaaacgcaacaactcactattggtggctaacgcatgccgcagtacctaccgtgacttgcttcaggcaggcgtatccatctacgagtatccgcttgggctacttcacaccaaatcactgacggcagatgggcaattctcattggttggatccgccaatctggatcgtcgtagcctgcaactcaacttcgagaacaacctcctcatcatggatccactggcaacgtcggccatcacgaatcggcaggaaggctacgtacgcgtgtctgagcaggtagcactggagacggtggaggcctggcctttccatatgcggcttcttcagaatgccatcggcatgatgtcgcccgttctctag

SEQ ID NO: 512346 - DNA, 183 bp, Stenotrophomonas maltophilia; identical to SEQ ID NO: 500943

SEQ ID NO: 512347 - DNA, 354 bp, Stenotrophomonas maltophilia
gtgtccgttgagacccttgccagcaaccatgtcgatccgctccccgaatccgttgcgtcttctttcaattgccatatcggcatcctcagccgtgctgaggctttcgttgatcgtgtcctcgctctccacgaaacgacgaacattgtcatcgcctggagacacgccaacatcatcaccggccagcagaccgccgagtgtttccgccgcctccggcggatctgccaagaagacctcggtgccatcgtcagcaacgaaatcacgcccgcaatcctcatcgagcaaaacgccatcaagcgcaaaaggaaagggcagacgaaagcggacgccgccaaggtagccgccatgttggggtag

SEQ ID NO: 512348 - DNA, 897 bp, Stenotrophomonas maltophilia
atgcgacttttggacaccgcaggggacaccgcatgtgttcaggcgggcctccgagtgggcaagattcggcagtgcggcgactggctgctgttccggcattaccccaccaagcaatcgacaaagctccggtctgcaaacttctgttgcacgcacctcgtgtgtggtttctgtgccatccggcgcggggcccgcatgatggctcgctaccttgagcggttcaccctgacacgtgcggatcggccggaacttcagccgtatctggtcacgctcaccgttcgcaacggtcccgaccttcgcgagcgtcttgatcacctggacaagtccctcacccgcctcaacaagcgccgtcatcggccccggtgcaattcggtcatcacgaatatcgccggtgctgtttggagttttgaggtcactcatagcgatgccaacggttggcatccgcacgtgcatgcagtttggctggcggctgaggcccccgatcagattgccctgcgtgctgagtggaaagacatcactggcgatagcttcatatgtgatgttcgccccatcgtccaggacaccggttccgatcaagaagagaacgctgtggtggacccctttgcgaagggattcgctgaggttttcaagtacgcgatgaaagccgccgagttgccgccaaaggttgcactcgatgcctacacagttctccgtggcaggcgtcttgttcgttccttcggcacgttctacggcgtccccgaacctgcaaatgacgatctggcggacgacataccagaagaggaacttccctacatcgatttgctatggcgatatgccggagaaggacgctatgaacacgcaaaaacagttgaccgcaccagccaacaccgagaagggcgaagcgatgatgttgtgctttga

SEQ ID NO: 512349 - DNA, 333 bp, Stenotrophomonas maltophilia
atgacacgcaaacccaatcgaaacccgcgtgtccaggtgacgctgtctcccgaagcaatggccgttcttgaagagttggccaccctgtccggacagcccaaagcggccatcgtttcggaactggtggacgtcgctttaccggccatgtccgtgaccctcgatgcgctccgggtagtacgtcggcagccggaagaggcacggaaactgttgtcgcagttcgctcaccagcagaccgcccatctcgctcaggcccagctcgaactcgatgctgccctggacgcccggacggtaaaagggaggcgacggaagatgaagggggattccgttggatga

SEQ ID NO: 512350 - DNA, 219 bp, Stenotrophomonas maltophilia
atggccggtactgagttggtagcgaccaagtacgcggcctgtgccgagttcgattccagcaacgggcagtgcgccaccgttgtttgggtcgatgcgccgtcgcccattccgccgctcactgcacaacaaggtaccgcccttggcggggcaaccattcttgtgtgggccggtgtcatggcgatggtgatgattcgcaagggtgcacgccttgaacgctaa

SEQ ID NO: 512351 - DNA, 255 bp, Stenotrophomonas maltophilia; identical to SEQ ID NO: 339229

SEQ ID NO: 512352 - DNA, 408 bp, Stenotrophomonas maltophilia
atggaacttacgcctgcgcaattcgcgcgtatcgaggattgcctgccgcggcagcggggcaatgtgtcgctggacaaccttcaagtgctcaacgcgatcctgttcgtggccgaaaatggctgcaagtggcgggccctgcccaagcggttcggcaactggcacacgatctacacgcggatgaaccggtgggccaaggccggggtcctggatcgggtcttcgagcgcatgcaggccgaacagctggtccgggtgcggctggaggcggtcagcctggacagtacgatcgtcaaggtccacccggacggcaccggcgcacgaaaaaaaacggcccgcaggccatcggccgctcccgcggaggctggaccaccaaaattcatatggctgccgcggattcccgctgcgcgttag

SEQ ID NO: 512353 - DNA, 468 bp, Stenotrophomonas maltophilia
atgcgaagcatcgacctactgctagacaaggcccgcgagaagtgcgaacgcccgtccgacagggctttggccgaaaaaatgcgcgtgaccgccagcgcggtatcgaagtggcgaaagggcggcgtgatcacggaaacgcacgcaagtgcgctagcagccatcgcaggtatggacggtgagatcgtcgtccgggtgatggaggagcaggctgagacccccgctcaacgcagggtgtggaggtcggtgctggacaggttgagcgcggcggcggcagtgctggtgctggtagtggtcgcaatgccaggcgtcgcacgcgcaaaggcgattgaaatcaaaggcttggacgagggtgacgccgcagtctgtatattatgttcaagctgctgcaggggtggctggcacgcctcttgcccagtccccggctcctacgttggcatggagcctgatcaatgcgtgatcggaaactga

SEQ ID NO: 512354 - DNA, 282 bp, Stenotrophomonas maltophilia
atgccgatgggaacccatgcccgggggagggtggtggtggtactgatccgggtggtggcacgaatcccggcaatggcggtggtagcggtgctggcagcggcacctgtgcgcagccgcctgtatgcagcggtgatgcgatccagtgcgcgcagcttttccagcaatggcgtgctggctgtcaggctgaggggctgggcggcaaggtcacgggtgatccgacgaattgcaaagctgcataccagtgcgaaggcaacgcgattgcctgcggtcagctcgctgtaa

SEQ ID NO: 512355 - DNA, 219 bp, Stenotrophomonas maltophilia
atggcgctgggggcagcgctcaccgcaatccggtttttccgctactggcagtgggccaggtccgccgagcaacggcgccaggacttcgtggtcgcagccgtcgccgccaccttggccgcgggggccgccgcagccgcgatcgccgggccgcaggcgcccgtcgacgatccggacaccgtcaccgacctgcagcaggggagggtcgggtatggcgactga

SEQ ID NO: 512356 - DNA, 6138 bp, Stenotrophomonas maltophilia
atgaaccgcatctaccggcgtgtatggaaccgccagctcaatgctctggtggtggcctcggaactggccaccggcgacagcggtggcagtgccgcacgcgatccgcgcacgtccctgctgatgcccaccgcgctggctctggcactgttgtgcgtgctggccagcggccacgcaggggcatcggagaccaatcaatcgctgcgtgacctgcaggcgctggccgccaagtatgcgcaaccgatgccggtcaaggtcgacgcggaagtcgccctggccgctgccgcgcgacaggcacagagcagcccggcactcagcgcggacgcccgcgtgggcctgcagctgaacaccacgtcgctgccgctggtgcgcgacgtgctgccggccacggtgcaggtgaagctggcagcgaacaccgcgccgcagcagattgccgtgccggcgctggcggccgatgtccgcgccaatgtgggcgtgggcaacgccgcggccaacgcggcacaggtggatgcgtcgctggacgcgcacgttgcgccgggcgcgcagtcaaccggggttgtcgctgctgcggcgcgcgccaaggccaaggtcgacgtcgccggtcgtcagatcgcttcgcttgatgcgggtacgcacgcctcggccggcctgcggggcgcaaccgctgggtcgctgcccgggctggacaccacactcgacagccggaccgacgcgcgcctggcggtggccggccatcacatcgacgggcaaggccaggccagagcgacggcggccgtccgcttgccggccaaggaagagttgccgggtgaaacccacgatcgtgccatcagcgccgcgttcgacaccggcgccgccggcaaggtgcgcgtgcaggcgccggacggccaggaagtcgtcgccgaccgcaacctgaagctggctgggcagacggccgtggccgcgcagcacagcacgctcggggttggcaatctggtgggcggcgccgtgggcgccgtgggtggcacgctgcagggcgctgccggtgcggtcgggagcacggtgggtggcgcgctgagcggcacggtcggccaggtcggcagtgcagtgggtggcacgctcaacaacacggtcggcgctgtcggtggcgcagtgggcggtgccctcaacggcacggttggctcagtaggaagcgcagtgggcggcgcactcaacagcaccgtcggcacggtcggcagtgcagtgggcggtgccctcaatggcacggttggctcagtaggaagcaccgtgggtggcgcactgaacggcaccgtcggcacggttggcagtgcagtgggcggcacgctcaacaatacggtcggtgcggtcggcggcgcagtcggcggtgccctcaacggcacggttggctcagtgggaagcgcagtgggtggcgcactcaacggcaccgtcgggacggtcggcagtgcagtgggtggcacgctcaacaacacggtcggcgcggtcggtggcgcagtgggcggtgccctcaacggcacggttggctcggtagggagcgcagcgagtggtgcactcaacggcaccgtcggcacggtcggcagcgcggtaggtggcgcactcaacggcaccgtcggcacggtcggcagtgcagtgggtggcacgctaaacaacacggtcggtgctgtcggtggcgcagtgggcggtgccctcaatggcgcggttggctcagtaggaagcgcagtgggtggcgcactgaacggcaccgtcggcacggtcggcagtgcagtgggcggcacgctcaacagcaccgtcggcacgatcggcagtgcagtgggcggcacgctcaacaatacggtcggtgcggtcggcggcgcagtcggcggtgccctcaacggcacggttggctcagtaggaagcgcagtgggtggcgcactgaacggcaccgtcggcacggtcggcagtgcagtgggcggcacgctcaacaacacggtcggtgctgtcggtggcgcagtgggcggtgccctcaatggcaccgtcggcacggtcgggagcactgtgggtggcgcactgaatggcaccgtcggcacggtcggcagtgcagtaggcggcacgctcaacaacacggtcggtgcggttggcggcgcagtgggcggtgccctcaatggcaccgtcggcacggtcggcagtgcagtgggtggcgcgctcaacaacacggtcggtgctgccggtggcgcagtgggtggcgcactcaacggcacggttggctccgtcgggagcactgtgggtggcgcactgaatggcaccgtcggcacggtctgcagtgcagtgggtggcacgctcaacaacacggtcggcgcggtcggtggcgcagtgggcggtgccctcaatggcacggtcggcagtgcagtgggcggcacgctcaacaacacggtcggtgcggttggcggcgcagtgggcggcacgctcaacaacacggtcggcaccgtcggtggtgcagtcggcggcattctcaacggcaccacgggcagccccggcactggcctgggcggtgtgctgggtagcacgctgggcaatgtcggcagcgcggtgggcaacctgctcaacggcaatctcaatggcaccatcggcaatctgggcagcgccgtgggtggcctggtcggtggcacgctcagcggtatcggcctgaccaaaccctctgcgattccgccgaccagcccgaaggcgccggcggcggccgacccgaatgcgggcctgatcatcggtaccggtggcctggtcggcaatgtcggccagctgatcgggccgaccaccaccagcctgttcggtggcaacggctacctgagcaacggcaatctcaagctcagcaatgccaacgtgatgcagacctattcgacggtcaatgtgctgggtctgccggtggtcaacctgtcgccggtcggcagcaccctcaatggcctgggtggcgcggccacgggcggcagctcgcacctgaccctgatcggtggcgtgacctccgacagctacatctacaacatcaacaacggcaatccgggtggcctgctgggcttgctgctgccgaaggattccccggcctgggcagccaaatgcctggacatcgcgctggccgacatttcctgctgggccgtcaacgcggcccaggactaccaggtgttgatgggcgatggcgccttcgccaacgggtcgaaggaagtggtgatcggtgccaacgcacggcatgagctgccgaaggtcgatgccaacgtcgccttccccggtgatggcgtgaacgatctcagcaacccgaccggcgtgccgacggccgactatgccgcgcgcatgggccattcggtgatcgtcggcgacagcgccgtcggcaccgccaacgggcagaccctgctgggtgccgagtccacctccaaccaggccaactcggtcgcgctgggctaccgctcggccgcactgcgtggcgcgcaggccagctacagtgcctacggcctcacggcgccgcaggtgtcggccggtgaagtgtcggtgggcaccgccggcgggggcgagcgccagatcaccaatgtggctgcgggcagcggcaacaccgacgcggtcaacgtagcgcagttgaagggggccatcagcctgatcaatggcgtggcggatgcggcagtgacctacgatctggacgccggcggcaatccgaactatcgccgcgtcaccctcggtgcaggcacgggcaccaccaccatcggcaacctcgccgccggtgcggtcaccgcgggcagcctcgaggccgtcaacggtggccagctggcggcaaccaacagcgccatcgccagcttcttcggtggtcgtgcagcctttgacccggccagtggcatcttcaccgcaccgctgttcgagatcagcacgatctccaccggcggcgccatcgccaagggcctgtacaccaacgccaccgatgccttcgcggcggtggatggctcgctggtcaacctcaactcgcagatcaccgatatccgcaacggcggtaccaagtacctgcgggtgaactcgaccggtaccgaggccgtggccagcggcgccgattcgatcgcggtcggcaccaatgcgcgggcgacggcggccaacagcatcgcggtgggggcgggaagccttgctgatcgtgccaacacggtttccatcggtgccgctggcgcagagcgtcaggtcgtcaacgtggcggccggtaccgcggccaccgatgcggtcaacgtaggacagttgcaggcctcggagcagggcgcgctgcgctacgacctcaacgccgatggcagcgtcaactatgccagcgcgacgctgggccagaccggcaccgccaccacgctgcgcaacctcggcccgggccaggtcagcgccaccagcagtgaggccatcaacggggcccagctgttcgccgccaaccaggcggtggccacccacctggggggtggcgccacagtcaacgccagcggcgtgctgaccgcaccgacgtactcgatcaacaacgtcgccgccaacggcaccgtgaccaagggcagctataacgacgtcggcaccgccttcgacgcggtcagcaattcgctggccaacgttgccgaccagaccggcgagatcgacaagctggccgtgaagtacgacgtcgatggcagtggcaatgtgatcaacagcgtgaccctcaagggcaccggtacgggcgcagtgaagctcaccaacgtcgccgcgggcagcatcctggccggcagcagtgatgcgatcaccggcgaccagctgttcagcacgaacagcaccctcgccaactacttcggtggcaccaccgcctacaacggcaccaccaatgtgtggactgcgccgacgttcagcatctccagcattgccaccgatggcaccttcaccagcggcgattacaacaacgtcaccgccgccttcactgccgtcgatggctcgctgaaggtcctcaaccagcgcatcagcaacggtggcggtggcagtgcctacctggcggtgaactcgacggcagccgcagccaccgcggccggtgcggaagcggttgcggtcggtccgcaggccagtgcagccggtgccaacagcgtggcggtcggtaacggcgccagcagcagtgccggcaacagcgtggcgctgggtgccggttcggtggccagtgtcggtgcacagagcggctacaccggcgcctacggccagaccggtgccagcaactcggccggtgaggtctcggtcggcagtagtggcagcgagcgcaagatcacccacgttgccgatggctcggacgaccacgatgcgaccaatgtcggccagctgaagaatggcgtgaactacgccatcgaccagtccaagtcctacaccgaccagaagatccagaacatcaccaacgtcgccggcagcttccgtgccaacaacaccaacaacctggccgacccgtccgccagcggcgccaactcggccgccggtggtgcgggctccaccgccgccggtgccaactcgaccgcgctgggcaatggttcgcaggcgcaggccgacaactccgtggcgctgggtgcgggttcggtggcgaaccgggccaacacggtctcggtcggtgccgccggtgccgaacgccaggtggtcaacgtggccgacggctcgcaggctaccgatgcggtcaacgtgcgccagttgcaggcctcgcagcagggtacgatccgctacgacaccacggtgaacggcgcgaccaactacaacagtgtcaccctgggcagcaccagcagcggcccgaccacggtgcgcaacgtcgccgccggcaccgccggtaccgacgctgtcaacgtggaccagctgaagtcgggcatggcgcagaccctggactggtcgaaggcctacaccgacgagcgcatgggcggcttcgagcgcgacctgcgcaagaccgacaaccgcgcctcggccggtatcgcttcggcgatggccaccgccgccctgccgcagcccagtgaagcgggtcgcagcatggcctcgatcgccgccggcagctacaacggcgaatcgggcgtggccgtgggcatctccggtgtctccgaaggcggtcgctggatctacaagttcagcggttcgaccaacagccgaggcgaggccggcgtggccgtcggtgccggcatccagtggtga

SEQ ID NO: 512357 - DNA, 1467 bp, Stenotrophomonas maltophilia; identical to SEQ ID NO: 502381

SEQ ID NO: 512358 - DNA, 627 bp, Stenotrophomonas maltophilia
atgccttgccgcgattcccttgggaaaccctggaccggtagtgccggccgctggccggcaaccgcgttgatcccaccacacggggatgccggccagcggccggcactaccctggtatcagcccagcgcttcggccactgcgcggaacacctgctgcatctgcggcggctggaacaggcggtggacgcgctgccgcgcttccgctgggaaaccctggaccggtagtgccggccgctggccggcaaccgcgttgatcccaccacacagcgatgccggccagcggccggcactaccgtggtatcagcccagcgcttcggctgccgcgcggaagatcggctgcatctgctgcggcaggaacaggcagtggatgccttgccgcgattcccttgggaaaccctggaccggtagtgccggccgctggccggcaaccgcgttgatcccaccacacagggatgccggccagcggccggcactaccctggtatcagcccagcgcttcggccaccgcgcggaacacctgctgcatctgcagcggcttgcgcagcacatgcacctccacgccgggcgggaacgcatcggcgggcaccgccaccgcggcatcctccagcaccagcgccggcccgcgatag

SEQ ID NO: 512359 - DNA, 702 bp, Stenotrophomonas maltophilia
atgcagcaggtgttccgcgcggtggccgaagcgctgggccggcactaccggtccagggtttcccaagggaatcgcggcaaggcatccactgcctgttcctgccgcagcagatgcagcaggtgttccgcgcggtggccgaagcgctgggccggcactaccggtccagggtttcccaagggaatcgcggcaaggcatccactgcctgttccagccgctgcagatgcagcaggtgttccgcgcggtggccgaagcgctgggccggcactaccggtccagggtttcccaagggaatcgcggcaaggcatccactgcctgttccagccgctgcagatgcagcaggtgttccgcgcggtggccgaagcgctgggccggcactaccggtccagggtttcccaagggaatcgcggcaaggcatccactgcctgttccagccgctgcagatgcagcaggtgttccgcgcggtggccgaagcgctgggccggcactaccggtccagggtttcccaagggaatcgcggcaaggcatccactgcctgttccagccgctgcagatgcagcaggtgttccgcgcggtggccgaagcgctgggccggcactaccggtccagggtttcccaagggaatcgcggcaaggcatccactgcctgttcctgccgcagcagatgcagcaggtgttccgcgcggtggccgaagcgctgggctga

SEQ ID NO: 512360 - DNA, 216 bp, Stenotrophomonas maltophilia
atggcattcgatgtgcagaagcggcgggcagggagcgcccaggcggtggccggtcggggcgccttcggtcacaacgatgtgaggccgatggccgggccgacacagcggcacggaatcggggagcgggcgagagctctggcgcatggtcagcccctcaccgtggagctgagcgcccagcgtgccttggccgcatcccggtcgctgtgcgcctggtga

SEQ ID NO: 512361 - DNA, 186 bp, Stenotrophomonas maltophilia
atggcgcatgacaggaggctggaggagcgagtgctgcactccaatgcgaagctcgccagggcataccgaatcgcggcccaggcagccctggacaacccatatgagcactcccggcgcttgcgcctggagcgggcaagagaatacctgcgcctggcgcggggctacgaaaaggcaatgcggcaatga

SEQ ID NO: 512362 - DNA, 432 bp, Stenotrophomonas maltophilia
atgggcaccaccaccacgccgcgcggcgtacgcaacagcaatcctggcaacatcgaccgcaccagcacgccgtggcagggcgaggatcggtccgccgccgccaccgcgcgcgagccgcgtttctgcgtgttcctgaccccacaggccgggttccgagccttggcaaagacgctgctcacataccagcggaagcatggcctgcgtacagtgaaggagatcatcggacgctgggcaccgccggtggagaacgatacgggcgcctacgtccggatagttgcggcggcggtgggcgtcgcgccttccgaagtcatccggttggataacccggtgacgctggggcgtctcgcgacggccatcgcaaagcacgagaacggtggcatgtactggagtgccgatgtggtcagtgctggtgtcgccgaggcgctcagctga

SEQ ID NO: 512363 - DNA, 999 bp, Stenotrophomonas maltophilia
atgagcctcaccccaacgatctatcgaagcactgatccaggtgcgccacttctgtccggtactgtgggagcgctgctcacggttctggacgcaatccttgttgacggctacggcttgggagacagccggaaggccggtatgggctggaccaagtcgttctccggctccgggctgagagcgtaccggaactcgcccatcacgggatctggctactacctgcgtgtagatgacacggccgcccgatcgtcgctgcttcgcgggtactcaagcatgagcgatgtcagtaccgggaccgatcctgttccatccgatgccatgaagtcccttggctcgcgctgggataagtcaggcaacgccagcgcggaggcgcggcattgggtggctgtcgggaacgagcggttcttctatttgtttatcgataccgccggcatttttgcctcgcagggcacgcaaggaacctacggtcactacgccggcgacttgatctcgatgcggccaggggataggcacaatttctgcgtttcctacaagggcagtgacacagaggccagcagtaccatcgggtatgccttcaaggcacagtctgggtggtctggcggtcccaccagcgacacctcaacagctgcctttatcgcgcgctcgtacaccggcacgcctggctcggtgcgcgcctgcattagcgcgcctgggcagggcagcggcggcctggttggcagtttggtgagctttccggcctatccatacccagggaatggtggactgctttacgggtcggtcgatgtgcttgaggcggcctatcaaccccgtggtcggttgccaggcatctacgcgcccatccaccgccggccgttccccgatcaaggccagatcaccgatgttgaagggctcccgtctggaacggtgctgatggctaagaacgtgagcggcgaaacgatgagcggcttccatgattctttcactggtcagatcttgatcgatatgacgaatgcgtgggagtag

SEQ ID NO: 512364 - DNA, 1152 bp, Stenotrophomonas maltophilia
atggcaagcgatatcgtcgacgaagattggaacgaagacttggccagcgaggtaaccgctaagggcgttagctctttggtggtctactctcgagattggacggttgacactattcttcgacagatcgagcagggaaatattgatctaaatccacaatttcaacgtagaaatgcgtggactgacgccaaaagaagcaagcttgttgagtcgttgattatcggtgtcccggttccggagatcgttctggcggaagatgtcagcaggaaaaagtcttttattgtaatcgacggaaagcagcgtcttctcgcgctggcaggcctctcggacccggctaagtacggtagctgggagaagcccattctgacgggattgcagactaggtcggatcttaatggcgacgacgttgcggcgctttcagcgaaggcggatgattatcgtcagctgatgaatgctgacattcgttgtacgataatttctaactatcagtcatcagatgttctgtacgatatattttatcggttgaataccggatctgtgccgcttagttctcaggagctccgtcaggtgctgaagagggggccgttctcggatttccttatttctgtaactaataatcgtctgccgctgcatgaagtcatgcggcttagtgggcctgataatcggcttcgggatgcggagatcgtcttaagatatatcgcgatttcgttgaatggtatgcagtatggcggaagtttgggggcgttccttgatgactcggcagagatgattaattccaagtggggcgagcttgagccagttgttgagggtcttttccaagagttgaatcatgctacggcgagccttcttgataaatttggcgaaaaagtcggcaggaaggtggtaggggggaaatgggaaggtcggttcaacagggctctgtttgaggttcaagcatactatttcgggaagatacctgctgatgcactggccagggtgactccagctgaggtaaaggagcaatttagtgaattttgctcgaacactccggacttcctggattcgatcgaaaccacgacgaagaatccccgtcgatatcgagctagatatgagcttttcatgggatttgtaaaccgggtctttgaaacccaaattgctagtgtaccggtcccttga

SEQ ID NO: 512365 - DNA, 816 bp, Stenotrophomonas maltophilia
atgactactgtcagtgtgtaccggcaggagctcggccaggagatcgatgcgcttagcaagaggttcatagcgccatggatgcctgttgatcccgatcatacgccggccatgttcgaacacgacgtaaaggctttttgcgtccttgctcatgctgcctttgaggaattcgtagaagatctaacaaggttggctatggaagaagcccgccaggcttggcttgacaagaggtttagctacgccacgatcgctttgctaggaagctatggcccctacgtcaagatatcggacgacgaaaagcagccgcagaaaaggctattcgaccaagtgcgggaggggctgaataaaggggtcaatgctcacgggaacgtaatcgctaacaaccatggcttctcacgtccttacttaaggtcactcttcacccccattggcgtggacgtgcctgaagacccggatcttctgcaatcgcttcaagaccttgctaatgccagagggtctttcgctcacactaaggccattgaggcaaagtacggtgaggctagagcaccgaagaatgctctgagaccaatgatgcctgagaaggcggctgaggcggtgcagaggtgcttgttgctttgcgacgagttggctaagcggtttgagtttgtgctcggccctgcttcctcgactggggtgcagccgccggtgaccactacacaagttaatgcaccgccaacgcaagcctcgcctgtcgtgcccgctggtgttgctgaatccgtgtccttggcgggcgcggtggtatccggtgaaacggatgaggatgtgcacctagccaagtga

SEQ ID NO: 512366 - DNA, 288 bp, Stenotrophomonas maltophilia; identical to SEQ ID NO: 505803

SEQ ID NO: 512367 - DNA, 654 bp, Stenotrophomonas maltophilia
atgccggaagctctattcgtggcaaccgccaaggccgctcccgcggccactgcagcggcgaacaacggaggcgactggaagtggctggtgccggtcgcaactctgctccttggcttcggtctcaagtgggtccaggaccacttgacggagaaggctcggcagaagcgcgacgatggactgcgccgccagcagcgctacgacgcactgcggatgcggcgcttagaggcagagcgcgccaacctgctggcgctccagcccctggtagtagccttcatgcgagccgcaaccgacgcctacaaggtgaagatgaaggccttcggagagggtaggggcgccgcagcctatctgcccagcagttcgatagagcgtgacgctgcgctgcaggcgatggccagggtcaatgacgatgttcgtcaatcgtcggccgcgatcatccccctgcagtcacgacttcactctgcggaagtccgagccgcgttgaatgagctgatcgatgttgtctgggcaaccatggattccaagaacagcttggggatgatgaagaactggcagctggtcgatcagccgcacaacgaactacacacgttgatgggccggatcatcaagcagcttgaggacgagaacttgcagctcggcgatccgcccgcgcgttga

SEQ ID NO: 512368 - DNA, 351 bp, Stenotrophomonas maltophilia
atgaagtctcttgcttttggcattgctttgcttgtcggggtagtgtcgggcccggccgttttgactgccgaggcggcgccgatcaattcgagcaccaccgtcgagtccaagaccatctacgcggcgaagtccgctgaggctgcctctgtcctggagtggatcaaggcgaggtcccccgagttcgcttcaacggcaaccccaggggatatcactgtccgcctcaagcaagtggcgccgaagctcttgacccggtcgacatcgtccccgccggttccgcttcctagcaatggccaggaaggcgaggaaatcacgatcaccaatcgccagtccgacgggaccattgagacctga

SEQ ID NO: 512369 - DNA, 738 bp, Stenotrophomonas maltophilia
atggacactacaaaatttaagaattcttcgacgccgattggaaagttcgtgatcgccctcgcaattcttgctgcaaccacgcccagcttggcaagcgcaagtcagattgccaatgaggaatctgcgattaaagaacgccagcttgaatcttcagatggaaagcaatgggttgcccgaatcatcccatcgcctgattttaacggaggcaaggtgttggtcgagcaacgcctgtttaaagatgggaagggcggacttgtatatcgtttcgacgatcaaaccccagcgaccaaaacttatcaccgagcactgtgtgaagctaaagattctgtcccctcgaggggcgcaaccacaatttccgggcaggcggcgtggagttggtcctgcacaaacagcaaggctgacacatcctcttcgagcaacgcgccgatctccgcaaggagttctgactatctgttcgctgttgcgccagacgggaactatcctgtaggaagcaatttcacatcctctggtgtcattgcatttaaaagcgtagtcgcgggcgacatgaaggcaacactctccatcgatgatggacggtgcacaacgtcagtctctgagccatacagcacccgcttcgatggcacgcacatagcgcaagtggcatgtctgatcagtgatgcccggactgtgaacacttcgatggaagggtgcataccacaacggtgcgctacgagcagaggcttcctcaatcctctgtag

SEQ ID NO: 512370 - DNA, 291 bp, Stenotrophomonas maltophilia
atggacagtggtgctggttttctttcccctgcaacaggcttggaggtggggcccaaggcatcgagggggcggcactctcgccgccagatgctggagaagggcatagaagatgagcgccatagggctcaggtggtctcgatggaggccttcaaggcaggccgggtggggcagatccccccggagttgctggagatgtacgaccagctgacccgcgaccagcacgcactggtgcggacttcgatcgtgctcgtggctgcgctgcggaggcgactgggcctgccggacctctaa

SEQ ID NO: 512371 - DNA, 561 bp, Stenotrophomonas maltophilia
atggctgaccacgcagcgcgcaatcgcgccaccgaccacaacatccacccagatctggccatggaactacgcgcgattgcggcggtacccatggatctccgccggccagcgctgcgacgcttggccgcgcggatcggcacccgcgctatggccgacctgttcggcgagttcattggcctggccaaccaggtcgcccgcaacgcccgcgagcaggccgaggacctgctggtactgcagggtcacgtgtggccgcacgaggccgagcgcgtgaacatgccctgcatcttgggcgcgctcaacggcattgtgctggccgccggcatcgaccctggcccgctctgcgggggctgtgctttccgcgccggcacgtggccaaccagtgcctcccgaccacggaagacgccgactactgctccccccccgggcgagcgccccttcctctgccacgaagccgtcgacgagcacggcaacgcgatcagcgcctgccgtggcttcgcccagcggcgcgccgcattgaatgctgccgagcgcagcaccgaagaccaggagcccgccgaatga

SEQ ID NO: 512372 - DNA, 270 bp, Stenotrophomonas maltophilia
atgaatactgatgaccacctgtccgtgcgctatcacgtgcacctggatgtcgccggcgcactgtcgaacatgaccgaccaggatctggacgggctgtttcaacgcaatccgcctggagagccggtaactgcagccgaagcccggcaggtgctggccgaccacctggccagtggccgcaaggtcatcccgctcgctccctgtgagggcttcgactacaccggcaccggatgccctggccacgtcgcagcgaacgaggtagaccatggctga

SEQ ID NO: 512373 - DNA, 231 bp, Stenotrophomonas maltophilia
atggctgacgcaggcattgccgacggcactgccacccggatcctgcagctgctgcaggagggaccgggcctggccggcgagctggccgccgagctccagctgccttcgaaccgggtcagcagctacctgcaccagctggccaagactggccgtgtgcggcgcgcgccattccatggccctgacgagcgcccatcggtcctctggagcctgcaggtggtgccccatgagtaa

SEQ ID NO: 512374 - DNA, 279 bp, Stenotrophomonas maltophilia
atgagtaaccagggtccctcgtcacgaggattgtcgagggccgcatcccccgcgaacctgcggccggtccgattcgtgacgctcaagcagttcgaagcactgaccggctacacggtcgatgccatcaactcgaagatcaagcgtggcgattggctggagggcgctgtgttcttcaaggcaccagatggaagaaacttgatcgacctggaggggtacgaagagtgggtaatgcacggcaaggcggcgtcaggccagctacacagagcagcatcgcaatag

SEQ ID NO: 512375 - DNA, 1875 bp, Stenotrophomonas maltophilia
ttgatcctcgtattcgactgcgagaccaatggcctcctcgacgaacttgacacgatccactgcatttccctccaagaggtagatgagaccggcgcaccgcgcggtcccatcctgtccgccaacgatcacggcacgggcgaaatgacagtccgtcaggccgtcgagaggctcaagaaggccaagcgcgttgtcggccacaacatcgccggattcgacattccggctatcgccaaggtgttcccggacttcaaggtccaggcgtacttcgacacgttgctgatgtccacgctggtctacccggacctcaaggaccgcgacttcaaggcccgcaagaagcagggagcgaacccggtgttgccgggcaagctgatcggccgccacgccctcgaagcgtggggctaccgcctcggtcgctggaaaggcgactacgcggcgcagatggccgcacgcggcctcgatccctgggcacagtggtctcaggaaatggacgactactgcgaccaggacgttgcggtcacgcaagcgctgttcgcattgctgatgagcaagggcctccctaccgaggccatcgagctggagcaggccgtcgcgccgatcctctcgcgtcagcagcgctacggctacctgttcgatcaggagaaggcgcgtgagctggagtgcatcctcgtgtcccggcgcactgcgctggaggccgagctgcgcaaggccattccgccgtggaaggtggtgaagcgcaagttcgtaccgaagcgcgacgacaagcgccgcggttacgtcaagggcgtggaggtcacgacctacaaggacgtggtgttcaacccggcgagccgccagcacatcgctgaccgcttgactgcaatgtacggctggcagccccaggagttcaccgagaagggccagccgaaaatcgacgaagaagtcctgggcgcgctcaagttcccgatcatcccgctcctgctggagcacttcatcgtcaacaagcgcctcggccagctcgccgaaggcgacgaggcgtggctcaaggccatcaagaaggacggccgcatccacggcagcgtgaatcagaacgcagcggtgaccggccgcatgacgcactcgaagccgaacatcgctcaggtgccgaaggtccagcactcgaaggagaagggaatcctcaagggccaggaaggcggctacggattcgagtgccgctcgttgttctgcgtcccaacagggaagctccaggtcggtgcggacgcctcgggattggagctgcgctgcctggcgcacttcatggcaaagcacgacggcggcgagtacgccaaggtcatcctcgaaggcgacatccactccgtcaaccaatcggcggcaggactgcccagccgcgacaacgccaagaccttcatctacgccttcctctatggggcaggcgacgcgaagctcggctccatcgtgggcaagggtcgccaggccggggcgaagctccgctcgaagttcctggccgggctgcctgcgctggagaagctggtacggggggtcaagaagcgcgcggccgagaagggatacctgatcggtctcgacggccggaagctgcacatccgcagcgaccacgccgcgctcaataccctgctccagtcggccggtgcgctggtgatgaagaaagccctggtgatcctcgacgccgacctgcaagccgcagggctggtgccgggcgtccactacgagttcctcgccaacgtccatgacgagtggcagatcgaagtggacgaggacaaggccgagttcgtgggcaagaccgcccaagctgccatccgcaaggctggcgatcacttcggcttccgctgtccgctggatggcgagttcaagatcggaaggaattgggccgagacgcactga

SEQ ID NO: 512376 - DNA, 657 bp, Stenotrophomonas maltophilia
atgactgccgagcaacacgctcggtccctgttcaacgtgttgccggccgaagtccgccacctggtcatcctgggtggcggaagcctgcgcgcgttctacgacgggaccgaaatcaaggacatcgactgcttcttcaagtgcagcgccgactactactgcgtctccaacgtgctcgacgacatgcctgggtggaccagcgaggaggccccgaccggcatccgcaacttccgctcgccctgcggtcgccttgtcagcctgatcggcttcgagttcggcactgtggatgagcatgtgcgccgcttcgacctgcgctgctgcgcaatggccgccgtgttcctggaaaagtacgacgaggtggtggtgtgctactacgacctcgccgaagtggtgcgcgactgcactgagaagctgctgttcgtgctgaacaacaacggcaccgagcgcaccatccgccgcatcacgcactacgtcgaggactacggctacacgctgcatcccgaccagcccgagcaggacgaactgttcgaggacgacgacttccccggccacgcgccgcagggcgtccacacgccgccgaaggcccccgagccggagtacatcctccgcgcccgccgccgcgtccgcgcaatccccgtaaccaaccacggctacccgtaa

SEQ ID NO: 512377 - DNA, 918 bp, Stenotrophomonas maltophilia
atgccaagatctattagctatcgcccggaaatcatagatgaactcatatctctgggccgtattgctagctatcgtcccatttttgaccacgaaaacgacgctgaactggtcggggcttatctatggaacgccaacgtctgcgcgcagctctacccactccttcaactgatagaagtatcgttaaggaatgcgattgacagacctctgagcgcggcgaacccgggccgatcttggtgggccaatgggatcttgcaatacaaatcttaccgccctgggagtccgccgcccgatgtggtgaataagcttgaaagtaactttcgagcggcccgcagtaaggttgtttctgataaacgctcgcgctatcagagtagggtgcctccttcgcaccgagaggttctagcaaaggcagatttctcaacctgggagtttattctggacccggagttcagaggcgatcacttgatttggcccgcccatttggggcaggtcttccgtggagactgggagggaagggatcctacgcagctattgacgtatgttcgtgaccaggttcgctcaatccgaatgtttcggaatcgagtgatgcatcatgagccggcatggaaaaacgctggcgtccactctgaaagtgatgcggtagcttttcttcaaggaagattgaaagcaatgaagtcaatcttgagcttgattcatcccgttcagatgattctcgccgaaaaaagtggtcttatcggtgctgctgagagggcttgcgccgcgggcgagttgcgtagatttaagcttagagctaagtatcgaaagatcgagacgatgagcaagttggagtctgtgctgcgcgacagttccagttccaatgaagccatcctaatcaagtcctatcgcgggcgaggtcggaggttcttaattgtcccggcttaa

SEQ ID NO: 512378 - DNA, 1443 bp, Stenotrophomonas maltophilia
atgacctctaaagaaccagtaacactttcgatggcgtggaaggtcagccaggcccaactggaatgtgtgggcgcgattgatgtgacactcaattgtgacaccaacctcttcatcgacccacttcttctggatgatgcatcagacgaagagtttgcgcagtgcgcaactgaagcatacatctcaaggtttgagaccatatgttcccttcttgcagagtcgaaggaacgcggtgacctcgcagaaaggtccgccagaaatctactgaaatttcacgaagttccctacacacatcttggctactcaagtggcacttccggttcggggtttggccctcaactcatagacaacctggctagcaacgccaaacaagccatttctattggagttcgggaccccaaccttttcatggttctttgtttatttgaagccggagtaggcccagaccgcatcagcgatatgacgaccaacattttggtcgactgcctagctgcctttaccctacgggcatgtacgcgactccaaatccaagttcaagattttacgcttgccgggaggaagcaccagcttccgtggaacccacttaagcccagcgagccaatcctcctagttccgcgcgatatcgttagagacctcccgatcgctgccgactggagcgcgataagcgaagccgcccaggtaaccgaagaccttaagaatcgagtgagtgctcagatcggagatatctggcgggcgaaaacgaggcgcgacaaggatgagacacttaaactcgcgcttaaaagcaagacatcttttgaaatgctcttggacttacttagagcagctgcggacgccccctacgacctaaagaatgaccatcgcggcgaaatttatccagcggatctgagggggcgcatagcagccacagagcccttgtcactacatcaatactccgggcgaggtttgaatttgaccgaagcgacggacgccgtgacgaaaattatcgacaagttcaagtcgctaattgaggataagggtctgtggaaagagctatgggatgaaaagctgacaacagcccgcctagaaaaggcgatgcagcgcctgttttatgcagtcgcagctgcgtactgcgaggcgaacaacctcgacctatcccccgaatccgacgcaggatgtgggccggtagattttaagatgtccaacggcgccaatgttaaggttctcgctgaactcaagcgatccaccaatccgaagctagtcgccggctatacaaaacaacttgaagcttataagggcgtagaagggactacccaagcattctacgtcgtgattgatataggcaaccttagttcccagaagatgtctgagttgagccgaactcgatccgcacggcttgaggcaggacttccagcctctgaaatctgcatcgtcgatgggcgaccgcagaggtcagcaagcaagcgatag

SEQ ID NO: 512379 - DNA, 1107 bp, Stenotrophomonas maltophilia
atgatcaacatcgtcctcgacaccaacgtctacagaaagaatccatttcgttccgacctaccattccaggctttggcgcgactagctaaagccggcctagtgaaggtctatctcccctacctagtcgagcgcgaatttcaaacctatcgtcgatccctgtgccagaaagacatcagcagcgcagaatccgcactaagctccctattgaaaaaggaactgtcaccgacaagcaaagctctagtagaagctacgctcagcgacatcaaggagtacgggcagtcggtacttgatgacgcagagcagtccctactgatgtgggcgaatgagattggcgccatacgacaagaactaacatttgagcagtcaaaaagtgctctggaatcatatttccaaggcagcgcccccttgacagaacctaagaagcgcaacgacataccggactcattcatatatcaggcagttaaagccatacctgccacttcacctctcgtcgtgatcagtgaggatggcaagctcgccgacgctatgtccctaatcgaacacgcgagcacgttcactagtctggccgcatttattgagaaagaatcgacacaagcactaatcgtcgacttagacgtgacggacaagcttcctcagattatttcaataattgaacagcaccaagcggaaaccaatgatatctcatcagcgatcgaaggaaagatcggggatagtttggtcaacatcacgatccactctagccagatacccgatgacaacaacgaagctacagtaagtggttacaacgacgcggaggatattgagcttcacttcgatgatgcgagctactttggcaacggggaaatcggcctcccattcagcctttctttgtgggtttccgcatacttctatatatacaaaccggactactacgcgatggactttgatatcagcgtaacagaccacagcgaccattatttccaagctgaggacgagttcttcctctcggtgtcaggaaccgcaaggatctcggttccaatgcccatccttctcgctttagacactgacgagatcgcaggtgcgctcgaagtgacaatcgattctgtcgagcaggtcgaggtcaattaa

SEQ ID NO: 512380 - DNA, 915 bp, Stenotrophomonas maltophilia
atgtcaggggcacccgccagccctcccaaattcagggtatggccggtactagacataaagctcagtggcgaggactacgagtcctcgctcaattccggccaaatgtccgcactggttgatctcaaagacgtattcgggcgcgcgtactcagtcgtggctcacggtgcatatgacatgcgccgcctgaaggcggaggaggacgaacagcttcagttcactacaaaagtgaaaaagggctcttcaattctagaaaccgactttacccccctggtcaaagcgttttcaagtgccgtcggctcgaatccagagctttctttaatcgcagcccttgtattggggctaacgctcgtttcaaggcccgtaattctaaaacactatgagaacagagctaagcagcttgaggtagaggataagaagctgctacttgcctctatcagaccacagcaaggggacaaagagaagcttgaactcttagaccgagcagtgaggaaactgacctctcggtatccacaattctctcaggtagtccccgacgcccgaagtgcattctggagatttgctgcctcctcagtcgatgccgaaagtctaaccattgacggccttgttcttagccaagaggacttggagctcttggcaaacaagagatcaagaagaattggtgacaaacagacgattcatgagacctgcaccgtaaaatatgttcgaaagaacggtgcgcattacatggtcggactgcagggcaagaacatctcgctgagcgcgaagttcatgaagcctcagctctcagacaccaagatcactaagctcttcaagcacatggcgaacgaggaaaagattgaggtagagctcgaggtacgagtcgtagacaaggccaatctctccggacgattgataaaattcaagctcaaagcgtga

SEQ ID NO: 512381 - DNA, 177 bp, Stenotrophomonas maltophilia
gtgcgtgaactgaccatggatgaagttttcgaagtcgagggtgaaggtgcgatgggcgcctttctcaatggtgccggtgcaggtggttttgccggtgcactcgtcggcggcccggccgggtccgctgccggtgcgctcatcggcggtggaattgccgttgcgctgtacctgatgtaa

SEQ ID NO: 512382 - DNA, 417 bp, Stenotrophomonas maltophilia
atgcaggcggattttctcgatgcacatgaacgccattgggatgatgcggaacgcttgtttcagtcgcagcgctgggccaatgccgatcatctgtacggcatggcggcggagtgtggaatgaagcggctgatgctggcgtttggaatgcaatacgatgcaatcaaggatcgacctgccagccaacaggaccgggtgcatgcggatggcacttgggcgcgtttcgagagctatcgcagcggccatgcgcaagggacgagctatgcgctgtcgcccggtaatccatttgcagactggggcgtttccgatcgctatgcccatcagtccaacttcgatcaagcgcgagcgcaggggcatcaagccggcgctcagacagtacgcagcctgattaccaaggcgcaatacgagggcttgctatga

SEQ ID NO: 512383 - DNA, 2931 bp, Stenotrophomonas maltophilia
atgcaaaaaacaacaatcactctcacgcccttggccctgaaagatgcgcccgcgctaatcgagtcggtttttcccgcccagaaggtgtcgttcgaggcacaaaaggagcggaaggcaaatcttggccaaaccctgaccgggctgggctcctactggaagggtcgcaagccactgatcttggtgcgagccatcgtgcttggcactctgctgccgcccactgacgacgcggaagccgatctcgccatcttcgaaaagctgatggccttcgacgatgaaggattggcccggcgggcattggctgccaacgcgttctcggtgtccaagctccaggagatgatccccatctcggacccggagcgctactttggcggacgtggttggcgacgcgacatcaccgatgacgacaagctggtgctgtaccgccaggcgctggccaccctgtcaggttacgaagaaaaggccagcatcagcaaacgccccgaagaactggatcaagactggctcttctccccggtgtgggcagaggtcaaccgtcactatgctcatctcggtttgagcgtgcagtccttgcccgagctggtggaacagctgggcgtattgcgctacggccaccgcgcccgcgtgggcgacacttttagcggcggcggctccatcccttttgaggctgcgcgcatcggctgcgacgtgtatgcctccgacctcaatcccatcgcatgcatgctgacttggggcgcattgaacatcattggttcaagcccggagcgacgcgaagaaatcgagaagtcacaggaacgtgttgccaagtcggtggatgcggagattacgaagctgggcatcgagcacgacaagcaaggcaatcgagccaagtcatatctttattgcgtagaagcccgttgcccggagacgggatggatggttcctctgtctccctcgtgggtgatctctaagggccggaacatcatcgctcgcctgaagccggatcacggcaacaagcgattcgacatcgagattgtcagtggcgttgcggacaaggaagcagcggctgctgatcagggtacggtacaagacggcgacatggtctatacgctggacggaaagacctatcgcacgcccatcaagacgctgcgcggcgactatcggaatgccgatggcagcacgggcaaccgcctacgccgttgggagaagaacgatttcaagcctcgccctgatgatgtgtttcaggaacggctctacgccattcactggatcgccaaggactcgctcaccaagtcccggcaggagacttggtttgccgccccgaccgacgccgattgggaatgtgagcgccgcgtggaaacgctcgtcgccgaaaagctgagccagtggcaggatgaaggactggttccggatatggccatcgaacacggggacgaaacgacgcgtctattccgtgaacgcggctggacgcactggcatcatttgttcaacgcccgccagcttcttctgatctcgcgctacttccagcatcgcacgccggaagactacgtcttcaacgccaagtcgctggattggaactcccggatcgccaactggatgaaccattgggagaagaccaacaacgtcttctacaaccaagcgttgaacacgttctacaactacggcatccgttgctttttcagccacgaagcaggccggtcgttcggctttgccaacagtccgcttccagagactcgccggtcgatcaagtgccgtgatgcagccaagcttgaagacgacgccgatatctggatcaccgatccaccctatgcggatgcggtgaattaccacgagatcaccgaatacttcattgcctggttgcgcaagaacccacccaaacccttcgatgactgggtgtgggattcgcgccgcgcactggcgatcaaggggtcagacgacgagtttcgacgtggcatgactgccgcctacaaagcaatggccgatcacatgcctgacaacggcatgcagtgcgtgatgtttacccatcaggacagcgccgtctggggcgacctgatcggcatcttctgggctgcgggcctacaagttgtggcggcgtggtacatcgcaacggaaaccaatgcagccatcaagaagggaagctttgtccaaggcaccgtcatcctgatgctcaagaagcgagcggctggcgagcgaactggcttcaaacagcgcctgctacccgctgtgcggcaggaagtggcgcgccagatcgaaaccatgatgcacttgaacgacaccgtggccgcccatcacggtgagccggtgtggggcgactccgatttgcagatggccggttatgcggcagcgctcaaggtgctgaccgcctacacacgcatcggcgacgaggacgtcaccacctttgccctgcgcccgcgcgcacggggtgaagtgaccgtggtggacgaaatcgtccagcaggcagcggaaaccgcatccagcctgctcgttccagagggcctcaccgccgacgcgtgggggcgcctcactggcatcgaacgctttgtactgcggattatggacatggaaaccgcaggcacgtccaagctggacaactatcagaacttcgccaaggcgttccgcgtgacggactacagccgcgtgatgggcgacatgcgccccaacaacgcacgcctcaagcgcgtcagcgaatacgcttcgcgcgatctgacagatgccaccgagatcggcgtgacgcggctgggtcagctcatcatcgcattgcaacagctgctcaaggacacggaggcgcaagttatcgtcgaacaactgcgatccgagatggcggacttcctggaggcccgatccctgcttgtggacatgctgggcttcatcgagcgcaaagcgcccgaatctgaggtgcgctctgccgccgaggtgttgggtgcgcgtttgaagaacatgcgcttcggcgattga

SEQ ID NO: 512384 - DNA, 651 bp, Stenotrophomonas maltophilia
atgaacgccgtgcccgtgccccagcagccgaagatttatcacattgcccatgtggatcgtctgccgtccatcgtggcgacgggcgggcttttgtcggatgcgctggttcaagcgcaggcgctgggcggaacgatggtgggcatgaaccacatcaaacagcgccgactgaccgagcttcaacttgccagccaccccggcttgttcgtcggtgcctgcgtgccgttttacttctgtccgcgctccgtgatgctgtatttgatccaccggcgcaatgcagaactggcctataaaggtggtcaggaacccatcatccacttgcaagcggatttgggcgcagttgtggcctgggccaacgcgcaacccgctcgctgggcgttcacgctatcaaacgccggatcgtatttttttgaagaccgcaatgacttggcgcgtcttggtgaaatcaactgggcggcggtgcaggcgaacaactggagtggcggcctgaaagaaggcaaacaagccgagttcctgttggagcaacattttccgtggcacctgatcgaacgcatcggcgtgcagtcggccacggtctatcgacaagtcgtcaacgcccttccggcgcacggacaccggcctccggtcgaagtgcgcccggactggtattactga

SEQ ID NO: 512385 - DNA, 627 bp, Stenotrophomonas maltophilia
atgtccaaagttgcaggtaacacaccattgcccaaggcacgtgcgcaagtgctgcacacgctgggttttggcgtgcctgcgacttctgatcctcatcacttcaaggtcgttattcccaaggccagcacgggcaaagttcagatcagcgaacaccttggcttgcagtctgcaagcaacgaaaacgcagtgatcgaccgcgttctactggatcggccgcgctggaccgccatccgcgccgaagttcaacgagccttcaacgctcgtctggccgcgcacggcatcaagcctggtacgtggaaggtcggcgacaacccggtggatcgcctgctcggcaaggaattgtgcgtactggcctgggccgtcgagcagatggagatggagaagattcaagtcgctgtgcgcaactggttggcgctgcgcccggaggaacgttggtggctgtttggcatgacggccatgagcaccggcggggtgatggatgggggcaagggctggcgcgcagcgctcaaacacgccttgggcgatgtggcgcagagcgaactgcttgcaccgcgtgcgcgacgtgtcaagtcggaacaagacgctgtccagatctccttgggcctgttcggggaagacgcgccatga

SEQ ID NO: 512386 - DNA, 1452 bp, Stenotrophomonas maltophilia
atgcgattgccgaactaccttgttctatcccccactggggtctatcacttccgctggaaggtccctaagcgcctccaaggcccattgggcctgaaagtggtgaagcgctcgctcggaacgcgcgacgcccgtgtggcgcatctgcaagccctcgtgctcgcctcccgctatgctgtggcccttcaaggaggggatatggcaaagagcgtggatgaactgctccgcagcgcgcagaaggggcaggctgactttgaagtggtagccggtcctcacggctacacagtcaaaacggacggttcggcgcaggacaacgctgcggctttggaaaccgtccggttgctgaacgcgcaaggggtggcctctgttggtggtgcgccgctggccgcatcgactcgcatcgccttggagatggcagtcgaaaaatggtccaaaaccttgaccagtggggcccgtaagactccaggtcagaagttggaggccgtgaaagcttttgttgcgtggaagaactctacgcgtaagcggtcaccggcgcgggtggcaatgggcgatctgtccaagactgattgcgcggaatgggtcatcagtctgaaacaaactcccgcagcgcggaccggcaagccgctgacggatagttatattgaaacaaagacgcgttggctgtcgctgttctttgactgggccatggcggcaggctactaccccaagggagacaacatcgcccgaggccatatcaaggtcagcaagaaggcaaagcggctgcaatcaaaaaagaccggttggcagccttttgaagtcgcccaacttaaaatgattttcgctttcccggcgctcaaggctatgcgccgacagtcgtctcgctgggttgcgattattgcgttgtacacaggcgcacgcagcaacgaaatcgcacagttggaactggccgacttcaaggtggttgatggagtcaagtgcatccatattacgaccgaaggcgcggataagagtctcaaaacggaggccagtgaaaggacgatcccaatacacccggacttgctcgcgctggggctgtggaagttggtcgaaaggttgcaagatgatggtgagagcaagttgtttcccaatctgacgttcgacgccaagaacggcccggccaatggccctcaaaaggcgttcagtcatctgctgagcgatacgctgaaaatctccgctcgtggcgatgggcgtattggactgcacagtttccgcaagacagtcattcagcggatgcaagatggcttggtgggcaaggagtttcgtgtcgcctacgtcggacacgaaggaggccgtgaccttgatgacgatcattcggcggtctatgggaagaaggtgtccccgaccgtcttggctgcgcagtgttttccagcactggactgggcaaatttgggtgtggtaaaagtggcggcgctgacgcctctgtttgctcctgcctaa

SEQ ID NO: 512387 - DNA, 231 bp, Stenotrophomonas maltophilia
gtgcacgatagctatggcagcacgctggccgagacgatcaacgggctgtacaaggccgaggtgatccatcggcagacgtggcgcagccgccagcaggtagaactggccacgctggactgggtgcactggtacaaccaccaacgactgctggggccgatcggatacatcccgccagcggaggccgaagcggcttactatcggcagcaagccggtcaggccaaagcggcctga

SEQ ID NO: 512388 - DNA, 1167 bp, Stenotrophomonas maltophilia
atgaaactattggccgaccacgcactggtaggccagaacgctgatcgtgacaaagggctgctaactggccctatgtttagtcacctgattgccaatctcgtgttgcgtgatgttgatcgcgcaatgtcagcggccttcccgagtcgttacttccgctatgtggatgacgtggtgctggtgggatcaccatcggaggtctctatagggcgcgctcaattggcggcattgttgagtgagttagggcttgacttacatgacgtcgatgcgagcaaggacttcgagcttgctgctggtgattggctggcaggggaagatgatttcggtggcaacgactcacaaggctggatgttcttcgcccgcgatctaaaacagtttctgatttcacagccttcgtctcgtgccgggcttgcagccagatttgctgaagagggattcaggattccattgccggattacagcgttgaagtcggtggtgcgagttatcaggatcgttttctcgatcagctgcgacgttatccgtggctgctagaaaagatattccgacagactacgccgagcatgcttttgttctctgctcagactcttcgcgtggaatatactaagcatttgcttcatatccttgaggttggcccgaagttggatggttacgcacgaaaaagattcatccctaagattcgctatttcgcaggccgactcctatacctggccagaactgaggatctgcctttgattgcagagcgcctgcggcaatatccagagttcgccatgcttgcagaaataatccatgcggtcggcacgcgagatatcacgcatcttctgcgaatgggaagcaatgccgcgcaatcggctgctcaggtcctgaagctgattcccggcgaaatcacttgccgaatcgaatcttggggttctgctgaacgtcagggcttggccatcttgcgagcaaatggcatcagcgttgtcggcccggtcgacgatgagctcaatcgcttcgctatgtggcaggagcgcgggcatgagttgatgaagtcagacgatcccttcatccaggaaatggcctgcctccacggggtttccgaacattcccgccattctcacattcttgagactgcactggatcgcggtgaggagctcgccttcgacgcgacgacgccaatcgatacgtactga

SEQ ID NO: 512389 - DNA, 549 bp, Stenotrophomonas maltophilia
atgaggccacagctactcgcactgcgggcgaccaatcagtaccgcactcgcgacatcatggcctaccttgggctgcgctattacttcgctaatctgtgcgcagggagggatcgctgggccgaggaggtttctctacatctcgtgatgagtcgcagcaggagtgcctattttcattccctgcacttcaaggatattcgcaccgacggtcaggtcggataccgcgacatttttctacccgggcccaatgagtcgttcgcggaagcggcattgcttgccgagtgcagcaggcacgcagcatttcgttctccagatttcgtcttcagctatcgcctggcggaaggcgaagactctcaaggggtttacaagccctatttctcgggactacaagagcggcataagaaaatcgccgttgtatgcaaagcagacgccggtcaggttgtgcgctataccgacatcaaacgtttctatccgaatatctccggtgagctggcaattcgcgcctggctgaaggcgtgtgatgtagctcagatggccccccctgtttcgtga

SEQ ID NO: 512390 - DNA, 969 bp, Stenotrophomonas maltophilia
atggctcgacttattaagcctgaagatatcccggaaacgctttggcaccctggatcgaagtgcctgcgtcttgctccatcgttgctcaccgcatgggggcacttactgcagtacgcgggactggaggaaaaggcactgcagcctgttcccaatggagaaatcggtggattgagcaaggaagagactgatgaccatctggcatggcgcttcagtggttcttcggcgcgagttcaactgagcttgcttgatcctcgggacgaacttgcaggggtctcagacgcgtttgccaaggtcttttcgggtgggaccgtgttgctagctgatctgccttgcggctccggcgcagcggttctgacgatgctggcgagtattgctgagttgcggcgccaaggccgtgttccgcgccacccgctacacgtcaaggttgtaggaggcgagttgtcggaattcgcgcgagactatgccagccgagccatggatcacatcaaggatgcattggctgagcaggcgatatgggtttctgccgagttcctgctgtgggatgcattggataaattttctaccgcggacctgaccaatcgcctgaccgtgcttggccaagagtgttcagcccgcctcattgtgctggctaatttttctggctttctacagggtgaagggaagtggaaagaggctatgccccagtttgaaagcctgttcgtacacggccgagcccttaatagtttcgtactttggatcgagccccaaacgaacaaggtactcgggtcaggtggcttcttcggacgagcccttgattggttcaaaaaattgttctcgacacatcagtccaaggaggagcaggaagctctcgtagttgagaaccttggaaagagtaattcctgcgttcagcatccactgaaggcccatcaatttgacgtccgtctagtaattcagcgctttgatctgcccttgagtggagcgaaggcatga

SEQ ID NO: 512391 - DNA, 204 bp, Stenotrophomonas maltophilia
atggtagatgtgccgaacgagatgccggtgatgggccgtttcgtgtgcctgggcgggttggacaaaatcccgttagttgtacaccatgagattagtcagctgcatcttttgtcggacaccaaaaaacggtctgctatcgacccgaagcggacatcatctatatatgaaaggctgtgcgattcagtatcattctttaggggataa

SEQ ID NO: 512392 - DNA, 267 bp, Stenotrophomonas maltophilia
atgaaaaagtcccgattcaccgagtcccagattgtcacgatcctcaagcaggccgatgccggcatcccggtcaaggacatctgccggcaggttggcatcagagtcgccacctactaccaatggaagtcgaagtacggcggcatgggggcgtcggatctcaggcgagtcaaggatctggaagccgagaacgccaagctcaagcggatgtacgccgagctggcgctcgacaatgcggcgatgaaggagttgatcgcaaaaaaactgtag

SEQ ID NO: 512393 - DNA, 945 bp, Stenotrophomonas maltophilia
atgaacctgcataaacatgcccgtttgagccctcgcggtcgagccctgcttgtggaccgcatccttgttcaaggcctacgcgccgaagaggcggcccatgccgccggcgtcagcgtgcgcaccgcctacaaatggctcaagcgtttcagccaggaagggccggatggcctgctcgatcgctcctcccgtcctcatcactgtccgcatgcaacaccgcaggcggtagtggatcgggtgtttgaacagcgacgtgcgcgccagacctatcgccagatcgccgaacagttgccggtggcgccgagcacgattgcccgcctgctgcggcgcgctggtttgcaccggctggccgagttggagcccgcaccgccgaccaaccgctacgaatacgcccggcccggccagttgctgcatttggatatcaagaaactggggcgcttccgccagcccggccatcgcgttaccggcaatcgtcagatcaactctcgcggcggcggttgggagtatgtccatctggccatcgacgaccactcgcgcgtggcctttgcctccatcgagccggatgagcgcgcccgcagtgccggccgggccctgttgctggccgtgcgttactaccgtgggctgggcgtgcgcttcgagcgcgtgctgaccgacaacggcgcctgttacagatcacgcagcttccgccgtctcgtgcgccggctcggtatgcaccacctgcgcacccggccctacacgccgcgcaccaacggcaaagccgagcgcctggtgcaaaccagtctgcgcgagtgggcctacgcacgcgcctatgacagctccgaacagcgcgcccatgcgctcgggccgtggctgcatcactacaactggcaccggccccatgccagcctcggctacaaaccacctatttcccgaattccactgaacaacatgctgggtttacacagctag

SEQ ID NO: 512394 - DNA, 1890 bp, Stenotrophomonas maltophilia
atgagcgttacggacgatctccacgacgcggcggccgatgagacgattatccgctgtcttgatctttccaagccgcgcagcttcttcctgtatgcgggcgcagggtcagggaagactcgttcgcttgtcgaggccattcgaacgacttgtgaacggcaggggcgagatctgtcactgagcgggcagaaaatcggcgtgatcacctacaccaatgcggcctgcgacgagattaagcagcgcttggagttcgatccccgcgtcgaggtgtcgactattcacgcttttgcttggtctctgatatccggctacgacaacgatatccggggatggttggccggtcggctgctccaggagattgcagagttggaggaagcgcaggcgaaagggcgggctacaagcaaggcagccgccgatcgcgctcgatcgatcgaaagcaagcagcgccgacacgagaacctgggatcaatcattcactttatctacagcccgacgggagacaaccagacgcgcgactccctgaaccatgccgaggtgatcgccatgacggccgattttctcgctgggaagccgggcttgcgtcgactcctcgtcacgaagttccccgtgttactgatcgatgagagccaggacacgagccgccggctcatggatgtgctgcttgacgtcgaggcagcgcatcgagaaaggttctgcctcgggctcttcggcgacatgatgcaaagaatctacgccgacggaaaagaacgcctagccgaagccattccagaggactgggcccgaccgcgcaagagcatgaaccatcgctgcccgataagggtagtggagctgataaatcgcgtccggcaagacgacgatggcgagagacaggtgccacggagcgatgccgcagtgggcaccgctcgcctgttcgtcgcgccacagggggcggacaaaccggcgactgaagccgctgtcgccggaaggatgcgggaaattacgggcgacgaaggctggtccggaggctccgacgccataaaaatactggcgcttgagcacctgatgtccgctcggcgtttcgggttcgaagggttcttcggtccgctctatgccgtcgagcggataagaacgagcgttctgcagggtacagggcccgggatcggtttttttactcgcgaggttctgccgctggtcgctgcgctacgcgcatccgaccggttcgcggtcgcgtcgatcgttcgcaagacatcgcctctcctcgaccgcaaatcccttaaggaggcgggcgaagaccaggccgcggtgctcgccgcagcgaaggccgcgtgcaatggcttactagacctagtctcgggcgatctcgtgcccacggcgcgggaggtgctgcgctacatcgccgagaagcggcttttcatgatcccagacgtgctgacgcctttcgttgcgccggactcgcccgccgaagaggaaggtgttgctggtgcggacgaggaggaacttaacctcaagacagagctcggcggatggcggcaagcgctggaagcgccgctacacgaaatcgagcgctatgatcgctatattcaaggcgcttccagcttcgacacgcaccaaggggttaaggggctggaattcccgcgcgtgatggtggtcgtaagcgacgaagaagcccgtggcttcatgttcgcctatgacaagctgtttggcgcaaaggaaaaaagcgaaacggatctgaagaacgaggcagctggtaaggaaacgtccattgaccgaacccggcggctcttctatgtgacctgtagtcgagccgaggagagtttagcggtcgtctattatggtgaagcggtcgaggctgcgcgggctgcgatcttgaggcagggctggtttgcggaagaagagatcgagattgttgcctag

SEQ ID NO: 512395 - DNA, 2346 bp, Stenotrophomonas maltophilia
atgcacatcaagttcattgagattgcgaatttcaggaagctgctgtcgatccgagtcgaccttgccgcagctacaacgttgtttgtcggtgctaacaacagcggaaagacctctgcgatgcttgccctgcggcgcttcctatcgccgcggcgctgcccatttgagatgcacgactttaccctctgccactggcccgcggtcatcgacattgggaagagttgggtcgcggcgcgggatcaggaagaggttgtcgagctcgtcatcgacccgtggctgtcagtcctaccggcgctggatctttggctccacgtcgaacctggtgagatgcatcttgtgcgtgacctaattccgacgctcgactgggaaggcggcagtctcggcgttcgcctccgctatgagccgaaggacttgaagctcctctacaaggacttcatgggagcactcagcgacgctgaggcgatgcggatggctgcaattgccgccgtggcggctgagcacccggacgccgattcgccgccggcgccgcccaagctgacgatctggccggagagtctcctcgacttcctcagtaagcgtctgtccgcctacttcacggttcaggcctactcgctcgatccggccaaactcatggagccgagcaagtcccaagcccagccccaggctcttccgccaacgtcgctcccgctcggaagcgatgtcttggccggcctcattcgcgtgcatgacattccggcacagcgcggattcggcgaggagcagccgtctcaggaggacgaagatgcgccggcggctgcggcgggaagccgcctttcagaccagttaaagagctactacgcaaaacacctcgacccgacgaaaggacccgatcccaaagacctgggcgcgctgcaggcgatcgaggccgcgcaagatgcttttgacaagcgccttaccgaaagcttcaaggccgcgttcaccgaggtcgagggcatgggctatcccggcgtgaccgatcctcggccgcgagtgtcgactcgcttgaaggcgatcgacggcctcaatcacagcgcagcaatcacgttcgaggtcgacgtaatcgctaaggacggcgaaatgatgccaatcttgcgcctgcctgaagcaaataacggcttggggtatcagaatctcatctcgatgatttttcggctgatgagcttccgtgatgcgtggatgcgcgtcggaaaggcctcgaacaccacttcagcagttcataccgaaccgctccacttggtgttaattgaggagccggaggctcaccttcacgcccaggtccagcaggtcttcatcaagaaggcatatgccgtgctgcgcgcgcatgaggatcttggggacaatgccaagctgcgcacccagctcgtggtcagcacccattcgagtcacgtcgcacacgaaacgtcgttctcgtgcctgcgttacttccgtcgcctcccggctggaatggtcgcgaaggtgcccgtctcaacggtcatcaacatgtccgaagtgttcggggccaatggcgaaacggagcggttcgtcactcgatatctgcgcgcgcaacacgccgacctgttcttcgccgacgccgccatcctcgtggaaggtccggcagagcggatgctcgtcccgaacttcatccgggcgcactatgacgagctgaaccagtgctacatcacattgcttgaaatcggggggagccacgctcaccggatgcggcccttgatcgaacacctaggcctcctgacgctcgtcatcacggacttggactccttgactggaacgggcggcgcgtctgctcagcccgcgaagggggcaggacagaagaccaataacgccacgcttaagacgtggattccggcaacggacgacatcgacgccctcatcaacgctgatgataaggcgaagacccggcgctccgacggtgatccgctcttcgcagtccgcgtcgcctatcaggtgccggtggtggtgacacttcccggagccacgggccctgacacggcatttccgtatacctttgaagatgcgcttgcattcgagaacatcgcattctttgcggcgcttcatgggaccgggctggtgcggaagttcagggcggcggttgacgcaggcggcgacgccgctgcgatcggcagctgtatgtatcaggcgttgaaggacggcaagaaggccgagtttgccctcgacgtgctcgaagcggaggggttcgataacctcgttgtgccacgctacattgccgaaggcctagaatggctgctgacacagctgaagaagaagcaggtcgaaatcctgcccattgagcttaccgagccgaatgcactgcagacagagcaggtggcggaatga

SEQ ID NO: 512396 - DNA, 861 bp, Stenotrophomonas maltophilia
gtgatcgaacgttgccgcgatgagtttccggttcgtctgatgtgccgctgcctgcgggtgtcaaccagcggctactacgactggagcaaacgactgtccagccctcgtcaatgcgataacgagcgcttgctgggccgtatccatgcgctgcatcaggacagccggggcacgctgggtgccggccgcatgcaggaggatctggtcgaggaagggttgatggccagtcggaaccgggttgcccggctgatggcggtagccggccttccgggctggccacgcccgaaacggcgtggtcagcgcgcccaaccggcactgacgccgccgggcgtgcgcaagctgctggagcgtgatttcagcgccctggagccggaaaccaagtgggtgactgacattaccgagatcaagacccagcaggccaaactgtatctgtgtgtcgtgctggatctgtttgatcagcgcattgtgggctggtcaatgcatcatcggcaggaccggcagatggtgatcagagcggtgcagatgacggtttggcaacggcaggagcggcatccgctgatcctgcactccgaccgcggcagtcaatttcgtagcggggattaccaggattacctggccgccaatggcctgctctgctcgatgagtgcggtggggcattgtggcgacaatgccgcctgcgaggggttctttggtctgctcaaacgcgagcggatctatcgcacaacgtatccaacactcgatgccgcccggtccgatgtgttcgaatacatcgagcgccgccacaaccccaggatgcgacggcgccgggtcaagcaggaccagaagttttcaaccctttccaaacagtccgtgatttcggggtag

SEQ ID NO: 512397 - DNA, 243 bp, Stenotrophomonas maltophilia
atgagtgagctgacggtcgccgaagcgctagccaaggccgagcagatcgacgtgatgctgggcgccatccaggcgactgcgccggacgcagtcgcggcgatgggcgggcgcgacgccctggcccgacgcagcgagatgacctgcctcggcccggtgccgcgcctggacgccgaggagtgggagcgcatgtcgctggagtacgaggacaggcgcgagcatggcagcgtcaaccgagggcactaa

SEQ ID NO: 512398 - DNA, 441 bp, Stenotrophomonas maltophilia
atggcagcgtcaaccgagggcactaacgggcacgcggtcgccgtcgaggtggagggcttgcgatacccctccgccaggtcggcggcccaggcgctcggcgtcagctccaacacggtggtccgccgctgccacagcccaagcgtcgccgactaccgctggctcggcgcgacgccgggcaagcgggcggtgcacgaccccgccgaggtgcggatcgccagggagctcatcgagcccacgcgctggccgaacgacggcggcgcgcgacgcgcccccgtgatggaccccaactgtgatccgcccagagtcgtgcgccgggtcggctggctcggctgcatgtgctgcgggcgatcccacttctccgaggacgtggcccgggcgcgcatgtgcctggactgcggcggcgcaggcgggatgcccatcgggacgcgtctagacgattga

SEQ ID NO: 512399 - DNA, 210 bp, Stenotrophomonas maltophilia
atgggcaccactcaagtcggcgtcaaatgctcatgtggaagtgacaagttcgagatgccaaggaatcccagggcatcggatacgatcaagtgctccaagtgcggtgcaagcggcagatatggcgatgtgatgcggcaggcaacgtcgcaagtcaaaacctccgttgagaagcagctcaaggatgtgctgcgaaaagcgggattcaaataa

SEQ ID NO: 512400 - DNA, 723 bp, Stenotrophomonas maltophilia
atgaagatcaccctcagcgacacccagctactcagcccgcagcagatcggcgagctcgcctcgcagctcgacacgctgcactcccgcgtcctcaaggccgtcgagcgcctcaacaaggacgtcgccgccaagaagagcgagatcgcctcgcgctggaagaacgcgccgggcgtcggcgccggcgagctggcgcgcttcgcgcagaacgagaccctcgcggccgtccgccagatcagggacaacagcaaggccgagctggacgcgctgctcaagcaggcgggcgccccgcacgcgcagctcgtcgcgcagaagccgttctacgactccccggcgaaggtcctggcccgcgcggccctgggcgaccccaagcgcaccgagtacctccagcagctccagcacgccggccccgccgagctcggccacatggcccaggtcgccgtcggcacgcgcaacctggccctggcctcggcggtgctgtccctgatcgaccgcatgccgtccaaggaccgcccggtcggccccgtcgagctggccaccgccatgcgcatggacgactacctcaaggtccaggagtacgtgaagctgggcgatgcgcgcctccagggcatcctggtcaccatccgcgcctggaacgccggcaaggccaaccccatcagctcgatccagctcgcgatgcgcgagcgggacatcgaccacgaactgatcgggggcggcgatgaataa

SEQ ID NO: 512401 - DNA, 279 bp, Stenotrophomonas maltophilia
atgaataagctggcccactactcggcggaccacccggtggcgatcgcaatcgccggcatggtcggcgccctgcgcaccggccgagacctcctcgcgtccctggccgagcgggccgaggccgcgggcgtccgcccgtactccgactacttcgacgacgcggcgcgtctggcgggcatgccgtactgccgcgcgctggacctgtacgtggaccgggccacgaagcgccgggccgaccgacttggctaccaccaggcgcacctcgcgctctgctcagcctga

SEQ ID NO: 512402 - DNA, 786 bp, Stenotrophomonas maltophilia
atggccgccaagaagcaacgtagcccgtcataccccggcattccccttcaggaggccatcgatcgggcgcaccagttctataagaaagaaggtaagcacgaggccctcgtgcagaccgccatcccgcactgggggtattcctccaagagcagcggtggcctcgtcacaatcgctgccctgaaagcatatggcctgatggccgataagggcgctggagccgagcgaaaggtctttctcacgcctttcggcttgaatctgattctagacgagcgaacggtatctcctgatcgagataaggcgatacagcaagctgcgctgaccccgaagatcatggccgagatgtggtcgaagttcggccgcgacctgccttcccacgagacgctccggcactatcttcgcgtcgagcgggatttcaacgacaacgccgtcaacgacgtcatcaaggtgtatcaggcaaacgtgcagttcgcccgattgggacaggatgatgtgggattcgaggaagccgacgagatcgagggcgacaacggcgatgccgatccgccaccgccgccgcccggtacgaacgccccaaaccctccgccgcgcgtcgtgcaggcaccgcctatcgttcccctaggcggcgaggaaatcggtaactaccgcgtctccaagacgacgactattcgtctcgtcgcgacgggcccttactcccgccaaagtatcgagggcttggtgaaacaactccagctcggcctcgacctcggcaacttcgacgacctgccggagggggacgaattagcctga

SEQ ID NO: 512403 - DNA, 942 bp, Stenotrophomonas maltophilia
atgtcagaacagatctacaacgtctttcttttctttgacgccaaggacctatgctccgtggcgggctacaccgcccacctgcacgatggatcagaccaggaagggatcgacttcttacggcggcgcgtagacgctgaccttgccattgctcagcaggtctccttatcgagaccgttcatgaggtccgagtacaacgcgagatgccggcttggagaaggccactacctttacgacgagctgttcatgcaaataggcgccggtgcgtcgcctcttttcgtatccacgcctgttctaaatggagtccctcacttcaactacagctccgaacatgggggcctggacgtgaacgatgttgccgaaaaactgggagagcccggcgtcatggtggactggctgcgaaaatacagtagcgacgaaggaatcaacttctcccagctcatccacgatgactacttcttggcgatcaagttgaccttcaacgcaggcctctatgtctctgcaatgaaacttcttgtctcctgcatcgacagcttggcttacatcgagtatggcgacgaccgaggggccttcgtgaaatggatgggggagtattgcgagctagcaccactcggcataaccgcagcggagttgtgggaactgcggaacggcctactccatatgacgaatatcaattcatcgaaggtgcgaaagaaccaggtgcgccgcatatccttcagagttggagatgccccggaagtcccacgcgaagctgggggcgtctactactttgacttcctggggttagtgcaggctttcgctcaggcacaagctcgctggatagagagctacaacagcgatcgagataagttcgccaagttcgtcgagcgctacgacgagacgatctctgatagcagggtggcagttacgcacttgggtggcggcggcttcgcaacatccccctaa

SEQ ID NO: 512404 - DNA, 516 bp, Stenotrophomonas maltophilia
atgaagctggaagacatgcccaccaaggagctgctggccctgcacaaccacatcgccgacaagccggcggggcccaagaccttcgcgacccggggcaagctcgtcgcccggatcgagcagatcgcgaaggccaaggacatcgacctggcctcgtccgggcggccgaagaagcccaaggcgaccaaggagcgcgcacagcctcgggccgacgttgccgaggcgcccgaagcgaccgagaagaagtcccacggcaagggcatcggcgcgctcgcacgcgcgatcctgatggaccccgcgggtttcccgcacgcgctggtggccgagatggtcaacgcgcagatcgagggcgcaacggcaacgcccaagtcggtgcgctggtacgccaacgacatgcgcaagaagggcgtcgcggtgccgccccgtcagaagcgccaccccgccgagatggacgaggagcagtccgccgacgcgctgtccacggtacgcgtcgtcaagtccgcgccgtccgacggctga

SEQ ID NO: 512405 - DNA, 147 bp, Stenotrophomonas maltophilia
atgtgctgggcctgcctggtgttcttcgccggcgtgctggtgctgctgagcctgcagggcgacacccgccaggcactgatcgccagcccggtgtggttcgtgctgctgggcgtggggtactgggtgcggcggaggaccgcgaagtga

SEQ ID NO: 512406 - DNA, 348 bp, Stenotrophomonas maltophilia
gtgcgccggctcgagcgcgaaggggtgatcaccggctaccacgcccatctcgacccggcggcagtgaaggccagcctgctggtgttcgtggagatcagcctggcctacaagtccggggacatcttcgaggagttccggcgcgcggcgctgaagcttcccaacgtgctggagtgccacctggtgtcgggtgacttcgattacctgctgaaggcgcggatcagcgagatggcctcctaccgcaagctgctgggcagcacgttgctgacgctgccgcatgtacgggaatcgaagagctacatcgtgatggaagaagtgaaagagacgctgagcctgccgattccggattga

SEQ ID NO: 512407 - DNA, 408 bp, Stenotrophomonas maltophilia; identical to SEQ ID NO: 502021

SEQ ID NO: 512408 - DNA, 243 bp, Stenotrophomonas maltophilia
gtgcaagaacagcaggcagagctgctgaaacaaacgctgcagcaagccatgggcgacgcatccgttgccagatttggctcgctgggggaggtgatctaccgccgcagcaaggatggcacgtccctggacaccaagcggcttgcagccgagtacccggagatcgctgcagcctgcacggtcgtccgtccgggttcgcgccgtttccggatcaacaccacgatcaaagaggtcaaatcatgctga

SEQ ID NO: 512409 - DNA, 339 bp, Stenotrophomonas maltophilia
ttgtacccaggcaaggacaccgttgtcgatttcagtcaggacccggaattggtcgagaccttcaccaacctggtctcgttcactgaggcagttgcagagcaggaacagcaggtagaactgctcaagcagacactgcagcaagccatgggggacgcttccattgcccggttcggttcactgggagaagtcatctaccgccgtagcaaggatggcacgtcactggataccaagcggctcgcagccgagcacccggagatcgctgcggcctacacggtagtccgtccgggttcgcgccgtttccggatcaacaccacgatcaaagaggtcacatcatgctga

SEQ ID NO: 512410 - DNA, 1752 bp, Stenotrophomonas maltophilia
atgaagctccgccgcctacgtattcacaacttccgctcgatcaccgacgcggacatcgaagttcacgattacactatgatcgtgggcgcgaacaatgcaggtaagagcaacgtcgttgctgcgctgcgggctttctacgaggacatcaagcattccaatgatgacctcccgaagatgcctggtgttcatattgatgagtcttgggtcgagctttcatttcacttgacagaagtggagtggcaaggactggcggacaagtataaggaaggtgccgagggccgcttccttatcgtccgtcgctactttaagtccgcggacaaggagcgtttcaaggccagccaaagtaacatttacgccattgtcaacggagagccagagaaggacctgttctacggggccaagaatgttggaaccgccaaggtcggtagcatcatctacattccagcgctgaccactgctgccgagcagatgaagacgagcggcccgtcgccgctgcgcgacatgctcaacctaatgctgaagcgggttatcgcacaaagccaagctttcaaggagatggagggcgcattctcgaaattgaatgatgaggcgcgtggcgaggaaggtttcttgtcgcagatttcaaggcccatcaaccaatccatcgagcaatggggtattcgcttcgacatgggcgtgaacccgcttgcaccggaagacatcaccaaaaacttaattcggcatggcttcgtggatgcgatgctcggggaaacgttgtttgcgctagatcgctatgggcacggttttcagcggtcgttcctgtatgaacttatcaagcttgccccgagctttactgatgccaaggtggctgtaaagaaagagtttgacccggatttcacgttgatcttgttcgaagagccagaagcattcctgcatccagcccaacaggaaaacatggcataccaccttcgccggctggggtgcggggacgcccagcaggtaattgtgaccacccactcgacgatcttcgttggcaaggtcgctgacgatctatgtcagatagtacgagttcgccgcaataacgggaccagcggcatcgggcaggtcaagaaggcacagctcaggggtgtgcttgggcaagggtatgaattcaagacatggctggaggcctatgtcaacgatccggtcgtgcctgacaccgctaaagggaacgcgcgaaagctgctgcaaggagcgaccgaggacacagccatcgccgaacaggaagagcggtttcgctatcaactctggctagattccgaacgtgcctcgatgttcttcgcagaccgagtacttcttgtggagggtgcaaccgaaaaggccctgtttgcatggctgcttgcacgcgattggcatgatctatcccgacaccgcgtcgcgatcgtcgatgcaatgggcaagtacaacctgcaccgctacattgctcttcttgaagggttcggcattccttatggcctaatgcttgatgacgaccaagacaaaggccaccacaaggtggtgaatgaaatgctgaaaaacaaggcaagtgtgaaccggcttgccgaagcgtgtttcgtcaatgagtgcatggagaagttcctaggcttgaacctgcccgtccgtgacgatcagaagccgctccacacgttaaaatcaattgaggcgggagtcgttgatcaatgccggatcgaagagcttcgcaaattatttattaagtgtttagccctcgaagggaatgaggctgctgccgcatga

SEQ ID NO: 512411 - DNA, 2217 bp, Stenotrophomonas maltophilia
atggggcaggcggtcgagtcgtttctcgatagtaacgatggcgggcgggatggggcattttctggaacttggaagccctccggcaatgagaacctcgccggccgtttcgtaatccagtgtaagcacaccagccgccctgcctacgtgctgcagttgtccgatttgaccgatgaggtggaaaaagcgaaacgcctcgtcactgctggtcgatgcgactgctatgtgttactaacgaacgcgggcgtcacgggcacgcgcgtcgaagagatcgaggcgctattcctggccgccggcgtcaagcaagtagctgtgtatgggtcgacgtggctcacgcaacagatccaagagcacaagcgccttcgcatgttggttccgcgcgtgtacggcctgggtgacctgagtcagatcctcgacgagcgcgcgtatgcccaggcacgcgccatcatcgaatcgatgcgcgaagatctggcgaaagtcgtagtgacggaggcatatcagcggtctgtcgaggcccttgaccggcacagcttcgtgctactggttggcgagcctgctgcaggaaagacaacaatcgcgtctatgctggcgatggcggccttggatcagtggaatgcttcgctgttaaagttggatgagccggccgaggtcgccaaacgttggaacccagacgagccgtcccagttcttctggttggacgatgctttcggcgttacgcagtatgaagaattcctggtgcatggctggaaccgcatactgccgcagctcaagcccatgctgcgcaagggcaccaagattgtgatgacgtcgcgtgactatatctacaatcgagcgcgtcgagacctgaaagagagcgcctttcctcttttcaaggaaagtcaggtggtcatcgacgttcacgagctaaccgggcaggagcggcgtcagatcctttacaaccacctcaagcttggcaaacagcccaagaccttcctcactgacatcaagccttttctcgaaaccgtggctgatcacccgcgtttcattccagagatggcgcggcgcttggccgatccgctgttcactaaggatctgtttgtcgactcgtactacattggccagttcgtggaaaagcgcgagcaactgctgcatgaggtgctgcaggcattggactccaatagcaaggccgcgctcgcgctcatttacatgcgaaacgaccggctgactagcccgatcgagctgcagcccacggaggtcgatgcgctgcagcggctgggcagtgacctgggcggctgtatcagcggcctggaggcacttgcgggcagcttggtggtgcgaaccagtgccagtggtgaggccatgtggcgcttcaagcacccaaccatcggcgatgcgtacgctgcgcacctagtgcaaagtccggacttgctcggcatctacctacagggcagcgacccggcgcgactgcttgagcaagttagttgcggcgatgttggtatcgagaaagctgtcgtggttcccacgtcgctgtttccaatcatgctaagcaagctcgatcagcttggggaaaacaaagtgcgcaaggattcctggctgtcggggttcgatacgcgacgaaagcgactgggattcttgtccaaccgctgctcgaaagagttcctcacagcttacttggaaaagcacgtcaagcttctcgccgccgtttccagtccgggactgatgctcagcgtcgtgcccgaggtgcgtttggcggcgcgcctgcatgtacttgggctactgccggaagctaataggttggagtttgtccgcaccgtcagtcaatatgcgatcgacgggcgcgacaccgacgcgctggataacaccacgattcgtggcgttttcacggactccgaacatgctacattggtggctaaggtccagacgcaactgcttccgaaattgcacagcgtgcggattgactgtcagagtgactgggtttcggatcagtcccgggaagaccacatgtggtcgttcctggcctcgctggacaacttgcggcgctgctatcagtacgactctgctgcgctcgccatcatcgaggccgaatcgaggcaggcgactagttggatcaatgacgatgacaacaactacgactcgccgcccccgcgaaagcttggcaagctcaagtcacacccggaagcgagtcaagtgcggagcatcttcgacgatatcgacgctgttaaggacgcgtcggagaactag

SEQ ID NO: 512412 - DNA, 801 bp, Stenotrophomonas maltophilia
atgcggtgggctatggataagtcgtataaccggatccaagcatccggctatcaggtagtcaggtctactcacatgtcaaagcagtacccaaagaggtcaatcaatggcgacgctggcgagcatttcgcggcgtacaagtttacgcggactctaaaatggccctgtcgacttcaaagtgtcgacttaggcatcgacgcagaattggagatttgtgaccagcaatgctccgcgacaggaaacgtggtcaaacttcaaataaagtcttttcaagagttgccaggatcccagagtcacaatgtctatgttgatgactcagatatcgactattggcagcgattctcagttccaaccatcatcgtatgcgtcgaccttaagaacgagaaagtgtactggaagccgatcagcgcaacagaagcctacgcgtcaggcggggcatctagaagaatcacattcgatttatctgaggatgaattgaaggctgaagcaacgagcaaaatttcctccctggcatcgccagatcacttcaaagatattttcgacttgatcactgaggcagagaatatttacaaaggacaaattgcttcggatgtgtttgacatttctgacgatgaattggatgagatacacaaagttaacgacgcctttaactccattgtttcaaggatcgatgagattcgtcgccattacccttggcgcgtcagcgaattctctggaagaaaaatcgagcggatgaaagccgaaatgtaccgctattggaactcggcggaggtgagttggcgaaatggcgtcaatggcatgtag

SEQ ID NO: 512413 - DNA, 564 bp, Stenotrophomonas maltophilia
atgttggatacccagagcacgccttcagggcgcatccgcaaggtggtcattgccggtggcggtacggcgggttggctggccggctgcgcgcttgcgcaccagttccgtgaccagctgcagatcacgctggtcgagtccgagcagatcggcacggtcggtgtcggtgagtccactgtgccgccgatccgcaccttccaccgcttcctgcagatcgacgagcaggagttcctgcgcgcggtggcaggcaccttcaagctgtcgatctcgttcgagaactggcgcctgccgggcgatcgcttcttccatccgttcggcaccatcggccatggcacctgggcggcccccttccatcacttctggctggacagcctgcgccgcggcatgccctcggacctgggcgacttctgcctggagagcatcgcctcgcgtggcgaccgcttctcgctgcacacccagccgcaggccagctatgcgtatcacttcgacgccggtctgtatgcgcggttcctgcgcggcagggccgaggcccacggcctgcgccggatcgaaggccggatcgcctag

SEQ ID NO: 512414 - DNA, 621 bp, Stenotrophomonas maltophilia
atgcggagaggggcgccggtccagcccggtggggcaacgcggacccgcgacactgggccgtcggataccgcaccaccggcattcaagtacttcccagaattcgctccgcggagagtgcgaaggaagcgctcatgctccaagccgctgatgattggcttgaaagcaccttcgatacagtacgcgagacgggagcagcgatgggcggcgttgatgttcatgccttgggcatcgaccagttcccattcgcaacggcgaatagtgccgatcctcaatccgcccgcttcgatcaacgtccagaggtccatcgttccgatgcgtgaagtgaaaactcctcagtctgaggttgaatccatcatcccgcgagagccaattgcgtcattggcttggtgccgggtgacagtgccaagcgagcgtggcacctgccacagaagcatagcgccgggccatgcccggcgagcacagcggcgacgcggttccaagcgattgccggccagcggccggcactacctcagtcttcttccggcggcagcacgatggcgtcgtcgtcgatcgccagcttgccggccatcagtacggcctgggtgcggttggtcacgcccagcttgcgcaggatggcggtga

SEQ ID NO: 512415 - DNA, 1272 bp, Stenotrophomonas maltophilia
atgccaacgcgcgaggaactctataccgctgtttggaccgagccactgcgcaagctcgcgaaacgttttcaggtctccgatagctacctagcacgggtatgcgactcgctcactatcccgcgcccggaggcgggatattgggcgaagaaggaggcaggcaaggcgtcaccgccgccgctcctcccgcccgctctgactggcgagccaaccgagtggctacctggcggcggcgtccacgtccgtcgatcggtgccccgcgggaagcgcgagcccaccaaagagcgcccgagtacccaccgcctcattcagggcgcgatgggcgatttcctgaagacgcgcaggctcgataactggtgggactatcttaggccctacaggcgcaatctcgtcgatgtcatggtcagcaagaccggcctgaaggacgccctagcctttgcgaatgcccttttcttcgcaatcgagaccaaggggcaccgggtcagcctgatcgataacaattgcggtgcttggcgcagacgagccttcggaaccggagagaggcctgtccagcaagatgagtacaacctgggggatcggtcttgggcaccggggcgcctgactgtggtccatattgacggacatttggtcggcctcgcgctcgtcgaagtggctacgcccactctgctccgatacgtcggcaacagcacctacgtgcgcgacgcagactatttcaccccgaagggccacttccgctatacgggcgatacatggacgaccacccgagattgcccgaccggtcgactgcgcctagtggcgtatgctccgcaccgacgcgtcgagctggccgaacattggcaggagaacggcacctcccgattgctcgcgcgtctgccggaaattgtcactggcatcgaagccttcggagccaagatgcccgcattggtcgcggagggagacgtgcaactggagcgcgagcgccgacagtacgaagccgaagaacggcagcgcgcgatccgggagaaccagcggcgcatcggggagtccaccaagcaaagccaggaacagttggataccctcatccgccactgggccgaaatcaaggcacgtgcggaattcctagagcgcctggaacaggacatcgcttgcctgccagaatcagaacgtgcctcactggaggcacgcctgagactagcacgcgaattgatcggcccgacggatcccatgccgcatttccgagcttggcggtccccggcggagcgctatatcccaaaacactttgaagaagacgagtga

SEQ ID NO: 512416 - DNA, 933 bp, Stenotrophomonas maltophilia
atggatcactatagtgggcggatttcgcacgccttctcattccccatagatcgggatgttagacgtctccgtaaatgggctggcagctatagtgaactagctgagaacactgtgaatgaagagctcctccaggagttcgaagagctgctgcgaatcgttcatggttttcatcaaatgggcgactcatgggagccattgagcaatcttggtgctcggcttcacgtcgatgcgatgcaggccgttaatattactctactcctgccgccttcctctgtgaaaggtgagttctttgcaagcattctctcgggtcagtctgcttacaagcaggatcgggataatcgtttaagtctcgcaattcgatttgaatatgccggtcgaacaatcgtgttgggtggcgatgggacgtacgacaattggatgtacattcgtcagcgtacaaaccgaaatggcactacaggcgaagctggtatttctgctgatatcgtgaatctccctcatcacgggtcgaggcgagacgctgatcctctgattcttgactatctgttcggaagtcacacaacggggcgtgctggccgtcagaatgaggatccgatcgatcaaaatgatcgtattgccatcgtctccgccgatggtaggtcacacccgcacggtgatgtcttgaggcatatcggcgctaggggcgttaggccgttctgcaccaatctctcaaaggtatgctcgccagctcagcccatgccaaacgttgcatgccacggcattgagcaagtattagagcgattcgtcgcatctgctgcgataccgaccagccggcctgccacttgtcaaggcgacatatgcgtctcgatttctactgatggtacagtttctgttgaccgacagtttaatgttgcctgcgcttttcgaggcgaacttgacttcttggctacgcaatga

SEQ ID NO: 512417 - DNA, 267 bp, Stenotrophomonas maltophilia
atgattatcatcgtccgggaagagctcggcaggaagaacaatcgaaacatcctgcccccccatcgcgacgacctgacatctaatcatgccatcttcgaggcctctgacatcgactcgcaccttttgacgaagtgcaggacctattgcccgcttgattttctggcgagcagtttccggctgtgcatagactcggtcgccacgctcgacggcactcggcggcgcactaccctctatggattcagtgttaaccacagcagttcggactga

SEQ ID NO: 512418 - DNA, 720 bp, Stenotrophomonas maltophilia
atggatcaaccaggtggtctccttgaccagttggacttgaacgggcgatgggcaatcgctaatgagaacagctcaaagcgtcagttctttctgcgaggaaattccgttgatgggagagtgaatgaaacattctccttctctccggtctttgcggtgttcagtgcagagtgggtggaagggatcgatgtagcgcggcttgaggatcaccgtcccattcacgagttgtttggctgtctcgagatcgtaaggcaatacggcgctattcgaaatcttcggcgttgtggtcttcgattcacggcgcttgagcaagtggcgcctgagctggcgaaaaaggactcagacgaacaagtgctgcttcagcgcgtcttggaacgcagtactcccaatgtgactggcgttatcgaagaggtagcgggaaggaccaccgacgctagtgtcaagttggtcggatcacatgatgataagacgaactacacgattaactacggtcccttcaatgatgtcgagataccgaagtggtttcctgagatttctgatgcttgggaagagtctgcaaatgcagacttcctgtgtgacgccgacttttgggagtctgattttgagttgaccgtctcgccgcggaagtgggcctcaccacttatccggcgattcgcaaaaattatctcacgtgtcacggatgaactgagggagaatgatgatggccctgaccgcgccaattga

SEQ ID NO: 512419 - DNA, 309 bp, Stenotrophomonas maltophilia
gtggctgatgaccaagaggcaatctctactctagaagcggatagctcccaagagtcctgggacggtgtgacctacgaggtcttcgctgccgagcggcaatgcctgcctgaggatttcgaaggccggatgcaagtggctgccgctgcaattggcaccccttggagggcgtacgacctacatgacgggcgatgccccgccctgagtggtggcaactgccaaggcgggttggtcagctacttcagcaatggacggtggatcgccggggtagacatgttccactcggtccaggacatcttcccactgcactag

SEQ ID NO: 512420 - DNA, 330 bp, Stenotrophomonas maltophilia
atggggctgacggagattggcggtggttgcggctggggtgtctcggatacgcgtggctgcgactttcccgcgttgttggactgggacgatgtgctgcgtgatgagcgtgaggatccattggggttcgcacgacgagcgacgttggcgttgctgacacagtcgggtgccggactgcttgctggcttcggtggcgacaaccagaaggggctggaagaggccaggaggactgtggcgctgttccaggcacatctgcggcggcagatgtggtttgcggacgtggcggagaagcggttggggcgtgttgctgaggctcttgcagctgccaggtag

SEQ ID NO: 512421 - DNA, 690 bp, Stenotrophomonas maltophilia
atgagctctagttcactcttccactatccaaaggctaagcacgtgaggacccaaaagcctcgcgtatttaagcgctacaggacatataagaaatttctgcagcgggagtttcagcgggtatgtgtctactgtcggcagccagatacatccgcaccaaatctgaattttggtgtagatcactatcggccgaaagggctcccgcaattcgcccatcttctctgcgaatataccaatctcttctacgcttgcggtcaatgtaattcacgcaagggagacgattggccaactgacgaaaaagctgggccattcgtcgtaaatccgtgcgatttcgagatggcaagccatttgcgattcacgaaggctaatggtcgaatcgaacctaatggcaagcacggaaagcacactgaagagttgttggagctgaacgctaccccattggtgcagtatcgcctcaacgcgttgcacattgttgcgttgctggagcgcgaagtggcgagtcttgaattgcagatcggcaaaatcaataaggccgtttcttcaggtcgcttgcgcgcagaagaagtgtccgaagatctcgctgcagcaaaggcggactatgcgcaggccaagtccgcgctggcggcgcaagttggcagcgatccagttgatccggtgccggctgtaagattgggcgtcccattgattcgttga

SEQ ID NO: 512422 - DNA, 249 bp, Stenotrophomonas maltophilia
atggtcgcggaatacagcggtcgacttgcttctatctctgaggataacggttttctactccagcatggtcttcgtatagaagaagggcgtgatcacccgtcctatgttgtggatgttgatgcgttctgtaacaccgtcaccatcgacaatacccttgagcaattggacgctctgcatgctcaggtattcaatgtcttcgagtgggcgttgggcgagaaaagccgggaatacttgttgggggataagtga

SEQ ID NO: 512423 - DNA, 933 bp, Stenotrophomonas maltophilia
atggcccttaaacacggctgggttcgaaacccactttcggtgatagcgatattcgccggagttgccgaaatttctggcgccgcggtcctccctcgactgaatggcgaagtacaagtcgtatttatgttctttgttatgttctttccgtgcgcgctggtcggactgtttttctacgtactttggtttaaagcaaaggttctgtacgcgcccggcgactacaagaacgacgagacattcgaacgaatgcatggagtagtattctcggctaacggcgaaaatgccacacaggccattcacacctcaaattcagaaccagtctcgcccacctctggtaacgccaacacagaaggttccgtagactccaaagaaggaacctcaaatagcgcaactagcgaaagcgcgtcctcggtgcgcgaacccatagcgccatacggcactccacacggcgccgccgaaaaaagagagggagaacgagaaggatcaaatgagatcgacgcctataccgcattcaagacagcctccgagaaggaatctttcgaaaggtacatttccgaacaaagggtcttggtcgagctgcacaagcgatatggcggcagcataaccgcaccagcaatcatggccaccgacggggggcgatcattcatgattgatggattcatcaacaccggaagtcgacagtattttgttgaagtggtttatctaacaagaccaagttcaattgatcgtttccgcgatgtcggaaagcggttagcaatggcatgggaggcgctcccagttgagcaccagaaaatagctacctgcatactgtgcatcgccgcaaagaacgatgcgctcctaggcagcatagggggtcgcgtgcaaagttacctatcgaagacgttccccaatgttaatgtccaggttgagagcataaatactagtcagctcgggtga

SEQ ID NO: 512424 - DNA, 1011 bp, Stenotrophomonas maltophilia
atgacttctgtcgccaaggtttatcgtcacagcgatccaggcgcccctcagcttaccggtcagtctgggagtctggtggcattgctcgacgcggtcctggtcaacggatacggtgtaggtgctgcagcgaaagcaggggcgggctgggcagtacagttctcgggcaccaataagcgcgcataccgtggcagcgctgagacgggctccggcgtatatctgcggattgatgattcaggcgctgaccctcgcgtggcgagggtccgggcctacgagacgatgaccagtatcgatgtggggacaggcctcgctcccaccgccgcgcaatcgagtggcggaagagtctgggtaaagtcagacagcgcatcgagtgcgattcgaccttgggaaatcatcgccacggatacggcgttctatttcttcgcttcacccattcctgttgcaagcgctggatacgatggggttgcgatcactccctgctttgcgggagatatcaattcccatcgcgatggggacgccagtcgcttcatgattatggataacggcttcgatgcttatacgtcctcggccatcccagggtttaccgcgcctgcaggtcgatggaacgactcgagtgtcatgccgtctaaggccgtagggacactggtgcgctcgtatacccaggagggctcggcggtacccgctgccttggcgctcgccacctcggcagccagcagcgctcgcagttcgctcggggggggcggagtcgcgtttcctgatcctgtgtccggtggactgatgttcgaacgggcactcgtagtagaaggggcagggatcatccgcggttcactgccgggcgtcttcgtgccgttgcacgagagaccgttcttcgacggtcagattgttgaggatctggctggtctaccgggtacggtgcttcgagcaaagttggcgtacgcggcggttggcgccaacccggctgtgaatccaatcgaccttggtcaacttcttttcgatatgagcaacccatggtga

SEQ ID NO: 512425 - DNA, 417 bp, Stenotrophomonas maltophilia
atgagccgggtcgtcctcgccggggtcgagcttccggcagatttgcaatggacggacgaattcactgcttggcgtgtcgggcagcaggttcgccacagcttgagcggggcgctgatcgtccaggagtctgcgcgacaggcaggccgcccgatcacgctacagaccacccgagatggacaggcatacgtcgcccccatccagctagacgtgctgcgccagctgcagtccctgaccgagcagctccaggtagcgccgatgcacctgatcctgccggcccacaacggcggcgagcgcacgttccaggtgcggtggctgcgcacggatgggtctgcgctggatgcccagccgctgcgcttcgccactcctgccattgatgccgactacttctccatcacccttcgccttatcacggtctga

SEQ ID NO: 512426 - DNA, 210 bp, Stenotrophomonas maltophilia
atgaccgcctcggcagacatgagccaggtttgcgggcgcaaacagcaccgccaccactccgccgacgcctgctgcggcgtcataggtacggacagcggtgaagcgcatgcgctgcgggaaaatgatgatctctgccatgcggtcaatgttgtccccgccgcagtcagcttttccacgatgatcgatggcgcatttcagggggccgcatga

SEQ ID NO: 512427 - DNA, 201 bp, Stenotrophomonas maltophilia
atgaaattgatgaccgaagaggcatggctggaacgctacttcgatccgagcagccgtccggacacgcagaagctgcagcgctggctgcgggaagggaagctcccaggccgtaaggttggtggatcttggtacatcgatgagcatgcgtggctcgccggcggcgacgacctcgtggcgcgcgtcctggctgatgcggcgtaa

SEQ ID NO: 512428 - DNA, 198 bp, Stenotrophomonas maltophilia
atgactaccgggtgcaagggaacgaactgcactgcatcgcctgagaacggatacaggcacagcagcgaatgtctgttcgagcatgcacgagcagtggctagtggcattgagagcgtgaagattggcgtcaaaattcctgatcacgtgacgcacgtcacctggcgcggccaccagatcgagctgcaggaaccgaaatga

SEQ ID NO: 512429 - DNA, 714 bp, Stenotrophomonas maltophilia
atggctgagctgctgcctatcctcgtggcctgcgagtacagcgacaccgtggcgtcggcgttccgcgccttcggcttcgacgcgtactcgtgcgatctgcgccccagcgagggcgacccgcgctggcacatccaggacgacgtgcggaaccacctgcaggccggccgatggctggcgatggtggcccacccctactgcaccttcaacactctggccggcatccgctggatgtaccacccggacgacaccgcgctgccgcagcctgaccgccgccggcacccgaagtacccgaaccgcatgcgcgactttttggaaggcgcactgctgttcgccgacctgatggcagcgcccgtggagttcatcgccgcggagaactcgaagccgcatggcctggccatgagcgttctgggccggccaacgcagactgtgcagccttacgacttcggcagccccttcaccaagggcgccacgctctggttgaagaacctaccggcgctggtggcaacccacacaaaggcgcaggtgatcgagcagcacgggaagatcgaggcccgttgccacctgatgccaccaggccccgaccgcgagaaggagcgctcgcgcttcgatcccgcgattgccgcggcgatggcccagcagtggggggggcacatcctcgaaacgaaggcggctgcccgcacaactcttcttgtcggaatggaggatgcagcatga

SEQ ID NO: 512430 - DNA, 243 bp, Stenotrophomonas maltophilia
atgagcggcgcagcggctaaggcaatggctgatgcacagagggctgccgaccgagctcaccacgagaagcgagtggcatggctggaatctccgtcgcccatgtgggcggatggcgaaagggtggcgctctgggagcgtagtcagatgctgatctccagccgcaactacctcagcaccggcgaaggcttcaatcattgccactgcgagccccgctgcaatgaaacggagccgaccaatggctga

SEQ ID NO: 512431 - DNA, 126 bp, Stenotrophomonas maltophilia
atgcgcctcctgaccttcttcggctgcagcaactggcgccacttcgccgcctgcgtcgcctgctacgccatcaccgccgcgctcgcagccgccatgtgctggccgctggcgtggtcctggtcctga

SEQ ID NO: 512432 - DNA, 375 bp, Stenotrophomonas maltophilia
atggaaaacaaccgcgcaggagtggctttggatctgaacggccttccctatagcgaggttgtggccctggtacgcgcgggggcggcctacattaaggtcaaccagtcagccctgtccctcgaactgcatcgtattcctcaaacctcgctgcagagggcggcgggttggatttggattcctgccgcagttgggtttgccgttctcgtcgagcggcactcttacgtatgggctgtcgcctgcgtggtgatcgcgggctactccatgctggcagctcggaaagcagacgcccgtcgcgcggtctatgccgccttggagaatgaatccctctatcaggccctccttcgcgcaaaggctatccgggtactgcctcggtag

SEQ ID NO: 512433 - DNA, 687 bp, Stenotrophomonas maltophilia
atgctcacctccatgaacaccgtaggtgaccggatcaaggaagctcggaaggcccggggcatgtctcgcccccagctggccgaggctgcgcgcgtgaaataccccaccctcgccggcattgagaacaacgaccaggcagggacgacgcagctaccgcagatcgcggaggcgcttggggtatccccgaagtggctgcaaaccggcagggggcccatggaaggaactgcagcaagcaacgacgacagcgactgggcagatatcagcggctacgcgcaggccatcggcttgggtggcggtcccgaggcccaggagtacgccgagacccacaaactgaaattcagggcagagtcgctggcccgtaagcgcctgcgccccaacgcccttgcggtgatgtacggcaagggcgacagcatggaaccgcgcatccacagcggtgacgccatcctgttcgacaccagcgacaccatcccgcgcgacggccagatgtacgtgatcatggtcgacggtggcggcgcggcgaaggagtaccacgtgaagcgctgcgaggtgatcgatgacttggtgttcttcaaggccgacaatccccgcggcgaccacaactggcggaagccgaagcgcctggatagtccacggcatcccatccagatcatcggccgggtgcgttggatcgggagttgggagggctga

SEQ ID NO: 512434 - DNA, 222 bp, Stenotrophomonas maltophilia
atgtacgacacgaagaagctggaactgcgcctgcggcaggccgaggcgaagggcgaagcactgcaggaaatgctggtgctgctgagcaagctgatcattcctggatctcctgcagcagcagcgatccaggcgcaactgcgagacgcagctgcatacacagggccgtccgttgcaaagaaggaactggcctccctcgcccacaccgtggccaacctgcagtag

SEQ ID NO: 512435 - DNA, 192 bp, Stenotrophomonas maltophilia
gtggcaaaaacgaatcagctggccggagccaacgtcctgacgctcatgcgaatgggtgggaagtggttcgtgctgaagcgggtcggcgagcgggtcgacgtgcggccggtcggccaggttccgaagaagcggcaccggaaggttccgggggtggtgatccccttccctgtcgcctcgagtggcgtccgttga

SEQ ID NO: 512436 - DNA, 366 bp, Stenotrophomonas maltophilia
atgaaaagtcagcaaattacctatgaagatgggttgacccgcaacccgacactccgggatcacatggcggcgatggtccaccgcggcgccggcctgacggctgtggccgggcagctcgatatggccccttcgaagctgagcgagaagctggccggctgcgacagcggtggcaagccaaggggtctgtccatcgacgacctggaacgctacatccaagtaaccaaggacgtctcgccggtccactacctgatcgagcgctacctagtaactcccgaagcagcgacggcagaggcgctggccgaactgcaccagcacctttctgccctgagcgggacgctcgccaagctggggatcaagtggccatga

SEQ ID NO: 512437 - DNA, 210 bp, Stenotrophomonas maltophilia
atggatttgaggaacatttcgcaggtcggccacaccgaccgacaggaagacgtcaacaggatgctgcgcgagggctgggtcctcctggccacccaaggaggcgtcaacgacgaaggccagccggtgttctggcacgcgctgggcttgccagaggatcccgtcgcgcttgcaatcgacctgctgcggaacaaagagcgcacggaagactga

SEQ ID NO: 512438 - DNA, 351 bp, Stenotrophomonas maltophilia
atgctcgacagttccatcaagggcgccccttctgtgatcacaaccgcgcgcctcaggcaggttgccggccagtttgccgaggtgaacgtcgagaacgtgccggactacaggctgctgaagccgatgcaggaaacccacagcgcgctggtcgtcatgcaggacgtggtcgaaaaagagatgggaatgagcgacatgcaagagcgcgcgcggctgagcttcattcgatcggaaatggccactacctatcgcgaccttctgagggcccgccgacccgatgttgcgtccatagttgacgagatcgcgccggataactggttcatccgcctggcacgaaaggtgcgcaagaagtag

SEQ ID NO: 512439 - DNA, 468 bp, Stenotrophomonas maltophilia
gtgaaccgcattgccgtcgcagtcgccgccttcgccctgtggtccgcagccatgttcggtgccggctgggcctggcgcggcgaccgggcagagggcaggggagccgagcagcgcgccggcggcgccgaggcagtcgccgcccaggtgaaccagacccgtgccaccgagcacgcccaggccgaggcactggccaccatcggagcgaagcatgaagaagatcgcactgcggccgcgaccgtccctgctgctgttgttgctggcgtgcgtgatggcagcctccagctgcgcgacgacctcgccacctgcaataccgctcgcctgtccgaagccgtcgccggcaccatcgaacgtgaccaggcagcccaactacgagcagaggtcgcgggcgctcttgttcaaatcgggcgagacgccgatgaccacgtccgcgcctgccaagccgtgatccgggcggacagggagcagtaa

SEQ ID NO: 512440 - DNA, 360 bp, Stenotrophomonas maltophilia
atgaagcgccccggcatggatccgcgagaggaagagcagcgccgcgtggccgagcgcatcgcggacctgcaggacacccagctccgcgaggacgcgcgcgcagtcctggccgatccagccgcgcgccggctggtctggatgttcgttcaggccatggatgtggatgacagcgcgttcaacacgaacgcgatggcgcagtcccgaaagatcggacggcaggaggccggtcagtggtggctgcgcgtcgtccgtgacagctgcccggagcgcgaggcacagatgcgtgccgaggccaacagtgcaatgaagcggctgcagtcgcagctgcaggaaaccgaggaaaccaacgatgtcgactga

SEQ ID NO: 512441 - DNA, 696 bp, Stenotrophomonas maltophilia
atgtcgactgaaaacgccaacagcgccagcaatcccaatcctggcccgggcggtagcaccaccaccaccacgaccgaagtgtcgcaggtgcccaacggcagcgcgccggcggacaccgatggcagcggcaacggtggtaacgcaatgggcggcaatggccagccgaacaagggcgaaggcggcagtgaagccggcaagcccgaggacggcaaggccaacgcggcacctgagcaatacggccagtttaatctgccggacgggttctccctggaaggcgaccgactgggcgcagccacgcagttcttcaaggcgaagggctggacgcaggagcaggcccaggaggccatcgacctgtacaccagcatggccggggaggacgccgccgcactgcagcaggcgatggagacgcaacgcctgcagcaggtggagcagtggggcgtggatgccaagcagcagctgggcgccaagtacgacgaaaccgtcggcctggccaccaccgcggtgaaggccatcaacgaccccgagctgaccaaggcgttcaacgagctgggctggggcaaccacccgaccatgattaaggcgttcgccttcttcggcgggttccttcgcgacagcaagatcgacgggctcggcggaaccaccgcctcgggcccagccgctgccagcgacccgaagtcggtcctctacggcggctga

SEQ ID NO: 512442 - DNA, 1527 bp, Stenotrophomonas maltophilia
atgaccatttccgccaacgaccgccgcaagacctacgtgggcaacggcgtcgccaccgcgtttaacgggccgagggcgttcctgtccagccacatccaggtgttcaccggcacgcacccggtctacaacctggtgccgccgtcgcagtacacggtgaccgggcttcgggcgaacgccagcactgtcacgttcaacaccgcgcctgccttgaacctggacatcctgatcttgcgcacggtgccactggaccagccggccgacatcaccaatcagggcgcgttccttcccgaaatccatgaggacgcattcgactaccgagtgatgcagctgcagcagttgctcgacagcgggatgcagcttgtccaagacccggaaagcggcgagttcgtctgggatgccaagggcagccgcatcatcagggtgggggatgccaagggcgacgccgatgccgtgaacttccgcaccgtgctggtgctgatcgaacagatccagaatggcggcgggtccgtcggcatcgcgccgaagttctgggcgtttgagggcgacggcgaggttaccgacttcccgctggtcggcgccgatgtgctggacgccctgttctacgacactgcgctggagaagacggccggcgctggggactatctggtatcgaagcctggcgacttccagattctgcccggtggcgacggggtggctccggcaattcgcttcacgacggcgccggccgatgggcagcgaggctttaccaccctgcggggttatgcccggccctggatcggcgaaacaccgatctacacggtcgcgccccgcatcgtgagcgtcaccggcaacacgacgctggccggtgacatgcacaacacgctgatcctcgccaactcgcccaacccgatcaccatcacgatccgcgccaactcgggcagtgcgatcgactggaaggagggccagttcttctcggtccaacaggtgggcgtcggtcaggtcacgctggcaatcgaaggcggagggcagctgtcggtgccggatctgttccagccgaagtcgcgtgccaagggctgcatcttcagcgcgacctgcacagcgcctgatgccgatgcgtggtcagcggctggtgatctgctgcggagcgcggcgaatcccgatctgcagtcgttcgtgcttcccgaccgatctgcccttatcgggacgaacatcaccgccgggacggggaagggctcgctggtgctgccctatggcgtggcgctttcgccggtggcggagcgcggcatctacgccagcttgtccgaagcgcaggccaccggcgtgccgctgacggtcgatgtgaagcgaaacggcaccagtatcctcaacgtgaaactgacgttcgacaacggcgagcgttccacgctgacggccgcgttgccgccgacatttgttcctggcggcgacctactggctgccggcgacgaaatcacgatcgatgtccagcaggtaggcacggctggcgccaagggcctgcaggtgtacctggtcggccagaggtccagctga

SEQ ID NO: 512443 - DNA, 1188 bp, Stenotrophomonas maltophilia
atgtcggcgcgcatctacgaccggccggacctcgaccaacgcagtcggctgctgccgctgctggtggtcggcgacctgccgaaggccattccgttcgtgccctatgaggggcgcctgcagatctacaacgccgtgggcggttgcacggtgcgccagatcgacggcgaccggctgccgccgggccaccagctgtacgtcgaccaagccacaaagcaggtggtgctgacctggccggcgtaccaggccggcgccgcgccgatcgccaacccgggattcgagagcggcccgaccggctgggacaccggcgcgggttgggtgatcgcaacggagaacccgccgaccgggcagtgggccgcgggatacaacaacaaccgcggcgagtcgatcatttccagcacgtcccggtatgaggtctatcccgggcagcgcaccgcggcgaagtgcaaggtgcgccagggtgcgtcggccgagggcaacgccggcgcctcggtcctgctcgaataccgggaccaggagggccaggttgtcggccgggtggaaggcaaccgggtcatgtcggccagcaagaaccgggtgtacgactccaacgtggtcggcatcgcgcccgccggcgccgccacgatcaacatcgccggcaacggcatccgctaccgcgaaaacaagattctcttcgtcgacgatttcgaatgggatcacaccgtcgcggccgtcggcctggaccatgaggccgagtaccgcttgaccctgcaggtcagcgactccgccggccgcactgcgatctggcgcggcttcatcggcgaccactcggtgttcttcaccagcaagccctatgcgctgggcgtcatcgaagaactgtccagcagccttgcgatcgacgacggtggtatccgggtaccgccgcaggcttcgtgtgtcgagggcgtggctccgagcttggtaatcctgtcgggcgagatgcgcacaccgttgcaggcgtatctgattccgccggaaggcgtggacccaagcctgcaggtcctcagcggcgaactgcgtcagctgctccgcggctacacgatggcgccagagggcgtcgactcgggtctggccatcgtctccggcacgctggcccaagtactgattactaccaccatggcgcctgaaggcgtcgacgcatccatgtccattacctcgggaactctcgcatga

SEQ ID NO: 512444 - DNA, 939 bp, Stenotrophomonas maltophilia
atgaacgctcgaaacaacatcgttgaactgaacattccgcatgccgtggccggccgcttcaagatcgaggcgttcaaggtcgacgcactgggggacgagatcccgggctcgcgccgactggctgccgactggttccacaacctggtcgtcaacgctggcttggatcgcatgggcaccaacagcgactatctcagcacctgcatggttgggtctggcagcgccgccccagcggaaggggatacgcagctgcagtcccgcgtggccagcactacctcgatcaactcggacaccaacggcatggtggcgtccccgcgatacggctggcggcgcaagacgttccggtttgccgccggcgcggcggcgggcaacctgtcggaggttggcatcggctggacctcgacggcggttttcagtcgagcgctgatcctcgacgggggtggaaacccgaccaccatcacggtgctgagcgatgaagtgctcgacgtgacctacgagctgcgggcctatgtgaacgaggcggacgtgagcttcagtgtcgtcatcagcggcgtgaactatgcgtgcgtgctgcggccggcaaacatcggcggcaaccagggcttgcagctcggcgattcggtgacgatcaataatttcaatcgcgcagctggtgtgcgcactaccgagtcgaacgtacttggttctgttacctccatgccttccggttccgcgcaggacatggattacacgaacaacgcctatgtgaatggaacctactatcgcagccacacgatcacggcttccttgaaccagtcaaacttcgccacagggatcggtgcaatcatcgtttcgaacaccttcagcgacttccaaacctcgttcaccccgaagatcccgaaggacgcgaccaaggttctgacgctgcagatccgcagcacctgggggcgacatgttccctga

SEQ ID NO: 512445 - DNA, 666 bp, Stenotrophomonas maltophilia
atgtgcggccgattcgtccagctccccgtgatcgacttcggccagccggggctggctgacctcgccccgggcttggccgagatccagcccagttacaacctggcacccacccagcgcgcgtcagtgatcctggaccgcggcgaaggccggcaggttacccgcctggcgtggggtctgctccccttctgggccaaggccaagggcctgcaaggctcgaccatcaacgcccgaatcgagacggtggccaccaaaccagccttccggtcggccttcaagaagcgccgctgcgttgtccccatggcgggctacttcgagtggtcggtcagccccgaggacgggaagaaggacccgtggttcatccacgccaccgggccgctgttggccgctggcctgtgggaggacaccagccccctgctgcccgagggcaacctgggcaccttcaccatcatcaccggcgacagcagcggcgtgtcggccgacatccacgaccgcatgccggtgtggctgcaggccggccagatcgatgagtggatggccgccagccccgacgacgccatggccatgctgctcgccagcgagccgccagcgatggaggcctaccgggtcagtcgcgcggtgaacacgccgcggaacaaccgcgaggatctcctgatccaagttgcctga

SEQ ID NO: 512446 - DNA, 480 bp, Stenotrophomonas maltophilia
atgagtgccgggaccgaaagcctcatcagggccatccaaaccaacgacccgctggccttctatgggtggctccacacactcaaggggacgcccgacctggacgctggcgtggccggcgatcctggcatcactgcgttggccgtcgcctccgtcatgtatgccaaggcgatccagtcggaccggatcctggcggcgcgctatgccgcgatgatcgaagcgctcatggacgccggggccaacccgctggtccggattggggagcggttcgtggtgcgacgggggcacacggggaagctggagcggcgccggatcagcgagggccagagcctggtagaagcgtgtggtgggatcatggctccggcgctacagcgctggtttgccgacaacgcccgggcagatcggttcaacacggatcttcaccgccaccacccggcgtttgtccagtcttaccggcacgtggcagaagcagaagcagcgtaa

SEQ ID NO: 512447 - DNA, 378 bp, Stenotrophomonas maltophilia
atggaaggcattttccccgttgttctcatcgccctgggtgtagtggtgtttttcgtccacagggcgaacaaggacaagaaggtcctgcaaaccgttgctggcgcattgattaccgaggtcaagctgcgggaggctgaagggcaccagcgcgaggccgacgaactccggaagcagtggcatgcgttgcttcgggcccaggccacggtcgccgcccgcccacgcatagctatcgaagagtcggagcgtcaggcgctactttccctgactgacccccgtcacctggagcacctcatggcccgatacggttctcaacatgaggcctacgactcgctcatgcgattggcgggcaaggtggaaaagacgagagcggcccgctag

SEQ ID NO: 512448 - DNA, 435 bp, Stenotrophomonas maltophilia
gtggaagaccttcgccaacagctggttgagaccgccctggcctgggagaaagcgttcggcaatgccccctcgatcacgtcggccttatctgagcacgacgcggccgttctcctgggctgcccgctggccgactactccgtcagcatgcgggccgcaacggcggtccagcggggctacgacttcctctaccaaggcctgcgttaccaagtgaaggggaaccgtcccaatgggaagaaagggagtgcggtgacctgggtgcccaagcccaccaactatgagtgggataggcttatctgggtgctctacaaccgactttatgaagtgcaggaggcctggctctgggaaaagcaggactactggctgcggttcgaaggcatccagcggctgggaccagcgcacatgcgcctggggcatccgttggtgccaacgagctga

SEQ ID NO: 512449 - DNA, 213 bp, Stenotrophomonas maltophilia
atgcaaaacaacactttcatcatccaggccaactactccaacggaaactgggagcccatcgacaacgcggaatactcgacgctcgccgaagccgaggctggcatggaagatctggagcagaacctgggctggcgcaacatgcgcatcgtggatgaagcccgttttgtctgggtctacggacaagagggcgaggaggagggcgaggatgcctaa

SEQ ID NO: 512450 - DNA, 210 bp, Stenotrophomonas maltophilia
atgcctaagtcctacgccatccaacccaaacaaccggttacgcgccggttgtctggaccgcagaaacaactgatctacatcgatgcatgcaacgttctgattgaacgcgatgcgcatgtcttggacttccgcgagcttctcaagctctacaaagaagatttggaaaggcggaagaacaacctatttccggagacaccctatggcgggtaa

SEQ ID NO: 512451 - DNA, 1050 bp, Stenotrophomonas maltophilia
atgcttgagctgctccccttcttggatgccattgcccgagccgatgccccgatggaaggcaaggccaacgggtggcaacgcaaagcaggactggcagagttcggtaacgcctgcgccttctgctccggtccactggacctgtcctctcccaagtcctggacggctacgtcgctggtgcccgcgcaactgggaggccccgtcggtgtcgtggagaactgggtgcctgcctgccgtccctgcgctgctgccaagggcctgcgcgatgtcgtgggctggtcggactggcaggcgtcagctgcccctgaccgggtggccctgctgttggcccggcgtcgtgctgcgttgctctacgcagaaaatcacttcaccccgttgagccgtcacacccagcgggagcgcctgctctcccacctgggttttcgtttcgataagccccgcttccgcgtctatgcctggtcgggtgaggtggatggggaacgcgtgtgcttggtgggctggagcacccgagccggggatccctccgccgttggtgaagccctgctggcgttgcgcctgcgcgatggtgcagaggtgttggcccagggccaggcgagcctcctgcggcttccggtggacgcgttcctgggggccgtgtgggcgctcatcgaggcccatgggctcgtcgtggagttggacgtgccaggcggtggcccgctcgatgtaaacgactggagagaatgttggcgccaccgagtccaggatcctgtcagcaaccacaagcgcatcccgatgaccggcggtcctgcccagcctcatgcttcccgtgtgctgtctacgaacccggattcggttcgccggttggcccagctgcaggcagcaaaatgggctgaccggttggacgaggcggaacaccgtttccgagaagcccagtctaggaagaacaaatatttggagcgggtcaagcgcggcctggaagccccgatgccgctggacgaataccgggactgggccgatgaggttagatccctacagcttgcctgggcgcgtttggtgaacgagagactgggctga

SEQ ID NO: 512452 - DNA, 240 bp, Stenotrophomonas maltophilia; identical to SEQ ID NO: 365123

SEQ ID NO: 512453 - DNA, 525 bp, Stenotrophomonas maltophilia; identical to SEQ ID NO: 365121

SEQ ID NO: 512454 - DNA, 387 bp, Stenotrophomonas maltophilia; identical to SEQ ID NO: 365120

SEQ ID NO: 512455 - DNA, 939 bp, Stenotrophomonas maltophilia; identical to SEQ ID NO: 365119

SEQ ID NO: 512456 - DNA, 177 bp, Stenotrophomonas maltophilia; identical to SEQ ID NO: 365118

SEQ ID NO: 512457 - DNA, 927 bp, Stenotrophomonas maltophilia; identical to SEQ ID NO: 365117

SEQ ID NO: 512458 - DNA, 285 bp, Stenotrophomonas maltophilia
atgttgaccgttcgcaatcttcgaccggaacccacgttgtccgactggttcagggacaacaacaacctgctggccggcctgatcctgtgggcggctgctctgctgtggcttgccggtattcagccgcgcttgaaagagtcagcttggtaccacgtcagcttcgtcgaaggcggtttgatgtacgaccgcatgccggatgaggcggcgtgccgtgccagcgtggcggacaacaccaccgcctgcctatcgggtgcggaactggacgggaacggttccggccattga

SEQ ID NO: 512459 - DNA, 726 bp, Stenotrophomonas maltophilia; identical to SEQ ID NO: 365116

SEQ ID NO: 512460 - DNA, 1047 bp, Stenotrophomonas maltophilia; identical to SEQ ID NO: 365115

SEQ ID NO: 512461 - DNA, 597 bp, Stenotrophomonas maltophilia; identical to SEQ ID NO: 365114

SEQ ID NO: 512462 - DNA, 648 bp, Stenotrophomonas maltophilia; identical to SEQ ID NO: 365113

SEQ ID NO: 512463 - DNA, 1209 bp, Stenotrophomonas maltophilia; identical to SEQ ID NO: 365112

SEQ ID NO: 512464 - DNA, 885 bp, Stenotrophomonas maltophilia
atgaatgacattgacgcagtactgagcaacaaaccgatttcaccgtcgcgggagatggcggcgtacgaggcgttgtgggcgcatcaaaaagcgacgttcaagacgatcgctgactgcttccgcgatagcccgaatgcgatgccctccgagctggtctcggaagaggaaattgacacggcgctacagcgggtgcaagaccagattgcgcacacgaagattcacgactttggtgtgcgtttgcatggcgcagaagactaccccgatcggttgcgcgatgccgcgcatcccgtcgaactgttgtactaccgaggctggtgggatctgatcgactcgcctaagcggatcgccatcgttggctcgcgcagcgtgtccgacgacggcttgcgccgaacccgcaagttggtgaagctgctggtccaagacggctacaccatcgtctccggtttggccaaaggcgtggataccgcggcacacacgacggccattgacaacggcggcagcacgattgccgtgatcggcacaccgattaccgagtattacccacccgagaaccgggcgctgcaagacttgattgccgagaaattcctgctggtgagccaggtgccgatctggcgctactcgacccaggactaccgtagcaatcgcctgttcttccctgagcgcaatgccacgatgtcagcgctcgcgcaggcaacggtcatcgtcgaagccagcgatacgtccggcacgctggcgcaagcacgcgcggcgctgcagcaggggcgcaagctgttcattctggacaactgctttcgcaatccgaagctgacatggccggccaagttccagagtcaaggggccattcgcgtcaccggcatcgacgacatcagggcagctcttggctaa

SEQ ID NO: 512465 - DNA, 639 bp, Stenotrophomonas maltophilia; identical to SEQ ID NO: 365110

SEQ ID NO: 512466 - DNA, 1140 bp, Stenotrophomonas maltophilia
atgctgatcgtcatgacctctccggacgccgtcctgcgtaatggccaacccgacccgcaactcgcccaggtgttgatcaacgccaaggcggcgggcaatccggtgggcttgatttccaatcatgcggaaccggcctggtttaacgggacgtttggcaccagtggcgttcagttcctgcaaagtcgagggcggcaatcgggcgagatcgtgtcgcagaacgccaagaagtttgcgctcaatcccttcgatgcgctggttctcgcggcaaaggacgaagacgtccagatggggaagaacggcggtgcgatcctcgtggcagccggatggtcggcagcacagcaggtcgcctcactgggcattcgcgtggacagcgccgcgcagctgcaagagatcatcaacctgacggccggctggtcggggcagtggtggtatgcaggcgacgctggccgctatcgggtgcgtgcgcttagcgacttgtccggccttggcaaaggtgtcacgcagcaactgttcgcgcagcggctgaccgccaccgtcaaaggcggtggcgcgcgactgaacgctttgctggccgtcacctcgcgttcgctgctcatggaaaaagtgaacgaactggatggactggtatggggcgtctatccgtcgtcgaagagtgctaacgacgatgacgagatccttagcgatttcacgcatcgcttgcgaacgacggtttcccgcgttcgcttctccaagcggggagagccgctattcattcggcacaccccttcgccgaagcgctcggcgggtggtggcggtgatcgaaccgatccgaccggccaaatttcgaccatccacctgaaccctttctacaaacagagcggacgattggtcggaaagcacgtgatcgttgtggacgattgcacgacctacggtgtgtcgtttggcgttgccgcggccttcttgcgcaaagccggtgccgcctccgtgacgggcgttgcgctggggaagtttggcaatcagttgcgttactacgagatcgacatcaagaccgatccgtatcagccggtcgtggccggcggcttcaccgtggccgcaccggggtggttccccggcgccaccagtggcgtcgctcagcaggttctgctgaccttgatcccgtaa

SEQ ID NO: 512467 - DNA, 825 bp, Stenotrophomonas maltophilia; identical to SEQ ID NO: 365108

SEQ ID NO: 512468 - DNA, 2256 bp, Stenotrophomonas maltophilia
atgggacgacagctgcagctcaatttcacgccgctgcgagtgcgcggtgatgccattcggctgcaggcgttgccctttgaggacgcgcagcagttccggaatctgcgcgacgagcaccgcgcgcactacgccgtgacccgtcgatcagatcacatcgtggcgctgccgcttactttgaatgcgtcgcccatcggcgaagaaaagattgtttcggtggttgagcatgcttcgctcatccggccgctgcttgagcagcgtctcgtgaccttgctcagttccaatcggcgaccggtggcgcgctataacccgattaccaccatagggcgcaccttgccgacgggcttcatcgaagccgaccggcatcttcatctgcaatcgcgggtcttgatcgcgatccgctcgttaaagctaccggacgcagaaccactcggtctcttgtgggacatcgagattcagaagacttgcgcaaccagccttgccgtgttgcatgcgcaaggcgttcggctggatgggttgacggtcgagcgcctggtgccggtcgaagatgtgcgcatgctgccctatcgccggctggtgggtcgagtcggcgcgctcacggacggccacgcgcgcctgtccgagcggtttcagaatgtagaggagttgcttccactcgacgagctgtacctggaggcctcacctgagaatcttcggcacctgctgcagcacttcatgcggaatacgtcgggcagggtgcagggcaagatcgatgagatcgtgttcgagaacagcagagggcgtgcgcgcatggagcacattgcccggatttcggactggctccgcggcctcggcgagatcgagctgcaagaaggtctcagcgttggcatcggcaacctgctgagcgagaaagatgcgcagaacttcccccgtttcaccgagggcacgacgccgacctatgttttcgacgccgggacgctcaagtcggagtcgcgggctgcggtcggtctaagcaagttcggtccctacagtcgccacgtcttcacgcccacgcggcctaatgtctgcgtgatctgcgaccgcgcgcggcgtggtcaatttgaactgttccttcggaagtttcgggatggcctaacggtcgacggcaagtcactgccatttgggcgagggtttctcggcatctacggactgcaggacatcaacctgacgtttgtggaggccgacgccttcacggccgacgcctatcatgcggctgcttccaaggcggtccggatgggcgccgagggcgcgccctggcatctggccttggtgcagaccgagcgagactcacgccaattggcgccgccgaagaatccgtatctggtggccaaggcggcgtttctctccaatcagatccccacgcagttcgtcgcgttcgagacgttctcgatggcgccgctcaatctcgcctacacccttagcaatctcgcccttgcggtctatgccaagctcggcggcattccctggttgatcaagtcggataagggtatcgcgcacgaggtggtcatcggcctaggcagcgcagcgattggcgaatcccgcttttcaaggaaagaacgcattgtcggcattaccagcgtctttcgcggtgacggcggctatctgctatcgaatctgtcgaacgctgttcccatgtcgaagtacggagaggccctgaccgaatcattgcaggccacccttcagcgcgtgcgcaacgagatgaactggatcaggggcgattcggtacgcgtgatcgttcatgcgttcaagccaatgcgcaataccgaggtggaatcggtcaaggcggcgttgaaggagttctctgaattcgatctgcagttcgccttcctgcacgtcaaacaggaccatccgtatctgctgtttgacgatgattccatcgggaccaagggcaggggagagaagacgccggttcgaggtctttttgcggaagtcggacataatgagaccttgttgacgttgacggggccgcagcagctcaagcgcccgacggatggcctacccaaaccgctactgctaagcctgcatcgcgattcgacgttcacggacatcatctatctcaccaaacaggtctattggttttcgaaccattcctggcgcagcttcctgccggcggcgatgccggtcaccatctactactccgaccttgtcgcgggtctcttagggcggcttgaccgtttgggtagccggtggagtccgagtgtgatgctcggcaagatcggcacaacgcggtggtttctatga

SEQ ID NO: 512469 - DNA, 1215 bp, Stenotrophomonas maltophilia
atgagcgccggcaacccgatgctgcacgaagcgctgcgcgcagtagcggggcaggccgagacactgacgactgcgggcccgctgtcgattgccttttatcactgggtgctcgccgaagggttgtccacccagcagagcgccgcgatggcgcgggacctgtgcgaagagatttccggcggtggtcggtcgattcatgccgtggcggctttggggttcctgctgagcatcgatccgacgttgagtgatgcatgccgcgactcattcgcgcagggcgtggactggctgatggggcgtagaggcgattcccaaacggctctcgtcagtctgatgcagccgttagcgcataccggcgttctggtgggtttgttggccacatccgatgatgtgcggtggtcgaaattcggcgcatggttcgcgtcgctctatgcaaagctgcagccgctgttgccggcggaagtcggctggcgccatgaactgctgtccatgatcaagacgcggtccgaggtgggattgaagggcgagctggcggtggtgcccgccaccgcgggcgcagctatttacgtcgcacgtcgcttggcggatgcttcgccggcggtcgataacgactttgcgtcgcagttgcttagccgcatcaagtcggttgtttatgacgaccctgaacaggcggccttggatctggcagcgtttcactatctcgcccagggcgcggcgcagatcgatctgcgcgcaccgagcctagacgatgtcggactgctgcttcgccggctcccatccgggttgcgtcggtggacctgggacgaacagaagaagacgccgaactcgaccgcgcaaaagtgggcggttgaaaacgaatatcactttcagaatcttctgtgcgcggtgctttcgccagtgttgcccgatctgcgtgatgaagagtggcttgcgtcggtggggcaaaagaaaccgcgggcagacttagtagtcccgtcgctgcacctggtgatcgaggtcaagtattggcgaaaaagcagcacgccgcaggacctgatttcgcagattggtgaagacgtcagcctttacctgaagcggggcagcccctatcgcaaagtgcttccgatcatctgggaccaaggacgacgcacagagcaatacgacctgcttattgcgggacttagtgagattcgcgacgtggtcagcccggtcgttatcgctcaaccggcgtttatggtttga

SEQ ID NO: 512470 - DNA, 432 bp, Stenotrophomonas maltophilia
atgagtagttcgaactgcccacttgaggaaggcgatcgcatcgatcacaagctcttcggattcggaactgtcgtgggcgcacctgttcccatggtgggccctgacctccgaagcgccagtggcgtccgcgacgccggctggagcgttccggccaaatgggacgacccgacgcggaccgccggtgccgtgatgcaccaggcgctacgcaaagtgtcatcgcctgactcgcggcccttcggccactgggatcggcagtggcagcctctgctgcaggcttggctagccgctcgacgcgacgttgaacagttgtcgtcaagcttccggcccgtacccgagcctgatgctttggcacgaatgcaggacgttgagagaaaagccttcgaagcgatgcggcacttttgggacgccgagcaatcgggggagcatccctag

SEQ ID NO: 512471 - DNA, 297 bp, Stenotrophomonas maltophilia
atggcctggttgtcgctgctgctgttcctgccctggttcctgctgctgggcagcctgtactggctgtttccgcgccagccgcgtaccccgcggcggcgcctgttcgacagcagcaccctggtgctggccttcgccctgagcatcgtgtcgatgctgtggggctaccgcatcggcgtggtgcagcccggcgccggacccatctggccacaggtgctggcggtgctgtatgcctacggcgcgttcctggcggtgctggtgctggcattgatgctgcggccgcgatggctggaccggtag

SEQ ID NO: 512472 - DNA, 495 bp, Stenotrophomonas maltophilia
atgacagcgtctgaaatttacgcgcagatggctgagcttcgctcggcagcagccacgctccgccagccgggagggaccaccaccgaccggatcagcgccgagctactcgaacgggcagcacagaccatcgcgattctgcagcgcgcgccgctgccagccaccacagtgacaggtctcctgccgaccttgcaggacggctggacgccggaggactacgggacctgggcaatccgtgcggccgagcgcgcgcacggcatcgggaccgccatcccgaacccaccgccgcccagctgggccgaggccccggacggctacaactaccgggcgatggacagcgatggccgttggtactggttccaggaccgcccctacagcgagaccatcggcaactgcgaagtgtgggacagcgagggcggctaccgagaggttcgcggcctgcatttctaccccgactgggccgagacgctggaagaacgcccaccgggtgcgaaatga

SEQ ID NO: 512473 - DNA, 363 bp, Stenotrophomonas maltophilia
atgaacgtgatgacgattggcgaggctgtgccggcagcactccaagtgcatacgtcggtggcattcccgccgccggccgagggctgcgctcacatcctggtgcgggacaacctcaatgcactgcgctttgaaaagggtgacgttctgctcgcagacctgtcccgcactgaatggcgctacgacggcatctatgtcctcgaactgcatggccggcaggtcgtgcgttacgtgcaggaccgagggtcaaagggactgtatgtgtactacctctcggcgatggagctgggccagttcatccctaagagcgagctgaaggtactggcagcgattacggccgtaaattgcacaaggagagtggcatga

SEQ ID NO: 512474 - DNA, 663 bp, Stenotrophomonas maltophilia
atgagcgccgacatcagccccatcgatcgcctgttggcgcggggactgaccggccgcgacctggtctcctacatgctccccggcatcgtctggctggcggagcatcaggacgaaacgttccgcctctgctaccacgacgatgctggacgagttgtggtggaagaggttgccgctcctgcgctgatcacccgggcacgggagctgggctggaccccggatgatccaaatcccgatcacccctattacatgttcggcgaagccatctaccaccggcggcgcggggttcactggttcgccacagcctgcgacgacacaaccgagatgctgccactggcatttcccgcccgcgaactcgccgccgcgaagaagagggacgaccgtcggtacaacgaggctgctcaggctcgacgtgcaaaggcgcgcgagcgcgaagtcaagcgccagaaagatgcagaggaacgtaaggcggtagctgaactgaatgcggcagtgcaggttgctgccgatgacttcgcaaaggaggccgagaaagctggccggcccatcacgccagggaccgcgcgacgcaaggtgtggaagcacattcgcaagtgcgacaactggacctaccacctgctgctcaagcggctgcgggccatgcaagtgaaaggagcgatggcatga

SEQ ID NO: 512475 - DNA, 228 bp, Stenotrophomonas maltophilia
gtgagccgggcaacgaccagtacccatgacggcgagagccgcgaagccgtaacccaggcgcttcacgagttgtacgtgggcgtggctgacatgagggacctgctgcagttcgtgattgagaacggtccgcttggcaacgaggagttcccgcggggcattgcagcagccgtaagcatgacgcacgagcgcgccgtcgcactgtgcaaggtggcggagggggtcctatga

SEQ ID NO: 512476 - DNA, 240 bp, Stenotrophomonas maltophilia
atggccaacaacagtgtatccccgggcagccccgcagtgtccctcgacgctgggcagatgaatctcatcaggctgcacctccggaaattgaccgcgtataccgacattctgtgcgagggcgacctgagcgacgttcagtcgtcctcagtgaacgtcattgccgaccacgccgcactggcggtcgtgcatatcggcgagattctcgacacggctgccgctgcggtgggggtggagcagtga

SEQ ID NO: 512477 - DNA, 477 bp, Stenotrophomonas maltophilia
atgaaccggatcaccatcgcggttgctgccttcgtcctgtggtcaggcgcaatgttcggtgcaggttgggtctggcgcggcgatcgcgctgagggcgccgaagcccgtcagcaggccagaaccagttccgcactggtgcagcaggtcaatcatacccgtgccaccgagcacgcccaggccgaggaactggccgccattggagcgaagcatgaagaagaccgcactgcggccgcgaccgtccctgctgctgttgtggctgacctgcgcgctggccgtctccagttgcgcgacgacctcgccacctgcaataccgctcgcctgtccgaagccgtcgccggcgccgtcgaacgtgaccaggcagcccaactacgagcagaggtcgcgggcgctcttgttcaagtcggacgagacgccgacgaccacgtccgggcctgccaggcggtgatcgcagctgaccgacaaccggtggcgccatga

SEQ ID NO: 512478 - DNA, 1815 bp, Stenotrophomonas maltophilia
ttggcagtggtcgaaggcaggactgtcgcgggcccccacgtgcgcaacgcctgccggcgccatctgaaagacctggaggacgctcacgagcgtggcctctacttcgatcgagaggctgcagataagaagatcgccttcttcgaagaagtgctgcgcctgagcgagggccagttcgagggcaagccattcaagctgcaccccagccaagcattcaagatcggcagtctgttcggctggaagcaggcggacggcacccggcgcttccgccgcgcatacatcgaggagggtaagggaaacggtaagtcgccgatggccggtgggatcgcgcttatcgggctttgtgccgatcaggaggccggcgcccaggtgtacgcggtggcctcgcacaaggatcaggccggaatcctgttccgggacgccgtcaagatggtgaaggcgtcaccggcgctgaagaagcggctggagttctcgggcggtgagggcaaggaatacaacatcgcccatcacaagtcgcagagctacttccgaccggcgtctcgtgacgttggaaagactgggtcgggctaccggccgcacttcgtcctggccgacgaagtgcacgagatggcggacggcaagatcatcgagatgatggagaacggcttcaagttccgccgttccccactgctgttcatgatcaccaattcgggcagcgaccggaacagcgttgcctgggcagagcatgagcatgcggtcaaggtggctgctggccaccacgaggccgttaacgatccgaccttcgtcggcgacgtcattgatgaccgcacgttctcgttcgtgtgcgggcttgatgagggcgacgagccgctcgaggatcctgcctgctgggtgaaagcaaacccgatgttgggtatcaccatcacggatgaatacctgcagggccgggttgacttggccaagcagatcccgagcaagctcaacgagatcctgcgactcaacttctgcatgtggaccgacgccgaccaggcgtggatgagtcgcgaaattgtcgagcctgcgatgcagtcgttcgacagggcgcagcaccacggcaagcgcctccatctcgggctggacttgtcgcagaaccgcgacattacggctctgggtgcggtggtggagaccggatcgaaggaggtcctggttgaggttgagggcaagaagaccctggtcaacaagccaacctttgatgcgtgggtggaggcgtggacgccgggagacacggtcaaggctcgcgaactgcgcgacaagcttccctacagcacgtggattgccaagggtcacttgcacgccccgaaggggcagacgatcagctaccggcacgtcgcgcagacggtggccgagtacgaccgtgacttcgaagttgtccaagtggcttacgaccggtacgcgttccgacagttcgaagaggaagtgaaggagctggggctttccgtctcgttcgtggagcacccgcagggtggcctgaagaagggcaagccaacagaggcggcggtcaaggcagccgccgcagccggcaagccgccgccggaagggctctggatgcccggatctctccggttgttcgaagaagccctgctggaaggacgcgtccgcttgctcggaaaccccgtgctggtgtccgcaatcatgtcggccgtcattgagagcgacaaatgggagaaccgctggctgtccaaagcgcgttcagtcaacaagatcgacgccgcggtggcggtagtgatggccttcggctccgcacattcatcggtcgcgcccgcctctgtctatgagcagcggggcatccgattcttatag

SEQ ID NO: 512479 - DNA, 1344 bp, Stenotrophomonas maltophilia
gtggacatggattttctggagcagagctcagaccagtggtcgctgatggagtcctttgtcaatcgcagcggcaagctgtttctgaaaaagctctcccgcaatgatgcatcgtgggcaaatgagggtggcggccatcagtatggcttctatgtgccccgcgccgtacgcgagtcaggcttctttcccgagcttcatgcccgggaagacatcccgcatatcctggaagctgactgcccatcattctggccccagaccggcgaggtcaggagcgactctggtatcaagtactacagcaacaagggctctgagtgccatttcacaaggattcccgcagagctttttgctggtctcaaccccgcatcgtggctgctgggcgggacgcttgaagagcccgaagggaatgcatatcactggttcatggtgattgactcagcttctacggaagcagaaatgcttgagagtcgtctcgacatccaagcggacttccacttcgatcttctcgatccatcgcagttcaagcgcgcctctgccatcgactcggacgaggctgcggatcttattatcgagatcgatgccgcgatcagaactggcaccatcgagacgctcgttgcgaagtactcgaagcttcccgatccgcttgtgcttgcggatgaggcgcggttggaattcctcagatctgtgaggtcgaagacgttcaacccatgggatatcaaaaagcctggcgacgctctcatgcgcgtaagcagggacatcgagttctcaatctaccgccgacacgagctccgcatgagggcagtagaagtcgccagagttctagcccagcatgaccggtctgcgactgcggctgtacgcgggttcgcgtccttgaattcgatatttctctctgcgagccaacagcggaagagccgtgccggaaagtcatttgagacccatctggccgccatgttgaaggcgggtggagtgcggttcgaggcacaggcgattcttggccagcgtcgcccggacttcgtccttcctgaccaagcaacggttgccttggacacacagcggcgacatgaagacgcagccattctttcggccaagacgactctacgcgagagatggaagcagatcactcacgagcgtttcaactgcgcaatcttcctcgctacggtggatgaccgggtttcgaaggaagcacttgcagatctacagaaggcagagatcacgctggtcgtgccggagtcgttgaagatgaagaccaatgagtccctctactatcacgacacgaacgtgatctccttccgggagttctttgacgaagagctagcgcgcaagcggccatccctccttttggtggattaa

SEQ ID NO: 512480 - DNA, 2037 bp, Stenotrophomonas maltophilia
gtgacaggggaagtagaggtccgcgtcaagcgacttggcaaaactattgccacaatatgcaggccgctactggacttggggggggcgccagcaatcagctttagaggcacattatggccactcgttgacggcgcagtcgaggtgggcatttccgaagtcagagattacgcagaggcagaaagcaaaacaggcaattccgctcccgtagcggcagcggctgcctctgcgcaggagcaggagcaggagcaggagcaggagcaggaaaattgtgctgctagcgaagccacctggcaggacgaccctatcactgagccgccgagtgcacgcctcattgttgatgcaggtccaggaacaggaaagacgcacgccgcctgtgcgcgcgtcgcatctatggtgaacagcggaattccagcctctcgaatcagtctgatcagcttcacccgtactgcagtcgtagagatccgcaaccgcatcgctagagcacttgaagatccagctgactctgccagcattagaatcattacactcgatgcattcgcgtgggcagtccagtcaggatttgcgaagaatgcccgtcttacgggaagccatgaagacaacatcaatgccgcgcaccgccttgtgttggatgaccctgatgttcgtgacgatctcgtccgcatagagcatctcatcatcgatgaggctcaggacattgttggagctcgtgccgatctaatccttgcgatgattgacgctctcgatccggagagtggcatcaccgcatttgctgatcgcgcacaggcaatctacggcttcgctgagcttaaccaagagggcagatgcaccaacttcctcgatgaactagtgaagcgaggatttcgacagcttttcctgaaaaaagttcatcgcaccagcgaccccaatcttcttgcgattttcactgatcttcgtcgcacagtactggatagccggaggccagacatcgaaaggtatgtccagagcgaaatccggcgcttggcacatgaggatgttggggacataggaaaacttgacctttctatgatcccgagcgattcgttagtgctaatgcgcaatcgcttggacgtacttatcgcatccagtcatgctggaattactccgcatcgcctgcgcctttcaaatatgcccatctgcgtgcgagcgtgggttgcacacctgctctgggattatgtacaccggcgaatatcacgtgatgagttcgagagacgctggcacgaacgtggaatacaggcacccatcaattgcgctgaggcatggagccgctgtgtggaagtagccggcgaatctacagtgatggtcgatctacacatgctgcgcaaagtccttgcccgcaccaatccgccgatgattttctgtacgccagaatttggcacctcagggccaattcttggaactattcatgcaagtaaagggcgcgaggcgccaactgtttatctctatctgcaagagcggttcgcagcagatgacacgggtgaagagtctcgcgtaatgcttgtcggcgctaccagaccgcgtgagcggctgctcgtcggtacgaccaacgggctaggcagcagagtcacaaatgaccgcttgtggcgcaacaccggacagtccattcaggtggaggttggcagaccctacgacattgagcctccgggacttgtagggcgaccattcttctcgcgtcaagacgacgcgatggctgcgcaggcagcctgggcatcccaatcgcttcgacaccgcatggtcctgcgcgcccaggagagtgcaggctggcagtatgtattgaatgacggagagcagcgcttggctggactgagcgagcgtttcaggtccgatatcaatcttattgcatggaagttacagaaacgtattggctggcttggtgcttgtcggtctatcggcattcgatcaatggttgttgctccggacagcagttacttggaaagcatgcttgaaccgtggaaatcgagtggctttctatttgcccccctcctgagctccctctcaactgctataccgaggtctcgttaa

SEQ ID NO: 512481 - DNA, 3084 bp, Stenotrophomonas maltophilia
atgaccgttcgcgatactcttgtcgaccagcttgctatcgacctaatcggcccactagccaacgacgaaatcatcgatgccagaccatcggacgtctatctcactggtattctctggcctcagaacactgttctaccaccggagcaggacgagcgccttgcagtcgcaggcggagatggagacagtaatgaagagactgacgcggcctcccagcccgcggcgtcccggatgcggcgcccttcaactgccggattatcattcgcttgcgcgtcggatagcgcggacgcgccaagggttgtcgttgaagttgcatgtgctcgctatcagccgcatccaaatgagacaaaccgatgggttcgcacgccatgccatgtgccacttcaagacattgtcctgactccaggcagcgatgacttcccagtacccattgccggcatcgatggtgtccgcctgaatgtgagggttatagcatttgaggctggagtgctggctacgatcacattggtaaatggctccttgcctgagcgaagcagggacgcaatcgagattgcaacgttgttccaaacaggcttgactgttcgggctgctgcggggtctcgcctcatcacacgcccaagccggaaagcggcgatcgacgctgacgatcgctccaatgctcttctatttcgtcattcgcgcgagtacgccaccggccacacgtgctccgctcgatggagtattgatgccgaggggcaagagatcgatgcagtacaaacaacctggatgcctcaggccacaacaaaagcagtgagtcccgacggggcacaccactttgccaagctcgctgattccggctcccttgcggcagcaacgctggctgacagtaccgatgatgaattgatcaagcatcttggcagcatatgtgatgcatatgccgattggttggaagatcagcgcatgacactggagagcattccggaccgcctcttggaaacagcaaactcgcatatcgccgagattcacctagcgcttgagcgaatgcgccgaggcgtgaataggctagccactgatcacgcaatggctgaagcgttccgtcttgccaatctcgcgatggaaacccagcgagtctggagcggatcctccttgatctggcgcccgttccagctcggctttctacttctttcgatggaatcaacactagactcccagcatccggaccgcagcgtaatggacctactttggttcccaactggcggcggcaagactgaagcatatctcggtctagtggccatggtggcttttcatcgccgccttgcaggtgcgaagcctcaggatggcgatggcgtagcatgcatcatgcgctacacgctgcgactactgactacgcagcaattcatccgtgctgcttccacaatttgcgcctgcgaggcaattcgccgcggcacagtggcctcaggcaggaagcaccaattgggaacaactccattctcgcttgggctatgggttggcggggaagccacaccaaacacgcgtaaggacgcattcgataacaagggggacagtttcaagcctcaagcgcggcagcttaccaagtgcccatgctgcaacgaagatctaaattacatccaacgccggcacacggactcggtagttaccgagtgtcgcacatctggatgcgcactttccggagcaccaattccgattttctccgtcgacgaagacatttaccagcagcgtccaacgatgctgattggcacggtcgataaatttgctcagattgtccgcaacccagcgtcgcgcacgctattcggggtcggtacgtcgatgcagccgcaactcattcttcaagacgaactgcatttgatttccggaccacttggaacgctgaccggtctctatgaagtcgcaattgacatcatcctctcgcacaatgggcgcccaccgaaaatcgtcggctcgacagcgacaatccggcgcgcccaggatcaggtccgtgctctgtttgatcgagctacctgccagttccccccacccggcctgagtgcagaggactctgggtttgccgtggaagatcgcaagctggcgggtcgccggtacgtcggaatcaccactgccgggcgatcagcgaaattcaccctccaagcggtagcagcttctctgctgaatggtgcgcttaattgtcttggcgagagtgaccgagacccatactggacacttttggcctacttcaattcacttcgtgagctgggtggcgcactggtgcttatgcaggacgacgtatctgacacgctcgcccttctggcggctcgacggagtcatagcacccgtcagctgtctgaaatcgaagagctgacgtcgcgccgaactcaagcagacattcgcgacatgcttgacaagctcgcggtaacagcggacaagcctggcgccgtggatgtcgttcttgctacgaacatggtcagcgtaggcgtggatattccgcgcctcggactgatgctagtgaatggccagcctaagacaatggcagagtacatccaggctacgagccgggtcggtcgcggcagggtcgagggtctcgtggtaaccctgctgaatggcgcgaagccccgtgaccgctctcactatgagactttcagtacttggcactcgatgctctacagattcgttgaggctacgagcgctactccgtttgcgtcgcgagctcgagatcgagcattacatgcggtccttgttgcgctcgtgcgccatctaatcccagagatgctcgaagagcccacttggtcggacggttccatcaaacgcgcacgcgagctaattgaccttgtcgttgcccgcgccggcaggatcgatgcagatgagggggatgtgcgcgacgagctactgaggcggcttgatgcctggatccggcgttcgccggagatctactggaagaaagctggctcacgcgcatcggcgctgatgcaaagtgcagaagaagcagcagcgcgacgcgctactggacgagtggttggacaagcgtggcctactccaaactccatgcgcggcgtcgagccagccactcccttccgcttggttaatggcttgaggagcaacgatgtcgcgcaataa

SEQ ID NO: 512482 - DNA, 1830 bp, Stenotrophomonas maltophilia
atgtcgcgcaataaacttggggaagtccgccgcagtgcagctgcatccctcttcggcccaggcgccgtaattgatttccgggctggtgatgccccgatctcggcagtcgcggctggtctcgaagagtgggatagaaattttccgcctgcgggaatgagaaacgaacaaactgtgctcgaagttcgactgcagaagaaacttcgcgtgcagggttttcgcctgccgccggtttcgaccgatgaattcgatcgatctgacagcaaggccctcgtagctgtccgattcccaaattggctgcagtgtccgcaatgcagccgtcttggcgagtcgcgtgcgtggtcagacgagactgggcaggccggcctctactgcgcgcagtgtacccaacgcgcgcccggccgcaggaaggtgtgggtagtacctatccgcttcgtgatggcctgcgaagccgggcatctcgatgagttcccatggcactcatgggtccggcacaatgaaggatgccagcggcgcaccttcctcagcctcgtgtccgagcgcgccggtcttgcaggcctgatcttgagctgcccgaactgcaatgctcgtcgttcaatggaccgggttttttccgaggagacttgggaaacttttccgaactgtcgtggtcgccgaccatggctctcgggcgctgatgaaacatgtaggcacaaggcccgcgcggttcagcgtggtgcctccaacctctatttcccggtgatcgagtcagctcttagcatcccaccgtggtctgatcagattcaagaggctatgggcgtgatgtgggatcagttcatgaatgttgaagatcctgatgagcgcgctatatacgttcgcattctcgcgaagaatgaactgaagcccgttctcgctgaattgggcatgacaccagaagcctttgccgaacatctaaaccttcgattgaattcgcaggagagaattgacactgataatctcagaggcgaagagcatcggcaatttactagtggcgtcgctgaccacgggccagatcgcgaattcgagatgcgcccccaaacggtgcctgcagccgttgcagaatggttttcccacctcgtccgcgttgttcgactgagggaagttagtgcgctgaagggttttacacgcattcatccccccggagatccggattctccgaacatcgctccgatatcgtcgcgacgcttggattggctacccgctatcgaagtgcgtggagagggcatctatcttgaactcagttctgacgcacttgcccactgggaggcacgggactcggtgattcagcgaattgctgtcttggatgagcgccacaaggctgcttggcgcaagcgcttcggcgaggacgtggcacctagtccggtcaccccccgccaggtgcttgtgcacaccctcgctcatgcgcttatgcgccagctcacactcgactgcggctactcgtcaactgcacttagagaacgcctttatgtcgaccaaggcgaggcttcaatggcaggcttgctcatctacacggctacaaccgacgatgacggcacattgggcggcctgcagcgcgaaggctccccagatcgaatggagcgaacaatcaaggctgcgatacaggctcaagcctggtgttcatcggatccactatgcatcgaagaccttttggtcggtgagaacggcatgtcgctcgcggcatgccacgcttgcgtgcttgcgccagagacatcatgcgagacattcaataatttcctcgatcgcgcccttctggttggctcaccccaagatccatcacttggatttttccattccctcgtgtcggagaatgattaa

SEQ ID NO: 512483 - DNA, 1614 bp, Stenotrophomonas maltophilia
atggcgaccatgtggccacgccttttgccagcagcgatccgggctgagtcgagacgagcggcagaagtccgcgtctatgacgctttggctgcccagctgggatcggcgtggacagtcttttactcacgtccgtggctgggagaaacatcgacgggttccgagatcgatggcgagtctgattttgttgttgctcaccctgattacggcgtacttttcgtcgaggtcaagggcggcgccatcacttatgacccagctcaggatcgctggaccagcacggatcgccatggcattcgacaccgcatcaagaatcctatcaagcaggctgccgacagcaagcatgcccttctaaagaaggcacaggctgagcgtagctggccgcgaggcttcttccgatttcgtcatggggttatatttcccgacgtttcttcagtgccgcagaacgcgggaccagatggtccccgcgaactttttgcgacacgacaggacctagatcaactcgtgcgttggattgttcaacggttatctggcggaaatgaggatgcactaggccctcacggcgtgagggtactcgagcatctacttgctcgacccatccagctgcattcgccattgtcttattcaagcgcagatgatgacgcagccatcgagatcctcactccccagcagttccacatcctcaacgccttcgaagatctgcgtcgcgtggcggtatcaggtggcgcaggcacgggcaagaccgttctcgcgtgtgaagacgcacgaaggctctcagcttctggcaaacgcactctcctgacctgcggttctgttcaactcgcacggcacatccgtgacgttcttcgagatagcggagtcgagattgaaacatttgcggacctggctcggcggctcgggacagaatctggcgttctctcgaatagcaccctgcctcgctctgaacaactgcccgaggttgtttttgacagcctgtcgacaagaccggaccttgcctatgaggcagttgtcgtggatgaagcacaagacttcacgccggcgacttgggtcgcgattgatgcgctcgcgagcagaagtgaaggatcggcactccatgcctactttgacagcaaccagcggctatatggagagctgcgcagccattttgacgcttacacacttctgccgatccgccttagccgcaatcttcgcaacacccagaacattcatgaagcgacacagcgcttctaccgcggccctgccttggtcgctgatggcccacttggcgccgctgtgcaatggatcaatagtgaggatgcagagctcgaacggactgcactcgatgaagtccgcagattagtgaagaccgaagccgtgttgcccgaagacattgcagtactggcccccgaagctggcatcttggatagactcgccattccgcttcgcgatcaagtccacgttgggcttacgctttcgacggtcggacatttcaaaggactcgagcgtcgcttcgtgatcttgcttgcgacccgctcgctttcggatataccagaaatggcttatgtcgcattgtcgagagcgcgcgcgcacttgacagttgctggccctgccgaggttattaagtggttgagagaacaatga

SEQ ID NO: 512484 - DNA, 1587 bp, Stenotrophomonas maltophilia
atgtcttcacttcgcgcatccatcttaacggcactggtcggtctcgctgtcgttgcaatccccagcaccccagcggctgctcaaacggctcagaatacttatatcgccggtgacggaaacgagtccatcaccaacaagcatttgttgaatggtgttctggtgggaacgaacaacaccacgcattcggccgcagagctcctttcggctttcactgtgatgggcagcaacaatgcgattgatacggcaggtatcgttttcggaaacaacaactctcagtcctcccccacccccggccttgcctcaggatcactgcaagtcggacgcggcaatacggttgagggcgagagcaacacccagcttggccagaacaacacgacgacgggctccacaaacgcgaccatcgggacgggcaacgaaatcgagggcaaccagaacctgctcacggggatcctggtcaccacgaaagggagcggaaacgccatcacggggtggggaggacaggttattggtgacaacaacgcacacatgggcaccggtggcagtatcagtggcaacaacaacgtgaccatgggcaacagcgttgaagtcacgggaaacaaccaggtcgttggcggcacctcggcacgtggctttgcggacgggtgcgttgcactcggcgctggttcccagtgcttcgaatcagacgagttcagcgtcggaataacgaacaacgagcgccgtgtgaccaatgttggcgacgggcgcaactacaccgatgcagcgaacgtgaggcaggtcgccgccgccgtgaggacgctgggcgcgggtgctgacatcgtcagcggtcaactcgtggaacccctcttccagttcctcagcggcgcaacctacaccaacgtcgctgaggccatgtatgacctggatggcaggatcgccaatctctcgcaaaatccgggtggcaccgctggtccgcagggccctcaggggcctcaaggccccgcaggaagggatggtgtgggcggctctgatgtaaaggcaggtgccaacgtcgtagtcactaccgacgaagacggcacccaagccgtggcggtcagcgacaacgtgcagttgtccgaccaaggctctgtccaggtcggcaagaccacggtcaacgcccagggcgtgaccgtccaaggcggcccttcggtgaccaccgcgggcgtcaacgcgggcaatcagcgcgtgaccagcgtggctccggggcgcatcgaacagggctccacggacgccgtgaacggtgggcaggtctatgaaatgcagcaggtctgggatgaccgctggaccgacaccgaccgccgtttgcggcaccaggatcgccggatcaacggtttgagcgcccaactgggagcgatgagccagatggccaccgctgcggcccagaacgggggcacggccgttggccaggtgaacctgaacgtgggcgtggggttctcggggggcagtgctgcaatggccgtgggctggggtgctcgggtgtctgaaaaggtcagcgtctcggcgggcctgtccttcggctctggcaacaagccggtggccggcttcgggttgagcatcaacttggggcgctaa

SEQ ID NO: 512485 - DNA, 1455 bp, Stenotrophomonas maltophilia
atgcaaacgtcctaccccctgcgccagcaatggctcggcaacatccgtggtgatctgctgtccggcatggtcgtcgccctggccctgattcccgaggccatcgccttctcgctcatcgccggcgtcgaccccaaggtcggcctgtacgccgcgttttccatcgcggtggtcaccgccatcgctggcggccggccgggcatgatctccgccgccaccggtgcaatggcgctggtgatggtcgacctggtcaaggaccatggcctgcagtacctgttcgccgccagcatcctggccggcctgctgcaggtgctggccggtgtgttcaagcttgggtcgctgatgcgattcgtctcgcgctcggtcatcaccggcttcgtcaacgcgctggcgatcctgatcttcctggcgcagatgccggaactgatcggccgcggtcccaccgtctacgtgctgtgtgccgccgcactggcgatcatctacctgctgccgcgcctcacccgcgctgtgccttcgccgctggttgcaatcgtcgtgctcaccgccgtagtgatcggctttggcgtggacgtgcgcagtgttggtgacatgggccagctgccggacagcctgccgcagttcctcatccccgatgtaccgctcagctgggaaacgctgcgcatcctgctgccggtgtcggccacgctggccgtggtcggcttgctcgaatcgatgatgaccctgcagatcgtcgaggacatcaccgagacgcccagcgagcgcaaccgcgaatgcgtcggccagggcgtggccaacacggtcaccgggttcctcggcggcatggccggctgcgcgatgatcggccagtcggtcatcaacgtgacgtctggtggccgcggccgcctgtcctgcctggtggccggcgtgctgctgctggtgctggtggtgtacggcagcgacctggtgcggcagatcccgatggctgcgctggtggcggtgatgatcatggtcagcatcggcactttcagctggcgctcgctgcgcgacctgcgcacgcatccgcgcagttcctcggccgtgatgttgctgaccgtggtggtcaccgtggccacccacgacctggccaagggcgtgctcagtggcgtgctgctgtcggcgctgttcttcgcccgcaaggtcggccgcatgctggaggtgcagcgcgaggatgccggagacacgcaggtctaccgcgtacgcgggcaggtgttctttgcgtctgccggccagctgggcgcggcgtttgactaccagcacgtcgcgccgaaggtgcagatcgacctgcgtgacgcccacctgtgggacctgaccgcagtggccgcgctggaacgtgcgcaggaaaagctggccgcgcatggggcggaggtggtggtggtgggcctcaatgtggctagccagacgctgatcgaacaggtgggcgggcgcgcgggcgggcattga

SEQ ID NO: 512486 - DNA, 1881 bp, Stenotrophomonas maltophilia
atgaactacgaggaaacctaccgtcgctcgatcgacgagccggaggcgttctggggcgaggaagccaagcgcatccattggcacaaaccgccgcagcaggtgctcgattacagcaacccgccgttccggcgctggttcgtcggtggtgaaaccaatctctgctacaacgccgtcgaccgccacctggcaacgcgcgccgaccagctcgcgctggttgcgatttccaccgaaaccaacagcacccgcgagatcacctatcgccagctgtatcgcgaagtgaacgacttcgccgccgtgctcaagcatctcggcgtcggccacggtgaccgcgtggtgatctacatgccgaacatggccgaagccgtgttcgcgatgctggcctgcgcgcgcatcggtgcggtgcactcggtggtgttcggtggcttcgccgcgcacaacctggcgctgcgtatcgacgatgcgaagccgaagttgctgatcgcagcggatgccggcatgcgcggtggcaagctgattcagtacaagccgatggttgacgcggcctgcgccgaagcggcgtcgcctccgccacacgtgctgatcgtctcgcgtgggctggatgccgccgaaccccgcgtgccgggtcgcgacgtggactacgccgcgctgcgtgcacaggttggtgaagtcgatgtgccggtgcagtggcttgaagcgagcgagccgagctacctgctgtacacctccggcaccaccggcaagccgaagggcgtgcagcgcgatgtcggtggttacgcggtggcgatggcgcagtcgatggagaccgtgttcgactgcaagccgggccaggtgatgttctccacttccgacgtcggctgggcggtgggccactcgtacaacgtgtacggcccgctgatcggtggctgcacctcgttgctgtacgaggggctgccgacgaatccggacccgggtatctggtgggcgctgtgcgaacagtacaacgtgcgcaccatgttctcctcacccaccgccatccgcgtgctgaagaagcacgacgcggacttcatccatcgccacgacctgcgcgccctgaagtacctgttcctggccggcgagccgctggacgaacccaccgcgcactggatcagcgaagcgctgggcaagccgatcatcgacaactactggcagaccgaaaccggctggccggcactgaccctgctgccgggcctggagatgaagccggtgcgcttcggttcaccgggcttccccaatctcggctatcggatgaaggtgatcgacgagaacaccggcgaggaagtggcgccggggcagaagggcgtgctggtggtgtcgccgcccttgccgccgggttgcatgagcacggtgtggaacgacgacagccgtttcctgcagagctacttcagccacttcaaggaactgctgtacagctcgctggactgggcgatccgcgatgacgatggctataccttcatcctcggccgtaccgacgatgtgatcaacgtggccgggcatcgtctgggtacgcgcgagatcgaggaggccatctccagccacccgcgcgtggccgaggctgccgtgatcggggtcaaggacgagctgaaggggcaggtgccgctggtgttcgtcaccctcaagcaggggcttgagggcgaggatccggcgccggtggtggccgagatgatggcgacggtgacgacttcgcttggtgcggtcgcgcgcccggcgcatgtgcacgtggtcaacgcgctgcccaagacccgttcgggcaagctgctgcggcgctcgttgcaggcgttggccgagcagcgtgacccgggcgacctgtcgacgctggatgatcccagcgcgctggaggaaatccgccgcgcgctgggccgctga

SEQ ID NO: 512487 - DNA, 603 bp, Stenotrophomonas maltophilia
atggcaactgaggacgagccgacgccggattggctgagcggcgaagggccgtggtggctcactggatacacgtggccggttcaacccggcgccagctggcagcctgaccattggtggcgctacgccagcggcttcagggaggccggggacaggcttttgagcaccgtcctcaatgatgggcgacgagatggcctcgatatcctggtgatgccgacgctgttcctgtaccgccactacatcgagctagccctgaaggccgcggagcggtccattgctcagtacctgggcgaggaaccccccacaagcaagaggccagaccacgttcttctggagcgctgggatcgaacattcgagagcctcgcaagacttccaggcggcgaagcaaccaggttcccggaagccgaccgggtcataagggagttggaccagcatgatcggcagtcattcgccttccgctacccagagtcgctcaagggtgaaccccatgcccaggcactaccatgggtgaactatgcccgtctggatgaggcgatgacgcacgtaaaggaggcgatcgactacttggacggcagcatttcatacgccaacgactgccggccctga

SEQ ID NO: 512488 - DNA, 684 bp, Stenotrophomonas maltophilia
atgactcaagtcattcaaaaaggcaccgcttggcggcgctttttctgttgcacctgttcgccgccgttactgcgtccctaccgccgtcgttttggcggccgccgcgtcggagacttgctttgcagcggttgcggccgcatctgcagaacgtgccgcctgcgcctgggccgccgcgaactcggcctgccgctgttcactgaacctgcgttccagttccatcgctgcggcaaggctctccggattcttcgcagcacatgcctgctgtatcagttgtaccgcacggtcggacaacccgggttggatgttgccaagcaggcaatcggcgtaggttggcgagccggcggccagcgcggtccagcatgtgaacctccttgcaagtctggatgggtccgagaagggaccaggccgagcatggcccggatcatggagcagtgttcctgcttcggcgtccggcgtccggcgtgcggcggctggggtcagacaaggcgcaaagcgcggaatgcggatgacccggcccgaacggaggggcatgaggcgagttccgcgtccgccatcaatggagaacgcgcgcacgtgtcgtgctggctttgtatgccattcgctgtgcgtgccgtcagtgacgattcaaagacgacactttcacgggcgcccccggcaaggcctggatctatgcaggcctgctga

SEQ ID NO: 512489 - DNA, 999 bp, Stenotrophomonas maltophilia
atggcagccaacgacgatctggtggtgttgcgcccggaagggctgtactgcgccgccggcgatttccacattgatccctggcgaccggtagcgcgcgcggtcatcacccatggccacggggatcacgcccgcccgggcatgggcgagtaccactgcagcgaaggcagcctgccgatcctgcgctggcgcctgggcgatgtgccggtgcaggcgcacgtcgagggcgtgccgttccgcctgggccgggtacaggtatcgctgcatccagccggtcacgtcctgggatcttcgcaggtgcgcatcgacgacgggcggcaggtctgggtcgcctccggcgactacaagcggcagcctgacccaacctgtgcgccgttcgaagtagtgccctgcgataccttcatcaccgaagccaccttcgccctgccgatctaccgctggccggacacgccggcagtcgctgctgagatcgtggcgtggcgccgcgaatgcgaacaacgcggcgaggctgcgatcctgctgtgctatgcgctgggcaaggcacagcgggtgctggcagagctgcggccactggacgatcggccggcctggctgcatggcgccatcgccaatggcgtggcggtgtaccggcaggccggcgtaccgatgctggagacgctcaccgtagccgaacagggccgccagcccgatgccgccggacagttgatcctcgccccgccctcagctgcgggcacgccctggatgcgccgcttcggccgtcaccagctgggcttcgcctcgggctggatgcaactgcgcggcaaccgccgccgccgcaacgttgatcgtggcttcgtcatttccgaccacgccgattggccagcactgctgcagacgatcgaacagaccggcgcgcagcgtgtgatcgccacccatggcaataccgatgcgttgattccgttcctgcgcgaacgcggcgtggctgccgaagccttccgtaccgatttcgggagcgaggaatga

SEQ ID NO: 512490 - DNA, 957 bp, Stenotrophomonas maltophilia
atgagtaccccgtccaaactgtcccagctgcgcgaactgtccgtggttgttgccgataccggtgactacgaggcgatcaagcgcctgcagccggtagactgcaccaccaacccgaccctggtgaagaaggcgctggacctgccggtctacgccgagctgatcgaacgcgaactggcctggggccgccagcagacgggcgaccgcgaagccgtggtgcacgccgtggccgaccgcctgaccatcggcgtcggcgcgctgctgagcacgctggtgccgggccgggtgtccaccgaggtggatgccgacctggctcacgacaccgctgccaccgtggccaaggcccgccagttcatccagatgtacgccgatgccggcgtgccgcgcgagaagatcctgatcaagatcgccgcgacctgggaaggcgtcgaagccgcgcgcatcctgcaggccgagggtatcgactgcaacctgaccctgatcttcaacccgacccaggcgctggcctgcagcgaagccggggcgttcctgatctcgccgttcgtcggccgcatcctggactggtacgtggccaacggccaggccccggccaccatcgatgaagacccgggcgtgaagttcgtgcgcggcgtgtatgccgaattcaagcgtcgcggttcgccgacggtggtgatgggcgcctcgttccgttcgaccgcgcagatcgaagcactggccggctgcgaccgcctgacgatttcgccggacctgctggagaagctggacgccgaccacggcgagctgccgcgcaagctggtggccggcgccgccgatggcgcggcggtgacgccgatcgatgcggccaagttcgcggcggacctggcggccgatccgatggccaccgagaagctggcgaccggcatcgatgcgtttgccaaggatctggaagcgctgcgcgagcggatccgcgcggcactgtga

SEQ ID NO: 512491 - DNA, 351 bp, Stenotrophomonas maltophilia; identical to SEQ ID NO: 500971

SEQ ID NO: 512492 - DNA, 12396 bp, Stenotrophomonas maltophilia
atgtcgcacccgcattcgccccacgcccgccctcctgctgccctgtggcgcagccacccgatggcctgggccgttgccgtggccctgggcacggtggtggcaccggccagccaggcccagcaggcattcagtccgggctggttcgccgagcggggcgcggcgcagggcgcggcggcgcagagcgggcgcatgcccaacggcgttccggtccagttccagttgcccgcgcagcagcaggatgcggcgcggcagaagctgcagcagtcgatcgacaacctgggcacggccgcacaggcgatcgccctgcagcagcgcctgcaggaacaggcgcggcaggggcgacgtgacgcgggggtggtggtggccgacggcctcggcaaggacggcctgaaggttgacgagaatccgttgacccgcggctggatcaacgcccgcgaggccattcagtcgcaggctgccgacgggcggctgcaggtcagcatcgagcagactgcggaccaggcgatcctgaactgggagaccttcaacatcggtggcaacaccacgctgaacttcctgcagaaccccgactgggcggtactgaaccgcgtcaatgatccgcaggcgcggcccagccaaatcctgggccagctgaaggccactggcaccgtcttcgtggccaaccgcaacggcgtggtgttcggcaacaacagccaggtcaacgtccgcaaccttgttgcggcggcagcgcggatcagtgacgcgcagttccgtgagcacggcctgtacagtgccgacgcgaacacctcggcgctgaccgatgccgtgggcaaggtcatggtcgaacgtggtgcacgcatcgccacccatgaaccgaccacggccacccgtggcggtggctatgtgctgctggcgggccacagcgtggagaacgcaggccagatcgaaacccgcaagggacaggcgcagctggcggccggtgacagtttcgtgatccgtcgcggcgtgggcaccgcgcagaacaccgcgtccaccacccgcggcaatgagatcgccccacgcttcgccagcgacagcacggccggctacgtgcgcaacagcggcctgatccaggcgcgcgaaggcgacgtcacgctggccggtcgcaccgtcgaacaggccggcgtggcggtagccaccacgacgttgaaccagcgtggcaccgtgcatctgctgaactcggcatccgacagcaagggcagcgtgaccctgcaggccgggtctgccacggcggtgctgatcgaagacgatggcaaggccaccgcgctggatacccggcgcgatgcgctcgtcaaggaatccgccgagcaggacaggcttcgcgggtccagcaacagcggcaccttcgacaacctctcgcgcctgcaggaccgtcgcgatcagtcgcgcatcgagatcgtctccggcggcgacgtggatttccaggcgggctcgctggcggtggcgaccggtggccaggtcgtttccgatgcagctcggcgcagctacctggacgacggggcgcgggtggacgtctccggtgcggtaggcgtggaggtggcgatggaaagcaacaacgtcaaggtgaaggtgcagggcaatgaactgcgcgattcgccggacaaccgtgacagtggcacgctgatcagcagcgaagtgtggatcgaccgccgccagctgaccgaggtcgctgccggcaccggcggttatgaccgcacgcgctggtacgccggcggcggcctgcttgaggtgggcggttacctggacaaccaggggcattcaatcggtgagtgggcggcgctgggcggcaccgtacagctggccggccaggaagtggtcagccatgccgggtcccgcatcaatctggccggtggcagcctggacgtacagtcgggcgtggtacagcagagctggctgcgtgggcgcgacgggcagctgtaccggcttgatgatgcaccggccgaaatgctgtacgacggtctgtaccagggctacgaagtgaagcaggaacgatggggggtgaccgaatcgttccgcaatccgctggtggcacccggccagcgtttcgacaatggctataccgtcggtcgcgatgcgggccggctgcgggtctcttcacccaccgtggtcctgcaggggcaggtggagacaggcaccttccagggtcagttgcagacatcacggccggacccggggcaggaggggtactcgcagtcgcagacggcagtggcgcgcaacgcacaactctggctcggccgcttcgacagcacgggtcgcaacggggtattcgactcgcaggtgcgcatcggcgggatcccggccgatcccacgccatggtcgctgcaggcgccgatcggggcgacaaggcgcaacaccgtgtggctggacagcgacgtactgagcggacagcgctggggacgcctggatctggcctcggccgggcacattgcgctggacggagcgctcacgctgcaggagggcgggcagcttgcgctcaccggcagccaggtcagtttcggcggcaccgtgcagatcgccggtggccaggtggaggcgggcaacctgcttccggtactcggccggccgacggcgctgctctccggcggccgcgcgggcgtagaggttgctgccggtgcccgcatcgatctcgccggcggctggagcaacgcactgctcgccaccgatgcgctggcaacgaaggcgtggatcgatggcggacaggtacgcttcgttggcagccatgacatcaccctgggcgatggcgcccttctctcggtggatgccggtggtgcgattggtaccgatggcaagggacgcgtcggaaagggcggtagtgtcagcctgcaggcggccagtattgatgtcgccacggatggcagcggccggctgcgcatgggggatggcgtgaacatcactgcgctcggcaatggcagcggtgccttgaccctggcaacgggcggcaagctggctatcggcgattccggcgcggccgcagaggatctgctgaggttgcaggccccgctgttcacgagtgggtttgcccgctatgacattgccagccatgccgggctgacggttgaagagggcaccctgctgcacgtggaacggccgggcattcgcctggcagctggcgcacagaatgcgctggcgcgggagcaggcgctggaggcctggatgcagccgctgtacacggccgacccaggcaacgggcgcgtaacccaacgcggtggcgccagcctggtgctgcgcgcgggacatctgttgtctgtggccgatctgcgcgtcggcaccggggccggggtcagggttgatcccggccagacgatcgagctgttcggttcgggtgacgtgaccgtggccggtcacctgcaggcagcgggcgggcgcatccgcatcgatgaggcattcgacccgaccggtgtgcgcggcgatcaacgccgcgagcgccgctggacgatcgccgagggcgcgctgctggatgtcagtggcgatgcggtttccatgggcgatgcgcggcaggtgctgcgcggccaggtgcgcaagggcggaaccatcgagattggtggtgcactggactgggaagaccaggacaacgtccgccacctgccaccggatacctttgtggtcatcgagcgcggggcgcggctgcaggcctccggtgcctcggcgtggcttgatgtcgaaggcagcggtcgtacccgggtggacagcgatggcggcagcatcgtgctgcgtgcagccaatgcgctgtacctccaggggtcgctcgatgcagcggcgggcggtgatggcgcacggggtggcacgctgggggttgcgttcggcggcggcacctatggtgcgacggccaggaacaaggaggtgctggcaccgcgggcgatctcgctcacccaggacacaccggcgggcgaggctctgcccgagcgcctggcgtacggccatgccacgctctccgtcgagcagatcaaggccggtggcttcgatcatctttcgctgttcggcgatatccgggcacaaggcgatgtcactctgcgcatggaccagagcctgcgcatccatggcctgaatgaacgcgccctgggcgttgcggagggcaaccaggagagcagtcgcctgctgctgagcgcaccttacgtgcgtcttgcgcaggggcgctggtggcagcctgccggggaaggcacgctgcggccggtggaggcgtcgctggatgcaggcaagcagcatcggttcgatgtgaccgccgatctcatcgacctgcgcgatgtcacctggttggcgagcttcgaccatgtcaacctgcagagcagcggcgacatccgaatgctggctccgatggccagcagtctgcaggaatccaggttcgccgcaccgggatcgatcgatatcagcgccgctcgcctgtatcccgccgcgcgggcgcaggggcgcatcgtggccggcgtgcctgaggccggtccttcgggattgccgggctgggccaacccagaggcggtactgcgcatccacggtgtcggtggtggcgcgcaaccggcaccggactcggcgttcggcagcctggcgctgacggccgccacggtagtgcagggcggcaacgtgcaggcgccgtggggccgggtgcagctgggtggtactgagttcaactccagtcgcgctgcgcgcgtcgagctgcttgcgggcagcctgacctccgtcagtggcgccggcctgacgttgccgttcggtggcaccgtggatggtgtggcgtggcgccgcgacggtgccgatttcgatgttcagggccccggatcggtcaacattccgatgggcgtggacatcgtggccagtgcgttcaacggcgccgccggcagcgtcgtggatgtgtccggaggcggcgaactgtccggcgccgcgttcgtagccggacggggtggctcggtcgacatcctgcggcatgcgctggcggatgcgaacccgcgctacggcttcagccgtgccggcaatgcggtctatgcgatcgtgccgggtcggacggacatgcaggcgccgctggcgaccgctgacggcagtgccgacccccggatcggccagcagatcgtcatccccggcggagtgccgggtctgcccgccggaacctacacgctgctgcccgccaactacgccctgcagaagggggcattccgcgttgagatcggtgccgagaacgcgcgtggcaacacgcagccggtggcgacaagcacgggttcctggcgtgtcagcgggcaccaggcgcaaggcctgggcggggcagtgtcgccactgctcaccgatctggtgctgaccccggccgaagcggtgcgccgccatgccagctacaacgaaacgtcctacagcacgttcgtggagggcgtggccgaacgacgaggcgaagcgttgcgctggcgaccgaccgatgccgcggctctcaacctgacgttcggcgaaggcgcgggccgcaccggcgcgccggcagtgacgttccacggtctgtcccgcttcaatgcgggcagcaatgacggacgcggcggcacgctttcggtcaacctgcatgcgtcgaacgacgcgatgctggaaatcgtcacggagggcagcgctgcggcgagcgggcgcggggcgaccgttttcgacagtgcgctcaacgcattccgcccgtcgacgttgctgatcggcggcgcgctgcggcgtgatgcgaccacctactcggtggaaggcacggcacagcatgttgtgttgcgcaacggtgtcagcctttcggcgcaggaagtcctgttgtcggctgcattcgggggcaacggcattctggtggagcagggcgcttcgatcaacaccctgtcccaggccgatccttcgcgcgtggcgcaacccactgcaccctacctggtttcaggcggtctgctggccgtgtccaatcagcgcctcacggcgctcagtacccaggggggaagcgcggccggtccggtggcgatcgacatcgggggttgcggatcgaactgcagcgggcagacccggctgctgtcggcgggcagcatcaatgtggtcaccgacggcgctctgagcattggcgacgcggtgagctacggcacgcgccagctcgggttgggcatgtcggcgctcaatcttggcagtgccgaagcgatcgcggcggcagcggcggccggcggcctgccggcgggcatgacgatgaatcaggaggtcctgcagcgattgctgcgcggaaacaccgccaccggcgcgccggcgctcgagtccctcagcctgactgcgcgcgatgccatcaatgtgttcggcagcgtggacctggatacgcgtgacggtgcgaccggccgcagcagtctgcgcagcctggtgctgggcgcgccagccattcacggttacggcaccgcgaccgatcgtgcgcgcattttcgccgacacgctggtgtgggacggtacgctggccggcaccccattgcccggcggtgaacagactcagccggccggcgaggcgatggtgggtcggcttggccaagggcagctggaaatcactacgcgggtgttggagctggggcgagcgcccttcacccggcccagttcgtcggtggccgctgaccgccaggtgcttggcttcgccggcgttacgctggcagcgtcggatcgcatgttgttctccggcaagggcagcctggatgtcttccagcggcagggcgactacgtggcaggcagcggctggcagttcagcgggggtgcgctggatatcgtcaccccgcttctgaccggcagcgcgggtgcgcagctggccatccgcaatggcggaacggtgcagttgcgtggcgccgcggcgaccgcgggcagcgatgcattgggtgcggagctgtccatcacggccgaacgcgtggtgatcgacagccgggtggcgctggcgtccggtcggttcgaggccaatgcccgccagggcatggcgcttggcagccatgcggtgctggacatggcggggcgcaagatcaacctgttcgacgtggacaagtacagctggggcggtgacgtcgcgttgtcgagccatgaaggtgacattgttgccgacgcggcgtcgcggattgatctttccgcccgcaacaaccgcggtggccgcttgacggtgtctgcgctggggccgcagggcggccgtgtagatctggcaggtacgttgcttggcggagccagcggccgctacgacgccggtggcaccgaagtgccctacgacggcggcgagctggtagtgcgtgcacgccagttgcaggacttctccggcctgaacacccggcttaccgccggtggcattaccggtggccggacgttccagttgagcgaaggcgacctggtgatcggcgatgaagtgaaggcccgccacgtggacatcagcgtcgatggcggcagcctgcaggtgaacggacgcatcgatgccagtggtgagcaggtcggcagcatccgtctttccgcccgcgatctgctgcgcgtggacggggcgctggatgcgcacggaagcgggctgcgcgtggacaactacggcaagatcatcgacagcccgaaccgtgcgatgatcgaactgacttcggccaacggcaccctgcagctgggcgccacctcatcgatggacctgcgcgccggcacctcggtggctgcgggtagcggcccgggccagaacgatggccgcgcacgcggcagcgtcaagctcaacgtgccacgtgtgggcagtaacgacgccgcgatcgacgtggccagcggactccgcatcgccggtgccggcgacctccaggtcaacgctttccgcagctatgattcggcgccgctggccagtgctgcggacgtgcatggccatcgtccgcaggtgatcaaccagcagtggctggatgcggtggtggacccggacaaccgccaatggatgaacgctgcgctggccaatacaggattgcagcagcgcactgccgccctgggcagccaccgccttcgccccggcgtgcagatcgtggcgcgcagcagcagcgacaacccgcgtggcgatctggtcgtggccggcgatatcgatctgtccgggtaccgctacggaccgcagtcgaaccggaccgatccagcgcggcgcgggttcggtgagtcggccgcgctggtgttgcgtgccgagggtgacatcaacgtctacggcagcatcaacgacggcttcgcgccgccgcccgccaatcccgatgaggacggctgggtgctgctggaagggcgcagtagcggtacgcccaacaccgcgttcggtggcgacctgatcgtgccgggcgagggtgtgcagttgcagcgcggcaccgagttccgcgccggtgccacgctgaactatgcactgcccttcgacgccgtgaccctgccggccggaaccgtgctgccggcagaaatgcggctgtcgggaccgctgctgctgccggccggcaccgtgctgggcgcagcagtgacgacggcgggtggcgaggtggtcgcggctggaaccgtgctggcccaggcattgtcgttgcaggcgggtgcgcgcctgggcgccggcttccggctgcgcacgccggcgccggtcgctgcacaggtgtggccggccggcgtcgcgctgccgatggcgatgaagctgtcgggcgcgctggacctgcatgccggtgcgatcatcccgtcgatgaccaaggtggagctggccggcgatgcgccggtgaagctgcgaacggccgacgccagcgggcgtcagggacgcaactgggcgctggcggcgatgctgcccgaaggcaccacctcctgggacctgaccgcggtggccggtgcggatacggcggccgccgatccgcggacccgccgttggggtagcgacggcagcatcgtgctggccgacagccactacagcaccatcgggacagtgaccacgaccacggaatggaagggcgatcggatcgtcaatctggaaggttcactgtactggtggggcgacgagagcctggcgggcaagtcacctgcagaggtcgccgagatcttcggggttaccgaggcagagatctgcgatgcaggtccgttctgcggcgccgcgccgcgcctggtggacaaggaaggctcgctggcatggtggggcgatgaatcctgggtcggccgcccggctacggaactgggcgccgagatgggcatgtcggaggaagagatctgcgtggcaatgggctactgctacggcggcggcacgctgactgaagtcacgacctatggcaagcggctgggcgctcccgcctggagcgtgctgcgcaccggcaagggagacctgacgctgctggccgcgcaggacgtgcgcatgaagtccggattcggtgtgtacaccgcaggtgcgccgacggcgctgggtgatggccgcgatgcgcagttcaacacggcgcgttcggctgcaccctggcagaccgcgctgttgggcaagaaccaggtgtcgggcaactatgatgcggcgctcgccggttaccgtgcgtggtatcccgaccatggcggcgatgtcagggttgaagccgggcgcgacatcatcggcgacgcctggaccgcccggtccgaatcgggtacggcgcagcgtgaccaggccgggcattcaagcgcggcggtgggcggttggttgtggcggcagggttcgggcaccgccgaaggcgtgcaggcgacaccgacgagctggtggatcaacttcggcacgtacagcaccgtgggcgccgaagcggacgcagcgccgcgcatggtcggcttcaccggcttcggcacgctgggaggcggcaacctgtcactggaagcgggccggcacgcgggcgtgctcgacccgatgggcaatgccctgggtctgttgaccgcgcctcactccagcgcgattgttgctgcggtcgggtcgaccgggcgcgtcagcaacggtgagctgcatctgaccggtggcggcgacctgacgctgcgcagtggcggtgcgttgaacccgggcctgcgcgccagcgcgcagcagcccgaagggttcctgcaggatctggatctcaatggcgcggtgaccaacctgcgcggcagcaccctgctgcaggcggcacgcatcggtggcctcagcgcgatacagagcagctacggaacgctgggcctgaaggatccgttcgtggccgacgcgccggtggcgatggccgggcccctgctcatcctgggggattccactgcccggctgcaggcccgtggtgacattgttctcggtggcgccgcagatgctgggcgtgtaccgacggccaactacaacgacgtggttctgggcgatggccagcatgcagctggcacgacctggttctcgctctggacccgaggcacggcactggacctgttctcggcaggcggaaatctcgcacccagcctggccggcagcctgcatgcaaccggtagcaacatgttcgctgagggcatcgcgctgcgcgagcaatccgttcccgccagcatcaattactggctgtatccgtccaggttcagcgcggtggctgcgagtggtgacatcatcagcgcctcgcttcgaggcctcggaccgggtgcgaccacgggcgatgtgatcctgctcgcgccttcggccagcggccggctcgatgttctggccgggggttcgatccatgccgcgaccaatgccaccggcattgcacgttccggtagcgacgctcgcctgcctggcccgcttgatcctgcattcatggcccagcagggcgtcagccggacccgggtcagccacaatctatcgaacgatggagtgcagggtccagacccgtcggcgatgctgccattgttcgcgttcggtcccagtaccccgaccaccggtgcgctgacgtcccggcccacatcaccgagccgcttctatgccgtggccggtgacatcatcgggttgggcagtggtgatcgccggcagttggagaagaacaccggtaccgcgaaccggacattgtttgactggtatgaagcgggatcggcagtgcaactgcgcgccgggcgtgacgtgatcaatgcgaacgtcaccgcgctcaacaccagcggtaccgacatcagcgggatcgaagcgggacgggacatcatccgcagcaacctgacggtggccggccccggcgacgtcgaggtgagtgcaggccggcagctgcgccaggaagaggcgggcaacctcatcagccttggcggtatcgtgcagggcgatacgcggccaggcgcaagcattgcggtgaccgcaggcaaccagcacattgatttcgacgcactgcgcgcacgctatctggatccggccaggctcgccgacccggcgcagtcgctggcctcgcagcccggcaaggcggtgaagatctacgacagggaactgaagcagtggctccaacaacgcttcggtgtggctgccgacggcgccgaggcactggcggcgttcgaccggttgccgaaggagcagcagcggatcttcctgcgccaggtctactacgccgagctgcgcgaaggcggccgcgagtacaccgatcggaatgggccacgcgttggttcttacctgcgcggccgcgaggccatcgccacgctgatgccggacaaggatgcagcaggtgcgacgatccaacgcaccggcgacatcctgatgtatggcggctccggcgtgcgtaccgaagccggcggcaacatcgagctgatggcaccgggtggacagatcgtggtgggggtacagggcgtggtgccaccggccagtgccgggctggtgacgcaggggcagggggacatccggctgttcagccaggacagcgtgctgctgggcctgtcgcgggtcatgaccacgttcggcggtgacatcctggcctggtcggagcagggtgacatcaatgccggtcgcggttcgcagaccaccttgttgtacacgccaccgcgccgcgtctatgacggctggggcaatgtgatcctgtcgccgcaggccccggccagtggtgcaggcatcgccacgctgaaccccattgccgaagtgcggccgggcgacgtcgacctgatcgcgccgctgggcaccatcgacgcgggcgaggccggcatccgcgtctcgggcaatatcaacctggccgcgttgcaggtgctgaacgcggccaacatccaggtacagggcgagagcaagggcctgccggtgctggcatcggtcaacgtcaatgcgctggcctcggccagtgcggcggccaacagcgccagccaggccgcgcaggatgtgatgcgcaagagccaggacgatgcacggcgcaaccagccgtcggtgatcagcgtgcagattctcggcttcggcagcggcaccagcagcatcaacccgccggcgcgtggcgccaccgccaacgacggctacgacgccgacagcgcgttccagttcccgcaggcaagtcgcgacgagggcacgcagcgccgctag

SEQ ID NO: 512493 - DNA, 1164 bp, Stenotrophomonas maltophilia
atgaccgcgcggcttcgggtgcgcctgccggcgctggcggggctgcgcgccgacagcacggtggactgggtgcagctgcacaagggcacggtgctggcccacggcaacgacacgctggcggcgctgggcatgcggcatccgcaggccacggtgcatgcctgccttgatccgaacgacctgatcctgctggaactgcagctgccgccgctgtccggacgccgcctgcagtcggcgctgcagggtgaggtggaggcgatgctgctggatgacctgcaggaggtcacgctggcccacggtgcgcaggcagcggatggcacggttgcggtggcctggctcggccagcaggcgatcgtgcaacttcaacagctgctggcttcgtgcgcacttcaactgcaggcactgtatccaacgcccctgctgctgccctggcagcccggccaggccacgctgcaggtcagcggcgcgcacctgctggtgcgcaacgggcgcgatcggggtttcgtccaatggcatggcgggcgtgacgcatgtgcagtgatgcaggcgctggccgggcgcctgcaacaggcgggggtgcaggccgtgcaatggatcggcagcgtgccgccggcgtggccggacaacctgccggccagcgcggtcgcgcctgcgcagcaggcctgcgggcccttgccggggtggtcattgccgctgcccggcgcgagccgccagtcgccgcgactggccatcgggctggcattggcagccgtactgctggccgcgctggggttgcagttgcaggtcgcgcgttggcgaagcgagggtgaagcactgcagcaggacatggcacggcagttcagcgcacgctttccggagatcaccacggtggtggacccggtggtgcaggcaaggcgcgtacttgcgctgccaccgccggcgccgccattgccaccgctgcagcgccaggtggctggcacgctgcaggccgttccggagctggccgggcaggtgcgcagcctgcactaccagccggggcagctgaagatggagctggataccgacgcccgggccttggccgacgatccacagcggcttgagcactggcagcacgcggtgcaggcgcagggcctgcagctggcgcgcgaagccgatggacgcctgcgggtgagcggagcggggcagtga

SEQ ID NO: 512494 - DNA, 561 bp, Stenotrophomonas maltophilia
atgctggagctggatcgccacctgagccagtcactggagcaggcgcggcatgcaccggtgaacgtgcaacgttacggccactcctgggtctggctgctctccagtgatgcctgggcggacgcagcgcgctgggcggcattggacagcagtgcacatccgctggtggcactgcgaagcgcgctcgatccaatgctacggccgtggcccgaagcggccatgcatgtattgccgctcgacgagggggatgcgcggctgctgcaacgtgcggccctgctggtggtcgtgcgcgatctgaacagtacccagcgcgtctacgacgatctgcgctatcaccaggcctaccgggccttcatcggcctcgaccacggaacggcgtggtcacccatgcagtgcacgcgcctgctgcaggcgtgcgcacatccagtgctgcgcgattgcctggatgacctgctggccaggatgccgccgcagctgctcgagacggcctgtgtaccgtctgcacgcattctgcccgcgcaggtgcacgcgcagcgaatcggcggtggatgtttatcgtactga

SEQ ID NO: 512495 - DNA, 309 bp, Stenotrophomonas maltophilia
atggaactacccccagacttcacatggcgtgaaacgtccaagtacgccccagccccggacacgatctgtctggggctggtgtgcgttgcccggatccagcagagggtggacaacctgcagtggcaggcatggctggactaccacaaggactaccggcagtacatcatccggccctgccagaaccagtggacgggcagggatgggatggtgttgtgggtgacccggcatcaggacaggctgcggcgcgaggctgctgagattgaggcagcccgagaggcggggaagatcaaggggatagccgaaaaatga

SEQ ID NO: 512496 - DNA, 816 bp, Stenotrophomonas maltophilia
atgctgaccatgttcaagcggctggcgtcgctgatccccactcccgccaccaacaaggtgacgctgttcgttagcgacacaggcatcccgtcgtacaaggatgacgccggcctggtcacgccgatgagcggccagccgatcccggccggctacatcgatggcctgaagatggagtgggtatcgggcacgcagatgcgtttcaccagtggctccgcatatgtcccgtcgctggggcgagcgctggcactggctgcggctgtcacgaagtcgccgtcgttggcggccagcacctggtatcacgcctatctctacagcaacgccggaacgcctgatgtggaggtgacaaccacggcgccggataccccatacagcggaaccgcgcgcgccaagaccggcgacacctcgcgtcggtatatcgggagcttcaagaccgacgcatcgggcgcgatcattcagttcatcatcgacactaccggagcctttcgatacctgatcggtaacaacttggctccgttgcggtgtcttgcgaatgggaaggcaactacccgcaccacggtaagtgtggccggcgcagtcccggctactgcagtgggggcaatcttcattatgaccaacaccgacacctccttctttgccaacctatcgattccgacgtcagtgtcatcgtctgtagttggcatcgctccaggcggcgcgcttgcaggccaggttctcacattccccaccgattcctcgcagaatgtagattattactacgggtcgctgcctgcgaatgggctttacattgatgttgtaggcttcacggcggggcgctga

SEQ ID NO: 512497 - DNA, 792 bp, Stenotrophomonas maltophilia
atgaccagtcccttctacaacccggccccagtgttcattgacaaccaggggcgtccggtcgctggaggctttctctacttttatgagaaggacagcaccacgccgaaactgacgtggtcggatgaggcgatgaccatccccaacccgaatcccgtaccactcgatagctcagggcgagctaacaacaacatctggatcaagggcagctataccgtctggctgcgggacaacctaggggcagcgctgtggaaccgcgatatcaatgacggatcggtgggcaacaacgtcttcccgaccctggaagcaggcaagttcctgaccaatgacggctcggtggtgctgtgggcggacctgatccagcttcctgaccccaccggctccgacgggaagatggtcgttgcaagtggcggtggctatgtcctccaggcccagccgacggcgccggtttcgccaatcgtggtcacggacacctcggtcaagtacgtcggcaccagctcggtcatccttgagcagtggggcactgcctcgatccctgccagcggcgcccagatcgccaccggcacgatcacgttccctacggcttacaccacggtgccaaaccttcaggtcacgatcaacaaggggtcgggcgtggttgcagcaggtttcatcggcgacatcggcgtcccgtcggtcagcaccacgggcgccactgtagcttgggaccttggcgtcgatgacgtgaagtcgatgtacaacctgaccagccccctgccgatcatgtggcgcgccatcggcaaggttgctagctga

SEQ ID NO: 512498 - DNA, 243 bp, Stenotrophomonas maltophilia
atggcgaatgttactcctgctgcatctggcgtcaaggcaatcccatctgtgtggatctcggaggaggggcatcacagtgcatatcgcaacctactagcgattcgcgcgctgggtgaggtcttcgaatcgggggccagtgagaacatggacattggagcaattattgagattgggtccttgatcgtccgcatggcgaatgaggccagcagttcaatcgttgggccggttggtggaatggcctaa

SEQ ID NO: 512499 - DNA, 708 bp, Stenotrophomonas maltophilia
atgaacggcatctctctgatctcggaagcgtccatcacaagccgcgagattgctgatctcgtcggctcccggcatgacaacgttcgggttgcgattgaacggcttgtcggacgtggtctgatcgctttacctgcggtgcaggaaatctctactggtggccgcccggggcttgaattcatcttttcgggtgagcggggcaagcgggactcgatcatcgtggttgcccagctgtcgccggagttcaccgcacggctcgtggaccgctggcaacagttggagaagatggcccagggcggaggattcgccatcccgcagacactgccggatgcgctccgattggccgctgacttggctgatgcaaaccgggccctggaagggaaggtggccgaacaggccccgaaagtggaattccatgaccgagtcgtcgttgcgccagatgcgatttctatcgctgaagcggcaaagacgctggggactgggcgaaatcgattgatggcgatccttcgccagatgcagtggctgaaccgtcgcaatgagccatatcaggaaaagatcaacaacggctggttggacgtgaagatcagcaagctttgggatcaccctgatcagggcctcaaaaggtccttgactccgctgatcactggtaaggggttggcgaagttgcaggcgcttggagtgggacagccccccaaggctattgcggcttag

SEQ ID NO: 512500 - DNA, 189 bp, Stenotrophomonas maltophilia
atggaggcaatccaacactatggagactccgagatggcagaagaccagatccgcagccagttccgaatcccagccaaggtctacgactggctcaaggaacaggcaaagcgggagcaccgttccatcaacggccagctgaatgcggagctggcaaagcggatgacttctgaaagtagggaggccgcatga

SEQ ID NO: 512501 - DNA, 543 bp, Stenotrophomonas maltophilia
atgaaccgtaagactcaggttgatttcatcaagacagcccttcggctccctccggagcttcatggtcgtgtccacgaatcggctgctgagcatggacgcacctacaacgctgagctgatctctaggctcgaagcctcgtttgagccacccaaggtccatttgaccgatgaccaagccaagaacctcgccgacgagatcatggcgcagatctacgtcaaggcatccgagcctgaaatcctccaggcggatgacatcgtttccctactccgccacatggagaatcgcagggctgaggaaggcaatgtcctcagcaatctagccgtgaaggcggagcagctggttcactcgatatacgccgaagaaggtgagacagagcgataccgctatgcgaaagagaagctgatccagctgcgggaactgcaaagccaccacatgtactggacaaggcttctgtttgacgagagcaccaaggttgacccgatgcacacggacttccttgttgagccagagatcaagcctgccccaaggaagaaggtgaagtga

SEQ ID NO: 512502 - DNA, 1698 bp, Stenotrophomonas maltophilia
atggccggaccttgggagaagtaccaaggtgtccccgcagaggctcccgctgccgatggcccgtgggcgaagtactcatcgggtgggcagcaggataaggttacagaccttcctccagtccaggcagaacgccctgatccaacagagggaatgagcggggtccagaagtactttgctggagttggtaagtccatcatggactcagccactggtgtcgggcagctactgtcgtctgatgctgctccttacctgttcggggtgacagggctggcgacgaatgctcttgatcggcgcttcggcataggcgaacgtgcggatcgggaagctgctgaggctcgcgtgagagaccagccattgctggattcaggggctggcactgctggtcacattagtgggcaagtgctgcagacgatcattcccgctggccgagttggaagtggcgcaggcatcgccgcccgtgcggctcccttcgttgaagcggcggttcgtagcggggcagtatccgggctacagccaaccgtcggagatgaaagccgggcgaagcgggcagctgtcggcgcagcaggtggagcagccgggcaggctgtttcaggcatagcaagtgccgcagctagtagggctgggcaagcagttcagcccgccatcgcaagctccattgctaccgcgaaacaggctgggattccccttcatgtagcccaggtcagtgactccaggttcctaaagggcttgtcgtcggtcctgaacacgctcccatttagtggcgcgtccactgctggtcgtaaccagcaacaagcattcaatcgtgctgtttccaacacgttcggggcagacgcgccagttctaaccgacgatgtaatgcgcgcatctcgtgacggcattagcaacgtctacaacaacatcttcagtcgtaacaccgtatcgctcaaccaatccgatcttgctcgtctgtcggcaattgagcagacggccatcaggaacatgactggagatagggcgcaggtagtcaggaaccagctcgatagcatcatcgataatttcgcgaatggatcagtcagcggcgcgaagtaccaatcgcttcgcaacgagctggcaaaggtgaagggcgaccctgccatcgaaggaatggtcaaggcacttcggagagtcgtggatgaggctgccttccgaagtgtcggaagcggcgatgcagcgctcttgaagcaggccaactctcaatgggcgaacctgcgcacagcggaggacgcgctaaagcaggttgctggcgcctctggggatatccgcccatccgccctatggccgatggtcaggaacggatcaaccagggaaatgcgcgagctggcgcgtgttgggcagaatgtccttaaggatccgatccccaactccggaactgctgagcgcgttgtcatcaacaatctgctcggccttggcggtggcgcctacttggcgagcaacgatgagctcccgacatgggcacggcttgctggcgccggactgctcgctgggcgcgttgcaaacagcccagcagcggccaacatgctcatgctttcgcgtccagctaccaatggagcaatcaatggactggcgcgcatcgctcagtctgcgccagctggcgtccctgcagcccttaacgctttggcttttccagcgactgcgtcggacgacgtgccttctggtagccgcgagaagaagggtcggtag

SEQ ID NO: 512503 - DNA, 1446 bp, Stenotrophomonas maltophilia
atggactttcagaagaactttttgtcctctctcggcgccggttacgaaattggcagcaagatcaaggaaaggcaggacagcaaccgcctcaaccagctagcccaggtcgcttattctgcccctgccgagcagcagcaggccgctatcggccaggctatgggcatcaatcgtactgccgggtccgagcttgaaaagcaggtcgcgacctcggaggagcgtcgaaattcgaccatggtaaacatggcgaagttgctaacgtcagcgccagaacaggcgcgccccgcactgtggcagaggtttgtcccaactttgagccagttcgggctttctgagcttcccacggaatacaacgcacaaaccgcaccggttattgaccaagcggctaagtcccttgtgcaggcatacgccgggaatgggactgtccagtcgcagaagattggcgaagacggttacatctacaacacgttccgagatggccgaatcgtcaatacgggcgtgaaggcagatcgccaggcatggttccgcgatcagccggggtttgagccgaccatcgtcaacaaggatggaacaatgcagacggttggtggtgccgcgccgtctcagtcagaagcaggcggtgtaagggtcagcactgtcgatgggcccgtccagatgaacattgaaggcatggcaactgaccagcagcaacggctggcccagacagtttcaatgatgcgtcagtcaggctatccggaagaagatattgacgcgttcgtttcggctcaggtcacttctgcgcgcaacaatgtgccccctcgtcagagcctcgctcggccaaccgctgggcaggaagcggccgacgctgagcgcgcgaagaccgctgttcgcaacgaaaacttcgccaccgaccttgagcaggatcgactgcgcaaagaacaggaagcgcggatcgaggcagacaaagccaaggcggtccaggaggcgaaatctcaagaggagcgcgcagcgactgctcgcgccaagagcgcagcgctcaacaacgtgaagcgcggaattactcgaattgacaaggctctcaccgcaattgaaggccttcgcggcgttgatagcgggccgctcgatcagtatctcgtcgcacgcaccaaggagggccaagagcttgcagcagctgttggggcaattcaggacagcatgctggcgcttactcgtgtcccgggcgtcggatcgcaatcagatcttgaggcacgcttggcaaatttgaagtatcccgatctgggcaactaccccagcgtgaatcgcaacaactacagccagctgaaggacttcgcaagcgatctagagcgccagttcggcggctccgacacggaagcggcgcccgcagctggcccgcagccaggaactgtcgaggacgggtatcgcttccgaggcgggaacccttcagacccgaacaactgggagcgcatctaa

SEQ ID NO: 512504 - DNA, 759 bp, Stenotrophomonas maltophilia
atggccgcagtaaccgcagcagtggtggttggcgctggcatggcctattcggccaatcgccagggcgccgctgcaaagaaggcaggtcgggcgcaggccaatgcggctcagcagacccttgaccagcagcaggcgatctacaacaactccgtagatcaggcgatgccgttctacgatgcaggcgtaaatgccctgagccagatcaacgccgtcaaccgtggcgactactctggcttcgagaacagcccggattatctgtacgcccgagggcaggcgcagcagggcatcgagcgtggggccgctgcccgtgggtcgctctacagcggcggaaccaacgttgacctggcaaacgcactcaacggcatcgcatcgcagaatctagggaactaccgcaactcgctgatgggcttggctcagatgggccagaaccagtcgcagtacttgggccagctcggcaaccagtacgggaaccagttcgccaacgcgatgggcatcaaaggccaggccaatgcgcagatcgcggccgcaggcccggcgacgcaggcgggctatggcaacgcactagcctcggcagccagcacctacctcggcgcgggtggcggaggcggcggaggtggtgggttcgggagttggtcccccaactccctgtggggtcagtcctcgaccgcttcacccggcagttcgatggggttcgggaacaatctcagctcactcttcgacatggccggtagcggccgcaaatccagctacgggagctga

SEQ ID NO: 512505 - DNA, 228 bp, Stenotrophomonas maltophilia
atgaccgacaccgaccactttgtagagatgtgctacagcgtcgacggaggcgcgaactggtccaactggaagcgccgcagcatcggcgaggttgggcagtacgccaagcgcgtgcgtttcatgcgccttggcaagtcccgccagcgcgtgttccgcatccgtgtttcctcgccccgcaagcatgacctgctcggcgccgtgctgactccggaactgacggacgactga

SEQ ID NO: 512506 - DNA, 2406 bp, Stenotrophomonas maltophilia
atgcgcgccaatcccgttgacctgatcggcggcttctacaccagcgacagcctgccgtggtcgtgccaagacacggtgaactggctgccggtgatggccgaggtagcaggtacgcgcacggtctcgatgtttgggaccccgcctgggctgaagccctatcagcaaatcggcaccggcccgattcgcggcatgcacgactgcgaaggtctgcgactggtcgtttctggccgttaccttttccgcatcagcaacacgggggtaggcatcccgattggcctgattcctggcgttggccgggtgcagatgacgcacaaccagttcaagaccggctatcaggtgctgatcgagaacgggcagggtggtggcgggtatgtctacacgacatccactgacactttcgcgaagatcactgacgaaggctatccggggtcgatctcgtcggactacctcgattcctacattcttggtgtcgagccgcaggggcggttctggttccattcaaacctggcggatgccacggactacagcacgcttgaccggtatgaggctgagtcggctcctgacagaatcgtgggactcgctgcaaatgcctccgaggtcgtcgtctttggtcagcggacgactgagtttttcttcaatacggggcaggccactggaaccttccagaatcggcggagctccatcgcccgtgggtgttcttcacgtcattccatccagaagctagacaacagcgtgttctggcttggcgacgatggtgtcgtatatcggctagatggatatgcggcgcgccctgtgtccacgcgtgctcttgaaaaggccatcactggcttcaactggtcagaggccatcgcgttcacctgggaggatcgcgggcataaggtttactacctgaccctgcctgacggccagacgttcggctacgacgtgatcaccggcctttggcatcgccgggagtcatacggcctgagccgctggcgccttagccacacccagaaatggggcagggagtggttcggcggggacttccaggacggacggctttgggagctggattgggactacttcctggaaggtgatcagccaatcatcagcgagcgcacgtcgggcgtggttgccgacaatcagagcgcattgctgctgcccaacgcggaactggttcttgataccgggcatggtcctgcaaccataccgactccatttccgaatcagccgccgtctccagttatttctgggtctgcgccagacgccgcagttggagcgccctatacatacacgttcacagcttccagcggtacgcctgcctacgcatataaagtcactgctggagatatgcccccggggctatccctaaccgatggaggcgttctcagtgggacaccaacgcagctgggcacgtttagctttacggtccgcgtaacggatagcaatggcctatgggatgaggtagctaacatcatgaccgtcagtgtcgagtggtggatgatcactgattccaatggattgactgatcgagtgtggacctcggttggactctccagttggtccggtccatttgatcgttccccttcggcaattgtccccggtagcgctgtgattggcgccaggaagggattcgcggtgatcgcatcgacaaccaatgccgcagagagcgatagcacatctccagttggttccgttataaacaacacgccactgacattgcccatcgcaggaccggtcaggttccgcagatttggcacgctcatttttgcgatcccagcaggaagcctcacatacgctctgagtcaggacggtggcgctacctgggcggcagtcaccactgaccatcagattagggacatcggcaggctttctagcggtcgctgggttacctatgcaagcactccagtaccagcggcaatgcggtattcggaccaagccataccgacgacttggacggttgccgccacgggtgaagtagcgtccggcgatcagatcattgggacttccggtgatcgggttgttgtccctctgacgcttgacaagttctgggttagcagtggaggcggagtctatacggtcatcacgccagtgacggcggccaatagccctagcccgcgatcttccgtgagcgtgggaagtaccatctattttgttggtcagcaagccggtggggcttcgtcaaacatcatttggacatctgatggtggtctttcgtggcaggggcatcgcaacgggcaagctggctcgttgcagagcatctttgcattcggcgaaaccatagttgcttctggaaacggcctgtcatctgcgggatcgtctccattctcatataagaaagccgactcgccgtgggtcgatgggatttgtccgttctctctcaaatcctcgaagaacatcaacatcttcccggttgaacgcccatga

SEQ ID NO: 512507 - DNA, 417 bp, Stenotrophomonas maltophilia
atgaccacagcagcaaccatcgtgaagcgggcgctgcggctgctgcgcgtcgttgacgcgacggaagcccccgaggctgaggatttcgagactggccgcgatgcgctgaacggaatgctcacccggtgggaggccaatggcctggcgctgggctggcagaacgtgagcaatccgaccgacgagcttcccatcccggccgaggcggaacaggcggttgccttcaaccttgccctcgttctgcgtgccgagtatggcgtttcgctggatgccgacgtggtccagttcgccaccgaggggctggccgagctgcagcgcgacatgctggttgccaatcctctcgtactgcgcccccgcctgccgcgctgtggccgctacaacatctacaccgatagctacaacgacggggccgactgttaa

SEQ ID NO: 512508 - DNA, 288 bp, Stenotrophomonas maltophilia
atggctaccgaaaagaagcacgcgctgtatctggtcaactcggacgaggatcgcatcgagctggtgcatgccgacgatgtggaagaccgcaaggccaatggctggaaggagccggaaggcatgaaggccaacggccggccgtggaacgctgagcgcgacctcccggggcaggatatcgccgcagaaatcgccaagcagacggcagccgcggacgccaaggagcagaagtcggccaaggccgacgatgcgccgaaggctgagaccagcaagcccgcgtcgaagaagtaa

SEQ ID NO: 512509 - DNA, 213 bp, Stenotrophomonas maltophilia
atggcacaactcgcaatcgaaacccagaacagcctgtacgctgcggcgccgggcacttccgacggtgcagtcctgggcaaggacagcaccgagaaggtcggcttctacggcactacgccgattgcccagccgaccatcaccgttgccaactcgggcgctggcactgctggcgccatcctggtggcgctgggcctggcccgtcagatcccgtaa

SEQ ID NO: 512510 - DNA, 1209 bp, Stenotrophomonas maltophilia
atggctggcaatcagcttctcaccagttccatcatcgtcaagcgcggcctggcagttctgaccgaaaagcttcaggtactgaagatggtcaatcgccagtacgacaccccgttcggctacaagggcggcgccaaggttggcgaccaggtgtctgtgcgcgttccgcagcgtggcgtggtccgaaagggccgcatcatggatctgcagccgcagatcgataagaccatccccgtgaaggtcgatcagtactacggcatggacaccggtgcgacctcggccgaaatggcgctgcagatcgatgacttccaggagcagttcatcgacccgaagatcggcgacctgctggccaacgtcgaagccgacttcatcaacaaggtaaccccgctggtcccgggtgctgtgggcgactacggcgcgttcgatgacgcccgcaccgcccttgccgccaaggcgtacctggacagccagctggctccgtcgggcgaccgcaacctgctcatcaacacctactcccagatcgatatcgtggacagcctgaagggcctctacaacgctcaggagaaggtgggccgccagtaccgcgagggcgagatggccagcaacacgctgggcttcgactggtactcgtccaacctgactgccaccaccactcgcggcagcggcgctggctacctggtcaatggcgcaggccagtccggcagcacgctggttgtggacaccggcaccggcaccatcaaccctggcgacaccttcacgatcgcgggcgtgttcgatgtgcacccgcagaccaagaaggttctggccggccagctgaagaagttcaccgtcaccctggccgcagcttcgggcgccaccgctctgcagatcaccccggaaatcgtggtgaccggctcggagcagaacgtgtccaatgctccggccgacaacgcggcaatcaccatcggcggcgtcgccggcaccaactacgtgcagaacctggccttctcgaaggatgcgttctacttcgtgactgccgatctgccgactccgccggccagccatggtgtcgattcggcccaggccacccaccagggcatcaccctgcgtttcacccagggcttcgacatcgtgaacgacatgttcctgtcgcgcttcgatctggtgtggggtggcggcattttgcgccccgagctggccgttcgcattcccgccaccgtcaccggcatctaa

SEQ ID NO: 512511 - DNA, 900 bp, Stenotrophomonas maltophilia
atgaacgagagcctgaaagccgccatcgacgctgtcgaggcatccaacccgaccccggcagcagaagcgccgcagaaggctgaagaagtagcaacaggaacacctgcagatgagcagggcaacgatgccgctaacgacctggaaggccaagaggccggccagtcggaagaatccggagattcggcagcttcggacggggaaggtgcacccgcgcaacgccagaacaaaggcgttgggaagcgcatcaatgagctgacgagggagaagtacgaggcaatccgtcgagcggaggccgcagagcagcgcgccaaggagctggagcagaagagccagcagggcgctgcaaaaggagccgccgaaggaaagccgaagctggaggacttcgatttcgaccacgatgcatacgtcgatgcactcaccgattggcgtctgaatcagaagctggccgaacgcgaaacgaccgaacagcagcggcagcagcagagtcaggagcaggagcgagcacagcagttccatagccggctgtcggcataccaagccgccaacccgggcaagtgggaggccgccatacaggcgccagtcaatttcacgccctccatgttggaagtgatcgccaccagtgatatcggcccgcagatcgcggtctatctcaccgagaaccttgaccgagcggacgagatctcgcgcatgacgcccttcgcggccgcagcagcactcggccgtctggaagcgtcgatgggtgcagccaagtccgtcgctactccccccaagccgacatccgtcacgaaagcaccgcccccgccttcgaccgttggcggcggttccgttgtgcgcaaagaccttgcgtccatggaagtcgccgatcacctcgaagccgtgcgggccaaacgaaaccgataa

SEQ ID NO: 512512 - DNA, 2052 bp, Stenotrophomonas maltophilia
atgcgggacgacgatctcaaggcgccagccactgctgaggaaaagttcaagcagatgcgttcgcgtttcgctgactgtgagtcggctgaaaccacgatgcgcaatcgggcgctggacgacttccgtttcatctggattgccggcagtcagtgggatagcaatttcggccgcctacgcggcaatcgcccgaagtacgagttcaacaagctgcggcaggcggtcaagcaggtcatcaacgacatgcgcatgaacacgccttcgatcaaggtccgcgccagtgaggatggcgacgtgaagcttgccgagatccgccagggcctgatccggaacatcgaggcgcagtccagggccgatgaggcgtacgactggggcggcatgtatgccgtgagctgtggctatggcgtgtggcgcgtgactaccgaatacgccggcgacgacacctttgaccaggaaatacggatcaagcgggtgcataacccgttctccgtgcggtttgacccatctgccaaggagctggatcggtcggacgcacgctacgccttcgttgaagactctttgccgcgggctgagttccatcgccgctggccgaaagcagagatcgtggcgttcgattcctctatgaccggcgactgccgagactggtatcgggacaaagaggtccgctttgctgagtactggcagaaggtcccggtcacccgtgaaatcctgatgctgtcggatggccgggtggtcgatgccgaggactttgacgagcaggccgcagccaatcctcccatggatgagatgggcatgccgactgcggagccgataacggtggagcagcgtcgcgaggtacagagccacaagatcaccatggagatcgtcagcggagctgagaccctggaagggccgttcgactggccaggcaagtacatcccgctggtccctgtgtggggcgatatcgtccatgttgatggacgagacgagtggtacggcatggcgcggatggctcgcgatgcccaggttctatacaacttcgagcggtccaacttcgccgaggtgattgcgaaccagccgaactctccgttcatgtacacgcccgcgcagatcgctgggtttgagcgtgaatggcgtgacctggcggtggacaatgccccgggtctcccctataaccccgatcctaaggcgcctggcatcaagccacagcgcgagccaccgccgcagctgtcgccgggctacatggccgcacttcagctttcgtcggacgacatgaagtcgaccactggcatctatgacgccagcctaggcagtcgcagcaacgagaccagcggccgcgccatcatggcccgtcagcgcgagggtgacgttgccaatttcgactaccaggacaacgttagccgggcgatcctgttcacggggatcatcatcaacgacttgatcccccacgtcatcgacagtgagcggcagatccgcatccttggcgaggacggggcagaggaattcatctgggtcaacaagcctgtatgggatgaggaggctcaggaatgggtgacgttcaacgatcttcgccaggggaaatacgacataaccattagcacggggcccagctatacgacccagcggatggaaaccctggacgcgatgatgcagctggctcagtccaatggcccggatgcgatgctggcgcgctatggcgtcctcaagtccatggataccccgggaatggacgaagtccgagacgcctacagggcgttcttggtcaagcagggtctactcccagcaggcgagggcgaagaggctccacagccgccgcagccaagcccgaaggatgtggctgacgcagaaaagtcctctgcccaggcagcccttgcaggggcgcaggcagaaggacagcagctggagaacatcgagcttcaacagcagctggaggccaggcagcttctgcttggaattcccccaacaccaccagttcaacccgccccagataagccgccgcaaggcggtttttttatgggtgctgatcagggcatgagccctaccgcaccggccggtcagccgggctatccgatctga

SEQ ID NO: 512513 - DNA, 1209 bp, Stenotrophomonas maltophilia
atgctgattgatgatgcgctacgcgagccaggcgaaactggcggcgcgggcctgctttcggtctgcatccgtcaggtccagaagtcgctgaagcagtcgagcaagcgcctgatcgaggcgaagctgcagagcttggggcttggcgagaaggacggattcaaggtgttcaaggaggcaatccagacaccgggcgacggcgtgattgcctttcagggcatgcaggaccataccgccgacagcatcaagtcgctggaaggtttcaagcgggcatggtgggaggaagcgcagtcaggaacggcgtattcgctgagccttctgcggccgaccattcgcgccccgggttctgagctgtggtttagctggaacccgcggcgcaagtcggatccggtcgaccgcatgctgcgcggtgctgagatcccgacaggggccatggtggtaaaggccaactggcaggacaacccatggttcacagcagagctggaacaggagcggctggattgccttcgaatggaggcagaccagtacgaccacatatggggtggtgattacgtcacctcggtgtctggcgcctacttcgccaagcatctggctgaggccagggagcagggcaggatctgtcgtgtcgctgccgatccgctgatgacgacccgggcctactgggatatcggcgggaccggtgcaaaggcagatgcctgcgccatttggattgtgcagttcgtggggcgtgagatccgtgttctgcggtactacgaggcagttgggcagcccttggcaacgcatgttgagtggctgcgccgctcgggcttcgctggatgtcaatgcgttcttccgcatgacggcgcgtcgcatgacaaggtctatgcggtgagctacgagagtgcactgacggctgccgggttcgacgttcgggtgataccgaacatgggcaccggtgctgcgatggcgcgcgttgagtcggtcaggcgtgttttcccctcggtgtggttcaacaacgggccgactgccgaagtggaagacgcgaccgaggcaggccgtgatgcgctgggctggtatcacgagaagcgggacgagtcccgaaacatcggcttcggcccgaaccacgactggtcaagtcacggcgctgactcgttcggcctggtggctgttgattttgaaacgatcggcgctcaaacggcgccgaaacctattagcttcaggagcggctggtga

SEQ ID NO: 512514 - DNA, 471 bp, Stenotrophomonas maltophilia
atggctggcggtagaccttctaagttccagcctgagtacgttgaacaggctcgtaagctctgcctactcggggcaacagaccaagagatagctgacttctttgaggtggaggtcaggacgatctaccgctggaaggctgagcacgacgagttttgtcagtccttaaaagcggggaaggaagtcgccgacgaacgcgtagagcgatctctgtttcagaaggccattgggtacgagcaggaagaagtgaagatcttcatgcctgcgggcgctgaagctccggtctatgctccgtttcgcgcgaaggtcgccccagacacgactgcggcaatcttctggctgaagaaccgtcgccctgatctgtggcgcgacaagcaacagactgagctgaccggcccggatggcggcccgatcaaggctgaagtaaccagggtggagaggaccattgtccgtcctgcaaattccgacggctga

SEQ ID NO: 512515 - DNA, 405 bp, Stenotrophomonas maltophilia
gtgagtgacatgggccgcgccacccgcaacatcgtcagtggctaccagcgtgatcgcgtgttccgtagcagtctgtacgcgagcgaatcccgccagttggtcaccgacttcaatggcgccatcccagccgatcgttccattgcccaagccgtttggcagacctgggagaaccagtgcattgccatgggcccggctgaggtttccgagcgttcggcgcagatccgtgtggctgcacagtacagcggccggtcccggatcaagctggatgtgaccctggacaacggtgacgtgttctcagcttggcacatcatccgcgtcatgggcgccccgtactttgacaacccgggctgggtcaccggcccgcgcaaggtggttgccaccatccccgcagtggagttgccgtga

SEQ ID NO: 512516 - DNA, 465 bp, Stenotrophomonas maltophilia
atgagcattctgtcccgtgtcctgctgggagctgtattgctcctagtaggcgttgccgtgtggcagcgcgggactgtggcacaagcggagcgcgcccgagacaacgcccagacggccaaggcagtcgcagagcaggagcgcgacaacgccatcgccgtgatcgcggtcgagcgtcagcgggtcaagcgggccgaggcagtggcaacccagtacgagcaggagaaggcagatgctgaatcgaaaggcgcggctgtcgctgatggcctgcgtgctggcaacctccgcctgcagcagcgctgggcaggctgtgaggcccgagtgtccgaccttgccgccagcgccggccagcctgatggtgccgccgacgacagagcagacagtgcgggccgaattgttcgtgccgcagccgcctgtgatgcccaggtccgtgggctccaagccttggtgagggtggatcgtgagtga

SEQ ID NO: 512517 - DNA, 276 bp, Stenotrophomonas maltophilia
atgagcagcccgaccccgatcatcaccccgcccaagcgcgagaacaaggcaagtttgctgccgcagggaatcatgcccatccgcgacaccatcaagcactacagcacctgggcgttggccgtcctcgtggcatctccggacctataccaggccgccaactcgctcggcatgctggccgacgaggctatgcccgaggctgtgaagtggtccattcgtggcgttgcgggcttcggtctgatcgccaagttcatcagccagcggaagccgcagggctga

SEQ ID NO: 512518 - DNA, 327 bp, Stenotrophomonas maltophilia
atgagcgccaacgatgagctggcgcgggatttccgtgcaggattggaacgcctggattcggcactcggccgtctgaatgggtcatccgccaacgggaacgtggtccgccttgagggcgcgggttccgtgtggaacgggatcgccatcggcgtggcgttggccggggtggtaatgggctcggcctggatcgcccacaccgcctccagcgcggaggtcgccgttcgtcaggccgaggcctaccgtgcggccgtctacatggtggctcccaaggccgctgaagagatcgaaaaagaactccagcgcaagaaggagcgcgataagcaatga

SEQ ID NO: 512519 - DNA, 249 bp, Stenotrophomonas maltophilia
atggacatcctggtccgcatcctcgccattgtcgttccctgcctcatgctgggcgtaggagcgctgacgggctggatctggatgctctggcaggaccacaacaagcacaagctgtatgtggccgagaacatgctgaagcagggcgcgctgcaggaagtgaaggaagaaatccacagccttcgggacgtgatctaccgaatcgccaccaagatggacgtgccagtgttctcggagccctacaggaaatga

SEQ ID NO: 512520 - DNA, 438 bp, Stenotrophomonas maltophilia
gtgtctgcccttgcctatgccatctcactcataaagcggtgggaaggatgcaggctggaggcatacccggaccccggcactggcggggacccttggacgattggctacggtgccacaggcccgggcatcgccaagggcgtgaagtggacgcaggcgcaggcagatgagcggctggctcaggacgtgacccggttcctcaagggcgtgcagtcggcggtgaagaagccagccactgatgcccagatcggggcaatgaccagcttggcctacaacatcggcgccaaggcgttcgccaactccacgttgctgcgaaaattcaacgctggggacatcgctggcgctgctgccgagttcacccgctggaacagggctgggggtcgggtcatgaagggcctgaccaaccggcgcctggacgaacagagggtgttccgcgaatga

SEQ ID NO: 512521 - DNA, 435 bp, Stenotrophomonas maltophilia
atgcaagctgacaccttcggggcatatgttcgggcagagctggagcattggggcagggagtttgcactgcaccgtgactgcgaatacctgggccaccagtccaagaacctgctagccgtcctgatcgagcatcacggcgagatgcctggccgggttcaggggttcaaaccgctggagaccgatctgcgcgctcagcgagtggaagacattgtctacagcatcggtagggaccaggtggtctatgcctgcgtcctacgcgcctattactgcggaatggggcgccggaagattgagaggtgggaaaccgccaatctgctgttagtacacgttggagagaagccagttagccagcggcattacctaaccttgcatgacgtggctttcgcagaggtcaagggcgccatgcgcggcatcgcaatggctcaggccgcctga

SEQ ID NO: 512522 - DNA, 474 bp, Stenotrophomonas maltophilia
atgagaatcctagccatcgatcccggcccggtagaaagcggctggtgcctgatgctggacggcatgatcctgcaggctggcgtggacgacaaccaggccctgctggcgatgctgcagggttgggagctgcacatgggcgacgcgctggcaatcgagatgatcgccagctacggcatggcagtcggccgcgaggtgttcgagacctgcgtgtgggtcggccgatttgctcaggcctggcaccagcccaacgccgtccacctcgtctaccgccgtgacgtgaagctgcacctatgcggtaacgctcaggccaaggacgccaacatccggcaggcgctgctggacctgctcgggccgcaggggaccaagaaggcgccggggccgacctacggtgtcaagtcgcacgcgtgggctgcgctcggcgtggcggtgactgtggctggtatcaccccggagaacagccggagggccgcatga

SEQ ID NO: 512523 - DNA, 324 bp, Stenotrophomonas maltophilia
atggacatctttcgtcatgactggtccagtctagccatcgatcctatgcagtcggcggcgaacgctaagagcagcgaattgagtcggctgcacttgcgcggtttagcgaacgcaatcaacccgatcagccacccctactggttcagcccggcacagattgccaaggctcggcttcggtgggcaacgctaaccgatcgttggacgtgcggtgatggcagatgggtcgaagtatcccctggtgggttctacgaagtatgggtaggtcacgacatggttggctacgagttgaaaaaacctcgctatcgctgggagcgccgccaatga

SEQ ID NO: 512524 - DNA, 189 bp, Stenotrophomonas maltophilia
atggacttctccgactacaagacccgtagccgactgaccgaggccagcaatgccggttacagcgccaggctcgaccgcaagccgatcacctcgtgcccgttcgatgaaggtacggacgaggccaaggcgttccagcactactggggccgggcggatcaggacgagcatcggcggcaggggagggcgtga

SEQ ID NO: 512525 - DNA, 375 bp, Stenotrophomonas maltophilia
atgaacctcgaacagatcgacaccagcactacggcggggaaggccgaggtcatgcggcttgcggctgaggggcggagggtggcccagcgataccttggcgaaagtagatatgcggaaatctttgagcccaaatgggattgggtgctaatggactacgccatcatcgccgagccggtcgggccggatgaggtgtggctggcactgttgccggacggaaagatcaagggcgtctgtgagactgaggaagaggcggaatatttcagcgctcactccgtctgctacatccgcgccgacctcgctggtgagaagggagcagagtcgagagaggagcggcttgcccgataccgccacattatcgctggggagaagggctga

SEQ ID NO: 512526 - DNA, 264 bp, Stenotrophomonas maltophilia
atgagcaacgcaaacgaaccggcatatccgaatgaactggcatcgccgaccaacgacagctacctcagcacgtccgggctgacgaagcgcgagcttattgccgcgatggcgttgcaaggcttgctgtccaatccgggcggcccggttcagtcaagttcaatgaaaggctgggatccctgtacgaactgtacgcacgcccaggttgcgcaagaagctaacgcattcgccgacgcccttatagctgaacttggagacgccgcatga

SEQ ID NO: 512527 - DNA, 450 bp, Stenotrophomonas maltophilia
gtgaagctcatcatcaactccgagattgccctgcagtcggcagttggtcagctccgtgagcagttcaaggaccgcaagtacctgacggtgagcatcacgcacggtaaggcgcggagcctggaccaaaacgcgatcagccatgcgtggtacgagcaggtcgcccgcgagctgcgcgaggacacgccgctaggcgtcaaggccttctgcaagctgaccatgggcgtgccgatcctccgcgccgaggacgacgagttccgcgccaagtacgacaaggccgtcaagccgatggcctacgaagacaagttgatcctgatggagtggttcccggtcacgtcgctgatgaccactccgcagctttcgcagtacctggaatcagtccagcgccattaccagcggcttggcgtgtggttggagttccccgagccgcagaacaagcagagggcagcgtaa

SEQ ID NO: 512528 - DNA, 132 bp, Stenotrophomonas maltophilia
atgagcaaagcatcaaccgtccgcctcctgcacgccgagcgttgcagcgtggccgagatcgccgcagtcgtgggctggaagctgtgcgacgtgcgctggttcattcgtacctggattgggggtgaggagtga

SEQ ID NO: 512529 - DNA, 270 bp, Stenotrophomonas maltophilia
atggacatgatccaaggcaccgccgccatgtgggttgatgccctgacagcggggaaggtgtgggaacaggaattcgatgcgccacggttccgcaaggcattcgtgacactgagccagactcgccgccagtggcctgcgccggctgacttcttcgaagccataccgccacgcgaacaactggcgatcacgaaacagccgatcaaggccaatccagagcgtgccgaacaggccgcccgtgaactggcaagtgtcttggggatccgtcgatga

SEQ ID NO: 512530 - DNA, 870 bp, Stenotrophomonas maltophilia
atgaactattttgagctccacctcggcgactacgcagcagcgacggcccacctgtcgctgatcgaggacgccatctacagccgcctcctgcgccggtactacctgcaggaagaggcgctgcccgccgatgtgaagcaggttgcccgtctggctggcgctcgctctcaggaagagctggaagcggtccaggcggtgctggccgagttcttcaccctgaccgacaccggatggcacaacaagcgtgctgacgaagagatcgagcgctatcaggccaagcaggacaaggcccgagccagcgctgcggctcgttggaacagggacgcaatgccaccggatagcgaacgcaatgcgaacgcaatgcgaacgcatagcgaaggcaatgctctccagacaccagacaccaatatctctacttcacttcgttcagtagagaaggcgcgcaagcgcgcatccacccccgactgcccggatgacgttgatccgcagacctggagcgactggctgtccctgcgaaaggcgaagaaggccccggtaaccgagaccgtgcttgaccaagcacgccgcgaagcccgcaaagccaacctcacgctgacccagttcctgcaggtctggtgcgcccgtggatcgcaggggctgcaagccgattggctgaaaccgaacgaacgcggaggggctcaatcggttcctcccagcgcccaacagcccagcaagacccgtgctggcgtcgaactccttcagagcctgaaacccaatgcacaacgaatggatccacaacgagattctggatggcctgagccggttgctctgcttgggcctggatcggaccccggcgatggacatgatccaaggcaccgccgccatgtgggttga

SEQ ID NO: 512531 - DNA, 312 bp, Stenotrophomonas maltophilia
atgaaccatccagctcgctacaccgatcccagcagcagccacgaagccgcagcgcacatggtgtcgtctggcgctcaggctcagcagcactcgcaggccgcttcggcggtccgcaagtacccgggcctgaccagcctggaactggcccgtgctaccgggctggatcgcttcatgttggcccgccgtctgcccgagctggaaaagcagggcctcattcggcgcgggatggtccggaagtgttcggccagcaacggccgcagcggctgcacgtggttcccgatcagcagtgatgaaggtccgaaggccgcctga

SEQ ID NO: 512532 - DNA, 207 bp, Stenotrophomonas maltophilia
gtggagctggaaacgctgtactcagccgaagagctgaaacgaatagagcgatacgcgtcggcccacgggctgacgctggaagaggcccagctgcaactgtttagagaagagatggcgcggcgctacaagctgcccataaagcagggcctagtggtcccttttcagaccctcagaaagcttcggaattctgacgatgaacaagcctaa

SEQ ID NO: 512533 - DNA, 186 bp, Stenotrophomonas maltophilia
atgtacgcagaccccacacacctccgcgctaacgcaatcaagtcccgatacaacgaccaggaaagcgacctcgtccacgcagtcgccaagttcaacggcatgcagcccgctgtgtttgtccgagaggccgtaatggcggcctgtctggcttacgagaaaggttcccacggaaagaaagcagcttga

SEQ ID NO: 512534 - DNA, 261 bp, Stenotrophomonas maltophilia
atggaacagttggaaaatgcggtgcgaacgctctgcgaggacgacatcctccaggacttgatgattcgggcgcttatcgccactcaccccaagcccggagacgtgaaagcagctttccaactgctcctctcacaccatcaagcgaacgctgcggactacggtttcgcttctggttcgtcggccgagtcaatccgcgaactggaggcgccgatcctggaaaaggctcagcgttggatgacttacttccccggaggctcataa

SEQ ID NO: 512535 - DNA, 273 bp, Stenotrophomonas maltophilia
atgacacctcgcacctactggaacaagtacgtcaagcgacagggcggcgccgctcgtacagcggccgctttggacatcccgtactcgaccatcgcaggcatctgcaatggaagccgaggcattggccgagttctcgccaagcgtatggctgctgcggacaagagcctggatgaaagcgttctgatctgggttcagtccatgcccgtcaaggccaacgttctgccgaaggaagacccggcccccaagaagaagggggcgcgccgtgctgcctga

SEQ ID NO: 512536 - DNA, 324 bp, Stenotrophomonas maltophilia
atgaaaagggcactcatcgccgcaataggcctgtcactggcctcaattgtgggaaccgcttccgctcaggactatgttggcggccactatcgagccgatggcacatatgtgaacggtcactaccgtaccagcgccaatagcaccaagctcgacaactactcgacgcggggaaacgttaacccgtacacaggccagcctggcactgttgacccctacaggcaaacccagcggaacccatacggatccccctataaccagcctcgtcagcgcagctaccctcagacctacggcggcagccagagacgatcaagctacggacattga

SEQ ID NO: 512537 - DNA, 207 bp, Stenotrophomonas maltophilia
gtggacaagacctttgaagttgcgctgatcgagatcgatcaccgacacagcacgcacgtgaatgtgaggatcgtccgaactgaccgttgcgtgacgatgcgcacctctaccagttcgggctcaatcgacaacagttgggtcctcctcccctccgaagccgtgaccatcggcgagcagctgatcgctgctggcaaggccgagggctga

SEQ ID NO: 512538 - DNA, 309 bp, Stenotrophomonas maltophilia
atgggcctgcacaccccaactgacatcgctcggaacgcccagcgtagctacgacgcccgcctgccggatgactccgaacgctgggacgcgatcaacgacgtagccaacgagtgcatcgaagaggaacgggtcggcgagatggtgcaggccctggtcgatgcgcttccggtcctgtcgaagctgtcgcgaatccccggcctgagcgcgcccgaagcggtgaacgcgatggctctgttcaagctggccctgagtctcgacaacaaggtcgatgagcaggcccgtctcttccacgatccgaggttcgcatga

SEQ ID NO: 512539 - DNA, 204 bp, Stenotrophomonas maltophilia
atggtcatccagttccccaaccccacggagcgccacgacatcagcgtggtgcgtggtctggcgaagcgtcacgggtggagtgtgggcgtagtgcgcgccttcatccagcacggctgcccgcgtagcgagatgaacaaccttgctgaggcagcacgccgccagcgcatgaaccagggccacgggccgcaaggagaagcgtcatga

SEQ ID NO: 512540 - DNA, 198 bp, Stenotrophomonas maltophilia
atgaattcactaagtgaacgcgcacagtttgaagaattccgaggcggggatctggagcgatgcgcgtccggtgagtaccgcaattggagcgttgagaacgattggatgctttggcaggcggcgtactcggcaggccgtaaggaagcctatcgcaaggaagccaatgcggtgcagaaggagatcagtgatgcccgatga

SEQ ID NO: 512541 - DNA, 309 bp, Stenotrophomonas maltophilia
atgcccgatgaaatcagtgctgttgccattgtttgcgatggctgggacatcagatttgtaggcaatgctcccatttcttcaatagtagataaccacaacatccgcattgggacaaagcttgtcactcaagaccgtttgcttgaagcacttgaacgtgcggccaaggctgaatccgctattcacaatctctccgtcgcaatggagagattcagagccaagtggcgaacgatcagcatcgaagagtttgggtacttcgctgatatggcgagccaacacaacctgggccacgggccgaagggggctgcgtga

SEQ ID NO: 512542 - DNA, 258 bp, Stenotrophomonas maltophilia
gtgacgccgaattccgagcttgaccgcctcttccccgccatcccgaagcccgatccgctgggcgacgccgaatcccaacgcgagtccgtcgaaggactctttattgaggaagaaaccatgtgcaccgaaaaccgctcccccgttgtcgtcccgaactccaccagctcgcatgatgccaaccgcctctatggcgaggcatacggcgtggactgggtctatgaaggcgcaaacagtgtcgcgcctacgagtgcagcctaa

SEQ ID NO: 512543 - DNA, 225 bp, Stenotrophomonas maltophilia
atgcgcacccactacctggtactggcttcgtgcgttgcggctcttctggtgtgcatcgggctggcgtgggtctgcaagcagatcgagcgctacgacctgactttcatcttcggcgcgctggctgtgctggccgtccttttcggcgctgacgaactgaccgtgatccgcaagaagcgcaacgaccgattcaagcagccgccgctcactactgaaagaggctcatga

SEQ ID NO: 512544 - DNA, 855 bp, Stenotrophomonas maltophilia
atgaacgcagtagtgcagttccaaccagcggtagacacctacgggtcgcgctccctgacggccgcagatgtccgcgcccaggtgaacctgatgcaggacgtcatgatcgaggtcatgcgtgatgggacccactacgggaccatccccggcaccaagtccaagagcctctacaaggctggcgccgagaagctgatggcgacgttccggcttgcagccaagccggaggttacggacctgtccgagggcggcgagattgcctaccgcgtgacagtgaacctgctgtcggccagcggctcattcatcggtgccggtatcggcgagtgcagcagtgccgaggacaaatacagctggcgcgccgccatctgcgacgaggaattcgacgccacgccggagaaccgccgacgcatcaaattcagcaagtaccagggccgggtcgagaagaagaagcaggttcgcaccaacccagcagacgtggctaacaccatcttgaagatggctaagaagcgggctcaggtagatgcggtaatcactgccactgccgcttcggacattttcactcaagacattgaggacctgccggaggaagtggtggccgagatcgttggccggcacaccccgcagtcgtctgtggcagctgcagcggtccagcagaccatcccgtctggccccgagcgcgaagccgctgacaaggaggccatggaggccgcacgcaagggcgtggaagcgttccgccagctgtgggctggctggccgaaggaaaagcgtcgcctagtgtccgacctgatgcccaagtaccaggccgaggctgagaaagtaagcacggccccagtggttgccgaggaggtccaggaatga

SEQ ID NO: 512545 - DNA, 654 bp, Stenotrophomonas maltophilia
atgatcgaccagcgcagcgacgagtggttcgcggcccgcgctggccggatcaccgcgtcccggatgaatgacgtgatggtcgagcgtgagcgcggcgagttcaagagtggcccccgcaagggtcagcagaagccgcagcccaaggcgctcaccgattacgcccaccagcttgcagccgagcgactgaccctgcgtccgcgtaaacaggtcaaggctgcagcgctggcatggggccagacggtcgagcctgcagctgtagccgcctaccaagctgagacgggggtaatcgttaccccggcagagttcaccctgcatcccaaatacgacttcatcggcgcgtcccccgacttcttggtgggcgattacggtggcggcgagatcaagtcgccggagtccagcgaggtgcatcttgaaactctgctgactggcctgccgcccgaacacatcgaacagatccagggcggcctgtgggttaccggccggaagtggtgggactttgtcagcttccacccggatttccccgagtcgcaccgcatctacatccaacgcgtcccacgggatgacgagtacatcgaacgccttgaatcggcctgcctacagatggaagccgatgtgcaagcaattctcgcccaactgaatcggagtgcagcgtaa

SEQ ID NO: 512546 - DNA, 456 bp, Stenotrophomonas maltophilia
atggcccgtggaatcaacaaagtcatcctggtcggcaatctcggcaacgacccggacgcgaagtacacccagggcggcatggcgatcacccgcatcagcctggccaccaccagcgtccgcaaggacaaggatggcaaccagcaggagcgcaccgaatggcaccgcgtggtgttcttcggcaagctcggcgagatcgccggcgagtacctgcgcaagggcagctcggtctacgtcgaaggcagcctgcgctacgacaagtacaccggccaggacggcgtggagaagtactccacggacatcatcgccgatgaaatgcagatgctcggcggcaagcaggaaggccagtcaggcggcaccagctcccgccgaggcggtcaggagcagtgcgagcggccgcagagggctacggacaattcgccgcgcgatgagtttgaagactcggatatcccgttctag

SEQ ID NO: 512547 - DNA, 522 bp, Stenotrophomonas maltophilia
atgaacactgacaagaccctggcggacgtgcagcccggtgggagggtgaggctgtgggatgtagcccctacccacgacctgcaaacgatcgagcgggtagcgaaggccatgcaggcttcagagcaggcgcaatcgggttggacctgggccgactgttcgcccatcgaggttaagggttggatggatatggcgcgtgcagccgtcgccgccatccccgctagccagccagtgcgtgagcagcgcgcagcactgtgggttcagttcgccgagaacggcaacattcagttcttcacgcgagaccctgatcgtgcagtagaggaatccttctgctatgcgcggccgctcactgcctattacgagaagccattcccgattgaggacctgtccaggttcaaggacctgattggtttcgctgcatggcaggcgattcagctgcccgagactgatccccgccgagatttcatacggcagagcgacgagctgctccgaattatcgactcggtcaaggagatttccaagtga

SEQ ID NO: 512548 - DNA, 471 bp, Stenotrophomonas maltophilia
gtgagcgcccaagacaaatacagcttgcaagaacgcggtaggttcaaagcgtggtgggatgccgctcgcccgtttgaaggctccgcctttccctatgaaatcgcatgggccgcatggcaagccgccctctccgcccagccctccccgggtggtcagcgggatgactcgcctatggcaaagatggcagccgctctccgtgggaaagccgaagctgagcgggctgcgttcgatcaacgcgtgcagtccggcgagtgggggccgatgccggacaacccggacgtactagaactgccacctcttcccgaagaggttgactcggttcgctgcatgattcgcggtgaaaaagggttcgctgagccctgcgattactacttcacctccaagcagatgcgtgactacgcgcgcaccgccctcgccgccagccagccggttcgcatctacggatgctgcgcccagccggaggtgaagtga

SEQ ID NO: 512549 - DNA, 909 bp, Stenotrophomonas maltophilia
atggctatcgtagacaacgctttccgtgagtggattgctgatttcaaggcgaccaacccgggcgtcgccgattcccgagccatccttgacaccgcgcaatacgctttcgcagcaggccggaaagcacagcgccgtgacgatgccgcccgccagccggtggagtcggaagagaacgtcgccgccgacacgtactggactttggtcgaaatgatcgaaccccatgtgcagcgggagggcatcaacccggatggggcgctacccgcttcggtgcatgactccgttgcgattctgctggcgcactggcttcgcacccgccagccggtggggtggcagccgatggaatccgcaccgaaggatggcaccgtcgttctgggcctgcttgaagggtcggacatcccacaatcgattcgcttccgcgatggatgggaaatagcgtgggacggctatcgcatccccgcacatgacggccccctacgttgggcgccgctctacgcagccacgcccgcgcagcagcccgctcaggtctatctggatggcttggatcgcgcactcggcgaggccatcgaccagcgcgaccgctaccacgaaatggctgatgacctggccggccatatcgcagctatcactggcgtggatatcggcgagcacagcagtgccaactgcccttggcagaacgccatcgaagcggcggaggaatacaagcccgcgcaggccgtggacctgggcgggaatgaaggttacggaacgcgctacgtgccaccggtgcaggcatttgacccaggacagttccgggaatctgtcgagcgactgaaggatgatgccctgcacgaacgtgacccgggaacggcggtaaacgcctacaaccgtgtgctggccctgatcgacggcaaggcggtgggcaatggctaa

SEQ ID NO: 512550 - DNA, 249 bp, Stenotrophomonas maltophilia
atggctaagggcatcgttcgatacaccaccggcgacgacggcgagctgatgcgcgtgatgccgtctggacaggtttcgttctccgatagcctcacggacgccatgcgtgacatgtacgagttggatcgcgctggctatgaggtgctgatcgacggggagccactgattccgtccactggcttcatcgcaagcctgcatcggctggttgattggctgctggaagccctgaagcgaggtcgacatgactga

SEQ ID NO: 512551 - DNA, 345 bp, Stenotrophomonas maltophilia
atgactgacgaacttctggccgctgcaagggatttctacaacgccacggtggcagacccggccgtgaccatccgctgtcagtcaccggcttctcgggattccgtcaccgccgccggtgagcgcctgcggctcgcactgctcgatcaggggtgcacctcggtcatggccgaccacccgcagttcgttgcgcctgccgcagctgggacacgtgaagtgcagcccgaagctgtcgatggcggcctcgacttggccgaacccggcgaacgtcacgcggcagcggatgcactggagcatgcctccggtataggccccgagcatgacgacgaggtgaccgcccatggctga

SEQ ID NO: 512552 - DNA, 264 bp, Stenotrophomonas maltophilia
atgagtgctgccgaaaacatcccctttgagctgcgcgccatcggcgccgaggaagtcggctccctgcttggcctggccgcgcgcacggtgctggagactgtcgcctgccggccggacttcccaatccgcatcaccatgcgtccagcaacttggatcgcgggcgaggtgctggagtggcgccaagctaaccgagccggtcagccagctcgtcggcgtcggtctggtagtaaatcagcaggctcttcaggtcgcgatggccaatga

SEQ ID NO: 512553 - DNA, 240 bp, Stenotrophomonas maltophilia
atgcctgatccgaccatgcagattgacgacttggctcgtgagcaagcgaagagccatcccaacagttgggtgtatgcgattgcggggacattcgggccaaatgacgagctggcaccggaagcgatcgtcggtgcatggaaggtcgacggcaatggttcgatcattgagggtagctttgtatccaacccaaaatacaaagaatatcggcgggcggatgagtgggcctccattgcttgctga

SEQ ID NO: 512554 - DNA, 438 bp, Stenotrophomonas maltophilia
atgaaggttgtctacagcttgcgcaatgatcttgcaaaggatccgtcaagggttttagacacgcaatccctgaccctgaacgacgcaaggcccatgcttggattgaaggggaacaaggggctctttggtagcgaggaatggtggtcaaatatcgactctggcgtcattgagggtgagtgcgtcatgggtgtaattacgacgctgtacgttgcgggacaggatcgcctcgagcacccaaacgaattcgatttcattctggacgacgggagttcaaggtcggaagcaatcttgacggatgatccgaactcgatttctgcatatgcgcccggacggaaagtcagaatccagtacgcgtatgatgaactcaagtgtccgttgaggaatgggtgccctcagtatctagacttcgttgtgaaaatcgagattggagagtggtag

SEQ ID NO: 512555 - DNA, 369 bp, Stenotrophomonas maltophilia
atggatgaggacgccgatatcaatgccgccatggagccttataagggacgcctcaagggcggaagcatgcacaggcgagataagcgctttggctatgacgacaaattttgggattggtggcaccgcatcggcaagccacagaatggcgggaaagatatcgagacgaagaaagaagccgacgaatggcacgacatctacgtccgttccaagttcctcatccaaaatagtctttttgagaaatttattcctctcttaagcagcaaggagcgccgcagcgcgagactctctatatggatcattgcgctgctcgtggtgcgctctaaaaattcacttgagacgaacccgcttcgcgggtcgcctttattttag

SEQ ID NO: 512556 - DNA, 708 bp, Stenotrophomonas maltophilia
atgaccgttgctaaggacacgatgtcgcgcatgcagagcttgatcgtgggcgcggaattgatccacacgaatgctatcgctctgtactcggaggcacagactcttgggaaaagcggtgccttcgcccgcgccgctacactccaccaaatttcgatggaggagtgttctaaagtggacattttaggtggcgcggttgtatcgatcctcacagggaacgacttcaatgaggctcagctcacgaggagctttcgcgaccacaaagtaaagaaccacgcaaacgcgtacaacgcagagccaacggacgaagaacgatctgcacgcgagtgtcgcgactgggatgccgcccgcgcggaattcaaaaagttccaggacaaatttcacaaggaaatgaacgaaataaaaaacacagggttgtacgtagactatgaggacggctctttcagcgctccaattaatactattaacgaggaaattgcctctgcatgcatgtacttaaatgcggacttcctccgccgaggggagggttttattcgcttactaaagcgaatcgaggcggatccagggcgattcgcgatggtggcaagagctttcttagacaatactgaggcaatggactttaagggccagttgaacgatgaggccatcatcgagaccattgttgaacagatgcgcctacagcttgaaaaacaccccgaaactgggagctag

SEQ ID NO: 512557 - DNA, 1374 bp, Stenotrophomonas maltophilia
atgagtacattgtccgttgatgaagagctggcgctattgctagccgaacttgagagagcgaacggcggaagcgtcgatttcgattggagcgaggagttcgacttcccgagctttgtaacaacaaccaatggtcagcagtgtcacttcactcgatcagcgctcgcaagcctgcacaggttggcgaggttgctccataaaagtagaagtccgtcggccacacgaattgaacttccagaattcaccaaacaattgcggcgcgtgactgcaaatgcgttcgctgatggtcttttgagtcgcgacgacgagcagttattgcgcgcaagcaagcgagtactgaagaatattttagacacgagcatcgaaactgcagcaggacgcgttacgcactattttccagcatggacgacgggtttcgtagcgaataagtatttctcacttggcccacttatcatcaccgatattcgaggctggctgaagttggtggagatatactccggcattgacgatgaagtcctcgatccgacttggaaggacgctctccttggtagtgcgcctcgaccgagcgcaagtcgcacaacaaatttattgcatgaaatcgaggaggcgctcggcacctgtgacgcagtgatcgtcgtccccgtggtcggctttgagatggagtactcccgcaagttggccaggatcgtcagcaagacctgtctcgacgccgtttctctgttgcatcagagtatcgaggtgttccagcgccagagtctttacgatgaacgtttgagtccattggacagtcgtacgctgtttgaggttgacggatatctggaaatctcaggcaagatgaatctgcgccataaaatgggaccacgccaaaattcgttcgtgacagaggaggtcaacagccatcggagggctattgaaaaggtagtggacggcctgttgagcgaacgcactgcaacgcatccaaagttgtctgcacgatgggcgacggcactcaactggtttgccgagggatgcagagagcctgacgatgcggtagcgctggcgaagatcggtacggctctcgatgtcctctcgtacgtcggtaagaaggaaggcattattcaaatggcatgcaatttcatcaatgccgaacgaggcagtgtcgttacgtccggggcgctcagcatgactatggagggtctcatcaagcgcatttacgaatatggacgctctcaagtgctgcatggcaaccatgttgaccgtctcaagtcatttgcagacgatcggcgtgtcgcttctcagttgactgggcacgtgctgcgtgaagccttgatccgctttgggaagtacgaaggtgcagacgccgatgatgcgtttcgggcaatgccgtcgcgagactaa

SEQ ID NO: 512558 - DNA, 432 bp, Stenotrophomonas maltophilia
atggctggcttagtcgaaatcttggttcttatactccttggtgtggtgctgttctatgtcgtggcgtccagggagcgggtcatccgagaactgcgcgatcaggcaagtcagcagggcagggatatcgccgcgttgcgacaggtgatggatgcagttgcggatagggtgcttctcagccgcgagcaacgtcgcgtcaagtggtttgacgaactgccacctctcgcattggaagacttcaaatcactcactacgggagccgagcgcgagctgatcttggcgtgcggggggggcgatgacgctgaagtcctaggcttgcactaccggcatgcccaccttgaatttcgttcggatggggaaaaggatgcggttgcccacggtttcgcccgcgaatgggcgaaggctgagaccgaccgtcctgttagatctatttga

SEQ ID NO: 512559 - DNA, 468 bp, Stenotrophomonas maltophilia
atgtggggatgcaggatgaacgcttgtgtgagactggtcttgttcacgagcatggcgctatgccttctgacgtgcacccatcccggtggcaacgccagcgatgtgatcgcagggagcagaagcgaaagctacggccccgaatccgcagcacagatggaagccagggcccgctctggcgatgggtacgctcaggcgctggtggagaatcactatcgcgagataggcaatgcagcgctgtacaggcagtggatggaggagggcgtttcgagaggagaccccgcagcgatgcagcgcctcgcttcccatctcatctcgttgggcgggaccgagaattgccaacgggctgaagtgatgctggtgcgcgcgcgcacgcttgtaacggacggcgatgcgtcgttccttggagccctcgactccacgatgcggaggcttaggggcgagcttccgggtagctcgccctgcaaatga

SEQ ID NO: 512560 - DNA, 855 bp, Stenotrophomonas maltophilia
atgccaccccgatggcgggtctgtggcgttgacgccggtgccctgcgtctggcgggcggattgcaggtggacgtggcgcagctgccggaccgggccacccgacgcgaatgctggatcctgccagggctggatgtggacgacgcggatcagttggcggcgcgcctggcgcaggatgacgtgcctgtgctggcggccgcgctgcgccgccatgtgcagtccggcgggcgcattgctgcctcctgctcctcggtgttcctgctgaatgcggcaggactgctttccggtcgcagcgttaccaccacatggcggctgtcgccagcgttgcgccgcgttgcaccggcggcgtcggttgaagccgaccgcatggtgatcgagtcgggcgcgttgatgaccgccggcgccgcattcgcacatctggacctgatgctgcacgtgctgcggcagcgcttcggcgatgcgctggcgtctgcggtgggacaggcgctgctggtggaccgccggcatcttcagtcacgctacgcgacgccggcgctgatggcaccgcaaagcgagctgatcgctcggctttcctcacatatcgagcggtcaatgcctggagcgatcaccgttgcggatctggccacctacgccaacacgtcgatccgcacgctcaaccggcaggtcacgcggctgctcggccacgggccgcaggcattgatccagtcaatacggctcaaccgcgcgcgagtcctgctggcgcaaggcacgttgccggtggacgaggtcgccgcccaggttggactgggcgacgcggcggcattgcgcaggctgctgcgcaggcggatggacgttacgcccagccagatacggggctga

SEQ ID NO: 512561 - DNA, 438 bp, Stenotrophomonas maltophilia
atgccgactctccagatcaagacgcctgccggcgcattcaccgcatcgcaatgccgcgcgatgctgtccgctgtcgagcaggcggccatcgcgtgcagcggactgggaccgctgccccaccagcgccggctctgctgggtgctccatgagccggtcgctcactggcgctgtggcgacgaggacaccttcgagacgtttgtcccggtgctggtacaggtgctggcacccgcaggcgtgcttgatgctgagcgacgcacgcgctacgcacgggcggtgcacgatgcgatcgtcggtgcactggcgcatccggagtcgcgccgccttgccgtatcgatcaccgtcagcgacgtcgccgatgggacctggggcgcaaacggcgagctgtggaacctggccaggttcgcggccgtggccggttatgcgcacatgcaggcgtaa

SEQ ID NO: 512562 - DNA, 141 bp, Stenotrophomonas maltophilia
atggccggccagcggccggcactaccgataaggaagaacgccggcttgcgccggcgtttcccgtttccagcagaaatggccgcagtgctgttcgtgcactgcgaggccaggcaggacgcacgcgagctgctggcgcgctga

SEQ ID NO: 512563 - DNA, 3828 bp, Stenotrophomonas maltophilia
atgaacaagattcattcaatcgtctggaatgcggccgccggtcgatgggtcgtcgcctccgaattcgccacccgtcgccgtcgcgcccacgcgggcagccgtaccgtgcttcgcccgctgcagctggccgttgctgtcgcgctggcatggggcggtgccgcaggtgcagagactctgcagttccccggcgccccggttgatgttgccgatggcacgcgggttgtcgaggacatcattgttgccaatggcgccaccggcgtcgtcgttggcaacggcggtacgctggtccagcagggaaatgccttccacatcggcggcaccgcgaaccgcgccgcccagaatctggacctcagcgggctctctcattacgtgttcgacaacgccagcctcgacttcaacgtcggtggccgcgtcatgggcggctcacgggatcagaccggggctaccaccggtacggtcgtgctggcttcggataccaacctcatccgcgcatcgcaccttggcattggcgatgtcggccgcaacatcagtgcagcggcgaccaatcaaggtaccgtgcgcctgggccagaacaacacgatcaacgccgacagcatcacgctcggcggcaaccagagcggcggcaccctggtcttccaggactcggtcacggacggaaccctcaccctgcgtggctccgacggggagagcgccgtaggcacctggaacattggtacgggaaacagcagcaattacaccggtgccaccggcactgtcgacctgcgccgaggcgtgcttgatgcaaaggtggacgcgctgaacatcgcgggcgcgccctatggcgatgccaccgcaacgggcaccctcagcctgggccggggcgtgctcgaagccaacaccatcatgatcggcgaacgcagcagcaccgttggcaccggcggttcgaacggtcgcctctccattggcgagggcggcaccgtgctggccaatgccatcaccctgggcaaccgcaccggcacccgagggaccgtgtcctcgaacatctccctcgacgggggtgcgctgcatgctggcagcatcctggccggcgccggcgccggcacgcgcgtgatcaccttcaacgatggcgtgctgggcaaccgtgccgcaggccaggacatgcaggttgatgttccggtggtgctggctgcgagcggcgagcatgcgttccgcgtcgatggcaatgatgccgtgatgaccgtcagtgggcaggtcagcggcaatgcaggcaccctgaccaagaccggcgagggcgtgctggccctgaccggtgccaacacctacagcggctcgacgcgcgtcgatcagggcctgatccgattccagtccggcagcaacctgggcaccggcagcattgtcctggatggcggcggcctgcagtgggccgcaggcagcgacgaagacatctccgcgcgactggaagcgctgggggctgagggcgcggtgctggacaccaacggcaacgctgtcaccctggccacggcgctgcacggcgaaggcggtcagctgatcaagcgcggcgacggcgcgctcaccctgaccgcagacaacacccacaccggcatgacccgcatcgaacagggtgaactggtgctgggcgatggcggcgcagccggcaacgtggcgggcgacatcgtcaacaacgcgcggctgaccctcaaccgcggtgaccgcatgtccctgtccgccaacatcgccggcagcggcgagctgctgcaggcaggtggcggcactgtcgtgctgtccggcgacgtcgcgcacagcggcggcacccgggtggcggccggcaccctgcagatcggtgacggcggctcgcgcggcacgctgggcggcgatgtcagcctggccggtggcacctacctggacgtggaccgcaacgatacgttcctgctctcggcgcgtgtcgccggcaatggcgcgctgcgccagatcggatcgggcaccaccgtgctggacgctgaccaccgctacgccggcggcacgttcatcgcggccggtgcgttgcgcctgggcaacggtggcaccagcggcagcgtgaccggtgcaatcgacaaccagggctggctggaattcaaccgcagcgacgacgtgctgctggacaatgcggtgagcggaacgggcggcctggtgcagatgggcacggggaccctgcgcatcgccgatgaccaggcctacaccggtgccacccgcgtgcttgcgggtgcacttcaggtcgatggcagcatccggtcggcgaccgaagtggccagcaatgccaccctgagcggcaacggcaccattcacggtgacgtggccaacgccggcgtgatccgtccgggcagcgggaatgactacggtcgcctgaccatccagggcaactacgtgggccagcaggggcagctggaactgaacacctggctgggcgacgacgcatcgcccagcagccagctggtgatcgatggcggcagcgccagcggcagcaccaccgtgcgcgttcacaacaccagcggcaccgaaggccacaccgtcggggacggcatcctggtggttgccgccatcaatggcgccaccacgtcggccgatgccttcaagctcggaaactatgcacgaaacggcgcattcgggtatggactcttccgcggcgacctggaaggcaagtcggccgaaaactggtacctgcgcaacgccttcgtcgtgcagccgccggtcgatccgacggacccggtcaatccgactgacccgatcaagccgatcgatccgactgatccggtcaatccgactgacccggtcaagccggtcgacccgatcaacccggtcaatccgaccaacccggtgcctccggtggccctgcccatcttcggccgcgagctggcgacctacggtacggtccagccgctggcgcgcgaactgggtgcactggcgatgggcaaccggcgcgacagggcgcaggccgccgctgcgggcgacaggccgcatgctgcctgggtgcgtgtggcaacccgcgacctgcacgaccggtacgaatccatggttgcgccggaagccaagggcaggctcgacgcgctgcaggtcggaagtgatttctggcaggccgccccgtcggcaggcgcccgctggcaggcgggcggctacctgtcgcacgcgagcagcaatgtgcaggtcgacggcatctataccaatgatgagcggacccgctatgtgcgcggggcgaccggcaacgtcgaactgcaggccaccagcgctggcttgaccctgaccggcactggcagccgaggcggctatctggatgccgtcgtccagctgacccgctacggcggttccgccaatgcgggcccggttcgcctcaacacccgtggcgacggctacctggtatcgctcgaggccggctatccgtttgtcatgcaggccggcaccgggcagttcacgctgcagcctgaagtccagctggtctggcagaaggagcgtttcgatgcagggcaggacgctgcagggcaggtgtcgcttggcagcacccaggggctgagcgggcgattgggcatcaacggcagctggcagttccagagcgcgggcggcgtgcagtgggcgccgtacctcgccgccgatgtgtggcatgaatcggatgcgcgctcggcagtgacgtacgccggcaaggaccagattcccctggaggcgggtggaaaccgagcttcgttgagcgctggcgtcaacgtccggctgaatgagcgcttcaacctgcagatctctggtgggcgcgagcgctccatgggcaacggcagtggtgccagccgggaaggcgcgttcggcaacctcggcctgcaggtgcgctggtaa

SEQ ID NO: 512564 - DNA, 681 bp, Stenotrophomonas maltophilia
atggccttgaacctggtcgttgccgacgaccatcccgtgatgctggccggcatggaaatgctgctgcgctccgaacccggcatcgcggtcgctggcctggccagcgactcgaccggactggttgcgctgctgagcgccgcatcggtggacgtggccgtctgtgacttttcgatgccgaacggacgctacggcgatggcgtgaccctgctcagattcctgcagcggcggtttcccaacctgaagctggtggtgctcaccggcatggagagtccgctggtcctgcgctccatccaggccgccggggtgacgtgcatcgtgagcaagagcgattcgctggagcacgtggttcctgcggtgcatgcggcccggtccggccagccgttcgtctctccggccattgagcgtttgctcgcccacgtggccgaagcacctggcagtggtgcgtccgcactttcaaagcgggaaacagaagtgctgcgcatgttcgccgaaggattgaccatccgggaaatcgccgagcgggtagggcgcagcagcaagaccgtcagcacgcagaaaatggcggccatgcgcaagcttggcctggagcgagacgcggacgtgttcgagtacgcgctggcgcatgggctggtccaggcatcacagagcgcccgtgcaggcgccggtggagaatcggactga

SEQ ID NO: 512565 - DNA, 660 bp, Stenotrophomonas maltophilia
atgtctcatccgatcattcgtgtagccattgcagacgaccacccggtcatccgcatgggaatcgaggccgcaatcgatgcggttcccacgctgcagtgcattggaacggcgtctgactcctcggagctggtggcgctgctggacagtaccgcatgtgatgtcgtggtgaccgactacgccatgccgggcggcacgcacggcgacggcctcgccctgctggatacactgcgcgaacgctaccccgacctgcgtgtgatcgtgatgacgggcatggaccagccggtggtcatccagtcactttatcagcgcggcatcacccatatcctcagcaaggccgatgacaccagccatgttccggcggccatcgctgcggcctgggccaaccggcgctacctctcgccgtcggtcgcgcagatcttgccacaccatgccgcagcgtcaaggaagacagcgctctcgccacgggaacgtgaagtgctgacgctgttcgtgtcggggcttggcatcaacgaaattgccgagcgcctggacaggcgcaagcagaccatcagcacgcagaagcggatcgggatggccaagctgggcatcgacaaggaagccgatctcttcaagttcgcgacggagctcggcctgcgttcaaacggccccgacccggactga

SEQ ID NO: 512566 - DNA, 3363 bp, Stenotrophomonas maltophilia
atgcctccggcctcgcctgacttgccttccgccccgttgcaggcactccaccgttcacagcgccggctgctgttggggggaggggggctgatcacgctgctggtgctgttgaccacagcggtgagcatctttgccggcgtgggcgaattccatgatcgcgagcgccagaagttcttcgaggcccgcggcgcgatcgattacttcctggtgcaacgtgaccgtgcgtatgcaggaagcgtgaacgccaacgacgtgatgtggagcgggcagcgggaagaactgcggcgcctgggtcggccgatggtggccaactacctgtcgcagggcatgcgaacggtggtccgggcagaaggcccggcgtcggtgccgtggctggtgctgggcgatcccgagcggccgatgccacagcctgagctggaagcctatctgggcatgatctatcagtactcgctgtacacgactgcggcgatcagttcgatgcaggggaacagcccggccatggtgtatggctatgacccgcaggcgcggctgatggcactgcccggcgtggttgacgaggcgcagctgctgcgggggctgcgcgcagattcgcgggcacaggcgttcgcgctgttgaagggcatcgagcgccacgcaccgctgcaatctccagatcccggtccgatggaaagcgccgccaagggccatcgcctggcctcgctgttcgggcggaacccgctggatggccggccctcgctggtgggtattctcaccctcgccgagggcaccacgccctatttccggcgggtcaccttcgagccgatcagcagcatcggctcgcgcctggaagcgaccgccgccggcagctatctgctgaccgggcccaccggtgaagtcgtgctggcaaagggccccctcagccgggaggccaatgcgcttggcccgctgctggcgcagcaggacacacgcaacgtgacacggctgtcgttccagcatctgtttgcggtaagcggggggttgtcagggacggactggcgcttcacgcgtctttacgactggagcgcgctgtggcgcgaccaggggatggccatcgttgcgcggctgctgacggcactgtcgatcatcgcagcactctggctgctgctctggcgggtggagcgcaaggtcatggcgccggccctggccgaggcatcgcgcgtctacgaaagcgaagcgctcagccagaccatcatcggcacggcgccggtgggcttggcactgctcagctgcgatgatggtgctcccctactgcagaaccaggtcgcacgcgaactggcgacgcagccggcgggcgattcggcgaccccggcgctctatgccgcgctggtgcagcaggcgcatgccttgcccggtgcgcgcaaggagttcaactggacgctgcacgacgcgggtgcagcgccgatccagcttcaggtggcgttggccatcgcacgctatcgcgaccagaccgtgtgggtctgcgcgctgcgtgatgtcacggcgcagatggaactgcagcagaccctggagcgcgcccgtcgcgattccgaggatgcccgcgccgctgcggaggcggccaaccgggcgaagagtgccttcgtcgccaccatgagtcacgaaatccgcacgccgctcaacggcatcctcggccatctggaactactggcacgctcaccgttgcagcctgcgcagcaggaacgcctgcagcgcatccggctgtcggcggactccctgatggcgatcatcagtgatgtgctcgacttctcgaagatcgaggccgggcagttggatatcgacccggcgcacttcaacgttcgtgagctgatcgagcaggccacgctgctgtatgcgcccgaggcgcacaagaagggcgtgaagctgttctacatgatcgacgccgagcttgaggatgcctaccgggcagatgcgcatcgcatccggcagatcatcaacaacctgctgagcaacgcggtgaagttcaccgagtccgggcgcatcacgctgcacgccgggctcgggaactgcctgcagccgaaccagagcgtgctgcggctgcgggtcgtggactccggcatcggcatgtccgacgagcagcttgcgcatctgttctgtcccttcgagcagggcgatgccagcgtgtcccgacgctacggtggcagcgggctggggttggcgctgtgcaggcaacttgcgcatctgctgggcggcagcatccaggccgaaagtacgctgggcgtcggcaccgtgttcaccctggaggtgccggttcgccccgtcgatgcaccgcagggcggtgaccagccgctgtcgggcaccacggtgacgctgctttccgcagcgccggagtggcggcaggaaatcgggcaggtcctgcagcgctggggcgcagggttgaccgtccttgatcgtccggccgcgctgcccaccgatgccgcaacgacaacgctgctgattttcggcgagcgccgcgcatggccggaggaggatgagcaggcgctgtgcagcctccacgcacggctggtgcgcgcgtacccgagcggccccctggcccccgaacgccgtcctgatggcgtgcacgtcaccagctattccagcccggcgctgctgcgcgcgttgttgcaggatgcaatgggagcggacgccccatcgccggtcgccgcgcaggcgcggccgccggcgggacggggaagggtgctgctggtggaggacaatccggtgaaccgcgagctgatccagcagcagctggaggaactcggctggcatgtgggcaccgccgaggatggccaggccgcactgagcctgtggccgtccgacagctgggacgtcgtgctgaccgacatcaacatgccggtgatggacggctacgagctggcccagacgctgcgtgcacgcgaggaaaaggtgccgatcctggcgatcaccgcaaccgcgctggccagcgagcgggagcgatgccggcaggcgggcatcgatgggctgttgctcaagcccctggatctggaacggctgtcggcggcgttagaccgctacgttcctgccagcaaccacaaggcacccgcgccggccgcggggcaggggctgccgctgaaacttcgggccctgttcgtcgaaagcggcgcgcgtgatcttgacgtccttgccgccgcgctgcgggaagggcggcaggccgcgctgctggacaaggtccattccctgaagggcgtgctgttgatgatgggggaacgttcgctcggcgagcgcttcggggccgtggagcatcgcctgcgcgagcacgacacggtggatgaagccgagctgcaggcgctgctcgcgtccctgtccgcgctcatcgacagctatcgggagtgcctgccgaacggctcgtga

SEQ ID NO: 512567 - DNA, 2661 bp, Stenotrophomonas maltophilia
atgttccgtttcttccgctccgcacacctgcgccaggacgcctcgcctgatgccaacgacgattgcgaccttgctgcgctccgcaagtaccagcgtggcgtgctgctgggcggcggctgcctgctcagcatcgccatcgttgccgggctgatcgcgctggcgctgttccacgcagatggctttgcggcgcggcggtcggaagcgcttcagcgcagccgtgccatcgtcgaggcccacctggcggcgtcggatgcggcccaccttcggctgttgagcatggccgagtacgcctggcggcatcggccggacaatgatgcgcggacgttggaagtggaccgtgccaactatctccgtgccggacagcgggccgtcatgaccgccggcaccgagagcgtgccgcagacggtgctgggtgccggcaccgatgcctggcccgttgaccgcctggatcgctatctcatgctggcgcactcgctgtcgatcatccgccggctgggcggggccggcggccggtccagcgaatcggagtcgagcttctttcttgatccgcgcggccagctgctggtactgggcgagggcatgagcgaacagcatctgctgtcggccacgggagaaaaggaccgtgcgcagctcatcggtcggctcgcggcgctgtcccgcaccggcgtcgacggcgcggaggcgtatggcacgcacgccacccggatggaactggtgcgccatccggtgtcgggggctccggcgatcgccagtgccctggtggcgcgtgacggtgccacgatgatcggtacgttcgtcacgctggaatcaacggcaccgctgtcccgggcaatgcgcatcgccgacggtggcgtgtcgttcgtgctgaccggcgacggccgcgtggtggcgggcaccggcagccccaaagcgctggatctgggcgaggtgacccggcatcttctggacgcggagcacaaggggcgcacgctggccaccttccgccaagggctgcgtttcttccaggtggtccgtatcgaggaagccgactgggcactggtcagcacgtactgcatcgccgatgtcattgccgatgggcaacgcctgtacatcgccgccgcgtcgttggcgttcggcctgttgctgggtctttggacgctgctggcctggctgcattggcgcgccttcgggcccgcgctggcacgcgccgcgcgcgtttaccagggcgaacagctcagccgcgcgttgatccagctgtcaccggtgggactgtgcctgctcgatcgccacagcggtgacccggtggtgcagaacgacatgatgcgtcagctcgccgccgccgccgagcgacgcggcgccatgctctacgcccgcatggtcgaccaggcctcggcgatcctgctgctgcctgataccaccattgccgagttcgaggtgtcggtggcggatccccacagtcaggcgcctgtcgtgctgctggtgggggcgaccagtgccagctatcaagggcgcatggtactgctgtgcgccgtgcgcgacctgagtgcgcggatcgaactggagcagcagcagaagcaggcgcgcgagtcggcggaggccgccagccgcgcaaagagccgcttcctggcggccatgagccacgagatccgcacgccgttgcatggcatcctgggtcacctggagttgctcggccgctctgcgctggacgacaaccagcaggcacggcttcggcggattacccaggctgcggactcgctgctgcagatcatcagcgacgtgctggatttctcccgcgcggaatccgggcacctggacctggttgcggagaccttcgagccggtgacgctgctggagcgggtcgcgctgctgttctcgccgctggccgaagcaaagggcctggtactggacgtcatggtcgatgatgcagtgccggccaggctggtcgggccacaggcacgcatcgagcaggtcctgcgcaatctggtcagcaatgcagtgaagttcaccccgtccggtcgtgtcgaactgagggctgactgggtgcccgatacggacggctcccagctgcagctgcaggtcatcgactccggcatcggcatgacggagacgcagatggcaaggctcttccagccctatgtgcaggcggacgccagcatcatcacccgtttcggcgggtctgggctgggactgtcactgtgccgtgaactgagcagctgcatggggggcaccatccatgccagcagcacgcccggcgtcggcagtgtcttcaccttctgcatcccggtccaggcggttccggatgccgggacgctgcccttggctgaccgctcggtgctcctgagttcctcggccagcgggtggcgggacgagctgcggcgccggcttgaacgctggggcgccaccgtgatcatcgtgagcgaggccgacgcctggcccgccgaacactgggaggcgcacgttccgctcgttgcattcgagagaagtcccgcgcggacggaagtggcgtcgcgggcgggacggcggcgggtgatcctggtatctgccgacggtccgctgaagccgcaggtgcggggaaatgcgtggcgcgtgtcctgctattccagtgatggcctgctgcaggccctgctggtttcctcgcagcggggcgtgccgacactggcggtggaaaggggcatgcactag

SEQ ID NO: 512568 - DNA, 186 bp, Stenotrophomonas maltophilia
atggcagatctttcccgacacaccctcatctacaccgagtacggccactggaatgtcatgcgcggccgtcagctgcttggcggccgtacctgcctcgcagaggcgctggcccttctggactacttccaccggctgcaacgggccgaagcgctgcattcacccgcgcagccgggagcggatcgatga

SEQ ID NO: 512569 - DNA, 1194 bp, Stenotrophomonas maltophilia
atgagtgccgtgccaacgctgctggtgagtgtcctggcatccgcccaccatggctggagccggtggcgcaaccgcatgcttgccgccgtcgaccacgatgccgtcatcgccaacgtgagtgacggtggcgggctcagcccgcgcttcacgttcatggcagtgatgtcctgcggtattgcgatcctggggctgcttcagtcctcgggggccgtcgtgatcggtgcgatgctgatctcgccgctgatgggccccatcgtgcagctgggtttttcgctgtgcgtggtcgatttccggatgatgggccgtgcactgcttgcgctgcttgtgggcatggcgctggcgctgctgaccgctatctgcatcgtatggctgtcgccgctacgcgaggcgaccaatgagatccttgcacgcacgcaacccaccctgttcgacctgctggtggcgctgctgtcagggctggccggcggctacgcagtgattacccggaagggagaggccattgtgggcgttgcaattgcgaccgccctgatgccgccgttggcagtggtcgcgtttgggctggcgacgggcgacatgcgcgtggccgggggcgcgatgttccttttcatgaccaacctgctggcgattgccctgagcgtgacactgattgccaagtggtacgggttcgggatggagaactcacctcgccacaccgcctggcaagcgggggtgatcgccaccacgttcattctgctggcgctgccgctgggactggccctgcgcgagatcgggcagcagacctgggccgcaaaccaagcccgcgccgtgcttacccggtacctgggcgatcgccgtgcgtcgattgaacacatgtccgtggtgcgtgccgagcatcgctatgtcatcgacgtggtggcgctggtcccggcctatatcaacaatgcccagggcaatctggcaggtcggctgtccgcgcggctggcggccccggtatccctgcgcgtcaggcaaaccctggaggccaacgaggacggactgcgcaaccgggccgatatcgatggcctgcggctcaacgttgccagcctgtctgccgagacccgggcgctgcgtgtcgagatggatgagatcgtggcggaacgctcacgcgtgctgcgtgaggaaagcgctgcagaggagcagggcgatggatcgcacagcgcggacagcctccgctag

SEQ ID NO: 512570 - DNA, 495 bp, Stenotrophomonas maltophilia
atgtgcactgtcgccctccgcctgcctcccatcctgctggcgctggcctcgctgctcgctgcaggccacgcggccgcgcagacgaccaccacgttcaacctcaccggcaccattctgccgggcgtctgccgcatcgccgtggccgacgtcaatctgggcagctatcaggcaacactgttcaccggcgcgtatacctcgccgttccagccggtgaatgttgtggtcagccagtgtgacccgctggtgacccgggttgccctgcgtttcgatggcaccgccgacaccagcaatgcccagctgttccagggtgtgcctggcatcggcgtcgagctgcagtacaccagcagcggggcccgcgtcgcccctggcggaacggcccagatggccacggctgcggcgacgcacgcattccgcgcacgcttcgtgcagagccgcgcaacggtatcggccggtacggtcagccgaccgatcacggtaaccatgacgtacaactga

SEQ ID NO: 512571 - DNA, 480 bp, Stenotrophomonas maltophilia
atgttccgtccgcttctctccctgagcctgctgctttgcgctgccacggtgcacgcgcaggacagccaggccttcaccatgtccggcgaaatcctgccaggtgtctgcaaggtcgcattccccgatgtggatctgggctcccatcaggcgtcattgttcaccggcagctatgccacggcctatgtggacttcagtggcaccgtcagcgactgcgacgcgcaggtgctgcgggtcgccatgaccttcaccggtgcggccgacagcagcaacgcgtcgctgttccagggggttcccggcgtaggcatcgaactggtgcgcgtggtcggtgccgtcaacgtgccgattgcaccgggtggccgtacccagtacaccaccgccgccggcgtgtatccgtaccgtgcgcgcttccggcagtccgctgcaacggtgggcgcgggccgcgtgacgcgtcccatcaccgtttcgctcacctacaactga

SEQ ID NO: 512572 - DNA, 495 bp, Stenotrophomonas maltophilia
atgcacgcacgatggctgctgctggcgctgctgtgcggggccgccctgccggtggcggcggcggacctcaccgtccgcttcaccggtaggttcctggccgggacctgccagctgagcgtgcaggacgtcgatctgggcacgttccaggcaacgtacttcgccaccagcacgcagtcacccgcggtggccttcgtgctggagcgcaagaactgcagtgacgacctgcgaacgctgcacgtccgcttcgtcggcaccgccgacagcagcaatgccagctactttgccatcccggccaccggcggtgtgcggggattggccatccgactgcagagtgccaccggcacgctgtatgcacccaaccaacccgcgtttgactggcccaccagcggcggctcggcaggccagctcgatctcggcgcattacttgtccgcaccggcaatgtcaccgccggtgcgatccgtacccccatcactgtccaggtcacctacaactga

SEQ ID NO: 512573 - DNA, 1056 bp, Stenotrophomonas maltophilia
gtgattcgcatgcctctggtcgcgcgattgatcgcgcttgtcctgttgatggccgcagcgcctgcgcttgcgcagaactgccgcttcaacgccggcaccaccacactcaccaacatcgccaacctcagtggcagcatcactgtcggtccggatgtgccggtcggcaccgaaatctaccgggccacctattacgccgggcccaccaaccagatctactgcacaccgggcagggccgatcgcatccgccagtacaccgcgcttccgtacgggccttcgggctacgtacacgggcgctacggaaccgtatacaacacgaatcttcccggcgtcggcgtggcggtctggttcagcggcaacccgtttccgatgctggtttccgcggaggtgaccacgggcacgctgatcgaccttgttcaatccttcgacgtcagcctgatcaagaccggaccgataacggccggcacgatcactggcgcgaacctgccgcgcttcgaataccgcatgaccggcgccaacagcgcactccagctctggaacggctgggtgcagggctcgctgtccattgttgcccgcacctgcaccgctgcagacatttcggtgaatcttggcgatcaccgcgtgacggagattcccaccgtcggcagcgggacacaatgggtcaacgtcccggtaacgctcagcaattgcccggcgttctacggccgctaccgcggcaacctcaccacgggaacggtacagacggccaatgggcgcgtcgacaacaccctccgcttccgcgtggatccggtcacggccgtggcggatagcgcgcgctcggtgatgacgctgcagagcgacggcgtgagtaccacggcgaccggcatcggcatccagatcgggaccgcggccgacgagtcggtgggctttggcagcatgcgtgattccgggttggcgctgagcgaaaccaacaacgcgtcctacacgctgatgctgcgtgcgcgctatacccgctacgccgctgccgcgtcatcgggacaggcgaacggggccgccaccattaccctggagtactactga

SEQ ID NO: 512574 - DNA, 2682 bp, Stenotrophomonas maltophilia
atgaacgcccgttcccgggcgccggctgccggcgcccgccggttccagcgcgcccgcctgccgggtgtggtggccgccatcctgtttgccccggccgtcgcgagcgccggcaacgaaagcccggacgatgtcgagttcgacgccgcgttcctgccggtgggggcgtcctcgcgcctggacctgcagcggttctcgcaggaagactacgttgcgcccggtacctaccggggggacgtgcgtctgaacggccagtggcaagcgcgtgcggacattgtctaccgcgaggtggacggcgtctcgcggctgtgcctggacccggccgcgctgaagcgctacggcatcgcgccggagcgcctgcacgccgaccaagcccggcagccggccctggcctggccggacgaacccttctgtggtgacctgggcgagcgcgtgcccggtgccacggcgtccttcgatgcaggcagccagaccctggatctgcaggtgccgcagctgtacctgcgcagcgaagcgcgcggccatgtcgaccccagtgagtgggatgccggcgtggcggcgctgtcgctgggctacaacgccaacgtctatcgctacagcaatggcgctgccccgacctactccgggttccttggcctgaacgcctcgggccgcgtggcgggctggcagctggtgcaccagggcgcgatgacgcgcggtggcagccagccgcagcgctaccggtcagcggccgcctacctgatgcacgacatcgtgccgtggaaggcgcagctgatggtcggcgacacgtccactgcgggcgacctgttcgagagcgtgcgcctgcgtggcgcccgcctgggcagcgacgaccgcatgctgccacagtcacagcgcggtttcgcaccggtagtgcgtggcatcgccgataccaacgcccgggtgatcgtgcgccagcgtggcaacgtcctgctggaaaccagcgttgcacctggaccgttcgagatcaacgacctgttcccgaccgggtatgccggcgatctcgacgtggaagtcgtcgaagccgacggccgctcacggcggttcacgctgccgtattcggcggtgccgcaactgctgcgtccgggccagtcacggtggtcggtagcggccggtcgtgttgccgaggcctcgctgctcgatgcgccggacgtcctgcagctgcagtaccagcgcggcctgtccaatgtggtcagcgcctacggcggcgcggtggtgggcgacaactaccactcggtgctggccggcagtgcggtcaatacacgattcggtgcgctggcaatggatgcgtcgttgtcacaggcccgtgtacgcggcctgcctgagctgtccggcagcagctttcgcctggcctacaatcgaagcatcgccagcaccggcacctcgtttgccatcgcggcctaccgctatgcaacgcgtggctacgtgagcgtgcgcgactgggccagcctgcgtgacgcacaggcacgtgatcttggcatcgacgcggtggcgcgccagcgcaaccgcatggacctgagcgtcaaccagcgcctgggggagcgcggaggccagctgttcgtcatcgggacgcggcgcgacttctggaacacggctggccgccagcttgacctgagcgtgggctacagcaaccagtggaagtcgctgagctacagcctgaacttccagcgcacgcgcgattcgatcgatttcatgccgggcttcctgcaggatcgcattcccggcgcggatgcggcgccgcgtccacagatggggcgggctgacaatcgcctgatgctcatgctgtcggtgcccttggggcgcacgccccgtgcgccacagctcaatgccacccagacccgcagcgacaatgccgatccctccacgcagctgtcagccagcgggctgtgggcccgcgacgaccgagtcaattacggcgtgtcactggcgcgtatcggcggtggcaacgccctggatgtcaacggcggctatcgcggcggccgcggccaggtggcggccaatctcagccgggggcctggctatacccagatgggccttggcgcgtcgggcgggctggtgctccacgcgggtgggctgaccctgtcgccgccgctgggcgacacggtcgcgctggtgcacgcgcccggcgcggcgggaatgcgggtggagaacagcggcggatcccgcgtggacaggcgtgggtttgcggtggtcccgtacctgacgccgtaccagctgaacacgatttcgctcgaccccaagggggccggctacagcgtggagctgcaggaaaccgcacgcgcggtggcgccgcgtgccggcgcgctggtgaagctcgatttcagtacgcgcgccagccgtgggctgatggtcgacacgcagaccgaagacgggcgcccgctaccgttcggcgcggaggccaccgatgccagcggcgccacggtcggcgtggtggggcagggcagccgcctgctgctcagtggccttcagtcgtccgggccggtgcaggtgcaatggggcgagggcgccgaccaccattgcgtggtggacgtgcagattcccgacggccctgtcagcggccagtacgccgtgctcagcgcgcaatgccgatcccccgtcgtccatgccaacggtgacgcgccgcccgcgcgccgggttaccaccaccttccaggagaacgcaccgtga

SEQ ID NO: 512575 - DNA, 741 bp, Stenotrophomonas maltophilia
atgaacgccctccatcgcatcatcgctgctgcattgctgtcgctcgtcgcgctggcttcgccggcggcccatgcgtcggtcgtgatcggcggtacccgcgtggtctatcccgcgcaggacaaggaagtcacgctcaagttcatcaatgaaggcgagcgcgcgacgctggtccaggtctggctggatgatggcgatgaccagtccacgccggataccgccaaagcccccttcgtggtcgcgccaccggtgttccgcctggacccgaagaagcagcagatcacccgcatcatgttcaccggcgcgggcctgccggccgaccgggaaacgctgtactggctgaacatgctggaaattcccccgaagaatggcactgccagcgccaacatcctgcagttcgccttccgcacccgcatcaaggtgttctaccggccgtcgaacctggcaggggagccggtgctggcttaccagaagctgcgctggaccctgcgcaccggtaaggacggcctggttctgcgtgccgacaatccgaccccgttccacgtcaactttgccaacgtcagcctcgatgtcggcggccaggaacagggcgggcagggcggcggcatggtcgcgccgttctcacaggccgagttcccgctgaaggatctgcgcgcgcgcccgtcgggccagctgaaggctgccgttacggtcatcaatgacttcggcgcgctggttcccaccgaggccgtgttgcagccctga

SEQ ID NO: 512576 - DNA, 585 bp, Stenotrophomonas maltophilia
gtgaagaagaacaccaccatcatgaagctcattccgatcgcttccgctgcaagcctgctgctggccgcttcggccgccagcgcccagtcctatggctcgggcaccatcgagttcaccggcgaagtcaccgacctgacctgcaccatttccggtggcgccggcgccatcggcaccaccaacgtcaccgttccgatgagcgcggtgcaggccaaccagctggcagcggccggcgacgttgccggtgaacacccgttccagctgatcatcggtggccccggccagggcacgtgcctggatggcaaggtcgccgagctgtacttcgacccggctgccggccaggtcgacgccagcaacggcaacctgcgcaaccaggaagccaacgcgccggcagccaacacccagatccaggtgaagtacaagaactccgtggtcgacctgcgcgatccgtcgttcaagaccgatccggtgaccatcaccaacaacaccgccacgatcgacatggccagccagtacgtcgccaacggtggcgctgcggccccgggcttcgtgcagtcgtacgtcaactacaaggttgtctacaactga

SEQ ID NO: 512577 - DNA, 246 bp, Stenotrophomonas maltophilia
atgccatcgcccgaccacattcccgaagacgctttccacgaagaagctatcaccgctgccgatctagagagcccagagacaccggaagcggacccgcaatacttgctcgtgcaaagcgggtttggtctccacgtccgtctgggaaaagacggcgaccagggattgcgcagcgaggacgaaatcgccgagctggtgcggcgagcgttgtatcaccgcaagagtctgacccttcatatcgagttctga

SEQ ID NO: 512578 - DNA, 810 bp, Stenotrophomonas maltophilia
atgaactggtcgtatgtcgtcagtgcactgtctctcccggatagcgcgcgggtggatcagcgcgtgcccaagaagctgttgctggagaagggtgcgcccaccgcctctgacaagcgcttgattacggatgcgattgaagacatacagtggctggccgccctcaaacccaacaccatcggcgtgcccgagtaccgcgatacgcagcgcgaatacctggaggttgcggtgctggccgtcaccttgcgcggagccatcaagccagccagcctttcacgccttgcagaactggtgcaccgggccgtgccttacccggtgctgttgctgctgcatgaaaaacgggctgaagggccaacactgaccctctcgctggcgcataagcgctgggcgcagaacgaggcgggcaagatcgtgctcgatggcgatctggtgtcggcctcgctgcttaaagcagccgatggcacacctggagctgatgcgaaggtggcttccgacatcgagcgggatttcatgcagtcgcttgcagtttcgcgtcagcctcaagcatcgctacatgccctctatgagggctggatcgtatgcgtgcaggccctgcacgccgcgcggcggatacggatttatcgagctccagcaaccccggaacaggccgccgcgcgacggcaagcactggctgattgccagcggctggaaggcgaaatcagtcgcctgcgggccgaggcggccaaggaaaagcaactggcgcgccaggtggagctgaacctgacgctcaagcgcatccaagccgaactggccgctgcgcaacaacagctttga

SEQ ID NO: 512579 - DNA, 1917 bp, Stenotrophomonas maltophilia
atggaaaaactcacggcagccagccccgaagcccgatcggccgatttggtggcgggcaatatcgaacagctcaaggcactgttcccggaactgctcacggaaggcaaagacggcgcggccgtgaatgtggacgtgctcaaggcgctggtgggcgatgccaacgtcacggatgccgacgagaaatacggcctcaactggcacggcaagcgtcgcgcgcgacaagtggcgctcacgcccagcaccggcaccttgcgcccctgcccggaagacagtgtggattgggagtccacccagaacttgatgatagagggtgacaacctcgaagcgctcaaactgctgcaaaaaagctatgccggcaaggtcaagctgatctatatcgacccgccgtacaacaccggcaaggactttgtgtacccagataattttcaggacaacatcaaaaattatttggagttgaccgggcagattgatggcggtcagaaaataagtagcaatacggaggccagtgggcggtttcacacggactggttgaacatgatgtatccgcggttaaagttggctcgaaaccttttaaaagacagcggtttcattttcatcagcattgatgacggtgaagtggaaaatctgcgtagagcttgcgatgaaatttttggcgaagagaacttcgttgcgcaactcgtgtggaagtctcgggtaagtgaagacacacgcgctaaaacgggcgtttctaccgaccatgagtacatcgtttgctactcgcggggagatcaggtggctcttcgtggatctgagaaagatacagataaattttcgaatccagacaacgatcctagagggccttggcgaagcgctgaccttaccgggctggccacgaaagagtcccggcccaaccttcattacgatctaattgaccccaagacggagatcaattacggctgccctcaaaaggggtggcgctacgaaaggtcgacaatgactcagaagatagacgaaggacggattttgtttccttcgagtcgtgacgggcgcccccgtcacaagctgtttttgaatgagatgcgaagtctttacaagaacatgagttccgtaatcacagaattcagcacggcagatggaacgaaggacgtgaatggtcttctgggctcaggagtgttttccttccccaagccaactgcgctggtagctagcattattgaacaggctacggaagcggaagatattatcctggacttttttgcaggttcaggaaccacggggcatgcaacgttgcttcgaaatgctgcggactcaagcaatagacgattcgtgctggtgcagcttccggaaccattggacccgtcgaccgcagatcaaaaattggcttcggacttctgcgataggctcggaaagcgccgcaccatcgcagagctaaccaaagagcgcctgcgtcgagccgccgccaagatcaaagccgataacccgtctgctggcgatactggctttcgcgtgttcaaactagacacctccaatatccgcgcctggaatccgaaaccggacgatctggaagccacgctgttcgaccatcaggatcacctgctcgaaggccgcagcgaggccgatgtgctttatgagctattgctcaagctcggcctcgacctgtgcgtgcccatcgaaaaacgctgcatcgaagggcttgatgtgcatgccgttggcggcggtgtgctgctggcttgcctggccgaaaagatcacccgtgagcaggtggagtcacttgcccaaggcatcatcgcctggcacaaggagttggcgcccgctggcccggctggaaaagaaagcacctgcgtgttccgcgacggcgcgtttgtcgacgacgtggccaaaaccaatctcgccgccattctggagcagcacggcatccagaacgtgcgcagcttgtaa

SEQ ID NO: 512580 - DNA, 426 bp, Stenotrophomonas maltophilia
gtgcgaatagttaacgttggagtggcgttgggagtgttcgtggccgcaggtctgccgatgtcggcattggcccaatccgatgatcacggcatcagcatgagtgggcagggcctgggcaaggcataccccgcggcaaccaatctgagccaggatcctgcctggctggtctacggattccagcgtgatggcatttcctactaccaggtcaacgatcttgctggccgggtagaaatgatcatcggcaatgccgacggtacattctgggcgttgccggccggtgagacgcaggtgccggtatcgctgcccagccagccgctgccggtaccggccaaggcgacccgttcgctcatctatcgtggcaacggcttcgcactggtgcgatacagcacgggttcccgcgtgctctgggcgatcgaaacgcagtaa

SEQ ID NO: 512581 - DNA, 1653 bp, Stenotrophomonas maltophilia
atgctgacagggaacgtactcgagggagaagtgcgattgaactggtggaatgaaggcctgcagctgaagttgcgcatccatccggcaggcctggtcctggcggtgttctatgcgatcgcttgctgggcgacccggcagttgtcactggatcagttctatctgcccgcgggaatacgcgtggcggcggtattgctttgccctcctcggttctggccgtacctgttgctcggcgaatatgcctatttcgcacagatgcgctacccgatgatcgagaagtacgggatggcctgggcggtccttgcatcggcttcgttgatgcccgcagtgatgctcatcacccatggctgccgcaaggtcctggcaaactcggtcaacgcgcgcctgctggccatcgcattgctgtcctccgtgctggtcacgctcctgaacgtgagcctgtcgcagttgctctggccgacgccgcctgcggattccgtgctcgcgttcctgtcccgcgccgtacgtttcagcgtcggagacttcatcgccatcctcaccgtggcaccacttgcactgctctgggccagacgcaacgtcgaacagggctggaaaaccatcttcaccggtcccactgccgtcgcactgtcggtgatgacgctgcttggcgtaaccgcgaccttgattccctccgaggccagcgcgctgaggacatcgctgcagttgctgatgggcttgccggccatcgcgctgacgtgcctgcatggctggcgtggcgcggccgtcggcgtgccggcgttgaatctgatcatcggcctgaccacgccgaaaccctatgccgcagccttcgatgcttcggcgttcactacccagcagatcatggccattaccggagtggcactgctgctgctcggttcccgcatcagccattatcatcggcgctatcaactccgcgaggtcggcgagaagaacgccatcaacctcgcgcgcagttcacacatggccagtgaatccgaccttcgcgaacgtgccatccacctgcgcaaactgggcgatggcatcgatctttcgctgtcggaagtcatcaactggctcaacagccacggtcactcggccatcgccaacagcctgacccacacggcgaacgtccattcccggttgttccgcgagcaggccagcatggtctacccgaccgcgcttgagcagctgggactgtatgtcgcgttgcaggccggtggcgtacgcgcagcgtgggtcaacacgcaccgtgtggccgagccccgcctggccggtgacccgtgtcggctcagcctggatctgcagctggctgcttaccggacgctcattgacgccgtgtccctgctgctgaagagcgagcccggccaggtgatcgtgcgggcgcgctgcattggcctgaagcgccagcgcggaatcgtcatgacggcctcgttgctggaccggcatcgcgcactgtccgacgccaccacgcgtcttgtcagggacagactggccggtcgtacgctggcattcggaggttcggtgcgttgccgccagaaccgcatcatcatggtgctggtggaatcggccgcgccattgcgacgcgaatccaccgagagcgccgtgtcgggcaccagcatcgcatcccacagctgggatggtcagcaggcacaggcctga

SEQ ID NO: 512582 - DNA, 216 bp, Stenotrophomonas maltophilia; identical to SEQ ID NO: 351490

SEQ ID NO: 512583 - DNA, 1284 bp, Stenotrophomonas maltophilia
atgagccaggacgacactcccgacctcaccgcgccgcaggcggcgggcaagatcgcgcccgaggcggtggcgctgcgcgcccagccgcgcccggtcacacgcctgaaccgacgcacgctggccatcctcaccggcggcctgtcggtcgccgtactcggcacgctgatgtggtcgctgcaaccgcagcggcgtggtgctggtgaacagaccgagctttacaacgtcgatcgtgtctccaagtccgaagggctggatgcgctgccagcggactactccaaactgccgccggccttgccgcccaaggtgcccgagctggggccgccgctgccgggcgatcttggcccggccatcgtcaagtcgcagcaaccggtgacggccgcctatgcggcccccggccacgacccgaacgatgcgctgcgcaaggaagccgaagcggccgcgggttcatcggtgttcttccgctctagcacgcagaaggccgcgccggtgacgcagtcgcaggccgccgtcgcgccgggcttcgccgccaatgcggcgttcgacccgatggctgccgggccagcctcaacggcggcgcagcctgccgacccgacggcggtacagaaccggcaagaccagaaagaggcgttccagaaagccggaaccacggaaacccgtaattccggcaacctgacgctgccggcttcgccgtaccaggtgatggccgggacggtgatcgctggcgcgctggtgacgggcatcaagtcggatttgccgggcgatgtgatcgccacggtgacggagccggtctatgacacggccaccgggcgcttcctgctgatcccgcagggttcgcgcatcctcggccgctacaacagccaggtcagctacgggcaaagccgcgtgcaggtggtgtggaaccggatcatcctgccagacacgtcttcgctgacgctcgacaacctggtcggcaccgatccggcaggctatgccgggctggaggatggcgtcgattggcattgggatcgcattttcgcaggcgcggcgctgacgacgctgttgggcatcggcgctgagctggccgcgccggagaaccgccaggatggcgaccgcatcatcatcgccgggcgcgacagcgcgcaggacagcatcaatcaggtcgggcaggagatgacccgtcgcaacatgaacatccagccgacgctgaccgagcggccgggcctgccggttcgcatcatcgccaaccgcgacttggtgctgcggccctaccagccattgttcttcaacaaggggacttcacgatga

SEQ ID NO: 512584 - DNA, 705 bp, Stenotrophomonas maltophilia
atgcgattcaagcgaccgcaggtgcgctatgccgatacgccgcagcctgccactccgtatcaagccgccacccaggtgtgggacgagcgcatcggctcggcccgcgtgcaggcgaagaactggcggctgatggccttcggctgcctggtgctggcgctgctgatggccggcggcctcgtttggcgctcggcgcagtccatcgtcacgccctatgtggtggaggtggacaacgccggccaggtacgcgccgtgggcgaagcggccacgccgtaccggcccaacgacgcgcagacggcgcaccacatcgcgcgcttcatcacgctggttcgatcgctgtccatcgaccccatcgtggtgcggcagaactggctggacgcctacgactacaccacggacaggggcgcggcagtgctcaacgactacgcccgcagcaacgacccgttcgcccgcatcggccgcgagtcggtgacggtgcagatcaccagcgtcacgcgcgcgagcgatgcctcgttcaacgtccgctggacggaacagcggttcgtcaatggcgcgcccgctggcaccgaacgctggaacgccgtgctttcaaccgtcctgcaaaccccgcgtacggagcaacgcctgcgcaagaacccgctcgggatctacgtcaacggcctgtcgtggagccgcgaactggattcttccgaaggagccaagccatga

SEQ ID NO: 512585 - DNA, 291 bp, Stenotrophomonas maltophilia; identical to SEQ ID NO: 351489

SEQ ID NO: 512586 - DNA, 264 bp, Stenotrophomonas maltophilia; identical to SEQ ID NO: 351515

SEQ ID NO: 512587 - DNA, 1488 bp, Stenotrophomonas maltophilia; identical to SEQ ID NO: 351516

SEQ ID NO: 512588 - DNA, 1119 bp, Stenotrophomonas maltophilia; identical to SEQ ID NO: 351517

SEQ ID NO: 512589 - DNA, 1146 bp, Stenotrophomonas maltophilia; identical to SEQ ID NO: 351518

SEQ ID NO: 512590 - DNA, 1755 bp, Stenotrophomonas maltophilia; identical to SEQ ID NO: 351519

SEQ ID NO: 512591 - DNA, 1011 bp, Stenotrophomonas maltophilia; identical to SEQ ID NO: 351520

SEQ ID NO: 512592 - DNA, 648 bp, Stenotrophomonas maltophilia; identical to SEQ ID NO: 351521

SEQ ID NO: 512593 - DNA, 372 bp, Stenotrophomonas maltophilia
gtgagtgccgccgaacgccgcgtgtatatgctgcaggagcagtttctggagatcgcccgtgccaacgcagtgcggtcagaggctgccgagaaggtggaaatctacgcttcggtcgatgcggaatcccaacgccagcatccgatgcagcttgagaactaccagaagcctgagcgcggtgacggcgcggccaccctgctggtggacgtagacgagcagggccgcccggttgccgtggacgttgcgcgcgacagcggatcggcggtgcaggatacggcggctgtggaggcggcgtatcgatggagctacaacgcggccagcagggacggcgtaccggtgcgtgggaaggtgcggatcacgatgtgggggccgtaa

SEQ ID NO: 512594 - DNA, 411 bp, Stenotrophomonas maltophilia
atgtcgcaggatcgattgaaagggattcgaacccgctgccggcgctgcgttggcagtgcggtggtgctggccacgctgatgatggcccacagcgccatggcgcagcaggagacgcagcaaattcgccccgcgcgcgtatcggcgtcgatcgtgatggagaccaagcacaacaacccgccgcgctatccgtcgcaggcctttcgcgaggagaaacagggcgaaacgatcctgatggtgaaggtggctgccgatggacagtggcttgacgcgatcgttctggagagcagcggctggccggagctggacgaggccgcgcaggtggcgactcgcaagtggcgatacctgccggcgagcgaagacggtgtgccggtgcccggagagatacgcgtaccggtgtcgttcaagctgtga

SEQ ID NO: 512595 - DNA, 183 bp, Stenotrophomonas maltophilia
atgcagcgcccggcacagccggttgcccagcataccaaaaccgccctgccccagccgggagaagggtcagatccctttgctgcgcaaaggcatccgaccccgtccgggaccctggatgtctacctgttgccggggaaggcctgccgcaactcatccaccagcacccgctggttctccgaatag

SEQ ID NO: 512596 - DNA, 1641 bp, Stenotrophomonas maltophilia
atgtccaagggttcagatctgctcgtcgccgcacttgagaacgaaggcgtcgagcgcattttcggtattcccggcgaagaaaacctcgacgtggtcgagtcgctccgccattccagcatcgaactggtcatcacccgccacgaacaggcggcggtcttcatggcggccacttacggccgcctgaccggcaagccgggcgtgtgcctggcaacgctcggcccgggcgcgctcaacttcaccaccggcgctgcctatgcgctgctcggtgcgtggccggtgatcctgatcaccggacagaagggcatcgtcgccagcaagcaggcgcgcttccagatcgtcgacatcgtcagcacgatgaagccgctgaccaagcaggcgcggcagatcgtctcggcgcgcacgatcccgaccatcgtccgcgaggcgttccgggttgcccaggaagagcggccaggcccggtgctgctggagctgcccgaggacatcgccgccgatgaggtcgagggcgcggcgctgatcccgccgcacgcagtggaccgcccggtcgccagcccggaagcgctggaccgcgcggcggagatcatccgcaacgcccggcgtccgctgctgatgatcgcttcggcggcgtcgcggccgcagtccagcgaggcgctgtcggcgttcgtgctgcgcgccggcattccgttcttcaccacgcagatgggcaagggcgcggtcgccgggggctcgggcctgtacatgggcaccgcggcgctgaccgagcgcgattacgtgcacatggcgatcgaccaggccgacgtgatcgtgaccatcggtcacgaagtcaccgagaagccgccgttcgtgatgcgcccgggtgggccgacggtgatccatatcggctactcgcaggcggcggtggagcaggtgtacttcccgcaggtggaggtgatcggtgatatcggccgttcgttgacccagctggccgatcgcatcgaaggtgcagtgcccaatgccgatgcgctgctgccgctgcgcgcaaccatcctcgagcacctggccgaccgtgccgaagaggcccggttcaccccgcagcggctggtgcacgacgtgcgccaggtgatgccacccgatggcatcgtggcgctggacaacggcatgtacaagatctggtttgcgcgcaactaccgcacccaggtggccaacacattgctgctggacaacgcgctggcgaccatgggcgcgggcctgccgtcggcgatcatggcctcgatcctgtatccacagcgacgggtgctggcggtgtgcggcgacggcggtttcatgatgaacagccaggagctggagacggcgaggcggctgggcctgaacctggtggtgctgatcctcaacgatggtgcctacggcatgatccgctggaagcaggcggtggatggtttcaccgactatggcatgaccttcagcaacccggatttcgtgaagtacgcggaggcctacggctgcaagggccacgaggtgaccgccatcgagcagttcatcccgaccctggaagctgcgttcaacgcgggtggggtgcacctggtctcggtgccggtggactattcggagaaccagcgggtgctggtggatgagttgcggcaggccttccccggcaacaggtag

SEQ ID NO: 512597 - DNA, 879 bp, Stenotrophomonas maltophilia
atgttcggtcgcgacctccatgaattcctgacggaagacgtgaagggcctgatcacgcacgttgtgaccggcaaggacgagaagcccgaggcgcagatcgacaagagccttgcctggatgcaggtggcgctgtcctgcatccatggcatcaagattctcaatgatcccgagctgcaggctgacaagacccgcgcgatgtggttcatcggcctgggcacgggtggccctgcggtgacggcaggttcaatgttgctgctgtatgaggtcgccatggccctgttcatcggcttgggaccactgttcattctttgccttctgttcgaccaggccaagcagctgttccaacgatggctgttctacggcattggaaccatgttctccatggcggtgctggcggcgatggtctcgatcgcgctggacatggtgatccgcgtgtcggcttcgttctggatgacggcgcttgtaaacaagttcccactcatggaggtgatccgcgtgtcttcctcgttctgggcgacggcgctggtgaacaggttcctgcttgacggggcttccagcgacggtatgaccagtccggcgatgcagcagggcggcatgggcctgattctgacgaccttgattctgactgcgcccccaatggcggccatgttcttccagggcaccttgggtagcttcatggcattttcgcagataggtggcagtgcggcctcaactcctagtgctgatggtcggcctccgggtacctacacacctccttcgccatcgaagagcgaagggcattcgagtcatcaggatggtggtgtcactataaggaactctgctccaagcacttacacgccgtccaatcagaagcaggggcagtatggcttggcgcattga

SEQ ID NO: 512598 - DNA, 552 bp, Stenotrophomonas maltophilia; identical to SEQ ID NO: 351495

SEQ ID NO: 512599 - DNA, 1344 bp, Stenotrophomonas maltophilia
atgagtggacctgcgctccctttgctggtgcggctgtaccgttcgctgctgccggttgcgctgcgcgaatggctatcacggcgtcgcaaccagcgcctgtgcgatgggttgcgctttgcccagggcccggcctggacgctgcccgacccgacgacgtcgcagtcctccccgccccccgatccggtgtggaaacggggcgtgaacgtgttgggttacctgcgcggccagttcgggctgggtgtcagcgcgcgcgcttacagccaggcactgatgaacgtgggctacccggtatccctgcaggattcgcgcgtggccgtccctcacgccaatgcagaccagagcctggtgtcgcacctgcggcccggcgtcggcgcgtttgccaccacgctggtattcgtcaatccggaccacttcagcgaagcgatggcggcccgtggggacgtggagcggccacagcgagtagtggcttgctggttctgggagctgccgcgcgtgcccgatgcctggcgtgaggcggtggctgccgtggacgagatcatcgtggccacggaattcgttgccgatgccttccgcgcagtgactgacaagcctgtgacccggatcccgttccccttgctggacgccgagcccagccgccttgcgcgcgccgacctcggcctacccgacggcgctttcgtgttcctgtgcaccttcgactgcaattccgcagtggcacgcaagaatcccggcgccgtcatcaacgctttccgcgcagcgtttccgccggagcgcaaggacgtcgtgctgatgttgaagtccagcaacggccatcgaaacccggacgccctgcgccagttgctggctcttgccggtgccgactcccgcatcctgctgcgcgatgacgtgatcgatgtgcggcatctgcaggcacttcagtgccactgcgatgcttatgtttccctgcatcgtgccgaagggcttggtctgggcatggccgagtgcatgcgactgggtaagccggttatcgctaccggctggtcgggaaacatggatttcatgaatgcaggcaacagcctgctggtggattacacgctggtgcctgtcaaaaccggcgagtatccacacgccgaaggccaggtatgggccgagccggacgtccggcacgcggccgcgttgatgcagcaggtggtcgaccgcccagccgacgttgccgaccgggtcgggcgggcgcgtcgggaaattgaacatggcatgtcgctgcagcgctcaggtgcgttgctggcggcgtacctggagagccccccccccttggccgtgccggcgtcgccggatggacgcggtctgtctggagcaggaaccccatga

SEQ ID NO: 512600 - DNA, 795 bp, Stenotrophomonas maltophilia
atgagcagtgtgttgcgctccatctggagctaccgattcttcatcctctcgtcgatcaagaacgatcttcgggcgcggttcacccgcagcaagctgggcgggctgtggatggtgatccacccgctggcgcaggtgctgatcttcgcgctgatcctgtccgaggtcctgtcggcgaaactgccgggcgtggacaacaagtacgcctacgccctgtacctgatggccggcatgttgttctggacgttgttcgccgaaaccattcagcggtgtctgacactgttcatcgacaacgccaacctgatgaagaagatggcgttcccacggctgtgcctgccgatcatcgcggcaggcaccatgctggtgaacaacgtgctcctctgcgcggccatcttcggtgtgttcgccgcgctgggccacttcccggacgcgaacgtgatctggcttccggtactggtgctgatgaccctcgccttggcgatgagcctgggcaccctgctgggcgtgatcaatgtcttcatgcgcgatctcggtcaggtcatccctgtggtgctgaacgcgctgttctggctcacccccgtcgtctacaacctcaacgcgctgcccgcgcgctaccaggcgtggttcaagttcaaccccctgtatgtgctggtcaccagctatcagaacgtgcttgtctacggcaagccgccgctgtggggccagctgggtggattggtgctggccacggccctgctggcaggtgttgcattgttgatgttccgcaagtccagcgctgaattggtggatgctctatga

SEQ ID NO: 512601 - DNA, 1218 bp, Stenotrophomonas maltophilia
atgagttctctgttgaaagtacgtggcgtcggcaagtgctactcgcgctggaacagcgagtggatgcgtttcatgtcctggttcggcctgccggttaaaccggcggaacagcactgggttctacgcgacatcagtttcgcggtaggccctggcgaaagcgtgggtattgtggggcagaacggcgccggcaagagtacgctgctcaagctaatcaccggcacctcccagcccagcaagggcagtgttacgcagaagggcaaggtgtcggcgatcctcgaactgggcatgggcttcaacctcgacttgaccggacgccagaacgtctaccacgccgccggattgatgggccatccgcagcaggcgatcgccgacgccatggatgacatcgaagccttcgccgagattggcgagtatttcgacgcgcccgtgcggacctattccagcggcatgcagatgcgcgtggcgttcagtgtggctaccgcattcaggccggacctgctgatcgtcgacgaagccttgtcggtgggtgacgcctacttcgtgcacaagtgcttcgaccgcatcaaggccttccgcgagcagggcaccagcctgctgttcgtgtcgcacgatcccaccgccgtgcaggtgctgtgcgaccgagccatcctcctggagggggggcggctgctgctcgacgccgatcccaagcaggtcatcgactactacaacgcgctgatcgcgcagaaagagcagggcacgatcaacgtggcagtgcgcgaggacggcgctgctgcgatctcctctggcaccggcgaagcagccatcgagaccgtgcaactgctcaatgacaagggcgaagcaaccgaatatgtcgccgtcggtgagcccgtgagccttcgcgttggggtgaaagtggctgccccgatcgacaagctggtcttcggctacatgatccgcgaccgtctcgggcaggccattttcggtaccaacacctaccataccgagcaggtggtctcgggagtggtggctggtcaggcgctgaccttcagcgcagacttcatcgccacgcttgggcccgggacctattccgtgtcactttcgctcagtgatgcccaggaccatcttggtcacaattatgaatggcgcgacatggcccttgtattctccgtcgccaacatggacaagcagtacttcatagggaccagctggatacccccccggatatccatcgcgtga

SEQ ID NO: 512602 - DNA, 1527 bp, Stenotrophomonas maltophilia
atgtcatccagtcaggaaagcttgatttcagccgacgaggtcatgcgtcgcgtgcgcatgcgcctaggcgttggcgaaatcggcacggggggggcggcttcggccgtcctcaccagcgtggtagcgggaacccacagcgcggcgccgaatcccgccttcaagccgccgactgcggacttcaagaagcggaccgagtatgtgctggccgattttcttggctacgacgacctcgcgttcgttacccatgcgtacgaagcgatcctgcatcgcgcgcccgacgagcacgcacgcagccatctccaggcgctgcgttcgggtgcggccagcaagatcgagatccttgctgcgctgcgctggtcgccggaagggcataccaacggggtgcacatcgatggtctgttgatcccgtacaagctgcatgcctggcgccggatcccggtcctgggctggatgctgcactgggtgcatgcgctggtgcgcctgccgcgccatgcgcgcgccgtggaaacccacatctcggcggtcagtggcgatctgcagttcttccagggcaccatttcccaggtggtggccgaacaggctgcgcgtctggagtcgcaggagcaggcgctgcaacgcatgcccagtactacccaggtggatgagctcgggcagcgcatcaacgtgctggcagagcagatggccgaacagctcgccacgctgcaggctatgccgcgcatgaccgaggagcttgcggccctgcaggcgatgccgcgtttccgcctggcaccgcggccgccggtggcaagtaccgaggccaccgccgcgacggtcgatgcgtcggcggttgattcggacctggacgaactgtatgccgcgttcgaagatcagttccgcggccctcaggccgagattcgcgaacgcctgcagccgtatatcaagtttatcacagacgtaggcgcgggtaccccgtcagcgccggtgctggatcttggctgcggtcgtggcgagtggttggacatgctgcgcgaacaaggcctgcatgcctctggcgtggacctcaacagcctgttcgtggaggaatgcgagaacaggggactgagcgtcgagtacatcgacgcgctgagcaagctccgcacgcttccggatgcatcattgggcatggtgacgctgttccaccttgccgagcacctgagtttccgtacgctgatcgacctgttcgatgaagtacggcgggtgctggtgccgggcggcggcttgatcgtggaaacgcccaatccggaaaatgccctggtcgcccagtgggccttctacatggatcccacccatcgcaacccgctgccgccgcagatgctgcgctggctggtgcaggcgcgtggcttcgcgcagtccgacatcaagccgctcttcgaggcgcgtgttacgtccgaggtcgacttcgttgccgacgacatccccggttcggccaccatcaatgcactggtcaagccgctccacgcatcgcgcgattacgcgatcatggcgcgcaagtcggtgtcggaaccgtga

SEQ ID NO: 512603 - DNA, 912 bp, Stenotrophomonas maltophilia
gtgacttcgaaggtgctggtgacaggcgcgaccggcttcgtcggtgggcacctgctggcggcaatcgccgctggccggttcggtccgcagtgcgcggccgtcgtgcttccgaccgggctggacctgcgggacggcgatgcactggctgcgttcatcgccgatcagcgcccggaagccgtcatccacctggctgcgcagagcttcgtgccacgcgccatcgccgagcccaaggaaacgtacgagatcaacgtgatcggtaccctcaatctgatccaggcgctggaagccgccggtttcagcggtcgcctgctgctggtgagctcaggcgacatctacggccgggtggaggagcgcgacctgccggtcactgccgccactgtgcctcatcccggcaacccgtatgcgtccagcaaactggccgccgaagagctgtgcctgcaatggtcgcgtcggaccgccgcgcaggtgctggtggcccgcccgttcaaccacattggaccggggcagagtaaccggttcgttgtatcctccttggcccatcaggtaatggccatcaaggagggacggcaacctgcagtgatcgatgtcggtgacatcgacgcaacgcgcgatttcagcgatgtacgcgacgtggtatccgcctatgcggcgatcctcgcccacgggcaggatcagacccgctacatcgttgcgtcgggcgtagagcgttcagtggcgcagattctgcgccgcatgcttgagctggcgcaggtgcaggcggatatccgggtcgacgcgacccggcttcgcccttccgaacagcgacgaatggtggccgatcccttcgccactacccatgacacaggctggcgtccactcatcgatttcgatcagacgctcgccgacatattgcaatcagtgagaagccaatga

SEQ ID NO: 512604 - DNA, 972 bp, Stenotrophomonas maltophilia
atgagcaccaaatccgcattgattactggcatcaccggtcaggacggcgcctacctgtccaagctgctgctggagaaggattacaccgtgtacggcctgctggcccgtcgcagcaccgataccctgtggcgcctgcgcgagctgggtgtggacaagcaggtccagctgattgatggcgatatttccgacctgtcctcgttgatccgcgcgatgcagctctccgctgccaccgaggtatacaaccttgctgcgcagagtttcgtcggtagctcctggcagcagccggtgctgaccgcgcagctcgacggcgtcggtgtgatcaatatgcttgaagcggtgcggatcgtgcgccccgacgcgcgtttctaccaagcatcgaccagcgaaatgttcggactgatccaggccgagatgcaggacgagcgcacgccattctacccgcgcagcccgtatggcgtcgccaagctgatgggccattgggccaccgtcaactaccgcgaaagccacggcatgcatgcctccagcggcatcctgttcaaccacgaatcgcccctgcgcggcatcgaattcgtcacccgcaaggtgaccgatgcggtcgcgcgcatcaagctgggcctgcaggacaagctgcacctcggcaacattgatgccaagcgcgattggggttttgccggcgactacgtcgaggccatgtggctcatgctgcagcaggaccacgccgatgactacgtgatcgccaccggcatcaccaccaccgtgcgtgacatgtgtcagatcgccttcgcccacgtcggcctggactaccagcagcacgtggtcatcgacgagaagttcctgcgcccggccgaagtggacgtgctgctcggcaacccggccaaggcccagaaggtcctgggctggacgcccaagaccagcctccagcagctgatcatctcgatggtggacgcggatcttcgccgcctccaggcctga

SEQ ID NO: 512605 - DNA, 2280 bp, Stenotrophomonas maltophilia
atggaagacaagttgaaccagcgtattgaactgagcgaccggcgcggtgcgcgcctccctgccgtggcttgggcggcgggggccacgctgctggccctgctgctggtgtggtggtggggcacgtttcaggccgacccccgccacgctccgcaactgcaggccgaaagtgtgcagatggacggtttccgcgtggagggtaagggcttccgcgccgtgggtggccagccttcgcattcgctcgccggacaattccgcctgcgtgcggacaagcgctattccttcgcgttctccgtcgatgccgccccgggggcgcccgctgccatcgtggtggacctgttcggaccgggctacgacaatcctgcccaggagcggacgttcgccacccagccgggccagacctccgtgcattggtcggacaccatggacgtcgggcacgacgtgccggacgtggtgtcgctgcgcatcttctacgacgggcctccagggctgctgctcagcgacatccgggtggttgaagtgccgacctggcgcatctgggtcggtcacctgttgatggcattgctgctcgccgccgctgtggcgctgatcgccgccgtcgccgactggacccgcaaggatgacgcggtggccgccgcgtacattccgtggtcgttgctggtcgccctgtggctgagcgccgcgctgattcggtacgttgccgcgcagctgttgccttactggtccggcgacgaatacgtctacaagatgatcgcctcgggcatctgggccggtggcggtcgatccggcatcccgctgcccgaccagatccagcacgcgaccaacctgcccaacatgctgtacccgtatctgatcgcaccgagtttcatgatcggtgattcgttctataccggcgtacggttgatcaatgcgttgatcgttgcctctgggctgttccccacctacctgatggcgcggcgcttcctcaatggtcgcctgagcttggtgatcgcggtggccgccatcgcactgccgggggtcttcatctccgcctacgcggtcaccgaggtgctgtacttccccctctacctctgggcctgctgggcgggcgtgcgctgcctggaacgttccggctcgatcaccgcgccgattgtcttcggtgtctggatcggcttgatgctcaacgtgcgcctcaacggcatcaccgtattgatggcggcgttgatgacgtggggactcgttgcgctgcgtgaagggacactacgtcaattcttgacgcgtccgacttggttgctggcgccgctgtcaagctacctggtcttcaagatggtgacggtcagcctgtcggcgccgactaccgatgggctgggcatgtatggcaaccgcctgggcggctggcagcatacgatcatgtccgacctgcacggcgcagccgggctgctgctgggccacctgacgatcctgtcgatcccattctcgctggcactggctgcgggcgtcgccatactgctgccctggcgcaaccagcgcacgccggcacaggtgcgcacgaccagcctgttcctgctgctcgccacggccggcgcaatcggcatggcgatcgtgttcaccgtcggtatctcgcccagcgacttgggcgggcttggacgctggcacagccgctattacttctcctctttccccctgctgttgatcctgctgttcgttccccgtccgcgccgcgaacaatcagcactggcctggcatgtctactggggcgtgctcgccagcgtgctgtgcgccgcgttgctgttcgtgatggtgctcaagctcaatgtctcgccctggttcggcgccaccgtggacagcatggaagcacagtggtaccggttcacgcgatggtggctggtcggttttgtggtcctggtgctggcgatcgccgctgtgcgcgacggctggctgcggcggaccctgcagctggcgctgctggccacgtggctgacggtggccaacgccggcacctggcacgagctcagccgcacccccggcgcgtttgacgcgcgctgcggcgccctggcgcatgaaatggtcgcccatgaccccggtggcatcgccgtggtggccagtggtcgccgcgaactggtcgacaacgtcttcttcctgccttacctgccggtcgccatgcgcatgctgcccgacggcggcgtggtggatggccgcacgctggcaaacgcgcgctacgtcttggcggatgagcgcatccaagtgacacatgcaacccgtctccccggcacgggtacctgcagcatctataaggtcgactga

SEQ ID NO: 512606 - DNA, 3072 bp, Stenotrophomonas maltophilia
atgagcaatgagcacagcccacttcacgtccccgccgaacccatgcgcgtggcgcgcccagtttcggtcgtgatcctgacctggaacggattggaatacaccaaaccctgcctggccagtgtcctgaagcacaccgacacctcacgcgtagaggtgatcgtcgtcgacaacggcagtaccgacggaacggtggagtacctgagcaagatcgccggcatctccaccatcttcaaccgcgacaacctgggtttcgtgcgcggcaataacgcagcgctgcgcctgatcgataccgatcgcgacgtcatcctgctcaacaacgacaccgagatcgatgacccgcactggatcgagaagttgcaggccactgccttcggcgaagatcgcgtcggtgttgtgggctgccgcatccgacgcctggatggggccgatttccagcacgctggcacctacatccctgaccgcagctactgggggcagcagctgggctcgggtgagaaggacatcaaccagtacgcctacgaccgggaagtggagggcgtagtgtttgcgtgcgtctatatccgccgtgaggtcatggacgcggtgggcttcctggacgaagacttcttctcctactacgaagacaccgactactgcctcaaggcgcgcgccgccggcttccgggtcatgaactgcggctcgctgaccatccgccaccgcgagcatggttcgacctcggtcaacaaggtcagccacaacgacatgttcctcacgtccaaggaaaccttcctgggcaagtggaaggaagtgctcgatgcccgctaccagtacaaggtgcacctgcattcgaccttcttccgcccggtcggctatgcgatgaccgctcggcagatcgccagtggcctggacaatgcaggtgtatcggtctcctacgagtacctgtacggcctcgacagcgtcctgcccatcgccgaatcgcgcgcccagaacaccggcgtctatacgctggaagttatcaagcagcgcgaagcacccggcccggacgtgccgcggctggtctatggtcaggccgatgccttcaatcgtgtgaccgagggataccgcatcggctacaccatgctggagaccaccggcgtgccgaaggagtgggtggacggctgcaacacgatgaacgagttgtgggtgccaaccgagttcaacaaatggaccttccagcgcagcggcgtgaccgtgccggtgaaggtgatgccgctcgcgctcattgacaccaatcacttcaatccgcgcatccgcggcatgaagatcgatggcgtcttcacgttcctctcgatcttcgagtggggtgagcgcaagtcgccggaaatcctgttgcgcgctttcaaccgcgccttccgcagtaccgacccggtggtgctgatctgcaagtattccaacagcgacccgggcgtcgacccggaggccatcatccgcgggctgcagctggaccccaatggcggccgtatcgtgtattcggtcaacgaatcggtgccgtattaccaggtggcccagctgtaccgctcggcagattgcttcgtgctgccgacacgcggggaaggctggggcatgccgctactggaggcaatggcctgcggcatcccggtgatcggcagttactggagtgcccagcaggccttcatggacgaggacaacagctatccgctgcaggtgtcgctcacgccggccgaggcgaagtgcccttactaccatggcttccagtgggcgctccccgacgaagaccacctggtcgcgctgctgcgccatgccttcgagcatccagacgaaacccgggccaagggtgagcaggcggcgcgtgacgtgagtgagctttggtcgctggagcgctcctctgaacgcatgcgcgcgcgcctggccgcgctcaatccgcagggctccagcctgccggaagtgcccgctgcggtgcgcagccgtatcggcatcgatgtttcacgcgccatgggcggtgaagtgtccggtgtgggccgctacgtcgcgatgctgaccaagggcctgtccgaataccaggcagaaaccgggcgtgcgcgcgattacctgctgctgcctgggttcggcgacttcgtgcatcccgactacgcgcccggcaagccgtccggcctgcagacacgcctcggcagtggcatgacgctgtaccgcggtccgctgcccgcgttcaaggatccggaccatttcgtccccgggctggacctggtgtattgcgccggcaacgtgttcccggttggcgtgggcgccaacgcactcatggtggtgcacgacacgacgttcctgtcgcatccggcgtaccacaccgccgagaacattgccctgtgctcgagcaacttcgagcgcgcggtgcaggccggtgcaagcttcgtggccgtctcggagaactcgcgccgcgacttcctcaagcactacaaagttgccgaagaccgcgtgcacaccatccactgtggaatcgatccggcgaccttcaagtcggcatccaggtcgcagatgcacagcgtgagccagcgttacgagctgcccgaatcgttcttcctgtacgtgggcagcatcgagccgcgcaagaacctgatgaccttgctcaaggcgatgctggcctacgacggcccggaaaccctggtggtggtgggggcgtcgggctggctcaacgatgacctgcgcaaggtaatgaaaagcgccggtgccaaggtcaaggtgctcggctatgtgcccatccaggacctgccggcgctctacagccgcgcgacggcgttcgtgtacccgtccctctacgaaggtttcggcctgcccgtggttgaggccatggcctgtggaacgccggtcatcacctcggccaacagctcgctgcaggagatcgccgagggtgcgggcctgctgctgcaggatccgttggatcccgccgaaatgacccgtgcactcgagcggatttcccaagacagagcctatgcacagcaactggtgcaggcaggccgcgagcgtgcgacccgatacagcctgcagaaccaggtggcaggccacatcgagctgttcaacaaactgatcaaggagtcgtga

SEQ ID NO: 512607 - DNA, 552 bp, Stenotrophomonas maltophilia
atgcgcacgttgccgtggatcaccctgctgctgaccagccttgccggctgcagcgccactgaaacaccgcccagtatgtcacccgacggcgccgccacgtcggccgagccggcgggtaaagccgcactggccacggtaccggcgtggatgtccagcgctgcggccgatgcgtcgctggtgtgctatctggacgtcgtggaaggcgccctttccggtggaaacggatggcgtgccgctgcaggcgatgccatccggatcgcgggctgggcagtggagacgggcgcgacggcgcagcgcgccggggcgatccggctgcacagcctggcgccgggcggtacggatgtgtatttcgcggccgaacgatcggatcgcgctgacgtcagcgcgtcgccgcagttcgccgccgcgccgccgtcgaatgcggggctgacctccagtatccggctcgatggcgtggcggcggggcagtatgagatcttctacgtgattggtgacgctgggaaggccgtggcctgtaccttgggcccctcgcgcgtgttgaccgttggctaa

SEQ ID NO: 512608 - DNA, 438 bp, Stenotrophomonas maltophilia
atggtctttgagatcgcacaacggcgcagctggtcgcagcgactgagcgtcaaggcgctcaggtcactggccggggagatgggcaggtttggcctcgtgggcggcatccagctggcggtcgactgggcactcttcgtcgccttgtcttgggccgggttgggggtggtaccgtctaaccttgtgtcccgggcaggcggtgccgcgttcgggtactggctcaacggcaagtacactttcgccggcggcagcgggcttggccggaaccagatgatccggttcgtggtcacctggatcgcgatgagcgtattgagttcagcgatcgtgtggatcgtcgggcacaaggcgggcctgggctgggcgtggctggtcaagcccgccggcgacgccgcgcttgccctactgagcttcttcatttcaaagcattggatttatcgatga

SEQ ID NO: 512609 - DNA, 987 bp, Stenotrophomonas maltophilia
atgaattctccttccgcaccgtcccgcatcgccgtcgtgattccctgctacaaggtgaccaggcacattgccggcgtggtcgcggcgatcggcagcgaagtagcgctgatctactgcgtcgacgatgcgtgcccggaacggagtggcgatttcatcgaggccaacgtcaccgatccccgcgtgcgcgtgctgcgccacgccgtcaaccagggcgtgggcggcgcggtgatgaccggctatcgacaggcgatcatcgacggagcgtcggtggtggtgaaggtcgatggcgatggccagatggacccgacgctgctgccgcagttcgtcgcacccatcctgcgtggcgaagccgactacaccaagggcaaccgcttttgggatctgcgccagatcaagcagatgccgccgctgcgccgaatcggcaaccttggcctgagcttcatgtccaaggcctccaccggctactgggatctgttcgatcccaccaacggctacaccgccatcagcacctcggtggccagccacctacccatggaccagatcagccgccgttatttcttcgagacggacatcctgttccgcctcaataccatgcgcgcggtggtggtcgatattccgatggacgcacgttacggcgatgaggaaagcggactgaaggtcggcaagatcctcggtgagttcgccttcaagcacgcgcgcaacaccttcaagcggatcggctacaactacttcctgcgtgacctgtcgttggcttccttcgagctggtcgctgcgctgggcctcctgctgctggcagccaccttcggtggctggcattggtggcactcggcccaagacggtgtgtccaccccactgggcacggtgatgatctccacggtggccgctgtttccggcctgcagttcctgctggccttcctgggctacgacatcgcgtcggtaccgcggcggccgcttacggccctgctggtgccgcgcaggccagactga

SEQ ID NO: 512610 - DNA, 855 bp, Stenotrophomonas maltophilia
ttggacatccgccctgccggtacggcaccggaactgcttcgccattaccagtcgattttcgccaagtgctttccacaggccacgcacctggacgcgggatatctggagtggttgtatgtgcgcaatccggccggcccggtgatcggcttagatgcgtgggatggcgatcgcctggccgcacattacgcatgcattccggtggcggcgattgtgggcggtcaggcctgccgggtgatgctgtcgctaaatacggcgaccgatcccgattatcaagggcaggggctgttcaccaaactcgctgagggtacgtacgcggcgggagccgagcagggcatggccgccgtgtatggcgtggccaacgccaattccactccaggcttcctgcgcaagctcggcttcaccttggtgggtccgttggacgccaaggtcggggtcggcgccctgctgccggagcgggccttgtcggtcctgggggacgtgcaattccgccgggactgggaccgcgcctcgctgcagtggaggtgcgccaatccgcaccgtggctaccggctggctcgatcgagggcgggcggagctctcgcccatgcgccaaccggcaagccgctgctgtcggcgttcgctgcgcttcccaaggcggtggaggggctcgagtatggctcgccggggatgggcatgcgtctgcacctgggcatggtgccgcgctcgatgggggcgctgaatggtgcctggttcgagctgccggccgggctgcgcagcagccccttgaacctgatcttccgcaccttggatgggcctatgcaggtgcccgccaccgatgccgtgctgttcagcgtattggacttcgatgcgttctga

SEQ ID NO: 512611 - DNA, 762 bp, Stenotrophomonas maltophilia
atgcgttctgatattggccccgtggtgttcctactggcgcatccggacgatgagttcggtgtgttcccgtggatcgaacgcgcattggcagatagtcgcacggtgcgctgcgtatggatgaccgatggtggctggggcgggcaggacatcgggcgtcgccagcgtgaaagcgaacacgtcctgaccgcgatgggcgtgccgctggacgccatgcattttctcggcggtgagcacgggttcgccgacggcgatctgtggaatcgcttggacgaggtgatcgaggtcctgcgtgcgcgttattgcacacttgcgcccagccacatcgtggtaccggcatgggagggtggtcaccccgatcatgatgcttcgcatctggccgggctcgcattggctgctgagagtggcggcgaagtgctgcagtacaccctgtaccagggggagaaactgcccgggccggtgttccgcgtgctttcgccgctgccggccaatggaccgcaccagaccattgccgtgagtgcgggacagcgcgtgcgctacatcaccgcatgcttcggttttcgatcgcagtggaagagcttcgtgggcctgctgcccttctacgcattgaagctcgccttcagccgataccccttcgtgctgcagccggtgcaagccggccgtaccgcgcagcggccccatccaggcccgctgctgtacgagcgacggggcggacccagctatgaggcgttcgccgaacgcaccgcgccctaccgcgaacgatag

SEQ ID NO: 512612 - DNA, 1359 bp, Stenotrophomonas maltophilia
atgacgctcccttgtttcaaggcatacgacattcggggccgcgttccggaagaattggacgccgccctggccgagcgtattggcgccggcaccgcgtccctgctgggatccggccctgtcgtgctgggacgcgacatccgccttagcagcccggaactgcaggccgcgctggaaagaggcttcaccggttccggccgggacgtgatcgacattggcctgtgcggcaccgaagaggtctacttccagaccttccatcggcaagcggccggcggcgtcatggtgaccgccagccacaacccgatgggctacaacggcatgaagctggtacgcgagcacgggcgccctatcagcggcgacaccggcctgtttgatgtccgcgacttcgccgcaggcgatgcaccgctgccctccggggaggggcaggtgcgcagggataccgacaaaaccgcctacatccagcacctactggggtatgtggacgtgagccatctcaagcccctgaagatcgtggtcaatgccggcaacggtggcgccgggctggtgatcgacgaactggcgccgcacctgccatttgagttcatccgtatccagcacgagcccgacggctcgttcccgaacggcatccccaatccgctgctgccggaaaaccgcgccgctaccgcagttgcggtgcgtgcccatggtgccgatttcggcattgcttgggacggcgatttcgaccgctgcttcttcttcgacagccacggcgaattcatcgaaggctattacctggtgggtctgctggccgtagcgctgctcaagcgtacgcgaggtggcaagatcatccacgacccgcgcctgacgtggaacactgtggaaatggtcgaacaggccggcggcgtgccgatcatgagcaagaccggccatgcgttcatcaaggagcgcatgcgcgccgaagacgcgatctatggcggcgagatgagcgcccatcattacttccgcgatttcgcgtactgcgattccggcatgatcccgtggctgctgattgccgaactggtctcgcagaccggtacctccttgggcgacctggtggccgaccgcatgcgggccttcccctgcagcggcgaaatcaacttccgcgtcgaggacgccaagaccaccgtagcccgggtgctggcgcactacaccgcgcaggacccggtgctggaccacaccgacggcgtcagcgtcgaattcgccacctggcgcttcaacctgcgcagttccaacaccgaaccgctgctacggctgaatatcgaaacccggggcgatgccgcgctgctgcgcgcccggaccgaagagctgaccgccctgctcggcggccaagccccccaacactga

SEQ ID NO: 512613 - DNA, 330 bp, Stenotrophomonas maltophilia
atgatcctcgtgaccctggccatgctggcctgcgggcaggtgctgttcaagcaggcatcggcgcacctgtcgttcgcacggccggcaagcttcctgtcgggaacattcatcattgcgctgttcatctacggcgctgcaacgctgctttggctggccgtactggcgcgggtgccgctgtcgctggcatttcccttctatggcctctcgttcctgctggtccccgcctttgcattgtggctgctgcacgagcccatccggccacagacctggatggggggcgccgttatcctggtgggcgtagtgatttcttcttgggggcagcgtcagtag

SEQ ID NO: 512614 - DNA, 900 bp, Stenotrophomonas maltophilia
atgacgaacatggatatcgcgaagatccaggtaggccagcaatgtcccgcctgccacttgccccttggcacgggcctgcaggattggcatcgtgcctgcggccgatgcacctatgaaggcagcacgttgagcgtggacatcgatgttcacggcgatagggaggtggtcgatgaagcgattcgcgaggagggtcttggccacctgcgcaagcagaacttcgaggcattggaggccgaactggcggcgcgagtcactgccgcgggggacggacgtccccgcctgctggatgttggctgcgcgcatggatggttcctcgaggcgggccgggacgatttcgatgtcaccgggatcgagcccgattcgcgcgttgccgatatggcggtcgcgcgtggcctgccagtgcggaagggcttcttccctgacgtgctcacctctgatgagcgcttcgatgtgatcgtgttcaacgacgtgcttgagcacattcctgacatcggcgcggcattgcgcgcgtgcgtgcgccatctgcagcccggtggctgggtggtggtcaatgctccggccagaacaggcgtgctttaccggatatccagggtgatggcaaggcttggcgtcaccgaaacatttgatcgcatgtggcaaaaggggtttccgtcgccgcacgtgcattatctggatgatgccagcatggagaccatcgccggccatgtcggcttggaactctcggcggtgcgctcactgccgtcgatcagcacacacggcctttacgcccggatacgcacagatcggagcgtctcgccggtcaaggccggcgtgttggccgctgtgctcacactggccagtccggccatgcgcttgctcccggccgacatcaaggtctggatgctgcaggtcacccgctga

SEQ ID NO: 512615 - DNA, 2058 bp, Stenotrophomonas maltophilia
atgagcctgcgccagtcgttgttcccgttgctgcgcgcggtattccgggtcttgccgctgtcgcaggcgcagcgcgaccgcctgcgtacccgctggctggcccggcacggcgactgggtgccaccgccgccgaagggacggcaggacgcgggtaggccgcgggccagcgcgcagctccgctggcgcgcggacgaggccgcgatcggccaccgcccgcaccagaagggcgcgctgccggagccgatgcccgccacgctggtcgcgttctacctgccgcaattccacaccttccccgaaaatgacgcctggtggggcaagggcttcaccgaatggcgcaacgtcacccgtgcgctaccgcagttcgaaggccacatccaaccgcggcttccggctgatctgggtttctatgacctgcgcaacccgcaggtgatgcgcgaccaggcgcagcttgccgccgagtacggcatcggcgcgttctgcttctattactactggttcagcggccgcacgttgatggaggacccgctgcggcaatggctggccgatgacagcatcgacctgccgttctgcctgtgctgggccaatgaaaactgggcgcgacgctgggacggccgcgacgacgatatcctgatcggccagcagcacagcgctgaggacgatctggccttcatcgcacatgtcgcgccctacctgcgcgaccgccgtgcattgaaggtcgaggggcggccgatgctgctggtctatcgcccgaacctgctgcccgacgcccgtgcgactgccgagcgctggcgccgctggtgccgcgacaacggcgtgggcgaaatccatctggcctacgtccagggcttcgagcgccccgatccacgcgacatcggctttgacgctgcggtcgagtttccgccgaacatgagcaatccctcttcgctgtcggcacagcagtggctgctcaatcccgatttcaatggcgatgtccgcgattggcgcgaattggccggcgaaatcgccgcccgtgccctgcccgattatccgctctatcccggggtcaaccccggttgggacaacgaggcccgacgttccggtcgcggccgcgtgtacctgcacgcctcaccacgtggttaccgtgactggttgcgcaccacgatccatgaacgcctctccgcagcaccgcaggcgcagcgactggtgttcataaacgcttggaacgagtgggctgaaggtgccgtgctggaaccggatgcccgcctcggccatgcttggctgcaggccacccgtgatgcgttgttgccggctgccacccggcatacgccggcaagaccatgcgtggtgattcatgcctggtatccagacgttttcgccgaacttctggacaagctgaaggccaccggcctgccttggcgcgtggttgtcaccacaagccacgagcggcatgctcagatcaggcaggtgctgaaagccagtggcatcaatgctgagatccgcgcatttgccaaccatggccgggacattctgcccttcctgcacgcagccgaatcgctgcttgaagacggcgaggatattgtcttgaagctgcacaccaagcgctccatccaccgcaaagatggcgaccgctggcgtaatgagctgattgatcgcctgatggcgcccgaccgggcgtccggtatcgtcgatgcgtttgccaaggacccctctcttggcctggtaccgccggaagggcacgtccaacgcctggactatttctggggcgcgaacgaacgtaacgtgcaggcattgctgagccgtttcggcgtagcacaaggcgacatcaacgccgatagtttcatcgctggcagcatgttctgggtgcggcttgaagccctgcggcccatgcttgacacgcacctgcagccgtcgctgttcgacaccgaggccggccaggtggacggcaccctcgcccacgccatcgagcggaccttcacgctcgtcgcgcgccatgcgggctaccgccagcaggatgcagccgccctgctaggcctaccctcgccccaggacacgacgtacgcctacgctcgccgcagttga

SEQ ID NO: 512616 - DNA, 669 bp, Stenotrophomonas maltophilia
atggatagcgtgagtataagtgctgcctccgggagcacgcataaagatcccgtcacgggtgagccggccattcaggcccgtgacccgattgacgaactcttggcaatgggggtggctccccgcttgctcatctctcatcaactcgtttgcatggactggttggccgtgcaccgccgagacaagttctgcctgtgctatcacgacagcacgggcgcggtcgtgacggaaacggtgggcgccgcccaacttctcactcgtgcacaggagatcggttggcggcccgtcgaggacccgatggagcctagcgctggttgccacctcttcgaagagacttcgtacaatctccggcgaggcatccactggtatgcgagtgcttacgacgataccgacgaaatgcttcctcttggctttcctgaggtcgcgctgacagcgggacgagagcggcagcgtcggcgcgatgcggcagcggatagacgcttcaagcgcacacagcaggagactgccaagcgggcgcgggaaaaagcaaggcgcagtctcgaaaggcttgccgaagacctgctgcgtaatccacctgccgatggccctgagcttagaacaatggcccaggccagacgcgcggctcgcgatctagtaaacgacactatcgcccacctgagtggccctaggtag

SEQ ID NO: 512617 - DNA, 270 bp, Stenotrophomonas maltophilia
atggccgagccggacacgccgccgaagaacagcgaggacaggatcgacacctggcccaggccaccgcgcaggcgcccgaccagcgacgaggccagtgcgatcaggcgctcggagatgccgccgcgcatcatgatttcgccggcaaagatgaacagtggaatggcgatgagcgaagcggagccggtaccggccgagatctgctgcaccagcacgatgctggggatatccaggtacagcagggtggccagcgccgcagcggccagcgcgtag

SEQ ID NO: 512618 - DNA, 918 bp, Stenotrophomonas maltophilia
gtgagattggcagttggcgctcgtttagtcgctgggatattgctgtttgctggtatcgccggttgcggaagagaatctccgaaggatgccatagcgcgggtatctaatccgaaatattcagccgctggcgattctcagcagcagattggtcagataactctcccgccgaacgaaagtcgggcggcggatacaatagctatgctgcggaccgatgcgaatcttggcaatccgaaggcggcttgtcgcttggccatagaactagatacttgtagaaggtcagtaatctacaaggaattcttagaaggagtggatggccagcaggagcatagcgttgagatgactgatatcctttcagtcgatccgatacaaagtgcaagacgttcgctcgccagattggagcgacattgtgagtctatttctgactcggattacgcgaacgcattcacctatcaaaagaatgcggcagcgcgatcccccgaactaatgagatggctcgttgcctctccggcattgaatagaaatgaatttctttccagtttggaggaatggtcagagtacaaagcactggccgagaactatgtgcaaaaggctataagagacgcggattctgacaactattttacgcttctttttatctatcaacccaaatccgaactaagtagagcgattccatttgctgtagacgatgagggcatgttcgttgctctggtcgaattggggactaggaatcgtgtccgtctaccgccaaggattattgaagtctcgaacaaattgaaagtccgcccatcagtcctcgcgtcagcccaagagaaattaaggctgctagacatgtatggttggggtagaaaaggtattgaggcgccaaccgagaaatcatctcacgcagttccggataaatcgctgtgcgttcagatatag

SEQ ID NO: 512619 - DNA, 933 bp, Stenotrophomonas maltophilia
atgctcgaccagcagccgctggcggcgctggtgctggactgggccgacagcggccagccgttgcaggcgcaggtgcaggtggatgccagcgacgatctgcagcactggcgcccgatcggccgcgacgtgccgctggtggacctgcagcgcgccggcaagcgcctgctgcagcgccgcctgcaggtggatggggccgcgcgctacctgcgtgttctggcgcagggtgattcgcagctgccgaccctgcgcggcgtgctggcggagctgccgccagcgccggcgacgctgccgtgggaatggctgtcgctggagccgaccacgaacggcaagggcgagtacaccttcgagatggatggccggttcccggtggcacgtgccgatgtggccagcaccgataacagcctggtgcagtggacgctgttcagtcgcgatgacgagggtgccgagtggcagcgccgcagcgcgccgtggatcgcctaccaggtgcagcagggcacgcagggccagcgccagcagtcggcggcacagccgctgggcggggtgcaccgcgaccgctactggaagctcgtggcgaatccggcggaaaccgccaccgccccgacactgcggctgggctaccagccggaagtgctggtgttcctgagccagggcgcggcgccttacgcgctggcggtgggcagcgcgacggcgcgccgcaccgacgcaccgatcggcgtgctgatcgaggaactgcggcagcgcaacgatccatcgtggcagccgaccctggcgcgactggaaggcagcccggaaccgctggcgggtgatgcggcgttgaagccgcgacgcgactggaagtcgtggttgctgtgggcgttgctgggcctgggcgtgctggtggtgggtggcctggcgctcagcctgcttcggcagaagccgacgccttcggcgtag

SEQ ID NO: 512620 - DNA, 1788 bp, Stenotrophomonas maltophilia
ttgaaggaaattaagaaacttattgaagcaatttcaaagttcgagccgggagcacctctcagcaagttcatcggcagtatacgattcccgaacttcaagaacattgagccggggaccgtcattcattttgactttccacttacaatactagtcggagcaaatggtagcgggaagagctccgtactgcatgcactttatggcgctccagacggccagacgacccgagatttttggttctctaccgagcttgacccaattattgaagggaaaggactaggtgtttctagatacatctattctcactggaatgaagcaaccaagtcattcgttgagacgaggaaagcaagagtccggagtggcactaagcttgactactgggagccgacaaaaatcgtaatcggcgatggaatgatccccttgccagcccccgccccagccggcgcggcttccgacaggtggcttccggtagaccgctcagttgttcatattaatttcaaggcagagattagtgcctttgatagattcttctactttgaaacgggacaaacaaaggaagaaaagcatgcagcaatgcttcgcgaagcaagacggctcaaggatgttatcgacaagaacagcaaaagcctagtcctctggaacagagagagagttttcgagaatagaaggctctctacagaagaattgaagtgggttagacacatccttggacacccgtacgattcagctacgattgtcagacacactctctatcctggatacagaggccaggacatcagcgtggtatttgaaagaaagtcacttcgttattctgaagcatttgctggaagcggcgaagtagcaattgtcagctctgtggtcaagctcttagcggcaagcgagttctctctcattctactggacgagccagaaacatcattacatcccggcgcacaggttaggtttctccactttattcttcattgcataaaactaaaaaaagctcaagtcgtcatatccacgcattcagcagagtttctttccagccttccagaccatgcaatcaaggtactggaatcgactcccgacggcaaagtaacaataacaaaatcttcttccgccctaactgccttcaatcgactgggaaagaagaatgaaggtaaacttcgcgtaatcgtggaggatgagcttgcgaaacgaattgtcgatatcgctcggagaatgctgccggcaggcgaatcagacgttattgaagttgtagttgtacctggcggtgccgatatgattctcgcccattacgcgccgtctgcaatggctgcgaaggacgatacttttgtacttcttgatggcgatcattcacttcgagttcccttgcctgatttggggatgctcgcaccgacagatgaacccaggcttggagagcttattcaagcgtccattggaaccaccccgtcgctatatcttagcggcggaaatgatgaaaatttaaacgtcaagaagattgcggcgcagaagaattacattcgctggataagcgagcgagttgattttctaccccactctgttcccgaagaaatcgttatcagaggagcatttcctgacctaattgataagctagatggcactagcagtgcagccaaaactgcgctctatgatcacttagcaaaatctgtacctggcgctggcgcgagtcagatcgtagaaattgcaggatatgagatttccaaaaattcttccggaaatttggatataattgaggtgtctcgaaagctggaaaaattcatcttgacctggcgcacatccaatgattaa

SEQ ID NO: 512621 - DNA, 945 bp, Stenotrophomonas maltophilia
atggctggatttcaggtcttagctggcgtcgagatcgaccccaaagcagctcatacgtatagactcaaccacaaagatgtctccttaattcaaggtgacattcgcgagacagacccagtttcgcttatgagatcaatccgaatgaagaagggaaaactggatcttcttgctgcctgccctccatgccagggtttctcccgcattcggacaaaaaatggcgcaagaagcaatagcgatccaagaaacgatctcgcaatgatctttcttgactatgctaaagccctcaagcctcgacatctattgcttgagaacgttccgggattaaggcgccagccaatttggcaggatttaattcggggccttgaagcagaaggttacgagattgttgaaggggtgatcgacgcaaacgactatggagtcgcgcagagacggaaacgattgattatgctcgcctcgctaggccagaagcccagcctaccatgcgtttccgaaagtcgtcccaccgtcagagacgcccttcagaactctgacattgcttccaatgataaacttcatcaaatgcggacagcccatgctccgcatgtcatgaaattgattaataaaatccccagaaatggaggaagccgatcggacctaccggacgacctggtactccaatgccatcagcggacctcgggatttagtgatgtatacggcagaatggcctggtcaaagccagcgccaaccattactagcggatgccacaatccttcaaagggacgttttctgcaccctgatgaaaaccgagccattacgcttagagaagcagcactacttcaaggttttccagccgactaccagtttgaagcaagccacggcaaagaagcaatcgcattgatgataggcaatgccttgcctcctccaatgatctgcgcacacgccaaagcccttgtaaccaaacaataa

SEQ ID NO: 512622 - DNA, 456 bp, Stenotrophomonas maltophilia
atgcagagctactactgggtcaagaccttccacatcgtgttcgtggtggcgtggatggccacggtgttctacctgccgcgcatcctggtcaacctggctgaaaccgcgggccagccagcggtgaccgagcgcctgcagctgatgggcctgcgtctgtaccgcttcggccactcgatgttcgggctggcgttcctgctcggcctggtgctgtggctgggctacaaggtcatccccgatttcccgaccatggtcgctccgggcggcgccggttggctgcacgccaagctgggcctggtggtgctgctgctggtgtatttcggctggaccggtcgcctgctcaagggcgtggccaagggccgggcgctgccgtcgtcgcgcgcgctgcgctggatcaacgagatcccgctgctggcgttcattcccatcgtgtggctggtgctggccaagccgttctga

SEQ ID NO: 512623 - DNA, 1308 bp, Stenotrophomonas maltophilia
atgctctatcaactgcacgaactgacccgcaacctgctcgccccgtgggtgcaccaggcccaggccaacgccaagttcttcgccaacccgggccattggtggtcgcagatgcccggtgccgatcgcctggcggcggtcaatgaactcttccatcgcatcggcaaggattacgagaagcccgagtggggcatcaacgaaatcgaggtcgaaggcgagcgcgtgccgatcgtcgtgcacgaggaagtgagcaagccgttctgcaagctgctgcgcttcaagcgccacagcaatgaagccgaccagctgcacaccatgctcaaccagccgttcgtgctggtggtggcgccgctgtcgggccaccacgccacgctgctgcgcgataccgtgcgtacgctgctgcgcgaccaccgcgtgtacgtcaccgactgggtcgacgcgcgcatggtgccgtccagcgaaggcgagttcgggttggatgactacatcgcctacatccaggagttcatccgccacctcggcgtggagcgcctgcacgtggtgagcgtgtgccagccgaccgtaccggtgctggctgcggtttcgctgatggccagccgtggcgaaccgacgccgcgcacgctggtgatgatgggtggcccgatcgatgcgcgctgcagcccgaccgcagtgaacaacctggccacgcagaacccgctgtcgtggttcgagaacaacgtcatccacaccgtgccggccagctatccgggtgtcggtcgtcgcgtgtacccgggcttcctgcagcacgccggcttcctgtcgatgaacccgagccgccacttcagctcgcactgggatttctacaccgacctggtcaagggcgacctggaagacgccgacgcgcaccgtcgtttctacgacgagtacaacgcggtgctggacatgccggccaagtactacctggacaccatccgcgtggtgttccaggacttcctgctgccgcgtggcgagtgggtggtgaacggcgagaaggtcgatccgtcggcgatccgcgataccgcgctgctgagcatcgaaggcgagctggacgacatcgccggccttggccagaccgaggcggcgcaggcgctgtgcaccggcatcgcggccgatcgccgcgagcatttcatcgtcgaaggtgcggggcactacggcatcttcagtggccgtcgctggcgcgaagtggtgtacccgaaggtccgcgacttcttcgccgcgcatgccgaagcaccggcagccagggccacgaagaagaaaagcaacgtcaccccgttgcgccggaaggcgggctga

SEQ ID NO: 512624 - DNA, 918 bp, Stenotrophomonas maltophilia
atgcagctggaaggtgcccagcactgccgagccggccaagccgccgagcgtctgcgtgatcgacagcgtcaccaggaaggtgatcatgtggtccacgccctgcttcaatgcggcggaaatgccgagcatgatcagcgggcccatgaacatgccggcgcccaccgacgccaggaactggctgacatagaagtcgtgcggccgatcgaggctggtgcggtgctggtcgaagaacgcggcggctcccagcagcaggatcgccatcagcaactgggcgatcaaccgcttgggcccgaaggtcaacgcggcgccggcgatgccggtgaccacgccggccaggattaccacgaacagcgggcgcatctggtccggccccatgcccagcgtacgcatcaggttgaccaccccgtaagactgctcggtggtcaggaagcggatcaggaaggcgccgacgatgaaatgcaggaccggcagcgtcgacagccagcggatctgcagcagcggattgcgccggtagtgctcgatgatcagggcggtggtggacagcacgatcgaggcgatcagcgcccagcccagccacgctgtattgagccaccagcgcgtgtagccctgcgccagcacgatcaccagcagggcaacggccggggcaagcagggcgaaggtgaggaaatccagcggttcgaaggccttgacctggatgcccggcggcagcttcagcagcaccaccgccgcgaacgcacacagggccagaccggcctcgaacgagtacagctggtgccattggccggtatcgaccaggcccggcgagacgatccaggcaatcggcaccgccagctgcgaaaggccgacaccgatcaccagcaggttgcccgtgaaccgtcgcggcagtgcctgcagcatgtacagcgtgcccagcgttga

SEQ ID NO: 512625 - DNA, 234 bp, Stenotrophomonas maltophilia
atggtgtggatctaccgggaatgtcatgcggcggcgcaagcccgagccgatgaatcactgcgttgcagtaccgccgcgtatggcgcggctttgccccgcgcggctgaaaacgcgacaatgcaggggtttccccgccgcgcgcccaccctgacggcgacgggggaaagcgtggggcccggccccgcgcgcgacacggttgcacgtggcccggcgctggcgccggccttcccctga

SEQ ID NO: 512626 - DNA, 201 bp, Stenotrophomonas maltophilia
atgcataacgagagcccgctcccgatcggtagagtcgagccatgttcggcggatgagaagcagccgaccagcggtcggctctaccagggcggaagcatcgagcagcagcgccagcgtgcgaagcgcacggcgatgtgggtcggcgccatcgccgtactggtctatgtcggcttcatcctcagcggggtgatcgggcgatga

SEQ ID NO: 512627 - DNA, 963 bp, Stenotrophomonas maltophilia
atgaacctacgtgatctgaagtacctggtagccctggccgaccacaagcatttcggccgggctgccgcctcctgcttcgtcagccagcccacgctgtccacccagatccgcaagctggaagaggaactgggcctgccgctggtggaacgcgcaccgcgcaaggtgatgctgaccccggccggccaggaagcggcggcacgggcacgggtgatcgtgtccgaagtggaacaactgaaggaagcggcgcgacgcagccgcgacccggaagccggcacggtgcgcctgggcatcttcccgaccctcggcccgtacctgctgccgcatgtgattccgcgcatccgtgaacgcttcccggagctggaactgctgctcgtcgaggaaaagagcgacgtgctgctggaccgcctgcgcgaaggcaagctggatgctgcgttgctggcgctgccggtgatcgatgaccagctgcatgccgagttcctgttcgaggaaccgttcctgctggccgtctccggccgccacccgctggcccgtcgcgaacacctggacgtgcaggagctggccacgcagaagctgctgctgctggaagacgggcattgcctgcgcgaccaggcgctggaagtctgccgcctgttcggcgccaacgagaagtccgaattccgcgctaccagcctggaaaccctgcgccagatggtcgccgctgacgtcggcatcaccctgctgccgagcctgtcggtgcagccgccggtgccgcgctcgaacaacatccgcctgctcgatttcaccggcgagggccgtcccagccgccgcatcgccatgatctggcgccgcagctcggccatgaacgacttcctgatggagctggccgaccagttcaagcgcttgccacaggcactgttcaccctggatgcgctgcacaccacgtccgatgcggcagccctgcccggccccgcgctgaacggctga

SEQ ID NO: 512628 - DNA, 198 bp, Stenotrophomonas maltophilia
gtggacgcgctggtgcgcgcgaccgatggcttcgccggatcggtagtgccggccgctggccggcaacgccttgcctgtccgttccgccgctcgccggccagcggccggcgctacccgctagccaaggcgtcgggccattcggcgttcgaggccgagaacgtggacgcgctggtgcgcgcgaccgatagcttcgcctga

SEQ ID NO: 512629 - DNA, 2202 bp, Stenotrophomonas maltophilia
gtgcggcggggaagcgtcctgggcctcgcgctggccctgtccatcggcagcgcgcacgcggccatcccagacggggtggaacccgtgcttgcagcgcccatcctggccaacggccagcccaccaaggaccccgtgttgctctggcagcagaacggggcttgggtcgcggaagccacgacgtggcagcagctcggcgtgacccttcgcccgggcgaagaggggcaggacctgaccgaccaagccttgggcgtcaaggtggcttacaaccccgagaacgccacggtccagctcaccattcccgccgaccgcaagccagcccagcagctcacccgacgcggcaccccggtttcccaggtgtcgcccgccatcgggggcgtgttggtcaactacaacctcgccacccagatcgcaggcggccaacaagccacgtccttggcactggacgcgcgcaccggagggcgttggggcgtggtctccacgacgggccagatcaaccaatcccccaatgggtttggcatgcgccgcggcatgacggcctggcagaaggacgacctgcagcgccaacggacctggcaagccggcgatgtctacgccacgccccgcatcggccccgtggcgctgggcggcattcgcctcgcgaaggacccggcagccctggatccgctcaccccgacgtggcccgtcccgaccttgggcggcatcgcgttggatccggggcaggtcaaggtcctgtccaaccaagccgaaatcacgcgccaggacgtcaaggccggccccttcaccgtggacggtcgaaacgtggcattgggagccagccaaacggctgtagtggtgcgtgacgcctacggccgagaaaccgccgtttccactgcgcggctctacgtcgccccaaccctgctgcgccccgggctctccgcgtgggaaatcgccgccggccaggtccgcgaagacgaaaaccgctacggcacggccggcgtcagcgcttcctgggccaagggcgtcaacgaccgctggaccatccgagccggtggccagctggacgagaacggcaagggcaacgtcaccgtgggttccacctgggccccaggcacctggggcgtgctcgacggcgaggtggggcgctcaagcgacggcgggacgcgctgggctgttgcctacgactacaaagggcccagttttggcgtgcggctggaacacgaagaaaacgacggcttctggcgactgcagagcgagacggcgctgcccatcgcctcgcgcacccaagccagcatttcctaccgcccggatcgccgcttcaccttgcgcggcacctacagcgccatcgacacggggcgcaccagtctggccttcgcctccctgggcgtgagcgcgaacctgagtgccgcgggccaggtgtccgccaacgtgctccgagaccttcaaggcaacgatcttcaagtggccgccagctacacctaccgcttcggcagcaaggccagcgtgggcgtgcgcgcccgccaagccccaggccaggactccctggccacccgggccacctaccgcaccgagggcggcgttcgcttggccgcggagcacaccgacggcgacccgcgcagcacccgggccacggcggatgccatgacgcgttacggcgacgcccggatcatgctggaccgctacgacgggcaaacccaggtggcggccaacttctccggcgccgtgttcctggaccaccgcggcgtggccttcgggcgacccgcctacgccagcttcgccgtggtggatgtgcccgggcaagcgggcttgccggtgcgggtcaacggggcgccggtgggcatcaccaaccggcaggggcgcgtgctggtcaccaacgtgccctccctgctgcccaccaccttcagtctcaaagataaagacctgccggtgggcgtggagatcggggagaccgaaaagcaatccgtggccccccgccaaggcggtgtgcgggtgaccttccccgtgctgacgcagaacgcccgggccttcaccgtgaccggtgccagcatcgcgcccggcaccttggcatctacgccgaacgaacaagccatggtcggctacgacggagcgctctacctggaacgccccgagccggggatggccgtcgaggtgtcgggcgtgtgcaaagccgtgttgccgtcgcccctaccgggggtggacgaggtggcctccgtagactgccgttga

SEQ ID NO: 512630 - DNA, 732 bp, Stenotrophomonas maltophilia
atgcccggcagttgcgccaggggccaggttcaaggtggaggcgtcctggacaatccagtcttccttggcgtcaccttcgatgacggtgtgcgtggcgccaccgcccaggtttccggcgcaggcagatgctgccatgccgagcgaaagcgtgctcgccagcagcgccgatacgggcagggcggcggggcgactgaccgcatgcttcatgcgcaacctcctgtgggccggcatccaggcgccccctccaagcgcgatacgttggctgggaggatcggacgcgatccggcgccttcctgcatgggtcgcccgctgcaacggacgctcagctcggtgctggcctggggccaatcgccggccggctgcagcgccagatcgtgccaggtggcaccgcgtctgccgaccacggctgtgggccggcgccggaagacatgccaagcgtcacgccgattcggtggggagcccgtgccacgctggacaagcgcgtcgtttatcaggaagaaacgtggcagtgctgccgcaatggcagtaaggaggcgacgacgtaccgcgacgttcatggcgaaactcctgttgggatggatcttcaggaagagcgctgcaggaacgtcgatggcgtggatcaagcgtgcacacagatggatggctggagccccttccggcccgggcgttgcagcgcgtacgcatcgcattgcgacccgtcaggtcgccggaggttccgctgcaccacaatga

SEQ ID NO: 512631 - DNA, 2007 bp, Stenotrophomonas maltophilia
atggtcgaaggattgggtgttgccgcgttggtcactggccatgggcagctgaccctctccggctccagcctgactggcagggctggcctgaacgcaggcagccgtccgcatgaaggcgtcggcctatggataacgatgggagcggccatcatccagaacggatcctacgtacgcggtgaccgccacgggggctatctcgggtcgtccagattcgagggtttcagtacacaccgctccaccctgctgctggatggctcgcgcctggaaggaacccgtgacagcgcgatcatcgtcggccacgtttccgggaccgacaccgaggtgggcatcacgctgcgcaatggcgccgagctgatcgctggcaacgggatactcatcgacctccagcccaacatctacgacagcacactgaaggttcacgccgatgtggaggtcagcaacagtcaactgcgcggtgacatccgcgcgcatgcaggcggcaccggcacgcttgcattgattgacaatgccgcactggtgggtggcataaccggcgcgtttgatgtgacgctcaaccggggtggccgctggcggctcagcaagcgcagcgatgtggcgaccttgaatctgggtgatggcggcacggtatcgctcggcgacggctccgccttccacaccctcaacgtggccggcaacttcatcggcaacgacggcaccatcgtgttcaacacggtgctggccggcgacgatgcggccaccgacaagctgatcatcggcggcgatacccgcggccgtgccaatgttcgcgtcaacaatgtcggcggcgccggtgcccagaccgacaagggcatcgagctgatccaggtgggcggcgcgtccaatggccagttcaacctggccggtcgcgcggtgggcggccagtacgagtacttcctgcacaagggcaccggcgccgatggcaactggtacctgcgctcgcagctgccagccacgcccgagccgtgcgcaatcgattccagcctgcccgaatgcagcgtggtggatccacccgaccccgttgctctggtcagcccggttgaaccactggctcctgtccaccccgacccggttctgcgccccgagcccggtgcctacctggccaacctgcaggccgcgcagacgatgttccgcctgggctaccacgaccgcaacgccggccagaactccggccgcgcctgggcccgcgtggacggttcgcgtaacggcttcgatgccatcagccgccagctcgacatccgtggcaacagccaggcactgaccgtcggcgccgatctgtggcgtcacgattcgggcagcagcgtgggcgtgatgctgtccagcggcaacgccagcagcacatccatcagtgagctgaccggctactacgcccgcggcaaggtgaagggcgaggcgctgggcgtctacggcacctggcgcggtggcaacggcaccgatccgtatgcaggcttctatgtggatggctcgctgcagcgtgcgcagttccgcaaccgtgtggaaggtatcggcctggatacggaacgctacgacagccgtgcctggcagggtgcgctggaaaccggctacgcgttccgtgtgggcggtgccagcaacggcggcatctatctggagccgcagctgcaggtgggctacagccgctgggacagcaaccgccacaccgaggccaacggcacggtggtgagcaccgagaatgccaatggcatgttcggccgtgcaggcctgcgcctgtccggcgtgacccgttggggaaacgctaccgccgaggtgcagccgtacctggccgccaacgggctgcatacccgcgccgaatcgtggatccgcatggatgacgagatcgccgatgcgcgtatcccgcgcagccgaggcgagttcagcggcggtgcgtcggtgaagttcgccaacggcatcggcgcctggggcgggctgtcgctgcagaaggccagcggctatcaccagaccagcgcacagctgggtgtcagttacagctggtaa

SEQ ID NO: 512632 - DNA, 177 bp, Stenotrophomonas maltophilia
atgagcatccattcctttgccgccgaacttgcggaggctgatatgggcctttacgcatgcgcggtgctgattgtcgtctgcctcggcggcgcaatagcttcaatcgtgattgagcaggcatggctggcgcttcgtcgcctgtggaagctccggaaggatcgctccaatggccggtga

SEQ ID NO: 512633 - DNA, 645 bp, Stenotrophomonas maltophilia
atggcgaacaagaatggggccgctgcgcccccgacgctggagagttggctggacttgcgaccaagttggttgcgaatggccgcagacggattggtccgagaccggcgcctcccgaatgatcaggaaatcgacgccctggcagaccattgtctgcaagaggcagccaaaatcctggcaacaaagcatcccccactcgcgcccggcctcattttgggaagccccaccgctggatcattgcgcattgattccgtattcgagatccgcggcgtgaacgcgatcggaccggatgcggtgctggatctgtcaaaaaaggggatgacggttgtttatggtgccaatggctctggcaaatccggttacgctcgcctgctgaaacacatctgcggcgcacgcgccaagggggtcatccatggcaatgtgttcgacggcgcaacgcaacccgcttgtgctcaggtcgccgtgaccacattcagtgaagtcgatggatccgctactcccagcacccttgcctggaacgcagcgtcaggaccacactccaagctaaacgcagtgccagtgtttgactcagcaacgctatggagcttggcgacaaccccagcgaagccacctacctgccccgttcgatgcgtttcgtcagcgccctga

SEQ ID NO: 512634 - DNA, 243 bp, Stenotrophomonas maltophilia
atggtcgtgccagaacgccagatgttcgatacctatctgtccgatccgcaggtctacgatcgtcttgaacagcatatccacgaccacttcatgacgggaatcaacgcggcaagcctgcgcattgaagacttccgcagcccgcactacaacacgttcttcgtcgatggcactaaggatcgcgatgccaacccgatcttctccgccaagcaccgggttctaccccgaaatcacggacggttgtaa

SEQ ID NO: 512635 - DNA, 912 bp, Stenotrophomonas maltophilia
atggaaaccgtccgcatcgccacccgcaagagcccgctcgccctctggcagagcgaacacgtcgccgaccgcctgcgccaggcccatcccggcgtgcatgtggaactggtgccgatgagcacccgcggtgacgaggtgcttgatcgctcgcttgccgcgatcggtggcaagggcctgttcctgaaggaactggagctggccatgctgcgcggtgaggccgactgcgcggtgcactcgctgaaggacgtgccgatggaactggacgagccgttcgcgctgccggcaatcctgccccgccacgatccagccgatggctttgtttccaacctgtatgcctcgctggacgcgctgccgatcggtgcccgggtcggtacttcgtcgctgcgccgccaggcccagctgcgcgcgctgcgcccggacctgcagctgctggacctgcgtggcaacgtcaacacgcgcctggccaagctcgacaatggtggctacgacgcgatcgtgctggccgtggccgggctggagcgcctcggcctgggcgcacgcatcgtcgcgcgcctgcagccgccacagtggctgccggcgccggcacaaggcgccgtcgcggtggaatgtgatggcggcaatgcgcgcctgcgggcgctgttcgccacgcttgatgacgcagccacgcgcgcctgcgtggaagccgagcgggcaatgaaccgcgcgctgcatggcagctgccatgtgccggtggcggccatcgcgcagtggcagggcgacgacctgcacctgcagggcttggtcggcagtgccagcgatggccgcgcggtgcgtgccgacgcggtgggcccgggcagcgacccggaggcgctcggccagcaggtggccaggcagctgctggatggcggcgccggcgagctgttgaacgcctga

SEQ ID NO: 512636 - DNA, 123 bp, Stenotrophomonas maltophilia
atgcggttgccggccagcggccggcactaccgtccgtccgtttccctggggaatcgcggctacctgttccagccgcagcagatgcagttggtcttccgcgcggtggccgaagcgctgggctga

SEQ ID NO: 512637 - DNA, 123 bp, Stenotrophomonas maltophilia; identical to SEQ ID NO: 512636

SEQ ID NO: 512638 - DNA, 774 bp, Stenotrophomonas maltophilia
atgtccgacggcaacgacactgcagtgcatgatggccacgcggctgataccgctgacgagcgcttcctggtccgcaacccgcgccagctgcgccagctgctgcggtcgctgatcgaccagcggtcgctgatcaacgcgcacatcgacggccgcgaccgctccttccctaccgccctgctcgacctcgacgaagacgaggacaccctgctgctcgatggcagcccgcaggaagccgccaaccgcgccgccgagcaggccgatcacctgctgtgcttcgcccagctcgaacgggtgctggtgcgcttccgcctgcaccagctgcagcgtgtggacaacgacggccacgtcgccttccgtgccccgctgccggaggaactggtgcacctgcagcgccgcgagctgtaccggctggagacgccggtcaccgactcgccccacctgctgctgccgcctggcgaagcgcgcgccgaagccctgtcgatgcgcgtggtggacatcagcggcggtggcctggccgtggtggtgcccaacgactgtgccgtgttcggcctgcagaagcgctatccggcacagctctcgctgcccgacggccccgacctggacatcgagctggtggtctgcaacctgctgccgcagcgccagcccaacggcatcgaggtcaagcgcgtgggcatgcgcttcgaacgcctgccgcgcggcgccgacagcgccatccagcgctacatcttccgcatcgaccgccagcgcaaggcacgccgcaacggcgagctctga

SEQ ID NO: 512639 - DNA, 372 bp, Stenotrophomonas maltophilia; identical to SEQ ID NO: 512330

SEQ ID NO: 512640 - DNA, 183 bp, Stenotrophomonas maltophilia; identical to SEQ ID NO: 500943

SEQ ID NO: 512641 - DNA, 684 bp, Stenotrophomonas maltophilia
atggatctggactggagcgcactgtggttgtcgctgaaggtggccggctgggccaccgcgatcaatctggtgctgggcgtggcactgggcgctctgctggcgcgtcggcgctttcctggccgtgagctgctggattcgctgctgaccttgccgatggtgctgccaccgacggtactgggttattacctgctggtgctgatcggtcgcaacggcccgatcggcgcgtggctgcagtcgtggttcggcatcaacctggtgttcacctggcaggccgcggtgatcgctgcggcggtggcctcgttgccgctggtgttcaagccggcacgcgcggcgttcgaggaagtggacaggcagttggagcaggccgcacgcacgctgggtgtgtccgaagcggctgtattcttccgcatcacgctgccactggcgtggcgcggcatcctcgccggcctgctgctggcgtttgcgcgcgcgatgggcgaattcggcgcgacgctgatggtggccggcagcattccggggcggacgcagacgttgtcgatcgccatctacgaggcggtacaggccgggcaggatgggaaggccaatgcgctggtgatcctgacctcggtggtctgcatcgtgatcctgttgctggccgcgcggctggtgggcgggcgtcgccgggagctgcgcgatgtggcttga

SEQ ID NO: 512642 - DNA, 2994 bp, Stenotrophomonas maltophilia
atggcagcaatcagtttgttcaacgtgcttgactggacgagcggcctggggcgcaagttccgccggaagagcggcgagccttcgagcgtgaaggaagaaatcatcgtcaaatcccacgaggagtatgaaaacctcgtggggcgctttgacgtgaccgatcgcgttcgcagtcgagagctcgatgtgccagaggctgaccgggatttcgcgctggagtgcggcgcggtctgggacgagaacgcccaggtgttcaaggtgcccgacggacgcaacgaggacgaattccaggagtggtggccgaaggttccggaagatttgcgggacacccaatcgcggatcatcacgacgaagcttggacggcgtgccgagggcttcctgcagggcaacgacatggggcagggcggcgacagcctggccactcccttgatgtatcttgccttccccgtgatcggcgttctggcgaccttcctagtgagcctcatcggctgggcaggctgggcagctctgttgctgaccattccttacttcattgccctcaagcaaggcgagggcatgaaggaggcactgaaggccctggtgcttttgcagtgggttccaatggcgcttcagttcatagttggagacagcaagggcggcaccgaggtggcaatgcaagccggcggcatggctgtgtatgcccagatggccaagacctatctttggtgggcccttggcttggcctttggctttgtgggcatcctgtttgtggtttgctttgtgtccgcggcctcgcacccccaccggggcgtcatcggcgggacggccgcgcgcttcattcaagcgatgaagtgggtggggctcatctttgccaccttggttgtcgccaaggtcctgccgtttggcttgggcgaggcggcaccttacgtgctggcgtgcatgtatgcgatgcaatacgccgaaggcaactttgtccagaacgccgcccggctctacctgcagaacaacgacaacaacctggccacccagggggcgttgatcaactcacacgtcaaggcccgtgaacagcaagccgaggcggccctgcgggacaagaccccgctgatcaccattgggcgcgccacgggacacctttccgacaagggctatggctactcgcccgacctgggcaccgtgatgatgttctcgtggagggattgtcagcagggcctgctggtattcggagccatcggatctggcaaatccttcgccgcgctgagacccatcgctcgtcggttccgtagagccgcgttggcgatggcatgtgtggcgccaggccacgcagatgcaagggagcgcttgaagcagcagaagcttgccggcggtggcgcgctcatcgccgacggcaaagacggggcgatcatctcggacttggagggattgttcgatatcgtcgtcaaacccgggatgcgggtggcgccatacgaagggttggcgccagatcaaatcgtccgggcattgcgcggcgcatcgggtgggcgcgtggacgagaaatccaagctttggacggatggtggcgatgcgttcctttaccacaccggcatcattcttcgtgcgctagtggatcacgagatggcttacaggtcttggtgttcggccaagctggaagggctggagcgtgcacagttggatgcggagcttgagctggtcaaacagcgcaagctggacgaggacgtggccgagactgaggcattgctcgagcggatcgccgaacagatcgccatccatcgaatccctgtgagcgacgacaggcaatggcaatacacgccattccaccacgccaagttgttgtccattgtggaacgcgtgattcccgccagccccgcgcctcgtgccaatgcaaagctgatggaggtggtgaaatacttgggcctggaagaggcggacacgagccatgacgaagaagggcgcctggcctacgcggcctacctgcaacagcaccgccttcgtcaagagagcgctccgcagaccatccacccggatctcttccgtcccatgtctcagctgcagagctcgctggaatgggcgttcctggagattcccgcgatgcatccggaacagaggcaatcgttcacgctcaactcacgagggctgctggagaagctcttgcgaggcgaaaagctgcgtgacagcaagacggacatgccttggcattcgattgagacgggcgaggtggatgtgtccgacgcgctctatggagccatggtaggcctcttcttgcccccgacccaattcggtgaagcgggtgaaatgatgatgcgcctgctcaaacagcgggtcatgaacggaatcaaggcgcgtggtgcattcggcgaaaagtggcgcgaagcgttgcctgggcaaaccgaggtgatgttgatgatggacgaggcccacctgttgttgacggccgatgacatcaacctgttctccgtttcgcgctcgctggggttgatgcccgtgcttgcaacgcaagggtttgaaagcttggtcaacgcctttgggtcagtcaacgaggcggagctgatggccaacacgatgcaatcggtgatcgcgctgaagtgctcgcacaacacccacgaatacctggaaaagcggttcggacaggcaacgttgaccacgttcaaacagcgcacccggggcatcgactaccaaggcggcatgaacaattggcgccactccgtgctcaacgacccggatcatgcctacgcgtccgcctacgacaagatgcgaatggaaggggccgggcggttgacggcctcgcgcatcgacgccgtgacggggcgccgctggcggattgggtcggaggacacgctgggccaagacgagatcgcgcgcgacattgacatgcccaccgggggcaagcgcgaggtgcagccgctcttcctgcaggaagaatactccgcccttcttgagccccgtggtcacgccatcgtggcgctgaaccgtgccggcatcaagcgaatcgacttggcggagctgctgcccgatgcggattga

SEQ ID NO: 512643 - DNA, 813 bp, Stenotrophomonas maltophilia
gtgcgtaaccagctcgacatcttcgatcacgacccagcccgcatggcagcggccaaccgcgccgccgcgtcaggtcctgtccgccaactcctcgtaattggagtaatcgtactgttcaacaccgccatatgcgcgaaagcggttcgcaaagtcgatggccaagccgaggaatacagccaggtacttacggaaaagttctatgtccttctcgttcccggtatacgaaaaactcggcaatccgctcaagtttgggatcggcgaactaaccaccatcggcaggagatctttgctcatctggttgatggttcggttgtaaccaaccaatgtggcgaggtcatcgccgatttcgtctcgaagatttggaattcgatcgagtacctgctctgtgccaggcaaaaacgagccacccgctgcccgcagcgctcgaacaaaagagtcgacacggtacttgggagctgtgccctgagaatccatgcccacccgtctttcgcatcgctttatttgaatcgcaagttggaccgggagctcagagacttcgtgcaacagcagtctgacgacaattcgcgcgttcgcttcgcgattgtccaccgcctcttgatgctgctgagctgcgatccgggtcgcttcctccgcgatctcagccgctcgcttggaggtgcggtaagcgagcatcgctaccacggtcgtagccactgctgctccgacaccgacacctaccgcggcccagtcggccacgttcccccagtccaccgcgagcgggcacatcgccatcgcgtaatccccctgtccatgttgaagccgattctgccatga

SEQ ID NO: 512644 - DNA, 1236 bp, Stenotrophomonas maltophilia
atgcctggctcaaagaggttgccggccagcggccggcactacccgaagcgcgaatccggtcggggacaagccctggtagagctggccgctggccggctgctctcgatgcctggttcaaagaggttgccggccaacggccggcactacccgaagcgcaaacccggtcggggacaagcactggtagagccggccgctggccggctgctctcgatgcctgcttcaaagggattgccggccagcggccggcactacccgaagcgcgaatccggtcggggacaagccctggtagagctggccgctggccggctgctctcgatgcctggttcaaagaggttgccggccaacggccggcactacccgaagcgcaaacccggtcggggacaagcactggtagagccggccgctggccggctgctctcgatgcctgcttcaaagggattgccggccagcggccggcactacccgaagcgcgaatccggtcggggacaagccctggtagagctggccgctggccggctgctctcgatgcctggttcaaagaggttgccggccaacggccggcactacccgaagcgcaaacccggtcggggacaagcactggtagagccggccgctggccggctgctctcgatgcctgcttcaaagggattgccggccagcggccggcactacccgaagcgcgaatccggtcggggacaagccctggtagagccggccgctggccggctgctctcgatgcctggctcaaagaggttgccggccagcggccggcactacccgaagcgcgaatccaggtcggggacaagccctggtagagccggccgctggccggctgctctcgatgcctggctcaaagaggttgccggccagcggccggcactacccgaagcgcgaatccggtcggggacaagccctggtagagctggccgctggccggctgctctcgatgcctggttcaaagaggttgccggccaacggccggcactacccgaagcgcaaacccggtcggggacaagcactggtagagccggccgctggccggctgctctcgatgcctgcttcaaagggattgccggccagcggccggcactacccgaagcgcgaatccggtcggggacaagccctggtagagccggccgctggccggctgctctcgatgcctggctcaaagaggttgccggccagcggccggcactacccgaagcgcgaacccagatcggggacaagccctggtag

SEQ ID NO: 512645 - DNA, 594 bp, Stenotrophomonas maltophilia
atgacggaacaactagtcgttcaccggtacgaacaacccgatgacaaggggctgagctggcctcgcatcgtcggcatcgcgtttgtaattgccctgcatctggccgccttcatgatgctcctcattcccgccgtggctcccaaggccgtggctgagaaggagcgcaacgtcatggtgaccatcgtcgatgcgccgccgaagccgtcgccggtcccgccgccgccgcaggcgccggtcgtggacgtgccggagccgcgcccgagcgatatcgtcaccccgccgtcgccccccgcgccgccggcacctgcgacctcgatcgaggccagcgtggacatctcgtcgaaggccatgaatccgccgcgctacccgccggccgccttccgcgcgggtatccagggcgaagtgatcctgatcattgatgtcgatgccaacggcaacgtcaccaatgtcacggtggaaaagtccagccgtaaccgcgacctggaccgtgccgcgatggaagcggctcgcaagtggcgcttcaacgccgctgaatctggcggtaagaaggcggcaggtcgcgttcgcgtcccggtcaactttgcgctgaactga

SEQ ID NO: 512646 - DNA, 348 bp, Stenotrophomonas maltophilia; identical to SEQ ID NO: 510954

SEQ ID NO: 512647 - DNA, 1074 bp, Stenotrophomonas maltophilia
atgaacggaattgaatccttcgcatcgattcaggtacttcgcggcattgcggcgctggccgtcgtgctgtttcatctgaagggctttgaagcagcggctggagcaagcaactcgctactcccctcctggattcgctttggatacagcggcgtcgatctgttcttcgtcatttccggtttcgtaatgaccgtcatcgctgccggtcgataccagagtccaagcgcatcactacagttccttagccgccgggcgtggcgtgtgctgccgatctactggctgatgagcgcatgcattgcagcctggagcgcattctgggtagcgcgcaatccagtcaccaactcggcgtttgatacgcagactctgatttcatcgttcctgctttggccccccggcgcctccctgatcattccggtgggttggacactggtgcatgaagcatatttctatctggccatggcaattgcgatctgcctggttcccgagcgcaggctgacagcctacctgttgggctgggcgcttctcgtggcaatcgtcctgaccttgcgcctgcagacaacgccagcgatgcacctggcatcatcaccgttgacctgggatttcattgcaggagcgttgatcggtctgcactggcgcagagtgccagccaggctcggcctgccgctgctgttgtgcggcatcggcatgtttgtctgcgcagccatctggctgaacgctgcaggcgtcgagcatccaggcgagctgggacgcgttgccctgttcgggagcgccagcgcagcggtggtccttggcgcggtgaactgggaagcatatcgtcggccacgcctaccagcgtggctgcactcgctcggcgatagttcgtattctctttacctgtcgcatttcttcatcatctcgctgtgtgtcgtactggcaaacaaactcggcggggctcattcatggtttcagcacgtgctttttctcgtcggagcactatcgctctgcctgattgccagccaagtattgttcaaatgggtggagcagccacttcagtccttcgcgcgcaagctgcaccgtcggcgcccgcaacccgcttga

SEQ ID NO: 512648 - DNA, 327 bp, Stenotrophomonas maltophilia
gtgctggcgatttcgccgttggtgcgggtgcttggctaccagtggccagtacatgaggacggggcgctggagccggttttgagcacggctcccacgctgctggtgatccagcgcctcgccgatttcagcctgcagaccgaggaactgtcaccgctggcctacgcgctgctgtcggtgttcggtgacgacagcgcgtcggtggatgaagcactgcagctgctgtccgaaacacatggcgtggcagcggacgcattgcgcatggcctgcgtgcctgttctgggcgagctgtgcgcggcgggcgtgctggttgcattgcctgatttctga

SEQ ID NO: 512649 - DNA, 939 bp, Stenotrophomonas maltophilia
atgggtgtcctaaacgtttgttgttatccaacctccattgctctcaaggctgctgatcatgcatatgtgtcttgtggagacggggcgtatgcgtggggatgttggggaggaaatagcggtggaactgtagttcgttctggggcgggcagcaccacgcgtgcagaggctatagccggtgacaagggccgagcaggcataactcactacctcataaatggcgtatgccaccagtctgcgaacagaattctcctgccagcacgcatcactgctaacaatgctcgtggtcacctgctatcggtttctatcttcgggctgtttgggcgcccctcagcgggtctcggtctcttcctggcacctttgtatttacatggttcgacatcgggtgatctagatgcgtgcatttaccaaggaactgcggcttcctctaatgccccgccagagcaggccttcattgaagcgagcatcgctctttacggtaaaacatacccagaattgctggttaaaagttctaatggaactggtggcagtcaacaggctccggaccagcaggtgggtgagaatcaagtccaaagagcggctgagtttaacattgagaatttcaagctatttgttaaataccgcgcggtagctagaggccagatgttcagcaccattcagttccataagatgatggttgcccgtgaagaatttgagcgatcgagagaagtcatcgagattgaatttggtgaaattggctccggcgggtggcaagatttcgttaggaagtttgatgatctaactctgcattttcaggaccgcctcgctcagatcttgccgcctcaggactacgaagctctacttgacatttctcaagagcgtcgcatggttctctcagaccccgagatcgttgagagcgtatatgcaccaggttccaaaccaagagggcccggccggagatag

SEQ ID NO: 512650 - DNA, 381 bp, Stenotrophomonas maltophilia
atgcaacgagggaccgcgtcatgctgtctacccagcttttcaacattcgttcacgtgcccaaggcttccccccgttcattgttcgccgcccgcctcaagcaggcccgggaactgcgcggcatcgccagccagcgagcgttgggggttctgatggggcttgataagaagctggcgagcagccgggtcaaccggtatgagaccgaggtcagcgggattgacttggatggattggggcgactggctgaagtgctgggcgtccccatggcgtacctcgtcgccgaggacgatcatctggcaactatcgttttggccgcctcccagttgtcatcagaagatcggatgcttgtcgccgaagagctgctcagaaagctgggttattag

SEQ ID NO: 512651 - DNA, 777 bp, Stenotrophomonas maltophilia
atgaaaaagaaccagacaaggatggccaccgccctggcggccacgctgctgttgagtgcccatgtcgttcccgcccaggaagccacccagcccaacccggagtcagggaagccgggcttctttcgacagctgggcaagagcctgaaagatgctggcggccagatgattggagtgaagcccaccggggccagcggaactcagtctgccggcaatgaagcgatctacacccctgtcagcggggccggaaagatccaggggctgttcaaatccgataaccaccagctcgcacaacaaggccggctggactggccccgcgtggcgttgacgttccaggaatggggggcgtccctgccttgctggacggtcgaagcgaagatctggaccagccccagcgcttctacagtggaaaccttccgaacgtgcgccaacgcggctttgaccgagacagacgacctgggcgacaccgccgaactcaacacggccgccctctggaaaggtcgcgacagcctgatgggcgttcgagtgccgtcgagcaagaccaacacaggggccagccggtctacaggccctaacccgcccagccagccgttcgtcgtcaacgtcagccgccccggcgtgactgacaaggccgttgatgtggcgcttcgcgtcgcctgggtcagcggctttatccagaccgccgacttgcacccgggcgcgtcggggatgctgactccgttcaaggacagccggatgtggatcgcggggttcaagccggaaggcaatcgagaccggtaa

SEQ ID NO: 512652 - DNA, 1137 bp, Stenotrophomonas maltophilia
atgacaagaagacgactaattcaggaaccatcaaagggaaaggtctggggtacgcgatgtgacggaagcatcgtcgaaatcacatccggaagctctggaaagctgaagtcacagttgaaagacttcccgaatgccgaagaagcactgaaatgggcgatcaagcaagagtggtcacgactgaaaaagggcttcgtactcgtgaaccctgctgctgccgcaggcgaaccctgcatgcatcgttatattggcggggggttcacaggagccctgatgattgcgggttgcaatgggaagctggcgaccaatcagcaccaggatgaagacacgcatggtgcggcaaccgacatgttgctgctcattggtgaagacactgagatcatccattgttggcgatcaagcaagacggaccttgcctggtcggcactacctacggatgaccggacaggattcctgattcgattcgactctggaatctacctttggacttcagatggcagtcctccccagcggatcagcgatgcaaccgtactgtcatcgcccttcctgacaagctccaacgggcatgccgcatggcatgacggtgagcaggtaacggtaatgagactcgacgatggaaggcacatcatgcagctggtgcgctcccctgcgatggttggcgggcattccgagcagatgatgggcacgctctcagcggatgccacgatgcttgcctgctgtgccaatccgggggagatcgagtacatcgatgtcgcccaggccaagactgtgcgccgacatcaggctgattttgaaatgatcgtcaagatggagtggagcgcggatggacgctggttgttggccttggagcaggatggacgatggcgcctgctgtgtctggacacggcaacaggcgaatcccgccacgggtggccagagttcactgacatgacgcggactgactttgcgctggacagcaatagcaggcgattggccgtcatacaccgcggtcatgttgccctttatgactttgcggacatgagggaaattcaacgtttccccgtggatcacctagtccgtactgcacacattgcatggacaggagaaaacaacatttcggtacggaccgactatggatgcctttccacgtatgtagtttga

SEQ ID NO: 512653 - DNA, 1950 bp, Stenotrophomonas maltophilia
atgagcctcacccagcccaccacgcggcaccactgtttcagccggctgacgacccatgtagggattctccttgcaatcattctggcgcaaggatgctccgtggtggctgcaaagaaagagtcccgagacagcacgtcaacactttcgatagagaggttgtctgacggagttaccagtgagacccaagctgcgctaagcaaacttggcttttcgccgaaggactgcatcgatagattcgaggactgctcgaagcggatgtggcaggccagccctttggaagaagaggaggcatactcttcgattgcagagattcttctggccaaagccattgccctagattgtaaaggcagagagggagagtgcgttgatgagaaagctcgcaatctggtcgcttccttgaagttcgcctatgcgtacctcttctttggctcccgaaggccggaggagcgagtgttcgagcggcgccaggagcaggtgaggcagttctacaatcgcgcccttgaagagcttgttccgctcctcgtacaaccgacgagcattggcggacgacttcctccgggattctctgttcatcctggagtatggctcgcccttagcgtgccagagacaggtgctagacagtggccagttgaactggtctccgcagaggggctcgccttcaagggcgtcagaaacatctatcggcgcgatggcttcggtgcagcgttcattgccgttcacacgaccgagaaccagcaagcttcagtcgctgagagtgagtatcgagagttgggctatgcctcggtcaccatcgtcgtgaaatttgatggaagtacggcgcgcgaagtggtggatgcaacgaggggcatcattgaggtcaaggacatctatcgcagtagggaggtgcagctgggaaacagtactgtgccactggcggcaaactactcagcaggatatgcgctttggctatcccgcagccatcttcgaaaagcaggattgatgggacttctcgctcgaagccgggcgcaggattatcatccgcaagtagtactaatggagcccttcgaccccaatagaaaggttgtaatcctcgtccatggtctagccagtagtcaggaggcttggatcaacttggccaatgaggtgcttggcgatgaaccactcagagagaaggtccaaatctggcaggttatttatccgacaagaatgccgatgctgattagccgcgagcgaattcagtcggccatagagtctacctatcattctcttgatcctaagggatcgtatccagccagcactaattcaattctcattggccacagcatgggcggggtaatctctaggctcatggtaagcgaacccgatgatgaccttctccggcgattccttccgcctagcttcaaactgactccggatcaattgcgagatctgaagtcccagccaatggcgatgcagtataccgattggaccccgcttccacaggtggacatggccattttcttagcagcgccccattgcggaacgcctgttgccgagcgaacgttcacccacatgcttgcgaagttggtcacagctccgatagacacggttgttgatttccagaatgcactgagtcatacgggtgctagcaaggagcagttgaaaaagctcgggctcaatcgcatgaacaccggcgtggatgatcttgcctcgcactcccagttcatgagggcgacctgccagctaccgatttccaagggggtttccgttcatagcatcattgccaggaggaatcccgcgtacgcacttgaacgctccagcgatggctttgttccgtacacaagcgcacatctcgctggcgcgcaatcggagctggtggtgacgtcaggacacagcgttcaagagacacccgaggccatcttggagatccggcgaatactgagagagtccatttcgctcaggcgtgaatcacaaaccgcacagccgaattga

SEQ ID NO: 512654 - DNA, 876 bp, Stenotrophomonas maltophilia
atgaatctgagaggtgcctcccgcgcgctcgacccagccctccttgagatgctcgtatgcatagcttctgagggtagctttactcgtgctgctgataagctcaatctgacccagcaagccattagcgcccaagtgaaacgactcgagcaaatcgtaggcagagttcttgttgaccgatcaaagacaggggctcgcctgactcagtttggagaggcactactagaacacgcaagattgctggcggacataggtgacagcgtccgccggcagttcgagtcagagcgctttgaagggtcagtacgcataggcatagcctccgagtttggggattccaggcttgagaagatgctgttcggccttagggaaagacacccgcttctagagctcagatgcaccatcggacgtacatcggaattgcttctggcctaccaggccgctcttctagacacaattgttggggcgcagcgaagtggcgatgcgcttggcgaggtaattttccgtgaggagcttgtatgggcaggagagagcggcggccttccttcaccaggagcagcactgcgacttgtgctatgtagcaatccaagtttcattcgagaggaagtgataagaaccttgacgagcttgaagcgccaatggattgtcacttttgaaagcgagagcgagttggcagtacaagccgctgttcgcagccactggggagttacggcagctccgcgtggagccttgcacgcaggaatcccatgcatcgagcttgaccatggggcggaacttccagcgcttggatccattgagtacttcttacttcataggcgcgcaagcggagcagtttcagatacgctcttgtcactgcttcgtgacccgaacctcgtgcgctag

SEQ ID NO: 512655 - DNA, 246 bp, Stenotrophomonas maltophilia
gtgtccaagtccatccatcgcaaagagtatgctgccctgattgaggctgtacgcgaagcgcggctagctgccggtctaacccaggctcaagtgtcgagcatgctgggccgcagccagtcgttcatcagtgacgtcgagacaggcaagcgcagggttgatgtggtggagctgagagatatcgcccgcctaacgggcctttcgctgggcaagctgatcactaactttgagaagcgaatcaaagactag

SEQ ID NO: 512656 - DNA, 633 bp, Stenotrophomonas maltophilia
atgagcaagcgccaataccgtttcatcacccaggccggaaccaggacaactctgatcctggcagcaacagcactgatcgctgcctgcggtggcccggccgacaaaaagatggtcacgaacggaacccaggagcagtaccgccactccatcgacgccatcgatgcaaagctcaacgcccatgaaagggcagcgttcaactgggcggttgccgggatgaaccttcagaagctgaatcaggcctacccaaacgcatcggtcagacaggtggtaagagggcagattgggcggatcaaagatgccaatcccaaggagataggcatgctgcgagaaaaagtcaaagagcaacttcccattcttgccgagcttaagaaggttagggcggttgacccagcttttcgactggaagacagcttttttggcctcaagccgatcatcacggctcgcatcgtcaacggctccacactgccattgagcgaggctagctggaacgcggccctatacatcaacggcgacgaagagcctgtagcctcgtcgaaggtgcgcagcgatttccgctcaatcgagggcctaaagcccgaccatcatgttacggctcgcttcaccgtcgggttcgtcaagggcgatcaaacctga

SEQ ID NO: 512657 - DNA, 432 bp, Stenotrophomonas maltophilia
atgcgcccgatcatcctagccatggacttagaaggaacgctgatctccaacgcggtaagtcagatcccccgcccgggcctttacgaatttctagagtcggcaaagtcgctctttgatggtctggttatcttcactacagttccagaacctagatttcgtgagatcgctggtctcttggcttgcgaaggtgcggtcccgggctggttcaccgacttgccatacatagactggactgggcctacaaaggatctagcctacgtttccaaggccatcggctctgtgtggcttttggatgattacgccccctatgttgagtcgggacaggagcgttgctggatccctgttcaacttttctgctccccctacctcgagaacgacgcaggactgaacgttgccattgcgacaatccggaagcgactgaacgagtgctag

SEQ ID NO: 512658 - DNA, 216 bp, Stenotrophomonas maltophilia; identical to SEQ ID NO: 511673

SEQ ID NO: 512659 - DNA, 1368 bp, Stenotrophomonas maltophilia
atgccggcgtcacgattgcgcccatttctggaactgtcgatcgacggggccgcgcgtgcagcttccatcatccggcgccattcttgcgcttggcaggcggtgagcgacagccacgccaggtcttcaggcagcagctcgcggccctcaggggtgatcagacgatcaccgaggaaagaaaaaccggcccaagggccggtcaggtcaatacggtggtgcgggtcgaactcaatcatgccgcgatctcatccttggccggggtctgagggcgcaggcaagagccgagccagaggcccagccattgccatgcggagccaacaaaggctgcggccgcccgatacagcatttcgcataatgtatacgccctcttcacgcgggagggcgcgtaagcgagtgggatatggccgtaggcggccctacgttacagccgagcagttccgtgatgcccggatcttctccgggctcacacgcctggacgccgctgagatgctcggcgtgtcccttcgcaccatcggtagttgggagctcggccgtgctcggccctcatgggcggccttcaagctgctgcgcttcctcaagcaaggcgccttcatagatccggcatgggctggctacacgatcgttcgtggccgcctgattacccctgagaatcacgcgattgagccccatgacatggcgtggctgtcgctgctggtgcggcgctcgcgggcgctctccgacctattgaaggtgcggcaagggcaggcggccggcgccggcggtcacgccggcgcggccgttgacctcggtcaattttcatcggttcgagatgcctcagatggggcgcccggcaggggccgcgaagcggccgctgccatgggcttgtctctatatccgacaagtcacaagcaattaccccaccaagtcgcccgggccctactgctgactggcgatgccagttttgcagggttcgttgacaatggggccaaagtggggccaaagtggccccatgaaaaagcccaagccagatgtacagaagttcaacctgaggatgcccgaggatctgatggaacgtgcccaggagcaggcctcggtgatgggggtctcactcaacgcgtttatcctgatggccctgtcggatttcgtgcgccggatcgaccagcaggcacgagcgtcgacggatgccgaagcggaatcgatcatcggggcgccgatcaagtcagcgcccaagccgagggccagccgtgccagcactgcgaaggcgacagcgtcgaagccggtggaaccaccgatgccccgtgttggccgcaacgaaccgtgcccgtgcggctcgggccgcaaggccaagcactgccatccggcgtactgctaagcccggggggtgcagcatga

SEQ ID NO: 512660 - DNA, 1047 bp, Stenotrophomonas maltophilia
atgaaatcacagaatccagctttgcgcataatgtatacgccctcttcacgcgggagggcgcgtaagcgagtgggatatggccgtaggcggccctacgttacagccgagcagttccgtgatgcccggatcttctccgggctcacacgcctggacgccgctgagatgctcggcgtgtcccttcgcaccatcggtagttgggagctcggccgtgctcggccctcatgggcggccttcaagctgctgcgcttcctcaagcaaggcgccttcatagatccggcatgggctggctacacgatcgttcgtggccgcctgattacccctgagaatcacgcgattgagccccatgacatggcgtggctgtcgctgctggtgcggcgctcgcgggcgctctccgacctattgaaggtgcggcaagggcaggcggccggcgccggcggtcacgccggcgcggccgttgacctcggtcaattttcatcggttcgagatgcctcagatggggcgcccggcaggggccgcgaagcggccgctgccatgggcttgtctctatatccgacaagtcacaagcaattaccccaccaagtcgcccgggccctactgctgactggcgatgccagttttgcagggttcgttgacaatggggccaaagtggggccaaagtggccccatgaaaaagcccaagccagatgtacagaagttcaacctgaggatgcccgtggatctgatggaacgtgcccaggagcaggcctcggtgatgggggtctcactcaacgcgtttatcctgatggccctgtcggatttcgtgcgccggatcgaccagcaggcacgagcgtcgacggatgccgaagcggaatcgatcatcggggcgccgatcaagtcagcgcccaagccgagggccagccgtgccagcactgcgaaggcgacagcgtcgaagccggtggaaccaccgatgccccgtgttggccgcaacgaaccgtgcccgtgcggctcgggccgcaaggccaagcactgccatccggcgtactgctaagcccggggggtgcagcatga

SEQ ID NO: 512661 - DNA, 849 bp, Stenotrophomonas maltophilia
atggctacgtgggctttgttcgcccttcatatgcctctagcgggcggtatgcatcgagcaagcgcggctataagaacagttgcctttctcgtatggaggagactggctgggccaatagttcgcagatggtttgcgagcgtggttgtgcgtacaagctgtacggcgatggggcaggtggccactactactccaccttcaacgattcaacgaattcgtcttatggcacctgtaggtctagtgatgaaaccccgcctccaaagccaaagcctgatcccggaccgggcaccgatcccggcactgatccgggcggcacggatcccggcggtggtggtacggaccccggtggcggtggtggtactaatccgggtggcggtggtggcaccgatcccggtggcggtggcgggactggccccggccctgatcccaagccttgccctgcaggtggcaaggatgccgatggcaagccctgtccaggcgaggggggcggcactgatcccggtggcggtccaaatcccggcgaaggcagcgggagcggcagtggtagcgccacttgtgcgaagccccctgtttgcagtggcgatgccattcagtgcgcccagcttttccagcagtggcgcgctggctgtcaggccgaggggctgggcggcaaggtcacaggtgatccaaccaattgcaaagctgcataccagtgcgaaggcaatgcggtcgcctgcggtcagctcgctgtcatgcgtaagcagatgtgcggcgccggggagggggacggcaacggcacactcaccggcgacggcacgtgcgctcaatccttcgtttgcactggcggtgatcccgttgcatgcgcggagttaa

SEQ ID NO: 512662 - DNA, 240 bp, Stenotrophomonas maltophilia
atggtcactgtccgtaaagccatcgcgttccttgccattggccttgtgtgcctctccctgctgctcgccgtgttcactgcctacgcgtggtcaatgcttggcgatgcgagcctctatgacgcgtttatcgcagcggtcaagctgctttccggcttcattgctgcgcttgtcgcagctgcttccttcaacgtcgcgtggcgacgctgcgtcggcgtgtcgtccgaagggcaggggggctaa

SEQ ID NO: 512663 - DNA, 1260 bp, Stenotrophomonas maltophilia
atgcgtgccagccgcagccggggcctttccggcgcgatcggaatcttcgagatcggcgatgtccttgtctgcccgtaccgccttcagcgatgcctggcgcaacagcttctgcccgccaatcccgcgatagaagacctccaccacgaaacgcggtgcgaaccaggtcgcggcgcgaaggtcggtgtcctgggtgggcacgtgcgccgtcggcttgcggccgccgccgccttcgatgcgcctgctgacttcgccgatcagttcgtccgagaacccggacccgacgcggccgacgtagagccagccatgtttcgggtctggccgcgccagcagcagcgagccgaacccggtgcggctgcctttcggcgcggtgtatccgaccaccgcgaactcgtcgctggccagctgtttggtctttcgccaatcctcactgcggccgctgtggtagctgcgatcggcgcgcttggaaatgatgccttcgaagtgctgctcaccggccaggcgataggcctcgtcgccatccccctgcacatgcgaactgaacgccaatggcctgccctgcccctccagcacggagtgcagcagggccttgcgttccagcaagggcgcatcggcgacgtccacgccatcaagatgcagcagatcgaacaatgcgtacgtcaggacaccctgccgctcgccggagagcgtggcctgcagcaggttgaagtcttccttggtgccggcgccggcgatgagctcaccgtccagtgccgccgaggtgaggcccagtgccgcgatcgcgtcacgtatttcaggcagcttgccggtccattccagtgcgttccgcgaccacagctgcacgttgccctcagccaccgtagcaaggatgcggtacccatcccatttgatctcatgcacccactgcccgcccttgggcggcgcgtcgcccagcttggccaactgcggctcaaacggtccggacggcccttccgccttttccgcgttactgagcgccagggccttcttcgcccagttctttcgtcgtgtgcgtgtggcgggtacgaccgtgagtttcttcttcgcggtctttccggccccggcacgcttcaggtcctccgggggcgctacagcaacatccgccagcagatcgtctgcctcgatatcgctggcaaattcatcgtcatccttgaacagcagccactgtggctggcgcgcaggcttgccggaacggaccagatgccatccacccttgagcttggcgccgaacagctcgaagcgtag

SEQ ID NO: 512664 - DNA, 2226 bp, Stenotrophomonas maltophilia
atgaggttgcagccgctgttcgtctccctggccttgacctgtcccgttgccttgatgccggccccgctgctggcggctccggccaccgtcgcgcgacaggccgaagccgcaccggtgttggtcaccgccgcacagtggcagcagatggccagcgaaggccgccgctacccgtggttcgccaaggagcaggcgcgcaccgaggcaacactgaagaagatgatgaaggccggcatcgacgtgccggtgcccagggacaagggcggcgggcgcacccatgaacagcacaagcgcaactaccaggcactgttggcggcgggcacgctgtaccggttgaccggcgacagggcctacgtggactacgcgcgcgacatgctgctgcagtacgcccagctttaccccacgctgggcccgcacccggagggtcgcggccagattcccggccgcgtgttctggcaggtgctcaacgattcggtgtggctggtcaacgccatccagggctatgacgcgatccgtgacgcgctgtccgccgaggaccgcgacaccatcgaatcgaaggtgttccggccgatggccgagttcctcgtcagcgaaccgaagaactacgaccagatccataaccacgccacgtgggcggtggccgccaccggcatgaccggctacgtgctgcgcgaccaggaactggtggagaagtccctgcgcggcagccagaaggacgacaagttcggcttcctgcggcagatcgacctgctgttctcgcccgatggctactacgaggaaggcccttactaccagcgctatgcactggcgccgttcctgctgttcgccaacgccatcgaacgcaatgagccgcagcggaagatcttcgcgcgtcgcgatggcgtgctgctgaaggcggtggatgtgctggtgcagtccagctatggcggcctgttcttcccgatcaacgatgcgatcctggacaagggcatcgacaccgaagagctggtggccggcatcggcatcgcctatacgcgcaccagtgatgaccgcctgttgtcggtggcccagcagcagaaacgcctgctgttgtcacccgaaggcctgcaggtggcgcaggcactgtccgccaacaaggccaagcccttcgactaccgcccgatgctgctgcgcgatggccccgacggcgaccgcggcggcctggcgatccttcgcatgaacggcgaacgcggccaggcactggtgcagaaggacacgatgcagggcatgggacacggccacttcgacaagctcaactggctgttctacgacaacggcaacccggtggtgaccgattacggcgccgcccgcttcctcaacgtggaagccaagcgcggtggcatctacctggccgagaaccgcagctgggccaagcagaccgtggcccacaacaccctggtggtggacgagcagagccacttcatgggcgactggaagcgtggcgaggaacatgccccgcaggtgcgcttcttccaggccgatgccgatacccagatcgcctcggcaacgatgcgcgatgcctatcccggcgtggcgttcacccgcacccaggcgctgctgcgccaccccgacctgggcctgccggtggtgctggacctgctgcaggtgcacggcgacaaggccgcgcgctacgacctgccgctgcacttcaacggccacatcgtcaccaccggcttcgaggccgagcacttccccagccagcgcccggtgctgggcaaggacaacggctaccagcacctgtggctggatgcacgcagcaaacccggcagcgagccgcggtcgctggcgtggctgctggacgggcgcttctacacctaccgcttcggcagcagcgcgccggcgcaggcgctgctggtggaaagcggcgcgaacgatccggaattcaacctgcgccgtgagcctgccctgctgcagcgcgtggacggccagaaggaggtcaccttcttcagcgtgctggagccgcatggggagtacaacggcaccgccgagtacgtgcatggcgccgacagccgcatcagggagatcgtgcgtacccgcggcagcgatgccgaggtgatcgagctgcgcctggccagtggcgcgcgcatcgccctcggcgtggccgacgacagcagcgccaagggcgagcacagcgtgagcgtggacggccatgcctaccgctggagcggcagccacgcacgcatggaccgcagcaagggtgacggcaaatga

SEQ ID NO: 512665 - DNA, 468 bp, Stenotrophomonas maltophilia
atgcgtggcgtggatctactccagctgctggcgggcgccaccctgctcccgcgcgatttcggcagcgtgcagcagctggatcagggtattcaggccggcaagcgtgcggctgagaccagccatcgtggcggcctgcgccgggctggccccctgcacatccagccgctggccgtcggcggcgtcgcggccatccatgcgcgccagcagggcgggcagcaggtccctggggtcatccagcagaacttcgacccgctcggcgacgtcggcaggcagcaggtgggcggcatcgccgatcagggcgtgcaactggggaacagcgcgcgggtggacatggtgaagctcctcgcagacggcaggccacctgcagatgcaaggtggcggacggtgcgggttggcgtaccggacaactcccagatggatggaaactccggcggattcccgggaatccccacgcaccgcccgccatga

SEQ ID NO: 512666 - DNA, 426 bp, Stenotrophomonas maltophilia
atgaagaaccagaagggcttcacccttatcgaactgatgatcgtcgtcgcgatcatcgccatcctggccgccatcgcactgcccgcctaccaggactacacctcgaagtcgaaggtcaccgctgcgctggccgacctggcctcgcacaagacccagttcgagatggaaatcagcaacggcaacaccccgtcgctggcaaccgctggcttccaggccaacaataccggttcctgctcgaccattgctgtggcagcaaccggcatgacctgcaccatccgcgatccgggccgcatcggcagcaagtcgactatcgctctgaactacacccaagccacgggcgaaggtgaagcggctgtggctggtggttttgtctgcaaagtcactgcggttgatgacaagttcatcccgaagggctgcaccaagtaa

SEQ ID NO: 512667 - DNA, 615 bp, Stenotrophomonas maltophilia
atggggttttcggcagggctgcgccctgcacccgctacgatccagagcaacagcaacagcaacagcaacagcagaagctggtttcctgagggatggcggggtgggtccggttgcgggagacgccgtaaacccttccatgggggcttggccgcggcatccatgccgcggacactcccgcaaccggacccatcccgccttcgacagagttctgcgatctgtcgggacggcgctctgcgtcgctgttggtgggtgtcgaccttggtcgacacagtagatccacgccatgcgtggatgactcattcgatatctgagagaaaaatcgtgtcgaccaaggtcgacacctaccaacagccgcgcggaacaaagccgcagttgccaacaaccgcgcgaaatctgtctgaggtggggtggtgtgggttggcaggaccgttggcgccatggatggcgccatcgagcccccatggacgggtttacggcgtgtcctgtcaacccacaccaccccgccatccctcggatagtccgctgttgctgttgctgttgccgttgctgtcgcttcggcctctgcgggtgcagggcgcagccctgccgaacaccccctacttccgcggcaggtag

SEQ ID NO: 512668 - DNA, 1329 bp, Stenotrophomonas maltophilia
ttggcggacgttgagccgatgggcgcggacgccgcaccgcgacagggcgcccgtgccatcgccgcggcggtggcgggcaccgtgttcgagtggttcgacttctttctatatggctcgctggcgatggtgttcggtcgccagttcttcccgcccggacatgagactgccgggctgttgtccgcattggcggtattcggcgccggctgggtggtgcggccgctgggtgcgctggtcttcggccggttgggcgaccgcatcggccgtcgccccaccttcctggtcaccatcgtgctgatgggcatcgccacgatcggcatcggcgctttgcccacctacgaaaaggccggtctgctggcccccgtgctgctggtggcgctgcggttgctgcagggcatcgccgtgggcggcgagttcggcggcgcggcgacctacgtggccgagcattccgcgccggcgcggcgtggactcaacacgtcgctggtgatgggtaccggcactctcggactgctgctggcgctgggcgccatcacggtctgccgcggggcgctgggcgaggccgcgttcgagcaatggggctggcggctgccgttcctggcctcggtgctgctgctggcgctgtcggtgtacatgcgcctgcacctggccgaatcgccggcattcgagaagctgcagcgcgagggcagggtagcggtctcgccgctgaaggaggccttcagcaaccgggagcatgtcaaggccatgctgttggcgctggcgaccatgaccgcggcgcagggcgtggtgtggaacgcgggccagtacttcccgctggtgttcctgcagcggccgctgggcctagatgtcggtacggccggcggattgatgatgtgcgcgctgctgctggccgcaccgctgttcccgttgaccggctggctgtccgaccggattggccggcgcccggtcatcatcaccggcttcctgctggccgcctcgacgctgctgccggccttccgcctgctggccgcgagcgtgcggcccgagctggcctggctgccggcgctggcggtgctgtggtggttgtccttgccggtggcattggtctgcggcccggcgtcggcctatctggtggaactgttccccacccgcatccgctacagcgccatcggcctgccataccacctgggaaacggttggttcggcggtttcatgccgttggccacggccgcggtgagcgtccactatcacagcgattttgccgggctgatctatccgacggcactggcgctggtgtgcggcctgttggcgttgtggctgatgccggagacgcggttgcgcgacatcagccgatag

SEQ ID NO: 512669 - DNA, 591 bp, Stenotrophomonas maltophilia
gtgctgtacgccgacggcaccgccgccagccgcaaggaggtgtcgcactacgagatgtggcgtgagttcccggcctggaaccaggccgcgcatggcgccaatggcaagttccggctcgacgcgcgcaacggcgatgccacgctgtaccagatcagctacgacggcaaggacacctggaacgacaagggcaaggtggaacaggccgaggcttcgcgcgaatggagcgagaacttcggcttcggcatcatccgcttcgcgcttgacgatggtttcgtgctgacgcgcatggccgacgaccaggtggaagggcgcgcggcatggacgatccgcgtcaccgacccgggcggcggcaacacgatgttctggatcgaccagaccgaccacaccgtgcgcaaggtcgacttcgccacgccgcgcggctggcacgagcgcatctacagcgacttctacatggtgccgcagccccggttccagcaaccgggccgggtacggctgtactacgctggcgcgctggttagcgacatccgctggacacgcgcggtagtggacgcgccgatcgcgcacgaggtcttcgtgcttggcggacgttga

SEQ ID NO: 512670 - DNA, 159 bp, Stenotrophomonas maltophilia
atgaagcgcatgttgttgccgttgttcgtcctgctgtgcggactgtcgctggccgccggcgtcgccgccgaggaaccgctggatgcgcatcggatcgtacagatggccccgccgccgcgggcggcgacagctggaaacgtccgagcaccctgcacctga

SEQ ID NO: 512671 - DNA, 1251 bp, Stenotrophomonas maltophilia
atgaacctgctcgaaggcatccgcgtgctcgacctgtcgcgcatcctggccgggccgtgggcgacccaggtgctggccgacttcggcgccgacgtcatcaaggtcgagcgtcccggtgtgggcgacgacacccgcggctgggggccgccctacctgaaggatgccgatggcgacgacaccgccgagtcggcgtattacctgtgcgccaaccgcggcaagcgttcggtcgccatcgacttcacccggccggaagggcaggcgctgatccgggcgctggccgcgcagtgccaggtgctggtggagaactacaaggtcggcggcctggagaagtacgggctggattacgccagtctgcgcgcagtgaaccaggcactcgtgtactgctcgatcaccggctacggccaggacgggccatacgcgcagcgcgccggctacgacgcggcgatccaggccatcggcggattgatgagcgtgaccggcgagccggatggtgcgccgggcggtggtccgcagaagttgggcgtcgcggccaccgacctgatgacgggcatgtatgcggccacggcgatcctggccgcgctgcgccacgccgaacgtaccgggcagggccagcacatcgacctggccctgctggatacgcaggtggcctggctggccaaccaggcctccaactggctggtcggcggcgtggtgccggagcggcagggcacggcgcatccgaacatcgtgccttaccaggtgatgccggccgcggatggtcatttcatgttggcggtcggcaacgacggccagttcgcgcgcctgtgcgcggtgatcggcgccccggaactggcggccgatccgcgctatgccagcaatgccgcgcgcgtagcacaccgtgcggagctggtgccgctgctgcagcggcggctgcgcacgcgtcccgctgcgcactggctggctgcgctggaagcggcggtggcgccggccaatccggtcaaccgcatcgaccaggtattcgacgatgcgcaggtacgggcgcgcggactgcgcatcgacctgccgcacgccgccggcggcacggtgccgatggtgcgcaatccgctgaagttctcggccacgccgctgcagtaccggcaggcggcgccggtgctgggccagcacaccgcccaggtgctggacgaggcgctcggaatcgatgaaagcaccgtggccacgttgcaggcgactggcgtggtgcaggcaaccgttccacccgactccatccaatag

SEQ ID NO: 512672 - DNA, 708 bp, Stenotrophomonas maltophilia
atgcgcgcgaacgaacgggcgatgatcgcgccaacacccagttcggccagcgtctgcaccgcctgctcgcgcgaaggcccgctgcgcatcggcgtggtcgatttcggcgacgacgccgggattgccgccgacgtgcaggccgcgttcgaggaagggctgcgcctgctggccgcgcttggccaccgcctgcagccgctgccggcgccggccttcgcgtccggccgcgcgcggcgcgcggggctgctgatgtgcgaggccgaactgctggtcgaacatgccgacgactgggccggcgaccgcagccgcttctcgcccttgctggcgaagctgatgggctgggcagagggccgcagcgcggcggaactggcggccgcctcgcaacgggtggatcgcgcgcaggtgcagctgcagcagtggctggcaggctgcgacgtgctggcgatgccgaccgcgccgcagcgcgccttcgccttcggcacatcggtgccggccagccaggccgacctcaccgcctacgccaacatggcgggcaatccggcgctgtcgctgccgttgccggtcaccgctggcgaactgccggtgggcatgcagctggtcggcggcatcggcggggaatacacgctggtcggactggccgacgccttccagcaggcgatggcctggcagccggcaatccccgatgcctgcaacgcatggtggccgcgatga

SEQ ID NO: 512673 - DNA, 150 bp, Stenotrophomonas maltophilia
gtgcgcccgctcgagggccgcatcctcaaccacagcaccggccgcgaattcgcgtgcgaaaagatcccccctgagctgatggacatcgtcgccggcggcggactgatgccgtggctggaacgccggatggcggcggagcgccgcgcatga

SEQ ID NO: 512674 - DNA, 870 bp, Stenotrophomonas maltophilia
atgaccgcaccgcaccagggcatcgtccacgccaccgtactcgcaccagacctgcaggcattctgcgtggcctacatcacgcaactggcgatgggtgtgcagcagcaaggtacgctcgacgccgccgatgccgtggcgctcgacctgccggacctcgccggcgctcccttggcctggctgaccaacagcgcaggccagccggtgctgcgggtgatcgaggaccgcaaggcagcagcctacgagcccatgttccatcatggctggctttcgctgggaatactggtcggcgacatcgacgcgcttgcggcgggcctgcatgcgccgtttcgcatgctcggcgcaccgacagacctggaactcagcgatgccatccgcgccgcacaggtattgggccctgccggcgaactgctctacctcaaccaggtcaaggccgcggtaccgccgttcgatctgccgatgacccaagacgcagtcgccacgcctttcatcggcgtgatcagcacgcccgaccgcgcggcctcgcatgcagcctggtcagccctgctcggcaccccgggctggatgttcgatacgaagatcaccgtgctcaatcgcgcccacggcaaacctttgcagggccagtatccggtagcagtggtgccgatgcccggacaatgcctggtcgagatcgaccaggtcgagctgtcgcccgatcatgcgcagcgcaggaccggcctgtacagcctctgtctgtgcctgcccgagatggacgactctgttcttcatgccgccggttggcgacacctgttcggcagcaagggacgccgtggcctgcgtggtccggccggagaacatgtcgagctgctgcgtccggatgtgggcccaagttga

SEQ ID NO: 512675 - DNA, 675 bp, Stenotrophomonas maltophilia
atgacgggcgccttcaattcgacctggaacggggcgatatgcctaggcgcaaagccggattgcctcgatccatttgagggctggcgcataccggtcacgcagctgctctaccccatcgactctccttccaacagcggtgcgttcaaggaaatccaggaactctggaatcgcggcatcgaagccgacccccatttcatgctggcaatgcggaatgtcgggagcttccgcgcctacgggttacgcagggacatgcctccggaatggttcgacagtccgttctaccgcagccatttcgcgcgcttcggaataatggattccctctggatcggctttccgatcaatgcggacgccgagtcgcacttcggcttccattcccatgcgccgttcagcgaccgggacgtggcgctgctttcctatgcgctgcgtggaatcaaatggttccaccggcagttgatgatcatccaggggtcgctgatcgccaaatcgtcactgacgccgaccgaacgcaaggtgctcaggcttctgttgaccaaggcctcggagaaggagatttccgagcaactggggctggccgtctcgaccacccaccagcatgtcgtttccctgttccggaagttctccgtccgcagccgcgccgggttgatgagcctgtggctcagtgactctggtcaataa

SEQ ID NO: 512676 - DNA, 186 bp, Stenotrophomonas maltophilia
atggaaatgagcaacagcaacagcgtgccgaagccgaccgccaatcgcgatccaactttcagattcctgatgggagacatttcaaaccttttttggggagtcctgggcggtggccggaggcttgcatgcgacgcctgcgggccggacgcggattacgcccacatgggcgagggtgggtgttcctga

SEQ ID NO: 512677 - DNA, 1143 bp, Stenotrophomonas maltophilia
gtgcatgcgtacggtcaggtcgccttcggcgatggcatgcagcagggcggagacttcggacaggttgccgtcggtggcttccatcaggcggttgagcccggccaccatgtcgcggaagtcgtgctcgaagcgggcctcgtcgccacgcaggctgaaatcgcccgccgccgcggcgctggccagccgcttgatctcggcattgatcgccgacaggctggccttggtctcgtccatcgcctgggtgatggcggccttctcgccgggcaggcggtccatgtccaccgacaggtcgccgcgtgcgtagcgcttcatcacctcgatgatccgcagcttcacgccgatgtgctggcctaccagtgcattgctttcatcgatcatgcgccggtaatcgccggtgaatggcgaggcgtcgatgcggtagctgatgctgccggcttcgtgctggcgggccatctcgccctgtgcggcgatcaccgactgcagctggcgctgcatgtgctgcatggcgcgcagcaggtcggcgacttcatccttgccggacaggtcgatgctgttgtccagacggccggcggcaatgccgttggccacggccaccgcgctggccagcgggcgggtcaggctgcgggtgatcagcagggccaacaggacgccgagcacgatgctcagcaggccgatgccgagcgagagcttgctggtccagctctcggtgtcgtagtattcgtcgctgctcttgcgggtcagctcaacctgatgcttgagcaggttggcgatgctttcgttccacgcgacggcgcgtggttgcagcttgccgagaaggacctggatggccgcatcgaagtctcccgcctgcatgaagtcgtccagttcctgcgtcggtgccatggcgagctggcgggccgcttcaatctccgcgaccatccggtctccggccgcatcgcgggggatcttgatgtactggccccagatttcatcgtacttgcgggcgagctctcgggtctgcgccgcatccttgtcgagaccgtcgccgcgcttgatcagcatcagccggcgatgcatcaacaccgcgttgttggtgtcgagcatctcgttcaacaggcgcatcttcaccatgttgatgtcggtcagatacttgaactggtctga

SEQ ID NO: 512678 - DNA, 1206 bp, Stenotrophomonas maltophilia
atgaccacgggtggacagagcgcctcgctttttggcgcaggcgattctgcgctgggatatctgtatcagattctcctcgctttgttggcttcattgcaccgccttgctcggggacaaattttctgcgtctatcttgagacgcttgacgacgtaacgtttgaacccttgggtagccctcttgagctgttccaactcaagcaccacattcgatccaaggccaatctgacggacgctagcccggatatctggaagacgttacgcgtctggatcacaggccgctccgacggcacgataccattggacgcgcgactgtgcttagtcaccaccagctcagtcgtcgaccacgccatcgcggccaaattaggtctgagggatcgggacgaggccagcgccattgtttcgctcagcgacgttgcgtccacatctaccaacgcggaaaatgctgttgcttacggcttgtaccttagccttagcgctacggagaagctcgacctcatcagctctatcacgatcgtacccagagttgccaacatcggcgaggtcgagcaaggcctgagtgagtacgcgcgcaccgccgtcaggcgcgatgttgcctcttcatttctcactcgcctggaaggctggtggctggtgcaatgtcagaaacatctcattgcccagtcgatgacgccggtcacgagcgcagctttggagtccgagattgatgacctccgggatcagttcctaatcgatgccctccctatcgacgacgacatactggaggcggaggtcgaattggccgcttatgatggtgccatcttcgtccatcaggccaagcttgcggggataggccctcggcgcgtcttagcggcagttcgcgactactaccgcgcgttcgagcatcgatcgcggtggatgcgcgaaaacctcctactggttggcgaacttgataaatatgaacggactctcaaagaggagtggatgctcgtttttgatcgcgccgtcgacgagatgggcgagcacgtggccgaagtggaactcaccagggcggcgcgtgcaatctatcaatgggtagaaacttcgtgcatccccattcggcctcgagtaggcaaccccagtctctcgcgcggctccctgcatatgctggcggataagcgagctttgggctggcacccccagttccgtgaacgccttgaggcactcttagaatcgagcccagcgacatga

SEQ ID NO: 512679 - DNA, 1929 bp, Stenotrophomonas maltophilia
ttgagcattcagattctcgatattgtcctttactctattggccggcatccgcgcgtactatcacttcagcccggcaagctcaacatcatcacgggtgactccaagactgggaaatcggcccttatttccattgtcgactactgtctcggcagcggctcctatcatgttccttatggcgtcatacgcgaccacgtgctgtggtacggcctgcgcctgaccgacgggaaagcgcagtatttcgtggcgcgccgagcaccggacgctaatcgtcagagcacgacagatgcctactacgccacgggcacgagcttggttattccttcgctggatcagctgcaagtcactaccaacatcgacaccgtagtagaacgattagggatagtgactggtatcgctctgaatcgccacgatccgccggaccaccagacgcgcgctccactcacggcaacgttgcgacatgcactggcgtacgtcttccagcctcagaccgaaatctcccaacccggcttccttctccacggacagagcgacagctggttcgcccaagcaattaaggacacgttcccctacttcctcggcgccgtggaagaagactatgtcggcaaggcagccaaactgaaggagctgcgccgagagctgcgcgcgaaggagcaggcgttggcccgcatcgagacactgactagtgatagcagtgttgccgcgctggtatctgtagcgagggatgtcggccttcttgaagcggactatgcgtccagctcaccatccgaagacatggctgcgcttcagatgatcatgagcaatccactttccgaacaagtcgacagaacatccacagcgatcgatcaggcggaactagaaggcttgaatcgccggcgaacagagctgcgtgtagacctgcatcgcttggacgatgaactcaaggcgatggtcgagttacgcaaggaggagaatgcttacacgcacgaagctaacgagcaggtgtcgcgcctagagagcattggcttattgaaagcctttgacgagaatcattgcccgctctgccaccatgccagcgatcgctttccgctctatgctgaactggacgcagagcttcgagttgccgccgcgcagctcgcggcagtaaggcgaagcactccggggttggatgcattggtcgtagagaagacccgggaactggaaaaggttcgtgtagccttgcaggaaaactggagcgcgcttgaggcagttcgccgttcggaccagcgtctttcggcgctacgcgactccgccacacggcgtgcgatggtaatcgggcgcatcagcgcgacaatcgattcatatccttcccgtcaggattcgtccgacctactcgcaaacatcgcggatctcgtccagcaagtaaaatttctggaaacagaactcagcgacgacactgtccgggagcgtgtcgactcctgcttatcaaggctaagtgagcgtatgacgcggtgggctacgttcttggaacttgagcacagcggcgtcccgtttcgcctggatcgcaggaagctcgaggtcatcgccgatgcagagcacggcccgattcccatgagcgcgatgggaagcggcgctaactggctgggttgccacctgattgcgcacctcgcgcttcacgaatggtttgtccgtagggagcgcccagtcccgcgcttcctgtttctcgatcaaccatcccaagtctacttccctgcggagactcaagccggttctgatgatgtgctacttcaggatgaggaccgtctagcagttgtaaggatcttcgagctgatcgataaagtggtgaaggagctcgcgcctcatatgcaggtcattatgactgagcatgcagatatcaatgaatcctggttccaagacgccgtgacggagcgatggcgacacggcgctgcactagtaccgttggattggcagtag

SEQ ID NO: 512680 - DNA, 747 bp, Stenotrophomonas maltophilia
atgcttgattccatgattggaaagtctattgatgcgctgattggtgtcgttggtgacgtcggagttgttgttaaagacggtgctttcaagcggcactgggagcagcgaggtggtgcgcaaaccttcgattccattgaggaatttctatcgttggtgcagtcgaaggcagagctcaatcgcctcgatatagaagccagtatcggaaccatcatgacaacccttaatggctcgaaggatgctcttgtagacttcgtcaaggggagcaagaacttgctggacacgatctacatggaggaagatgaagtcaccggagcggaggtcctggatatggactgctttggcattcgaattaatggaccgcaggtcggcgatgtcacatcgcttcagcttgaccagatggagtatctgggtaaatggcagttttcggtaatgtttataatggaagcgagagttcgggttgattactgcgccagctatgcggaatatttagatcacgagcgagaagaattcatagaaatgacatcgatgaacggtgtcggtatatgtgatctcgaagaggttaggccggtccgaatctccggaaagatgatcattagtatcgatcaagagggcgacgtagaagctgggcgggccgcaatcgcaaacggagccttccgtgatgaaagcttcgaattcgaagccgtttccgcgacactgcttccccttgaatgctggggtcatagggcggtgcctgatcatgatctgtag

SEQ ID NO: 512681 - DNA, 321 bp, Stenotrophomonas maltophilia
atggctgaccagctgctcaccgctgcaatggatcacgccgagccgatccagtccgcctacgcccatggcccggtgtgggatgccttcggcctgacccgcgccgcatacctggtcgttcctcgcagaacgctccagtccatgccgctggaatggcaggagcgcttcgtcgcgctgatgaatgaagcccacgcccatctgccagccgatgcgttccccgagtacaccgtgcggcgccaggacaacggcaagttcgttgccgacccgctccgtgactaccgacacaccggccccatcgctcccaaggattcctccaatggctga

SEQ ID NO: 512682 - DNA, 558 bp, Stenotrophomonas maltophilia
atggctgagcagacgatcacccacatcgtggtgaagaacgagcaggcgcgcgagcatgggactttctttgttgtggaaggctgcgagcagcagggcaacggcaacactcgctattgggcccagctgacctgcaacacgcccttcggcgtggtgggaaccttcttcggttccatgggcgcgccagcggcaaggttcctgcgtcgctgtgggaaggggtacatcctcggccggctgtgggggctggagaccgaggtgtacaacggcgacgtggcgaaggccaatttgatcaagtgggtgctgcagcagcgcaggcgcgtcgagataaccaacgaagaagcgcgcgagctgctggatgccatcgactgcgcggacttcgatagcgagcacggcttccagtcgctggtctacggcaaccgcaacttctatcaggcgttctccgagggcggcggcagcgactacaaggtccccaacccgcaggccgagggcttctgggagcacctatggccgggcttcctggccgagctggcacagcgcgtggaggtggctgccaatggctga

SEQ ID NO: 512683 - DNA, 372 bp, Stenotrophomonas maltophilia
gtgaccttctacaagatcatcaacccgtccgatccctatcacctgacagcagatgatctggtgctggcaggaatcgccgcattcctgctcggcagcggcaagtacgcgctcgaagcatccgacggcagcgaaggcgttccgttgttcctggtcggtggacacgacgaatggttcgccgcgcacggcgcgcagagctttgaatcggccttggaggctgcactggaagagcgcacagaggaactggccaggatcttcgacagcgtcacgctggaaggcacccgctcgtcgctcaatgacatcggcgccaccgccgcgaggcttgcgactggcattcgcgagcgagcatcacagcaggcggtgggcaatggctga

SEQ ID NO: 512684 - DNA, 501 bp, Stenotrophomonas maltophilia
atgaaacagcctcagcccagcgacgtcaaaccttcaacaccgatccccgatagcgcgattgaagcgttccgcgctgcctacgccacgcatggcacccagaagggttacgccgatgcaatccgcgccggcctggccgctgcagcgccgctgataagccaggacgcgatgctctcgcttgaacaggacgcacagaagtacctggtgcatcagctggacattgcactgaatggtgaagccgccgcagcgcgcgcgccggtgctggcggatcttttgagccagtgccaggccgaagcccgccgccggcacggccccgttctctcgacgattccgggcgttgcagcagcccacctgcgcaaggtgtacatggacctcgctgacggcgcgcgcaatctcagcgaatccgccatggcgatgagtgacaagacggttcgcgaactggtcgccatgggaatcactgaggtccacctactgccggacacaacgccggaggccaccccgtga

SEQ ID NO: 512685 - DNA, 225 bp, Stenotrophomonas maltophilia
atgccaacaatcacagtcgacgttgaactcgaagacttcgacgactcggacattctggaggaatgccggtcccgaggcctcaacgtgctgcccaccgcggcggccgatgcacctgccgctgatcttgtcgtggagcgagcctatctcgcggctcgtgccatgaccgatctgccgcgggagctgaaagacctgttctggatcgtccacggccgcgcaatcgcgtag

SEQ ID NO: 512686 - DNA, 246 bp, Stenotrophomonas maltophilia
atggatggcctgcacccaatcggcggcggcctggacgcggtgatcgtcggcacggccacaccgacacccgaagagaggcttcagcggtacgtggcggcagctgcggcgcatccctgccgctggcacgagctgcgcgtccagttcggccaggtcctgcagcgctcactgaagaacggcgtccggatcggctttgtcgcttggcagcggcagatgcctgccctgtggtcgcgccacagcccctcctga

SEQ ID NO: 512687 - DNA, 252 bp, Stenotrophomonas maltophilia
atgggtggcatgaacatgccccggatcaccaaggaagaagccattgccgcatacgacggcaatgccgccgcgcttgcgcgcgctctcggaataacgccgtcggctgtatatcagtggccggaaggtcagatcgatgacctttgggcgctgaagctgcgcttcgtgctgatgccgacttactttcaggcactggtccgtcgtcccgacgacgacccggacgctgaccggatcgtgccagtggagggcgcctga

SEQ ID NO: 512688 - DNA, 264 bp, Stenotrophomonas maltophilia
atggacggagtgaaattcaccgcagaacagcaactgatctttcgtttaatcggcgaagtggaactgctcaagggctgcgttctggacctgatggcttcgcgacgcgacccggcaggtgccgttgcctctatcgaaagcgccaaccggaacgccatggcagtcatcaacgagatgctctcgaacgatccatcacctcggatggtctgccttgggcatgcagattcattggcccggacatggtcggaggcactgcaggcgccctaa

SEQ ID NO: 512689 - DNA, 618 bp, Stenotrophomonas maltophilia
atggcggctaggccggcgtaccacatcacggacgtaagcaacctaccgtccatcttgagcactggcggtctgctatccgacgcccggatgcagggcgcatcagtgaccgttattggctattctcacatcaaggaacgccggttgacggtcgcgcaagttgattgtttcgccgatcgccccttcgttggcgagttcgttcccttctactactgttaccgatccgtcatgctgtacacggtcaacaatggtaacgtgggcaggcctgcagggtgccaaaacacgattgtgcacctcgttacagatacagatgcgctgatcgcgattggcaggcaatgggcgattagcgatggcaacgccagtgcttcgcacacttccttcttcagcgatgtggcagcgttggatcagctgaactggaatgcgatcaatgccacgtattggtcaggccagcaacaccagaaatgtgcggaatttttggtgaaggacttcgtgccatggtcggcgatcagtcacatcggttgttacgacgccaatgtggctgcgcaggtggaggcaacacttgacagtgtctcagcttctcaccgcccccaagtcattgtaaaacgcgagtggtactactga

SEQ ID NO: 512690 - DNA, 1074 bp, Stenotrophomonas maltophilia
atgatcaatatagcgcacggtaatctgttaaaggcagatgttgatgcattagttaataccgttaacaccgaaggtgttatgggtaagggtattgcgctgcaatttaagcgcgcctatccgcgtgtgtacgaggactatcgagttgactgcaaagcaggtcttgtagagatcggcaagatgcatgttgtcgaattgggctccttgggaggcggtccgaagtgggtaatcaacttcccaacgaagggccattggaagtccaagagtaagttgaaggacattcgatccgggctggtagcccttgccaagaccgtgcaaaagctcggaatccagtctattgcaattccgcctcttggttgcgggcacggtggcttgctttggtccgatgtcgaaccaatgattcgtgaggttcttagtccgctcgaatcgctacgtgttgagctgtatgcccctacaggggcaccggacgcggctgaaatgccgaatcggacttcaaagccgaagctgactcccggcgctgcagcagttgttgcgcttatgtctaaatataaaagcgcgatgcttgacccgatcatcagcctgctagaagttcataagttgatgtacttcttgcaggaagctggagagcccttgaagcttcggtatgatcaagggaagttcggcccttattcgccgaatctccggcatgtcctaaatcgaatcgaaggccactacctcagtggctatggcgacggccaggacaacccgacgaagccgattgcttttttgggtgacgcagaagatcaagcattggagtaccttgcggatcactttgccactcaggcaaatatggagcgcgtggccgtactgatagatggttatgaagatccgtacgggctcgagcttttaggctctgtccattgggttatgatgcacgatgcgagcgcaattgattccgccgatgcggctgttcgtttggtccatggctggaatgcgcgtaaggcagagctgatgaagcctgagcatataaagaaggcatgggtacgtttgaagcagtacgattgggacaaaatatcccgcagtgccgttcatcactaa

SEQ ID NO: 512691 - DNA, 2529 bp, Stenotrophomonas maltophilia
atgcgtcgagtcaatgcactttccgcgatgatgttgctgggcacggttgtgggaagtgcgggggcgcagtcctacagcaagaccaacgtcatcacctatcacgatgatctgtcgaagtgggtgcttggccaggtccggacgtcggtcaaccaggacacgggccggaccgagtcccaggtggattatgacccggccaccgcgaagccccagcggatccatgccttcggccagctccagcagaccattcactacaacagcgacggtaccgttcgcgccgtggtggatgggcgtggcaatacggtgagcctgtccggctggaagcgcggcatccccgggaacatccagtatgcggatggttcgacccagtctaccggcgtggatgacaatggctggatacgctggatcaccgatggccggggcaacaccacgcgttacgactacgacgcgatggggcgcatgtcgctggtcgactaccccgacggcgatacggtggactgggcgtccaccacgacacagtttgcccaggtgggcggcgccgagtacggcattcctgccggtcattggcggcagacggtcagcaccggcaatgcgcgcaaggtcacctactacgatgcgctgtggcgcccattgctggtgcgcgagtacgacgcgggcaatgaagccggcacgcagcgggcctcggtgaccgcctatgacacggaggggcgggtcaccttccagtcctatcctgtcgcgggggtcggtacggtccaggacgccggaactggcgtccgtacgacgtacgacgcacttgggcgggtggtccaggtcagccaggattccgagattggcgcgctggtcagcacaaccgagtacctgccggggcggcgcgtgcgcacgaccaatgccaggggtatcccgaccgtcgtgacctacaccggtgcagatgccgcgaagcttgactggccggtacgtatcgaactggcagagggagccgtgctggatatcccgcgggacgtcttcggcaagccgacgtcgatcacccgcagggccagcaatggctcggtgacgtcgacccggcgctatgtctacgatgcggcgcagcggttgtgcaagacgatcgaaccggaaaccggcgccaccgtaattgactacgacgccgcatcgaacccggttggaagcgcgcaggggttggacctgtccgatgcaggcaactgcaaccaggacattgccgcggcaagcgggcgccgggtggtgcgttcctatgacgcacgcaaccggctcgcatcactgcagttccccgacggcaatggcaaccagcgctggagctactggcccgatggcctggtcaagcaggtcaccacgttgaacgccggggtggagacgcacaacagctatgcgtacaaccgtcgcgggctgctcatcggtgaggtgcagagccccaccgatggcgaagcgctggcgatggggtatgcctacgacgcactgggcaacctgtccgcgcatcgctatccctccggcaacgtggtcgcgtatgcgcccaacgcactgggacaggccgggcaggcgggctcctacgccgctggcgtggtctattaccccaacggggcgattcgtcagttcacctatggcaacggtattgtccacacgatggtgcagaacgcgcgccagttgccggatgaaagccaggacacgcttggcgcaacccggatcctcagcgacggctacgactacgatgcggtcggcaatgtgatggcaatcactgacggtgccacgggccgcaaccagcgtggcaaccgcaatctgggctatgacgggctggatcggctcgtttcggcttcctcgcccatgttcggctcggcgagctacagctatgacgcgttggacaacctcacgcgcgtgacgattctcggccgtgaccatcactactgctatgacaacgcctggcgcttgaccaacgtgaaggtcaacgggtgcggaggggcaaccgtggtcggcctggcctacgatgcgcagggcaatctgcgggcgaagaacgggcagccgttcaccttcgacttcggcaaccggctgcgtgcggcggcaggttccgagagctaccgttacgacgctgacggtcgccgcacacagacagattcatcgttcggacggatcacctcgatgtacgaccacgccggcgtcctccgctaccaggcgagcgagcgcgaggacaaacggaccgattacatcacgctgggcggaagcctggtcgccaaggcagcggtgccgatgcggcgttcgccggccgcgaaggacttcgttgggtggtcgcctgtggcctctgccgtccgctacgtcgtcgaggaaagcgtggacggggtgacctggaccacggtctacgaaggcaacgccgcgaactggacgtcggccgcacgccctgccaccagctatgcgtatcgcgtgcttgcctgtggcgccacggggagctgcacgccggtgtccgatgtctcgcatgtccagcgtccgcagggtgacatcgtgcccctgctgtaccagctgctgctgggctga

SEQ ID NO: 512692 - DNA, 3357 bp, Stenotrophomonas maltophilia
atgaatcacccgctgcacggccgttcgtcccactcccgctccccgctgcacagccgcctcgcgctggccgtgtccagctctctgttgcttgccgctgccgcgcccgccatggccggcgaggcgctggacgcatggcagcaacagcgccagctgcaggcggcgtgggcacagcccgccgtcaacgcgcctgcagcatcgacggccgccacgcccgcggcaaccgccaccgccctgctcggcaatccgggcgatgccgccagctggcgcagcgatgaattcaacgccgactggggcctgggtgcgatgggggccgaccacgcgtatgcccgcggcctgaccggcaagggcgtgcgcctggcgctgttcgacaccggctcggcactggctcaccccgaattcgccggccgcaacacctccagcatcaccatcggcccgaactgtgcgtcaccgggaaccgtcggcggtaccggcgcgtgcagccagacacagggtgatcaaccgggtatcaactactacacgctcggcgcgggcgtgcctgcttccctgcaggccaacatcattgccgcaggccgtgaatggggtttccgctatgccgatcacggcacgcatgtcctcggaaccattggcgccaaccgcaatggcacggggatgcacggcgtcgccttcggtgccgatctgacgaccgcccgtgtatttggtgacacttactacgaatggaggcgccaggcgagcggaggctacctgcctgaagccgtggaacggacggatcccgatggggccgcaaggctggacatgtacgcgcagctgcaggcacaaggcgtgcgtgccatcaatcacagctggggcatctccacccggaacatgaccgtggccgcactggatgcccagtacgcacgcatcggtaccggctacgacgtatacggaagcatctacaaggacagtgcgaacgcccccgcttcgcagttgatccaggtctggtcggccggcaatggcagcggcgccgtcgccggtatcaccgcggccctgccgcgctggaagccggagatcgagccctactggctggccgtcgccaacgttcgccagcccaatacagccaatggtgaaaccgactacgtgatcaacgcaggctcgagcatctgtggcgctgccgccaactggtgcatttccgcacccggcacggcaatcctcagcaccatcgtttccggtgacatccagggacggctggagaagaccgcagactacgtccgtcttctcatcgacagccagaatcccacgtacgactacggcctgaagaccggcacgtccatggccgccccccatatcaccggcgcactcggcctgttgatggagcgcttcccatacctggacaacgcccaggtgcgcgacgtcctgctgaccaccgcgcgcgatctcggtgcggcaggcgtcgacccgatctacggctggggcatggttgacctgcgcagggccatcgagggctatggctcgctgcgcgtggataccaacgtggtgatgaaccagagggccggcggcctgaaggtgtgggagggcgatgcctgggacgactggaccaatgacatcggcggctccggcacgctgaccaaatccggcatcggttggctgcgcctgagcggcgacaacagcttcaacggcgcggtgctgcgcgagggcacgctggagttgaacggcagcagcaccctcacctcggcggtcgatgtgcaaggcggccggttcctgctcaacggcagcctggtctccaccgcactcaccaccaccggtggcgtcagcacggtcagcgccagcggcgttctgaaggacgggaacctgaccgtcaatggcggcgtggtgtccttcaatggcatgcagaccggcggcaccaccacggtcggcagcaacggcctgctgaagggtatcggcacgttgggcagcacccgagtggacggcaccatcgcgcccggcaattcgatcggcacgctgaccatcaacggcgactacgtgcagggcgcgaccggcgtctacgccgccgaactcgcgcctggcgggcacagcgaccagttgcacgtgaccggtaccgccaccctcggcggcacgctggtcgcgttgccggaaccaggcatctactatctcggcgagcagttcaacttcatccgcgccgacggtggcatcaacggccagttcgcgaaaaccgacttcagcgcgttctcgccgttcctgcagttcagcctcgcctacggcaccaatggcacccgcatcgacgtggcacgcggtgcctcgctggccagcgccgccaccaccccgaaccagcgcgcggtggccgccgcggcggacctgctggcaatcaaccagggcctgcccaagccgctgacccagctgttcccgcagcaggtcggcggcgtgctcgacggcctcagcggcgaactgcacgcagccacgccgctcgcactggtggaaggcagccgctacgttcgcgatgccgcgctgtcccgccgtgcaggtgcagtcgcgccaagcgccgatgcgggcgacgccaccggcgcctgggtgcaggctctgggcggcaacagcaggctggacggcaacagcaataccgcccgcaccgaagccaacagcaacggcctgctggccggtatcgaccacgagttctctggctggcaggtcggcgtgctggctggcaccggccgcaccgacgtcaagcagcaggcgcttcgtgccaagtcgaagatcgacaacacccacttcggtgcatatgccagtcacaactggggcggcctcggcctgcgtggcggcgtcgcctggagcaagcacaaggtgaagagcacccgcgatgtcgacttcgcagggttcagcgacagcctgagcgcccgctacaacgcgcatacccgccaggccttcatcgaagccggctaccgctttggtggcccggaggccgggctggaaccctacctgcaggtcgcgcgcgtggaggtggacctgaagcagatcaacgagcgcggtggtgcagccgccctgcacggcaaggtggatgacaccggcaccacgatcgccaccgctggcctgcgcttcgacaagggcctgaaggcatcgttccagcaggacagctggctgcacctgcgtgggggcgtgggctaccgtcgtgcctcgggtgaccgcagccagctggccgacctcgcattcgccaacagcaccaccaccttcgcggtcgaaggcgccccgattgccgacagcgccgttgtggccgagctggggctgtcggcctggctgaccccgcgccagcagctggagctgggttacagcggccagtacggcagtgaaagccgcgaccacagcgccaacatgcgctggtcggttcgcttctag

SEQ ID NO: 512693 - DNA, 558 bp, Stenotrophomonas maltophilia
gtgtcagttaaagatcttcccatcttcgttgattccgccaacgtgctgcagcgcatgtcgcgccgtctccaacgccaagtcccttccctgggggcctccgttcaagattttgatgaaccggcgatcactaacgtttccgtcgctgtcgatcgcctctacgacagcatcgaagttcccgggatcgtgagcacgctcatgtgcagtggctctcaactggaagccaactcgttcagcaccgccaagcaaagcctttgcctttgcgagcccagcctcgcgcgcctgctccaagctcgcaatcgggccgaagccatgaccgaggaagactgtccccgcatcggcgtgatcggaaaccatcacatgaacggaccagccagcttgccctcgatgaagttggacagtggcgacttttccatccgcttccagcgcaaacacatcccgaccctgctctccgggtgcattcattcttatcggcctccattcgcttcggtcgcccgactctatcaccccacccagatcaactgcgcatctggcggccttgagggctcgtctcatggctga

SEQ ID NO: 512694 - DNA, 696 bp, Stenotrophomonas maltophilia
atggaaaccattggcgatcgagtaaagaaggcccgggcggatgcccgcatgagcaggtccgagctggccgtggcgaccggcattggctacagcaccattgctgagctcgaacggggcggaatgcagacgagcacaaagctccgcgtcattgcgtccgccctgggcgtttccctaacgtggctagaaaccggcaagggcatgcaacaaggcatagcagagccccaggccgagtacgtcgcggcgtctgagattcccgccggctatgttcgcttccgcatgatggatgcgcaggctgccgggggtgtgggcgtggtaaaccaggactatccggcagtgctgcgagaggtcgatatcgccgaatggcaggtgcgtagccagatcgggttcatccccgaagaggggcgcgtgcagctgattaccgttcgcggggactccatgcaccctgatgtgaagaacggggacgtggtcatggtcgacacggcgcgcggcttcttcgacggcgacggggtgtacttgatcaacctcaacggctacaccatggtcaagcgcctgcagatgctgcctaacggtctgcatatcgtcagtacgaatcccaagtaccagaacgccgttctgccaccagatgagatcgacaccttgcacgtagccggccggatcgttggcgctgctctgatgcgccggggcgaggatatctag

SEQ ID NO: 512695 - DNA, 447 bp, Stenotrophomonas maltophilia
atggactggaaatcccacatcgaagtgctgttgagcgccggcgcaactgttgaacagttggcttccggtatgggtgtcactcccaacgcagttcgcgagatccgggctgggcgcacccgatctccacgtgccgacgcggctttcaagctggctgacatgaagcccgaccagttcggggaatctcccctcactcacgtgactgccctgttcgacacccgcatgagcaagcgcgcgctgcgcgagaagctgggcctgagcaccgacaagcaactggccaagcttctgaagctgccggtggagcaggtagagggctgggcagatgaagacatggtcccggcgctgccgcaggtgatgaagctgcttgggcaccccgagcagcaggagccggcgcagccggcgaacgaagaccccgatgcagaccgcatcgcctcgattgaggtggcgtga

SEQ ID NO: 512696 - DNA, 312 bp, Stenotrophomonas maltophilia
atgaacattccagcccgccccaccgatccgcaaagcagccaatctgctgctgcagacctcctcgccagcggcgcgctgcgcgtccagcacaccaagaccgaggcggcggtgatccgccatccaggccagagcagcctgcatctgtcgatgctcactggccttgaccgccacatgctggggcgccgtctgcctgagttggcccgagagggacgcatttggcgtgggccgaccgctccatgcgccaccaccggtaaaccttcctgcacttggtggcctgtggctccgggtcagaacctgacgctggggatctga

SEQ ID NO: 512697 - DNA, 927 bp, Stenotrophomonas maltophilia
atggtgttcgaacgctatccaggtggcggcggcgaactgctgctggctctggcccttgccgacaacgctcacgacgacggcacgcgtatcttcccgtcggtcgccacgctggccctgaagtctaggcagtcggagcgttcggtgcagtatcagctccggaagatggagcgcatcggctggttggaggtcgtcagcgagggcggtgggcgcatgaaaggctataagtctggcggccgcccgcgagagtaccggatcagccagtactggatcgcaggtggcgacctcgcggctgatgatgatgccggaaaacagcccgaagattcaaagggtgcaaattctgcaccctttgcgaagggtgcaaaacagagcgggaaagggcgcaaaacgacgcaggaaagggtgcaaccacgcgtcgaaaagggtgcaacagctgttgcacccgaacctaaagcaacccaaagcaaccaagagcaaccctcacacagcgagtgtgagcccgaggctgatccgctggcgctgaccgctgagcaggtcgatgtggagctgtccgggttcggcgtgatccctgcggtcatcgatcgggagacgttggcccggtttgttcggcaccgcgcggcgatccggcgggttctgtccgtccagggctggctgcatctccgccaggagttgctggacctgatcgccgacggccacaaccccaacgaatccctgaagcagacgatggccgcgggcttggcgctgcccgtaatccctgtcgccaagaaatccgtaggagcaacccatgcaagccctcaacacggttctgccgaccgtaccgagcagctcgagcagcagttctacgctcaacgccgaggcggtggccacggtggcggcgctgagttcgtaccaggcaacgtcgttgacgccgagtttgccgtcgtcggctga

SEQ ID NO: 512698 - DNA, 177 bp, Stenotrophomonas maltophilia
atgttctcccctgaaaagtgcgggttttctggactggaactaccgatgagagggtcgtcccgcgaattgtggatacgcgtgtttgggggggcgctcggtctaggagccggccaacgccataatttcgccccccctaccccgctgtcgtggaacgatgaaccgtggaaccgtcagtga

SEQ ID NO: 512699 - DNA, 798 bp, Stenotrophomonas maltophilia
atgaaaaagaactccctatgcttgctactcacttgtgcgctcgggctaacgacccctctagcagctcaagagaacccactacagcctgtttgggagcgtgcttcgaaagaacgcgaaagtcctgccccctacactgggaagtactgcgactactcgcagttcagcggcttggaattcacattctcccgcgacgaggtctatcgaaagtatggattccagcacttttcaaagactgtagatgggtttgagagtcttccctttgatgagtacgcggggaagagggggaagatcggccgagaggccggcgccgatgcccgggaggttctcgttgaggactgctcctccgcatacttgcgtaatgcgagagagattgacgcggaggacgcgatggcattcggcatcgagttcgctgtggctccggccactacctgggtcgtcacaagtgaaactgatcgaatgactgatgcgaagtcctgccatgtgactccacagaccgatcggttgccatatccgatgttcttttatcactcgaaagaagggctttcagtggctgttgtcggtggtgacttccccggtaagagcacaaggtttcgtgtggacaagaatcgtgcagtttctgaggtcgatggcctaagcggtcaaagggctcaggcacttgtggcacagatccggtcgggcgggaggcttctgctcgttggtgcatatcaatggccctatgagtcggaagtaatccgtgagttcaatctttcaggcttggtagagaagctgaatacctgtaagtcagcggtcagccgctag

SEQ ID NO: 512700 - DNA, 1047 bp, Stenotrophomonas maltophilia
atgtccattggcgaatgggtgagcatgtacgagcgtgaagagcttgacattcatcctgagttccagaggttctaccgctggtcagacgcgcaaaaggcggggttaattgaatctatccttctaggcattccattgccgccgatcttcgttagtcagcgagaggacggagtctgggatgttgtcgatgggctgcagcgtctgtcaacaatttttcagttcatgggaatactgaaagatgcaaatggagggctggttgagccactggtgctgatcggaaccaaatatctgccgtcgcttgaaggcgtcgtctggggtggggacgatgaagcggaaaacgatatgccgaaagagcttcggctgattgttaagcgctctaagattggcgcaagcattgttctgaaagagagcgatgaatccgctaagtacgatctttttcagcgccttaatactggcggatcagagcttagtcctcaggaggttcgtaactgcctgatggtgatgattaacaaggatttctatgagtggattcgcaagttccgtgaaaacaccgacttcaaggaaacgactgcgctgagtgatcgtccaattgaagaggcttacgatactgaacttgcgctacgtttcttggtatttggcacaattgcagtgagtgagctcaagtccattggtgatattggcgtcttcttgactgagcgtatgactgaggttgctgctgcgaaggattttgcggcaaagcctgcaactgatctgttcaataatacgttctcaattatcaatggggccttggaggatgatgctttcaagcgttttaattccgcaaagggtcgccacgaaggtggtttccttctctcgttgtttgaggtcgtagcgttgggggtggccttcaatctgatggagaatactctatgcagtaagaacgaaattcgtaagcgtgcgcagtctgtttggtctgatagctcattcacgaaatgggcaacgtccggtatgacggcgacgcgtcgactgccgcatttgatcccctatggaagagctttgtttagggcgtaa

SEQ ID NO: 512701 - DNA, 636 bp, Stenotrophomonas maltophilia
atgcgaaccactgatgatcttttgcgtgcgatatcggaagacttgatttggcgaaagaaggagcttacggagcttaggaatctcgtaaacgactatgatggcaagatcaggcagcgcgtcctaattcgttcggcggtcgcgttgctctacgcgcactgggagggctttgtaaagaagtcttctacgtattatctaaagtatgttgcgttccagcgtgcgaacctggatcagttgcagaccaatttcctagtgctggcggctagattgccagccgcgcaggctgcgggaggtggtgggttcaagggcgggattgatctcgctgaattttacttgaactgtgccggtagaagggccaatgtaccgcataaaaggatggtggacaccaagtcaaacttgggctccaacgtattgaaagacattttactgatgcttggattggacgactcggcgttcttgaccaagatgcagtacatcgacagcaacttggttaatccccgtaatcatgttgctcatggtgaggatctttcgataacggttggcgagtatcgcgacttgcatgacaccgttatggagctaatcgaagggtttagaacatctgtagagaatgccgccgtgacgaagcgttatctcaagtag

SEQ ID NO: 512702 - DNA, 144 bp, Stenotrophomonas maltophilia
atggtgacgggattgcagtcccaattttggtcctcgggtggcgcggcgggtgtcattgcgttgtatatctttgaaacgtatcgattggtggtagattgcaaatccgtttacagcggttcgattccgcttgaggcctacaattga

SEQ ID NO: 512703 - DNA, 837 bp, Stenotrophomonas maltophilia
atgtttttttcacaacgaatgggcttgagtccggtaagggttgagatccagctccatgatatggacaaggctctgagagtcgcgttgtggaacgcgtatcaaccgaacatcattgtcccaggcagaaggaatcaattcacggactcctcgccgttgatggagtacttccggaccctctgggatcaagtgctgcacgagccggtggatagaatccccccattttatgacgggactgcagccgaaatcagcgcgtacttctttgaggtcgaatggcacgaagtctacggatttcttgaattctcgatgacgacacccgcgctcaatagccaataccaagacaggttgggcctaagcatcaatcttgctcttgagagggagatgtcaggctataggctagtcaataacgtcttttctcccattacggattcccaggagatctcaaatattgaagaagcgataaatcgcacagatgcacctgcgggcgcgaattcgcatctacgtgcggcgctcaccctaatgtctgatcgaattaaccccgattataggaattcgatcaaggagtcgatatccgccgtagaatccatggctaagcatctcaccaacaatccaaaggcaagcctaggcgaagccatcttggttctcgaaaggaaaggcgagatgcataacgcgctccgcaaaggcctttcatcgctttacggatacacgtcagacgctcacggcattcgtcacgctttgatggatgaaccgaatctaactttcgtggacgcaaaattcatgcttgtcgcgtgtagtggcttcgtcaatttcatgattggaaagtcttcgaccagcggatga

SEQ ID NO: 512704 - DNA, 1023 bp, Stenotrophomonas maltophilia
atggattggcctggtgaaaagatattcactcacatgctagacatcgtagagcgcaatttattgtcgcccatcgtcggtccgtggaaaattcggcgcgaaggcgctgcggcaatagaagttcagcgagggcaaatgctgtctattgctcaggtcgaggccgatattgctagggtcaagtcaggggacctcgtattcgcgccggatggaaacgggtccggtttcccaaagttgctccctcggcccactgcgtcggaaagtgtacaccttcaatctaccgttcgcgctgagcatcacttcgcaggtgccttcacccacagtgcgattcgaatgctgcgcaaggaggtgaacgtttggaaggctgttgcacgcgccggtgaaattttattggagggcgaggacgtagatccgaagggtgagcctgatcccgactggttagagcggtggcgggagaacgcgagcagcgtcagcgcggagagaatgcaggagctctgggcgcaagtgcttgcgcgggaggtgcggtccccaggtgcgttgtctttgagggcgctggatctcttgaagaacctggacagcagtgacgctgcaaaaatcgaacggttagcgccgttcgtcatggactcgagctttgtttatcggagtccggatagtgaagatccgcgttggctctcatatcctgaagcggttggccttcaggagcttggggttatcgctggcgtggaagcaacgacgatgaattatcgattggggtcgacgtcaaagaccaaataccatcaaggcttaaggattggtggatacgggatctctatcgttggagaggatccttcccgagttgtggatctacggtgcttcaaggtgacagagatcggtaaggaaattcttcagcttgttacggctgattccgatccggaatatgtcgaacaagtcgctgtcgccatcaagaaggagggctacaccgttcacatgggtttgactattatttctgaaagtggtgagacattcttgaaagatgcacgtgagatatag

SEQ ID NO: 512705 - DNA, 1062 bp, Stenotrophomonas maltophilia
atgtcagaggggtccgggttgagccagccctccacctgctcgggcttgatgttgatgcatgcgccccagctagagcggtccccgtcaagtctggcacaatctgaattcccgacccaaccaaggatggcttcaaacatggtcagcaaccagggatgggtcagaaacccgctatcagttatcgcgatatttgcaggccttgctgaggcaagtggcgccgcggtgcttccactgctaaatgggaacgcgcaactcatcttcatgcggttcgttatgttctttccgtgcgcacttgtcggattgttcttttacgtactttggttcaagcccaaggttctatatgcacccggggactacaaaaatgatgagtccttcaaggaaatgcatggagtattctcaaaggacgggacaagcgctccatatgctgcgcagacctcgaattcggaaccagcggtggattggcccgcttccgaacaacaggacgtagacactcccagccaaactacgccagaagcctcagattctgaaagcaccccaggcccaaccgaagtccgtgagcccgcagcgccgcacgggacctcgcatgagggggaggaagagcgaatcgagccgaagcaaaccaccataactcccagctcggaaaccccaaaaatcgagtttgcggcgttcaatgcattcctagccgaaaagaaggctataaccgagttgcaaaagcgttacggaggtgtcgcaacggcgccggcgatcatgtccgccacaggcactgcaccatacttgattgacgcctttatcagcaatggagatcgccagtacttcattgaagtcgtatacgcatctaggccacttaagatcagccggattcttggcgccggcaaacgattgaccactgcttgggacgcagttccagacaaggacaaaggcaagacgacctgcgttctatgcatcgtctccgagcaagaatccatgcttgaaagaaatgcatctaatgcacagtcgttgttgaccagcatgcacccaagcgtcaatctccgagtggagcgcgtgctgctgaataatctccaatga

SEQ ID NO: 512706 - DNA, 234 bp, Stenotrophomonas maltophilia
atgcggactaacctctgggatcgattcggcgaactggtcagcagcaaccctcgattactggcgaccgtcaccgcgcacaacagtgatggtactagcacgttgactacctatgacggggtgaagatgcgggcctttggccaactccagttggccatcccatacaacgtgtgggtgcggggtggtcgtttggtcgaagccgcgccgaatcttccctcgattgaattgttggtctga

SEQ ID NO: 512707 - DNA, 987 bp, Stenotrophomonas maltophilia
atgccgatcgaagtaacaagaatcactttggaatcgggccggagcgcgtggggctggacgttcgactttgagcttgccgatccggcgcagctggatttcctgaaacccacagcggcgggcccgcgccagttcgaggttgtgctcaacggccatgcctggactgggatcgtggagagctatcagaagcagcgcgagttcgcggatggggcggtacgcctcagtggccggtcgcgcactgcgcttctcgctgcgccttacgcgccagctcgggtgaagatcaccggcgatgatcggagcgtgtcgcagctggtggcggaggagctcgccgatacgggcttcacaagccagtacgggaccgtcgactggatcgttcccgccggtgcttggttctacgacgctaacacgcctctcgatgccatcagtggcttggccggggcaagtggcgcggtggtgcagtccgacccagcgcagccggtgttgcgggtcagggccagctatccagtcagcccgtggcattggagggaatcacctcctgaccatgttgtgcaggaggacatcgtccttaccgagagccttcagatgcgcagcgcgccgctgtacgatgcggtggtggtcaccggtgagctgccggggaagggcatcacctgcaaagtgcgcaaggacggcgaggcaggtcagctgttcgcgcaacaggtcagcagcccgctgatcaatgttgctgctgccggcgccgagcgcggtcggaacatcctcagtgatcgcggtgagcaagccgctgtcgacctcaccatgccgctgtttcccaagccgcttagaccaggtgaggtcggtcctatcacgccgttggacttggtggaggtcgttggcgctgcggggatatggcatgggcagtgcgagtcgctgcgcgttgatgttgtgatcgatcagcaggcattggtgatcgagcagaccgtaacccttgaaaggcactacagcgatgcggactaa

SEQ ID NO: 512708 - DNA, 471 bp, Stenotrophomonas maltophilia
gtgttcgaatccgccgttgcagcctatcgcgcgactctgcgcagcagcatgcaggacggcgacgcgccgctctgcgagaccacccgggcccggctggcgcaggcggatgaactgctggaacttgtcaggaatcagacccgcaccgtggtcgatccagcggacccgtggcgcggcctgtatcagccgagccggctcccagcccgcaatgcccacggcgagattctgtgccatccggacgtgccgatgtgggctgatggtcgcgagacttcgctgcgcccgcttttccttgcgcaaggtttcgacctggtcgtggttgagggcgaactttccgaagaggccatcggatctggcgtctatcgtgccacacaagagctgcacgactggaaccctgcagcaccgggcgacgactggcgcctcgcctggtggaccggccagagttctgtagacactcagttgccgctctgcgcgtag

SEQ ID NO: 512709 - DNA, 600 bp, Stenotrophomonas maltophilia
gtggctaaggaaaaggcgattgagggccggccagtcaagtcaggcgttgatggagccgcaactccggcccaaaaaagcggagtggaaagcatttcgaaggtgaccgccgactacttggcgtcactgagggacatcgccgagacaacgcaggtcgtaatgcctcatctcatcgggtggcttaaggatcaaagacgggaggccaccgagaaggttgaaaaggcgggcgcagtgggaaagcctagccctggtggcatcaatttccgttctgctcacgatgctgttgaattcgctaccgcgcaacgtgaacttcgaaagctgcataagaacaagagcgccgacctcatggctcgggcgttgtttgttcaagttttctgcgaatacgatgctttcatcgggcgcatgctgactactgtcttcctctcaaaacccgaccttatgcggtcgatcacccgcgagatatccctcgcggatcttctggctgtcaatgacattgatacgatctgccagggaattctggagaaggaagtagagacttttcgacgggatagctacatcgaacagtggaccggccagcctttcgtagacatccggttgccataa

SEQ ID NO: 512710 - DNA, 612 bp, Stenotrophomonas maltophilia
atggccttgtgcctcggtcttcgctctggcggggatcgcgggcgcatacctgggttccagcttgggcaaggcgttcgacggcaggagcctgttggcgctgtttgctgtggctatgatcgttgtcggcatcgccatgcttcgcaggcgcaacacgcctggactcacggacgctcggctcggcagaggcaacgcgcccgcgctgattgggctgggcgccaccgccggcgggctttctggcttctttggcattggcggaggctttctcatcgtgcccgcactggtggccgcgacgggcatgccgatgatcgccgcagtcggaagctcgctcgtcgccgtcgccgcatttggcatgaccaccgcactgaactacgcgcgtacaggtctggtcaactggaagctcgcggcagttttcgtcgttgccggcgtggctggcggtattgcaggtgcagcaacttcgacgaagctggccaactatcgtggagctctgaacacggtatttgcagtactgatcttcattactgccgcatacatgctgtggaaggtgagctgaccggatgtgctccagaccacagccgagcactgatagccagcgcagcgcttcaaaggctttga

SEQ ID NO: 512711 - DNA, 198 bp, Stenotrophomonas maltophilia
atgtatcaccagattcgacaccgcattgaccgctactgccagggcgctggtgccgatagccacatgcggatctcccactccgaccacgtagagcatcagtggtaccgccaggatggatccgcccccaccgaccacgcccaggacgaagccgaccaggacgccagacaggccgcccagaaccaactgcagcagagatag

SEQ ID NO: 512712 - DNA, 138 bp, Stenotrophomonas maltophilia
atgaggcgaggggagcaggccggcacgcgcatcgttgacgacgcggacagcctgctccaagggggcgtctaccgctacggattggttcacgactggctccggggggattggttgcttaatacttacatggttacctaa

SEQ ID NO: 512713 - DNA, 936 bp, Stenotrophomonas maltophilia
atgtatctgccgtatcttagaaatcgaactaacgaggtctttgcggttcttgaaagtgcgccgataactgctgcaaatagactgatattgccgatttttaatcttgttgatcaggggggattttttccgggtcgggcaagaagaatcgcagctagtggacagccctttgcattaattttgaatacggcgccgcatgcgtcgtggagtgcaatcgtcgcgctattggaagagttgaactcggcgcatcctcatacagtatttcctgcatttgaaatttcggccgcgacttcggcagcagagcttgcatggttctgttctcagttttcagcttggcgcacaatctttgttcaccgaacagttccttcgttcgctggcttggatgtcgctttgcatagtttggcgcttgagcctatgcacgtttccgaactcggggtcgtgccttctgtaagggcattgagtgctcccgcgctcgggctttcatgtttgacagatgcgtttcagcgtcaaatcgtaaatggtgcgtatccagctacgtcgccatttgacaacaatgtgaggcgctacgtcggccttggatttgatggcgtaagtgacttcgcgactgttggagaccattttaagaaggggggtgggcaggcatcccatgttgcgttgcacctgacggagtcagtagggggaagctatgtttgcaatcatttcgtttcgcattcgacgcctaagtccgctggtattagattcaagtacttggatgcgctcgcgcagcttcgcgctcatgttgcgaccaatcctggcgcctttctaacaacgggagtccaggaattcatgtctgcccactcatatcaggggctgggtaccgccaaacgatggtctattcggcaccatctcgaattgatgaattcagaattgatcggcgctggagcaaaaactctcttctag

SEQ ID NO: 512714 - DNA, 861 bp, Stenotrophomonas maltophilia
atgagaacaggccacttggatctgcagtcaacgcgtgatttgcacagactatttgaggcctcatctttaaggcagatcgctggtggtgcgccaacccaactcctgattgacgtcgctcgcgactttggcatgcatcgcggagccaagaactttcacgaagttctagagctagctcaccaattgcttggtcggggacgcaggaccgaatatttttacaagaacctcttgattaagaagattctattcggagttcatagccctcgtacgacatctgtttttagtgaattccgcatagcagacagtcgcgcagatttagtttttgtgaacaataaggcggtcgtctatgagattaagactggccttgacgacctctcaaaagcagaaaagcaggcatttgactacttgagctgctttacgtacgtgagtttcgtactagcgccaaatcatttggatcaggcgcaacggaatctgcctcgcgaagttggcatttctggaatcagcgacagaggtggaatctctgtggttcgccctccagagaggacgaccaaatttttgagtaaagaggcgatcttcaattgcctgctgatgggcgagtatcaacagcttcttcgtcagctaggctgtgaaggagatgtcgagtatggacaggcaatgtctgtcctggattcggtcgacgttgttgaaatgcatgagtatttggtgcgatgccttcgcgcgcgagatcagcgagaaattcaaagcgtgggatggtctgagattccgtccgccctgctcgccgctgcctgctcatatcagttgagcgtcacgcagtggagaagagttctggccgttcttgacacttcaatagacgatgtcctataa

SEQ ID NO: 512715 - DNA, 1287 bp, Stenotrophomonas maltophilia
gtgcagcagcgtgtcattcaccgtcaccccgccggccaccacctgacggaggatgcgttccaccgtcgccgtgtcgtggctgaagggatacagcgccagcggccggtcgcgggacagcacgtcggccagcgcggcatccagatccgggtaggcccgcaccggcaggatcggcccgaagatctcctcgcgcatcaggtccagttcgtccggcgggtccagcaccacggtcggcaccagcaggcgctcgcggtcggcgcgcgcctcatccacctgcgccagcggaatcaccggcacgccgcgttcgcgcgcctgtgccagatagccctgcaggcgccggtactggccttcattgatgatgcgggtgtagtcgtcggcatcgctgaagtcgccatagcgctcgcgcacctgctgctgcagcgcctgtacgaactcgcgctggcgcacggtgtcgatcagcacgtaatccggcgcgatgcaggtctgcccggcgttgaaccatttcccggtggcgagccgcgcggcggctttgtccagcgggaaatcgcgacagacgatggccggcgacttgccgcccagttccagcgtgaccggcaccagatgttcggcggcggcggccatcaccttgcggccgaccgccgtcgaaccggtgaacaacagatggtccagcggcagcgaagacactgcctccgccacgtccgccccgccctgcaccaccgccacccgatcgggcgggaacacactggccagcagatcggccaggaacgcgctggtgcgcggcgtgtgttccgaaggcttcagcagtacgtggttgcccgcagcgatggcggtggccaaaggcaccaatgccagcgtgaccgggtagttccagggcgagatcaccccgaccacacccagcggcgtcggccgcagctgcgcgcgcgccggccacagcttccatcccgccgatgcccgctgcggcttcgaccagcgccgcaggtggcggcgcaggtggtcgatggccgacagtacgctcatgccatcggccagcttcgattcaacgtgggcgcgatggccgaaatcctcggcgatggcttgggccatctcgtccaaacgtggcttcaacgcctcgcgcaggcggcgcaggtcggcttcgcgctggtccagcgacgggcgctgcgactgccaggcgctgcgcagggtgtgcaggagggcggggaggtcttccggcgtagtggtggtcataggccgactatacggcgtgctgcgcgacgcaatggtagtgccggccgctggccggcaacctcatga

SEQ ID NO: 512716 - DNA, 2994 bp, Stenotrophomonas maltophilia
atggctacccttcacgagaccgcctacccgcgactgaagcctgatcccaccgccaaggaactggaggagatctataccccgaccgccgctgagattgcattcgccaagcagctgaccacccagccgggtccgcagctggcggtactgattcatctcaagctcttccaacgcttgggctacttcacgctgttggccgacgtacccgagcggatccggaagcacatcgccaaggccgcccgactcgggagcgtattggacaccgaccagctcgaacgctacgacgcttccggcagccagcgccggcatatgccgcagcttcggcaattcatcggggtacgtcccctggataaatcgggcttggcttggctggacacagtggccaccggagcagcccagaccaagcacaccatcccggacatcgtgaacgtcctgctcgaagagctggtgcaccatcgctacgaactgcccggtttccgcactctggagctggccgccatcggcgcccgtgagcgggtcaatctgggctactaccgcagcatcagccacgcgctgacgcctgccacgcgcacgctcatcgacgaactgctgcgcgcaccggaagggtccaggttcaccggctggcaatcactcaagcgcgagcccggccggcccaccaacaaggaagttcggttctacctgcagcacatccgcatgctgcagcagttggccgaccagctgcctcccatcgatgtgccggtgcccaagctcaagcagttccgtgcaatggctcgggcctatgacgccagcgagctggccgaactggctccggacaagcgctatgcgctggccaccatcttcattcgcgcccagcatgccaagacactggatgatgcagccgagttgttcatcaagcaggtgcgcgggctggagaacacggcccagcagaaattgctggcctaccagctcgaacatgccaaacgggccgacttcctcatcggccagctcaaggaaatcctgcaggcctatcagctagacggcagcgatagtcagcgcgtggatgccatcgacaacagcctggaagcggaagtgtcgaccttgctggccgaatgcgaagaacatatggcctacgccgggaagaactacctgcctttcatgctgcagccctatggcgcggtcaggccgctgctgttcaatgggctggagctgatgaaacttcgggcgaccagccacgacgccggcatggagccgctgatcgcagcggtgctctcgctgcgcaaccagcgccgtgagctgatcgaggtcgcctccctcggtttggacccggaaaaggactttgactggatgtccaagctctggtgtcagcacgtgttcggcaagcgggccagtgcagccggcgccggctggatgcaccgtaagtacttcgagctggccgtgctggtgcaggtcaaggacgaactgaagtccggagatctcttcattcccagcagcggacggtttgatgactaccgtgagcagctggtcgatgaagccaccttggcccaggaactggaagcctacggccaggtgtcaggcctgcccaccgacgccgagtctttcgtggcgggattacgtgcacaactgacctccctggccgatgaggtcgacgcgcgtttcccggagaacgtacatgcggacatcctggatgggcgcctggtgctgcggaaggggcaacgcgccgaagtctccagcgcgattaccacggtggatcgcctcatcgccgaacggcttccagaatccagcatcgtcgatgtcctgatcgatgccagccaatggctggatctgcaccgtttcttccgcccgatcgccggcaccgagagccaggtcgaagatctgccccgacgtgtgatcaccacgccattctgctatggctgcaacctggggccgacgcagacggcgcggtcgatcaagggcttcagccggcgccaggtcgcttggctcaacctgaaatacgtgaccgaggatgtgcttgagaaggccatcgtggaggtcatcaatacctacaacaaattcgacctgcctggctattggggcagcggcaagagcgcatcagctgatggcacgaagtggagcgtctacgaggacaacctgctgtcggagtatcacatccgctacggcggctacggtggcatcggctactaccacgtgtccgacaaatacgtagcgctgttcagccacttcattccctgtggcgtgcacgagggcatctacatcctcgacggtctgttggccaacacttccgacatccagcctgagatcgtccatggcgacacgcaggcccaaagctatccggtcttcggcctggcccacatgctgggcatccagctgatgccccggatccggaacatcaaggacctgacattctttcggcccgaaccgggtagggcttataagaacatccaggcactgttcggggacagcatcgactggcgactgatcgccacccatctccacgacatgctgcgggtggtgatctcaatccgattgggcaagatcaccgcgtcctcgatcctgcgccggctgggcacctacagccggaagaacaagctgtacttcgccttccgggaacttggcaaggccgttcgaacgctgttcttgctgcgctacattgatgacaatgagatccgcaaaacgatccatgctgccaccaacaagagcgaggaatacaacggcttcgtgaaatgggtgttctttggcagccaggggatcattgctgagaacgtccaacacgagcagcgcaagatcatcaagtacagccagctggtggccaacatgatcatcctccacaacgtggaaggcatgagccggaccttggccgagatgaggaaggaggggattgaactgacgcccgagatcctggccggcctgtcgccttatcggaccagccacatcaatcgcttcggcgactaccacctggatcttgaaagggaagtggcgccgctgagctacacagccaaggtgcttgaacagaccccatag

SEQ ID NO: 512717 - DNA, 264 bp, Stenotrophomonas maltophilia
atggtgctgaccccgtttgcccgcacgggccgcggcgcggccaaggcccgaggccgaattgaagagatctgcttggcccccttccaggctgtgcgcctgaacaccgccagcagcgagtaccagttgactgctcccaccgatcccgaaagggatctggatgaaatcctggccacgttgctcgatgacatgcaccgcatggccgatacgcaccagtgcttcctggaagcgtcgctcagtacagacgacggccggcactgggactga

SEQ ID NO: 512718 - DNA, 1293 bp, Stenotrophomonas maltophilia
atgtctgacggaggttcgttcgatgcgattcttcaccattcgcccgaccggctgctgggcatctcaccattaggattcgtggctcagaccctcaggctcaactgcttagactgccatgacagtttgggcttgctaggggttaggccaaggtactcggacgattggtgcacatacctctgtcattcacacggtgcaaaggtcgcgatcatagacagggtgccggcggccaataagttggcactattgtgggacccacggaagtggcaagcgctcaatggcgcggctgctcaatggaggccctatctaacggcttgcccggagtgtctcaagagcagctatcactcgatgctattccagctaccctgggtcaaccagtgcccttggcaccgggtgcgtacggtcgctcggtgcgggtcttgcggtgcacctctctggaaatcctttcaatctgacgctccgcctttcatctgctcttgcggacgcgaccatgttcaaccgtccctactcttgtccgatcccgaggggaaggatggggcgcgagagttccatgtgcggcgataccttgcgtgggctgatgccagtcgctcgcgtcgggacctcttcggctgcgagggggactcccgcgtgaccgaagcgacctctgggttgttcgtcccgcgaggagctccctggcatggcggaactgagggaagttcaggcctactcgtccgctcatcggtggtaaagcacccatgcacgccaaggcagtccttgtcatcagaagctctagcgggtttggcgccagccattgcggatgacgcggagttttttctagagctccctcaggaaatggaaaattcccttgagaggatcacattctccatagcctcaaagttccctccgggggagttctctgaacgtgaaaggcgtctgctaggcatgtcgaccactgatgattcgccgcgccgattctcaagagtcaacgtcatcctcctggctgcgtatgctgtccatggaaggctcttcttcgacgggagggtgctgccacgatccgctcaagcgacattgcgggagatggccgaagcaatttcccggcacaccggcgagggttcacgattggcggcttaccaccgcgcgtttagccgcgtcctattcagggcctatgcgcgagccgcatttcaggtcctaagcgaggttgaatactccgcatgcaaaaggccgcccccgccgctgcgacctattgcgctgacacgaagccggctgcgctgcagcgacgtaaagctcctgtggataccggaagcgacctcaaagtga

SEQ ID NO: 512719 - DNA, 1047 bp, Stenotrophomonas maltophilia
atgagagtcaatcacgaagccaatgtcgatccgggactgggaacattcaaaacggtttttactaaaaggggggagcccattgtggagaccgtcgcgatggaagaggcgctcaccaagatcgtgctggcaattgagaagggatatcgcggcattgggctgcattcgcaaactcgctatggcaagacctttctttcccggtatatctgcaaaaacctcgattggtgtccattcagttgcgtcgctgtgtctgcagttgttagagcaatcggcatcaacgagtctgcattcatggattggatgatagcccagctaggacagcgaccaatcgcgcgacagtcggcccagaacaggattgatcgcgtcatcaatgccattgagatgatgttgaacaatgcaggcgtggagcgactgctcttggtcgtcgacgatgccaatctgattgaaacagcggctctgcagcatttcgcaacgcttgataatgagctggagaggcgtgggaagtcgatcttcgtagtttttttgttccaggataaccacacctccaacaagcaagaggcgatcaacaagctccatgccccgccgcagatcagggggcgcttcttcacgcagtttcatccgttccatgggattcgctcggcgaaagatctccgcgtctttcttcagcggtttgaagacgacgctgagatggcgccaggggcaggcgtaacattgcctaggagtctggcaccccacctctacgatggcccgttcaggattgccgaatacagcgcaaagctgtgggactttggggtgcagcagagagccgcagctggtcggggggaattcgatgagtggcccctgcaagcagtgaatgttatggctcagtacattgcaaagcggatcatcaccaagcctggctttactgagatgacagaaatggatctcaagatggccatcgggtattccgaccttgttgagtacgacagcgcctgtgcggagctgaatttcacccctgatcggggaagcctggctggccctggggggggtatggagtatggcgatgtctga

SEQ ID NO: 512720 - DNA, 1890 bp, Stenotrophomonas maltophilia
atgagcatgctcactctgaagcagatctcatcatgggatctgattgctccatctcagctgacgccgaaagcctatcgatgctacacggccagatgccaggcccttcaggccgtagccgcaggcgtttctatcgcatgcgcagctaggcgtcacggggttaatcccggcacgttaggatccacaatcaaaaacgcgttgcagatggcccccgacggtaggccttggggttggcgtgcgtgcttgccgcacaaaatccgaaaccacatcgccgcctcacccgcagattttcccaagttggcaggccccggagccttcaagaaggtgctgagactgctccccgagcttgaagagcagctgacagcctactcagggcagctgccgaagcggaacattcccagcagcactttcgagaactttttcaagaaggtgaagtccctcattcgcaagagggttccaagcgatcgctaccccgcaaacgacacaacttgtgcccgacgtagcatcgtgaagttcatcaaggattctcgccgcggcacacctttcgtcgacgaagactttgaagtggaagacgctgtcagtgccggccagttgcaggaggtctttgctctccagtacggcgattgggttcaatacgatggtcacaaactagacgtctccttctccgtggagggccatgatgccgatggcaatccgttcatgcagaagatcgactgcgtctggcttatcgctgggtgctttgcgctactccgcatgtgctgcagttggaccctggcattcgcaaagaactacaacggcactgacttcaacgcagtttgcgcgaacacacttcggaaatgggagcccaaggatctggtgtgtccccgcatgaggtacgtcccgggtagcggaatcggcactgcacctgcgctcggctttgtatcaagcggagctatcacaagcctagacaatgctatggctcaccggcttggtgtcaatcgccagcgcatgatctcggaattacggggggtcattcacttcggcgcaagtggagttccggaaacgcgtggccttcttgaggcatggaacaagcgcaaggaagagactgcgatccgcctactgcctggtgcgtttcgcccccggggcgatgaagtagagaagagcatcaccaatggcagcgatccggatgactaccctctgcagcgagatgcactggaggatctgatggatgtgattgctgcggcttcgaacgtggaaggccatgggtctcaccaaggacgcgatccttacgaggtcctgcggaactacgcagcatccgggggctggcttttcgcgacccgaaacaacgaggatcggggagttgccatgtcgatcgtgagcactaaagcccagatcaagggggacaagcgccgccgtcggcagccttatgttcagttcgcacacgcgctatatcgatcagtcgcactgaaaaacagatgggacttagtgggtgctgtttactctgctgaagtggacatcactgatggccgaacaatgtacctctacaccgaggaaggagagctgttcgttgtgcttcgcgcactgcgtccgtgggcaaggacgccgcacagccttgccttgcgcaggctaatccacaggcgggtcgctcgaggtgatattgacctatcgggcgtcgaggatgcagttctagcctataaggaacacttgcgggcgcgcttccatgacagcaaagaagcggcttcccttcaggtgcagcacaaaaagagtttcgacgcggccgacgctcctgaggtacgcccgataacgatcgccagtcctccacttcaggggacaccccaagcggtcatcatcgcggaactggcaatccccatttcgggaagggttaagctcggcaggaggggatacaagaaatga

SEQ ID NO: 512721 - DNA, 708 bp, Stenotrophomonas maltophilia
atgactagccgccgttctgacgccacgcaggctccgcctcacctcccctattcaccgaggagcctctcgcccagggagcagatcaggcttgacgcctatcacttcctctcgccgaagaacggaggccgaaccatcgccgttgtcgagccctgccggctggccttggccttggagctagagtttgacttgtcggtggcgagctacgtggagcgtcctcgcactctagccgtcgaaggcagtgagatcgagctttgcttctggctggccaagacggatggcgcggagagcttcatcgcgttccgacggcagactaagcccaccacctacgcagagcgcgctgaaaacgtggcttgcgccaagctcatggaagcagcgaaagccgctggaatcgccctgaccatccgtaagccgcggtcactgctcacggctcgggtggccaatgcgacacgtcttgaacttctaccgtatgttcagtcagccgccgacctcaaggccgtggatgtgttcattgacgctgtttgccttcacatgaatgccaaccccgtgagttcgttctacggcattgagaccagtctcaacggcacgttcgactggcgggatgttcggtgtgtcacatgcctgctcatccataggggcgtcctcagcatcaacttcagtgagcgcctcaccgcgagaacacagctgcgcctagaggtcgcaggcatatga

SEQ ID NO: 512722 - DNA, 621 bp, Stenotrophomonas maltophilia
atgggggctcgatggcgccatccatggcgccaacggtcctgccaacccacaccgccccatccccgacggatttccggtgacggaggtagatccacgccatgcgtggatgaatctccattgaaatcgattatttcgacaattgaacgaagagcatccacgcatggcgtggatctacgtgtcgaccaaggtcgacgcccaccaagagcaggccatgcattccgacagatcgcggagaactgtcgaaggcggggtgggtccggtggcgggggcgtgagccgcatggatgcggcgaccgagctacatggacgtacttgcagcgccccccgccaccggacccaccccgcctacccacaggaaaccccgcttgggctgttgcttttgctgttgctggggttgccggccagcggccggcactaccgcgggtgcagggccgcaggccctgccgcccaaccccattacttggcagcagcgatctgcttttcgatgtcggcggccgtcaccgggccgaggaaggtgtgcgccagcttgccctgcggatccagcagatgcgtcagcggcaggcctcgcggcgtggcgaaatcggccggcggatcgaacgggtccacgatcacgatcggatag

SEQ ID NO: 512723 - DNA, 852 bp, Stenotrophomonas maltophilia
atgaccaccaaggcagacaccgctctggtggcgccgcacctggtcaagtttcgtggcgacagcatcggtacgcccgccactgagccggtgccgaccatcacctctggtgctggcgccgcgcgaccggccggcgccgcgcatgctctcggtgttgccgctgcctcgttggtcaccctgcgacgcaacatggtcggtgccgacgcgcgcacgccgctgaccaccgtggcagcgcaggctgagcaccatgcgctggctaccgccttccttgaacaggcaaacggcgggttctatcaaggcgccggcaacgatgcgcgcgacccagtcagcaccatcactgccagcggcagccagcagcgtctggtcaccgcccacctgatgaccaacaccagcgcgcactgtggcgcaggcggcgcagacccggtgccgaccatcaccagcgccggcaaccagacctttgtcgaatgcaccctcagccctgagcaggaggcaagcgccctacgcgtggcagccttcctggtgaagtactacggcaccggttccaacgttccgagcctcgccgatcccgtcgacacagtaaccacccgagatcgcctggcgctggtgacggtggtgatcaagggcacgccctacgtcatcgtggatatcggcctgcgcatgctcaagccgcacgagctgtaccgcgcccagggcttcccgcccggctacatcatcgatcgcacggccaacggcacgccgctcagcaccagcgccgccgtgcgtatggtcggcaacagcgtaagcccaccaccgctgcgcgccttggccgaggcgaacctcgaccgggtgccggctgacatggcggtggcggcatga

SEQ ID NO: 512724 - DNA, 408 bp, Stenotrophomonas maltophilia
ttgaacgttgagcacatcgctaccgcaggtgaccggtcaccactgatccaccaccagcgcgcggccgttgcggttgcagcggcgctcgaaactgccctgaccagcacgcaccctgccagctgcggcggccgcgcattgaccttcacgtttgccgccgagccgcagctgcaggccgcgtgcgacgcctggcgcgtgtacgccctcgccaccatcgacacgccggcgccgctggcggcgacagcgacccagcggctgacggcccagatcggcctcgccctcttcgatgaccccaccatggacctggcacagatcgcaaaccttgtaacgacggcacggtcggattcgcagaccgcgctgctgccggctcccaccgctgaagttacggaggcccgagatgggcgcagctga

SEQ ID NO: 512725 - DNA, 264 bp, Stenotrophomonas maltophilia
atgggcgcagctgagaacatccccgaagtcctgctgaagctcgagcaggtcgaagcccagaccgggatgaagaagagctacatctaccgcgagatgaagaagggaaccttcccaagagcctgcaaaatcgggcacggtactcgctggatgcagagcgacgtccaaaggtggatcgccgctctgacaccaagtaaatccagtcccagcttatctctagcaacgcataacactcagctagctaagctgaattcttctgccaagtaa

SEQ ID NO: 512726 - DNA, 921 bp, Stenotrophomonas maltophilia
atgccgtcttgggctgaccttcgcacacagttcgacgcgcagcccagcgatccgcaaaaacttgactggttggagaagagcctctatcactggttaggctgcgtgagtaaagcacgcggaggacgtaacgtcgttttctacgcgacggccttcatgcagaagcccgcggtacccgcttacgaaacgatgctcatgcttgaggacgttaacggtctcatggctgctctgcatggcatggattggtcgaaaaatctgacactcttgctccacacgccaggcggcgtccctggggctgccaatgccctcgttgagtatctgcattccaagttcgcagacattgaggtcattgttcccacctttgccatgtctgcgggaacaatgatctctctaggagcggatcgcgtagtgatgggccgtcagagtcagctcgggccaattgatgcgcagatgcaaacgaagcatggttccgtgtcagcgggtgcaatgctggagaacttccagcgcgcccgagaagagatcgccgccgatcaaaatttggcgcacctatggcatcccattctgcaatcaatggggccgtctctaaaccaagaggccgctgatgctttggcattcggcgaagccatggtcaaaggttggctggaaaagcggatgtttgctggggagagcaacgcagcagaactcgctacaaacgctgcccaccactttaatgccaccacggtccacaagaatcactcgcgccgcattgatcgtgatgaggcaagatcagtgaacatcaaggtcgaagatcttgaggacagccaggacctgcaggaagcagtattgactgcataccatatcgcttccttgaatttcactgtgactaaggcagtgaagattttcgctagcacgcagaatgttacttggcagaagaattcagcttag

SEQ ID NO: 512727 - DNA, 183 bp, Stenotrophomonas maltophilia
atgtctgccgcacaggtcgtcgacgcgatggaaaacgcggatcggctctacgccgactatatgaaactctcgcaattgggaacattgggcttcctcggcactgccgagcctcaccgaagcgagatcatcgcttcggctagcccagtcctaaacgagggttaccagaatgccgtcttgggctga

SEQ ID NO: 512728 - DNA, 1704 bp, Stenotrophomonas maltophilia
atgagagagctcaacgtttcagttgagtctgcgttctccggcgggcccacggattggatgtccatcgattggcatcacgtccaccggactgtcaggggtatgcagctacgaatcgcgaaggcgacacaggaaggcgactggcgcagggtgaaatccctgcaacggatgctgacccgctccttcaccgccaagctactcgcggtgaaacgagtgacggaaaaccagggtaagcgcaccgctggcgttgatcgccagctctggaacacaccgcaacaacgatggcaggcaatctaccgcctccgtcgccgtggctactcacctctaccgctccggcgcgtcttcattcccaaagctaacgggaaggaacgaccactgggcatccccaccatgcacgaccgggctatgcaggcgctgtacctgcttgcgttagaacccgtcgccgagagcaccagcgatccgaacagcttcggctttcgacaagggcgctcaacgcacgatgccatggcccagaacttcatctgcttggcgaagaaatactcgccaagttgggttctggaagcggatatcaaaggctgctttgaccacatcgatcacgcgtggctagtcgccaacgtccccatggacaaggtgatcctccacaagtggctgaaggcgggcatcctgtatcgggggcagtacgacccgacggaggaagggacaccacagggtggcatcgtctcgccgacactggcgaatatggcgctgaatggcttggagacgggattgaaggagcatctgtaccgctcccttggctacacccgtgcccaacaggcaaaagtgaacgtcatccgatacgcggacgacttcgtgatcacagggagctctccggagatcctcactgaccacgtccgtccatgggtcgaacgctttctggccacccgagggctcaccctctcggaagaaaagacgcgtgtgacacacatcgatgccggcttcgacttccttggatggaacttccgcaagtacagcggcaagctcctgatcaaacctagtctgaaaaacgcctccgcgttctacgacaaggtaaagggagtcatcagcaatcagcttatggccgaacaaggctcgctgatccggatgcttaacccgatgctcagaggctgggccaactaccatcacccggtcgttgccaaggctgcactcacacgtatggatgccatggtgttcaaggctctctggcggtgggcaaggcggaggcacaacaacaagggagctagttggattcgcgatcgctatttccactcgatcggaacccggcactgggtctttgcggcaccacgcgacaccgtagatgcttcggactccatgctggagctctacgagatggcctccacgtccatcaaccgacacgtcaagatcaaggcggagtacaacccgttcgatcctcgtttcgagctgtacgcggagaaacggcgtcaggaccggcttctcaggtcccgcgcgcaccgacgccggtgggctactctctttgcttcccagcaaggcaagtgcgctctctgcggcgctgccatcacccgggaaacaggctggcacgatcaccacatcgagcctaggttggcagggggttccgacctcctgatcaaccgagtcctgctccacccggaatgtcacgtccaggtacatatcttgggcatacatgttgttaaacccacagccaaggcttga

SEQ ID NO: 512729 - DNA, 1302 bp, Stenotrophomonas maltophilia
atgagcatccgccaactggaacccgtcctcagactgcttcgatctatctcaggaaaggctctaaagagtatttctgaagagcacccgatcgccgacatcaagaccataaagacgctttacaactatagctacaacagcggtacacatttgatcagcctgcttgagccacccggccacaattcacaggccatactcaacatactcacgtcttcccccacaaaggaaagtgagacacttcttgaggtaaagcgtcgcattaccagtgttctagagactgacctctccgcagaagaaagggaaagcattggatccatcctcggctctcacgacacccctcacgtacattggcgggacacaaacgaggcgatcgacaaagtcctcctcactcgtcttcatatagataatgaccaggagatattgcttaaggcggatgcatacctgattgaaaagacaaaagagttcatgagcgctttcatgcccatgaagcgcgatcaagagctatacctggcggcccacacccacctccgagctcttgaattcatgcaccatttgcagttcgaaatcactacgaatcgcgccatcccaaacgacaggaccataaacaacatgcagattgacttcagtcatatctgcaaaaatattccacctgcgcaaggtgtgaccattcaagcgcacacgcctttcatgtccctgagtgaggttccggcattctgcatcaagaatgcatcggaggttgcacgccttgtgtcggcggccactggcttcacctacaacaaaagagacatcctcactggaaaagacgctaccagagcactggtttccctagccgtgtacttggcactctccaaacttcccagtgatgaaaatccgaatccgattggaatcgtacatattgtcgccgccttctgctccgttctgcaccagcggaagatgaagtcgaagccaatgacatccaggcgatacagttccaggctaatttcaccacaaaagcagctggatgccttcatcgcacgcaaggaaaagaagctatcaccagccgcatctttcatctatggtgaaagaacactttggtacacccacgccctactcggaagagctcacgcgacgcgttctcacagaccattgcagactgagcaggcgaagcttctcaaagagatctattcatcactggaccctgctcggattagtgagctcatcaatgcatatcgcgatcacatggttagatctgcccatgactatgtagcgatgtatggccgggcagaagcgatgtacgagtgggttcatggcctacgacgagaatag

SEQ ID NO: 512730 - DNA, 729 bp, Stenotrophomonas maltophilia
atggcaagcttccactacagcatcaagagcgggaagaagggcagtgcacgcagacatgccaactacattgatcgacaagggacgcacagcgctcgtgcagacctgatccactcaagccacggaaacatgccgaactgggccgagggtgatcccggcctgttctgggccatggcagatcggcacgaacgggccaacggcgcggcctatcgcgagcacgagatcgcattgccgaacgaactgagcgcgctgcagctaattgaccttgcggagcgactggttgtgaacttggtcggaagcaaaccgtaccagtacgctatccacgcaccggaggggaagctgggtggcatccagaatccccacgttcacttgatgtgctcggacaggattccggatggtgtcggccgagcgccggagaagatgttcacgcgctacaacgggcggcagccggacgcaggggggtgccgcaaggacagcggaggccggagcccaatggaactgcgacagcaggtgacggcaatccgcaagctggtggccgagacgcagaaccaagttttggctgagtacggacatgaagcccgagtcgaccaccgtagcctgcgtgatcaaggcgtacagcggcatgccgaacgccacctaggccaacgcttcatcgaaagcatggctgatcccgagaaagagcagtacgcgaagtgccggtcggctggcacagctgccgatgcccccacttag

SEQ ID NO: 512731 - DNA, 1455 bp, Stenotrophomonas maltophilia
atgaacaacatgccagtcaagttgacccccagttatccgctaggtgccttccacctcataacgcgagaggcgggctatgagctggtccgaaacgtgcaggcaccggacgcgttgatcgggatgggcatgatcaatgcgatctcgatggcctgtcaggggttgatcgacgtgaggttgccgactgggcaagtgcgcccggtctcacagaacctgttgcttgtcgccgaatcgggcgagcgcaagtcgaccgtgtcgtcgctgttgcttgctccctttcgcgaagccgatgcgcaggcactgatcagccacacgctgaagatggagcagtaccaagccgagcacgggtcgtgggttgccaagggaaagggccttcgtaacgccatcagcaaggcagccagcaaaggaaagccgaccacggacctggatgaccagttgcttgagcatgttcgttccatgcccataaagccccttcttcgtcacttcctgcgccaagacataacggccaaagccgtgatggaggctctgcagggtaacggcgagtcgattgcgattaccacggacgaaggccacatgctgttcaaaagtgaagccatggctcaccttggtcttctcaaccgtctctgggactctccggaagtgctgcctctggatcgcgcagagaacgaacgcttgctggcgatgaaccctcgtgcttcggtcagcatcatgacccagtacgcaccgttgaagcagttcctggatagacgcggatcggttgccaagggaagcggtcactgggcgcgctacctggttggttggccgtcgtcaacgatgggccaccgccaaatcgatgcaaatgaaccggtatgggagcacctgccgaccttccaggcacgcatcagggagctgttgggcaagtatcgcgacatgatcgaaacgggtgcgatgaaacgcgaactgatcgggttcacggtggatgcgaaagcccgctggggagagctcgcgagccaaaccgaaagcatgctgcgcatgggtgagtaccttagcgacattaatgatttcgcttcgaaggtgatggagatcctcgctcgattggcagcggcaatgcactactttgctggcgaaagtggcgacatcacgctcgataccctggatcgggcgtttgccatcgtccgatggcatgtcgacgagtacaaatatctattctcgccccaatgcacggccccgcaggatcagatcgatgcccgggtagtggcagcctaccttcattcacgtatctggggtggactgacatccgatacccatgttcccaagaaccatgtcctgcgtaatgggccggtgcgcaaccgtacccgcctgaacgatgccctggcactgctggaggcgaagggagccatctgtgcatacatcgaccgtcgagacaaaaagacctacctgcgtctgaacaacaacttcttctgtgagtggaggcagtag

SEQ ID NO: 512732 - DNA, 354 bp, Stenotrophomonas maltophilia
atgagtaacatgattgaagctccaacagaggctcgtagctctctggcacagctggcgcgggccctgaatcagcaactgaccagcggcaaaggcaagctcgaatgcgacttcagggaagcatacccgctgctggagcagtacatcgcgcggaagatgcgcaagaaggcactgatggagttgttcaacacggcctacgagcacgagttgactttggttcagttccgcaagttgctgaatgccgagcgtgagaggcgtgcggtatctggggacgtgatgatctgcaccgcatgcgaacggccgctggcttccgccacgaatgaagctatgcacaccaacaacggggaggcggtgtga

SEQ ID NO: 512733 - DNA, 306 bp, Stenotrophomonas maltophilia
gtgaatacctgctcaacccatccgcacaccggtatggactacaccacttccgtgcctgaagccggacgtgtcgacctcgatgcaggctggccagacagcccgaccctgcgcctcaaggaactgctcaagctgctccgcgtgagtaggagcaaagcctacgagctcatgaagaccgaccctgacttccccaagggcgtcccgctctacgacggagagcagtcacccaagttctattggactcgcgaggctatcgcctgggccgaaggtcgcactaccaagttccgcacccagcagaggggcaattga

SEQ ID NO: 512734 - DNA, 783 bp, Stenotrophomonas maltophilia
atgagaaaactaggggtggtatgcctgctggttgtagcgtcatccattgtgctgacttcatgcggcgggaaaataaggagcgaagtcgtagcggcgtgcatgcgaggtggtgggccaaagaagaattgcacgtgtttctacaaaaagctggaggacaagtacggcgtaagtactctggaagctatgcgggatcatgggctggcgccaccggattttggtcagagcgttgtcgccagtgctgctgagtgcagtgggttggattcagccgtcgcgatggagatattgggtgtggatccccggtctacgccctctgtagttccgattgatcctgaagcaccaagtacgcctgtccaaccgggagagaggccgtcggcacctgaatttgcctacgatgaagcgaccattgacgccgcgattgccgtaacaggaggagtcgagtcgggtgaggagtttagagaagggaggaagacggcgtcgggtgatgttgatgggaacggagtccttagtgatcgcgctgtcttgttcacgattgaggtgggctcgcagaacctatccactcagtacttggctgtgttcctgaggcaggacaacgggagcttgaggttcgccagtgctacgccagtgggcgggcgaggcaatatggtcgacgacttggtcatcgaacatgaggaaattaggctaagtacattggagttaggaccggacgatcctgattgctgtccgacccttgagaggaagattagttatgtgctgcacaacggtaaggtcaaacgcgtgaactga

SEQ ID NO: 512735 - DNA, 216 bp, Stenotrophomonas maltophilia
atgaggtacttgattggcctgtacggcgtaaccgtcctgattgcaacggtctgcttttatatctggggacgttatgcctacaaaggattcttcttcaaccttagtcatggactggtatggccagcagtagtgttcccatccttgggaaggctgatcggaggtctggtctggctggttgtcatcgtcgggatactggcactggtgaaggggcggtaa

SEQ ID NO: 512736 - DNA, 687 bp, Stenotrophomonas maltophilia
atgtccgaagaagaccactacgagatcctcggggttcgccccgaggcccctctttgggagatagagctggccttcaagggtcggcgaacccagtaccacccggatcgttacgcagcaggggacgaagccgccatcgcatgggcgacagccaagatgcaggcggtgaacaaggcctactccgtcctcaaagatccagagcaacgcgagcgtttcgatcgatcacgggcggcggagcgatccaggcctgagcctgagcaggagctccgtagagccaagccggaaccaccgccgctgcgcacgctccgccaagccctgaaatcgcttgagttcaccaatgagccattcgagcgagtgttcgtcgcgccgtacatcccacgaaagaagctgcaaggggccctggacagttatggcatgggcctgcgtgcccaagacgtggtcgcgctcattgacgacacggtctttggcggcgcacgtgaggggatattgatcactgagacccagatccggaacaaggccaagtttgaagaggaggacacccgactgctcggctatctatcggacatcacggcgcatgggacgcgtattcggatcaatggcgagttgtacgccacgctgagcattccaaacccggatgacctggaactgttgttcgaggcggtgaatgcgcatctgcaagaagcacactaa

SEQ ID NO: 512737 - DNA, 492 bp, Stenotrophomonas maltophilia
atgcatcaagttgaagccactgtccacgtgagccaaatgtctaggggtgacaaaagtgaagaggcggctgtcagaagagcgctgaggattcttgagaagaggatgaacaccgcaggcccgctcttgaatgatcctgatgtggcgggggagttctttcgacttcgcctgggaggcgagacgcgtgagcactttgaggtggcattcctcgacacacgccatcagctgattgccgtggagcggttgttctcgggttccattgatggtgcgcagatccacccgaggattgtggttcaacgcgctttggcgcagaacgctgccgctgtcctgctggctcataaccatccgagcgggtgttgtgaaccctcgaccgccgatcgtgcggtcacctctcgactaaaggacgccttggcattgatggatgtgagggtgctggaccatctcgtcgtgtcagccgggcagagcgtatcaatggctcggcgtggatatctctag

SEQ ID NO: 512738 - DNA, 843 bp, Stenotrophomonas maltophilia
atggtgatgtacctggcgcggccggcgttctgcagtctgcagatggtcaccgatgtcatagcgcaacgccaaggcggttgcaatgccgcgttcttcaatggcatcgccgccgagtggcaccagcgtgtccaggactacgacacccatgggggggcgccgcagcacatcactccgtgggcagcaatccagccgcgacgtaacaccttcttgaacttgtacttgtcgccggcaaccgattcggtccaagggccggtactgcaggaaatgcggcggcgacacggcctgaactattgcccggcatgcggggagcccggcaagccaaacacgctagatcattatattccaaaaacgctctatccgcatttttgcattacgccgctcaacttgtttcctatgtgcgacgcatgccaagacctcaaggataccaagactggcgatgccgctcatccgcgtttcttcttgcatccgtactttgacgtgttcgtcgccaaccaagtactcgaactggtgattgctgcgccttacgacacgcccacatttcgcttgggggtgcaccaagggctgacggcccctcagatcgcgctggtaacgtgccatgtacgagaactagacatcgagcaacgctttgcggattacttcaccggccagtacgtgcgattgctgcgtcaggctcgccatctccgcgattccggccagaatgttcggacggtgctcaccgggtttcgagacgcgattgcgccggatggggtgaatgtgtgggaccacgtcttctacgccgcgacggtagccaacaccgctttggtggactacctggcggagggccccttgccagccttccggtag

SEQ ID NO: 512739 - DNA, 525 bp, Stenotrophomonas maltophilia
gtgcttttggaagagggggtggtattcttctaccaaggcgccccggtccacttgagctcgggacaacgcctgttcgcgtatatcgtgataaatgttctcggtgcgatccgccgcaacagtctattgcttgtggacgagccagagctatttatgcacccaacgctagagatccagttcgtcgatttacttaagcgaatcctggcgaaatttaactccaaagcattgattgctacgcattcggaggtgacggtacgcgagattccagcacgatgcgtgcacgttttcgagaagactacagaaggactggtgataaaacagccgcccttccagacctttggtggcgatgtgcagcgcatctcatcttacgtattcggtgacagtgccgcatccaagccatttgagaaatggatcaaggataagatcgaagagcttggctcgggcgaagaactgctagatcgactcggcgaccaagtcaatgaggaactggtcatccagattcgggcgctggatcgcaacgcatggtga

SEQ ID NO: 512740 - DNA, 612 bp, Stenotrophomonas maltophilia
atgtctacgaaaggctggccggtccatcccttcgtcctcctcgctaccgatccgccaccacaccggttgcccgtggcggaagccaacaatgctgcggtgctgcgccagttcctccaccgtgcgcggcacgccgtgcgcctgcagatactctggcgatgcgcaggtgaccagtcgctggctccccagccgccgcgccaccagatgctcggcctggtgcagcccgccgaagcggatcagcaggtcgatgccttcctcgatgggatcgacgaaatgatcggtgaaggtcatcgtcaactgcaggtccgggtactgccggcacagccgcaacagcaccggcagcaccaccaggcgcccgaacgaggatggcatgtcgatgcgcagccgcccgctgggcaggccggccgaacccaggcaggcctcggcggcggagatttcttccagcgccgccgcgcacgatgcgtagtacgcctcgccatcggtggtcagcgcgatgcgccgcgtggtgcggtggaacaggcgcacccccagccgcgcttccagccgggcgacggccttgcccaccgccgagcgcgagatgcccagcgcgtcggcggcctcggtgaagctgcctga

SEQ ID NO: 512741 - DNA, 270 bp, Stenotrophomonas maltophilia
atggacgaggccacccagcagaacgccgcgctggtcgaggaagccaccgccgccgcgcgttcgatggaggagcaggccacccagctggccgaggcagtatcggtgttccgtacggggaccagcagcgccaacgccaacagtcggcccgccaaccgcctcctctcccgccctgccgcagcaccccgtgcccccgcgctgaagctggcctccgccccgcgtcccatgaaatcggcgatggccacaagtgccgaagagtggcaggagttctga

SEQ ID NO: 512742 - DNA, 2346 bp, Stenotrophomonas maltophilia
atgcgcaggaatcttccagtaaccggtaatgagatcgttcttggcgatggctgcaccatcgtttcgaagacggatatcaaaggtgtcatcgaggaaatcaatcaggacttccttgacatcagtggcttcaccaccgaagagctggtgaacaaggcccataacatcgtccgtcacccggacatgccggaactggcgttttcggatctctggaaagacctgaaagccgagcgcccctgggtcggcatggtcaagaaccgctgcaagaacggcgaccactactgggtcgaggcgcacttctccccgcgctatgaagacggcaggctgatcggctacatgtcagtgcgtcggaaggcgacacgacaggcaatccaggaagccgaagcagcctacgccaggatccggaatggcgaaccgggccttaccatttcccacggcagagtggtcaaagccacgtggatgccacgccttgctcgtcggttcaacctgttgctccggcgcaaccacgtccaggtcgcgatgcagtcgcttgcactggcggcagtgggaatgcttggattctgcctggcgcaggggagcgcctggttggcgctcccctgcggcctgctcgcgggcgtgctgggctacgcgcttattcgggaaacacaccgacgcagccgacggctggccgcgctcgccagctcagtgcgctccatttccgaaggcaactacactgcctcgatcgatatcctcggcgacggcgagatcagcaacctcgcacggtcgatcaaggccatgcaggtgcggcagggttatgaaatacagcagatcaagcagcagtccgcagccaatctacgcatccgcaccgcgctgaacgaggtcaccaccagcgtgatgatcgccgacgccgacctcaacatcatctacgccaaccaaccgctgatggagatgctgggcaaggccgaacaggacatgcgccacgatcttccgaacttcgacatgaagacgctgatcggcagcaacatcgacatcttccacaagcatccgccgcaccagcgcaagctgctgggcgacctgcggggcacccaccgcgcgcagatcaccgtcggcggacacgtgatgcgccagatcatcaaccccgtcaatgatgccgatggcaagcgcgtcggttatgtggtggagtgggccgaccgcactatcgaggtacagatcgagaaggaggtcagcgacatcatcgtcgccgcctcgcgcggcgacctgtccggccgtatccggctggaagacaagagtggcttcctgctgcagatctccgagcaactcaatggcctgctggcggccatcggcagcagcgtcgagcaggtctccaacgtgcttcgcgcgctctcgcagggcgacctcaccgcgcaaatggagggcgactaccgcggcgtgttcgccgacatgcgcgacgacgccaacgccaccgtcatccagctcaccggcatcatcgaccgcatccagaccgcggcgtccagcatccaccgcgcggcggcggaaatcgccaccggcaacaatgacctgtcgcaccgcaccgagcagcaggccgccaatctggaggaaaccgctgcctcgatggaggaactgacctccaccgtgcgccagaacgccgagcacgcccgccaggccaaccagctggcgcaggatgcgcatggcgtggcctcccagggcggcgacatcgtcggcaaagtggtcaccaccatgtcggccatcgaagcctcgtcaaagaagatcgccgacatcatcagcgtcatcgacggcatcgccttccagaccaacatcctggccctgaacgcggcagtggaagccgcacgcgctggcgagcagggccgcggcttcgctgtggtcgcttcggaggtgcgtacgctggcccagcgctcggccggtgctgccaaggagatcaaggatctgatcggggattcggtcggcaaggtgtccgaaggctcggcgctggtgcaccaggccggctccaccatgggcgagatcgtcagctcggtgcaacgcgtgaccgacatcatggccgagatctccgccgcctcgcaggaacagagcgccggcatcgagcaggtcaaccagaccgtggtgcagatggacgaagccacccagcagaacgccgcgctggtggaagaagccaccgccgccgcccgttcgatggaggagcaggccaacgaactggcctccgcggtagcaatgttccgcaccacctccgcccaggcggcaccgaccatacggccgatactcaaggctgtgccgcaaccgcaagcatcatcccgcgcacgcccaaccccgtcggcctccaccactaccaacaataacgaatggcaggagttctag

SEQ ID NO: 512743 - DNA, 2922 bp, Stenotrophomonas maltophilia
atgaacatgcaacgtccgatgaaaatgcgacttcaaagcaagatgccccggtcaggcatacaacaggggagcgggaatcttccggtggcacaatcccggcggggcctgcccctcgttggtgcgcttctggtgctgccaatgctggtcaccctgtacggaccgcgtgtcgacctgctcggtccgcatgccggcacgctgccggcgctccacttcgcactggagatgttctcgatagtggtatcgctgctggtggtcatcgcgtccttccagacgctcgacacgcaccgaccgccattggccaacagcctgattctggtgtttacaacagtagcgacgctggacttcctgcatgcgctttcctatagcggcatgccgtccctgctctcgcccaacggcatgtccaaggcgatattcttctggctgtccggacgcatcgcggagttgatcggcttcgtgttgctgctcagcgggctggtgctgaggggcccccacggcctgtggcttctgcttggcatcgtcgtgagcctgctgatggcattgctggaacctcaggccgggcaatggaaatcggcattgttcaccgaagggctgggaggcatgccggtgaatgcccgcctgggcctggcgttatgcgccggctatctgctgatggcggcctggatggcgcgggcgacgaccgagcgcccgctgttcaccgccctcgccaaggccagcttcattctgggaatcggcgagctgggcttcatcggctggagcaccccgaccgaggcaggcgtgctgctggggcatgtctacaaggtgctggcttatctatgtgttttccggggcatctacctcgcttcgatgcgcctgccctacgaggaaatggtggcatcgcgccggtgtctggccaggaaggaagcggagtaccgttcactggtgagcaacatgcccatcgggctgatgcagctcgatggccacctgcgcctgtgctttgccagcccgacggtcgaacggagcctggcccatccattggagagcatccaagggaaacatatcagcgaggtcttgccggcggaggttgcggcgaaaatcattcctggcctgctgagcgccttgggcggcgaacggacggagcaggactatgacctggtctcggccgcaggagaacaactgcaccacagcttcatcgccgttcccgaccgcgacgacaacaatgcgacaagaggcgttctggccctcttccaggacaccaccgagcgcacccgcgcccaacagcagctggacctggccgtgcgcgagaccagcgagctgcgtgccgcgctggacgcgcacgcgatcgtcgcgatgaccgatcacaagggggtcatcacccgggtcaacgacaagttctgccagatctcgcagtattcgcggcaggagctgattggcagcaaccatcgcatcatcaactccgggcggcatcccaagaccttcttcaaggagatgtgggccacgatcggccgcggcagagtatggagcggggatgtctgcaaccgtgccaaggacggctcgttctactgggtacagaccacgatcgtgccattgctgggcgagaacgggcggcctgcgcagtacatcgccatccgcgcggatatcacccagcgcaagctggccgagaaggaggcccggcggctggcctaccacgatgccctgaccggactgggcaaccggcggctgatgatggagcagctcactctcgctgccgagcgggcacagcaggtgcacagcttcggcgcactggcgatgatcgacctggatcacttcaaggagatcaacgacacccagggccacccgcagggtgacagcctgctgcagcaggtagccgcccgcctgaaggaagcggcccggcccgacgacgtcatcgtgcggctgggaggcgatgagttctgcgtgctgttccataacctgggtcccacgtcgaaggatgccatcgcgcgcgctgcggacatcagcgagcgtatacgcaatactctggccggtccctaccggctgggaaacacggtgttgaacgtcaccgccagcatcggcatcaccatgatccacagcggctacgatgccagcgaactgatccagcgcgctgatcaggcgctctacaaggccaaggaaagcggccgcaacgctctgcagttcttcgacgcgcacctgcaggccgagatggcaaaccgcagcagcctgctgcgcgatctccgccgcgccatcgaggacgagcagctacgccttcactaccagcccatcgttgacgtggagatgcgcgtgaccggtcacgaggcgctgctgcgctggcaacacccaaatcttggcatggtgccgccggacgtcttcattccattggccgagcaggtcaacgtaatcctgccgctcggcatctgggtgctggtgaccgcctgcctgcagatcaaggactgggcggacgacccagtccgctcgcaatggagcatttcggtgaacgtcagcgcacgccagctccacgaccccgacttcgtctccagcgtggaaaccgtgcttgaacgtaccggagccaatccccgcaacctgcgcctggaactgactgaaagcatgctgcacaccaacctggacgccgtgatcgggaagatgcaactgctgcgcaagcgcggagtgcgcttctcgcttgacgacttcggcaccgggtactcctcgctgagctatctccggcaacttccggtggagcagctcaagatcgaccgatcgttcgtacgggacatccagaacaacacggacgacatggccatcgtcaagatgatcctagcgctggcggcatcgatgggagtggaggtcgtggccgaaggcgtggagaccgaagcacaacacgcccggctggtcagctacggctgccagaagtaccagggttacctgttcggcaagccggccgaaatccattga

SEQ ID NO: 512744 - DNA, 912 bp, Stenotrophomonas maltophilia
atggggatcagggtccgccgtgtaacctggaaggagaccgccgacgttcgcggcgctgaataccacagtcaacaccgctgccaactagggcctgttgtcacaaagcgcgggaccgccaatttctatcagatcgcgccgctggtgcacgtgctggtgatgagctacggtctggcgctgcgtctgcgtcagctgcagtacgacaaggcagccgccgagcagaaagtcaccgtcgccacccgtcgttcggaagagcaacgacagctcgtggcgatgctgtcccacgagttaggcaaccctcttgcggccattgaccgcgccgcgcagatgatccagatcaagacgccggggcttgcgtcatcggaggtgcagcggctggcacagatccgtagcaacgcggcggcgctttccggcttcgtcgatcatttcctgatgaccgaggcgccggatcatggtgcgcttgcggtatcgcctgtgtcctggtccatccgtggcctgccggaagatgcagtccagcggcagggcgaggtggcgagcgggcatctacgcctgggcgaatgctcggatggcgacttttccctcgatcccacgctggtgggagtcgccgtcggaaacctgctggccaacgctcttcggtactcgccagcacaaagcaaggtggagcttgccgcgacgctggatgacgcagggctatgcatccgggtagcgtaccaaggccccggcatgagccaaggcgagctggacaggctcggtacgccctatttccggggaactgcctcgttggggaagaagggcgacggattggggtatcacttcacccggcgcatcgtggaagcccatggaggccgcctgacggcccgttccagcatcgggtcaggactggaggttgagatattcctgccagatcgcccgtag

SEQ ID NO: 512745 - DNA, 651 bp, Stenotrophomonas maltophilia
atgaccgtggtcaacatcgcgactgctgtatatgctggtggtagtactgctgcgcgagcggcagggaaaagtgcgttgagggaagtaggagagctgatcacggagcgcggcgggcgccaaagcaaccggggcccagcggagggcagtgcggacacgagccggttcagaagagggtggcgagatgagtattggcgatatgagaggctccgagaaaatttccgttcaggctgcatatgtgttgatgtgcgtcttcctgcaaaagtacagagagagggggggggcgggcaggacgccctggttgatctattgtcttcggcaggctcatttttgtgggcgaatggcttgcccaacgacccagcaatgtgggatgactggtgcggagcatttgcagaggccgctgccgctggaaattctctcaattctgaatttcgtgtcgcgcaaatgagttcatcgggcgggcacttggcgttgctggaggcattttcagtgatgatggtatttcttgaggcgatttttgatcgatccggtgaggatcttccgttgttcgaagttattgttcgactcatgtcgcctctaagtgattccggttgtttgagtgattcctctgtctgggctgagtggatggcgtcggttggaaaggtgagggcgtag

SEQ ID NO: 512746 - DNA, 261 bp, Stenotrophomonas maltophilia
atgcaggagttcccctacgccgacaaagaagcgatttcggcgctctctctcaggcagtgggcgcgctggcgggggggcgcgacgggtggcgatctcgcacagatcgctatcagcatgggaatcagcaggaatgccgtagagaacaatagacttctgaacaccgttgagctggcccgcatcaaggagttgagcaacggcgacgtcgttctggagctatgtttgcggccggcagcgggctggcattcgacgcccgatttatga

SEQ ID NO: 512747 - DNA, 297 bp, Stenotrophomonas maltophilia
atgccttccgaccagacccgcgtcaacctcaccctcccggccgatgtggtcgatgtccttgaccgcctggggaaggtcaccggtgcgggcagggccacgatcatccgcgagtggctcattgaaggtcgccccatgtttgctgagatggccaccgctgccgagatggctcatgaccgtcaggttgatgcactgaaggttatgggcgacgtgctccgtcagactgcgatcgctaccaaccagctcgagctggctatcaagaccaagcgccgcgctgcaatgaggaagcgcaaacagtga

SEQ ID NO: 512748 - DNA, 303 bp, Stenotrophomonas maltophilia
atgaccaccgctgcgcaccttagcgccgagattcttgagagcctccggccagccgttcgcactgcatatctggcatgggagtcaggtgccgatcttcggcatgtgcttacccggccgaccttctaccgttatcgcgccgagctcctttctcacggggtcgatatcgccacgctggtcccgaaagaggtctccaatgtggtccctttgttcaagaccctcgaggcagttccagcttccgttccggactgggcagtcggcactaacctctatttcgagccctcggtcatcaggcgtatcgcctaa

SEQ ID NO: 512749 - DNA, 489 bp, Stenotrophomonas maltophilia
gtgaaagctagactgattgggattatcccttcgcttggtagaaactccattcccgccattgcaggcgtgctgctgttcatggcagccgggagccttcaagcgaaaaagcttcctggcgtcatcaactgcaccgccggatgcacgctgacaaccccgtatcccgatccggtgaccaaccagcagctttcccaagaggtccagaagctcaatgacggccggaccaccgtctggacagcccagacgcgagtccagaccggcgatgtcctgaccgtctgcaacggtatttcctgcgtcaactacacgtggcgaggtgcaggtttcgactccggcgaagtgatttcgaccgtcctcccgcccaactcccggggcggtggtggtggcggcggtggtggtggcggcggcggcggtggcagcggcccgatcagcggcggctgccacggcaactgcggtggcggcaaggtccgggtgggcgaactggaacagatgtga

SEQ ID NO: 512750 - DNA, 1200 bp, Stenotrophomonas maltophilia
atgatgtctttctccgccaacggcccacgcgtgtttccggtaccggctgattggtccgacgccatcacagaaacgctgtcgtgggccaccaactacatgcaggcatcggcatctggtgtctcccagcattgttcgtatcgctctgatccgcgtcggtcctttgagttctctgtgaagtgtgagggccagcagcgccgggtcgtcgacatgctgctcgctggccacggtggtcgttggctcgtccccatctggccggatgcgcagctcattcccgcgagattgcccgtaggatcggtcgagattgcctgccgaaccaatgggtttgatttcttcgtcggcggacaggccttgctgtggggagcggtcaaccgctgggaagtggtgacggtgacctcggtggaagccgaagggctctcgctcgccgctgccaccgctggcacatggccaactggaaccgtgctgtttcccttgcgaagggctcagctgcaggacagcgcggaagagtcgctatggcatgacaatgccggcatccgttcgctgacgttcgacgtgcttgacgtctgtcagtggcccagcctggtcgacctgccgctctacctgggcacgcccgtcctgaaccgttgggcagactggactgatcaaccgaaggccagctatgcccgcctgcgagaggtattggacaacgacagcgctgcaccgcttaccgtgccccttgcagacttcgccttccgatcgcaaagcacacaatggaagctgttcgggcgtgaagagcacagctggctgcgctctctggcgtacaccctgtgcggccggtccacgcctatatggctgccgtcctacaccagtgatctgcgcatcaccgccgatctggccgtgggcgccatcgagatccccatcgaatgggcgggctatgcgctgttcggtgcgcaggcgcctgggcgtcgagacctgcgcatcgagctgttggacggcaccgccattcatcggcgcattactggctcggtggcctccaacgacgtcgaggtgatcaccctggatgcgcccttggacatcagcgtttcggcgtcgcgggttcgggccgtccagatcatgagcctggccacgctcgccagcgaccaggtcgagattcgacacgccaccgacgccgatggtgtcgctacctgcaccctcggctttgcttcggtggttccccatgtttga

SEQ ID NO: 512751 - DNA, 861 bp, Stenotrophomonas maltophilia
atgtttgaggccttcgagaccagccgcttcctggcccgccctgtccatctgttcctgttcaccctgcagggcaacgcgtaccggttcgcatccggcgcgcgcgacatgatgatcggtaatggggatggtgcaaggctctatcgctcggcgcccggcatcgagcgcagtgctgtgaatgaaaccagcgagcgatcgcagaacaagctgaccatcaagatgccgttcctgttgaatccggccgctgccgagctgccggtgacgcaggagttcggccgtatctttcggccctatgcgccaagcggccgggtttccgttgtgtgcatgaaggtccacagcaacgacccggacctgcaggcggtgatcgagtggacgggccaggtggtatcaccgcgcttcactgacaccaccctgaccctgacctgcgagcgtaataactcccgcaagggtttccggggcaatacgggccggttcacccggggctgctggaaggcgctgtatcggtgtggggtagcgatgtcggatcacgctgtggaggccgtgctggcttccgtgggtggtgccaccttgcgctcagctgcgtttgccgcgttccccgctggtcgcttggaaggcggggtcatggtctgggcgcgcagcaacggcctggcggagacgcggacgatcaactcgcacgccggcgacaccatcaccctcaactaccccggtcctgaactggctgcgggtctgacggtcacggtcgcgcctgggtgtgcacacacattcgccgactgcggcagctacttccagaacacgcccaactatggcggccagccgcagttgaacgtggagaacccctttgacggacaccggatctcatggtga

SEQ ID NO: 512752 - DNA, 318 bp, Stenotrophomonas maltophilia
atggcgcttgcgttggccctaggcggcctcgtgctactggtgaatcagttccgttcgcccttcccgcaacgggagccgcagcaggcctttgtgtggtgggtgcagctgatcatcatgatcgtatcgatgctgatcagtgcgctgctcgcccggacgaaccagaccaagccggaagtgcagacgcccgatatccccaccaccgaagaaggcaccgccgtgaagcgcatctatggaactgtgcggatctccgagccgcaggtacttgcgtggcggtcggccggtaccgacaagatccgcaagggaggcggcaagaaatga

SEQ ID NO: 512753 - DNA, 228 bp, Stenotrophomonas maltophilia
atgatcgtaacccttgagcacttgcgcacgattccgggcttcggcaacaagccaggcttctgctcgcgtggcggtagggactggtttgccgcgcatgggttggattggaatgcgttccgtaaggagggtatcgaggccgagaggctggtcgctacaggtgatggcctggccctggcattggttgcgcacgctcagcgaatggaggccagcgatgggcggcggaggtaa

SEQ ID NO: 512754 - DNA, 3726 bp, Stenotrophomonas maltophilia
atgggcggcggaggtaagaagaccgttggttactggtacaagctcaagctgcttttcggcctgtgtcaggggccggtggatgagttcgtgcagtgggacgtggatgatgcaacggcatgggctggcgtggtcacgtccaacgggtcgatctggattcacgccgagaacctgttcggcggtgaggatgagcagggcggcatcgagggcgaggccgagatcatgttcggccgcgaggaccagcagctcaatccctggcttccgccgaatctcggtgctgcgcacggcgcctatcgtgggctggtcactgtcctgttcaagggcggaaggtggtcggccttcaccccctatccgaagtcgcccagcttcgtcctgcgccggatcaaggaaggctggcaggatggcgtgtgctggtatccggagaaggtgaagatcctgctcgacaaggatgccagcgaggtcgtttccggcttccgctccgtgtcctggagcctgccctgcgtcgatatgcagggcacgtactgcacagtgcctggggatagcgaggaccgcttcaccctcaatggcaccggcgcaacgatcttccaggtcggcttgcggatcagtggctcggtcgagaccaagtactacagcggtggcttcccgatgccaggctcgcccagcttcatcaagggcggcacgggttcgggaagcatcctgcccaatcacaacgtgtatcgcctggagatcagcaatccgccggcgacgtaccacctgaactacacccccaattttgagtcttcgcgcctgatcctcgacggcgcgccattgaacgtcgaagtggccagcaatgcgaccgtcaggctgcaggcgctgacgatcgatggcctgcaggatgcgcccagccagtggctgacggcgcgagtggagagcctggatgccaaggtgccgctggtcgggatgaatgccgcccacatcctgtacgacagcattacccacgaaagcatgggggccgaacccatctcggtgatcgacgatgccagcttccgcgcagccgcggatgtcttcttcgaagagggaatgggcctgtgcccgatctatgatccagataaggagtccatcgagcagtaccagcaacggatctgtgacgctgcaggggccgtgctcgtgcagggcatggatggtcggtatcgcctgaacgtgccgcgcgggaagtacgttctggacgagcttccggtgctgaccgacgacgacgtcctggattgggccgaagagcccgccacgatggacaacgcctgcaaccagctgttcgtgaagtacttcgaccctgtcgagaacgcgatcggcaccacccccgcgctgcagtcgctgggcgcgatccaggcctttggcagtgtggtctcggagaaggaggaccgctccggcgaggtcgccaacgtggatctggccctgaagatcggcgcccgcaatctgcgcgccaaggccacctcgctgcgcaagttcgacctgaccaccacgcccgtggcccgcacgtggtcaccgggcagctacttccgcctgcaggcgcccaagcggggcatcgccgacatggtgtgtctgatgggcgagaagcgtggcggcaccctgaagtccggcgccatcaccttcagctgcagtgaggacgtctacagccagcccaattcggtctatgtcggaactgagccaggcgggaagccgccgtcgacggcgccgaccgtttcgccgcaccaggtggcgatggaggtgccctacgtcgtgctggtctcgcagctcagtgcggccgacctggcacagctcagcagtgacgtctctttcctgctggcagcctcagcgccaccaacggtggggcagtacttccgcctgatggctcaggctggcggggcggagtacagctatcgcggccggggtgactggtgcgcaagtgctgccttggtcgaagaagccggctatcgcaccgagagcttcaccctgaccgatccgctggatctgggctcggtggccgtgggcgatatcgccctggttggcgcggagatttgccgggtggatgccattgacgcggctgcgatgaccctcacgctgggccgtgcctgcgccgacacggtgcctcacctgcacgcgccgggcgcccgcgtgctgttcctcaccgactttgcggccgacaccaccgagtacgtcggcggtgacaccgttcacgccaagctgctcacccgtggcgcctcggcgctgacggacctggccgacgcgcaggatctggtggtcgagatggaggatcgccaggcccggccgtatccgccggcggacgtgcatatcaacggcgagctgtacccagaggacgtcgtcggtgacgctgttttgagctgggcccatcgcgatcgcgtggcgcaggcggaccagctggtggataccggcatggccagcattgggcctgagccaggcaccacgtacaccgtgaccgtgtatgacgccgcttccggcgccctggttgtctcctacccggacctggtgggtgcctcgttcacggttcctgccggccagctggtcgaacgcaaccgcgtgctgctcagctcccggcgcgacgggctggatagctggcagtcggtggagttgctgttccgtcgtgtctatcaactggatttcagcatcagcgcctggcgtggtgccaacaactccaccgcctctctggtgttcaccacggaggccgagggcgtggagtggtcgatcgatcagggcgtgctgcctgcggggatgagcctgaacaccaccgcaggtcggatcgaagggattccgctgggtggcgcgccgggttactacccgatccgggtgaagggtcaggatgcggcgggcaatgtgggctttgccgagaccgagattgcgctgtcgaccatgcgcagcagcttcccgatgcagaccggctaccaggaggccggtggccgcacggtggcggtcggctcctccaacctgccggtgctggaccctacgcagtcgccatacgccggcggtgcctcggtgcgtttcaatggcaccggattgcggcaggagctggaggccagtctgggaacggccgacttcagcgtggccatgtggatacgccctgacgcggccccaagcgacacctacgcccgcctgttccagatcggcccgaacacgaccaatggcggcctctacctgcgccgcgagcagctgaccaacccgatgcaggttggcctggacgtgttcacgggcggcaactacgtgcgcctcttcaatgatgcggtccttgcactggcggagaaccgactgccaaacagtgcctggtcgcacctggcgatctccagacgcggcggcgtggcccgcatcttcaaggatggccgcctggtcgatgagagtgcgctgcctgcagcagcggtcaacctcagccagacggcattgtcgctggccagcaacacgaccctgaccgccgagcggctgtatgccgggctggctggcgtcgaggtgcatgccggtgcagctgtgtattgggagtccttcacgccgccggcaaagccctcagacttccccgcgcgcctgctggagatgccggcactgccgatcgcgctggttcgcggtcgggcctatggcccgtacagcctgcacttcaagcggggcaccgaggccagcccggtgacctggtcggcaaccggcctgccgccaggggtttcgttggacgtggatcagaccggcagcgactcgaccctgggaggaaccccatcgtga

SEQ ID NO: 512755 - DNA, 741 bp, Stenotrophomonas maltophilia
gtgaccgccttcaatgcggtgattaccgccaccgatgcgctgggctccgtggagcgccgttcgcggctgcacgtcttcgatcgggggcagctatgggcagagatcgacaacaccgcccagatgacgctgttcgggccggccgggtctgacctgtcggtgcaggcagggcgcttgaacctgcagtgcggcggtaccggcaccgcctcaagggcgcgctttgagagtgtgccggcggccaaggattgccgtgccctggtcggattcgtgatcccggccggtaccggcgtgcgcacggacaacgtgggtctcctcctgcgcaccaccagctggcaggtcaccaacgatacctacgcctacatcctgggcgtcggtcgtcgcagcgccacctcgtttggcgtcgagtttgggcggggttccaacgcggcctcagggtctttccagcagctgcagttcgtcgaggtgccaggcatcacggaaagtgaagtggtggtgtggctggagatcgagctgatcggttcgacgctgaccgtccgccgcttggacggcaccgttgtcctgacccggtcggacagcacccatcaggccgccggccgggtcggcgtcaactatttccgtggcagccagggcggccctgggctcttcacgggcttctacttcgaatcgctcgatccgacgagcgagtacaccgatgaggccggcgacacctacgtcgaccaggccggcattgcctaccaaggataa

SEQ ID NO: 512756 - DNA, 1242 bp, Stenotrophomonas maltophilia
atggctcgattcagctcaaaaccgcagctgcagaccctggccagcagcgtgatcattcccggcacggcgccggagggcggcgccgccgtcggtggcggcacggtgtcgcctggaaacgacattcgcctgactgtggggcagctgctggccacgcttggcgatgccggcgcgagccaggctacccgcgtcggcagtacagccaagtggcaggccgccaaggcgcgcggcgcgaccaatccggcgcgtctggccatcgtgggcgactccaatgtcgccggccaaggctcgggaacgggagctgatggtctggttggcgcggcaacaaccagcctggcgcggcgcttcatggtgaagaagggtgttcgtaccgacagcttcttcggcgagcagaacgtcaccctggccaataccgggctggccagctacgacccgcgcatcaccttgggcacgggctgggcaccggactccaccgtctcccagattttcggcgggcgccacctgaaggcggccggcggcagcacgggaaagttgcggttcacgcctgcaggcgcgttctccagcttccgggtgtggtatccgaccctttccggcctgaacacggcggtgggcatctacgtcgacgggagcttggtcgataccgtgtcacaggacgcggctgcgtcgctggtgtcgaaggactacacggtgtccgccggcacccactacatcgaggtcggcgtcggtagcggcggcgacgccttcgtctgtggtatcgagaccttcgatggcagcgccagcccggtggcgttggtgggcggttactgcgcggccaagtctgcggacctgatcgtcgccagtcagccctggaatcaccggccgatgctgtcggccctgcggcctgacttcaccgtggtgatatgcacgatcaacgacaccaccgccggcactgacccaggcatgtggtacgcgaatctggaggcggtggtgaaggcggcctcggcgacctctgatggctgtctgtgcgtcggtttcgtccccaacgatggcagggccttgggtgggatctacggatacgacgccaaggcggccgcgctgcgcaacatcgcggcggactacaactggcacttcctcgatctgcgggtggcgctgggccgcagctgggcccggcagagcgatcgcggcctggtgttcgacaacgtccaccccaactcgaccggagccgaagcgatcgcttcggccctgagcgacttcctgcagctctag

SEQ ID NO: 512757 - DNA, 978 bp, Stenotrophomonas maltophilia
atgaagatgggaatgcgcggcgccgcggcgtcggttctgattctggcgatgggcacttcgggtgtcgctctgtcgcaacaaccggctgcccccgcagccgccaaggagaccgcaaccttgaattcccccaagcagaagctcggctatgccatcggcctggacgtggccaagtcgttcaccccgatcgccgaagagatcgatgtggccgccctgcgcaccgccgttgagcgctcgttcgagggcctgcagccgcagatcacccaggaacaggccaaggccaccgatgccgccctgcgccaggtcgtgatggcccgcagtggccagcaggtgccgggcgtggcaccgggttcgcagccgccgaaggtcgaccgcgtcaaggtgtcgcagatgatcggctcctactcggtgggcccgtcgctggcgcagctgaaggacgatatcgatgtcgcctcgctgtttgacgcgatcagcaccggcctgaccaagggccagccgaagatgacggaagctgacgcgaccgccaccatccaggccttcatgggtgccaagcaggctgaaatgcaggccaaggccgcccaggctgcgcagaccaaccgcacggaaggcaacgcattcctagccaagaacaagacccagccgggcgtggtgaccacctcgtcgggcctgcagtaccaggtgatccgcccgggtagcggcgagcgtcctctgccgagcagcaaggtgcgcgtgaactacgaaggcaagctgctcaacggcaccgtgttcgacagttcctacggccgccagccggccgagttcggcctggaccaggtgatcaagggctggaccgaaggcgtcgcgctgatgccggtcggttcgaagtaccgcttctggatcccgggcgaactggcctacggcgagaacggcaccccgggcggcccgatcggcccgaacgcgacgctgacgttcgacgtcgagctgctgggcgttctgccgtaa

SEQ ID NO: 512758 - DNA, 1263 bp, Stenotrophomonas maltophilia
atgcaggttcaatcgtgctcaaagactcggatgcacttccgtatctttcgttgcctatcgctggtgacgagccttgtgaccgctgttccagccatggcggacaatggcgaggtgagcggaacacgtgagggctcacttgagcaggtcatcctgctcagccgccacaacctgcgcgcgccggtggtggcgtcgggcgcgctggccaatgccactccggagcgctggccaggctgggacgtgggcgcaggcgagctcaccaccaaaggcggcgtgctggaggtctacatgggccgttacatgggccagtggctgcgtcaggcgcagctgttgccggcttcgggttgcccgcagctggctgacttccacgcccatgccaacagccttcagcgcacccaggccaccgcgcagttcttcgttgccggtgccttcccgggctgtcatgtcgcagtcgagcagcgcatggcgctgggcacgatggatccgttgttcaatccggtgatccacaacagagacacggtcttccgcgagcgcgcactgtcggcaatgcagcgagcgttggccgcatcggaactggcaccggcactgtccgtggtggagcagatcacccgctacccgcagtcggcggcctgtgcggggcacagcgagtgccatctgatgctggccgacacgatcttcaatgcggaaccgggcaaggaaccacgcgcgtccggttcgctggccctggccagcgggttggtcgatgccttgttgatggagcactaccagggcagtggcgtcccccgcgaaggctggggccggttgaccaccgaggcgcaatggcaggcgctggcgcagatccgcaatcgctaccaggacatcctgttcggaacgcccgaagtggcgcgcgatgtggccgctccgctgctggcaagagtgaatgcgttgttcgaggacccggcatcgccaaaggtgagcctgctggtcggccacgattccaacatcggttcggtgctggtggcgttgggaatcacggactacagcctgccggggcagtacgagaagacgccgatcggcggcctgctgcagttcgagcgctggcgtgatcgtggggccggtgaagtgcgttaccggttggtgtatgtctatcccacgcgcgagcagctacgtggtgcgatcccgttgaccgacgcacagccgccgggccgggtggagctgatgctgccgggctgcgcgcagtcgggttgcagtgacgcgcagttcaacaacctgttgcattcaccttga

SEQ ID NO: 512759 - DNA, 825 bp, Stenotrophomonas maltophilia
atgaccgccatgctgcccgcggccaccgcactgctggctgagatggccagtctggccggctgcgagcgcgccgacggctatgcctgcatcaccgcacgtcgcgagcatggcgccagctcggtggagattccgcaaccgcagttcgcgatcctgctggaaggccgcaagcaggtgcgtaccgctcatcagtctctggcgttcgttcccggcgacatcctgctgctgacccagcgctgccgcatcgatgtggtcaacacccccgacccgcgcagtggccgttacctcagcgccatcgtgccgctgtgtgccgaagtgctggcggccgctcgcacgctgtggatcgaggggcttcccgcgcctggccaggcgatggcgcggttgccgttgatcgaacatggcgcggtactgcgccaatggcggcaatcgctgcaggacgggcgttacagcgaagcacgattggcgctggcctcgctggtactgaccttgtgccggcagggccacggcaacctgctgctgccgcaggcgccgagcctgggcgaacagatccgcgaccgcatcgccgccgaaccggcacgcgactggcagtcgcgcgatgtggaagaacagttcgcgctgagcggcgcgaccctccgccgccggctcgctgccgaggacaccagcctgcgccagctgctcaccgaggcacggctggcgcatggcatgcagctgctctacaccacggacctgccgttgaagaccgtggccgcacgcgcgggctatcggtctgtggcgagtttcagcaagcgcttcgccgagcagtacgggctggctcccacagacatttga

SEQ ID NO: 512760 - DNA, 705 bp, Stenotrophomonas maltophilia
atgagccgccattcacgacaccccgaactgcaccgctccgagcgcgtcggctggctgcgtgccgccgtgctgggggccaacgatggcatcgtctcggtggccggcctggtggtcggcgtagccgccagcggcgcctccgctgcgaccatcctggccaccggcgtggccggcaccgtggccggcgcgatgtcgatggcggccggcgagtatgtctcggtgcagacccaggccgacaccgaagacgccgacctggcgatggaaaaacgcgaactgcacgaagatccgcacagcgagctggaagagctggccgcgatctaccgccaccgtggcctggagccggcgctggcacggcaggtggccgaacagctcaccgcccacgacgcactgggcgcccacgcccgcgacgagctgggcattaccgataccctgcgcgcccgcccgctgcaggcagcgctggcctcggccggcgccttcacctgcggtgcggcactgccggtgctgaccgcgctgctggcgccggtcgacaaggtcgcgatgatgaccaccgccagcaccctgctcggcctgtgcctgaccggcgcaatggcagcccaggccggcggcgcaccgccggtacgcggcgcgatccgggtgatgttctggggcgcgctggcgatggccgcagccgccggcgtcggtcgcctgctcggcgcacacgtgacatga

SEQ ID NO: 512761 - DNA, 1365 bp, Stenotrophomonas maltophilia
ttgtcgagccccagccacgtcgccgatacccccattaccgaccgctcgcagctggtggcggagatcgcctccggcgaaaagccccgcgcgcggtggcgcattggtaccgagcacgagaagttcggcttccgcctggatgacctgcgcccgccgaccttcgaaggcgagcggggcatcgaagcgctgctcaacggcctggttcgttttggttggacgccggtgcaggaaaacggcaacaccatcgccctgctgcgcgacggcgcttcggtgacgctggaaccggccggtcagctggaactgtccggagcggcgctggagaccatccaccagacctgcgtggagaccggcacccacctcaacgaagtggcacaggtggccggtgagctgcagctgggcttcctcggcatgggcttccagcccaagtggaagcgcgatgagatgccgtggatgccgaagggccgctacaagatcatgcgcgcgtacatgcccaaggtcggctcgctgggcctggacatgatgacccgcacctgcacggtgcaggtgaacctggactacgccaccgaagcggacatggtgaagaagttccgcgtgtcgctggcgctgcagccgatcgccaccgcgctgttcgccgattcgccgttcaccgaaggcaagcccaacggctacctgagctaccgctcgcacatctggaccgacaccgacgccgaccgcaccggcatgctcgacttcgtgttcgaggatggcttcggttacgagcgctatgtcgattacctgctcgacgtgccgatgtatttctcctaccgcaatggcatctaccacgacgccagcgggcagagcttccgcgatttcatgcagggtaggctgccggtgctgccgggtgcgctgccgaccctgcgcgactggtcggatcacatgaccaccgcgttcccggaagtgcgcctgaagaagtacctggaaatgcgcggcgccgacggtggcccgtggagccgcctgtgcgcgctgccggcgttctgggtcggcctgctgtacgacgacaccgcgctggatgccgcctgggacctggtgcgtgacttcaccctggccgagcgccatgcactgcgcgacggggtgccgaagtacgcgatgaacctgccgttccgcaacggcacggtgcgcgacctggcccgcgaagcggtgaagatttccgttgaaggcctcaagcgccgcgcggcgcgcaatgccgacggccaggacgagagcaagttcctggacgtgctgcaggagatcgtcgagtccggcctgaccccggccgagcgcaagctggcgctgttccatggccgctggcacggcgacgtcgatccggtgttccgcgagttcgcgtattga

SEQ ID NO: 512762 - DNA, 1140 bp, Stenotrophomonas maltophilia
atgccgctgcatgacacgctgacagtcaccggctccggccgctacgacgccttcaagatcggcagcaacaccgtcgacaagtccacctacagcatcggcatcgagttccgcccgatcgagagcctgctgttccgcggcaagtacggcactgccttccgcgcgccgaccctgtccgacgcattccagggccgcagcggctactatgccaacggctccaccgactactaccgttgcggccagctgggctacgacccggccaacaccaccggttgcccgtatgacagcgtctcggtattcggcacccgcgccggcaatccggacctggaaccgatcaccgccgacgtctggaacgcaggtgttgtgtgggcaccgatcaacaacctgtcgctgtcggtggactactacaactggaagatcaagaacgaggtcgatacgctcagctccgaccagctgctgctggccgagtactactgccgtggcggccaggccaacaacacctcggccagctgccagaacgtcgacgactggatcacccgcgatgcgtccggcgtgctggacgagatctacaccccgaagatgaacgtcgcccgccagaacctggaagcgctgaccgccagcttcaagtacgtgcacgacatgggccgcttcggttcgttgcagttctcgggcaactacaccgacatgctcaagcgcgaactgcagccgcagccgggcgatgagttcctggacctgctgcgtgacccgtacgcgatgtgggtatacgactcgtacgccaaggtgcgcgccgatggttcggtcggctgggccaaggacaagtggaccaccaccctgtatgccaactacatcggcaagacgccgaactacatggcctacgtgggcaatggctacgactacgtccacagctccggctacaaggcaggcaagtgggggtcctacaccacctacaacctgagcgtgaactatcgcgcgctggacaacctgaccctgtcgctgatggtcaacaacgtgttcaacaagatgccggacaaccagcgcttcagcttcgccgggaccagcggccagccgtacaacaattacctgtacaacgcctacgggcgtgccatctacgtgcaggccaagtacgagttcggcggcaactga

SEQ ID NO: 512763 - DNA, 210 bp, Stenotrophomonas maltophilia
atggttggggtgatggcgctcggcgcaggaaaggtgaagaagacgctttccccggctctgtacgaccgcgtgatggccttgttgagcagcatggtcaagcgagcggctccgcagatcacccatctgatcgttgatgcctctctgcgtatggaagatcgtgcgtgcaggggggggggcatcaagggagttcactcaagcagaatggcgtga

SEQ ID NO: 512764 - DNA, 930 bp, Stenotrophomonas maltophilia
atgccagtcaccaagcgtgccaatggccactatcaagttaccgtcggatacggcggaagaacgcatcgcaagacttctcgacactggtcgttcaaagacgcgaaagaatacgaacgcaagtacctcgccgcaatcaaggacgttgcggctggtcgagagccagaacggatgatccccgagggcgtggagaagttcctaacggatcatgttccacgcctcggttcacaggccaagacaaaggcccatatccgggcgctcatgccgtacgtggctggtcgaaatatgaaggagatcgcccaggtatgggcagagataaaggcagcagagattgggaaggctcctgccactgtcaaccacaagggtcgcatcttgaggcagatcagccggatggcgtggcgcgagtgggggtggttggaccggccagctgctatcgggctgctgccggagaagccccgcgagacgttcctcacgcttgatcaggtcgaggcgctggctacggcttgcccgaatcctgccgttggcgactacgtgcggctggcggcgtatacgggcatccggcgcgggcacctgctgcgcctaactgcccatgaagtgcgcggcgggtttatccatctggaccgaactagcaagacgcggacgctccaactggttccgctgcatcccaaggtggcaggtatcgcagcgcgactcccgctgggggcctcagacgatcaggtccgggattcgtgggccaaggcacgtgaggcgtgcggcctacagcacgtccgctggcacgacttgaggcacacgtgtgcctcatggctcgtccaggctggcgtgcccctgcacacggtgtcggaggtgcttgggcacagctccatggcgatgactcggcgctatgctcacctgtcgccggaacacctgtcagatgccatcaaaaagatggcctaa

SEQ ID NO: 512765 - DNA, 597 bp, Stenotrophomonas maltophilia
atgacctggaatccgatcagcagcgcgccgagggatggcagctcgattcttgggcttatggctgacgaactggatcgaaacgggaatccgataacggttcaggtttgctggaacgttggattcgagcagtttgtggcggtcatggaccttgagcctatccatgacctgacccactggatgaagcttcttgaagctcctaaggaacagtcgatgaatgctgaaaggaaagctgaggcttacttcaaatctcttgaggactggcagcgggcgcagctagacgcccagccggaaatgaaaccgtgcccgttctgcggtggcgacgcatctgtgttccgggtcgagggcgaaggcgaggaagacggctacttcgtcggatgcgacggcgttgagaccgggtgcaatgttgagctgcacacctgggtttcagatgacctgagcatcgtcatcgacagctggaaccaacggaccgaccacgaacgtattgccgatctggaatttcagcgcgacaacctgttcaacgagaacaaggcgctgtatcgccagctggtttccatgcagaagcggctggacggaaacgccgaagaggataagcactga

SEQ ID NO: 512766 - DNA, 579 bp, Stenotrophomonas maltophilia
atgcgagttctgatcgcctgtgagtacagcggcgctgtgcgggaccagttcatcgggggggggcacgaggcgatgagctgtgaccttctgcctaccgatgttcctggtccgcactatcaaggcgacgtgcgcgacgtgttggattacccgtgggatctgatgatcgcccatccgccatgcacccacctgtcggtcagcggcgcacgacatttcgaggccaagcgcatggatggcaggcagcagtcggcggtgtcgttcttcatgatgctggccaaggtcgatatcccgatgatcgccatcgagaatccggtttgcatcatgtcctcaatgtggcgccagccggaccaggttatccagccgtggcagttcggccatggcgagacaaaggctacggcgctgtggctgaaaggactgccccgcctgacgccgaccaacatcgtagaaggccgcgaggatcgcatccaccgcatggctcctggccctgatcgctggaaggaacgaagcaagacctatcctggcattgctgcagcgatggccgaccagtggggatcaattctgagcttgaggaggaccgcatga

SEQ ID NO: 512767 - DNA, 183 bp, Stenotrophomonas maltophilia
atggctaggatcattgagtacgcgttcgatacgccatgggccatcaaggatgaaggcgacagaggcaccatcgaaatgcctgatggagctaccgacgaggagtgcgaagaggcagtccgcgagctgttctgggagcgctacaactacggttggtctgacgccgaggattcgaccaatggctaa

SEQ ID NO: 512768 - DNA, 549 bp, Stenotrophomonas maltophilia
atgatcggcgccaaccttcgcagcattctgtcactcgctgcaaagatgggaggtggtgcgcaccccatgaccgttgccaatatccatcatgaggccgaccacgcattgcagttgctggctgccgccctcgacgcccgccagccggtgactatggacgatgcgctggcagcaggagatggcacgctgcacggagcaattgaccactggcaggaacgtgcattgcgcgctgaggctgaactggccgcccgccagccggtgggggagatcaccgacaccgaaatcgacgcgcgcctcaacgctctgtaccgcgagatggtggacagcggccagcacaacggcggcatgtcgggcgttgcatgggaccgagccgtctatcgcatggcatcgggctcgcccgcgcaggccgtggacctgaccgttgcccaagctgtcgctgtgtacgacgccgtgacccgcaggaacttcacccgggacgtcaagtccgaggaggacaaggcccgtacggtgaccgcggccctgaccgacagccaggcggtgggcaatggctag

SEQ ID NO: 512769 - DNA, 240 bp, Stenotrophomonas maltophilia
atgcgctggtgcaggcgctctccaacctggcctgaccctgctctggtgggtgccaaccttggttggcacattccaaccgtgccggcgaatcttccgccggccagcggccggcactaccaggcctaccgctcgatcgccggcaacgcatccgacaacagcaaccgatcaatccgccgcagcgcactttccagctgccgacggtccgccgccagccccaacgacagccgcaccccgttctga

SEQ ID NO: 512770 - DNA, 261 bp, Stenotrophomonas maltophilia
atgggcctgtttgatttcctcaaagcgaagaagaccaccgccgaaaccgccaagaaccgcctgcagatcatcatcgcgcaggagcgcagcaaccgcggcggccccgattacctgccgctgctgcagcgcgagctgctggaagtgatcaagaagtacgtgagcatcgacgtcgatgcagtgaaggtcgacctggtgaaggatggccagcacgatgtgctggacatctccgtggcgctgcctgaaggcccggacaaaccctga

SEQ ID NO: 512771 - DNA, 420 bp, Stenotrophomonas maltophilia
atgatgatcgtggccgcgccggcctatgcgcagcggcacggcctgccacgcaacgccgaggagctgcagtcgcacaaccgtctggacatcggccatgcacgggcgatgcagggctggccgctgttgcaggacggtcgcgaacgcatgttgctgcccagtggcaatgcccgcgccagcaacggcgatgcgctgcgccagctggtgctgggtgggctgggcatggcgcggctggcgacctaccaggtgcaggaggacatcgctgccggacgcctgttgccggtgctggaggaggccaaccccggtgacctggaagaggtgcacgcggtgttcctgggacagggtggctatctgccgctgcgggtgcgcgccttcctcgatttcctggtggagaacgtcgatctgacgcagccacgggggtag

SEQ ID NO: 512772 - DNA, 429 bp, Stenotrophomonas maltophilia
gtgccaaatcgggccgtggtctttgtgagtgaagcgtgcgaggggcttggcggccgtcgcctgtctgaaatcatgggggacgcgtctgaattcaaccgtcgggctggcgtcaccggggtgactctcttcgacgggcgcaggttcctgagctacatggagggtccgtcggacgggctggatgttgcattctccagggcggccggcgcgacgagccactgcaacctgatcgagatcgcccgcggtcgtgtaggtcagcgcaggttgccgtactggtcgatgcgttgcatccccgtgtccccgccggagctcgtgcagttggtaggcgcagactggacggggtttctgcagcgaggccaagatcaggtaccaccggcaaccgcgatggagatgctggtcgcggtggcggagccattcgcagaaacggcatag

SEQ ID NO: 512773 - DNA, 498 bp, Stenotrophomonas maltophilia
atggcgacacccattaaagaacgaatcggtgcagtcaagggaaccctcgaggtgctgagaaataacggcgattgggactcatttaagagcccagacgtctactccggccattgcgaagaggacagactcgtttacaacatgacatcaattgtctcggagaggatctcaattaacgaatttccttgcgataactgccattcggccttcctagcactcagcaagagctacggaaatgcaattgttgtgcatgtaacgcatgccaaaacaggcattggcggatacaaggattttcacccagcgacggcgagagactacgatgtattcattcattatctcagcggaactgcatactatcattccagtcatgtcgcctccccacttcgtctagcaaacgtggagccagacgcagattatcttggcaaaagcaacgcttcgattgctaatcacaagaacttccggacatcgaaagaactaaagaagcaaaaagttccgagctag

SEQ ID NO: 512774 - DNA, 336 bp, Stenotrophomonas maltophilia
gtggcaggtccttgcttctggcgtgacctaaagggagtagttcaggaatgtggcgaaggccctgagccacagactctcgagttctacttcagaaatggcttcttctacgactaccacaatcccgatttcattgatggagctattgggtttcagtgggggggcgacttcgaactacgcattggcccgccgaccggtccaatggttgtgccgatggttttcgaagcggagcaagagcgctatgcccccggggagagcattgccggcgatgagattccgggcgtagccgtccagggtagcaatcagtggaacgtcctcattttcattcagtggacttga

SEQ ID NO: 512775 - DNA, 1482 bp, Stenotrophomonas maltophilia
atgaccatcgagtttgtgcctctggacttcgtatcggtccaaggaaccgcgcgcagcacggtgatgcttcgtgcgcggggcgttggtcctggtctcgcgggtaacggttctgcccaactcaagctcggcagtgctggtgtcgcgcacgttcgcttcggaggtggtgtcgatcctgttgtgccagcgcacggcagtgcggcgctgctgctgcgcgctgagggcgtgggatccactcaccttgcgggggagggcggcgtctcgatcgagctccgagccgccggcttccaggccactcctggtcacggcggtggcgcagcgaagctggcgctgaacgcgcgtggacgccagctcacggggccgatggcattcgccgggctggaggcgaatccccgcatgatctccgctttcggcggattgtggtttgtcagcccgcgtgcggcgatcgcggtgagccaggttccatcaacactgccgacccatgttctgagcgaagcaatcactgtggctgcaggacgccgtagcagccagtcgagcaagagctcggtctccgacgcgttgagccttgaggaagcagcggcgatcgtttatcagctgctggtggacgaaggggtcatgttcgcacctgcgctgaaggcgacggtctcaaagctggagcgcgtactggataggcttctgctgcttggcgcctgccagtcctacgccgacgcagtcaatgcgattgccggcggcctatggttcggcgccttgacggaagccctgaagtccgaacgtgtggtggaaagcctgatcacctcggaggttgtcgggaccctgcagagggcggccgatcgcctggccgagtccatgttgattaatgccgacacattcggatctggcactggcgtggtgctggtcaacgagcgcgcgctgattgcaaccggtgaggtcagcgtagcagaggccttgcagcatctgggcgacagcattggattcgtgacgcgccttgcgctggataccggcgagtacgtggcatgggtgctgaacacagagaaccgcgcgctgagccggtacacggactatccgttcaacagcttcgccaagatcggtggcagatactacggtgcggcagccaacggtctgcatcgactcgaaggcaatgacgacgatggtgaaccgattgccgctcgaatcaggctggggctttctgccttggggactcgccggctcaagcgcgtcccagaggctttcgtcgggtacaccagtgatggtgtcttgcttctgcacgtgatcacggtgaacgaggaatccggtcagaaagaggccgctatctacaagatcctggaacgccctgcgaccagtacacgcgagacgcgctggaagctggggaaggggatcaaagcggtcgacttcgatttcatcatcgagaacgtggacggcgccgacttcgatctcgcggcgatcgatttcaggccgatctatctcgaacgaaggacgagggggtag

SEQ ID NO: 512776 - DNA, 738 bp, Stenotrophomonas maltophilia
atgttgtccaagccgccgattgcgacattcattcccccgaggccggcgagggaggcgctaccgtaccgggcgccgtatacggtctgcggggcggagcccgccaagggctactggcggcagtcctgcagcgaagggacgatggccgtgccgaaggacggggcggtgcagctgccgcagaacgcggtgattctgggctacgagcagtcgggcggcggcaactacgtccgataccaggtttgccgcagcgtgttcgtccagacggcccccccagggcctatcacgtgcaccagctacccggagcagaaggcgcaacctgcgtcgcccaggattccgggacgcttcgagtatgcggacgtgtttgcgtgggacgccggagcgcgaagcgacgccgagctcgacggagacctggccatgaggttgaccatgaatcgaacggttggcgttgtggtgggcctctgcaccgatcgggaccggctggaagatcccgcagcgatcctccatgggctctatttccatcagagccagggcgggtcgatgcaggcctgtgcaatcgaatcgggtgcgaaggtcaccgaagtcaggtcatacaccgcttccgatgcctgggaggtccgcagggtgggcggggtgatcgagtacatgtgcaatggcgtcgtcttctatcgatcgcagaaacgcagccatggccaggtgctggtcggctgcgccgtcttcgccacgggagacgtcatcgaatga

SEQ ID NO: 512777 - DNA, 1902 bp, Stenotrophomonas maltophilia
atgagcggcgggcgctacaccggctggacgccgatcgtggtagtcggtgaccggacagccgcttcactgcatgtgccggcggctcggaagctgctgggctacgtcgtgcaggaggcggcacggaacggactcgggaccgccagtgcgcggcaggaggccgatgacggaaccgtcgtagtggccgagaagatcggtgaactgacgcgattgacgatcgtcacgccggagcctgagccgccgctcgagccccttgatcccatgggcggattcatcctgtggcctcgctggaacgtgcacaccggcaacccggcggaccgtggttccctggtggatcctgccggggagaatccagcggcctggcttgagttcaccggtagaagcctcgtgacgcgctactggaggcgatgggacgtcgtcgacaacatcaatggggctcgctacgagagctataaccagccgcacctgtatccctccggcctgtactacttcggcaacgtcgactggaaggacggtaaggatgtggctctgtcgttctacggatatggggctcgctaccttcgggagctgtcgctcagcgacgccggcgcgcgctggatcttccagcaggggcaaatcctcttcgatcgcgttgcctatgcggacgcgatggtcgaggcgccacccgactatctgtcctggcgggtgacatctggctgtcttcgtagaggagctgccggccatcaagagttgctggtgaccttcacacactacctgaacaaccagccgacgacggctcaatccgcgtttgtggcgttcagagtcaatcggaatgagggaacacccgagaagggcgattgggaggtcgtgcaaggaagccatcgcctcctgggcatgacgcctggccggatcaacccagagggcggaacgtcggccgacggcttcgcggactcggcgctgccctggttcttcaatgcagacgggaccaaggcggttcggaccgtgagtagcgagccgaccttggcattcggcttggtggagacgatgacgcaggaggtggacatctccgacggtgccatcgaccacaagctgacccaagccgaatatctgatcgggaactacaccaacgtgcttggggcctttgcgctcgtggcgccaacgcgtggcttggtggcctcggactacgccggcgtagagcgcaaggatgcctatctggcacttcgccttagccaaggtcaggtagctaccgaggcaacagggtaccgcggcaccttgcgcgtgcttgccgtgctggaatttgacggcggggagatccccctgatcgatcgggatttcaccgtcggcaatgatcgccaggactatcaccaacttgcttgcatggatctgcgccacaacttgttctgtggctggcgcatccaaggctccaatggggcccacaccattcagccgtttgcgtacatgggcggccgcttggtgtatggcgcagtcgagccggttaactgggatccgaccagtggacagccggcaccgttcctggggctggataccaggccgccaggattcgtcatcgacggcctggtgttcggtgcttactggactggcgcggccggatcgggatgggggccgcgcagaggcgaccagcagggcgtgatctggcgcaaacacccacgcgagggtctgattttcttctcggccgcttccggtctcagaacggcaatggtgcaacgacagggcatcagggacttcctcggcttcgattggagtgggggatggaactactgcaagggccgctactgcgtgtcgatccccgggccctacaccggcacgctcaactacctgacgggctacgagctcggcgcggtcactggcgtcacagcggacgaccgtcgcttctatccgctggcggcactgccgaaacctatatag

SEQ ID NO: 512778 - DNA, 480 bp, Stenotrophomonas maltophilia
gtgtttcagctgaccgagcgccccgagatcatcaagtgtctggagactggcgctttcttccacacgctgagcgatacctggattgggcaggcctatcgcgactggctcgaagctggcaatacgccgcagccgtgcccacctccatacgagctgtactccaaagagcactttcaagcgatccgcgcggccgcgtgggagtggatgacggtagaggtgagggcgcgccgctacgacaacatcgaaacctgttgcagctactacaacagcggcgtggagcggtaccgactggaggctcgggcgatggttgcctggcgcgatgctgtgaatctgagacttgaacagctggtgctggcccctccggctggcattgagacctgggaccaggtttgcccgctgctgccacaacccgcccagttcaattggccgtccagcgttgagctcccgctcggggtaggtgacggccccgcaattcgactttga

SEQ ID NO: 512779 - DNA, 969 bp, Stenotrophomonas maltophilia
atggggcgtaaccgcttcatcaacggggacatgcgcatctggcagcgtggtgtcagttttagcgcgagcggtgccgttgggaaggtgttctgcgccgatcggtggttcgtggagcgaagtacgagcacgatggcagtcgcgcggcaggacactacggtcagtgacagggccatcattgggcctgtcgcgaactacatgcgcgtgagcgtggcagccagcgctggtgcaggccactacgccctgttggcgcaagacgtggaagatgtgctcacgttcgctggacaaactgtagttgtgtcgggatggttccgtgcgcagtccagcatgaacatcagcctggaggctatccaagtcaccaacggtggcagcggcaacccttccttcagcagtgcctcacagcgggtaactacctcatggcagtacctgtcctttgtcgttccgatcgctgcgttcaatcaggcaattatccctggctcacgactgcgtctacggttctggatgtcaggcggatctgactgggccagctcgaccaatgtaggaacgcagaatggttattttgactacgctcttgtccagaccgagcaaggtgtagtcgcttctccatttgaacgccgtctcgatgctatcgaaatgctgatgtgccagcgcttctacgaaaagactctcgacgtagatgtgctgccgaccacttcgaactacttcggtcgcgttgcattcggttcgcctgtcattggcgggaacatgacgttcctatcggttccattcaaggtgacaaagcgcggtgcacctgcagtcacagtgtggagcgccacgccaacacccgctgcgggatttgttggccaggacgatgggtcgacggttcccgtgtcagtgcagaatgtgggttccaacggcgcacagatctcgtggagcaatacgccgggtcgctggggtggcttcttccagatgacctcagacgcggagttctga

SEQ ID NO: 512780 - DNA, 525 bp, Stenotrophomonas maltophilia
atggccgacaagaccctccagctcaagcagaacatccccaccgaggtcgaggccacggtagtctcgtccggcgcttcgagcgccggcaagatcccggccctaggccctgatggccggtttgacccgagcactatgcccgctggcatcggtgcagatacgaaggtgcttccggccaccgagatcctggccgccggcgactttgtgaacatctacgtcaatgccaccacacccagcgtgcgcaaagcggacgcgagcgcggccagcgctggcaagaaggctcatgggttcgtgcgcgaaggagttgcacaaggcgcgaatgcgacggtgtacttcgaagggccgaacagctccctctccggactgactgcagggctcacctatgtgctgagccacacgacccccggcggcgtcctggcgctgtcggcgggcacggccactgcagggcacattctccaggaggtgggggtggccactgcggcaggcgagatcaatgttgagctcggccagccggtgatgcgcggctga

SEQ ID NO: 512781 - DNA, 285 bp, Stenotrophomonas maltophilia
atgcagaaccagcaggccagcacaaccccactggcggagccgcagaccccgatcgaatccgccgtgaaggacctggcacgggttcagcaggatgtgcacatcgcggttgagcagctggcgcgccgcctcgcaccggtactggcggagaccaagcccgacgcttctgcctccaaggggcgcgccgtcggcgcatcgccgcttctcgaagacctgttccagcagcgggacgcagccgcggccatcctggacgtcgtcaacatgctgcacgctcagctgaccctgtga

SEQ ID NO: 512782 - DNA, 444 bp, Stenotrophomonas maltophilia
atgggtctgttttctaaaccgcagcttcgcaccgaagtgctgagagctgcagatggtctggtcaggctaatggtggacacgagcgccgaagctgagccgctgggtactgctgctgcaggcgttcaaccttcggatatcctgaatgatccaaagggaaaagagcttgccgacttcgtccagaattcactccaagcaggggtcaacaactaccaccgcctgaccgtgtatctgccgtacgtccacagtcattggggcgacgaagcggtagacgtgatcaatgagcttttccgtagattcaatggtttgtgggttgcgcttgtgttcttgcctggctcgactggatctgagcgtgacgagagaatcaagacgcttctcggtgcagacgacccgaatggcgggaagctgtgggcgctcaataatgagctggttcggttgatgccataa

SEQ ID NO: 512783 - DNA, 498 bp, Stenotrophomonas maltophilia
atgatcgagactgtggcaggactgacggaactacaaatcaaatttttcacggcatgcgcccagaccctcgtcgcaattgcagttggcggcattgcttggcggcagtggcgtactgcggtccagcaagctgaaacagcgcgcaacaagctgattgcggatctgttcgaccgccgatacaagatctacagccgctttcgcgaactagttcagacagcaatggtcggtaggcagaaagagatggatcacgcactgatcgagatcagcatgctgaagcatgaaatgcgttgggtcttcggaaatgaagtcgttcaaaagcttgatgagcaagtcatttcgacgcttacgcccatggctcttgccaggaccaacatgcagtcatcagagggcgagcaataccgacagcacaccgctgactaccgggcagcaagagaccgcgcggacgcaagtacgcgattcattcccaaaatatttgaagactccttgaccctccgtcactag

SEQ ID NO: 512784 - DNA, 366 bp, Stenotrophomonas maltophilia
atggctttgtcagccgaggtccgcattgaccagctgcacgagttattgggagaacaggaaaggcagcgcgaggcgctgaacattcgaatccacgatctggagcggatccaagccgaccacgcaagtgcgatcgagggacttgtctccctcttggacagcgcgcgcgggcgtgcggcggcgatggaagccgtcatccctcttctcctggaagtgagcgaccaacggacccgggatcgcgctcaggccgcactggagctgcgctggcgtcaggatgggcctctggggacgggtacgacgcctcgttacgctgccgcattcgagcaagtagctctcgaagttgccccgcaagcattgcttcagcggtag

SEQ ID NO: 512785 - DNA, 141 bp, Stenotrophomonas maltophilia
atggcacagaacgaaaagaccggcaagaaagtcgcatcgaccgcatccaagctgttgagtgatccgaaatcgtcgaaggcagtgaagtcggtcgcggcatccgcactgacccaggccccgaacaagccgaagaagaagtaa

SEQ ID NO: 512786 - DNA, 291 bp, Stenotrophomonas maltophilia
atggctgcgcggaaccttgccaatcctcaagatggggagctcaacgggtatcacgctctcgttgggcgggtcgtcttggccgactgggtggactcccatcggatggatgggtggcaccgcggcgacgcggatgcctcgccgatggcctgccggtcggcaggtctgctagtcgccgcgtcggaagaggcggtggttgtggcaggcagctggtcgacggaagaggaacctcagcgctgcggcgcgatgacgattccaaccaaggccctcattgcgctgagggccttggaatga

SEQ ID NO: 512787 - DNA, 177 bp, Stenotrophomonas maltophilia
atggctgaccccatcaaggtaacggtcactgatcccactacgggcaaggtcctgcaggagcggatcctcgtgaacgactatgcggtgatctgcgccggcgatcggtacgtcaagaacgttcagatcattggttccacacacatgatcgccgttgcgaaggagaagccgaatggctga

SEQ ID NO: 512788 - DNA, 273 bp, Stenotrophomonas maltophilia
atgaacacttctgaccgccttcccgtgcgctaccacctgcacctggacgtcgccggcgcgctgatcaatatgaccggccgcgagctgaaagggctcttccagcgcagcccgtccggagagccggtaactgcagccgaagcccgccgggtgctgaccgaccacctggccaacggccgtagggtcatcccgctcggaccggtctgcgaaggcttcgactacagcggtaccgggtgcccgggccacccaggagcagctgaggcagaccatggctga

SEQ ID NO: 512789 - DNA, 246 bp, Stenotrophomonas maltophilia
atgaccaccgatgtgaccatcgtttgcgccgcctgcgggatcggcactcgcaccgagatttctgagccgccccgatttggtgtcgatctggcagtgatcgcggaagccgtcggattcacatacgtgttcgaccttgcatatggccgagtggctatcttctgcggcgacagatgcaagacagcgaacatcaccaagcgcggctatctgcgccgccacatcatcgcgcccaaggagcaagcagcatga

SEQ ID NO: 512790 - DNA, 435 bp, Stenotrophomonas maltophilia
atgaacaacttctccgctgtaggccgcattggccgtgatgctgtcacccgcttcactcaggcaggcaagtccgtcaccggttgggcgctggccgtggatcgtggctttggcgacaacaagcagaccgtgtggctggactgcaccctgtggggtgatcgcggccagaagctggccgaacacatccgcaagggtgagcgcctgggcgtggtcggcgaaatcggaacccgcgaacacgacggcaagacctacgtcaccctcgacgtgaaggacgtgacactgctcggcggcaagcaggaaggccagtcaggcggcaccagctcccgccgaggcggtcaggagcagcgcgagcggccgcagagggttacggacaatgcgcagcgcgatgagtttgaagactcggacattccgttcctgaccatgcaggggggctggtga

SEQ ID NO: 512791 - DNA, 696 bp, Stenotrophomonas maltophilia
atgagcgtaaatcagaagctggtcaaggtcgcccagcgtatcgcccaagaaggtatcggcaagactcgcaagaacagccagcagggctacaacttccgtggtgtggacgaggttatgaacgcgttctcgccgattctcgccgaggagggtctgtatatgcgtccggccttcagtgagcgcgaagttgtggagcgcgcaagccggaacggtggcgtcctgttctctgtgtcgctcaagggcgagttcactttcagcgatgacgccggggacgcagtgacagttggtcccttctacggcgaggccatggacagtgccgataaggccaccaacaaggccatggcagtggcattcaagtacgccatgttccagacgttctgcgtgccgctggagggtgtaaccgggggcgatgctgacctgatgacccacgacgtcatcagcgatgaggagcggcgtgccatgaagtgccgtgatttggtggaagccaacgcagagagcgttcaagcaatccgcgacggcatcgactccggcgactacgtgaaggctgcagaagcttggtacgagctggaccaggacaccatgcgcggcctgtgggttgcgccgtccaagggtggcccgttcacgaccaagcagcgcgaaatcatgaagtccaccgaattcaccaagtaccgcccaactgacgaacaggaagccgcctga

SEQ ID NO: 512792 - DNA, 360 bp, Stenotrophomonas maltophilia
atgatcagcgcatgggaaatctactgggtaatgcagttggacacgatcagatttgcatcggcccttgcatccattgctggccttattggcctagttgttatcgccattgctgttgctgatgtgtatgacgacgggaaggccctgaagcgagttcttcttgtgtctcctatgcttcttatccccatcgctgccgcaaccttcctgccttccagcaaaacagcagccgcaatgatcgtcatccccgcaatcgccaacaacgagcgattccaggctgaggcgggcgacctttacaagctcgctaagcagggcctgcagaagctcgtagccgacgaacaagacaagaagcctgccgccgagtaa

SEQ ID NO: 512793 - DNA, 234 bp, Stenotrophomonas maltophilia
atgaaggcccactacctggtactggcttcgtgcatcagcctgatcgtcttcttctgctgggctgcgtggttcgtgtaccgctatgaggcttacgagatcacggccagctgcgtgcttctcgccatcttcgccgcgctgttcgcccacgacgagctgcacatcatccgcaagaagcgcaacgaccgattcaagcagccgccgctcaccacagaacatgaaggagctaggaaatga

SEQ ID NO: 512794 - DNA, 243 bp, Stenotrophomonas maltophilia
atggacgcctacgagaacggtaacgcgtccgcgcatccgaccccgcatgtgtgggctgagcgctgggaaatgatcgagaagatcagggaaagcgaaggtggcctgaccaagagagagctgttcgctgcaatggctatgcagggaatccgcgccgcgatgacggacgggcataccagctacatggacgtggccaaaaaggcggttgctcagtccgacgcacttctactagcgctggagaaatga

SEQ ID NO: 512795 - DNA, 252 bp, Stenotrophomonas maltophilia
atgactacgagtgttgatgtgctggcggtgatgcaggagctggaggacgagctgcaatcggctgcgaattactccggagaaggctgctactggtcccgtgatgacgatgacctactccggcgatcaggagaagcccgcgacgcagtcgccgagctgatcgaggcgattggcccagccttgtatgagcttcgcgacacgagtgaagccaagagggatctgatctccgtcctcgcccgcgtcaaaggagcctga

SEQ ID NO: 512796 - DNA, 369 bp, Stenotrophomonas maltophilia
atggccgattggcacatttcccgccgggatgcggaagacgactacgaggacgcccgtgaggtctacatcgccgagcgctctgccgagcttctggctgagtaccagcgcgacgacgagaaggtcacggaagccgtcaaggaattcatggcttacggcgaaggcgaggatcacatccgcgctacctgggttttcctctgctcctaccgcaacacagagacagatcgcggcattgccgacgcggcaaatgcactggcgactgacctgcagtcctacatcaacccgatcttgcgcgagtgggccgaggacaaggcccgcgaggaagtggcgcagaacgaggccaaccgatccgaatcgaggagcgcggcatga

SEQ ID NO: 512797 - DNA, 201 bp, Stenotrophomonas maltophilia
gtggacaagacctttgaagttgaagtggtgcgcctgtctcagggcggcgtgtcctacgccacagcaaacatcaggcggcgcccggatggcatttcgttgctcatcagcaacggcttcatctcgacctatgcgcttctgacctactccgaagccgtgaccatcggcgagcagctgatcgctgctggtaaggcggagggctga

SEQ ID NO: 512798 - DNA, 198 bp, Stenotrophomonas maltophilia
atgaatctgcacgaggagatggacaagctggcctacttgatcgcccagcgggcccagaggaggctaggcacacaggtgcgtctgcacctcgtgccagaaaggccaaggcttgaggatcaagccctccagctggctggaaccccaccatccaagtcatctcttattgagatgaagcgctacagagctaataggggctaa

SEQ ID NO: 512799 - DNA, 510 bp, Stenotrophomonas maltophilia
atggatttcagttcaatcaccacagttttctccatggttacaggcgccttgcagctgacttccgccgctatggacgtgaaggagttcaacaactccgcagcgactatttcggagatcaaccagaagcttctggcagcccagcaaggactcctcgctcacaacaccatgcttctccagctgcagagcgattacttccaagccacagaggagctgcgaaaactcaaagaagctgctacggagaaggctcgctatgaccttgtcgacctcggcggaggcgtcttcgtctactgcacaaatctggccccaatgcccggagacactgcaaagccaggactgccggacgttgcgcactacctctgccagccgtgtttcgatgccgggactaaggttgtcctccaacacaacggggactactggcgttgcaacggatgcaaggccgtctaccaagccaatcctcgaagcagccaatccgtcttggatgcgcttgatcgcagggatggctacttttga

SEQ ID NO: 512800 - DNA, 177 bp, Stenotrophomonas maltophilia
atgaacaaagaacaagaaggtcagctgattgcttgggaggccatcgctcggcaggcgctgacgtacctatcgagcgaacagaaactggagctcattcgtttcgtaggaccgacctgttctcgccgggagccggagattgctgcggctgcgacgaaggttcttcagcaggtccgctaa

SEQ ID NO: 512801 - DNA, 186 bp, Stenotrophomonas maltophilia
atgtacgcagaccccacacacctccgcgacaacccgatcaaggtccgtttcaacgactcggaaaaggcagtgatcgaggctctcgccaacttcaatggccgtcagcccgcagtgttcgtgcgggagctggtcctggctgggattgcttctctcgaacagcgtagttccgaccgcgatgccgcctga

SEQ ID NO: 512802 - DNA, 189 bp, Stenotrophomonas maltophilia
atggaaatacagctgtcgcgcgatgagcgccgaaggttgaaggaatacgcggaggccctagggcttccagagcatgaagcactgctccatgccgcccgcgtcgagcttgaccggcgataccggctcaagtctcagcagggctcagtagtgaactttgagggactgaagcgtgaccgcaccgacccctaa

SEQ ID NO: 512803 - DNA, 354 bp, Stenotrophomonas maltophilia
atggtggactggatcagtcgggaagttgcggagggcctcaagaggctcatgtgcttgggcctggagcggactccggcagcggaggttatccagctgaccgccgccgtctggctggaggccatcactgagggccgggagtttgatcaggagttggacgcgccgcgcttccgtagggccttcgcgatcctgtgccgagactcgcgccagtggccgctaccgtcctcgcttctggaggccatgccgccccgagaacagctggccctgaccaagcagccgatccctgctgaccctgactctcccgagatgaaaaagcgtttcgaggaaattgccaaggttctgaggatgccgtcatga

SEQ ID NO: 512804 - DNA, 213 bp, Stenotrophomonas maltophilia
atgcagttcatggtcgggcaagagggtgtgattgaggagaaatcgagcgtctaccacgatagctggttcgtatccggcgccctactcgataggaacggtaagcgcagctcgtggtatgagcaggctctcgaacccatcctccccgaaggctcagccccgagcgagtacaccttccagcagctgatggacaacctgcaggaggtgatggcgtga

SEQ ID NO: 512805 - DNA, 444 bp, Stenotrophomonas maltophilia
gtgactcaggtcgtaaccctcccgccgaacgcccgcgaatcggcgatcaagatcctgtcggagatgctgcgcttcgcccattccggtaagccggtgaacgtgaagatcagcattgcgcgcccggagcggacgccgccgcagtgcgcgtacctatgggcagttgtctacccgctactggccgacgccaaaggctacgagcgcgacgacgtgcacgagtacctgctgggctgccacttcggctggcgtgagaagcgactgccaggtggccgaaccgaacaggtcccgatccgctccacaaccaccgacgaaaacggaaaccgtgacgtgctggaaggccgcgccttctgggactacgtcgaattttgccaacgagtcggcgcccgcgccggggtattcatccctgatccggaccgttcgtacaaccttcagagggcagcagcatga

SEQ ID NO: 512806 - DNA, 684 bp, Stenotrophomonas maltophilia
atgagtcttgtccagagatttgaaaagaacgagtctggccgcgatttcgtggtcggtgacattcacgggtgctttgatgaactgtgcggcgagatggatcgcgtggagttcgacccagcgagggatcggattttctccgttggcgacctcgttgaccgagggccgctctccgctgacgcaatcaactggatcggacaggattggtttcacgccgtgcgcggaaaccatgaacagatggctatcggcgtagctgcgggcaggcacgacctagccaactatctgcagaacggcggcggctggttcctatcgatggaggaggagcgccagcagcggatggctgccgctctggacacgcttccgctgtgcatcgaagtggatacggcgtcaggcctggtaggcatcgttcatgccgacatagctggcaacgactggaaagcctttaccgatcaggtggaggccccgcgatccaacaaccacgccaagtcgttggctgagttcgcgatgtggtctcgtgaccgtatccgcgagatggacgaatcaggcgttgagggagtggccctcatgttcgtaggtcacacaccagtgaagcagccaactaggcttggcaacgtctgctacatcgataccggctgcgtgttcgggcgcgccttgaccatgctgcaaatcaacggagaacccgcatga

SEQ ID NO: 512807 - DNA, 348 bp, Stenotrophomonas maltophilia
atgaacctcgaacagatcgacaccagcactacggcggggaaggccatagagtggctgtctcgtgatgacgctcagcttgcactgttccaggcgatccgagatatcaagtttggtttgcctaccgacgacaagctgatccttgagaacctacgcaatgcaggtctatggattgcccgatacgagcccgagccagcaccgccggttgggccgggagaggcttggctggtagcgcatggaggattgatcgacaacgtcagccgcgaattcgcagaggatttcaggtcaaaagtgggaggggagatagtccgctacatccgcgccgacctcgctggggagaagggcgaatga

SEQ ID NO: 512808 - DNA, 192 bp, Stenotrophomonas maltophilia
atgaacctctccagctacaaggaccgcagccgcctgtctgaggcgagcaatctcggctacagcgccaggctcgaccgcaagccgatcacctcgtgcccgttcgatgaagggacggacgaggccatggcgttccagcactactggggccgggcggatcaggacgagcatcggcgacaggggagggtggcgtga

SEQ ID NO: 512809 - DNA, 363 bp, Stenotrophomonas maltophilia
atgaatgagctgatcttgccttggccgcacaaggacctgtcgccgaatgggcgcgtgcactggtcggcaaaggccaaggccgcgaagaaggcacgtgctcatgctcatgcctcctccctcgcatgtggcctgcggggatgggcaagggatgggcgcatccacctgcacgtcaccttctacccgccaactcggatgatccccgacgacgacaacatgctggcccggttcaagccgtaccgggacgggatcgccgacgcgctgggcatagacgacaagcggttcatcagccacccgctggtcagcaccgaggtccgcaagggcggccaggtggtggttcggatcaccggagggccggaggcatga

SEQ ID NO: 512810 - DNA, 699 bp, Stenotrophomonas maltophilia
atgactgacgttcgcgaactgcccgcacggctcaaccagcagaccgtcaggctggatactggccggggcgggattccggagctgaccaatcaggatatcgccgctgcgctggccttcgttccggcagggctgggcagggaggtgttcatcgcctgccattggccggatggggcggcactgagccggcgtaggctggatgccctgttcacccacctggctctgaccgagtatcgccgcagggaagggcaagtaaccgatgcccgaataacctacgggatcgctatggcattgcggcagtggcaccgcgccgacacggccgaccagcggtcagaggtctacagggcgcagactgcgctggacaaggctcgagaggatcaatggcctgagcgcatgcctgagatgctgcccacacttcttcgcgtcatcgtggaggagatcgcctgcccgaggaattgcggggactgtcaggggcgtgggaccattctggccggggaattggtcaaggcctgcactgattgcgatggcacgggccacaccaagaatagcgacggctggcgggcaaggaagctgggaaaggacccgtccaacttccgtcgcgactggaagtcttgctaccagtggctgtttgagcggatccgtgacgccgaggccgaggcggcgcaccagatggcggacgctgtgaagagggaggcggcatga

SEQ ID NO: 512811 - DNA, 264 bp, Stenotrophomonas maltophilia
atgaacgactggatgccgatagaaagcgcgccaaaggacaagtgcgtgttagtgaccttcgcgctggaatcaatttcacatcgcgacgcaacaacacccggcgtgatgcttgcctactgggatgcgtatcacgccccaggcggcagagggtatgacggtgttggagacggctggatcgatgcccacagcggtgaggggtgccatctccattacggcccccccattttgtggcgaccaatccctgatccgacagcaaggtcgtga

SEQ ID NO: 512812 - DNA, 324 bp, Stenotrophomonas maltophilia
atgagtggcgacgatctggcccgcgagctgcgcaccggccttgagcgactggatacggcattgacccggatccatggcgcatcggccaacgggaacgtggtccgccttgagggagccggttctgtctggaacggcatcgccatcgggattgcactggctggcgttgtgctgggctctgcttggatcgctcacacagcatcgagcgctgatgtcgccgtccggcaagccgaggcataccgagcagctgtctacatggtggctcccaaggccgctgaagagatcgaaaaagaactccagcgcaagaaggagcgcgataagcaatga

SEQ ID NO: 512813 - DNA, 285 bp, Stenotrophomonas maltophilia
atgaattcgattccgaagaataccgctcctgccccgcagtctcgcgttgattctcttatgagtgctcagcgacaattacttgatgaactgtctcagactgtgatcggaacgcgcgaagtgttccacaaggtactggggcccgagcggttgatgggggaagcctgcaagcagagcgagccatcgcctccgcaggcgcctctcgtggatgcgattgagggcaacaacaatctgctgctgagcattctcagcgacctccagagcatcaacggtcgcagcgttctctga

SEQ ID NO: 512814 - DNA, 297 bp, Stenotrophomonas maltophilia
gtgatcgttgctcagaactcctatcaggccatccgtggcgccgatgtggaatgccaatgctggctgagggacgacgcgggcagggtgaaccttcacgagctcagcttggaagttcaggccattgcctatgggcgaaaacacgttcaggcaacgtggcctgcaacaggcgacagcgagggacgattgcagttcaccgtccccaatgggcacaagctcgatgggggcctgtatcagctaaggatccgattcgacccgtccggcgagttggtgagccttggcctgttggagattgtgtga

SEQ ID NO: 512815 - DNA, 393 bp, Stenotrophomonas maltophilia
atgactgggcgaccgagtgactatcggcccgagtactgcgccaaggtgatggagctaggccgacaaggcaagtcggttgtccaaatggcttgcgagctggatgttgtacggatgaccttgtaccgctgggtcgatgaacacccagaatttagtgacgcctttacgcgtgcgcggcagctgagccaagactggtgggagacgcaggctcaatgcggcctcactgcggagcggttcaacgcctcattgtggtcccgctccatggcagctcggttcccggaggactaccaggagcgcaagggcattgagctgactggtgccaagggtgggcccgtcgaggtttcggttgaggtgaagaagatcgtagtcgctggcgtggagcctgtgcgggaatga

SEQ ID NO: 512816 - DNA, 1284 bp, Stenotrophomonas maltophilia
atgagtgagctgcggctggaggttccggctgcgatgcttccattctggacagagagacgccgccacaagatcgcccgaggcggacgtggttcggctaagtcgtggtccatcgcccggatgctcgccacgcgcgggatcatccagccaacccgctggctgtgctgccgagagacgcagaagtccatcaaggagtcatcgcttcgcctgctggcggatcagattcagtcgctgaacctgggctactactacgacgtgcagcagcaggccatcaagggccagccgggaacatcggcagcggatagtgaattcgccttcgcgggcctgaaggagcacacggccgactcaatcaagtcctacgagggctttgatggggcatggatcgaggaggcccattcggtgagtgagcggtcggctactgtgctgatccccaccatccgaaagccaggctcggagctttggtggtcctacaatcctgaacaggaagaggactacgtccaccagcttgcggggatggacgatccggacacgctggtcatcacgatcaactggcgggacaacccctggttcccattggagctggagaaggaacgtcagaagctgcagaggatcaactctgacctttaccagcacgtctgggagggccagtgccgcagtgctgcggggctgatgtttaagcgtgactggttccagttctacgacgtgctaccgagccgcctcaacctgtacctggcaagtgactacgccgtcaccccggatggaggcgactacacggagcacggggtttgggggctggcttcgacgggcgacctgtacgcagtggattggtggtatgggcagacggacccggccgagtggatcgatgcttggatcggtcttgttgggcagcacaagccactagcggcctttgaagagaagggcgtgatcctacgggccgtcgaatcctcgatcaccaagcggatgcgggagatgcagaccttcgtccgccgcgtgcctctggcatcggcgggcagcaaggcggagcgcgcattgggcttcgcggcccgcgcatcggctgggactgtctacctgccgcgcctgccctgggcagtaaggctgctgaaccagctctgcgcgttcaacggcgaggacgggcgccaagacgatggcgtcgatgtctgcagcctgatcgggcgcgggctcgactccatggcaaacgcagccccggaacagtccgggcatctgaagcgccgcatgcgcgactacgacatcaaccacgacgaacctgacagctggaagactgtatga

SEQ ID NO: 512817 - DNA, 1935 bp, Stenotrophomonas maltophilia
atgaccgagagcgacaaccaaatcggccatgccgagctgctgcagcagttcagggaggccgacgacacgtcacgtccggcgcgagagctatcggagcgtgaccgcgactactacgacggcaagcagctgtctggcgaagagatcgaggcgctgaataagcgccgtcagccgctcgttatcagcaaccgtatcgccccgaagatcgacgctctgatcgggcatgagaagcgcatccggaccgatccgcgcgcttaccctcgcaccccgaagcatgaggctgagtccgagtcggcgactgactcgatccgctatgtatgtgatgctaatcggttcagccagattcgttcgaatgtagccgagaacctgttcattgagggcgctggcggcgcgacggtgacggtcaaggcaaatggcgatgtgctggatgttgtcatcagcaacgtcccgtgggatcggttctattgggacccgcacagccgcaagcgcgacttctcggacgcgtcgtatcttggcgttgtcctgtggatggacgaacaggaagccattgcgctggctggcccggatgcagatcgttctgacgttgagttgatcatccagggttgctacagcagcacggcgaccagtggcgacacctacgacgaccggcctcagttcatgtggggtgacctcaagcgccgccgtgtccgtgtcctgcagcatcggttcaagcgcaagggcgaatggcacaccgccatcatctgcggtggggggttccttcgtgatccccaagtctcgccctatgtggacgagaagggtatcccgcagtgcgacctgattgggacctcggcctacatcgaccgagagaacaatcgatacggcgtggtgcgccggatgatctccccgcaggacgagatcaacaagcgccggtccaaggcgctgcatctgctgaacagtcggcagatcatcgcggataagggtgcagttgaggaccgagagcaggcccgccgcgaaatggcccgccctgacggctacgtcgaggtaaacggtgacatgcggtttgaggttgctgatggcattgccttggcagctgggcagttcaacctgctgcaggaggcaaaggctgagatcgacgccagcggcgtgaacccggcaatcgaaggcgatgccagcgccccgagtggccgcgcccaggaaatgatgatggcctcgggccttgccgaaatggcgggcgtctttgaggcgctgcgggactggagctgggaggtctaccgccaggtgtggttccgcatccggcagtactggaccgacgagaagtggatccgagtgaccgatgacgagcgcaacatgcgctgggtggcaatcaaccgccccatgactcaggccgatctgatgatcgaacaggctgagcagtctggacagccgctcaacccacagcaggttgcacagctccgcgccgatccgatgatgcagcaggtgtccgtccaaaacccgctgggtgagctggacgtggacttgatccttgaggatggccctgactcggtcaacctgcagagtgagcagtatcagtcgctggtcgatctcaagagagctgacccggcgtccataccgacgcgtatgatcatcgaggcctccagcctgcggaacaaggatcagatccttgagcatctggacagcggcggcatcccgcctcaggtccagcagcagatgcaggaaatgcagcaggcgctccagcaggcacagcaggccgtgcaggagtctgagcagaaggctcaggaggcacaggctgacaacgccatcaaggtggcagagctgcagctgaaacagcaggagcttgccatccggcaggaggagctaggcatcgagagataccgagccgagacagagcgaattacggccatgcggccagatccagaaccccaacagaccccgccatcgagcggggtttttgttggctga

SEQ ID NO: 512818 - DNA, 738 bp, Stenotrophomonas maltophilia
atgagcaacgagaaccgcgatttccttgatgaactggtgactgccgagcaggccccgcccactaccgaagccgaagaggcagaccagggcgagcagcaggagcagcagcagacggtcgagcaagtacagcagccggaaaccccggcgcccgaggcgacgacggccacggaagtcaaggagccgcagacggttccgcttgctgccgtaatggcagagagggagaagcggcagcgccttgagcgtgagctggctgaggaaagggcgaagcatcaggcccaacaggcaccggcacccagctactacgaggatccggagggctacttggcccgggcacagaacgacatcgagcagcgggcgaccgctcggctcaatgccgcactggaagcccaggcacgagagcagtacccggattacgaagagaagatgggtgtcgtgatggaacacgcgcaaggaaatcccgccatcgtgcgggaaatcatgactgcgccaaacccagcagttgcggcctacaagatgggccagcggctgatggagttccagcagatgcaggaccccgaagcctatcgcgcaaagatcgcggcagaggttcgtgcccagatcgacgccgagaacaaggccaaggccgaccagcgccagaaggccgccagcgaaatccctcctgacctatcccaagcccggaatacgcggggtgagttcaccccgaagtccgacgttttcaatgagctattcaaggggtaa

SEQ ID NO: 512819 - DNA, 1086 bp, Stenotrophomonas maltophilia
atgaccaataccaccatctccgcagccgtccgtgccaagcagtgggacgacaacttcttcatggagtatgtccgtgccaaccgcttcaagcgctacatgggcaccagcgagaacagcatcatccaggtcaagaacaacctgaccaagaagaagggcgatgcaatcaccatcaacctggtcggtgcgctggatgccgatgctggcccgaacaccggcaccaccaccctggtgggtaacgaaaaggcgctgccgaacgacggccacaaggtgaccattggcgttgtccgtgacgccaccgtggtcaacgttgaggaagagcaggcttcggccttcgatgtccgcgacgctggccgtcaggcgctcaaggatctgtccatgcgctacctgcgcaacgacatcatcaaggcgctgggctcggtgcagggtgttccgtacgccactgcgtccgccgcccagaagaacgcctggactgtcgccaacgtggaccgcgtcctgtttggcgatgccgtcgccaactacagcgctacccacgccaccgcgctgaacaacgtgacggcggccatgaccctgacccgcgacaccgtctcgcttctgcgccagattgcgcaggaggccgagaccgtgaacggtgacggtatccgtccgttcacctacggcgaggacgaggaaacctacgtcctgttcgtcaactcgcgtgcgttccgagacctcaagaaggacctcgagacagtccacaaggatgcccgcgagcgcgctctgagcaacccgctgttcaccggcaccacctcgctgtactgggatggcgtcgtgatccgcgagattccggagatcggcaacttcaacaacaccgcaaccactccgatcccggtcactccggtgtacctgtgcggcgcccaggcgctggccgtggcgtgggccatgaccaccaagaccacgctgcgcaaggaagacgactacggcttccagtacggcgtcggcttcatggagctgcgcggcgtcgagaaggtgctgtgggggcagggcaccacagctgcgaaggactggagcctggtcaccggctacgtgtcggccccggcagcggcgtaa

SEQ ID NO: 512820 - DNA, 354 bp, Stenotrophomonas maltophilia
atggccacgtatagccgcgaagaactggtgcggcaggtcctgctgcgccttggcgttcttgacgctgacgaagctcccgaggctcgggatgcagccgacgtaggacgcatggctcagacggtgatggaagacctctacaccgagggcaagttgccattcgacatcgacggcgacatcccggcgcgctacctcacacacctgagctatgtcatcgctgagcctctggtggccgactacggcgcacttgcccgtgaggcaacgatcgtgcgaaacgcagacatcgggcgccgggcgatcaatcgcctgaatgcgaccacgtaccagggcgctgtcgtgccttcggactacttctaa

SEQ ID NO: 512821 - DNA, 2109 bp, Stenotrophomonas maltophilia
atgcgcgcccagcccgtagacctgatcggcggcttctataccgacgacagcctgccgtggtcgtgccaggacacggtgaactggctgccggtgatggccgaggtggctggtacgcgcacggtatcgatgttcgcgactccgcctgggcttaagccgtaccagcagattggcaccggcccgattcgcggaatgcacgactgcgaagggctgaggctgatcgtctcgggccgctacctgtaccggatcagcaatgccggtgttggcattcccctgggtctgatccctggcgttggtcgcgtccagatgacgcacaaccagttcaagaccggctatcaggtgctggtcgagaacgggcagggcggcggcggatacgtctacaacacggtagacgacacctttgcaaagatcacggacgagggctacccgggttcgatctcgtcggattacctcgattcgtacctgctgggcgtcgagcctctgggccgattctggttccattccaatctggcagatgcgactgactacaacacccttgatcggtacgaggctgaggctgcgcccgacaagattgtgggtcttgcggtcagccagtttgaggtcgttgtctttggccagcggacgattgagttcttcttcaacgctggcggtcagactggcacgttccagaaccgtcgccagtcgatcacccgtggctgcgcctcgcgccacactatccagaagctggacaacaccctgttctggcttggcgatgatggtgtggtctaccgcatggagggctatgcagctcgtccggtatcaacgcgagcgctagagaaggccatttccggctacaactgggctgaggccattgccttcacctgggaggatcgcggccacaaggtctactacctgaccttcccggatggccaaaccttcggctacgacgtggtgacgggcctttggcaccgtcgagagtccttcgggatcaatcgctggcgcctgagccacacccagaagtggggccgcgattggttcggcggagacttccaggacggtcgcatctggcagctggattgggactacttccttgagggcgatcagccgatcatcagcgagcgcgcctcgggtgtgatcgccgacaatcagagcgcgttgctgctgccgaatgctgaattgatcttcgacacgggacaagggccagcaacagtccccactgtgttcccagtgcagcctccgattcccgtcctcggtgggatgcttccgatttcctacttcggacagccgtattcctatcagctgccggttacgggtggcactgcgccattctcgttcaagttgatgtcggggcagctcccttcaggcttcaccctgaacgcaagtacaggcgtcatctctgggcagtcgtctgcgcctgcatctgttgggctgacaatccgggtgaccgataagaacggcttgtggagcgaaaaggactatcgattcgtcaacattggcacgctcaccacctccacaggccaccagttccttgacaccaccaacagctacacggtcccagctcccgctggcactcagaatggcgatctgctgattgccttcgtgtcgtttagcgatgtcggtatcccgccagctatcccggtaaccgtcagcgctgggtgggagcagattcaccgcgatgcgtcggctgtccgtagcatctacatcggctacaggaagattgccaacggctctgacagcctggtagtgactacggctacgcgagctgtaacccacgcccattcgattgtccgaattcctgcgggacagttcagagggacgggtgagcgtgtgtcgcttctgaccaccatggccacgtctttcgatgcgcccaagcaggtcactggcttcatggcgcaatacgccatcggcatcacgctgatcggcgcgggcaatggtgacacgaggccgcagatttacgccttcccatcaggccagtcagcaacttacagcggtgtaaacgcgaacacatgcaacccatccatctgctacgacgtggtggctagcgacgccttcaccgggacctggacgatgcgagggactgcctcaaccgccaatgatcctggtcatgtgttcactatccaggtggagatctga

SEQ ID NO: 512822 - DNA, 558 bp, Stenotrophomonas maltophilia
atgaaaatcgcaaccgatccaggcttcctgcaggaagtcatggatcaccctgccgtgcgtccgtggattgctccggatggcgtggatggaccgttgccgctcgctcggatcttcgatcaggggatcgggatcgagtttgagggcggcgggttcttcttccaccggctcggtgatggtgtggtggaggtgcacacgatgttcctaccgcactccaggggcgtggcggggttctgcgcgcaggccgctgagtacctgttctgcggcactgaggtgaccaagattgtcacgaaggtgccggtggacaacatcccggccatgcgcctgaccgagcgcgtcgggttccgcctcgactacgtggctgagaaggccttccagcgcggcggtgtggcccacgacgtgaagcactacagctgggacatcgatctctgggtgcgcggcacagacggccctgtgtgggcgttcaagcgctgctgcgagctgggcaacaagaacaaagggctacggctggcgtatcgctgggccgtgacaaacgacgactactcggtattggagagctga

SEQ ID NO: 512823 - DNA, 864 bp, Stenotrophomonas maltophilia
atgcctgctgcaggtgcaattgtaggagcggctgggagcctgatcggcggcaagatgcagtccgacgctgctggccgtgctggtgacgcggcgtcaaacgcctctcaggacgccatccgggcgcaactggcgatgtacaaccagagccgtgcggacacgctgccgtatcagacggtcggcactggcgcgctgaacatgctggctgggatgtacggccttccgacctactcgggcggtatcaacacgggtggcatccagatcagcgagccccaggctgcgcagaagaagaagcgcagcttcttcgacaaggtgactgacccggccaacctcgccggtcagttcggcggcaccagctacgacccgatgggcttcttcagcagcagcagctcgggcgatggtggcggcctgcagttctcgactggtgggggcactggcaacgcgctggctggcggcggaatggtcaatccgggaaccggcgttgccgacttcagccagttctatcagacacccgactacctagtagcacgagacgagggcatcaacgcgctcgaccgtggcgctgcggcccgtggcggcctgtattccggtggtgctgatgccgaccgcatgaccttcgcatcgaacctcggctccaaagccttcggcgggttccaaaacaacttgttccggttggctggcttgggcggccaggcaaattccgaactgaactcgctgggccagaacaccggcaaccaagtggggaattcgctaaccaacgctggcaatgcaaggtcgtccgcatacctgcggcagggccaagcgtggaacaacgcattgagtgacctgggcgggttcgctggcgactacttcggaggccgcaagtaa

SEQ ID NO: 512824 - DNA, 1395 bp, Stenotrophomonas maltophilia
atggctgacttctacaactcttgggccaccgggcaggccaatgcgcttgctcgtaggaaagccacgaatgatctcgaccaacaggccgagctgcaggctcttggccccaaggtcatttctggcgatctcggcgctacggatagggcgtatgcgcttgaccctaagacggctcaggcctaccaggggcagcaggatagggagcgccagcagcttgttggcttggctcgcacgctgaccaatgcagcgtctaatccgcagtatcaggccgctgtctacaagactgcggtcccatttcttgcacgccgcttcggtgccgagaacatcccgcaggaatgggatgcagctacggtaatgcccatcgcccagcagatccttgatctcgacaagaacactccttcgctgggcggaacgggtggcacagtccagtcgcagaagatcggcgatgacggctttatctacaacacgttccgcgatggccgaatggtcaataccgggatcaaggctgaccgtcaggcgtggttccgcgatcagcctggctttgagccggaaatcatcaacaaggatggctctatccggtcgttaggatcgtccgggggtgcaatggcgcaagctcctgcagggcagggcgtgcaggtagggaatggagctggcgccgttcggatgaacattgagggcatcccggctgcccagcagcaacgcatggcgcagacagtgtcgctgatgcagcaggccggatatccagaagaagaaatcatgggcttcctccagagccagctgccgcccgattcaccaggactgccgcaagctggatcggcgcccatgcagcctatgagccgcgcccgaccgtcagcggcacaggaagcccaggcaacggagatggctcgtcagcaggtccagctcgccgcgctcccagcccgtctacagcttgagaacgatgcggcaatcaaccgcgccagcggcgagtctcaggtgaaggcgcaagcagagcaggcagctacagcgcgctcgaatgacaatgcggcgcgggtatatgaggccggtatggctggtgtctaccaagggatgcagaacacctcgacaggtccaattgttgggcggctgcctgccctaacggacaatcagcagatcgctgaggggtcggtatctgcaatggcgccggtccttaagcagatgttccgtgcagctggcgaaggtgtattcactgacaaggaccaggacctgttgatgaagatggctccggctcgctcggattctccggctgctcgtgaggcgaagatggcaaacgtggacaacatcgttcgggccaagctcaacatgccgccgccgcagaaggctaccaaccccaagacgggtgaaaccctctatctccgcttcggccagtgggtgaagaagtaa

SEQ ID NO: 512825 - DNA, 1128 bp, Stenotrophomonas maltophilia
atgggcgagaggctgaccaatgcgggaattgctgctgctggtggcggacttggtgagcttggcggtagtgcgctccgcgtcttgggcaacaaggtcacgccagagatcaccgcgctctacaaccaggccaagcgtttcggcgtggagctgactccagctcagctgtcgaacagtcccttcgtgcagcgtgctaccaacctgctgcgcagtatgcccctgtcgggtgccaatcaggcatgggagcgccaagtcggccagttcaatcaggctgtgtcgcgggagtttggtgagaacgccccgaagatcacgccggacgttttcgccagcgctaagtcccgtatcggacaagagtttgagcagctgtcagcccattccaagctcaacatcaccgatgggctgatggagcgccttggcggcctacagcaggaagctgccgcatttgcagatgaaggtacggtgcgtgccgttgggagtgccatcgaccggatgttccggcaatccaaggacggcgtactgccagggcaggcgtacaagtcgctggattcgacgctcggcaagatcatggcgagtggcggcgagaagtctttctacatcggtcaggtgcgcgatgccatccgcgaggcgatggatgagtccatcgaaccggctatgcgtcaggcctggcagcaggcccgtggtcagtacaaggcgctcaagacggttgaaccattggttgccaagagcgctgatggatcgatctccccagcccaactgatggggcgcgtcaccgccaacaatgcgggcaaatcggcgatggcctccggtcgcggcggaaaccttggtgatcttgctcgggtaggtcaggcgatgaagtccccatccagcagtggcacgaccgagaatgcgctggttgcacagctggggaatccgcttctctggccgcttgttgctgcccgtactgccgttggggctaccgctggtcgagccgcaaacagcaacatgctcgctcgcctgatggctgatccgcaggcgcgtggcgcagtggtgaacagcttggcgcggctaggtgggccgctgggtatcctcgccgctcccgctgccagcgctgccgtcatggccgagccgaggcggcgtgtggatgaagactga

SEQ ID NO: 512826 - DNA, 279 bp, Stenotrophomonas maltophilia
atggactacagcccttggattgctcccttcatcgtggctcttctgacccctattggcatcaaggtttggaaggccattgagcgccatgatgagcgcaagcgtctccgttacgaggccaagcgcgctgcccgacttgaacggaaggccgcacgaaaggccgcgaaggaagccgccaaaggcgaccatcacacctcagtcttcatccacacgccgcctcggctcggccatgacggcagcgctggcagcgggagcggcgaggatacccagcggcccacctag

SEQ ID NO: 512827 - DNA, 411 bp, Stenotrophomonas maltophilia
atgacctcttccagcttcaccgacggcttccctgaacgcctgcgagcatcccgcgagaaggcaggactcaccctccgtgacctcggggtggccgcagatatcaactacacccagatttcccggtatgagcagggcctggcattccctagacccgctgttctgaaccggatggccgaggctctcggagtccctgcagacgccctgcgctatggctccgaacactccgtccagatccttggcccggatggcgcggagatcgtcaccctgttcttctcgccagagcagtttgctcaggtcgaagtgatcgcagagctagatggccttagcgttccagaggccatcaagaagatgatcctggatggcgcaaagttcatgcagaacaactccccaccattgcgaagagtgaagtaa

SEQ ID NO: 512828 - DNA, 150 bp, Stenotrophomonas maltophilia
atgggcaagagacagcttgttctgaacatcccggctgagctccgccgctggctcgagcagcgagcagcagaggagagccggtctctcaattacatcgccagccaagtgctggaaaaggctcgcgcagagcaggagagggcggccgcatga

SEQ ID NO: 512829 - DNA, 618 bp, Stenotrophomonas maltophilia
atgagcatcctcaccatcacagcagtaggtgaagcacggattgataccagggtcatggcagaccatctaggcgtccagcaccagaacctgtttgagatggtgaaggactacaagtcggactttgaggagcttggaattctccggtttcaaaccgagaaaaaagacggccgtggacgtccagagaaattcgccctgctgaacgaggaccagtgctacctgatgctcacctacagcaggaacacgccaaaggtgcgcgctcttaaggtgaaactggtcaaggccttcaaagaagcacgggaagcgagacgccttgatgaaggcgagtacctgcccgcgtatcaccagctgcatgaaacgatccatatgctggcagctggctccagcaatgagaagttcgttcacattaacgtgaacaaggccatcaacaaggtcgttgggatagatgcaggacagcgcaagagcctagatcttccagcgaagtccttgctcacggtggctcaagtagttgccaccaatgcaatgcaatctgccgataaccatcgcgatggatacgaacgcgcaaagcgctcacttggcgccctacagcaggccctcatagggccctcaaaagccgcctaa

SEQ ID NO: 512830 - DNA, 297 bp, Stenotrophomonas maltophilia
atggcggagagtatcaaaaaattccctgagttcaaacctcaggggagcgggtcacggtatgtggatgagcaagttggcatcctggccgaaatgatcatgaagaggatgaccagtcagggcggcggaatcgacctaggttgcaacgtgattgagtttccggcgtcgcgcattgtccggaacatgcaggctcagggcgccagatcagatgttgaccccgttcttcgcgacagaatagctcgcgtagtaagtgattgcgtaaacaagaactatcgagaagggaggatttgtgaggaatag

SEQ ID NO: 512831 - DNA, 327 bp, Stenotrophomonas maltophilia
atggtgaaggcgcatcgaatagcatgggcacttcactacggtgaagaccctggcatcttgttcgttgatcacatcaatgggaacaaggctgacaaccgcatctgcaatctgcgtctagcgacgttggagcagaacgcaatgaatgcaaagcggcaagagcgtaataagacagggcagaagggcgtctattgggatgctcgtcggcgccgatacaaggtgagcttcagacagaggcacgtcgcctttacgaagacattggaggaggcggtggaaatctaccgtcgcctcgcactggagtttggcggcccgttcgccagattcaactaa

SEQ ID NO: 512832 - DNA, 774 bp, Stenotrophomonas maltophilia
atgaccagcccgttctacaacccggctccagtcttcctggacaacaacgcgaggcctgtggccggagggttcctctacttctatgaacccgggactacgacgccaaagctcacctggtcgaatgaggctttgacgatccccaatgccaaccctgtccctttggatagcgcggggcgcgccaacaccaatatctggatgaagggcagctactcggtacgcctgaccgacaacctgggcgctgtgatctggacccgtgatgtcagcgacggggcaaccggccaagccgtcatcccgccgatggaggctggcaagtttctgaccaacgacggctcggtgtacctgtggggcgatgtcctgcagctgccggacccgaccggctcggacgggaaggtcccggttgccagcggcggcacctatgtcctgcagtccttcccgtcctatccgaccgttccggttgtcactgacaactcggtcaagacagggaccatcctgcagcagtggggcactggcagcatcccggccagcgggaccaaggttgccgccgtcaccctcaatttccctactgcctatgtgtcgcccccttattgcacagttgggatcaatcgcgggagtggcgttgtcgctgcgggcttcatcggatgcttgggttggactgccagtaccacgcagctgaccatcatctgggacctgaacatcgttcagaccggcagtgagtacaacctcaccagcccaatcccgatccagtggagcgccatcggcaaggtagccagctga

SEQ ID NO: 512833 - DNA, 1173 bp, Stenotrophomonas maltophilia
atggtcaatcgcttccctggcgagcagccgcgctttgaccaaccggtagtcgatcagtctggacgggtgacgcaggcgtgggcgaactacttcctgcggctggcttcggcccaatccaatgacgatctgcgcgcgctctatgaagcccttgcggcccgagtagcggcgctggaagacggcgagggcggcagcttccagatcctcggccagcagtccatcgcggtgaacggcatcccgcagccgggccatgtggtgatcatcacgctgcagggcgacacggacagccccggcaccacggagtactacggcaccggcccgactggtgcgaagggctggttccctgtttcggacacgatcacggtcaacggtggcgagctgacgaagactgtcggccctgatggcgtgaccacgttcggcctggcagatgttcccgactctggcgccggcacgctgctggcgaccaccttcgacacgaaggggcgtaggactggcagccgtccagcaacgatcaccggcaccgcgcagcagatcgacgtggccaatgggaacgcggcggctggcttgccgaccctgtcactggctgcagaggttctggcctcgctgggaaaggccgacagtgcggtgcaggaggttcgccccggcacgaacatcaccgtggacaacaccgacccgcgccggccgattgtcagtgccgcctctggacttcctgaggcgccgaacgacggatggccatacgcacgtcagagcctgtcatgggcgccgctggatggccctaacagcccctacgtgctactgcgctggtcacaactgactgaccagctcgggaacccgctgaccgaccaacagggcaggccgctgctcgccaactcggcgcagattccctaccagtggctatcgggtgtcccagcaaatctgaccggcgttgctggcctttcggggcagggctacgccttccgatccagtggcggcgtctggtcgctccagaccctcgcaagcctgcagacccttcctgcaatgacgctggcggccgccaacgctcttactggcgtcaacgacttccagctggtggcaatcaccgatctgactggtggccgcgagccgtgctggtacgactcaacggtggccagtggcacgaaatggcgccgcttctcggataggagcatcgcgaactaa

SEQ ID NO: 512834 - DNA, 741 bp, Stenotrophomonas maltophilia
atggcccttgatccctcaatttccatcatccgggggttgcaggcctctgtggctctggacggccttacggttacggttagcccgggagtctgttacatcccaggaacaggccgcatcaccagcgacggtacagccagcatcactctgtccggcctgacgccgaacacgttctatcatctgtacggctatggcgtgggaggctcactggcactggaagccagtaccgtcgctcctgacacgccgtatctcggaactgcccgctgcaagactggggacaccacgcggcgctatctgatctcaggacggaccaacgccagcggcatcctgcgtcccggcaagcacacccgcccagccgagatgggcaaccgagtgatgctcgacgcggccagcgctgcggggtcggtcccagtgacgcttctgtcaggccttgtggctaccacgccgcagacagtcgatctgtcctcagtcctgccgatcactgccaatagggccatcgtccaggcgctgaaccccaccaatttcagcctgtacttctcgcgctcggatgtaggcgcgccctctgcgaccaacttccagtacgcagccgtccccggctccgcccctgttctggacatcacgctggacgccaaccggcagttcacggtcctgctcaacaactccctcccgctcatcggcccgattctcggccttctcaccggctcggcgtcgctgacgctcatcggttacgacttcgaccgctag

SEQ ID NO: 512835 - DNA, 1137 bp, Stenotrophomonas maltophilia
atgcccaagtatgcagaccccgccgtataccccgtaggcactccggcagccaccgacaacgtgatgacccggaccgctgctggcgccgatggcaacttcgccctaggcaaccttgccggcatcgctggcctgactccatccgctgacctgtccctgtactacaacggcaccgcatgggcgacatacacggtaaccagcgtaggccgcaccctccttgccgccaccacccaggctgcgcagcggaccgcattggcgctcggcacagttgcaacatttgaccaaggcaactctgggaacacgatccctcattgcaatagcactgttacgtggggcaatcctcagacaatgctggggaacctaaccatctcaaacggcggtccatctctttttcttagccatacgaatggcaacctgaccagattctggaaccccggaacagcacttaccctgagcaatactctaagtggtacgacgacgaactatctcgttatcgacatggctagttcgattgtctacttccgaggaaacagcgttccggctggtgacaacctgtattccagtgggcaggcaggtaaccgctggtcacaggtatacgcggtaaacggcaccatcaacacctccgacgcccgcctaaagaccgagccgcgcaagctgtcggaggctgagcgcggggcagggtcggagctggcgcgtctccctgcgatctgggaatggctgaccggtgaccggctgcacgctggcccgactgtgcaggctgcaatggcggtgatggaggcgcatggccttgatccgttcgcctactcattcatctgctacgacgagtgggaggctgagccagagcagtggcatgagtggcctgcagaagaggcggtttatgaggaagtgcctgatcccgtctatggggcaaatggaaccatcctcaccgtccaccgcacgaaaaaggttctggtcaaggaagccgtcgaggctggccgcgagctgatccagcccgcgcgcgaggcgggtgaccgctacagcttccgcaaagaggagctgctgtgcttcatggtctcggcgctggctgcggagaacgacctgcaggcggtcaaggtcgaggcgctggacgcccggctggcagccctcgaagccaaggcctga

SEQ ID NO: 512836 - DNA, 303 bp, Stenotrophomonas maltophilia
atggaactaccgtccgacttcaaatggcattacgcctctggccttgagcagatcccggtgacgatcagccacatgagtgtgggcgttgccaggatcagccagcgggtggatacgctgcggtggcaggttacgctggactaccacaaggaccaccggcagcagactgtgaggccctgcgagaaccagtggactggcagggctgggatggagctgtgggtcatccggcatcaggaccggctgcgacaggaagtcgcagctatccttgcagccaaggaggcggggaagatcaagcccgctgagtga

SEQ ID NO: 512837 - DNA, 1164 bp, Stenotrophomonas maltophilia
atggcaagacctaccaaccgactgagcgcgcgcgccgcgcagaccaccaccaaggcaggctaccacgcggatggcggggggctgtatctgctcgtcggcccaacgggagcgaagtcctgggtgctgcgctaccagcgcggcggcaggcgccgggaaatggggttggggccagccttgctggtcagcctgcaggaggcccgagcatcggccttacagcaccgccggcagttgctagccggtgaggacccgatcgaagccaggcgcgcaagccggtcggccggcaccaccttcggcgaggctgctgacgcctacattgcctcccaccgcgccggctggaagaacgacgcacaggccgatcagtgggagcagtccctgcgcacgtacggccctgcccgtgataccccggtcggcaacgtcgacacccacctggtgatggcctgcctgcgacctatctggaccgaaaagacggtgaccgccacacgcgtgcgcggacgcattgagcgcgtcctggactgggccaaggtccacgggcaccgggatggcgagaatcctgcccgatggcgtggccacctggagaacctgctgcccaagccgggcaaggtgaacaagcccaagcaccacgacgccatgccctatcgggacgtgcccgccttcatggccacgctagccgagcgtgatgcccgtacgcgccgggcgctccgcttcgtcatcctgacggcggcacgcactgcggaggtcactggcgccgagtggtcggagttcgatctgaaccacaagctttggaccataccggccggccgcatgaagggtggtcgggaccacatcgtgccgctgaccgaggcagcggtggccatcctgaagccgctatcgcggaaggaaccgccattcgccctgtccgagaacgcgatgctctacctagtgcagaagccagccccgaaaggactgggactgcccttcactgtccacggctttcggtccagcttccgcgactgggcggcagagaccaccgaccacgccaacgaggtagtagaaatggcgctggcacatgccatcaggaacaaggcggaggcggcctatcgccgtggccagctcttggacaagcgccggcccctcatggaggcctgggcctcgtatctggggctcggctcaaaccccgcgccgtag

SEQ ID NO: 512838 - DNA, 429 bp, Stenotrophomonas maltophilia
gtgctgtggtggaacggtcggcagatcgccaacgtcagatgcggcgatgatggcgccgtgcgcgtgcaccttgatgcccggaagatgtggcagaccaaggacgtgcgggccgccagcatcgcccaggggaggcgctacgccgagcgctggtgcgcggccaggctctatccggagatgcgcctgcgcgccgccgtggcgcgactgctggataccaccccgagcgagccgctggagccgctgcccggcctgccgccgacccgcgagcagcagcaacaggcccagcgcttggccgaggccacagccgtcgccacggctcgggtcaaggaagcgctggaaccacctaagccgccggccaccaagccccggccgaaggacgcccgcaaggcgtgggtcagggcagggctgcagcagctacggcgcggggtttga

SEQ ID NO: 512839 - DNA, 336 bp, Stenotrophomonas maltophilia
atgtcggattacccggaagaccataaaattcgtgtcaagtggggcggttttcagtcggggatagtcatcggcgccacggtggtgatctgggtggcgtattggctgctcatcagccccgaccatgagcgcttgaagaccgtgttgaccttggtagggctgaacatcgacatcgtgggagtggtgtgggcttcgctgtctccgccttactacggggcctttgctgatggcggaaaactcgagttcaagcgaaaggaggttcaggagcgggcctttaggcgaggaatgtcgttggtcgccttgggcttcttgctgcagggcttgtccaccattctctga

SEQ ID NO: 512840 - DNA, 483 bp, Stenotrophomonas maltophilia
gtggctgatcaacccgaaccactctcctggcagctggtcgagttcctgcgcgatcgcgtgaaactgatccgtacctcggccggtttccgcaccgatatcggcagtgggctgatcgtggtggacgatgatgaggtgagcgaggacgaatccgagcccgccaccgtcatctcggtcccgcaactctcgcgtagcggcggtagtagcgcccaggtcagctccgatgcggcaatcaccatcgagttcgaagtgccgcgcggaagtggacaggcgaatccgaagctacttgtgcaccgtgccaggcacgacttgatccgggcactgaccttcaaccccaagctgctgccgaagggcgtcactgcgttcgagctggtttcaacccagatggcaaccctggaagacgacgcagggcataccgccgtcgtcgctcagatcaccgcgcgggctggtctgaccgagacctttgagcccgtccccaacccgtag

SEQ ID NO: 512841 - DNA, 792 bp, Stenotrophomonas maltophilia
gtgcggtcgagggacgtgtttacccattgcccgtttggcaccaccgctctgcccggccccacttatggcggctggtccaactgggtggatacaggggcgcgtcgcaacgaggtcaacacatgcaagcccacggctgctcgctgcagcgatggcagcttgcaggttgtggcgtggcactcggccgatgggcaggacgtgccgccgccctcgggttcgagtggcatttcttactggtatcccgacgctgtggtgcgcctgacagcagcggagaaagcaaagctggactgggccatcgccaacgtgcccatccaacgggtcgagacgccggcaccgatgcccggcaactggcccgccaacgtgagcgagtcggctttctacgaagagcaatgcaacgcgctttcggacgccgggaacatccgctacgcctattcctacgacttcgaatgcgtctccaacatgggcatgcactactgcgactacaactggaccagcggcggcacctctttggccgtgtgccggcaagcgtgcgcgtccgacttggtgggcaagaccaacaatccttatcgctgggagtggcccgagtcgtcggtggtggcttcgacgccctattccacctgcacgggccagcccggatgcacgcccaacggtgggtttggcacccagcaaggcctgccggcgtgcaacgagcacaacgtgggtcagaccttggcgttcaactggtatcgccagttctacaacccggtgcgggtggactatcaagagattacgttgacgtgccgggggccaacctga

SEQ ID NO: 512842 - DNA, 654 bp, Stenotrophomonas maltophilia
atgccgcccttgcaggcggcattttctgtaggtgccgagcttgctcggcacgccgatagcgctcccggtcgcggcttctccgaacggcgccgaccaaggtcggcatctaccggaagccaggcagccggaacgaaaatgccgcccttgcaggcggcattttctgtaggtgccgagcttgctcggcacgccgatagcgctcccggtcgcggcttctccgaacggcgccgaccaaggtcggcatctaccggaagccaggcagccggaacgaaaatgccgcccttgcaggcggcattttctgtaggtgccgagcttgctcggcacgccgatagcgctcccggtcgcggcttctccgaacggcgccgaccaaggtcggcatctaccgaaagccaggcagccggaacgaaaatgccgcccttgcaggcggcattttctgtaggtgccgagcttgctcggcacaccgacagcgcatgtggaaagccatgccgaccaaggtcggcatctaccaggaaattggcgcacggcatcgttgtggattacgccgccgaagccgcgaccttctccaggatccgcttgccactgctttccagcgcggcgtcttccttttccttctgctgctgcgccagcttcgcacccgggcactgcgccagcatgtag

SEQ ID NO: 512843 - DNA, 687 bp, Stenotrophomonas maltophilia
atgttgggaattggccagggcatcctcggcatcggcgccttcaagcagcgcctgccgcgcccggaagaagcactgccggggcgtgaccaaccgctgccgctgcacagcaaccagcacttcgtgaacagccatccgctgaaggaccgtttcgccggcctgcagcagatccgcttcgcgctgggctgcttctggggcgccgagcgcaagttctggaccgaaccgggcgtgtacagcacctcggtcggctatgccggcggcatcaccccgaacccgacctatgaagaggtctgctcggggctgaccggccacaccgaagtggtgcaggtggtgttcgacccagcggtggtgagcctggagcggctgctgcagctgttctgggaaagccacgacccgacccagggcatgcgccagggcaacgacaccggcacccagtaccgttcggcgatccacgctaccgacgaggcgcagtacgctgccgcgctggccagccgcgaggcctaccaggcgcagctggccgcagccggcttcgggccgatcaccaccgagatcgtgtacccggcaccggcgtactactacgccgaggactatcaccagcagtacctggcgaagaatccgaacggctactgcggcatcggcggcaccggcgtgagctgcccgatcgggctggatgtggaggcgccgcgctga

SEQ ID NO: 512844 - DNA, 450 bp, Stenotrophomonas maltophilia
atggtcaccggcctgagcattgcgcctgcactggtggaagaagcactcgccgcccgccagccgtccaagcaaccggatagcgttgctctgggcgaagcaacggaattctgcaccgagaagggcgaccgacagccggtggggcaggagccgattgggtttcagttccgcagccgacagtggtcggacgaagaatttgccggcccttggctgaacccgaacgttcctaatcgtgcccattacgactcgcgcccggcgaactacgaaaccagaagcatctacgccgccccgcccgcgcaggccgtggacctgggtctgcagctggatcgctatgacgctggcctgctgggtgacggtggtggcggcgatgttggctggtggcaggactacatccgcgctgagctggatcgcgcccatgagttctatcaggaccaggccgacgcccatggctga

SEQ ID NO: 512845 - DNA, 1128 bp, Stenotrophomonas maltophilia
atgatccacgtcggagactgcctcgaagtgatgcgcgggatggccgacaactcggtcgacgccatcgtgaccgatccaccctacggcctgtcgttcatgggcaagcgctgggatcacgacgtgcccagcaccgagatatgggccgagtgcctgcgcgtgttgaagcctggtggccacctgctggcgttcgccggtacccgcacgcagcaccggatggccgtgcgcattgaggacgccggcttcgagatccgcgacatgatcgcgtgggtctacggcagcggcttcccgaagtcgcacaacggcccctggggaggtactgcgctgaagcccgcgctcgagccgatcaccgtcgcccgcaagccgcttacaggcacggtggccgccaactggcatcagcacagcaccggtgggctgaacatcgacgcatgccggatcgagacgatggacaaactcggtggcggcgatcagtctgccgcgccgaagatcggtcccgatggatggaaccggccatggatgcaggacgagcaggccaaggcggcacatgcccatcgctgcaatgccaacgtcgccaaagcagaggcgctgggccgctggcccgcaaacctggttcacgacgggagcgctgaagtactcgccgagttccccgacgcaccaggtcagcagcgagacactggccccctgttcgcacgatccgctcaggtctacggcgagttcgctgcggtttctgagcatcgagctcgaggcgactccggcagtgcggcgcggtttttctactgcgccaaggctacgcgcgaagaccgtaacgacggcctggattctggcccggtaccggctgtctccgccggcgcgacgatgcgcgatcgcgagacggccgactggtcagagcggaacgggaaccaccaccccaccgtgaagccaacaaacctcatgcgctacctgtgtcgactggtcactccggccggcggcctggtgctggatccgttcatgggcagcggcagcacgggcaaggccgcagtactcgaaggtttccagttcgtcggcatcgagcaggatcccgtctacgccgcgatcgccgaggcgcgcatccgtgttgcgcagcctgggctgccactgggagcaatcgcatga

SEQ ID NO: 512846 - DNA, 321 bp, Stenotrophomonas maltophilia
atgagcaacgaaaagaagaccctggctgttgatgtgctggcggtgctgcgccgcatggctggaatggcgctggcaatgcgggaatcaacgcgcgttgacgatgatcgcaaacgagttgctgaggaagaagaccagcaggcagtagccgccgtcgtggagcttgtagaggccgtcagcgagcatcacgcagccatggtgaatgacgcataccaagagaagcacggcgataagcaagcaactatctctgcgggtaggcgtctgggagaggcatctgagcgacgcctcgccgccctcgcccgcgtcaaaggagaatcagcatga

SEQ ID NO: 512847 - DNA, 300 bp, Stenotrophomonas maltophilia
atgagcgccaaagtcgaattcaatgcgaagtgcttcggcgcgaacctcagcgtcaaccgggacagtgacagctcctggcgcatgtcgctctacaccttcgttgggaagaacaagacgcaccgaaccattgcgttcgcctgcgccaatcccggccagatgccgcgcgtagataccgccgatgcggataccggcacccctgccgctatatggcttggctcggcctgcttcgatctgccaaccgctctcgccccgaaggtccaagcgttcctggctgagcatgccaacggaggcgcagcatga

SEQ ID NO: 512848 - DNA, 291 bp, Stenotrophomonas maltophilia
atggaagttctcgtcaacgccatcggtctattcggcgcgactgttctcggactagcagtgtttgctcttctcgttcttgggttgctgatgccgctcgctgtgttcggcataaaaccgctgctgcgagtggctattgaagagctacgtaagaccaatcggctgctcgccaggcaaggcatgcgtgaccaagggatagacgctggtggcataggggagaccgctacgtcgcgggacgattcggcgccacagtctttgcaggatttcatccgcgatcgcgatgcgcggtcctga

SEQ ID NO: 512849 - DNA, 357 bp, Stenotrophomonas maltophilia
atgatgaaggaagcagcagcactggaagcactcgcgcacgcactggcggccaaagttaagaaacgggacaggcctccggtccgaaacctaccctcaacccatgcatcaagcattgagcagaacgctacaaattcagcgtatatgcgccggattcggacactagttgaagcctaccagctcggctggctggttgatcagcacctggtagtgaggcagagcatcaccgagctgtcgccgactgagctgcgctccctgttgatcgagctagaggaagccagggaagcaatcacagaaggcttccctcttgagcaaaccgggctgatcaagaacatggccacggtactaccaaagccctag

SEQ ID NO: 512850 - DNA, 327 bp, Stenotrophomonas maltophilia
atgaatccgctggacaaggcaatactcatctgcggcacccagagtgaactggcccggcgtgtcaccggaaagccggcgacgggctacgtctaccactggcgcaagaacggtgtgacggaagaggttgcaatcgccatcgaacgagccgtagctaccgctataggggaagacccaggtgcggcagcacgggcagcagccaatggcggacgagtgaccgcagacgagttgcttcctggtgtgcgttgggagcgggacgaggcgggagccgttgtcggctacttcaagaacgtcccgccgttggctgaagtcaccgatgcccatgcgtga

SEQ ID NO: 512851 - DNA, 273 bp, Stenotrophomonas maltophilia
atggcagagatcatcagcttcccgcagcgaatgcgcttcaccgcaatccgcaccttcgacgccgcaaacggcatcggtagtgtggttgcggtcctctgggctcccgcaaacagcaacagaaacagcaatggccagcgccacgaacacgatggtcaccccacacttgcggagctttcgcccgaggcagcgcagccgatagcgacggtgtccagcaacccagccacggcgcgcgattgcaaggatgagaaccggatcacgcatgggcatcggtga

SEQ ID NO: 512852 - DNA, 150 bp, Stenotrophomonas maltophilia
atggaactggccgccctggcgctgactgacgcggtgcccgggttggtaggtgaagaagcattggcagagcgcgagcgcatccgccaagaaaccgaacgtagagacagcgcccagcgccagctcgatgaaggaggtatccgttgggtgtga

SEQ ID NO: 512853 - DNA, 846 bp, Stenotrophomonas maltophilia
atgtccctgcccctgcccacccatgccgccggtcttggcctgcgccgtggcctgatcgacgaactgctggccatgccggccggtgccatcgacttcctcgaagtctcccccgacaactggatcggcgtcggcggtgcacacggcgacgcgctgcgccaactcagcgagcgccaccccttgacctgccacggcctgtcgctgtcgctgggcggtcctgatccgctggaccgcaccctgctggcacagacccgtgccttcctcgacctgcaccaggtgcagctgtacagcgaacacctgagctactgcgccgccggtggccatgtctacgacctgctgccactgccgttcaccgccgaggccgttcaccatgtcgccggccgtatcgcccaggtgcaggacatgctgggccggcgcatcgccgtggagaacatttcctactacgccgttgccggcgcggacatgagcgagatcgacttcatcaacgccgtgctcgccgaagccgactgcgacctgctgctggacgtcaacaacgtcttcgtcaatgcctgcaacaacggttacgacgccttcgaattcctggcccacgtgccgtcccaccgtgtcgcctcgctgcacgtagcgggccacttcgatgaagacgacggcttcaagatcgatacccatggtgcgccggtgaaaggcgtggtctgggccctgttgcgcgaggcctacatgcgggtgggcgtgcgtcccacgctgctcgaacgcgacttcaacttcccgccgctggccggattgctggccgagatcgcgcagatccgccaggcgcaggctgaggcacgttggccggaggtggcccatggctga

SEQ ID NO: 512854 - DNA, 213 bp, Stenotrophomonas maltophilia
atgcaaaccgccttcccgggcaggttgcttggccgtgatgaccgcacgctaccccgccttcccgtggggaatgcggataatcgacgcgatgctgtgcagagccatgccgccagcgtagagcgcagcaccgccgaccggcaatgccctgcggcactgcagcgcgcgcaaggtggtgcagggatctatgctcggcgccattcccgcatggaatga

SEQ ID NO: 512855 - DNA, 603 bp, Stenotrophomonas maltophilia
atgactgaccgccttcgtacgatccgcctgtacggcaagctgggtgcccgctttgggcgcaggttccggctggcggtgaacagcccggccgaggcggtgcatgcgctgtgcacgatgttgccgggattccagcagtacctgatgggcgcaaaggccaagggcatggagtttgccgtgttcaacgggcggcagaacctgtcgcgggatcagctgcacgacccgccgggacaggatgacatccgtattgcgccggtgctggtgggcagcaagcggggaggcattctgcagacgatcatgggcgttgttttgattgttgttggcgtctacatgaacattgcggccggtggatccggtaccggattcatccagatgggtgtgggcatggtggtcggtggcgtcgcccagatgctctcctcccagccaaaaggcctgggtgccaaagacacacccgaaaacgcgcccagctacagcatgaacggcaccgtcaacacgcaggcgcaaggcaaccccgtgccggtcgcctatggcggccatgacaccaagggcatgttcatcggctcggccgtgatcagcggcggcatcctggcggaggaccagttttga

SEQ ID NO: 512856 - DNA, 450 bp, Stenotrophomonas maltophilia
atgaagcgcctgactgccttttgcctcgtggttgcactgacatcctgtgcggcgcatccgaaccgcaccacgaagtgtccaccggcccatttcacctacgtcggcaccgagagagtcgacggactgacctacgggcgcttccagatcacccacaacgctgatcagccgcttcagctgtgggtggatgagagacgcaggttgaactcaaggaccgctcgcgcagagatgaggcgtaaaggcgaggatgcctggcgaccttacaacgtgatccttgaggaaatcacaccgggagcgatcgggctgtcgatcgggcagggtgaacagcagagcgttttgttcgatggtgatggcgtgttcctgcccggccaatccagtgcggacacggagtactccatcgtggtacgggatgcagccggttgcgaacatcgcaccgcgtcattcattccctga

SEQ ID NO: 512857 - DNA, 297 bp, Stenotrophomonas maltophilia
atgagctacttggttttctgcacgtttgacctcaagggcgcgagcgccagggactacgagaatgcgtactcggatcttaaagatcttggtctcagcaaagtgcaaaagaccaagaaggatggggaggcagtcattcctacaacctctgcaatgggggagttcactggcagtagcgcggtctcagtccgcgatgacattcgcgcaaatgtcaaagctgcgtttgccgctcgccgcttcaggtctgagatatttgtgattgtcggcggcaattgggcctggggagctaccacaacgtga

SEQ ID NO: 512858 - DNA, 501 bp, Stenotrophomonas maltophilia
atgaaagattcgatgagaccttgggaagtctacgagcaggctgctcgtaccgtcgtgttcgatttgcgcgaacaacttaatattgcaggcgttgaggacaagcagaacatgctcggcgcaagcggaacggtctgggagattgacggcaaggctgctcttgccgatgactctggatttttgttgattgaggcacgtcggcacaccaccagtggtcagaagcaagaggctatagctgcattggcatatcgcattgatgatcttggcggtgctggcggcattgtcgtatcaccgctgccactccaatccggcgccgccgttattgcgaaacacgagaatattcaccatgttcaactcagcgagtggagcactgctgaaaactatctagccgaactcatgggccgcgcattccaccgcgcaagcgagcacgcagcggtgtcattctcggagagactggagatcaccgttatttgtaaccgcaaggtcatcgatctcggcacctga

SEQ ID NO: 512859 - DNA, 252 bp, Stenotrophomonas maltophilia
gtgcctcctagctactttgacctaaagacggctctcgccaaattcgcagatgcgaccgatacaaaatccaaactcaaggaaggcgctgagctagttgggcaatccgtattcaacgcaggcctgttcacggcaagggagcttccaaagttcgtggcacttgcagtggagcagcaactaaaggaaaggagggacctcccccctgaaaaacgcgaaaagatgcaagagttcgtagaccgcaacaagaagaaataa

SEQ ID NO: 512860 - DNA, 126 bp, Stenotrophomonas maltophilia
atgtacacgactgttgaagccgattcggagtgtgtcgcgatccagctggctgaagcaaagcttaaaaactccaaccctttgcacagggactactcctggtccgcaaagaaggtgaccaaaagttag

SEQ ID NO: 512861 - DNA, 519 bp, Stenotrophomonas maltophilia
atgtcgctgtcagagaagttgttggacaatctgaaaagctgggttgtcgtctcagtccctaccatattgagccacgggtgccgatcaaccgatcacggcattgatgtcgcgtctggttccataagagggaacaagtggttctctgtggattcggcttatgcaggggagtacgcgtggcattggagcaggcccgagactggctatccgctactcgctagggtaaacgtgaggagtggtttgcaggcggtccagcgccctagcggactccacttcccggctttcctttcggagtgctttcctgaggttccagcgggctatgaactaagcaaacactttcaggaagtcttggcatctcacttgattgaagctttcgatgaatctgtcagtgcctacacgttctcagatcaccaggaagtacttattgcgagttgcgaagattgggtcttcaatgcgacgtttgaaacgctgccgccggacaaggagtcgtacatgcagcaactccagtcgtcgcgagaatga

SEQ ID NO: 512862 - DNA, 2025 bp, Stenotrophomonas maltophilia
atgacgtggggcgcgccatcgcatccgcaaggctggtacgagcgaatgcgcgctgatgaatctgtccgcgtggtgattgaagccttcatacgtgatgttctgccccatggtcgtgatgatattcgcgcgacgttcgtgccggccgtggagcgacttgccccaaatttgacgcccgcgttcctcgatgccgcttccactgccgttcgctttggacacatttggtccgatgaagccattctggcgggtgcattgagggacctgcaaggcttcgagtcagttgtggatcttgccgtccgggagcttacgccaggagaagaagagctacagcgtgcggcggagttcatgctcagatgcaagaacaaggaattcagcgaggactacgctcaacactacgctgaagacgatagtggttgggtcgccggccagttcttagcgggctacatcgacacggttcgtagaacgctgggctggaggcatctatttgaacaccgtcaccgcgatcaactagttcacacatggctagatcgccttgacgaacattcttcaccttcgttgggcgagcttaggggcatatatgggctaacacgacataccgccaatgagagccttctgtggccggttttagccaagcactggctaccggaatttgagcgggacttgctggacttggtgaaagagggccatcgagacccaggtgtacgaatggccgctctcgaatgcttggtcgacaacgtggtggggcgtcttcctgatgtggttgggcagctccttcgaagtggagctgaagcacgattggtcgagattgcattggaactttgtgacttacgctatcagcgtgattttcaagggaggccgcgaaaggaggatgcagtgccttgggtcgctccatccctgcctagtcctttcgacgagatcgctgacgccgcttatgcggtcttgaagaagctaacgccggtcctgtctgaggaggcgcagtcggtggtcaggcgcatcgtgccggccagtgagaatgtgcgcgcttttagagtgaagatggacgctcatgtgcccgtcggttccgcggacgatgctcagtggctcctggctcattctgatgacccgacagtcgcagaactcgctattgaactcgcaatccgtcatggactgaatgaagatgtacaagctgccttgacgcatagattcgcggatgttgtcgcgccagcaatggctgcggtggcagcgaaactgtcggccccacttcctccagcgatactgagcctcgccagcaacaagggcagtcgcgtctgtcagactctcgttagcctgcttgacgctaggcctcatgtcgatcatcgcgctccactgctgctgctctcgaagaacgagtggtcgccacggggggggtactatgaagaggtggacgattttccgatcgctcgagccgccgtgacagctctgggtaagataggcacgctcgatgcagctactgctgatgacctgtataacttggcaattgatactagggactcggcgctgcgatgtgccatcttctcactgctagtcaacctggcggaggtgcgtttccaggaggcgttgatggacgtcgccctcaatccaggcaacaagtggattcgacagcaggcttcccttgcacttgcagttgggtacgagcacatcgttccatcagtcctgcagcgagtaacgccggaggtgctgatcagcaagatacctggtgtggcgtcaaggctactgttgttgctaacttgcgcgggtgatgctgacactgtccttagggctgccgagatggtctcttccaaatcaaccaggcgcgtgctgctgctcctaatgatctggctgcttcgcgagcatgatcagcagttggcagagcgcatcggacgaatgctgccttccagcaacgtggggattgcttgggcgcttgctggaggcggagacggcctgggcgatacgtcgttggatgaattgggcgacccggcctgtgtggaggaggtattgaattttatgcagccgaagagcaagggaagctga

SEQ ID NO: 512863 - DNA, 1548 bp, Stenotrophomonas maltophilia
atgactggatacgagtatcagatcgatgtctcagtctggctcgcactcgacttggtcctctcaagtgagttcgctaatgaagtagtcctcgagccagccactgaggaagacatcgaagcggatctggaggaagccaagcctggacgcgtggtaacggtcgcggaggtcgaacagtatcgcttgattgttcaagcaaaactccgtagcggtgacgcatggtccgtcgctggtgtgaagcggctacttgaacacggaaccaatcgtccatccgcagccagccgtttgggagatatgcggaatcgataccttttggtgacatccgcgggcgtcaatggacgcgcccggggtttgcaggtccgcagcccagggctttggccgaaggtggccgatatggccccctcaataagaaatatgcttcccgctggttcagcgggccgagtggctatcatcgggaatcaagaccttgagcgtctggagcgtgatatcaaggcattactatcagagaagcttcgtgtgccaaatgctaggttggaggggtgccgtcgaaagctccgcgacgaggcccgtgcccgcattggtggcgcaggtggaggtcgttggactcgggcccaactggaagaggtcatacgcgcccacgatggctacatcgcgagctcgcctgagttggagcactacgttaagccaactaactgggcagagataaaatcggcggtgctcgagcgcaatgcggcgttgatagttggtcagtcgggtactgggaagacgatggcaacgtcaaaactctacgatgaactgcgtagagaaattcccgggcttactcgggtgctcatcaagtacgggccagatcagatcagaacggacaatacgccagccccggttctttacgacatcgaggatccgtggggaagatacgacttcgacccgagaagtcgctcatggaacgatcaactcgctcagcacttcacgtatgccaggcctgaccggatggtagttgccacttcgcgtttggacgtcgctaggagttctggtgcgctaggtacggtaaagcgctgggaagtaagccttgaggctgaacactacgggacgcgcgagcgccagcggctctatcaaacccgcattgatgggttgccgcgtaatgtccaggtgctggcgaaagagagtcagtcgattgtactggcggagctcgcaaccccgcttgagattcagaagttcttcgacgcattggccaccacagcgacggggaagagaggttcagactcccgactgataagtgacgcaattaagcgtgctcatcaggattccatcgagcgtacggtagtggaccaagtagaagagcgtagtgatgttcgcgctgcggctgtgttgtgggggctgctgaaggcgaatgacaagctgtcgctgcggcttctccgcgaaattgatagcttgctcgccgatacaaacgatgctttcgaaagaggagcagtccctttggtcaacttctttgttgcctcgaggaacctgcgccagtcgggggggcatagtctcctactatcaccctcgtgttga

SEQ ID NO: 512864 - DNA, 2631 bp, Stenotrophomonas maltophilia
gtgcccgtcaaggcgggacggcattgctatgcgcttggaaaaatgggcaaattaactcccctgcagcaagctaatcagagccgacagagcgaaggaacatcgcccccagtacgtttagaggacttggcccgttccagtctcgtcgagtggacaccggccttcgtgcctcgtacgtatgaacgccacctggccccactgtcccaggcagaggtagagcgccacgccaacttggctggcgtcagtcccgctgggatcgactatgtaatctcggcaatcgtgcttccccctgccagaaaggtggaaaactcttacggcacaaaccgagttggcgaacgccatggctatgttcagggtagctttctctcggagaaatctgaagcccgcattcaaactgagtcagatggcgagatgggctttgcggacatcgtgtcctgcaatccgtcaacgttgatcctattggatcagcccaccaccgtcacagtgacttacgtcgacgcaatcggtcgccggcagccacgtcggtatacgccagactacctcttggtcatgtcggacagagtggtcgctgtcgaagttaagccactgcaagcgcttctgggaaaccatcggcaccgcccggacatttggccattccgcgatggaagattctctttccgtcccgccgaagaccacttcagatctgttggcattgacttcgaagtcattccaaccgagacgatcccttggattctcgctcgaaacctctctctgcttgagcccgttctctatcccgctaccgacgatgagcacgcgaaaatcagatcggtacaacgtgctgttcatcgcaagcagccggtgtctatcgaagctgtaatgagtgattgcagcctgacgagtggactcccgatactccaagcaattctgttgcagaaggtctacgtggatctctctcggtgctgcctatggcagcccgaatccgcaacaatctgctcaacccttgatcgggcgacgaaaattgggattgcgatcgagcatcgcgatctcgtgctgcagagaggccacggcgaagctgagcagttgttcaatcctcgataccttgaacggatcggctttcgactcgccgtcatcaacggtcaggcccaagccctgttttcggaatcacctgatattagcgaacgaaccgttcagcgctggcgcgcgagctacagagagcacggcttggcaggtctggcgccaaaatcagagaacgccggccgtccccgctcaatcacggacgccaatctcgacgttgccatgagccagatagcaaccgaccggtcgtccggtaatggggtgactatcgagaagtcttatgcatgctattgcgtgacagtggagagcatgaatgcgggggcgaatcggcttcatcagatgtccaaggcatcctacaaccgactgtggcacttgcgtgaccacaatagaatcgacgcacataaggccaggggaaagcgagccgccaacgcggatgcaggccgcgtagccactgagaagcaagccccgcttgcgacggtgccattccagatcgcccaagttgatcactgcactttacccgttgcatgcgaggtgaagggcgacgcgatcctcagcatgctagtcgaccaagtgacggaagaagtactcgcgtggatagttctgttctcaccaccaagctcaactacagacgctctactcctacgcgattgcgtccgcaggcacgggcggctccctaggacaatttatgccgatggaggtagcgacttccgagggaacgccttccagatgtccctttgggatcttcgaattagcttcatccaacgggcgtcgggacatccgaaaagcgggagtcagatcgagcgcagacatgatttggttcaggaagctgccattcgcggaaccacaggcttcaaggaagacgtcaagaccagccgcgccgtatctgccagccatagtcatgaagccagaaggaagcaagttcgcagccgtgttcttgacaaggtctccctgtctataaacatgatcaacaacggcaccgcctggcagaatgcgaagagcctcatcgacacgcgcctgcgcttcgagaaggtctatggcaaacagggagtggcggtcgagccagacctcaagttctttgtgaccacttcgccgttcgtcgatattggtggccgaacgagccctaggggggcgatccgctgggatcagcgctactttacctccaccgtgctcatctcaaaatccatcagtgttgcgcggctctcaccgcgacttgatccagagagtgacggaaacgtcatctacttctacctcgacaagacttggcatagggccgtatgtcgtgcacacgctcttcgcgcgggaatcagtgacgaactgctttccggaaccgcgccatttgccactaggtactcgtcggagcggggaattcatccgatgcacaaggcgatggagatggagcagagggagttcgacgaagtctccgcaaagaccagcagctgttcggagttcgccgaacagcccgtatcttccgaggccagcggtgagcaagctccccggaccttgacacctagcctgtgcatggacgatggctgggatagcgtccaaccggcagcagtggatcgtgggacggacgccccatga

SEQ ID NO: 512865 - DNA, 1116 bp, Stenotrophomonas maltophilia
atgaccgcacatccaacggcattcgagcgcgatcttgatcgcatcacaccaaggctcatcggcgttgttaggcatcgcaacttcatagcgacagaggtgttcctgaggacgttctgcgagaacattggcgggggaaacatcattgcgatcatcggcccttcaaattgcggaaagtcttttttgcttctgagactggccaagcacctccgagaggttgtcttcaaagaggcagccccggaatcagtacctatcatcggtgctttcgtcctgccttctaatgactctcgcgtaacgccgaagtacgttattcaaatgttactgggtgatgctggccatcctctctacgatccgatgaagctagagcaatccagacatcgtgggtctgcagggtccaagacggaggccgaccacctcaagctgctcaggaatttgttctccatccgaagggtagagtttgtacttctggatgacgcacagagcattgcacgcacgaacaacgaggaatttggagccacacttctggaggctctcaaggttctgtctggcccagggcaaaatcttgtgctcaccggggggtatgagctacttggcccactgctggcccatagagcacatctgcccgcaagagtcacgatcgtccatcttgcaccctacgagggtgaggctgactatggcgcatggcagggcatcatcaaagcaatcgaggaagctaacccccatggcataggtcagaacggtgcactgagagcctgcagccgtgaactttatgtccagtgtcacggctgcattggcgttctggacaaacgtctccaacaggtcatcgcgtacaccgccgcctgcaaccagagcatcagcgcagagatgatccgcgccgtcaggcctgtacaggctgaatggtcaacgatcgccaaggacatcgcgcttggcagggctgcccttgcccaggttcctgatgtaatcacgcccggagtaccgcgtcccggctcggcgggcggaaacgccagcgccgaaatgcccatcgatagcgcaaagagtggctccagctccgcactccaaaagcgaccccggaagagccgtccattccaaagaaagcctgcacgagtcccaggaggctga

SEQ ID NO: 512866 - DNA, 1293 bp, Stenotrophomonas maltophilia
atgagcaccttcttgctaccagtccaacccctatcacttggaactgcagagactgagtcgctatggtcattctactctcgagtggcgatgcttcacggatatggcggctcgcaactccttcgagcgctgcgcggggccttcgagccaaacaccgctgcggatggcgagtccaggctctacacgggtaatgggctcaatggctcaggcctatgggtcaggcgcgtttctgacctcctgcaaagaggacttggcagaagcgatctcagcagactcacgttgtttgcgctcccgacctacctccccaggtcgggcgaaagcctccgttctgggacaaagaacatcgcgcgtctacgcacctggtgcgagatgtgtttcttgcaagacgctagccaccagattgatgcgcatgaccgcctaatctggagtattagctacattcagagatgtccgtttcatcggatacggcttcgctccatttgcccatcctgctgccagcctcagaagtaccacaacatgaaactcggcctcgatcattgctactcatgcggtgcgtctctggttggcagcagtaacctgattcagccggacttgcttccccactacggagagcaagagtgtgttgaactagtttcagccattgcctccggagaaatctcaagcatcgcgcccgatgtcgtccctcggttctatcgcacgttggatgcgatgtgcgctcctctacaccgacttgataggcgcaagattaaggagaggatagcgtcccggggtgcgaaaaactcttccactctgaacaacttgattgagatttcagtacattaccaaatcccgatcgcacagctcgcgactgagccagagctcgcagcgaaggcgtccttcaggctcgttttggctcacccagatggcgaggcaccttttgaagggcggagctacaacgagatcatcgacgaagttcgctcgctgatggaaagggggcttgccgcacccaatgggatccgcatcccaactttcgcagatatctcaacgctatttcgtctgcgcagactctcatttcgactcgagttcccggaccttgctaagagatatctaggcaaagtgagacgacaagcgcatctattgctacggcgagagacggggatggcgctcatcgaacgtcttttcgctgaagggaaacttccatatctcactgacggagaggtacagagcatgctcgaggaggagcttgatctgagtcaagcatcagccaaggcgctgcgtagccactggaggcatagacgcactacccgaaccccttga

SEQ ID NO: 512867 - DNA, 984 bp, Stenotrophomonas maltophilia
gtgccgtacgttcccaaaagcatgtcgcggcgcgcaatctccgcgcttgcaaagatcggtgacataagtgaagtttccgatccttcaatcaattcattggatcaagaagagttcttcagcaggtggttcagctttctcacatttgagatacgtggaatgcgcgcgctcctggcctgcgcgcgcggcgggcaaaagctcgattggatagttgcaaggaacctggctgacagaacatcagggttgcatgatgttgtgatcgtttccgctgacagtatgctctcctcagagagactggccgtgagggccgccggcctctcctacatcgccatagatcaagagatcttcatcccagctctgggcgtcaatacgtcggcaagatcctccgtctccctgcctgacgccaaactatcgcccgccacacaggcagttcttatccatgcgctcaacactggcaagtgtcgctatgagatatacgggttgctaagtcagcttgcgattccgttaaaacagctaggacgggttagccatgaactggcctttgccggatttggggcagttgatcgtattggagcaaagtcgtatgtcgaaatggatgagtgcagtattacttgggcgaaagcagagccaatgttgtctagcccagttatagatattcttcggattcggccacgagcaattacagggcttggtcagatgcgcgtgttagatgaagatgctctcctatggaaggcacacgtccgacatcatcctccgtaccgcttggcagtccaccagcgtcttttgaaatcactaagaaggtacttggcacctagtgatgccgagtctttcgcagaaattgagatctgggatcgctgtccggcaagactgagcccagactcgattcaggtcgaccctatttcgctttacctctgtcggcgtagtcatgccacgctcgctgagcttggccggctgcagaagaccatcattgacaaatgggtgagctag

SEQ ID NO: 512868 - DNA, 372 bp, Stenotrophomonas maltophilia
atgcatgaggtatccaattgccgggcagagaacctcgaactagtagcccttgcggtttacagaagcatcgcagaggcttgggcgctgactgatgaggagcagtgccagatcctcgctgtgccagctttgcctatgaccgatggccaggaaggatcagtggatcaaaatgtcctacttcgcatcggcatcatcatttcaatctaccgatacctgcataccattttctcggatcgtgcgcaggccgatgcatggatccgccgtgcgaacatcaatcctctctttgggggggagccagcaattaggctgctttgtggcggaagccttgcgcagctcatggcgatacgtgatcaccttgaagcacagtttggttga

SEQ ID NO: 512869 - DNA, 144 bp, Stenotrophomonas maltophilia
atggacaggctgctctatgttgtagatatcggtgtagtgaacctggacaacgagatcagcgagagcgcttcggacctgatctcgaaaaacgtcggatgggtggtcatagatgagcaaatctatgcttcttccaactgcgattga

SEQ ID NO: 512870 - DNA, 528 bp, Stenotrophomonas maltophilia
atgaagtgcgtcccaaggtccggagcggggaggcgtagccatgtgtactccgtcgttggcgaagcctttgctcaaatgactcgcttcgtgcccacggaacaaatcctgcgtgacgccgcagcgctgcgcgaaacactagccgcccggtggtttagcgcggcccaagccagtgccgcgctggagccggagtttggaagggacggccaacgcgcaagcgaattgcggcgtcaggggaagttgctgggcgtttatgtcacgcataccctctgctaccgctacccaacctggcagttccttcccgatgggcggcccgccgaacacttacccgagatcctaacagtgttacgcaactccggctccttccagtgtgagccgaatggtctgcgtcgcagcactggttggggcgaggctgaatggttcttgtcaccgcatgcgcttctctccggcgcggcgccggccgcgatgctgagcatagactcagccctcgttttatatgccacccagtgcgaatttgaagaaattctttga

SEQ ID NO: 512871 - DNA, 375 bp, Stenotrophomonas maltophilia
atggccgcacatgggcagcgcgatgaagcatgggcaatgcgtattgatctcctgcattcggcaacccgtgtctcccgcgcattgctgggtgtcctgctgccactgcgctgcctggtctgcggcgatccgggccatgatgatctcgatctgtgccgcgcctgcctcgccggactgccctgggccggtcgcgcctgcctgcggtgtgcactgccgttgccggatgagggcctgatcgtctgcggcagctgccgcgaggaagcaccaccgcagacggccacccacgccagcctgctgtacctgcctatgcacgaccgcaattcttgtcgccgaaaagtcgcaatgattgacgtggctctgtctcgcctgcagctgtag

SEQ ID NO: 512872 - DNA, 138 bp, Stenotrophomonas maltophilia
atgcgcgaccacggcaaccggttgcaccagctgcctgccacctcgtcgctggcgcggggcgtgtccgccgggtccgggaaacaggtctccacctggaaacccagctgcaggtccgccaacagtcgcagcaactgctga

SEQ ID NO: 512873 - DNA, 813 bp, Stenotrophomonas maltophilia
atgcctctccacgtggtgacgcgcggtgcgaagtttggggtttgcaacatctgtggcaacactggcccactgactgaagatcacactccgcccaaaggctgtgtgaatccaactgctgttgagcttcaacacgtcacgcatctgcttgatgcggggaaggcgatcaagacaaaagctcaggatggggtgaagtaccgtacgctgtgtggccggtgcaacaacgccctgctcggcggccgatatgatccggtgcttatcgacttcaccaagcgagtcagtgggttgcttgcatccgacttggcgctgccctcggtcatggcggtgcctacaaagcctgccctactgattcgcgcggtttgggggcacttggcggcagtcggagttgatcgctatcgaaaggggccgctcacggagcaatggcgggatttcttcttggacgaaactctgcctttgcctgccggggtcaatgtccactactggatttatccctatcgtcggcaggcgctcatccgcgacgcaggttccgtggatctcactaggggcggagacatttccacctactggctgatgaagttttaccccttggcatttgccgtatggaagtcaaaggggggatgggcgctgccttatcgggatcttgcgggatggcgcgtgcgcgacccggatgagctgattgatgtgatggttgacctggctcccgtgagtcatgagctgacgttagaagcacctactgacacgcaactcatcatgtttggccaagactccgttgttgcgactagccggaagcctcgcgggcgcattctgaaaatatga

SEQ ID NO: 512874 - DNA, 573 bp, Stenotrophomonas maltophilia
gtggctagcgacaagagtttttggcgcgcaattctcgaaggcgtagtcgttgcggccattgttggcgcatgcacatgggcgctcaagttcgtgcccgtgatcggccagtggttgagcaaaggtgtgaccgttcctgtctgggcgatttcaggcattgcgctagccctgccgttgctgttcgtcttggcactcaactccttccgtgcgagtaaggaggttgccgccatccagcaggtgtcgcctcaagctccgtccccgtggcgacctgaagggctgacacttctagtgctgagggcgcttcgggcagttgatgctggcgaactcagccccgaacaaacccgcaagtttctccaggtggcgggcttcggaatccacccgttgtcagatgtgaccctggccctgcaggagctagcggaggcggactatgcttatttcaactacagggctcattcaggattggtctacaagttgctcggtgacggaatccgctttgcgcagcgcgaagatattccaaccatgccttatgcagagcttcgtagactccgggccgaaatggaccgtctgcgggactga

SEQ ID NO: 512875 - DNA, 450 bp, Stenotrophomonas maltophilia
atgccgatcgaacgtatcgtcatcgaaaacttcaagtcgtttcggcatctggacctgccgctcaacgcccacatgaacctggtggtgggcgacaacgaggtcggcaagtccaccctgctggaggccatccacgcggtggtcaccgggcagttgcatgggcgcaatcttgcctacgagctaacgcctcacctgtttcaccagcccacagtgcgggagtacttggcgacgcttgctgcagggacgccggcatcgccgccgcggatctccctcgaagcctatctgggcggcgacgccgcactggcctcgttgcgcggcaccaacaactcgctgcgccaagacaccgccggcatccggttgctggttgagctcaaggcggtcagcgtcgaactcacgcacgcgagacaagccgagctgtgcgagcagggccagctggggcgatgcggccaataa

SEQ ID NO: 512876 - DNA, 960 bp, Stenotrophomonas maltophilia; identical to SEQ ID NO: 283713

SEQ ID NO: 512877 - DNA, 567 bp, Stenotrophomonas maltophilia
atgctggttggctatgcgcgcgtctcgacgcaggatcagaacctggagctacagcgggaggccttgacccaggccgggtgccaaaagctctttgaggacaaattaagcggcacgagagccgagcgccccggcttggccaaggcgcttgaaatgctacgcaagggagacacgctggtcgtctggaagctggatcgcctgggccgcagcgtcaagcaattggtcgatctggtcagcgagttgcacaagcagagcatccagttcaagagtctcaccgacgccatcgacaccggcacgccgtcgggacggttcttctttcacgtcatggccagcctcgccgaaatggagcgcgagctgacggtggagcggacccgagcaggattggcggtcgcccggctgtcaggccgcaagggagggcgcaaaccgaagatgaccaaaagcaagattgaatcggccaagaagctgctcgccagcgggatcgctcccaaggacgtggccaagaacctcggggtctcaatcccgacgttgtatcgctgggtgccggcttccggtcacgctgaacaaaaatga

SEQ ID NO: 512878 - DNA, 2970 bp, Stenotrophomonas maltophilia; identical to SEQ ID NO: 283715

SEQ ID NO: 512879 - DNA, 282 bp, Stenotrophomonas maltophilia
atgaaagatatttctacatttcccgcacttgccgcgacagccaccagtctggtcctgcccgaacagctggcccaacaggctgccgatgcggtccgcgagctgatggccgaagccgcggccgagaacaccactcgcagctacaccagctccctgcgctactgggccggctggcacgcggcgcgctatggcattgagttggccttgccggtacccgaagccatcgtgctccagttcgtagtcgatcacgtacagcgcggctcgaccgacggcgaattggcctag

SEQ ID NO: 512880 - DNA, 1953 bp, Stenotrophomonas maltophilia
gtgaaacgtaagcctatagcaatcaagaagaaggacggggcgaggattctattgaccgagcttctgccgtacgaactgcctatatttttttctaactatcggctatacgaactggtttccgaccctcccgaccacattcccagtttactaaagggattgctaggcttgggcgttgcgccgaagttcaccatacctttcaactttaaaattgagcgtggcgatggacgaaagcggactctctcaatcatgcatcccgccagccagctcaaatttattgatttctatgcgacttgggatcactacatcatcaaccagtgctctaaaagtgagtatagccttcggcgccccatacaggtcggctccgtatatttcgaatctagtctcgcagaagacgggcctgcgctaggcgatgaggccggcgaccttgcaccaagttcatcgaaagagcagcggacacacgcttcgtcatacttttactacgcctcgtacaatcagatttggaaattttacgactctacagaattcaggcgacttgagcagaattatcgcaggctgctgcgacttgatgtctccaagtgtttccagagtatttatacccattctatatcttgggcggtacgtgacaagacatttgcaaaaaagcacaaggacgcggaatcgttcgacaagtcattcgatttgttaatgcagggctcgaactggaacgagactaacggaatattggtgggccctgaggtatcgcgccttttcgctgaagttatcctccagcaagtcgatgacgacatttcggtccacctggcgggcgccggcctcagccactcgcaattgcggataaggcgttacgtagatgattacctggtgttcttcaactcagaagaagcctgttccgccgctcgctctgcaattgaaggggcgctagaaaagtacaagctatccatcaatgacgctaagacagagatcctcgagtcacctctaattagcgacctttcgattgcgagagatgcggttagaggcttgcttcgagagcggatatccagtcagttcaaatggagcgatgcgaagctagaagaggctcaggcagtagtgcggccacccaatgagcgctccgcagaccacctaatacgcgcactgaaggccgccataaagacaaacaaggcaacgtattcgacgatatcgccgtacgccctcggactcatatctagagtactgtctcgagcgaacaggagcctcacgaaggatgccgtcgccatccagaacccgcatcatatgtaccagaagctatcttatgttctggagatggcgttcttcttgtacagaatggatgtacgagtaaatactacgtatagggtcacctcgatactactaacaatttccgaaattgcggataagtttggcagcactggcaaaataatcagacaggaaattgtcgaccatggcgtatccgtcttgaagcaggccagtcgagctttgatcggggagtgcgaaacatcctctctccttgcttgcttgttctacatcggcggggaagcagcagttgcagagtctgatgtcatcgatgctctccggctcagtgaagcatccgaagctagctacttcaaggttgtgactgcactgttttgcgcacagaagaagccaggttacgccgcgctccgcaaagccgcctgtgaagccgccgagcgaattttcgaacatcggaaggtagatatacatcttgatgctgaagctacacttctattcctcgacattgtgtcgtgcccattcgcaagagatagcactaaagagttggcgcttggcatattcacgaagagccttggacacaaagccatggctgtaggtgaaatgaacttcttcaagaagtttgctgccagccacctcagtttttgcgactggcgttcgacaaacgagctaccggcactccttaagcgaaaagagttgaagccggcgtacgattga

SEQ ID NO: 512881 - DNA, 1323 bp, Stenotrophomonas maltophilia
atgatttctcaggagttgacggttggggcgctcaaccggatgagacggcgcggggcacagttcaaatacaaaacagatgagggagcattccctaagagtcaagctgagtggacgactctcctaacgtcaatacagaaccaaattctagatgggacctttaggttcaggcccttcagcacacgctctctatcgaagggaaagaaactcttctctacgaatagccttgagaacatcatggttatgcggaagattaacgataacattcgccgtgcatatagggtcaaacaggcaaatcgcttcgatatcatcaagcagatacagcaggctcttaaggagacgactccaaagcatgtcatcaggcttgacatcagatcattctatgagtctgttccccgtcgcaggctggtggagaagattcgagctgaccgcctcgtatcgacgcgcacgttggaacttctcagcagacttctccgcttgaccagtcactcgggttctcgcggcctaccccggggccttcaggtaagcgcgaccctcgcggaaatccacgcgtcacatctggagcgagaccttcgtgccattgagggcatctactacgtcgcaagatatgttgatgatatagtccttttttcctatgtagatttgtcaaatcttaaagataaaattcatagcgcctttacgctaaatggccttctggtgaatgcatctaaaaccaaggatgcgagcgtgcaatgccggtgcgctacgggatgcatgcatatcaatgggaattgtgcctgctcgtcgtcgtgcaagtgcagcttagttctcacggatgccaatatccagcagctcgatattcttggctacaagctagccttccccgacgtcaacgaaaggaagaaggataggtttaaccctgtcggagcctacatggctgacaaaaaaatggcaaagtacaaatcaagaattcactcggcaactcgtgattatttgaagacgagcgactttgagctacttcgcgacagggttttgtttcttaccggaaactacaagctggagtcgtcaaagtctggtggctccctgcgcggaggcatcttctacaacttcgatttgtacagcccgctaaccgaggccgcactgatgcgggacagtcgactggagcacctggacagattcctatctagatgccttctccgggtttttacgatttgcgcaccaccaaatagaactgagcgccgccaacttctgtcactctcatttgtcaatgggcacaagcataggcgcatgcggcaacttccgcctaagcgaatctctgagattggaaggtgctggcgtgaaacgtaa

SEQ ID NO: 512882 - DNA, 1824 bp, Stenotrophomonas maltophilia
atgcggcaggaatggttcgaaatgcaggccgaacggcgccggccctacgccatgcagacgtggattccgctgcgcgccttcgagggcacccgggaaggcgacatcgcccagctcggctaccacgaggacgtgtcatgcgcggtctcggtcgcggtgccggccgcgcaccgcacggcggtcgaggacgtcgagtggggggattcggggctgagcaacacccaaggcgcctatgtcttcgaggacggccgatacaaaactgccgaagccttcgagatcgaggacggggtcgacgtcggcatccacttggtcttggcgcagtacaaccccatcggcggccaagtgtggcacttgaaccaggacctggtgctagcgctggcgctgatcgaggagaaccacagctggatccgacccgacgagaactacgccgtcgttgccaagcgtacctttcactccgacggctcgatcgagggcattcatatccgcaccgacgtgctgcgcgactacctgtgcgctcgcggcatggcgctgcgtctgctgacctaccgcgaacgcaccacctacgaagccatggccgaccacatcgactggcccggcggctggatcgaggtccccctcgccgacggacgcttcgaaggtagcgtcacccgggtgctgccagggggcgatccggaaggcgccaccgtcgccgttcaccacgtgtggcgcactgacgtggatgtcgaggccgatgtccccgtcatgggcccggagaccgacgaaggcaccgactacacccatcgtcgcttcacccgcaccggccccgtgatccaccgtatcagcggccagagctggcgccgcgaatggatcgaaccggcgacacgcagtccgcgcgtgcgcggcgaccacgagccctcagcaaccaccttcatcgtcaatgccgcaggcgaccgccagaacgccgatgagctcaacgacgaggacatcgggctgtggctgtggttcgagcccacgatcgtgagcgacctgctggcgctgcgcggcggcaagctcgagtggtacacgcacgacaccggaggtctgcaaggcgagcccggctatagcagcatccatttcggtatcaacgaagccggactaatcaacgtgtacgcgcgggacgtggctcggctgtccgaatggcaccggcgcatatgggccggacgcaatctctacccgaatggccggctcagtgccgaattgggccaggcgcatgtcgagggacgggtggcagacaccacagcgccggaagcacgtaccatcgaggcgctgatcgcgatcgatgcggcggcgcaagccatttggggtttccccgtcttccgcccccacaacatccaggatcgactcttggcgagcgtgcaccgctttcgcgcgacaaaccgagactcgctgctagagctggccaaagatgtggcgcgactgacggccgatcgcgtggatgcggttgcgctgcaggccttcgcgccggtcacccaggaattgggaggcaccggatcgctgaagtccctcgaacgcgcgcttgctaagcatgagggcgcggcacaggcacgagccctcatggggccgttggcgggcatctacgatctccgtgtcggtgcggcccacctgcccggatcgcaaattggcgacgcgtttgggctcgtgggcatcgatccggcggcgaagccctatgatcaggcggtgcaacttctcaccacgctggcgaagacgctcgaagcgatcgccgtgtcaatccgcgcgagcgcgcgggccgccgtcgcgtccagtgctttgacatcgacccctgcgtcgtcacaacgacgcgtgacctga

SEQ ID NO: 512883 - DNA, 1362 bp, Stenotrophomonas maltophilia
atggcttcgctgcagcaacgattggccgacctgctgttggccccgcgcgaggatctcgattgcgagatcaagaactggctcgacctcgcgaactcggtcgatgccaaggccacgttcgccaaggcggtgctagcgctcgccaaccacggcgacggctttgtggtcttcgggctggcgcagaccacgaccggtttcaccgaagcgccggatcgtccagtcacactggatgggtacgaccaagacctgatcaacggcatcgttgcgaactactgcgatcccgcgctgcactgtagcgtgcacttcgtcaccgccccggacggtgccgtgcatccaatcgtgacggttccgggaggccaccgcatgccggtgcgggccaagcgggccagccccgacaacaagacggtgcagaacaacgcgatctacatgcgccggccgggaccgcgcagcgagatgccacagacgtcccaggactgggacgcgctgctggcacggtgccagaacaatcgccgcgatgagctgttcgatcagatccgtggcttgatcactggcgccgtgccgcaggcgccgccggcacccgtgcccggccgcttgggcgagtggatggagcgctgccatgcccgctggacgcaactcgtcgactcggtgcccgccggcaccgggccgcgcatgccatacggtcgctacagcatcggctacgagatcatcggcgaccgcaagccagtcacgctcgcccaactgccggatgtgttgcgcaccagcgtagtccgccataccgggtggcccccgttctggctacccacccggccagggattacgccgtacgcgatggacggtgccatcgaatgctggatcggcggcgacacggagaatccgcccgagcagcgcgacgccgcgcacgccgacttttggcgcatcgacccctccggcctggcgtatctcatccgtgggtaccaggaagatgatcttggcgatcgacaaggccgcacgacctatacgccagccgccgccttcgacttggtcattcccgtgtggcgcatcggcgaggccatgcttcatgccgaacggctggccgccaacctgtttaacggaccgacgacgatcaagttcagcgtgacctacgaaggcttggcgggccggaagctcgtgacgctggacggacgccgcgtgctctttgaaggccggaccgctcaccaggaccaaatcacgctgaccacgcacgtcgatgcgcagtccatcgagtcgaacctgcccgagatcgtgcagccattactggaaccgctctacgccctgttcgacttcttcgtgctgccggccaacttggtggccgaagagctggcacgcatgcgctcgggacgcagctga

SEQ ID NO: 512884 - DNA, 414 bp, Stenotrophomonas maltophilia
atgcgtaccgcattccgtaaaccaccgttggcgatattgggcggtgccgatcctggcagcgacgcgttcgagcgcgcagctggtggccaggtgcccagcgtcatcccggaaggcagcatgccgccggccgactggccggccacggtggtggtgccctgtggcatgggggatgcgcgcaacctgatcatggcccttgccggtgatgcctgcatcgtcagcggtgggcgcgcctgcacgatctcggaggtttggctgcacaagcggccgctgctgccgcttgcaggggcaggtggcgggtccgacgcgctgccggacaccccgccggacgagcgcggcaattcgccgatcctgccgtggcgcaacagtgatgagctggccgggcaactgcgtgtcctgggaatgctgcaacactga

SEQ ID NO: 512885 - DNA, 756 bp, Stenotrophomonas maltophilia
atgcggcggagttcgacgcgaagttctgaggtttcgcgtaatgcggttcatggagacggcacctgcgagggtgccgttttcgtttgcgcgcacggagagtcgtttccgcgactgcggaggggtgtcactttctttgctcgtgcaaagaaagtaaccaaagaaacacgccgccagggcgcgagccgatgctacgcatcggtaccctgcgctcctcggcccgtcgagggacggtgcgggaactcgctgcgctcagacacccgcacctcttcgccctcgccggacctgcggtgctcggctcgctcaaggcggaccggaaggtcaagatcaacggcaacagcatccacacgtggcgtggatttactgggtgcagctgtggcatttgaccttgggtccgccttgagcgagccgagcatcgcaggggaatcaggggcgaagaggcgccggtgtctgagcgcagcgagttcggcgccgtcccctgattcgccgagaagcacagggaaccgtcgcgcagcgacggctcgcgccccggcggcgtgtttctttggttactttctttgcacgagcaaagaaagtaacacctccccgcaggcgcggaaacgatccgccgggcacgatccggcatcagcaatgcatcgcgcaaacaaaaacgcccggcgcgaagccaggcgttcctgcactaccgtggagcggtggcttacgccgccgtcgacgcccgcagcgcggcgatgcgctcttccagcggcgggtggctcatga

SEQ ID NO: 512886 - DNA, 243 bp, Stenotrophomonas maltophilia
atggatgccgcggccaagcccccatgggtgagggcgctttgcttgcgaagcactgcttcgcaagcgcccgaacgcccagccgccagcgactgggccggaccgcggagcggggtttacggcgtctcccgcaaccggacccaccccgccatcccagatagcccgctgtcgctgttgctgttgcttcggccgttgccgttgcctccgcgggtgcagggcgcagccctgcagcccccccttccctga

SEQ ID NO: 512887 - DNA, 1335 bp, Stenotrophomonas maltophilia
atgcccaggaaggaccgtgcgctcgaactgaagatcgagaatctgctggtggaccccaagctcacggagctctgtgaggtactgcgcactggcgatgacattctcgatctgattgaccttcccgagaacggccactcacgcattctcgcgtggatgtttgatccccgcgaaggccatggacaaggcgaccagatcctcagggatctgttgctcgccgcctggcagatggcacaggcagagcattgcggcttgcgaaagaacggaaagaccgcagcattctttggcaaatggtccccatcgaatcttcgcacgaccagctttggctctgcattcacgctccgcgaagtgatcgtcaattcaaaggacaggattgatctggcggtgtttgttcctgaccagaattttgtagtcctgatcgagaacaaggcgggaagctcgcatacggggaaccagctggagcggtactacaatggctggatcgaggtcacgaagaagaatccgaagctacggagattcgatcccgtattccttgcgcttgatcgaaatttcgatcctgatgaaagccagattcaccccatgagccaccaatggctgcacctggggtacgaatggctgcgcaattctgcagatcgcgcggatgtcgatctggagcgcgggaacgccgccgcccgcctcgttgtcaattactgcaaccgccagaccgacctttggaagagtgccactgttcgcagagcggaggcgctcgcgggggatctcaacaaccagcacggcgaagcgctccaccgcctcctgggtgccaaggggaacatgcacagccgttggatgacggaaagaagagatacgttggccctgcgattcatgctgcagaatcgcgatgctgtagcgatgctcaggcagatgcgcggaactgcacttctgcagcagcgaatcctcgacaggaacatcgcgacgctgcagtccaagcacttctactcctcgcgacagaagctactggtatccatacccgactgggagaagtacacgcacagtgtcaccgatgaaacggggagctacgactacgaggctgtctatctgagaatacgtgcggtcgatgatgagaagctgaagtaccggatcagcttgatgtgggaaggccgtcatgcgccttcgccatcgctagccctggaggcacgaaagcgccttcagcgattccacaagaaattcggaacctataggactgcgaactatcgccacgttctcctggaggacaatctcagtatcgagaagaccgccgagaaagtggaatcacttctcaatgaactcggcccgattggctcggcagaagtcgctccctga

SEQ ID NO: 512888 - DNA, 213 bp, Stenotrophomonas maltophilia
atgaagatggtcatggcggtgatcaagccgttcaagctcgacgacgtgcgcgaagcgctggccgagcgtggggttaccgggatcacggtgacggaagtgaagggctttggtcgccagaagggccataccgacacccactgcccggacaggcggcagcggcttcgcacgggccgtgttcaggcgctatcctccacgccggaagacaggagatag

SEQ ID NO: 512889 - DNA, 3606 bp, Stenotrophomonas maltophilia
atgacgatctctgctatcgatatcaagctgcgccagtcgcagcgactcaccgacaaccccgacggtggtggccggatggtgcaagccgagatcatcgacggcgccatgaacaatcttttccccgatattggcgatgaagaacgcacaacggggcgaacgactctgcgcaagctgttcgtgcatctggatacggctgcgccggacgtgctgaaggatgcgatcggcgtgctgatcgacccgccgagcgaccctcgtgtgaccgtgagcatgttcgcgaccgggtcgtacagcgatgttcggctggatgccaagaaccgcgtcgagagctacatcacgcgcggcaccgagtccaggttcatcctgatgggcaaccatttcagcggtcagatgacgatgctggtttataccacgtcagatgcgcccagccccgacatcaatgacaacttcagcctgttgaccctcgccggctccgggcatgatgaggcggagcagtacgtacgcgtgaagaccgttctctccaggaccactcgcaccttcacggacgatcaaggcgcattcgagcgcgatgttctcgtgatcgagttgatcaacccgctgctgcgaaacttcttcggacaggaggtcgtgcgctacagcgcgacaaagccggccacccgcgtgtatgagacaaatgtggttgacgcgacgagctaccacagcgtcaagcgcctctctgcggctgccaagcctggcgacctctctgtggtggtcgacacgccgtacgttccgattgtccccacctccacggccgagacgccggtgagcgacgttctggctggtatgggtgccatcagtcacgtgcagtcaggcccggtcgggagcttgagccaaacgttctcagcgagcttcaacgcaggtgtgccagtcaaccgttacctgggtacaggaatggccgttggcagcgtcaaggtcatggctgggagcgtcgagctggtcgatgacggcggcggtagcctggtatctgcggctgtgactccctggggtggcagcgttgactaccaatccggcgtgatatcgatctcgcatgcgacgggcgttggattgaccagcttgagcatctccgcgacccctgcaggctctatctccgttcagggatacaccgacgagattacggtgacccaaaacaaccagggaatggtctggttgctgcagctgacccctcttcctgcaccggggacggttaccgtcgactatcgggctctagggcgctgggtgaggctgagcgacaacgggaaggggcagctggttggcaagccgggtcagggcggtggcacgatcaactacatgaccggctcggtcgtcctgacggccggggctttgccggacctgaagagcagcatcatcggtgcgtggggcacggcggttgtggcagagcctcggacgggcgatgccgctattttgccgcccgcgttgcacttcacgttggggcaggggaccgcgatcccgggcagtgttcacatgctgctccgcgtcggcggggctgacatcgaggtgaccgataacggcgtgggtggtctgcttgtcgggggacagctacgcggctcaatcgcgtatgccacaggtgaggtaacgctgcggccggcgaccctgccggacgctgatagccaggtcgcggtcacatatgactggggccagcagctcaatgcggcgccacagccggtgccggacggctccggaatcgtctcctttgtgctgccgcaagggcctgtgcggccgggctcggttctccttgactgggtgatcagcgtgcgccgcgatcgcgacgacatctcgtcagcgccgcagccaatgcgcgcgatcgccagggacgatggcaatggaaacctgcgggccgtctcggtgggtgatgccagtgccgacacggtgttgggctcggtgaactatgcgaccggggcggtaagcctgcaggctggaaagttcatggtccgccaggtgtcctacccgcagtacgagcttcagtccgggcggctgaaggtggtggggtacggccgcttggatgtgctcgctgagttttctgcaggcaccatcatctcggtcgcttggctgctgtcgggcgactcctcgcagcaagcgcaggagagcttgccgctgccctcgatgcagctgcagctgacgcccaccatcagcgatagcgtcgttcctggtagcgtgcgcttcaccttccgtgggcggacatacgtggaccgcagcggcggtctgtaccacagcatcgaccctgccactggtgcgggtgtttacgccggcacgatcgactacacgtccggagtggtgagtctgtcgcagtgggtgccgggcggaagcaaccaagtccagatcctctccctgctgacccgcatcgctgacccgggcgttgcgttcatcttcttccgcgcgccgggctcccctctgcgaccgggtatgttcacgttgagggccagccgcctcgacggtgagctgctgactgcgacggctgatatcaatggtgatatcgccacctcccagatgcggggcacggtcgattgggagagcggtgtcgtcaaggtgcagttcggcgagctcgtgcccgtcgccggcaatgaggggatgccctggtttgaccccgcattggtggaaggggaccgcgtctggcggccggctctggtcctgcctggctcgatctacatgggagccgtggtctatcggtcaatccccctgtctgaggttgtgatcggcctctcatctgttcgccttcccagcgacggccgtgttccagcgttcaagcccgggcagacggtcctgattcaccacacggcgaagcacagcgttgcggcgcctcaggcaaatcaggtgctgaattttggccggacgcgtatcgcagggctggaagtcagggacgcaggcggaaagcccgtggatagtgcctggtacaccgctgaccttgatgcagggagcttgaccttcagcgatccactcaacctttccgcatacacgctgcctatcgtggtgagcgagcgtgtcgaggaccgtcgcttggtggtccaaccgcagatcacaggagagattgaaatcaacacgggcctcacccacgactacccagctggcgaatccctcatcagcaccgccttgcggcttggcgaggcaaatgggtcgttggacctccaggcgcgcgtcgagagcctgttcgatcaagctgcgtggactggagcctggagcaacattccgattggcagtccggcgcctggcacctacaacgacacggactttcctctcgaagtgaccaacagcgacgccatcacggagcgatgggctgtccggttcactagttcgacaaactttgaagtcatgggggagacggtgggcgtgatcgccactgggagtaccacaacggatcttgcgcccatcaaccctcgcaccaacaaggcgtacttcagtatgcgggctgctggctggggtggtggttggtcggtaaacaatgtcgtgcgcttcaacaccgtgggcggcctggcgcccgtatggatggcccggaccacgctacctggtacgccggccggcgcgaccgactccacacggctgatggtcgtgggcaacgccgctggaggtgcccagtga

SEQ ID NO: 512890 - DNA, 216 bp, Stenotrophomonas maltophilia
atgatcggcgaagtcctccagtttcaggatctgcaggagctctgccggcctggcgaacgaccgcgcttgtcgacggttgaagcgtgggcgcgcaaggagggaattcgctacaggtacgacggcaagggcggtatctggaccactgctgctgcaatgaacgcagcgctcggcctgcagcaggcttccaacgacatctatgggacggacctgatctga

SEQ ID NO: 512891 - DNA, 843 bp, Stenotrophomonas maltophilia
atgtatagcgtgctgttttcaaccgctgaatggccggccggtggctctcagatttctatgtcgcgtctattcgagcacaccgaagattcggtagaagccgcctttacagatgctaacggtaatcctgatttggagaagctgaaaagcatcccggcgctgttcgctcaagaaatttatggtggggtccttccaccggctcgagtcggaaacattcactctgcacgattagtagggagggaaattcacatcgaatatagcttcgatgcgacgatcccacctattcctggagacactttgaggcgctccggtgcgcagattggactcaacgtttttactaggtctcattgggccgtcaaggatttcgacctttataagttcatcgttcgaaaccagcggcaatcccgcaggctgcctaccgcattcgatgtgtcgtcaccagaggccgttgaccccaacttggtgtcggtcatgatgccgttcacagcggctttggagccaacgtatcgtaagattcgagaggtggccgaggggctcgggcttgaatgtagaagggctgacaacatatgggatcacgcgacagtcattcaggatgttgttaatctcatcgatcaggccgcgatcgtgatatgcgattgcactggtaaaaatgcgaacgttttttacgaagcaggtatcgcacatgcgttcgggcgtgaggtggtgttgatcactcagaacgcagacgacgttccttttgatcttcgccaccatagattcttgccatatctcggcaatgccgaggggttggaacgtttggctggcgaccttgcgcctcggcttcaggctctgcgcgctcgggtgtga

SEQ ID NO: 512892 - DNA, 186 bp, Stenotrophomonas maltophilia
atgaattctgtccgtcaggtaataaagaccaagaagcgtgataaacaccatctgccagaacacgaattgatagatgaaaacaaaagtaagccgcatgcctctctgcagcccaacgaaatcgacctgagtcagaagcccatgaatcatgggcctaaacaaaagggctacaaaaagaaaaagacttaa

SEQ ID NO: 512893 - DNA, 930 bp, Stenotrophomonas maltophilia
atgagccatgggtcgggcgcacagcacacacagccttgggaccttaaggcgattcttcttgagatcattggccaagacttctacaacagggcgccgcgcgagggcgccaattccatcgtgcggatcaagcacgggaaggtcttctctcacgcaggggaagagttcgttgggcttcttctgattcatgcagacgcgcgttcgattgaagcaagctatgcagaccttcaaacgggaggggcacgttccatcccgatgcaggatggggagggcgttcgcaccgaagcgcacgtcgtcatccggctgtcgcacaccatgtacggcaccactcaatgctatccagttgctttggaggagtctcccggactctcgccgtcagttctgctatctcgtcttcaacgacccgtgcacaaggcggggcaacggtcgaagaagaactcagctggtgagatcgtcagctggtaccctgtgatcgaattggatggtttgttttccaagtctcttctcgatgagatcgaaagcggcaatctaaattcctttgacttggtgcgccagagcgtcgagtcgggcggaatggacgaacccggggaattggtgcgtcagcagcaagtgctacgtgtaggtgtgcgcccaggtccggaagaaggtctggtgactcgatccttggccgcgatccgcaagatggctttcgacgaggactatgagcagattcggattcactacaaggaggcggggagctcgaagtcaaagactgctgtcatcgacgtggacgagaacgcgcctgacccagctgaatcactcgaccaacttgtgtcgcgatcagcagtagtttccttggtcacgccgatgaactgggatcacgaagaagtcgtagatgatttcctcgaacttatggctgagcgtcttctcttggagctgacagaggaagcatga

SEQ ID NO: 512894 - DNA, 1053 bp, Stenotrophomonas maltophilia
atgacatctaatttgtctaatgcgatgaagctccaacaacagctggataaggagcgtcggcttgtctcgacagacagctatgacttgagtgtgggtcagctgcttagtatgtttgaggctggtgagatagaggttccgcctgagtaccagcggcagtttgtctgggatgaagttcgggagtcgcagcttatcgagtcggtattgctggggattccaattcctagtctatttatggccaccaatgctgactccacctgggagattgttgatggcgtgcagaggcttggtacaatcgcgcatttttcagggcgcccggatctactcaggaaggtgatcaagaacgagcctctaaaaattacagggcttgataagctgtctgctcttaacgggcaggctatcgaggacctcccgaagcccctgcagttgatgttcaatactcgtccgatgagggttactgtcttaaatgacaagagtgatcagggtgttagatttgatcttttcgagaggctgaatacgggcggaatttcgctgaccaatcaagagatcagaaattgtgtttttcgaggtccatttaatgaggatcttaagcgcctgagctctcatgctagcttcctaagctccgtaaaaattaaatctggggatcagagaaatgggactcttgaggagtttgtccttcgattcttcgctttctttgatagttatgttgaatttgatcatagcgtaaaagatttccttaatgagtacatgaagtctcgtgcctctggccgattgggctcggtcgaggagcgattgtttaaagatacgtttgatgttatttctcagtaccttcctcatggcatagttagggggcagcgtgttactcctgtgaatctatttgagggtgttgcggttggcgttgctctggccatcaagtctgggcgaccagtgcatccggcccgattggctggtttgcttggtgattccaatttgcggaaattcaccaccggggcaacaaattcaaaaaaggcagtcgtcggtcgcatcgagtatgttcgtgatgctctggtgaggtga

SEQ ID NO: 512895 - DNA, 684 bp, Stenotrophomonas maltophilia
atgttcaccgctcatcgaaatgacgtaacgaagcgaattaccgaagttcgcctgcttcttgatctcgttcgcaacatggaggcgccccctccggcggtggattccctagaggttagagttcttcgaggacttttttttgttcacctgtactcggcgctggagtttacaatcaacggcgcggtcgagcgtttcctggcgggcgtgggagatctccgagtcaaagcgcagcatttcgagccggtattcttgtctgtcgcgttggactctactttctcctcattgagaatggtgtccgaggagaaaaggtggcctaagaggcgggaggtttggtctagggctgcttctgaagagatttgtccggttaattctggaatatttgggttgtatctccagaatgtatgggtggagcggattgatgcgctgtcgaattgtctgaatattggtgagcccatgattcccaacgccgcttatcgagcctatgtagatgagctggttgaccgtaggaatggcgtcgcgcatggccgatttagtgccgctggagtgggaggtggtcggcggtcgcctgaccttcaaattaggtttaacgcaatctcagagacttgtcttaatatattggatgttctggaagacggtctcgatggtcgctgtgtcgtgcaagagcagtttagggggctctatccctga

SEQ ID NO: 512896 - DNA, 183 bp, Stenotrophomonas maltophilia
atgaagatcatccaccggctcggcatcgcgttcctttggatgcttccactgaactttcttctgctgacgactgccaagctgatgtcaggaaacgcgcttgggaacgaagaactcgtgggcttcggcgtcgccctctttggtctgatggcgggagggattctctatcgccgccgccctcggtag

SEQ ID NO: 512897 - DNA, 651 bp, Stenotrophomonas maltophilia
atgcgcgccatctgcctcattcttgcaaccagcgccctgctgggctgcaatcaaagtccacctagcgctgcgccgcgcgtcgagccttctgagcccgcgcgacctgagccgtccaaatccgtcttggggctagaactgggtcaggatgccaaccttccagagtgcgtaaaagagagaacatacggctcaatctactacgcgaccttcagcacaaatatctgctggaaagatcagtgggccagcggcagcaagtcggtgaagcccagagagatgccaaaggaaggaaagctagaagctatgttcccacgcgaaagcgttcccaagggaataaacacccttgccaacattgtcgtgatcggcggaaaaattgaacaagttgatctggacacgtccaacacggctgatcaagcggaaatatcgacattgcttaccagcaaatggggagcgccaaaccgcactaatgtgagcgagctccagaacggctttggagcgcggttctctagcctccaagagcagtggaacttttctgacttcagcatcgttcatatcggcgtggtcactcacgagggagggttgataagcttccagtcacgagttgcattcgacgcagaacagaagcgccagagggaacaaagcgctcagggcttctaa

SEQ ID NO: 512898 - DNA, 273 bp, Stenotrophomonas maltophilia
atggatttctccgaagacttggatgccttcgccgccgagcagaaaaaacgtatcgaggaaatgttgcgtctgacagaagagaacgctagatcggttctagtggagctgcttggggaaggcgtgaacacgatcactgcgattcgcctgaacgctgacaccggcaagttctatgacgtgcaagctcccacagggatcgtcgaagcgctcaggagtgctgggctccttcaggaagaggacggagacgattcggccagcaaggagaggaaactctaa

SEQ ID NO: 512899 - DNA, 2136 bp, Stenotrophomonas maltophilia
gtgagcaaggagctaacggcattcgcattggttgcggaagagtatgagaagacgggggatccccttcgaggtctctatcctcttttcgcgccattgctttcagaaagcaagggaggtcccttcgatcccgagaagttttccgcttcatttacgagtgcctatgggcttgagatgagcccatttgtagcgagtgcgctcgcggaaagaatgaacgatcttggcttgctcgacagagagttcgacaggaatgtcggtgcaagctacaaagtggccaactttcagtgggaagctgagcctattgctgaagctcaggttgaaaacacgatcaacctttttgctgagtgggccgaagttcagtgtcaggcatatgagaaagaaattgagcgaagcgcattagaagacgccatacttgcaaggctagcaaggccggagtttgcctctgtgttcgccattcagtccggagaaaaaaataatcggctcagaaagatgatgggggttgccgcggtcgacgtcaatgcaaaggatgaggcgttcctagattatctagtcgctcgttttattcttcacgtcgaagaaaattcgccagcggtatttgatgccatatctcttatttcctatggatctctgatagccgacgcggttgctggtcttgccgttacaaggcagagcggcccgagcgggaggaatcttcgcctagtattagacgctccattgctgatggatcttcttgatctcaattctccggcgcacaagcaatacgccatggggcttattgaaattgccagggatgcgggattgttgctggcaactttcgatcattgcatggaggaggtcaaatttactattcaggcgacattagacgcgaccgcccgtggcgagggctacgggccaatggcaaaccgaatcagaacggagccggggaagcgacttagtgctacattggtgcgggatcgcctcaaaactcgagttgctgatctaggcataacagttcttagggctgaaatgtataaggaggcccgatactcaaaatttttcccggaagaaagggttgatcaggttagaaatgccatcggcgatcttcatgagcatctggaggccaggattagagacgcggcaagcgtggcaactgttgcgcggctgaaacaagataggggggatgctgatgagctatttgaggcgggaaccatctttgtaactagaaattcggttctggcaaagcgagttaataggcatctctccaaggggcgctccagcccctcacctacatttgtgatcgctacagatggtcagattgcagggatgctatggtttgtccgcgggatgaagggcgtggagctctcgcggaggcggcttattgcaaactgttctgctgcgattcttccaaaaagagagcttgttgcaagaatctcatcaatccttgacgggatacagccggagctgcgacaggaatttgaggtgctgatgtctgattcaagagccagtctttgcgtgatgaggctcaccgcaggcgatgtcgattctgttaatggcgaaagttctctcgagttgatcgaacatatgcgggctgagatatcggctccggctgttgagcgagccgaggcagcggagattcgagctggcgttgctgaaaggcgtgtaattgactcgcagattgagctaaataacatgagcgaatcagctaagtttgatcttggcgagctcaagcgcattcatgaggagcaggtcgccgaaaatgatcgccttcagatgacgtctgcgctcgaggtcgctcagctccggcatgatcttgaagtagcccgcaactctgaggagaaacgagtaagtgagtcgaatagagcggccagtagacttgctgaaaggatagctgttctggaggatggcctgaaaataaagagattgcgcgttattaaatttgtcaaattcattgctattattatggcgatttcaattcctgtgcttgcgtttgttttcgatactgaattaattgtccagattatttcctgtattgctgcagttctttctgtaggtgcagtggctcgctgggctgagagtttccttgagaaaattgcaggggctatgtttaaggcagacgaaaggctgatcgcagagctgcgatcgacagaggtccctgtctga

SEQ ID NO: 512900 - DNA, 234 bp, Stenotrophomonas maltophilia
gtgccgctggccatcggcggattccagaacggcccgccaccggccctgcacggggtgcaggtcgatgcagcggctgcgcacctgcacctgtgcgccccgctgcgcggcatccagggcgttgagcagtaccagccgcgcgtcatcgacctgcgcatcggcgtagctgaaggcctgccgcagcgccggggagagccactggccgagcggatcgtgctgcagttccagtgcgcgtga

SEQ ID NO: 512901 - DNA, 1206 bp, Stenotrophomonas maltophilia
atgttgaccgataccaagctgcgcaacctcaagccgaaggacaagctgtacaaggccgtcgatcgtgacggcctctatgtggccgtcacgccggctggtgccatctcttttcgctacaactacgcgatcaatggccggcaggagacgatgaccttcggccgctacggagttggcggcatcaccttggcagaagcgcgcgagcggcttaatgaggccaagaagatgatcgcggcgggcaagtcgccggcaaaggagaaggcacgcgacaaggcgcgtaccaaggatgccgagacgttcggggcatgggccgagaagtggttgcgcggctaccagatggccgattccacccgcgacatgcgccgctccgtctatgagcgcgacctcaagaccaagttcggcaactggaagctgactgagatcacccacgaggacttgcgggcattgaccgatgccatcgtcggccgcggtgcgccggcgacggctgtgcatgttcgggagatcgtattgcaggtctatcgctgggctatcgagcgtggtcagaaggtcgagaacccagccgagctggtgcgcccgacttccatcgccaaattcgagccgcgcgaccgtgcgttgacgcctgatgaaatcggcttgatgtaccagtacatggagcgtattggcacgacgccaaccattcgggcggcggtcaaattgctgcttctgacaatggtgcgcaagagcgagctgaccgatgcgacctgggacgaaatcaatttcagcgaggcgctttggacgatcccgaaagagcggatgaagcgacgcaacccccatctggtgtttctttcccggcaggcgctggatatcttcatcgcgctgaaaatctttgccggtggctcgaactatgtgtttccggggcgctacgatgccgacgtgcagatgagcagtgccacgctcaatcgcgtgctgacgctgacctatcggctggcgcgaaaagaggggaggcctcttgcaaacttcgggccgcatgatttgcggcgcacggccagcacgctacttcacgaagccggctacaacaccgattggatcgagaagtgcctcgcccacgagcaacggggtgtcagggcggtttacaacaaggctgaatatcgcgagcaacgcacggccatgttgcaagactgggcggacatgatcgacgagtggacactcaagtcacgtttgccggcgtga

SEQ ID NO: 512902 - DNA, 996 bp, Stenotrophomonas maltophilia
atgaggaatccttcaatcccgatctgggaaggctgctatccagccatttcggaagccatagggcgattccaaggtcgttggcgggcatcttcaacggacaagcacagcgtccgattgttgaaggaactgattgatcccgttgtgaccgcctatgcagccaccgttcccttgcgctatttgggccatgtaccgggtgtcgggccagacgtgaagccactcagcgagatcgcacgactgatcgggttcaacgcaatggctcggctgcaacggcagctactgcgcgctttcacgctcacgaacaaccggtggtctgcgcgcgaaaagcagtttgtcgcaacgctcgaaacattgattgagttggtcagcgcctgtgcccgcaagcgaccaacaaagtcgaagattcgcgacacgaatttgaagagtgggcgcactcgggggttttgccgattttgcggggcaatggccgaactgactctattcggcaatggaagcgaggcaccaaaggcaaatgacccggaagacgtactgagactaagcaacctgtactgtcctgaacaccggccaagattgccaaccggcgaatggaatcccgcatatcgaagagctaaacggtcactggcgcagttcgatcaggaactagctagacttggcctgcaatccacaaaaatgcaagcaggccaagcgcagtcaggcgacgcgcttatcgacagctacgtctttcactatgtccgcaagtatggctttcagcctgcggacgaggccgaactgcgccatcatgcgcgatggatggtggacaacaaagtgacggatcggaagaagcaaatggtgattctgcaccggtacggcatgagtcagtcagacatagcgcgaaagctgagcatcaagcgccaagctgtgttcaaggcgcttgcgtcgatcccggaggacgcccgccaactacccatgctccccggtttcccatctcattttctttcgtcaaccaaatcgtacaattag

SEQ ID NO: 512903 - DNA, 225 bp, Stenotrophomonas maltophilia
atgctggcaacaacgaacaggacgctcatcaaccgcaagaaactgttggcgatgatcccgctggcagagcgcacgatttacaacatggagcagcgcggagagtttccccgtcgcatcgtgctcaccagcagaaacgtcgcatgggatctggcggaggttgaagcatgggttgatgcccgcaggttgtcgggtgtccaagccatacgccctggagtcgggcactga

SEQ ID NO: 512904 - DNA, 906 bp, Stenotrophomonas maltophilia
atgcggctcgcatcaggccgctgccagcaaggcgatttcttcatagcggacatctttggtgcctcgccgaaagatgatattgccagcatggagtatccgttgttcgcgttgaaggctggcgacaagcgcgtgcgtacctacgagcgcaatggcaacaccgtgactgtgatgcccgggtcttgtggctgcgccaccatccacgacaaagacctgtggatttactgcatcagccagttgatggaagccaggaaccggggccgcgtcatcgcgccgaccgtgcgctttaccgcctatgacttcctgatcgcaacgggacgtggtgccagcggtcgggcttacgaacgcatggaagacatgctgcgccgcctgaaaggcacggtggtcgaaaccaacatcgagacgaatgggcagcgtgaacgacgtggctttggcttgatcgacagttggcgggtggtcgagaagtctcccgtcgatgatcgaatggtagccgtcgaggtggatttgccacgctggctcttccgttcggtggatgctgggaaagtgttaacgctatcggatgactattggggtctgcgcaaggcgttggatcgccgcatctacgagttggcccgcaagcattgcggttcgcaatcgcgttggcgcgtctcgatgacggttctgcaccaaaagagcggcagcatggcgtcgctgcgtcgattccgctttgacgtgaaagcgttggcggagagtggtgggttgccagactacctgatggccttcgatgtggaacgggacgtggtggcaatctatgccatcggccccaagggccggagggcggaggcatgcgacattcagaccggacggccacatgccacgctgacggctcacaagagggttgtcgcgaggaagcccaagaggcagctctga

SEQ ID NO: 512905 - DNA, 402 bp, Stenotrophomonas maltophilia
atgccaaagctgccccagcgcccccccaaagagccggccgccctgcctcccaaggtgcggggtgggcggccgcgtgggcggcgcatagaggtgtgggtgacaccagaggaagaagcgaccattgccgacctggctgcacaggccggcttgtccaactcgggctacctgcgagcggtaggccttaaccagccggtgcggtcagtggttgacctgaaagcggtggccgacctcgggcacgtcaacggcgaccttggccgggtggcgggcctgctgaaactctggctggccgagaaacgcgggcagggcggacgtccggtggaggtcgaaagcctcatgatcgagttccgcgccctgcaaacccgcgtcctggacgtcatggggcgcgtggtgcgtggtgattga

SEQ ID NO: 512906 - DNA, 279 bp, Stenotrophomonas maltophilia
atgagcaccaaaccaaaaagttacatgaccgaagaagaccgcacgcggcggcgagctggcggcatgtcggagaacgcaatcctgatggcggaatcccgtgcagccgaccacgcgggcgacgaggaggccgcgtgggcatggctggcgctggcagaactaccagcgcactcactcgccttcctgaaagaccagcaaggggcggctttcatccgggagcatggctttaacaccgccgatgccgacgccgcctacgggcgcgattggttggatcggatttga

SEQ ID NO: 512907 - DNA, 588 bp, Stenotrophomonas maltophilia
atggggcagcgcatcgggtacgcccgagtctcgacagatgaccagaaccttgatttgcagttcgatgcgctgcacaaggctggcatcggcgacgactgcctctactctgacacagcgagcggcaaggatgctgagcgcaaggaactagcagcgtgcctcaaggcgctgcgcgagggagacacccttgtcgtgtggcggctggatcgccttggccgcagcctgcctgacctcgtgcgcatcgttggagagctggaacagaagggcgtcagcttcgagagcctgacggagaagatcgagacgagcagcgcggcaggcaagctggttttccacgtctttgcagcgctcgccgagttcgagcgcaacctgatccgggagcgcacccgcgctggccttgccgcagcccgagccagaggtcgcgccggcgggaggaagccaaagctcaccgaggcccagatcaaagagatcaacgagatggtggacgcgcagaagctccccatcggtcgaatcgccgagctgtacggtgtctcgcgaaccacaatttacaaggtagctcctattgggcggcccgagccgaagcggcagaactga

SEQ ID NO: 512908 - DNA, 3255 bp, Stenotrophomonas maltophilia
atggacaccaataccaagaagggctacgacctcatcaatcgccgccgcaagcagtgggtcaacgaggaagaagtacgccacgcatggatgaaggggcttgaagaggccttgcagatcgacttggacgcggagagagccaagcgcgactccagctacaacaacgtcgtcatcgaattcaaaggccccggcctcttcaagggaagtgagacaagtccgaagttcatcgaggcgaccgatggtcgtctcttgaaatacatcccccgcttggctgctgagcaagggctggatgagaaggcctacatcggtattgccatcgacggcgatcatgtgggctttgcgcaagtccaagatggcaagatcgttcaccagccactgatgccgttctcgaccattgccttccagatggtggtcgatgcgctgagagcaaatttccggcgagccatcacatcagagaacctagccgaggactttgggcatctatccgagacaggccgcgagttcatgcaggaactgtccaatgctcttgctgacgctcttgggcagcccggcaaccgcaaaatcaagatgctcttcgaggaatgggcaaccttgtatgggcaggctgctgacctcagcattcaacagcgcaagaagatcaatgggtcgttgggatttgacttctcaggcccggccgccattgacttgcccgccaagcttttcgttacccacacctttcattctctgctgatgaagctgatcgcggccgagatcgtggctgcacatggcatggcgtcaagcacttccctgatccatgagctactggctctcggatcggacgacgctctggttgaggccctacgctcggatgtcgagaacggcgggttcttcaacgcagtcggcttgcatggcttcgtcgaagaagccatctttagttggtatctggatgccacaaccaagaaggcgatccgcacgtcgatgtgcttggcgattcgcaccttgctggcccagctttcggtctatcgcttcgataccatcaagaaaaccggccgctcgcgcgatgttctgcgtgacttctatcaggacttggtgccggaggaattgcgcaagagccttggcgagttctacacgcctgactggttggtcgagcactctgtggccaagctcggctacaagcgagacaagtggcttgccgctcggctacttgacccgacatgcgggtctggctcgttcttgctggaggctattgagcagaagcgccgagcagcgctgacggcaggatggactgctgagcagacggtggacatgctgaccacgacggtctggggcttcgacctcaacccacttgctgtgcaatcctctcgtgtcaacttcctgatcgctatcgcagaccttttgcagcagtgcaaaggcaaggacgttgagattcccgtgctcctggcagatgcggtgtactccccggccccgcatccagacggcgaccaaaaggttattgaatacagcatcggcagccagcaggcgaatctacaagtcgttctccctgccgatctggcacgtgatcgtgtgctgctggacaaggtatttcaactcatgggtgaagaggtcgaaaacgacactgagtaccctcctgtcgcgaaggcgctagtgaaagctcgaattctgagcaaggcgcaggccgacgaatggcatgacaacctcaagacgacctacgaccaggtactcgccctgcaccggcagaactggaatggaatctggttcaggatcgtgcgcaacttcttctggtcagccacggccgggcagtttgacgccatcgttggcaatccgccttgggtgcgatggtcgaatctccctgaagcgtatcggaaccgagccaagccgacctgcgagaagtacgccatcttctcggacaccaagttccacgggggcaatgagctagacatctccgccatcatcacctacacgacagcggacaagtggctggtagaggatgggcggttggtgttcgtcatcacgcagacggttttccagtccccttcgtcgcaaggcttccggcgtttccgcatcaatgcgaccgaccgtttggtgccaatctccattgatgacatgaaagagctaaagccgttcccggacgcggccaacaagacggctgtcgccatgttcacgaagaaggtgcgggggacgacccgttatccgctggactaccgggtctggcttggcaaacctaagacggacgatgctggcaatccgaagaaagggcgcggcggtcaggttgcacgcttgaaggccatcgacccacgcttgaatcgtgccgaggtgaccgcccttgtggatgtgatccagatggaggccaatcccgtctctcagacgatggagggcgcaccctgggccatcatgaagccggggcacttcgcagcatgtcaaccgatgtttggagcttcgacttgggtcaacggtcgcaagggcatcacgaccgacctcaacggggtttatttcgtggacgtcatcgactcgaacccagcgacgcagacggtcaaggtgcgcacccggccgcatgagggcaagactgacttgggtcagccgcgcgagttctgggttgaagccgagagcttgtttccccttgcaaagggtgcaggcgacctgcatccctgctacttcctgccggagaacacgctatatgcgttcgtgcccaataagggcatcgaccgggcctcattggacactgcagcggcgtgctatagcagccacacgaatccgaagaccttcaagtttttcaaggcgtataagtctttcctggagtcccgttccaccttcaagacccgtatgaaggccgctcctttcttcgctatctacaacgtgggcgattacaccttcgcgccgtacaaggtcatttgggctgagatgacgggcgacttctcggcggccgtagtggcgtcaggctcggtaccaggctacgggccgcgtgtttatgttcctgaccacaagctctactttgccgacttcgaccaaccggagccagctttttacttgtgcggattgctgcactcagagatcgtcaaggagatgatcgaggcgcacaacgtggcaaccaatatgggcgacatattcaagcatgtgagcctgcctgagtatgacgccactttggccgagcataaggcgcttgctgagctagtgaagcgggcccatcaagagcatgactctaagaagcgtgccaatatcgtcgccaaggtcagggctgctgctgctgagatcattgaagctgaaatcgcacttcgccagtaa

SEQ ID NO: 512909 - DNA, 2655 bp, Stenotrophomonas maltophilia
atgagcgatcaatacacctacgcgagattttggcgctgcgctctacaggtgaatcctgtcggctacaacggcacctacaggggagccgaccacgggctggatgagggcggctacaaccaagccctgcttcaaaaatgccttgatctgggtatcaaggttgttggtttggccgaccacggcagcgtggccagcgtcgatgccttacgtcaggtgctacagccgcacgggatcgtggtgtttccgggtttcgagatcgcctcgaacgacaagacgcattacgtctgtctcttcccggaggacaccacggtgcagcagcttgatcgctaccttggcaacctcaagctgcatgacccagcggatggcattcggccttctcggctgagttcggaagaactgatcgaagaagtcgatttactgggtgggttcatctacgctgcacattgcacgcaggaaagcgggttgctgaaaaaccgcctgaatcacgtatggaaacatccaaagctgcgcgcggcccaaattccggggtcgatagacgacctcacgagcatcgagggcgacttctatcgcaaggtgttcttgaataaggacgacggctaccggcgtgagcgccctgtggcagcgatcaatgccaaggatgttgccaagcctgatgacttggatcagccgagcgcaacgtgcttcatcaagatgacacggcccactttcgctgcgttcaaggtggccttcctcgatccgggatcgcgtgtccggctcaactcgcagcaggcccaaagcccaattggtaaggtggtacgcatgacggtggccggtggctaccttgatggcgtccgggtggatttttcagaccatctcaacacggtgattggcggccgtggaacgggtaagtcaaccttgcttgaatgcctgcgcttcgccttggacttgccacccaaaggcaagcaggcgcagaagctccaccaagagatcatcaaggagaaccttggtcgctcggccggtcgggttgagctgacagtggtgtcctctgcccagaacggcaagcagtacaccatttcgcgccgtcatggcgagccgcctatggtgcgtgacatggatggcaacgtctcgaccctgctcccgcgcgacttgctgccaggcatcgacatttatgggcagaacgagatttacgagctggcccaagatgaaaccagtcgggtgcagttgctggatcgcttccttcctcaagacggagagtacgagtccaagagcgccgacgtgcataggcgcttgaaggagaaccagcagacgctcaccaagtccctgaccgatctcgacgagctgaatgcacaagttgagcgcttgcccaagctggaagagcagcttcgcggttttgatgagctggggatcaaggagaagctggccaagacctcattgctcgcgcgcgagcgagagattgccaagaccgcgaccgagggcgtacagagctttcgcgatgcgctgacagacctgcgtgacagcttgcctaaccttgacttcatcaacgatgaggcgcttgaaggtttgcctgacgccgcccagttgctcgctatgcgtacgacgctggatggactcaagcaggggttcactggccatctgaccgcgatgcaggccttgcttgatgacaaggcaggacagttctccacccagcatgacgcatggcagcatgcgattcaggcgcacgatgtcgagttggagaaggcgctgcgcacgttacccgccactgctggaaagagcgggcaggaggtcggtgttgcctatcagaagttgatgggggagatcgagcgcatcaagcccatgaagtcgcgggcgactacgcacgagtcccagcgcgacaccttgcgtcaggaacggcgcaacctgttggccgagctgtctgatttgcgtgcgcaacgcatacaggcgttgcagaaggccgcgaagaagctgaacagacgacttgagggcaagctcaaggtggagatcgtgccggaggctgaccgcacgcccttgatgaccttcctgctgggttgcaggctggacggtgttggtgaaaagcggcttgcgttcattgaggatgctgagacgatcagcccgctgtcgatggcccagtcgattcagaaagggtctgccgacgtgcaactcgattggggcgtcacgcagatggtggccgacgcactcaccaagctccagtcgtctcagctcatggagttggaggccttggagctggagcatcgcgtggacattttcttgaatgtcgcgcacggccaagccgatacggtattccggccgctcaacaagctctctacggggcagcagtgcactgcaatcctgcacatgctgctgcttgagaacgttgatccccttctcatggatcagccggaggacaaccttgacaatgccttcatcgcagatcggatcgtcgctgagttgagggaggcaaagaccagtcggcagttcttgttcgccacacacaacgcgaacattccggtgttcggtgatgccgagtggattggcgtgttcacggccgctgaaaaccaagggcgtctcggactggaagcgcaaggctcgattgacgttcccgtgattcgggatcaggtggccagcattctggaaggcgggcgcgacgccttcatccagcgcaaagagaagtacgagttctaa

SEQ ID NO: 512910 - DNA, 837 bp, Stenotrophomonas maltophilia
atgaccggtccaatcgtcgtctgcgtgattaacctcaagggtggagtcggaaaatctactatctccgccttgcttgcgcgtcgggccgcctcctcaaagcgaaaaaaggtggttgctattgacttggatcctcaggcgaatctaagtcaggcgttgatgggggcagggtatgcgaattttttgacgaatagagacccgtcaattgttgagctgtttaaggaattcatccctccctcgcgcggtcattctgctccaagctccacgggtggcgatctttcaaaggtgatcttcgagtttggcgggggttatctaaaaataatcccgtccagattcgatttttcagacaatttggtaagtgcggttcgtcctgatcctttggttcttgcgcgttatttggcgttgaatcactcggatgcggatctcgtgcttattgattgtgctccgactgaatccattcttacaaaatccgcatatcatgctagcggctatgttcttgttcctgtaaagcctgagtattttgccacgattgggtttccgcttcttcaggagtcattgacttcattccggagcgcaaatcgggggcaggtcatcgaggtggccggagttgtagtgaataacgggttctacgatggtggaaatggcggtgggccggaaaaggctagggcgatgaatgagattcgtacggaggctttgaggaatggttggcacgtttttgctaaccagattcctttctcgcgtggattccctaagataatgcgtggtgatgagtcctatagcgggaatgctagagaatttccaaggtttgctgatgaatttttcaataagattggcttatga

SEQ ID NO: 512911 - DNA, 702 bp, Stenotrophomonas maltophilia
atgttcgagacaaacacctacgacgatcctcttgttctagcaccgacagttcgtcagcgctgggaatttctcgaaacgagttccgctgctgccgtgctgcgctccgtctgcccaagtgaatggtcggacattgtgcatgttctggagaatttccagcttgatccagcgcgctggcttaagcgtggtggaaacaggggggatatcgcgaagatcatcgatgatatgtttgctgcgaggggctggcgagaaacgagggttgatctgcagacccagggcattctctacgcgaagaacggagatgaggttgggcggctccctgtggttgagcaggaaggttacttggtcgataacttcaaaggacgggttgccttggacgttgaatggaacgctaaggacggcaatcttgatcgcgatctttcggcctatcgtgcttggcacgaagctggggtgatctccgctgcggtacttatcacccaggatcggttggccctgaaggagctcgcgaatgaaatttgggggcagtatcaggggacgcttcctcaggccgatcggaactctaggttgccgatcgaccttgggacgtctacgacgaccaatttggagaaggctgcgttacgagttcgacgaggagtgatggggacttgtccacttcttgttatcgcagcaactcgagctacttggaatggccagccttacgcatag

SEQ ID NO: 512912 - DNA, 615 bp, Stenotrophomonas maltophilia
atgggccctgcccgccccgacgaggctcggcttccggcgaggagatcacagcgctcgcggccgcctttcaaggaggcgcctgcgaactccgaacgcagggcggatgcccttgcgtacgaagtaaagggggaggtgacggccaacggccggcgccggaggacattcgtacgcaagggcctccgtcctgcgccgcgcagaatgcatccgccacacgcatgtcttcgtcctgatccgccgcgaaccgatgggccctgcccgccccgacgaggctcggcttccggcgaggagatcacagcgctcgcggccgcctttcaaggaggcgcctgcgaactccgaacgcagggcggatgcccttgcgtacgaagtaaagggggaggtgacggccaacggccggcgccggaggacattcgtacgcaagggcatccgccctgcgccgcgcagattgaacccgccgcacgcgatgcaggaacggctcagcgcccgcgaccaccgtgccagtgctggtgccacgcctggaacatcagcacgttccacaggtgtgtgtgccacttgcgctcgccccgcaggaacgcctcccagacaccacgcacgcgcgccacatcgaagcagccctga

SEQ ID NO: 512913 - DNA, 459 bp, Stenotrophomonas maltophilia
atgtctgcattgactccgtgggaccccttccgggaactggatgaattgcaaaaccgcctggcgacgatgttgggacggacacctcagcgacagggcgcccgtaccggcaacgaagccatgaccacggcggactgggcgccaatggtggacatcagcgaggatgagaacgcattcatcctcaagctggatctgccggaggtccccaaggatgccgtgcgcgtcagcgcggaaaacggcgtgctcaccatcagcggcgagcgcaaactggaaaaagaggagcagggcaagaagttccaccgcatcgaacgtgcgtatggccgctttgtgcgcagctttgtcttgcctgacaacgttgatccgaccaaggtgacggcttcgatgaaagacggcgcgctggaagtgcggcttgtcaaggccgagcaagccaaaccgaaacagattgatatctcagtcaactaa

SEQ ID NO: 512914 - DNA, 915 bp, Stenotrophomonas maltophilia
atgaatatcaaacagccacaatacatcttctccgcacttgccctggcggtcgtcgtcggactgagcggaccggctctggcccaatcggcggcacgttctagtccaggtgctgcagcaccctctgccgcaaccaaagcggcgcagccacaggtagattacaaggtcgcccgggaagccgcgggaaagcgcgccaaactcgcccaagatgcaatcactgcgctggccaagacccatgaggcattgatcctccttgatgcaaggaagaccaaggaggcgctcgctgcgctggaactggccagcggaaagctggaactggtattggcgcgtgacccaaaacttgctttggcgcccgtcgatgcacgtgtcatcacccacgatatccacgccaacgtggaatcggtcaagaaagcggtcaagttgtctcgggagttgttggatgatggcgaggtgcaaaaggcacggcccattgttgccaatcttgccagcgaaatcgtgatcgaaaccgacaacctgccgatggcaacgtacccggcagcgatcaagtcggccgcacggctcatcgacagcggcaagattgacgatgccaaggcggtgctcgcccgagcgctgaacacgatggtgatgacctcggtcgcctttcctctgcccgtgctacgggccgaagccgcgatggcaaaagcggaaaagctggccgagaccggcaagcgcaatgccaaacagagcgaggagctcagcgccctgctggcctacgtgcgcacggaaatcgagctggcgcagatcctgggttatggcaagaaggcggacttcaagcccatcttcgatcaggtgaaggctatcgagcagaaatccgccggaggaaaaagcggcaaggggtggttcgacgagttgaagatgcgcatccaaaggctgtcttga

SEQ ID NO: 512915 - DNA, 888 bp, Stenotrophomonas maltophilia
atgaatgagcaaacatcgaatcccaatgcgacgaacgaaggaataaacgaacaggccgcggtaagcagccttcctgtcagtccagaggccaagcctgaagtcgtcacggaggtacagcctgaggttcagaaggaaatggactcgcaggcggcagacaaacgtaaacaagtcctcgatgaggccgtctcggccttggcgctgaccaaatcagcgctggccgcacttgacggcaaggacgctgcacgcgcattggcaacgctggccgaagtgacgggaaagctggagctgatcgttgcgcgcgaacccacgctcgccctggcccccgttgatgtgcgcaccatcgtgcacgacttgttcgccaacacggaaaccattgaggcgatgaccgacgaggcgctggatgccctcaaacatggcgaggtgcaacaggctcgccacgtgctggctttgctggccagtgaaatcgtgatcacggtcaccaacatccctttggcgtcctatcccgcagccgtgaaggcagtcgtgccgctgatcgatcagggcaagatcgaagaagccaaagccgcgctgcaggcagcgctcagcacgttggtcgagacgcgcagcgtgcatccgctgcccgccctgcgcgccaggctgctcctgaagcgcgccgagaccctggtagaagatggtcagcggagcgaagcgtccaatgagcgcctggagacattattgaacgaagcgcggcagcagttggaaatggcagaactgctgggctatggaaagaagaaggactttgagcccctgtatgctgaactcaagaaagtcaagcaaaagacggctgggggaggcggcggaaaaggctggctcgatgaaatcaaggcaaagctgtccaagttgttctga

SEQ ID NO: 512916 - DNA, 612 bp, Stenotrophomonas maltophilia
atgaacacagacaccatcgccaattccaatgcggatgaccccaccaaagcactgtgttcgctgagccagaattggtggctttttgcgctgcgcggtgtcttggcattgattttcgcagcccttgcgttctggatgccacaatcggctctgttggccatgaccttagtgttcggcgcattttccttggtcaatggcgctttcaacttggttgcagcggtgcgccatatccagaaaaaagagcgctggggctggctgctgttcagcggcattgtcggcatacttaccggcgtcgtcgtcctggttgctccttgggtcgccacgatggtcatggcttcttttttatgggctagcgtggggttctgggcgattttcaccggtgtgctggagatatccgccgccgttcggctgcgtcaagaaatcaagggtgaaatctggcttgccttaagtggactgctctcgattgtccttggcgctatcgtcttgtggatattttttacccgtccggtcgagtcattcctggccgcaggctggctgttgggcttctatgcggcagtctatggtgtcacgcttttgttcttgagttggcgtcttcgcaaaacgcgccagggataa

SEQ ID NO: 512917 - DNA, 810 bp, Stenotrophomonas maltophilia
atgtgccgtgttctgggtgtcgcccgcagtggtttctacgcctggtgctcacgcgagccatccacgcgccgccagcaacgggccgagctggatcagcgggtcgcgcaagcgtataacgcccgtaagggccgcagtggcgccccgcggctgtgccatgacctgtgggaagccgggctgcactgtaatcgcaagacggttgcagcctcgatgcagcgacaaggcttacgcgccaaggcggccaagaagttcaaggccacaaccaactcccgacactcgctcccggtggcagagaacttgctcaagcaagacttcacagcatcagcacccaatcagaaatgggtgggcgacatcacctacctgcacacggacgagggctggctgtatctcgccgtaatcattgatctgtactcgcgcatggtggtcggctgggccatgagcgaacgcatgacggctgacctggcctgcgatgctctgcacatggcgctgtggcggcgaaagcagccaaagggagtgatcgtacacagcgaccgcggcagtcagtactgctcaacggcttatcagggtctaatccgcgctcatcagctgcgatgcagtatgagcgcgaaaggcaactgctacgacaatgcgtgtgcggagagcttcttccacagcctgaaggtcgaatgcatccatggcgagcgcttcatgagccgcgcccagatgcgtgaaaccgtgtttgaatacatcgaaaccgactataaccgccagcggcgacatagcacgctggggcacatcagcccgcaagcctacgaggcccggatgagtgcttga

SEQ ID NO: 512918 - DNA, 300 bp, Stenotrophomonas maltophilia
atggcaagaaccgctaccccgatgaaacagaaccgtacccgtcactcccaagccttcaagaatgaagcgttggcgctggccgagcgaattggcgttagtaaagcggccgaacagcttggtcttcatgcgtctcagctctatggctggcgcagtaagcagcagcagaccctgagcagcagtgagcgcgaacagtcactggccgacgaaaacgcccgcctcaagcggctcctggccgagcaagccgaagaactggccatcgtaaaaaaggccgcggcgtactttgcgaagagcctcaagtga

SEQ ID NO: 512919 - DNA, 258 bp, Stenotrophomonas maltophilia; identical to SEQ ID NO: 272312

SEQ ID NO: 512920 - DNA, 228 bp, Stenotrophomonas maltophilia
atggccgccattgggggcgcagtcagaatcaaggtcgtcaggatcaatcccatgccgccctgctgcatcgcctggctggtcatgccgtcgctggaggcgccgtcgagcaggaacttgttgaccagggcggtggaccagaacgcggtcgagacacggatcaccatgtccagcgcgatcgataccatcgctgccagtaccgccatcgagaacatcgtgccgatgccgtag

SEQ ID NO: 512921 - DNA, 147 bp, Stenotrophomonas maltophilia
atgccgtcgctggaggcgccgtcgagcaggaacttgttgaccaaggcggtggaccagaacgcggtcgagacacggatcaccatgtccagcgcgatcgagaccatcgccgccagcaccgccatggagaacatggttccaatgccgtag

SEQ ID NO: 512922 - DNA, 441 bp, Stenotrophomonas maltophilia
atgaagaatgatcttcacctcgtctgtccgcattgccagtccatcaaccgcgtaccgactgcgaagctatcggaacatcccaactgcggccgctgccagcagcccttgttcacgggcgaacccatcgagttgaccacggcgacgttctcgcgccacgtggagcgcagcgacctgccactgttggtcgatttctgggcaccttggtgcgggccgtgcaagatgatggccccgcaattccagcaagcggcgcgccagctcgaacccagggtcaggctggccaaggtcaataccgaggcagaaccccacctggccgcgcagttcggcatccgcagcattccgacgctcgccctgttccagggtgggcgggagatcgggcgtcaggccggcgccttgggcgcgcaggacatcgtgcgctgggcatctgcacaggtggggcgttga

SEQ ID NO: 512923 - DNA, 177 bp, Stenotrophomonas maltophilia
atgccgccctgctgcatcgcctggctggtcatgccgtcgctggaggcgccttcgagtaggaacttgttgaccagggcggtggaccagaatgcggtcgagacacggatcaccatgtccagcgcgatcgataccatcgctgccagtaccgccatcgagaacatcgtgccgatgccgtag

SEQ ID NO: 512924 - DNA, 273 bp, Stenotrophomonas maltophilia; identical to SEQ ID NO: 498400

SEQ ID NO: 512925 - DNA, 1647 bp, Stenotrophomonas maltophilia; identical to SEQ ID NO: 505216

SEQ ID NO: 512926 - DNA, 567 bp, Stenotrophomonas maltophilia
atggacgacgagccaataggtgcaggggctgatcctgcttcacaggagaccgcagacagtgacaagttcttcattcgctctcctgaagagttcaccgccgccttcttggccggatggattgttgacgctcgcagtggtggcttggttcgcggccggcttcacgaagaggggcacgtccctatgcttcagcacgcaggccccttgggcactttcgaatacatgggtgtgatggaaggcggggagtacatcctcagcactgacgccaccgcagcgcattttgatcgcctcaatgagatcaacagcgacaagaccccctgtgacacaccgctgcctgcagcgcctccagggcgcgtgattgacgtatcggccgaaccccatgacaaggtgttgatgatcgaacggcagttcatcatcaaccgcaattccacccgtcgatacctagacgagctggtcgccctgaatgacccacacagttactaccgcggccagtttttcagcgatgacgtggtctcgtacctgaacgagcatcccgaactcggggacggaccgccggcaaatgggggctga

SEQ ID NO: 512927 - DNA, 474 bp, Stenotrophomonas maltophilia
atgaacgacgtcaataggggctgcacttgcccgagcggcggtggctcgctgcaccacccttgcccagcgcaccctgtcccaacggacctgctggctgacctaaacgaacgccttgaaaccgccaaggcgctcggctatgaggatgacatcccggtgggcatcggccttctgctttgcgtgcgtgcagccctcgccgcccgccagccggctcgcatctacggatgctgcgcccagccggagggtgagctgcacaccgccgaatgcccgaacatgcggcacgtcgccgcccgccggccggtgaatgggctctcatgggctgactattggatggagcgcggacaatgcgaagtcgcccacgacttcgaagcgttttgtcgcgctgaggcttgggcgctccagcgcttcccagacgctcgccagccggttggacaggtcacgggtgccgagatcgacggccaggcggtggacaaatga

SEQ ID NO: 512928 - DNA, 645 bp, Stenotrophomonas maltophilia
atgcgtgagcgtcccatcctgttcaacggtgccatggtgcgcgccatcctggccggccagaaaacgcagacacggcgcgcaatcaaggacatcccttggcgccctggctgcaatccagatttcagccaggcccgcgccttctccaatggcggcgagttccgcatcaccggcagtcaggaaatgaccaccggcttccggtgccccttaggccagcgcggcgaccggttgtgggtacgcgaaacgaccgtggacgtggaaaggcacggctacctcggccccgtccatctggaatccgaagaaggctacgccacgctgcagggcggattggcacctgggccggacgacgtgatcgatgtcgagccgcacgagatcacactgcggccgtccattcacatgccgcgttccatgtgccgcctgttccttgaaatcactgacgtgcgcgtggagcggctgcaggccatcagcccagccgatgcccttgccgagggctccatggagtgggccggcgagcaggacacccccattcgcgacctggacacaggggacgagcgcatcgccttcagcgcgctgtgggacagcaccggcggcgactggaacagcaacccctgggtgtgggtcatcaccttcatgaggatcgaagcatga

SEQ ID NO: 512929 - DNA, 792 bp, Stenotrophomonas maltophilia
atgcgcagaccgaacagccagcgaccaagacagggacgctgtagccccattctatcgacagtccttctcacgggactgattgcgctcacgggttgcgccccgcccgcgcagcagacggatacttgggcatcggcccagcgtgaattcctagcccgcccagagaatcagttccttcggaaggacgacctgaccttcagcaattgggaatgggccatgcagacctacaccgaccaagaagtcgcaagggggcacacgccgactgactgggagatgttgcagggaggtcgcgacctcttggcgcatgagctgggtattgtgcgcgcagctatccaatcctcgacagcggtgcaccgcgaggcggtggcacaggcagacccttcgcagcgctacgagacagcgtggtacgacgccgctgcccctcggcctcaatcagctccaacgcttggccacggtgagcttgcagcgcctgaagtgtcggattggtcacctccccctctgcccgctggaacgctgccagctactcaggttgcccaaccacccgcggatgtcttgtgggcaccggcaccggcgccggctgacgctccgccactccaggaacagccaacgcagtacgtcgatgctcgcggcaggcctgtagccaatccaatgcccgcaggcccgaacggatactggaacgagcaagggcagtaccgccagacgttcgatcgcggagacggcgtacagcagactttccgcaacagccgcaccccaatcgaggccttcaacgaagcgggcgcggccttcgatcgctga

SEQ ID NO: 512930 - DNA, 333 bp, Stenotrophomonas maltophilia
atggagcaccactccctttcccaggccgagcttggccggcgggccggtgtcgcgcagacaatgatttcgggcctggtcagtcgtcaggacggctcaaagaacccgcgctcggacaccatcgacaagctcgctgcgttcttcaaggtagcgccatggatgctgctgattccagacatcgacatggacatgctcactgatcaaggtttgaaggaactggtcgagagctatgctcgggtccccgctttgggacgggccacgatcctgagaattgctgaagcggaggttcgatatgcgcagaccgaacagccagcgaccaagacagggacgctgtag

SEQ ID NO: 512931 - DNA, 1083 bp, Stenotrophomonas maltophilia
atggctgcccgcactccattgatcctcaaccagagcaccgctcgcgtcgaagagctggccgctgccgatacgatccccggcgcgatgatcgaagggctgatcggtcgaaatgcgctgatcaacggcgatttccgcgtgtggcagcgcggtacgaattttccagccgcgacaggccagcgatacacggctgacagatggcaggtcaacgccattgggtcgacgatttggattcagcgagtcgacattcctccgggcggtggggctgtgcccatgctccagaagtcgaagtacatgctgcaagcgattgtaagcagcgttgcaggggctgggaacttcgcattgttccagcagcgtatcgagggcgtgaggcagctatcaggcaagaccgtaacggtcagtttcaaggccaaagccagcatcgccaatttcaaagtaggcgttgaatttcagcagtcgttcggcaacaccggctccgccggagttgatagtctgaacgcctccgtgacgctcggtactgactggcaggagtacgcagtacaaattgcattgccgtcggtggtagggaaaacgatcgtcgacaacgactaccttcaactcagcttctggctggacgcgggcgcgaatttcgcagggcgctccctcagcgccggccaaaaaagcgggactgttagcgttacagaagtgcaggttgaagacagtaatgttgcaactgcttttgagtataggcccgacgcgcacgagcggatgctttgcgatcggtactgccaactgctcgacttcggcaacggtaatggcttcacactggtcatgatcaacggcgtcaacagcgtgttggggtttcttccgctccagtcacctatgcgagctgtgccaactgcgaccagacgcggcgatttccctacttacacgggtcccggctcgggttcgggatccacgctcactggcctgaccatcatccccactggtgttgcccggctggcgcttgtcgggaccatcagcgtttctggcaccgtgaatcaagtcggatacctgggctcaacgagcaccaacggtttccagatacttctagatgcagagctgtga

SEQ ID NO: 512932 - DNA, 480 bp, Stenotrophomonas maltophilia
atgtaccgactgagccaatttcccggctacgttgatgagatcgcgaccggcacctgtattccggttgccagcgactgctggcaggccgtggcctatcgagcatggcttcagatgggcaacaagcccagccctgcgccatcaccctatgagcccaacacgccggctcatcaccgtgcaatccgcgatgcggcgtgggggtggatgaccgacgtggtcaaggagcgccagtacgacagcatcgagagctgcgtcggctactacaacagcggcgtggagcgataccggctggaggcccgggcaatggtggcctggcgcgacgcggtgaacgagaaactggttgctttggtactcgatccgccgccgggcgtcgtgacatgggagcaggttcgacctctgctgccccaaccgtcccagttcaactggccgtccagcttggagctcccgctcggagtaggtgacggccccgcagttcaactttga

SEQ ID NO: 512933 - DNA, 543 bp, Stenotrophomonas maltophilia
atgaacgcaatggagcgacaccaggaagagtggtacgccgccgtcggccggttttcaatcgcaatgggggaaatcgagtgggcgggcgcgcagatgcttacgtttctacgtgatctcgacgaaatcgtcgtcaggaagcaagacttcggcagcttgattgggacgctgaagcaggaagcccaagcccaggagggagcgttcgcgcgtggcgttgaggactgcatgccggaagcagaccgcctgagacagaagcgcaattccatcctgcactcggggatccgctggttggttgggtttgaggggattccagacggaagcgatgtcgaagtcggccctcaattcgacctcgaccagctgattcctcgcttcgagtcgttcgtgcacgacaggaaacacccggatgagcggatgcaacttcaggatcttcagcatcatgcggacagcgcgaaggctctcagtgagcggatgtggcgcattcttgtgacggagcactcgctgcggcaacagcggctcgaggccggcgcgtcgacggcagcaggttga

SEQ ID NO: 512934 - DNA, 2421 bp, Stenotrophomonas maltophilia
atgaagcgcaccgccaccgcatcccatcctctgacgccgcgcccgctgttccgcagcctggtgctggcgctggcgtcccttcccgccggcatcgcacttgccggcgatctcgacggccagactgcggaggtcggtgctggcgatccggtcgaagcgtggacgttgaagaacggctcgctgctgaccgtgaatgacggcgcaacccgcaatctgaccgctgaggactcgaccgtggtgctgtccaacactagtgtggatgcgacgacggcgggccccgctgtgcgcctctccggcgcctcggccctggcggctcgatcgacgcaattcaacggtagcatccatcttgtcgacaacagcaccgccttgatcgaagacagccagatctccgtggcggcgggagcgggcgtgcatcccggcattgccagcgtgggcatcgacctcgctcctgccggggcttccttcccacagaacgcgttcgcaacggtgcgcaacagcaccatccgtgcccaggatgcgcccggtacgagtgacatcaacagcggcttgggcgtacgtctgatggggggcacgatccatctggaaggctcccgcatcgacgccgacaacatggccgcactgctggcgccctcagcggccggccagcccccgatcgaacttcgtgttgaccactccgtgctccagtcccgtcgcggcgctgcaatccgcgtcgcaccgcgcgcgcgggatgccgagtaccagatcaccgtcgcgaacgggtcaaaacttgtcgcaggcgacgggaatctgctgctgatgagttcgtggaccggcaaccctgtcgccgccgacagtcgtgtcagctttacagtggacgacgcgcggctgatcggtgatgtcaggctcgatacggcaacggttaccaacggcacgatcaacgtaaccctgcgtaacaaggcacagatcgacggccgcttcctcagcgtcacctcggccagcatcgacggcgacagcacctggctgatgtccggcgacagcactgtcggtcatctcgcgctgggtagcaccggtacggtggcgctgggcaatggcagtacgttcaacacgctcaccgtggataccttcgacggggccggtggcaccctgctgttcaacacccagctgggcgacgacagttcggccaccgacaagctgatcatcaagggcgacgccaacggccaggccaacgtgcgcgtgctcaatgccggcggcgcaggcgccaagaccgacaagggcatcgagctgatccgtgtgggcggtgcgtccaatgcgcagttcgacctgcagggccgcgcggtgggtgggcagtacgagtacttcctgttcaaggacgcgaccaacggcggctggtacctgcgctcggaacttgccggggcgccggatccgtgtgtgatcgacccgacgctgccggagtgtaagccggtcgatccggtggacccggtggacccggtggatccggtcgatccggtcgatccgatcgaccccacgccggtgttgcgcccggaagccggcgcgtacctggccaaccaattcgcgatggaccagctgctgcgccatggctggcgcgaccgccagggcggcaacacctccgccattgatggcgtgcgtggctgggcccgcgtggacgctacacagagcaagctgtcggcggtggaagaccagctggacctgcgcgtggaccgctcgcgcctgcagctgggtgcggacatcggcgtgttcgacaacggccagggccgcgttggcctgatgggcacgctggccaggtccgatgccacctcgcgttcgcagctgaccggctacagcgcacgcggcaaggtcaacggcggcgcgctgggcgtgtacggcaactggagcaacgatgcactgtatgtggatgccagtgtgcagcgcggccagttccgcaaccgcgtgcagggcgaaggcctggccgaggaacgctacgactcggacatctggcagagctcgctggaagccggctaccgcttcggcatcggccagatcggcagcaccgcgctgagcctgcagccggaactgcagctggtctacaccgacgccaacaccgatcgccacgaggaagccaacggcacggtggtgcgcagcctgggcgacagcggtctgtccggccgcgtgggcctgcgcctgcagggcgaaggccgcagtgccgccggcgcgtcggtcagcccgtatgtggtggccaactggtaccgcgatggcgccagcaacggcatggcgttcgatgatgaagcgctgaaggccagcgtgccgcgcaaccgctacgagttgaatgccggtgcgcgcgtggacttccgttccgggctgagtgcgtggggtggcttcggcgtgatgcggggtgaccatgggtaccgcgaagcgacggccaatctgagcatgtcgtacaagtggtga

SEQ ID NO: 512935 - DNA, 3243 bp, Stenotrophomonas maltophilia
atgcatacacccaccccacgccaccatgcgctgccagctgccctagccattgcactgcttgccagcattcccgcctcggcccagcagatcgtggcggacggcgacgaccagatgcccgccgaaggcgattaccacaccactgagccggtgctgccgggcgacccgtcgggacatgccttctacgcaatcaacggcggccgcattcttccgacagggccggtcaatctctctaccgaaggacgcggagcgcacgctgcgcacgccgaaggtaccggcagcctgatctcgttgcagggcgcatcggtgagcaccactggcatctctgcagcaggcgcgtcagttgccgcaggcgcccgactggaggccgccgatgtagtgatcgagacacgcggcaacggcgctcacggggtacaggtgcagggcgcggatgccgtgctgagaaacgtgcaggtccgcagcaccggcggcgatgcgcttcggttgatgggaggcacgctgcaggttcagggcgctcagttgcaggtgaaccgctacggtacttacggtctgtatgcgaatgcgggcacagcaacgctggatggggtccacatcgacatggcgggtgacgcgggcaatggtgtcctggcgaccggcacggccgaggtcgtcctgcaggacgcgagcattggacgcgtgggctattcgggtgtggccgcaacggcgcatcgcggcacgcgcctggtgatgaagggtgtggacattgacatgcgcggtgacgccgccgtcggtctggcgatgggaggcagcgtaaacgtttccgacagccgcatcagcgtgcagggcgcccatggtcgcgccgtcgatcagtcaggtggtgcgctggacgtgcagagcagcgagctgtccggcaatacgggactgaggctgatggacaatggcagcgcgaacctgcgtgacagcagtgtccgcagcgagctggtcgcattggatatcaatggccgaggcaacgtcgtgacagtggaacgcagctcgcttgcaacgtctgcaggtactgccatctggatgccgaacgattccacgctggtgctgagtgagtcttcagtggtggcccagggagacggtgggctcggccttgatgcacgaggcggcagcgcgcagcttttcagtaccaacctgcgcacaggggggcgttctgcccatggtctgtatgcgcagggcggcgccgggcggccgcccgggatcgaggcggtcgattcccaggtgctgaccgagggtgatgggtctgctgcggcgattgcacgcaccggcgggaccgtcacgctggtcgacagccgcttgcagacccttggccgatcctcgcacggtgtcattgccggtggtgctgggcatatcgctttgaacaacacccatgtgcgcaccgaaggcgagggcgcgtgggcggcggtgatcaatgacaacgggcggatgcgcatcgacggcggctcgctggtgagcgtccagcatggtggtgtgtgggtgcgcagcagccgcgaccccggcctgaccctgtccaacggtgcggtggtatcgggcggcaatggcatcgccttggcactggatgccgcagtggccgggcgcttcgatgtggtgctggagggccgctcgcggatggacggtgacatcgccatcaccccggaggacgaggacgctgggctgccgccacagtcggacgtgcatgtacggctggccgatggttcgctctggcagggttcgtcggatctggtgcagacgatggcgatcgagaacggcagccagtggacgctgaccggtgatgccacggtgggcgagttgcaggtactcaacagtggcgtggccttgtccgacggcagcggccgtttcaatacgctcaccgtggacggcgacctgcacagcgcaggggcgacgttcctgttccagggcacgctggccggcgatgacagcgcgatggaccgcctgcacgtgcgcggcgacagctccggcgacgcgctgatcgcggtgaagaacatcggtggcgtaggcgcacctaccgtggatggcatcgcgctgatcgagatcgacggtgcatcgctggcgagttacacgctgagcggccgcgcggtgggcggatcgtacgagtacttcctgttccagggcggcctggccgatccttccgatggcaactggtatctgcgttcgcagtggttcgatatctgccaggacaacccggccgcaccggggtgcgtggtcgatccgggcccggatccggatccaaccgatccgactgatccgactgatccgactgatccgactgatccgactgatccgggcgatccgatcctgccgccaccggtgctgcgcccggaagcgggggcttacctggccaaccagtcggcggcgatcaacctgttcgcgcaccgcatgcacgagcgcaatggcgcacgttcgatggacggcgagcgccaggcctgggcacgcgtgggtcggcagcaggcggatttcagcgcggtcggcggccagctgtcgattgatggcaacacctcgatgttgcagatcggcactgacctgctgcagcgtggcaacgcggttgccggtgtgatgctgggaagcggccgcgccgacagcagcgtagtgtccgatctgaccggttacagcgccaagggccgggtacgtggcagcgccgtgggtgggtacggcacctggatgcaggaagcggacggcacgcggggcgcgtatgtggatgcagccctgcagtacggccgcttcgataaccgcgtgcagggcatcggcctggcgccggagcactacgactcgcgcatggccactgcgtcactggagtccggctacacattcaatgtgtggcaggacaccgccagcgcactgtatgtgcagccacaactgcagctgagccatgtcgatttccgcgccgatcgccacgtggagagcaacggtacggtggtcgaccatgccgacgccggtggccttagcgggcgcctgggcgtgcgtgtgttcggccatggcacggccgccggcaacaccgtgcagccgtacctgggcgtgaactggctgcgtggcagcggcaccagcacgttgcagttcaacggcggcacgctgggtgcggacgtgccgcgcaaccgctatgaagtgcaggccggtgccgagctgaggctgggccagcgttggggtgcgtggggtggcatgagcgtgcagcgcggcgatcatggctaccgcaacgtaggcggccagctgggcctgcgcatggcctggtaa

SEQ ID NO: 512936 - DNA, 1926 bp, Stenotrophomonas maltophilia; identical to SEQ ID NO: 510530

SEQ ID NO: 512937 - DNA, 717 bp, Stenotrophomonas maltophilia
atggcggctgcgttgcgcccattgccacagcagtggccgcagcggctggcgtggccgctcgccggccagggcctgcaggcgcgccggtgtcagcgcgtccagctgcaggcgctcaaaggcatcggccagccgctccaccagcgccgcagccggctcctgcaacagcacggcctgatcgtgctccagatccatcagcagcagaggctcgcctgcatcacccagcagtgcctggccctgtcgcagcggcagccgctcgcgcagcaggcgggtgatggcgtgcgcgccatctgccaggcggatcggcgcaggtgtctgcatgaccaggggctccggtgccaactgcatgcgacgcaacgcgcgaccgatggcaccgtcatcaagcacgtcctgatgcccgtcgccatcacgcagctggccgccgatgtcctcgatccagcactgcaggcgcggacgttgctgtcgcatgcgctgggcggcgttgcgcagcgccggggtatcgcggatgaccagcagatcacaatcgtccagatcctggctgcggcggacctggccatccggcagcgccgaggccaggcgcagccgttgcagcagggcctgctcgccctggatatcggttcccactaccagcacgcgtgccatccgtgttccccgtgcggccacctccccggtggcctcgcgtcgccaaggctagggcatcgccagcggcggccgtcgtga

SEQ ID NO: 512938 - DNA, 939 bp, Stenotrophomonas maltophilia
gtggggtggtgcagtgaccgtgtccccggccacggtgcgcctggcaggagatgccttcaccgtggggctgtctgggcttcctgcgcgggcctgcgtgccgttcgtctccgccatcgcggacgacgtgaacgtgcgggacgtgatcgtgggcaacaccagtgttctgctgagcaaccgagggagcttggacgtccccggcttgggattggcgtgcggggccgatggggccgtggtcgacgtcgtctattactcaggcctggtcgccgggtcgtcggtcgccgtggtgcccacgcttcccctgccctccacgcccgccgtccctggcccttcaacgccgacaccggctggccccgtatccaccgctcccagcgtgcccgatgcagtgccgggcgttcctgggagcgtgtcgccaagccctggggttgctccttccccggctcttccaccgcttcctgttgcgcccagcgttccggtgcctcagccgctcccaacgccggtccccaccccggctccgccggccttggtgccgtgccggcaatcggaaagctcggtggctcgggccagctgcccggcgggcacttggggcacggagacggtgcgcacgcgccaggtctgcgctcccggcgacgtggatccaaactcagacgccgcgtgggagcatcccgaggcgtgggttcaagcccagacggtggcggccgtgacggcgaggcattgccaggcctgccctggaagctcccaggaggaacgcgatcaatggctgcccacttctcaaccctgcccgtcgggccaagctgggacgcacacctgggagcgccagcaggtgcggtctcgagacgtgttcacccattgcccgtttggcaccaccgccctgcccagcccgacttacgggggctggtccaactgggtggatacaggtgtgaatcgcccagggttccgtag

SEQ ID NO: 512939 - DNA, 228 bp, Stenotrophomonas maltophilia; identical to SEQ ID NO: 505228

SEQ ID NO: 512940 - DNA, 588 bp, Stenotrophomonas maltophilia
atgcgtctcgttgtctgctgcttcaaggggggcgtggggcgcaccacgctttcgctcaacctcgccgccgcgtttgccggccaatcccgcgtgctcgtcaacgaccgcgaccctcaatgtggttcggtcgcttggtctgcgatgagcgacggggagaccccgtttaccgtgagccgtgcctcatccccaggcttcgacctggagattcaagacctgccgcccagcgccccagtgaaagaccagctgccggacgcggacctctatctagttcccacgttgctcgatggtggatcgtttgtggtctatttgcggacgattgaaaccctgcgacgtcagggcaagcccttcctgccggtcgccaatcgggtcaacgtgaagcgggcggagcaccgccgccggctggaagatcccagcctggcaggcgccatcgtcattcccgagcgggcggcgttggcgagctactacgagcttggcgagaccgtgttctccatgcgcggcgctggcgtggacaaggcgcgagaggacattctgcgggtaggtcaggctatccaaaaaagattggccaacccggcgcgggggcatgcatga

SEQ ID NO: 512941 - DNA, 555 bp, Stenotrophomonas maltophilia; identical to SEQ ID NO: 506647

SEQ ID NO: 512942 - DNA, 1152 bp, Stenotrophomonas maltophilia
atggccgtactggaccagatcaacacgaaattcggcagaggcactgtgggagtagacagcgcgggctggcgggttggtggagcaaggccgggggagaggctccatggtgcatggcaacgcccaatggcgagcaaaattgcattatttgtcaccaagctatacaaggaagtggagcagccttctgcaggcacgctgacaaagatctttgaaatagcaaacatcaaacactatacacaaccaaaaggatggcggttgaagatggaagaaagcaacatcgaatcaggaaagtacaaaccgcgcttcgatttcgataaagatcacaacaaagatcgttccgagactggaaccatcaatgagcttttgcaagagctcaattacgagatggcgcgcacagaaaatggcaaagaagccgaacactccaatgcctcaggaaaaacaataacccgcaaggaacttaatggagtcattgacttcatcaactccacattgggacaagagattcctaccgggaactgcacacttccaatctccaccctaaaaacaatcaagctcctttacctcaagaacgactccagcgacactcagttactccaaagaatctcgaaaccaggaaccatcaaggccactttcgagcactggacagaacgcaacaccccaagaaatgaaaagaccataaaagcagcctcctatctcatgtccacgcttgagcttgagatcgacgaggagatacttaagcacatccacatcaacagactcacaccatcgaaactccttgaatactacgccagacacataaaggagcttatagaacctatctacatggctttcgtcggcaatgatgaagccattgcaagcgcctttatgtttggcgcacatcaaatagaaagctatcaaccctcaaatgccttacccagcaaagaaggcgccccccgtacacgaaaggctatacatctatttgctgactctcccattcctgcacttcgttggagagtgtcagcaggttgtcgaatcagaaaacgacgagttgagcaaatacaagatagagccactcttcgctcacgccatctcctcaccgacggagtgcgatgccctattgcgacctgtcacatctctcgcagctattcactccttcctgcaaaccaatgcaaatga

SEQ ID NO: 512943 - DNA, 210 bp, Stenotrophomonas maltophilia
atgtcatttgccttcactggaggctctctccattgctcgctggcactcgaccagcgcgtcatggctgcaaagccgccttttgccatccttgtaggtccgaacttggcccgccttgaccagctggaagaagcgatgccggctgacgccgagctgggctgcggcgtcttccgggccgtatgcgagtttctggctgggttcattcatcggtag

SEQ ID NO: 512944 - DNA, 432 bp, Stenotrophomonas maltophilia
atggccagaaccgacccccaagtgaatgtgcgcatcccttcgttgctgaaatcgcaactggaggaggccgcggccgacaccggacgctctctgacagcggagatcgtgaccaggttggaatggtcgctagaggctcagctcttggaccaagtgcagttgctgcacaagaatctgggagaggtccgcagtttggcggctgaactcgatgagctaaccgcagacatcaatcgctatgaggcgggtcagcaagatgcgttgaaatggcttttggaagatgaggccattcccgaagatcgcgcactggcggctgctcgccttgctcgagacacgatgagcgatcgcctgtacgcgttgcgctactcgatccaaaccattctcgaggcaatcgagaaggatggcaaagagcctgcgtactacaggcgcaagttctga

SEQ ID NO: 512945 - DNA, 1278 bp, Stenotrophomonas maltophilia
atgctccacgacgagcagggcgtgcctttgttctacccgaccctgttcgctacttcccagcttcggaatgccggggcagccgtcaacacgatccgaaacaagcttgccgacatcgttgtacttctgcgctgggagcaggccaatggccgagacctgatcaccgagttccgcagcgggcgccttctcacagtttcagacatagtctcgcttcgagatttcgccaagctcgacatgcgggagttgagttcagttggagaaggtgacaagaaacgaagcggcgtcatcgattttctcgaggcgcgagttgcctcaaatcaggtgctggccaccattggtgggcatcagcatttcaaccgtatcagcacgtttgccgactatctggaatttacggcttcggtcgttacacagcaccagaactcgtctcgaaccgctcaagaaattgcgcggatggctagaaccattcgcaagcaccgaccgcgcgggttggcaaaacagagggatgacgatttggatctgcgctcgccaccctccgagttggttgagcgattcatggcgataggaactgagggtgatccgcgcaatccgttccggcatccggaagtccagctccgcaatgccatcatcttcgggctgctaagacacaccggaatgcgacgaggagagctattgagcttgcgactcgaccagttcgacttgggccatgagccgcacgtctgggttcggcgcaatcaggatgataagcatgacccgcgaccctatcagccggtaacgaagaccaaggagcggccattaccgatacctgaggcgctcgccaatcagatcgaccgttacatgctgaatgtccgttccaggatcggccccgccagaaggcatccgtatctacttgtctcgcacaggaagggcgatacatggggcaagccactctccacctcagctctgagtagccagatcttttcgcggatgcgcgcggtggaccccgcctttgaggcgatccatccccacgcctttcgacaccatttcaattacgagctttccgtcagcattgacaagcacaacgccaagatccggtcgggtgaagatgctgaggcattgccgttcagcgaggctagggagctggatgttcgtgctttcctgaatggtcatcgcagcaaggcatcgggagcgacgtacaacccgcgccacattcgtgaagccagcgacaaggctgctcgtcaggtgcaggccgctcatcccaagcgtagcgataactccaaggggggcggtggtgatccgcgctaa

SEQ ID NO: 512946 - DNA, 1584 bp, Stenotrophomonas maltophilia
gtggtgatccgcgctaatccaaagcaggtcgatgtcgagggaaagtcgaccgctcagacagtgtctaaggatggctatcccttcaagccttcggataaacattggcaattaaacaaggacgtgcagatttcactagcgctgccgggggtggttgaagctagaaccgaggctggctttcgcgccacgctgttgcgctatgcggaagaggcatccgctcgtcatgcgcgaaatatggagacgcgtttcaagcgatacatacgggatacaggagcgtcgcgggtgaccgtggttgacctcatcaactggcgcgccagccttgcggcagacgagcaatatcagttaggcggcctgaagggctttctgcttgcctggcacgactacggatttgacggcgtcactagcgaagtcgttgatctcctccaaagctggcgaataaaggggaacgaaaagggggcggccgttgctagtggttgccccgagaatgggccctacaccgacctcgagatggctgcgctcctggattgggcgaacctcgcggtagcacgaaaggacattgcattcgaggactacgcatatctgctcaccttggcgatgaccgcgcgccgtcccgtccagatcgctgctctcagggggcgggatctcgttcgtgaaacaggtgaaggcgcgcccatgtttaggctcaacattccgcgagccaagcaacgtggcatcgcttttcgaggtgcctaccggtctcttgccatccttgaagacctatatttggtgcttcggcagcagcatcgacagtccgtcgccgcagttttcgaggcgattggggggacggttgatcctgccttggtaggtgaggtgccgatctttctcaatcgcaagaagcttgaggatgttggaaatttagacgagctcaccgactatctgatgggtggcgcgccagatcaactgcattcaaaaattgactcgctcgattccgctctacagcgttgcgcgaaggcgtcgactgcgcactcggagcgtactggtgagtttattcgtttttccgcactgcgattccgacacacgcgaggcacgaagcttcgccgagagggattcggtgcagtcatcatcgccgagttgctggatcattccgacacccagaacgtccatgtgtacacggagaacaccgctcaagaggcggtagtcatcaatgagctagtgggtgctcgactcgctcccttcgcgcaagcctgcctcggcaagcttgtccactctgaacgtaaggcagttcgcggtgacgatccgcggagccgtgtgccgaatgatcgtcaacacgcggtggggacctgcggtaactatggattctgcgctagcggctaccgagcctgctacacatgctttcacttccagccgtgggtcgacgggccgcatgaagaggtgctggtggacctatatgccgagaaggagcgcacccgggaggcaggctgttccaacgtcattgttaatgctaatgaccaactgatccttgctgtcgaacactgtgtttcgatgtgcaaggatgcgagggctcagatgctcgacgcgaatctgttggaggcgggcacccatgggtga

SEQ ID NO: 512947 - DNA, 1857 bp, Stenotrophomonas maltophilia
atgggtgatgtcgtccagttcgttccccgcgctgagcgcgaagccagcggaaaccttgccgacttcatacgcttggcaaaagagggtctgactgcattcgcgaatggtggcgcttgggatcgcgacaagtggcagcaaaacgagaccatagtcgtcttcgcgacgaaaacagcacctctgaactcatactctttcacgcccttcgtcgaaccattcatgcagttcgcaaaggcatacattcgatacagatatagccacaggccagtcaagagcttggcaatgatgctccaagcacttcgctgcgtggaggcaggattgctggcggcttgcggccgaggagatgtcggactcctgagtggtgcggtaatggacgtttgcgccaacaagtgcaaggagttctactccagcgaggacgtgcaccacaaaaccgggctccaacttcaagctgtattcgacttcttacgtgagaagagccttgtcccgtcgttgccggcttggaagtctcctttcaagaagccggtgatcctgaccgaggatctcggcgaagcgggacaggcccatcgcatggaaaagcttcccaccaatgaggcaatgctcgcagttgctgacgtgtttgcccaggccgacgatcgggagagtcagttttactcatcaatcttcatcctgcttatggccgcgccaggccgcgtctccgaagtgctgaagcttcctattgactgcatccagtgggaggaagatgacgacggtaatcttcagatgttcctgcgttggaatgcggccaagggcaaaggagcgacgaagaagtgggtcgtgcctgtcatgcatgacgtcgtgaaagaggccgtccggcgcctgatcgaaatcggtgctcctgcacgtgagttagtcagggcggcgttcgaaggctccacgtcttcgtctgaagatgtcggcacgtccaatctcatcaaagaatttggcggcttctactggcccttccttgatgagaagagggtgctgacgacctggagtgctctgtgcctgcatcgagagaatgaattcagtcgcaagaaggaaattaggccagactcatggcggattccaagcgctgacgaggtgaataagcgcttgggcgctggcagcggccacggcgaatctctctttgaccgtatgggcctgcggaatttggatggcacgcgcatcacgttgacatcgcaccagctccgtcattggctcagcacgatgtcagaacgggcgggcatggacgactacagcctggcgcgctgggccggtcgcgcaaaggtttccgacaaccgtcattacgaccatcgctcgccggaggaacgcctagaggctgcccgtgggctgcttccgatgcagcctgccccattgctcgagcgcatcaagcagcgtcaaccggtgacgtatcaggaacttgggactgatcggctgggaacggccaaagccacgctctatggcatgtgcgtgcacgactacgccatggcaccgtgccagaaacagcgcgaatgcatgacctgcaaggagcatgtttgcatcaagggtgatcacgttgcgctagaccggattcgcctcttggaggcgcagacggaaaaactgctccagcaggccatgaaagctcatgaggatggcgactttggtgccgaccgctgggtggacaatcacaagtggaagctcgcgcacgtcaaggcaatgaggatgacattggagcatcccaatgttctggagggagcggtcctcaggattccggatgggcacgatccttctccggttcgccgtgctctcatggatcttggcgttgtcgaagtgccctccatggatgcgcttggtccgaaaatgattgccttggctcttacctga

SEQ ID NO: 512948 - DNA, 453 bp, Stenotrophomonas maltophilia
atgccaaagaagatcatcaccaaggcaacgctgccaaagataatgcgtgagctggatcgctgggacggcaagctcacttggccgctattctgcgagcgcgccgcaaaggtgctggacgtgccttcgatctcgaagcacacgatgtacctttatcctgccgtcaaggagcggtttcagcagcgtcaaaaggatttgcgtgaggcgagagatgcgctcccgagagatttcacgttggacgccgctatccgccgcatcactgacttggaagcgcaggttaagcggttagaggacaccaacaatctgcttcttgatcagtttcgtcgatggcaatacaacgcctacgcgaacaacgttcgtatggacttgcttgcattggacaagtcgttgcctgaggtgaaccgttctggtcgccggaaaggtgaaaagaagaagagagagaatagcgagcggtga

SEQ ID NO: 512949 - DNA, 909 bp, Stenotrophomonas maltophilia
atgagcgtctcaacgtcctaccgcctggaagcccagaaactccttgctgacgggaagaggatcagcctcttcaccagccacccgggcacgctgggagcatatcgggaagcgagtctgcgagagttcctcaagcagcatctcccatcacgcttcctggttaccagcggattcgtgaccgatcatgatcgagagcaagacaatcaggttgatcgatcctcgcgtcagatcgactgcctcgcgcatgacaagcaggactttaccccgctgttacgcgccgatgaattttcgatcgttaggcctgaatccgttgctgcgatcattgaggtcaagagctctctagaaatagtgagggaaaccgtccggatgaataccagcccatcgtttctcacccccaaggggcgacactaccgctgggcgggcagcctggtcgaggcccttgagaacatcaaatctgcggtcgacgtgatggaagctgcatccatccgccgcaatacgtactttgcgggagtaatcgcctattctgcgcgccccctccgaaagctgcctgaagcgatgaactccggcgaactgttcaagcagcttgggattgaggaaattgaacagttgcccgactgcatctgtgttctagacggccccgcctggtccttctcatgcgttgccggaacggatccgaacgtccacggcgatgtgaccaccgaccctaactcctcctacgccattgaatctccacgggacggcgagggaagcgcacttcagatctttagcgcctatctgcatcacgcggttgcggtgaatcggctacagcagccgcacatggtcggaggggcgcactccgctgcaggctatagcgcgcaggaacagcactacaggatccccgtctcatccaagcgaatgttaggttcgacttaa

SEQ ID NO: 512950 - DNA, 3756 bp, Stenotrophomonas maltophilia
atgtctgccatgcttcagtcggatgagttcccgtgggaagagctgatcgcggaccaaggactggctccgacgaacatcgtactgacggctaacactggccgcgcggagcgggtggccaaactggtcaacctgatgctgatctccacggtcgactcgggggaggctgcattcagtcaggtctgtgttctattgccccccgatgttccggatacgatccatcaagacgtgatgaatgacatggctcggcgccatggtggatccgatgaggttcacgcacaagctgtgtcagggcgcctccatgtgcaccgcgttacctccctgaatgccgctgagctggtcgcgttaattacagaccttcctgatggaagctttgccattgtcctcgacgcgtcaaggtatcgtgcgccagacgcggccagcataagctcatcatttgggctgccggaggaccgctggattccatccttgatctggctggcggatgcgtgtatcgagcgttcatcagctcccagatgtgttctgatcgatgcgggtgcgtcaccgccacagttggagcgcaacattgatgccttccgggatcttgactgcctggtgtgggcggttggcggtcaggccgcggtagctgatgacgagatcctcagattcaagcgatgggttgcccgagtcaagcgaggggatgtcctgactgtcctggatgaagttgacgttcttgaagccacgtccaaccagtcaaaactcataatgaaggctgaccttctgtataagggcggaaggtcgtctcgtgccgcggagcttcttcaacccctttgggcctctgcggaacgtcttgctccgtttgtaggaattcgattagctgccatcgcagttgctggtggggacagggtaggcgcagcggtgtttctaaacgggtgcgccgccaagcttgacgatcctcagatgatggaggatgcccttgacctggcacaaacgctacagtccgaaacggtgacgcgtcattgtttgtcctggttggcccggtaccagcctgattcggcggcgctacaagagcatcagctgcaggccatgcttgtcgcctgtcgtgacgggggcacgatccagtgcaatgacattgcaggtctccccctcacagcctatgtcgatctcattcttgccagcgttcatcgccaagaggttccggactactctgcaactatttcaggtcttgggacagagtgggagcatcttcacagtgagaccgtacttgcgtgcgcacttgatgcgatgcgacgagacctgcccgttcaggcggcaatgcttgtggtcggcctgtctccggtggcggggcgcgtcagtgcctcgagccagcttctactctggacaattgagcgcttgctgatcgctggacaaggggatcatcgtgaactcatcagcgatgccgtcctgtgggcgctcaggtacttggctgctcaccctgctgatacgcaggttcgtgagcggcttgacgagcttctttccattgatagtgctggcgtgaatggcatcgcactgctggctcacgcggttctccgactcattgatatccagcaggtgtccgaaacctccctccaccggccttcagtgccggcgggggcgtggcaggatgaggagtggctgggcttctaccgttcggccacggaatggatcacccaagatggggtcgtggacctggcgacggtgcgccttccgatagaactacttacgctgagtgctgatgaggtactggcaaagctcaaggtgctggcacagtatgtcgtcgagcaagagcagcctgacgattacgccgttctgaatcagatgttgatgatcgcgttcgcggtagtgccgcatgcggacaactcgagcgcggatcttgagctgctcaggttggtggctacacggctggtcattaccggtgaggcccagcttgcccgcgacctggtcgagtcgggtttgtctgccacgcatgatgatcctcatcgacttcgtcttgcgtggcatgcctatggcgatgtgttccatcggatgcaggaccatccaagggcactgctttccttcggttgcgcggtcgcgagcggtggagatatcgggctggagcaggcgtactatgagagcgttgccttggcaagagccctgcgcgacatcgggctgtttgacgtcgctcacgcgctcttggcgcgctgtgaggggctgatttcccgaatgggggctggggaggacatggcccatcgattgcagacactgcggctcggtgttcgccttggcgaactgcattctctgagagcagagctggggcattggataccgctactgagtgaactatcagccaatcttcgcgaggtcatgcgcagggatgatgagatcaccacggtacttctacttctcgtccaatcacgcgatcgcgttctgctgcttggcggggaagtgccctcgtcagttgatgaaatcatacagcaggccagcgcaatggccggcgcgatcactcaggatcttttgcttctggctgagaacgcagccccggggagggaccgactcgtttcctatgcgcagcttgctcaacgtgcacggtattcgggcgatgtcggcttcgatgtgcagcgtttggttcgcgcggcccgagctcaacttgcccaggaagagacgctcgccgacgcagagctggctgcgttcgcggtggaggttacctccgatcatgccattctagtgcctggcgcagttggccagcgctggcttccgtccaccctcgacgaaccggttgagacgatcaatctcttgtcccagcaggggcttcaggtggagttgctcgccctcgatagcgctgaccgcctcatccgcgtcagcggtgtggacggacggattctggtgaatcgtgaggatggggtgttctccgcccgcggactcgatgcatggtccgtcgtatatccatatgcctttggcatagacagtgatgatcccaatctgttccataccagtatgcgcgagttgggcctgtccagtagcatcggggctcgcaccgtttttgtaatggatacccggctgcagagcattcccccgcagctattggtcgttgaaggagagttcgtcggtaatcaggcctctgttgcggtggccccttccttggcgtggctgcgaggtgcaacgacctcaagcccgcttcagtacggaccaccggcagcttggatatcaaccgccgtatccgacggtgaggacggtacgctgtgtagggtggctgatcgcctgaacgagacttttgtccagcatcagattcagctggataccggcgccgagccacctcccagcctgcgagctgcccagttggcgatcgtcgccgctcacggcgggctggatcccggtgcacgcttcttccaggttgtgtcggacgagtcggcgctgagaatcagctcattggaccttgctcgagcgcttgagaaggtcggggtggcgattctttttgtatgtagcggtgggcggcagaacgctcatccggcagcgaacaccaccgtgggactaccgaagcagcttctcagtcgcggaacacgtgcggtcatcgcatcgccttggcctttggactctcgtgtgccgtcgcactggctcccggcgtttcttcatgcatggaatgagggcgcccgactgatcgatgcaaacgcggatgcaaaccgggcggtcgcccggcaaatgggtcatgagccacgcgatgcgctggcaatgacgctttacggcaaccctcttctgtgcaagggtgacctgccgctttctgaataa

SEQ ID NO: 512951 - DNA, 243 bp, Stenotrophomonas maltophilia
atgacccagacgacgttcagggccatcatgaagtggatcaatctggcggtcgcgctgctgatcatcctgctggcgacgcgttacctgtggagccgggccatcagcggacagctgggcggcatgcacgacgtcgccctggtcgggctttcgttgttctgcgtgtttttcggggtgctgaccgtgcagtcgatccgccgcgccaagagcaggcagggggagcgccagcaggctgacctcgattga

SEQ ID NO: 512952 - DNA, 849 bp, Stenotrophomonas maltophilia
atgcagaattgcagtaagaggtcgaacgacgttgtcgagcttcgagacaattccaagccgttgctagaaaacgttgaggtcgtaagtaagttcgtgcgaggtgactattcgcgtcgccatttcaagggcgtgttcgcgacaaagataacatttgaagatgttgtttttaatcaatgtgtttttgaggcttgctacataagaaattgcactttcataaattgcaatttcaaggggtctgtatttaaagacacttacctccatggcacgaattttcggaattgtggattctggtatgtccgtttcgataagtgccagatcgactcgagcctaatagatcagtgtcttccaaaggaggagaacattgctcgcgaattggtgcgatctttgcgtgtaaattatgctcagatcggaagctacgagggtgtaaataaggccgctgcgtacgaagtttgcctgacgggtaagcattactttaaggccatgattcaaaactcagaatactacacgatggaaaagtatcagggctggaacaggtttatgtacgcggctcgatactgtagttggaagttgatggatgtgctgtggggtaatggtgaaagtctatggaaggtcattagaagtgcaggcgttaccgtcattgtcggatcgttgttgtggcatctgctcgaaccaggtggcgcttcggttcttctgcagcggacaggcgcaatagcagccctcttctttgcaactccaagtcctaatggactagctgtcccgttttggcttggagtgagtatttcgacagctaggataatattgacggcattgtttctggccgttcttgtaaaaaggctggcccgccgatga

SEQ ID NO: 512953 - DNA, 621 bp, Stenotrophomonas maltophilia
atgagcgccagcattcatatttttggatctataacgcgcggggaggcggccctagactcagacgttgatgttctggtcgtttccgacgcgaaaattgttgcaggctgctatccggctgagtggagtgtttaccgggctgatgtactccgggagaagttcataagaggtgacctgtttgcatggcacctagcccttgatgctcgatgtgtttatgctccagacgggcaaggccatgttaagaagttcgggctaccgtctccttatgttcgcgtgcgtgaagacatctcacttttccgtgcgatgctcgagacttcactgggtgagctgagaggcggatcttcatctcgtgtcttcgagctcggaatttgccacacggcgctcagggatattgcgatgagcgcctcttatcatctcctcgagcgtccgaatttttcgcgatactccccgtttcatatgccggtagagattggtgtttcgagggaggcatatgagatatcagttaaagctcgacatgcatcaacgcgcggggctacgtctcccgatgatatcgacttcgcaatcagtgagttcttagatgctgatctcattaggtgggctggggctgtggagcgagcgatatga

SEQ ID NO: 512954 - DNA, 1005 bp, Stenotrophomonas maltophilia
atgacggcagcgaagatccagcactacgttccgaagttcctcttgcgaaacttcggaacagggaagaaggaccaactctgggtcttcgacaaggcctccggacgcagcttccagacgaacgccaagaatgtcgccagtgagtcgcgcttctatgattttgtggtcgatggtgctgaccactccttggaagatggactgtcgaggatcgagtcgcaagcaaaacctatcatggagcggattctccatgatgattctgtcggcgcaattccagcccaaggccgcgctcttctggccgcattccttgccatccagttcgttaggacgcgagccttccggatgcaatgggaagacatgcgccgcttgctgcgtgagaagattgagtccatgggcgaccacgtcgtaccaggttcccaggctgaagcgctcattcggccgcagaccgagaacgaaatcaagatcgacacagcacgaatgatcttgcaggcgccgactgacttaggccctcactttctgagcaaggtctggtttttggcgaagaccacgaagacccatcccttcatgatcggcgacaatccgatcgctctccagaatcatatcgacatggggccgtacggcaatctcggcctcggtgttaaggggatcgaaatctactttcccctttcttcaacacgtgctctcgccatgtggtgcccatcggtggctcaacaagtggctgaggcggctaacacgcttcgctccttgccaatccagctcactgcgtcggtcgtacgcgaccgtgaaggaattatcgctttggacgatgccctgaccctcggtacagcgctgccttacaagccggagcatgtgacgaacttcaattcacttcaggtgagccgaagcgaacgctatgttttttgctcgatgggagacttctcattgcccatcaggatggttgcggatcatccgtttcttagagttgggccgcgaatcaccaatatcgcaagcaagagaacttcggccgaatag

SEQ ID NO: 512955 - DNA, 1431 bp, Stenotrophomonas maltophilia
atgatctgcatcgggcggtacctgttggcttttgcgctctgtgtggtcgcccaggtctccacaattcctgccgcgcatgctgcggttgtcgagcttgatcagggcttggcctaccagcgctgcttgaaggatatgccgaaggtcacggcaggcggcaacatcgtcagcaagtccgaatgcacgcgcagttcaaattcaagctatccgatctgctatacgcagcgctactgggtatacgaacaggccggacagaacagcggcaaggagatcggcccatacgagcgtgagcagtactgcgcgtccgcgtcctgttctacgcgtcttgatggcgaggccggaatgatcaacggcacgctgtacagcggcggcgtttgcagcaagggctgcaagatgcagccgaaccttgaccctgctgtgaacttcaacatcagcgattccgccaaccccaatggcattcccattcgtcgcggaacgtggaaggcgtcgggcgacgtgtgcgatagctcgatacctccgcagcctgagaagaaggatgagtattgccatcagtcgggcaactaccaggtctgcaagtctgagaacaagacgtgcatcagcacggcaagcggattccgtacctgtgcgagtgattctgcgaatcagaagggccacacggccaccaataacccccgcaccgaggccgcaagcatcagcgcgccgaacacgccgcccaatgcgccgagcaaccgccccggcgaggactggcagccgagcggtggcacgacgaatatcaccaacaacaacaacggcaacaccaccaacacgcagaactattacaacaaagggacgcctaacgggaatcagccaacgcccggcgatggttcaggcccgggcgtcggtggtagcaatggcaacggtgagcaaggcgaggggaacggaaaccaagccggtggcggcggtaactgcaaaacgccgccgactacgagcggcgatccgatcctcgggatgattgctatgcagacctgggcaacgcgttgcgagactgagaggggcaacgggggcaaggttacgggcgatgttggcaattgtgattccgcttttagcgttgagggcgattcggttcaggccaaccagctgcgtgcgcagcgcgcccagctgtgcaatgggaagcccggccaaggcgagggcagcaatggtgatccgcatgagggtgccgaagacgttgacggccccggcaagtggtcatggaagttcgatgagagcttgatcgacaagagcgggtttggcggcggctcttgcccgcagttcggcaccgtggactttggccgcttcggcgcggtgtctctcgacagcgtcacatggtggtgcccgctggttgcggcaatgcgcgccgtgatgctgctactgggcgctttcatttcgttccgcatcgtctttggagacggatcatga

SEQ ID NO: 512956 - DNA, 1761 bp, Stenotrophomonas maltophilia
gtgaacgccatcccgcttcggctcgaagacctacgcatcacgcttaacggaacgttcgtgagatcggccaaggacattggcgatcgcgacgtggaaaagctaatcgaatccgctcgcgccaatgaggatggcgactacaatccgctcctcgaagtaagaagaaaggctgtaggcgccgccaaagtatcagcaatcgtgttctactccaaaagggaggcatatttcgccccggaccacgacctctttgacactatcgcgtcctaccttgtcatcgttgaagttgggccgcgtgagttcactattttcaagaaaagttgcgccaccataactccacttcttgagaaggaatacgagatcgtcgagtatgaagatctcttgaataccttcgatgactcacgatctcagattcagaagttgagcacgagagaaatgaatgtatcggacaagggcctacgcgccaggagttacgaagctcccgacctgaagggccacatgtctcctcacgccgcaggccggtcaattccgcgcttcactcaagttcgcacaaagagtgaggttcgctcgatcagcctaaatactggtcgcatcaatcagcttactgatcgcgtaaatgttggcaaggcgatagactggtcatcgcagattttcacagctatgtcgcggagacgagtcaataagagtttcttctcatctttcgcgagaaggatatcccttgaagaagtcctaaagtctgctcgacccgcgagcattctcttcgagcgattcgcgatcgaggagcacttgattgaggatggcatagatctttggtacacgaagaacgggaggtaccacaagcttaagcctgcatctctaaagagatttctcaacacgcttgacgttgctttcgaaatcgacaaccaccagaaccttatcggcactagaagtggaaagcttcgaatcaacaagaagactttgtcaccaaactctgccgcactgagcaggctgaaagtcaaaggccccaaggactacatcaccttccagtcctggatcacagatcatggatacttcgtcgtctcatttgatcgtccggactacctatatatcaaaaagagctgctttgagaaccgcgctggaagggctgaagtcgacgccattctcacatgcttggagccgaagaaaagcttctcaacggccacaagcgagaagggggacgtgtcagccattagcacggaatttgatccttcctcactgttcgcgaaggttgagtgcattcatcgaaaagacacctacgtgttctgcgatgactttgggaccgagtgggctgaccatataaccatcgacctgagtgcggcacgcgtcacattcatacattccaaacatgccaagaaatcaagcaattcagccagcgccctccatgaagtcattggccaagccataaagaatcttggcagcatgcacttcacggccactaccttctcggcgaaggtcaaccagaagtttaataagaagtacagaggatctcagatagatagaacaagaataggtaattacaagaaggccaacagtgacgtcaaggtactactggcggacccgcgacttcatcggaaatgcgtggtggcctgctcatccctttcgaagagtgatgtgacggccgagtttcagaagctcaagcgtggccttccagtgaaagggcatatcacgcaacttttctggatcatctcctcctttatccattcgtgccaaggaaatgcctgctacccggctgtgtactgcaagccttag

SEQ ID NO: 512957 - DNA, 339 bp, Stenotrophomonas maltophilia
atgtatgcaatcactgaatccggctaccgtgcggtatcggctgagatgccgctggtccaaggggagattcgcgtcgacatactgccggcgtcactgctgaccagaatcagaagcgaccaaatgaaggccgagcgcaaccagcgcctacgtgccacggattggacccaggcgcccgatagcccgctggatcccctggttaaggccgcattggcagcataccgccagcagcttcgtgaccttcccgcgcaggcgggcttccctgattgtgcctggccgaccgtgccgtcaacgctggatggcttcgcctcggtgggccagccggcgatcgccgcaacctga

SEQ ID NO: 512958 - DNA, 729 bp, Stenotrophomonas maltophilia
atgcctgacgtcaaactctctcagctcgccgccgccagtgcggcctcggtcgcggccggggccggcctgtggacgatggctggccacatccttggcctgcgcatggagtatgtggggccggcttccattcgcgtttccagcggcagcgcttggattccctcgctgcagcaggcgatcgaggttccgaccgccctgaccctcagtggtctgaccctcgcagcgaacacctggtaccacgtgttcctgtatctgaacggtgctgtgcccgcgattgaagccgtgacggcggcgccggccgccccctacagcgggactgctcgcgccaagaccggcgacacctcgcggcgctatatcggtagcttcaggacggatggaagcggtctgatctacaacttcatcattcaaggcccccagcagatctacatgcaggaggtgccgagggctgtcgctggcgggaacagcacgacattcatccccgttagcctatccgcacttgtgccaatcgtgagccgaagtgccattgtggcgatgaccaataacggtagcgccgcagtcagattcaggccagcatcctctggattcactggagcaacccgtatgtatgggctgacggctggcgcgttcgttgtcggccccctgcccaccgatgcgagtcagaacattgagtatcaggtggatgcaggtggcttggccaacctggacgtcgtcggcttcgctgtggagcgctga

SEQ ID NO: 512959 - DNA, 975 bp, Stenotrophomonas maltophilia
atggcctacgcagaattcagcaacattccgaaccttcagacactgatcgatcttgttgttcagttcgctcaggccaatggctggaccgtggagcgcaacagtctttcgggtgccaaccgcactgccaccctccgcattccaggggtatcggactacatccacctgttcaactcggaccagctgtctttgcgatcccgcctttcgattggttacgacggcggcgcggctcccgcatcgcaaccactggtttcgccgcgcgacgtatcaacctatgaactggtcggtgcattcccgagactgaagctgttctccaatggctacgccatccatgtagccatctcccaggccatcgccggcgagtatcgccatcacgctttcggcgtcctggagaaggcgggtgcctataccggcgggacttatgttgacgggacgtattgggcgcgcactggtggctacagtgggatggtttcgtcgagcggcaacaatgtcgtcctgttcggttttaacaccagcaacaccggctgcggccacgttcgggcggattcgaccgaggatggccgaaccaatagctacaacctgctgtgcaactactttgggagttcgctgaatgctgaaggccaggcaggcagcagtgtcggcacaatcgcgcaggcgaccagctcttcgagctacgacagcaactggcttgggtatgccctggggggcgcggacgagaacatcttctcgggtcgcagcattctccaccccatccagttgaatgtgcgccgcgccggtgcctcgccctacctgtcgccgctggggcgcgtatcgggccttcgggcctgctatctggagaagctggagcccgaacaggagatcacaattggtgatgacacctggatggtgtttccttggctgcgcaagctggcaatgagcagcgtcaccaacgcgccgccggccagtggtaactatggctgggcggtgaagaagtcctga

SEQ ID NO: 512960 - DNA, 975 bp, Stenotrophomonas maltophilia
atggcctgggcaacagacaccgcagccaacatcaccgacctcatggcccggttgcgggactttctgactaccaacgccgccctggtggcagcgaaccagcagtggcaggtggtgggtggtgtggccagtggaccgatcgcggccaacaattttgtgtcgctcaaagggcgaggtcttgccggcgaggacgagatctacctctcgctggaggcgtggatcgttcctgccagcaactactacaacatgcggatgcgcggccacaccgcatacaaccccgcgatgcctggcgtcgacccggccggcgccaactcgaattacgtcactctgctgggcgtcaactcggcgattaaatactggttcatcgccaacggccgctgcttcaaggtcatcacgcgcatcaatggtcgctatgacgccatgtacgcgggtttcattctgcccgaacacctgcctggggactggagctatccgctgttcatcggtgcctcctgccttgatagcaatgcaatggcgtccttggacacctaccagcattcaaacttctggaatccaaatgcctctggccagaacaacaattcactgagtcaggcctacctctttacgccggtgcaggcatggttgccgattcgcaatcgctaccaggacaacgcgtttacccgagcacgcatgaccctgccgtgggcgccgggcgtagtgaaccagaatgtgcgcaactgcctcgacggccagcgctggctgaaacggggccagctcatgggaattggttggctctccagcagtcccgatcgaggaaaccgtgtcgatgaaatgccggaaggtgggcagttctatggcgacttcgatggcgtgttctacacgccagcctttggagcaacggccgaacagatcgccaccgttgaaggcaaggatcatctgctggtgccaaacgtgtatcgcaccggcgatggcgagtacgccgcatttgccctggagtga

SEQ ID NO: 512961 - DNA, 486 bp, Stenotrophomonas maltophilia
gtggccaagccccgcactgcgccgcccagcgcacccaagaccgtccaggatgacaagccggccgacgtgccggtcgtcacggaagagaagactgccgacgcgccgccggcggcggatgactcggtaccggagcaaggccaaggcgagctggagtccgccgcgtcgattgtctctgcagccgatggtgctgccgtcgaccagtcgcaggtcaaccattcggcagcggaccaggacgctggcatcgaagcgggtgcttcttcgcctgacgctgcgtctctcgacgttgtcactgcgcctgccacttccaccagctcgggcgatgacacgccgagcatctggtggttcgaagtactcagcccgttcaagcacgccgacgtagtcgtcaagccgcctgcgtggatcccgatgacctgggatgaggccgaggactaccaggatgctggcgctctcggtgacgaaccggccacccaggaagagctggagtaa

SEQ ID NO: 512962 - DNA, 570 bp, Stenotrophomonas maltophilia
atggcgcagctcgaagtcactctggattcggcaacacccgcactggccgatgcgctgcggcagctggaaggagaggcgcgcgagctgatcctgaaggactggggcgagtacttgctcgggtcaacccgccgccgcgggaagcaacaggtcgatccatccggtcggaagtggcgagcgctttcgccgtcctacaagcgctacaagcagcgcaaacgtccaggcaggccaatcctggaattcgacttccatatgctcggcgacatggcgtcgtggcagttggatgggggcgatgccgtgttggtcggcaccaacgcgccctatggcgccatccatcagggcggcggaacgatcagtcgcccggcgcgttcgacacacgtccatctaaaaaaaagaaaaggcgggagccgattcgtaaaagccaaccggcagaatcaacggtaccggcgtcgggtcacgttgcctgcctacacgatcacaatgccagctcgtccgtggctcggcgtcagtcgcgaggatgagaaggagctgctcgacatcgcccacgatcacgtgagcggcgccttcgagtga

SEQ ID NO: 512963 - DNA, 468 bp, Stenotrophomonas maltophilia
atgtcgttggggatcaccgccaccatcctcgcggcgcatgcgatgggcgccgggcgtacggcacggctgccggccatcgcccggactggtgtgctggtggggctggcggcgctgagcgtggtggtggtgctggttgtggcgctggcgcccgggctgaccgggctgatcttggcggcggccgacgtgcgtgagctggctgcgttgcagctgcggactgtggtgtggggcgtgctggcgatgggagtcagtgcggtgctcgtcggggtgatgcgcggcagcggcacggtagggttgccagctgtgctgggcatggcagcggtgctgctggtggagctgccgctggcgatgtggatgcaggcgcagcacgggctggccggcgtgtggtgggcgtggccgctggggttgctggccatgctggtgatgcaggtgatgtgcttcgcccggtggcggcgggtgcaggctgggtag

SEQ ID NO: 512964 - DNA, 153 bp, Stenotrophomonas maltophilia
atgctcgacactgcctcgaaatctctggacgccacggctagcgatgccagcttctggcatgaagcagccgtgagattcaacaggggcgagggcgacagcgtacggcccgtggcggacgaaacatctggcgatgtcgagcactactggtcctga

SEQ ID NO: 512965 - DNA, 543 bp, Stenotrophomonas maltophilia
atgggccgggtcaagattgccttcatgcttggactgattgacgactcagagagaatgcgtctctcacttgtagctaaggtcagaaacgagttcgcgcacctagctgaggacattagctttaacaccccacgaatcgccgatcgctgccgacagttggcggcgccagaagagctggtgcctccccgccaggttcctgacgcactggagcttgaaatgcttcacgagttcaaaactccattggcaaatagaaataatcccagggcgatcttcgaggaggccacgctgttcctcctctacatactaaagggtcgatttgcccaggcaatggtgaggcggcctagccgccctagcaagttcaagaacgcggcagagcccgccggcgagttcttggtgcgtgcaatggtcgcaaaaagacatgccatcgaagcgggtgacccgccggacaagattgctcagctgcgagatgaagttaaccggcttgcaaatattgttgtcttcactgctgcgggtgcaaacaagaagtatcagtccgggaacgactag

SEQ ID NO: 512966 - DNA, 297 bp, Stenotrophomonas maltophilia
atgagctatttagctttctgcactttcgacctcaagaacgcgagcagccaggactacaagaatgcatatgctgacctcgaagagatgggactaagaagagtgcaaacgtcagataatggtggggacgtagtcattccaactacctctgcgatgggggcattcaagggcagcagttctggcgaagtgcgcgactatgttcgtaataaggttaaggctgctttcgcagcccgcagattcaattctgagatctttgtcgcagtcggtgagaattgggcatggggtgccgcaacgacatga

SEQ ID NO: 512967 - DNA, 714 bp, Stenotrophomonas maltophilia
atgcgccttgtgttcttcgatgagacaaaaaacgatcagcagtacccctcgtatcacatcggcgcagtagtgatcgaggacacacatcttctagaggttgagggcatcgtcaatgctctcgcaacggacgtatttggcaatgcgcatctgtctcaagacaccgagttccatgcggcggagatctatcatcgcaagaagaactttaaggattggggcagcttcgatcttcgaattgatgtgctgcgaaggcttgttggcattctcagtctcgattgcgtacatctaattgacatacagatcaattgcgatctgttgacggagaaccaaagcgctgaggacatcgcgttcatgttcctctgcgagcgctcaaatgacttcatgcgaaagcataaggatctcggtatgctcatcggagatcgtgagagtgacaaaggcgcagccagacatgctggatctctctctcattacaaagcgaaaggcaccggctttgctttcggtcgtgagattcggaaccttgtcgattccgttcactttacgcattcacatctcagtcgattccttcagcttgctgatgtatacgtttggctccagcagttccgtgttaggaatcgagggtcgacgaatccccggcatcaagccgtgctctccctgctcaaggaggagaacgtgaatctgtttgcgagcaagtacaaagagtggccgaagcgggattga

SEQ ID NO: 512968 - DNA, 258 bp, Stenotrophomonas maltophilia
atgcgcagtcgaggaaaggtggctgctatcaatccacgccgtggcatggtggcaatagctacagaggatggcgggtttaccatcattgaactcttgtccgattggtctctagaagtgggggatgagatcacttggacagaccgctacggactcggtcacgagatgtaccggaacgtcacgcaacaaaccgaagaagaagtgtttgtgcagaaccacgacgttagtcggtcaaatctacaggctcagcttcttctctga

SEQ ID NO: 512969 - DNA, 255 bp, Stenotrophomonas maltophilia
atggaaatactggtgtatagccagttcaaagacaccggcgagttggctaagctattttcctggagctggtcgggcaagttcttgatcatggagcgccttgcgccgctcgatccgggcgatctcagctcgcatcgcatccctagctatctcacagatcgcaagcccgagaactacggcaaagacgcttcaggaaaaatcaaggccctcgactatgctgcgttggccatcgccaacccgagcagcgatttcctttag

SEQ ID NO: 512970 - DNA, 213 bp, Stenotrophomonas maltophilia
atgaaaggcgagagcgtgcagccgaccaggcgttggttagtcagctgctctagcgcgcgcgcggttaaggctcacctgccctggtcccacgaagctatttcgctcactcagtccatttcttggctgacccgcaactttgtcaagcactcctgcgaggtgtgtctttgtaaacccggtcgtttcgcacatcctctggaagtaccctccaagtga

SEQ ID NO: 512971 - DNA, 534 bp, Stenotrophomonas maltophilia
gtggtcaatctgcttgaacgcgattttctcgcgctggagccggaaaccaagtgggggacagatattaccgagatcgagacccagcagggcaagctgtatctggggatcgtgctggatctgtacgaccagcgcatcatgggctcgtcaatacacgatcgacaggatcgccagatggtgacccgggctgtgcagatagcggtgcggcagcgtcaaggaagcgatgaggtaatcctgcattcggatcgaggcagccagttccgcagccgcgactaccaggggcatctagcggctaacgggctgatctgctcgatgagcgctgtgggtcattgtggcgacaacgcgacctgcgaagccctctttgggccactcaagcgtgagcggatctatcgaacgaactgcgccacaaagtatgcagcacgagcggatgcgtttgactacatagagcgacgccataacccaaggatgcgacgaagggtcgccaggcaggaccagaaggttgcagctcttttagaaccgtccgtgatatcggggtag

SEQ ID NO: 512972 - DNA, 429 bp, Stenotrophomonas maltophilia
atgacaaacatggatatcggttccccgcccgcgcgggaacgtgcactgcgcagcatcaccccggagacggcgaaacagcatcaactgctcttgcgagcgatctttcgcgaggagatcgactaccgtcagcgcgacgaggatcaggcgtacttcgagaacctctattggtgtgcctatctgctgttccatgtgggagatctggccgatgtcgagtccatgtggattgccaagaatctgaacatggataccggttctggcttcgacgtcgagaacatggtgggtgccggtgtggagcagacgattgagtaccttctggaaagatctctcgacgatgctgcggattacattgacgagtgcttgccagctcactcgcagcaggaaatcgaggaatggtcccgctcccgtcgtagctacttctacgacgtctga

SEQ ID NO: 512973 - DNA, 384 bp, Stenotrophomonas maltophilia
atgaaactaccggcccgcttctgggtgcatcttttcagccatctggggttcgtcgcaatcatggccgcgctcttggccgactgggtcggggtgttcttcgaagctcttgtcagccaatcccatgcccccgccgacgtggcccgggtgggtcatgtcggaacggtgttcgggttctgcatgctcgccctgctgctgttgggggcgctgagcatcccgagtgaactgtcggggctggtcaggccgtacggccgcaaggcgccctatcggcagcaggcgcaggtgatgcatcggaaggtgctgctgatcaccatcgcggtactgtcctgggcggcgctggcgtcggcgtttttcattggatcgttgctgcgttccggccaggcgtga

SEQ ID NO: 512974 - DNA, 315 bp, Stenotrophomonas maltophilia
atgcgtctgttcaaactatcctggttgctcgcaacgctcggcttcattgccccagcctgccacggaagtgaaccaggccaagccaggcatgagcgctgcctgcagctgatcgagcagcatgttgaggactcgaggggatgggacaggacgttgtaccgcatcgaggaggaaggctccggaagttcggatcgagggttcgctgtgcagtacctggatgatctgaaagtgctcctgccccgcgacgggttgaaatctttccacgttgatgtcgacccgacgtgcaacgaaatcgttcgtgaaacctactaccagtag

SEQ ID NO: 512975 - DNA, 201 bp, Stenotrophomonas maltophilia
atgaccgatcttttcagggtggtagcaaatgctccgcgaaagatgtttcacgccgacatgatcgatacgtacgacacatttttctcgcaatgcgagatcgctcgagccgttgggctggcggcggtctcgatctctagacgtgacctcgatcgtgcgaagaccgttctacagaaggggttgcagatggcactcagcatttag

SEQ ID NO: 512976 - DNA, 204 bp, Stenotrophomonas maltophilia
atgcagctgacattcgacgacgcgaagggcctgggtgagcgcaagcagacccgtcgagagaccttcctggcggagatgaaacaggtggttccctggaatgcgttactgacccagatcgagccgcattacccgtgttcgggacgcgcgggtcagccgccatatgcgattgagacgatgctgcccatccacctgctgcagcagtga

SEQ ID NO: 512977 - DNA, 129 bp, Stenotrophomonas maltophilia
atgatcgtgccggaacagcgggtggtcgccgtgcgtctggtccaccggcgcgagacccacagcgctccacaggacgactatccctccttcttcgccgatatcctgcagttggcgcggacactgcgatag

SEQ ID NO: 512978 - DNA, 996 bp, Stenotrophomonas maltophilia
atgagtaacgttcaacaaggaccggtcaaggctgttcggaagcgatccagtagtgtgttggcccttgttgtgctgggcgcgctgttctacgcagcgagtgccacggcctgcgaggagtacggcgcgcgtccggacctgctccatgacaaaacttatgacagctacccgcccgagcgcggcacacggctggacggaggatttgccgtcaagagtttccacaagtgtctggggggcgcgtgggagccggtagtcatgacgcttgatctgcctgggttcacctacgagggggatctcacctacaaggggcagagctatccggcctatgcagccgagcctgattcaccgctgatgatctttacccacaagcttgcctacgcggatgaagctccgcttcgccttggcgaggatgtgcacgccctgtacgagatactcgatggcgatggagttcagtacgccattgtttaccgcgtggagttcttttccaggggcgggcgcatgagaacgctgtccacccggcacgggtcgatcgacctgcgagccccaggcaggccatcgctcgacagtcgtgctcgcgtggaattggcgttgcagttccctgctgccacctgcccgttgcaggacaaggccgaaaccctgcaggacgtgcagactgcagagctgtccgtaccgggctccaccgcaaaggaaaagctggtcgccatccgcatggactgcggcgtggacccgccgcgtgcgcggatgacgctcagtgatgctggggatgcgggcaacacgggaagccagctgacgcctacagccgattcggatgccgaaggcgtgcgcgtgcagctgctgcggaatggctctgaagtgcagttcggccagacttgggactttgatccgggggtgggcggcgcgcatgaccatcagttcaccgcgcgctatatccgcaccaacgaaccgctggtgcccggcacgatcaagggtgaggcagttctgaacgtcgattactggtga

SEQ ID NO: 512979 - DNA, 609 bp, Stenotrophomonas maltophilia
atgtcaacagacaagaccctctaccacatcaccgagatcgcgaatctgccctccatcattgttgatggtcttctgagcgacgcgtctgtgggcgacagacccaaccaggtgattgggtattcgaacatcaaggaacgaaggcttacgcagtacacggtgccctgctgtggcgaccgatttgtcggagagtttgtccctttttactactgccctcgctcgccgatgctatacaccatcaacaatggcaacacggggatgccctacgggcatcagcgtgaaatcgttcacctagtcacatccgtgcatcgcgttatgggcttgaacaaagaatgggccatcagcgacggcaatgctggcgcggatgccgtgagcttttcaaaccaacttacagcattgcaagagcttgattgggatgcgatcaacgcactggattggcgcgggcgcacccgtcagaagatggcagagttcctagttgcagattcagtaccttggagcgtgttctacggcataggggtgattgaccaaaacgcgctagaccgggtagcgaacataactcgcaatatcgcgcatcaacctcaaatcaagatacttcggaactggtactactaa

SEQ ID NO: 512980 - DNA, 1071 bp, Stenotrophomonas maltophilia
atgatcaacatcgcacgcgggaaccttctcaaggccaatacgcaggcgctggtgaacaccgtcaacaccgaaggtgtgatgggtaaaggaatagcgctgcaattcaaacaggcgttcccttcgatgtaccgggattacaactcggccgccaaagccggaaacgtggtacttggcaagatgcacgtcgtggacttgggggccttggccgaaggccctcaatggatcattaacttcccgaccaagaagcactggaaatccaagagcaggatttctgatatcgaggccggcttagcggacctggtgaaaacgatcaagaagcttggtatcgcgtcaatcgcggtgcctcccctcggctgtgggtacggcggtctagattggaaagacgtcaggccacttatcgagcaagcattctcggccctgccagaagttgatgttcagctgtatgcgccagacggagcccctgaagcggcgtcgatgcctacccgcaccccccgccccccaatgaccgaagggcgtgcatcacttctagcattgatgaagcgctatcaagcggggttactggaccccttcgtgtcgcttctcgaggtccataagctgatgtattttctgcaggaggcgggacagccactacgcctgcgctactcggaaggtttttatggaccttacgcaaagaatctacgccaagtattgatcactctcgaaggtcactacatcagcggatatggtgctggcgaagacaacccccaaaagccactgacgctacttgatagaagtgcagagcttgcagaattgagaatcgcagaggatccaatcacctcctccagaatggatcgagtgcaacgcctcatcgaaggctatgaggatgcctacggcttggagctactcagctctgtgcattgggttatgtgcagatcaaaggacgcaatgcttgacgtcgagagcgcaatagctgaggtgcaacactggaatcctcgcaaggctgcacttctaaagccagaccatctccggatagcctggaagcgcctgcatgatcaaaagtgggcgacagaatccttaagctcgatccattga

SEQ ID NO: 512981 - DNA, 486 bp, Stenotrophomonas maltophilia
gtggcaaataagagcaagcgtcttcagaacatcatcaagctctataagcagcagaccgggaaagtatcggttgagatgcatgaagtggcgaagtttgccgccgatatgggttggccattgccgaaaccaaaagatccagtgagcctgctggccgagcagttttcgaaggcggcgcgggaggagacgcgcaaggacgaggtcactggtcgtccgtatcgagtgaacctggctgtgactgtgccgcaagccgacggcggacagatgacattctggaccgatatcgacgaggcgccaaggcacattgcccataggtcctttacgcagcggcgcgagcaaatggtaggcgacgcgttgcagcttacatttgacgtgatgcattggaatcgcgtcaatgaagttgacgagccgatagtcatgcagttggacttcactgatgacgttgattggcgaatgaatgcgcctgacgaagacggcgaggctgcttga

SEQ ID NO: 512982 - DNA, 1122 bp, Stenotrophomonas maltophilia
atggaagctaagacccccggccagttcgtcacagccctgctcaaggagcggggctggagcaagcggacgctagccattgtgttggccatagatgaagctgtaatcactcgcatcgcctccgacaagcgtccgatcactgccgacttggcattggcgttcgaggacgtatttaaggtgcctgcggagaaatttctcgcactccagaaagactatgacttagcagtcgccagaattgcctacagagcagatccccgattggcaattcgagctgagatatttggaggtcttcctgtcgcggatatgatcaagcgcggctggctgagtgttgacagcccgagagacgtaactgctgtcgaaggggaggttgctaggttctttggcgtcactgaagtggacgatgtggtgtttctgcctcacgcagctaagcgtactgatgtggcagtaaatgccactccagcgcagcttgcgtggttgtaccgcgttaaagcgatggccagcgaaatggttgttcctcggtatgctccccagaaggggctcgaggcgattgaaagattgaagccgcttcgtgcgtctgcggaggaggcgcgaaaggttcctcgtattcttgctgaggcaggaattcgcttcgttctagttgagtcattgcctggtgcaaaaattgacggcgtttgcatgtggcttgcggatcacgcaccggtgatcggaataactatgcgtttcgaccggattgataacttttggtttgtccttcggcacgagttggagcatgtgttgagagaggatggaaagatttcgccgatggtcgacgttgatatggatcgccgaacggacgacgcggttgcagaggaagaaagggcggcgaacgtggcagcttcttcgtttgtagtcccgccagacaaaatgaaggctttcgtcgcgcgaaaggctcctttttttgccgagcgcgacatccttggttttgcggcgacacttggggtgcaccccggattggttgcaggccagttgcagcacatcacaggtaagtacgatcgctttcgttctcatctagtgaaggttcgttcaattgtcgcgccttcagctttcgttgacggctggggcgatgtggcacctctcggagaatag

SEQ ID NO: 512983 - DNA, 741 bp, Stenotrophomonas maltophilia
atggacactgcaaaaaagccttcgaagccgcttggaaaggccgtgatcgccctcgccattctcgtcgcgttcacgccaggactagcgaccgccaatcagatcgccagtgaaagatctgcgattcatgaacgccaacttgaatcttccgatggaaagaagtggatcgttcgaaccatcccatcgtctgatttccaagggggtaaggtgatggtcgagcaacgtctgtttagagatgggaagggcgggcttgtctatcgatttgacgaccaaagtcaagcaaccaagatctatcatcaagccctgtgtgaagcgaaagattctgtcccctcaaagggggcaaccacaatctccggagaggcagtgtggagttggtcctgcacaaacaacaaagctgatgccccctcttcgagcaatgccccaatctccgctaggagttcggactatctgttcgctatcgcccctaacgggtactatcctgtaggacaaaatttcacatccactggcgctgttgcttttgtaagtgcagtcgccggagacatgaaggcaacgctctccattgatgatggaagatgtacaacgtcggttaccgagccatatagcgcccccttcgaaggctcacacacagcgcaagtagcgtgtctgataagtgatgcccgggctgtgaacacgtcgatggaaggatgcataccacagcggtgtgcgactgatagaggctccctcagcgctgtgcagtttccctga

SEQ ID NO: 512984 - DNA, 339 bp, Stenotrophomonas maltophilia
atgtctgcccgtgacccggcactaatcttctccatagctcgctacggctgggtgcgcgggcatcagcgctaccgtcttgtccgactctggcagcagatccgcaagggcggggtgattgtgatcctgctggtgatgattgcccttcttgtgttcggagtgcaggggagcccacaggaccgcaacaaccccgcctgcccccgtgcgaacgtcaaaggatcggatggcctggaagcgcatgcgctgagggaacgtgatgatctctggcatggcagcaatgttgatggtggcactacccggcgcggaacgatgaaacgttcggcatttcagggggctgcatga

SEQ ID NO: 512985 - DNA, 372 bp, Stenotrophomonas maltophilia
gtgagtgaattcgataacgtcccgccgccgccggcaaccaccaatgccccggccgaccagcgcacgatggcgctggccgcgcacctgctgggcatcttcaccggtttcatcggtgccctgatcatctggctgatcaacaaggatgatgcgggcaagggcttcgtgaccgatcagtccaaggaagcacttaacttccagattaccgttgccatcgccgtgctggtctgcgtagtcctcagcttcgtcgtcatcggcgccatcctgatgccgatcgtgtacgtggccaaccttgttctgtgcatcatcgccgctgtgaaggccaacaacggcgaagcctaccgctacccgttcgcgctgcgcctggtcaagtaa

SEQ ID NO: 512986 - DNA, 1488 bp, Stenotrophomonas maltophilia
atgtctgaggaaatcctggtcaatgtgaccccgcgcgagacccgtgtcgcggtgatcgaaaacggcatgctgcaggaacttcacatcgagcgcggttggcgccgtggcgtggtcggcaacatctacaagggcaaggtgcagcgggtcatgcccggcatgcaggccgccttcgtcgaagtcggcctggagcgcgcggcgttcctgcacgccaatgacgtggtgcggccggcgccggtggccagcgccgacaccgagaacaccaccctgccaccgccggccagcgtgccgatcgtcgagctgctgcgtgacggccaggacatcgtggtgcaggtggtgaaggacccgatcggcaccaagggcgcgcgcctgaccacgcagatcagcattccctcgcgctacatggtgctgctgccgcagtccaaggtggtgggcgtgtcggcgcgcatcgaagacgaaaccgagcgcgcccgcctgaaggcgctggtgaccgaactgtcggcgcagcacggtggctacggctacatcgtgcggaccaacgccgaagggcagccggccgaggccatcgccgaggacatcgcctacctgtcgcgcgtgtggaacgtggtcgagcgccgcggccgcgaggcgccgtcgtgcagcatcatctatgaagacctgagcctgccgctgcggtccgtgcgcgacctgatccgcaaggacgtggacaaggtgaaggtggactcgaaggagacgttcggccagttgcaggccttcgtcgccaagtacatgccggtgctggccgaaaagctggagctgtattccggcgatcgcccgatcttcgacatgttcggcgtggaagacgagatcggccgcgcactggacaagcaggtgccgttgaaatccggtggctacctggtgatcgaccagaccgaggcgatgaccaccatcgacgtcaataccggttcgttcctcggccagcgcaacctggaagaaacggtgttccgcaccaacctggaagcggcgcaggcagtggcgcgtcagctgcggctgcgcaacctgggcggcatcatcatcatcgacttcatcgatatggatgatgcagagcatcgccgccaggtgctgcgcacgctggaaaaggcgctggcccgcgaccatgccaagaccacggtgtacgacttctcgccgctgggcctggtggaaatgacccgtaagcgcacggtcgaaagcctggagcgccagctgtcggaaacctgcccgcagtgcagtggccgcggcagcatcaagaccaccgagacggtgacctacgagatcttccgcgagatcacccgcgccgtgcgccagttcgatgccgcgcggctgctggtcatcgcgtcgaccaaggtggtcgcgcgcatcaccgatgaggagtcctcggcggtggctgagctggaggaatttctcggcaagagcatccgcttccaggcggacgagcagtacctgcaggagcaattcgatgttgttctgctctga

SEQ ID NO: 512987 - DNA, 4719 bp, Stenotrophomonas maltophilia
atgaatcgaatctatcgacgtatctggaaccgggccaaggggtgctgggaggtagccagcgagctggctgtagtaaaaggaagcaccagcggcccgcgcaggctgattccagtactggtggtcgcgttgacggctacagccgccatgcaggatgcgaccgcaggagttgactactatggctgctcggtccttgactctggttccaactatcttcgctgccttccacatgcgggtcagaccgatggaaccttgtgggctaacgctgcggccgatgcgaaagagtatctgatcattggtggcgggacgtatctgagtggcagctggggggcgggtttcggacaccaaagccggatcgttggcaactatggatccgcgtttggctacaaggccaccatcaacggcgtagacagtgttgccgtgggctacaacgcgactgccaatggtggtcacagcacggttgtaggcgccaatgcctacggcaagggaatcggctccaccgcattcggaaacagcgctgcggcaacgcgtcagaacgcgcttgcgatcggcagtggctcgttgtcacagagcgagaatgcggttgcaatgggcgcgaacgcatttgccaatggcgttgatggcgtagccttgggcagcaaagcctcggttgataccggcggcggcacgtccggcatcgccattggtgctgctgcgaaggccgggacgccgggttacaccggtgcaatcgccataggcggtggcgccgaggcgcgcattgatggcgtagccctcggctacggtgcgtcggcagccgcgcaaggagcagttgcgctgggtgtgcgttcttccgcaaccgaagtgaatactgtctctgtgggcagttccacgctgcgacggcggattgtgaacgtggaagacggccgcatcacggcttccagctcagatgccgttaccggcaagcaactgcatgcgatgaacgagcgggtcgatggcttgatcaagcaggattccgcgagcggcatagtgcgtattgccaacagcaataccggcacggaagtcagcatgcgcaatgcagtgttggcgacgcgaaaagtgagtggcgtttctgatggaacgttgacgacaagcagtacggatgccgtgaatggccggcagctcaacgccacgaacaccaggctggggacagtggaatcggcagtgggaactgtaaagggagaccttgccgacgtccgtacgctcgcccagtcggccaccaaccgtatcgatgccaccaccctggcgctgggcaagggcgcagttgcagagtcgggcagctacggtatcagcaccgccatcggcaacaacgccaaggcctacaacggtcgcagtgtcgcactcgggttcgatgcgctggccggcgtcgatgcagagggcaacaaggtgaacaaccagaatgccggcgtgtccatcggagcgaacacgcgcagcgcaaacggcgcggtcgcgaccggcttccgagccatcgcgagcggaaacttctccattgccataggcggtgatgccaatgcggccgccgagcatgccactgcaatggggtacctgagcaaagccacagcaaagcagtccactgcgctggggcgtggcagcgaggccaaggcgcagttcgccaccgcgttgggcaatcttgcggtatcggccaacaccagcgccgttgcactgggtgaccgggccaacgcccgccatgacaatgcagtggcattgggtgccggctcagtgacggcgtccgtcaactccgtatcggtgggcagtgccactctcaagcgcaagatccagtacattgccgatggcgcggtcagcaatggcagtaccgatgccatcaccggcaatcagctgttcgcgaccaaccaggccgtatccaccgcgcagagcacggccacgagcgcgcagacggcagccaacgccgccaaggtcgacgccgccaaggcactgaccgagacgaccgcgctcgccggcctggtctctcagaccgccgccagcggcaatgtccgtttgggtgggaagaacagcggcaccgtactggacgtgcgcaacagtgccaacgccagccggaaggttgtcggtgtggctgacggcgacttgggtgacagcagcaatgaagcggtcaacggcaagcagctcaatgccaccaacgtgcaggtcgctgccgtggagaaagcggctacggccgcgcaggcggatgcaacggttgcgaaggcagatgctgccaaggcgctggtcagcacgagtgcgctggaagggctggtcagccagaccgccgccagcggtaatgtccgcctgggcgagaagaacagcggaacggtgctggacgtgcgaaacagtgcagatgccagtcgaaagatcagtggagttgctgacgcagcattgagcacgaccagtacagaggctgtggctgggagacagctgcaccaaactaatggtcgagtttcggctctagaggaaattaaccggtatttcagtgttggaacggatgcgttcagtcagcctgcggaagcgaatgtgctaggcgtggccatcggcgattctgcgaagaccggaggcgaggggggaaccgcgctgggctcgttctctctagcggatggcatcaattctgtagctgtcggtcgaggttcaaccgtttcgaaagactctctaaatggctttgctatgggagccggagcccaggtggatgaagtgggcggcgtcgcaattggtgcggcggctaaggttcgcgctggagcaacgagggctatggcacttggctcaggagctgaagcaacagaggctgacaccgcatccttcggtactaatggtacgtggcgccgcctcgtgaatgtcgctcgtggcacggctgagcacaatgtcactacggtttcccaactcaaggactccctcgccacgctcggcggcagcgcaagcatggacgccagcggcaacatcgttgcgccgacctactcggtgcagggcggtacgcagaacaccgttgaggacgcgttgatggccctcgatggtgctgtcatcaccgcaggccgccgtgcggacatggtggaaggccagctcaactcgatcttccaggattcaccctcggcccgtgtcgatggcaggagccagatcgagctgagtggcgcgaacggcatggtgttggccaatctggctgacggtcgggtggcgcctggaagccgtgatgccgtaacgggcaatcagctgtacgccgcagagcagaagatctcgcagaatcgaaatgatctggaggcgatgcgcaaggagcgggagatgggcgagcgggcaatgcgtggattggatgcgggcgtcatcgactacggtggtgcgcgcttgactggtgtggccgacggctcgctctccgtggacagtcgagatgtagttactgggcgccagttattcagtgttagcgatcgggtatcgcagattgaggatcagcaccgcttcttcaagatcgatacagatgagcttagtgaaggcgcgttggccggcttcctcggagtggcaattggcgactctgcccgaacgggagttgacggtggaacagccattggctcctacgcagctgcgctgggggtgaattcggtcgctcttggacgtgggtcttgggtctccgaagattcgagtggtggctttgccgtgggagctggtgcgcaggtgtgggaacgtaacggcattgccattggggagagcgctatggtccttaagggtgcagacggctccctcgcgttgggagttggtgcagtggcaactgagaaaggtacggcttcgtttggtagcgggagcattcaacgccgcctcgtaaacatcgccaacggcaccgccaaccacaacgccgccaccgtcggccagctgcgcgatgcactgtccgccctcggcagcgaagtcgatgccaacggcaatatcgtcggttccagcttcaccgtgcaaggccagtctcagtccacgctcaatggtgcattggaagcgctcgacggcgcggtgatcagcaaccgctcgcgcgtgaaccaggtcgagtcgcagctgcgcagcgtgttccaggacacgccctcggtccgcgccgacggtctcaaccagctcaccctcgccggaacccacggcatggtcatctccaacgtggccaacggcctgatcgccgccggcagccgcgacgcggtcaatggtggccagctgcattcgatgcagcagcagctcaacggccgtatcgatggcctggaagagcgcatcgatgcaccgcagccgcgggcaatggccgtcgcgtcggtgcccgaaccggaagtgccggtgccgctggccgaaggcggccagcaggtggcgtcggcaggcgagggtgagaagcccgcgccgcagccgaagtcgaagaaggacgacacgcccaagccgcaggtcgacaccgctgaactggagaagatgctggcccgtgccaacgagtacaccgatggcgcgatcagcaacttcgagcgtcgcctggacaagatggacaagcgcttcaaccgcatggcggcgatgagcagcgcgcagaccgcgatggcgatgaacaccgccggcctggccacctacaaccgcctcggcgcgggcgtgggctacagcgagggtgagtcggcgatggcagtgggctaccagcgtgtgctcaacgagaagggctcggccaccttcagcctcaatggggcgttcaccaacagcggcgaacgcagcatgggtgtcggcgtgggcatcggctggtaa

SEQ ID NO: 512988 - DNA, 1131 bp, Stenotrophomonas maltophilia
atgagccggcgtgtgttgttcgtgttgatgctggtgtgcgcgctggccgtgctgatgccacgggcgtgggcgcagtggccgccagagacacatcccaccgaccagagccgggacatcgtgatgacgtgggaccgctcggccgtgcccggtgacgtggtgctgtgggcgccgaggacggtactggggttcagtcatgacgtggcgatgaagtatgggcagatccatgtggtgtgtgggtctgcttctgatagtgagtttggtaaatgccccacggcgggtgttccacatctaactattggcgagtccgaaatctcgcttttgatggtcgagcagagaacgggcctgcgcatcgagatcagggcaattgggcatctgcagaggattatgtcagggcgggtatgcagcaatgactactgggagaaaacccaacgatttctctacgcggcgagttggtttgagtgtagagatcaaccgattggtactggcgtaaaactgtcagttcccacaagagagctggtgcgtctcgtcgcaggccactggaaggccacgatgcgcctgtacatcaaggccgatcccgccgcagctcccgtcgccaccgccaccttcaacttcgatttcactgtcaccgactacgacgcgatctcgatctactttcctgccttcgacaccgtcgcgccgctggtcaacatggacctgcgctacgaccccatcaagcagatggtgggcggccgcaagcagctggagatgtgcctctacgacggcctcggctcgcagagcgagttcctcggtgtcaccgtgcgtgacagcgggccgcgcccgccacccggcagcgacttcgcggtctggcatcgcgatggtggcagcgacgaccgccagcgcctggactaccacgtcagcctgaactacggcgggcgcgatatccgcatgcggcatggcgtggaagagctgctgcatggcatcgagagcgccgaactgcgcctggtcatgctgcccggcatcagccagccggtctattgcgtgcccacgccgctgacattgctgacacctcccactcctgtcgccagcaagcgccccggtctctacgagggcgagctgacggtggaactgcgcgtccccaccgccaaaccctga

SEQ ID NO: 512989 - DNA, 1161 bp, Stenotrophomonas maltophilia
atgaagggcagggggaccgctagactgcaggcgaccctgagccacgagaggtcccccttgacccccgacgagtacgaccgcgcctcctgcgtgctgctgcaggactacctgctgcaggcatctcccgagcagcgccacatctacgtcgcgcgccgcaactacgatgacagccccgagttgctggcttggctggcggaacgcagcgagctggattgcgccacggcgctgatgatgtactggtcgctgggcgcggcctggttcacccaatacgcaactgatggcgacgtgcccgcgcatgagcgcgacgcccatgccatcgtccgccgcatcgagcaacactacatcgagggcttctatgccggtcgtgcaatcgcctttgatccgggcaactggccgggcccttcgatggggaatcaccccggcctggtcgtgcgccgccccgtccccgacgccatgctggctgcggtggcaggcgagcggacctgcgatccctttgcagaggccgtcgacgcggccttcgatgatggcctgccgctggcgctcgctgcacagctgcatgccatggccgtggcggtgcagcctgatcgcgggccagccctcggcgatgccgtcgccggcgacgtcgacatctgggcggaggtgatgccgccgacgctgtcgccgctggtgacgaccgcggatccgggctggccggtgcttgagaccttcctgcgtcaggcctcgccgcaggaatgccatcaactgatgctgttcgctgacaccaacgcgctgtcagacgcgctgcagtggttgctggaccagtcgacactagccgcttccagcgcactcgcgctctactggaacctgggcgcgtcgtggtacgtccccttcgccacgatcgaggatgtgccggagtcgtaccgctatacggcggtcgtgctgagacggatcgagcagcgcctggctgatgacgcttacgcggatcacgggttgggtttcgacctggcgcggaaccggccgcgtttccctgcgtgttggccgggtcgggaggtgctgcgtgcgattcctgacccgatgtggcagcggcgcccggggcagatcgtggaggaatcggacgacgtggatttcatcaccggcctgccggaagacattgccgaggcgctcgcgaacgcccgcgggtag

SEQ ID NO: 512990 - DNA, 237 bp, Stenotrophomonas maltophilia
gtgaccccgcccatggctgaccagctgctcaccgtgcatccagtgcgcgtagtggtgaacgcgaagttcattgcgagtcccggtgtatccgtgcttgagggtcgctttcagtgcgaactggattgcggccacatcgtcatgcggccgggggaacacgtgcgcggcaccaggttctctattcgggcgccccacagtgcccggtgcaaccaatgcaagaaggagcccgcccatggctga

SEQ ID NO: 512991 - DNA, 234 bp, Stenotrophomonas maltophilia
gtgactgatgcactcaagcatgcaaaggccgcagccaaggcggaggcgtatctgtatgtgtgggcggccgtcgtgcagttgctcgaaggtcccacttcgcccgatcgcgacatgaaggctatcaagcccatcaaccgcgtgatcgcaattgccaagaaggagcagcaacggctcttggcgaagtacgacggcgagcttgccaagatcgacagccaggcggtgggcaatggctga

SEQ ID NO: 512992 - DNA, 1167 bp, Stenotrophomonas maltophilia
atgagcaacgacatcaagaaccttgcggacgtgcagcccggtgggagggtgaggctgggggatcaggcctgcgactggcgattcagcgaatggtggtcaggactgccgcaggacattggcgttctgtacccatacgacatcgcaaagctcgcatggcaagccgccctctccgcccagccctccacgggtggtcagggggattcggacctgagcgcccttgccgccagcattggcgaggtcgcgcaccgcctaagcacctacatgccgcacctgtcggaatgggcagatcgggcacgagactgcaagaaggctgctgaggttctgtcagccctcgccgcccgccagccggtgggggagccggtcgtcgactacgaagacctggtggaccaggccaaggacctgatccagtgcggttgtagcgttaacggtgccctcgattggctgctggaacagctgactgacggcgaagcactcgccgccccgcccgcgcaggccgtggacctggggcagaccttccaggctcgcgtggccgaatggatgggccagtgcttcctgccgtcgctctacagcaacatgaccgagcgcggcgaccgcctgctggaggaagtgctggagctgctgcaggccaacggctacgacaaggcgcgcgtgcccaccctggtcgactacgtgttcggccgcccaatcggcgagcctgcgcaggaagtcggcggcgtcatggtcaccctggccggctactgctgggtggcgggcctggacatgcacgctgcaggagacgcggagctggctcgcatcaaccagcccgaggtaatggcgaagatccgtgccaagcaggaggcaaagaacgccctgcacttcgacacgccgctgccgggtgatgctggcgccgccattgaggaatggccacgcgagggcgacctggttcgatacggtgatggctgtagctcgctcgctatcaggcttggcccgcacgcaggcggctggcatggctatcagtgctgcggtggctacaccttctttaccaaggcatacagacccagccgtgccgatatggacacttggctggactgcgccaagtaccgcgacgagcgcacgaaggtggcagacaaccgcgtcgcgcacgagatgtacctgatcgaccaccaggcggaggtggcccgtgactga

SEQ ID NO: 512993 - DNA, 150 bp, Stenotrophomonas maltophilia
atgagcagccacctccgcctcgcttgggcagtcgtcgcgctggtggccgccgttgtcgtgccactgcgtatcgcggagatccagcaagcgaatgctgaccgtgatgcggccaaggcacgctgggcgatcagcacctcggtgaggggctga

SEQ ID NO: 512994 - DNA, 321 bp, Stenotrophomonas maltophilia
atgagcgctgccgaaactgcgctggcaaccctggaacgcattgcagggacaaacgctgagttcggggccgtggcagctgccacccccgacttcatgattcgcgtcggcgaatccatgttgaagaagcaatccactgatctgcgcacggcccatgccctgctatcggatctggtcgaacagggcgaccgcctgaccgctgcgttccgtgcgctgggcctcgacaacagccagatcaatcgctcgcggctcgcccgagagtgcgaagagtcgatggttgccttcgacgccgcactcgcccgcgccaaaggaggcgctgcatga

SEQ ID NO: 512995 - DNA, 1014 bp, Stenotrophomonas maltophilia
atgaccgacaccgaccacggcgccatgggcgcgccgccggcgagtatcgaggcgttcacctttggcgaggccagcccggtgctggaatcgcgtggcttcctcgactacctcgaatgctggcgcaatggccgctacttcgagccgccggtggatctgcaagggctgtcgcgcaccacgcgctccaacccgtacctgcacagtggcctgacgttcaaacgcaacatgctggtgcgcactttccggccgcaccggctgctgagccgcgaggcgttctcgcagctggcgctggactacaccaccttcggcatggggtacgtcgagcgacgccgtgccatgtcaggcgccgcacacagcctggccgtgccgctggcgcagtacgtgcgccgtggtgtccagcccggtgagttctttcaggtgcgcgccggacgggtagagcatgagtttcccgccggtgaggtgttccagctgcgggaggccgatgccgatcaggaaatctacggcctgccggaatggatgccggccgtgcaggccgcgctgctcaacgaatcggccacgctgttccggcggaagtattacaacaacggctcccacgccggttacatcctctacctgaccgacgcccaggcggatggcgcggatgtggatgcgctgcgcgatgcactgcggcaatcgcgcgggccgggcaacttcaagaacctgttcgtgcactcgcccagcgggaagaaggacggcctgcaggtgattccggtcagcgaggtcgcggcccgggacgaattcaccggcatcaagagcgtgacccgtgatgacatgctggctgcgctgcgggtgccgccgcaactgctcggtatcgtcccgcagaacagcggcggctttggctccatccgggacgcagcggcggtgtgggcggcaatggaactcgcccctctgcagacgcgcatgaccgcgatcaatgagtggctgggccaggaggtgattcgcttcgagccgttcgagctggccccagccacaacgtga

SEQ ID NO: 512996 - DNA, 291 bp, Stenotrophomonas maltophilia
atgctgcaaggcttgtcggaaggtttcgcgttgggcacctggaccatcgtcggcgcggcaatcggccccttggtggttgccgctgggttcggcttccgtaaggtcgtcgcctacttcaacggcgttcccacgcccgagcgcccgttcatggcgtggtgcatcctgagtgctgtcctgttcgcaattgcggggtcgatgtggcaggcgaaggctggtccgttcgccgagtgtcgggcggccggcggcaccaatgcgcagtgcctcatcctgccgcagagcaacagggcgtaa

SEQ ID NO: 512997 - DNA, 666 bp, Stenotrophomonas maltophilia
atgtgcggccgcttcgtccaacgcccggttctagacttcggcatgccgtcgctggtcgacctcgcgccggcgctggccgagatcccaccgagctacaacctggcgcccacacagcgggcgtcggtcatccttgatcgaggaacgggcaggcagctgtcacgactcgcgtggggcctgttgccgttctgggccaaggccaagagcctgcagggctccaccatcaacgcccgcatcgagacggtggccaccaagaacagcttccgagacgcgttcaagaagcgcagatgcctggtgccaatggcgggctactacgagtggtcgatcagcgacgtggacggcaagaaagatccttggttcatccacgccgacggtccactttgggctgcagggctgtgggaggacaccagcccgctgctgcctgacggcaacctgggcaccttcaccatcatcaccggcgacagcagcggggtgtcggccgatatccacgaccgcatgcctgtctggatcgaccctggccagctcgacgcgtggctcacggctgagccggaggaagcgatggcgatgatgctggcttccgagccgcccgctatgcaggcttaccgcgtgagccgggctgtgaacaccccacgcaacaacaccgagcagctcctgcagcccgtagcctga

SEQ ID NO: 512998 - DNA, 156 bp, Stenotrophomonas maltophilia
atgaaatcatccacttatgtgccgtctttttcccggcggcggttcgtggaacgcctgtggttcgtggtcgcatggctgaattttcccggtgccgtaggggggcgtccccagctgcaggcatcgcttacacgctccgcgcacggcagcaacggctag

SEQ ID NO: 512999 - DNA, 306 bp, Stenotrophomonas maltophilia
atgcaggcgcatgggcgtccggtgccgatcaaacctgagcagcgacgccttctcgtttcggagtccggcaccccgctcacgaaatcagccttggacagcgcctggcagcgcctggtccgccgcgcgattgcggaggacgtgatcgaggaggagcagcggttcgcgctccatggcctgaaacaccggggaatcaccgacagcgaggacaagagcgctggcggccacgtgaccgaggccatgcgtcagctgtacgaccattccgtaccggtggtaagagcggccgtgaaaccaaaaaagagccgctaa

SEQ ID NO: 513000 - DNA, 213 bp, Stenotrophomonas maltophilia
atggttgaaccgatgatccgtgacccacatcggtactgcccggactgcggcatggctggctatatcgactacacagaaatccccgcttcggtgcgcacatacacgcgtgctgacggcgagtactcggaccacgttgggccctcccgcgactgcgaatgccgggactgcggcgcgtcgttcacgctgaccgcctgggagaactgccatggttga

SEQ ID NO: 513001 - DNA, 183 bp, Stenotrophomonas maltophilia
gtgccggtcctgcacggtgcactcaatggtgactggctgtggcgcgccgccgggcgtggccagtggccgctgttctgggtcgatgccatcgcgctggccatggccttcggcttcgcccgcctggccgtcgccagccagcgccgcgcccgcaacggcgatccgaacagcgtctgggcgaactga

SEQ ID NO: 513002 - DNA, 420 bp, Stenotrophomonas maltophilia
atgaagaaccagaagggcttcacccttatcgaactgatgatcgtcgttgcgatcatcgccatcctggccgccatcgccctgccgatgtaccaggactatgtggccaagtcgcaggtcactgctgcacttgccgaagtcacccctggcaagacgcagttcgagatcttcgtgaacgaaggcaaggctgatgccgacttcacggcgaccaagctgggtctgccggctgcaccgaccacccgttgcacgagcttcacgatcgttgccggtgccgaaggctcgattgcctgcacctccatcaagggcagcccgaaggcggctggcaatattacttggaagcgcgccgctgacggtacctggacttgcaacaccactgttgctgatgacaagtactacccggttggctgcaccaagggttcctaa

SEQ ID NO: 513003 - DNA, 408 bp, Stenotrophomonas maltophilia
atgcgtgaacaaagaggatttagcttgattgaattgatgatcgtcgtagcgattattgccattatttccgcaatcgcgatgtcgatttatcaaggatttgttgcgaagtcacagcttgtggccgggttggctgagattcggcccggcaagaccacaattgaggctgtcgtacaggatggacgcagtccggcgttggtgaacgccgcatatgtcgggatccgagtatctggacgctgcactgctgtgcgtgccgagctcgccggtaatggagtggccgaaatcgcttgtactgtggatggtaattctctagttgccggcaaagacctcatcctccgtcgcgcagccgacggcacctggacctgcgacggcagcgccttcgaagcgcgctatcgcccaaccggctgttga

SEQ ID NO: 513004 - DNA, 11301 bp, Stenotrophomonas maltophilia
atgaacactatctatcgtctggttttcaaccgcgcgctgcgcgtctggcaggtggcgtcggagctggtgaaggggggcggtggcctggtcggccatgtgccgggccggcagagcgccgcgctgtcgcccctgggcttcgcactgatgtgctcactgggctgggtcagcttggtaccccctgcgctggcgcagtccgatgcgcgcatcatttccgaccccaatgcgccgggccgtgaacggccgacgatggtgacggcccccaatggcgtgccgatggtgaacatcaccacgccgtcggcggcgggtgtgtcgcgcaaccgctattcgcagttcgacgtgggccgcgatggcgtcatcctgaacaacgcccgcggccaggtgcagacgcagctgggcggctgggtacagggcaacccgtggctcgccaccggcagtgcacgggtgatcctcaatgaagtgaatggtccggccagccggctcaacggctatgtggaagtggccgggcagcgcgccgaagtgatcattgccaacccggccgggatccaggtcaacggcggtgggttcctcaatgccagccgggtgaccctgaccaccggcacgccgatgttcacgggtgcaggcgcacttgagggctaccgcgtcaccggcggcgcgatccagatcgatggcgatggcctggacaccagccgtgccgactacaccgacctgatcacccgttcgttgcaggtcaacgccggcatctgggccaaccagctgcaggcgacgctgggcaacaacgtggtcagtgccgaccacagccaggccagcgcgaccgcggccagcggcgaggcaccggccttcgcgctggacgttggcgcgctgggcggcatgttcgccaacaagatctggctggtcggcaacgagcacggcgtgggcgtgcgcaatgccggcagcattggcgcacaggccggcgagctggtggtgacggtggatggccggctggaaaacaccggcgccctgcagtcgcggcagaacgtgcgcgtgcaggccagtggcgatcttgccaatggcggcaccatcgcggccacgcgcgaagttgcgatcaccgccggtggcacgctggacaacagcggcggcacgctcaatgcacagcgcctgcaggtggaggcgcacgggttgcgcaaccatggcggcgccattgaacagaccggcgcgcaagcgctggcgctcaaggccgacgcagccagcaaccgtagcaatggcctgttgggtgcactggatgccgtagcgtcaggtggtaacgggagcagcgttggcagcggcacgtcgcccggcaatggcggtggaacacccggaaccggaggcggcaatggcggctcggcgggcacgccgacgtcgccggagctgcccctggccgagggcctgatcgccatcgccggtacgctggacaacgacggcggcagcatcagcaacggcggcacggtgtcactggccgcacgcaacggtctcgacaacagcggcggtcgcctgggagtgagcgcgctgcaggctgggggcgagctgcgcaatgatggcggcacgctgcaggtgcatggcgatgccgcgttgcatgtcggcctgttgtcgaaccagaagggtgcgctgagcgtggccggcgacctgtggctggatgcgcagtcgctcgacaaccgcggtggtgaactgcggcacgccggcaaagcggcatcgtcgtggacggtgcagggcctgttctacaacgacggtggtctgctggccaccaatgccacgcagttggcgttgcgcgcaggccaggtcggcaatgccggtggccgcattgaacatgccggtgagggtggcctcacgctggacacgggtgactgggctggtcccggtggacggctgagcacggtggggcgcctgcactggacgactggcaacgccgacctgcgcaacggtgcgatcagtgcggcgggattcgacatcgtggctggcatgctggacaaccgcggcggcagcctgctgtcgctcggaaccggtgccagttcggtgaaggcgtcgaacctggacaacggcgcaggtggcacgttggccggcaacggcgacctgatagtggccgcgaccacgctcgacaacagcaagggcctggtgcagcaggctggcaccggcaccctgagcgtgcaggccgatacgctgcatggcagcgaggggcgcctgctcagcaacggcgcgctggtgctgtccggcggcgagttggacgtgagtggtggtacgacatcggcgcagagtgtgcagatccacgccggggcactgcgcaaccgccagggccagatcgtctcgcagggtgtctcggcgctggcgctggacgtacgcgatgcgctcgacaatcagggcggccagatcgtcggcaacggcggcctgcgcatcgacgccggtcgcatcgacaaccagaagggcacgctgcagtcggccggcacgcagggtctggtgctgacggtacgcgactccctggacaacacggggggcgcgatatccggcaatggccaggtgcagctgcaggccgacaggctggtcaaccagggcggcaaggtactggccgcaggcagcgctgcattgcaggtgctggcccgcgagctgctggacaacagcaacggtggccgattggccggtaccggtgatgtgcagctgcaggcagcgcgcctggacaaccgcggcggcgcgatcgaacacgccggcagcggcatcttgcagatccacgccgacagcctgcagggcgcggcgggccgcatcctcagccagtcgtcgctgatgcttgagggcggccaactgcagctgggggccggcagcattacccaggccgagcgcatcgccatcgatgcgcagcacctggacaatgccggcggcaacctcagcgcgaccggcagcgacgcgctgcggctgcacgtggcgcagggcgtggacaacagtggcggcacgatcgccggcaacggggcactggatgtgcaggccggtgaactgatcaaccgcacgggcacgctcagcggcgccggaacggctgacagcacgctgcagatcgtcgctgcgctggacaaccacgaaggcacgatcgccagcaatgccaatcgcctgacggtcacttccgcacgactggacaacagtggcggcagcatccgccaggccggcaaccagggcctggacatcaccaccggccgcctggacggcagcaagggcacgctggtctcctcggccacgctgaccctgcgtgctggcgacgtggatcatcgtgacgcgacgctgggcgccgatcgcctcgaccttgaggccactacgctcgacaacgccggtggccgcatcatcgccagcggcgaaggcgccagtcgcatcaaggccacgacgctgggcaatgccggtggcacgctggccagcaatggcgacctggccctgctggcacaggcgctggacaaccgtgcaggcaggatccagcacgcggggagcggccagctgcaggtctcggcgaagaccctgctgggcaacggcggcagcgtgctcagcaatggcagcttcgcgctggatggcgccaacctcgatctggccgcggcaaccacctcggcgcgccgcgtcgacatcaccgccgataccctgaccaccgccggtggcacgctcaccgcaaccggtgaagacgcgctgcgcctgcgcgtacagggtgtgctggacaatcgtggtggcacgctggcgggcaatggcgcgctggatgtcatcgcgcagcagctgatcaatgcacagggcacgctgcagggtgcaggcgcgggtcactccacgctggcgatcggccgggcgctggacaaccagaagggccgcatcctgctcggcggtgccggcacggtcaccgcggccagccttggtaaccagggcggcacagtgcatgcgggcggcagcgcgctggtgctgggcgttgacggtcgtctcgacaatggcgagcaggggctgctgtccagcaccggcacgatgaccctgggcgccggcagtctcgacaaccgccacggcaccctggtcgctggcaaggacctgagcgcgaccacggcggcaggcgtggacaacagcgacggcgcgatgcaggccggcgaacggctgcagttgcagggcaacggcctgctcaaccagcgcggcacgctgctgggcggccagctggacatcgatacccgcggccagcggctggacaaccgcgccggcacgctgggcacgcagaagggcgacctgatcgttcgcagtggcgcgatggacaaccagggcggtcgcgtgcagtcggcggccgacctggccatcaacacggccgggcaggacatcgacaaccgcgccaccgccggcagcggtggattgctggcggccgggaagctgcagctggatggtggcgcgctggacaaccgtggcggcgcagtcaatgcacaaggcgatgcgcgcttgctgctggcccgcgtcgacaacagttccggtggaacacttgccagcgccgcgaatctgtcgctgcaggcggcgagcctgggcaatgccagtggtcgcgtgcaggccgggcgcaacctcgacctgaccctgggcgggcacctggacaacgccgccggtgcgatcgcggcggggcagctgctggccctcaacgccgccagcgtggacaaccgcaacacccgtggcggcgacggcacgcgtggcctgcaggcgggccagctgcagttcggcgcccagtggctggacaacagccagggccaggtcgtcaccgatggcggtgcgcggctgcagatcaacggccagctgcagaacaccggcggcgtgatcagcaccggaggcaacctggacagccaggcggacaacgtcgccaacagcggcggcctgctgcgcgccgatggcagccagaccctggtcgcacgtgcgctcagcgaagacggccaggtgcatgcgcagcgggacctcggcctcatcctgcagcagggcatgcgccatcgtggcgaatggatcgccaacggtacgctgtcgctgaacctgtccggcgacctcgacaaccagggtgtggtgcgcggtggcaacctcgacctcaacgcccagaacatcaccaatgccgcgtcaggcgagatctccagccagggcacgacccacctcaacgcccgtggccagctgaccaaccgcggcctgatcgatggcgcgttgacccacctggaggccggcgaaatcgacaatctcggcaccgggcgcatctacggtgatcgcgtggcgatctccaccggcgtgctgaagaaccgcgccgaagaggccggtggtgccacccgcgtcggcaccgtggctgcacgcgagcgcctggacctgggcgtgcgcgagctgcagaacaccggcaagggcctgatctacagcggcggtgatgctgccattggcggcacgctgagtgccgatcgcatcgccagcggcattgccgggcggatcgacaacatcagctcggtcatcgatgtcaccggcaacctgtccatcgatgcgcaggtggtcaacaacatccgcgagaacgtggtcatcacacagaccaccaccttgaacgctccggtgcgcatggatcgacccgcctggtggcgcaacggcaagaatggcaccgaggacattcgcagcaccagccattattccgcgcacgaggtgtactacctcgacccagccgatatcctcgaagacacgccgcacatcacgccggatggcttcaccgtgcaccgtgcggtggtacgactgaccgcgcagaccagtgcctacttcttcgggcgcggtgggctgtatgccgcgctgggtgagcgtgcgcggctgaacgtgcaggacggcacggtggtgatgtactacgtcggccgccaggacaaccaggtcaatccggaccaggttgccgctggcgccgacgatccgtttgccgagctggccaccctgcatcccgattcgccgccattccgctacgtcgatgacaaactcacctactcgtcagcgtatggcacctgtacgaccaactgcgtgcagttgtggacctacaaggactacgatcccgaccgcattctgaccagcccacagtttgcgggcggcaactccaccagtgccaacgagcagtatcgcctggccacgcgcaccgtgaccgaagatgtgttgcagccgagcgtcggtgccgatgcggtcatccggtcagtcggtgcgatgcgcatccgcagcgatgacctgcgcaaccactacggcagcattgccgccggcggcgatctggacatcatcggcctgaccggcgcggcaaaggtggagaacctggcggccacgctgtatcgcacgcaccagttctccaacgtcagccacaccttcggcggggatgtgatgacctggagtgctccggccatttccgaggtgaccggtaagattggcggcagcattgtcagcggcggctcgttgagcatcgacgtcggtgacctgagcaacctcaaccagggacggaacgcgccgaacgtgcagaacggttcggccatggccaacctcaacgtgcaggggcccacggcgctgccggatgggccgggtcatggcggtgcgcaggggccgggccagtccgccggcaccggtgccgaacgcgcgctggcacaggcggccgatggtgccagtacccagcaagggagcagcgtcggcggcgtgagcggcaacaccggtacgtccgggccgcgcgtggtcgcagccagtggaggatcgccggatcgcatcgcgatgggtgcaccggacacgcgcgcgccgagcgccagcctgttcaacgtcaatcccaacggcggccactatctggtcgagaccgatccgcgcttcaccgaccacaagacctggctgagttcggaccacctgctgggccagatgggctactcgcccgataccgtgcagaagcggctgggtgatgggtactacgagcagaagctggtgcgcgagcagatcggccagctgaccggtcgccgcttcctcgacggctacgccagtgacgaggcgcagtaccgcgcgctgctggaggccggtgccacggtcgccagcgaatggggccttcgccccggcgtggcgctgaccgaagcgcagatggcacagctgaccagtgacatcgtctggctggtcgagcagaccgtcaccctggccgatggcagcaccaccaccgcgctggtgccgcaggtctacctgcgcctgcgcccgggcgacctggacggcaacggtgcactgctggccggcgccaatgtcgatatcaaactgggcaatggcctagtcaacaccggcaacatcgccgggcgcaagctggtgaccatcgatgccggcaacatcgagcatctgggcggcagcatttccggccagtacgtcgggctgtcgtcggacaaggacatccgcgttgtcggtgcagccgtgacggctagcgatgcgctgtcggtcaaggctgcgggcaatgtcacggtggcctccacggtggagacacagcagggcggtggcacctaccagtacgagaccaaccgcatcgatcgggtcgccggtctgtatgtaaccaatcccagtggcgacggcatgctgtcggtggtggccggtggtgacatcagcctgcaggccgcacagatccgcaacgccggcgccgacggtctgacccagctggccgcaggcggcactctggatgttggcgcgattgcgctggaggaacgccgcgacgccaccttcgatgaacgcaaccatcagcgcagcagcaggacgacacacgctgccacgtcagtgcagggcgctggcgatgtggtgctggcggccggcaaggacatcaacctggcagccgcgcagatcaatgctggtggtggcctggcattgcaggccggcggtgacatcaacagccaggcgctggtggacagtgagagccgggattttgcgaacgcgggcaagcgcagctcgctgcagatcagccagagtgatgagacggtgcggggcagccagttgtctgctgacggcggaatcgcactcagtgcaggtcgcgatgtgaacctggtagccgcggaggtacgaagcgaacaggatgcgatcagtattggtgctggccgtgatgtgaatctgacatctgcgcaggaagagcatacctgggagcaagacacccagcgcaagaagcgtgggctcacgtccactacgcgtaccgcaacgcacgatgcgacccaagacatcctggccattggcacggttttgtcgggtgagcggatcagcatcggcgcaggtcgtgacatcacagccgagggcgccaagattgcggccactggcgatgtagtgatggctgccaagggcaatctcagtattgttgctgcggagtccagtcattccgaacagcacagtagcgatcgcaagaagtccgggctacttggagggatgaatggcagcttcggggttaccttcggcagccgaagcagcggcaacagcagttccctgaccgagacgatcgcggaaggaagcatcgtcggcagcgcgctgggcagcgtgacactaacggcgggagaaacgctgcacatcggcggatccgatgttctctccaagaacggaatgacgttgcttggcaagaatgtacgtatcgattcagcagaacagcactcggagtacaacgacaggaactacttcaggcagtccggtctgaatgttgccgtgggcggtgcgaccgttgatacgattcaaagtgcacgcgccgtgtacgctttcgccaagcgcgcagacgaggtcgaggacgatcgcctcaaggcgctctatgcgtacaaggcggcgcagggtgcaatcgcggtggcccaggctgcggggcagcagtcgggcgatggcggtggcggcgccggattgaacgtccgggtgaccgcaggaacccagcgatcccagtcggaaacgacgatggagcagacgacccatcgtggcagcacattgcacagtgatggcgatgtggtgatcgcagccacgggcggtgatctgaccgtggtgggcagtaacgtgtccggtcgcaacgtagatcttgcggcggccaaggatctggtgatcagaagcagcgaggatcgctatgcccaggacagcagaagccagtcccagggtggagagatcggtgttgcgatcagtggaagcagcggcggtggtgcagcgatcggtgtctatgttggcgccaatgccgcgcgtggcaaggccgacgggaacggcaccgtccacaacgaaagtatcatcaaggccggggatcgccttacgtttgcgagtggtggagacacgactttgcagggcgcacagctggttgccaaccaggtgattggcgaggtagcgggcaatctgacggtgcgcacagaacaggacacggatagatacaagagtcagcagcttgcggcgaaaggtgaagccacgattggctatggcttcgagggtagtgccagcggcagtgccgccttgattgacagtgactaccgtagcgtccgtgagcagacgggaatcgccgctggcgacgggggcttccagttgcaggtggggggcaacacgcatctggtcggggccgtcatcgcaagtaccgcggattcctcgaagaatctactgtcgacgggtagcttgacggttgaggatctaaacaatcgagcggagttcctttctgcatcgatcactggcggtaccagcggcggtgggagtccctcagacgggttcaatttcaacccgtcggtgatgccgggcatgccgacgggggacagcaggaacaccaccacgcggagcggcgtagccgacggcacgatcgatatcagaaacggagacagcagcacgctggcagacctgcagcgcggcgtaaccagtctggacaacgccaacgggtttgcgcccatctttgacgagaagaaggttcaggagcggcaggaactcacgcagatcctgggagagatcggtttcaaggccgttggcaatctggcctccaagaagagtgcccaggccaaggtggacctggaagttgcgcgcgccaatggtgatgccgaggccgaggcagacgcgctgcggcggatcagcgagtggggtgaaagcgggcgcaacaaggtcttgctgcatggcctgacaggcgctgccgttgcggcattgagtggcggcgatattagtggcgccgctgcgggtgccaccggtgccgcgctggccaaggaggcaatgacgcgtttcctcacaggccagggcatagatccgcgaagtggtgagttcaacagcttgatcgaactcgccagtgctgcgctgggcggggtcgtgggtggtaccgttggtgcgggcacggcgctgctgggagatcagttcaatcgacagttgcatcctgatgagatcaatttcctggccgcaaaggccaaggacttcgccaatctgctgttcggatgcggggaaaactgtagtagcgatcaggtcaaggtggcgcgggggcgtctgttgcgcgaagcctacgcacgtgtagatgccatatacggctcgtacgagtcagactttgctgcgtcaagcttcattggctcaaacccaatgacgttcgttggtcccgatggtcagcagcgcgaagggctcatagaactggacaatgatcgccgcaatgaccacagcctgtacaaggatctgcttggcacccggcgaacggaattcaatctgttgacggaagcactgctggacggtgggaaaaccgaagcggcgttaagactggactacaaccggcagctcgctgagctcgccacgagtgcacgtggccgtgatggagtgatgatcctcgaaaccttcagtggagaaatcgggggatggggctcagtagtaaagaatgtactgaagggggatggtgagtctgcgagccttgcagctgcgcctcttcttattttcaccaaggtgccgggggccaaggccgcagccgagttggcggaggacctagcgacgcagattgtgaagggagctgcgtctcgggccgaggcaacagcaggcacaatgagtgcgaacattggcactcctttgaccttcaacaaggcgacccggacttggagtagtccgggagggcttgactatgggatgggctctatacatggaaatcgtatcaagcacatattggcacatacggttccaaacccagcaaaggtcacgcattccgttttcgttgaggatagatccaagttgatctctcttatcgacgaggcctggaggatgaagggcgctgcggtgcctggagatccgggggcattcatagtccctatggggcgagtaattggcactgccggtgagaagaacataagaattattgttaagcctggcaccaataaaataatatctgcgtatcctgtacagtga

SEQ ID NO: 513005 - DNA, 549 bp, Stenotrophomonas maltophilia
atgaagcgcgaggccaagaggagcggtctgcgagtcgttggcaattttttgatcgcgttacatacgcgcgatgttatctcaggcttcacattggatcctgcgccatcctctacctacatatggaccttcgtaattccgacatatgatgatttgccctacctgcacatgtctctaggtcagaggattgcaagcgcggaagtggataaagttttttttcgtggaatgcatgaggcgcatatcaaaaagcttgaggcagtgagaacggcggcagacttgttgctctatgtcgacagtcttgacttcacaagcgactattcagaatgggtaaagtacatatccgccatccggctgggcgatttcgtggcggcggacgcgacgctgaagacgcttttgaagttgccaatgtccaatgctattaaaagtagattagatgcgattctttctgtgctgaagaatggcggtgaatcgggcgcgcagcatcttttggatgcgtggtctgttcagacggatcgattagtgggcggcagctcctggggcagcggacggtag

SEQ ID NO: 513006 - DNA, 600 bp, Stenotrophomonas maltophilia
atgctcggcttcccggacaggccggaaggcagccgagcgcgggctcggctttacagaaagcggccagccaggctgcttttgattttgttcttctcttcttctccgtgggtggacgcgcccggaacccggccccacccgcgaacagcttttcgcgaccacccacgaggggcggcgccgttggccgaagacttcctggcgctgcgcattgcccgttgtggaagcgttctcacaacaatgcgacgcaacacgctccccgacgaaagtccgcaaaaaacgttagctggttcacatttttacaccgcgttgatcttgatcaatggacttgtcgtaatcggcctgcacaatggcggcccgttcggcacggcgcgccgtcaatcgatgcagcgcgagggggcgtcgggcgggagcagtactgatccaacgggtacagggagcgcggggaactgccactggggagcggcagccgcgcaggtaccgaccggatccggtcgccggttgcgtctgcggggatggggacgcaaccggccacctctatctgaatggggaagctcgatcacgacgtcttcacatttcccgctgaacgcgggcaaatcgttgtga

SEQ ID NO: 513007 - DNA, 213 bp, Stenotrophomonas maltophilia
atgaacaccgaacgtgatggctaccaaatgagcctgcttttcgagagggaagtcgatcgaagagtaagcgccgaaaaggttagcaacgtggtccagctactacctatgcgcgtaaagacaaaagagaatgatgcgcattcgcaggagtgggctcgccgtcagcttctggaacgggtactcaatcacgccgaatcgcttaagcgacagttgtga

SEQ ID NO: 513008 - DNA, 1668 bp, Stenotrophomonas maltophilia
atggcttcaccagggaaaaaaccgtcactaaagatcgtcgctcagggtcttggctccgacaagaatgcacgtgaaactcttgaggctctcgagtcaaaggaattggtgctggcattcgctggcccgattggatcgggcctaaggactgttgttgagacatttgaagcccagctcaccgagataaattacgacgtcgtcgtaatcaaaatttcagagctaatgtcaaagatttctttgactagtcagtccggtgttcaaatccctgacgaacgtgggatggatcgatacgaggcgttgcagcgccacgggaatgagcttagaaatgctcacggtaatgattttctcgcatatctctgtcttcgagaaatttcggttgaccgtgctgctcggcatcctgatcaggacgttggtagcgtaactcctagccgcgtttgctatcttatagatcagataaagcacccagaggagattgagcttcttagggcagtttatggttccaatttctttctcattggagcgctttgtggttttccgcagcggaagcaaaaccttaggcatgagggggtggcgccgactgacgcggagatccttatggatagagatcgaaagcaagctgagaagtatgggcaaaagctagagaagacgcttcagaatgctgatttcttcataaggaatgctcggtccaattcgaagcagctttcggcgcctgttcgacgcttccttagtctgatgcacggaaaagttggggtcactccaacaattcaagagcagggtatgtatgcagcctattcggccgcattgggctcagcttgcctatcgaggcaggttggtgcggccattcaggataagcgtggtcatcttatttctgttggttgtaatgacgtcccgcgtggcggtggtggcctgtatcgggagggtgacgaaaaggctgatcatcggtgcgtacatctcggcggagggcagtgcttcaatcatcgtgagaaagacgcgctgcggaatgaaatacagaaaatatctgcagccgtggcaaaaaaatgcctcgactctatcaatgcggaatcaggaaaggatggtccggggatcgatagtgttgggatctcaaggaagctcggggtattgattgctgccgaactcagggatgaatcaagggtaaaagatatcctggagttttcccggtccgttcatgctgaaatggatgcgctaattggactctcgcgtgagactagtggttcatcgcaagatggagttctctatacaaccacctatccctgccataactgcgccagacacattgttgccgcaggtattagggcggtttactttatcgagccttacgaaaagagcttggctgttgagttgcacggagatgcaattgaccacgggctagatgaagagccatcgcttcatgagtgggagcggcactcccggctcaagtcccgaaaggtcgcattcttgcactttgagggtgtggcgccacgcaggtttgtcagcctatttaatgacgctggcgagcgaaaggatgagagaactggtaaggcgattgcatttgtcccgagagatgcgtccaagcgctcgagagtgcatctggagggctacattgaaattgagtcgcgggtcgtgcagctattggagaagaagttcgtcgatggaatgatcttcaacgcatga

SEQ ID NO: 513009 - DNA, 645 bp, Stenotrophomonas maltophilia
atgccctcgtcaaaacgtaatcagcctgtgcctggtgaattctatctgctgatgcccgacacgactcgaaggggaagagggcatggcgttgagatcgagaatgaggacgcactgctgacgcctcccaggctgatcatccgccccgaagaaggcggctttcctcatctgtcgcagagaccgcgtctggtgctcgatccaaagctgggggatccaccgcaggacctcgaaggaggaatgagtggctactggttggtatcagagcgcctcaagatggccttcaccgaaatagatcccgtcgcctttgagttcgtggagtgtgattacgtgcttccggacggcacagagggcccaacgtaccacctgtgcgaggttgctcgcgagctggatgccgtcgatgaggaagcatcgaagttccgggtcatcgtcgatgagggctatccgggcgggaagttctacgaccttcgtggcggagcaagcttggcattcaagagtgacgtaattggggacagtcatgtcttcaggagcccgtactccggcgatcttgtctactgcgatcgcatgttccgggatgccatacgcgctgcgggaattggaagcgagtgtgaaatgcgtggcctgaggttcaaggacgcagccaatgtctga

SEQ ID NO: 513010 - DNA, 495 bp, Stenotrophomonas maltophilia
atggcaaccaagaaagctgcgaagaagaagcccgccgccaagaaagcggtgaagaaggtcgcgaagaaggccgctgccaagaaggcagtgaagaaggtcgcgaagaaggcgactgccaagaaggcagtgaagaaggcggcgaagaaggtcgccaagaagaccacggcgaagaaggcagtgaagaaggtcgccaagaagtccactgccaagaaggccgtcaagaagaccgcgaagaaggcggccaagaaggccaccaagaagactgccaagaaggctacggcccgcaagccggccaagaaggtcgcaaagaaggcgactgccaagaaggccgtcaagaagaccgccaagaaggcagtaaagaagaccgcgaagaaggctaccaagaaggccgccccgaagaaggcagcgaagaaggttgccaagcgcaagccggccgcccgcaagaagaaggccgctccggtcgctctgccggcaaccccggcgccgctgatctaa

SEQ ID NO: 513011 - DNA, 207 bp, Stenotrophomonas maltophilia
atgggccggcaggcgccgcccttgagtggactatatgcaggtaaatacctgcatgtcaaaatcggccacgaacgcccggatgtggtagtgccggccgctggccagcatcccgctggagttgggtgcgtgcagttgccggccagcggccggcactaccagatgctgcccacccggcagcggggagttgacagcgagtcaacctactag

SEQ ID NO: 513012 - DNA, 678 bp, Stenotrophomonas maltophilia
atgctgctgtataagttcaaaggcagtgcggattcgctgtacgcgcttgatattgccattcatgagcgccttttctgctctccatacgaggcgttgaatgacccttttgaagggcagtttcgaaccctcgtgtcgggaccaccctcgccggcttttggcatgcagttcggggggaacttcggcccaggtagaggccgcgaggtttatacaaatgccggcctcgcgcgcctcaccggcggcaagaacgtttgcagccttactactgcctggcaagacgttaggatgtgggcgctctatggcgacagttttcgcggcctcgcgtttgagttcgaggtcgatgacaaccacccccagctccgacaggttcagtatgtcgaccgcttaccgaagatcgacacgggcctgctcacttccagcaccttcgaggacgcccttagctacaagacgcaccactgggagtacgaggcggagtggcgcttcataactgaccaatcctatgttcttctagaggggcgattgcgaagcatcctgcttgggacacgtgtgcctgatgcggtgaaggaagcgatcctcaagatcgcgccccccgattgcacggtgcatcaggttggcctagaccccgaaggcatccgagtgacccgccacgtgcagctaccgcgacctcagcgcaacgtctaa

SEQ ID NO: 513013 - DNA, 213 bp, Stenotrophomonas maltophilia
atgtgtgaactgatgatcctcgaccccgccaggcactgcccggactgcggccaaaagggcgtcctcgacttcacgaacgttcccgcttcggtgcggacgtacacccgagaggacggcaactattcggaccacatcggcccttcccgcgactacgagtgccgcaactgcggcgcctcattcacgctcaccggctgggaggcttcccatggttga

SEQ ID NO: 513014 - DNA, 615 bp, Stenotrophomonas maltophilia
atggagggagttggaactactcgacgagccaatgcagcactgaagagtgacagcttcaaaggctcagatggatgcatctgcaactgcatcttcgttcttcaatcgtgtggctggacagttagaggattgctgatcttgtgtggcgagaatgaagttgcagagttggagagtctggcggagcaggctccttctcttcgcatgctgctgagcaggaaatggcggaacttcgtgtgggaagacgagtacagcatgctacgtgcgcgagccccagggccgcatcagccagatcggcctgacccagcccggccaggcgcgccagatcgtggtgaacaacgtgacccatgcggccttcggcccggcgaccggctggacctttggcaacggccgccagctacagcgtccgctggatctggactaccgcccgcaagtggtgcacgacccggccgcaggtggcctctcgctgggctatggctacgacccggtcggttcgatcaccgaattgaagaacggcgcaggctcgacggtgctggccaagtacgcctacgacacgctgggccgcctgactcagacccaggacggcacgaccggcaccccgatcgaaacctatgcctatga

SEQ ID NO: 513015 - DNA, 915 bp, Stenotrophomonas maltophilia
atgcgccatggtggacggcgtgctgaagtaggtcttgcgccacttcttgtgcatcgccatgccgctggcgaccttgttcagctggttgaaaccgtaggtccagaagaactcgtcaaagtagaaattgccgtggtagccctgtgcggtacgggcgttggtccccaggaagaacaactcggcgccattggccagggtgatcgggtcgccggtcaggtcacggtccagcacctcacgcacgaagccccgcatgtagccgaggaagatgtgcgcctggctcttggatgcgctcaggaaaatctggttgcggccggtggtcagcgcgtcgatcagcgcctcgcgggcgaagtagtaggtggcaccgatctggcgcgacttcaggatgatgcgcgtgcgttcgttgcccgcccggtaccaatcgcgctggtagtcgaaacagccatccacgaacgccgtctgcaggcgctcgatctcttcctcgctgaactcgttcttgcgcgccttcttcttgggagccgcgttgcggttggccaccgccggattgaggtcagcctcgttgccaccaccctggtaccgttgaatgcgcgcctgccgttccaactggcggtgcagcagatcaatctctttgaagtcaccgccggtcttgccttccttgtggatcaggatggccaggcgtgcctccaatgcgccgccgatgcgctcgacggtgtctgcgcggtcccattcgtctcgcgctttccagctgtggaccgtcttttccttttcgccgatcagcgaggcgatatcgcacacgcgccaacccatccagtacaggaacttggcttggcgtcgtggatcgacgtggagtttttcggctacgctggtcacgtgaacaggttgcccgccgccacgcgcgcgcgacacgaaaaacccacgtag

SEQ ID NO: 513016 - DNA, 510 bp, Stenotrophomonas maltophilia
atgtccatgcccagcaagctcaagaatctcaacctgttcaacgacggcctcagctatctgggccaggtcaccgaggtcaagctgccgaccttgacccgcaagatggaggaataccgcgccggcggcatgcttggccccgtcgatatcgacctgggccaagagaagatcgagctggaatggaagtgcggcggactgatgcgcgacgtgctgcgccagtacggcgccatcgcccacaacgccgtacagctgcgcttcgctggcgcataccagcgcgaagacagcgccgatgtggatgcggtggagatcgtcatccgcggccgccacagcgagatcgacgccggcacgggcaaggtcggcgacgacaccgagttcagcgtgaagaccaccgccagctactacaagctgagcatcaacggccgtaccgagatcgagatcgacatggtcggcatggtgttcatcgtcaacggcgtggacatgctcgccgcacagcgccgcgccatcggctactga

SEQ ID NO: 513017 - DNA, 1128 bp, Stenotrophomonas maltophilia
gtgccgagcaggttcacgcctgctccccacacgcaccccatcggcgacgtagatggcctgcagcccgcgctcgacggcaaagccaaccgtgccggagataccttcaccgggccgctggcggtgaatggtgccatgctgcgttcttacggatggaatggcgtagccagcaacggaatcctggtgctgggtgataccggctcctccatcgctaagaacggggcctacttcgacttcaccaactcggcgggtgggtacaccgccacgctttcatccggcggcacgatctggaccagcggcaactttgaccctgccaaaaaggtgagtagggccggcgacacggtgaccggcgcgcttaactggaactacggcggggcatctgttcttcgggtgaccaaccagggtgatggcagcgcggcgttgcaggctgtgaatcaggcgggcaccaacttcgcaactatgtttgtgcggggcgacgcttacgacagcaccttcgctggcacctacaagatcaacacgccgcaactgtcggtcaacggcccggcaatccccggagggcaatacgcgggttacgtcctgcaaaaacttacggcacaaccgggcgcaaacgctgacatgctgcaatcgcagtactttcgcgccaccaatgattccaacaccagctggtccgccttcaactggcggatcggccggcaggtggatgcgaccatcatggggtacatcgaattccagggcagtaatcagaatgtgctagtggtcgccggcgggggcgtcggtcattttaccttcgccggcaacggcgcattttcgtgcaatggcggtttcgacttcggttcgtcgcgcaagctgaaggacattgacgggccggtcccgtatggcctggcggttgtcgagcgcatggagctggccgcaggccactacaagccggaatacaacggcgacggtcggcgccgactgttcttcgttgccgagcagctggcagagctggtgcccgaggctgtggatcttgagggcgtcgagttcaacggcgagcgcgtcccgtccatcaagctcgaccagctgctgcctgtcctggctagtgcgattcaggagcttgctgggcaggttcgagaactgcgggagagcgtctga

SEQ ID NO: 513018 - DNA, 621 bp, Stenotrophomonas maltophilia
atggtggtaaaggcgctgaccagccagccgatggccttcaccgccatgcgcaggttcaccgtcagcacggtgcccaggatctggccgaacccgcgcccggcatcggtggcgccctgcagctgctcgctggtggcctcgaacggggcgaacagcttcatcacccagccccacgcctggctcatcgccgaggacaccatgtcccacaccgggccgagcggttcgagcgcggtggccagctcggccatgatcggattgaccacgtcgacaatgccctgccaagtgccaatcatgaatgccttgatcggctcccagtatttccacaccagcgctgccaccacgccgatggcggcgccgatggccagcaccggcaggctgatgcccccgagcagcggcagcagcatgcggccaacgttgagcagcatcgggaacgcccggccgcccaaggaaagcacctggcccaccagcttgcccaagccgccgcctccgctgagcagcatcacggccttgtggatctgcgtcagcgccatcgcgccgacaccacctgcgacaaccaagccgccgagcgcagcagccagcgcggtgccgccgatgaccagcttggcgatggtggcgaccatctga

SEQ ID NO: 513019 - DNA, 447 bp, Stenotrophomonas maltophilia
atgtatccgctacaaaagaactatcagtaccaccctgttgcgctgacgctggccaccataattgaacggctgacgttgccgccgccgcgtcgcatgaggcagtggaactcgacgacggcgctcgcgctctggcttgatgcgctgggcacgctgacctgggcagagcaggactgcgagctgctggcattgcgccagtccggcgccgtactgccaacgttcgccgcgcctacgttggcgaactcaaagcgcacgtcgtactcgcccacgccgccgttgcgtagccacgtgccgctctcggcgatgcgactggagttgttgccgccgccggtcgttgatacccagacctcatatgcaccattggcgttgatgcgaagctcgacctgtgcggaggtagtgcctggcgcgttggtgtcggactggttgtgtgcggagaagaccttgccgtga

SEQ ID NO: 513020 - DNA, 255 bp, Stenotrophomonas maltophilia
atgaaggtacccagggtgccctggaagaacatcgcagccattgggggcgcagtcaggatcagcgtcgtcagaatcagtcccatgccgccctgctgcagcgccatgctgctcatgccctcggtcaggttcgaccccagcagtgcacccagcgcagacgcgccccagaacgaagccgccacgcgcgccaccatttccatggcaatgccggtcatcgcagccaacaccgccatcgagaacatggtgccgatgccatag

SEQ ID NO: 513021 - DNA, 168 bp, Stenotrophomonas maltophilia
atgccgctcaccgaacgggtgttggtcacccgcgccgctgatggcagcgtgcagctgcagcacctgcccgagccgcctgcagaggatgcccacgccgacacactggccggcggcgtcctggtcgcagacggtgtccagatcgccaccctgccggcgattacgcagtga

SEQ ID NO: 513022 - DNA, 315 bp, Stenotrophomonas maltophilia
atggatcagtgcaatgcgcgctacgcggccggtgaagccgactgccacctcattgggggtcacgcggacgcgaaggtgccgcgcctgccggatcttggcgaacattgcgccgcgcttgatgcgcccggccttggcccgacgcaggggcgcggcacggcgcgccgcgtacggcgtgccatcggggttcttctgcgttgcgatgcgctgctgttgtgcccggcgcagcgcggtaccgaccttgcgcgccagcgtgccgcgttcggccggctgcagacgccgcagcaggggcgcggcccaggcttccagtcgctgtag

SEQ ID NO: 513023 - DNA, 135 bp, Stenotrophomonas maltophilia
gtgaagaccaccgccagctactacaagctgagcatcaatggccgtaccgagatcgaaatcgacatggtcggcatggtgttcatcgtcaacggcgtggaccagctggccggccagcgccgcgccatcggcgcctga

SEQ ID NO: 513024 - DNA, 282 bp, Stenotrophomonas maltophilia
atgttcaagttcggcgatggcgcggtcatcagctacgacagcgcgtcacatgcgctcgcagccatcttgcccagcggtggcattgccacgatcaccgcaaatggcggcgtgacgatcaacgggccggtcaccattaacggcgataccagcatcacgggccaggtcaccatcaacggcaaggcggaggcgtccgaggacgttgtgggcggtggcatcagcctcaagcagcataggcacggcgcggtacagccgggcagcggcacgtcgggaccgccggcatga

SEQ ID NO: 513025 - DNA, 276 bp, Stenotrophomonas maltophilia
atggctgaactactgaccaccgccacgctgctgtgctgcgtggccatctgcgtgcgcctgctgacctaccggccggcccccaacgccaaccatcgacacggcgtcgcctggtgcgcctggctgctgattgccagcaccggtgggcaggccctgcagatcatcctgcagggcgccggcgcccgcgtcaccgcttggcagctggcactgttggtggtgctgatggtggccgtctatcgggcgcgtgggaacgtggcccacctgttcgggagcaactga

SEQ ID NO: 513026 - DNA, 219 bp, Stenotrophomonas maltophilia
gtgggcgatctgcaggtgctcgacacgctgcgagagctgggcgaccagggcaagccacaggcgctggtagagggcagtgggcgggtatatggcgcctatctgctggtcagcctgagcgagacgcgcaaggagttctttcccgacggcactccgcgcctgatcgaatttcagatgcagttagagcgcgacgacgacggcgccaccgaggcggtcgcgtga

SEQ ID NO: 513027 - DNA, 177 bp, Stenotrophomonas maltophilia
gtgcagtgtggcaccgccgtggagctgcacgaacgctaccggtcctatgacgctaccgcccagggcaatcaacgcgccgacgatctgaccccgaccattgatgaactgcggcgcgatcaccgcaacgccatcagcgatctgcaagggctgcgccgggtcacggtggagttgatctga

SEQ ID NO: 513028 - DNA, 837 bp, Stenotrophomonas maltophilia
atgtccatacgactagctctccgacgaatatttgcgttgaacgcaaatgaccggctaagcttagatgggcacacttctgggagtcaacgtctttgttgttctcggatgcccgcccctcaacctacgcctactgctcttggtcaacgccttcgcgccgcccgtgtggccaaggggtggacgcaggcacagcttggggaattgcttttgggcgtggatgacccgaacacggtggctccccgcatcagccgttacgaacgaggcatgcacaagcccgatctggcgaccatcgagagacttgcggaactgctggatcttcctaaagaagacattttcctatttgatgtgaagtccaaacaagggccagtcaatgtcatcggcattccactggactcgtccgccgccatccaagtgcatgtcggagccaattcagaaaaagtggcttcgaatttaggaaagttccagccaatattgaaaagcgacaacagtggaaatgtcctcaacagcctcatcgaagacaaatttttgttctgctccacagttgtaaaaatgtttgacccccaatcagccgctactttgttcgaaatttcgtggataaatcgttccgggcagacgattagatcattttacaggattgccatacagaaccgagacatcgtcattgcagaagtggcgtcactggatgaagcagccggattgaccaaggcagaaatagcccgattcaaccttgatcttgttctgagtcagtcgccacctgaggccaccgaaaaactcgcatcccacgcccaggcggccccgtcagctcgccccatccaagttcatcgaaaacaacatctttga

SEQ ID NO: 513029 - DNA, 1356 bp, Stenotrophomonas maltophilia
atggcacggggaaagggacagctcacggctcgcggcctcgcagcgctcgcgattggggagtgggcaaatgacgcagccactcacggcgctggggtgctccaggcccgcaaactcgcctccggcgcaatcagcttctactaccgctacaccggccccaaccgccggcaggaccgtctctctcttggcagcacgatgaccttggccgaggcccgggctgaagcggccatcctggctcgccggtatcaggctggggaacgggatctacgcggtgcacttctggctgacgaagctgcggcggcaaatgaggcagcgcgtgctaaggcggctgcaacggcgcggagttccgccactctcggcgcactgatgaacgcctacgtctcaagccttaaagaagcaggcaaggtcagcgccggcagcgtagagaaagcggtgaagctccacatcgagaaggcatggccggcactctgggagcggcctgctgcagagcttgagctggacgacctgctcccgatcctgtcacgcatggtgcgcgagaagaagctgcgggagggcggcaagatccggtcgtatctgcgtgcggcgtatgcagcagcgatcgcagcgaagcaggacgcggctgcacctgacgctttgcgcctgctcaacgtgtccagaaacccggcgcgcgacctggccacgctcgacagcggtcagccgcgcgaccgggttctgtcggtggccgagctccgtgcctactggcgccggatcgaggcgatgcccgggagggagggtgcccttgtgcgcttccacctgttgaccggcgggcagcgcattgcacagctgatgcggctgaagtggtcagatcacgatcacgacacggacaccggtaccggatccgtccgcttgctcgacatcaaggggcgtcgccgcgtgcctcgcgtgcacctggtgccactgctcccgctgatggctgcggatctcgccgtcttgcgcggcgatgatcgcagtgaaggcggcggcgacggcaccaggccgcacctgttctcgctcaccggcggaaaggcgcctgctacctatgatgaattccggggaatcatggatccggtggtggccagcatggtggccgccggcgagctgacgtcgccgttcacaccgggcgatctacgacgcacggtggagactcggctcgctgcgctgggcctgtcggaagaagtccgtggccacctgcagtcccacggcctgagtggcgtccagaagcggcattacaacttcttcgagtacgacgcggagaagcgcgctgcggtggaggccctgtacgaactacttaccggcgctggtgcgacggtggtgccgatgcgtaagggcctgagccgctag

SEQ ID NO: 513030 - DNA, 678 bp, Stenotrophomonas maltophilia
atgcgcctacagattcttgagcccagacatcatacgcaccttgctaccggtgaccgttgctggcattacggggaatacaccagtgagggtggctaccgggcgagcgacaccaatcaaaagatcctgaacttgaagaagaagccgaccgtaagcgaggctcagctttactacaagaatcaggctattgactattggggtcgcacattggctcgagtaatcaacctccagcagactgtcggcgtgcgtacattcgtgccaatgcctggttcaaagccggttggtcatgccgagtacgacgatcggatgctgagggtgctgaagcgtatggccgcaggtgtgtccggcgttgatatcaggcccttgcttgttcagacggtagagcgagacgcgcagcatcacgggcatcgtttgacgccggatgagctttgcgagaccttggccgtagacagtgcccagctcgatccgcccctggcgcgctcagtggtcgtggttgacgatgtcatcacgatgggggcttcttttgccgccgcaaagaggctgctgatcgggctgccgaacgttagcgaggtcgttggaatcttccttgccaaaacagtgtggccggctccagcgttcccgatgctgaccgctgagcagattcagcagcttctcgcgtcgggcggtactccaaccgcctga

SEQ ID NO: 513031 - DNA, 939 bp, Stenotrophomonas maltophilia
atgtttgtagagtgctcacagcagcccgagatgaaccaagtctctgacttttcactgttctcagccccaccgattgagctccgtcgcgagatggcagcttacgaatcgctgtggcttggccagggagcatggttcaagaacatcgcccagctcttcgctgagaatccggggcgagtaccgtctgagctggtttcgaagcttgagatccgagacacctggaggcgcttacttgaagaggtcggcgcggatcgcttgaaagaggtgggcgtccgcgtccatggcgcaggtgagtaccctgcgaagttgcgagaagcagaccatcccatcgagctcctgtactacaggggcgattgggagttggtcgacacacgaggggtggcagtggtcggaacccgtagcccctcgccagaaggtgccgccaacgctcggcgcattgcccaggcgttggtaaggcacggctatacagtagtgtccggcttggcgcgcggcatagactttgccgcccacaccggtgcattggacgctggcggccgaaccatagcggttatcgggaccccgctgttcgactactacccgcgcgagaatgcagggcttcaagatacgctggccaaggatcacctcgtgatttctcaggtgccgttcttgcgttacaagcagcagcactacaaggccaacagcctcttcttccccgctcggaacgtgacaatgtcagcgctgacggaggcaaccgtcatcgtggaagctgggaacacatcgggaacattggttcaagcgagagcagctttggcgcaaggaagaaagctgttcattttggatagctgcttccgccgggaagatctcagctggcccaagaagtacgaggcgcagggggctatccgcgttcgcaacgtaaccgagatcatggaagctctgggtaaaaatgcgcctacagattcttga

SEQ ID NO: 513032 - DNA, 840 bp, Stenotrophomonas maltophilia
atggcacttcagccaatcgacatcgacaccgtccagcccaacggcaagaagggcgacccggcgcgactgatgtcgcagaaagtgaatggcaactttcaagagctatacgaaggtcaacaggccattcaaaccaccctgacccccttggctggcaagaacatgcttatgaactgtggagttccgatcaatcagcggaacttcgcaggcggagcgctcgctatgggcgtgttcggctacgaccgttggaagggtggtaacggcggatgcaacatcgtcattagcagcgctggcgtctggacgttgaacggcccaatccagcaggttgtggagtcgccgcagcacgcttggggaaagccgatcaccttcagcgcggagtctccttctggccccatcaacgtctacatggcgggggcggttggaaccattcctgcaggctcaggccgacagagcgttaccctgctcgccaatggctcaggggacatgctggtcgatatcagtacctcggccccgaccagcttctcccaactgcagatggagcgcggcgagagcgcgacggcgtttgatgcgcgcccaacagccttggaaataattctgtgccaacggtacgggaaggctggcggaaccttcagccggggcgcggtttcggtcgcgactggcgtgtcgatccacgtccctattgccatgcgagctactccagcagtgaccttcagcaacgtgggctacgtatacgggtgctcaggcatcagcgcgaacgcatccgctatgggtgtggacatttacgtgtcagccacgggcgcgtttgcctatggcgcgggctacttcttcgacgcggagctgtga

SEQ ID NO: 513033 - DNA, 216 bp, Stenotrophomonas maltophilia
gtgggctttaccatcaatttcccgaacgttgcaattgttgccgacgaaatttcgtccttcgagctcaatcccaacgttcctcgtgttgacgtgtacctcaagaatggtaaggaatattccttcccctacaagacgcttcccgaagcgcagcatgcgtttaactcgctcaaggccgggatggggcatgccggctatgacggccatagcattatctga

SEQ ID NO: 513034 - DNA, 783 bp, Stenotrophomonas maltophilia
atgtcggcactagccgcgcccgcggcggccctgacgccgtgcggccactgcggcagcgacgaagtgcgcatgcgagcgcggggcagcgccagcagccggcgcaccgcgcaggtcgtgtgcgcgcgctgcagcgcccagagtgagctgtgcgtcggcgcagatgcggaagctcaggcggtcaaggcgtggggacacaaacccaacgtgcctccggcgccgccggcggtgggtctggtgcgcggcagaacgccgattccggaacccaccctgcagcgcgatccgctcgagctgatcgcccgcatgctggtcggcggaagtttccgcgagccatcgaacggccggtcgtccatacagccattgacgtccgccgacattgcaggtgccgtcgggttaatgagggatccagttgccaagcaggctgctgtagcggttgcgctgcgggggcagggcgtgtccttagcctcgctcgggcgggcgctggccaggcgtgtgatgcgacagatccaatgggatcggcggcacggctcagggcccgtgcttcgaatggatgatccggccgaccggtggcgcatgaggctggtactgcaggacgcggtgaacgacctggtgtggcccgagcggaagactgctgcgcaggacgcagctaaggcggtgaagatgaggaagggcgactacctgcgcgtgtatggaatcgcggcagcgacgctccggcaagcactcgaagatggccggcaagagttcaaggtcaggttgtttgcaggacgccagggcggatcggtttag

SEQ ID NO: 513035 - DNA, 294 bp, Stenotrophomonas maltophilia
atggcaaagaagacggctacaccttctcggaacgagaagaacgaaaatcggtatcagagccactactggagagctcaggcggactacgttctagaagttttcggggattcgctgaaggcaagccagggctggaagaacgatctttccgggctggacgctgtgcactatttcctggtgcagaagcacaactggcttccctccgtcgtgcgggcaatgtctctggaagacctgcgatttgctttgagcgaagaaatgcatggttggaagctgcccaaagacgctggcggtcaatag

SEQ ID NO: 513036 - DNA, 405 bp, Stenotrophomonas maltophilia
atggatctcgatcaggagatggacaagctggcacagctgatcgcgcttcgcgcgcagcggaagatgggagagaagcccaagctcacgctggtcggaagcgtagagccggctgaggctccagtagcatcgcctgccgccagtgatgccgtcctcactcgtccagcaatgcgcatggacgttgtgctgcgggaatcccattacaggatgattcgccacttccaaaggcgatggggcgcatccatgcagcttttgattgaccaggcgtgtttcggttacatgggaatcgaacagcttcctgacgacgacctcatccagctccacaaggacctggagcgggccgaggattgcatgcgcgatggcgtcagctttgaagatgctggcttgcttcgtagccgctatggatga

SEQ ID NO: 513037 - DNA, 411 bp, Stenotrophomonas maltophilia
atgtcgaagcttgtaattgccatcggaatcgtggctctggccttgtgcgcttgcgccaacgctggcaatgctgacaacgaacaggcacgcgctgctgcggcccgtgccaccgtttcggcgaacgaggcggcggccgaggcacagaaggctatcgacacgctcaaggagtcgacggcagaactgtgccaaggggagtcgactgccgccgagcgcatcatgcgggcgaggcagatgggaacacccatggctacagtcatgaccaccgcgatcaagtacggcgagccttacgtgggcttcgtccacaaagcatacggacaaccccgcctcaccagcgatgccgcaaaagatgttgtaacgggagagttccgcgacaccgcatacggcgattgtctcgaacgttggaaattctga

SEQ ID NO: 513038 - DNA, 285 bp, Stenotrophomonas maltophilia
gtgatcgccggcctccgtactgaaccgcgcgctgcgatggtctgtggcctccgcgtgcccctcagccccacagaatcaaaggtgctgcagctgatcatcgatgccggcgatatcccaatcagtcgcgcaaggttggaggaacacctgtacggcggttccgagcgaaagtcgaacacggtggaagtgaccatctgtcgcctccgtcagaagctgatccagcacggctaccgcatcaatgccacgcgcagccgtggttacaccatcagtcagggcggtgcagcatga

SEQ ID NO: 513039 - DNA, 966 bp, Stenotrophomonas maltophilia
atgtccagatgccatccggaaaccaatcgggtgaaaggcatggctaagcgtccgattctgatgaatggagccatggtacgcgcctctctggcagacgtgcagcccggtgggagggtgaggctgggggatgcgcgccgccagtggctggaaatccgtggattggcctcggccatcgtgaagaatctagaagccttcgccgcatcgccgcacaaagcagcgtggtgcggtgcgctggatgactctctgacgttcgccgatcagattgagagggatgccgctgccgcctatgaagccgccctctccgcccagccctccccgggtggtcagggggatgcgaacggtaggatcgacatcggtaacgatgtggtaattggtggacgaaaggccaaggtgatcggcctcgacccctacaccccgtgtctggaaattgaatgggcggacgcacaaggcggtaaggagtatcgaccgcgcgagcaaatgatccttgccgcccggcagccggtggaaacgcagctgggctacacgctgtctgacgtgcatgaggcttattcacgtggaaagcgcgatgccgcccgccagccggtgggggagctgcatctgcctccggatgggttctacaagattgtgtttgacgacgccgaggtgccggacgagagtttcgcgcgttccggggcgctggatgcggcgttgcggcggttcgagcagatcagcaacaagtggaatgctcatctgttcgtgcgctttgccaacaacacccgtgactgcacggtgcccaatgcaaagcccgcgcaggccgtggacctgggacagttccgtacccaagttgccgagttgctgcgcagggagttcgatctggaaatcgccgacccggaagatcaccggcatgatgatggcgcgggcgaagctgaccggatcgcatgcaagatcgtggccctgatcgacagccaggcggtgggcaatggctga

SEQ ID NO: 513040 - DNA, 498 bp, Stenotrophomonas maltophilia
atgcaaaccgccgtcatcagcgactgtggcaactaccgctacctgctcacccgccccagcgaggtcgcccgcccggagcgcggcaccgctctattcctgatgttgaatcccagcacggccgatgccgctgtggacgacccgaccattcgcagatgccggggcttcgccaaggcatggggctgcaacggcctgacggtcgcaaacctgttcgccctgcgctctaccgatccggccctgctgctgtcgcatgcagaccccatcggcccgctcaacgacgactggctgcggcgcctcgcccgcgagtacggcgacgtggtctgcgcctggggcgctcattcaatggcggcaagccgcgccaccacggtcgcgcagctcatgactgccgcaggtgcgcggttgtggtgcctcggcatcaccaagcatggcgctcccaggcatcccctctatgtgcgcgccgatcagccgctggcgccttggcgggagccgaaccatgggtaa

SEQ ID NO: 513041 - DNA, 384 bp, Stenotrophomonas maltophilia
ttgaccgttgagcacatcaaggccgcggcgggcgagcggtcaccactgatccaccagcagcgcgcggccatagcggttgcagcagcgctcgaaaccgccctgaccagcacgcgccccgccagcggcggcgaccgcgcattgaccttcacctttgccggtgagccgcagctgcaggccgcgtgcgacgcctggcgcgcatacgccctcgccaccatcgacacgccggcgccggtggcagcgactgcaagccaacggctgacggcccagatcggcctcgccctgttcaacgacccgaccttggacctgatgcagattgcgaaccgcttagcagggttgcagggagaagccggcaccgcgctgttgccagcactggtcagcaagtag

SEQ ID NO: 513042 - DNA, 240 bp, Stenotrophomonas maltophilia
atgaccagcaccgtcgaaaacgacaacgcctccaccgttaaggcaagggcagatgacgcactgatcgcactgcgtaaggtcgaagaggactgcggattctccaaagccagcatctaccggatgatggcgcgcggcgagtttccgaagccggcaaagcgtgccggccgcagtgtccgctggttgaggtcagaagtgcagcaatgggtgcgcaacgaatggcggccgcaggcaccgacgtga

SEQ ID NO: 513043 - DNA, 2487 bp, Stenotrophomonas maltophilia
atgtcgttgcaccagtatcggcgcaaacgccggcttggcggtggcgccgggcagacaacggagcccgacgacacgcccgcaccgggcgacccgaagcggcggccgacctttgtcatccagctgcaccatgccagctcgcgtcactatgacttccgcctggaaatggacggcgtactgaagagctgggcggtgcccaaggggccttccctgcgcgtcggtgaaaagcggctggccgtggaagtggaagaccatccgctctcctacgccggtttcgagggagacattcctgaaggccactatggtgcgggccacgtgggagtcttcgatcacggcacctgggcctgtgaaggcgatccactgcaggcactggcggcgggcaggatcgacttcgtgctgcatggacaacgcctggccggtggctggaagctggtgcagaccgcgatgaaaggacgccaggtgcagtggctgttgatcaagcgcggtgacggggaagcgcgcgacgcggaggcggatgacctgctgacggcaccgatgccgaaacgaacacctgcggcgaagaagcgttccgcggacaagacggcgcgagctgcacccgtcgcacgcacggccacacgcaaggccgatgtgcgctggcatgcacgcgcgctgcaactgcacggcgcacgtgacgcaccctacccgcatgcattcaaaccgcagttgaccgatcatcgcgacagtgcgccggacggcgaccgctggcttcacgagatcaagtgggatggctatcgcctgctggcggatctgcacaatggcgaggtcaagctgcgctcccgcaatggtctggattggaccgatgattttcccgaagtggtgcaggccgtgcaggcgctgccggtgcgcgatgcacgcctggacggcgaactggtggtgctggacaaggaaggacgcagtgacttcgcagcgttgcagcgggtgatcgacggcagttcgaagcaaccgctgcgctacatcgtgttcgatcttccgggcttggctggagcggatatcagtcgtgcgccgttgctggagcgcaaagcactcctgaaagagctcattgggccggcgcctggcaccttggccttcagcgagcacgtgatcgaccatggcccgcaggtgttcgttgccagtggcaaggccggattcgaaggcatcgtcagcaagcaggtggatgccccgtacgtgaatacccgcgcgcgcagctgggtgaaggtgaagcacgaagacaccgacgagttcctgatcgtcggctacacggcacccaagggttcacgggtggggttcggctcgctgctgctggcgacgccggacaagggcggcttgcgctatgtgggccgcgttggcaccggtttcgacgaccaaagcctgcgcgcgctgctcaaggcactgcagcccttggcggtgaagacgcccgtgctgcagctgccggcgcatgtgccgttccgcgctgccagcgtacgctgggtgaagccggtggcggttgccgaggtggccttccgtggctggggcaaggaaggcctgctgcgccaggccagtttcaagcgactgcgcagcgacaagcagaaggaggacctgggaatgagcaccgcagatgccgaaaccggaggcgaggtcgagatcactcatccggagcgggtggtgtttccaaggcagaaactgcgcaagggtgacgtggccgactactaccagcgcatggcgcgctggatcctgcccgagattgccggacgtccgctgtcactgctgcgctgcccggacggcgtgggcaaggcctgcttcttccagaagcaccatggccccggcctgggggacgcggtacatgcggtacccctgcagcagaagagcggccgcgaggattacttctacgtcgacgatgcgcggggcctgctgcagctggtgcagatgaacaccctggaactgcatccgtggggcgcaaccgtggccgatcccgagcacccggatcgtctggtgttcgatctcgaccccggcgaaggggtgagctgggcacaggtgaaggccgctgcgcgcgatgtccgtgaccgcctgcaggaggtgggcctgcagagcttcgtgcggctgtccggtggcaagggcgtgcacgtggtggtgccgctgcagcccaaggccggctgggacgaggccaaggcgttctgcgaggcgttcgcgcaggcaatggcgctggagcagcctgatcgctacgtggcgacgatgagcaaggccaagcgcggcggcgtgatcttcatcgattggctgcgcaacacacgcggtgccaccagcgtgtgttcgtggtcgctgcgcgcgcgcgatgctgccggcgtggcggtgccgctgcgctgggaagaactggcccgggtgagcgcggccgacgcgtttccgatggccaaggcgctggcgcgcgccaagcggctgaagggtgacccatggcagggcatcgcgcggttgaagcagaggctgccgtcgccgaagcggtag

SEQ ID NO: 513044 - DNA, 1272 bp, Stenotrophomonas maltophilia; identical to SEQ ID NO: 500130

SEQ ID NO: 513045 - DNA, 258 bp, Stenotrophomonas maltophilia
atggcgaaaccctacgaacccaagaggctcactccctctgagctggccgaactgcacgcgctacctgacgatgccgtcatcacgagcatcgaggccgctgccttcctgcgcctgacaccgcgcaccttggcctggactcgcacccagcgccccgagagccacccgccgcacctggttgtcgggtcgcggacggtccgctatcgcatgggtgacctgcgtacccacatgaagcgccactgcgccaacgtggagggctga

SEQ ID NO: 513046 - DNA, 2094 bp, Stenotrophomonas maltophilia
atgaatcccgccgcacgacgccgttgcctgccgctgtccgccctgctgctgtcgccctgggcggcagtggccgagcctgagcccaccgccctgcctgcggtgcaggtacaggccgcccgggtgccgggcatcgatccgttcgcgctgccggccagccaggacacggtctggatcgacgccagccgcgcgggcaccggcgcgcagctgtctgaggccttggccggggtccccggactgctggcgcgtgaccggcagaacttcgcccaggacacgcagctgtcgatccgtggcttcggcgcgcgctcgaccttcggggtgcgcggggtgcgggtgttgatcgacggcgtgccggcgaccatgcctgacggccagggtcagctgtcgcatgccagcctgttgggcgccgagcgcatcgaggtgctgcgcgggccgttctcggcgttgtacggcaattcctccggcggcgtgctgcaggtctggagcgcgcagggccaggccggcgacccgtggcggttgcgcgtgaatgccggcgccgacaacacgctcagtgtcggtgcgcagctgaagggtgccggtcaagtgctggactacagcatcgccgccaatcacttccgcgccgatggctggcgggaccatagccgcgcgcgccgtgaatcgctcaacgcacgcatcggtggagagctgggcggtgggcggctggagctgctgctcaatgcgcttgacgcccccgatgcgcaggatccgctgggcctgacccgtgcccaggtggcggctgatccgcgccaggccacggcagtcgcgcaccagtacaacacccgcaaaaccgtgcgccagcagcaggccggcctgcgctggacccgtgaaacgggagcgcagcgctggcaattgatgggctatgccggccagcgcgcggtacgccagtacctgccgattccgccggcaccccagaccaacagcccgctgcatgccggcggcgtgatcgatctgcagggcggctatggcgggctggacgcgcgctggggctggcacggtgatctggccgggcgaccgctggacctggtagccgggctcagcgccgaccgccagcgccagcaccgcaccggcttcgagaacttcatcggcagcgccctgggcgtgcgtgggcggctgcgtcgtgaccagatcgacgtcgtgcagaacgtggatcagttcgcccaggcctggtggcagtggagcccgcgctggtcgctgctggccgggctgcgccacagcgccgtgcgattcgaatcgaatgaccgctacatcgtcggcgccaaccccgacgacagtggccaccgccgctaccaggcgatcacgcctgtggcaggcgtcagcttcgaggccagcccgcagtggcggctgcacgcggcggtgggacgtggtttcgagacccccaccttcaacgaactgggctatcgcgccgacggccaagccgggctggcactggatctggccgccgcgcgcagccgctccatcgaggttggcagcaagtggcacgcacaggatggcaaccaactcgatatcagcctgttccgtgcagataccgacggcgagctggccgttgccagcaatatcggcggacgcagcacctaccgcaacattggccgcacccgccgccaggggctggagctgcagtaccgacagccgctggccgagcacctggaactgcagctggcgtggacctggctgcaggcgcaggtgcgctcgccgtacctgacctcgaacaccctggtcgctgcaggcagccgtctgcccggcgtgccgcgccagcaggccttcgcccggctgcagtggagccctgccgattggcagtgggcgctggaggcaatggccagcagcgataccgtggtcaatgacgtggccaccgagcgcgcgccgggctacgccctgctgcacctggaagccggccgtcgatggacgctgccgggcggcgagctgcgcgccttcgccaggctggagaacgtgctggaccaggcctacatcggctcggtgatcgtcaatgacggcaatggtcgcttctacgagccgggaccgggacggcgagccaacgtcggcctgcaatggtcgtggcgttga

SEQ ID NO: 513047 - DNA, 1701 bp, Stenotrophomonas maltophilia
atggcgcttctcctttccacctcgatcagcgcggggccgaactggcgaagccggaacctggacatcgcgcgcacgcggattccagtgccatttcgtggcgcgcttgctggcgctcgcgtgcttgcgggcccggcgcgtgaggccaccattgtcgaacccgaacagcgctcggccggtcccgcgctgcgtacctccttcgatgactggtaccaccgaatccacatcctgccgctgcgcattgacctcggcaatctggtgaccaaccaggtgcgatttgtgcaggtctggaacgcctacctgcagccgcagaccttggcctcggtggtgctggagaatggcgagggtgtcgaactggtggggccaggcacgccgccgctgacgttcgcgccgctgcagctgcgcaggtggcagctgtcgatcactaccgaggggccgcccgtcatcgcggccacgctgtcctacgacttcgtggccttgggcagccgcacggtcacaatcaccggcaatcgcatgtcggcgtggatgctgccgccagattggtcccggccggtgtcggagactctggcgtgggcaaccgacgttcagcaggccgccagcggtggtgaggcgcgtttcccccttcgcggctccccgcgacgctcctgggaattcagcgtcctggccgatcgccgcgagcgccaggtgctggaacacgccctgttcgactggtcggcccgcacgtgggcactgcccatctggaatgacgtgtcctggctgcagtcgcgccttgcgctgggcgtgcagtccatcccggtaccgggcgccacacagcgggactatcggcagggcggcctggcgatgctgtggcaaaacgtcaccacctacgaactggtcgaggtggcggccatcaccggcaacaccctgcagctggctcggcctacggccaacgcctgggcgcctggcacgcgggtgttgccctgcaggacagcgcgcctcgcagaaacacccagcctcgagcgcctgaccgaccaggctgtgcgctccaccgtgcggctgacggccgtggaaacttgcgactggccagcagtcgcgccggcgtccacctatcgcggtcgacctgtacttgagcagcggcctgacctggaccaatcgccgaccgcagaattcggccggcagttggtggtgatcgatggggacatcggtccggtagcgatcgatgacttcacgggaagggcttggccagtgcagtcccatgcctggcagacgtggggccgcaccgagcaggccaacctgcgcagcctcctgtactggctgcagggtcgcgcgtccgcgctgtggctgccgtcctgggccgacgacctggagctgatcgagccggccttggccacctccggaggcatcgtggtggcatgggccggcgtgtctcgcttcggccgcgcgcagcccggccgccgacatttgcgcatcgaactgttcaatggccaggtgttgtaccgccagttggtccaggccaccgaactcgatgcccagcgtgagttcctgcagttggacgtgccgcacggtatcgccctgcagcctgcagccatccgcttgatcagttggatggtgctggcccgcctcagctctgacaccgtcgagctgtcccatgaaactgatggcgagggcctggcccgctgtcgggtgtccttcgccggcatcggtgccgaggagagtgagccgtga

SEQ ID NO: 513048 - DNA, 519 bp, Stenotrophomonas maltophilia; identical to SEQ ID NO: 504110

SEQ ID NO: 513049 - DNA, 1347 bp, Stenotrophomonas maltophilia
gtgcctgcgcagcaagctgatcaccgcaccgccggcgtcggcgaactgggcgccatcgatcgccgtcggtaccgcaggcggatcctgcggcgcccggacgggctcgtagttgtcgccataggtctgatccatgtagacctgcttgggcttgtagcccaggtcgaggatcttcttgtcgcggctggcggtagcgtccagatcctccggctcttccgtgacgcgatagacccgaggaatggccgcgccagggaagttccattcggtgagccagcgcgctggccccttgttgaaggactcgcacaccaggtcggcatcggaggtgatgatgtcgcggcgcacttcgcgctgcagctggtcgttgcccagcttgcctggcgtgccttgggtactggcggtctggcccagcaccaccttctggatggtggcatccatgtagtcctgcagggccttgtagtcggccgtgccactacgtccggcctccagcaacgccagctccattcccttgggcatgatgatgccgctgtcggtctggatcgcgcgggtggcctgcagcagcttggccttctccggatcggttgcgttggtgtcgtacttgcccaccgcggtgggcatgccgaacttctcaaggaagatcagccagaacttgagcccgttgcgcttgaacagcaccggccagtacagccagtgcgccaagccgaggccgtacggctcatcgtcgtggtcggcaccggagcagaagttccagaagtatggtgcgagtgccgggacgccctccgtcatctgcgtctgggtgagcaggcgcagatcgccttccttgccgtagcggaagcgtcggcgattgcggaccttgatcgcctccaggccgatgcgggtgccgtcgaccttgtacaggatctcggccacgccatagccatagaacacgccaaacagcatcttgcgggtgacgttgtcccagccgatgccgtgcagctgctcctgcagatactctgccgcctggcggtcgatgcgcttctcgccaccgggctccacctgccattcgcaggccaccaccgagtcctggcgcgagccgaaggtggttttcacctctggatcggacagcacctgctcgtagatctgcaggtcatagccgccccgattgcgcagcacgctatcgaagggcagcagcagcggcccggtgtagccacgggtaatgtcgatgccatcggcggtggtggcaatctcgcggccgatctctgggcggacgatggtcatacgaatcctccaaaatcattgccgccgctgacggtgccgaaggcatcatcggtcacgacggtggccacgccgtcggcccggccgtcgccgatgtag

SEQ ID NO: 513050 - DNA, 651 bp, Stenotrophomonas maltophilia
atgccctgttgtggacgctgccgttcgacgatctggatgcccgccagcgcgagcaggcgttggccgaggacgtgcgccgttgggaggccgacctgcggggcagcagcggcggccagacacacctggtggccaaccatgccgagctgcgctcgcggcccggtgccagttgcgggccggccgcccgcggctgcctcgcccaggtccgcgcggacccgcaacgcttcgtggaggcccatgccgggcaccagcagttgcacgcgcggctggatcagctcgccgaagcagactacttcgtatcgccgttccagccgaagggcgagggcatcctggtgccgatgccgacctacgggctggtggtcgatgccaccagcgcacgcgcgctggcgttcgtacagggtgacatcgatggtgccctgcgcggcagctgccggggagtgcagctgggccggcggctggtgcccggtggcagctatctggtcgaaagcatcatcggcgccagcctggtacaggccaacgcgcagctgctggccgacatgctggtcgaactgcctgccgatcacccgctgccggccgaatgcgaacaggccatgcagccgatgcgggccgacgagcagagcctgtgccgtgcgatgcagggcgagtatgcgatga

SEQ ID NO: 513051 - DNA, 273 bp, Stenotrophomonas maltophilia
gtggagtacgtcgacggcatcccgatggtgccgcgtctggagcgaaaggacctgcaggatccggagctggtgcgccacggcgacggcgcgatcgccggcgtgctgatgcagtttgccgcactcaaccacgtcacctcggtgcccatcgagttccaggcggccggcgcgcgcgcctacatcggcgacggccgagccgacggcgtggccaccgtcgtgaccgatgatgccttcggcacggtcagcggcggaaatgattttggaggatatgcatga

SEQ ID NO: 513052 - DNA, 612 bp, Stenotrophomonas maltophilia
atgaccccatccattcccgaaggctaccgcgaagaccgtaatggtcggctggtgcccgaggcacagatcaagccgatcgatctggcccgcgaccagctggtgcaggagaagatccagcgcgccctggaactgcgcgaagcactgcgcaccttcaaggcggatacgttcgccgatatcggcgcgttcgtgcagctcagcggcgagcagtacggcgccaagatcggcggtgacaagggcaacgtcagcctgtattcctacgatggccgcttcaagatcctgcgcgcctgccaggacacaatccagttcgatgagcgcctgcaggccgccaaggcactgatcgatgagtgcctcaacgactggaccgaaggctcgcgcgccgagctgcgcaccctggtcaacagcgccttcaaggtgggccaggacggcagcatcaagacggcagaggtgctgtcactgcgccggctgcagttcgatgacgcccgctggcagcgggcaatgaccgcgatcagtgatgcggtgacggtggtgggcagcaagacctacgtgcgcttctacgagcgcgatgcacggggtcagtaccagccgatttccctcgacgtggcaggagtctga

SEQ ID NO: 513053 - DNA, 294 bp, Stenotrophomonas maltophilia
gtgcgctgcagcgaccaggaactgcgcagcgacgagatcgacaagcacctggatgccggcaagcaggtcaccaagctggccctggtgctggaggacgcactgtccttcgagctgggcgatgacctggtggtgcgcaagctgaagttcctggacggcgcgctctcccaactggagcaggccgatgccgacggccgccgcgccgagttcgacgcccgctttgccctgcagagcggcgagattcgccgcctgttcctggtgctggaacaggccttccacctttcaacgaacccgtga

SEQ ID NO: 513054 - DNA, 252 bp, Stenotrophomonas maltophilia
atgcgtggccacgatccggtcgaagtcctcccggaactgctgaagagttcgcccctcagcaatgacccgatcgatggattgccggaagtccgccagcagagcgtcacggctggcaccggccaccatgaagctggagtcgtgctccgactcccaaacgtcgaggtagctctcggtgagcacgttctttttgcgacggaagaactcgatctgctcccggaacggcagttgagcgtaggcaaccccggccattga

SEQ ID NO: 513055 - DNA, 498 bp, Stenotrophomonas maltophilia
gtgtggtccaacgctgcttcgaaccccgcgcaggacgtcgaaaccggcaaggaagctgtgcgtgacagcatcggtctgtatcccaacaccatgctgttgtctgccaaggcgttcaagcagctcaagcagcatccaaagctgattgaccgctcggccagcaccggcattcgcaaggtcaccttggatctgctcaagcaggttttcgagatcgacaacatcgtcgtcggcggcggtgtggtggccgatgacaatggcgcattcggtgatgtctggggtacttcggctgttctggcctacgtcagccctggcgctgacgtgaacgccaacgtcgaggagcccagctacggctatggctatcgcatcgaaggcatgcccctggtcgaagttccctactgggacaacagcgccaagagctggatctacggggtcagcaacgatgccaccccggtcctggcaggcatggccgccggctatctgatcagcggcgcaggcaactga

SEQ ID NO: 513056 - DNA, 498 bp, Stenotrophomonas maltophilia
gtgtggtccaacgccgcctccaatccggcgcaggatgtggaaaccggcaaggaagcagtgcgagacagcattggcctgtaccccaacaccatgttgctgtcggccaaggccttcaagcagctcaagcagcatccgaagctgatcgatcgctccgccagcactggcattcgcaaggtcaccctggatctgctcaagcaggtcttcgagatcgacaacattgtcgtcggcggcggtgtggttgctgatgacaatggcgcctttggtgacgtgtggggcacttcggctgtcctggcctacgtcagccccggtgccgacgtgaacgccaacgtggaagagcccagctacggctatggctaccgcatcgaaggcatgccgctggtcgaagttccctactgggacaacagcgccaagagctggatctatggcgtcagcaacgatgccactccggtcctggcaggcatggcggcgggctatctgatcagcggcgccggcaactga

SEQ ID NO: 513057 - DNA, 297 bp, Stenotrophomonas maltophilia
gtggcccgcaactaccgcctcaaccccgactggaagatcgaccaggtggctctggcggccgcgcaggcacagcgtgtgcgcggcattcggccgggtacgacaggggcgcagaaggcccgatctgctgctggcggttacgaaggtcccgccttcgacaaaggcccgctgatgccctccatcggcaccgtgtgtcagtcccaggaggatctggaaggcgagctgccgccttacctcggtggtcgcttggtcgattcgctgcatagccacttcgatcgcatcttcggtggggtggagtga

SEQ ID NO: 513058 - DNA, 351 bp, Stenotrophomonas maltophilia
atgaagctggtggccgagcaggcgccggacaatgccgccgagcgcggcagcgcgctgatgggcctgctgcagaccgacctgttcgaagcactgctgcagtttcaggaggcggccgaccaggacgatgagagcatttcccccgccgatcgcattgcgctgtacagcaaggcggccaaggccattgccgagctgacccgatcttccatcgtgcgagagaaatgggccggcgaaatccgccagaaggcgctggtcgacgcggccagccgggtcgaggaggctgcacgggcaaagggcctggacgctgagggcgtggagttctggcgcaacaaggtgctgcatggagtcggctaa

SEQ ID NO: 513059 - DNA, 285 bp, Stenotrophomonas maltophilia
atgggcagtgagagccagcgcggccactggccggccatgcgggcaacctacacggtcccgcttttccggctcccgccaggccctttgcagaccgacgtcctgaagcggcttcactgtgtgccgccgatgtggttgagcgaacagattggaggtccgtttgatgacctgactcccggtcaggcatggcgcgacgggttcaacgaatgccgtaggcgttcgctactgctgatcgagaaggaactgaccgaagctggccgcgaggaaggggctgttgatgcgccgtga

SEQ ID NO: 513060 - DNA, 246 bp, Stenotrophomonas maltophilia
gtgtccacctgggcccgatggattgcgcgctacctgctgcacaaggaccgggtcaacaccgaggaacgcaccgatccggtggtgcgcgactacaaggaagcgctgcgctttctggagctggtgcgcgatggcaagttcagcctcggcgccgatgacccgctgcctgcgcccagcggcggtgcaccggaggtctgtgcaccaccgcgagagttcagccatcgaaccctgcaggactacggccggtga

SEQ ID NO: 513061 - DNA, 1698 bp, Stenotrophomonas maltophilia
atgaaaaacttagcctttcaaaggcttcatctcgtatctcatcgggaacgaaaagcaaggtcagtcgagttccatcccgacgtgacggtgatcaagggcctaaatgacgtaggtaagtcatcgctcgccaaatccatctacgccacccttggcgccgaggctgccgaggttcatcccgactggaagaacgcgagcgtgatctccgcattggagttcactgtagacaccgaaccttacgttctgctaaaggaaggcaagaccttcaccttgatccatgcgggcactatcgcgggttgctacacgagcatctcggagggcttggcgccagccctgtacggccttttgggggcgaagttgaggctgaagaatcgctctgacaaagtggtcgtgccgcccccagcgttcctctttattccattttacgtagaccaagatgctggttggaatcagccgtggacgtcttttgcgcgtttggaacagttcacccgctggcgagaagacgttgtgaatttccatgtcggagtgaccggtgctgaatatttcgaggcgatggaggctcaggcggaagctgcagctgctcgcgttgaaccagccaagcagctggaaggcctgaaatcgcttcagaagcgcgcccaagaaacggccctgcaggacattgacgtggaaatcgatcctgcagtcttcgcgaaagagattgagagggtcgttggcttgctacagggcctagtcgaagttcgcgaggttgaacgtgcaaagctgtctaagctaactcaacgccgtctcgagcttgaagcgcagagagaaattctggatagagtccgcaaagagcttcacgccgactacatgtttgcagcgaagcacgaagacgatgaactggagtgcccgacgtgcggtcagctccacgagaattcctttgcacagagatttgcattggcgcaagacgaagcgcgagcagatgatgtgctagttgaggttatgaacagcctcgccgatgtttcaggacagatcgccataagtcgtcaacgcttgaaagatgccacagaagatgagcaaaaattcaatgaattgctgacccagcgtagaggacaggtcacattcgccagacttctcgagcgggcagggcagaagaggttctcttcgcagttggatgaacaagttgccgacctggttcgagtgatcgccgacttggactatcagattaagcaggcgggcgagaggctgcgaaacgcgcgctctactgcgcggaagcgggaagtaatcgacacgtacgctgggttgctcaagagcttttcccaggcgttgagcgtgcaatttccggatcagttccttgagtccctcacggcgaaactgcatgagacaggaagtgatcgccctagggccatcctcgcttatgtctacgctatcttgcgtttagcatggaaggctgaggatgctgtgaggtgtccgatcgtctttgactcgcccaagcaacaggatcaagatgacatcaatcacgtcaagctgctcgaattcattcgggacgagcgcccggcagactcccagctgattctattgctcgtggatgatgctggcgttgatttcggccgtgagccattggttcttgatcaaaagtattcgctgctttctgcgagtgaatacgatgatacgtcggcattgattcggacttggcaggctcttcgagaggccgccctgaattga

SEQ ID NO: 513062 - DNA, 1119 bp, Stenotrophomonas maltophilia
atgagttccaacgtcattgctgactttatgtccgctgctccgttagcagaggaaggcggcgctatctcggccgatcggttcgactatcagaagaattgggcgctggcacgcttgctaagcttgcatcaggccgacggcaactacgcgctgctttgcgagcttcacgaggacattgctgttcttaactgccccgaacatcccacgacggctgcgttctatcagatcaagaccagcgccgctggcgcttggactttgaagaagttgacgaaccgcaagaagggtaacgccgggaatgctctgccgtccatcttgggccgcctgtgcgcgaaggccgaggaactgaaggaccagaaggtgacgttccaattcgtcaccaacgagggaagcggtttcagcttcaagggcctagacgcggcaaaagcggctggctcctccggccagcgcctcttcgaagcgctgagttcgactgagtgggcgacgctcaagcagtgcttggctgatgagttaggacaggatttcagtgttgctttacagaatcagctgacggtatcggttgcccagattcacctaagcaagcacaacgagacgaccgtaggactcgtggcaaacttcctggaagagcatgcgcccaatgctcacattcaaccgaaaacgttttaccggacgttgttcgatgagttgcggcgaaagacggtcgcccaaaggcctattggtgccatctctgacgtgtgcaaggcgaaagggatcgatagggaggggctcgacgcgatgcttgccagtgctcgttccgttgccccagccactgccgcctggagtcatatccaagcagagcttcactcggatggcgtctcgcttctcataaggcgaaggcttaaagatgcttatcctggctacttctcaagaatgcagagcccgcttgatgcggcgttccgcagggatcgacgccttctcgtcgcagccagtgagagcgcgatgtcagaagatcaaacgctgctggagctcgccgaagctgcggcgaaaatcgcacgtaaggacccaagctatggcgctgccggcatgtccgccgaacaggaactcatcgttgtgatgatggccttctatgaaaccgacacccactaa

SEQ ID NO: 513063 - DNA, 1005 bp, Stenotrophomonas maltophilia
atgctacttccggaagatattgagctgggattttcattctctggctacgataagagaaatcgagtacgcgtgatgctgtttcactcaaaatggggaagttacccacggggaacttttttctgcgacgatggcttcttccatgctgatgaggatctggtcttctccgttgtgcgctgcactggctggcggtccatcaacgaagatgttccattttccgagttcgcttgggcttcgcctgcccaggtaagggtgttgggtgcgcttcttttttgtcagacctttgacggggctaggatccttctctacccggtggttgggcaggagttgactttgagtgcggatgggctctgtctcgatggacaggactcggtccgaatgatcaaagagaagctgctgctatctgcgaaagagcagcatcatcgagcgaacatcccgtgtgttccggccggattggtgagtgagccttacgacctgctggatcacgaccttgatatgggccgcttcctgtcgtcgtatcagaggatagatccttcaaactttgtacttgtgcgaggaattcaggcgttagtgaagtcagatatgttggggcggcatcgagagttcggtgaggaatcggtcattgccgcattcatcgcgttagatgcttcgttctcacttgtcttgcgggaactaaggctggaggggctgaataatccatcggcgaatgatgcagcccgttggctacatcgtgttctctacgaggcgtttgggcatgagccgcccggagcactggagaaatactttgaggaattctacgcaagtaggatttcaacgatgcatccaagcaatcggttcggggactttccgtactcgccgaccatgtgggacgacgcaatttacttgagatcgcagctaaggcaggtcttctcattcctcgtgcatggaaggcatttcacggacttcaaagatgcggtcgacgatttccatgctcagcgtaatcttgggtctgcggtgttaaatggatga

SEQ ID NO: 513064 - DNA, 636 bp, Stenotrophomonas maltophilia
atggatgaaattccaatattaaagggagcgagggatggggatgatgcctttagcatctgggagccgcaccaggcgttctacattcagtcgatgctcttcaatacgacatcggccttcgagtcgtgcggaattgcggaggggatcatcaagagaatattgaatgacgagattgatccgcaagaggagagagacgttctgctggactgcttgcaaaatatagtaaaccagtccggatctatatcgcggtacttcttcccatcgcgtgatggggtgaaggcgggagataagaagagtattcacaaagatcgcggacgttacctatcaaaggtcttcggtgtggagggcgacagccccctgatgaatcgatcattgaggaattcgattgagcacttcgacgagcggcttgatctctatcttcaaggtgggatagttggatgcatttttcctagccttgttctccctgagcctgaagactcggatgtgcctcatcacatcttcagggcttactacttgagggaaggaatattccaagtgttagatgagagatacaaaatacagccgattgttgatgaggtggccagaattcatgatctcttagtaagatttgatggcaacggtggggtctttcgtttgtag

SEQ ID NO: 513065 - DNA, 2427 bp, Stenotrophomonas maltophilia
atgtttaaccagattgacatcacccaattcggaagcttcagtggtcttaactggaagaagaccgtgcgtgatcgtggcaacaccgtccaggatttcaagcgtctgaatatcctctatggtcgcaattactctggtaaaaccactctttcccgaatcttccgggcgctcgaaactggacgcatgccttcaaactacgctggcgcgaccttcaccatccgcggagacaaaggtgatgtaactcagactagcatcgctgaccatgactacgatatccgagtctacaaccgggatttcgtcagtgaaaatcttagcttcctgatcaatcaggacgttggaggggagataaagtccttcgcaatcgtaggtgagaagaacaaggagatcgagaatgaaatcacggccatccaggaaaaactcggcagctcagaatccaagacgggccttcggcacgatctagataccaagaggaaagaaagagatcggaacaagaacaaccataagagtgcttttgatgcactggaaagcaagcttcgctctcatgccaacgagaacattaagcagaaccgcacctatggccccgccgtctataacatagaaagcatcaagagggacatcacttccgtcaaaaaggctggattcacgccattgacaaccgaagaacaagcaataaaggtaaacctcttaaagcaagaggccctacctgacattgccgacaccgtaacgatcagcctcaagcacgactcactgagcaagaccgctgaagagctactttcaagattaatcaagccaactcaagcgattcaggagctattgattgaggccacccttcaagcgtgggtgaagcaaggcatagcactgcacaaagacaagcgagacacgtgcgccttttgtcgtcagagccttccccataacatgtgggaggttctggactcacatttcagcaaggaatcatctgatcttgagtcatccatcgattcatgcatggccttgctcaccagcgaaattcaagccatacctagcttcttgactttaagtggcgacaagttctatgcagaggaaatggcttcgtttgaggccagcaaagggttactcactgaatgcctagtggtttacaagcaagacttggaaattctcaaggccgcattaaatgcgagaaagagcaacctctttcagcaagttgccatgccgctctccaagcatgatccagaggcaattcagagatgtgcccacgatataaatgatctaatcggaaagagcaatggccgcaccgactccctagagaaggacaagggctccgcgcgagaggcattacgactcgccgatgttgcctccttcatcagcgccatcaactacgatgcagaggtggcccgcatagcggaccttaaggcagacgccgacattaccagcactgcgtatgatgacgcggaagccgagattatcaagctcgaagcccatatctccctcctcctaagccaacaaaaggatgaacgcaaaggtgcggagcatgtcaattccttgctcaaccatttctttggtcatgatggaatcaagcttgaggccagggacaatgcggagaggaacgtcgtcaaatttgagatagttcgagacgggaaacccgcctacaacttaagtgaaggcgaatgcagtctgattgccttttgctacttcattgccagactggaagaacctgaaagcaagggcaaggatttgattgtctacattgacgatccgatctccagcctagacgggaaccacatcttcttcatgttcagcctgatcgagagcctgattgccaagccgttcaagaatgcggacggatctaatggctatcgctaccgtcagctcttcatctccactcacaaccttgacttcttaaaatatctcaagaggttgtcgacacctaaaaaaaagttgccaactggggaagggaaggccaagagcgttgatgacagtgagcatttcatggtggagcgaaatggccccacaagcgacatattgctgatgccgtcctatctgaaggactacgtcactgagttcaactacctcttccaccagatatacaaatgcaggaaccaacacgccgcgcatgatgcgcacgagccgttctatagttttgggaacaaccttcgcaagttcctagaagccttcttgttcttcaagctcccctaccacgacgacaagaacgatgcgcttgagcgaatcaggaaattctttggaaatgaagacccaactgcaatctccctaattaatcgactcaacaatgaattttctcatcttgaatcgacaccagatcgtggattcaaacctatagaaattccagagatatccaaagtggccaactttgtcttagataaaatattctcctcagacccccatcaatacaatgccctactcaagagcattggagagccaccgaggacacaataa

SEQ ID NO: 513066 - DNA, 198 bp, Stenotrophomonas maltophilia
atggcccgacgcgcaagccggaaggcggctcggctctacccggccgtgacccgggtcgctcacgccagggataccgggttcgcttggtggcagtggtgggtcatgacactgctgaccctaacgggcgctgtcggggacttcgctttcctgggcgaactgccgatgttcctgtttgtgatgtatgcgcagttgatctaa

SEQ ID NO: 513067 - DNA, 225 bp, Stenotrophomonas maltophilia
atgaacgaaaaagcagcgtcgtcccgtctatcccggtatgagcgcggggagcgtgagcccgaccatgagaccctgtcggcgctcagtgaggcattgggcgtcccgccggcatacttccatgccagttcggacgtgctggccgaagtcattcttcttgtggcccgactgccggccgcgcgccaacaggcagtgcttgacctcatcaaggatcacttggctctctga

SEQ ID NO: 513068 - DNA, 1092 bp, Stenotrophomonas maltophilia
atggatagactgattttcgcggtaattcattctctagaaaaagaggctcattccaacacctcacgagtccggcatgcgccaggatcgttggacgtttcgctcagtcaggttcagtcgctcggacaacagttgtcgcgtctcgtcgggcgagacgggagcaccgtattctggggtcaattcggaaccaacaatcgagaggggcagttcccaggtgcggtagaaaacttgactgctagctctgatctggcgacgttcatgacgctcacagaggtggccatggcggaacttgtggctgctgccggaaaggagcctctgtcgactggcggttacgtgttctttatggtctacgaggtcaacgcgacgccattcttgctcgtggcgatgattaaagagcgcggagcactgagcttgtcggtggacatggttccaactgatatccgtgaacttgacttgtcgaagctgcaccaagccgcacgtattaatcttgcgaggtatgagcaggcattgagtgccggctctgccgatgctggcgctgacgaggaggagagaacctacctctgcttcgttaacaaaggtgcacgcaatgaagtcgctaagtattttatcgatgcgttgggttgtgagaagggtgtttcatctaaccgagcgacaaagtccgcaatcgatgctgttaggaagtttgtatcttcaaagaaggagatcaagcctcatgctcgcaaggtgagaagagccgtcatcgatcatatggctgcgttgccgcagggggctgtgatgacggtcgggactctagtggcggttgtgcgtgtggcgctgggagatgagctggtcgagcacgtcgaggggttgagtgaatatctcaacggcgaggatgggcaggtcccagaatcctttatagtcagtgcgcaatacctcaagtccgttactcgaattaccgcgcaagctgatggttggcgtctatcgttcgaggacacggaaatcagcgagacggaggggcctttgatctacagtcgtgctgataagtcactgcgaatcagacgtctgccggacgaggcagcaaaaaagattgaggcaaccctagatcagcgtggctaa

SEQ ID NO: 513069 - DNA, 1263 bp, Stenotrophomonas maltophilia
gtgtttgagaccgtagttcgcctataccgtgccgctgggaggcctcctgtagaggagggcacattctcctatgacgggaatgcgtgtgacgttgcggacgaaatccaagagtgtcaggcgctagatcgaaaattcgggagcttcgaagatggtccgcatgtagaagacggacaaatttcattcacgtggaagcttccatcgaatgaatttggacgcttctactcggacgtctatgactttgttgacggttctgaaattctcagctcgggcggcgtccctgacaactactacctcgttcaggaggacgttcttagcggatcagaagaaccaaccgcagagttggctgctgcgctgcatttggggaaattaataggtggcttgctaaagctctcgttgaacacagtgtccttgacggctagcaccaagaagcttctatttgtccttcctgcgacaggtgacactgggccaaaaacgtttgagatcgacaccagaataacccgcgcctgcctacaggccccacagcccgatatatcagtcttggaggcgctcttttctggtgaagaaggaaagctgcacatcaacgagcataagcagctgtttcgtgtggcgcttacaagtatcttggcgaaaaggcgagcagatgctactgagcctgtcttccagtatgtggtttattcatggccggatgttgttatgtcctacgagctcaatgcagagtgttacatccagaaattctccttcgagaagcttcgcggagatgtggcgcgcattgagctcgattacgccactcgcatggctgcggtgctcggagacagctcaggcaagctgctggcgctaccattgtcgatcggcggtctagctgcagtttggtccgcagatgacgtatggagtgcatctgggctctgtttcggtatgttgctggtttcccttctgcttagtggcatcctccacaatcagcggcttgcttcgaagagagttgaagcgggcttcaatctctccatctcggacgtccaaagcgcttccggtaggcatccgccgacattgcaagtagcgatcaagaaggcgaaggcaggattcgaagagcagttggacttcctccagaaggtccatatggttgttcaccctttggcctggttaccaacgctcattgcgttggcgatgatcatccttaagtttggtgcgaaggccctgcccagcatttgcgtaatcgccctctccgccgcagttgcagctgctttcttcaagtcaaagaaagcagtgtag

SEQ ID NO: 513070 - DNA, 273 bp, Stenotrophomonas maltophilia
atggggctccgtgcctgccgccacaccctagcaaccgaattggatgtcaacgacgttccacagaaggagattgagcttgctaccagccacagcaccgatccacgggatcgggtgcaggtgctgcgcaagcactacctccacaagaaaccgcaggttacccggagcaagcaagtcagcgccttggagctgtatcggcccaacgtggaattgccgagctaccagagggggcagtttgccaagctcttggccgatccaaacaaattctatccctga

SEQ ID NO: 513071 - DNA, 369 bp, Stenotrophomonas maltophilia
atgcctatcgatttgacgggattgtcggtcaaagagttgcgctctttgatcagcaccgcagagaagcagcagaccaagatcctgacacgcccgaaggctgctgccatgcgtgccaagatcaacaaatacgtcaaggatcatggctacacaatcgaggaactctacggagttcctgatgcggcggcgcccagcaagtccaagaagacaaacgtccggagaagcccttcggccagcaaactgggcaaggtggctccgaagtatcgcaacccggccaatccgaacgagacttggactggtcgcggcagacagcccaagtggatggcggcgctggtccaagccgggaagtcacccaccgattttctgatctag

SEQ ID NO: 513072 - DNA, 1161 bp, Stenotrophomonas maltophilia
atgaggatgctgtggagcagattcctggtaggcagttcggttgaggcagactggcttttgtccaaggggttcatcacggatgacgaaaagagattgccgttgccaccgcttccgcccccggcgccaggtgttccggttgttccgaccaatccattcatcccgccccctgttgccagcttgcccaacttcgaagtccttctggacaggcttgagatcgccattctggaatgggggcgacaaggcagttcggaactcgttcaggcacataaggtaaggtcggccctgtttagagccgtcgtcaatgcagcgacgctgaaggaagattggtggaagtctcctttgggtgcggacttggctgacgagctgtcggcccaccgctcaatcctccaaaagctcactgcagcccgacagcccggccagccagcgccctgggtctttacgaccaactatgacttggccatcgaatgggcggcggaatcggtggatcttcaggtcatcaatggcttcttgggcgtgcacagccgccgtttctcaccccagagcttcgacctcgggttccgcaatgcccaggctaagggagaagctcgtttcggcgtctacaacatctacttggccaagctccatggatcgctgacctggaaagaggttgaccacagcttgtatgaggtgccggcatctgaagcttggcgtgatatcgatgagttcttgaccgggttcgcagacaagctgagctacttggtccttccgcgcgcagccaagtatcttcagaccgtcggctatgtaatgggcgaactgctgcgacgattcgcggagtttatgtctcgaccgcagactgctctcatcatcagtggctatggcttcggcgatgaacacatcaaccgacttatccggtccgcgttgctcaatcccacgctccaggtggtcgtgtatctgccggagttcaagggagaccccgcagcgacggaccttccgaaaaccgtgcgaagacttcttgctcttcagacgccgcgcctgaccatcgttggtgggggaagtagggccttcaccagcgcattggcaaatgatcttccggacccaacggtctacgatcaggagctggcagatctgcgcaggcgactgatgcctgagaagccggatggaaccgaggaagccgcgccatga

SEQ ID NO: 513073 - DNA, 1755 bp, Stenotrophomonas maltophilia
atgaggagccgccaagccataggttatgttgtccaaatcgacggcgtggatatcacgctgaacctgatggacgtccatagggggcagttggctgctcacgcgcatggcgtctcggtcgtcactgaagtcggcagccttctagggattgaatctggtgggcgcctgctggtgatgaaggttcaatccctgtcgttcgccgagcctaaagaggttcaccggttcggactttcaggaacttcggtttcctccgagcccctgcgacatctaacggggctggtggttggtcggctgcgccgtgaggccggacggttagtgttcgtttcggattcgctttcctcgccggcgttgggggctgaggcctttccgctcaccgatgacgagctctcatcgattcttggcggttcggttgctacaccggcagacatccacttaggtgatgacctccgaggcggtggtcgtctgaccgtcgacctacagagcctagtctccaggcatgtggcggtccttggcagctcagggcaaggcaagagctgcttcactgctgcggtgctccagcaggtcgcgaagatgcctaaggcacgtgtcgtcatcttcgatatcaacggtgaatacgaagacgccttccctgcggataactatcctccgaacgccatcaaggtgactcgtatcggtgggtcggattcggacagctaccgcatcccctactacgcattggggcggcttggcctgcaacgcctattgttgccaagtgacaagacgcaacggcccgcactgacctttgccttggatcacctcaaccaagtgaaatggttccccggggccggtggcgtgggcctagcggtagacacgcaagcgtcgctgttcgacgactgtagaagtgatcgcgtctttgaggcccaagccatcatcaacagcctgcgggcggggacagcgccattggccacgtcatggcctcccatgctggcactcggtcctttgattgcggacagccatgccattgccccagcaaggggctcgttcgaacgcaatgcctggaactacggcaacattgcacctctcattacacgaattgcccgtttcactgacgatgaaatgttcaaagacgtcgttaacgtggatggcggtttgggcagcggtgggccgctcagttggcgagatgagtctagggccgtcgtggaacggctgtttggcggggacgaagtggagtggcgggtgcacatcgttgacctccgtcgggtatcgcacgatctcactccgtttgtcttgggggctgtcttggaactctatgcattcgagctctttagtcgtggccaagagaacaaacgagagaccctgttggtgctggaggaggcgcaccactacctacgccagttgggggccggcgatgaagccgtgaacaatgccttggcctacgagcgcttagccaaagaggggcgtaagttcggactggcgctctggttgagcacccaacggccatcggaaatctcgcccactgttctttcgcaatgcaacacctgggtgtcgttccggctgtcgtcggagaaggacctttcggccattcagtccgccagtgagtgggctgacaaacgggaagtccggcgcattgctggtctagcccgtcagaacgccttggcctttggtggcagcctacagatggccaccctgatcaaggcgccgactgcggacccgctgcctcgttcggaggacgggcggttcaatagctgggccggtggccaggttgacgctggtgtctaa

SEQ ID NO: 513074 - DNA, 1791 bp, Stenotrophomonas maltophilia
gtgtggttaccgtcggcagcaatcctctctgacccacatctcaatagagatgcattgttcgtatcgcaagtgtggcgtgagctcttggatgctcgctcgcctgacacctatcgtgcccgcgtcctagatcccttcttgctaattgaagagctgcagaaagtttgtgagctagcgaaaaatgacacgaagtggatgtcacacgttcactcgatttgtgcagagattgcagactggaaattaacaaccgacaggcttgatcttcccgctgcggctaagcacgccattggagtgatctcgagttctaccaatcttaagtatgaggatctgcatcgagtggcggagtctgccttattggtcaggcagttggttggtgagccactctacgttttgctcgctgatgctcgaagtctgctggataacggctttaaacgaaagattgagtttgttcaaacgctggcattcattgcttctcacgcgagtagattgggtgttcgtgatagcattcttatagagctagacgagtgcagcttggtctgtccgcccgaggatatcctggaccttattgcggctcatctaagtcccgagtggcgcgatttttcttgcttcttgtctgtaacagctcccattcgagacatggatagtctgttggcagggagtggttttgttagaataggattgccgcggattgaacactctgtccagggagtctcttggcacgccagtcatgatggcggctacttaacagaagtccaagtaaaggcgcggtcaagccgcctagctgctgagggcgcattgtccaatctacaggctatgcttagcatgctgtctctctatgcgaaccagtcgctctaccgaattgccgatcaggttttggtcgaggatgctgggacctatgttgtggaggacgtgtcgcctgccaagcactacgggttgttcgcccgcaaagaccacattaggaccgcgcgagagcgtatgcgccatgccggctggccggttgatggaagaatcaggaatgtgcttggtgcgcacgcacttggtatttcggccagtgatccacgtgcggccctaagtcacttctggacgtcgctggaagctatcgcgggtagtcttggctctggcggcataggcgagcgggtagcagggaccattgcgcctattgtgacttctaggcgcgttcataaaatagtcacgtatctagcgttgagcatctacgagactagaaagatcattgggacgaaactagacaagggtttgatgccggcctcgaccgatggatatgtttcccgcgcagatgtcttgtgctgcgtttctggtccagaagataatgtcggtgttctagatctattcaaagtggtatcggctaatccccttctctgcttccacctgtatagtttttggcttgagatgcatgatccaaagcttgtggcacgggcgatgagaaggtccgagcagcgagtcaagtggcagatccttagaatctatagggcgcgcaatgtttttgtccataaaggcggcggtgatgaacttgcttggcgcctgctagagaatgcgcagtcttacatatcgtttgttttgggtaggctaatgttcgacttggggtcgaacacgggctggtcagttgatactgcactggagtttgagcggcagcatttcgaacgtctgtgcgattctgcgcagcggcttggcgctgatgcaggcttaaaggggtctgattttttaaggcacctgagtgtaactgaggaggatactttagtctggggcgcgggtagccggttctttaaatctccataa

SEQ ID NO: 513075 - DNA, 609 bp, Stenotrophomonas maltophilia
atgacctcggacaacggctcgatgatgtttacgctcggcgtgggtcttttcgccgtgctgctggcgcttggcgcctatgccgtgcgccgcatcagcgcccgcgaccccagcggcaggcattggctgctgcgcagcctggccctgctgtcgcccctctgcctgctgaccggcgcggtgatcggcctgatcggcccgcatctcaatggcgaacgggaaccggcccatacccccgcactgtggggggcgtcgatgatcctggtactggcgggtgcgctgactctgccggtgttgtggcggatgctggtgcaccggcacctgggccgcccggtcaacgcgctgccgttcttccatgccagccggacctcgctgctggtgctgttcgtgctggccctgatctacctgaaagcaagcggcaaggcggcggacgacctgatgccgtggctgacaggtccaggcctgtggccggcagtggtgcgtgccgcaggggaagccatgcagatcgccatgacgtcggtcgtgctcaccttgtccttcatggtcgtgcggttcctgatgatgggtttcgcgcgccgtctggtggcaccgctccggcgctcgccagggctatga

SEQ ID NO: 513076 - DNA, 240 bp, Stenotrophomonas maltophilia
gtgggcgccggcccgccgggcatggcccggcgctaccgctccgatgcattcccgccggactcgtgtcagcgcctgtacctgccggggaggcgcgctttggtgggtgccaaccttggttggcacgggcccaacgccaaccaaggttggcgactgccgatactgccggccagcggccggcactacctgcacccggggcacttgccgaatccgcgtcaacaccttgacgcggcctgcctataa

SEQ ID NO: 513077 - DNA, 156 bp, Stenotrophomonas maltophilia
atgtcgtcggcgcggctgctggcagcggcggagaccggcggcggggtgttcggcatgcccggggccgcggactgcagttcgggcacctcggcgatcgaggtccacccgctcatgccctggcaccaggccagggagcgcgggttggcctgggcgtag

SEQ ID NO: 513078 - DNA, 5298 bp, Stenotrophomonas maltophilia
atgaatcgtatctatcgccgtctatggagtcgcgtccgtcagtgctgggtggtggccagcgaactggcaccatcgcgcggaaaggcgtcttccaccgttcgtgcagggagtcttgtgcttctttcgttgctggtggtgccgactgctggcgcgcgcgaggatgacgaagatgacacagcctggtgggcacggcagacaatgagtgcctttgtcgcaacggctggcgacagtgggcgcgcattcgagacccgggcagtcaatcgtggcgatgtgtacagcaacacgtcgcgggccaactggagtgtcatcgacggcaaggagtccatggcacttgggtcggaagcacgtgccagcggtgaacatagtctcgcggcaggcatcagcagccgtgccgcgggtgcgagaagcgtgacgcttgggagcctctcggaggcatggggagataacagcattgcgctcggccactatgccgtcaccaagaacggtgggtatggcaccgctgtaggcacctacagtgaggccaacgggattggagcaacggcgctcgggcagaatgccaaggcccgaaccgataactccattgccgtgggaagtgggtccatgacggatgccggggctggcgtctcaaagattgccatcggcggcaatgcgtacgcaggaactgcagggttcaccggcgcgatcgcaatcggtggtgcatccaactccggctacgatggcgtggcgctcggctatggtgcgaaggccgagaaatccggcagccttgcattgggctcccattcggtggccaatgaatccaataccgtctcggtgggcaatggcagcaccaagcggcgtatcgtgaatgtggccgatgcgcgcctgtctgcaaccagtacagacgcagtaaccggaaagcagctgtatgccaccaactccaacgtgaccaaggcccagaccgcagccgacggagcgaaaacgacggccacggcggcacaatccaccgccaacacggccaacagcaatgccaactcggcgctggcgaaggccaatgcggtcagtggcctggtgagccaagtatcggccgctggcaacgtaaggctgggtggtaagaacaccggtacggtgctggatgtgcgcaacaagtccaatgccaaccgccgcatcaccggtctggctgacgcatcgctcacgacaaccagcaccgaggctgtgacgggcaaacagctcactgctaccaacaccaatgtgaccagtgccaaaactgcggccgatgcagcgaagacaactgccacggcagcgcagtccatggccactacggccaataccaatgccaacacagcgttggccaaggccaatgcggtcagcagcctggtcagccaagtctcggccagtggcaacgtgcgccttggcggcgagaacaccggcaccgtgctggatgtccgcaacaagtccaatgctgttcgcactatcactggcctgaaggatggggcgctgagcacgaccagcaccgaggcggtgacgggcaagcagctcaatgcaaccaacgccaatgtcagcaaggcgcaggcagcagccgacgcgacggctacacggctgaacgccagcgcagtggcccttggcgcgggagctgtcgcggagcaggccagctacggcatcagtacggcgctgggcaacaacgccaaagcctacaacggcaagagcgtcgccatgggcgcagacgcacgtgcaactgtggatgacgcgggtaacaagatcagtggcaacgcgggtgtgtccatcggtgctggaacccgcagtggcaacggtgcggtggcacttggactggacgctgtggcaacgggtgatcgtggtattgccgtcggccatgaggcatccggcaaaggtacgcacgcaacggcactaggcttccagagcaacgcgtcggccaaccaggccacggccgttgggcgcggcgcagttgccagcagcctgtatgcctcggcggtgggcaatcaggcgagcgccacggcgcagagcgcgttggccctcggtgatcgcgccagtgcgacacatgcgggcgcggttgcgctcggcaatggctcagccacgaccgccaccaatcaggtgtcggtgggcaatggctcgttgaagcgcaaagtggtcaacgtggcggatgccgccttgagtacgtccagcagtgaagcggtgaccggcaagcagctgcatgccaccaacaccagcgtggctgctgtgaaggcgaccgcagacggtgcgcaggcgcggctggcggtactggatggcctggtggggcaggtgtcggcaaccggcaacatgcgcctgggcgccgacaacaccggcaccgtcatcgacgtggctaacaagaccggggccaagcgcaagctgcagaatctggccaatggcgtgctcagtgcgtccagcacggatgcggtgaccgggcagcagctcaatgctaccaacagcgaagtgaccagcgtgcgcacggccgctactgcggcgaagacagcggccgacgctgcccgtggcgtagccgatggcgctgttctgaaggctgatgcattgggcggactggtgggccaggtgtctgccagtggcaacgtgcgtctgggtgcggagaacactgggactatcgtggatgttgcgaataagagcggtggcaagcgacgcatctacaacatcgccaacggcacgctgagtgcaggcagcacagacgcggtgaccgggcagcagctgtttgcgaccaatgccacggtggagacacagcgacaggctttggctgggcacgcgcagcagctgacggatcaggacgggcgtatcgccgacaaccgggtcgagctggatgcgctgcgtgcggacttcgataacttcgatccggatctggatggcgtggtgaagttcagtgctgatcgtcgcttggtggatatggaaggtgcgcgcgtatcgggggtggcagcgggggatatcagctcttcggccagcacggatgcggtgaatggggggcagttgtttgccactaatctacgaatggccgaaatggaagatctgacccgcttcattgcggtgggtgcggatggctttagtacagccgcacttgctggggatctgggcgttgcgctgggcgatggcgctattgcatctgttgataaggagggggcgaccgcgcttggggcattctcgactgcgagcgcaaagaactcagtagctcttgggcgggctgccaacgttcatagtggcgccgaggatggcttcgcgctgggtggaaggtctcaggtagcggcaaagtacggagtttccctcggggcggagagtgaggtccatgcctccgcgatcggatctgttgcgctcggatatcagtctattgcgcgtgagtcagaaaccgtatcgataggtaatgactcgcttcagcgccggctggtgaatgttgcgcgtggaagagggagcaacgacgccgccaccgcagggcagctgaatgaggctctagccactttgggtggaggtgccggactggacggcgctggcagcatcattgcgcccgagtacaaggtccagggcagcacccagagtaccgtgggtgaggcactggttgcattggatggagcggtggtaaaggcgagcagtcgttcggaacgtgtcgaaagtcagatgcgcgcgacgttccagcagtcgccctcaacccgggcagatggaattggtcaactgaacctggccggtgcgcaaggcatggttctgtcgaatcttgccgatggtcgtattgccgctggtagtcgcgatgcggtgactggtagccagctgtatgcagccaagcaggatatcgccgaaaacagaagcgagatcgatcagattaaggagcagcgaaatggtctggccacctttgctcgccaaggtccgattgacttcgctggcgctcggatcaccggtctggctgatggtgatatcagttctgcatcgagcagtgatgccgtcactggcgggcagctgtatacgacaaacagcaggttgaatgatctggaagattcacaaaggttcctgtcggtaggctccgccggtccggcagtttccgccaaagctggtttggtgggtgttgcgctaggtgattcggccgtgggagttggcgagggcgcgattgcgttgggtagtttctcccgcgcaggaggcaagaactctgtagctcttggccgtgccgcgcatgtcatggaatctgcggaggatggcttcgcggtgggtgtaaggtcggtggttgacgcggagaagggcattgcaattggcgctgcgagctcagtccaggcgggtgccgcctatagtgttgccattggcagtggctctatcgccagagatactcttactgtttcgttcggggagggagcactccagcgccgcctcgtcaacgtagccaacggccgcaacgccaacgacgcagccaccatcggccagctccgcggcgccctgtccacccttggtggcaacatcgacgccaacggcaacgtcaccacccccggcttcacggtccagggccagcaccagagcaccatcaacgacgctctcaccacgctggactccgccgtggtcaccaccggctcccgcatggaccgcgtcgaaacccagctccgctcggtcttccaggaagccccgtccacccgcggcgacggcaccgcccagctcaccctggccggcgccaacggcatggtcatctccaacgtggccaacggcctgatcgccgccggcagccgcgaggcggtcaacggtggccagctgcacgccgtgcagaagcagctcaatggccgcatggatggcctggagcagcgcgtggatggccagccgcagtcgcgtgcgttgtctacggcttcggccgcaccgaccgaacaggtcacgccaacgccggaagccggcgattcgccgcaggtagcctcggcaggcgagggcacgtcgcccgcgccacagccgaagtcgaagaaggacgacacgccgtcgcccacgccgcaggtcgataccgctgaactggagaagatgctggcccgcgccaacgaatacaccgatggcgccatcagcaacttcgagcgtcgcctggacaagatggacaagcgcttcaaccgcatggcggcgatgagcagcgcgcagacggccatggccatgaacaccgctggcctggccacctacaaccgcctcggcgcgggcgtgggctatgccgaaggcgaatcggccatggcggtgggctaccagcgcgtgctcaacgaaaagggctcagccaccttcagcctcaatggtgcgttcaccaacagcggtgaacgcagcatgggcgtgggtgtgggcatcggctggtaa

SEQ ID NO: 513079 - DNA, 2682 bp, Stenotrophomonas maltophilia
atgtacctgcatgcggtactgacggctcctcccccgttcggcgttgtcgcttccatgtaccgcaccaccctgaacctgcttgctggcgccattgcgctgggcctcaccgccggcgctgccggcgccgctgaatccgccgacaccggcaaggacagcaccaccctcggcaccgtgctggtgaccggttccaacatcaagcgcagcgataccgccgggcccaacccggtgcagatcgtcagccgcgaacagatcgagcagaccggccgctccaccctcaccgacgtgctgcgcaacctgtcggccaatgccggcaacagcttcgacgagcagtacaccggcagcttcgccgccggctcggcctcgatcggcctgcgtggcctgtcgccgaagaacacactggtgctggtcaacggctaccgcgtgtccaacttcggcttcgcgctcaatacccaggacaccttcgtcgacctcaacgcgctgccgatcagcgcggtggaacgcatcgaagtgctgaaggacggcgcctcggcggtgtatggctccgacgccatcgccggtgtcatcaacatcatcctgcgcaagaacttccagggcgtggaagtgggcggcggtttcggtaccgccacccagggcggcctggacgaacgcaaggccaacctgctggccggcttcggcgacctggagcagcagggctggaacgtgctgttcgggctggacctgctcaagcgtgatcgcctcgacgccgaccagcgcgcctatacccgcagcggcgatttccgcgacaagcccggcggacgcctggccggctggtccaccgccggtggcaattggctgtccaacccgcgcgcgccacaaccgttcgccaactgcccggatggcagtcagctgcgtccctacagcgatttcggcagcaccctgcccggccaggcctgcgccttcaacgcgcagccgttcaagaccctgcagcccggcgccgagcgcctgcaggcgtcgttgagtgcgacctaccgcttcaatgacagtgtcgaagcgttcgccgacgtgctgtacagccacaacaaggccgaccagatcttcagtgcgccgctgaccgttggccccggcctgcgtgcctacaacccggctaccggcacgctcatcgacgtgccggcggtgctgccggtcggccatcccaacaacccgggcagcacgccactgccgttcgagtacaccttcttcgacctcggcccgcgcctgaaggacaacacgcaggtgttctaccgtgccctggcgggcgtgcgcggcagcggcgaacgctgggactgggaagtggcagcgctgacctcgcagagtgcacagcgcgagtacgtcgacaacttcgtcaatcgctatgcgttcgagcagatcctgcgcgagggcagctacaacttcctcaacccgtccagcacgccgggcgcgctggatgcactgcgcctgcagaccaagcgtccgggctggtacaagctgcacgcgttgaacgtgaaggcctcgacctcgctgtgggagatgcccgccggtacggtcggcttcgcctggggtgccgagttccgcaaggaatcgctggatgcgcgcaccagcgcgcaggtgctgtcgggcaccgaactgcgcccggccatcaacgtggtcaacggcgagcgccaggtcagtgccgcctatgccgaactgagcgtgccactgcaccgcacgttggagctgcaggtggccggccgcggcgatcactatgatgacttcggcaaggcgttctcgccgaaggtggcgctgcgctggcagccgctggacagcctgctgctgcgcggctcgttctcgcgcggcttccgggcaccctcgctgccggagatcgcgccgggccagaccgtcagctacggctcggtgatcgatccgctggatccgctgcaaccgggcggcagccgtggcgtgaccaacatccgcaccggcaacccggatctgaaggcggagcgctcgcgcaacttcaacgtgggtgcagtgtggtcgccggatggtgataccagcatcggcctggactggtaccgcatcgagcaggacaacctggtcaagccggacagcgcgcagttcatcgtcgacaacccgacgctgttccccggtcgcgtgcaacgtgatgcgcagggacgcatccagttcatcaccaaccagtacgccaaccagggcgaactgaccacctcgggcctggacctggacgccaaccgcaccttccgcaccgtgggctggggcaccttcaccgtggccggcagctggacccacctgctcagcttcaagcagccgctggtggctgggcaggcaccgtatgacggcgccggcaacaaccgccacggcgcgctgccgcgtacccgcggcaccacctcgttgaactgggcggtgggcgactggagcagtacgctgagcctgcagtacgtgagtggctacgaccagcgtgtggcgacggcaaccagcaacccgggcctgcgcgaccgcatcaagccgtatcaccagctggacctgtacgtagcgtacgaaggtattcccaacacgacgctgtcgctgtcggtgctgaacctgaccgacaaggacccgccgttcgaccccgccggtggctccaacggtttcgacatcagccagtacaacctgcgcggacagttcgtctcgctgggcgctcgttacaggttctga

SEQ ID NO: 513080 - DNA, 1155 bp, Stenotrophomonas maltophilia
atggacgtcaccctgctttccgatgtgtccgcctggcagcgccttggcggagccgataccgctaccgaaatcgcccagcagccagcgctgtgggaagccctcgcccaggatctgtcgcgtgcccgcgaccgcctgcaggccttcctcggcggcagcctcaacgatcccaaccagcgcgtgctgttcaccggcgccggcagctccggcttcatcgccgagatggtggccgatgcgatcaacgcgcagtggtcggccgaggtgcgcgtggtgcacaccaccagcctgctgacccatccggcgctgtacctgcagcgcgaccgccccaccctgctggtctcgtttggccgcagtggttccagtccggaaagcgtggccgcggtggaccgcgtgcgcgccgatgtggatgaggcacgcttcctcgacatcacctgcaacgccgatggcgaactcgcccgtcgtggtgccggccgtgccgatacctgcacgctgctgatgccgtcggccagctgcgatcgcgccttcgccatgaccagcagcctgacctgcatgctgctggccgcactgaccgtgttcgatcgttcgccgtgggatgcgcgcgtggcgcgcctgaagcagatcgccgcgctggcccgcgaaggccaggcgcagtgggatgcaccggtggcggtgctggcgcagcgcccgttcaaccgcatcatctacctcggcagcggcccgctggaagcgctggcgcgcgagtgcgcgctgaaggtgctggagctgaccgccggccgcgtgctggcgctggccaacacaccgctgggcttccgccatggcccgaagtcgacgctggacggcaacaccctggtggtggtgctgcgcagcgtgcagccgctggcgcgccgctacgaacaggacctgctggaagaactgcgccgcgatggcgtggccggccaggtactggcgatcggcccgcattcggacatcggcgccgacgacgaatacaccctcaccgtgccggcactggacgatccgtggctggcaccggtgtggctgggcttcgcgcagctgttcgcgctgcagcgctcggccgcgctgggcctgaccccggacaacccgttcccggacggcaccgtcaaccgcgtcgtcaagggcgtcaccatccaccatggctga

SEQ ID NO: 513081 - DNA, 939 bp, Stenotrophomonas maltophilia
atggctgagctgatcgcccacgcctgctacggcatcgacatcggcggcaccaagatcgagctggtggcgtgcgatgcggcgatgcaggtcacctggcgccgccgcgtggccaccccacagggtgactacgacggcttcctgaaggcggtggtggcgctggtggccgaggccgatgcggcgctgggccgcggtgatgccgccatcggcatcgccctgcccggcgtgcgcgaccgccgcagcggccgccagctcagcgcgaacgtgccggcactgaccggccaatgcgtggcgcaggatctgcaggcacgcctgcaacgcccgctgcacttcggcaacgacctgcagtgctttgccctgtcggaagcgcatggcggggccgccgacggctaccccagcatgttcggcgccattctcggcactggtgccggcggcggcttctgcctgcagggccgcctgctatccggcttcaacggcctggccggcgaatggggccactggagcgtgcccggccacctgctgcagcgacatggcctgccgctgatcgactgcgcctgtggcctgcagggctgcgtggagcgctacgtgtccggcagcgggctggcaatgatcgagcgccacctcggtggcagtgccgcagacgccagcgccgtgatcgccctggccgaagccggcgatgcacatgcgcgccaggcgctggacatccaccgcgatctgcttggccacagcctggccgcgctggtgctggcgctggacccgcacgtgatcgtgctcggcggtggcctctcgcagtacgcgccgctgtaccagcagctgccggcggccatcgccgctcatctgttcaacggcgtgcaggttccgccgatcgtgccaccgcgcttcggcgatgccggtggcgcacgtggtgccgccctgctcgcctgccaaccctcgttttcctga

SEQ ID NO: 513082 - DNA, 1335 bp, Stenotrophomonas maltophilia
atgtccccgttgcagaccctgcttgcctcccaccgcgccggtgccaacgtcggcctgtacagcgtctgctgcagcaacgagcaggtgctgcgtgcggccatgcacgtggcgctggcgcacggcaccgtgctgctgatcgaggccacctccaaccaggtcgaccagttcggcggctacaccgggatgactccgccgcagtaccgcgattacgtcagcacgctggccgatgaagaaggtttcccgcgcgagcggctgatcctgggtggcgaccacctcggcccgaatgcctggcagaagcgcccggctgccgaagcgatgacccacgcgcgcgtgctgatcgaagcctacgtcgccgccggtttccacaagatccacctcgattgcagcatgtcctgcgccgatgacccggtgccgctgcccgacgccatcgtcgccgcgcgctcggccgagctggccgagatcgccgaacgcaccgccgccgatcatggcctgccgccgccggtctacgtgatcggtaccgaagtgccgattcccggtggcgaagcctcgctggccgaaggcctgcaggtgaccacgcccgctgctgccgcgcagaccctggcgattcatcagcaggcgttcgatacgccgcagctgcgcgatgcgtggcagcgcgtgatcgccatggtggtgcaaccgggcgtggacttcgaccacagcagtgtgcacgagtacgacccggccgccgccagcacgctggccgacttcctcgaacagcagccgcgcatcgtgttcgaagcgcattccaccgattaccagcgcgaaagcgggctgcacgcgctggtgcgcgaccacttcgccatcctcaaggtcggcccggcggcgaccttcgcctaccgcgaagcgctgttcgcgctggccgcgatcgaggctgaactgttgccggccgcactgtgctcgcgcctgccgcaggtgctggaagaagtgatggttgcgcagccgaagtactggcagtcctactaccagggcgatgaggcagcgctgcgcctgctgcgcagctattccttcagcgaccgctgccgctactactggggcgagcccgcgctggtgcaggcggtgcagaccctgttcgccaacctggaacagcacgcgccgccgctggtactgctcagccagtacctgccggagcagtaccgcgccgtgcgcgagggcaccctggccaatacgcctaccgcgctggcacggcatcgcgtcggcctgtgcctgggcgagtacgcccgtgcgtgcagcgccaaccaggccggaacccgcacgcatcacgcagacgcggctgccgccgttgctgcgaacggctaa

SEQ ID NO: 513083 - DNA, 777 bp, Stenotrophomonas maltophilia
atgcgcaacacccgctcccgccggcaacagatcctgcagctgctgatcgagcacggctcggtgcaggtggccgatctggtcgagcgcttcggcgtgtcggcggtgaccatccgtgccgacctgacccacttcgaatcgcaaggcctggccaaccgtacccacggtggcgccacgctggtacgcacgccgccgcaggaacaggacatccacgaaaaggacgcactgaacctgccgctgaaggaatcgatcggcgcgtgtgccgcgcgcctggtgcggcccggtgacaacatcatcatcgactccggctcgaccacgatgaccctggcccgtcacttgcgcacccagcgcgacgtgacggtgatgaccaatgggttgaacatcgcctgggaactggccaacgcgcccggcatcaacgtgctgctgaccggtggactgctgcgccagcagtcgttgtcgctgcagggcagccaggccgaagccagcctcaactcctacagcttcgacaccctgttcctgggcgtggacggcctggacctgcagttcggcctgaccacccacgatgaagccgaagcccgcctcaaccaccgcatggtcgagcgcgcgcgccgcatcgtggtgctgaccgacgcctccaagttcggccgcgtcagcctgcaccgcatcgcacttctcgatcagatccacgccatcatcaccgacgccggcatcgacgacgcaacccgtgaagggctgcagcggctgggcatcgaagtgatcatcgccgagcccactgcatga

SEQ ID NO: 513084 - DNA, 384 bp, Stenotrophomonas maltophilia
gtgcatcgtgaccaggtgcaggacatcgtcgcgctggacatcgcgctgcgacgtgacgacgccgactggttcgaacagctgccgccggagatcgacggccgcctgctgcacaagctgtactacggccacttcctgtgccacgtgttccaccaggactacatcgcccgcaagggggaagacccgatggcgatcgagcacgcaatgtgggcattgctggaccagcgtggtgccgagtacccggccgagcacaatgtcggtcacctgtacccggccaagccggcgctggcgggcttctacaggcagcttgatccgagcaatacgttcaacccgggcatcggccagacctcgaaggccaaggggtgggggggctgcgactgcggatga

SEQ ID NO: 513085 - DNA, 324 bp, Stenotrophomonas maltophilia
atgctcgacggcttcttcgccgaagccgagcatggctcggctctacagaaagccacggcagccgagcatggctcggctctacagaaagccacggcagccgagcgtggctcggctttacagaaggccaaggccgccgggcatggcccggtattgcagccttatgcgtcgcggttgccgcgacgcatcacgcgctgcttctcgatcgcccagtcgcggtccttggcggcatcgcgcttgtcgtgggtctgcttgcccttggccagcgcgacttcgagcttgatcttgttcttgctccaatacatcgcggtgggcacgatcgtgtag

SEQ ID NO: 513086 - DNA, 948 bp, Stenotrophomonas maltophilia
atgtacgttgttcccaacgtcgcgcgcgcactgacgctggccggactgacgtcgttcggctttgccgcgcacgcggtgtgcgtgccggatgttcccagcgtgacgtatgcacagaccgtgccggtgcgtttcgtgcaggagcctgatgtgctgttgcataccgcttctagttcgttcatcacgatgcattgcgatagtgccgagaacctcatcgtggcaccgcgactgctgggtctgaggtatgtacgcgacatcgatggttatccggcgttcgagatgggcccggattcgcctctggtgcagcttcgcttggacgccacaccattgggcgatgaggaaggtgcagaaccttatccgatcgacccggtgaacagttccacgcactgggtctatgacaactcgggcggatcgatattcaggttcatgcttgatttctactcccgcggtggcgcgatgcgcccgcaaccgcagcgcgccagtggctcggtacaattgcaaggaactggcggcacgggcgatttctatttcgagatcggctacgaattccaaggcaccacctgcgccctgatggatgccagccccgtgctcgaccccatcagcgccgatgcgctggacgccactggtagcggtggcgcgaaggatttcactgtgcagatggactgcggtgttccgggtcgtccagtgtcgttggaaatctacgatgccaccgatggcagcaacatgagcgacattctggcgcccgcggccggttccagtgcgcagggtgtgggcctgcaggtgctgcacaacggtctgccgttgccgatgggacgggtgtgggcgcataccgattccaccggcgccagtgaacgcatcccgttcactgcgcgctatatccgcctggcaggtgagccgttgctggccggcgagatcattggccaggcggtgctggtggccaactattattga

SEQ ID NO: 513087 - DNA, 459 bp, Stenotrophomonas maltophilia
atgtctgatttgctacggaaactagagaacgctagcaccgaagatctgctcgaagaggacagggctcgtcttgatcaattctgggatgagatcaagggtctaatcgacgagttcgcggacaggcatatgcctagtcaagtcacaaacgcgatcttggcggccatcgaaaggctcgagcaggccatagcgattgcccgacgtagagttttgctgaaggaagatcttgacaacaagagcgcacagcttgccaagctagaagaagagctcgagagggagggctccgaagaagggcgaaaaagattgagagagcagatcgaggcgctgcaacgtcaaatgcagctcgtcgagaatcagctggaagttgaaagaaggcgcttggcggacgaatgtgagcaggttgcggcagcagtgagccaaattcggatcgcgatgaatctgcgatataggaaaagagtatga

SEQ ID NO: 513088 - DNA, 219 bp, Stenotrophomonas maltophilia
atgaccgccgacgatttcacctacttcgccacttacaccatccgccttgctcacatcagtgcaatcagcgacgtagttgataacggaccgcaagctggcagcagtcgctatcaggtcaacatcattgtcgccggcgtcacgctgtcggaggcctatccttctgagaaaaccgccctgcaagctcgttctgagatctttgacgcgctcgagacctgctaa

SEQ ID NO: 513089 - DNA, 219 bp, Stenotrophomonas maltophilia
atggaaatgaacaaggcccgcgaacttcttgcaagccgcatgggcccggccacgcagaggttcgacgcatgcggtggcggcggacgccccgagctgacgacgcaggacattgcggctgccatgtcgtacgtgcaggacgggcttggccgggagctgatggaggcggtgtggtgccagagagcgcttcacgccggcgcgagcatctgcgcaaggcggtaa

SEQ ID NO: 513090 - DNA, 528 bp, Stenotrophomonas maltophilia
atgtctgcccttgccatctggtactccgggcgcctggccttcaatcaagcccgttccgcaaaaagggacagggtccagacctacgtccgaatgattgcgcttgcttcgcaggaatcgcagctcgcgatgcggttcgttcggggtgggttcgaacgaaagaacccgattggcggcgatacatacggctttgcgcaattgcgagacaatttggagtcgatctctttccacgatgtcccagacccgagattggtcagcatcattcgagacgccggggccgcatgccacaaacttgacaagcattgcgacatgctcttgaacacgggcgaaccagtagatttcgtcaacttgatcgaggtcgaagacgcagcgagcgtgttgatgcagtgcttcatggaagcggcggatatcagcatcgagctgctgccctatcatcgccgcgcattcagaacggtggtggactatgcgcgcgcaaaacggcaggtattgttcaagcggcacgagtcacctctaaaaaatgatgcagactga

SEQ ID NO: 513091 - DNA, 318 bp, Stenotrophomonas maltophilia
atgacccaggaacatatcagccacccggaagggttgccgaactgcgccgccggccaccgcgcgcgccacatccacgacaagcgctgtgcgtccgccggcggtggccacctggtggagtgcgcttgcaggtcgaccagcaagcatgccgatcccgacaaggccgtagaggcgtggcgccggctcaaccggccgcctcgcagcgcgcgggcactgcctccggccaccgtccccgacaacgtcgtgcagttcaacctctgcctcgcggaccagccgacggcgaggaagagcgccgcgggaggcgccaatgggcgccgctga

SEQ ID NO: 513092 - DNA, 594 bp, Stenotrophomonas maltophilia
atgggcatgccccgctacttcgttgagtatggcggctggaattccatattcgcgtcaaagtacttctacgctgcggcagcagtgtcggggttgggctactggtatttccagcagcccaagtggtgggatttggtaacgtcagtggtgccgggcctggtggggtttgccattgctggagttgccatatttgtcagtcttgggagtgacgctctccgttcgatcattgccggcaaagagcccgagtccactgagacctcgcccttcattgctttcatggcgatgttcacccacttcataatggtgcagttgattgcactcgtgctggcactagtcgcaaagttcttctatgagaccgcatcgccaccgtctgcggctttggttgatgtgggcgtgggcctccggccacttttctggtggctcggagggctgttcttctgttacgccgtcatgctttgcctttcgctggctaccgagatattccggttggcgactatgatcgacgactatcagacgctagagaacgtccgtctcgctgaagaggcaaaggccagagagcaagctcagcaggaagaggctgatcgcaacactaattag

SEQ ID NO: 513093 - DNA, 879 bp, Stenotrophomonas maltophilia
atggaaaaagtaattcgtgttggcgcactgaacatcgtgacgcagccgcatagcccgaagacttacgagctcttgattcaaaagctcggacgcacccggagggctggccgtatcagaggcgaccgctttggactcgtaacacttgcgcctaaagctggcgggccagctagtgatccttatgtccaggggttgatcggcacatttacgcggattgacgtgaaaggcgattggatgaatgtgaagtccggcaaggtggcagagtcggacgacaagcaagggctgagcattcccgccaatctgcagcctaacgccaaatttttccgttacaggttctacctcaagagccatgtactggtcttcgagatcggcaatggcggcgcccgtctcactccgaacaacgcgggagccctttttcagaggctcgtctcaaacgagacgatcgagaaggaatttggcgaggtggtttgcaccgtgttcccggcgcgagacaccattgaagaaatcatcaatagcaagacacttcgcacggttgagttcgtcgttcacgctccgaaccctgatacgggtaagaaggccgagacggcatataaggagcgactgcagcgaatgcacgctctcagactccaccagacggtcgtggcaaagaagaaggactacatccagcccgacgagcagcttgagagcgatctgagagtcgcctctaccaatggccaggtgaaagcaacggtcaagaaggggggcaggcttgtgaaaatctcaactattgatacgccgtatgagtacgttcactcgtacgacggcaaccggacgaccaccatcgatgaaggtgagttcggcatggctgccgaccgagcattgtcagaactgagagaaggataa

SEQ ID NO: 513094 - DNA, 1023 bp, Stenotrophomonas maltophilia
atggctcagcgcttttgctgtccggagtgctttgatgatcaggggcttaagctgcagatattcccatcgctagagcctggtagaggtgattgcgacttttgcggtagtgttgatgtgcagcttctggagccgaagaagctcacaaattacttcgagcttttgcttaacgtttatgagcctgcggaaaatgggaagtctctggttgactggatgaagcaagactggaagctttttacgcacgcgcagatggattccgcgcatgcaaaggagcttttggcggaaattttggatgatggggagctggtaagaaagtccttttcgccatcgccaacatataatagtcagggattggcgcaatgggataagtttcgggatgagatgatgtatgccaatcggtggttcttgaatgtagccattgatcttgatcggcttggtcagctgctcgacatgctcctggcccaggcgctgcctgacacttggtatcgcgcgcgcatcaggacggaagatgtggacttccacatcgatcaaatgggcgctccgcccaagcgacgttcatcgcatgggcgtgcgaatccagccggtatcccatatctctaccttggatcgttgccggaaacggcagcggccgaaatccgcccgcatacaggcgaggttgcatgcgtagcggagtttagaattccagagataaaagcggcagaccttcgtgatccacgaaaactggtttcccctttcattttgactgattcgagcgaaattggtcagttgcgagcagatttgccctttctggaaaggttgggagaggagttgactcgcccggtgcagcccgctggagccgcgattgattacattccaagccagtacttatgtgagtacatcaagaggcgtgggtttgatggagttatttaccggagttcagtcagtgagggaatcaatttggcgcttttcgatcctgaggtcgcgaagggcggggcagtgactgcttaccagataacgaaggtgtcagtcgcggtggcggaggcctaa

SEQ ID NO: 513095 - DNA, 936 bp, Stenotrophomonas maltophilia
atgtatcatccttattttcgaggaaagcaattcgagctgctcaccattcgagagttggcgccccttctggctgagtctgggtttgtgccaattgttgagcctgtgcgagaaggcttgaatgggctcaagcgagctcttgaggcagtgtgcaatgcgggggggaaggtcatcgtaattgtaaatccaaactacggtgatcacagcgtcgacggcgcaagcatcagcgaatttttgggtgatgagtacggcgacagtgaaagtgtctcggctggcatattgcttagcagtgatatgactgttgaagacgcattcgcgtgctatacggctcatgaagcgcacaatccggttctggtgcacgctggatttaccattccaaaggcgttggctgctaggatggcagatcgccttccaaatttgtcgcatgttttcttggaggagcatgcgaaaattctgtatagaaagcacttcgagtctggtagcggaattatcattcgagatggattccgaaaggtccgcaatgcggattatcctgatgttgaggagttctctgacctgcatgtaacttacaatcaattggggatggatgggtttggtgacttcctagttgttggtgatgtttacagtgaaggaggtggtccggcgtacgctgtggctatccatttaacttttatcgaccctgacaatgatgatgtcatgtacatctaccattttgtgtccgatacaaaggacactcctgcggatccagcaggtaagtttgcgcaggcgctcaggaagttgatcgaaaagctagatagtggaacgtctcatatcttggatacgagtgccattagagaattcagagttcttcatgagaagggtcactttcccggccttggctatataaagaagctctctatgaagcatcatgttgagactcttgctcaatatttgaggtga

SEQ ID NO: 513096 - DNA, 891 bp, Stenotrophomonas maltophilia
atgagcggttatagcgccggacagatcgcagctttgactaggctattttccgcatccgtgtttcgcgagatggcgaaatatgggcggtcaactttgttctctcgcttggcgttgcaggctgacgtatggggcgaactcgatgatctagcgacagttggagatgcgtttgattctgcatttggagtgcttcgtgttgctggccggcgagatgaatacgtttaccgcgctgctgtgattcgcaaagtgctaatgggaactcattcgcttcgcactgcctctatgttgagcgagtttcgggtgggtggtagcaaggcggatctcgtcatacttaatggaactgctactgcatatgagatcaaatctgagcgagattcactttctcggcttgcctctcaagttgagaattataagcgtctgttcgctagggtaaatgtcatagccggcgaggctcatgtcgagcgggttttgacgacggtgccggaggatgtcggcgtcatgtgcctatccaggcgatatcgaatttctacggtgcgagaggctgtagagtgtcccgaacgtatctgtcctgccacagtctttgaatcacttaggattgcagagagttcagaaatcctgcgctcaatgggccgcgatgtgccaatggtcccgaatactcaaaggcatgcgttgatgcgtaagctatttgagacgctcgatccagtttcactccatcaggagatggtcaagactctaaagcgtacgcgcgatctggcgccgctttctgagctgcttcaagggttgccaaaatcacttcatgctgccgcactttctattgccattcatcacggcgatcatcagagacttgtgactgcaattaggacgccgttgcaaactgcaatgaactgggggtaa

SEQ ID NO: 513097 - DNA, 297 bp, Stenotrophomonas maltophilia
atgaaactccaggggcagctggccattgaggtcgacggcgatgaagtgttgtacgtcagtgcgcgcgacttcgagatcgcggaaagcgattggcgttcgaccggtggtggtgatcggcagtacgaagtgttgtgggtgtacgaagacgagggcggagcgttcgaagtaaaggtcgaggccgtccagtctgagggccgcattacgcacttcaccgtttcggtagacggcgcaagtgaggtcgaaagcgagagcgatctgactgtgtccccgtccgatatcgatccggaagatgactga

SEQ ID NO: 513098 - DNA, 324 bp, Stenotrophomonas maltophilia
atgacctacgctgcccgagaattgaacacccgcgtccagattcagaaggtgacgcgtatccgtgacccactgggtggcgaccgcgaggtgtggtccacctttgctgagacgttcgccaaggtggagccgctggtgggccgagagttcatcgcagcacaggccgagcattcagagctaacagccaaggtgacaatgcgctggcgagcagacgtgaaccaactgcaccgcgtaatgatccgcggcgaggcctacgggatcatcagcgcacagaacatccggtatcagaatcgagagctgctgctctacgtaaagcgattggcatag

SEQ ID NO: 513099 - DNA, 1506 bp, Stenotrophomonas maltophilia
gtgagccgcgccagccgcgtcatcgagttcattgagcggtactgccttacgccggatggcgcgcaggtaggccgcccgatgctgctggccgacttccagaaagagttcatccgcgccacctacgacaacccctccggcacgcgccgcgcctatctgtcgatcgcacgcaagaacggcaaaacaggcctcattgccggcctgctgctggcccacctggtgggaccagaggccaagctcaacgcgcagttggtgtcgggagccatgagccgtgaccaggccgccctggtgttcaacctcgcggccaagatggtgcagctctcccccaccctgtccaagctggtgcgcatcgtgccatcgggcaagcgcctgctcggcctgcccatgaacaccgaattcaaggcgatggccgccgatggcaagacggcgcacgggctctccccggtactggcgatcctcgatgaggttggccaggtgcgcggcccgcaatccgatttcgtggacgccatcgtgaccagccagggcgcgcacgccgagccgctgctgctggtcatctccacgcaggctgccactgacgccgacctactcagcgtatggctggacgatgcgcaagcgtcgaatgatccctgcatcgtctgccatctctacgccgcccccgagggctgcgcgctggaagatgaggaagcgtggactgctgcaaacccggccttgggcctgttccgcagccgggcagacctggccgagcagatgaaacaggccgcgcgcatgcccagcatggagaacaccgcgcgcaatctgctgctcaaccagcgcgtgaccaccgatgcccctttcgtctcgccgggcgtgtggaaggccaacggcgcagagccgctgccgttcgacggccccgtgttcggtggcctggacctgtccgcccgcaacgacctcacggcactggtgctggtgggccaggtggagggggtatggcaggtgcagccctacttctggacgccgcaggtgggcttgggcgaacgcgtgcgccgcgaccgcgccccgtatgacgtgtgggccaggcaagggctgctgcgcaccacgccaggcgcatccgtggactacgcgcacgtggccaccgacattgccgacctgctctcggacctggacgtggaggccatcgccttcgaccgctggcgcatggacgtgatgaaaggcgaactggaccggctcggcatccagctgccgctggtgccgttcgggcagggcttcaaggatatggctcccgccctggacaccctggaggcggagctgctcaacagccggctggcccacggcatgcaccccgtcttgcagctgtgcgccgccaacgcgatgaccgtccgcgatcctgccggcaaccgaaagctggacaagggacgcgccaccgggcgcatcgacggcatggtggccctggcaatggcccttggcgcggcgcagacggtgcagctgcccgcgcccgatccctaccaatcccgaggactgcgcttcatatga

SEQ ID NO: 513100 - DNA, 456 bp, Stenotrophomonas maltophilia
atgaagaagcgaaagcaacgctcagatagcaacactgccgccgtgcaagcggcgcagaatgccgcgcttggagcgctggagccgcccgcccacatcgcattccccgactcggccatgccctattggcaggccatcatgcgcaaccgtccgcgcaaccgctggaatgatctggatctggccaacgccgccgagctggcgatgctccacgacgacatggcccgcctgcgcgctgtgatccgcctgcagggcgacgtgcgcgaggacggcaagccgcacgcggcacaccgcctgttggatacagcaggccggcgcgccatcgccctgtcgaggctgctgcacgtccatcccgaggccaccgaaggccgcagccgcgatgccggcaatgccctggcactggaacgcgatgccgagcaggaggcagatccgctgatcccgatgctgcgggtggtgaagtga

SEQ ID NO: 513101 - DNA, 462 bp, Stenotrophomonas maltophilia
atgcctaagcgcccgcccgtacacaaccctttcccgcgcgtgccaggccgccgcgtccacaaccccagcaaggcacgtaaggtaaccaccttcgacccgatggcagcacgcggcatagcgcacgcaccgacgccgctggaggccaagaagaaggccaacccgaccggacgcgatgccgactcacgccgcaccatcccgctcaacagcacacgctggaggaagctgcgcgcacgcatcctggccgaggagccgatctgtcgcatgtgcaacgagccagcgaccgacgtggaccacatcagcggcgatcccagcgacaaccaccgccacaacctgcagggcctgtgccacgagtgccactcccgcaagacggcccgcgagcgcactggcaggccgatggtggtcggatgcgacgtggacggctggccgatagacccgcgccacccgtggaacgccaaagcgtga

SEQ ID NO: 513102 - DNA, 1176 bp, Stenotrophomonas maltophilia
atgaggctgtggccgttcaagcgcgcagagaagcgtgacgcatcgactgatcccagctggggccacctggtcaacggcggcgcggtcagcgcgtcggggcagttcgtggacgccaaggccgcagagaccatcgcggcggtgtatgcggctgtgcagacgctggccgaatccaccgcctgcctgccgctgcacgtctaccagcgcaaagccgatggcgaccgcgagcgtgcagacgatcatccgctcgcacgcgcgctgcgtcagcccaacgcccaccagtccggcttatcgttccgcgaggcgatgacagcagcggtgctattgcatggcaacgcctacgctcgcatcgagtacgacgccacggccaacgtgaaggcgctgcacccgatcaacccgcgcgctgtcaccgtggtgaagctggcctcgggccgctaccgctacgagtacgccgaggacaacggggcaatagtgcggctgctggaggatgaggtgttccacctggccgaccggaccgagccgggcagcatcatgggcaagtcccgcattgccatcgcacgcgacacgctgggcctgggcctcggcctgcgtgaccacggcgcatccacgttccgtaacggcgcacggctctccggcgtgctgcaaacgccgaacgtcctggacgacaacagcgccgcgcgcatcggcgattcctggcgctcccaattctccggcaccgagaacatcggcaagacggcagtactggagaacggcctcacctaccagcagctggcaatgagcctggaggatgctcagtggattgcggctcagcagttcaccgtggtggaggttgcgcgcctgttccgcgttccgcccaccatgctgcaggacctcagccacgccagctacagcaacaccgctgagctgggtagccagttcgtgcgctatagcttgcagcgctggctggccatgtgggaggccgagattagccggcagctactcgggccgatgggccgcaagcgctacctggccgaacacagcgtggaagggctgctgcgcggcaacccggaggcgcgcgctgacttctacggcaaggcgctgaaagaccggtggatgaccgtggatgaggtgcgccgactggagaacctgcccgcgcttgaccgcgcccccgaaccacctgaggaccccaccaatgcctaa

SEQ ID NO: 513103 - DNA, 516 bp, Stenotrophomonas maltophilia
gtggagcgccgcttcgctgccggtgcaaccgtggagggccgccagctgatcgggttggcggccccgttctgttctgagacacgggtagccgacttccgggaggtgatcgcgccgggtgcgttcacacgcacgctggccgagaaccgcgacattctggcactggtggaccatgacgtgggccgggtgctgggccgcacccgtagcggcacgctggagctgcgagagagcgcccaagggctggagtaccgcattgccctgcccgagaccaccacgggcaacgacctgcgcgcgctggccctacgcgacgacctgggcggcgtctcgatgggctttgtcgccaagcgtgacagttgggccggcgagctgcgcaccctgcacgaggtggagctgcacgaaatcagcatcgtgcaggcgcatgcggcctatcccaccaccaccgtatcgctgcgtagccgtcagccaggcgaccgtgaccgccttggcctgctgcgctgctggctggagacctgccgatga

SEQ ID NO: 513104 - DNA, 1221 bp, Stenotrophomonas maltophilia
atgaccctgaaagccctacgtgaggcgcgcgctgcgaaagtagccgaggcccgcgcgctggtggaaaccgcccaacgcgagaaccgccagctcaccgccgaggaatcggtcaccttcgacaccatcaaggccgcaatcaccgacctggaacagcaggagcagcgccagcagttcctggacgacgccgagcgccgcagcactggcaccgtggtcagtggcggcagcgacacgctgcccgagctggagaagcgcgtctcgctgctcaccgtggtgcaggccaagatcgatggacgcgcactgacgggcgcagaggccgagtatcacgccgaggccgagcgccgcaccggcatgaaggcgcagggcgtgctggtgccgctgtcgctgctggagcgccgcgcaccgaacctgaccaccactgccggcgagctgattccgaccgatcaccgtggcgaccagtacatcggcccgctgcgtgattcgctggtggtgcgccagatgggcgtgcgtgtgctgtcgagcctgaccggcaacgtggaaatcccgaagttcgctgcaggcctgtcggcgggctgggtggccgagaacgaggcgctgccggaatcggtgatggacttcgattcggtcagcctcaagccgcgtcacgtgggcgcgatcacttcatggtcccgtcagctggcgcagcagtccaatccgagcatcgagcaactgctgcgcgacgacctggccttcgctgtcggtgcagaggtggacaaggccatcatcaccggcgatggcgtcaaggctccgctgggcatcatcaacacggccggcgtgcagaccaccacggttcccaccacctgggaggaagtgctggccgtagagggcctgctggaggacgtgaacgtcgctccgaactactggtacaccaagccgagcgtgctgcgcgcgctgcgcgggaagctcaaggcagccactgccggcagcgagtacatcgccaccgccaaccgcatcggcgagattgccgccgccacgtccaacgctgcaccggccaacaccgcgatcctgggcgactggacgcagctgatcctgggcacgtggggcgtgctggacctgctggtgaacccgtatgagggcgaggcattccgccgtggcaacgtgctgatccgcgcgatgatgacctgtgacctggtggcacgtcatcccaaggcgttcgtggtggccaagccggcaaccgggggctga

SEQ ID NO: 513105 - DNA, 243 bp, Stenotrophomonas maltophilia
atgggattcagtggcgtaatttgtagcttcctgacgatgccgatttgcgcagagtcctggcggcttttccgtgcggtcccggcgtggttgcgtacggtgcgttgcaactgtctctccagatttggcgaggtggtgaacgtggtgcatcggctgcagcgggcgcatggggtgagcccgctgcagccctgcgcagcgtgctgcattctttcctcatgcgttgcactgcagtgcctgtcactgtga

SEQ ID NO: 513106 - DNA, 981 bp, Stenotrophomonas maltophilia
atggcaaataacggaggctttttcgcaattggaaaacaacaatggaccaaggcttgctcacttggcctgaaccatgcggttacgcttcttgtgatggcacgaggtactggcagggacaattgcacaacgtcttggagcgcagaatccgctttcaagtacaccggacttgcatggcggcgcggcaatgatgccattgccgcgctatgcgaagcgcagcttgcaaccaaggaacagtccgggaagcgcccccgctataagctttccaaaccagatagcctggaagatctgatctggcttcccaatgagttcgtgacgggcgcagcaagcgaaataccgccattgcgcaagctccgggaaggccagagcgttgagcatctggaaacgcttgtagagctttacgcagctcaggatctagtgggagacggcgggatatccagaagcttgttccgagcaccatacgacgtgcgcgaacgcatttgtggacgaggcccttttgagatcattggcttctccagaagcaagcgtgtggatcactgcagctggagtggcccactaaagcgattccaacacgccaaggtggaggatgattcacagcatcctgtatggatatttctccgctcaatggagcgcatgggtctccttgagcgagcgacctacctggtagagagcgacaatcaggacgccgagctgattcatcaacttgaaggcgatgatctctctcagcggaccgccgatgccgccgcagccctagcagactcactccctggaggatttagctacgaggcgcagcgcttcgatttcgtgctgcccatccctgaacatatggccaaagcaacagtagtcggcatcatgcggctgagatatcgccccaagacgaccaagacggcggcttggtacggccggcatgtagaaagctgtgcaaggtatgaagcgctctacaaccgaattgccgagggcgatttcagcggattggccgcctag

SEQ ID NO: 513107 - DNA, 357 bp, Stenotrophomonas maltophilia
atgagttctatcgtacaccaacccctgccggccgcaatcgggcatttccccgatgcgctgccggacttttctgacaccgcgcgctgggcccaggtgctggtacaggacaacctcaacgccccgcgctatgagccgggcgacgtgttgcacgtggacctgcgccgcaactacttcgcgggagacgcctgctatgcggtggaaatcgcagggcagcagtccattcggttcgtccaggcccgccccggcggactgcacgtctacacgcgcagcaaccccggcgcagcctacccaatccctcccgacctgctggtaatcctcgggatggtgacgtacgccactaccacgcggagggtctga

SEQ ID NO: 513108 - DNA, 291 bp, Stenotrophomonas maltophilia
atggatcgtgaccccaatccgctgctgtacgtgcgggagtacctgccgaccacgttgcaagccactgacgagcaggtccgcaaggtgatggacgagtgcattgagtgcatcgagacccacaccagccgcgacctggaatcgctgactgaggagaattccggcctcgtgatggacgtggtggccgcgctcaccgcctggcagatgacgcccatcagcgcccccaaggacgctcgggtgacgctcgctctacgcctgctggaccccatgaaatccacgaccaagaggcactga

SEQ ID NO: 513109 - DNA, 306 bp, Stenotrophomonas maltophilia
gtgagcatcccgacccttgagcaggccaagacccacctgcgccagatcgacagcgacctggacacggccataggcatcgccatcagcggcgcacaggccgaaatggatggctacctcggtggcgaacccacggccacccgctggccggcagaggcagcagtccccggcgacgtgctagccgccgcgctgaccctgacggcggtgcacttcgaggccggcacgcccgacgacgcggagcgccgccgcaaggccgcctacgcgctgctggcaaagcaccgcaccgatgccggcattcggggggcgtga

SEQ ID NO: 513110 - DNA, 207 bp, Stenotrophomonas maltophilia
atgaccgatcccgcgctcaaactcgcctaccccatcgaagaagccttcgggctgatcggggtctcacgcactcgcggataccaactcatcaataccggcctgctccagacctacaaggacggcaagcgccggctttgcagccaccccgccttggttagctgccagcaggcaatggagaaggcgtcgcgcgagggcaaggcggcgtga

SEQ ID NO: 513111 - DNA, 882 bp, Stenotrophomonas maltophilia
gtgagtgtcgccctctggttccaaaatttctgcgcttccctccaggtcgataccgcatctacgatcagccaacgctacggagccatcaccactcgtctcaatacagacttctggatgacaacctctaacaatgcccatagcctctatgccgggtcatatggtcgcaataccgcgatcagaggattcagtgatctggatatggtgttccagctgccgcaaagcctgtttgcgcgatacgacagctatgccagtaacggccagtccgcgctgatccagatggtgaagacctccattgaacgaacctactcccgcacctcggttcgcggcgatgggcaggtgatccaagtccccttcacggacggcattacctttgaagtagtgcctggttttcagaatcagaacggcagctttacttatcccgacgccaacggcggtgggcggtggcgccagactgatccgcgcgcagagatcgccgccatgcgggatcggaacacggcggtgaatcataacctcgttcctctgtgtcgcatgatgcgccagtggaaggcagaatggatcgtacctatcagcggactgctgatcgatacgctggcctatcagttcatcgagaactacgagcaccgcgccaaatcgtactactactatgactttctatgtcgtgatttcttcaagtttatgtctgaaagaaatcggacacagggctattggcgggccccgggcagtggccatcacgtattcggcggagatcttttccagtacaaggccttgcgttgttacaacctcgcggtagatgcgatcaactacgaactctccactccaaaaagagagtactccgcaaagcaaaagtggggcgagatcttcggctctcggttcccaacctga

SEQ ID NO: 513112 - DNA, 1536 bp, Stenotrophomonas maltophilia
atgactgcaccatcaccgaaccaccgacatacatcatggatgcagaagctggctgagggccttgatcttccggtctcacgctacgaagccgccgatagaagttatcactcggtcagcgagtggctagagcgcgaggcatccgagttcgctgatagccgtgtgcgggtttacacccaaggctcctttcgcctcgggaccgccatagcacccgttcaaaccgatgcagactatgacttggacatcgtgtgcgagttcgactggtcaaaacatcaacgaacccaagccgaactgcatgccgctttgggccgagagctgatcgcctatgcgcgccgatacaacatgcaggtgcccacgccctggaatcgctgctggaccctaaactatgcagatgaggcgcggttccacatggatgtactgccatgtgtgcccgatggtcagcgccagcgctacctgcgcgaggcggcatcgatggcgctggaccatgtcgacatgtcggtttcgattaccgacaaggaacatccgcagttccactcgatctcggttgattggtcgatcagcaatcccaatggatatgcggactggttctacgagcgaatgcgaccggtgttcgatgctcgccgcctgcagatgatgctcgtagaagccaaagccaacgtggcggagattcctgcgtttcgagtacgcactccgctgcaactgaccattcagcttcttaagcggcaccgtgatatgcgattcttggatcaggacaatgccttcaggcccacctcagtggtgctaaccactttgtctgctcttagctatcggcaagagggcacggtgttggaggccgtagtgtccatcctccagtgcatggacaccttcattgaatcgcgcggagagatttcatggattccaaatccggccgatccacgcgagaacctcgccgaggcgtggagcacggatgtgaggtatcgggaagcctttcaggagtggcttgaagaagctcgcacagacgtccgtctggcattggagagtggctcgcaggaggagttcatcgacgcgtggtctccccgactggggcgcgagctggtggagtctgcagtcggccatacgcagtccgggtcgcttatcacccgtacctttactggcgcgctcagcaagctacgtgacgcaccacatcgcgctccggtcttctggccactgtctcaaacaggaatggtcgtcattgaaagtgcccattatgttcgtgatggcttccgatcccggcaattcagtgataatgggcgtgtcccggtgggctccaagctggttttcacggctagcacgaatgtcccctctccttatgagatctactggcagatcattaataccggcgtcgaagccacgcgcgcgcgggatctgcgcggacgatttgaggacgccaagacggcgcacgggcatctggtccgtcgcgagacggccatctatcgtgggactcacagcgtggaatgtttcatcgtcaagcaaggttactgcgtggcgcgctcaggcttgttcgttgtgaacatcgaatag

SEQ ID NO: 513113 - DNA, 555 bp, Stenotrophomonas maltophilia
atggacgacctactcgaagaccagattcgggagtgctttggtcgcgtggtgtacacccacaagacgcacgagaaaatggccgacctatgcgctgacacgttgcgccagttcaagatcgcccagatcgtgctgtctgcactggccacctgcggtgtgatctccttgttcctgaccgatgagctactggccaaaatcataacggcgctactttcgtttgccagcttggttgttgccggctacatgaaggggttcgatccgggcggtgccgcccagaagcatcgcgacgccgccgcactactctggagcgtgcgcgagtcctatcaatctcttcttaccgatctggttcgcggagcattgtctgccaccgacgcaacagctcgtcgtgacgaactacaagatgccgtggcccgaatctatcaaggtgcgcctcacaccaacggcaaggcgtatcagacagcgcagcacgcgctgaagcagctcgaggactacaccttctccgacgacgagattgacaattttcttcctgcgtcgcttaggaggagtgctcgcctatga

SEQ ID NO: 513114 - DNA, 462 bp, Stenotrophomonas maltophilia
gtgatccggccgatcattctgctcctgaccgcaagcatggccgcgtgtgcatcgcacccggccgatgccgtgcagtgtcccgaggccacgatcacctacatcggcagtgaaactgtggataccgtggtccttggcaggttccagatcgctacggagggatcgcaggcactacggctgccactggccagcgtggatcggcaggcgcatgcacacgcggtatcgaccgagatccgcgacgaacacggtctggcctggcgtcccttcagtgttgttctggaagagctcaagccgccggctgcggacctggtggttgcacgtggtgagattgaaaccttcctgtacgacggcaagggcgccttcctgcccggtgccgtgcagaaagggcaggcgctttccatcgtcgtgcgcgatcttcaaggttgcacacatcgctcgatgccgttcgctcctgagccacgttga

SEQ ID NO: 513115 - DNA, 615 bp, Stenotrophomonas maltophilia
atgttcgctgcacagcatcgggggagtggcagctgccgtgccaccgcattccgatctgacaggaagcctgcatgtgacccagggagctcctccaccctcctcttccacccgcgccgtgccaccgccgaattcgccagacatcacggctgctgcatggaatcgccgcccacgcaatggccgcgcgctcggcctggaacattggccgcgttggctgcgggcaattcccgacgtcgagcgcgctggcgcattgatgcggctgttcggcgccttgtttctgctgcttcccggcattgcgctggtggcttctacgtatcggcacgccagtgcagcggcggccgccgccgtgttcctgttcgtcacagtgcatgctgcgttgcatgggttggcggcgtggcgagcggcaaccacgcacgcgattccgccgatagtgcgctttctggatggccacgccgccggaataatgatcgccagttcacttctgatcgccatcggtgcagggatggcgaagctgcctgtttcaccgttcttctggctgctggccggcacggtgagtcaactcttcggtgcgcgaatggcaggccagcggctgcgcaacgcgttgctggtgctcggtag

SEQ ID NO: 513116 - DNA, 408 bp, Stenotrophomonas maltophilia
atgcctgaccgtactcccgacgttccccgcctgcgcgagctgctcggcactgcagtgcgcgatctgcccgcggccctggccgagaagctcgaaggcgctctctgtagatctgcggagtccgtcgtgccctcagcgttcttcgcacaccttcaagggcatggcggcaatctgcgcgccgacggccagccctggaccgaaacccggctcagcccaggccgagccttcgatctggccctggccacccgcagcgcgtcgggcatcactgcgcttatcgccttgctgcatgccgcgcatgtggcgcgggagagcgacgatcccgcgtgctacccgtccgcagcgctggtcgacggcctgttcaacgcctgccaggccctgtcgctgcaggtggagcgctgcctggttccgtga

SEQ ID NO: 513117 - DNA, 615 bp, Stenotrophomonas maltophilia
atgctggaactggcgcgctgcttcgcgatggtgctgctgctggttgagcggatgctggtcgatctgcgccatgcggcgcgcaccgacggcctgaccggcctgctcaaccgcggtgcggtgctggccgatggccacgcgcgtctgcagcgcctgcgtcgacaggggcggccgctggcgctgctgctggtggatgtcgatcacttcaagcagatcaatgaccgctggggccatctggccggcgaccaggtgttgcgccactttgcagcggtgctgcagcgctgtacgcagggccgtgacgccctgctgggccgttacggcggcgaggagttcgtgctggtgctggccggcagcacgcagggcgaagcaatggcaggggctgcagcgatccgtaccgctctgcagcggtgcccggcgcgcctggccaccggagcggtgacggtcaccgccagcatcggtctggcgatggacgaaggccacggcgacctgtccacgctgctggcggcggccgatgcggcgctgtaccgggccaaggccgagggccgcgatcgcctggcctgcgccgtcccggccgggaatccgcctctgcccatcgccgccgacgcgctgcccgtgtaa

SEQ ID NO: 513118 - DNA, 1482 bp, Stenotrophomonas maltophilia
atgcggcctccttccggaaggcgccggcgcaggcggccccagggttatggtcagggagcgctgctacgtgagtcatcctttcgattggggtgtcgtatcgccagctcgctatgcatggaccgagaccgtgggcgagtgaattatgttgcggcgagctccatctcgacgcggcgattggggaagatcttgcagaagaactttttgagtgttgttgacctgttcgcaggctgtggcggcttcggacttggtcttgaagaggcgggattcacgccaatcttcgtcaacgagcttaatgacgatgcccgcagcacctacctcgtaaataggcgagatcgctacgctcattttcgagaaggaatggatgaatcgcgttggctaaatccatttagctcttctgatgcgcgaaaaatgacgaggaaatcctacctcgatgatctggagtccagattcgagtcgactttcggaataaaacacggggagatcgaccttgtcgtcggcgggcctccttgtcagggtttctcaggaatcggccatcgtcgttcctactccgtagacaagcatgacatcccatccaatcatcttttcaaggacatggcgagcatcattcgccaccttcagcccaaggcgttcgtctttgagaacgtgaggggcttgcttactgcgcgttggactcccgaaggggagcctggcgaaatttggtgggcggtcaagcgtgcattcgcacgcattggcaactatagaattgcttcccaattgctacatgcaaaggattatggggttgcgcagaatcggccgcgagtaatgctcgttggaatccgcgacgacattgcgggggcggctactcgcgtcgactgtatcgatgaaatagacgacaccgccatcggtcttggttttttgcctcggccgatcggtggagccccagatctgatggatcttcttggcgatttaatagatccagagtatacaaatggcgggcagaccgctgtctatccgaaagggccttcggctgatatccagtatctactcaggaaaaaactttctggtgaggtagctgaaatgggcgcgcctctgacggatcatgaatatagcaagcatagtgaccacgtgaaggcgaagtttcaggcaatgatcaatggtgaccactacgtagggacgaagaaatttgcccaacgtctgctgcctccagtttggggcgctaaagggccaatgatcacagcgacctccctacccgatgactacgttcacttcaaacaagcgcgaacgctgactgtacgagaatgggcgcgacttcagggttttcccgactggtaccagttccgtgggaagcggaccacgggcgggattcgacgcgcaggaaatcctcaagaaggaattcacttcagagaactgccgaaatacacccaaattggcaatgcggtaccggtgccgctcgctcgggaaatcggaaaaaacttggcgggaatccttcttgcgaagcggtag

SEQ ID NO: 513119 - DNA, 1974 bp, Stenotrophomonas maltophilia
atggatacatcatcagatcgtaagtttgaatgcgcgcgcgctacagccatcagcgatggattggaacgtctgcaggggagagcatttggcggcgaagacgtcgctgccaagcccgagaagccggatgataaatggtggcctcgagcggcacttcttccgggagttcaagccgcaattgatcgctttagtacaaatccatcgccggaagtggcgatggaggtggtcttccttatgggaggtgctggaaacggaaaatcattcgcagcaagagagctgggtgagcgccttgggcttcgcaacgaaaatccagacgcgctggcgcagcgaacctacactgcgaccgttgatggcgccaagtactatctgctgaatgatgcgaccatcgcgcccaggggcgattacgagaatcaagagattgctttggcaaccgacctgctcgactggttcgagcaatcctccaaaatgctggtgcgcagcttctgttgcgtcaatcgaggcatcgtggccgatgagattcgtgggctgcaagaggttcagggtgctgagccttcgctttcattctcgatccttcgatggctagcgaatcctgaagatctgaggttcgatcagatcggtgcgactgagctgagggccctgcagcacgacgttcagagtgctacacgagagttggaatttgtacttgcgggtcgtcgcgtaaggttgctttcccttgccgtggactcttactcgctcttcgagctggatggcagtgctggacactcccgtggccaggcattgttcgcagagctactcgccagatttgatggtgtggaaggagaacgaccggacttgtgcccgattcgctccaatatcatccagtggcaatctcaaacgggtcagagctcttggcagcagctgatgtcatctgcagagatcgcgtcaggtcggttgtatagctatcgagacgtatggggtgctgcagctatgtcgctgttaggtccaagggtaaatcttggatcaaaaaaccaagaaattctagagtatttggattcgctaataggtgttgcgaccaactgccccgatgctcgaggccgacttgccgcagttatttcgctctcaaagcatcgcgcacactgcgcagtcttccgttctccagttccacagatagagcttgacggcaccgagtttccacctgcgactccgatccacgccgggctggcattggttgatcctgcggtatggagaagcgctgactcgaaaagcgtggaagcagctatgcagtgcatagcaatgggcgagcttcctagcagagagctcttgaagatacccgatgttcctaatgtctggtctaagtttgacgaatatctggaaaggactctgctcgaatacgtagatagtccgaagtgtaatgacatcgaacgtcgcagactgatttcttggtacggcgcatacgtcgcgcgactggtaggtgtggcgcgaggtgcctatggaaacgtcaatgtaatagaagagtggcggagatgccatcgatcctgcatctctggatccgcgaggctcccaatcgagctcgagcagtcgatcagcgcgcttatatttcctccgcatcctgacggtcccgccagtagcatgctgttgcccgccttctccgttagggcggagcctgtctcttctgttaaggaacaagtgcagccaaagctcgttgagatcgtttccgtcgcgagtgtaagccttcaggtccgaaggcaaggaagcaggttggttatcgaatgttacatcgcaggtaatccagcgccgattggccagcttgtgcttgacttcgcactgattcgagaggcgcaggcgtttaaccagggactctgtggccagaccgaatccacgacttacattgagccacgcatcgaaagatgcaggtcttcaagcatggctgcaattgatcgaacgcagcgaagacttgcggttgtggccaatggaacctacaaggaagttgagagatga

SEQ ID NO: 513120 - DNA, 1449 bp, Stenotrophomonas maltophilia
atgagtaattatttccctgagctaaagcgaccgcagtatccatcgagcccggaaattcttctctcggctttggcatggtcggtagtacctaggccagccagtgctccccgcaatacggggctgatatacgttagaaaggacagcaacaacttaacacggccatcagcatccaagttcaatactcaccctaccaggcctgtaggtgaggatctgacaaagttttcagaaatcctaaagaagaaggggttcgtcattcacgacgggacacttcctgaattcgtcgttgaggccgttacggactcattgatgggtgcgcgtgctgaaaagggggtcggatacgcatcgtctgctatcggcctgtgtggcgcattgcttcaggatcctgcgggaggtctaggtgcaccaaatccccctaactttgccagtcttctaaatacgatgtacacgcttggagggggtgagggatctgcatccgagctttggttcaaagttgcaactcactatgcggccgatcctacactgagtcgcatagaggctgcgctggcaaaaacgactctgagcgaattcctgcctgcagactggccgccgactacagtgcagctacacgagggagcccaatcgacggccctgccttcctggtggcatgaggacgtgattgcgaagcagattggaacgccattctcctggttccgcgacagctgggacagactgtgctctgaaagttggtacacagcattgacgccgaggaagtgggcggcgtgggcggtttgtgtgctgcgcaatgcgctggggttctccttcctgtgggaggcaaatttctttgcggaactggttcgcggcgttagagatattacgcgcgaaccctatgctgtcgcgcgaagtgcgcttgtgccaacgcggccgctgattgcgtaccaaaaagggagcattgctcaaatggatgtcatgcctgggataaaacaggcattgattcaagggtcggcatatcgcaaagcccttggcgaggtgctagaaggagaaggcgacccctgcagaaatcttgttgacgtaattaacctgctgaggcacgaccactctgcggcgctcagggaaaaactggaggtcggagacgtatctggcacgactaacctcgttgagacagtgcgctattcgctaatcgaacgtagtgcgtccgatgttccagatcatcatgcgctattgagaaggatcagtaggaactacactcatgtatcgccagggccggagtggattgttgtcatggcagcagtttccgcctcctctcccacgcaagagctacgccttggtgacgtacagaggcaacttgattcgctggggctgaaaccgcgaattgacttccttcttgccgagctggagcgcgcagggctctgcgtcagtgcttcagatggcgacgaggggatacagattaatttgggtattggggggaactaa

SEQ ID NO: 513121 - DNA, 5424 bp, Stenotrophomonas maltophilia
atgccattgataggcaaggcaattgcgctcatcgctgaaggtatgggtggccagcttatgctggagctgccggatgacctgccgccaagtttcgtgcgggaaattgttgacggggcaaacgagcggattgttcaagaaatcaaattcgcgatgttcgttcatgaggcgcgggatgacgtcaaggaaatcatgcctcgcgtggatttccgcgagcttgcgatgttccgtcaagggcggcatctcgcagtgacatatgcgagcaagaatcgcgggatgtccacctatagcagcgtctaccccctacttcttagcagtggtttcccctccatccagtctggcgaggcaggagctggggtagcaacacttgaagacttctcagctgctctggcggttgtcctcatcgaggagtgtagttccctcgaaatctcacatgagcaacttgcttcagtcacccgggggattgtgaaatttctcgcggatgcttacgagctctccgtcggtgggaaggcaagcgtttcccgcgactggtggctgcacgttaagcagtgggccgagaatgtagtggcattcgcaggggggcgtggctccaggacgggagcgttcttgtacggcgccgcgggcttgccgaatcctgtctcctccgatggccttgctatcgcgcccaaagactacgttcggaagctcgaaagcgattggatcgatgcggatggcattcgtgtagagctcggtcgcctcgggatgctgggtgacgaggcttctggcgcgaagacgctggagaaaatcgattgggcaaacgttgttgagagctcagagtacgacagcggctcggcggtggcgcgagtcgctgcgtctgcaactgctgatcaggagctcaagacagagggctgggcggcgatcgacgaagcgacgttcaagtcgtctagtagaaatgaccgcatgcagatggagatgcggcgaaatggaaaagcgctaccttctccgttcccgaatgccgtaccagtactaatcgcgacagccggagaccagtttgaaccgggttcgcgctcttctacgtacctcaatatcgagatcgtcgttccgctctctgacggcgctgaagtgccttctgccgtgctcgatggttttgagcttccacaagtaagagtgcaaggcgtcggaacttatcgaggctcttcattcacgcttaagtctgctgtcaaggtcgcagggagcatgcacctgctgggcgacctcaccatcaagactggaaaagcgaagcagagcgaccctgctatattgctggaggctcctgagtacctccgaaaggtggagcctctgaagtttgtgcagattcgctcatctgagtgtgcgctttggctgaaggaagagtcatcaaaacgtcaggcgccacgcttctgcgttgtcgacgctcatggggcaatggaggcgacccttcttgtcaacaaaccatctcgctatgaatttgctcttgcatgggggcatgagctcccgttcgatcagtccacttggcaactgggcgacgagcatcttgagtgctcgtcatggtcaagtgcggatggtgcattcgctattggcactgaagacctcacgtcgactgttgaactcaagcccaagcctgaccctggttgcaacctgaaaattttgctcgacgttgcatctacggcggcaaggcctctctctcctttcgtagccgcagctactggtgcacgccctgcgacagataggctgctcgagccttcggtgcttggcaagctcgaggcagagttcaattgcatcatcagagaactagctgaagggcacgcactgggcgcaattcaagcaagtagttccaaagttgctgagcaattcgagactatctgtcccggcacaaaggctgctacgagcctggctggtcgcttggacatatatcctgctcaacctactgctgctctgctcgagctgcctgagtacaaaaggctgcgtgaatcgtacacagaacttggattggtagagctctcgctcgatacagagggcagggagaagtctggcgagctgacagtgtctcgacttccgctcgactcgctggatcgagagcggatcggggccgtgttgtcggcttatagggaagtgctctcagtctcggccactctccagccttcagatcgattctgggccaggaatcctttctcggtcgcggtgtaccctgttggtagtggcgtacagcaagtttgtgcagtcctgctgagtcccttgcatcccattcgtcttgcatggagctgggaggttcaggtcggccttcgcgaggcgtatgacgattcagcaagcccttctgcctcactgtcactactagatggcaccaacttccctgcactggtcagcaacctcgatgcattccaggaagaggaggccttcttgccggtgcctgtggatgctcggccttccgatctgtatataggatggcatgtgagcgttccggtttcttcgggatcgccagctattcctgactggcttcagggagagcgattcccagcagaggggctttcatccctgactccctcgtcaatttctactgctgtagatgacttcttgcgggtttcgccagaagttcagacgcttagaatcgcagtaactagcaatgtgcccactcgacgatccaacgtgatggatgaggggctccttagcaagctcagggaattggcagagtcaagcgcagagctcgagggggtctccagcgtaaacatcaaggattcagtcaatcgacatggggatatcccgccgcttggacggcttggggaggctttgctgtcggcacgtcctggattcaatctcacctggcacaccgcgccagagggtgatgtcgctgagaaccatgtcacctttgtggagggaggcgcagcaagagccggattctcccttatagggaagtcgcttggatggttgcctgatctgccgcttcgaaggacgccggttcgaaaaagtgccattaatcactcagttctcgactacagtttgaacagcgaggcatcgcgagagagtggactcgccaaggctttgcttgcgtatgaacagagcgatagcggcaaagcatgggccgtgaagataatgcccaatttttctggcgcgacagcgaaccccaactggctagtcgccggagactttggtgtggatccgcagtccctggctggagctgtagccagccatgtcggcggtagctacgtactttgggattggcgcccggctacgactgtttctgccggaagaggcggggctatgcgggtgcagccgtactttgtcctcgcgagcgtccccggtgccctcagtggtgctattcgcgatcggttgagccgtctcaactcagttgcgtctgaggatgagatacggcagcgtgcgaagctacttgttacgacactggcaaagcgcgccattggcctaaacactctactttctgttggtcaccatcaggcaactggcgcgattggatttttctttgcgctcagttctctacagcgttgggtggatgaagccccagcaggagaattgcgcctggtacttccggtcgatgctgtggatcctttccttagggataccgtcggttatccaaagggggacaatcgacgtcgagctgacctcatcgcgatatcggctcagagtacgaacagcggcctgtaccgcgtgaacctgattccaatcgaaatcaagcattacggtctagtcaagactgagcgcgaagtagggttccccaaggcgggcgaggagcgtcttcgcgagcatgccgaacagctcaagatgtataagatgcaacttgcggaactttgcgccggcgtgacgtcagcagttggaagcaaggcgtccatgcttaggcagcgactacttgcagtgctcgatgccgggttgcagctgaacaacacccagagcgccgatgctgtcgaagtccttcggtctgtagcggagggaagggctcagttcgccactggtaccggcattctcatttggtatcaagcattcgccagaactgaggatggagagactgctacttgggacgaatttggtggcgactatggcgatgagtcagatcgacggattgaaatccgcataaatcctgcagaatatgactctagctactggggggcttccgctgtggggcgctgtcacgatgttgttcttcaagcgctttcggcggcgaacgaagatcaggttcgtgaggctgatgagcttgacggccagccagtggcctcgcccgaaccggctaaagggggcgaggttgaactcgatgtgaaaatcgccgatgtcgatagtcggtcccctaatggcgagtctcccgatggcgtagctgaggtcgctgcaacggtgtcgactgcttttaccaattgtgctgaaacgaggctaagcagtaaggtgctagagcataagtacgaccagcttatctcggctctttcggaatttcatgtaaaggtgaaccgacctaaagatggagtgccctacaaagaggggcccgcattcgtagaatattctgtcgtgccggcctatggcgtttccgtaaatcgcgttgaggcccagatccaaaatctgaagctgaggatggggctcgccgcggatatgcaattgggctgctcgacccatatgggaaacattgttatatccgtcccgaaggatgactccgagcgttactttgtagatgcgcaggagatgtggcagcgctggaagcgcccgcgcaaaggtttcgtagttccggtgggggaggattcctctggtgaaattgccgagatcgacttttctagctcaaattcacctcacctgttgattgctggcgtgacaggtagtggtaagtcagaagcacttcttaccatccttcatggtgctgcgaaattctattcatctgaagagctcaagctgaagctcattgatcctaaggggacggaactcaacaccctcgaggggttgccgcataccgatggcccgattggcagcatggctgaggatgccgtggagctccttgctagcgctgttgatgaaatggaagataggtaccggttgttcaaatccatgcctggccacgtgaggagtatctctgagtaccaagcgtctggcggagaaatggcgcgctggatcttggtgcttgatgagtatgctgatctgacaagcgatgatgacgagcggaagaagattgagcagagcttgcgaagaatctcccagaaggcccgtgccgcaggtattcatgtcatcgtgtcgacacagaagcctgtcgtgtccgttgttaataccgtggtcaagggcaatctgccgggaaagatcgcacttcgggtaaatactgccactgaaagccgagtggttctcgacgagggcggggccgagcaattggccggtaagggtgatgcgattattaaaactggtaatggacggatgagggttcagtttgcccgttacgatgttgccggggagtcgtag

SEQ ID NO: 513122 - DNA, 504 bp, Stenotrophomonas maltophilia
atgaccagcgcactggcacgccgattggcctgcgccgcgctagtgaccgtactggctgtcagcggccgcgtaaggccgccatccacgggcttggatgacagcaccgccgccacgctcacgggcgccaccagtccccgcacgatgggcgaccgcacccgcacgacgcggccggtggagaccaatctgggcccgcaccgtttcatgctcccgggcaacctctactacaaccaaatcgacccgtttgccggtggcgggatgatgctggcagtgttctggaaggacttcgataccccgccgcagggggatcatcctatgcagtcggtggaagatggataccggcaggtctcgatagagcctgcagtaggtggatggtgcggctgcggattatctggcgcagcgtttggcggggcttgcgacgctgacgccgcgctgggggctgatgcctgtgcagtggatcgctcgtgggtgcctgacgatgtgcgggaggtgacgccggactggtag

SEQ ID NO: 513123 - DNA, 192 bp, Stenotrophomonas maltophilia
atgcagttggccgacgccaattgcaccctaggcggcctacgctccctggtcacgatggccttggctgaggagctcacgcggcagaacggcgcgccagaacagcgtctgggcgaccggcagatggaggggctactgatggcggtactttcgctgacggtgatggccagcgagcgagtgcaggggcagcggtag

SEQ ID NO: 513124 - DNA, 288 bp, Stenotrophomonas maltophilia
gtgatcgtcggctgggtggttgccgactgggtgatcgtcggctgggtgatcgtcggctgggtgatcgtcggctgggtgatcgtcggctgggtgatcgtcggctgggtgatcgtcggctgggtgatcgtcggctgggtgatcgtcggctgggtagagtcgactgttagtcgactatcgcgcgcagcgcgggcttttcatcgccgtgcgcagagcagtcgactaacagtcgactctaccgcagcgatcggatggtccgcagcgatcggatggtccgcagcgatcagatag

SEQ ID NO: 513125 - DNA, 192 bp, Stenotrophomonas maltophilia
atgcagcaagcgattaattttcgtctggttggttccaaagtgcccggcaatcttctcttcactcattccccggcgcttcatatcgctgatcgtgtccacgtctttatcagtaaaattctgagttactttagactcaatacaagtcttcaattcatcgacctgtttctgaatactctgaagcttcataattga

SEQ ID NO: 513126 - DNA, 399 bp, Stenotrophomonas maltophilia
atggatcttccaggagctgtcggcgtaattttcgctccaaccttcgagcaagtgctatctgttcttgcacatgattccggatcatcggacttcggcggaaccgaaaattcaggcggcaatttccccactgagaaaacaatagtcgacagcttcgacgcgccttatggcgggtacaacgagtggagaattcgcggcgccaaaccgataggaatatttgttgccaatccgagcgatatcacagtcaagaaaaagcaggagctctccttcaatggagagcatattgtgaccttcggctgtgagtccatatcgctctcatcggttcactcgtcatttctagacctgcagatattcaccatgagccccaatgggctagtcaagatcaccccgattgacacctaa

SEQ ID NO: 513127 - DNA, 933 bp, Stenotrophomonas maltophilia
atggacaagaagattcgtgatgcaaagcatgtactaatcatttgcacagagacatatctgaagcgcctgatgggcgacgaagctcccaataaggggctgggcgtcaaatgggaaggaactattgcttaccagcacctctacaactcaggcttagacaaccaaaagttcatccccgttattctcgaggagacggactacccgttcattcctgttccacttcagccatacacccattacaacgcctcagagccggtgcgttatgaccgcctatacaagcgcctgaccggccagtcgcatatcgaaaaaccagaacttggtcaaaggcgtccgttgccatttaagccggtaaagaccgacccaaaacttttctttatttcaccaatagacattgatctatggaacgaagcgaagtggcgggcgacctttttcatgttcgctcaaggtgtgccacctgtcctcggattggcattcttaaatgaggaagccgctcgaaagatattcaaaggctggcgagatcgcttcggcgacaacgatgaccatgaggagattcgcgtgtccattattgaaggtgatattcccggcgaagatccaggctacaccgtaatcgttggcccagacattgatggtttttcggctcggtacaaagagtcggggattgagattaaagatgacttattgatgtgcgtcagtcgtctcaatcgcatgacaccgccgcctgagagcatgaatcttgaaaacttcaaagctggctatagggctcataaaacttactatctggttcctggggtaatctcagaaggtaacagccagatgaagccgctcactgacctcgcaatctttaagagcaaagttcaattcaggcatgtaagtgagattggcgaacacgacgttgatacgataatattcaaagatccagagtgcgaactgaaatag

SEQ ID NO: 513128 - DNA, 435 bp, Stenotrophomonas maltophilia
atgcctaagtgtgcaatggtgttcctaagcgcggctgtggaagatatcggtgaggagcgcttggctgaagtcatggttggaggccggcagttcaacgccaattgtggctcacacggcatcgtgtgcttcgacggaagcaggtttctgatatatctcgaaggagccgcaagcgcggtggctgccagttgcgtctacaccgagtccgtcacgtttcatgcagaaatcgtcgagctggcgcggggctccatccagcagttgcggttccctgcgcatgcgttgctcttcctgccagtgtcggaggccgagatgaaagggttgatgaggtcggactgggttaacttctcccagcgcttcggtgggaggttcgtgcctgaaacgggaatggaacggcttgccgaattggtcaacagtcggatgaatgacatcccgcgatga

SEQ ID NO: 513129 - DNA, 297 bp, Stenotrophomonas maltophilia
atgcatcgggtgtgggggccggggtggcccgtcccgaccttgggcggcatcgcgttggatccggggcaagtcaaggtcctgtccaaccaggcggaaatcacgcgccaagacgtcaaggccggccccttcaccgtggacggccgaaacgtggccctaggagccagccaaacggccgtggtcgtgcgcgacgcctacggcctggaaaccgccgtttccactgcacggctctacgtcgccccaaccctgctgcgtcccgggctctccgcgtgggaaatcgccgccggccaggtccgctaa

SEQ ID NO: 513130 - DNA, 1167 bp, Stenotrophomonas maltophilia
gtggacgagaacggcaagggcaacgtcaccgtgggttccacctgggccccgggcacttggggcgtgctcgacggcgaggtggggcgctcaagcgacggcgggacgcgctgggctgctgcctacgactacagggggcgcacgtttggcgtgcgcctggaacacgaggaaaacgatgggttctggcgactgcagagcgagacggcgctgcccatcgcgtcgcgcacccaagccagcgtttcctaccgcccagttcgccgcttcaccgtccgttgcgcctacagcgccatcgacacggggcgctccagcctggccttcgcttccctgggcgtgagcgcgaacctgggcaccgcgggccaggtctccgccaacgtgctccgagatctccaaggcgacgatcttcaagtatccgccagttacacgtatcgcttcggcagcaaggccagcgtgggcgtgcgcgcccgccaggcaccgggccaagactccctgaccacccgggccacctaccgcaccgagggcggtcttcgcttggctgctgagcacaccgacggcgacctgcgcagcacccgggccacggcggatgccatgacccgttacggcgacgcccggatcatggtggaccgctacgacgggcaaacctccgtggcggccaacttctccggctccgtgttcctggaccaccgcggcgtagccttcggaaggcctgcctatgccagcttcgcggtcgtggacgtgccgggtcaggcgggcttgccggtgcgggtcaacggagcgccggtcggccagaccaacaagcaaggccgcgtcttggtgaccgacgttccctccttgctgcccaccacggtgagcctcaaagacaaagacctgcccgtgggcgtggagatcggggagacggagaaacaagccgtggccccccggcaaggcggtgtgcgggtgaccttccccgtgctgacgcagaacgcccgggccttcatcctgacaggtccgatcatcgcgccgggcaccgtcgcgtccacgccgaacgaacaagccatggtcggctacgacggagccctttacctagaacaccctgagccggggatggccgtcgaggtttccggcgtgtgcaaagccgtgttgccgtcgccactgccgggcgtggacgaagtggcgaagttaaggtgcaactag

SEQ ID NO: 513131 - DNA, 1044 bp, Stenotrophomonas maltophilia
atggctgccgccgagcagcgcatggaagccagcagcgcgcgtgcacgtcgctcagcgcctgcatcgaacaaggccctggattcaatcacggtcacgggtggccgtgtcgctgcgcccgctgccgccaacgagggcgagctcggcatccagctggcggcgtggcagccggactcggccatcgcccggcgcctgcgccagggcccggcgtcgcaactgtatgaccgctatctggccgagcgcgatgcccatgccgacagcagcgcattcttcctcgacgtggctgacctgctgctggagcagggccaacgcgacctggcgctgcgcgtgttgtcgaacctggccgagatggacctggacaatcgccacctgctgcgcgtgctcggctatcggctgatgcaggccgatgcgcccgcgctggcggtgccggtgttcgagcaggtgctggccatgggccaggaagaaccgcagagcttccgcgacctgggcctggcactggcagcagccggcaagccgcagcaggcgctggcgccgctgtaccaggtggtcgtgcgcccgtgggacagccgtttcgatggcatcgcgctgatcgcactggatgagctgaccaacctggtggcacgcagcaccccccggctggatacctcggccatcgacccacgcctgctgcaggcgatgccgctggacctgcgcgtggtgctgtcgtgggatgccgacaacagcgacatggacctgtgggtgaccgacccgaacggcgagcgcgcttactacggcaaccgcctgacctaccagggcgggcagatgtcgcaggacttcaccggcggctatggtcccgagcagttctcgctgcgcaacgccaagccgggcaggtacaaggtggaggcgaactacttcggcagccgccagcagctggtgaccggggcgacgacactgatgctgcgcctgaccacccactggggcacgccgaagcagaaggaccagatggtcacgatgcggttgaaggatcgcgccgaaaccgtgctggtgggcgagttcgaggtgaagtag

SEQ ID NO: 513132 - DNA, 1689 bp, Stenotrophomonas maltophilia
atggccgaggaagaacgccaggcggcactcgagcagcttcggattcttgattcggatccggagccatttttcgatgccctcaccgaagctgcccaaaccatgacggccatgccgatgagcttgatcacgctcatcgaccgcggccgccagtggttcaagtcccaagcagggctggatggtgtcacccagacgcctcgagccatctccttctgcacttgggccattgaatcagctgaagtcatggaggtagaggacgctagtaaggatccacggttcgccaacaacccgctggtgctcggaccgcctcatctcagacactatgttggagccccgatcaccaaggacggccaacgtgtcggcactctgtgtgttctgagcccatcccccgggaggctgtgtgagtctcaccttgccaccctaaccttgctagcgaaggccgctggggtgggcatggaacagcgggctcgcctcctccaccgcgtttcccagtccgatgcgctgcagcgggatctggaacgaagccagttcttcttggaacagaccaacgcgttagcgagagtcggtggctgggaactgtcgcttgaatcaggtgagctgaaatggaccaaagagacccattgcatccacggcgtctctgaagacgtcgcaccttccatgagcgtagcgatggggttctacacaccagcggcgaggcaatcgctggaaaccgctctggaccgctgcgctacggcaggggcccctatcgatgtgacactgccttcaaccaaagcgtccggggcgaaaacctggcttcacgtggttgggcaacgcgacattcaagatggacagatccgcctgatcggcgcagttcaggacgtgacagagcagcgcaacgccggcgaggcacttgcgcaaagcgaagccaggtatcgccggctgtttcaacacagcctgggcctcatctgcacgcactcgttggacggaaccctcacttccgtcaatccggcagcgtcccactcgttgggcgcatcggaagccgatcttgtggggcggcctttggcagagcttattccaaccgaacgccgcccatactttgaggcctacttgagccggattcacgagaatcagagcgactcgggcatgatggatctcatcgcgcacgacggctcccgtcgcttttgggcctaccataacgtcttggatacggaagcagacccgccctatgttctagggcacgctcaggacatcacaacccagcacatccaggaacagcagctccaagagctggccattcgcgaccctctgacccgagcgttcaaccgacgatacctcacgcagctagcacaccaacaatcgggcacgtggggctgcctggtgttcgatctggaccacttcaaggaagtgaacgacacccaagggcacgcggagggggacaaggtgctggtcgattttgttgccttcctctcgattcctctgcaaggagacgaagtggtagtgagattgggaggtgacgagtttctggtcttcgtgcctggagctaccctggagcggctgcagctgctcgaggccgactaccgggagcgttcccctgatgcccccatccggttttcgggcggttgcgccatcggacggccttcggaatcggtcgcagataccatcaaccgggcggacatgaagctttatgatcgccgcaggcaggatcgtgggtag

SEQ ID NO: 513133 - DNA, 1992 bp, Stenotrophomonas maltophilia
ttgagcttttcgatcgatagtctctttgagcaccgcaaggtgctctctttgtcttcgcaccatcgaaacccaggtctcgcctacgtcgtgtctgcgccgcaggccagctcagacgattatcaatcgtcgttgtggttcacccccaccgccggcgccgttgccccagcggagctcgcctccgagggcggcatcagcttcccacaactcagcccggacgggcagtccatcgctttcctatccgaccgtggttctgctggccgtcctcagcctcatctcattggcgttgccggcggtgaggggcaagcgctcccacaggtggccgagctagaggtcaccagccttttgcagtggcacccagacgggcgccagctcctcgcattggtttccctgccttacgcagaggacgccgacgacgacgtcaggcatccccagcgcccgctggtcatcacccacctgccctacaagctggacggcacaggctacaccgtcggcagcaggtcccatctgttctctgtggacacgaccggctccacggggccacaccccctgacagctgcggactacgacgtgcggtctgcctcatggtcgccagacggtcgatccttggcttacgcaaggacgtcgtccgggtgcgctcgccatcgcgtcaacctgtggttggcgacgcctggatcgaaccctttgcagatcaccgaggacttcgccactgttgccaacgtgagctggtctccggacggcacgcggctcgcattcgccggcaaccggcaagagggagactcagcctcattcctctatctttggtcgcgcgctgaaggggtggtcggccctatcctgccctatatcttggagggcatgcagattgcttggtcggctgacagccgcctggtggccgccgtcgtcacgcaccaaggctgcctcgaggtagccgtcgctgatctgcacgcgagcgaccactacttgcttcccagcaaccaggatcaggtttcaattccccagacttgtggggaccgcttggcgctgggagcttccagctacacgcggttggacgagctctatctctctgagtgggacttcgacgcgcagcgccaacggctgacgtcgttgaacctaagcctcagcgaggacttgcccgtgcggtgcacccggcgatccttccaggttccggcgggcgatggaacgcaggaagcggtcgacgcttgggtattggaagcgaaggcgcaatcggggcgctcgtcgccactgttgatcgacttccatggcgggccgcacagcgttgctctgatggacttcgcggcgcacatctacctctaccaagcagtggctgcaggctggactgtcgtcgcccccaatctcgtcggctcgaacggctatggaaaatccttcgagaaaaggctggttggacagtggggcgagctggacttgccgcaggccgaagccatcgttgaccagttgcgcttggagggtgttgcaaatgaactggctgcatgtgcaggaaagtcctacggaggctttctgagtgcttgggcgatctgctgcagcgacaagttctgtggggcggtcgtaagtgcgccggtagcaaatatgttgtcccaggcgggcacgtccgattcaggctactacgtaaccccttacgccatggatggtgtgcccgaagccgcttccgagcgctacgcatcgctgtcgcccgtatctcacgtaacggccgcccgaggtcctgtcctgctgctcaacggagaagaggaccaacgctgcccggtagggcaatgtgaggagctcatgaccgggcttgcctatcgttcagatcaatcggtgtcgatggtggtgtatcccggtggaacccattcattagcggcgaccggccgccctagccaccgccgcgactaccaccaacgcatcgttcgctttctcgaacgcgtccgatggagcgagaacggtttgatgacccgctctgaaccatgcgagaacgttgacaaagatgcgctcccttcttga

SEQ ID NO: 513134 - DNA, 138 bp, Stenotrophomonas maltophilia
atggcacagaacaatcagaaccagcagaaccagcagaaccaggatcagcgcaacgagcgcaatcagcagcagcagcagcagaaccagcgcgatgagcgcaatcagcagaaccagcagaacgaacgcaacgagcgctaa

SEQ ID NO: 513135 - DNA, 288 bp, Stenotrophomonas maltophilia
atgaacctcaccctggaacagctggccgcgcgccttgaagcatgcgaggcagacctggaagcccaccgcggctacctcaaggcgatggaatacgggatccgaacgctcattgccacgcatcccaacgctaaggctctgagcctgtcctgggaacataccctcgtcgccgcggccgattcacattttgggcggggcggctgcgttttcacggccggaatccaacaggccatgcgaaccctgacaggccaggtcgaggcactcgcgggtggggcggggaacacgcactga

SEQ ID NO: 513136 - DNA, 948 bp, Stenotrophomonas maltophilia
atgaaagaacagaccgaaaaaccggaacaagagatgagcattgatgaaatgcttcgtgtggatttggcagctggatgggaccctctagagctcgatgaacgtcgccgaaatgccctgcagcaaatgctttcgcctgacgactatgaggtgacaccagaggacgctgttctggcatgcaaggtgttgatggaacacggagttgacccggatgcctgtgagcgcggaaacagcggtggggtgtggccaacgcctttgttcatggccgttagacagaagaatttgggggttgccaagattctacttgagcacggcgcagatcccaatcgaaccgatttcgatgaaggaacttaccgatcaacccccctcttcagagctgcagccataggggataaggccatgtgtcatcttcttctggatcacggtgctgatcctttcgtatccaggccgcttcgtttctacggaccaatgccagctccagaaacgcgcgaaagccttgggtataaggggcacgatgttcactctgagatgatattgaacgccgggacagcaacccccctttatattgcggccataaacggacgcttagaagtttgccacttacttctcgagcgaaacgctgacccgacagcacgggtgaatgttcacattgatagccatccagaaggtggccctgagggcgtatgggaggaaaccccggcccaggctgctgagcgctcaggacacttttcggccgccggaattattcgtgcctttctcaaccagaaaagcctcgagaaggccttgtcccctggcatgccgttcccccaacaaacgcaagcagcgaacgcagccaaggccgacgggcttcaaatggttattggtggccaggtttggagctcggggcaagaggtgtctaaggaggcatcggccgcggcgatgcaagccccaaagcagcgcctgcgtttgtga

SEQ ID NO: 513137 - DNA, 345 bp, Stenotrophomonas maltophilia
atgctttctcttcacaacccccgcctggccaaccccatgggccgcctgccaacggccaacgtgggcacgcgcgatgccaaacggctccgccagctcgccgacgagcacgggatttccctgcaagaagtcctacggcaagtgttggcgctctacttccgccagccctttgccttgtcctccaagcggctgggccaagccgggggagatcgactgccccagaccaaagcgcccatgcacctggtggagggagtcgagacgctggcgaaggccttgggcctcactcgaggagaagtgttgcgccagatcgtgcggggcaccttgagcacgtgccatgaccatcattag

SEQ ID NO: 513138 - DNA, 333 bp, Stenotrophomonas maltophilia
atgaattttctcccatgcaatccagagggacttgccgaattcgatgcttggaatgctagctcaacagctgcgatttcggcgatgcgtatcgaacgtgagggcaggcatgcagccaacggaacctcactcaaggcagctctcgcggcaaatgcgtcggaaggcagtcttgaactcttggatttcctcgcgcaggacatggagcgcgttgaggatgacccatccccggcagggttctatcggcttcaggcttacagccgtgcccgggcggtgaagcaaatccagatctaccagtttgagctggagcgtatggtcatccaagcaaccggaccgtaa

SEQ ID NO: 513139 - DNA, 1326 bp, Stenotrophomonas maltophilia
atggtcgcgatggaactacgcacgctgtcggatctggatctcaggtcagtggagtgcgatgagcttgaacttcatttcggcggcgacgataagacagcacagacactctatctgtggctggccagatatttggaagagatccgtattgtgatgggcgactcagtgagcacgctgcccactaaaagtatccagtttccgggcttcgaagccgacgccgcgctccttccctatccacgcaacgtctttgatggctaccgggtacttcaggaattcttcgttttcccccgccgcttctacttcgccaggataaagagcctggcgcaggcatggcctgcgcaaggttcatctgcgcgcatcgagcttcacttcaatcggcccatgccactgggcgtgcacattcgaaatggagatatttccttgcattgtgttcctgcggtgaacctcttcgcgcacgatgccgaacccatacgcgtggatggtcgggtcaccgagtacgccatcaatccggcgggtacccaagcgcatgggtacgaggttttcagcgtcgatggcgtcagcggcgtatgggcatcctcccgggagcgggccaaagaagtgcgccggacctatcacgacttctactcattccagcatgagatagaccgcacctcgaatgggcctgcaccgtactaccgttcgcggctgcacgttgaccagagcgtcggtggaacccagcaacgcatcgccttcatccgaagcgacgagtcacttcatccagatgccagtgagacggtatcagtgcagctaacctgcaccaatcgcgacttgccctcagtgctggtcgtgggcgacgtatgccatccattggacgacgtcccggcgtttgtcaatgtcgccaatgcaatccgcccgacaccaagctacaggccagtccttgatgggagcctccactggaatctgatctccaatctctcgctgaacttcctctcactcctgggaacggagccaatgaaggcggtcattcgagcgtatgacttcgcggctcttcacgacgttcaagcaaaacgcgtgagtcagatgcgcctgaatggaatcgtggctgccacgactgttccgagtacagcattcgtgatggggctgccggttcgaggcctgaagaccgttcttgaactggatccttccatgttcctctgcgagggcgagatgtatctgttcgggtctgtcctttcgcacttcttctcgctctacgcgagcatcaatgcctttcacgtccttgaagtcataaacaccgagaacaaagagacatatcaatggccgattcggcacggaagccagcccatcatctag

SEQ ID NO: 513140 - DNA, 1023 bp, Stenotrophomonas maltophilia
atggccgattcggcacggaagccagcccatcatctagccggtccgctgttggataacgcccggcgccatgccttctacagtcttgtggaacgacttcatcgtctgcatgacgatgacctggagcatgccttggacggcgatcctgcagctgagcgaatccgattctgcaatgacccccggttgggctttccaatctcggatgtagtaattggtgagttcggcccggcggcgggagggtactcgtatcgcctcgcggtcagcttcctgggcctgcatggcgtcgattcgccactaccgttgcactatgtcgagcgtattgctgcagagcacgccaacggtacaggccttcacgccgccttcctcgatttcttcaatcatcgccttctcacactactgcatcgcggttggcgcaagtaccgctaccacgttcgctttcagtcaggtgcgcgcgatcgattctcgggctatgttctctcgctgatcggtctgcacgatgcgcatctgagggagtacagcagcctgccttggagccgactgctaacgtatgccggcgttgtggcaagccgcagcagatcacctgcaacagtgggtggaatcgtctcccattgcttcgacctgcctgacgttgtggtaaaggagttccagccaatctacgttgacgtgcccgttgaggagcgctcgcggattggagcatccggggcgatgttggggaatagcttcattgcaggaagccgggtcagaacccgcgagcactgcttcgcgattgctattggaaatctcagtacggagcgctttcgtgattttctgccgaacgggcgcgatttcccacttctgggcaccttgatccagtttcttctaagagaccagctcgcgtacaacctggagctcggattgcgcacagagcatatctcgcctcttcgtttatgcaaggagagcggcggcaacctgggctggacaacctttctgggctctgctccgtcacagctcgccgacgccagtgtcaaaatcaaggtgcgggcatga

SEQ ID NO: 513141 - DNA, 261 bp, Stenotrophomonas maltophilia
atggcgcagaggcgtcgcatcgcctgcgagcaggtcatcgagagatatctcttcggacaggcccccggtagcactctcgcctggctcactcgcaagcccgacggatacgatcagtgcacccaggcggatctgatcgccttcgcgcagctcaacgacgctgccggctcccaggggctcttcagcgccgttgatccatgtcataccggccagatcgcgcaggcagaatgccccatcacgcgagaagagctcggcatgacgtga

SEQ ID NO: 513142 - DNA, 375 bp, Stenotrophomonas maltophilia
atgagtccggagatccaggcaaacccgctcggcggcgagggaagcccgctgaagatcgccgtcatccaactcaaggatgacggcgtgttcctcagtctcgacgtcgatgcactgtgggcgtcgcctgacagatcactggggaagacctatcgcgatcatgacgagttcgtcatcaggccgggcagctacaagttcgtcccattccatcaggtccagcgggacactcgtttcattgctgtcgcagccagataccaggatgtcagcggagtgacatggcgggcagtacatcggattcagccacacgggaggtcctatccattgctggtagagctgggagattcaggtatcagtatcaagagtgaggacttggaatga

SEQ ID NO: 513143 - DNA, 1338 bp, Stenotrophomonas maltophilia
atgatgttgcggagcaaagtagtctggaaggaagggctgttcgtgaagccccagcacttccagcaggagacgcggtatctggagggccagctgcatcaacgtctgtcgtccattggcgagaacctccatggattcgttgagcttgagataaataccgagtacctgaccttcggaaaaatcgcgctgctgcgcgcgcgcggggcgatgcctgacggaagcgtcttcgacatgccgatggatacgccggtgccaagtccactggacatagccgacgcatcggcgataaatcaggtcgtgtacctcgccctgccgctcaggattgaaggcggcacggaggttcagtgggccagcaatgcggagtctcgccgttaccaggcacacagacgcgagattcgcgacatccacaccgaggagggtgatctggtcgagatggatctggccatgcctggctacaggttgatgctcgagggtgaagaccggagtgcatttgcatgcttggcgatcacgcgaatccgcgatcgacgaccagacggcagcgtggctcttgatgacgcgcactacgccactgcgttgtcggtgagtgcggttgttccactggcgagattcctcgaagaggtcgctgggctcatgcggcagcgggccatggtgatcgccgaacgcattggttcgccatctcagtcgggggtggcagaggtgaccgactttggtctgctgcaggcactgaatcgcatccagcccctgttccagcatctggcacgctcacgttgcctgcaccccgaacgtctttactgccacctttcgcaggcatgtggcgagctggtgacattcacagatgacggccggctcccgatcgagtatccggcctatcagcacgaagatctgcatgcgtcatttcatgcgctggaaagtaccttgagaagagcactgggaactgtgttggagccccgtgccgtttccatcccgatgcagcttcagaagtacgggttgcgcacggccatggtgaacgatcgccgccttgtcgagagcgctgacttcattctcgcggtgcgtgcgaacattcccctcgagcaactccgcacacgcttcgtccagcagaccaaagttgcctcgatcgaacggatcgacgagctggtcagcctgcagcttcccggcattcctctcgttgcaatcccggtggcgccaagacatctcccttaccacgcgggtttcacttacttccagctggacaggggaaatccggcctggcagatgatgcgttctacatctggcatcgggctgcacgtatccggcgaattcccgggtttggacattcagctgtggggaatccgaagtgaatag

SEQ ID NO: 513144 - DNA, 798 bp, Stenotrophomonas maltophilia
atgacgctcccacccgtcatccagggaaaggtcgcgcgcaaggacgagatctcattcgagaccgcagaaggtatcgatgaggatccagagctctacttccagatgcggggccactcctgcaatccgctggtggacgccgcccaaccgttgcttgccctcgccattcggatcaggcgaatcgaagtgccaatggacgcaaaggcacttcacgagcgcatccgcaatcagctggtcacgatggagaacgagctgcgcctgcatggctatgaagcggggacgctgtctgcctatcgatactgtctctgcagctttctcgatgaggcggttatggcgacgccttggggatcgcagtctgtatgggcgcagcactcgctgctcagtgcctgccacaacgagacctggggcggagagaagtttttcagcatcctgtccaggctcatgacacagccggagcacttccgtgacgtgctggaattcctctatctgtgcctgtgccttgggttcaagggacgctatcagcttgagcgtgacgggcaggattcgatcagcaccatcatgcgtcgtctgcaccgtagcctccgacagatgcggggtgccgcacctgcgacgctgaccgagtccctggatcaggcggtccatcgacgatatcggctggtgcgcctgctgccctcattcgccccttggcttgcagcagcctcgttgatggtcgccgcctactgtatgtatgcgttctacctgggtgccatgactgcagaagtgcttggcgcgctggacattgtcctggcgcggcccggatag

SEQ ID NO: 513145 - DNA, 2574 bp, Stenotrophomonas maltophilia
atgatccgtattgaactgtctgccctcattgccggtttgaacaacgcagcccattctgccctggagcgcgctgcgaacctctccgtccagcggggagagcgtgaagtgaccgccaggcatctactcttctgctgcctggaagaccccttgggcgactgcggccggattctcgggctgagcgggatcgaggtcgagcggcttcggcaggaactgctccaatcctttcccgcgcaggtggacgcggtgctttccgcccctcccaccttctgcccgctgctactggaattgctgcagcaggcgtggacattggcgacgcttgaacttggccagaaagaggtccggaccggcgccatcctgctggcggcattgctggtccccaatcgctatctctgttcggcgacagcagcaattctgcgcccgatcaatcgtgaggcattgcgcaatgagtttgcccgggctgtctccacgtccagcgaggcggcgttgccgaaagacgtgcagttcgattgcgcgtcggctcattccaccggcggggattcttcgctggtcaagtacgcgaccagcgtgaccgattccgcccgggagggacggatagatccggtttcaggtcgggatgaagaaattgatctgatgatcgacatccttctgcgccgccggaagaacaaccccattgcagtagggcatgcgggcgtcggcaagagtgctgtcatcgagggcttggcactgcggatcgtcaagggtttggtccctgcggcactgcagtcggttgaaatatggagcttggatctgggcgctctgcaggctggggcttcggtcaagggggagttcgaaaggcggctgaagggcgttgtcgacgaggtgcgttcctctgcaccgcgcatcattctcttcattgatgaagcccacacactgattggcgcaggcgccgcggccggtggcagtgacgcggccaatctgctcaaaccagcgttggcgcgcggtgaactccgcacgattgccgcgaccacctggtccgagtaccgacgatacttcgagcgtgacccggcgctatcgcgccgattccagttggttcagatttccgagcccaccattgagcgggccgtgcacatgctgcgtagcgtgcgcgggttctatgagaagtcgcacggggtcaagatcagcgacgcggcgttgcaggcggcagtatccctctcggcgcgatacctgcccggtcggcagcttcccgacaaggcgatcgatgtcctggataccgcctgtgcccggctcgctgcgtcccgaaactgtccgccacgggagatcgtcgcgattgagtcgtccatccagcagctggagatggagcatcaggctctcattcgcgaccaggccgacggaaggaagatcgaccccgaacgagtggtcgcacttgaagcgcaggtcaccgcacttggacaggaacgctgcgatctccatacgcgctatctcaggcagcaggaggcggtcgagcgcatacagaccgtgcgcgccggtgaagaccatcaggcacgtgatgacctgccagagcacgtcgccacccttcgacgccttcacagagacggcccgctggtgtacgcggacgtgggggctggtcagatcgcaagggtaatagcttcctggacgggcgttcctgtggccacgctcaatgctgatcaaactgagcggttggccggtcttctggatgccgtcacggctactgtcagagggcagcatcgcgccgtagagctgatccaccggcaccttctcactgcaatggcggacctgcgtcgtcccggtcggcctctgggagccttcctcctggttgggcccagcggcgttgggaagacggagactgccttgcggatcgccgatcatcttttcggcggaaagcagttcctgaccaccatcaacatgtccgaataccaggagaaacacaccgtttcacggctcctgggtgctccgccaggctacgttggatttggagagggcggagttctgacagaggccatccgccagaaaccgtactcgatcgtgctgctcgatgaagtagaaaaggcacacccggaggtgctcagcattttctatcaggcgttcgatcgtggtgacatttcagacggcgaggggaacagcgtcgactgcagcaacatcctgttcatgctgacatcaaacctctgtttcgacacgcatgagacgcagaacggagagattgacgagcccggcctgaaggcgggacttcggtcattcttcaagccggcgcttctggctcggatgcacatcgttcgttatcagcccctgagcaacgacgtgctgatcgagattgtcgagcagcgcctcgaggaggtttgtttccgtttcgaacgtcggtatggtgcaccgctgcatgtgaccgatcaggtactcagcgtactcaaggaacgttgcgcatcaaatcccgacggcgcccggatgctggatgcgagcatcgatggtgaggtgctgccaccgctatcgctggctgtccttcagcgaatggcaaaagcgctgcctttccggcaggcaacgctggatttgcagggccaggcgtttgtggcagagcttcaatga

SEQ ID NO: 513146 - DNA, 1539 bp, Stenotrophomonas maltophilia
atgacggcactgcaggcattgcaagtggtacaggcaacgctgcgcggcaaggacgcaaatgatacggcgtgcgcctggatggcggcgatcggtcggatgccagttgcgccagccgcggcattggcctgctatcgggttgatgacgctgcacaatcgctgtacccggtggcgggcctgaaggtacccgtgcgggagctgcccgtgatcagcatggctgatcttgaacatccggccgtctactgccttgtgcagcgagggccctgcctggtatccgcgtcgtcggtgagccagccgtccgtgcaagccctgattgccgcgatgaaatccgggcccggcctgctggccatacccgtggtggatgttgccgtacccagggcgatcgccgtggtgctgctggccgggccggcagagatgctgcggcggttccagcgtagccccgagtgggttggcttggttggcgtactgcagcacgcgcttgcacaggggaatgcacagctacgcgtcgacagggtacctgccgccagcagtgagcctatgaaggaaggggccgacctgatccggagcaacctggtggggcaaagtgtgcccgctcgtcgtctgcgcgctgaagtactcgccgcggctgattcgcgattggcggtgctgatcacaggtgaaaccggaacgggcaaggaccacgcggcgtcgttgatacaccgggcgtctacccgccgggacggagcatttgttccgttgaactgcgctgccatcgcacctgagcttatcgccgcagagttgtttggtgcggtcaagggcgcctataccggcgccacctcggatcgtcccggcctggtcgccgccgctgatggcggcacgttgttcctggatgagattggcgacatgcccttggcgttgcaggggacgctgctgcgggtcctgaatgaaaagacctacaggccgctgggtgcggtgcgtgagcgagcatctgatttccgtcttgtctgcgccacacataggcccttgcttgagagcgtccgtgaaggtcgcttccgacaggacctgtacttccgtatacggcaactcaccttggtagttccgcctctacgcgagcgccggacagatatcccgctgctggtcaaccgtatcctggcgcggcttgccagcggcagcggcagcgcggccatccctatatccgagtgtgccattcgtcgtctgcaacagcatgactatcccggaaacatccgtgaactcgccaccctgattgaggtggccgcagagcgggcgacctgcaacgggattgatgcggagatggtggagttgctgttgcagaagccgctcacctgcgcgccagcgatgccgccggagccgatgattggtgcggtgccgcccgaccactcgttgagcttgagtgaggctcgcgatcagtttgagcggaggatcatttccagtcggcttcgccacttcaatggatcacgcgcaagaacggcacgcagtctggacatcgcgcgaagaacactgctttacaaatgcaagcggcttggattgggggatgcaccttga

SEQ ID NO: 513147 - DNA, 639 bp, Stenotrophomonas maltophilia
atgagcgtggtgatcagcggctccctgtgggccggaccgacgaagtctgccccagcgctggtgaactgcgcttccctgtcccgtccaatggaacgcctggcctgcttcgatgcccaggttcggctcgcagcaccagcgatgaaggaagtgagacctgccgcgccggtgcgggtgcacccattcatccaccagctcgcccgcttcgagcgcactcgcgttacgggcgacagccgcttccgcatgtccattgatgaagtgcgtcctggccaacgggatgtgctgatctcggcgccagctttgaatcagccggcgccgagatccctgttgacgatcagctgtatcgacaacatcagccgcttgcaactggtcgtccacccgccgttgccccaacaccaggctcgagtggagatcagtgcggatggcagcgccgtagcaggcgcgcagacctggcaggtgctgggtgatggcgtgctggtggacgccggacgcggtctggcggcgatcgaggtgctacgccggctggaggcttccggggaactgcacctcagcagtgacgtcgcgcagattgacggtcttcggttcgatgcaaccgggctgccgtcaatgatcactgagcagcggcgggcatgccgatggtga

SEQ ID NO: 513148 - DNA, 1455 bp, Stenotrophomonas maltophilia
atgccgatggtgacagagatggatgatgtcattgagtccctgctggctcccatctccggtgcgtcaccggccggcgtatttgatgccgaggatgagttgtacctcgccatcgatctggagatggtaaagctcggagggctccacgcggcgacgttggactggtcattcgtcgagtccagcgcgattcactacctgcaggcgcgctgcaagcacttccgtatccttggtcatctgatgagtgcctggctcagacatcagcaatggcagggatggatccggtccatccagctgctggcgggaatgactgaactgcactggacatcattatttccccaacctggaccggccggactgtcagccaggaagagactctatacagcgctgggacagcgcctgctgcagtccctgaagcatcttcagccggacagccacaccggcgccggcgcaacccaggccacggaggccgtggctgcgctgcagcgggccgagcgccaccacacaatcggcgcatcggtggccgcactgctgttgcctgcacttgagcgggcgattgagcatgccgagcgcgcacccttccagccgccacggccgacgcgctcggcctcgccgcagcctgtgcgtgatgcgctggggaaagagttcttctcggcttcacgcgagcttccacttggcaacgagcgggagattcgtgccgcgtgcctgaagctggctgaccacatcaatcagcaggatggctttgatcccaccggatacctgttgaggcgccgcgcgctctgggccggaatccacgggacgccgccggccagggcggacggtcgcacagagatgatgaatgtgccggccgacatctctatcgagtaccaggatgcgctgatgggtggcccgtgcagtcctgccctgctgatgcgcatcgagcgtagcgtagcgtcttgcccctattggctgcggggtagcttcctctcagcctccatcgcgcagcggcttgagatgcccatggtggctgtcgtcatccggtctgccgtcggacgcttcgcgcagcgactgccaatgctgcgcgatcttctcttcagtgacggaagccctttcatcgatgcagagacgctgggatggatcagcggcgacgacgatagtgatcggtgtggagtggccggcaaggccgtgacgctcgcacgcatgcatgccgagcttctggatcagcagaaggatgggcaaagcatggaatcgattctgctgggcctgcaggcccggcggcctgggaagcagagcctgcgagagcgcgcctacagcagtgcggcggcggcagatctgttccatgcacggggattggcatcgcttgcacaggatctgtacgccggtgtcgcgcagaccatgtccagccatgccgcaaatgaatgggaacccgacctcttcagtcatgtcacggcacgaagtggaagaagcgaggcgggtcaatga

SEQ ID NO: 513149 - DNA, 3723 bp, Stenotrophomonas maltophilia
atgtcgttgaaactgagctggctcggccgggcaggtacccttgcgcggaggatcggggtatggggcgcgcgcgtgtggctacctgtcgctctcttcgctatcgtcgcgctgctggtgagtctgtggtggctggggcctggttggacgtggaaggggcaagctccattggctcccttgcccatgcgtcttgcgttgagtctggtcctggtcgtggtgccactcaccatctggggcgctgtcatgcgcttccgctatcacaggctacgggatgagcagctgcgtcagctcgcttcacaacaggacccactgcaggcagccgaagacgcccagcagcggtctcttgatgggtcccttcagctgctgcgatgcaatctgcggcgtcggaactatctctatgcgttgccgtggtacgtggttatcggtcaggaaggctcgggcaagaccagcttcatcaaccgtagcagccagagtttctcgctgagcggcgtcgatcgggccgctgccgagcgttccactgccgattcaccagcactggccattgattggtggatcagcaacgacgccgtggtaatcgacccggccggtgagctgatttgccagaaacaataccggtcggtgggggggcagccagggcccgactgcgtcgccaagcaggaacgggttcatgccttcatgcaggaacatccggacgccgcaccgcggttgtggcgacactttgttgcctggcttggaaagaatcggccgagacggcccctcaacggggcgatcctgatggtcgacctgtctttgctgctggtgcagcagcccagcgaccgcaaagcgctggccctgctgatacgcagtcgcctgcgcgaactgatggaggaactgggtacccgtcttcccgtctacatcgtgctcagcaagttcgacatggtccgcggctttgacaccttctttgcggggctgccgagtgaggtgcgggaggccagcctgggttttacctgcacgctgagctccgtcgacgatttcgatgcttggcttcaggagctgagccagcaatatgacagtttcgtcgagcgcctgaacgagcagattttcgatgccatggccgaacgatcgaccgagggggagcgtgaggatctgtatgtcttctcccggcaggtgtcaggtttgaagcccttgctgttcatgttcctgtcggaaattcttgaaagcgaccgctattcgacgccggcactggttcgcggaatgtactttgcttccgtcttccagcagggtatccccgccaacgctttgggaaatgccgttggacggacatacggcctgcctttgcccgctgggcgcgccttgccgccgggaaaggcaagcagctatttcacgcaccggctgttccagaagatgatctatcccgaagctggactcgccggtgacaacatccgcgttctggaaaggaagaggcgagccctttggatcaacgcagcctgcgcgctgctggtcactctgggggctgtggggggctggcattaccagttccagcagaaccggcagaaggtccatgcagtgctggacaagagtcggtccttcaatgccactggcatcgagagaggccaggacacgtccggacgcaacctgcttcctgcgcttgaccagatccgggatgcggtttcggtgtacgaggactatcggacgtcatggccgcacgtggctggcctcggtctataccagggtcacgacatcggccccaaggtcgatgcggcctacatgcagttgctgggccagcaattcctgccgcaactggccgagggcgttgttgctgggttggacgatgcacctccaggcagcgaccgcagccttgcggcgctgcgtgtctaccggatgatcgaggaccgcgccaaccgcaagcctgagtacgtcgaatcgtggatggcgggtgcgtggcagcaagcctttcccggtgacgcagagacccagaaccgtttgatgagccatctgcgctacgcgttgacctacgtggatgcacgcctgccgtcgcaaccgcgtggcgtgaaggagctgcaggctgagctgcggcagattccgcttccacatcgagtgtacgcgggcatgaagcgtgaagcgctggatacgctgccggcatcgctggatcttcgggcggagatcgggccggtagcggatgtcctctacaaatcacctgcggcggaacaggcgcgaagcgaatcgcactcccatatcaatccgctactgacagctgagggattccacggttacttcctgcgacggaccaaggcggtggaagcgctggcactcaccgatcagtggacgctcggctatcgcgcgcagtcgcaatattcggaggaggatcgcaggcgcctggcggcgcagatacgtgaactgtatgcagatgactacatcgccaactggcgcagaggcctgaacagcctgaaggtcaatgacttccaggatctggaccatggcgtgctggtactggagcaggttattggaccgacccagccactgcgcaggctcattgaatcagtggcccggaactcgcgccttgatgcccggccgggggcgctggatacaggcgctgaacgtgccgccgctgcagcggaagatgctccgacggtccggcgtatcgagcgtgaattctccgcactggcgcaactactcggcgcgactgaggggcagatggagagtattgccgacatccagcgggcgatcagtggcctgcatgactacatgaagggcatccagatcagcaccaaccggggcgaggcagcactggacgcgttgagcggccggacccgtcgcgagggtgtcgacccgatcttcctggtcaggcagatggctacaggcctgcccgagcccctcaaccggcacgtagcaacattggcggacgaaagtgagcggacgcttgcgctggaagctgtgctggagctggaaagacgctgggagcaggacgtgcatggcttctatcggcaacggctggcaggacgctacccgctggaacctgccagcacacagaacatcgatctggatgacttcgaggcattctttggaccaaaggggcgcctgcaggggttccaggacagctacctgacgcccctgctgtcccgcgacagcgcagcgctggccacgtcatcggctggagaggctctgatcacgcctgaacttgggccccggatcgaacaggcacagcgcatccgtcaagcgttcttcaatgagcgcggtgggttgggcgtccagttcaatgtacagcccctggcactgtcggcgacccatctcaacagcgtgctgaatgtcgatggacagctgatctcctatgcgcatggcccacgaacagtgacaggtctgatctggcccaacgcgctgcgcgatggtgtggagagccggttgaccctggtggggccggcggggcagacgcgcgtgatgcgataccaaggtccctgggccttgttccgcctgctgagccaggcccagttgaacggcagcacgctcagcagcgtggatctgagcttcagtgcgggaacgggcgcggtgcgctatcgcatcacatcggacaggacaggaaacccgttcacgcagcaggtattcaacgagttcaacctgccgcgctcattgcgcccgaagatgccgtccgccacgacgccacgtgcaccgttgcagggggatggggcgcaagttattgcacagcctgcgcaattggatgcacagaaaagtccttccaatcgcgagggttga

SEQ ID NO: 513150 - DNA, 519 bp, Stenotrophomonas maltophilia
atgccaactcccgcctatatctcgatgcagggcaagacccagggcaacattacccagggggcattcaccgccgactcggtcggcaacgtgttcgtggaaggtcacgaggatgaggtccttgtccagcagatcagccatgtggtgaccgtgccgacggacccgcagtccggtcagcccgcaggccagcgtgtgcatcgtccgttgaagttcacctgcgcgctgaacaaggcggtgccgctgatgtacaacgcgctggcctctggcgagatgctgccgacggtggagctgaagtggttccggacgtccattgacggacgtcaggagcacttcttcagcacactgctggaggacgccacgatcgtggacatcaacacgcagcttccgcacgcacaggatccggaaaagtccgactttacccagctgatcgaggtcagtctggcgtatcggaagatcacgtgggaacacaccgtcgctggcacttcgggctccgacgactggcgcgcaccactggaatcctga

SEQ ID NO: 513151 - DNA, 258 bp, Stenotrophomonas maltophilia
atggcatccatcattctggtcggtcatcggtacgactgcccgctccatggcgcgaccgaggtggtatccggcgcgtccggcttctcagtgcaggggcgctcagtggcgtgcgtgggtgatcggatggcctgcggcgccgtcatcgtcagtggcagccaacatgtgagttgtggtggggcgcaggtggcttgggttggcgacagcaccgaccacggtggaaccctcagtgagggcgccaatgccgtgacccttggctga

SEQ ID NO: 513152 - DNA, 2502 bp, Stenotrophomonas maltophilia
gtggccacacaatccgacatccgatttgatttcgctctcgccaacggccctgcctttgacgtggtccggttcacgttggtcgaggctctcagcgcaccgttccgccttgaggttgaactgtccacggccgaggcatcgctggacctcgggctgttgttgggcgaggtcgttcgtttcacactctgccgcggcggtgatgccatccgttgcgtggacggcatcgtcaccgggatcgagcagggtgaaagtggcttccgacgcacgcgctatcgcgcgatcgtcgagcccgccgtgcatcggttggcattgaggcgcaacagccgcatctttcagcgccgcagcattccggagattctcaagatcgttctggatgagcagggcattctggccgagtttgccgcggcccatccgcacccgctgcgtgagtactgcgtgcagcatcgtgagtcggacttcgacttcatgcagcgcgtggcggctgaagagggctttgttttctactttgacccgggtgagcggtccgagctgaggctgatcgacaccacactggcctgccccgaactgccgggacgaggatcacgcccaggtacggtgatgtaccacgccatgcccggtggcgatgtcggcgagcctggactatggcgattcacccaccagcgacggatggccagcacgcgggccaccctgcgtgactacaccttccgcctgcccaaccgggatctccagcacggggctgacgcccgtgatggcatcggcgagttcgagcactatgatgcgcccggtcgctacaaggccgatgcgactggcagagcgtgcgcacgcttgcgcctggcggcgctgcgctcgggcaccgaccaagccagcatccagggcgacgatgcgcgcctgtggccggggctggcgttcgagttgaacggccacccgtcatcacggctgaaccgcgattggcgggtggtggcgctggtccatcagggtgaacagtccagtgcgcaggaggaagaaagcgcgtccgctgaacaaggcagcagctatcggtatgaaggcacggtggttcctgccgatgtcgactggcaagcgccgctgcgcgccgccccggtcatggatgggccgcagatcgcccacgtggtcgggccggagggggagcagatctacaccgacgagtctggtcgggtgatggtgtggttcccatgggatcgcgaaggtccgaagcaggacagcacctgttggatacgggtcagccagacatgggccggccccggctatggcgccatgcagatcccacgggtggggcatgaggtcatggtcagcttcctggacggggaccccgatcaaccgatcgtgaccggccgcagctaccacgctgccaatccgccgccgtacgcgctgccggccttgaagaccctggtcacgctcaagagccaggagcaccacgggcgtggccacaatgaactgctgctcgacgacactcatggggagttgaaggcacagctgcgaagtacccacgcgggaaccgcgctcaacctgggctacctgacccacccgcgtgccaccgacggtacgggcgaaccacgtggtgagggtttcgagctgcgcaccgatgccaatggcgcactgcgtgccgctcacgggctgttgcttaccgcctacgggcgcagtcaggccacaggcagccaactggaccaccgcgagctggtcgaatgcgttcaggcgctgtccggcctcctgaagtcgttgggtgacaccgccgcggcgcatcacgcgctacccgacgtggacggaccgcgtgacgccctggttgcagccattacacagatgggcggcggagccaatgaccggaagcgtgatgaggctggtaaaccggtagtcgccatcaatgcgccggacggcatcgtcatggccacgccgcggacgatgctgctggcggcgtccgagcgtgtggagattgcgtccgaacgtgaccagcgaatggcggctggcggggtactgcatcgaaccgccggcaagggtgtcagtgagttcgccatcgacggcggtctgagctacatcgctcaccgtgacgacatacgcatccaggcgcagcacggcaatgtcgaccagcaggctgaaaagaatctgcagctgcaggccggcgagcagatcatccagtcggcgcagaagaaaatcgtgctgggatgcggccaaagcgcgctggttctgcacgccgatggccaactggaagtatttggttcggcactgaagatccacgccgatgtggagatcgacgccgccgcaccggctgaaagtgcttttgaaacgctgggtcagatcgacacgtccggccgttttgcactgcgccaggcagatggcgaaaccccggctgcccagcagcgttaccggatgacgctggctgacggaagcgtgctggaggggatcagcgatgcgctcggcatgaccgaactactggagaaagacgcgatgagcgttgcacagctggaggtactcgatgacccgtccgaccactga

SEQ ID NO: 513153 - DNA, 1644 bp, Stenotrophomonas maltophilia
atgacccgtccgaccactgagcgctgcatcgccaccgggcgtgtggtaacccagcccgctggcagtgtacagaaggtgatcctgccgatgcccaagccggccatcgcgatcctggtgcatggggtgaacgatgtgggcgaggcttacgtggaacaggagacgggcctctgcctggggctgagcgagcgccttgaccgcacgggtcgcagcgaatcgttgctcagcggtgcgtactaccgggtgccggactgtggcgatcgcgatgcctcggatccagatgcggtgtacttccggcgcgcgcacacgcaggcacggttcgcagccaagggcgtggaagcgcaggagccgcgcagcatggtaattccgttctactgggggttccgggaggaggagggagtcaaccccagaaccggcaagccgtggatcgacaaggagcagccccacggcgagtatctcgaccgccacggcaaccgtttggacaaggacagcgccaagaacggtggcccgttcgccaacgccaccagttgcataccggacatgtgggctgatggcttctccgggcgtatcgccaaggtgctgcccagcaaccccgtcggcggtaccgccacccgtccgctgctgaaggcgcgctcgcgccactacatggtgctggccgcgcagcggctggcgatgctggtgcggatgatccgcaggaagaacccggatgacacgatcaacgtaatcgggcacagccaagggtgtctggtcagtttgctggccaacgcattcctcaaggacagtggcgatcggccggtggatacgctggtgatgaaccatccgccttatgggctgggggaaagcgttctggacaagctggaggtgggtgacaggcagcagaccgtcgaggcgcgggtgaagacgctgcagtccatcgtcggcttcatgacgggtacgtcgcatgcggtaccggccttttccgcactggccgatgcgccaaggaacaaggtcgttggtcgggggtgggggccgcagcaggcacagcgcgcttctgtaagccaaggtagcagcgcgttcaacgagcgcgacaaccgcggcaaggtgtacctgtacttctgtccggatgaccagaccgtggccctgcagaccgtacagggcattggctgggcgggggtgcctgatcgaattgccactgttacctcggaatcactgcaggactggaaggatcgcagcaggcatgagccccggctcatgcagaacggctttgaacggcatctgcccgcactggagctgctgggcgatcgcttcaagcagcgctgcttcaccaagcgcatccgcgacggcaaggcactgcaggtaggccttccgccgcatgagtacgtgctggagctttggcacgagtggacctggaccggcaccacgatggggggcatggacaagctcggccgcggcggcttcagcacgggtcagacggtgcgtgttaccggcgaagcactgacacctccggttgcggcacagctggggggcgataccgacgccatttcaccgatcgatgcgtccatcgcaatgacgcaggacgaggggcggctgttgccgtgggagatgttccctcggcctgtgcacagcaccagcacatatgaagtgaagcattggcttgattcccgctga

SEQ ID NO: 513154 - DNA, 546 bp, Stenotrophomonas maltophilia
atgcctgacctcgaacgcgcatggaatgaaggcaaggcaacggtggacaaggcaaaagtggtgtatgcacgccatctgggcggtggccgggtcgagatccgcaggaaggagaccccggcagaggtcaaacgccgctggatggacaccaccgacagcgaagacaaccgcaagtcgttccactcgagcatcgtggccaacgcgatgcacagccagaaggtgaccgcctatgacctgtcgatcgggcaggccaggacgatcgatgaccggacgtactacctgtatctgtgcctggtggcggattggaggacgccgtgggatgacgaggacgaaatatcgccgacatcagacagggctgagatttccgcagcgatgcaagttcaccagcgcgagtctccaagttacccgttgatcgcgcagacgcatgcttatcgagagaccggcattctccctgattgcgcgaagtgtgatcttccaagtctggtctggacacagacggctgctgaccgaaagagctaccggccagtacgtcaaggaacagctacatga

SEQ ID NO: 513155 - DNA, 1317 bp, Stenotrophomonas maltophilia
atgaataacgatcagcgcatgctcaccttggacatcatcggcgtcggtctgtcggtggagatgctccgccagggggatgtatggcatgagttgaagagggcagacacattcagcgcgaatgcgatgccgccgaaagactcatcaggttggcaccacgcgaatggtcccggcgtactggggaagcggcgagcggatacgctggagctcgctttgaagagcatggttgaggcatggccgataccagcggtgtcagtgatcagtaccatcgccaatgactggctgaggagtgtttactcggacgccgagttgagggggaaggacgttggaaagttgaatcggatgcgtatgccagccggcctccattggccccagatcaagcaactggacgtggtctacagcgataccccggaagatgtgatcgaagccatcttccggacgttcgagcgccaccctgatatgccggcgattctggtatacgcgttcgggccagacggaaaatacgacgccccgcgcacggccagcaccccgttggccacctatgcggccatggtggtggcccgccgcgagcgggtggaatggctgcggccgtgggcgccgtatacccagatgggcgaggacaccatctacccaggtttctggaaatgggcgcagacgccacccaagcccttcaaacccacaccgttctttcccacgccctggacgcgcggtcacttcaaacaatgggacgaactccccacgctggccaagctgcatcgcccggtcgtcgcccgcctcacggatgagcagggtgcgcctctcaagcgtcaggcccagcacgaggcgcttgtagagggctggaaacaggccgcaggcgaaacctacatcaactcggtgttccttgacaccggcaaggccggtaccggcatcgccacgctgtcgccagtgctgcgcgagctcaagggcaacccagacctgttggatccaaaggaaggcatcgacctgtacgcgcggctgggcgaaaccggcgcggcctcgccgttcgtgcaattggtactggccacgatggccgctgccgagtcgaagcgggccagcatggcggtgccgatgcgccgaccggaccaggtgacgatgatccaggtgagtccttcggacgatgagattccgtcgtacctgttcaagccacgcttgctgccgcagacctcgcaggctccggatgtgccggaacagcagcctgcagcgccgcgctacgttgcgccgacgtcgatggacaaggaagccgttgctgcggaccgcaaggcactggctgagctgctgcgcgatggtgggtccggtgggtga

SEQ ID NO: 513156 - DNA, 513 bp, Stenotrophomonas maltophilia
atgtcgagcaaggatggttctgtcgctcccaaggagcggatcaacatcaaatacgtacccgcaacgggcgatcaggcggccgagatggagctgccactcaagctggttgttgttggcgacttcaagggccacacagagcaggccatgattgacgagcgccagtctgtccgtgtcgacaagggcagcttcgatgccgtcatggagaaggcagagctcggcctcacgcttgacgtccctgaccgtctttcagacgagcctgagagaaggctcaatcttcagctttcgttctcctcgctcaatgacttcacgccagacgcgatcgcccaacagctcccagagctccgtacgttgctggagctcagggaggccctggtcgcgttgaaaggaccactaggcaacgttccggcctttcgcaatgcattgcaggaaatgctggctgacccaggagcgcgcgaaagactggccgaagaactgcagttggcgttgacaacgcgggacgagtacagccgctga

SEQ ID NO: 513157 - DNA, 1476 bp, Stenotrophomonas maltophilia
atggaagccaaggaaacttcttcagggaagatcgcgcccgcgccggttggtttgctcgatcagatcatggcccagaccaggatgcagccgacgcaggagggctactccacggcaaaacggggcgttgctgaattcattgccgaaatgctgcgcacaaaggatcggaccgagccggtcaacaagcatctcgtggatcagatgatcgtcgaactggatgtccgcatcagccagcagatggatgcggtactccaccacccccggtttcaggatctggaatccgcctggcgtggattgaagctattggttgatcgcaccgatttccgggagaacatccagatagatattctgcatgccacgaagcaggagctccttgaggacttcgagagcgcagcggaaataacccagagcggactctacaagcacagctactcagcgggctatgggcagtttggcggcgagcctgtcgctgccatgattggcaactactacttcggtccgtcgacaccggacgtcaaactgctgaactacatcgcatccgtgggggccatggcgcatgcgccgttcattgccgcagcaagtcatgaattcttcagcatcgatggctatcaggagctgtccagcctgaaggaaatcaaggacatctttgatggccctcgatacacgaagtggcgcgccttgcgggattcagaagactcccgctatctaggcctggccatgccgcgatttcttcttcggcagccctacgacccgctggagaatcctgttcggcgattcagctataccgaatctgtaagcgattcacatgagaactacctttggggcaacgcagccttcctgctggctacccgaattactgacagctttgccaagtatcgttggtgccccaacatcatcggtcctcaatccggtggtgcagtggaagatcttcccgtgcacctttatgaggcacttggccagatccaggcaaagattccgactgaagtgctgataaccgaccgcagggagttcgagctttccgaggagggattcattcccttgacgatgcgcaaggggagcgacaacgccgcattcttctcggcaaactccgtccagcgcccgcagttgttcccgaacactcttgaggggcagcaggcgcagacgaactacaggctgggtacgcaacttccgtacatgttcatcatcaatcgtctggcgcactacatcaaggcgcttcagcgcgagcagatcgggagctggaaggaacgccacgacctggagcgggagctgaattcctggctgaagcagtacgtagctgatcaggaaaatcctccggccatggtccgcagccggaggccgctgcgcgcggccagggtcgaggtgaaggatgtgcccggtgaagcgggctggtaccaggtggcaatgagtgtgcggccgcacttcaagtacatgggggccaacttcgagctatcgctggtcggtcggctggacaaggaatag

SEQ ID NO: 513158 - DNA, 258 bp, Stenotrophomonas maltophilia
atgggacttccagatttcaacgatgcggtcatgggctcggctgacctcctgcttcgggcggccgctggaatccggggggctatcgagaataacgagccccgaatccgggtgggggatgttcgcctgttgacggatgcccagcagccgttacagctgcgctttcgggtggattgcgatctgattctggacgatcgaagcacggcgttcgagatggagctgacgttgaacggtcacacacgcaactacagtgcactctga

SEQ ID NO: 513159 - DNA, 423 bp, Stenotrophomonas maltophilia
atgcctctacacagagctttccgcgatgagttgagccacctacgacttcaagggaagaagtttgctcttgaaaatccgcagcttgcgcggttcctcggtgaacgtgcgagcgatcccgatgtggagcggcttctggagggcttctccttcctgacggcaaagctgcggatgaagattgaggacgacttcgaggagctgacccacggtctgctgcaactgctctggcccaactatctgaggccaatcccgagcatgacaattctgaaattcgagcccagtgatcgtgctattgccgactcgcagacaatacccaagggcgcgatggtcggatcggtcgaggttgatggggtcgcatgccgctttagaacctgcagcgatgtcctcattcacctgacctgccccccgttttccgggccaacctga

SEQ ID NO: 513160 - DNA, 813 bp, Stenotrophomonas maltophilia
atgaattcgccagcttaccttcatcatctaaagcaagaagaatcattgacgctgagtgagggcttcgactgcgaagtctgggagcttgccgtccctgacgattctacgtcactaagtgagtgggctcgccggtttcgtgaaacctactgcctcgatagtgacctagatatcctgcgcgagggcacaggcaaatcacgagccgaatatcttctggaactggtctttcccgacgagcgcgtagcacctggtcctgccgtacggtcaggcgattttgcggagatgctcgtatcagattacgtcgaattcgtcttgggctattgggttccccgtggcaagtacgcagagaaagggagtcgagacgagtctgtcaagggggtggacatcatcggctttcagtgccaagacccaactaagccgaaacctaccgacgaaatgctggcctttgaggcgaaggctcagctcggcggaggggtgtacaaagatcgcctgcaggtcgcggtcaacgactcaggcaaagactatcttcgagctggcgaaacgttggccgcgatgaaacgacgtatgcttgtatccggcgatcgtgcttcgatgctggttgttcagcgatttcagaacgcggtcgacaggccctatcggcttgtctcgggtgcagctgccattctttccgactcggcttacgatacagacggcatcaagagaacgtccatcaccgggcacaccaacgctgacaacctgaagctagttgcaatcaggggcaaggatctgatgaagctcgctcatgccctataccagcgagcagcgaatgaagcctga

SEQ ID NO: 513161 - DNA, 3138 bp, Stenotrophomonas maltophilia
atgaagcctgatttcaacagtcgtcggtacttcggaattacccgctcgaagggaaagatgtacgagttgggtttgcctgaagattcacacatcgccgtgccggacggagttgaacctgccgccctgttccctttgtctatcgggacactaatggatgcgtcggcagcgctaaatgatgctatcgatgtcgaagagggcctagccgacgacctgcgagacgatatcgattttgctgcaagcttcttcgatgcttacctgagttctcggtttgatgccagcgtgtcgcgggaagtcactttgctcgcatcagccagctatttcttgggtcaacgcccaggaagtagcttggtccttgcccgtcggcttcaagcagaatctgccaatccaatcgaacacctgacgatctgggtgctgcgagcagactggcgtgcaccgccaaagctggccgtgcattggctatccgggatgctccaagagctttccctccggctcatgggccacttcaacgagggtgtgccgcctgaatcggtcatcgagttactaagaaaactccgtcaattgacctatgctagcggcagctcaagggaagttgtattggtggaggtcgcatcggccgtggtcaggctgcgtttggcgggatcggcttggatcttgttgcctaggtttagtgggttggacaatgcagcttgggctggcgcaatccgccgccccggcttccccaaggaactctggccatcccagaagttgctcggcaaggccggccttttcgctggaaggtcgggggtagtccagatgcccacgagcgctggcaagacgcgctctgtagaggtcgttctccgcagcgcattcctggctgaccggacgcgtgtcgcggtgatcgtcgctcctttccgcgccttgagccatgagattgccgcttcgttgcgtcagtcgttcaaaggcgaagacgtcaaggtcaacgagctttccgatgcactgcagctggacttcctcgatcaattggccgagttgctcggccagacggcccccgcggcgcggtacttgatggtgttgactccggagaagctcctgtatgtgttgaggcaagagcctagcttgattgcgcaaattgggatggtggtctacgacgaagggcaccagttcgacgcaggatcacgcgggataacttatgaactgctgctcacggaaatcaaagcgctacttccagcaacagcccagactgtgcttatctccgctgtcatcaaaaacgcttcggacgtcggcacgtggctcattggtgcagagccgaacgttgttaacggtaagagcctgttgtcgacagcgcggtcagtagcgtttgcgacctggagtgagcgacttgggcagcttctgtttttcgaatccgatcgttacgtccgcccggactatttcgtgcctaggagcatcgaaactcaagagcttgagctgcgcggaagggagataaatgtcagaagttttccacagaagggcaaggatgcttggaaagacatttcgctctatctcggaattcgattggctccaagcggtgccgtggccgtattttgtggcagaaaggacactgcaagtggcctggcagaacgagcagttgaagtttatgagcgagggttcaagctaccctctccggctgcggcatccgacgccgatgaagttcagcgcttgacttacttggcggcagagcattttggggcagactccatggtgacgaaagccgcattgctcggcgtctttgtgcatcacggaacgacacctcaaggattacgcctatccattgaacatgcgatgcaaagcgagctcatcaggctggtcatttgcacttcgaccttggctcagggcgtcaatttaccaattcggtacctaatcgtttcgggagtgaatcaaggcgctgaacgtatcaagacgcgggacttccaaaacttaattggccgagccggtcgcgcgggcatgcataccgaaggacttgtccttttcgcggaccccaaggtcatcgacaatcgtcaacgtgagagttggcgcttggaagcggcagttgggctattaaaggcagagaattccgaagaaacatcaagctcgcttcttgaattacttgaggccatttcgtcgcctgacggcagaagcactctaccaatcgcgaccaccgaattactgcatgcatacttcaagcgaggcgaggagttggtggcatgggccaggaatatggccgtcgtttatcagtcatttggattcgacgaacgatccttggcgaaggagatttcgagaaggcagagattgatggtagctctcgaaagctttctgatggccaatcgtggattcgagagcttcgaaaacgttcttgagaaagtgcgggttttggcaggctctacgctggctttttccttggcggacgaagccatgaaggcgtctcttgtccagctctttgaattgtcggcaacgcacatcgagcaagttgtttccgagcccgctcgacagatgtcttatgctaagacgctgcttggcgctttcgacgcaaagattgtcgacgcttgggttcaggaacatgcaaatgtgctgcgcactcttgcgacaccagatgcgtggctgacggcaatatggccgcttttcatgactgttgtcgacgacaagctattgacagcgatggagcccgctaggatgccgatgcggctcgcacagggctggatgcggggggcttcgtaccgagaactgattgctatgaccaaggacgccgaagcgtctaagccttggggaaagaccgctcgccgcaagctcaacgatgccgatgtgcttcagttcttggaaggctgtctcggatttgattgcccgttgatcgtcgccgccgtaggtcagttccttttcggagcaacagggctcaatggcgaggaggctggcgcgcttaacgagtttcagaagtctttggcttacgggttgccgagcagacttgccgtgtcgacctatgagtctggtctggccgacaggcaagttgcgcaggaagttgcggttcaagttcggctggctggatacgaagggttcaatttccgtgcggcgttacgcgagcaccgcgatgtagttgtccgctcactggcagcgtacccctcttacttcgacaaggtgctcgatggtctgtaa

SEQ ID NO: 513162 - DNA, 2106 bp, Stenotrophomonas maltophilia
atgtccgttgcattctcccgtccccccgataccgctcgcctgccgcacctgcagcagctcgcccgccgcgctgatcgccgcctgctgatcggcagcgcagcactgggcctggctggcctggtgctggccctgcgtgggccacaggtgcaggccgccgtgctggctgccgctgcagtgctgcctgcggcgtggctgggcggatcccaggctggccgtggcatcgcccgcaatggcctggcctcgctgttgtcgctgcaactggcgctggtgtgcgcgatcgtcggcctgtcaccggcactgccggttgccctgttgctgggcgtgctgctgggacaccgcgatcggctgccggtgtggctggccggtggggtcggcacgctcgcactgctggccccgttgctgagcggtgccacagtgtggccgacgctgctgcaggcgggcatgttcgcaggcctgaccctgttcctcggccaggtcgcactgcggcttcgccagcagaccgagacacttggccatggcccgcgtcgccttgccgcgctggcacgcgatatcgccaccggcgccgatcttggtgcgcatgccgacaccagcgcctatgcgccgggttcactggcccacgccctggccgacactgcacgccacgtgcaggcccagcgtggacgcgaggcggcggcgcacgccgagaacgcgcagatccgccaggcgctggatgcctcgcgcaccgcgatgatgatcgctgacaacgaccacgtgatccgctatgtgaaccgctcggtggtagcactgctgcgcaaccagcaggcaacgttgcgacaggccttccccgatttcgacgccgaacgcctggtaggcagcagcatccatcgtttccacgccaacccggaccgcatccgcgccatcctcaatggcctgcaggtcacgcatgacggcaaggtgcagatcggcccggtgcacttcgcgcaggtggtcacaccggtgttcgaccaccagggcgcgcgcctgggctttgccgtggagtggcatgaccggacccacgaactcacgctggagaacgccgtggccggcatcgtcgctgccgccgccgccggtgatctcgagcagcgcctgcaggcaaccgaaggcgccagcttcctcgacggcctcacgggaggcatcaaccagctgctcgatacgctgggcagcactgtcgatgaagtgcggcagatgctctcggcgctggccaacggcgacctggaccggcgcatgcacggcgagtatcacggcgccttcgctgccatccagcgcgacgccaatgccacggcggaacagctggcacgcatggtcggccgcatccaggactgcgcatcgtcgatcagtaccgcggccggtgagatcgctgccggcaacggcgcgttgtccgagcgcagcgagcggcaggcggcgcatctgcaggaaaccgcggcctccatggaggaactgacggccaccgtgcgccagaacgccgcccatgcgcgggaggccagcgcgctggcgtcctccacgcaggacgcggccagcgacggcaacctggccatgcggcgggtggtcgacaccatgcaggccatcgagggcgcgtcgaagcggatcggcgacatcaccggcgtcatcgacggcatcgcgttccagaccaacatcctggcgctgaatgccgccgtggaggcggcgcgcgccggcgagcagggccgaggcttcgccgtggtggccagtgaagtgcgggttctggcgcagcgttcggcggcggcggcccaggagatcaagaagctgatcgacgaagccggccgccaggtgggcgaaggtgcccagctggtggcggatgccggccaacgcatgcaggggatcgtggggggtgtcgagaatgtcagccacctgatgcgcgagatatccgcggcgtcgcaggagcagtcaatcggtatcgagcagatcaaccagaccgtggtgcagatggaccaggccacgcagcagaatgctgcgctggtggaggaagcaactgccgcagcacgcgagctgcagtcgcaggcgggaacgctggatgatgcggtgtcggtgttccgtcggcaggagtcacagggcgtggcgctggtcgcctga

SEQ ID NO: 513163 - DNA, 1320 bp, Stenotrophomonas maltophilia
atggaaaacgatcagcgcatgctcaccttggacattattggcgtcggtctgtcggtggagatgtttcgtcaaggtgacgtgtggcaggcaatgaaggaagcagaaacgttcagtgcgaatattctgccgcccaaagactcgccacgttggcggcacgcgaacggcgccggcgtcctatctaagcggagagcagacacgctggaactcgccctgaaggacatggttgaggcttggcctatcccctcggttggaatattggcaacggatgccaatgattggttgaggaacacctactcagacgatgaactgcgtgagatggacagtatgtatcttgacagaacacgtatgcccgccgggctgcattggacgcagataaagcaatcagacgtgatttacaacaacacgcctgaagacgtgatcgaagccatcttccggacgttcgagcgccaccctgatatgccggcgattctggtatacgcgttcgggccagacggaaaatatgacgtcccgcgcacggccagcaccccgctggccacctatgcggccatggtggtcgcccgccgcgagcgggtggaatggctgcggccgtgggcaccgtatacccagatgggcgaggacaccatctacccaggtttctggaaatgggggcagacgccacccaaacccttcaaacctacaccgttctttcccacgccctggacgcgcgggcacttcaaacagtgggacgaactgcccacgctcgccaaactgcatcgcccggtcgtcgcccgcctcacggatgagcagggtacgcctctcaaacgccaggcccagcacgaggcgcttgtagagggctggaaacgggctgccggcgaaacctacatcaactcagtgttccttgacgccggcaaggccggtaccggcattgccacactgtcgccagtgctgcgcgagctcaagggcaacccggacctgttggatccaaaggaaggcatcgacctgtacgcgcggctgggcgaaaccggtgcggcttcgccgttcgtgcagttggtactggccacgatggccgctgccgagtcgaagcgggccagcatggtggtgccgatgcgccggccggaccaggtgacgatgatccaggtgagcccttcggacgatgagattccgtcgtacctgttcaagccacgcttgctgccgcagacctcgcaggcgccggacgttccgcagcagcaacctgtagcgccgcgctacgttgcgccgatgtcgatggacaaggaggccgttgctgccgaccgcaaggcactggatgagctgttgggtgatagcggtcccgaggatatctga

SEQ ID NO: 513164 - DNA, 1467 bp, Stenotrophomonas maltophilia
atgcggtggcaggcccaccttcagtgccttgccgtcgcggatgcgcttggtgaagcaacgttgcttgaagcgatcccccaacggggacagcatgggaatccgctgctcgaagtcactgctctgcagcgtacggtcataggtttttgctgctgtccagcgctgcatgccatcggtcgtaagcgccttcacgtgctcaggtacacctgcccagccaataccctgcacggtctgcagggccacggtctggtcatccggacagaagtacaggtacaccttgccgcggttgtcgcgctcgttgaacgcgctgctgcccgcgcttatggaggcacgctgtgcctgctgcggcccccacccccgaccaacgaccttgttccttggggcatcggccagtgcggaaaaggccggtgccgcatgcgacgtacccgtcatgaagccgacgatggactgcagcgtcttcacccgagcctccacggtctgctggtcatcgccggtttcaaggccgtccaggaagctctcccccaggccgtagggcggatgattcatcaccagcgtgtccacgggacgatcaccactgtccttgaggaacgcattggccagcaggctcacaagacacccttggctgtgcccgaccacgttgatcgtgtcatccgggttcttcctgcggatcatgcgtaccagcatcgccagccgctgcgccgccagcaccatgtagtggcgcgagcgcgccttcagcagtggccgggtggcggtgccgccaaccgggttgctgggcagcaccttggcgatgcgcccagagaagccgtcggcccacatgtccggaatgcagctggtggcattggcgaagggcccgccgttcttggcgctgtccttgtccaggcggttgccgtggcggtcgaggtactcgccgtggggctgctccttgtcgatccacggcttgccggttctgggattgatcccctcctcctcccggaacccccagtagaacggaatcaccacgctgcgtggctcctgcgcttccacgcccttgggggcgaaccgcgcctgggtgtgcgagcgccggaagtacaccgcgtctggatcaggcgcgtcccggtcagcgcagtcaggcacccggtagtacgcaccgcccaacagcgactcctggcgcccggtgcggtccagccgttcactcattcccaggcagatgccggtctcctgctccacgtaggcctcgcctacgtcattgaccccgtgcacgaggatgacgatggccggcttgggcatcggcaggatcaccttctgcacggtgccggccggttgggtcaccacacggccggtggcgatacaacgctcagaggtcggacgggtcatcgagtacctccagttgtggctcagatatcctcgggaccgctatcacccaacagctcatccagtgccttgcggtcggcagcaacggcctccttgtccatcgacatcggcgcaacgtag

SEQ ID NO: 513165 - DNA, 780 bp, Stenotrophomonas maltophilia
atggcgaacgcgccgttgcaggccaggctcgttgcgttggcgggcgaacgtcgccggttcggctaccgacggctgcacatcctgctggaacgggagggctggatcgccaaccacaagcgaatctaccggctgtaccgcaacgctggcctggcggtgcgcaagcgccgcaagcgcgatcgcgtggccgtcgagcgccgtccgctgcagctgccgtcggggcccaaccacacctggtcgatggacttcgtcttcgacgccctggccaacgggcgcccgatcaagtgcctgacggtggtggacgattgcaccaaggaagcggtggaaatcgccgtcggccggaggataaatggccagaacgtggccgacatcctggatgcggtatgccgtttccgcggctaccccgcggcgatcaggaccgaccagggacccgagtttaccggccgggcgctggaccagtgggcgaccgccaacggcgtgacgcttgtgctgacccagccagggaaacccacgcagaacgcctatgtggagagcttcaacggcaagttccgggacgaatgcttgaacgaaaactggtttatctcgctcgagcacgcacgggcggtaatcgccatctggcgcaaggactacaacgaggtgcgtccgcacagctcactgcccaaatgcacgcctgccgagttcgccgccgcgctgcgcaacgaaggtgccttgactggttcgaccgctgatcgaaacctgacccaccggagcggtatgctccccaacctggactctactaagtag

SEQ ID NO: 513166 - DNA, 264 bp, Stenotrophomonas maltophilia; identical to SEQ ID NO: 340967

SEQ ID NO: 513167 - DNA, 246 bp, Stenotrophomonas maltophilia
atggggggcatggacaagctcggccgcggcggcttcagcaccgggcaggtggtacgcgttaccggcgaagcactgacacctccggttgcggcacagctggggggcgataccgacggcatctcgccgatcgacgcctccattgcaatgacgcaggacgaggggcggctgttgccgtgggagatgttccctcggcctgtgcacagcaccagcacatatgaagtgaagcattggcttgattcccgctga

SEQ ID NO: 513168 - DNA, 480 bp, Stenotrophomonas maltophilia; identical to SEQ ID NO: 499582

SEQ ID NO: 513169 - DNA, 861 bp, Stenotrophomonas maltophilia
gtgatcgaacgttgccgcgatgagtttccgattcgcctgatgtgccgctgcctgcgggtatcgaccagtggctactacgactggagcaagcgcctgcccagtgcccgccagcgcgacaacgagcgcttgctgggccgtatccatgcgctgcaccaggacagccggggcacgctgggtgccggccgcatgcaggaggatctggtcgaggaagggttgatggccagtcggaaccgggttgcccggctgatggcgttggcaggccttcaaggctggccgcgcccgaaacggcgtggtcagcgcgcccaaccggcactgacgccgccgtgcgtgcgcaacctgctggagcgtgatttcagcgccctggagccggaaaccaagtgggtgactgacattaccgagatcaagacccagcaggccaagctgtatctgtgcgtcgtgctggacctgtttgatcagcgcattgtgggttggtccatgcaccaccggcaggaccggcagatggtgatcagggccgtgcagatgacggtttggcaacggcaggagcggcatccgctgatcctgcactccgaccgcggcagtcaatttcgtagcggggattaccagggctacctggccgccaatggcctgctttgctcgatgagtgctgtggggcattgtggcgacaatgccgcctgcgaggggttctttggtctcctcaaacgcgaacggatctatcgcacaacgtatccaacactcgatgccgccaggtccgatgtgttcgaatacatcgagcgccgccacaatcccaggatgcgacggcgacgggtcaaacaggatcagaagttttcagccctttccaaacagtccgtgatttcggggtag

SEQ ID NO: 513170 - DNA, 345 bp, Stenotrophomonas maltophilia
atgatgactaacttcgtaagccacacctcgccgcttgacgcactcacgcacgctctgggtgagcagttgtccaaggggaagaacaagcttgagcaggatttcagggaggcctatccgatcctggaagagcacatagcaaggaagatgcgcaagaagatcttggtagatcagttcaatgctgcgtacaagcatgagctgaacctgattcagttccgaaagctgctcaaggaggagcgtgctcgtcgccatgcggatggcgatgctacccggtgccagagttgtggccagctgttggtcgaggcagaagaaaacacctctgctgagacgacaggggaggatgcatga

SEQ ID NO: 513171 - DNA, 252 bp, Stenotrophomonas maltophilia
atgaacaagccgcgcgaaggatcggcagcgaaggagtgcacgctggtcagcacgccggagcgcaccaggaacgtgcccagcagcgacagcgcgaaggcggcgatcgccagcagcagggtccagctgccgaaggtgccgcgcttttcagtgacggcctgcgaatggatcaatgccgcaccgaccagccacggcatgaagctggcgttctccaccgggtcccagaaccaccagccgccccagcccagctcgtaa

SEQ ID NO: 513172 - DNA, 435 bp, Stenotrophomonas maltophilia
atgggtcgaaacaagaacaaggaaatcagcgcggcgctgttcaagaagatcgagccgctgctgccggtgttcgtgccctcagccaagggcggtcgcccgcgggtcagtgacgagatggcgctcaacggcatcctgttcgtgctgcgtacgggcatcccttgggaggaactgccgcaggagctgggctttggcagcggcatgacatgttggcggcgtctgcgccaatggcaggaagccggggtgtggcaccgcctgcatctgctactgcttgctgaactgcacagcgctggcaagctggacttcagccgggccaacctggacgctgccagcgtccccagcccccggggggctcgcacacgggccccaacccgaccgacaggggcaaactcggcagcaagcgccacctcatcacggaccgccagggcatcccgctga

SEQ ID NO: 513173 - DNA, 378 bp, Stenotrophomonas maltophilia
atgttctgcgtcaccggtgctaaccggcacgactcggtggtcttcgagcaactggtcgatgccttgccggatgtgcgaggaaagcgcggcaggccgcgccgctggccgggcaagctgcatgcggacaagggctacgactttgcgcgctgccgggcgcacctcaggcgccggggcatcgtcgatcgcatcgcccgccggggcattgaacgcaacgatcgattgggccgccatcgttgggtcgtggaacgcacgcatgcctggctggccgccttcggcaagctgcgtgtgcgtttcgagcgaagcgttcatacccacgtggccttgctatccctggcatgcagcgtcatttgcgtgcggtccttgatgtggttgtgttag

SEQ ID NO: 513174 - DNA, 378 bp, Stenotrophomonas maltophilia
atggaagctaagcccgcattctatgtcgccaaagtgacccgttacggaaccaacagtgagctgcgacacctcttgaatctgtacctacagcactacccggaggaggctggcgagcatgcggtgattgacaacagcctactgcacctttgcggatggtccctgaacgaggccgtcgccaacacggtagcgaagtcgctcagggaggaatgcacggggccggatgagggcgacgtagtgacagtccgcatgtggcctcacgatgtatctgggtggccttctgtccatgtactggatgcagctggtgacattcatctgcagccccagctatcgcacatcctggagtgcggctttgtcgccgatggaggtcgcaatggctga

SEQ ID NO: 513175 - DNA, 312 bp, Stenotrophomonas maltophilia
atgtaccgagctgccgaggcgcttgctctgtcatacacaccggcacagatggctgcatccttcagggcaggtctcaccaccgcttacatgcaggagaaagaggtgaacgccccagcggcggagcggccggcccgtggcgccgatgctaacgaggctgcgggaaccttggatgcggaagagctgctcgtgatggcagcgcacgcgcagcgccaggcagttggtcattcctcgttgatcgccgcacggatcgatcagatggtggccgatgtgcgcagcggtcacggaacagaggagcagtccgatggaagctaa

SEQ ID NO: 513176 - DNA, 354 bp, Stenotrophomonas maltophilia
atgcgcagcttgatcgaacagccttcaaccctgcaccagcacacgtcagtgatgttcccgcctccggccgatggcttcgcccatgtattggtgtcggacaacctcaattcgccgaggttcgagaggggtgatgtgctgcttgccaacctttcgcaaaccgaatggcgctacgacggtgtttacgtggtggagctgcatggcaggcaggtggtgaggttcgtacaggatcgtggtgagtcgggcctgtacgttttctacctagccggcatggagctggggcagttcgtccccaagagcgaactgaggatccttgcggcggttaccgccgtgaccagcacgaggcgagtcgcatga

SEQ ID NO: 513177 - DNA, 669 bp, Stenotrophomonas maltophilia
atgccttgtccgcttgccgccaaggcgtggatgcctcggtcaccgatatcgcttcacgattccctggccccgagtttcccaaggggtggcccttgggggaagacggcgagaagctcgacaagctggcgcgctgggccttggagggaagcgcaaagcgaggtcagcccgatacgctctttgaagcccgttaccggacgttgcgcagcattaacgccgccacgaaggcgctgcagcggtcactcgccaggaaggaatcccatgctcactgaaaccaccatggccattggcgacagcggtcgcaatgaacccacaccggcgcgcgaagtggtgtacgtgcaggcgcttccggccgcgcgcggcaacatagtgactccagatagcatcctcttcattttctggcgtcgccctggtaacgaggctaggccagtgaaggtccgcagcatcctcaaaccgaacacgccccggaatcggggcccatacgttcgggtggtgtttgagtgcacgcggttctcgcgcgcccagctggaaagcggacacgtgtggggagactggatggatgtagccgttccatctctcgctgatgcccagcaccagctgtgggacaccctcagcacgcgcgatcgtgtgcgaatcgtaagagccgtgaggaacgccgcatgcgcagcttga

SEQ ID NO: 513178 - DNA, 423 bp, Stenotrophomonas maltophilia
atggcgagcaacagtgtaaacccccagctggacccccgcgcagtagcggaagccgtccaccagcagctgaacaacccgaagaccgtgcagctggcgattgtcggccactacgtcgaagaaggctggcgggataacccaatgaatgaggccatcacgaatcgcctgcacaccatcgatcgctgcatcgctgcctccagcgtgatgcggagcctgctgcaccgcgacgcaatggcgaagctggatatccagagccagggcgacgacaccgaggtccacgttgtttacccggtactgaagtacgacgaggcagatgccctgttccttgggatgcaggagttgatgatgcaggcgcaggattccctgcagtcaatccgagacgacgcctacggtatcgccacgcggcagtcgaaaggggaaaagtaa

SEQ ID NO: 513179 - DNA, 198 bp, Stenotrophomonas maltophilia
atgggtagggattctcctacgggccctgtgcccagctacaagccgaggcccggcgccaaggtcgtcaaccagcaggaaggcgcgatggtgcgcatcggcgacagcatcgaagtgttcgtcatcacagcacgaaatggccacgcccggctcacgatcagcgcgccgcgcaacctggaaatcaccgctccaaaacagtga

SEQ ID NO: 513180 - DNA, 153 bp, Stenotrophomonas maltophilia
atgaacgccaagaacatcacccggcacctccgcagccgtatcgcctgggggcgagcagaacgtttctcgctgacgagcatctctgcagcccaccagtgcctgttcgtggcgacccggtcaggggcttgctactacgagcgcatcgagggctga

SEQ ID NO: 513181 - DNA, 222 bp, Stenotrophomonas maltophilia
atgcacctgcgcgaaagcgagatggccaccggcggcaattccccggcagcgccgcagcacagctacaacgtaatcctcagcaatggcgacgagatgttcctcgtccccggcgcgacccccgaggaagcttccagtaacgcggtcgccagctgggccaaccgctacggcgaggtggtcgaggtcgtcatcatttgccgttccgacatgggcggtgaggcatga

SEQ ID NO: 513182 - DNA, 213 bp, Stenotrophomonas maltophilia
atgacccctgaagaagaagcgaaggtatccgccctgatcgacgccctaggcggcaccggtgaggtcgctgtcctgtgtaaggtcacctcgccgtcaatcagcggctggcgcaagcgcggcattccgcacgcttggctgatgttcctgcgcgaacgtttcccacagcacttcgacgctgagggcaacatcgccgtggagaagaaggccgcgtaa

SEQ ID NO: 513183 - DNA, 465 bp, Stenotrophomonas maltophilia
atggcgtacatcccgcacgaggtagtggccgtgcaggtgtctggcgcgaagaacccaacgtccagatacgacgaagccccggcagtcgggcatgactatcgccgaggcttcgcgcagaacgaggccactatgccacacgatcacaccccgggtaaccccgctggcgcgccgcgccatatcagcgactgcatgcaggaagcggtcgcgcaccttgccgagcgccgcgcacgcccgctcgttacccttgccgagcgcctgccggatggccgcatcgcagtcctggtgttcgatcgcacgcagcagcacgatgaacccacttacgacttctactgcagcggcccagagtcggccctgatgtggattgcgcagatggccgggaagtcgtggatcaccacagaacacctgagcgtcttcgcggcactgatcgccgaggcattcccgcagggggtgcccagccgtggctaa

SEQ ID NO: 513184 - DNA, 237 bp, Stenotrophomonas maltophilia
atgactgaactgtgcggaaagctcgcggtggctacctatggaacgtccggcacccggttcgtcggcgaggtgatcggataccagccccagccgacgtacatcttccagctccccgacggcacgatcgaacactgggtggccgaactggtgcgcccggcgtccgtggaagaggagatttcctactggcgcaatcgggcgatggcggcggagaaggccggcgggggtgggaatgactga

SEQ ID NO: 513185 - DNA, 219 bp, Stenotrophomonas maltophilia
atggcgaacggtagatcgatcctcgatgcacacacgatgcgcgtggacaccgtgctgaccgatgacttccgcgtggtgcagacgctggactgcttcggagaggtgagccggcgcgtggccaatgtcgccttgatgcagatggatcagggtatccgcgagcagctgattcgcctcggatggacgccaccggtagatggaggccccgcgaatggcaggtga

SEQ ID NO: 513186 - DNA, 723 bp, Stenotrophomonas maltophilia
atggcaggtgagcgcggtgcaatccacaccagggcagcgcgcaggcttcgcacctgcagcccggcagctcgtgggacatggctggacgtgcagggctacctgcaggcgcaggagcagcccggggcaacccgggcgacgctggcgcagatcgccgctgccactggcgccgacatgccgatgctggccgaactggtcgatgcgggcgtgttgtgtggctccgacgtgggcggggcatcgtttgcgtgggccccaagccatgggaggcgatcaggcgagcccgtgccgctgctgtctgtgggcgggggagcatgctggtactgcccatcgatgctggtgggcgagtacagccggcagcagcaggcggtgattgctcggaagcgaatcactgccatgaggcggcacaagggctacgcgccaccacggttggaccttggtgaagcgaaagcaagcaacggtaatggtgcatcaccggcagataccagcgctcgggtgtgcctggagatgcgcaaggcgggtgtacgtggatcgatcccgactcacccgtcgctgttggccgccatcgtggaaggcgggacgccggaaatgttcgctgaggcagcacgggacgctgctcgattggggaagggattcatctgggccgtggccactgtccgggccaggttggagggcgccgagcggtctgcctcgcgtgcgcgcgcgtttggcgccgggcagggccagtga

SEQ ID NO: 513187 - DNA, 537 bp, Stenotrophomonas maltophilia
atgcccccgaagagcctgacgccgcgcgttcccggcgaagccctgccgcccaccgagaccgatgcgggcaccgctactgccgctggccctgtggatgccgccggcgctgccactgaccatgccgaccaactccgcgcggaactggaggccatcgcctcgctcaacgtgcccgaggtcctggaggccctggcgaccctcaaccgcgacgagctgatcctgctccacgccatcgagacggacggcaagggccgcgtcaccgtgctgggtccgatcagcgaccaactggatgcactggctgctgaccaaagggagaccagcgccggcgctgccgatggcacggccgctgccgctggccgtctggccgaaaccttgggtgcaagcgacgcggatgccgcctggaatgacccgcgcggctatgcggcggcggccgcgaagcagcgccgcgccaagggcagcccgatcaccaaggccgagcagcccgcagcggtgctgaccgccgagggctgggtcgtgcccgagcccgaaccgaaggagtga

SEQ ID NO: 513188 - DNA, 348 bp, Stenotrophomonas maltophilia
atgtgcggcagcaaggccaagatcatggaccccgccggcctgctgactggcaagaacgccaagtacgcagacccgctgggcatcaccaaaaccgccatcggtgatccgaccggcgacctgcgcaaggagcgctcgcgtatcgccgcgcagaaggaggccgatcgcctggccgccgaggacgccaagaacgtcctgccgaaggcacgcgcggctgctgcgaaggccgccgaggaatcaacggccgcatccctcaacacccgcctgaagcggcgcagcgcgttcgctgtctcgctgctgcagggcggcgccaccccatcgtcgctgctggccagcggcaacaggagctga

SEQ ID NO: 513189 - DNA, 249 bp, Stenotrophomonas maltophilia
atgaaagatcagatcacccaggacattgccgtggccacggcgaaaatcgccccggtcacgagcgtgactgtagggacctacacgcctggatacacgctgagcgacttggcgatgctgggtacgatcatcttcacgatgctcaacatcttcgcgctgatcgtgaagaactggggcgactggaccaactggggccgcgcgcgctgggcgacggtggtacgcatctatgcgaggatccgccgccgtggctga

SEQ ID NO: 513190 - DNA, 1545 bp, Stenotrophomonas maltophilia
atgaccgtccccgcatacaccggaccgaacaggtcgaccgccaacggcgtcacgaccgtctttccgtacagcttcccgatcctcgatgccacccatgtgctggtgacggtgaacggcctggcacgcacccttggcgtgcactacgacgtcaccggtgtgggcaacctgggtggcggcaatatcgtgttctacgcgccccccgcagccaactcccaagtggagcgcatgcggaacatgccgtacatccgcgagaccaactacaccaatcttggcgacctcttggccagcacgctgaacgcggatcaggactcgccagtgatgatgatccagcagttgtctgccaacagcatgcagctgatcctcgacccggattctggcgagttcgtctgggatgccaagggcaaccgcatcatcagggttggcgatgctaagggcgacgccgatgcagtgaacgtccgcaccgcgctggtgttgatcgagcaggtgcagaacggcggcggcaccgtaggggtttcgccgcggctgtggaccttcgtcggcgacggcgaggtgacagatttcccgctggccggggctgacgtaacggacccgctgttctacgacacggcggtggagctggccgccaacgcgggcaactacaaggtatcccgcccggtcgatgccaacggcgtgggcgagttcctgatcgtgccaggcgtcagcggggcgccgccggctatcaggttcctgcagcccctcggggatggagtccggggctttaccaccctgcgcggctacgcgcggccgtggatcggacagcagccgatctacaccgttgccccccggatcatcagcgtcaccggcaacgtgacgctgggcggggacatgcacaacacactgatcctggccaactcgcccagcccgatcaccatcaccatccgcgcgaacaccggcggcagcgccgactggaaggagggtcagttcttctctgtgatgcaggtaggagcggggcaggtgaccttggcagtcgagggcggtggtgggcagctcaatgtgccggccagcttcgaggccaagacccgcgcgcagcgcagcatcatcagcgccaccaacatcgcgccggatgctgatgcttgggtggccgccggcgacatgttgcgggttgcctcggcaccggacctgcagtgctttgagctgatcgaccgcacggtcttgttgaccgctaacattgccaccggcaacggcaaggacagcctggtgcttccctacggcctgctactcgacacggtggccaatgggggaatctacgccaccctttccaccgcgcaggcctctggcacgccgctgacgatcgacgtcaatcgcaacggcaccagcatcctggccacgaagttgaccttcgatagcaacgagcgcagcaccactaccgcagccactccgccggtgctggtggccggtggcgacgtgctggccaagggggatgagatcaccatcgacgtggaccaggtgggcacggcgggcgcccgtggcctccgggtgtacctcgtcggtcagagggcctcctga

SEQ ID NO: 513191 - DNA, 1569 bp, Stenotrophomonas maltophilia
atgtccgcgcgcctctacgatcgtcccgatcttgaccagcgcgaaggacggctcgccctctacgtcacgggttcactgccaaatgcgatgccttcccaggcgtacgagggccgacttcagatcaccaattcggttggcgcgtgcaccgttcggcagatcgatggcgacaccttgccgccgggtcatcggctgtatgtcgaccaagcaagccgccaggtagttctggcatggccagcgtttcaggagaacgccgccccgatcgcgaatccagggttcgaggatgggccgacgggctgggaggcgggcgccggttgggtgatcgcaacggagaatcctccggtggggctgtgggcggccggctacaacaacaaccagggtgagtcggtcatttccagcacttcgcgttacgcggtgtatgccgggcagcgcaccagtgcaaagtgcaaggtgcggcagggtgcgtcggccgaaggcaatgccggtgcctcggtcctgctcgaatatcgggaccaggatggccaggttgtcggccgggtggaaggcaaccgggtcatgtcagccagcaagaaccgagtgtacgactccgacgtggttggtaccgctcctgcgggggcggccacgatcaatatcgcaggcaacggtatccggtaccgggagaacaagattctctttgtggatgccttcgagtgggatcacacggtcgccgctgcaggcgtcaatcacgaggtcacctacggaatcaccctgctggtaagcgattcgcttggccggagcgccaggtgggagggccgggtagttgtcgctgttatccgcgactacgctacagaggtcctgctcgacgccccggtggcttactggaagttggacgatgctctgggcgccgtgagctttgcagatagcagtgggaacggcatttcggccaggacgatccggacttgggcaggtgctgctaccgagcccctgatgcagcgtgggccgcttcgcacgggcggccaatccggctggttcgacgggatttcgaacattggtgttgagccggggagcgggggattctccaggctggcgatctccccgagcggaaggtttgccgtggagtgcgtgctggaaacgccgacgttcctggggaattccacaccgtacattctgcgcaagcaggcggagacgtctacggcccactacgaggactacctgcttggcttcgctggtaatcagacgttccagcttgtgttcggctggaccaacagcggggcaggcagcgcccggcatgtcactgcgccgtttgcattggagcctgggcggatctatcacattctcggcgtgtgcgatgttgtcggcggtgtggttaccgtcagcctctacatcaatggcgagctggtcgcgatgcgcgacgacagttcgatgcagcagcttcccatcgattcggcaggtgccttcaccgtcaacgcgccacagaactggggcgcatggagcttctcggggcggatttccgatatcgccctctatgcccacccgctttcggcggctcgggcgttggcccacgcgcgggcggcaggcttggcgaccctttga

SEQ ID NO: 513192 - DNA, 303 bp, Stenotrophomonas maltophilia
atgaccaccgacaacaagaccctggctgtggatgtgctggcggtgatggatggcgcctgctacgtacttctccgcaagggatctcgatccccggaactggaagaagcccgctccgtagtggccgagctgatcgaggcggggaaggcaatacagactgcttccgatgagattgaagctgcaaaggacgagtacctacctgtcctcgtccccatggatgttcaggcatccctcaatcgaaaactccgctccgcgcgggaacgtttttctactgccctcgcccgcgtaaaaggagaagcagcatga

SEQ ID NO: 513193 - DNA, 399 bp, Stenotrophomonas maltophilia
atgatgaacagtgatggatcgacacacagggtctacttccatagtggtggctggatgaactgccactgcgtcgcggcaggtgaccactgggaagtcgagagttcagtggagcgtcgcgcgcgcgagttgcttgaagagcactgcccttcgggagattacgagcgaagcgacgtgctggatgcaatccgtgctgccgctagccctcagtgggagccaatcgattcggcaccgaaggatgggactcctgttctcctggaccaccggcattggcatacgagagtgctccgtggcggctgggacgcgcacgagcaggcatggcgagttcatggattcggatgcccggccacgcagcccacccactggcagccgctgcccgctccgccggaggaaaggccatga

SEQ ID NO: 513194 - DNA, 204 bp, Stenotrophomonas maltophilia
atgagcgagaaagagaacttcgcggccatgggtgagatctcgcaagagaaattcagcgaaatgttcccggagctcgttgaatgccccaagtgtcacggacatggtggcgaccgttggcacaaccctgacggcagtgaatggggagagcgctgcgaccgctgtgatgggttcggctacatcgggaagaaggagagccgagcatga

SEQ ID NO: 513195 - DNA, 339 bp, Stenotrophomonas maltophilia
atgacccgcttcgcccgtggccgcatgccggccggccagatgaacaagacagagcaggcctacgcacagcacctggagcgcctgcggataaccggcgacgtggagtggtaccggtttgagggcgtgaagctgcgtctggccgacaacacgttctacaccccggattttgccgtcatgagcggtgacggtgtcatggagatgcacgaggtcaaagggttctggaccgacgacgctcgcgtgaagatcaaggtggccgcaggccagtacccgttccggttcatcgcattcaaggccgtcgcgaagaaccgcggcggtggctggctcagggaggagttttga

SEQ ID NO: 513196 - DNA, 342 bp, Stenotrophomonas maltophilia
atgatccgcggcatcgcatacggcggcagctgggccggcgagatgctcagcacatcaggggccgtcgccaagatgatgccccgtcggcccaaggccggggacagggtcaagacctatcgcgggtccgatgttgtcgaagtcacgcaggccccagagcggtatgaggtcaagaaggtggctcggtatgacggcaaaggaggcctagaggaggcctactacttctggattccgggaagcgaggtgccggagcccgcgcgcgtgttcaaggatgcgcgcgcagctcggctggtcagtttccgcagcaagccagcgtcaatcgcagaggcgacgcatggccggtaa

SEQ ID NO: 513197 - DNA, 546 bp, Stenotrophomonas maltophilia
atgagcaaggaaaccatcatcgtcccggtagtgcaggcgacgatccagcgcagcgagtacgtcacgatctccgactcgttcccgaagcatgaactgccgatcctggagctgatccacggcgaggacaacgtggtcgtgaccgacccggactacttcgcgttcgaattgccgaacaacgccacgcaggaactgcagcgcctctacacgaagtacaccgacaagtaccggccggtggtggaccaggtgttcccgcgcggcgcccgcgacgtcgcttccgagctgggcatggatgtcggcaaggacactttcagcaagcagtccgaggctgtgatcgaaagccgactgccgccgcgcccgaccgccgccgccagcctgagccgtcccgcgccggaagacgagggcgacgaccagcccgaactgacccatgccgagctgcgcgaagagctgacccgcctgggtatcgaccacaagggcaacgcgccgaaggccgaactgcaggcgctgtacgacgccgcgcaggccggcgccggcaccctgggcggctga

SEQ ID NO: 513198 - DNA, 489 bp, Stenotrophomonas maltophilia
atgaaggtcacgacttccacgcacgtgatggtcgaggacatcgcctacttggcgcgccgcatgcggccggacgagatcgagcaggatctggccatgaccggcgcggccgaatacgacccggagcaggcgatcatcaagatggccgctgtgcacggcccgaagttcgtcatcctggccgacaacgtgccagttgttgccggcggcttctggcaggtgcgcccgggtgtatgggaggggtggcagctcggcaccatggaaggctgggaggcgcactggcgcacgatcaccaaggtgacgcgcaggctcaacgaccagatgctggcccagcccgacgtgcatcgcctgcagctctacggccaggccggccgcgacaagacgttcgagtggtatgagcgttcgctgggctaccaccgtgaagccaccctgagccgctactgcgccaatggcgacgacgcggtcctgttcgcacgtatcaaggaggcaggctga

SEQ ID NO: 513199 - DNA, 1284 bp, Stenotrophomonas maltophilia
atggcgaacggatacatgcgcgcaggcgcggcactcggcgatgcactgttcggcaatggccgggcggcctacaacgaccagttgggactggagtacaagcatgccctcgcgctggaacaagccaggcaggcccggaacgcccgagttatcggcgacaggaatgtggcctcctatcagggcattacgcctgatctagttggccgtgcccgggcaggtgatgttgcagcgctaaacgagctcaccgcacttgggcttacggcaaaccaaaccatgaactttgatgctctggggaagacccaagagttcgggttccggcaggctgcccgcgacaaggctgtcttgggcgatcctctcaaccccaattcggagctcttcggcatcgccaatggtccagtcgaaacgacgaagatctctgacggggtggcctacagccccttgggctcgtcgtcccagacggtcaatgtgacgccgctcggcgaggccgcgattgggcagcgccgcgcgtctgccgcggccagctatgcgagtgccgacaactcacgagcgtcagctgcgaagacccgccaagagatggcgcagggcgccgcggatacgctcggcagtcctcgtgggatgaaggctcctagcggctatcgctggcgtgctgacggaggcctggcgttcatcccgggcggcccggctgacccggcaaatagcacgctggggaccccgacggagggagagcgtaagtcggcaacgcttctaagccgcctggaaaactcgctcgggcagatgaacacggcgatcggagagaatgaaagcgctgcgaagccgggcatcttggccagtattgcgggtcgcatcccgttctcgggcgagtacgctcggaaccttgtgaactccagcgagcgccagcgggtcgaagctgcacaactggacatgcttgacgccgctctgacgttggggacaggcgccgcttacacgaaagaacagcttgaaggctaccggaagagctatttcccgcagttgggcgacagcgaagacacggtggctgataagcaggcccgtctggacaacatcgtggaggcagcgcgcatcggcgcagggcgcgccgcgccctctgcgggcctcccacgagccccaaggactctcggggaccccgttcttggctcgcgttcgccgggcctgccgtcagcggggccgccgcctgcagctgtgcaggcattgcgcgcgaaccctgagctcgcgcgccagtttgacgccaagtatggcgctggtgcgtccgcctcctatctgggccgctga

SEQ ID NO: 513200 - DNA, 510 bp, Stenotrophomonas maltophilia
atggtccgttgctgtcaaggacaattttggtccaacattccggccatgtctgagcccaccttccaccagttcaagctgcgcctgcctgtcgagctattccagcggctggagaccgaagctgcccggtctaatcgctcggtgagcgcggaaatgatttaccgcctcgagggttcactccatcaggacgatgacgcggcgatcggctgggggctggatgacccgcaggaccgcgccgcggtgttgaaggcgcttctgtttcaagagatcggtctgctgcgccgtcgcatcgaggatctgggcggtaaggaagtggtgctgcagatggacaaggcagacctggccaagaagatcaccggtcctcgcctaaacggcacggaagccgagaagcgctcgcacatgtccagggcgctagagacgttcccgctcaccactctgttgaccgacgacgagctaggcaagctcgccgagcgcgtcatcaccatccagagggccatggggcagctgaaatga

SEQ ID NO: 513201 - DNA, 180 bp, Stenotrophomonas maltophilia
atgtcaaagagcgaagatcctcagttcaaactgcgcttgccccgggacgtgcgtgactggatcggctgccaggccgctcagaaccgcagtagcaagagttccgagatcattcgctgcattcgtgagcgtatggatcgtgtcgggtttaaggccgacggttcgatcggagaggcggcatga

SEQ ID NO: 513202 - DNA, 843 bp, Stenotrophomonas maltophilia
atgaacggcctcgccaagatcagccactacggggtggtgcgcttgggcgagatggaggccgaggcggttgtcctggaggatggccggcgcggctttatcggcaagcagatcgcgacagcgctcggctacaccgagaagacgcgaagtggccggtttgatcgttttttggccgaattcgctcctaaatacatgatcggtaaggagaaagcagggtggccggttttgaaccctgggaagggtgggcgggctcagttcatcgaggctgaagctgtgatcgaagcgatcgacaacgtgatcgatgtggctttcacgaagggcttccacaagcagcagaagaaccaagtgctggcctgcctcgccatccgcaagtcgctgggcatgctgggcttggtcgcattgattgatgaggctaccgggtaccagtaccaccgtgcacctgacgctttgcaggacctgatcggcaagctcatcaggctggaggtcaaggactgggagcgacgctttgagccggagtactaccgggctctggcaaaggtgactggcacgccgtacaccagcggcgccaacggacgccctcccatctggggagcgatcacccgcaagtgggtgtatgaggcctgcttcccggaagaggtcatcgcggagatctcggcgaggcagggcgtgggggagaagcttcaccagtggctgtccgacggcggcatccatgtgcttatgcggcagaaggaccacgtgaaactgctggcagagacgtccgccaactacaaggacttcgaggccaggtgtatgcagggttttccccgccccgggcagatcggaatcatctatccggaggccgcatga

SEQ ID NO: 513203 - DNA, 318 bp, Stenotrophomonas maltophilia
atggcgacttactggattacgtttcgtctcgctgctgagactgtcggcggccgcgactacaacacgcgctaccaagcgctcgttgacgctgtgaaagctcatcgggccacgcactggtggtttgagccaacctcattttggatggtaaacagcaactcaagccaggcagtgatcgctgcagcagccaaaaaagccattgcaccaaccaaggatttggttctgatcggatccaacgacaccgtgggcgtgaccttggtcggcgcagccgacaagctgaccgaccttaaggcactggtgccaaatctctcgattggctga

SEQ ID NO: 513204 - DNA, 336 bp, Stenotrophomonas maltophilia
atgtacgccataaaaggaggtagttacaggacaatctcttcctttgacgagctggaggccggcgaagaatccgcaatggctatcccgccacctttggaagaggcgctggagacgggaaagatacgccgccgccgtgacatggcattgcgcggcaccgactggacccagatgcccgacgcgccactgaacgcgctggagagggctgcgtatcagacctaccggcaggcgctccgtgacctacctggtgttcccggcttccccaacgtcccatggcctacgcctccgacgatcaaggaaggagctgcaggctctggtgagggccctgtctacccctga

SEQ ID NO: 513205 - DNA, 1029 bp, Stenotrophomonas maltophilia
atgatgtcggtcacgcgctgcaccgaggcgacgatctcgcccatggtgctgccggcctggtggaccaggctggagccttcggcaaccttgccgaccgagtcgtcgatcaggcccttgatctccttggcggcggcggccgagcgctgggcaagggtgcgcacttcgctggcgaccacggcaaagccgcggccctgttcgccggcacgggcggcttccactgcggcattcagcgccaggatgttggtctggaaggcaatgccgtcgatgaccgagatgatctcggcgatcttcttcgacgaggcttcgatggccgacatggtggtgaccacctggccgaccacgtcaccgccctgcgaggcgacaccgtgcgcaccgatggcgagctggttggcctggcgggcgtgctcggcgttctggcgcacggtggaggtcagttcctccatcgaggcggcggtttcttccaggttggcggcctgctgctcggtgcggcgcgacaggtcgctgttgccggaggcgatctcgccggcggccagggtgatgctggaggcgctggcctggatctggccgacgatctgggtcagctgtgcaacggtggtgttggcatcatcccgcatgcgcgcgaacacgccattgaactggccttccatgcgcgcggtcaggtcgccggcggcgatcgactgcagcagctgcgagagctggccgaggttgccgtcggccacctgcatcatggtgttgagatgctcgatcatcagcttgaagtcatgctggaaacgctgtgcgtcgccgcgctggctgaagtcaccggcagcggccgccgcggccagctgctggatctgcgaattgatcgccagcaggctggctttggccgcgtccatcgagtcgtgcaggatcgcgcggctgccgggcaggcggcgtgcatccggggtgagattgccgatggcgtactggttgagcacgtcgatggcatcgcggatcgcatccaggtgctcgaagatcaccgtattgatgccgccggccagctggccatag

SEQ ID NO: 513206 - DNA, 327 bp, Stenotrophomonas maltophilia
atgtgccgcaggctgcttgagactctcattattgaaatgtacgaacaccaggggcgagaggtagagattaagaaagatgctcactatcagccgctgagtgagcttgtggcttacgttgagagcgatcacaagatatcgctgagcaggatgggactcaaagccctgaagaaattcaagcggctaggggacctttctgcacacaacagacgttacaacgcgcgcgaaagtgatatcgcgccgctccgagatggcatccgtttagtggtcgaagaaatgctgaacatcgccaacctctattcgaaggcatcaaattcaaaagcggcctag

SEQ ID NO: 513207 - DNA, 663 bp, Stenotrophomonas maltophilia
ttgaaagccaatgagaaggtaggtccgctcaaggccagcatgtccgttgtcttgaaagccaatgaagtggtcgtcgcagaagtggatgacgcgatactgtggaacgcagttttttcggcgataaacagcggttcctcgacattgaaccctatgacgcttcctagcgcacaaacgcaagccatagatgctgaaaatacatccaaagtccagacccagcagcagactcagaacacaccagtcgccgagcccctcaacaaatttgcaaaagagctaggggtagagctcgatgtgctcgttggctcctgcgatcccacttcttcggagccgcacctgcgactggactcccattgttgggagcaaatgaagaaggaacttcctatgcgagggcccaaggcagtcgcgccgattgtattggctgcaacagctctttgcctatgggcccgaaatggtggcattggccccgttacccaaggacaagctcagggagtcttgggaacaattggccttcgggaccccaacgcctcgcgtggcataaaaagcgcagagtggcttcagtctcgccctggcggccaggttgtcttgaatcctgcgcaggtctctaaggcaatattgattaccagctgcttctgcaagcaggactggagtgcttggaaatccctttaa

SEQ ID NO: 513208 - DNA, 654 bp, Stenotrophomonas maltophilia
atgactgagtcccctgccccgatcggcgtgctggtggtcgacgaccacccgctgctgcgtgacggcctggccgcgctgctgggcgcccattccgacctgcgcctgctcggcgaggccgccgatggcgaggaagccatcgagcgctatcagcagctgcagccggacgtggtgctgatggacctgcagatgccacgcctggatggtgtggaagccatcgtgcggatccgcgcgatggacccgcgtgcgcgcatcatcgtgctgaccacctatcgcggtgacgtgcgtgcggtacgggcgctgcaggccggcgccagtgcgtacctgttgaaggacatgctgcgccacgagctggtcgatacgatccgcatggtcgctggcggccggcgcgcaccgataccaccggcagtcgctgcgagcattgccgcgcacgtggtggaggaccggttgtcgccgcgcgagaccgaggtgctgcggcatgtggccggtggcctgtcgaacaagcgcatcggcgagcgcatgcagatttccgagcagacggtgaaggcgcacatgaagagcctgatggacaagctcggggtgggtgatcgcacgcacgcggtgacccaggcgctgcggcgcggcatcatcagcctggacgacagcggtcacgattag

SEQ ID NO: 513209 - DNA, 828 bp, Stenotrophomonas maltophilia; identical to SEQ ID NO: 117483

SEQ ID NO: 513210 - DNA, 639 bp, Stenotrophomonas maltophilia; identical to SEQ ID NO: 248005

SEQ ID NO: 513211 - DNA, 558 bp, Stenotrophomonas maltophilia; identical to SEQ ID NO: 199428

SEQ ID NO: 513212 - DNA, 237 bp, Stenotrophomonas maltophilia; identical to SEQ ID NO: 149275

SEQ ID NO: 513213 - DNA, 477 bp, Stenotrophomonas maltophilia; identical to SEQ ID NO: 199444

SEQ ID NO: 513214 - DNA, 1071 bp, Stenotrophomonas maltophilia; identical to SEQ ID NO: 199445

SEQ ID NO: 513215 - DNA, 1320 bp, Stenotrophomonas maltophilia
atgcgccagcttgccacatacagtttttcgtctcctgcgagcgatcatcgaactgcccaagaacggcattcagaggcgattggaatcatcgagaaatggctgcacaaaaaaggggctgaaacccctctggagcctgaaggatttttccgctcaagaacacgagaagaccaaactggcatctacaccgtcgcaaggcatgatcatgatggggacgagctgatcgagttcaggctggatgaaaaatcaaacaccggcctcgatttctctacatccatctctgtgcttttctcggatggatccaccaccattttctgcacgctatccgcgtcaagccccgaagccgccatactcgacgcttacacagatgcccgctgcccgtcagttgtccgggatctgctagccgctcatgatgactggacgtatgcaggagtcgatatttcacgtgacgtgaggttggtagatagcgaagcggaagtagtgaagcttgtcgagcacatcaaggacctgcaagctagaaaggctccccttgtaatggtctcggaatacaaaggtgaagaggcctggacaggcatctctgagaagcttgcaagagacctcgtaggcgcagcagaagttgtgcgcatcaccgattctggatccaaactactaagctcaaaagtggggaaaaagcactcctgctacctcggagccattcgactctattggcctgcaacgagcgaactggagatgccgaggtcttttgtttggaccgaagaatcgctgctaccggaagatgaggccgaggatgctctctacgcgaaacggttccagaataagctgcgcaatctcattctgtctgcaaccgcagtctcaatcgcgccccccaaacgaatcaaagagctagttcaacagacagccagcaaggcgcttcacgatgcaaggaaaagttcagaagagcgcatcgagcaacttaaagcttccattaatgacctgaaagagaagcttgagaaggccgaatatcgaaatcgctccctctcctatcagctacagcagtccgccatacttgccgacatcgggcaggacaacgaaggcgcttcaaacgacgaagagaacgacgctcctgctaagggagaggttcgcttctacaaaaaaatagccaatgccggcaaggctgacaagatggtgcaaaccaaagattgcggccacaagtcctggcagtcctcaaatggcgctgataaagcaaaaaagggccttgcccgccttatcggatccgaggattggaagtctgccttacattgcggaacgtgcactggcggtggtgtttggagagttgaatggtga

SEQ ID NO: 513216 - DNA, 1383 bp, Stenotrophomonas maltophilia
atgaagagtaagtcgaagactggccctgtcaagggcggggaggccaatggcgacgccgttgatcaggctccgaagaaaaagggcaaggcctttggggccgaagccaatcccaacgacgccacggatgacctgggtgtgatcggggaagacctctcgtttgagctggcctatgccgacgatatgcgccgcggcaaccagtttcgcatcggcggcaagatggacaacggcgagatcgacgtttccctgtatcagtgggatgagtccgaaggcatctgggccctgcaagccacccgggaagtagaagcccacgcgttggactggatgcgcaagcacgccccggaggacgccaagcagagcagcgcaaccagctgcgtcaagacggccatgctcgaaatgatccgcttgcctggcatgaagttgcctgaaagccagcatcgggccatcgtgccgctgaagggcggttacctggagatcctcaaggacgctaacaagaaggcctacatcgaatacctgccggccgaccccaaacacgggatcacatctcttgttccagcgaagctcaacctggaccaggtgaagtcgggtcgttacacccccaagccgttggaccccaagtcgcggtgggccaaatatctggatcgcttcatgcctgacatggccgtgcgagggttgcttcaagaagccatggcgtcgtcggtcatgccgatgtgcctggaaaaagccttcctgttgctgggaagcggcagcaacggcaagagcaccttgcttcacgtcctgcgagccatccaccccaagaacactgcggtccgcatcgacaagctggatgggcagttcgccatggcacctctcgcttccaagactctttatctggcgacagaggcgcccaaggtcctctccgatcccatccagcaggtcctgaaggcgctcatctcacgcgaccccatgtccgccgagaacaaaggcaaggacgcttacaccacggttcctcggggcacgctctttcttgccctgaacgccatgttctccgtgacgagtcatgagcacggcttttggcgaaagatctgcatgatccccttcaatgtgcgcctggccgcacatccaggcactcgtccgaaagcttcgggacaaatcgatctggctatggagccggggtgccatcgagcctcatgttgggctgaccgaaaagaaggagcacgcctggctggcgttccaagtgaaggtcgaaagcgatggggtggatgcagcatgtgcggacgcagcaagcgtgcgagaactcgtggagtggctggctcgctaacgtccgctagcacgttggctagtccaccggcccggagcgctcgcggagcttctcgcaagcgcgctgggcggcatgaccatcgttag

SEQ ID NO: 513217 - DNA, 315 bp, Stenotrophomonas maltophilia
atgcaacgcacgcccgtcgtgttcgccttcgccgttcatgcgctggtgctggccggctgtgaccggccgcagcagttgccggtgaacgcgctcgccgccgacccggcccggctgcacgcgctgcgcgcgcagtgccgcacggacgcgcacgacggcgcgttttacgcgcaggtggctcaagccgacctgcggcgctttctctccggccaggccgggccggacgagtaccagacgctagccgacctgccaccgattccgcccagcttcgacgaacccaccgatgccgatgcgcctgggcaggaggactcgccatga

SEQ ID NO: 513218 - DNA, 390 bp, Stenotrophomonas maltophilia
atggagatcacacccgagcaattcgccaccatcgagcactgtctgcccaagcagcgcggcaatgtcagcctgagcaacctgcaggtagtcaacgccatcctctatgtggccgagcatggctgcaagtggcgtggactgcccaaacggttcggcaactggcacacgatctacacgcgcatgaaccgctggaccaaggccggtgtactcgatcgcatgttcgaggaattgcagcgggcccaggtcgtgcgcatcaagatcgaggcggtctcgctggactccaccagcatcaaggtccacccagacggcaccggagcgttaaaaaactgctcgtgtcaagccatttgtgcaaatcgcacgaggtctaaaactctatatgggacgcaaagttag

SEQ ID NO: 513219 - DNA, 156 bp, Stenotrophomonas maltophilia
atgcaccatcttcattcccaccgcgcccggcagcaacgtgccaccaccatcgccatcacgccatcggtcacccgctggcaccccgcggcgcgagccgctggttggacactgctggccatgacgctgaccgtcttcgtggtgttcaggctcggctga

SEQ ID NO: 513220 - DNA, 480 bp, Stenotrophomonas maltophilia
atgaaccacccagttttccggcactacccccgcaacagccctcaggccgccgggcgcatcctggccaccgccttgctcgccaacggcgacatcaaggatgtcgaatggcagcgactggccgacacgcaggccttcgaacggctcgatctgcatggcctgcaatggcatgtcgttctggacgagttgtgccaggacctgatgaccggtgttcgcccggggcgggatatcctgatcgacggcccgacgctcgctgcctggctggacgagatcgataacgtcgcgttgcaggcgctggtgatcaagctttgcgctcaagtcatcgaggccgacggcgaggtgcacccgggcgagtcgatgttgttgcgcgcggcacttgagcggtgggtgctgccgatggaagaccaggagtgtgtcgaaccactggtctacggcctcgactttcaggtggtgccgcgccctggcatctcgatgccgggctaa

SEQ ID NO: 513221 - DNA, 234 bp, Stenotrophomonas maltophilia
atgaaacatgtctacttggccctgctgctcgccatgacggctgtcgtttttctcttcaagttccagaacctcgacactgtgaccgtgcagttcctgtctgcgagcttgacgctaccgctgtcgttgctgctgctggcggtgtacgtgctgggcatgctgacgggaggcacgctcctgtccatggttcgcagctgggtgcgcggcgccacctcgaaacctcccttgagcaactga

SEQ ID NO: 513222 - DNA, 1086 bp, Stenotrophomonas maltophilia
atgacttttcttctgttcgcgggggggctcctggccttggttgccggcgccttcatcctcgtgcgcggtgcgtcgctcctggcattgcgcctgggtctgtcgccgctggtggtgggtctcacggtggtggcttttggcaccagtgcaccggagatggccgtgacaaccggcgcagtgctggccgggcagggcgggctggcggtgggcaacgccgtgggcagcaacatcttcaacgtgctgttcgtcctgggcctggccgcgctcatcacgccgctggcggtgcaccggcaagtcatccgccaggaggcgccgatcatgatcggcggcgccgtgttgctcatcgtcctgggcctggacggatcgttggggctgttcgacggatcgctgctgctcggcctgctgatggcctacaccgcgttcctggtccggcagtcgcgcgcggagccggccgcgaccggtcccgacgagtacgccgacacactgcagccggccaaggcggggcggtgggacgcccggctgccggcacagctcggtctgatcgtcgccgggctggtgctgctcgtgctgggatcggattggctggtgcaggcggcagtcatcttcgcgcgtgcactcggtctgtcggaggtgatcatcggcctgaccatcgtcgcctcgggcacttcgctgccggaggtggcggcatcggtagtggccagcctcaagggcgaacgcgacatcgccgtgggcaacgtggtgggcagttgcgtgttcaacctctttggcgtcgttggcctgggggccgtcgtggcggctgtgggcaccggtgccgcgctgccgctgccgccggacgtggcccggtttgatctgtgggtcatgctcgccgcactggtggcttgcctgccggtcttcctgaccggtcgcgagatcgcccgttgggagggcggcctgttcctgggctactacgtcgcgtatgtggcctacctggtgctggcggcgcagcgccatgacggcgtccaggccttcggcgacgcgatgctggggttcgtggtgccgctgaccatcgtcacgctgggcgtgacgatgttgcggcgggcggggcgctga

SEQ ID NO: 513223 - DNA, 2253 bp, Stenotrophomonas maltophilia
atggggctggcctctcgtgccgccttcacggcgctgcctctggccgcgctgggcgtcgtggtgggcatgttgttgtggctgcagctgccgacgggtggtgcgctcgagtggataccggcgctgggcatctcgctggcctggcgcatcgacggcctggcggtgctgatgctgctgatgatcacggctgtgggcagcgcggtattcgtctacgccggcggctacttcgcaagccacccggggcaacggcggctgttcgtgcagctcacgctgttcatggtggcgatgatcggctgcgtcactgctgacaatctgttcacgctcttcctgttctgggaagccaccagcgtgctgtccttcctgctcgtcggcttccaccatgaacgcgcggtcagccgcaaggcggcgcagcaggcgctgctggtgacaggcaccggcggcctggcgctgctggcgggcttgatcctgatcgggcaggtgatgggcaccagcaccatcagcgtgatcgtcgaacgcctgccggccaccgcgcccaccccgctgctgacggcgggtgtcctgttggtgatcgtgggcgccttcaccaagagcgcgcagttcccgttccacttctggcttcccaacgcgatggccgcgccaacaccggtgtcggcctacctgcattcggccacgatggtgaagctgggtgtgtacctgctggcgcggctggacgccggcctcgacgactggctgctgtggcaggtgctgctgcagggcgcgggttcgatcaccgccgcctggggcatggtgctggcgctgcgcgagcgcgacctcaagcgcatcctggcctggtcgacggtggccacgctgggcaccttggtggcgctggtgggcatgccaggcgaaggtgctgcggtggctgtgggcgcgctgctgctggcgcatgcgctgtacaaggcgccgctgttcttcgtcgctggcaatgtcgatcatggcaccggcacccgcatcatcgaccgactgggcaacctgcgccacgccatgccgtggaccgcggcggcggcggcgctggccggcatgtcgatggccggcatccccttgtcgttcggcttcgtggtgaaggacctgatcggcgacgccaaggcggccgacaacgtgctggctttcgcgccgctggccaacacggtgttctcggccatcgcggtggccgtggccggtgtcgccgccgtgcgcgtgttctggcaccgcgcgcccgagcccgcgctcaccggcgtgcatgaggccggtcccgcgctggtgctgccgcccatggtgctggccggcttcggcgtcgcgctggggctgttcccggcctgggcccagccgatggtagaagctgcgggggtggccatgaccgccggcgacgaccctgtgctggcgccgctggcgcgggcactgctggcagagtcgctgacctttgccaccacgctggcgctgggtgcgatcgtctatctgctgtgggacgtgctgcaccgcatggtggatgcggttgccccgcggctagccaccttcggccttgccaggctctacgaacgttccctggactggattccgcgtctcgctgcgttcagtacgcgggcgttgcagcacggacgctcgccaggttacatggccgtggcggcggccgcggcggtgctggccatcgggctcccgctggtggcagccgcgcccacgctggcctggccggcctggtctgcgccgccattgggcgtggccggtgccgtgctactgatcgctgtcggcgccatggcggccgccacgctgaaggaccgcctggtgctgctgctgggtgccggtctcgtgggctacggcagcgcagtgctgtttctctttgcgggggcgccggacgtcgccttcacacaggtggtcgttgagacggtgttcgtcatcgtcgttgcggcggtgctgttggcgttgaaacgccaaggcaaggccatgagcgtgcccgagccggtctggcgcccgatggcgctcgtgctgtcgctggccttcgccaccgtgctgaccgcgctgctgctggccgccgtggcgctgcccttcgacgacacgctgtcgcgctggttcggcgagcacagtgtgccggccgcgcagggccgcaacgtggtaaacgtgatcctggtcgacttccgagcgctggacacgctgggcgagatcacggtcgtgatgctgtcgctgctggcggcggtgccgctgctgcgtgctgtgcgcacccggcgcgacacggaggccggacgatga

SEQ ID NO: 513224 - DNA, 444 bp, Stenotrophomonas maltophilia
atgaaccgccggctggtcatcctggaggtagtggctaagcccctgtacgtggtgatcctggccgcgtcgctggtggtcctgctgcgcggccacaacgagcccggcggcggcttcatcggcggcctgctggcggtgaccgccagcgtgctgtgggccgtcgcgcacggacccgatgccgccacgcagcgcctgccgctgcgctcgccggtgcggcttgcggcgctgggcgtgctggtcggcgcgctgtcgggcctgccggcctggctgatgggcaaggcctaccttacgcacctgtgggccggtgtgccgctgggcttcacgacgctgccggtgtccacggtgctggtgtttgatctcggcgtctacctgtgcgtgtggggtgcgctggggggttatgccatcgcactgctcgacagcgacgaggcggaggagggcgcgcaatga

SEQ ID NO: 513225 - DNA, 429 bp, Stenotrophomonas maltophilia
atgatctgggccgtcgccttcgcgctctggatcacgttgaccgcagggctgtacctggcgctgtcgcgcgacgtgctgcgctgcgtggtgggcctggcgctgctgggcagcgcggtgaacctgctgctgctggccgcgggccgcctggggtcggcgcagccggcggtgatcgaggcgggcggccgggtgctgcaggaggcggccaacccgctgccgcaggcgctggtgctgaccgccatcgtgatcgggttcgcgctgatgtgctttgcgctcgtgctggtcatgcagttggtgcggcgcgtcggcaccgacgatgcgctggcgctgcggctggtggagcccgagccggcggaccccgtgaagccgccgctggccttcgatgccgtccatgccgacgacgatgcgcggccgcagagggccgacacgtga

SEQ ID NO: 513226 - DNA, 1464 bp, Stenotrophomonas maltophilia
gtgagcatcgtcgccaccgcacccgtgctcgtgccgctggccaccgcgggcctgacggcgctgttctcgggccggtcccgcacgcagcaggccatcagcttcgtcggcgtcctgggcttcctgggggcggcggtgacgctgctggcgcaggtcagcgccagcggcccggtcggcgtcagcttcggcgattggcccgcgccctacggcattcagttccgcttcgacggcctgtccaccgccttgctgctgttgacggcgctgatgggcctggtcacgctgatcttcctgggcagcgacgccgaccccggtccgcgccaccggctgctgctgccgctgctgcacggcacgctggccggcgtggccggtgccttcagcaccgccgacctgttcaacctctatgtctggttcgaggtgatgctgatctgcgccctgggcctgatcgcgctgggcggccggcgcgaccagctcgatgccgccttcaagtacctgggcctgaacctgttcggcacgctcctgctgctggccgccatcgggctgctctatgccgccacagggcagctcaactacggcgggctggcactggcggcgcgccagctcgacccggccctgctgcacacgttgctggcggcgctgacggtggggctgctgctgaaggccggggcttttccgctgtatgcctggctgccggcgtcctaccccacgctgcccgcgccggtgctggccctgttcgccgcgctgctgggcaaggtggcggcctacgccgtgctgcgcatgctgggcgacgtgttcatgcccgaaggtgcggcgctgtacgaggtgctgggctgggtggcggtggccaccatggtggctggtgtgctgggcgcggcgcaccactgggacatgcggcgcatcctggccttccacagcgtcagccagatcggttacgtgctgctggcggtggcactgggcggcccggccggccatgccgcggcgctgttctacacgctgcaccacagcctggtgaaggccagtctgtacctgaccgccggcatggtggccagcgtggccggcagctacgacctgcggcgcatcggtggcctggccgccgcacggccgatgctggcgctgctgttcgcggtgatggccttgtcgctggtaggcattccgccgctgtcgggcttctgggccaagctgctggtgctgcaggaggcctttgcacaggggcgctacacgtgggccgcgctggccctgctggtgagcgtgctgacgctctactcgatgatgaagatctggaccgaggccttctggaagccccatcccttggccgatgcggaaggtgtatggccagcgcggcgcgtggcgctcgcaccggcctgggcggcgacggtcagcctggcggccgtgacgcttgcgatcggatttgcaccccagacactgatcgagttcgcgcaggccgcggccgcgacgctgggccggaaatga

SEQ ID NO: 513227 - DNA, 348 bp, Stenotrophomonas maltophilia
atgaacaagctcaccgccgccgtccttttgccactgcgctttggctgggcgatgctcgcctcgggcgtgcaaacggttgccgcgatcgttcggcgcggcctggctatcggcacggcgcctgcggcgaccttcgtgcgcatcggcttcgcgccgatgagtccacagggcgctgcgctgctggtctgcatgatctcgctgacgccggggacgacggtgatcgacatcgacctggtgcgccgggagatggtgctgcacatgctcgacgcgaacaacgcggcggctgaggtcgacgccatccggcgcgacttcgagccgccgctgctggcctggtttggagagtcggcatga

SEQ ID NO: 513228 - DNA, 312 bp, Stenotrophomonas maltophilia
atgaacgggctgctgaacgcggcctcggtgggctgggccacagccgtgctcaccttgctggcgctgtgcgcgaccctgatcgccaccgtgcgcatcgtgcgcgggcctcggcatgcggatcgcgtggtggccctcgacatcttcctggcggccgccgtggcgctgtgcgttgcggcctcgctggccacccgccgcaccgtgttcctcgacgtggccatcggccttgcgctggtcggcttcgtggggacggtggggtgggcacgcttgatcgagcggtcggcgccgtccgatacgcaggaggagcggcgatga

SEQ ID NO: 513229 - DNA, 342 bp, Stenotrophomonas maltophilia
atgatgacgaccctgggcgggctgctgcttgctgctggcgcggtgttgctggtgatcgcagcctggggcgtgatcgtgttgcccgatgcactggcccgccagcacgcggcgacgaaggcgggcacgttggcgctgacgctcgtgtgcgtgggcgccttgctcgtggcccaggacacggcctggacctggcggctgctgctgatcctgggttttctgctggcgaccttgccggtggcttctcacctgctggcacgggctgcagtgcgcgaagggggtctggctcaagcggtcgacgcggcggagttcgtctccaacacggactgggacggaacgcctgactga

SEQ ID NO: 513230 - DNA, 159 bp, Stenotrophomonas maltophilia
atgcgctcgaccaaggtttccctcgtagccgcctgcaccagaccccatattgccggggacttctataccgacaaccagttcgtcagtctcgtcaccgaaacccccgcgacttcggtgtatgcatgctcgttgttcagaataactggcagcttgatttga

SEQ ID NO: 513231 - DNA, 393 bp, Stenotrophomonas maltophilia
atggacgacaaatcacacgtttcgctggagcagcagctttgtctggtgtgcggcactgcttttgataccggcaacatcttgctcgaccggcgcctgcgcgcgagcatgaagcaccacacgacgacgggctgggggctgtgtcccaagcaccagcgcctgttttcggagggcttcgtggccttggtcgaatgcgatccgcagcgcagcggaacgccgtcgggttcgggcctgatgaagcctgatcaggcgtaccgcaccgggcggctggcgcatttgaagcgggatgccttcgcccgggtgttcaacgttccggtcgcggccgagcagccgtgtgtctttgtcgagcttggcgtgatcgaacaactgcaggcgatggtgcctgcgacagattga

SEQ ID NO: 513232 - DNA, 513 bp, Stenotrophomonas maltophilia
ttgtgccggaagcggtcgcaaggattccagttcttcacgagctttgcggacctcgcgttcggcctccgtcaacgccttctgctggtgcgtggtctgttcaagcaggcggccgttatcacgattgagtctcagcagctccgcgttcttggcggtgacctggtccgcggcctggcggagttcgacctgcaacgcctgaagggcctgttcgtgctgacgttgctcgcgtgccctttgctcctgcgcctgggcccggaagtggtcaacgtcagcgcccacgacgagccgcgcagccccgagcagaagcgccgtgcgatgagctgggcgcaacggctcaagcgggtcttttccatcgacatcaccacctgcgcccactgcggcggcgcggtacggatcgtcgccagcatcgaagaacccaccgccatccgcgccatcctcgcccacttcgagaaacacggcgcgctggagcaagcgcactaccggcccgcaccgcgcgccccgccgccggccgcgtga

SEQ ID NO: 513233 - DNA, 444 bp, Stenotrophomonas maltophilia
atgttcggccgctacacctacctgtacgacctctccagcctgggccagcgcgagcaggactacgaccagaaaacccaggtgctgtcggtggaaggcgtctaccgccacgaccagcattgggaagtggccggcaagctcgcccggcgcgagggcgaggtgcgctacggacgcggcagcgggccgtggttcgactcggccaccgacttcgccgcgctacagctgcgctacgaggtggtctacgcctggcacgcgctggccgaataccgctggctggacgtgcaggccggcggcacgcggcagggctggctggtcggactggaccgcgacatcggcaagaacttccgcatcggcgccggctacaacttcaccgagttcagcgacgacctgaccgacttcgactacgaccacgagggctggttcctcaacatggtcgggatgtactga

SEQ ID NO: 513234 - DNA, 1746 bp, Stenotrophomonas maltophilia
atgcgacaggacgacgacgctgcactcgcttccggtactacatccgatggctggttcacccggctccggcgttcgctgctggcgcgccttggcaataccgggctcgtgctggggacgttgttcttcgccgcctcgctcacgcccagcctcacgccacggatcacggtcgcgcaggcggtgctgtcgggcatgtgcctggccgccggctacggcctgggcgtgctgctgcgctggctgtggggatacctggagctgccgctccccgggccggcgggacagccgcgtcgccgccgtatcgcggtcgtcgcctgcgcggtcagcgccgcgctcgcgctttggcgcagccagcattgggaaaacatcgtccgcgaactgatgcacctggctcccgccggtccatcgcgcatcttgggcgtactcgcgggtgcggcggtcgtggcgctgctgctggtcgtgctgggccgcatcgcgctgatgatcatcaaggcggtgatgcgcctagtcacccgcaaggtgccgcgacggatcgcgcacgtggtcggtgcgatcgccggcgtgctgctgctggtgggcctggtcaacggcgtgatcctgtcctcgttgctggacaccctggacgcctcctatcgccaggccgatgcactgatcccgcccgacatgccgccgccgaccgaatgggacagccccggcagcgcgcagtcgctagtggcctggaaccagctcgggcgcatgggccggcgctacgtcgatgcccgccccaccgccgacgaactcgccgcctacgccggtcccggcgccaaggcgccgctgcgcgtgtacgcgggcctgcccaccggcgacacgcccgaagagcgcgcccagctggcgctggaagaactcaagcgcgtcggcggcttcgagcgcaaggcgctgatcatcatcactccgaccggcaccggttgggtcgacccgtccggcatcgacggcatcgaatatctctaccgcggcgatgtggccagcgtcgcggtgcagtactcgtacctgtccagtccgctgacgctgctcctggatccggacacaggcggggtcaccgcgcgcgcactgttccgcgaggtctacggctactggcgcacgctgccgcccgagcggcggccgaagctgtacctgcacggcctgagcctgggcgcgctcaattcggaacgctcgttcgagatgttcgagctgctcggcgaaccattcgatggcgcggtctggagcggacctccgttcgccgccagcaagtgggccgggctgacccgctcgcgcaatcccggttcgccggtgtggctgccgcagttccaggacggctcgttcgtccgcttcatgaaccaggacggcagctccaccccgcccggcacgccgtggggcccgatgcgcgtggtctacctgcagtacggcagcgacgcggtgacgttcttcgaccgtcacggcttcttccgcgaaccggaactgctcgatgccccgcgcccgccggacgtatccccggcgatgcgctggtatccggtcgtgacgatgatgcagatggcaatggatacttcgctgtcgatgagcgcaccaatgggtttcggccacgtctacgcgccatcgcactacatcaacgcctggctggaagtcaccggcatcgacgactggtcgcccgaagacgtggcccgcctgcagcgccacctggatgagcgccgggccgaagagctgtccaaggatggcggcgaggagaccgtggacggctga

SEQ ID NO: 513235 - DNA, 357 bp, Stenotrophomonas maltophilia
atgagcagcgcgctgccatcccagagcgagccggtgctgcccaagcgtgcagcgcactacctgtgggcggtgctgatcgcccgcatctacgaggtgttccccctcttgtgtccgctgtgtggcgggcatatgcgcatcatcgcgttcattacgcacagcgctgacatccggcacatcctggaccacatcggggcagattcagagccaccccgcatctccccggcgcgcgggccaccgctgtgggatgactgtagtgatgcgcagatggatgacggggcgcaaaccgagccagcagactgggacctggcggcgcaaccggcaccggactttgaggtcgatcagcgcatcagttggtga

SEQ ID NO: 513236 - DNA, 444 bp, Stenotrophomonas maltophilia; identical to SEQ ID NO: 127110

SEQ ID NO: 513237 - DNA, 540 bp, Stenotrophomonas maltophilia; identical to SEQ ID NO: 127111

SEQ ID NO: 513238 - DNA, 705 bp, Stenotrophomonas maltophilia; identical to SEQ ID NO: 127112

SEQ ID NO: 513239 - DNA, 969 bp, Stenotrophomonas maltophilia
atgaccattatcgccgcatattattacaacgaaggtaagcgagtccgtgaaatcaggctcgatgagcacgtcgaactaaacgagaatcgctcgggcttctgctggatcgcgcttagcgagcccaccgcagacgaactcagcgcgatccagacgacgtataacctccatcctttggcgatcgacaacgccatgcacccgctgtgcccgcccaagctcgaggtctacaacgatgagttgtacgtcgtcgcccagaccgccgagctggtcggcgaccggatcagctacggcaagatggcgatcttcaccggtcacaatcaccttatcaccgtgcggcacggcaatgccggagcgctgggcaaacttcgggagcaactcgaggcatcgccgacgcagttcggcaagggtgtcgactatgtgctgcacgcgatcttgcaccgagtggtcgaccagtatctgcccatcttcgaaatgatcgaggacgacgtcctggcgatggagcgacggtcgctgcacgctttcctcgggccagaagaggtggcgcgaatcttcgaactaaggtccgaactcacgcggttccagcgcacgctcggggctatggccgagctggtgcgaaagctcgttcgcggccactttccctgcatcagcgccgaaatgacaccatatttccacgacgtcgcggaccatgtccaccgcgtgcagtccatggtcgacggcctcctgcttgtcctgtccacggtcttcgaggccagcagccttctggaagcgcaaaggatcggtgtggtcactcgccagctcgcggcctgggcggcgatcttggcggtcccgacggcgatcgccggaatatatggcatgaacttcaagcacatgccggaactggacacgccatatggctacttcgtcgtgctcggagtgatagcggtgttctgccttctcctattcatgcgcttcaagaaggccaagtggctatga

SEQ ID NO: 513240 - DNA, 156 bp, Stenotrophomonas maltophilia
atgacctcccaggtgaccgacgttctagaagcagtccagtcattcatcgccaaaggctatgaccgcgaataccgcgtcaaggacggcaatctcgtcgatctcgaactagggtcaaccctcgatgcatgcagacggataggcgttttaaccgcatga

SEQ ID NO: 513241 - DNA, 357 bp, Stenotrophomonas maltophilia
atgagcagcgcgctgccatcccagagcgagccggtgctgcccaagcgtgcagcgcactacctgtgggcggtgctgatcgcccgcatctacgaggtgttccccctcttgtgtccgctgtgtggcgggcatatgcgcatcatcgcgttcattacgcacagcgctgacatccggcacatcctggaccacatcggggcagattcagagccaccccgcatctccccggcgcgcgggccaccgctgtgggatgactgtagtgatgcgcagatggatgacgaggcgcaaaccgagccaccagactgggacctagcggcgcaaccggcaccggactttgaggtcgatcagcgcatcagttggtga

SEQ ID NO: 513242 - DNA, 1038 bp, Stenotrophomonas maltophilia
atgcagcgagaagccgccgaccttgccggcatcggcgtccagcgagcctgcgtcaccgggcaatgtttgcagcgtgacgaccttgcggccagcgtcgcgaccggtggcgatgcggtaggtcatcgaactcatccgcagcccatccatgccgtcgtcgctacccgcgctgtcggacaggaacacggattcgtcctcgccttccagccagccgcggcgcgtcaggtgccggcacacgcgatgcgcgatggtgttggcgacctgcgtcagttgcgcagaggtgggggcacgggcgcggcgcaggcgcggcttgcgccgcgggggctcggtggtgtcctcgtacacgccgtcgagccacagcatgtggaagtgaacattcaggttcagcgcgctgccgaagcgctggatcagggtcaccgcgccgcattgcgcgctggcgtggtcgacgccgacttgatcggccaaccagccggcgatcacgcgctgcacgatgcccagcaccgggccaatggcttctggcttgctggcgaacaggaaacgcaaggggtacggaaagctcagcacccattgccgcaccggccgcgggccgaacacctcgtccaccagatgccgcgccgactcggccatgcgccgcgcgccgcagctggggcagaagccgcgcttcttgcaggaatacgccaccagcctctctgcacggcagtgctcgcacaccacgcgcaggaaaccgtgctcgagcacgccgcagcgcaggtaggtctcgaactcctcgcgcacatactcgggcagcgagcggtcttcggcctcaagacgcgcgatgaagtccgggtagtgcgcctgcaccagcgaatacagcagcgtgcgctcgggacggtgaggcgcatagcgagccgtgggcagatgcgctgccggcgacgttgcgtgcgccacggcatcctgcagctgcgacacggtcgcggcgaagcgcggcacgaaacactccggtgcagggaatggctgctcaggcttgcgcccgccccggccggttcatatcggcctttatga

SEQ ID NO: 513243 - DNA, 153 bp, Stenotrophomonas maltophilia
atgtccccgctaccggtaccgcccatggatccgatcaccccgtcgctggcccgccacagccgcgccgccaagcgtaccgtgatccgcgctcggttgcgccggtgccgcccggccggtggtggcgcctgcgcgcaggcggctgaactggcatga

SEQ ID NO: 513244 - DNA, 2133 bp, Stenotrophomonas maltophilia
atgctggtaggcacgtacaacccgtggctggtggcgatctcgctgctggtcgccgtgatggcttcatacaccgcgctggcgatggccgggcgcacggtgaccgcaccgggcaggggcgcggcctggtggtggcggctgggcggcggcttcgccatgggcctgggcatctggtcgatgcatttcatcggcatgctggctttcgacctgcccattccattgggctacgaccttcccatcaccctgctctcgcttgcgcttgccatcgcctcatcggtgttcgcgctgtggctggtctcgctgcgcaccctgccccacccgcgattggcggtcggcgccctgctgatgggcaccggcatcgccggcatgcattacgttggcatggctgcaatgcgcatgcagccgggcatcgactacgacccgggctggctgctgttctcgctgatggtggcggtggctgcctcctggaccgcgctgtacgtggcgttccggctgcgcgcccagcgcacccgcatcggtgatcgactggcggcggcgggcctgctcggcctggccatcgtcggcatgcattacaccggcatggccgctgcgcgcttcccggaaggcagcgtctgcggcgcggcggtcggcgatggcctgcagaacgagtggctggcgatgctggtggtggtgctgaccgtggcgatcctggccgtggtgctggtggtctcatggctggaccagcgcgtggaagcgcaactgctgcggctgcgcaattcgatgctgagcacctcgttgaccgacgcgcagcaggaactgacccaggccgcgctgcacgatccgctcacccgcctgcccaaccgcctgctgctgcagcggcgcatcgtgcaggcactggccgaggccgaacagggcggcaaccgcttcgcggtgatgttcatggacctggacggcttcaagcaggtcaatgatgcctatggccatcaggccggtgatgcgctgctggtggcggtggccgaacgcacccgccaactgctgcgcccgcacgatatgctggcacggctgggcggcgacgagttcgtgctggtggtgcgcatcgagcacgacgaggacctgccgaccctggcccggcgcatcctgcaggcggtgggcagcggcccgttgctgccggacaacgaactgcaggtgaccgccagcatcggcgtggcgatctgcccggaccacgccgccagcgagcgccagctgatggccttcgccgatgcggcgatgtaccaggccaaggagtccggacgcaacgccttcgtgctgttcgccgactggatgaacgacagcgccgagcagcagttccggctgctggccgacctgcgccgggccatcggcagcgagcagctgttcctgcactatcagccgaagatccgcgtggccacgcagaaggtggccggcgccgaagcgctgatccgctggcgccatccggaacacggcctgattccccccgaccgcttcatccgcctggccgagcgcagcggtgcgatcaacgagatcgggcgctgggcgctggaccaggcctgccagcagctgcggcgctggcacgacgccgggcatgaaagctggtcgatgtcggtgaacctgtcgccggtgcagttcagttcgccgcacctgctgcaggatgtgcgcgaggtgatcgagcgccatggcattgccccgcgccacctggtgctggagatcaccgaaagcaccgtcatgcgcgataccgataccagtcttcgcctgctgcaggcgctgtcggtgctgggcgtaggcatctccatcgatgacttcggcaccggctattccagcctgctgtacctgaagcggctgccagccaccgagatcaagatcgaccatgcgttcgtgcgcgacctggaacacagtgcagaggacgtggtgatcgtctcggcgatcgtggcgctgggccatgcgctggacatggacatcgtcgccgagggcgtggagaccgccgcccagcgcgcctacctggagcgcctgggctgcgactacctgcagggctacctgctgggccgcccggtcgatgcggcgcgcttcatgcagctgcacgacctgccccggccgcgggtggaactggcgcagagcccgccgccgcaatacccgccgggctga

SEQ ID NO: 513245 - DNA, 270 bp, Stenotrophomonas maltophilia; identical to SEQ ID NO: 495300

SEQ ID NO: 513246 - DNA, 780 bp, Stenotrophomonas maltophilia; identical to SEQ ID NO: 495301

SEQ ID NO: 513247 - DNA, 420 bp, Stenotrophomonas maltophilia
ttgagcctgctggcctccaccctgctggcggtcggcaagaccgcagcgccgatcggcccgcaggtcggccagcacgcggccgccgcacccagcctgttcggtgcggtgctggcgctgctggcggtgctggcgctggtgatcggcctgggctggctgctcaagcgcatgcccggcagcggcttccgcccggccgaaggcatgaagctggtggccagcctcagcgtcggcgccaaggagcgcgtggtggtggtggaggtcaacggccagcaattgctgctgggcgtcactgccggcggcatcaacaccctgcataccctgcccgaaccgttgccggcaccggcgccggtgcgcgtgccggacttcaagaacctgccgaatttcgcccagctgctgcagcaacggctgcgcaaggacccctga

SEQ ID NO: 513248 - DNA, 336 bp, Stenotrophomonas maltophilia
atgaacgatatcgacgccctcgaaccgaccccggcccagttcagcagcctgcaggccgacgaggccaacggtccggacctgaacctggacgtgatcctcgatgtgccggtgaccctgtcgctggaagtcggtcgtgcccgcctgccgatccgcaacctgctgcagctcaaccagggttcagtggtggaactggagcgcggtgccggcgaatcgctggacgtgttcgtcaacggcaccctgatcgcccacggcgaagtggtggtgatcaatgaccgcttcggcgtgcgcctgaccgacgtggtcagcccgagcgagcggatccggagactgcgttga

SEQ ID NO: 513249 - DNA, 1005 bp, Stenotrophomonas maltophilia
atgaatgatctgctgtcccaggacgagatcgatgccctgctccacggcgtggacagcggcgcggtcgagaccgatgcggaacccccgtcaggcgaagcgcgctcgtacgacttcgccagccaggaccgcatcatccgtggtcgcatgccgaccctggaaatggtccacgagcgcttcgcgcgcctgtggcggatcggcctgttcaacctgatccggcgctcggccgagctgtcggtgcgcggcatcgaactgatcaagttcaacgactacatgcactcgctgtatgtgccgaccaacctgaacctgatccgcttcaagccgctgcgcggtaccggcctgatcgtgttcgagccgaccctggtgttcgccatcgtcgacaacttcttcggcggcgacgggcgctacccgacccgcatcgagggccgcgaattcacggccaccgaaatgcgggtgatccacctgctgctgaagcagaccttcgccgacctgcgcgaagcgtgggcaccggtgatggacgtcgacttcgagtacatcaactcggagatcaacccgcacttcgccaacatcgtgacgccgcgcgaatacgtggtggtgtgccgcctgcacgtcgagctcgacggcggcggcggtgacatccacgtcaccctgccctactcgatgctggaaccgatccgcgaactgctcgacgccggcatccagagcgaccgcaacgaccgcgacgagagctggggcaagaccctgcgcgagcagctcaacatcgccgaagtcaccctgtccagcgtactggccagcaagcgcatgaccctgcgcgacctgacccagttgaaggtcggcgacatcctgccgatcgagctgagcccgcaggtgccgctgtgcgtggagaacattccggtgttcaccggcgagttcggcatcgccaacggcatgaacgccgtgaagatcaccgctacccatccgccgggcacccgcccgcgcgtacccgtcatccaggaagacccgcaatga

SEQ ID NO: 513250 - DNA, 1170 bp, Stenotrophomonas maltophilia
atgcccgccccgctcgccagcagcgccaacccggccccgcccgccaccagcaacagtgccgcgcgcgccgcgcgcagcgaaggcgcaaaggacttcagccagctgctgcagggcggtgcgccctccgcgcccgcgcctgcgggcagcgctaccacaccgacgccgtccacgcccagccagccatcgaccgccgacagcaatggccaggcaccgggcgaacgcagcgcggacgcggaagcggcaactgccgaaacgccgccgctaccgcccgttgccctgcccccggctggacccggcaccgacaaggacaagcccgccgcgaccgaggacgccccgtggccaccgatcggcctggccggcctggtgctggcgatgccgacgcctgccgatccggccgtcgctctggcgggcagcgctgcaccgtcactggccagcgacggtacggcgctatccaccactgcccccgccgcgaccccgacactgcctgcagccgcgccggcagcggcaaccgcagcccccgtggcggccgacggcaaaccggcggcgaccagcgcggaggatgccaccgcgctgccactgccggagatgatcctgcccggcaagcgcagcgagcgcggcgaaggcagtgacgtggccgccgttggcgaccgcgcagttacaccgttgctgcacgcaccggcagcggccgccgtgcaggacctgaaggcggcgctcgccaccggcaacgcgatcttcaatggcgaacccacgcccaagcccgtgctgggtgacgatggcttcgaccaggccatcggcgcacgcctgggctggctggccgaccagaagatcggccatgcccacatccgcctgagcccggacgacatggggccggtcgacgtgcgcctgcagttgaacggcgacaaggtgcatgccagcttcagcagcccgcacgtggacgtgcgccaggcactggaaagcagcctgccgcgcctgcgcgagctgctgggcgaacagggcttccagctggctcacgccgatgtcggccaccaggcgcctggtggtgacggcaatgcgtcgggacaacccggtggcggcgctatgaccggcgacggagaaccgacgccgggcgatgccagcgtgtcgtccgcgcagttgatccgccagcgcggcttgctggacgcctacgcctga

SEQ ID NO: 513251 - DNA, 468 bp, Stenotrophomonas maltophilia
atgaaccagtccaagcgcatcgatcccctgctcaagcgggcccaggaacacgaggacgcggtcgcccgcgacctggcggaacgccagcgcgtgctcgacacccatctgtcgcgcctggacgaactgcgccgctatgccgaggagtacgccaacgcccagatggcagcgaccagcccggcacagctgctgaaccgccgcgccttccttgatcgcctggacagtgcggtcgagcagcagcaggccacggtcaacggcaaccgcgaaaaagtggaggccgagcgcgcgcggctgatcctggccagccgtgacaaggcggtgctggagcagctggccgccagctaccgcgcgcaggaaaaggtggtgaccgaccgccgcgaccagcgcgagatggacgacattggcgcgcggcgcgcgcgcctggtgcaggccgaagaccaggacggcgccgagcagggaggccgcccgtga

SEQ ID NO: 513252 - DNA, 1386 bp, Stenotrophomonas maltophilia
atgagcgccgcaccgcaaacgacgccgccgccggccgactgggccgtggcccgcaacctgcgcctggcccggcgcctggacggcctgcgcgtggataccgcgcatggccgtgggctgatccgcgagggcgtgctgcgccgcgcggtcgggctcaccctggaagcggtcggctgcgaggcgccgctgggcgccagctgcaaggtggaagtggtcgatggtggctgggtcgatgccgaagtggtcggctttgccggtgagcgcacctacctgatgcccagcgccgaactgcacggcctgctgcccaacgcccgcgtggtaccgtcggcgcggcgtggcggcgtggaagtgggtgaaggcctgctcggccgcgtcatcgacagcgacggcgtgccgctggatggcaagggcccgatccgcgcagaagggcatgtcggcatggccggcgtgtcgatcaatccgttggcgcgtgaaccgatcacccagccgctggacgtgggcgtgcgcgcgatcaacgcgctgttgccgatcggccgcggccagcgtgtcggcctgttcgccggttccggcgtcggcaagtcgacgctgctgggcatgatgacccgctacaccgctgccgacgtgatcgtggtcggcctgattggtgaacgaggccgcgaagtacgcgatttcgtcgagaccacgctgggcgaggaaggcctgcgccgcgccgtggtggtggccagccccgccgaccggccacccttggcgcgcctgcacggtgcctaccgtgccaccgccatcgccgagtggttccgcgaccagggcctgaacgtgctgctgctgatggactcgctgacccgcttcgcccaggcgcagcgcgagatcggcttgtcggtcggtgaaccaccgaccacccgcggttacccgccctcggtgttcgccaagctgccggcgctggtcgaacgcgctggcaacggcgcaaagggccgcggctcgatcaccgcgttctacaccgtactgaccgaaggcgatgatccgcaggatccgatcgccgacgccgcacgcgcgatcctcgacggccacatcctgctctcgcgccgggtggccgacagcggcctgtacccggccatcgacgtcgaatcgtcggtcagccgcgtggtcacggaaatcgccgacgagccgtggcgcctgcgcatccgcaagttgaagcgactggtctcggcgtactcggccaaccgtgacctgatcgcgatcggtgcctaccagcgtggtaacgacgcggccaccgacgaagccctggaacgctggccggaaatcatggagttcctcggccaggacgttgccaaggccgcagatctcccgcacagccaggcggcgctgcagcgcctggtggaacaagagagttaa

SEQ ID NO: 513253 - DNA, 642 bp, Stenotrophomonas maltophilia
gtgagcaacgtcgtgcgctggcttgccccggacctgctggcccagcccgaaccggcgctggagcaggaggacgcgttcgaactcaccgagccggacccggaacacgaaccggagccgccgctgcagctgccgaccctggaggaaatccaggcgatccaggacagcgcggagaaggaaggattcgatcagggccatgccgaagggtacggccagggccaggcggaggtgcgtcgcctcgtcgcgcagatcgaaggcatcctcgacaacttcagccggccgctggtgcggctggagaacgaagtggtcggcgcccttggtgaactggcggtgcgcatcgccggcgcgctggtcggccgcgcctacgaggccgagccggcactgctggcgcagctggtcggcgaagcgattgacgccgtgggcggcagcacccgcgaggtggaagtgcggctgcacccggatgacatcgccgcgcttgccccgctgctgaacctgtcgccggcgcagcgcctagtaccggataccagcctcagccgtggcgacctgcgcgtgcacgccgaagccgtacgcatcgacggcaccctggaggcccgcctgcgcggtgcgctggatgcggtgatccgccagaccggggcgacggcatga

SEQ ID NO: 513254 - DNA, 1002 bp, Stenotrophomonas maltophilia
atgactgaggcacaactgaccggcgtacagcgcgcggccgtgctgctgctgtccctgggtgagctggatgcggccgaagtgctgcgccacatggaacccaaggaggtgcagaaaatcggcatcgccatggccaccatgaccgacatcacccgcgagcaggtggaacgggtgatggaccagttcggccaggagctgggctcgaagacctcactcggcgttggctcggacgactacatccgcaacatgctggtgcaggcgctgggcagcgagaaggccggcaacctgatcgaccgcatcctgctcggccgcaacaccaccggcctggacgcgctgaagtggatggacccgcgtgcggtggccgacctggtgcgcaacgagcacccgcagatcatcgccatcgtgatggcgcacctggaaaccgaccaggccgccgacgcgctgaaactgctgccggaccgtacccgcgtggacgtgctgctgcgcatcgctaccctcgacggcattccgccgaacgcactcaatgaactcaacgagatcatggagcgccagttcgccggcaaccagaacctgaagtcgtcgaacatcggtggcgtgcagtgcgcggccaacatcctgaacttcatggacagcggccaggaccaggcgatcctgggcgagatcgcccgcatcgatgcgccgttgagcaaccgcatccaggacctgatgttcgtgttcgacgatctggtcgacctggacgaccgcgagatgcagctggtgctgcgcgaggtgagcggcgagcgcctgggcctggccctgcgcggcgccgacatcaaggtgcgcgacaagatcacccgcaacatgtcgcagcgcgcggccgagatcctgctggaagacatggaagcccgcgggccggtgcgcctgtccgacgtggaaggcgcgcagcgcgagatcctggccatcgtcaagcgcatggccgatgaaggcaccgtcaccatcggcggcagcgcggaggccatgctgtga

SEQ ID NO: 513255 - DNA, 1647 bp, Stenotrophomonas maltophilia
atggcactgacgctctccaaggacagcctgaacgccgaaaaggccgggcaatggttcgaccgcctgcagagtctgcagatcacccgtcggctgggcctgatggcgatgatcgcagtggcggtggcggcaggcctgtccgtgttcttctggtcacagaagccgggcatggtcccgctgtacaccggcctggaccagaaggcgaccgctgaagcgaccgacctgctgcgcgccgcgcagattccgttcgcgctcgacccggccaccggtggcatcaccgtgccggaaaagaacctgcacgacgcccgcctgaagctggccggttccggcctgaccgacagcggcaagctgggcttcgagctgatggaacgcgacccgggctttggtgtcagccagttcgtggaaagcgcgcgctaccagcacgcgctggaaaccgagctgtcgcgcaccatcaacacgctgcgcccggtgcgcgattcgcgcgtgcacctggccattcccaagcccagcgcgttcacccgccagcgtgacgtggccagcgcctcggtcaccctggaactgcgtggcggccagcagctggaacgcagccaggtcgatgccatcgtgcacatggtcgccgccagcattccggatctcgcgccggagcgggtgaccgtggtcgaccagagtgggcgcatgctcagcatcaccgacccgaacagcgaagcggcggtcaacgcggcccagttcgagcaggtgcgccgccaggaaacctcgttcaaccagcgcatccgcgagctgctggaaccgatgaccggccccggccgcgtcaacccggaagtgagcgtggacatggatttctcggtgaccgaggaagcccgcgagctctacaacggcgagccgcagaagctgcgcagcgagcagatgagcgagaacaccaccagcacgccgggcccgcagggcgtgccgggtgcgaccagcaacagcccgccgggccagcaggccgcaccggccaccgcgcaggccccgaccgaaagcagcaagaacgcgacccgcaactacgagctggaccgcaccctgcagcacacccgccagccggccggccgcatcaagcgcgtctcggtggcggtgctggtggacaacgtgccgcgcgccggcgccaacggcaagatgagcccgcagccgctgtcggctgccgaactgacccgcgtcgaagcgctggtcaagcaggccgtcggcttcaacgccgagcgtggcgacaccgtgtcggtgatgaatgccccgttcgtgcgtgacaccacgccggtcgaaggcccgtcgtggtgggagctgccgtgggtgcacgatgccggccgcatgctgcttggtgcggtggtggtgctggcgctgctgttcggcgtgctgcgtccggcgctgcgcgcgatcaccggccagagcaggaagaacgacgaacaggcactcgagccgcataccgcggacgtgcagctggtcgatgacgatggcatgccgctgccggcgctgggcgctgaccgggccagcctgggcgggccggaagcactggccctgccggtggattcatatgaggaacgactgcggatggcgcgtgaagccgtgaagaccgactccaagcgcgtggcccaggtggtcaagggctgggtggccaatgactga

SEQ ID NO: 513256 - DNA, 366 bp, Stenotrophomonas maltophilia
atgtcccactccgtcacttcgatcctttcgcagatccgctcctatcagacccagatgggacagccggcgctcaacccgctgggcgaaacgccgcgcagcaatgccctgccgggcacggtgctggatgcgccgcaggtgcagccggccagcttcaccgaaaccctgcgtggtgcgattgccggcgtcaacgatgcgcaacagaagtccggcgccctcgccaaggccttcgaaatgggcgaccccagcgccgacctcgccaaggtgatggtcgcctcgcagcagtcccagatcgccttccgcgccaccgtggaagtccgcaaccgtctcgtccaggcttaccaggacgtgatgaacatgccgctgtaa

SEQ ID NO: 513257 - DNA, 417 bp, Stenotrophomonas maltophilia
atgcatcacctgatcctgctcgccgtcctgctctgcccggccctggccaccgcggccaactgcacactgcccgccgcgctcgaccaacgccggttcaccaacctcagcgacccgttgtacgcgccggacaaccccaacgccggacgcatggtgcagctcagctttgctggcagccagtacgtgctggacatcctcggcaccgacctccgcatcggcggcagctaccgctaccagcgcctggccccgcatatcgcggaaatccagatgaccgaggcccacccggccggccccgcccactacaccctgctgctgacgtgccagagcgaccgccagggccgtttcatctacacccagcatgacggccccatcgcaccgcgccagcgccagaattccggccgatggaccctgcagccatag

SEQ ID NO: 513258 - DNA, 1506 bp, Stenotrophomonas maltophilia
gtgagcgaatcgcgcatcctggtgctggacaacgacgccgtgcgcgcagagcgcaccgttgccctgctggaattcatggacttcaacccgcgctgggtgtccgacgcggccgacttcgacctgggccgccagcgccagaacgactggatggcggtgatcgtcggcagcctggacgacagcgccgccagcactgcgctgtaccactggctgggcggcagcagcctgccgccgccggtgctgctggccgatggtgatgctgcagcgtttgcccagcagcacgggctgcacgaggccaacatctggccactggaaacgccgctgcgccacgcgcagatggaagccctgctgcgccgtgccagcctcaagcgcctggatgccgagcaccaggccggcgccgcgcaggatcaaggcccgaccggcaacggcccggcggtcaccgcgctgcgcaccatgatcgagcaggtggccgcgttcgacaccaccgtgctggtgctgggcgaatccggcaccggcaaggaagtggtatcgcgcgccatccaccagcgctcgccgcgccgtgatggcccgttcgtggcgatcaactgtggcgccattccggccgacctgctggaaagcgaactgttcggccacgagaagggcgccttcaccggcgcactgaccgcgcgcaagggccgatttgaaatggccgagggcggcaccctgctgctcgacgaaatcggcgacatgagcctgccgatgcaggtgaagctgctgcgcgtgctgcaggaacgcagtttcgagcgcgttggcggcaaccagaccatccgctgcaacgtgcgcgtggtggccgcgacccaccgcgacctggagacccgcatcgccgagggcaagttccgcgaggacctgttctaccgcctcaacgtgttcccgatcgacgtgcccgcgctgcgcgaacggcgcgaagacctgccggcgctggtggaaaccatcgccgcgcagctggcccgcaccggccgtggcgaagtgcgcttcaccccggaagcgctgcaggcgctggccggctacgagtggccgggcaacgtgcgcgagctgaccaacctggtcgagcgcctggccgtgctgcatccgggtggctcggtgcgcgtgcaggacctgccggctcgctatcgtggcgatgccacgctggcagcggtggccgcagcggcaccggcagcgccgattgccagcgaagaacgcctggacctgcgcagcttctcgttccataccccgggcagcggcggccagccggcgctggagcacggcatcgccgtcaatcgcacagccgccccggcggcactgcccgacgacggtctggacctgcgcaaccacatggccaacatcgaactgggcctgatcaacgaagcactggaacgcacccaaggcgtggtcgcccacgccgcccagctgctcggcctgcgccgcaccaccctggtggaaaagctgcgcaagtacggcatcgagcgcgagcaggccgaactggccggctga

SEQ ID NO: 513259 - DNA, 378 bp, Stenotrophomonas maltophilia
atgaacaagctcacggtcctgctggtcgatgaccacgagggcttcatcaacgcggcgatgcgccatttccgcaagatcgactggctgcagatcgtcggcagtgccggcaacggcctggaagcgatcgagcgctcggaaacgctgcgcccgcaggtggtgctgatggacctggcgatgccggaaatgggcggcctgcaggcgacccgcctgatcaagtcgcaggacgatgcaccgtacatcgtgatcgccagccacttcgacgacgccgagcaccgcgaacacgcgctgcgcgccggcgccgacaactttgtcagcaagctgtcctacatccaggaagtcatgccgatcctggaaggcctcagggaggatcgatcgtga

SEQ ID NO: 513260 - DNA, 1410 bp, Stenotrophomonas maltophilia
atgaaggctgcactctcgacccagctgggccagcaactccacctcaccccgcaactgctgcagtcgatccggctgctgcagctcgatggcctgcacctggagcaggaaatccagcgcctgctggactccaacccgctgctggagatcgaggaggccgaagcgcccgctgctgaagccaccgaagcgagtgccaccaccctcgacaccgccgccttcgacgagctgcccgagccgtcgatgtgggatgtggccggtgccaattggcaggacggtgatgacgaccgcatggcacgcatcgccgctggcgagtcgaccgacccgcagctgcgcgtgctgcagcgcctggcgctggacatggacgaccatcagctggcggtggccgcgttctggctggaccactgcgatgaagccggctacctgcaggcgccgctggcccagctgcagctgctggccagtgcccagttcgacatcaccgccgacggcgtggaagccatccgccagcagctgctgcatggcgaacccgccggcatggccgcgcaggacctgcgcgaaggcctgcaggcgcagctgcgcagcctgcatggcgtggtgccggcccgccacctggccgcacgcattctcgatggcgcgctcgacgcgctcgcggcccacgactaccccgccctcgcccgccagcacgacgccgagatcgacgacgtgcgcgaggcggtgcgcctgatcctctcgctgcagccgcgcccgggcgacagcctgctgcccgaacgcaacgccgtggtggtgccggacgtggtcgcctggcacgctgatgggcagtggaaggtcgcactgaacccggccaccagccgccgcgtgtcgatcaacagccagtacgaacaggccctggccgagaccagcgacgccgccccggcactgcgcgaaatgctgcaggaggcgcgctggttcagccgcggcctgtcgatgcgctacgacaccctgctgcgcaccgcgcgggtgatcgtcgagcgccaggccgccttcctggtccgtggcgaagaggccatggcgccgttgaccctgaaggaagtggccgaggagatcggcatgcacgagtccaccgtctcgcgcatcaccaccggcaagttcctgcagaccccgcgcggcaccttcgaactgaagcacttcttcgccgtgcgcctggaaggcgccagcgtctccggccaggcggtgaaggccatggtccgccgcctgatcgacgccgaaccggccggccgcccgctggccgatgaggccattgccggcctgctgtcacgccagggggtgaacattgcccgccgaaccgtcgcaaaataccgagaacaactggatatcgccccggcccgcgaacggcgccggctcagcgccaggcaaccccagctggcccgggtgggctga

SEQ ID NO: 513261 - DNA, 639 bp, Stenotrophomonas maltophilia
gtgcctgtgcgagttctcatcgtcgacgatcacacccttgtccgcgccggcctggcgcggctgctgcaggggtttgccgacgtgcagctcgtggccgaggccagcaacgccgaacaggcactgcaactgtccctgcagcacgcaccggatgtggtgctgatggacctctcgctgccgggccgcaccggcctggaagcgctcagcgacatccgcctgcgtgcccccggtacccgggtggtgatgatgaccatgcacgacgatgccgcccacgtgcgcgatgcactggatcgtggcgcggtcgggttcgtggtgaaggacgccgcaccgcaggaactggaactggcactgcgggccgcgcacgccggccaggtgttcctgagcccgcagatctcggccaagatgctggcgccgatgctgggccgcgagaaacccaccggcatcgccgcactctcaccacggcagcgtgagatcctgcgccgcatcggcaagggcgagagcaacaaggaaatcgccgccgatctcggcatcagcgtcaagacggtggagacccaccgcgcacggatgatggaatcgctgggctgccgccgcgccaatgacctgctgctgctggccgcgcgccatcagcacgagctcgagtaa

SEQ ID NO: 513262 - DNA, 579 bp, Stenotrophomonas maltophilia
atgacctcgctgccgaccacctcgctgcatcacccggccgaaagcgagctgttcgacgagacgctcagctgcgaactggccctgccggccgagttccaggcgggcagcgcggccggccgcaccagcagcgccgaaggcctgctgcgcagcctggcactggtcgaggacagccgcgtcgacgagcacgacgaacgcaacgaagccagcctgcagctgcagcgcctggaagccaagctggacctggcgatggtgctgctcggccggctggtgcgccagcagggccaggagctgaccctgcgcccggtgcgctggtcgcgccgtggcatccgcctgcagctgggcccgcgcagtggcgcaagccccggccaggccggcgtggtgcgcctgcagcccagcgattggctgcccgaccacatcgacctgccggtggaggtcgtcgcagaagccgccgacggtagcggcgggcacttcctgtggctgcgcttccagcgtttgggcgatggcctggagatggcgatggagcggcacctgttccgcctgcaccgccgccaggtggccgaggcacgccgcgcacgctga

SEQ ID NO: 513263 - DNA, 294 bp, Stenotrophomonas maltophilia
atgagcctgcaggaactgcatgcgcagctggatgccttcgagagagccttgggcgaagaatccctcgaccaggccgacagcctgctcgacggccacgacagcaccctgcacgccctgctcagccagccgctgaccgctgcggaccacgcgccgctgagcgccctgttcgagcgccagcagagtctgctcggcctgctgcgccagcgccgtgatgccgtggccgcactgatgaacgacggccagcgctcccttcgcgcggcgcatgcctatctgcaggcagaatcgctggcatga

SEQ ID NO: 513264 - DNA, 417 bp, Stenotrophomonas maltophilia
atgtacggttccagccgtcaatatgccgagcagtaccgccaggtgggggtgaccagtgcggtcgccgatgccgatccacacaagctggtggcgatgctgctggccggcgcgctggagcgcgtgcgccgcgccctggccagccttgaacgcggtgaccaggccggcaagggcaaggcgatcggcgaagtctgcgcgatcgtcggccacctcaacggctcgctggaccatgaggccggtggcgagatcgccggaaatctgtcggcgctgtacgactacgtgctgcagcgcctgaccgaggccaacctgcacaacgaccgtgccgcgctggatgaatcgctgcagctgctgggcgagatcgacagcgcctggaacgcgatcccgcacgaacagcgccgcccggccgcggtggcgccatga

SEQ ID NO: 513265 - DNA, 1416 bp, Stenotrophomonas maltophilia
gtggcagactttggatacggtggcattggctcgggactggatatttccagcatcgtcaaccagctggtcgcagctgaccgcaagcccgccgacaatgcgctgaacctgcagcagtccaaggccaagatgcagttgtcgtcgatcggcaccatcacctctgctttcgacaagctgaagacggcgctgaccgcactgaaggccaccacggcgttcgacacgcgcacggtgaccgccagcaagggcggcgacaagggcaccgacgagatcctgacggcgtcggtcgcgctgtatgacgttggcaccaccaaggctgcggcctccaacggcacgcacgtggtcaatgtcacctcgctggcgacagcgcacaaactgatcgccgatacctcggtacccaagaccgacacgtttgctgccggaaccttgacgctgaccgttggcgtgggcgacaaggccaagaccatgaacgtggaggtggaggacggcgacacgctgaccaccatccgcaacaagatcgatgcggccggccgcaaggaaggcgtgcaggccaccctgatcagctccggcgacaaccagtacctgtcgatcgcccaggagaagaccggtgccgccaacgcgatcaagctcgaatacgccggcagcgacgccaaactgggcggcctggtcaacagcctcaagcagaacaccgccgccgccgacgccgagctgaccatcgatggtgtgaaggtcgtcagcgcgagcaacaccgtggccgatgcggttccgggcctgaccctgaacctgaagatgccgggcaccagcacggtgaccatcagcacggacactgcggcagccaccaaggtgatgcaggagttcgtcaccgcctacaactctgcactggcggcgatcaacaccgaaaccaagtacgacgccaagaccaaggaagcctccacgctgaccggcgatgcgcagatgcgcggcgccaccagccagctgcgctcggtgatgtcgagcgtgctcaaggacctggccggtgacaagctcgatgccaaggcgatcggcctggatacccgtggctatcccaatgccgacggcacgctgatcctggacaccaccaagttcgccgccgcactggccagccagccggagaagatgcgccaggcgatcaccggtgataccggcggtgccggcaagctgtacacgctggtcgacagctatgtcagcacgacggtcggcaaggaaggcgccttcgttgcccgcaccaagggcctgaacaccacgctggacaacatcgacaagcgccgcaaggacctcgacacgcgcatgaagagcgtggaagagcgctacaagaagcagttcctggcgctggacagcctgatgggcaagctgcagcagagcaacaccgcgctgcagcagcagctggcccagttgaaccgctga

SEQ ID NO: 513266 - DNA, 1179 bp, Stenotrophomonas maltophilia
atggcacaagtcatcaacaccaatacgatgtccctgaatgctcagcgcaacctgagcaccagcggcagctcgctggctaccaccatccagcgcctgtcctccggttcgcgcatcaacagcgccaaggacgacgccgccggcctggcgatctccgagcgcttcggcacgcagatccgcggtaccgacgtcgccatccgcaatgccaacgacggtatctcgctggcccaggtcgccgaaggttcgctgaccgaaatcggcaacaacctgcagcgcgtccgcgagctgtcggtgcaggcctccaacgccaccaactcggccagcgaccgcaaggcgctgcaggccgaagtgacccagctggtctcggaaatcgaccgcgtcgccaagcagtcggacttcaacggcaccaagctgctggacggcaccttctccagccagctgttccaggtcggcgccaatgccggccaggccatcgccatcgacaagaccatcgatgccaaggccggctcgctgggcacctcgaccttcgccaccggcgcgaccgctgccctggctgccagcaccgacggcgcccgtttctccggcaccgtgatgggcgtggacatcggcacggttgaagtgaaggccggcgccaccacggccgatgcctccaaggccgtcgccaccgccatcaacgccaagatcggcgaggccggcatctacgccgaagccaatgccgacggcaccctgaagctgagctcggtgaaggaaggcaaggctgtcgccgccgccgatatcgccctgatgcgcagcgactacgacgcgaccgccaagacctggggcaccgcggcagctgcgggcgcctacactgccggcaccgatacctcggccaacgtgcagaagctggacgtgagcaccgtgctcggcgcccagcaggcgctggaagtggtcgacaaggccctgggtgcgatcaacagcacccgcgccgacctcggtgcgatccagaaccgcttcacctcggtcgtggccaacctgcagacctcgtcggaaaacctgtcggcatcgcgcagccgcatcaaggacaccgacttcgccaaggaaaccgccgaactgacccgcacccagatcctgcagcaggccggtacggccatgctggcccaggccaaccaggtgccgcagggcgtgctcagcctgctgcgctga

SEQ ID NO: 513267 - DNA, 1185 bp, Stenotrophomonas maltophilia
atggcacaagtcatcaacaccaatacgatgtcgttgaatgctcagcgtaacctgagcaccagcggcagctcgctggctaccaccatccagcgcctgtcctccggttcgcgcatcaacagcgccaaggacgacgccgccggcctggcgatctccgagcgcttcggcacgcagatccgcggtaccgacgtcgccatccgcaatgccaacgacggtatctcgctggcccaggtcgccgaaggttcgctgaccgaaatcggcaacaacctgcagcgcgtccgcgagctgtcggtgcaggcctccaacgccaccaactcggccagcgaccgcaaggcgctgcaggccgaagtgacccagctggtctcggaaatcgaccgcgtcgccaagcagtcggacttcaacggcaccaagctgctggacggttcgttctccagccagctgttccaggtcggtgccaacgccggccaggccatcgccatcgacaagaccatcgatgccaaggccaacgccctgggcggcgccaagttcgacaccaacgcgctggccctggccgacccgggcaccaacgctgatttcagcaccagcggcctgcagatcaatggcgttgccattgccgatgtctcggtcaagcagggcgccgacgccgctgccaccggcaaggcctcgcgtgaagcactggtgaccgcgatcaacgccaagatcggcgagaccggcgtgttcgcggaagtgaacggcaccgctggcgtgaccctgacctcggtcaaggacagcgtcaacgccgatggctcgttcaaggccatcaccgcgaccccgggcacctggaccggcgccaccgcgccgaccttcaccgcctcgacggccgcgccggccgccaagtacgccagcgacctggacgtcagcaccgtgaagggtgcccagcaggcgatggaaatcgtcgacaaggccctgggtgcgatcaacagcacccgcgccgacctcggtgcgatccagaaccgcttcacctcggtcgtggccaacctgcagacctcgtcggaaaacctgtcggcatcgcgcagccgcatcaaggacaccgacttcgccaaggaaaccgccgagctgacccgcacccagatcctgcagcaggccggtacggccatgctggcccaggccaaccaggtgccgcagggcgtgctcagcctgctgcgctga

SEQ ID NO: 513268 - DNA, 762 bp, Stenotrophomonas maltophilia
atggagatcacgcccgaacaattcgctaccattgaacactgcctgcccaggcagcgtggcaacgtcagcctgagcaatctgcaggtggtcaatgcgatcctctatgtggccgaacatggttgcaagtggcgcggactgcccaaacgcttcggcaactggcacacgatttacacgcgcatgaatcgctggaccaaagctggcgtcctggatcgcatgttcgaggagttgcagcgtgcgcaagtcgtgcgtatcaggatcgaagccgtctcgctggactccacaagcatcaaggtccatcccgacggcacaggggcactaaaaaaaagtccgcagtccatcggaaagtcccgaggcggatggaacaccaagattcatatggttgccgcggatgctcgaacggccgtgacgttttgcctctcgcctgggcaggcgcacgacgcacccgaaggccggcgcctgctcagcagtcttgggccgaccagcagaccggtgcatttgttgatggaccgtgcctacgaaggcaacgagacacggcagctggcactggatctgggtttcattccggtggtgccaccaatgaagacgcggatcgaaccgtgggactacgaccgcgagatgtacaagcgccgcaatgaggtggagcggttgttccgtcgactcaaaggctatcgccgtatcttctcgcggttcgagaaactcgacctcatgttcctgggcttcatcagcttcgtgctcgtcgctgatggactgaggatgtgttaa

SEQ ID NO: 513269 - DNA, 846 bp, Stenotrophomonas maltophilia
atgaagcagtcggacccagtaacccggggtgcaacggccgaactgattgacgagctgagctgcggcatcacgcttagtcccgaaccgacgcgcgtggcaacggaagtggcgcatttcctccatgcgaatgttgggcacagcgttcatccattggaacacttggtctggaccaaggtcccgtacatcctgggtgtccagcatccagtggccacagccttcccagaggatgagcgactcgtcattcagaaggcgttcttcgaccacctctgggaggtttctttatcgacgatggttgagaccatcggggacgcttggccgcccgcctcgccattcgtcgacattgccgatcggctgaatcgtgacaacgcggcgcacgctccgtcgatgaagagcttcgcgcaggtctatcgcgacgagattaatggtgtcttggaactcgcagctccgatcgccgccgaggtgctgcacgacatggccgtgaagtcgctcggcctcggcatccaaccttcagcagatgagcgggaaggaatcacgaggcagtgtctcggcttgctacgggcagcagtccggaagccagtcggtcggcgtgctctgcgcacgctgcaagttggtgctctgttgcatgcggcgctacgctggaatcgcacgcagaagctgaatgccaacgacatattcgactttcatcatgccggcgctgcgttaggctactgcgatgtccttttgacggacgggcctatgcacacgcttctgacgcagcggcacttgagcatcgaacgcgatttcccgtgccgggtcatgtcttccgttgaagaggcagccacttgggttcggcatcgcatcgcatga

SEQ ID NO: 513270 - DNA, 3312 bp, Stenotrophomonas maltophilia; identical to SEQ ID NO: 499901

SEQ ID NO: 513271 - DNA, 927 bp, Stenotrophomonas maltophilia
atgctggttaaggtgaacgacatgtggccacgctctgtggagattgcccattcgctttacactgaaggattgattgagctcgaggaaaaaagggcgcggccttggggtggggctgttcttggaaagtttgtaaatgaaaacaagcgagccataacaacgggtggtgttgaggagatattaactgctatcgctagttttgacgatctttgtgggcgccacggtgaagattggagggcgaggagtcttaaaaagctacaggcgatttttgattatgggaagtttgttcgggcgtcggggggggcatggggggcatacgaactttgctcaagggcgaaatacggggtttgcccgtactgtcagcagtcactttcgctaacagtggttcgcgataacaatctcaagtgcttccgtccaacgttagatcactatttttcgaagtcggattacccattccttgctctttctctaaataatttggtccctagttgctatgcctgtaatagctcgcttaaggggtcggctaatttttataggaataggcataagcacccgtatcatgatgaagagtggttaactttctctatggatatggatgcttattttcgcgggcgatcagagggttcaggtgtttggaaaattagtatttcatacgacggcagggataagtgccaggtcaacaccatgaaaacttttgcgattaaggagcgttatgcaaagcttgagtggatgtttgagagatttgctgagcgagcctgtgattattatttgaacggtggcggtcggtatcgtgagctgttcaataatactgactatgacgctgttgctgttgttcgccttgattttgatgaggcgaactataaaggggaacttctcggtaagatgaagagggatgtctgtatgaaaatcagggcttcgattggggtgtaa

SEQ ID NO: 513272 - DNA, 1017 bp, Stenotrophomonas maltophilia
ttgtggctttcgtgtgcttccgcggccacgccggcaaccttccccgggtttccgggcatcgatttctacctcaaggacgaagccgcgcaccccaccggcagcctcaagcaccggctcgcgcgctcgctgttcctctacgcgctctgcaacggccggctgatgccgggccaggccgtggtcgatgcgtcctccggcagcacggcgatttccgaagcgtggttcgcgcgcctgctcggcctgcgcttcaccgcggtgatgcccgacaccaccgcgcccggcaagatcgaggcggtgctcgcgctcggcggccattgcgacctcaccccgcccggcaagtgcacgcaggaacgcgcgcgagagatcgccgcggatggcgcctgcttcctcgaccagttcggcctggccgaacgcgccaccgactggcgcggcaacaacaacatcgccgaatcgatcatcggccagctggcgcgcgaaccgcatcccgatccggcgtggatcgtctgcggcgtcggcaccggcggcacctcggccaccatcggccgctacctccgctaccgcggcatgccgacgcggctgtgcgtggccgaacccgcgggcatggtctatgcgcgcgcctggcccacccgcgaccgcgacgcgcgcgtggactgcctgagcctgatcgaaggcatcggccgccagaacgtcgaaccgagcttccagttcggcgtggtggacgaggtgatcgaagtcgatgactgcgcctcgatcgccgggatgctggtgctcgagtcgctgctcggcttccgttacggcggctcttccggcaccaacctcgtcgcctgcctgcagctcgcatcgcgcatgaaggctgccggcgaacagggcagcatcgtgaccctgctctgtgatcgcggcgcgcgttaccgcgaaacgctctacagcgaaagctggcgcgcgcagaagtgcatcgaacccggggcatggcgcaaggcgctggaaaacacgctggaaaccggcgtattccagcttgcgtga

SEQ ID NO: 513273 - DNA, 876 bp, Stenotrophomonas maltophilia
atgcccgtcaccttcaccaaggcccaggccagcaagctgctcaacgtctccgagatgaagctctacgaagagagccgcatcgttccgcttcgcaagttctccgcgagccagctggatcgccgcatcgaacgcacccgcgcattgcgcgacaaggcgcgcgaccagctgcagcgccagcgcgtggcccagcgcgcaaagaccggcagcaagcgcggtgcatccggtgacgccaaccagcagcgtagcaaggacaaggccgcactgatcgcggacatcctcaagcgcttcgaaggccagctgaaggtcgcgcgcaagaacgagaaggccggcatcgtgccgaagggcgcaccgcagcgtcgcagcacccgcaaggcggcgatctccaaggcgcaggcgccggacaaggatttcaccgcatcgcggatgcgcgcgcgcaaccgcatggacgaggaagccggcagtgcgatgaaggcacgcaaggccgcccgcaaggcgacggctgccgatggcgcgacccgggaggcggctacgaaaaaggccgttgccaagaaggccgccacgaaaaaggccgcggtgaagaaggccgttgcgaagtccgccacgaagaagatggccgcgaagaaggccgcgaagaaggcggtggccaagcggccgtcgaacacgccggtgggcggcaagaccggcggcaagcgcaccgccaacctgcgcgcgctcaacgatgccggaagcggcaagctgcacgaaggcttctccgacgtgcgcgcgcagaacatcgcgctggagcagaagctcgaagccggccgcaagacgccgatccagggccatgtcagctcgcgtggccggcgcaaccaggtcaagcgcgacaaccgcggttga

SEQ ID NO: 513274 - DNA, 156 bp, Stenotrophomonas maltophilia
atggccgcgtcgcaccacatcgacgaactcgatccggcctgtgcggagtatccgatcctgcgcgagacgcaaacggccgagctcgatgcggtgatgtccaacagcttcggcttcggtggcaccaacgccacgctggtgttcggccgccatcgctga

SEQ ID NO: 513275 - DNA, 480 bp, Stenotrophomonas maltophilia
atgcgccgcatcctcatcctgctcgccacccacctgctcaccctcggcctgggcttcggcctgggcgtctatctcctgccgatcctgatcgcccccgatgacccgccggttgcgcaggtgcaggcggccatgaaagacgccccctaccgcaccacctttcgccgcgacctcaagggcagtgatgcggtgcattgggcggaaggcaacgtcagcgtcagcccgcgccaggtcgcgttcgacggcaagatgggtccgggtccggattacaaggtgtacctggtccgtgacttcgtcgacaacaaggccgatttcctgaagatcaaggcacaggcccagcgcatcggcgaggtgaagaccttcaaccgtttcctggtggacgtgcctgaaagcgtcaacgtggacgattacaccaccgtagtggtgtggtgcgaacggttcgagcagttcatttccgccgggcagtaccgcacgccgggctga

SEQ ID NO: 513276 - DNA, 201 bp, Stenotrophomonas maltophilia
atgagctgggcgcaacggctcaagcgggtcttttccatcgacgtcaccacctgcgcccactgcggcggcgcggtgcggatcgtcgccagcatcgaagacccaaaggccattcgcgccatcctcgcccacttcgagaaacaccgcgcgctggagcaagcgcactaccggcccgcagcgcgcgccccgccgcccgccgcgtga

SEQ ID NO: 513277 - DNA, 201 bp, Stenotrophomonas maltophilia
atgagctgggcgcaacggctcaagcgggtcttttccatcgacatcaccacctgcgcccactgcggcggcgcggtacggatcgtcgccagcatcgaggaacccaccgccatccgcgccatcctcgcccacttcgagaaacacggcgcgctggagcaagcgcactaccggcccgcagcgcgcgccccgccgccggccgcgtga

SEQ ID NO: 513278 - DNA, 633 bp, Stenotrophomonas maltophilia
atggcaggcaagagccggaaggacaggatcgcgcaggagatcggcctgttcatgcagcagtacgcgcgcaaggcgcagcgccatgcagaaccctgcgaccggccgtacgaccggggctggaagcgcggctcaagcgcttgccgccctaagaagtgggtaggctgctttccgcagagcatgacgaggatgaccagccccgttgcatgggccaggcgcgccattgtcgtgacgttctgtatcgcgctatgcgcctgcggtatggtgatggacagttcgttcgacaccctgcaggaggcgcttgactccgacagggtgaacaaggggtggattcccggctgggtgccgcaagcggcgaccgatctgcgggaggtacatgacctcgactcgaacaccagcgcgctggccttcaccaaaccccctgcggcatcactgcagctgccggcggattgccaggcaacgacattcagtagcagcgatcctgttgcgttcgatcgatactggtggccgggcgacgggacgctcaagtcgtcgtaccgcgtctttcgctgcgcgcccgaatccggaaaatccgtcttcgtcgccgtcaacacggccgaagaccacgtgcttttctggcgaacctacgcgcgctga

SEQ ID NO: 513279 - DNA, 795 bp, Stenotrophomonas maltophilia
atggctcgcatttcgctccccggctttgacctggacccggacgagaccgaccgcccggcggttgccagccgcctgcaggtggccgagcacgacgcagagattcccgtgcatgaacaccgcaagggccagctcattcttgcgctgcatggcgcggtgacctgcgaagtggccaatgcgttgtggatcgttccgccccagtgtggcgtctggatcccgggcggcatgccgcacagcaatcgcgccaccgccaacgcgcgcctgtgctacctgttcgtcgagcccggcgtcgtcgacctgccggcgcagtgcgtgacgctggcgatctcgccgatgctgcgcgagatgatcctgcacctggccgacgcgccgctggactacccgcatggcagccacaccgaccggttggcgcgggtgttgctggacgagctggtacagatgccggccgagcatctgtcgttgccggtcagccatcacccgaaggtgcgtgcgctggcggcggcgctgtcggcggatccggcagatcgcagcaccatcagccagtgggcggtgcgcctggccctgggcgagcgcacattgacccggctcatcgaacgggaaacgggcttgtccttcgggcgctggcggcagcagctgcacctgctcatcgccattcgggaacttgccacgggcgcaccggtacaacgcgtttccgagacgctgggctatgagtcggtgacggccttcatcacgatgttcaagaaggcgcttggcctttccccggcgcggtacttcgcggtgcgcttgcgtgggcggtag

SEQ ID NO: 513280 - DNA, 342 bp, Stenotrophomonas maltophilia
atgcggtgcattcggatactagccatcctctcgctcgttctgggccagctggggtgccgggatgaggttgagagttcaacgtaccccatgggtcagacgggaaagagttgcactgcctacaaaggctttgatcgccagcctcccgaagtggttgttacggaactggccagacgggggttggacagtcgcaggttgatccataaaacagtttgcggctcgatcaccagctgggagatccttcccgcaggggcgtcaatcaatcggatacctcccccagatacctacgtgaacgtctggctgagggaagacggctctgtttccgtcagtacggacctcccttga

SEQ ID NO: 513281 - DNA, 627 bp, Stenotrophomonas maltophilia
atggatgccaccctccgcgcgtcgtggtcccagcgaatgctggcgtggctgaagaaggaggccgcgccgctgctgatgctgctgggcctgttcttcgttgcacgcgacaccctggccaaccattacgtcgtgccgagtggttcaatgcagcccgccttgcagccgggtgaccgcgtcgttgtcgatatgcgcgcgtacggcctgcgcctgcctttcagcgggctgaagctgatgggcgccaccgtgccgcaacgcggcgaggtggtggtgttcgcttcgccggccgatggcgtgcgcatgatcaagcgcgtggtggccgtggccggcgaccgcgtgcgtctgcaggatgggcgcctgagcgtcaatggacgccccctccagatgacctgtgcgagcggcgtggaacggtttggcaagcggcacgcctggctcgacctgacgcatggcggaggcccggacattgccgatgtgcaggtaccctccggcaaggtactggtgctgggtgatcaccgtggcaacagcctggacggccgcttcttcggatgggtcgatgcggaccggatttatggccgcgcgatggcggtgtactaccgccggggtgagggcgtggtctggcagcgcctgtag

SEQ ID NO: 513282 - DNA, 453 bp, Stenotrophomonas maltophilia
gtgggcataccgaagggaatcgcgctggccgcaactgtcctgcttgtggctcttctggcttgcctgccggcgcacgaggagagtggcggcatcgcgcccaacggcctggggtgcccgcgtttcagtgcgtcccgtgcgttgccagtgacggtggaggcgctgcgtgccgatcccatgcgttatcacggcagactggtgcgcgtacggggtgcctacgttgagagcttcgaaatgtctgcgctgcacccggggccaccggtgcaggatccatgggcggccgacggcgtgtgggtgaatggaattcccgtcacggcgctgccgtcggagcaggcggttgaactcaccggaatcgtatcggcgggccaacccgcgttcccttacggcaaggggcaccttgggcaatggcctgcggagctctgcgtgtcttcgatcctgcccttggcggcgccttga

SEQ ID NO: 513283 - DNA, 1413 bp, Stenotrophomonas maltophilia
atggacgcacagacgattttcagcatgctcgcggcagccgccgccggcgccgccgttgcatgggtaatcagcagcaggcgccgcccgcccaccaccgcatcggcagtcgtcaatcctgaggcaggcacgtccgaatcaacccgccccactggagcgactgggctgccgttgccagcgccaatggcatcctccttgatcgttcagaacctcgccggcgagaacgcccttgcggtgacggaggttccgacggacttgttcgaaaaggtgtcgggaaagggccgcaaaccgcccaaggccgtgggtcggctgaacgcgttgctccaagcagcccccactgccgcattggcagcccaaggcgtgcccgagaacgtgttcgaagtggcgatcaacggtcccctgctgaacgccaaagacgcagcgggcaatgtcatcgaaggaacctatcgggcgatgacaaacggcggaagcggtggcatcaaggagcacgggctgctgaccaagcccgagaacctgagcaacgccatgaacgcagccgcggtctggcaggttgcctcagttgtggttgcccaaaagcacctggctgacatcagcgagaagctggatgggatcgtgaccacgatcaatcgcgtggaggggaaactggacgctcagcgtcgcggcgccttaatgggggcaatggacacgctcaaagaggtttccgtgcccattcttcaaggcgagcacaccactcacaatcggcagacgctcgaagatcagtatcagaagatgatggataaaaagcacgagatccatcagcttctcagagaccgcatcgatgccctatccgaccttcaggacacccaaacgtttggtgcctcgggatttccagacaagatccgagaggaaattggcaagatcgaaaccttgttccaggagactttgctctgctcacgagtgcgattccaagcgtggtcccttcttaccgttttgcaaggagagccactgctgaaaaagcagcgctatcggaccatccaacacgatttcgatcagatcttttctccggatggactgcgctcggtgttcgaacagaatgtcaccgatctgatcctgcgcgttgattccaagatggttctcaagtcaacgcttgctaaccaccgaactgagctgacaaaagagctgcgctcgaccctgtccgcacttgatcaagacattcgggcagagcgctctatcattgctcatggagaagcgctcttgagcgacgccacacaacccacccgagtcctcgtcagaaccaagggcaatcaggtgattgaattcaagcatcttcccgccaacgtcacacccgagctgctggagcacgacatgcagccgacggtgttcccggcacatctactccaggcagtctccgaaccagcattggctcgaaggcattga

SEQ ID NO: 513284 - DNA, 924 bp, Stenotrophomonas maltophilia
atgtccaagttcgccataccacctactcccatatttggcctcgttgacggaaacaatttctacgccagttgcgagcgggttttcaacccgtcgctgcgcggccagccggtgtgcatgttgtctaacaacgacggatgcgcgatcgcccgcagcaaggagtgcaagaacctgggcgtgaagattggccagcccatccacgaagtgccgtctcacatccgccgacagcttcgaatcttctcggcgaacttcggcctctacggggacctgtcaagccgaggcgtgtcggtgctgcgggagtggttcccgcgcgtggaggtctactccattgacgaatcgttcgtgaccttcgacggcgtgccggcggagcaatgcgaggcgatggcccgccaggcccgtgcccaaatcctccagtgggtgggcattccgtgttgggtgggcatcggtcccacgaagaccttggccaagctggccaacaagctggccaagaagacaccacacggggtggtcacggctctgcccggttcgcccgagctggaaacctatccggtcgaggacgtgtggggcgtggggcgcaagctcacggccaagctgggcgctgaaggcatcttcaccgcggcagacctggcccgtgccgatcccgacaaggccatgtggaagaccggctaccgctacaagaaagccggggtggggttgctcgacctcacccacgacgacgtccaccaaggcgatctgttcgccggcatagatccccgatcgcaagcgctcatgaaggtgatggaccaagccaacgctaagttcggccgaggcaccatgggcatggcgtcctcggcctggcgaccaaagggaccggcgctggccaagccggtgtgggcgttgaaccagaaaaacttgtcgccggcttatacgaccggtgagatcagctga

SEQ ID NO: 513285 - DNA, 507 bp, Stenotrophomonas maltophilia
atggccatgcccgtctccgaccacctcgccatccctctgtttcgagcatttgccctgctcgaataccagctcaagcgccgccaggcatttctgagggcggatcggcatggcaatgcaatggtggactggtccgaagtgaaggcagcagtggacggttttccagccgctgacttcgtcttgcagctcgacgccttcacccgacagaaggtgctcgagagggcacgtgagcgaccaagagttcaagtggtcgtcaatgcggggggccggcggcaggcaaccttcgaaccacgcccactgcagccaccgaacgaagctcgatccgacgctcgcgccttagtggaagcggccaagcgcgtgcgcaacaacctattccacggcggcaaagaagatccgggcgagcaacctttcgacggcgacgacgatgagtggggcgacgccgcactcgacgtcgcacggacgctgctcacgctcgtggaccgaggagcgttcgggccacccgatccctaa

SEQ ID NO: 513286 - DNA, 549 bp, Stenotrophomonas maltophilia
gtgtcaaagcacctggaacgccaccacccgccggatgagctccgctacgctcacgctctggcgctgcgcctcgcggcggacgcggtcgtgcaggtctcgggaagcccggatgggcggcaagcggtcgtccctagggccggcgagtggagagtgcaacagctggggatgcgccaggtaggcggtgagccattggcgcacgacgcccgtggctacacgccggtccacgtcgccctgctcaccgccgacacaccgaccgttcgcgcgttgctggacaacggtgctgatccgttggtgaccacgaagctggcccaggcccggaacatgggcgccaagactctggttgcatatcgccacggtcgggcgcacgcgcagccaccgggcagccgagagcgtgacgccgagttcgccgtgtgcaaagcagtggaccgcctgcgggatgagcgcggcgcgccggctaccgaggacgacacccactggtggatgaaaggggtcgaggacgcggcggacatagctgccctacaggggcgtccgtggaaggctgcggggtag

SEQ ID NO: 513287 - DNA, 141 bp, Stenotrophomonas maltophilia
atggcgttggtcggagacgccgatgtgattgaaaacgaggcgggtgaccacatcgatcccgtgaaccgttggatcaacattatgttgcgccggcacgggtgcaacttggtggcattgaggaggggcagtgagtctttctaa

SEQ ID NO: 513288 - DNA, 519 bp, Stenotrophomonas maltophilia
ttggccctaaccaccctgaaatccctcaacgccgaaatcaaacagctcgaagcccagaagaagctggtcgagaagcgcgacggtgaggtgcccaaagccctggcggtcctccagaagtatgcgaaggtcctcagtccggcccagcggcggcaggtggccaagctcatcggggaaacgatcgacgccaagccggcgcgtcccgccaaggctgccgcgggtcccctcaagggccgcaagctgggcaaggtggcgccgaagtatcgcctcccaagcggtgagacgtgggctggtcgggggttggcccccaaggccttcaccgcgtgggccaagtccgccgagggcaaggcgtgggctcaggccaaccccggagcgaagttccccccggccggaggtacggtgaagaaggcgcgcgctaaggttgccaagaaggcgggcaagccggtgaagaaggccgcccagaaggccgtcaagaaacttgcgaagaaagccgtcgccaagaaggccagcaagaaggtctga

SEQ ID NO: 513289 - DNA, 1230 bp, Stenotrophomonas maltophilia
atgggtatcgaacgggagtttcagagctacggcgcccagctggtcaatcgtgcgtgggcggtttccgcggtcaccgctgatccacgggaggtggtggtgagcctctggcaacacaaaatcgccacgcgcgacggacggtggttctacgatgattcgctcgcgcggtggaatggcgcgggcaagaacttgctcaaggagcacctgggcgtggcctaccgcgaagggttgcgcttgcgggccgtggtcgcgacccaacacaaccgcgccgagcgcgaacggaatccagacaaggccccgcgcaacacgttcaaggcgcgccccgagtgggtgggccatgtggagctgctggacggtgaccatttcgtgctagcgttcgaccacgtcgacgagacggccactccccccgcaggagcgaagtattggcgggttgccgaagcggtggaagcgatggggggcggaacgctggctgaggtgggcgaatggatcgagactcacttcccctcggaccccctcgccgacttgcgggccaacctggagcacctgacggtcaactccccgagccgcccccactacaaccgcgaccgatccgactggcgcaccgactcgggccacccccacgaccggttgttcaagatcgtggacgccggtcctcccgagcgggcccgctatgtgcggttcaacccagccgtccacggccatctggatctccggaaaggcgacgatgggaaatgggtggccgtgcccttgctccaggacgagcaaacgcgtgcggaagcgcaaggccaggccgacgcgttcgagcatgcacctccgatcgacaatgagcgcgacgcccgggtgtggtccatgcgcggcgttgcgcaacgccgcggccaacccttgtttcgcgcccgcctgcttgacgcctacgatcgccagtgcgccatcacggggtgctctgccttggaggtgctggaagcggcgcacgtgctgccctacaggggcgaacacaccaaccgcatggacaacggcctactccttcgtgccgatctccacaccctgttcgattgccaactgctttggatcacggccgagaacacggtggctctcgctccggctctcctggccaccgactacgcttctcttcaaggcctgcagcttcgtctgccggtgtccaaaggagatcaccccaacccggctcacctggccgagcacgcgacggcatgcaagacccgccactcgctgcaatag

SEQ ID NO: 513290 - DNA, 1236 bp, Stenotrophomonas maltophilia
atgcgattgccaatgcttgttgtgctggtttttgctttgatggtttgttccggatgtggcagctctaaaagtaacattgtctatctcaagggcgaacgcaaggcggttttgaccgctccggccttcttcatggatcgccaaggggacctctacccaccctttgatatcaaagtcgatgtcgatcgcaatgagtttattagcagcagcgatggggtgagagggcgtagttcgacaaaggccacgcttcgggcctactaccaacggcacttcgaaaaaggggatgaatcctggacggcgttgctcgacgcaacaggagtcgatcccagtggcgtctttgatcaggactgggatcgcatccaggtcgccctaaggaagcgtgttattgattgcttcaaggttcccgtcggccaggaggtggtgctcgttatccacgggttcaacaatgatcacggaacagcaaacacctggatgagtgggttcgattccgaggtgaagaggcgccggccaggtgcgcaagtggtgcgcatgtattgggatggacttcgtgggaatgcaatgggcataggcatttggggcgaggctcagttcaattcgccgcgggtgggacagagtcttcgccgcatcctcaatcaggtggattcaggaacgaaactgcgcatctttacgcacagtctgggtggctccgtggtcgccaatgcattgggcaacgggggcggggcctacaacggattcagtcagagctggaatgcggttgttaaagaaagagctggagcgatggatggggaatggcgcatcccccggaacctgacggacctgagggtggccatgttggttccggctcagcctccgactgcattcaatgacttttcattggttacggaggggatgcagcagggcgtgatcccttcccgtatcgtagttggaaccagtgagggggatatcgccacgtcaaaatttattctgcactgtggcacttggcggaccggcaatacgtgtatgccgcttcgccagcaaaagacatgtcgggagcttcgaaaagtgtttgatcagccgggcgaagcttcgcgcgtgcgcttggtgaatttccccaggcccatcaagtggtatcacgatcacggcgtgccaagctatgtggaagacagagcggagtggaatgagcttctggagcaactgttcgaggacgatcccccgatccccaagagcaccgttcgattctgtccttccgtggcgagctga

SEQ ID NO: 513291 - DNA, 2325 bp, Stenotrophomonas maltophilia
atgctggcatggctaaggaagtggtggggtccaaacaatgatggttccgccggatcgaagaccaaagccgaggagccgtttcattcagaactggacaccggttcggacacggaggaagagggagcaccttccggtgatcagttcctggatgatcagcccatcaccggtcgattgtctgatcgattcaatcgggcgccgttcgcgtcccggttggctcatacgctagcccagcgcgccgatccgtccagcatcgtcgttggcctatatggcccttggggagatgggaaaacatctgtccttgaaatgatgggggaggcattgaaggagtatccgcgggtcattcttgtgcgcttcaatccgtggcatttccaaagccaagacgccctgctgcgagggttcttcgcgacacttgctgaggcgatggacgaatccttgcccaataaaatggagagggtgggtgagcttctgaagcagtacggagggctcttgtctcttgcgagcgtgaccttcgcaggtgcggttcagatttcccctggggaggccgcaaagagtgtgggcgagtcgttgtccactgtgagtctggaagagttgcgttcgcgaatagatcgaatgctgggccaatcgaatcgccgcttggtggttctcgttgacgacatcgataggctggatcgcgaggaaacccacgccatctttaagctggtcaagctgtccgctagcttcaagcacacgtcgtacgttctggccttcgacgatgacgtggttgcggcggcgttgggtgaacgctacggagagggcggggccaagggaggccgggcgtttcttgagaagatcgtccaagtgccgctcaaccttcccccggcagataccaacagcttgcgattgatcgctttggagggggttcagagggcggtggatcaaacagggattgtgctcacccagagtcaggtggacgcgttcattcggcactttgatgacgttattgcaccggcactcggcacgccgcgaaaagcaaagcttctatcaaacgctctcctgtttgccctcccgattcttaagggtgaggtgaacaccgtcgatctgatgctcatcgagggggttcgggtgatttatccaggcctgtacgctgcaatccgatccaaccgcgacctttttcttaagggcgggcgcgcaggcgggcgcgacgataatcagaagaaagaagatgaaatctccgctttgctggagaaatcgcttcctcacatctcggtcgaagagcgcggctggatccgtcgtcggctgctggagccgctgttccccaggctgggaaattcgatgtatggcggggagtgggattcgacttgggctgcggagcaaaagatctgcgcgggggagtacttccagcgatactttgcctacggagtgccattgggcgacgtgcctgatcgcctgattgcagagttcatagaaagcgcgcaggcgctgtcaccccccgaagcaagggaagcgctggaacggtttgcagagaggcagggcatgcctcgcttggttacaaggcttcgccagagaaaagaggctatcaacgctacggaagctagggcgatagcactcgcctttgcaaggaacggagatctcctgccgcgggagcggggcatgctaatgccactggatacgcgcggttcggcggccattctcatcgcggacctgctaagaaggctgcccgcgggcagcgaaaggcaaggagtggctgaacaggtcattcgggaggcatcgtcggttgggtttgtctccgattgcttgcgttggatccatcattacgacgacaagcccgaagaccgccgagtgctttccgacgagggtgataaggctctcgcaaagttggccgtagaacgaatcgaggctgaaagcgccgaagcgccattcttccttaccgaacccaaggacgcccccacgctctattggctatggtgccaagagacatcggatgcacatgtgcaacacgcgctccgtgcgcagttggatacgtcgacggaccgagtggatgcatttttggcgtgtttcgtgggagagtcttggggagttgagagtgggatccccaggccgggggactttgataggcgccaatacgactctgtttccaagcttgttggcgcggactacattgctgccaagctcaaggagcggtatggggctgaattggatagtcctgaggaataccctgctgagggaatggatcaaccccgccgagtcgcgcatcagttcatgaacgtacatatcttcgttactcaggaaaaaggctcgtcgagcggcagcgacgcaactcatacaagcgaagaatccatgaagtag

SEQ ID NO: 513292 - DNA, 204 bp, Stenotrophomonas maltophilia
atgaaccacaattgcaaaaacaaggactacagtggcttggggcacgactggcaacaagcaatggacgcccttccaaccttgatcatcgaacggaacgaagcttccgtcatgggcaccgatgcgttaatcgctgcggctaaaacgggcctcagggacgcctgcgagaactaccggacggcattgatcgagcatcgaagggcgtag

SEQ ID NO: 513293 - DNA, 801 bp, Stenotrophomonas maltophilia
atgagcaccttctcagaacgccacaactacagcgttactcctgcagaagtaacgatccgtgagagtgctccaagagagcttagagaacatgtagttcttggcgcattgctgaacggcatgagcgaagatcacttgcagcgaatcgtgtgcgaaacccttggcgagctacccaagggctcggaagacgggctcgcagaggtgagtagactgctcgaggcagctgagtggtttgagatctatgacatgatcgagcgcattgcatcgtcgcttcctgagcgctccatcgcgttcatgaagcccatcaggccacgcgacaatttctcgtcctacatcaacaaggtctttcgcaagaatggtatcgggtggcagctgctggacaaccgtattgaattccggggtgcagaggcctttgaagtcgccacaaagaagggcgccagcgagttgcgaagcgccggaaagaacacgacggccaacgaactccatgaagcattgcgcgacctgtctcgccgccccaacccggagctcaccggtgccattcaacatgggatggcagcattggaatgcttggctaaagatttgacgggtggtgacaaggagacgctgggggctttggtgaagaacaatcctggcctgttcccctcacctcttggcgaagcaatctcaaaggtatacggttttgcttcaaacaacggtcggcaccttaaggaaggcggcgatccgtcgttggatgaggccgaactgatcgtgggcttgtccggcgtgctttgccgctacttggcgcacaaaattccccgaccttaa

SEQ ID NO: 513294 - DNA, 330 bp, Stenotrophomonas maltophilia
atggttccagaacgtgacctcgccaaccattggccgcttgagagcttccatcggaacggcgacgatgagatagcggccggcttcactgttcccgagggttaccgaaaccggattcgcaccaaggccattcttgccgcgggcattgcagagctccaaaacggctttcgcggacatccgcccttctacatcgaagcgctggtgagcgtggacaatcccgcttcacagaacgtggcccaggaggttctggacgacgaacctgcgccaatcgtcgatgaccactcgcacaagcccgcccttcgatacgcaaaactgttcccaaccggcagctaa

SEQ ID NO: 513295 - DNA, 975 bp, Stenotrophomonas maltophilia
atggatctcaaaagcctggccacgctgggtgacctgtccggcccactggaactcctgtcgaagggaccgaaggccctagcggcgtggatggagaagcgcacagagcagcgatacgaggaattcatccgagcagcccttgagagcgatgtgttccctgaaaacgcggaggccatgacttcggaagatttcctcgccatgctcagggcgctggaagtggacatcgaggccgagaaggccaccgtctatggtcgccttgcctgttcaatcgccaccggcaaaacagcaggccatctcaaacgccagttcatcaaagcgctgagcgatctatcgtttggccaggtcgatcttctgcgccgcgcttggatcgccgagcgccaccacgtgtttcccggcgccggcgggggtgacctggacccaaaggaattccttgggctgcgatcgaaaagcagcatcaaccgtcagacctttgaacgctgggggctgatcgaagagaaaggactgagcctcgccggccgccggttcgtggaagcttgttttactagcgaggagctagtgccgtcctcagtgggctttcaagaatgggccaagggtcacatccacatcgtttgcaacgaaatggatacgccaagttgccacgacttcctgctgaagttggaggcggaaggccatagagaggctatccatgtccacaacagcgccgcatttcggggacgtcccaaccgtctgctggcatccggatccgtcatggtagtcctcctcacagacaaacccctgcgtctctcagacgaatgggccacggtggaagacgccatccgaggacaggcactcgttgtggtggtcactaccgatccgactgcgtcgctgcccgccgtcttggaggatctggaatgcatagaggcgtcaccggagcgtgctggagaagctgtgaaaacgatcctggaacgctttgaagaaaaagggttccggggcacctaa

SEQ ID NO: 513296 - DNA, 534 bp, Stenotrophomonas maltophilia
atgcaaggaatgtcagatcccagcgatgcattgaagatatttcagaaagccattcttgaaggtccggtcgatctagaaaagggtcaagtggatccgacggtatacgttcaccttcaccggggacaggctataccacaatacacatacgtcctgctggaagggaaaacggtgcgatcgtttgcaacgtttgccctgaacggcacctacaagggctgtcccaaccttgcggtgggctacgcagtgcccaaggcctaccgcaacaagggactggccaaggccatccttcgcgctggcatcgccgaaatgcggaacggctttaagggcatgtcgccgttctacgtcgaggctgttgtgagcgaaaagaacacgtcatctctgaaagtagccgaggccgtgctcggtaaagcgcttgaacgattcaacgatggtcactcgggtgagcccgcggttcgattcgcgtgcaagttcgaaaccgccccttcccacactcgggatttcaacaatggatctcaaaagcctggccacgctgggtga

SEQ ID NO: 513297 - DNA, 819 bp, Stenotrophomonas maltophilia
gtgaaactctttgacctcctgaagctgcaagagccggccttcgaccctcaacaggcgaaagtccatttggcgcgctacaaccgacgggagcaacctatcgacgtgtaccgacatggtggattcgaagagtggcagcgctggcaaaacggcaacaacttcacgctgccccaggtcgtcagcctgatcgacgattgccaagggcggtggatgtttgccggattgtttctgcaacaggggttcatcatcgatcctgaccccacgccccatcactactactcacttaagcgcatgccaggcacggaagacctagaggggcgcctgttctgtgtgagcagctacaaatccaggcaatcctacgttcactgcgccaccgtggcagacatggccgtggtggaactgctacccgaaaaaatcactgtgggtcccttccccggctacaagcaggtcaacctcagcaaggacgaactggatctgctagttaggcacagcacccaatcatggcgcacagccttgtcgagcgtgaaagggatctacctcatcaccgacaaggccaccggcaaactctacgtgggcaaggccgatggggagaatggaatttggggccgctggtgccagtattcgagcaccggccacggccacaacagaggcttggtgcaggagctgggactgaccgcaagcgagcggcaacgggatttgcatttctctctcttggaaattgccgatcttcaatccacccgccaggagatattggaccgggaggggcactggaaagacatcctgatgagccgttcgctggatcgcggctacaaccgcaactga

SEQ ID NO: 513298 - DNA, 3072 bp, Stenotrophomonas maltophilia
atggcaaaggaatgggccccgtcatgggtgggccagcacgtaacgggatcgtcggactggcgcttgcgcttggagggcctggagctcgccttggcgctgaacgggcgcacccaccgggtcaatgtcgaagacgaggccacttaccgcgtcaatgccggcaccttctggaccgatatcacgttccatccggagcggcacggggaagtgaaggccgacggtttgcccaacgcccagggcgccgccttggttcaagcgttgaacttggcgttgagggagaagcgcctgcgggatgacgtgacgttcctccaaggcgcgcagcgcgcaatcgacgcgtggctggatcacaaggcagaacaagagcgggcctgcttcgagcagcgccgctggttcacccacgagcagcaggaggacgttctcgctgcccgccccacggttgacccagccgccctccgatcgcgcctgaagaaaccgggcgtggcggtccggctgggaccagctgcccaggcgatccaacgctcgctggtggcgtgggaagccgaccaccgcccggcttgggccgcgctcaacgccgcccacgtggaacgcgaattggtggcctgcaaagacttgctgggccgggtggaaagcaaaccgctcaccccggaacaggcaagggccgtcgtgtgcttcgacaaccgcgtgcaggtggtggcctcggccggctcgggcaagacttcgaccatggtggccaaggcggcctacgccacccaccgcgggttcgtggatcccaagcgaatcgtcctgctggcgttcaacacggacgccgccgaagagctcaagaagcgcgcggtcttggcgtttgagcgcttgggcatgggggacgtaactgtagaggcgtccaccttccatgctctgggcttgcgcctcatcggcaaggccaccagggagaagcccgacgtttccgactgggccaccgacgcggctggtgccgtgcgaaaactcaccgacctcgtggaccagctcaaagaccggtcgcccacgttccgccgccagtgggacctgtttcgcttcgtctttggaaaggaccttccagcgtttggtgcaccggagccgtcagatgcgtgggacgcccagggcaagggcgcgctggtcaccaaccgcggcgagcgggtgaagagcgtggaagaggtgatgatcgccaacctgctcttcttgaacggagtcgattaccgctacgagtccccctacccccaccgcaccgccgacgaaacgcatcggcagtacaagcccgatttctactaccccgacttgaacctgttccacgagcacttcgcgctcgacgccgacggcgtgccgccagcgcacttcgaaggatacctggaaggagtgatctggaagcgacagcttcacgctgagaaaggcacggagctgtttgaaaccaccagccacgggttgcgccacggcgacgattttgatcggctggagcgcgaactgaccgcccgtgggttggtgctcgatcccaatccagaccgggagattcccaaggagggccagcagcccatggcatcggtcgagctcattaagttgctgcgcccgttcatgagccatgccaagagcaacggtctgagcgcctcggatctgcggcagcggctggccgtgatgcccgccgacaccttcaagctgcgctaccagatgttcctggacattgccattccggtgatggcggcgtgggacgaagccttggcagcagaggatggcatcgactttgaggacatgctcaacctcgccgccggccatttggaaggcgggcgcgtggaatcgccttacgacctggtgatggccgacgagttccaagacgcctcgcgcgcccgggcccggttgtgccgtgcactggtccaaggcaaaggccgcttcctcttcgctgtgggcgacgattggcagtcgatcaaccgctttgccggcgcggacgtgtcggtgatgaccggctttcgccagtggtttgggcatggccaagtgctcaagctggagcaaacgttccggtgcccccaggcgctgtgcgacgtctccagcgcgtttgtctccaagaacccggggcagatcgccaagcgcgtgcattcggccacccctgcccatggcccagtgctccaagcgttccaggtggaaaccaaggaccagctggccgatgcaatcgaccgcttcgtggtgaacttggccgagggggtgcgcaatggcacgatcccgccggggcgtaacggcaaggtgtcggtttacatcttgggccgctacaacgctgatcggcagtatgtgcccacgaagcagagccggttcaaccgctgggtggaggtttcgttcctgaccatccaccgctctaaaggtagcgaagcagactacgtgattttaccggagatgctcagtctgttgagggggcgcagcttcccgaacacccgcaccgatgatccagtgttagccttggctatgcccgaaggagacacgttcccgctgggcgaagagcgcaggctgttctacgtggccctgacccgggcccggcgcaccgtagcgatgtttacctcccggggccaacgctccaagttcatcgatgaactcatcgaggagggtgtcctctccctcacgagcgtggacggcgaagagattcaagaacgctcatgccccgcctgcaaacaaggcgtcatcctcgtcaagagtagcaagaacggtttgttcgaggcttgctccaactttccgatttgccgattcaagcccgtcaaacaacgaagtggcccagcccgcgccacaagaacaagcgcaggtcgttctgtagctcaagtgctaaggcaaaacgcgaatgtggatcctacagtccttcaatcgcttatgaacatgcgcggcgagatagcacgaagagccaacgttcccccttacatcatttttcacgactcgactcttcgaaccatcgctgtgcaccgcccgacttcgctgaatcaattgcggctgctgcccggcttgacgagcgcaaaggtcgatcgctacggcgcggagctgcttcgggctgttcgtcaaccacacaacaacaaccaaaagaattctccaacgtga

SEQ ID NO: 513299 - DNA, 246 bp, Stenotrophomonas maltophilia
atgctgggaagcggcgggggctatattgatgaagcgatgaaggccggtgcctacattcgacgcaaggaactgggtaccaccctttacatcaactgcgactccgcgtgccccttggtcttcatggcaggggttgaacggctgaactggtcgccctaccccaagttgggattccatcagatctacacacccgatggccaagccgcacgcttggcagccaaccctactgccaagtgtttagctacctga

SEQ ID NO: 513300 - DNA, 528 bp, Stenotrophomonas maltophilia
atgcttcaacggaaccagccccccccgatccggtgccgcatgtctcgaccaacagcccttttcgtgctgctcatcgtcgcgcctttggcgaccgccgccagcgatccacgtgacgtggtcacccgtctctacgacgccatccaggcgccgacgtcgaacgaaacggccatttcttcgctgctgggcgatgcactgcgctcagcggtcgatgcgcagcatgcttacgagcgggcctgtaccgcgttggccgcgcacgatgagaaaccgcacatgctcgaccagagtccgtatctgctggcgccggatcgaccggacacggtagcggtgggaatgcccgaatcgaggggtgacgcgacctgggtccgcgtcgacatggcagtgggcgactatcgctggaccgaccgggtcctgctgcagcggcaggaccgcgactggaaggtcatggatatccgatgggggcagggcggccacctgatcggccggctccaggagttctcggcactccgctgcgcgccttcaggccgctag

SEQ ID NO: 513301 - DNA, 978 bp, Stenotrophomonas maltophilia
atgaagatgggaatgcgcggcgccgcggcgtcggttctgattctggcgatgggcacttcgggtgtcgctctgtcgcaacaaccggctgcccccgcagccgccaaggagaccgcaaccttgaattcccccaagcagaagctcggctacgccatcggccttgatgtcgccaagtcgttcaccccgatcgccgatgagatcgatgtggccgcgctgcgcactgccgtggagcgttcgttcgaaggcctgcagccgcagatcacccaggaacaggccaaggccaccgatgccgcgttgcgccaggtggtgatggcccgcagtggccagcaggtgccgggcatggcgccgggttcgcagccgccgaaggtcgatcgcgtcaaagtgtcgcagatgatcggttcgtactcggtcggcccgtcgctggcacagctgaaggacgacattgatgtcgcctcgctgtttgacgcgatcagcacaggcctgagcaagggccagccgaagatgacggaagctgacgcgaccgccaccatccaggccttcatgggcagcaagcaggccgagatgcaggccaaggccgccgcagccgcacagaccaaccgcgaggaaggcaacgcgttcctggccaagaacaagacccagccgggcgtcgtcaccaccccgtcgggcctgcagtaccagatcatccgcccgggtagcggcgagcgcccgctgccgagcagcaaggtgcgcgtgaactacgaaggcaagctgctcaacggcaccgtgtttgacagctcctatggtcgccagccggccgagttcggcctggaccaggtgatcaagggctggaccgaaggcgtcgcgctgatgccggtcgggtcgaagtaccgcttctggatcccgggtgagctggcttacggtgagaacggcaccccgggtggcccgatcggcccgaatgcgactctgaccttcgacgtcgagctgctgggcgtcctgccgtaa

SEQ ID NO: 513302 - DNA, 663 bp, Stenotrophomonas maltophilia
atgcgagcaacctcgcacaagcgagccctgcatcggtgtaggcagtgtctccaagtctctcggcatttgagtccaggaggtcactggccagctgcgaaaacagctcgactgatgcgccaaatcgaacaagggaaaagtatggacactgtaaagaaatcatcgaagccgattggaaaggccttgatcgccctcgccattctcgttgcggtcgcgccaggactagcggccgccaatccgattgccagtgaaagctcggcgattcatgaacgccagcttgaatcttccgatggaaagaagtggatcgttcgaaccatcccgacgtccgatttccaaggcggtacggtgatggttgagcaacgtctgttcagagatggaaagggcgggcttgtctatcggtttgacgaccaaagtcaagcaaccaagatctatcaccaggccctgtgtgaagcaaaagactctgtcccctcaagaggggcaaccacaatctccggagaggcagtgtggagttggtcctgcacaaacagcaaagctgatgtcccctcttcgagcaatgctccaatctccgccaggagctcggactatctgtacgctgtcgcccccgaagggtactatcctgtagcaaaaattttacatccactggcgctgttgcttttaagagtgtag

SEQ ID NO: 513303 - DNA, 1326 bp, Stenotrophomonas maltophilia
atgagtgagctagcgatctggatgaacggtgtagaggtagcgaaatggcagcagaactcgaacagctctccgcgccttacctacacccaaaactggcttgagtctggttcgccacgccctatttccctctcactcccattgctgccacttggtgaaagtcaccgtggacagaaggttgtcgactacttcgacaaccttcttcctgacaacagcgagatcagaagcaggctacgcgatcgcttttcaacccgctcagcgggaacctttgaccttctcgaggccatcggtcgggattgcgttggcgctgtgcagctgctacccgttgcagccacacccaacgatctgcagagcatccaattccggccattgaatgagggcgaagttgcggacatcctgcgaggagttactgcacccgcactgccaggatcaaggcaccatccgagtgacgagtttcgaatctctatcgccggtgcacaggagaagacagggctacttctgcacgaggatcagtggtgtattcccatcggcagcacgccttctactcatatcttcaagttgcccctaggcctggtcggcaacatgagggcagacatgcaccagtcagtcgagaacgagtggctgtgcatgcatctgctttccgccttcggaattcccgttgcagagacgcaaatgggacgtttccaggaccaacgcgcgctcattgttgagcgattcgaccgccgtctgtctgcggaccgccgatggtggctgaggttgccacaggaagacatgtgccaggtctttggtctgcccgccgccaggaaatatgaatcggatggtggcccaggcatcgtggccatcatggatctgcttcgacaatccgagcattccgaggaccgcgcgaccttcttcaagacgcagattcttttctggatgttggctgcaatcgatggccatgccaagaacttcagcgttcacattgaagctggcggccgcttcagattaacgcccatctatgacgtgctttcggtctaccccattctcggccgcggacccggccagctggagcctcgtgatgcgaagctcgccatgagtatcaacggacggaatcgacaccgaagtctgctggatattcgacgacggcattggaacgaaacagctcgcgtctgcggtgtaagcgatggcgcagaaccatggatcgagacactgctggaatccgtggaacctgccatcgcacaggtcacgcgtcagctcccggatgatttcccttccaacgtgtccggacctattttccagggactgcgtgctgctgcggcacgcctttccagcatggcaccggaggcctga

SEQ ID NO: 513304 - DNA, 207 bp, Stenotrophomonas maltophilia
atgatcagctcccgccctctgattaccgcactgctggcgctgacggcctgcaccgccaccgcgcagcacaacccgctcgccacctcggtgccatcgcccaaccacaacgcgcgcacgccgatcatcaaggttgcggccgaagctcactacttcatccgacaaagtggtatggacgatgtgatttctgtaaggatcaggaatcagtga

SEQ ID NO: 513305 - DNA, 957 bp, Stenotrophomonas maltophilia
atgctgggcattgcagagacaggacccaacaccgccatttccaaacgattcctgcctgcaagacgcatgcccgctggtattccgccagccaaggcaccaacccaacagcccacccgccagcgcacccaccacctgcgacagcgccagcaccacctccttctgttccgggctcagcttggaggggtctccgccggtcaacgtattggtcagcaccttcgcggccaactcgccaccggccgcggacaccgccccggttcccgcattgccaccattggcttccgccagcagcgcacccaagatcgcatgcgacagcaattgcagagtcgcattgggatcgctgccgtggttcgggtccagcttgctgccgatgaagtaagcggcataggccgccagtgcattggacgcgacctgaccagcgccctgtcccgccacaccacccaccagcgccgtcgtcactgcgttcagtgcacggttgtactcatcgaggcgccccacttccccgcgccgctgtttgcctggctgtttgccgccgccaccttgctgcgcacaggcacccgattccatcgccctcagtcacaaggccgtgttgaccttcaacattcgtccaatccgcggccagatcaacatgtagaaggcacccacggccaacccgatgaaaagcatgatgccagcgcgcctgggagcccacccaaaccaaaaggaaggactggtccagacctttatccaagcgccaggagagaaggcaccctcgaacgcgagccacgccaacaaggcacagattggtgcagctacaacatgacgagctttgaaccgcggaagaaatttatccacaagcataaccccgggcacaccgaagatgaggcccaacacggcggctatggcgcaaaccagcgatgtgaaaattgcagcctgcgaaaagctgcctatccgagaactcagcggaatgcctatgaatag

SEQ ID NO: 513306 - DNA, 270 bp, Stenotrophomonas maltophilia
atggagtttgaggggggcggtatgaattttgagcagcagacggaagagttcttctcgatgcttaggatgttgatggaggaagggaagctgaagcttgcctcggatggtgtcttcgccgatggcgaaatcgatgcgcaattgggtgttatgcgtcacgcttggcctgctacaagagatcaggaagatctcgatgaggatggattctggtttcttacggatgctccgtttggattggtttggatcacgcctgagggagacgcctggacctga

SEQ ID NO: 513307 - DNA, 276 bp, Stenotrophomonas maltophilia
gtggtgggcaactggtacgtgtgcacccatcccgactccagcttccctggccaactgcgcgcgtcgctgaccgggccggactggcgacgcaccatcggcagcggcaactacaccgagtaccgccccggccaggcaccggacaagcgtccgctgcacgatgttgccgacgtgcgcgacgtgctgcagcaacgcttcggcatgcagttgcccgaagacccgcggctcgatccggcgatcaacgactggctgcagcgctcacgcgccgcgaccttgtag

SEQ ID NO: 513308 - DNA, 2259 bp, Stenotrophomonas maltophilia
gtgggtagtggcaagaagcaaaccgtcggctaccgctactacatggccctgtacatgggcgagtgccttggcccggtggattcgttgcgggagatccgcgccggcgatcgcaggatctgggacggcagtgctcagaccgcctacatcacctggatgggcgtgaaggtgcccattacgattccagccacgggggtgatcaccgaatcgcgctcaatccgcatcatggcgcctgacgtgttcggtggcgacaagggtgagggcggcatcgacggaacgcttgaggttcgcatgggcgagcccacacagatgccgagcgcctatttgcagtcgctggtgccgggcccgtggccagccgctcgcggcctgtttaccacggtgttcaacggccaagtcgcggcaatgaacccgtacatcaagaactggacgaagaagatctcgcgttggcggcagggctggaagaacggtctctggcggggcgacctggtccaggtcgacgaaggcatgaacccggcgcacatcatctaccaggtgcgcaccgagggtatgggtcatccggtcgacgtcatcaacgacgagagcttccgccaggccgcgcagacgctgaaggacgaaggattcggactgtgcttgaagtggtcccggtccgttcctgcaggcgaattcatggacatggtgtgcgatcacatcggtggcatgcgcatcgaggatccggtgaccggcctgaccgagttggtgctggtacggccggactatgacccggccgcccttgcggagatcggcccggcaaacatcatcgagctgatggagtggcagcagccgatgctggaaggcagcgtcaatgaggtcacggtcgtctaccgagatatcgccaccaacaaggatgccgccgtcacgtatcagaacctggccagcgtccaggcccaaggccgggtggtcagcacccgaaagaactatccgggcctgtggaacgccgcgctcgcggggcgagtggcggcgcgcgaggtggctgcggtaagcagcttgccctgtagggtcaaggttcgggtgcggcaggacgccggcccgttcaaacgcgggcaggttcgcgctctgtcgtggccacgtcgcggcgtcgcccggatgccggttcgcatcctggacatcgacgaaggaacgcaaactgaaacggccgtggtactgaccgttgtccaggacgtcagcggcatggccgcagcaagctacatccagccctcggacagtgcttgggtagaacccgacaccaagcccaagcccgtcaccctgcagcgtctgcaggaggccagctaccgcgacctcgcgtcgaccctggggccgtcggatctggcggccgtgccggcggacgccggctacctgacctcaatcggcgtgcggccgtcctccgtggccttcggatacacgctacagacgcggctgggtggcgctgcattcgccgaggcgggcacggccgactttgccccgaccggcctactgattacggcaatgacggccaccaccacggccattgggctgtctgccggcgtcagcctggacacggtcgaggtcggcagcgaggcactgatcgatgatgagctggtccgagtagtgtcgatcgacccggtggcggcaacacttaccgtggcccgtggctgtgtggatacagtgccggtgccgcatgccgttggtgcgcgggtgtggttcacagatgagtacgtgggtttcgacggtcgggagtacatgaccaacgaatctccgcaagccaaactgctcacccgaaccagccagggcgagctgaacccagatctggccacggcgatcgcgctgacgatgcgccgtcgccagatccggccgtacccaccgggacggctgcgcatcaatggcgacacttatcctgccgaagcctggggcactggcgggaccgtggtggccacctggtcacatcgcgatcgcatcctgcaggccgaccagctgatcgactccgagcagtccagcatcggcccagagccaggcaccacgtacaccgcccgctggtacctgcaggacgccctggttcgcacgcagacgggcatcacggccgcaaccgacagttacctgccgccggtcggcagcggcggcaagaccctgcgggttgagatcgaggctgtccgcgacggcttcaccagctggcagcggctgcagcacaccttcctctaccgcgcccagctggtgaccgaagcgggcgaccgcatcgtcaccgaagccggcgacccgatcatcttggagtaa

SEQ ID NO: 513309 - DNA, 771 bp, Stenotrophomonas maltophilia
atgcctgacgtcaaactctcccagctcgccgcagccagtgccgcctcggtcgccgccggggccggcctgtggacgatggctggccacatcctcggcctgcgcatggagtacgtggggccggcttccattcgcgtttccagcggcagcgcctggattccgtcgttgcagcaggccattgaggtgcctgccgcgctgaccctcagcggtctgacgcttgcggcgaacacctggtaccacctctatctgtacctcaacggctcgacaccggcgatcgaagctgtcacggatgctccggctgctccttacagcgggactgctcgtagcaaggctggagcgccttcgcggcggtatgtcggcagcttccggaccgatgcgggcggcgtcatcgccaagttcaaacatgtcccagcagctggcgccgtcgtctatctcgggatccgaccgctgtcgctcaacgctggagtgtcaaccaccactacgagcgtcagcctcggcgcggcggtaccgacgacggccgccgctgccgcgctcatcatcagcttggacgcggctggcgctgcgctgttcaccggtaactcggagatgcccgacccagtcctttctaacggcaacttccttgggtacacagaatcctccacccaggtctcagtgagtcggatggatgggcacccggtcgacgcgaatcagagcatcagctaccggctgagccagacgccgtcgtccggaacgggggcctacgttcgtgtaatggcatacacctatgaacgctga

SEQ ID NO: 513310 - DNA, 231 bp, Stenotrophomonas maltophilia; identical to SEQ ID NO: 304975

SEQ ID NO: 513311 - DNA, 804 bp, Stenotrophomonas maltophilia
gtggctcccggagccacgggcaagagcttctgggcgctggaagcggcaatgtccgttgcctgtgctgcaaccgttgaaagcagagcggccggtggtgacttggtagggcttgcacctgcgaaagcgggtcgcgtcgtctattacgcgggagaagaccccgagccagcgctgattgggcgaattcactctgttggcaaacaccttggtcaagaagctcgcgaagccatcatagaaaacctcatggtcatgccgatcatgggaaaactaatggacgtcacgaagaaaagtaagcgggcccagataatcgagcaatgcgaaggcgctcggctaatcgttctggacacattgagccgtattcatacccttgatgagaatagcaacggggatatggcccggcttgtcgctatgcttgaggaaattgcgtccattactaaagcgtcagtgctttatctgcaccatgtcagcaaaggcagcgcccgcgacgggcaggccgatcagcaacaggcagtacgtggtgcgtcggctcttgtcgataatccccgatggtgcggtttcgtcgcgaagatgactgacaaagaagcgcagaaccatactgaccgcgtctacgaccgacagcctatcggggaaaaccgccggaagttctttgtccgtttcggcgttagcaaacagaactacgccgagattgacgatgatcgttggtatcagcgtcatgacggcggcgtgttgctgccagtggaattggcggcggtcacgaaggaacgcactctgcacgtcgtaagtgggagtgacgatgagcggtggtaa

SEQ ID NO: 513312 - DNA, 753 bp, Stenotrophomonas maltophilia
atgagcggtggtaacgccgtggtccccaccagtactagcgcacaggcccgagtgatgctgtatcagcctagccagcgcccgcgattgcgtgaaggtgattggacaaatacatcatttggccgctgccgcgtggcaggcaggctaggccagaggcacgccgatattgtggaagcggtcctgtactgcgcagaacgtcggcgccctgtctctgacggcggcgttgagctgctggtagaccccgctcgggtgagaaaaacactttccgacagccgctacagctttacgcagatcgaaaagctgttggccgagctgcgagcggcgacgatcacaattgagacgccacaattcgatttcccaataatcgggggattgattgatcacgttatcccatcgcccatgacacggcctgatcccctaacggggggagagcggaatctatggcgggtgcgccttggtgtagcgctggtgatgctgcttgagcatgacttgagtctgtactacgacccagcccccattgcccgcctgcagcatggcatcagccaagcggtagcgcggcacgttttgagccacaaagtagaaccgacaggcggttggtatcttgacaccgttatcgtggcggttgccggacaggcctcaagccaagccatgcgcgatgcgagacgaaggctcaaggaggagactcaagagttacgggaaattgggcttgtgctcgacggcgaccgcatcaagaaaaacggcgcttgcaacacctga

SEQ ID NO: 513313 - DNA, 321 bp, Stenotrophomonas maltophilia
atgatggacattctgatgttcgctggattcgtagtactcgcctcgactttcgccatcggcatgtgggcactcggccggtggctgcgtagcaagggctacggaccacagctcgataggctggatcgccaatacacggccttgcagcttcgagtaagcccgctcgccttgtcggcttcctaccgcatgttttccggggcgcaggctctgaatcgcctacctttgctaggcagcaagaataacgccgccttgaaccagcaagttttgatggccatccaagccgcgcaggaagcccagaggcaagagaagcgcgacaatcgctga

SEQ ID NO: 513314 - DNA, 1620 bp, Stenotrophomonas maltophilia
atgcaacgttcagcactactcgcactcatcggtgcggtgctcttgctttcggccggcactgctgcggcagcaggagatataactcaaggcaatgaaatgaatgggcttttgcggatgctctatgacgccgcaagtgaatggtcaccacgactacagggctatgcactcacattgctggcttcccttgcactaatccaattggtgtggacgttcatgcctttagtcatgaaacaagctgacttcggcgaaatcgtcggcgagttgatccgcttcttcatggctatcggctttttctacgcgatcattgagcattccgttccttgggcgacagctgtagtagacagttttcgcgaagcagcgggcacggctagcggtttgggccgtgcgcttcagccgggcgatatgttcgcggtcgccgtcgatttctcgcgcaccatcgtagagggaatctcagttttctctccgggtaaagcggtcctcatcgcgcttgttggctgtttggttttactgtgcttcgccttcatcgcggcattcatgtttgtgacgcttgtagagtcatacgtcatcatcaacgcctccgtgctgttcttcggctttggtggttcgcaatggacacgcgactttgcaattgctccgctccgcttcgttatcgcagtaggtgccaagctgttcgtcctaacgttgatcgtaggaattatcgtcacttcggcgaagtcttggttagcagcgtataccaacgacgaagcgtctctgatgacattggcgggcttggctctggtatgcgcatacctgactaagactattcccgaattgatcggcgggatgattagcggcacgtcgatgggcggcggatcagccattggtggcatggcggctgccggtgcggccggtgcggcggcggcgatcgcaaccatcgccacggccggtgcggcggctccggctgctgccggtgctcttggcgcggccgggagtggtagtgcagcgggggcaggtgcggcgggtgccggtgggcttggcggcggcggtctggcggccgcgatcaattccagctttgccggtagtagtgcgcccgccgcagccgcatcaggtggcggggcggcctctggcctcggcgcgagcactggcggtcaagcggcggccaagggcgcgtcgtcggcaggtgccagagtgggcggcagcggcgcaccacaaacgccgggcgcagcgacgcagcagcctaacagcggcgtacagcaggccgccaagcaggccgggaagtccgcgcaggtcaatgacgacaaagaccagcaagcgacaccaaaagggggagttgtcagctccggcaacgcactttcccaagcggccaatggtggcgcaaagatgctcggcgtgatggcctcgatggcagtgccgggcatggagaacgcgcacggcttgtctcttggcgcaggatctgcgccacctgttcccgacgataccagttcggccgctccagccaatggagcggaatctgccgcggaacctagacaagcggaatctaacgtcatccatccggcctcggacaacagctctactcccggccgcctcgcctcgctcaatgtgccgggcatgccctcgaataacgaccaaccggagaaataa

SEQ ID NO: 513315 - DNA, 795 bp, Stenotrophomonas maltophilia
atggaaatggaatcgcaaaaatcgccgatttcgtcagctcgaaaattcggtcgaggcgcggcgctagctctggcaatggcaagcacaggccttggtgtaagtctctacctggcacctgccccggcttacgccatctactgctcgaactgctcgacgttctatcagcagatgttcgagtacgccgaagcggtcaacacgcagctgaacactgcccagcaactggcaacgcagattcagcagtatcaaaacatggtcacgcagggtctgagtttgcccaactccatgttcggcagtatcgcggccgacctgcaaagcgtggcgaatatctacacgaagtcgcaggccttgggccgccaaatccagaacatggattcgcagttcaacacgcagtttcccggcttcgagtcctacctgaatcaagccgcgaactcggcggaagtcccggcgcgggatcgttatcagaagtggtcagagcaggggcgcgacaacgtgaaggcggcgatggaagcggcgaacctcaataccggcactttcgagtctgaggacgcgcagcttgcccgcatggtttcccgttcgcagtcggccgctggccggatgcaggcgattcaggcgggcaacgaaatagcctcgcataacgtgcagcaactgcaaaagctgcgcgatctggtagccacgcaaatcaacatgcagggcaactacatggcccagcaaggcgaccggagggccgctagcgaagccgccgaacaacaattcgaagctcggaagaataactggggaccttcggaggacttctaa

SEQ ID NO: 513316 - DNA, 243 bp, Stenotrophomonas maltophilia
atgaccgaccatcaaaatgcaaatactgaacgacgccctcaacgccgtggccgcgcatcgttcgtggcggtactggatgaggtgcggaaggagcacgaacgcggggtaccgctggtatggatttatgaggcattcgcggaccggctcgaaatgggatacacccagttcaccaaatacgtcacacgatacatcaagcaaggtcagccaatcctcgctccctacaagcacgacgggaagcgatga

SEQ ID NO: 513317 - DNA, 1953 bp, Stenotrophomonas maltophilia
atgatcgcgcatcgcatcaaccgtgaacgcaaagcctcaagcccagcccggttaatcaagtatatggtggcggccaagggcggcattgacccgacgagctgggagcgcacggccgattacattctggattccgccaatggcacgaccgagggcgagaaggtcgccagctatcgggtcacgaattgcggcacggatgatccggcagatgccgcaatcttaatccaagccacgcaagcggctaacaccaggtcgaaggcggaaaagacctaccactttgtctattccttcccgcccggcgagcagccagaccttgagacgctgcacgccatcgaagacgaactatgcgctgccatcggcctcgatgagcaccagcgtgtatcagcggttcatatcgacaccgataacctgcacgtgcatgtagccatcaacaaggttcacccgaccgggttacagaacatcgaaccctattacgaccagttccgcctgatggaggcatgcgagcgtcttgaggtggagcatggcttgcaaagaacgtttcatggtctagaggcaaagcagcggcatcagaaccgcgacattgagttgttgccagagaaagccccagagcagcgcgatagcctattccgtgaacaccttagaaacgcttacgacctcagcatatcggagcctcccgaagccaaaaccctaaaggggttgcgtaagctgtccgatacccgtctacagaagcagtcagcagataaagcggagccagtccgcatcggcgcgaaggcggccagcgtggaggcgcagtccggcatcgagacactaaccgggtacgcggcccgcgagctggccccggcgatgcgacaggcgacgagctggcaggagctgcacgacgcagcggccgagcacggcctagaggttcgccagcgcggcgctggccttgttatcggagagccggatttaggcatttgggcgaaggccagcaacgtcggccgcgacctttccatgaagaccctaaccgaccgtcttggcctgttccagccttccgaacggcaggccgaggcgaaggcgaaccgcaagcggtacgagccacgaccccggcggccggacaacccgacgacagcaggcctgttcaaccagtaccagcgcgagcgacaggcggccattctggcccgccgtcagggcctcgaccagatcaagcgcgagagcgcggctttcaatgcgcaggtgaggcagtggagccagacagagcgaatgcttttgaaggtcgcgggtaaggggccgaccaaacgcctgatgtacggcactatcaaacagcaggccgacgcctcgcgccagaagaaccggcagagcgcagacgctcgccgtcaggcgctgttcaaacagacgacgatgcccacttgggccgactggctgacgcagcaggccgagcgcggcaacgccgaggcgctggccgtcctgcgcgaccgcgaggaacggacacgccgctggaacggggagctactgaccgccgaccgggccgacaaggccaaggctgtcgttctcgacaagctcaaacccaaggcccggaaagacggaacgatgacgtacagcaccatcgacggcggcatggtgatcgaccggaagacccacgttcaggcgcagaaagccacgaccggcgcggcgctggttgcgctcgaactagcgtccaagcggttcgagggccaagccctcatcgtggaaggcacagacgagttccggcttgaagtcgcccagctcgccggtatgcacggcctcaaggtcacgttcaccgatccggcgatggagcagatgcgccgcgagacggccgagcataaggaaatggagaaggcctttcagaccgaggtatacgctccgaaggacaccaaaaagggggaggggagcaagatgccgggcgtggccccacagcgtaggcagaagcaaccgaaggaccgctctaatggactgatatag

SEQ ID NO: 513318 - DNA, 1008 bp, Stenotrophomonas maltophilia
atgcatctaataatgctcgatacatgtgtttggcttgatatttcgtctcaaaaagctgaattgccaatgcttactgccatagaacatctggtacaggatgggagtatcaaaatactactgcccgatctgatacgtgccgagtacgaacgaaataaagagagggtgattgaggctacgcgcaaacggctcgccagtgaatttcgagtaattaaaggggtggttgagtcgtttggcggtgacggtaaagagactgcgctcaaaactttagatgatgttaatcacaggctgcctattctttccgaggtaaatcaaaacacagtaaatcgtgttaccaaactttttgacatggcccacgaagttataatctctgatgccgcaaaaatcagagcagcagagcgggctatcactaagaaggcgccgttccataagcagaagaatagtgttgctgacgcagtgttagcagagactttccaagagtttcgggtgtcacacgcaagtgagtacgaaacctttagatttgtcactcataatgtcacggatttttccggcaaagaccacaggcagccacacgacgatttcgcagatatttttgacggcagcagctctttattctttaacgccacaagctctgccatcgaggatttgctcgatcttgaagaatttcactatgagaatagctttgcttgggaggacgaaactcgtgggcttcaggaaatcatgtctgcgatggacgagttgttcgataaagtttggtacaaccgccatatgaacatgatgtatcacctagataatggtgacatagagatcgtccccgctggcacaaaacgctacggcaatgatgtgattcacgaagatatcctcggccaagcaaaaattgcagctcagcgggtcagggataaatatgaagatactgggccttggagcgactttgaatgggggatgctcaatgggaagctctctgccctgcgatgggtcttgggtgatgagtgggacatgctcgacacgtaa

SEQ ID NO: 513319 - DNA, 825 bp, Stenotrophomonas maltophilia
atgggcgatgtaacaattattaccaatgctattgggcgttttgccaacgccatgcggctttatggtgaagccttcatcagatatcgagggctggtagcaatcgaccgtgaagaggctatccacaacctcgaccgagcatttgagcaaaatcttgagagttttcatacgttatatgatgtatcgcaaggggtgtttgactttcatgctcatccggataccagtctcctaattgctattcgtaatgctcttcatcatcgtgaccatcctttgttccatagtcttcttcagactatttggttggacggggagccagagcgtctgcttggagcggagtatttaatggctaggcatcgaacgacgggtggcaatcccccgccgatgatgcacttgattaagttggaagatatatacagtcgcctcgacccacgtcgtgaatcggtacacataaatccaatgggtaagggcaatgctttatctagatttatcactctggaaaatggcctcgccttcgagagagtgtgggccaaagcaaaaaaagatcgctatcccaccaagcaggtgtatttagacttgttgccgatatttaattctgcggtttcgagagtttttgctgcattggatatggctggagtgccgtttcaagggtttgatgcagatgcctataaatctacatttattgatgaattaaagacaaaccttcaacatttcgatttctttggtctgcgtatacatgcgctacagatagaattaggcccgaagttcacaatccaagaggcctctatcaggcggggctgtacctacgaaaaggtgatggaggacgaatag

SEQ ID NO: 513320 - DNA, 162 bp, Stenotrophomonas maltophilia
atggccgagtacttccgagccgatccgacctatgcagcggagttgcttgccgaagtccgtcgtgacggcaacccggacgagctggcaattctgttgcggcagatggacgaggcgttcgggagcgactgcaaacgttcgggctctccgatgagacaactatga

SEQ ID NO: 513321 - DNA, 699 bp, Stenotrophomonas maltophilia
atgacgcaagcagcttggacacgcgacggtcggccggtagatgcggcttccattcccggcgccgagtgggaggcgttgaaacagacggcgcagttaggtgacttcgtgatgccgtgctgcaaggcaccggcagtactcaagacaagcatcaatggtttacctttcttcgctcatctgtcggaggagtgcggcactgcgcccgagactaaatggcataagtcgggtaaggccgcagtgatggccgccttaaccggcatgggtatcgaaaaccgtgacgaggtgccgggccgatcaccaagcggcgacaagtgggaggctgatgttctcttctcggcttccggtcgcaccatcgtcatcgagctgcaacgctcctaccagcatctacgtgacttcacgcgtcggcaggagcggtacgctgcatcgggcgttgagtgctactggctggtccgcaaagagacattcatgaccttaggaaaggccacgtcacgcctattgttgaagcgtgatttcggcaacgtgtttccggctagtggaatcggtactggcatgctgcccgagttgccggtggcgatgctggacaccgagggcgagcaaccggttcagttcggcgggttcaagaccgcgactgtgcctgtgtggttggcaggcatccttgatggtgcataccaatatcgcggtggctcttggaaccttaattga

SEQ ID NO: 513322 - DNA, 2109 bp, Stenotrophomonas maltophilia
atgtctgcatttacgattcacataaaaaactgcaacagcatcgaaagtgctgagattcggatcaataagggcacgcttaatataaagtacgggcctaatggattggggaaaagctcaatagcgaaagcaatcctagcatccgtgagcgatgatgggacgcttcaaaaattgaagccctttaaacatcgtgcgtttgcagggcagtttgatccgtctgtggttggggtcgaagatataaagtcggttttggtttttgacgacacctacgtttcgcaatttgcattccagcgggatgaagtcctaaagaatagttttgaaatattcataaagacagatgattttcttgctgctatgcaggagatagaagcactattccaaggaattaaggcggccttcgacggaaacgaggacttgagcaatgctatatcagacctgaaagagcttcgtgatgcatttggagttacaaaaacgggggcgctttccaagtcaagcaagggatataaagcatttggttccggaaataaaattgcaaatattccagaacatctcaagccatttgaagaatttataaaaagtgatcaaccggcgacgtggatagcttggcagactaaaggtaattccttcttggaattgtcggataactgtccttattgttcttctagttttcaaggtactgataagaaggacgtggcgcaagcagttgccaaagaatacgattcaaagtccgttgagcatttgagtgcgttacaggcaatcattgcaagattgggaaaatattttgatgatgcttgccgtgagagcttggagaaaatcacaaaatcaaaggttgagctttcgttagaagaaactaatttcctaagcgcccttagaggcgacgttgaaacgctcattgcaaaactcgaagggttgcgatctatctcgttttttgtacttcgagatgttgagaaaattgaagacgaaatcaccaagctgagaattgatctcgaccttcttgggagacttaactcggcagatactaaatctgttgtttatcccgtaaatgctaagctccaagagttggcggagaaggtgggagaactcaaaggtaagatcaacaagcataaaaagctaattgagaggaccgtcgcggaaaatcaagatggcattaatggctttcttaagtcggctggctacaagtacagcgtagttatcaagtctgaagccgagtcttacaagatgaagctggtacaccaagaccatgacgaacatattgagacagcggcccagcacctaagctatggagaaaggaacgcattcgctcttattctattcatgtatcaggttttgagggaaaaacctggattggcggtcttggacgatcctgtctcaagctttgataagacgaagaaattcgccattctgaacgagttgtttagaggcaaggcaagtcttcgtgataccaccgtccttatgctgacccatgatattgaacctgcaatagatgttatacgtggcgttaagcggttattccaacatcctaagccaacggcatattttctggcgtcgaaagcgggtgtagtatccgaggtggagattagagaggaaaatattcaaacatttgcgcagatatgtagtgataatattctcgaacttgatgatgaagttattaagtgcatatatttgagaaggcattttgagatcatcaatgatctaggcgcggaatataattatttggccaatcttttacacgctagggacgtgccaattctaaaatctgccgtgggcgatgtcgctatgaatgctgaacagattgcgaacgccgaagctggcatcaagaaattcatcccggcttttgattactcggcggtgcttgctgcgattaaagataaagcagagatgaagcgtcgctttacagaagctaccgtcgggtacgacaaaatccagcttttccgcatctttaaggaagtgcatggttccgccaatggggagcaggatggcattcttcagaaatttgtgaacgagtcatttcacatcgagaacgaatatgtgatgcagctaaatccccacaagttcgacaatgtgccggagtatgtcgttttggaatgtgatagggttattctggcgtcttaa

SEQ ID NO: 513323 - DNA, 807 bp, Stenotrophomonas maltophilia
atggccaccaggaagtccaacgctgcgacgcccgtcgcagctgctcttacactcgagcaaatgcgctctgcaatccccaagctaaagcgccgaatcaaggaccttgagcaacttgaccccaagtcgctgactcacaggtccgacccgcggctcgacgcaattgaaaggaagctccaggatacccttgcagaagttttcggacatggcacgttagagtacaaccgattcagtccgggggcgctagacaatgccggctacaacatgatgcatgaaactccatttcatgaggtgattgccagtgttgaggaaagtaggcagcgggaaatttccaatcttcagaccgtaattgatttatttgaggagaagcttgaggacggcgaagactcgccggcaatcaggggacgtcgagcgttcggcgacctgtcgctgcacccggaaatcgctcgagtatgcttcaagctatttgaagatggccattacgcgcaggctgtcgaaaacgcctgcaaagtcttggatgcgctggtgaagctaagaagcatgcgctcggagccaagcggcactgaactcatgcagcttgttttcagccccagatcaccaatactgaagttcaacgatcaaacgaacagcagcgaaaaaagcgagcagcagggaatgatgtacttgttcgccggcgctatgcttgccattcgaaaccctcgggcacacggactagttgaagatcaccctgataatgccgttgagtacatctcattcatcaatatgctggcaaaagcgctagatcgaaccagcaccaacttgacggaataa

SEQ ID NO: 513324 - DNA, 288 bp, Stenotrophomonas maltophilia
atgggtgatgtagatgtcggactagtcaatcagtatttgacgcgtgttaatcagctggcttgcaaagccgagagcggtgctgaaatcaccgccgatcttggtagagtcgttggtgaggcaattgatcactttgcgattgtccacaatccggctgcacagttggagggattcattagccaactgaagataagtgcagaagtgctgcgcgagaagtcgccagtgcatgcagaggtgctttctcgagctgtcaccatcgcagcccgtgcttccgtagagccccaaacttag

SEQ ID NO: 513325 - DNA, 1290 bp, Stenotrophomonas maltophilia
gtgaacgccttccattcggtcgtagaactatatcgggcagcagggcgccctaacatcatagaagaccgcttctccttcgaagggagcggctgcgacaggctgcgttcggcgctcgatgtttgcggctcgctagagccccgattcgggcgctttgacgacgccccgtattggcatgacggcacgattgatttctcgtggtcattggcaagcaatgagtctggccgattctacctatcagtagatgacttcgtcaggcggtgtgagtcattgcatcgcggcgtggttcccggcaacttttacatcgctgacatcgaccatctatcctctcaatctcctccgaacgaaaattcctgcgtctccgatcaagacaaactggcagctctcccaccgatgcttgtaagagttttccaactttgccaattgattcgtctacttggagaactcagccttacaggcagcgtagtttcggaggcaggcaaaccgtcgcacctggtctttgttaagcctgcatcaactggcgcggcgccgctcaccgtggaagtagtaactcgaatcagcgccgacatgatctctgacagctgcgcaccagacctattaattctcaccgaccttcttggaaaccaagaatctggcagggtaagaaatgaagaatatcgcgccgtgtttcggctagccattgcaaacatcggcgccgaagagatcaccacatcaagtcgatttaagtggctcgtcgataattgggaacgaatcctcgcgcgctttcgctacgatgttgaatgccttgtagatcgactatcatttgagggagtcaaaagagaaatacttgacgccgaattactattcattggcaaaattaattcatccattgtcgaaaatgcggcgaaatttcttggcattccactatcactagtagccctaacgaccatcttgtccagcaactccgcatcgagcgacattgtcgtttgcctcggagcccttctagttagtttaataatcagcgggactgcaaaggcaatcggctatcagatgggctcgatcgacagcgcttttcagggcactctgaagagcttacgcgcgcgagccgcctcagatggcgaagtttcctgcaagctggacggcctgcaggaaaccttccttgatcgactcaggttcgctaaacgaacggtactgacctttcgaatgctggcttggattccaccgtgcgtaggattggcactcattgcgtggaaatacccacccgaatggctgaagaacttgatgcaactcttagcaaaccttctagatcactag

SEQ ID NO: 513326 - DNA, 1170 bp, Stenotrophomonas maltophilia
atggaattgttgagaggagctgtgatccatagccttcagaaggaggcccacgcaaacaccgcagagatcaagtgggctcaaaagactctgaatccgtgcgacgacatggtcttgaagctggccgaacagcttgccgacctggtgggcaaagacggaaactcagttctttggggacaatttcagcgcgcctctcgtcaaggcgacttcccgggcgccgtgtctggcttgattgatcccaatgacgatacatcactaatgggactttccaaggtggcaatgatcgagcttcgtgatcaggcgagattcaagcctggcgccacgggtggccacatcttcttcggtcactaccagagacagggcaaagactatttgctcgtggcgatgatcaagcaaaaaggggccatcactcttacccctgacatgcggccaactgccatcaaggaaattgacatgtctaagctgcaccaagcagctcgcatcaatctggaccgcttccgcgatcatctcgccactgaaactgttatgacttcgacttcgtcggagttgtcttccccaactggtacagcggccagcgggaagtcgagtggcagcaatacgtccgacacagcgattgagaagacttatctttgcttcgtgaacagaaaaggaagagaagaggttgctgactacttcattgatgcgcttggatgccgaaaaggaacctcctcctcgcaaatgacgaccggactactgcggagtcttcggaacttcgttcgctcgaggccgaacatttcccatgcgcaggtcgagatcaagcagggcgtggttgattacatgcaatccctccctgaggacatgcccttggtccgactcgacgaagtggttcaagcggcaagagcgaaggtcgcccctcagttgcactctgaatttgatgacctaaagagctacctcaatagcgaggcgcaagggatccacgcggaattcaccctcagcagagcggccctgaaggcgcacattcgaattaatgccaagaaatcgaattggggactttggttcgagacatcggctgtcggcacacagaactcagaactcctctatagcgttgaaagaaaaacccttactcttacttccctaccgactgatacagtcgagggtatcgaagaaacactgcgagcccgtggtcagatgtga

SEQ ID NO: 513327 - DNA, 1368 bp, Stenotrophomonas maltophilia
atggagcgcatggacgatcttgagcagttcgttgaaggcagtcgcctgctgggagtcggctattggaccgacaagccacgtgaaattgttcatccccgtgtcgtaagaaacgatggtgtgactgcggtgtactgccacagtcatcccaatcagaaggatgggccctatcttcccctggacagtttcctgcgtgagctagttttgcgcactccagggctagtcgcagctggataccgagccaatgggcagccaacgacgatctccttcgataagaggaatagggtcgaaatctcgcctgagctgcattcctatctttctaaattcgtcattccgccccattttgacgccgacgctgaacatttcagagatcgtttccttaatgaaaacaattctctacttcatgcgtggctgccgaactatcgccgcactatcgattcagtgagtgatgctgtgcgtcgcggagtagtcgctaacgttatcgatacgatttggatggagcaggacaattccattagtcatgcgggccgaggaaccctcggaagggcggacgtcgaccgtgcacgctctcgcctaatccaattgaccgagaagatcgcagctgatggcacaccggcgaacttccagcgcttggcggcggacttggatagattgtcagcggatggcctgatctctaagaagccacacctcgtcttggctagagcatttgcggccatccatcccgataggtatcacactgtcgtcgacagggagaaacagaaggatgctatcgaatggtttgctcgacatacaggattcatcaatccgggtggcaattgggcgaaccaggcggccgcactgtcggcacacctgaccgaatgtgatcttgcggacgactatcatgtcagaaacctcttcccttggttcgtcttccgcaacttggcctccgagtccggaagagtgaaattcttgccagggcatagatcccgtgttgcgagcggcaccgcagaggtagaggtagggttgaggtcgatccagtacaggcagaacgtcattcaagaccgccttatcgatttgcttcatgagaaatttggtgacttggtagcgtccgagcatccaacaggcacggggggctctgcggacgcgctcgcccttaagcaggatggccagttcgtcctctacgagatcaagccagccaagacagcctccagtgcggtgaggcaggccttgggacagttgctggaatactcttaccgtgggaacggcctggaggcggcggcactggttgttgtgtcaaacgcacctcttgactgcataacggcagagtatcttgagcgcctgcgtgtgcagttcggtctcccacttgagtacatgcaagttgcggatgactga

SEQ ID NO: 513328 - DNA, 1005 bp, Stenotrophomonas maltophilia
atgcagaacgacgccatcgccgcagttcctatgcctccccccgtcctgaagggaccgaagcgtcagcactatttgccgcgcttcttcttgcagggattcattggccaggatcaatgccttgccgtctatgacaggtccactgaccagatgcgccgccagcaacccttgaataccggagcggtagggcacctctacacaattaacgacgaagacggcaggcagcgcttcgaatgggaacaagccctcggcaggatcgaaagcgatgcgtctcgcatttttccgatactcctcggtgggaacccgttgcaagacgatgccagggcagcgattgctctgtttgttggaacgctcgctgtccggacgccggagtttatacagagcgttggtgaagctaccggccagcttgtgaagatccttactcaaacggcttttgccaacgatgagagggcacttgcctcgctgcgcggatgcccagaatttgctggtctcgatgaaggggaaatgcgagagagagcagaggggctggccgatttcaccgcgcgcggagacttcacagtgaacgttgaccaccagtggtcggtgtctatggcattgccaatgggacagcacatcgcgcaggtgctggctacccgccattggtccgtactagaggctcctgccggcgcagcttttgtggtcagtgacgccccggtagttctgacaactttctcccctcagccttcctgggccggagtcggatttggatcagcggaagcacttgtgttggtgcctcttgatagcacccacgccttggccatgtacggattgaagcgcagcaattcacatcgaaagattgatcggcgcttggtgaggagcatcaatttgaacgtcgcgagacactctcagcgcttcttgctcggccgggacaacgcgcttgtggagacgattgcgcgcgcatcctgcttagatcaaacaagatggacgccaaagttccatctggcaacgggcaggggcggatcaaagtaa

SEQ ID NO: 513329 - DNA, 708 bp, Stenotrophomonas maltophilia
atgcgcggttcatgcatatcgaagaaagaggcggagccggccgataagccgggttctgtcgtggacagtcattcctctaggcgttacgtcaccgcaacgctcaagcaacctacccggatccaacgcgggccgcgccaaaggatccctatttggtcttgctccaggtggggtttgccgtgccggtctgttaccagactcgcggtgcgctcttaccgcaccatttcacccttaccggccttccgaagaagacgtaggcggtatctttctgttgcactttccgtcggcttgcgccgcccaggcgttacctggcaccttgccctatggagcccggactttcctcggcacccccgaagggatgacgcgactgtctggccgactccgccagcgcgcattctagcgtacgcacgcctttcctgccgtgccgatcgcggcgtccggttcatccatccacgcgtggcgtggatctaccgatgccgctgccttggtgggtgcggattccgatctggtgggtgcggaccttggtccgcacgatccatcaactaccgtacagcgccttgcgcggcgcaccggtcagttccgcagccagcttggcggcggtcgacggcggcaggtgctcgctcagcttcgcgtagacgcggcgaccatgcgccagctgcgcttcctcgtcgtcaccggcaccctgcaccatcaccacgaactcgcccttga

SEQ ID NO: 513330 - DNA, 318 bp, Stenotrophomonas maltophilia
atgaccgctttcgcacagaccatggaagacatgcaggcagagatcgcccgcctgcgcgctgagctgcagaacgccgccaaggccgcgctcgatgccgtggcgctgtcctgcgagaaggagcgcgaggctgatgcgctgcgcgctgaggtgaaggagctgcggcgcactgaggctcggtatcggtggctccagaagcagaccccttatcgcctcggaaagattcaggccgcctgcgtgatcgacgcggtggacacgctctacttcaaggccgacgaatttgacagccaggtagacgccgcaatgggagcatccgcatga

SEQ ID NO: 513331 - DNA, 285 bp, Stenotrophomonas maltophilia
atgagcagtaagcacatcccaggtccgtgggtgatcgacaaggtttcaggaggctggggggttcgcgccccgaactggggctatgtggctatccatgacaccagcgggctgccgcacttcgatgaaaggcaagaggccaatcgccgcctgattgccgccgcgcctgagctgttggaagcgctgcaggtggcagagctggctcttcgtgagcgcggtctgcgcgcatgcggcgagtacaagcagattgaagccgccatcgccaaggccacgggagaaggcgaatga

SEQ ID NO: 513332 - DNA, 360 bp, Stenotrophomonas maltophilia
atgttgactgaattcggcaaggcgctccggaagctgcggatagatttcagcctcacgcttggtgggctcggggagctgctcggggtgagtgctgcgtacctgtccgctgtggaaacgggccgcaagccagtcccgtcggcgcttctaccgaagctgcagagtcatctgcgtctcggcgaagcggccatgcgggatttggaagtcgcggcagctaagcagatgaatgaggtggttgtggggctaggcaaccatcggagtgatagagcaaaggagcttgctgtggcctttgcgcggagattcgacaccatggacgcggaggaggtggaaaagatgttggcccaattggaaaagctcaaatga

SEQ ID NO: 513333 - DNA, 540 bp, Stenotrophomonas maltophilia
atgagtggctattgcttccaagtgccgccgttgagtacggaaaagatcactgccagggcagattttctccgaaaaactctggcggttgagaccgatcggtttcccttgattgaagtggttgagtactggttcccagctctgtgggaagccttttcgcttcaggtacgcgagaagtcagagatgggtagcgcgcatggcctcacgttcccagagactgctgaaatctggttgcgtgaggacgtgtacgagggcttcctcgccgatcagccccgggatcgatttaccgtggcccacgaggtaggacacctgttgttgcacaacggtgttgggttggcgaggagcatgaggaagccgagtgaactcaaggcctatgagaactcggagtggcaggccaacacctttgcgggtgcgcttctgatcccgacggcgactgcgcagcgcctgaggaatgaatcggaactggctgacgcatgtaacgtcagcgtggatgccgcgagggttcgactcgcatctctccgccaacgggggatgctgaagtaa

SEQ ID NO: 513334 - DNA, 258 bp, Stenotrophomonas maltophilia
atgtgttcggtgggcttggagccgccaccaatttcttgcttgactcgactaaccggggattctaactacatccgggccgtctggcaagaatcaaatctggctccagaaggaggtgtgacatgcccgatggaaattcatccggcccccaaggggttccgatgggtctactgccgctatcgccgagtgcgtaactcagagcgcgtgctggacgcccacgactacggctatgaagcctggcgcttcctggtccgttgctaa

SEQ ID NO: 513335 - DNA, 1287 bp, Stenotrophomonas maltophilia
ttggctgcctgggaagatctgacaactacggcgccgtactcgcgcctgctggatgcgttggtcggcgactgtgccgatgtgcggaggttcgggggaagcatttctatctcgagggcactgtacgggctggggatcccttgcgggctgcctacctcgaagagacatttggcgataccggctgcagtcgcggcagaaaagctgaacgaagcaattcatgccacgagctttaggcgagtgcatttgatgccgcttgatatggccgatagcctgcctaccctgtcgtttggcaacgcgaccattggtcgtatgactgcgtcagagctgcgccagcttgttgatctagaccgcatggagcgtatttacccggatcacgggtttgatctggggcagttcgcccagttccattggttggtagtgcatgaggagatcccagtagctcgcggacctgaagggcgtgagctgtttcgcttgcgacttgatccacttgaggattacggtcgaattgagccgcaccgaggcgcgtaccctgaggctgttgagaccgcactcttctggctcgccttggcgccttgggagcagttcaccgatgcaccagatatcgactggcgagggatgcagattccctgggcttacacggtggaccatgatcttttttcagctatgaagcggccaccgagccccgacagcctctcatggcaggatagggttatccaggacgagtgcggacgccctgtggatgtggtcagtccggccgcgatgtggctatcggacgactccggtgatgcgctagtggagtacttcagcgctagagagcacgcgatttcttgtttgccgcaatttcagctgttcaagactccgattgttcacttcttcacacgagcgtttctcacccatgggattgatgagttcatggcacatatgctcgttattgaggccggacttggtctgccggaagactacaagcgaaagtcgagcactggagcaaagctgcacgagagccatggcgcaacggagagagtctcggcgcggttgtcggtgatccttgaaccaagcgctgtgagcgaatacagggagctcttcaaaattcgcagtgagttcttgcatggccgacccatgcaggtaattcctggaacccagcgcatcgcagcacgcattcttgcaaggcgcgtcgtggatgctttggtggccgccagcgtgaacgatcaagcccttgaaagggggccgttccttgacgatctgctcgaacgaggcgttctcatggacagttcacggccccagatcgcttag

SEQ ID NO: 513336 - DNA, 1080 bp, Stenotrophomonas maltophilia
atgggcggtcgggaggcgattcgcggcttcgctattcagacgttggtctgcattcttgattcgcttcgggacggtcgcgattggtcggacgttaccattgagcctgattctggaaacgagaaagtggatgtcatttggacaaacgctgacgggtctcgactcgctcagcaagtaaagtcgtcgaagaatcagattaataaggcgagcgtagttttgtggtgcagtgagttaaagcagtcaaaatcggccgataagtatcagctgattttgtcgggccctgtcgcggcgactgtcttgttggagcagcccttcgatgatgttgaggttcctacgcctgcttcttttgacgccctggcgctgattgatcaagcaatgactgggcttgatcgatttctggacaggaacggcatcgggacccttccgctagctcttcgggagtccattgttcacgagctgtccggaaagctcctaattggctcaatccatggcaaaaccatggggcgttctgattttgaaggatggctgttcaagtgtgtgctggattcttatccgcaggctataagtcagcgcctgagcgagaattgtgtcgtcttgtggaattttgttgagctatcaggtgaggtgggtgaggaaagatctttcgagatggccattcccttaactgttgtgaatggcggcacctttacagccgtgatagaggggttcttgctaagagtccgctcgccctcgtccgaaatgagatacgtatcttcgtgtgttattgattctgcgcagaataggaattacatggagaggaggttggagagtgttcctttcggcgacattgcggtactgccaaactcatcttcagctgtctatttggtcttctcctcgctcaggtcgatgcaaagtgatggctggaggtggtcgcctgggacctacaagtttgagcttcttgttaaatactccacgtctgcgctccccgtactcgtcagggttgccgacgtcgcgataagccacgaagagttctcagtatttcagtccggtgctaccaagtgcgtgtctcttagaggatccactgcttggtggaccttcgactaa

SEQ ID NO: 513337 - DNA, 1770 bp, Stenotrophomonas maltophilia
atgaactttcctgtaattccccaaaacctctccatttcggcaatgcggagctcgggttatagagacacagcgcatgctcttgcggagattatcgacaattcgatccaggctggtgacggcttggaaggtcgcaccgaggtcgaggtcatatgcattgaagaccagcaaccttccggacgccgacagatctcaaagattgctgtattcgataacgcttgcggtatggatagttcctcgcttcgccaagcactgcaatttggtaacggctcccgactggagaagtcgaagcaaaatggaataggaaagttcggcatgggattgcctaactcgtcgatttcccagtgccgtcgacttgatgtgtggacttggcgcgacggcaatgtgctgcatgcctacattgacgtcaatgagattagcaaagggatcatgacggaggtgcctgcgcccaagcccgatgaaattccgcaggagtggtccaatctaatcgcttgcgagatcggcccccacgggactctggtagtgtggtcagatcttgatcgaacgacctggaagcagagcactactctgttgcgacatactgagttcatcagtggccgcgcctaccgccatttcattaacgatcagacggttagaattcgtttggcggcctatgaggcaaagtcgaatgcaaccattcaacagtgcttcgtacgtgccaacgacccgctttacctcatggtaggagccaatgcgcccgcaccctacgatgtaacgcccgcattcgtgccattctgtgatccggttcgtctcgagatctcgcacgccggcgcgctccatccagttaccatcgtcgcctcgatctgcaagcgtgaaacgcgaaatgacggtggtggaacgtcgataggccaacatgcgcagaagaatcaagggatctcggtagtccgagcgaagagagagctcgagctcaatacctcctttacaagctcctacgacacgcgtgagcgttggtggggtattgaggtgctattcgagcctgggctggatgatgtctttggggtgaccaacaacaagcagtctgccactgggtttacacgtctcagcttggaagaagacgctgcggaggagaaactcactactcaggagtacaaggacaaactcgaggctgaaagcgatcctcggctcgccatgtactacatcagcagggagattgagaagctcctcactgcgatccggcctcaagtgctgaaaatgagagagggcactagggcttccggttccaatgagcgggccgaggcgaaggcagagaaggcggcttcgcaatcagttgccagaagaagaggtcgcatcggtgatacgggccagagcgacaaggaagagggcgcccccgtaaacgaacgcacgtctcttctggctgcggaaattcttcaggatggggttgacaaggccaaggcggaggagatcgcagtggattatgtaaaaaagaaaataaagtttaggtttaagcatggtgcgattcctccgtcgcacatctttgacgtgtcgaccttgggtggcgtcattttgattaccctcaatacccggcaccccgtccatgaaagcctgttccacgcgcttcttgaggagaacgtcgattcgtctgatctaaaccacgctaggcagattctttcgctgatcgccgcgtgggctcggcttgaagacgaagctccgagcgagaaaatgcgacaatcgattgaggatgttcgcatgcagtggggacgtatggcgatggatttttttgagtctgaggcgtga

SEQ ID NO: 513338 - DNA, 1698 bp, Stenotrophomonas maltophilia
atgctgcctgacaaggacggggtacacgaaacgcaacaggtggcgcctgcagcggagccctctcgaatggtagagcacctagcgaggagctcatcgtcagcgcttgagtctttgctcgggcacgccacggtggaactgctgcagcgctttgggccagaggcgacaacgcgcggctccttggcgtactttatcgtcagtgtctatgggcgtcggggttgtctgcggcggaaagagattcgcgaactgttactcaagggactgcgatcagaagagtcgtccgatctttgcttggcactacatttgccagacgtgtggccgagtcatacgctcgaaggcgtcaattttagcgtaggtaccgacaacctcgaggggctggagcgctggtatgagatcgatcgagatgaggtcgatacgccctatgagggcggggagggctcccatcgggccgtcgcgacccaccagctatggggtcatcaattgagggcatttcaggagattcgccaaaagatctccaatccagaacggtccgtactcgtgcacatgccatacggatccggcaagctgaggcttgttgcgacggtcgtgactgatctttacagatcagagtcaagtgaaaaatcaataatttggtttgctccaggtgcggcgctttgcgaagaagcgtttacagaactaagcagcgtatggcgtcagctcggatcgagggacgtaaccatcacgaaactgtacggtgcacataagcaggtatatatcgcagagacagagtgtgctggatcgtcagagacgccgcgatgggacctgtctcgaattaagggccagatagctgtggtggacatcctggctctcaggggtgatgacccggggttgagcgcgataggcgagttcgcttcttccgtggtattcgctgacgcggaatgtctggttcacaaagtcggaaccgatatccttaatagaatccgttcgggcggaaagttcacaactatcgggatgatcgcggcttcggcgagtgcgatccccgaaccaagtaagaaggtgcttggtcagctattcaaggagaactacatagccttagacgctgagggtgagctactttcaatccgtgagtctggacatttctcggatgtcaaggttgaggcaatcgacgtcagtagtgcgatcaacgcaagcccattgccttcatcctcaagccttgagcaagatgaattggaatatggggccgactatgtgcgcggactcgcgacgtctgttgagcgcaatgaaaggatcttgtcaattcttaagggcgagaactccaagagtggaaaggtcattttctatgccgcaacctccgagagtgcacgtcttttcgccggtctcctcaacatgggaggtatcaaggctaggtctgttacttcggatgagtccccggagtcgagaaagattgggattcaacgattcaatgccaggccggagaaagttctctgtgttcacgggttctttgtttctggtacggagatcgaagatgtctctgtctgcattgtggcaatgcttggcaagtcccgagcaaacgtgacctccatggtgggcagattggtgcagggcagaaaagcgtccgcaaagcctctgaggctgattgttgcatctgacagggcgggagatcatgcctgggtaagtcagattagtgagtggtccgtgcttaacgataaggagtggaaatga

SEQ ID NO: 513339 - DNA, 1155 bp, Stenotrophomonas maltophilia
atgaatttcccaagtcccatctacgctgactacgcatcctccgcgccaccattgcccgaggtcgtagaggccatgatggaatggctagggggatctcatgcaaatcctcatgccgaccacctgccagggcatcgggcagctagggctatcgatgatgcgcggcaccacatcgcggatcttcttgatgctgatccggagggagtgatcttcacctctggagcgaccgagtcaaacaatctagccctgaagggccttgtaggctgctgtagcggggggatctacttcagtccattggaccacagttcgatcgtagaagtggcgaattatctcagcgtttccggcaaatgcaggaccggggtgctggagcatgatgcgcaaggaagtatctctgctgcagccgtgtcgtctgcgcttggaagtggccaaggcaggtcgctcgttgcgattgcgcatggaaacaacgaaattggaaccatccaggcgctgtccgcgattgggaacgtcatcgcaaccgcggggcacctacttcatgtggacgcctcccaaactgcggcccatgtcccgatctccgtctcggacatgcagatcagttcccttagcatctccggtcacaaactctatggtcctgccgggataggagctctatggttggagcccgcgctgagaaatgaactgctaccaatctttcacgggggggggcaacagggcggaacgcgatcgggaaccgttcccacctacttggctgtcgggctaggggttgcggctaggctcgcacgcgaccgtatggagcatagtcgcgcacacctgcaggcgatggcttctcagttcctagtagcccttgcaagcaggggcttccctccgcttatcatcggtcacccttcggagagattgccggggcaccttagccttcggttcccgggggcggatgcacaagagttgctgaccatgctcatgccgaaggttgcgttctcaaccggggccgcttgcgctgctggtgaacttaggccatctagagtgctccatgcgcttggtgtggaggaagactgcgcgcgggaagttatgagattctcctttgggcgctcaagtgaggccagcgatgtggcgctggcagttgagcacatcgtaaatgccatgcataaccttcagactcgatag

SEQ ID NO: 513340 - DNA, 3354 bp, Stenotrophomonas maltophilia
atgagcttttcgcagacctattcaggaaggcttatggcaagtaattcgcgcccattggtgcaggtggcctcgcgctttcagcgttcggtgcagctcgagtccgatcttggccgagaggacgctctcgatggctatgtgctacacggcagtggcgagcttgcccttgagacgactgcgcgctatgtgagtacttcgcagcagcgtgcattcacctggactggaccttacggcggcggtaagtcgacgcttgcgctggcccttgcgcaactagcaggtgggacgccgccagtgcgaaagcgcgcgaagttggcgctgggtttggacgctgctaatgaggtgacgcgcgcatttggcgggcgcaaaccatggactgtgatcccgttggtgggccgtcgccagtcgcttgagtctgctctgagccaggcaatcgataagtacgctcccctccgtggcgccaagcgtatgcgtgacggcgcccgagacgtggtcagtgagctggtgaagcgcgcggagaatccagacgcgggcggaatccttgtcattcttgacgagatgggcaagctcctggaagcggctgctgcggctggcgaagacatctatctgctgcaggagcttgccgaggcggctagtcgttgcgacgggcggcttgtcatcgtgggcgtgctgcatcaagccttcgaacagtacgtcggcaggtcccaccgaggcatccaagcggagtgggccaaggtccaggggcgatttgtggacatccccgtggtggctggtacagatgaggtcatcagcctgattggcggtgccattgaatcaggtcaggagcatgcaaagtctttcaaggtcagtcgttcgattgctgatcagattaggctgaggcgtccgtcctccccgccgacgcttgccgctgccctggacgcgtgctggccacttcaccctgtcacggcggctctgctaggcccgtgctcgcgtcgccggttcgggcagaacgaacgcagtgtgttcggcttcctgagctcggctgagcctctggggttccaagagttcctgcgaggtcaggcgggcggaatctcagtcgtttacagtcctgcgcgcttctgggactaccttcgcgtgaacttcgagcctgccatcttagcgtcggccgatggacatcgttgggcagttgctagtgaggcaatcgagcgagtcgaggcacgctaccaagaaccgcatgtggcgttgatcaagacaatcgcgttgatcgacatgttccgaaacggttctggcgtagcagcgaccaatgaagtcctgcagcagagcgttcctggacatagcgcgaaggagatcgcggccgctctaggggatcttgttaactcgagcgtcgctgtgtatcgaaagcaccagtcagcatgggcggtctatgccggcagcgatttcgacattgaagcggccgtcgagcaggtcaaggaaaagcgtactctttcgattgaccagcagttcaagcaagtcggtacattgccggcgctgagcgcgcgaaagcactacttccttactggaacgctgcgctggttcgaacgcgtagttgccaccccgaaggcggccgctgagatgcttgattcccctaaggggtcgactgcgggacggttcattctgcttgttccggacgaggatacttcaccgaagtcactccatgacgcggcagtggctttggctggacgcagcagggattcgcttaacgccatcggtgttccgaagctccacttaggcttggcggatcaggcgactgagctggcggcgttggagcaggtggccaagactaccccacagctggaaggcgattccgtagccaggcgtgagatttccgcgcggttggagcatgctcgacactcgcttgatgccgacctgcgcgaggcattttcaacagctacctggcacatcggtacagatgtgctgacgagcacggttgacgatggcctttcccccattgccagcatcgtgtgtgaccgcgcgttccacaagtcgcccctggtttttagtgagctagtcaatcgcaacaatttgtcctcaaatgccgcgaaggctcagcggcttctgatgcatcgcatgctatcgcacgcccatcagccggaactggggttcgagggctatcccgctgaagcaggcctctaccacaccatcctcgccccgttgcagctccatggtccaaatggcgcaaccacaggcttccggacgctggcacagctggaggagatgggtggttccagcatcgtggcgctctggcaagactggaaggctcagttagtacagtcgcggtccgcggtgtcattggctgcgctgtttgagactgcgcaacgtgagccttacggtgtacgtagcggtgtcctccccatcttcgctatggccttcttcttggctcaccgtagtgagatcaccttgtatatcgatggcatgttcacgccggagatgagtgacgctgactcggacgcatggctgcaggatgcgtctcgaattggttggaaatggctccacatcgacgagagctcgcggaagatgctgcggcacctcgctcgccgccttgagcccatcgcggaacggcctgttcaggctgatccgctggactcagctagggcgttggtggcctgggcattctcgctgcccacgtggacccgtaaaacaatgtccatcagcgaggctgctcggaacgtgcgctcggtactgctgcgtgcctctgatccactcaagacgattttcgttgatctgcctgaggcgctcgaactcaagcctggcaaggaaatcgttgatgtcatcatcagcgttgttaatgaactcgacactgcgtacgaacaagtgcttaggaagctaggggatcagttgttgatttccctggcccactcagggcctctgtcccggctcaggacgcgtgcgaaggcgatcgcgggcagaacaggtgagttccgaattgatgcatttgtttcaagattggctgagtatgatggactcacgacccagaacgagagtcttgcgtcgctggctaccaatcgggctgcgcgtgacttcactgaccaggacgtcgaacgcgcaggtatccagcttgctgattgggcgttccagttccgacgcttggagctgcttgcctctgttcagggtcgtccgtcgggtcgccgagccttggccgtcgcttttggcagccagaggaccgtcagtgcctctttcgacgttgcagacgaagatcgcgaactgatcgagcaggtgcgtgacgtgatactggcggcggcccagagagaggggctgaccaaggagctctacctcgccgccctcgcagaggcgggcgcagtgatgctagatgaaaaagttgagacggaggctcacagtggctga

SEQ ID NO: 513341 - DNA, 933 bp, Stenotrophomonas maltophilia
atgacctcgataccgcttcctaaatctgttcagttttctggccacgaaacgtttcctcttcggcagctttggttgcgtaaggcgtacgacgccgctgcggagggtgaaggtcgcacggcgaaggaggtctttgctccggaggtgggaatccgtcgtttcggggtaggtaagaacatggtcgcctctatccgtcactgggctatggcctgtgatgtcatcgctgaggcgtcggacgggcgcatttcgattgcccccacagcacaagccatattcggccgtgacggccttgatccattcctggagcgtccggcaaccgcttggtgggtccattggctgctggccggcagggcacagcgctccacctcatggtggtgggttttcaatcaaggggttcagcacggttttgacgtcgaactcctcactgactcgctcaaagcggcagttgagcaggccggatacaagacctcacgggtaaccctcaagcgtgacgttgaggtgtgcttgcgttgctatgtgaccaagcgggacggtcgcggtggagatgaagccgccgaaccgctcttgtctgagttggggctcatcacagaaggcggcggggggaccttctcgttcttgcgaggcacgcatggatcattacctgaaggcatctttgcgatggcactgctggagttctgggctgaccgcgattcgcgacttggcaccggccaagccacgctctcttttgagacaatttctcacgagtacggttccccaggcagagtgttcaagctcgatgagcgaggcgtcgaggaccggcttgcaggactcgaatcactgaccgacggtcagctcaggtggactgataccgcaggggtgagacaggtcagtcgtcagattcgcggagctcatgatgagcttttcgcagacctattcaggaaggcttatggcaagtaa

SEQ ID NO: 513342 - DNA, 945 bp, Stenotrophomonas maltophilia
atgagtagttctacctccccttcggacgttgtagagctctaccgcaacaaaaacgtggcttcctaccgtgtcccggcaactgtggagggcgccgacggtcgcaagtacaacgtgggcgagagaatcgatgcgggcgggaatgccgtcgttcaccgatgccaagaggcgatcagtggcgacgagtacgcgatcaaatttcaggtggagttcggtcgtggtggagcgcgccggcggaggtttgagcgcgaggtggccttgctgagaagcctggacgacgagcacatcatcaaatggatcactgacggcagcgttgatacagtggcgcagtctggcggaggccctcggaatgcgcggcatcggcgtggagcgaactcatccggacattgggcgtctggcaagccaatcagtattccgtttgtagtactggaggtggctgaccggcacctccaagcgcatgtaaaggcggagggcacgattgccccttctgtctacctaccgcagttcatcgggcttgcccgtgccctggtgaagatcaatagcatggctctccaccgtgacatcaagcccgagaacattctcgtcgtgagggacaagtgggtcatcagcgacttcggcttgtgcgacctagggggtgaaggtgccgatctaaccggaccggaagagaaggtagggcctgcgttctggatgtccccggaggcatcgaatcagcgactcggctgcaaagatctcatcggacagcaatctgatgtgtttcagcttgcttcggtcttctggtatgtcgcgtgcggcaggcacccgaccggcattgtgcgatcaacggactggcgcggagagagtagcgcgctatttggcgtgcttgagcaggcgctgctgcattgtggccagtctaggttcacgacaagcgagtctttcagtactgcgatccgcggtgcagtactgccatag

SEQ ID NO: 513343 - DNA, 1365 bp, Stenotrophomonas maltophilia
atgacacggaaatggacatctagtcagcattcgattgctgacattcgcgactggaacagtgccaacaccttgatgcttcagccgaactaccagcgccgcgaggtctggggcgatgcagcaaaggttatgctcatcgatagcatcctcgccggcattccgatgccgaagatcttcgtggcgcagacgatcaaggaggatcggacctaccggagtgtgattgatggtcagcagagaatcacaacgattctagacttcatcagtaacgggtttgtgcttcgcccgccctacacaggtgagtacgttgggttggcctacaaggacctccctgctgtcgtccgggatgatttcctgctctaccagatcgacttcaaccaggcggccggcctctctgacgaggagctaagagaggtgtactccagggtcaacaagtatctggttccgctcaatcgccaggagctccgcaaggcggacttccctggcgacttcttgacggctgcggagacgctagccaacgctgaggtgtttgatgacgcagggctgtttagtgccgctgcgcgtcgacgatctctggacgttgagttcgtatgtgagttgcttgcggcgcaacttgaaggtgtcggcgataagaaggacgcaatcgacgcctgttgtctgaagtacaccaagtggcctgcggaccagcgcgcaggctttgagaaagagttcgtcgaagtgcgggacgacatcctcgcgatgctgggttcacctcagctcttgaagaagtcccgttggaggcagaaggcggacttctattccctcttcgttgcagtgcttggcttgcgtcgggaaggctatcgccttcccgaggacttgcggcctgttagggatgatctgtcaatgcttgaccgattcatcgcgccaagctccgagtccccccttctgcgtagctatgggatttactgtgtctcccaggcgaattcctcgtcaagtcgcaagtggagaagcaattttctgtccgctgtgttgaccgggacgtactgcggatcaatggcggacgcgttccagcgagagactgtcgcctcgctactcattgaaatccggtaccttctggatgaagtcggtggggaggatgggtgctcgtcattcccattcttcacgtgcccaggttgcggccgcggagatgccgatacgtgggacgtatcaaagttggcggtgctctggcctgcagggaccaccagctattgcatgtctaatgcgcagtgggtgcacaccggttgtatcgacaagctcagcgattccatcgtgattgagctagccgattatctatcggaagatgaggacgaagaagagcagttctcaatttctgggggcggtgaacatgagtag

SEQ ID NO: 513344 - DNA, 1191 bp, Stenotrophomonas maltophilia
atggcaaagacactcaacaccaaagcagccggtctggatctggtcgaccgcttgtaccgcaaccaattgctggtagatctagcattctcagaggacgagcgcgactgccttgtcgaaatcgccaagctggcacggggactgctgctcaaggagggatactccgacctggaactggaacgcgccgttcactgcgttctgacctgcattgagtcgcaggtggcggacaacttgatagaccacgtggacaggtacggactcgatatcccgctgcccgaggatctcgacagggagacgtatgatcgcgctgaatcattctcacgggactatgcgaccgcaagcttcctcgcctacggaaccatggggagcgaagacacatctggaattgttcgcgtcgtcaatgccctcgtccaaatctgtgcagacctgccggccttactcaggcatcgcctcgcagagcgggtcttcgctgcagagttcccgcttgcatcactggagattctgacgtggctcgcccgtaacgacattctggttccggcaaagtacaggggaactagtggcctccagcattcgcttggaccggtctcgatccgcgcagtctcgctctggcagcaggacaacattcggctcgtgattcagtcgagcatgccgggacacgactccaccgtgattcaccggaccatcagccaaggatttgccaagcacctcagtgaggcggggatgatctggatcgccgaggttctcaggactgagacaaagcgagcccgcagtcgatccgctaagcgcgtgccttacatcgacccaggtcaatgggaggatagcaactacctccaatccacactgaagaacctgcgcacctttgcgccttggtcccgggcggaactgtgtgcccagtcaactgtggtcagcgacatcggggcatcactattggcccgagccaaactgatgaacagcacaaggggcctaattcgaggcgatgaactcaagccgacgctgtccgatgaaatatcgctagtggtcaaccagcacggatttcagatgagcgcgaggacgatgtacaaccgcctcaaggagtacgaagttcgcgccgacagaatcattcgctgttgctcggtgatgcgagaggccggcatgacctatccagtggagtatccggacttctatcgcatgttccagattgccatgaccgcatga

SEQ ID NO: 513345 - DNA, 183 bp, Stenotrophomonas maltophilia
atgccagttagcgtcaaagttaagtatcagatcaggatcaagggctactccttgcgcatcgtagggccaatcagcatcgcggctccagcgagaacggaaagtgcggtgctcgaggcagtccgaaagcgcgagtatgcggacaagaagcaagtagaaagcctcgtcatcctgagcattcagtag

SEQ ID NO: 513346 - DNA, 759 bp, Stenotrophomonas maltophilia
atggcataccgtgacgacgttgatcttcacttccttggcgaaatgaagtcccaagacctgaacgatctggtccactgcctcacgcacgacaaagacggttcgcctcgccttactgaggagttgaccgtcaatgagaagttcaagcggtacaacccggaccaccaccagtactgggaactagtcgcggcggaaattcagtgcttcggcgccaacactttcgcaaccatgttccgcggaggaaagggtgttcagtacaaggaagttctaatggacgtgtgctcaaagatgaaggtgaactacaacaaggactcaagcgttgagaagattgaaagcaatcttctgatgaagatcctcaccgatgcgctcgagaagatgggtccggaggaactgagggaactcgccgagatcactggcgtcaagaacacaagcggactcactgcagagacgatggtgggtgtcttccaggcggtgttccgtatgggcggctttaagtcctaccagctgacgctaatcgtcgtcaacgcggtcctgcgcgcactcatcggtcgcggtctatcgttcgccggcaacgtcgccctgaccaggacgatggcgctgctcaccggacctatcggctgggccatcacaggcatctggacggcgatagatgttgccggggcagcctaccgagtgaccatccccgcagtcattcaagtcgctgcgctgcgccagaagcatctctacgagaatcaggttcaggacgtcaattttacgaactga

SEQ ID NO: 513347 - DNA, 933 bp, Stenotrophomonas maltophilia
atgcccgacggaccaacttggagtaagcgcgttttggcccagcccatcgtcatccaactccaggagttggcatcggacagcagtcacgacgtcagcgacttgctccgcaaggcgctgatggtggccaccaagcttgaactgggcgagttccgcgagtggattctcgccgaactcagaggctattcggggaccagccgggacaacttgcccgactatcggatcatccgtggcgacctgcgggtttacaatccttaccatggattgcagcccttcatcgtgccgcaggagttgcacgaggccgctactgtcatcaatgtgactgagtccgtggcctccttgtgcgagttagcgtccgggaagacgcaaggtgagatcgtctatccgtttgcacctacgcaggagcgcgtcctgatgtcgatacagggaggtctcacccagcttcgaccaacgcgagtggtgggcgccaataggctgaaggcaatcatcaataccgtgcgcacacatatcttggaatgggcactctcgctggaggcggaagctatagtgggcgatggactttcattttcggcaagcgagaagcaggcggccatgaatagccagaacatccgtatcgagaacttccaggggatcctcggcaacgtgcagggcgggtcggtgacccagagtaacacccagcatatcgtcgcctcggacttctcgtcgctggctcgctatctggccgagaagggcgtcaaggaggctgaaatcaaagacttagaactggccgtgcgcgacgatcctgagcccggcaagggaggaagcttcgggccgagggtgagtgcctggatgggaaagatggtgaccctagcagctactggaggctgggaggtgagcgtggcgaccgctggcggcgtgttagccgcagcgttaagcaagttctatgggttcagctga

SEQ ID NO: 513348 - DNA, 132 bp, Stenotrophomonas maltophilia
atgctggccctcgtcgagcgtgccgtggtgatgcgcaacggcaggatcatcatggacggtccattggagcaggtggtgcagggcaaccaggtgcagccgatcgccgcggtcgcaggggggcatcatggttga

SEQ ID NO: 513349 - DNA, 366 bp, Stenotrophomonas maltophilia
atgctgtttgatcaattgatgatgtttacgacagttcctgaggagcgctttcggagcattgcctcgctgttggttcgggagggcagtgctccggagtggttcgctggcctgcactacatccactggtcgggaaagaccaaggatctgctactggcttccccttgcattggcgacgccttgctgcttgatgatcacggtccttacgtgcatccagggcaggagcacctgtggattcaagccccgctgtttggatcgccctatccggcggaggacgatggtctcagcatcgcaatgggatgcctactcgagcgtgttgatccgagtggaggaaagcggatattcacgacttcacgccggcccagttga

SEQ ID NO: 513350 - DNA, 1971 bp, Stenotrophomonas maltophilia
atgcggtttctgaatttcccggatcgcaatgatctatgggtggtcaagtggtacgacaaacgccaacagatgcatgaacttagcggatccccgagcatagaggttctgctgcagcggatcgacattcaagattccaaagcgcttcgccggatgactcatgctgaggttggagcttttctggcgcgccagccgtactcacaaagcggaaccttccgtatcgcccgactggatgagagctccatgccggctatccgtaatggccaggtctatcgtgcagggaggcaagtcggcgatctcccctcgtccgtcatcacgttgaacatgcctggtggagagaggctgatgcgagaggtaaccctcggcgaggagttgcacccgcggccgaaggaatggacttacaactaccgcttgctcaatccctcgcagtatgaattgctccgcgactacgacggctcgagatgcatcgttcgcacgatcaagcaccgggatcgcgacgtcgatgtggtgatcccaagatctttgattgaacaagtcttctacttcccagactcagtgatcattcgagcagctggaaagggcggctgggaccagtacgaggatcaactagtcgttcgcaagagactggaaaatggacttgagacgggcatctgcccagacacaggctcatggaagatcgtcctacgcaccgaggtgcgagatcagcatgccatcatgatggccctcttttctcacagcccgtatgcgcgcgagagagctaaccaaatatcctcaagggcgctcgctgagcgaaggctggatcgtcatgcagcgtggaatgcttcaggtcagattccatgggatccggccttcggctcctacatgcttaggcttagagggttcatgctcagtagcgtgccacgcaagggctcggacacttttctggcctgtcacatcgccggcatgacagcacctgagcatctgcccgtggttcgacacgagcgtgagaatagcaatcgcgagggacagaatggggatatagatcgagaaagatctcgtggaggcaagtcggagaagcgaggagatcccaatcgcaacatcgtgcctggaagacactctaatccgcatgagggcaatgaagggttcgatacaacggccacatcctggctaattcagcctcgcatgtggaagcaggagaaggacagccatatttcgctggagactccgcctgcccagccgaacttgaatcccaaccaagccaacgaagcgtcaagcggcccaagtagtgggcaggccggaaaccctggcaaagccagcatgcatgccccaccgactcccgccgtggccacctttgtccatctagaggatgctcttcagttgttgctagaggagggattcatcgagcacttcgccttcgtagaacctccatacgttgcgcaaagggaagaccgcggcgggctcggttgctggaatttcctctcccacgaagtacgcgagaacgcgcagaaatctggccaccttccaggtcgcggctggtcaatcctcaatcccagagattggcctaggaggcctcgcgcagcgctggtgctgcgaattgagcttcgtagtacggttgtccactggattgagatcgaacgtcgacactatgaaacgggaatgcgctctcccgtcttggcaaatctcccggagaatttggctgattcgttcattgattacactctgcatcagatttcggagaatgaagggatcgacttggccggggtcctacgcaacgttgtggagcctttcggcgcaccggtgcgcgctgccttgtatcaacactcctaccgcactgagaaggtttccgtcgcctctgccagcacgcctacgcctgaagaatcgaagcgcgaccttgggcccagtccttctgagcgtatgtccaatatccttgggatgaagctagattcaatcaaagcaattctgcttcgcataagcggcccgggcgacaagggctag

SEQ ID NO: 513351 - DNA, 1518 bp, Stenotrophomonas maltophilia
atgattgagatgccaagagtgccggcacagcggtggtgtgataactgcggaaggcaggtgcagagaatgcaccgcttccaccggggaaagggttactgctctgtatgctacccctccgagtttccagcagtaccctgtactggctgcctcggcatagcccgtatgcatcgacgagattcatcgccagcgctgtgcggcggctgtcgtcgcgcgaggcggacttgccatcgctgtggaaagccggtacccaaggcgggactgaaagtgggggccgacgccgtggtctgtcccgcgtgtgctccccactttcggggagaggagccctgctcgaactgtggtcgtctcagtagtaggctgacctggggcggcgaaggtgatctgaaggcccgcgtgtgccagccgtgtaggaatgaatcaacctacgccacctgcgtccactgtcgacgctaccgtccggttgctggattgtcgtctgaaggccgagctcactgcagtcactgtggacccgctggggaggcttggcatgagtgtccaggctgcggaatggcggtatccggcagtggagcgggccagtgtcgacactgtctgaatcaagcgcggctgcggcgagaggcgcggcttgtagcggcagctctttcccaatcatgggtggtgaccttggtcgacggcttcgccgaatggctgatcgccagggacagcgctagcccgaagttgccaaagacgttcatctcccatctgcccttcttccaagtgttggatcaaagcatcgagtccgcagagaggcttgtcccacagaccatgatggatgagttcacagtccggggactgcgtcggcacttgctacctctggagttcctgaggcatgaggtcggtctggagatcacgaaagagatgaagacttatcacgtggaaacggcacggatcatggcgatcctggagagagcggagactggcggctgggggaatgatctgattcggttcaatcagtggctgattcaagagcagaagcccgtgcgcactcgacgtctttacgtctccgcggcggacagactgatgcgctctgccggcatcaacgtgttgacccagcttgaccaagagacggtcgatcatcatttggccgatactccatctgcgaggaacgacgttggcgctgttctccgcttcgcgaagatcgtcctgaaccttaggattgtcctcccggctcgaaagctcccacgtgaacaggcaccgaagccgcttgcggaaatgcgtgcactactcaagaagatcaggggagggacggagctagttcagatccagcatctagagcgggtgatatctcttgcgatgcgaataccgttaagggcgatcgctgtaggtgactggtggccagagctgcgtgggcggcggtggttcgttatctcacggtgggaggctgtcacctgtcccatggagcttgaggacattcttgagatatgggctagttcgggtgataggaccccagtcactcagcagcttgacgcagggtctatcgcttga

SEQ ID NO: 513352 - DNA, 1062 bp, Stenotrophomonas maltophilia
atggctgggacgttgtcgcccggtcagtctgagacgtttcccttccaccggggtgtcctgccggtggaaggggaactgctgagttcgtacttgctgcgcctggcggatgctcacagcgcggaccactaccggttctattcctcacttctgcctggcgcgcaaatatggaatagggacatcgatagagcgatgagcgggcagttggcgcagctacttatccagcgatgcgagctcagtgcggaagtggtgagcggactatcgcttgcggagtacgaggcgctgatatccgctggcggtaaatgccatcctgccggtcgcagcatgtggataaactcggtcggaatctttcaccgaactcgaacgttgggtggactgcaggtctgccctatgtgtctcgctcaagcgcgggtctacaagcgaatatggcgcctgtcctttgtgacctgctgtccggagcatctcattcccctgcagtcagtctgcccaggttgttcggcacccatcgttcctcatcgacaactcgtgggcacaactacctgtcattcttgtcatgtggaccacatcgcgcgatcgcaattcacagaggggagctgcactatcccgccaggtcagcgaatgctcatcgacgcgctagctggaaaggagatttccacgcttggcgccggagttccgttgcgggatctcgtgaaaggcgtgggtctgctacgtcgatggggcatgcttcgtgtgccaatttccctcaagggaagtccgattgagacgcaaagcccaatcaggcgggcgatctacttcgatctccttcatgagctgaccagtcgctggccgaattcgatgaacctgcttgcagtccgaggtcgagtctcccgccagaccttcgagagcgcgagtccgccggactggcttgtatgcatgggtggagagctctcgacacgggcaagatcaagagcgaaagcaaaagggcgaagtgatctttcgtcctacctcagacaattgcaggctacaaagccagccggatggagagaactgagggcgtcggctttgacaagggcagcaatggaatga

SEQ ID NO: 513353 - DNA, 885 bp, Stenotrophomonas maltophilia
atgagcgtcgaacatctattgcccgaggtcgctgcgattctggaggagcccaaccagagtcgaattgagttctgtcgccaagaccgatgggtggggtacaccgctgcaacaaaggcgttggatgagctggatgatctgcggaacttccccaagaacctgcggccgaacaacatcctcctcgttgctcgcagcggaaacggaaagagctccatcttggactactttgccaaccgacaccccatagggataaccaatgaagggaagccggttgtgccagtgttgaagctggagatgcctagcaagccagatgagtcggaattctggtcactcattctgtggatactcgggatatcccatcgcgaaagtgatcgcacagcacataagaagcggcaggcgaaatctgcgatggtttatgccaatgtccagatgttggcactcgacgaattcaataacgttgctgaggctggccgtgcaacggccgatcttctggcggctataagaaacctaagtaacgaactccgaattccgatcgtcgctgccggtaccgagaaagcaatcaacgctctcaatctggatccgcagttgaagtcccgcttcgagcctatcggcttgccacaatggaagctggaccgagagtaccgaggcttcttggcggcgtacgaacagcttcttccattggtcaaaccctcaggtctggccagccgcgagctcgctacgactctctttgcaatggctggtggcaccgtggggcagaacgtgaagctcctgcgccgggcgagcgtggaggccatcgagtcgggaactgagcaaattaccccggagctacttaggggcctggagtggacccgcgctgatggctgggacgttgtcgcccggtcagtctga

SEQ ID NO: 513354 - DNA, 1941 bp, Stenotrophomonas maltophilia
gtgatcggagcatcccgaaagttctttgcaatcgctcctggtgttgaggtaagcagcgaggggcgtcgctatgtcgtgactcacgtgatgactcctagcagtgttttggctaaggacctaggcacaggccaaagccagacactgagagtcgagacactcacgcgagttgttgagtccgactctgacgaagagaaggcagatcgtgacctcgccctgtattcggacgaggagtgggcagaggggcaacgtcggctttctttcatcaagccgttggtagagatgcctgttcgagagcgtgcggacgtggaggcaatggccaagctggctggagtccactacaccacgctctacaagtggctcaaggcgtttctcctcacgggacatgtctcctcattggtccccggaaaggctgggcgtaagactggaacacgcatgctgagtatggagcaggaagcagtaattcagtctgcaatcgaggataagtacctttccggtgaccgaggtacggctcaggatgttgtcgatgaggtgaggcatcggtgccatcgaatgaagctgaagatgccaagccacattacgatccgagcgcgcatcaaggacatcccgaaggctatggccctgcgaaagcgggggctgagggacgatgcgcgagataggtatgagccgatcagaggctcgttccccggggcggatcatccatacagcgttgtccagatcgatcacacaccggccaatgtgatcgttgtggacgaggttagccgtctcccgatcggcaggccttacttgacgctcgcgattgatgtcaaaactcgtctggtagcagggctctatctgtcgatggacccgccatcgtccgttgcagttggtatctgcctgtctcaagccatctgtcagaagcgggagtacttggcaaatctgggcgtaggtggagagtggccggtgtggggcgtcatgggcaaagtgcattcggacaacgctaaagagttccgctccaaggcgctctctcgtgcctgtgcggaacacggcatcgaccttcagtaccggaagaagaagacgccgcactacggaggacacatcgagcgtctgatgggaactgctgctcgaatcttcctgggcctacccggaaagaccttctccaaccctaaggagcgtaagggctacgattcagaggctaaggcggcgatgacgctcaaggagttggaggcgtatcttgttgactacatcgtcaacaagtatcacaagagcgttcattccgggattgggatgacgccattggcagcttgggagcgagggattgctggctcggaaacggagccgggtattggtctgctgccccttccggaggacccggcgcgcgtacagttggacttcatgccctatgaagaacggactatccagcgatacggttaccagtgggacaatgtgcattattacgacagtgtgctggacccctacatcaatagtgtcgatccgaacagcaagaagaagaccaagtacctggtccggcgtgacccccgggatattagtgtgacctacttcttggaccctgccgacaaccgatacactgccgtcaggtaccggaatgtggcacatcccgcgatcagcctttgggaactcaatgctgctgcggttcgcatgcgggaggaggggctcaggggcgtcgacgaggaccagttgttcgccacagtgggcaggcttcgccagcgagttgacgatgcactgcaggctaccaagtccgccaaggcggctcgtcgctccgcagctcggaggccgccgggcgaaagaccgatcgccaccaagcagccctcgcgtgcggtgcacattccggccgctgcgaatgacgggaacatccatggacagctcgtcggaccagagcagccattcggcgacgatccatttgctgaccctatcactccattcaacgtggccttgaagcgatga

SEQ ID NO: 513355 - DNA, 549 bp, Stenotrophomonas maltophilia
ttggagcaggacctgctcgagctactggatttcgacgcgcgggtgtcggaggtgttggtccagccattcaccatctttcacgtcgaggacggacgccgtcgtccctatacccccgacgtaagggcaagctacattggcgttggtggcgaggtggttgtctacgaagtgaagtatcaggaagagctcaggaagaactgggcgaagtaccgcgcgcgtttcggtgcggcctaccgctactgccgagacaatggttggcgcttcaagttgatgaccgaaaggcacatccgcaccccgtatctggcaaacgtgaaattcctgagacggttcctgcgcctaccggagcaggagctgatctccgggcagttgctctacacactcagggcccttggccccacaaccgcccaggcgttactggccgcgacgtacatgtcagcagacagcaggctgcgtgccatacctatgctttggaaattggtcggtgatggccggatcgcggctgagctgggtgagccactgactatggcatcggtgatttggatggagtcttga

SEQ ID NO: 513356 - DNA, 357 bp, Stenotrophomonas maltophilia
atgcaatggatgaccttcagctgtccgctctgcggcgctgccgggcaacggtttccactgcgctctgcaggcaaacgccaggcgaggacggcatgccgcgggtgtggcgtggtgctgcgctcggacccacgcctgggcatgcattcgctctatctgctgtacacacagttcatcgccatgctggctgtatttcccatgatctgggcctacaccctgggtcgatggttctggctgacggcgatctgggccctggtatcggcgctgtgctggctgcccggcatgatcaggcatgcacgcagccggatctgccgcgccacgccggatccgaatcgaagctacgctcgacgcaggccctag

SEQ ID NO: 513357 - DNA, 1068 bp, Stenotrophomonas maltophilia
atgtctcaaagtgcggaactggcttacgagcagtttaagaacatagatctgtcggatccgttctttgacagcctcaaggctgactacgaagaatttccgacgtggtttcagaaaaaatcagaagaacgggcctatatcttcaagcgtgacaagggcgggatcgacgggttcctttacctcaagacggaggatggaccgatagatgacgtgtcgcctcccctgccagctgaacggcggatcaaagtcggcacattcaagctcaattcaattggatctcgcttgggcgagcgctttcttaagaaggtgttcgaccatgccatccaccatggcatagctttgatctatgtgacggtgtttgccaagcacgacggcttgattcgcttatttgagcggcatggtttcatcaacgtcgcaagcaagacatcccaaaacggtgaagaactggtcctgcagaaggacttcaaagcggcctacaccgacgcagtaacgagctatcccagcatccccgtgggaaacaaccgatgctacttgctgtctctctatccggagtggcacacgcggttgcttccggactccattctgcgaacggaaaatcaggacttggtgcaggatgtgtctcataccaacagcatccataaggtgtacttaacagcgatgcagggcacggaaggcctgaagccgaacgatgtcttggtcatctaccgccctgcaccgaacaaaggcaaagcttggttcgagtcagtcgcaacgagcataggtgttgtggaagaatcgagacatatcagcaccttcaagacaaaggaggaattcaaagcgtactgcagcccctacagcatcttcactgaagcggaactagacggcttctggcgcacgggcaggtatccgaacatcttcaagttcacatacaatgtcgcgctgaagaagcgacccaatcgcgctcgactgatcgaggaagtcggtctctcgagagatgcgtactatggcttcatgcagttgacctttgagcagctacaccacattgcccaactaggcgaaatcgatgaaagtcttattgtcaatcaagcctga

SEQ ID NO: 513358 - DNA, 375 bp, Stenotrophomonas maltophilia
atgaaagtcttattgtcaatcaagcctgagtacgcagagaagattctcgacggacgaaagcgctttgagtttcggaaggcacttcctaaggcgaagggtgtcaccactgtcgtgatctacgccacgatgccagttggaaagatcatcggtgaatttgaagtcgatagatgcatgtctcatcgcccaaaggatctgtgggcaatgactcatgagttttctgggattacaaagactttcttcaactcgtattttaagggacggagcacagcgcatgctttcaaggtaaagtccgccaagcgctacgactctccaattaccttgacagaactgattggcacgaccgctgctccgcagtcctttcgctatttgacatag

SEQ ID NO: 513359 - DNA, 417 bp, Stenotrophomonas maltophilia
atgtgcccgccctgctcgcggatgcgcaccaactggcgcatcaggtcggtcggtttgccgtcagatggtgccgctttgcgcaccgcctcgcggaacacacccggcagcgtgggcgccgctcggcccagcggcataccgatcaaaccggagcaacgacgccatctggtttcgcagtccggcacccagctcacgaaatcagccttcgacagcgcctggcaacgcctggtccgccgcgcggttgtggaagacgtgatcgataaggaccagcggttcgcgctccatggcttggaacatcggggaattaccgacagcgaggataagagcgctggcggccacgtgaccgaggccatgcgtcagctgtacgaccattccgtaccggtggtgaaagcggccgtgaaaccagaaaagaggggctaa

SEQ ID NO: 513360 - DNA, 1134 bp, Stenotrophomonas maltophilia
atgagccggcgtgtgttgttcgtgttgatgctggtgtgcgcgctggccgtgctgatgccacgggcatgggcgcagtggccgccggagacacatcccaccgatcagagccgggacatcgtgatgtcgtgggaccgctcggccgtgcccggcgacgtggagctgtgggcgccgaggacggtgctggggttcagtcatgacgtggcgatgaagtacgggcagatccatgtggtgtgtgggtcattcacggacccagagttcggcagatgccggacggaagggattggaggggagctcaccgttccctcggaggttgtcattcgcttggttgagcaaagaacgggtctacgaaacgacattcgcatggtcgggtatctggagcgttcgatgaccgaccgcagttgcacgggtgacttctggcaaccgggggtccggccgctatttgcatcacgcttggactattgcggtaccggcgaagcaattggtaccggcgccgcgttgaccttgtcagaagctgagctggcgcgacttgtcgcaggccactggaaggccacgatgcgcctgaacatcaaggccgacccagccgcagctcctgtcgccaccgccaccttcaacttcgatttcaccgtcaccgactacgacgcgatctcgatctacttcccggccttcgacaccattgcgccgctggtcaacatggacctgcgctacgaccccatcaagcagatggtgggcggccgcaagcagctggagatgtgcctctacgacggcctcggctcgcagagcgagttcctcggcgtcaccgtgcgcgacagcgggccgcgcccgccacccggcagcgacttcgcggtctggcaccgcgatggtggcagcgacgaccgccagcgcctggactaccacgtcagcctgaactacggcgggcgcgatatccgcatgcggcatggcgtggaagaactgctgcatggcatcgacagcgccgaactgcgcctggtgatgctgcccggcatcagccagccggtctattgcgtgcccacgccgctgacattgctgacacctcccacccctgtcgccagcaagcgccccggtctctacgagggcgagctgacggtggaactgcgcgtacccaccgccaaaccctga

SEQ ID NO: 513361 - DNA, 1521 bp, Stenotrophomonas maltophilia
atgccccgcgctctccccctcaccgcactgctgctggccgcattggccagtgcgcccgcctccgcttcgatcacggtggccccgcagaagccatcggccaccgccgatgcagtacacgcggcgtacgccacgcgctgggatgaagccatccagcaggcacgcggcggcaacacgctgggtgcactgatcagcatggagcggctgatggaggatcctttgctggacgacttcgatgccgagcgtcgcggccgcgcctcgcaggtcgccggctggaccgctctgatgcagaagaagccggatcaggcccgccgctacctgcagcgggcgcaggaggccctgccggaggatgcacagatcctgctcaccctggtgtcggtggaactgtcggacaaccagccggccgcagccaccaccttgctggtgaaggcactgcggcacgccgacgcgccgctgccgatcgatcaccacgcggtcaactacctgcagtaccgcctgcgtgaccagccgcagaagcgcatggacctgctgcaggcgctgtttgacaacggctggaagagtggcggcctggaacccaccgggctgtggctggcgctggccacgctgcaggccgacaacggccgtggcgacagcattccggccacgctggcgcgcatcgacagcccggccgagatcatccgcctgcgcagcgacaagcgcttcgatcgctatgtcgatcgcggtgacgcgcgtttcgatccagtgcaggcggcacagcgccacctcgatgaactacgtgtttccggcctgctcgaccgcgcactggacgcgcgcatggccgagttcagcaccaccttgctgatgctggaccgcaacgaggaagtgctgtcgttgaccgagggcatggccgctgccgccagcaacggcgaatcgcctgccgccacagaagcggaatgggtggcctggctgctcaacagccggctcaccgcactgcgccggctgggccgcaccgatgaggcactggccacggcgaagcaggccgcccgcatcggcgcgctcggcccggatggtgtcgagcaccagatgaatgtcggcttcgtgttcagttcgctgggacgcatgcaggacgctgcgcaggccgtgaatgacatgccgggcctcgccggttacggcaaggccgcacaggcgctgctgcagtttgccgccgcccgcgagcgcggtgatgccaaggcgcgcgatgcagcacgcgcggtgatcctggcccagcgcgacgatgcccgcctgttccaccgcgaaatgctgctggaagaaggcgacctggacggtgccgccgccgtcctgatcgaacagctgcgctcgccggttgaacgcggtgaaaccctggccagcctgcaggacatgcgcacctatccgtcattgccgggcgatgtgcgcatcgatgccgcgtggcgtgcactcaagcagcgtgccgacgtgcaggccgaagtggcacgcgtcggccgcatcgagcgctacgacctggtcagcacttccacctcgcgctga

SEQ ID NO: 513362 - DNA, 477 bp, Stenotrophomonas maltophilia
atggatgaggtgcgcgatgacttcggtatcggtctgcgattcgaaggtgtagcccatcgcgcgcagcctctcacgctgcgcttcgtggttctcgatgatgccgttgtgcaccagcgccacgccgtggctgatgtgcggatgcgcgttggcctcggtgacgcccccgtgggtggcccagcgggtgtggccgatgcccagcactgcattgaatccttcggcctcggccgccgtagccatttccaacacgcgaccggtgcgacgcacccggcgtacctcggggcgctcggtgtggtcgatcaccgcgatgccggaggaatcgtaaccgcggtactcaagccgcttcagaccctcgatcagcactggtaccacgtcgcgatcggcgattgcacccacgattccacacatgtcacgcgattccttgaagacgatcagcgcattctagcctgcgcgtccggcttccccctcctgtccgcttaa

SEQ ID NO: 513363 - DNA, 396 bp, Stenotrophomonas maltophilia
atgaaccaatttctgatccccttcgataccgacccgctggaaacgcgggagtggcgtgaatcgctgcaggcggtgatgcaggccggtggccggccacgcgcgcactacctgatcgatcagctgagcgggctggacgccccgcagcacggcgacctgcatacctgcgcatggacggcctacgtcaataccatcccgcccgaacgccagccggcctatccgggcgacctggccgtcgagcgccgcctgaacgcgatgatccgctggaacgtgatggtcatggtgctgcgtgctggatgcaggacgccatgggcaggtatggcatcgacaccggcaagcgcgacccggccccggtgtaaggcggcggtgttcaccacgcccgttgtgcgggcgtggtga

SEQ ID NO: 513364 - DNA, 483 bp, Stenotrophomonas maltophilia
atgatgatggatcaggtgcgcgatgacttcggtatcggtctgcgattcaaacgtgtagcccagcgcgcgcagcttctcgcgctgctcttcgtggttctcgatgatgccgttgtgcaccagggccacaccgtggctgatgtgcggatgtgcattggcctcggtgacaccgccgtgggtggcccagcgggtgtggccgatgcccagcaccgcattgaagccctcagtctcggccgccatggccatttccgacacgcggccggtacgacgcacccggcggacttccggacgctcgctctggtcgatcaccgcgatgcccgaggaatcgtagccacggtattcaaggcgcttcagaccctcgatcagtaccggtactacgtcgcgatcggcgattgcacccacgattccacacatgtcacgcgtttccttgaagacgattgccgcattctagcctgcgtgtccggcttccccctcctgtccgcttaa

SEQ ID NO: 513365 - DNA, 975 bp, Stenotrophomonas maltophilia
atggacagtcaatcgaacagtgcagccgcaccccaggaaggcaataaggggccttataccgtcacggtctacctcgctgccccgggcacacctgttgcaggcaaggatggcacgacccactcatcttcggcgggccatgcctacttcatggttgccgatggtgacaagaaagacggatatgggttctcgccgataaaaacggggatcaccgggcctgggcacgtggtgaagggggagttcgagacctaccagaaccctcggttctcctacacgctcgagatcaccaaggatcagtacgacaaattgaaggcgtacggcgaggcgagcgtcaatcgcgatcaggagcgcttcaatctctattacaacggtttgtcgaacagctgcgtcgattacgtgtggacgggccttggtcaggccggcctgcggcccaagttagagaagcccgatcccagcttcgaagggacgatgaaggtgcttccgaatattgatgcgctgaagagcattcccaagccgttccccgatagcaagctcaattcgacgcacgagaatcccctccccaagaagcaaaccacgttgcagaagctgttgaccgaggtggagggtgagcggcggccgcaagagcgtttggctgcgctgtcgccggaatcgcagcagctgtttgaccgcatgcgatcggagctgcctgagaaggtgagcgatgcgcaggtgatgtcagcgatggtcgctgcgcgggagaacggcattcaccagccgcgacagctgcgcgatgtggtgctgcaggaagagaagatcttcgtgatgggcacgacgcctggcttcagggccatggtggatctgaaccagcctcagcaaagccttgaggagggggtggcccgcagtcagcagatcgacacgcgagtggccgaacagacccgtcaggaaacgcagcagcgcgaggcggtggcccagacgtccggcggcattcagatgggctag

SEQ ID NO: 513366 - DNA, 1872 bp, Stenotrophomonas maltophilia
atgaaatccgtagttaacactgcccgctccaagtcaaagccaaaagttcgagtagctgccttcttcgctggcgcaggcggcctcgatttgggattcgaccaagcaggatttgacgtcgtatatgctacagacttcataccccagtgtactgagaccatcagagccaattcatcaaaatcaatccaatcggcaccagaagtcgtttgtgcagatattcgcacattgaagcagagcgacctaccttcggatattgattttgttattggcggtcctccctgccagtcattttcagcgtctggacgtagagctggaggcgcggccggaacactggactccagagggaccctgttcgaggcctattgtcgtgtcttatcctggctaaaacccaagggattccttttcgaaaacgttcgcggcatcctagcaacgaatgggggaaaagattgggcgcgaattcagcaggctttcaaagagctcggctatacaattagcttcagggttctagacgcacttgattacggcgctcctcagcagagagagagactatttctggtcggtcatcgagccgatcgctctttccttttccctgcccccctatttggaccagactcccaaagcgggcagccccatgtcaccgccggcagagctcttgagggagtagttcaaactgaggatgttgccgcactgtgcctcaaagatggcaagtacgcccatctgcttccgctcgtccccccgggtagcaactatcttcacttcacgtcgaagcgaggctatccgaatccggtcttcgcttataggtcacgattctccgactttctctacaaagccgaccccaatctcccaattaagacactaatcgcaagccccggaaagtacaccggaccgtttcactgggatagcagatacttttctgtggccgagtacaagcgccttcaaggcttccccgatgactatatcgtgacgggatccaggtccgatgcgatcaagcaaatcggaaactctgtaagcccgaagattgcattcgcccttgcacaatctattgccacccagatttttgacatagacaccggcattgagctcctgcctgcagatgcgccgctcagcttcgataagagaaaaagtgccaaggcgaggaatacgagaaggctgcacgcaatcgtagacgaatctaagggggccatggcaagttcattttctatattcgactacgagaccagaattgaaccaacactcgctcctgccggaaagaagaacaccaaagtcacaagagtaaaggatggcgtaaagatatctgttcgatcggatggctcaaagaagctattcgcgaaaatgacgatgcgcttacccggaattatgccgacatctgaaggtgaccccacagatggatacgttcgcatcgaagttttcggcgagtcgcctcattcaatccaaacaatgtggaacgcgatcgacgactgggtcatcagatccagtaatttccattcgcttttcgagctctacggccacttcactgaaccgcacccgattttcgaaattgataattttgttacccactcgactcatcctatcgcgacatttgccaagcactgctcaaagtttgagaattgttcgacccacttgaaaagatctcacttgacggatcttttcggatcatcccttggcacgaataattttcttgatatagtagagattctgagagggtatcgattcgacatccgctgctttgaaactaacattgcgatgcctaaagataagtacatggtggcataccccttcactctccctcatagaaagcagatgaacttctcagtaaagaggcggcagacggttcttcagaacgtgttgagccctcgcaatgacgagatgtattga

SEQ ID NO: 513367 - DNA, 1179 bp, Stenotrophomonas maltophilia
atgaatcgaccaccagaatctgagtgtaaggatctagcttccgtttacggaacggaagcggaaggacgaatcggggagcaggttctgaactgcttacagctggcgctttcatatgcggaagatgattacgcaaagggcgaggaagtaaatttcaaactcagcccacgactcaagtctgcgatagagaacctctccgcaaaatccgagacttccaccaccgctttcaccaacatcgtgacggccattagcataaagacagcgcgcccggaaattgatgtccgctaccatcaagttcagattcagaatcagaccaatcgaccagcgggattcaattttcggggcgtatccgagaagaacatttacccatggctatccaagaatgagtttaatggcgccaagtcgggatggcagacgcgcacattcgagcgcccaaagccatattttctttcgtatgacgaaaacattggaaccatcaagactagctttcttgaaatatacgacgagctagaatccggagattgcgatccatttgaagcgctacgatttctgatttacaagcaaattcaaatacgcgccaaaaaaggaataataatcgccgaaccaaagacgcgagatatagccactattgtgcgcatgctaacggagcacttttctcaaacatacaagaacaaaggcgcatcaagactgccagtcctagccttccacgcgatttacaccgttctggtgcgcgagatgcaacgctttcatggcatgtccatcagacctcttgaatcacattcagcggcagacgctcaaaccggcgcaattggggatattgagatagcaagaagcgatggatctatttttgaagcccttgagattaaacacaacatccctattgactccaccattattgagcatgtaaagcgcaaggtgatggataaatccgtcgatcgctactatgttcttaccacccatatcagcagcgataagcccggactggaggaagagttaacctcaatccaggcacgcttcggatgccaggtaatagttaatggagtgtaccgatccctttattattaccttcgcctattgtcggatccttcgagcttcgctccagagtatgccgcactattgaagaccgagagagccatcagcttcgaacaccgtgaagcttggaatagaatcgctatgggctag

SEQ ID NO: 513368 - DNA, 225 bp, Stenotrophomonas maltophilia
atgttctcggctgaagatgagcgcttgcacgcgcagactgtgcaagcgattacccgtcgtgtgcttcctggcaggccgcagtcgcgcaatgcgatgcttcagctgatcgacggggcgggccagctgcacctgcagttgcaggtcacgcccaaaggtgaggtgacgctgtcattcttggatgagcatgcagacatcgcgcgcgtggtctcggcggagcagctctga

SEQ ID NO: 513369 - DNA, 243 bp, Stenotrophomonas maltophilia
atggacaccatcgagctgcacgggctgaccttcaaggtcgagcacatccctgaccctgacgcgggtgcgccctgggagaacaacgacacgctgggcactgtgagcggctgggaatgccgcgaccactaccggggcagcgcgtggattggcgcgcactggtcgccctacaaccgccgctggtgcatcaacgtcctgccttgcgtgaccttgtgggtcgcgctgtcgggagggcgcgcaccgtga

SEQ ID NO: 513370 - DNA, 324 bp, Stenotrophomonas maltophilia
atgaatctcgacaagtacgcaccgaagatcgccgccgacatagcgcgggcgttggtggacctcgcgctcgccaagggctatgccatttccgtcaacgatggcgaggagtggacggtgaagcgtggacgcgaccggcagatggtgctggaagcgctggcgaccaccgacgccgacacgctggtattccgccgcgaggatggcagccgcgtcggtttcgtgtggctgatctggcagaacggggccgacgtagcgagcgactggagcgcaaacgaggacaccgacgcgctggtggagccggtgctgcgcgggctgggggtgctgtga

SEQ ID NO: 513371 - DNA, 288 bp, Stenotrophomonas maltophilia
atgccggtggtggtgatcgcgcccaacgacagcctgttggagaaggtgaagtcgaacatgcaggaagtgcgtgcgcgcggaggcgagctgttcgtgttcgccgaccaggatagccacttcatggagtccgagggcgttcatgtcatccgcacgccgaggcacgtgggcgcgctgagtgcagtggtgcacaccattccggtacagctgctcgcatatcacaccgcgctggcgcgaggtacggatgtcgacaagccgcgcaacctcgccaagagcgtcacagtggaatga

SEQ ID NO: 513372 - DNA, 195 bp, Stenotrophomonas maltophilia
atggatgccgcggccaagcccccatggacgggttacggcgtctcccgccatcggatccaccccgccatcccacaggaaaccagcttctgccgttgccgttgcttgaagcctccgcaggtgcagggcgcagccctgccgacacccccaacaggcagccggcgcccggaacaggtaccctatgccgccatcagatag

SEQ ID NO: 513373 - DNA, 636 bp, Stenotrophomonas maltophilia
atgggtcgaggcaggtggtgcggtgatccagagcaattcttccgtccgtggcgatctgcacggtgcttacctggtttccacccagatggccggcttcaccgtgcaaccctcaacgctggtcgtggacggctcacgcctcgaaggcaccacgggcagcgcgatctacgtggggcccagcttcagaagcgataccgatgtggatatcactctgcgcaacggcgccgagctgatcgctggcaacggtgtactgatcgacatccagcccaatacccgcgatccagcgctgaaagtccacgccgacgtggatgtcagcaacagccagttgcgcggcgatctccgcgccggtgccggggcaaccggttcgctggcgctgcgcgacaacgcatcgctggtcggcggcattaccggggcaatcgacgtcgctctcagccagggtggccagtggcagctcaacaagaacagcgatgtagcgagcctgagtgtcggcaacgatggcgtcgtcgccctcggcgacggctccgccttccacaccctcaacgtggctggcaacttcagcggcgccgatggcacgatcgtcttcaacaccgtactggccggcgacgacgcagccaccgacaagctgatcatcggcggtga

SEQ ID NO: 513374 - DNA, 540 bp, Stenotrophomonas maltophilia
atgatcagcttgtcggtggcggcactgtcgccggccaacacggtgttgaagatgatcgtgccaccggcgccgctgaagttgccggccacgttgaggctgtggaaggcggagccgtcgccgagcgcgatctcgccgccgctgcccagcgacaccgagccggtgctgctgctgccggtcagctgccaacgggcattgtccaccgccatcgacgtgatgttctcggtggcaccacgcagcgaggcgttattggtcaggccgacatcgacgatgctgccagcggtgttgatgatgttgccggagaggttggagtcgtcgacggtgaagccaacggtggcagcggccgcagtgacttccagcaggttgccgttgctgccgatcagctgcgcgccgttgcggacggtgaagcggacgtcggagtctgggatgcgcgccaatgtgggtgcggggacaatcagtgcggcacctgcgttgccttccaccctggaagcgtcgatgaccaccctggaggcgatggggctggtggaacttcctacggcgtag

SEQ ID NO: 513375 - DNA, 690 bp, Stenotrophomonas maltophilia
gtgaggttgccagcgccactccgcaatctcagtccatgcgacggccgaccgtattcttacggccatgcattcgccctccagcgctcccgatttcatgatagcccgccggccctcgggctgggtgcagagcggcgagcgctgggatctgtggtggaacggccgttcggtggccagtatcgtgccgcatgccgcgctcgggttccgtctgtacctggacgcacgcaagatgtcacaggtcaaggtcgtgtccgccaccagcacccgtcaggccaagcgctacgccgagcgctggtgtgctgcacggctctgcccgcagttgcctctgcgcgatgcggtggcgcgattggtggatgccggtactccaccgcctccggcgctcacgcgggaacagcggcagcaggcccggcgcctggccgaagccggggcaggggagatggggcggatcaaggaagcgctggcgccacggccgcgcatgacggccgccaggcccgaggtgcaggggcgaggtggagcctggtctgtaccaggccaggttccatcctccccgcgccgaaacgggaacacatccccagccagggctacgccgaaagctcctcacgtacgatcctcgcccccgcgctgagtgcgcgcagcttgcccctggccacgtcgcgcgccaacggcgccatgccacagttggtgctcgggtag

SEQ ID NO: 513376 - DNA, 195 bp, Stenotrophomonas maltophilia
atggacgccaagctgggccagaagctgacgtcagcggagagcgacaagatctggaacacaggctcatttcaggggcttgagatgattgacatggcgattcactacgcccaagccattgctgctcttgaagcatatctcgccggattgccggcgcgggatccgttgcctgagcgttatacaaagcgctttgattga

SEQ ID NO: 513377 - DNA, 894 bp, Stenotrophomonas maltophilia
atgtacccttacgggcagatagctctccccaaaggcttctttcatgcagacgagagcattgccacgcttgtcacgaagggcttcagctggactcactactttgaagagtcgagctttgacgaattcggctggtcgtttcccgaggagattcgccttatgggaagcatggtgatgtgcgaaaggcaggatgagccaacccccatactctacccactccaagagcccacgttcttgctggatccagcgactgttgacctcagtagttcgctcggccgaaatgcaattgttgatctaattaaggatgtaggtcgctggccattgcgaacccacatcgctaacggattcacccagaaagccgaggaaagaatttcgacctttgaccccacgagacttgagctggaacgcttggcgagtacctgggagcgcttacgtcccacggacttcgttctgttgcgaggtctttctgcgttgatcaagagcgacatgctgtcgcaacatccagaatttggcgcggaagctctcatgagcctgtacgtagcgctggagtgctcatttcagctggtcttgcaacgccttcgagaggacgggaaccccagtccatccgccagcgatgcggcgcggtggttgcacgacacttttgattcacatttcgactttgatcctccagattcttcatacaagtacttcgaagaattctatcaggggcgtatcaccgcatttcatccacgaaaccgattcggcgacttcccatttcctcccaatttctgggatgaccttattcatttacggaggtctctgcccggcatatttgcatttctgctacatggtagtcatagcgcatcatttcttgcgggggtcagggaatttcaggcgaagtggaatgggaaccactag

SEQ ID NO: 513378 - DNA, 1278 bp, Stenotrophomonas maltophilia
atgaagttcggctacagcgaagatgaggtccatgcacacatttatgccaaggggatcgaggcgctcatcgtcgactctaaagaattggatgatgcgttgagtgttgctatgccggtcgatgaaggggatgggcaagagggtggagagtttgcattttggaagattatcaagcagcgcgttctagagagaattcagcgaattcattgtagcgtgcgccatggaaggttcatcgggtcaaaagtcaagctcccaattgatagaagtcggccgatggagctggatctgcttggcgcacacgatgacggcatattcgtgctcgagctgaaagttgaccgctcgtctgagcggaatgcattctcggaacttctcgcgtatagccactacatcgcccagatgttcgctatgtccggtccggaagacatcactaacgttctcgttgcgccgatggacgtcaagatcacccggcaggcgttcttgtacgatctaatcgtcaccaatcgcaatgtcatcgtttacaatcctgtcctaaagggcagcacgctggatagcctggagcttcagcttttcgtcccgactgacgaggagtttagattcttcgccaatcgacttttgtcgcatgatgcgatggcgtgcgtggttgcttcattcccagacctggacgggtggtacgacagcaaagggagctcggttaatgactataccaagaagtttcttggcggtctcgcggggtacgcctctcagctcatggaggctgagcaattgcatgggtttgcatatattcgaaaatactggccggagctgccctttccttacaagaatgcactgattctttgcgcaataaatccattcttggttgcggatccggatcgtgcgaatgcgattaccgagcagctttcggaagatggtatttcggcacttctggagagtcctgagtactctttctatggtcgcgttatccggcttgcacagcgcgcaattgcggacagtcttgcgcatgggcaaagatcagagatagaactcccgcattggccaagcatgatcagatcgatcgttgaaacggctacttgcactaacttcgccttccgccctactggcctctttcgggaagcctatgtcgcccacataaaccgtctgcacgaacagaattcgggagggcaagtgcatgatctatcaagggtgaaaggcgaagacatcaacaattggctgaaggcctggatgttcatggaaatgtgtgggttcgatgattctcaggagatggaagaggagaacatggaatga

SEQ ID NO: 513379 - DNA, 1848 bp, Stenotrophomonas maltophilia
atgagatttcggctggacaagatcattgtcaagaatttcaagcgcattgagacacttgaagttgatctcagccctatcactgcgctggtagggggcaatacatgtggcaagagcagcgcgcttcaggctgcacagcttggcgtctcaatattgcaggcggctttccgcagaaaaagggcggacggcacctttgaatttcttgggaccgtcgcaaacgatgccgtactctttaggccgactgatcggcttcttgacctgcgccgcggtgagcctgcaacgcaaagcctgggattttcggttgcttatctaggcgtcgacttggatgccggtgccgacaagcaactcactatcggagtgcatcgagggaagaacgccaacatcgcgatcactcgcactggtgataacgacttggccgggttgctcgcagaccctgaacaccccttttcgattctgaccccaggcctttcaggtataccgcttagagaagagtggcgtacgaagggagcgattgatgcggccgtcatgcacggggacgcgaatctttaccttcgtactgtcctcgatcacttattcacgcgagatttggacgaaactgccagggccgcttggcgcaagagcagagacataaacattcttccgcctgacagtgggtggaagacattctccacgcttctggatcactgctacccgggtagtcgtgtcattgtcgggcataatccacaacacgataggtatgtctacgtagaagttgaatttgaaagctcgcgcgttactctcgatatggcctccacggggatgcttcaggtcattcagatcatcgcgtatacctgcttctatgcgccacctctcctgctgcttgatgagcccgatgcgcacttgcatgcagacagtcaaggccgcctatatgaggcgctaaagggggtcgcttccgccacccagacgcgtattctctttgccagtcattcgcctcaactgatccagcggatcatgtatgacccgaactctacggttgtatggatgagtgatggcgccaaggtgccagttgacgctacccagcgaccagccattccgatattgatgacgcttggcgcgctctctgtgggggcagatgccttcgaccctgcgaggccaatgatactcatgacagaggataagttggccaggcctgtgactgtattggcgaaggccaatggtgctccggagaacattgctgttctctcctacaacggctgcggaaatcttccggcggcaaggctactggcaaacatgatcactgacatgcggccagacgcacgaatcatcattcatcgagatagagactttaggacagagcaggagatgcagttcgagctgtccgttgccgatgcggaaaggcagcgtaatggaatcgcgcgggtgaaagaagtctttacgccttttaacgatgtggagcattccttcgcccagccgagtcacctcaaggccgtatttcagcagctcgatcctgacatgattgatgctgcgattacggatgtcacagcactgaggcgcgacgatttggtcaatgccgcgcgtgtagctcgcgagataattcgcgggtcaatctatgaggttcctcgaaagcgcgcaaagcccgagtgggcggtgtctggcatgccggacatcgcgccatctgtcaatcgcttccttccggcaaatggtcttatgccggtatcctttgaaaatgcgcacggaaagctattgatggatgggctccgtcccaaaattcatcactacgtaggaggtgcctctcaaatttcggacgcgcggatctacacgatcacagcacaccttcgcacccctgcttggcaagaagcattcggggcatga

SEQ ID NO: 513380 - DNA, 1911 bp, Stenotrophomonas maltophilia
atggaagcgactgataagcggatgcgagatgcagagcatgcccgccgactggcggacgagttcttagaatccataaggtctcgcatcgccggcgacctaatgtcacggacatttctttttcttgagatgcagcgcgtcctcgatgctaggagcttggcgccgagcagcagcgagggcgaacttgggcgcgtgcatcactattacatgctcaagtggggaatgaatttagcgactgcagagctactcggcgcgcttcccgtggtaggcatacctttggtggcatccacgccagatctaaagcgaacagcggaaggcctgctttgggagttcggtctgatatcgcttcttaggcaatgcgcagagaagattcgtgccggtcagattgatctgacggctggcgtcgcggaaggggatctcgtttttgcaggcaacgagtcaattcacttggaattgctggatcacttggaagaacggacatggagagcgttcgaggaagagtggactacgtcggactccgcgccgcacggatggacgttagttccgtccgatgtccaagtggagacgattcaagacgtcggtgccttttggcggaagccttccaagcagagggtgccccgtgacagtcgagaagaaattacccgcataatgggtaagttagtgcggccctggccgacgccgcatggggtttttattggatacgacgcggatcctcgggttgatgatttctactcaaccatcgcgagcgttgtgttggaagatgtgctgacagacggcggcatacatcccttgactcaatttgagggctttaccggtctcgatctggtgaaggttttaatcactctagtcggtatatacagaaagcatgttgacttttgcggtatagcgaagactgaccatccggaaatagccgtggttgattgcttgacgctttgggggcctcgccaagacctgttgcaagccatagctgacgaaatggacttggagccggatgtcgtcgatcgagtgctgcgttgcctaagtgtttcggcgaaggacgctgagcgactctctgctgagtcaacgccggtgcttccgatgcttatcgacttgggaaacggaatggtctttcgcccaatttctagtctcgacgcaaatccgtttggtacgttcaagatcatcgctcagtggcgccactcgggcgttgtgaatcaaatttctaaacgcagagaagaatggcttaggaacgatctcttttcgatatttggcgggcgcaggtatgtgtgcattgagcgtggagtcgtcatcaaggagggcaagagggttctcacagacattgatgctgcaatcttcgatcgcaccacaggcgagctcgctctttttcagctcaaatggcaggactacgacacccaaaatgtaaagcagcgagccagtcgggctaagaatttcgctgttgatgtcgacgcatgggccgaagccgtcggtcgctggttgggggaacaaggtcccgccggtgtcgcgcaagccatgcgattgaatatcaagaatggcgagttgcctatcgcggtgtttcttttcgtgctttcccgagacgtcgcgcgcacacaagcgtatgggcatcccatcaagagcccgtggctttccgcggcgacgtggccacagttccgtcgcgttcgcggtgaggtggggcccgcgactcgcgttttctccaagttgcacgaactgcttagagaggaagagcgtaaagtgttcgccggataccgttctagcgactatagggtcgttctgaaagacggaaaggtgctgagtttcacggggctttggtacagatccgaaggtgaagttgcagcaaaaaccgaagcagaagcagaagccggaactgaagccggaactgaagccggggcggaagcggctccgccggatttagcgcggtag

SEQ ID NO: 513381 - DNA, 1074 bp, Stenotrophomonas maltophilia
atgcacaccctcaagatcgcgaccgcctgcgcactgctgctaaccacgttgggcctggcatgctccgggcaggccgcaccgctttcctatgcacaggaaaaggagaacacagccaagctggtggacatcattgacggtgccacccgcgacggtctggttgccgtgctggtgccggccccatatgtcgtgcacaacggcgggccaggcgtcggctctccggtccccggctttcatctgggcaaccgctcgaccgacctacccgggttctcgacgcgggtgtccttccagcacgaggatattccctcccagggctatgtgcagctgttcaacaccaacgaactggaaaccggcccgcagaggacggtgttgatggacgtgttcgaggtgcatctgattccgccaggcacctatctgctgaacggtgcggagaactaccgcctgaacacccgcgtggccaagctgaagccgctggggaccacggacgaagtatcgaaggacatcggcgccacccgcctggccgacgtcgattaccgtttctattcctggaagaaggtctgggtaccacccggcgtcctgaccgatcagcactcccagcaggtctgcatctcggtgcatgtggcctccggcaactgcgtggcatggggcacccagaactacgaaacctcgcgcccgaccgaaggctactgggatgacaggattgtccctgaagacatccctgccgtacgcatccaggcggtcatcgccaaggcccacgcgccactggccttcactgcccgcgaagggcagatcctgctcagccccttcattgttgccgccgacggcgatatcgatttcaacgcgaacgactgcgcaccggtcgacaagctgacgggctgcgccctgcgccgcttcagggtgcactaccaacccgcgccgttggaggctgcacgcaagcacatcgcaattacctcgcgcggcctcaacggcacgcagcgcaaggtactggagcggatggaggcgatgcagctgcaggtgctgggtcccagtgcgccgtccgatgcggcgctgggcaagggcgtcagcgccacaccctga

SEQ ID NO: 513382 - DNA, 441 bp, Stenotrophomonas maltophilia
atgaatgccaaagacatctcaggagaaggcttggacgagcggcttacatcagcgctacctgccttgtatcaccgaattggccaatcactgattgatgccgtgcctaccgaccaatgcgagatctggctgaacttcgagatcatcaagaatgtctggtcgggttgggcgttctaccgcaagccgtcaggctcatacggctatctagaaattccagatgatgctgaagcagcgcttctggagatgcatcagctctttgcgcaatggcaccatgcactctggacgagtttgacgtttcatctggatccagagaacaagatggagatcgagctcggatatgagcagctttccgaggatgagttcatcgattccctgggccgggagcaggcttggcaggaccggtatctcggggttgacgctcagattgactggcagagctactaa

SEQ ID NO: 513383 - DNA, 168 bp, Stenotrophomonas maltophilia
atgcccatattgagaaccgggacgaacaacgccgtgcagaaggtcagcgacagcagccagaggccggcggcggactccgatggcattctcatgcggtgcaggtggaccaccagcatcgccatcggcatcagcagcgtcgaggccaggatgacccaggccaggccgtag

SEQ ID NO: 513384 - DNA, 615 bp, Stenotrophomonas maltophilia
ttgatttctgccttgcggctgacgttgcgtgccactgacgttgggtcgcgcgttacttttcttttcgcgaaaagaaaagtaacccaaagaaacgctccgccggccgcgagccggtgctacgcaccggttccctgcgctcctcggcccgtcgagggacggcgcgggaactcgctacgctcagacacccgcgcctcttcgccctcgccggacctgcggtgctcggctcgcttgaaggcggactcaacggcagctccgggcagatccacgccatgcgtggatgctcctgcttctgctctacctcgtattctcttcgcggctggcacgcgcgcgatctgtccggggtcaggcggttggggattgcgggggtgtccgccgcatgggcccgaggcatgcctcgggcgggttgggcaggacgcccaaccccggtcttgccgtttgcgcaggacagcgcaaacacgcaagcgcggccaagcctacacggacgtacttgcggcgtcccccgcaatccccactcgcctgacccaccccatgaccggctctccgcggccaaccgcaacgcgttcccctatgctccaacgcacacccctcggacaccccgcatgccgcccctgctga

SEQ ID NO: 513385 - DNA, 1185 bp, Stenotrophomonas maltophilia
atggctgatatggacgacgatgacctgttggaagcgttgggcgtcgaagcggcacccaacaaggccggcacccatacggccaagcaggagcggctgatcgcaggtttcgaggacatcttgcggttcgtggagacgcatggccgtgggccccagcacggcgaggaccgtgacattttcgaacggctgtatgccgtgcgtctggatcgcttgcgcggtatgcccgaggcgcgcgatcttctggcccccatggacacggccgggctgctggatggacaggtggctgcgaccgtcaatccggacgagctggacgaggatgccttgttggccgagctgggggtcgatgcgcccgctggtgaggatgacatcacccggctgcgccatgtggcctccttcgccgaacgaaaggcggcagaagagatcgccaatcgcacccgctgcgaagatttcgagaatttccagccgctgttcgagggcgtggaggccgacctcaaggagggaaggcgcaagaccttgcggttcgggcgcgacgccagcgttctgcaaggcaacttcttcatcctgggcgggcagatggcgtatgtcgccgaggttggcgagcccatccgtgccccgaatggggaagccgatgcccgcatgcgcgtcatctactccaatggcacggaaagcaacctgttgcaacgttcactgcagcgggcgctatacaaagacgagacggggcggcgtattaccgacgcggacaacgggccgctgttcggagacaccttggagcctgacgacatcgagagtgggaccatctatgtcctgcaaagcaggtccgatcacccatttgtgacccagcaccgcgagctggttcacaagattggtgtgacgggtgggaaggtggagacacgcgttgccgcagccaaagacgatgccacttatctgttggcggaggtggacattgtggctacttacaagctggcccatatcaaccgcacgaagctggaaaatctgttccacaagatcttcgcgcctgcgcagctggatctgactattgaagaccggttcggtaagcccgtaaagccgcgcgagtggttcctagtgccgctgcaggccattgacgaagcggtaagtcgtatccgggatggctcgatcacggactacatctacgatccgaaatcggcgcggctgaaagcgcagaagtag

SEQ ID NO: 513386 - DNA, 1038 bp, Stenotrophomonas maltophilia
atgctgggtggacagttgtgctatgcccgccggatctacaagttccagaagcagcctgacctgtcccagtcgaatttcgagtccgtgcttggtgtggcccgagagcttcgggagcgggaccctggctgcatgccgctcatcaccgatctgacttcgtttgtccaagtgggagacatcatgagcgtgtcggcggatcggcgcacgtcgtacatcgaggtcaaggaagggaagcacaataaacacgtcatggacctcgcgatgttctacgaggcctctggatgcgagacctttcgcgagatcgtcgagaaaacagagagtccgaagactctcaagcagatgggacgtgtgctacgccagaaggcgcgcatggctcacctgcgggatgtcatgcctaccggccaagcgaaggatccagacaccggagaggtggttcagatcccggagcccttcttccctatcaagaactgggacgagtcgttggcgaaacttactaagacggccaaggagaagcaaagctgggcatatgatgtgcaaggccccatcttcatgggcgcctacgcgggtgagttggccacccgcggacacattatgttcctcatggcattgagttttgagggggatgtggagcaggactaccacatcattcgattggcagactgcatgcatgtccctttggcgccgccggttttctcggcggatctggccgatgagatcaagatggatctggtctttgggcgaatgaatgtctgtatcgctgtttctattccacggctgatcgaagtgtgtgagatggcgggaatggacgtccgctacgcaacacgaaaagagctagggcgagcgagagcagagggtattgggccgatcgtttacaggggcaaggggctgatgttctcgcttgctggcgaggagatgatgctgttggagggggtgatcttccgtgccctgtttcatggtcaacagcctgagtcggttctgcggcagtatttggagaacagcgccctgatgagttcggactcagcggcgagtcgtccatcatga

SEQ ID NO: 513387 - DNA, 2691 bp, Stenotrophomonas maltophilia
atggagtttctggtaatcatcgggctgttgtggctcattggggcgattttcggcaacaagacgcccaaggcatcgcccgttgatccaaaggttgaggccgaggctcgcgccaatgctgcgctctggcaagcggccttcgacgagaagtacaagcgctggatcgagcaagccctgaccttcgcaggccagggacgctggatccccaaggggacggcaaagaggttcctggcgtcccatccggcccccaagcatcaggtgaagagctggcggcaggccgtgggcgacacctcgcccgaagagaccttgcgcctgcaattcgacaagctgaacacccagcaccttgcgcgccagaagatcgcacgcaaggacttcttcgccaccgtggagaagaacccactcaccgacgagcagatccacgcctgcgtgtgcatggatgacgcggtcatggtcgtggctgccgcgggctctggcaagacgtccacgatggtggccaagaccgggtatgccttgcatgaaggcctggccgcgccggagcagatcttgttgttggctttcaatcgagcaacggccgacgaagtaggacaacgcattgccgagcagctgaagggcgtaccgcaggtcgagaaggtcaggtccaacactttccacgccttcggcattgatgtcatcgccaaggctactggcaagaagccatcgctggccccgtgggtagaccccagtaatcccggcgccgacgtgcgggaggtgggcgacatcattcggatgctgtccgagcaggacaaggcattcaagcgcgactgggacctgttccggacggtgtacgctcgcgacgtaggcaagtggggccagcccgacgagccggaagcctacgccaatggcgtgcgaggctttcgaacggcccggggggaggtggtcaagagcaaggaagaacgcacgatcgccgactggctgttctacaacggcgtgaactatgagtacgaacgaccctacgaacacgagacggctgaccaccaacaccggcagtatttccccgacttctactaccccgacgccaagctctaccacgagcatttcgccctgaacgagaagggccaagcgcccaagcattttcaggactacctgtcaggcgtgaggtggaagcgtgagcttcacgccaggatggggacagcactgtttgagaccacatcgcatggtctgttgactggcgacgctatcctggccctggaacaagtactgattgagcggggcgtgcagcctgtctttgatccgagcaaggaagtcacaggcctgccgcctgtccacgagcaagacctggcccggtcgttccgggtgttccagcagcacgtgaagaacaatggcctgacccatcaggatctgctggcagcgctcaaagcccagtccaaggacggctttggtgcacgcctgcgaatgtacctgtccatctacgagcggattgcggccgaatgggagaagcgcctgcagcggggcaacttcatcgacttcgaggacatgctgatcctggccgcaggccatgtggagtccggggcctacaagagcccgtataccctcatattggctgatgagttccaggacagctcgcgagcccgtatccggctgttgaaggccttatccaatcaatccgatccgcccgcgcacctgtgcgtggtgggtgacgactggcagggtatcaatcgctttgcgggctcggacatcacggtgatgaccgagttcgagaagacgttcgacaacgccacgcgcctgtcgcttagtaccaccttccggtgcccccaggatctttgcgacgtgtccagccagttcgtccaggccaaccccgcgcagatcaaaaagaaggtcaagaccaccaacccgctgaccaagacccccatgctggcctatgggttcgcgaaccaggacagcattgccggctacgtcgaaaagcaactgggtcacatgcaccagttggcagttgaaggaaaggtgacgccggccaagggggcgcacatcaccgtcatgctcttggggcgctaccgtgatgacaaacccaccgcgctggagtcctggcaacgtaggttcggtgacaagttgaagatcgagttccgcaccgcccacggctccaaggggttagaggccgagtacgtattcgtcctcaacgtcgtggagggtacgcgcggcttccccagccagatccaagacgaccccgcgctgcagctggccatgccggcgccagaccagttcccgttcgccgaggaacgccgcctgttctacgtggccatgacccgcgctcgcaaacaggttcggctctatacaacactgggccagccctcgcggttcctggtggagctggccaagaaggaacacatcaggatcgagcccatcgacggcgaggccctggaaccatgcccggaatgcggtcggggggtcttgcagttgcggtcaggcccctatggcgatttccacggatgtagtcgctttccggcgtgtaccttcaagcgcaaggtggaccaaggcgcggccacgccaccccagcctagaacacaagcccagcggctgccggcaaataccagggcgggcgaccaatgccccgtgtgcagacgaggcgtcattcagtcgaggaacggccggaatggtccgttcctgggctgttctcgcttccgagaaggctgcaaagctactcggaacctatcgagctga

SEQ ID NO: 513388 - DNA, 399 bp, Stenotrophomonas maltophilia
atggatgcccaagaacggctggcagctgttcttggagcgggactagatgacgtaatcgatatcggcgggttcgacttggatgacctcgccgtgctcgccgtcaatgatgactgggccgaaggtgacgaagccacggacgaagaggtgcagtcctatgccaatgaatttttcatcaccaatcctgacgataaggacagcttgtattaccggaccgaaggactcgaagaaatcgaatcgacctcggtgaggcaggatttatgcgagttcttccctgagctggaactgagctacgagagtttcgaaacgtggcttagtgagtccattgccgagttgaagcggtcactactgagccaagttgccggccgtgggacaagtacgaccgaccccggaaaaatgtaa

SEQ ID NO: 513389 - DNA, 918 bp, Stenotrophomonas maltophilia
gtggagatcacttctcgctttgcccctcgttccacccgccgcggtggctcttccatccaactgaccaagggcgattgcctcgcccagctgaaaaagctgccggacgcttccgtcgatctggtgctgaccgacctgccctatggcaccacgggctgcaagtgggacacggtcatcgacttggccaccatgtggcgcgagctgtatcgcgtgggcacgcccgagtgcgtgtttgtcttcaccgcgcaatctcctttcaccttcgttctggcccagtccaacccttatgggttgaagcacctgcgccacacgatcgtgtgggagaagtccaacggcaccaatccgctgctggccaagcgccagcccatgaaggtgcatgaagacatcctggtgttctgccgcaagcaggctcgctacaacccacagatgatcgccggcaagccgttttccgcttcgaccggcaagttcacgggcgggcaagctggcggcatggcgggaatgccgcgcaaggccgccgaaaacaccggcacgcggtatccgcgttccgtccagttcttttcctgggagcgcggctggcaccccacgcaaaagcccgtggcgttgatggagtggttgatcaagacctactccaatccggggcacaccgtgctggacctgaccatgggctcgggcactacgggcgtggctgctgccaggacgggccggaactttatcggcttcgagctggacgcgcagtacatggccatcgcgcgtcgccggatcctttgcgcgcagaagggcaagcatgatccgcagccgacgcaggcctatcgccaagctaggccgcggatggagaccgtccggggtggcgcgaagttgctctccggtcgctcaaagcgcaccaccacggcgctgcggaaggaggtgcgtcatgtcgcatga

SEQ ID NO: 513390 - DNA, 453 bp, Stenotrophomonas maltophilia
gtggcaatcggtgccaacacccgcaccacgcaggagaacgaagtggcgatgggcggacgcaaagtcacgcaagttgccaatggttcgatctcccagggttcgaccgacgcgatcaatggtggccagttgtgggagatcatgcaaggaatgggtggctcgaacttcgacgaaaccttgtggaacgaccgttgggagaacatcaacagccgatttggcgaggttgatcgtcgcctcaacggtctaggcgcgcaaatgggcgccttgtcgatgatggcggccacgccaggcgatggtggggttaccgtcggcgttggcttctcgggcggcgaaaccgccctggccgtgggttggtcgcgtcgtctcaacgaccgcgtctcgatcgcagtgggtgcgtccttcggtggcggcaacaaggcggtcgtgggcgtgggcctgcggattggggggcgctaa

SEQ ID NO: 513391 - DNA, 837 bp, Stenotrophomonas maltophilia
atggacgacctgttctcggatctaaacgaccttccggttcctcccacgccgccggcacgcccggcggctccgaacctggccgatggtctgcgcaacgccggcctactttcacgccaggcggtggcagatcgagcgtcggtccctgtcgtagagcctgagcacttcatcgtggccgagccggcgccggacaccgagtcggtagcggtgagtgagcccgtcttcgagcaagaggatgcgtccgcagtgctggaggaagcgcctcaactcttcaccgacgcagaagcgaatctcgcggtcgagtttactcccgaggctgaacccgaacccgaacccgaacccgaacccgaggcatcgctcgcgcctcccatgatgatttcaacgcctgttgaaggcgtgcccgaggctggctctcgttctgctaccacccgacgctggctctgggtgggtggcggggccgtgttggcggtcggcgtcattgcctggctggtgtacggctctagtaacaaggaggcggtgcccgagttcgtgcctaccccagtggcagagccagtggccgataaaccccctgcggctcttgtggcggttgagccagaagcgcctgcgcctgcagctgttgaaacgccggccgctcctatcgcaccaaccacgccagccgcacaagacaagggagtgcaggcgcccaatccagtgcctgaggtggcgaacaagtccgcaccgaatccggcagcgaagaaaccacagcgcacgaagcctgttgtccagcctacgccgacgcccgcgcccacgtggcaggacgacgcgttggacaaattggacgatttagaaaagcgcctatga

SEQ ID NO: 513392 - DNA, 828 bp, Stenotrophomonas maltophilia
atgatcacccgggccgtgttgattgccatgctgatggtgggcggctacgcccaggccggtgtgccccagcacatcgaaggcatgtcgcgcaccacgcgcgcgcacgccgagcaggccctggattgctcccgcaagctggggcgcgatcccacgctgctgattgtcgccgacatgcgcctacccagctcggcccagcgattgtgggccatcgatccgcgcacgtccgaagtggtgctgcgcacggaagtggcccatggccgcggctccgatcctgaccgatcgggcagggcgtcagtgttctccaacactcccggctccctcatgaccagcgtagggctgtacgccgtatccgaggcgtaccggaacaccaaggacggcagtacccgccgccggcttgacggtttgatggtgggcttcaacgacgccgcccgggagcgcgcggtggtgcttcatccggccagctatgtccgcgcaggctgggctgggcattccgaggggtgtcctgctgtctcgtacgccatcatggaccagttgaacgagcgcggcctggacaatgcagtgctgtggatcgagggcgaccaggccgggttggacgaggccatcgcgtcttgctcaggcagcaaggttcgccaccgcttccgctggccatggcagccgaagttaccggcaaagccgcaatggaccccggacacatcggactactacaacccgtacttcgaggtggaggccgcaggctactgcccgaatctgacggcgggccagttctggtggatgacgcagccgatcttggccgaagccgcgagcgagcgttggacgctgcgctactga

SEQ ID NO: 513393 - DNA, 945 bp, Stenotrophomonas maltophilia
ttgaccttgatcttgttaggacatgaagtcagccgtaccgatgttcatggctctgtccgatttcaatatgaaacagccgagcctaggggccttttcgctgtggccgacagcgctctaaccaggaaggacgtactggacgagggccggactgcgtacagaactctactcacgggtctggagaaggtccatgaagtggacatccgggttcgccgccctgacatcctgcgcaacggacatttccagggctacctagctacccccgcctatcgaggcaaggccttcctagcctttgctgggaatgccaactctgcccaccatgccctcaacgctattcgacgcgacctcgctgaactggtcgtcagcttccgcttcaacagacaagagggagagccaaaggggctcatcctgctgcgcgggagagatcgaaatcccatgcgtgatggagctgtggcgtttgatgaggaaaccttcttcctgcctgaggtggacagactattccaggccgacttctttgccggtgtagtagcccaggcgatcgaagcagcccttcaatcagtggtggctcactgccaaagcgactatgacctcaggttggccagcgccaccttcgcgttcggagtgtggtgccccgtccagagaaggcatttgctatataacctcgaacccaagcgcgcgatggtgggcggacagatacagctcgtagctacgcctcatgtcgtcccagagagcaaagttcttccgctgggaactcggtccgtcatcgaaatgctcccgatccaagaaacatacaacagagcaattgcagacaaacaatctcctgctgaggctatgttgtctctcatggatagcgttattgacaaggaccacgaagcgtttacgggctaccccataaatcgcccgttgaaccgcgtccacctcaaggagaacgacctccgacgactgtaa

SEQ ID NO: 513394 - DNA, 702 bp, Stenotrophomonas maltophilia
atggaagccaggctccttcatgttctcaggctaatccgatatggaacttgcaagttcgaacccaaggacggcactccggaagagatcaagaggttccagcccatcgccaacgctgtggtgcatgccaaggacatgggctacatccgcgatgccattacgatggtcgactgcttcggcggacagaagtatttcaagaccgtaatcacggctggcgggctgacgtacagaggcgaagaagccttggctgatgagatcggttcgggaacgctgattgagaagcttgttgatgagatttctgcaagcgacaacatgtcagccctacgcaacaactgggaccgtgccatcgagcggagcaggaatgatcccatgggatcgatcacggccgccaacagctttctcgagtccgtgatgaaatggatcgtcgagcaaagcggtcagccagttcccgagaaccgaaagaagctgttcgagcttacagtgaagctggtgagtgatggcctccctggccaggactcggacattctcgggcacttcgatacgatcatgcgggagatcggttctctccgaagcaagatcggggatgcacacggagctacctcagcaaaacgtccgcctagttcgactcaagccatgctgagcgtgaaccttgccggctcgctggccctgtatctgctggaatcgttcgatgagcagaatcgctag

SEQ ID NO: 513395 - DNA, 408 bp, Stenotrophomonas maltophilia
atgaaatccatcatcctgctgaccttgatggctgttgccgcccctgcgtgggcgcagtccaacgaacagttggcccgagagaacgccgagctgcgcgcccgcgtcgcgggcttggaagcccgcatggcgcaactggaaagccgctccgctcccgcggtgactccggcggccgggaaagcccttgacctggaccagtggcgcaggtgccgggccgggctgaccaaggaacagatgattgaactgctaggcaagccgacgaccgagcagttcgccagcgccgtcaaccagtatccggacatggagacctggtactacggcacgcccggcgtggggcctggaggctcggtggtgttcatgggcgggaaggtcgcccaatgcatcacggtgggctttaccaacaacccgtag

SEQ ID NO: 513396 - DNA, 849 bp, Stenotrophomonas maltophilia
atgaaatcagttgctcttacgcccgtacttcttgtttgcttcctggccgcttgcggcaagcccgaaactgccgcctccgcctcacagcccgaaggcaaaccagacgccccggtggccagccatgctcctaagcccaaggcagccacgaacgtgccgctggagcagtacgtcgaagtgtccaacggcatctacagcttcacgcccgagcagggatttgaggtcatcgccttcaatgcggccatctcacaggtcgatcccaagcttcccccggacttcgatctgctggctcggttgtcgtctaaggactacgaccggacccaggacgcattcaagaagcgggagctgctggccaccttgcagcccaagctggaagaacggatcgcacacttccaggccagtccgtacgtcgctacggtgtacgcctacaagaacaacatcgaagggtatgacttcacgagcaacgccttccccatcaatgtcttcaagggggacaacagtttgttcgccggcaatggggtgctgctcgactaccggttgaacaacaaggctgctgtgtcgttcttcccggtggccgatgaggccttggcccagcgcattgagatgttgcgcaccagtggaaagacccctcgcctgaaagcgtacttcgtggcagatcgcaagccgaccaactccaacgcgtcggcgttcaaccactacttcacagatgacatcccgctgaccgccacgcacctgcagctggtggaccgggacgggacggtcctggccgactacgtccctgaccagagcagcacgccgcagccgccctcggaggttcaggccaatgccgcttcgatcatcgacgacttctaa

SEQ ID NO: 513397 - DNA, 1077 bp, Stenotrophomonas maltophilia
atgattaagtatcatgtccgatcaagggatctgataacagttgttaacgacatcaatatggggcgcttgatccttgatgcgtactttcaacgaaatctggtttggcgagaggtgcataaacaggacttcattaagaccatcttgctgggatttccgtgtccgcaaatatttatatcaaagggtgtgattgatgtcgaaaatatggccaccacttcttgcgtggtcgatggtcagcagcggctcaatgcaataagtgagtatatcgcgggagtgttcctcgttgatggaagtacatatcaagagcttagtagcgatgccaaatcagaattcctgaagtatgagttagctgtcatagaattggatttggataacaatgatggaagggtcaaggaaatattccagcgccttaataggacttcgaattcgttgaccgccatcgagaaacttgcttcccagtacgcgccctctcaatacatgctcgtagcaagccacctggcgggagaacttggttccatcaatgacgacgaggaggaagacaagttccgaatcgatccgtcggtggataagtcgttctttgactgggcggcggcacatccgacgccgtacttcaatcgattgtacgacgagtacggcgtttttaaagcgcacgaggtttcaaggaaagtgcatttgatgcacatattgaatctcatgacgacagtgttgtctggttttttcaatcgaaacgttagagccaaggaatacttggatcaatacgctcaggattttgaggacaaggagcttgtcgtggggcttcttgaagcctcggcgaaattgatagttagcgctcagttccagcaagggtcatactggttaaataaggccaacctgttttcgctaattgtcgccgtggctggctccatagctggcgggtccgtgattgaccctgggaagctaaagattgagcttggcaaattcgagaacacgctgccggatgactacaggctcgctgcggcggagggtgttaatgattctcgggagcggaagctcaggaataaatatttagtggaaatcgtcaagctggctgctgcagtttga

SEQ ID NO: 513398 - DNA, 645 bp, Stenotrophomonas maltophilia
atgccctcgtcaaaacgtaatcagcctgtgcctggtgaattctatctgctgatgcccgacacgactcgaaggggaagagggcatggcgttgagatcgagaatgaggacgcactgctgacgcctcccaggctgatcatccgccccgaagaaggcggctttcctcatctgtcgcagagaccgcgtctggtgctcgatccagagctgggggatccaccgcaggacctcgaaggaggaatgagtggctactggttggtatcagagcgcctcaagatggccttcaccgaaatagatcccgtcgcctttgagctcgtggagtgtgattacgtgcttccggacggcacagagggcccaacgtaccacctgtgcgaggttgctcgcgagctggatgcggtcgatgaggaagcatcgaagttccgggtcatcgtcgatgagggctatccgggcgggaagttctacgaccttcgtggcggagcaagcttggcattcaagagggacgtaatcggggacagtcatgtcttcaggagcccgtactccggcgatcttgtctactgcgatcgcgtgttccgggatgccatacgcgctgcgggaattggaagcgagtgtgaaacgcgtggcctgaggttcaaggacgcggccaatgtctga

SEQ ID NO: 513399 - DNA, 138 bp, Stenotrophomonas maltophilia
atgccctactcatcccccgctcgccgcacgaatctgtatgtcgtgctgcacccgctggtcttccagctgctggtccatctgattcgccagcgcacgctgatgcgcttcacggctgaccgcatcgaactgctgcagtga

SEQ ID NO: 513400 - DNA, 954 bp, Stenotrophomonas maltophilia
atggcaacggaactggctttcagtacagaattcaacgacaccatcaacgccgaacgcgcgtacgagctgtactgggccgacgtgatcaccgacaagcgtgcgtttctgtgtcccgagcatgagaacggttgcccggcgaagtacacctgcgcgaacatggataccgaacagcttcagttgaagcaggttccgcatttccgcaatcagcatgacagcgagccgcacatggagggatgccccggcattgcggagctggatgctcgtagcaacggaagtggggaaagccggaccagcgaggctgggcaaccggcgccggaccggttcctgctggcacgtcctgcgggtcatttcgacgttcgccagggaacaacagccggaattggcccgggtgcgggtagccgcagcggtggcggtgagaccggtggcacgcgcagccgccgcacccagttctactcgctcgccgcgctggtgtcgcgctggctcaaggcacggcaggacaacgtggatgacacgatgatcgtcagtgccggcacgcaggaagcgatgagctatcgggagctgttcgagaacttcttcgagaagcgcccacacctttccgggaacacacgggtgtactggagcaaggcatggatccgcaagacggccaatggtttccagatcaccttctgcgagccggtcacgacccttgctggcgagacgctgaccgaaccgctacgtgccacggcgatgatctggaacagcgtactggcagcgtcggaaatgaaatcactgcacgccagacggcttcagcgcttcgcggcaagtgaagcgccctgcgtggtgttcctctacggagcccccgtgctgcaggagaagcaatcgcgcacctacctgaacttcgacgtgaaaaatctggatctggtggatgtgcaaggtaccgacatcttcgacaggatccggcggctacaggaatga

SEQ ID NO: 513401 - DNA, 603 bp, Stenotrophomonas maltophilia
atgttgttggatgcaggtcttcccgtcgctgttgcttctgtgatcagtggcgtagtacttgcggcaaaagtggtgcaggcgctgcacgcatacatccgacaggggcgaaaggaatgcctcgagttgtgggaccgctcgaaggttgatgacgcgttctggctggagtcgtacatcaaccatcggtacaacgtgcgttctccgccagcggacctggttcgggcctgcctgaaggcagcgaattcgaccgccatggtgagggacctcgtcatgaactggcgcttcttccaggggagttccctgcaagcattgcgctggcgtgtcgctcgcagaaatcgccctgttctccttgcgatcgagctcgcgatgcttccattggcctactttgtcttcgtcgtgcttggtctgttggtgatcggaaagggcggtgagaaggggattgtggctgcatgtcccttgatcgcactgggcgcaatgagcttctggacgttcctgacgttgatcggtgcgcgaagagcgcttgctgatctacgccggcgggatgaggcagaggagcgggcatcgatgtcgcatccgccagccgacacgtgcgaagcgcttggttag

SEQ ID NO: 513402 - DNA, 900 bp, Stenotrophomonas maltophilia
atgtcagtcctggacaacctcgccaacctgcagaccttcgtccacgccgccgacacccgcagcttcgtcgagaccgggcgcctgcagggcatctcggcctcggccgccggcaagtgcgttgcgcggctggagcacgcactgggcgtgcgcctgttccaccgcagcacgcgcagcatcaccctcaccgccgagggccagctgttcctggtgcgctgccggcgcatcctcgacgaacgcgatgccgcgcgcaccgaactggcgcaaccgcacgctgcaccgagcggcacgctgcggatcagcctgccgctggtaggtgacctcaccctgccgttgatggccgaattcatggccgcgtatccggacatccgcctcgacctggatttcagcgaccggctggtcgatgtcatcgaggaaggtttcgatgcggtgctgcgcgttggcgaacccagcgactcgcggatgaacgcgcgccggctgggggtgttcccgcggcgtgtcgtcgcctcgccgggctacctgcagcgtcgcggcgttccacgcacgccggccgacctgttgcagcacacgttgctgcactaccgcttccccagcaccggcaagctggagccgtggccgatccactggcccgaccacgaaacaccgcaggagctgccggtgcacatggtggccaacaccatcgaggcgcgggtggcgctggcgctgcgcggtaccggcttggccttcgtgccggtgcactcggtgcgcgaagcgctggccgacggccgcctggtcaccgtgctggaggatcatgtgcactcctgcggcaccttccacctgctgtggccgtcgggccgacacgtactgccgaagctgcgggtgttcatcgacttcgtcggcgcccgcctggacaccgtgccgtag

SEQ ID NO: 513403 - DNA, 1179 bp, Stenotrophomonas maltophilia
atgaatgccgctctttcccttgaacctgcaccgacgctgccttcggtgcagcggctgctgcagcaggtccacccgctgcgcctggtcggtgcggtggtgctggtgcgcgagcacggcgtgctgcgccatgccagcgcgaccgggctggccgatcgcgagtcggccaggccgatgcagcgcgatcagctgttccggctggcatcggtcagcaagccgttgctggccacggtgatcctgcgcctggtggccgaaggcgtgctcgacctcgacacaccggtgcagcgctggctgccggacttccgcccggcgctggccgatggccgcacgccgccgatcagcctgcgccagctgctcagccacagcagcgggctgggctatcgcttcctggaggcggatgcggtggggccctacgcgcgcgctggcgtcagcgatggcatggacgccaacccgctttccctggccgagaacgtacgccggatcgcgcaggcggcactgctgttcgagccgggcagccagtggctgtactcgtcgggcgtggacgtggccggtgcggtggccgaagccgcgaccggtgaaacgctgcaggcgctgttccagcgtctgctggctgccccgttgcgcctgcgcgataccgcgttcgccacgcgcgatgccgcacgactggccacgccgtatgtgagcgacacgccgcggccgcatcgcctgcaggaaggggaggtggtcgcgccgttcgagggcacggtgggcatcgagtacagccttgcgcgtgccctcgatgcaagccgtttcgcttcggccggcgccggcctggtgggtactgccgatgaagtgatggcggtgttggaggcgctgcgtgacgtgcagcgctctggcctgttgccacccgcgctggcggaggagatggccagcgcgcaggtgggcgaacaggggccgccggaaccggccggctggggcttcgggctgggctttgcggtactgcgcgacgccgccgccagtggcacaccacagcgcgaaggcacctggcgctggggcggtgcctacgggcacagctggttcgtcgacccgtcgcgtgggctgagcgtggtggcgctgaccaacacgctgtacgaaggcatggatggcgcctttgtcgatgaactgcgcgacgcggtctatgccgacctggagaccacgcgatga

SEQ ID NO: 513404 - DNA, 1185 bp, Stenotrophomonas maltophilia
atgagcggccatgccatcgatgccgccagtccggccggcgaggccacgcgcctgccgtgggcgggcctgcttgccttggccggcggcggcttcatcaccctgttgaccgagaccctgccggcgggtgtgctgcggccgatgggcgaaagcctgggcgtgagtgatgcggcggtcggccagctggtgagcgtgtatgcgctgggttcggtgatggccgcactgccgatgaccgcgctgacccagcgcctgccacggcgtccgctgctgctggcggccatcgctggcttcgtggtggtcaatacgctgacggcgttgagcagcagttacgcgctgatcctggctgcgcgcttcctggccggcgtgagcggtggcctgctgtggtcgctggtggccggttatgccgcgcgcatggtggtgccgtcgctgcagggacgggccatcgcggtcgcgatggtcggttcgccgctggcgctgtcgctgggggtgccggcaggaacgctgctgggccagcaggtcggctggcgctgggcgttcgcgctgatgagcgtgctgggtctgctgctgctggcctacgcgcgctgggcgttgcctgcgctgccggccgctggggccgggcaacgcacttcgctggcgaccgtgtggcgcctgcccggtgtacgcagtgcgctgctggtgatggcgctgtacgtgctggcgcacaacgtgctctacacctacatcgagccgctggcggtcgacgcgggtgccggtgcatggctggaccggctgctgctggccttcggcatggcggcgattgccggcatcgcgattgccggctggggcgtggatcgccacctgcatgcgctggtgtgggcggcggtgatcggcttcatcgtgccggtgctggccttgctggtgtggcctggcgtggcgagcgcactgctgctggcgacgatcctgtggggcgtggcgttcggcgccgtgccgaccctgttccagaccgccttggcacggcgcgccggggccgctgcggacctggcgcagtcgatgctggtgaccggctggaacctggccattgcggccggcggcgtggcaggcggcgtgctgctgcaggccagcggcccacgccagctgggatggctgccgttgctgctgctggcggtgaccgccgcgtggctgctggcacggccgaaggcctgggcgtag

SEQ ID NO: 513405 - DNA, 162 bp, Stenotrophomonas maltophilia
atgcgccgtacaccactcgccatgatcttctgcagtgccctgctgatggcatcgccggcaaatgcccacgatgcagaaggcgcggagcccgcacagccgcttcccgatatcgcgctgcccgcaccgctggaccgtgtactgcgcgactacgagcaggcgtga

SEQ ID NO: 513406 - DNA, 441 bp, Stenotrophomonas maltophilia
atggagggcatgaggcgtggatcgcggaaatctgtccgggcagcgtatgcatcggtcattgatcggtacgggttcagtcaactcgaacggagacgggaatgtagcgcaggtaggtggaccttgcttctatcaagcgtcagcgcactggcccggcttttcctgctcgccctttggggtgtggtcactttcaatcggaacaccgacaactccctcggaatctacgagttgtccactccgggtgtagaagcgctcttctggggctgcttcttcgggcagcccatgctgaccgtggtgatgttcatccggatggcattgcgggaccgttccgcgttctacgagatcccactcgcgatcgcgatcgcggtctggggccttttttctgtacaacctgtcgttcttcagaagctgagcggcatgccggccggccgagcgccggcctga

SEQ ID NO: 513407 - DNA, 1134 bp, Stenotrophomonas maltophilia
atgagccggcgtgtgttgttcgtgttgatgctggtgtgtgcgctggtgctggtgatgccgcgggcgtgggcgcagtggccgccggaaacgcatccggccgaccagagccgggacttcgtgatgagctgggaccgctcggccgtgccgggtgacgtggtgctgtgggcgccgcggacggtgttgggattcagtcatgacctggcgctgaagtatgggcagatgcatgtggtttgcgggtctgcttctgacaatgaatttgggaaatgcgccgtagagggtgagccgggacagtcgcttggcatcagtaacgtcgccctgctgttcgtagagcagagaaccggcctgcgtactgagcttcgagcggagggctacctgcagagggtcatgtcggactggatctgcgccagtgactactgggacacggctagaaggcgtctgaatgcgtccttctggttccagtgcgcttcgggtcagccagcgggcactggggcgagccttcagcttcccgctgcagcactctccagactcgtcgcaggtcactggaaggccacgatgcgcctgaacatcaaggccgaccccgccgcagcacccgtcgccacagccaccttcaacttcgacttcaccgtcaccgactacgacgcgatctcgatctacttcccggccttcgacaccatcgcgccgctggtcaacatggacctgcgctacgaccccatcaagcagatggtgggcggccgcaagcagctggagatgtgcctctacgacggcctcggctcgcagagcgagttcctcggcgtcaccgtgcgcgacagcgggccgcgcccgccacccggtagcgacttcgcggtctggcatcgcgatggtggcagcgacgaccgccagcgcctggactaccacgtcagcctgaactatggcgggcgcgatatccgcatgcggcatggcgtggaagagctgctgcatggcatcgacagcgccgaactgcgcctggtcatgctgcccggtatcagccagccggtctattgcgtgcccacgccgctgacattgctgacacctcccacccccgtcgccagcaagcgccccggtctctacgagggcgagctgacggtggaactgcgcgtacccaccgccaaaccctga

SEQ ID NO: 513408 - DNA, 495 bp, Stenotrophomonas maltophilia
atggcaaccaagaaagctgcgaagaagaagcccgccgccaagaaagcggtgaagaaggtcgcgaagaaggccgctgccaagaaggcagtgaagaaggtcgcgaagaaggcgactgccaagaaggcagtgaagaaggcggcgaagaaggtcgccaagaagaccactgcgaagaaggcagtgaagaaggcggcgaagaaggtcgccaagaagtccactgccaagaaggccgtcaagaagaccgcgaagaaggcggccaagaagactgccaagaaggctacggcccgcaagccggccaagaaggtcgcaaagaaggcgactgccaagaaggccgtcaagaagaccgccaagaaggcagtaaagaagaccgcgaagaaggctaccaagaaggctgccccgaagaaggcagcgaagaaggttgccaagcgcaagccggccgcccgcaagaagaaggccgctccggtcgctctgccggcaaccccggcgccgctgatctaa

SEQ ID NO: 513409 - DNA, 414 bp, Stenotrophomonas maltophilia
atgaagaaccagaagggcttcacccttatcgaactgatgatcgtcgttgcgatcatcgccatcctggccgccatcgccctgccgatgtaccaggactacgtggccaagtcgcagaccgctgcgggtctggctgaagtcaccagcggcaagaccgctgctgaggtcgcactcaacgaaggcaaggatttcgctgatccggctgacatcggtctgaaggtttcgacccgttgcccgaccgtcaccgtgaagggcaccgcctcttccggtgcagcctcgatcgcctgcacccttgctggtaactctcaggtgaaggacaagaccatcaccctgacccgcgccactgctgacggtacttggacctgtgccacgaccgtactgaagaagtacgccccgacgggctgcaccggcgcctaa

SEQ ID NO: 513410 - DNA, 408 bp, Stenotrophomonas maltophilia
atgaagcgaactaggggtttcacactgatcgagctgatgatagtagttgccatcattgccatcctggcagctattgcattgccgatgtatcaggattacgtggccaaggctgatttggccgcagctttgtcggatatccggccgggtaagaccacgatggagtccgttgcccaggacaaccagaacgcatctctggttaacgcggaatacattgggctcaagccgagtacgaggtgttctgcggtttcggcggaactggcggcgacgggcgtgggcagtatcacgtgcactctcgttggaggggcgccagtatctggcaagaaattggtcctccgccgcgcagccgacggcacctggacctgcgacggcagtgccttcgaagcgcgctatcgcccaaccggctgttga

SEQ ID NO: 513411 - DNA, 12876 bp, Stenotrophomonas maltophilia
atgaacactatctatcgtctggttttcaaccgcgcgctgcgcgtctggcaggtggcttcggagctggtgaagggcggcggtggcctggtcggccatgtgccgggccggcagagcgccgcgctgtcgccgctgggtttcgcactgatgtgctcactgggctgggtcagcctgggaacgcctgcgctggcgcagtccgatgcgcgcatcatttccgatccgaatgcgccgggccgtgaacggccgacgatggtgaccgcacccaatggcgtgccgatggtgaacatcaccacgccgtcggcggcgggtgtgtcgcgcaaccgctattcgcagttcgacgtgggccgcgatggcgtcatcctcaacaacgcccgcggccaggtgcagacgcagctgggcggctgggtgcagggcaacccgtggctcgccaccggcagtgcacgggtcatcctcaatgaagtgaatggtccggccagccggctcaacggctatgtggaagtggccgggcagcgcgccgaagtgatcattgccaacccggccgggatccaggtcaacggcggtgggttcctcaatgccagccgggtgaccctgaccaccggcacgccgatgttcacgggtgcaggcgcacttgagggctatcgggtcaccggtggcgcgatccagatcgatggcgatggcctggacaccagccgtgccgattacaccgacctgatcacccgttcgttgcaggtcaacgccggcatctgggccaaccagctgcaggcgacgctgggcaacaacgtagtcagtgccgaccacagccaggccagcgcgaccgcggccagcggcgaggcaccggccttcgcgctggacgttggcgcgctgggcggcatgttcgccaacaagatctggctggtcggcaacgagcacggcgtgggcgtgcgcaatgccggcagcatcggcgcacaggccggcgagctggtggtgacggtggatggccggctggaaaacaccggcgccctgcagtcgcggcagaacgtgcgcgtgcacgccagtggcgatcttgccaatggcggcaccatcgcggccacgcgcgaagttgcgatcaccgccggtggcacgctggacaacagcaacggcacgctcaatgcacagcgcctgcagctgcaggcgcaggggttgcgcaaccatggcggcgccattgaacagaccggtgtgcaagggctggcactcaaggccgacgcagccagcaaccgtagcaatggcctgttgggtgcactggatgccatggcatcaggtggtaacgggagcagcgctggcagcggcgcgtcgcccggcaatggcggtggaacaccgggaaccggcacgccgggaacgccgggaaccggaggcggcaatggcggctcggcgggtacgccgacgtcgccggagctgcccctggccgagggcctgatcgccatcgccggtacgctggacaacgacggcggcagcatcagcaacggcggctcggtgtcactggccgcacgcaacggtctcgacaacagcggcggtcgcctgggagtgagcgcgctgcaggccgggggggagctgcgcaatgacggcggcatgctgcaggtgcatggcgatgccgcgttgcaggtgggcctgttgtcgaaccagaagggtgcgctgagcgtggccggcgacctgtggctggatgcgcaggcgctcgacaaccgcggtggtgaactgcgccacgccggcaaggcggcatcgtcgtggacggtgcagggcctgttcaacaacgacggtggcctgctggccaccaatgccacgcggcttgcattgcgcgcaggccaggtcggcaatgcgggaggccgcatcgaacatgccggtggcggtggtctcgcgttggatacgggcgactgggccggcagcggtgggcgactgagtaccctgggccgcctgcaatggtcggtcggcaacgccgatctgcgcaacggttcgctcagtgcggccgggttcgagatcctggccgcgacgctggacaaccggggcggcagcctgctgtcgctgggtagcggggccagttcggtgaaggccacgacgctggacaacagtgcccgcggcacgttggccggcaacggcgatctggcactggtcgcgaccacgctggacaacagcaacggcctggttcagcaggctggcaccggcatcctgagcgtgcaggccgatacgttgcgtggcagcgaagggcgtctgctcagcaacggcgcgctggtgctgtccggcggcgagctggacgtgagtggtggcacgacatcggcgcagagtgtgcagatccacgccggggcactgcgcaaccgccagggccagatcgtctcgcagggtgtctcggcgctggcgctggacgtgcgccatgcgttcgacaatcagggcggccagatcgtcggcaacggcggcctgcgcatcgacgccggtcgcatcgacaaccagaagggcacgctgcagtcggccggcacgcagggcgtggcgctgacggtgcgcgactccctggacaacacgggcggcgcgatatccggcaatggccaggtgcagctgcaggttggcagcctgctcaaccagggcggcaaggtgctggccgcaggcagtggtgcgctgcaggtgctggcccgcgagctgctggacaacagcaacggtggccgattggccggtactggtgatgtgcagctgcaggcagcgcgcctggacaaccgcggcggcgcgatcgaacacgcgggcagaggcaccttgcagatccgggccgacagcctgcagggcgcggcgggccggatcctcagccagtcgtcgctgacgctggaagggggcgagcttgtgctcggcgccggcagcgttacccaggccgagcgcaccgccatcgatgcgcagcgcctggacaatgccggcggcagcctcagtgcgactggcagcgaggcgctgctagtgcgtgtggcgcaggcattggacaacagcggcggcacgatcgccggcaacggcgcgctggatgttcaggccggtgaactgatcaaccgcaagggcacgctcagcggtgccggaacggctgacagcacgctgcagatcgtcgctgcgctggacaaccacgaaggcacgatcgccagcaatgccaatcgcctgacggtcacttccgcacggctggacaacagtggcggcagcatccgccaggccggcaaccagggcctggacatcaccaccggccgcctggacggcagcaagggcacgctggtctcctcggccacgctgaccctgcgtgctggcgacgtggatcatcgtgacgcgacgctgggcgccgatcgcctagaccttgaggccaccacgctcaacaacgccggtggccgcatcatcgccagcggcgaaggcgccagtcgcatcaaggccacgacgctgggcaatgccggtggcacgctggccagcaatggcgacctggccctgctggcacaggcgctggacaaccgtgcaggcaggatccagcacgcggggagcggccagctgcaggtctcggcgaagaccctgctgggcaacggcggcagcgtgctcagcaatggcagcttcgcgctggatggcgccaacctcgatctgaccgcggcaaccacctcggcgcgccgcgtcgacatcaccgccgataccctgaccacctccggtggcacgctcaccgcaaccggtgaagacgcgctgcgcctgcgcgtacagggtgtgctggacaatcgcggtggatcgctggccagcaatagcgcgctggccgtcaccgcgcagcagctgatcaatgcacagggcacgctgcagggtgcaggcgcgggtcactccacgctggtgatcggccaggcgctggacaaccagaagggccgcatccttctcggcggtgccggcaccctcaccgcagccagcctgagcaacctgggcggtaccgtgcatgcgggcggcagcgcgctggtgctgggcgttgacggtcgtctcgacaatggcgagcagggcctgctgtccagcaccggcatgatgaccctggatgccgacagtctcgacaaccgccacggcaccctggtcgccggcaaggacctgatggtgactacggcggccggcgtgggcaacagcgacggcgcgatgcaggccggcgaacggctgcagctgcagggcaacggcctgctcaaccagcgcggcacgctgctgggcggccagctggacatcgatacccgcggccagcggctggacaaccgcgccggcacgctgggcacgcagaagggcgatctgagcgttcgcagtggcgcgatggacaaccagggcggtcgcgtgcagtcggcggccgacctggccatcaacacggccgggcaggacatcgacaaccgcgccaccgccggcagcggtggattgctggcggccggaaagctgcagctggatggtggcgtgctggacaaccgtggcggcgcagtcaatgcacaaggcgatgcgcgcttgctgctggcccgcgtcgacaacagttccggtggaacacttgccagcgccgcgaatctgtcgctgcagacggcgagcctggccaatgccagtggtcgcgtgcaggccgggcgcaacctcgacctgaccctggacgggcacctggacaacgccgacggcgcgatcgcggctggccagctgctgaccctcacggccgccagcgtggacaaccgcaacacccgtggcggcgacggcacgcgtggcttgcaggcgggccagctgcagttcggtgcacagtggctggacaacagccagggccaggtcgtcactgatggcggtgcgcggctgcagatcaacggccagctgcagaacaccggcggcgtgatcagcaccggcggcaacctggacagccaggcggacaacgtcgccaacagcggcggcctgctgcgcgccgatggcagccagaccctggtcgcacgtgcgctcagcgaagacggccaggtgcatgcgcagcgtgacctcggcctcaccctgcggcagggcatgcgccaacgtggcgaatggatcgccaacggcacgctgtcgctgaacctgtccggcgacctcgacaaccagggtgtggtgcgcggtggcaacctcgacctcaacgcccagaacatcaccaatgcggcctcgggtgagatatccagccagggcacgacccacctcaatgcccgtggccagctgaccaaccggggcctgatcgatggcgcgctgacccacctggaggccggcgaaatcgacaatcttggcaccgggcgcatctacggtgatcgcgtggcgatctccaccggcgtgctgaagaatcgcgccgaagaggccggtggtgccacccgcgtcggcaccgtggctgcacgcgagcgcctggacctgggcgtgcgcgagctgcagaacaccggcaagggcctgatctacagcggcggtgatgctgccatcggcggcacgctgagtgccgatcgcatcgccagcggcattgccgggcggatcgacaacatcagctcggtcatcgatgtcaccggcaacctgtccatcgatgcgcaggtggtcaacaacatccgcgagaacgtggtcatcacacagaccaccaccgtgaacgctccggtgcgcatggatcgacccgcctggtggcgcaacggcaagaatggcaccgaggacattcgcagcaccagtcactattcggcgcacgaggtgtactacctcaacccgaccgatatcctggaagacacgccgcacatcacgccggatggcttcaccgtgcaccgtgcggtggtacgactgaccgcgcagaccagtgcctacttcttcgggcgcggtgggctgtatgccgcgctgggtgagcgtgcgcggctgaacgtgcaggacggcacggtggtgatgtactacgtcggccgccaggacaaccaggtcaatccggaccaggttgccgctggtgccgacgatccgtttgccgagctggccaccctgcatcccgattcgccggcattccgctacgtcgatgacaaactcacctactcgtcagcgtatggcacctgtacgaccaactgcgtgcagttgtggacctacaaggattacgatcccgaccgcattctgaccagcccacagtttgcgggcggcaactccaccagtgccaacgagcagtatcgcctggccacgcgcaccgtgaccgaagatgtgttgcagccgagcgtcggtgccgatgcggtcatccggtcaggcggtgcgatgcgcatccgcagcgatgacctgcgcaaccactacggcagcattgccgccggcggcgatctggacatcatcggcctgaccggcgcggcaaaggtggagaacctggcggccacgctgtatcgcacgcaccaattctccaacgtcagccacacgttcggcggggatgtgatgacctggagtgctccggccatttccgaggtgaccggtaagattggcggcagcattgtcagcggcggctcgttgagcatcgacgtcggtgacctgagcaacctcaaccaggggcgcaacgcgccgaacgtgcagaacggttcggccatggccaacctcaacgtgcaggggcccacggcgctgccggatgggccgggccacggcggtgcgcaggggccgggccagtccaccggcaccggtgccgaacgcgcgctggcgcaggcggccgatgccgccggtacccagcagggcggcagcgtcggcggcgtgagcggcaacaccggtacgtccgggccgcgcgtggtcgcagccagtggaggatcgccggatcgaatcgcgatgggtgcaccggacacgcgcgcgccgagcgccagcctgttcaacgtcaatcccaacggcggccactatctggtcgagaccgatccgcgcttcaccgaccacaagacctggctgagttcggaccatctgctgggccagatgggctactcgcccgataccgtgcagaagcggctgggtgatgggtactacgagcagaagctggtgcgcgagcagatcggccagctgaccggtcgccgcttcctcgacggctacgccagtgacgaggcgcagtaccgcgcgctgctggaggccggtgccacggtcgccagcgaatggggccttcgccccggcgtggcgctgaccgaagcgcagatggcacagctgaccagtgacattgtctggctggtcgagcagaccgtcaccctggccgatggcagcaccaccaccgcgctggtgccgcaggtctacctgcgcctgcgcccgggcgacctggacggcaacggtgcactgctggccggcgccaatgtcgatatcaaactgggcaatgacctggtcaacaccggcaacatcgccgggcgcaagctggtgaccatcgatgccggcaacatcgagcatctgggcggcagcatttccggccagtacgtcgggctgtcgtcggacaaggacatccgtgttgtgggtgccgccgtgacggccaccgatgcgctgtcggtcaaggctgcgggcaatgtcacggtggcctccacggtggagacacagcagggcggtggcacctaccagtacgagaccaaccgcatcgatcgggtcgccggtctgtatgtaaccaatcccagtggcgacggcatgctgtcggtggtggccggtggtgacatcagcctgcaggccgcacagatccgcaacgccggcgccgacggcctgacccagctggccgcaggcggcactctggatgttggcgcgattgcgctggaggagcgccgcgacgccaccttcgatgaacgcaaccaccagcgcagcagcaggacgacacacgctgcctcgtcggtgcagggcgctggcgacgtggtgctggccgctggcaaggacatcaaccttgctgcagcgcagatcaatgctggtggtggcctggcattgcaggccggcggtgacatcaacagccaggcgctggtggacagtgagagccgggattttgccaatgcaggcaagcgcagctcgctgcaggtcagccagcgtgatgaaacggtgcgcggcagtacgctgcaggccggagacaatctgctgctgagcgcgggccgggacgtgagccttacagccgcgttggtcgacagcaatgacggcgcggtaagcgtggccgcaggccgcgacgtcaacctgctctcggccaacgagacgcacgactacagtctggacagctacgaaaagaaaaagaagacgctctccagcaccaccaccacgcgcagcgtcgacgccagcgacagctatgccatcggcacggcgatccagggcgagcgcatcaacatcacggctggccgcgatctgactgcggcaggtgcggtggtcgatgccaccggcaacgtgattctgggggctggtaacaatgtgctgatcactgccgccgaggaccatcacagcagtgagtccaacgaaagcaaaaagaaatccggcgttaccggaggcttcggcaacggcgtggcatcggtcggctacagcagcacgaagaacagcagcacccgcgccgagcagtccaccacccaggtgggatcggcgatcgcctcgcgcgacggcaatgtgctgatcaatgctggcaacacgctgacgatcgaagcctcggacgtcgccgcaggcgagaacctgacattggtgggcaaggacattgcgctgctggcgcgacaggacaccacggacagccaatccagtcaggccagcaagtccagcggcttctcggtgggcgtgacctacgacccgaccaaggcctaccgcagcgcccgcgattcgaccaccgacggtatggccgatagtggctcggcgatggggcggatcacccgcaccgccgaaggcgccgcctccggcctgcgcgcggccaccacgtcgaccgtggtgactgccggcagccagcgcaccaacagcgaacagagccattcgaccagtgatgcccgcgtcagccagttggctgcaggcggcgatctcacgttgattgccaacggcggctcgatcctcagccagggcacacagatgtcggccgagggcaacgctgtgctgctggccacccaggacatcgtgttcgacgtggcccacaacaccgagcgcagcgacagcagcagccgcggcaagggctggggctttgccaacaacaccagcggcctgccgttcggtaccaacaacgcgcagagccagggcagcggcagcagtgacaccatcaccggcacgcagttgtcggtcggcggcggcgtgcgcatggccaccaccgaaggcaacatccgcctgaccgcagccaacatcgcggccgagaaggacgtcagcatccgtgcggccggcgatctgctggtgcgcagcgggcaggatacggtcagcaacgccaatacgtccgacagcaaggcgatcggcacggtacagatatcggatgccgagaagttctctggctggcaccgcgagcagcaccaggacgacagcgcgcaggtgtcacaggtggccagcagcatcggcagtctgggcggcagcgtgaacctgaccgccggtggcaagtacacgcagacggccagcaacgtggtggccgccaaggacgtgaacatcaccgccgccgagatcgagctgttgaccgccgacgaaatcggccactactcgcagagcgacaaggacctgaagatcggcgtgttcgcgcgggtgaagtcgccgttgatcgacctgatcaacaacgtggacgcggcccgtcagtccgatgatcgcctgcagaagatgcagggcatggcggcgggcgccaacgcgtaccaggcagccagtgcgatctcagcgctgtccggccgtggcggtagcggcgaactgttccgtgctgaagcaggcatcggcttcaagaccgccaacagcagtgccgatggcagcagcagggtgtcgcgtggctccaccatccagggcggcggcaacgtcaacctcaccagcacccagggcgacatccacgtgatgcagggcaatctgagtgcaggcaacgccctcagcctggattcggccggcgacatcctgctggaagcaggcaaggcgcatgtggccgaccgcagcaagagcagcaatgccggtgccgaagtcggcgtgggggtctcggtaggggcgcagaccggcgtgtacgtgtacgccgaagccagtgttggcagcagcaaggccaatgccgagagcagcacctggcagaacaccacgctgaccggcaagaacatctcgatgaaggccgagggcgataccacgctgcgtggtgccacggcgaccgctgatcgcatcgacgtcaagaccggcggcacgctgacgatcgagtcgctgcaggacatcgccgagagcatgtccaggaacagccaggtgggtggccgcgtgcaggtgtcgttcggtaccgcgtggaatgccgacgggtatgcgagcgcaggcaaggccagcggcagctatcagggtgtcggccagcagagcggcctgtttgccggcaatggcgggtaccacgtcgatgccggccacgtgaacctggtgggcggggcgattgccagcactaatgcaggcaacagtgaactgactgcgggctcgctgacgttcaccgacctgcagaaccacatggactacacggccagctccggcagcatcagtggtggtgcgggcgggcagatggatggctgggcgcccaagccgggaacggccgcaccccgaggtggtccgggcctgccgatgatggaaaagggcagcgacagcagctccacccttgccaccttgaccgagggcaacatcaccatcggtggcaagcagacgtccgcggctgagctgggcatcaacaccgatgccagtggggcacatcgtgcgctggatgcattgccggatgcgagcaagttgctggcggaccagcaggcgatggcggctgcggcggggacggtgatggccaccagccagcagattgcctgggatattggcagtgcggatgcgaagaagatcacggacaagtatcgggaagggatgagtcccgaagagagacgggcgttcgatgcgcttcttcccgatgagcagctcaagcgcctggtcgcgttcgatgcaacctaccccgatgcgctcgctacccagcaaaagtgggcccctgatggtgtctatggtcgcgcgctcggcgcagtgaccagcgcgttggtcggtggtgttgaaggacagggactgggtcagctgggttccaatgcgctggcgccgtatgcggctgaactgatcggcaagacgtttgacccgaacaagcagagtgctgtgcctagcgaggccatgcagatgctgtcgcacgcgctgctgggcgcgctgttggcagaggccaatggtggcaaggcggggagtggggcgttggcggccggtggtggtgagcttgcggcgaagttcctgggtgactactacgccaaacagaataaggggcagttgtcgcccgagcaggcggagcaagtaagggtgctcggacaggcagtcggcgcaatggcgggaggactttccgctgcaggaatttctggcgcgacattgggcatgggtattgcaaaaaattccgttgagaataactacctgaatcacgacgagcggatggagtaccttcaggcgaccgttatctgctctgatgcaggtaaagactgcgatatcaaggaaaacttcgagcggctctccgccgagcgcgattacaagctgttgatggcgtgccaagtgccaggatctgccgcatgtgctgaacagcgctcacttgcgaaaattgcattggaatcgcataactcacctatatataagggagagtatgacgcatggatggcggaaaacgccgataagctcatcgctgcaagcaagaatgccggttctggggtaagccttgaaaaaattgccattcactcttctaccgaagatctgcaaaggaaggtgtactgttcgctcgttggtgagtgtggttcgaacactgtcgatctattgcgtggtgcaggctacggtgcggaagctgactggctgtcgtcgacgaatcgagcagtcgttggtgctgcctttgtaaatgggctctggactgggggaagagacctggtagcgggtgctgcaagcatgaaccagatcggtgttctgctgggtttggtctcggattacaaggagatggacaagcttggcttgcaggccttctcccaaaaacgcaacaacgcgataagccaggccatcaatgagtacatggagaagactgcggggttggcctactacttagctggtggacgaaactcgtggaactttgaggatgtcgaccaagctgcgaacgttggcggaaagctcactgttgatatcggaacctctttgttagggcctgaggcgttccttgcaaagggggctaagaccaccgcattggaggccgctgcctcggaggcgctcgaacgagctcgagtggcgcgctcggtaaaattggagccggatggctcgttgccgccgcatttgctgccagataacattgttggggatggaagtattgctcacttggggggtgttaattatccggacggcatatcattcaaggtcgatattgatgcgcatatttctcgtccagatggttattctcagaagaacggaatttctggggcgcacaattcagtggaattcaggtcggaggctgcggctcgtggcgtgaaaatcgtaagcgaggtttccacggatgttccgggtgtttccgttatttcctatcaggtgccggcgttggatcctactgggaaagtaattgtgggctataaaaataaagtccagacgaagacggtttatgatccggctataatgtcagataggaaggttttggcactcggccaggaggctgctgcgaagggttacaaggacgctgttgctgcggggaagaggatatatgagtccaatgcgggaggcgtctctttcgttgtgtacatcgatgatgctggtgtagttaaaaatttccaccctaagtga

SEQ ID NO: 513412 - DNA, 1761 bp, Stenotrophomonas maltophilia
atggctggcaacgtcttttcaaatctacttcgacccttcatccttcaaaaggacacggaactaccaggcgtggcttcttctgagccgcctgaacccccggtccgggagcgcttggatgattcaagccagcggccagtggcttcagcggagccggtaaccctttcgcccgttgagggccctcaaagtgtgcccccatcgttcaacgatgaggcaacggatcggttggggaacactttggccttcgctggtctgaagacgaagggtcgcttcgaggacgaggtaaggcaggccatcgaagacggcgccgatgtgaaagggtatcgcgacgcgcgcggcgattccgccttgcataaatgtcaggagccgtggcagatggaactgcttatctcggctggggcggatgttcacgcgttggacaaacaagggcgttcgccttttgatcgcctgttgagcacataccaaagggaacccgcttggtccgaaaaacctactgcggaaggtttggcgctgttggcgaaggccggagcggatgtcaatgccctaagccaagggcaatccgctctgcatgttgctgcgaagcgagggcttgaaggcgattgccacatgcttatcgatgccggcgccgacgtgaatctgcggacggacgggggagacaccccgctccacctggccagcgacccaagcgttgtgctgcgcttgctggatgccaaggccgatccctccctgctgaactcgaatggcgagccagcgctaaaacatgatcctatgctttatcgagaaagtattcggaaccaccgagacgatttttcgccgcgtgagcgcgtcgatgcggcgaccgacccgattttcctggccgagacgcccagcgagcttgtcgctgcgttggggcagggcggtagtgtgagggacaccgatgcgctgggccgaaccgcgcttcattacgtcaaaacgggggagatggtgcaggcgttggtgttggccggggcccaggttgacgcaaaagacatggagggaaacattcctgcccataccgcggacgagcgcgcgatggaagagttggtcgatggggtggggagaggcgtttcgcaacaccatgtggagaacgacaggggggaaaccccttatgcgacccgggatcactaccacgaggctcggtattgggatgccgaagcgaaagagcaggccgcggaaaaggcggagcagacgaaggaggcgcaagaccgcgtgttcaacattgtggaactcattgaggccggcgacgccaaacgtttgctggagcaggtggatcccaacgaagaactggtcagtcggaaccgaacgttcaacatcgacggagacgagggctgggcttacaacgactatgccggctacagcgtcctccatgaagcggcgaagcagggaaacacggagctctgccgagaactggtgttcgcaggggcggattggaacaaagaatgtaagctcgtcggcgagcgaggctttgacaaccatgtcaacggctttcgaaacgagcctggcatgaagcccatcgattttgcgaacaaccgagagaccaagtcgttcttgaacaacgctgagaacgagctgcgagcccacaaccgatccaagctcttggacgagcttcttcccgctgccaacgcttggaagccaccggaaggcgggtttgcggccgacgcccaacgccaggtcggtgcggccatgaaggcccatgggcaggacggccaaacccaggaagcccctcgcttgcgagcgcgcttctaa

SEQ ID NO: 513413 - DNA, 834 bp, Stenotrophomonas maltophilia
atgctcgaagccaccacggtgagcgagcgtcgggcctgccgccttgcggggctgtcccgcgatgccttccgccatccgcccgaacaggcgcctgcgaaccaggcgctgtcagcgcgcatcatcgaactggcgcaggcgcgccgcaggttcggctatcgccgcctgcacgacctgctgcgtccggagtacccggctgtgaaccacaagaaggtctaccgcctgtatcgcgaggcgaacctggccgtgcgtcgtcgcaagaaggtccgcaggccgcccggcgagcgccagcggctgtcgtctgcaacggcccccaatgcggtatggagcatggacttcgtcagcgacgcgctggccaatgggcgccgcctgaagtgcctgacggtcgccgacgactttacccacgagtgcgtcgacatcacggtcgaccatggcatcagtggcgcctacctcgtgcgcgtgctggatcaggctgcgcggttccgcggctacccgcgggcggtgcgcacggacaacggtccggagttcaccagccgggccttcatcgcatggacgcagcagcatggcatccaacacctgctcatcgagcctggccggcctatgcagaacggctacatcgagagcttcaacggcaagttccgcgacgaatgcctcaacgagcattggttcacgtcgctggtccaatcccgcagcgtcatcgccgagtggcgccgcgactacaaccaggtgcgaccacacagcagttgcggacgcatcccgccggcccagttcgctgccaaccaccgaacccaaacccatcccaccgcagtacccttcaaccccaggctccaccagtaa

SEQ ID NO: 513414 - DNA, 267 bp, Stenotrophomonas maltophilia
atgcgcaagagtcgcttcaccacggaacagatcattggcttcatcaagcaggccgaggccggcatggcggtatcggagttgggccggcagcacggcttcagcccggccagtttctacgcctggcgggccaggcacggcggcatggaggccgaagacgccaagcgcctgaaggagctggagtcggagaacaaccgcttgaagcggctgctggctgaagcgcacctggacatcgaagcgctcaaggtcggcttcggggtaaaacgctag

SEQ ID NO: 513415 - DNA, 339 bp, Stenotrophomonas maltophilia
atgaaacttcagttcctacacgaagaaggcgtcgctgcggccgccgcctacgaagcagagcgcaaccggcgcaacgaagatctggaagtccaagtgaacacgtgcaggcgcgcccacggtgccgctggcgatgaggcctgcagcaaggtccgccattcgctctctcacttggaagagcatttcgctcagaagatcgaggaggcgagcaagcggcgagacgagttcggctttgcggactaccagctctacaactttgcctacagtgagctgcgcgagcaggtgttgaccctccagttggaggcattgatggagctggaagccgccggaggccatgcatga

SEQ ID NO: 513416 - DNA, 264 bp, Stenotrophomonas maltophilia
atgagcactcaacgcgaccgcttgtccatgatcccagcgctcaagccgctgacgacccgcgaccacttggcgttgctgcacttcctttggctaggcgtttcaggccttggagcggccaagctaggatgggggatggtcagcggtccccgagccacgctctccgatttctccgttggcgtgctgctctgcctcgcccctctagcgattgccggtgtctgggtgctttgcctgattgggattgcccaacaccatcagatcttttga

SEQ ID NO: 513417 - DNA, 186 bp, Stenotrophomonas maltophilia
gtgcgaaaacttttcaacaaactgctcaacatcgcccttttcggcatggttctgttcgccctggaccaagttccggagcgcttgggacgcatgtccaaaaccgcccagaacctggttcagcaggtgggctactcgggccccatgcagggcattccctcgggcgtgccagacggttacgagttctga

SEQ ID NO: 513418 - DNA, 2607 bp, Stenotrophomonas maltophilia
atgtcgaataagaatggggccgttgcgcccccgacgctggaagagtggttgaatggccgcccaagctggttgcgcatggcggcagccacggtcatcgagcaccgccgcatgccgaacgaagaggagatggaggcgctggcggatcactgcctggccgacgcggccaagacactggacgctccccacccggcgttggcaccgggaaccatcttggggacacccaccgccgctgagcttcgcatcgactcggtctcctccatccgcggcgtcaatgcccttggcgaggacgcggcattggatctcagccaaggccacatgaccgtggtctacggacccaacggggccggcaaatcgggctacgcccgtttgatgaagcacgtttgcggcgcgcgggccaagggatccatccacggcaacgtgttcaagcagaaccccggtgctgcctctgctctaatcaaagtcacggcgacccgatccgacggcacgacgtcgtctgctgatctcacttggcaagcatccgacggcccccatgcgacgttgaaagcggtgccggtgttcgactcagccacggcgctggagttcggcgacagcgccaccaccgccacccatcttccccgggcgatgcggttcgtcgggatgctcatccacatctcagacgatctcgccacccgattgaaggcccgcgccgccaagctcaccagcaaactgcccatcatcccggaagatcacgcccaaagcagtgcggcaacgttccttcggaaactgacggcgaaactgatcgaagaggagatcaaccagcgttgcgctttccccgcggcactgaacgatgagcgtttggcgctggagaccgcactggcccaggcgaaccctgaagtggcccacgccaaggccgtcggagagctggaacgcttgtcgcagatggccacaagcgtctcggcgttgagggggagcttgagcgacgagaaggcccaagccctcctggaggcccgcagcaatgcagaggtcaagcgccaggccgccaccgcctatgccacggccttcctcaatgggctgccgctcaaaggcgtcggagacgccgtgtggcaaaccctttgggacgctgcaaaggcgtattcgaccggtcttgcctaccgtgatctcccgttcccccacgttggagacgaggcttgttgtgtcctctgccagcaaccgttgggagacgagggcaaggcccgcttgaccagctttgaaagctacctcaacgacaccctgcagacagaagcgaaaagcgcggaagacgcgctgacggcgctgaaaaaggcattgcccagtcctctccccgatgtcgcttggcaggcccagtgcgccgctatcggcttggaagccccccaagccactgagctgcttgaggccatccatgcgaggttgaaagccatggccgaggccacggccgctccggcagtgcagtggtctacatggaccaacgcctacgatcagaaggtcaagacaaccaccgctgaacgcgacgcgctggcgggcttgctggacccgacggggcggaaagagaaagaaacccgcctagcagagctgaaagcacaacagtggctatcggagcagcgcgatgcggtatgggccgacgtgatccgcctcaaacgcgtgggaacggtggaagccgctgtccggtccacctcaaccagccagttgacgaccaaaagcaatgacattggcgagtcggagttggccaagggctattgcgaccgcttcaatgccgagttgcgggcgctggggggccattcgcttcctgtccgcatgtcgtatcgctcccaaggcaaaggcgcgttcaccttctacgtggaactgaaggacgcgcaaggtgcccagaagaatcgggagatcctgagcgagggtgagcaacgcatcgtggcattagcggccttcttggccgacgcgacgggccttgaacggggcatgcccgtgatcttcgacgaccccatctcctccctggatcagcgctttgaggaggcggtcgccaaacgcctggtagatctggccgagcgtcgccaggtgatcgtgttcacgcatcgattgtcactgatggttctgctgcagagtgccgccaagcagcgggccaacctcgatcagtctacggtcaaggtcgcggttgaatcgatcgcccgcgatggaagtaagaccggcatgccggcgcagatcaacaccttctccttgaagccacaatccggcttgggacaaatggtcagcagcatcggacagcttaagaagcttgatccgccgctaaaagaacttgccctgaaggccgcctgcagcaacttccgaatcttggttgagcgctctgtagaggacgagctttgttctggcgtcatcaaccgctaccggcgcgagatcaacacgctcaacaagctacagcggcttagtgcaatcaccccaacagactgcgcgctgatcgacgggatgatgacgaagtattcggcattcgagcactcccaacccaccgacacccccagttggcttccggatccggacgaactgctgaaggacgttcaagacatgctcgaatggtgcaaggagttcagtaagcgagcggaagcggcggcgaaacccaaggcgtag

SEQ ID NO: 513419 - DNA, 189 bp, Stenotrophomonas maltophilia
atgattctggcctacttctgtcttgtacttgtcgtgttgggagcggtcccgcgaatctgcatctactcgttggagatcgtacctcctgccaacgctgggtcattgttgcggaatggacgcttgcagggcttgttcctgctgagcgcgtcgttgttgattctcagggaattggtgattaatcctgcatag

SEQ ID NO: 513420 - DNA, 261 bp, Stenotrophomonas maltophilia
atggagctgggcacgattacggtgcagcagcgccggcccccctccgatgcctgggcctctgccgcagtggcccctcccgttccgcttccggcctcgggtgctgccggtgagaagatcaccatcaccaatgagcttcccggtggcttcgtggaaacctggacgttccagtgggttgcgggagagggtgggggcggttggaagcagaccgattacgaaacgcacgcgccgatcgtgcagcctgatcggcccaacgagctgtga

SEQ ID NO: 513421 - DNA, 873 bp, Stenotrophomonas maltophilia
atgcaggtaatggatgcccatgggggcaatgaacagatcgcctccggccgtcggtactggaaggtgctggccctgtgcctggtgctcaccgcgtgccaggcgccttctaccccggcatcggccgaagcggcggccgctccggttccgctcgccgcggcagcgccggcagcgcccccccatgcagtgaccggtgattcctctcggtacccggatgcgtcctacacggacggtcgcctgcgcccggcttatggctggtgcgtggatggcgtggaggatgcgggcaagctgcaggcctgcggcaaggatgaactggcctatcaggaagggcgcctgcaggagggtgccagcaagactgtgaccgggctcgacgctgctgcgaagcaggcgttccttgccacccaggcgacctggcgcagcgataccgaccgtcattgctccgctccgaccaatgccggtgtggatgacctgaaggcacaggagtgccgcctgttccgcgtggccaaccgtgccgacgcattgatggcgcagagcggcccgcccgatacctcctacacccaggcaacgcttcgcccggaattcatccgctgtgtgcagcaggcccgtggcatgaacgaccatatccaggcctgcggcgataccgagctggcctaccaccagacgcagctgcaggccgaagtggcgcgcctgatgaacggccccgacagtccggccaaggaccgctggatggacgaacaggccacttgggccgaggacaccgacaagcgctgcagcccggctacagagagcgtgggccaggcgctggacgcgcagtcgtgcctcatcaaccgctacgccaaccgcgcggtggaactgcaggcgcgcgagcgccgttga

SEQ ID NO: 513422 - DNA, 591 bp, Stenotrophomonas maltophilia
atgcaagccttgagcgcgcctgcgcgcattgatcgatccgcctttgaaatccgacgcggaattgcgctggtgatgtgcctgttgctgggcgcctgccaggccccttcggccgacagcgccacggttgccgctgccgccagcgcagatgagcccacaccggcagccacatcgacaccggccagcgcgacgcctgcaactacagccgccgatgccgacgcggatgccgatgactttcccgcgccgctgcccgatgcctcctacacccaggccaacctgcgtcctgcgtacacccgttgcgtggacgccagcgaagcggtgacagcacgcctgcaggcatgtggcgacgaggagttgagttaccaggaagaccgcttggccgagatcgtcgccggtgtcgtggcaagtcccgacagcaaggccaaggatgactggatggatgcgcaggctgcctggtggtcggacaccaatcgccattgccgctgggatcccaaaaccgatggccagggccagaggctggacgcgcagtcgtgccgcatcaaccgcgtggccaaccgcgttgaccagctgcaggccgctgcacgcagcaagtga

SEQ ID NO: 513423 - DNA, 2403 bp, Stenotrophomonas maltophilia
atggatgtagtgaccgatgcaaggaaggcgatggaacactggcatcgcggccagacctccgcccgttttgaaaccgacaaccgtggtccaggctggatttcctcgggcaagggtgaccatggcggcgtgtcctatggcagctaccagttcgccagcgccgttggcggggtggacgagtacctgaagtcgtcccgctatgcggaccagttccacggcctgaaacctgcgacggaagccttcagcgagcgctggaaagcgttggccgcacgcgacgaaaagggcttcgcccaggaacagcacgatttcatccagcaccagtattacgacgtgcagatggatcgcctgaagaaggtcggcgtggacctgcaaggtcgcggccctgccgtgcaggacgcgctgtggagcacgtcggtgcagtatcgcaacatgacccgtggtgtattccagaacggcctgaaacaagcctatggtgatgattacaagctgtccgagctgagtgacgagcagattgtcagggccgtgcaggattacaagcacgccaacgtccagcgccatttcgagagctcgcccaagcagtgggattcgctgcgcgagcgcacgctcaatgaaaagtccgagctggttgcgctggcgcgctacgacaggatcaaccacgacccgcagccgtaccagggcaagacctacgaacaggcgttcggcgagccggcgcatcgtcagtccgccgcgcgcccggcgcgtgcaccgatggtcgacggtgtgctggtgcagggcgaacgcggcaatgaagtgctcgcgctgcagcagaagctggcgcaggccggctacaccggtgtggatggcaaggtgctgaagcccgacggcgatttcggcagcgatacctaccacgcggtgcgtcagttccagaaggcgcatgggctggaagaagatggcaaggcggggcgtgacacgctgtctgcactgaacgccggggttcgcccacccgcacagacaccggcaccgccatcggtaccctcgccagaacgccacgagccgaaggcgccctctacggatggtgcgccggtggcggccgcccccggtggcggccgcatcacggtgatcgagccctacggcaatgtcaccagcaaccgcacgctggcccacggcatcagtggcgaaacggcctatcgcgaactgaagatccatcatcccaacaccaatgccgaagccgtgcgcaccggcgatgcccgcaaggccgaccgccaatcgggcatggtcgaaggcgagatggagaacatccgcacacgtgaggacaagaatgacattccgctggtgcgcaaggacctgatcctcaccgatcgcctgggcagccgcgatgtgatgattccgaacccggtggccggctacgcgcagttcaacaaggacgcgaccaattcgatcagcctctacagccacccggccggcgatccgcgccgtgagctggtaggccaggtgctgcacggcgccgctggcacgtcgccctacaagaacggtgacttcgtcgagtacggcgctccgctgatcaagcagtcgaacgccggcagcaaaccggtgcatgcgcatatcgaagtggagccggcgcagttccgccgctacctcggcgacatgctcaacgaccgcatcaccctcggcggcaaggtacacgcgcaggggccggaagcagcgcaggccgcacgcgccacgcagcaggcgccgatggccgacggcatgctggtgaagggcgaacgcggcgatgagatcaaggcgctgcagggcaagctggccgcgttgggttacaccgccgccgacggcaaggcgctgggcaccgatggcatctttggcaaggacacgctggcagcggtcaagcagttccaggccaacaacggcctggagcaggatggcaaggccggccgccagaccctggcgcgcctggacgacccggccgcagtgaaagccggcgcgcagaccgccgccgccccggcacgcgccgaaccgaccgcaccggcagcgcccagcatgcgcgatccttcgcatgccgagaatccgcgcttcaaccaggccctggagaaactacaggagctgcagcagcagcgcgtgcaggctggcctgtgcccgctgttcgccaatgcgcaggaaaccgaacgcgccgccggccagctggcctacgagagcaaggtcgccggcatgcgccagatcgaccatgtggtcgcacgcccggatggcagcggcttgttcgccgtgcagggcaatgtcggcgacccggctgcgcagcgcaccttcgtcgacagccgacaggccgtgtcgcagtcggtcgaggccagcacccgccagaccgaggaactggatgtccagttcaaccaacgcgtgcaggaacagcagcaggagcaggtgcgcaaccgcggcctgtaa

SEQ ID NO: 513424 - DNA, 687 bp, Stenotrophomonas maltophilia
atggcggcgggcagccgggatgcaggccgggttgccgctgccgcccttgcgtggggatactcggtacgcgagttcctgttgcaccgcatctgttggaagggaagccacaatgaaaccgactgcatcctcgctggcgggctctggcctcgcctgcctcaccctgctggcgggactggccttgggcagtggttgcagcagcgtccgcgacacgcgccttgcggagatcaagcccggcccacgatgcgacttcaccgaaggcgccaccttcgacaaccggccgtcctacctgtcggccggacaggaaaatgcgcccatcggcgcgctttccaggctctttggcgtctacaacaaggacatccaccagatcacgatccgccaggaggcgagccggctggtggcccgcttcctgccgccgacggcaccggcatcgaggctgcaggcagcgcttccagcaagagctacagcgccgaaggagaacagctggtcatcaaccggtggtcatcgtgcaaaccgggcgaggccggcgccggctgcatctggtcgcgcgtggaactgtcctgcacggtggaaaacgatccggtggtgaagcaggtggacggaggcgcggtcctgctggccctgatcatcccgatgggccagcgcaggacccagttcggggtgtaccggcgggtcgaccctgcagaatga

SEQ ID NO: 513425 - DNA, 513 bp, Stenotrophomonas maltophilia
atgggactgccgcaagatttgctcaagcaggctagacatcttgccactaaagagaagaagcggccgcagcaggccaatttaaggcgggccgtatcgtcggcttactacgcgctttttcatcttttgtcgtcggaagccgcttctcgtatcactccgcttcaaccggcgggaatggctaaagttgtgcaacgggctctgacccacggtgacatgaagaacgccgcgaaaggtatcgttcttaatcctccggcgcgcccctatctaatgctactcggagcggcagggccagtcccggccgacctggcctacgtggcccgtacctttgtcacgctgcaggagcagcgtcactctgccgactacgacgtttcaaagacttttctgaagtctcaagttttaactcaagtcaaagacgtcgaggatgcattcaataagtgggccgctgttcgaatgagccctcacgctaacgcacttctgatggcattttttctttggaagccacttagcggtcgctag

SEQ ID NO: 513426 - DNA, 615 bp, Stenotrophomonas maltophilia
atgagcatcctcaacgttctgatccgccctgaacagctggtggtcgctgtggacacctgggcggaggatgccgtgaccggagcgggctcggccggcgcgaagctgttgctcatcccccaacacaacctggtcttggcgtgccggggctcggcgcagttcttcctgcacctctaccagctatgcctgcaggcgagcttccgtgccgatttcaccatggaacagctcaccaaggagctgggcctggtcatcgacaaactttggccggactacgaaaggggagctgtggaggccgggctaccgctggccgcgctgggcgctgagatcgtcctggccggttggtcaccgaagaacgggaggatgatggccaccgcttacgccaagtctcccggtggcagaccggctgtcgtccagcccatcactgggcagctttcgtcgcctggcgagcccttgcaggactggccgccctcgatggccacgccggccctgctcgaagccgggcgccggcaggcgcattggctcaacgaacgggtgggcaggcgagtggccggaggacggttgctactggggctcttgcagcagggccaagccgttgtgaaagatcttggcgtcctttag

SEQ ID NO: 513427 - DNA, 273 bp, Stenotrophomonas maltophilia
atgaaagacgccgaacagattctcgaacgcctgcagacctgcgaagccgcgcttgatgcccagcgcggctatatcaaggcgttggagtatggtctccgagcattggtggtcacacacccagcaccagatcgtttgaatagcgcctggaaacacctgctccctggaatcgcagacacgcacgccgccgccgacagtgcgatgttcaccgccgcattccagcaagccctggtgttgattgggcagcagatcgaagggaatcagagcagttcgtga

SEQ ID NO: 513428 - DNA, 291 bp, Stenotrophomonas maltophilia
atggacgatgcccggaatcccaaaaggaaggggcaacgcaaggacggtatgccctggaaaagcatcattgcggtcattgtgatcgtcggcgttgtcttggcgattgctgaaatgggcagggtagatcgtcagtaccgcgcgcaggccaaccgccaagcgcttgaggccatgcaggcagtgacccaaggcgaagattctgtggctcggccggcgctggataccattccggccgaagacgctgagcagaaagcactgagacaaaaaggccacgcggcttccgacggccgatga

SEQ ID NO: 513429 - DNA, 330 bp, Stenotrophomonas maltophilia
atgtgggcaaccttcgccatcttcggcctgggtgcgctactgctctccatcggcatgatcttcggtagacccgacaccaagctgctgttttcccagccacgctggatgctggctagcggtccactcggaccgatctacgtcgtagcgctgaccattgccaccccgcatatcggcgtggggctgaccatggcgggaattctctttggccgagccctggtcagcctttgcgtggatcactgggggctacttggatgtcccaagcgccccattgatcgatatcacgtgggtgctctcgtggcaattcttctggcgctatgcctgatccattag

SEQ ID NO: 513430 - DNA, 186 bp, Stenotrophomonas maltophilia
gtggaggaagacgaggtccagggcgagaagcgcagcaactggtcgaagatcgacgcggcctggccgcaccaggacgctaagggctaccgcattgtccgcaacgcgatgccggtgaacggtgtggtggccctgcgactgggcgagcattcgtggaatagtctggatcagactgcgttggccttatga

SEQ ID NO: 513431 - DNA, 237 bp, Stenotrophomonas maltophilia
atgagcaaaccaaccctaacgctgtatcgaatgaccgccgacttcactggcgagcacctctacgttctgttccaggacgaccatccaacgctgccaccggtattggggccgctagaaccaattgaagtggccgaagaccaccccttgaggatgtccgagagggaacactggctgcatcgatgcaacctgatggaccgagggtggaccgtgttcgggtcgcagcacaccttcggatga

SEQ ID NO: 513432 - DNA, 2202 bp, Stenotrophomonas maltophilia
atgcgcatcacattttcccgctacagagaagagctcaacatgattgtccaagcattacgagaaaagctggaacgctcaacctccacggccgaaatggaactactggctcgcgatgacaagacacccccccagtgcgagaaaatctcgtcggtccatatcgaagagcttatctcgcttctcggaggaaacaatcgtaaaaagaccaatgcccttggcttggccctcgcactggtggacgcagatgggctcatttccaagctccgtcgtgaaggagcactgagagcatctcgctacaagtttaagtgtgggaccccgaaagagctcgtgacgctgctaatcaagctacgcattcgcctcgaccttacagaggagcggtgcgtataccttaattccgtcctcaatctgtatgtgattgcacccgaagctaagcgaattcgaagcgctctgctgtcacgcctgagggcacgaaaaggaattgcactgaagtcattcctagtgttgctcgaccgagtttttgcgcacggccgtcaatataatcctttcgcgcaacctttcagcattgagcattacagcaatgaagatatcagcgacgcggtctcgcgtatccttctgctttatagggaagagtacggactgtcagcatcagacttggcattgactgacccacagaccacgaaccttctcaacagcacctacacgatcgatctgctcgacacactgcaacttgaaagtctgtataaggcagaggttttgcttgacggtttgccctatcaagctgacttggaagatggcgacatagtgatccgttccacagatccgaacacagagaaatccgtgcgatatggatacatccaaacggacaagcaggttctcgttcgacataagcatgcgtatgaccttctttctgccggcaagccgcctcgcagtatagaagtggcatttcaagagctttacgatggccacctttctaagttcgccaagatcattgagaaacctatagcccgtatcgcaatcgggattccagatgacgcgtcattctttgacaatctttcgagtaacgagatatttttccaagaactcctgatgctcctgcaactcgatgtggagagctatggccctctgtcgacacaacccattgagatcaaggacggcgtgacttcgtttgatctcttcaaggtcaaccgacttttcgcactaatgagttttgcaatggatagcgaactcaagaagattgatgacaaagagaagcggcgcctactgtcacttcactcagtcatcccggtaatgaagaagagtgccttgttgcggcttcttgaggccctatttcaggacgggaaggcggaaaatgtgctttctctcctcaccatggaaagcaatcgagaccatgtcgacattcaatataccccgttcatttttgtcgatgaccactatttcttagcacctggggtaattgcaaactccaatcttgttcggaactccatacaagccaatggcctgtcgagccagcggatcaaggccgaggatccgatgcagaacgccgttgccaaggcacttgaagacgctggttttctggtcggagtggaagtaggggacaaaaattcctccaagccgtcagccatacctgaatttgatatcgtcgcgtatagagatggagttctctacgcgtttgagtgcaagaacaactatcatccatgctcagcgcacgagcgacgcaatagctattcagccattaaaacgggcggaaagcaactgacgaagaggaaagcttggctcacagacgagaagaaccaagataaactattccagagacttgaatggaatgtggcgcgacccgaggcaatccacacatgtgtattgctgtccaatcgggtctttgcaggcgcccaaatcgatggtcaccccgtccggcaagctcacgagctcatcaatgttattctccgcggaaccatcacctctgatgccttctcgctacgcttttggaaaggcgagacgtttgccacgtccgacctggatcagttcttgggcgatagcggactgatgaaagatcatttcgatgcacttaaaccgctcaacactcgtcgaaagatcggaagcaagacggtgatccacgaaagctggtatctcgatccaacagaagaagatcgcatcctaagaagtcgctacgtgatgactatgaaaccagagcaggatcatacgaagtaa

SEQ ID NO: 513433 - DNA, 522 bp, Stenotrophomonas maltophilia
gtgcatcgccgtctggaagaacgtcccgaagacgccgacttcaatgctgtcgaagcggcaatctatgtgggcagaagcaccaagaccttgaaacgcgcgatcgataaaggcgtggggccggctcgggcgaagaaccccgatgccagtggtctttacgccaccaatcgccatacgcgctaccgcaagaacgacctagatgcgtggcgttcaggcctgattgactttgcggtcgagttcaagcgattcgacgacctgacctctgatgcatcttggctcgtgacaagcgaaggaaaaatccatgggtacctgatggccgccgatagcgtcgatgccgtcctgcacgcgctgagcgacgaggctgtggtctttgcccctatcaaccaagcactcagaaaggcgtggtcagacatgcctgcgcgtcgggcctacgatgcggcctttgatgaccttgtggagcatgagcgcgctgctgtaaaagccgcacgcgagcgagatgccctccattcggagtttggcgcgtga

SEQ ID NO: 513434 - DNA, 768 bp, Stenotrophomonas maltophilia
atggccggtgctgtggaagacccaaactggtaccaccgcttttctgcttggtgggaaggccagtcgttggcaatcaaggtttacttcggaggttcagcgcttctgctgatggccatcgcctgctttcacgcctcccctcgaggactgctgaccgggtgtctgacctacgcttcaagcgggcttctagcttttggttttctgcgcgaggcatacctatgggtcacacccaagctccagcttcctcttgtgaagctgttgatgactggcgcgagcgtgatggcactggcggcagcaacggggattagcagaatggcggtgaacgaggcgacgggccaagacccctcgcacttcccgacgacaattgcgttgctgctgccgctgtccgtgctacgggtcgtgtcagtggtggcgattgtcgtcagcacgctttccaccgtggcgctaatcctctgggcgggagcaaaagtacttcttacttgggggccactgggcgacaacgacttttggcttcttctggcacgagtacttgcaggtttttcgatcgcaatcatcatctccagtacgagcagcgccgctatcgtgccgacgtggatggaaaccatggcccggaagtcagcaatgttcctagacctctacggtgacccggcgtgcaccacaaagcctggcgatagggcgcggcgcatcaacgacaacgtggtcatcgtcggcgccgcgtcgggcgcctatcccacgtatgttcgtcgcctgtgcgccatcgcacccgaatga

SEQ ID NO: 513435 - DNA, 237 bp, Stenotrophomonas maltophilia
atgaaatcaacaaaagccacggcggaggcgaagggcttcttcgtgacctggacgatcgtggtggctgcccatctgacttcttttctgggcctgggcttcgctgacctgctgccgcatcctgagcaagtccgggcgatcttcagcttgctcgtcctagcgctcgtgccggcgcacgtggtggtgcccggtctggtggcaattgtctacagcatgatgcgccggacctcatccaggtag

SEQ ID NO: 513436 - DNA, 975 bp, Stenotrophomonas maltophilia
gtgcccactgtgttcttttcctactcccacgccgacgaggaccttcgggaccagcttgagaagcagttggccatgctcacgcggcaaggggtgattgagacttggcatgatcgccgcattggcgcggggcaagagcttggccaggtcatcgatgaccacatcaacagcgatgacatcattttactattggtcagtccggacttcatcgcctccgattactgctacgacatcgagatgaagcgggccatggaacgccacgacgcgggcgaagccatcgtcattcccgtgattttgcgtgcttgcgactggcaccatgcacccttcggaaagctgctcggcacacccaaagacggaaaacctgtcacccaatggccggaccgggatgaagcgttcctccaggtcgccagagcggtccgtgacgccgccggacgcatttcagggagccaagctccggctaccctgaaaaatcccccgtcgaaggcaaccgtcagacaaagtgatgccagcccatcaataaccagcccacgctcgagcaacttgcggttgtccaagaccttcacccaacgggacaaggaccatttcaaggccgagacgttcgaatacatcgcccgctacttcgagaactctcttgctgaactgcaggcaaggaacccaggattcgaaggtgtgttccggcgggtggatgctaaccgcttctttgccacgatctacaaggatggcaaggacgttgcacgagcgacggtctatatggggggcatgctgggcgggatcaactactttcaaggcgaaaccgacagcagcaactcgtccagcgaatctctgtcagtccaggctgacgaccaaatgctcttcctaaccagcatgggcatgtcatcgttcggacgcgagcatgatcggaagatgagccaggagggggcagcagaactgctgtggggcttggtcatagagccacttcaacgacgcaataactggtag

SEQ ID NO: 513437 - DNA, 972 bp, Stenotrophomonas maltophilia
atggaagaggtcacctccagccgctcctcacatcaaccgcgagatcctattcacgaggcgacgctctggaccttaagaaagttgaaggaagcgacttcaagacaccctcttgacgaagagactttctccgcctttattctgagcggactatacttcaccgcaccactattctccgcatttcttggtcgccctgaaaaatcaacgaatgccagctggggaattttcaataagagtggaggcggtgatgaccccctctcagagacgagcacgggcgctgatttctgttttgttctgggtcgcgaaaatgagttcgccgaagttggcttctttcaggcaaagcatctgaaggccgacaagccaagaactctcaacgtgagacacggcccctcagaaacgtcggaggggaatacccagctcgcagtgcttctcggttttgcgtgccgactcatggcatcgacagatgcaccagggttcgcccatttcaagaccatcaaaaccaatctagatgcggcagcatatttaaataagcaaaaggaaggctacattacagatcttacctctaagattgaatgggttcatcacatcatctaccatcaaggcgaacctacagccataccactatctaaacttgatcgagaaacgataattgcagaggtaaaaagaaccccccctaggtcacacaagatcacacacatgggaagcccttttagcgatctgatcttgcaagctttcgatagcgaaggctcaggctggcttagaatccaaagaagttcgttggatgagcttctacctgcactcgccgaaatttcgaccctcatagtttcggatgacaggggcggaagggctttggttcccaagggatgcagcgatctgacaccagctttggacttgagtggcatgccgcaccacgcaaaccgagagttgtgggaatcactcatagcgcgacctgcacgcccacgcacagggccttag

SEQ ID NO: 513438 - DNA, 879 bp, Stenotrophomonas maltophilia
atggcgcgcgaaacacgagttgccgacctggtgaactggcatggaaagctgcacgacctccgcgacgcccagaggtgtcgtgcccccaagtttttgctccctttccatttcgtaacgatggccttgctcctcaaagaggaaggcgcgggagcggtcacaatttcgcctcatatggaggagtacgctgcccgcctgaagctttgggaagcgatcgggttggtcagcccgccagttacgtctgagccagagacgagcagccgttaccacgaaatcactccgctaaaagatgagcaggcagttcagacctctgcaaccgcccttgccgacatgttgacggggggtggaaagcatggtacgaaagcacagcgcgaggacatctcgatcatgatctctgagctcctgggcaactgctatcaccatgcccgtgcgcacgacgggtttcacggcctagcttgcgctcagacttggtacaacgacactcgtgctcagttcgccattgcggacacggggattgggattaggcaaagcctgaatgagagcccagatcttcgtcctcagcttagaaaaaggaacgcttgcgagtatgcttgtgagctaggagtttcaagcaaactcggccgcggtcacgctggctacgggctggctatcgctcgtgacattgccatgcaaacgcccaattcactcctgtatgttcagtctctcaacgaggtctactatgttgagaaccagaaggaggccgagattgatagcttggagcatgcgcttgacgggacacttatcgtttttgagtgggacctcaagcgccccctagatttggcaaaagtgtacgctagctggccgggtaacgacgatgacgacgataccgaaggattcttctga

SEQ ID NO: 513439 - DNA, 561 bp, Stenotrophomonas maltophilia
atgcttccctcgctcggctaccaaggcttccgcactgcccccatcccgtccggctgggtccagatgggcgagcgctgggcgctgtggtggaacggacgcgaggtggccaccgtcactgcggcacgcgagggtggctaccgcctgcacatgaacgccctgaagatgtggcagaccaagaacgcaccggttgccagcatccggcagggcaagcgcttcgccgagcgctggtgcgccgccaggctgtatccgggcttgccgctgcgagaggcggtcgttcgcctgaccgacaacacacccatcaaaccggcgcgtccgctgcctggcctgccgccgacccgcgaacagcagcaacaggcccagcggctggacgaggcgactgctgccgcgtccgcccgggtgatggcggcgctggcgcagacaggaataacgcctatgaaccagcccggatccaggccaggaataggctgcgcgcaagctatcggccgtggcagatcagttcactcgtgcgccagcgaagttgattcctcgcttaccgagagtgaagtctgttgtgggcgctga

SEQ ID NO: 513440 - DNA, 879 bp, Stenotrophomonas maltophilia
atgtcactattggtcgatcttcaggcagctcaggagtggcttgcagactcagagattgaaggggacgagtcgagggcggttacagaggaggagtactggagatcggctacgaccaggctgagcacgatactcgcaatcgcccaccagtctgctgagttctatcttaaaggaagaatcgcggatgtgagcccgtttctattgctttcaaatagcgttagggactggcctaaggctgattctagtggcgacacatcattctctaaacttcgtactatcgatgcgcaggatattgtgcgcttgcacgatcgttgttcgtcgtcttcgcttagcgattcgttcaagtcacagctagagaacctgcgaattcgccgaaattctattatgcatactgtcgactcgggtgttgctgttaaggtaaacgagttgatcaggtcgattctcgctattcataagaatctagttgggggtaagtggctggacttccgaagggcatctctggatcaatcaagtggcagtaaactctatcctgacgaagatcgatggagcgatgggcacgtcgtatcagagtttttggcccttgagtccattctttcggctgctgagtttgaggagcaccttggtctccctgcgggtaggcggcgttacatttgtccccagtgcacgtgggagacgttttcggattctggtgtggaagtgttctcggctgtgctggagccaaattcgccagaatcgaagaccatatggtgtcctctgtgcgataaggtgcaacccgtctatcggttgagctgtgaggatgaattgtgtcgagggaatgtgatttcggatgattggctgaaatgcgcgacttgtgctggtcggcaagtcaaccatccggattag

SEQ ID NO: 513441 - DNA, 996 bp, Stenotrophomonas maltophilia
atgaaatgggttaccgaggttcattcgaaggcccagatactccaggcgcagatcgagcatgcgcgctcgatggcgcgagaattcggtctcaatgaggcggacgcgatcgcgccctatctgcgagaagtagagcgaatctatgaggcggaatttccgctggcccgtgcgatggatgactcagatctggtgttccacattgaaggcccagcactggctgatcacacccccaagctcagtctggtcgagtcaatcttcgcgaacatccgaacccaggtgttttccgtcgcgaaggctgtggcgaacatgggagctggcacgcacctatccgacaaggatgtcgagctgtcgctctctgcactcgcgccaggaagtctctacatcggagtcaaggcggagcccccaacatcacgcaccgggcagcagcatctgctgggcgaagaagaccggattctgattgcaacccgagaggcgatgagatcaattcggctggtcagccaacatctaaatgatgatgctcccgaagtgttggcggagatcccagacgctgtggttcgggatgctgctcttgttgccgttgctcgtctcgctcccacagggagagtgggtattaccaagatcactctcgcctctgcagatcagggtagggcgtttatgggtgaggggcttacacccaaagttcggaaggaactaaagcaccagctgcgaggatcattccgctccggacataacgtcgtgactctgcgcggcgaggttcgggagctggacttggatttcgaaagattcgaactcaggcgaatcgaacaatacccagatcggtctgtccgctgtcgagtgagcccggaagtgttcatagatatccaagcgcttgttgggcagcacgtggaggtcattggtttggctgcagaagcagctggtgagcttccaagaatgctgctggtctccgaagtgcgcgtcctcggcgaagatcgttccgtgcttcagccgaccctgatctaa

SEQ ID NO: 513442 - DNA, 453 bp, Stenotrophomonas maltophilia
atgccgatcccggctttaacgcaggagggatatcttcctgcgggcgaacatctgtgtgatttcacagagttcgaggagacgttcgctcacaatgagcaccgtgctgccttgctggcaaagctgcgagacttccttcgatttctcgatggtgaaggcttagccctgccgtattacctggacgggagctattcgacggacaaggctttccctggagacatcgatttcgttttggattgctcagcggccacaggcgaccagattcgtgctgcttttctattgatgaccacgcggcaacaggaaatcaagagcatctatcaagtggatttttgggtgtacttccccggggcgcctagtgacctgcgaaagttcttccagtacgttcgggtggaggaaatgcaggctaaaaatatgtctgtcggcgtgcgcaagggcatcctaaggataccgcaatga

SEQ ID NO: 513443 - DNA, 219 bp, Stenotrophomonas maltophilia
atggccgccggtctcacgtacctgatccatgcatgctttgagctgttcgtgaagacgtcggtccagaatcaagtcagtatcccctctggctttgacgagaacagagctacgctccgtgcgcagcacgaagacgttgcgaccgctgtgcatgcggaacttgccaagctcaacgccaccggtgctcgttccaagttgccggtgaggcagcgtgatccttga

SEQ ID NO: 513444 - DNA, 1395 bp, Stenotrophomonas maltophilia
atgtctatcgaactagcagagcggaacctcgtcttcggcaacccaaccgaagcagggaacaagcagttctaccgatggcagaacaagcctgctacggcgttcctaaatgactacgaaaagctaatggtttttctattctcggacgagactgaagcgaacgccaagtacaaagtcgctcaacgccaatcagcagccaaagtcgaaccgccgctgaccaagctggacaaggtgaagctggtatgggagcgcatccttccacatcgcgagctcgtgattggtggattacgaatccagactcaggttcgcggcgacgcaagcaagatctacaactcgtctgaaatgagcgacggtgaacgcgtcatcttctatctgatcgggcagtgtctcgctgcgcccgaggacagcatcatcgtcatcgacgaacctgagctgcacctgcataagtcggtgcagggtccactgtgggccgaagttgagagactgcggccggactgcctgtttgtgtatctgactcacgatgtcgactttgccgtggctcaagaaggcgcgcagcgcgtctggctcaagtcttttgacgggacatcttgggattgggagctcatcgaggacaacggcaaccttccagacgacctcctgattgaagtgctcggcagtcgaaagcctgttgtctttgttgagggtcttaacggtagtcacgacgtctcactctatcgcgagatccttgcgggatttctcgtcatcccgcgcggcagctgcgatcaggtcatccaagccgttcgagcgttgcgctcgaatacccagctccaccacctgcaggtttatggtcttattgatcgagatcgccgtacgccgccagaaatcgctgcgctacaggccgacagtattttcgttttagacgttgcggaggtcgagaacctcttttgcacggaggaggttctagcactcgttagcggccgcttggcccgcgacataacttccgattttaacttggctgtgagccacgtatttaagcagttgaaggccgaactcgacacccaagtttctttgcgggtcatcgccgaagtgaagttcaagctcaattgcttcgatgcgtcggctcgtggcgcgccagccatctcatcggctttggaagaactaaccaaaggcatcaatatttccgcgctgtacgcgcagttcgaaggacggttccagacagtgatcaattccgcggactaccaagagttgttgcgactatacaaccgcaagtctctgccgaaccagatcggaagcgcgttgggcctgaaggcgggagagctcgccgaactcgtggttcgccttgcaagaactgatgagcgaagtgctgtcgttgccgctattaagccgcacttaggcgccttcgctgctctcgtgacctga

SEQ ID NO: 513445 - DNA, 630 bp, Stenotrophomonas maltophilia
atgaaaatccctgccgacctgataggcgctctcatcggccccaccaccagacttacaacggatgtggcctcggcagtatgggaggcggcgctagacgagaacgtgctgggtaaggtgcccgtagtctctgctgtgcttgccgtacgcgagggagcggcggcgataagtgatcgcctgtacgccgcaaaagtagcccggttcttgattggcgttgaaagcctatcggccagcgaacgcgctcgtgttgtcgacgaaatcgctggaacacaagcaaagcgagggcggctaggcgagttgctgctggacaagctcaaccgtgcggacccactacacaaaccaaagatgctggccgatctgttcgtcgccgttggaaggcgcaagattccggcctcagacttcgatcgcctttcagacatggtgctgagcgtattcctcggcgacttgagggatctcgccgagaggggaagcatagaggatgtcgctgaaagccgccgtttcgcacttcaagcctccggcttcctcgcatgggaggttgacgcggtttacgcaggtggaggagcaagcttgaaatggtcaatcaccgcggacggcagcactattctagcgcactgcccgccaagcaatggttga

SEQ ID NO: 513446 - DNA, 744 bp, Stenotrophomonas maltophilia
gtgaccccagaagagttcattgtgcaccttgaaaagtacgaggaggatctgtctgggatactggcgcgtttcacgaagaccagggatcgcatctacatcagtcgcgatgacgatcctcggtaccgtcagatggtccaagagctagtagatcttttcgacgacgccttgggcaagaacggctattcccgcaacattgctgccattgtcaacgaaggtgttagcaacttcacacgctctccgtcattcaaaagcgtagaggacattatttcggtcctgcgctccgcagtgactcgcatcaagcgcaaccccgacttaatcgcacagcagcccgcaaagcctgacagccaaatggggcacgtatggtcgctgctccacccaagcgttgtcgccctagccaaacccagattcgaggctggtcactacgcagatgccgtagaggccgtccttaaagaggtcaactcagttgtaaagatgctacacaaagctgtggccaatgaagaacttgatggcgcacctctgatgcggaaagcattcacacctaacaagcccacgatcaccctggatgacctaaccacagaaacgggtcgtaacatccagcaggggcatatggatctgtttgcgggctcaatgatcggcgtgcgcaaccctaaggcccatggaaatatcgtgattacgccggagcgggcaatccatcacttcttccttgcaagtctgctatttcacaagctggatgagcggctttga

SEQ ID NO: 513447 - DNA, 2124 bp, Stenotrophomonas maltophilia
atgaatgaagcaatgtgcgcgatcagtccagatgaggcccttaccggagctgctgcaattgaaaaggataagcttcagcgaactggctttgcggcggctgcaacaagggcgctggatcgggtgtcatctaccgcgggatttgtaatttctattgaggggccttggggaagtggaaaaacgtcaactcttgcaatgatggagcatctgatccgaagttctgccgatgcaagtcctattgtcgtgcactttaatccatggttgatcggggacagggagtcgttgttgcggcaattcctcggatcgatatcttcggcgattgaattggtcgacaacgtcagcggtgcgaagaaggtcgctaaagagattcagaattattcaaaggtgttcgatctgctgaagtgggtgcccggggcagagccttgggctagcatcgtgaagggggtcatggagtcggcagggaaggccgctggcggattcgctgaccagaaagagcgggacatcagcggccagaaggagcggctcgaaaaagccctaagtaaattcaagagaaagatatttgtatttattgacgacgtcgatcgactgtttccgctcgaagtattcgaaatggttcggattgttaaagcagttggccagttgcccaatattggatatgttattgcatgggactcggaatatgtgcggcgggcattaagatctgcatctgttccacgagcttccacatatatagataaggttgttcaggttcgccttccgttgcccgcgatatccccgagctcgcgccttcggcttcttaatgatgctatttcctcgctgccggatgatgctcttatgactcatttcccgaagcaggaagagcgaatgaatatgctctattttaatggcctgcgtgaccttcttgaacagccgagagatatcactcgagtaataaatacggtttcggttattgagcctgggctgcgtggagaggttgtttttgcagatatagttggcttggcttgccttattgtgcgcgccccgagagtctacgatgagttacgtagggattcgtcattgtttactaaaacattcgacggtagttacagtgggggcgaaagggatgctcatgcgagcaggcttgaggaattgtatcggaggacacaaaaccccgaggcggtgcgtaaacttgtgcatttcttgtttccgagtaccgctgcggccgctaacaagtttgcatttggaaagcaggttgacatcgaaggccatatttctgctcctagtcgcttgggcattgcgcttggcatgtcaataggattgactgatgtcagtattgtggacgcaaagagatttattttaagtgctgagcggcggctggaggttgcaggaaagataaatgaagataatgggctaggcttcttggaaatgcttgaaggtgttgctgagaacatgtctgttgaggaagtgaaaagtctggaggattcctgtatggccatcgcgcgtcttgtagatgggggggtattttcgacatcaaaaaccgagaggaaattcttctccctttccgccgagactctcgcggtaagagcgatttcacgccttgtttcgacttgcatgcctggaagtctctgtgagatggcctataagattgccactgatccaaactcactcactgttgcggcagagattttgacaaatggtctgcgaacagagcaggagccgaacgctctgatcgttgttaagcaaaagcggaaattggctggtgaagttttcgcggaaaatagccgagttgcagttcttaatggtacgttctggggatttagcgatccagctagaattctgtggaccattatgagggttgcgccaaaaattgctgcaagtgtgttctcggagatcaagaaggatgatccaactcttgataagtttgccttgaatttccttaggcacggtctgagttccagtggaggccggagctatgcagttcctgaagacccgacagtggctaacctcgtgagcctgagcgaacttgccaaacatgcaaagcgccgactcgatgatcctcaagtgtcttatccactccgagctgcctggcaatcagttgttgatggacggcctctctacggcaaagatgggtctgtcgcgaagatgtag

SEQ ID NO: 513448 - DNA, 609 bp, Stenotrophomonas maltophilia
atgggggagggggcggatggccctctccaaaacacgccaaagcccttccatggtgctcgatggcgccatccctggcgccaacggttttggagagggccatccgccccctctcgacagtttcctgcgggcgcggacgggaagggcggaatcaaaggcagaagcaaaagcaaaaaaggcagccataggctgccttttttgcttgttggggtcagagccctttgcgtagcaaagggctctgaccccggctcttgccttgcctttgctcacccttccgccgagcggaatgccgggtggcgcgggtgggtgaggctgaccgggacacgccgtaaacccgtccctgggggcttggcagcggcatccatgccgctgacagtcccggtcagcctcacccacccgggccccacagccaaccaacaatcagccggaaacgctttgaaccttacagcgcctcgaaaatacccgccgcacccatgccggtgccgatgcacatcgtcaccatgccgtacttctgctggcgacgacgcaggccgtgcagcagggtcgcggtacggatcgcgccggtcgcgcccagcggatggcccagggcgatcgcgccgcccagcgggttga

SEQ ID NO: 513449 - DNA, 183 bp, Stenotrophomonas maltophilia
atgaccggcgcgcgcaagccgagcatgggctcggctctacagagagcaggcaacgtgtcggtcggaagttccggtagtgccggccgctggccggcagtgtcgaccaaggtcgacacctaccaacagcattcccagcggcgcatcgggtggaaagcccccttgttgttcaagggggcgcgctga

SEQ ID NO: 513450 - DNA, 939 bp, Stenotrophomonas maltophilia
atgagcaagattctcgtcatcgccgaacaccacgacggcaagctcaacgccgccaccgccaaaaccgtcagcgctgctgccgctatcagcggtgccagcatcgacgtgctggtgctggccgccgacccggccgccgttgccgccgaggccgcgaagatcaccggcgtcgccaaggtcctgaccgtgaccaacgccgccaacgcgcaggccatcgcccaggtgctggcgccgcagatcgcgcagctggccaagggttacacccacgtgttcggcccgtcgaccaccttcggcaaggacctgatgccgtgcgtggccgcgctgctgggcgtcaaccaggtctccgacctgatgaccgttgaaggcagccataccttcaagcgcccgatctacgccggcaacgcgatcatcaccgtggaagtcccggccgaccagatcgtggtcgccaccgtgcgtgccgcctcgtggccggaagccgcccagggcggtagcgccgccatcgaagcagccaacgtcgatgctgccctgccgacccacacccgcttcgtcggcctcgccgcgggtgccagcgaccgcccggacctgcagagcgccaagcgcgtggtctccggtggccgcggcgtcggttcggaagaaaacttcaaggtgatcttccagctggccgacaagctcggtgccgccgtcggtgcctcgcgtgccgcggtcgatgccggctacgtccccagcgacctgcaggtcggccagaccggcaagatcatcgcgccggaactgtacgtggcggtcggcatcagtggtgccatccagcacctgaccggcatcaaggatgccggcacgatcgtggcgatcaacaaggacggcgatgcgccgatcttcgagattgccgatatcggcctggtgggggatctgtttacgatcctgccggagctggaaaaggcgctgtaa

SEQ ID NO: 513451 - DNA, 390 bp, Stenotrophomonas maltophilia
atgagcggacgcttctttagattcctgatttccggcggcaccgcggccgccgtggagtacctcgtcttccttttgatccaactgtctctgggggagcgctggctcatcctgagccagaccctgagctttggctgcggctttgtcgcaagcttcctgctcaaccgcagctgggtctttcgcagcagcggcgcaatgaaggcagaactgctaaagtatggcgcaatcgccgcattcaacctcgtggcgggcaatgcggcgatgctgctgctgaccggccctgccgatctggatcagtacatctcaaagttgctggtgatggggtgtatcgccggctggaactatctgattttctcgaagctgattttcaagcagcagaccggcaaggcgtga

SEQ ID NO: 513452 - DNA, 690 bp, Stenotrophomonas maltophilia
atgtcactcgaatattccaatgtcgctgtagtgatccctgcctacaatgaaggaagcgcgatcaaggacaccattcacgcgattcctggtaacttccccaagataatcgtgatcgatgatgggagccgggacgatacgcatgagcgtgtccgcgaaacccgagcgaccctgatccgccacccgatcaacctcgggcagggtgctggtctgcagaccggcatcgacgcggcgttgctggatcctgcgatcgaatacatcgtcactttcgatgccgatggccagcaccggatcgaggatgttgaaagaatgctggcctatgcggcacagcacaaggtgcagatcgtgatgggttcccgcttcctgggcaaggccgtcaacatgccgcggatgaagcgcgtcatcctgaaggccgctgtctggttttccaatgtaacgtcaggcgtacacctcaccgatacgcacaatggcctccgcgtcatccatcgctcggcggcggaacggctaaagctggaacttcctgacttctcgcacgcttcagagatcgtcgagcggattgggcaacagcacttcagctatgcggaagtaccggtcacgatcatctacagcgagtactcccgcagcaagggccagtcgatgatcaatgcaatcaacattgcctttgatgcaatcctgagaaaggtgatcaagtaa

SEQ ID NO: 513453 - DNA, 387 bp, Stenotrophomonas maltophilia
atgctcattcgatttctgctgatcgcctcaacgctgaccatcgcttggtatttccttacctcgcgtggcactagccggtccaacgcattcaagaaagtactgttggtgggctttgtcgccgcggcaatcgttgccattctgatacctgaagcgcttacgcaactggcgaattttgtgggtgtcggacgcggcaccgatcttctggtctatgtactggtccaggtcgtcgcgttccagatgttcaatacctacgcaaaagacaagcagaaccagcgacagatcgttcatctggcgcgccgcattgcaattctggaatccatgactgcgacggcgcccgcggcaatcagtggtggtgccactcaggctgatggcgaacagaagcactga

SEQ ID NO: 513454 - DNA, 993 bp, Stenotrophomonas maltophilia
gtgaccggaggggcaggctacatcggctcccatacggcaatcgcgctgctggctgcaggctacgaagttgtcatcctcgacaacttcagcaacagtgagcgctggatacctgcacgaatcgcagagctgtccggctccagctttgaatcggtggagctggacctgtgcgacaaggccgctacgctggagtgcctgcagcgaatcaagcccgatggcgtcattcacttcgcagcgctgaaatccgttggcgagagttttattcggccactccactattatcagaacaatctctcaggcaccctgaatctgctggatgccatgttgcaggtgggctgcaagaacctggtgttcagctcgtcagctactgtctatggctatcctgagcattgcccgatcggggaagatgctccactttctgccatcaatccctacgggcgaaccaagctgatgatggagcaggccatccaggacatcagcgcggcgaatccggaattcaataccgccctgctccgctatttcaacccggcaggtgcgcaccccagtggtctcctcggcgagttgccgcggggcacacccaacaacctggttccattcgtggctcaggtcgctgctgggctgcgtgaacgggtgcaggtgttcggtggaaattatcccactgtcgatggaaccggagtacgcgactacatccatgtcatggatctggctgacgcacatgtgcacgcgctggcctaccttttgcagcgcaagcaggatctgctagtgaacctgggcaccgggcgcggatactcggtactggagatcatcgctgcattcgcgcgcgcgagcggaaagccgattccgtacgacatcgtggatcaacgccccggagatgccgctgaatgctatgccgatccatcccttgctacggaattgctgggttggcatgcctctcgcgatcttgacctgatctgcgtggatacctggcgctggcagcagcatctcgaacaacactga

SEQ ID NO: 513455 - DNA, 2202 bp, Stenotrophomonas maltophilia
atgcatgtcaccacgcctgcccgtgtaatcgggctgccgcaggcttccgtcgtcgcaggactactagccgctgccgcggcagtatccatcatctcccgcgtgcccgggtccgagcttctgggcttctggcagacgttgagtgtggcgggcctttgcgcggcgggtctctggtacgttcttgggcctgtggcacgccggctggttgtctggcagacaagcctcgggcgacgtgggcgctggctgtccatcgtgctggctcttctgtctggaatgatctggctgtatgccttaccagtcggaccggcgcctgccggcgtggccgatgtgacggtgagtgtgcttgatggtagcaatgagcatgcacagggccgggaagtctggctgcgcctagagcgcgatggcgtcgatgtgccttcggcggatctgaagcagaccggcgactggctcgacaaggcgccgttcctagtcgccgccaatccaccgggccaagcctccgtacactggcatggatcctataccaacagacttcgcttggtgttcatttcgcatgcctggtctgggcgtgcccgagttgcgtggaatggcaaccacaaggacttggacctgtatagcgcggaaggcagcagtgccaccgtcgatctggcaggcatggtcaccaccaacggctatcttgccttccctgaacgcaatggccgccagtggttcactgcggcgtgcgatgcgcttgtactgggtgcgctgaccctattcgtctttggatggcttgcaatgcgacactgcatggaagccgaggctgcgtcacatggcgcgctggcgagcctgcaacgccagacgatgatgcttgccatgcccatagtgctgacgagcctctttgcgcttttcatcttctatccgggtctgatgacctcagactcactggatcaatggcgccaggcaggccatttcgcattcaatgatgcccacccgctactgtatggcctgttcatggtggccatgcgcttcgtctgggatagtcccgcttctgtagcgcttgtgcagctgcttctcttctccgcaagttgcggctggttactggccagcctgcagcgcctgacaggcacctcgaaccgagttgtctgggcatcggcgtggcttgttgctctgtatccactgctgccgattactgcggtgacgctgtggaaggatgtgccatacgccaccgctgtgattgcactgaccgccttcctcatgacttcgctgtcccaccgtaatgcgcagcgaatcagcgcaggcggtgccgctggcctctgcctgatcatgttctgcgcgatgaccctacgccacaacggcccgccggttgccttcgccgccgcgctggcgctgttcttcctcgccaagaaatcccgctttcgcgtggtgctggcactggtcggcgccatcgtattgatggctctactgaagggaccggtatcgagcgtagtcggcattgatcgcaaaccggtgagctacattctgtattcgcaccacattgctgcgcatctggctgcccatcacctgcccgaagatcctcaggaaagagcactgctgcgacagctcaaccacaagcagcccgactgggcgtacaactgcgcaacggtcaatcctgtgatcttcaacccggatttcgatgcacatcaggccatgcagcacaatgatgacctgctccggatctggttggcgcttgcgacgaaacggcccgacatcgagtatgcccacggtctatgctcgagtggactgatctggcgcgtgatcgattcggacatcgaccccctgtatcttgcaagccttgggctatgggcaccgcacggtaaagtgacgtggattaccggcgaggcaggcgccccctcagcggaatccaaatcgccacaactggccgagttcataggccagatggtgttgatgccgggcatgcaggctgtgtttcggccggcactcttcatgtatgcgctcatcttcgcctgtggcgtagcgatgtaccgcctcaatgaccgatcgatggctctgttgttgttcctgcccgcagtgcataccgccttcttgtccatttcgatcgtggcacaggatgcacggtaccagctgcccttgtacgcgatcaccctggctgcggttccgttacttcttttcgcccgcagggcgactacccagcagcccgccgatgcaaacccgcgttcccgcccggcatga

SEQ ID NO: 513456 - DNA, 2166 bp, Stenotrophomonas maltophilia
atgagttggtataagacagccaatgccagcggtctggcagcaggtgtggttctgtcggccgcgtggctgccggcatcggcgcgcttcctgagcctggctacagcgcctgcagtgatggtgttcatacttgccagcgtgctgtctggctggttgatggccgccgtcctgcggcgtacgcacccgatatggagccgtgtaagaatcggcgcgcggataggctggatcaccagctgcatctttgccggctggctgctgacctggatgattccattcgacccggcaccagcaacaacgctgcaggtggagatcgagtccctcggtaagggcccccccgaatccaagggatcggaagtctgggtccgcctcatagctgatggccgtgatgcccggctgcgcgacgtcgaggcgggcccaagctggactgcggctaatggctaccttatctctccgatcaacagcccaccggacaagatccactggaacggccattattccagcgacgtctacgtggagttcttcacccacccctggtctgggcaggcaaccctgcgctgggccggcaaagagcagcactacaacctctacagccccactggtggcgaaatccgggttcgcctggccggagctgtccccaatccacacttcctgacgcttcccacgcggacgcccttgcagtatctggtgcaggcctgccagtccgtgactctcggcctgctgctgttggccggcttcgggctggcatcgcgttggccatcgccctggcaatcagcacggaacgatgaagcgcaaccgtcattgggccgggaagtcttgatcgcagcactgccattgctgcttgtcggcagcatcctgctggtattgttcctccccgccatcctgaccaccgactcattgaaccagtgggcgcaggcggcaagcggtagtttcgatgacgcccatccggttctgtatgcgttctacctatggttcatccagcagatcctgcccagccccacccttgcagcctggctgcagctggccgttctggcgctggcatccggatggttggcgactgttgtccgccgcgcctgcaacgcgccgcgctggacatcgacggccggcggcctgctgctggctgcgtatccagtgacggcgttgtcatccataacactgtggaaagacgttccgtatgcaaccagcgtggtcgcgctgaccgcctttgtcattggcaataccttcctcgaccgaccaagcctgcgcaagtggtacaactgcctggcgttggtgctgctcgctgcctgctgcatggcgctgcggcacaacgggcctcccgtagcggtcgcggccttcttgatcctcctgctgcggcccggtacccgcatgcgtgtgctggcctgcttgctgctggctgccagcctcatgtggggcatcaagggcccgttggccgacagcgtgggcacgcatcgcagcagtgcggcttacatggcatacacccaccacctgtccgcgcatctggcagcagggcagaatccggagtctgccgaggacaacgcgatacttgaagccgtcgacagcggagccagcgactggcgatatcgctgctcgatggtgaacacgaccatcttcaatgatcattatgatattccgacggccgtgaagcatcaggatgacctgttccggatctggctcggcatggccctgaaacggccggatatcgaacttgaccacgtgctttgtgccagcggaatggtctggcgctaccggacctcggggccactgtatctctatgtcttcggcttcgagatcggcgaagagcagaatctgcaatgggtgcagccggggctgagcggaccgccgcaagcatccgtgctgccgaacgcgaccaactggatgggcaagaccctgttgaagccgcagctgggacgcctttggcgccccgctcctttcctgatcgcgctgtgcctgctgaccgtagttgcgtggaggcgcaccggtgatcggcgcatactgcttgtgccgatgctggtgctggttcatagcgcgatcctgatggtggcgatcattgcccaggacgcgcgctatcagcttcccctctacatggtgtgcctgatcgtcgcgccagcgctcgcgctggcacggcggcaaccgcatcacattccgttggccgccgggcgcgccgccggatag

SEQ ID NO: 513457 - DNA, 999 bp, Stenotrophomonas maltophilia
atggagtgggatagaggcatagcagtggtgatcccatgctacaaggtgacccgccagatcctggtgttgctggctgaaatcggtcccgaggtcgatcgcatctactgtgttgatgatgcctgccctgatggcagtggcgatctgatcgaacggagctgcagcgatcctcgtgtggtcgtgctgcgtaaccgcgtgaataccggagtaggcggtgccgtcatgcatggctaccgccgcgctgtggcagacggcgcgacggtcatcgtcaagctcgacggcgatggccagatggacccggcattgatcgaagcatttgtgtcgccgatcctcggggctgatgctgattacaccaagggcaatcggttcttcgatctgcgcgagatcaagtcgatgcccctgctgcggcggattggcaaccttggattgtcgttcatggcaaaggcatcgaccgggtactgggacctgttcgatcccaccaacggctataccgccatccatgctgaagttgcgcgtcgcttgccttacgactcgatcagctcgcgatacttcttcgagagcgacatcctgttccggctcaatgtgatgagggcaaaggtgctcgacgtgccgatggacgcccgctacggcgacgaaataagcggcttgaaggtatcgaagatcgttggcgagttcctcgccaagcacgtacgcaataccagcaagcgaatcatctacggctactttctgcgagacatgaacattgcctcgttcgagcttctggttgccgtgccgatgatcgtttttggcgtggcgttcggcctgtatcactggatcggttcagtggaaggtggcctcattaccccgctcggcaccatcatgctggcagcgttgccattggttcttggggtacagctgttgctggccttcctttcgcatgatacggcggcgatgccgcgtcatgcattgcatcgcctcctgctgcgctatccggcggcgcgcccggcggccaacggaatgtga

SEQ ID NO: 513458 - DNA, 2025 bp, Stenotrophomonas maltophilia
atgcatgtgatcgtcatccagctggcgtgttggcgtgttggcggagagcgggctgcattggcgcgtgcccgcctgcgcgcgatgcccgctgcttcggtgctgatcgttggcgagggagcgccgcccgccgacctgcttgaggagtgtgcagagagacgcacgctgtgcgtgaattcgcctttgcatgcgatgcagggccgacggttgcctgatgtccgccgcagtggtgacgcggagcagctcggttggtcattggcggtgatggcggcgcttcgggcgctgcagcaggatgtgcacttggactgtgtggagattccatcgtgtggtgcgctggcctatgcacttctccaggagcgagctctgtcagaggtgtttgacactacgcgcgtgatgttgcggtttgacggcatccaggccatcgaagtcctgaggcagggacgcaatgtcgagatggctgcgctgatgttgatggacatggagcggatgtgcctggagcaatgcgaccaggttctggtcgatagtcaggcgatcgcggaatccttgcagcgcttccttccaggcagccagaggccgctacacctgcaggcgacgctgctggagacagccgggctcgtgtcggagcagcatgcagtgggttcagcactggcttgcgtcgcaaccgaagcgcctgctctcaggcagtgcctgcgggcgatttccggttacctgcagcagagcaatgatggtctgctgcaggtctcggtcgtttgccagcctgcgcttctatccgaagtgctgcatgtggtgcctgctgccctgcgccatcgtttccaggaagcgcctgcagattgcctgcgcgcttcgcccatgcgtgtggtcatgcctgatcgctggtctgcaggctcggctctggcgcgggagctgcttgctcatggccatagcctgattgtggatgtcgccaacccggcgctggctgccgcacaggggtgggaacaggggcggacccatcttggctacacggatgcccgtgggctgttcgaagcgctgcgggcttcgcagcagtgggtgcccactcgtcacctgcggatggggccttccccgccgctgcccaagcttgacgttggtacgccgggcccagccaaggtctccgtggtcgtgccctgctacaacatgggccgttggctgccgcagaccttgtgcaacatacagcagttttcatggagcgatctggaggtcatcgttgttgacgatggatcgactgatcccggcaccgtgcagctcatcgaggagctggaagcaagccccaccgctggcctgcgcgtggtccgtcttgagttcaaccaggggttgtctgctgccaggaatgccggcgttgccgcagcgcagggtgagttcaccctgtgtctggacgctgatgacctggtgtcgccagagtttgtttcgattgctgtacgagcactgcagcgacaccctgcgcacgacttcgttgttcctcgctgcgcctacttcttcggtgacgaatctgcgcttgatgtgaacgagttgcggctcggtcagggcttgccgatggttggtgcggcatttgattccggtgcgctgggcaatcgcttctcaacggcgaccagcctggcgcgaacttcggtactgcgtgcactcggttatgacgaaagcctgcgttcctatgaagactggcagctttaccgtcgcgcgctgcaacaaggcagtcgtttcgttgtgaccaatgacgtacattttttctaccggcagcgaccggattcaatgatccacgatccggccatgcgcgctcgccacagcctgctttatgcggagatggtgggcggggcgacgttgattgggcaggggccggtggtgtcgccgaacctgctgggggcgctggccgctcccccacggatcgacgggagctcatcggggctgttgctgggtggcgttgtcgaagcgctcgacgagatgcaggcattgcgccgtagtcgcatcgtcgggctgggatacagattgtcggcgctgttgcggtggctgcgccgctga

SEQ ID NO: 513459 - DNA, 2172 bp, Stenotrophomonas maltophilia
atgggcttgagggttttcgttacccgcgaacttttcccctttaccgccggtggcattggacgcgtgatcgcgaacatgctgatgaccgcgccggaagaagatcgcgcggagatggcagtactttacgtcggcgacaacgtcgaggcggacgcgttcgcggtcgcccacccgggcgtgaccttcctcgcgtggccgcattcgcgctttcaacaagtagacgagcgtggggagattttcccgccaatgtcggcgttcacccacagcatgctgcattgggaatcggtgcatgtgctgcaggggctgctcgagctggaacgcctgaaaggcccgcttgagtatgtcgagttcgtggactggggggcacctgcgttcgccgcaacccaggaaaagctgcttggcagcgcattgacgacggccacgctggccgtgcgcctgcacactacagacagcatcctggccgattttgagccgcgcgtgcagagtgtgcacgggttgaatctctttgacctagagcgaaaggcactggccgattgcgacattatcgtcggtcagatcgcgccggttgccgaggcgttccgcgtgttctacggcttcagcgaggaggagtggactccacgcctgcgcctgcatgctccgccggtgttgctggatacgatgcagccggtcacacagaccaccgtgatcaatgattcaacgccgctgttgttcacttcgaaactgcaggatatcaagcgcccggatactttcatccgtggctgcatccagttcctgcgggacaggccgcgttatcagggcaacattgttttcctggcgcattcttttgatgtgagctatcaggagtatgtcatctcgctggtgccggaggaactgcgcagccgggtggtgtttgcccgtggcgtaaccggtgcggcgcgcgagaagagcatttctggcgcggtatgcgtattcccatcgccatgggagtctttctgccttgctgcgtacgaggcatcgctgtcaggcgcagcttgcgtgctcaacgcgcagaatccggctttcgggccgggcagtccgtggcgggatggatacaactgcagcacgtttgatgggagtgccgaagatctggcacgcgcgctttgcggcctgtttgaaagcacccccggccgactgtcgccggtcgaggtgccgagggacccgcttccctggaagaggcttgatccggtggcaatacctgctgcggttcccctggacaggcaattgaccgtagtcgtcgtcaaccgcgatagtgcggggcgcgtattgaatacgctggatagcatcctcgcgtccaatctgacgcttgacaagctgatcgtgattgacgatgcctcgcgggacccacgcgatatcgctgcgctggaccagctgggtagcaatgatccgcgtttgtccgtgcatcggcttgcggtgcccgttggtgacgctgtagcgcgcaacatgggccttgcgctggttgagacgccgtttgctggattcgtgcgtggtggtgaccagttgctgccgggcttcctcaaggtcgcggtgagcgcattggcgtcgcacccggattttgatgtggtcgtggggcaggtgggcgtgaccgtggatcccgatgatgtaatcgccggcaatgtcgccccggatggattccgcattttctatggtgaaggacgcctcgcaggactctacgagaactgcctggcgccggaaagctacgtgatccggaccgaggttgccaggcgcttcgcattcgatcccgtcatccctgcacttgaagtatgggaaatgatgctgcgcgcctgccagtcgggtgcgcgcttcatggtgacttccgccgtgaacgtgcttgcacggcatcaggggcaaccagatgaacggcacttggagcagatccagatcgcgatgcgccggcgcctgcagcgcaagcgcgtgcgtgtcggctcactggaggtgcctgcgtacttcatcttcggtgcgcatgtagcgccgagcgggttcatgggggatgcctccaacgcggaaatggcctatcggctgcaggcactgatggaaagcgagtccgtgcgctacaccctggcacttgccaggcttctgcagaagcgggcgccatgggtactgcgcttgggtaaatggtcggtgcagcgactggcgccgatctatcgccgattgcggtga

SEQ ID NO: 513460 - DNA, 2241 bp, Stenotrophomonas maltophilia
atgaatactcgtaaccgggactactggatcaacaggagcggtgatctctatgccgaccagcagaagatccggcgtgaggcgggcaacagcaattacgcccggcaggaagcgtggctggtgggattcctcgccgagcgttccgaacaactggggcggccggttcgggttctggacttcggggtgggcttcggacgtcttgcgcggttgctgccgcagcatgccttcgtggactacttcggtttcgatatctcccctgctatggtggagccactgctgcgtgaaccgcctgttgagctggccgcagacatcgggcatcgcatccgcgtcggatcttcgttggccgacgccatgcagggcgagcagtttgatgtgatcttcacagtctcggtgttgatccacaacgaccgcgaacaggcggcagacgtacttgcacagatgcgtgcgttgctggcgcccgaaggacggctgtgcttcatcgagaaccgaccggtgtcgatcagcctgctggccaacctgtggcacgcaggttgctggagtcatgatgttgccggcacgttggcgccggacatgaatgtggacgtcgaagacggaatcctttcggaccatgccatctacattctgcacgaatccgccgccgggatcccacgccagcttcgtgtgccgggcgcccgcgggtttgaaccgatcaccgccggtgactacctgttgcggacgctggaagctaccacggctgttgcgcgtggcatggaagtggaaagtgccacgcttggcggcgacatcgcgcagatgcgtgatgcggtggagctctatcgtcaggccgaagaacgcgcgcgaacgaatctggacatcgcgcgacagcatctaggcgatgacgtgggcctgctggatggtataggccatcttaccgcagccattgatgcgcttccggcattggcgatgcgtatcggcgtgctggctggcgagacctccgtgcagcaggtccagtccttggagcggattgaagcgctgcatgcgcgtgaagcgacgcttgtcgaatcgctggcgcagcaggagcgagagcttgagcaggtgcaggcccggttggaagctgcccaaagcgccaaccagcacctgcaatggcaacagggcctccgtgagcaggtccgccaggtcctgagcagccgaacggaagagcgcgccatgccatacctcgaagcgccggtgggtggcagtgcctcggtcggtcagccggcacctccggtgtacgaattcaacgcccgccgtgacatgcgattcgcacaggctgtggttgggcatgagcgggtctgccacatcatgcatcaggagtggttcggtatccgtgcggcctgcggctcgctcccgggacacaagcttgcggtgaccagtacctcagcgcccggcgccggcgatgttgaggaggtggcccgtctgcttgccgccaacaaggtgaatcggctggttattcatggattctccgatggcatgttgcagtgggtgaaaggcctcgctgcagccggattcgaccggatctacatggtctggcatggcgcgccctcgatgtggatccatgttgaagaacggcgcctgttcgcgttggcctacaaggcggtccgcactggtctgatccgcagggtcagtgtcatgcgcgcaggttcccatgcggcgcttgcagatgtagcgggctggcagaggcaggtctataacatgccgccagcctacaccggcaagcgcattccacggcgggcgaccggagccaccgtattcattccgtcctggaacctgattcacaagaacatcttcacgaatgccgcagccgcggctgcgaccgcggaagtggcaaacatttggctgatggcggatgatttcgcgttaccgtaccgggtggacaagaatgttaagcgtcttccaaaactcagccagttgcagatgatggaggcgatgtcgcaagccgatgcagtgatgaatgcctccatcgtcgactgccatccgatggtggagttggaggcacttgctgccggtactcccgcgctgcggggacgtctggggatggatgcgctggaagaccatccctatgtcgagattacccaggtggccgatccactcagcgttgccgatgtgcgccagacgctgcgccggatattggcggctcccgcagtggagatggatgacatgatgtcgtcctactcgcgccagatggtggcgttgtccttcgagcgatattcagaatttatggaaatctaa

SEQ ID NO: 513461 - DNA, 726 bp, Stenotrophomonas maltophilia
atgaccttcattgaagtggtcgactgcagcgtccagctgccgatctatggcaccaacaaccgctccatgaagggagccatcatgtccgccgttaccggcgggcgcgtggctcccaccagccgcaacgtgaccgtggtggattctctccagaacgtcaccttcaacctgcgtgagggtgacaagctgggtctcgtcggccataacggagcaggcaagaccacgttgctgaaaacacttgcgggcgtttatgagccaacttctggctacatccgcagccaggggcgcgttgccaatctgctggacgtgacgatgggcatggatttcgaagcaaccggtgtcgagaacatccggttgaaggggctgctgcatgggctttcccgtgctgagatccaaagcaagatcccgcagatctgcgagttctcgggccttggcccgtatgtgaacatgccggtgcgcgtgtactccagtggcatgatggtgcgtctggcgttctcgattgccaccagtttcgatgccgagattctgctgatggacgaatggttgggtgtcggcgatgcggacttcaacgcccgcgctcagcaacgcctcgccgaaatcgtacagaaggccagcattctggtcctggccagccacaatcaggacatcatcgccgctaattgcaatcgcatcatgcatcttgagcatgggcgcatcaccagcgatcagccgatagaggcccgtgcctga

SEQ ID NO: 513462 - DNA, 861 bp, Stenotrophomonas maltophilia
ttgaacaccgaaactattttgaaggcggaagctgatcggcgtccggtccgaatcagcagccacgatactcagatgaaggctctcccggcgttcattcgtgacattgccgaaggcatgggagcctggcgtgcttggacggcgttggcactacttgacatcaagcacaagtatcgccgatcagtcttgggtcccttctggattaccatcagcatgtttgtgctgatcctcggtattggcctgctctacagccagttgttccggatgaaccttcgggactatctgccctacatcgctcttggcgatattgtgtggatctacatctcgaccacagtgcaggagggatgtaccacgttcactgcttcggagaatctgatccgttcgatgcggctgccaatgacgcttcatgtgatgcggttggtgacacgaaccttcatcgtgttcctgcatggggcagtcgcctatctgccgtttgttgtatttctcaagatcgagccggagctggtttggttgctcgctttgccgggcgttgccctgattgtgctggcgaccattcccattacggcgatattcggcatgctgtctgctcgcttccgcgacctgcaacccgcgatcgcaaacttcatgcagctcggcttcttcatgacgccgatcatctggaaggcggacatgctgggcccgcatcgttgggttgccgatatcaatccaatctaccacttcatccagatcgtgcgcatgccgctgatgggacaggttccagaagcgcactcgtactacttcgtactcgccttcatcgccgcggcgtttgtgatcgcgcttcccttcctggcggcaaatcgccacaagatctcgctgtgggtgtaa

SEQ ID NO: 513463 - DNA, 1011 bp, Stenotrophomonas maltophilia
ttgaatcgtccccacgagccgttgcttcatcccattctccaccccctgacgctggcccagttctacgggaagcatcacgaggcgatggccaccgccgatgcgtgccaggcacttgttttggccgaacagttttgtcgccacgcccaagtcgcaggcgtggacacctcaaccccaatcggcttcgactgggtcgttcgaccgaacgaccagaacacggggatggaactggagttatggaagggtgcatccgtagcgctggttcgcttcccggatcgcggggcgctggatgacgcgcttgaaacggcagcgtcgcgaacgccggcgttggcccgggcctattcccagctcaccgatgatcagcgcttcggattgctgtcggagattcgcgaatccatcgatcacgtgcgagccaaccttgcctctgccactgccattgaagggatgcggagccagcccgagttgccttcgccgtctcagccgcctctggacatcgcccaactgctccggcggtttgaggtccccgatgcccaagcccggttggcggcggaccacgtcaaggcgacctatggagaagcgctggacaccatgcatggtagccaggtgctggcagcagcccatgcgcatgccccgcacttggggctatacggagccccttggcagacgtggctttgcgagaacgcaacgaccgggaacctcgatggggtggaggcctgtttgcgcatgcatgccgagcccaatgtgcccgacgccaacggcgagacgccgctacacctcgccgctcgccacggccaccccggcatcgttcgtcggttgattgaggccggcgcggatacagcgttggggaacccccgcggggagactcccctgcatgtggcggcccaacacaaacgcgcgcagtgctgcctggagctcatggccgcaggcgcggaccctgggcagttggatcgtgaggggcgcaagccgggcgacgctcaccgggagaaggcacgtgagcaagtccacgatttatga

SEQ ID NO: 513464 - DNA, 1188 bp, Stenotrophomonas maltophilia
atgagcaacaccccccaaagccccgaagagcttcgccgtctgcaggagctggctgagctttttgatgacgacaccccgccgtcgcccgccaccaccactccgcccacaacgccaagcggcggtagcgaggtgttgaacgctgccaagcattggggccgtgccttcgggcgcaagaccaaggagctgacggagaaggctgccgagaagaccaaagaagcccaagaggccttggcacgtcgagcagaagaggccaaggaacgcaaggaagccaccgcagccgagcaggcgcggcaacagcaagaacaagccgaacgggaggaagcggcaaagccatccgcccgtgcgcagccgatggacgtgttcgcccccgagccggtttcggaatccacaacggttgcaccggacggacccagccgggcctacgagccgctggttacggtggtcgttgtcgaaccagaagccgtagaaccgaaaacgcgggacgtgcttgcggaagaggaggcagtgaagccggcggacctttccgttgcttcggaggcaacagaagacgatgaggcgttgcccccgtccacgcccgcgcctcatgtcgcggacgcggcagcggttcaaccggagctctcgccagcgcatgccgcccctgctggctcgacctcaacaacgatcagccgcaagaagggttggtcaatcgtcgttgtggccggcgtcgcctgcctggtgctgggtggggggattgcttggtgggtcactcgcgacaccgggaaaaacgaacccgctcacactgcggctcctgcgtctgcggtggctgcgcctgtttcaacgccggcagcgccggtccctgaggttaagcaagcgccccctgtttcggctcctgaacccgagcaagcgccggttgcagtcgaagcgccacccgcgttgccggttgagaagggcgccgtgcctgctctcgcagaagcgcccagggcggcagcgcgggccgaggctcaaccggtgaagaaaggcgacaaacgcgctcctgaggaagtgaagaggccgagggcagtggttgccaaaacgacgtcttcggcaggcgtaggagcaacgcccgcagctaagaaaccagcggctgaaaagccccgggaagaagcgaagtggcaggaaaaggcagaaagcgacatggacgcctgggcaaagaaggctggaatcaactaa

SEQ ID NO: 513465 - DNA, 615 bp, Stenotrophomonas maltophilia
atgaaacgctttgctcttactctcaccatcgccgcattgctggcccccgggctttcgtttgcgcaggacgccacccagcccgaaccccaacagaccaacaagctgcgccttttcaaagccggtggaatcggctgcctggccggcggtggcctggccctcatcaccggtaacaagaagcaggcagctgccgcttgcctggctgggggcgtggtcggaggcgtcgcgtcatttcgggcccaactcaacgaagcgaaagaagttgctgacgctgcgaaagccgcaggcctggatgcgcaaatcagcactaaggaagtgcagagcgcggacggccaggtagaggcattggacgctttgacgattcgctacaaccccctggacatgcaaccggtgagccaaaagaccgctgccactctggacaagctcgccgggttgctaaaggcctcgaagaaccagttgacgatccgctttgagggtggagacctgtcggtgtgtccgattcccgctgaggagttgcatagccgtggggcgttgaaggggcatagctctgttgtggcgtgtggggaagacaacgagcccttcctcatccgtgtgacgccgatccctgacgttcgctaa

SEQ ID NO: 513466 - DNA, 1617 bp, Stenotrophomonas maltophilia
atgagccgcctgcgcgtcatcatcggcggtaccgcactggccctgctggccgctgcggtgccgatcgcggtcatggcctacgccacctgggaccgcgcggtcagcgtcgaacagcagcgcctgcgcgacatcgccgatcgcaccctgcgccgctccgacctgtcctaccaggaggcgctggcggcgctgaaatccgccgaagccggtgcctacgtgtcctgcagccccgagcacatccggcgcatgcagaccctggtgatgaccaccccatcgattgaccagatgggctacttcgaaggaggcaagctgcgctgcacctcctgggggccgttcctgtcggatgtggatcagcccaggccggaccacgtcaccagcgacggcgccggcatcgcagtggacgtgcgcccggaaatcagcgggcgacgccaggtgctggcgatcctgtatgggtcctacgacgctctggtggacccacgccgcttcgtcgatgtcatcgccgacccgaatgtgcggctggcactggccagccccgacggacgcctgctggccaaacagcccggcctggatccggacctgctgcaggcactgctgcgcgacccgggcgaaggcctggaccacaccacgctgttcgctaccgcgcgcaacgaggaatggctggccgtcgccactacaccgcgcaccgcgctcgctgcggccttccgccaacaggcctggctgtacgtgccggtgggcctgctgctggccgccgccggcgccgggctggtgatctggctgtcgcggcgccgcctttccctgcgcggcgaactggctaccgccatccgccgccgcgagctgtacctgcattatcagccgatcatcgaactggacaccggcatctgcgtcggcgccgaggcgctggtgcgctggcaacgcccggatggcacccaggtgcgccctgacctgttcattccactggccgaagaggccggcatgatcgccgacgtcaccgacctggtgatcgagaacgtggtgcgcgacatgcgcgagctgctggtcgccgaccgcagcgcgcacatcgcgatcaacctcgccgccgaagacatcagcagcggtcgcgccctgaagatgatctcccggcacatggccggcagcggcatcctgccgcagcagatctggatggaggccaccgaacgtggcttcctcgatctggaccgcgcgcgcaccatgctcgccgccgcccgccgcgccggccacagcgtggccatcgatgatttcggcgtcggcttctccagcctgcaatacctgcagcagctgccactggatgcactgaagatcgacaaatcattcatcgatgcgatcggcaccgaaagcgccaccagcccggtcacgccgcacatcatcgacatggccaaggagctgggcctgtgggtggtggccgagggcgtggaaaccgaagcgcagctggcctatctgcacagccggcatgtggaattcggacagggctggctgttctcgcggccgctgccgcgcgatgagttcgtcgccttccatcagaagcggcagcagcagtacggcgctgcacgcgaacacatgcagaacccgcgcagcgtgccgatcgagcgtgagggagtggagtag

SEQ ID NO: 513467 - DNA, 2649 bp, Stenotrophomonas maltophilia
atgatttctgccaaggaccggcggggggaaaatgctccctgcaatgtttatccgggctcgccgctttgctcgctcatcgttggcttggcacttgcgctgggagtcgggttccacgtctcagcccaggatggactcttcaactaccaagagtatgagaagaaggtaaaaagcgcgcagtcgcttgccgccatatccgcagatgaggtattcggggatcgaacttccggcttcgacggcagcaccgagttcctcgttgaagacgtgtccatacctggcaatttcgaccttccggtcagcatcgcccgccgctttggagttgaggccgtcaaccgaggatctcgctatagcgaggccaaagggctgacgctgtttgacgattgggaaatcgtcgttccccacatgtcgggcgtatggaccaagggggctggatggattacgggcgatccaggggcgcagaccacacagcgttgttcggtcaataaggcgccctacctattggagacctggggctataccaatatcggcttcggcattgacgtgaagtggcatggcggaaatggcgaggagcttctgattgccgacgatccgtcccatgccacggcaccaggcttggaggcgcccaagtggatgacggcttcgagagcacggttcacctgtttggctgcaacacgaaacggatatccgggcgaggcgtttattgggcacaccccggatgggaagaagtacttcttcgactggggtgtggaaaggccctatgcaacagctcagttcagtgatggcgctgccaatcgttcggtggggcgtaagcgggtctatcttctggcgtcgcgtgtggaggaccgttatgggaattgggtgtcctatagttacaacggagacaaactcactagcattcagtccagcgacggtcgccggattgacctgagctatgacggcgacggtcgggtgaccagcgtgcaagccaatgggcgcatatggcggtattcgtatgttggcgacacggacgggaacgacggtggcttgtcccaggtcacgcttccggatggctcggcgtgggcttacagtcatcgcggacgcctccagtccagtttccctatccgtaaagccgacgatgagggcgggtgcgaaatacgggccggtagtgagccccctcctacgcagatgacggtggtcgccccctcgggtgcgcaaggcatattcgactttgaaatggagttgttcattcgctccgatccttgcaatggactgacaccctcgcactaccaagcgtggtctttgaagaagcgcaccatcaccgggcccggactgtctccgatggtcactacgcgaagctacaacctgcagttgccgggaagcggccgctggtccagcctgaccaagccggatggaacgcagattcgcgagcgctacggtgccaatccagctctgaacgagcgaaagctcatgcaaaagcaggttctggacgcagctggccaagtggagcgtgacgagctctacacctatacgttcggttccgagaccggtccgttcagtacgcgggtcgggcattccatcggggtgcaagcgggtcagttcttggcgggcatgctgagcgctctcagtgaaagcacattctctcaagatggcgatacctaccgcgtggtctacagcgatttcgatcgcaaggcccgtccggcacgcgtgagctataccggtccttctggtaccaaggctgagatacgagagcatctggatacggccagcccttgggtcttggatcaggtgctgagtgtcaaggaggttgcgtcgggaaagatcaccacacagtatgcctatgacggtatggccaagccgaatgccgtctatcgggccggggctttgctgcagagtgttacttatgcggcggatggcacgatcagtgcagtgcgcgatggaaaggggaacgaaacgcagatccaggactggtatcgcggcgtgccgcgattggtcatcaatcccgatggcaccaccaatcgcatgtcggcagatggaaacgggtggatcacttccaccacggacgcgctacaaaggactacttcctatctgcacgatccgatgggtcgcgtgcgcgaagtccaaccgccggtcgatgagaaccagtgggccaagactaccatctcattccgtcaggtcgcggccgatgagtacggcctttcgccggggcactggcgagtcgataacgcccaaggggcacggcgccaggaaacctatctcgacgcactctggcagccgctcctggtgcgcgaatacgatgcaaacaacgtcgccggcacgcagcggtgggtcaggaacgcatacgacagcgaaggtcgcctgacgttcacctcttatccttcaagcgatagcacggtggcgaccggtacctggaccgagtacgacgcgctggggcggaagacctcttcgtcccaggacagcgagcagggcctgctgattacaaccattggctacagcagcaatgccaccaccacagtcgtggatccactcggccatcagaccatcacccgattcgatgcgtttgaaggcccggactacgggaggcctgcgcagatcattcgtgccgatggcagcaaagtcagcatcaaacgaaatgcttttggccttaccaccgaagtagcccagtccgccaactaa

SEQ ID NO: 513468 - DNA, 546 bp, Stenotrophomonas maltophilia
atgcctgacctcgaacgcgcatggaatgaaggcaaggcaacggtggacaaggcaaaagtggtgtatgcacgccatctgggcggtggccgggtcgagatccgcaggaaggagaccccggcagaggtcaaacgccgctggatggacaccaccgacagcgaagacaaccgcaagtcgttccactcgagcatcgtggccaacgcgatgcacagccagaaggtgaccgcctatgacctgtcgatcgggcaggccaggacgatcgatgaccggacgtactacctgtatctgtgcctggtggcggattggaggacgccgtgggataagccggcggacatcgcagtgacttccgaccgaatagaagttgacaaggcagttcaagtctacagatcagaatctggcgatttcccgctgatcaatgaaacgctcaggtatagaaacacaggagttctgcccgagtgtgcgagatgcgaccttccaagtctggtctggacgcagacggccgctgatcgaaagagctaccagcccgtgcgacagggcgcaggcgcatga

SEQ ID NO: 513469 - DNA, 1146 bp, Stenotrophomonas maltophilia
atgcgtttggcagtactcacactgaccgttgccgcggtcctggtcgccagcggttgcaaccgcatcggcagcagtggtgacgcaggcaaggccgcgtcgctcgatttcgacaagccggtgtccggcgagatcacctcgcgcagcggcatcaacttcaacgacggcagccatcaccagctctaccagatcaagctggaagacaaggatctggtcggcctgaagctcaccggtgccctcagcggctcgatcgccgtgttcaacaacggcagccttgtttccaccagcaacaccggttacgaacgcgaaggcgacgtctcgctggcgttccgtgccaatggcggcggcacctaccaggtggcggtcaatgccgatggcccgaccgcctttggtccgtatcgcctgcgcgccgagaagctgaaaccctacgacggcaagccgttggcgggcagtggcgaaatcgtggacatgctggccagtgactcgcaggactacaccctgcaggtggacaaggccggcctgtacgaaatccgcctggtgtcggacgtcttcgatccggtactgaagctgtcgggccagggcgttgaagccgaaaacgacgatggcaacgacagcaccaactcgcggctgaccctgtcgctgaagccgggcaagtacaccttgaccgcgcgcggcctcggcagcggtgtcaatggcatgttcaccctgtctgccacccgcattgaactgccgggcaatctggtcgagcgcgatggcactgccctgccgaagtcgggcagcgtgtacaccatgctggacaacgaaggccgtcgccgcttcctgctgacgctggatcgtaccgccgacgtgcgcttggatgcgatctccagccaggtcgataccgtgctgcgcgtggtcggtggcgatgtcgagctgaccgacgacgacggtggcaacggtaccaactcgcgcctggaggagaccctgccggccggccattacaccgtcgacgtgtccagcctgaacaatggcgcaggcatggtggaagtgcgcgtgcaggtggatggtgccagcgctgacggtgccgccgcctccgcggcccgcgctgctgccgacgctgcagccgccgtggccgatgacgctgctgcggtggaagctgccagccgttga

SEQ ID NO: 513470 - DNA, 1419 bp, Stenotrophomonas maltophilia
atggcaagctttggatacggtggcattggctcggggctcaacatctcggacatcgtcaaccagctggtcgcagccgaccgcaagcccgccgacaacgcgctgaacctgcagcagtccaaggccaagatgcagctgtcgtcgatcggcaccgtcacttcggccttcgacaagctgaagaccgcactgaccgcactgaaggccaccaccgcgttcgatacgcgcaccgtgacagccaccggcaaggccggccccaccaatgccgacgacgttctgacagcctcggtggcgctgtacgacctcggcacgaccaaggcagccgcctccaacggcacgcaccaggtggaggtcacctccctggccaccgcgcacaagctgattgccgacacctcattcccgaagaccgacaccttcggtgccggaaccttgacgctgaccgttggcgtcggcgacaaggccaagaccatgaacgtggcggtggaggacggcgatacgctgaccaccatccgcaacaagatcgatgcggccggccgcaaggagggcgtgcaggccacactgatcacctcgggcgacaaccagtatctgtcgatcgcccaggaaaagaccggcgctgccaacgcgatcaagctggagtacggtggcagcgacccgaagctgggcgcactggtcggcagcctgaagcagaacacggccgcagcggacgccgagctgaccatcgatggtgtgaaggtcgtcagcgccagcaacacggtggccgatgcggttccgggcctgaccctgaacctcaaggttcccggcaagagcaccgtggtgatcagtaccgacactgccgccgcgaccaaggtgatgcaggagttcgtgaccgcctacaacgcggcgatcgcggcgatcaacaccgaaaccaagtacgacgccaagaccaaggaagcggccacgctgaccggtgacgcgcagatgcgcggtgcctccagccagctgcgctcgatgatgtccggcgtgctgaaggagctttccgctgacggcctggacccgaaggtgcttggcctgcagacgcgcggctatcccaatgccgacggcagcctggtgctggataccaccaagtttgccgctgcactggccagccagccggagaagatccgcgccgccatcaccggcgacaccggcggtgccggcacgctttacaccatggttgacggctacgtcagcaccacggtcggcaaggaaggcgccttcgtcgcccgcaccaagggcctgaacaccacgctggacaacatcgacaagcgccgcaaggacctcgacacacgcatgaagaacgtggaagagcgctacaagaagcagttcatcgcgctggacagcctgatgggcaagctgcagcagagcaatacgtcgctgcagcagcagctggcacagctgaaccgttaa

SEQ ID NO: 513471 - DNA, 417 bp, Stenotrophomonas maltophilia
atgtacggttccagccgtcaatatgccgagcagtaccgccaggtgggagtgaccagtgcggttgccgacgccgatccgcacaagctggtggcgatgctgctggccggcgcgctggagcgcgtgcggcgcgcactggccagcctcgagcgtggcgaccaggccggcaagggcaaggcgatcggcgaggtctgcgcgatcgtcggccacctcaacggctcgctggaccacgaggccggcggcgagatcgccggcaatctgtcggcgctctacgactacgtgctgcagcgcctgaccgaggccaacctgcacaacgaccgtgccgccctcgacgaatccctgcagctgctgggcgagatcgacagcgcctggaatgcgatcccgatggaacagcgccgctcggccgcggtggcaccatga

SEQ ID NO: 513472 - DNA, 294 bp, Stenotrophomonas maltophilia
atgagcctgcacgaactgcacgcccagctggatgctttcgaaaaggccctgggcgaagatgcgctcgaccaggccgacagcctgctcgacggccacgacagcacgctgcatgccctgctcagccagccgctgaccttggacgaccacgcaccactcagtgcgctgttcgagcgccagcagaacctgctgggcctgctgcgccagcgccgcgatgcggtggctgcactgatgaatgacggccagcgctcccttcgcgcggcgcatgcctacctgcaggcagaatcgctggcatga

SEQ ID NO: 513473 - DNA, 579 bp, Stenotrophomonas maltophilia
atgacccaactgccgacaacgtcgctgcaccatcctgccgaaagcgagctgttcgacgaaacgctcagctgcgaactggccctgcccgccgagttccagcccggcagtgccgccggtcgtaccagcagcgccgaaggcctgctgcgcagcctggcgctggtggaagacagccgcgttgacgagcatgacgaccgcaacgaggccagcctgcagcttcagcggctcgaggcgaagctggatctggcgatggtgctgcttggccgcctggtccgccagcagggccaggagctgaccctgcgcccggtgcgctggtcacgtcgcgggatacgcctgcagctgggcccgcgcagtggcgccagtcccggccaggcaggcctggtgcgcctgcagcccagcgactggctgcccgaccatatcgacctgccggtggaagtgatcgccgaagcagcggatggcggcggcggccactatctctggctgcgcttccagcgccttggcgatggcctggaaatggccatggagcgccacctgttccgcctgcaccgtcgacaggtggccgaagcacgccgggcgcgctga

SEQ ID NO: 513474 - DNA, 639 bp, Stenotrophomonas maltophilia
gtgcctgtgcgagttctcatcgtcgacgatcacaccctggtccgcgccggcctggcgcggcttctgcaggggtttgccgacgtgcagctggtggccgaagccagcaacgccgagcaggcgctgcagctggccctgcagcacgcaccggacgtggtgctgatggacctgtcactgccgggccgtacgggcctggaagcgctcagcgatatccggctgcgcgcgcctggtacccgggtcgtgatgatgaccatgcatgacgatgccgcgcacgtgcgcgatgcgcttgaccgcggcgcggtcgggttcgtggtcaaggatgcggcaccgcaggaactggaactggcgcttcgcgcggcgcatgccggccaggtgttcctgagtccgcagatctccgccaagatgctggcaccgatgctcggccgcgagaagcccactggcatcgccgcgctgtcaccacgccagcgcgagatcctgcgccgcatcggcaagggcgaaagcaacaaggaaatcgccgccgacctcggcatcagcgtcaagacggtggaaacccaccgcgcacgcatgatggagtcactgggctgccgtcgcgccaatgatctgctgctgctggccgcgcgccaccagcacgagctggagtga

SEQ ID NO: 513475 - DNA, 1410 bp, Stenotrophomonas maltophilia
atgaaggctgcactctcgacccagctgggccaacaactccacctcaccccgcagctgctgcagtcgatccggctgctgcagcttgatggcctgcacctggaacaggaaatccagcgcctgctggactccaatcccctgctggaaatcgaagaacccgaagcaccgaccgccgacgccaccgaggttgccgccacgacgctggaaaccgccgcgttcgatgagctgccggagtcctcgatgtgggacgttgccggtaccagctggcaggacggtgacgacgatcgcatggcgcgtatcgctgccggcgaatcgaccgacccgcagctgcgcgtgctgcagcgcctgtcgctcgacatggatgatcgccagctggcagtggccgcattctggctggaccactgcgacgaggccggctacctgcaggcgccactggaccagctgcagctgctggccagcgcacagttcgacatcgctgccgacggcgtcgaagccatccgccagcagctgctgcacggtgaaccggccggcatggccgcgcaggacctgcgcgagggcctgcaggcgcagctgcgcagccttcacggcgcggtgcctgcccgccacctggccacgcgcatcctggacggcgcgctcgatgcgctggccgcacatgattaccccgccctcgcccgccagcacgacgccgagatcgacgacgttcgcgaagcggtacgcctgattctgtcgctgcagccacgcccgggcgacagcctgctgccggaacgcaatgccgttgtggttccggacgtggtcgcctggcacgccgatggccagtggaaggtggcattgaacccgaccaccagccgccgcgtctccatcaacagccagtacgaacaggcgctggcagagaccagcgaggccgccccggcactgcgcgaaatgctgcaggaagcgcgctggttcagccgcggcctgtcgatgcgctacgacaccctgctgcgcaccgcgcgggtgatcgtcgagcgccaggccgccttcctggcccgtggcgaagaggccatggccccgctgaccctgaaggaagtggccgaggagatcggcatgcacgagtccaccgtttcgcgcatcactaccggcaagttcctgcagaccccgcgcggcaccttcgaactgaagcacttcttcgccgtgcgcctggaaggcgccagcgtctccgggcaggcggtgaaggccatggtccgccgcctgatcgacgccgaaccggccggccgcccgctggcagacgaggccattgccggcctgctgtcacgccagggggtgaacattgcccgccgaaccgtcgcaaaataccgagaacaactggatatcgccccggcccgcgaacggcgccggctcagcgccaggcaaccccagctggcccgggtgggctga

SEQ ID NO: 513476 - DNA, 378 bp, Stenotrophomonas maltophilia
atgaacaagctcacggtcctgctggtcgatgaccacgagggcttcatcaacgcggcgatgcgccatttccgcaagatcgactggctgcagatcgtcggcagcgccggcaacggcctggaagcgatcgagcgctcggaaacgctgcgcccgcaggtggtgctgatggacctggcgatgccggaaatgggcggcctgcaggccacccgcctgatcaagtcgcaggacgatgcaccgtacatcgtgatcgccagccacttcgacgacgccgagcaccgcgagcacgcactgcgtgccggcgccgacaattttgtcagcaagctgtcctacatccaggaagtcatgccgatcctggaaggcctcagggaggatcgatcgtga

SEQ ID NO: 513477 - DNA, 1506 bp, Stenotrophomonas maltophilia
gtgagcgaatcgcgcatcctggtgctggacaacgacgccgtgcgcgcagagcgcaccgttgccctgctggaattcatggacttcaacccgcgctgggtctccgacgcggccgacttcgatctgggccggcagcgccagaacgactggatggcggtgatcgtcggcagcctggacgacagcgccgccagcaccgcactctacaactggctgggcggcagcagcctgccaccgccggtgctgctggccgatggtgatgcctctgcgttcgcgcagcagcacggcctgcacgaagccaatatctggccgcttgaaacgccgctgcgccacgcgcagatggaagcccttctgcgccgcgccagcctcaagcgcctggatgccgagcatcaggccggtgccgtgcaggatcaggggccgaccggcaacggtccggcggtgaccgcactgcgcaccatgatcgaacaggtggccgcgttcgataccaccgtgctggtgctgggtgaatcgggtaccggcaaggaagtggtgtcgcgcgcgatccaccagcgctcgccgcgccgcgatggcccgttcgtggcgatcaactgcggcgccattccggcggacctgctggaaagcgaactgttcggccacgagaagggcgccttcaccggtgcgctgaccgcgcgcaagggtcgtttcgaaatggccgagggcggcaccctgctgctggatgaaatcggcgacatgagcctgccgatgcaggtgaagctgctgcgcgtgctgcaggagcgcagtttcgagcgcgtgggcggcaaccagaccatccgctgcaacgtgcgcgtggtggcggcgacccatcgcgacctggaaacccgtattgccgagggcaagttccgcgaggatctgttctaccgcctgaacgtgttcccgattgaagtgcccgcgctgcgcgaacgtcgcgaggacctgccggcactggtggaaaccatcgccgcacagctggcccgcaccggccgtggcgaggtgcgcttcaccccggaagccttgcaggcactggccggctacgaatggccgggcaacgtgcgcgagctgaccaacctggtcgaacgactggccgtgctgcatccgggtggttcggtgcgcgtgcaggacctgccggcccgctatcgtggcgatgcggcactggccgccgtcgctacgccggcaccggcaccgcccgccgccagcgaagagcggctggacctgcgcagcttctcgttccacacacccggcagtggcaaccagccggcgctggagcacggcattgccgtcaatcgcccggcggctccggccgcactgcccgacgaaggcatggacctgcgcaaccacatggccaacatcgaactgggcctgatccacgaagcactggaacgcacccagggcgtggtcgcccacgccgcccagctgctcggcctgcgccgcaccaccctggtggaaaagctgcgcaagtacggcatcgagcgcgagcaggccgagctggccggctga

SEQ ID NO: 513478 - DNA, 384 bp, Stenotrophomonas maltophilia
atgctcgcttcctgttcctctttcctcatctgggcggccgtgaccgtggcgaccctcggcctgctgttccggccattccgcattccggagtacgtgtgggcactgggggctgctcttctgcttccactgctgggaacggtgccgttcggcacgaccttgcacgcggtggccgagggccgcgatgtctatctgttcctgatcggcatgatgatgctggccgggctggcccggctggcccggcgcgaaggcctgttcgacccggcacaatcattccctggcacgcaagcgcaaggtggaatgggcggatctggccaagagccagttgatcaccgtgcaccgcacaagcggcaaccgcacgctgctgaatggtgcgttggcgcgtga

SEQ ID NO: 513479 - DNA, 192 bp, Stenotrophomonas maltophilia
atgctgatggtcacatgggcctcagcggcgggcagggcggcggtttccacggcggcgcgcaggcgctcgcagggtggcgatgaattcctcgccgccgtcgcgggccagcaggtcatcactgcgttgcgggcagccgtcgaggatcgcggcgaccgcctgcaggttgttggcgtccccagcgcccagcgctga

SEQ ID NO: 513480 - DNA, 12282 bp, Stenotrophomonas maltophilia
atgaacactatctatcgtctggttttcaaccgcgcgctgcgcgtctggcaggtggcttcggagctggtgaagggcggcggtggcctggtcggccatgtgccgggccggcagagcgccgcgctgtcgccgctgggcttcgcactgatgtgctcactgggctgggtcagcctgggaacgcctgcgctggcgcagtccgatgcgcgcatcatttccgatccgaatgcgccgggccgtgaacggccgacgatggtgaccgcacccaatggcgtgccgatggtgaacatcaccacgccgtcggcggcgggtgtgtcgcgcaaccgctattcgcagttcgacgtgggccgcgatggcgtcatcctcaacaacgcccgcggccaggtgcagacgcagctgggcggctgggtacagggcaacccgtggctcgccaccggcagtgcacgggtgatcctcaatgaagtgaatggtccggccagccggctcaacggctatgtggaagtggccgggcagcgcgccgaagtgatcattgccaacccggccgggatccaggtcaatggcggcggtttcctcaatgccagccgggtgaccctgaccaccggcacgccgatgttcacgggtgcaggcgcacttgagggctatcgggtcaccggtggcgcgatccagatcgatggcgatggcctggacaccagccgtgctgattacaccgacctgatcacccgttcgttgcaggtcaacgccggcatctgggccaaccagctgcaggcgacgctgggcaacaacgtggtcagtgccgaccacagccaggccagtgcgaccgcggccagcggcgaggcgccggccttcgcgctggacgttggtgcgctgggcggcatgttcgccaacaagatctggctggtcggcaatgagcacggcgtgggcgtgcgcaatgccggcagcattggcgcacaggccggcgagctggtggtgacggtggatggccggctggaaaacatcggcgccctgcagtcgcggcagaacgtgcgcgtgcaggccggtggcgatcttgccaatggcggcaccatcgccgccacgcgcgaagttgcgatcaccgccggtggcacgctggacaacagcaacggcacgctcaatgcacagcgcctgcagctgcaggcgcaggggttgcgcaaccatggcggcgccattgaacagaccggtgtgcaagcgctggcactcaaggccgacgcagccagcaaccgtagcaatggcctgttgggtgcactggatgccatggcatcaagtggtaacgggagcagcgctggcagcggcgcgtcgcccggcaatggcggtggaacacccggaaccggcacgccgggaacgccgggaaccggaggcggcaatgggggctcggcgggcacgccgacgtcgccggagctgcccctggccgagggcctgatcgccatcgccggtacgctggacaacgacggcggcagcatcagcaacggcggctcggtgtcactggccgcacgcaacggtctcgacaacagcggcggtcgcctgggcgtgagcgcgctgcaggctgggggggagctgcgcaatgacggcggcacgctgcaggtgcatggcgatgccgcgctgcaggtgggcctgttgtcgaaccagaagggtgcgctgagcgtggccggcgacctgtggctggatgcgcagtcgctcgacaaccgcggtggtgaactgcgccacgccggcaaagcggcatcgtcgtggacggtgcagggcctgttcaacaacgacggtggcctgctggccaccaatgccacgcagctggccttgcgcgcaggccaggtcggcaatgccggtggccgtatcgaacatgccggtggcgatggtctcgcgttgggtacgggcgactgggccggcagcggtgggcgactgagtaccctgggccgcctgcaatggtcggccggcaacgccgatctgcgcaacggttcgctcagtgcggccgggttcgagatcctggccgcgacgctggacaaccggggcggcagcctgctgtcgctgggtagcggggccagttcggtgaaggccacgacgctggacaacagtgcccgcggcacgttggccggcaacggcgatctggcactggtcgcgaccacgctggacaacagcaacggcctggttcagcaggctggcaccggcaccctgagcgtgcaggccgatacgttgcgtggcagcgaagggcgcctgctcagcaacggcgcgctggtgctgtccggcggcgagctggacgtgagtggtggtacgacatcggcgcagagcgtgcagatccacgcaggggcactgcgcaaccgccagggccagatcgtctcgcagggtgtctcggcgctggcgctggacgtgcgccatgcgttcgacaatcagggcggccagatcgtcggcaacggcggcctgcgcatcgacgccggtcgcatcgacaaccagaagggcacgctgcagtcggccggcacgcagggcgtggcgctgacggtgcgcgacacgctggataacagcggcggcggcatctccggcaatggccaggtgcagctgcaggttggcagcctggtcaaccagggcggcaaggtgctggcggcaggcagcggcgcgctgcaggtgcaggcccgagagcgcttggacaacagcaacggcggccgcctggccggtaccggtgatctgcggctgcaggcggcaagcctggacaaccgcagcggtgcaatcgaacacgccggcggcggtacgttgcagatccgctccgacagcctgcagggtgcgggcggccgcatcctcagccagtcggcgctggaacttgagggcggcgacctgctgctgggggccggcagcactacccaggcagagcgcattgccatcgatgcgcagcgcttggacaacaccggtggcaacctcagcgcgaccggcagcgacgcgctgcggctgcacgtggcgcagggcgtggacaacagcggcggcacgatcgccggcaacggcgcgctggatgttcaggccggtgaactgatcaaccgcaagggcacgctcagcggtgccggaacggctgacagcacgctgcagatcgtcgctgcgctggacaaccacgaaggcacgatcgccagcaatgccaatcgcctgacggtcacttccgcacggctggacaacagtggcggcagcatccgccaggccggcaaccagggcctggacatcaccaccggccgcctggacggcagcaagggcacgctggtctcctcggccacgctgaccctgcgtgctggcgacgtggatcatcgtgacgcgacgctgggcgccgatcgcctcgaccttgaggccactacgctcgacaacgccggtggccgcatcatcgccagcggcgaaggcgccagtcgcatcaaggccacgacgctgggcaatgccggtggcacgctggccagcaatggcgacctggccctgctggcacagacgctcgacaacagtgcaggcaggatccagcacgccggcagcggccagctgcaggtctcggcgaagaccctgctgggcaacggcggcagcgtgctcagcaatggcagcttcgcgctggatggcgccaacctcgatctgaccgcggcaaccacctcggcgcgccgcgtcgacatcaccgccgataccctgaccaccgccggtggcacgctcaccgcaaccggtgaagacgcgctgcgcctgcgcgtacagggtgtgctggacaatcgtggtggcacgctggcgggcaatggcgtgctggatctcaccgcgcagcagctgatcaatgcacagggcacgctgcagggtgcaggcagcggtcactccacgctggcgatcggccaggcgctggacaaccagaagggccgcatcctgctgggcggtgccggcacggtcaccgcagccagcctgagcaacctgggcggtaccgtgcatgcgggcggcagcgcgctggtgctgggcgttgagggtcgtctcgacaatggcgagcaggggctgctgtccagcaccggcacgatgaccctgggcgccggcagtctcgacaaccgccacggcaccctggtcgctggcaaggacctgagcgcgaccacggcggcacgcgtggacaacagcgacggcgcgatgcaggccggcgaacggctgcagttgcagggcaacggcctgctcaaccagcgcggcacgctgctgggcggccagctggacatcgatacccgcggccagcggctggacaaccgcgccggcacgctgggcacgcagaagggcgatctgagcgttcgcagtggcgcgatggacaaccagggcggtcgcgtgcagtcggcggccgacctggccatcaacacggccgggcaggacatcgacaaccgcgccaccgccggcagcggtggattgctggcggccggaaagctgcagctggatggtggcgtgctggacaaccgtggcggcgcagtcaatgcacaaggcgatgcgcgcttgctgctggcccgcgtcgacaacagttccggtggaacacttgccagcgccgcgaatctgtcgctgcagacggcgagcctggccaatgccagtggtcgcgtgcaggccgggcgcaacctcgacctgaccctggacgggcacctggacaacgccgacggcgcgatcgcggctggccagctgctgaccctcacggccgccagcgtggacaaccgcaacacccgtggcggcgacggcacgcgtggcttgcaggcgggccagctgcagttcggtgcacagtggctggacaacagccagggccaggtcgtcactgatggcggtgcgcggctgcagatcaacggccagctgcagaacaccggcggcgtgatcagcaccggcggcaacctggacagccaggcggacaacgtcgccaacagcggcggcctgctgcgcgccgatggcagccagaccctggtcgcacgtgcgctcagcgaagacggccaggtgcatgcgcagcgtgacctcggcctcaccctgcagcagggcatgcgccaacgtggcgaatggatcgccaacggcaccctgtcgctgaacctgtccggcgacctcgacaaccagggtgtggtgcgcggtggcaacctcgacctcaacgcccagaacatcaccaatgcggcctcgggtgagatatccagccagggcacgacccacctcaatgcccgtggccagctgaccaaccggggcctgatcgatggcgcgctgacccacctggaggccggcgaaatcgacaatcttggcaccgggcgcatctatggtgatcgcgtggcgatctccaccggcgtgctgaagaatcgcgccgaagaggccggtggtgccacccgcgtcggcaccgtggctgcacgcgagcgcctggacctgggcgtgcgcgagctgcagaacaccggcaagggcctgatctacagcggcggtgatgctgccatcggcggcacgctgagtgccgatcgcatcgccagcggcattgccgggcggatcgacaacatcagctcggtcatcgatgtcaccggcaacctgtccatcgatgcgcaggtggtcaacaacatccgcgagaacgtggtcatcacacagaccaccgccgtgaacgctccggtgcgcatggatcgacccgcctggtggcgcaacggcaagaatggcaccgaggacattcgcagcaccagtcactattcggcgcacgaggtgtactacctcaatccgaccgatatcctggaagacacgccgcatatcacgccggatggcttcaccgtgcaccgtgcggtggtacgactgaccgcgcagaccagtgcctacttcttcgggcgcggtgggctgtatgccgcgctgggtgagcgtgcgcggctgaacgtgcaggacggcacggtggtgatgtactacgtcggccgccaggacaaccaggtcaatccggaccaggttgccgctggtgccgacgatccgtttgccgagctggccaccctgcatcccgattcgccggcattccgctacgtcgatgacaaactcacctactcgtcagcgtatggcacctgtacgaccaactgcgtgcagttgtggacctacaaggactacgatcccgaccgcattctgaccagcccacagtttgcgggcggcaactccaccagtgccaacgagcagtatcgcctggccacgcgcaccgtgaccgaagatgtgttgcagccgagcgtcggtgccgatgcggtcatccggtcaggcggtgcgatgcgcatccgcagcgatgacctgcgcaaccactacggcagcattgccgccggcggcgatctggacatcatcggcctgaccggcgcggcaaaggtggagaacctggcggccacgctgtatcgcacgcaccagttctccaacgtcagccacacgttcggcggggatgtgatgacctggagtgctccggccatttccgaggtgaccggtaagattggcggcagcattgtcagcggcggctcgttgagcatcgacgtcggtgacctgagcaacctcaaccaggggcgaaacgcgccgaacgtgcagaacggttcggccatggccaacctcaacgtgcaggggcccaaggcgctgccggatgggccgggccatggcggtgcgcaggggccgggccagtccgccggcaccggtgccgaacgcgcgctggcacaggcggccgatggtgccagtacccagcaagggagcagcgtcggcggcgtgagcggcaacaccggtacgtccgggccgcgcgtggtcgcagccagtggaggatcgccggatcgcatcgcgatgggtgcaccggacacgcgcgcgccgagcgccagcctgttcaacgtcaatcccaacggcggccactatctggtcgagaccgatccgcgcttcaccgaccacaagacctggctgagttcggaccacctgctgggccagatgggctactcgcccgataccgtgcagaagcggctgggtgatgggtactacgagcagaagctggtgcgcgagcagatcggccagctgaccggtcgccgcttcctcgacggctacgccagtgacgaggcgcagtaccgcgcgctgctggaggccggtgccacggtggccagcgaatggggccttcgccccggcgtggcgctgaccgaagcgcagatggcacagctgaccagtgacatcgtctggctggtcgagcagaccgtcaccctggccgatggcagcaccaccaccgcgctggtaccgcaggtctacctgcgcctgcgtccgggcgacctggacggcaacggtgcactgctggccggcgccaatgtcgatatcaaactgggcaatggcctggtcaacaccggcaacatcgccgggcgcaagctggtgaccatcgatgccggcaacatcgagcatctgggcggcagcatttccggccagtacgtcgggctgtcgtcggacaaggacatccgcgttgtcggtgccgccgtgacggctagcgatgcgctgtcggtcaaggctgcgggcaatgtcacggtggcctccacggtggagacacagcagggcggtggcacctaccagtacgagaccaaccgcatcgatcgggtcgccggtctgtatgtaaccaatcctagtggcgacggcatgctgtcggtggtggccggtggtgacatcagcctgcaggccgcacagatccgcaacgccggcgccgacggcctgacccagctggccgcaggcggcactctggatgttggcgcgattgcgctggaggaacgccgcgacgccaccttcgatgaacgcaaccatcagcgcagcagcaggacgacacacgctgccacgtcagtgcagggcgctggcgatgtggtgctggcggccggcaaggacatcaacctggccgccgcgcagatcaaggcggcgggcggtctggcattgcaggccggtggggacatcaacagccaggcgctggtggacagtgagagccgggattttgccagcgcaggcaagcgcagttcgctgcagatcagtcagagcgatgaaacagtgcgcggcagtacgttgcaggccggagacaatctgctgctgaacgcgggccgggacgtgagccttacagccgcgttggtcgacagcaatgacggcgcggtaagcgtggccgcaggccgcgacgtcaacctgctctcggccaacgagacgcacgactacagtctggacagctacgacaagaaaaagaagacgctctccagcaccaccaccacgcgcagcgtcgacgccagcgacagctatgccatcggcacggcgatccagggcgagcgcatcaacatcacggctggccgcgatctgactgcggtaggtgcggtggtcgatgccaccggcaacgtcattctgggggctggcaacaatgtgctgatcactgccgccgaggaccatcacagcagtgagtccaacgaaagcaaaaagaaatccggcgttaccgggggcttcggcaacggcgtggcatcggtgggctatagcagcgcgaagaacagcagcacccacgccgagcagtccaccatccaggtgggatcggcgatcgcctcgcgcgacggcaatgtgctgatcaatgctggcaacacgctgacgatcgaggcctcggacgtcgccgcaggcgagagcctgacattggtgggcaaggacattgcgttgctggcgcgacaggacaccacggacagccaatccagtcaggccagcaagtccagcggcttctccgtgggcgtgacttacgacccgaccaaggcctaccgcagcgcccgcgattcgaccaccgacggcatggccgacagtggctcggcgatggggcggatcacccgcaccgctgaaggcgccgcctctggcctgcgtgcggccaccacgtcgaccgtggtgactgccggcagccagcgcaccaacagcgaacagagccattcgaccagtgatgcccgcgtcagccagttggctgcaggcggcgatctcacgttgattgccaacggcggctcgatcctcagccagggcacacagatgtcggccgagggcaacgctgtgctgctggccacccaggacatcgtgttcgacgtggcccacaacaccgagcgcagcgacagcagcagccgcggcaagggctggggctttgccaacaacaccagcggcctgccgttcggtaccaacaactcgcagagccagggcagcggcagcagtgacaccatcaccggcacgcagctgtcggtcggcggcggcgtgcgcatggccaccaccgagggcaacatcagcctgaccgcagccaatatcgccgccgagaaggacgtcagcatccgtgccgccggtgatctgctggtgcgcagcgggcaggatacggtcagcaacgccaatacgtccgacagcaaggcgatcggcacggtacagatatcggatgccgagaagttctctggctggcaccgcgagcagcaccaggacgacagcgcgcaggtgtcacaggtggccagcagcatcggcagtctgggcggcagcgcgaacctgaccgccggaggcaagtacacgcagacggccagcaacgtggtggccgccaaggacgtgaacatcaccgccgccgagatcgagctgttgaccgccgacgaaatcggccactactcgcagagcgacaaggacctgaagatcggcgtgttcgcgcgggtgaagtcgccgttgatcgatctgatcaacaacgtggacgcggcccgtcagtcggatgatcgcctgcagaagatgcagggcatggcggcgggcgccaacgcgtaccaggcagccagtgcgatctcggcactgtccggccgtggcggcagtggcgaactgttccgtgctgaagcaggcatcggcttcaagaccgccaacagcagtgccgatggcagcagcagggtgtcgcgtggctccaccatccagggcggcggcaacgtcaacctcaccagcacgacgggcgacatccacgtggtgcagggcaatctgagtgcaggcaacaccctcagcctggattcggccggcgacatcctgctggaagcaggcaaggcgcatgtggccgaccgcagcaagagcagcaatgccggcgccgaagtcggcgtgggggtctcggtaggggcgcagaccggcgtgtacgtgtacgccgaagccagtgttggcagcagcaaggccaatgccgagagcagcacctggcagaacaccacgctgaccggcaagaatatttcgatgaaggccgagggcgataccacgctgcgtggtgccacggcgaccgctgatcgcatcgacgtcaagaccggcggcacgctgacgatcgagtcgctgcaggacatcgccgagagcatgtccaggaacagccaggtgggtggccgcgtgcaggtgtcgttcggtaccgcgtggaatgccgacgggtatgccagcgcaggcaaggccagcggcagctatcagggtgtcggccagcagagtggcctgtttgccggcaatggcggctaccacgtcgatgccggccacgtgaacctggtgggcggcgcgattgccagcactcatgcgggcaacagtgaactgactgcgggctcgctgacgttcactgacctgcagaaccacatggactacacggccagctccggcagcatcagtggtggtgcgggcgggcagatggatggctgggcgcccaagccgggaacggccgcaccccgaggtggtccgggcctgccgatgatggaaaagggcagcgacagcagctccacccttgccaccttgaccgagggcaacatcaccatcggtggcaagcagacgtcggcggctgagctgggcatcaacaccgatgccagtggggcacatcgtgcgctggatgcattgccggatgcgagcaagttgctggcggaccagcaggcgatggcggctgcggcggggacggtgatggccaccagccagcagattgcatgggacgttcaagcctatcagagcaagaaggcaacccaggcgtactatgatggcctatcaagcgatgataagagggcgttcaacgcgcttagcgcggagcagcgcgatgcggtgctgacggcaaacagccaagcttataacgatgcgaagaagtggggtgatggcggtgagtacagccgtgccctgagcgcagtgacgacggctgtggtagggggcgtagccggccagggcgccggtcaggtcgcgtccaatgcgctggcgccctatgccgcttacttcatcggcagcaagcttgactcgaaccacggcagcgatcccaatgcgactctgcaattgctgtcgcacgcggtattgggtgcactgctggcggaagccaatggtggcaatgcgggaaccggagcggtctctgcggctggcggcgagttggccgcgaaggtgctgaccagtacattgaccggaggagatccttccaggctgagcccggagcagaaggagatggtgctggcgttgtcgcaggcggtgggagcactggcgggtgggttgtcagggcaggatctggctgggatcgcgttgaatgcggggattgccaagaattcggttgagaacaacttcctttcagaggatcaggctcgtgtactgaagcagcagctcgacgagtgcggcggcgacacgtcatgccagaagacggtgcgcgacgttgccaagcaattgtcggagagaatggattacgagctgctctcagtgtgcactgcgaactcagcgagccctgcgtgtcaggcgtttgtgaatgcggccgtttcctacaagtatggctcgtggcccggagagcttggactgttcgatgatctcggccgtagcagcgaggcgctttcttcgttcgcccactccatgaatggacgtgcctatcgtgagctgatatttgagaacggggggatccagccggtctatatcctgcctcaggaacacactgtagctgcactggcggagtggaccggaaatcttgacaggacgatcgatcagtacggcctcttctcgaaggaatcgtcagctgagctggggcttggacttgcgaaggtactgcttcgaaaatatggcgctgttaccataatcgaagggagcggaggcttcgggaagggggcgaaagcgggcagctccgaagcactgcagcgagcgacgtctgggccagtctatgcaacgaataaggaggcgactgctgctgccacggctttgggctttaggcgtgtaaaggagactgctcacgatggtgagcttgtctttactaatggaaagatatttatttcaagggatgtggatggccataatggtggtgcttggaaggcagcgaaatcggtgaaggcgctaggtagccgagatacccggcttggtacgtttgattctagtttgaaaaggataggggggtga

SEQ ID NO: 513481 - DNA, 285 bp, Stenotrophomonas maltophilia
atgaaccgtccgctgcgcatcctgcacaccgaagccgccaagggaatgggcgggcaggagatctacatcttccgccacatgcaggtgatgcgcgcgcgtggccatgaggtggcgctgctgtgccagcccgaagcgcgcctggccaagctggcacgcgacgacggtttcaccgtgtacaccctgcgcatgggggggcctgctgcgcctgctgcgcggcatctggtcggtctcgcgcctggtgcgtcgcgagcgctacgacgtggtcaacaccaccagccgccgtga

SEQ ID NO: 513482 - DNA, 1230 bp, Stenotrophomonas maltophilia
atgccgcagaaactcatcgatcaaaccaccatccagccggacggccgccctggcgacgacgcgttcaccgcgttcgcgacctgcaacgagaacttccaggacgccgagcagcgcctagtggcgttgggtgcgcgcatcgatcaggaggccgccgaccgcgggcagcacgttgcggccgagtcggcaattcgagaagccgccgacgcggcgttgagcgcacgcattcctggcaagaacattgttatcaatggtgacttccggttctggcagcgtggtacgtcgttcgtggggatgaccaacggcgcctataccgctgatcgtttcattccggtgatggtcggtgacactatcgactgcattcgagcggaacatccgctgggcgatcccacaaacttgttcaacgcccgatacttcatgcggtgcagcgtgggtcagattgctggtaacggcagcctcgccactttgcaataccgtattgagaacggtgtacggcttcttgcaggaaaaacggttaccgtcagtatgctggtgcgagcatcgtcagctacgaagatgggtatcgaatttgaaatgacgtttggtactggaggttccccttctccgtctatctacggcaatagcaagcttgtgaccggaatcactggcggttggcaacgaatcagcaggaccttcactctcgctgatattgcagggaagacgtttggtactgctactgagggctatctgtcgctgattctgtggttggatgctggtagcaattgggacgcgcgttcggcaggcgtaggacggcaggcgggcgatttccagttctccaacatccaaattgaaattggtagtgttgctaccgactttgagcaacgcaacgacgcgattgaactggttctgtgccagcgctactacgaaaagagctacaacctaggtgttgcgcccggtactgctacacgtgagggtagtcatacgtctggcgcgctaacaagttatcttttgcacgccccaaccgttcgtttcagtcaaagaaaacgcagcactccggcaatcgctttttacaatgcgcagaatggggcggctggtcagatttccgagtatggggcggatggtttgcaccttacgaataaacccgctggaatcaacgttgttggttcgatgtcgtttgaagcatttgtgccgaacggaacagcaacgcccggcaacgttgaacgtttccaatggacggcagacgcggagctttaa

SEQ ID NO: 513483 - DNA, 855 bp, Stenotrophomonas maltophilia
atgtactccaacaagctgtacacgccgctaagatatccaggagggaaggcacgcttctcttccttgatagagcgcataattcgagataatgaccttcatggaggtcattattttgagccgtttgcgggcggggctgggcttgcgctcatactactggttgatgatgtggtcgaggcaattcacatcaacgatatcgacccagcggttgccgccttttggaaagccgcagtcagcgatactgaccgccttatcaggatggtggaaatggccgacgtttcaatggatgcgtggcaccattggcgctcggtaatgattggcgaggcagctggaacggaccttgagcgtggctttgcgacgctcttcatgaacagaaccaatcggtctggaatcctgaagggcggagtcataggagggaagcaacaagcaggaaaataccgtcttgatgcgcgttttatgcgagagaagatctgcgaaagactgaagcgcattggccagctttcgagccgcatcaatgtctacgaagaagatgcacagtccattctgcatcgcagcacagagttccttccagaaagaacgctcatctatctcgaccccccttattacgtaaagggggcaggactgtaccgtaattcatacaaagacgacgatcacaagaagattgcgagacttcttctcacgaaggatttccccttcccttggatcgtgtcgtacgacaatgccgcagagattcgcgagatgtacggcgaagctagcggcgtatcttatggtctgaattacacagcacagcggcgatacgtaggagatgaagtcatgtatttcagtgacagactctcggtagtacccaataaaatttga

SEQ ID NO: 513484 - DNA, 1653 bp, Stenotrophomonas maltophilia
gtggttgcgaatagtggaaggatccttgtgcggtcaattgagttcaatcaaccgccgtttcgtaagctgagcaagttgagaattgattttgcagagcgcgttacgcttatcgctggccacaacggtattggcaagtcaacaatcctgggccttctagcaaacacgtttggcgtcaccacaaaagaaccacgcacttacttcggcgagagcttctacaccaatatcgagaaaattgtatacctatctctcgatgaagctgcgtatgcaaaagataatccaacctccgcaccgatcgtagtttcgaccgtcggcgaggttacagtccgaaagcgtagcgccatgacgcagcggacagtctggaatcgcgcgcgtgttgtacctcgcaccgtggagaaggctgctgacgatccggttggccaagatgccaaggtgccgctccccaccattttccttggcctgcgccgcctagctccgattggcgaggccgacgagaaggacgttgccagctctctccttcagatggacgaagaggaccgccgactcatggtcgatttcgtcggctcggtgatcgtcggtgctcacgtcaatgatcaaatgacccagacagttatacgtggcgccgggaaaacgtcaattcagccgggctttgacacgcatgacgcgatggccatatcaacaggccaggatagcttaggcagtattgccacggcattcgcgtcctttaatcgactgagacgcgaacagggggctgcatatcagggaggacttctagtaattgatgaagtagacgtcggattccatccgcacgcgcttgaacgtctcgcgggcgctctcaaaaagcatgcgaaaaagctcgatgttcaagtgatagcgacaacgcactcaccggcgctgatcgagtgtattcatcctgatggcaagggcgtcgctttggccccagatgcagtcgtctatttgcttgacacggctaggccgcgtatcgctgaggatcagtcgctcactgcaatcctggacgacatggcacttcgggagaatgttccccaaaccagcacgaaacccaagctcggcgtctatttcgaggacaaagagggagttcagatcttcgatgcgatcgtgacacgcggaaagcgcatgagtctttcgagaaagtatgacgtcacggtgaagccgatcgcactggaggtgggcggctccaacctgctcaagcttccagaacacgacccaatcttcaaggatcgtgtgctcgtggttgacgccgacacgcccgtgcctgcaaaagccaagaagcgcggcaacgttgtgaagctgccgtgccccacaggcgctactggcacagcgcggtcgccagagaacatgatcattcagttcctagttgccatgacgaaggcaaaggacggagtatacttggacgcgatgttgagtcttgacgtcaagaacgtctcgaccgacaagattttgagcacatttttccccgacggccccaaagtatcaacagaccgcgagtcgacgaaaaaatggtggaataagaattggcccaagctgaaggcatggaaggtcattgaggtgtgggcggactgccaccaagccgaggttaatttgttcatggaagaatttgaaaatgcggtaaaagtaacctcgacccgcctacgctaa

SEQ ID NO: 513485 - DNA, 306 bp, Stenotrophomonas maltophilia
atgaagtacatgacgaacagtctacgtcagggcgcagacaagagcccgactttgcccaacgtggatcagacggaaagtcagactggctggccggatagtccgacgcttcgtttgaaggagctgatcaagctgctgcgtgtcagcaggagcaaggcctacgaactcatgaagtccgatccggacttcccgaagggcattccgctctatgacagcgaactgtccccgaagttctactggacgcatgaggctatggcatgggctgaagggcgtgccgtcaagttccgtcgtgcgaaggaggcgaagtga

SEQ ID NO: 513486 - DNA, 321 bp, Stenotrophomonas maltophilia
atgggcatgatttctgactggatcgtagatgcaacaacgtcactggtcggcaagctgaaggatgctgcagccggactggttgggaaagggcttgccactttcggcttgaccactgtcacgttcaacgcgctgctgcccaagctcaaagagttcgtcatgcagttcattggtggaatcgacggtcctgcatggcagatgctcaattaccttggcgttggcatttctttctcaatgatcttctctgcattgacggtgcgcatggcctggaaggtcttcatcgtgcccaaggctgtcgctgaccagttgggggcaggctcatga

SEQ ID NO: 513487 - DNA, 246 bp, Stenotrophomonas maltophilia
atggacgtgacgctcaatcagatcgtgcacgaactgatcgcactgcttgtcgggggattggcttacgaagatgaagtccaggcctttatgccggtgcttggcaagttgctccacatggtgtggaaccttcgcgccggctgggcgcttcggaagcatgccatgctcatatgcctcatcgaccaaggcgactgcgccatcgggcaggaagttaggccaatcacggaactgctctggcgtcatctctaa

SEQ ID NO: 513488 - DNA, 378 bp, Stenotrophomonas maltophilia
gtgatcgacctggatgatttccaccagaccaacgacgcgcacgggcatgccggtggcgatgcgttgctgcagcacctggtggccgtgtgcaagctgctgctgcgcgccaccgacggcatcgcacggctgggcggcgacgagttcgtgctggtgctgccggaaacccagggcgccgacagcatggccaccgtgcagcgcctgcagcgctcgctggcacatcgcgtgctgaccgtgcaggagcagcgcgtgccggtgcatttcagcgccgggctggcgcagtggcagcccggtgacgataccgaaaccctgctgcggcgcgccgatgacgcgctgtatgcggccaagcggcagggcaagaaccgcgtgcaggcgggctga

SEQ ID NO: 513489 - DNA, 1614 bp, Stenotrophomonas maltophilia
gtgtcacccagtgcttcattgatcgaccgcatcgaatcgattccgcggcgtgagctgtatttcttcgcgctgtaccgggtgctgatcgcctcggtcatcgccgccctgctctacagccccctgtcggccatggtcggcgaagcccaccatccacggctggccgacaccgtcgccgccatctacctggtgctctcgctgctggccctggtgatcggccgcaatgaacgctggctgcgcccgatcgtggtcagcggcgtgctggtggacattgtcgccgccaccctgttgtcgcatgccctgccgggtgccagcgccggcatttcgatgtcgctgctgttcaacatcgccgctgccgccaccctgctgccgctcagcctggggctgggcctggccctggccgccagcctcgccaccggcgtggaatacacctggaagctgctggaaggtggcgaccccacccgtaccctggccgaactggcgatgttcgccaccagctacctggcgctggccttcatcagttaccaggtcggcagccgcgcgcgccgcaaccagcagctggccaaccagcgcggcgatgaagtggccaacctgttccagatcaacgagctgatcatccgccgcatgcgtaccggcgtgctggtggtcgacgccgacaaccgcgtcaccctggccaacgaggccgcctcgatgctgctcggtgacagcgacggcagcggcgaaagcggccgcctggacctggccagcgccgccccggaactggcccgtcgcctgcagcgctggcgcaacggctgggcccaggacgaactgccgctgcagctcaaccccgaccagcccgaagtgcagccccgctttgcgcgcctgctggccggcagcgagctggccctggtattcctggacgactccagcgtggtctcgcgccgtgccgagtcgcttaccctgtcagcaatggggcgcttctcggccagcctcgcccacgagatccgcaacccgctggccgcgatcaactacgcggtgcagctgctggaggaaggcaccggcttcaacgaaagcgaccgccgcctgctgcagatcatccgccagcagtgccagcgcaccaacggcatcgtcgaaagcgtgctgggcctggcccggcgcgagcgcgccacgcccgaaaacgtcgacctggccgccttcgtgcgccgcttcgtgctggagtacaagcaggggcagacgctggagaccgacagcatcgagccgatcatcaacgacacctcggtgctggcccaggtcgacagcaagcacctctaccaggtgctgaccgtgctggtgcacaacgcgctcaagtacgggcgcatcggccagcaaccggcgcgggtgcgcctgcgcgtggcgcagcacgagcgcagcgcggtcatcgacgtgatggatcgtggccccggcattcccgagaccgtggccgcgcagttgttccggccgttcttcaccacgtccgagcatggcaccgggctgggtctgtacatcgcccgcgagctgtgccgggccaaccaggcgcggctggactacatcccggttcccgctggaggctcctgcttccgcctggtgctgcccggcccgcatacgctgttgcccacctga

SEQ ID NO: 513490 - DNA, 1374 bp, Stenotrophomonas maltophilia
atgaacgaaacccgcagcgccctcgtcgtcgacgacgaacgcgacatccgcgaactgctggtactcacgctcggccgcatggggctgcgcatcagtaccgcagccaaccttgccgaagcgcgcgaactgctggccagcaatccgtacgacctgtgcatcaccgacatgcgcctgcccgacggcaacggtatcgagctggtcagcgagatcgcccagcactacccgcgcacgccggtggcgatgatcactgcctttggcagcatggacctggcggtggaagcgctgaaggccggcgccttcgatttcgtcagcaagccggtggacatcgccgtgctgcgtggcctggtcaagcacgcgctggaactcaacaacaccgagcgccccgtgcccggccctgccgccgaacagggcgcacgcctgcttggcgactcgccggccatggacgtgctgcgtaccaccatcggcaaggtcgcgcgcagccaggcgccggtctacatcctcggtgaatccggcgtgggcaaggagctggtcgcacgcaccatccatgcccagggtgcccgcgcggccggcccgttcgtgccggtcaactgcggcgccattcccggcgagctgatggagagcgaattcttcggccaccgcaagggcagcttcagcggcgcccacgccgacaagcccgggctgttccaggccgcgcatggcggcaccctgttcctggacgaagtggccgagctgcccctgcagatgcaggtgaagctgctgcgcgcgatccaggaaaaatcggtgcgcgcggtcggtgcggccaacgaagagccggtggacgtgcgcatcctctcggccacccacaaggacctggccgaactggtcgaggacggccgtttccgccacgacctctactaccgcatcaacgtgattgagctgagggtgccgccgctgcgcgagcgtcgccaggacctgccggaactggccgcgtcggtgctggcacggctggcccgcagccatggccgcccgacgccgttgctggcgccgtcggcactggacgcactggcccagtacgccttccccggcaacgtgcgcgaactggagaacatcctggaacgcgcgctggccctggccgaagaagaccgcatcggcgccgacgacctgcgcctgccgcagcatgccccgcgcacgcccggcagcgcagcacacgccgaggccgtggtggacctgcagcccggcagcgccgccctgccctcctacatcgaacagctcgagcgcagcgccatccagcgcgcgctggaagaaaaccgctggaacaagacccgcaccgccgcgcagctgggcatcaccttccgcgcgctgcgctacaagctgaagaagctggggatggagtaa

SEQ ID NO: 513491 - DNA, 1731 bp, Stenotrophomonas maltophilia
atgaacaccgtaaccaccgccaacctcgtcggcatcaccggcctggcccgtcgcctggtccaggatggtgcgctggacgaggcttccgcccgcgacgcgatggccaaggccgctgcggcccgccagccgctgccgacctggttcgcgcagaacaaggtggtcggggcggcccagttggcggccgccaatgcggtcgagttcggcatgccgctgttcgacgtgtccacgttcgacgccagccagaacgcgatgagcctggtcagcgaggagctgctgcgcaagcacaacgtgctgccgctgttcaaacgcggcggcaagctgttcgtgggcaccagcaacccgacccattcgctggacgagatcaagttccacaccaatctggtggtggaaccgatcctggtcgatgaagaccagatccgccgcacgctcgagcagtggcatgccagccatgacacgctgggcgacgcgctaagcggtgacgacgatggcattggtaacctggatgtgtccggcggtgacgaggacatttccgggggcggcgacgccggcatcgatgccaagggcgatgacaccccggtggtgaagttcgtcaacaaggtgctggtggacgcgatccgcaagggcgcctcggacatccacttcgagccctatgaagacgactatcgcgtgcgcctgcgcatcgatggcctgctgaagatggtcgcgcgcgcgccggtgaagttgaaccagcgcatcgccgcgcgcctgaaggtgatggcacagctggacatcgccgagaagcgcgtgccgcaggacgggcgcatcaagctcaatctgtccaagaccaagcagatcgacttccgcgtgagtacgttgccgaccctgttcggcgagaaggtggtgctgcgtatcctggatggcagcgcggccaagctgggcatcgacaagctgggttacgagccggaccagcagaagctgttcctggaagccatccacaagccgtacggcatggtgctggtgaccggcccgaccggttcgggcaagacggtgtcgctgtacaccgcgctgggtatcctcaacgacgagacgcgcaacatctccaccgccgaagacccggtggaaatccgcttgcccggcgtcaaccaggtgcagcagaacaacaagcgcggcatgaccttcgccgcggccctgcgctcgttcctgcgacaggatccggacatcatcatggtcggcgaaatccgcgacctggaaacggccgagatcgcgatcaaggcggcgcagaccggccacatggtgctgtccacgctgcacaccaacgatgcgccgcagaccatcgcgcgcctgatgaacatgggcatcgcgccgtacaacatcaccagctcggtgacgctggtgatcgcgcagcgcctggcgcgccggctgtgcaacaactgcaagcgcccggccaatctgcccgagcatgcgctgctggccgaaggcttcacccaggcgcagctggacgcgggtatcgagctgtacgaggcggtcggctgcgatgagtgcaccgagggctacaagggccgtacgggtatctaccaggtgatgccgatgaccgacgagatcgccacgatcgtgctggctggcggcaatgcgttgcagattgccgaggccgcacagcagatcggggtgaacgatctgcgccagtcggcgttgaagaaggccgctgcgggcattaccagcctggccgagatcaaccgcgttaccaaggattga

SEQ ID NO: 513492 - DNA, 849 bp, Stenotrophomonas maltophilia
atgatcgggccggggatgaacttcgacgttgtcgcacagttgcagagcgctatatccgggctccttccggagatgggggcatttctgctattggctgcgatcattaatcgcaacgatcttgtgggcgttgttcggcgtttactgcctgcagggttccatgtcaacgtcttttcttttctgctagacgcgctgctaattgcaccgcttctggcagtaggcatggtgttgatgcaacattcagttgcatggacatggaccggtgcaatgggtgcgatgtgggctgaatttccgaagtggctgctgctcttagtagtgctctttgtgggggatgcaatcggttacttccggcatcggctcgagcactgtaggtggctatggttgtttcacgagatgcaccacagtgatcgcaggatgacttggttctctctgtaccgttttcatcccatcaaccgtttgacaacggtgttcatcgatatgggggcgcttctgctctttgggttcccgctgtgggtcatcttcatgaacgcgctcatccgtcattactatggcttgttcattcacgcgaacgtgccatggacctatggcgccttgggtcgcctattcgtgtcgcccgccatgcatagatggcatcacgtgcgcaacggggaaggggtgggtaacaatttcgcgacagtgttctcggtattcgaccagtggtttggcacttggtatgtgccctttccgtgcgacgcacccctgggggtggccggtgccggccacgattccttcttgcatcagatcttcagtcccttcgctcgcttgtttaggttgaggcgtccctccgctgtcgggagcgatgctgttccgtag

SEQ ID NO: 513493 - DNA, 429 bp, Stenotrophomonas maltophilia
atgaagaaccagaagggcttcacccttatcgaactgatgatcgtcgttgcgatcatcgccattttggctgcgattgcgatcccggcctatcaggactacgtcgttcgttcgcaggcggcttccgccctggctgagattacccccggcaaggtcggcttcgaacaggcgaccaacgaaggcaagactccgtcgaccaccgcaaccgatgcgggcttcatcggcgttgctgccagcacctcctactgcaatgtggccgtgactgccacgaccattgcctgcaccaccaagaacggcaacgctaccaagttcaacagcaagaacattacgtggacccgcgacgccaacagcggcctgtggtcctgctccaccagcctcgatgcgaagtatcgtccgggccagtgtggtgctgccgccgctccgacgccgtaa

SEQ ID NO: 513494 - DNA, 1260 bp, Stenotrophomonas maltophilia
atgtctgtcagtggcagtgcaatgaagaaagaacccgtggcgcgcagcaccacggaactgcagccgtttgtatgggaggggaccgacaagcggggtgtgaagatgaaaggcgagcagatggcaaagaacgccaatctgttgcgcgcagaattgagacgccagggcatcacgcccaaagcggtgaaggcgaagccaaagcctattttcggcagcacaggcagcaggattacgccgaaggacattgccttcttcagtcgccagatggcaaccatgatgaagtcaggtgtgcctatcgtctcttcactcgagatcattggcgaagggcacaagaaccttcggatgaagaggatgatcggaacgatccgcgccgatatcgagggcggctcatccctatatgaggcgatcagcagacatccagtgcagttcgacgaactgtatcgcaacctggtccgcgcgggcgaaggcgctggcgtattggagaccgtgcttgacactgtggccaactacaaggagaacatcgaaacactcaagggcaagatcaagaaggcgctgttttatccgatcatggtcatggcagtcgccatcctggtcagtggcatcctacttgtctgggtggtccctcaattcgaagatgtcttcaaaggcttcggagccgaattgcccgctttcacccagctgattgttggcgtttctcgcttcttggtgtcttggtggtggctgatcctgttcacttttgtgggggcgatagttggcttcatcgcagcctacaagcgctctccgaagctgcaacacacgatggaccgattgatcctgagggtgccagtgatcggccagatcatgcacaacagctcaattgcccgctttgcacgtaccactgcagtgaccttcaaggccggcgtgcccttggtggaggcgttgggcattgtcgccggcgcgaccggcaacaaggtctacgaagagtccgtactgcggatgcgtgacgacgtgtcggtcggctatcccgtgaacatggccatgaagcagctgaacctatttcctcatatggtcatccagatgaccggcatcggcgaggaggccggtgctctggacgccatgctgttcaaggtcgccgagtactatgagcaggaagtcaacaacgccgtggacgcattgagcagtctgcttgaacctttcatcatggtcatcattggcggaattgtcggcagcatcgtgatcggcatgtacctgccgatcttcaagctcgcaggagcggtaggataa

SEQ ID NO: 513495 - DNA, 864 bp, Stenotrophomonas maltophilia
atggcatttctcgaccagcatcccggcctcggctaccccgccgcggccgccctggggctgctgctgggcagtttcctcaacgtcgtcatcctgcgcctgcccaagcggctggagtggcagtggaagcgcgatgcgcgcgaggtcctggaagaaccggacttctacgagcccccgccaccggggatcgtggtcgagccctcgcactgcccgcactgcaagcacaagctgagctggtacgagaacatcccgctgttcagctggatcatccagggcggcaagtgccgccactgcaaggcgccaatctcgctgcagtacccgctggtcgaggccctgacttcagtgctggttctggcctgcgtctggcagttcggcttcggctggcagggcttcggcgccatcgtgctgacctgcttcctgatcgccctgtccggcatcgacctgcgcacccagctgctgcccgaccagttgaccctgccactgatgtggctgggcctgataggcaacatcgacaacctgtatatgccggccaagcctgccttggtcggcgcggcggtgggctatctgtcgctgtggatggtctggtggctattcaagcagctgaccggcaaggaaggcatgggccacggcgatttcaagctgctggccgccctcggcgcctggtgcgggctgaagggcatcctgccgatcatcctgctgtcgtcggtgctgggcgccatcatcggctcgatctggctgtacacccggggccgtgaccgcgccacgccgatcccgttcggcccctacctggccatcgcaggctggctgtacttcatgtggggcgcgcccgtggtcgagcagtacctggtgttgagcggactgcgctga

SEQ ID NO: 513496 - DNA, 612 bp, Stenotrophomonas maltophilia
atgagccggtatgtagtgggcctgaccggcggcattgccgccggcaagagcgaggtgacccggcgcttcgaggcgctgggcatcgtggtggccgacgccgacctggccgcccgcgcggtggtcgctgccggcagccccgccttgggccgcatcgccgagcgcttcggcgcccacatgctgcaggcggacggcagcctggaccgggcgcgcctgcgtgcccatgtattcgccgatccggccgagcgggtggcattggaagccatcacccatccggccatccgcctgctgatgcaacagcagtgcgagcaggccgccagcccctatgcgattgccgccattccgttgctgaccgaggtcggcgggcggcaggcctacccgtggttggaccgggtattgctggtggacgcgcccgaagccgtgcagcacgcccggctgatgcagcgcgacggcatcgacgccgcgctggccgacaagatgatcgccgcccaggccagccgcgcgcagcggttggcactggccgatgatgtggtggtcaacgatggccaccccgaggatctgcaggcgcaggtggaagcgctgcatgagcgctatctggggttggctgggagttga

SEQ ID NO: 513497 - DNA, 387 bp, Stenotrophomonas maltophilia
atgtccgcacgccccttgttcccccagctgcacgccctgatcggcgaagccgctgacctgctgcccgccgacgtcgccgagcgcatcgaaaccctgctcgatgatcccaaggatctgctgcccgcgctgctggcccgcatggacgggcgcgatgcagccgacggtcgacggctggaagcggagggactgagcccggcacaggcggccaccatggccggcctcagccgcaccctggccggcttgaatgcactcatgcaggtgctgcacgccgccgaagccgcccgcgagcagggcggtgcccatcagcagctcagcccggatgtcgtagatggattgctgcttggcgcacgagaactggcccgttatgcccgcctgcagctggagtag

SEQ ID NO: 513498 - DNA, 1329 bp, Stenotrophomonas maltophilia
gtggcaaccaagggggagcgccggcgttcgccgtatcggcggcgcctgcgcagccgcatcatcgtctcgttcgtgttgttgggcttctgcctgacgacactgttcgcgttcgccaccaactgggcccgcatgcgcgtggaaaaccagctggtggaagacgtgatgaaccgcaacatcaacgagtacgtgcggcggttctacgagagcccggatcgcaaccccgacctgcccgtgcagcagatgcgtgcgcgcctgatcaagcctgacaagttcgaggcgctgcgcgaggaagagccggactggtacgagttcaaggatggcctgtacaacatgggcggcgtggacgagcgcggccagcgctattcctacaagctggccgtacgcaagacgcctgacgcctgggcattcctggcctacgacatgaccgacagcgtgcgcggtgggcagcagctcaaccgcgcgctggtgctgtcggtgctggtgttcagcctgctgtcgctggtgctgggctggtggtcggcatcgaaggtgatgaagccggtctcggacctggccgcgcggttgcgcgcctatcgcggcggcaccagcgagcccgagccgctggcgccacgtttccccgatgacgaagtggggcaactggcgcaggcgctggatgattattcgtcgcggctgaccgaagtggtgcagcgcgaccgtgagttcaacgccgacgtcagccacgagttgcgcacgccgctggcggtgatccgtggcgccaccgagctgctgctgacccggcccggcctggatgagaaggtgctgcagcgtctgcagcgcatccagcgtgccgaacagcagtgcagcgacctgatcggcgcgctgctgctgctgtcgcgcaacgaacgagggcagggcaccagcaacgtcgcgcgcgtagccgaacagctgctggatgcccaccgcgcacagctgggcggcaagccattggaactggcactggaaggcgagcgcaacctggtgatcgatgcgccggaagccgcattgtcggtggcgctgggcaacttgatcggcaacgcggtgaagtactcgcaggatggtgaggtgcgcgtctttgtcggcagcaattcggtgtcggtaaccgacagcggaccgggcctgagcgaagaggatgccgccaagctgttccagcgcggctatcgcggcacgcacgccggccattcgcagggcggtggtatcggcctgtcgatcgtcagccgcctgtgcgatctgtatggctggcaggtcagcgtgcgccccggtggcgagcgcggcgtaatcgccaccctgacattctcgccgaagccgttgtaa

SEQ ID NO: 513499 - DNA, 678 bp, Stenotrophomonas maltophilia
gtgcgcattctcgtaatcgaagacaacagcgacatcgccgccaaccttggcgactaccttgaggatcgtggccacaccgtggacttcgccgccgacggcgtgaccggcctgcacctggcggtggtccacgagttcgacgccatcgttctggacctgaacctgccgggcatggacggcattgaagtctgccgcaagctgcgcaacgaagcgcgcaagcagacccccgtactgatgctgaccgcccgcgactcgctggacaacaagctggccggtttcgattccggcgccgacgactacctgatcaagccgttcgcgctgcaggaagtggaagtgcgcttgaacgcgctgtcgcgccggggcaaaggcgtgcagacccgcgtgctggaaaccggcgatctggaatacaacctggacacgctggaagtgcgccgccagggcaagctgctgcagctcaacccgaccgcgctgaagatcctgcaggccctgatggaagccgcgccggccgtggtcacccgccaggagctggaaacccgcgtctggggcgaagagctgcccgactcggattctctgcgtgtccacatccacggcctgcgtgcggtggtcgacaagccgtttgaagtgccgctgatccagacccgccatggcatcggataccgcatcgctaccccggaagcctga

SEQ ID NO: 513500 - DNA, 462 bp, Stenotrophomonas maltophilia
atgtaccgcaccactatgctcgctctgatgctgtcgctcggcctggtggccaccgtgcaggccaaggcgcagaaggacaccgtgcagatggattccttcaccccggtatccgaacagatccgccgggttgaaacggccatgggcagcgaggactacagcgagatcgggctggaggacaagagccgcgtgcagcaggcgctgaaccggatccggatcaagatgaatggccgcgagaaggtggatgagctggccccgcaggagcgcaacgacctgttcaacgagcaggagatcgtcaacaccatcatgacccgcgcccaggccgacagccgcatgatctgccgccgcgagcgcctgaccggcagcaacatgccgaccagcgtctgcctgaccgtggcccagcgtcgcaaggcccaggaagacagccgccaggcgctgaccgaccagcagcgcatcagccgctga

SEQ ID NO: 513501 - DNA, 471 bp, Stenotrophomonas maltophilia
atgcagcgcatgacccccttcgccctgatgctgggcctggcactggccaccactgcgcacgccaagcccgataaagggcaggtgaagttcgacgccaacgcgccggtggccgaacagatccgcaacgttgagacggcgatcaacaccgaggactacagcgagatcgggctggaagacaaaagccgcgtacagcaggcgctgggccgcatcaagatcaagatgggcgaccacgaacgggtggagcagttgagcccgcaggaccgcaccgagatcttcaacgaccaggaagtgatcaacacgatcatgacccgcgcccatgccgacagccgcatggtctgccgccgcgagcgcaccaccggcagcaacatgccgcagagcgtctgcctgaccgtggcccagcgccgcaaggcgcaggaagacagccgcaaggccctcaacgacaaccagcgcttcaacaactacaagccgtaa

SEQ ID NO: 513502 - DNA, 480 bp, Stenotrophomonas maltophilia
atgtaccgcatcatgacgatcgcgttgctgctgggcctgtctggcgctgttgccgccaagccggagaaagtcgctgtacagatggaccggcaggggtcggtcgccgagcagatgcgccaggtggaaaccgcgctggctgcccccgactatgccgaactgtctgccgaggatcgcggccaggtgcagcaggcgctgtcgcgtatccgccagcacatgggcgaacgccagaccgtgcaggagctgccgccgcagttgcaggccgaggtcttcaacgagcaggaacgcatcaacaccctgatggcgcgtggccatgacgacagccggcagatctgcaggtaccaacgcaccaccggcagcaacatgcccaggagccgctgcctgaccgtggccgaacggcgccggatcgaagagaaaggcaaggcgctgatcaacgaccagcgcagctacaacacgctcagcccaccgcccgctgggcgttga

SEQ ID NO: 513503 - DNA, 879 bp, Stenotrophomonas maltophilia
atgaagctcgccatcctgtcccgcaacagctccctgtattccacccgtcggctggtcgaggcggcgcgcgcgcgcggccataccgtgcgcatcctcgacccgttgcgctgttacatgcgcatcgccgccgatggcttttccatgcactacaaaggccggccgatgaccggcgtggacatggtcattccgcgcatcggtgcctcgatcacccgctacggcaccgccgtgctgcgccagttcgaactgatgggcgcacgcacgcccaatccgtccgatgccatcctgcgttcgcgcgacaagctgcgcgcgcaccagctgctggcggccaagggcatcgacatgccggtcaccgtgttcggcgacaaccccgatgacaccgtcgatctgctgtccatgctcggcccgccgccgcatgtggtgaagctcaatgaaggcacccagggtcgcggcgtgatcctgaccgaaaaggccagtgcctcgcgcggcattgtcgaagcgctgcgcggcctgtacgccaacttcctgatgcaggaattcatcggcgaggccaagggcgccgacctgcgctgcttcgtggtgggcgaccaggtggtggcgtcgatgcagcggcaggcgccggagggcgacttccgctccaacctgcacgccggcggcaccgccgttgcggccaaggccagtcgcgccgagcagcaggtggcggtgcgttcggccaaggcgctgggcctgtcggtgtgcggcgtggacctgatccgctccgcgcgcggcccgctggtgctggaggtcaactccacgccggggctggagggcatcgaagcggcctgcggtgtggacgtggccacacgcatcatcgaacacgtagagaaggtcaaaaaaccctga

SEQ ID NO: 513504 - DNA, 243 bp, Stenotrophomonas maltophilia
atgaattgccggaacgacgtcgtcgagcgcatccatcggatctttctttcagccggcgtcggctcgaacaagcagcttgaggccgtgcgcgcgctcgggcgtgctggtggtcccaaggccgcgaaactgctcgagcagatctaccagcaggcgttcagcaattctgccctgcagatggcctgcgtggcggcgctgggcgaagcggcccgtggcttccaggccagtgctgaacgggacagctga

SEQ ID NO: 513505 - DNA, 462 bp, Stenotrophomonas maltophilia
atgtcgaaaatggagcaacttgcacagaagctgcagcaatccgcacacgcggagcaggccagggccgccgccatcgaaaagcagtaccaggactggatccaatcgctgcatgtgctgttcgacaccctcgaactgtggctgcaaccattggtgcaggcgcaggtggccacgctgcgtcgggacacggtcaccatcaccgagaatccgtcatccggggaactgaaaacctacgcggcccccgcactgaccctgaacgtcaatggcaaggccgccgcgatcaagcctctggcccgcttctgcttcggctgccagggacgggtggatattctggcccgggaaaaccagtggcacctgacacggcacttggagccgaaagaggtctggtacctgcacacgcatgatcgcacccagggacgcgtgctggacgcggacgcgttggccgcggtgttcgcggcgtactga

SEQ ID NO: 513506 - DNA, 315 bp, Stenotrophomonas maltophilia
atgctggtgttcaaccgcaaggatgaactgcaatggcgcttcgtgcggcgcctgacccgcgcgcgactgcagccgccgctacactacctgccctcttccaccggtttcgtcgaagccgccgcgtgcggactcggttggggcatggccccggaaaccctggtcgcgcccgccgtgcgcgccggccgcgtggtggtactggaaccccgccgctggctggatgtgccgctgtactggcaacatgccgccgtgcgctcaagcacgctgcagcacatcacccaggcgctgcgcactgcagccagcggcacccttcgttga

SEQ ID NO: 513507 - DNA, 246 bp, Stenotrophomonas maltophilia; identical to SEQ ID NO: 513487

SEQ ID NO: 513508 - DNA, 1401 bp, Stenotrophomonas maltophilia
atgggcctccgtctacttagcacctttaccctgatcctgttgatgctggttgtggggagttcgtttgaggccactgcgcaggttccggtttacccctgttcaacgtcgaaggacgtgtacagtagtcaatgccctgatgagggtaaggcgtatgccgcagcttgggcagtggcgagggctgtagctcagtcctcaaacgcgagttcgccgggtgtttggtgtcctggcgtgaagcgtgcgggtggggcaactgcatataccgcctatgtcacaccttgtgccaatcaaggccctcagtgggagactcgcactcgcacgtggccgcaaggccaggagtgttcgagtcagacaggcggagtgacgccgttcttccctccatcgggctcaaccaggtgccgcgaggggtgcgagttccagtaccgcgataacggcgacgatacgacgacctatagtgctaccggcaaggtttgcgatggcaagccggattgcacggcgggcggtcgcaacatggtttggaacgccatgctgggcgtgtgccagccggtggagcccgagtgcccggagggtaaggtcaaggtgggtaacgcttgtgccgatgagaagccctgcccggatggcatggcgttggtcgcaggctcgtgtaagaagaaggacgaagagtgtccttctggcatggtgcgcagccctttgggcagctgcatacctggcgacggacagtgcgccaagggagaggtgcgcggccccgatggaacgtgtaagcgcgatagtgataacgacggcgaccctgacccgaccgggccggatgatccggagacgttcagcggtggggatgcttgtaatgcccctccttcgtgcagcggctccccgatcatgtgcggccaggcccggatccagtggcgcatcgaatgcaatacacgcaggaacaacaacatcagcggcggacactgctcgcagtcgggcatgccgacttgcaccggtgagaagtgcaacgccatggagtacgcggggttgttgatgcagtggcgctctgcgtgtgcgctagaaaagatggcgggagagaaggcggagtcgcccggcacgagcaagaccgacgcgaatgggaacggtgtccctgatgccctggagggcaggggagaggtcaccgggattggggacaacgcagctgatatcgccagtgccaaaaagtggggcatcggtctttcgaccgacagtcttgacactagcaacatgttcggcggtgctggaacgtgccctgagcctccggcgatcacgatcatgggcaaaaccgttagttcggcagagttcccttacttctgccgtattgccgcaatccttcgcgcattgatcctgatctttggtgcctactccgcgattcgaattctcatgggaggtcttttctga

SEQ ID NO: 513509 - DNA, 243 bp, Stenotrophomonas maltophilia
atgaagtacatgaacatcgcccgccgtttcggtgcctccgcggtcgccaagctcagtgccggtaccaccgccctggtcgtttcaggtgccgcgctggcttccggcagcacctcgcctggtgcggccatcgctgcggaggtctccaagggcaacgcagacatggcgatcgtgatcggcgccatcgccctgctgctgggcatcctggtggtgtgggctttcaccaaacgcgccgccaagggttga

SEQ ID NO: 513510 - DNA, 222 bp, Stenotrophomonas maltophilia; identical to SEQ ID NO: 511053

SEQ ID NO: 513511 - DNA, 747 bp, Stenotrophomonas maltophilia
atgaatgaatcgatgtacttctatgggctgctggtggtggtgttcgtgctggccggcgtggtcaagggcgtgacgggcatggggctgccgacggtggcgatgggcctgctcggtggcgcgctgtcgccggtggcggcggcgtcgatgctgttcatcccgaccttcgtcaccaatgcgtggcagctgctgtccgggccgtcactgggccacatcgtgcggcgcctgtggccgatgatgctggccgtggtggtggtgaccctaggttcggcagcgtggctggtacgggtcgatcgcagcgggtcgcgcgttgcgctgggcgtggccctgatggtctatgccgcctatgcgttgcttgcgccggtgttccgcgtgccgcagcggcgcgagcgctggctggggccgctggtgggcgcgctgtccggcgtagtgaccggcgccaccggcgtgttcgtgatgccggcggtgccgtacctgcaatcactggggttgcagcgcgaagaactggtgcaggcgctcgggctggcgttcaccgtatcgacgattgcactgaccacgggcctggtgctgcacggtgcgttcggcatccagcagctgggcttgagtgcactggcggtggtgccggcactgctgggcatgtggctggggcaggtgatccggcagcgcatcagtgcgcggctgttccgcgcctgctttctgggtttcctgctgctgctcggcctggagctggtgctgcggccgttgttctga

SEQ ID NO: 513512 - DNA, 900 bp, Stenotrophomonas maltophilia
atgcggatggacatcgccgacctgcgcctgttcctggcaatcgccgaggcgggcagcatcactgccggcgcaacgcaggcgaacctggccctgggttcggccagcgagcggctgcgcacgatcgaagccgatgccggcaccccgctgctgaaccggcatccacgtggcgtcagcctgactgaagccggcgccgccctcgcccaccatgcacgcctgatcctgcaacagcaggcgcagctgcgcggcgaactgcaggcattcgcgcagggggcgcgcggcaccctgcatctgtatgccaacaccgcagcactgaccagctacctgccctcgcggctcgcaccgtggttggccgaacgcccccgcctgcacgtcgaactgctggaacgcaccagccccgaagtcgtgcgtgcaatcagcgctggccaggccgaggccggcatcatcagtgatgcggtcgacgccaccggcctgcagcagcatgtggtggccgaagatccgctggtgatgctgctgcctgccgatcaccggtttgcatcactgcgcagcgtgaccttcgccgatgccgccggcgagaccttcgttgccctcgccgatggcaatgcgcttcagttctacatcgaagaccaggcccgcgacatcgggcgccgcctggatgtgcgcatccgcatgaagaccttcgagggcgtctgcatcatggtcggccacggcatcggtgtcggcatcgtgccgcggagcatcgcgcgccagcatcgacgcagtacgcataccgttgcggtgccgcttgccgatgcgtgggcacaacgccgcctgtgcgcctgtttcgccgggtgggcgcagctgtcaccggcgatgcgcagcctgctgcaccacctgggcgtgcaagcgcagaaaaaagtgtga

SEQ ID NO: 513513 - DNA, 297 bp, Stenotrophomonas maltophilia
atgaacgctccgaagatcacgatcaataccgctgtcgagacccgcaccgttaccaccagcaagggcatgcagaagccgatctacagccagcgtgcaacgctcgaaaccgaagccatgcgcatccaaatcgaagtcgaagtcgatggcctggacaaggggtatccggttggcgcggtgaaggaatgggacctcaccacggacctggtgccgggccgcttcggtgtcgaactcgctcgccgtatgaccctggttgatccggtaggcgcgaagccgcagccggctaacaaggcggcctga

SEQ ID NO: 513514 - DNA, 630 bp, Stenotrophomonas maltophilia
atgcggagttggcggcgaacggctgagcccctcgtggttggtcgcgtagagcggatcgcgtgcttggccgggcgggtgggccatgcaggggacgctgcaagtacccctccggggcccggcccagccgctggcggctgtacgttcaggcgcttgcgaagcagtgcttcgcaagcaaagcgccctcacccctgtaagctcgatggcgccatccatggcgccaacgcccctgcatggcccacccgcccggcctctgacagtttccgtgcgcgtccagccacggaagaaagaaagaaaagcaaaagcgggtcgcttcgctgcgcttgctcgggtgtcgaccaaggtcgacacccaccaacagccgcgggaacctgtcgaaggcggggtggctcaggttgcgggggcgtgagcgccatggatggcgcgatcgaggctacagggacgtacttgcgccgtcccccgcaacctgagccaccccgcctcccctcaggaagccagcttttgacgttgctgttgaagttgccggccagcggccggcactaccgcgggtgcagggcgcagccctgccgaacaacatccctcagtaacgaggccggccttcttccagcacctggcgcaggaacggcacggtga

SEQ ID NO: 513515 - DNA, 615 bp, Stenotrophomonas maltophilia
atggaaaactatccagccacgccatccttagcatcggacttcctccttctttccaactggcagcgattggcatttatggctagctgctgcgagaggatgattccaaactatcgcagatttagtgcccagacttcatttggggatgtaaacattctgcgtaacacccttgattctgtctggcttgaggtcattgggggggcggggagtcgcaatctcgaaagtctttccaaaggctgcgaggcacaggctccggatccatccaatttcagttcaatttatgcgtcttccgcgctggatgctgcagccgcaatttcaataaccgcctcagccgcagctactcatgccgaggtcacggccgtgatggatgtggttgaattggctagagactcagtggatttgtttgttcagattgttgaaaatctggatccaaatgctcctgaatttgaaaatagaatactaagaagcctcttgatgcagactgagctgaaacgacagaggcgtgccttggaaattctcaagtctaccggaagagaaaataaagtggcacgggctgaaatcgttaaacgatgggggcacgtggaattgccgagccttgctgcaacccctgaatcctag

SEQ ID NO: 513516 - DNA, 435 bp, Stenotrophomonas maltophilia
gtgtactcaaactctctgctggaagtggcggacgcgacgcgctatgaaatcgacgaaagtactgacggcgccaactggtcgctgattgcgtgggatcgaaccgtttccctgaataagggcggcggaggcaacttctactaccgtggtcgtgcctgcaatcccgcaggctgcagccccagttctgctgctggcctggttgcgatttccagtgcgccggcagtacctacgggtgtgaggatcgtaaagagcggccccaacatctgctcggtcatctggaatgcgtcgccgggtgctacctactacaacatgcgttcaagcagcggcggcgcgacctatagggcagaaggcatcggctacgacctcgatacgcgctgccagggtggttacaaggtgcgtgcctgcaatgcgcaggcgtgctcggcctggtcgaactga

SEQ ID NO: 513517 - DNA, 414 bp, Stenotrophomonas maltophilia
atgctcggctgcttctgcagggaatgcccagccgagcgtggctcggctccactcagaaaaaatgaagaacggcggctcgaccgctttttcccagtagctcggcgccgccatgtagaagtgctgcgcctcggcccgggcgaaccagcgtgcggctgcgtcggtgtccttctccacgcccggtgcaccgcggcccagcagcagtccggcgaagtactggccgaacacattgcccttctcgccggcacgctggtacagctgcagcgcacgtgcgggatcgcgcggcagtcccatgcccttttccagcagcgcgcccaggtctacctgcgcttcggcatcgccacgctcggcgcggcgctggatctgcgcaaccagtggatgcacggtgccatcctgtgcggccaccgcatccggtag

SEQ ID NO: 513518 - DNA, 369 bp, Stenotrophomonas maltophilia
atggaccgcgcgggcgaaactggccgggtcggccagctcgaacggggtcaggccggggaaatgcgcggcgcagaccagcaggccatccagccgccccagctcgcgctgcagggcctgggccagttcggcatagtcatcgggtccggcaccctccaggtccagcgggtacagcaggggttccgggccgaccgcctggacctgggcatagacccggtccagccggcgcggcttgcgccccagcaggaccaccgtagccccggccgccgcagcggcaatcgccgccgcactgcccagcccgccgccggcaccggcaaccagcaccacgcggtcctgcaacgggcggccatcgagcgccccgtcagtcggtga

SEQ ID NO: 513519 - DNA, 897 bp, Stenotrophomonas maltophilia
atggccgcagaggagcgcgcaaagagccaccatcaattggccgatcgcctagtgaagaacttgggcgaagcgcgcgcgcgcgcgcctacgcccgaggtggtgcgctcctacgatggcggtcacggcggattgctatatgaaatcgagcctcgccgtactctgtcggagatgttcatcgatccgatggtgcgcggcgcatgcgaagagatcattgaagagcaccacagacgtgatcttttgaggtcgtacggcttggagccgcggcaccgcatcctgctgtcaggcgcgccaggcaatggaaagacgtctttggcagaggcgctggccaccgagctgatggtcccactgttcgtggtgcgctatgaagcagttatcggcagcttcttaggggagaccagtggtcgtctgaagaagctcttcgacttcgctagaacccaccaatgcgtactgttttttgatgagttcgacactctaggtaaagaacgtggcgatacgcatgaaactggcgagattaagcgcgtggtgagctcgctgctcctgcagatcgatgcattgcctagccatgttgtcgtcgtgactgccactaatcatgctgagctgctcgaccgtgcagtttggcgcaggttccagctccgacttgagcttgaaccgccgactgcggcgcagaaggaagcctggttcattaagctccaacagcgcctagatgcaccgctgggtgtctctccgaagaccttggcagccaagctgcatgccaccagcttttcggatctggagcagttctgcgaagacgtccatcgccgcttcatcttggcaatgccagagccaaacctgaagaaaattgtgaccgaacgcttgaatcagtggcatgctcgctaccaagtcaacaggatgacgtga

SEQ ID NO: 513520 - DNA, 2592 bp, Stenotrophomonas maltophilia
atggctaatgaggaatttccgcttctccttttcccgaaacgggcgaatatcgaagataggaatgacggggcgggtggggccccaaagcccattcagcttccaacacctcagcgccaaggggagcgacttaccccaaagttcactgaactgtttgagacactagaagcgcatcggttgaccatctctgagaacgcgccagaacaggatccagagtttgtcctagtactggagacggttggatctcacgaaaagttcttcaaggccgtccagaagctgcaggccgaatggctgttcgaattcgctgacgagttcgtgcaagacgaagattttcatcgtctggaggccggagccgaagccgacgagcctctgaatggacgcatgtacctagtaggcaccaaccagcgagctttagctgagttgctttccctttggcagcgctttcaggctgatccacgcgcaaagtttgaccggggcttggcgccgctgaaagaagtcttcgtccatctgcatgacatcagacgatggggtgtcgaggatcgcatcgatgcggacatgcgattgtactggcaagatgaagtcgaaagtggtcgtgcgacaactcgctttgagttggaggcctggtacttcgggtccccggcaaagaacattgcagttgtgcgcgacctacttaccttcattagagcgtccggcggtcaggtccttcaaagggcgctaattcctgagatcgcctaccacggctttctcgtcgagctacctacacctgttgtatcttcaattctgaaaggcgattacccatcgttcgtcctctccgatcgcgtcatgttcttccggccacgagctcaaagcgtcaacccaggctctgaagtagggccagtccagcaattggttggggcgcaaggggaagtcctaggcgatccggtcgttgctttgtttgacggactgccgctcgccaaccacgccgtactgcagcgtcgcctactgatcgacgacccagacaactgggcgctcgaatatccagccaaggatcgcgtgcatgggaccgccatggcctcgctaatcctccatggcgatttgaataatcgcgcgccgcctgccaatcgtccgctttacgtaagacctatcatgcgccctgacccgaacgacgggcgggcccggcgggcggagtgcacgccggataatcagctgctgatcgacctagttcaccgtgctgtacggcgcctgttcgagcaagacggtcaagagcctccggttggaccttcaatcaaggtcatcaacctttcggtaggcaacgagcaccgcatctttaccggagaaatttctccctgggccaggctgatcgactggctgtccttcaagtacaacgtgctctttgtaattagcgccggcaaccagtcagaagatcttgaacttcaagttaggcgtgacacgctcagcaacctttctgaggatcataagcaggcagctgcaacaagagcgttgctacagacctcagtccggcgcaggcttatgtcgccgagcgaatcgatcaacgcaatcacggtgggagcgcatcatagtgacggggcccccggcccagctcatcccaaccttcatgatctctttgcccgaggagggttgagcccagtctcacgcattggcatggggatggggcgctccatcaagcccgacatcttgatgcccggcggccggatcgttttcaaagagcatgtcctatccaagccagagagcacgaccgtgcagatggcacccaccgggttggcacctggacatttggtggctcgcccatccgcggccggcggacctgtcggtgataccgaatattctcgcgggaccagtaacgcaacagcattggccagtggcatggcggcaagagcatttgaggttatcgaagccttgcgtgcaagcggtgcggccatccccaaaacgcacgatgctgcgttgatcaaggcattgcttgtccatggagctcagtggggttcgctatcgaaaaccgtgctcgatcatggcccgagctttgctcacatcactccgctcaactcgcgacacatgcgggagaaggacttcatttcaagctggctcggctacggtccagtcgacgaagagcgagcgctcaggtgcgcgagcaatcgcgccacactgatcggcgtgggggaggtcaagaaagacagggcagtatcattcaccgcccccatgccgccagggcttggacgcgtcgtgacaatgcgtcgaatgaccgtgaccttggcctggatgtcgcccacaaaatcttcgctgcagcgctatcgtcaggccaagctgtggatacagccacccgaggatttcggcaccagccgcatcaacacacccttccacatgactgtcaagcgcggcaccgttcaacacgaggtctgggagggcgaacgcaaagcgctgcccatcgttgatgggcagatgttcgagtgcaaggtgaattgtatggaagatgcccccggtctaaccgacgagatcaaattcgccctatgtgtcaccttggaagttggcattgaatccggaatcgacatctatcaagaaatccgtgatcgaatacgccccgctgttccggtgctagtctag

SEQ ID NO: 513521 - DNA, 195 bp, Stenotrophomonas maltophilia
atgaagccttcggtgtactacgatcgcgtggtggacgtgatggaggaactggtcaagttcaccctgctggtgcgcgggcgtagtgactacctggtggaccgctacagcgagcgcaagggggccgtcgaggcagcagcgctggccgctgccgcaggcgtggtggagaccgttttgaaccagaaggaaagtgcgtga

SEQ ID NO: 513522 - DNA, 195 bp, Stenotrophomonas maltophilia
atggaagctgaagccagcagcacctatacagtcgtcatcgctccaagcaaagagaagctattgagtgaggtcaacagcttgattgacgccggctggatgcctcaagggggactcagcatcgagtacccatctaacgctgcactgcctatgtacggccaagccctagtaaggggcattacaaccgacgcaggttga

SEQ ID NO: 513523 - DNA, 915 bp, Stenotrophomonas maltophilia
atggcaaatggaaattggttcgttcggattctcatcattgctctttgcgtctttctcggtgcaggcatcttttaccggtacgtgtacatctcgccggcgggagacctggggcctggtgttttagtggtcattgcacttttagttgtacttgtgctcagcgaaagcttcaacagtttttcgcttggttcgctgctatctatgaccaaacaggtggcggagaagaaggcgcaggtctctgagctgaaagcggagaacagcgaacttaggtcgcaagtcatttctatagccaccactgtctctcaacggcagaccagcacaaacattctggggctgccaccagatctagcacgcatgttcaccatcactccggcaggtgaggcggaagtagaggagaggcaggctgaagagcagccaccacctcaggagcaacctccccaccggcaggcgccgcggcggctggaccggcgcaagctagagcagcttggaattgagcgctttctaaaggccaatgacctggacctgttcctgctagttcgggaagcaaagctgaccgcgcagatcgaaacagtcgatccggtaagcacttcttccccgatcttcgatgggtacctcaacagtcttgacgcggaaatatttattgaggtccagctcgctacccgccttccaatatttacgttcctgcgcgacaagttgtatgtaatgctcaccaagctgagccattacaagttactaaagaagacaaacgtctttatgtcgctggttctggtcagccttcctggcgaagaggcccgtccaagccagatctcgcggttgttcaccgagttccaaccggcgataactggcggtttgttgcgcatcgtcgaggttcatctaacggaggaagaggcagccggcttgtacgaaggtgacgtctga

SEQ ID NO: 513524 - DNA, 693 bp, Stenotrophomonas maltophilia
atgtccctagcgaatggtgttcagcagtacgtgaaggcatacgacaaggcggtagagatgttcaatgtctaccctgacgccgaagcgccagagcttcttgcactccaaaagaatctcagcgatgagtgcctgaagctcctagacgtgacggggctggactggaatcaatgcggaaatctcggcaggcatttgaagttccttaagtactacctggaccagaatgacaaagatgcgtgccaaggcgacatccgggacatcgtgttctgggacctgccaaccgcacttcggaacctcgcggaggtcattgacgagtatcagcactatgatcagaagctaaaagatggcgtggttcctctgatcaatggcgcgcattatgactcggcaatgcgcaagatattcgtcattctaacggacagactccgtcgcgcattcggcgtcgcagaggaaattgacggcgacgagcttgtcaatctcgtatttggcaggggtgggaaaattccagtggcgcttgacgagccgaaaaagcaggcaatgcgaaacttgatcagcggattctacggcgtctaccgcaaccggatagctcacaacgatgttgaacccggcctggctcagaccagagccattttggaaatggctaacacgatcattctcgacattgaggctatcgctaccgcgtcggtaaagctggcgtag

SEQ ID NO: 513525 - DNA, 777 bp, Stenotrophomonas maltophilia
atgcgcatgaaacacacacgtcgattcgccgaagctttgggaagctggatgcactttgaggcttgttgcttcagggcagggctgttctctgagagttctttcaaggctgcaatagggagcgttgctagctcgctacacggagatcacaaggcagctcgtgtgcacgcggactacccacttcctgcgatacagcgggtgccagttgtcggcgagaaaagtggcggcgggcgcaaaaaaaatgtggacttcgcgctgatatatgacgataagcggatgcctgtatctgagccgcaagtcctgatcgaagctaagtgggctggttcctcacattgcactgtgtcgaatttgatggccgacttcgtaaggctttccttgatgaaaagagcgcatccagacgccgtgtgccttttcgttttggctggtcacgtgacgaatattgatgctgtactgttgcgacgtccgttcaagggtgagcgtcgcgatactctccctgttgatggctctatctcatctaagaagttcaagttccttcatagggacgcagagcatcagaaggctttttccggactcatctcggcttttcattcatcaaacctcaatgtgcctatcggattttctgcaacaagtagcggtatctatccgccatccccagcgaagttcaaggcgatagcttgggaagttctaggggtagaagagattaatttgagtcgcgcagagtggcccgtttctaaaaaggacaagtcaaaaaaggctccggtagaagaggatattttgtaa

SEQ ID NO: 513526 - DNA, 1755 bp, Stenotrophomonas maltophilia
atggctaatgtacctgcactttgggagccctcggcaaggaaggaggtctatgaccttttggttgcactatggccacgtctggacgacgacgatcgcgttgtcttggtgatgcagatcgcgggtggcccacctgcatggatgtccgaccatctatccgagactgatcgagatcaactctgcgcgcgccgcgtattcgagcgcttgcggatcatgcagcgctcggatcctgaacggccaaatgccgcgctggaaactgagcttgcccgtctgcgcggtatctatcctcattgggatgtcgctccaggcgatcaggcacacttctcgttctacagtcagtctcgctggcgcactctagactcggtggacgacgaggtgcgcctgcaatccatgactgcggctgagattgtcgaggaaattactacaggttcgcgggaagatgcgctggacgactggcggcagatggtggcgagcgactgggacaggatgatggcagtgcttcgaggcgtggcggagcgaactgggcccgaccccgagctctgggccgcgacgctctggggtcttcgaactaaggctgcgagcccaatacctagtgaggatgtgcttagcctggtcgcaggtatggacgctcagctggcacttgatcccggcgttgccgcggccgcctcttacttactggagtcggcggcgtcctccgcgcagttctccgagatgtcgcaggaaggcttttggcgggcatttgatgctgtgttgccaggcgtcgctcaggacgacgctaactcgcgcctcccagatgatcgcgactgggtcgctgtcgctataaacacatcaatgggcaatttggctcttgcctttctcaacgctttgttcgcccggcgccagcttgtaggcgcaggtatcccggcagatctgattgctcgatttgtccaactaatcgggactggggaggcccgccaccttcctgcccgcgtcgtgtttgcttcacgcctttcctacatcttcgcggttgatcccgagctcgcgcgcttgcacctgctacctaacttcgtgtggggccgcgacgagactgaagccctcgcatcttggcaaggttttggttggcagccgcacctcgacccattgctatggaacgagatcaagaccgacttccttgcgtgcttccaacaggagaggatccaacagttgggcaaagccgttggccctctggcccaggctttagctgccgctgggctctacatcggtcttgacgatttgccgcgccaagcgacgcaaggtgctatcagccggatgaattctgagacccgtgcgagcatgctgcattggatcgttggggcgctttaccgagcggacaacggagaagttgatccggatgcggtttgggctgagaaggtgaagccatggatactgaagttctggccgcgtgacccgcagatcaagagcactgcagaaactcgcccctgggtagagatggcgcttgcgacgaacgaagcattcgaagacgccgtagcgacagtggagaagttcattcgaccggacgacaacgacttcgtactcggtgagctggcggcctcagagcacgtggatgtgcacccgcggccggcgctgagacttatggatgcgtttctatcgccgaatggtcatttttggtccttcgaagaattgagagttgtgctagatcgcatcttggcttcggaccctatgctccgcgaggatccagcttttgctcggtgggatggctttgagcgagcacgcgcctag

SEQ ID NO: 513527 - DNA, 2049 bp, Stenotrophomonas maltophilia
atgccaaaattcgtcaagggaggtcccgtcgttccggacgagctggttcagtcgctcgaagatgatcgtgtagtgatcttctgcggcgcgggcatctcgatgggggccggcctcccggactatgtaggcttggtcaagtactgctatgacgaccttgccgagactctccctccgtccaaggcatctgattggctctggcccgaccgtatgctgggtagccttgagggtaagttcgggagagctcaggtgcgagacgccgtcaagagatgtctctctgcaacgccaacttcgctagacatgcacaaagccattctacgactagcaaaattgcgtggcgagactggagttcggctcgttacgacgaacttcgatacgctgtttgagcaagccagcagcgcatggcatttcggcagagacttgcactctgggcccatcctgccgattccgcgcaacgataaagcagcgacttggcgcagcgtggtctacttgcacggcaggctggacgaggcgggtgctaatgagcatctagtcatgacaagtgctgacttcgggcggtcctatctgaccgacgcatgggctgcaaggttcgtagccaggctctttagcgacttcacagtactcttcattggatacagtctcaatgatcccgtacttcgttacatgacagatgcattcgccgctgagaattcatcgtcgcgcgtagcggccaagcgctctccagcctatatctttgtgccgcacaaggggaaaggtgatggcgatggtgcgccctatagccaccgcaatctcaggccgattttctaccgagaaaccaaggaccatcggcatcttcggaatacgatcatcgggtgggccgatgcccgggaagactaccttaaaaacacgatagatctgatcgctcgaactgccccgaagcgcccgtcaaccatcaacccaagtgatgtggcgaacctcgtatgggctgtgtgcggacgtcctagtgacgcgggccatggggccaaggtgttcgcggaaatgaggacgatcccgcctatcgagtggtttgacgagttcgagcttcgtgagattgaaattattgcaatccacggggaggcgggaaaggccgcgcgagacgaaggcgaccacccacctcctcacccgcatctgataattgagccgctgttccctcgggtacatgatgcccgcctcacgcaactgccgccgcaatcggagcacttggcacgctggcttgcacagcacataagtgactacggtctggcgtcacgtgtgatccagaagctcgctagtcacaggatcttacatccgttcctagctcggcagatccggatgtctctttctcagaccgatgacgtgaagcccggactggcgaagctctggagactgatcgtatccacatctgaggacaccttggcgctggggcggctgttccccttcgagttgaaggtgcccgagagtctcggtgtgggtcacgaggctgtcgcgtttaaggtcgatctgctcgcagcactgcgtccgtccgtatcgctctcccagccattcaagacgtcgcgccctgacttcaattcgaatgccgatggcgaggaggagaaggcgcgaggcacacgattgtccgaagtggtcaatgcggaattaaccatccccggggatgctcaagtcaatcatcttgttgagcgaattctggcgcacaacgactccgcagcctttgtagcatctatcctgccagagctaacggtgctgctgaggcggactgccgacctgttcacccttatcgagaaaacatccgctgggaccgacatctccgtctttcaccgtccctctatcgtcccgcatgcgcagaaccgcaactacgagaattggactctgatgatcacgctgatctggcacggctggaagcacattgacatggttgctcctgacgatagccgccgattcattggtgagtggcttggcagcgaaatcatcgttctacgtaggttgggtatcgctgcgctgaaccacacagttgggctaacttggcacgaaaagatggagcatctcctcaatggctaa

SEQ ID NO: 513528 - DNA, 2097 bp, Stenotrophomonas maltophilia
gtgcgctcgaatgcctgctccattggacctgcgaaggtgtcccgagacgacttcgcgcgcctcaaggagttgatccggcaaaaccgtcgtcatgacgcggccgcgctgttgctcgctatggccgtgtgcgcgggcggcaattctctggtggccgacttacgccgcaaggggttgctgcgcgcctctcgatacgactttcgaataggagcactgcgggaaatggtgcgcctcttgggccgcctgcacgacgcactgggactcgaacctcgttggcacgagtacctggcatccgtagatgccctccacgacctcgcggcggacgccaagcgacttcgggacgccctgctgacgcggctgtcgaagcgacggggtcgcgcgctcaagaccttcctggtcatcgccaaccaggcgttttcctcccgcacccgggtgctgaccgatgccgagatcgacgaagcgagtatcgcgcctgaccacgatggcctgagtgcggaagacattgccagcgcggtgtcgcgcgtgctgaccgtcgtcagggaggcgggcagactgcgcatcaccgacttctcctacacggacgagcgtgcgctcagcgccgacagcagcacctacctgacggacctgcataccgcctttaggctggatgaactgtgccgcgcggagaccctgattgacgggctgccctaccgcgcgctcactttagatagccgggttgtcgtccggtccatcgatccggacctggaaaagtccgtacgcctcggctatgcccaaatggagacgcagatgctggtccgccggttgggtatcgaagaggtttgggccaaatcgcctcctccgatgtcgctaaccgaggtgtttgatgggttctatgcgcccatcatctcgcgtttcatgcagataaaggaaaagcccctccgccgcatcacgtttggcatccccgacatgcccggtctgtttgatccgctcgccgaagagcaggccttccgtgaagactacctagcactgctgcagctggacgtggatgactacgaggacctcgagctcgaacctttcgaggtgtcccccggcgttcgctccattgacttgttccgcgtcagccgtctcttcgccttgttagaatttttgtaccagcgggagctggtaaaaatcgccgactcagcggagcgggcgcaactcgccttgcattctatcatcgccgtgttccggcacgagcagctactgaccttcctcagtaacgtgcttcccttggagacggccgagaagataatctcgctgctggtgctcgatgactcccgcgatttcgtagacctgcagtacacgccgttcctcaaggtcgatgattactacctgctcgccccttcggtgatcgcgcacgccaatctcgtgcgaaacatcgcctttgccaatggcctcaatgagaagcgtctcgcaggcgaggccgaccccatgcaatcggccgtggaacaggcgttgcgccacgcgggtttccatgtcggcgtcgaggtcaaaccaacccgaaaggctggtgacacggacctgatcgcctatcgggatggcacgctgtacctgatcgaatgcaagaacgcctaccatccgtgcaatgcgcacgagatgcgtaacagctacgaccacattcgcaaggccggcgagcagctctcgttgcggcagcagatgtttgccgatcctgcttaccagaagaaggtctggcaggcgctcgagtggaacgttgccgctcctaccgccactcgaacgctcgtgctgaccgccaatcgcgtcttcacggggtcgacgatccaaggccacccggtgcgtcaggcacacgagttcatcaacgtgatcgcacgtgggaggattcacagtcccgatgcggtctatcgcttctgggaaggcgattcgctgtcgacggcagatgtggaccgctacctaggcggcgatggcctcgcgagcgaacagttcgcggcgcttgagccgatcaactacgcgaatgatttcggcgcgagaacgctggtcttcgagagttggcgcttcagcgtggagaagtaccacaaactcgtccaggcgcgttacgcccacagagccgagcccattgtctcctga

SEQ ID NO: 513529 - DNA, 435 bp, Stenotrophomonas maltophilia
atgcagatacagatcagcggccagtatggcgattcgccgtcagacgccctttttgccccactccagagacaactgaacatctgcttcgagcgtcatgtgaaggggaactatcttcgatccatcaccaaattcggaatcgttcttcgggtctccggaacgatctggacattcgaaccggatggaccagaccgcttgaagctgtttctcaaaaggcagctgctgaccatggatatggtctacgcctgccagccttggaaaaccgtcgacaggaacgccctcgtgtccgttgtatctgcagatatggcgacctgtatcggcatgatgatcgaacgggcgcatcgcgcaggagaacttctgcaactcgatcaactacggatggacgttgccaatgcgcttgcagatttcgaacgctacttcctgggtgaggctgtctag

SEQ ID NO: 513530 - DNA, 606 bp, Stenotrophomonas maltophilia
atgagcgctggggagtgctcgctggggctcttcagatgtcctcttgggcagtacccgatcggcgggcagggtgcgggtggctgtgccccgattccagcctctcatggtgaggggagttgcgggccgcgtgcgataggtaagtggatcaaagcctggggagccatatcccgttctgttgcgaccggtgatgtgggggcttcggttggaaagagatcaaaggccgaggctgtcgctgaggctcagtcccggtgtgcgacatatggtgcgaaggattgcactgtagggataacgtataagaaccagtgcgtcgcttacgcggatccggctccgggctctaaaggcttgatttcaatggccggcggcccaacgagagaggctgcttccactgaggttctgaagtactgtgctgctcacggcggtgggcagtgcacgatcaagtacaccgattgcagtgagccgatcttccaagaattccgattgctcgatggagctgcgttgatacatccgacgtccagcgtctatcgcattctggcagattggtggtatctgtctctaggtgagactgctgcttggcgcttgagtcacgtaggtagccactcatggtga

SEQ ID NO: 513531 - DNA, 972 bp, Stenotrophomonas maltophilia
atgatcctgcgtcccctgccgctgcgcggcgccctgctgctggccctgtcgtccctgccgctggctgcactggccgaagccacctcgcccgctcccacccagcaggtgcccggcgtctaccaccagcgcgttggtgcgctgcaggtcaccgccctgttcgacggcgtggtcgcgctgggccggcaggaagtggtcgacgtgccgccgacactggtcagccgcctgttggaaggccgctacgtaccggaagacaagaagggcctgcagaccgcgatcaacgccttcctggtgcgccagggcaaccacctgaccctggtcgataccggcaccgcgcagtgcttcggccccggcctgggccaggtgctgggcaacctgcgcgcctccggcgtggacccggccgaggtggacgaggtgctgctgacccacgcccacccggaccatctgtgcggcgtgctcgacgcgcagggcaagccggcctacccgaatgccacggtgtggctgtccaaggccgatgccgattactggctcagcccggccagcgaggccacggcgccgaagggcgtgcgcttcgccttcccgctggcacgcaacgcggtcgcgccctaccaggccagcggccacctgcgcacgttcagccccggcgatgccctgcccggtggcgcggtggcgatggacacccacggccatacccccggccatgtctcctaccggttcgacagccagggccagtcactgctggtgtggggtgatgtgctgcacttccatgcggtgcagttcgcgcacccggaagcggcattcgaggccgattcggaccgcaaggcggccatcgccagccgtcgcgggctgctgcagcaggccaccgccaacggttggtgggtggccggtgcgcacctgccgttcccgggcctgggccatgtgcgtggcgagggccaggcctatgcgtgggtgccggcggagtattcgccgttgtga

SEQ ID NO: 513532 - DNA, 504 bp, Stenotrophomonas maltophilia
atgacctggaaagcttggtgctgctctgcctcccttctggtttgtctgttgctgccggcggcgccagcgggcgccggcccacgatttgtcccgctgggcgaacgcccgtggccggggctggcaccgggggattcacccttttacgatctggagcgcgaactgctggaggagttccgcgagctctgtcccgaattcttctgccagggcctgttcgacaactacgcgccgctgcggttgcagtgtgctgtcgagatcgcctcggacaccgtgagccagtgcgccttctacgttgctgccagctcgcacgacgtgcatccgctgacgggagacctctcggcaacccggtcgagctgggtctgcgagctgccgctcccgcctggtttgggagtgcagacctggttcgatcatatggacgtgaggccaggccgctccggcagactgttcaatccatggccaggccagcagtcctcactgttcgagctgctgcaggagtgcctgccatga

SEQ ID NO: 513533 - DNA, 492 bp, Stenotrophomonas maltophilia
atgaatggtctgctgttggcgactctgctggcggccgcttcgcccgcgctggcgcacgggccccatgtggatctgatcgacttcccgctcagtgaaggcagctgggatcgcttctttgcgctgcagggcgccctggtacagggcttcgaccgcgtctgttcagatacgttctgcgaaggggagtacagcaactaccgggtgctggaggttcgctgttcggtactggcgccgcgcggaaccgtacagggctgcagctgggttatcgtggccagcgagctcggtatcgtgccgcagaccggccaggtgcgggtcgataacggccgctgggtgtgccaagtgggtttgcggccaggcgtcccggtcgacaccttctttgctgcgctgcagcagcctgaagggattttcaggcccctgccgggaactggaaccggtcttttcgatgtgctgcccgagtgcctgcgccgtccaggacaccacgggagggaagcatga

SEQ ID NO: 513534 - DNA, 480 bp, Stenotrophomonas maltophilia
atgatgggcgcgctgcggttgggggtcatctgcggacttctgctggcaacgggcctcgcccacgccggtcccgcctatgtagacgcgcggctgtatccgaatcaggccgaaggctggcagcgctttctggccatcgagcgggccttggtgcgcggattcgacgatatctgcggagataccttctgcgaaggcgagtactacaacctgcaggcgatgcgcctgcgttgctcggtgaatcaggatactggactgctggcgggttgcatctggaccttcgccggcagcaacacctcggtacgcagggacggccacatagaggtggatgtgcgcagctttgcttgtccgctgccactggctgctgacacgtcgctggcggcattcctgcacaccctcgaggccgctcccgcccacgatgcgatcaacgttgcgctgcccggcacttcggcaactgtctatgaggggttacgcgagtgcatttga

SEQ ID NO: 513535 - DNA, 588 bp, Stenotrophomonas maltophilia
gtgaacgtaccccctgctcctgaagagagccgcagccttcggctcaaggccgccacccgtgacagccacggcgcgctggacaagcacatcatggccggcgacatcttcgccagtcgcagcaatttttcccgtttcctgcgcgtgcagtaccgctttcatcacagcatcgatgggctgtacgcccatcctgcagtggtcgcgctgctgcccgacctggacgagcgtcgtcgtctggcgcagatcgcgcgtgatctgcaggacctggagcagaggctaccggaggtagacagggtgccattgccgtgcgatctggcgctgccggccctcctgggctggttgtacgtggccgaaggttccaaactgggcggagccgttctttacaagatggccgccacgctcggtctcgatcgtggcttcggcgcccgccacttggccgcgcaccccgatggagcggcaggccaatggcgcaagttcaccgccgtgctggacgcggtgacgctgaacgccgaacaggaacagcaggtggtcgacgcagctgatgccgcgttccgcagcgtgcaaggctacgtcaagctggaattcgcctga

SEQ ID NO: 513536 - DNA, 486 bp, Stenotrophomonas maltophilia
atgcgagcggtcatcgtcgcgttgatttcgggcattgcgagcatgtctttcgtcgttggagcaacggcttcagagcacgggtatgtcgatctgggcgcctactcgaaacagacttcgtattttcacgaatctgcatggaaaatccgctccgatctgatcagacagtgcgaacagagcgcttgtgtgaactggttggggcagtaccgcccacttcatttcgagtgctctgcggatacgcgaagcggcctcatcggcgcgtgtcattgggtgttcgtagccatgcatcttgagttggatccgcagagcggcgtggtgcatgggacgaccacgacatccggatgtgaattgcccctgcccgagaacctgggggcgttggagttggcaagcgcgctgttggatactgatccgctgaacgttccgctgccgggaatcaatcgttccctgctgagtctgagcagggaatgcctgccggggcgcttcgcatga

SEQ ID NO: 513537 - DNA, 492 bp, Stenotrophomonas maltophilia
atgacgcgcgcatactgggtggttcttgtgggcggattgatgctggcctcaatggtgcaggcgaagcctatctatgtggacgcacgggactaccccacgcagggtgccggacgcgctgcatttgaagccctggaagcgaagtggcgcgaggggttcacgatcgcgtgcatggacgcgctctgcgataccggctacaacaactatcttcctgtgcatctgagttgcgcagtgcgtgcagacgatggaattttgaagagctgccattgggccatcgcgggaagtgctcggagcatccatcccgggacaggaagaggggagtacgagatccggacagcggtttgtgaaattcccctggctgcagatacgccgcttgcgatcctgctggcgacggcagccaccaaagatccctttgatgatccgctgccgggcgcagggacgagtgtctactccagcatttccgattgtctgagcgccaggactgacgaccattga

SEQ ID NO: 513538 - DNA, 1260 bp, Stenotrophomonas maltophilia
atgcggatcgccctcaccaagaaaaccgttgctactgttctaccgaaggatcgcccctacgagctcagggacgcgcaggtgcgcggtctactgctccgggtgcagccctctggatacaaagcttggattgtcacttgggcgcacggaaagcgtcgtacgcttgggtctaccgatcatatctcgcttgaccaggctcgagatattgccctcaaagtgatggccgagtacgtccaatcgggcttacccaacatcgcaaagccagagctcccaaggatcacgctccgagcgtatctggacgaccactacgccctttgggccaaaacagagcttaagcgggcggacgacgcgctgcggcgcatcgagcaggccttcgctgacctgctgcctatgactttaaaagacatcaacgccaaagtcatcgaacgatggtgggtcacgcgactgaaggacactgttcgacccggtgctagacaaaccatcacaaaggccaccgcatcgcggaatttggctaccctacggtcagccctgtccaaggcagttaagtggggaatgctggaagccaaccccgtcacggaagctgcactgaaggtctcgaagcctcgtagcgtggtccgtttcctcagtcccgctgaggagaactccttgcgtgctgctctcacatcccgcgattgtgccgtctcgctggcacgtaagtcgggaaacaggtggcgtgcagatcgtaaacgcgcattgctcccggaaatacctacaggagcctatgccgatcatttgcatccattggtgctactagccatgaatactggtctccgcaaaggcgaactactttcgctggactggtcggatatcaacatgcaagcgcggcttctgactgttcgacctgaacatgccaagtctgggaggcaacgccatgtaccgctaaatggcgaggcgatgaccgtactgcgccagtgggtatcgcagtcaacgggcaatggagctgtgtttggggttgctggcatgaaatcatcgtgggagaagctcttgatcgatgccaagatcatcaacttccgtttccacgatctgcgccatcattttgccagcaagctagttatggcggggggggatttaaacactgtccgggaactattgggtcacgctgacttgacgatgaccctgcgttacgcacaccttgcgccagaacatcttgcagcggcagtggcaaagctaacttacgggcagccacgcccagccagcgccccgcaattcggggaacctcgataa

SEQ ID NO: 513539 - DNA, 924 bp, Stenotrophomonas maltophilia
atgcagcgaatgggtattgctgaccctcgccgcgtggttatggtcggcgacgaatctgccgatgtaaaagccgcctacaatgctggttgctacacggtcctggacaaggcctcgtggcctaatgactggcggaactgggacaactataagcactgggacgcattgaagcttcttcctgacgcagtcatcgagttcccaagaacgctccaccaagttcttgaagacattgagtcgtatgctctgaacctagagtggcagttcaacaattcgatggatgattcgcatcaacccagcttttgcgagttcagccacatctttccgcgcgaagtaggtgaaggcaacacgagggtcaagattagcttcgcggggcgacacttctcaaactggccctccgtcgcagcacgcctgcaatggcacgcccttacacacaacatccacgctcacaaggatgctcagcagttcccggcgcagtggtgcaattccgtatacgcctatgtccgcaggacctttccactgctgtcgttcctcgacagctcagtgaccgtggccgccatacctgcacgccccggacgcagtccacgcatgcaatacttcatcgcgcagctacaaaacgactttagacagcgagaaccactgggcacaacgcacgatgcagtgcaattcagcaccacactactgtcttacaggaatggcgtccgatcacacagcggggatcacctcaagcgggttccgcgctttgagaacgtgcgcgatcacctggtggtcaccaatccagccgatgtagggggcaaggattttgttatccttgacgatgtttgcaccagcggcgcgaccctgatgtacgcccacaagcgcttgatggatgcgggcgcccgcagcgtggcgctgttcgccctttccaagaacgtgagcaatgtgctgtga

SEQ ID NO: 513540 - DNA, 483 bp, Stenotrophomonas maltophilia
gtggcagttatggcccatggcctgcacaccgtggcgccctccaagcataagaccttagcccaagaaatcctggacaagggcggagcattggtctccgagtatccattcggcgtggaagcgcgaccggagtttttcgtcaaacgagaccgtatccaggccggattggcgcagggcgtcgtgatggtccagtccgatgtgaagggcggcagcctacacgctagccgcgccgccctggactacggacgctggttggccgtgcctgaacctaccagattggatgcggaaaacatggagccgaaggtacaggcgaacatgctaattgcatctggcaagcacgatcagatatccgagctcctgggctgctcgccaattgcgctgcgaaaggtgctcatacttaaggggcgagacgactattcgcaacttctcgaaatgcccccgcccgaatgggggcaaaggccacagaaccaagcagggctcctatga

SEQ ID NO: 513541 - DNA, 276 bp, Stenotrophomonas maltophilia
atgcggggcgtatcgcagcgcgcgctgggagccaagatcgggatgaccaagcaggccggtagcacgcgtatcaatagatatgagcagcagacgtctcgtgctgacatggacacggctgcagcgatggcgaaggctttgggcgttccattggcgtttctgtttgcagaggacgatgacttggcggaggcaattctggctttctccaagctaccagccgatcagcgtgcacgcatactcgaccacatgaagtcgctggctgcgcaaactatggagtaa

SEQ ID NO: 513542 - DNA, 609 bp, Stenotrophomonas maltophilia
atgaagccaaaaatgaccgtacgcaaggcaagcaagctctttgcagcgaccgaagaagaactggcggaagaggcgttgaagtactccaaggtcaagcaacgcgaagggatgtcgttccccttgtggtacacaaattgcttgaagcttggtgctagggatatctgcgaagggaagagcgcagaggatgcatttctgagggttacaaacttcccagacgccctgaaggcgaaggcacacgggctgatccgaagctttcaggaaattgtcgctgcaaacgacgatatagacttcaccccacaggagagccccaaaggttgcaatacgtcgatcgagggcgtgacgctcagcacccgacaggatctggttgcatcgaaaaagtcggacggccgactactgcttctctacttccacgttgtggacacgccgatgaaggctcagcaggccgagacactgctccagttggcgcagtacatcgccgatgctaggcagatcaacgctgacgttgccatcgtcgatatcccgcgtaagcgccttatccgggtctacgatgactacgatccggaacagatgaaggcaacagtcgctaacgcgatgagcaagctgcactaa

SEQ ID NO: 513543 - DNA, 477 bp, Stenotrophomonas maltophilia
atggcaaagcaaagcaagttcttgggcgtagatggcaagtaccacccagtcggctggttcttaggtatggacggcaagtatcacgccccgggatcattcctcggcgctgatggtaaatatcatcctaagggttacgtccttggcatcaatgggaagtaccacaagcccggagccgccctaggcttcgacggcaagtaccacgaaaagggctccgttcctgggcttgatggcaagtaccacaagaagaacgaggttctaggtctcaatgggaagtaccacccgcaagactgggtgcttggtcttgacggggagtatcatccgaaagatcacttcttgggcatggatggcaagtaccatccgaagggaagcgttcagggaatcaatggcaagtaccaccctcccggatacttcataggagttgacggcgagtaccaccctcctggctccgtattaggtgttgacgggaagtatcactga

SEQ ID NO: 513544 - DNA, 819 bp, Stenotrophomonas maltophilia
atgaacaccccacaggattccagcctcggtcgcgaggtcagttacccgtcgcagtacgatcccggcctgctgtttcccatcccccgcagcggcgcccgcgccgagatcggcctcgatgacgccgcgctgccgttcgttggccacgaccgctggcatgccttcgagctgagctggctcgacgcgcgtggcaagccgcaggtcgccgtcgccaccgtgcaggtgccgtgcacctcgccgcggttgatcgaatcgaagtcgttcaagctgtacctgaactccctcaacagcacccgtatcgacagcgccgaggcactgcgcgcgcgcatcgtggcggatctgtcggcctgcgccggtgcgccggtggaggtcgaattcggcctgccgggcctgcgtgagacgccgctcggcgaatccatcgatgggctggacctggagatcgactgctacggcccgccgcaggcagacttcctcgccgctgatgccggcgaggtggtggaggaaaccctggtctcggcgctgctgaagtccaactgcccggttaccggccagccggactgggccacggtcagcctgcgctaccgcgggccgaagatcgaccgcgccggcctgctgcgttacctggtcagctaccgcgagcacgccgagttccacgagcagtgtgttgaacggatcttcagcgaggtgtctgcgcgctgccagccgcagtggctggaagtggaggcccgctacacccgtcgtggcggcctggatatcaacccctggcgtgccagcccgggcatcgccgccccggccgcgacctaccgcgaactgcggcagtaa

SEQ ID NO: 513545 - DNA, 294 bp, Stenotrophomonas maltophilia; identical to SEQ ID NO: 493581

SEQ ID NO: 513546 - DNA, 513 bp, Stenotrophomonas maltophilia
atgatcaagaccaccccgctacagaccgccctgatcgccgccctgctgggcagcgttgctctggtcggttgcaagaagaaggaagagtcgaccgacagcaacgccgctccggcagcgaccgccccggccgaacccgcagctcccgcgccgatgaccggcgcaccgccgccgatggccgaagccgctgcggtcaacgtctcgtcggtcaccgtcggcaagaccgccgccgccgacaagtcggttgcgacgacggctttgttcgcaccgaaggatgacatcatcgtctcggtcaagaccgacggcgctgccaacaacgtcaccgttggcgccaagctgacctatcaggacggccaggtagccggcgaacagaacgccaccctgaacaccagtggtgcggaaaccaccaacgtcacgttcaagaatgcaaagggctggccggccggcaagtaccgcgccgaggtcaccgtcgatggcaaggcggccggaacgccgcaggagttcgaggtcaagtaa

SEQ ID NO: 513547 - DNA, 2223 bp, Stenotrophomonas maltophilia
atgtccaagatcctctacacgctgaccgacgaagcaccgttcctggccacccagtcgctgctgccgatcgtcggcgcctacaccgccaccgcaggcatcgtggtggaaacccgtgacatctcgctgtccggccgcatcctgtcgctgttccctgaactgctcagcgacgcgcagaaggtcagcgacgacctggccgagctgggccagctggcgaccaccccggacgccaacatcatcaagctgccgaacatctccgcctcggtgccgcagctgaaggcggccatcaaggaactgcaggaccagggctatccgctgccggattacccggaaaccccggccgacgaccagcagcgcgactacaaggcgcgctacgacaaggtcaagggcagtgcggtgaacccggtgctgcgcgaaggcaactccgaccgccgtgcaccgctgtcggtgaagaactacgcgcgcaagcatccgcaccgcatgggcgcctgggcgtcggattcgaagtcgcacgtcgcgcacatggccgccggtgacttctacggcagcgagaagtcggccaccctggccaacgccggttcgctgaagatcaccttccacggcaaggacggcagcgccgtggtgctgaaggaaaagaccgcagtgaaggcgggcgagatcgtcgatgccgccgtcatgagccgcaaggcactggccgcgttcatcggcgagcagattgccgatgccaaggcccagggcgtgctgttctcgctgcacctgaaggcgaccatgatgaaggtctccgacccgatcatgttcggcgtggcggtgaacgagttctacaaggacgtactgaccaagcacgccgacgtgctgaagcaggccggtttcgatgccaacaacggcattggtgacctggctgcgcgcctgccgtcgctgcctgaagccacccgcgccgcgatcgaggccgacctggccgccgagtacgcgcagcgcccgggcgtggccatggtcaattcggacaagggcatcaccaacctgcacgtgccgagcgacgtgatcgtcgacgcctcgatgccggcgatgatccgcgactcgggcaagatgtggaatgccgaaggcaagctacaggacaccaaggcggtcattccggaccgctgctacgccggcgtgtaccaggccgtcatcgacgactgcaaggcgcacggtgccttcgacccggccaccatgggttcggtgccgaacgtcggcctgatggcgcagaaggccgaggagtacggctcgcacgacaagaccttccagatcgccgccgatggcgtggtcaaggtcaccgatgatgccggcgccgtggtgttcgagcacgccgtggaagccggtgacatctggcgcatgtgccagaccaaggacgcgccgatccaggactgggtcaagctggccgtcgagcgcgcccgcctgagcagcaccccggccgtgttctggctggacgccgcccgcgcccacgacgcgcaggtcatcgccaaggtcgagcagtacctgaaggaccacgacaccaccggcctggacatccgcatcctgccgccggtggaagccaccgcgttctcgctggaccgcatccgcaagggcgaggacaccatctcggtgaccggcaacgtgctgcgtgactacctgaccgacctgttcccgatcatggaactgggcaccagcgccaagatgctgtcgatcgtgccgctgatggccggtggcggcctgttcgagaccggtgccggtggttcggccccgaagcacgtgcagcagttcgttgaagaggactacctgcgttgggattcgctgggtgagttcctggccctggccgcgtcgctggaacacctgggcaaccgctacgacaacgccgctgcccgtgtgctggccaaggcgctggacgaagccaacggccagttcctggacaacgacaagtcgccatcgcgcaagctgggtggcatcgacaaccgtggcagccacttctacatcgcgctgtactgggcccaggccctggccgcgcaggacgaggacgccgccctgaaggcgcgcttcgccccgctggccaagacgctgaccgacaacgagcagaagatcgtcgaagagctgatcgcagtgcagggcaaggccgtggacatcggcggctactaccgcccggacgtggccaaggccagcaaggcgatgcgcccgagcgcgaccttcaacgccgcgctggaacagctgcgcggctga

SEQ ID NO: 513548 - DNA, 966 bp, Stenotrophomonas maltophilia
atggcacgcgtgctggtagtgggaaccgatatccagggcgagcaggccctgctgcaacggctgcgcctggcctcggcgctgccggatggccaggtccgccgcagccaggatctggacgattgtgatctgctggtcatccgcgataccccggcgctgcgcaacgccgcccagcgcatgcgacagcaacgtccgcgcctgcagtgctggatcgaggacatcggcggccagctgcgtgatggcgacgggcatcaggacgtgcttgatgacggtgccatcggtcgcgcgttgcgtcgcatgcagttggcaccggagcccctggtcatgcagacacctgcgccgatccgcctggcagatggcgcgcacgccatcacccgtctgctgcgcgagcggctgccgctgcgacagggccaggcactgctgggtgatgcaggcgagcctctgctgctgatggatctggagcacgatcaggccgtgctgttgcaggagccggctgcggcgctggtggagcggctggccgatgcctttgagcgcctgcagctggacgcgctgacaccggcgcgcctgcaggccctggccggcgagcggccacgccagccgctgcggccactgctgtggcaatgggcgcaacgcagccgccattggcaggcgctggacgagcgcctgcgcggcgcctcggtgaagctgctgcgctggccggacttccgcgtactgggccatgaccacgatggcttccgcctgtgctcgctgctgctcaagcgtgcgtgtacggttgaggaatgcacgatgctgctcgaactgccggcggcggccgttcgcgatttcatccatgccgcctatctgtgtggctacgcgcagctgcaggccgccccggcgacgctgatgatggcggcaggtggcacccgcaccgacaacggactgctcgcccgcctgtggcggcacctgcgcgggagcgagcgcaatgcgtga

SEQ ID NO: 513549 - DNA, 549 bp, Stenotrophomonas maltophilia
atgcgtgagcacaaggtggtcgtgctgggcggcatgggcagcggcaagtcgacgctggtacgcagcatcgcggctggcgcggtggtcgacacggatgtggccaacagtgatcgcctcggcgccgacaaggcctccaccaccgtggcgctggactatgcagacatcgacctgcccaacggcgaacgcctgcgtctctacggcacacccggccagcagcgtttcgatttcctgtggccgatcctgctgcagggcgcgcgtggcgcggtgctgctgctggatgcgcgccgcgccggcctggccagcgagctggaaggctatctgcaggtgctgcagccgttcgcatcatccttggcactggtcgtggcggtcacccacctggaccaggcaccgcaggccgcactggatgactgggccatccgtgcctgccttgacgaccagccgctgccgctgctggccgtggatgcccgtgaccgaggacagggactgctgctgatggatgtactgatgagcgaaatggaagcgcacgcactggtggctgcacatggctga

SEQ ID NO: 513550 - DNA, 417 bp, Stenotrophomonas maltophilia; identical to SEQ ID NO: 493576

SEQ ID NO: 513551 - DNA, 417 bp, Stenotrophomonas maltophilia
gtgagcccggccgcaggggaacaaggggctcggaccaacatcgacaaggggtgcgacgtggctggattgaatgattcgttgaacgcactgatgggcatcgacggcgcgcaggcagtggcgctggtcgattacgaaagcggcatgctgctgggcgaagccggtgctggcatggacatggaagtggccgccgccggcaataccgaagtgatccgcgcgaagatgaagaccgccgcatcgctgaacctcaacgacagcatcgaggacatcctgatctcgctgggcaaggcgtaccacatcatgcgcccggtggcgaagaagaagggcctgttcttctacatcgtgctggaccgtaccaagtccaacctggcattggcccggcgcaaggtgcaggacgtggaggccgaactggcgatctga

SEQ ID NO: 513552 - DNA, 945 bp, Stenotrophomonas maltophilia
atgcagcaaatgacctttattccgcgcgtggaggaaggcaacgtcatcccgcagcgcgcccgcgacggctacatcagcgcgaccgccctgtgccagtccgtcggcaagcgctggtccgactaccgggcactgaaatcgacggaggagttcctgcaggagctcatggcgcagacgaagctgtccgagaatgagctgatccacgtggtatccggtgggaacccggccatgcagggcacctggatccacccgtacctcgccatccacctcggccagtggctgtcgcgcaggttcgcagtgaaggtctcgcagtgggtggtggaatggcagcagggtcgcgccaatgcgttgctgcccgtgcacatcgaccgctacatgcagaaccgtgccaaggtgccgtacacccatttctcgatgctcaacgagctgacgttgaacctgatcgcaccgctggagcaggcgggctatacgctcccgcaggcgctggtgccggacatctccgaaggccgactgttctgcaaatggctgagggatcatcgcggcgtcgacaccgatgcgctgcccacgtatgaccacgcctacccggacggccgcacggtgcaggccaagctgtatcccaacgagttctacgaggacttccgccgccacttcaacgaagtgtggctgccagatcatgcgcccaggtacttcgccgcacgcgacagcaaggctctctgtcgttcgtctctgcactgctgcttccagcagcctgaaggcagcgccgaacgtgctcggctgcttcggctggaagcagccgagcatggtccggcgctacggaggcggccgctcagatcgccagttcggcctccacgtcctgcaccttgcgccgggccaatgccaggttggacttggtacggtccagcacgatgtagaagaacaggcccttcttcttcgccaccgggcgcatga

SEQ ID NO: 513553 - DNA, 1731 bp, Stenotrophomonas maltophilia
atgtccgagcctgacaccgttgccgacttggcgtcgcgcatcgccggcgccattcacgccggcttcgagcagtatcacgcccgctttgcggcgatcaccgcccgtgcgcggcagcgtttcgagcagcgcgactgggtgggcgcgcgccgggatgcagtcgagcgcatcgcgttgtacgacctgtgcatcgccgaacagatggatgcgctgcggcgcctcgccggcgaagcgatcggggaacgcgcgctgtggctgcaggtgcatgcgcgctatagcgcactgctgagggggctgatcgacgccgagctgtacaagaccttctacaacacgctgtcgcggcgcttgttctccacccgtggcgtggacccggcgctggagttcatcgccttcgatgtcgagccgtccgatgcgatcacccacccggtcgcacggcatacctatgcggtctcgccgacgcggccggtggaggctctccagcgcgtgctggccgattaccgcttcgacattccgtatgcgcaccagctgcgctgcgcggcggccatcgctgtgcgcctgcaggatgatctggcccactggggtgatacgccggtgcgcagcatcgagctgctcgacaccgtgttctaccgggagcgccgcgcctacctggtgggtcgcgtgttcggcgaacaccgcttctcaccgtgcgtgatcgccctggtcaacgatgggcagggcctgcgtgcagatgcggtgctgacccggcgtcgcgatgtcgcccatctgttcggcgtgtcgcgcagctatttccaggccgaccttgccacggtgggcgatgcggtggtgttcctgcgcagcctgttgccgggcaagcccattgatgagatctatacggtgctgggccgcgccaagcagggcaagaccgagcgctaccgtaccttcttccgccacttcaacgaacatccgcaggagcggctggtgcatgccgaaggcacgccgggcatggtcatggcggtgttcaccctgcccagctatccgctggtgttcaagctgatccgcgaccgcttcgcgtggccgaagtcgatgtcgcggcagcaggtggaagagaagtatgcgctggtgttcaacctcgaccgtgtcggtcgcctgcttgatgcgcagccgtaccgccatctgcgtttcccgcgcgaccgcttcgcaccggccttgctgcaggagctgcttgcgcagtgcgcgcagagcgtgcgcgtcgatggcgatcaggtggaagtcgcactgtgctacgtgcagcgtcgcttccgtccattgaacctgtacctgcgcgagcagggcggcgatgcggtgcgtgcggcggtactcgactacgcgcaggcgatcaccgacatggcgcgcaacaacatcttccccggcgacatgctgccgaagaacttcggcgtatcgcggcatggccgggcagtcttctacgactatgacgagctgtgcctggtcagcgactgcgtcttccgcgcctggccgcagccgcgcacgccggaggaagccatggccgacgaaccctggttccacgtcgggccacgcgacgtgtttccagagcgcttcggcccgttcatgggcctgccggcgggcgagctggcggcggtgcgcgaacattaccggcacctgtttgatcccgcgtggtggcagggcctgcaggcgcgcttcgccagcggtgattatccggataccccgccctatgcggcggtccatcgcctggcctga

SEQ ID NO: 513554 - DNA, 891 bp, Stenotrophomonas maltophilia
atgatgcgttcccccctgttccttgcgctggccctggcgttcgccgccggtgctcccctgctgccggccgatgccgtggcccagaacgcgcgcgccgtgcgcgccactgccgagatgagcatggtgctgtcaggcagtatcgacgtggcggccgatggttcggtcagcacgctggtcctggaccagcgtgccatgctcgcacccggcatcgtgtcgttcgtggaaggcgccatacgcggctggcagttcgaaccgacgctgcgcgatggcacgccggtggccgtccacgcgccgctgcgcgtacgcctgcgtggcaagcagcaggaagacggcaactaccagatcagcatgaccagcgtcgacttcagtgaatatgatccgaaggctaccgattcgatcacccagaagcgcatgccgccgccgcgctaccccgaagaggccttccgcaatggcgggcagggtgacgtactgctgctggtcaaggtcgcacgcgacggcaccgtggccgatgtcattgccgagcaggtgaacatgaccgtggtcgcaccggaacggaccatggccaggatgcgcgacatcttcgccaaggccagtatcagtgcggcccgcaagtggaccttctcgccgccgaccaccggcgaggacagcacgcgggattcatggaccgtgcgcgtgccggtcactttcgccctgaacaacagcgacaacggccagccggaacgctacggccgctggcgtgccttcatccccggcccgcgccaggccgcaccctggcgcacgccggatggcgccggacaggcgggaagtgatctgctgccggccggcggcgtgtacatggtcgatggcacccagcgcggcctgcgcctgctgacgccgctggcgcagcgctga

SEQ ID NO: 513555 - DNA, 1575 bp, Stenotrophomonas maltophilia
atgcgaacgctgtctccccgcctcaacctgggcaagctgatcctcgccctggccctgctcagcgccatcatcgccctggccaataccctgctggccagctaccgcgtgcagcgcgaccagctggtcggcaataccctggaagccaaccgcgtctatgccaccaagctggccgagaccacccagaacttcctgctggccgcacagcaggagctggcctacgccgccacccggctcggccagagtgacctcgatccggcacaggcgcaggacgaggccagccgcctgcagctgcagaccaacagcttcaattcctcgctggtggtggacgccgacggcctggtgatcgccacctcgccgcagaccctgcagctgcagggcgagatcctgcacagcgtcggcaacaatgccgcattggctgcacgccagccgatgatcagcgacccgtaccagtcgaccacaggcaagctgctggtctcgctgtcgcacccgatcttcgaccgccagggccactatcgcggctacgtcagcggcaccctgtacctgcgccagcgcagcgcgctgcatacgctgctgggcaagcactactaccgcgacggctcctacctgtacgtggtcgaccgccatggccgcctgctgtaccacgccgacggcaagcgggtcggcgactacgtggtcggcaacccggcggtgaaggcggtggtgcgcggtgagcgcggcgcgcagcaggtccgtaacaacctgggcgtgtcgatgctggccggttacgcgccggtaccggccactggttggggcatcatcgcccagcggccgaccgaggccacattgcagccgttgtcacggttgatgaccgcggtgatctggaacgcgatcccgctcggcctgctgtcactgctgatcacctggtggttcgcccggcgcatctcgatgccgctgtggcagctggcgcgcaacgtgcagggtggcgaggacaccggcagcgcgatcaaccacgtcagcggcatccgcgcatggtacttcgaggttgcccagctcaagcaggcggtcctgcacagcttcaacgccctgcaggaccgcattggcacactcaaccgcgccaaccgtaccgatccgctgaccggcctgctcaatcgccgcggcctgcagcaggcgctggatgcgctgcaggtgcagggcattccgttcgcgatcctggcgctggacatcgatcgcttcaaatcgatcaacgacagccacggccatgacgtcggtgacgccgccatcgtccatatcgccgaccagatgcgccgctactcgcgcgacagcgacatcctctgccgtgccggtggcgaggaattcctgctgctgctgccgggcatcagtaccgactcggcgcgccaggccggcgagcgcctgcgccagcacatcgccgatcatccgttcgagccggtcggcaccatcaccgtgtcgctgggcgtggcccacttccccagcttccatgtcgatgccgagcaggcgctgcggctggccgacaaggccctgtacatggccaaggaacagggccgcaaccgcgtggtggtctacccgtacgcggactga

SEQ ID NO: 513556 - DNA, 1068 bp, Stenotrophomonas maltophilia
atgcgatttctgctgcagagcttgagggttcttccttgcgcaacccatcgaggccactttgtcgaatcccatctttcgcgggttcgcatgcacctgaatgccggtgaccatgcttcggccgaggccgtgatggcgggggtgccggctgagacccatgagcaccttgtctggcgcttgtcggtggaacgtcgggttggtcgatggatcaagacgtggacgcaggcgttgccacagtcctctcaccctctactggtttctgcatatgcggaaatcaacaaggcatggtcagtccgcggtgagagctacgcagcggatatcccgatgttgcggcgacgcagataccccgggatcatgatgcaggcatatcggaagctctcggacatcgtggcccaggagcctggcaatgcaatggcgttggctggcctgattcactgtgacgtcgtggtcggcaccggtgacggaaacagggatgactggctcaatgcggcgatggcggccgagccgttccattgcccttcgatcgtgcagtatgcgagagggacatggcagcgctggggaggcgagccggatgatcactttcgatttgccgattgggtggttgagaacgcgcccgctggcagctgctcgcacatcgtggctgcacaagcgctgctggatgatgccctgaccgtggcggacggcttcagctcaatgcgaggaatctcccgccatctcggaaacgagacaaccgctgcgtggctacgccgcgcaatactgaaatgggccggtgccacgccggaaaccctggagtgtcgtctgcgggacattgcatcccttcatggcgacagctatcacgggatctgcatggagacatttgcatttgcggcgtatctcgcgggtgccaaagatgaggcccgccagctgctgatcgcattgagggggcgattgcaggctgatgtatgggagatgctgttgccgtccattcccggctggctggctgccgttggcctcaggcatcgggcggcgcacctggcgcatgatcgcatctgtcgtgatctggagttggacccgcggcagatctgccgatag

SEQ ID NO: 513557 - DNA, 1746 bp, Stenotrophomonas maltophilia
ttgtccgataacacttccgaaaccggcagcgccgatgcgcccgccgaaaagcgcgtgcgcaagccccgcgtgagcaaggccgccgccccggcagccgccgaaaccagcgccgctccggcgcaaccgaccctgccgctggcagccgcgcccgaagcgccggcaccggctgcagccgcccccgcgccgagcgcgcctgccactgaagcccccgcctccggcggcggtgagggtggcgaaggccgcgaatccggacagcgccagcagaaccaccagggcggtgggcagcaccagggccagggtcagaacaacaacccctacaaccagaacggccagcagggccagggcaatcgccgcgaccgtttccgcaaccgtcgcgaccgcgaccgcaaccgcggtggccgcgatgacggcatgccgcaggacggcggcgagcagcagcccttcgtgccgcgcccgcacgccaacgtgcccgagggcttcccggtctactcgctgagcgacctcaagcgcatgccggcacagaagctgctggagatcgccgagcagctgcagatctccgaaggcgtggcccgtgcccgcaagcaggacgtgatcttcgccctgctcaaggtgctgacccgccacggcgacggcgttgccgccgatggcgtgctggaaatcctgccggacggcttcggcttcctgcgcgcggccgaagccagctacctggccggcccggacgacacctacatctcgcccagccagatccgccgcttcaacctgcgcaccggcgaccacatctccggccgcatccgcttcccgaaggacggcgagcgctacttcgcgctgaacatcgtcgacaccatcaacggtgagccgatcgaagcgtcgaagaacaaggtgctgttcgagaacctgaccgcgctgttcccgcgccgccgcttcaccctggagcgtggcaacggttcgtcggaagacattaccggccgcatcctcgatctgatggcgccgcagggcaagggccagcgctcgctcatcgtgtcccagccgaaggccggcaagacgatgatgatgcagcaggtcgccactgccatcaccaccaaccatccggacgtgcacctgatcgtgctgctgatcgacgaacgcccggaagaagtgaccgaaatgcagcgcaccgtgcgcggcgaggtcatcagctcgaccttcgacgagccggccgcgcgccacgtgcaggtggccgaaatggtcatcgagcgcgccaagcgcctggtcgagcacaagaaggacgtggtgatcctgctcgactcgatcacccgtctggcccgcgcctacaacaacgtggtgccgagctcgggcaaggtgctgaccggtggtgtggacgccaacgccctgcaccgcccgaagcgcttcttcggtgccgcgcgcaacgtggaggaaggcggcagcctgaccatcatcgccaccgcgctggtcgacaccggctcgaagatggacgaggtgatctacgaagagttcaagggcaccggcaacagcgaagtgcacctgagccgccgtatcgctgaaaagcgcgtgttcccggccatcgacatcaaccgctccggcacccgccgcgaggacctgctgatcgagccggaactgctgcagaagatctggatcctgcgcaagctgctgcatccgatggatgaaatggccgcgatggagttcctgctggacaagatgaagaacaccaagtccaacgacgagttcttcggttcgatgaagcgctga

SEQ ID NO: 513558 - DNA, 330 bp, Stenotrophomonas maltophilia
atgagcgacaaggttgtacatgtcggcgacgccgacttcgatagcgcagtgctgaattccaaggaaccggtgctggtcgatttctgggccgagtggtgtggcccctgcaagatgatcgccccggcgctggacgaactggccgatgcctaccagggccgcgccaagatcgccaaggtcaacgtcgaccacaaccgcgcactggccgccaagtaccacgtgcgttcgattccgtacctggtcgtgttcaaggacggcgagaaggtcggcgagcagatcggtgcggtgggcaaggctcagctggccggcctgctggacaaggccctggcctga

SEQ ID NO: 513559 - DNA, 1722 bp, Stenotrophomonas maltophilia
atgagcgacaaaccgctgaccgatttgaccttctcctccttcgagctgcatccggccctgcaggccggccttgaaggagccggattcacccgctgcaccccgatccaggcgctgaccctgccggtcgcgctgcccggcggtgatgttgccggccaggcccagaccggcaccggcaagaccctggccttcctggtcgctgtcgtgaaccgcctgctgacccgcccggcgctggccgaccgcaagccggaggatccgcgtgcgctgatccttgccccgacccgcgaactggccatccagatccacaaggatgcggtgaagttcggttccgacctgggcctgcgtttcgcgctggtctacggtggcgtggattacgacaagcagcgtgagctgctgcagcagggcgtggacgtgatcatcgccaccccgggccgcctgatcgactacgtcaagcagcacaaggtggtttcgctgcatgcctgcgagatctgcgtgctggacgaagccgatcgcatgttcgatctgggcttcatcaaggacatccgcttcctgctgcgccgcatgccggaacgcaccatccgccagaccctgctgttcagtgccaccctcagccatcgcgtgctggagctggcctacgagcacatgaacgagccgcagaagctggtggtcgaagccgagaccatcaccgctgcgcgcgtgcgccagcgcatctatttcccggccgacgacgagaagatcccgctgctgctgggcctgctgtcgcgcagtgaaggcgcgcgcaccatggtgttcgtcaataccaaggtgttcgtcgagcgcgtcgcccgctcgctggaaaaggccggctaccgcgtcggcgtgctgtccggcgacgtgccgcagaagaagcgtgagagcctgctcaaccgcttccagaagggccagctagaaatcctggtggccaccgacgtggccgcgcgtggcctgcacatcgacggcatcaagtacgtctacaactacgacctgccgttcgacgccgaagactacgtgcaccgcatcggtcgtaccgcgcgcctgggcgaagagggtgatgcgatcagcttcgcctgcgaacgctacgcgatgggcctgccggacatcgaggcctacatcgagcagaagatcccgtccgagccggtcaccaaggaactgttgacgccgctgccgcgcccggaacgcccggccccggctgctggcgaggaaggtgaggagaacgagagcgtcggccagatcttccgtgaagcgcgcgaagcccgcgccgctgaagaagagcgccgtggtggtggtcgcagtgggggccgctccggcggtggccgtggcgagcgtcgcgacggtgagcgcagcggcgagcgccgttcgcgtggcccgcgcaagccgcgcgtggaaggcgagcaggttgcagctgccccggccgaaggtgctgaagccgctgtcgcccaggctccgcgtccgccgcgcccgccccgcgccgagggcgcgccggaaggtgccgtggatggcgagcgcaagccgcgcaagcgccgtcgtcgtcgccacggccgtccggtcgagggtggcgagggcgtgcaggccaacgccggcaacggcgccagcccggtgaccccggtgcaggtggtggccaagccggtgcgcacggcggccgacagcggcgattcgttcctgacccgcatcggccgcaagatccgccggatgctgtcgggcagctga

SEQ ID NO: 513560 - DNA, 687 bp, Stenotrophomonas maltophilia
atgagtgtcctgcgcttcgacaatgtcagcaaacagtacgccggtggccacgaggcgctgatcgatgtcagcttcgaggtcgcgccgggcgagatgctgttcgtcaccggccattccggtgcgggcaagagcactttgctcaagttgatccacctcgacgagcggcccagccgcggcgcggtggtgttcgacgagcgcaacctgctgaaggtgcgcggcggcgacgtgccccgccaccgacgcgcggtgggcgcggtctaccaggaccaccggctgctgatggaccgctcgatcgccgagaacgtggcgctgccgctgatcctgcgcggcacccgccgtggcgacatcagcaagcgcgtgcgctcggtgctggagcggatgggcctgggccatcgcgagaaggcgctgccctcgcagctgtcggccggcgagcagcagcgcgtgggcatcgcccgcgccatcgtcggcgagcccaagctgctggtggccgatgagccgaccggcaacctcgacccgaccctggcggcggagatcatggccctgttcgccgagctgccctcgcgcggcaccagcgtgctggtggtcagccacgacctgccgctgctgcgccgcatgcgcaagcgcgtgctgatcctcgaccatggccggctggtggatgacatctcgccgcaggacctggcggagtaa

SEQ ID NO: 513561 - DNA, 948 bp, Stenotrophomonas maltophilia
atggcgaagaacgaaaacagcgaagtcgccgccccctcgcgcgtgggcgtctggttccagcaccacgtgcacagcgtggtgttcagcctgggccgcgcctgccgcaagccatgggcgaccctgctgacggtgatggtcatggcgctggcgctggcgctgccgctgggcctgtcgatcgcgctggacaacctcaagcagttcgccggcagcgtgcagcagtcgcgcgacatcaacgtgttcctgaagggcaacgtcgatgcacccggcgcgctgcgcctggccggccagctgcgcgaccgcgacgacgtggccgaagtgaacgtgcgcacgcccgagcagggcctgcaggaactgcgcgatgccggcctgggtgaggcgatcgacgcactcaacgacaatccgctgccttcgctgctggtgatcactcccggccagggcaaggacgacgcacgcctggcgcgcgcgctggaaagcctgcccgaggccgatctggtgcagcacgacgcgctgtggcgccagcgactggatgcctggcttgccttcggtgcgcggctggtgcaggtgctgtcggtcctgctcggcgcaggtgccgcgctggtggtcggcaacacggtgcgcctggacatccaggcccgccgcgaagagatcggcgtgctgcagctgctcggcgccagcgatggcttcatccgccgcccgttcctgtacctgggcgcgtggtacggcctgggcgccggcgcggtggcgctggccctgatcggcgctgcgggtgccgccctgcgcatgccgctggccgaactctcgcgcagctacggcagcccgttcgtactgcacggcctggacctgctgcacggcggcctggtcctgctcggcacgctgctgctgggttggctgggcgcctggctggtcaccggccacttcctccgccagacccgcccgaccgacacctga

SEQ ID NO: 513562 - DNA, 843 bp, Stenotrophomonas maltophilia
atgcaaccgcaagcgctgaaacaccttgaagggcccgcgacgcgggtgatggtggtcgatggctcgaagctggtgcgcaagctgatcgccgacgtcctgcagcgtgacctgccgggcgtggaggtgatcggctgcgacagcatcgaggacgcacagcaggcgctggcacaggggccggtggacctggtgacgacctcgctgaccctgcgcgatggcgacggtctggcgctggcgcggatggtgcgcgaagcggccggccaggcctatgtgccggtgatcgtggtctccggcgatgcccagcagcacctggagcagcgccgcttcaccgagtacgtcaccgactatttcgacaaatcgctcggccatgaagcactggcgaccttcatccgcggctacgtgcagccccagaccatccccggtgccaccatcctctatatcgaggacagccgcgtggtggccgaggccaccaagcgcatgctggaacgccagcagttgaacgtgctgcacgtggtcagcgccgaagaagcgttcaccctgctcaccgccgagtcgctgggccgcagtcgccaccgcatcgacctggtgctgaccgacgtcaccctgaagggcgaactgagcggtcgcgacgtggtgcagcgcgtgcgcgtggatttcggctacggcaagcgccgcctgccggtgctggtgatgaccggcgatggcaacccgcacaaccagaccgggctgctgcagtccggtgccaacgacctggtgctcaagccgatcgaagaacggctgctggtcaccaaagtgctgttccagctgaggctggcccgattgaacgatggacctctgttgcgatga

SEQ ID NO: 513563 - DNA, 714 bp, Stenotrophomonas maltophilia
atgatggatgaagtagccgacaccccgacgatccagctggaaccgagctggaagcagcatgtcggcgattacctgttgcagccgcagatgcgcgagctgtccagcttcctgcgccagcgcaaggccagtggcgcggcggtgttcccgcccggcccgcagatcttcgccgcgttcgacgccacgccgttcgagcaggtgaaggtggtgatcctcgggcaggacccgtaccacggtcgcggccaggcacatggcctgagtttctcggtgccgccgggcgtgccggtgccgccgtcgctgctgaacatctacaaggagatcgagagcgatctcggtatcccgcgtccggaccacggctgcctgattccgtgggcgcagcgtggcgtgctgctgctcaatgcggtactgacggtggaagagggcaaggccggtgcgcaccagggtcgtggctgggaaggcttcaccgaccacgtggtggatgtgctcaaccgcgagcgcgaagggctggtgttcatgctctggggcgcctatgcgcagcagaagggcaaggtgatcgacacccgccgccatcgcgtgctgaagtcgccgcatccgtcgccgctttcggcccatcggggcttcctcggctgtcgtcatttctcgatggccaacgagtacctgcagcgtcgcggccaggccccgatcgactggtcgctgccgccgcgctcggcactctga

SEQ ID NO: 513564 - DNA, 876 bp, Stenotrophomonas maltophilia
atgagccagaacacctctactgcccttgtggcaaacaatctcccgattcccagtgcgctcggttcgctggacgcctacatcggtgccgtgcaccagatcccggtgctgtcggtcgatgacgaacaggacctggcccgtcgcttccgcgacggcaacgatctggacgctgcccgcgagctggtgcattcgcacctgcgcttcgtggtgcacgtggcccgcggctacaacggctacggccttgccctgggcgacctgatccaggaaggcaacatcggcctgatgaaggcggtcaagcgcttcgacccggacatgggcgtgcgcctggtttccttcgcggtgcactggatccgtgccgagatgcacgagttcatcctgaagaactggcgcatcgtgaaggtcgccaccaccaaggcgcagcgcaagctgttcttcaacctgcgcaagtcgaagacgcgcctgggctggatgaacgcggcggaagtgagcgcggtggccaaggacctgaacgtgtccgagcgcgaggtcatggaaatggagtcgcgcctgtcgggtcgcgatatcgggttcgatgcgccgaccgacgaggacaacgaacacgcaccgccgtcgccggctgcgttcctggtcgccgatgacgaagacccgtcgatggcctacgagcgcgaggacagcgaagacaaccagatgcagctgctgcgcgaaggcctggcggaactggatgcgcgttcgcgtgacatcatccgccgccgctggctggatgccgacagcaaggtgacgctgcaggagctggccgacgagtacggcgtgtcggccgagcgcatccgccaggttgaagcgaacgcgctgaagaagatgaaggcgctgttcaccgcgtaa

SEQ ID NO: 513565 - DNA, 1284 bp, Stenotrophomonas maltophilia
atgaagatcctcgtcatcggctctggcggccgcgaacacgccctggcatggaagctggcccagtcctcccgtgtcaccgaagtgatcgtggcgcccggcaacgccggtaccgccagcgaagacacgtgccgcaacgtggcagtcaaggtgaccgatatcgacggcctgctggcgttggcccaggccgaaggcgtagcgctgaccgtggtcggcccggaagtaccgctggtggccggcgtggtcgaccgcttccgcgccgccggcctgcgcatcttcgggccaaccgccgccgccgcgcagctggaaggcagcaaggcctacgccaaggacttcctggcgcgccacaacatccccaccgcgtactacgccgtgcacagcgacgtggacgccgcgctggcgtatgtgcgcgagaagggcgcaccgatcgtggtcaaggccgatggcctggccgccggcaagggcgtgatcgtggcgatgagcctgaccgaggccgaggacgcggtgcgtgacatgctgtccggcaacgcgtttggcgatgccggtgcgcgcgtggtcatcgaggaattcctcgacggtgaggaagccagcttcatttcgatggtggacggcgtgcatgcgctgccgatggccacctcgcaggaccacaagcgcgtcggcgacggcgacaccggcccgaataccggcggcatgggcgcctattcgccggccccggtggtgacgccggaggtgcatgcacgggtgatgcgcgaggtggtgaaccccaccgtgcagggcatgatcgccgacggcatcccgttcaccggtttcctctacgccggcctgatgatcgatgccagcggcgcaccgaaggtgatcgaattcaacgtgcgctttggcgacccggaaacccagccagtgatgctgcgcctgcagtcggacctggtcgagctggtggaagcggccatcgatggccgcctggatgaggtcgaagcgcagtgggacgcgcgcccgtcgctgggcgtggtgctggcggccaggccgtacccggaagcgccgatcaccggcgacgtgatttccggcctggacgacgtgccggccagtgccaaggtgttccatgccggtacggcattggatgctcagggccacgtggtcagtgcgggcggtcgcgtgctgtgcgtggccgcactgggcgacagcgtgcgcgacgcgcaggccaatgcctacgccggcgtggccaaggtgagctgggccaacgcgttccaccgcaacgacattggctggcgcgcgatcgcacgcgaagagtga

SEQ ID NO: 513566 - DNA, 1584 bp, Stenotrophomonas maltophilia
atgactgctgatctgttgcccgtccgccgggccctcctctccgtttccgacaagaccggcctggtcgagctggccactgcgctggcggcacgcggcgtggagctgttgtccaccggcggcaccgccaaggcgatccgcgatgcgggcctggccgtgaaggacgtggccgaggtcaccggcttcccggaaatgatggacggccgggtcaagaccctgcacccgatggtgcacggcggcctgctgggccgctccggcctggatgacgcagtgatggccgagcacggtatcggtgccatcgacctgctggtgctgaacctgtacccgttcgaatcggtcaccgcccaggccgactgcaccctggccgacgcggtcgagaacatcgacatcggcggcccggccatgctgcgctcggcggccaagaacttcgcccgcgtggcggtggccaccgatccgtcgcagtacgccgagctgctggcctcgctggaggccaacaacggccagctgacggcggccacccgcttcgcattctcggtggccgcgttcaaccgcgtcgcccagtacgatgcggcgatcagcaactacctgtcggcggtcaccgccactgacgccgccgtgccggcccgtgccgagtacccggcgcagatgaactccaccttcgtgaaggtgatggacctgcgctatggcgagaacccgcaccagagcggcgcgttctaccgcgacctgtacccggtgccgggcacgctggccaccttccagcagctgcagggcaaggagctgagctacaacaacctggccgacgccgatgcggcgtgggaatgcgtgcgccagttcgatgcgccggcctgcgtcatcgtcaagcacgccaacccgtgcggcgtggccgtcggtgccggcaacggcgatgcctacgagctggcctacgccaccgacccgaccagcgccttcggcggcatcatcgccttcaacaagccgctggatgccgccaccgccaaggtgatcctcgaccgccagttcgtcgaagtgctgatcgccccggactacgagccggccgcgctggagtacgcgcagaagaaggccaacgtgcgcgtactgcgcatcccgcacggcgacggcctgaacaacttcgacagcaagcgcgtcggctcgggcctgctgctgcagtcctcggacaaccgcggcatgacccgcgacgaactgaaggtggtcagcaggctggcgccgaccgacaagcagttcaccgacctgctgtttgcctggaaggtcgccaagttcgtgaagtccaacgcgatcgtctatgccaaggacaaccgcaccatcggtgtcggtgccggccagatgagccgcgtgtactcggcccgcatcgccggcatcaaggccgccgatgcgaacctggtggtcgagggctcggtgatggcctccgacgctttcttcccgttccgcgatggcatcgatgccgctgcagccgccggcatcaaggcggtcatccagccgggcggttcgatgcgcgatgccgaagtgatcgccgccgccgacgaacatggcctggccatggtgttcaccggcgtgcgccacttccgccactga

SEQ ID NO: 513567 - DNA, 618 bp, Stenotrophomonas maltophilia
gtgtcgatctatgcattgaaaggacgttttcaggacctgttgcgtccggccgtacgcggtctgtaccgcatggggatcaccgccaatgcggtgaccgtgaccgcggccgcggtctcgctgctggtcgctgccgccgtctggtgctgcgcgccggcccagcccctgctgtacctgctgctgccgctgtggatgctgctgcgcatggcgctcaacgccgtggacggcatgttggcccgcgagttcggccagcagtcgcggctgggcgcctatctgaacgagctgtgcgatgtgatcgccgacgcggcgctgtacctgagcctgctcagcgtgccgggcgtgcgcccggaagtgctgtggctgctggcctggacggcggcgctgagcgagtacgccggggtgctggggctgatggtcggtgccagccgccgctatgacggcccgatgggcaagagtgaccgcgccttcgtcgtcggcgtgctgggtctgctgctggcgtctgagtgggttggcgcgatgacggtcactggcgtggctgcggccatggcggtgctgtgcatgctgaccatgatcaaccgcgtccgtcgcggactgcgggaaacggcggtttcgtcgaattaa

SEQ ID NO: 513568 - DNA, 1752 bp, Stenotrophomonas maltophilia
atgcgtcaggcgcaggaacgggaattccacagcttcgaccaggtaccgctgttctaccggtactgggcgggcaccaccgcaaccccggccacccgggccatcgtgctgctgcaccgcggccacgagcactccgggcgcgtcacccacctggtcgatgagctggacctgcccgacaccgccttcttcgcctgggatgcgcgcggcaatggccgttcgccgggtgcgcgtggcgatgcaccgggcttcccggcgctggtgcgcgacctggacagcttcatcgcccacatcggcgccgagcacggcattgcggtggaagacatcgtggtgatcgcgcagagcgtaggggcggtggtcgccgcgacctgggtgcacgattacgcgccacgcctgcgtgcgctggtgatggcttcaccggcgttcaaggtgaagctgtacgtgccgttcgcgcggccgggcctggccttgatgcagaagctgcgcggcaacttcttcgtcaacagctacgtcaagccgcagtggctgacccatgacccggcgcgggtggaaagctaccgtaccgatccgctgatcacccggccgatctcggtgcgcgtgctgctgggcctgtacgaagcggccgaccgcatcgtggccgatgcgcaggcgatcagcgtgccggtgcagctgctggtgtccggctcggatttcgtggtgcaccgtggcccgcaggatcgcttctatgagcgcctgtccagcccgatcaaggagcgggtgcacctgccgggcttcttccacgacacgctgggcgagcgcgatcgggcaccggcactggcgcgcatccgcagcttcatccaggcgcgtttcgccgaaccgttgcgcgagctgtcacggcgcgacgcgcaccgccatgggccgaccttcgaagagtcggagatcctggcctggccaccggaacgcaacagcctggccgacctgcgctggcgcgtggtacgtggcggcctgcgcttcggcggcacgctgtccgaaggcatcgcgctgggcctgcagaccggtttcgattccggtagcacgctggactacatctaccggaatgaggcgcgcggcaagggcccattggggcggatggtcgaccgcaactacctggatgcgatcggctggcgtggcatccgcgtgcgtggccagcacctgcaggaactgctgcgcgacgccgcacagcgcctgcgcgggcagggcacgccggtgcgggtgctggacgtggccgccggccatggccgctatgtgctggaagcactgggccagggcgagcagcgcgccgaccgcatcgtgctgcgcgacttcagcgatctgaacgtgacccagggccaggcgttgatccagcgcctgggcgcggccgacatcgcgcgcttcgagcagggtgatgcgttcgacccggcacagctggccaaggtcgatccagcgccgacgctggcggtagtctcgggcctgtacgaactgttccccgacaacgacgccgtgctgcgctcgctgcagggcattgccgcagcggtgccggtgggtggctacctggcctataccggccagccctggcacccgcagctggaattcattgcccgtgccttgaccagccaccgcggtggcgcggcgtgggtgatgcgccgccgtacccagcaggagatggacgaactggtgcgcctggccgggttcgagaaggtggcgcagcgtatcgacgacttcggcatcttcaccgtatcgctggcgcgccggaccgcgtga

SEQ ID NO: 513569 - DNA, 1329 bp, Stenotrophomonas maltophilia
atggcgacgctcgccgcatccccactggccgcagaggggcgcccctggcggcgcgccctgttgtggctggccctgctgggtccgttcttctttgccagttatggcttcgccaactggatggccggccgccacgctaccctgccggtgatggcgttcggctgggagacccgcatcccgttcgtgccatggacgatcgtgccgtactggtcgatcgacctgttctacgcggtctcgttcttcctgtgccggcaacggctggagctggaccggcacgcattgcggctgttgagcgcacagctgatcgccgtgagctgcttcctgctgtggccgctgcgcttcagcttcgagcgtccgcagatcggcggtgtgttcggctggctgttcgatgtgctgctaggcttcgacaagccgttcaaccaggcaccgtcgctgcacatcgtgttgctgatcgtgctgtgggtgaagttcgcacagtacctgcacggcgtgtggcgctgggtgctgcatgtgtggacgctgctgatcggcgtatcggtgctgaccacgttccagcatcatttcatcgatatcccgaccggcctgctggccggctggttgtgcgtgtggctgtggccggagcagggcacgccaccgctgcgtgcatggcgcacggcacgtgatgccaagcgctggcgcctggcaggggtgtacctgctgggggccgctgtgctgctggtgccggtggtgcttctgcgtggcgccgcgttgtggctgctgtggccggtggtgtcgctgctgctggtggcgctggcctatgccgggctgggtaccgcggtgttccagaagcgcgccgatggtcgcctgaccatggcggcacgctggctgctggcgccgtacctgggcgcagcctgggtcaattcgcggctgtggacgcggcgtgcgccgcagccggtgccggtgatggatgacgtgtggctgggacgcattccctgtgctgcgttgccaacaccgctggtcggcgtggtcgatacctgtgctgaactgtcctgccgcgcgccgggcgcggcgtatgccagcgtgccgatgctggacctggtggtgcccacgccggaacagctgcgcgaggcggccgatgccatcgagcgtctgcgcgtgcaggggccgctgctggcgtgctgcgcgctgggctattcgcgtagtgccgccagcgtcgccacctggctgctgcgcagtggtcgtgccgccgatgcgaacgcggcagtggcgatcgtgcgggctgcacgccccggcatcgtgctgcacgcggcgcatctgcatgccatcattgctgcggcaggagcgcgcgcatga

SEQ ID NO: 513570 - DNA, 438 bp, Stenotrophomonas maltophilia
atgagcacggttcccgatctggtgaccatgcacctgctgctgcgccaggggcgttggccggcgctgctgtcgctggggatgttgctggtggcactgctgctgctcggcaccgagccggggctggcgatgatcgctgccggcctgttgctgctcagtgttgccgcgggcatcgcacaggcctaccacgcgtggcgggtggggctggatgccagcctgctgcagctgctgcgcgatgaaggcctggagggcgaagccgccgcgcgccgcatcgatcagctgctgcacgacagtggcctgcgccgcgcgtcgcccgatgcgccactgcgtggctgggatgcgcgctggtccggcatgcgccgcctgctgctgcgccagtacctgctgaccgcagtgcagttcgcactgctggtgctggccgtggtgtggccgcagacgtga

SEQ ID NO: 513571 - DNA, 630 bp, Stenotrophomonas maltophilia
atgtttgccgaactgattgcccgcgcctgcagtggtgcgatccatgtggtgaccggcgcacgcgcgctgtggatcggttgcgcgccgtccagcgagcgccgcgtgtactacggcaaccacgccagccatggtgacttcgtgctgatctggtcatcgatgccgccggcactgcggcgccaggtgcgcccggtggccgcggccgagtactggcagcgtgatggcctgcgtcgctacctgatcgatgcggtgttcaacggtgttctggtcgagcgcgaggccggccatcgccagcaggacccgttgcaggtactgcgcgatgcggtggacgaagactgctcgctgatcctgttcccggaaggcacgcgcaatatcggcgatgaaccgctgttgccgttcaagagcggcatctaccacctggcgcggcaacggccggagctggagttcgtgccggtatggatcgacaacctgaagcgggtgatgccgaaggggcggttcctgccgttgccgctgctgtgcacggccaccttcggcacgccgctgcggctgcaggccgacgaggacaaggccgcattcctggcccgcagccggcaggcgctgctggacctggcgccgaatggaggtcgtgcatga

SEQ ID NO: 513572 - DNA, 996 bp, Stenotrophomonas maltophilia
atgagtttcgtgctggatgtatctggcgatctggcaacgcagagtgtcggccagcagaccggcctgctgtttgccggcgtcggcgcggtgctggtgctggccacgctggtggccgagaccctgcgctggcgccagcgcggtcagcccagcgcggtgatcgccaacctggtgtcgcgtatccgtgcatggtgggtgatggcgatcgtggtcgggctggcgctgttcttcggccgcgccggggtgatcgtgctgttcgcgatcatttcgttgttcgcgctgcgcgagttcatcaccctggcgccgacccgttcaggcgactactacgcgctgctggctgcgttctacatcgtgctgccgtggcagtactacctggtgtggatcgactggtacggcatgtacacgctgctgatcccggtctatgcgttcctgttcctgccgatcctgtcgaccatcggtggcgataccacgcactacctggagcgcaccgcgaaggtgcagtgggggttgatgatctgcgtgttctgcatctcgcacgtgccgctgctgctgaacctgcacgtgcccggtcacgacccctcgcgcaacgtgctgctgttcgccttcctggtgatcgtggtgcagtcctcggacgtgttgcagtacatctggggcaagctgctgggccggcacctgatcgcgccgaagctgtcgccgtcgaagacggtggagggcttcgtgggtggcgtgctgagcgccagcgcgcttggggcggcgctgtggtggatcaccccgttcacgccgctgcaggcgttcggcctgtcgctgctgatcaacctgatgggattctggggcggcctggtgatgtcggcgatcaagcgcgaccgtgggatcaaggactggggccacatgatcgagggccatggcggcatgctcgaccggctcgattcggtgtgcttcgccgcgccggtgttcttccatgtggtgcggtactactggaaggcgggcggcggcgggtga

SEQ ID NO: 513573 - DNA, 198 bp, Stenotrophomonas maltophilia; identical to SEQ ID NO: 493551

SEQ ID NO: 513574 - DNA, 768 bp, Stenotrophomonas maltophilia
atgtccgagccgaacccgccgcgccgccctttggccaccttcctgcgccccgcgtcggaaggcgaggccgcacctgcgaccgacgcgcgcacgcccgacccgtcggcgcatgacatccctgccgcgaagtccggggacccggtcgacgcggcgctgccgccgatggcggagacgcgacagctcgatgacaccgtcatcctcgacgaagcgcccgtgatcgaacccgtccttgccgtcccggccgcgcaggtggtggccggcgatgcgccgagcttcctgggcacttcgcggccgcgcgcgctgccgacgccgcgctggcactgggtgctggtcgccgggctggcactgctgctggtactgcagagcgtgctggccgatcgtgcgcgactggccgccgacgccggcaaccgcacctggctgggcgcactgtgcggcgtgctgcgctgcagcctgccggcctggcacgagccgaccgcgttcaccatgaccagccgcgagatccgccccctgcccggccaggccggtgtgctgcaggtgcaggccagcatccgcaacgatgcgcgctgggcacaggcctggccggacctgcgcctgtcactgtccgatgccgatggccgggtgatcggcagcggcgtgttcacgcccgcgcaataccttggcgaaagcccggccacgaccgtgctggaaccgggccagagtgcgcgcatcgcgttccgcgtgcaggagcccgccgcgtccaccgtcgcatttaccttcgacttcctctga

SEQ ID NO: 513575 - DNA, 921 bp, Stenotrophomonas maltophilia
atgccgttcctggaactgaccctgcgctgcaccgaagccacccagccccgctatgaaaatgcgctggaggacgtcggcgcactggccgtgaccctgcttgatgccgaagccgacaccagcaacgaacaggccatcctcgaacccggcgtgggggaaacgccgctgtgggacaccctggtgctgagcgcgctgttccccgccgacagcaatgcgctgctgctgctggccgccctggaatccttcgacccggaactggactggagcaatggcagcttccgcgccgtcgaagacgaagactgggagcgcgcatggctggaccagttccagccgatggatttcggcagccgcacctggatcgtgccgtggaaccatgaactgccggacgctgcacaggccgccgatgccgccgtggtgcggctggacccgggcctggccttcggctcgggcacccatccgaccaccgccctgtgcctgcgctggctggaccagctggccgtggacggccagctgcagggccagcgcgtgctcgacttcggctgcggctcgggcatcctcgcgctggccgcgctgaagctgggcgccgccgaagcgatcggcgtggacaacgacccgcaggcgctggtcgccaccgccgacaatgccgagcgcaatggcgagcaggcccgcatgcaggtgtacctgccgcaggacgaaccggtcgccacctacccgatcgtggtcgccaacatccttgcctcggcgctggatgcgctggccgagctgctggccgcacgcgtcgccgccggcggtcgcatcgccctgtcgggcatcctgcagggccaggaaggcgaactgctgcagcgttatgccgcgtggttcgacgatctgcaggccacccaggatggcgactggatgcgcatcaccggcacgcgccgcgcctga

SEQ ID NO: 513576 - DNA, 972 bp, Stenotrophomonas maltophilia
atggccttcgctccgaccctgaaaacctggttgctcgtgctgccggcggtggccgtgctgggcgtggccgggtatcgggccagcggccatgccgcgggcgtggcgtcgacgtcggcgtcgccggacctgccgctggtcatggccagccgtgacggcggagcgccgctgccggtggtgccggaagcattggcgcggcggctggcggctttcgagcgcggcaacacgctgccgtcgggcctgccgctggacctgcgcgccgacatcgaagacgccagcgacctgtatgcctacgcccagcgcctgcgcgcacaggccgacaacggcaatcacgaggcgcgctggatgctcagccgcgtctatgactattgcgcgcagtacgcactggatccgggtggctaccgcctggacaacaacgtactgagcgggttgggcctgactgcggcgccggcgatgatcgaggcacgcgagcgggtggcacagcggtgtggcggtttcgtgccgggcgacaagctgggcgcggcgctggtgctggccgaacgccgcaaggcggccgcgcagggcaacctggccgcggaagcgtcgctgttcgccgagggcgagcccttgcatgacagtgccgagtaccgccgcgacctggtcgagcgcgtgcgcacctcgcgcgaccccgaggcctacatggccatcgcgccagccatgggcgtgcgtgcggccggtgaccgcgcgcttgacgggctggtggcgggcgagcagctcagtgaacttgcatggcggcttgcggcctgtgaactcggcctggcctgtggagcggacagcgtgctggtcaacaatttttgtgcgaacggagggatctgttcgcaggatggagcgcaggatttccgggatttcgtgtatgacgctgcggtatcgcggcaaggtgctgggaaaatgaaggaatggatcaagcgattggttggaaagagggacgggcgatga

SEQ ID NO: 513577 - DNA, 375 bp, Stenotrophomonas maltophilia
atgaattaccgtcgattcctgcatggggccaagttctggttctgggtggcgctgttcgtggcctactcggctggggcggttggcctgctgatgatcgatacctacgaggaccgctaccggcatctgtcgaaggtggagctgaccacggtgaaggcgcaggaagacgtgcgccgcgccggtgccagccaggtcgctgcggtctaccgcgcgcagagtggcatgccattcgcttcactgccggccggcagcaccttccaggtggtgtggcccgatggttccaccgaaaccatggtgatcgtcgatccgacctcgcccaatggcgtgcggccgctggcccattcgcagattccggccgacgtggccgacaagcgctga

SEQ ID NO: 513578 - DNA, 1368 bp, Stenotrophomonas maltophilia
atgctcgacaaagtcgtcatcgccaaccgaggggagatcgcgctgcgcatcctgcgcgcgtgccataccctcggcatccgcacggtggccgtgcactccacggtcgaccgcaacctcaagcacgtggccatggccgacgagtcggtctgcatcggtccggcgccgtcgccgcagagctacctcaacatcccggccctgatcgcggcggcggaagtcaccgatgcccaggccatccacccgggctacggcttcctgtcggagaacgccgacttcgccgaacgcgtggaagaatccggcttcatcttcatcggccccaaggccgacaccatccgcatgatgggtgacaaggtcgaagccatccgcgcgatgaaggccgcgggcgtaccgtgcgtgcccggctcgggcggcccgctcggcgaggacatcgtcgccaacaccaagatcgcccgcgagatcggttatccggtcatcatcaaggcggccggcggtggcggtggtcgcggcatgcgcgtggtgcacgccgaagcgtcgctgaagacctcgatcgaaaccaccaagagcgaggccaaggccgcgttcggcaatggcgaggtctacatggagaagttcctggagaatccgcgccacgtggaaatccaggtgctggccgatggacagggcaatgccatccacctcggtgagcgcgactgctcgatgcagcgccgccaccagaaggtggtggaagaggcaccggcgccgggcatcaccgccgagcagcgcgagcagatcggcaaggtctgcgtggaagcctgcatccgcatcggctaccgcggcgcgggcacgttcgagttcctgtacgaggacggccgcttctacttcatcgagatgaacacccgcatccaggtggagcatccggtcaccgaaatggtcaccggcatcgacctggtggccgagcagctgaagatcgccgccggccagaagctgtcgatcaagcagagcgacgtggtgctgaccggccatgccatcgagtgccgcatcaacgccgaagacgccgaaaccttcgtgccgagcccgggcaccatcaccggcttccatccgccgggtggccccggcgtgcgcgtggacacccacatctacagtggctaccgcgtgccgtcgaactacgactcgatgatcggcaagctgatcgtgcacggcccggaccgcgaaaccgccattgcccgcatgcgggtggcactgagcgaaatggtggtcgatggcatcaagaccaacatcgccctgcagcagcggatcatgcgtgacaagggcttccaggccggtggccagaacatccactacctggaaaagcgcctggccgagcgcaagaacaagccgattgcattgacctga

SEQ ID NO: 513579 - DNA, 480 bp, Stenotrophomonas maltophilia; identical to SEQ ID NO: 493545

SEQ ID NO: 513580 - DNA, 420 bp, Stenotrophomonas maltophilia
atgccgccgcgcgtgcttgccggcatcctgctgtgggccggtctgtgcggcgccagtgtcgctgccgagcgcgcggccgcgggcatcgactgcgcacaggcaagcggcgactacgagcgcgacatgtgcgattccgatcgcctggatgatgccgacagcgcattgaacgccgtctacgcgcaggcgcgtggcgaactgaaggcgcaggcaaccgatggcagctgcagccgctgcgcggcggccgaacagcagctggtgaaggcccagcgcatctggatcaccttgcgcgatgcagattgcgaggcggtgtatgccttcaatgcagacggcacctcgcgcaaccccgcgaagatgcaatgcctgatcacccagacgcgcgaccgtacgcggcagctgcgcgagttctacgaactgctttga

SEQ ID NO: 513581 - DNA, 450 bp, Stenotrophomonas maltophilia
atggcgaagctgctggtcctgcacggccccaacctcaacctgctcggcacccgcgagccggaggtctacggccacaccacgctggccgacatcgaccaggccctggctgcccaggcatcggccgccggacacaccgtggaacggctgcagtccaacgccgagcatgtgctggtggaccgcgtgcaggctgcgcgcagcgacggaaccgctttcatcctgatcaaccccgccgccttcacccacacctcggtcgccctgcgcgatgcgctggcggcggtggcggtgccgttcatcgagatccacctgtccaacccgcatacccgtgagccgttccgccagcacagctacttcagtgacaaggcagtgggcgtggtatgcggtttcggtgccgacagctaccgctacgcgatggacgcggcgctgctgcgcgtgcaggcggccagcgcgtga

SEQ ID NO: 513582 - DNA, 729 bp, Stenotrophomonas maltophilia
atgcacccggacccgcagaccctgatcgatgccggcgacgatgacgcccattgggccgacctgctttcacccgcgcgccgtcgcctgatcgcgtcggccgggctggccgctggcggcctggccagcgcgtcggctgccaccgcagccgcgcgcagcgacaacgccgtgaacaccaccgaacccgggcgacccggcttccgcgccatcgttccgccggcgcccgagggccgcagcccttggggccaggccacggccagcgagcctaccccgcggccggccagcgtgcgccccggcgaggccacgctgcccacccggccacgtgcctacaccgccatcaagagctaccacgcccacatctacttcgacgaggacagcttcgagaaggccgcgctgctgcggcgctgggccgccgagcgcttccctgtggagctgggcaactggaaccttgagccacgcgggccgcacgtcaccccgtcgttctatttcggcttcaccaacgacctgctgccggtgctggtgccctggctgcagctcaacagcctgggcctgaccatcctgatccaccccaataccggcgatggccgcgctgaccatctgcattacgcgttgtgggtgaaccgcgcgcagccggtcaatgcctacaactggccggcgccgaagcccgggcagccggaaccgctggaagaggtgttcccgaacgtggtgccgacggtgccgctggagatctga

SEQ ID NO: 513583 - DNA, 828 bp, Stenotrophomonas maltophilia
atgaccccgcttgatgccgacacccagcgcaagcgcgcgcgtttccgccagctgcatgcgcgcggttgtttcgtgctgcccaatccgtgggacgtgggcagcgcccgctacctgcagcggcagggcttccaggcactggccacgaccagtgccggctgcgcctggagtgaagggcggccggatggggcggtttcgctgcaggccacactggaacatctgcggctgatggcggccgcgacaccgctgccgttgaacgccgatttcggtgatggcttcggcgccacgccacaggcagtgggcgaggcggtggcggcggccatcgacaccggtattgcggcgctgtcgatcgaggacgccagcggcgtggccgatgcgccgctgcggccgatcgggcaggcggtcgagcgactgtgtgcggcacgtgcggccatcgaccgcgcggggggcgatgtgctgctggtcgcgcgggccgagaatttcttcgttggcgtgccggatctgcaggacaccctgcagcgcctgcgcgcctatgccgaggccggcgccgatgtgctgtatgcaccgggcatcagcacgcccgaacagatcagcgcggtggttgccgctgcaggggcgaagccggtgaacctgctggtgggtggacggacaccgctgagcctgcaggacatcgccgcactcggcgtgcgacgggtcagcctgggcggtgcgctggcgcgagctgcgtggggtgggctgatgcaggccatcgagccgatcttgcaggacggccgcttcgatggcctgcagcaggcggcttcgggcgcggcgttgaacgcgctgttccgctga

SEQ ID NO: 513584 - DNA, 534 bp, Stenotrophomonas maltophilia
atgcaccggtatctgcttgcccttctgctggccctgccgatggcaatggacgttacgcccgcgctggccggtgaactcagtccggaagactcggccgcattgcgcaaggaggtgcaggcgatgatgggcgccttcgcccgtggcgataccgagctgatcatcgcgcgtacccatcccagcctgaagcagctggccggtggcgacgaggcctatgcgcgggcgacccgcgacaccgtgaaggcgctgcgcagggccggcgtcagcatcatcagcgacgaggcaggcgtgccgggccgcacctatgcggccggtgacgaggaagtctgcttcgtaccgcgccagtcactgctgcgcgtgcgcgaagcgccgatgcgcagcacgtcattcatggttgctgtgcgacgcgtcggtacaacgcaatggcgctatctggacggcgcggcgatgctggacaacccggcactgctgcggcaactgctgccggcgctggagccgggcgtgacgctgcccaggggtgggatggaagcgctgtag

SEQ ID NO: 513585 - DNA, 597 bp, Stenotrophomonas maltophilia
atgcacaccctcatcgttaccgcccaccctgaacccggcgcgttgacccatgccatcgccaggcgcatcggcgaagccatcaccgcgtcggatgccgccaacagcgtgacccacgccgatctgatggccgaaggcttcgatccgcgcttcaacatgcaggaccaggcgctgttccgtggcatcggcgcaactccggctgacgtcgccgccgagcaggcgcggctgcaggctgccgacacgctggtactggtctatcccctgtactggtggtccttccccgcgctgctgaagggctggatcgatcgtgtgttcacccagggctgggcctaccaggacggcgccgatggcaaggtgcagaaaaagctgcagcggttgggcgtgcatctggtcggcatcggcggggctggcgcggacatgatcgaacggcgcggctacggtgcggcgatgaagacccagatcgacatgggcatcttcgactactgcggcgcgcgcgtgctgtcgtccgacctgctgctggacgccgattccggtgcagccgaagcgcatctgcagaccgcgctggcgatcggccgtaaaatcggtgctccgatgcgctga

SEQ ID NO: 513586 - DNA, 594 bp, Stenotrophomonas maltophilia
atgcctgccaacgccgctcccacgcgccgccgattgacccgcgagcaacgcgcccgccagttgctggacgtggcctgggcgctggtcggcgacgaaggcaccgacgcattgacgctggggcggctggccgaggcggccggtgtgaccaaaccggtggcctatgatcacttcgtgacccgcaacggactgctggccgcgctctacgatgactatgacgggcggcagacggtggtcttccacgagcgtatcggtcgtgccagggcgcagctggccgatcgtgcggcggccatcgcctccggctacatcgactgcgtcctcagccagggcagtgaagtgcagggcatcctcgctgcgctggtgggcgcgccggaactccatgaagtgcgtcggcgctaccagcaggacttcatcgacaactgcgacacctggctgggcccgtttgcggccgatggcacggtccccctggccggacgctgggcgattctcggtgcggccgaagccctgtccgaagccgtggcggcaggcgcgctggacaaggtcggcgccgaggccgagctgcagcgcttgatcgtggcgacggtcaagcgacgctga

SEQ ID NO: 513587 - DNA, 795 bp, Stenotrophomonas maltophilia
atgcctgctcctgcgcctgcccacctgccggtctcgtccatcaccctggacgcggcaaccttcgcggtggtccaccagcacaacgcggacatcgcgcggcaaccggcctcgctgaccaagctgatgaccgcctacgccgcttacggatgcgtcgaagagaacggtggcacgtgggaccaggcggtcaccatcgccgacgaggatgtgcatgccgtagccgatgatgaaacacgcatgggcctggtgcccggcgaaacggtcacgctggcgcgcctgctggaagggttgatgatcgtctccggcaatgatgcggcgctggccatcgcacgccatctggacggatcacagcctgcgttcctgggccgcatgaactggcacgcgcgccagcttggcctgcgcagcacgcggttcgccagcgtgtccggcatcaccaccccgcaccatgcctccagcgcgcgcgacatggcggtactcgccgcctgcctgctgaatgaccatccgcagatcctggcaatcaccgcgcagcgcacgttcgcgcatggccgcttcagccgcagcaaccagaacgccctgcttggcgaagacggcgtggatggattgaagaccggctacacccaggccgcaggcttctgcctggccgccactgcctgccgggctgtgcccgggcggaacctgccggtacgcctgatcaccgtggtgctgggcgctgaaagccgcgacgcacgcgatgcccttgtgcgcgagaggctggccgccgggtttgcggcgctggccgacaccaccgccgacgcctga

SEQ ID NO: 513588 - DNA, 567 bp, Stenotrophomonas maltophilia; identical to SEQ ID NO: 493536

SEQ ID NO: 513589 - DNA, 144 bp, Stenotrophomonas maltophilia
atgaacatctacggcagcctgttgttcctgcagggccacgtggccaacgccgaactggcccggcagctggcccgcccgtccaccggctcccccacgggtgcgccgcaaccggccgcgccggttcagaaaccgcgtggccgttga

SEQ ID NO: 513590 - DNA, 900 bp, Stenotrophomonas maltophilia
atgtcccgtccgccccttcacgccctgcagggcttcgtggccgccgcgcggctgggcaacctgtcacgcgcagcggcgtcgatgagcctgaccgtcagtgcgctcagccatcagatgcgccagctggaagagcggctggggcagccactgctggtccgccagccacgcggcgtcaccctcaccctggaagggcagcgcctgctcgaccaggtcggcccgcatctggatgcgatcaacgaggccttccagccctatgccgcacgcgccgagcacgtgctgacgatcagcgcggtaccgtcgatggcgtcggcgtggctggtgccgcgcttggggcacttcgttgccgagcatccacagatcgagatcaacctgcagtcgagtgaacgcctgattgacttcgagcgacagcgccagttcgacgccgcgctgcggctgggcagcgggcagtggccgggcctggtggtggagccgctgttcgacgagtggctgctgccgatggccagcccggcgctgatcgaacgcatgggagggatcgaccgcgtgccgctgaaccagtggccgctgctgggggatcccgatggcgcgtggggcgcctggttcgcgctgagtgggcagaacccgccgccgcgcttcgtggcggtgctggatgattcggaggcgcatcaccgtgcggcgctggacggggtgggcgtagcgctgggacgggtgacgcgggcgcgcctgctgctggattccggccaactggtggcgctgtccagcctgcgactgaaaaccgcctggccgcattggctggtctacccgcagcgctcggcccgccatcgcggcttcctggccttccgcgactggctgcacgctcaggcggccgagcacgtccggcacatggcagacgcgcatttatag

SEQ ID NO: 513591 - DNA, 717 bp, Stenotrophomonas maltophilia
atgtccctggccgatcatcgtggtgcgctggcaccgctgggcttcctgcgcgtggccatcaacctgggcaatccagtactggcgcagggggacgcgcgctcaccgcgcgggccgtcactggaactggccacggcattggcgcagcgcatgggcgtgcaggcacgcttcacctgccacgacgccgcggccgcggtggtcgctgcagccagcaaggatgcctgggacctggccttcctggccatcgatccggcgcgcgccgaccgcatcgccttcagcgccccctatgtggagatcgaaggcacctacctggtgcgcgaggacagccctgcgcagcaggtggccgacctggaccgcgatggcctgcgcatcgcggtcggtcgtggcgccgcctacgacctgttcctcagccgcgaactgcgccacgccatgatcgagcgggccgagacgtcggccgctgccatcaccctgttcgatctgcagcgcctggatgccgccgccggcgtgcgccagccgctggccgcctgggcgcaggcgcatcccggccaccgcgtgctggccgaccgtttcaccgtgatccagcaggcggtcgcggcgccggcctcgcgcccggccgatgcattgcaggcgctgttcgaggaagtggaggcgatcaaggcaggctcgttgctgggcgaagccttcgcccgtgccgggcaggcggttacgttggtacggtga

SEQ ID NO: 513592 - DNA, 372 bp, Stenotrophomonas maltophilia
atgaaccccatcctgcacgtcgagataccggtcactgacctgggccgggccatcacgttctaccagcactggctgcaggtggcggtggacgaaccgatcctgctgcacgactgcaggatggcttacctgccgtttgccgatgaggccaccggtgccagcatggcgctggtgcggggggccgactatctgccctccgtccacggtgcgcgcatctacatcggggttgatgacctggatgccagcctcgagcgtgcgctgcaggccggggccgagctgcgcttcggcccggccgatgccggtgactggcgcgtggccgagatcgccgacagcgaaggcaatcgcattgcgctgcaggcgcgcgtggttctgtag

SEQ ID NO: 513593 - DNA, 840 bp, Stenotrophomonas maltophilia
atgacgacgctcgatgtcccccgctacctgcaacgcctgcagctggatgcaccgccaccgctgacgctggcgggcctgaccctgctgcagcagcgccacaacgcactgctgccgttcgaaaccctcagctgcctgctgcgcgatgcagtaccgatcgacctggacagcgtgcagcgcaagctgctcgacgaccgtcgtggcggctactgcttcgaactcaacggcggcctgctggcactgctgcaggcgctgggcttcgatgcacagccgttgagcgcgcgcgtgctgctggccgcccaggacggcgaactgaccgcacgcacccacctgctgctgcgtgtgcaggtggacggcgatgactggctggtggatgccggtttcggcagcctgaccccgaccgtaccgctgcggctgcatgatccgcagccgcaggccacgccccacgagcgcttcctgttgcagcgcctgcccggtgagggggatttcgtgctgtccgccgagtccggcgatggctggcgggcgatgtatcgcttcgacctgcacgcgccggcaccgatcgacaacgtcgtgggcaactggtacgtgtgcacccatcccgattccagtttccccggccagctgcgcgcatccctgaccgggccggactggcgacgcaccatcggcagtggcaactacaccgagtaccgtcccggccaggcaccggacaagcgtccgctgcgcgatgtgggcgacgtgcgcgaggtgttgcagcagcgcttcggcatgcagctgccggacgacccacggctggacccggcgatcaacgactggctgcagcgctcacgctcggccacggtgtag

SEQ ID NO: 513594 - DNA, 2538 bp, Stenotrophomonas maltophilia
atgtcggccgtcgtcccccacctccggtccctgcgcatgcggcttgccgcactgcgctcggcgtcccccggcctgctgctgtggctgcagccgcatcggctcagtgtggccagcaagctcaaggcgaccctgtgggtctgtgggctgggcctgatcgcgatcgccgccgtctacgcctggaccggccatgccagcacgcaggcggcgcgcagccaggccagctaccagcacggcagcgatctggccgcgagcgtggccacgcgggtggccgaggcgcgtcgtctgcagacccagtatgcacgtagtttcgacgatgccgaccgcgcgcagctgctggcgacgcagaaggcgctccaggccgatcttcaggcgctgcgcgcgatgccgatggatcccggccggcgcgaggcgctgcaggcactgaccgaagccgccggcgcgttctcgcagggtgtggccgccctgttcgaacgcgtcgatgagatgggtcgtggcgatgccggcctcgccgcgcaattgcagcaggccgccgacgccctgcaggcgcaggtggatgcgttgcagcggccttcgttggcgttgtccctgcagaagatgcgccgccaggaggcactgctgctgctcgatggtgactccacccatgccgaccgtgcgagcgaagaaaagctgccgttcgatctcgcactggtgggcctgccgaccgatgcgcaggatgcccttcgtaacggcatggaggcctatcaggccgcattgctgggctataccgccgcccgcgtgggcctggatgtagaggcgcaatcgctgctggataccgccgccggcgtggcgccggcgctggccgtcttccagcaggcccaggtggcggcgctggccaaggcacaggcgcgccagcaggccggcgcacgcaccatgagcgtgctgttcgcggtgaccctgctgctggtcgccggtgtgttgatcaccagcctggtgctggtgcggcgtgcggtgcgccagccgatccaggacaccctgcgtttcgccagcgacatcgccgacgaccgactcgacaccaccctgcgcgtctacaacgccaacgatgaaatcggccagctggcgcagcgcctggtcgacatgcagcagcgcctgcgcgcgcgcatcgagaccgagcgtgccgtggcgcgcggcaacacccgtgtgcggcaggcattggacagtgcgcagaccgggctgatggtgatcgatgccgagggccgggtggcctacgtcaatccggcactgctgcagcaactcgagcgcgaggccgaagatctggtgggcagcgatgccgtgcgcctgcatccggcgctgaccagcctggccggcgcgcgccagcgcgaggagcgcgagatcggccatgccggcgtgcgctaccagctgattgccaaccccatcatcgacgaagggcagttcctcggcgtagcggtggaatggcgcagtcgtgcgctggagacgctgctggaaaccgaggtcgctgccctggtcgatgctgcagcacgcggcgacctgcatggccgtatcgtgctggagggcaagcagggcttcgtgcgcaccttgtcgaccagcatcaatcgcctgctggccacctttgaaaccaaccttggtgacctgcaggcactgctggctgcgctggcccgcggcgacctcagcgtgcgcatggagggtgacctgcagggcgtgttcgcgcgcatgcgcgacgatgccaatgccaccgtcgcgcagctgggccgcatcgtcacccgcatccagcaggccacctccagcctggataccggcgttggcgagatcgtcgccggccatcacgatctgtcgcagcgcaccgagcagcaggccgccaacctggaagagaccgcggcgtcgatgcaggagctgaccgataccgtcggccgcaacgccgatgccgcaggccgcgccgatgcactggtgcagggcgcggcggcggtggcccagcggggtggcgaggcggtcggccaggtggtcgcgaccatgcatggcatcagcgaagcctcgcgacggatcggcgacatcacccagttgatcgacggcatcgccttccagaccaacatccttgccctcaatgcggcggtggaagcggcgcgtgccggcgagcagggccgcagcttcgccgtggtggccgccgaagtgcgcctgctggcgcagcgcagtgccgaggcggccaagcagatcaaggggctgatcgaggattcggtggcgcgtgtcggccagggcaaccagcaggccgcgcaggccggcaccacgatgggcgagatcgtcggcagcgtgcagcagctggccgagctgctggcaggtatccgcagtgcgtcgcaggaccagcatgcgggcatcgctcaggtgaaccagaccatcgtgcagatggaagccagcacccagcgcaacgccagtctggtggaagaggccggtgcctccacggcgcagatgcaggcgcaggtgcgtgccttggcagaagccgtgggcgcgttccgcttgcagtcgatgccgcaggcgcgcgcggcggcctag

SEQ ID NO: 513595 - DNA, 2523 bp, Stenotrophomonas maltophilia
atgttcaagaacgtcctgttccaactgcattggctgctgggcattaccgccggtgccgtcctggccctgatgggcctcagcggcgccatgctgtccttcgaggacgagctgctgcgcgcggccaatcctggcttcgctgagatcgccgagcaccatgcggacggccagcatccccttgcactcagcgaactggtgccgttgctgcaggctggcagcgagcgccccctgcaacgcctgcgcgtggatgccaccggacagcggccgtcggtcgcgcgctttgccggcggcaaggaacactgggtgtacttcgatccgtacagcggcgagcgcttcagcgccctgcgcgggcaggcattcttcgacgtcgtcgaggacctgcatcgccacctcgctgccggtgagcgcggcaagtggatcaccggcagctgtgcaatcgcgctgctgttcttcaccctgtccggtctctacctgcgctggccacgacgctggtggcactggcgcagctggctggcggtggagtggacgcgcagcggccgaggcttcctgtggagcctgcactcggtggtcggcacctgggtgctgctgatctacctgatgagtgcgctgaccggcctgtggtggtcgtttgactggtaccgcaacgcggccaacacgctgctcggtgtggcgccggcggcaaagcacacggttgccgccgacgcggcactggacgtccatcgcatcgaggccacgctgtacgcgctacccggcgtgcgcaccggcttcatcgacctgcgcctgccggagaagccggggcaggcgctgaacgtgcgggtgatggccggtgatccgtcgcagcgcggcggccaccacgaccgtgcgcatgacctgctgcagctcgatccggccagcggcgcggttctcgatgcccgcccgtacgcacgccagggcgcgggcggacagctggccaccagcgtgttcgcgctgcattcgggcagctacttcggtgtgcccgggcgcgtggtggtgatgctcagcagcctgggcatgagcctgttcttcatcaccggctggatgctgtacctggaccgccgccgcagccagcgtgcagcgcgagggctgcgccgcgcgctgccggccacgaccaccgatggccgtggtccgccgtggctggtggtgcatgccagccagagcggactgggcgaacaactggcgtggcgtgcggccgcgcagctgcaggcgtccggtcatgcggtgcaggtgctatcgctggcccgcgtcgatgccgcgacgctgcaggccacctcccaggcgctgctcgtgctgagcacgttcggcgacggcgagccaccggatgccacgcgccgcgcggcgcggctgctgctcgcacaacgcctggacctgtcgcgcctgcagttcggcctgctcgcgctgggcgaccgccagtacccgcattactgcggcttcggccgccagttcgatggctggctgatcggcaacggcgcgcgcccgctgttcgagcgcatcgatgtcgatgccgcttcggtgccggcattgcgccaatggcagcagcagctgggtacgctcaccggcatcgtcaccgatgacagcgtgctgcctgcggctacgcagatgcatgagtggcgcctgctcggccgcgaccacctcaacccgggcagcgtcggcggagccatctggcgtatccgtcttgccgcaccggccgacgtgcagtggcaggcgggtgacatcctgcacatcgcaccccgccacaacgcgcggcatgccggtgccgtgctgaagggacacggtctggatccgctgcagcccctgctggtcgatggccatccgcgcacgctgctggcgctggccagtgaacgcgagctgcccgaggccgatgccgcgctggcggtgcaggatgcctgcctgtggctggccgggctgccgctgctgcccagccgcgagtattcgatcgcctcctgcacggatgatggcgtggtggagctggtagtgcggctggtgcatgacgcctccggtcgcgccgggttgggctcgggctggctgtcgttgcatgcaccgatcggtgccggcatcgtcgcccgcgtgcatcgcaaccccggtttccatcgcgtcagcggcgcgccgatggtgctgatcggcaacggcaccggcatcgccgggctgcgcagcctgttgcgcgaagctgcccacgcaggcgagcgcgggcactggctgctgttcggtgaacgccagcgcgcacacgacttcctgttcgccgacgagatcgaagcctggcaggccaatggccatctcacgcgggtggacctggcgttctcgcgcgatggcgagggtggttacgtgcaggatcgcctgcgtgcggccgtcgatgcgctgcgcgactggatgcagcgcggtgcggtgatccatgtctgtgggtcgttgcagggcatggccgaaggcgtggaccaggtgctgcgaaccgcgctgggtgatgaagcggtggaaacgctgctggaaaacgggcgctaccgccgcgacgtgtattga

SEQ ID NO: 513596 - DNA, 564 bp, Stenotrophomonas maltophilia
atgaagtggcaacggccagcgctgctgtggacagcggtgctggccgctggcctcggcctgtgggccgggcatcgattctcacccggcccgtctgcaccggccgcggcaacgacggcttccacagcgacggccgtgaagcctgccctgcaggtgggtgatcccttgccggcgctgatcctgccggacctggcggaacaaccgctggacctgcgcgcccgcttcgccggccggccgctgctgatcaatgtctgggccagctggtgtgcgccctgcgtggaagagatgcccgaactggcccgcttcgccgaagcccaaggcaacaacggtgtgcaggtgctgggcattgcgctggatgccccggacgacgtgcgcgctttcctgctgcgggtgccggtggactacccgatcgtggtcgagacgccggggccacgcgatgccagcgtgcaactgggcaatacgcagggcctgctgccctacagcgtgctgttcgatgcacaggggcggcgggtgaaggcaaagctggggccgttcgcccacggcgagatcgacggctgggtgaagtga

SEQ ID NO: 513597 - DNA, 2382 bp, Stenotrophomonas maltophilia
ttgaagactctgtttgcgcgcggcgccgccttgtgcgccctgttgtggctctcgctgccggccttcgcgctggatgagaaggacctgctgccggtggaccaggcgttcgcgctgaccgccagtgcccccgaacggggccaggtgcaactgcagttcaagatcgcaccgggcttttacctatatcgccaccgcaccagcgtcaaggccgacccggccttcaatgccggcgcgctgcagatgcccaagggcgacaagcaccacgacgatttcttcggcgaagtcgagacctatcgcgagcgcctgcaggccaccctgcccggcactccgtccgaggctgccggcaccatcagcctggaagtgcgttaccagggctgcgccgatgccggtgtctgctacccgccgcagaagcgcgtggtgcaggtcaccctgccgggcgccggtgcggcggcggcggtgcctgccgcgcgtgccggtgcggccagcccgttcaacaacccgctggccggtgccggcaacagcggtggcctgcgcctgccgggcgcggccaacaacagccaggccctgccgctgccgtcggaacaggcgttcggcttcgatgccatcgccagtgacggcaacaccctgctgctgcgcttcagcccagcgcccggctattacctgtatcgcgaccgcacctcgctgaagctggaaggcagcgccggcgtgctggccggcaagccgcgctggccagccgcgcaatcgcatcgcgacgagcacttcggcgatgtctcggtctacttcaaccaggtggaagtgccgctgccgctgcgccgcactgtcactgatgccgtcgacagcaccttggtggtgaccttccagggctgccagaccgatggcatctgctacccgccgatgacccgccgggtgaagctgtcgattcccgctggcaagctgtccgccagcattgaccaggcgccagcgcgcaacgaggtgatcagcccgctgcccgccgccggcgtgccacgtgaatccgccaacggcgcaccgttgcgcctgctgccgaccgtccccaacgacggcattgccactcccgccgccagcggcagtgagggtgcgcgcaatgagttcgccgccgacgcgcgcgatggcaacgcactgcgcacgcgcccaccggcgacaaccccgaacccggaccgttcgttcgtgtgggtgctgctgctggcgctggccggtggcctggtgctgaacctgatgccctgcgtgctgccgatcctgtcgctgaaggtgctgagcctggcgcagagtggcgaaagccctgagcgggcacgcagccatgccctctggtacacgctgggcgtgctggtcgcgttcgcggtgatcggcgcgctgatggtgggcctgcgcgcgatcggcaacgccgtcggcatcggcttccagctgcagcacccgggcgtggtggcggcgctggcctacatcatgttcgcggtgggcctgagcctgtccggcgtgtttaccctcggcggtggcatcggcaacctcggccagtcgctggccagccgcagcgggccggccggcgatttcttcaccggtgcgttggcctgcctggtcggcagcgcctgcgtcggcccgttcatgggcggggcgatcgcctacgcgttcattgccccgccgctgaaggcgatgaccgtattcctgttcctcggcctgggcctggcgctgccgttcctgctgatcggcttcgtgccagcgctggcacgccgcctgcccaagcccggcccgtggatggaaacgctcaagcacgtgctggccttcccgatgtatgccaccgcgctgtggctgctgtgggtgctgggcaaacagcgcggcgtggacggcatggcactggtgctgggtggcctgctgctgttcgccttcggcctgtggctgttcgagcgcaatcgctggaccggctcgcgtgcggtgaccctgctcggcgtgctgctggcgatcggcgcgctggttcctgcctggggcgtgacccagctggcaccaccggcgcgggccgcacaggccgccagcgagaacgtggtcgagtattcgccgcagttgctggaccgcctgcgtgcggacaaccgcgtggtgttcgtcaacatgactgccgactggtgcgtgagctgcaaggccaatgaacgtgccgtgctgtcgcggccggagttcaaggaactgctcaagcgcaccaacgcggtgtacatgcgcggtgactacaccaacgtcgacccgcagatcaccacgttccttgaagagcacaaggccgtgggcgtgccgctgtacgtggtgtacggcccgggtgcgccgccgaccgtgctgccgaccctgttgacccaggcggtggtcgaggaagcgctgctgcgcaccgcacgatga

SEQ ID NO: 513598 - DNA, 339 bp, Stenotrophomonas maltophilia; identical to SEQ ID NO: 493526

SEQ ID NO: 513599 - DNA, 1791 bp, Stenotrophomonas maltophilia
atgcgattgctgtccccgcttgccgccgcctgcctgctggcactggccgccgcgccggcccaggccgaggttttcatcaacgaactgcactacgacgacagcaccgccgccggtgacgtcggcgaagccatcgaagtggtcgccaccgccggcgaggacctgtccggctaccgcctctacctctacaacggcagcaatccttcggcggccgcggtctacgccaacaacccggtcccggccggcaccgccgccggctgcggcagcgcgaccatcgccgtggtcaactacctgaccaacggcatccagaacggccccaacgacggcatcgccctggtcgatgccagcggcaaggtggtccagttcctcagctacgagggcgccatcaccgcctccggtggccctgccgccggcatgaccagccagaacatcccggtggccgagaccaacagcacggccgcgggcacctcgctgcagctgaccggcagcggcagccagtacacccacttcacctgggccgagtcggccaggcagaccttcggcagctgcaacaacggccagaccttcagtggcggcggaaccccgggcccgaacacaccgccgtcggtctccaccaccaccccggcgcagggcagcagcaccttcccggccgccgccgacctggaagtggtgttcagcgagaccgtgaacctggccagtggcgccttcgccctgagctgcggcacctccggcagcgtgccgttgaccttcccggccagcggccgcagcgtgaagctgtccaccaacactgcgctggtggccggtgaggcctgccgcttcgacatccgcgccgcgcgcatcaccgacctgcagggcgcgcacccggccgccgacagccgcatcgccttcaccgtggccagcaccggcggcaatccggacccgggcaacccgggcgtgccggccggctattactccaaggtcaacaccagcagccccagccagctgcgctgctcgctgcatgccaccatcaagggccacaccgcctacccttacagcggctcgggcaccagtacctggaccattctggaaatcgccgacgaggatccgaacaattccggcaggatcctcgatgcatatcgcaaccacagctacgccaaggtgaccgatcgcgccggcagtggcagtggcctgaagtacaaccgcgagcacacctggccgaactcgctgggctttgccaccaccaccggtgacaagggcctgccgtacgcgccgtataccgacacccacatgctgtacctgaccgacgcgcagtggaacgccgaccgtggcaacaagccgttcggcaagtgcgacgccaactgcggcgagcgcgccaccgaggccaacaacggccagggcggcggcagcggcggctatccgggcaactccaactgggtgcgcacgccagacggcaacaccggcaccttcgaggtgtggggcaagcgcaagggcgacatggcgcgtgcggtgatgtacatggcgatccgttacgagggcggcaaggatgcggccaccggccagtccgagccggacctggagctgaccgacgaccgcagcaaaatcgtcaagaccagcagttcgccggcctacatgggcctgctgtccacgctgatcgactggcacttgtccgatccgccggatgatgccgagcgtgcgcgcaatgacgtgatctacagcttccagggcaaccgcaacccgttcatcgaccaccccgagtgggcaaccccggccctgttcacctcggccaagccggccacctgccagctggccaactga

SEQ ID NO: 513600 - DNA, 126 bp, Stenotrophomonas maltophilia
atgaaaaaatttttccgcccgcgcgcctcggccaaggcgtcggtcttggacaatttcggtgacaagcgtcgcactgtcagatatctgacgttcatttacgacaaagtgtcactggatcggccttag

SEQ ID NO: 513601 - DNA, 288 bp, Stenotrophomonas maltophilia
atgagcatcaagccgctgcacgaccgcgttgtggtcaagccgatcgaagccgacgaaatctccgccggtggcatcgtcatccccgactcggccaaggaaaagtccaccaagggtgaggtcgtggccgtcggccccggcaagccgctggacaacggcaacgtgcgcgcgccgtcgctgaaggtcggcgacaaggtcatctacggccagtacgccggcagctcgtacaagagcgaaggcgtcgaatacaaggtcctgcgcgaagacgacgtgctcgccgtcatcggctga

SEQ ID NO: 513602 - DNA, 1650 bp, Stenotrophomonas maltophilia
atggctgccaaggatattcgtttcggtgaagacgcccgttcgcgcatggtgcgcggcgtcaacgttctcgccaatgccgtcaaggccaccctgggcccgaagggccgcaacgtcgtgctggaaaagagcttcggcgcgccgaccatcaccaaggacggcgtctccgtcgccaaggagatcgaactggctgacaagttcgagaacatgggcgcgcagatggtgaaggaagttgcttcgcgcaccaacgatgatgccggcgacggcaccaccaccgccaccgtgctggcccaggccctgatccgcgaaggcgccaaggccgttgccgccggcatgaacccgatggacctcaagcgcggtatcgacaaggccgtctcggccgccgtcgccgagctgaagaacatctccaagccgaccgccgacgacaaggcgatcgcccaggtcggtaccatctcggccaactcggacgagtcgatcggccagatcatcgctgacgcgatgaaggaagtcggcaaggaaggcgtcatcaccgttgaagaaggctcgggcctggacaacgaactggacgtggtcaagggcatgcagttcgaccgcggctacctgtcgccgtacttcatcaacaaccagcagtcgcagaccgctgacctggatgacccgttcatcctgctgcacgacaagaagatctccaacgtccgtgacctgctgccggtgctggaaggcgtcgccaaggccggcaaaccgctgctgatcgtggccgaggaagtcgaaggcgaagcgctggccaccctggtggtcaacaccatccgtggcatcgtcaaggtcgtggccgtcaaggccccgggcttcggcgaccgtcgcaaggcgatgctggaagacatggccgtgctgaccggcggcaccgtgatctccgaagaagtcggcctgtcgctggagaaggccaccataaaggacctgggccgcgccaagaaggtgcaggtctccaaggagaacaccaccatcattgacggcgtcggcgacaaggccaacgttgatgcacgcgtggcgcagatcaagacccagatccaggacacctcctcggattacgaccgcgagaagctgcaggaacgcgtggccaagctggccggcggtgttgccgtgatcaaggtcggcgcctcgaccgaaatcgaaatgaaggaaaagaaggatcgcgtcgacgacgccctgcacgcgacccgtgcggccgttgaagaaggcgtggttccgggcggcggcgttgccctggtccgcgcgatcaccgcgctggccggcctgaagggcgccaacgaagaccagaaccacggcatccagatcgccctgcgtgcgatggaagccccgctgcgcgagatcgtggccaacgccggtgacgagccgtcggtcatcatcaacaaggtcaaggaaggcaccggcagcttcggttacaacgccgccaccggcgagttcggcgacatgctgcagttcggcatcctggacccgaccaaggtgacccgttcggcgctgcagaacgccgcctcgatcgctggcctgatgatcaccaccgaagccatggttgccgaagctccgaagaaggacgagccggccatgggtggcgccggtggcatgggcggcatgggtggcatgggcggcatggacttctaa

SEQ ID NO: 513603 - DNA, 612 bp, Stenotrophomonas maltophilia
atgcctacctccttcatcgtcgtcgacgacttcctttctcctgccgatgcgcaggggctgcgccaggcggcgctgggcctgacctatccggtgcaggagggtgcattccccggccgcaattcgcagcagcggctggaactggatgggctgtccggcgcggtctcgcggctggtcaacgaaccgctgcggccggtcaacccactgcagtcgcacggcaagttccgccttaccctggccggtgacaccggccgcgccaaggtgcacgccgatcactcgcactggtcgggcatcctctacctgagtgcaccggagcactgcgagggcggcaccgagttcttccgccaccgccgtaccggcaccgagcgcatggccctggatgcagcggagctggccgcattgggctatgccaacggcggcgacatgcatcgtgacatcatcgagcgcgacagcaacgacgacagccagtgggaaatgaccatgcgcatcccgatgcgtttcaaccggctggtgctgctgcggccctggttctggcataccgccgggccagcgttcggcgaccgcccggagaatggccggctggtgtacctgatgttcttcgagcaggcgcgctga

SEQ ID NO: 513604 - DNA, 1164 bp, Stenotrophomonas maltophilia
atgtgccgtgccaccctgatgttgctgacgctgctcccgctggcggtactggccgcgccgccacccgtgccctcgcccactcgcatcgatgccgaagcacggcggctgatgcaggcggcccatgcgcgcgggatggcgctggcggtgatcgatgacggcaaggtggtgcatgtggccgcctacggtgaacgcaacgccgcaggcgagccgctgcgcaccgacaccgtgatgtatgccgcatcgctcaccaagatggccttcggccacctggtcgcacagctggcgcaggacggggtgatcgatctggatgccagcatcgccacagctctggacgtgccgctgccagactacccgcccgaaccgaaaaagtacgccgactacagcgtgctggcgagtgatgcacgctggcgccggctcacgccccgaaagctgctgaatcacgccagcggctttgccaacttcggctttctcgaaccggatggccggttgaagttccacttcgagcccggcagccgctacggctattccggcgagggcctgatcctgctgcagttcgtgatcgaacgtgggcgactgggcgaggatgtgggtgcgttgatgcagcagcgcgtgttcgatcgcttcggcatggcgcgcaccagcatgtcgtggcgcgcggatttcgccggcaacctggccgatggctggaccgtcgaaggcaatacagagccgcacgatcaacgcagccgtgtgcgggcggcaggatcgatggataccaccatcaccgacatggcccacttcgccgccggttatgtgcgcggcgatgggctgtctgcggcaatgcgcagggaactggtgcggccgcagctgccgatcaccaccgccagccagttcccaacgctgcagccggagctgcccgttgcgcagcagcaccgggatctggccgcgggcctgggcgtggtgaccttccgtggcccccagggtgcaggcttctacaagggcggccacgacgatgcggtcggcaacaccctggtgtgcatcgagcggcacaaacgctgcgtggtgatcctgggcaacgatgtacgggccgaggccaccttcccggcactggtggcgttcgtgctgggtgataccggcgtgccatggcagtgggagtacggcgcggcgaaggccttcatcgaatga

SEQ ID NO: 513605 - DNA, 930 bp, Stenotrophomonas maltophilia
ttgcgcctcttcctgttgcccctgttcgccgctcccttgcctgcgctcgcctccaacgccgccgcgcacatcctgccgatgtggatgcagggcggtcatccggcggtggccgtctcgctggacgggcgcgccgaaccgctgcgcttcgtggtcgacagtgccgccggggcaacgctggtcgatgcccgcgtcgtgcggcgctatggcctggaggatgcggatgcagaggtatcacaggcgcaaggggcgagtgcagcttcggcgcggttgcagcgcatgcgcagcacgtcctggcagctgggcagctggcagctgcaggcccaagccatgaacgtcgatctgtcatcgttgccgaaggatgatgatccagccatcgacggcttgatcggcaacgatctgaccgggcgctgggacacccgttgggacttcggccgcaatcaactggcgctgtggacacccggcggattgaacctggaaggaccgggttgccagcccaatgcgctgcccggccgcactggcggcctgcgccagttcggcttcatcacgcttgcactgggcgcgcctgcggtggacgccatcgccgtggtcgacaccggtgccgcacagaccgtcctcaacgccgaagccgcccgcgcactggggctgcgcaccgacggcagcgacgcgcgggtgcgggtgcgtgaaaagggcaccgaaggcctgggcggcggcaagcaggcaacctggctgtacaccctgcccggcatgaccggcggcggctggcagcacccgtcgatggaggtccgcatcagcgaactgccggtgttcaaggcgatcggcctggagggccggccggcgctgatcctcggtgccgatgcaatgcgcggcggccaggtggacatcggtgccggcgcggcgcggatctgcctgcgccggccgcaggccggctga

SEQ ID NO: 513606 - DNA, 708 bp, Stenotrophomonas maltophilia
atgagtactcccatccgtgtcatcgtcgtcgacgacgatgccagcatccgcgacgccatcgccgaccacctgctgctgcacggctaccagatacgcctggcggcggatgcggcggcactggacgtgctgctgcaggccgaacgaccggacctgatcatcctcgactggatgatgcccggtgaggatgggctgtcggtctgccgcaggctgcaggcgagggcgatcccgatcctgatgctgtcggcgatgggggctgcaccggaccgcgtgatcggcctggagatgggcgcggacgactacctggccaaaccctttgatccgcgtgaactgctggcgcgggtacgcgcactgctgcgccgtcaggacaagctgcgcacgcaggtggccagcgaactgcggtttgatggctggcgattgctgcccgaccagcgtcgcctgttcgcaccggacggtgccgagctggtgctgagtcgtggcgagttttccctgttgctggcgctggccgaacgtcccgggcgggtgctggggcgtgagcagctgctgcagttgagtcgcggagaagccagtgacagcgtggaccgtgccattgacctcgcgatcagccgcctgcgccgcaagctcgggcaggccgcgtccggggcagaagccctcgtgcagacactgcgcggggaagggtatcgcttcgacgctgaggtacaggtgctgtga

SEQ ID NO: 513607 - DNA, 1299 bp, Stenotrophomonas maltophilia
atgctggcgctggccagcctgctgctggcaaccctggccagcgttgcagtggtgggttggatgccccggcccgcgccgccaccgatgcggctggaccatgcgatgcaggtactgcgtggggaacaggcgccggcgtcactgggattgcgcagggcgacgcaggacgcgcccccccaaggtagcgccagcgactggctcgcgcagctggcggccgcgcagatgggcatgccggccgaggatgtacgcctggcatggacggggcagggcagggcgcccgatgtgcaggtcatcgagggtggcgcggtactggacgcctccggtcgtgctggcgtgctgaaatcacaggccgcgctgctgaccgcgatgcagtggccgccgtttgaactggggatgcgccaggccgacggccgctggcgggtggtcggcagcgaccatagtgacctggcggcctggcgccgccaggtgatgctcgccctgttgggcggtgcgatcctgctggcgccgttggcggcgtgggcgtcgatccggttggggcgcccgctgcggcgcctggccgaagcgagcgcacgcgtcgacctgcaggccgagtcgccattgcccgacgatggcccacgcgaagtgcagatgctggccgccgcgatcagcaccggtcgcgaacgcctgcgggtccaggcacaggacatgacccatatgctggcggcagtggcgcatgacctgcgcacgcccctgaccggcctgcgcctgcgcgccgagttcgctcccgcaccacaggccgcccggatggtggcggacatcgaacgcatggacgcgatgatcgagcaggtgctggactatgcacgcggcgagctgcagcccttgcagatgcgctcgctggatctggctgccctgctgcaggaaagcctgcaaggggcgctgctgcgcggggtcgacatttcgcttcagtgcccggatacgctgccgtggcatggcgatgcgctgctgctccggcgcgcggtcgacaatctcatcgacaacgccgagcgttacgcgggcgccgtggagctgcatgtcgccgtgtggggacatggggtgcagctggatgtgatggatcgcgggccgggcatcgccgaagctgatcgtgtccgcctgctgcaaccgttccggcgcagcgaaagctcgcgcagtcgcgctaccggtgggaccgggctgggactggccatggccgccaacgtggccaggcgtcacgcaggcgaactgcagctgctgcaccgcgagggtggcgggctgatcgcgcgcctgctgctgggaaagctcccctga

SEQ ID NO: 513608 - DNA, 501 bp, Stenotrophomonas maltophilia
atgatcgaagccaagcatcaggccctgctggaggaatcgcagcgacgcggccacgccaacatcgcgcaactgcgcctgtgcttccagctgctctcgttgtcctcgtcgatcgatcgcgactgcgccgcgcggctggcaccgcatgggctcagcgagggccgcttcatcgtgctgttcctgctgcacggggccggtggcacgctgccgccgcacctgctggccgagcgtgccggcgtgacccgtgccaccatcagcggcctgctcgatggcctgcagcgtgaaggcctgctgcagcgtcgcagcgatgacggggatggccgccgtctgcagatcgtattgaccgcaccgggaaagcgcttggccgagtcgttgttcgagcagcacacgcaatggatcagcggcctgttcgacgacctggatgcgggtgaacagcagctgctgtcgcagctgctgcacaaggtctggcagcacacggacggcgggcgggaatcggcagcatga

SEQ ID NO: 513609 - DNA, 741 bp, Stenotrophomonas maltophilia
atgagcacgcccgttcctgcgcaaaggctgcatgcactcaacagtggcagcgctgctgccgcccatctggccgaatgcctggccgtggatttcaccgcgctgctgcaggtggtggcgcctgcccttgagccggaatcgctgcaatgcatgcgcgatgcctcaggcaagggcatcacccagcgcatggcgctggcggcgcggttgctgcacgaagccggacagggggagcctgcgcgctggcaggcgcatgcgtcagacacggtgcgtggctgggcctgctacctgatcggcggcgacgccgacgcgacgctgccggccaagctgcaggcgatgcggccactggctgacgacccgcacttcggcgtgcgcgaatgggcgtggctggcgctgcgtgccgacattgttgccgcaccactgcaggcgctggagtacctgcaaccatggacgcaggaaggatcgccgtacctgcgccgcttcgcctgcgaagcgctgcgcccgcgcggcgtgtgggccacacatgtcgcgctgttcaagcggcagccggaacttgcagaggcgatgctggaagcactcgccgacgacccggagcgctatgtgcaggactcggtcggcaactggctcaatgatgccggcaagacacagccgcagtggctgcgtgcgctgtgcgcgcgctggcaacagcagcaccgtggcgatgccaatgcctacatccgcaaacgcgccatgcgctcgctccggtag

SEQ ID NO: 513610 - DNA, 339 bp, Stenotrophomonas maltophilia
atgtcgcacaccttcatcgagctctataccgccacccccgcctggaccacgctccagcccgagcagcggaatgccttcttcgcccgtatcggtgcaggcatgcagcagttcgatccagtccgcatcacactgctggcgatgggccgcattgccaggggcgtacagcacggcagcgatgagcagttctatgcggtctggcgctgtgcaagccgcgcggacgccgatgcgctggtggccggcattgccgccaccggttggcatcagtacttcgccaccatcaacgccgtcggcgcagacgatgggatggggcggcaccttgccgacctggccgccttgtag

SEQ ID NO: 513611 - DNA, 258 bp, Stenotrophomonas maltophilia
atgcagagcacgctccaggtcacgctgttcggcccgcttggcgacagcccggcattgcagttgccggggcgggaagggccgtcggtggccatcccggaggcggccctgcggcggttggtctccgacctctacaccacccgttccctgctcaatcccgagcagctggacgaggccaggcaggagctggaccgcgtgctggagcgctgggccgacatccacgaaggcctgctgctggacgtggaagtgcatggcaaatga

SEQ ID NO: 513612 - DNA, 1074 bp, Stenotrophomonas maltophilia
atgcccccgcacaccgacgacctgcgcatccgcaccatcgaaccgctgacaccgcctgcccagctgctggcgatgctgccctgtgacgatgaagcctccgacaccgtcagcgcctcgcgcgcggccctgcaccagatcctgcacggccgtgacgaccgcctggcagtggtggtgggcccgtgctcgatccacgacccgaaggccgccatcgaatacgcccagcgcctgaagccgctgcgcgacgcgctggccggcgaactggaaatcgtcatgcgtgtgtacttcgagaagccgcgcaccacggtgggctggaagggcctgatcaacgacccggacctggacggcagcttcaggatcgacaagggcctgcgcattgcccgcggcctgctgcgcgacatcaacaagctcggcctgccggccggtgtcgaattcctcgatgtgatctcgccgcagtacatcgccgacctggtggcgtggggcgcgatcggcgcgcgtaccaccgaaagccaagtgcatcgtgagctggcctcggggctgtcgtgcccggtcggcttcaagaacggcaccgatggcaacgtcaagatcgccgctgacgcggtgggtgcggcgtccaatccgcatcacttcctgtcggtcaccaagcagggcggcaccgccatcgtgtcgaccaccggcaatccggattgccatgtgatcctgcggggcggcaagcagccgaactacgacgccggcagcgtcgccgacgcctgccaggtgctggccaaggccaagctgccgacgcgcctgatgatcgacgccagccacgccaacagcctgaaaaaccccgagaaccagccgaaggtgatcgaggacatcgctgttcagctggaagacggcgaacagcgcatcgttggcgtgatgatcgagagccatctggtcggtggccgccaggaactggtggaaggccagccgctggtctacgggcagagcatcaccgatggctgcatcgactgggacaccaccgtgacggtgctggagcgtctggctgcggccgtgcgcgcccgtcgcgacgtgaaggtgtccgaagcagcctga

SEQ ID NO: 513613 - DNA, 618 bp, Stenotrophomonas maltophilia
atgctgctgtccatcatctacctgatcgccatttccgccgaagccatgaccggcgcactgtccgccggccgccgccgcatggacctgttcggcgtggtcatgatcgcctgcgtcaccgccctcggtggcggctcgctgcgcgacatcctgctcggccactatccgctgggctgggtgaagcatcccgagtacctgggcttcaccgtatgcgcggcgctgatcgccacctgggtggcgcgctggatgcaccacttccgccgcaccttcctggtgctcgatggcctgggcctgatcgccttcaccctgatcggctgctcgatcgcgcgcgaagccggccatgcaatgccgatcgtgctgatcgccggcatgctgaccggcgcgttcggcggggtgctgcgcgacatcctctgcaacgaggtgccactcatcttccagaaggagctgtacgcgatcatcgcgctgctgaccggcgcggcctatctgttgctgctgcactggggcgtggccgatgccaccgcaatcctgtgctgccttggcggcggcttcgcgttgcgcctgctggcgatccactaccgctgggaaatgccgaagttcgtgtaccacgacgaagtgcattga

SEQ ID NO: 513614 - DNA, 264 bp, Stenotrophomonas maltophilia
atggccccgtccgtccgcccgtggttcctgtacctgctcgaatgccgcgatggcagctattacgccggcatcagcaccgatgtggaggcgcgtttcgccgcccaccaggccggcaagggcgcgcgctacacccgggcccggccgccgctgcgcgtgctggccgtgcgcgaatacccggaccgggccgccgcctcgcgggccgagtggcaactcaagcagcagccccgcgaacggaagctggcctggctgcagacgcttctgtag

SEQ ID NO: 513615 - DNA, 486 bp, Stenotrophomonas maltophilia
atgggctacccggtccatgcgatgatcgccccgcgcccagagctggagacccggatgtccacgatcgccctgctgttcgctctctccgcagcaacgagccctgccgccgacgccgccacgatcgcggccatcgaagccacctgccacgactacgtcgatggccagctggaggccgacccgcagcgcgtcgcccgttccctgcatccggacctggccaagcgcgcggtcctcggcgatacacccgacgagcgcctgggcctgcgccggatgtcgaaggaagagctggtctcgttgacgaaacagggcgcgctgaagaccccgaaggatcaatgggatcgccgctgcacggtgctggacgtgaccggcaacgcggcctcggtgcggctggaaaccccgtggttcgtcgactacttccacatggggcgtttcgaccagcgctgggtcatcgtcaacgcactgtggtacccgaaaccgaaggcgcactga

SEQ ID NO: 513616 - DNA, 456 bp, Stenotrophomonas maltophilia
atgcgtgccgccggcaacgcatggatctccgtcgtcgtgctggtcgccggcatcgcgctgctgcctggcctgctgtatctgctcgggctggcattggtggacggtcggccgaagccggccgaccgcgcgcccagtggtgtggctgcgtgcagcggtgagccacgggcgggataccagccgatgaacccctggcgcttcaccgcccagttcttcgacaaggacgggatgaagaacaaggtgcctgaagtggagcgggaggccttctggattgcccggcgccacctgtggcggcaacctcggcgcggcatgctgcgctggcatctcagcagcaccgcgttggcgatctggatcacccggcattggagtaccgcgcagattgcggacaccgcgaggaaggaggacttctgccggacctggtcgaaacggcgggtgcccggtggccagatgaaccggtag

SEQ ID NO: 513617 - DNA, 1281 bp, Stenotrophomonas maltophilia
atgagtcgcgagcgcgttccccacctggtcgttgtcggcggcggttttgccggtctctgggccacccgtgccctggcccgcgagcgcatacgcatcaccctggtcgaccgccgcaaccatcacctgttccagccgctgctgtaccaggtggccaccgccggcctgtccgcgccggatatcgccgcaccgctgcgccacatcctcggccaccagcgcaacgtggaagtccgcctcggcgaagtggtggccatcgacaagcaggcacggcagatcggcatggccgatggcagcacgctggactacgacagcctgctgctggccaccggcgctacccacgcctacttcggcaacgaccagtgggccgaagatgcccccggcctgaaaacgctggacgatgccattgcgctgcgccgcaagctgctgctggcgttcgagcgtgccgaggccgaaccggacccgaccaggaaggcggcgtggctgagtttcgccatcgtcggtggtggtcccaccggcgtcgaactggccggcacgctggccgagatcgcgcgccacacgctgcgcaacgaattccgccacatcgatccggccagcgccaaggtgcgcttggtcgaggctgggccgcgcgtgctgtcctcgttcccggaagtgctttcgctgaaggcgcgccgccagctggaaaagctgggcgtggaagtgctgaccggtaccccggtgagcgacatcgacagccagggcttcaagctcggtgagcagttcgtgccggcccgcaccgtcgtctgggccgccggcgtggccgcttcaccactggcgcgcacgctggacgtgccgctggaccgcgccggccgcgtgcaggtgcagccggacctgaccctgcccgatcacccggagctgttcgtggccggcgacctggccgcactgagccaggccgacggcaagccggttcccggcgtggcgcccgcggccaagcagatgggcaagtacgtggccgaggtggtccgtgcacgcctgcacggcaagcccgagcccggtccgttcaagtacgccgactacggcaacctggccaccattggccgcatggccgcgatcgtgcacctgggccggctgcagctctccggcgtgctggcctggtggttctggctggccgcgcacgtgttcttcctgatcggcttccgcaaccgcatcgtggtgctgctgaactgggcggtcgcgtactggagctaccagcgcagcgcgcgcatcatcttcggtgatgaccaggacgaccggcggccgaggcggtaa

SEQ ID NO: 513618 - DNA, 780 bp, Stenotrophomonas maltophilia
atgagcgaaccggaaaagcgcatcgccctgttgatcgacgccgacaatgcgccggcctcgaagatcgacgaggtcctggccgaagtcgcccgctatggcgtggccaacgtgcgccgtgcctacggcaactggaagagcccgcggttgaagggctgggaagcggtgctgcacgaatacgcgatccgcccgatccagcagttcgcctacagcaagggcaagaatgcgtcggacatggcgatggtgatcgatgccatggacctgctgtacgcgcgcaaccttgatggcttcgccatcgtgtcgagcgatgccgatttcaccccgatggtgatgcgcctgctgaccgacggcgtgaaggtgtatggcttcggcgaaaagaagacgccggaaccgttcgtcaacgcgtgctcgaagttcacctacctggaagcgctgggccagacccacgccagcgtgccggatgccgagcaggcatcgagcgaacaggcatcgaacgagcccgtcgccaatgatgatgcacgcccgcgcaagagcggggcggagatgcgcagcgacacccggctggtgaagatgctgcgccgcgcggtgtcctcggccgagggcgaggatggctggtcgcacctggggccggtcggcagccagatcggcaaccaggcctcgttcgatccgcgcaactatggctacggcaaactcagcgatctgctggcggcgattggcctgttcgagctgaagaaggacggcaagtcgtcctacgtgcgcgcgctgccaaaaaagaaccggtag

SEQ ID NO: 513619 - DNA, 621 bp, Stenotrophomonas maltophilia
atgttgaagatctggggccgccgcaattccagcaacgtccgcaaggtgctgtggtgtgccgaggagatcggcctgccgtacgaatccatcgaagtcggcggcagccatggcggcacgcagacgccggagtaccaggcgatgaatcccaacggcctggtgccggtgatcgaggaccacggcctgccgctgtgggaatcgaacaccatcgtgcgttacctgagcgcgcgctatgcgctgggcacgctgtacgccgaggacccgatggagcgcgcgcaggccgaaaagtggatggactggagcacctcgcggatggcgccgctgtacagcgacctggtctggggcatcatgcgcaccgcgccggccgaccgtgacgaagcgcgcatcagcgcggccatcgtccgtgccggtgactacctggcgatggccgatgccaccctggccacgcagccatggctgtcgggcgggacgttcgcgatgggcgacattccgctcggctcgctggtgtacgcctggtatgaactgccgatccagcgcccggacctgccgcacctggccgagtggtatgcgcgcctgcgtgagcgaccggcctaccagcgcggcgtgatgtcgccgctgacgtaa

SEQ ID NO: 513620 - DNA, 2199 bp, Stenotrophomonas maltophilia
atggcccgttacactggcccgatgctttcaccgattccgaccctgcaggtcgccctgcctgtccccctgccccgcctgttcgactacctgtcgccggagggcgatgcaccggcggtcgcggtcggctgccgcctgaaggtgccgttcggcaaccgggagctggtcggtgtggtggtggggcacggccagaccgacgacggccagggactgcgccaggccttggcctggtgcgacccgcagccgctgctgcagggggaactgtggcagagcctgcaatggctggcgcgctacacccatgcgccactgggcgaggtgctgagcaccgccctgcccggcccgctgcgccatggcgaggtcctgcccgacacacaccactggggttggcagctgaccaccgaaggccacgcccagcgtgaaaagctgcgcgccggcagccgtccacggcaactggccgagctgctggccgaagccatcgtggatgaggacgtgctgggcgaacgcatgcaggactggcgcaccgccgcgcgcagcctggccaagcgcgggctggccgagcgggttgcgctgagcgtggccccccaacacgcgcagccactgcccggtcccacgctcaacccggaccaggccgaggcggtggccgcgatcaatgccgccgacggcttccggccgttcctgctggatggcgtgaccggcagcggcaagaccgaggtctacctgcaggcgatcatccattgcctggcgcagggcaggcaggcgctggtgctggtgccggaaatcggcctgaccccgcagaccctggcacgcttccgtggccgcctcggcatcgccgtgcatgcgctgcactcggggttgaacgacaacgagcgcgcgcgcgtctgggcagcggcctcacgcggcgaagcgcgcgtcatcgtcggcacccgctcagcggtgttcacgccgctgccccaggccggcctgctgatcgtcgacgaggaacacgacggcagctacaagcagcaggacggcatccgttaccacgcgcgcgatttcgccctggtccgggccaagtcgctgggcgttccggtgttgctgggcagtgccacgccctcgctggaaaccctgcacaacgcctacgccgggcgttacacccacctgcgcctgaaacagcgcgccggcgatgcgcggccaccgcgcgtgcgcatcctcgatgtacgcaagcgcccgctgcatgacggcctctcggccgatgtgctggccggcatcggggagcatctgcagcgtggccagcaggtgctggtgttcaagaaccgccgcggctacgcaccggtgctgctgtgccacgactgcggctggaccgcgccatgccagcgctgcgatgcgccgatgaccgtgcatggtggcggtcgtcgcctgcagtgccaccactgcggcgcgcggcaaccggcgccgctggcatgtccggcctgcggcagcctggcactgcaaccgcagggcatcggtaccgaacgcctggaagaacatctcactgcggccttcgccgacttcccggtggtgcgcatcgaccgcggcaccacctcacggcgcgacgcgctggaacagcagctggcgaaactgggcgaccagcccggcatcctggtcggcacgcagatcctggccaagggccacgacctgcccaagctgaccctggtggtggtggtgggtatcgatgagggcctgttctcggccgacttccgcgccagcgaaaaactggcgcagcagctgatccaggtggccggccgcgcgggacgtgcgcgcgacccgggcgaggtctggctgcagacccatcaccccgggcacccgctgctggaaaccctggtgagcggtggctaccatccgttcgcgcaagccgagttgaaccagcgccaggcggccggattcccgcccttcgcgcatctggcgctgatgcgcgccgaagcgcagcaggtggagcatgccaatgcattcctgctggcagcccggcacctgctgggcgaacagaacgtggtcgaggcctacgggccgatgccggcgccgatgccgcggcgggccggttaccagcgcacgcagctgctgctgtctgccctgcagcggccgccgctgcatggcgtgctttcgcaactggttccgcagctgtacgcgctgccggaagcacgcaaggtgcgctggtcgctggatgtggatccaacggatctttattga

SEQ ID NO: 513621 - DNA, 1005 bp, Stenotrophomonas maltophilia
atgacggctgtgcccgcccctgtttcctcgaccgcggccggcgcgctgtcggcgttcctgcgtggcgtcgagcgccgtgccctggtggtcgctgaactgcagtgcggcgatgccgcgcgtgccgagcagaccctggtggcggtgatgcgcgcctttgccgcagtggccagcgacctgccgatggcgcagtggccgacccgcttctggacccttctgggccagcgccaggcgctgcgcgagccggtgggcgggcagtggctgccgccgttggccgtgctgggcgcgatgccgccgctgccgcgccttgcgctgctgctgcgggtgggcggcagcctggacgagggcatcgccatgcgcgtgctcgaccaggacgaggccggctaccagcacctgctggccgacgcctgcccgcgtgatgcccacggccagccggatgcctcggcctggcgccagttggccgaacaggtgcaggcgcgtatccgtgagttgccggccgcgcgcctgcagcagctgcagcaacccgccgccgcgaccgcccacaatgaagccccgaccccgagctggcgcgcaccgcagcgcgatgagcgggcggccgccaatggcaagcgccgtcgcacgaacgccaagccacgttggcgcggtccgctgatcctgctggcgaccgtggcgatactgttggccgcagcgctgggctggcgccactggcaggggcattccttcggcagtgatgcaccgctgccggagggggtggtgggcgaagccggtccggtgacggtggaagccctgccacccagcaaggtcaacgccacgccggatgcgaccacggcccaggccacggacgacgcagcgatgctggccgatcgtgactacccgctggttgccgatgccgacctgtacgcgtggactgccgcgggcggcccgctgccggtggatgaatcgcaatccaggccgagccggccggagccggccagtgccacgctggaaaccgctgctgccgatgaataa

SEQ ID NO: 513622 - DNA, 609 bp, Stenotrophomonas maltophilia
gtgccacgctggaaaccgctgctgccgatgaataagtccgtgttcgccagcctgctgctggccctgccgttgtcgctgtctgccgcgccgcaatcgttgaacgtgccgttgccgccaccgacgtcgccggccacgccggtggcttcgccagcaccgtcggcggcagcaccctctggcttcgcccagctcgatgcgcagcagcagcgccagcgccgcgccgactacgccgcctggcgcgcgctgccggaaggagagcgcgagcgcatccgccaggcggctgcgcgattcaatgcgctgcctgcggaccagcagcagcgcctgcgccaacagttccgcgaccaggaccaggcgttccgcgacgggtggcggctgggcccgcaactgggcctggaattccccaagctgcatggcttgttcggcttcgtgccgccggaacagcgcgagaccgcgctggccgtactgcgccagctcagcccggcgcagctggcccagctgactctggtcgcgcagcgaacgccaccgcaggaacgcgacgcagtgcgcagcgccttcctcgccgtgcccgccgccgagcgcgacagctggctcaagcgccaggccggccagtaa

SEQ ID NO: 513623 - DNA, 1365 bp, Stenotrophomonas maltophilia
atgtctactgcaacctccacgccgcgcttcagcaaggaagtcggcgccaccggtctgctcgccctgccgcttgtgctgggccatgtgtccaccggtctgatctccttcgtcgacaacgtgattgccggccaccacgccacggccacactggccgccgtcaccatcggtacggcgctgctgtggctgccgatgctgattccgatcggcaccctgatctcgctcaccgcctcggtgtcgcagctgcatggcgccggccgcgagcgcgagatcggcccgctgttccgccaggcactgtggctggccttggggctgggcctgatcatgttcaccttcctcaccgtggtgccgccgctgctgccgtcgttcggcatcgcgccggacatcgtgccgggggcgaccgcgttcctgcatgcggtgcgctggggcggacctgcgctgaccctgtacttctgcatgcgctatctcagtgaaggcatgcactggacgctgccgacgatgctgctcggcttcggtggcctgctggtgctggcaccgatgggctatgtgctggccaacggcaagctcggcttcccggaaatgggcgccgaaggcctgggcatcgcctcggcggtgatgatgtggctgcaggcgatcgccttcgccacctacctgtggttcaccaggcgcttcgcccatctgcagctgttctcgcatttcgaagggccgcgctggaaggcgatctgggacttgctgcgcaccggcctgccgatcggcatcaccgtgctgatggagggcggcctgttcatcgtcaccgcgctgctgatcggccgccttggtgccaacgaagccgctgcgcaccagatcgcgatcaatgtcgcgcagctgtgcttcatgatcccgatgggcgtggccgaggccaccaccgtgcgcgtcggccatgcggtcggccgtggtgacggcttcggcgtgcggcgtgcggcctgggccggttacgcgatcatcatgggcacgcagacgttgtcggcggcggtgctgctgttcggccacgatgccatcgtcggtgtgtacaccaacgacctggcagtggccggcctggcctcgaccctgctgctgtacgcggccaccttccagttcccggacggcatccaggtgctgtcggccggcgcgctgcgcggcctgaaggacacccgcgtgccgatgttcatcgccatgttcgcgtactggggcctgggcatgccgctcggcgccgggctcggcctggggctgggcatgggcccgcagggcatgtggatcggcctgatcgtcggcttgaccgccgctgccatcctgatgggctggcgcctgcgccgcagcagccagcgcatcgggcaatccgcgctgtcctga

SEQ ID NO: 513624 - DNA, 1923 bp, Stenotrophomonas maltophilia
atgaatcaacccgtgcccccgctgcccccggcgcgtcgcaatcccgtcgccagcttcttcatcgggctgtgggacgtcatgaacttcacccgccggttgatcctcaacctggtgttcttcggcctgctgttcctgctgctggtgatgttcgtcatcgccgccggcatgggcgccggtgccagcaagtcgctgcaggaccgcacgacgctcgtgatcgcgccggaaggccgcttggtcgagcagttcagcgccgacccggtcagccgcgcgctggccaaggcggtgggtgacaacggcgccgaggagatccagctgcgcgatctgctgcgggtgatcgagtcggccaaggaagacaagaagatcgaacgcgtggtgctggagctggacaagctgcagccgtccggtttcgcctcgctgcgtgaggtggccgccgcgctgcaggacctgcgcgcctccggcaagcagctggtggcctacagcgagagcatgggccagtcgcagtacctgctggccgcgcaggccgaggaggtctacctggacccgatgggttcggtcgtgctcgaaggcctcggccgctaccgccagtacttccgcaccggcctgcaggacaagctgggcgtggacgtgcacctgttcaaggtgggcgagtacaagtccgcggccgagccgtacgtgctcgacgcggcgtcgccggcctccaaggaagccgacctgttctggatgaacgacgtgtggcagcgctacctgggcgacatcgccaaggcccgccgcctggatccggcacagctggccgccggcatcgacaccctgccggaaggcatcgctgccgccggtggtgacctggccaagttcgccctgcagcagaagctggtgaccgcgctgaagacccgcgaggaattcgaggatctgatgatcgagcgcggcgtggccgacgaggatgccgacggtggtttccgcaacgttgacttcggccgctacctggccctactcgacgcgcgccgcaacccggtggactcgcgtccgcaggtggccgtggtggtggccgccggcgaaatcagtggcggtgacctgccggccggccgcatcggtggcgagtcgacctcggcgctgctgcgtgccgcgcgcgacgacgacaacgtgaagtcggtggtgctgcgggtggattcgccgggcggtgaagtgttcgcctccgagcagatccgtcgtgaagtggtagccctgcaggccgctggcaagccggtcgtggtgtcgatgggtgatctggccgcttccggtggctactggatcagcatgaacgccgatcgcatctatgccgatccgtcgaccatcaccggttcgatcggcatcttcggcatggtgccgaacttcagccgcgcgctggacaagatcggcgtgcacaccgacggtgtcggcaccacccgcttcgccggcgccttcgatgtcacccgcccgatggacccggccgtgggccaggtcatccagacggtgatcaacaagggctacgcggacttcaccggccgtgtcgccgacgcccgcaagaagccggtcgaggccgtggacgaggtcgcccgtggccgcgtgtggagcggtgcacaggccaaggaacgcggcctggtcgatgccttcggtggcctgaaggacgcggtggccgatgcggccagccgcgccaagctgggcaaggccgatgcctatcgcgtgcgctacatcgagaaggcggccacgccgttcgcgcagttcgtcagcggtttcgccggcagccgcgccggtgcctggatgctgtccgattcggggatggcgcggatgatgctggcacgcacgatgccggaagtggacactcagttgcgcttcgtcgagaacgcggcccgcgagaagggcaatggcgctccggtgaaggcgctggcgtactgcttctgcggattctga

SEQ ID NO: 513625 - DNA, 213 bp, Stenotrophomonas maltophilia
atgcgcatcctgaccctgttctcgtccctgctggccggcgtgctgttggtggcctgccagcggccgccgacgccgaacccggagaagccaccggtgcccaaagcgatgtcgcgtgcgatgcaggaaccgctggaccgcgccaagggcgcgcagaaagcggtggaagaggccgccgcacgcgaacgcaaggccgaggccgacgcgacgcagtga

SEQ ID NO: 513626 - DNA, 777 bp, Stenotrophomonas maltophilia
atgacccagcaacggtggcgcctggacggccagacggccctgatcacgggtgccagcgccggtattggcctggccattgcgcacgaactggctggcctcggcgccgacctgatgatcgtcggccgcgacatcgacatgctggaaacggcgcgcgacgaactgctggatgtctatccgcagcaccaggtgcacgcgctggcggccgatgtctccgatgacgaggaccgtcggcagatcctggactgggtggaagatcacagcgatggcctgcacatcctggtcaacaatgccggtggcaacgtcaccaaggcggccacggaatattccgaggacgaatggcgcaagatcttcgagaccaacctgttctcggccttcgagctgtcgcgctacgcgcatccgctgctggcccggcacgcgtcgtcgtcgatcgtcaatgtcggcagcgtgtccgggctgacccatgtgcgcagtggcgtggtctatggcatgaccaaggcggcgatgcaccagatgacccgcaacctggccgtcgagtgggcggaggatggcatccgggtcaacgcggtggcgccctggtacatccgcacgcggcgcacgtccggtccgttgtcggacccggactactacgaggaagtgatcaaccgcacgccgatgcgccgcatcggcgagccggaggaagtggccgcagccgttggcttcctgtgcctgccggcggccagctatgtcaccggcgaatgcatcgcggtggatggcggcttcctgcgctacgggttctga

SEQ ID NO: 513627 - DNA, 729 bp, Stenotrophomonas maltophilia
atgtacgctgtgcgcatgaagaacctgatctggctggccctgggcctgttcgccggcaacgcgttggccgacgacggggtgatctaccgttgtacctccagcagcagcgatgtgcccaccctgcaacgcacgccctgccctgccggcagcaagcagcaggtggtgagggtgccggccagtgctccgccggcgccggcctcagcggcacccgtgccggccgcgcccggaccggcggcggccactgcgccgtccgttcccgcacccgcgcctcgtcgccccggcgaaggacgcacgatcatggaagctggcatggtcgaacgcgaaggcggcgatctgatactcgacagtgcatcgctgccacgccaggccgatgccgcgccggacagcaatgcgccgccgaagccgccgctgccaccgatcttccagtgcaccgacagccagggcggtggctacctgcacgaatacgaagccgcccccgggcgctgcgaactgatgaccgtgcagggactgggcggcgccacgccggtcaatgccgccggctgcgaagtggtgcgcgaccgctgcgaggaactgccggacgcgcagcgctgcagcagctggcagcaacgcttccgcgacgcacgtggccgtgagcggttcgcctcgccggaaaaccgcgacaatgcccgtgcggaacgcgaacggctgcagggcgtgctggaggccagcaactgcccggtaccagggtga

SEQ ID NO: 513628 - DNA, 690 bp, Stenotrophomonas maltophilia
atgaacctgctgcgcaccgccctgggcctgtgcctgctgctgccatggaccgcagcggccgccgaggacgtgcgcgtctaccgctgcgtcgccagcaatggcgccgtggccctacaggacaggccctgcagcagcggccggcaggaggtgcgtgacctgcagcgcccgcgcgatccggcaccccgggtggtgcgcagtgacgcccctcccgcggcgcccagcgaggttccggtgatgcgcgatcgcgaagtccgccacgtctacatccagccgccacaaccgttgtacgagtgcgtgagcgacgacggtcgccgctacaccagcgacagcaacgagggcaatccgcgctgggtcccgttgtggaccagcgtgtggctcccgcacgggcaccacggcgcggtccaccccggtccacgcccgggcttcggcacgccggtcggtgcgccaatcggtgaaggcacaggctaccggccgcctgcggtgggcgtcggcgtgcaggtgccggccggcagcgtgctggtccgtgacagctgccatgcgctgccgccgcaggacgtctgtgcgcgcctgcgtgaccgccgctgggaactggaccgccgttacaacagcgcgctgcagagtgagcgcaccgccatcagcaatgaacagcgtggcatcgacgcgcgcctgtcgcgggactgcgaacgctga

SEQ ID NO: 513629 - DNA, 591 bp, Stenotrophomonas maltophilia
atgggggcccacgtcgggccggtcgccgccatgaaagaactcaccctggactctgctgtcgccacgctccgcgccggcggcgtgatcgcctatccgaccgaagcggtctggggcctgggctgtgatccctcgcatgaggcggcggtgcacatggtgctgcggctgaagcagcgcccgatcgagaaaggcatgatcctggtcgccgccgagttgtcgcagctggagggctgggtgcgcctgcaggcgttgcccgatgcccgccagcgcgcggtgctggccagctggccgggtgccaacacctggatcctgccggccggtccgcgcgcccagccctggattaccggcgagcacagcggcatcgccgtgcgcatcagcgcgcacccgctggtcgccgccctgtgccgcgcctggggggggcccctcgtctccaccagcgccaacctggccggtgaaccaccggcacgcagccgtgccgagctggatccacgcctgctgcgcctgctcgatggcatcctcgatggcgaaaccggcggcctggcccagcccaccccgatccgcgacgcgctcagcggcaacgtgctgcgctcctga

SEQ ID NO: 513630 - DNA, 2493 bp, Stenotrophomonas maltophilia
atgcccaagcacctgctcatcgtcgaatcgccggccaaggccaagacgatcaacaaatacctcggcaaggactacaccgtcctggcctcgtatgggcatgtgcgtgacctgattccgaaggaaggcgcggtcgacccggacaacgggttcgccatgcactacgacgtgatcgacaagaacgaaaaacatgtcgacgcgatcgccaaggccgccaagggcgccgacgacatcctgctggcgaccgacccggatcgcgaaggtgaagcgatcagctggcatatcgccgagatcctgaaggaacgcgggctggtcaaggacaagccgatgcagcgcgtggtgttcaccgagatcaccccgcgcgccatcaaggaagcgatcagccagccacgcgcgatcgccagcgacctggtcgatgcccagcaggcgcgccgcgcgctggactacctggtcggcttcaacctgtcgccggtgctgtggcgcaaggtccagcgcggcctgtccgccggccgcgtgcagagcccggcgctgcgcatgatcgtcgagcgcgaggaggagatcgaagccttcatcgcccgcgagtactggtcgatcgccgccgagtgcgcacacccgtcgcagcacttcaacgccaagctggtcaagctggacgggcagaaattcgagcagttcaccatcaccgacggcgacaccgccgaagccgcccgcctgcgcatccagcaggccgcgcagggctcgctgcatgtcaccgacgtggccagcaaggagcgcaagcgccgcccggcgccgccgttcaccacctccaccctgcagcaggaagcctcgcgcaagctcggtttcaccacccgcaagaccatgcaggtggcgcagaagctgtatgaaggcgtggcgatcggtgacgaaggcaccgtcggcctcatctcgtacatgcgtaccgactcggtgaacctgtcgcaggacgcgctggccgagatccgcgacgtgatcgcccgtgattacggtatcgcctcgctgccggaccagccgaacacgtaccagaccaagtccaagaacgcccaggaagcgcacgaggcggtgcgcccgacctcggccctgcgcaccccggcccaggtggcgcgcttcctgaccgacgacgagcgccgcctgtacgaactgatctggaagcgcgccgtcgcctgccagatgatcccggccacgctcaataccgtcagcgtcgacctgtccgctggcagcgagcacgtgttccgtgccagcggtaccaccgtggtggtgcccggcttcctggccgtgtacgaggaaggcaaggacaacaagagcgccgaagacgaggacgaaggccgcaagctgccggcgatgaagccgggcgaccgcgtgccgctggaacgcatccaggccgagcagcatttcacccagccgccgccgcgctacaccgaagcggcgctggtgaaggcgctggaagagtacggcatcggccgtccgtcgacctacgcctcgatcatccagaccctgctgttccgcaagtacgtggaaatggaaggccgcagcttccgcccgtccgacgtcggccgcgcggtgtccaagttcctgtccagccacttcacccagtacgtggactacgacttcaccgccaagctcgaagacgagctcgacgccgtctcgcgtggcgaagaagagtggatcccgctgatggcccgcttctgggagccgttcaaggagctggtggaagacaagaaggaatcggtggaccgcgccgaggccagtggcgcgcgcgagctcggcaccgacccgaagaccggcaagccggtcagcgtgcgcctcggccgcttcgggccttacgccgccatcggcagcaccgccgaggacgccgaggagaagccgaaattcgcctcgctgcgccccggccagtcgatgcacaccatatccttggaagacgcgctggaactgttcctgatgccacgcgcgctgggcgaggacaacggcgagccggtcagcgtcggcatcggccgcttcggcccgttcgccaagcgcggcagcacctatgcctcgctgaagaaggaagacgacccgtacaccatcgacctggcccgcgccgtgttcctgatcgaagagaaggaagagatcgcgcgcaaccggatcatcaaggagttcgagggcagcgacatccaggtgctgaacggccgcttcggcccgtacatcagcgacggcaggatgaacggcaagatccccaaggatcgcgagccggcatcgctgaccctggccgaagtgcagcagctgatggaagaaaccggcaagcccgtgcgcaagggcttcggcgccaagaaggctgccgcgaagaaggcaccggccaagaaggcggcggtgaagaaggaagcggcgccgaagaaggccgcagccaagaaagcgcctgccaagaaagcggcgaagaaggccgtggtaaagaaggccgctgcaaagaaggcaccggcgaagaaggccgtcaagaaagccgcgaagtag

SEQ ID NO: 513631 - DNA, 930 bp, Stenotrophomonas maltophilia
atgaccgagtggtactacgccgaaggacagcaacgccagggcccgctgccggtccaggaaatccgccagcgcttccagcggggcgaactgaacctggacaccctggtctggcgcgaaggcatggcccagtgggctgcactgcgccaggtggtcgatgagctcggcctgcagacgctggccgatgccagcacggccaccgccagcggcggcttcgacctgcgcggcgactacgccgccatcgacaacggcactgcaccgctgcctggcacgggcgcgctcagcagctcgccctacagcgccccgaccgcttccggtgccggtggcccgcagccggtgatcggcggcgaggtggtctacgcaggcttctggaagcgcgtagcggcgtacatgatcgactacttcgtgctggccattccgggcggcatcatcggcgccatcatcggcgtggtgcttggcgccagcatgggcgcggtgggcagcggcgagacctccatcgaaatcgtcgcgcaggtggccagcgcgctgatcaacatggccatcggcgttgcctactacacctggttccattcctcgcagggtggcgccacgctgggcaagatggcggtcggcatcaaggtcgtgcgcagcaacggcgatcgcctgaccaagggccgcgccttcggccgctactgggccatgctgctgagcagcttcaccctcggcatcggcttcctgatggccgccttcaccgagcgcaagcagggcctgcacgacatgatctgcgacaccctggtggtcgaccgctgggcctacaccgaccagccgcacctgcagcgccatgagctgggcacggtcaccatcgtgatcctggtgctcaccggcctgctggtgctggcgggcctggtgctgctggtggccgcggtcggcttcatcgccaagatggcctcatga

SEQ ID NO: 513632 - DNA, 765 bp, Stenotrophomonas maltophilia
gtgagcgagtggttccacgcagaaggcaaccggcagcaaggcccgctgccggcggaacagttggtcgagttgttccgcaacaaccagatctccctggacaccctggtctggcgcgacggcctgccgcaatggcagccgttgcgcagcgtggtcgatgagctgggcctgatcgtgccggcgctggacgtcgccgcgccggccgtggaacccgagccggagcccgaaccggaaccggttgcgccgccgccgccgcaaccaccggtgctgccaccgtccacgccctatgccacgcagaccccggccggggtgctgccgccgccgaaaaagaagctctccggctgcgccctgaccgcgatcatcggcggcggcctgctgctggtgctggtgccggtcatggccatcctcgcggcgatcgccctgcctgcctacaacgactacaccgtgcgtgccaaggttgccaccgcggtcaatgccctgcagccgctgaaacagcaggtgcagcacttcgccgacgacgaaggccgctgccccggtgccaacgatgccggtttcccggcgccgggtgatttcacccaggccggcctgtcggcggtgaacatcggccgcttcaacaacggccactgcggcatcgaagcaacgctggccgtgcccggcaagagcctcgatcgcgacctgctgtggctggaatatgatcgcgacagcggccgctgggaatgcagcggtgaaagcgacgacaagtacctgccgccgtcgtgccgcggctga

SEQ ID NO: 513633 - DNA, 474 bp, Stenotrophomonas maltophilia
atgaaagagagcatcctggatgtactgctgtacctgtttgaacactatttcagcgaagatgcggacctgatccgtgaccgcgattcgctccagaacggcctgatccaggccggtttcagccccaccgagatcaacaaggcgttcgactggcttgatgccctggccgcgcagcggccgagcgtggcccaggcgcgggtcgatggccccgtgcgcatctaccacggccccgagctggacaagctggacgtggaatgccgcggcttcctgctgtacctggaacagcacggcatcctcgacgccgaccagcgcgagctggtgctggaccgggcgatggccctggaccaggacgaactggacctggacgacctgaagtgggtcgtgctgatggtgctgttcaaccagcccggctccgaagcggcctacgcctggatggagacgcagatgttcatggacgagccagaacccctgcactga

SEQ ID NO: 513634 - DNA, 1128 bp, Stenotrophomonas maltophilia
atgaccacacatgcatacgaggcgctgctgcgcctgttgatggcgggaggcgcactggcgtcccgacgggccctgctgcaggccgcgggcgatgcggaaaccgccatcgcgcaaggcactgcgacctggcgtgcgcacggttgcacgccggagcagtgcgccgccctggaacgccccgatacccgggcctggacatccgcccggcactggctggaacaggacaaccatcacctgctgccgtgtaccgatccggcctttccgccatcactgctggaggtacccaacccgccgctggcgctgttcgtggccggtgatccctgcctggcctggcgcccttcggtggcgctggtcggcagccgctcgcccaccccgggcgggcgtgcactggccgcgcgttttgccggctgcttcgtcgaggccggcctggcggtgaccagcggcctggccgcaggcatcgatgcggccgcgcaccaggctacgctggaggccggcggctgcaccatggcagtgatcggcaccggccctgaccgggcctatccggacagccacgcgcggctgcaggcgcggatcgccgccgaaggcgtggtgctcagcgagtacctgccgggcacggctgcccgccccagccacttccctgcgcgcaaccggctggtggccggactggcgctggccaccgtggtggtcgaggccgcgcagcgctcgggcgcgctgatcaccgcgcgcctggccgccgaggcaggccgcgaggtctgtgccctgcccgggtcggtgctcaacccgcgcgcgaccggctgccatcgcctgatccgcgagggcgcggcgctggtcgagcgccccgaggaggtcctggaactgctcgcccccgcccttcgccagcagctgccgggcttgcaatcgcggttggccacccccactgaacaggcaccgccggcgctcctgccggcgcgctgggccgacgaccctgactaccagtgcttgtggcgggcgctggaccacaacccaagcggtatggattcactgatcacgcgttgtggattgacggcgtcacaggtgtcctccatgctgctggccatggaactggcgggaatcgtggtgtgcgtacacggccgctactgtcgaactccctag

SEQ ID NO: 513635 - DNA, 1164 bp, Stenotrophomonas maltophilia
gtggacctgttggggaatcagggcttcacacctatgttgcttcgttttcgtacggtcgtcgccgcggcgatgctgaccgtggctgcctatgctaccgccgtggaagtgaatggcgggcacccggacacctatgtggtccgaaaaggggatacgttgtgggatatcgccgcacgtttcctgcagaagccttggctgtggccggagatctggcaagccaatccgcagatcgccaacccgcacctgatctatccaggtgacgtgctgagcctggcctacctggaccgggtgaccgtgtcccaggccggtccgcgccaggaggccccgatcgacgccattccgctggcccaggtcgagccgttcctgaagcagctgagcgttgtcgccagcgtcaagcagctgccctacgtcgtcggcctggaggacagccgcctgcgcgtgtccggtggcgacaccgtctacgtgcgcctggcggatgcccaggtgggccagcgctgggccgtggtacgcccgaccgtgcgttacgcccagcccaagccgaccgaggacctgaccgccaatggcgacgtcaccccgggcagcggcaacctgtggaaggcctacaacgcacccaacgcacgtcgtggcgtgctcggctacgaactggcccaggtcgccaccggcaccatcacccagatcgccggcggcaaggtcgaggcctccacgctggtgctggacaagaacgtcggcggccgcgaagtgcgcgccggcgaccgcctggtgccggtcgaagcccggccgtacgacctgcagttcgtgccccacgtacccgctgcgggtgtcgagggcgtggacgtgcgcgtgctggcggtcaccgacatgttcaccgccggtggcccacgcgacgtgatcgcgatttcggccggccgtgcccagggcgtggacaacggcaccgtgttctcgctgtggcgcccgggccggcatgtagcgcaccgcatgaagtacccgacctcctcgcgcatggacgactcgctcagcaccggcgcaggccgggtctcgctgccggatgaatatgccgcgcatgcgatggtgttccgcaccttcgacaacgtcagctacgcgctggtgatgcagggcgtgaagccggtgcaggtgggttacaacgcgctgcacccggacgcgaagtaa

SEQ ID NO: 513636 - DNA, 513 bp, Stenotrophomonas maltophilia; identical to SEQ ID NO: 493488

SEQ ID NO: 513637 - DNA, 924 bp, Stenotrophomonas maltophilia
atgaggattgtctttgccggtacgccggaattcgcggtgtcgtcgctgcgcgccgcggcgcgccaccacgaggtcgtggccgtctatacccagcctgatcgcccggccgggcgcggccgtggcctggcaccgtcgccggtcaagctcgaagccgtggcccgtggcattccggtctaccagcccgaatcgctgaaggatgaagctgcccagcggcagctgcgcgacctgcagccggacctgatggtggtggtcgcctacggcctgatcctgcccagggcggtactggcgatcccgacccacggctgctggaacgtgcatgcctcgctgctgccacgctggcgcggtgccgcgccgatccagcgcgcgatccaggccggtgacgcaaagaccggcgtgtgcctgatgcagatggaagccggcctggataccggcccggtgctgctgcaccaggagctgccgatcgcggccaccgataccggcggccagctgcatgacaagctggccgaactgggcgcacaggtgctgtccgacggcctgggcctgctgcgtgccggcatcaagccgatcgcgcggccgcagcccgaacagggcgtgacctacgcgcacaagctggacaaggccgaagcccgcctggactgggcgcaggacgccgatgcactggcgcgcaccgtgcgcgccttcaatccgtggccgatcgccgaggccacgctggccggcgagcgcgtgcgcatccacggcgcggtcgctcttgacctggtccacggccaggcgccaggggcggtgctggcggccagccgcgatggtatcgacatcgcctgcggccagggcgcgctgcgcctgcgcacgctgcagcgcgaaggcggcaaggcgatcaccgccgccgactacctcaatgcccgccgcgacctgcacgtgggggcataa

SEQ ID NO: 513638 - DNA, 1332 bp, Stenotrophomonas maltophilia
gtgtcgaagcagaatgatttctccgtcgccaaggcggcgcccggcgcggccacccgcatgctggccgcacgcgtactggcgcaggtgttcacccgtggccgctcgctgaaggcggaactggcctgggcactgcccaagctggccgacagtcgtgatcgggccttgctggaagcgctgtgctttgcagtcctgcgccgccgcagtacctacgacgctgccttgcagtcgtggatgcagaagccgctgtcggcgcgtgatgccgacctgcgcacgttgctgatggtgggcttcgcgcagctggacgtgctggaactgccggcgcatgcggccctgtcggccacggtcgacgccgcccgcgcgctgggccgtgagcgccaggccgggctggtcaacgcgatcctgcgccgcgcgcagcgcgaggggttcccggagcagcctgcgcgtgacgcctttccggcgtggctggccgatgccgtcgagcgcgactggccgtcccaggcccaggcgatctttgctgccagcctgcagccggcgccgctgtggctgcgtgccaaccgccagcagggggggcgtgacaaggcgctggccacgctggccgaggccggcattgctgccgaagccagcccgctcagcgccgacgcgctgcgcctggtggcgcccatcgcggtgaaccagttgccggggttcgccgacggtgcgctgtcggtgcaggacctgtcggcgcaatgtgcggcggacgcgctggcaccggcgtccggcgcccgcgttctggacgcctgcgcggcaccgggtggcaagtcggcgcacctgctggagcgtgacccgagcctgcgcctgctggcgctggatatcgatgcgcgtcgcctggcgcgtgcccgcgatacctacacccgcaccggtgtaggtgagggcgcgcagacccgggtggccgatgccagcgaccccggtgcctggtgggatggcacaccgttcgacgccatcctgctggatgcgccgtgttcggccaccggcgtgatccgccgccagccggacgtgatgttccaccgccgcgccgaggatatcgatgcgctggtcggcgtgcaggcccgcctgctggaggcctgctggtcgatgctgcgcccgggcggcgtgctgctgtacgccacctgttcgatcctgcgcgccgagaacatcgatcaggtgcgggccttcctgaagtggcatccggacgcggtggcacagccgctggatgacagattcggcctggactgcgaggggatcgcgcgccagcgactgccgggtgacagcgatgctgacggtttcttttacgcgcgtctgctaaaaacggcctga

SEQ ID NO: 513639 - DNA, 1710 bp, Stenotrophomonas maltophilia
atgctgaaatcccgcgcgtcgcgcgagacgtggttgttcgtggtgatggccctgctggtgctgggggccgggctgggccttcgtgatccgtggccatcggacgaaccgcgcttcgcgctggtggccaagcagatgttcgacagcggccactggctgttcccgcaccgcgggaccgagctgtactcggacaagccgccgatgctgatgtggtggcaggccacgctgtacagcctggtcgggcagtggcgcgtggccttcctgctgccgtcgctgctggcggcactgggcacgctgtggtgcgtggtcgacctgggccggcggctgtggacgcggcgggtggggctgtatgccggctgggcgctgctgttcgcgctgcagttcaccttccaggcgaagaaggcgcagatcgatcccctgctgctgctgttcatcaccctggccaactacggcctgctgcgccacctgctgctggggcctgcctggcgctggtggtggctgggctggttcttcgccggcatcggcgtgatcaccaagggcgtgggcatgctggcgctgctgatgatcgtgcccgcggcaatcgccacggcgctgcggtggccacgggtgggcctgcacgcgcgcgacgcgcgcttctggctggcgccgctggccttcctgctggcggtgtcgttgtggctggcgccgatgctgctggccggctttgccaccggctcggacgaatatcgcgcctacatggacgatatcctgttccagcagacggcgcggcgctacacccattcctgggatcaccaccagcccgcctggtacttcctggcgacgatgccgctgatgtggatcccggcattcctggccctgccctgggcgattccggcctggcgccgccggctgcaacgccgcgacgcgcgctatctgctgccgctggcctggtggctgatggtggtgctgttcttctcgattcccgccggcaagcgcgacgtctacatcctgccggcgctgccgatgttctgcctggtgctggcaccgctgttgccggggttgctgaagcgacgcgatgtgcaggccgtggtggggctgttcaccggcctgctgtcattgggcctggccgtggctggcgtgatggcggtgctgggtgacccggccttcgagctgcgcctgacccatagccgcgggctcgcccccggggccgtcgacgcgctggcgtggacgatcctggcgatgggcctgtggggcggattgagcctgctggcctgtggccgtcgccggcagcttgcgctggtgtcgaccctggcggtggtctgggtgctgtacagcctggtcggctacccgctgctgaacgattccagttcggcccgtggcctgatgcgcgcggtcggtacccgcctgggccccgatgccgagctggggctggtggcctggaaggaacagcacctgctgctggccgaccgtcccgcagcgaccttcggtttcgagactgactgggacgagcagctggtggcggccacgcgctggcagcggctggcgcccggacgccgttggctgctggtccacgagtacgcgatgctgtcgtgcgtcgaccgcaaccgctccgaactggccggcgtggccaaccggcggcgctggtggctggtgccggcggcggcggtgacggtgccgtgcgtggtcactgccgaggagcgggaacgtgaacggcgtttgcaggaacatgactag

SEQ ID NO: 513640 - DNA, 1257 bp, Stenotrophomonas maltophilia
atggccggcgacccgctgggcgttcccgtcggtgggcgtcacggggttgcacacgggctggcccagctggggctgttctgcctgccggcactggtgctgaccgtgccgatcaacctgttgccgtatggtcttctgctgctgctcagcaccctgctggcgccggagctgctgtggcgcgcgcggggcatggccggccagccggtgaaagtgctggtctggctgatgctggcggtgctggcgctcggcgtactgtcggtggtgctgttcgaacagggcctgcgtgacgtcgacaaccgttcgcgattcgtggtgatcccatggatcgcgctgtggatctgcgcgctgcgtcccagcctgcggtggctctggtacggctcgttgaccggcctgctcgccaccttcgtgatgtcgctgtggcaggtgctgggcggcgccccgcgcgcggagctgttcaccaacgccatcgtgctggccgacatcgtgatggtgttgatggtgctgctggtgttctgccgcccgtcgcggcgctggtcgctggtgatcctcggcatggccgccggctgcggcaccatcgtgctgaccggcagccgcggtgtgttcgccgccttgctggcgctgctggtggtgctggcgctgagcctgcgctggcgtaccggtgcggcgcgcctgtcggtgctggccgggatgctggcgatcggtgcgacgctgctgctgtcggtgccggagctgcgccaccaggtccgcctgagcgagctgcacagcgacgtgcagcggatggagctgggcgacagtgattcttccgccggtgcccgcgtcgagcgcctgcaggtagcctggcagaccttcctcgatcatccgctggtgggtgttggcatcggtcatttcgacagcgcgatgcagcgcgtgccggtctgccgggagaacccggaagagttgcgctgccacctggggcatgcccacaacgacgtggccgaatgggcggcgacccagggtgtaccgggcctgctgctgttgctggcggtgtatggcatcccgctgtggttgttcgtgcgcctgcatcgccgcagcggacgggcgaccttccgcgggccggccgctgccggcgtcatgctggtgatcacctacgcgttgtgcgggctgacccagtcgatgttcgcgcaccagatgacggccagtttctacgtgaccctggtcgggctgctgaccggcctgtcgatcgtcgaaggcgcgcgccaccgggcgatcaccggctcgtga

SEQ ID NO: 513641 - DNA, 807 bp, Stenotrophomonas maltophilia
atgtcctccacgaccgctcccatcgaacggcctcgcatctcggcctgtattatcgcgttcaacgaggccggccgcatcggcgactgcctggcctcgctggccttctgcgacgaaatcatcgtcgtggactcgtactccaccgatgccaccctggccatcgccgaggccgcaggcgcccgcgtgctgcagcgcgcgttcgatggcttccgtagccagaaggcctactgcgtcgagcaggcaagccacgactgggtgctgtgcctggacgccgatgagcggatcagcccggaactgcgcgcagccatcgaacgggcccgcgacggtggcttcgccggccatgccggctatcgcttcgcgcgcctgtcggagtacttcggcaggttcctgcgccatggcaacgcctacccggaccgggtgatgcgcctgttcgaccgccgccgcggcggctggcgcggcaagcgcgagatccacgaggcggccagcgtcgacggcagcgtcggcaccctgcgcggcgacctggtccattacccgtatcgctccctgcagcagcagctggccaagaccgagaagtacgcgcggatgatggccgagcacgagttcgcacgcggcaagcgggccacgctgggcaagctggtactggcgccggcctggcggttctggcgcggcttcgtgttccgtggcggcttccgcgatggctggcacggcctggtctacgcctacgtgcgcgccaactacgtgcggcagaagaccatcatgctgtggatgctgggcaacggccagcccgtggccgacccgccgaacccctga

SEQ ID NO: 513642 - DNA, 1056 bp, Stenotrophomonas maltophilia
atggccgggtacctgttgtttgcgacggagcgctatgcgctgcctattctcgccccgttggcgcaggccttgcacgcctccgggcaggaggtggcggcctggttcgaggacggcgcggccgccagcagcctgccgggcgtgcccaacatcggactgaaacaggccctggcgatgcggccgcgtgccgtgttcagcgccgccaactgggtgccgaccttcctgtccggcgccaaggtacagctgttccatggcttcaacgtggagaagcgcgacagtgcgcgcggccacttccgggtgcgcggcatgttcgacctgtactgcacgcaggggccggccaccaccgctccgttccgtgagatcgccgccctgcagggccacttcgccgtagccgagaccggctggccgaagctcgacccgctgttccgcgacgacggtggcgagagcgccgcgctgcgcgcagcggcgggcgggcgcccggtgatcctgttcggttcgaccttcaccgagcgcctgagcgcagcgccccacctgcatgcgcagatcgccgccgatatcgctggcggtgagcgctactggctgctgaccctgcacccgaagtgcccaccggaactgttcgagcgctaccgcgcgctggccggtgcccatgcccgcttcatcgagccggagcaggtgatggctgcgcagcgcgccgccgatgtgctggtgtcggacacctcgtcgatcgtttcggagttcatcgtccagcacaagccggtggtgaccttccgcaaccgcgtgcccaagccgcacatgatcgacttcgacgacccggcgcagctgccggcgatgctgcagcgcgcgctgcatcccgacgccgcgctgcaggcggagatcgtgcgctacgccgacgccatccatccgtaccgcgatggcctgtccagcgagcgggtgatcgccgccaccgaggatttcctgtccggtgaaatgggcgtgctgcggcgcaagcccttcggcagctgggtgcgcgacctgcagatccgcaaggacctgggatattgggggccgtcgcagcgctga

SEQ ID NO: 513643 - DNA, 1539 bp, Stenotrophomonas maltophilia
gtgagcctgccgccgcccctgcccgcatcgctgcctgccggtggcgaggaccatcgcctgcacccgtggtcgtggctgttcgtgctgctgatgcagctgcgccactacttcctgccgctggtggcgctgctggtgttcggccagcgcggtgaccgcgacccgatgtgggcgcagctgattccgctgtcggcgattgccgcgctggtgctggtctcggtgctgcagtacctcagctaccgctaccgcatcggcagcgacgcgatcaccgtgcgcagcggactgctggcgcgcaaccgccgcgagatcccgttcgcccgcatccacaacgtggaagtgcggcagaacccgctgcaccgcctgttcggcgtggccgagctgcgcctggaatcggccggtggcgtgcgtccggaagccgaaatgcgcgtgctgaagctggaccaggcgctggcgctggaacgactggtgcgccagcgtgggcaggcaccgcaggccgccgacgtcgtggccgcccactcgatcaccgacgccgacaccgaacaggtgctgctacgcctgtcgagctgggacgtggtgcgcatgggcctgctgtccaaccgcggctgggcattggcgatcgccgccttcggcgtgctgttccagaccgtgccgcggccggtgatggacgcggccatccagcgtggcggccgggaagccttcggctacgcaagccacctgcatcccggcgtggccggcgccttcctgctgctggccgcagccttgctgctgggctggctggcgctgcgtgcgctgtcggtggtgctgaccctgctgcgctatcacggcttcaccctcagcgagcaggatcgccgcctgaccgtctcggccggcctgctcagccgtacccgcagcagtgtcgcgcgtcgccgcatccaggcctggacgctgcgcgaaaccaccctgcatcgctggttcggcctgcgccagctgcgcatcgacagcgctgccggcgggccctcgcgcgacgaagaccgcgccctgcgcgagctggcaccgctggcaccggcaatgcgctgcgagcagctggtgcagcacctgttgcctcaactgcggtggccgccagcgcaatggcagtccattccgcagcgtggctggtggcggctgtgcctgggcgcgctgctgctggtgccggtgctggcagcggccgcgtactggcgctggggatcatggggcctgatcgtgctggcctggctgccggtggcgctgctggtggcacatcggcagatggcgcgcatgggctggtatctggatgcccattacgtggccgtgcgcggcggctggtggaagcgctggtggcgctgggccgagctggacaaggtgcagggcctgcgcctgcagcgttcaccgctggacaagctgctcggcaccagcagcctgcagctggatacggccggtgcgcacggtgatgtggcgttgaccctgcgctacctgccgcaggcacaggcgcaacacgtgatggagcagctggccgcggcgctggcgcggcgcaagctgcgctggtaa

SEQ ID NO: 513644 - DNA, 501 bp, Stenotrophomonas maltophilia
gtgatcgacgttcccctgacctccccgcctgccgatgcctggcagtcgctgccgcagcgcgccgcccgcctggccgcactggaaggcgccttcggcggactgttcgtgccgggcctgccgctggccgcggccgcgtggttcttcgagctgcccggcggcctgtggacggccgcccttgggctgctgatcggcatcgtcttcggcgcgtggcttggccaccggcgcttgacccgcacccgctggcggctggatacccaagggctgggcctgcgccgcgacctgatgtggcagctggaaacgcgcatccccatttcgcgcgtgcagcacctggacctgcgccgcggcccgctggaacgccgtgccggcctggccacgctgatcgtgcacaccgccgggacccgcatgagcgcagtgaccgtgagcggcctggacgaggccgacgccgagcgcctgcgtgacaccctgtcccatcagctcgaccaggacgccgacgccctgtga

SEQ ID NO: 513645 - DNA, 1137 bp, Stenotrophomonas maltophilia
atgtccgcctcccccggtcccgccatgcctgctgcctcttccctgttcggcgaccccgccgcgatccgctgcgaacgcgcggtggccgaactgcgtgccggtcgcccggtactgctccacgatgggcagggccagcggctggcggtgattgcactggacagcgccactgccagcagcttcgctgccttcgccgctgccgcacgcgagcgccattacctgttcctgaccgccacccgcgcccgcgtgctcggcgtggaggcaccggcaggcgcacgcctgccgctggcgggggttgccttcgatgccctgccctcgctgggctacctgcgcgagcccggcccgatgccggacgactggacggccggcgacgccttcgatgccggcgcggtggagctggcccgcctgggcctgctgctgccggcgatggtggcggtgcgcctggatgcagctgaccgcaccttcgagggtgctgctgaagtggcgctctgcgatctggccgaaggcgcggcccacgccgcccacgattacgaactggtcgcccgttcgccggtaccgctgcgcgacgtcggcatgaccaccttcgcggtgttccgcggcggcgtggcccagcgcgaccaggtcgcgatcatcgtcggcgaaccggacctgtcggcggtggtgccggtacgcgtgcactcctcgtgcctgaccggtgacctgttcggctcactcaagtgcgactgcggcgaccagctgcggcgcggcctgcgcaagctgaaggaactgggcggcggcgtgctgctgtacctggaccaggaaggccgcggcaccggcatcgccgccaagatgcgcgcctacggctaccagcacgacggcctggacaccatcgatgccgatgcacagctgggcttcggtgccgacgagcgccgctacggcagtgcggtggcgatgctgcatggcctgggcatttcgcgcgtggccctgctcagcaacaacccgaccaaggcacagcgtctgcgcaacgccggcatcgaggtgctggactgcattccggtcaccggcgagatcactgccgagaacgaacactacctgcgcaccaaggccgatcgtgccggccacatgctggatgtggacgcgctgatccaggctgcccagtag

SEQ ID NO: 513646 - DNA, 921 bp, Stenotrophomonas maltophilia
atgaatccgcaacgcaaagcccggctggtctaccgcgccaccaccctgttcgcccgcctgccctggccgctgctgcgggggttcgcacacgccctggcgtggacgtgggttcgtgtcaatgcccgtgagagccgcgttacccggcgcaacctcgaactggcctacccggagctggacggtcctgcacgcgaccgcctgcaccgcgacctgctgcgctccactgcgctgcaggccatcgagaccctgcgtttgtggagccggcagccggccgacaacctgcggctgcacctgaagcagcgccacggcgaagccctgtacgacgcggccctggccagcggcaagggcgtgatcgtggccgcaccgcacttcggcaactgggagctgctgaaccagtggctggcctcgcgcgggcagatcgccatcgtctacaagccgccggaagacgaggccagcgacgccttcctgcagctggtgcgcggcggccagaacgtgcagcaggtacgcgccgagggcccggccgtgcgccagctgttcaaggtgctcaaggacggcggcgccaccggcatcctgcccgaccagcagcccaaggccggcgatggcgtgttcgtgccgttcttcggcgtgcaggcgctgaccatgaccctggtcaaccggctggccgagcgcaccggcgccaccgtgctgtatggctggtgcgagcgcatcgggccggacatggaattcgccctgcacatcgagccgaccgacccggccgtggccgatccggacccgcaggtggccgccaccgcgctcaatgccggcatcgagcgcatcgcccgtcgcgacccgtcgcagtaccagtggacctacaagcgctatacgctgcggccaccgggcagcggcgaggaagatccgtatgcgaccgaagagcatccgcactga

SEQ ID NO: 513647 - DNA, 441 bp, Stenotrophomonas maltophilia; identical to SEQ ID NO: 493477

SEQ ID NO: 513648 - DNA, 1854 bp, Stenotrophomonas maltophilia
atggccaacgaacgtcctgcccaatccgaaatcaagcaactgatcagcaagggcctggaacagggctacctgacctacgccgaagtcaatgaccatctgccggacgacatggtcgacccggaacagatcgaagacatcatcggcatgatcaacggcatgggcatcgatgtccatgaagttgcgccggatgtggaaaccctgcttctcaacgacggcaacaccggtaaccgcgaagtcgatgacaccgcggccgaagaagctgccgccgcgctgagcgcgctcgacaccgaaggtggccgtaccaccgacccggtgcgcatgtacatgcgcgaaatgggcacggtcgagctgctgacccgcgaaggcgaaatcgccatcgccaagcgcatcgaggaaggcctttcgcaggtccaggccgccctgggccagttcccggtttcggtcgaatcgctgctgaccgactacgaggcccacaaggaaggcaagaagcgcctggccgaagtgatcgtcggcttcaacgacctggccgacgaagagccggcgccgccggcggtcgctgccgatgacagcagcgatgccgacgcagaaggcgacgaggacgaggacgatgacgtcgagggtggcgaggaagaagccgcaccgaccggtccggatccggaggaagtcgctgcgcgcatgcaggcgctgagcgatgctttcaatgccttcaagaaggcggcgaccaagggcgacaagaagaacctgccgcgcctgcgcgaagagatgtcggcggtgttcgtcaccctgaagctgccgctgccgctgaccgacgtgctgaccaagcagctgcgcgacaccatggcgtcgatcaaggcccatgagcgacgcgtgctgaacctggccaccgtcaccgcgcgcatgccgcgcaaggacttcatccgctcctgggaaggcaaccagaccaacctggagtgggtggaagacgcactgaagcgcaagcagaagtggtcgtcggccctgcgcgaagtgaaggaccagatcatcgccgaacagcaggcgacgatcgacatcgagaagctgacccagctggacctggaagagctgaaggaaatcagccgtgccatggcctacggtgaagccaaggcgcgcaaggccaagaaggaaatggtcgaggccaacctgcgcctggtgatctcgatcgccaagaagtacaccaaccgtggcctgcagttcctcgacctgatccaggaaggcaacatcggcctgatgaaggccgtggacaagttcgagtaccgccgcggttacaagttctcgacctacgccacctggtggatccgccaggcgatcacccgctcgattgccgaccaggcgcgcaccatccgtattccggtgcacatgatcgagacgatcaacaagttgaaccgcatttcccgccagatgctccagcagtacggccgcgaggctacgccggaggagctggccaaggaaatggacatgccggaagacaagatccgcaaggtgatgaagatcgccaaggagccgatctcgatggaaaccccgatcggcgacgacgaggattcccatctgggcgacttcatcgaggacaccaacgtggagtccccgatcgagaacaccaccaacatcaacctgtctgaaaccgtgcgcgacgtgctggccggcctcaccccgagggaagccaaggtgctgcgcatgcgcttcggcatcgacatgaacaccgaccacacgctggaagaagtcggcaagcagttcgacgtgacccgcgagcgcatccgccagatcgaagcgaaggcgctgcgcaagctgcgtcacccgagccgctcggagcagctgcgcagcttcctggatatcgattga

SEQ ID NO: 513649 - DNA, 312 bp, Stenotrophomonas maltophilia
atgaaggatgtggagcacgatgttcccgagcccgtgcaaaccgatttcccgccgctgctggactgggatgaggtgatgcgggttgagtgcgaggatcgattgggatttgcacgccgtacgacgtatgcgctgctgacgctgtcggaggccggattgcttgccggcttcagcggcgacaaccaacagggactgaagcagatcagacggatggttgcgttgttccaggcatgcctgaggcggcaggtatggctcgcggaagcggcggagaggcggctggggcgtatttcggaggcgcttgccgccgccgggtag

SEQ ID NO: 513650 - DNA, 570 bp, Stenotrophomonas maltophilia
atgcaactggaagacatcgagcgcataggcgactacgtcatgccggagcgccctgcagtacgctcagatctcgcactgatcttcggaactcggcacggagtggaggatttctgccaggcagtagtcaccctgtggcacaagagaatgttccggaaggcagtcgtttccggtggcatgaccgcaggtcttcacgattcagaagccgaaaccatggctacccgcctcatggagttgggaattccagagcatgtgctcatcatcgagccgttcgccatgaacactggtgagaacgtatggcgctcgcgcgagcttgccgagcgcatgctgcctctcgaagagagacggagcgtcattgccatcggaaaaatctgttccgcgcgtcgatatctgatgacactggcccgtcattggccagggccaatcgttaccgcgcagtgggtcaactatttcgcggtggacaagagtgactggcacctggatccggagttcgccgaacgcgtcagggccgagtacgtgaagatcccgcactacataaggaggggattcctgatcgagcttccagaaagctga

SEQ ID NO: 513651 - DNA, 498 bp, Stenotrophomonas maltophilia
atgagcttcgccgccagtaccgtgatggtcggcggagcggagatgtatcccaccaggaccatcgtccagaacgccatcaactccaaggaccacacgaccctggtcgctgcggtcaaggcagcgggcctggtcgataccctcaatggcgccggccccttcaccgtcttcgcgcccaccaatgcagccttcagcaagctgcccgcaggtacggtcgatacgctggtgaaacctgaaaacaaggcacaactgaccaagatcctgacctaccacgtggtgacaggcaattacagttcagcgcagctgatggccgatgccaggaagcacggcggcaaggccacgctgaagaccgttgaaggtgaatccctcaccgtcgcactgcatgacggcaagctgtgggtcatcgatgccaagggcggcaaggcggggatcagcatcgccgacgtcggccagtccaatggcgtgatccacgtgatcgacaccgtgttgatgccgaagtag

SEQ ID NO: 513652 - DNA, 252 bp, Stenotrophomonas maltophilia
atgagtcataccggcatttttcagatcaccgatctcacctacaaggctggggagcagggcgacctggcccgcgcactgcagatcgtcgccacctgcaccgcctgcggatcgacgagcgtgtgggacgagcatgagatggaacacgttgccggtggaaccgtgctgtcatgccgtggctgtggtgtccgccaggccatcagcaacgcgcgcctttctggctgcgcttccgacatccgccatccgcgccgctga

SEQ ID NO: 513653 - DNA, 393 bp, Stenotrophomonas maltophilia
gtgagcacctcatcgcattcgcttgcctacctgcttgcgcgcatcctgctgatggcgctgttcctggtctccgggctgggcaagctcggcgatctcagcggcacccaggcctatatggaagccatgggcgtgcccggcatcctgctgtggccaacggtcgccttcgagatcggcagtggcctgtgcatcctgcttggcttccagacccggctggtgtcgatcgtgctggtgggcttcagcctggtcaccgctttcatcttccaccacaacttcgccgaccagacccagcagatcatgttcctgaagaacctggggctggccggtgggttcctgctgctggcctgcaccggggccgggcgctacagcatcgacgggcgcggtcggcgcgggtaa

SEQ ID NO: 513654 - DNA, 420 bp, Stenotrophomonas maltophilia; identical to SEQ ID NO: 493469

SEQ ID NO: 513655 - DNA, 408 bp, Stenotrophomonas maltophilia
atggcacacgatgcaggcaggacgatcacgcccacgatgctgtataccgccgcggccgcggccgtgctggtcagcctgctggcctgggcggtggaatggagcgggatggcctatgtctgcccatattgccgcgtgcagcgcacggtcatcggcgtgctgggcctgctgacgctgtacgcgcgcccgggcggcatcgtggtgccctggctgtcgtacagcgcgggcgccttcgcgttcgtggtggcggcgatgcagcacttcaacggttggaagcgcatttccgccggcgacttcagtttcaacgaacagtggtacatcgatccgtggctgctgtcgggctgcgcgatgctggtcctggtggcgcagctgatgctggtgcaggccgcctgccggcgcaggttgcactga

SEQ ID NO: 513656 - DNA, 690 bp, Stenotrophomonas maltophilia
atgccgtcgcacaggatcctctacatactgaatccatcgggcaacatggcacgaaagttcagcgtcatgcgtgatcgtgaaggcggtatccgttgcgacaaaatggaacccggcgcgatggattgcgaacccttcgtcatcatcgacgagctcccggtcgagcaaccggcgatcaactatcttcagttcaagcgcatagtcgctcaatcggtgatcagcctgtctgagcccggctacccgaccaatgtgtacgatgacatccagaatccgcagagaagggatgcggtcagccagcatctggggcagcgtttcgagacttacatctacctggcttccggcgcgtactcgcttggcatcgatgtctgggcgccgcagaagatccgctatgctgacgggtctaccgcttcctacaactacagcatgatcaaccgtcgctgggagcccaacgccctcctttacaaggacaggttcggtaactccattccgcttagcgttacacagttgagcgaggggcgaggcggcgttacgcatcgcttcgaattcccgaatgggaatgccaccgatatgggaagcttcgtcaatgcgctcaacaacatcggtgtcccggtgacgggggcgggcaatcagtctgtcacctgcaccagcccgatcaggctgaccgaggtcaaggtgacctgcaaccggaactga

SEQ ID NO: 513657 - DNA, 642 bp, Stenotrophomonas maltophilia
atgccgccgatcctcaccgccttcgccacctcccccgaccgcggccagggcctggcccgtgacatgcgcgtgcgctgggcgctggaggaactggccgtggcctatgacgtacaactgctcagcttcgccgagctgaagcagcccgcgcacttggcacggaatccgttcgggcagattcccacctggcaggagggcgaccggaccctgttcgaatccggcgccatcgccctgcacctggccgaacagcaccccggcctgctgccgcgcgatccggacgcccgcatgcgcgcgatcatgtgggtgttcgctgcgctgaacacggtggagccccccatcgtcgagcgctccatggcctgggtgcttgagcgcgagcaaccctggtacgcgcaacggctgccaatgctcgatgagcgggtccggacgcggctggcccaactatcgacgtggttggcgaggacaacgtggctggacggcgaattcagcgtgggcgacctgatgatggtctcggtgctgctgcgcctgaagagcagcggcctgctcgacgagtacccacaggtcgccacctatgtggcccgggccacgcagcggcccgcctaccagcgtgcgtttgctgcgcagctggcggttttccaggacgcctag

SEQ ID NO: 513658 - DNA, 453 bp, Stenotrophomonas maltophilia
atgagcacccagtccaccatcgaacatcgcctcaacgacctgatcgaaatcgcccgcgatggcaagtcgttctatgaagaagcggccaccaaggtcaaggatgccgagctgtcggcactgttcacccgcatcgctggcgtcaagggccgcatcgtggcggcgttgagcggctcagtggccgccagcggtggcaagccggccgaacatggcaccgtggtcggttcgatgcagcagttctacggcaaggttcgagccgctttcggtgacaccaactatggctacgtggctgaacttgaagaatccgaggaccgcctgctgggcgcgttcaaggatgtgctgcaggacaacgagctgccgccggccgtgcgccaggaagtgacccagctgcttccggaagtgcaggagtgccacaacgtcatgcgtgcgcgaaagcacgcaatgaaggccgcctga

SEQ ID NO: 513659 - DNA, 672 bp, Stenotrophomonas maltophilia
atgcgcatcctcgtggccatggacgacgccgaacttgcacaggcgcttcgcaacgtattgcagagccgcaacatgctggtggacctcgtggcaacctggtcactggccaaggccgcggtacaggccgtggagtaccgcgccctcattctcgaccgctggctgcccgaaggcgattcactgaagctggtgcagatcgtgcgcggcttgcgtacctggctgcccattctgctgttggggcgccacaaccacgctgccgactgcatcgcttgcctggatgccggtgccgatgactacctgcccacgccgttcgagttcgacgaactggccgcgcgactgcgcgcgattacccggcgcctcgacgctgatgccggccacattctgagaatcggcaatttcacgttcgatttttccaaccgcatggcattggtaggcggtgcgcccctgagcctgccgcgcagccagctgctgctgctggaagcgctttgcgcccgccagggccggatcgtccgccatgaagtgctgagtgctgccgtgcacctggccggcgccgacggcggtaccaccgtgttggatccgcacgtgtcacgcctgcgccgtgccctgcgctcggccagtgtcagcatcgagtccaagcgtgggctgggctacatgctgaacgacgacgcggcctga

SEQ ID NO: 513660 - DNA, 2802 bp, Stenotrophomonas maltophilia
atgcatccatcgcgcatgtgcgaggcgttcggggatgtgtgcaccgggcaaatgagccgtggaaccgaccagggagagacgatgtcagcgcgtcaacgatcactgcgtgaagcacgccacatggacaaggccgcctatgtggggggcgacgagcggttctacgaattgagctacaaccagtaccggcccagcgaagatttctgcagtatcgttgaagcggagatcgaggcggccggcatggcgtggacgatccatcgcatcggtgtctggtcgcacctggcgacgcatggcgacccggtcgccggcaacctgccgccgcaaggctggaagatccacgtttcagccacgcaggagaactgccagcggttgctgcgcaccgtcacccggatggccctggccgagcgcgtgaagttcaagttcgccaatgacatgaacacgatgcgcatgatgagctccaagcgttggccacgcggtggctcgggcaagttcatcacgctctatccgctggaccttgcggtcttcacgcgcttcatcgagcagctgcatggggcgctgaaggacgaagatggctcgtacatcctgtccgatcgacgctacaaggactgccgctgcctgtattaccgctatggcggcatgcgccaggtgtaccggcttgatttcatcggccagaaggtgccgatgctggtcgcgcccgacggcagccatgttcccgacctgcgcaatccctatttcgaggtgcctgcctgggaaaccgacccgttccccagcgaggatgatcccggcgagatgacgttgaaggagggccgctatcaggtgcaggccgcgcttgggttctccaacacgggcggggtctacctggcgttggatcaggtcaccggggaggaagtggtcatcaaggaggcgcggccgcatgtggaaatgcacggggaagggctcgacgccaccagccggctggcacgcgaacgacgcaatctggaactgctgggcccggtgggcgcctcgccgcgctgcctggatgcattcaccgattgggaaaacagctatctggtggaagagcgcctggatgcattcgatcttcgcgagctgatgctcaagcactcgccgctgatgaaggcccgtcccagtgcacgcgatggtagtgactactacgggatgtgcgtgaccatcttcaccggtctgcttcgcgcggtcgaccgcgcacacaaggtgggagtggtgatcggtgacatctcgccgtccaacatcatggtcgaccgcagcaacatgcgtgtgcgcctgatcgatctggaggccgcgttcctggacggcagcgatgagtgggatgacatccacacgcccggattccgccggatcatgaagggtcgcaagcgcgccagctgtttcagggatgaccgctatgcgaccgcggtggtgatgttctactgcctgttcccgctgatggccatggcctacatccgtaccgacctgttccagaaggtgctgccggtgatgatggaggatatcggctggcagcacacgccagtggccgaggtcatccaggcgctggtggacgaccgtatcggcctggaagaggccgcacagctgctgcagcagccggcgaccctgcaggcgccgttctcgtcgccgcagcgcccgttgccggcgccgcgccagtgtatccggcggctgctcgcgttcatggatgcacacagccggctgcagccggagcggacgctgttcccacttgatccgttctcgcactccaccaacacgatgagccttggtctgggggcgaccggtgtgatccacgccttccatggggtgggtcatcagccgtcgccggcggtgatggagcgctatgcgcaggagctgcaggccctggatcgcacatcgctaccgccggggttcctcaccggccttgccggcatcgcctggtcggcgctgctgcgtggcgagggggaactggcccgcagcctgctcgacagcgctgacggcagtgacctgttgcatgcgcatcactcgctctatcacggcatggcgggtatcggaatggcgcacctggccatgcatcacgcgaccggcctgcccgggcatctcgacagggcgctgtcgctggcgcggcggcttgcagacaccgtccaccacggagagcggggtgcctactggcaggacgaaggtggcgtccgcatcggcatgggttacggccaggccggcgtggcgctgttcctgctgaggctgtcgcagctcagtggtgatccggcatggcgcgtgcttggcgagcaggcactgcgacacgatctctcctacggcttcgagctggagcccggagtgaccaccttccccagctcaccggaagaggtcaacacctatgaaccctatctggagcaggggactgcgggcatcgccaaggtcgcgatccgttacggcctgtggcaggacgtgaatcggctggtggatgacttccatcgcaagtattccggcttctgcggcctgttgtatggcctgtcgggcatgctggatgtgtttgtcgacgcccatctctactccggtgaccctaggtacctgcagatggcggagcgaccgtaccagggcatcgtcgatctgtatctgttcgaggaggaggagggaatggcggcggtgccgggcgagaatctgttccgcatttccttcgaccacggtaccggcatcgccggagtgatccgcgccctgcatcggtacgacacgctggcgccggatgagttcttcctggatgcactcgatgtgcatggcgcggtggtacgggaagtggacggagccggggtggggcaggcggcggttgcatga

SEQ ID NO: 513661 - DNA, 1644 bp, Stenotrophomonas maltophilia
atgaatgcgcgcccgcacccggccggacagccacttcagcgcgagcagaccgcgcagcggcacagtgtgcgcgccatcctcgccagcttcgcgatcctgctcggccccctccgcgggcgctaccttgcggtggccgccaccaccgcgatgttcggcggactgggcgggctgctgcatccgctgctgatccgcgcgatcttcgacgaggccgccagccggcaggatttcaatcgcttcctgctgcttaccggtgcatatctgctgctgtgcctggtgaccaacctgggcaactacagctgcgcgctgtggcagcagcacgtggataaccgcatcgtggagcggatcgggacctcgttgctgaccgcctactatggccgcagttatgacgaggtggtgcagaagggggctggctactatgtggcgcggatccgctcggacgtgaaggatggcgtggtgccgatgctgtcggtcgcacgcaccaccctgacccaggcggtgacattcgtcgccttgatcgcagccctgctgatcatctcctggcgtgcgttcctggtgctgatggccatcattcccatcgccaccacggtcagcgtgctggtcggccgacgcatccgcgagctgaccgtggtggagcgtgaccgcgaggccgaactggtttctttgctgacccgggccgtgtctgccttcaagatggtctgtacgttcggcctgggccccaggacggtgcaggcccatgaccgcagcctgcgcgaggtgctggattcgacctaccagcgcttcagggtggtgaggaccctgcagggtgcgagcgacctgacgatggtgatctcggatgtctgctcgatcttcgtcggcgcactgttcgtgttccgccaacagatgacactgggttcgttcatcgccttcatgaacgccttctggcgctcagccacgacgctcatcggcatcttcaagaacattgccgagatgcacagccacggtgtggtggtggtgcgggtggcggagttcatgaccgcgccggcagccgcggcgtcggccacgcacatcgagggtggtctgctggcgacgtcgatcggctacgggtacggcgccactcccgtgttttcggatttcaccctggccctttcacccggtgaacgtgcactggtgattggcgacaatggcagcggcaagacgaccctggccaacgtcctggccgggtacttccagcccgtcgccggccagctgctgcgaccggcgcgtatccgcgccatcacgcttcctctgcagttccctccgctgaaggtgcgcgacctcggcgccgatccggtgctgctggcgcgactggggatggacggcgacgggatcgccgacagcctgccggaaaccctgtcggcagggcagcagcagaagatcgccttggcgatggtgctgggcgaggatgccgacctctacattcttgatgagccggtcgccaacctcgatacggccagccgcgagattgcgatggacgcgatcttcgcacgcagccatggccgcatgctggtgatgatcatgcacggcgccgaggcctaccgcgcccgattcgatcacgtacacgaacttggcaggtccatgtggcaaccggcacgggtcacgcccgtgcacgtccggggagaggcatga

SEQ ID NO: 513662 - DNA, 1362 bp, Stenotrophomonas maltophilia
atgaagtcgatacagggtgcagaaaagggtgcgggcatgcgcaggctggtctactgcgcgcaggtggcgctgcacaatacactgcggagcaaggccatcaccgccctgatggtgctggccatcgcggtgggcattggggccagcatgaccaccttgaccgtggtctacctgctgtccggcgatcccttgcccgggcgcagcggtgacctctactacccccagctggatgccaatccgaactcgaagggccgcgagccgtacgacgtgctggactatcgctcggccttcgacctgtggtcgtccgggcgcgcggaccagcagacactggtggttgccaatccggtcaagctgcggcccgatcagggcagcgcgccaccggtcatccgctcatcgatctccaccaccaccgacttcgcgacgatgttcgcggtgccgctggcgcatggacgctggtggtcgcgcgaggaggatgacgcgcgcgcacgtgtggtggtgatctcgtcggagctcaacgagcagatgttcggtgggggcgacagtgtggggcagacactgcgggtcaaggacaccgcgatgcgcatcgtgggcgtgctcgcaccctggcgaccctcgccgctgttctacaaggtgcggggcggccgcttcagcggcggcaacacgtcgggcttcttcgcctcggccgatgatctgttcatgccgctgacctccagcctggagatcaatgacggcgacttcgtgccgttcacctgctggtccacgccggaggagcgcggccgcctgcagaccgcgccgtgtgtctgggtacacctgtgggtcaagctggacagcgccgccaaggtggccgcctatcagcggttcctgcagaactatgccgcggagcagaaggccctgggccggatcagccacgccgacaacacgcggctgcgctcattgatgcagtggctcgacttcaaccaagtggtacccagcgacgtgaagctgcaggccatcctggccttcgccttcctcgggatctgcattgccaatgtggtcggtctgctgctggcgaagttcctgcgctacagcggtgagatcggcttgcgtcgcgcactgggcgcaagccgcgcggcgatcttcctgcagtgcgtggtcgaggccgcgctggtgggggcactgggtggcacgctgggcctgttgctgacctggctcggcctgagcgcggtgcgcagccagccggtggcctatgcggacctggcgcggcttgataccaccatgctgctgttcaccctggcgctgtcggtgctggccagcctgctggcgagcctgattcccgcgatccgtgccagtgcggtccagcccatcgcccaactgaagcttctgtag

SEQ ID NO: 513663 - DNA, 1215 bp, Stenotrophomonas maltophilia
atgcagatcggcatcgtactttcggccctgcgccggcaccgcctggcgaccttcctcatcgcgatggagatcgcattggcctgcgccgtgctgtgcaacgcgatcttcctgatgatcgagcggaacgctgcaatgcagctggtcagtggcctggacgagtcacggctgggggtgatccagctcgacggcatcgatgccgagcgcgccaacgatgtcaacgcgcgggtcgttggtgcattgcgggggctgagcggcgtgacggcggccgggctggtcagtgccatgccgttcggcagcccgggcatacgcgccggcgtcaacctggacgaggaccagcaggtgcccggcggtgttctggatttctacctggccgatgccgtggccctggacgcgctgcagttgcacctggtgggggggcgcatgcccggtgcggacgagttcgcaccgaccgatgaactggtgccggccaatcccccggcgctggtcacccaggagctggcccaacgctactggcccggcgaaaacgccgtgggcaagagcctgtgggcgatggacacccggctgcgggtgatcggcgtggtcgagcacatggccgtatcccgccccggccgcggtgaagccaagggctcggactggtcggtgatcgtgcccgcatcgcaggggccgcgcctgaccggccgctatctggtgcgcgccgaggccggcgacatgaaccgcgtaatgcgcgatgcgcagcaggcaatccgccgtgtcgcgccggacgtggtgttcgatgtcgagggcagccggcggatctccgaactgcgcgagcggcatttcgaaggtgaccgggtcatgatggggctgctgggcggtgtcatcatcgcactgctggctgccactgccctgggcattgtcggactggccagttactgggtggagcaacgtcgcaagcagatcggcatccgccgcgcgctgggggccacgcgcaccgatgtgatgcgctatttccagatcgagaacatgctgattgtctccatcggcatcgcggccggggctctgctggcctacgcgatgaacctgaccctgatgcgcttctacgaactgccgcgcctgccactgctgtacctgccggtgagtgcggtgatcctgctgctgctgggccaggcggcggtactgctgccggcgctgcgtgccgcggccatcgcgccggtgtcggccatccgttcgttgtga

SEQ ID NO: 513664 - DNA, 696 bp, Stenotrophomonas maltophilia
atgctcaggatgcaaggcgtcagcaaagtgttccaggtgggtgaagtcatgacccatgcattgcgctccatcgacctgtcggtgcaggagggcgatttcctctcgattaccggcccttccggctccggcaagtccacactgctgaacatcctcggtctgctcgagggcttttccggcggccactacgcgatcggcggcgtggatgttggcggcatgcgcgacgcggcgctcagcgcgctgcgcaacgagaagatcggcttcgtgttccaggcgttcaacctgattccggatctgaccatccaggccaatgtggaggtgcccctgcgctaccgtggcatggcggcagccgaatgcaggcagcgtgtggcctcggcactggcccaggtcggactgggcagccgcatgtcgcactatcccggcgaactgtcgggcgggcagcagcagcgcgcggcgatcgcccgcgccatcgcgggcacgccggccctgctgctggctgacgagccgaccggaaacctggactcgcagatgtcgcagggggtcatggagattctgcgtgagctcaaccagggcggcatgaccatcatcatggtgacgcatgacaaggagctggcggcgtgcgcgggtcgcagcgtccacatcgtggatgggcagatcgtcgaggtcacagcgcaggccatgcaggcgctgtgcgcctga

SEQ ID NO: 513665 - DNA, 3351 bp, Stenotrophomonas maltophilia
atgaatcacccgctgtacggccgttcgtcccgctccctgtcgcatcgcccgctggcgcttgccgtcgccagctcgctgctgctggccaccgcactgccagccatggccagcgaatcactcgaggcctggcagcagcagagccagctgcaggccgcgtgggcgcagcccgctgccagcaccgcacctgcaaccacggccacggcagctgccgccagcagcaccgccgttcttggcaaccccggcgatccggccagctggcgcagcgacgaattcaacgccgattggggcctgggcgcgatgggcgcggactacgcctatgcgcgcggcctgaccggcaagggcgtacgcctggcgctgttcgactcgggctccgcactggcgcatccggagtttgcaggacgcaatacctccagcatcaccatcggtgccgactgtgcgacgccgggcgtggtcgcaggggccggcgcctgcgggcagacccgcggcgaacagcccggctacaactactacggactgggcgccggcgttccggcctcactggcggcacgcctgatcgccgccggccagccctatggcttcagctacgccgatcacggcacgcatgtgcttggcaccatcggcgccaaccgcaatggcaccggcatgcatggcgtggcctttggtgcggatctcactgccgcccgcgtgttcggtgacacctactacgagtggcgcctggacccggacaggttctatcgtccgcgcgcggtgtaccgcaccgatccggatgatgccgccacgctggacatgtatgcgcagatccaggcgcagggtgtacgcgccatcaatcacagctggggcatttccacgcgcaacatgaccgccgccgcgctggaccagcagtacgccagcattggtgccgactacggcgtgtacggcagcatctacgccaacaacggcaatgccccaggctccactctcatccaggtgtggtcggctggcaacggcagcggtgcggttgccggcatcaccgcctcgatgccgcgctggaagcccgaactggaaccgtactggctggcggtcgccaatgtccgccggcccgacgccgccgcaggtgaaaccgactacgtgatcgatggcagttccagcatctgcggggttgccgccaactggtgcatctcggcccccggtaccgatatcgtcagcaccatcgtctccggcgatatccagggccgcatcgagaacacctccgcctacgtgcggctgatcatcgacagcgagaacaccaactacgtctacggcaccaagaccggcacgtcgatggccgccccccatatcaccggcgccctcggcctgctgatggagcgcttcccgtacctggacaacgcccaggtccgcgacgtgctgttgaccaccgcacgcgatctcggcgcgccaggcatcgatgcaatctacggctggggcatggtcgacctgcgcaaggccatcgagggctatggctcgctgcgcgtggacaccaacgtggtgatgaaccagagggccggcggcctgaaggtctgggaaggcgatgcgtgggacaactggaccaacgacatcggcggccccggcaagctgaccaaatccggtatcggttggctgcgcctgagcggcaacaacagcttcaacggcgccgtggtgcaggacggcatgctggagttgaacggcgccaacacgctcacctcggcggtcgaggtccagggtggccggctgctgctcaacggcaggctggtctccaccgccctgaccaccaccggtggcgtcagcacggtcagcaccagcggcgtgctggataacagcaacctggtagtcaacggcggcgtggtgtccttcaacggcacgcagaccggtggcaccaccaccgtcggcgccaatggcctgctgaagggcgtcggcacgctcggcaacacccgcgtggacggcatcatcgcgccgggcaactcgatcggcacgctgaccatcaacggcaactacgtgcagggcgccaccggcgtgtatgcggcggagctggcaccgggtagtcgcagtgaccagctgcacgtgaccggcaccgccaccctcggcggcaccctggtcgccctgccggaaccgggcgtgtattacctcggcgaacagttcaacgtcctgcgtgccgacggtggcatcagcggccagttcgccaagaccgacttcagtgcgttctcgcccttcctgcagttcagcctggcctacggtgccaatggcacgcgcatcgacgttgcccgtggcgcttcgctggccacggctgccaacacgcccaaccagcgtgcggtggcggccgccgccgacctgctgccgatcgcccagggcctgcccaagccgctgacccagctgttcccgcagcaggtcggtggcgtgctcgatggcctcagcggcgagctgcatccggccacggccatcgccctggtcgagggcagccgctacgtgcgcgatgccgcgttgtcacgccgggccggcgccgccgcacccggcagcgacgtgggtgatgcgacgggcgcatgggtgcaggccatcggtggcaacagcaggctggacggtgacttcaacaccgcccgcaccgaggccaacagcaacggcctgctggtcggcatcgaccgcgagttctccggctggcaggtcggcgtgctggccggtaccggccgtaccgacgtcaagcagcaggaccgccgcgccaagtcgaagatcgacaacacgcacttcggtgcctatgccagccacacctggggcggcttcggcctgcgcggtggtgtggcgtggagcaagcacgaggtgaagagcacgcgtgaagtcgccttcgcaggtttcagtgacagcctgagcgcgcgttacgacgcccgcacccgccaagccttcatcgaagctggttatcgcttcggtggccccgaagccgggctggagccgtacctgcaggtggcgcgcgtggaagtggacctcaagcgcatcagcgaacgcggtggagcagcggcgctgcagggcaagatggacgacaccggaaccacgatcgccaccgccggcgtgcgcttcgacaaggggctgaaggcttcgttccagcaggacagctggctgcacctgcgcgggggcgtcggctatcgtcgtgcctcgggggatcgcagccaggtcgccaaccttgcgtttgccaatggcagctccacgttcgcggtcaacggcgcgccgatcgccgacaacgcggtggtggccgaactgggcctgtcggcgtggctcacctcgcgccagcagctggagctgggctacagcggccagttcggcagcgagagccgtgaccatggtgcgaatgcacgctggtccgtgcgtttctga

SEQ ID NO: 513666 - DNA, 414 bp, Stenotrophomonas maltophilia; identical to SEQ ID NO: 512884

SEQ ID NO: 513667 - DNA, 201 bp, Stenotrophomonas maltophilia
atgcgtactttcaggaaagtgatcgccggtgctgtgttcgcgttggcctgcagtgggtcggtggccgtggccggaccggtccagccctgcgattttccctgctggaaggcctaccaggcgtgtgtagccggtgggggtgatgccatggaatgccagtacgaatacgatcgatgcgtcatggagcgctgcggcgcggtgtaa

SEQ ID NO: 513668 - DNA, 351 bp, Stenotrophomonas maltophilia
atggccgtcatgcgtgtcgtcgccaacatcgccacgtctgatcccgcccgcgccgctgcattctatggcgagctgctcggcatgccggtggtgatggaccatggctggatcgtcacccatggcgggcagggcagtgcgctggcgcaggtcagcttcgccagcgaagggggttccggcgcaccggtgccggacctgtctatcgaagtggacaacctgcaggaggtgctggaacgcatgcacgcggctggcatcgcgctggactatgggccggccgacgagccctggggcgtgcggcgcttcttcgtccgcgacccgttcggccggctgttgaacatcctcgcccacgcctga

SEQ ID NO: 513669 - DNA, 660 bp, Stenotrophomonas maltophilia
atggcgaccgtcgcacccggaccccgccccatgcagattcccgccgtcgccaggccccgcaccaaacccgctgaaacccgccaggaagagctgatggacgccgcgcaggcgctgttcctgtcacagggcgtggaagcgaccaccatcagtgacatcgtggccgccgccgacgtggccaagggcacgttctatacctacttcgcctcgcgcaccgagatcctgcaggcgctggcgcagcgctacacgctgcagttcatggccgaggtcgaccatgccgttcagcagcagcctgcccacgatggcgtggcgcgactgtgcgcctggatccgcgccaacatcgagacctatgtgcgcacgcacgcactgcacgacgtcgtctacgccaaccatcaccaccaccagcgcggcaatgccgagcgcaacgccatccagcagcagctgctcgacatcctcgaggcgggcacccgtgcaggcctgtggcagctgccggcaccgcagatcacggcctcgctgatctatgccggcgtacatggcgccaccgatgacctgatcgctgcgcccacgcaggacgccgacaccttcattgcggcggtggtggccgattgcctgcgcatggtcggcgtgtcgccggcgccgaagcgtggcggcacccgtcgctga

SEQ ID NO: 513670 - DNA, 1473 bp, Stenotrophomonas maltophilia
atgcaacgcttccgacggccggccctggtgctggcggcctacctgggcaccttcctcgcctcgctggacatcagcatcgtcaacgtcgcgctgccgacgctgcagcaggcactgcacaccgacatggccgggctgcagtgggtgatcaacgcctatgccatcgccctgtccgcagtgatgctgtcggcggggccgctgggtgaccgctatggccaccgccgcatgtggctgctcagcgtggcgaccttcaccgtgggctcgctgctgtgtgcctgcgcaggcagtctttccgcactggtggcggggcgggcggtgcagggggtggccggcgccctgctgatcccgagtgcgatgccgatcctcagccatgcattccctgatccgcgccagcgtgcacgcgcgatcgggggctggtcggcgttcagcgcgctggcgctggtgctggggccgctgctgggaggcgaactggtgcagcgcgcaggttggcccagcatcttcctgatcaacctgccgctgggcctgcttgcactcgcgctgggggcctggggcattcctgaacgacggcatccgcagcacgccgcgctggacccggccgggcagctgctcagcatcgtcgcgctgggtgcactcagttacggcctgatcgcgatcggcgagcacggcctgctggcaccttcgaccctgctggcgctcggcatcgcagcatccggcctggcgctgtttgcgtgggtcgagcgccgcgtggcgcggccgctgctgccgctggacctgttggcgaagccgggtttcggcatgctcaacctggcctcgttcgtgcttggattcaccgcttatgcgagcctgttcttcctgtcgctgttcttccagcaggcgcagggacatggggctgcgcaggccggtgcgcagctggtaccgcagttcgtgctgatggcggtggtgtcgctgctgttcggccgtctggcggcgtggttcgggctgcatgccgcgctggtgacgggctatgcaatgacaggcatggcgctgtgtgcgattgccacgttcgagccgactacagcgcacggccaggccagcgcactgctgatgctgctcggcactggcatgggactggcggtacctgcgaccggcatggcggtgatgtcatgcgtaccggccgagcgtgccggcattgcgtcggccacgatgaacgcgctgcgccaggcgggcatgagccttggcatcgcgctgctgggcagcctgatgggcctgcgcgcggtatgccagttcactgcgaccgcgcaggcggcagggcagcccgcagtggccgcacaggcgcgcacgctgatcctgcagccgtcttcactgctgccggggacgcagatactggcctggtaccgcggcgcgatggccagcggtttcggctgggcgatggctgtcgccggcgtgctggccctgttggcggcgctcgccctgtaccgccagtgcaggcgcgcctga

SEQ ID NO: 513671 - DNA, 306 bp, Stenotrophomonas maltophilia
atggctgaccagcatcacggcacctcccatcgtggcttcgcttcgatggaccgggacaagcagcgcgcgatcgccgcaaagggtggacgcgccgcgcatgcgtccggcaatgcacatgagttcagcccggccgaggcacgcgtggcaggccgcaagggcggcgaggcgatcagccgcaatcgccagcacatggcagcgatcggccgcgaaggcgggcacgcgcgccacgccaatgcacggcaacagcggcagcacgcggccgaacccgcgccgacgaaggaagggccgcaacgccagcagggctga

SEQ ID NO: 513672 - DNA, 1512 bp, Stenotrophomonas maltophilia
atgaccgcccagacaggaaaggacgccgtgaacagattcggatggcttgtactgctggcctgcgctgcaccggcccatgcggacactgcgctgctgagcggcagtttcgttcacttcggttactcgtccaccgatgagcagctgccagcggcgcagctgccgctgttcctcgacgaactgcgggacctgggcaacgacacgctcatcatcggccagacccgcgccacccgtgccggcgtgggctgcgccagcagcgcgcaggatttcgaatggatcgccggcttcccggccaagctgggcacggtgctggacgcggccgcagcgcgtgggatgaaggtcgtggtcggcaccacctacagttcgggccagtgtgcggcattctggcagggctcgaacgctgcagcggtggcgcaggacgcagcgcagtcgatggcgcagctggcccagcagtacgcgatgcatccggcattcgccggctggtacatcaccgatgagcccgcgcaggtaccggacgagcgtgcgtcgttctatcgttcaatcgtttccacactgaaagcggcgacgccgtccaggccggtgatggtggcgccctatctggcatcctccagcgtcgacccggccagcgtggccagtgctgcgctacggtttcgctctgccacgggggtcgacgtgcagatctggcaggacggcatcggcgcggcgtcgcacgcgaaactgttccagtgggatcgaccgggctattccaccgagcagtactaccaggcgttgtcggcgcagctgggcgccagcgctgtgtgggccgacatcgagctgttcaaccatggcagcccgctgttccttgataccggtaacggcctgtccggtgcataccggtcggcgtcggtgcagcgcatcaaccagcagttgtggagcgcgcgttcggctggcaagcgcgttgcctggctcaaccagtaccacatgtccgaagtggtcggccccggccagggctacggcgaggcgccgcggatgatgaacacctatcgcgggttgtacgggttgggtgcctcgtacctcgtcgatccggtgcagaccacctatcactacagcgtggcgccggcgaccagctatcccgacggcagcggccatgagctgttcgaccgccgggtaggcgacccgcgcaatccgatggacgcgggctgggtaggcgtgcacggcaacgtcagcatcaccatcgacctgggccagcgccgacgggtggactggatcggcctgcacacgatgacccgcccggcctggggcatcgtcacgccgacttcggtggaggtgatgtgcgccgagcccggaactgccgccgtaaccatcggcacgctgtcggcacccttcacccagtccggcgtgatgggctcgaccgaagaggagtacgtgctcggcaatgcagcccccctggctgcgcaatgccgcacgctggagctgcgcgtggccaacggcagctggaccttcctcagcgagatcgagatggctgcagagcagtaa

SEQ ID NO: 513673 - DNA, 465 bp, Stenotrophomonas maltophilia
atggatctccaacacgccacgctgggtaccctgctgcgcgcactgctggaccagctggacccggccgtcgagcaggcctaccggcacctgcaactggactaccggccgcgctacacgccggtgctgcgcacgctgatggcgcagggcccctgccggatcaaggacctcgcgctggcctgcgggctcagccattcggcgctcagccagaccgtggcggcgatggtgcgcgatggttggctgcacactgccaatggtgacgacgggcgcgaacgcatcctgcagttgagcccgcgcgcgcagcgcgcgatgcctgtgctgcaggcgcaatggcaggccaccgcagtggcggcacgcagcctcgatgccgatctggggcagtcgttggagcaggtgctgcgcaaagcactggtggcgctcgaacaacggcccttcgcacagcgcctgcaggacgcccgccggcgctga

SEQ ID NO: 513674 - DNA, 954 bp, Stenotrophomonas maltophilia
atgatatataagcgcttatatatcctcaatgcggggtggatgatggcggtctcctggatgctcggcgcgctgctggcgacggcctgcccggcgcaggatgcggtgctgcaggcggccgccagcgccgtgcaggcgcagtacctggacgaggcggaggccgcccgcatcgccgatgccctgcgcagctggtcggcgcagcagcggtatgcggacagctgttcggatcctgctgcgttcagcgcacgcctgaaccaggacctggacatgttcgatggccacttccacgttgagcgcgtggacgcagctgccggccaggacgactggttgatggcctggcgtgccgatgcccgcagcaatggtgccggtgtgcgcgaggtgcgggtgctggaaggcaacattggctacctgcggttgagtactttttacccgctggatctggcgcggccgaagttcgctgcggccttcacgctgctggccgacaccgatggcctggtgctggatctgcgccagaacgggggaggcgacgatgcaagtgccgacctgctggtgcgcacgctgctggacgcgaagatcggcgcggtgcagcagctggaccagcgtggccggcgcacgccggtaccgctgccgcctgccagcctgcctgtgtacctgaagccgctggtggtgctgatcgaccggcgtaccggttcggcggccgagttcgtcgcctattcgctgcaggccctgggccgcgcgcgcattgtcggcacgcgcagtggcggtgccgcgcatatgtttggtgatcctgtgctgctgcccgatggctatcagatcagcattcccgaccggcaaccgatcaatctgcgcaccggcggcaattgggaaggcaccggcgtgaggcctgatgtggccggcggcgacgatccgctgttcatcgcgcggcaactgctggcgcctgcgaagtcgtcaagatga

SEQ ID NO: 513675 - DNA, 894 bp, Stenotrophomonas maltophilia
atgaagattctgttgaccggcagttccgggcgcatcgggcgcgcgatcttcggtgcgttggcggccgcccacgaagtggtggggctggaccgcagcccgttcgccaccacgcgcatcattgccgatgtcaccgatcgccaggcggtcacgcgtgcggtgcagggcgtggacgcggtcatccataccgcggccctgcatgctccgcatgtcggcttggtgccggacgcggtattccagcagatcaacgtggaggcaaccgcgcacctgctgcaggccgcacgcgaagccggcgcacggcgtttcgtgctgaccagcaccaccgcgctgtacggccatgccgtggtagccggtggctgccgttggatcgacgaagacaccgagccgctgccgcgcacgatctaccaccgcaccaagttgcaggccgagaccctggctgaagctgccgccacgccgggcttcagcgttcgcgtgctgcgcatgggccggtgcttcccggaaccgcccgagcgcatggcgatgttccgcctgcatcgcggcatcgacgcccgcgatgtggccagcgcacacgctgcactgctgctcgacgaaggcgcccgattcgcccgctatctcgcctgcgcaccgacgccgttccggcgcgaggactgcctggaactggccacccacccgcgcagcgtgctggcccgtcgcgcgccgcagctgctggccgagttcgaacgccgtggctggccgctgccattgagcatcgaccgtgtctacgacagtgcccgcctgcgcagtgagctgggctggcaaccgtgcttcgggccggacgacgtgctgcagcagtatgccgtcggcagcatcgaggtactgccgcgcgcgcagtggatcaaggaccgcgtggccgagtga

SEQ ID NO: 513676 - DNA, 2532 bp, Stenotrophomonas maltophilia
atgccttcttcccgttccgccgctgcccgccgcccgggcagcatcgcccacaagctgatgctgggcaccgccgcgatcgcgctgctgtgcttcggcctgactgcgttcctgatctaccgacaggccagcgccagccttatcagcgcctcgcgccagaccatgaccagcgaggcgaccgctgaggcgcgccaggtggcggccgatctgggcaccgcctttgccagcaacgatgccatggttgaaggcgtgctggcccagcgcgcccgtggtgacgtgcccgaccgcgccagcctggcggcggtgctgggcgagcagctgcgcgcccatcccgaatggctgggcaagagcaccatgtgggagcccgatgccttcgacggcaaggatgccgagttcgtcaacaccgaggcgcacgatgccaccggccgctacatgagctactgggcctggcaggagggcaagccgcagcagtcggtgatgaccgattacaccgagaccgccagcggttccggtgactggtacatggtgcccagccgcgacaagctgccgaaagtgagcgaaccgtatgcctatgacatcgccgggcagcaggtgctgatgagtacgctgagcacgccgatcatcgagaacgacaggttcctcggtgtgttcaccgtcgacttctcgctggcagcgttgcagaagcacctggccacgctgcagccgatgggggccggccgcgtcgaactgctgtcgccgaagggcgtggtgctggcctcggccaatgccgccgaaatcggcaagcctcgcaacgacgcactgacccgcagcatgctggccgagatcgccgccgaccgccccttcgaggccttcagccccgatgcggccggcaacgtgcgcgtgtatgtgccgctgcgcgtgggcgatgccccgcagcgcttcgcgctgggcgtggtgatgccgcatgcggtgatcgtggccgaagcgcgccagctgctgtggctgaccctgctggtcggcgtgatcgccgcgctgaccctcagcgccggtgtctacatactgctgcgccgcctggcgatccgcccgctggccgaagcggtgcgcgtggccggtgacgtcgccgccggcaagctggacagcaccctgccggcgcgcagcaacgacgaagtggggcgcctgctggacgcgatgcagggcatgcgcggccagctgcaggcggtgatggctgcgcaggccgaaatggcgcgccgccacgatgccggtgaactcagctaccgcatggatgccgcggcgttcccgggcgagtacggccgcatggtggccgacagcaaccagctggtggcctccagcaacgcggtcacccagcgcctggttgaagtgatgcagcgctatgccgtcggcgacctcagcgtggacatggaagcactgccgggcgagaaggcggtgttcaccgctgcgatggcgaccaccaagcgcaacctggccgcgatcaacgagcagatccagcagcttgccgctgcggccgccgccggtgacttcgccgtgcgcggtgatgcactgcgcttcgaccacgatttccgccgcatggtggagaccctcaacaccatgatggaagtcagcgaccacaacctggccgcactgtcgacgctgctgcgcgcgatcgccggcggtgacctcagtacccgcatgcagggtgacttccatggggtatttgcggtgatgcgcgacgatgccaacagcaccgtgcagcacctgacccagatcgtcggccagatccagcagtcggcagccagcatccgcttggccgccggcgagatcgccgccggcaacagcgacctgtcgcgccgtaccgaacagcaggctgccaacctggaagaaaccgccgcgtcgatggaagaactgacctccaccgtgcgccagaacgccgaccacgcgctgcaggccaacgcgctggccggttccgcggcgggcgtggccagcgaaggcggccaggtggtcagccaggtggtgcacaccatggagcagatcgaggcgtcttcgcagcgcatcgccgagatcatctcggtgatcgatggcattgcgttccagaccaacatcctggcgttgaacgcggcagtggaagcggcgcgcgccggtgagcagggccgtggcttcgccgtggttgccagtgaagtgcgcgcgttggcgcagcgttcggcgggtgctgcgaaggagatcaaggagctgatcgacgcctcggtggcccaggtcggtgccggtgcgcagctggtgcacggcgcggggcgcaccatgcaggacatcgtcggtcaggtcggtcgggtcaacgagatcatggccgagatctcagccgcgtcgcgcgaacaatcggccggcatcgagcaggtcaaccagactgtggtgcagatggacgaaaccacccagcagaacgccgcgctggtggaggaagccagtgccgccgcgcgcgcgatggaggagcaggccgagcagctggcggtggcggtgtcgcgcttccgcctgcaggccgagccggcggccgtggcacgccgcgcggcctga

SEQ ID NO: 513677 - DNA, 387 bp, Stenotrophomonas maltophilia; identical to SEQ ID NO: 493445

SEQ ID NO: 513678 - DNA, 171 bp, Stenotrophomonas maltophilia; identical to SEQ ID NO: 493444

SEQ ID NO: 513679 - DNA, 2046 bp, Stenotrophomonas maltophilia
atgtccccatcgtcccgttcccgttccgcgcgcctgccgcgcacccgcctggcccctgccctggcctccgcctgcctgctggccctgccaggcctggccgctgcagaggccggcgccgatgcctccaccaaggatctggataccgtggtggtcaccgcctcgggcagccagcaatggatcaaggatgccccggccagcatcagcgtgatcagccgtgaggacatcgagcgccagccggttcccgacctggccaccctgctcagccgcgtgccgggcgtgaccggcggcctcagcgccgtcggcgaacagtccaagatcaagctgcgcggcatgccgtccaactacacgctggtgctggtggacggcaagcgcatgggcagctcggccgcgaccaactaccgccccgacctcggccgccaggacctgaactggatctcgcccgaccagatcgaacgcatcgaagtggtgcgtgggccgatgtcctcgctgtacggctccgacgccatgggcggggtgatcaacatcatcacccggcgcatcggcgacgaatggaacggcagcgccacccacagctacacccgtcccggtgatggcaagcgcggcgatacccagcagatcggcgcgaccttctccggcccgctgggcgaacgcttcggcctgcgcatcggtgccaacagcatgcgccgtgattcggaccagtccaaccacggtgtctacggcaatgcctacgccggcgagaaggaccgcactgtcgatgcgctgctgcagtggaagctgagcgacgcacaggaactgtcgctggaagccggccatggcgtgcagcaggccttcatcgatgcgtcgctggaaaagcaggacgaaggcgcctggggagccagtgagctcaagcgcagctcgctggcgctcaaccacgatggcacgtggagcttcggcacctccaggctcagcgcatactggaccgaatacaagaacgacatcggcgccaccggccgctcagaggccaccgacacgatcatcgagggcagcctgaccacgccgttcaccctgggcgttgaacaccagtttgccgtgggtgggcagtggaagcgtcaggaactgaccaacaccgataccatcggccgcgcaccgatcgactacgccggcaacgccgtcagcggctccagcctggaagtggatacctgggcgctgtttgtcgaagacgaactgaagctgcaccgcaccctggccctgaccgtgggcgcgcgcctggaccaccatgagaagttcggcggccacgtcagcccgcgtgcgtacctggtctggcatccggccgaacagtggaccatccgcggtggcgtctccaaggggttccgtgcgcccagcctgaccgagaactcggccaccgctgccacccagtccggcggccgtggctgcacctcgctgatcccgctggggtatacccgcggcgggtgctacatggccggcaacccggacctggatccggaaaccagcaccaaccgcgagatcggcatcagcttcgacaatgacctgatcgatgttggcgtgacctacttccacaccgacttccggaacaagatcgaatacgcaccgctgggccgcttcaacggcatctggtggacgcgcatgagcaacgtgcagcgcgcgcgcaccagcggcatggaaggcaacttcaacgtccgcttcggcgagcagtggcgctggcgcacctcggcgacctggatgaaggaagccaggaacctgaccaccggccgcaacctgatcgatacgccggaattctccggctactcgtcgctggactggacgccgaatacggtgttctccggcagcctgtcggcgcagtacaccggcaagcagaccggcaccgccacgaccttcctcaatgcctacaccctgtatgacctgaccgtggcatggaacgtcaacgaggtgctgaccctgcgcggtggcgtcagcaacctggccgacaagaagctgtatgcggaaggctccaccgactacttcgtcgccgggcgcagctacttcctcagcatgaccgcgcgcttctga

SEQ ID NO: 513680 - DNA, 1926 bp, Stenotrophomonas maltophilia
atgggggtgcagaccatccatgcggaagcagaaacgccccggctcgacgccggctgggcgctgctgcccgctgaatcgccgttgcagatgcccgaacagaccctgcgcgaaggtgcactgaaggtccggcggcatcgcacgtcgccgcgcctgatcggcctgcgccggctgtacatcttcggtggcacgctcggcatgaccgccgtggccacgcggatgatgtggcgggtgctgtcggccaatggcatcagcgtgctcgaagcctgcctgctggtgctgttcgttggcctgtttgcctggatcgcgctgtctttcgccagcgccctggccggcttcctgaccgccgtgttcgaccgtggctatcgcctcggcatcgacccggacaagccgctgccgaccgtgcacagccgcaccgcgctgctgatgccgacctacaacgaagacccgcgccgcctgctggcgggcctgcaggcgatctacgagtcggtggcggccaccggccagctcggccgattcgatttcttcgtgctcagcgatacccgtcgcgaggacatcgccgctgccgaggagcgggtgttcggcgagctgcgcgagcgggtgccggacgggcagatccgcctgttctaccgccgccgtggtgacaacagcgggcgcaaggccggcaacatcgccgactgggtccgtcgcttcggcggtgcctacccgcagatgctgatcctcgacgccgacagcctgatgaccggcgacagcatcgtgcgcctggtggccggcatggagcacaacgccgacgtcggcctgatccagaccctgccgtcggtgatcggcggccgcaccctgttcgcacgcatgcagcagttcggtggccgcgtgtacgggccggtgatcgcccgtggcgtggcctggtggcatggcgccgagagcaactactggggccacaacgccatcatccgtacccgcgccttcgccgaccacgccggcctgccggcgctgccggggcgcaagccgttcggcggccacgtgctcagccatgacttcgtcgaagcagcgttgatgcgtcgtggcggctgggccgcgcacatggtgccctacctcggtggcagctatgaagagggcccgccgacgctgaccgatctgctggtacgcgaccgccgctggtgccagggcaacctgcagcacggcaaggtcgtgggcagccgcggcctgcactggatcagccgcacgcacatgctgatcggcatcggccactatttcaccgcaccgatgtgggcaatgctgatgctgatcggcatcgccatcccgctgttccaggagggcatcgacttcaatgccctgctgcacctgtcgcccagcgtgtactggcgcgcacaggacgaagagcaggtggtgcgcctgttcgccgccaccatggcggtactgctgctgcccaaggtgctcggttacctggcgatgctgctggacccggtcgaccgccgcggctgcggcggtgcgatccgtgccttcgtgtcgatgctggtggaaaccgtgctggccgcgctgatggcgccggtggtgatgtacgtgcagtcgcggggcgtggccgaagtgttgtccggccgcgattccggctgggatgcgcagcagcgtgacgacggcggcatctcgtggctggcactgatccgcggctacggtggcctgggtgtgttcggcgccttcatgggcgtgctggcctgggccgtgtcgccgtcgctggcggcgtggatggcgccggtggtgatcggcatggtgttggccattccggtggtggcgctgacctcctcgcgtggtccgggcgccttcctgcatcgcctgggcctgctggacattcccgaagagaacatcccgccaccggtactggtccgcgccgcgcagctgcggcgcgaagcggccgagcaaccgccgctgtactga

SEQ ID NO: 513681 - DNA, 660 bp, Stenotrophomonas maltophilia
atgctgcaaacggtggaacaggaaaccggcgcctcgccgcagtggtcggtaatctggctgcacggcctcggcgccgatggccatgatttcgcgccgatcgtgccggagctggtgcggccgcactggccggcgctgcgcttcgtgttcccgcacgcaccggtgcggccgatcacgatcaacaacggcgtgcccatgcgcggctggtacgacatcgtcggcatggacttccggtcgcgtgccgacatggccggcgtgcaggaatcggtggtgcagctggacgcgctgatcgcgcgcgagatcgagcgtggcgtcgcggcggagaagatcttcctggccggcttctcgcagggtggtgcgatcatcctgactgctgcgctgtcgcgtaccgcgccactggccggcctgatcgccctgtccacctatctgcccgaggccgacagtgcccgtcgtgctgaaggtgccgtgcaggtgccggtgttcatggcccatggcagtggcgacccggtgatcccgcaggccgtcgccgcccacagcgcacaggcgctgcgtacgctgggcctggacgtggcgtggcacagctacccgatggcccaccaggtctgtgccgaggaaatccaggcactgggtgactggctgcaggaacggctgggcgcggcctga

SEQ ID NO: 513682 - DNA, 1044 bp, Stenotrophomonas maltophilia
atgcccctggccagcccatcgccgtggatgccggaactgtgccgcctgccgcggctggcggcgatgctgggcctggccgagctggtggtggtggtgctggccctggccccggatggcagccgccactggaccgttggcgagctgctgtcggccagcggcttcgcgctgtggctggcgctggccgtgaccgccagcctgtgcctgctgcggcaggcgctgtccaggctgccgcaggtgatgggggcggtcgctgccatcgcactggcggccctgatcgcggtggtctgcgccggcatcgtgcacgcgctgtacgcggtgctgggtgacagcttcgccaacggcatcagcttctggcgcttcaccctcggcagcgccgccaccaccgcgctgatcaccgcgctggcgctgcgctacttctatgtcagcgaccgctgggccgcgcaggtgcaggccaatgcacgcgcccaggccgatgcgctgcaggcgcgcatccgcccgcatttcctgttcaacagcatgaacctcatcgccagcctgctgcatcgggacccggcggtggccgagcgtgccgtgctcgacctgtccgatctgttccgtgctgcgctcggtgcaggcgagggcgattccaccctgcgcgacgaatgcgaactggccgagcgctacctgtcgatcgaatcgctgcgcctgggcgaacgcctgcaggtgcgctggcaacgtgacgagccgctgccgtgggacctgccattgccaaggctggtactgcagccgctggtggaaaacgccgtgctgcatggcatttcgcgcctgcccgagggcggcaccatcgagctgcagctgctgcgcgagggcaacgatctgcagatccgcgtgcgcaatcccgcgcctgatccgcaggcgcccgggctggccctggcgcggggggccggccatgcccagcacagcatcggccatcggctggcctggcgctttggcagtgccgcgcggatgacggctggctggagcgagggctactatgcctgccaggtgacagtgccgatccagtga

SEQ ID NO: 513683 - DNA, 732 bp, Stenotrophomonas maltophilia
gtgagggtagtcatcgccgatgacgaaccactggcgcgtgagcgcctgcgcagcctgttggccgcacaggacggcgtggacgtggtggccgaggccggcaacggcgagcaggccctgcacgcgtgcgcggagctgcagccggacctggtcctgctggacatcgcaatgcctgggctggacggcctggaagcagcccgccacctggccagcttcgaaccgcggccggcggtggtgttctgcactgcctacgatgcgcatgcgctgtcggccttcgaagcggcagccatcgattacctgatgaagccggtgcgcgccgaacgcctggcagcggcgattgcacgggcacgcacgttcctggccggtcgcgatggccagccgcaggcgcacagcgggcagcaggcacgcagcgtactgtgcgcacgcctgcgcggcagcctgcggctgattccgctggacgacatccactacctgcaggccgaagagaagtacgtggtggtgcaccacgcgcgcggcgaggacctgatcgaggaatcgctgaagtcgctggaggaagagttcgccagccgtttcatccgtatccatcgcaactgcctggtggcgcggcacgagctggtggagctgcgccgcggctccggcgggcaggtgcaggcggtgctgcggcatggcaggcagccgctggaagtcagccgccgctgtgtggcgacgctgaagcaggaactgcggcatctgtga

SEQ ID NO: 513684 - DNA, 912 bp, Stenotrophomonas maltophilia
atggaaaccgtccgcatcgccacccgcaagagcccgctcgccctctggcaaagcgaacacgtcgccaaccgcctgcgccaggcccatcccgggctgcatgtggaactggtgccgatgagcacccgcggtgacgaggtgctcgaccgctcgctggccgccatcggtggcaagggcctgttcctgaaggagctggagctggccatgctgcgcggtgaggccgactgcgccgtgcactcgctgaaggatgtgccgatggaactggacgaacccttcgcgctgccggcgatgctgacccgccacgatccagccgatggtttcgtctccaacctgtacgcctcgctggacgcgctgccgatcggtgcgcgggtcggcacctcatcgctgcgccgccaggcccagctgcgcgcgctgcgcccggatctggaattgctggacctgcgcggcaacgtcaacacccgcctggccaagctcgacaatggtggctacgacgccatcgtgctggccgtggccggcctggagcgcctgggcctgggcgggcgcatcgtcgcgcgcctgcagccgccgcagtggctgccggcaccggcgcagggcgcggtggcggtggagtgcgacggtggcaatacgcgcctgatggcgctgttcgccacgcttgatgacgccgctacgcgcgcctgcgtggaagccgagcgggcgatgaaccgcgcgctgcatggcagctgccacgtgccggtggcggccatcgcgcagtggcagggcgacgacctgcacctgcagggcctggtcggcagtgccagcgatggtcgtgcggtgcgcgccgaggcggtgggaccggcccgggatccggaggcgctgggccagcgcgtggcgaagatgctgctggaagccggtgccggcgaactgctgaacgtctga

SEQ ID NO: 513685 - DNA, 777 bp, Stenotrophomonas maltophilia
atgtccctgcgcgtgtccctgctggtccccctgctgctgtgtgcgccgctcgcatacgcacaggatgcctccgaactggcggcgatgtcctcgccgtggagtggcagtggtggcgagctcgggtttgcctcggcacgcggcaacagcagcaccgagagcttcaacggccgtctgcgcctgcgctacaccgacggtgactgggtgcacagcatggacctgttcggcctgcgctccagctccaaggtgaccgaaaccaacgacgacggcaccaccacccgccgcaacaacaccaccgccaaccgctacaccggcagtgccggcagcgcgctgcagctgggcgaacaccgccagctgaccgcgacggtgcgtacggaacgcgacgacttcgccacctacgaccgccagagctcgttcggtctgggttacggcacccgcctgtggaacaccgagcgcttctcgttcgacgcgcagatcggccccggtgtgcgccgcacccacagcaccgaggacgaccgcacccgcaccggcctgatcggccgtggcctgttcgacatgaagtattcgctgactgacaacaccgacctggtcaacacgctgctggtcgaatccggttcgtacaacaccttcggccagaacgacttcggtgtctcggtgagcatgaacgagcacctggcactgaaggccggctggcaggcgcgctacaacagtgacgtggccgaggacaagcgcaagaccgatacgctgaccacgatgaacgtggtctacaagttcaaataa

SEQ ID NO: 513686 - DNA, 603 bp, Stenotrophomonas maltophilia
atgcgccggttgcctgccctgtccctgctggcctgcctgctgctggccgcctgtgatcgcgcgccggcgccggccggcgccgagcccccggtacccgtcgccgatccgacgcaggcggtgctgggcgccagccagcgtttcgcggccctgcgcagcttccacgccgaactggaggtgctgggcgcaccacagccggtgcgcagcgccatggacttcgtcgcgcccgatcgtttccgggtggagacgccggcggggccgcagaccatcatcggcgacaccatgttcctgcaggccgacggcgcgatccgccaggtgccgaccccgcccggcctgctcgagcaatggcgcaacccgctgcccgccgatgccctgcccgccgaactgaaggccgaagatctcggcagccagtcgctggacggggtgcagacccggcactaccggctgcgcggtgcccagcccggggaacgcctggagtactgggtggatgcccagggcctgccacgccagatcgtacgcagcggcagcagcaatggccgcagcttccagctgcgcctgcgctattcgcgcttcaacgaccctgaggtgcgcgtcgatctgccctga

SEQ ID NO: 513687 - DNA, 972 bp, Stenotrophomonas maltophilia; identical to SEQ ID NO: 495825

SEQ ID NO: 513688 - DNA, 795 bp, Stenotrophomonas maltophilia
atgaaaaagaccctgttgctgcccctgctcgccgctgcgctggccctgaccgcctgcggcaagtccggcgagccctcgcagaagctggtggtggccgccacggccgtgccgcatgccgagatcctcgaggtggtcaagccgatcctcaagcaggaaggcgtggacctggacgtgcgggtgttcaatgactacgtgcagcccaacgaccagctggtgcagaagcaggtggatgcgaactacttccagaccgagccctacctggatgcctacaaccgcgaccgcaagaccgacctggtgaaggtgatcggcgtgcacatcgagccgttcggtgcgtactcgcgcaaggtcaagtcgctggccgagctgcgcgaaggcgccgacgtggtgatcccgaacgatccgagcaacaacagccgcgcgctgatcctgctgcacaaggccggcgtgatcgagctgaaggacccgaccaacgcactggcgacccagcgcgacatcatcgccaatccgaagaacctgaagttccgcgagctcgactcggcgatgctgccgcgcgtgctggaccaggtcgacctggccctgatcaataccaactacgcgctggacgcaggcctcaacccgacccaggatgcgctggcgatcgagagcaaggactcgccgtacgtgaatttcctggtcgcgcgcccggacaacaaggacgacgcccgcgtgcagaagctggccaaggccctgaccagcccgcaggtgaaggcgttcatcgagaccaagtacaagggcgcggtgctgccggcgttctga

SEQ ID NO: 513689 - DNA, 1500 bp, Stenotrophomonas maltophilia
atgacgccccgctacgtgctggccatcgaccagggcaccaccagttcgcgcgcgatcctgttcgaccgcgccggcgacatcgtcggcagcgcgcagcgcgagttcgcgcagatcttcccgcagcccggctgggtcgagcatgacccccgcgagatccttaccagcgtctatgccacattgaccgaactgctcagccgcgggcagatcgacccacgccatatcgccgcgctgggcatcaccaaccagcgcgaaaccaccgtggtctgggaccgtgccaccggccagccgatccacaacgccatcgtctggcaatcgcggcagagccacgccatctgcgagcggctgaagtccgacgggcatgaagcactgatccgcgagcggaccgggctgctgatcgacgcctatttctccgcgaccaaggtgcgctggatcctcgaccacgtggatggtgcgcagcagcgcgccgaacgtggtgagctgctgttcggcaccatcgacagctggctggtgtggaacctcagcggtggccaggcacatgtgactgactacagcaatgcggcacgcacgctgctgttcaacatccacacgctggactgggatgacgacctgctggccctgctcgacattccgcgcgcgatgctgccgcaggtgcgcgactccagcgcggtgtacgcacacacccggccgcagttcttcttcgaccacccgatccccatcgccggcatcgccggtgaccagcaggcggcgctgttcggccaggcttgtttccagccgggcatggtcaagaacacctatggcaccggttgcttcatgttgatgcacaccggcgcgcaggcggtgcggtcgcgcaacggcctgctgaccaccattgcctggggcctggacgggcgcgtggagtacgcgctggagggttcgatcttcatcgccggctcggtggtgcagtggctgcgcgatggactacgcatgatcgaacgcgccagcgacagccaggcgctggctgcgcaggtgcccgacagtggcggcgcctacctggtgccggcgttcgtcggcctcggcgcgccctattggcgcagtgatgtgcgcggtgcgatgttcggcctgacccgtggcacccgcaaggcgcacttcgtgcgcgccgcgctggaagcgatggcctaccagacccgcgatgtactcgatgcgatgcagtccgatgcgggtatcgcgctgaccgagctgcgcgctgatggcggtgcgatcggcaacgacttcctggccggtttccaggccgacattctcggtgtgccgctgctgcggccgcgactgaccgagaccaccgcgctgggtgcggcctatctggccggcctggcagtggggttctggaacagccgcgaacagatcgccgcgcaatggggcctggaccggcgcttcgagccacggatggaggtggcccggcgcgagaaactgtatgcgggatggcagcaggcggtggccgcgaccctcgccttccacgtcgattga

SEQ ID NO: 513690 - DNA, 1506 bp, Stenotrophomonas maltophilia
atggacgacgtcgacctgctggtgatcggtggcggcatcaatggcgccggcatcgcccgtgacgccagcggccgcggcctgcgcgtgctgctgtgcgaacagcatgacctggccgcgcacacctccagcgccagcagcaagctgatccacggcggcctgcgctacctggagcagggcgagttcgggctggtgcgcaaggcgctgggcgaacgcgaggtggtgcgccggcaggcgccccatctggtccatccgctgcgcttcgtcctgccgtgggaaccgcacctgcgcccacgctggatgctgcgcgcggggctgtggctgtacgaccatctgggccggcgcagccccgccttccccgcgtcacgcgcactggaactgcagcacgatccgctcggccagtggctctccccggcgctgcggcaggccttcagctacgccgatgcgcaggtcgatgacgcgcggctggtactgctcaacgccctggatgccgcgcagcggggcgcacaggtgcaggtgcgcagccgctgcatcgacctgcaccccgtgcagggtcggtggcgggccgttctggaatccgccgatggccagcggcaccccgtgaatgcccgcgccgtggtcaatgcggcgggcccgtgggccgggggcctgctggaacggatgcaggcgcgcagcggctgccctgcgctgcgcctggtgcagggcagccacatcgtgctgcgcaggccgtggcccgatgacagcgcctgcctgctgcagcagcccgacgggcgggtggtgttcctgctgcctttcgcccacgaccacctgctggtgggcaccaccgataccgactatcgcggtgacccggcgcgctgcagcgtgctgccttccgaggtgacctacctgtgcgaagcggccaatcgctacctgcgtgaccccatcgccccggacgaggtggtctgggcgttcgccggtgtccgtccattgctggccgacccggatccgcgcgcagcgcagctgagccgcgactaccgcctgcaggtgcaggtggacccggcaccggcgctgcatgtactgggcggcaagctgaccacctaccgggtgctggccgaggaggcactggacctgctgcgccctgccctgccacagatgggaccggcctggacggcgcgcggagacccgctgccgggcagcgactggggcgacgccgcacaggcgtgctcgcgcctgctggcgctggcaccgtggttgcccgcaggtatcgcgcgacgctgggccggggcctatggcagtcgcagcgcggaactgctgcagggtgtacacggcctgcacgatctgggcgaggacttcggcggtggcctgcatgcacgcgaagtggacttcctgcgcgaacgcgagtgggcgtgtgacaccgacgatatcctgtggcgccggagcaagctggggttgcgcctggatgctgcgcaggtggcacggctgcaggcatggatggagggtcggatcccttttccacggaaagggctctga

SEQ ID NO: 513691 - DNA, 636 bp, Stenotrophomonas maltophilia
atgcgctccatccgtatcctgagtctcgccctgctgacctccgccgccttcgcgccggccgctttcgcccaggacagcagcaccaccgataccgcttcgggcaagcattttgccgttgttggcggcatctcgctgctggagccgaagaacgacccgatcaccggcgtgaagaagaccgacggtggcccggcgccgaccgtcagcttcagctactacatcaacgacaactgggccgttgagctgtggggcgctgccgacaagttcgacaacaagttcaagggcccgaacaacgcccgcctgggttcggtcgagcagcagccggtcgcgctgagcggccagtaccacttcggccaggccgacaacgtgttccgcccgttcgtgggcgtgggctactaccagtcgagcttcagcaacgagaagctgggcaacggtgctgacaccgacatccgcttcaaggatgccaagggcgtgatcggcaccgtcggcgtcgacatgaacatcaactccacctggttcgcccgcgctgacgcccgctacatgcgcgcccgcccggacatcaaggtcggcggcgagaagatcggcgaagccaagatggatccgtggaccgtcggcttcggcatcggcgcccgcttctga

SEQ ID NO: 513692 - DNA, 132 bp, Stenotrophomonas maltophilia; identical to SEQ ID NO: 499836

SEQ ID NO: 513693 - DNA, 516 bp, Stenotrophomonas maltophilia
gtgagcacggcaacgttgtgcattggcctgccagcgcaggtgaacgtgggatgccgggtgctgctgctgggctcgatgccaggcgtggcatccctgcaggagcagcgctactacgcgcatcctcgcaaccgcttctggccgctgatggccgatatctgcggtttcgacgcggatctgccctatgcgcaacggctgcaggcgttgaaggccgcaggcatcggcctgtgggatgtgatcgggcgctgcgagcggcgcggcagcctggatgcggacatcgtgcgtggcacggaagtggccaatgcactgccggaactgatcgccacgttgcctgagctgacgctgatcggctgcaatggcggcgcgtcattgcaggcattccagcgctgggtgttgccgcggctggaggccccgccgaaggtggtcgcgctgccgtcgaccagccctgccaatgcggcgtggtcgttgccgcgcctgcgccaggcctggcagccggtggccgacgcgcgggcgacatga

SEQ ID NO: 513694 - DNA, 1731 bp, Stenotrophomonas maltophilia
atggccgaaatcaaggaagcacttgtccccgatatcggtgactacagcgatatcccggtaatcgaggtgcttgtcgccgtcggcgacacggtcaagaaggaccagggcctggtgacgctggaaagcgacaaggcgaccatggaagtgccgtcctcggtggcgggcgtggtcaaggagctcaaggtcaaagtgggcgacagcctgtccgaaggcaaggtcgtggccctgatcgaagtggccgaaggcgaagccgaagccgccaagccggccgctgccgcaccggcaccggcaccggcaccggcaccggccaaggccgctgccccggctgccgccacccagagcgcgccggccgcagctgcgccggccgctccggctgccagcggtggtgcggttgaagccctggtgccggacatcggcgactacgccggcattccggtcatcgaagtgctggtcgccgtgggcgatacggtcaagaaggaccagggcctggtcacgctggaaagcgacaaggccaccatggaagtgccgtcgtctgttgccggtgtggtcaaggagatcaaggtcaaggtgggcgacaatctgtcgcaaggcgacgtggttgccatcatcgaagccgagggcgctgccgcgccggcgccgaccaaggccgctgctgctgccgctccggctgccgcagagaccgccaccaaggtcgagccggtcgctgtgccggcgcagccggacaagctggcggcccgcgagatcgcctcggccggtaccccgtccagcccgccggtgcagttcaatgccgatggcgtgctgccggccaaggtgccgtacgccaccccggcggtgcgcgtgttcgcccgcgagctgggcgtggacctgctgcagatcaacggcaccgagaagggtggccgcatcaccaagggtgacgtacagaagttcgtcaaggccgcgctcagcggtggcgtgccggcagctgccggtggcgccgtcgctgctggtggtggcctgaacctgctgccgtggccgaaggtcgacttcagcaagttcggcgagaccgaagtccagccgctgtcgcgcatcaagaagatctccggtgcgaacctggcccgcaactgggccatgatcccgcacgtcacccagttcgagcaggccgacatcaccgacctggaaggcctgcgcgtggcgttgaacaaggagaacgagaaggccggcatcaagctgaccatgctcgccttcctgatcaaggccagcgccgcagcgctgaagaagttcccggaattcaacgcctcgctcgatgccagcggtgaaaacctgaccctgaagaagtacttccacatcggtttcgccgccgacacgccgaacggcctggtcgtgccggtcatccgcgacgtggacaagaagggtgtggtgcagatcgcgcaggaaaccggcgaactggccaagaaggcacgcgacggcaagctgggcccggcggacatgagcggcggctgcttctcgatcagctcgttgggcggcatcggcggcaccgcgttcaccccgatcgtcaacgcaccggaagtggccatcctcggcgtctccaagtcgtccatccagccggtctggaacggcaaggaattcgcaccgaagctgatgctgccgctgtcgctgagctacgaccaccgcgtcatcgacggcgcactggccgcacgcttcaccacgtacctgtcgcaggtactggccgacatgcgccgcgtgctgctgtaa

SEQ ID NO: 513695 - DNA, 1803 bp, Stenotrophomonas maltophilia
atggccacgattgaagtcaaggttcccgacatcggcgattacagcgatgtgccggtgatcgaagtgttggtcgccgtcggcgacacggtgaagaaggatcagggtctggtgaccctggagtcggacaaggccaccctggaagtgccgtcctcggccgccggcgtggtcaaggaaatcaaggtcaagctgggcgacaccctgtccgaaggcgccgtggtcgtggtgctggacactgaaggcgccgccgcagccccggccaaggccgccgcgccggctccggccgccccggccagcaagccgccggtgaccccgtcgcaccgcgccccggccgaaccggctgcgccgaagccggcgctgtccagcggcaagccggccgacatcgaatgcgagatggtcgtgctgggctccggcccgggcggctacaccgcagccttccgcgccgccgacgtcggcctggatacggtgctggtcgaacgttacgccagcctcggcggcgtctgcctcaatgtcggctgcatcccgtccaaggcgctgctgcatgctgctgcggtcatcgacgaagtggcccacgccggtgatttcggcgtcgagttcggcaagccgaccattaccctggacaagctgcgcgcgtacaaggaaaaggtcgtcaaccagctgaccaagggcctggccgggatggccaagcagcgcaaggtccgcaacgtgcagggcgtcggcaggtttgtttcggccaatgagctggagatcaccgcggctgacggcagcacccagctgctgcgcttccagaaatgcatcatcgccgccggttcgcaggcggtgaagctgccgaacttcccgtgggacgacaagcgcgtgatggattccaccgatgcgctggagctggccgaagtgccgggctcgctgctggtcgtcggcggcggcatcatcggcctggaaatggccaccgtgtacagcgcgctgggcagcaaggtcaccgtggtcgagttcatggaccagctgatgcccggcgccgacaaggacctggtcaagccgctggccgaccgcctgaagaagcagggcatcgacgtgcacctgaagaccaaggcctcgggcgtcaccgccgatgccaagggcatcaccgtgaccttcgaagccgccgaggaaggccaggcgcctgcgctggcgcagggcaccttcgaccgcgtgctggtggccgtgggccgctcgccgaacggcaagaagatcgatgccgagaaggccggcgtgcaggtcaccgaccgcggcttcatcccggtcgatcggcagatgcgtaccaacgtgccgcacatctttgccatcggcgacatcgtcggcaacccgatgctggcccacaaggccacgcacgagggcaagctggccgctgaagtggcagccggccacaagaaggagtgggtcgcccgcgtgattccgtcggtggcctacaccaacccggaaatcgcctgggtcggcgtgaccgagaccgaagccaaggccaagggcctgaaggtcggcgtggccaagttcccgtgggccgccagtggccgcgcgatcggcatcggtcgcaccgagggcttcaccaagctgatcttcgacgaagagacccaccgcatcatcggtggcgcgatcgtcggcgtgcatgccggcgacctgctggccgagatcggcctggcgatcgagatgggtgcggaagcggaagacatcggccacaccatccatgcgcatccgacgctgagcgagtcggtggcgatggcctcggaaatctacgacggcacgatcaccgatctgtacatgccgaagaagaagtaa

SEQ ID NO: 513696 - DNA, 819 bp, Stenotrophomonas maltophilia
atgcgccccgtacccaccctgctcgccctttccctgctcgctgccggcgcctcgttcgccaatgccgcccacgccgccgaaggcgacgaccgcttcgccatccgtctgggtgcgatgaacatcgattcggacaacacgctgcgtggcagcaccaccgtggccggccaggacatctccctggaccaggacttcaagctgggtggcaaggaatgggagccgcgcatcgacggcatgttccgcatcagcaaccgtcagcgcctgctgttcaactacttcaagtacgacaaggaccgtcgcgagacgcttgaccagggcatttccttcggcggtgagagcgtgccggccggcagcttcgtgaagggcgagctgaagtaccaggtggccagcctggtctatgactactcggtcgtcgataccgacaccttcgacctgggcctgcagatcggtggcgagtacgccaaggtcagcaccaagggctacgcggacctgggcacggtgtatgaaggccagttcctcaacgagaaggccgatggcgtggcaccggtggtgggtgcgcgcatgaccttcactccgtccgagcgctggatgatcacgctgcagggccagtacctgaacacgcgctggggcagtttcgatgactacaagggcgacctgagccgcgccaatgcgatcgtcgattaccgcttcaccaagaacttcggtgtgttcgccggctacgactggttcaagctggacgtggacaagaagggcagcgacggcacggtcggcctgaagcaggaattcaagggcccggtggccggtatcagcttcgtgttctga

SEQ ID NO: 513697 - DNA, 333 bp, Stenotrophomonas maltophilia; identical to SEQ ID NO: 495816

SEQ ID NO: 513698 - DNA, 801 bp, Stenotrophomonas maltophilia
atggcgggcgaggctctaacccctaccagctacatccagcatcacctgcacaacctgaccgcaccggtcggcaagggtgagggtatgttctggcatatccacgtcgataccttcctcaccgccgtcctgatgggcctggtgatcgttgtcgcgttctggctggggacccgcaaggccaccgccggcgtgccgggcaagtggcaggccttcgtcgagatctgcctggagttcgtcgaccgccaggccaaggacacctaccacggcaagagcaagctggtcacgccgatcgccatcacgatcttcttctggatcctgttgatgaatctgctgaagatgatcccggccgatttcatcgccaagccgctggaatgggtgggcgtgcactactggaagccggtgccgaccgctgacgtcaatgccaccctcggcatggccatcagcgtgttcttcctgatgctgttcttcgcgctcaagtccaagggcctggtcggcttcgtcaaggaattcctgactgcgccgttcggcaagtggatgatgccgttcaacctgatcctcaacatcgtcgagtggctgagcaagccgatctcgctggcgatgcgactgttcggcaacatgttcggcggcgaaatcgtgttcctgctgatctgggtgctgggtggtgccggtttcttcggcgccatcgcgggtggtgtgttcggcctcggctggatgctgttccacctgctggtgatcccgctgcaggccttcatcttcatgatgctgtcgatcgtgtacctgagcctgtcggaagacgctcactga

SEQ ID NO: 513699 - DNA, 306 bp, Stenotrophomonas maltophilia; identical to SEQ ID NO: 495814

SEQ ID NO: 513700 - DNA, 522 bp, Stenotrophomonas maltophilia; identical to SEQ ID NO: 495813

SEQ ID NO: 513701 - DNA, 528 bp, Stenotrophomonas maltophilia
atgagccaggccctcacgcttgcccgcccgtacgcccgcgccgcgttcgcgaccgcgcgcgacgaaggtgcgttcgcgccgtggtcggacgccctggcgttctccgcccacgtcgccgccgacccgcgcgtggcggccctgctcgccaacccggagctgggtcgtgacgacgccgtcgccctgctggcgccggtgtcgcacggcgagacctactcgcgcttcctggccatcctggccgaatcgcatcgtctgccgctgctgccggaaatctccggcatgttcgacgccctgcgcgccgaagccgagcacgtggtcaaggccacggtgacctcggcttccgagctgtcggccggcgagctggacgcgatcaaggctgcgctgcgcaagcgcttcaaccgcgaggtcgacgtgaccaccgcggtcgatgcttcgctgatcggcggcgccgtgatcgacgccggcgacgtggtcatcgatggttcgctgaagggcaagctggcccgtctgcagaccgcgctcgctaactga

SEQ ID NO: 513702 - DNA, 1548 bp, Stenotrophomonas maltophilia
atggcaaccacgctcaacccctccgaaatcagcgaactgatcaagaaccgcatcgagaaggtcaagctggccgcggaatcgcgcaacgaaggcaccgtgaccagcgtgtccgacggcatcgtgcgcatcttcggtctggccgacgtgatgcagggcgaaatgatcgaactgccgaacaacaccttcgccctggccctgaacctggagcgcgactcggtcggcgccgtggtcctgggtgactacgagcacctgcgcgaaggcgacgtcgccaagaccaccggccgcatcctggaagtgccggtcggcccggaactgctgggccgcgtcgtgaacgcgctgggcgagccgatcgacggcaagggcccgctgggcaccgacctgaccgctccggtggaacgcgttgcgccgggcgtgatctggcgcaagtcggtcgaccagccggtgcagaccggttacaagtcggtcgactcgatgatcccgatcggccgtggccagcgcgagctgatcatcggtgaccgccagaccggcaagaccgccatggcgatcgatgcggtgatcaaccagaagggcaccggcatcaagtgcgtgtacgttgcgatcggccagaaggcgtcgaccatcgccaacatcgtgcgcaagctggaagagaacggcgcgctggcccacaccatcgtggtggccgcgaccgcttccgaatcggctgccatgcagtacatcagcgcctactcgggctgcaccatgggtgagtacttcatggaccgcggcgaagacgcgctgatcgtgtacgacgatctgtccaagcaggccgttgcctaccgccagatctcgctgctgctgaagcgtccgccgggccgtgaagcctacccgggtgacgtgttctacctgcactcccgtctgctcgagcgcgctgcccgcgtgtccgaggaatacgtcgagaagttcaccgaaggcaaggtcaccggcaagaccggttcgctgaccgcgctgccgatcatcgagacccaggccggcgacgtgtccgccttcgttccgaccaacgtgatctcgatcaccgacggccagatcttcctggaaaccgacctgttcaacgccggcatccgcccggccgtgaacgccggtatctcggtgtcgcgcgtcggtggctcggcccagaccaagatcatcaagaagctgtcgggcggcatccgcatctcgctggcccagtaccgcgagctggctgcgttcgcgcagttcgcctcggacctggacgaagcgacccgcaagcagctggagcgtggccagcgcgtcaccgagctgatgaagcagaagcagtacgcgccgatgtcgattgccaaccaggcgctgtcgatctacgccgtcaacgagggttacctcgacgacgtgccggtcaacaagctgctggcgttcgaagaaggcctgcacgcccacttcgccaacacccagggcgagctgatcagcaaggtcaacgccaccggcggttgggacaacgacatcgaaggtgccttcaagaagggcatcgccgagttcaagaccaccggcagctggtaa

SEQ ID NO: 513703 - DNA, 864 bp, Stenotrophomonas maltophilia
atggcaagcggacgcgaaatcaaaaccaagatcaagagcgtgcagaacacccgcaaggtgacgcgcgccctggaaatggtctcggcctccaagatccgcaaggcgcaggatcggatgaagacctcgcgtccgtacgcgcaggcgatgaagcaggtgatcggtcatctggcccaggccagcaccgactaccagcatccgttcctggtcgagcgcgagcaggtcaagcgggtcggtttcatcgtgatctcctccgatcgcggcctggccggcggcctgaacaacaacctgttccgcaagatgctgggcgaagccaaggcatggcaggacaagggtgccgaagtggacctggtgaccatcggccagaaggcttcgaccttcttccgccgcgtgaaggtcaacatggtcggcagcgtgacccacatcggcgacgtgccgaagctggaatcgctgatcggtgtgatcaaggtcatgctcgacgccttcaccgaaggcaggatcgaccgcgtgtacctggtctacaaccgcttcgtgaacaccatggtgcagaaggccagcttcgatcagctgctgccgctgccgccggctgagaagcaggtcgctcaccacgactgggactacctgtacgaacccgatgccgcgaccgtgctcgagcacgtgatgacgcgttacatcgagtcgctggtgtaccaggcactgctggaaaacgtcgcctccgagcatgcggcacgcatggttgcgatgaaggcggcgagcgacaacgccaacaagctgatcggcaccctgcagctcgtctacaacaaggcgcgccaggcagcgatcacccaggaaatctccgaaatcgtcggcggcgcggcagcagtctga

SEQ ID NO: 513704 - DNA, 1407 bp, Stenotrophomonas maltophilia
atgagtcagggcaagatcgttcagatcatcggcgcggtcgtcgacgtcgaattcccgcgtgaatcggtgccgaaggtgtacgacgcactgaaggtggaaaacaccgagatcaccctcgaagtccagcagcagctgggcgacggcgtggtgcgtaccatcgccctcggttccaccgacggcctgaagcgcaacctggttgccgtcaacaccggccgtggcatctcggtgccggtcggcgccggcaccctgggccgcatcatggacgtgcttggccgtccgatcgacgaagccggcccggtcgctgccagcgacaactgggaaatccaccgcgctgcgccgtcgtatgaagaccagtccccggccaccgagctgctggaaaccggcatcaaggtcatcgacctgatgtgcccgttcgccaagggcggcaaggtcggcctgttcggcggcgccggcgtcggcaagaccgtcaacatgatggaactgatcaacaacatcgccaaggcgcacagcggtctgtccgtgttcgccggcgtgggtgagcgtacccgtgagggcaacgacttctaccacgaaatgaaggactccaacgtcctggacaaggtggcgatggtgtacggccagatgaacgagccgccgggcaaccgtctgcgcgtcgccctgaccggcctgaccatggccgagtacttccgcgacgagaaggacgaaaacggcaagggtaaggacgtcctgctgttcgtcgacaacatctaccgttacaccctggccggtaccgaagtgtcggcactgctgggccgcatgccgtccgccgtgggttaccagccgaccctggccgaggaaatgggcgtcctgcaggagcgcatcacctcgaccaagaacggttcgatcacctcgatccaggccgtctacgttcccgcggacgacctgaccgacccgtcgccggcgaccaccttcgcccacctggactcgaccgtgaccctgtcgcgttcgatcgcctcgctgggtatctacccggccgtcgacccgctggactccaccagccgccagatggatccgctggtcatcggccacgagcactacgacaccgcccagcgcgtccagcagaccctgcagaagtacaaggaactgaaggacatcatcgccatcctgggcatggacgaactgtccgaagaagacaagcaggccgtgtcgcgcgcccgcaagatcgagcgcttcttcagccagccgttccacgtggccgaagtgttcaccggttcgccgggcaagtacgtgccgctgaaggacaccatccgtggcttcaaggccatcgtcgatggcgagtacgaccacctgccggagcaggcgttctacatggtcggcggcatcgaagaagcggtcgagaaggccaagaagatggccgagaaggcctga

SEQ ID NO: 513705 - DNA, 423 bp, Stenotrophomonas maltophilia; identical to SEQ ID NO: 495808

SEQ ID NO: 513706 - DNA, 2214 bp, Stenotrophomonas maltophilia
atgcagcaccactcgacagcgattgaaggcggcagctggcagcggccgtggcgcacaccggcaggcgtgttcctgattgcgtggatcgttctgtgcctgccatggctcagtggcatcaagaccattccctttgatgccgtgcagcagttcttcccggcggtcagtttcagtgccgagcagttgcgtcacctgcaggccccctggtggaatccgtatctctacggtggctacccgcaggtggccgatccgcagatgatgacgctgcagccgacgatgctgctgccgatgctgctggcgccgggctccctgcacctgttcacggtggtggtgctgctgcatgtgctggcaggcggcctgggtgcactgcggttgagccgcgtgcagggcatgccgccgccggcgcagctgctgttcgcgctcacgctgatgtttggtggcgtggccgcgtcgcgcctgcagcacacgccgatgatcatcagctactgcctgctgccctggctgtggctgggcctggagcaggtccgccggcggggacggatgcgcgacatcctgctggccggtgtggccggcgggatgtgtgcgcttcaactgacccaggtcacctatttcatcatcctcgcgtgcgtgatctacgccgtggctgctgtcgtgctggcacaggggcagcgcatgcgcctgctgtggcagctgggcgtggtggccattctcgccggtggtgtcagtgcgccgcagtggctgtccacgctggcctggctggaccagaccaatcgcaatggcctgacgctggaagccgcgctgccgggtgccatccactggcagacactggtgacactgctgtcgggcaacgtgttctcgcaggggcgcggcgacagctgggccttcggtgatatcagcgccgattacctctatgtgggggcagtgccgctggcgctgtggctgctctggggcggtgaggtgctgcggcgcaagccggcggcgacgcgcgtcgcgctgtgtgcgctgacgctggcgatcatggtcgcggtgggtggcgccacgccgctgttcccctggttgttcggctggcttccggggctggacctgttccggcgcccgtccgatgcgctgttccttaccgtgcctgcggcggcgtggctgggtgccagtgccctgcaggttgccctgcagcggcagccattgcgattgcatcgggtgtccgtggcggtcgtcgcagtgctgggcgcgtgcgctgcgtggctggcgatcgatcatggtcatccgctcgctttcgcctggcttgcggtcagcgccgcgctgggcgtagccgcggtgtgggtgctgcgccgccaccagtcacctgcgcgctgggtgctggcgctggtgctgttggacctgctgctgttcaacgtcggcaccaggttcaacgcgggcagcggcacaaagtcggtgctcaccgccgatcgtgcgggtcctgcgcagcgcgcctatgcgctgctggcggcagagcggcatatcggcatacccgagcgcgcggtggtcttcggcatcggcggactcaccaacggcgcggcggtgcatgccattgcgctggcaaacggctacaacccgctgctggcaagcgactatctgcagatgaccgggatgccgggcgagccggtggataccttccagcagaaggtccccactgcctggatgccagacaccgctgctcccctgtacgacctgctgggcgtgcgttggctgctggcccaggagccgttcccgggctccagcgcgcagggcgaccaggtggaacttgcgcggcgtgacagcgtgctgccacgggtgctgaatccgcggcaggtgcgccgccatgaggagcgtctaccgcctgcgccgctgttcaaccagaccgatttcaaccggcagctatggctgccggcagccgccagcagccactgtgccgaacaggatgccggcgaggccacggtacaggtgctgcgctaccagccgggacgcatcgagctgacggtggtggccgaccatgcagcatgggtggtgatcaacgaaaccaccggtcgtggctggcaggcgcagctcgaggatggccaggtactgccgctgctgcgcggcaatggcctcttccatgcgttgtgcgtgccggccgggcagcatcaggtgcggttgcgctacagcgcgctgcagctgtggcgtgagggactgggagcgcgcctgcgccgtgacggtgatcgctga

SEQ ID NO: 513707 - DNA, 384 bp, Stenotrophomonas maltophilia
atgagccttgtccgccagggaagcgcctacctcgtgatcgggctcgtgcagctgctggtcgattggctggtgttcgtggtcgccaccgcgcttggcatgccggtcgcaccggccaacgtcgccgggcgcctggccggcatgctgctgggcttctggctcaacggccgctacacctttgccgaggccggcacccacaagctgggctggaagcgctttgcacgcttcttcgggctgtggctgctgctgactgcggcaagcacgttgctggtgagcctggtcgaccacgcgctgggcctgcagtacacctggctggccaagccactggtggaaggcgggctggcgtgcgtgtcgttcctgttgatgcgccatgtggtgtaccgctga

SEQ ID NO: 513708 - DNA, 1368 bp, Stenotrophomonas maltophilia
atgacccaagccctgcacgtcatcatcctcgccgccggcgccggcaagcgcatgaggtcggtgctgccgaaggtgctgcagccgatcgccggccaaccgatgctggcgcacgtgatcgatgcggcccgcgaactgcaaccggcggccatccatgtggtctacggccatggcggtgaggcggtgcggcaacagttcgccgaccagcccgacctgcagtgggctgaacaggcgcagcagctgggtacgggccacgcggtggcgcaggcgatgccgcaggtgccggatgccgtgcaggtgctggtgctgtacggcgatgtaccgctgatccgcgcgcagaccctgcgcgatctgctggcgcagccggggcggttggcggtgctggtcgccgaggttgatgacccgaccggttacggccgcgtgctgcgcgatgccgaaggcaaggtgggagcgatcgtcgagcagaaggacgcgaccgacgaccagctgcgcgtgcgcacgatcaacaccggcatcatcgccgcggagtcgaccgcgctgcgccgctggctgtcgcagctgtccaaccgcaatgcgcagggcgagtactacctgaccgacgtgttcgcatttgccgcgcatgagtacaccccggccgaaatggcgctggtggccgacgcgcaggaagccgagggggcaaacgatccctggcagctgtcgcagctggagcgtgcctggcagcatcgcgccgtgcgtgcgctgtgcgcacagggtgcacgcgtgcgcgacccggcacgactcgacatccgtggcaccgtcaccgtgggcagtgacgtgctgatcgatgtcgatgtcgttctcgaaggcaacatcgtgctcggcgacggcgttaccatcggtccgttcaaccgcctgaaggacgttactctcggccccggtaccgaagtacgcgcgcactgtgatctggagggtgtggtcaccgaaggcgcggcgctggtcggtccgttcgcgcgcctccgcccaggtaccgtgctggccgatggcgtgcacgtcggcaacttcgtcgaaaccaagaaggtcaccctcggcgtcggcagcaaggccaaccacctcacctatctgggtgatgcggtgatcggcagcaaggtgaacatcggtgccggcaccatcacctgcaactacgacggcgtgaacaagtcgaccaccaccatcggcgacaacgcgttcatcggttccaacagttcgctggtggcgccgctgacgatcggcgagggcgcgaccatcgctgccggttcggtcatcacccgcaccgccccggacggcaagctgacactggcccgcgcacgacaggaaaccatcgatggctggaagcgcccggtcaagaagtcctga

SEQ ID NO: 513709 - DNA, 534 bp, Stenotrophomonas maltophilia
atggctggaagcgcccggtcaagaagtcctgagccacgtattccgcatgccgacgagctcggcgtgctgccggcaattgaacagcgtgccggcgaactgctgaaggatcacgaagcccatccggtatttgccggccacggcctggatctgccgacgctgcaggacggccttcagcggggccagctgtgggttgtggatggccccggcggcgacattgccggctacctgctgggcggcgagctgtgtggcgagttccatgtcctgcagatggatgtggaccccgcgcacgcgcgtcgtggccatggccgtgcattgctgcggcacgccttggcgcaggccagggccaccggctttgctgcagcggtgctgaccaccttgagcgatgtgccatggaatgcagccttctatgccagcgaagggttcgacgtagtgcctgaggctgagtggaacgacggcctgcgcgccgtcatggccgaagaggctgcgctcgggtttccgatgcacctgcgggtggcgatgcggcgggcctggtag

SEQ ID NO: 513710 - DNA, 1353 bp, Stenotrophomonas maltophilia
atgaaacggcgctcgttcaccttccgcctgttcctgcgcctgctgccggtgctggcgctggccgctgcgctgccgtggctgctggcgtactggatgaaccatggctgggtggtgaccacggcgtcggccgtgatcctgctggcgttgatgtggtggaccctgcgccgtgccaccgcaccggtgcgctcgctgatgcgtgcactgtccggcaccaccagcagctaccgcgacggcgagtacaacttcggcgtgtactggccgggcaacgacgaactgggcgacctggtgcaggcgcaccgcgagctgggcgatgtgctgcgcgaacagcggcagggcctggtgcagcgcgaactgctgctggacaccatggtgcagaacacgccggtggccatgctgctgattgcctccggcggcgatggcatcgcccgcgtggtgttctccaacctggctgcgcgcaagctgctgcatggcggctggaagctggaaggccagcgtctggaagaggtgctggaacaggtgccggtagagctgcgcgatgccattgcccgtggcggcgacagcctgttcgcggtgcatgccgagggcgaggacggcgacgaggatgacgagcaggtctaccacctgtcgcgccgcgccttccagctcaacggccgtccgcacgacctgctgctggtacgcctgctcaccgccgaactgcgccgccaggaagtgcagacgtggaagaaggtgatccgggtgatcagccacgagctcaacaactcactggcgccgatcgcctcgctggcccactccggtggcgtgctggtgcagcgcgaacgcttcgaccggttgccggagatcttcaccaccatcgaggaccgcgcacgccacctggaaggcttcatccgtggctatgcacgcttcgcaaagctgccgcagccgcaactgcagaccgtgcactgggcgccgttcctgtccagcctgcgccagcagatcccgttcaccatggaacgcgagccggacgaggacctgagcagccgcatcgacatcgcgcagttcgggcaggcattgctgaatcttctgaagaacgcgcatgaagcctgcgccgaggccgatccgcccaacgatgacgtacaggtgcaactcacgcggctgccgcaatggctgcgcctggacgtactggatcgcggcaagggcatgaacgagcaggtgctgcagaacgccttgatgccgttctattcgaccaagcgcaacggcaccggcctggggttggcactgacgcgcgagatcgtggaagcgcacggtggccgcgtgtcgctgcagaaccgcggcgatggcgggttgtgcgtgtcgatcctgttgccggtgggttga

SEQ ID NO: 513711 - DNA, 1347 bp, Stenotrophomonas maltophilia
atgccttcgatcctgatcatcgacgacaacgccagtgtgggcactgcactggacgtgctgttctccctgcacgacatcgacaccctgcaggcgcagagcccggccgaggggctggccctgctcgagtcgcagccggtcgacctggtgatccaggacatgaacttcagcgaggacaccacctccggcgaggagggcgaagcgctgttcgcacagatccgcgcacgccacccggacctgccggtgatcctgctgacggcctggacccacctgagcagcgcggtggacctggtcaaggccggcgccgccgactacctggccaagccctgggacgaccgcaagctgctgaccacggtcaacaacctgctggagctgtccgaggcgcggcgcgaactggaccgccgccgcagccgcgagctgcgccagcgcaatgcgctggaagaaaagtacgacctgtgcggtgcggtcttcgccgatccggccagcgagcgcgtcatcgccctggcctgccaggtcgcgcgctccgagctgccggtgctgatcaccggtcccaatggtgccggcaaggagaagatcgcgcagatcatccaggccaattcactggtggccaagggcccgttcatcacggtcaactgcggcgcgttgccgtcggagctgatcgaggccgaactgttcggcgccgaggccggcgcctacaccggcgccaacaaggcacgcgagggcaagttcgaagccgccgacggaggcacgctgttcctggatgagatcggcaacctgtcgctgggcgggcagatgaagctgttgcgtgtgctggaaaccggccgcttcgagcgcctgggttccaatcgcgaacgccaggtcaaagtccgcgtggtcagcgcgaccaatgccgacctgccggcgatgatccgcgacggcacgttccgcgaagatctctattaccgcctcaatacagtggaactggtactaccgccgttggccgagcgcgcgggcgacatcgttccactggccgagcgtttcctgacggccggcaagccgctgtccagtgccgccagtgccgccctgcaacggcacccgtggccgggcaacgtgcgcgaactgcgcaacgtgatccagcgtgccgaactgctggcgaccggcaaccgcatcgaggtggccgacctgaacctgccgcgcacctcaccggcgccacgacctgcaccgagcgctggcaacgatcccgaccgtgagcgcatcgaggacgtgctggcacgcaaccacggcgtcatcgcccaggcggctgccgaactcggcctgagccgccaggccctgtaccggcgcatggaccgccacggcatcccacgcgaatga

SEQ ID NO: 513712 - DNA, 387 bp, Stenotrophomonas maltophilia
atgcgtatccgctggatgctgatgatgatgctcctgccactgccggcactggccggcggtggcagctcgcagacactggagtggcgccaggacgatgcgcgcctggcattgcgttcgagcgaaggccaggtgcgcgtggaagccgccggcccggaagcccgcttcggcgtgcgcagcggcgatcgcatcctgcgggtggatgacaccaccgtacgcaggatcgagcatcttgccgaggccctgcggcgttcaagcgccgccagggcctatctcctgctgcagcgcgacaggcaggaactgacggtcgcggtggacgccgctgcctggcgcagggcgctggtcgctccgcctccgccagcaccgccaccgccgccgccccgacgctga

SEQ ID NO: 513713 - DNA, 1215 bp, Stenotrophomonas maltophilia
atggatatccgccccatcctcagcaccctgcgccggcacaagacagccgccgccctgatcgtgctggaagtcgccctgacctgcgccatcgtctgcaatgccctgttcctggtcacccagcgcgttgaacggatcagccagaccagcggcctggccgagaacgagctggtgttcgtccgggtcagcggcatcggcaagcagaccaatggccaggcccgcacccaggaggacctgtccgccctgcgcgccgttcccggggtcaccgccgccgcgaaggtcaaccagctgccgttccgcccgaactcctccaataccagcgtttcgctgaagcaggaacaggaacgtccgaccgccttcgtcaccatgtacatgttcggcgaaggtggactgtccacgcttggactgcagctgaccgccggccgcgacttccagcccagtgaatacagcaacgtcgaggatgcacagaagaacgcctccaccaataccgcctcctcggtgatcatcagccgcacgctcgccgacaggctgtaccccggcgagaacgcactgggcaagacgttctacatgggcaagcagccactgcacgtggtgggtattgtcgcgtcattggccacgcccaccgattacaacaacaacaccacgctgtcgatggtgctgcctgtgcggaccgatttcacccagggcccgtacgtcctgcgcaccgctccggaacggcgcgaggaagtactcaagggcgcgatcgccgcgcttgaacgcaacgaccccaaccggctggtgcgcgagaagctgacctatgaggcgcagcgcaatgactacttcaagaacgacagggccatggtcgggctgctgatcacggtgtgcatctcgctgctggtggtcaccgcactgggcatcatcggcctggccagcttctgggtgcagcagcgcagcaagcagattggtatccgtcgcgcgctcggcgcgacgcgtgggcagatcctgcgctacttccagaccgagaacttcctgctggccacgctgggcatcgtgctgggcatgctggccgcctatgcgatcaacctggcactgatgaacatgtacgagctgccgcgcatgccgctgcactacctgccgctgggcgcactgctgctgtgggtgcttggccagatcgcggtgttcgggccggcccggcgcgcggcagcggtaccgcctgcggttgccacgcggggcgcatga

SEQ ID NO: 513714 - DNA, 1302 bp, Stenotrophomonas maltophilia
atgttcgcctactacacccgattggcggtacgcagcttccgccgcaacaagatcctgaccgcactgatggtggtcgccatcgcgctcggcatcggtgcctcgatgaccacgctgacggtgttccacgtgctgtccggcgacccgattcccggcaagagcgaccagctgttctacgtgcagatcgatccgcgcccgcgcggcggctataccccgggtgaggagcctgaggaacagatgacacggcgcgacgccgagaccctgctgcgcgagaagcgcggcatccgccaggcgatgatgagcgcgggcggcggcacggtggaaccggagctcagcacgctcaagccgttctcggtggatacgcgctggacgtcggccgatttcttcccgatgttcgacgtgccgatgcagtacgggcgtgcctggaacagcagcgatgatgacaatcgcagccgggtggtggtgctgtcgaaagcgatcaacgacaagctgttccagggtgccgacagcaccggtcgcgagatccgcctgagtggccattcactgcgggtgatcggcgtgatgaagaagtggaatcccgaaccccacttcttcgatctgaccaccggcaactacggcaaggatgaagacctgctggtgccgttttccactgcgatggacctggagttcggcagcaacggcaacatgaactgcttcggcgagaatccggatggcagcagcaactcgatcaacgcgccctgcagctggatccagtactgggtggagctggatccggccaaggtcgaggactaccgcagctacctggccaactactcggaccagcagcgcgcagcgggccgtttcgagcgccctaccaacgtgcgcctgcgcccggtgatggagtggttgacgttcaagaatgccgtgcccagcgacgtgcgcctgcagatgtggctggcattgggctttctcggcgtctgcctggtcaacacggtgggcctgctgctggcgaagttcctgcgccgcagcggcgagatcggcgtgcgccgcgccctcggtgccagccgtgggcagatcttcctgcaatgcctggttgaagccggtgcgatcggcgttgccggcggcgtgctcggcatcggcctggccctgctcggcctgtatgcggtgcgccagcaacccgtggactacgcgagcctggcccacctggacggcagcatgctgctgctggccattggcctgaccctgttcgccagcctcgccgctggtttcctgcccgcctggcgcgcgatgcaggttaccccggccatccagctcaagtcgcagtaa

SEQ ID NO: 513715 - DNA, 726 bp, Stenotrophomonas maltophilia
atgtacatgctcgaaatgcgttcggtcgccaaggtcttccgcaccgaacaggtggaaacccacgcgttgcgctcgctggaactgcaggtcaaggaaggcgagttcgtcgcggtcaccggcccgtccggctccggcaagaccaccttcctcaacatcgccggcctgctggaaaccttcaccagcggcacctacctgcttgacggccaggacgtgagcacgctgggcgatgacgcccgcagccgcctgcgcaaccagaagatcggcttcatcttccagggcttcaacctgattcccgacctgaacctgttcgacaacgtcgacgtgccgctgcgctaccggaagatgagtgccaacgagcgccgcgaacgcatcgagaaggcgctcacccaggtcggcctgggctcacgcatgaagcactacccgaacgaactgtccggcggccagcagcagcgtgcggcgatcgcgcgtgcgctggccggcagcccgcgcctgctgctggccgacgaaccgaccggcaacctggatacgcagatggcccgcggcgtgatggaactgctggaggagatcaatgccgccggcaccaccatcgtgatggtcacccacgacccggaactggccgcgcgcgcgcagcgcaacgtgcacatcgtcgatggccaggtgaccgacctggtgcgcgaaccggtgctggctaccccgccgcgccacatcgttgccgtcaacgagtga

SEQ ID NO: 513716 - DNA, 1278 bp, Stenotrophomonas maltophilia
atgatccgcgacacttccgcacaggaccagatcgtttcctccgcccccgccggcgccacccgcgtcaactggcagcgctaccgctggccggcgctgggcgccatcgtgctgctggccggcatcggctgggccgtgcatgcctggtccaatgccagccgctccttcgacagcagccgggtgcgcatcgccgaagtgaagcgcggcgacctggtccgcgacatcgccgccgacggccgggtgatcgccgccaatagcccgatcctgtacgccatctcggccggcaccgtggacctgaaagtggtcgccggtgacgtggtgaagaagggccaggaactggcggtcatcgacagcccggaactgcgcagcaagctggcccaggaacaggccaccctggccggcctggaagccgaggccagccgtgccgcgctggacgccaccctggcccgcgccaagtcgcgcaaggaaaccgaccaggccaccatcgagcgccaggccgccgaccgcgacctgcagcgcttccagcgcggctacgacggcggtgcggtgccacagatcgacctggccaaggccaaggactcgctgaagaaggccgacatcaccctggccaacgccaccaccgatgcgcgcctgcagagccagggcgccgacctggatgcccgcaacaagcgcctgctggccgaccgccagaaggccgtggtggccgaagtgcagcgccaggtcgacgcactgaccctgcgcgcaccgtttgacggccaggtcggccaggtgcaggcggtccagtccaccaacctggctgccaacgcgccggtgctgggcgtggtcgacctgtccaagttcgaggtcgagatcaaggtgccggagagcttcgcccgcgacctggcgatcggcatgccggcgcagctgaccggcggcaatggcaagccgttcccgggcgagatcagcgcggtgtcgccggaagtggtcaacggcgaggtcaacgcccgcgtgcgcttcgccagcgcgcagccggaaggcctgcgccagagccagcggatgtcggtgcgcgtgctgctcgatacccgcaaggacgtgctgaaggtcgagcgcggcccgttcgtcgaacagggcaatggcgtggcctacgtgatggatggccgcaccgcggtgcggcgtccggtggaactgggcgtcagcagcctgggcgaagtggaaatcaagtcgggtgtgcagccgggcgaccgcatcgtggtctccggcagcgacctgttcaaggacgccgaacgcgtctccgtcaactga

SEQ ID NO: 513717 - DNA, 1839 bp, Stenotrophomonas maltophilia
atgtgtggaatcgtgggtgcaatcgccgatcgcgacgtggtgccggtgctgatcgaaggcctgaagcggcttgagtaccgtggttacgactcctcgggcatcgcggtgatcgatcacgccgagcgccccgaagtacgtcgtgtccgccgcaccggtcgcgtgtcggaaatggccacggcggccgaggccgaagggttcaatgcggtgctgggtatcggccacacccgctgggccacccacggcggcgtcaccgaggccaacgcgcatccgcacatcagccacggcgtggcgctggtgcacaacggcatcatcgagaaccacgaagagcagcgcgagaagctgcgcgcgctgggctacaccttcgagtcgcagaccgacaccgaagtcatcgcgcacctgatccatcatcacctgaagggcggcgatgacctgctggtggcgctgcagcacacggtgaaggagctgaccggcgcctacgcgctggccgtggtcagccgcgccgagccggagcgcttcgtctgcgcgcgcatgggctgcccgctgctggtgggcctgggcgagggcgagaacttcgtcgcctccgacgtctcggcggtgatctcggccacccgcaaggtgatcttcctggaagagggcgacaccgccgagatccgtcgcgatggcgtgcgcatcttcgatgagcatgaccggccggtcgagcgcgatgtgcacctgtccgacgtgtcgctggcatcgctggagcttggcccgtaccgccacttcatgcagaaggaaatccacgagcagccgcgcgcgctgggcgacaccatcgaggcggcgatcgacgccggtggtttcccggccgagctgttcggcaagaatgccgaagcggtgctgtcgggcatcgagggcgtgcagatcattgcctgcggcaccagctactacgccggcctgaccgcgcgctactggatcgaagccatcgccggcctgccgtgcagcgtggagattgccagcgagtaccgctaccgggccgcgtatgccaacccgaagcacctgatcgtcaccatctcccagtccggcgaaacgctggatacgatggaggcgctgaagtacgccaaggcgcttggccacaagcacacgctgtcgatctgcaacgtgccggaaagcgcgattccgcgcgccagcgagctggtctgctacacccgcgcgggcgcggagatcggcgtagcttcgaccaaggccttcaccacccagctggccgcgctgttccagttgaccgtggtgctgggcaagctgcatggccgcatcgacgcggcgcaggaagcggattacctggaacagctgcgcttcctgccgggcagcgtgcagcacgcgctgaatctggaaccgcagatcgcggcgtgggccgaacgcttcgcgcgcaagtccaatgcgctgttcctgggccgtggcctgcattacccgatcgcgctggaaggctcgctcaagctcaaggagatttcctacatccacgccgaggcctacccggcgggcgagctgaagcatggcccgctggcgctggtggacgaggacatgccggtggtggtgatcgcccccaatgacagcctgctggagaaggtgaagtcgaacatgcaggaagtgcgcgcccgtggtggcgagctgttcgtgttcgccgaccaggacagcaacttcaatgagtccgaaggcgtgcacgtgatccgcacgccgcgccatgccggcgtgctcagcccgatcgtgcacaccattccggtgcagctgctggcctaccacaccgcgctggcacgcggcaccgacgtggacaagccgcgcaacctggccaagagcgtgacggtggagtaa

SEQ ID NO: 513718 - DNA, 432 bp, Stenotrophomonas maltophilia
atgaacgtccgcgaactcctgcaatccaagaaagaagctgtcatcaccatcgacgccgaagacaccatcggtgccgccgcccacaagatgagcgcgaacaggatcgctgcgctggtggtgatgaaggacgatgccccggtcggcatcatttccgagaaggacatcgtgcgtaccctggccgacgacggcccgcaggccggccgccgggtgatctccagcctgccgtccaccggcctggaaggcattgcgccggacgcgacgctgaagcaggccatgtcgttgatgacgtactcgcggcgccgtcatctgatggtgaccgacggcaaccagctggtcggcatcctcagcctgggcgatatcgtgaagaacctgctgggcgagctggaactggaaaaggccgtgcttcaggacatctacatggccgcccactga

SEQ ID NO: 513719 - DNA, 429 bp, Stenotrophomonas maltophilia
atggaaacgatggaactgcaccgcggccgcctgatcgaccacatccagctggtggtgcgtgacctggcggccagccgccgcttctaccaggcggtgttcgacaccatcggcatcccgatcgccggcgaaggcgatgattacttctgggccgatgagctgttcatttccagcgccagcagcgaggccgccgccggccagctgaccggccggcaccatctggccttccaggcccgcgacagcgccaccgtcgatgccttccataccgccgcgatcgccgccggcggcaccgataacggcgcgccgggcgaacgcccctaccacccgggctactacggcgccttcgtgctcgacccggacggcaacaacatcgaagtggtctatcacggtcctgcgaactacagcgccgactcggtaaaggtcacgttctga

SEQ ID NO: 513720 - DNA, 516 bp, Stenotrophomonas maltophilia
atgaccattcccgccctgcgcgatgtccccggcgtcgccgcccaggccccggccgaaaccagcggcttcgtgttcaaccacaccatgctgcgggtgaaggacatcaccgcctcgctggacttctacacccgcgtactgggttaccagctgatcgacaagcgcgacttcccggacgcccagttcagcctgtacttcctggcctacgtgccggccggcgcagtggtgccagaagacgacagccagcgccgcctgtggatggccggcctgccgggcgtgctggaactgacccacaaccacggtaccgaaacccaggccggtgcggtgtaccacgacggcaacagcgacccgcgcggcttcggccacatctgcgtgtcggtaccggacatcgaggccgcctgccagcgcttcgaggacctcggcgtgaccttccagaaacgcctgaccgacggccgcatgaagaacctggccttcatcaaggacccggacggctactgggtcgaaatcatcgccaactga

SEQ ID NO: 513721 - DNA, 1113 bp, Stenotrophomonas maltophilia
atgtcgcagcgtgaatgggtggccgccgccatccgcaagatcgaagccgatttcaaccgttccgccgatacccatctgatcccgctggcgctgcccgggttcgagggcatcgacctgtacctgaaggacgagtcgagccatcccaccggcagcctcaagcaccggctggcgcgctcgctgttcctgtacgcgctggccaacggttggttgcgcgagggccggccggtgatcgaggcctccagtggctcgaccgccgtgtccgaagcctatttcgcgcgcctgctgggcctgccgttcattgcggtgatcccggccaccacctcgccggaaaagatcgcggcgatcgagttccatgggggccgctgccacctggtcgagcgcgcctgcgacctcaactgtgattcggaaaagctggcccgcgaaaccggcggccacttcatggaccagttcacctatgccgagcgggcgaccgactggcgtgccaacaacaacatcgccgaatccatcttcaagcagatggccgaagagcccagcccggttccggaatggatcgtgtgcagcccgggtaccggcggtaccgccgccacgctgggccgttatgtcagctaccgccggcatgacacccgcatcctgtgcgcggacccggaagtgtcggtgttcttcgacggctacaaggctgccgtggccggtgaacaggactggcgtggactgacctgtagcggtggctcgcgcgtggaaggcatcggccggccacgggtggagccgagtttcatcccgaccagtgtcgatgcgatggtgaaggtgcccgatgcgctgagcctggccgcgatgcgccatgtcagccgccagctcggccgccgtgtcggtggctccaccggcaccaacttcatcggcgtgctgcaggccgcgcaatggatgcgtgaggcgggccaccagggcagcatcgtcagcatcctgtgcgacagtggcgagcgctatgcgcagagctattacgacccggcgtggtatgggcgacaggggatcgatgtcgacggcgccgatgcgcagctggcggcggcggtggccgggcaggggttgcccgaactgccgtggtgcagcctggaagcgttgtaa

SEQ ID NO: 513722 - DNA, 405 bp, Stenotrophomonas maltophilia
atggaaggtctggctgcagtggcatccatctcaccggcgcgctcgctggcgctgtccgccagcccggcagaactggcctggatcgccgcgctgtgcgatgccggcgacgacgccccccgccatttggagcagctgcaggcggtattgcagcagggcggcacgttcaacgatgcccaggagtggtacccgttcgaggtgatcgagcgcggcgccagccagttgcagctgggccacgagcgcgagttcgtgatctgcgtgctgctgtggctgcaggcattggcccagggacgcgccagcatcctggaccccagcctgcacctggatgaccgcgcgatggacatcgaggcgttgcctgatgcgctgcgcgatgcggtgctggatgcgttcaccgcagcggggtattga

SEQ ID NO: 513723 - DNA, 2031 bp, Stenotrophomonas maltophilia
gtgaccgttgccaaccccctgctcgacttttccggactgccgcgctttgacgcgatccgccccgagcacgtcgcgccggcgctggatgtgctgctggccgaggccgaagctgccgtcagcgcagccgagcgggtgcagccggtgcgttgggacaccttcgtcaccccgctggatgacgccaccgagcgcctgtggcgtgcctggggcctggtcggccacctgcagggggtggtcaacaccccggaactgcgtgaggcctacaacggcaacctgccgcgggtgacccgtttcgccagcgcgctgggccagaacctggcgctgtatcgccagtaccaggcactggccgccagcccggaggccgcgcatttcaatgaagcccagcgcaaggtgctggacaacacgctgcgtgacttccgcctgggcggtgccgagctggcacctgaggcgcagcagcgctttgcggcgatcaaggaggaactgtcggcgctgtcggcgaagttctcgcagaacgtgctcgacgccaccgatgcatggtcgctgtacatcgaggacgaagcgcgactgctgggcctgccggaagacgtgaaggctgccgcgcgcgctgcggcagagaaggacggcaggaccggctggaaactgaccctgcagatgccgtgctacctgccggtgcagacctgggctgaagaccgcgacctgcgcgagatcctgtaccgtgccagcgcgcagcgtgcatcggagttcggcgatgacgcgctggacaacagtggcaacatcgaccgtatccttgccctgcgcgccgaactggccgcgttgctcggcttcgattcgtacggccattactcggtggcgaccaagatggcgcaggatccggccgaagtgctgggtttcctgcgtgaccttgccgcgcgagccaagccgttcgcggccaaggaccgcgccgagctggagcagttcgcacgcgagcagctgggcatcgatgccctgcaggcctgggacctggcgttcgccgccgaccgcctgaagcaggcgcgttacagctattccgagcaggaagtgaagcagtatttcaccgaaccgaaggtactgggcggcctgttctcggtgatcgagcagctgtatggcctgcatgtgcaggaagacagcgcaccggtgtggcacgaagacgtgcgcttcttccgcctggtcgatgcgcagggcgcgctggtcggccagttctacctggacctgtacgcacgcgagggcaagcgcggcggtgcgtggatggacgattgccgcaaccgtcgcgtgcgtggcgacggcagcgtgcagacgccactggtctacctggtgtgcaactttggccggggcgccaacggcagaccggcgaccttcagccacaatgaagtgaccacgctgttccatgagatgggccacgggctgcaccagctgctgacccgcatcggcgaactgggcgtggccggcatcaacggcgtggaatgggacgcggtggagctgcccagccagttcatggagaacttctgctgggaatgggaccacctgcagggcatgaccgcgcacgtggacagtggcgagccgctgccgcgcgcgctgtacgagcgcatgctggcggcgcgcaatttccatagcggcatggccacggtgcgccagctggagttcggcctgttcgacatgctgctgcacagccagttcgaaccggcgcaggacagcgtgctggcactgctggaccgagtgcgcgcggaagtggccgtgaaccacccgccggtctggaaccgcttcccgcaccagttcagccacatcttcgccggtggttacgccgcgggttactacagctacaagtgggccgaagtgctcagcgccgatgcctacgccgcgttcgaggaagcgccgcaggcactggctgaaaccggtgcacgcttccgcgatgagatcctgtcgcgtggtggcagccgcccggcggcggagaacttcaaggccttccgcggccgcgcgccgcagatcgacgcgctgctgcggcactcgggcatggcgtaa

SEQ ID NO: 513724 - DNA, 804 bp, Stenotrophomonas maltophilia
gtgagcacggtgccgccgattgccgcatggccggccgcgccgctgtcgggcaaggtggtgctggtcaccggcggcgccaacggcatcggccgtggcatcgcacaggccgtgctcggtgccggcggacgcgtgctgatcggcgacctggacgtggaggccggcgaggcgtgcctggcggaatggcagcgtagtggcgaggccgcattccagcgcctggacatcaccgacgaagccagcgtgcgcgacttcatcgccgtggccctgcggcgtttcagccgtatcgacgggctggtcaacaacgcgggcatcgccggaccgcatggcacgcagctgcaggacatggactgggacgagtggcagcgccgcctgtcctcgctgcacggcgccttcctgtgcagcaagcacgcactaccggcgctgacggccagcgccgccggcgcaatcatcaacatcgcctcgacccgcgcctggcaatccgaagcgcacagcgaggcctatgctgcggccaaaggcgggctggtggcgttcacccatgcgctggcgatcagtgccggcccaacggtgcgggtcaacagcatcagtccgggctggatcggcaccacggcctggcaggccccctcgcggcgacacgcaccggagtactcggccatcgaccaggcacagcacccggtcggccgggtcggccgccccgaggacatcggcgcgctggcggtgtacctgctgtcgtcgctgtccggcttcagcaccggccaggacttcatcgtcgacggcggcatgacccggaagatgatctacgccggatag

SEQ ID NO: 513725 - DNA, 654 bp, Stenotrophomonas maltophilia
atgccccggcgctgccagcggcaggcacgacggcgcgttgccaacgacgcgcctacaatggcggccccgccagccgacgtgcccgccatgaccgattcccccctgcccaccgatgacccgatcgctgccacccgcctgtggctggagcgcatcgtcatcggcctgaatctgtgcccgttcgccaaggcggtgtatgtgaaggaccaggtccgcatcgtgctcagtgatgcgaccacgccggaagcgctggttgagcagctggccgaggaactggtgctgttgcgcgatacgccggccgagcagatcgataccacgctgatcgtgcatccgcaggtgctgacggacttcctcgactacaacgatttcctcgacaacgccgacgccgcgatcgaggcactggacctgcagggcatcctgcaggtggccagcttccacccggactaccagttcgacggcgtggcagcggacgacgccagcaactacaccaatcgcgcgcccttccccaccctgcacctgctgcgcgaagacagcgtggcgcgcgcagtggatgtctatccggacccggacgtgatcgtcgagcgcaacatccagaccctggaccgcatcggcgtggacggctggcatcgccgcctgcgtggcgaagacctgacgtga

SEQ ID NO: 513726 - DNA, 483 bp, Stenotrophomonas maltophilia
atgccttccttcgacgtcgtgtccgaagtcgacacccacgagctgaccaacgccatcgaccaggccaaccgcgaactggccacccgcttcgacttcaagggcgtggacgcaaagttcgagcgcgacggcgatgtcatcaaccagaccgcgccgaccgaattccagctcaagcagatgaacgacatcctgcgtgctcgcctggccgcacgcggcatcgacgtgctcagcctggagttcggcgacatcgagaccaacctggcccaggcccggcagaagatcaccgtcaagcagggcatcgagcagaagatcgccaagaagatcgcggcggcgctgaaggatgccaagctgaaggtggaaagccagatcaacggcgacaagctgcgcgtgcagggcaagaagcgcgacgacctgcaggacgccatcgccgtgctcaaggccggcaagttcgagctgccgctgcagttcaacaacttccgcgactga

SEQ ID NO: 513727 - DNA, 897 bp, Stenotrophomonas maltophilia
atgaacgtgcaacgctccccttcgcgtgcggtggcctggatggtcgctgcggtcgcctgtttctcgctgatggacgctggcatgaagcagctgtcggccagctatccgaccctggaggtgaccttcctgcgcggcgcggcctcgttgccgttcgtgctggtctgggtgttggccagcgccggcccgcgctcgctggtgccgcgtcgctggggcctgcacctgctgcgtggcgcgctgggcatggcgatgatcggctgcttcgtgttcgccctgcgcgacctgccgctgtccaccgcctacaccatctatttcgtcgccccgctgctgatcgccgccttgtcggtaccgctgctgggcgagcgggtcgggccacggcgctgggtcgccatcggcatcggcctggtcggcgtgctggtggtgctgcggccgggcgtggacggtttcatctcggtgcccggcctgatggtgctggctgcggccaccgcctatgccgtggcggcgatcacggtcagcctgctgacccgcaccgatacctcgcagtcgatggtggtctggttcctggtgatcatggccatcggtgccggcctgctgtcccttcccggctgggtgccgctgcagctggcgcatgcgccgctgatcgccggcatgggcctggccggggcgctgggccagatcgccctgaccaaggcgttccagctgggcgaggcctcgatgatcgcgcccttggaatacagtggcctggtctgggtgatcggttgggatctggccttctggggccagctgcctgatggctatacctgggtgggcgccgcgatcatcgtggcttcggggctgtacctgctgcatcgtgagcgcctgaaccgggtgcagccacctaagccgctggaccatccctga

SEQ ID NO: 513728 - DNA, 498 bp, Stenotrophomonas maltophilia
atggcctcctcagtccattccctaggacttttcgagcacaaaggcagtggctggcggggcttgttaggaaaagggctacaggtcattgaccgggcgtacgatgcgcgcaacaggatttcgacgctaacgttccccgatgggaacggaagccagacttggagttacgccgcagatgggcttccaacacaggtagtcacgctcgccaataccaatcagaaggggacagtcactgtcgatctcagcaaggtcgacagcccgaagacgggcgcgcaggtgatagcccatgaagatcagcacgatattgatacggcggagcgaggacgccccgcggccaccagtgatgaggttcgtgccacagagcggagtgcttacggcacggaggcggttgttgctaaaggcctcgggatcaacatcagcaaggatgaacaggccaagggggtggagggttctgttacaaactgggaagcgcgtcagcccaagaccgagaaggacaaatga

SEQ ID NO: 513729 - DNA, 228 bp, Stenotrophomonas maltophilia
atgactacccgtggctttcatcgaaccctgcgcggtttccacgatggctaccatttcgtgctgaccatcaccagcagcgtggatgacgttttcgcgtacacagccgaagtcgacggcatctctgtcgagttgcgatccgagggcgtgatcaggagcaagggcgacgcgatgcagctcggcatggcagcggttgagcgccacgtggcgggtctcgcccccaagcgctga

SEQ ID NO: 513730 - DNA, 231 bp, Stenotrophomonas maltophilia
atggctgagcgcgaacagtgctgcccgaagtgcaagggcaccagcggttaccgctactttgagacggccgccaccggcatgagcgcctcgggctggggcattgatgacgttccggaagcggacggcacctatggtcgccattatggcccgtcgctctacgagtgcctggactgcggccacaaactgcgcgaggcaaccgtgctggcgattcgcggggtggccaatggctga

SEQ ID NO: 513731 - DNA, 198 bp, Stenotrophomonas maltophilia
atggctaagtacctcgtggaaatgccgttccaggccgtgcagttcttcctcgtagaagcccatagcgctgccgaagcgaagaaccttgcccgtgaaggagaaggtgggccagtagaggctatcgactggcgcgtcaccaagcacttcgcaccgacctctgcgcgcctcgttgatagcacggagctggacaatggctga

SEQ ID NO: 513732 - DNA, 762 bp, Stenotrophomonas maltophilia
gtgattgcctacttatcaagggtctttgagagccacacgactgtaatcaccttccgcttcgcccgcaaaatgacgaagcgcattcgccgtcgatacagcccacttagacatctcaaccaaatacacctgttgatccagaatctcggatggattcccagtaaatcgcctgaactcggtattggccatgccggcggggataacacggatttgctcggccaaacggtacgccatgtcgttaagagtgcggttatagccgagaagcgtagcgagcgagtcaccgagctcctcgggaagcttgtagatccgttcctccacacgctcaaggccgggaagcatcgacttcacgccatcgctaagtgccgcgtccaatccctcccagacttcgtgaatcgaccctcgattaagccagtctctcggcatctcgagctggcgatgcatgatgaaaatgttcgtgggaagctcggaaacctcatgaaccaaaagccgcccgaggatacgggcgtcagcaagtcgagtttcgaccgcgtctttatgctgctgttcggctatttgcgtggcttgtcgcgcgatcagtgccgcccttctagatgtaagccatgcgaggagggcaaccaggaccgttatcactcctaccgctgcagtggtgattactccccatcctgcccagaacgtcgcgcactcagccttcatcgaaaggcattcaccaaatcccagagccatcgccgatctcccctgtccatgatggagccgattctgccatga

SEQ ID NO: 513733 - DNA, 258 bp, Stenotrophomonas maltophilia
atgagccgccacatcgcccgccgcgcgcccaaggaaaccttgggcttcgcctggggccgcttcccgaccacggacggcagcgccgtcacctggcgcctgtaccgccgcgaccaccgccgcgcactgcatatgcacgtgctgaccttcttcgcccatgacgatcgagccgtgatcgccggccacctgcgccgcgcgcgccgctacctgcgcgacaaggtggacgacatcgacctggtggcgatggaggtggcggcgtga

SEQ ID NO: 513734 - DNA, 222 bp, Stenotrophomonas maltophilia
atgaccagcatccacgtgaagcccgtcttcagcggcgccaccgatcgcgaaaaggagcaggaccggcagaggctggccagcgacatcgcgcgcttcgaggccggcgggggcaaggtccagatcctggccaacagcggtatcgacaagagcacgatcagccgccggcatgtggtcgagggcggccacggccgccgtgctgggaaggagggagtgaaggcatga

SEQ ID NO: 513735 - DNA, 294 bp, Stenotrophomonas maltophilia
atgaccagcaccactccggccaccggccgcatccagctgttcgacgtcgacagctcgcagatccacagcatcggccacgatgccgccaccaacaccctcgcaatccgtttctaccgcggctacggcgacaacaaggtgcctgcggcggtctaccactacgccaacttcagcgccgaggaattccaggcgttcaaggacgccgactcactcggcaagcacttcggcgcgtacatcaagccgttcccggaaaagtacccgtaccacaaggtcgccgagcagcagctggccgcctga

SEQ ID NO: 513736 - DNA, 258 bp, Stenotrophomonas maltophilia
gtgagccgccgcctcgcttacatcctcgcgccgctggctatgtgggcggtgatctgcggcttcgcagctgccggcgccgtcttggccgtcgtccacggcaactacctctcactactgatggcccgcgcggtgctggccggttcggcctatcaggccgctctggaatggttccgcgccgagaaggcgctggccgagcgccgcagcggcatccagtccatgacctccgccatgccggtaccggcggaagacctgcagtaa

SEQ ID NO: 513737 - DNA, 342 bp, Stenotrophomonas maltophilia
atggaccaaaccgccctcaattcagcttcccaccgcgcccaggcaagctgggagaaccgcgaagacccgcgcatcgccgctgaggcggccatcgacagcacggcactggaagccctgcgcgccgcgccggccatgctcgaacagaccttcggcttccagtcgcctgccttctgggccaaggccgcccgcctgctggatgcccagcaggacgccgccttcgcgaccctgatccgcgaggcccgcgacgcctacgtcaacgaggaaatcgaggacgcagccgacgacaagggtctgtccgctaacggcgccatcgaccatctgcttgcggagcgcgcggcatga

SEQ ID NO: 513738 - DNA, 378 bp, Stenotrophomonas maltophilia
atgcagcggctgcgaaatgacgtcgatctgtacggcatcggccacggccgtgagaacaccaggcgatacatgctggaggcgatggagcggcaggctaagctggatagcgaagccatcgatcgcggcattctcactaccaaggaacgggacgctgaggttgtcgcctgtgtggcggacgcggtgccgaaggggaaggccgcctattcggcgttcaagaaggggaaacgcgcgccagcagatctcaacctcgcgaatgatctgatgacctcttggctggtcaacattgagaccatctcgatcaaccagcccgagggcactagcgactcggtggaagcttggaagcgtgccaaggcggccgtcgagctcagctctccgtag

SEQ ID NO: 513739 - DNA, 165 bp, Stenotrophomonas maltophilia
atgcaaatcatcatcgaccagaccatcttcggcttggcgggcatcgagcagttgagcgatgaagcgctagtgcaactgcacagcgaccttgaacgagcccaggattgcatgcgcgaaggcattagtttcgaggacgccgggttgctccgctcgcggtttggatga

SEQ ID NO: 513740 - DNA, 486 bp, Stenotrophomonas maltophilia
atggccttctccgacaacctcaaacggctgcgtctggcgcgtggaatgacgcaagagcagcttgcgctcgcctgcggctggtcaggccaaagccgtatcgccaactacgaatcatcagccgccagcgccagggaaccaaaggtgtccgaggttcctcttatcgcctcggctctgggagttgcggtcgccgagctgttcggcgacttgcctgtgccgtctcaggttcagcgactggactttgcaaggatctccgccgcggtcactgtgcttcggacctaccttgaattgatgggaaagcccatcgagatggtcgaggacccggtgctattggaaatcgcgtacgaggtggttcaggagttcggcggggaggccccagccgacaacgttctggacctgaccaaggtgcttgctgacaggatgagagggggcaacgttgagcgatcgattcggggaactggcaaagcggttggcggctcgcacggctga

SEQ ID NO: 513741 - DNA, 462 bp, Stenotrophomonas maltophilia
atggccaacaaggaattgatgcttgaagttctgaagcgcttgaacgagaagccgaacagcgttgtgaccactgaggagctcgccggtgctgggtcccccgaagccatccaggacgtggcccggtacctgcacgaccacggcttgataaaggcagacttcttcctggaaggacttggctttgctcgtatcacaacgaaaggccgcgactaccttgccgaggacggcggactgacgcgcgagctcggtgtggtgaccatcaagctgcatgaggatcagctccatcagctgatcgagctgcagatccaccgatcagagctgccccagactcaaaagcagcgattgctcgatcagcttcgacagctgcccgccgagaccacaaaacaccttgccatgcagcttgtggacgcgggcttgaagaactggcaactcgcactcccgctactgcaaaggttcttgagttga

SEQ ID NO: 513742 - DNA, 384 bp, Stenotrophomonas maltophilia
atgaagcgcggccgctccactggcaacaagaccaagggacagcagtcccgattcgacgctatcaaggacattggctgcattgcctgccttgcgctcggcttcggccacatgggttgccaggaacaccacctgctggtcggcgggaagcacggccagccccggcgcggccacgacttcacgattggcctgtgcccgtggcaccacgtcggcgagccgatggccggcctcagccattccacctgcgccgagcgctacgggcccagctacgcacgcgaaccgcggcggttccggcaggagatcggcaccgacgactacctgctggacctgcagaacaccctgatcgaacagcacctggagaagacctcatggcgaccagccgcctga

SEQ ID NO: 513743 - DNA, 396 bp, Stenotrophomonas maltophilia
atggataaaaagcagcttgaagcgcgcctggtccagtgggcggaagagtatggcggcggccgctacgaaaacatcggtttcgcaagtcggaacgtgctgcagtcgctgatcgagcatcagggatttatgccgggcggcggtggatatcgcggcattctgatcaacacgcctggcgacgaagtgcagtccgccgtgcttgccatggaggcattcggctacgtccgtccggcccgaacccttcggtgtgagtacttcctgaagaccgctccgttggagctgaagctgcagaacctgaggcgcgtggggattgatatcaaacgtcccacctactatgactacctcgcgatcggaaaagcattcgtaatgggtcagctttcaaaggagatggcagcatga

SEQ ID NO: 513744 - DNA, 384 bp, Stenotrophomonas maltophilia
atgaagatggtcgtttacatgatgatcgcagattcttgctgcggtgatagcttctgcaaaattggcgtcaccgcagatctggccgcgcgggtgagcgcggttcagaccgggtgcccgatgccgatcactgacgttgcctacctggagctgccacgcggcgcgcgacaggcagaggcgctgttccatagcaatctgcgtgccttccacacgcagggggaatggttccggatgaacctgtcgaacccggaccacaagcgcgctatggccgctgcaaccgcagtggtattgcggcaccacgggctcagcgaaacgcgctggaagcacatgagccttgatgctgtgcgatcgctctgtagggtattgcgtctagacaatgcggcctag

SEQ ID NO: 513745 - DNA, 237 bp, Stenotrophomonas maltophilia
atgaagaagaccgcaccgcggccacggccgtccctgcagctgttgctgctggcgtccgtgatggcagcctccagctgcgcgacgacctcgccacctgcaacaccgctcgcctgtccgaagccgccgccggcgccgtcgaacgtgaccaggcagcccaactacgagcggaggtcgcgggagctcttgttcaaatcgggcgggacgccgatgaccacgtccgtgcctgccaaggcgtga

SEQ ID NO: 513746 - DNA, 468 bp, Stenotrophomonas maltophilia
atggcactgcagaccaactacccggatacccagccggccgccatcgccggcgcgccggcgaccatgctgccggccaccgacatctcccgcaccgtggagggtgcggcgatcgccttcggcaaggccgtggagcagggcgccaccgacaagtcggtgaaggccttcgccggcggcaagttcgtcggcatcgctctgctggatcgctcagcctcgggcctgacggtcacggcgggccaggtcaccggccgcgcaaccgatgcgttcggcgtgggcgaatctgcacgcgtccgcaccaagggcgacatctgggttgaggcggcgatcgcggtcgcagccggagatcccgtgtacgtcacggcaaccggcacgttcgtcaacgcggggtcgagcaatgtgcttgtgcccggcgcccgctgggacaccagcaccaccgccgccggccagctggccgtcgtccgtctcggctaa

SEQ ID NO: 513747 - DNA, 948 bp, Stenotrophomonas maltophilia
atgagcgcaatccccctgatcgatgcccaggctgcactgggcttcgtggtcgcccaggcttcgatcatcgagccgggcgtttaccgcaccgtctatccggatatccagtaccgcggtttgatcccggtggatacaagcggcagcgaattcgccacgtcggtgacctacatgtcgcaggaccagtacggcaaggccgactggatcaatggcaatgccgacgatatcccgaaggccggcaccacccggtcgaagttcgagaccccggtctacaccgctggcatcggctatggcttcggcttcgaggagatcgggcgggcccagctgctgggcatcaatcttcccaccgaagacgccgctgccgcgcgtcgtgcctccgaagagatggtcgatcgcgtggcgctgctgggtgatacggcgaagggcttcagcggcctgttcaacgccgccaatgtcaccccgattgcggcgccaactggttcctggggcacgctgcaggtcgccggtactgcaaccccggaccagatcgtcgatgacatgaacgcgtcgctgatgaacgtcttcaacggcaccaatacgactgcgttggcggaccgactgctgctgccgtggtcgaagttcatgctgatctccaccaagaagatgagtcagtacagcgacctcaccatcctgcagtacttcttggccaacaacgtctacaccgcaactaccggacagccgctgaccgtgcgcggacagcgcggcctggacactgccggtgtaggtggtgtggcacgtctggtcgcctatcgctacgaccccagcgtgctgaagctgcacatgccgatgccgcaccgcttcctgtctccgcatccggctggcccgctgcgcgtggacgtgccgggcgtgatgcgactgggcggcctggacgttcgtcagccgaagcaggtcgtctacctcgacggcatctga

SEQ ID NO: 513748 - DNA, 393 bp, Stenotrophomonas maltophilia
atgaccgaactgaccaacatcgtggcggcagagcgccgcctggacatcctccacccggccacccaggaaccggtaggcctggtgctgatcctcctgcccgacagccacccgcaggtgaagaccgcagcccgcaagtcgatcaacgatcgcatcaactaccgcggcaaggtgggtgccgagcagatcgaggccagccgcatcagcatgctctgtgcatcgatcggtgggtgggagtggcagagggagctgactttccacggcgagaagcccgccttccaggagcaggtcctgcgtgatctcctgaaggaactgccgtgggtgggggaacaggtcgacgtcgccctgaccgaccgggcggagttctttcgccgacctgacgaaacggacggctga

SEQ ID NO: 513749 - DNA, 984 bp, Stenotrophomonas maltophilia
atgtcacttcaaccgatcgacaccagcacagaccacggcacgtacaaaggcgatcccgcgaagaccgcgttcgacaagttcaatgccaacgagcagttcctgctgggtgtggccaacgctgctcaggcgaccgccagtgcagccctgccgcgcgccggtggccagctaacgggcgacaccgtccttgtgggcggcacattgcgtatcgcacccaatgcggctggcgaccagatgttccttcgctcggagggtgccactggcgtaaccatcgatgcagtcaacaacgcgaacagtacctatgctgcgctatctattcgcggaagcgtcatcaatctcaacgctcctgtggccgtttccagcaccctctcggtgccgcagaacttcaagagcgtcaacgtgaacgtggtcctggccaccggcgttgccgggaccgtgtttctccggcccaatggcaccgacagtggggttgggcagctaactctcgggtccaccggggtctgcagcgccccgtcgttcaaccccacctcctcagccgacgtcaaggattacatcgagggtttcgctggcgacgcagacgcgctcctcaatcggttggtggtgataactcacaagtaccgacctgagttcatggagagcgagagaacttacgtatcgctcctcgccgaaaacgtgcacagcgttcttccagaggctaccgatggcgactacgaggtggtggagcaggagccctttgaccagcccgtgacagtcaccctgcaggtgccgaatgaagacggtgagggcacgcacgacgtgcagatggatgccatcgaaacggcttggcgcgaggttacccggcacgttcccatgaacgtcaacctcatgccgatactggccctgtgtgtgcgtgggcaccagaccaaggaccgtcgcattcgtgagctggaaatggctgtcgcatcgcttcaggcgatgatccagccaccgaatggggcggccgaatga

SEQ ID NO: 513750 - DNA, 3618 bp, Stenotrophomonas maltophilia
gtgaaccgagccgtcagctaccagcacgatccactggccctggcgtgcgctgatgtgatcggcgcaggcggcaagagcagcaccaacgcccgcacgctggtggagaccccggacagtctgcactcgatctcctacgccaaggttctggacctgatcagcgagggcgagatccggggcttggtggccggcaaccaatccatctacctcaatgaggtgccgattcagaacagcgacggcagcttcaacttcaacggcgtgaaggtcgagacgcgctcgggcacgcaggaccaggagtacatcccgggcttcccgtccgtagagaacgagatcggcgttggcgttgagctgcgcgatacgccggtggtgcgtgcggcgtccgggcaggacctgtccgcggtgcggatccggttcggtgtgcccgccctgcagcgacagaacaccgagaacggggacaccgagggctacgccgtcgagtacgccatcgatctatccaccgacggcggtgccttcagcacggtgctgagcaacgctttccgtggcaagacgactaccgagtaccagcgcagccaccgcatcgacctgccgccgggcaatcagtggcaggcgcggatccgccgcctcacgcccaacgcgaacagctccaccgtcgccgacaccgtgaacgtgatctcgatgacggagatcatcgacgtgaaactgcgctacccgaactgcgcgctggcagcgatccagatcgacggcagccagttccagggcaagcccactacggcgtaccgcatctggggccggatcatccgcgtacccagcaactatgacccgattgcgcgcacctacaccggggtgtgggacggcaccttcaagtcggcctggacgaacaacccggcgtgggtgttcttcgacatggtcaccaacgaccgtttcggcctgggcgaccgcatcccgctggactgggtgaacaagtggcgcctgtacgagatcgcgcagtactgcgatcagctggtcagcgacggcatgggcggcatggagccgcgcttcacctgcagcctgtacctgcagacccgggcgtcggcccacaaggtgctgcaggacatggccagcatgttccgcggcatcagcttctacgcggcggggcagatcatggcctcggccgacatgccgaaggacccggtctatacctacagtcaggccaacgtggtcgacgggaagttcacgtacaccggcagcggcagcaaggcacggcacacggtggcgttggtgtcctggtccgacccggacgacttcggccggcagaaggtcgagccggtccagctgcaggaaggcattgcacgctacggcgtgaaccagatcgaggtgacggctttcggctgccactccaagtcgcaggcccagcgcgtggggctgcacatcctctacagcgagaatctggagaccgagaccgtcaacttcgccgtgggcctcgatgccctgaactgcatgccgggggatgtgatccaggtggccaacgccaagcgcgctggccggcgcaattccggccgtatcagcgcggccacggcgagcagcctgaccttggacgtggtgccgccctccatgcaggtcggggacgtcctgcgcgcaacgctgccgagcggcaagacccaggcccgtaccatcagcggggtcaacccggagacgcgcgtggtgaccgtctcagcgccttggggcgaggtgccggtggcacagtcgatctgggcgacggaatcgaccgacctggtgatggagcagttccgggtgatcagcatcaccgaggaagacgggctgacctaccgcatcacggggctgacccatcgcccggacaagttcggcgcgatcgatgacggcacgcggctggagccgccgccggtcagcatcgtgccgcccagcgtgcagccaccgccggcgaatgtgcgcatgtcgtcccatgtggtgatcgaccagggcatcgccacgccggtgctgaccatcgagtgggacgccgccgacaaggcaattgcctacgacgtggaatggcgcagggacgacctgaactgggttcgtgtcgggcgcgtgggcacggccagcgcggaggtgcgggggatctacgcgggcaagtacctggcccgggtgcgagcggtgaacgcactcaatgccgtgtcgcagccggccctcagcgtcctcaccgacattcagggcaagacggaaccgccgccggcgctgacgtcgctgacggccgcttcggtggtgttcggcatccagctggcctgggcgttcccgcccggggcaaccgacaccgaacgtaccgagatctggcgcagcgcgggaccgaacctggaaagcgcgacgaagcttggcgatttcgcctatccccagaaccggcaccggctcgatggcctggccgccggcgcgaagttctacttctggggccggctggtggatcgcagcggcaacatcgggccgtggtatccaacgggcacgggcgtaatgggcgaggcaagcacgaaccaatccgaatacgacacctatttctcaggacgtattagcgagagcgccctggggcaggagctgctgaccaagatcgaggccatcgacagcctcgagccgttgctgccgctgctgtacgacgccgacgcgacctatgaggtcggacagaccgtggtttatggcggtcggacctacgtgtggcgcgctgccgagccaggcaacacccagccgccgagcacatcctggcaggatgttggcgcaggcatggcaggctacggcgcgttggtgagccaggtggagcagaacgcccagagcatcagcgatgtcgacggcaaggtgctggcacaggctcagcagctcagcggcatcactgcgcagttggacgttcaggccgccggcgagacggactggggcgccggtgacacttcggtgtttgccggcactatcaccctgcaaagcgttatcgcaagtcaggacctggtgcaggcgcagcgtaccgaccaggtggaggtgaaactgggccagaccgctgcggctgtccagagcgaggctactgcgcgcagcaccggtgatcaagcgctgggtgcgcgggtggataccaccaatgccaacctggccaacaccaacgcttcggtgcagcaggttagccagtcggtgataaatctggatggcaaggtggcggccacctacactgtgcgcgcgcagatcaccagcgcgggccagatctacatggccggcatgggggtaggtgtcgagcagcagcccgatggcagctatcagagccagatcctgatgcaggctgatcgattcggggtgatcaacgtggtgaacggcaacgtcaccgcgcccttcgtgatccagggtggccagacgttcatcagccaggcgctgatcggcaccgcgtggatcaccagcgccaagatcgccgatgcggcgatcaccaacgcgaagatcagcggcgcgatccagtcggatgacttcgtcgctggccagaccggctggaggatcgacaaggccgccggcggcgggttccagttcaacggcatggtggccggcggatatcgcctgaacatcaccaaccagggcgtctacatctactacccgaacggcaacccggccgtcgaacttggagtgctgctgtaa

SEQ ID NO: 513751 - DNA, 540 bp, Stenotrophomonas maltophilia
atgcaaagcgattgcaggactgcccgctcgacccctcgccgcctgatgctgggcatgtcccttgctctgttgtcagccggccttgcccagagcgccttcgccggccaatgggtgccgacaggccgcgtactctgggtggattcggaaactatccagccttacccagtggcctataccaacttctgccagggcggcgtggatgggccgagcggcgtctacctgtacggcgactggggttcggaagggttcggctcgtgcccaaccgacccatacaccggttttcaggagatgaagggctccggcggcacatgcagaccggatccccaaggcgttggtggcggctactcctgcgaagagaatcaccacaccttcggcggtcagacctaccaaggcccaatgccggcgacctgtagctcgcctgggatctatggcgtaagccacctctaccgtagggaactcgtctacttcggctccggccacatgcccgatgacttctacgacaggttctacgagagctcccaagagtacatctgccagtag

SEQ ID NO: 513752 - DNA, 159 bp, Stenotrophomonas maltophilia
atgaaagagctcaccgcgaaagaagtgaaagcagtatcaggcggaacgaatcgccttccggttaactcgggtacgattcagacccgcggcaagaatccgttctccggccctgttccgcgagacggcaccatcccctacgtgcgttacgtccagaagtaa

SEQ ID NO: 513753 - DNA, 165 bp, Stenotrophomonas maltophilia
atgacttggacgccattacacgaggccgtggtcatgggcgatgttgccgcgctcaacgctgcactggccgcgaccatcttccctgatccgcgcgatcgccacggtcagacaccgctccacttcgccgcccatctgggaaacgttgaggttgtgtccgcgctgtag

SEQ ID NO: 513754 - DNA, 600 bp, Stenotrophomonas maltophilia
ttggcgatttaccacctcatcgcgaaagcctattcccgccgcgatggccattcggccaccgccggcacggcgtatcgcgcgggcgtgcgtattgaagacctgcgcaccggggaggttcacggttacacccgccggcacggcgtggccttttccgccctttgccttcccggtgaccaaaccgccgaccggaccgagttctggaaccgggtcgaagggcaccacaagcgcggcgatgccgtcacctgtcgggaggtggtggtggccttgccggctgaactcgatggcggcgcgcggcaggacttggctcatgctttcgccaagcacttggccgacacctacggcgtggcggcagacttggccgtccacgaacccagcaagggcggcgacaaccgcaaccaccacgcccacatcctgttgagcgcttgcgtggtttctcccgacggtacgctggggaagaaggccgaggccttggaccctatcgcttgcaaacgcgccaagcgccccaccttagtcgatacccagcgcgagcactgggccggtagagtgaacgccgccctggagcgcgcccaggtggacgcgcacgtgtaccaccgcacctag

SEQ ID NO: 513755 - DNA, 264 bp, Stenotrophomonas maltophilia
atgggcagcctgctcatcgacggaggccaggcggccttcggccttggccgcgtccatgagccgttgaaagcgggattggtgggcatcgtgccgcgcggcgttgacctgttgaatccggtcgttgcggcgcacccgccgagggcgatgccggcggcggcgcgcttaggtgagttccttgccctcgtgcatggtggcgatgcggtccacttcggcgtaacggcggaaatcgccttcgtgcgcggcctcggctttttggtcagctag

SEQ ID NO: 513756 - DNA, 684 bp, Stenotrophomonas maltophilia
gtgccccggcgggccgctcgcgcggccggtcagcaggcgagtaagcccaaggcccagattccagccaccgggcacacccgcgtcatcggcaacgggacgagggaaaacgaacaagtcgcccggctggccaacctgtggttggcccaattggagagcgatattgctgacctgatcaggcgtgccctgacctgggctcaaaaccatgccgaacccttgccccgctctctggcccgggactacctccaggccgagggcgaagcgcagttggccaccgtgctgcgtgaccaagccgccgccgacctcaagcaggcccagcgcgcccggctcgatgcccgctattaccgcgaccagggcgaaatcgggctgaagggcaaggacaagctggcccagcgcctgggctggacgcccaggaccttgcgcgatctacaggacgtggtgaagcaatccggggacgccgtggttcatgccaagcagggcgaacagcaggccatcaccacccaggaagccaccaccgtcgaggccgagcgccagcggaaccgcttgatggacgggttcttgaaggcccatccgggagagaacttccagttcccggagcgctggtcgtcaccgcagcctgtgcccggacttgcccccagaccccacaacactccactgaatttcagcagcctgtcaggggggagttaa

SEQ ID NO: 513757 - DNA, 690 bp, Stenotrophomonas maltophilia
atggcagatcaggagcggcagcagcaggccccagttgagagtgcgagcaagtggaagctcatgagcttcctgcttgccggtgtcctcatcccgatatttgcatcgctcttgccatgggttctcgaaaacagggttcccgagaacaaactcagttactcactgataggcccaatttcggctaaaggcgccagatcctttgagcttaatattgaaaatcaaggaagagaaccgcagaacaatctagagatctggattcctttgcagatcattcctcagatcgacccaaaggttcttcctggtggaaggattgaactcaatgaaaaactgccatccataattctggacacttcatcggagccgtcaaagaaggaaactaaggacgatttcacgattcttcactatgagaagcttcgcccagacgaatcgctggatgttcggctattcgtgattggcgacggcattttttggaaccagtacgagttggagcgcatgcgcatcgtctcggacaacacccttgctcaaattgacaagcccagcgaagaacttgatttcatgtttagggttggctctgttcttttcgttctgtttattgttttgctctttgggtatggggtctactacgaaaagttcatgcccgtcgataagaagagagctgaactgcaaaagcagcttgaaaagttaggatcgtaa

SEQ ID NO: 513758 - DNA, 234 bp, Stenotrophomonas maltophilia
atgaatactgtccgcaccatcctgatttccaccgtcgctgcactgggcctggccgcctgcggcagcagccagccgtcaaaccaagagccccaggacgccatcaccaaactgttcacccaagcatccagtggtgcgatgacggtgaccggtttccgcgacttcaagctcaccggttgccacaaaccgaccctggcgatggggtcgtctgcgacgtcggaggctccattgttgtga

SEQ ID NO: 513759 - DNA, 471 bp, Stenotrophomonas maltophilia
atgagcactgggtcatacgcgcacttgggttgcgcctccgtcattctcggaggtgcagacctgctcttcgtgggtggtggctttgaaatgctccatgacggcagccccttcgggtggctgaccgttctcggcgacctggggatttggctggtgctggctttcctctattggatcacctacagagcaaaccgccgccgcgcctggatcgcccggcagcactatccccatttcgccgaacaagacttgatgcgtggcggcttctggcgcggcttcctctggacgtgggccggcgtcatctcggtccacgtgctgctgttcctggtcagcggcttcgccgaactgctgcccaatcccgagcaggtgcgcgggtggatggcactggccgggctcgcactggtgcctgcgcacgtggtgctgcccattttgggcggcaccgcctatagcctcatccactctacctccgtccgctaa

SEQ ID NO: 513760 - DNA, 354 bp, Stenotrophomonas maltophilia; identical to SEQ ID NO: 509799

SEQ ID NO: 513761 - DNA, 843 bp, Stenotrophomonas maltophilia
atgcacgacccgttcaagatcagtcagcccacctgcatcagcttttcggggggacgcaccagcgcctacctgctctggcgcgtgctgcaggccaacggcggcctccctgccgacacggtggtctgcttcgccaacaccggcaaggaagtggaagcaaccctgcgcttcgtgcgcgactgcgccgagcactggcaggtgccgatccactggctggaatacgtgcccacggagcctggcttcgcgctggtcgatttcgaccaagccagccgtcagggcgggccattcgaggcgctgatccgtaagcgccagtacctgcccaatcccgtcgctcgcggctgcacgaccagcctgaagatacgccccatgcaccgctatctgcggcatctgggctggacggactgggaccagatgatcggcatccgcgccgacgagcagcggcgtgtatcaaagatccgcgcacgcgggcactccaccgaatcgacccacgagaccatgtgcatgccgctggcggacgccggcatcaccgtgcgcgatgtgggcgccttctggcaggtgcagccattcaacctggacctgctgacagtgaacgggcgcacgctcgaaggcaactgcgacctatgctttctgaagccgcgcgggcagcgcctggcgctcatcaaggcccggcccgaggcggcggtgtggtggattcgcatggagtccctgaacctggcgagcaagcccagcggcgccagattccgcgccgatggtcccagctacgccgacctggcgcgcttcgccgccgaccagggtgacctgttcgacgccgccgaggaatcgatcgcctgcttctgcggcgactga

SEQ ID NO: 513762 - DNA, 510 bp, Stenotrophomonas maltophilia; identical to SEQ ID NO: 328391

SEQ ID NO: 513763 - DNA, 2280 bp, Stenotrophomonas maltophilia
atgtccctcgatctcgataccaccgccaacgatgcaacgcccgtgcagggcgaactgctcgatgcggaatcttcccctctgaccctgagccttcaggattttgtcggtgagttcggcgacgaactgctcgactcgctcaaccgcgccaacccgccggtctataacggccagccgcaggcgcaccggcagctcatcgtcgccagcctcaagcgcaagttgttccaggcccaggccgacgtcgtccatgccgctgccgagttgctggtcgactgtggcgaacgcgccgcgatcgtcaatggcgagatgggctgcggcaagacgaccgtcggtattgccgcggccgccgtgctcaacgccgaaggctaccgccgaaccttggttctctcgccaccccatctggtttacaagtggcggcgcgagatccaggagacggtggcaggcgccaaggtctgggtgctcaacggcccggacacgctggtcaagctcatcaagctgcgcgagcagttgggtgtgcagcccacgggccaggagttctttgtcctgggacgcgtcaggatgcggatgggattccactggaagcccgtcttcaccacgcggcgcacccgccatggcgacgtggcagcgtgccctgactgcggcacgatcatcaccgacctcgacggcgagccggtcaacccggtcgcgctcgaagccgaggagtaccgcaggaagtgcggccagtgcgctgcgcccctgtggacgttgatccgtccgcgcagcctgtccggcggcgaccagtcctcggccgtgctcaaagccctcaaacggattcctacgattggcgaagtcaccgcgcagaagctcatgcagaagttcggcgatggcttcttggcctcgatgctgggcgacaacatccatgagttcatcaacctcatggacggcaacggcgagctggtgttttccgaccgtcaggccacccgcatggaacgtgcgatggccaatatggagttcggctttggcgagggtggttaccagccgtccgagttcatcaagaggtacttgccgcaaggcaccttcgatctgctcatcgccgacgaggcccacgagtacaagaacggcggcagcgcccagggccaggccatgggcgtgctggcagcgaaggctcgcaagaccttgctgctgaccggcacgttgatgggcggctacggcgacgacctgttctacctgctgttccgcgcccttcccgggcggatgatcgaagacggctatcgcccgaccacgagcggcagcatgacctcggccgcgatggcgtttatgcgcgatcacggtgtcttgaaggacatctactccgagagcaccggcacggcgcacaagacggccaagggcaccaaggtatcggtgcgcacggtcaaggctcccggcttcgggccgaaaggggtcttgcggtgcatcctgccgttcaccatcttcctcaagctcaaggacatcggaggcaacatcctgccgccgtatgacgaggagtttcgcgaggtccagatggacgtggcgcaagccgcggcctaccgcgatctggcgggtcggctgaccgcggagctgaaacaggctctggcgcgacgcgatacgaccttgctcggcgtggtgctcaacgtgctgctggcctggccggattgctgcttccggtcggagaccgtggtgcatccgcgcacgcgcaacaccctggcgttcgtcccggctcagttcaacgagttcgagatcagccccaaggagcgtgagctactcgacatctgcaaagaggagaaggcacagggtcgcaaggttctggcctatacggtctataccggaacgcgggacaccacctcgcgtttgaaggtgctgctggagcaggatggcttcaaggtggcggtactgcgcgcaagcgtggatgccagccgccgcgaggactggatcgctgagcagttggaccgtggcatcgatgtgctcatcaccaatcccgagttggtcaaaacgggattggacctgttggagtttccgacgatcgtgttcatgcagtcgggctacaacgtgtattcgctccagcaggcggcacgccgctcctggcgcatcgggcagaagctgtccgtgcgcgtgatctacctcggctacgcgggttcctcgcagatgacctgccttgagctgatggccaagaagatcatggtctcgcagtccacctcgggcgatgtaccagagtccgggctcgatgtcctgaaccaggatggcgattccgtcgaggttgccctcgcaaggcaacttgtgatggtttga

SEQ ID NO: 513764 - DNA, 600 bp, Stenotrophomonas maltophilia
atgtgcccatcccatccccggttccaccatcccgaacgccgcctgctgtcggggtttctcggcctgctcttatcggtcctggccggtggctgcgcgacgacgaccacgacgcagatggcgcccgacgtcattgcgattgaggaagcctcgcccggaccccagcccgaagccgcccagttcattccggtcgtgcgctacggtcgctacaccctcgtcgagcttgcgccgatggctgcacagcgcgacttgctgctgcaaaccgtcgatgtatctatgcccgaagacgcccgagcaacggtcggcgatgggctgcggcatgtgctcaagcgcagcggctatcagctttgcgagacggcgcatgccgtgatcgagttgtacacgctgccgctgccagcggcgcacctgcatctgggccccatgagcctgcgcgatgcgttgctcaccctggccggcccggcctgggaactgcacgcggatgaccgtacgcgccaagtctgctttgagcagatcggcgaacccactggcggcgccccgattcttgaaccgcccgccaccgccgccgcggcgcagccgttccccctcgcgggaggccggccatga

SEQ ID NO: 513765 - DNA, 648 bp, Stenotrophomonas maltophilia
atgaacacttcgcaatcttcccggcgcccgaccgccgccgtggtggtgcagagcctgctctggctttggctgatctgcctcagcgtcctcgtggttctgggctaccagacgatgagcgacctggctgaccaggagcggcttggcacccgcctgcaacgcctcgaagcgcaggtagccggtctggccgaaacgacccagaccttgcaacagcggcccgcagccgcgaccgccacagtcctgcaagacgcccgtcaggccctggaggcgcgcattgcccaattcgagcaggcgctaagcgaccgcgcaactgccgacgaccttcaggcgctgcgcgcggaggtcgagcagatcaaggtgcgccagacggcagcgcgtgccgccgtgccggtccagccgcgcgcgcctggcaagcccgctgccgcgaaacccgagccaccgccgccgctgcccttccgcgtcgtcggcgccgaactgcgcgccggccagcgcagcgtgtccgtcgcgccgggcgccggggatttcacgcctgaccagctccaggtgctgctgccaggcgatgcggttggcccatggcgcttgctggcaatcgacggcaacgccgccgtattccagatcgacgggcaggtccgccgcctggcgattccttga

SEQ ID NO: 513766 - DNA, 726 bp, Stenotrophomonas maltophilia
atgaagcccgcgatcttgctcgccatgctcctgctggtctcaccgcagtggaccgcctgggcacagcagcccgcgacggcccagcctcgcaatgcgcagagccaggaacgtcccttggtcggtcgcgccctggacgaccgcgcggcacgcgactggggactgcaaccgcaggagtgggcgcgctaccaggaactcatggcagggcctttgggcatccattcgcccaacctggacccgctttccgcgctgggcatcgaggcccgctccgacgaagagagacgccgctacgcggagatgcaggtgcaggccgaggcgcgccgcgtggagaagttactcgcctaccagcgcgcctacgacgaagcctggcagcggctgaaccccggcatgcagcgcgtgaacctccctgatgacaggtcgaatgctgccgccatgcgcggcagtggtcgcaccgcggttttcatcaaggacggctgcgtcgcctgcggtcaactcgtgcagcgcctgcagacttcaggggccgagttcgacctgtacatggtcggcagccgccaggacgatgcgcgcatccgcgactgggccaagcgcgcgcagatcgacccggcgcgcgtgcgcagcggcagcatcacgctcaaccacgacggcggccgctggctgtcgctgggcctgcccggcgacttgccagcggtcgtgcgtgaggcgaacggccaatggcagcgccagccgtag

SEQ ID NO: 513767 - DNA, 549 bp, Stenotrophomonas maltophilia
atgacgaaatcccatctggccaatctcacgttcaagagcctgctcatgctgctgaccgccctgccactggcctcgcttgccggcgagccgctgatcgtggtcgaggaccgtggcggcgtatcggcgctgccgtactacgaagcactcaacctccagccgcggggcaacggtgcagcgcggtcacccatcccgatgccgcaggttcccgcgacacccgcggatgaagccgcgatgctgccggtgcgcagcgccaagctcacacccggcaccgtcgcgcgacgggtgatcgaggcgcctggcctgcggccattcgtggtcgtcggcgacgacaaggcttcccaggactggttgcagcgccgcgccgccgctttgcgcgagcgcggcgcggtcggcctggtggtcaacgtcgagaccgtacagggcctagcgcggctgcgcgcactggcgctcggcgtacccctcgcgcccgtgtccggcgacgacctggccgaacgcctgggcctgcggcactacccggcgctggttacggccaccggcatcgagcaatga

SEQ ID NO: 513768 - DNA, 897 bp, Stenotrophomonas maltophilia
atgatcggtagtcttaccctcgaccagttgcgcatccttgtgaccattgcggaggcaggtagtttttcagccgccggtcgcgaacttaggcgtgcgcagtcggcagttagccaggccgtcagcaatctcgaggcaatccagggcgttgaactgtttgaccgccgagggcgccgaccgcgcctgactgatgtggggcgtgtactggtcgatcaagctcggtcggtgcttgcaagtgccactcgtttcgaggccattgcagccagcacgcgcgcgggtgtagagccggagttgacgattgcgatcgatcccttggtgccaaccgcacctctgattgacagcttgcgcacgctgagtgaaaccttccccgatctcccggtgcatttttcgaccgaagggctgggcggttcattgcggcggcttcgcagtggttcggcagccattgccctgtgcctgctgctgcctggcgttcctgatgacattgctgcctatccgttgctgcgcgctcgaatgcatgcggtcgtcgcgcccggccatcctcttgccttgttaggacgtccggcgacagagagcgatctcgcgccgtacgtccagttggttttgtcggatccggtcgatccaggcagcgcaaattacggcgtggccggcaccagactttggcgatttgtcgatctcggtcgtcgattcgattttcttttggcgggattcggttggtgccgcatgcctgagcacctcgtggcgccattgatcgccgtcggggcactcacggcgattgagattcacgaagatccgacgcccccggaaggtctgacgatctacgcggcgcaccgacgtgatcgtgcgctaggcgtggcaggacgatggttgctcgacgagttgcgtcgaaacctcgtctcgtga

SEQ ID NO: 513769 - DNA, 429 bp, Stenotrophomonas maltophilia
atgaaggaggagcttcgactgtcagatgaactggtcgccgaactccttgtggctgagcaccttgtcatctcgacaccggtctacaactacaacgtcccggcctcgctcaaggcgtgggtggatcacatcgtacgcaagggcatgacgctcggctttgacgggcggggccttgtcaaaggcaagaaggcgaccttgttgattgcttctggcggcgtgtatagcgagggatcgccgataaaggatcgcgacatcgcgacgcaataccttcggctcatcctcggggttatcggcatcgatgacgtaagtgtggtggcgggcggcggggcgaaagccgttgacctgcgtgagcagacgatggatggattccttgacgcgctgcagccgcagatcgatcgcgctgcaggagttgcaatcacccgaaaatcttga

SEQ ID NO: 513770 - DNA, 435 bp, Stenotrophomonas maltophilia
atgggaagaaacaagaacaaggaaatcagcacggagctgtacaagaagctggcgccattgctgccggtggtgacgccgtcgaccaagggcggacggccccgcctgagcgacgagcaggcgctcaacggcatcgtcttcgtactgcgtacgggcatcccgtgggaggatctgccgcaagagctgggctttggcagcggcatgacctgctggcggcggctgcgcgattggcaagcggcaggtgtgtggcacggtctgcacctggcgttgctcggtgaactgcgccatgctgacaagctggacttcagtcgattcatcatggacggggcgagcgtaccgaacccccggggggctcgtacacaggccccaaccccacggacaggggcaagctgggcagcaaacgccacctcatcacggaccgccaaggcatcccgatga

SEQ ID NO: 513771 - DNA, 381 bp, Stenotrophomonas maltophilia
atgatgttttgcgttaccggtgccaatcggcatgattcggtggtgttcgacgaactgatcgacgccttgcctgcggtcgcgggcaagcgtggcaggccgcgccgctggccgggcaagatgcatgcggacaagggttacgactacgcgcgatgccgcgcgcatctcaagcgccgtggcatcaaggaccgcatcgcccgcaaaggcatcgagagcaacgaccgacttggccgccatcgctgggtggtcgagcgcacgcacgcctggttggcagctttcggcaagctgcgcactcgcttcgagcgtcgcatcgacattcatgtcgccttgctctcgctggcctgttgcgtcatctgcctgcggtccatcccgtcgttttgttag

SEQ ID NO: 513772 - DNA, 1686 bp, Stenotrophomonas maltophilia
atgttattggttaaacaagaactgctcgcgacgctcgcgaacacgcttgaatccttctcgcccggcgctggagccaaagccgcgtttgagtcgcccaaggtggcggcgcacggcgatttcgtcagcacggccgccatgcaactcgccaagccgcttgaccgcaagcctcgcgaactcgctgaagaagtgagggccatgctactggccacaccctcattcgggcagtgggtacaggcggtcgagatcgccggccctggcttcttgaacatccacttgaggacggccgccaagcagcaggtcgtgcgcgaagtgctcgccgccggcgatgcgtacggtcggcagccagctaccggcgaaaaggtgctggtggagtttgtctcggccaacccgaccggcccgctgcacgtgggccacggccgccaagcggcattgggagatgccatttgcaacctgcgcgcctcgcagggcgatgcggtgtaccgtgagttctattacaacgacgccggcgtgcagattcagacgctcgccagcagcgtgcagatgcgcgccaggggcctgaagccaggcgacgccgcctggccaagtggcgaaaaggcagcggcttacaacggtgactacattgccgacatcgccaaggacttcatggcgaagaagaccgtgaaatcggacgaccgcgcgttcaccgcgagcggcgacgtcgatgacatcgattcgatccgtgagttcgccgttgcttacctgcggcgggagcaagacagcgatctgcaggcgttccgcgtgcgcttcgacaattactaccttgagtcgagcctgtactccagcggacgtgtcgagtcgacggtggtcaagctggtggccgccggcaagacgtacgagcaggacggcgcgctctggctgaagtcaactgactacggcgacgataaggaccgcgtcatgaagaagggcgacggcacgtacacctacttcgtgcccgacgtggcgtaccacattgccaagtgggagcggggcttccacacggtcgtcaacatccagggtaccgaccaccatggcaccatcgcacgcgttcgcgccggcctgcagggcgtggacgaaagcattccggccgattacccggactatgtgctgcacacaatggtgcgcgtcatgaagggtggcgaagaggtcaagataagcaagcgcgcaggcagctatgtcacgctgcgcgacttgatcgaatggaccagtaccgacgcggtccgcttctttctgctgagccgtaagcccgacaccgaatacacgttcgacgttgaccttgccgtgacgaagaacaacgacaacccggtgtattacgtgcagtacgcgcatgcgcgcatctgctcggtgttagcgagttggggcggcgacgtggcatcgctgcacgatgttgaactgttggcacttgaaagcccggccgcgcaggctctcatgctgctactcgccagataccccgaaatgctgagcgcggcagcgaaggatttctcgccgcatgatgtcacgttctacttacgcgagctggccgctagttaccacagctactacgacgccgagcgaattcttgtcgacgacgagagtgtcaagaaggcacgtttggcgcttatcgctgctaccgcgcatgtgctgcgcaatggtctcgcgattctcggcgtcagggcgccgagcaagatgtga

SEQ ID NO: 513773 - DNA, 969 bp, Stenotrophomonas maltophilia
atgagcgtcatcgccgcctactattacaacaaaggcaagcgaatccgggaaattgcgctcgacgagcgcttcgagcaggatgaggcgcgctcgggcttctgctggatcgcgcttcgcgagcccagcgccgacgaacttcacacgctccagacggcgtatcacctccatccgttggcagtcgataacgcgatgcacccgctttgcccgccaaagctcgaggtctacaacgatgagctgtacatcgtcgctcaaacagctgagctggtcggcgacaagatcagctatggcaagacggcgatcttcaccggtcacaatcacctcatcaccgcgcggcatggcaacggtggagcgctaggcaacctgcgggggcagcttgaggcttcgccaacgctcctgggaaagggtgtcgactacgtgctgcacgcgatcttgcaccgtatcgtggaccagtatttgcccatctttgaaatgatcgaggatgacgttctggagatggagagaagatcggtaggcgactttcttgggcgagaagaagtcgcccggatattcagcctgagaggcgaactcacgcgcttccaacgcacgcttggcgctatggccgaactggtcagaaagctggtccgtggacattatccctgcatcagtgctgaagtgagaccgtacttcgacgatgttgctgaccacgtagatcgtgtgcagtccatggtcaatggtctccttcaggtcctgaggacggtctttgaattcagcagcctgctggaggcgcaaaggacgggtgtgatcactcgccagtttacgtcttgggcggcaatactggcagttccggcggcgatcgctggaatttacggcatgaacttcaagaacatgccggggctggagacaacctatggatacctcgtcgtgctcggggtgatgacggcgatctgcctgttcctgttcgtgcgcttcaagaaggcaaagtggctatga

SEQ ID NO: 513774 - DNA, 702 bp, Stenotrophomonas maltophilia
atgtcagacctctcatcctttccgatcacgaggcgctggccagcagctcatcccgattgcctacaactttacgcagcacccacgccaaatggagtcaaggtctcgatcctgctggaggaaatcggcttggcgtacgagcctcacctcgttgacatctcaaagaacgagtcgaaggacccggcgttcgtatcgttgaacccaaacggccgcataccggcgatcatcgatccggcgggccctgacggcagacctattgccgtatgggaatccggcgcgatccttctctacctagcctacaagacgggccagctaatcccgagtgcacccaccaaacgttacgaaactctgacctgggtgttcttccacatgtcggccatcgggccgattttcggtcaactcggattcttcgtgcgatttggcggcaaggactacgaagacaagcggcctcgaaagcgatttaccgaaggatccaagcgccttctgggagtcttgggccgccagctggaaggacgcaactggatcgacgaatattcgattgcgggcattgctacgctcggcacggtgaatgcgctggttgaatcgtatgatgctgacgagatacttggactcagcaattactcaaacaaccaagcatggctcggacgccggctggctcgaccagcagtgcagcgtggccagcgcatccctgcgaggtctgcatga

SEQ ID NO: 513775 - DNA, 522 bp, Stenotrophomonas maltophilia
atgaatgagccaaagccagaattcgcgtcgttcgcaaaacagatgcaagccgggttcctcgactggatgacgtatctatgcgtctacatacctggggcgctgcttttgctcaatgtgcacatgtatgacttgtttttcccactgctgcacttcaaggtctacctcgcggtcgtgatcatcccgagcatcctgaccgtcgtgtggtggattcagatgcgatccacacccggaaagctgctgcgcaatctgcagatcctgcgtttggacgggaaaccgatgaccaacacagatgtgacgattcgctttatctgcatgggtttttctacgctgatgttcggcatgggtttcttgccagccttcagcaacaagcatcaaagccttcacgacctccttgctggaaccgccgtttttcacgtcaagcccaagccaaagccaaagcagggcaaggccttgcgcaaagacactcgctccacacccgacacttctgaatcgcaccggcttccgtggaggctcaactcctga

SEQ ID NO: 513776 - DNA, 270 bp, Stenotrophomonas maltophilia
atgaacactaaagctgctcgttttagccctgaggtacgtgaacgtgccgtacgtttggtgcaggaatgccaagcggattacgcatcgctgtggggcgcatgtgaatcgatagcccccaagattggctgctctgtcagcaccttgcatggatgggtgcagcgcaaagaaatagatgcaggccaacgcccaggattgaccacggatgaacgtgagcggctcaagcaactggagcgagagaacaaggaactgcgccgcggaacgtgtcaatga

SEQ ID NO: 513777 - DNA, 489 bp, Stenotrophomonas maltophilia; identical to SEQ ID NO: 127102

SEQ ID NO: 513778 - DNA, 1023 bp, Stenotrophomonas maltophilia; identical to SEQ ID NO: 127105

SEQ ID NO: 513779 - DNA, 423 bp, Stenotrophomonas maltophilia; identical to SEQ ID NO: 127106

SEQ ID NO: 513780 - DNA, 1233 bp, Stenotrophomonas maltophilia; identical to SEQ ID NO: 127107

SEQ ID NO: 513781 - DNA, 876 bp, Stenotrophomonas maltophilia
atggaactcaatcaagtcagctatttcatcaacttggccgagacgctgaatttcacagcggccgctcgcttgagcggtgtgtcacagccaagtctgacccgcgcgatccgccgcttggaagatgagcttggcgggccgctgatctatcgcgacgggaagaacagccgcctgactggccttggccatgacgtcgaggcagaattccggcgcatggtggtcgcgatgaagagcgttcgcaatcactcggagcactgggcgatgggggggcaccgcgtgctggatgtcgccgtcgcgcccaccgtcggaccaaaggaatttacggcattcttcgagagcgcattggcggagatgccatccatcgaaatcaagctgcactcgctccagtcgaacgaggacacatcggaggtgctttcaggaaaataccacgcgtgcatcatgccgcgtgaaacaagaccggaacgcaagctggatgtgcatcctctatttcgggagcgcttcgtgctcggctgttctgcaaaccatcccttggctgccaacgagatcgtgcgcggcgaagacctgctcgagtttcctttcgtcgatcgcctgaaatgcgagtttcgcgatcggatcctcgatcacttcgcgcgacgggacttgctcatgcgacctcgctttcgatcagatcgcgaggactgggtgcaacgggtcgtcgctgacggccacgccatatgcattcttccggaacgatcgccgaccgtgcaaggcctcgtcactcggccgatcgacggatttgtcttggagcgcgaagtcgtgatcgcgacagtatccggctccacggcaacggtcgagatacggaacatcgcgcagctggcagcccggtatgagtggaactga

SEQ ID NO: 513782 - DNA, 450 bp, Stenotrophomonas maltophilia; identical to SEQ ID NO: 197221

SEQ ID NO: 513783 - DNA, 402 bp, Stenotrophomonas maltophilia; identical to SEQ ID NO: 130533

SEQ ID NO: 513784 - DNA, 1272 bp, Stenotrophomonas maltophilia; identical to SEQ ID NO: 130532

SEQ ID NO: 513785 - DNA, 513 bp, Stenotrophomonas maltophilia; identical to SEQ ID NO: 130531

SEQ ID NO: 513786 - DNA, 471 bp, Stenotrophomonas maltophilia; identical to SEQ ID NO: 130530

SEQ ID NO: 513787 - DNA, 306 bp, Stenotrophomonas maltophilia; identical to SEQ ID NO: 130529

SEQ ID NO: 513788 - DNA, 432 bp, Stenotrophomonas maltophilia; identical to SEQ ID NO: 200677

SEQ ID NO: 513789 - DNA, 1011 bp, Stenotrophomonas maltophilia; identical to SEQ ID NO: 130527

SEQ ID NO: 513790 - DNA, 606 bp, Stenotrophomonas maltophilia
atggtcaccagaggtttcacaggccgcggtccaggcggcgaccagtccgatcggataccgccgggtcagcatctcgtggagaatttccctgttctgacggccgggccaacgccgagcgtggagccctccgattggaaattcaccgtcaagatcggtccgaagcccgtcaaagtgtggaactggagcgagttcaacgccctaccgaagaccaagatgacccgagacattcactgcgtcacgtcctggtccaagctggataccgcctgggagggcgtactcatcgaagacatccttgcagatgcagggctcgatcggcccaccgatttcgtcttggcgcactgctacgataattactcgacaaacgtcccgctggcggatctgctctccgggaaagcgatggtcgccctcaactatgcgggcaagccgcttccccgcgatcatggagggccggcgcgtcttctggttccgcacctttacttctggaagtccgccaaatgggtgaacgcgctgcaattcacaacgcgtgacgaggcgggcttctgggagctgcgcggctatcacatctatggcgatccgtggcgcgagcagcgatacaccaatgactga

SEQ ID NO: 513791 - DNA, 744 bp, Stenotrophomonas maltophilia; identical to SEQ ID NO: 157618

SEQ ID NO: 513792 - DNA, 1230 bp, Stenotrophomonas maltophilia
atgagccgctttgccgaacccgtcttcattgccgctggccttcggacgcctttcggccgcggcggaggcgcgttggctgcctacgatgccatctctctgtccgtgcctgtcgtgcaggcgatggcggcgcaggcggagcctgatctcctcgtctggggaaccgtgatcccgaatttgggctggagcaatattgctcgcgaaacctggcttgatgccaagctcaatccgactgttccggcgttctccgtcgtcctggcatgctcgaccagcatgacggcgaccttcgctgcggcagggatgctgggcggaggaaccgacctcaccatggtcggcgggtccgaagtcatgagccggccgtcaatcgccctgacggccgatgcatcgaagcggctcaccgacctctttgcgcaggatgcgaccgccgcgcttgccgccctccagtctctgactccacgagactacgtgctccccacaaagggctgggcaaaccggatcaccggaaggacgatgggtgatcatatggaggagaccgccaaggcttggcgggtctcgcgcgtcgcgcaggatgattgggcgctcaagagccaccagcgggcagtcgctggttgggaacgtggcttcttcgacgatctcgtgatttcgctgcctgagctggcgcgcgatgcgaacccgcgcgccgatacgtcgcccgaacggctggccgcactcaagcccgccttcgatcgcgacagcgggaggggaaccctgaccgccggcaacagctcaccgattacggatggagccgccgggtgttgggtcgctaccgaagccggtgtggcgagactcccggcgggcaccccctacgcgcggctcgtcgactacgagatctctgccgtcgatctccacaccgagggcctgctgatggcgccctcctatggcattccgcgcctgctcgcgcggcatcaactcagcttctccgacatcgcactctgggaaatccacgaagcctttgcagcccaggtcctggcgaacgtcgcggccatcaccgatcgggagtgggtgcgcgcgacagccggtgtccaggcggctatgggcgattttgactgggaccgcgtcaatcccaatggaggctcggtcgccctgggtcatccgttcggcgctacaggcgcgcgcgacctcagccaggcggtaaaggaactttgggccatgccgcccggatcggggtctcctcgttttcagtgcaataagtga

SEQ ID NO: 513793 - DNA, 651 bp, Stenotrophomonas maltophilia
ttgaaggaactcaaacagcgccacctctttgtgccacgcggcaccaaagtgcccgcagaaatcgctgcggtgtgcgaagccaatgtcgacgtcgctttgatcgaaaagcattgggatagtctggtgcacctggcagcctcggtcatgagcggacatgccagtgcggtggcagctcttgcgcggttcggttctgccgcccagggcgatccaatctatgaggctggcgtgcaattggggcggttgctgcgtacggcgtttttggctgactactttgtcaaggacgctttcaggaacgagttgcgccgggtgctcaatcggggcgaggctgttaacgccctcaagcgcgccatttataccggccggatcagcccggcgcaggccaaacgtgtcgatgaaatgcaggctgtggccgatgcgttgagcctgatggccaacatcgtgatggcgtggaatacctcacagatgcaggcggtcctggatcgctggtcgaaccgccgccaggtcattccaccggaactgatcgggaagattgcgcccaccaggctggagagcatcaacttgcggggtgtgtttcgcttcccggttgaccgctatgctgaccaaatcctgccttcgcggccaaatgcatcgataactggcaccaatggatga

SEQ ID NO: 513794 - DNA, 672 bp, Stenotrophomonas maltophilia
atgttgggtgccgagacgaccgagcgcgccacgcgctcggtcacccaccagatgaacgcagcgaagttccctgtgcaccgggaccttgcagggttcgacttcgacgtctcgccggtcgaccgcaagctcgtgctacaactggccgaaatggccttcaccgatgaggcgcacaacgttgtgctggtgggtgggccgggcaccggcaagagccacctcgcgaccgccatcggcgtggcgggcatcacgcagcatggcaagcgcgtgcgcttctactcgacggtcgacctggtcaatgcactggaacaggagaaggcgcaaggcaaggccgggcgcatcgccagcagcctgctgcgtctggacgcggtggtcctggacgagatggggtatctgcccttcagccaggccggcggggcgctgctgttccacctgctctccaaactgtacgagcacaccagcgtggtggtgacgacgaacctggacttcgccgaatggagcagcgtgttcgtggatccgaagatgaccactgcgttgctggaccggctcacgcaccactgccacatcgtggagacgggtaacgacagttaccggatcacgcacgccacggcgaactcgaaaaagcgcatcaaggctcgtgagcaggagggaaaggcgccggccggaaacgttggttga

SEQ ID NO: 513795 - DNA, 1368 bp, Stenotrophomonas maltophilia
atgattcatcactacgacttcgacctcttcgtcatcggcggcggcagcggcggcgtgcgcgccgcgcgcatggccggtcagcgcggtgcgcgcgtggcgctggccgaatgcgccgaactgggcggcacctgcgtcaacgtgggctgcgtgcccaagaagctctacagctatgccgccggctacgccgccgccttcgaggaagcccccggctacggctggacgctgcccgaggccccgcgcttcgactgggccacgctcaagcgccagcgcgcgcaggagatcacgcgcctgaacggcgtgtatcagaagctgctcgacggcgcgggcgtgaagacgttgaccggctgggcgcaactggtggacggccacacggtcagcgtgagcgacacgcgctacaccgcgcgccacatcctggtcgccaccggcggcatgcctgccgcgcccgacatgccgggccgcgagctggccgtggtgtcggacgcgatgttcgatctgcccgatttccccaagcgcctgctggtgatgggcggcggctacatcggctgcgaattcgcctcgctgttccgcggcctgggcgcgcacgtgacgctggtcaatcgcggcgcccacatcctcaacggcttcgacgacgacgtgcgcgaggcgctggcgcgcgagatgggccgccagggcatcgacctgcgcatgacggcgcaggtggaaacgctgcgccgcgagggcgacggcctggtcgcgatgctctcgcgcggccagcagatcgaggccgacaccgtgctgctggccaccggccgcaagcccaacacggcgggcatgggactggacgcggcgggcgtgaagctggacgcgcgcggtgccgtggtggtcgatgcgcagtaccgcagcagcgtgccctcggtgctggccatcggcgacgtgagcagccgactggcgctgacaccggtggcgctggccgaagcgatggtggtggtggaccagctcttcggcgacggccagcgccgcatgggctatgacaacgtgcccaccgccgtgttcacgcacccgaacgtggcgacctgcggcctgacggaggccgcggcgcgcgcgaagttcggcgagaagggcgtgcgcatcttcgcagccgacttcaaggccctgcgccacacgctgtcgggccgcgacgagcgcaccttcatcaagctggtggtcgacgcgaagagcgactgcgtggtgggcctgcacatggtgggcgccgacgcgggcgagatcgtgcagggcttcgccgtggccatgaacgcgggtgcgaccaaggcgcagttcgacagcaccatcggtatccacccgaccacggccgaggagttcgtgacgctgcgcgagccgatggtgggctga

SEQ ID NO: 513796 - DNA, 252 bp, Stenotrophomonas maltophilia
atgcgcccgggcaagcgcagggcgctggacaaggagaacaagcccattgatgcgctgatagagcaggtggagaagatcaaggccagcatccgcgccaaagtggagcaccccttcagggtgatcaaacgccagtttggctacaccaaggtgcgctaccgggggctcatgaagaacacgctgcagctcactacgctttttgcgctatcgaacctgtggatggtgcgccaccaattgctggcggagcggggataa

SEQ ID NO: 513797 - DNA, 267 bp, Stenotrophomonas maltophilia
atgagaacaagcaaatacagcgaagagaaaatcattggctttctgcgccaagcagaagcgggcatgccgatcaaggagatcggccgcaaacacggcttcagtgacgcctcgttctacaagtggcgcgccaagttcgcaggcatggacgccagcgaggccaaacggcttcgcgaacttgagctggagaacggcaagctcaagcggctgctggccgaggcgcacctagacatccacgcgcttaaaagcgtcttcggcacaaagcgctag

SEQ ID NO: 513798 - DNA, 846 bp, Stenotrophomonas maltophilia
atggtgactgaacaccacatgtccgaacgccacgcttgtgcccttgtggggctaagccgagacagttaccgacatgtgggccagaccagtgcgctcaacttggagctgcgtgatcagatcgtccagaccgcgcacacccgcaggcgctggggctaccgcatgattcacgacgtcctgcggccccagtacccgggcatcaaccacaagcgggtgtaccgcatctataccgctgagggcctgtccatcaggaaacgcaagaaggccaagcgcattggcgtgcgtgtgccactggtagccgccatggcgctcaaccaaacttggagtatggacttcgtcagtgatgcgatcgctaggccgggcgctgtatcccgacgcatcaaatgcttcacagtggccgatgacttcagccacgaatgcgtagacatcactgcagactttggcattggcggtgcctacgtcacgcggctactagaccgggccgctacgtttcggggctaccccagggcggtcagaaccgacaacggaccggagttcacttgtcgggccttcatgacgtgggcacaaaaacacggcatcaaacacatcctgatcgagcccggtagtccgactcaaaatgcctacatcgagagcttcaacggcacgttccgagatgaatgcctcgacgagaactggtttgaatccctggagcaggcccgccagatcatcgccacatggagaaccgactacaacgagatcagaccccacagtagttgcggacgtataccgcccgcaaccttcgccgcattgaatcgccggttaaccggcgattcaatgcaacagagctcgaccaacgcagggatcagttag

SEQ ID NO: 513799 - DNA, 840 bp, Stenotrophomonas maltophilia
ttgcaaacctcggacttctggaattttgattggtacggagattgggggcaggtcatggacagcatcacactgacacgtcttttcgagccctttttcacgacgaagcctgtgggagaaggcactgggcttggcatgtcagtcgtgcacggaatcctgcgcgatcatcaagcagcgattcgcgtcacaagtaagttgggagagggctcttcattcagtgtcattcttcggcctgctgaatcgcagagctgcgacgttgctgaggcagacgttgttgtggaggaaaagtttgacgacggagtcctaacgcgtttgaaacgacaaacaaccgtccttcacgtggatgatgatgagctgatcggatcgatggtgggacgcatgctcaagaaggcgggttttcccgctcatcactatttgcatcccaaaaaggcccttgatgacgtttgctctggggcaatcggttacgacctcgccgtccttgattacgccatgcccgagttggatggactaagccttgccaaagagttgctgcgcctgcatcctggcaaaccagttgtcatcacgacagggttcatctcagacgatttgagaaaaaatgcaccgaccatcggcgtatccgaactgattccgaagccgaacacaggtgcgcagcttctcaaaagtattgagcggctcgccttgcaactggctcagtcacgaggaccaggtagctcttctcagacaaagcgagtgcccgatagcccaggtcgcgcaccttgtagcgcgcaccgcgttgcaaagttcgaaacaaccgtcggtggcgtgcctaaagaccaatgcggtggccgtcaccgagagcggtga

SEQ ID NO: 513800 - DNA, 555 bp, Stenotrophomonas maltophilia
atggtgcgcgtcatgaagagtggtgaagaggtcaagataagcaagcgcgccggcagctacgtcacgctgcgcgacctgattgaatggaccagtaccgacgcggtccgcttctttctgctgagccgcaagcccgacaccgaatacacgttcgacgtcgacctcgctgtgacgaagaacaacgacaacccggtgtattacgtgcagtacgcgcatgcgcgtatctgctcggttcttgcgagctggggaggcgacgtggcgtccttgcatgacgttgaactgacggcactcgaaagcccggccgcgcaggcactcatgctgctgctcgccaaatatccggacatgctgaacgcggcggcaaaggatttcgcgccgcacgacgtcacgttctacctgcgcgagctggccgctagctaccacagctactacgacgccgagcgaattctggtcgacgacgagggtgtcaagaaagcacgtttggcactcgtagccgcaaccgctcgagtgctgcacaatggcctcgcgattcttggcgtcagtgcgccgagcaagatgtga

SEQ ID NO: 513801 - DNA, 1146 bp, Stenotrophomonas maltophilia
atgcaattggttaaacaggagctgctcgcggcgctcgcgaagacgcttgaatccttctcgcctggcgctggctccaaagccgcgttcgagtcccccaaggtggcggcgcacggcgatttcgccagcacggcggccatgcaactcgcgaagccgctcggtcgaaagccgcgcgagcttgccgaagaactaagtgccgcgctgcttgccacttcctcattcagccagtgggtgcaggcggttgagatcgccggcccgggcttcctgaatgtccgcttgaagacggtcgccaagcagcaggttgtacgcgaagtgctcgatgcaggtgaggcatacggtcggcagccatccaccggcgaaaaggtgctggtcgagttcgtctcggccaacccgacgggcccgctgcacgtgggccacggccgtcaggcggcgctgggtgatgccatttgcaatctgcgcgcctcgcagggcgatgcggtgtaccgcgagttctattacaacgacgccggcgtgcagatccaaacgctcgccaccagcgtgcagatgcgcgccaagggcctgaagccgggcgatgccgactggccaagcggcgaaaaggctgcggcttacaacggtgactacatcgccgacatcgccgaggacttcaaggcgaagaagactgttaagtcggacgaccgcgcgttcaccgcgagcggcgatgtcgacgacgttgactcgatccgtgaattcgctgtggcctacctgcggcgggagcaagacctcgatctgcgggcgttcggtgtgcgcttcgacaactactaccttgagtccagcctttactcaagcggacgcgtcgaatcgacagtggtcaagctggtggccgccggcatgacgtacgagcaggacggcgctctgtggctccggtcgagcgactacggcgacgacaaggaccgcgtcatgaagaagggcgacggcacgtacacctacttcgtgcccgacgtggcgtatcacatcgccaagtgggagcgggctttcacacggtcgtcaacatccagggtaccgaccaccacggcaccatcgcacgagtgcgcgccggcctgcagggcgtggacgagagtattcccgcagatttccccgactatgtgctgcacacgatggtgcgcgtcatga

SEQ ID NO: 513802 - DNA, 528 bp, Stenotrophomonas maltophilia
atgcgcgaagcggtcaccaccatgacccagatcgacgcgcaggccaagaaaatcaaggagatcaccagcgtgatcgacagcatcgctttcaagaccaacatcctggcactcaacgctgcagtggaagctgctcgcgcgggtgaacaaggtcgtggtttcgcggtggtggcaatggaggtgcgcagcttggcagaaagtagtcgctccgcggccagggagatcggtgagttgattgccactacagtgacacaggtggatgccggctccaagaccgtcaaggcggctggcgaaaccatggggctcatcgtagattcgattcgcaccgtgggtgacacggtagacgcgattgcgcgggcgtccaacgagcaagccgcaggcatcgagcaggtcaatgtggccatggccgacatggatcgcaacacgcagcagaacgcggcgatggtagagcaagccagcgcggcagccacctctctgcagtcccaagctcagaagctggtgcaaagcatcggcagcctgcgaacggtctga

SEQ ID NO: 513803 - DNA, 372 bp, Stenotrophomonas maltophilia
atgaatagtgcgcttctctttcatgccgaagtgaaggcggcgatctccaagactttcatagagccacgaagcgtaggtgccgcgctgaagatgttctcgccgtcgaaagccgacactgcggccaccctgagcggaagcggtgtaacggcattcgtcgtcacgggaataaaggacaccgtgctccaaaacgctgtcgagaaggctcaaagcttggctatacggcgtaacggcgaaaccgagcttgttggaagcgcgattcattaccttgatgctgaggtcgcggacctagttgaagcgcgattcattcggttcattcctgacggccaattgggcaagctcgcgtcagaaattgcgcttgtgcgtgggaggtga

SEQ ID NO: 513804 - DNA, 969 bp, Stenotrophomonas maltophilia
atgagcgtcatcgccgcctactactacaacgcaggcaagcgaatccgggaaattgcgctcgacgagcgcttcgaacaggatgaggcgcgctcgggcttctgctggattgcgcttcgcgagcccagtgccgacgagcttcacacgctccaggcggcgtatcacctccatccgttggcagtcgataacgcgatgcacccgctttgcccgccaaagctagaggtctacaacgatgagctttacatcgtcgctcagaccgcagagctggtcggcgacaagattagctatggcaagacggcgatcttcaccggccacaaccacctcatcacggcacggcacggcaacggtggagcgctaggcaaccttcgggagcaacttgaggcttcgccgacactcctgggaaagggggtcgattacgtgctgcacgcgatcttgcaccgtatcgtggaccagtatttgcccatcttcgaaatgattgaggatgatgttctggcaatggagaagcgatcgatagatgactttcttgggcgagatgaagtcgcccggatattcagcctgagaggcgaacttacgcgcttccaacgcacgcttggcgctatggccgaactggtcagaaagcttgttcgtggacattttccgtgcataagccctgaagtaagaccgtacttcgacgatgtcgccgatcacgtaattcgcgtccagtccatggtcgacggcctccttcaggtactgcgcacagtgtttgaattcagtagcttgctggaggcgcaacggacgggtgtgattacgcgcaaatttacttcttgggctgcaatactggcagtcccgacggcgatcgctggaatttacggcatgaacttcaagagcatgccgggactgaatacggcctatggatacctcgtcgtgctcgggctgatggcgtcagtctgccttctcctgttcttgcgcttcaagaaggccaagtggctatga

SEQ ID NO: 513805 - DNA, 597 bp, Stenotrophomonas maltophilia
atgctggaggaaattggcttggtgtacgagccccacttggttgacatctcaaagaacgagtcgaaggacccggcgtacgtatcattgaacccgaacggtcgcataccggcgatcatcgatccggcgggccctgacggcaaacctatcgccgtatgggaatccggcgcgattcttctctacttggccgacaagacgggccagctcgtcccgagtgcacccgccaaacgttacgaaactctgagctgggtgttcttccagatgtcggccgtcgggccgattttcggtcaacttggtttcttcgtgcggcttggcggcaaggattctgaagaccagcggcctcgaaagcgctttaccgaagaatctaagcgccttttgggagtcttggaccgacagctggaaggtcgcgactggatcgttgacgaatattcgattgcggacattgctacgctcgggtgggtaaacgcgctggttgaatcgtatgatgctggcgagatactgggactcagcaattattcaaacatccaagcatggctcggacgcgggctggctcgaccagcagtacagcgtggcctgcgcacccctgtgaggcttgcatga

SEQ ID NO: 513806 - DNA, 1020 bp, Stenotrophomonas maltophilia
atgaaagccattggatacaagaccccatcgcccatctcggccgcggattccttcgtcgacatcgagttgcccaagccagagccaaagggccgcgacatcctcgtcgaagtaaaggccatttcggttaatccggtcgactacaaggtccgtggcagcacgcctccggccgatggcactgaatggaaagtgctcggctgggacgttgcgggaatcgtcgcggcggtcggccccgatgtagcaggtttcaaggtgggagaagaggtctggtatgcaggctccatcactcggtcgggagcaaacgccgagttccatctcgtcgacgagcgtatcgtcggaaaaaagccttcaaagatcggctgggccgacgccgcggcgctcccgctgacatcgttgaccgcatgggaggccttctttgtccgcctggatgtgaagaagccagttcccggcgccgctgccgccatcctgatcatcggcggtgctggcggtgtgggatcaatcgccgttcagatcgcacgtcagttcaccagcctcaccgttattgcgacggcttcgcgtcctgagacaagggatttcgtcgcatcgcttggtgcacaccatgtagtcgatcactcgaagccgattgctggccaggtcgcggcattgggcattggcgcccccgcctttgtattctccacgacgcaaaccgccaagcatatcgacgacatcgcagaattgatcgcaccgcaggggcgtctttgcctgatcgacgacccgtctggtttcgacatcatgaagttcaagcgcaaggcggtatcgatccatcatgaactcatgtttacgcggtccatcttccagactccggatatggacgaacaggggcgaatcctcaatgagatgtctagcgcggtcgatgacggaaagatccgctcaactgccatgcagaacctcggttcaatcaacgcccaaaatctcaagaaggcgcatgcgcaactcgaaagtggaacaaccattggtaaggtcgtgcttgaaggctttgcttga

SEQ ID NO: 513807 - DNA, 420 bp, Stenotrophomonas maltophilia
atgtccggtaacagcttcacctcccgctccatcactcgagaggcggccgcccgcctcatcgccgacaccgtcgccgccgcagagcgcatcggattcgaaccggtcgttgcgattgtcgatgtggctggcaacctgaaggcgtttgaacgcagcgatcgcagttcctatcttgccgtcaacattgccattgacaaggcctacaccgcagcatccttcggcctgtcgacagcccagtgggtcgaccttttggaagatcgcggcgcttcgaacttacggcatgttccgcgcgtcatggccgccgctggcgggtttcctctcatggaggacggggcgattattggcgggatcggcatttccgggggaagctgggcgcaggaccaggaagctggcgaagaagcccttcgcaatttttccaagtga

SEQ ID NO: 513808 - DNA, 516 bp, Stenotrophomonas maltophilia
atgaatcacgaaaaagctgttctggccggcgggtgcttctggggaatgcaggatctcatccgcaagcagcccggcatcatctcgactcgtgtggggtacaccggcggcgatgttccgaacgccacctaccgcaaccacgggacgcatgccgagggcatcgaggtcatcttcgaccctgagctgactagctaccggaacattctggaattcttctttcagatccacgaccctacgacgaagaaccgtcagggcaatgaccgtgggctctcctaccggtctgccatttactacgtgggggtggagcagaaacacgtcgccgaggagaccatcgccgatgtgaatgcgtccgggctttggaatggcccagtggtcaccgaggtggagcccgccggagacttctgggaggctgagccagagcaccaggactatctgcagaaactccctaatgggtatacctgtcacttcccgcgtgccgactggatccttccgaagcgcaaaaacgctgacgaaaagtag

SEQ ID NO: 513809 - DNA, 444 bp, Stenotrophomonas maltophilia
atgaagtttgaaaagactcaagcagcacttgaccggctgaccccggagcaacgccgggtcacccagaagtcgggcactgaaaggcccttcacgggagagtacaacgacaacaaagaacctggcatctatgtcgacgtggtgtcgggagagccgctgttcgcttcggcggacaagttcgattcgggtactggctggccaagcttcaccaagccgattgtttcggagaacgttaacgaattgcgcgacaccgagcatggcatggtacgcaccgaggttcgttcgacgcatggcgacagccacctgggccacgtgttcccggacggcccctctgaccgaggcggcctgcgctattgcattaactctgcgtccttgcgtttcatccatcgcgaagagatggccgccgaggggtatggcgcatatctcgaccaagtggagggcgtgtga

SEQ ID NO: 513810 - DNA, 957 bp, Stenotrophomonas maltophilia
ttgaacgaactaccgctactacgaatatcgccaggggatctcgagggtttgcttggtactctcgatgtcagtttcgttgccctcacggaatgcgtggtgagcatggggtacagcctggatctgggcggtatgaacgcgcctggaatccattacaacgtcgttggtactggtcgagccgtgtttggcaatcgcgacccaataccgctgatgccccacacgttgattattgtgccgcccaattcaccgtttcgaattgaggtcgaaggcagcatgggcttcacagctctgcgctccgtcaagaagcagcctcagatgacctcctcgagcaccatacgcagattctccgcaggagatggagatccttccctaatactggtgtgcggttacttttacgctacctacggcgcctgcgccgacctctttgcaggcttgacggaacccatcttcgaacagttcgacgtcgacgatcacgtcgacacgaaactccagacagcaatcagcgagctcgtcgcacaggaagttggcagcggtgccatgagtgcagctttgctaaaacaagtcatcgtgttgcttttacggaggtcgctcgtctccatgaacgcctgggtggagcgcttctcggtgctcaacgatcctctggtcgcaaaggcttttgccgagatggccatgcgtcctgccgatgatcattcactgcaaagcctcgcccacacggcctgcctcagtcgttctgctttcgccgctcgatttactgaggctatcggaaaggctccgatgcaggtacttcgggagctccgactgcggcaagcgatgttccaactgaaaggcagcggcctcgccatcgagctagtcgctcgcaatgctggatatgccagccggagcagttttacaaaggcatttcgaaggacctatggaatagagccctcagcggtccgtcgcgacgatgcgacggcagtttag

SEQ ID NO: 513811 - DNA, 210 bp, Stenotrophomonas maltophilia
gtgttcgaaacgttgctcgtagcctgcccggacattgatcggcagcacacgctcctcaacgaagtttcacgacttgtggacgagggcgtacttcgcaccaaaatgaccgagcggttcgcgcctctcaaggcggccaatcttaagcgcgtgcacaagctcgtggagaccggcacaactcgcgggaaatacgtactggagggattcagatga

SEQ ID NO: 513812 - DNA, 336 bp, Stenotrophomonas maltophilia
atgagcaatacaagcaacgtaattcgtccaccgaaggcttacgtgattttcatcaaagaaagcatgcacgacgaagtggagatggggctctacaagtcggcggtcggcgcaagcttcaagggccactctcccagctttcttgcggcatacggcgctctggaggtcttggaaggcgcgccagcggagggagtggtaatcctggagttcgcggacatggagaaagcccgcgcgtggtatcacagtccagcttatcaagaagcggctcggcatcgattcgccggtgccgtttaccgcggactgatcgtcgaaggaatcgctccagcggagatgaaataa

SEQ ID NO: 513813 - DNA, 549 bp, Stenotrophomonas maltophilia
atggagcagcccttgacgccgcgcaatcgtgaagctgccgaaactatcggccgagtacttgcaccacgcggagtctcgcaacgcaagatacacccctgcagcgcccgcagctacccaccgttcaacttcaaggacgacaagggcaatctgacgggcttcgatgtcgagattggccgggctattgctgccaagctcggtgtgaagccggagttcaccactaccgagtggagtggcatcctggccggcttgcaagcaggcaccagccttggcctgacccgcgatcagacgctgcgctacgtcgtggggccacaggcgctgagggccgcggtaccgagcctgtccaatagcctgatcagcctcatcaaggacacatctctggtgtcggtaatagcagtgaccgaattgatgctggcaaccaaggagctcatctccaccactttccaaccttttccgctgtacctggcggcggcggccatctactgggtgctcagtctgagttttgagcagattcaaagatggatggaaaagcgggtggcgtacccttattga

SEQ ID NO: 513814 - DNA, 735 bp, Stenotrophomonas maltophilia
atggtcgcgatagacatacaaaaaatcagcaagtggtatggcagttttcaagtactgaaaaactgcagtaccaaagtcgacaagggagaagtggtcgtggtgtgcggtccatcaggctctggcaagtccacgttgattaagacggtcaacgcactggagccattccaatctggaaccatcaccgtagagggtgtttcggtgggtgaagcatccaccaatttgtccatgctgcgggctcgcattggcatggtttttcagagtttcgagctgtttccccacctctcaatcgagaaaaatctagcgctggcgcaaatgatcgtgcttaagcgctccgaagacgatgccatggcgcggggactgaagcttttggacagagttggtatgttggctcacaaagccaagtttccagggcaactgtccggagggcagcagcagcgggtggccattgcaagagcgttgtgcatggatccgattgccatgctattcgatgaacccacttcggcgctcgacccagaaatgatcaacgacgtattggacgtgatggtggagctggcccaagaaggcatgacgatgatggttgtgtcccatgagatgggttttgccaagaaggtcgcgaaccgtgtcgtattcatggatcagggcgaaatcgtggaagatgcctcaaaagacgagttctttggaagcccacgttctgacagggctcagcagtttctgtccaagatccttactcactga

SEQ ID NO: 513815 - DNA, 324 bp, Stenotrophomonas maltophilia
atgaagcaacagaccctcgccatggccgccgcgcacatcgcgcagtacgagcggtaccgcaagacgatctggcgcaaagccatcttggcggcgatggagcagattgttccgtggtcgcagttgtgcagcgttatcgagccgtacgtcccgaagtacggcaagggccgcccgccggtcggtctgcagcgcatgtcgcgcatgtacttcgtgctgcactggttcaaactggtctacgtgtcgtgtgaggatgcccctcaagcgtctgcaatccagagtcgccatcgtgcggaagacatagacaggaggttctcatggtcgcgatag

SEQ ID NO: 513816 - DNA, 675 bp, Stenotrophomonas maltophilia
atgctgcagctgatgcatcagtttcgcgttcgcatcatgacgtcgccaacgttcaccagtgctaggatcatcggcgctatcttgttcgaagccactatggacggcctggtgcagggaaagtccgtgcccgagttcctttggaaagaccgcggtatcgtgccgttcttgaaagtggacaaggggcttgaagcggtgagcagcggcgtgcgcctgatgaagccgaacccgggactcgagccgctgctggagcgggccaggagcatgggcatcttcggaacgaagatgcggtcggtcatcgatgccaatgtcgccgcaggtatctcggaggtagtgcgccagcagttcgacgtaggcgcgcagattactgccgcggggatgatgcctattctggagcctgaagtgtcgatcggcatccccgacaaggctagcgcggagatgacgctgcgcgacgagatcagggcgcggctcgatacattgcctgccgagtctcagatcatgatcaagttgacgattccggatgttcctgacttctatcgcagcctgatcgagcatccacgcgtggcgcgtgtggtcgcgctttccggcggctactccagggtgcaggcatgccagaagcttgcggcgaatcccggactaattgccagcttctcccgcgcattgatcgatgacctctga

SEQ ID NO: 513817 - DNA, 1233 bp, Stenotrophomonas maltophilia
atgactagccttaaagttgaatttcccgggagcctcggccatttgctggctgcacggcttgataaaccaaacactttgccaagagcgtgggctgtcttcgcacactgtttcacgtgctccaaagactcgaaagcggcctcctacatttcgcgtgcgttggtcgaggccgggttcggcgtgcttcgcttcgatttcacagggttgggtggcagcggcggtgacttcgcgaacacccatttcagttcaaacgtcggcgatctagtcgcggcggccgactggctgcgaagtgagcatggatcgccagcgctcctcatcgggcattcgctcggtggcgcagccgttctggccgctgcacaccgcattgccgatgcgtgtgctgtggtgacgctcggcgcgcccttcgaaccggcacacgttacgcgccattttggggaggggctggctctcatcgagtccaacggagaggcccgtgtaacgctttcgggtcgggagttcacgttgcggcgggaatttctagacgacgtagcctcccagcctcaggccgagcgaatccatgcgttgcatcggcctttgcttgtgttgcacgcgcccggcgatacgattgttggagtagacaacgcacgccgaatcttcgaacaggcactgcaccccaaatccttcgtatcgctcgacgatgccgaccatctgctcaacagtcacagcgatgccacgtacgccgcagggctcatcgctgcctgggctaagcggtatttgcctgctcccgccccttcaagcgaggtggcgtcgacacccggagcggagtctctgccggtgggcgttgtgcgagtcagcgaccgttcgggcaactttgccgtcaacgttgaggcagggcgccacacgctggtgagtgacgaaccggtgggggtgggcggtgacgacctcggcttgggaccatatgaccttctgctcggtgcgcttggagcttgcacggcgatgacgttgcgcctttacgcccgccacaagaaatggcccctcgaggacgtccgcgtcactttgactcacgccaagatccacgctgcagactgtgctgaatgtgagaccaaggaaggcaagattgaccgaatccagcggacggtcgaactcgcggggccactcgatgcgccgcaacgggcacgtttgctggagatcgccgacaaatgccccgtgcaccgcacgctcaaatccgaggtggagatcaagacgctcctttcctag

SEQ ID NO: 513818 - DNA, 1806 bp, Stenotrophomonas maltophilia
atgacttcttccgttgacaaagatcccaccgaaccaagcaattttctgcgcaacgtcatcgaaaacgaccttgaactaggcgtctatgcagcgcgcaaatggggaggcagccccggcgacgcgcaacaccatgcgcaaggcatgctagacccggccaaggtccgcactcgattcccgcctgaacccaacggctacctgcacatcgggcatgccaagagcatctggcttaacttcgagctcgccaagaaatactgtggcgtgtgtcacctgcgcttcgatgacaccaacccggagaaagaagagcaggaatacgtcgatagcatccgcgacgtggtgaagtggctgggctacgaaacctgcctggctgacagccccgtggctcccggcaccctgcagccgcacgaatacttcgccagcgactactttgacttcatgtaccgcgcggccgagtacctgatcatcgccgggctcgcctacgtggacgagcagacgcccgagcaaatgcgcgccgcgcgcggggacttcaacacacccggaactgacagcccgttccgtacccgcagccccgacgagaacctggcgcgcttccgccagatgcgagacggcgagctcgtagacggtgccgccatccttcgcgcgaagattgacatggccaatcccaatatcaacctgcgcgaccctgcgctctaccgcatccgtcgggcgacgcaccacaacacaggcgacaaatggtgcatctatccgatgtacacctttgcacatccgattgaggatgcgttggagcagatcacccattcgatcgccacattggagttcgaagaccagagaccgttctacgactggttgctttaccgtttggcagaaggcgggttgatcgccagcccgcatccgcgccagtatgaattcgcgcggctcaatgtgacgcacatggtcaccagcaagcgcaagctgcgccagctggtcgaagacgggcacgtcgatggctgggacgacccacggatgccaaccctcgcaggcctccgccggcgcggctacacgcccgaagcgctcaggctcttctgcgaacgcagcggcgtgacgaagtccggcggctggatcgactacgcgagcctcgaagcgaccctccgcgacacgctcgaccccatcgccccgcgcgcgatggccgtgctcgacccggtcaagctcgtcatcaccaactgggccgagctgatgggcagcgacgcctcactggacgactgcaccgcccccgtaaacccgcgcgaccccgaaggcggcatgcgccgcttcaagatcggccgcgaggtgtggatcgaacgcaccgactacgaagatgtgcagccaaagggtttcttccgactgttccccggcaacaaggtgcgcctgaaatacggtcacaccatcgtgtgcacgggcgccacgcgtgacgctgacggcaagctggtcgaagtgcaggccacgctgatgcccgatacaaagagcggcacgccaggcgcggatgcggtaaaggtgaagggcaacattacctgggtcgccgtagccgatgcggtaccggtcgaggtgcgcttgtatgaacggctgtttaccacggagcaaccgggcagcggggagttgctggatgagctgaataaggcgagcctcgtgacatgctcggccttcgcagaaccgtcattgtctgtagcgcaggttggcggtgtggggtttcagttcgagcggcacgggtacttcgtggtggatgcaaaagcgtcacacgatggaaagcttgtgttcaatcgggctgctgggatgcgagacggtcgggagaagtaa

SEQ ID NO: 513819 - DNA, 789 bp, Stenotrophomonas maltophilia
atgacgtccagcgagcaacaaggtccgtggcgcaacgcgaagatcgagcgcatctcgcagctcacgccacgcatcaagagcttctttctcgatgtgtcggaactggcatcgcgccgtgcgggacaacatatcagtgtgcggctgaccgcgcccgatggttatgtcgcacaacgcagctattccattgcatcggcgcctcgcgccgataccgtcgaaatcatcatcgagaagctcgaagatggtgaggtgtcgccttttttccatgacatcgcggaggtgggcgaaagtatcgaggtgcgtgggccgctcggtgggcatttcgtctggggacccgccgatggcgggccgctgttgttgattgcgggcggttcgggaatcgcgccgttgatggcgatggtgcgcgcgtgggccgcggaccccacagaggaagttgcgccgaaggccactatggctgaaccgcggccggtgcctatgcccgtgctgttggtctgctccgcacgcaccccagccgatcttcctttccatgccgagttgcttgaactcgaagcagcacggcccgacttcactttcatcgcagtgaccacgcgcgagccaccaccgcggcattccgacctggggcgccggcttgatgccgcggcaattgcaaacgtgcttgcccgctgggaccacacgcctcgtcatgtttacgtatgcggcgccaatcggttcgtcgaagctgttgctaatggacttgtcgatgccgggataaccgcagcccacataaaaactgagaggtacggcggcgcataa

SEQ ID NO: 513820 - DNA, 609 bp, Stenotrophomonas maltophilia
atggttacacgcggatttagcgggcgacggcccacggctgatattgccaaccgattgccgccgggccagttcaagaccgacgactttccggtgctctcgaaaggaccggtgccgcgcatcgacttagctgcttggcggtttactctgagcgacggcccgcggccattgaaaagttggagctggaacgagttcctggcgctgccacgctccgtctgggagggtgacatccactgtgtgacgacttggtcgaagttcgacacgcgctgggaaggtgtgaccatcgacgctctgctcgccgacgccggcattgcggccccgacgccctggctgctagcgctatcgctagacgactacgataccaacgtgccagttgccgatttgctaggcggtcgcgccatggttgcgacgcacttcgacggtcggccgttggcgcctgaacacggcggcccggcacgtttattggtgccacacctgtacttctggaaaagcgcgaagtggattaaggggctcaagttcaccgcgcgcgatgaggctggattctgggagctgcgcggatatcacatttacggcgatccttggcggcagcaacgctattcggacgattcttga

SEQ ID NO: 513821 - DNA, 516 bp, Stenotrophomonas maltophilia
atgggtttgaaagaaaccgccatcctcgccggaggttgcttctggggcatgcaggagttggtacgcaagattcctggtgtcgcgagtacacgcgtcggctacaacggcggcgacgttgccaatgccacttaccgcaatcacggcacgcatgccgaggcgctcgaagtggtattcgatccggcgttcatcagttatcgcgaggtgctggaatttttcttccagattcacgatcccagcacgcccagcccgccgggcaacgaaagcgggtggtcttaccgttccggcatctacttcactacgccagagcagcggcagatcgcgctggaaacgattgccgacgtcgacgcctcgggcctgtggccgggcaaggtggtcaccgaagtcaaacccgccggccccttctggcaggccgagccggagcaccaggactatctgcaacgtcgtccgaatggttacacctgccactttccacgcccgcagtggaagctccccaggcgggtggctacatgcgcttga

SEQ ID NO: 513822 - DNA, 492 bp, Stenotrophomonas maltophilia
atgacgaacgaccaagaccctgtgaatgccccgcagttgcgagttccgcagtggatcgatgcgcacgggaacccgagctggccgctcgagctggccgatctcggagacgagttcaaggttattttttgcttccagcacgggtgcccgggttgtcatagccacggatttccgactctaaaagcgctggttgaagcgctgtccgggcagggcttcggcttcgcagccgtgcaaaccgtgttcgagtctgccgagataaacacattcgatcgtttgcgcgagacgcagcagcgctacgggttgtcaatcccattcgggcatgacccggccgtggaccgctatccgagcctgatggcggatttcgagacgcgcggcacaccgtggttcatcgtcatcgatccgctgggggaggtcattcacagcgacttccgcctcgataccgagcacctgttggggaccttcggcggcgccgacgaactgcctcaggccatgtga

SEQ ID NO: 513823 - DNA, 1533 bp, Stenotrophomonas maltophilia
atgcaagccaacgtgaccgccccgcacgatccgcccgccgacccggcgtcccgagcagcgctgtacatgccgttcgacaacagctacgcgcgtgaacttgagggcctgtatgcgagatcgaatccggcaggctcgccagcgcctcggctactgcggctgaaccgcgaactggctgacgagctcggactggacgcagatgaaatgtcctcggccgccggcctcgccgtgctcgccggcaatgccgttcccgcgcaggcgcaaccgctggcacaggcctatgctgggcaccagttcggcagcttctcgcggcaactcggtgatggccgcgccctgctgctgggcgaactcatcgaccgctgcggccgacgccgtgacattgccctgaagggatcgggccgaaccccattctcgcgtcgcggtgacggcaaggccgcactcggacccgtgctgcgcgagtacctgatgggcgaggccatgcacgccctgggcatcccgaccacgcgcgcactggccgcggtggccaccggcgcgaccgtacagcgcgagcagctcctgcctggcgccatcctgacgcgcgtggccgcaagccacttgcgtgtaggcactttcgagtacatcgcggccagagacgaccaggccctgctgcgccggctggccgactacgccattgcgcgtcacgatgcagctctggccggcacccccgacccctacctgggcctgctgcaggcggtggccgagcgccaagcgtctttggtcgcgcgctggatgggcgtgggcttcattcacggcgtcatgaacaccgacaacatgacaatctccggcgagacgatcgattatggcccttgcgctttcatggagcacttcgaccccgaggccgtattcagctcgatcgacacttcgggccgctatgcctatgggaatcaaccggcgattgcgcagtggaacttggcgcgcttggccgaggcactgctgacgctgatcgacgctgatggcgagcctgccgaacaacgcgccggcgcggttgtacaggcgtttgccgaacactttgactttcattggacgaccgtcctgcggctcaagctgggcctggacgacgccagtgggggcgaccgcgcgctggccgacgactacctgacgctgctgcgccggcaccgcatcgacttcacgctcgcgtttgcccgcctggccgacgctgcgcaaggcaataacacgccgctgagaacgctgttcggaggggcggccgcagcgctggaactttggctgaagcgctggcgggagcgcactctggcgatcggcaagagcccggacgaactcgcggcggccctgcggagcgccaacccgatctatatcccgcgcaaccaccacgtcgaatcggcgctggcggcggccgtggagcgcgatgacctggcacctttcgagcgcctgctgcgggtgctgcaacaccccttcgacgagcatgcggcagacagcgcgttggccgagcccgcgcctgcagagcagacggaaaactaccgtaccttctgcggcacctga

SEQ ID NO: 513824 - DNA, 972 bp, Stenotrophomonas maltophilia
atgcaagacgacagcgtgcaagcaggcatcatgggggagcccgcgcccgaactgggcgtgacgcaatggatcgacgccgccggccagccgctcgccgactacgggctggacaagatgcgcggcgccttcaagctgatcttctgtttccaggatgcctgcccaggctgccacctgaccggattcccctcgctgatccgtgtggtcgaggcctttcgcggctcgcccttcgtcagcttcgcggcggtgcagacggtgttcgaggactttgagtccaacaccttcgatcaggtagcggtcaaccagcgcaaatacgcactaccgataccgttcggccacgatgccggcgccggtcgcgtgggtgacggctcggtgctgatgcagcgctaccgcaacggcggcacgccctggttcatcctcgtcgatcccagtggctcggttgtttacaaccacttccgcatcgacgccgacaaactcattgccgagctcaaacgcgccgagtcggcgccgcctttgcccacgccggatgcaggaaccatcacctggctagatgtcatccagcacgcgaaaggcaacaatccacctccgccacggcggttcgagctcgacgatgtcgaatggcgccagcgcctgacgcccgagcagtaccgcatcacgcggcaaaagggaaccgaacctgcgcacagctcgaccatgtgtgccttgttcgaacccggtctttacggatgcgtgtgctgcggcaccgagttgttcgacgcttcgagcaaattccgaagcaagagtggttggcccagcttcaggcaggcgcttgcgcccgggctgatcgcgcatcactacgattcgagccatggcatgacgcgcatcgagaccacctgcaatgtgtgcgacgcacacctgggccatgttttccccgatgggcccgaacccagtggcctgcgctactgcatgaacgccgcggcgttggtcaagtcctga

SEQ ID NO: 513825 - DNA, 1395 bp, Stenotrophomonas maltophilia
atgaacttcgataccatcgtcatcggtgcagggcaagccgggccgtttctggcggccaagctcgtagagcgcggccgcaatgtcgcgctggtggaggcccgcgaccttggcggcacttgcgtcaaccgaggctgtacacccaccaagactttgcgcaagtcggcgcgagtggcctacctggcccgtcgcgctgccgagttcggagtgaatgtgggcacggtgaacgtcgacttcgccgtcgccatgcaacgcatgcaagatagggtcgaccaagcgcgatccggactcgagagctggctcggcgggttgcagggcctgcgcatcattaaggcccacggccggctaacgggtcgcgatggtggcgagttcctggtgcgggcgggcgaacacattttgcgcgcgcctcaaatcatcctgaacacgggtacgcgcccctccgtgccgccaattccgggtctggcggaaaacccgtaccttgatagcgagggactgttggcgttgcgcgagctgccccgcaagttggtgatcatcggaggcgggtacataagccttgagatggcgcagatctttcgccgcctcggcagcgaggtcgccatcatcgagacggggccgcgcttgactggacgggaagacgccgacgtgtccgctgcagtcaccgagatgctgcaggccgaggacatcgacgtttacatcggcgtgtctattgcggcagtcaaaccgggggaaaccgagggcggcacctgtgttcaactggccgacggtcgcatcattggcggcagccacctgctggtggctaccggccgcgcgcccaacaccgacgatctggggctggatagcgtggggttgagggccaacatgcgtggctacatcgccaccaacgatcggctcgagaccgacgtaccaggcatctgggcgctgggggacatcaaccagcgcggggccttcacccacaccagctaccacgatcaggaggttctggccgagaacctcgcgggcgggcaacgtagcgccgacgcgcgcaacagcatttatgccatgttcaccgatccaccactggcacacgtggggctgtacgaagccgaggccaagcgcctagtggaaaaagagggtcgacgtatttcgcaggccgtgcacgcgatgaaggacgtgagccgggcgaaggaagagagtgaaaccgtgggcgtgatcaagctgctgatcgatgaagacagcggcctgttcctgggtgccacgatgctgggcatccaggccgacgagatcattcaatccattggcctagtgatggccagccagggcacctggcgcacggtgcgtgaggcgctgccagtgcaccccaccgtcactgaattcctgcctaccatcatcgaccgccgcaagctcttggtggtgaattaa

SEQ ID NO: 513826 - DNA, 609 bp, Stenotrophomonas maltophilia
atgccgatcaatcgatcttttcttggccgaaaccgcggcgtcgacaaccacgggggtcgcttgccgccgggacagtctctgactgaaggtttcccagtcctcacccatgggccttcaccgcgcccgcgcagcgatgacgaatgggtgctgaccatgaaagtcggcccgcgactggtggcccaatggactctggccgaattcaaggctctgccgcagagcgagcaggtggtcgacattcactgcgtgaccacctggtccaagttcgacacgcgatggcgtggcgtcacagtggacgaccttctcgccgcagccggcgtgcaagcacccaccccctgggtgcttgcacactcgcaggacggctacagcaccaacctgccgctggcggacttgacgcaagggcgcgccatggtcgccacccacttcgacgacaaacccctgacgcacgagcacggcggacctgcacgcctgttggtgccgcacttgtatttctggaaatcagccaagtggctgagtagccttgagttcacgactgaggaagaagcggggttctgggagctgcacggctaccacatgcgcggtgacccgttcagggaagagcgctatggctga

SEQ ID NO: 513827 - DNA, 702 bp, Stenotrophomonas maltophilia
atgtcgggggctccgacgaccttgccgaactcgaagccaacggagagcttgacaaacttctcgcgaccaatcctccttcgagttgagcggttatggctcgggcacgacggcccgcgcaccaagtgctcgttgatcggacgccttgggtccggccctttcgaagaaccgcttcatcgtttcgaccatcagcatcgcctagggtgttgtagtgaaagcagtgcgcggcggggcacagttagaagtcatcaagccgtacatccagccccaatacaggccacactgacagagggagttggggatgctggtgttgcgcgaacccttgggccggtggcgcctggctggatggcttctgctgacggttggcgtcgtactactcggcgcatcctgatgcaagggcggcctgcggccatgcggggcaaccgaggggtggacggcgccgacccacagcaggagcgcatccttccgcgcgcagcgcgcacgagacatgttccgcgatggctccaaggacccggtatggagctggctggtcatcgtgctgtttgccgtgggaacggtctcggcgttcacaggtgcggaggcgggcatctggcgcaggcgtttctccggccgctactgcgaagcgcaccatgcttcgtcacgattcggttgcttcaagacgcaaggcgcgttcaccagaatctccatgcaggcgatggtgcttga

SEQ ID NO: 513828 - DNA, 381 bp, Stenotrophomonas maltophilia
atggtggtttcaacctggctgcacgccgcgcatcgcggcgtgcccacttttctcgtggcggccctcctgatgggtcagtccccgatggccttggccgagtccccggcgcagcgccaggagctggtcgccgcactgcgccagctcgacgcgctggagcacgccgtcgtccacagcgccgcgcatacctccgtcattccgggcgagcgctaccacttcgattacccgcggctgctggctgacctggcgcgcgtgcgcgctggcatccaggcccatctcacaccgtcgcgcgcccagccgcgcgagccccccgaactggccggcgactaccgcaccgaacgggctactgagccattgccgacgactgcggggggcaagccatga

SEQ ID NO: 513829 - DNA, 234 bp, Stenotrophomonas maltophilia
atgaacggcgcccaggtctcggcatttcaagccaacagcggcatcgcgccttccacgatggcgaccgtcctggtcggcgtcgtgttcgcggtcctgctcgtctggggcgtctgggccatccgaacggcctacgtggggtggtccgagagccgcctcaaccagcgccagttcctcggggtctgcatccgcttcgtcgcgatgtacctcgtcctgagtttcttccttctctcttga

SEQ ID NO: 513830 - DNA, 792 bp, Stenotrophomonas maltophilia
atgaagcagaaacgtccttccattccagtccaggtgcaagccttccgcaggcgcccgcgccggtggcatcgctggcatcgctggcattgggccctgatcgccgggctggtcgcggcgccgctgatctggctcatgttcagggcgcccggcgagcccgcaccgcagccttcgccccaggccagcatcacgcaggaggccgatcctccctggcggttgggcagtccggaggcgcgtttcaacatcatcttctacgccgatctggaatgcccgtactgcaaggcgtacgcaccgcagcttcggcagtggatcaatgcacaccgggacgtgagcctgcagtggcaccacatgccgctgtccatccatgaacccgccgcgagccaggaggcgcgcctggtcgaatgcgccggccaggccacaggacacgaggcgttctggacggcggtccagtgggtctatgccaacacgcgcggcaacggccagggcgtggcggacctggaggcgtttcccggcatgtccgaggatctgaaggcgtgcatgcgcagcgagcattccgcgcgggccgtgcaggcacaggcaggggaagccactgcgtcgggcatcacggcgacgccttcgctgcgactggtcgatcgcacgagcggcaggagcctggtgctgcctggcccggtgccgggcgattcactgctgtcggcgatcgacatgctcgtcacccgcgatcccggcgaagccaagcccacggattccgtggacccaccagcccacgccgacggcgatggcgacatgccgcgatag

SEQ ID NO: 513831 - DNA, 483 bp, Stenotrophomonas maltophilia
atgactgcgttctctgaatcgttccgatcggaagttgcgcgcattgcgcgcaaagagaacaagggggagatgagctccctgcgcaagacggcaacgaaccagcgcgcagagatcgcgacgctcaagcgcgacctcaaggacttggcagggcaggtgcgcagcttggccaaggcattgcaaaaatccctgacagcggccgagcgccaacaaccccggcggcagtccccggattcgtccgcagggacgccggcggctgcgaaccgaagaggccgcgcgttcgtcttcagccatgaggcgctggtcgccaagcggcaggcgtttcacatgacccagaaagagatggcgcagctgctcggcgtgtcgtcgctgagcgtctacaaatgggaaaccggtcgggtcacgcctcgcgaggcgcaactcgtgcgcgtgcgcgaagtgctccagatgggcgtgcgcgaagcccgcaggcagattccggagtga

SEQ ID NO: 513832 - DNA, 312 bp, Stenotrophomonas maltophilia
atgaatcgcgtccaactcgttgaaatcctcgctgccaagaacgacctgtccaaggctgctgccaatgcggttctcgagaccttgatcgacaccgttcagacggccgtgaagaaaggcgacgccgttcaactcgttggctttggcaccttcaagtccgccaagcgcgcggcgcgcagcggcaagaacccgtccaccggagccgccctgaagatcccggctgcgaccgtgccgaaattcgttgcgggcgccaagttcaaagccgtagtcgatcctaaggccgccaagcgcaaggccgagaaggctggcaagtaa

SEQ ID NO: 513833 - DNA, 438 bp, Stenotrophomonas maltophilia
atgctccccttcgcgtccacgcatccacgtacgtccagacccgcgttggtcttcgcggcgactctactgtggtcgggcgcttccgtcgcccaggaaatctgggccatcaccgagtccggagcgccgctgcagggtacgcactcacccacgcgcgtgatcgagctggatgcagcccgacgcatcgaggcggaactggcggcgggcttgcccaatgatctgcaacaggccgagtccatcctgcgccgtcgcctgaaggcaggaggtccgtcccttcaacgccgtctgcaaactgcctatcagggcgtcgccgatgcctggagccttggcatcacaaccctcccggcggtcgtggtggaccaacgctacgtggtctatggcgaggccaacctggaccaggcgctggcacgcatcgcccgataccgcaaggagcacccgtga

SEQ ID NO: 513834 - DNA, 369 bp, Stenotrophomonas maltophilia
gtgagcccgatgcgtgcgacctggctgcacccacgctggctgttcagccggcgtgcggcgaaggcgttgctgtggacggtggtgcttgtcgcggctgccgtgggggccaacgtcgtcggcatctatctcgtcggcagcgttgccggctgggagcagtggctgaccgcaaccgcgggctacttcctggtgtggcggctgtgcctgtacggcgcgacggcctccggatggatctggatgcgccgccggctgctcgcgcgcgaggaccagaacggcgcagacaggcaggcgcggcgccgcctggtgcgcagcgagatcgccggtgtcgtcgccatcatggtgctggaagccagtctgctgatgcagggctga

SEQ ID NO: 513835 - DNA, 1521 bp, Stenotrophomonas maltophilia
atgacgcttttgacgaccgactacctggagtactacctcaccctcgtgtcctggatcgtccataacgggatctgggccgtgctggtgtccagcggggtgtttgcgctgcctttcgtcgcgatcatcgtgcaggaatggctcaaggcccgctccgaaggcgcggacgaaggcaacaagggcgtgctgtcggctgcgcgcatcgagaaccgggtgttcgtcgccatcgtggtggtgatgttcgccggcatccctttcatcgacgtcgatctgaacaccatccggtacgacagctcacgctcggcgcagtgccaggtcagcgtgccgcagccgaccgacacaggctggtcgcagtccttctcgacgctcaacaaccaaagcgccaagctgccggtgtggtgggccttcatgcacgcgctctcgcgtgcggtcacgggtgcttccgtggcggcgatcccttgcggcactgatttacggcagatgaggatggagatcgacgccacgcgcatcgacgaccccgtgctggctcaggaggtcgctgatttcacgcacgactgctacggaccggcacgcgccaagctgttcatgcagcgcccgcaactcgacgaggcgcagatgcatgatgtcacctggatcggctcacgcttcttcacggacacagccggcttctacgacaactatcggtcgagcacgccgcgcgatgactggccttatgacagcaaccgtgatgctgggctggctcagatatccagcggcggtggctatccgacctgcaggcaatggtgggccgacggtagcaacggcctgcgcgcacgactgctgggccaagtggacccgagcctgctcacgcggctggcgggctgggccgggttcctgagccgcgccgaggtggacgactccgtgatccgcaccatcgcgtcgccgaggcaacagaagttgaaccagggtagcgtctatacggactacgggggccagatcgacaagaccttgccgaacgtcatcacgcgcgcggccggcgacgtaggcatggcgatgggatcgatgggctttttcccggctatggacgtggtgcgtcaagcccttccaatggccctatcactgctcaagatggccttagtcatctgcattccattggtgttggtcatcgggacctacgagctgaaggcagtcatcacaatcagcgtcgttcagttttccttgttcttcgtcgatttctggttccaactcgcacgctggatcgacagcaccatcctcgatgcgctttatggttggggcttcgggtggaaccgcccgcactcaaacttcgaccctgtaatggggttgaacaatgcctttggagacatgctgctcaatttcgtgatggcgacgattttcctggtacttcctacgttctggatcggtgcgctcacctgggtgggcgtccgtgctggcgcgatcgccaataccttcgccactgcaacaaaagatgcaggcagcgcgggaggtaaaggagctggaaccatctcaggcggcaagctcaggtaa

SEQ ID NO: 513836 - DNA, 375 bp, Stenotrophomonas maltophilia
atgagcacgacgacaacacgcatcagcaccgcggaacggcttggccgtagcttcggccgtggatggcgtgcctatgcgcgcggtgagcgccgagtgccgagatggctggtctccaagggcatgccggtggctggtgctaccgcgctgctatggatagtcaagctggctgcgctgggactgctgctctacgtcgccttctggttcgcagtcgtgttgctgggggtggcggcggcggggtgggcaatggatcagcaacatcccgctgaatatgactacgagttgcagtacccgaccatcgaggaattgcgggctgcaccaggctacgatcccaacctacacaacgatacatcccacgagatgtaccaagacgactga

SEQ ID NO: 513837 - DNA, 1869 bp, Stenotrophomonas maltophilia
atgctctcactgttccagcgaaaacgggcctcggtcgccgccgctccaccgccaacccccgtcaccaatcccccgaaagggctgctgcgaccagaaccggccgcatctctgctggcgacgccacgccgacagaagctgctggaacacatctggcagcgcacgtcgctgtcgcgcacgcaattcaccaccttgtaccgcgcgcccctggagcgctacgccgaactggtccagcaattccccgcgtcggagagccaccaccatgcctacccgggcggcatgctggaccacggcctggagatcgtcgcctacagcctaaagctgcggcagtcccatctgctgcccatcggcgccagccccgaagatcaagcggtgcagtccgaggcctggaccgccgctgtcgcctatgccgctctgctgcacgacatcggcaagatcgccgtcgatctgcacgtcaagctggtcgacggcagcacctggcacccgtggcatggtccactgcaccagccgtaccgattccgctaccgtgacgatcgcgagtaccgactacacagtgccgcgacgggactgctctaccaccaactgctagatgcccatctcctggactggctcagtggctatcccgccctatgggggccgctgctgtacgtactggccggccagtacgaacacgccgggatactgggcgaacttgtcgtgcaggccgaccgcgcttcggtcgcccaggaactgggtggtgatccggcccgcgccacggccgcgcccaagcatgcgctgcaacgcaagctgcttgatgggctgcgctacctactcaaggaagagttgaagctgaaccagcccgaggcctccgatggctggctcaccgaggacgcgctatggctggtgagcaagacggtctccgacaagctacgcgcgcacctgctatcccagggcatcgatggcatccctgcgaacaacaccgccgtgttcaacgtgctgcaggatcacggcatgctgcagcctacatcggacggcaaagcggtctggcgcgcaaccgtgaccagcacgaccggctggacccactcgttctccctgctgcgtctcactcccgcgctgatctgggactctggcgaacggccagtgccctttgcaggttcggtcgagatcggcgcggcctccgcggaaagcgatgccggcacgccagccatcccacctactgccgtggcgaaaccggctcaggaaagtcaagagcctccgccttgggcaggcagtagtaccgccaccgtttcgtcgcctgcggcccagcccgtgctcaacgtcatggaggacatgctggcgatggtgggcttgggcgacgcttccggcgccggccaagatgcggaggagatcccggggcaggttttcgacgctcccatgccagtgaccacaacaatatctcttcagccacctgtacacatgcctgcgtcagcttcgtcggcagtgaagccatccggggagcatttcgtggcgtggctgaaatacgggatcgccgcgcggcagctcatcatcaatgatgcaaaggcactcgtgcatacggtgagtggcactgcgtacttggtcagccctggtgtgttccaacgctatgcgcaagaacatccgaaagtgagcttgctagctaggcacgcgggccaacaggattggcagtgggtacaaaagcgcttcgagaaacttcagttgcataggaagcagccgagcggcttgaacatctggacctgcgaggttaccggtccgcgtaaggttcggaggctgcacggctatcttctggaggatgcaggtgggctctttcatgacgtgccaccaaacaatccatatcttgtcctgagtgaggttgcccctgaaaaccggagtgcgtag

SEQ ID NO: 513838 - DNA, 870 bp, Stenotrophomonas maltophilia
atgaaggggcgctggccgatcacattgatgtgcgaggttctgcaggtcagcgccagcggatatttccgctgggatgcgtcgaggcgcgataccaagcacgcagggcgcaggctgcacagcgatgaggccttgttggctcacatccgggccatccacgagcagttgcgcggtgaatatggctggccgcgcatgcatcgcgaactgctggcccgcggcctgcgcgtgggcaaagagcgggtgcgccggttgatgcagcgccacggcatccgggccaagggtaggcgcaagttcgtggtgaccaccgacagcgcgcaccgcttgccagtcgccccggacctggtgcagcgccgcttcacgccggcagcgcccaaagtggtgtggagcggcgacatcacgtacatcgctaccgacgagggatggctgtacctggcggccgtgctggacctgcacagccgccaggtggtgggctggagcctgcaggcgtacatgcagacctcgctggtcaaggatgcgttgctgatggcttgctttcgccgtcgacctgccgcaggcctgatctttcacagcgacaggggcagccagtactgcagccaggattttcaggacactctgggcgcccggggcatacgcagttcgatgtcacgcaagggcaattggtgggacaacgctcccacagagagcctgtggggacggttgaagacggcctgcgtgcacggccagcggtttgccactcgcatgcaggcaaggcaggccgtcatggactggatcgccttctacaaccactcgcggctacattcagcactgggctacctcagtccgatgcagttcgaacaacgctggttggcggcgcagcgcaaatctgccgcttga

SEQ ID NO: 513839 - DNA, 357 bp, Stenotrophomonas maltophilia
atgccgggaggggagcatgaattgaacgagaagcaaacgagagcgaagtacacgctggagttcaagcaggaggcagtgcggcaggtcaaggccgggcgtgctgcgtcggccgtggccacgacgctgggcatgcccaaggcgagcctgacgaactgggtgcgggccgatgcgaagggccagttggaggtgaggtccgaaggcaaggccacaacactgacggtcacgcccgagcaggcggagattgcgcggttgaaggcgcaggtagcgcggctgacgatggagcgcgacatcgcaaaaaaagccgcggcgtactttgcgcaggacgtgctgcaaggtacgcctggattttctggatga

SEQ ID NO: 513840 - DNA, 141 bp, Stenotrophomonas maltophilia
atggcctccaatgagattaggctgagcaactaccagttagcctccggccgcttcatcggatgctcccagattccctatgcgtcgaacatccacgaccaagacataaaagctatgcagcggatgtatgggcaagggggctaa

SEQ ID NO: 513841 - DNA, 948 bp, Stenotrophomonas maltophilia
atggaaagcgcctcttccagcctggcgaaggcgattaccttaccaaggaaagttgaagtggaattgagacaccttcgctattttgccgtcttggcagaggaacttcacttcagccacgcggctgagcgcctacatatcgaacaaccgccattgtcccgagcgatcaaagaactggaggaggatctgggggttgttctcttcgatcgagaccgcagagggacgaagctgactgcagctggatccgccttcctgcaagatacccgccggctgttcaccgttctcgaacaggcgcgagagaatgctaaggccgtcgcagcaggtgcgcgtggcagcctgcgtatcgcggtctccgatggtgcgaccgatcctcggttctcggagttcttggcccgttgccgagccgaggaaccggaaatcgaagtacgcctgtccgaagttccgttggcggaccagttgcgcggcctacgctctggcgacttcatgatcggcttcgcgcacacagcagatgtcggcgagggcatcattgccgagccgatttggcgagatcccctggtaatagccgtgccggcccggcacgaactgctcgctcataaggaagtgcccctccatgagctcgatggccatccgctcgtcttgtgcgacccacgggtctgcgagggctactgccgcgtattggcacgactccttggacctctggaacaccggcaaaacgtcgttgaacgtgcgacctcactggagatgatgctcacgctggtcggtgccggttatggtgtcggcttcatggcagcaagtaaagtaccagtcagccagcggcccgatgtcgtagtccgccccttggccgtggaatcggcggtcattacgacctatttactccgatccgacagcggcgatgtgacagcctcactggaacgatttatttttcgcctgcgcgaaggtttgggcacttaa

SEQ ID NO: 513842 - DNA, 222 bp, Stenotrophomonas maltophilia
ttggcgttcggcaacgctgtgcgcgcctttcgcttggaactgagtgttgctcaggaagaactggccgcactagccggagttgagcgttggcatatgggcaagattgggcggggggaacacttacccgcgttggccttggtactgaaaattgcagccgtgctcaagataagcggcaccgaactgatggccgcgaccgagcacaacatgcagctccgctgctga

SEQ ID NO: 513843 - DNA, 1935 bp, Stenotrophomonas maltophilia
atgatggcactctctgatctgactgtgcggcaagccaaggccgctgacaaagcctacagcctccccgacaccgatggcctcggcctggtggttgcccctaccggcggcaaatcatggcacctgcgctactactggctcggcaagcaaaagcgcatctccctgggcaactaccccgagatcggcctgcgcgaagcgcgtaccttgcgcgacgaagcccgggcgctcctggccaagggcatcaacccccacaccgaccgcaagcagaagcggcacgcggtcaagctggcggccgattacaccttcaaggccgtcttcgatgcctgggtcgagcatcgccgcaaggaactcaaggaaggtcgccaaagcaccctctcgcagatcctgcggattttcggcaaggacgtgctgcccacccttggcaagatgtcgatctacgacattcgccggccccagcttctgggcgtcctggcaaggatcgaggaacgcaaggccttcaccacagcagaaaaggtccgcacctggttgagtcagttgttccgctatgccctcgtgatcgtcgaggggctggaagccaatccggcctccgacctggatgtggtggcggagcccaagcccccggtgagccacaacccgtacctgcatctgcccgagctgccaaacttcctccagaagctccggcgctacaacccgcgtggctggcaaacccagctcggcatccggctactgttcctgaccggtgtgcgcaccggtgagttgcggctggcaaccccggatcagttcgacctggaccgcggcctgtggatcatcccgccgcagatcgtcaagcagcttcaggacgagatgcgcaaggccggcaagcgcccccaggacgtgccgccctacatcgtgccgctgtcccttcaggccatcgagatcgtgcgctacctcttgggggtgatgcggcccgcccaggttcatctgctcacacaccgcagcgaacttaagaagcgcgtcagcgagaacaccctcaatgccgccctgaagcggatgggctacgaggaccaactgaccggccacggcatccgcgggaccatctcgacggcgctcaacgagatcggttatcccaagatttgggtggacgctcagctctcgcactccgacccgaacaaggtgagttcggcctataaccacgccaagtacgtagaaccgcgacgtcggatgatgcaggactgggccgatcgcctcgacctgctcgagcagggtcaggtggaagccgccagtgctcacctcaccattcgtatcgaaggggtgccggcgatggcagaagacgagcctgttgccgccgccgctgtgttccctgaaggctctgtgccgcctgtagtggctgctcccatcgtcgtgactccgaacgacgccggaagcacgttccagcgactgtcgcaggtgcctccggcgcccacgcgggcgccggaaccggaagtgtccgcaattcagcgcgagcgcgaggaaatgcttgctatgtacgagtcaccgagctgtctgccagtgccgctgttcggcaagctggctgggaagtccaaggatcagatcaaccgcgagttgaaggccggcaagctgctatccatcagtttgggcaaccgcgggcagcgcgttcccgactggcaactggtgccgctcaagcacaagctggcgcaggtgctcatgaaccaacgcccgcacgcggattcgtgggacctgtaccgcatgctgacccagccgcacccggacctgggtgatcgcgcggccattgatgcggtcacgatgaccaacgtgcccgcgattgtccgggtcatcatgggcgactaccggcaccatgcggatgcgcccgagactgttgctccgcggcccatccctgaggatgtggggcagagcgcccgtcggctggtggatagcacagtggtctttgaaggggcctaa

SEQ ID NO: 513844 - DNA, 591 bp, Stenotrophomonas maltophilia
gtgttgccggtggagacctggttcgaactgatgctcgactgcgctaccgccgtggttgcgaccgaggccgcgagcgcgttcttctgctcgttgttgttgcccgaagcaatgttgacaccgatgttgcctgacgcaccgccgaaggcattgccaccgagacctgcggcattggtgacgccggagttcatggtcgcgttgccgaagccggcctggttgacgaacacctcggcgtcggccatgccgaagctgaaggacgcatcggcagcggacaatgacgcggcattgtcctgggcgttgttgtcccccgataccacgttgaagccgaggttgccggaggcgccggcacccacgctgtcaccgatggaggcactgttggtgaccaggctgttgctggtggcgttgttgctgatcgactggcggttgtcgatcaccgcaatggccgccgagtcgaggtcgatgtcgccggtgatggtggggtcgccggagaaattgacgtcggtgctgaggcgcaggtccttctccaggttcacgtcgacgccgtggttgttcttttccttgcgctcgtcggcctggatggtgctgtgcttctga

SEQ ID NO: 513845 - DNA, 1083 bp, Stenotrophomonas maltophilia
atgaatagttctcatcactttgatcctgactgggtgtcaccaccgggtgacagtattgtcacgattagtaggagatctgggatcaatgaggatgaactcgctcgaaggctgcatctgagcgcatccgactttcatttgcttctaattggcgaattccccatcgatgagtcaatcggtgagaggatctcgcgcgaggttggagcaagctcaagcttttgggtaaagagatacaagaagtacagagattcgctcggtctggcggccgagaaattgagccgtgagttcaggctgccgctaggtgaaatgcgcagattgggatggataccaaaagggtcagcagggatcgaagctgagctctcggcggccaactttctggaagtcagatctattgatgaattcgaatcgaagtatggtcgactggaagaggccctggctttccgtaggtcctcaacatttgatatcgaaatgggagccgtgtctgcctggtatagggcaattgagctagcctctcagaagatttcgctaaggagttatgatgttgaaattctttctaactcacttggcgacgttcgacgctttactctgactcctgatccccaggactttcttcctgaaatcgtaaaagtacttgcagactgcggcgtcgccctttgcgttgtgcccgcgccgctcgggtgtccagtgagcggaatcgcatgtttcaatgcgcggggcgggctgattggacttagttcgcggcatctaactgatgatcacttctggttctctctttttcatgaagtagctcatttgctcctgcatgcagggaggatatcgatcgaagtcgatagcggtgttggatcaaatgaagaagatgaggcaaacgaattttcctctagaatccttgttccagaagagtggcatggcgagctaaattctgtggctttgaacaagttcgggattgcgcggctggcgaaaaagataggtgtctcccccggcattgttgttggtcagcttcagcatagaaagcgcattaggcataaccagttcaattatctaaagaatagatataagtggattggctctagcctcgaaaaggcttga

SEQ ID NO: 513846 - DNA, 927 bp, Stenotrophomonas maltophilia
atgaggcccagagatttcggcgagctacagagactaaaagcgctgcttgagagtgatgacctattcaacgaccttcccggattggcggaggcaggggccgttgactcatttgccctccagctaatcgatagcagaaggcgagtagagtttgtgtcaaaaatttccaaaatggaaatttgcagtgacagattgaacccatactctcagtacttcgatcctattcgtgcctctatatcccactttagagaaggcaatgttgatgaagcctgctggctcgtgtttcttgccacgcatttcggacacaatgctaagagcaagtggcggctaacccgcgacatatacggggcacttggcacaaagatgtggacttgggatgaagttacaagagatatggcagggtttcgagattggctcgccggtgccgaagcgaccctaagaggtggagacggcgttcaccgagcctttgggaatcatcgaaagtacacatctctagacgcctggaagccaaatgccactggcgacgcaattgccagctacgtggcttggattcagcggaatggcggacatcaggcaatgttagttgatgcgctcacagcatcactgggggatcccggagcggcgttcgatcggctctacagttccatggcgcaggttgcgagtttcggccgcatcggtagattcgattacttgaccatgctcggaaagactgggattgccccaatatccccaccttccccatactttaagagcgcgaccgggccgctaaacggagccaagcttctgtttggatccggcaagaccgtgggagactacgaaacaaaaaccgttgcacttggaagtgcgctcggattcgggatgcagataatggaagacgccatttgcaactggcaaaagagccccactgagttcaagccttttcgaggctag

SEQ ID NO: 513847 - DNA, 993 bp, Stenotrophomonas maltophilia
ttgtatttgcgctcggaatctgtagacgacatgcaacacgctgtgttgtcgaagctgctccttccccgcacaaagagagttcaggccagccggggtgaatttttcgaaatatcaggagccatgctgcgcctgaagaacccaagggccaggctcggcagaggcattcggcaggggagactattcagcagcttaggcgaacttctttggtatctcgccggatccaatgaactggacttcatctattactacattaagaaatatgcggatgagtcagaagatggcctgacgataaaaggatcttatggagagcgcctttttcgatctcgccagatatacagaatactttcactactgaaaagcaagagcactagccgacgagccgtccttcaaatattcagaaaggatgatcttagaaattcaaaagaagtcccttgcacgatatcacttcaatttcttcttcgaagtaaaaaactcgatttgatcgcatcaatgagatccaacgatgcacttatcggattgcctcacgatgtatttgctttcaccatgattcaagagatcgccgcaagacacctgaaagtggaagttggaacctacacgcactttgtagggagcctgcacctgtacaccagcgacatatccagggctaaggagtacatttccgacggccttcagcgagtaactcccatgcccgctatgccaataggagacccccttcccagaataaagttgctactgagtgcagagcagtcaattagaaaaacagggaactcaataaaaattgaaaaagatatagagaactactggaaggatataatttacatccttcgctcatatcattacgttcaaaaaaaggaccggagcggcgtctacagaatgaagaacaagctctcttctgatttttaccatcagtaccttgatatgaaggcagcaagaatgaaagatcgcgctgaagctgctgatgtacaaaatactcaggacacccttcttctgtga

SEQ ID NO: 513848 - DNA, 438 bp, Stenotrophomonas maltophilia
gtggcgcagctgtcgaaagcgaaccgtatccggctggcgctcacggctgtctttggcgagcgccaggtcggcatggtcgcgtgggttgacagcagtaacaatacggtcgaccagctgacgtttgatgcgttgattgcgctgggcttccgggtgcgaatatttgcctatggcgccaacatcagcgccgacaattacaagctggtcgctacaccatggccgcgccaagcgccgcgacgggaggaggacccgacgctctatcgcctggacaagccggacgctggcaccggcattgcgaccgcagggagtgaggccggtgctggcgtccgggtcgtcagcgcacaaggggcagtttccactgccggaggcacgctggttcgggtgggtgagcgccctatggggacattccccgagtcgaagccgtacccacccagcttctga

SEQ ID NO: 513849 - DNA, 381 bp, Stenotrophomonas maltophilia
atgattgagttcgacccgcaccaccgtatcgacttgaccggcccatgggtcggtttttctttcctcggtgatcgtctgatcacgcccgaaggccgcgagctgcttccggaagatctggcctggctgtcgctcaccgcctgccaagcgcaggaatggcgccggatgatggaagctgcacgctcggcgccgtcgatcgacagttccagaaatgcgcgcaatcgcgacgcaagcatcctccatcatcctgccactgtcgttaatctgcgagacgtggtgagccggcgcaaacagcggtcggcggtggcgatgactggccctgacgccgagccgccagcggcagtcctgccggtaccggggccgagacgccacgagcgcgtgtga

SEQ ID NO: 513850 - DNA, 438 bp, Stenotrophomonas maltophilia
ttgcaggagagcattgagtcaaccttggacaaggcaggcttggatcccaggaaggaaggccatccagaccatgcgctctaccagcagatccgcgatggtgtatccgccgtggatgccaggcacgggcgcaacttcgatgaaaccagtgagcgcatgacggccagcctgcttgcgacggccaagagcagcggcctcgaacgcgttgatcatgtggtcctgggcagtccacccagcgatggctcgggcgctcgcatgttcattgtgcagggagcaccggacaatccagcgcacctgcgggcgtcggttccgatcagcgaggcaatcaatacgccggtggagcagtcgatcgccaaggccgaacagattgcgcaggcacagcaggtcggtcagcaagaccacgcccaggagcagacccgaaccgcgatgcgcatgggctag

SEQ ID NO: 513851 - DNA, 1269 bp, Stenotrophomonas maltophilia
atgagcgacccgatctcagccatcctcgacctgcatgacaccccgcgcacgcgcaacgacagccagggcatgctgctgtcgctggccaccgagcatccgcaccagctgggtgagttgatgctgcaggccatggcgcgtcgctcgccgggctcggccttcctcgatatggcgctggacctgctgccggacgaggcggtgcccgcagtcgcggccgaggcctggcgccgctatcgcgagggcgagcgaggtgaactgctggccagcgtgatggagttcgccagctaccaggcgccgcaggtgctgcaagacgattgggaggcgttgctggtggtggcccatgaggatgaggtgcagttggcctcgcaggtctggcggggcttgcccggcgcgattgccgcgcactgggcgcagttgctggccgaggccggggacgatcgggagatggtgcgcgcgagggtgctgctgctcgctgctcagcccgaaacctatgccgttgcccggggctacctcgtcgactggggccagctggatgccgacatctgggcgcactgggctggcgtggccaacggtccgcggccgcgtcgcctgcacggcgagaagccgctgcacatccgcttcggccgtgagcagcaccgcgcgcagttggccgacgagccaagctggcgcaagcgcatctggcacctgcacccgacctggaatggcggacaggtgcagcacgccggccacatgggcggaccgctggaagcgctgtgtggcagctgccatgcgccgctgcagcgcctgctgcgaaccgatgctgccgcgctgcagccgggcgcggcgggtgagatcacgctgggcctgtgcctggactgctgcggttgggaagatccgcctgtgcgtttctatcgccacgatgctgccggcctgcccagctgccaccccagccagcgtctggaggtgccggccacgccgaccgacagcggtgatctgatgcaggccgaggtgggtctggccgccatggacggtgcgcgctggcagcaacaggactggggccagtccaaccatcggcagaacctgtcgcgtgtgggcggcgcgcccagctgggtgcagagcgcctggtatccggcatgcatcgactgtggcgaggagatgcccttcgtgatgcagctcgattcgacgctgccgaccacgggtgagggcaccctgctgtggggcagcggcggcatgctctatacgttctggtgcgcgacgtgccgggtgagcggacacttctggcagtgcacctga

SEQ ID NO: 513852 - DNA, 1179 bp, Stenotrophomonas maltophilia
gtgcctgacaagagcaagagaatcctgaagccgggctggcgtcgggtgaaatttggtgatgtagtgcgccaatgcaaggaaaaggtggatccactaagctctggcctagagcgttacatcgcaggtgaccacatggacaccgatgacctccgtctccgccgctggggcgagattggctcaggttacttggggcccgctttccatatgcgattcaaaccgggtcaagtcctctatggatcacgccgaacctatttgcgcaaggtggcggtggccaatttcgagggaatctgcgccaatacgaccttcgtgcttgaacccgtgagccccgatgaactcttgccggagttcctgccgttcctgatgcagaccgatgcattcagtgatttctcagttaagaactccaaaggctcagtcaatccctacattaacttctctgatctcgcgaggtttgagtttccccttgcgcctctgaacgaacagagacggcttgttaatctgctgcgagcagtcgagcgagttagtgattctcttcaggaactaagcgagtttaccggtcggcttgctggcgcaatgcttgctaatgtactgagtcgagattggccgattgtcgaccttggctcagttgttcagggggcccagtacggactctcaatcaatgccggatcggacggtcagtatccgatgctgcgaatgatgaatatcgaagatgggctctgcgtcgagaatgacatcaagtatgtagatctcagcgagaaggacttcgaaacctatcggcttgcaaatggtgatgtgcttttcaaccgaacaaacagctatgagctggttggccgaacaggggtgtacgagctcgagggcgatcacgtctttgcttcgtatcttgtgcggatcaagactgtttccgaaaagctggaaccgaagttcctcacgctttacctgaactctgatttcgggcgtcgacaagttcttgcatatgcgaccaaagcgataagccaggccaacgtgaacgccagtaatttactccgtgttcgtttgccgttgccgcccttggaggtgcagaagcagctgcttgacgagattgcgtgcttgaagtcggcgggaggagcagcaatggcacgccgctcttccgcagaggagatgaagaagcagttgctggcagaaatcgcgagggacgcagagtga

SEQ ID NO: 513853 - DNA, 471 bp, Stenotrophomonas maltophilia
gtgacgcaggtcatattggcacagggggggggctggcgctccgggtgggcctatagcccgttggcaaacgtccagcctgtacggatggacgcggccctggacgagataaccatgcccaccgaaatcgtagcagcgatcggcgaaggcgcgctcgcttatcgagagagcggcattctctcactggcagatggcagagtattctccgcgtgccggcagtatcgctatcgcttgagcgaggacagtgttgtcgtcgagttcgcagacggacctcatatcgggacgcagttcctcagcttgagtttctcgcggacggataccgggttggaagcgagtggcgtctatgcctgcggagacgacacctaccatgcaacctacaggattctggggccggcggcctttgaagtggtcatcatggtccaagggcctgcaaaggcatacgagctagtcagccgatattcccggtcgggataa

SEQ ID NO: 513854 - DNA, 960 bp, Stenotrophomonas maltophilia; identical to SEQ ID NO: 127100

SEQ ID NO: 513855 - DNA, 534 bp, Stenotrophomonas maltophilia; identical to SEQ ID NO: 231077

SEQ ID NO: 513856 - DNA, 897 bp, Stenotrophomonas maltophilia; identical to SEQ ID NO: 197161

SEQ ID NO: 513857 - DNA, 1221 bp, Stenotrophomonas maltophilia; identical to SEQ ID NO: 197162

SEQ ID NO: 513858 - DNA, 1050 bp, Stenotrophomonas maltophilia; identical to SEQ ID NO: 197163

SEQ ID NO: 513859 - DNA, 282 bp, Stenotrophomonas maltophilia; identical to SEQ ID NO: 144616

SEQ ID NO: 513860 - DNA, 237 bp, Stenotrophomonas maltophilia; identical to SEQ ID NO: 121649

SEQ ID NO: 513861 - DNA, 1647 bp, Stenotrophomonas maltophilia; identical to SEQ ID NO: 180726

SEQ ID NO: 513862 - DNA, 246 bp, Stenotrophomonas maltophilia; identical to SEQ ID NO: 108023

SEQ ID NO: 513863 - DNA, 276 bp, Stenotrophomonas maltophilia; identical to SEQ ID NO: 121653

SEQ ID NO: 513864 - DNA, 351 bp, Stenotrophomonas maltophilia; identical to SEQ ID NO: 121654

SEQ ID NO: 513865 - DNA, 435 bp, Stenotrophomonas maltophilia; identical to SEQ ID NO: 237408

SEQ ID NO: 513866 - DNA, 465 bp, Stenotrophomonas maltophilia
gtggacagccagggcggcatcagccgccccacagacttccgcacaaacttcgtccacctgggctcatatgcggtgttggacgaaaaatccgcctctcgcggcctgcacgatgtgtacaccgaaaaggcctcggccgagcactaccgcaagaccggcaagttcccggacggcgccacgctggtgaaagagatccgcaagctcgaaaccagcgccatgaccaccggcgaccctgtggtctggggttccgatgcggccgtgtggttcgtgatggtcaaggacgccaaaggccgtttcgccagcaaccccttgtggggcgacggctggggctgggcgctgttcaaggccgacgcccccgccaagaatgtcgccgtcagctacgcagccgactgcatgggctgccatgtgccggcggccaagaccgaccgcgtattcatccagggctatccgacactgacccagcactga

SEQ ID NO: 513867 - DNA, 534 bp, Stenotrophomonas maltophilia
atgacccaaatcgcccccctgaccatcgacaccgctgacgccgctaccgctgccacactcaaggccgtcaaagccaagctcggcgtggtgccgaacctgctcgccacgctggcccacgcgccggcagcgctcaacggctacctcggcctgtccgaaacgctgggcaccggccgcctgagtgccacccagcgcgagatcgttgcgctggctgccggtcaagccaatcgctgccagtactgcctgagcgcacacaccctgatcggcaaaggtgccggactgtcggcagaggccatcgccgcggcccgcaccggccaggcggccaacgcacttgacgatgcaattgccggctttgcccgcgcgctggtcgagcaacgcggcgtggtgtcggccgacgccatggccaactaccgccgcgcggggctcgacgacggcctgatactggaagtgatcgccaacatcgcgctgaacacgctcaccaactacaccaaccacatcgccgacaccacggtggatttccccgtggtcgccgtctga

SEQ ID NO: 513868 - DNA, 843 bp, Stenotrophomonas maltophilia
atggcggatcgactggccggcttgctccggcactactcgctttcggcgcgcgtttttcacagcggcgccttctgtgggcagcatcattacgcggcgccgcatggctatatccatctggtgcggcgcggcccgattacggcgcgttcgcccgtgcatgaagatctgctggttaccgagccgagcctgctgttttatccgcgcgtggcgtcgcatcgttttgtcgccgcccccggcgataccgctgagctgttgtgtgcggaggtcgatctgggcgcttcgacgggcaatccgttggccatggccttgccgtcgatgctgctgattccgctggcggacttgcccggcctcgggccgacgctagagctgctgtctgccgaagccgagcgcgaccagtgcggtcggcaggccgccatcgaccgcttgtgcgagttgctactgatccagttgctgcgttatctgatggatgggcggcttggcgccaccggactgctggcgggactggccgacccgaaactcgcgcgcgccataaccgccatgcacgatgcgccgcagaccgcgtggtcgctcgaggcgctggcggcgcaggcgggcatgtcacgcgcgcgcttcgccgccgcgttcaaagacgcggtgggcgtcacgccgggcgactatctggccgactggcggatgaacgtcagttgcaccctgctcaagcaggggcgtccggtggcggtggtggccgaccgcgtcggctacggcagcccgaacgcgttggcgcgcgccttccgcgtgcgcatgggctgcgccccgcgcgactggctggcgcagcagcgcggtgacgcgtcgctcagcggttcgtga

SEQ ID NO: 513869 - DNA, 291 bp, Stenotrophomonas maltophilia; identical to SEQ ID NO: 16838

SEQ ID NO: 513870 - DNA, 387 bp, Stenotrophomonas maltophilia; identical to SEQ ID NO: 328281

SEQ ID NO: 513871 - DNA, 174 bp, Stenotrophomonas maltophilia
atgttcggcccctctggcgtgttcgatcccgcgacctatgagccgcgctcgggcaagaccttctggatggccgcaacggacgtgagttcgctggtgggcaaggaggcagcagccgacacgctcatcggcaactgcacgaccgcacgaccagcctcccgttcaaattcgagttag

SEQ ID NO: 513872 - DNA, 327 bp, Stenotrophomonas maltophilia; identical to SEQ ID NO: 91887

SEQ ID NO: 513873 - DNA, 501 bp, Stenotrophomonas maltophilia; identical to SEQ ID NO: 85998

SEQ ID NO: 513874 - DNA, 372 bp, Stenotrophomonas maltophilia
atgagcacgtcaaccatcgaggcgctggccagcgcctggtcaaggattgccgaggaagcggaattccccgctgactacgaggggactgccacaccacaagcgcatcgggctagcgaagctattcaggagcagattcgggagcgcatcgtcgccaccaacgacatgcggctgttcagcctgctgcacctgctgggtcaggcgtcgctgcgcatggagcaagcgctgtggccggaggattacgagcggatgacgcgcgaggttgaggaagccctgcggcaagccaccgacgccaacgccagatcgtacacccacgaagaagtgatgcaggcgatgcaggaacgcatcgaccgggcgcgagacaagccatgttga

SEQ ID NO: 513875 - DNA, 558 bp, Stenotrophomonas maltophilia; identical to SEQ ID NO: 86000

SEQ ID NO: 513876 - DNA, 285 bp, Stenotrophomonas maltophilia
atgtttgtggcctttgtgattgatgtctatgcccgccgcatagtgggctggcgggtcagcagccacatgcgtacggactttgtagtggatgcgctggagcaggcgctgtatgccagaagaccttcaagcgatacggaactgattcaccactccgataggggtagtcagtatgtgtccattcgctacaccgaacgcttggaagaagctggactgatgccctctgtgggtagcactggcgactcctatgaggggtcgtctcagaaaacggaaaataaagcacgctaa

SEQ ID NO: 513877 - DNA, 177 bp, Stenotrophomonas maltophilia
atgagcaggtatccgtcattcgccgagctggcggagttcgatatggggctcgctgcgtgtgctgtgttgctgtcggtcgctctcggcggggccatcgtctccatcgtgattgagcaggcatggctggcgctccgtcgcctgtggaatctctggaaggagcatgccaatggccgttga

SEQ ID NO: 513878 - DNA, 771 bp, Stenotrophomonas maltophilia
gtgctcatcaataccaagcgtcactcagactctgggtgtcacctaatcaggccagtcgcgcctgatgtctgcttcaagatccttggcacgactggggatatcggccagagcgtggaatgccgtctctatgctgctgcgcaacacgtcagatgctccagagcttcttgcctcgatgcccatgtcggcgacttcatccagtgcgtccaaaagcatttcgatagacgccaaggtcagctgttgcggtccggtgagcagagcgaattcctccagagaccaaacaatctttggaactgtgcgtttaagcacccgaaggatcgtgtctatgtcggacttggacagcttttcgtagtccttgccgccgcccactcgacgaaacgcagcgggcaaagccaccactttccgaaggcgaagcaaaatcacatcgactcgccgctttttttcagccaaggccgcttggcgatcgctcagatcctgtgcgaggcgcaattcgtgagtttcgcgagcaaagcgattggctccgtaaccaatcgccaaagcgccagccgctgcaacccaagtgccagccgcagccagccaatcagctgcgtttcccgcttcgatgcatttgagggggatgtcactgcctgtcatagcaatagcagtgattacaacccccattccaaaagctatggccgcggtcatgccagcatcgcgcttagagatcagcttgagatgattcatttgcgagccaccccctgtggcatccatgcaatggtggggattctgccatga

SEQ ID NO: 513879 - DNA, 1644 bp, Stenotrophomonas maltophilia
atgggcggaactaagccaggcaggaatgaactttgtccgtgtggaagcgacaagaagttcaagcgctgccacggcggcctcaatgtcaattacgaagagatgatctcgcgaggtgcggaggaagccaagcgcagggctgagatcaatcggatacagcagcagcgacagcaaggcctaggtcgcccaatcatcgccgaccagactgccggcaagcggatcgtcgctgtgggccatcgcctatttcaaggcgaatggccaacctttcatgacttcctctatagctacatccttgacgttctggggcatgactggttcgaagcccagacgcaactggaacacaacgaacgtcaccctgtcattcagtggcatgaaaggttcctgctggcgtcgaaagccgccgacctggcgccaggcgagacacgccagacgctgatgaccggcgcaatcagcgcatttctaacgctggcgtatgacctctacctcctagagcacaacaacgtccaaacgcgcaccccacagctgcggaagttactgatcggtcgcttgaagtgccaagatcagttcatcggggtgcgttatgagatccgtgttgcggccatacttttgagagcgggattcgagctggaatgggaagatgaaaccgatcgccgaaccaagcatgtggaatacacagccacctatccgcgcaccggcaaagcttttggcgtggagtgcaagatccgaaaccaggacactgcgaagcaggcgaaccagcatcttgggaggtttgctgggctggtaagtgatgcgctgaagaagacaacccctcatgaccgtttgatcttcgtcgatctgaacatgcacgcctatccctatgttccgggcggaccacatgattggcgaacgatcggcatcaacacgcttcgaaggttcgaggcacaaccaaaggcggcgaccctgccccccgccgtggtgttcatcaccaactatcctgaccatcaccaccttgatactcaggttcctgatgctggagccgccattgagggcttcaagatcgatgactatcggaccggtgagatcctgaccctgtcgcagaagatagggatgcgtgtacgtaatcctgagatcgaggcactcgtagcatcgatccaggaacatatcgacctgccttccacgtttgagggggaaattcctgggctgccgtcaaaccgcctgctcatcgggcaccgatatcagatggacgatggcgtggtgggcacgttgaaagacgcctgtgtgatgagcgacaacggggaggtcgcgttgattattgctcgggatgaaggcggacaagcgatctacaccaaccagctttcgcctgaggaatttgctgcttggaagcgctatccagagacgttcttcgggcagatccgccaaggacctggcccgatcaacgatcctattgaactctatgacagattgaaagctacttacatccacaccccgaaagagaagctgcttcaattcatgggagaacacggcgaccaatttgctgcactcacgcagccggagctgttggatgtctatgtgcaaggcatggtgaacgccgtgatggagcgggcgggggcgcaagaagtcccggtgcatatccaaaggatgaagccgccgccgactcgaactatttag

SEQ ID NO: 513880 - DNA, 1206 bp, Stenotrophomonas maltophilia
atggataagatttcgctcaagtttgaagagggcctgttgctgccgggaacttacatcataagcaaggaagacttcattgcggagttctgtagcagtcccgagaagaccttcggccattatcaagagatggctcgctcgaaattcctcaagccattcctggatatttacgaatgggccgaggaggctggggcaacgtcaattgtcgtcggagggtcattcgtatcgcgcaaaaatgatcccaatgacctggatgtagtgatctttttcgccacatcttcgcaggtcccacacggccgggaacgctacgacatagatggcctcatgctcgatgtgcaacttcttgcggaggaccagcccgagatcgctagtgcataccttgaattactggggaccacccgatccggcgctaggcacggcttggtccaggtaaagatgcacagctctgtgcaaaccttctacaggcctgagcagtcgtcacagagccttgagatagtcaaggttgcatacttgggccggcgctggtcgaaacagcagacaacgaagggggttatcgtaccgttgcacgggattcgaacgcatgcggacggatggctaccacgcctgtgtctatctgcgagcacgtcaggatgggctgttgctccctatgtgtacgggtatcgatctgcaaacgtccttcgcaatgaggaggagaaggctgaaatcgttgaggggtttagatcctggctgattgatgtccgaaaggaatatgagggtccaatttccatcgtggcgcactctttcgggagctacatagtgggtcgttacctgtccaatgccggtgatatttcggagaaattcgagtgcgtaatcctgtgcggttcgatactcacaactaatttcgattggggtgatttcattgatcgaggcatcgtaggacgagtcttgaatactatttcagaagaagatgagtgggttaggtatattccagacggcggcatacgttttctggcgaaggacgatctgtttggcgccgccggaaaatctggcttcgtcaaggagcatcctcagctgtgtcaaattcgtagcgcattgctgactcataacaatgtgtttcgtgaggacgtagtgaccgcccaatggctaccctatctggaagcatcgaagggagctctagagcaaaaggccttccagctcttgctagaaaggcttaagtccgagactatgtaa

SEQ ID NO: 513881 - DNA, 291 bp, Stenotrophomonas maltophilia
atggcattcccgaccgctgtaaacgaccagatcaccgattcggtcacccaggccaacaccaaggtgctgggcgacgcgcccgccgtggcagtgggcaatctgtaccaggccaccgcacaggcgctggccaatgccgcccacaacgccaccaacgcgcagcagcagtcctacgtcaccgcgcagtcggccaccaccatgggcgtggccactctgtactcgatcgataccgccaccacggcggtagcgagcaaggaaatcctcagcacccgcgtccgcggcctgggctcctga

SEQ ID NO: 513882 - DNA, 1053 bp, Stenotrophomonas maltophilia
atgatgcacggcgtggatgagctcgccccggttatcggcacggcggccgcctgtcgagccgtcgggctatggcgcggcgcaccggcccgaagccgagcgcggtcacaccgcttcacccttcacggaccgcaccctcgccgcgcgccgaggcctcggccaccgctggcgctcgacgccctcgagcagcaggcgctgctcgaggtgctcaacagcgaacgcttctgcgacacggcgccggcggcgatctacgccacgctgctcgacgaaggccgctacatgggctcggtgcgcaccatgtaccgggcgctcgccgccgatggcggcacgcgcgaacgccggcgccagctcagccacccgagctacgtcaaacccgaactgctggccacctcgcccaaccaggtctggtcctgggacatcaccaagctcaaggggccggtcaaatggacctgtttccacctctacgtgatcctcgacatcttcagccgccaagtcgtgggctggctaatcgccgagcgtgaaagcgccgagctggccgaacagttgatcgccgagaccgtgtcccgccacgacatcgcgcccggcaccctcacgctgcatgccgatcgcggcgcgagcatgcgctccaagcccgtggccgccttgctggtcgatctggacatcaccaaaagccatagccgcccgcacgtctcggacgacaacccgtattcggagtcgcaattcaagacaatgaagtaccgcccggacttccccgcgcgcttcggcagcctcgccgacgcccgcgcccactgccagaccttcttcgcctggtacaacaccgagcaccggcactcgggcatcggctacatgacgccgagcagcgtccattacggccaggcacaagcggcgcatctgctccgtcaggacaccctcgacgcggccttcctggccaacccgaaacgtttcaaggggcgccgccctgaacccccagagctgccgagcgccgtctggatcaacccacccgcaacggagaagaacgacgactcgaacatcctggcttccgcagtaaattcatga

SEQ ID NO: 513883 - DNA, 510 bp, Stenotrophomonas maltophilia
atgacgaccaccactcaaccccaggcatccatgcacattctgaagacctctgccgatccgctcgtctcgcaaggagcccgtagggcgactgaagagacgagcggatcggcggcgccgaccaagccatccggtgacgacaccgaggtcgtgccacgcgcccgacgtcggcagttctccaatgccgacaagcggcgcatcctcgacgcggtcgaccgctgcagccagcccggcgaggtcggtgcgctgctgcgccgggagggcgtctattcgtcaagcctgagcacgtggcgacgccagcgcgaggccgccgagttggccgccttggcgccgcaaaagcggggccccaagccagatgtcgccgccgtcgaagcgcgccagattgcgctgctgacgcgtgagaacgaacgcctcaagagccaactcgacaaggcgatgctggtgatcgaagtccaaaaaaaagttgccgcattgctgggcagtccgatcgacgacacgcacggcaaacaatga

SEQ ID NO: 513884 - DNA, 405 bp, Stenotrophomonas maltophilia
atgttcgcccggctcagcgggctcgatgtaatccaggatgagaccacgatcctcaacttccgtcgtctgctggaggagcatggcctggaggcggtgaatgcgcaccttgcgcgcaaaggtcagagcctgcgcgcaggcacgatcgtggatgccacgatcatccacgcgccgagctcgaccaagaacgccaccaaggcacgtgacccggaaatgcatcaaacccgcaagggcaaccagtggcacttcgggatgaaggcgcacatcggcgttgatgaattgtccgggcaggtgcaccacgtgaaatacacggcagccaatgtcagcgatgtcaccgtcaccgatacgcttacgctgtttgcgctatccaacttgtggatgctgcgccggcagctcatgccggcatag

SEQ ID NO: 513885 - DNA, 246 bp, Stenotrophomonas maltophilia
atgcagctgacatttggcgacgccgaaggcttgggcaagcgcatgcagacccgacgcgagatcttcctggccgagatgaagcaggtagtgccgtggaaggcgctgctgactcagatcgagccgcactatccacgctcaggccgcgcgggtcggccgccgtattcgatggagacgatgctgcgtatccacctgctacagcagtggtacgcgttgagcgatccaggcgcggaagaagcgctgcactag

SEQ ID NO: 513886 - DNA, 177 bp, Stenotrophomonas maltophilia
atgccgccctgctgcatcgcctggctggtcatgccgtcgctggaggcgccttcgagcaggaacttgttgaccagggcggtggaccagaacgcggtcgagacacggatcaccatatccagcgcgatcgataccatcgctgccagtaccgccatcgagaacatcgtgccgatgccgtag

SEQ ID NO: 513887 - DNA, 177 bp, Stenotrophomonas maltophilia; identical to SEQ ID NO: 511045

SEQ ID NO: 513888 - DNA, 255 bp, Stenotrophomonas maltophilia
atggcgccggtgggattcgtgccgaccaaggtcggcacctacctgagcaacgtcatggcgccggtgggattcgtgccgaccaaggtcggcacctaccagagcagcgtcatggcgtcggtgggattcgtgccgaccaaggtcggcacctaccagagcaacgtcatgtgggattcgtgccgaccaaggtcggcacctaccagagcagtgtcatggcgccggtgggattcgtgccgaccaaggtcggcacctacctga

SEQ ID NO: 513889 - DNA, 1200 bp, Stenotrophomonas maltophilia
atgcgcatcaatcccgcattcgatctgcacccggcacaacagaacgatccggcgaagatcgacaaggtcgcgcgccagctggaaggccagttcgcgcagatgctggtcaagagcatgcgtgacgccagcttcggcgactcgctgttccccggcgaaaacaagatgttccgcgagatgtacgaccagaagattgccgaggcgatgacccgcggcaagggccttggcctgtctggcatgatcagccggcagctgtccggccaggccgccgatggcccggcgctggatacccgcgtggacccggccaaggccagccgtgcctatcagctcaatgcaccggccaagccggcaccgtcgctgccgctggaagacggcagccaggccgtgcgccttctgcagcagatggccgccggcgcgcagtccggcgcacacgcggcggttgcaccgatggaacaggcgctggacctgatcgccgggcgcgaaagcagcagcatgcaccgctcgctgggtaccgaagatccgtacatcggcggcctgcaaggcgaggactgggctgccaacagcgaccagtgggcggccaccgccagcaaccgcggtacggccatcagcccggccgatgcgatggcgacccgtaccgccgtcgcccagctgggcgaacacaccccggaaggcttcgtcgccagcatctggcagcacgcgcagcgtgcggccaaggaactgggcgtggatgcccgcgccctggttgcccaggcggcgctggaaaccggctggggcaagcgccacatcaagcatgccgacggcagcacctcgcacaacctgttcggcatcaaggccaatggctggaacggccagcgcgccgtggccggcacccacgagtacgtcgatggcgtgcgccgcaacgagaccgccagcttccgcgcctacagttcgccggccgagagctttgccgactacgtgcgcctgctgaagaccagcccgcgctaccagcaggccctgcaggccggcaccgacgtgcagggcttcgcccgtggcctgcagcgcgccggctatgccaccgacccgcgctacgcggccaagatcgccgcgatcgccggcggaccgaccatcgagcgcgccgtcagcgccgtggccgatgccggctcgcgccttggccagaccttcgccagcaccgcaaccgcggcgctgggtatcacccgtcgttga

SEQ ID NO: 513890 - DNA, 1083 bp, Stenotrophomonas maltophilia
atggccgtaccggcctgctgcaggatctgggtgcgggtcagctctgcggtttccttggcgaagtcggtatccttgatgcggctgcgcgaagccgacaggttctccgacgaggtctgcaggttggccacgaccgaggtgaagcggttctggatcgcgccgaggtcggcgcgggtgctgttgatcgcacccagggccttgtcgaccacttccattgcctgctgtgcacccttcacggtggacacgtcgatcttgtcggcgaactgcttgcccgggaccggggttgccgcggcgaagccggccagcgagctgccgatggcagtgaaagcgcccgcgttgttcacgctgtccttgaccgaggtcagggtcagtgcgccggcggcatcggtttcggccagcacgccggtttcgccgatcttggcgttgatggcggcagcgacggccttgccgtttgcagcggtgttggcggcagcgtcaccgacgctcttgaccgtcatggcgccgaagttgaagacggtgcccttgctgtcggtgatggtgaacgcacccactgcggtgtcggtgtcagcggtaccggcgattgcggttgcggtaccgctggagaactgtgcaccacccagggcgttggccttggcatcgatggtcttgtcgatggcgatggcctggccggcattggcgccgacctggaacagctggctggagaacgtgccgtccagcagcttggtgccgttgaagtccgactgcttggcgacgcggtcgatttccgagaccagctgggtcacttcagcctgcagcgccttgcggtcgctggccgagttggtggcgttggacgcctgcaccgacagctcgcggacgcgctgcaggttgttgccgatttcggtcagcgaaccttcggcgacctgggccagcgagatgccgtcgttggcattgcggatggcgacgtcggtaccgcggatctgcgtgccgaagcgctcggagatcgccagaccggcggcgtcgtccttggcgctgttgatgcgcgaaccggaggacaggcgctggatggtggtggccagcgagctgccgctggtgctcaggttacgctga

SEQ ID NO: 513891 - DNA, 435 bp, Stenotrophomonas maltophilia
atgaagggattttttgcagctgccgccgtcgtcgctctgctcgctggttgttcggccacccgccccatcgcgacagaggtggcaaagcccgtcccggccagtcagatcttcgcctacgcccagcccgccgctgacaccgggacggtcatcgtgacccgggatgttggcttggccggatcaaagtgtcctgtcgccttctacgtcgacggcaaagtggcagcacacgtagacaatgggcagaccatgacggtgtacatcccttcgggcaagcacatcctgggtgccggcccagcgggcaccggtgtgtgcggcatcgtgagccgtaccgcgcatatgcgcgaagcggctttcgacgttgtcgctggagaccgtctcaagctgcggctcggcttcacccgtgatgggacgtaccagatcacaccgaccgcactctga

SEQ ID NO: 513892 - DNA, 675 bp, Stenotrophomonas maltophilia
atggtgagggagccacgaaggacaggtatcgccgctgcgctcctagttctattggggaaatgcgtcgctactccaaaaggcaatctgggtgcccctccaatggattcccatcgcgtggagaagcgctttgcggacatcgaggctaaggtgcagtcaattgcgtcgagactggacgctagggacgcgccccgcctggctgttgtgccatctttatttaattttctcgtatgtgcattcctcgctctgttgctgacgggtgcgatagtcctaaggggcacaaaggactggtttgaattttgctcatatttgatgccggttttggctgcgctgattggcggcgctggactatacttcactaaggcggagcatgaagtttctgttgcaggtaagcgcgtggtattgaaatatgatgccatttgctatgcactatcagtgcttttgctgatagtgggtgtctgtagcttccttgtttacaaagagaagatacttgcagttgcaatggctgctttggtcccgtttgcgttcgttcacacattgacgggcgtctggattaggtcaagagcaggcaacaagttcaagttcgtcttttggttctgggtcttcttgaccgttatccttgcttctaccagctattgctggattgagtgggtggctaaatccctagtctttcggtga

SEQ ID NO: 513893 - DNA, 966 bp, Stenotrophomonas maltophilia
atgcgtaaaactcttatcttcggcaacggattggggatggcactcgaccccggcctttttagcttggatgacgccatcggccgtgcttgggacggagtggggatcttcgaccaagaaacgcgtgcgctggtcagatgctgcctggtcgatgatggagacaccgagcgccctcacggcgaggatgatttggacgctcttcagttggtggtctcatcctgtgacttcctggatcggatgagccgtggcggcgctcactggctcagtcaacatggccaacgcttccccgcggcagtgcgcaagtttctttaccagacggcgctccaatttcatcagcgagaggttgtcctgccaatcgagttcgttgggccattggctgccttccttcaccagactcagtcacacgttgcaacgctcaactacgacaatctgctgtatcagcgaatgattgaggcgcatgtcttgaacggctatggcggcgccctagtagacggaatgctttcgaacggcttcgctcccgagaaccttgagcgcaagtgggggcggacgttcggctactaccttcatcttcatggatcgccactctttgtcgatcaagacgaaactgtgcgaaagctgactcaaggcgagcttgggggcgatgacgacgtagtcggatcccacattgtgctaacgcacgtcaagcataagcccacggtcatcgcagcgtcacccctgctgcagagttattgggaacacctcgagctcgccttggcagagtccgaagaggtgatcttgttcggctactcagggctggacacccacctcaacgagctgctcgagcggcgctcgccgaagagcgttcgggttgtcgagtgggtgggggctggctcgcaagatgagcgcgagaacttctggagaaaggcgctcggcaaggatgcagtccttaaccagatggatagtatcttagcgtttacggaatgggcttga

SEQ ID NO: 513894 - DNA, 1728 bp, Stenotrophomonas maltophilia
atgcctcggatccggcacattgctattcgcaacttccgctccattcattctttggactggtctccgtccgctggagtgaactgtcttattggtcccggtgatagcggaaagtcaacgatattggatgccatcgatctctgtctgggagcgcggcgatctgtttcatttggcgatgcggatttccacgggctgaacgttacagtcccaatcatcattcagataacgttgggcgctctctccccgtcactcatggacctggatctttacggggacttcctcagaggattcgatgggacgactaaggtcctcgaagatgagcccaaggctgggtgggagactgtcctaacactacagctagtggtcaatgcagatcttgatccctcctggtcgctgttctccgaccgcgccactcgcgatggcattgaacgaagcctcccatggaaggagcgcgctacgattgctccggccaagatagggcagttcgctgcgtccaatctctcctggagtcgcggatcggttttgaaccgcttgacggaggagaaggccgaattgggagcccaactggccgctgcaggtcgcgacgcacgtagtagctttggaactattgccaccccacgccttgccaagaccttgggagtggtgcagaccaccgcccagagtctcggtgtatctgtcggcaccaccccacaagcactgctggatgctcacgccgtgtccctgggcgaaggggcaatcgcgctacatgatgagcaggggattccgcttcgctcgcttggaacgggatcctctcgccttctggtcgcaggactccagcgcgcggcggcgatggccgctcccatcgttcttgtcgacgaagtggaatatggcttggagcctcatcggctaatgcgattgctggactcacttggagccaaggagaccacaccgcccatccaggccttcttgacgagccattcaccagtagcgctgcgcgagctatcgggagaccagctgtttgtcacacgacagcattcccagctccattcagtcacagtcgcaggatcgtctgacgagatccaaagcactcttcgggccgatcctgaggcgtttctggccaagtcggtcatcgtctgcgagggcgcaagcgaagttgggtttgtccgagggctggacctctggggtgttgcagctgagcaaacgtcgttcgccgctcttgggggctcttgtgtcaatgcgggcggtggtactccggacaacgcctttgcacgtgcaacagcgttgatgaatctcggctaccgtgttctggtcttcatcgacgcggacaaagaggctaagcctggtgtggcagaggcttttgcctcaacacttggggagcttgtcacatggcgcgttaacctcaccctggaggatgagctcttccggagcctgcccgacacatccattgacgcgctgttggcgaaagcaaaagagctggttggcgaagacttgatggatcagcacataaagactcgatctaatggaaggttggcgcttgcgagcattgaagcccagagacctgcatcgggttattccagcgagactcgagagatcttgggggcagcctcacgtatccgcggtagcggatggttcaagtctctgactgcctatcaagacatcgtccttaacattgtttcttccggctatccatccgccgactcgggcttcaaatcggttgtggatcagctctggagattcatgcgtgccacctga

SEQ ID NO: 513895 - DNA, 1419 bp, Stenotrophomonas maltophilia
gtgccacctgagatcgacctctatgccattcagcgcggctccattaccgcgcccgccggatgcggcaagacggagttgatcaccagctcactcgccgccagacctccaagcaaaccagttttgatcctgacgcacacgaacgcaggcgttgcggccttgcgttctcgcctgaaaaaggcagtagttccgtcagcatcctaccggttgtcgacgatagacgggttcgccatgcggctcataggcaagttcccgagccgaagtggtcacgcgaccaatcttttggagcttagcaaccccagcgccgactaccctgcgatccggcaagctgcgctgaacctgctggccgccggtcatctactgcaagcgcttacagctacctatgaccgactttgggttgatgagtatcaggattgtaataccgcacagcatgccttggttatcggtttggcctcgatgttgccaacatgcgtgctaggcgaccctatgcaagccatcttcggattcagaaacaatcggctcgtcagttggcagcatgatgtgcaagccgtgtttccagcttctggagagcttggcacgccttggcgttggcgaaacgcggggactgagacactcgggcaatggttgctgcaggcccgtgccgccttggctgcgggacagcgagtcgacttgcgaaccgcacccgagcaggtgatatggaaggggcttacgaagggcaacgaagcgatcgagcggcggaccgctgcgaggtcgaatgcaccaggtcaaggaactgtactcatcattggcgattcgataaatgttcaaggacgtcatgacttgaccagccaaacgccaggtgccgtggtcgtcgaacgagtggatcttcccgagctaacagcttttgctcgctcttttgatctctacggcgcaacggcactgcaagatcttgtgttcttcactgcggagatgatgactggagttggcgcgacagccctcttgagccgcgttggaagcctgcgtgccaacagggcgaaaaatccccctacgattcccgaggcggccgccgtagcgtttgaaggcgatcgcacctggaggcgcgctttggagctggttagcgccctcgccaacaatggcgacactcgcgtgtatcgaccggaactgctgcagtgctgccgatccgccatggagtcagcactacgcggagagaagacatttcttgaggcggcccatcatgctcgagagcgaaatcgacatttgcgctccccaatggctaggcgcgcggttggaagcacgttgcttctgaaggggttggaggccgacgtggcagtcattctggaaccggagaaaatgactgcccaacacctctatgtcgccctgaccaggggcgcgaaagccgtcgtggtgtgctcgtctactcctatcttgacaccgcgccaatag

SEQ ID NO: 513896 - DNA, 222 bp, Stenotrophomonas maltophilia
atgtggcgtcgaaacggattgtctctggtgttacttgcattgatggccgtcttcttggtcgcccaggcgttgaccggatggcaggttcataacgacgagctcgctcagcacggggcccacgctctaggtttcttttcctacttgggcaccggccacttcagcagcaccaccttcgagaactgggaaagtgagttcctaagatgggcatgtatgtgctgctga

SEQ ID NO: 513897 - DNA, 432 bp, Stenotrophomonas maltophilia
gtgccatttcgtgccgtgggttacatgagccaagccgtgcagccttggaaccgcgagcacctggatgcattggttcagcgtgctgcttccttcaacctcgaagcggaggtcacgggagtgttgcttttcgatggcatcagtttcctccaatacctcgagggccccgaggaaggcttgaagcgcgcatacgaacgggtgctctcttccccgttccattcggaaatcatcgaacttggccgagggaccgtcggcagccggcttttaccctattggtcgatgcattggctgctggctgaccccagtcagcttcgctccgtagcaagggcggactggacagggttcgtaaggtcgaacgaagcatcacgtcgccggtcgaccgcgatggaccggcttcacctgtatctgcatccctacattgcccgaccggaatag

SEQ ID NO: 513898 - DNA, 744 bp, Stenotrophomonas maltophilia
gtgagcgacgaagatctggatcagaggattcgccaaatcgatggttggatccgggccttgacgagcgaagtgcacttcctggacgaacgggtccatttgctgaagcctttggtaaaggacagtgatgtgcaggctgccatgaaggctaagcttgaccattcgcaaggagtggggctctggaaccacttggtgccactcttgggtcaggactacatccgcgagcttgccaggctgtttctcgacaagggagagaagaccggtagcctcacgaacatctggcgcaagcttcaggtgccgggggttcgcgagcgctatcgggacagctatggcggtatgttcgatgatctagaagaagaaccgattgagggcatcagcgaagcgacgagagaagaatggcggcagcgacgacgcgaccgaagcaaggacgtttttgacaaagagtgggccgccctctcagtagccatggaccaaatttcccatgatcctgtgggcaaaagcgtcaagacgttccgtgacaaaaggcattcccactgggagatgcagttgattggtcaggagcctgcgccctttgacatcggcgcactggacctcacctacgacggcgtgtttgagtttggcaggcggtgcgaaaaggtcttggcagatcttggtaagttgctcacccatacgcactgggaaccttccgagttcagtgagatgagcgccgagcagggaagggcactttggttgaccttggctaattga

SEQ ID NO: 513899 - DNA, 1407 bp, Stenotrophomonas maltophilia
atggagcctatgcccttagcgcttttcgccgtgttcgccctctccttgcccagggggttggggttcggtgatgaccttcccgaaagcgcgtggaagagctcggatgggatcacggtgtgtgcgctgacgaaaaatgtgatcacgggtaacttcggagtgcttgtgatgcggcgccaagtggacgatgtctgggttgtccttcgcagagaggcaggcgcctttgatctgtcgcgcgccatggagatcatcagggatgcttgcggagaggccgcaggcaagctgccggtccctcctggggtgaagcgccgtcctccacttgtgggcaagggtgctagggagttcagcgaaattttcaaacttctcgcgcacccctgcagacggcgcggggcatcgatgctcaatgagctctacttggcgatgccaaacccagatgccaattgggccagcgactgtcgcacaggaaatttccacacccgactctgggaagcgcttctgtttgccagcctgaaggaacagggcctgtgggtcgatcagaatcatccgtcaccagatttctatgtgcggaatcggacgggagacgacgcatggattgaggccgtcacgactaaccccgtagtgccttacgatcacgcccattctcaagaggccgagccacctttgaaccggcgagaaagaatgctgggaggggctgccgagcgttatgcaaagaccttgaagaacaagttggacaaagcgtatgtgcgcatggatcacgtcgttgggaagcccttcgccatcgccattgcggatttccatgcgcccggttcgatggtttggagccgtgtagcgctgatggcgtacctctatgggttctatgcgaaagagatagaggtgcggggcaagcgggtggcggtctctcaagatgtgcatgtcctgcccggcgctcccaagatcccggcgggcttgttcttcactccggagggtgaagagttgtcggctgtgatcttcagccaaggcgcgacccttgcaaagctcagtcgcgtcccttactcgttcgatcttcccgcagacgactaccgttacgttcgctttggagaactcagcgattttacgcccggtgccttgcgcggggtgccgttctgcatggacgtaaacacagacgaataccgcgcgctttgggcaccctatgatcacgagccctggacggcagagatggaggtgttccacaacccgaacgccaagtatccgttgagtcccgcgcttcttccagaggccacgcactggctttcggttgatggcgtgctggactgcaaagccttctttcagaacactgttctgaagtcaaaaaccttgattcaaggcgtagataggcctgttccgactgtggacgacctgatctttagggagacaaccgaaggcgaagaatga

SEQ ID NO: 513900 - DNA, 1368 bp, Stenotrophomonas maltophilia
atgagcagcgtcggtcaaaccgtgacgaacggtggcatgcaggccatgcgcatcctgatctgcgcgcacgacttccagcccaacccgtcaccgcaatcactgcgggtgacccagctggcaagcggactggccagccttgggcatgatgtccatgttctgacccggacatgtggtgccggcatgccgcagatagaggacccacccggcctacaggtccatcgggcctcgccgcagggcgtcgaagcactgattgatgcggtctcccgcatactgcgccgtctgcggcgccggaagtctgatgcgggggcgtccccgtcctcgcagaccgcttcatcaaccgcgccgatggcaggaacggcaacgttgaaccggaaggggcgcgcgatcgcgcggttgcgctcgatcctggatgcgcggatttttccggatgggcgctcgcgctggattgggggagcagtgcgccatggccggaagctgctcagcgactggtcgccgcaggtgatcatcggatcacatgagccggctgcggggttgctggtggcatcgatgctttcgcgcgagtcggcaattccgtttgttgccgaactcggtgatccggtactgacctcctacaccccagagcgctggagggcggcgtcgctcgcgcttgagcggcaggtttgtcacgaggccggcgccattgtcgttacgtccgaggccaccgctgccctgctgcaggagcggcatggtccccggatcgcgccgctcagcgtgattccgcagggtttccccgtggcggacgggccgatgcctgacgtcgccaggtcagccagcgggttgcgattggtctacacggggcgcttctatccgttccgtgatcccatgccgctggtccatgcggtgctggcatcacctggttgcacgctcacgattgcaggccctggcctgccaccagaactggcgagcgcatgtgcggcgcatccgcaggtcttgcggtttgccggaagcctggaccattcacaggctatcgagctgcagcgcggtgccgacgctctggtcaacatcggtaatgccggcatgacccagatcccgggcaagcttctggagtatctgggttcggggcggccggtactgcatctgcagccggatgccaccgatcccgcagccgcaatcatccgcggggagcgctgtggatttctcgccgccaatgaggtcgctgcgatcagtgcacttctgcaagagctgctgcagcgcaagcagaatgggcagttggatgcgggcctgcgactggggccggatgctttcgccgagtatcgttgggatcggctggctgaacgcctggccatcgtatgccgcgatgccgcgatggtggggcaacggcaagcgtag

SEQ ID NO: 513901 - DNA, 1959 bp, Stenotrophomonas maltophilia
atgaatccaatcatcggcaacaatcaggcggcgcatctgatcgacatttccgcaatgctcgacgctgtgctcggctgggcgtcggacaagctgggcggtccggttgagggatacagcacggatctgcttggcagtgacctgacccgcttggctgcgcactcggcgcgccgcatcggctgggctccttcccgtgagccggatcgcctggacattgcgctgatcgacggtaccgagccgggtgcccagcaggacaacgtcgctgcgcccgccgccgaaaaccgcctgcatgtgttctttgccttcccgggcatgtccggccacaagtcggacgagctcctggccggctactcgcaactgttcaaggccgagatgatggcagcgacctgccttgaagcgcctgacgctgcggcgatggtgctggcggtgatcacctcgtcgcgtgcggtgtcgtctgcggagacctggtgggagttcgcagacgcactcaacaccttcggctcgttcaagctttccgatatgtcgcgcaagctgcagtcggccacggccggcctgaagcatgccgccctgcttgccgacgaaatggtcaacgaaatctcgacgttggcagtcgagcgcacccgtgaccggcactcgctgtggcgcatcgcccgcaatctgcgccaggaagtgctggagcaccgattccgcaagctggaacgaccggtggttacaccgcgcgagggttacttccgcagcgctgccggccgcctgctcaaaaatgcaggtatgagccaggccaacgcgcatgccgataccagcgtgctgcagtcgctggctgtaagcgcggtgcgcacccgatgcgccctgcttgttgccgaggaccatacttttggtgggctcgagcagtgggtctgtgattttgcacggcacctgcataccaagaacttcgtgccttacctgatcgtgctggggtcgccctcgctcaacagtcgcatcgcgcagcagttcccgggcgagctggtgtacctggatggtcagtcggcattgctgggcgagacggtcgcacgtgggcgcttcgagtcgctggtggtcagccatgcctacgatggcctgcacacgatcgaacccggttgcaaggtggttgaggttcttcacaacatctatttctggcagctgcaggacccggggctcgagcgcgaacgtgcccgcgttgacgagtacattgccgtttcgagcgaagtggccgattacgcgtgcgtgtaccagaagctggcgcgttcgaaggtggcaaccgtgccgcatggcttgaacatcgtcgacctgtatcgtccgccggcggactacctgcgcagggcacgcggacaacgcgatgccttcaggatcctgttcgtgggcaatctctatccgcagaagaacgtgatctgcctgcttgaggcatttgccaggctcaggcaggaagcgccgcaggcgacgctgcgcatcgcaggagccccggctgaatcggggaacgcggccaaggtggaggaggctatccgccggctgggccttgccgattcggtggaactgctgggctcgctcaagcgccgcgagctgagccgtgagtattcccatgcacacctgttcgtgctgccctccctgttcgaaggctatgggctggtgaatctggaagccgcccacttcggcctgccaatggtgctgtccaacactggctgtgcggccgagctgtctgcgggaacgccggcgtgccgggttgcacccatcgcggtcacgcacgacaagctcagccataaggaagtcgcggagcgcagccgtgcgccggccgagaaggatgtggcggcgctgtacggtgagctgtcgcatgtcatgcggaattatccggagttgatggaagcgggattggcgatgatcgaagtgcctccgttcagcacgctgcagcaggctggtgatgcgatgctggacgtcgttacacgggcgtcctga

SEQ ID NO: 513902 - DNA, 1134 bp, Stenotrophomonas maltophilia
atgacaagcatcgacatcaacgggcaggactactgggaatcgcgtttccagcaggactggatccagaacgaaggccagaagcaaagccagttcttcgggatggttgcctgccgcctgttgccggcctggctggtggatgacgtgaagcgcaatggcttgggtctgtgtgactggggctgtgcgatgggcgatggcacacaggtcatcaagtctgagttggggcttgatcaggtggctggcctggatttctctacgtccgccatcgagcaggcacgccgcaactatccgcagatcgcattcgccaccgacgatctcctggccgaaggtgtggatctcgactacgacgtgatcttctcctccaatacactcgagcatttccacgaaccctgggacgcggcggccaagctgaccgcgcatgcgcgcgagtacttcgtgatgctggttccgttccaggaaccgcttgaagagcgtcatgaggaacatttctacagtttccactggcacaatctgcgccgcgagcttcccaacggcttccgccttgtgcacgtgggcgtcatcgatgtcgggctgctgccggatccgcagtacagcggcaagcaactgctggccgtctatgcctccgaatccgcggttcagcgcgtcatgccggagctggtcgatcaggggctggacctgctgggccgctatggccatgcgcatgatcgcctggtgtctgttgcgatggagcttgatgccaccatccggcaacgcaacgagctgggtgcgaagctggacgatgcgctgcggcaaggtgattcgatccgcgcggatgtggagcgcctcgctgttgagcaggcacgccagttgaccctcatcgcggatctggagcagggccgcagtgagctgcgcgagcgggtattggaggtcgagtcgcagttgagcaatgcacagaccgctgagcttcaagccaccttgcgcgcggaggctggtgaacgccgccattccgatgccgagcgccggcactccgaggcagagaaggcattgcagaacctgcagaaggagaatgaggagattgctcgtcgcctggatcaggtgtatgcctcccactcctggcgccttaccgcacccttccgttcaatccgtcgccttttctga

SEQ ID NO: 513903 - DNA, 171 bp, Stenotrophomonas maltophilia
atggacagcagggaacgacggcagcggattgaggcattggcccatcagatatgggaagcggaagggcgcccggacgaccagcagcagcggcattggcacatggccgagcgcctggtgaaagccgagattgccgctgcgcgcgacgaggagggaaccgatggccagccgtaa

SEQ ID NO: 513904 - DNA, 222 bp, Stenotrophomonas maltophilia
atgaaattgatggtcatcggcgccagcaggggcctgggtcgggcgttcgtggaaggcctgtgcagtgcgggcgacaccgtcatcggcgtttcgcgcagccgtccgcgcgaccttgaatgccccgagggtgtcaccctgcagtggatcgaggccgatctgtcccaacccaccctggctgcaatcacatcgcagcgcaggcaccggccgatctggatgtgctga

SEQ ID NO: 513905 - DNA, 1008 bp, Stenotrophomonas maltophilia
atggcggaaacggaccggttcagtcgaaccacggttatgactctggcaaagcgggcagctaatcagtgctcgaacccagactgtcgggcgatcacaagtgggccggccgatagcgctgacaaatccgtgaacgttggtgaagccgcccatatctatggggcgaatcctggttcggcacggtatgacgcaggaatgctgccagcgcagcgcagctcgataactaatgcaatttggttgtgtggaaactgccacaagctggtagatgacgactcatcacgttacccggcgggtttactttttgagtggcaacgcgagcatgagaaacacataggcctgcaggtcggcaaagcatccgcgcatctcagaaatcggtatgagaagcgccacctccagaagtttggcgagatcagctatgcagccgagcgtttgattcttgagaaagagccctactgggaatatttgctgaccgcgcaggtgatgcgcgatgagatccagccatatctgcgccgtgcccacgcattgcggcgagggttgtacatcaagcagtgcactcgtgtcccaaaaaagggttcgttctactggatttcggatcgctcgtctgagatcggcaatttggcccgagcgctcgccgcgcttgcgaccgatgagctcgccacggcgtggggagcccccggtgttccgggcgatgatgagctcattgtcgagacagccaggcttttctcggagctctgcaaaagtgcaatcgagatagaggagaacataagattttcacgcctcgattccgaattcgagagagtgcagaatctattcattggcgtcacagttgggcttttggagcacgtggagcgcattccgaactttctgctggagactatctcggcaaagcccacttcagggcagtttgagcttttgttaaagatcgagctacctgaagggtgggccgaagaagtatccgaagcgattgaacaagcccgccaaagaatcatcgccagcggcgaaattgactag

SEQ ID NO: 513906 - DNA, 501 bp, Stenotrophomonas maltophilia
atgcagtcctcccatggcttccgcaccgccctgatcccctctggctgggtccagacggacgagcggtgggcgctttggtacaacggccgggagacggccagcgttacccctgacggtcgccccggagtgcgcctgtggatggaaggccggaagatgtggcacgtgaaggaagtacgcgcggccaacgtccggcaggcgaagcgctacgccgagcgctggtgcgccgccaggctctaccccgacctgcctctgtgtgaggccgttgcccgtctgaccgacagcaccccgatccagccgccgccaccgatgcctgggctgccgccgacccgcgagcagcagcaacaggcccgccgcttggccgaggcggggacgagggagctggagcgagttaaggcagcgcttgatccaatccgtccgccggcggcgacgaagccaagggcgagggacccgcaaaaggcgcgagtgaccgcagcgctgcgggatctacggcgcggggtctga

SEQ ID NO: 513907 - DNA, 756 bp, Stenotrophomonas maltophilia
atgagccttgcgcagcacgccctcgccctctcagtccgtcaggtagatgcagtcacagccttgatagccgagatgcggccaccgctcgatccaccgggtcggcctcaatgcgcgctgttcctcacaatcgcggagcagttcgacgccacggtctgcctggcgcgggccaatctcctgacccacggggctgtgcatgtccgcgcgatgatcgaggccaccgccgacctgttcatgcttgggctgagagataaccacgtacggcgcatgcaatatgaagaggccaacggcgcaaagcggttctacgagcggatgcttgaatcccaccagctcaccgctgcgaaccgcaagatgatcggagccaatctggtcgagtgcctcgcgcgttacagcccgctgcatgaagagttcaagaaggacaagctctatgaggtggagaaattcactgccaccgggctgcccgagttcatcggcctctactcgatgctgtgcagcttcgtccacaatgacctcaccgctctgtcgctgcgtcaccagcgggacacgccaggaatgatatttcgcgccccgctggacgacgggatagcgttcctgatcctgcaagccgctcaacacgcaatggtgcgttcggccgaatccatcggcgaaatcgcgtggttcccgccgggtcactttgagcagcacatcgatacgatgcacaggctgtaccaggagttggtggacagccgccctctacagcgagccgagactcctgcttaa

SEQ ID NO: 513908 - DNA, 468 bp, Stenotrophomonas maltophilia
atgagcagcttcaccgccaacacgtcacctgtcgccaaacagcagcctgtcactgccgggccgttctggccggagatcgacgtcggcgtgctgcgagagtcggtgcgcgtcgcaggcgatgtcgctgcgccgcgtatgcgggccacggtggtcatggcggttatgtccgtcacgcgggaactggaacagtggcaggcggccaaggtggccgccggttacgccaccctgggcgatgtgccggcacaggaggtcgacggcacatcgcgcctggtccagctgtatctgcgcgccgtgtactgcgccacggcagtggaactgcacgaacgctaccgctcctatgacgctacgggccaaggcaaccagcgtgcagacgatctggcgcccacgatcgatgagatccgccgcgacctgcgcaacgcgatcagcgacctgctgggtacccggcgcgtcacagtcgagttgatctga

SEQ ID NO: 513909 - DNA, 216 bp, Stenotrophomonas maltophilia
atgcgcgttcacgcccagcaaggcgacaccatcgaccagctgtgctggcgtcacctgggcgccacggcgggcatgaccgaacaggtgttcgcgctgaatcccggcctgtccttgcacgggccaatccttccgatggggacgccggtaacactgcctgccctccccccatcccatttgatcgccaccgagcgaccgctgatccagctctgggactga

SEQ ID NO: 513910 - DNA, 357 bp, Stenotrophomonas maltophilia
atgaccgaaccaacctccctcaccggcaccgtaatggtcgccaccggcctcggcctggcctctctggtgcccggcatcgacggcgatgccctgattggcgcctttgccgggggcacgttgttcgtcgtctcggccaaggatctgcccatctggaagcgccttgtgtacctgatcgtcagcgtgatcgccggatactacggcgccggcgaggtactgcgctgggtgccgctgcagtccaccggcatggccgccttcgccgccgcagcctgcggcatcaccgtcacgctcggcctgattgagcgcggccgaaccttcgacctgtcccgtatccggcgcggagggccacccagtgcataa

SEQ ID NO: 513911 - DNA, 276 bp, Stenotrophomonas maltophilia
gtgcataacctgcttgtcgtcgccaccctggtcagcagtctcgccatctgcgtgctgctgattacctaccggcctgggcctgatgcccggcaccgcattggggtgtcgtgctgtgcgtggctgctgatcgcctgtaccggcggccttgccatcaacgttgcattgtttggcgcagccgcacacgtcagcgtatggcagctgggcctgttgcttgtcctactgttggtgacctaccgcgcccgaggcaacgtggcgcgcattctgagggtcgagtag

SEQ ID NO: 513912 - DNA, 636 bp, Stenotrophomonas maltophilia
gtggtcaccgccgagcaactgagtcagatcatgcaatgcccgctgccgcgtgcgcagcgttgggcgcccgcgctgaacgcggccatggtgcgtttcagcatcaccaccaagcgccgtgccgcgtacttcctcgcgcagatcggccacgaaagcctgagcctgtcgcgggtcgaagagaacctcagctacagccgcaagcgcctgccggaagtattcggcaagcgcatcgccgccaccgagctcgacgcattcgtccaccagccggagaagcttggcaaccgcgtgtatgccggccgcaacggcaacggcaacgaggccagcggcgatggctacctctatcgtggccgctgccccgtgcagatcaccggacgcggcaactaccggcacatcggccagctgatcggccagccgctggaacagcagccgcagctgctgctggatgtggaagtgggcgccgcagccgctgccgcgtactggaaggacgccggcctgaacactatcgccgatggcggcgacgtgctggcggtcagccgccgcgtcaacctcggctcggtcacgtccaaggccacgcccgaaggcatggccgaccggatcagccgcaccaatcgcgccttgcaagtcctgggggctgcgtga

SEQ ID NO: 513913 - DNA, 507 bp, Stenotrophomonas maltophilia
gtgatctcccgacgcctggcggcgatcctggccgcgttgctggtgatcgtgctgctgctgggcgttgcggtcgcgctggcgcagcagcgacgcattgatggcattggccgtcaacgcgacaacgccgaggccgagcgtgatgcggccaaacaggagcgcgatgcgctcaacggcgacgccaaagtcgtcacgcgctacgtcgaccgcgtgcagtacgtacgcgaagccggcgccaccatcgtcaaagaggttcccgtctatgtcacgcccgaagctgatcgcgcttgccttgtgcctgctggctttgtccgcgtgcacgacgcagccgccgaaaaccgccccctggccggacctgccggagatcctgatgcgcccgccgccggcactgcgctctctaccgtcgccagcaccgtcaccgacaactacaccacctgccacgccatccgcgagcagttgatcggcctccaggacgcggtgcgccagcggcaggcgtccggccgtgattaa

SEQ ID NO: 513914 - DNA, 492 bp, Stenotrophomonas maltophilia
gtgattaagccggactcgctgcgcacgcacctgctggcggccgtccccggtctgcaggaaagcgccgagcgtctgctggtgttcgtggaggatggaaagctgcaaagcagctaccagcccggcctgtcgttccagtaccaatacacgctggccctgatcctcaccgactacgccggcagccccgattcgctgatgctgccggtgctgcagtggctaacccggcaccagccggaactgctcgccaatccggcccggcgcgacgatataggtttcgatgtcgacgtactcgccgacaacctggtcgacgtcgcgctcaagctgccgctgaccgagcgcgttgtggtgacgccgcagcccgatggttcgttcctgctcacccacgtgggcgaacccgccaccgaggactatcacgccgcgtcgctggccggcggccaggtggtcgacgctgagggcgcgctggtcgcctgcctgcctggcattccccttgtctga

SEQ ID NO: 513915 - DNA, 447 bp, Stenotrophomonas maltophilia
ttggagcagtgggtagaacccctgctggcgcgcctgcagcccgctgagcgcgtccgccttgcccgccgcgtaggtacgcagctgcgacgcgccgagcagcgccgtatcgctgcacagcgcaatcctgacggcagtgcctacgcaccccgtcgcaagccctctccggcccggcagaaggcgggtcgcgtcaaacgcgcggccatgttcgccaagctgcgccaggccaagcatctgcgcgtgcgcgctgatgcgcagcaggtatcggtgggcttcgtcggccgcgtctcccgcatcgcaaccgttcatcaggaaggccgaacagatagcgtcatccgcggcggcccgcgcgtgcgctacgagcagcgccgcctgctgggcttctccgacagcagcctcgccctggtacgcgacgcgatcatggaccacctcaccgccggaatggcgtag

SEQ ID NO: 513916 - DNA, 891 bp, Stenotrophomonas maltophilia
atgtccacctttaccgctgtcgaattgtccaagctgcccgtcccggacctgaccgaacaggtcagctttgagcagtcctacgccgatctgaaagccaccctgtacctgctggcgcctgagtacgccgcgctgctggaatcggacccgatgagcgtgctgctgcaggtctgcgcgtaccgcgaagtccacctgcgggaatcgttcaacgtgcgcggcaaaggcaacatgttggcctatgccggcggcgctgatctggacaacctcggcgccttcttcggcgtggtgcgccaacagatcacgcctgccgagcccaagaccaataccccggctgtgatggagagcgacgtcgaactgcggcgccgcatccagctcgccccggagggctacagcgtcgctggcccggagggcgcctacctcttccatgcgttgtcggcagatccagacgtgcttgatgtgagcgcaatgagtcccacccccggcgaggtgctggtgacgctgctctcgcgcagtggtgatggcgttccctcgtccggcctggtcgagcgcgtagccgctgctctgatggatggcaacgtgcgcccgctgactgacctcgtcactgtccgggccgccgagatcatgcgctacaccgtgaaggcggagatcgtcacctacgccggcccggatgccgccgttgtgctggaagaggcgaaccgccggctgcgcgcctacgtggatgagtcgcaccggctgggccgtgacgtaccgcgctcgggcctctatgcctcgctgcatgttgagggcgttcagcgggtgaacctgatcgaaccggtggatgacctgttcatcgccaatcaccaagccgcgcactgcaccgccttcgacatcgtgcacgtgggcaaccatgaataa

SEQ ID NO: 513917 - DNA, 1416 bp, Stenotrophomonas maltophilia
atgaataagcgcatcaccaagcggctgaccgatgagccagtcgggatcggcgatggcgcgcgcactgtgttcgcaccgacgttcctgggcaaacccacacgccttgtcacagaggtaacgtcgatctatcgccgcgactggcgtggccggcagcggctgtcgcgcgagccccgccacaacctgctggccgactccgacgttctggcggccaaggtcggcagaattggcaccaccggcgtcttcccacctggctggtccttcccacccggcccgttcggcggctggacccgcgaaattgttgctgtcggaacgctggaggacggcaccccctacttcgatctgcgcctggcaggcaagagcgtcgcatcctacgttcgattctttgatgtgatcttccagaccacaccaattgcggctgcacggggcagcatctggacggtaagcgttggtctgcagatcgtcgccggtgacccggaggcaggcttccgtgagccgctgcgccaactggtattggctgagtgcgatcggaacggtcagtacctggtcagcagcaccagcaccaagcccaatccggccacgctgcagcgcctttccgtcacccgaaagctgagccacgaggacgtggccggcatcaagtgctacatcggaatggcagtcgacccggatagcagcgttgacgtgacgttgcgcatatcccagccgcaactggaacccaccagcggcccaacgccgtacattcccacgcgcggcggcgcgcgtaccgtcaccgactatgtgctggacgagcgcaagcagatccacctgggcgaggcgccgccaattggggcgacactggcgtgggacggcagcgtcggtgttgacgtgggcaccagcctgctgccgccaaacgccaccgcgttggaacgaaccgccgaggcggtcaccgcgcgcagcttcgacatcggaacagtcgtcgggctgctctggaaccccgccacctgccccgagaacctgctgccatggttggcatggacgatgtccgtggacacatggcgcaacagctggccgctggcggtgaagcgcgcccgcgtcgccaactcgctgatcgtgcagcgccgtaagggcactgcgcgcagcatcgcggacgtggtggacagcttcggtggcgtggtcgacatcaccgagtggtggcagacaacgccacgcggcaccccacacacattcgcgctgacgctgacccttggcggccaggacggcgaaaccaccaccgcgcagtacgtcgatgacgtcattgccgaggtgaacttcaccaagccggtacgcagccacttcaccttcacccaaggcatcaacctggccggtcgcgtgggcgtcatcgcggccacccgagccgctgtgtttgtccgccttcaagctacggaagccaccactccatga

SEQ ID NO: 513918 - DNA, 1455 bp, Stenotrophomonas maltophilia
atgaccggcctcagattcatcgttacccgccgtggccgcgaggccatcgtcaacgccgagcagaacggcaccgccccggtgctggcccactctctgggcctcaccgccgaagtggtcgaggcgcaccgcgaaatgcaatcactgcccggtgaacacacccggctgcagtcgatcaggggaggggccacggcgcgggacacgatccacgtcacggcccgcgatgccaccgatgccacgtactcggtacgcggcatcggtctgtacctggccgatgggacgctgttggcggtctacggccagccggccgtgctggcggagaagtcgacgcaggcggttctgctgctcgccgccgatatccagttcgccgacatcgcagccaccgatatcaccttcggcgacaccaacttcgacctcaacgtgggcaccgaggaaaaggccggtgtgctggagttggccaccccgactgaaacagctaccggcaccgacgcgacgcgcgccgttcattcgaaaggcctgcgcgaactgctcgacgcgcggttcggccctggcgcgcccaccgcgctcgccaagaagctgatcgctaccgcaacggaaagcgctgtacgccagctgttgggcctgaaaggagcgtcgctcaaagacgatggcgagggcaacggcttggatgctgacctgctggacggcaagcacggtgcacactacctcgcttgggagaacctcaccggcgtgcctgccagcgcctacatgcccggccaggtgattaccttcgccggcaagaccgcgccctcgggcacgctggtgtgtgacggtcgtgaactgctacgcacggactacccacgcctcttcgcggccatcggcaccacctacggcagcaatgccgagggaaccacgttcaagctgcccaaggtcgatgaggacagcggcgtcatccataccggcgatcctgccaaggtcggccagagcagcgccggctcagtgattgcgcacacacacagcgcgagcgcgagcgcagccggcgctcatgctcactctgccggtgccgatgcggtgggcgatcacgctcacggcgcctggacggatggtcagggccaccacggccatacgggcggcaccaactgggtcggtgaccatcagcatctggtcccgttcgcagacgccggcatcgcctatccgtggggcggcgactacaacaaccatgctggttcacgcggcaatgtcgactacgacaacccttggccgaacaccagccctgccggcggccactctcatgcctattcaaccgatggcaacggcacgcacgcccacaacatcggcatgaatggtgccggtagccacagccacaccatcaacgttgcaggcgttggcgatcactcacacgccatcaccgtgggtagcaccggctcggcccgcaacctgcccgccggcatccggatgctgttctgcatcgccttctga

SEQ ID NO: 513919 - DNA, 615 bp, Stenotrophomonas maltophilia
atgcaactgaaaaccgaccacgaaatctatggccactcgttcgatgcgttgaccggtctgtacgtactgccaattcggatctacccggaagcggacggcagttgcccgcttcccaacaacacggttgattttccgccagtggagcaggccggcgcccatcaggcgtggcggatcaatgctgagcgcacggcatgggagacggtcgccgacttccggggcgtgatgctgtgggacaagaacacgggcgtacccgcgcccaaccaactcgccttgggggaactgcccccgccaagcgtgaccatccagcgaccgcagcctatcgagccgggcgagccgctggcgaaccgctggaacgatgcgctcgatgcgtgggagctggtgcccgactacacccagaccccgatctgggataaggcaaccggcttctacctgccgcagttggccatgggcgagccgctgccggccacggcgactgcgctggcaccaccgcgcgaccacaccgggccgtggcgctacagcgagactcagggcggttgggagagcgtgccgacgccagagccgattgaacccgccccggtaccgccggagtccgccaccgatcctgcggcgggctga

SEQ ID NO: 513920 - DNA, 534 bp, Stenotrophomonas maltophilia
atgctccgctggggcacggtgattgccgtgcgcaccacagcgccagcacgcgtccgcgtccagacgggcgagatccaaaccgactggatcgcctggctggaacgcagggccgggccgaacggccgcacctggcacgcgccaggcaaaggcgagcaggtgctgctggcttgccccgatggggacatctcacaggcggtcatcatcggcagcacgtcacaggacgcgtacccgcagccggctagcagcgaggacgtcgaccgcacaacctatcccgacgggagcgttgtcgagttcaaccacgcaacctcgaccctgtcggtccatgccggcaagggccaggtcatcgtgaactgccagcaggccgaggtgcatgcgagcgcggcggtggtgctggattcgcccacggtgcacgccaccggcagcgtcatggcggatggcaacgtgtccgccggcaccggcgctacgggcaccttcactaccggcacgggccaggtcgtgagcgtggaacgcggcagcgtcaccaacatctactga

SEQ ID NO: 513921 - DNA, 465 bp, Stenotrophomonas maltophilia
atgaacccacaaggctccctccccttcaacgccgagacattcgagcgcctggcggaccagatcaacgcggtgcagtcctgcgccgaactgcaggcgctcactgacgaagccatgcagtcggccaacgcgctgctcgccggcatcggcgcgcagatggcggcgttacagccgatgatggcgctgctcagcccgccgggcatcaatcccgctgagatcgtgacgtggatcaacggcttgattagcgctgtcattcagccctacgtgaagcctatgctggtgcttccgctgcagatcgcccagataaccgcggctatcgccaaactgcaggctgcgattgattcggccgcttcgcgcatcggctcctgcagcatcgagatgccgtccgtcaccgtccccgagctgcccaaactgccagaggtccctgagctgccgtctgtagaaccgccgaatctgtccggctcgtag

SEQ ID NO: 513922 - DNA, 360 bp, Stenotrophomonas maltophilia
atgaggggcatggatgcatccactggccgctggctggacgatgacgcgcacctggtgcagtccatcgctcgcatcctgaccacgcccattggcacacgggtgcagcgccgcgacttcggatcgctcctgcccgagctggtcgaccagccattcaacagcaccacacagctgcgcctgtacggcgccgctgccacggcgctcatgcgctgggaacctcgcctgcagatcaagcagctgtcgctgtcacgcggcgaacggccgggcgcgttcgtgctcgatgtcacctgccgtcgcgtgcgcagccagcagtccaacgagttcacccggctgactgtccccctccgctaccgcgaaacctga

SEQ ID NO: 513923 - DNA, 1167 bp, Stenotrophomonas maltophilia
atggaccagtaccaccacggcgtacgcgtcgtcgaagtaaacggcggcacccgcccgatccgcacggtggccaccgccatcctgggcatcgtctgcacggccgaggacgccgacgcatccgtattcccgctcaacaaggccgtgctgctgaccgacgtgcgcggcgccgtcgccaaggccggcaccaagggcacgctcgccgccagcctgcgcggcatcgctgaccaatccaatcccgtcgccgtggtcgtgcgtgtcgctcagggcgcggcagatccggagaccaccaccaacgtcatcggcagcaaggacaccggcacctacaccggcctgcaggcgctgctggtggccgaggcgcagcttggcgtcaaaccgcgcatcctggccgtgccgggactggatacgcaggaagtagtcgctgcgctggcccccatcgccaagacgctgcgcgccatggcctacgtgagcgcgtcggccgccggcaaggtgtccgatgtcatcgtctaccgcgatcagttcagcgagcgcgagctgatgatgatctggcccgacttcctcgcctgggacaccgccaccagcaccccggcgatggcctacgcgaccgcccgcgccgctgggctgcgcgcacgcatcgatcaggagcagggctggcacaagtcgatctccaacgtgcccgtttccggcgtcaccggcatcagccgggacgtgcattgggatctgcaggaccccaacaccgatgccggcctgctcaactccaaggacgtgaccaccctggtcaacgtcaacggctaccgcttctggggcaaccgcaccctgagcagcgatccgctgttcgccttcgaaacggccacgcgcaccgcgcacatcctggccgacaccatcgcagaggcgatgctggtctacatggacaagccgctgcaccccagccaggtcaaggacatcttggagagcatcaatgccaagttccgcgagctgaagaacggcggctacatcatcgacgccaacgcctggtacgacgaagccgccaacctgcccacgtccctgtcgggcggaaagctggtgatcgactacgacttcaccccggtgcccccgctggagaacctgcagctgaatcagcgcatcaccgaccgctacttcgccgacttcccgagccgcatcaacggctga

SEQ ID NO: 513924 - DNA, 510 bp, Stenotrophomonas maltophilia
atggcaatgcccagcaagctgaaaaacctcaacctgttcaacgatggcgagagctaccgggggctggtgaccgagttcaagctgcccacgctgacccgcaagatggaggaataccgcgccggtggcatggccggacccatcgacatcgacatgggccaggagaagatcgaggccgagtggaagtgcggcggcctgtcgcgcgaggtgctgcgtcagtacggcaagacctcgcacaacggcgtgcagcttcgctttgccggcgcctaccagcgcgacgacaccggcgaggtggatgcggtggagatcgtgctgcgcggtcgccacagcgagatcgacgccggcaccggtaaggcaggcgacgacacagagttcagcgtgaaaacctcggccagctactacaagctgtcgatcaacggccgcactgaaatcgagatcgacatggtcgcgatgattttcatcgtggacggcaacgatctgctgcaggaacagcgccgcgccatcggcatctga

SEQ ID NO: 513925 - DNA, 348 bp, Stenotrophomonas maltophilia
atgagccgcaagacccacgacaacgccctgctggacaccaccaccggcaaggtcagcgcccccgactacgtcacgctcgaactggatgcgcccatccagcgcggcgaccagatcatcgagacgctgcagctgcgcaagcccgacgccggcaccctgcgtggcgtgaagctggtcgacctgttgcagctggataccactgccatccgcatgctggcgccgcgcatcaccactccgaccctgaccaccgcagacatcgacaagctggacccggccgacctggtgacgctgggcaccgagatcgccggttttttcatgaagaaggcggaccgggaatccctgaacgcgtag

SEQ ID NO: 513926 - DNA, 2868 bp, Stenotrophomonas maltophilia
atggccgctgacaacctgcgcatgcaggtcatcctgtccgcaatggataaggcgaccgcgccgttccgcaagatccagcgcggcggcaaggggcttgccgaccagctgctgcagtcacgcgatgcgctgcgcaaactcaatgcaacccaacgcgatctgggcgccttccgccagcaggtagctgcatcgcgtgaatcggctactgcctacgccgcacagcaggccaaggtgcgcggactggctgccgccgtcgccgctgccacgcagccctcccgcgcactgaccaagcagttcaaggacgccacccgcgtcgccggactgatgaaggacaagcagcaacagcaggcggcagagttgcagcgcctgcgcagcggtctggaccgcgccggtatcagcacgcgcaaccttggcaacgatgagcgtcgcctgcgtgcggacattgcccgtaccaacgagagcatcaagcggcaggagacacgcctcgccgccgccaatcggctgaaggagcgcgcagcccagctgcagagcgccggcatcggcatggtcggcaccggtgccggattggcattcggcggccaacgtgccctgatggccggggcgctgccgctgtctgaggccatgagctttgaatcggccatggccgatgtccgcaaggtggtggacttcgacacgcccgagcagttcaaggaaatgggtcgggaggtgcagaacctctcgaccaagctgccgatggtgtcgaccgacattgccaagatcgttgccgctgccggtcaggccggcatcgccaaggccgagctggtcaggttcgccgaggacgcggccaagatgggcgttgccttcgacaccaccgccgaggacgccggccaaaccatggcgacctggcgcactgcgttccgcatggggcaggacgatgtcgtcgtgctggccgacaagatcaactacctgggcaacaccggccccgccagcgtccagaagatcagcgaagtggtgaaccgaatcggcgcgctcggcgaggtcgccggcctcggcagcgggccgctggccgcgctgggcgcgacggttgccggtatgggcatcgagtccgaggtgtcggccaccggcatcaagaacatgctgctcacgctgtcgtcgggcgaggccgccacctcgcggcaggtcgctgcgttcagcaagttgggcatcaaagccaccgatatggcgcaggccatgcagaaggatgccggcggcgccatcctgagcgtgctcgacaagctgaaactgctgcccaagcatgagcaggcggcgacgatgacgacgctgttcgggcgcgaatccatcggcgcgatcgctccgctgctgacgaacctcgacctgctgaaaaccaactttgacaaggtcaccgatgccacccaatacagtggctcgatgtcggccgaatacgcgtcacgcgtggcgacgtctgagaatgcgctgcagctgctgaaaaacaccgtgaacgtaaccggccaggccatcggcgagacgctgctgagcgacttcaaggcgctggccgaacaaaccgccgaagtggtgaagaccgtgatcgactggattcgggagaaccccgagctggtgaagatgctcgccaaggcggccatcgtcggcgccgccctggtcaccgtcttcggtgcgttgatggttaccgctggcgtggtggcgatgtcgttctcacagatcagtgctgccatggcgctgctgtcctctggcggcggcatgggcggcttggttacgcgcgtaacgtcgctggccggccgcgcgttcccgatgctactcaacgtgggacgcatgctgctgccgctgctcggcggcatcagcctgccggtgctggccatcggcgccgccgtggccgtggtcgctgccctggtgtggaagtattgggaaccgatcaaggcgttcatgatcggcgtatgggaaggcatcctcgacgtggtcaatccgatcatggacgaactgatgaccgcgctggagccactgggcccggtgtgggacatgatctccaatgccatgagccaggcttgggattgggtcaagaagctgttcgaaccctttgaggccaccagcgagcagctgcagggcgccactgacgccggccgagggttcggccagatcctgggcaacgtgctgactgtgaacctgcggctggctgtgaaggccatcggctggctggtcgacgcgttcaccaccatcctgcccatcatcaagaacgccatcgggggcgcgtggaagtatctgcagggcgcatgggatctgatcgtgggcctgttcacccttgacggcgatctgatccgcaacggcttgtcgtccatgtgggacggcatcaatcagatcctggtgggctggcccgccaagatgctgcagtccggcaaggacatgatctctggcctgatcgacggcatccgctcgatggccggttccgtgggcgatatcgtcagcaacatcggcagcggcgccgtctccgcgttcaagagcgtgctgggcatccacagcccctcgcgcgtgttcaaacagctgggcgactacaccatgcagggcttggccggcggtctcgacggcggccaagatcgcgctgtgcagtccgtggtggggctcggcgaccgtatgaagcgcgccggcgctgggatggcgatggcggccgctgtgacgcccgtggtgcctgtcagcagcgcgccggtcatggcgccgtctgccggcggcgcgggcatgacgcaggccggtggcaacacctatcacatcaccatccaagccggtgcctgcgccgatgcgcaggccattgcgcaggccgtccgcgccgaactggatcgccgcgaccgcgaagcgggttcacggcgcaacgcccgccttactgactga

SEQ ID NO: 513927 - DNA, 399 bp, Stenotrophomonas maltophilia
atgatgatgtccctgggcacgttcgttttctcgctctccaccgccgcctaccagcagctgcaacgccagatgtcatggcgccacccaaccagcgagcgcgtgggcgcgcgtgcggcccggcagtacgttggccccggcgaagagaccatcgacctgtccggtgtgatccacgccgagctggccgacgatctgctcacgctggatgtgctgcgggagctggccgccgagggccgcccgctggcgctggtggagggcaacggcacggtctatggcgcctacgtcatcctctcgatcaacgaaggtcggacagagttcttttccgatggcacgccgcgccgcattgatttccagctgcagctggcgcgtaccgacgatgacacggaggaagcggcagcatga

SEQ ID NO: 513928 - DNA, 999 bp, Stenotrophomonas maltophilia
atgagcgccttctacccgattccgcagtggcgcgcgacactggacggtgtagacattaccgaccggctcgcgccgcgcctgctggatctgagcctgaccgaaagccggggcgatgaggccgaccaggttgacctgcgcctgcatgaccatgacggacgcctggcgctgccgcgtcgcggtgtgacattggcgctggcattcggctgggctgacagcggcatggtcaacaagggcacgttcgtggtcgatgaggctgaacacagcggcccgcccgacatcatcaccattcgcgcccgcagcgcggatctgacgcactcgatccgcacgcgccgcgagcgcagctggcatgacaccacgctcggggcagtgctgcgcgccttggccggggaacactcgctgaaagcagccatagcgcctgcgctcgatagcgtggcgttaccgcatctggatcaggcaaacgaaagcgacgtgaacctgctcacgcggcttggcaagcgattcgatgccgtggcgaccatcaaggccggtactctgatcttcaagcccatcgatggcactacgaccggtgacggcatcagcctgccggtgcagaagctgacacgcgcatcaggggattcgcaccggtacgccgtggtcgaccgcgatgcggtgaccggcgtgcgtgcctactggggtgatcgcggcgcggcgcggcgcaaggccgtgctggtgggcaccgacaagaacgagaagaagctgcaggctacctacgccagcgagagcgaggcgcggcaacatgcgacggcggagttgcagcggctggcacggggtacagcgacactatcgttcaagttggcgctaggccgtgccgatctttatcccggtcagacggtgaatgtcgcgggcatcaagcccgagatcgacggcacggactggctggtggtgaaggcgacgcacaccattgatggcggcgccggctttacgacgtcccttgaacttgaacgcggggcaacggcgtag

SEQ ID NO: 513929 - DNA, 468 bp, Stenotrophomonas maltophilia
atgtcactcactgaagatcctaagctcggcgtgggcgcacgactgcgtgccgaacgtgagcgcctggacctgagccaagaggaaatgggctcgcgcgccggcaagaataagaacacgcagatgcgctacgagacgggcgtcaactcaccgaccgccgcttacctgcatgaactggccgcgctgggcgttgatatcgggtatgtgctgaccggattcccaaccgaactggacgacgaagacggcgagatgcttgcgcgcttccggtcggcatcgcctgaaatgcgctttgcggtgcgactgatgctgacggcgccgaaggaggctgctgcaaagcacgccgaagccggtgcggcgccgatggtgggtggtaataattccggccaggtcaatgcgggcacggtgacccagggcgatgtcagcttccagatcggttcgcgcaacaagggcggccggaaacgctcgagctaa

SEQ ID NO: 513930 - DNA, 216 bp, Stenotrophomonas maltophilia
atgtccaaacctgtcctaaaaaccgcaccccaggtgcgagaggaactcgaccggcagggcatctccatcgccgagttcgcccgcacccacaatctcgacaagcgcgccacgtggctggtgctgtccggtcgcaacaagggtcgccgtggcgaagcgcacaaggccgcagtagtgctgggcatcaaggccggcaccgtcgatcccgcgtcgaactga

SEQ ID NO: 513931 - DNA, 327 bp, Stenotrophomonas maltophilia
atgtcttcgcacagcgcacgcagaaaggtggtcttccgatgccccttctgccattcccctttggtgaagcgcaccagccatctgagccatgaccacctccggcatgactcgttcaactgcaccaacccggtctgttctgccgcgttcaccggccacaccgaactgaccggcgttgccagtcccagcggcctgcccgatgcacggccgactgatcttcccccaagccccgcatatgcccgcgagatcgcccagcgcgctcaccgcatgcagcacagcggcaatcaacccgatctgctggacgcattgccgctccccgccgaccactga

SEQ ID NO: 513932 - DNA, 321 bp, Stenotrophomonas maltophilia
atggctgttcttgaactggcgatgctctcgccaatggcgaagctttgcctgcaatccaccatccgtcacggcgggttggtggttggcgtacgcggctacaccggccgtcaggccgaggccggcgaagcattcaccgcggcgcccgtgtggcagttgatggcgctgggccttgtgcgctgcgcgcccggcaatgaccgcctgctggaagtgactgatcgcggtatcgagttgaacgactgcggcgtggtcgaaatcaagaacccgcccgaggggctgggactgatcgacgccgagaccgaccaacgcgaggcgaccccatga

SEQ ID NO: 513933 - DNA, 219 bp, Stenotrophomonas maltophilia
atgagccagcgcgacgcatggtcgaccgcacaggtgcccttcctcgtccccggcccttccgggtacgtgcctaccgatcctgccaagaaggcagaagacgccgccacgctggccgcgcgggtagccgcgttccgcaaggcgggcggcaaggtcgaagtcatcaccgaacccacctgccgcccgcagaaaagcagcaagcgccgcagcgcgaaggcctga

SEQ ID NO: 513934 - DNA, 2703 bp, Stenotrophomonas maltophilia
atgcaagaagacatccgccagcaagttctgcagcgcatcgagcgggactacggcctcaagcaccgtcccagcacggaatacatgcgcagcggcaagtgccccgcctgtggtcagaaggagctttacaccagcttccagaatccgtgggtgctgcgctgtgggcgccaggccaagtgcgggcatgaggtcagcgtcaaggatgtctacgacgatctgttcgatgactggtcaaagcgccacgaacgcacggagacggcgccgcacgctgcggcggacgcctacctgcggtactcgcgcggcttcgatctgaccgcgctccgtggcctctacacgcaggagagctacttcgaccgcaagtccagggaaggcaccgcgacggtacgcttcccgctgaccaagggcggctattgggagcgtctgatcgaccgcgctcaccgcttcggcaagcagaaagcgcgcttcatgccgggccagagctatgcgggcgcctggtggatcgcccccgctgcggccgacatgctgccgaccgcgcgtgaggtctggatcaccgagggcatcttcgacgctatctcgctcctgcagcatggcattgcggctgcatccggtatgtccagcaacggctaccccgaggaatcgctgcgcgccctgcgcgaccagcgcggcggcaagctgccggtgctggtatgggcctacgacaacgagccaaccgcacgtgattacgtgcgcaagcatgcacgccgggccgagacgctgggcttcaagagccgtgcagcactgatcccgcagaagccggggcaaaagaccgactggaacgacctgcatctgcgcgcgtcgaccatcaacgacgccgacgcacgccaggctcagtgggatgccgacatcgcggaggcgcgctatcacggcgacgtgctgctggcgaagtccgccatcgagaagggcctgctgatgtatgcccacacgcagcgccgcgagttccaccttgaacaccgctcgcgtctgttctggttcagcttcgatagcgtgaagttcgacaagctgtgccaggagcgcgccaaacgtaaggaagacccggacgaggaactcgacgccgacgaggccgagaagatccgccgcgcctgctgcagcgtggaagaaatcgccaactgctatccagaggcgctctactttcagagccatgaggtgaccgacgaaagctggtacttcttccgcgtcagcttcccgcacgatgcgccgcccgtaaagggcacctttaccggtgcgcaggtcgccagcgccagcgagttcaagaagcgcctcatcagcatggcgcagggcgcggtgttcaccggcaccggccaccagctggattgcatcatccgcgacgtgctgtatgacatcaccaaggtccagaccatcgacttcgtgggctacagcgaggatcacaagtcctacatcctcggcgacgtggcggtgcgcgacggcgaactgagcatcgccaatgccgaggactacttcgagttcaagaacctgcgcgtgaaatccacgcagaagtcgatccgactggacattcagcgcgaccccgaaaagcagcgcaacgactggctggcgtggctgtggatgtgcttcggcacccacggcatgatcgcgctcacgttctggttcggctcgctgtacgccaaccaaatccgcagcgcgcacaagtcgttccccttcttggaagcgacgggcgaggccggcgccggcaagaccacgctgctgaccttcctgtggaagctgctcggccgcagcgactacgaaggctttgacccggcgaagtcatccaaggccggccgcgcccgcgccatgggccagatttccggcatgccggtggtgctgctggaggccgaccgtagcgacgccgatcgctcgcacgccaagtcgtttgaatgggatgaattgaaggattactacggcggcggcaccctcgccacgcgcggcgtgcgcaatggcggcaacgacacctacgagcccccattccggggcaccatcgtcatcagccagaacgccgccgtggacgccagcgaggccatcctgacgcgtatcgtcaagctgcacttccgcaagccgcaggtcaccactgagagccgcatcgcggccgacaaccttaacgccctgcaggtggaggaactgagccacttcctgatccgcgccgtccgcgccgaaagccaggtcatggaaaagtttggcgagcgcgtgcgcttctacgagggcaagctgcgcgagcgcggggagctacgcatggagcgcgtcacaaagaaccatgcgcagatgctggcgctgttcgacgccctgcgcctggtcatggagatccccgaggagatggtggtcgccacgcgcgaagcgctggttgcggccgcactggagcgccagagcgcggtgagcgccgataacgccctggtcactgagttctgggaggtctacgagtatctggaaaccaccaacggcggcatgccggcggtgaaccactcgcgcgatgcatcgcggatcgccatcaacctcaacgagttcgccgccaaggcagcgcaccattcgcagcagctggcagacctcaaggtgctgcgcacgctgctgcgtgactcgcgccggcacaagtgtctggacacgaacgtagccgtgaacagcgctatccgtcagggcaccatgggcgccgccgccacggtcaaatgctgggtgttcaaggtatga

SEQ ID NO: 513935 - DNA, 192 bp, Stenotrophomonas maltophilia
atgggccaggcggaaccgggcaaggttgccttgcacgcgtgggaggctacagaccacctgcgaaccgaggacgacattcggttgttcttggaagccagcgaagagcaagcgggcgacgatccgcagttcatggcgctggcacgggccactgttgacctggcgcgcaggcgttggggattggcgaacggctag

SEQ ID NO: 513936 - DNA, 303 bp, Stenotrophomonas maltophilia
atggcagctaagaagaagattcagctggagacgttcgacgtcgccgaacacctgcgcacccccaaggaaatggccgcgtatctggacgcgtgcattgccgaaagcgacggcgactctgcattcatcgccaaggcgctcggcgatattgcccgcgcccagggcatgagcaaggttgcccgcgatgcgggtgtgtcgcgcgaaagcctgtaccgcgccctgtccggcgagcgcagcccggacttcgccaccatcctcaaggtgacgcgtgccctcggcgtgcagctgcacgcgagcgctgcctga

SEQ ID NO: 513937 - DNA, 288 bp, Stenotrophomonas maltophilia
atggaaatgaagcgcaccccacagttcaccgcatggatcgacggcctgaaggacttcacgggacgcgctcgcatcctggcccgaatccgccgcttgggcgaaggcaaccccggcgatcatcggaacctgaccggcggcatttcggaactgcgcgtcgatgtgggtccgggttaccgggtgtattacacgcagcgcggaaacgagctggtgatcctgctggtaggcggcgataagggcgcgcaacagcgcgatatcgacaaagcaaaggaattggcccgttccctttaa

SEQ ID NO: 513938 - DNA, 237 bp, Stenotrophomonas maltophilia
atggcacacagccacggagcgcccgcgcatgccgcgcgccagctcgcacattttttcggccagatcgccgacaccaccgaatggaaccacgcctgctggcagggtctctttgcgcgcctgctcggcgcgggaaagacgccggcagagttgacgctgggcgagatccagaacgccgtcgatcaggtaaaggcccggtgggcagattgccacggcaccggcccgagggcggtgtcatga

SEQ ID NO: 513939 - DNA, 273 bp, Stenotrophomonas maltophilia
atgagcgcacacacccgcaacggcacccgcacagcggcggatgtggtgaacagcatccacttcgtggtgcacgaaaacgacatcgaccgtctctggcaggcccagcaggccattgacctgctcgcgctgctcgataccgatcagccttcccccatcactctcgaccacatcgccgcagtcgcggcgtacgtcgcggaggatctgcgccatgtgttgggcaatgcccaccgggccgaccagctgccagccgtagacctggcggacaccctgtaa

SEQ ID NO: 513940 - DNA, 408 bp, Stenotrophomonas maltophilia
atgtatcagcaaactgagtcacccccagccgccgcatgttcgcagggggccgacaccggacccgccgcgcaggctaccacgcggccagaattcaccacggccaccgacagcaaggcagtgctgcagttcgccattgcccccgatgagattgtcgtgaccgcgattctcgccatgggggctccccgctgcatcgagcagcgctggacgcgtcggacccgcagcagctttctgctggccgcagccccggtactgtgggcgatggagaaggacgccatcggtcacgacctggccgacttcctcgaccatgccggcgtgccccttgccatcgccaacatgctgcctcggcctgccagcaccgccgcatccgcggctatcgctgcagcagcgctggaggtggccaatgtctga

SEQ ID NO: 513941 - DNA, 381 bp, Stenotrophomonas maltophilia
atgtctgagagcaagccatgccgatgcgcacggtgcgagacgacaccggccaacgcccgccactgggtgaagcacctgacgcagcaggccgagtacgcagcggaactccccccctacgagcgtgtcgttggcctgcatcaagcccagcaggcactggcggccgtgctgaccgcgcgcacctcgcctgcagtccagccgctttctggccgggaggatctgacggctgcggtgatcgctgcggtgaagcgtcatcgctccctggtgcactcgcctcacagtgtctatgcaacggaactggccgctgcgagccaacaggtcgacgctgctttggcgacactggccgcccacgacttcgatgccggcgaggtggccaccgtatga

SEQ ID NO: 513942 - DNA, 285 bp, Stenotrophomonas maltophilia
atgaagtacctcacgacccaacggcagatcgcggcgccgtggccgatgcccagctgcagggccgggcatacggcacgactgatggaagaccgccgcagagccgatgccggcggcggccactacatcgaatgccaatgcggccgcacccacaagcaccccagcgcacacctggccttgcaggagtggacccgcctgtacgggcgcgcgacaccggcagcttccccaaccaacaacgtgatccagctggggctggggctgggcgacagaagcaccgggtgtggatga

SEQ ID NO: 513943 - DNA, 222 bp, Stenotrophomonas maltophilia
ttgagcagccgcattgtgcaattcaacatcctgcaggagctgtgcaccccgcacggccccccaccccgtgcggcgaccgtgcggcgctgggcagaacggcagggtatccggtacaagtacgaccgccacggcgggatctggaccaccctcgacgcgctgaacgccgcgctggggctggtcgaaccgctccagcacgaagtacgggaagaggacaacatctga

SEQ ID NO: 513944 - DNA, 633 bp, Stenotrophomonas maltophilia
atggaatgggcaccggttagttttgggttggaagccgctcccaatctgtgtgcacagcccgcaagcgtggtctgcacggatgattggaaatgggtgatccctgtgttggccttgatcctgggctttgcgctgagatgggtgcaggagaacctctctgaaggaaagaggcagcaatcccagaggcgcctgcggcaggaattgcggctagatcacgtaaggatgcaacgaagtgatgcggaaagagccaatctgcttgctcttcagcaagctgtagcaaagtactatctaagcgcgtccgaagcgcatggcgcaatgttggatgcccttggtatcaatggagtttgggcccgcgttcgtatggatcacgcagtgaatggcgccattcaatcaagcaaggctgaaatgactgtgctgcagtatcgaattcacgcagccaaggtttgcatccggctagacgatctgatcgatgaggtgacagcggcattgaaggccgaatctcttgaagtcgctgaggagaattggaagcgagccgacatctcatttgccaatgcccagcgcctcatcggggccgaaatccggcggcttgaagatgatgctggccagcaggctgaactggatagtgagcagaagtag

SEQ ID NO: 513945 - DNA, 1458 bp, Stenotrophomonas maltophilia
atgggtgacggttcgcagttcaatagccttactgcaggctcgttcgttggcagcggtgggacactcgcgttcaacactgtgctggccggagatgcatcggccacggatcacctgcatgtgctgggagactccagtggccaggcgtacgtaaaggttgcgaatgtagggggagcaggagccaagacgaccaacggaattgagctgattcaggttggggggcaatcgggagctgtatttcagctggccgggcgtgcggttggtggcccgtacgattatttcctcactaaaaatgactccaacgggaactggtatctccgatcacaggtgccgactccgccagacccctgcgtggtagatcccagccttccgcaatgtaatcccgacccgaatccgaatccgaatccgaatccgaatccgaatccgaatccgaacccgaacccgaatccgaatccgaatccgaatcccaaccccaaccccaacccgaatcccaacccgaatccgaatccagaactggagccggagccggagctggagccgctgctccgtcccgaaccgggcgcgtacttggccaacctgcaggcggcgcagacaatgttccgcctgggctaccatgatcgcaatgcaggccagaatggtgggcgggcttgggcgcgtgtcgacggctcgcgcaacggcttcgacgcgatcagccgtcagctcgacatccgtggcaacagccaaagcctgagtgtgggtgccgatgtgtggcgtgatgattcgggtagcagcgtgggtttgatgctgtccagcggaaatgcgaccagcacctctgtcaatgaactgactggctactacgcccgtggcaaggtgaaaggtgaggcgctgggtgtgtatggcacgtggcgtcgcgcaggtatgagtgatccgtacgcggggttctacttggacggttctgtgcagcgtgcccagttccgcaatcgtgtggacggagtcggcttggctcaggagcgctacgacagtcgcgcctggcaaggcgccgtggaggccggctatgccttccgcgccggcggtcccagcaatggtggggtgtatctggagccgcagctgcagattggctacaaccgctgggacagcggcagccataccgaagccaacggtacagtggtgactaccgaggatgctgacggtctcttcggtcgagtcggtgtgcgtctatccagtgtgacgcgctggggcaacggcgccgccgaggtgcagccgtacgtcacggcccactggctgcacacccgcgccgaatcacagatccgtatggacggtgaagccgtggatgcgcgcatcccacgtagccgtggtgagttcggcgcgggtgcttcgttgaaattcgccaacggactgggcgcgtggggcggtctattgctgcagaaggcaagcggattccatcagacgagcgctcaggttggtattagctacagttggtga

SEQ ID NO: 513946 - DNA, 1212 bp, Stenotrophomonas maltophilia
atggaaaagatcatgtacaagcacaaaaccatggctgtgctggctgctaccgctctgttcgctaccgttgctgccgcttcggcacagactgtcaatgtcactggaggcggtgcctcgataccggccaccctctataagggttcggatgacagcatcctgccagccaacttcagctacgctgtgacaggttctggcacgggcaagaaggcgtttctggagaacaacacagcgctgttctcgaccactggcaccgtgcatttcgctggcagcgactcggtgctgagcagcgcagagctcagcacctacaactacacctacaacgttgctggagatgccaaccgttacggcccgttgatacaggtcccgtcggcactgatgccgattgtgattccgttcaacaagggcggtcccgcgctggacctgaatgtgactcagatatgcggcatcttctccggcaagatcaataactggagccagctggctggctcgggccgcgtcgggcacatctccgttgtgtatcgtcctgaaagcagtggtgccagtgaaattctgacccgcttcctgtcctccgcttgccaaccggccgatgtctcaggcaccacactgaagctgcgaaacggtgtgccggcgttctcggtgcagtcgaactttgcagatgtgtttgccaagagcatctatggcagcaacactccggtgaattttgtcgcagctccgagcatgggcgatgcatcgcactacaatgcggtgtatgcccttgaaggcagaatcggctatgtcggcccggatgtggtcccgaacctggcagacgcgaccaggatcgccaccgtcaaggggttctcgccaggcgacgtaaacgttcaggccaccatcgagaccgtggctccgccgaggggtgctgccgccgataatccagccaactgggtcccggtgtttggcaacccgagcacgggctatccgattgttggatacacaagttttgtgtttggccagtgctacaaggatgtccatgtgggtgctcgcttgcgcggcttcctgttcaggcattacaacaccggcgccgacggtaacaatgatgcgcccctgagcgctcatggtttcatcccactgaccaaggcatggcgcgatgcgatccgggagcacttcgcggtcgcatccaggagcacggcgctgaacaatcctgctgcctgcaatggtatcgggcggccgctgtaa

SEQ ID NO: 513947 - DNA, 441 bp, Stenotrophomonas maltophilia
atgaaccggacgtcccactccgcatacctgcgtgacggcagcatccgggacgccgatgccttgatcgcgctcgacagcgtggcagctatcgatccaggtcgggccatgcagatttgcgagtggctggcacgcggcggtgtgcaggtcgccgagcagaacggcaaggccgccggctacctggtcatccatcaccacttcttcggcgcagccttcatcgaaatgctgatggtggcgcacgcacagcgcggccagggcatcggtacggcactactgcggcacacgatcgcgcggcacggtggcagcaagctgttcacctcgaccaatgcttccaacatcgggatgcaacgcctgctcgctgccaacggcttcatcgatagcggcatcgtgcatggcctggatgaaggcgatccggaaatcatctaccgcttcgcggaagactga

SEQ ID NO: 513948 - DNA, 612 bp, Stenotrophomonas maltophilia
atggatgaaatgaaaaaactggaacaggcaagaaagtcgttgcgacatgtactcaacgacaccacccctcttgaaagagatgattattttaggataggactgttcattcagacctactgcttcgcagattttgaggcacggcggatcatcaacctgctggaacaaattcagtcgggagaacccacctcgtacgcttcgaaactcaacgataaagacaccatcgaacacctcaagcgccacgctgctgactgcgtttggaacaaagatgtgtcggaagggttgagcaaagtagctgagatcttaggcatgcaccgaacgattaggcacatgtttgctcattggtccggccgccgagtaccgggtcacgaccactatattttcttcacagcaaatctagctggccaaaagattccagatggcgcgccaagatttgaagagcatgaagaagcgaacatgcagtatggactaatgccagtatcggacttggagcaagaacttgaaaaactcaaagggcacgtcgagtacatgacgaacatcgggcgtcagctagaggcaaaggtcagcgaaattgccgagcagttcaaagaagataagaaaaaaggcaaattctga

SEQ ID NO: 513949 - DNA, 513 bp, Stenotrophomonas maltophilia
atgcgctctccccacggcttccgcaccgccccgatttcctctggctgggtccagaccggcgagcgctgggcgctctggtacaacggccgggaaacggcgaacgtcacgctcgatggcggtcctggcgtccggctgtggatggagggccagaagatgtggcacaccaaggaagcgcgcgccgccaacgtccgacaggcgaagcgctacgccgagcgctggtgcgcagcccggctgtatcccgagctgcctctgcgtgaggccgttgcccggctgaccgacagcacgccgatccagttgcccccgccactgcccagcctgccgccgacccgtgagcagcggcaacaggcccggcgcctggctgaggccggagcgaaggaggtcgagcggatcaaggcggcgctggagccgcgcaagccgccagcagagaccaagccccgagcgagggacgtccgcagcaaggcgtgggtgaggggcagggctggagcatctgcgccgcggtgtttgaccacctag

SEQ ID NO: 513950 - DNA, 846 bp, Stenotrophomonas maltophilia
atgcaagttcatgtggcagagttgcagcatgatcttgctttggcaaaggctgagcatggcaagcaagttctgtcgtttaaattgaatgggccgcgacttaatgatggctctattcctctccatctgctgtcccggttgtcgagtttaatcgagcgatcaatgggatacgcgtcttaccgaattcagaatggacgtgaggctaccaggcgaatccctgaagaaattaggcggaccctcgatctcaggttggcggatgtggcgatggggtccacggaacttgtgattactggcaacacgtcgcctgacctcaccggtgagtcactgctagaaaacagcctttcgacagtgtttcgggtgctaaacgctgagccaaccagcgtagcgcaagaggctgctgaggcaggctccatggcatctcggatgattgctcgtatgctcacggaacttgaggcggagaactgcactgtagacatggtgtggacagactcggctgatcgagttcatcgctggacggccgctccggagcgcgttgctttggttcggcagaatctgcagctagtgactgttcgtcctccagagacgttcgctgttgttggtgccgttacgctactcagtgccagtggccggattgaggtgatggatgatgacggcaggaaaatttctgccaagttcccgagagatctgtttgatcgagttaggcatttgaagcttggtcagcggctgagctttagctttgaaagaaccacgactaccaatgtcagtgtggggcagactttggaagactacacgctccttggtttttcttttggagacgaattgggttcgatcgagtatttaactgaatga

SEQ ID NO: 513951 - DNA, 525 bp, Stenotrophomonas maltophilia
gtgggcgtagacagccttgaacgcgtcatcgtccacgtagacatcgcgaccggcttccttattccgccggatgccctcacacgggttcggcaggtcgccgccacgcccattggcccgttactcgctgcgcgagatggcgggcttaccctggccaccaccggcgccaccacgctggccagccactcgcgctccgacttcggccttgatgccggcacggtgggcgtggagtttgccgtgtggggcgatgacgccgttgcagccctcgtaggcttcgccaccggccccgcagcgctgaacaaggcgctgggtgcggacctcgccagcatcggctgggatctcgcggccgggcgcctgctgcaggcgggcggtgcgatcgccactggcctgccgacagcgacccacggcgacattgtcgggctgcaggtggtgttctcgacccctcgccagctgcggctatacctcaacggcgcgcagatcctggtgcgcgagctgcagctgtccgggccgctgttcttctccaagtga

SEQ ID NO: 513952 - DNA, 1026 bp, Stenotrophomonas maltophilia
atgagcgacgagagcaacggtgttggcgatttcttgaaggatctgcgcggcgcttggagcaatcggatagcgaatccactgatcggttcgtttgctctaagttgggcggcagtcaactatagggcaatagtagttttgctcgccggatcttcgtttgaagagaaatttgcgtatatcgattccgacttgtatccgaatttttcatatgcattattgaagtgctttgtacttccgctgacctttgcgctgctctatatttacgctttgcccaggccgacggagcgagtttatcagcgtgctttggagcatcagcgagagttaaacaatattgcgaagagtgtcgctgatgagaagctcctcagtgcagccgagtctgcagcgcttatggagcgcgcagagaaaatgatcgctgaggcaagggctgatgctgcggagaaggtcgagaaagctaacaatgaacttacggccgcgctcacgcttgcggatgagcaaactgcacgggctgctaaggaactgggctccgtcgcccgtttggtgcagacgcacgaagctgaacttgccgcgcgtgattccgagttaaatcgtaggcttagtgaaattgcggaaaaaaacaggttcgaggtccagcaatttaaaacgatggcagaggcttcggatcggcgggctgccagcttgagttgggcgctaacttttgagcgagcaattagtgcctcgcatgaggaagcttcgtcaaatttgatggcgcgcctcttcgatctccttacagctaagcaggtaacccttttcgtcggctccatggaattcggttccattaaattcacaaaggaatacgggttcatcgattcgcaaggattagagacgagagattggctttcgtggaccctttctgatcgaggacgaattgcggtgtatgattctagtgatcgtgaggtggcatcgttcttgtggcggccccgtgaaaggcgctggcatggtacgacctccggtcgggatgcccagctcgttgcgcaggctcccacggaatag

SEQ ID NO: 513953 - DNA, 1134 bp, Stenotrophomonas maltophilia
atgaaccggcgttggatgttcgtgttgatgctggtgtgtgcgccggtgctggtgatgccgcgggcgtgggcgcagtggccgccagaaacgcatccggccgaccagagccgggacatcgtgatgagctgggatcgctcggcggtacccggtgatgtggagttgtgggcgccgcggacggtgctgggattcagtcacgacctggcgctgaagtatgggcagatccatgtggtttgtgggtcgagctccgactccgaactcggccgttgtcctactgatggggtgatagaccaagatcttgggagaacacagatcgtcctgcgagcagtggagcagcgaaccggccttcgggcagagataggtgcagtgggcttcatgcagagaattatgtcgggccgagtttgcaccagcgatttttggaacagttcggagcgaaatctctatgaggcactttggtttcagtgcccaccaaatgatccgcttggaaccggagttcagctgacactccctgagactgaaattgcacggctcgtcgcaggccactggaaggccacgatgcgcctgaacatcaaggccgatcccgccgcagcacctgtcgccacagccaccttcaacttcgatttcaccgtcaccgactacgacgcgatctcgatctacttcccgaccttcgacaccgtcgcgccgctggtcaatctcgatctgcgctacgaccccatccagaaggtggtgggtggcaggaaacagctggatatgtgcctgtacgacggcctgggttcgcagagcgaatacctcgacgtcacggttcgcgacagcggtccacgcccacctgcagggtcggacttctcgctctggcaccgcgatggcggcagcgatgccagccagcgcctggactaccgggtccacctggactacggcggccaccgcctggcgatgaagcacaacgtcaagcagcagctgcgcggcatcgacagcgcacagctgcggctggtgatgctgccgggcatcagccagccggtgtactgcgtgccgacgccgctgaccctggaaacaccgcccaccccgatcgccagccagcgccccggcctgtacgagggcgagctgaccgtggtgctcgatgtccccactgccaaaccctga

SEQ ID NO: 513954 - DNA, 1263 bp, Stenotrophomonas maltophilia
atgattgaaagaaatctgatcgtccgtgggttttgcggaattaaagaagtcaatctgaatctgcgccgtttcaatgtctttgtggggccgcaagctagtggcaaaagtcttctggcaaagttggactatttttgccaagaggccttggggcaaatgctggtggccgcagccgtcaccggcgattttgaagaatacaggcggctcgttgatctgaagtttaagaattactttcctccgaagacttgggggaaatcgcggccatttgagattcaatccaggattggcgatatttggatatacctgaaaggcagtccaaagaaggggtctttgcaactatcttttagtgacgaagttgaatttaggtttggaaggatggctaaacggctggctcaacttgtatcaaagttcggagaagatcgcttcttgattaatggcgaggattactatctttccagatatcttctgcgcatgtcagagtttgtgatgcgagatgaggtcttcgagagtttactttttgttcccgccggacggtctttctttgcaaatttagatcgtgcggtttggccaattctccagcggcaaaagtcgatcgacccctttcttattcagtacggagtgcactatgaaagtgtaaagggggcatatcgtcgtgcttccatttacagcaacaaagacgaacgaggagtggttcactcgccttctaggtctaacctctggcgtgcaattggcggagagttggtgatcgagaaggaagacgaatatgtcaagtttgaagatggaagaatggttcccgtggctaatctttcatccggacagcaggagcttcttccgcttttgattggtgtgttctcctcctcaagcgacgagagcaggaagatgatctacattgaagagccagaggcgcatttgttccctagtgctcagaaagatgtagttgaattcatagtttccgggttcaatgagatgtctgcggggagcggtgtttttataacgactcatagtccgtatgtcctggcttccataaataaccttcttgccgcccacagggtgtcaagaaagagggggcgtgggcggcttgtcgagaatatatatcctaggcaatgttggttggatatagatcatctttcgtgttacgcagtccaaggtggaggggctgagtcaattgttgatcacgaattcagtatcattgacgcttcatatattgattctgtctcgtcatctattgcttatggctatgaggctcttttggagataaattcgtga

SEQ ID NO: 513955 - DNA, 207 bp, Stenotrophomonas maltophilia
atgactgaccagctgctcaccgctgcacaggccaagcacacagcgcgcgcgctgctgaccgaatgccgggcacgccgacacggcctcggcttctggttcgccttcaacgctgcacagcgcgcgcgcctccgcgccgctacccccgcatcgccgcctgcacagctgcgcgctccggcgcaggctgcccaactggacctgttcgcatga

SEQ ID NO: 513956 - DNA, 207 bp, Stenotrophomonas maltophilia; identical to SEQ ID NO: 505321

SEQ ID NO: 513957 - DNA, 1470 bp, Stenotrophomonas maltophilia
gtgaacgccgccctgccccgtctcggtctgatcgttgcgctggccagcttggcggcctgcaggaccgtcggcccggattacgccctgccggaagggtcggcgttcaagcgcccggaggccaatacagccttcatcgatacgcagaacccgcaggtggccgccaaccaggcgctgcccgaccgctggtggtcgctgtacaacgacccggtgctggacggcctgatcacccaggcgctgcgtgacaacgtggaactgaaggccgccgatgcacacctgcgtcgtgccgcggcgatgtacgaacaagcgctggacgccggtggctttgagtacgaggccgaggccggtgtcagccgcgcgcagctgtcggccgaatcgttcctgcaggagcacgagctgccggtgatcaacctggccgatggcaagttcgcggtcagctaccagttcgacctgttcggcaagctcaagcgcggcgccgaggcagcgcgtgccgacgagcagtcggtcgctgcggcgcgcgacctggcccaggtcagcgtggtcgcgcaggtcgccgacagctacctggaaatctgccacgccaaccacgaactgcacgtggccgagcattcgctgcagctgcagcagcgcagccgcacggtcaccgagcgcctgatcgcggccggccgcggcacgccgccggaactggcccgcgccaatgcgcaggtagcgttgctggaggcggcactgccgccgctacgcgcgcagcgttcggcggccgcctattcgctggccgcgctgcttgggaaaaccccgggccagctgccagccggcgtgatcgactgtgcgcacgcccccggcctggcgcagccgctgccggtcggtgatggccgggcgctgctgcagcgccgcccggacgtgcgccaggccgagcgcaagctggcctcggccacggcgcggattggggtcgccaccgccgagctgtacccggacatccgcctgggtgcctcggtgggtgccgccggcctgctggaagacttcggcacgccgatgacccagcagtggtcgatcggcccgctgatctcgtggacgctgccgtcgtccggcacgcacgcacgcatccacgccgccgaggcgggtgccgatgccgcgctggccgagttcgaccacaccgtgctgcaggcgctgcgcgagacccagaccgcgctggaccgctatgcgcaggacctgcgccggctgcagtcgctgcgcatcgcgcaggagcaggccgcactggccgccgagcagaaccgccggctgtaccagggtggccgtacgccgtacctgtccagcctggatgccgaccgcagcctggccaccagcgacgccaccctggccgccgccgaagcgcaggtctcgcgcgaccagatccatctgttcctggtgctgggtggcggctggcaggcatcggttgccccgcccgcgccgtccaccgcacaggcctcggcgaagtaa

SEQ ID NO: 513958 - DNA, 561 bp, Stenotrophomonas maltophilia
atgaagaagtttctgaagtgggcgatcatcgtgatcgtggtcctgttcgtgggcctgatggcactcggcatgctggtcgacgccaacaagacgcctgagcagcgtgcagccgagaccgctgcgcgtgagcagcagcgtaccgaagccgctgccgccagggagcaggccaaggccgacgctgcggcatcgaaggagcgcgccaaggccgaggccgagcagaagaagctcgacgaagagcgtgctgcgctcgacgcgctgccgcaggtgactgttgccgagctggccaaggcctacgaggagaacaccgttgccgccgaccagaagttcaagggcaagcgctaccgcgtttccggcacggtggactcgatcaacaccgatctgatgggcgacccctacgtgagcctgcgcgcgggcctgttcatcgagccgcagttctcgttcagccaggctcacctggaggtcatcggcaccctgaagaagggtcagaccgtgaatctggtctgcaccggtcgtggtgatgtcggcaagacgccgatgtccaaggattgccaggtcctctga

SEQ ID NO: 513959 - DNA, 306 bp, Stenotrophomonas maltophilia
atgggtgatatcaatcgactgcgccaggtgctgttgttgccgttcgcgctggcggcgctcgctgcctgcagccagcccggcgacccggcgcagaccgtgcagcgcgacgccgacacgctgcacgctcccgccgcgccagtcagtgaggcgatgcagatgcagccgatggcgccagctgaaggggtgacccggcccgaggcggtgcagttgcgcaggaccagcgacgggggcgttgagatccgcaaagtggacgcagtgtccgggcacggtgccgacacggcacgcgttgaacctcagcagcactga

SEQ ID NO: 513960 - DNA, 297 bp, Stenotrophomonas maltophilia
atgcagattgtgatggaagtgaacgatgagaacggcaatcggctatgggacctcgccagccggttgggcctgctgtgcggtgtggcgtggtcggattcaacgcctggcaatggctttgctgccaatctgccgcctggggagttcttctacatccccatcattccctccgactcgcttggctacgttcccgtggttggttacgcgaatggccgggtgtactgggcgttgaataagaatggcagcggtcagttcgtcggcacgatcaaaccagtcaagttctactacggagtgcggtga

SEQ ID NO: 513961 - DNA, 336 bp, Stenotrophomonas maltophilia
atgatctacaacgtcaggccaggtacgggtcatgggtttgtgcggtttgtccgcccgcagctggagcaggcaacaccaggacagaatcagcccggcgcgtggaatgtgggaggcaatgagtcccgcgcggcatggcaagtcaacgtgcgaagtgatggcaaggtggcaggcatcaagctggagtccagcaacggcctcagcgcttttgacgtcctctccgacatgttccgtgtgtcgtccccaagcggcggcatgcgcactgagtacagcgacggaaactggcgtgtttacgaccagaatgggcgtctgcgtatgcgatggggcgttgtgccgtga

SEQ ID NO: 513962 - DNA, 597 bp, Stenotrophomonas maltophilia
atgagcaaagaagaagaactgaagaaccgtgacctgccggatatccgcccgatgggtccaaaggacccgactgatactgaaccggtgcccgatgacagctggtacatcgagaccaatccgttgttccgcggcgccgacatcatcggcgtgaactacaagggcaacgtcgacggcctgcaggtcggcggcaaggtcagcaccgggtctgcgaccctgcaggtcaaggagggcatgaccaacgttggcctgagctacaacaacgagcacgtctcagcctcggtcggttacaccgtcggcaatgagaacgccaacgtcaccaccgtctatgacaccaacagcggcctggccatcggcggcaagctgaagttcggcagcaccacggttgatttcaaccagaacagcatcggtgccacctacaacttcggaggcggcatcaccgccggcatcagcggttcgatgaacggtggcctcaccgtcagcttcggtgggagcaactggggcggtggtagtggcttctcgttctcgctgggagccaccaactccggcggcagctggagcgtggacgcccgcttcaacttggtgttcaacgccaactaa

SEQ ID NO: 513963 - DNA, 744 bp, Stenotrophomonas maltophilia
atgagggctttttgcacccttcgaggtctccgcaaagggtgcagaatctgcacccttttggacgacggattgaccttgaatcgaaaccccgagatgttccacggccgactcatcaaagggtgcaaattctgcacccttcaaccaagccggattaatccgatactcgcgggtaactccaccttcgtcgaaaccccttcggcggccaccgcggccagagttgaccagcagcaaccatccggcctgttccatgcgccgcagctggtactgcacggaacgctcagactgacgggtcttgtgcgccagcctggcgatcgatggaaagatgtgcgttccatcatcatgcgcgtggtcagccaatgccaacgcaagcagcagctccccaccactccccggatacctggagaacaccaggcccgttacccgggcgctcacatggcaccccaggtgttctgctcagggcaaactactccccgccgtgaactcgacagtagggctgcttgtcgtacagcgacttccaccgagcgggcagctcgtccgccgttccggtcacagtgttccggcagcgtttcccagtcccagtgtgggcgctgcattgcacacggcctccccactcgatccagtcgtagtactcggaaggcgtcaggcccagcagagcagatgtatgcaactccccggccgctatcgctgcggcttgttcggcggttgcgaatgcctctctcacaccgaacggtgcctcgatgctga

SEQ ID NO: 513964 - DNA, 312 bp, Stenotrophomonas maltophilia
atgagccatctggcccgttccaccgatcccagtggcagccatgtagccgctgccgatcttgtcgctagcggcgcgctgcgtgtccagcatgccaaggctgaggcggcggtgatccgtcaccccgggcatagcagcttgcaccttgcgacgcttaccggccttgaccgccacatgctgggtcgccgtctgcctgagcttgcccgcgagggacgcatctggcgcggcccgacggcgccgtgcgccaccaccggcaagcccgcctgcacctggtggccagtggcgccgggctccaacttcaacttggcagtctga

SEQ ID NO: 513965 - DNA, 588 bp, Stenotrophomonas maltophilia
atgaagcccaagccccatttcctgcccaagcgccagacggtgatctacggattcaccgagcagatgctgcgcgacaccggcagcaaccgccgcagcttcgccatggtggtggccgatcagtacctgtcgatgtatgcgcaggacgaccgcgaagtgccgttccgactcaccctcggtggggagggcgacggcgacgcggacaagaagcacaacggccagatccttggccgctacctcgacggcgtggtcaagacgctgccggccgaccttgaagacgcctgggtgatgagcctgccggagccgtaccgcagcaactgcgagcgcgcgctggggcgtcgccgcggcattttgccgatccgaatggaagccatcgaaacgtccgccgatacggtgggcgtggggcagttaatgaaggactttggcgacctctgcgctgcggtcagccccgcggtcgccgacggcgtgattgacgagaaggaccgcccccacggtcagaagatcatcaacgaaaccgacgacctggtcatcagcgcactgacgttccgcaaggcggtgattcgcgccatgggactggagaccgcccgatga

SEQ ID NO: 513966 - DNA, 432 bp, Stenotrophomonas maltophilia
atggacaaccttactgcttccgagatcatcgaccgcttgggtggcaccaccgaggtggcccgcatctgccgaatcaagccgccgtctgtcagtgagtggcgtgcaagtggaattcccccggcgcgcaggcagttcctcgaattgctgcggccggaagcattcgtagggtccagcattgcggccgtccgccagctggtcgacagccgcatgagtaagcgcgcgctgtgcgccaagctcggcatggacagcgacaggcacctggccaccttgctgcagcttcctctcgaagaggttgcggcatggccagaggaaggcgttctgcccgccttgccgcagatccagcgcctgctcggcgttgagccacaggccgctgctgagcccgcgaacgaggatcccgacgcgaatcgcatcgcgccggtcgacaccgcctga

SEQ ID NO: 513967 - DNA, 570 bp, Stenotrophomonas maltophilia
atggagttctatttgcaacttgctttgctggcgatcttctgtgtcgtcgcaacaatggccgttcgcgcgaccattcgagttcgcgcgctcgcagttgagcgaggacttcagagagccactctcttggcctgtgccgacgtgatggctaacgaaaagaacactgcaaaggcccgtgacttcgcgtcgctgattgctgtgttttcgctttctgacaaggtgatggcttcctttggtcgagatcacaagttgcttcgctccaagatggaggagttgcatcaggcaagcgaagcagcgcagggaggtggcctaagcgatgcggacaagaaggctatccagccggccctgagcgtcttcgcattgagttgtctgctgcgcgatccggcttccagtattcaggttaagcgcatatgggagcagttgactgcagagtcctacgctcgtgcgaacagcagtgctcccggccagagtaaggttcgggccacggaagccgctcagaagccaatgcaggacaggatccataaggtcgaggatgaagtgatcgataccttcagcgatctttgccacgcatga

SEQ ID NO: 513968 - DNA, 273 bp, Stenotrophomonas maltophilia
gtggtagctacgcgagtaccgaatccgagcaacgttctaccagccgagggcgttaaggaagtattgctgcaggctgcggcgaacaatcctgtaatagccttggtcgtctgcgggatcatcatctgttttgcttggtggtctatttgccaggttctgatcaagcgtaagcagtacgacgtaatgaagtcgcccgaggcgtcgaaagccatgaccgaaatggcaaagatcgaaaaggcccataaacgggccatggctaagctcaagaagagctga

SEQ ID NO: 513969 - DNA, 336 bp, Stenotrophomonas maltophilia
atgagccgcacgtatagaaacgagctgccgcagctcgacacagcactatcggcgttggagcgggccgcccgcgaagcattcgcggtcgcacaggatgactatccccccggcgccagctgcatcgtccgttcccagcgctacggccatcccgttgtcgaacgcagggcgctgatcgtcagcacgaccgtggatctgcacatcggcatcgatggaaagccctgggcgtcggtgagcgtccggacaaggaacctcaaaaccggaaagcaccgcgtcttctatccatccgtagaggtcgccggacagcccagcctacgcgccatggccggtgccgaatga

SEQ ID NO: 513970 - DNA, 489 bp, Stenotrophomonas maltophilia
gtggcgcaattcactccccaacaggctggcggcgtgaacgtcgtggccttcctcgacatgctggcttggtcggagggtacggataacgggaagcagcccaccaaggaccgcggctacgacgtgatcgtcggtggccaactgttcaaggtctacaccgatcatccgcgtactttggtggctctacccaagctaggcatccactccactgccgccggtcgctaccagctgctgcgccgctactacgacgcttacaagaagacgctcggcctgaaggacttctcgcctctaagccaggacctgattgcgctgcagcagatccgcgagcgccgcgcgctgccgctgatccaggcgggcaagatcccggaggcaatcaaggcagtcagcaacatctgggcgagcctgcccggcgcaggctacggtcagcacgaacaggaacttgccgacttgctggccgtgtatcgcaaggccggcgggacgttggcgccatga

SEQ ID NO: 513971 - DNA, 315 bp, Stenotrophomonas maltophilia
atgatcggggtcgacgtggactggcaggccattggcacggcagttggcggcctgatggtaggtgccggcggtgtagcgctgtggtggcgcaaacagttcgtagagacagccagggaaggggccgaggtcaacgtgatccagctgatgcgcgaggaagtgacccggctgggcgaacgggttggccgcatggaagccagggagcttcggctcattcgccacatctaccgcctcgaagggctgatgcgtgcggcggggttggagccaccgccgttcgatccggacagcgacacgatcagggcaggaggatcggagtga

SEQ ID NO: 513972 - DNA, 168 bp, Stenotrophomonas maltophilia
gtgaccgaccacgacttcttcgccgccatggccgtcggcatcccgtccatcgccccgccaacccgtatcggccgcgacctggccaccggggccgatatcaacgcgttggccgcggtcggcgccgacgccacgcccactgatcccctgccctgcgctctccccctgtag

SEQ ID NO: 513973 - DNA, 927 bp, Stenotrophomonas maltophilia
atgagcctggcgctggtccacagccgtgcccgcgccggggtcgatgccccgctggtgcgagtggaagtgcatctctctggcggcctgcctgtcacccagatcgttggcctggccgaaaccagcgtgcgcgaatcccgcgagcgtgtgcgggccgccctgctctgcgctcgcttcgactttccacagcggcgcatcacgttgaatctggcgcccgccgacctgcccaaggaaggtggtcgctacgacctggcgattgccttgggcattcttgcggccagcggccaggtcgatccacagtcgctgctgcagtacgaattcctgggcgagcttggcctgaccggtgagctgcggccggtggccggtgcactgccggccgcgattgccgccgctgaagccggtcgcatcctggtggtaccgccggggaatgccgcagaggcagctttggccgagcatgccgatgtgcgtgtagcgcgtacgctgctggagtgctgcgccgggttgggcaatccgcgcctgttgccgcccgtggaacgcgtggacacgacaccgttgccactacccgatctggccgacgtgcgcgggcaggcgcatgcacgacgcgcattggaagtggctgccgccggtgggcaccatctgttgttgatcggcagccctggctgtggcaagacgctgttggcctcgcgcctgcccagcctgttgccggataccgaagagactgaggcgctgcagctggccgcgattgcatcggtgagtggcgaagggctggacccgcgacgatggcggcagcggccctttcgggcaccgcatcacagtgccagtgcggcggcgctggtgggtgggggcaacccgccctgccccggtgagatatcactggcccaccatggagtcctcttccttgatgagctcgtccttaggtcgtcaagttga

SEQ ID NO: 513974 - DNA, 204 bp, Stenotrophomonas maltophilia
atgacgccgggcatagcccggcagcacgcggtagtgccggccgctggccggcatccgcgatggcgcgggagcgtgtcgaccaaggtcgacacctaccagagcatcagccttcaccccaccttcgaggggcccgtgcgccagcggctggggaccaggccgaaacgcttgcggaatgccgcggcgaagttgctggggtggcggtag

SEQ ID NO: 513975 - DNA, 1053 bp, Stenotrophomonas maltophilia
gtggcgactggccgccgctggcctggcccatgcgctgccacagcggcaccgcctcgcggggatcgaagcacgccgctgcggccagcatcagtcccacttcatccgcctgtgtctcgtggctgcgcgcatacggcagcaggtagccatagcccatcgccgacatcatcatctgttgctgctgcgcatccatgccgctggcggcgccggccacctgcccgatctgggtcagcttctgctgggccatgcgctgtgcaccatggcgcagcagcgcatgggcgatctcatgccccatcaccaccgccatcgcatcgcgggtgcgtgctaccggcaccaacccggtgtagaccgccatcttgccgcccggcaggcagaacgcattggcctggtcggacgggatcacattcacttcccactggaaatcccgcgcgaaatgcgccggctgcacgccgtgctcctgggccagcgcggtctccaccacatcgaccttggcaatcaagcgctgggcgatatcgcgcacatcgcgcgcgatcggtgcattggggtccatcggccgttcctgcgacaggatctgctggtaggcctgcagccccagcgcggtttcctggcgcgcgtccaggctgctgtcgatcatcaccttctcgccggtgtacggatcgaccgtgcggttggagaaccagtagaacagcgcataggcggcggccagcagcagcacccaccagcggatgttgccgaacaggccacgccgctgtgggccttgcgacgagcgggagaagggatcgttgcgcatcaggggacttcctgctggccccgccggctggcgggcacggcgcaatcttagtgcgccgctgcccgcagcgggtgaagccgggtgccgctcagatgccgcgcaccaggcggaagccgatgcgggcgttggtggtatccgaatcctgggactgccgccaggccgcgcgggtctgctcgggggcattggcccagttgccaccgcggatcacccgcgaccggcagcccgggttgaaccaggcgacgccatcggacggtgcgcggcggtag

SEQ ID NO: 513976 - DNA, 771 bp, Stenotrophomonas maltophilia
atgaagcgtacgccctcggcgatgcgcggccacgccttccacttcctccgctacggcatcggcttcctggttgcccatctgttgctgatcgtgctgggactgtgggcctgggatgcgctgctggaagaccgcaccgaagccggactgcaggccgaaatgcgtggcacccatgccctgctgcagcaccgcttcgccgaaaccccgcgcgagcagtggccgacgctggcgcgcgaactggacgccgacttcgcctatgccctgcgcatggtgccgttggcagaggcgatgaaggcgctgccggccagccagcgcccccccttcagcaacggccgggtgcagatcgacctggagcacatgcgcagcctgcagcggatcggcgacagcgactacgcggtgatgctcgggccgttggacgaagcgctgcctgacgagggctggcaggacagcgaagtgtcaggcgtggcgatcctgctgctgatcctgatggtggccgtggcgctgccgatgtacgtgatggtctaccgcctgtggcgcgacgtctcgcagctggcccaggccgcccggcagatgcgcgacggccagctggataaccgcgctggtgcggccgctggccaatgccttcaatcacatggccgagcagctgcagcagctgctggaaagccagcgcgtgctggcgcaggcagtggcgcacgaagtccgcacgccgctggcgcggatgcgtttcggcctggccgacctggaggacaccgcgctggacgagatccagcgtga

SEQ ID NO: 513977 - DNA, 612 bp, Stenotrophomonas maltophilia
atgtttcctgacgccgtacccgcccccgacctgctgcatgcacaggcctgcctgatcgatgccctctcgatgtcgctgcagatgcgcgacgcttacacccgccaccattgcgaccgcgttggcctgctcgcgcagcgcctggccacgcactgcgatctggatgacgatgccagtgcgcagatcggcctggcagcgcgcttccatgacatcggcaagatcggcattcccgatgaggtgctgctggccccgcgccggcataccgacgaggagcgcgcgatcatgcgcgagcatccggtgcgcggtgagcatatcttcctggccaccggccgcagcgatgcggcaccggttgcgcggctgatccgcgcccatcacgaggcgttcgatggcagtggctatcccgatgggctgcgcggcgagagcattccgttgggctcacgcatcgtcaccgttgcggatgcctatgacgcgatgaccagcgtgcgtccctaccgtgccgcgatggagcacgagacggctctgcgcatcatcgacgagcaatccggtggcctgatcgatccttacgttctgcaacgcttccatcgcctgctggcgcaggaacctgagctggcctga

SEQ ID NO: 513978 - DNA, 192 bp, Stenotrophomonas maltophilia
atggcgcggtacgtctacgagtgcctgcaattcaacgagcagatcggcacctgtgagcaggctggattcgtgccgcgcaccgatattcccgcacttaccactgccgaggtgtcggggttgttgtccatggttgcggtgtgcttcgccgtgtcatgggcatacaagcagttaggcaggtccgttcgcaactaa

SEQ ID NO: 513979 - DNA, 594 bp, Stenotrophomonas maltophilia
atgctactgggttccgaggcccccgctatgcaggcctaccgcgtgagccgggctgtgaacaccccgggcaagaacaccgagcagctcctgcagcccgtcggccgagcgcatgccagcaggcgtctacccttcccagccgaagggaggcttgatgtgcagcttgctcaacctgttcgcccgtaccgcctcccgataggcctcgatcttggccacatcctcgcgcaaccgagcctcgtggcgggtcacccacatctcggctccggcccggccctgctcgtagctggtacaccagcggaatggcccacctgggccatgccggtgccggtcgagattggcaatccagatcccgtcgcccacccgttgcgccagcgaaaccacccacgcgccgctgcaggcgatgaccgtcggtggctcgctggggaggctggcagaacgcgtcgtccagtagaagtcggggggcagcggcatggcgcggaggatacggctgaacgtcgcaaaggctgcgacaggggagcgggcgcaggcgtgagcatgtgcggcggtggggatgctgatggaccccttacgcgcggtaaggtgcaatttttcaggtga

SEQ ID NO: 513980 - DNA, 645 bp, Stenotrophomonas maltophilia
atgccgaccttggtcggcgttttcgtgccaaccaaggttggcacctaccgaagcggatgcatggtttcgggatccggcatccggccggactcgcactgcccggtgtgcgcgccgggcttgccgttcccgggtatatcgattacgccgcgttttgccggggtgagtgaggctggccgggaatgccttggtagatgccgaccttggtcggcgttttcgtgccaaccaaggttggcacctaccgaagcggatgcatggtttcgggatccggcatccggccggacccgcactgcccggtgtgcgcgccggacgtgccattcccggggtatatcgattacgccgcgttctgccggggtgggtgaggctggccgggaatgccttggtagatgccgaccttggtcggcgttttcgtgccaaccaaagttggcacctaccgaagcggatgcatggttggcacctaccgaagcggatgcatggttggcacccaccgacgcggatgcatggtttcgggatgatgctgggggtagctccctacatcgttccacctccaagacaatccggcgcaacatgcgtgctattgccgtcatcggcattgctctattgttgaacccgattctggatcttggggaaaacaccgcatggcggtag

SEQ ID NO: 513981 - DNA, 999 bp, Stenotrophomonas maltophilia
atggaaggcaatgacgatctggtggtgctgcgtccggaggggctgtactgcgccgcgggagatttccacatcgatccctggcgcccggtgccgcgcgcggtcatcacccatggccacggcgaccacgcgcgcccgggcatgggcgaataccactgcagcgaaggaagcctgccgatcctgcgctggcggctgggcgatgttggcgtgcaggcgcacgccgagggggtgccgttccgcttgggccgggtgcaggtatcgctgcatccggccggtcatgtgctcggttcgtcgcaggtgcgcatcgacgatggtgaacgggtgtgggtggcgtccggcgactacaagcgccaacccgacccgacctgcacgcccttcgaagtggtgccctgcgatacgttcattaccgaagcgacgttcgcgctgccgatctatcgctggccggacaccccggcggtcgccgcagagatcgtggcgtggcgccgcgaatgcgaacaacgtggcgaagcggcgatcctgctgtgctatgcactcggcaaggcgcagcgggtgctggccgagttgttgccgctggacgaccgccccgcgtggctgcacggcgccatcgccaatggcgtgtcggtctaccggcaggccaacatcccgatgctggagacgctcaccgtcgccgaacaggggcgtcaacccgatgccgccggccagttgatcctggccccaccctcggccgcaggcacgccgtggatgcgccgcttcggaccgcatcaactggggttcgcctcggggtggatgcagctgcgcggcaaccggcggcgccgcaacgtcgaccggggcttcgtcatttccgatcacgctgattggcccgcgctgctgcagaccatcgaacagaccggcgcgcagcgggtcatcgccacccatggcaataccgatgcattgattccgttcctgcgcgagcgcggcgtggcggctgaagcctttcgcaccgacttcgggagcgaggaatga

SEQ ID NO: 513982 - DNA, 2088 bp, Stenotrophomonas maltophilia
atgacccgtaccgcgctcgtcaccaccgccctgccctacgccaacggcccgctgcacctgggccacctggtcggctacatccaggccgacatctgggtgcgtgcgcggcgaatgagtggcggcaaggcctggtttgtctgcgccgacgatacccatggcacgccgatcatgctggccgcggaaaaggccggggtcactccggaaaccttcatcgccaacatccaggccagccacgaacgtgacttcgccgccttcggcgtggccttcgaccactacgactcgaccaattcggcagccaacaaggcgctgaccgagcagttctacctgaagctggaagcggccggccacatcagccgccgttcggtggcgcagttctacgacccggccaagggcatgttcctgcccgaccgttacgtcaagggcatctgcccgaactgcggcagccccgaccagtacggcgacaactgcgaagtgtgcggcgctacctatgcgccgaccgatctgaaggaaccgcgttcggtcatctccggtgccacgccggaaatgcgcgattcggagcacttcttcttcgaggtgggccacttcgacgcgttcctgcgcgaatggctggccggcgacgtcgccctgccgggcgtgaaggccaagctcggcgagtggctcaacgccgaaggtggcctgcgcgcgtgggacatctcgcgcgatgcgccgtacttcggcttccagattcccggccagccgggcaagtacttctacgtctggctggacgcgccgatcggctacctgtccagcttccagaccctgtgcggcaggatcggcgaggacttcgaagcgcacctgcgcgccggtaccagcaccgagctgcaccacttcatcggcaaggacatcgtcaacttccacggcctgttctggccggcggtgctgcacggcaccggtcaccgcgcgccgacccgcctgcacgtcaacggctacctgaccgtggacggcgccaagatgagcaagtcgcgcggcaccttcgtgatggcgcgtaccttcctcgatgtcggcctggagccggaagcgctgcgctactactacgccgccaagtccggcggtggcgtcgacgatctcgacctgaacctgggtgacttcatcgcccgcgtcaacgccgacctagtcggcaagttcgtcaacctggccagccgctgcgccggcttcatcagcaagcgcttcgacgggcagctggccgcgcagctgcccgatgcggcgcagtaccagcgcttcgtcgatggcctggcgccgatccgtgaagcctacgagcgcaacgacccggccgcggcgatccgcctgaccatgaccctggccgacgaagccaaccgctacatcgacgacgtcaagccgtgggtcatcgccaagcaggaaggcgccgatgcgcagctgcaggccgtatgcagccagggcctgaacctgttccgcgtgctggtcaccgccctgaagccggtgctgccggccaccgccgcgcaggccgaagccttcctggccgcgccggtgaacgactggaccgaactggcacagccgctgctgggccaccgcatcaccgactacaccccgctgttcacccgtatcgacccgaagaagattgacgccatgatcgacgcctccaaggacaccctgcagccggccgcggccgccgctgccgcccccgccgccaggaccgaagcggccaagccggccgccccggccccggccaaggacgaagcaaagagcgccgacgcgccggcctacatcggcatcgacgatttcgccaagctcgacctgcgcatcggcaaggtgctggtctgcgagttcgtggaaggatcggacaagctgctgcgcttcgagctggatgcaggtgaactgggcaagcgccagatcttctccggtatccgtggcagctacggcgagccggagaagctggtcggccgcagcgtggtgttcatcgccaacctggccccgcgcaagatgcgcttcggcctgagcgaaggcatgatcctgtcggccggcttcgacggcggtgcgctggcgttgctggacgccgacagcggcgcgcagccgggcatgccggtccgctga

SEQ ID NO: 513983 - DNA, 183 bp, Stenotrophomonas maltophilia
atgtttcgcatgcgaaacatttggattgagggtgaggctggctcaaatcgtgcgacgtcgcacgatttcgcccaagcggtgcctatcaccaaaagtgacaacgtgtcacttttacccctcatcgccggctgtctcgcactccaaatcgtgcgacgtcgcacgattttcctgccgccgccatag

SEQ ID NO: 513984 - DNA, 777 bp, Stenotrophomonas maltophilia
atgcctagtctcgtgggctcggagatgtgtataagagacaggtgccgccgtgtcaggagtggagcgagaaccgaaccatcaactgcccattgggccaagtgggccaggtgttccagagccgccgtcaccactgcggaaccgatccgagcgtttacgaggcgtgggctggctcgacgacggccggcagttggaccacgaccaacagcacctgcacgccgtgccctgctcccgagacccgcaacgtgggatgccctgcaggtcagtttggctcgatcggccagcggcggaccttctcatgcacgggcaccggttcgtgggacgcttggacgcaaaccaacaccacctgcgcggcttgcccagcgcctttcccacaagcggaaacccagtgggtcaccacggcggccgcttgcccggcgggccagagtggatcgcacacgtggcaggccgagcagcggcggacgaggatcggctcttacaactgcccggccaccacgtggtcgctgccaagctcgacgttcaccacttggacaaattgggcggagacgggggttcgtcgcaacgaggccaatacatgcacccccaacgcaccacctccgacgtttcccgaatacaccgggcgatcttggcattcgtggggagacggagggcactacggctgggcgatcttctgcaacgctccccggaccctggccgagcttcaagccacctcgttggcatgcacttggcaatacgaaacgaacgacacccccacgtttacgccagagccacctagcgtga

SEQ ID NO: 513985 - DNA, 132 bp, Stenotrophomonas maltophilia
atgcggttgccggccagcggccggcactaccgttcggcagtttcccaggggaagcgtggcaggggtccccgcctgctccagccgctgcagatgcagctggtcttccgcgccgtggccgaggcgctgggctga

SEQ ID NO: 513986 - DNA, 606 bp, Stenotrophomonas maltophilia
atgaacagcagcgaactcacgcccattgacgccgaccgcgtgcaggtcggcgactgtgtcattaccttgtcctcgcgtgaggtcgaggttgaaggcgcgcgccgtccgcggcggctgacgccgaaagcgctgggcgtacttcgcgtgttgatgcggcagcctgggcgcgtggtcacccgtgaagagctgtttgccgaggtctggcccgatacgttgccgaccaatgacgtgctgacccaggccgtcacccagctgcgcaaggcgttcgccaacgacgatgacaatggccaggcctacatcgagaccatcgccaagagcggctatcggctgctggtaccggtgcaggcgctggacgacgtcgagccggtggcggaagtggacgcggtggccgttgcggatgtgatgccgtcgccggacggtgccggcacgattccggcgctggccgtgccggcagcgccttcacgccggcgtggctggcgccagctgcgccgccagttgttgtggggatgctggccgcgctgctggtcatggccacattgttgctgcggcgcgggccggagccgagttcaccggtggatgcagcggtcgagaacggcgtgcgggtga

SEQ ID NO: 513987 - DNA, 258 bp, Stenotrophomonas maltophilia
atggcgaaaccttacgaacccaggaagctcactccgcaggagctggcagagctgcacgccctgccagacgacgcggtcgtcacgagcgtggaggccgctgccttcctgcggctgacgccgcgcaccctcgcatggacccgcacccagcgccccgagagccacccgccgcacctggtggtcgggtcgcggacgattcgataccgcatgggcgacctacggacccacatgaagcgccgcggcgccaccatggagggctga

SEQ ID NO: 513988 - DNA, 2091 bp, Stenotrophomonas maltophilia
atggccgcacaagagaacgcccacggcgtgctagaccgtgggcgcaaggttacaaccgaccgggagacggagcctgccagagctcacgagatcaatgatgccgcggggcacgccgccgcgacgccatcatttgaggccgcgtccgagtaccaccgcgtccggctcgacctgattcccctacgtcgtcgcgacaaggtgcccgccgataggcgctggcaggaacgcgcctacgaccggggcgaggtgctggagcgcgcgaagcgcgacggcctgaatctgggcgtgctcctgcccgccgacgtggtcgtggtggacgtggacccgcgcaactttcccgaagggcgcgacagcctagccgagctggccgcagcgttcgacctgccgctcgcgtcggcgccgcacgtcctgaccggcaatctcgaacaccccggccaccacttctacttccgcaagcccgcgggcgtcgtgctgctggagagcgtggatggcttcgagggagtggagctgaagtcgctcggccgtcaggtcgtcgcggcgggttctgtgcatccgactggcggcttgtaccgctgggcgcccgactcgccgccgctgggcgacatgccggacctgcccgtaaggctggtcgagaaggcgcgcaggccagatcgccccaagaagcaagcgaccggcgcgggtgagctgacgcccgaacagctggccgagaccctggcgcagctcgacccgtgcgacttcggcgagaagcagcacgaccgctggcgcgacctgatgatggcttgccacttcgcgaccgacggcggggggcgacaggagttcatcgactggtgcatgggcgacggccactatcgcggccaggagtggatcgtcggtcgccgctgggactcgctgcacgccgacagggacgaggccgtcaccacggcgaccctgcaaatgttcctgcaggaggtgggcggcggcatcgcaccgcccgatgcggctgaggacttcgacgtgtgggacgaggtcgaaccgatcgagccgcgcgcccgcaggcgcttcctcaacgtgaacgatctgaaggcgttgccgccgccgaggtggctcgtgcccggcctgctggtggaggacagcgtcgcggccatctacggcgcgcccgaatcgggtaagtcgttccttgcgctcgacatcgcgatggccgtcgcgggcggcgtggactggcacggtcgcagggtcaccgacggcggcgtcctgtacgtcgcggctgagggcgcgtctggcctcggcaagcgcgtccgcgcgtgggagatcgaccgcggcatcgacgtgggcaagttcccgctctggctggaccacggcgagatcaacctggccgccgagcgcgacggcggcgtccgcgccttcgtcagcgacgtggtcgaggagctaggaccgctgcgcctggtcgtcatcgacaccctcaaccagacggcagcaggcgccgacgagaactcggcgaaggacatggggcgctacatcgcgagcatgaagcgcatccgcgacgagacgggcgcgaccgtcgtggtcgtgcaccactccggcaaggaccccggcaagggcatgcgcggcagctcgtctctgctcggggcaatggacaccacggtcgaggtgatccgcgacaaggaaatgcgcgccatcaccgtgaccgtgcacaagcagaaggacgcggagcgcgagccgccgatgcgattcaacctggagcgcgtggaccttccgggggaacccgactggaacggcaggccgccgtcgtcgctcgtgctccgtccggccgtgatggtcgacgcgacctccgacttcgggggcgaggcgacgccggacgacgggctgactgtcctggcgtgcgagctgggcgcgtcgggcgggacggtgaaggcgtccgagctgctcgacgccgccaccaagcgcctgggcatgagcaagagctcggcgcagcgcgcggtggcagacaagatccccgagggtcgcatcgatgccgtgcgcgcaagctgggacggccgccacttctggctgtggtgcgagcgcgtcggcaagcactccacggcgccgaaggtggtgcgggtcgaggccgcgtcatga

SEQ ID NO: 513989 - DNA, 246 bp, Stenotrophomonas maltophilia
atgagtgacaagctgacggtggccgaggctctggccaaggcggagcagatcgaggtcatgctgggcgctatcgagggcaccgcgcccgaggcggtcgaggcgatgggcgggcgcgacgccctggcccggcgcagcgagatgacgtgcctcggcccggtgccgcgcctggacgcggacgagtgggagcgcatgtcgctggaatacgaggcgcggcgcgagcatggcagcgtcaaccgggggcactaa

SEQ ID NO: 513990 - DNA, 444 bp, Stenotrophomonas maltophilia
atggcagcgtcaaccgggggcactaacgggcaagcggtcgccgtggaggtgggcggggtgcgatacccctccgccaggcaggcggcccaagcgctcggcctcagccccaacggggtgtcggtccggtgccactccgacaggtggcccgactaccgctggctcggcgcgacgcccggccggcgggagctgacgcccgaggagaggcacatcgcaaggcccctcacggagcccgaacggtggccgaacgacggcggcgcgcgacgcgcccccgtgatggaccccaactacgacccgcccagggtcgtgcgtcgggtcggctggctccgctgcatgtgctgcgggcggtcccacttctccgaggacgtagcccgcgcccgcatgtgcctggactgcggcggggccggcggcatgccgaccgggccgcgtgccgactgggacgcctga

SEQ ID NO: 513991 - DNA, 1347 bp, Stenotrophomonas maltophilia
atgaagcgtgcagggctgggcagggcaatgggtgtggttctggcgttggcagcactgccggcaatggcggcggccaacgtgcagcagttcagccacgggcggttcgagcagattccggtgcacatgccggctggcacgccgcagcgtgtggtgatctggttccatgaacccaccgccggtggtgataccagccgccttccgatcgaggccctgcgtgccgatggcgcgatggtcgctgccgtggacatcgcgcatctgcgcagcgtgctcaagcgcgaggggaatccgacctgttcgttcggttccggcgacgtcgagaacttctcgcgctggttgcaggcctccctgcacctgcctggctaccacctgccgctggtcggtggtgatggtgaaggcgccgagatggcctacacgctggccgcacaggccgacacccaggtgttcgccggcctgctgaccaccggcttctgcccggatcacagccacgagcgcatggtctgcggcgatggcgtgaagcacaacaagctgcagcctgccgagttgaattccccgtggctgagcgccgccggcgaccatggctgcaaggttggcgaggccagccgcttcgtgcagcaggtggcgatggcacgcgagttcaagcgcaccgcgcgcggcgatgcttcacccggcctggtggcggcggcgcgggtgatcggcgcgcaggccggcgtcagcctggcaccgccaccagccgcgctgaagggcctgccgatagtggaagtacccgctgccggtaatggcgacacgctggccgtgttcgtttccggcgatggcggctgggccggcctggacaaggacgtagcatcgtcgctcaacgagcatggcgtggccgtggtcggcatcgactcactgcgctacttctggagcgaacgcacgccgaagggatttgccactgacctgcagaagatcatcgatcactaccgccagcagtggcatcgcgacaaggtgatgctgatcggtttctcgcagggtgccgacgtgctgccggccaccatcaaccagcttgatgccggcacccgtgaggcgctggaccgtatcgtgctgctgtcggtgggcaggaaggctgactttgaattccatgtcagcaactggctggggggcggcggtgacggcctgccgatcgcgccggaagtggcgaagctgccggcggcgaagaccctctgcgtgtatggcgacaaggatgacgacgcgctgtgccccggcctgccggccaacgacggcgtgcagaaggtgaagcttccgggcgaccatcacttcaatggtgattacgaccgattggccgaagtgatcctcaagggcggggcgtag

SEQ ID NO: 513992 - DNA, 285 bp, Stenotrophomonas maltophilia
atgttcgtctccgatctgggccatcgccttggcctgggtgtgctcgatgccacgagcgctgcgctcgtcttcaagctgcgattcaagcgtggtcacacgctgctgcgccgtggcgtcacgagcctgcgcgtccagggcattgccgcggtagagaagtgctgcggcaatggccaccagcaggagcaccagcagcagggcgaccgttgcgatcagggcgcgaatcatcagtaccggccctcgcacatcgcgcgctcggccgtgcggcggcgctccaggcctttgtag

SEQ ID NO: 513993 - DNA, 975 bp, Stenotrophomonas maltophilia
atggcctgggcaaccgacacagcagccaacatcaccgacctcatggcccgcctgcgggacttcctgaccaccaacgcggccctggtggcagcgaaccagcagtggcaggtggtgggcggcgtggccagcggtccgatcgcggccaacgatttcgtgtcactgaaggggcgcgggctctccggagaggatgagatctacgtatcgctgcaggcgtgggtggtgcccgccagcgcttactacaacatggcgatcttcggtcataccggctacaacccggcgcagccgcgcttggatcctcctggctccaattcgaatccggtggcgttgctgggcgtcaactcgccgatcaagtactggttcgtcgcaaacggccgttgcttcaaggtcatcacgcgaatcaacggtcgttatgacgccgtctacgctggcttcatcttgaccgaccatcttccagccgactggagttacccgctcttcattggtggatcgtgcctggagaggaactacctggcttcctcggatacctatgagcactccaacttctggagccccaacgccgacggcgtcaacaacacaagccgtagccaggcgtacctcttctctccgatgcaggcttgggttccgatccgcaacctctcgctgggcggctctcaggcgacagggcgcatgacgctgccgtgggcaaatgccatctgcaaccaaaacgtgcgcaactgtctggatgggcagcgctgggtgcaacgcgggcaattggcgggttttgcatggggcgccagtctgtccgaccgaggcgctccctacagccagatgcccgagaagggtcagttctacggcagcttcgacggcgtcttctacaccccgtcattcggtgcaacggcggagcaagtggcaaccgtgggcggtgtggaccatctggtggtgcccaacgtgtaccgcactggttctggcgagttcgccgcgttttccctggagtga

SEQ ID NO: 513994 - DNA, 480 bp, Stenotrophomonas maltophilia
gtgcagtcccatgcctggcagacgtggggccgcaccgagcaggccaacctgcgcagcctcctgtactggctgcagggtcgcgcgtccgcgctgtggctgccgtcctgggccgacgacctggagctgatcgagccggccttggccacctccggaggcatcgtggtggcatgggccggcgtgtctcgcttcggccgcgcgcagcccggccgccgacatttgcgcatcgaactgttcaatggccaggtgttgtaccgccagttggtccaggccaccgaactcgatgcccagcgtgagttcctgcagttggacgtgccgcacggtatcgccctgcagcctgcagccatccgcttgatcagttggatggtgctggcccgcctcagctctgacaccgtcgagctgtcccatgaaactgatggcgagggcctggcccgctgtcgggtgtccttcgccggcatcggtgccgaggagagtgagccgtga

SEQ ID NO: 513995 - DNA, 348 bp, Stenotrophomonas maltophilia
gtgccgattctgaagttcgatttccacatgctcggtgacatggcttcatggcaaacggacgggaacgatgccgtcctggtcggtaccaatgcaccctatggcgccatccaccaattcggcggcaccatccaacgcgccgcgcgtccggccaatatccacctgaagacgggtaagggcggcagccggttcgtcaaagccagtcgtgggaacgcgcgctacaagcgctcggtcacaatgccttcgtacacgaacaccatcgctgctcgtccgtggctcggtgtcagtcgcgaggatgagaaggagctgctggatatcgcccaggatcacgtgagcggcgccttcgagtga

SEQ ID NO: 513996 - DNA, 282 bp, Stenotrophomonas maltophilia
atgggcagtgagagccagcgcggccactggccggccatgcgggcaacctacaccgtcccgcttttccggctcccgccagagctggccgcgagcgaggggccgctgatccgccgcaatccgctgacgaagaagtcccaggtggccgccgtcctgaaggacggcggccgtatcgtgcctggtgcgcgcgaagggctgcggcggctcttggatcatgccggtcaggaagtgccggcatggcagaccgccctccgggccgctcagggcgcaaggagcaaggcatga

SEQ ID NO: 513997 - DNA, 1476 bp, Stenotrophomonas maltophilia
atgcgcatccctcatcgtcttagtcgttcttcgaccggtcgttggtcctttgtccagcgtgttccggttgatctccacgccgtgctcgattgccggctcatcaagcggacacttcggactaaagatttagcgcaggcgcatgtgcgtgcggtcgtgcttggggcgggctatgctcgtctctttgcacagttgaaggatcaacgcgtggctaaactcagcagatccgacgccgaactcctcatcgctcgactgacgagtgctgaggggcttcaagagctcactctcaatcgcacccgcaaaccggacgggacgatcacggagcagtggcagatcgacagtccaaaggatttgaaactctatcgggaactgatggagcttgaggccgccggcctgacgccgccctcctcgccgctgccccaggcatcttttgccatgttcggttcgccggccaccggagcagcgaggcggaggcccgctgcccctgcgattgagacgatgacgcttggcaaggctcgcgaggcattcttggcgacgatcaagtcctcgacacttcccaagacctacaccatcaagaagacggcggtcgaagcactggtggcgtttctggggccaaagatgacgctccacgccatcacgcgttcggatctagcgcgttggtatcaggacatgcgagagaagggttcttccactcctacgttgaccaacaagcagtcttacattggtggcaaaggaggcttcttcgattgggccatggcttcgggccactatccgaagggcgacaaccctgcttccggacatgtgagctactcggcccgcgagaagcgtgcccgcaagaagcacggctttaaggcttatgatcgggcccaaatccatgcactctttgcgtctgaggccttggccaaaatgtccgaggacgcgcgatgggcatcctttattggtctttacactggggctcgcgcatcggaagttggccagttgctgaccaaagacgtgttcgaggatgaaggaatcccctgtatccgcatttctgacgagggggaacaccagaaggtcaagacggaggtgagcctccgaaccgttcccgtccacgctgaactgcttcgactggggttcctgcagtgggtggccgcaaaacgggctgcggggcatgagcggcttttcccggccgccaaagcagaagcggtcaacggccaaggcaactggatcacaaaagcgttcagtcgacacctcgggcagatcgcccatgggtggccaccagcgaagagagggtttcactcgctgcgcaagacgtttattcaggagctgcaaggtgctggcgtggtgtccgagcttcgtgcccagattgtgggtcacgagatcgatgacgagcaccatgcgacctatagccggcctttcagcgtccgcgagaagctgtccggcatggggcctcacagcccgggcctgtcggtggtggactacggctttcctgaagaatga

SEQ ID NO: 513998 - DNA, 228 bp, Stenotrophomonas maltophilia
atgaagtggaacgcatttcctcgtaagcgctccgctgcctcattgaccgtcgaagacttcaagcaatgcgggcatctaatcctggatggcatggacagctcccctgcgcaacctcacgagctgcgccgcctgccaatggcgtggaatctcaagcccagccagtggggccaacctctcaccttccaagcgcgccctctcagaagtcacccgggaggccgccgatggtga

SEQ ID NO: 513999 - DNA, 303 bp, Stenotrophomonas maltophilia
gtgacgatagcccaggccggcacccaagaggccgccgccggtgtgcagcaggtgatcgctacccaggaggcgctgcaaggaatcagtagcgccgttggcttgatccatgacatgggccagcagatggcggcggcatcagaagaacaggcgcatgtcgccgaggatatctcccggcagatcacgcgcattgcccaagcctctggctataatgccgagctggcgggagagaccgcgcaggtgggcaacgacttgaaacagacatcacatgccatgcatgcactggttgagcgcttcggtaactga

SEQ ID NO: 514000 - DNA, 1764 bp, Stenotrophomonas maltophilia
atgcactggttgagcgcttcggtaactgagatgagaaaaccgggagagaacaatcaggtgcctgacggggcggaaccgaatacatgggatggcctggagtcagcgcttgccggtgccattttcaatgccgctgtagatgccatcatggtcatcaacgcacgcggtattctccaggcggttaaccagtctacacaaacgcttttcggcttcagttcggacgagatgctcggcaagaacatctccatgctgatgccagcaccgtatgcccaggagcacgacggttatttaaacaactattgctccagcggtgagcgcaagatcatcggcattggccgagaggtcacgggccagcgcaaagacggcagctgctttccgctgcatttgagcgtcagtgagttcagtcaggatggccagcagttattcgtcggcatctgccacgacatcagtgagcgccgcaagttcaccgagcacattgcctttctggccaaatacgacgggcttaccgggtgtgccaatcgacgtgagtttattgaagggctgtccagagccattgaggcttgtcagaccagtgggcggaaaattgcggtgttgttcatcgatctggacggtttcaagcagatcaacgacaaccatggtcatcaggttggcgaccgcttgctcaagctaacagttgagcgctttcagaaaaccttgcgcgatagtgacttattaggtcgggtggggggagacgagttcgtcgtctctatcattctagattccaaaggggaagcagcctcccacatcgccgcacggttgatggaggcgctgaaggagccattcgtcattgataatcgggcactgagtgttggcgcaagtatcggcatcagcctgtaccccgatgacggtctgacagccgatgaggtgatgaatgaagctgatatcgccatgtatcaggccaaggtggaaggaggcggctgtattcgcctattcgatcaagcgttacgtgaacgatccgagcaggtctatcgcctgctcagtcgcttgcgcaaggccatttcgctagagcagttcgagttgcattaccagttgcagttcgatatgcagaccttgcagccgtgcggcatggaggccttgctgcgttggcgtgacgttaatggcctggtggcacctgatcagtttattcctgtagcactggaatacggcctgatgccgactattggacgctgggtcattcgccaggcgtgcaaagacaatatgacgctaatcgaaacgggcctgctggatgtggtggtagcggtcaacatctgtgcctcgttgttcagtgaagccggattctgcgcgctggttcatcagttacttgtcagcactggactgccggctgagcgtttggagcttgagatcgccgaagatgtggcaatgaactcttcggcccaggtattgcagacctcggatgaactgcatgaggccggtatccgtttggcaatggatgattttggcatcggcttttcgtcgttgaaccgcttgaaaaagttgcggtttgacaagctgaagatcgatcgatcgttcgtttctggtctttttgaaagccgtagcgatcaagctatcgtgcaggccgttctcggcatggccaaaggactcagcatgcgcacggtggctgagggggttgaaacggaggagcagctagccttcctgcgggaggcaggatgctctcaagggcaaggtttctggtttgccaggccgatgccactacctgaactaattgagtggttgcgggagcggcgttag

SEQ ID NO: 514001 - DNA, 498 bp, Stenotrophomonas maltophilia
atgcgcaagaccctttctttttctctggccttgatggctgcgttttctgccacttcggcgtccgccgctgacgtcaccgaagacttgatgatttctgcgaccgtgaacaacgagtgcagcatgctcgtgacccagctgggcggtggtgaatacaacggcttggcggttggcacgcagggctactccaacggcgcgttgctggtgcgttgtaaccagggcacggcctttagcatcgtgcccggcgatggattgaactacggggccgcgattggccgtcccaatcaccgtgccgtgtcggatggtgctggaaacttcgtcgcttacggcctctttaaggatcctggtgccagccagatatggggcagtggggccgatgcttgggagggcgtgggaaccggtgagcagcagatgatcggcatcggttatgccttctatgatctgaacaaggtgcccggcggaaccttctccgacaccatcgccgtaaccctgacttactga

SEQ ID NO: 514002 - DNA, 657 bp, Stenotrophomonas maltophilia
atgttgaagcgtttgttggtggtttcattgtttttgctgtgcgccgctcctgcatcggcgggcaacgtgtcgttgtttcccacaagcatcgtggccccggctggagaaaaggcaggggcgttgaccttggaaaaccatggaggcgcctcggagcgcttccaggtcacggtgttggactggtcccaagaccccagcgggcaggacgtgaccggccccgccaaggcggtgctcgcggcaccgtccattgtcgaaatcccgccagggacccgccgggccgtgcggttggtgcgcacccaaggcatcggcacgccgggctactaccgcgtgctgctgcgccagttgccccagccgtccacggcgggccaggtgcagttgttgatccaccagaacctgccggtggggtttgaagacgccaaggccggtcctcccgtgctcagggcgcgcttcaccgccaaaggtctcctgctgaccaacttcgggcccaccgccgcacgcgtgaccgccgtcggtcctcaaggcatgccggcgtggcgcgaaggggcgctggggtgggtgctccctggtcagagcaagctggttgagctcaagcccggcttgaaagcgtccacgctctcaatcacggccaacgggtcccccgctaccgtccccgtgaactga

SEQ ID NO: 514003 - DNA, 309 bp, Stenotrophomonas maltophilia
atgcagcgtcttaccaagcctcaagccccgcagcgccttcccaaggtcttgcttccgaaggccatgcaccaagcgctccaagtgcaagccagcatcgctggcgtgaccatcgccgaagccgtgcgccaagtgctgaccgttgcgatcaccaagcctttatccccgtcgcaaggccaggtgcttgagcctcgcatcgcgttggctccggtgtcggccccagcagagttggtggcgaggttgaagtctagggcatggatggaacaggtcagcgtggccgaaatagtgcggcgggcgttgaacgatttctga

SEQ ID NO: 514004 - DNA, 342 bp, Stenotrophomonas maltophilia
atggaacccctcaccaccctagacggccgttatgtcattgttcgaggccgcctctggcgcacgaccaacccgcgtcttagcaagccagaaagggagcgcctcgttcatgcgctgatggacgcacggcgtgccgtgaagtctgcgaaggtcaacgaagacagggaggcactggccgccgcccggcgcgccgtggacagcgcgaaaaggggattgggcgaacgtggtccggtgtggtggaccgatggggatcagggttggaacctgcacctggtgaagaactcgccctatgcgagatggtttaaccaacaagccaatggcgaggccgaggcctacgaactgtaa

SEQ ID NO: 514005 - DNA, 306 bp, Stenotrophomonas maltophilia
atgctgcattccgaccagggcagtcaattcaccggcaacgaatggcaagcgttcctgaaggctcatggcatcgtctgcagcatgagccgacgcggcaactgtcatgacaacacagtggccgaaagcttctttcaactactgaagcgggagcgaatcaggcgcaagatctacctgacccgggacgccgcacgcagcgacgtattcgactacatagagatgttctacaaccccaagcgccgacatggttcaaatggaggtatctctccggtagagttcgaacggcaagcgggaaaatctggcttgtag

SEQ ID NO: 514006 - DNA, 411 bp, Stenotrophomonas maltophilia
atgcattttgcgataatcgcaaatgacctttaccgggggtttgggtcaggctatgcggtcgcctcctgtcgtccgcccatgcagcccaagtctcccgccacgctattcggccgtcgccttcgggcggcgcgggtggctgctggcttgacgcaggcagatttggggagggtgctgggcttggacgaccagaatacgggcgcgccgcgcgtcagtcggtatgagaccggtcggcatgagcccgaccaggaaaccatggccaagatcgctgaggccctgggcctgccggtggcctatttccatgccgtggacaatgtcctggccgaagtgatcctgctggtcagccgcatgcctcctgccgagcgggaggcgatcctggccctgatcagggagcgggtcagcacacccgagtag

SEQ ID NO: 514007 - DNA, 1320 bp, Stenotrophomonas maltophilia
atgagcactaccgcaccacggaaaatgggcctgaccatggccaccatgctggtcgccggcaacatgatcggcaccggggtgttcctgctgccggccaacctggccacggtcggcagcatttcctcggtcggctgggtcatcgccaccgccggcgcgatcgcgctggggctggtgttcgcccggctttcgcagatcaacccgcagcccggcggcccgtatgcgtatgcccgcgataccttcggcaactacgtcggctttgtcagcaactacgcgtactggttcggcaactggatcggcaatgtcgccatcgcactggtggtcaccggctacctgagccacctgtggccctggctggagggcatctacccgcgcctgggcttcaccctggcggtgatctggctgctgagcctggccaatgcccgcggcgcccgctggatcggcgcgttggagaccggcacgctgctgctggcgttgatcccgatcctgagcatcgccatcgccggctggtggtggttcgatgcggacatgttcatggccggctggaacgtcagcggcatggaggacagcgcggcgatctcgcgcagcgcctcgatcgcgctgtgggcgttcatgggcgtggagagcgcggcggtatcggccgacgtcatcgacaaccccaaacgcaacatcccgctggcgaccctgctcgggctggcgctggcggcggtgatctacatcagctgctcgctggtgatcatgggcatgctgccgatggaggcactgcgcgactcctcggcaccgttcgccgatgtcgccaagctgatgatcggcccctggggcgtggtggtgatcgcgctgtgtgcgatcttcaagtcgatcggcgcgctcggcggctggatgctgctggtcgggcagtccgccaaggcggcggccgaggatgggctgttcccgcgcgtgttctgcaagctcaaccgccatggcatgcccggcaccggcctgatgatcgtggcggtgctgatgagcggcctgctgctggtgacctcctcgccgacactggcccggcagttcgaccagctgaccaacatcgcggtgctgctgaccatcattccctacctgttctcggccggggccctggccgcgaccacgctggagcgcaatgaacggggctggctgcgggccggctgcctgctcaccgccgccgccgcggtcgcctactgcctgtatgccctgctcggcgccgacgcccagctgctggcctacgccaccgtggcgatgctgttcagcgccgcgctgtacccgttcttccgcaagcggatgctggagaccggcagcggccgctag

SEQ ID NO: 514008 - DNA, 906 bp, Stenotrophomonas maltophilia
atgaccagcacccgccaggagcaacgcgtactgcaactgtcgatcgcagggaccgtgctggtcgctgcgatcggtttctttggcggcatgctggcccgctcgcaggccatcctgttcgacggcatctacagcctggttgacgtggccctgaccctggtcgcactggcggtgctgcggctgatgaacaacgagcagagcccccgcttccagtacgggttctggcacctggagccgatggtcgaggcgctgggcggcgccatcctcagcctggcctgcatctatgcgatggccaatgccgtcatcggcttcagcggtggcggccacgagacccgggtcggcccgggcctggcgtgggccgcgctgctggcggtggtcgacctggtcatggcggtatggatcggccgccatgcgcgccgcctggagtccgggctgctggcgctggacgcgcgggcctggctgctgaccgggctgatgagcctggcggtggtgctgtccttcgtcatcgcgctggcgctgcgcggcggcagccacgcgcactggatcccgtatctggacccgctggtgctggccgtcatcagcctggccgcgctgccggtaccgctgcgcgcggcctggaaagccgcccgcgaggtgctgcaggtggcgccgagcgaactcgatgcgcaggtgcagacggtgatggagcagttcgtcgccgagcatcggtttgaaggtttcaccagccatgtcgccaagatgggccgcatgcagttcatcgagatccacatcctcacccggcccgatacgcagctgggcagcatcggcgacgtggaccgcctgcgcgatgagatcgccacacggctggacgcacgctccggccgcttctggctgaccatcgacttcacttccgatccggcctggacatga

SEQ ID NO: 514009 - DNA, 2289 bp, Stenotrophomonas maltophilia
atgtacttcaagtccctggactatcccatcgtcatcatcgacgcggactacgagtcgccgcgcatcaacggcatcctgatccgcgccctggccgacgagctgcgccacaacgaccagcgcgtgctgtgcggcctgaccctggatgacgcgcgcgccggcgcacgcacctacgtggccgcctcggcggtgttgatctccatcgacggcaccgaggagaacgacgaccagttccagcagctgctcgccttcctgcgcgagcagagcaagcgccgcgccgacctgccggtgttcctgtacggcgaccgccgcaccatcgagaaggtgccgagcaagctgctcaagtacgtgcacggctacatcttcctgttcgaggacaccaagagcttcatcgcccgccaggtgatgcgcgcggccgaagactacatggccacgctattgccgccgttcttcaaggcgctgatccaccacgccgccgagtccaactattcctggcatacccccggccacgccggtggcgtggcgttcaccaagtcgccggtgggccgtgcgctgcaccagttctacggcgagaacacgctgcgcagcgacctgtcgatctcggtaccggaactcggctcgctgctcgaccacaccggcccgatccgcgatgccgaaaccgaggccgcgcgcaacttcggcgccgaccacaccttcttcgtcaccaacggcacctccaccgccaacaagatcgtctggcacggcaccgtggcgcgcggcgacatcgtgttcgtggaccgcaactgccacaagtcgctgctgcactcgctgatcatgaccggcggcatcccggtgtacttcacccccagccgcaacgcgcacggcatcatcggcccgatcagcctggaccagttctccggcgaggcgctgcagcggatgatccaggccaacccgctggccagcaaggcggccaagccgggtgccaagccgcgcatcgcggtggtcaccaactccacctacgacgggctctgctacaacgccgagaagatcgccgacaacctcggtaccgcggtggacttcctgcacttcgacgaagcctggtacggctacgccgcgttccacccgttctacgagaaccattacggcatggccaagggcaagccgcgcgagcaggacgcgatcatcttcaccacccattccacgcacaagctgctggccgcgttctcgcaggcatcgatgatccacgtgcgcaacgcggccacccgcgagctggatgcggagcggttcaacgaatcgttcatgatgcacacctccaccagcccgcattacggcatcatcgccgcgtgcgacgtcgcctcgaagatgatggaaggcgaggccggccgctcgctggtgcaggaaatgcacgatgaagccgtcaccttccgccgcgccatgctgcatgtcagccaggacctcggccgcgatgactggtggttcaaggtatggcagccggacggcgtggaacgcagcatcggccaggccgacagcgacaagccgctgaccacctcgcgcccggactggtacctgcgcccggacgcccattggcatggcttcgacaacctcgccgacgactatgtgctgatcgatccggtcaaggtcacgctgctcacgcccggcctggcgatggacggcaccatgggcaagctgggcattcccgccgcggtgttgagcaagttcctgtggacacgtggcatcaccgtggagaagaccaacctgtactcggtgctgttcctgttctcgatgggcatcaccaagggcaaatggagcaccctggtcaccgaactgctggccttcaaggacctctacgacagcaacgcaccgctgacccgcgcactgccgagcctggtcgaggagcacccggtggcctatgccgactggggcctgcgcgacctgtgcgccgcgctgcacgccttcaacgacgagttccgcgtcgccgaagtgatgcgcgagatgtacgtggacctgcccgagccggtgatgaccccggccgaagcgtacaaccacctggtgcaggggcagatcgagcgcgtcgacatcgaccagatcagcggccgcgtcgccggcaccatgctggtgccgtaccctccgggcatcccgacgatcatgccgggtgaacgtttcggcgcgcaggacgagccgatcatccagtcgctgcgcatcgcccgcgagcagaacgcgcgcttcccgggcttcgagtccgacgtgcacggcctgatcatcgacaacagcggcgcgcagcccagctacaaggtggaagtcctgaagctgtaa

SEQ ID NO: 514010 - DNA, 1350 bp, Stenotrophomonas maltophilia
atggcaggtcagaaaaaaatcggcgtagtcggcgcgacgttcctcgtcgccggcaacatgatgggctcgggcgtgttcctgctgcccgccagcctggccaagatcggcaccgcctcgatctggggctggctgatgaccaccgccggcgcgctgctgctcgccttcgtgttcgccaagctcggcaaactggccccgcaggccggcggcccctacgcctatgcacgcgactggttcggcccgtacatgggcttccagaccaacaccatctactggttcgccaactggatcggcaacgtcgccatcccgatcgcggcggtcggctacttcagttacttcttcccgatcctgtccgacccgatcccgcgctgcatcgcggtgctggtgctggtatgggcgttgagcttcgccaacgtgatcggcccggcgttcgtcacccgcgtgcagaccgtgaccaccagcttcgcgctgatcccgatcctgggtatcgcgatcttcggctggttcttcttcgacccggccatcttcaagggcgcctacaacgtctcgggtgagtccaacttcggcgccatctccagcgccgcggcactgacgctgtgggccttcatcggcgtggagtcggcctcggtgaccgccggcgtggtcgagaacccggagaagaacgtcgcccgcgccacgctggccggcgtgttcctggcggcggtggcctacatcgccagctcctcggtgatcatgggcatggtccccaacgccgacctgcaggtctccgacgcaccgttcgcgctggccgcggccaatgccgtcggtggctggggcggcgcgctggtcagcctgtgcgccttcatcggcgcggccggctcgctcggcggctggatcctgctgaccgcgcagagcgccaaggcggcctcggacgacggcctgttcccgagcatcttcagcaagatcaacaaagacgaggtgccggtcaagggcgtgctgatcgtcgcggtgctgatgaccctggcggtgctgatcacctcgacctcgaaaaccgcgtcggcgcagttcgacgtgatcacctccgctgccgtggtgctgaccctgctgccctacatctactcgtgcgtggcctgctacttcgtggtcgagcgctcgcacacgctggtccacaccggcgcgttctgggtgctgaccagcatcaccgtggtctattgcctgtgggcgatcttcggctcctccggcagcatcgtgcagtacgccttcctgttcgtactgttcatcaccgtcttctatccgttcttcagcgaggaccgtcgcaagcagaagcttgccaagctctcgcccgtcgctgccccgcgcagcgcatcgaactga

SEQ ID NO: 514011 - DNA, 1464 bp, Stenotrophomonas maltophilia
atgaaaccacgaacacttgccattgcgatggcccttgcattggcacccggatgggccagcgcacaggattcggtagccaccctgcgcgaagagatcacgcaggtgcagaaccatctgcaggccttgaccgaacgcctcaacgcgctggagcgcggacagggcacccaggcacagagcggtacccccgcgcctgcgacagcgccacaaacggcacccgcctcgtccgtagtcaccaccccgccggcagccgccgccacatcgatcgcgcagctgtccccgtcgcgttcggcggccaccacgcaatcggtgctgccgccacgtgattcggtcgccgacccgtccaccgcggcatcccgaccggacaatgcgccctcccccaccgatccggagctgaagggtttcttcgccatccccggcaccgagaccatgatccgcctgggcggttacgccaagctcgatgcgatcgccgatggccgcgccgcgggcgacaccgaacagttcgtcacctcctccattccggtgggcggtccgcaccgcgacgtctcgcatttcgacatgcacgccaagcagacccgcttcagcttcgaagcgcgtcgcccgaccagccatggcaacctgcgcttctacctggagaacgacttcttcggcagcagcgacagctatcagttccgcctgcgccatgcctacggacagctgggcaacacctacgccggctatggctactccaccttcatggatgccgactcgctgcccgatacgctggatttcgccggccccggcggcgccggctacctgctggtggccggcatccaccacagcttcgcgctgggcaagggcaacagcctgaccatcgccgccgaagacccggatgcacagctggccaacaccggcgattcggacatcagtgccgaccgcttccccgacgtcagcctggtcgcacgcatggagcgcaactgggggcacctgcagctgggcgcggtggcgcgcagcctcggctacgacggcgacggccgcagtgaccgcaccttcggcggcggcctgcagctgagcggctcgttcgccgtcgccgagcgcgacctgctgctgttcgggctgctcggcggcaagggcatgggccgctacaccgccgacctgaccggttcgggcctggacgcggcgatcaatgccgacggccggctcaaggcactgccgctgtacggcggcttcttcggctacacccactactggtcggagatgtggcgctcgaacctgatctacggcgaactgcacatggacgacgctgacgcgctcgccaatgatgcattccggcgcagccgctatggcgcgctgaacctgatctggagcccggcgccgtcctggacgatgggcatggaactgctctatggccaacagcagctgcaggacggacgcagcgccgacaccctgcgcctgcagggcagcctgcaatacagcttcatcaagtaa

SEQ ID NO: 514012 - DNA, 474 bp, Stenotrophomonas maltophilia
gtggctgcgcacccgcccggtgctgctgcgcgtcggcgacacgctgttcctgcatggcggcatcgccccgaagcgctgccactggcactggatccggcgcgcaccaatgccgcctaccaggcctcgctggggcgcccgcgcgccgaggtcaaggccgatccgggcaccgcgccgctgtatgacggcaagaccagcccgatctggtaccgcggttacttcgacgggcgcctggacacgcctggcgtgcagggcgtgctcgatcagctcggcctgcagcgcatcgtggtcgggcatacctcgatgccacacgtcagcacgttccatgacggccgcatcatcgccatcgatgccgacatgaaggaaggcagcaatgccgagctgctgttcatcgaggacggcgcgctcagccgcggcctgctcgatggctctcgcgttccactggcgcagggtgttattgaggaatccacgcactga

SEQ ID NO: 514013 - DNA, 429 bp, Stenotrophomonas maltophilia
atgaagcgcacgccctcggcgatgcgcggccacgccttccatttcctgcgctacggcatcggcttcctggtcgcccacctgctgctgatcgtgctgggcctgtgggcctgggatgcgctgctggaagaccgcaccgaagccggactgctggccgagatgcgcggcacccatgccctgctgcagcaccgcttcgccgaaaccccgcgcgagcagtggccgacgctggcgcgcgaactggacgccgacttcgcctatgccctgcgcatggtgccgttggcagaggcgatgaaggcgctgccggccagccagcgccccccccttcagcaacggccgggtgcagatcgacctggagcacatgcgcagcctgcagcggatcggcgacagcgactacgcggtgatgctcgggccgttggacgaagcgctgcctga

SEQ ID NO: 514014 - DNA, 585 bp, Stenotrophomonas maltophilia
atgctgtggaaactcttggcggtggtggcattggtggtcggcggcccggcatgggcacacgacgatgggtcggcaggcaccactgaatcggaagctgtccctggcgtgggccgagtggactaccagcgcctttttgaggcgttgagcgagcctggcgaaagcctggatgcgtttgcgcagcggattggcccgcgccttcgcgcttacagcgatgagacggggtttgaggcgtgcggcgttctggccagcgacggcgaccggttcggcgtggtgattggaacaaatcactctcacgttgcctgcgtgaacttcgccagcaaaacccctgcaggcttccagccgacgatggagacgattcacagccacggcggcgaaaagacgtttgcggccagtgccacggacgtgctgctgctgggcaaggacgccttcggctcacgctcgcgcacgtcgctccgcgtaacagggcagaaccttcgcatgttcagcaagacggattaccaagggggagccggttacttggctacccccgatggcgtcattcaccaggtcggggcgaagcacgtccgagtgctgggcggggattag

SEQ ID NO: 514015 - DNA, 246 bp, Stenotrophomonas maltophilia
atggggcttgataagaccttggccggcaatcgggtcaaccgctacgagagccaagccaggggcatcgacttagacggcctcggtaagcttgccgaggtgcttggcgtcccaatggcctacctggtggcggaggacgacgcaacggcggacgcgctattggcgctggcgcagctgtctcctacacaacgcacgaaggcagttgaggcccttctcaagttcgcggcgacgggcgctggggggggctga

SEQ ID NO: 514016 - DNA, 309 bp, Stenotrophomonas maltophilia
atgaaccacgcaccagcccccaccgtctcagtgatgaccccgcaggcacgatttacgttgtgcttctgcatcgccgttttccttgtcggcccgtttggccttctgctaggccctgttatctcgcgcctgttgcgccgacgtgccgagcgaaagactccgacggccgcctatgcggcggagcaacgcagcaacggtcacttcaacctggctcagctgttggttgttacgcttttcggtgtctggggaatcgtcgggctcgtggcattggtgcctatggcaatgttcctcgcttccgtcctgttcgcgtag

SEQ ID NO: 514017 - DNA, 1329 bp, Stenotrophomonas maltophilia
atgatgtcccggcaggaaccgtctgccgcttcctattgggacaagggaatgaagacttttgaagtttttgggatacatcgagaggtccgcgacaactcctacgtagacagaggttcgctcgaccgtgccttaaggaagttgctggaacgtcaacagacccacatagccatacgaggcgcatccaagtccggcaagtcctggctaagacagcgggcacttgaagacccgatagttgtccagtgccgcatcacctacacggtcatggatatctatcgggatgcgttggcgcgacttgacataagccttgaagtcgagcggacctcagggaagacttggggcggaaaaataactgcctctggggaggcaggatttaagctgctagcaaaggtcgagggcggcgcagagggctcgtttgaaagcgagactggaacgacccacaaggcagttggcaaggacatcgcagaccttgagttcattgcgaccctgattcgtagctcaggccgaaccttggtaatcgaggattttcactacctgcccgttgagcaacaagctaacttcgcatttgacctcaagaccctttgggactacggcaccatcgtcgtggtggtcggcgtctggatcaacgagaacatgttgatcacccttaacccggatctctcagaccgcatcgaagagctctcggtcacttggtcaaaagctgaacttaagcaggtgttccaaaagggttgcggcgcgctcaacctacgacccaccgatgcagtctcgagtcagctggccgaaatatcctatgaaagcgtcggcttgctgcaaaaactggcgcttcgctaccttgacgacgagctcggcatcaccgagggagctcccgacggcgaagagatggttgtcagtgatgagacgaagatttctgatgccgccatgcatgtggcagagcagctaaatcagctttaccagaccttcgcgcgtcgagtgagtgaagggatacgggcccgcacaaatgcaaccggcatctacgctcacgcgatggccgtaatcatggaagccagagatgaagacctctcacagggcatctctgcccgagctgtgtatgaggcagcgcatgcacgccaagcccgaatacagctcagcaacctcaaagcggtcctgacgaagttcccagagctccaagtagatgcggaggggcgaggcctggttgtgtcctatgacagccagggggagatggtcagcgttgtcgataggcagctacttctgtatcgcaggtttgcaacagtgcaatggccttgggaagccctgattgctgaagtgaccgagaaagctggggcgtatgactaa

SEQ ID NO: 514018 - DNA, 330 bp, Stenotrophomonas maltophilia
atgttagggaaaacgtcggcgctactctgcgctgtggctttcacgcttgcagggtgtgcaacccagaaggaaatgctggtaaccggcgcgagccgggcggatggaaccatcacgctcgcctacgagagcaatgagttccagcgcgtatcggtcgatggccagaaggcccaggacatggctacgcagcgctgcaaagcctggggctacgacggtgctgagtcattcggttcacaagagaccgaatgtctgtcgcgccgtggcttcggcaactgcggtagccgccgcgtttcggttgtctatcagtgcaccggttcgccatcgcagaggtaa

SEQ ID NO: 514019 - DNA, 498 bp, Stenotrophomonas maltophilia
ttgctggatgctgcggcgggtgtcctcgttgagattggcctgtccggcgaggcgctctattacgtcgccctgttccaggagaagaacttctggcgggtgatcaagaccgatgcggtcgacaacgccgagcgcgtctaccgcacctttgcccagcaatcggaacagctggcgcaggtctacatcgatacgacccgcctggaagccggcaagcgctacaccgagcgcctggtggcctacaacgaggagcgcctgcgcaccctgcagcaggaaatggaacagcagcaggcgcagtcggcccaggtcagcgcggccctgcagcaggcgcagcagcaggcggtcagcctcagcaccgacgtgcagagcaccaacagccagctggacgccctgcagcgccgcatccagatcctgcaggccgaacagggcaacccggaactgagcctgcccaagccggaaagcgtgccttcgccggcaccggctgccgccagcgacgggcgctga

SEQ ID NO: 514020 - DNA, 483 bp, Stenotrophomonas maltophilia
gtggccaagccccgcaccgcgccgtccagcgcacccaagaccgtccaggacagcaagccggccgccgcgccggccgtcacggaagagaagcctgcagagaccgccacggcacagttggatcctccggcagatgccgacgtcgatgccgccgcctcttcgggcctgggcaccgacccagcgctggaaccgaccgcgaacgaccaggcttctggcgccggcggcgacgttaccccttctgcaccgccggccaccgctgacgccaatggcgcggccggtgccgctgatgaccctgccaccggcgtgaattcgcacgatgacgacacgccggcacgcgtctgttttgaggtgctgactccgttcaagttcaaggggcaccccgtcaagccgccggcctggatcgagatctccgaagacgacgcggcgatctaccaggacgctggcgtcctcggcagcgagccggccgaacccttcgaccacgtctga

SEQ ID NO: 514021 - DNA, 948 bp, Stenotrophomonas maltophilia
atgacccagcaaaccactgcccagtcccgcgtcatcgatcccattctcaccacccacgcgcagggctacctgcggccgggcaacgtgggccgcttcctgttcccgatcgccacggtgcgctcctacggcggccagattctggagttcggcaaggagagcttccgccgctacaacaccaagcgcgcccccggctcggcgaccaagcgcatcaccttcggctacgccggcaagccctatgccatcacaccggctggcctggaggcgctggtgccggacgaaaaccagaacgacgctgcccaggtgccgggcctggacctggccagtgacgcggtcgacgtcgtcctcgacacccacgaactggcccacgagtacgagtgcgccgaactggcccgcgacgcctccaagtacgacaacgatcacaagatcacgctggtaggcgcggatgcctggacgggcgatagcagtgatccgactcaggatatcggcaaggccaagaacgcggtgcgtggctcgatcggcgtgcgtccgaataccgtcctgctttcggcgtcgtccttcgccgctctggaatccaacaagtcgatcatcgaccggctgaagtacaccggccgcgactcagtcacggcggagctgctggccaagctgtggaacgtgcagaacgtgtacgtcggcgaggcggtgggtgcgagcggccaggacgatgacctcagcgacgtctggggcaatgacgtgatcgtggcgtatgtggccccgccgaccggtggcaacagccgcagcaacgcgcgtccgagctatggctacacctactcgatcaccggcatgccgctggtccgcaagccgtaccgcgacgagaacgcccgctcctgggtgtatccggtggacgctgatcgcgtgccggtgatgagcggcatgctcgccggctacctgatccagggtgctggcgcgtaa

SEQ ID NO: 514022 - DNA, 360 bp, Stenotrophomonas maltophilia
atgacccagaagattgctctgctttccctctccatcgccgccacggccgcactggctgccgagcgcttcgtcggcgccggcggcgcctatgccacggccggcggcaacaccttcggcgtgacggccaccgaagccaaggtcggcgagctggtcaacaccgacgtgctgggcacggcggtcgccaccgccggcggtgtgatcgccaagaacgcctacgtccaggtcggcagtgacggcaaggcggttacccataccactggcatcgccgtcgcccaggcgctgcagggtgccgctgcggatggcgaccgcattgaggtgctgctgatccagaacgcccccagcgcagcgtcggccggctaa

SEQ ID NO: 514023 - DNA, 1155 bp, Stenotrophomonas maltophilia
atgaaccagcccgccgcagctctcgaaatcttcaaggcaggaacgcacgtcgccgaggacggtcgctcctttacgttcagcgaagccgacgttcagcagatcgcgcagacctatagcgtcgacctgcatgaggcaccgatcgttgtcggccatcccaaggccgatctgccggcatacggctggggtaaatccctggagtgtcgcgacggcgtgctgttcgcagagccgcaccaggtcgaccccgatttcgccggcatggtcaacaagggtcgcttcaagaagatcagcgcatcgatcttccttcccgacacgcctggcaatccgacgcccggcaagttctacctgcggcacatcggtttcctgggcgcacagccgccggcagtgaaggggctgaagtccgcgtccttctccgaaggcgaagaggcggtctgcttctcgcagccgctcgcccgcttgggctggaccctgagcagcttgctgcagtcgatgcgcgattacctcatcgaccgagacgggctggaaacagccgacaagctcatcccgcaatggcagatccgcgaggtcacggaaagcacgcgtgatccggacgagcgtgtgggagcaccctcgaccgctttcgcggaacccaccgatgaacgaacaacggagattcaaatgtcccagcagaaccagcaacagatcgcccagcgccagcaggaactggacaaccagactgccgccctggaagcacgtgagaaggcactggccgcccgtgaggcggttgcgcgtcgcgaagacgccaccaactttgccgagggcctggtcaacgacggcaagctgttgccgcgacagaagcccggtgtcgttgagctgctgttggccctccctgtgggcggccagccgctgaattttgccgagggcgaaacccaggtttccaagcccgccgaagcggtcctgcgcgagctgctttccagcctgcccaagacgatggacttcagcgagaaatccggcggcggtttgcccgacacgtcggcgcccgccgatttcgccacgccgggtggtggcctgcaggtcgatgccgccggcatggagctgcaccgcaaggcagtggcctatcagcagaccaacccaggcgtgaagtacctggacgcggtgaaggccgtcggcggtcgctga

SEQ ID NO: 514024 - DNA, 1275 bp, Stenotrophomonas maltophilia
atggcgaccgtgggctatggccaagttccctttgagcagcagatcgcgttcttccgtcgcaagcgcaacatcgtcacggaaagctggctggacgtatgggagtcggagcatgaccagggtttcatggtcgccggcgccaaccgtgatgagctggtggcggactttgccacggcgatccgcaaggccatcgacgacggagtgacgctggagcagttccgtcgtgatttcgaccgcatcgtcgccacacatggctgggactacaacggtggacgcaactggcgctcccgcgtcatctacgaaaccaacctgcgccagagctacaacgcgggccgatggcatcagctgcaggccctgaagaagtccaggccgtggtggcgctaccgccacagcgacgcagtcgagacgccccggccactgcaccaggcctgggatggcatggttctgcactgtgatgatccgtggtggcagtggttcttcccggccaacggctggggctgccaatgctatgtcgaggcactgaacgatcgtgacctggcgcggctgggtaaggacggcccagacacggcgcctgcgatcgagtttgaacagcgcatggtcgggcagcgaagtcctggcggtccgttcctggtggaaacgccggtgggcgtggatcccggtttcggctatgcccccggacgcagtctggatggttggccgattcgcaggggcggaccacaaacgcctcctgcgctgggcagcggtatcgaggaggcgctgcaggccgcgctgcgccgaaatgtgcgcctgccggcctcgccagcagcgcgcaccgctgctcaggtgctggagcgcccccgtgcgctggacgcgctgcaggccggcctaagcgaatggcgcgcggctgcagcagctggtcgcgcgcattcgagccggtatctcgttggagcgctccaggtcagtgcagtcgatgctctgtcaagcaaggcggccgagctggggtcggccgcgatcgccgttgaggcggccgaggtattggaccgggtgccagcggcataccttccatcgctggcgaacgcgctgcgatcgccattcgctcttctgtatgacgccgcgagcagcatcgtgcgcttcgtgcttcaaggtgatcggcggcagcgccttgtcgtcgacgttcggatccaaggaaacgccgccatgcccaacctgatccaggatgccagcgtagtttcgtcgctggatcttcgtcgcctggtcgaccgtggaagctggcagctgatccagggggagattccctaa

SEQ ID NO: 514025 - DNA, 1521 bp, Stenotrophomonas maltophilia
atgaccaccgcccgccctgaactgaaccgcgaggtggccaccactgcggacggaatggacatcacccgcggctacaccgggccactgatgcttccgttcgacagcgtgctgcgcaatcgcggcggctacgacctgcagatctacgagcaggtgctatctgatcccgaggtcaaggcgacgtttggctctcggcaggattccgtcgtcgcctgcgaatggcaggttgagcctggcgggaagcgcgcgattgaccgcgcagcagcggatcatctgcgcgatcagctccacgacattggctgggataacgtgacccgcaagatgcacttcggtgtcttctacggctacgccccggcagagatcatctacaaggctgacggcaatcgcatcgcgatgagcgcgatcaaggtgcggaaccgccgccgcttccgcttcggcaaggatggcgatctgcgcctgctcactcagtcccacatggccgaaggaatcccggcgccggctccatacttctggaactattgcgccggcgccgaccatgatgatgagccctacggcctcggcctggcgcattggctgtactggccggtgctgttcaagcgcaatgggttgaagttctggctgatcttcctggagaaattcggcatgcccacggcggtgggcaagtacgacgagaacgccactgctgaagagaggaacaggctgctgggcgcgacccgcgccctacagaccgacagcggcatcatcatgcccaaggcaatggaggttgccctgcttgaggcgggtcgtagcgggacggcggactacaaggcgctgcaggactacatggacgccacgatccagaaggtcgtcctcgggcagaccgccagcacgcaaggcacggccggaaaacttggcaacgacgaactgcaggccgaggtccgcagggacatcatcaaggccgacgccgacctgatctgtgagtccttcaccaaggggccggcccgctggctgacggaaatgaacttcccaggtgcggaagtcccccgtgtctatcgggtcactgatgaggctgaggatcttgatgcagcggcatctcgcgacgagaagctctatcgcctgggctatcgccccaagcccgtctacatcgagcagacgtatggaccgaactatgagctgatggagccagcagccgagccgccgacgccaccgtctgccatcgacgacgctcgcttcgccgacccgcaaaagtcggtcctggcgctgctccggcgtcactatccggcggcgttcgcagaagcggacggccagcaggttgggaccatgacggcccagctcgatcgatcaacgcgtgaagtcggcgcggagtgggttcaggggctgcagcagctgacagagaacgccacctcgttggaggagctgtacgaccaggtcctggcagcggcgccggagatgagcctggaggagttcgccaacggcgtcgccctcggcctgagcgccgctcacctgcgcgggcgagacgacgcacagcgcgccgccggaggctga

SEQ ID NO: 514026 - DNA, 213 bp, Stenotrophomonas maltophilia
atgcgttccactgaccccggcattgatcttcacaaacgtgtgcgcgccggcttcctgcttcagggcaccaccctcacccagtggtgccgcgagaacggaacccacatttccaatgcccgaggcgccttgctcggcacctgggatggccccaagggccgcgccatgcgcagccgcatcatgaaggccgcccgcattgaccgggtgcaggcatga

SEQ ID NO: 514027 - DNA, 498 bp, Stenotrophomonas maltophilia
atgacagaacagacgcaggaaaagtcaaaggaagatcttttcaaggagttcatctacagcctagctgcggcggacgccgttgctgatcggttgaccaacgcagttgagacctatggaccctatgtggtcgaggttgcgagcggtgttttggcggttgtgagggacatgccgatgatgttcttcgcaaacgttcacggggtgcctgaactgactgagctcaagccccatcagcgtgccgtggagcgggctagaagcatttcgtgtcgcattgccttgattcgctggaaactggtgtctcacattgaacagcaccctgatgtcgaacctcctgagccaaaggtgctcgctgcagagctcgccaggggagtggcagagcagcccagtgcgactgcctttgaagattttgtcgatgcgttgcttcagcaagaccggctgaccaaggtcttgaagccagcttcttccagcgcgccggctgcgcccgacttgggtcggttctaa

SEQ ID NO: 514028 - DNA, 657 bp, Stenotrophomonas maltophilia
atgtctcaagcgggccacgcgatcaagcgctcccatctcgtggaggtgatctcggccatgttgggctaccgaagctttgccgcgctttgtgtcgaagagtcggacagttctctcgagaatcacttggccgacgcagagctttacgtgctcaacatgccgttggccgagaaccgtgcgagcaagcttggggtgccgcagtccctcgatgcgtgtaaggccgccgttgtgtcaactttccccgtccccatttatgacggcatcgatgagttctgggatagccacgcccgcgagctgctcgaaggggaaatcgcggatggcgaaaacacggctgccgccatggccggttgcaatgcagacttcccggactctcccgaccttcaaccgccagaagacagcggcgatctgtgggcaagcactgacaggtgggccatcgaggcgagtggcaccatgagtggcgagtatgaccctgacggtgaacggatgttcaatggtcacacgttggaggtgtggggtgagctctgctacataaaagcggggcgctccggcctgatttttgaagaaagcaaggagggcgcagagttgaacgacgattggcgtgatgacgattctgacgatctagacgtgcagttcgctgagcgtatggaaagggacgcctag

SEQ ID NO: 514029 - DNA, 405 bp, Stenotrophomonas maltophilia
atggcaaagcagaagaacaccccagcgccggcagccggcagtccgctcgatgcgccggaagcgtccgctaccgtggccgacgcagctaccggccagggcgaacagccgaacgccgaaagccccgaggctgacgcggtagccgctgtcggcaagccggaggcggatgagggtggaaacagcccggcgcccgaaaccgtggacacggacgacgacgcgctgccaccggatgaagaactggctccgtcgaacagtgaaaccgtgccggcgctggtgctcagcgacaaccacctgggcaaggtcggcgatgtgatccaggttgaagcggctcacgttgaggcgttgcgccttggcgggctgatcgacccccaccccaacgccatcaagtcggccacgccggaggaatga

SEQ ID NO: 514030 - DNA, 225 bp, Stenotrophomonas maltophilia
atgagcaagcgcgcgctgcgcgccaagctcggtatggatagcgacaagcacctggccatcctgctgcagctgcccgtggaagaggtagaggcgtggccggaagaggggatcctgcccgcgctgccgcagatccagcgcctgctcggcggagagcccaaaccgcctgatcgcgtagcacccacggatttcgaccatgaccgaatcgtcccggtcgatgcggcctga

SEQ ID NO: 514031 - DNA, 333 bp, Stenotrophomonas maltophilia
atgcaacagagctggcacgggccgctccccccgccgcaacagcttgccgaattcgatgcgatcacgccgggcttggcagatcgcatcatgaagatggccgaagaagaaggccagcatagtcgtgacgttcagaagcgagcgctgactggttcgatcaccacccaggtgattggtcaagtgtttggcctgctcattgctgccggatgcctctacgcctcctaccacttggccatggcgggccacgattgggtcgccggcatcttgggcggcggcactcttactactgtcgtgcttgccttcttgagatggaagaaggactccgacgaaagttga

SEQ ID NO: 514032 - DNA, 207 bp, Stenotrophomonas maltophilia
atgaacaagatgatcacctccctgaacgctgtcttggccggtttcggtggcgcattcgccatcttcccgactggtcagatcgaacagttcatcaagcgcgagcctgttgaggctcgtatgcaggctaactttgcccgcgccggaatgcgcatggaagtcgcaataagaaaggtcaaggatgaagccaaggcctcacaacagacctaa

SEQ ID NO: 514033 - DNA, 300 bp, Stenotrophomonas maltophilia
atgagcgcccctgtcgaattcaccgctaagtgcttcggcgcgaacctcggcctcaccaggggtagcgacaactcctggtgcgtgtcgctctacaccttcgtcggcaagaacaggaatcaccgcggaattgccttcgcaaccgcggtccccggccagctgccgcgagtggatacggctgacggcgatacctttccctcagcagccctgtgggtcgggtcggcatccttcgacatacccgatgccctggtgccgaagctgcaggccttcctcgccgaacacacccaaggcggtgccgcatga

SEQ ID NO: 514034 - DNA, 267 bp, Stenotrophomonas maltophilia
atgagcgcgtccgttgatgttgttacgttgctgcgcgccctgcagtctcagattggccccagtcgccctgacgaagatgacgatgaggtcgacgctgacgcatgggatcgcatcgacgccgcgatctccagcctcggcgagctgatcaatgcagcgcagaatgcgcgcgcatcgatacagcacatgcgtggaccggaggcgatcatccacgcacgcaccgcggaactcgatgccgccctcgcccgcgtcaaaggcggtgccgcatga

SEQ ID NO: 514035 - DNA, 495 bp, Stenotrophomonas maltophilia
atgagcttctacaagaccagcgatccagccgtactggccgcatacgagcaggagcgggtcgataaagcgctgctgcaggcggaggtcgatgcattcgcccaccgcttcggtggcaagggactggtgtacgcggatccggcgcgcctggccggcatcaagttcaccccggccaaacctcgcaacctgtggcgtgcgcccgaccgcaatggcttgcagtggccacgcagctcgccgctcaaaggtgccaccgccgaagaaaaggccgcgctcaaagccctgcaggccgagtggaaggagcatatgccggctcgaaagatcgacaccaatgccgtgattcgcgcgctcgggttcagcagcagctgtgacttcttcttcgagggactgacctatttccggcacgagggtttcgtctacgcctccaccagcaaggcaatgccgcgcatgaccgagatcctgggcagcgagtacgagcaggccaaggcagcgcgcgcatga

SEQ ID NO: 514036 - DNA, 213 bp, Stenotrophomonas maltophilia
gtgcgcaaccagctcgacattttcaaggacgacccggtccgcatggccaaagccaaccgcgacgccgccgaccacgcgctgcacgacacgcagttcaccgagcgcgagcggcaagagcgctccgcgtactacaccaacgaagccgaacggtgggagtttcgcgccgctctcggcggccagcagatccaaggcgcaaaggagccgcgagcatga

SEQ ID NO: 514037 - DNA, 822 bp, Stenotrophomonas maltophilia
atgactcaagcaaaactaccttccacgcctccctgctgcttaagcgcgggatcagggttccgactctggtgcaagttcaacgcccgcttcgatcgcagccgcattgcaagctgcctcaaccttagccacgtgattgaatgccagctgcgcgacgtgcctagtaccgttccagtcgtcatcagtgggaggaccggtcaaggtggccggatccgcaaatatcgttgcccagttgtcgatcagtcccatggctatggccaagtgtccggcaacgggatggccgacgtagtggagacgatcgccgagcgattcagccacttgaaagcgtcgagtgaatactccgctccggatccggctcctgaagccaggatccatttggaactgcttctccgcacccgttcgccccatggcctccagagtcgagcggagggtcctgtaggcgagcccaacctcggctcgaatctggaggagaaccagcagcctctgagcacgatcctggtcggcgcgggcattcgactcctgggaggcgatctttaccgccaagttcgcggatttattggccgctctccccagtcggaccgatatacgtccaaggcgatttgcttggcggccaaggcgaagagtggcaataccgaggaaaaccgtagcaacgaccgcgacagctgcgacaactaccgcccatccatcccaccacacgacgcagccgtcgatccccaagcccgagcacgtactaaagccattccaccagctcattccctcatccccctgtggcctcaccggaattctgccatgccgcggcagcgggtggagaccgtctatggctga

SEQ ID NO: 514038 - DNA, 516 bp, Stenotrophomonas maltophilia
ttgttcagccgcgatgacgagagtgcggaatggcagcgccgcagtgcgccatggattgcgtaccaactgcagcagggcgcgcagggccagcgccagcaatcagcggcccagccgctggggggcgtgcatcgtgaccgctactggaagctgatggcgaacccggcggaaactgcgaccgcaccgaccctgcgcttgggctaccagccggaagtactggtgttcctgagccagggggcagcaccgtatgcactggcagtgggcagcgcgaccgcgcgccgcatggaagcgccgattggtgtgttgatcgaggaactgcggcagcgcaatgatccgtcgtggcagccgacgctggcgcgcctggagggcagcccggagccgctggccggtgacgcggcgctgaagccgcagcacgattggaaggcgtggttgctgtgggcgttgctggggctgggtgtgttggttgttggcggcctggcggtcagcctgcttcggcagaagccggcgccctcggcgtag

SEQ ID NO: 514039 - DNA, 189 bp, Stenotrophomonas maltophilia
atggtggcggcgaggtcgtgcaggcatgagccaccgcgtaaagtgatcggttcacttccccacaaggagtcccgcgtgcaggacgaccacgacgacaccgacaccccaggctgggacgcgatcaatgcggcgctggcgccgctgtatgccggccaggaaccccgtcactacggtacggcgttgccgtaa

SEQ ID NO: 514040 - DNA, 1881 bp, Stenotrophomonas maltophilia; identical to SEQ ID NO: 506909

SEQ ID NO: 514041 - DNA, 1122 bp, Stenotrophomonas maltophilia
atgctcaccctcggcctggtcgcctgcgcgacccagccgaagtccccaccgtcttcaccccaggccagcagtacgccgcgccagcccgccaccaaggcccatgggccggccgaggctgcacccgaagcaactgcggctaccgcgccgccggtggatctcaccccggtgccgttcgaggtcgcgcgggcccgcttcattgccgataccgccaagcgctatggcctgaagccggagcagatcagcagcgtgctcgaccaggcgcaggtgcgccagccgatcatcgccgcgatgtcgcgcccggccgagcgggtcaagccgtggaacgaataccggccgatgttcatcagcaaggcacgcattgatggcggtcgcgcgttcctggccgaacaccgtgccgaactggatcgcgtgcagcagcgcaccggcgtgccggccgaagtgatcgtggcgatcatcggcgtggaaaccagttacggaaagaatgccggcagccatcgcgtgctcgatgcgctgtacacgctggcgttctactacccacgcagcggcgacccggccaagctcgaacgcgaagtgcgccgcgaactgttcttccgcgatgagctggccaagctgttcgagctgggccgcgaagaaaaactggacatcaccacgctcaagggcagttatgccggtgcgatgggcatgggccagttcatgccgtccagttacctcgattacgcggtggacggcaacggtgatggtcgtcgcgacctgttcaacagctacgacgacgtgttctcctccatcgccaactacttcgtgaagaaggggggctgggtgcgtggtggccaggttgcggtaccggcgacgctggccccgggccgcgaggagttcaacccgaccgaatggatgcccacctggtcgctggccgacctcgcacagcgcggctaccagccgagcacgccggtgcagccgggcgccaccgccaccccgatcaccctggaaggcagcaccggcaagcagtactggctgggcttccagaactactacgcgatcacccgctacaacctctcgaagatgtacgcgatggccgtgttccagctgtcccaggccatcgccggacaggagctgcccccggcatga

SEQ ID NO: 514042 - DNA, 1269 bp, Stenotrophomonas maltophilia
atgaacatcagatggttggtcccgagcttgatcgtcttcgcgctggcggcctgcagcagcgcgccgaagaagccggccacggccggccatggtggcaagtccagcggcacgctggtgcagggccgtggttcgcgaccggcgcactgcccggaaggttcgccgtatgcagcggccaaggaagacctcagcacccgcggcaattacaccgctggtggcctgtacaaaccaggcgtgcgtgacagcacgcccgactacattcccaacgtggcctgcatccccgagccggaagtgaccgccgaggaacgttcggccatcggcaacaagtcgccgtacgtggtgctgggcaagtcgtacaaagtgctcgacgacacccatgactacgtcgagcgcggcaccgcgtcgtactacggggccaagttccacggccgcctgacctccaaccgcgaggtctacgacatgtaccagttcactgccgcgcacaagacgctgccgctgcccagcttcgcccgcgtgaccaacctggacaacggcgagtcggtgatcgtgcgtgtcaacgatcgtggtccgttccatgacggccgcgtggtcgatctcagctatgccgccgccgtgcgcctgggcatcacccaacgcggtaccggcaatgtcgaggtgcgcgcgctgcaaccgggcgagagcaacctgatggcgcagaagccgtcgcgtcgcgagcgtcgcgcggctgaagcggctgccaccactgcagtggccagcgcgcgcccggtgccggcgccacgtgcttccaccgacagtgatatcgatcgcctggtcaaccgcttgccgaccgatggcgccccggcgcgcggccagccggccaccacccggggcgtggccagcaccgcgccggatgtggcggtcagcagcctgccgccaagcgcgccggtggtgcgcaactccgcgccggctccggcggttgtcgccagcacggccccgcgcgcggtggcatcggcaccggtgcgtgccgccgcggcggcgccgagcctgtcgcagcagatggtcggcgcggtgatggtgcaggtcgccagcttctccaaccgcgacaacgccaaccgcgcgatgggccagctcagtgccgccggcatcgtcggcgcgaccatcagcgacatcgccgccggtggccgcaccctgttccgcctgcgtgttccggcaagcgaccatgccagtgcggcggaacttgtcgggcgcatcgccggtctgggcctgggttcgccgcagatcgtcaaggactga

SEQ ID NO: 514043 - DNA, 1218 bp, Stenotrophomonas maltophilia
atgaatttccgttccgccgccaccgccctggccgccaccctggtggtgggcctggcttccgcccagacgccgctgccgactccggccacgccggcgcccgccgccgccgccgccccggccaccgtcgccactccgccggccccggcgccaagcgtgtccaaggcctgggtgctgatggattacgccaccggccaggtgctggctggtgaaaacatccacgagcagctggccccggccagcatcaccaaggtgatgacgtcctacgtgatcgccgccgaggtcaagaacggcaaggtccgtgcggatgaccaggtgatgatgagcgagcgcgcctggcgcgaaggtggcgccggcaccgatggcagctacagcggattcccggtcaaccagaccgcgcgcctggaagacatggaaaagggcatggcgatccagtccggcaatgatgccgcgatcgccttggccgaacatgtggctggcagcgaagaggcctttgcctcgctgatgaacagctacgccgccaagatcggcatgaaggactcgcacttcgtcaacgcccatggcctgaccgcgcagggccaccacagcaccgcctacgatctggcgctgctgggccgcgcgatggtccgcgattacccggaaacctacgcgtacaacaagatcaaggaattccaggtcggcaacatcaagcagccgaaccgcaacctgctgctgtggcgcgatggcagcgtggacggcatcaagaccggccacacctccgaggcgggctactgcctgatgagctcggcccagcgtggcgaccagcgcctgatcgcggtggtgctgggcggtgcgtcggagaagcagcgtgccgatgacagcctggccctgctgaactggggcttccgcttcttcgagacccaccgcctctacgagccgggcaaggccgtggccgagcacaaggtctggaagggcaccaccgacaaggtgcagctgggcgtggcccagccgatgctggtcagcgtgccgcgcggccgctacaacgacctgaagccgagcatcgacgtgcccaagaccctggaagcaccgttcaccgtcggccagcagatcggtaccgtgaaggtcaccctggatggcaaggtcatcgccgaggcaccgctggtggccgtggccgccgtcgagcaggccggcttcttcaagcgcctgtgggacagcttctggatgtggtgggaatcggaatga

SEQ ID NO: 514044 - DNA, 309 bp, Stenotrophomonas maltophilia; identical to SEQ ID NO: 497865

SEQ ID NO: 514045 - DNA, 1092 bp, Stenotrophomonas maltophilia
atgccttcgaagatcatcattgaaaacctgcgccatatcaaacgtctagagtttgaaatcccgaatcagggattgtggctgctcactggtgcaaatggcacggggaagacttcgctgctcgggtgcatcaggcgtatcggatttagtaactcctttcctctccatttccctgcttcaaaaaaatctgatcgattggattcctacgagggagcgaaaatctcttacgaaacgccaggcggaaacgtttcgtacacgtacagaactgagcggtgggttcctacgccgaagaagaacagcaaagttctatcgcgcttgccgtacccgaacgtgctctacatcgcggcgaatgcagatcgaatcgagccgagtcaggaagatttctcgccaaaaagagtgcgcgcggccccgcgaggaataatcgatgcggctaacagaatattctgcacgaacaagttcgacgctctgaagacaattaatgtgcgccgaggagtggggagtcaggcgttcttgattgagcttcccgatgtaggaggaaagaagcagtacttctcagaaaagaaccttagcttgggtgagctgtgtatcattaagctgctacggatgctgcaggattgccctgacaactccctcttgttgatagacgagcttgagcttgcgcttcatcctacagcacaggcagagttgcttagccatctgggtgatattgctggcagcaagtccttgaccgttattgtgtctacgcactcttccacattgatcaagcaagcctcacgtgacagcctgttgttccttcaggagacggaagacggcgttgttcaatgtacacgcggctgcttcccgtcttatgtcctgggcgcactggcctatcgtgaagaggcggcatccgacattttgatatatgtagaagatgagtctgcccgaattgttgtggaacagttggtccggcatgcgatgacgcgtttgtacgcagacggatctatctgtccaggtgttagtgctgttccggtcgggggggtttgcaaatgtgcttcgtttttttgttcgtcaaactccgttgcttccggcgatcacaaaggcgtacatggtccttga

SEQ ID NO: 514046 - DNA, 261 bp, Stenotrophomonas maltophilia
atgaaattgagacagcatttcgtcctcaacaccttgagtcttcgcgctcaagacattccgttagtgccggatgatgcggccaagccccggaaggtggccaagggaatcgtggataaggtttgcgatctgttggctcaacagctgcctaatgcaagttcattggacgtcgaggttgcattgctgaagttgctagcggaccacacgttcagaaactcgatgcctagagtcatgcagcaatttggaccgatccttcggggataa

SEQ ID NO: 514047 - DNA, 465 bp, Stenotrophomonas maltophilia
atgactgacctgattcgtgcaatttcgatgtttggggcgggtggttcggtcgagcaggttgaacacgagaccgcgctcgaaattgtgggggaggccgtaatggcaagggagaatgcatgtgcgcaacgccgctccttcgagtgcagcgacctgtccccgtttcgcgcgacgtccaatttcgcggagctgttcgcagcccacgtaggtgatcgctcgctgaggcacgatatgcgcgtatgcgatgtctccatgttccgcatgctttgggcggcgcgtcaggctgctgacatgctcggtgtcccttatggggtctacattgacgttgcggtgcgctacctgcgggatatgaaggggaagaagcggatcactccgaaaatgctcatcgcgccggacgtgcaactgcatgtgatggatcgctggaacgcggagatgtccgtcgaccgcgtcgctgagcggcagaactga

SEQ ID NO: 514048 - DNA, 2112 bp, Stenotrophomonas maltophilia
gtgtttgatcaggaagtctcagatgggttccgtaagatttgccagtcactaaagctttaccgccgagctgagctggtggatgaagcctctggagactcgctgatcgatgatctatacgtagatcctctgcgtggcaataaaatcatcaccactctgctagagccgcacactaccttcctgatcggtagaaagggaacgggcaagtccacaatcttccagaagatgcagcgcgagatcctgcgtaggggttactccacgtcggcgtacatcgatataaagacaatctacgagtcatctcaggttgatcccgttgtcagtggtcgcgtctacgcaacagactcaggccttccgagggaggcactggaaaaaatattgcttcaaaaggcgtttctcgagtccttggtcaacgaaataagggcgcagctcaagaagcgaatatctcatgcctctctttggtctaaagtcaaggaggctttcggtggcggcatctccgagctggatgttgcgctcgaggagttggtccaatcactgaatgttcccacctatgagaatgcggtaggaattcttacgagggcgactagagaaaagcgagaaatatctgccgatcgcagcgtcaaaggttctgccggcctgggggcagagggtatcgggctgacctttgaggggggcgcgacactgggtaataagtctgtcgacgagttcgattattcggacgttctaattcgaacgctacggatgaatgatttcatcgtaaagcttcgcgagctgcttgatcgcgtgaaggtgcggcaactctacattctgatcgacgattttagcgaacttccgcaggatggtatgcgcttcgtggtggatggaatgctcgcgcccttgaataattggtccgatgaactagttaagctgaagattgcggcttatcccggccgcatttattatggtcagatcgacaaggcgaaggttgatgaggtctaccttgacctatacaagttgcacgcgccggctgacgtcgcgaccatggaatattcagcaattgattttacaaaacgtctagttggtgagcgattcaataagtttcttccggggagggagtcggaagttttcgctgtcgatgacgaacatctttggcgtgagcttttctacgccagtcttgggaatccgagaattcttggttacgtcttgcattttgcctcggagatggcgtccgttcgtggaagtaagattaatctcaaaatcatcaaggatgcttctagaaaatattatgaggataagattgagccatatttttcgcttggtcgttttcttcatgacaccttcgctgaaaggctttctatttttagtctgaaagagctcttggaggacgttgttcggcgcgcccgcgagctgagggaacatacgtctgaagtcttcactcggataaaaggaactccgccgacaagtcattttcatgttccggtggcaatggagtcggtgctgcagacgctggaattgaatttcttcgtaacaaagtacttcgaaatgtcggaccgatcgggaaagaaggtttcggtctattcgctaaattacggcctgtgcgagcgctacagtattcggtttgggcgaccatcgggtgagcgagaatttagactttactttgttgaaagagtttttgattattcggggatcgtgctctcatttctgaataggaatcaagatatttcttgcgacacgtgttctaccaagttctcatttgatcagttatccgcaattaagatgtatggaatggtttgccctcagtgccgtagcggtaccgtcgtcgtggcgaatctctctcggaagtacgcagaccaggttcggcaggtttccgagaatcttttgctggagcaggttgatctaaatattctcgcagcgcttgacgctgagggatcgccgatgaagcctaaggatgttgcggaggagctagactgttcccaccagctggttggacggcgtgcgaagcacctcgaggaacgagaattgctgctgcgagacaaggatgggtatcagcggctctatcgcataactccgacggcccagagtgcttacttttcgagcgaagacgttgcactggatattcaatcgagcgaggttgagtag

SEQ ID NO: 514049 - DNA, 855 bp, Stenotrophomonas maltophilia
atggcaaggcagataattgacaccaccacaccacatggagggtatgtcggcgatccagccaaaactgcatttggcaagacaaacgacaattttgccgaggtttaccagctcgccggcaacgccctgccaaggtctggaggcgaagtaatcgggacactaagggtgaccggaccttcgctggtgtacccgatcaatccgaaccctaccaacggcgtggcgtcgctggggtttgtcgccaacggatcatacggcggcggcggcggaatgattgatggccaggcatccatcggctggtggagcagctttggcgagtacaacctgggatttgcgtcgtcaccaaccggtgctcttacatcaagaatgcggtgcaacgcgtccggcacagttactgccgtcgcctttaatccaacgtcctccgctgacgtcaaggacttcatcattggttacgaccgagacgccgacgctgagattgatcggcttgtggtagtggagtacagcatgcggccgggcttcctcgaatctgacaagaggtacataggtctgttggccgagaatgtgcattcagtgctaccagacgcgactgatggcggaatcgagcgcgagcgcgcaatcgaggtcccaattccttacgagccgggaaatgagccggaacctgacgaagacggtcacgtcccggcaccgccaacgcggacggtcctggttagggaggtcatcccgatgaactatgacatggctcagattctggctctgaacacgcgggctcaccaaacgaagaacaggcgcatccgcgatctggaggaaaaatttgcggccctgcaacaaatagttgcgaatttgcaggctggcgaattgtga

SEQ ID NO: 514050 - DNA, 282 bp, Stenotrophomonas maltophilia
atgaattttgagatttctgacttaaaggctcgcttagaggcgtgcgagacagatcttgcggcgcaccgtggctacttgaaggccctggagtacggggtgcggacgctaatcatcacgcatccggatccagacttgttatcgagagcctgggagtcgattcttcctgggatcactgaggctcacgggccggagggcgggtggattttcaacgcggccttccagcagctgctctcggtgttgactcagcaaattgaggcgcggggcggcaaggtcggtgattag

SEQ ID NO: 514051 - DNA, 204 bp, Stenotrophomonas maltophilia
atgaaagacaccctcatcctgaccatctccaaccagaaattaagcctcagcccggcagaagccaagttcctggctgagcatctgcgcacggctgtggcacagccgaatctcgcgctgaattttgcgcagagccggactgagcagggcggccgcatcgcactgtcgcgtggtgtcgtgaatagccgttccaccactgactgctga

SEQ ID NO: 514052 - DNA, 750 bp, Stenotrophomonas maltophilia
atgagcgacaaccagagcatcaacacgactacttccgaaccggccattcaattcagcgaagggagcgaggctgcgccggtatcggagaacaggcagcggctgaacgagctggcccggcagttggccagcgcagtgcagcgcaagcgcgccctggtcggcaaggtcgatcagatgcagcgcgccaaactggcagcgcaaagcgatgccgccgctgctcgccagcaatggagtgcaaagctgcgtgatgccgatggcaacctcactcgcgatattcagaagctgcgtgccaacgagcgttcggcactctcgctcgctgaggaatatgaggcaatggagggcgaaatcgcggacgaactgcggcgcctggagctggaattggcggaggtggcagaccgttgcctcagcacggcgaatggtgtcatcagagaggctgccagtcaggcctatgagcagttgctgacaaacgttggcgaaagcctggcggtggccttcgagctgttctcgaaggcggagaacgggggcgtgaaccatcggcaggcagccaatgccgacgaactggccagcaagttcttcggacgcctcggcaacgcggtacgccatcgtttggacgatgccacagttgctgagcaggttgcgaagcgcttggcattgccgccgatggatatgggcgaggtgaatatgcagctggcgggtagcattgccgcccgtatccggcggcgggctgaactcaacgcagagggttcagcgtga

SEQ ID NO: 514053 - DNA, 1002 bp, Stenotrophomonas maltophilia
atgccagatcttttgagcagcacaagcatcgcccagcagtgggtagaagaagccatcggacgccaagaacctggtctgtacagccatgttgtttcagcagtggtctggacggacgcgcgtgggcaagatggttcactactggtggaagcagatcctcaagctgtgctcagcaccttgagacgtcaaaggctgccgcttctgctcaaccatgatccgggcaagcctatgggacaggtcctagaggctgagtacttcgagagcccagacgggcagaagtttgtcgcagcagtgatcgggtactactccagggatcacgttttgtcgtttgccgatcttggacttgacggcatcacagcgccgcctgttggccagcttcccgagccacgtggcgatttgtggatcgagattgcatgtgatcccagagaggtatcagccgagtgggtggacgcagtgtccgctgatgcaccaatgcctgttgtccgcaccgcgctgtcacacaactcaagtgaagctacgcaacagttgatccgcattggattagcattcgttctactcgtggggattccaactgcaaaggcgttcggtaccgagctgggcaaggatatctatgcaggggtgagcaagtggctgaagaagctcttggcagctccgagcgaccaccgcagccaactcatctgcatcgaaagccatcaacaaaactgtcaagtgagctttcttattcgcggcagtaacgtcgctacgagctacgcagcccacgatggcatagctcaggcggccgcccaagctgcaagaatcattaacgtactcgcacagcggggcatgcccgccacgcagttggtctacgagttcgacactgaatcactaaagtggtatccgtcgtatgccgcacttgacagcaatcgcctaattactagctccccaatgctcattgctctagcggcggatacccctgcgggccttagcctcggactggcacgcaaagacatgggcaagagcatttaa

SEQ ID NO: 514054 - DNA, 264 bp, Stenotrophomonas maltophilia
ttggccgacaacggctggcagccgtatttcaagctcaattactggcatagccgttccggcgaagaccgcatccgtttcgacgacgacgtgatcgtcaattcgcagcgctcgcgcgcgctggaagccggcgtgggtgtggtcggtcgcttcaaccgcaccatcagtgcgtacgccgtggccgactacacgcgcgagctgggcggcgaccgcaacgagaagcgccgcatcatcgaaggcaacatcggcctgcgcgcggactggtga

SEQ ID NO: 514055 - DNA, 270 bp, Stenotrophomonas maltophilia
gtgccggcgatcaccatcggtgcgggcctggacaagctggacggtggggttgaagccggccgcgcgctgcgcgagaagtacttcgccgactgctaccaccaggcctgcgatgcatggacgccgagctgggacccgagcggccacgccgccgacaccctgctggtctacgacctgggtgcggagctggccaacagccgccgctggcccacgtgggaaaaggaatcggagttccgcagcgcgcgtgacaagagcgaagcggcccgccgctga

SEQ ID NO: 514056 - DNA, 153 bp, Stenotrophomonas maltophilia
atggccgccgatcgtcgcgtggtggtcaccggcgccgccgccatcagtccgctcggccacgactggtccaccatcgaagcgcacctgcgcacctgcgcagctgccgcaatgccgtgcgtgcaatgcccgagtgggatgtgtatgccggcctga

SEQ ID NO: 514057 - DNA, 258 bp, Stenotrophomonas maltophilia
atgtctcccgaacttgccttgaccgaactgcgtggcggcctgatcaccgtgctgtgggtcgccggaccgctgctgctcaccgtgctggtggtgggcgtggtgcaggccgcgacccagctcaatgaaccgaccattgccttcgtcaccaaagcggcagcgctgaccgcggtgctgttcgcgctgggcagcctgctgatcggccacctggttgaattcaccacgctgctgttccagcgcattccacacctgatcggctag

SEQ ID NO: 514058 - DNA, 309 bp, Stenotrophomonas maltophilia
atgctgcgttgtgccgtggagaagctgaccaaggagggcaacggcgatgatgactatggcgagacgctggaggcaaccgattacgtcggtgtcagcgagaagggtttgggtgccgatggccttgacgctggtggctggcttggtggcggctcctgcccagcgatgaacaacgcgatcctcactcagcttggcgtcaagggcctcgatgttctttgtgacggcgcatcaatcctcggcatgtacatcctgttcctcggttggatgcatgcctccttcattcttggtcgttcgctcattggaggtggctaa

SEQ ID NO: 514059 - DNA, 159 bp, Stenotrophomonas maltophilia
atggtggcggtgacggcggcggtgacggcggtggtgacggtggcggcgacggcgggggtgacggtggcggtgatggtggcggtgatggcggtggtgacggtggcggcgacggcggcggggatggtggcggtggcaccgatcctgagccgtgccctgtag

SEQ ID NO: 514060 - DNA, 258 bp, Stenotrophomonas maltophilia
atgaagagcatcaacaacaccgttcgtccgtccatcaaggcccgcgccaagtcggccgcctccaagctgaccagtgttgtcgtcggctcgctcgtctcggcctcggcgttcgcccagtcggcggacatgcccaccagcgtcgatggtgctgccgagttcatgaccagcaagggcggcattgcgattgccgtgtgtgcggccatcaccctgatcacgctgggcatcaccgccgccaagctgccgcgtaagggcacctga

SEQ ID NO: 514061 - DNA, 216 bp, Stenotrophomonas maltophilia
atggcctctccccgtaaagcaatggccatgctggccgcttgccttgtgtacttctccctgctgcttgcggcgttcaccggctacgtgtggttgatgcttggtggcgatagcctctacgaggctgttatcgcagccatcaagctgctttgcggcttcgttttggcgttggctatcaccgcttgcgtcaaagctgctctgcgcggtcgggaggcgtga

SEQ ID NO: 514062 - DNA, 351 bp, Stenotrophomonas maltophilia
atgcctagtctcgtgggctcggagatgtgtataagagacagcccggacagcatcgccacgatcaggccgaccacgccggccaggccactggccagcagcgtggaagtgaacaggaacgccgccagcgccgcacccgcgccgccgagcaggccgcgcagcggacgcggcacgcgcgagaagacgccgcgcaggatgctgccggcgaacacgccgatgaacagcgccaggaaccaggtgtcgccgccagcgccgggctcgcgcccgcgatggccgctgaccggtgccggcagcggttcgccgtcgatcagcttgaccagcaccgccgtggcatcggtgatgccgccggcatag

SEQ ID NO: 514063 - DNA, 327 bp, Stenotrophomonas maltophilia; identical to SEQ ID NO: 324070

SEQ ID NO: 514064 - DNA, 300 bp, Stenotrophomonas maltophilia; identical to SEQ ID NO: 324071

SEQ ID NO: 514065 - DNA, 1668 bp, Stenotrophomonas maltophilia
atggacgcacgcacgaactcccagggtatcgccgccgcaccgcttggactctttgctgcctactggggcgacatgctgtggcggaccgtcgcgtccggcgaagcgctgagacagcgcgccaacaacatgaccgaacacgaagcggcgggtatgccgccgctgctccacttcgagtcagagcaggtggctgacggccacgacttgcaaccggcgagcaactaccggctcctgcgtgtcactcgctgtggcaccgacgccttggagaagcatgtgcgcaaaggcgccgcgccggtgctggtggtcgatccacgcgccggccacggccctggcattggcggcttcaaacgcgattctgaagttggcatggcactgctcgaaggccatcccgtgtacttcgtagtgttcgatccggagcccgtcgagggccagaccatgggcgcagtcgtccagaccctggccacattcatcgacatggtggccaagcgccaccgaggcaaggccccgatcgtctacggcaactgccaaggcggttgggcgatcacgctggcgctgtcgcactgcgagcaccgtgccgccttggcagtgctcaatggctcgccgctgtcgtactgggcaggcgagagaggcatcaaccccatgcggctgctcggtgggttcacgggcggcatctggccggcgcactgggcgtcggacctcggcgccgggcgattcgacggtgcctggctggtccagaacttcgaggcgttgcggcccgagggcgtgttcaagaaatacgacacgctcttcgcgcagccggagactgagcgcgatcgcttcctggagttcgagcgttggtggaatggcttctaccagcttgcccgcgaggaaatgttgtcgatcgcaggcgatcttttcgtaggtaatcacctggagagcggcgaggtcgtggtcgatggccactgccgcgcggatctcagccgcattggcgcaccgctggtggtcttttgctccaacggcgacaacatcacaccgccccaccaggcgctcggctggctcaaagcggtatatccgacgaccgcagacctggtggcggcgggccagcgcgtggtgtacctgctgcaccaacatgttggccaccttggcatcttcgtctccgcgggggtggcgcgacgcgagcaccgcgccatcttgcatcatgccgaatcgatccaggcactcaagcctggactctacgagatggttctggaggacagcgcctcttcggagtcggccgccgctgcgcagttccagccgcggcggctggaagacctgccttacgacgccaacccggcggggttcgacaaggtcgaagcactctcggagatcaccgagcgcttctattcgcagtgggtgtcgccgtgggtccgcttcgccgtcacccccgactcggctcgtgaacttcgcgcgctgcaccccatgcgcgtcagtcgcaaggtctggtccgagcaggtgaccccggccctggcgctgctgccatgggtgcaacgatggcttgagcagtggagtgcgcaggatccccatcgggtcgaaaatccttggtatcagcttgagcgaactggtgcagacgcgattgggcaggccatggaatcatggcgcaagagccgggacctgtgggctgagcttgtgttcgagcaggcctatgccaactga

SEQ ID NO: 514066 - DNA, 1134 bp, Stenotrophomonas maltophilia
atgcgcgtcctcgccatcaatgccggcagtgcgaccctgaagttcggagttttcgagtcggctcgtaccttgccattgatcgactcggcgattgatcatcctgcggtggatgctgcgaccttcgaggagatcgagcggcacttgcacagggcgggtgtcacaacgctcgatggcattggtcaccgcgtcgcacacggtggcccactgttgagcaacgcggtgctcgtggatgaagaagtcgaacgcgagatcggcaaggcttcggctctggcgccgcatcacaatcctgccgcattggccggcatacgcctgacccgtgagcgttggcccggcgtgcgccacgtcgcggtcttcgacaccgctttccatgacgacatgcccgaatacgcccattcctatgctgttccgccatcgtggcgcgcggcaggggtacggagatacggcttccatggcctgtcccaccagggtgtactggccgccgtcagcaccgagctgaaacggccgccgtcagaacttcgtatcgtgagctgccacattggaagcggcgccagcgtctgcgcgatcgatcgcggaaggtcggtcgatacatctatgggaatgaccgcgcttgaaggtcttgtgatgggcacgcgctgtggagacctcgaccctggcgtacccggcttcgtcgcacgcgcactgggtttgacgttggcgcagatcgaggcggcgctttacagcgacagtggactcaaaggattgtcgggtgagagttcggacctgcggattgtggagaagcgcgcgggagaaggagtcggagccgcccaactggcaatgcaggttcacgcgtaccgcgtgcgcaaatacatcggcgcctacgccgccgcgatgggcggttgcgatgctgtggccttcactggcggagctggagaaaattcggccgcgttgcgtcggcgcatcgttgatggcctggagttcatcggcctggaactagacgaagagcgcaatcgcgcctactcgcccaacactgaagtcgcccagttgcagtcatcccgatccgccgtcgccgtgctggtggttcaagcacgcgagcagttagcgatcgcgcgtgagacgttccgagcgctgaatgaccaggcaagtggtttggtatag

SEQ ID NO: 514067 - DNA, 453 bp, Stenotrophomonas maltophilia; identical to SEQ ID NO: 324074

SEQ ID NO: 514068 - DNA, 1317 bp, Stenotrophomonas maltophilia
atgagccacctcacgacacgggatcgaaccgtatcgcccgacggatatgccgccgcgctacggatcttgcgccggctgctggccggcatcgagcgcccgccggcgttgcgtctgggcgatatgctcttgcacgagctcgaatcgcacccggaatacaccctgatcatccgtgacccgggtctgctgcgtcgcttggtcctgcgcccggatccgctgctgctggcggaagcctatttccgcggcaccatcgacattgagggagacctgtacaccgcgctcgggctcaaggcgcatttcgagaggttttcgctctcttggcgcgacaaactggccctgttgcgcgacgcactgctgctgcgcgtgtccgaccaggacgggttgaagccctcgcggagtctggcctcgcgcgtcgcacgtcgcttctcccatcgccattcgcgtcaaaccgatcaggccgcaatctcctttcactacgatgtgtccaacgcgttctatggactctggctcgatgccgagagggtctactcatgtggctatttcaaggcgacggatgacacgctggaccaggctcagcgcaacaagctggagcacatctgccgcaagctgcgcctgcagcgaggcgaacgcctgctcgacatcggctgcggctggggcgcgctcgtgtgctgggcggcaagagaacatggcgtccgtgcgcacggcatcacgctcagccaacagcaactcgaatacgcgcgcgagcgcatccgctcggagggcctgcaggatctcgtcaccgttgaactgcgcgactaccgtgacctcgaaggcacggccgttttcgacaaggtgtcaagcattggcatgttcgagcacgtgggactcgcgaacctaccggcctactacgcggtggtccagcgggttttgcggccaggaggactcttcctcaaccacgggatcacccatgacgaggagggctggagccgaaccgtcgcgactgagttcatcaaccgctacgtcttccccgacggcgaattggactgcgtcagcaatatccagctagggatggagcgctccggcttcgagatccatgacgtcgaaggtcttcgaccccactacgcgctgaccttgcgtcattgggtccagcgactcgaagcgcgccgggaggaggccttgcgggaggtcgatgaggtgaccttccgcatctggcgcttgtacatggcggcgtgtgcactggaattcgaggccggggggactgggatctaccagatcgtcgcgtccaaacgcgacggcggaagctggcccgtgcccttgacccgctctgatctttatggataa

SEQ ID NO: 514069 - DNA, 2430 bp, Stenotrophomonas maltophilia; identical to SEQ ID NO: 324076

SEQ ID NO: 514070 - DNA, 603 bp, Stenotrophomonas maltophilia; identical to SEQ ID NO: 324077

SEQ ID NO: 514071 - DNA, 831 bp, Stenotrophomonas maltophilia; identical to SEQ ID NO: 324078

SEQ ID NO: 514072 - DNA, 1263 bp, Stenotrophomonas maltophilia; identical to SEQ ID NO: 324079

SEQ ID NO: 514073 - DNA, 1056 bp, Stenotrophomonas maltophilia; identical to SEQ ID NO: 324080

SEQ ID NO: 514074 - DNA, 1623 bp, Stenotrophomonas maltophilia; identical to SEQ ID NO: 324081

SEQ ID NO: 514075 - DNA, 1032 bp, Stenotrophomonas maltophilia; identical to SEQ ID NO: 324082

SEQ ID NO: 514076 - DNA, 255 bp, Stenotrophomonas maltophilia; identical to SEQ ID NO: 324083

SEQ ID NO: 514077 - DNA, 645 bp, Stenotrophomonas maltophilia; identical to SEQ ID NO: 324084

SEQ ID NO: 514078 - DNA, 900 bp, Stenotrophomonas maltophilia; identical to SEQ ID NO: 324085

SEQ ID NO: 514079 - DNA, 1554 bp, Stenotrophomonas maltophilia; identical to SEQ ID NO: 324086

SEQ ID NO: 514080 - DNA, 1362 bp, Stenotrophomonas maltophilia; identical to SEQ ID NO: 324087

SEQ ID NO: 514081 - DNA, 498 bp, Stenotrophomonas maltophilia; identical to SEQ ID NO: 324088

SEQ ID NO: 514082 - DNA, 906 bp, Stenotrophomonas maltophilia; identical to SEQ ID NO: 324089

SEQ ID NO: 514083 - DNA, 612 bp, Stenotrophomonas maltophilia; identical to SEQ ID NO: 324090

SEQ ID NO: 514084 - DNA, 1326 bp, Stenotrophomonas maltophilia; identical to SEQ ID NO: 324091

SEQ ID NO: 514085 - DNA, 2466 bp, Stenotrophomonas maltophilia; identical to SEQ ID NO: 324092

SEQ ID NO: 514086 - DNA, 159 bp, Stenotrophomonas maltophilia; identical to SEQ ID NO: 324094

SEQ ID NO: 514087 - DNA, 651 bp, Stenotrophomonas maltophilia; identical to SEQ ID NO: 324095

SEQ ID NO: 514088 - DNA, 240 bp, Stenotrophomonas maltophilia
atgacaacttctcaccgcaccggtccaaggttttcgcgctcgcgatggttcctgggctttctggtcttcctggccgtgagcatctacatgctgctgacggaacaccgcgggcactacctggccgcgctgccactggtcctcctggcgacttgcgtcatcgctcatgtgctgatgcatcgccatgccgtaccaggcgacggtagcaaggcgaatccatcgtacccgggagagcgcaaatga

SEQ ID NO: 514089 - DNA, 402 bp, Stenotrophomonas maltophilia; identical to SEQ ID NO: 324097

SEQ ID NO: 514090 - DNA, 423 bp, Stenotrophomonas maltophilia; identical to SEQ ID NO: 324098

SEQ ID NO: 514091 - DNA, 426 bp, Stenotrophomonas maltophilia; identical to SEQ ID NO: 324099

SEQ ID NO: 514092 - DNA, 465 bp, Stenotrophomonas maltophilia; identical to SEQ ID NO: 324100

SEQ ID NO: 514093 - DNA, 1296 bp, Stenotrophomonas maltophilia; identical to SEQ ID NO: 324101

SEQ ID NO: 514094 - DNA, 1815 bp, Stenotrophomonas maltophilia; identical to SEQ ID NO: 324102

SEQ ID NO: 514095 - DNA, 579 bp, Stenotrophomonas maltophilia
atgcccgcaatccatgtatcccggcacttggtcggcgccggcctcctggccgcagccctggccagtggctgcgcgaccaccacggcgccgctcgcacccgatgccatcgaggaagtctcggccgcgcccgaacccgaggcgcccgagtacatcccggtcgtgcgctacggccgctacacgctggtcgagttggcacccacggcagcgcagcgcgacctgctgttgcagaccatcgacgtgtccatgcccgaggatgcccgcgccacggtcggcgacgggatgcggcatgtgctcaagcgcagcggctacggcctttgcgagaccgcgcatgccgtgatcgaactgtacgcgctgccgctgccggcggcacatctgcatctcggccccatgaccttgcgccatgcgctgctcacgctggctgggccgtcctgggaactgcacgcggatgaccgcgcacggcaaatctgcttcgatcggcccggcgaccgtgcagtcgccgagtccccatccgggccactcgccaccgagacggtgcagacgttcccgctggcgcctgcggtttcgggaggccagccatga

SEQ ID NO: 514096 - DNA, 228 bp, Stenotrophomonas maltophilia; identical to SEQ ID NO: 323928

SEQ ID NO: 514097 - DNA, 459 bp, Stenotrophomonas maltophilia
atgtcgcttcagggggccagcgacccagccctcaagacgcaacctttgtgggccgagagcatggctgtcgccgtgccgccgcggttgtattcacaactcgacagggcaaagctcaccatcgccgatcttcaggactacccgatctatcgctggcaggccgaggattgccctctgctggacgaaagactggcctccgtcatgccactggaccaggagaacatcctgcgggtgacttcattcgagatgctggcgctatgggttgcagccggctacggcgtcggggtatccgcgcaatcgcgcatcgaccaaggtcagggatgggggatcaccatgcggccgctctctgacggtccctatgagatggtgacgtatctgcaccagccccacgcgcaagccgactccatttcggagcggttcgagcgcagagcgctgcaaatcaccgcggccggcgccacgtaa

SEQ ID NO: 514098 - DNA, 219 bp, Stenotrophomonas maltophilia
atgctccccccgctcgatcttgcccatgtgcgaacgctcaattccggccagtgccgccagttcctcctgagcaacaccctgatccacacgaaacgcgcgtacggccttcccgaatgccagggctggctcggcttcatacctggtggtgcctgggggacggcctcgttgaacagtacgcttctgcatcaacagaagcgtcgagcagtcacgataatttaa

SEQ ID NO: 514099 - DNA, 891 bp, Stenotrophomonas maltophilia
atggagttacgacaccttcgatgcttcgttgctttggccgaggaactacacttcacacgggctgccgagcgactgcacatcgagcaaccccccttgtcccgagcgattaaagaactggaagacgagttaggagtcgttttcttcgaccgggatagacgggggacccgcttgaccccagccggtgccgccttcctgcaagacatccgtcgactattcattatcctcgagcaggcgcaagacaacgcaagggcaatcgcggcaggtttgcgagggagtctacgcattgctatatctgacggcgctattgattcacggctgtcagctttcctagcgcgttgtcgcgcagaggaaccggagatcgagattcgcttatgcgaagtccccttggccgagcaggtgcgaggcctgcgggccggcgatttttcaattggcttcgcacacgctgcagatgtcggcgatggcatcactgcccaagctatctggcacgacccattggtagttgccgtacccgcccggcatgagctcctcatccacaaggaggtgccgctcgatgaactcggcagccatccgctcgtcttgtgcgacccacagatatgtgagggctactgccgagaattagcacggctgcttggccctttggaaaatcggcagaacgttgtcgagcacgcaacctcgttagacatgatgcttacgctggtcggcgccggttatggtgtcggcttcatggcagccaccaaaattccgattagccaacgaccggacgtcgtgattcgtcccttggccgtggagtcggcgatcatcacaacttatctgcttcggcccgacagcggcgatgtgccggcctcactggagcggcttatcgttcgtctacgcgaaggtttggacggatag

SEQ ID NO: 514100 - DNA, 1005 bp, Stenotrophomonas maltophilia
atgaagaaaccttttatcctccttgccgctgccgtcactgttggtctcgtggcgtgggctgcgtggcacttcagtcagcgcgacggtgacgatgggctggtgctgcacggcaatgtggacatccgccagatctcgctggccttcgatggcagtggccgcgtggcggaagtgcgagccgaagaaggcgaccgggtgaaggccggtgcggttgtgggcctgctggacacgcgcacgctggccctgcaggcggagcaggcgcaggcgcagatcgaggttcagcagcagaccctgctgcggctgcggaccggctcgcgtccccaggagatcgcacaggcccgcagtcgggtcaccgcggcgcaggcggatgcgtcccaagccgagcaggatctcaagcgtctgcaaggcatcgcagccaacacccaagggcgcggcgtcagcgctcaggacctggatcgcgccaggagtaatcaccaggtcgcccaggccaaggtcgccgagcagcgcgaagccttgcgtctgaccgaactgggtccccgggcggaggaagtcgcgggcgcccaggcgcagctcaaagcggcgcaggcacagttggcgctccttcagcatcagatcgcgcagggcgagttgaaggtgcccgcggatgcggtggtgcggtcgcggctgctggagcccggcgacatggcgacgccgcaacgtccggtgttggccttggcgctgacccagcccaaatgggtgcgcgcctatgtgggcgagcccgacctggtccgcgtcaagccgggcatggaggcacaggtggtcgccgatgggcgccccggcgagcctatccccggcaagatcggctacatctcctcggtggccgagttcacgcccaaatcggtgcagaccgaagaactgcgcaccagcctggtctacgaggtgcgagtgctggtcgacgaccctcaggacgtgctgcggctggggcagccggcaacggtccatctggcggtggctggcactgcgcgatga

SEQ ID NO: 514101 - DNA, 1794 bp, Stenotrophomonas maltophilia
atgaacgagggcaatgcaacggttcacccaccggtccacgctcagggcctgtgcaagaccttcgatgcgccgggcggcggcccgttgcgcgcggtaaacgacgtgtcgatgacgataagggcgggcgagttgaccgccctggtcggcccggacggtgccggcaagaccacgctcatgcgcatgatggcgggactgctcacgcccgacggtggatcgttgcaggtactgggttgcgacgtcgccaaggatccgcagtcggtccaggaccgcatcagctacatgccgcagcgattcggcctgtacgaggacctgagcgtgcaggagaacctggacctgtatgccgacctgcacggggtgccccaggaggtgcgccgcgagcgcttcgggcgcatgctggaaatgacggacatggcccgtttcaccgaacggccggccggcaagctgtcgggcggcatgaaacaaaaactcggtcttgcctgcacgctggtgcgctcgccggacttgctgctgctggacgagcccagcgtgggcgtcgatccgctgtcgcgccgcgacctgtggaagatcgtgcagcagttggtcgaggacgagaacctcagcgtgatcgtcagcacggcctacatggatgaagccgagcgctgcgcgcaggtgttcgtgatgcacgagggccggttgctggccgaaggggcgccgcacgcgctgcgcagccgcgcacgcggcctcaccttcgtcgccacaccgcgacccggtacgcccgcgcgcgatctgcaggcgcggctgatcgatgaggatgcgctgatcattgacgccgtgcccaaggccggcgaggtgtggttcattcgccagcccgaggcgcaggcggatgccgtcgatgcgttgctcggcgacctggatcaccggccgcgcagcgaggacctggaagacgcgttcatgatgatgctgcgccagcagcaggccgagggtgcggacaaggaggcccctgccgaggcgcccgcgccgtcgccgcaggtcgcgccggcgcgcagcgacgacaagccggtgatcgtcgtgcgcgacctggtgcgcaaatttggcgatttcaccgcggtcgccagcacatccttcgaggttgcgcgcggggagatcttcgggctgctcggcccgaacggcgcgggcaaaaccaccacgttccgcatgctttgtggtctgctgccggccaccagcggccacctggaagtggccagcctgaacctgcgcacggcacgcgcccaggcgcgcgcacggatcggctatgtgtcgcagaagttcgcgctgtacggcaacctgaccgtgcgcgagaacctggagttcttcgctggcgcctacggactgcgcggtgctgccatgcgtgatcgggtggccgcgaccatcgaacagttcgggttggacgccgctgccgtgagcggggtactgccgggtggctacaagcagcgcctggcgatggcggccggcctgctgcacgagccggagatcctgttcctggacgagccgaccagcggcatcgatccgctggcgcgccgctcgttctggcgcaccatcacctcgctcgcccagtcgggcgtcaccgtcatcatcacgacccacttcatggaagaggcggagtactgcgaccgcatcgcgatccaggacgccggcaagatgctggcactcggcacgccgcaagaggtgcgagagcaagccggcggcgaagcgggtggcgacatgaacagtgccttcatcgccgtcgtcgaacagggccgcgcccaaagcaggcacgcgcaaggaggggacaagtga

SEQ ID NO: 514102 - DNA, 1131 bp, Stenotrophomonas maltophilia
gtgaccacctccggcttcgcaaggcggttcaccgcactgctgcgcaaggaagtgcgccagatgctgcgcgacaagagcaacctggccgtcggcctgctgcttccggtcgcactgatcctgctgttcggctacggcttgtcgttcgacgtgaagaatgcgccgatcgcggtggtgctcgaagacagctcacccaccgcacgcgaggtcgtcgcaggcctgcaaggctccgcctacctgtctccgacgttgaccaccagcatgacgcaggccgaagcccgcatgcgggccggcgagatcgacgcgatcgtgcgcattccgatggacttctcgcgtcgcctggcgaccggcgacgcgacaatccagatcgtgctcaacggcgtggagtcgaccaccgcgtcggctgtcgagggctacgtgagcggtgcaatcggcgtctgggcgcagcgccagggagaccgcgcaggcggcaaggccccagcgggcgcgagcgttgaggtggtgcagcgcacctggttcaacgaggccaacaacagctcctggtacctggtccccggcctcatcgtgctcgtgctcacgctggtgggggctttcctgacttcgctgctgatcgcccgggagtgggagcgcggcacgctggaatcgctgttcgtcacgccggtgcgtccgaccgaactcgtgctcgccaagctcacgccctatctggcgatcggcgcgatcgacctgacgctgtgcctgctggccgcccggttcctgttcgaggtgccgatgcgcggctcgctgtggatcatcgtcctggcgtcgatgctgtatctcgccgtgtcgctgctgctggggctgttcatctcgggcaagacgcgcaaccagttccaggccagccagatggcgctgctgaccagcttcatgcccgccatgatgctgtcgggcttcgtgttcgacctgcgcaacgtgccggtggtgatccaggtgatcagccagttgttgccggccacgcatttcatgggcctgatcaagacgctgttcctagcgggcgaccactggcccaccatcgtgcgcagcctgctgatcctctcggcatacgccgtggtgctgacctacgcgacgcggcgcacgctgcgcaagacattggattga

SEQ ID NO: 514103 - DNA, 1116 bp, Stenotrophomonas maltophilia
atgacgtcctttattgccaccctcgcgcagatcggcgccctggtcaaaaaagagatcctggcgctggtcaaggagccctccagccgggccatcctgttcctgcccgcgctgctgcaggccctgctgttcggctacggcgcgacttacgacctcaagtacgttccgtatgccgtgctggaccagagccgcagcgcggcgtcggtcgaactgctgtcgcggctggacggcaccggcgtgttcgaacgcgaggccacgctgacctcgcccgagcagatcgccggccaggtcgacgccggcaaggcgctgatggtggtcagcattccttcggacttccatacgcgcctggcggccggacagcgggcacctctgcagatcatcctggacgggcgcaattcgtcgaccgcgggctcggccgccggctacgtcggctccatcgtggccgactacaacgcctcgctcggaagcggcgcacaaggcgtcacgatcgagcggcgcgcctggtacaaccccaacctggaatcgcgctggaacctcatgccggcgctgatcgcggcattgagcatgatgcagaccctgctgctatcggcgctgtcggtggcccgcgagcgcgagcaaggcacgttcgaccagttgctggtcacgccgctcacgccgatgcagatcctgatcggcaaggcgctcccggcgatcctggtcgggctcatccagtccaccgtcatcttcctgatcatccggttctggttcgagatcccgatgaacgggtcggtgtggctgctgtacctcgggctcatcaccttcaccatcgcggcggtcggggtcggactgtcgatctccgccctgtcgctgaccatgcagcaggcgatgctctacacgttcttgctgatcatgccgctgatgctgctgtccggcctgctcacgccggtgcgcaacatgccgcaagtgctgcagcttgccacctatgtcaatccgctgcggttcggcatgagcatcgtgcgccgcgtctatctcgaaggcgcgggcttcggcgacgtggcgctggagttcatccccttgctcgtgctggccgccatcacgctgccgctggcggcgtggctgttccgcaaccgtctctcttga

SEQ ID NO: 514104 - DNA, 1545 bp, Stenotrophomonas maltophilia
atgttcgatttgcagcgccacattcctcatccaacacgccgcggcctggcgaactgcgcattggcggtggccctggcagcggcattggccggctgcgcggtcgggccggatttcgtgaaaccgacgcccgtggccccggacgattggacgagctggcgcagcgccgaggattccctgcgcgcgttgggcgctgccgaccagcccctgcccccgcactggtggcaggccttcaacgatccggtgctggacaacctgacgcagcgggccttggtttccagcccggacctgcagaccgccgcgctgcactttgcgcaggcccgcgtccagcgcagcacgacggccgcccagcgcgggccggaggtaggtgtcagcgggagcgccaatcgccagcgccagagcgagtacggtgccggcacccgcatgatcgacgcgatcggcggcgatcgcgagagcctggtgaatgtgttgagcgagccgttcacgctgtatcaggccggcttcgacgcatcatgggaagtagacctgtgggggcgcgtgcggcgctccatcgaggccgctgatgccgacgtggaccgccaggcggcactgctggaccttgctcggctgacactggtcagcgatgtggcccgcaactacttcgaactgcgcaccacgcagcgccagatcctcctggcgcgcgaggacatcacggcgttggaggatcggttgggcatcctgcaggcccgggtggatggcggcgtcatcgaccacctgaacctggagcagcaacgcgcggagcttgcggccatcaaggcgcagttgcccggcctgctggcccaggaaggcgcgagcgccaaccagatcgcgttgttgctgggcgagcgccccggcgcgctgcgcgagacgctggcagcgccccctgccagcgacggcacgacggcgcttcccgatctcgcgctgggtttgccttcggaagcggcgctgcgccgacccgacatccgagccgccgaagcccggctgcatcgggcgaccgcgagcatcggcgtggcgcgggcggacctgtaccccagcatccggcttggcgcgcgctttggttacgagtcctacctgagtggcgagttctccgactggggcagccgcgcctggtcggtcgggcccagcctgaacctgcctttgttcgacggtggccggcgcaggagcgtggtgcaactgcgcgagctggagcagcaggaagcggccgtgagctaccaacagacggtactacaggcgtggcaggagatcgatgacgcgcttagcgcctacaacgcggagcagcagcaagcgcagcaattgcaagcccgggtgcgcagtgcggcagacgcctatcaactggcccaggcgcgctacgacggcgggacggccgacttcatcacggtgctcgacagccagcgcagcttcctgcaggcgcgccgcgacctgacggccagccaagggcggctgaacacccgctacgtgacgatccagaaggtggtaggcaacgccccccaggttgagaagccgacggcggctgcgacatcaggggaatga

SEQ ID NO: 514105 - DNA, 1881 bp, Stenotrophomonas maltophilia
atggcgtcgctgtgtgtggggtgcgccggtgtcaaggtgggaaccgtcagccccgaggactacatctcccagcgacgcggggatgtgctgaccaccggcaagctcagcgcctcggcccgcgacgtgctcacgagtcttgcgatctcgccagagcgatgccgggagaatgtcagcgactgcgcccagttgctgacgcgcagcgatgtcattggcatggaacgtcaactcgccacggcagcggagctgtggttgcaggaagccatgcgccaggagcggcaaggcgtgaccggccaccagcgcttcgagggcctgttgggggcctatctgcaggtggcgcgccatgcctacgcctatctgttcttcaccccacgcctgccgggggatcgggcgttcgaggatcgccagacgcaagttcgcgactactacaactatgcggcgcagcaggcggccgcgctgttgttcgagcagtaccgcgacgcgcggcagcatgtcggagatagcatccaggtgggcgattggctgctgcgtggagacatgtccggcgtgtaccagaacggccccccaccacgtgcaagcgaactgctcccggcgtcgcggctcaccttccagggcatccgaagcatctaccggcgtgacggcttcggggccgaactcgtggtggcgaccggtgctggggacgaggaccgcgcggcttcggcgcacgcctatagcgagacaccatatcggccggtcacggccatcctggcctttccgggaagcacgctggagcaggtgcttcgcgctcgcgaagtcaccctggtcggatacgacccctaccggcacgacggcctgcagatccagggcacctcggtgccgctcgcagccaacttcacctccgcctacggtctgtggctggcgcgctcggggttttccgtgcaggccctgcgcacggtcctgggcaggagccgcagcctggacgccccgcatgtctatctgatgcagcccttcgaccccaaccgccgggtcatcatcatgctgcacggattggccagcagtcccgaggcctggatcaacgtcgccaatgacatcatgggcgatgaagcgttgcgccagcgctaccaggtctggcaggtgtactaccccaccaatgcgcctcttgcgtacaaccacgcggcgattcggagcgcgctcaccgcgaccttccagcatttcgatccttcgggcgccaccgccgcctcgcgcgacattgtcgtcgtcggccacagcatgggcggagtgctgggccgattgctggtctcgtcctccggcagtgtgctgctcgatacggtcaaggcgggccgccaactggagggcgagcggttcgagagattccgaaccgcggtcgagggctttttgagcttcgagccatacccgggcgtgacgcgcgcgatcttcattgcggcgccccacagagggaccccattcgcgggcaaccggctctcgcggttcctctccggactcatcacgttgccggcacaagtggtcaatcgggcggtacgactgcagcaggtcatcggtgacaaggaggtcacgccagccagcttgccgacctacttacccaacggggtcgacaacctgagggattctgaccccttcatccgcgccgcagccgagctcccgatttctgccagcgtgcgctaccacagcatcgttgcgaaccacacgccggacagggccctcgtcgattccgatgacggcctcgtgccataccgcagcgcacatcttgccggcgcgcaatcggagctggtcatcccgttttcccacagcgtgcaagagaccccggaggcgatcctggaggtgcgacgcattcttcgcgagcaccagcgggcgattccggggccagggagcacaacgcgtgagtga

SEQ ID NO: 514106 - DNA, 1416 bp, Stenotrophomonas maltophilia
atgacaaacgatcccagcaaacaatccccgccgcctggagtgcagcgcggtaccgacggcatctccgtgggccactccgcgcgcgtcgagcgtgtgctcaccctggacaaccttcagttgggtgtggcgcttgccagtgacaccgttcccgcagaggggaacacgcgaaccgtggcctccatgcgtggcagtgcctgggtcggcatcggcacctggctcgggggattgatcgcctcggcgatcggcgagtgcctgtccggcacccgtctggtctgccgtggacagcgcctgcggtttctggcgccggtccgtctgggtgatcgccttcgggccgaggtaaccgtcaccgagcaccatccggcaacgggtcgcatggtcctgcactgtgcctgctccaaccaggacggcatatcggtcgccgacggcgaagtggaggtggcacccagcgatgtgcccggcggcgacgatcagatcgatatcgggctgagcgtggatgtgggcggcagcatgcagcgcatgctgtctcacgttcagacgctggacgccatccgtgtcgcggtcgtacatccctgcgacgaagccagcctgtcagccgcgctggatgcacgccgggccggactgatcgagcctgtcctggtggccccgcgcgccaagctggacgtggttgcccagcaacacgggctggatctgaccagcatcgaggtcatcgacgtaccgcacagccacgcagctgccgaacgcgcggtcgagatggccggcaatggcgaggtcgaggccttgatgaagggcagcctgcacaccgacgagctgatggccgccatcctcgcaccggccagccggcttcgcaccaagcgacgcatcagccactgtttcgtgttgcaaacgcctggttacccccggcccttcatcgtcaccgatgccgcgatcaatctggcaccggacctggcgcagaaagccgacatcgtgcgcaatgccatcgagctggcccacgtcatcggcgtggccgatcccaaggtcgccattctggcggcggtggagactgtcaacccggccatgcccgcgacgctgcacgcggcggcgctgtgcaagatggccgaccgagggcagatcgtcggcggtgtgctggatggaccgctggcgttcgacaacgccatctcggccgtggcggcacgaaccaaaggcatcgtctcggcagtggcaggacaggccgacatcctggtggtccccgacttggagagcggcaacatgcttgccaagcaattgatctacctcggacaggcggccagtgccggcatcgtgcttggtgccaaggttccggtgatcttgaccagccgcgccgacagccgccaggcacgggtcgcgtcctgcgccatagctctgatgctggcgcaccagtacaggcagacgccgccatga

SEQ ID NO: 514107 - DNA, 1473 bp, Stenotrophomonas maltophilia
atgcacagccattcgttaagactggccgtctgcgccgccgccctgttgatgagcggctgcgcctcgatggcacctgcgctcgacaagccggccgtggcgatgcccgcggcgtacgcgcacggcacgccatccggggcgcagggttctaccgcagccgcgaccctggcctggcgtgactacttcaccgaccccgtgctggcgcagctgatcgcgcaggcgctcgcgaacaacccggacatgcgcactgcggtgctgcgggtcagggaggcacaggccgcctacggagtgcagcgcgccgaccggctgcctaccatcggcgtgggcctggacgccacgcgggcgcgcacgccggccgacctgagcctgagcggccgagcggccaccgccagccagtaccaggccgggctgggcctgagcagttgggagatcgacctctgggggcgcatcgcgagcctcaatgaagcggcgctgcagagcttcctggccaccgacgcggcccgtcgtgcggtgagcgtctcgctcgtcgccgaggtggccgatgcctacttgggcctgcgcgaattgcaggagcgattgcggctggcacaggcaagcgaaaccagccagcgcgagtcgctgcgcatcttcacccggcgcctggaggtgggctctgcttcccgtcttgaactgacgcaggtgcagaccctgctgacccaggccgagtccctggtcgtgcaggtgcagcaggagcgtgacgcgcaaagattggccctgagcatcctggtgggcgatctgtcggatgccgcgattccgatggacgatgccactgcagtcgacgcggacatcctggctccggtgtcaccgggcctgccttcggacctgctgtacagcaggcccgacgtcgttgccgcagagcaccaattgcggggcgccaatgccaacatcggtgcggcacgcgcggcgttcttcccgcgcatcagcctcaccgcctttggcggcgccgccagtacggagctggaccagctgttccgaggcgccaaccgcgcttggagtttcgcgcccagcctgtcgctgccgatcttcgatgcaggacgcaatcgctcgaacctggagctggccgaggtgcgcaagaacctggccgtggtgcagtacgagcagacggtgcagaacgcctttcgcgacgtggccgatgcgctgtcggcgcagcattggctcgaacgccaggtcggtatccagcagcgcgccgtccaaacgcagatcgagcgcgcgcggctgtcccgcctgagctacgacaacggcgcgtctccgtttctcgacgtgctggatgccgagcgcaacctgatctcatcccagcagcaactggttcagacacgtcgcgcattgctatcgagccgcattgcgctgtacgccgcattgggcggtggaacgcaggattccggcgatgcgccgctgtcgtccacgcagccccttcctaccgccccttattcgcgttga

SEQ ID NO: 514108 - DNA, 1080 bp, Stenotrophomonas maltophilia
atgaccatggccctatctctgaacaaaaaactgattctccccgttgtggcgatcgcgttggccgccgctggctggtacgcgtggcaacactttgccctcgggcaagacgacggctccgtcatcggcggcaacggacgcatcgaggccaccgaggtcgatatcgccaccaagctggcaggcagggtgagcgacatcctggtcgacgagggtgccttcgtgaaggcgggccagacactggccaccatgcaggtgcagaccctggaggcgcagttgcgcgaagcgcaggcgcagcgccaacaggcgatcaacgccgtggccagcgcccaggcccaggtggcgatgcgcgagagcgacaagactgcgctggtggcccagatgcgccagaccgaagccgagctcaatgccgccaggcggcggctcgtccgttccgagacgctcgtcaaggaaggcgccacctccacgcagacgctcgacgatgacagcgcccgcgcgctcagcgccgatgccgccgtcgctgcggcccgggcgcgcgtggcctccgccgatgccgccatcacggccgcgcgaacacaagtgaccagcgcacagtcccaggtcgccgcaacggacgccacgctggagcgcatccagtccgagatcgacgacagccagctcaaggcgccgcgcgacggccgggtgcagtttcgtgtggcgcagccgggcgaggtgctgggtgccggcggccgggtgatgaacatgatcgacctgtcggacgtttacatgaccttcttcctgcccactgaagcggcgggacggctggcgttgggctcggaggtgcgcatcgtgctggacgcggcgccggactacgtgattccggccaaggtctccttcatcgccagcgctgcccagttcacgcccaagacggtggagaccgccagcgagcgccaaaagctgatgttccgcgtgcgcgcacacatcgaccgcgagttgctgcgcaagcacctggagtacgtgaagactggcttgcccggtgaggcctgggtgcggctcgatgactcgcaggagtggccagcccgactcgccctgaaggtccagccatga

SEQ ID NO: 514109 - DNA, 2751 bp, Stenotrophomonas maltophilia
atgacgcaatcggcgctggtcacaagcacggacgtcgtccgccttgagcaggtggaactgcactacggcaagatccgggcgctggccggcatcacgctggacgtcccagcggggcgcatggtgggcttgatcggccccgatggcgtcggcaagtcgagcctgctgtcgctggtggcgggcgcccgcgcagtgcagggcggacacgtgcaggtgctgggtggcgacatggcgagccggcgccaccgcaacgcggtctgcccgcgcatcgcctatatgccgcaagggctgggcaagaacctctatccgacactgtcggtggaagagaacctgcagttcttcgcgcgcctgttcggccacgacgcggccgagcggcgccggcgcatcgacgatctcactgcagccaccggcctgcacaagttcctggcgcgcccggccggcaagctctccggcggcatgaagcaaaagctcggcctgtgctgcgcactgatccatgacccggacctcctgatcctggacgagcccaccacgggcgtcgatccgctggcccgtgcgcagttctgggacctgatcgcgcgcattcgcaccgatcgccccgcgatgagcgtgatcgtcgccacggcctacatggacgaggcgcagcgcttcgactggctggtcgccatggacgatggccaggtactggcgaccggcacgcccgcgcaactgctgtcgcgtaccagcagcgattcgctggaggccgcattcatcgcgttgctgcccgaagacaagaagcgtggccaccagccggtggtgatcccgccgctgcaagcctcggaagacgacatcgccatcgaagccgatgggctgacgatgcgcttcggcgacttcgtcgcggtggaccacgtctccttccgcattcgccgcggcgagatcttcggcttcctcggctccaatggctgcggcaagagcaccaccatgaagatgctcaccgggctgctggaggcgagcgagggccgggcctggctgttcggccacgagatcgatccgcgggacatcgcaacccgtcggcgggtcggctacatgtcccaggccttctcgctgtatggcgagttgaccgtccggcagaatctggcactgcacgcccggctgttccaggtgcccgaggaggacatcgacgcgcgggtggccgagatggagcagcgcttcgggctgggcgaggtgcaggacagcctgcccgagagcatgccgctgggcatgcgccagcggctgtcgctcgccgtggcgatggtgcataagccggagttgctgattcttgacgagccgacttctggcgtggacccggtcgcgcgcgatgccttctggcggctgctggtcgagctgtcgcgtcgcgacaaggtcaccatcttcatctccacccacttcatgaacgaggccgagcgctgcgatcgcatgtcgatgatgcatgccggcaaggtgctcgatagcgacacgccggccaatctggtagaaaaacgcggggcgcagacactggaagaagccttcatcggctacctggtcgaagccggcggcggtgcgccccaggccgacacgcctgtcggcgcaggccccgcccaggccgggcccgcccccggccacgccaagcccagccgcttcagcctgcaacggttgttcagctacatgtggcgggaatcgctggaactgcagcgcgatcccgtgcgcgccacgctggccttggccggatcggccttgctgatgttcgtgatcggcttcggcatcagcatggacgtcgaggacctgcgctacgccgtgcttgaccgcgaccagtccacgctcagccagagctacaccttgagcctggccggctcccggtacttcgtggagcagccgccgatcaccgattacaccgagctcgatcgccgcatgacgagcggcgagctgagtcttgccctggagattcctccgggattcggacgcgacgtgctgcgcgggcgcaacgtgcagatcggcgcctggatcgatggcgcgatgccgcagcgcgccgagaccgtcattggctacgtgcagggcatccaccagcactggctggtggagcaggctacagaacgcacgggcagcgcccccatcgggcaagccgggatcgaaacgcgctttcggtacaacccggacgtcaagagcctgccggccatggtgccggctgtggtgccgatgctgctgttgatgctgccggccatgctcacggcgctggccgtggtgcgcgagaaggaaaccggctccatcttgaacctgtacgtcacccccgtcacccggaccgaattcctgctgggcaaacaactgccctatgtagggctggccatgctgaacttcttcctgatgacgctgttgtcggtgaccgtgttcggggtaccgatcaagggaagctttctgacgctcgtgttggccgcggtgatcttcagcttctgcgcgacgggcatgggcttgcttgcatcgagcatcaccaagagccagatcgcggcgatgttcttcgcgatgatcggaaccatgattcccaccgttcagttctcgggcctgaccgacccggtgtcctcgctgcagggcggcgggcgctggttgggcgagatctatccggccacgcacatgatcagcatcagccgcggtgtcttcaacaaggccctaggcttcggcgatctgggcggggcgctcgttcccatgctgatcgcggtacccgtgatcatcggtgcggcgattgcgctgctgcgcaagcaggagcgctga

SEQ ID NO: 514110 - DNA, 1128 bp, Stenotrophomonas maltophilia
atgggccaattcctctccaacacctaccgattgggcgtcaaggaactgtggagcctgtggcgcgaccgcaccatgctggtgctcatcgtgtacgtcttcaccttgggcgtgtacaccggggcgacggccatgcccgagacgctgcacaacgccccaatcgcggtcgtcgacgaagaccaatccccactgtcccaacgcatcatttcggccctgtatccaccccagttcagcaagccgcagttgatcgagtggccagagatggacgtggggatggacgagggacgctacacgttcgtgatggtgatcccgcgcaacttccagcgtgacctgctggccggccgcgcaccgcagatccagctcaacgtggatgccacgcgcatgagccaggcgtttgtcggtagcggctacgtgcagcagatcgtcaacggtgagatcagtgagttcgcacagcgctaccgctccagcgccgtgcctgtggtggatctcgccttgcgggcgcgcttcaaccccgcgctggagccctcctggtcaggcagtcttgcggagatcatcgactacattgccatgttgtccatcgttctagcaggcgcggcgctcatccgcgaacgtgagcacggcacggtcgagcacctgctggtcatgccggtgacgccggcgcagatcatgctggccaaggtctggtccatgggagcggtggtactgctggcggcggccgtgtcgatcggtttcgtcgtgcaaggcctgctggatgtgccaatcgccgggtcgctgccgctgttcttcgtcggtgcggcgttgtgcctgttcgccaccacgtcgatgggcatcttcctggcgacgctggcgcgcaacatgccccagttcggcatgctgatgatgctgaccatcatgcctttgcagatgctctcggggggcgccacgccgcgcgaaagcatgccagagctggtgcagaacatcatgctggtggcaccgaccacgcacttcgtgcagcttggacaggcgatcctgttccgtggtgccggcctggcggtggtgtggccgcagttcgccgcgttgctgttgatcggagccgtgctgttcggcttgtcgctgcaacgctttcgcaaaaccatcgcacggatggcctga

SEQ ID NO: 514111 - DNA, 963 bp, Stenotrophomonas maltophilia
atgaaagctgcctactacaccgtcaacggagaacccgaggtcctcacctacggcgatctgcccgacccgaaggccaaggagggtgaggtcgtcgtccgcgtccaggccgtcagcctcgaaggaggcgacgtgctctcccgtcgcaacatggccccgcccaccacgccctacgtcgtcggctacgcggccgccggtgtcatcgcgtccataggcccaggcgtgatcgaccttgatgtcggccagcgtgtggcctgcttcaactggaaaggctcgcacgcggagctgttcgcggtgccgcagcacttcgtgtttccggtgcccgatgccttggagatcgacgcggccgcggttggcctgatcgcctttggcacggcccacgacgggctgttcgagttcggtgccttgcaaaagggcgaaactgtgctcgtgcagggtgccgccggaggcgtggggcttgccgccgtacagttggcgcatcgcgccggcgcgaaggtcatcgccacagcgtccacgctgtcgcgcctggcgaaactgcgggacttcggagccacgcacggcatcgactaccgggacgaagacatcgcgcagcgcgcactgtcgctgactgacggcaaaggcgtggacatggtgatcgatctggcgggtggcaaggcgcaggcctcgctgctcaagacactgcgctatcgcgggcgctatattcccttggggggcgccagcggcgagcgggtcgctttcgagatcgccgatctcgccccgaacagcctggcgatcatcacggccctgttcggcaaggaactgcataccccgcgtgtccacgcaatgatccaggcgatcttcgccgacatggccggcggctcgctgacgatgccgatcgacaagaagtttgcgctttcgcaggccgcgcacgcgcaccggcacgcggaggaaggccaccccttcgggcgcatcgtgctcgtgccttga

SEQ ID NO: 514112 - DNA, 2448 bp, Stenotrophomonas maltophilia
atgaacgctgagcaacacgatcacagccacgcccatggcgacggttcacggctcgcccagcccggtgcgcaggatggtgccatgggctcaagcgtcagggacccagtctgcggcatggtcgtggatccgcgccgcgcggcccatcgcgtggatcaccagggctcggcttactggttctgctccagcggttgccaagccaagttcgaggccgatccgctgcgctacgcatcttctggcgcggcctcgtcgcccgcggacgcggccgggcacgcgccgcattcccacggcgcagtccatcgggggggcgcaaagccagccgcgccggcatcctcgacggggatctggacctgccccatgcatccagagatccgccgcaacgagccgggtagttgcccgatctgcggaatggcgctggagccgctcgtggcgagcgccgactccgggcccagcccggaactggcggacatgacgcgacgcttctgggtcggcctcgcgctggccttgcctgtcttcctgcttgaaatgggatcgcacgtgattccggcgctccatcacctggtgccgccagcgatctcgacctggctccagttcgccctcgccacgccggtggtactgtgggccggctggccgttcttcgagcgcgcctgggcctcgctgcgccaccgcagtctcaacatgttcacgctgatcgcattgggcaccggcgtcgcctggggctacagcgtggtcgcgactctggcaccaggcctgttcccgcaggccttccgcaccatggacggcaccgtggcggtgtatttcgagtccgctgcggtgattaccgtactcgtgctgctcgggcaggtgctggaactgcgcgcccgcgagcagacctccggggcgatcaaggccttgctggacctcgcgccgaagatcgcgcggcgcctgcgcgaggacgggaccgaagaggacgtgccggttgagcaggtaatgatcggcgacaagctgcgcatccgccctggcgagaccgttccggtcgacggcgtgatcgaggacgggcgctcctcgatcgacgaatcgatgatctcgggcgaatcgatgcccgtcacccgtgcccagggcgacccggcggtgggcggtacgctgaaccagaccggggcgctcatcatccgcgcgcagaaggtcggcaaggacaccatgctctcgcgcatcgttcagatggtcgccgatgcgcagcgctctcgcgcacccatccagcgcatggctgacaaggtgtcgggctggttcgtgccggccgtcgtcctggtcgcgatcctcgcgttcacggggtgggccatctgggggccggagccgcggttggcacacggcctggtcgccgcggtgtcggtgctcatcatcgcctgcccgtgcgcgctgggcctggcgacgccgatgtcgatcatggtcggcgtgggcaagggagccggtgtgggcgtgctgatcaagaacgccgaagcgctggagcgcatggaaaaggtcgacacgctggtcgtggacaagacgggcaccctgaccgaaggcaggccggccgtcacaggcatcgtggccaccgccggcttcacgcaggacgaggttcttggtcttgcggccggcgtcgagcaggcctcggagcatccgctggccctggccattgtggcggccgcccagcaacgcaacatcgccctggcgcaggtctcgggattcgattcccccctgggcaaaggcgcgctgggcgtagtcgagggctggcgcgtggtggtcggcaatgccgcattcctggccgagcatggcatcgagaccgcgccgctcggtgcccaggctgacgaactgcgtcgagatggcgcgacggcgatctatatcggtgtcgatcagcgcgcggccgggatctttgccatcgccgatccggtgaaggccacgacgccacaggcgctcaaggcactgcacggcgaagggatccgtattgtcatgctgaccggtgacaatcggaccaccgccgaggccgtcgcgcgccggctaggcatcgacgaggtcgaggcggatgtgctgcccgatcagaaggcctcgatcgtcaaccggttcaagtcggaaggcagggtcgtcgcgatggcgggcgacggggtcaacgatgcgccggccctcgctgcggccgacgtcggcatcgccatgggatcgggcacggacgtggcgatagagagcgcgggcgtgacgctgctcaagggcgacctgaccggcatcgtcaaggccaggcagctctcgcaggcgacgatgcgcaacattcggcagaacctcgtcttcgccttcatctacaacgccgccggcgtgccgatcgcggcaggcgtgctttatccggtgttcggattgctgctgtctccgatcattgcagcggccgccatggcgttgtcgtcggtcagtgtcattggcaatgcgctgcggctgagggcgatgaagatatga

SEQ ID NO: 514113 - DNA, 1047 bp, Stenotrophomonas maltophilia
atgaaagctctggtttatcacggtgaccacaagatctcgcttgaagacaagcccaagcccacccttcaaaagcccacggatgtagtagtacgggttttgaagaccacgatctgcggcacggatctcggcatctacaaaggcaagaatccagaggtcgccgacgggcgcatcctgggccatgaaggggtaggcgtcatcgaggaagtgggcgagagtgtcacgcagttcaagaaaggcgacaaggtcctgatttcctgcgtcacttcttgcggctcgtgcgactactgcaagaagcagctttactcccattgccgcgacggcgggtggatcctgggttacatgatcgatggcgtgcaggccgaatacgtccgcatcccgcatgccgacaacagcctctacaagatcccccagacaattgacgacgaaatcgccgtcctgctgagcgacatcctgcccaccggccacgaaatcggcgtccagtatgggaatgtccagccgggcgatgcggtggctattgtcggcgcgggccccgtcggcatgtccgtactgttgaccgcccagttctactccccctcgaccatcatcgtgatcgacatggacgagaatcgcctccagctcgccaaggagctcggggcaacgcacaccatcaactccggcacggagaacgttgtcgaagccgtgcataggattgcggcagagggagtcgatgttgcgatcgaggcggtgggcataccggcgacttgggacatctgccaggagatcgtcaagcccggcgcgcacatcgccaacgtcggcgtgcatggcgtcaaggttgacttcgagattcagaagctctggatcaagaacctgacgatcaccacgggactggtgaacacgaacacgacgcccatgctgatgaaggtcgcctcgaccgacaagcttccgttgaagaagatgattacccatcgcttcgagctggccgagatcgagcacgcctatcaggtattcctcaatggcgccaaggagaaggcgatgaagatcatcctctcgaacgcaggcgctgcctga

SEQ ID NO: 514114 - DNA, 504 bp, Stenotrophomonas maltophilia
atggccgtgaaaggcatgccggcgaaacgattgtttgaatggatggccgccggcctgacagcctccggtggcgaagggggagacaagctgaaggttgcccgggaaatggcctatccctcccaccccgagcactacgctcttccgccttatccgggcgtgaacgaaacgctgggcggccagcctacccgtgtgcatgtgattccgacaggcgatctcccgccatttgtccaggcagccgtcgatccttcgtacgaaatccgctcaccctcccgtgtcgaactcgacgacggcacagtgtttggctggatacttcaccagttcagggactccgggaatgattgcgagggcatactgcgcgtgtggtggcccgccgaggcaccagaggttttcttcgaagagcacgctcaacacttctcggtcgagttccgagccttgtttcttctcggcgcacaagccttggagaaaggcgattcgagtccacaacccaccgcgacggcaccgtga

SEQ ID NO: 514115 - DNA, 765 bp, Stenotrophomonas maltophilia
atgcatatagagcaggaagggctgcttggcgggaaggtggtttgcgtcactggcggcgaatcaggcatagggcgatgtattgcgatggcgtgtgcgcaagccggcgcatcggtctgcgttgctggctttgacgcaacacgaatcaatggcgtggtcgcagaaatacaagctttgggccgccaagccttgggtatggtgacggatatccgggacccggcgcaggtcgatgcgatgattgccgcggtcgatcatcaatggggacgtctggatgcggcgttcgccaatgctggcggaacccaggcgagcgggccgacgcacgaaacctcacttgcagagtgggatgccggcgtgaaactcaacctgaccgggacattcctgaccctgaccgcggctgcacgctatctggtccgacagggagaaggtggggtgctcatggcgacgggttcatcgaccgcagtccgcgtcgtgcccgacgcctgcacctacatcgccccgaaggctgccgtccacgcgctcgtgtccatcatggcactcgagttggcccctcaccggattcgggtcaacgctctgattcctggccccaccgacacccccgcgcttcgagcaattccagggcacgctgagcgcgcagctgccagcgtgccgctgggcgaactcgtcgatccggccgaaatcggccgcttggcagcctttgccgcgagcgatgcattgcgtcatatgacaggaacacagctttgcatcgattccggccggataatcgcctga

SEQ ID NO: 514116 - DNA, 1731 bp, Stenotrophomonas maltophilia
atgtctgccccatctaccgagcgccttgtccttgttctgaactgcggctcatcgagcatcaagtttgcggtgttcgatgcttcccttgacccaatgccccgccgaccgttgtggaatgggaaggtccaaggaatcggtggtgacgtcccggattttggggagaccggtgttgcacctttccgtgtgcaactcgatacggagaccccccatcgaagcgcgctgcaattgatccgtgagcgcgtgtcggcacgtctgaatgaacacagcagcctcagcgctattgcccaccggatcgtgcatggcggcagcaaatactccgctccaatccgtgtggatgcgcaggtcctcgccgatctgaagggttacgtccctcttgccccgttgcatcagccctttgcgcttgaagccatcgaggtcctgctgcaggacctgccgcaagtgccccagatcgcctgcttcgacacgggctttcatcacacgcttcccgaggtagagcaggttctgccgcttccctacgaagcatggcagcgcggtctgcgacgctacggcttccatggcttgtcctacgagtacatggcgactgcgctcgcgcagcgtcacggccaggcagcccaaggccgcaccatcgtcgcgcacctgggcagcggcgcgagtctgtgcgccatgaaaggtttgcagagcgtcgcgacgacgatgggtttctccgccctggatggtctgatgatgggaactcgcaccggctcgcttgatccaggcgcggtgctctatctgatggaggtcgagcgcctgtcgctagggcaggtcggcgacatcctctatcaccgctccggcctgctcggcgtttccggtatttcatccgagccccgggtgcttgcgaagcatgagtcggatgccggcgaacccggcaccagggctcgcctcgcgttggagctgtacgtgcgacgcatcgtgcgtgagatcggggcattgaccgccgtgctaggaggcttggatctcctcgtcttcaccgcaggcgtcggagaacacagcgcattcgtgcgtgaacgcgtttgtcgtggcttggccttcctcggagttgctctggacgagccagccaatctcgtggatgcacctgtgatttcccagtccgacagccctgtcctggtaggtgtcgagcccaccaacgaagaatggatcattgccggccatgcacggcaggtgctgcgcctcacccaaaccccacgtcctgacccttggaaaaacgccatgtacaaaagactcctggtgccgctcgatggcagtcccaccgcgcatcttgcgctggatcacgctgcggctctggctcgcctcagcggagcgaccgtcgtcctgctgcacgttattgaggagctcaagcacagcaacggtttcgagcgccccaaggtgtacctggatgaggtgcggccgggcttcttggcggctggccaggcgctgttggatcaggccgctggccgtctgcgacaagacggtattgcggtggagacgcttctcaacgaggccaagggagagcgtgtctcggagctgatcgccaaacaggccgaaacagcgcgctgcgatgtggtcgtgctcggcacccacgggcgccggggtatggatcgcctgctgttgggcagtgatgccgaacaggtggctcgcatcgcacctgttccggtgatgctggtgcgccaccctcacccagcggccaccgaagtgccgctggccaagtgcgactga

SEQ ID NO: 514117 - DNA, 894 bp, Stenotrophomonas maltophilia
atgcagcgtttgatcctgccccttccgggcaacgaggttttcgccagcgagctggcacgacagagtcgtggtgaacttggaacggtggaaactcgccgatttcccgatggcgagacctacgtacgcctgcacgggatgcctaacgggcgtcccgtcgatctgatctgcacgttggcacggccagacgcacagttcctggcgctaaccttcgctgcagatgctgcaagggaccttggggcaagcgaagtcaacctggtggccccctacctggcctacatgcggcaggacgcgcgattccacccaggtgaatgcatcagttcaagatcgtttgcccggttgatatccgcgaccttcgaccgcctggtgaccgtcgaccctcacctgcaccgacatgcggcactgacttcgctgtacaccataccggccacaacgctgcatgccgcaccgctgttgtccagttggatcgcagccaatgtcgatctgcctctgatcatcggaccagacgaagaaagcgagcagtgggcaggtgatatcgcaaggcgcattggcgtgccttatgccgttttgaacaagacgcgcctaggcgaccgcagtgtcgagatcgaggtcccagatttgtctgcgtggcgcgatcgcacgccggtactggtggacgacatcgcatcgtctggacggaccttggcggtggcagcgcgtaagcttgtcgaacaggggctccgaaaacccgaatgcgtcgtggtgcatgcgctgttcgctgacgaagcctgggtggaattgatccccctattctcgcgtatcacatccaccgacgccgtcccgcaccccagcaacaggattgccctgtcagccctggtctgcggcgcgctggacgcatcgcttactgctggcgcttaa

SEQ ID NO: 514118 - DNA, 2313 bp, Stenotrophomonas maltophilia
atgaacgacaagacttcggcacggtctcaatggctggccggacacgggccaatcaagcgacggcacgacaccattgagcatatcgacgcggccgtcgccgatctgctggaagcggggtccatcgcatccgtggaggatgcttacgtattgctcgccgcgagcgaccgcctgacgtgtgcggcgatgaacgtcgttgcgcacatgacctacgccaatcgtatcgacttatccggcgccccgctgatggagcatgatttcaaggcggtgccggaaggacataccggcggatcgctcaacatggtgccggccttcgtgggatatctgcttgccaatgcgttggctggctcgacccgcggatggctgatggggcagggacactgcgtcgcggccatcgaggcgattaacacgctgaccggggacgtgtccccaagccagaagggacggtacgatcgtagcgaagctgggctgtcccgtctgtgtgcggacttctattcctacgccgtcgatgcgcgtggcgaaccggcggtgccgttgggcagccatgcgagcccccataccgcaggggcagtctccgaaggcggatacctgggcttcgccgcactgcaatacgtgcatatgcccttgccgggagagagcttggtggccttcctgagcgacggcgcgttcgaagagcagcgcggctcggattgggcaccgcgctggtggcgagccgaggactgcggtttcgcgattccggtgatgatcctcaacggacgccggatcgagcagcgcacgcagatcgtccaagaaggcggtgccgcttggctggcagaggatgtgcgccataacggcttcgagccgctgatcgtcgatggccgtgaccctgccgcaatcgcctgggcgatcctggcggcggagcaggcgctgaaaaggttcgccgccgcgccggaacgacgttatcccgcccggttgccatatgtcatcgccgagaccgagaaagggttcggcttcgccggcgccggtaccaacgccgcacacaatcttccactggtcggcaatcctcaccgggatgccggcgcccgggaagcgttcaatgccagcgcctctgcgctccatgtggcgtctggggacctcgatcacgcgcttgcggtgctcgatacccatcgcagccagggccgcggtcgggagagccagcattccatggctcatcgtcacccgcaggcgctgcacctgccagtaccggcgtgggcaccggccggcacccaaggcagcgccatggcgatgctggatcggtggttcgttgagctggttcgggccaaccctggattgcgggtccggctcggtaatcccgacgagttggccagtaacaagatgggcggcaccctcgcgctgctcaagcatcgggtcaacgtgccggaaccgggcatggccgaggaccttcatggcgcggtgatcaccgcgctcaatgaagaggcagtcgccgcagcggcgcttggcaacaagggggggctcaacctgatcgtcagctacgaggcgttcgcaatgaagatgctcggcctgctgcgccaggagatcattttcgcgcgccatcagaaggcgctcggccaagtccccggctggctatctgttccgctgatcgtcacctcgcacacctgggagaactcgaagaacgagcagtctcaccaggacccgacgataggcgaagccttgctgggcgagatgtcagacaccgcacgcgtactgtttccggtagacagcaacaccgctgtggccgcgctgcgagacgtgtacgccggccgcggacagctcgcctgcatggtggtgtccaagcgggatgctcccgagcgtctcgatgccaacgcggctcaacggctggtcgagcgcggcgcagcgcacatcgcagggacgcctggcgttgccggcgtgcagttcgtcgccatcggagcgtatcaactggaggaggcgctgaaagcccacgctttcctggagcggcatgggctggcttcctgcgtcaccgcggtgatcgagcccgggcggttacgcattccacgcgatgagatcgagcgcgctttcgtgctcggcgatgacgaattacaggcgttctttcccgacgacctgccgcgggtggtgctcagccacacacgtcccgaaccgatgttggggatccttcgacgcctcgatggcggccaagcaaggacgcgtgcgctgggttacatcagtcgcggaggcacgctcgacgtggctggaatgctcctcgccaatcgctgcacttggatacacgccgtgcaggcagccgcgcaagtgaccggctggaagacgcctgcaccgggctga

SEQ ID NO: 514119 - DNA, 1359 bp, Stenotrophomonas maltophilia
atgctctcattgaccagcctcggcggagccggcaccgtcacgggctccaagcacctgctgacctgcgacgacacccgcattctgatcgattgcggcttgtttcagggcctgaagaacttgcgcgagctcaattggcagcaactggctgtcaatccagaagacgtggacgcagccgttctcacccacggccatctggaccactgcggttatctgccgagattcgtgctcaatggtttctccgggccgatatacgccactcccgccacgcgcgatgtggctgcgttgatcctgcgtgacagtgccttcttgcaggaaaaggatgccgagttcgccaatcgcaaaggtttcagcaagcacaagcctgccctgcctctgtaccgggtcgccgacgccgagcgcgcgatcggcatgttcgccacagcaccgcttcatagggaggttgcgctgcccggcggaggcacgttgttgctccgacgggcaggacacatccttggtgccgccacggcacagatcgacatcggcggccggcgcatcgtgttttccggtgatctcggacgctatgacgacctggtgatgcatgcgcccgaaagcgtgcccgaggctgactatgtggtgatcgaatcaacctacggcgaccgtcgccacgagcacagcgatccggtcgaagctctgggggcggtgatcgagcgcaccgtgaagcgaggcggtacggtggtggttccggcattcgcggtcggccgtgcccagtcgctcatctacgatctgtggctgctgcgccgcgctggtcgtttgaacaatgttccgatttttctggacagtcctatggcgaccagtgctacggaactgatgcatgcctacccggacgaccatcggctttcagtacaagattacacggcggcatgcgaagcgatcacttgcgtgcgcgatgtagaagagtctaaagcgttgtccgccaaccgttatcccaaggtgatcatttctgccagcggcatggccaccggcggacgcgtcttgcatcacatcgctgctttcggcccccatcaccttaatacgctactgttctctgggtttcaggctgcgggcacgcgcggacgcaagctgctcgaaggtgcaaaagagacgaagatccatggccagtgggtgccagtgaaagccgaggtcgccgagctccccgggctgtccgcgcatgccgacagcgacgagttgatgcgttggctggccggtttccagcgtccacccaagaatgtttttatcgttcacggcgagccaagtgcatccgaggcgctgcgcgagcgggtgcaacgtgacctgggctggcaggccacggttccacggcagggtcaggagttcaagctgtga

SEQ ID NO: 514120 - DNA, 1488 bp, Stenotrophomonas maltophilia
atggtagcggtgcggatgcgcctgcatgcgcagcaccaagctgtcgctgtcatgcgcagggattcctatgtctgcctcgctgaaggactcgcgtcgcgatcgcaggtgctggtcagggcgggggagcgcgagctgctcgcccagctgtaccagatcgaggacgatgagcgcctggcgcccgagcaggtggccttgtccgaagacgcctgggacgccttggggttgcatgcaggcgataccgtcgaggtgcgccatccgccgttactggactcgctggccggcgtgcgcaagcggatctacggtcagcgcctgaacatgcaggacatgaccgccatcgtcggcgacgtcgtgaaggggcgctacacggatgtgcatctggctgcgttcctgaccgccacttccaccctgccgctggacgaacaagagaccgtcgatctgacccgcgcgatggttcaggtgggtgagcgcttgaaatggggggcccagatggtcgtcgacaagcactgcgtcggcggattgccgggcaaccgcaccacacccatcgtcgtggcgattgtgacggcgaacggcctgctaatgcccaagacctcgtcacgcgccatcacatcgcctgccggcaccgccgataccatggaaactttagcacctgtcgacctcagcctagacaagctgcgcgatgtggtcaagcgcgaaggcggctgcctggcgtggggtggttccatgcacttgtccccagccgacgacatttttgtacgcgttgagcgtgaattagacatcgatacggagggacaactgatcgcctcggtgttgtccaagaagatcgcggccggcgcgacgcatgtcgtcatcgatattcctgtcggacctaccgccaaggtacgtagccaggaggccgctcaactgctgggctcgaagttgaccgccactgccacatacttcggtctcgccgtgcattgcctgtatacggacggcactcagcccgtcggccgcggcatcggcccggcgctggaagcccgggatgtgctggccgtattgcgcaatgacgagggggcgccggccgatcttcgccaacgagccgctgtggttgccggcgcagtgttggagatggggggcgctgcgccagcaggaggaggcatggcgttggccttgcgcactctagacgaggggctcgcgtgggagaagtttcagcgcatctgcgatgctcaaggcggaatgcgagaaccgccacgcgccccttgcgtgctgcccttggtcgctgccagcgccggcaaggtggtggggatcgacaatcgcaaactgtcccggctggcgaagttggccggcgctccggacaacccggcagctggcgtggatctgagggtgcaggttggcgatcgggttgtgccgggggcgccgttgctgtttctgcatgcgcaaacgccaagcaccttggactatgccctgatctatgcacgcggggccggagacattatcgaaatcgcgacttag

SEQ ID NO: 514121 - DNA, 1863 bp, Stenotrophomonas maltophilia
atgctctccctgttccagcgaaaacgtcctccggtcgctgccgcgccgtcgccagcatctgccaccgacctcctgaaagggctgacgcggccggagtcggctgcctcgctgctggccaccccgcgccggcagaagctgatggaacacatctggcagcgcacctcgctctcgcgaaggcagttcgccaccctgtaccgcacgccactggagcgctacgccgagctggtccaggggttcccggcctccgaagcgcaccatcacgcctacccgggcggcatgctcgaccatggcctggaaatcgtcgcctacagcctgaagctgcggcagtcccatctgctgcccataggcgccagccctgaagaccaggccgcgcaagccgaggcgtggactgctgcgatcgcgtacgcggccctgttgcacgacatcggcaagatcgccgtggacctgcaggtcgaactggccgacggcagcacttggcacccttggcatggcccgctgcgccagccgtaccgcttccgctaccgggaggatcgcgagtaccgcctgcacagcgccgccacgagcctgctgtaccaccagttgctcaaccgcgacattctcgactggctcagcggctatccgtcattgtgggcgccgctgctttacgttcttgccgggcagtacgagcacgccggggtgctcggcgagttggtcgtgcaggcagaccgcgcctccgtcgcccaggagctgggcggcgatcccgcgcgcgccatggccgcacccaagcactcgctccaacgcaagctggtgaacgggcttcgctacctgctcaaggaagagctgaaactgaaccagcctgaagcctccgatggctggctcaccgaggactcgctatggctggtgagcaagacggtctcggacaagctccgagcgcacttgctgtcccagggcgttgatggcatccctgcgaacaacactgcggtgttcaacgtgctccaggaccacggcatgttgcagccgacgccagacggcaaggcgatctggcgcgcgaccgtgaccagttccaccggctggtcccactcgttcaccctgttgcgggtggcgcctgcactgatttgggagcctggcgagcggcccgcgccgttcgccgggacggtggcgattgatacgggctccacggacaacgaggccgatgggccactcccacttcccccagatgatgtgcagcccgccgcagcgagccaagaggcgctgccatgggaagaagctggtagcaccgcttcggctccttcgcccaggccccaaaccaaggccgatgtcatggaggacatgctggcgatggtgggtctacgggattcgtccggcatggcgcgggaggcggaagccgccgcgggcgaggtggatgcaacgcccccgggagcgccctcactaatctcggtcaccgctacgccttcatcaccgttgcccatgtccccggtcgcgcagccctccggcgagcatttcatggcatggctgcaacagggcatagcctcgcggcggctaataatcaacgacgcgaaagcgctcgtacacaccgtgagcgatacggcgtacctggtaagcccaggcgtcttccagcggtatgcacaagagcacccgcaggtggaagcactggccaggcgagagaatcagcaggactggcagtgggtacagaaacgcttcgaacgactgcaactgcaccgtaaacagcccaacggcctgaacatctggacctgcgaagtcaccggcccacgcaaggcgcgtcagttacacggctatctcctgcagagcccgctgcaactattccaagacccgccccccaacaatccttatctgaaaaccgggggcgtctctccggcgccgtga

SEQ ID NO: 514122 - DNA, 360 bp, Stenotrophomonas maltophilia; identical to SEQ ID NO: 347132

SEQ ID NO: 514123 - DNA, 372 bp, Stenotrophomonas maltophilia
atgagcccggcgcgcatggcatggcggccgctgcgctggctgttcagccggcgcgcggcgaagacgctgctgtggctggtgctgatcgttgccgccgccgtgggggcgaacgtcgcgggcatctacctggtcggcagcgttgcaggctgggaacggtggctggcggcctccgcagggtatttcttcatctggcggctgtgcgtgtacgtggcaacggtctatggatggttctggatgcgccgccgggtgctggcccgggaagaccaaagtgggacagatggccaggcgcggcgccggttgatccgcaccgaagtcgccggcgtcgtcgccatcgtcgcgctggaagccagcctgctgatgcaggccgcttga

SEQ ID NO: 514124 - DNA, 948 bp, Stenotrophomonas maltophilia
gtgacccgaccattcgacctgatgcgccgcctgcgcgctggcgtggcttcgttgctgctgctcagcgccacgggtagctacgccctcaatacagcgaccgtcatcggatcggtggcatcgcccgactgcctcgaataccgcgtcgtcggcatctgctactggctctattgcacatggacgggctgcaccgtgcgcacgtccacgaaagtgcgccactacgttcccgacgcggtggtgtcgtcgtactcgaataccggcgaaaacccctgggtcgaagtccgggcaatgggcacacccaacccgtcggcccaagcgggcggcgatgggaccacaaacgaggatcacgaaaacaatctcgcaaaattcaaaaacgcggacgtcatcggccaccccggtgccgaggtgttcaaccagttcgcctcgtcgtcgggctacttctgtgagggcgcgggcacggcgttcatgccgtacttgctcagcaccctggatacgctggcctggcgctacaacgtgcccgagatggcctacccggaagcgctgattccgggccggcgcgaggtcggcgcacgcaccacgatgaacctgtggggcaacgtgtatccccgtggcggcttcctgcaccaaaccgacgacttcaaggccagcgcagtggtggcccagcgtgcgggcgatgtggtcactcgccgggggcagatccacgtctatcagccgttgctcgcgaactcccgcgacggctactggccagccggcgcgctgatggagggcgatgcctcgaccggcaagtggcaagaactcacgcccgtcctgtcgtcgtcctgcacggtcttcccgcgcagcggcttccttacccaggcgcagcaaggcgactacgcatgggcgctgtggcggccgtatgcctgctgctcacgccgtggccaggtgttcctgggcagcgtcgatttcctctga

SEQ ID NO: 514125 - DNA, 447 bp, Stenotrophomonas maltophilia
atgccagcatctctttccaggttcgcgccgggctggcgaaccctcggcctggccgtggcgctgccggcagccctggccgttttcagcccggccaccttcgccgccgacgtggtggtcgtcaccgacagccgccacccggtcaagaacaggggcggcgagcagctgatcgagctggacgaagcccaccggattgaagcggagctttccgcgggactgcccaccgaccccgaacaggcgacggccatcgtcaagcgccggctgaatgtcggcggtgccgatctacagcgccgcatcgcttccgcataccaaggcgtcaccgacgcatggagcctgggcatcaccagcattccagccgtcgtggtggacaaacgctacgtggtctatggcgagccggacgtggctcgcgctgtcgcgcgcatcgagcagcaccggaggaaccagccgtga

SEQ ID NO: 514126 - DNA, 495 bp, Stenotrophomonas maltophilia
atgtcactcgtcgtcaatgactcctgcgtggagccacgttttgccccagcgtcccaatccgatgactggatcatccggcaagccatcgcgctgctggagcagcgggtcttcaagaaggggccttccctggatcagcctgcggccgttaaggactacctgcgcctgaaactggccgccgagcccaacgaaatcttcgccgtcgtgtatttgaacaacatgcacgaggtactggcctatgaaccgacgttcaaaggcacagtccattcgaccacggtacatgcgcgcccgatcgtgcagcgtgccctggaactgaacgctgctgcggtcattttcagccaccaacacccttcgggctgcacggacccatcgagcgcggatcgcgcgttgacccaaacgctgagggccgcgttgtcgctgatcgacgtgagggtgctggatcacctgatcgtcggccaaggcacgccgtactcgttcgcggaatccggcctgctgtag

SEQ ID NO: 514127 - DNA, 774 bp, Stenotrophomonas maltophilia
atggaccagaaacgtccttccattccgatgcaggtccaggcgttccgccgtcgccgctggccctgggtattggctgctgcgctggtcgcgctgctgctgatctggctcgtgtcccggtcgcccggcggatcctcagcgccgtcgcccgcgccggtcagcacggcgcaggtcgctgggccaccctggcagatgggcaaccctgacggccgtttcacgctgacactctatgccgacctggaatgcccgttctgccgggagtacttcccgcagctcaagcggtgggtcggcagcaacaccgacgtcgcactgcaatggcatcaccagccgctggctgcgcacgagcctgccgcgtcggacgaggcacgtctggccgagtgcgctgccgaagcaggcgggcatgcggcgttctggcaggcggtcgaatgggtctatgcccacacgcgcagcgacggccagggcttgcccgatggcttgcgctacccagaaacaacgtcagccatcgagcagtgcatggcgagtgagcggcccaacgcggccatcagcgcccaggccgcggaagcgaccaagagcggcgtgaccgccacgccgtcgctgcgactgctcgatcgccagacgggccaggccatcgtgctgcaagggccgatcgagggcgatgccttgctctcggccatggacatgctggcggccggggaaatgtccagcgacgcggcgggttcgcccgccacccccacatccgagatgcctgccgacgttgtcggcgacatgcccaggtag

SEQ ID NO: 514128 - DNA, 930 bp, Stenotrophomonas maltophilia
atgaagcatcctgcattcacgctgctggggctgttggccgtggccaccacagtggtcatgtcccccgccgcccgcgcggtcgaaatcctgcgctgggaacgcatgccgctcgcgctgccgctgaaggtaggccaggagcgcatcgtgttcatcgaccggaacgtccgcgtgggcgtgccggcgggcgtgggcgaacgcctgcgcgtgcagagcgcgggtggcgcggtgtacctgcgcgccagcgagccgatcgagcccacgcggctgcaattgcaggacgccgacacgggcgcgctgttcctgctcgacatcgcggccgagccgcccaaggacggcgaggccgagctggagccggtgcgcatcgtcgagggcagcagcaccccggcgcgctatggcgatcaggcaggcggtgccgatgaggccccggcacgcgcccagaatcagacaggcgctcatgcggcgcggcgcgaaaccccggtttcggtcgtcctgacgcgcttcgccgctcagaacctttacgcgcccctgcgcaccgtggagccgctgccaggcgtcatgcgggtgaacctgcgccgtgacctcgacctcggcacgctgatgccgacgctgccggtgcgcgcggtcgcgctcgcgtcgtggcgtctggaagaccagtgggtcaccgccgtgcgtctgaccaacagcagcagcggctgggtcacgctcgacccgcgcgtgctgcaaggcgacttcctcaccgcaaccttccagcacgaatcattgggtccgcgcggatctcccgaggacacgaccgtcctgtacctggtgacgcgtgggcacggcctcgcgcaatcgctgctgccggcgatccaccgcttcgaccccgctgcgcacctggcgcagccggaagctgaagccgacgacggcaagggggcccgccatgcgcagtaa

SEQ ID NO: 514129 - DNA, 324 bp, Stenotrophomonas maltophilia
gtgccgtgcgagagcattgccgagtggggcgcctggttttcagtagctgatcggcgcgtggtggagacctggatcgatgacgtctgtatcttcacggtctttcttgggctggaccacaaccacggacttggtggcgatccactcctgttcgagacgatggtctttgtggatggtgtgacgcaccagatgcgccggtacttcatctgggaggaagcggaagccggccacgccgagatgaccgagttgatccgagccgaaatgcaggaagcgcaggtgcgcgctgcgcaggcctgggagcaggtgcatgcgcggatgaaggcctga

SEQ ID NO: 514130 - DNA, 540 bp, Stenotrophomonas maltophilia
atgaagaaatcccatctggccttgcggggcctgctcgtattgctggcgggtctgccgctggcctcgctcgccggcgagccgctgatcgtggtcgaagaccgcggcggcgcgtcggcgctgccgtactacgaagccctgaacctccagccgcgcgccaacgcgccggcccggccgccgatcccgacgccacaggttcccgccacgccggcagacgaggccgcgatgctcccggtacgcagcgccaagctcacgcccggcaccgtcgcgcggcgggtcatcgaggctccgggtctgcggcctttcgcggtcgtcggcgacgacgaaacttcccgggcctggctgcgccgccaggcggcagcgctgcgcgagcgcggcgcggtcggcctggtggtcaacgtcgagaccgtgcagggcctggcgcgactgcgcgccctggtgcccggcgtacccctcgcgcccgtgtccggcgacgacctggccgagcgtctcggcctgcggcactacccggtgctgatcacggccaccggcatcgagcaatga

SEQ ID NO: 514131 - DNA, 642 bp, Stenotrophomonas maltophilia
atgaacgccccgcagcccgcccatcgttcaaccgccgcggtggtggtgcagagcctgatgtggctctggctgatcggcctcagtgtcctcgtggccatcggctaccaggccatgaacgaccaggccgaccagaagcgcctcgattcccgcctgcagcgcctcgaagcgcagacaacaggcctggccgagaccgtcgaggccatccagcagcgtccggccgtcgccacggcggcagacctcaaagacacccgccaaatcctggaagcacgcgcggcccaggtcgagcaatcgctgagcgcctatgccgccgacgacgaccttcaggcactgcgcgccgaagtcgagcaagtcaaggcgcggcagaccgctgcgcgcgccgctgcacccgtccagccgcgcaccgggaacaagcccaccgccaagcccgaaccaccgccgctcccgttccgcatcgtcggtgccgaactgcgtgccggcgagcgcagcgtgtccgtcgcgccgagcagtggcgacttcacgcccgaccagcttcaggtgctgctacccggcgatgcggtcggcccgtggcgcttgcaggccgtcgagggcaacaccgcggtgttccaggccggcgaccagacccgccgcgtggcgattccctga

SEQ ID NO: 514132 - DNA, 600 bp, Stenotrophomonas maltophilia
atgtgcccctctccaccctggtttcaccatcccgaacgccgcctgctggcgggctttctcggcctgctttggtccgtactggctggcggttgcgcgacgacgagcgcgccggtcgcgcccgacactatcgaggaagtctcggccgcgcccatacccgaggcgcccgagtacatccccgtcgtgcgctacggtcgctacaccctcgtggaactggcaccgacagcagcgcagcgcgacctgctgttacagaccatcgacgtgtcgatgcccgaggatgcccgcgccacggtcggcgacgggctacggcatgtgctcaagcgcagcggttacggcttgtgccagacggcgcacgcggtgatcgagctgtacgcactgccgctgccagcggcgcacctgcaccttggcccgatgaccctgcgcgatgcgctgctcacgctggctggtccggcctgggaactgcacgcggatgaccgcgcacggcaaatctgcttcgagcggcccggcgacagcatgaccgccgacaacgcacccgcgtcgcccgccaccgaggcggcgcagacgttcccactggcgcccccggcatcggaaggccagccatga

SEQ ID NO: 514133 - DNA, 321 bp, Stenotrophomonas maltophilia
atgttctcaagcctgttcaagcggcccgcgccgcagaagcaaccgttgttcgcaccaggtacgttgcagctgagcgagaaggtgcattggctggcccgcaaaggcctgatcgatcccttggcctatgtccaacgccatgtgcgcggtgactggggcgagaccgacgaggcgacccgccaagccaacgatgtcgcaatccggggggacgatccgatgatctcccacttcaggatcacgcccgaactggtgttgatcgtcaaaaccagcgaggaccaccgcaccacggtgatccagcttcccgaagaacgggacatgatctga

SEQ ID NO: 514134 - DNA, 1110 bp, Stenotrophomonas maltophilia
atggccctcatgttcccgcggctcgcccgcaatttcgccaagaacgggtactacccgaccgacgaacccacgctcgaaagagccctcaacgcactgatgcccagcgatgggccgatgtgcatcctcgatccctgcgccggcgaaggcgtggcgatcgccgaagccgctcatgtcctcgggcgcgaacaggcaaaagcgttcgccgtcgagttcgacgcggagcgggcacgccatgcccgcggcctggtcgatcactgcctgcacgcggatctgatggacacgatgatctccaagcagtccttcgggctgctctggctcaacccgccgtatggcgatctgtccaaggacgtcaacggcaacatcggctatcagggccagggccgtgcccgcctcgaaaagctgttctaccagcgcagcctgtcgctgttgcagtacggcggcgtgctggtcttcatcgtccctggctacgtgctcgacgccgagctggtcggctggctgacacgccactacacggacctgcggatctaccgagcggtggagacgcagttcaagcaggtggtgatcttcggccgcagggtgcgtcagcgcgagctggcacccgatggtctcaaggccgtgcgcaatctgctgctgcaggttgggcttggcgaagtcgaagccgaggaactgccgagcgaatggccgttccggccgtacatcgtccccgccagtccggccgagccggagcatttcttccgcgtgacgatggagccagagcagttcgccgatgaggttgaccggctccaaggcctctggccgtcgctggacacgcatctgggggccgcgcagcagaaactgcgtccgccagcgcgtgccttgactccttggcatctcgccttggctctggctgcgggtgcgatctcgggggttgtgcgctccaagaccgggcgcgtgctcgtcgtcaaaggtgacacccacaaggacaagacgctccagcgggaattcaccgaacgcgaagacggctccatcgccgagacccgcatcctcaccgacaagttcgtgcccgtcatccgcgcgtgggacatgacgcccggctccgctacacggggcgaggtcctgaccatccgttaa

SEQ ID NO: 514135 - DNA, 324 bp, Stenotrophomonas maltophilia
atgtccaccatcgtttgcgatgcacctcattccacgctggacgaacctgcgtggcgcgctgtctgcaagacggctgccgagcaagcccagcgtggttgcggcctgtcctgggatcactgggtcacgcttttcagttccgagatcgacgcgcaagccagtcggttgccggtaagccagcgggctcaggccctggaaatcgcgacccaggattgggactacgcaacacctgccgaacggcaggaaacccaggagtggaacgctgcgaacggctactgctcccatggcatcgaactgggctactgcccggccggttgcggttcctag

SEQ ID NO: 514136 - DNA, 690 bp, Stenotrophomonas maltophilia
atggcagtcacatcggcgcccgagcaatcgggttcgcccatcaccgtcccaggccaactcacgctgcgcacgatccgcggaagaaacggccctttcaacgtcggccgacttgtcacccccatcggcaagttcgcggtgaaggatgcggagctggagcagtaccccgaaggcaagtacgacggggagttcgtcatccgctacatcttcccgaagtcctatcccgtcggcgacggcatgcggttcgagatccgtgccaacctggacgggatgacgctcaacggcatcgacaaactgagccgtgacgaggctcgcagcttcaccacccaagaagtcgatccgctcgatgaagagctgagtgcgcagcctgcggcaacgccggcgaagcccgcgaaggcatccagacccgccaagcccgcacccgtgcaggcgtccgcggatccgctggtcgataccacgcctttcggcatggatgcgccgacgcccgccgcggctgctgccgctggtagcaccgaagatggcgacgccgcactgttcgggctgctctggccgctgggagagtccgtgaaactggattcgaccatcgaccgccgcgccctgcgcgcgcagatcgcccgcctgggtgaactgggctacgcgctggacttcaagacgcaggagtggagccgccaggccgaactgcaacctgcgtga

SEQ ID NO: 514137 - DNA, 477 bp, Stenotrophomonas maltophilia
atgctgccggtctccctgcgctgcgccaacgccttcgtgcaggagcaccatcgccaccaccggccggttcagggggcgaagtttgccctggcggtcgcgctgtccggcagcgacgccatttgcggtgtggccatcgtcggccggccggttgcccgccacctggacgacggctggacactcgaagtcaccaggctttgcactgatagcgtgtcgaacgcctgcagcaagctctacggcgcggcgtggaaggcggccaaggccctgggttacacgcggctgatcacctacaccttgcccgaggaaggcggtgccagcctgcgcgccgccggctggcacctgctcggtatgcgcggcggcggcgcctggaaccgcctcagccgtccccgcgccggcacccccgaccacctgcgcggccgcaagtgcctgtggcaggcgccaggcggcgcggacaaagggaaacacccggatgccgattga

SEQ ID NO: 514138 - DNA, 354 bp, Stenotrophomonas maltophilia
atgtcactgcgattcaaaggttccgacctgcgccccgtgctggccgaggccgttgccaaccaatgccgcgtcgtcctcgccaaggaccagggcgtgtacttcctcgccgagcagggagagcgccgtaccgatggccgcgtgaagctgctggcctatgccgtcggctgcaacccggataccgacccgtttgacgactggtgggaattggcgcgcgccgagctgggtggcgacgacttcggcgagttcttcgacccgaaggaaggcgtcttcgcacgcatcctgcacggcacggacgatctgatgctgtccgccaccacgacgcacctgtcgctggaggtggtgccatcggtgtag

SEQ ID NO: 514139 - DNA, 687 bp, Stenotrophomonas maltophilia
atggcgaacaactactacgaaggcacgggcgttctcgtgctagagcgtgtcacccccgtcatcaaggcgctgttcggcgccttcgcgctggacgaagaccatcccggcaacgggcaggcctacatcgctcaaatcgccgagaccaatgatccgcgctggacggatgtgttggacggcctggaaggcctggccgcacaaatcggcatccccatgcccgacgacgaagagttgtcgattccgcctctgctcgaacggctggccgcgcacttcggtgccgagcaggacggggagctggagaacctgatcgagcaccacaagttcgaggacagcgccgacctggaagccttgcttctgatctcctcctgcttcgatgacggccatcacctgagcgccatccagttcgagggctgctggtattgcagcaggcctaggttgttcgagttcggcggcgatggctgctacctgagccgcgagatccaggtcttccgaacgtcctcgcaggcgctccaactcggcgaccaactgcgcaagacgatcctggccgccgacatcgaagaggcctcggcgttgatcgcgctggaggtcgccaacctgctcgcaggcatcaacgacgaacagttccgcctgactgtgcgccatcgcgtcgccgaacggctggcccagatgccaacgatcagcgccgtctga

SEQ ID NO: 514140 - DNA, 1656 bp, Stenotrophomonas maltophilia
atggctgagatcacctcccagcaaatggccggcaaactgctcgcagcggggttcgagcgcagcggtccgtccgcggcggccttgagcgacccgatcgccgacacgcccatggtcgtgaccctcgaccaactgcgtccctacgaccacgacccacgcaagaagcgcaatccggcctacgaggacatcaaggcgtccatccgcgagcgcgggctggacgcggcaccggccatcacccgacggcctggcgaggaacactacatcatccgcaacggcggcaacacgcggttggccatcctgcgggagctgtggtcggagaccaaggacgagcggttcttccgcatatcgtgcctgttccgcccgtggcccagtcgtggcgaagttgtcatgctgaccggccatctggccgagaacgaattgcgcggcggcctcacgttcatcgagcgcgctctcggtgtcgagaaggcgcgcgagttctacgagcaggaaagcggcaccaccttgagccaatccgaactggcccgccgccttgcggccgatggcttcccggtccagcagtcgcacatcagccgcatgaacgacacggtgcgctacctcctgcccgcgatccccgccgtgctctatgctggcctcggccgccaccaggtcgaacgcctgtcggtcatgcgcaaggcctgcatgttcgcgtgggagcgctacgccaagggccgcacgccggtccaggacttcgacgagttcttccaggaagtcttgtcgcagtttgatgtgcaggccgatgagttctccgcgcagcgcgtacaggacgagctgatcggccagatggccgagctgctgggcgtcgattacgacgtgctcgcgctggacatgaccgaatccgagagccgccagcgcgctctggtcagtgatccgacgccaccctcgacaccgctcgccttgccggagcctggggctatcgcgcgtccacctgccaacaccgcgccgcctaccacagagcccgtatcggcagcgcagcctgcaggccccgcgtctgccccctcagcgcgagagagcgacacagatgccaacgaggcgaggacggcgagtccggcaaccgatcatcagcggcttcaggagcacatcgtctcgccggcgccgacgaccgaacggctccagtccatccagcgcatggtcgccgaccaattgggcgatgcgttgccgcccgacttctcggcgaacgtcttgcagtcaatccccgtgcaagctggcgggctctatccgatctctgatgtctggtacatcgacgcgagtctggagacgcccgagcgcctgcgcatccacgtcgcgcagttcgcgcgcgagatcgcgggtgacgccggcctggacgagtgcatcgaagacagtccagacggcatcggtttcgcttgccgtgcctacgcccaggacccagggccgcttggccgtgccgctctggcgctgctggcatgtctggccggtcagcagcccgccgatgtcggcctggataacgcgcaattcgtcatcgacctgtcggcactgctgcatggacaagggcatgcaacccggcggctgagcgacaccgcactggtcaagctgttccggctgctgcggctggcccgccgtctgctcgacctggacgccggcgctgccgcccctggaacgtga

SEQ ID NO: 514141 - DNA, 747 bp, Stenotrophomonas maltophilia
atgtacgacaaaccacctctaaccaaggtgttctatcgcccgattgaagcctccatcaggtgggccgggttgctgcggttcaaacatcttgtcctggcctcgatctcgtcgccaaggaacctaccgaagtcgttagattgtccccgttggagcgagcttcgcctgtacaccgaccgcatctacgatggaatccttaacggggagttgccgttcggggagaacggcatcacgacacatgatcccgctttgatcgactcccctgatctcaccgttcgccacgtcgatctgaagcgttggatgcaccagcactaccccgagcaccggccaggctttctattctcgcgcagcgaacgcatcgcccatccggtcatctcgctggagaccgggcaagccatgctggtcgaacagttggcgctgaaatccgccttggagcagtccagacgccaacttcgcgagttgcaggacaaacacaatgcgctgctcaagcaatccacggtgatccccgcctgcgcgcagtgcccgatcagcgatcgggccgaggccacctacctgaacatcatcggggccatgctggagttgatgctcggccagtcgccatcgggcacgccgtactccagcttcaagacgcaggaggccgtggtcagcgcactggtcgcccatcaccacggcgtcatgggtatcgccgagcggacattgaacggcaagttcgccacggccaggcgccggctgcatagcgccacgctctga

SEQ ID NO: 514142 - DNA, 4503 bp, Stenotrophomonas maltophilia
atgaaacgcatccgcaaggcccaagccgcgttgaacctgcccaccctcaagctcgaagggggtttattcctgcctgatcaactggaaaaagccgctcagggccgcgctaacgcacagctagaggccgactacgggacccccaagggcgtcaagctcaaggatgaatacagccgcgctttccagatcgcgtgcgctcaatggcagcacttcgccgcgcagattgggcgcgccgacatcgatgctgcgcagctcaccacgtccttcatccacgaactgctgcgcgatgcgtttggctacgccgccttgcaagccacggcagcacagcaagtgggtgaaatgcgttacccggtcagcctgatggctggcagcctgcccgtgctggtggccccgcacaccttggggttggacgaggccgacgcgtgctttgccgtgcagggcggcggcaaccgcaagaaggccccattccaggccatgcaggaattgctcaacgccagcgaaccgctgcaatggggcatcgtcagcaatggcaaacaactgcgcctgctgcgggacgcggctagcctcacccgccccagttttctcgaagtcgatctggctgacctgctcggcggccagcgctacgccgaattcgccaacgtctggcgcttgctgcacgcgagccgcgcagcccgcctcggccagagcgttacggcgtgcatctgggagcaatggcgcagcgaaggtcaacaggagggcactcgcgtgcgcgacggcctgcgcaatggcgtcgagcaggccctgctgaccttcggcgcaggcttcctgcaacaccccgccaaccacgccctgcgtgctgccctgaacgacggcacgcttagcaaggacgaatatttccaacaactgctgcgcctgatttaccggctcattttcgtgttcaccgtggaagagcgcggcgtgctgcatccgcagggagacagcgccgaagaacaagccgcccgccgcgcctatgccgaaggctacgccctagctcacctgcgcgaactctgcctcaagcgtcgcgcccgcacccgccatgacgaccagtggcaggccattcgaatcgtgatccgtggtctggcgcggggagagccgcgcctggcgctgcccgcgctgggcgggctgtttgcccccgaacaatgccccgatctggataccgccagcctagacaacacccacctgctcacggccttgcgacatctgcgctgggcggtggtctcgcagggcaagggcagcagcctcacgccggtggactaccgaaatatggggccggaagagctgggcagcgtctatgaaagcctgctggaactggtgccggccatcgacctacctgcacgcactttcggcttcgtcggccgtaccgaagaaggcagcaccgcaggcaacgcccgcaagctcaccggcagctactacactcccgacagtctggtgcaggaactgatcaagagcgcactcgatcccgttatcgagcagcgcctggcggctcatccggccaaccccaccgaggcgctgctgaccatccgcgtagtcgatccggcttgcggcagcggccacttcctgttggccgccgcccgccgcttggcggaaaagctggcacagttccgcagcctcgaaggcgggcaggagggtgccatccagccgcaggactaccgccacgccctgcgcgaagttgtggcccgctgcatctatggggttgaccgcaaccccatggccatcgaactggcacgcatggcactgtggctggagggctacgaggaaggccgcccgctgggttttctcgaccaccacttgcaagtgggcgacgccctcctgggcctgaccgacctgaacgtgctggaacaaggcattgccaaggatgccttcaagcccttgagcggcgacgacaaggacgtctgcaaagaactggccaaggccaacgccgccggcctcaagcagatcgccaaggatctgcaaggcatgcagatgctgctgggcgtggacaaccacaatggcctggaagccctgcgcgccattgaggccttgcccaccgacacgccagaacaggtggtgggcaaggaacaggcctggcgccactttttggaggattccgctcacagcccgctggcgcacgccgccgatgcgctggtgggcgcttacctgctgcagaagacggagggcacagcagaagccgtacctaccagcatcaccctgcacgcgctactgaccgcgccagaacgcgccaagtccgagcatgccgctcctatcattgcggcccgcgacgcctgcgagcagtcccgcgtattccactggccgctggccttcccgcaggtattcgcgcaaggcggcttcgactgcgtactaggcaatccgccgtgggagcgcatcaagctgcaagaagaagaattctttgccacccgccaccgcgacgtggcgcaagcccgcaacaaggccgaacgcacccagcgcatccagtggctcagtgaaggcatcctgggacgccacctgcaccccaacctggcccatgaggtgcatgaggacgaggccgagaagcgcctctaccgcgaatttgttaccgcccgccgcacagcggaggcggccagcgtgtttgcccatgtgaaaggcaccgacggcggccgttatccactgaccggcgtgggcgacgtgaacacctatgcgctgttcgccgaaaccatcctgcaaatccatgcagacagtggccgcgccggcttcattgtgccgaccggcattgctaccgacgacagcaccaaggcgtactttggccacatcacccagaaccagaggctggtcagcctttacgacatcgaaaaccgcgacgcggtgtttccttccgtgcaccgtagctacaagttttgcctgctcaccctaggcacagcggaacaggccgagttcgtctgcttcgcctcccaggtcagccaactggccgactcgcgccgccgcttcaccctcacgcccgatgagttccgcctcatcaaccccaacacacttacgtgcccagtctttcggagcgagcgtgatgcggaactgaccaagaagctataccgtgccgccccggtgctgatgcgcgatgccgtaaccgtaggcgagggcaagcaagccaaagtggtggagcctgagcagaatccgtggggcatttcgttcatgcgcatgctggacatgtccaacgacagtcacctgttcaaagacgagctagtcgccgaccacctgccgttgtacgaggccaagcttattcaccagttcgaccaccgctgggctacctacacggtggacggcaacagtcgcgatgtcacactgcctgaaaaggccgatccggatttcaccgtcactcctcgctattgggtcagtcgcaccgaggtggaggaacgtctatgcaagcgcgaccgcgatggccgcgtgatctggcagtgggagcgggattggttgatgggctggcgccgcaatgcgagagctacggatgaacgcacaacgattgcaacagtgatgcccataagtgcgcaaggagacagtgttttcctgtggcttgtaaatgaggaaatttcagtcgaacactctgctgcgctccttggtagcctaggaagccttgcatttgattttgtcgcaagacagaaagtgggaggggttaacttcagtttctactactttaagcagctcccggtactcgctcccactggctacaccgaagccgacctcgccttcatcgtcccgcgcgtactggagctgacctacactgcccatgacctctccagttgggccaaagacctgggctacgacggcgaacctttccctttcgactccgaccgtcgcgccaccctgcgcgccgaactcgatgcctggtacgccaaactctacggtctcacccgcgacgaactgcgttacatcctcgaccccgccgatgtcatggacgaggactaccccagcgaaaccttccgtgtgctcaagaacaaggaacagaaggagttcggcgaataccgtactcaacggctgatcctggcagcttgggatgcattggaaacccaacaacgcctcacgactccctcaccaaagcctgcacgtcgtacggccccccttccaatttatgcacaaggtggcacacccgccaccgaagccgaggactggctggcagggttggtctgcgacgtgctcctgcaagccggaccgtgtgacgataatcgcctgcgacgcattcttggggcacgattgccggaagacacgccgcatgccgagagactgcatgattggctgcggccggtgaacacagagcgccggacgctcatttgtgattggcttcgtgatctgttgggcgtcgctgcaacggcaccgctgtccatccacaacccggaagcgctggccgacattattggcgatcatcgcaccgcatcgctggctcgctacttgatcgaggctcgtcgccaccatgagaccgctctggcagaagtgatggcggattcggcgtcgagtgcgcagacagacgaaacgcgcaaaaggggataa

SEQ ID NO: 514143 - DNA, 1944 bp, Stenotrophomonas maltophilia
atgaaaggtgtcacgctttcgacgacagaccatgctaagccacgcctctgggtcgaaacaatgtggttgctagagtcgtttacatcccagcgcctcattcgcgagatccccttgcggcgcgggctcaatctgatcgtgtcgccacctggagcgggcagctccggtcacggcgtcgggaaaacagccttctgccagttgttgcgcttcgtactggatgatccgctttggtccggcggttcgaccttacgcgacgaactgctgagcagtcgcgagctgaaagagggggccgtcgccgcccgtgtgcatgtgggtggtgaggtgtggacggtcctgaagccgtggctgcatcagaaacactatcgagcttcacgatctgctgattggcgccaattggcagccaatgaagccgagaacgagttcagtgcctaccaggctgcgctgcgccagcatctggtcgaaattttgcccgttcgcgagttgccaacctcgaagcaatccatcgagtggcaccagattctggcctggtgttcccgcgaccagaatgcgcgctaccagaactactaccagtggcgcgccgatggcgttggattcagtccgccagcgaggtcgcctgcagcactcgtgcaaatcgtgctgggtctgttgactgacgcgacaacattgcgcgacctggacagcaccgccagggagatggaggatcagaaatcgaagttgcaagcactgcgcaaggagcccgcgcgtttgttgaaatacgtgcgccgccaactgacccgccgcctcgatgtctctgtcgctactccgttccggcaggacggcttgcttgagcacccaaacttgatcggaatcgccaagcagcgtcatgaggcttatcaacgggagctgtcggccatcgatgctgagcggcaagagctcgtggaacagcgtcaggcatgggtggaaaagcgtgcgccgttgaaagctggcattgagcgtctgagcaatgagatcaagcagaacgaagccatgctggccggtgacatgcagcgggtagccgagcttcaggaagaagcatcgtctttgcaacaacagctacccacccactgcgacgcaggaagccgattgctcagggattgcagtcatgtgatggagcggatcgagcaggcgcagatcgatcggaagcagcggatcattctgcatcagcgctccaaaggagatcttgaaaacgaactggcgccccaacgtcgccgacgggatgagctggaggccgagacagcgcccatgaatgcacaagttgcagccatcgatcaacgggaagctgagctcatgacgaggcacgcacaatccttgtcagccgaccagcttctcagtgatgccatcgaagactacgaacactacgagagcattgcatctggaaagtcacagtcaaccgatatcgtgacagtagagcgaaagctggagtcgactcggcaccgtcacgagcaacttcaaatgcagcatgagaaggagcgtgaggcagtgaaggggcgtcgtcgggcgatcagtgagtctatgcaggctgttgccaagtcgttgccctctttcctgtggggcgttttcaacgatgaggataagcaccgcaaccatccatttcagatggggccaatgcattcaacaaccttcagggttctggaaattctggccggggatatcgcctgcttgctcgacagcatatctgcggatagcttccatcctggatttctgctgcacgactcacctcgtgaggcagaaatgagtgaggccatactgtggtcactgctcgggcatgtcgcagcgagaagaggtgattctttccagtacgttgtcaccacatcgactgaaccctcagacgctttcaagtcttttgagaggctcaggctgtcatccgatagcgaggatggtcttttgcttcgtcggcgggtgggtacagagcaggcgtctttgacatga

SEQ ID NO: 514144 - DNA, 249 bp, Stenotrophomonas maltophilia
atgaccagcatggtggcgcgccagaccggcatggaattgcatcagagcgatcagggcggctgcagcttcgtgaacctgctgcgggccagcccggccgcctgccagggctttatcgagcaggcgctttcgcagatcgagcgcgaggcgcgcccgggtgacatcgtgctgctggcggcattgcgcacgcccgaactgcggggcatcgattggtcgcagcaggacgatgagacggtcgacgcaccttgctga

SEQ ID NO: 514145 - DNA, 234 bp, Stenotrophomonas maltophilia
atgggctcagctctacagcaaccgcgcacgcaggaaaccgtcaagagcctgcgggtgggtccgggcaggaccgtccgcggcatggatgccgcggccgagcttacagggatgtacttgcagcgtgtcctgcccggacccacccgcaggctcacccccgatacccggaaggcgctgctcttcgcagccaacccgaacccaacaaaaaacccggccgaagccgggcttttcgcatga

SEQ ID NO: 514146 - DNA, 132 bp, Stenotrophomonas maltophilia
atgccgtggtcgatgaaaccgggcgtggcgagcaagcgttgcatgctggtgctggtgctggtgctggtgctggatgcatggggcgaagtgaagcgcttgccatggccctgcagcgcgatggcgtgcgcgtga

SEQ ID NO: 514147 - DNA, 246 bp, Stenotrophomonas maltophilia
atgagccagcgcgtcaacgacggcgtctgggtcgccttcctcgatcgccaccggatcggccctggcggaccctgcagggcctgcaccagctacgaactgggccaaaaaggggtcgagctgtggatagcccggcatgaggcccgcctgcgggaggaagtgagccagatcgtcctgtggcggagggcgatccgggaaaaccggctggccaagtccaggctccggccaccctttgactggctggaatag

SEQ ID NO: 514148 - DNA, 255 bp, Stenotrophomonas maltophilia
gtgagcaatcaagagctgtttgaagaggcgatgaagggcgccacaaaggacgcgctgcagatgacgtttgaaagggtcaaccagctcccgccccccctggtgatcccgtacctcacgcagatgaccgtgattgcggtggagctgctgcgagcgggcggccagcgggacgcctttgtacgggagtttctggctgaggcaacacgcagcctggagagcccgccgttcctcactatgaaagaccttcgcgtcaactga

SEQ ID NO: 514149 - DNA, 768 bp, Stenotrophomonas maltophilia
atgcgcgccctgatcctgcttgcccaccccgagccccgctcgttcaatgcacatctggccgcgcaggccgccgagcagctgcggcatgagaacctgcaggtggacgtgatcgacctgtatgcggatcgcttcgatccgctggaagcggctgaccaccatccgcatcgcctgcatcccgaccacttcgacgcccaacgcgaacagcggcacagcgccgagcagggccagctgcccgccgaggtgcagcgccatctgcgaatgctgcgggccgcggacctgctgatcctgcagttcccgctgtggtggttcgcggctccggccatgctgaagggctggctggaccgcgtgctggtctacgggccgatgtacaacagccggcaccgccacgagcgcggcgtgatgcagggcaagcgtgcgttgctgagcgtcaccaccggctcgtcggcgcgggcatgcgcggtggacggccgcgagggcgacacccggttgctgctgtggccgttgatgtacagcctgcgctacgtcggcttcgaagtgatggaaccattcgtggtgcacggcgtgcgttccgggctgccagcggatcgcgtgcaggcgcacgacaaagcaatggcggcggccaccagcgactaccgcgagcggctggcaggctggcgacaatggccgagcgtacccttcaacgacagcggggattttgacgggggtgtggcgctgcgcgcggaagcgaccgcccacagccctttcatccgccatcgcaacgtggaatga

SEQ ID NO: 514150 - DNA, 627 bp, Stenotrophomonas maltophilia
atgtccaatgcccgctctggcctgctcgagcctggccccgacgccctgctccaggcggcccgctcactggagatgaatcgactcgcattgttgctgtcctgcctgcaggagccgagggccagtctgttcagggtggtattgcaggcgctgacggtgttgtggtgctggctctggatggatggatggaccgcaacccgtgctggccaacgatgcggcgagggtgttgcccgcgtccattgcgctgcttttcgcttccgtggcatgggcggcgtgggtgaatctgtacaaggaccgcggtgtggcatggcgcgacgcggcgggcctgcttctgagcctgatgatggtcaccgtgcaggtcgatgcggccttcattcttctgatgacgctcaatgcaaccttgcctttcctcgtgatcgcagcgacaacggtctacgggcggaaggcaatggctccggccatcgctgcggcgacgctgggcctgctgtgggctgcgcccgagggttactggacctcgcggccggcgtacctggcgtacgccttggcgctgactgtcctgctgcctgccgtcgtcgccaccatggtcgctgccatgcgcgatatcgcactgcgtgccgtcgcctcgcgtga

SEQ ID NO: 514151 - DNA, 324 bp, Stenotrophomonas maltophilia
atgcagctcctgcactggtcaaacggcgggcgctgcgtgttccctcatattcgtgtggacctatggtccatcgcccgcatcatcgagctcaacggcagctaccagatccgccattaccttggcgactccctgatgggcattggaacggacggtggatcgacactcatcgcgctcgatctctgcccgctcagtcgcggacagatcgtctcattcgatctgggcgatctcgatatccgccaaggcaagcacatcgccgaatctattgccgaactctttcggaagttcgacagcgggctgctgactagcgacaacctttatccttga

SEQ ID NO: 514152 - DNA, 360 bp, Stenotrophomonas maltophilia
atggccaaagtcattgcactcacctcgttcgaacaccacggaagccgtagccgcggcgcggagttcgatgtatccaaccaacacgcggacttgctggtccatcgtggcctcgtgaagctggctggcaaggcgggcgccgctagcggtggtccggctgctccgactggcggatccaatgagggcgctcagctcgtccgccagaaggctgccgacgcgatcgcggcaatttcggcggtgaccgatctcgaaatgctggacgctgcgctgaaggcagagaccggcaagggcgaaaagtcccgcgccaccgtgatcgaagcaatcgaagccgccatcaaggctgcgacgccggcgcaggcttga

SEQ ID NO: 514153 - DNA, 477 bp, Stenotrophomonas maltophilia
gtgaaccggatcaccatctacctgctggtgttcatcgcatggtccgctggcatgttcggtgccggctgggcttggcgcggtgaccgggccgagacttgggaagcccaacagcaagccagcaccagcgctggccaggtccagcagctcaccgagacccgtgccgccgagcacagccaggccgagactctggccaccatcggagccaagcatgaagaagaccgcaccgcggccacggccgtccctgctgttgttgttgctggcgtgcgtgatggcagcctccagctgcgcgacgacctcgccacctgcaacaccgctcgcctgtcccaggccgtcgccggcaccatcgaacgtgatgcgcacgccgaactacgagcagaggttgcgggagctgttgttcaagtcggccgagacgcagacgaccacgtccgtgccagccaagccgtcatcgcagcagaccgtgccgaggtgacgcgatga

SEQ ID NO: 514154 - DNA, 252 bp, Stenotrophomonas maltophilia
atgcgtgagctgatctatgtcacgaaggaagatgcactggcaaatggcatgacccatgaggggaccctgttcggcgttccggcctggctccgcgtggacagcgagaaacaggtcaccgggacgccgaagatcccagggctgcacctctggtgctgggtgatcgaccaactgttggagctgacgtgctgcttgctgccgcaggactgcgccatggtctcgccgatcaccgtcggcagggagatcgagccgtga

SEQ ID NO: 514155 - DNA, 213 bp, Stenotrophomonas maltophilia
atgaccttcgcgacccgcaacatcggcgccgcgcgcgtcggcatcgccgtgctggtgctgaccatgctcggcctggccatggccgccctggtggcggtggcgatccccgcagagaacaaggattcgttcggcatgctggtcggcggcctgaacaacgccaccggcatggtgatcggctacttcttcgggatgacccgtaggtcgggaggctga

SEQ ID NO: 514156 - DNA, 666 bp, Stenotrophomonas maltophilia
atgatcctgaccgcctcgacaatccagcaggtggttgtctgcagtgccgccgttgccgcccagtgggctcagcccctgaccgacgcctgcactgcgttcggcatcagcaccccgaagcgggtggcggcgttcctggcgcaggtcgggcacgagtcggcgagcctgaccaggatcgtcgagaacctgaactacggtgcgcagggcatggccgacacctggcccagccgctacgccgttgaccccagggccaagccgaggaagccgaacgaccttgcgcgcgcgctggaacggaagccggtcgcgatcggcaacaacgcatatgccaatcggctgggcaacggctcggaggcgagtggcgatggctaccgctatcgcggccgcggtcctatccagaacaccggccgggccaactatgcggccatccgagacgctttgcgggtgaagggcatcaagggcgttcctgacttcgagaccaaacccgaggaactggagcagccgagatggggcgccctggctgccggagcattttgggatgcccgatccctgaacaagctggcggatgccggccgtttcgatgagatcaccgaacgagtcaacggtgggcagaccggcgctgctgaccgaaaggcgcgctacgcccgcgcgctgaaggcactggccgcatga

SEQ ID NO: 514157 - DNA, 534 bp, Stenotrophomonas maltophilia
atgaagttcactgatgagcaacgcctgattgtcctgatgctcgctgacattcagaaggcgctgaaggttcgaggtgagtttgatccaagcttcatctcgaaggtcacggcttacaaggaagagttcgcgataccgttcgagcatgggttgcttttcgacgatcaggacctgccggacagttttaagttcgtcatcgacgttctagatatgtggtcattcattgagcgggccgtcaaggacctggatgaggggcagcgtcaggaactgatcgaccgtgttggactgcgtggggataatcctcagttccgcggttttgacggcaacaatgaaacagagttgatggcacattgccgccttctggtgaatgacctgcatcgcttcactgagttcaaggatagagacttcaattcgcatagcccaacggccgagctctaccgagagatgtatgagctgtttgagccaatgaggcgccagctgctggaccgccgtcggctcagcttggatgacctggaggcgctgctttcgacccgatga

SEQ ID NO: 514158 - DNA, 414 bp, Stenotrophomonas maltophilia
atgcaggctgaccgcgcgctggagctggtactgccctggccgagcaaggacctgtcgccgaacgcccgggtccatttccgggcaaaggcccgggcgacgaagcacgcccgacagacggcggtggtactggcgcacgaggctgggtggcgcgcgctgcagttgccgcccggcaagttgcacctgtggatcgactgctaccaggcgccgggcaagaagctgccggacgacgacaacatgacgggacggtgcaagccgtaccgggacgggatcgcccagctgcttggcatcaacgacgggcgattccaggcacacctgttcgtgcatgacgagcgccgcccaggcggccaggtggtggtgcggattacgggcgggccggcagcggccggccattcaacgacaggggaaggggcatga

SEQ ID NO: 514159 - DNA, 216 bp, Stenotrophomonas maltophilia
atgagccttctggaccaaccgccgagaggccttgggatcgcgaagccgcatatcagcttcggccgatacttcgacgaatcgcagatggtgagggtcgatttctggccgctctggcctactgatgctggctggtcccatgccgctggggaagacctgaaagaggcatgggaggcacacatgcagtgctacgaagacgacgatgaggagctgccctga

SEQ ID NO: 514160 - DNA, 219 bp, Stenotrophomonas maltophilia
atggacttcaccaactacagcacgcgcagcaggttcgccaaggagatcaacgccggttactcggcgcggctcaccgacgggcagtggtgggaaaacccacacctggtctggatcgaatgcgagaccgaggacggcgccaaccgcagggcggggccgctgagcgagaaggcggaagcctggcagcacggctggtggctggccgcccagggcgtgcgctga

SEQ ID NO: 514161 - DNA, 195 bp, Stenotrophomonas maltophilia
atgacctcgaggaacaccactactgccgatatgcgtgcgctacttgctgtagtgacagtgcttgcgcgcaatcagccgaatcgaagccagttcagggagcaggtgatccagctggtgaggcatcacgcttcgacgctgcctccccaggaacaggaggaaatgcttcaggcagcgaaggacctgatcgaggaatag

SEQ ID NO: 514162 - DNA, 336 bp, Stenotrophomonas maltophilia
ttgcgtgtggatgagaatgcctcggtggcacgcggtaaagaccaggcgcacgatgtcgggcctggccaagcctcgcgagagactgagaagactgaagtctgcaaggttgccgcagactacgcccgtagcatcatggatgggcggcagcatggtgtcgcaatgtcacgagtcatggacttggctaaggaagcggatccggccatagcacccctactgaccaagatggtcgttgatgcatacgacaggcctaggatggcggttgaacgcaaccgcgagaccgcggtacgggatttcgagaacgaagcgtttctgacctgcgtcaagcaaagccagtga

SEQ ID NO: 514163 - DNA, 315 bp, Stenotrophomonas maltophilia
gtgttccccggcagcttcattccctccatcaacgcgatcatggcggccaagacgcggtccagcgaccttcagctgatcgcccagcaggatttcggccattcctacgcgctgaccctgcgcacctggcgccagcgcttcctcgcacagctgcccgccgtgcaggcacaggggttcgatgcgcgcttctgccgcctgtgggacttctacctggcctactgcgaaggcggcttcctggagcgttcgatcggtgtttcgcatctgctgctggcgcgcccgggccatcgacccgtggtcccggctggcgaaggcaactga

SEQ ID NO: 514164 - DNA, 951 bp, Stenotrophomonas maltophilia
atggcctctgtatcgcccctcccccgtcgacgctggcgcctgctgcgcaccctgcagcgctgggttgataccggcgaagccgcggacgttggcgcggaacagtcgggccgcatcgactggctgcgtgcggtgccgttcgcactgatgcatgtggcgtgcatcgcggtgatctgggtaggtgtctcatggacggctgtcatcgtggccgcagcgctctacgcggtgcgcatgttcgccatcaccgcgttctatcaccgctacttctcacaccgcaccttccaggcaccgcgcgcggtgcagttcgtgttcgcggtgatcggcgcggccagcgtgcagcgcggcccgctgtggtgggcggctcatcatcgccaccatcaccgccacgcagaccagccactggacccgcattcgccgcgcgagggaggcttctggcgcagccacatgggctggttcctgacccgcgaagccttcgccaccgacctgtcgcgggtgccggacctggcgcgcttcccggaactgcgctggctggaccgcttcgacaccgccattcccgtgctgctggccatcggcctctatgcattgggcgcagcactggaacactgggcgccgggcctgcacacctccggcccgcagttgctggtgtggggattcttcatttccaccatcgtgctgttccacgccacggtcaccatcaactcgctggcccaccgcttcggtcgtcgccgcttcgagacccgcgacgacagccgcaacaacctctggctggccctgctgacgttcggcgaaggctggcacaacaaccatcacttcttccccggcaccgtccgccagggcttccgctggtgggagatcgacctgacctggtacgggctgcgcgtgatggcggcgttcggcctggtcaagggactcaagcccatccccgaatgggtgctggcaaaggcgaggtactga

SEQ ID NO: 514165 - DNA, 1035 bp, Stenotrophomonas maltophilia
gtgctgcccgaacagctggcccagcaggctgccgatgcggtccgcgagctgctggccgaagccgcagccgagaacacgacccgcagctacaccagcgccctgcgctactgggccggctggcatgtggcgcgctacggcatcgagttggccttgccggtacccgaagccatcgtgctccagttcgtagtcgatcacgtgcagcgccgctcgaccgacggcgaattggcctgggaacttccaccagccgtcgaccaggccttggtggccgctggcctcaaagccaaggtcggcccgtggaccttggccaccgtgcgccatcgcgttgccgtgctgtctactgcgcaccggctcaagcacatggccaatccctgcgagcagcctgcaattcgcaccgtgctcagccgcgtggcgcgggccgcggtaaaacgcggtccgcgcccacgcaagaagactgcgatcaccctggccgagctggaagccatcttggccacttgcgacgacagcctggaaggaattcgggatcgcgccctactctgcttcggattcgctagtggcggccgccggcgcagcgagatcgccgctgccgacctgcgcgacctgcgccggattggcgaggcgggctatatctaccggctggagcacagtaagacccagcaggccagggttacggccacctcgaccccggacaagccggtgctcgatcgggccgccatcgccctgcaggactggctggacgcagccgggatcaccgaaggggcgatcttccggcggctctggaaacagcgggtcggccctgccttgtccccggcggctgtgggtgagattgtccagcggcgggctcgcctggccggactggagggcgattttggcgggcatagcctgcgctcggggttcgtgaccgaggccagccgccagggcgttgccctgccggcaatcatgcagctgaccgagcaccggtcggtgtcgagtgttgtggggtactttcaggccggcggagccgcagctaaccccgctgctcgactgcttgaggactga

SEQ ID NO: 514166 - DNA, 2241 bp, Stenotrophomonas maltophilia
gtgatcacggggctatccatttaccgatataagagcttccatccaacagtagctcaccccatccactttgaggcgaacacgccgccccggcccgtctttctctacggcatcaatggcgccggcaaatcagccatcggagaggtgatccaaggactggctgggaaggaagcagagttttcccactgcgccttgcaaactagcaataacgctgactatcgaattctcgtctacaaccaacgcttcgtagataaggtaatccgtacggccgagggcgtacctggaatcttcaccattggcgtccaagatgccgccacccagacagagatcgaagagaagcaagccgaaaccgagaggcttgaagcgcaatccgcggcgttggacgcgaagatccagcaaacgattgacgcaggcaaggcagttagggacattgccattactggtgcttggaaggcgcattctgactacgatcaagggccattccgggacttgatgaagggctttcactctgatcgtcagaagttcttcgaggagctggacacttacaccgtcgctgacgacgtagagctggacaaccttgatcgcttaatgcaaagactggcagacgccaacagcacggagagttcccagcccaagatttctttggatctagctggactcgctatcgttgaggctgacgccatctggggcgatgtgattgccgtctctgcgaccagtcgtctggcgccgctcatcgaaaagtggggtaatagcgattgggtgggccaggggcgaaagtttgcgcatgatccagagtgtccgttctgtcagcaacatctgccggctggcttcgccgaagatctagctttgctactggatggagacaggcagtcgaagctcgatcgggtccagtcgctttccgacacctacgctcagcgtgttgccgagatcgaggtggcagctaagaccatgctcgaacaggcgttctccaaggaagagccggggttggagcaggcttgggatctatttcatgcacagatcaaggctaacgccgcctcgatgttgtcgaagatcgaaaagccgggcgagattgttgtgctagaagccagtaatgctgagggtttgacgaaggcgatcgctaccgtgaacgagcgggtcacccagttcaacacccgagttgcggatcgagtcgctgagcgtgagcgcatcaagaccatgttctggcaggtcatgcgaagggaacgggcgcccgtctatgacacatacaaagcgggcaaagacccactagcggaagtactaaagaaggacagggaagacaaggcggaggtaagtagggcgctgacggctgtcgccgcgcggttaagggaactgcgtcgtgtgcaaagcggtgttgctgcgtcggtggataagatcaattcgcgccttgcacggatggggattgcgtcctactccattgccaggaaagccggcgaagggaatttgtattgtttggcgcgtcccggacaagccgaaggagatatgaagtccctgagcgaaggcgagaagactctcatttcctttctctactacctggaatgccttggcggctcagacaccgccgaagccggcgctgtcgatctcgggaggaccattgcggtcattgatgatcctatatccagcttgtctcacaattttgtgtttgacattgcctcgatcatctacggagagctgatcaagccggaagatggaatacccaggccgcgccaggtgatcgtcctgacacacaatctgttcttcctgcacgaagtgcttaggcagacgatcggcggatccgatcttgccaaggcgtcaaagaagtgccagctcctacgtgttgtgaagcccgagcacaccaaagtcgtgcccatgaaggctgccgagctcatgaacgactaccaggccctgtggcaagtgctacgagacgctcgcgactccaacatgcctgcgatcatggtgcccaacgccatgcgttgcatcctcgaacactttttctggttcactcatcaagaggacaagttcaaagaggccttaaagaaggtcggcgacgaagacgcaaccttcgctccgttggcgcgctacctggatcgaggatcacacaaggatggaattaacatcacggtgatggacttcaatcaatacgatctgaactactacttcaccaagttccaggctgtgttcgtagccgcagggtttggcgatcactacttggcaaacatgggcgcggcagaggattcatccgcagcgtag

SEQ ID NO: 514167 - DNA, 1026 bp, Stenotrophomonas maltophilia
atggccttcgctgtgattagtgcttcagctcagcggccttgcagtaaccgactgacagattattcagtattgggcatcgatccgggctctgcagagcggttcttttcaagagtcgtgggaacgactgacgaaattcggaagaagctcatagatgaccagcgccttggcgactgttgggaatacacgttcaacgcgcttcacttcaagccgctggtcgcttttgatgctgaccatcccgaaagactgatctgccccctgccatacgcagtggagagcaggctcaccgagggcatcttcttcgacgtagctaccaagggcgcgggctttgagaaagcatatggcgatggggtcgagtacatcattggccgcatgctgcagtctctcccatccacttactcggtctccaagcctgtcaaacagcgagtcgggaagctcgagttcgctggcgccgatttcataatcgaccagaatcaaagcagggcgtacatcgagtgcaaggcgaagcgcctggcgttgcgcggccgggttgcagagaagctggaggatttgcgcagtgaaatgcagcacctagccaacgccatccttcagaactatcgaaacattgaccgggaaactagcgaacctgacgcaacgaatgatgcacaatgccgcatattctccattgtgataacgcttgaggactggctgcttttcagcaacgtcgctaccgatatgctggagcgtctcgtcacagaaggacttgaaaagtctgggctgccggccgacctgaagcagcgagtcccctatctggtcttcggagcagagaccttccagcatgctgtcgcagcgatgaccatacatccgatgtcggatgtccttggcggtctgggcgcccctcagtacgaaggatgggtaccctcgacgtatctgcagacgtgcttcccggacgtcaaaacctcgtcgatcggaggctttgacaaggacttcaactctctcgttcactcgcttctgtcagatgccaagatgcgtcgtaacaggactctgtga

SEQ ID NO: 514168 - DNA, 897 bp, Stenotrophomonas maltophilia
atgtcagatcagcccaagccgttcagtcctgtctcggttgccgtcatccagttcgacccacagtgcgggccggagaacgtccccgccaacatcgaacgggcgcgcctgcttgtcacgcaggtagtggaacgtggggcccgcctgatcgtgctgcccgagctatgctgcactggctattcgttcagcagtcgggcggaggcgttcgcgatggctgagtcggtgccggaggggccgacctcgcggctctgggaagccttcgcgcgcgaggcgggcattcacctggccgtgggtattgctgaatacgatggcagccgtctgtacaacaccgccgtgctgttcgggcccggcggctatatcggacgctatcgcaagacccacctgtggtgccgcgaaaagctctacttctgtgccggggatctcggctacccggttttcgagaccagcattggccgcatcggcctgatgatctgctgggatgtctggttccccgaggtgccgcgtctgcttgcgctgcagggggccgacatcatcctcagcctcaactgctgggtgtggacgccgccgccattgttcgatgaaagcgggtgctgcatggcctgctacctgacgatgaccgccgcacacgtcaacaacgtgttcatcgcagcggccaaccgcgtcggtacagatcgcggggaacgcttcctggggtgctcgttgattgtcggtaccaacggatggccgctggccccgatcgcagcgcctgaaggtgaggcaatggtgatggccgaggtggacctgtccacggcacgcagtgcgccgatctggaattccctgaacgatctctgccgcgacaggcgtaccgatctcttcgatcctatgctgggttatcgccagcatcccatgctgccgcgctga

SEQ ID NO: 514169 - DNA, 1191 bp, Stenotrophomonas maltophilia
atggcgcgcatcccgtcacatgcacaagcggcagcctcccgcagccatttcggctcggcactcttcctcgcggcgttcgcggtggtgatcgtcgcgacgctggttgtcgggtggggcgcggcgtctcccggccagctctggccagaccacgcccagatgatgggtagcctcgatacatgggcaggtcgttggcgatggtgggttggcgatgccagtgaagtgaccttctacaagcatgagtttgcctcgctcggcctgatcggcggtgctgcattggcccattgggcgcaccggcgaggaaagcgatggcaggggttcccgatctgctacggcactggccgctggccttgggtcgcggtagcgtcgattggcggactgctgcttgccaacatgatatttgccggcacggtgcgggatgggagctggcagcccacgttcgttgctgccgtctcgctgccggcggcgatggtgctgctgttcggtggcggctggaagattacgggaatcgccgctgcatctggcgcattgctggtcacgccgctggcgttgttgctggtgaatcaggtctgcgcaccgctgggcctgcccgccgtcatcggcaacgttcttgcaatgacactggcaagcgcggccgcctttgtcgccgcgaggcggctgggctggaatccggttcccgctgcgcctggggcagcgccggctgcgcccgtcacgcggcatggctggcaatggggcatgcgcagggtactggcggacttcagtgaagcacccttcctgggcaacgagttcgccagtgccgggctgatcggcggcgtactgcttgccgcccttctgcagccggccggacccttctatggcaccggttggctgatggcattgctgtgcggccaggcgctcgcctccgcggtgggggtctgggtatggcgggagcgctggatccaggggggctggtatcccacgtacatcccgattgtctccgtggttcctgcctgcattctagcccatggcgggagcgcggcggtggtggtgctgtccgcgctgctgggggcactgctgacgccaccgctggccgcggcatgttctgctcgcttgcctgcacacgtgcatccgtatatcggcaatctcctctcgatggcggcaggcgttctgctgatcgtccctgcagtgggctggatactgaagggggccatatga

SEQ ID NO: 514170 - DNA, 993 bp, Stenotrophomonas maltophilia
atgagacggctggcattgggctcactcggcggcaccctcagcatgcgtggtgatgcggcgggcgtgggcatcgttccgaaggtttccgcgcagatgctggcggaggtagtccccgggctgggcaggttggcaatggtgcagacgcatacgcttggtctgtcacccagtgcgtcgctgtcgtgggtcgacgttctcgctgcgcgcgactgggccgacgcgatggtggacgacggcgctgatggcgtggtcatcacccagggcaccgacacgctcgaggagtcagcgtatctgttggatctgctgtggccgcacccgcaaccgatggtgttgactggtgccatgcgtggggctgatgcagccggtgctgatgggcccggaaacgtgctggctgcggcgattgcggcactggatccgcacacgcgcatgcgcggggtggtcgtcgccatgcaggaccgactgtacgcggcggaccaggtgcgcaaggtgcatagtctggatctggatgccttccaatcgccaggtaaaggctgtatcgggcgggtgcaggaagggcaatgcagctatgaaggatcgcctccggaacgactgcctgcactggtgccaacacgggttcatcaacgggtagccatgctcgaggcggtgctgggcgaaggtcctgaggtgctgcattcgttgctggagagtggatgcgaggggctggttgtggcggccatgggcgcgggccatgtcccgtccagttgggttgaacccttggcgcgtgccgcagtgcatcgtcccgtcatcatcgcctcgcgcaccggcgccggcgcgacggcacgccatacctatggctttgctggcagcgaaatccacctgcagcggcgggggctgctgatggcgggatcactgtgcccacgtaagtgtcgcctgttgttgtgggctctgatcggctcggatgcactcggctctctgcagcaacgtctgcaagcctacggcggtggcaacggcagctga

SEQ ID NO: 514171 - DNA, 1014 bp, Stenotrophomonas maltophilia; identical to SEQ ID NO: 5004

SEQ ID NO: 514172 - DNA, 1053 bp, Stenotrophomonas maltophilia
atgctcaagcttcacgatttttgcaacagagccgccaagtccgtttaccaggttgccgaaagtatccatgtcggccgggtggatcgtcgcagacggctcgatccggaggcattccggcgatatgtacaggagcagccggagcctgtcgagtgggtgatggaagcctgcggtacggcgcattactgggggcgggtggcgcaggcgctgggtcatcgggtggtgctgttgcacccgcgctacgtgcggccgtatcggcggcgcaacaagaccgaccgtaacgactgcgatgccatcctcgaagcagcgcgttgtgccgacatgcacccggtgccggtgaaaagccatgagcagcagcaagtgcagcagctgcacaacctgcgcgaggcctggaaaaagacccgggtgcagcacatcaacttgctgcgcggcatcctgcgcgaactgggcgtggcggcgccgagtggcacccaggcctttctacgccaggcctgcgagctgatcgagcgtcccgaagtctgcgccctgcgcggcgcgctgcagatggtgctggccgaaatcagcctgtgcgaacaggcgatgcgcgacagcgaagaacaactggcgcgctggcatgccgacgatgacatcgtgcacaaactcgacgaagtcagcggtatcgggctgctcaccgccagcgccctgaaaaccgccgtcggcaaacccgaacgcttcgccagcggccggcacctgagcgcctggctcggcatgacccctaacgaatacagcagcggcgcacggcgcagactcgggtgcatcagctgtaaaggcaacacctatgtgcgcaccctgctgatccacggcgcccgcgcggcactgctggccgccaagcgctgccagacgcgaacgccggagcgcctgacccagctgcagcgctgggccctgcaaacggccgaacgtatcggccacaacaaagcggcggtggccctggcgaacaaactggtgaggatctgctgggcagtgtggtgccatgaacgccgcttcagcggcgactggcagagtgccaggcccgcctga

SEQ ID NO: 514173 - DNA, 765 bp, Stenotrophomonas maltophilia; identical to SEQ ID NO: 6031

SEQ ID NO: 514174 - DNA, 246 bp, Stenotrophomonas maltophilia; identical to SEQ ID NO: 511152

SEQ ID NO: 514175 - DNA, 705 bp, Stenotrophomonas maltophilia; identical to SEQ ID NO: 511155

SEQ ID NO: 514176 - DNA, 1389 bp, Stenotrophomonas maltophilia; identical to SEQ ID NO: 511156

SEQ ID NO: 514177 - DNA, 588 bp, Stenotrophomonas maltophilia; identical to SEQ ID NO: 330754

SEQ ID NO: 514178 - DNA, 525 bp, Stenotrophomonas maltophilia; identical to SEQ ID NO: 330755

SEQ ID NO: 514179 - DNA, 750 bp, Stenotrophomonas maltophilia
atggccgaaccgcaccacctcgcgcactggtatccgactgccgcctacctctacgtgctgtgcctagacacgctggcgctggcctgggaatacctgcgccgccatcctgactaccagctcgactggctgcgccgtgcgcaccgccccgatgctgcgcatcgctggggcatgcgtctgctggaagacccagccctggatgcgcgtgacgcgcatccggcctggctccccggccatgaggccgtggtgcaactccaccccgatgccgatccgccaccggatgccgagccgttcgcgttttggcgtattcccggccacaagcaactgttgcatgacggcaagggactggcgctgatcgcgcgcagccccggccattgcctgcgctatgcgctggcgcctggcctggaggacggcatggccgtggcccatgcctaccgtggccgtggggccacccacgtgcctgacacgccagcacccatggctcggccccggccgccccctgccgcgttgatggagctgcacaccctgcaggcgctcgatgcgaccctggcgggcgcgtccttgcgcgaggtggctgaagacctgttcggcgcggataccgcggccggttggtacagcgatggcggcttgcgctccaaggtgcgccgcctggtgcggcgcggcgatgcgctgatgcgcggcggctatcgacgcctagcacagcttgcgccgcttgagaagggccgttttgaaggccacgcaaaacgaccctga

SEQ ID NO: 514180 - DNA, 348 bp, Stenotrophomonas maltophilia; identical to SEQ ID NO: 330757

SEQ ID NO: 514181 - DNA, 294 bp, Stenotrophomonas maltophilia; identical to SEQ ID NO: 330758

SEQ ID NO: 514182 - DNA, 669 bp, Stenotrophomonas maltophilia
atggcatttcgagcagacgaagcggcgcaagccgggtacgaagaagtggagaaataccttgtcctgcgcccccgggatgcggacgaatctgaaagagcgcgaagcaagcaagcgctgcaggacatcgtggatgaactcgggccggtggttgacagatacccttcatggcacccactggtgcgcaaccacgatagccgccaccccgtcaccacaccgagtgatcgctgcggctacaaaggcctcgaccacacgcggtacttcgccaatggattcatcacctgtccctatggcgatggtcaggaggtcttggactcggttctagcccttcctcgccaccacgctgcttacatcacagcggagaagctggatgtgcagttctacaacccagaagccaccccgatactggtcaagtgcaactgggaagagcccttaccgatggacaagatgatcccgctgtccatcgcagtgcctttgatcctggagaaagaggttccgtgctggacctggtcccaggtcgcggagacatgggagtcgatgcgctcgtatttcctgggcgccccccatggcgcgcgatcgtcgctgttcgtgagccaggagaccggacaggggatcaagaaggtttgggaaacgctgatctacacggggatgtttggcccgatcaaggtgtga

SEQ ID NO: 514183 - DNA, 2049 bp, Stenotrophomonas maltophilia; identical to SEQ ID NO: 330763

SEQ ID NO: 514184 - DNA, 495 bp, Stenotrophomonas maltophilia
atgacgcgtagagccttttacagctttcactaccagccagacaactggagagctgcccaagtcagaagcatgggtgttatagatggaaacaagcccgcttccgataacgactgggaagatgtgaaggcaggcggagatgatgcaattcaagagtggattgatgagcaattaaaaggaaagacggttgcaatcattcttgttggagagaatacggctgggagaaaatggattaactacgaaataaagaaagcgtggaaggataagaagggggtgcttgggatctacatccacaatctcaaggatagcgacggagatcaagcggaaaagggaagcaatccattttcaaaattcactataaatggtgtctccatggatgaaatcgtaaaaacttacaatccgccatattcctccagtactaatgtgtacagtcacatcaaggaaaaccttgaggactggatcgaaaaagccattgagatcaggggaaattactcgtaa

SEQ ID NO: 514185 - DNA, 1620 bp, Stenotrophomonas maltophilia
atgattccaagacaacctcttgctggggtgcgaattcacctctcaggatctgctccagatgagcggcaagaagaaatatgcttgtttgtgaaggcactagcatcgcgaatatttagcgagggaggttcagtgattcatggcagtcacccgtccttgtctaaaccattagaagatgccgcgagagattttcttcatgcgggaggtgaggtaggagccttaacattggttcgtgctcaaaaatttgccgaaacagatgaacaaattgcagaaatagaaatccaacgccaattcgcagcggtgcaaatagttcccgcagaagctgatggagtaagcaatagtgatttaactccaatgcgagactggatggccgagcgatcggatgcggttgtctgcgttggaggtaagtggtgggacataaataaggccaaagcaggggtccccactgagcttgatgcgatgctagaactcggaaagccaggtttcgttgttgcaggatttgggggagcaattgcgggttatctaaaggacaacccgagcttgccttcaagattgcaaaatggactatctgagaatgcaaaccgagaaattgcgaacgatacgtctatcgaacgtattgtagaaaccattgtcaatcagctaaagcttctgccgctcgtgcggcgcagtgtttcacgggggcgtaattttcgaattcttgctcttgatgggggaggattgcgagggacgtttactgccgccgtcttggctaagtgggatgacatgctcaggagtggtggcggtaacaatctagtatcgcatttcgatttagtggctggcacatcgacaggtgcaatactcgcaatcgggcttgccctcggaatagctccgcgcgatatattgaaattctaccaagagcaaggaccgttaattttcccaaaagataggaagcttcgacattggttgaaatccaagcacgaatcttccacgctccgagatttactgtgcaaagtgtatggtgataggagaataactgatgcctcatgctgcaggctcgttattcctacagtaagagccaaacatggacaagctgaagctattgtcacagcccataccccagatagaacagcatttcgagatatctcagcggtcgatgccgcacttgcatcttcagctgcccctacatattttgacgaatctgtctgggatgggccggttgcgcctgaatcttttcttgatggtggtgtttgggcgaacaatccaattctccccgcactggcagaagctgttcgctatctaaaaatacccttggatcgaatagatgttttaagtgtcggcacaatgggcagtgaaagcgatttcacggagtcccttggaaaagggaaagctggatgggcacccaatagtgccgatctcttctttgctgcccaggagcatggggcactagttttggccgatggttttttaggcccaacacgccatcttcggattaatcaacagactccggtagaaattaaacttgatgatgcagaagcgattgaagatatggccgtgcggggaaatgatgtaggcaaggattcttttgtttccgttcgatctagattcttggatggactgttggctccagaatggcaacggtattaa

SEQ ID NO: 514186 - DNA, 1143 bp, Stenotrophomonas maltophilia; identical to SEQ ID NO: 330766

SEQ ID NO: 514187 - DNA, 483 bp, Stenotrophomonas maltophilia; identical to SEQ ID NO: 330767

SEQ ID NO: 514188 - DNA, 663 bp, Stenotrophomonas maltophilia
atgaagactcacccttttgtcgaggcggtggcctcgctgcagtttgaaaactgttttaacccgtattcagatcgttgcgaagtgcatgaccgtcgcgatgcacctcggcgccgaactgcggcgctttctgccatgctgcgttgcgcgctggaggaaccggtcgatgcaatatggattggccgagaccttggataccgtggggggcgccgcacggggctggccctgactgatgacgttcacatgacccatcatgccaagcgttgggacctcgatttagttgcagaacgacctaccgtaggaagcgcagtggctgagcgaactgctgcagtcatatggaacatgctggagcacattgatgctcgtatcttcctttggaacgtcttcccacttcatccgcacgaatcgggtgatccgtttaccaaccggcagcacaatgctcgtgaaagacgtgcgggcgaagaattgctgcagcaacttattgacctattgcagccatcccgcatcgttgccataggaaatgacgctgccgcagcagctcatcgcatcacggatacggtgcccgttatttgtgtgaggcatccgagttacggtggccaaacacagtttcaggagcaaatttcggaactctatggatacccactacggaatcaatcacttttttga

SEQ ID NO: 514189 - DNA, 627 bp, Stenotrophomonas maltophilia; identical to SEQ ID NO: 330768

SEQ ID NO: 514190 - DNA, 1206 bp, Stenotrophomonas maltophilia
gtggcaaaaatcaagctcaccaagtccgcagtcgatgcggcacaacctcaggcgcaggccgtcgaattccgggacacgctggtgcccggcttcctgtgcaaggttacgccagcaggccgcaaggtgttcatgctccagtatcggacgaacgccggcgaacgccgcaagcccgccttgggcctctatggggaactcaccgtcgaacaagcccgttcccttgcccaggagtggctggccgaggtccgtcggggtggtgaccccggtgcggccaagaccgccgcgcgcaaggccccgaccgtcgctgaactgtgtgtgaagttcatggaggaccactccaagcagcgcaacaagcccagcacgcaggccggctaccaaaagtgcatcacccgtaacatcatcccgatgctgggccgcatgaaggtgcaggacgtgaaacgcccggacgtggccggggcgatgaagaagatggcgcacaagcccgcggacgcgaaccgcacgttcagcgtgatgcgcaagatgttcaacctggccgaagtctggggctaccggccggacggcaccaacccgtgccgccatgtcccgatgtaccccaacggcaaggccacgcacctcatcagcgacgaggagatgggcaagctgttccggtatctcgactatctggaaaccgatgggttggggctggatcatgcgatccttccgctggccatccggttgcaattcgagttcgcgggccgccgctccgagatcgtcaccctgcaatgggattgggtggatttggagaaccggcgcgtggtctggcccgacagcaagaccggcggcatgtccaagcccttaagcgaggaagcctaccgcctgctttccaccgcgccgcaccaggacggttgcccgcacgtgttctcgtccccgaatcatccggggcagcacctgaccacgggcgagtattacagcggctggacgcgcatcctcaagcgcgccggcgtgacccacgtgggcacgcacggcatccgccaccgttcggccaccgacatcgctaactcggggattccggtgaaggtcggcatggcgctgacggcgcacaagaccgtggcaatgttcatgcgttacgtccacaccgaggacaaaccggtacgcgaggcggccgaactggtggcgaaccggcgcaaggcgatcaccggggcgcagcgcccggtagaggtggcagcatga

SEQ ID NO: 514191 - DNA, 324 bp, Stenotrophomonas maltophilia
atgctgccggccggcgccaaccgcgaagaggcccaggccacggtcaagcgcatcgtcgccgccggcctgagcgactactacatcatcagccagggcgaggacatcaacgccgtggcgctgggccagtaccgcaaccgcgaaggcgccgagcggcgcatggctgccgtgcaggctgccggcttccagccgcgcctggtggccagcggcgacgccggccagtggtggctggaggggcagctggcggcgggcacgcagccggcccaggcccagcagcgcagcggcgcggcacagagccggtcgctggaatgcgcaaggttgcgctag

SEQ ID NO: 514192 - DNA, 423 bp, Stenotrophomonas maltophilia
gtgctggcgaagggcatccacagcaaccggcgcaagggctcgcttgacagcttgacgctctggacgaaggaactgcgggcggcagtgaagtggttgcagacctaccggaacgaacggatgaaagcccatgggcgaccgataccgatcaaaccggagcagcggcgccttatcgtcacagagtcgggaacacccctgagcaagtcggctctggacagcgcctggcagcggttgatccgacgtgccatctccgagggaatcatcgacaaagagagccgcttcgcgcttcacagcctgaaacatcgaggcatcaccgacagcggggacaaggcatccggcggccacgtaaccgatgccatgcgtcagctgtacgaccattccatgccggtggtcacagcggccgtgaaaccaaagaagagccgctaa

SEQ ID NO: 514193 - DNA, 135 bp, Stenotrophomonas maltophilia
atggatctgcacgagcggtaccacgcagaaggctgctctgccgaccctgccgccagcttcgccgcactgatcactgacccgccctatgccagcggcgggacgcatgcatacgcgcgcattctgctgtgcctgtag

SEQ ID NO: 514194 - DNA, 1647 bp, Stenotrophomonas maltophilia
atgactgcagagtccatgctcgttcgcctgatttcgtctaaagaaccgcgcgcgatagcgctgatcggaggttggggtcgaggtaaaacccatctgtggcggcacctggtgaagacgacaccgaaccaaccgcgtgccaagtacagctatgtctcgctgtttggagtcaacagtctcgaagatctgaagctggccatcttccaacgcgagatcgacgcaggcccgccgccgaccaaaccgaattggtgggagcggcaaaaatcaaagctgcccgggcgagccgttgttgaatcggtgtcgctcatcgagaacccttggttaaacaacctcaacacgctctacagaacggtcgctttctctcaggtgaagggtcgactcgtctgcctagatgatttcgaaagaaagggaaaagacctcgatctagaggaggtcttgggcctgataacgttcctctgcgaagagcgggaatgcgctgtcgtgctgatcttgaatgacaccacgatggacagcctcgacgattggaacaaataccgcgagaaggttttccatgcggaggtcacctatcggccatcgactgagacgtgtatcaacatcatctttggagccgccactcagaatgcgtggtacaacggtgcgcgccaggttctgatgcagctggacgtaagtaacatgcgcatcatgacccgcgtcaaggacgcaatcgcacccctcgctgagctattctcagaagcatcggacgcgacccagttccagatcggcgcaacgctggcgttgtacgtctactgccacaacgcctcaggggagggagccccgccaatggagcgagctcttacgcacagccgccttgcgtttgcggcgaagggtgatcagcacaccgaggaagagaagcgctgggaggcgattctgagcaaggtcgacttctacccagacgagctggatctcgcagtgacggcctatgtccgggacggctatcctgatgttgcaacgttcattgcccaagtcgcccgaatggaatctgcgcataaagcaaacagcgcagatcaggcattcagttcggcatgggaggcctatcacaactcgtttgacgacaactcagaagagatcgtctccagttttgccaaggccttcccagcagcagcgccgaccatgcacgcaatgaacgcgaattccacaattgcgctgatgagacaactgggacaggaggaactggccaactccttcatcgcggactggattaccccacgtcgcggtgcgcggaggcgggagctttctcttcgcgaggctgagattttcggcccgcttaccgacgcgggattcattcatgcactggatcaagctgaacgagaggaagccaccgaaccggatttgaaagaagcgttagaaaccgttgcgcgcggccaaggttcactcgaccaagcgctacgcacgatctcgcggtcggagcttcaagaggtgattcagtggtttgagcgtaatccgggtagggcgtcaagaacatttatcaccacgagcatgcaattccggggcggcgaacacgtggccgtggcgcaagggcgaatccgtgatgcgcttaaggtgcttgctgaacggtcaccgatcaatgccatacggatttcaggaatactccgcgccatcgacgacttgtaa

SEQ ID NO: 514195 - DNA, 1044 bp, Stenotrophomonas maltophilia
gtggacggaaacagctcaaaacctgacgaaaacacgattgcgcagctttctgcgctggcaattgcactcaaatggctcgatggcgaggggagcgcgagccgcccggggcacctgctcaagacgctggtcacgaccacccaggaggccctgcgcagcggacagccgctgcccgcgatggaatcgggcgccttggccgagatctggcggcaggaggaggcaccccggtcgtccgaggtcgcgccgctgcggagtggcgttgttcggaaatggtggcaggcgcggcagcagcccctgcggcagcggttggaggacgagggcgcagagctggtccccgtgctggaagtcctgtcagggggtggacgtagcatcccgacgcgctatcgcatcggcttccagcagggggaccgggatcctgccgtggaactggacgaggatccgggcggactggaacctcggagcgagatcgtctaccgcattgatcctgcccggccggcgctgtggcttcgcctcatgctcggcagcaagccgttcccggttgcgtcgtggcgcggctggatcctgatgggatctgcggtcctgaacttcctgatcatcgccctcatgtggtgggcgctctacacgcgctgggcaacgccccggccggtgacgaccgacgagttcgccgtgctgagcatcaccgctgttctgtcgtggtgtctttggtgggcgactgggccggtgcgccgactgccggagcagcgggtcaccttggccaccgcccagtacctcgcgttcggcgagctctacgggcagctgaggaccatgccggaaggaaagacgccggaccgccgacgcatcttctcggtcgtgcgccactggggcacatgcccggtttgctcggcagaggtggacctaggggatgggggcagggagtttccggggcgccttgtagggaaatgtcacgatgcgccgacggaacatgtcttcagcttcgatccggtgcggctgacaggacgactcctgcgcccagaactccccacaatggcccagagcttccgacaatga

SEQ ID NO: 514196 - DNA, 1437 bp, Stenotrophomonas maltophilia
atggagagcatgccgttccaccctcagccgcagcccgataccgcctgcgagtctccgaaccgcaatggcctgcgggtcccctttggtctccgtaacggccgggtctgggcgccgcgggaagtcgctccgggccttgcctgcggctgtgtctgcccggcctgccatcagccgctgatcgccaaagccatcaccagcaccaagcgcgtcccccatttcgcccatgcggtcgaggtggcctgcgagaccggggccgagtccggcatccatatgcgggccaagcaggtgatcaccgaccggatgcgcgtcgcgctgccggcctggggcggcaatctgctcgaccggcccaatccgcccaccgggcgcgacaacctgcgccgcccctacgaggggcgccggatcgacatcccgggtagcgacgcccccttgctggaggtccaccaagagttcgtgatggacggcttcatccccgacgtgcatgccttcgacgccgacggcgagttgctgatcgagatccgctacacccatgccgtcgacgaccagaaggaggagcgcgtccgcgccggcgggtaccggatgttcgagatcgacctgtccggcatggaccgggacactccccacgaccccgacgccttcgagcggctggtcctggacgagcccgccaaccgcgcctggatctgcttccctggcgcggaagccgcctgggccgagtccaagcgcctgctggacgagcggattgaagagatcaaccggcagatcgaggaagatgcccggcgcgagcagcgggaggcccggcagcggcttgaggcgctccaggccgaggccaaggacaaggagggccgcagagcgcacatgcggcagaagctcagaacgcggcacctaccggcgctggctgagttgcccgggcgcgtctcacccgaccggatcgccagcttcaccgccgatctggaagcccaagccgccgacaggatcgccgaattgcgtgaggggttgccgtccgcgctggaccggctgtgcatgaagccggacgaggacgactggatctacggcgtcgcccccgcactgtggcgcctctgcctgctccgccactacgtccagcgccgcgagccgggtgaccggatcaacaaccgcgacgtcttccagtggatcaagagcagcttcccgatcgacagggacctctacggcctattcattgcccaatacggcgctcgacgcgaggcccgcgaagccggctaccggaagcgcacgctcgatttctgggccttcaccgaggaggagaacggcttgatcccgaacttctacctgccggtgaaccgcttcatcgaacgcctggcctggcttcacgtgctgaagccagtccccggagagctggggggctacgaagtcgcttcgcccccggaacacgggatgtttcctgacgccgaagtggcccctgactga

SEQ ID NO: 514197 - DNA, 405 bp, Stenotrophomonas maltophilia
atgaacgccgtagagattgagcaagccctctccgacctcgccctccagccctttgatgggaccgagttccccttccagttcctggttgccttcggcaacaaggcggtcaccatcgaccgcctgcgcaagggcaacaccaaccattccgacgtgcccggcggggtgctgcagcgcagccatatccacatcgctgtggccgagcccgggcaagtcgggcagaccctcgccgcgctgaaggccagccccggcaccgccaaggcaaaggccaaattcgtcctggccaccgacggcactaccctggaggccgaggacctggccaccggggacgccatcgccgccgactacccccagttccccgaccacttcggcttcttcctgccgctggccggcatctccaccatctag

SEQ ID NO: 514198 - DNA, 1044 bp, Stenotrophomonas maltophilia
gtgcgcgccaccgggcgccggaacaagctgtacgtcgaactgctaaacgaaaaccccgagtgggcaacggccgcgcgtcggccggacatgaaccactttatggcccgcctgatcttctgcttctttgccgaagacaccgacatcttccccggcgccacgatgttcacggccaccgtggaccagatgagcgagcgtgacggggccaacgtccacgaggtgctgggcacgatcttccgtgccatgaacaccaagacggaagaccgagtggctgctggcatcccgcgctgggccattgaattcccctacgtcaacggcgggctgttctccggtagcactgacgtgcccaagttcacccgcactgcgcggtcttacctgtatcaggcgggacagctggactggaaggagatcaatccggacatcttcgggtcaatgatccaggctgttgccgacgatgaggagcgcggcgccctgggcatgcactacaccagcgtgcccaacatcttgaaagtgctcaaccccctgttcctggacgacctgcgggcgcaactggaagcggcgggcgacaacaagatcaagctgctgaaccttcgcaagcgcatggcccgcattcgcgtgttcgatccggcgtgcggcagcggcaacttcctggtcatcgcgtacaagcagatgcgcgagatcgaagcccagatcaaccgacgccgcggcgaagccaacttggcttcggaaattccgatcaacaactttcgagggatcgagctgcgtgacttcccggccgagattgcgcggcgggcgctgatcatcgccgagtaccagtgcgacgtgctgtaccgcgggcagaaggaggcgctgaaggaagtgctgccgctggatagtcagaactggatcgtctgcgggaacgcgctgcggctggactggctggcgatctgcccgccgacgggctcgggcgtaaatctccgcgctccttcaaagaacctgattagccccgaccctcagccgcgagtcgcaggatttgcgccgcctgcggcacagcatggtgccacctga

SEQ ID NO: 514199 - DNA, 963 bp, Stenotrophomonas maltophilia
atgggcatcaaccgcgtgcagttccaacccggcctttcgatgagcgagttcatccaccgctacggcaccgaagcaaagtgttaccgggccttgtacaagtggcgctggcctgaaggtttccgctgtccggcctgtgccggacgcgcgcgttcgcgcttcaggcgcggcgatgcgatctactaccagtgccgcgcttgccggcatcagacgaccttgacggcgggcaccctgttcgaaggcaccaaactgccgctgcgcacctggatgctggcgatgcacctgctgacctcgaccaagaccaacttggctgcgctggaactgatgcgccatctgggcgtgaactacaagaccgcctggcgcctgaagcacaaggtcatgcaggccatgaccgagcgggaggattccagaaaactccagggtttcgtgcagcttgacgacgcctatctgggcggcgagcgcaacggcggcaagcccgggcgcgggtcggagaacaagcaggcgttcgtgatcgcagtgcagacggacgaacacctcgaacgcccgaccttcgcagtgatcgagccggtccgcagcttcgacaacgcctcactcaacgactggatcacgcgccgcctggcacctgagtgcgaggtctacagtgacggcttggcttgcttccgccggctcgaagacgccggccacgcccacacaacgctcgacaccggcggcggccgcgccgccaccgaagtggctggagcgcgatgggtcaacgtcgtcctgggcaacctcaagcgggcgatcggtggcacctaccatgccgtcaaacaagccaagtatgcgcggcgctacctggccgaagcggcgtaccgtttcaaccgccggttccgcctgcgcgagacgctgccgcgacttgcgaccgcgatgatgcggtgcaaaccatgtccggagccgcgtctgcggattgcgagcaactttcatggctga

SEQ ID NO: 514200 - DNA, 345 bp, Stenotrophomonas maltophilia
atgggatttcgttttcaacggcgtatcaggcttggtggtggttgggggctcaatgccagtggttccggcgcatcgctgagtcatcgctcacggcatggttcggtgggtacgcgtggtttcagccttcgtacgggtattccggggctgagttttcgccagagctggggtaagaacaccggcgtcatggcactgcttgtactgtgttttgtagtgcttgcggcgatggtaaaagtgctgctctatctgctgccgctgctatggcagtgcctggcgtgggtggtgcttacggtctatgacctgtgccgatacggcatccagcgggtggttgccttgcgcacgcgttga

SEQ ID NO: 514201 - DNA, 1500 bp, Stenotrophomonas maltophilia
atggcaagcattgtttctctcaaaacccatgatggtcgcgacatctcctacgtcgatgaggtgaagggacagggaggcatgaaggatgtctacttctctccaaaccgtgactacgtggttgccttcttccgcgacaagcaggacccgggcgccaaggaacggctgatcctcattgcagataaattccgcgaacgcatctacagtcaggaaggcggcgcttactggaaggacctgttctgctggcccacggccgtggtcgagcatcagggccgactgggcgttgtcgcgccgttctacaacccgaacttcttcttcgccgtaggcagccgcaacggtgacagcctgggcatcaagggccgggagaaagaaggcaagtggttcgcaagcgcgaagaaccgcaacaccttcatcgacccgaaggaactgggcgactggagcagccacctcaagatcggcttgatgatcgcccgcgcagtacgtcgcctgcacgccgccggcttggcccactccgatctttcgtacaagaacgtgctggtcgatccctcacgtggcgccgcctgcgtgatcgacattgacggtctggtagtacccggcaagatcccaccactggtggctggcacgccggacttcatcgacccgctggtgatgatgacccagcgcctgccgctgggcgacccgcagcgcgtattgcccagcatccgtaccgatcagcacgccttgtcggtgctgatctacatgtacctgctgtaccgccatccattgcgcggacccaaagtgcatgacgtcggcgacccgcagcgtgatgaagagctgtccatgggcgagaaagcgctgtggatcgaaaaccccaccgatgtatcgaaccgcattcgtccggccgacttgaaaacctcccagctaccgtggggcgatccagccaagatttcctacaaggtcaccgggccttacctggccccgctgttcgagcgcgctttcaccaacgggctgcatgattccaatcaacggccaattgccgatgaatgggagttcgccctggtcaagaccgtcgacctgttgcagccctgcaccaacaccagctgcgagcagaagtggtatgtcttcgacaacagcaactcgccgcgctgcccattctgcggcacgccgtacaagggcagcctgccggtgctgaatctgtactcctcgcacaaggagggtaacttccggccggagaaccaccgcctgatggtctacagcaaccaatcgctgttctcctggcacatgttcaagaacgtgttcccgaacgagaaactggcggagaacctgcgccgccgactgggctacttcgtgcttcaccaaggcaagtggtggctgaagaacgaggccatgccgcagctatgggacgccagcaacaaaacccagatcccactaggcgggcagatcgagctcaccgatggcctgcaactgttgaacaaggaagaaggcggccgcctgatcgttgtgcagatggcacacggcgcctga

SEQ ID NO: 514202 - DNA, 1764 bp, Stenotrophomonas maltophilia
atgacattcaaggatcccggcaacaatggccgacagctgctacagatggcagcggtgctggcagctactgccgaagcgaagaactacgatggcgaaatcctgcaggccttcatcggctcgtccgacgaactgaagctggcggaagactttctgcaatcggtgcaggaacgctggcgctcccatctcgataccacagaaccggaacaggcacggtctgtcgacgcaaccgccaccgcaccagcaacggcagccgccaccgatgtagccgcggcggttgtctgcgatgtacagacagacgaatcggcgcaggcagccacccagacgcttgcaccgtgcgagccaataccagcagccgacaccatcactgcggctgcagttgcggctgaagccgacgctacccctaacgttgctgctttgactgcgggcacagcacctgtcgcaagtgctgcggttacggctgcggtcgctgcacctgcattggccatcgctactcccgctatcgcagctgtcaccgcccccgtcaccaccgcggcggttgcagcagtggcgcctccacccaaggtctatccggatatgaagatccagctcgccaatgccaaggccggccagccgtatgaaggcgcgtttgtcatcgcggccgccgcacagatcaccatcatcggcgtgcaggcccctgaaggtatcggcctgttccacgccccgggcagcaccagcattcaaggcacgccggcgatggctggtgatttcgagctgcaggtaaagtatcacttcagcgatgaagccgaggacgcaccggtgcgcattgccaaggtcaacctgaccgtgaccccggacccgcgctcactgtggcagaacctgccttcggacaagggcgttccgttctggaagccggatcatgatgcccagctgatggccgacgagaagatcgtcgcggccagccaacgcggacgctcgcacgcacacaaagccacctgccgcgacgatgatttcttcatcgacacctgcaacggctggcagattgcaatcgtcgccgatggtgccggcagtgcacgttactcgcgcgaaggcgcgcgccgcgcagcccaggccgccggcaacttcatcatcaacgcactggccaatgacgccgcgctgctgctcgccgctgatgacatcatcgccgccccctcggccgaggagcgcaacaaaaagcaggatgcgctcaagtcagcgttctacaccgtggtcggccacgccgcccatgacgcactgaagactctgagcgtactggccagtgaaggcggccccgacggactcccggtcagcctggctgatctgaacaccaccctgctcattgccgtgcgcaaacaacacgccggcaagcacatcatcggcagctacagcatcggcgacggcgccatcggcatcctcgccggcggtgatgtgcacctgggcggcaagcccgatggcggtgaattctccggcggcacgcgcttcctggccgctgcctatgtacagcaggaccaactctgggagcgcacccgtgcattcgtgctcgatgaagcgcaatccatcgtgctgctcaccgatggcgtgtccgatccgaagttcaagagcgacaatgcgctcgaagagcgctcggcctgggatgccttgatggacgaagtaatcgcccataccggcttcccgtcggtagaagatgacctggccgtgaagctcctcgactggctcaacttctgggtgcccggcgaacacgacgaccgtaccatcgcaatcatctggtga

SEQ ID NO: 514203 - DNA, 1050 bp, Stenotrophomonas maltophilia
atgcgtcgccttcccgttttcatcgttctcgatctttccgaatccatgatcggcgaggatcaccgccgtctgcaggaagggattgccaacctttccgccatgctcaagaccgatccccaggcattggagacggtctatatcagcctgattggctttgccggccaggcacggacactgacgccactggtggaagtggcctcgttctatccaccgcgcctaccggtcggctcgggtaccaacctgggccgggcgatgacccacctgatggacgagatcgaactgcaggtgcgcaagagcacaccggaccagaagggcgactggaagccgattatctacctgatgaccgacggcaaacccaccgacgccatcgatgcggcagtggagcgctggaacaagcactacgcccagcgctcgtcactggtcgctgtaggcattggccagtacgctagcctgagcgcattgcgcagattcaccgacaatgtgctgaacttcgccaacggtggtgaccagcagttccacaagttcattacctgggtcagccagtcggtatcggtacagagcagaagcgtaggcatggccggcgacagcggcgtgaacctggccaagttcgacgagagcttcctgaagaaaatcgagcaggcggcttcgcagattacccaggatgaagatttcgccatcatccgcgccacctgttccaagaagaaactgccgtacctgatgaagtatgagaagtcgcctgcacagatccgtaccgagtacatgtcattggacgtggtgccatacctgcttaccggcgtgtacccggtcgagaaggactacaacgactggtccgagagcaattccatcgaaggcagcatcaacagcgatcagttgttgggctcaccgggctgcccgcattgcggcaacccgattggttttgcgatgtgcagctgcggtgcggtgatctgcctggcaggtggcggtgcggcgctctgtccggtgtgcaacaagcagggcaacttcggccagggcgaaggtgatggattcgacgtaaccagagcacgaggctga

SEQ ID NO: 514204 - DNA, 645 bp, Stenotrophomonas maltophilia
atgtcagatcgtcgtttgatcatctacttcctcgctgacacctccgggtcgatgcgcggggagcccattgagtcggtcaacatcgggctgcgctcgatgatgtccgcgttgcgccagaacccgtatgcactggagacggtgcacctgtccatcgtcaccttcaactcggaggtggccgagattctgccgatcacgccgattgaaaccgccgcgataccggacatcgtctgtccgcagtcgggcgcaacgatgctcggcgaaggcctggagttcatcgtcgccaaggtacaacgcgaggtccgtcgctccagcgccgacaacaagggcgactggcgcccgctgctgtttgtgctgaccgatggcaagcccaccgatgtgctggcattcaaggaagtcgtgccgaagatcaaggcctgtggctttggcactatcatcgcctgtgccgccggccccaaggccgatgccgaggcgctgaagactttcgccgatcgggtggtcagccttgacaccatggatgcgaactcgttctccagcttcttccagtgggtatcgacggcagtcaccgccggcagcagcagcgtcggcgcggccagcaccggcgtggaactgccgccaccgccgcccgaagtccaggtcgtgttctaa

SEQ ID NO: 514205 - DNA, 642 bp, Stenotrophomonas maltophilia
atgcgtcgtcttccagtcttcatcttggccgatgtctccggctcgatgctcggtgagcccatcgaagccgtgcgcaccggcgtgcagaccatgctctcctcactgcgccaggatccctatgcgctggaaacggcatacatcagcatcataactttctccgataccgcccagaacgtggtcccgctgaccgagctggtctcgatccaggcaccggatttcaaggccggcggcaccaccgcgctgggcgcggcactgaaggagctcgcccgctccatcgagcgcgacgtccgcaagagttcaccggaacagaagggtgactggaagccgctggtgttcctgctgaccgacggtgcgcctaccgacaacctgcaggaaggcatcaacgaaatccgcaacgcgaagatcggcacgttcgttgcctgcgcggccggcccgaatgccgataccaccgaactgtccaagatcaccgaatcggtggtacgcctggatacgctggattcgaactcggtcaagagcttcttcaagtgggttagctcgtcggtctccacctccagccagaagatcgaatccggcggcgtggacctgaccaagggcttgaacgagctgccgccaccgccgccggaagtacaggttgtgatctga

SEQ ID NO: 514206 - DNA, 1026 bp, Stenotrophomonas maltophilia
atgcgacacttcgggctttccattcttattacgatcgtgtgtctcgtgttggcgtacttgtggggtgggccaagggcagtagtcattaccgccatcctcggtgtgctggaattgtcgctatcattcgataacgccgtagtcaatgccgccgtgctgcgcggctgggataaattctggaaaaccatattccttacgatcggtatcctggtcgcggttttcggcatgcgtctgttgttcccgctgctgatcgtctcgcttgccgccgacatgtccttgatggatgcctggaatctggggctgaaggacccggaggaatactccaagcacctcactgagcatcatgccgaggttgcggcgttcggtggtgtgttcctgctgctggtattcctcaacttcctgatcgacgaggaaaaggacctgcattggctgggttggatggaaaagaagatcgccgcgctgcataagctcgacacggtctctatcttcattgcgatggtagtgctggtgctgtcggttgaatttctggtgccagaggcgcgtcagttcgctgtattgttctcgggtgtctgtggcatcctggtctacatgggtgtcaacgtgatcagtggcctgctggagtttggggagggcggcgatgcgatcatgaagggaggtatcggcggcttcctgtacctggaagtgctggatgcgtcgttctctttcgacggtgtcattggcgcgtttgcgatcaccaacgacatcgtgatcatcatgctgggcctagcaatcggtgcaatgttcgtgcgctccatgaccatctatctggtcgacaaggggacgctggaccagtacgtgttccttgagcacggcgcgcattatgccatcggcatcctcgctgtgatcatgtttgtcggaatgaagtaccacgtacctgagttgatcaccgcgctgttgggtgttgctttcatcgtggtctcgatctggtcttccattcgctaccggaggaagagccagccagaggcgctgaccaacgccggcgaagcctga

SEQ ID NO: 514207 - DNA, 579 bp, Stenotrophomonas maltophilia
atgggcgtcagcctcgttaaaggtggcaacatcagtctgtccaagaccgaacccagtctcagtcaaattctgatcggactgggctgggacgccaggtcctcggccggaagtgatttcgatctggatgccagcctcttcatcgtggatgaaagtggcaaggtaccttccgatgcgcacttcattttctacaaccaacttctttccccgtgtggctccgtggagcacactggtgacaatcgtaccggtgacggagatggcgacgatgaggcgctgaaagtgttgctccatcaggtgccggctgcggttaagcggctggtagttgctgtaaccatccatgacgcgcatgcgcgtcagcagaatttcggtcaggtgtcgggtgctttcatgcgcatcgtcaacttggaaaacgatgcggagatagcccgtttcgacctgtccgaggattattccaccgaaactgcgatggtgttcggtgaggtatatcgccacaaccaggaatggaaattcaaagcagtcgggcagggctacgaaggtggtctggccgctttgtgcgcgcagcacggcgtggaagtcaattga

SEQ ID NO: 514208 - DNA, 576 bp, Stenotrophomonas maltophilia
atggctatttcgttgcagaagggcggtaacgtaaatctgtcgaaggaagcaccttcgatgaagaatattctagtcggcttgggttggaacgcccgtgcgaccgatggtgctggcttcgatctcgatgccagcgccttcctgctgcaggaaagcggaaaggtgggttccgatgcgggcttcatcttctacaaccagaaggcttcgccgtgcggcggtgtcgtgcaccagggtgacaacaccaccggtgaaggcgacggcgatgacgaggtggtcaagatagatctgtccaagctggccggtgacgttcagaaggttgccttctcggtgacgattcacgacgccgaatcgcgtcgccagaacttcggccaggtgtcagatgcctatatccgcttggttgatgaagccaacggccaggaagtggcgcgctacgacctgtcggaagacgcatcggtagaaaccgcaatcatctttggtgagctttatcgccacaatggcgagtggaagttcaaggctgttggccagggcttccagggtggtctgggtccgatggcccgcaactacggtgtcaacgcctaa

SEQ ID NO: 514209 - DNA, 246 bp, Stenotrophomonas maltophilia
gtggtttcgggctttggtagcgtctattcgatagatgccgagcctggcaaggacatcatcatcgacaacgcacatgtcgttgcctgggacagtaacctcaactacagcatctccgctaccagtctgcgtagcgggctgctgtcagggttggtttcttcggtgaccagcggtgagggcttggtactgaaattcaacgggcagggcaaggttgtgctctgttcgtgtaattgtgacaggtatgtttag

SEQ ID NO: 514210 - DNA, 585 bp, Stenotrophomonas maltophilia
gtgtctattagtctttcgaaaggccagaaaatcacccttgaaaagcagggtggcggtgcgttgacacaggtgttcatgggcctgggctgggatgttgccaagagcggcttcctgggtagcctgttcggcggcggtggtggaattgacctggatgcttcctgcgtgatgttcgacgcgaacaagcaggtagtggataccgtctggttcagacagctgaacagtgtggacggctcggtgcgtcactcgggcgacaaccgcaccggtgatggcgacggtgatgacgaagtcatccatgtggacctgagccgggttccggcgcacgtagagagcctggtgttcaccgtcaacagcttcaccggccagaccttcgaccgtgtcgccaacgcggtgtgccgtctggtcgacaagggcaacaacaaggaagtcgcgcagctgaacctgagcggcgtacgtggcaaccacaccgccgtcatcatgtccaaggtctatcgccacaatggtgagtggaagctccacgcgattggcgaaaatgcttccggccaaaccttcaggcatctgttgccgcggattcttccgcatctgtaa

SEQ ID NO: 514211 - DNA, 1047 bp, Stenotrophomonas maltophilia
atgcagcagaccacactttggttcaatcgaaccttcagccatgttcgtccagcgatcgagctgatccacgcggctgatacggagcaacgctttcgcactatatgcagccacgacaatccgaactttccgggcttctcggcggcgtcgtacagcgagcttgaaccggccggtctggacagcgaagcctatgtcgactattgcctggatttctgcctgcgcaaccaggtagacattttctatccgggccgcagtgctggttcgattgccctacgccgtgccgagtttgccgcgctcaatacgcgcctgatcctggttgccgacgatgccgcgctgacagcgctggaggaaaaggcccagttttacctggaccaagccagcgcagaagtacccggccctgaaaccatcatggtgcagagctacgcagagtatcaacaggcccatgcgaccctacgcagcaagcatgcagcactgtgcatcaaaccatcggtaggtgtgtacggaatcggtttccgtattatcgacgagcgccgcaaggccttggatcacatcctgaagggtatagatttccacgtcgccagcgctgatcttgaccgtgagctgtccagaatgcaaagcttccgaccgcttctggtcatggagtacctcagtggccacgagtacagcgtcgactgtctggccagtgatggcaagctattggtggcagtggcgcgacgtaaggagcatggtgctggcgcgggtcagaccatcgtcgacgatccgttgatcgtgcgcgcatgccagcgcttggcggtcgagtacgggctcaacgcaatcttcaatgtgcagttcaaggaggactgcgaaggccgtctgcgcgtgctggagatcaacgcgcgaatgtccggtggctcggcgatggcctgtctggccggcccgaatctgccgcatcttgctgtgctggacgcgctgggcgagctggatcaacagcgcattccggcagtgaagcatggtctgcgggttggcgagtatcgccaggcggtggtgctgccggaggcgcagtccgcatga

SEQ ID NO: 514212 - DNA, 1212 bp, Stenotrophomonas maltophilia
atgagcaatgtcgccatggagggcgctgtcggagccggcgcacatctgcagatggaactgccgaccgggcatatttcaatccagcttgatgcgggctcacggcgtacggatatcaccgattacattggttttgccgcgcgtgacaatgccaagcgcggctacctgttcgtcagcaaggtgttgggcaagcactatccggtggcgccatcgcgcatgcgcgcggtgcatgacgaactggccggcttgctggacgtggccgacaccgaatcagtggtgttcgtcggtatggccgaaaccgcgaccggtcttggccatggcgtgttcgaggcattcaaacgtaatcagccagacgttgctgccttgtatgtgcattccacgcgttactggatggacgagaagacactgacgttcgaggaaggtcacagccatgcgccaaacctttgcctgcatctgccgcaggaccctgccagcatgcaacagctgcgcggctgcagcgtgctggtgttggtggatgatgagctgagcactggcaatacgttcgtcaatctcgcgcaggagtaccgcagtcactttccgcagatcgaacgtatccatgtgctgacgctctgcgatttctccggtggccgtgcacgcgacgtcatccagcagggcgctgcgctggcgcaggtcgacgtatcggcactgtttcggggcagccatagcttccgcgcctctggcgctgcgctggcttcgccacaggcgagcgcgcagcccaggtgcttccgctatccgcaactgaccggcaacttcgggcgcaggccggtgtcggcggcactggtgattgcggatgtgcagggcgaacggatcgtgcgcgaggccctccaaggcaagcaatcggtgcggatggtcggtaccggtgagttcatgcacgccgcattcgtgctgggcggttggctggagcagcgcgggttcgacgtgcgggtgcagtcgacgacgcgctcgccgatcatgccaggccatggtgatatccacagtgtggtgccgctggccgaccattatcaggaaggcgtgcccaatttcttctacaacgatggcttgtttcgcaacgaccagaccctggtgtgctgcgagggcgtggccaacgcatcgacgcaggcattggccgcggcattgaacgcgcgcatcgtcgagttcaggtgtgagggaggctgtgttgaactttctgttctgtga

SEQ ID NO: 514213 - DNA, 672 bp, Stenotrophomonas maltophilia
atggcgcacgggccgcaaggtgatgccaatggcttcatgacccagcgccagcatgatgcgttcgtcagtctgggtgggttcgctaccctgattccggtgaccgcgcgcgatggcgacgcctatcgccgggtaagcctgcctgcggtgccctatgcggtgatcaaccatggcggggtgattctggatgcgtgcctgcagcccttgccggaatggcatgcccgggtgaccgccgaggcggacgcggcgcggggttggctggaggagctgcatgcgcgcgcactgcacatgatccaggcatcggcgctgagcgccaccagtcgcatcatcggtgactacggtctgccgttttattggcttgccaagtaccgcgacgaacacgtcggccatcttgatcacatgcaggacgccttggttgcacccttcgtcgcacagatgggtggggaggtctgggtgcaccgcaacggcaacaacctggcggttctgccgcggaccctgcagaagtcacatgccgtgcgcttcctgatcgaacacctgcgtgggcagcatacgcatgcggtgacctggggcatgggtgacagcgagtcggatattccattccttctggagtgcgactaccagatatccccgcgccgcagccagatcgcggcgattctcgaggagcgactgccgtga

SEQ ID NO: 514214 - DNA, 1092 bp, Stenotrophomonas maltophilia
gtgagtttccacggcagctaccgtgccgaagatgtcgagttcctgctgacgccgatccagctgacgcagctgcacgacgttgcagacaaggaacagctgatccagagcggcgcgcgccactacagcgagatgctgactccggagcaacttccctctgcccagtacatgcagctgtttgacgacgcgctgcagcgcaatggtcagcgcatggccaacgactgcttgcagctctgcacggatctggcggccagcgtgcgtggtgagatcgtgattgtttctttggcgcgcgcgggcacgccggtgggtgccattctcaagcacctgctgcagcgcagactgcaacgcgattgcagccactattcggtttccatcatccgcgatcgcggcatcgacgcggttgcgttggaccatgtgcgtgcccgccatgcggatgcctccatcgttttcgtcgacggctggaccggcaagggtgtcatcagtcgcgaactgcgcgtagccatcgccgactacaaccagacccgtggtgcggcgttggccgacggcctgtatgtgcttgccgacctgtgcggggtcgctcatcacgctgcctcgtacgaggactatctgattccttcggcgatactcaattcaacggtttcaggtttggtcagccgttcgatcctgaacgaccagatcgggccggagcagttccacggctgcgtctacttcgatcagtttcgcagcaatgatctatccgtggcgttcgtcgaaagaatcgttgacctggccatgcaggcgccgatgcctgccccgttgctgagcggccaggctgtggataaacagcgctgcgcggcggtgtcggtcaactacatgcagcaggtgtgcagccagtacggaattgcgaacctcaaccttgtgaagccgggcatcgccgaggcaacccgggtattgctgcggcgcttgccggacaggttgatactgcgtgacgaatcgctggccgatgttgcccatctcaagcgcctggcgctggaaaagggagtagctgtgcaatgtgatccggacctgccatacaacgcggtgtccttgatcaggagtgtggccaatggacattga

SEQ ID NO: 514215 - DNA, 888 bp, Stenotrophomonas maltophilia
atggacattgacctgcactttggcgcatcgctgtatgtacctggtacccatccggacctggcggccatcgctgcaggggccaagcttgagggcgtgcgcaacctgatcttctgcatggaagatgcggttgccgaccacgagctggatgcggcgtacgcgaacctggcacaggcattgtcgggcatgcagcggcggcccgggcttgcgcgttatctgcgcccgcgcgattcccaatccttgtcgcgggtactggcgttgccgggtatcgcggctattgacgggtttgtgttgccgaaatttggcgctgccaatctatctgcgtttctgggtccattgctgggcacgacgtattcgatcatgcccaccctggaaaccgcagatgcatttgacgaacggctgatgcgtgagttgtgtgcctgcctgctggcgcatccgcaactgccgcggattgtcgcgttgcggatcggtggcaatgatctgctgtcattgctgggcatgcggcggccgcgcgggatgaccatctatgacacgccggtcggcgatgttatttcttcgctggtacgtgtattcaagccagcaggtttccagctcacatccccggtattcgaatacttcgaagacgaacacacgctggcgcgtgagttgcagcgggacctggcgtacgggttgtgcgggaagaccgccatccatccctgccaggtggagatgatcgagcgcttctttcaggtgtccgacgaagatgtggcgctggccacgctgatggtggacggcagcagcgccggcatcttcaagatgcacggcgccatgtgcgaaccggcgacgcaccgtcgctgggcgcaggaagtgctggcgcgctcgcgtcagctgcagggaaagctggggagctga

SEQ ID NO: 514216 - DNA, 1236 bp, Stenotrophomonas maltophilia
atgacgtcattgatggcgggcgggaactgcgtgcttcccggcgaagattttgaagtgcgtgtgcgctgggtcagcgcaaaggcgagcctcagcgaagtagatgtatcagcattcgtgctgggcaacaccggtaaggtagccagtgacagcgacatggttttctacggacagacaaccgacagcagcggtgctgtccacctcaaggaaaccaaccgcgccggcagcgcaggtgcgcgcgaggcactgcttgatatcgatctgcgcaaactgcgcggcgaatcggagaaagtcgccatcaccagcaccttgatggacgcccaggccaagggcgtatcgttcaaggatctgcaatcgctggtcatctccatttaccacggcggctcagagcagatcagcttcgatgtcccggttgcgggcaagtccgaggctgcgctgatcgttggcgagttctacaagcgcaatggccagtggaagttccgtgccgtaggccagggcttcaacggcggtttgaagcccctggctgaaggctttggcgtgagcatcgaggccgagccgaagtcaccgccaccaccgccggcacctgcaccaagcccggcgaccccaccgccgccgccaaccgcgccggtcaacctgtccaagatcactctgaccaaggcacagccgaaaatcagcctggccaagcagggcggcgcattcggtgagatcaagatcaatctgaactggaacaagcgcactgccagcaagggcctgctcgccggcatttttggcggcggtggtggcatcgacctcgatctgcgctgcctgtttgaactcaaggatggcagcaagggcgcggtgcaggcacttggccgggtgttcggcgacttcgaccgtgcgcctttcatccgcctgatgggcgacgaccgcaccggcgccaacaatgatggcgaatggatgcgcatcaacggtgcgcgctgggacgacatcaagcgcatcatcgtcttcacctcgatctatgaaggcgtcaccaactggggggaaaccgacggcgtggtgacggtattcgttcccggcaatgccccgatcgaggtcaagctcgatgagggcgcatctaacagcaggaactgcgcgatcgtgctgctggagaacatcggcggcgagatcagcgtcaagcgcgaggtccagtacttcgcctccgaaccggatatcgatcagcgctttggctggggcctgcgctggtcggcaggcagcaagtaa

SEQ ID NO: 514217 - DNA, 744 bp, Stenotrophomonas maltophilia
atggaagagacgctgtacgagatgccggtgatgcgccgctttgcccgcctgggcgggctggacgacatcccggacgaaaccacgatcctcaacttccgccggctgctggagacgcatgatctggcgccgcagctcctggagcgcgtgaacgcacacctggcgcgcaagggccagagcctgaaggcgggcacgatcgtcgatgcgacgatcattgcggcaccgagctctaccaagaacagggacggcaagcgcgacccggagatgcaccagacgaagaagggcaaccagtggcacttcgggatgaaggcgcacattggcgtggacgaggaatcgggcctggtgcatcacgtggagtgcacagcggcgaacgtgaatgacgtgacgcaggtgcacaagctgctgcacggcaaggaagatacgatctgcggcgacagcggctacacgggcgcggacaagcgcgaggagctgcaagacgtggaggctgcgttctggatcgcggagaagccctcgaagttgcgagcgctgaagaacaagcgcgagcgcaagtacgccgagcgctgggagcacttcaaggccagcctgcgggcgaaggtggagcacccgttccgggtggtgaagcgccagttcggctacaccaaggtgcgctaccgcggcttggcgaagaacacggcgcaggtattgacgctgttcgcgctgtcgaacctgtggatggtgcggcgacgtctgttgctgccgacggggtaa

SEQ ID NO: 514218 - DNA, 138 bp, Stenotrophomonas maltophilia
atgacgacgatgcagctgagctttggggacgcggaacacacgggcaatcggaagaagacgcgacgcgagatcttcctggcggagatggggcaggtggtgccgtggaacgtattgctggcgctgatcgcaccgcactaa

SEQ ID NO: 514219 - DNA, 312 bp, Stenotrophomonas maltophilia
atgactggctcacgcaagaagggtcgactgactccccagcaacggcaggaagttcgcgacaggttgcgctccgtggacaacgagggcccggaagggtccatcgcacggatccgtagagtcgtctcgcatcccccgacaggcggcaatccccggcgatatcgcttcggactggccatggtgttgcttgccgtcttccagatgctgatggtcgtagtgctgcctgatgatgatcgccgttggacgttcttcgggttcgcgtggctgactttgttcgttggggcgtggcaaatcgacaaggccgggaaaagttaa

SEQ ID NO: 514220 - DNA, 411 bp, Stenotrophomonas maltophilia
atgatagtaaaaagtaaagaaacccgactttacggcaagaaactaaggtcagagcgcctgcgcttggggctgacccaagccgctcttgccgaatcagggggcgtcagcaaggcgacccaagtggcgtacgaagcggatgcgacccggcccgatatcagctatctgtcgaggatcgccgaggtgggtgtcgacatcctgtggctggcgacggatcggcgcgccgcacgtgacgtcgactgggacctgatggacgagattctggagttgatcgaagagtgggcgtcagagcgggataagcccacaacacgctcggaccggaagaacctgttggccgcgctatatgcgcagttcaaccatcagggaagcgttgatcccgcagctgctgcgacgatattcaggctcgccaaatga

SEQ ID NO: 514221 - DNA, 279 bp, Stenotrophomonas maltophilia
atggccgatcgcccacaggtactcaacaacctccgccatgctttcgagcacgccggcatctccgtatctgaatgggctgattcacacggatttcgccgcgagaacgtctatgccgtgctttcaggccgaacgagggggcggcgcggcgaggcgcacaggatcgcgctcgcattgggactgaagccggaggcgcactccaaggctgcagagacgctgcacatgcaactgaagagacttcgggccatcccgccctgcctggaggatccccctatgagctag

SEQ ID NO: 514222 - DNA, 1785 bp, Stenotrophomonas maltophilia
atgatgtcactggcatcgctggcaaaatcgctcggactggtggatctgtcgcctctgcttgtactgcttgcaaaacgacagatctttaccgagctctctcgcttctcgttgacccaacccgacgcttgcttcatcactgctgatccatccttgttgcatgaagccgtactccatgagtgggagcaaatggctcgcgatcctgcgggcgacctggagggacatgcatgccgcaaaggcttgcccttggcccggcacctgaaacttggtttagccaaccttgaagcgcttggcaatggagccaggggccgaagtgcgaggcgttggcggcaaagagtgctggaaggtgaagccatcggtctgtcgccagtcgtggccgtcacgcccaagtaccacttgtctgggaatcggaatccaaagcgcccagaaatcgtgctcgcattcgccgaggacgtgatccgaacacattggccttccgataatcgcccaacgcccagcgccctttaccgcctgtacaagaccgctgccgaggatttccacccgcattacaagcatatttccaaacccgcattctgcagaatcctgaacttagtcagagatgcattagcgctgggtcgtggtggaaagcgcgccgcgaacgccgcccaggaagcgaccgatgtccacgaacgtgcactgctccccagcaggcccttcgaactggctacttgcgaccactatctcaccgatttgtactgtgaagttctagatgcaaatggcatgacctatgccatgcagccatggctgaccgttctacgtgactgttacacgaagtcgattctcgcgttctggatcacgctgaagccgccgagccgtcgcaactgcgcgctgatcatccgacagtgcttgcgactgcatggtcgactgcctgaaacgatcatcgtggatcacggcgccgagttcgaatccgtctatttttcgagtcttctcgcccactgccgcgtcaatctgatgttccgtccatcggggcatccacggttcggtagcgaagcagagcgcttctttggccaattcaaagacctgtggctgtcgttgcggccaggaaacaaggtgtcggtcaaggaaatccgcagcgtctcgggaagtcaccgtcccgaaaagctcgcctgcctttcgctgctcgatctgtgggacgaccttctgaccttcaatcagtggctcgacagctacgcaactgaatccagccttgcctcgccgagcgtacttatgcagcgtggcctcggaagcttcgcatgctctggcaggaagctcccctacgacgacactttcatcatcgcttcggccgtcgacgacggaaagtacgcgcttgatcggcagcgcgggctccacattggcgccttccactactggaacccgaagctctccttgcttgtcgggcgcggctcggtcaacgtcaggatcgatccggaagatccataccgcgtctacgcactggttgagggaagctggatcacgtgtcttgcttcacggtctccgacatacatgacgcagacgcacttgaaacaggccgtggaaggggtcctggtacacgacggtggcaaggcacgtgacgcggccaagaacgatgccgacaggaatctggtccgcgcaatcctgtccagacagtccggtaatggcgatacttcttccgccaacatgacctcaccgccccccagccacgcagttcccgccgccaacactgaactcgaggagctgttctctgccgccgcgtcaagtcagctcgagaggctggagactcatcaatggtga

SEQ ID NO: 514223 - DNA, 1074 bp, Stenotrophomonas maltophilia
atggtgagcccgggatgctggatacgcgacgccattgatcaaatacagatatcgaaagtcgagcacaagcgctacgtcactgttcgaaagacgatcgttgcgagactgcgcgccattctgcccggcgagttgatggtgctggttgggcctcctcgtgtcgggaagtcgcgttgcatatgcgacgccctatcgatatcggaagacaacaagccagattccaagcttgtgatgagcgctgtcatggtcgatgcggagaactccgcaaaaaacggcgagttctccacgaaggatttcatgatctcctgtctgaaggccatccatcatccaatctatggcgagcccgccgaggatgatctctggggattcaaactggatcaactcctgcacaagacctcggaagccacattgcgccaagctttcgaacgtgctttggagctgaggcaaaccgagtacctgatcatcgatgaggcacatcacgtcaaatatgtccccggtggcgacgctgcggctgcacgcgttcttgattcatggaagtgccttgctaacaagaccaaggtcaagctggttttgtctggctcgtacaagttactcccacttctggccctggcaccccacatggtaggccgccaaagtccgctggactttggccgatacagagtcaacccttccgacgtaaacagttgggagcaagtgctcagggagttcagcaagcttctcaggttcgacgagaaagtttctctcagcacatggaacattctgctctttgaaggttcactgggctgtgttggcctgctttccagatggcttcgttcttgcctcgcatcgatgctgagtgaaggcgtcaacgctctgacgctggaagcgctgctggcggagcgcctccccacagtccaggaatgcaagttgctcgacgaaatactgttgggagaagcggctatgaagcggttccacgagaacaaccaaacgcagctcccgcctcagaaagtgaacaaggagagcaagagcagccaccagaagaatgggcggccattccagcgcaattctcgacgcagtccggcgggcggaagggcctga

SEQ ID NO: 514224 - DNA, 1350 bp, Stenotrophomonas maltophilia
atgggccacttgctgccgcttcggatgctggccactggatcagccgatgtcgaagcactgccctcttatctgattcgcctggcttccgcacacggcatcactacgggccatctgatgcgtctgctactagcgaacacaggaaactcggaagtcgacctggcggcaggaatccactctcagccgtttgcaggcctggtacgtccgaacacgactacgcggagggtattggagagcgcgacccggcacgttctggagccgctcggaacgttgatccaagggacctttctgtttctctatcccgcgatcaagcgatcaacctacacttattccccgacgatcagatggtgtcctgcatgcctgtccgagcaaacggtcattcacggcgcggcgtacctgaaactctcatggctccttgaaggcgcagaggcttgcgcgatacaccgcctccggctaaggaacacgtgccctcattgtcagaggtttgctcggccgatgaatcgctggctagcgatcaacgtttgccagcattgtgacgcgccgttggaccgggtgaccgctgacgatgtcgttcttaccgtctcgacagctgctgcacctgatctggtcagatttgttggagacctcgcccatcgccacatcccgttcccgatcggtgccgccaatcgcttcatcgatcagatattcaatgaagcatgggctagccagagggagcaggacctctggaagaagcttccgcgagacgactgcctccgctacgcgaacccggatgaaccgatcacactgccaacagcgcgtcgaatcgcctatctgctcgaaatgcccatcagcgagcttctcgacggcggcaccccaactgttcagtcgtttggcttcgctgccgaacaaccactgccagcccctatggagccaggcaagcgagggccgaaggtgaaagtcgaagcgcttggcaaaacgctgatggaggcactagcgactggcgctccccgctcccttgagcaaatctcacgagattctgagacaacggtaggcgcaatgcgctatcactacccggacctcgtccgtcggcttgccttgaactggaatgcgcatcttgctgcagagcgcaatcgcaagagggcccaggcgcgggaggccaccttcaacggcatccagacctggcatcaacggcagacgaagcccctgtcccggaaagggctgctggccgagctgatcagggaaaccggcctcccgaaggaggtacttcggcaagcgatccagcagttctggataccggccttgtctgctgcccttggctcggaacccgccaaacccccgacaccgagccggaccgactgtgctttacgcaaatga

SEQ ID NO: 514225 - DNA, 855 bp, Stenotrophomonas maltophilia
atgagtgcgagggaagggcgcaaccttccctcgccttcggagggtactagcatcagactcagggatgtcgttgggattgtggtcgccgccgtgttcctgcgggccgcattggaaattcttgctgggtccgtgtatggaggggacgcgtactactggtcgttgctgttccagttggttatgtatggcgtcatgttcgccttgttgcgcagagatgccttgatcgttggggtgtacgacggaagccggcttggcaaacctctcattgtcgcgattgccttggccaccgcattcgtgggggttacagtggctggtcaacaggtcatcagggacgttgcttcacatgttggagcgggagattctctgacgccggcagctgtcgtttctcatggcacgtattcgatgttcagcgccagggtaatggcgtttgttgtcgtaacgtgcctggtcgccccattcgttgaggaagcaatttttcgcggggttctgatcgggcggggtgttatcaagggcagcaatgtcaggaggattgtggtctcatccttgatcttcgctgcgttccacgcgttgtcgggccacatcgtcaatgccttcatcttctccatggtctctggctttctcttctgtcatttcagatcgatagttcctgcatttgcgttccacgccacgttcaatatgctcgccttcctttggagctactaccttgcccatgacggcgtggggggaatgatgagccagaagatgtttggagcggatgcataccatttgtggttcttggcttctatcactgtttttgcaggttgtattctctggatgcttaggcgcggggcgtggcgggagcgcggttttcacggatga

SEQ ID NO: 514226 - DNA, 348 bp, Stenotrophomonas maltophilia
atgccgttgcccgccgacttctactggactagacgctctgccagccgcctggacgatcctctgacggtgatcggctgcgcgggggtgtgggttgttgcgttgacgcaacgcgtggacgacgggagctgggtggccacgctggacacgcaccgccacgggccaggggatggaccttggcgccgctgcagcagctacgagcagggctgcgccggcgcggaactgtgggtgaccaggcacgaggcacgcctgcgtgaggacgtggccaagatcacgacgtacagggagtcagtacgtgcgaatagattggccaagctgcacacatcaccgccgttcggctggatggggtag

SEQ ID NO: 514227 - DNA, 741 bp, Stenotrophomonas maltophilia
atgactctgcggattccgaagttgatagccgccatcagcgggccaaggagcaggcccacgaacgtccaaattccgatggagaagctgtggatagcagtcgatcctcattgtggatgttgcgcgagccatcgaccagccttgctacatgcttgttgcagatatgtgcttgtggaagcaggttactgtctgacggcgcgcaggttcacgatctttggggatagggggcgctgtcgagagttgaacgcgtcatcatgctccccgacaaaggcagcggagagggccgagcggcagcttgggaggcagaggaaatggtgtgcgctgccctcgggtgagagagctagtactggggagcgaactgccaggccgcgtttggtcttgttcatgggctcatggtgctgccggggagggcatgagcgcaatcgcagatcgccccgcgaatcggccaccgagcatcgaccggaccataaacgcaattttgcgtttatggtcgccgcccatttctgtctctggccttggcgcgcgcactcgtctccccgccacgcctgcgggcttcatggggtgctttttctgcactgcctgcagcactccgtgccccggccccgcgtggcgttctccgtggttctctggcagcggccggccctgcggttccctgcgcggagggcgtctatgagcgttcccgtggccgtatgtggccgccctcggaaggcagcgatttttcaggtgaccacgggaaagaagtaa

SEQ ID NO: 514228 - DNA, 279 bp, Stenotrophomonas maltophilia
atgatcaagtcatataacgataagaacacagagaagatcgcccacgccattagagtcaaagcttgggtgaacattgaaagcgcggttcggcgtaagttgaagatgcttaatgcggcagtggagttgaaagaccttctggttcctcctggtaacaatctggaggccctgaaaggggacagggaagggcagtacagcatccgcatcaacaagcagtaccgcgtctgtttcaaatgggtggatggtgacgcctacgatgtagaagtcaccgactaccactaa

SEQ ID NO: 514229 - DNA, 726 bp, Stenotrophomonas maltophilia
atgaaggctctacccttgaagaacgaactgatccacggcgatgccctgaccgtactgccgaccctgccggccgagagcttcgacgccctcatcactgaccctccctatgccagcggcggggtgcatgccgcgtcgcgacagcaggcgccgcagacgaagtacatgcagagcggccagcggcagctgcacgcagacttcgtaggcgacgagcgcgaccagcgctcccatctggcctggatgcggctctggttggccgagtgcgcgcgcttgctgaaggatggtgccccggtgctgctgttcaccgactggcggcagttgccgttgaccaccgacgccctgcagtgcgccgggttcacctggcgcggcattgccgtgtgggataagaccgaaggtgtgcggccacagctggggcggtttcggaatcaggccgagtacgtggtctggggcagcaaaggccatatgcccttggggcggcaggcaccggtgctgcccggtgtgatccgggagaaggtgcggcgggttgataagcaccatatgaccgggaagccgaccgacctgatgcggcagctggtgcggatctgcgaggcgggtggccggatcctggacccctttgcgggctcggggacgacactggtggcggcatccgcagagggctacggctggacggggatcgagatgactgggcactacgctgaggtggctaaagcgcgggtgaccgaaggctga

SEQ ID NO: 514230 - DNA, 1005 bp, Stenotrophomonas maltophilia
atgtctgactctgccgaccgggccgcttctccggccggggctgaggtgttcaccttcggtgagcccaccgctgtgctcgactcgcggggcatcctggactatgccgagtgttggcagaacggccgatactacgagccgcctgtctctctgtccgggctggcaaggaccacccgttccaaccccatcctgcagagtggcctgctgttcaagcgcaacatgctggcgatgacgttcaggccgcaccggctgctgacgcgcgagcgattcaatcagctggccttggactggatcacattcggtacggggtacgtcgagcgccgcaactcggtgacgggcagggcaatagagctgcaggtaccactggcgcagtacatccggcgtggtgtcaccgagggcgagttcttccagatccgcggcttccgcgatgagcacgctttcaaggccgattctgttttccagctgcggaatgcggatgtcgatcaggagatctacggcatgcctgagtggctgtcagccgttcaatcagccttgctgaacgaatcggccaccttgttccgccgccggtactacaacaacggctcgcatgctggcttcattctgtacctgtccgattccaacgtgaacaaggacgatgtggacggcatgcgtgcggcgctgcgcgagtccaagggcgtaggcaacttcaagaatctgtttctgcattcgcccggcgggagcaaggacggtatcaagctcattccgataagcgaggtcgcggccaaggacgagttcagcggcatcaagaacgtgactcgcgacgacatgctgaccgcattgcgcgtccccccgcagctgctgagcatcgtgccgcagaactcaggtggcttcggcgacatcggcaagaccgcagccgtctgggcggctatggagctggggccactgcaggcgggcatggccgccatcaacgaatggctgggggaagaggtagtcaccttctcgccgtttgggctggggctgcccgcgtga

SEQ ID NO: 514231 - DNA, 1788 bp, Stenotrophomonas maltophilia
atggtgtgcgcgataggcaccctagaccatgtgaattccgttgtcgaccatatgccgatcgatgtgcgccgccaggccaagttcctgtactggatggggtggcgcgtctgcgatattgccgaggcgacaggtgagaaagagaagacgcttcacagctggaagtcccgggacgaatgggatcgcgctgacaatgtagagcgcatcggtggcgcattggaagcgcggctgatcatgctgatcatgaagccggagaagaccggcggcgagttcaaggagatcgatcttctgcatcgccagctggagcgccaggcccgcatacagcggtatcgggaggggggcagcgaggtggatctgaacccagccatagcgcggcgcaatgccgggccgaagaagaagcctcggaagaacgaattttccgaagaccaggtgacgttgctggtcgacgcattcctggagcagtgctttgggtaccagcgggattggtaccgggcgcgtgaccagcgcacgcgggcgatcctgaagtctcgccagatcggtgcaacgttctacttcgcccgtgaggcgctgatcgatgcgctgaccacgggacgtaaccagatcttcctcagcgcatcaaagtcacaggcagacattttccgccgctacatgcaggcgtttgttcgggaggtgctcgaagtcgacctgacgggcaatcccatcgtcctcgccaatggtgctgagctctatttcctgggcaccaacgctagaacggcgcagggctaccacggcaacttctatttcgatgagttcttctggacgcatcgtttcgatgacctgaacaaggttgccagcggcatggcgatgcacaagaagtggcgcaagacctacttcagcacgccgtcgtccatggcccacgaggcctacgacttctggaccggcgagcgcttcaataaggggaagcccgccaacgaacgccacgcgctggatgttacccacgccgcgctgcagcggggcgccgcctgcagcgacaggatctggcgtcacatcgtaaccatcctggacgcacaggaaggcggctgtgacctattcgacatcgacgaactgcgccgcgagtacagcccggatgcattcgccaacctgttgatgtgcgagttcgtcgacgacagcgccagcatcttcccactgacgatgatccagccttgcatggtcgacagctgggaggtatggggcggggagtacaagccgttcaccaagcgtccctacggcgaccgcgctgtctggattggctacgacccggccgaaaccggtgacagtgccggcctggtggtagtcgcgccgccgacggaggaggggggggtgttccgtgtcctggaaaagcatcagttcaggggaatggacttcgccgcacaggctcgcttcatcaagcagatctgcgagcgctactgggtgacgtacatcggtatcgacaccacgggaatgggtactggcgtggcccagctggtgaaacagttcttccccggcctaactaccttccgctattcgcctgacgtgaagcgcgacctggtgctcaaggcctacgacgtcatcaagaatgagcgcctgcagttcgacgcgggctggagtgacatggcgcagtcgttgatggcgatccagaagaccatgaccgccagcggcagacagatgacctacaccgcagggcgcacgaaagataccggtcacgcggatcttgcgtgggcgctcttccacgtgctgcataacgaaccgctggagggcactgaagcccgcgccagcatcatggagatctactga

SEQ ID NO: 514232 - DNA, 858 bp, Stenotrophomonas maltophilia
atgtcgagtcaagccaagaaaatccgcacccgattcttccgcgtggcggtcgagggcgctaccaccgacggccgcaagatcgagcgcagctggatcgaagacatggcggccacctacaacgcgcagacctacggatcacgcgtgtgggtcgagcatatgcgcagcttactgcccgaaagcccgttccgggcgtatggcaacgtgctggccgccaaggcacaggaagacaccgtcaacggcgagaagaagctttgcctgtacgtgcagcttgagccgactgccgacctggtcaacatggtcaatgtgcagaagcagaagctctacacgtccatcgaggtccaggagaactttgccggcaccggcaaggcctatctgatgggcgtggccgtgaccgatacccctgccagcctgggtaccgagatgctggcgttcgcggcacagaatccagacgccagcccactgaagcaccgcaagagcagcccagacacgctgttcacggcggcagaggaaacccaaatcgtcctggaggaggctgccgctccgtccgcgccggtcattcgtagtttcagcgaccgcatcaagagcctgttcaaggcacccacgccaccagcgagcgacgcaggtgacgaaagcttggagcgcttcaccagccttctgagcgacatggatgcgcagatgagtcagcagcaggtggacctgcaggagctgtcgcagcgctttgcggaaagcgagagcgccagccagcgactgcgcgccgagctcgggacgctgcgcaacacggtcgagaacacccccgagttcagcacccagcgcccgccagtgaccggcccaagtggcggtgaccaaaccgactgctga

SEQ ID NO: 514233 - DNA, 1017 bp, Stenotrophomonas maltophilia
atgcagcccatgacacgcgtggccttggaagcctatgtacgccgccagtgcgaactgaacggcgtcagcaccgtccacaataccttcaccgtcgcgccgtccgtgcagcagacgatggagacccgtatccaggaatccagcgcattcctgcagaagatcaacatcaccggtgtggccgccctggaaggtgagaaggtcggcgtcggcgtctctggcaccatcgccggtcgtaccgacaccaccggcaaagcggaacgccagccgcgcgatgtgagcgcactggacaagaagggctacaaggcggtgcagaccgactttgatacggccctgcgctacgccacgctcgacgcgtgggcgacccagcccaccttccagactcgtatccgcgattccatcatccagcggcaggccttggaccgcctgatgatcggcttccacggcacgcatgcggcacctgacaccgaccgcgacaagttcccgttgctggaagacgtaaacatcggttggctgcagcagtaccggaacaacgcgtccgagcgcgtactgagcagtggcaaggaagccgacaaggtctccatcggtggtgctggctcggactacgccaacctcgacgcattggcaatggatgcaatcagcaacctgatcgatccttggcatcgacgcgacccgggtctggtcgtgatcctcggccgcgacctgattcatgacaagtacttcccgatggtcaaccaggaccagccctccaccgagaagatcgcgaccgacctgctgctggcgacgaagcgtatcggcggcctgcagccggcagacgtaccctacatccccgacgacgcgatgctgatcaccagcctgaagaatctctcgatctactggcagatcggtggccgccgccgcttcatccaggagcagccgcagaagaaccgcgtggcgaacttcgagcagtccaacgacgcctacgtcgttgaggactacggtctggggtgcctggtcgagaacatcgtcatcgaggaagcctga

SEQ ID NO: 514234 - DNA, 717 bp, Stenotrophomonas maltophilia
atggccgacagccccgccaagcgccatctgcgccgatgcctggctgcccaggaggcagcggcgcggaacgccgaacagccgatggatggtgccagccagtacgagctgacgttgatgcagctgcatcaggaccggctgcggctgaaacagctgcagtcggtaaaggcaaagggtgaactgaaggccgagctgctgcccgcctatgacgagtatgtcgaaggcgtactgacggcagggcaaggcgccgcggatgaagccctggttacgttgatgctctggaacatcgatgcagcgcgctacccggaggcactgcgcatcgccgaatacgttctggcgcacaacatgcccatgcccgaccgcttccagcgcacgaccggctgcgtgattgccgacgagatcggcgaggccgcgctgatgtgtctcaaggccggcaccccgttcgacccgtccgttctggagcaggcccagcggctgactgccgaccaggacatgcccgatgaggcccgcgccaagcttcatctggcgcaggcccgccacctgcttgcatccgatgacccggacaccctgcctgtgggcgatgtgaaccgtgccgtggatctgctgcgcgaggcactgcagcgccacaagaactgtggtgcgaagaaggatctggagcgcgccgagcgcgcccagaagaaacaagccgccgctgccgccactggcgagcgcaccggctga

SEQ ID NO: 514235 - DNA, 468 bp, Stenotrophomonas maltophilia
gtgagcggcttcaccgcaaattcccccgccataccatcggagccggacatcatcgccggtagcttctggccgcctacgaaactgggttcgatgcgcgatgctctacgtctcgatggcagcgtgacacccgcccgtctgcgggaggcagcggtcaatgccgtgatcgtggtgggtgacgaactggccgcgtggcaagcggcgcgaatggccgatggacacctcgcactggcggatgtgccgtcgccagccatcgacagcagcacgcggcaccttctgctctatgcccgcgcagttcgatgcgccacagcggtggaactgcaggagcgcttccgctcctacgacgcgaccgcccagggcaaccagcgtgccgatgacctggcgcccaccatcgacgagctgcgccgggatcttcgccacgcggtgagcgactttctgggccgcccacgtaccttggtggacctgatctga

SEQ ID NO: 514236 - DNA, 222 bp, Stenotrophomonas maltophilia
atgcgcgtgatggctctccagggcgacaccatcgacctgctgtgctggcgtcacctgggcacaacggcaggcttgaccgagcaggtattcgcgctcaacccggatctggcactgcacggccccattctgcccatgggaaccgctgtccagctccctccccctccccctcccccctcccaatcgactgccatcgagcggccgctgatccagctatgggactga

SEQ ID NO: 514237 - DNA, 357 bp, Stenotrophomonas maltophilia
atgaccgaacccacctccctcaccggcgccgccgccatcgctaccggccttggcctggctgcgctgctccccggtatcgatggcgatgcgctgatcggcgcctttgcaggcggcacgctctttgtcgtttcggccaaggatttctcgctctggaagcgatcggtctacctgatcgtcagcgtcatcgctggctactacggcgccgatgacgtgtcgcgctgggtgccgctgcgatccacgggcatggccgccttcatctgtgcagcctgcagcatcacagtcaccctggccttgatcgagcgtggccgagacatccacccaccccgctttccccgtggagggcctcccagtgcatag

SEQ ID NO: 514238 - DNA, 276 bp, Stenotrophomonas maltophilia
gtgcatagcctgcttgttgttgccaccctgctgaccagcaccgccatctgcatgcgattgatgacctatcgccccgaacccggcgcccgcaggcgcctgggcgtctcctgctgcgcttggctgctgatcacctgtaccggaggccttgccatcaacgtcgcattgtttggcgctgcggcacacgtgaacgtgtggcagctgggcctgctgcttgtcctactgttggtgacctaccgcgcccgaggcaacgtggcgcgcattctgagggtcgagtag

SEQ ID NO: 514239 - DNA, 507 bp, Stenotrophomonas maltophilia
gtgatctcccgacgcctggcggcggtcctggccgcgctgctggtgatcgtgctgctgctaggcattgcggtcacgctagtgcagcagcggcgtattgacggcatcgtccgtcagcgcgacaacgccgaggcagagcgcgatgcggccaaacaggagcgcgacgtgctcagtggtgatgccaaagtcgtcacgcgctacgtcgaccgcgtacagtacgtccgcgaggcgggcgccactatcgtcaaagaggttcccgtctatgttacgcccgaagctgatcgtgcttgccctgtgcctgctggctttgtccgcgtgcacgacgcggccgccgagaaccgtcccttggcccgacctgccggagatgctgatgcggccgccaccggaattgcgctctctaccgtcggcgccaccgttgccgacaactacaccacctgccacgcagttcgcgaacagctgattgccctgcagctggcggtgagcgagcgccaggcgagtatccgtgattaa

SEQ ID NO: 514240 - DNA, 492 bp, Stenotrophomonas maltophilia
gtgattaagccggcctctctgcgcgatcacctactggccgcggtgcccgggctgcaggccaacccggatcgtcttctgatcttcattgaagatggcaaactgcagagcagctaccagcccggtctgtcgtttcagtaccactatgcgctttccctgatcctgactgacttcgccggcagcccagactcgatcatgctgcccctgatgcagtggatcacgcgacaccagccggaactgctggccaatcctgcgcgccgtgacgacattgcgttcgaagtggatgtgctcgccaacaacctggtcgacgtggctctaaagctgccactaaccgagcgggtggtggtctcgcgtcgaggcgacggcaccctgctgatacaccatgccgccgagccccccaccgaggactaccacgccgagcccatgaccggcggcaacgtgcacgatgagcaaggcacattggtggcacgcctaccggtcattgcgcttgagtga

SEQ ID NO: 514241 - DNA, 246 bp, Stenotrophomonas maltophilia
atgttcgccaagctccggcagagcaagcacctgcgcatacgggcagatccgcagcaggtgtcagttggcttcacagggcgcgtgtcccgcattgcgcgcgtccaccaagagggccgaaccgatgaggtgagtccacgagggccgcgcgtgcgctacgagtgtcgcggcattctgggcttcagcgccgacgccgcagagcgcatacgcgaggccatcctggaacatctggcagatgacgcgcggtag

SEQ ID NO: 514242 - DNA, 891 bp, Stenotrophomonas maltophilia
atgtccactttcaccgccgtagagctttccaaactgccggtgccggatctgatcgaacaggtcagcttcgagcagtcctacgccgatctgaaggcaatcctgcatctgcttgcgccggagtacgacggcctgctggagtcggacccgatgagcgtcctgttgcagatctgcgcctatcgtgaggttcacctgcgtgaatccctcaacgcgcgctccaaaggcaacctgttggcctacgcgcgcggcgcagacctggacaaccttgctgcattcttcggtgtccagcgccagcagatcacgcccccggatccgaaccgacgcctgcccgccgagatggagagcgacgaagatctgcgcagacgtgtgcagcttgcccccgagggctacagcgtcgccgggcctgaaggtgcctatctctttcacgctctgtctgccgatgctgacgtgctggatgtgagcgtactcagcccaagccctggtgaggttctggtcaccctgctctcgcgctcaggagaagggataccctccccggagctgatcgcgcgcgtgaatggagcgctgatgcatgggaacgttcgcccgctgaccgacctcgtaagcacgcgggccgccgagattgtgccctacacgatcagggccaacgtcattacattctccggtcccgattcggccatcgttctggaggaagcgaacaggcgcctttcggcctttgttgaagagctgcaccggctgggccgcgacataccgcagtcgggaatctacgcggcgctgcatgtcgatggcgtccaacgggtcgacctgatcgagccggccgaggacatcgtgatcgcttcccaccaagcttcgttctgcgcggcgatccacgtagtgcacctgggtgaccatgagtag

SEQ ID NO: 514243 - DNA, 1416 bp, Stenotrophomonas maltophilia
atgagtaggcgtgtcacagagcgcctgagcggcgagctgatgggcgttggcgacggcgccagagcagcattcctcccaacctacctgggcaagcccacgcgcctggcaaccgacgtgaccgccatctaccgctgcgattggcgcgggcacgtgcgtctgtcccaacaggtccgctacaacctgctcgcgaactccgatgtactgcgctcattcgttggccggattcccacgttgggcagcctgcccgatggttggacgacagcgaacagccaggccagcgactggacacgcgaggtcgtcgcctgcgggcgcttggatgatggcactccgtatgtggattaccgtctgtcaggtacgaatgtaagcgatgccgtgcagttcctggacattggctttcaggagacgcccacacccgcagcgcgccacagcatctggactgtcagcgtggggctgcaggtcattgccggcgatgcggagaggggctttcgcgagtctctgcgtcagctcgtactggccgaagtcgctgcagacggtcgttacctcatcagcagcaccagcactcgcccgaatccggtgcagctcgaacggatctcggtgacacgacgtctgacgcatgcgaacgtggccggcatccgctgctacatcggcatggccgttcttccaggcgccactgtcgacgttacgctacgcatctcacagcctcagcttgagccgggtacatctgcgtccagctacctcaccactcgtggcaccgcccgctcggctccggactatcagctgagcacggataatgaagtcctgttggcagaagcccccccgtcgggtgcagttctgacgtgggatggcggggttggtatcgagttgatgtccagccttctgcctcccaatgctacgcacctggaacgcatcggcgaagccgtggcggcacaagcatggtcgatcagttcagtagtgccgctggtgtggaatccacacctgtgtccggagagccttctcccgtggctggcatggaccatgtctgtcgatacctggcgcaacagctggccgctgctcgtccggcgtgcccgcgttgcaaacgcgctgcaggtacagcgccggaagggcacagcgcgcagcattggcgatgtggtggacagtttcggcggtgaggtcgagatcaccgaatggtgggagacgacaccacggggggctccatacacctttgaactcaccctgacgctgggcggccaaggcggcgagaccgccacggcccagtacgtcgacgacgtgatcgctgaagtgaacttcaccaagcccgtgcgcagccacttcacgttcacccaaggcgtcaacctcgccggccgcatcggcgtcgttgcaaccacgcgcgccgccgtgttctcgcgcctgcaagccaaggaatccatcccctcatga

SEQ ID NO: 514244 - DNA, 1455 bp, Stenotrophomonas maltophilia
atgagcggcctgcgatttacagtaaccaagcgtggtcgggaggccatcgtcaatgccgagcagaacggcacagcgccggtactggcgcattcattgggccttaccaacgcgatcatcgacgcccatccggaattgctggtgctcccaggcgagcacacacgcctgggcaccctgaaggggggcgctacggcaccggataccatccatgtgacggctcgggacgccagtgatgcaacctacgcggtgcgtggcatcggcctgtacctggacgatggcaccttgttggccgtgtatggccagcaggcagtgctggcagagaagtccagccaagccgtcctgttgcttgcagccgacctgcagttcgccgatatcgccgccaccgatatcaccttcggcgacagcaatttccagctgaacatcggtaccgaggaaaaggcgggggcactggagctggctactggggccgagaccatcatcggcgaagacgccgagcgagcgattcattcgcgcgggctacgtgaacttctggacctgcgtcttgggccaaatggcccgactgagttgacgcgcgagttgcttgccgcaatcgattcaccagcgctgcgcaagctgatggaactcaagagcgcggcactccgggatgaaggtgaaggcaacgaactcgatgcggacctgcttgacgggcagcacggcgctcactacctggactggacgaacttcactggcgtgccagccagtacctacattcccgggcaggtcatcacctttgcaggaaaggctccgccgcaaggtacgttgctttgcgacggtagagaggtagagcgaagcgcctacccccgcctgttcgaggctatcggtgacacctacggcgaggccggcgatgcgggtaagttcaagctgcccaaggtcgatgaagacagcggcatcatccacaccgcgtgtccggaaaaggtgggccaggtcagcaacggctcagtaatcgagcacgagcactctggcactgctgtggcagcaggtcggcacacccacagcgccagtgccagtggcgtgggagaccacacgcacggtgcatggactgacggccaaggtcatcacgcgcacagcggcagcgcctcctggcaaggtgatcaccagcatctgaccccattcgccgaggtgggaattgcctacccttggggtgcggactacggccgccatgccggctccaacggcaacgtcgactacgacaatccttggccctacaccagtcccagtgggaaccacgcgcacagcatcgccacagatggtggcggcaaccacgcccacaacatcggcatgaatggtgcgggtggtcacggtcacaccatcagtgtgggcgaggttggcgaccacacccatagcgttacggtcggcagcacgggcacccctaggaatctacccgctggcatccgaatgctctattgcatcacctactga

SEQ ID NO: 514245 - DNA, 615 bp, Stenotrophomonas maltophilia
atgcaactgaaagaaccacacgaaacctatgggcattccttcgacgagttcacgcgtttgtacctgcttccggttcggatcttcccggaggcggatggtagctgcccgcttccggagaacacagtcgatttcccgccgacgcagaagactggacccagccagatgtggcgcatcaatgaggcgcgctcggcatgggagctgatcgctgatcaccggggagccatgctgtgggacaagcacagtggagcggcagttctcaatcagctggaggcgggcgaccctctaccggtcgacgtgaccaacatccggccaaacgccctgccccctgaggagccgttaatgaaccgctggagcgagctcgacggggcctggcacttggtgccggactacagccgcatgcccgtgtgggacaaggcgaccggtgctgtgttgcccatgctctctccgggtgagccgctgcctgctactgccacggcgctgccaccaccaagacaggggggcggaccatggcagtacaacgatgtatcgaatgcatgggagccagtaccgcccacgcccattcctgtggagattcccgttcctcctgactattccaacgtgcggaccccttcctga

SEQ ID NO: 514246 - DNA, 1017 bp, Stenotrophomonas maltophilia
atgcacttggcacgcggcgacatcccagctcaggtgagcaacatgctgcgctgtggcgcagtgatccaggtgcgcaccgaaccgcaacccgcagcacgggtgcagacaggagagatacagaccgactggattccgtggctcgagcggcgcctggggcccaacggtcggacctggcatgcaccgggagagggggagcaagtgctgctggcatgccccgacggcgacatatcgcaagccatcatcctgggaagcctggcgcagacggcatacccccacccggccgatgcacagcacgtcgaacgatcggtctacccggatggcagcagcgtggagttcgaccacgccacctccacgctcactgtgaccgcggctgagggtcaagttgtggtccactgccagcgcgccgaggtgcatgccagcgccgcagtgatgctggacacacccaccacccacaccaccggaagcctaacggcggacggcaacgtttctgccggaaccggcgcgacgggaaccatctgctcgcccaccggacaggtggtcacgatagaacgcggcgcggtcaccaacatctctggcggatccgtcagccgacgggcgtcccttcccttcaacccagagcccttcgagcgcctggtcgctcagctcaacgccgtaacaacctgcgatgaactgcaggccctcgctgatcaggccctgcagtccgccaacacgttgctggccggagtcggcgcgcagctggccgcgctgaaacccctcatggcgttgctctcggctcccggggccaacccggcgcagattgtcacctggatcaccgacttcatctcagcgttcctgcagccctatctgcagcccatgctggtactgccggcgcagattgcggggatcaccagcgccattgccaacctgcagtctgccatcacagcagctgcggatcggatcgggtcatgcagcatcgaactgccgcccatcgagctcccggaactcccctcgcctactgctgcgcttcgagatccctga

SEQ ID NO: 514247 - DNA, 357 bp, Stenotrophomonas maltophilia
atgagaggcatggacgcggcatcgggccgctggctggaagatgacgcccacctgattcagtccatcgcgcggatcctgaccacaccactggggtcgcgggtgcaacgccgcgacttcggttccttgttgccggagctgctcgaccaacccttcaacagcattacgcagctgcgcctgtacggcgctacagccaccgccttgatgcgctgggagccacgtctgcagatcaagcgcatggcgctgtccgatggtggacgtcccggcgcattggtgcttgagctcaccgcgcgggtccgtgagcgccaatccaacgagttgacccgccttactgtcccccttcgccctcgcgaagcctga

SEQ ID NO: 514248 - DNA, 1167 bp, Stenotrophomonas maltophilia
atggaccagttccaccacggcgtgcgcgtcgtcgagatcaacggcggcacccgccccatccgcaccgtcgctacggccatcgtaggcatcgtctgcaccgctcccgatgctgaagcgaagcagttccccctcaacacgccggtgctgctgaccgacgtgcggggcgcgatcctcgaggccggaacgaaaggcacgctgggggcaagcctccgtgccatcgctgaccaggccaatccggtcaccgttgtcgttcgtgttgaggccggcagcgatgacgcggccacctcgaccaacgtgatcggctcgatggacaccgggaagtacacggggctgcacgcgctgttggcggcagagggtcagttgggggtaaagccgcgcattcttgccattccaggactggacacggaagaagtggtcaaggcgctggcgcctgtcgccaggaagctgcgcgccatggcctacgtgagcgcgtctgccgctgggaccgtcgccgatgtcattgcttatcgtgccaacttcggcgagcgcgagctgatgatgatctggccggacttcatcgcctgggacaccaccaccaacagccccgaaccagcctacgcgacggcgagggcagccggactgcgcgcccgtatcgatcaggaactgggctggaacaagtccctttcgaacgtgccggtttctggcgtcatgggcctcagccgcgacgtgcattgggacttgcaggatcccgaaaccgatgccggcctgctcaatgccaatgaggtaaccacgctgatcaactcgcggggccatcgtttctggggcaaccgcaccctcagcgacgatcccctgtttgcgttcgagcccgcagcacgcacggctcacatcctcgccgacaccatcgctgaagccatgctggtctacaccgacaagcagctgcaccccagtcaggtgaaggacattctggagagcatcaacgccaagttccgggagctcaagaacggcggctacgtgatcgatgcaaacgcctggtacgacgaagcggccaatctgccctcctcgctggccgacggcaagctcgtcatcgattacgactacacgccggtgccgcccctggagcacctacagctgaaccagcgaatcaccgaccgctacttcgccgacttcgcgacccgcgtcaccggctga

SEQ ID NO: 514249 - DNA, 348 bp, Stenotrophomonas maltophilia
atgagccgcaagaccgccaacgatgccctgctggatacaaccaccggcaacgtaagcgcacccgactacctcacgcttgaactggattcgcccatccagcgcggcgagcagaccatcgacacgctgcacctgcgcaagcccgatgcgggttgcctgcgtggcgtgaagctgatggatctgctgcagctggatacttccgccatccgcctcctggccccgcgcatcaccaccccggcactgaccactgcggacgtggacaaactggacccggctgacctggtcacgcttggcaccgagatcgccagttttttcatgaagaaggcggaccgggaatccctgaacgggtag

SEQ ID NO: 514250 - DNA, 2856 bp, Stenotrophomonas maltophilia
gtggccgccgacaaacttcgcctgcaagtcatcctgtccgccatggacaaggcaaccgccccgctgcgcaagatccagcgcggcagtaaggggctggccgaccaactgcagcgccagcgcgaatccctgcgcaagctcaacgcagcccagcgcgatatcagcgcattccgccagcaagccaatgcggccaagctcacgcgaacggcctacgaccaacagcgcgctaaggtcagcgaactggcagcacgcatcaaggctacgaatgccccgagccgagcgctgcgccgcgagttcaacgaagctgcccgcgcggcaggcgtgatgaagctcaagacgcaacaacaggccacacagcttcagcagatgcgcggcgcgctggagcgtgctggcatcagcacacggcaactgggcacgcatgagcggcaactacggagccagatcgagcaggcgacccgggccatgcagcagcagcaggcgcagctctcgcggctggccagccgccagcagaccatggcaaaggcaagtcgtcaggcacagagcatgcgctcggcaggcagctccctcgccatgggcggggcggtcgccgggggctacggctacgggctggcccgggtgctgggcggcatggtaggggctggcagcgccttcgatgccgaaatgagcagcgtccaggctctcacccgcttggacaagcagagtgagcaactggcagcgctgcgcgcgcaggcacgccagcttggcgcagcaaccagtttcaccgccaccgatgcagcccaaggccaaggattccttgccatggccggcttcacacccgaagccatccgcgctgccatgcctgggctgctggacatggcgaaggcaggccgcaccgagctcgcacgcaccgcggatatcggctcaaacatcctcagcggcttcggcttggatccgaaggaaatgacccgcgtgtccgacgtcctggtgctgggtttcagcaccgccaacaccaacctggagatgctgggcgacaccatgaagtacgtcgcgcccatcgcgaaggctgcaggcgtcagcctcgaagaatcggtggcaatggcaggcctgctgggcaatgttggcatccagtccagccaggccggcaccaccctacgctcgatgatgctgcgcctctcggcgcccactgccaaagcctcggccgcgctggcccagctcaatgtggaaacccgggacagcaaaggcaatatgcgcggcatcctggacatcaccgcagaagtcgccaagagcgtcgagaacatgggcagcgccgaccgtctgtcctacctcaagcgcatattcggcgaggaaccggccgccggcatggccgaactgatctcccgtgctggcagtggagaaatcgagaagtacctcaacgtactgcagggtgccgaggggactgccgcgcaaacggcccagatcatggatgccaatctgtctggctcctggaagcagttcaagtcagccagcgaggacgtgatgatcgctgttcacgagctgctggatggccctctgcgcggcgtcgtcgatcggctcacccaagccactcgcgccgtcggaaaatgggtgaaggccaatcccggactcgccgctggcattgcaaaggtggctgccgttctggcggcgctgcttatcgccgccgggggagccatggtcactctcggtgccatgctcgggccgctggcaatgctgcgttacctgttcaccgccgttggcgtcaatgcaggcagcatgttcggcatgatcggcaaggtgctgccgatgctcctcaacaccggtcgcatgctgctgccactactgggaggcatcagcgcgcccgtgctcgctatcggcatcgccgtaggcgttgtagccgccttggtatggaagtactgggagccgatcaaggcgttcatgatcggcgtttgggagggcgttctggacgtggtcacgcccatcatggatgaactcatgacggcgcttgaacctctcggtcccgtatgggacatgatctccgacgccatgagcgaagcatgggcatggatcaagaaactgttcgagcccttcgaggccaccagcgagcagctgcagggcgctaccgatgcgggccgaggcttcggccaggtgctgggcaacgtgctgtcagtgaacctacgcatcgcggtgaaggccatcagctggctggtcaaggcgtttaccaccgtgctaccggccatcaagaacgccatcggcggtgcatggacctacctgcagggtgcgtgggatctcatcgtcggcctgttcaccctcgacggtgatcgcattcgcaccggcatggcctccatgtggaagggcatcaacaagatcctcatgggctggccagcgaagatggtgcaggcgggcaagaacatgatcgatggactgatacagggcatctcttcgctggcaggttcggtgggcgacaccatcagcggaatcgccgatggtgccatcggcaggttcaaacgcatgctgggcatccagagtccctcgcgcgtgttcgcgcaactgggcaacttcactgtccaaggtttcactggtggcatcgatgccggccgtcagcgcgccgtgcagtccgtagcgcgtcttggcgaccgtgtgaggcaggcaggtgccggggtggtcctggcggccgcctcaatgccgatggcgtctgtcggcagcgtaccgcttcccgctggcagcgcaggaatgccggcagcgcaggcaggtggcaacacgtacgaaatcaccgtccacgtgggagcgggtgcggatgggcaagccatcgcgcaggccgttcgggaagaactggaccgtcgcgaccgagagcgggcgtcacgcctgcacagccgcctgaccgactga

SEQ ID NO: 514251 - DNA, 396 bp, Stenotrophomonas maltophilia
atgatgatgtccctgggaacgttcgtgttctccctgcagactgctgcgtatcagcagctgcagcgccagatgtcctggcgccatccggccagcgagcgcgtcggtgtgctcgcagcgcgccagtaccttggccccggagaggagaccatcgacctgtccggcgtgatccacgccgagatgaccgatgacctcctgaccttggacgtgctgcgcgaactggccgcagacggccgccccttggcgctggtggagggtaacggcaccgtctacggcggctatgtcatcctgtccatcaacgaagggcgcaccgagttctttgcagacggcacaccccgccgcatcgacttccagttgcagttggcacgcatcgatgacgaggtcgaggccagcgcatga

SEQ ID NO: 514252 - DNA, 993 bp, Stenotrophomonas maltophilia
atgagtggtaactatcccatccctgtctggcaggtcgtgctggatggcatggacatcaccagccgcctggcgccacgcctgctcgacctttcccttaccgaaagccgcggtgacgaagccgaccaggtggaccttcgcgttcacgaccacgatggccgcctcgccctgccgaggcgtggggtaaccctttcgctggcctttggatggaccgacaaaggcatgatcaacaagggtacgttcgtggtggacgaagccgagcacagcggaccgccggacatcatcaccatccgcgcgcgcagcgcggatctgacccgaaccatccgtacccgccgtgagcgcagctggcacgacaccacgctgggtgcagtgctgcgtgcgctggctggagaccacgcattgaaggtcgccgtcgacccagcactggaccgcatttccctgccgcacctggatcaggccaacgagagcgatgtgaacctgctcacgcgactgggcaagcgcttcgatgccatcgccaccatcaaggccggcacgctgatcttcaagcccattgatggcgccatgacagacgccggcatagagcttcccgtactgcggctgacccgagcagcaggcgattcgcaccgctattcggtagccgaccgcgatgcggtcaccggcgtacgcgcctattggggggaccgtggcgctgcgcgccgcaaagctgtgctggttggcacggatgataacgagaagaaactgcaggccacctacgccaacgaagccgaggcaacgcagcacgccagagccgaactgcagcgcctgcaacgcggcgcggcgaccttgtccatgcgcctggcgctggggcgggccgatgtgtacccaggggtgaaactatcgatctcgggcttcaaacccgagatcgacggtacggattggctggtggtgaaggcgacgcactcgattgcgggatcttcgggcttcaccacgtcactggagctcgaacgcacccagtag

SEQ ID NO: 514253 - DNA, 621 bp, Stenotrophomonas maltophilia
atgagcaccagaagagatctggaacctgaaagctttacggaagagacgacgctctggcagatctactggaagtccaggacgatcaagccgagcaagttcaaccttatttccacactgcttgtctttggcttcctggccgtcacgatcttttacgcgccccagaacactcaagcgttggctgctactgtccgtgaactcgcaactttcagtctgaatgccactctggctgtgctggggttcctggtggccggcttcacgattttcgctacggtgaccaatcccaatatgctgatcgcgatgggaagcattccgcatgaggagagcggcctatcctggctgaagcattccttcttcgtgctgctgcgaaccttcgtgtactacctggtatacgcggtgttgtgctttgcggtggtgtacttcggagcgaagggaggccctgtgtcattcctggtttcgttgtcgccacacccgcaggcgtatgcgttgtgcattgccaaggtcgcattcgtggcattggccacgggacagttcttcctgctgatgcagctgaagtcgtttatctacaacgtctacagttccgtggtcgcgagtctgcgctggcgagcagaagggaacgattga

SEQ ID NO: 514254 - DNA, 1038 bp, Stenotrophomonas maltophilia
gtggcagaagcgaaggaaagcaaggaagttgagttcggcaatctggtggtgcgttttggggataaggtgttgctcgatcacttcgacgagatcgtgtatcccgcatttattgatgggtacacgcgtaccttcagtgaaaccaagtacttcttcgagaaagtgagcctcgttcgcttgggggaaatccctgatacagatgctccccttgtggcggttgtcggtcgaatcatcaaggatggtgtccttcggcgagaccaggtgtacgtggatggggcactgaagaagaagccagggaaaatgcagtcctcgccatcggccatgttcatgttgatgcttcacaaccatcgtctggtctacctcaaggagaccagcgatgcgccaccaaagtcggcattccgcactactttgcttcagttcttgaagcgaaagcacggggaagtggtcaaggcgaaaaaggaagcaattgacgagcgctacgcgaagcgggctgaaagaaaactgcacaaagagaagcttgaggagaagtacggcactcctacggttcagctcattccactgtcgtcggaagactctgtgcgggagttcgtagaccggtatcaggagctgagacaggtaaagattacctttactgccaccaatgatgaaaaccccatgcacaacttcttcgcgcagttcaagcgtgcgaaggaggatgttgaagccgatgcatccacgatcacacacaccgctaagactggcttggacaaggacgcggctgtagatcagattactgaggctaccgagcagggaatcaacgaggtgcgcttgtctggtattgacgaggcgggcgataagttggtgggaaacaacgttgacttcaggctgaagaagactttggcgggcgtcagcgaagagccggtaaaggcagctcgtactttggtcagagctttcaatggtttggtcaaggatggaattatcaaggttgaagcgacgacatcgagagccgcgcgccgcatagggaaaatttgggatgagcaccagaagagatctggaacctga

SEQ ID NO: 514255 - DNA, 438 bp, Stenotrophomonas maltophilia
atggtacttgtgtcgaacatcgacgatgtcggagtgcgtttgagggcagagcgggaacgcctggagctgacgcaggaggcgctgggcatacaaggcggcaagaacaagcagacccagctgcgctacgagaccggcgtgaactcgcctacagcggcttacctgcacggcattgccgaggcaggggtagacatcggctatgtactgactggcttcccgtcggaacttcgcgatgacgaagcggaagtcctggcgcgattccgcgcggcgtcgccggagctgcgacgagcggcactttctgtgctggcctcgggcgaggctgcgcggcagacggcagtggtgggaggcgacaaccacggtcaggtgaacaatgggccggttgagcaaggtgatgtgagcttcactgtcggtgagaagagcaagaagcgcagcaaacgatag

SEQ ID NO: 514256 - DNA, 216 bp, Stenotrophomonas maltophilia
atgtccaaacctgtcctaaagacggcagatgaagccagggccgagctggaccgccaaggcatctccatcgcggatttcgcgcgcactcacggcctcaagccccgcgccatctacgtcgtcctccgtggcctcaatgttggccgccgtggcgaagcccaccgtgccgccgtcgccctgggaatgaaggaaggcgtccttaatccccccaacgcctga

SEQ ID NO: 514257 - DNA, 327 bp, Stenotrophomonas maltophilia
atgaccgcaaccggcctgcgcaggaaagtagtgttccgatgcgtcttctgcggttcaccgctggtgaaacgcaccagccacttgagccatccacatctgcgccacgactcgttcaactgcaccgacccgatctgctcggccgcgttcaccgggcacaccgaactgaccggcgttgccagcccgagcggtctcccggatccacgtcccaccgacctccccccaagccccgcctatgcgcgggacatagcccagcgcgcccaccgcgcacagcaaggcggcgaccagcccgatctgctggacacgttgcctctcacccaccaccactga

SEQ ID NO: 514258 - DNA, 297 bp, Stenotrophomonas maltophilia
atggcgttcatcgaactgacgaccctgtcgtcactggcaaagctttgcctgcgcaccaccattcgtagcggcggcctcgtcgtcggcccccagggttacacgggccgcgaagccgaaactgggccgatcttcgccaccggcgtggtctggcagttgatggcactcggcctcgtgcgctgcgctcccaacaacgatctgctgctggaagccaccaacctgggcatcgaactgcacgactgcggtcgcgcagaaatcccgcttggccccatccgaaccaccgacgaggaccgcccatga

SEQ ID NO: 514259 - DNA, 213 bp, Stenotrophomonas maltophilia
atgagccagagcaacgggtggtccagcgcacaggctccaaacttcgtggccggcgccgccggccacatccccaagcaccccgacgagaaggcaaaggaagcccacgagctcgccatcaggctggccagcttccgcgcacgtggcggcaaggtcgaagtgatccacaccccgtccgcagcacccatccacggccggcgcaccaccgaggtctga

SEQ ID NO: 514260 - DNA, 2697 bp, Stenotrophomonas maltophilia
atgcaagaggctatccgccaacaggttctgcagcgcatcgagcgcgactatggcctgaagcaccgcagcggcaccgactacatgcgtgggggcaggtgcccccactgcagcaagaaggagctctacacccattttcagaagccatgggtgctgcgatgcggccggcaggccaagtgtggccaagaggtgcgcgtgcgtgacctctacgacgacctgttcgacgactactccaagcacaacccgcagacgccgcaggcaccacacgccgccgctgacgcatacctggcgacggcgcgcggcttcagcctgaaagggttggacgggctctacacccaggaacactacttcgaccgcgacaagaatcagggcaccgccaccgtgcgcttcgccctggtcaaaggcggttactgggaacgcctgatcgatcgcccgcaccgcttcggcaaaaagaaggcgcgcttcgcaccaggcgagagctacgccggtgtctggtggtgtgccgccgcccgcgaccgactgcgcaccgcgcgcgaggtatggatcgtggaaggcatcttcgatgccatcgcgctgctgcagcatggcatctgcgccgtggccgccatgtccagcaacgcctatccggagcactccctcaaggaactgatggacgcccgtcccaacgacctgcccgtgctggtgtgggccctggacaacgaatcgggcgcgcgagaattcacccacaagcacgtgcgccgcgccgagaagctgggcttcacctgcaaggctgcccagatcgagcagaagggcgagacaaagaccgactggaacgacctgcacctgcgtgcactggccgctgaagacagcgccgccctgtggttgtcagaccttgagcacgcccgtcacaacggcgccctgttgctggcgcccaacgccatggacaaggggctgatcatgcatgagcgcgacaagcagaccgagttcttccttgagcacggtcaccgcatgtactggttcgagttcgatgcgctgcggttcgaaaagctctgccgcgagcgcggcgtagatcgcgaccaggccgaagagaacgagctggaaggcgaagagctcgccaggatccagcgcgccagcgctaccgtgcgccagatcgccaactgctatccagaagccctgtacttccagaagaacgaggccaccgacgaaagctggtacttcttccgcatcgacttcccgcacgacgatccacccgtaaaaggcaccttcaccggggggcagatcgccagcgcaaccgaattcaagaagcgcctgctcggccttgcccagggcgcgttgtacagcggtaccggcaagcacctggaccgcatcatcgacaagcagaccttcaacatcaaagacgttgccaccgtcgatttcgtcggctacagccccgagcaccaggcctacatctaccgtgacctcgccgtgcgcaacggcgagatcaccctcgccaacgccgaggactacttcgaattcaaaaagctgcgcatcaagaccacccagcgctccatccgcctggacatccagcgcgaccacgagcgctaccggcaggactggctgcagtggctgtggacgtgcttcggcacccacggcctggtcgcactcaccttctggttcggctccctgttcgccaaccagatccgcgccgcccacaaatccttcccgttcctggaagccaccggcgaagcaggagcaggtaagaccaccctgctcaccttcctctggaagctgctgtcacgttccgactacgagggcttcgacccggccaaatcgtccaaggccggccgcgcccgcagcatgggccagacgtcgggcatgcccgttgtcctgcttgaagccgaccgcgacgcgcccgacaaggcgcacgccagatcgttcgagtgggacgaactgaaggactactacggcggcggaacgctcgccacgcgcggcgtcaagagtgccggcaacgaaacgtacgagcctccgttccggggcaccatcgtcatcagtcagaacgccgcagtggacgctagcgaggccatcctcacccgcatcgtcaagctgcacttccgcaagcccaacgccaccaccgaaagcaggcaggccgcagacaacctcaacgccctgcaggtcgaagacctcagccacttcctcatcatggccgtgcgtgccgaacagcgcgtcctggagaagttcaccgagcgcgtgcgcttctacgaagccaagctgcgcgaagacaagaacctgcgcatggagcgcatcatcaagaaccacgcgcagatgctcgccctgctggacggcctgcgcctggtcatcgatcttcctgaagaaatggtggtggccacccgcaacgctctggtggaaatggcccagcagcgccagaccgacatcagcgccgaccaccccatggtcaacgaattctgggaaacctacgagtacctggaaaccataggcagcggcgagcgccgcatcgtcaaccactcgcgcgacccgcagcgcatcgcgatcaacctcaacgacttcgtcgccaaggccagtcagttcaaccagcctgtgccggatctgaaactgctgcgcgcctatctgcgcgactcgcgccgtcacaagctgatcgacgccaacctcaccgtcaacagcgccatcaagagcaccagcaccggcgctggcgtggccgtgcgttgctgggtgttcaaagcatga

SEQ ID NO: 514261 - DNA, 297 bp, Stenotrophomonas maltophilia
atggaaatgaagcgcacccgagagttcaaggactggatcgatgccctcaaggacgggctgggccgcgctcgtatccaggcgcgcatcgaccgattggccgctggcaatgccggagaccaccgcaacctgcagggcggaatctcggagatgcgtgtcgatgttggcccgggctaccgggtgtactacacgcagcgcggaagcgagctgatcatcctgctggtgggcggcgacaagtcgagcaaggccgcacagcagcgggatatcgagaaagcgaaggagttggcacggaacctctga

SEQ ID NO: 514262 - DNA, 489 bp, Stenotrophomonas maltophilia
atgaccgccgatgccgactacgaacgcacgacgtatgaagtccgcctggacatctgctacgcggtgaggctttacgcgttgcatgagcgtttttacgcgcgtttggacaaaggcatcaaggcgattgagctgattgccggcagtggcgcgttctacgctgtcactgccggctacaccgggacgacgaagatctgcgcgctggtagttaccaccttcgcgctgctgagcctggtgtatgactttggtggacgtgcacgagagatgcgaggcgctggccgcagtttcctgcagctgttgtcggaggtggatacccccggcgcgacggtgccgtctattgacaagctgattgcgcaggctggcaaggatgcgcccaccaccatcgatgcgttggccaaaccagcctacaaccagaacctgattacgcacgggcgctacagtcgcgttgtcccgctgaacaagcgggagaagttcctgcagttcgtggcctga

SEQ ID NO: 514263 - DNA, 243 bp, Stenotrophomonas maltophilia
atggcacaccagagccatcttgcgcgtgcgcgccagcttgcccaactgttcggccagatcgccgacaccaccgaatggaaccacgcctgctggctggccctgttcgcgcgtctgctggggccgggcatagcgccggccgagctcacgctggccgacgtgcagcgggccatcgagcagaccagcgccagctggcccaccggttgcgcctcggcagccaacggcggcccgagggcgctgtcatga

SEQ ID NO: 514264 - DNA, 273 bp, Stenotrophomonas maltophilia
atgagcgcctacatccgcgatgcccaccgcacccccgccgaagtcctcaacagcttgcactacctggtgcacgagctcgacgtcgaccgtctgcagcaggcccagcaagctgtcgacctgatcagcctgatcgagaccgatcaaccctcccccatcaccctgaaccacgtcgccgccgtcgccgcctacgtggcccgcgacctggccgagattctcggcaacgcctaccggcccggtgtctcgccggcagccgactgcccggaaaacatttaa

SEQ ID NO: 514265 - DNA, 207 bp, Stenotrophomonas maltophilia
atgaccaccgaaaaatgcgtcatccaggaagaccgtcccgacctggccctggaccgcgagatcgcagattttgccgacggctatctgttctatagcgagacggccgatggccgcgaaggaacctatgcccccagcgtgtgggaacgcacgttgatcaccgacgccatccgcacgtgggtggcaatgatcgagagccgcatcggctga

SEQ ID NO: 514266 - DNA, 429 bp, Stenotrophomonas maltophilia
atgcacccgcagactgagtcagcctcagccgttggcgcgcatccgcagcagtccagcaccggacccggcgcgcagcctaccacgaccgcagacaacgcccctcgcccggactgcagcgccatgctgcagttcgccatcacccacgatgagatccgcgtcatcgccgtcctggtcatgggccagccgcgtcgcgtcgaacaacgctggaagcgacgcaccctcaacagctgggtgctgcagtccggccccatcctgtgggaagcggagactgacgcaatcagccacccgctggccgacttcctggaccgtgccgggctaccgatcggcattgccgccatgctgccccggcaatccggcccagccgccgcggcagccatcgcaacagcagccagcgagctggcggcctgccgcggcgacggagcgtgctga

SEQ ID NO: 514267 - DNA, 276 bp, Stenotrophomonas maltophilia
atgcagcaacagatgaccccgccgcgtgcattgcccacctgcaggaagcgccacaccgcccgctacatgctcgactaccgccgcctcgaagccagaggcggccacttcatcgaatgcgcctgcagcagcacgcccaagtgcccttcattcgagctcgcctgggcccactggcacaagcagcaccgcctgcagcccagcgcggccgcattggccgagcggaccaccggcggcgtccggcagataggcctgttcggcctgcagcaggtgcccacgtga

SEQ ID NO: 514268 - DNA, 219 bp, Stenotrophomonas maltophilia
gtgaaccgcattgtcaccttcgcccagctgcagcagatctgctgcccagtcggcccccagccgcgccttgccaccgtgcggcgctgggcggaccgccaaggcatccgctacaagtacgaccgacacggcggcatctggaccaccctcgacgcactcaacgcgtccctgggcctgacagccgctcagcaggaagaagtacgggaagaggacaacatctga

SEQ ID NO: 514269 - DNA, 1197 bp, Stenotrophomonas maltophilia
atggcacgcggcagaaaaaggaagttcaacccggacattccggggcacattgatcaggacgcattgccgaaggggatctactggtccgacggccgctggtacatcgtccaggatcacccacaaggcggtgggcggcagaagcgcaccgtggccgggaccaccgcccgcctgtcagatctacacgccatcatggaagaacagcgcacgggcaccgctcgcggcaccctgcgcttcctgttcgagcgctaccacgaatccagcgacttccagcgcctggccaagagcacgcgcaagaactacaagagctatgccgaggtgctggccacctacctgcgcaaagacggcaccctgctcggctccatgccggtcgaccgcatcaccacccccgtggttcagcgcttggtcgagacattcgctgccggtaggcctgcaaaccacgtccaacctgctctgcccgcgtaccccaccaaggccaaccacctgcaccgctacctgcgcctggtcatgtcctggggcgtgcgtatgggctactgtcgcaccaaccctgccaaaggcgtgcgccaggcaagagagcgcgccgattcgcgcatgccctcgcaggaggcgttccgcgcggtactcgcattcgcgcgcgagcgcggcgcgctgggcgaaaacatcaagggcagcttccctgactacctggcgccggtgatggtgctggcctatagcgtgcgcctgcgcggcatcgaggtctgcaccctcaccgacgcgcaccggcaggaagacggcatccgcagcaaccgacgcaagggctctcgggacaacgtgaccgaatgggatccggccatgatcgaagcgtgggaccagctgatcgcacggcgcacccgcatctggaaccggaagggccgcgtgcggccggtaccgctgcgtgccagcgatcgctacctgctgatcgagcgcggcggggagccgatcacccgcagcgcgttgtccagctcctggcaacgcttcatcaccgaggccatccgcgtgggtgtcatcgccaaggaggatcgattcgccctgcacggcctcaagcatcgcggtatcaccgacggcgacaacaaggctgccggcggacacaaatcggcctcgatgcagcagcggtacgaccatgaagtaccggtggttcaaccacccaagaagcgcaacgcgcttgagcgtggaaccacctaa

SEQ ID NO: 514270 - DNA, 273 bp, Stenotrophomonas maltophilia
atgcatggtgatgctgctgtcatgttcaagctgggcttcccgctgtttctcattggtcttgcgctgatcgtcatcagcgtcaagatgaaggagaagctgcgccgctacgagttcaacaacaggacctctggcggagctgtcgaattttcttcctacgaggcctcccgttcccatgagaccaaatggaggcttgcccgactgatcacggtcatcggcgttattccgtttctcatggggagctgcagcatggccatcgggctgctcaacggctga

SEQ ID NO: 514271 - DNA, 702 bp, Stenotrophomonas maltophilia
atggaagccaggctccttcatgttctcaggctaatccgatctggaactagcaagctcgagcccagggatggcacgccggaagaggtaaagagattccagcccattgccaacgctgtgatgcatgctaaggacatgggctacatccgcgatgccatttcaatcgttgatgcttgcagtgggcaaaggtacttcaccgccgttatcaccaccggcggtctgacataccatggcgaggaagccttagctgatgagatcggccccggaacgctgattgaggagcttgtcggtgagatttctgcaagcgacaacatgacagccctacggcacaactgggaccgtgccatcgagcggagcaggaatgatcccatgggatcgatcacggctgccaacagctttctcgagtccgtaatgaaatggatcgtcgagcaaagcggtcagcctgttccagagaaccgaaggaagctgttcgagcttacagtgaagctggtcagtgatggcctccctggccaggactcggacattgttgggcacttcgatacgatcatgcgggaaatcggttctctccgaagcaagatcggggatgcacacgggtctacctcagcaaaacgtccgcccagttcaagtcaagccatgctgagcgtgaaccttgccggctcgctggccctgtatctgctggactcgttcgatgagcagaatcgttag

SEQ ID NO: 514272 - DNA, 477 bp, Stenotrophomonas maltophilia
gtgtcgaccaagaaccagcgacttcaaaaactgatccagcactaccgcgacgagaccgggaacgagtctgtcgatatgcatgaggtagccaagttcgccgctgatcgtggctacccgctcccgaagccgaagagtgctctcgaccgcttggcggaggaactgtcgtcggcggcaagagaagaggtgcgtcacgacaaggtgaccggcaagccttatcgggccaacttggcggtcgtccaatgggtcaatgggcaacagatgacgctctggcatgacattgatgtcgcaccaagacgggtggctcacaaggcttttgtccaacgccgcgagcaaatggttggcgacgctgtacaactcacgcttgatgtcacgcactggaacagcgtgaacgctgaggacgagccgattgtcatgcctatggacttcaccgacgacgtgcagtggcggttgaacgccccggacgaaaaagcagcctga

SEQ ID NO: 514273 - DNA, 273 bp, Stenotrophomonas maltophilia
atggacacccagcgtggctgcgaaaccgagtacatcacggtcatagaagaaaggagctttgcgcgcaatgaagccattcaatttgtcaggtggaaccgcaaacgcagcagccgccgcattggcgatacgctcttcctcaaccacatccgcgtcggttcgtccgtccatatctacatccaggatcggcttcgcctgaccatggcgctgcagaacgtgttcaagttcgtgccgcaatacaaaccagaagttgtcgatcctgtcgaaccggaatga

SEQ ID NO: 514274 - DNA, 270 bp, Stenotrophomonas maltophilia
atgaggcaggaactcaatgtcttcgaccttgtcagttccgaagaactcagcgaccgctttctcaacagtctctacgtccttgacattatcgacacccggcaaccagccgcgcttcttcatttccgcgattggcaacgcaccgaaaatctgggccctgatagcacgaccaggatcgctacggaatgcgatccgtgcgagctggaggtcatagtctttctggagcgtaagaatgcggtccgcctctacgccaaacacgtcctcaagctgtag

SEQ ID NO: 514275 - DNA, 852 bp, Stenotrophomonas maltophilia
atggacgacctgttctcggatctaaacgaccttccggttcctcccacgccgccggcacgcccggcggtgccgaacctggccgatggtctgcgcaacgccggcctactttcacgccaggcggtggcagatcgagcgtcggtccctgtcgtagagcccgagcacttcatagttgccgagccggcgccggacaccgagtcggtagcggtgtgtgtgcccgtcttcgagcaagaggatgcgtccgcagtgctggaggaagcgccccaactcttcagtgacgcagaagcgaacctcgtggtcgagtttactcccgaagccgaagccgaagccgaagccgaagccgaacctgagcccgagcccgagcccgagcctgaggcatcgctggggcctcccgtgatgacttcaacgcccgtcgaaggcgcgcccgaggctggctctcgttctgctaccacccgacgctggctctggatgggtggcggggccgtgttggcggtcggcgtcattgcctggctggtgtacggctctagtaacaaggaggcggtgcccgagtccgtgcctaccccaatggcagagccagtggccgatgagctgcctgcggctcttgtggcggttgagccagaagcgcctgcgcctgcaactgttgcaccgaacatgcctgctgcacaagacaaggtagtgcaggcgcccgaccccgcgcctgaggtgccgagcaagccagcaaccaaaccagaggcgaagaagccgcaacgcacgaagccggctgtccagcccacgccccagccgaagcccgtacccaggcccacgtggcaggacgacgcattggacaagttggacgatttagaaaagcgcttatga

SEQ ID NO: 514276 - DNA, 264 bp, Stenotrophomonas maltophilia
atgaccatttcagttatccgccctttttccaacgaagacaaagccgttgttgagaaggcagccgcacgcttctgcaagcgccacggtattgaacaggacgctaattatccagacgcctacttggacgtcatcgcccaccttcaccacacatcagacccccatcaggggcggttgtggcaggcctgcttttgccgagcggttggtcttccctacgacaggcggctgacggtggctttcgggcatctgggcttccaaatcgattga

SEQ ID NO: 514277 - DNA, 135 bp, Stenotrophomonas maltophilia
atgagcatctttgaccgtatcgcccactcgcaggaacacagcttcatcgccctgcgcacaaatggcctgttggtcatttccctcaccggactggctgctctgaccgccaccattctgcctgccatcgtcgcctga

SEQ ID NO: 514278 - DNA, 429 bp, Stenotrophomonas maltophilia
atgaagaaccagaagggcttcacccttatcgaactgatgatcgtcgtcgcgatcatcgccatcctggccgccatcgcgctgccggcctaccaggactacacctcgaagtcgaaggtcaccgctgcgctggccgacctggctgcgcacaagacccagttcgagatggaagtcagcaacggcaaggctccgaccctgcagactgcaggtttccaggctgacaacaccggcaactgctcgaagattgacgtcgctgatagcggcatgacctgcaccatccgtgacccgggtcgcatcggtgccgcctccacgctgaagctggcatatgctgaagccaccgtggatgacaagggcgccatcactaaggcgggtggcttcacctgcactctgtctgacgtcaaggcgaagtacgctccggccggctgcaactga

SEQ ID NO: 514279 - DNA, 2952 bp, Stenotrophomonas maltophilia
gtgcacgacctgagagagagatcgttaatgacttcacgtaccaccgcgctgggccaggccatccgttacgccctggcaaccaccgctacgctggctgccctgccggccttcgcccagagcagcagcactgcaccgaccaccctggaccgcatcgagatcaccggttcgcgcatccgccaggttgacgttgaaaccgcccagccggtcctggccctgtcccgcctggacatcgaacgccagggtttcagctcggtgtcggacatcctgcagaacgtcaccgcgatgggcagcccgaccatcagccgtgccaacgttctgtcggccggtgaagatgccggtggtacctacgtcaacatgcgcaacctcggcacccagcgcacgctggtgctggtcaacggcaagcgcctgggcatcagtacctccggcttccaggacgtgtcgaccctgccagtgtcggcggtggaacgcatcgaagtgctgaaggacggcgcctcggccatctacggctccgacgcgatggccggcgtgatcaacatcatcacccgcaccaacgtcagcggcatcaccgccaacgtctaccacggccagtacagcgaaggcgacggcgcgcgtgaccgcttcgacgttgttgccggctggtccaacgaccgcttctcggccacgttcgctgccgagcactccgaagaaaaggccgtgtgggcgcgcgaccgcggcttcagccgctacagcaacaccgaccgccacccgaccgatggctggaccaccaacagccagtggggccagttctatggcgtgaagggcggcccgggctgcaccaaggccgccggttgcgactacgcgctcaaccgcggcagcgacccgaccaacccggccaactaccacttcaccgacccgaccgcgttcaccggtgacgtcagcaacaccaatgatcagatgcacctgagctatccgatcaagcgtgattcgctgtacttctcgggccaggccaacattaccgacaccgtgcgcttcaaggccgagctgggctacaacaagcgctcctcgacccgcgtcaccgccggctatccgttcgatgtcgacgtcgccaagatcaacccgatgtcgatcgacagctacttcaatccgttcggcaaccagcatggctacgccacgccgaccgcagtgaagtggaaccgtcgcctgtgggagctgccgcgcaccagcaccagcgaactgaagacctaccgtgccgtggccgcgttcgacggctcgttcgagatcggcgagcgctacttcgactgggaagtgggctaccagtacaacaagaacgagctgcgccagcacaccaccggcaacctgcacaagggccgcgtacaggccgccaccggtccgtcgtactacaacgccaccaccggcaaggtggagtgcggcaccccgggcgcgacgatcgccggctgcctgccgtggaacccgctggttccctacggcgtggaaagcccgtatggcatgaccaacaaccaggccctgcaggactggctgttcccggccgagaacgccaccggccgcaccacctccaagaacgccttcgccaccatcagcggcagcctgttcaccctgcctgccggtgacctgggctttgccttcggcgtggaaaaccgcgaggaaaccggcaagttcgtgccggatgcactggcccagactggtgcgaccaccaacctggccgctggcccgaccggtggctcgtacaaggtgaaggaagcctacctggagttgaacgtgccggtgctggccgacctgccgggtgcccgtgagctgagcctcaacgccgcgacccgcttctcggactacaacaccttcggcaacaccctcaacagcaagttcggcttcaagtggaagccgatcgaccagctgctcgtgcgtggtacctgggcacagggcttccgtgccccgaccatctccgacctgtacggtggtggttcggaaaccttcgccaacttctctgacccgtgcgacagcaagtacggttcggccaagagcagcgccgaagtccgcgcacgctgcgcgaaggacatcgccgatgtcgccaacttccgccagctggacagcagcaacaagccgaccgaaggctcggttgccgctacgccgaccccgttcatcggtggttcgaacccgaacctgaagccggaaacctcgaccagccgcaccctgggcgtggtctggagcccgaccttcgtcagcaacctcaatgtctcgctggactggtggaagatccgcatcgacgacaccatcgtcgatgacagcccgaaccagatcctgatcgactgctacgagcagggcctggccgatcgttgcgcgcgcttcacccgcaatccgtccaacggcatcgtcaccggcctgaggttcggcggccgcaacgccggcttcgccgaagtcgaaggctacgacatggacctgtcgtaccgcctggagaccgactacggcaagctgagcacctcctggtcgaccacctacgtggccaaggacatctcccgctcgtccaacgacagctcgatcgtgccgaccgtcagcaacggcatcgtcaccaactcgggcatcggcttccgcgtgcgttcgaacctgaccgtgggctgggacctggagaacttcggcgtgagctggaccgcgcgctactactccagcgtcaaggaacagtgcgtcaacccgaccaagtacgccgatgagtgctccgatccgggcgtgatcgcgccgtggtacaagggtgcgcgcaactacaatgagcgtggcgcggtgaccttccacgacgtgcagttccgctacaacctgccgtgggatgccaccgtttcggttggcgccaacaacgtgttcgacaagcagggcccggtcatgtacaccaagccgcgctcggtcttctcgtactacggtggttacgacatcggtcgtttcatctacatgaagtacacccagcgcttctga

SEQ ID NO: 514280 - DNA, 1134 bp, Stenotrophomonas maltophilia
atgagccggcggctgtggtggtggctggtgctgttcagtgcgctggtgctggtggtgcctcaggcgatggcacagcggccgccggaaacgcatccgaccgatgagcatcgcgacatcgtgatgagttgggatcggtctgcgatgccgggggacatcgtgttgatgccaccgcgcacgctgttggcgtacgaccatgtggatctgggcaagcgctacggcgagctgcatctgacgtgtgtttcggatagcagcgcggagagggggcggtgccctgtggaggggattagagatcagaacctcgggctgaagccaattgctcttacgttcgtggaacagcgctcacagatgcataaggaagtgcgcatcagtggcggcctttcccgcgcaatggacaacagagcctgtttgggcgacttctggcaatcggggatcttcgcgccttggtcgacctacttcactgtctgtccgggggctaacgctgcgggaaccggtgctcagcttgctcttgaaatgccggagctaatcgaacttgtcgcaggcatatggactgcaacgctcgaactccgcgcgaacacccccgacacccgcaacctcgccacgtacacctaccgtttcgaactcacgatcaccgactacgacgcggtctccatctacctgcctgaattccaggaagccgcccccaccgttggcctcaatctcagctacgaccccattgcccgaacggtcggtggccgcgcacatctggacatgtgcctgtacgacggcctcggttcgcagagtgagtacctgggggtcaccgtgcgcgacagcggcacgcgccctcccggtcccaccggctattcggtctggcataccgacggcgccggtggtgacagccaacgcatggactacaccgtcaccctcgaccacaacggcgcgcgcattccattgcgcaacggcgtggaagaacaactgcgcaacatcgatacggcgcggttgcgtctggtgatgttgcccggcatgacccagccggtgttctgcgtgcctacgccgctcaccctcgataccccgcgcgtacccatcgacgagaaacgctctggtgcctatcagggcgatctgaaggtcgaactgcgcctgcctacctcccgcccgtga

SEQ ID NO: 514281 - DNA, 912 bp, Stenotrophomonas maltophilia
atgagtggggcacggaagagacagcttggtgagttagtcttctactatcgacggaacgccgaaaggcatgggacgaaagaccttttcgttgaaggtggcggcgacaaactccttatggatagatatttttccgttcgaagtgtttctgaaaaatttagtcgagtagctgtgtattcgatggatagcatagatttttcaggaacggatttctccgcatttgagctccctgcgccatcagctcgaagctgcgtaattgccttgcggaagattctgggcgattctggcgccagcttgaagaacttggcatttctaatcgatcgagatatcgaagatgttcgcccgactcctcatgtgaaagacattcttttgacggattctggcgcattgccggttcatttgtttgataacaatgctgaggagcgaatttgcggattgattcttgatggaagaattgatgtatctgtttttaagcgatcagtcaatagcatctgcaggggggtttataccgttcgcgccgctgccatggtgaagcaagcacccgccagaatactgtccccgaaggggtttattcgaggcaatgtggctgctggctacgatcttgatgttagaggctacctggaacggtgtctttacgcaggaaattgccatgagcgatatgatgagatttatgaggcagttggggatgttgattcccggctagatgctctagagctgagacccttttctttcataaatgaccacgatctttatgtgacgctaaaagagatttttgatctctcgggtgatagggctaatcgttcggcaaaggatatcgaggggttgattctgatgacgtatgaccattctgagcttgagcgacatagtctatttgaaggcctagatcgctggctctccgtctctccatcggcctag

SEQ ID NO: 514282 - DNA, 1206 bp, Stenotrophomonas maltophilia
atggggacaacggaactggaaagacgactattcttaatattattcgaagccttatttccagcgaggcggccgggggggcataggagtaggctgtccgaaattccattttcacgtgcttgcgtgcacctggaaggtgggggatgtattgaggcaagaaagaaggatggattgactggcccatatgacctttctgttcgagcttcgagtgaatcggagtccgtgcatttctatgtaaagcttagaaatgggcaaattcagcatgagtatatgggtaaggatgggcgagataaatttaattcgctgctgtccgagatagagtcaataataccttcggtggtctatctggatgacaagagaacattctccggctcacctcgccaaagtaggtctgtcagtcgttcagttgtagatggtcggcttgttcggtctgtagacgagggggagggtaggggggatgatccagtcacgcagtgtattgatgagctgacaaatgctgttcgtcgagaggcattctttctctcgaatagaggaaatagggatgcgcaatctatatacacggatctggtaaagggcattacttcgtttccggaatcaaaagtagatgattctatttttgaggtcaggagtgtgctggagaagttggaggaaaagagtaactatttttctcgatatggattggcggcaaaaatagaccaccgtgaaatgatcgaggcgctggaagattcgcctgaatggcaacgggtttttgttaattccctcgtggggccctatgtgaagacgctctccgcaaggctcggggccgtcgaggctcttcatagaaaaattgatgtatgggtcaacagtctcaatgacttcatggtgtcgaagtcttttgcatttagcgttggggaaggcgcagtaattagctcggcgtcaggacgcaagctatttgcaccatcactgtcctcgggtgagcgacacctcattctgctgttgaccaaagcctttctcctcggaacaaaaggaggggttatgatcgtagatgagccagagttatcacttaactcatcctggcagcgaagattgattggaagcttgttggatatgtttgccggcggcggatgtcagctgattgttgcttctcattctcttgagatttgcagtcaatatgaaaatcaaataatggagcttagggatgagtggggcacggaagagacagcttggtga

SEQ ID NO: 514283 - DNA, 600 bp, Stenotrophomonas maltophilia
atgacggcccatcccaccgccgcacgcacacccaaagccgcgccacttcctcgctcgcgcctgcgcgctcgcctcgtgctggggggcttcgccgccgtcggcctcgctgcgctggcctgggcggctttcgtgcagccgttgccgcgcctgatctacaacccgtccgacagcgttccggtcggctggtatcgcgtcgatccgcagcgccacggcgccgattcgctgccacgtcccttgtccgtgggcagcgtcgtcctgaccacattgccgccagatgttgccacgctcgctgcgcagcgcggctacctgccggcacacgttccgctgctcaaacgtgtgggcgcggtcgcgccgcaacacgtctgcatcgtcgccggtcaggtacgcatcgacggcgtgccggtggccgccgcgctgcctgccgatcggctgggccggctgctgccatcctggcagcattgccggccgctggccgagggcgagctgttcctgttaagcgtgaccaacccggcgtcgttcgacagccgctattttggcccggtcagcgcatccgccgtgatcggcatcgcgcatccggtctggctggagtcccgcccatga

SEQ ID NO: 514284 - DNA, 546 bp, Stenotrophomonas maltophilia
atgaccacatcctcattgtctgctgccgcacctgccgccatctcggtcacggctgcgcacgctgcaccgtccagccagccgggcagcgcgccgttgacgcgcgtatcgctcgcctacatcgaaccgcgcttcaagctctacttgcgcttcggtgaaccagcgcgcacgctccagctcgatcgctggcggcgctgcgccatgttcatgccgggtgcaatgctctgccgcgttcgctggcaggccaacgactacggcacgatccgctggcagctcatggtgatgcaggcggctacaccgcttgacgccgtacaacgcatccccggcgtgcagccaggcgcgtgcttgctgctgcatgccgaaggtgatgccaatgtgcgcgccgtgctggaacgcatcgacggcatcgaggcgctggggatcgctgccatcgacgtgtcgcccgcctactggcgcacgctcgccaaccggctcgccgcgcatttgccgctgcccggatacaccgccgaccggcacgccgcctggctggccgggagggcgctgccatga

SEQ ID NO: 514285 - DNA, 288 bp, Stenotrophomonas maltophilia
atgatcgacaacagcaacccacccaacggcaaacgcccggccaagcgggtcggcatcggcgcgcgtccgcccgccaatccgcacgccgaagcctggattcgccaaggcgacgcggatgcgctcaacaagggcgacctctacaccgctcgcctgacgctcgacatcacgcctgccatgcgggcgcgcatcaaggtgtcggccttcacgcaaggcgtgaccgtggccgacctgctgcgcggtttgctggagcgcgagtttccagaacaccgcagggagaacacgccatga

SEQ ID NO: 514286 - DNA, 639 bp, Stenotrophomonas maltophilia
atgatcgtcgccttgctcaaccagaaaggcggtgtcggcaagaccacgctcgccacgcacatcgctggcgaactggcgctgcgcggcctgcacgtcgtcctgctggatgccgatccgcagggttcgtcactggactggacgcagcgcagaagccagcagggcttgccacggctgttcagcgccgtgggcctggcacgcgaaacactgcaccaggaagccccagaactcgccaggcgggccgatcacgtcatcatcgacgggccacccaggatcgccgccttggcgcgctctgcgctgctggcagccgaacgcgtgctgatcccggtacaacccagcccctacgacctgtgggccagcgccgagatggtggcgctgatccgtgaggcccaggtgttccggcctgcgctacgcgcggccttcgtcatcaaccggcgcgtcagcaccacggtgatcgggcgcgaagcacggcaagccttggccgaacagccgttgccagcgctgcgcagcgaggtgcgtcagcgcatcgtctttgccgacagcgtggctgcgggtcgattggcgcgagagacagcccccgatagtgcagcggcgcaggaaatcaccgcgctggtcgatgagctgctgcggtggccgtcatga

SEQ ID NO: 514287 - DNA, 825 bp, Stenotrophomonas maltophilia
ttgcagcagcgagaacagctcgacctgtttcgcgcactgccgggcgaggacatggcaccgcgcgatgcccaggatttgatggcctatccgttcttctcgctggcgaagtcgcggcgcaccgcgccgatcgacttccgcagcggcaacatcaccattcgcgtggaaggcacgcaggagcatggtattgccaccatctgggatgccgacatcctgatctgggcggccagccagatcgtcgaagccaaggacgcgggtatccagccgtcccggcggatgcaggccacgccctacgagatcctgcgcttcatcgggcgcggcaaatcgctgcgcgactaccagcgtctcaaggccgcgctggatcggctgcaatcgaccgtagtggccacgtccatccgcgaaaccacgggaaggcgcttgcaccgcttttcgtggatcaacgaatggaaggaactggccgatgccagaggcacgccgctgggcatcgagctgatcctgccggactggttctatgcgggcgtgctggacgcagccctggtgctgaccatcgacccgacgtacttccgactcatgggcggcatcgagcgctggctgtaccgcctggtgcgcaagcatggcggcaggcaggaatatggctggcagttcgacttccggcatctgcaccgcaagtcgggcagcagcacgcggttttcggatttcgcctacgacctgcgggcgctggtcgcccggcaatcgctgccggggtacgagcttggcatcgtgcagattcccgaggacgacatggaattgctgaccttccggcccgcgccgcagacggcacggggataa

SEQ ID NO: 514288 - DNA, 282 bp, Stenotrophomonas maltophilia
atgcgacccgctcccttgcggcctgccgccgctcccgttgccacacccgcacaaccccaacgctatctcaccaacgacgaagccgccgactacctgcgcctgtcaccgcgcacgttggagaaacagcgcgtcatcggtggtggcccgaagttccgcaagttcggtcgccgcgtcatgtacgccgtggccgacctcgatgcttgggcggaaacgcgcagcttcgagaccacttccgaccccgaatatgccgagcaccactcggctgacagccgtgcgcgctga

SEQ ID NO: 514289 - DNA, 807 bp, Stenotrophomonas maltophilia
atggccgatcgcagtgccgagccgtggtatgccacggcggcctatctctacgttctgcatctggatagcccggcgctggcctgggagtacctgcgccgccatccagactatcggcacgactggctgcgccgtcgtcgccaaccggatactgccgggcattgggggctgcgcctgctggaagatcccgctctggatgcgcgggatgcgcacccggcctggttccccgatcacgatgccgtggtgcagctctacccggatgccgatccgccgcccgatgcgctgtgctttgatttctggaggctgccgggccacaaacacctgatccatgacggcaagcgcctggtgctggtggcgcactggcccggctgctgcctgcgtttcgtgctcgcgccaggcttggccgatggcatggcttacgcctatgccatccgggcctgcgccgcgccttgcgaacgctatgcagccctggcgagcgaattgaacaagatcgccgtagcagccggtgccgtacctgcggcgaccgtccggccacgtccgccgctgtccgcattgctggaactgcacacgcttcaggcgctggacgcgaccctggcgggtgcgtccttgcgggaggtggccgaagggctgtttggtttggatgccgttaccgccgactggcacgccgacagcgctctgcgcgcgcgcgtgcgacggctggtgcgccggggcgatgggctgatgcgcggcggttatcgccgtctggcacagcttccggttgtcacttcgcatgaggggggacgtttcgcaacccctgcagaacgtccctga

SEQ ID NO: 514290 - DNA, 348 bp, Stenotrophomonas maltophilia
atgactccgctcatcaccgccgacgagcgcacgcgcctgctggccaacggccaggcccgcgctgccgggcaggacaccgacccgctgcccgtggcacgcctgttcacgccagatgcgcatgccacctggctgctggcttcgctcgacccagccgatggcgatactgcccacggcctgatcgacttggggattggcatgcctgcactgggaacggtgaagctgtccgacctggccgccatcgtcgggccgcgccagcagcccgtgatgcgggatcgctacttccagccggtgcggcggctgtcggagtacctgcggctggccgaagacaacggctcgatcaccgattga

SEQ ID NO: 514291 - DNA, 291 bp, Stenotrophomonas maltophilia
atgcagaagcgaaccgtccagcgcggccgaccggccggctccaccacctttgacgccgagttggcccaggctttcggcgtagcggtgcgtgcgctgcgcacggaacgcggcatcgcccaggaaacgctggccaacctggccggcattgagcgctctcacatgggcaagatcgagcgcggcgagcatgcaccgaccctggcgatcatcttcaagatcgccagtgcgctggagtgcagcacagcagcgctgatggccgaagcggaaaaccgactttcggcttccgagacgtag

SEQ ID NO: 514292 - DNA, 690 bp, Stenotrophomonas maltophilia
atgcacggcgtgtcggcgcactgcgccgccgggctttcgggctgtgccccgtgccgtcttcgccgtcacggccattcggcatcaatccctcacgccttcgcgcctgcggcgctgcgcgctgcgcttgcgttgaaagtcgcgcctcgccgcaatgggcgggcttgtggaactacgccccggcttgctgccgcaggttgcacgaaagcgtgccgtcctcgacgctggcagttcgtcgcctgtacgtcacgaaggacggttcaccgacacgccgcccggccttgcaatagagcttccacgccacgcctcaagcaagaggccgcctgctacgtcagggacgctttcaccttgtcattgggcgttgtccttgcccgtgccagggcgcaaaccggtgaagccgtcacgcgggaagccaagtcggccatgttcctttcggagcgggtcggcccaaggccgtcctgtctgtttgtgaatcctggcggtggccgggcttctatggctgcaaccttccagcgaaaacaatttcccctgcgctacgcgcattcctcgcgggacaaattcttttcgcttccaggcgctccactgcgttgcgcccgcaagcggtgcagccagcccgtcccccgccggtcggatcacaacaggacgcgatgggcgcgaaccctgttcaaccgaaaggaaattcatcatggctaa

SEQ ID NO: 514293 - DNA, 537 bp, Stenotrophomonas maltophilia
atgaaccacttcatcgtcatttccggctgctcaggcggcggtaaatcaacactgctcaccgaactgcaccaacgcggatatgccgtggtggaagaaccgggacggcgcatcgtgcaggaacaaacgcatacgggcggacaagccttgccgtggctcgacatggtggccttcttgcgccgagccatcgacttggcgcgagaagaccatgccaatgctgcacacgacaactcgcaatgggtgttcttcgaccgtggcgtgatcgactctgcagcagcattgcaggcgctgaccggcgagcctgtgctggacaaacttggccagcagtatcgctaccacccccatgttttcctggcaccgccgtggccggacatttatgtgcaggacgcggagcgccgccatgacatggctgccgcgctgctggaattcgagcggctccagcgcacctatccggcgctgggctataccgtttcgctgttgcccaaggtcggcgtagcgcagcgcgccgactttgtactaaaagctctggcagttcgctga

SEQ ID NO: 514294 - DNA, 2085 bp, Stenotrophomonas maltophilia
atgaacgccatcaaccacaccgaagcccaagccatccacgccacggccatcgccgcgcctgccgtcctgctggaagccgccgacccgagcaagaatctgattcttgtgccgctgtcgcggctggtatcgcgccctacgggccgcaacgtgcgcaagaccccgcgcatgtcgattcccgaactcgccgccagcatccagcgtgtcggcctgctgcaaaacctgatcgtgaccgcgaccgctgacggcgagcgttacgaagtcgtggccggaggccgtcgccttgccgccctcaagctgctggcgaagaaacaccgcatcagcaaggaatgggaagtgccttgcctgctggtggccgatggcaccgcccgcaccgccagcctgaccgagaacgtgcagcgcgaagccatgcacccggcagaccagttcgaggcattcgccgcgctggtggccgaaggccgccccatcgaggacattgccgcagatttcagcgtcacgccgctggtggtgcagcgccgcctgaaactcgccaacgtgtcgccgcgcctgctggccgactacggggccgaggccgtgagccttgaccagttgatggcccttgccatcaccgacgaccacgccgcgcaggaagccgcgttctacgatgcgcccacatggcagcgcagcccgcacaacctgcgcgaccgactgaccgagcgcgagattgatgcccaccggcatccgctggtgcgcttcgttgggctggatgcttacgaggctgcaggcggtggcacccgccgcgatctgttcgcggaagccgatagcggcgtgtatctgaccgatgccacgctgctggaacggctggcgcaggacaagctggccagccttgccgccgaggtgaaggccgaaggctgggcatgggtggatgccccccccggcacgacccatgccgacctgcaagccttccagcgcgccccgagacagcgccgcagcccgaacaagcgcgaagcccaacgcatcgagaagctgcaaaccaagatgcaggcgctggccgaagccgtggacgccgcgctggacgacgaggacgaggaaaaggccgacgccttgcaggaggaaggcgaacgcctgggcgaacagttgcaggcgctggaagatggcttgcaggactacggggaagccgtcaaagctgctgctggtgccatcgtcaccatcgaccgcaacggtgaagctgtgatctatcgcggtctgctgcgcgaagccgaggccaaggcactgcgcacgcttgaacggctgcggcagggtttcggtagcgagggccaagccgggaacgacgacaccggcgaggaagccgacgacgcccctaagcccgccgccatgtccgaccggctggcgcaacgcttgagtgctcaccgtaccgccgcgctgcaaatcgaagtggcccggcatccgcaggtggcgctggccgcactggtgcatggcatggtgcagactgtcttacaaggtagccattacggccacgatctgccgctgggcgtgaagctgacccagcaagatcggctggaaggcatggccccggactggccggaatcgcccgccgccgtggcgctgcgcgaactgcaacaggcagcgggtgaagccttgccgcaggacagcgccgaactgttcgccgcgctgctggcgaagccgcaggatgaactggtgcgcctgctggccgtatgcgtggcatccacggtcgatgtggtgacgccccgcgccacgcagcaccagccgggtgccgaactggcgcaggcggtggggctggacatggcggtatggtggcaacccaccgcagatggctatttccagcatgtgccgaaggccgcaattctggaagctgtgggcgaattcgcaccggagcacgtcacccggctggcgaagctgaaaaaaggcgacattgccagcgaagccgaacggctggccgatggcaccggctggatgcccgccatcttcgccgccgaagccacgcagcaggccgcgcaggaggtggtgacggacgaggcagccgaagcaccggaggaagccgccgccgtggcgaatgagcagccgcaggccgaggcactggccgcctga

SEQ ID NO: 514295 - DNA, 828 bp, Stenotrophomonas maltophilia
atgcttgcatcccgtttcgcttcccgttccccggtactgcgcagcgactccccgctgtccgatgaccagattcaccgcgtggccccgtccatctttgcggaagcgccccacgaaagccgttcccagcgttacgcctatatccccaccgccacggtgctgaccgaactgcgcaaggaagggtttcagcccttcatggtgacgcagacccgcacccgccacgaagaccggcgcgactacaccaagcacatgatccggctgcgccacgccagccagatcaacgcccgaggcgaagccaacgaaattatcctgctgaactcgcacgacggcaccagcagttaccagatgctggccggaatgttccgtttcgtgtgcagcaatggccttgtttgcggcgacaccgtggccgatgtgcgcgtgccgcataagggcgacgtggccgggcaagtgatcgaaggtgcctatcaggtgctgcacggttttgaccgtgcgctggaatcccgcgagtccatgcaggccatcacgctggacgaaggcgaggccgaagtgttcgcccgcgccgcgctgtcgctcaagtacgacgacccggacaagccagcccccatcaccgaatcgcaaatcctgatgccgcgccggttcgacgaccgccgcccggacttgtggatgaccttcaaccgcatacaggaaaacctgaccaaaggcggtttgtctggacgcagcgccaacggacgccgccagcagacccgcccggtgcagggcattgattccgatgtgcgcctcaatcgcgccctgtggctgctggccgacggcctgcgccaattgaaagcctga

SEQ ID NO: 514296 - DNA, 483 bp, Stenotrophomonas maltophilia
atgcttaccgtgggggcttgcctagtgcatcagccggaaatctcattttcgataatgttaaaaccagttagtgaaaaatcggttgcagaagcactgaagatcacaggccttactttggagcaagctgagaatgaaggcgtaaatccatctgaggccatgacgaaattttcagtttggatcgccaagaatgtccccaaggaaagctctccggtttttgtgggacttaacgccccatttgactgggggtttgtaaattactattttttgaaatacctgggcgaaaatccatttggcttcactgcgctggatattaaagcgctttttatgggtgctacgggttgctcatggtacgagactagatcaagtgctattgataaagttgtgcatcctaaccaaaagggagatcacgatgcacttcacgacgcaaaatatcaggccgagctttttagattggttcgtgccttggctgaacggagtgactaa

SEQ ID NO: 514297 - DNA, 510 bp, Stenotrophomonas maltophilia
atgtcgcaactgtccttttcctcgttcggtgacgctttgctggctcgtgacgcccaggggcactacctgtcggcatcggtagatcaaattcttgaagcggcacgtcaggccatcgagttgaagatgcagcgtggcgctgagttcacttcgccggcgctggtcaaggagtacctgcgcaacaagttggcaggctttgaacatgaagtctttgcggtgctgtttctggatacacgtcaccggctgatcgagtacagggagatgttccacggcaccatcgacagtgcatcggtgtatccccgcgaagtggtcaaggaggcgctgaggctcaacgcggcagcggtcatcctctcgcacaaccatcccagcggaaatcctgagccgtcgcaggcggacaaggtgctgacgcagcggctcaaagaagcgctgatgctggtggaggttcgcatactggatcacgtcattgtgggcgctatggaaactgtctcattcgccgagaaaggactggcctag

SEQ ID NO: 514298 - DNA, 1203 bp, Stenotrophomonas maltophilia
atggcgaaaatcaaactcaccaagtccgcagtcgatgcggcacaagcccaagctcaacccatcgaactgcgcgataccctggttcctggcttcttgtgcaagatcaccccggcaggccgcaaggtgttcatgctccagtaccggacaaacgccggagagcggcgcaaacctgccttgggactgtatggagagctgaccgtcgaacaagcccggtcgctagcccaggagtggctggcgcaagtgcgccggggtggagatcctgccgcagagaaggctgcagcgcgtcaggcacccaccgtcaaggaactgtgcatcaagttcatggaggactactccagccagcgcaacaagctgagcacgcaggaaggctaccagagcgtcattgatcgcaacatcatcccgatgcttggccgcatgaaggtgcaggatctgaagcgccctgacgtggcttcgatgatgaagaagatggcgcacaagcccgccgatgcgaaccgcacgttcagcgttatgcgcaagatgttcaacttggccgaggtatggggctatcgtcctgacggcaccaacccatgccgccatgtgcccatgtacccgaacggcaaggcgactcacctcatcagcgacgaggaaatgggcaagttgtttcgctaccttgaccagctggaggcggaagggctggagcatgctgtgatcccgttggccatccgcctgcaattcgagtttgccgctcgcctttctgaaatcgtctcactccaatgggattggattgatctggagaaccggcgggtggtatggcctgacagcaagacaggcggtatgtccaagcccatgagcgaagaagcctatcggcttctttcgacggcggctcgcaatgcgacgacgccccatgtactaccgtctccgcatcaccccgatcggcatctaaccgatggcgagtattacaacggttggagtcgcactctcaaagctgcaggcgtgacgcatgtgggcacgcacggcatccgtcaccgttcagcgacggacatcgccaattctggcatcccggtgaaggtcggtatggcgctgacggcgcacaagaccgtggcgatgttcatgcgctacgtccacaccgaagacaagcccgtgcgggaggccgccgagttggtggcgaatcggcgcaaagcgatcaccggtgccaagcaatcacctgcggaggtgacagcatga

SEQ ID NO: 514299 - DNA, 501 bp, Stenotrophomonas maltophilia
atgaccctgaccggcaacgccccctgccgggtcctgatcgtcgacgactccgccgtcgtgcgccagatgctcaccgagatcctgtccagcgacccgaccatcgacgtggtcggcaccgccgccgacccgctgctggcgcgcgagaagatcaagcgcctggccccggacgtgatcacgctggacgtggaaatgccgcgcatggacgggctggcattcctggaaaacctgatgcgcctgcacccgctgccggtggtgatgatctcctcgctgaccgaacgcggcgccgacaccaccctgcaggcgctggcgctgggcgcggtggacttcgtgtccaagcccaagctggacgtggcgcgcggcctgcaggcctacgccgatgagatcatcgccaaggtcaagatgtccgcccgctggtgcgtgcggccgctccgaaactcctgctcgaagcagctcctgcaatgcgcccggctgcgccgcagttccgcaccaccgaccgcctga

SEQ ID NO: 514300 - DNA, 2379 bp, Stenotrophomonas maltophilia
atgccgtggatcaacaacctgaaactgatgccgaagctgctgttgaccttcggtgtcctcctgctggtgatgctgctgcagggcatcgtcgcctatcgcggactgcattcgctgaacaacgtcaccaccgagttggccggttcgcgcatggaaagcatccgcatggccggcgagatgcgcggcatgctgggcgagtaccgcaatgccgcctaccagcagctgatccgcgccagcgatgacgtcaaggccgacgcgcgcaagcaggccgtcgacctgcgcaccagcatggacacgtcgatcaaggactacccgaagctggtcgacaacccgcagcagaagaagctgttcgataccttcgccaaggaatggaaggacgccctggcctcctatgacagcgtcaccgaaatgctggagctggacctgccggacgatgccatcgataccttcgtgggcgagacccgcaccaagcaccgcaaggcggcttcggcgctggaagcgctgatcgccgaagacaaccgcctcgcccgcgcctcgcgcgaagaggccgcgtccacctattccgcctcggccgtgctgaccgtgattgccctgctgggcggcgccgcactcggcctggtgctggtctggctgttcgcccgtgctctggtcggcagcgtgcgtggtgccgtttcggttgccaacgacgtcgccggcggcaagctcgatggccacatcgacgtcagccgccaggacgaagtgggcgagctgatgcaggccatgcagcgcatgcagcgcgacctgcgcgagcgcatcgaaaccgaccaggccgtcgcccgcgagaacctgcgcatccgtaccgcgctggattacagctccaccggcgtctacctgaccgataccagcaacaccatcgtctacagcaaccgcgccctgcagcagaccctgagccagtaccaggacgaagtgcgccgcgacctgccggacttcgacgcccaggcctcgctgatcggcaagccggtcaccgtgctggagcaccgcggcgagatggaccagaccctgctgggcaacctgaaggcgcacggcgtcgcccgtcgcccgatgcagtacggcgacgcccagttcgcgcaggtggtgtcgaccatccgcaatgaaagcggcgacaccgtcggctacgtggtggaatggcgcgaccgcacccaggaggccctggtcgaagccgaagtggcgcgcgtcatcgcccaggccgccgccggcgacctgtccggccgcatcgacgccagcgacaaggaaggcttcttcctgcagctggcacagcagatcaacggcctgctggacgccaacgccggcagcatcgaacagatctccggcctccttgccgcactgtcgcagggtgacctgaccgtgcgcatgcacggcgattaccagggcgtgttcgcccgcatgcgcgacgacgccaacgccaccgccgcgcagctgagtgaaatcgtcacccgcatcaagcagtccagccgcgcgatcagctcggccgccggcgaaatcgcctccggtaacagcgacctgtcgcgtcgtaccgagcagcaggcggccaacctggaagagaccgccgcctcgatggaggaactgacctccaccgtgcgccagaacgctgaacatgcccgtcaggccaaccagctcgccatcggcgcgcatggtgtcgcttcgcagggcggcgacgtcgtcggccaggtagtcaccaccatgtcggccatcgaagcctcgtcgaagaagatcgccgagatcatctcggtcatcgacggcatcgccttccagaccaacatcctggcgctgaatgccgcggtggaagccgcgcgtgccggtgaacagggccgtggctttgccgtggtcgccagcgaggtgcgcaccctcgcccagcgctcggccgccgccgccaaggagatcaagggcctgatcgacgattcggtcggcaaggtcaacgacggctcggcactggtgcacaaggccggcgcgaccatgggcgagatcgttgcctcggtgcagcgcgtgaccgacatcatggccgagatctccgccgcctcgcaggaacagagtgccggcatcgagcaggtcaaccagaccgtggtgcagatggacgaaaccacccagcagaacgctgcactggtggaagaagccaccgccgccgcccgggcgatggaagaacaggccggccacctcagcgaggccgtttcgatcttcgtggtcgacgaagccgataccgtggttgcaccgccgcgcgttgctgccccggccccgcgtgctgctgcaccggcagcaccggctccggccgctccgcccgcgcgccgcaccgcgggtggtcgcccgatggccacggaactggccgacggggactggcaggaattctga

SEQ ID NO: 514301 - DNA, 402 bp, Stenotrophomonas maltophilia
atgaagctttcggtattgatcagcacgttcgttgtggccatgtccattgcaggtggtgctaaggctggccttgatccttggtgtaacccgagctattgcccgcccacgcccacctatccgggaaccggtgatactacgcgggaagatacctcctatccggcgacggtgtatgagttgcatcgcgattgcgtggagaatgcggagctgatgcgatcggccgccgtgaacgattatcttggctggtcgtacgaaatgaagaagacctactatgaatatgcgggagtcgttgcgttcattttcaaagggcccaacagttatggcctcatcgagctcagcttcaaggatccatactctcaggatcccttctggcccgggaacatattcaactattgcttcaaatag

SEQ ID NO: 514302 - DNA, 768 bp, Stenotrophomonas maltophilia
atgaaagtcagatatggagtgtctccgcaggcattgcttgcactgaataagctggatctacaacatcctgtacgttgtgtagcgcgctgttctcatgcgctggacttgatggccagtgtcgccagttgccgacttcgctactgcccacgttgtgattcccggccggatcgatttgagcggtgtgaacgtgctcggcgctatctgaagatgagccggaaaagggatgtcgcgcggataaatggacccctgctctgtctactgcacaagtgtgcggcagaagaggctgatcgttccggcagttttcgagtgaaccgtatccgggtggggagtagcgggaatccgttgagttttgttgccgctcaagtcgatgttgctcgcatcatcagggaaatatcaccctcatatcaatctcttgagaccttgcagaaagcttattttgcagtgttcatcatgagcattcttcatccatttgaggacggaaatgggcggacaatgcgcatgtggcttatctctcttgcggcttcgtccgaatcggctgaagttgcggaatttgtgtcgtttttggctctctatgtgaagttcaggcagcgtgatcttgtggtcgccatggatcagctttctgagggttttgtttccggtgtccaggagttccatgccgcagccgtaacgttcttcgaaggtcttttcgatgaggaggcgagtgcacgagtatttgattgggcaatctcaatcgagcctgaagggtctcttctagctcgagcctggtaa

SEQ ID NO: 514303 - DNA, 1431 bp, Stenotrophomonas maltophilia; identical to SEQ ID NO: 495226

SEQ ID NO: 514304 - DNA, 270 bp, Stenotrophomonas maltophilia; identical to SEQ ID NO: 509826

SEQ ID NO: 514305 - DNA, 540 bp, Stenotrophomonas maltophilia
atgaacaccgcggccagcacgacggtgatcgccaccaccgcgccggtgatctgggtcatcgccttctgcgtggccggcttcggcgccaggccttcctcggtcatgatgcgttcgacgttctcgatcactacgatcgcgtcatcgaccacgatgccgatcgccagcaccatcgcgaacagggtcagctggttgatcgtgaagccgatcatccacatgcccaggaaggtaccgagcagggcaaccggaatgaccagggtcgggatcagggtggcgcggaagttctgcaggaagatcagcatcaccaggaacacgaggaacaccgcctcgaacagggtcttgaccacttcctggatcgagatcttgacgaaggtggtgctgtcgtacggcgagaaccaggtgacgccggccgggaagctgggctgcagttcgtccatcttggcgcgcaccgcatcggccacgttcagggcgttggcgcccggcagcagctggatggcgaaggcaccggtcggcttgccgttgtactgggtatcgaagccgtag

SEQ ID NO: 514306 - DNA, 228 bp, Stenotrophomonas maltophilia
atggccggcgtatcggactgcagcgcgatcaccatcaggaagccggcgttggccttggccaccaccacgccctgctgggtcacttccgatggcagtcggggcgtggccagcgagaccttgttctgcacctgcacctgggcgatgtccggatcggtaccggtctcgaaggtcagcgtgatctgcgcacggccgttggaggcggacgaggaactgaaatacagcaggtga

SEQ ID NO: 514307 - DNA, 1011 bp, Stenotrophomonas maltophilia
atgcgacgtacccgtcatgaagccgacgatggactgcagcgtcttcacccgcgcctcgacggtctgctgcctgtcacccacctccagcttgtccagaacgctttcccccagcccataaggcggatggttcatcaccagcgtatccaccggccgatcgccactgtccttgaggaatgcgttggccagcaaactgaccagacacccttggctgtgcccgattacgttgatcgtgtcatccgggttcttcctgcggatcatccgcaccagcatcgccagccgctgcgcggccagcaccatgtagtggcgcgagcgcgccttcagcagcggacgggtggcggtaccgccgacggggttgctgggcagcaccttggcgatacgcccggagaagccatcagcccacatgtccggtatgcaactggtggcgttggcgaacgggccaccgttcttggcgctgtccttgtccaaacggttgccgtggcggtcgagatactcgccgtggggctgctccttgtcgatccacggcttgccggttctggggttgactccctcctcctcccggaacccccagtagaacggaattaccatgctgcgcggctcctgcgcttccacgcccttggctgcgaaccgtgcctgcgtgtgcgcgcgccggaagtacaccgcatctggatccgaggcatcgcgatcgccacagtccggcacccggtagtacgcaccgctgagcaacgattcgctgcgacccgtgcggtcaaggcgctcgctcagccccaggcagaggcccgtctcctgttccacgtaagcctcgcccacatcgttcaccccatgcaccaggatcgcgatggccggcttgggcatcggcaggatcaccttctgtacactgccagcgggctgggttaccacacgcccggtggcgatgcagcgctcagtggtcggacgggtcatcgagtacctccagctgtgcaacgctcatcgcgtctttctccagtagttcggtcatgccgagcgcatcgctga

SEQ ID NO: 514308 - DNA, 213 bp, Stenotrophomonas maltophilia
atgaagcttcagagtattcagaaacaggtcgatgaattgaagacttgtattgagtctaaagtaactcagaattttactgataaagacgtggacacgatcagcgatatgaagcgccggggaatgagtgaagagaagattgccgggcactttggaaccaaccagacgaaaattaatcgcttgctgcatggcaaggttccagttgaaaagacgtaa

SEQ ID NO: 514309 - DNA, 456 bp, Stenotrophomonas maltophilia
gtggatatccgccggcgcgagacaccggcggaggtcaagcgccgctggatggacaccaccgacagcgaggacaaccgcaagtcgttccattccagcatcgtggccaatgccgaacacagtcggatggtgacggcctatgacctgtcgatcgggcaggcgaagaccatcgatgatcggacgtattacctgtatctgtgcctcgtggcggattggaggacgccgtgggatgaggagagaaagatagcaatgactactgatcgggaggatgtgcgaaaagctctggatctatatgagcgccatggccacgaagatccactaatctcgcagaccttgcattatcgaaagacgggcattcttcccgagtgcgcagaatgcgaactacccactctggtctggacgcagactgccgctgacaggaagagctaccagccggtgcgaaagggaacgggcgcatga

SEQ ID NO: 514310 - DNA, 1542 bp, Stenotrophomonas maltophilia
atgatgaggcactcgctcctggtgttgctgtctcttcttctcccgggttgcgaaaagaagagcgccctggagcaggcctggcctgctgaccctgcagcgttcgcggcagccgtgcggccgccggcttcatacaacccttccgaactccccaacgacttcctgggcttgaatcagttgcccatctccggcgcccaagcgccaccgctaccggatgcccctgttatggagagagaccagcgcatgattaccctggacatcatcggcgtcggcctatccgtggaaatgttccgccagggcgatgtgtggcatgagttgaagcaggccgagagcttcagcgccaatgcgatgccgcccagagactcgccacgctggcgtcatgcgaatggtccgggagttcttgggaaacgccaagcggacgttctggaactgaccttgaaatccatgatcgaggggtggcccatccccagcgtgactgttacggcgacagatgcgaatgattggttgaggggaatccgatctgaagagcgattgcgggagatggatgcaagcttcatcaataatacccgcatgcccgctgggctccattggacccagatcaaacagctggacgtgatctacagcgacaccccagaagatgtagtcgaagccattttccggacctttgagcgctatccggacatacccgcactgctggtctacgttctagggccagatggcaagtacgacaccccgcgcaccgccagcacaccgctggccacctacgcggcgatggtggtggcccgtcgcgagcgggtggaatggctgcggccgtgggcgccgtatacccgcatgggcgaggacaccatctaccccggcttctggcagtgggcgcagacgcctcccaagcccttcaaggcgacgcccttcttccctacgccttggacgcgtgggcacttcaaacaatgggatgccctgccgacgctggcccaactgcaccgtcccgttgtggcccggctgaccgatgaagacggcgttcccctcaagcgccaggcgcggcacgacgccctggttgagggctggaaacaggcggcgggggagacctacatcgacaaggtgttctttgacaccggcaaggccggcacgggtattgccacgctgtcgccggtgctgcgtgagctcaagggcagcccggacctgctggagcccaaggaggggatcgacctgtacgcgcggctgggcgaaaccggtgcggcttcgccgttcgtgcagttggtactggccacgatgatcgctgccgagtcgaagcgggccagcatggtggtgccgatgcgccggccggaccaggtgacgatgatccaggtgagcccttcggacgatgagattccgtcgtacctgttcaagccacgcttgctgccgcagacctcgcaggcgccggacgttccgcagcagcaacctgtagcgccgcgctacgttgcgccgatgtcgatggacaaggaagccgttgctgccgaccgcaaggcactggatgagctgttggctgatagcggtcccgaggatatctga

SEQ ID NO: 514311 - DNA, 963 bp, Stenotrophomonas maltophilia
atgccaaagctccagcacgtactcatgcggcggcaggcctacctgcagtgccttgccgtcgcggatgcgcttggtgaaacagcgttgcttgaagcgttcacccagtgtatccagtacgggcagcgaacgctcgaacgcattctccatgagcctgggatcatgcattctccgatcattccatttccgcagatcctcggcggtgatcgtgacaacgtgatccggcacccccgcccagccgatgccctgcaccgtctgcagggccacggtctgatcgtccgggcagaagtacaggtacaccttgccgcgattgtcgcgctcgctgaacgcactactgcccgcgctgaccgatgtgcgctgcgcctgctgcggcccccagccctggccgaccaccttgccgcgggtggcatcggccagcgtggagaaccccggcaccgcatgcgaggtgccggtcatgaaaccgacgatggactgcagcgtcttcacccgcgcctcgacggtctgctgcctgtcacccacctccagcttgtccagaacgctttcccccagcccataaggcggatggttcatcaccagcgtatccaccggccgatcgccactgtccttgaggaatgcgttggccagcaaactgaccagacacccttggctgtgcccgaccacgttgatcgtgtcatccgggttcttcctgcggatcatccgcaccagcatcgccagccgctgcgccgccagcaccatgtagtggcgcgagcgcgccttcagcagtggccgggtggcggtgccgccaaccgggttgctgggcagcaccttggcgatgcgcccagagaagccgtcggcccacatgtccggaatgcagctggtggcattggcgaagggcccaccgttctttgcgctgtccttgtccaggcggttgccgtggcggtcgaggtactcgccgtggggcgcatcgcgcttcacgttgggtcgtaa

SEQ ID NO: 514312 - DNA, 321 bp, Stenotrophomonas maltophilia
gtgttgtcgcctgatggcctggtcaatgtccatgcctaccccaattaccccgagccagttctccgtgctttcaaccgcacttgcgatatcgtcagccgttgttctgctttcgtggaccgcgtccctgctatcgccgaagcaatcgacgaagttattgcctggcgttgggcgggcctcatcaccgaagaacagcaggtccacctcttcggccagctccgggtctactgcctcgaccccggatccgccgtcctctcgggcacccagtcggccatcgagctcgacacctgggaagccgagcgagccgattcccaagccgcgtaa

SEQ ID NO: 514313 - DNA, 375 bp, Stenotrophomonas maltophilia
atgagcacgcaaaaaccgttgaccgatcccaccccgaacgagaacggggaagtgatgatgttgtgtttcgagaaggactcgatggcgaggtatcggccggtgatcttcatcggcccaccgaatgccccgtctgaggctcaggagctgatcgtcggcacctggtcttacggcctgcgaaaagcacagacgcgagggctgcatctgtatttcgtgacctacgaagaacgctaccgtttcaagcatccggaggatccgcgccgcgacggcaccgagggtccgttaccggctcacgttgttgcagttcggcacggtgatagctactgctacaccggcactttcgaccaggacaaggaggtggccagtgttgtcgcctga

SEQ ID NO: 514314 - DNA, 333 bp, Stenotrophomonas maltophilia
atggcgcgcaaagtaaaccgaagtccgcgtgtccaggtaaccctctcgccggaagccatggccgctctcgatgacctggccaacctcagcgggcagtcaaaatccgccctgatttctgagttggtggacatcgcgttgccggccatgagcgtgaccctcgacgcgctccgggttgtacatcggcagccggaagaggcacgaaagttgttgtcggagttcgctcatcagcagaccgcccacctggcacaggcacagctcgacctcgacgctgcggtcgatgccaggacggtcaaaggtaagcggcgaaaggctcggggtgatctgaatggatga

SEQ ID NO: 514315 - DNA, 1431 bp, Stenotrophomonas maltophilia
atgaaacggtttatccagggtgaacatcgaggtcaaagcaccttacttcccgaaagcctcgacgactacgtcagcgataccaatccggttcgggtggttgacgttttcgtcgatgaactcgatttggccaatctaggttttgatggcgtcattccagccgaaaccggcagacctgcctaccacccggcgatcctgctgaagatctacatctacggttacctaaaccgaattcaatcgagccgacgtctggagcgagaagcccagcgcaacgtcgaactcatgtggctaaccgggcgtttgatgcccgatttcaagaccatcgccaacttccgaaaagacaacagcaaggccattcgcggcgtctgccgccagttcgttttgctctgccagcagttggggttgtttgacgaaaacctggttgccatcgacggcagcaaattcaaggcagtgaacaaccgtgaccgcaatttcaccagcgccaaactgaagcggcgcatggaagaaatcgaggcgagcatcggccgttatttggctgcgctcgatgcggctgatcgacagattcctagcgcctccgcgccagacattgccagcctggaagataaaatcgccaagctcaaatcgcagatgaaagagcttcaagggatcgaaactcagctcaacgattcccctgacaaacaggtttcgctgaccgacccggatgcccgttcgatgatgacgcgcggcagcggtatcgtcggctacaacgtgcagacggcggtcgatacgcagcaccatttgattgttgctcatgaggtcaccaacagaggttctgaccgcgaccaactcagctcgatggccaagcaagctagggaagccattggcgcagaaacattgtcggtagtcgccgaccgaggctacttcaagggtgaagaaatcctcgcctgtcacgatgcaaacatcaccgcttatgtgccaaagccgatgacttcaagcgccaaggctgatggccggttcaacaaagatgccttcgtttatgacgcgacgaaaaacgaatatacatgcccggctggagaggcactgatttggcgattctccagcgttgagaaaggcatgaatatgcactgttactggagttcaaagtgccagagttgcgcgctgaaaacccagtgcacgccaagcacaaatcgtcgagtaaggcgctgggaacatgaagcggtgctggaggaaatgcaacaccggctgaaccaagcaccggagatgatgcgggttcggaagcggactgttgagcatcccttcgggacgctcaaacaatggatgggagcaacgcacttcctgactcgaaaactgaatggggtgagcgcagaaatgagcttgaatgtgctcgcctacaacttgaagcgggtgatgaaaatcatcggcaccgaaggcttgttgaaggcgatggcggcgtaa

SEQ ID NO: 514316 - DNA, 1098 bp, Stenotrophomonas maltophilia; identical to SEQ ID NO: 324053

SEQ ID NO: 514317 - DNA, 279 bp, Stenotrophomonas maltophilia
atgtgtgagcgctgtatcaccaaacgtatccgcgagggtcaagtcctgaagtttgggttgtcgccgcatggctgctggatggataccaccgaccgggaagacaaccgcaagtcgttccactcgagccacgatgatccgcttatcgcgcagaccctccactatcgcaataccggcatcctgcccgagtgtgcgaaatgcgagttacccactctggtctggacgcagacggccggtgatcgaaagaaataccagccggtgcgacagggcgtaggcgcatga

SEQ ID NO: 514318 - DNA, 1485 bp, Stenotrophomonas maltophilia
atggtgatgccgcaaccggaagcgcccgaagccgcactgcgcgcgatgatcgaccagatcctgaaggggttcgtcgatgagggggtggatcgtcttcattggttgcagacgctgtcgccacgagggttgttcgatcttgatgagcgtcgacgcagctggtgggcccccaatgacgacaggctgctcgccggcctcaacgcctgcgcagcggcaccgcttgatctgcagacggcggcactgttccttgcgggctcggatggcaatggtcacacgcgcgaggccgcgttgcagcggatgcgttcggtacccagccatctgacgttgtcctgcgccttgctccgctgcaatgactgggtgcccgaagtgcgcgcggtggcgcgggatgtcgtgatgtccctgctcgaacagtgcgcggtgcaccacgtgctgaaggcctggccgatcgctgtccgcttgcgcgatgcacagcgggtgcaacgggaatggctcgatggcggcctgtccgcctggctgtcgtcgccagccgctcaccccgttcttgaaggactgctgggccaccccgaggcaagaacccggttggcggccttcaccatcgccctgcagatccatccagacccggaggaactgcgctcgctcgcgctgctggacaacagcccgcaagtctcgcacctggcacttgcacatctcttggcgaacggaacgcctggggaggtcgaggcgcaatgtgtcatggcgttggccgcgccctccagcggggtgcgtgccgcggcgttgcgtgcactggtcgaacgtaacgtgccgggtctcgatgcccacatcgaagctgccgcatttgaccgttcgcgcagcgtgcgcagattggcggcgtggctgcttcagcagcgcgatgcgctccccgcgatcacgttgtggcgcgatgaacttcagcagcgtacccgcgggcgctggcgcgaggcattggcagcgctgggcgatcacgccgaagctgcagatgcgaccgcgcttcgcgcgttgctgccccaggtgtcggcgcgccatcgacgcagctgcctgcgaggttggctgcgggccgaagacggtgcacgtctggagtggctgcgtgccgcactggaagagcctgggcggactgtggacgagttgctggcccgtgccacgcccctgtgggccggcgaactggatccgctccggctgatggcgttctgccacgatggtccttcgcacgtggcacaggtcggcctgctgagccagttgcgcagactacccctttggcagcacctcgatctgctgctggacgcggtgccgctgcgcgccgaggagcgagcttggcacctgcgactggtggagaactggcttcaggcgagccagcactactcacccctgggggccgcccgccgccaggctctggtcagccggcttgaagagggcaggcacaccctgccggagaccgtcggcgcgcaggtgctggcagccatacgccaggcctga

SEQ ID NO: 514319 - DNA, 2862 bp, Stenotrophomonas maltophilia
atgcgcaagaccaaccgccttattacgcccagccgcctgccgctcgccctggcagtgattgcctgcctgcaggcagccccggtgctggcccaggaatccacccgcgaggaagcagcggcgtcaagtgcttcgacgtctgacaagaaggccactgatcttgacaaggttacggtcaccggctccctgatccgtcgcgcggactatgaaaccacctcgccggtgttcaccatcgacaccgagcgcaatgccgcccagggccagaccagcgtcagtgaattcctgcagaagtcggcgatcggcgccgccgaaacgcagatcaccaatcagttcggcggcttcaccaccaatggtggtaccggcgtacagacgttctcgctacgcggcctgggtgccaatcgcacgcttatcctgcttgatggccagcgtccgggcccggccggtacccgcggcgcggtcggcgcgttcgacctgaacgtgctgcccaccgccgtcctgcagcgtgccgagatcgtgaaggatggttcgtcctccatctatggctccgatgccgtcgccggcgtggtcaatctgatcaccaagaagaacttcgaccgtcccgagctgaccgtcagcggtcgcgttccgaccgaaggcggcggtgaagtattctcggcgtcgctggccaacggctggaacttcgacaatggcagcatcgtcgccgccgtggaatggtaccgccagaacgaactgacccgcggtgaccgcgatttcttcaagtgcgccgaagatatcgtctgggacgacaagggcaaccgcatcgaccgcgtcgaccgctctatcctggccggcaccaacctggccaactgccagaacatgctgcacaacgtcatcgacgtcggttccgtccgttacgtgccgagcaccgatggcagcacggttggcccgttcccgggctatcgtccgcgcgccaaccagacctatgccaacggcaaccccgtggcgacgtatcaggagccgtacaacttccaggcttacggccaagcccagatcatcaaccgccaagagcgcaagacggtctactttgccactgacttcggctttgattcgttcaactggaagacccagttcctctacaacaaccgcaccacggacaacttctcgtggcgccagttcttcccgacagtgctgatccccggcaccaccacccgcgctcagccggtgctgccgttcaagtctgcttccgagaccgaagttgattactactacttcgccaacaagttcgatggcggcttcggcagcagcacctggggctgggaagtcaatgccaactacagccactccagtggcaagtacagcaaccttggcatccgcaactcgatcagcggcgacatcggccgtccgggtaccggcactgcagctgcgaactacttcgacccgggctatctgaatggctcgaaggtcgacgagctggtctcgatcctcggcgtctgggccaagggcaagaccacctacgatcagaccacggtcaacgccgtgttcagcggtgagctgttcgatcttccggccggtgccgtggcttccgcagtcggtgtggagtaccgcaactacaagatcgacgaccagccgggtgccgattttgccgacatctggggttcgaccaccgccggtcgcaccaagggcgacgagaaggtgaaggaagcgttcgtcgaactggatgtgccggtcttcaagggagttccgggcatcgagtcgctgtcgctgaacggctcggcccgcgtcttcaagtacgacacggtgtccggttcggacaaggtgtggaagttcggtgtcaactggcagatcatcccgtcgctgcgcctgcgcggcaccatcggtacctcctaccgtgcaccgggcctgtatgagctgtaccttggcaatcagaccggcttccaggcgcagaccgcgatcgatccctgcatccgctgggctgaaggcaacaacagcaacgctgctgccaactgcgccgctgccggtatcccgggcgactacaccgccgcaggcaacagcagcgccaccgtcttcactcgtggcggcgctggcggcgacctgaagccggagacctcgcgtgcacgcagcatcggcctggtgttcaccccggaatttgctgacctgagcgttgcgatcgactacttcgactacgaagtcagcgaccagatcaccgcgctgagtgcggcgtccatcctggaaggctgctacgagtcgaccacctatccgaaccgctactgcgacctgatgcgtcgtaatccgaattcgggtaccaacgcgaacatgatcaccgaggtgtatgcgcagtacctgaacatcaaccgccagcgcacccgcggctgggatctgaccctgaactgggaacacgagttcagcttcggcaagttctcgctggactcgcaggtcacctacacggttgaagacaccgccgagctgttcgacagcgcagcggccagcggcctgtcctcgtcggaccagctgggtgatttcggtcgcccggacctggtcggcaacctgggcctgagcctggagcgtggcgactggacctacaactggatgacccagtacatcgcgtcgaccaaggacccggacctgctggagacgttcacctatcagggccgtccgaattcctaccgcgacatcaccgctggcagccgctggtatcacaccgcctcggtgagctacgagcaggccgattggcagattctggtgggcgtctccaacgtgttcgatgccaagccgccgctgatctccagcagcgtctactcttcgcgctacggcaacacccacccgttcgccacccagtacgactactacggtcgcaccccgttcgtgcgcctgaagtacaagttctga

SEQ ID NO: 514320 - DNA, 2034 bp, Stenotrophomonas maltophilia
atgaaagccacacgcctcttcgcccatgtgggcgctgctgctacgctgctgggcctggccgtgggccaggcgctggctacaccgctgccggtcgacgacttcgccaagattcccgccatccaatcggtcaccatgagccccgatggcaaacagctggttgcgatcatcgctgccccgggaagcaacaacggtgacaccgcgctcgccaactggaacctggacaatctcggcgcaggcccggtggccatcacgccctccggcgaccgcatgaagttcatcgccgccagcgcattgaaggccggccgcagccttgtcatcggccgccaggaacttaccgcgcagctggccggttgtggagaaggcaactcggtgggaaacaccaagactttcctatcgaaggcttacctgaccgacacttcccagaccaagttcgacgaagcattcgccgacaattcacgcaagcttggcatcagcgaacagacacaacgctgcctggaactggcgggaactgcatcactggttcactcgctcccaatggaccctgacaaggtcatcatttcacagatcaatcagtcaacgttctcggcaggctactacctgttcaatctcaagaccggacagaccgagctgctcttccgtggcgacgcgcgctcgacgcccgggttgttccatccccgcagcggcgaactcctgacaaggacccagatcgaaccggccgggtcgagcgagtacgaacagcagatcctgatcaaggacaaggcaagcggaaagttcgagaagcacgatgcgctgacaaccaagctcagcgaacgctacacgatggacgtggcgggcatcgatgaccagaccggcaagctctacatcctcaccgacagattttccgagcaggtgcaggcccgcctgtacgacccagcaacccggaccttcgacaaggagccgctggccgcccacccgcagtatccgatcagcggcctcatcctcggcagcaaacccagcaacttcaatcaggttctgggcttctatgtggatgggccgcggcgcgaagcgatctatgtcgacccgcagatgaaggccctcttcgacggcctcaaacaggcctatccggggaagtacgtcgccatcaccggctacaacgacgatctctcccgcgtgctctttaccaccaacagtgccgacacgccgacgacctatcacatactcagcgaccgcaaacaggtgaccaccctgggcagtgagcgaccctggatcgatggcaggcagatcggccagcaacgctgggtcacctataccgcccgcgacggacgaaagattcccgccatccttgatctgcccgcgggctggaaggaagggggagaaccacttccagcgctcgtgcacccgcacggtggcccatgggctcgtgactatgccggctgggatgcatctggctgggtgccttacttcacctcgcgtggctacgctgtcatccgcccccagtatcgaggctcaaccggctttggacgcgaccactggctcgcgggtgacaggcagtgggggctgaccatgcaggacgacaatgacgatgcggctgcgtggctggtgcagcagggcatcgccgcaaaggaccgcctggccatcttcgggtactcctatggcggcttcgcagccgctgctgccacggtccgcagcccctcgcctttccagtgtgccattgccggagcgcccgtcaccgatctcggcagagtcggcatgtcatggagcgagaaccgcctgcagcgcatcctgcaggggcagaccgtcaagggaatggacccgatacagaacacggccaaggcgaccatcccggtactgctttacgtcggagatcgtgacgtacgtactccggcgttccacgcccgatcgttctacaacgcagtccaaggcaaggttccggcgaagttcgagttgatcgccgacatgccgcacagcatgccgtggtacccgagccactaccgggccacgctgccgctgatggccgacttcctggccaaggactgcggcccaggcggcctgtag

SEQ ID NO: 514321 - DNA, 2808 bp, Stenotrophomonas maltophilia
atgtctcgtaatggcttcccgcgtcacccgctcacccgcgccgtcctcagcggcctgatcctggccggcagcagcgcgatcgcgctcgcccaggaaaacacgcccaccgatctcggacgcgtaaccgtcaccggctcactgatcccgcagacacagatcgagaaccacacgccggtcctgactgttaccgccgaggacatccagacccgcggcttcaccagcgtggccgaagtactgcagcagaattcgctgaccactggcgggctgcagggcggccagacctcagcttcgttcacccagggcgccgaagcctcaggcatgttcggcctcagcccgagctacaccaagtacctgatcaacgggcggccgatgctgtcctaccccgctctctacaacggcagcgacaccttcaacaatctcagcggcatcccgatcgacatcgtcgagcgcatcgagattctgccgggcggccaatcgtcgctgtacggctcggacgcgatcgccggcgtggtcaacatcatcctcaaggaccacatggacggcggcgtactgaacgtgcgtggcggcgcctacaccgagggtggcggcaacgatttccgagtcagtggcgcgcatggcttcaacgccttcgatgaccgtttccatgcgctggtcaacgtgcagtacgagaagagcagtccgatctggggttaccagcgcgacctgaccaagcagaacaacacccgtggctacacgccacaggttccgaccaacgacttcctggtctacctgccggaccagcagaacgcctacgtgatgatggatccaagccgctgtgccaacgtggccagccagttcggcggcaccaccgtactgggcacgcgcgcggtcggtgaatcttgcggctcgcccttcagcgctggctacaagacgctgaagaacggcaaggaaagcagccagatctattcgtcgatgtcctttgatgtcaacgacaacttccagctgttcgccgatgcgctgtacagcctggaggaggtccagtacaacgccggttcgggctacgcgttctggggcagtgatgtcggcttcggtgcgttcgtcgaccaggccagcggcgaatacatgaacctgcagcgcgcgttcgcgccggaggacatcggtcccgccggctaccgtgacaccatgagcactgatcgcaacaaggcctaccaggtcacgttgggagggcgtggcaacttcggcaactgggattacagcgccagcttcagccgaggtgagtacaagctgaccgagcgcagctttgcgcgctgggcgaacgagatcgacagctacttcgaagaccgcgtgctgggcccggtactgggcatcaccgacgacggctacaacatctacagccccaattggagcgcgttctattcgccgctgccggccggtgatttccagaccttcaccggcttcacctacaacaagagccgcacctggcagaacctgggccgcgcgcagatcaccaacggttcgctgttcaagctgcctggtggtgatgccggactggccgtggtggccgaagccggcagcgaaggctggtcgtacacccctgaccagcgcctgctggacggtagcgtgtggggcacaacctcggtggccggtgccggccatcgcagcaactacgcggtgaccagcgagctgcgcatgccgctgctggagtcgctgaccgtgaccgcctccggacgttacgacgcgttcaggatcgccgaaaagaccgtcgacaaatcgacctacagcatcggtatcgagttccgcccgatcgaaagcctgctgttccgtggcaagtacggcaccgccttccgcgcgcccagcctgtccgacgcgttccaggggcgcagtgggtactacgccaatggttcgatcgactacttccgctgtggacagctcggcttcaaccccagcgacacggtgggttgtccctatgccaatgaatcggtgttcggcgagcagtcaggcaacccggagctggaagcgatcaccgccgacgtctggaatgccggcatcgtgtgggcgccgatcaacaacctgtcggtgtcggtggactactacaactggaagatcaagaacgaggtcaatacgctcagctccgaccagttgctgctggccgagtactactgccgtaatggccagaccaacaacacctcggccagttgccagaacgtaaacgactggatcacccgcgatggcgccggcaagctggaacagatctacacgcccaagatgaacatcgccagccagaacctgcaggcggtaacggccagcttcaagtacgtgcaggacatcggccgcttcggcgcgctgcagttctccagcaactacaccaacatgatcaagcgcgagctgcagccgcaaccgggcgatgagtatctggacctgctgcgcgacccgtacgcgatgtggaactacgaccagtacgccaaggtgcgtgccgacggtgcggtgggctgggcgaaggacaagtggactaccacgttgtacttcaactacatcggcaagacgccaaaccgcatggcgtacctgggcaagggctacgactacgtgcatccgtccggctaccaggccggcaagtggggctcatacaccacctacaacctgagcgtgaactatcaggcgatggataacctgacgctgtcgatgatggtcaacaacgtgttcaacaagatgcccgacggtcaggcacacagttacgccggcaacgtcggcgctccctataacagcagcatctacaacccttacggccgcgccgtctacgtgcaggccaagtacgagttcggcgggaagtaa

SEQ ID NO: 514322 - DNA, 303 bp, Stenotrophomonas maltophilia
atgaagagcatgatcgtgatggcagtaatgggcatttcattgcttgcggtgatggggcctgccaaggctgcggacccttatccgaggtgcaccgcgtgctccaggggctgggccgagtgtgtagcaaacaacggtgctgatcacccgatctgtcagcacaagcaactcgtatgcgatcagatctgcgcatgggagatcccggtagtgggcatcccatctgccttggacgcgggcgggcgcgaggctccgacaggcaggctggagcttgctgtggcgatggccaagcgattgtccagctcctga

SEQ ID NO: 514323 - DNA, 444 bp, Stenotrophomonas maltophilia
atgacctgcaacggacccgatgtagacagcctcttcccgtactacaccaccttgcggcaggcgagcacaccggcggagcatgatcggtacggccgtcgcttcctggacgcctatgcggcgttgctcagggatgcaccggatgttgccctcacgcgaccaagcaaggatgaggcggcagatgggttgttacatgtgctctttccgttcgaagcttgggacgagaagctgaactttccacgccatgacgtgcgcttcccgtttgttcctgtgtgcaacctcgttgtcgctcgcgctgcgcgctgcccgggagccgaccagttgcgcatgcagatcgggcaggcaggcgatgagagtgaacagcgcttgttgtgcgtcaaggagttctcaaggcgaaggctggcggagaaaggtgagtgccccgaaatggccatcacaagcccctga

SEQ ID NO: 514324 - DNA, 645 bp, Stenotrophomonas maltophilia
atgaacttgttgagcttgatcttagccgtgctcgcaacactggcttcaacagagaatgcgaaggccgacggcgggaaatcggtaaccgctgtcagcaacatctcactccgatacggcggtgagcagaacggtcgctaccggaacgtgtcagtaatgaagcagggcaagttggtgcgccgcatggcactgggcgagcgctcttactccctattcgagcacgcccccgatccggcgacgtcccctgatggccggtatgtgctcgtctctgatgtggaatccggagaggttggcatgccggatgggcgcggttctctgcatgaaaggcagtactgcggtttcatcgacacacgaagcggctgcctgttcgcgcgtcagaccgggcaattctgtggggggcagttcaacgacgctggagcctgggtatctccggcccttcccgacctgaccctttctgaggcgcgccctaccgcagaggactatgcatcaggccgcctgagcccatcggatgcacccgatggttccatcgataatctgcttcgctgcgacccgccaggtccaagcaacagagaccactacaggaagctgatcgatgcggggatctttgaagtcactccttcgcagagaaaggcgctgtacggcgggtag

SEQ ID NO: 514325 - DNA, 1329 bp, Stenotrophomonas maltophilia
atgcagcagatcgacttcgacctcggagtgcaattcacgctggagtcgcttctggccgagcgtctggcactgttggcgggcgcaggcctgtcgatggctcccccgagcagcctccccagtgcagcggcaatagcggcagaggcaaaacgcaagtacgacgcgatgcacggagcggggctcgccccgctgtcgccggacatcgagcagcaggccgagttcttctttcagcagggcaagctggcgtcggtctatttccgaaccctgatcgatccgcacgtctttgcggcgccgcccaatgatggccacttcgccgtggctgatctgttgctggttcaaggaatacagacagcggtcaccacgaacgtagacatgctgatcgaaacggcgggccagcgcctttacggacaaatcgggacaggtctcgatcaggccgaagtggtcgttctcccgccgcatacctcaccgttgctgaagatccacggatgtcgacacaaggatcatgacaacatggtctgggcaccgggacagatcacggcacctcctgttgctgatcgtattgcttcgagcgcccaatggctgatccagcgattggcagacagggatcttcttatcgtcggctattggacagactgggactatctcaatcaagtttttgaaagggtcctggatcaaattcgtccgtcgaaggtgatcgtcgtcgatcccgccgacggtgcgagcttccaggctaaggcgccaaacatgtatgcgctgagcgatgctgttcagaacggattcttacatgtccgcgcttctggagcggactttctggcggcgttgagaaaggctttctcgaaaacttttatcaggcagctgatcagctgtggagcggatgaattccaggacaggactggggcagcgccaccacaagccatcacggagccgcccgacatcgacaatgaggccctgtggctcatgcgccgagatctggaggggcgagccccgaaccaaccggctgcgatgctctctccgccaatggaatgcacgctggggctgacacttttgcagctcagatcatcaggtgcgacggcggatgggcactattggctgctgaacaacaagcgcatcagggtgttgcgggcgtctaatgagttgatccaccgtgtcgaggccaaacacgctcgggagattgctcccacggtttcgcccgacatcgtgattgcggtgggtgcagaggcagactcattgccttccgatatcgtccgcgcgggcagtgcgcccaccattgcacgtggcacggccagtcgttggctgacgcggttacaagcaaacgaggagttggggctgtga

SEQ ID NO: 514326 - DNA, 537 bp, Stenotrophomonas maltophilia
gtgatcgagattctccaatccagtagtgatctgctcagggaggccggatactcaacggagcggacggctctcggccagcgcgaggctcttgtctttgacggcgataccgtactgggatttctcttcgcctacgacagcgctgccgatctgatgaagaactggccagcggattccgacgcggccatatccgcctatcagttcgggttacgcaaatccggaacgaaagcttggaatacctatctcatcctattgacgtctgagccagcggattatgcaaaggcggtatcgctgggtgctattgaggaagatcttggcgggactaggaaaatcgctagagctggaatccaggatgtcgccgatctgggtgctgccctgcttccactcctagcactgcagagcgccccgcgccttgaggcggtcgacatgcggaaggaaatccgacagcgtacaaccgagttgcccgctagagtagtggatgcgttcctttcaggcgcggaagaatcagtggtgatccaagtgctggaggaatcgccatga

SEQ ID NO: 514327 - DNA, 2043 bp, Stenotrophomonas maltophilia
atgaagcttgcctacatagacctgtgcggctttcgtggctaccggaaacggatgcggcttgagttcgctgaggatttcacgatacttgacggtcgtaatggcgtcggaaagagcaccatctttgatgctgtggagttcgccctaacggggcatctaagcaagtataaagacgccaaagctgacggtgagaccgttgcggattacatctggtgggcaggaaacggtcctgcaccagaagctcggtatgtcgaagctggtttctgtgaccacgaaggcgtcatctccatccgacgcaccgagttcgaattccccgacgaggctgtgcttgggaaacttgcggcgaggctgtgcgacctgaacctggcaccccgtgatcccatctcgcagctatgctccacttcgattatccgcgacgagcatatcgctggccttagtctcgatctcaaggaaaccgatcggtatgcgctgctccgtgatggccttggtgcgaacgattcggacagttggataacaagggggagccaacttgtttctgcagccaagaagcgatcgctagcagctcaacaggaagaagcttcgctcaacaacgagctgatggctgcgacgcgacgcgtagatgaggtccgggccagcattgttggcgacaacatcctggccgaagctgttgagcgcctacgtgctttcgcaaagtccgaagccgcagcggaccaactggttggtccggtacgccagcagatcgctcatatcggtgcggaaatccagtcgctacaagagctcttgtcgagatggacggctacacaggccgctcgcggacgtcttccggagctgggcaagatccgagatgccgcactcgtcgaggtcgatgctgcgacgaaaacagttgaagcattgcggcgagacgagaatcttccttcgtcgtcgcacctggcgaagcaggcgcgcgatctaatggcactggccaacctcggtcgccacgtcgggttacaggacggtcattgtccactgtgtgccaccagtcaggaccacgcgcactacgagcaaggcatcgccactgccgaggatctcgccaagacgctggatcggcaggcggctgaggaagcccagcacgagcaggcgacgcgggcggcggaagtgcgtcttggtgcggcccgtcagtccatggctgctgccgaagccagcttcaattcggcccggcaagtaatccaagactttgactcgctgcgcaagggccgtggcgtgggagaccatgaaacgtcggagcagctgagtgctcgcgccgagcagcttcgcgcgacattggagcttgcgcaacgcgatttgcgcgtcctagaaacagtgaggttgaacacggagctggaacatgcgaagcgggaggaagctcgcgccaaagagcgtctagccgcagctcaggagcgcgccgggcgggcgaggaaggccgaggcgaccgcgcaggcactccacgatgcagcacgtcgcgcagcaggagaaacgttggatcgtcgcctggatcgagtcctaccgctgatgtcggagctctatcgccgcctccgtccccatcccgtttggcgggacatcgagtactcgattcgcggcgatgtccgcaagtttctcaagctcaaggtgggtgacgaactcaatcctcagtttcttttctcgagtggccagcgccgcgcgacaggactggccttcttgctgtcggtgaacctgtcactggcgtggagtcgatggcgcacgatcatgctggatgatcccgttcaacacgtcgacgacttccgcactgtccatctcgcagagcttgcggcgcagcttgtggcagaaggtcgccagattgtctgtgccgtcgaagatgccgctctggctgaactgctctgccgcaggctgccggtaaggaaatcgagtgcagccaaacggataacgatgggcccagatgaaaacggcgatctcacagttacgtcggaaaagatgctgcaaatgttgcctaagggcactcttcttggtgggagaaccgcaatttcggccagccactcagcacgagaaggataa

SEQ ID NO: 514328 - DNA, 1302 bp, Stenotrophomonas maltophilia
atgaattccccagtgccgtacaggaatcgatttgcacactggtacgcctgcaatcagcgtgatccagatggtcggctgcgcgaggaagctctcaaccaggctataggcgcagtcgaagcaggggagatcatcacgctcgatggcgtgagatcaccgctctcgaaaaaaattgccgaacatcacggccttgatcagttcgagatgaactttaattgggtctgcacggcccagagctggtcgtgcccttgctgttcgaggactaagtttcaggtatctaggccaggcaccaaggggcaaattctggcgaagctggttatccatcacgaccacatgggcgaagccctgatggctggattcctacaggcctttcgcgatgaaggtacgaacgaagcccaggtggaaggtaatcgcctggtcaaccgcatcgggagtgcatttgcggcctatgaggaagtgttggtatgcgaggactgcaacaatgcagatgccatagcaaagcgtgcaattggaagtcccacgtacttctcattctccgtcagccaaatccgaggtttcatccagtcaggcgatcatcgcccgcatgagatcgacgttggcaaggcccggcaggcatgggaatcagcgaaggccgcatatgacctcaggatgcgcataatcggagacgtagcgcgtgcggctgctacgaacaatcattggtttgaaccccacccaagcacgtcttgcgccgttcctgtctttggagatcgcgttgggtatccgggtgatttcattctatcggagtggctatcgcctggaccactttcagacgccttgggccggaatacatcggttagcaagccgaacctctcgcgttggcgaaccgaagcgccctcaaagcccaaggccctgcccgttaatttccttgcaatcctctgctcagaagaacataaggccaagtcatggtcggcgctgcctgatgactggtgctgtccgatttgtgagagaagcaagcgggagactgtcgaggtcaggtctggaggaaagcttggcttcgaccacaagggtggcccgcgcaaaggagcatgggcctctgcgccaagattttgcaatcactgcttcactgtcttctcagcacttaaaagggaagtgacacagcttctcgaagtggacgcgcacgacactcatggggcggtcagtccggcagacataagggcgatcatagcggccaggcctaactcgccgcatgtaatccagatcgacagggcacgagatttggtagagcgggtggtcggaaagccggtggagtctgcggcggctcgatag

SEQ ID NO: 514329 - DNA, 192 bp, Stenotrophomonas maltophilia
atgctcaccacgggccattccaaacggccactgacctccaacaacaatgtgattggcaaggctgtgggctcaaccacgatcggcgctggtcgggcggccaactacgtcttgaagaaagggcttgagatggccaggaaaaaaataccatccgccgaacaccgtcacggcaagctgaccttcgccacccgctga

SEQ ID NO: 514330 - DNA, 651 bp, Stenotrophomonas maltophilia
atgaacacatggaagatcacctgggaaacgttctttaaacactcgagtcggcgaagctatgcaaaggaactctggcgcctctcgagcataaagttgcgtgttggcttcatcgttgctgcgctggcgttcattgccgcgatctcatgggtggcacatcatcacctggacgactggcaatcgatggcagcaattctgtccgcagaattgtttctcttcctgatcattgaagaaatgaaaggccgcgtcttcagatcggagtatggcgatgccaataccgttctgggcccgccagagaaggagtggcaccgggggagcagattcctgatgtttaagaaaaagcttaccgatgcctctgtaacccgagatcatgtcaagaacctcttcgatctcatcgacgcgaagatcgacctggaaaaccaccgcaatgagacagccaagaaattcttgatctttgcatcgggcgtggcgacagcctcagctgtcgcatggacgaagggattggagcctaaggcagcaatacaagccgcggcgtggtttgctctcttctgtgcattcatcgcccctttcctttgggttttaccatcaaggaaggaacgcctaaaagagctcaaatacttcatgctgctctatgtgaagggaaacgacctgtag

SEQ ID NO: 514331 - DNA, 684 bp, Stenotrophomonas maltophilia
atgaaccacgagaattttgaggaagccttgtcgctagaacgcttcagccgctacctgacctgggcggctggcgaccgtggccaagctatcgccctctatgggctgaacacccgcctttccgaaagcctgtacacacccctgcagacgctggaggtggcgctgcgcaatcgcatccacacggttctcgccgaggccaagggcgcggattggtatagcgaagctgcagcgctcctacttgttccacaccagtccgagcaggctgccaaggccatggaggagttggtccagggggggaagcccgtgaccgcgggtggtgtggtcgctagcctcactttcagcttctggacggcgatgttcaacaaggactacgaaaccctgtggcaacagaccctccacaggattgccgacccaactgcgcctaaaggattgaagcgaaaaagcttctcagggccgctcacgccaatccgcgtcctacgtaaccgtatcgcgcaccacgaaccgatccttggctgggatctccgcaagcatcacgcccaaattatagagctaatcgagtggctgtcgccgccggccgcgaaatggtgcagcgagagcgatcgttttctgcaggtataccccacagagggaatcgcgctcgcgcagctgaaagcccccgagaaatgcaaagatgaggccacatattga

SEQ ID NO: 514332 - DNA, 492 bp, Stenotrophomonas maltophilia
atgtccaccaagaagtccgacgccgaagtcatcgagttccccaagcctggcaagaaaacctcgtccaccgagaagatctgggggaaagccgtttacggccatggctatgccggcatcccttctattctgatccaaggtcagcgccggataggcctgaacccgatgcagatgaacatttgcatccagttgctcgactattggtttgacccggcgcgcaaacccttccccaccaagaaggatttggcacaacgtatcggctgcaccgagaagaccattcagaacaacatccgggcgctcgagaaggcgggactggttaagcgtcaacttcgccgaactgccgctggcgactggaacagcaacatctaccacttggacggactggtcgcgaaagtgagggcgctggaacccgaattcacggaagagaagcagcagcgcgctgcgctgaagtcccaactccagaagcccggtgggctgaaggcgaagtccaagtaa

SEQ ID NO: 514333 - DNA, 1194 bp, Stenotrophomonas maltophilia
atgggtaccattgtcagccgccgtcgcaaagacggatcattaggttacaccgcccaaatccgcatccaccggcagggcaagtgcatccactccgagtcggagacattcgatcgtcgccaactggccaccgaatggatgcggcgccgggaagccgagctggaccagcagcgggcccgtcgcgagccgctgggcaagggctccacccttgctgagctgctggagtggtacgggaaggagatcaaggaactgacgccctggggacggacgaaggaagccgccctcaagcgcctggcgagctacgagatagccaagaggaacgtcctgcgtttgaccaccgccgattacatcggccacgtcgaagatctccggcccgctggcgccggcccggccacggccggcaatgacctgatctggctgcgccaagtgctgcgttccgcccgcgcctcactaggcctgccgatcgacctgccgttgctaaaggacgctgcgcacgaactgcggcagcgccgcgttactgctgccgagggaaagaccctgctcgaccacttcgccgtgcgcgacacgcgcgccgagattccgatggccgacatcatccgcttcgccctgcttacggcctgccgccaggaagagatcaccctgctcaagtgggccgacctggatcgcgagaaaggcatcgcctggctggacgacgtgaagcacccgcgcaagaagattggcaatcgccgcgccttccgcctgctgtccgaggcctgggagatcatcgaccggcagcccaagctcatgatcgagggtccggacggcaagcagatccccgatccgcgcgtgttcccctacaaccccaagtcgatcggcgccaacttcacccgtgcctgcaggctccgcggcctgcaggacctgcacttccacgacctccgccacgaggccacctcgcgcctgttcgagcgcggctacgacatccctgaagtcgcccagttcaccctgcacgagtcctggacgaccttgaagcggtacacccacctgcgacccgagcatgtcgacgaacgccccgccaaagccccaaccaatccacccgacactctccaatccggcccatcgctccattttggtacggaaatctattaccccacccgtagggaaattaagattcccaggtggggccatcgcatgaccacagaagaaccgtcgaccatgtag

SEQ ID NO: 514334 - DNA, 1182 bp, Stenotrophomonas maltophilia
atgacgcttcattccaataatgaactacttagggacacgctagaggcgttgccactgctggatggccgatttgaacagcttaagttaattaatgttccagtggttggccccaagcgcggctgtttctccttggttttccgggcatgggataggattaacgaaaagctcgttgcacttaagttttatgacattgatccattgaatctcaatgatcagtatcgtttggcatgttttgagcgtgagcacggcattcttcagcagttgttgggggtcgaacgctgtcttcaactcgcatcatcattgtcgagttttgagttaaagctgccactcgatccggtggcgggaacgaatttcgttctgaattgtcactacttcgcaattgactggctctcggatcaggttgacggcttttttcttaatcaagagaagatcggtgcaatcgagaagttggatctatttaatgaaatagttcttgcggttgaggcgttgaataatcgtggaatttcgcaccgtgaccttaaggctgataatttgaggtcttgcttggcagatgcaaagcgtcttgtcgttgccattgatcttggaactgcggctagagttcaatcttctccaatatccggaatgtatagcgggagtgtgggggcacccgcgtacgcaggcccggaggcgctgtccaatcttgcggggattcgatccatatctcatctgacagacgcatatgcgctaggttgccttctgtttgaactgttccataaggactactatttcttggctgcgagaattagaaatccaaatttggatgtccgaattacagcgatgcagcagcaattgactggcgcaaagacggacgatcagcttctgtcggcttgggacggggcattggaacgacttgcaagagggattgagtcacctacggttgattcattaggttcaagttgcccgccaggtatttgtcagattgtcgatgaggtcgtcagtggcctgacagcttttgattatcggcgccgaatgccgcttgataaagcgagagagcggattcagatagcccggcgcgtacttttgaacgagcatgcctatgcggcgaggatcaaggtgaggaatgttcgtcgtcaaaatagaattgacaagcagcgtgctaaaatgcagaggctggtaggaattagtcaggtaaagccgtcatga

SEQ ID NO: 514335 - DNA, 1827 bp, Stenotrophomonas maltophilia
atgatgccaattcccgctgttaatggcagtgatatgagtctgcaggttgagcgcaagccattgcagcttttccttcatgctggtgagacggaaattttgactttcgtccttccgccgatggatgatcttgacgaggtccgagtgttgggggagcagcacgctcacctagaacgcctcaatgcaaatgcaagtctaaatttttatcaagactttaagctggaaaaggctttgcttgagcaaaagtacgatgattttaagcattctcccacctatcttaatcgcctcgcaggctttgcggcgatcttgggggatcgggacgcagaggcacgatatctatccttggcgcgcgagcgaacatcggatgcacttatcgcgcaccgccagggtgagaacctaattgtccgaaatcttgacgccgaggcggagcaggtttttgcagggctggatttaagcgctgatctatatgcgaacattagaatagcgtctttgaaagttcgccgggacgacatccatggagctcgtcgatcgatagatgccgctcttcatatcgatcctattgattacagtgctcgtatatttgacggcgccatgtgcattattgaaggacggattccggaggcgatacaaagttttcgtgttgcactggagtcaaggccgaattctgcttcggcatatgccaatatggcaatcgcgtacaaattagttggcctgattcataaggcgctggcggcagtgaagcgtgccgtggcgttggatccaattaacccatatttcgttggattgctgagcgacgtcgctcatgaaattggtgaagatgcggatgctcttgccagtcttagatattatgttcaggtggacccgtcgagaccggatatgtggtcgagagttgcgcgggcctgtttcaggcttaagctgttcaatgatgcggagtatgctcttaaaagagaaggggcaattaaggatagtgtggcggtttggaacaatcttggtgtttgttatcatcgtcgcaaggaatatcgtcgggctctttcagcgttcaagcatgctttccttctgaatcctggatctcgttcgcatgatgtttttctggctgctagaaatgccactcagactttgtcggacatgagcttgtacgaagaggctgtggagttctctagtcaagttattaatttcgacgttgataattatttgattagaagtccggggttgtcggatatatactctttgcagattcatgggtacctgaagcttgggcgttattcggcggcaactactgctgggcgggatatattgaggcaggatggggtttcgagtgacttgattgtctgggtggtagcctcgctggtggggcagatgtcgctgaggggggattttaacagcgatattgattctttgatcgcgagttactggacggactctgtgcgtgctggtgtcagtgagcggcagtggtttcgatttattaataatgttgctttcgcgtttgcggaggctggaaatatacctatggctgagaaggccatgaagagcattagttcaagaattgggtctgatgcgtacccgaccgcgacccaagggctggtccatatgcggaagggtaatgtcgaaaaggcagctggtctctacgaaaaagcgataattttggcggattccgcgtcagacaaggctcgaattaggcaaaagctaaatttggagcttggtcggatttatgcggaaacaaacgcaaggaagtctaagagacttttggagaaggtggtcggggtaaagggcggggagcgccagctggaaattgccgctgagattttgcttaggaagattcggatgagatag

SEQ ID NO: 514336 - DNA, 1167 bp, Stenotrophomonas maltophilia
atgaagatcgcggttgcagggatgggatacgtcggcctggccaatgctgtgcttcttgctcagcacaattctgtcgtcgcactggatgtggacgcggcaaaggtggaagcgatcaacaagtggcgttcgcccatcgaggacgctgatatccaaggctttctggaccgagggaccttggatctgcgcgcgaccgtggataagcaatcggcttatgccggcgctaggctcgtcattattgcaacgccgacggactacgatccggatacgaacttcttcgacacgagctcggtcgaggaagtcatccgtgatgtgctggagatcaatccgtccgcgacgctgatcgtaaagtccaccgtacccgtggggttcaccgatcgtgtccgtgctgagcatgcaggcgggaagatcatcttctcgccggagtttctccgcgagggtcgcgccctgcacgacaacctctaccccagccgcatcatcgtgggtgagaaatcggcgcaggccacggagtttgcatcacttcttctgcagggggctgcgacggacaacgttcccgttgtcttctgcggagcagctgaggcagaggccatcaagctgtttgcgaacacatatctggcaatgcgtgtgtcctacttcaatgagctggatacctatgcagcctgccatggtttggatgcgcgtcagatcattgatggcgtgtgcctggatccccggattggagagcactacaacaatccctcctgtggctatggaggctactgcttgccaaaggacacgcgacagttgctggcgaactatcgcgacgttccacagaatctcatccaggccatcgtggcgtccaactcgacccgcaaggacttcattgctgcggaagtacttcgctccaatcccagggtggtgggcatctaccgtctggcgatgaaggccgggtcggacaacttccgttcgtccagcatccagggcgtcatgaagcgaatcaaggctaaaggcgttgaggtgattgtctatgagcccaccatcgccgccgatgagttttttcggtccagagtgtgccgggacctgggtgagttcaagcgcactgctgacgtgatcattgccaatcgacgccacgctgatctagacgatgtggcaggcaagacatacagtcgcgatcagttcggggtcgactga

SEQ ID NO: 514337 - DNA, 1386 bp, Stenotrophomonas maltophilia
atgttgatgctggtctcgctggtcctcgccaacctggcgagtcttggtatccagttcgtgataccgaggctgttggtcccggaggagtacacgcgttttgcgatgatgtgggcgtcgggccagctggcggctgctgttcttttcgaatggctgcggattggcgtggtccgttattccacaagtgactctcgtgatccacggcagttgcctgaagcccttggcgcactttacctgggcgttctgggtgtggcggtagtcctggcggtgctgcttctggtaactggcgatgctgggggggcaatcttcactgcgggcttcatcctcttctacgcatgtgctcaaggggcattcgatggtcagcaggccagcttgagggccagatttcgcaatgttcgcttctccattacctggatggcgcgaagcatcctgtcattcatccttacgcttgccgcggcgtcgacgttctccgatggcaggttcgcacttgcgggcctgatcatttccttcctggttgcctcgctgttcgccggatcatgcccgcgctcacttcggtggcccgcgcgatcgagcgtgatcttcctgatgaagtttggattgttcgctgctgccgcagggatgatctcgtttgcgctgccactcgccgcgagatacgcgatggtgcattacgcaggtggagctgagtcggcaggcgccttgctggcagtggatattgcacagaagatcctgatggcgctcggaacggcgatcaatctggtgctgctccagccggtaattggtcgcgtcaatcttgatcccgtggaaggcaggcgtcacatggccggccacctggtcaacgtggtggcgctcttttctgccgccatggttatgctgctctatgcgaatcgtgtactggtgacgtatttcgtgccaccggcattccttgattcctactcgaaggtgtcgcttctcgcggtcatttcagtcgcgcttgtttgcttgaagagctatgggctcgatgcattgttcgccatcgggggcaagacggtctactcggtagccaccagcgcattggcgttggtcctcttcgtgctcggatgtgttggtctgtatgcgacgcagtccatcggcctggtcagcatcctgatcgccttgctgcttgcgttgaccgcgggtgtcattctggctgcctggctcgcggcctccaagctgtcaatggagctcccgtgggccaagttgtcaaggatcttcctggtcaccttcgttgccttggctgcctcctactgccttgctgcgtatgcaggccctgttgtccagatgttgggaatggtgatgatcgtgctcgtcattctttgtggctatcgctcgcttggtgtaggcgggcccaggcaatggttgggccagtcgtga

SEQ ID NO: 514338 - DNA, 1203 bp, Stenotrophomonas maltophilia
atgcgcagcgatcctgatcatgtaggcgaacagacgagtcgcgtggagaacccggtttcgtccctcaacgtcctgatattcactacggatgtccacgcgggtgggatcaaggcatccacgcttcgccttagggagatgctggctgacggggtctccaatgtgagcatcctgtcctatgagcctgcggaagagggtggagaggcggactattccctcggccttccgctggtgcgggagttccagcccaatgcgcgatgggattatgacgttcgccgcgccatgggtatcctggtggctgtgcttcgattccgcaggctgatgcggaatgaacgcttcgatgcagttatttcgatgtcgtacggtccgagtattgtcgcgttgatggcgaagaagctcgggcttgactttaagctcgtcgtttccgagcgacaggatccttcgcgggatctcgctgccggctggcgaaagcgcctggtgcggagtttgtgtggttggatgtaccgcgggagtgatctctatcactgcaattccccagttgctgccgaacgcgctccgattctcttcaaagtgtcgccgaagaagaccctttacatccccaatggatatgatttttcgcagctggatgagcagtcccttgctccgccagtttcggcgatattcgggccgtacgttgtgtcgtgcggtcgattgaatgaacagaaggggcaacacatcgccattgctgttttcgccggaatggcgaagctgggttacaagggcgcactggtgttcattggtgacggcagcttgagagagtctctggaggcgtgtgctgaaatgagtggggtatcggatcgagtggtgttcctcggagcggtggacaacccccttccgtacttccgccaggccgatctcgtgcttgtcacttccttgtgggagggattcgccaatgtgcccgttgaggcgatggctgtcggcgggagggtgatcagcacgcggtggagtggggccaaggaagtgcttcaggacgcagccgacttcttctcgtccgatcttgacgcacttgatcgatgcgataaggccgcagtggcaatagcgtcaaccgaggccatggcagcgatcaccgaattgccccgactcgctgccgtaaggtctttgcgcgagcagtacggatacgcggggacatcgcgcaggttcgtcgcggccatcgagggccttcgatga

SEQ ID NO: 514339 - DNA, 1296 bp, Stenotrophomonas maltophilia
atgatcaggatcaggtttgtcagctggcttggtcttctggcgatagttctgttgcccgttttcaagatgtcgttcgtccctgtcagttacagcccgccgtcgctcatcccggcagcactgcttggtatcgtcttcttcttcggttcacgtggaaggattgagcgcgccgacgtggcgacaatctgttttgtgctctacgtggtcctggtcagtttcatcttcctgggcgtgaaggacattggcgtggatcgcgtcctgagaggacttctgcctgttctagcggggctggccgcctttcttggtttccgctactacttcaggttcgtctctatcgatcagtacctgaacattcttcgttccgtgctgaaaatcgtgctgtgctatggaatcttcgagatcgtcgccctctacctgggtattggtggcgtgtttcgcgacgcactggcacttgcactgagcggaaatgcagggtcgcgggtgcagctgtttacctccgaggcatcctgggccagcctctatcttgtgttcgcattcccgctgcttggccgcttgtcctggatctatcgcgggatgtggttgatgctttttgccgccactttctcgctctatggctttgcgacgctggtcatcggattgatcggataccgccttctgatgggtcgcagcttcaccaggaccctgtttcaggtgctcctcatcggcgcaggtaccttgttggtggcatatgcggtgaagctgatcgtgtccaatctcgcatcttcaggtgaccttccttactacttgacacgcatcatcaagctcgacgaggcgtcgaccgttgaggcatcgctgctggagtctctcgacggatccgtctttgtgcgcatcatgtatcccgtgtacgcgttcctcgtctcgctttcatatccgttcggaatgggcgcagcgatgtatccgtacagtttcaatgacgcaatgtcatggttgccgctgaatcatgttgcgtatcgaaatttcgagattatgggcgacatctcgtcggtctcggctgatccgcgtaatctgtatgtgggcatctacgtgatgggcgggttgctggggctggcgtatctcatcttcatgctcaaccgcgttcgtcgagatttcggcctcatcaagcgcttcggttctccggccgagaagctggtggttctccagctggtgctcatgggcgccgcctgccttcagtttggctcatttgccttcgtgctcctgtggatcccgcttgccgcagtactggccatttcacgtggtataaggatggtgcgtcatggctaa

SEQ ID NO: 514340 - DNA, 1257 bp, Stenotrophomonas maltophilia
atggctaaggccgtctttctcatgaccaggccgttccttcctgtggtcggtggccgtgagcgcatgctgcgccagcacctcgagtacctggttgatcggttcgatgaagtgatggtcatctgttttaaggggcggggcgaggctgttgatgttgagcggtaccggcgggagttcccctcggtggcgttccatttcaccagttacccggggctggcggatgtgttgcgtggcgcccttcacctggggctgtcagcgccgcttcaatgcttggccttcttcggcgagggcaagtcgcgttggatcacttcgcgaatcgccgagttcggtcccgatgttgttgttgtggacatgctcaggttgtggggctacgtccggcattggcgctcgacgccgctcgtccttgatatcgatgatctgctttccgtccgctatcagaggcaactgtcctcaggcgcaacagacgtgcttggaaccttcagggagcgattgccggctgcagccggatggctggccaacgtgtttgcagcccgccttctagccgtcgagtccaaacgattggcaaagatggaactggatgtgaccgcgtccgccgcgagcgtcatctttgtatcggggctggaggctgagcggcacaggctgaggacgggcgcggctaacctgtactctgtgccgccgatgtctgcggacgtcagtggcgtccggccgccacggttacgtcaaggcggcatgctgcttcgcttcgcgttcctgggcaatctaaaggcaccgcagaacttgcaggccctgcgatacgtggttggcacgcttcttcctgtgctggttgaggccgggtttgagtactcgctggatgtgattggaagcatcgatgcgagggtggcccatgaactttcgcgtccggagattaccttccatggtttcgttgacgatttgaatgaggcgctccgtgaaacggatctacacttggcgcccattctttccggatccggagtcaagacaaagatcgttgatgcctttgcgatcggggttccaaccgtgacaacttctttgggcttggaagggttggatgtcgagggtcgtcacgttgcactcgtcttcgacacgcccatgcagttcctggaaatcgtaaggacagtcattgcggatccgacaatgcttgacagtatcgccttcaacgcatcggcctacgtctctgagcagcacgcgcgcgacgtggtcttctcgaggtactccaacgcctacgagaggatgggatcatga

SEQ ID NO: 514341 - DNA, 513 bp, Stenotrophomonas maltophilia
atgatctggcgcaccctccataagtgcgtggtgcatgtggtaaacatggcctgcgcggtgcttcccgacgatccgatctcctgtcgccttcgtccgcgtctgctgggcattctcgggatatcgactgccggtggtgttcgaatccgggggggcgggcgctttgagggagggcgcatcgtcattggccagggctgcttcatcaaccgtggctgttacttcgatgcaacggggatgatccgccttggccgtcgtgtaaccgtgggccacggcgtcgcattgatcacggcgtctcacgttgtcggtagcgccgacgcgcgcgcgggcaaggttaccgccagtgacgtggatgttggtgacggggtctggattggggcgaacgcggttattctttccggcgtttcgatcggtgccggcgcgatcattggtgcgggagcggtggttacacgcgacgtgccagcgaacgtgcttgttgcgggcaacccggccgtcttcaagaaggagttggatgcatga

SEQ ID NO: 514342 - DNA, 540 bp, Stenotrophomonas maltophilia
atgaccgaggttcctgttacggaaacactactgagcctgttgaatgcggacctccgcgttgccagggcaggggcggagccatcactgatgagaggcctggttcgctattttgtggatcctgggttcgcaacagtggtgcgctaccggttgtcggtcttcgcgaggcgattcggcaaggtgggccgcgtgctgtcgaagttgatgtggctgtacaacgtgcgcgtttccgcttgctatctttcccccagctccaggatcgggcccggattgtctcttccccatgctgcagccgtggtcgtgggagatggcgttgtggctggacgcgatcttcagctgtaccaatccgtcacgctcggccaacgcggcacgcagtatccatgcattggagatggagtaaccatttttgccggcgcctgcgtgctgggcccgttgcaagtgggagatcacgcggttgtgggcgccaatgcagttgtgctgcggagcgtatcgccccgcagtacggtggcgggtgtgcctgctcaggagctggcccgaaagtag

SEQ ID NO: 514343 - DNA, 2151 bp, Stenotrophomonas maltophilia
ttgatcacctccaactataggccgctggcgcgcgccggcgtggccctgctcagcctgagcatcagcactgtcctgcaggcacagaccgcgcctgcacccaccgcaagtgactggggcggtatcggcttgctgcagacgccaaccgcacgcatggcagaagaaggcgaactggcgttcaccgccagccacacgtcgccttacagtcgttacaacctcgtgctgcagccgctcccatggatggagggcgcgttccgctatgtatcggtggcaaatcggcgctatggcccggaatggctcagcggcagccagaactacaaggacaagtcgatcgacgtgaagatccgcttgctgcaggaaagccgctgggtcccggaagtctccgcaggcttccgcgacctgggcggcaccggccttttctccagcgaatacctggtggcaagcaagcggatcggcgcctttgacgcgagcctgggcgtggcgacgggctacatcggcaatcggggtgacttccgcaatccccttgctgcgttgaatgatcggtttgagacccgaccacgctccacgggcgcaggaaagttcaacagcaatggcatgctccgtggtccggttggcgtattcggcggtgtcgcctatcagacgccgtgggaaccccttcagctgaagctcgagtacgacggcaacgattacaagcgcgagccgcagaacaaccggcaggttcaacgcagcccgttcaatttcggggcatcctacgccgtcaatcagaatgtgcatctgcatgcaggctgggagcgaggtgacgtggccacttttggcatcacgctgcgaaccaacctcgcgcaagccaggtcaatgcccaaggttctggatccagcgcctgtcccactcaagcgtcatggatggaatggtgaggcacgcaccgatgagagcagcaacacggattatcaatccccggattggagcgccgtggccagccagcttgatcagaacgccggactgcgcgtaaaccgcatcagccaacgaggctcagaaatcatcgttaccggcgagcaacgacgcttctattacccggcacagggcctgggacggactgctcgcgttctcgacggcatcgcgccagccagcgtcgactggttcacagtgcagaacacccgcctcggcgtgccggtcgtcgagaccagcatggagcgcaaagcgttcgtggactatgtgaacaacaagagcgacctcggtacgttggccgggcatgtggagatgacccccccggcaagccaacgcaggcagaccctctacgaggcgcctcgtcaccgcttcgacggtgcattcaacattggctatcagcaatcactgggcggtcccgacgggttcgtgctgttccaggtcgccggcacttacggcgcgagcttctacttcacgcgcaatctgtggctcagtggcaacatcagctataacgcttacaacaactacgacaagttccgctacgacgccccaagccgcctgccgcgggttcgaacgaacattcgtcgttacatgacgactgaagacctgacgttgcccagcttgcagctgaccagcacccatcatctcggtcgagacctttacggcatggcttacgccggcatgctggagtcaatgtatgcaggcgccggcggcgaggttctctatcgcccgctggacgagcgctgggcagtgggagtcgaagcaaactgggtgaagcagcgcgatttcgaccagcgattcagtttccgcgactacagcgtcgctaccggccatgcaaccttctactacctgtggggtgaccagcggcgcgtggtcagcgcgctgagcgccggccgatacctcgccaaagactggggcgcaacgctcgccgtctcgcgcgcctttgacaacggcgtaacgatgggcgcctacgcgacgaagaccgatgtatcctctgccgactacggcgaaggaagctttgacaagggaatctacgtctcgatcccgttcgatttcctgctcccacgatcgacgcgcgcacgtgccaacttcctgtggaatcccctctaccgagatggaggcgcaagagttggccacagctacggcctttatcagatgacgtctgaacgagaccctgggttcttcttcgacaacatcaatagaattggcgattaa

SEQ ID NO: 514344 - DNA, 777 bp, Stenotrophomonas maltophilia
atgagcccgcgtctgcttgccctgctgctgggcacgataactgcagccaccgccacggccgctccacaggtatcggtggaggtgatgggtcatgtcagccatcccggcgtgcagatcatgccggccggcgcacgcctcagtgatgccattctggccgcaagcccacagccctccgcctacccattggcggccgcctggctgcgtgcctccgagcggatcgcgcagactcgcctgaagaccggtgtcctgttcgatctagctcaactgatggaagacacatccgccgacgcggatgatgcaggtgtcgcccgcacccttgcggacgacatcgagcgcatgccggtcaccggtcgtgtccccgcactgttgaccgctcgcgcgatcgaagtggcagacgcaagcaaccgccccctcggcgacggagatcgcctggtctatcccggacgtcccaccacggtgaccgtcgtgggagtcgttgccgagccctgcacgctgcgccatgttgctcagcaagcgccgctaaactacctgcgccactgtcctgccctgcgcgccgcgagcaaggactacctgtacgtgatcgagccggacggcagagtcgagaagatcggcattgcgctctggaatcgctcagccctttccacgctggcccctggagcagtgctgtacgtacctttgcgaccgagcgccctggccaaggtgaatcctggcctcaatgaagaaattgcaagcttcctcgcaacccaggtaatggaattaccgggagtttcgccttga

SEQ ID NO: 514345 - DNA, 687 bp, Stenotrophomonas maltophilia
atgagcaggagcgctctcgccgcgctatcgtcggcgcaacgcggcgttgccgcattgctgttgattgcattcggtctatcgggctgcggcgtggtgggccgtaccagcgtcaagacggcacaactggccctgcaaggccgccccgacattacacccagcgccgaagaggtcgccaagaagcgctatccgcagatcaaggtgctcggtcctgatggcggtgccgtgctggtgctgggcaatatcgatgccggccgccaagcctggtacagcagtgagcgcagcatcatcttcctgcacgacggcctgctcgtcggcacctttggtggcagccccgagctgcagaacatgtggatcgagggcgataacccattcagggcactgcacaagcttgatcgtacagtaattgtgcatcgccgctacgacctgatgccgggctaccgctatggcgtggaggtgcaaggcacgctgcagccgatgggcagtgaagccatcgagattctcggcaagcgccgcagtgtgctgcacgtgcgcgaaacacagcgcggcaggcactggaaggccgagaatcatttctgggtagacccggataccggcttcatctggaagagccgccaggcaatcgcgccaggcaccagcttggaaatcacccagctcaagccctatagcccggatctgccacaccgatga

SEQ ID NO: 514346 - DNA, 1107 bp, Stenotrophomonas maltophilia
atggactgcaagcgtctttgcgccgctttggcgctggccctttccctctccggatgcatgtttgcacccggccagcacatgcgttcgagcgcgttcgcacgcgacgaccagccggttggcaatgaccagatcgagctgattccgatcacgccgaagctcatcgccatggatcgggctgcacgcgatgtgcccggcctaccgacagcgctgaccagctaccagcctggcccttacgagatcggcgccggcgacgtcctgtacatcacggtttgggatcacccggagctgaccgttccggcaggcccccagcaacagctcaatgcggcgggccgtcccgtccagtccgatggatcgctgttctatccctatgtcggcaagatctctgccgcaggcaggacaccgagccagctgcgcgaggaacttacaagcaagcttgcgcgctacattgaagcaccccaagtcgatgtctccatcctgacctatgccagccaacgcgtctgggtcactggcgcgtcgcgccaggccgccactgtgccgctgaccgtcacgccgctgacgctgggcgacgcaatcagccagtccggactggacgccacccaggccgacctgtccggcgtccggctgacccgcgacggcgtcacctacaccatcgacctggatcgccttggtcgccagggcggcggtgccacgaatattttcctgaagtccagcgaccacttgtacgtgccttacctggatcgcaaggaaattttcgtggtgggcgaagtcaaccagcccggcgcgatgagcttcaaaaccagcgacatttcgctcagccaggcactcggccgggcacgcggactgcagcaaagcacctcaaacggaaatgccgtctacgtgatccgcggctcgcaggatctgcagagcacgccttccaccgtgtaccacctggaagccagatcgccggccgcgtttgccgttgccagccagtttgaactgcttcccggtgacgttgtattcgtcggtgcggccggggtcactcgctggagccgctttgtgaaccagctgcttcccttcacgtcgatcatcagtaacgcggcaagcgcgcgtaacgatctcgacaattga

SEQ ID NO: 514347 - DNA, 534 bp, Stenotrophomonas maltophilia
atggccctggtgctgctgttcaccctcccccgcgcagacgcacgcctgaaatggcgatggctgctggccatcgccgtcaccgccggcatcacgcttgcttcgaagctcgccttcatgggctgggggattggcatcaagagcgtgcacttcaccggcttctccgggcatgccgcgatgtccagcgtcatctatccggtcgttggcgcgctgctggcggggcccggcaagctcccccggagaatcggcctggtcatcggcgtgctgctggccaccgccattgcctggtcacgaatcccgttgcatgcgcatagcctttcggaggtcattgccgggctgatgattggactggggtgcagcacgtgggcagtgcgtaccacatcgttcattgatcgacctccacccatcgtaactgttggcgcggcgtttgctggaatgattttgccccttaccctgcccgatctgcatacccatcagctcgtgattgcactggcgaaatcgatctccggcagggcagaaatcttgcagcatttctga

SEQ ID NO: 514348 - DNA, 2007 bp, Stenotrophomonas maltophilia
atgcctgtcatccacagtcgattcccgaatctgcttccgtggctgggcgcagccctgctcgtccttgggctgtgtactacccccctggcgcgcagcatcccctggagccgcttcgccgaacttgtggagatcggcttgttcgcgtgcggcgctggcgtactactgaagcgctggcgccactggtcgatggccagcgttctgggcgtgctgtggttgctgctactgcctgtattcgctggtgtgctggctttcctgtccgcgctgttgatgctgctggctgcagccgccatcggtacaacgttgttcgcgcaacgcgcgctggcgctgcaggcatgcgcaggcctgctggtgatggccgcggtactgggctggacgctgctgctgccgatccattaccgatggatctacctgctggcctgcctggcattggtggcctggcgccgcgccacactgcggtccgcgctgcgggccgcggccacgcaatggcggcatgcagtggccgctgcaccgcgtagcgcagcctttgccgtgctcgtgcttggtctggccagcacggcctgctggctgccgaccctgcagtatgacgacctgacctatcacctgcggctgccatggcagttgatggaactcggggtgtaccagcctgcgccagaacaccagatctgggcactggcgccgtgggcaaccgatgtgatccatgcgattccgcagctgctgtctggtgctgaagcacgcggcccggtcaatgcattctggctgctggcactgggcgctgctgcgtggcacctggctgcacaactgggggcgggcgggcagtcgcgctggctcgccgttgccatggtagccagcctgccgctgaccgcgggcctggccggcggcatgcagaccgaattgccaacggcagcagtactgctgtggatgtgtgcactggccgcagccccgcgcgatacccgtctttccagctggctgctgctggcggtactggcgggtgggctgctggcaatcaagaccatgggtgcgctcatggcgctgccggtactgctatgggccctggtccgccatccgtggccgtcgctgccacgaatcgtactggtggcgctggtcggcctgctggtgggcgcgtccagttacgcctacgccacttggatcgccggcaacccggtgctgccgctgttcaacggcatcttccattcgccgtactacgcacccgtcaacttccttgatgccacctacagcgtcggcttcggcgccaacctgccgtggatgctcacgtttcattcctcgcgctacttcgagtcgcaggatggcgcggcaggcgtggcgctggtcggcctggcgggcctgtggctgctggcactgctgcgcccgtccacgcgcgcggcgacactggtggcaacagccgtactggtgctgccgctgttgcctgtgcagtacctgcgctatgcctacccgggcatggtcctgctgtctgtcgtggccgttgcggcgctgggtgccggcgccccgcgtcggccgctgctggtactgctggtcacgatctgcgtgctgaacgtcagcctgcaatcgaccggctactggatgatgcgcagcggtgcattgaaggacacgttgaaggccgctggccgcgacgagcccctgttccagcgcttcacccccgaacgctcgctggcagcgggcgttcgcgcgtcgcccgatgatggacgcaatgtcctggtactggaccctgccgccccctacttcgccgagttcggcagccgtggccgcagtgttgcctggtacgcgccctcgctgcaggcggcggcagcggtcgccgaacacgacgccagcggccagcggtggctggcagtgctgcggggcatgcaggccgggcacatcattctcaacacccgtaacctgacggcgccgcaacgcgcggcactgcagttggccggggcggaactgcggggcgaggcaggcgatcgccagtggtggtatcttcccgccgccatggagctccccgcagaatga

SEQ ID NO: 514349 - DNA, 174 bp, Stenotrophomonas maltophilia
atgagtacgtccacgctctccacgccaacgccaacgccagacaagggttccgccgcgatgccgcgcattgccgtggtgattccctgctgccgcgtgcgggcgcatgtcatgcaggtcattgccggcatcggcgccgaagtgggctggatcatcgccgtggcagcggcgcgatga

SEQ ID NO: 514350 - DNA, 843 bp, Stenotrophomonas maltophilia
atggatccacgcgtcaccgtcatcgaacacgcgcaggaccagggcgttggcggcgcaacgatgaccggatacatgcatgcgctgcaggcgcctgcagaggtggtcatcaagcttgatggcgatggccagatggaccccgcgcaggtgctgcgcttcgccagcccgcctctctccggccacgccgactacgccaagggcaatcgctttcatcgtgtgggtttcctgccggggatgccttgggtacgacttgccggcaacgccgcgttgtcgttcctgaccaagctctccagcggttactggcagatcgccgatcccaccaacgggtacaccgctgtacgcagcgagctgctgcacgagctggaactggagcgcattgcgaagcgctatttcttcgaatcggatcttccataccacctcaaccaggcacgcgcggtcgtggttgacgttcccatgcgcgcgcactacaaggatgaaaccagcagccttcgccccgcacgcatcctcggtcctttcatgctcggccaccttcgcaataccgcgcgccgcatcctctacagctacgtcactcgtgggttctcactggccagtgtgcaactgctgctgggcagcctgcttctggttgccggctccgttttcggcctgtggcactggctggtgtcgatgcaaagcggggtaccagccaccgctggcaccgtgatggcggctggcctgccgatcatagtgggcgtgcagatgctgatgtcatggctgaatttcgatgtggcgagcgaaccccggcaggctgcgcaccggctgttggcagatgtgcaggcttaccagcgcggcggcggatcgacgcgatga

SEQ ID NO: 514351 - DNA, 2088 bp, Stenotrophomonas maltophilia
atgaccgtatccatgcccacacgccttctgctgtcgctgtccattgcgggggcgctgcccgcatgcagcccggtggatgccacgcaggcgcccgcagccgccacaatggaggactttcgtattgacgagcgcaggcttccggctttcatccggttcaagccctcggatctggattcggccatcgatgcctgcaacgccttcggtgagcacgtcaacggaaaatggacggcagcggcatcgattcccgccgatggcagttcctggggcgtagaggagctcctggctgaacgaagcaggggtgtacaggtgcagattctcgaccgcttggtggcgctggcccggcccgaccacgtcgagaagatgctggccgatctttgggcgaccggcctggacgaggtgcagatcgaagcgcaggggttgactccgctggccgaagagctggacgccattgccgcattgcacagccgggacgccgtggtggactacctgcacaagagcgcggcgcgcggccagaaccgcgtgttcagcctctgggtgtctgccgactacaaggacagcggcaccaacatcgcttttgtacgccagcggggactgggcctcccagaaccaggcatgtatgcggaccccggccaagcggcgttgatcgatgcgtaccgcgaacatatcgccgcaatgctggtgctggcgggcgacgatgctgcagacgcgcgtcgccaggccgggcacgtgcttgcgctcgagagccgcctggcggcagcgagctcgacggcgaccgatctggccaccaaacccgacctgtcctacaacccggtcagcgtagcgcaggccgatgccatcgccccccatttcaggtggcacgacttcttcgcggcccacggcctgcccgatccgaagatgttctcgctttcgatgcccgacttccacaaagaggtcagcaacgccctggccgacaccccgcccgaagcctggcgcgcctacctgcggttccaccagatccgggccgcagcgccgtacctgccggcagcgtttgcgcgggagtccttcaagttcaaccagaagcgcctgcgtggcgttgaagaaccagcgcctcgcaaggaacaggtactggatgcgctggactggctggtaggcgacgccattgggcagcactatgttgccgccacgttcccgccgcagaccaaggcacgcattgaagtgatggtgggccacctgaaggatgcgctacgcgagcgcatcaagggcgtcagctggatgggcgagcagacccgcgccgcagcattggaaaagctggacgcaatgaccatcaggattgctcacccggacacgtgggagagctgggacggactgcataccgaccggtccagctatctgggcaatatgcgcgctgcgactgcgttccgctaccgcgaacgcattgcccggataggcgcgccggtggaccgcgatgagtggatgatgcatccgcagaagccgaatgcctactacatggccaacaacaatgagctgggcttcacagctgccttcctgcagccgccacagttcgatcctgacgccgacgacgccctgaactatgggggcatcggtgccatcatcggccatgaactgattcatggctttgacgtcaatgggagcctgttcggcccgcgtggcgacatggagaactggtgggcagagggcgacgccaagcgattttccgaactgagtagcaggctggaggcgcagatcaaccagtaccggattggcggaaagcctgtgaacggtgccttggtcctcggcgaaagcatggccgacatgggcggcttggccgtcgcctttgatgccctgcaagcagcaactgcaagcacggccgatccgatgatcgacggtttgagccgggagcagcgcttcttctacagctacgccacgacctatcgcgagaagacgacccctcaacaggccgagatgtggctacgcacaagcaagcacccgccctacgcgatccgtgcgttcgcagcagcctccaaccacccgggctttgccgccgcattccagtgcaagcccggcgcgccgatggcccgcccccccgaggatcgcgtggtgatctggtaa

SEQ ID NO: 514352 - DNA, 426 bp, Stenotrophomonas maltophilia
atgaacattgaatcgatcctgtacaccgcccaggccaccgctgtcggcggccgcgaaggtcatgccacgtcgtctgacaggtcgctcgacatcgtgctgtccacgccgaaggagctggatggtaccggtggcccgggtaccaacccggagcagctgtttgccgccggctattcggcctgcttcctgggcgcactgcgctatgttgccgggcaggaacacgtggcccttccggacactgcggcagtcaccggccgcgtaggcatcggcgcggtcagcaccggctttgccatcgacgtcgcgctgaccgtatcgctgccgggcgtcaaccgtgaagtggccgacgacctggtgcgcaaggcgcacgtggtgtgcccgtattcgcacgccacccgcaacaacatcaacgtcgctctgatcctggcctga

SEQ ID NO: 514353 - DNA, 900 bp, Stenotrophomonas maltophilia
atggcgacgttgccgaagctgggttcttctgtgaagaagggccacgcgatgacgtcacgacgacggggagaactgctgtgggcgctgcgcctgatcagccgccatgccgggctggaagcgggccgcgcggctgcggccgtgctgcccctgcgggtgcacgcccggctggcggagtgcgctttccggcagttcgggccctggctgtgcaggcagcgcctgaaccgcacgcggcacgccctgcttcgcctgggctgctcccccgaacatgttgccaacctggccccgcacgtgctcgcacgagactggctgcgccgtgtcacccgcaagcggctgcatgcactgactttcgatgcacaacagcagtgggtgcgcggcatgctctggcgtgatccgcaggcgctgtgggccgccgccggggggcgccgccgcgtggtctgcctgctgcccagtggtgacccggagctggcgatggctgccctgctcgatcgccccggcgcgcccgcacactacttcctcaacagcccccatcgcgaggactcgccgccatatcgcgtgctgaagcagctgcagcgccgcggccaccggctggacatcggccaaccaagccaacacggacgcgcatggcgccaacttcgacaaggtgcgaccgtgctgaccgtgctgggccccgagctgctgatggcatcgtcgccggaacccgcgccgatccgcctggcacgcctggccggggtgccgctgatgctgctcggacatcgccaggagacgtccgacgccggcacggtgcatgtgctgcgcgaatttgccccgcacgaactgcaacccggcgcgcatgcactccagagcgtggcgcgcgccttcctggccgatgcgccgcacgactggacggatctgcaccggtaa

SEQ ID NO: 514354 - DNA, 2688 bp, Stenotrophomonas maltophilia
atgcgccccccagctccttccactgctgccgatccgttccgcgcccttccaggcgcaggtgcagcggccaccgatgccgatgagctgcgtgcgctgaagcgatacccgcgccggctgatgctggcctgtggtgccgtgctcagcctgctctcgatcagcgtgttgatcacgctgctggtggtgcaggtgaaccggttcgaagcacgtcggattgccgatttccgccgcgcgcacaatgcactgcagatccagttggcgcggcaggatgccagctacgcgcgcgtggccaacatggcgggctacgcgtgggggcggaatatctcactgggcgatacgccgccgcaggccatgcgccgggcctacctcgaaggcggccagcggctgatggtggtcgccgatgaccgcagccgcccgcagatggcgctgggccttgccacggctgactggccagccgccgaacttcagcggtatctgcagttgagtgcggcggtgtcgttgatccagcgcctgaccgccagcaccaacgacggtgagcccgccagtgcctcctatttcttcgatcccagtggccagtacctgtcactggacaggggcctgaccgagcgcagcctgatggacgcgctggcggtcgactcccggcagcaggtgttcgaacacctgcgcgcaccggcacaactgctggcaccggcctccagccatgaccaggtgccgctgctggaaagcgtgacccagcgtggccagccaaggcgctcgttcgcgcgccacccgatcagcggtgagccgtcgctggtatcggtgttccaggccctggacggggcctcgcccattgcgaccttcgttgcctatgagccgatcgagcgattgcaggcgctgctccggcgcaacagccaggggcatatcacgctggtggaccgcgacggactgcgcgtgctggcgtccagcgagccgggcgccggcccgcagtcgccgctgtccgagggcgactgggtgctgttgggcgatgccacccgggcgcgcttccacgagggccggtttaccctggcgctgggtgtggccggcacgccgtggacgctggtggagacctactgctggcgcgacatcctgcagggcatcgcgccggtgctggtggccggtggcctgctgttgatggcggcgctggcgttgttgtgggccttgctgatatggctgcatcggcgcatgtacacgccggcgctggagcaggtgcaggacatttacgcgcgcgatgaacgcctgcagcagctgctcgaacacttaccggtgggtgtggcgctgctggacgcacgcagcggcgcggtacaggaccagaacggaacgctgcggcgcatggacctggggacaggcgcccgcctgttgccgcggctgtgtgaagcggcactacgcaacgatcctgccgctgcgggtctgatcgacagcgagctaccctcgatccacgatgcacgccagttgcggcaccatcgcgcccgcttgcggccgggaggccgcgtctggccgggcagtgtgctgctggtcgtggaagacgtgaccgatgaggtgcttgcgcttcgggaacagcaggagcggacccgccaggccgagcgttgcagccaggccaagtcgcattttgttgccgcgatgagccacgagattcgtacaccgctgcacggcatcatcggccacctggagctgctggcccgtgcggcgctgcatccggaactgctggagcgggtggtccgcctgcgccagtcagccgactcgctgatggacatcatcaccgacgtgctggacctgtcgcgtatcgagtccggtcattggaccctcagccctgagcggttcgcaccggcggcactgctggagcgggtggcagtgctgtatgcgccgatggcgcacgccaagggcctgcagctggactgcgtggtggacccggaggtgccggaggtggccgtggcacccatggcggcaatcgaacgggtactgcgcaatctggccagcaacgcgttgaaattcacggcctccggccgcgtgcagctgcgcctgtcctgccgccgcgagggagggcaggcgcggctgcgcctggacgtgaccgactcgggaatcggcttgaccgcagccgagtgcgagcgcctgttccagccgttcatgcaggccgacgccagcatcctgtcgcgctttggcggttcaggcctgggcctggccctgtgccaacagctgtgcgagcgcatgcaagggcgcatctgggtggagagcaccacgggtgtcggcagccgcttcgtattcgaagtgcctctgttgacctcgatcaccacaccaccggcactgcccctgttcggccgcgagatcggactgctggccgccgcagggccttggcgcggcgaactggaacgccggctgcgcggctggggcgggcaggtcaggctgctttgtccaggcgccgagggtggcctgggtgatctgcgcgcaggcacgccggtggtggtcttcgagccttccgctgcagggctgaaggccgtgcaggacgcgggccacccgctggtctgggtcggtcgggagggccccttgcgcccgcagcgctcgccccgtggcattgaagtctcctgctatgccagtgaggccctgcgccaggcactgatggcggacgtcggcctcgacctcgcagagtcgaatacgtcagttgttggcgcaatcggataa

SEQ ID NO: 514355 - DNA, 3381 bp, Stenotrophomonas maltophilia
atggcagacgccgacaccgcagatggcacgggccgggcggccgcacgcctggaggacctgcgccggctgcggcggcgcctgctgctgggcggcggcgtcctgatcacggtactggtgatgctggccacagtggtcagttcggtggccgatgtggaggaattccacgcgcgtgaacggcagtccttcggcgaagcgcgcgccgcggtggactatttcctgttccagcgtgaccgtgcgtacgccacctccatcaatggcaacgatgtgctgtggcgcgaccagcgcccggccctgcagcacgtgggaacaccgttggccgagcgcttccacggccagggtgacgaggtggtggtgcgtgcccagggccgtaccgctgtgccatggctggtgctaggcgcgcgcgacaacccgctgcccgaggcggagttgcgtgcctacctcggcatggtcgatatctattccgcctataccgcagattcgatcaccgcccaggacgcaggtggtccggtgctgatgtacgcctacgagccgcaggggcggctggtggcggtggccaatgtgcgtgacgaggcccagctgttgcagatgctgggcgtaccgacccggcgccaggcgtttgcgcggctgttgagcgacgaaccgcagatccgcaaactggcgccacggcctggcccgatccgcgccgcctcgcgcgaggggcgcctgttgtcgcactacggcaccaacccgctgaccggccagccggccctgatcggcatggtgaccatggccgagggcaccaccccgtacttccgccgggtggtgttcgagtccatcgacaacatccgcgcccgcctgcagtcccgcgagcaggggcgctacctggtggcgtccagcaaccagcaggtggtgttcagcacgggcggcctgtccgcgcaggaccaggccatcctgctgggtacgctgggcggcacggccgccagccagcccaagcgcgagcatgtgcagggccgtttcatcctcacctgcagcctgccaggggtgaactggaccctcagccatgtctacgactggggcgatatctggcgcagccaaggctattacctgctggcgcgctggctcagtgcgctgctgatcatcggcctgttgtggtggctgctgcggcgcatcgaccgccgtgtgttcactccagcgctggccgatgcctcgcgcgtgtacgaaagcgaggcgctgagccgggtgatcatcggcaccgcgccaatcgggctggcactgctggcgcgcgacagcggggcggcgctgctgcagaacgaggccgcgcgccacctggtgggcggtgcggcgggcgcatcgccgcagcacgagggcattacgccgctgtacgcacgcctggtggagctggggcgcaatgcggccgatgacgagatcgtggagctgcaatggtcgccggagcagggcggggctggcagccagctacaggtcagtctgtcgcgtgccacctatcacgaccagccggtatgggtctgcgcaatgcgtgacgtgaccgcgcagcgcgaactggaagacaacctgcgccgggcgcgcgaagactcggagtcggcccggcattcggccgaggccgccaaccgggccaagtccgccttcgtagcgaccatgagccatgagatccgcaccccgctcaatggtgtgctgggccatctggaactgctggcgcgctcgccgctgcaggccgggcaacgcgagcgcctggatcgcatccgtttctcggccgatgcgttgatgcggatcatcagtgatgtgctggacttctccaagatcgaggccggccagctggacgtggaaccggcgccgttcgcgctgcgcccgcttattgaaagcgttgcactgctgtacgcgcccgatgcgctgcgcaagaacgtgcgcctgtactacgccgtggacgcaccggcggaccagcagtgcatcggtgatgcgcatcgcatccgccagatcctcaacaacctggtcagcaacgcggtgaagttcaccgaatccgggcgcatcctgctgcgtgccgagttgcagccaggcgaggcgggcagcgtgctgcgggtgcaggtcatcgactccggcatcggcatgaatgccgagcaggccgcgcagctgttccagccattccagcaggccgacgccagcgtctcgcgccgcttcggcggcagcgggctgggcttggcgctgtgccagcagctggcgcaggccatgggcgggcaggtggccgtggacagcaccgagggcgtgggcagcagctttaccctgaccttgccgatccaactgcaggcggccccgccagctgcggaaccgctggcggggcagcaggtgactgtgttgtccaccagcccggaatggcgcgccgaaatgacgcgcctgctgctggcctggggcgcggagatgaccgcgctggatcggcccaatgcggatgacagcggtgatctgctgctgatcgtcggcgatcaccgggcgtggagcgaggacgaagagcagcagttgcaggcagtgcatcggcgtaccgtgcttgcacatgcgcagggcccgctgacgccggagcaacacggtacgcgcgtcgaggtcacctgctatgccagcgacgcgctgctgctggcgttggaaggtgacggcgcgccggccatcgcacgtgccataaccccggcaacacccacgcagtcgcgtggcaccgtgctgctggtggaagacaacgcggtcaaccgcgagctgatccagcagcagctggaagaactcgggtacgcggtggaggccgccgaggatggccaggcggcgctggccctctggcgggacaacgccttcatggcagtgctgaccgacatcaacatgcccgtcatggatggttacgcgctggcgcgggaactgcgtgcacgcggccaatcgctgccgatcctggcgatcaccgccaccgcgctggccagtgagcgcgagcgatgcctggcggccggtatcgatgatctgctgctgaagcccctgaacctggaacggttgcaggcggggttgtcacgggtgcgaccggtggccccacccgggcagcaggcgacggctgcagcggtgcccgcgggcccgcgcaaggtttctgcggccatccgcaggctgttcgtcgagaccggcgacacggacctgaccgccattgccgaagctcgtggcgacaatgatgtgcagcgcctgctggatcgcgtacatgccttcaaaggggtgctgcagatgctcggcgagcgcgaactgggcgcgcagtgcggcgaggtcgagcagcggttgcgtgagggcagtacggtcgacccggcgatgctggatgcgctgcaatctgcgctggaggcctgtctgcaggcttatcgcgaagggctggagcgggaatcgtga

SEQ ID NO: 514356 - DNA, 714 bp, Stenotrophomonas maltophilia
atgtgcgaccagctgttgaagcacttccattccaaccaatccacggacaagcgcaccatgaatcatctgtcgatccgcgtggccattgccgatgaccacccggtgatccgcttgggtgtgcgcgccgcgctggatgaagcgcctgccatccagtgcattggcgaggccaaggattcgtccgaactggtgaagctgctggaacaggccgagaaggacgcggcgccctgcgatgtcgtggtgaccgactatgcgatgccgggtggcgatcatggcgacggactggagctgctcaaccacctgcagacgcacttcccgggcctgcgcatcgtggtgatgaccgggctggaccagcccgggctgctcaaccggctgaacagcctcggcgtggcaggcattctcagcaagggcgatgacctgcagcatgtggcatcggcggtgatggcggtctatgcgcaacggcgctacctgtcgcccagtgtggccgagcacctgcagcatctggagaagcgtcgcgtgacgtcgctttctcccaacgaaaagaaggtgattaccttgttcatttccggcctgagcgttgccgagatcgcggcaaccctgggccgcaaaaagcagaccgtcagcacgcagaagatcaatgccatgcgcaagctgggcattgccggcgatgccgagctgcataccttcgccgccgatcttggcctcaaggcggactga

SEQ ID NO: 514357 - DNA, 669 bp, Stenotrophomonas maltophilia
atgagcattcgcattgtcgtggccgatgaccatccggtcgtcatcgccggtgcgcaggaagcgctggcgaaggtgcccggcatccagatcatcgccagcgccacggattctacgtcattggtcgaggcgttgagtggtactcccgtcgatgtggcggtcaccgacttttcgatgccgggtggccagtacggagatggcgtggcgttgttggggtttctgaagcgtcgctttcccaaggtgccactggtagtgctgaccggtattggcggaacccaagtgctggtcagcctgcgccgcgcggaagtgacctgcatcgtggccaagaccgatctcatcgatcacctggtttacgccatccaggcagcacacaggggccagggctatctctcgccggatatcgagcgccagatcggcagcctggtccaggcggtatccgcagagctgaccaagcgcgagaccgaggtactgcgcttgattgccgaggggcgctcgcagaaggagattgccgaacagctgcaacgcagccgccagaccatcagcacgcagaagcactcggccatgcgcaagctagggttgcaacgtactgcggacatcttcgaatacgccgtgcgcgaaggactggtgtcggcttcgcaggcctcacgcccgcggcgcggcgaagccgactga

SEQ ID NO: 514358 - DNA, 267 bp, Stenotrophomonas maltophilia
atggcaacgccggatgcaggcgctagggtggggaggatcctgttcttccacaccggagccgccgtgccacgcccgcttgatggccatatcgctgccttgatgtccagcttcgcccagctcaagccgcacgggcagaagcgctttcttgagcagctcaatgaatacctgtacgcctccgcagcgcagcgccggcagctgcggcggcaatggccggatgtggtgattgaaccctgcacctgccatgaggacgagcccggctcgccgtag

SEQ ID NO: 514359 - DNA, 930 bp, Stenotrophomonas maltophilia
atgatttcacgcaagcttctctgtgccgccgtgctggcatgcgtcgcaccgctttccgccgttgcggcggatggctacctgaccccgggcaagaatggcggcagcggcaagatgccctcaggctattcgcacctgtactttgaactggccgagaatgactggacacggatcgtcacgctgccggagcgcccgcaggccggcgaccgcgtgacgctcagctcgctggccgacagctacgcgattctggacgcccggaagaccgtgtttgaagagcaggtcgatatcccggtcgacagcctgagcaatgccgagttccgctggagcgatgcctacagccgttgggacgtggtgggcgggctgaccgcgcgcctggtgactggccgcaacaccgacaccctgcagattccagactcggatcacacgctcacccaggtgggcctgtacgacaccaagcgtgcttcaacggtgcagttgccgaccttggcccgcaatggctcgttgctggtggtggccaatgcctccagtgcagacgtgacggtgcgcggcgtgcaggcgcagggctctgccagcaactgcgaagcgggccgcaactgcgcgttcgtgttcggcgccgatggcgtgtggtacgtgcgcctgggcaatggccgccaacaggccaccgaatcgctgccgaccccggccaagcgctggaccgatgtgttcctgagcagcccggccgatgacccgttgctgccgcaggagatgcgcctgccgcgcgaagcggtctgtggtgacgtctaccagttcaccaatctggacactgcgcagttcacccgcgtgtcggcggaaaacaccgatctgaagaacagtgcgctgatccgcaagggccatcgctacgtcttccgcttcgatggtgctcagggccgctggatccaccagcgcgtcaagtaa

SEQ ID NO: 514360 - DNA, 684 bp, Stenotrophomonas maltophilia
atgaaattcattctttctgccggctgtgtggcggtagccacctgcgcgcctgctgccgccttcgccaacgatgacaccggctactacgccagcatccgcgtcatcgacgcccaccaccaggcccgcaacctcgatgccagtgcccgcccgggcatcggccagttcgttgccggtgaccagcgccagcacttcgccactggctcggcagctttcggctacacgcatggcactggctggcgcaccgaaggtgagtatgtggttcgccgcaacgacacctacaccagcggctccagcaccttcgccaccagcttcaacaaccacgaggtgcgttcgcagcggctgatgctcaacgcgtaccgcgatatcgccatcaacgatgcatggtcggtctacggcatggccggcgccggcctgtcgcacctgcagtccggtggctggcagggcaacccgaaccgccagtacggcaagtccacccgcacgcaactggcgtggtcggcgggcgtaggcatttcggttgcggcaggcaccaacaccacggtggacctgggctaccgctacacggacctgggcaccaccgaaagcggatggaaccgcttcgccaatgcgcgtggcctgcaggacgagaagatgcagctggacgtggtgtcgcgcgaagtgacgctgggcgtgcgctacgcattctga

SEQ ID NO: 514361 - DNA, 510 bp, Stenotrophomonas maltophilia
atgaacaagcttgcaattgctctgaccgccgcgctctcgctgggtgctgctgcttcggccagtgctgctgatgcgaccatcaacttcagcggcgagatcaaggcgctgacctgcaccatcactgcaggtgcctcgggtacgagcgtcaccatgccgactttgtccgctgcggtcatcaacggtggtacgggtgcccgtcagaaggacttcaccatccagatgggtgcgtctggtggttcgtgcgacgccggcacctacatcctcagcttcaacggtgcaaacctcgaagaggggcgcctgaagaagaccacgggtaccgccgacaacgtggagctggcgattctggaagggggcacggaagtggatctgcgcacgcataccatcacgcgcactcttgcagccgcgggttccatcaccgtcccgctggtggccaagtacgaaaaggctgctgccggcgacgccacgaacggcactttcaacaccggcctgcaagtcttcgtccagtactga

SEQ ID NO: 514362 - DNA, 735 bp, Stenotrophomonas maltophilia
atgcttcatctcaatcaaaagcttgtcctcactgccgctttagccgtggcagcctgtggtgcagcgccggccaaggcgggtgtggtcatcagtggtacccgcgttgtattccccgcagcggagcgcgaggtaagcgtgcgcctggccaataccggcgacgcgcctgcgctggtgcagtcatggatcgatgacggtgacgccaaaggtacgcctgaaaccatggggcacgtgcccttcgtgattcgtccgccagtcgcccgtgtggatccaggcagcggccaggtgctgcgcatcgcccatacagggcaggccatgccccaggatcgggagagcgtgtactttctcaatgtgctggatgtcccagccgcagcaccggccacggctagcgacggtgtactgcacctggtcgtacgttctcggctgaaagtgttctatcggccaaaaggcctgaccgcagtcggcgcagccaaggcgccttcgcagttgcgttggagcgtggccaaagaccacgaaggatgggcgctgaaggccgacaatccaacgccctatcacgtgagcgtggacgcaattgtcggcgtgaacaacatcggtgctgagatggtgacgccacgtgcaactcgcacataccggctgagtcaggccgagtactcttcactcggctcaactgtcaccttcaagatccggaccgaccacggtgcccaggtttcggtgaatgcgccactcgcgcgcgactga

SEQ ID NO: 514363 - DNA, 2490 bp, Stenotrophomonas maltophilia
atgggcgctcccgctttggagttcaactccgatctcctgtacggcacgcacatcgacgtgagccggttcgagcgcgatggcatggcgccaggcacctacagtgccgacatcagtgtcaatggcacgattgtcggccgccgcgacgtcgaggtgcgtgatctcgatggcaccagccggatctgtttgacgcctgagttgcttgccatgctcggccttgatgctgcaaaggttgatgctgcgcgcaacgccgcggatgtcgaattgctgccgatgccggaggccatgagttgcgaggatatctcgcgcttcattccctccgcctctgcgggcttggacgtgggagagcagatcctggagatcagcattccgcaggcctacatgagctcacgggtaagtggctgggttgatccagagcgctgggacaacggcatcaatgcgctgctgctgaactacagcgtcagccacaatcgattcaactacagcggccagcagaccagtcgcacgagcggcagcattgatgccgggctgaatctgggcgcgtggcgagtgcgccataacggctacttcgtcgcggggcagggtacggcgagctacaccgctggaacgctgttcgctcagcgcgagatccgccgctggaatgcccagctgaccataggcgaggccgccagcgatggcgatctgttcggttctgtcagctatcgcggcgtcaacctgagcaccgatcctcgcatgctccccgattctctcaatagctatgcgccggtggtcagagggaccgcccagaccaatgcgcggatcactatccgtcagcgtggccgggtcattcacgaaaccacggtggcgccagggccattcgagatcgataatctgacaagcatggccagcggtggcgacctggaggtggaggtcagcgaagcggacggccgtgtcgagacctttgtggttccgtttgcagcattgccgaagctgctgcgccagggccagcagcgcttcagcgtaaccgccggagagctgcgtgatgccaatccggaggcgacgcgtttcgcccaagccacctatcgccgtggcatgggcagtgcgatcacggcctacggtggtgcactggcgtcggacagctaccatgccgttctccttggtgccgcattcaatacccgcataggcgcattctccggtgacgttacgttctcggacacgcgcctgtcgtctgatctgccggggttcggaaatcgtatgagcgggcagtcctatcgtctgggctacagccgcacattcaacagcgcaaccagcttttcactggcggcctaccgctactcgaccgaaggatacctgagcttcagcgaggcggctcgcttgcaggctcagatgagtgccggcgctggccagccaatggttgcgcggcagcgcagccggcttgacctgacggtcagccagcgattgccgaagggatcggtgtatctgcagggcagcagcgccgactactggagtgacaatcggcgttccaccaccttctccgccggctacagcggacagctcggccctgcttcatacaacctgagtgcgcggcgatcaatggagtcttcactgttcggcgcgggcggtacgcgcgtcagcacgagcgtgaatctcagcatccaggtcccactgggacgcgcaccttctgcgccgcgtctcagcgccagcgccggtactagcggcaacggtggaatttaccgtgcaggtgtggaagggcagttcggtggcttgcagcagggcaactacaacgtttcctacggacgcgacagcggtttgagcgagttcggcgtgggtgtcggctatcgtgcttccgccgctgctctcggtgcgagctggacccagagcgatagcgcccagcagctgggcatctctgcaagtggcagcgtgcttatgcatgcaggcgggatggcattgtcattgccggtgggagagaccgtgggtctgctgcatgtccccggtgcggcgggcgcggcggtagggagccaacgtggcgtcaagaccaatagcaagggctacgccattgtgccgtacctaagtgcctaccggttgaacgaggtttccgtggatcccaagggccttccgatggatgtcgagctgaagacaggctcggtcaccgcggtgccgacggcgggtgcggtggtcaagatggtggttcccacttcggtgggccgtagcgccctgatcgaagcgatggatgccgatggggctccgctgccgttcgggttggatgtctacaacgaggctggcgagattgttggcgtcgttggtcagggcagccgcctgtgggtgcgcggcgtcgaggagtcgggtcgcctgcttgtcaatgccggtgagaacgggaccggccgctgtgcaatccactatgacctctcgggtgccggcaatgacgaagttcatgtgagcaagtgtctgcggtctgagcttgaagggatcgcagaagccaaagaagcgagctcggctggcaatgcttcgcactga

SEQ ID NO: 514364 - DNA, 1023 bp, Stenotrophomonas maltophilia
atgatatttccaaactgtttcaacgccggaatgtggcggatcaaagctctgttgattttggggctcgtgctgggtgctccggccgcgaaagcctgcacaacggtcgctgatcggatggatccctcggcaggcggcacgggcgtagaatggcaattcaccggtgtgggtgagccgttaatggggtgggtgcgctactggggcaacccggctaaccccgacacctttgtctatcgatcctgctccgggagcggaacccagcgtgttgttcttgcaccggcgctttcgttgtactcggaggatgacgcctccggcggggcggctatcttcaatgtcggcaatggtgtgggggtacaattctccgtagccatccaggatgcaagtggtagctggctgagcgacgagaatgtcagctcgacgggtattgaggttgatgcaccggtcatcgcaggcgacgtgcaggtcaggatctggtaccggtacatcgcgacggccgatccggggtcagcatcgacgctgaccgcgaacgccttttcgtggaacattagcgggtccggcccagcgtaccgaaaggtcgtgtcgagccactctattggcaagtatatcccgccaccggcgccgtcttgcggctttgaccttgaaccgcccggtgatgtggcgttgtcgcacactacgttggggatgcttgagcgcgatggcagtggcccgcccaaggagttcagctggaagttcagctgcaattccactgccagcgggagcatcgtgacctaccgtcccggtaccgcatcaggtgctacgggcagaatggctatcgagtctgaaccgggcgcggcgaagggcgtcgagttcgaggttcgtagagcgaccacccccagcggtgccaagtcgccggtcaggttcgacagtccctactatcctggcaagagtggcacggagtatctggatgtgcgctacgtgcacaccggggaccccctgcaggcaggcaagggcaagggcagcctgaaggtcgagttggatgtgtactga

SEQ ID NO: 514365 - DNA, 750 bp, Stenotrophomonas maltophilia
atgggtaggttgcgtatcatcggggtattggttttgctgatgctgccatgggtctgccgggctgacattgcagtgcatgtcacgcggttgattcaccagggagatgagcgaatggtcgtcgagcggatctggaacaagggcaacagaccgtccttgatccaggcttggattgacgagggtgatcgcgagcaatcggtcagcgggacccgccccccgttcttcgccattccgccgctgttccaactggaacctggtcggaatcgcgacatcagtgtccgactggtggacgcggcgtccctcccgtctgaccgggagtcactctactggctgaacattcttgaccttccagctacctccaagagcgatggtcctaccgatatcgcctatgcagtccgctggcgcataaagctctttcatcggccctcagggctttccggttcgtccgcagatgcggtgtctggactgaagtgggccgtgcgccgttcgggggacagggttgtgctggttgcgcagaatgatgctccttatcacgtcagcctgcgcgagcttcagttggggggggatgctctggagcttccagtggcgagtgcggtcatcgcaccgctggcggaatggtcgatggagatcccagcaccaaaggggcccgatggccttcggttgaagggcgtatggctggatgatggggcagagggccatgatttcgagttggttgtcgcctgcgatgaagagtggtgcggccacatccagtga

SEQ ID NO: 514366 - DNA, 1041 bp, Stenotrophomonas maltophilia
atgctctcaggtggtgcaggtttggcgtctggcctctcaggctggctctcgaccggggcggcgcgggtggctgtgtccatcctgaccttgacgcctggacttgcccatgctgcctgcaccggaggcggcggcgacaccaacctgtccccgccacccctggttgaattcagcgccaaggacgtggcggtgaacgcccccctcacaccgtggctgcccctgagcggcggcgcgccaacgaccgagttccgttgcgacagcagcgcgaacatcagctaccgggtagaaagccacggtggctatgttgacccgcgctatcacgaaagcgggcaggagttcatggtgtaccgcaccggcgtggaaggggttggcatggccttcctggtcgagtcgtggcgtggtggcgcgcgcccgtccggcctcgggtacaacgaggtggagctgtacgcaggtgacagcggcgtgggcccggttggcgcgcgggtgatgatcaagtacatccgcatcggcccgatcagccatggcagtacatcaaccagccgggaaatggtgatccagtcgcggttgtacgagggcggctccggctcgccacgccgcgaggatctgtgggtgtcctcgaccacgttgaaagtgcaggacaagcccagctgtcgcatgcgtgcacaggaggtgaacatggggtcgatccctgtaagtgcgttcaagggcgtgggcacgaccgccgggcagcgcacctatgaactggcactcgattgcgaagccggggtggggcaggtggactaccaggtggtaccgaccacggcggtgatcgatgctgggctggggctggcagaagccacgggcggggttaagggagtggcctaccagttcctggaatccggcgacgtgccgatgcggttctacagtaccggactgttcggctatggctcggccagtgcccaggtgctgcgcaagacgttcggggtacgctaccggcagaccgagtcgactatcacccccggcccggccaatgccggcctgaccttcagcctgaccttcccctga

SEQ ID NO: 514367 - DNA, 723 bp, Stenotrophomonas maltophilia
atggtgcttcgcgtgcacacacgactgatggaatgcgtcgctgggctgggtctgctgtttgccgtggcgagtgccgcgcgcgcagagatcacggtggaaggaacccgcgcaatctatgcagcaccggcggcggagatcagtgtgcggctgggcaatgaagggcgccgcgccgcgctggtacaggcttggatttcggacggagggccggagcagaagcccgaggattcggcggcaccgttcatcctcgacaagccggtgttccggctggacccaggcaaaacgcatgcactgcggatacgcggcattgccgcgaaagcgccagtggatgaccgtgaacacctttactggctgaacgtggtggacgtgcccccgcgcgaagcgggcgctgatgagaatgtggtgcagttggccatccgtttccgcatgaagctgttctaccgcccggccgggctgggcacacccgtggacccggatgccaaggtggcgatggcacgcacggagcgcggcattgaactgcgcaacgccgcgcggcattacttcaacatcgccacgatgacggtggtctccgaggcgggagagcgtgcactggacagtctctatctggcgccgggcgagacccgcacgctggcactacccgagggcgtcagcgggccagtaagccaggttcgctaccagtgggtggacgacgacggcatcctgcatgcggaaacccgcacgctttga

SEQ ID NO: 514368 - DNA, 681 bp, Stenotrophomonas maltophilia
gtgggcgagctgagggcatcccgtccgggagtgatggaaggtgcggcagcgcccgccttcaccagcagcgccatcgaagcgctgaaatggcttgcgctgttgtccatgaccggcgaccacgtggccaaggtgctctgcggcggctacctgccaggggtgagcgagctggggcgcctggcgtttccgctgttcgcactggtgatggcctgcaacctggcccggcccggcgccgacctggccaggtcgatccgccgtctcggcctgtggggtctggtcgcgcagccgctgcatgcgctggccttcggcgcttggctgccgttgaacatcctgttgaccttcaccgtagccgcgctggcggttttcgcgctggcccgcaaccggccactactgttgctgctggccgcaggggtgttgccggccgtggtggactaccagtgggccggcgtcggcttcgtggtgctgggctggatcgcgttccggcaccgcgcgtggtggctgttgctgattggcttcgcggcggtgtgctgggccaaccataacggctgggcgttgctggccattcccttggcctgggcgctggcgcgtgtggaatggcgcatcccacgttggcgctgggcgttctatggctactacgtggggcatctggcggtgctggtggtgctggcccgtgtgctttcgtga

SEQ ID NO: 514369 - DNA, 366 bp, Stenotrophomonas maltophilia
atgaacgcatcggatattccccacctgcgcgcgcagtacgcctcggcgaatgccgaagaaggcgaagccaccgcgcccgatccccacaacttcatcgcgctgctgcaccagattggtctgggtgccgctgccgacggccagccctggcccgagcgccaccagttgccgggccgctgcctggccctggccgacagcgatggcgccctggccggcctgcgcgtggtgcaggagattctgctggccgccgaacgcgcccgccagagcggcggcccggaacactacgtgggcgaccgcgtaatggaagggctgaagctggccgcgctggcgctgaccaaccacgccatcttccgtctgcaacccgagtag

SEQ ID NO: 514370 - DNA, 270 bp, Stenotrophomonas maltophilia
gtgcgcaagaaccttgcccacaacatcgtcatcgccgcagcgctttcgctggccgccgccgcctcggcccaggcggccgaattcatgtgctttgccaagatcgggccggccagcgcgccgaacaacagcagcccgatgttcggctcagtacaggccggcagcaaggcggctgccgaagcccagtaccaggcccgcgtggccacgaccgccgcgcccgtgcgtgcggggcgctgggtgatccacagcgtggagtgccagctagccaagtga

SEQ ID NO: 514371 - DNA, 1395 bp, Stenotrophomonas maltophilia
atgcgccttccagcttttccttcgtttgccacgccgttgcgatacgtgctgctcgcaacactcctgctcgtaccccatctggccagcgccgcctcggtctgcgtcatgcgttcgggcgagcgcatgctgctggtgcaggatgtcacctcgcgctggcagctgcctggcggaatggcagaacatggtgagttgccgcagcacactgccatccgcgaagcgctggaagaaaccgggcttgtcgtcaccaccaccgacctgctggacgacgaggcgggcgtgcatgtcttcgcctgccgcgccctcgaaccggtccaggtacagggcaatgcggtgaacctgctggatgcgccgcacctcgggcgggaaatcatccaggcgcgctgggtcggccgcgacgaggctcgtacattgcgcacacgtttcccgcaacagctggagcgcgcgtatcaacagctgcatgcggtgccccccagcgaagtgcagcccgtcgagcgcttcgcgccggtatcggcgttccggcaggccgaggtggatcgcgtgcagcgcacccagcagtggccggtgcgcgggctggcggtggttggcaacatcctgggcgaattctggttctacctgctggcaatgcctgtgttgtgggcggcgttcggcgcgcaggcaacgcgcctgatgctgatggcgttgatggtggtcacgctggccgtgcagagcatcaaggtcttcgcaccggtgccgcgccccttcagcttcgacgccacgctcagcctggccggtgccgccggcccttccctgcccagcgggcacaccaccagcgctacctgcttctttgtactggccgcgctgtggttgttggcacgccaacacatcaccggaaggttcaagcgcggggcagtgctgggcgtcgcgctgatggccggggtgatcgccggaatggcccgggtctggctgggggttcactattggagcgatgttgctgccgggttgctgttgggtagtgcgatcgcagcgggaatccatgcgttggggacatcgctggcacgccacgaacacccggcggtgcgcgagcggatctgttgggctgccattgcctccgccagcctggccgtgggtgtggcctggcaggccgtgccgctgctattgccgttctgcgtagcagccgcctgcgcggtggtgccgcgtgcaacccaggagcgagcgtcggtgggctcggcggtattgctgctgctcggcctgctggtgctgggtgggctatgcctgccgatggcccaacgcgccgagccattcgcgcttgcggccagcctgcaggcgctggtctacatggggctgggcgcctgggtggcctggggtgccagcgcggttgccgggttgcgcccgatgaagcacccgccgtcacggtag

SEQ ID NO: 514372 - DNA, 462 bp, Stenotrophomonas maltophilia
atgtttggtgatgattccctgctttttatgaaatatgtgaaagggcggagcagcgctgtatacccgtggtcgttgtcaattgtggattgctattttatatggctcgcattttgcaaggtctctggcagtgaccggccgctgctgtcgaggatatctgcggacggcgagcagattgaggatgttctcattgctgatgcctacgatatttacgagattgatagtcgcgctgaaggtttcgaagttgtgctgcgccaccattcgtccggctcactgtgctattgggatattcatgagcgttttgttgtagctgttggtggtcgtgattttcttgaggtggcaagcccctatcctggggacatagaaaaacatcgctatattgaggagatgatgcatagagaggcgctcggaattgatgagccgcctgaagtgatttatgcggccatctccaatccgttctcttga

SEQ ID NO: 514373 - DNA, 534 bp, Stenotrophomonas maltophilia
atgtgcaccttcgtcacactgttcctgcccacctcgtttgcgcacgtgaaagccgccaggatcatggagcgcagcggccgacgcctgttcgtacaggattctcccagtctgcaggcggccgtcgggcccggctggcagccgtggctgagcgccgcgcactgcgattgcggtactgcgctggcctcgtcgcgggccgagcgggagtggaagggcgatgccgaacgctggcggaagaagggctggagcgaagccaagatcgcccgcgcgctggccgagcagcgagcgcgccatgaacaggatcagcaggtacgtcgcgatgaagcagtgggcgacgccggccagtggctgcagcgcatcgatgcgctgctgcaggctggtgccgcgcgtatcggcctgctggtgcgtgactacgacggtgcggtgagtgacctgcagccgaagccgccggaacgtcactggccgcggggccagctggccgcagcggatctgctggcgttcgagccgggcacgttgcattggatcgaacgcgggtag

SEQ ID NO: 514374 - DNA, 1392 bp, Stenotrophomonas maltophilia
gtgatctactcttttacgtatgaagggaaaattttcaatctactgcctctcaatgtgcgaactgggcaagggtggaacatcttcaacgcccattccatgtcgcttctcataggtgcgaatgggtcaggaaaaaccgagtttctatccaggttgtgcgaagctattcgcgacaagaacgaatctgacctggaagctggtgtcgacctaagtaaatacggggtaatttacttcacgccagctccggttgcgcgctctagatttccacgttccggaaagaggttcaaactgcttgagggggctgacagaaagttcaaggcagatcccaaagttgtagctactctgtcgcgtgagtttcgattctcaaattcaatcgtggcacgcctcgccgtgccgatggagcgggggctcgacgcactctttgctgctgcaatggagtttccaacagactatagttctgagttcgcagagatttttggttcaagattcaaagactacgtagaaaggtcccatcgttggcgatcgtacgacggcgtaactgacgaggagatcgatgcgcgtcagcaagatatgcttgatgctcaaagcagtcttcgaaccacgatccggaactatcttcgaaaagcttatgggcctgattattcgaacgctattcttgccgctattgcgcacggctctctgcgcggacgcaagcgaatcgtggtggctagacgcttctggaaggcaactttgcgtggaggccaagatgtcgaagatgttcttcctgacttcaagaagttcatcgagatattcaaaaaactagggcctaaggttgcaaaaagaggcgtggcaataactgataagcggcgcagtcacttggaacgccaatttggagagattctttcatttgagctctctgggcttagctcgggggctgaagcgctcgtgaggcagttcttcaaactaagctcggctattggtgagcttcgttcgaatgggatttctaatctaattctaatgatcgatgagggcgatgcgttccttcatattgcttggcagcaacgatatgttgactatctcaatagatttatcgggaaagagatggaggggtttgactctgtacaggttgtgttggcatctcactcccctgtgttgatgtccgattttcctagagactttctgattaatcttgggcagggggattttggatgtcaaaagtcgttcggtgcgccattggaattaatcatagagagcgccgcgggggcgggaactgtaggtacctttgctgcaaggagcatgaaggggctagttaagaggaaatttttgaggccgcgcgatcactacttgattgatcagttggatgatccaatcgtgaaatcttttatctcgaggcggcgcagtgataatatcaattga

SEQ ID NO: 514375 - DNA, 948 bp, Stenotrophomonas maltophilia
gtgataatatcaattgatgatgcttggtctgattatgctatccggcggcaccaggaatatgttagcgatctcttggatggtgagtttagagaagatgtgccttggggttgccggtatttgagtgaattcgtaagtagaaataagcgtgcaatttctgtgggtgacgtctgcgagataagaagctgcattgatgattttcagattatcatggcgaatcgatcagagtccgtggctgaaagaattaatgccaaaattgaaagtgtattgagctattcagcattctgcaggaagcgaccaagcgcttgggacgcttatgcactgtgtaaggaattcaagtacgacatgtgtccgtattgtcagcaatcgcttgcaatgacagtatttcgagatggctctggcgccttcaggcctaccttggatcatttttacccgaagtataggtttccttttttggcgctatctttgtacaacttggttccctcgtgccaatcttgcaatagctcgctgaagggggcgatggattttttcgatgttgaacatctccatccatatggaagcacggaatccatattctttgagattgacatcgataagtacttgagaagcagaactaagggggcgaagggctggcgcgtgaatgtgtttggtcgtgggggcgcggctgcttctgaatctatttcgacttttgcaattaaagagaggtatgaaatgcttgagtcgctcgtggatagatttgttgccagtacatatctgagattcagtataaatgaggttaagtacagggatcttatctcaaatgcggattttcaattggagcttgatgagcttgttggtttttctccgtcggcttacaagaatgagtttatgggtaggatgaagctggatttatacgagcagatcaggggtaggcttaatcagtctttgggtgctggagtggtcaatatttaa

SEQ ID NO: 514376 - DNA, 774 bp, Stenotrophomonas maltophilia
atgaccaccattcttctcccaagattgtcccgtttgggcgtcagccgcctggtggcggagctcggcacggattactcgtccgacgatgccgtagcctttttgaatgaccacgcctcgctatcgagctatgcagcaagtgggggagtcagagagcatcgtgtggctgaagagatcgccgcgactattcgcaagactgcggaggggtgtgggtttcccaacttgtcggggcagaccgggcgcgccaagttcgatcgtgacgcagccattgcccttgcgtcgtttggctcactagcaagtggcgaagggttgcgggatgacgtctgggcctatctgaccactgtattgctgcccgacgttgtgcgctggcgattcgagagcaagtctcaagagcgattcagcggcggggtacgtaatgctctgcagcggctctacatgcgagcgtcagcgcttgacttgggacccgaagcgggcgttgatcggtggcgcctgctgagagctctgacagaggacgcccatgtagcgatctttgagcgtccactgattggcgggaaccgggtacttgcaaaagctatcgcccacggttgggcccaagcggcagcaagtgagtccaaagggaacatggaagacatcatgcgttgcgctataaagctcctgcgcctcaggtaccagatcgttgatcttggcgtactggaagatcaggagctcgctgacacggttgcgagcgtattcaaggacgcagcggcccaagtggtcgaagtggtcgaagtagtctga

SEQ ID NO: 514377 - DNA, 915 bp, Stenotrophomonas maltophilia
atgagcagaatcgcgtatccgtacctaagaattccagatgaagcggtccagttcagtggctggtttgtgggagaccccaacgctccacttcttcctgcaccggaagtcctggctgactgggactacgcccgcgatttggtcgtacgcgggggtgttcagattgattgggattccgcgtccgagtcgcttcagtttggagagggagattggctggcatccgcacagcttctgattggaacaggacaggggcagttgcctaggcaagttcagtatgcacaggcactcccactctccaagcaaaacccatcagcccttctggaggtatcggttccaggcagcacgctgtcctctcagctggccatgcgtttgacgattgcgttgaccgcgccgtccactgaagcaacgccactttcaccagtgctgaaagggtctcgcttgtgggagagcagttgtgatgtgctgatcgaagacggaggatcttccagattcccggtctccgccattggcttcggagctgccttcgccggcaagccgcatgagcatgctccctggtatgtcgaatggcggccagaggatctttccggcgacttttcctcgaaggtcgttctctatgtcaactctgacgaggagacattccttgagaagttcctgttgggtgatcgcgcaactatccaggcagtgcttggcggcgtcgcctcacacatgtgctcgaccattctcctgcgtaacagcaaggacttggatctcgaagcgttcgaggagggttcggttggcgcggtggcgaatcactggctcagtcaggcgttccccaacgaaggcgggctggcaggtatcgtccgattgctcgagagtgaccctggggcattcaacgctgcactgattgcatccgccgatgttggagagcagaccacatga

SEQ ID NO: 514378 - DNA, 1845 bp, Stenotrophomonas maltophilia
atgaaacttgagctatacagcgaacccttctcaaagaatgggaaccttgcgggggaaggcttcaagcgactgttggggagacccaacctcaacctgcttcagacattggtgcgcgagagtctgcagaacgtaattgacgcaaccctgcctggacgatcccctgaggcacgtattcgcctgcggaagtttagggacaccgagcggaacaccctgtcgaactcagtgttggcccagatgccagccggcggtccttccaagcagattctcagcgactctttggagaagcccgaactctgggtttttgagatagccgattttggtacggtgggcctttctggccctgtagaggccgatgtcgcgccgtcgggagaggagcgggctaacttcgtcaacttcctcaagaacgttggggcagcacgagacagccaccaaggtggcggcacctacggttatggaaagagctcgctctacgcaatgagttcgtgctcgcttgtcctagttgatagccaaactttcaatgagggaaagccggttcgccgtcttatggcctgccacttgggagaggctttcgacgcgagtgtcggaactggcattcggcgtttcacggggcgccactggtggggcatgcccgcgggcagcgacagcgtggctcccgcgaccggagcgcacgcactcgacttgagtggcgagttggggatgttctctcgatccgaggctgatagcgggacctctatcgttatcgtagatcccgagcttgaagtctcttccacccaggaactgggtcgtgagctgattacgtgtgtactcctgaacttctggccaagaatgtcggatacgaccgcggctgaccgccgcctgacggtcagcatcgagattgacggccagccgctggatgtcccagcgcctgaggctttcccgccactggacctcttctgccgggcactcgccgacattcgttccaatgcgggttcattgaaggacgttcgatctcagcgtcctgcaaaggcattgggcaagctcgcattcgccccgggggtcgcggcgcagaggcatccactggcttcttccaatggtgaagacatcctggcaggtgcatcgcacattgccttgatgcgccctgtcgaattagtggtgaagtacttacgcggcgccccctatccggactccctgcatgagtgggcaggggtttttgtctgctcggctgagtcggaggtggaggaagcctttgctcaggcggagccaccaacgcacgatgactgggcaccggacaatcttcccaaaggaaagcaacagacgatggttcgagtcggcatgcgggctctcagagcccatgccgatacatttgtgcctaccaagtcgctcagcagatcagcggaccctgcgtcccccagtctcgcggcaactgccgggcaaatggggcgctttctctcacccacaagcgcccgcggcgctggaaaacctgaaccatccaagcgcggtggtccatcacccaagaagggcgtccggctatcttcacccgagatgattggactctctcttgctcaagacggcgcagcacttgcgacgttcagggttgatttgaccaatgacgggagccaaggaccactgacgctcatcgtcgagccgaagctggtcgctgatggcaatggaatcagtgcagaagacgtaccctcgaatctgcttccacgactacacagcgtgtcactggaagcacacgacctgagcagcaagggtcagatcctcgacgttgggctattgagcggggaggttaccgcggttgttcgaatggtcaagggcgctgctgtgactgtcgcagtccgagtacttagtgaggacgcggcatga

SEQ ID NO: 514379 - DNA, 1005 bp, Stenotrophomonas maltophilia
atgcgtgagactgcccacgaacactggctctcgcttcgcagcagcacgcagcggagagacggagtggacgtcgcaacggtggccgcaggggttgactccgggtttggtgccattcgctatgcacttacacctgacgcagctccgagactgctgattccagtgtcagctggggtgtcggcctctgatgtacgaaagcttgggggacccagcgttgatatatctatcacgcgactttcgctcagtggcatctggtcgctctacgtcgacattggccttcgcgagcggcgactggagagtcttttcggcgatctctgcacgcaaatcatttctagaatcgcagacggcatacctccgctggccgccgtggcgtcctgcatcagagattttcgaattctactggcagaggagcctcaagctccggttgacgtgagcacggtgctcggcttgctcggcgagcttgtggttcttcgagagggtgtaaggcgaagcgcgcaggcagttgactcctggaccggtcccttgggtcaacgacacgactttcgaggtccaggcggcgcgttggaagtcaagtccaccgcctttctgcagagctcaaatgtgcacatccatgggctcgaacagctctctccgcccgctgacaccccgctttggttagctcacgtagtgcttgagagggctgcagccggaaatgtttatgtagaacagctctgcaaagagttgatcgcattgggagttaaggaagatgccattgtcagtcgtctggcatcgatgggctgtcaggactccagggctccggagtggaacgctctgcgcaccaccttggaggccatcaggctttattcagtctctgacaacttcccaaggctcaccaccagcctgctgccacatggacaacttccggccggcgttggcgatgtccaatacacgattgatttgggttcagccgcggaccaattggtaccgagcactcagcatgaacacgtctacgaggcggtcttctcatga

SEQ ID NO: 514380 - DNA, 2592 bp, Stenotrophomonas maltophilia
ttgaatacacaagtagaagccctctccacgattatccgggagaagctcccaagttatgacaccttggacgcagccgcggcggcggcgcgccaggccctcgaaacggtgatgggcccattccctgaacagatggatgccaacttccaggcggctatcgagttggtgcgttcgtcgttccagaacgtagagatcctgcgcaagaactcgctgatcaagccacggccaacttggtacaacgggccgacggaacatgacaagcactggcccgcgctcctgaactatctccgcgaagtcaagaagtggaaggatgcgtccgagtcgctggatgactcctcctccgagatcgtctctctgctagcaaatccagccgaggacgagttcagatgtcgaggactggtcgttggctatgtccagtcaggaaagactgcaaacatgaccgcggtcatcgccaaggcggtggatgctggttacaacctcatcattcttctcggtggcgtcacaaacaagcttcgcgcacagactcagcgccgcatcgaagcagatgttgtgaacaggcacggcaccctgtggcagaagtacaccactgcggaagacagcggcgactttgtcaggcctccaaacggtcaatttgtgatgccgcacaagggtggcgctcagctggctgtaattaaaaaggagtctacgcgcctcgagaaattgctcgagactgtgacaaatacggctcggccaattaagcgaaagctcaaggcactgatcatcgatgacgagtgcgatcaggcatccgtgaattccggtgccgatgatgaagagatgactcggatcaacgaagcgatccgaaggctgatagcggcgctgccttgcgtttcgtacgtcggctataccgccacgccgtttgcaaatgtattcatcaatccgttcccggttcgcgcagacaaactggacgacctctatcccgaggacttcattacagcactgcctcgtcccaagggttacttcggcacacttgaggtcttcggtgaggccgacgcatccgccgacgatgatgctgtcgacttcggacgagacatgttccgatccataccgtcggaagaggtcgatcagctggttcctaagggaaagaacggccacaaaactttcacgccggatgtgacgcctcagcttcagaaggcaatcgtctggttcctgatcacttgcgccgttcgccgcgcgcgagggcagcagagcgagcacatgacgatgcttgttcacacctccgcatacattgcacagcacgacagcatggcggatgccattcgcgcctggctggcagccaatcgtcgctctattgagtcgctctccggagccgtcggagacttggtgcgccaagttttctcagaggagattgtcagaagccccctgagtgatcagagcgacccaacactcttggacagcacactcaagcccctcctcccggaggttctggaagccttggaactcgttgttgagaacggcgagagtctcgagcgcctggactttactggcgatgcgaagacctacattgtcgtgggcggatcggtgctggcgcgcggacttacccttgaaggactctcagtgtctttcttcctgcgcacctctcgccagtacgacacgttgctacagatggggcgctggtttgggttcagaaatggatacgaggatctcccgcgtctctggacgacccaagacctgatatcaaacttccgagcgctggcgcaggtagaggaggagatccgaaaggaaatttccacctatcgttcggcagaggtttcgccactggacttcgcagtaaaggttcggtcaattcccggactcgcgatcacgtcagcggcgaagatgcggcatgcaatcaggacgagcatcagcttcgacggaaagcacgagcaaacgactcgctttgatcacaccgactcggacgtggtttccaggaactggagcgccgcggcgagccttgttgaccagctgattgctgagaaatactcgcggataaaggagaacgtcttcatggatgttcccggcactgtagttcgaaagttcctggccaactacagcatgtgcgacaagcagctaaatctcaccaaagagatgttgctgacctacattgatggatccgccagtcgcatgccgttctggaatgtcgcgattgtgagctccagcagggctgagcggcgagtccacttgggtggcctgagtgacattggacctgtcattcgttccaggttgcccgagtcatctgactatgccgacatcaaggctttgatgtcgaaacaagatgtgctcgctgatgttgaggactctgatgctcagtcgaccgatggatgggaaaagctgaagagctatcgtcccgatactccccttctcttggtgtacccgatagacagtgtctctgaaccgagcagggccggcgatcatcgcgtagcactgaacgccaagggcgacctcatcggcctcggattcgtattcccagggcgcattgaccgaaccggtcgttacttcagcgtggaactgaacgtccctacgccagatcagctcgaggatgtggaagcaggcaatacagagcaggcgcaggatgcgtga

SEQ ID NO: 514381 - DNA, 705 bp, Stenotrophomonas maltophilia
atgtggccgccagccaagcggctggcccaactggacgcgcggcgtgcgcacagcgccaagaccgcgccccgacagaagtccgtcgcaccgaacacgccgctggatgtgcaggccatcgacccgcagcgggctaccgtctgccagctgggccaggcctggctggactgctacatcccccgctacaagcatcctgatcgtatccgcgcggtgctggaactgcacctctatccgacgctgggtactgcccgcggccgggacgtcgtgccgctggacgtggatcgcctgctggtggccgccgtggcgcgcgggacgcccaccgtggccaatgacctgcagtgctacatggtgcgcctgttcaagtatgcgcaggtgctgggctgggccaccggcaatctggcgtccaactttggcttgcgcgatgctggcggtcgcgagcgggcccgcacgcgttggctgcccttgcacgagttgatcggcctagctcgcgcgatgcgcaccttcgagcgcttcgggcgggaaaacgagctggccacgtggctactgctgacgctgcgcgtgcgcaagatggagttgctctcggccaagtggaacgaatttgatttcacccgcggggtctggttcctgcgtggggggagcgcaccaaagccggcgcccaaatcgaagtgcccctcaccgcccaggttatggcctggctgcaggaattga

SEQ ID NO: 514382 - DNA, 1218 bp, Stenotrophomonas maltophilia
ttgaaccgggcaatccttgtagtacgctctcagcctggtgatccatggaagtcgccctgtatgacgtttgaagacgatgtccggcactacgtaaaccaatcccacgccaatgcatggagaagggcggcaaaggcgcctggcgagccggcgctgattagctcctttctgtccgccgaaatgtacggtggattagtgaaaattctgaaggcctggcatggcggcccgttggtcaccgtctcaggcatcttcacccaccagacgcccaaagttcgcctgctgacgaagccgcattccaccgaaattgcggacttgatgctggttcaccagcatctttccatagcgggtgcctccgtggtttcgacccagggcaatgccttgctactacaagcgaaacgaaccggaacccctgccacaggatcggttgcgtcgggaactgcggcactgcagtttgagctctatcgtgactgggccccattcgttggcgtaacgcgaataccggagaagcccctcggcaaagattattgggacttccgtggcagccttatgcctggcacgtcggcctcatcagaaggcgcctacctgaccgtcttcgatcagcaggcgttctcgatgtcgcactgtaagcctcaatgggcagcaccgatcaacccaggtccggcgcacaaggcactggcgagcttcccagcaggctgcacgtggtcacagggcaatgcccccgcaccgggcagtctcgcgacggacggcgttgcctgttccgatgacttcggcgccgcttttgctgagttcctagcgggcaaacgtgggcgctccttcacaccaggggtcaccgcaggaaaggatcactggtccatctttgtcaacttgatgctgaaggagtctgccaagggcagcagaccttacctgtacaactcgtcgaatcagaaaatcaagagcgcgccaagagtccggacactgctctttggaagcgttgctccacttcttgagcacgtcgccattggagagttgcacagctttctcgcacaggacgtgcctgctcccgtggaccgcttcgctctcaccaacgtgattttgcgaacacttgatcgcgagaggcgagcacgggacgctgacggcccgccagacgatcggcctgacccctttgaggaatttgagggaggtggacatcccccgatgctcctggtcgtgaccgccgatgaggaaggggcagatcgcgtatag

SEQ ID NO: 514383 - DNA, 210 bp, Stenotrophomonas maltophilia
atgacagcaaagatggatggcgggaccatgccgctcatgatgcgccatgcgttgcgcttggaaacccgcccaaaactgggcaagagccatgttgatgtggatgcggaagatgcattgcccgccactgtgcagcgacatgaaaatggggtgagggtgaatcgcggtacctctgtgaccgaagttgggcaggagacggccgatgaaaattga

SEQ ID NO: 514384 - DNA, 213 bp, Stenotrophomonas maltophilia
atgaaaattgaaggcaccctcgccccgctgatcacgcgtttcgcatcgcggctaggcgaacgccgcactgaggtctatcgctacgatccggagcggcaggtttcccgggtatgggatggaggttgctggattgacgccattcaggtgcgccgctccgtcgcttcagagacgagcatgaccaaggtccaccaggaaacgaccgatgactgttga

SEQ ID NO: 514385 - DNA, 963 bp, Stenotrophomonas maltophilia
atgactgttgatcgggagatcctcatcgtcagtacggccgtcgacgtggcaacggatgctgtcgtcagcatcctgacaaaacgcgggatcggtgtcttacgagtcaataccgaagacctgcccttcgattcctcgttgagtttcgactatcaggattcccatgcaacgcgaatgacactaggtggcgtcgagctctctccaaggaccatctggtaccgccgcctaaggaccccggaaaagccctccgcgatggatagcggcatctatgaattctgtttgcgagagaatcgagccgccttcatgggggggctgatgactcaacgggtgcgatgggtgagtcatccggcatccgtctggcaggctgagttcaagccctaccagcttcacgttgcgcaatctgttggactcccgattccgcccacgctcgtctcgaatgatcccataggaatcgctcaggtctgccgagaactgggcgacatgatcgtcaagccagctcgctctggtcacttctggaaggagggcgaagagtactctgtattcacgtccgcgctcaccgaagaggatctcaattcgctggacgaggcgcgatgggccccttcaatctatcagcagcgagtccagaaggatgtcgatgttcgtgccacatttgttggcggcaggctctttgctgcagccatccactcacagaccgatcccgccgccacggtagactggcgaagaacggagaattccgatcttccccactcagtgattgaactcccggagtcgctctgcgagcaactgcggctactcatgtcgcgcctagatctcgcctttggctgcattgaccttgtcaaaaagccggatgggacatttgtttttctcgaggtcaatcccagtggccagtggctttggctggacgatcaactgaaccttggcatttctgaggcggttgcagattggttgacctcccatgacgattga

SEQ ID NO: 514386 - DNA, 966 bp, Stenotrophomonas maltophilia
atgacgattgagtctgagcagggcgagctcgttgcgcagacgtctgccaaaaggatagagagttcctcgaaggccagcgcatggccattcgtgcgtgctgttctcgaccgcgtgctcggcacggcaacgttcgacttcatattcccgtggaaagcccccctgccacgaggccgacaggaagagcatgtgcagcggcaagaagccgaaaaggccgagttgaaggcccgcacctcgagccaggataaggaagaacttctaagtacgctggaggagttaagcgcgctggtcgaggcgcaggatgagcgacggaaaggcgtcgaaggccggctttccaccattgtaggcctgtcctctatcgctgcgaccctggcgacgggcctcatcgtcgcgcaggcaggcggtaccctgaatctcggagccacctggagtcgtgccgtggttgccgtactggcattctaccttgtgctccagttatgcgatgcgattgggtgggcaatacaagggcagtcacgtgccacgtatcgcagcgaagcgatgaccgatgtagtccgggaccctgcgatggcggatgcagactggcttcgcttacggattgaagggaagttcgagcggcttctgtccagtcagacgcaaacggacaaaaaggtaaccgccatggccgttgcccaccgagcagcagggaatttcataggggggctgatcctgctgagcatgatcggggtagcggcgtccttccagcctcgctcggaccagaccgtgattaaaacgcttcgtgaaagtgcggagatccgatcgctgctgcaggggcccccgggaccgcagggtccatccggtccaatggggccctcgggacagcctggcgagcgcggcccccaaggccagcgagggccgcaaggagttcaaggattgcggggcgagcgcggtgcggctgggcccgccttgaacgcctcaaccgacacgcactaa

SEQ ID NO: 514387 - DNA, 360 bp, Stenotrophomonas maltophilia
atggcgctgggcaatctcaacagtctcatcgcgctgcgcacgaagggccggcccacgcatgactccatcgtggaaacctttggccgcacggcgatccactctcttcgccacagcatcagccaccgcaccgacacgcacctcgttgacttctccgccatcgcgaccacccagctgtcggagacgttagctgagggcttacgtggcgcgccccggtgctcgccagcacacgcggacaaagcggacctacaggagcacgcgacggatcaacccgtcatgagcattccaacgccgaaaagccacagctcttcggtctccagcgacaacggaccggaacaccccgcacaggcgctggtcggctag

SEQ ID NO: 514388 - DNA, 408 bp, Stenotrophomonas maltophilia
atgtccaacaagattgcgactgagagaaaggttctgcgatgcatctacgacatgtatctgccgcagtatccctataggccggacaaaggccccgttggacaagtcatgattccgatcgacatggaggcggtggcgaatcgtctaggcatgagcaagtacctactcttcggttacctaacctcgtacttagaccacaagtggcggcacaagacaggggagaacagctacgtgcacctttttgcagctgccgcaggtgacatgaggcatgttgtcaattttccttaccttgcggcaattctggccagccatgaccaagagcattcaaaattcgcgtggtcgcttggcgtgtccctggtggcattggcattgtcagtcggtgccattattgcgcagctggtgtccgcgtaa

SEQ ID NO: 514389 - DNA, 372 bp, Stenotrophomonas maltophilia
atggagatcagtcgcaacgcaggtgcgggattcgtcgatcagtcacctcttacagtgcggtcgaagcgcggtgtcgacttggtgcagttcagctataacgcggtgatcttcaaggaacttgacgttcttgacgtcgcggcgcctgagtcacttctggttcgtgacaggacgtacggcaacatccatcgagtgaagaaacttgtcgtcagggagggctttgtcgagcctatctttcgattcaagggtatgtcggggagcagtcatacattgatttgctctgaggagttccggcacgctgcgggtgagaggctcaagggtgtggagttcatcgacatcgacggtgccatctggccgcatatcaaaatcatctag

SEQ ID NO: 514390 - DNA, 144 bp, Stenotrophomonas maltophilia
atgcccctgcagctcctgctggtaccgccgcacatcgcgccgctcccgccggcaccagtcctgcagtgcttctgcgagatccggatcggctacccagtgccggctgcgcagcagcgtcggcaggaagccgcgcaggtccgctga

SEQ ID NO: 514391 - DNA, 501 bp, Stenotrophomonas maltophilia
atgtctcttctgctacccgagcttgccgttggtttcctgctgctggcgggattgtccggcagcagcaggatcgtggagcagagccctgcgcaggcgctggccgaatgggaggcacgagggcgtgccgatggactggcgcgaccggatgccccatgccaggatttcctgcagacgatcgggcgcaagcccgcagggctggaatacctgggctgcagccaggacgacgcgtcctatatcaagcccatgcaagcccactaccgcgtcgccggcgcacgcgccgagcaggtcgaagcgtatctgcacacgacgttcggaatgccgaagttacgttacacctgctgtggctggagcagtggcgggccctacagctggcgcgaaggtgcaggcacggtgaggtaccagatcgggatggggatggaatcgctgccgcatccgcgcagcgattggcgccgcatcgaagcattcaacgtcaccgtggaggtgacgcggcagagcccgtag

SEQ ID NO: 514392 - DNA, 1434 bp, Stenotrophomonas maltophilia
atgaaggctgttggacgtctgctgctgtgcgctgcgctggcctgtccgcttctgacggccgtgccggtttctcctgcgattggcgcaaccacctccgagcctgcacatccgcatgcgcaggacgccatcgatgactggcttgcggccttcaacgcaggcagcctcgatgcgttgcaggccttcgccgacaggtatgcgaagaaggaaggcagtgctcccaaggactatcttgagttccgcgagagtaccggcccgctgcgcgtgctggaaacgcgcgagggcacgcctggtcaagcgaagctgctggtgatgggccagctgaacgagcgtgcgatgtgggtgacggcggagatggacccggaccacccagcgcacttgaagctgttccacatcgaaggcaccgaaacaccggacaagtacaagccggagcgtgttgcgttgccggccctgatggctgacgccaggacgaagctggacgcgctgcgtacacaggacgcgctgtcgggagcgctgctggtggcgcgcaacggccaggtgctgctggattggtggggcggcgaggcggatcgcgaaggcggcattccggtgcgggcggatacacgcttccggttggcctcgtccaacaaaatgttcacctcagtggccatcctgcagctggtgcaggcgggcaggctggggctggacgatacgatcggcaagcatctgcccgactacccgaacaaggccgtcgccgctgaggtcaccgtccgccagctgttgacccacaccagcggtctcggcgatttcttcggcgatgatttcgaccagtactcggcctcgctgaagacgctggatgactacgtgcagcgcttcgccaaggatgcaccgcagttcacgcccggcagccaggacagctactccaactatggcttcatcgtgcttgggcgcctcatcgaggccgtttcagggcaatcgtactatgcctatgtggagcagcacatcctgcgaccggccggcatgaccggcaccggcttcgaaccggaaacggtgaaagtgccacagcgtgccgttgcctacacgaagacgaacgggcaatggacacgtgaaacgaagtcgctgccttggcgcggcatgtccgccggcggtggttacagcacagccaccgacatgctgaaattcgtcgaggcgctgcgcggcggaagactggtctcgccggcactgctgcagcaagccaccacggcgcagaaccacaagcgttggtatggctttggcttcgtggtgcagggcgagggcagggagcaccagtacggccacgaaggtggtgcgcctgggtcgaacagtgccatcgtggtgatgcctgctcagggttatgtgatcgtcggcctggccaatgttgatccggacgcgatgggcaacgtggtcaattacatcgcgcggcggttgccgttgcagtga

SEQ ID NO: 514393 - DNA, 2163 bp, Stenotrophomonas maltophilia
atgcaccaggggacggtagccagtcagggcgtcgcgcgcgagcgcgtggttcacgcccagccagatctggcattgcgggggctagtgctgcttgcgcagttccacggcatcgctgcggatgcggagcagctggcgcatgcgcatggacgcaacggcgaagcatttgacgagacgaccctgctgctggccgcccgccgcttgggcctcaaagcccggatctcagcgacgccgcagcggcgtctttccagggtcacactgccggcgctggcgttggcgggcccgcaccctttcatcattgcgcggatcgaccgcgatcaggtgctcatccacgacctggccgaaaagcggccgagaacgctcacgctggacgaactggggcagcgctatgtaggacgcctgctgcaagtgacctcgcgtgcgtcggtgctgggcgaactggcaagattcgatttcagctggttcatcccggcggtcatcaagtaccggcgcttactggtcgaagtactgatcgtctcgttcttcatccagatgtttgccctggtaacaccgctgttctaccaagtggtgatggacaaggtgctggtgcaccgagggctcaccacgctggatgtgattgccgtcggcctggtttcgatggcggtgttcgacgttgtgctgtcaggcctgcgtacttacgtcttctcacacaccagcagcaaaatcgatgtcgaactcggcgcgcgcctgtttcggcatgtgcttgcgcttccgttggcgtacttcgagtcgcgccgcgtgggtgacaccatcgcccgcgtgcgggaactggagaacatccgcagtttcctcaccgggcaggcgttgacctcggtgctggacctgttcttcacggttgtctttcttgccgtgatgttccactacagcagatggctgaccctgatcgtggcgctttcgcttccgctgtatgcgctgatttcggcgttggtgacgcctgtacttcgcaggcgcctgaatgacaagttccagcgtggcgccgacaaccaggcgtttctggtggagaccgtcagcggcatcggaacggtcaaggccatggcggtggacccgagggtgacccgcacgtgggacagccaattggcgggatacgtcagcgcaggcttcaacgtcacccgcatcgccacgctcggccagcagagtgtgcagcttgtgcagaagctggtggccgttgcgatcctgttctggggggcgaagctggtcatcgatggcaagttgagcctgggtcagttgattgccttcaacatgctgtccggccaagtggcggcgccgatcatccgcctggcacagctttggcaggacttccagcaggtcggaatctccgttgaacgactgggcgatatcctcaatacgcgcactgagctgccgggaagccggatggcattgcctccgatccagggccggatcacgttcgaacgcgtcgggttccgctatcgtccagacgctgcggccgtgcttactgatatcgaactggatgtccggcctggcgaagtggttggcatcgtcgggcgctcaggctcgggcaagagcacgctgaccaagctggtgcagcgcttgtattcgccggaacagggcagggtgctgatcgatggacatgatctggcgctggccgatccggcatggttgcgtcgacaactcggcgtggtcctgcaggagaatttcctgttcaaccgctctgtgcgcgagaacattgcattgggcgaacctggcatgccgctggaacgggtgatccaggccgctacgctggccggcgcgcatgagttcatcgtcgagctgcacgagggctacgataccaaggtcggtgaacacggtgccgggctttccggtggccaacgccagcgcatcgccatcgcccgggcgctgatcaccgatccgcgcatcctgatcttcgacgaggcaaccagtgcgttggattacgagtccgagcacgccgtgatgtccaacatgcgcgcgatatgcaagggccgcacggtgctgatcatcgcccacaggctgtccacggtgcgccatgcgaaccgcatcgtggtggtggagaaggggcggatcgtcgaggccggtgcacatgaggaactgatgcgcctgcctgatggcttctatgcccacctgcagcgactgcaggcgggggccgcatga

SEQ ID NO: 514394 - DNA, 1422 bp, Stenotrophomonas maltophilia
atgaagcatcgaatacaggccgcaggcgattttctgggtcgatacgtgcgggtggcgagtgcggcgtggaaggcacgtgcgcagatggagtcgccgcagcgaacggccgatgagcgcgacttcctgcccgcccacctggagctgatcgagacgcccgtctcgccaacgtcacgctggagcatgcggatcatcattgcattgttctgtattgcactgctgtgggcatgcatcggccagctggacatcgtggcggtggcgccgggcaagaccgtcgtcaactcgcgtaccaaggtggtgcagccggccgagactgctgtggtccgtcgcatcttggtgcgcgacgggcagacggtgaaagcaggtgagctgctgatcgagctggagggggcgggcgccggggcagagctcgcccaggccggcgaagccttgaccaacgcccggctggcggcgctgagactggaagcactgctgggggccttcgacacgggcaacctgccgcagttgccatcggacagtgggctgcccgcgcagcggctggcggacgaacaggtgctcgtgcgcagtcagttcgaggctttccaggcccggcgcaatggcctgcaggccggcatccagcagcgccaggcagagcttcacaccaccgagggcctgatccagccgttgagcgactcggcgcagatcgcacgcacccgcgcggcggactatgcacgcctggtggagggcaactacgtcgggcgccacgactatctgttgcgcgagcaggaacgcatcgccgccgagcgcgacctggccacccagcgcaatcgggtgcaggagctgcgctcggccctgctggcggcacgggaggaactacgggtgctggtcaccgacacccggcaacaggcccttgatgaactgcgcaaggcccaggagcagatcgggcagatggggccggaagtggccaagaccggacagcgcaatcgacagatgacattgcgcgcaccggtggacgggaccgtgcagcagctggccgtgcacaccgtgggcggcgtggtgacgccggcacaaccgctgctggtagtagtgcccagtggcgacggcatggaagtggaagcaacgctgctcaacaaggacatcggcttcgtgcggccgggccaggcggtcacgatcaagatcgacagttttccctatacccgctatggctacctcaccggaaccgtcgtgagcgtgtcccatgatgcggcacaggatgagcagctgggcctggtatttccggcacggatccgcctggatcgttccgagctggacatcggcggcgtcaaggtgaggatgagtgctggcatgagcctgtccgcagagatcaagacggggcggcggcgggtcatcgactatctgctcagcccgctgcagcagcacgcgcaggaagcgctgcgtgaacgctga

SEQ ID NO: 514395 - DNA, 831 bp, Stenotrophomonas maltophilia
gtgaacgctgaggccgatcctgtggtggctggcaggtggttgaacgcgtgccggctgcggtacgacatgctgctgtggttgtcattgtcggtcgtgctggggggatgcgggtccgacaggaaaggaccagaggccacacggctgcagggacgcatcggtggtgtcgcgctggaggtgcccagacaggatgtatggatatgggagcaggaccgggacgcgcgagcggaccccgcgtcacgctgcggtgtgccattgcgcagcgtttccatccagctgcgttggccggagatggcgccgcgcaatgcgcagacccgacaggactacgaccggcgcgattcggcggggaacggcgattcgaactggatcgacatcggaatgagccaggccggcgagggtgagaacatcacgctgcggcagatacgggactggggcctgtatcgccttcaccatcaacgactgcccgccgaagtcaccttcgatttcggtcgtgacgcagcgctcgggctggagatggcccgaccggcgctgccggagcgtcaaagcttcaactggaaccgtatcacctataccgacagcctggacccggcacgcgcacccactgttctgatccgctgcatgaccgggccgcagtactcacccccgcagtggacgcccctgtgcgaggcctcgcttgagcagcctgggctgcggaatgtacgcaccaccgttgtttaccgtcagaacctgttgccgcattggcaggagatccaggccgatgtccaggcctatctgcaacgcatcaggtcccattgccctacacaccggaacgtgaaggagattgaacgtggttga

SEQ ID NO: 514396 - DNA, 8643 bp, Stenotrophomonas maltophilia
gtggttgaaatgatgacagccgaacagcgtgcactggcgcgggcgatgctcgacagcggcaagatcgaggagatgtaccagttcatcgctggtttcgggcatcgctatgcccggctggccagtggcgtggccgtgggcaacatgttctccgggttgactgcactggagtttcttgaggaaaccgcaagggcccatggcgttcccgtggacgatgcgaagatccaggcagtgcgtgcgggcatggcccgaggcctcctggacatgctcgaccagatcgtggatgcagccggtaacgttgttcgtgagatcaccgctggcgaagcatggaccttccacaaccgtgtgttcaccgatctgaatctaccggttgattcctggacgttgaacacgccgttcaaacttctggacgagcaggaacgcgatgccatctgggactcgatgctcaacagcaacgggcgattgccatgggataccaaggccggcatcgaactgctggtgaaggtggtcaagaacgcagagaacgaccccttgggagccggttcatggttctggcgtctgggtttgaatccggatgtgtactcggcatggatggcacggctgagcaccgaaacgctggaggatggttccagctgggtcgcccggccgttggatcccttcctgttcttcaccggcgcgttggcgctggatgcctcggacctggagttcaacaaggaccagatccgcgaattcctcaacaccctgcccgaggtgctgaagctgtcggtcaagcaagggagcggactgaccgcctatggttcgctgcagggtgatgccatcgacggtaccgatgaggccgacgtcatcttcggccaggatggcgcagacgtgctctctggcctggccggcaacgatgtgatcgacggcggcaccggcaacgataccctgaacggcggcgccggcaatgacgcactgttcggtggcgcgggaaacgatacgctcgacggtggtaccggcagcgaccagttgcacggcggtctgggttttgacacctacagcattggtactggcctggccggcgatctggatacgatcgttgataccgatggcaacggtaccgtgatcatcaacggcaacggcgcttgggccaacggactcatcgcgacgtcagccaccacctgggagagcgccgatggccagatcaaggtcagccactcggtcgccaacggttcgaagctgatcatccgcagtggcaccgacaccggcagcgtgatggtcgacggctggagccagggccacctgggcatcacgcttcccgagttcaagccgggccaggcaggcacaggaggcaccgggctggccgacttcctcaatcccttcgtgaacagcgtgcccagcgcagcggtcaacctgtccggtggcaacggccgcgacatgatctggggcaccgccttcggcagtggtgacaccctggacggcggtgaaggtagtgacatcatcaacggtcgcggtggcgccgacaccatcaccggcggtgtcggcgacgacttcatctccggcctgggatcggggacgatcgcgcatggcggagagggcaatgatgtcctcaacgctcagtggaacttcggctttgacgtgcgcacgaattcacgtgtaccgattaccgaatccggtatctggcgggacgtggaggccttcttcagctggagtgcaatgcagaggctgggacgccgcgatgatggcagcctggccatcggcttcgactatggcctgtcgggcatgttcgatttcagtggcgcctcggtggcgccaggctggacgttcagattccggcgcctggacaatgatacctacaccctggtctacagcagcgccaccgagccggatggcatcccgctgggccagggacggatcaccacggaggccggctccggcatcacctacaccagcggtgtgagcctgtttggcgaagacggcaacgatcagctcggtggcagcagtgcagcggactacctcgatgggggagatggtgacgatgcgatcagtggtgaaggcggccacgatgtgatcctggccggggccggcaacgaccaggtggccggcggtgacggcaacgacagcatcgacggcggcgccggcaacgacgagatgtggggagaaggtggaaatgacctgatcgacggtggagacggtgatgatctgatctggggtgactattacccgcaatccggaatcgttggcggcggcaacgacatcctgcggggtggcgccggcaacgaccagctgtcaggccaggccggcgatgatctgctgtccggcggcattggcaacgatcttctggttggcggtaccggcaatgatcgcctgatgggcgaagacggtgacgatgagctgcagggcgaagacggtgacgacaccctcgacggcggcaatggcgccgaccggctgttcgggcaggatggcaatgatgttctgctgggcggcgagggcgccgatcatctggaaggtggcgatggcaatgatcatctcgatggtggcgccggcaaggatgtgctcatcggcggcgaaggcgatgacacgctcataggtggccagggcgacgacgaactgtggggtggatctggcaaggacacactgtccggtggcgagggcgccgacaccctgcgcggtgaagcgggggacgacgtgcttgccggcggtgcgggcaacgacatattgatgggcggcgatgggcgcgacacgctcgacggcggcggtggcgacgacgagctgcagggtggcgccggcaatgattccctgaacggtggcaacggcgctgaccgtctgtttggtgaggatggcaacgacagtctgtatggcggtgacggtgacgacgtcctggccggtgatggcggcgccggcagttccggagcggctggcaatgactatctcgacggcggtgccggcaacgacgtgctgttcgggcagggcgggcacgacgagctcaatggcggcgccggcgatgacaggttgtacggtgatgaagacaatggcccgggtggcaacgatacgctacgcggtggcacaggcaatgacctgctgtccggcggcgccggcgacgacatcctggacggcggcaccggcaatgacgtgctctacggtggtaccggtaacaaccagtaccacttcgaagcggggtttggtatcgatcatgtctacctgcaggagggcaatccgggttttgatcgcgtcaccttcggttcaagcatcaaccaggccgatctgcactacgaggcttacgggctagatctgatcattcgccacatcaacggtgcagatatggtggtggtgcacaactactttgcatccaacggagcgggcgggatcgcggtgggcggcatcgacgtcaccgatcgcggacgcctggaggaacaactggagctgccgtcgcttgtcttcggtaccggcggtgatgacagcatgttgggcaccagcggcgatgacagtctgtacggtgccgacggcaacgatacactgatgggcctggagggcaacgaccggctgttcggcggcggcggcgatgacctactgatcggtggttttggccatgacgtgctcgacggcggcgccggcaacgacatctatcactacgacttcggtcatggctacgaccgcatcatcaatctgggcagcgccgaggcgggcacggacatcatccgaatcggtcctggtctgactcgggcgatgatcaataacatccagatctccggcgatgacctgatgctcgccttcttcaccggcgcggggttccaatcgctgagcctggatggattccttgccgggagcaatcgcagtcacatcatcgagttcgacgatggcacgtggctgagcgccgaggacttcgtcgagacgacgcgcagctggaacggtaccgacggtgatgatacgtacacggcgaccgatgaaggcaacaacctgcgtgcgggtgccggcaacgatatcgtccatggccaggggggcaacgatcgaatcttcggcggcgaaggcgacgatcagctgttcggtggcgacggcaacgatgtgatctacggcgatggcggagcggacctgcttgatggcggcgccggcgacgacatgctgtatgcgaatgaattcagtgatggcagcccggacatcctccggggtggcgcaggcaatgatcgctactacatcagcaccggctaccagtacggctcgtccccggacacggtcatcgaactggaaggcgaaggcgtggacaccgtctttgccgagtccttctcgtacaccctgacggccaatgtcgagaacctggtgggcgtgttcaacagcagcacctggtattggcagaatccgtcctatcccggctggatcgtgcacattccccgcgctctggtcggcaatgacctggacaacatcatccagtttggcaagccgtcctacctgggcacccatagtggacgttactacctgcttgacggcggtgccggcaatgacacgctgatcggaacccaggccaacgaaacctatgtggtcgacagcctcggcgatgtgatcatcgagggtgactggggctgggacaaccgcttctccattgatacggtacgtgccagcctgtcctactcgatcgccaacctggtcaacatcgagaacctggagctggtcggaagcggcgattggtcgggctggggtaatgccggcgacaacacgctcaacggccgcacgtcgacaggcgccaaccacctgtacggtgggatgggagatgatcgctacatcatcagtgccaacgacacggtggtggagctggccggggaaggcaacgataccgtggtaatcgacgccctcgaggaaggcgcaccgcagaaccagtggttcgacgtcgcccacttcgcaaacgtcgaaaacctggagctgggcaacaacctggtgcctgacggacgcggcgagggcaccatcaacggtggcgcattccatgcgaatctgcgcggcgatgccggcgacaatgtcctgaccggaaacggattcagcaacgagatccgcggcggcggaggcaacgataccctcaaaggcggcgatcgcgagccgaacacggtctacaaggccagccgggactatctctacggtgaagaaggcaatgaccagctgatcgcaggccagggtggagcggacctgcatggcggcaccggcgatgacctgctcaggggcggttatggcgacgacgatttccactacggaatcggcgatggccgcgatacggtggattcgcggccgggtgccgggcgcgaccgtgtggtgtttggtgcaggcatcgacccggacgacgtcaccttcagccgcagtgggctggacctgatcgtgcaggttggcagcgatccgaatgaccagcttttggtcagcagctactggtatgaggagggtggcagtctggtggtgcgtggggtgatcgaccacttcctgttcgccgatggcaccgtacgtcgcggcgatctgcaccagctgccctacaccaacaagcctccggtcacgctgatcccgttcgtcgagttcgaggccatcggtgaggcggccttctcggcgcagattccctcgggcatgttccaggatgaggcgcaggacacgctgacctattcactgagtgcgaacgcgccggcctggctggtcatcgacccgctcaccggccagctgacgggcacgccgcccaatggcggtgcggatctttcgctgcagatcatcgccgccgacagctgggggcagcgcaccacggcctggctgacgctgaatgtacgcaacgtgctgcggggtaccgacggcggggatgtgcttaccggcacccagttccgtgacgatctgcatggcggagcgggcaatgatgtattgaatggtgcaggtgccgatgatcgcctgtatggcggcgagggcgacgacatctatgtggtgagcgacccgagccagcaggtaatcgaactggccggcggcggcgacgacactgtccgcagtggcagtcatcgctacgtgctgggcgagaatgtcgagcggctcgagctgctggacggtgcgtatgaagggactggcaaccagggcaacaacacgttgatcggcaaccagggcgacaaccggctggatggccaggccggcgaagatcgccttgtcggtggtggcggcgatgatacctacgtggtcgacagtgccggcgacgttgtcatcgaggtggcgggtgaaggcatcgataccgtggagtcggcgctggactggcagctcggcgaccatctggagaacctggtgctgaccggctccggcaacctgagcggggttggcaacagcctggacaacgagctgtacggcaatgatggcaacaatcggctcgagggtggcgtcggtgctgatcgtctgtacggtggcctgggcgatgatctgtacatcatcgaatcggcccaggatcgcgtgttcgaggacgaagacagtggcgtggataccatcgagcgccgtttcgagaccaacctgatcctggccgacaacgtcgagaacctgatcctggccaacggcatcgtgtccggcaacggcaatgcgctggacaatgtcatcactggcaacactgcggccaacaagctgagcggcatggacggcaacgacacccttgtcggcggtgacggcgatgaccagctgtggggcggcagcggtgacgatgtcctgcgcggtgacaatggtgcggactatcttgatggcggcagcggtgccgatcagatgagcggtggggcaggcaatgacatctacatcgtggacaacacggcggacacgatcatcgagctggccggcggtggcacggaccaggtgcagtcttcggcttcctacacgctgtcagcggatctggaaaacctgttcctgaccggaagtgccgacatcaacgggaccggcaacgcgctgggcaactacctggcgggcaacagcggtagcaacacgctcaacggagggggcggcaacgacacgctcagtggtggggcgggcaacgataccctgctgggcggcgctggcaacgacgcctatctggtcgacgcgaactcgggcagcgatgtggtcgacaacaccggtggcggcaacgatacggtgttcttccagaacggcgtcacccgggagcggctgagcttctcccgcgacggcgatgacctgttgatccggatcgatcaggcggccacgccggcggtccgcgtgcgcaatcacttcctcggcggggactgggccatcgatcaggtccagcctgacggaggcagttcactcagcgcggcgcagatcaaccagctggtgaatggtggcagtggaggcgggttcgacagcaccgtcaccggtacgtcagcgggagaacagctcgtaggcaccgccggcaaggacctgatagagggattggggggcgatgacacgctgttcggcatggcaggcgacgacacgctgcgcggaggcgatggcaacgatcagcttgcaggcggcaatggcagtgctgcgggctccggcaatgaccggcttgagggaggggcaggcaacgataccctgcgcggccaggacggcaagaacgtgcttgtgggcggcagcggggatgaccagtacatccatggcggcggaaacgatgtgatcgacaacacggggggcggcgtcgactggttgttcttccagaacggcatcaccaccagccagcttggtttcacccgcgaaggtgacaatctggtgatcgttgtgaacggaaatgccaaccagcgtgttacggtgaccaatcacttcctgggcggtgactgggcgctcgactatctgcaggctgccaccggcaatgcgctcaacacagcggccatcaatgcgctggtcagtaacggcggcggtgatggaggaggtaccccgggcaccggaaacgatgccgactacccgtccaagatcaacggtacggcgaacgccgagcagttggtcggtaccagcgggcgtgacctgatcaagggccttgccggcgacgacaagttgttcggcatggggggcgatgacaagctggaaggtggcgatggcaatgattacctgtccggtggcaacggcagcttcagcggatccggcaaggacatcctgatcggtggcgccggcgatgaccagctggtaggcgaggatggcgatgacatgctcatcggcggcgtgggcaacgacacgtatttctaccgcgccgggtcgggcgccgatacggtggacaacaccggtggcggtaccgactggttgtacttcgatggcattgatcgcagccgcctgagttatcaccgtgacggcgatgatctgatcgtcagggtggatggcagcgcagggcagcagatgcgtgtgcttcgtcatttccagggtggacagtacgccatcgctttcgtgcagcctggcgatggcggctacgccatcaccgccgatcagattgccaatcagttgacaccgatgacggcactgcgcaccagcatgacgtctgacgccgcgtctgcgccggagggaatgtcgctggaggccgagttgcagcatctggtaggggctatgggcgcgttccgggcaggtgctgccaccgggcttgttggcgatgcacctgtgcagctggccgatgtggacccatccctgtgggcgggtgcactgcaccgtcaggaggcgcgcgccacgcttgtgccgggctga

SEQ ID NO: 514397 - DNA, 321 bp, Stenotrophomonas maltophilia
atgaaggttgtggttcttgctgcattactgatggtggcgcaggcgtctgcgatacacgcccaagccctgcccaccgagctggcgcagctgggcattcttgccggcatgccttatgccaaggccaagcgcctgatggatgcggcagggtggcaggcgagtccggtccagggcgcgcctgagtcactcgagggctttccggaagttggatgccagaagggcgccaagcaatgcgcaacaaccttcgaaaagggcgggcagcaggtcgcgatgcggctgggcactaccctggcagggcagccgttcgtacagggcgctgattga

SEQ ID NO: 514398 - DNA, 792 bp, Stenotrophomonas maltophilia
atgaacatcgtcaagcgtcgggccagtgcccgcaaggtactcaagccggtggccaaggtgctgggtgttgccttggcgctgtctgccaccaatgctggggcgtttggtccggtgcaggaaaccggtccagcgctgatgcagcacatctggaatcagatcaataccctgcagtccaagctgcaggagaagacccagttcgtcaaagagaatacccagtggctgaaagactggaatcagacattgaccgagtacagagaggcgctcatcaaggtgcagggcatcatgaatgacttcgggcttccagatgcagcgcccctgacgccagtagcttcaaagtacctggtggctgaaacctgcggtactggggctgatctcaaggatatgttgccatcgctggtgtttgattccacgggtgactggaagaagcagcagacccagatctgcgtgaacatccgcatgatgcagaatcgcaaatacaacgatgcggttgatttcatgttgcgcacaggtccctcattcgcgaagagccttgagtcgatcgctgacctgagattcggtagcaacctgaagggcaacatagatgcggttgcgagcgactcccttcgcactgcaaacgaaatgaatgcaactgtccagaacttcgatagtcggatgaaggcatatgacgcctacatccaggtgatggaagcgaatcagaagatcgtcgcccagaatgccctgaagggaaagaagggcctggctagcgatctggtcaagacggtggcgctgaagactgcgctgagcatcgattga

SEQ ID NO: 514399 - DNA, 960 bp, Stenotrophomonas maltophilia
atgatccgtattgctatgctggccattctcctaatggctttccaccccacaacgaatgcccaaccttatcgcggaggatcaaactacaattggttccacattgaaggttgccaaagggagccgtacggcgtgctctccaattatcacctcttccggaacgaggtcgatgcgcaactgaagcagatggcgtcgggtgggcagcagcgattgcgtattggcgtattccacgcacggaatgcgaatacgggaactgtcatcccctctaacggcgggaaccttcctctgcaacaacgggagaacctgcgagacctgatgatttctgccaagaacgcaggattcatagaagtcgtggttgcttttttccctcagctagacaacggaccaggatcgtgggcgggcgccacgtggaattcgtcccacgaagaatattttcaagagaactggaatctgattgccaacttgatgccctacatgcgggaatcaaagattaaatttcttgtcgatttaatgaacgagggttctccgccatcctctgccccttacctgtggcgagagtatacaaaaaaaatgtgggccaacttcacttacatttttggccgcgcagagacgatcggcttctcaataccaacaaacagcgccgatcgaatcgcattcctccctgaactatatggccctcttccaccatatgtgcttgatttccacctctatggcaatgaaaagaatcagctaaaggcaattgatgccagcctcaatgccatcagttggccgcagggaatcatcgtaggtgagtcctattacaatgacgcaacttctgcatcggacatttcttctgcagctagtggaatgagcagagcaatttatttcgctctacagtggccaatgacccgcacttccacgtgcgctgacgtcgacgtagctccgcctagcgatttcaacaactacattcttcaagggctatag

SEQ ID NO: 514400 - DNA, 216 bp, Stenotrophomonas maltophilia
atggaagcgtcagcgatgaatgagcgtctcactgagctgcgccatgcgctcaacgatgcagcacaggctgtatgggatatccagggtgtaaccgatctgctccttaactccggcgagatgggagagtcggcgatccctcctgcggttcgggctgtggtcaatttggtcaacgagagggctacctctgttgccaagaagatcgaggaggtcctgtga

SEQ ID NO: 514401 - DNA, 243 bp, Stenotrophomonas maltophilia
atgaccaagagccagcgaggcattgtcgatggcttctttggttgcggctccaaaattatggacgtgatgagaactggcataaaggcttcaagcggcatgccgaggtttgagatggagcagattgaagacgcgctaagtgagttggccagcatgacttccgaggagtacgcaatgcggagagtcggcccaatcaccggagcaattcctgactccaagcgccatccgcagttccacctagagtaa

SEQ ID NO: 514402 - DNA, 756 bp, Stenotrophomonas maltophilia
atgagcagatttacgtgtgacgagaagtggtggctcgagaccctagaggtcgttgagtggaacgccttcgaggaaatgattgattttcatttcccgcctccaagggactacgaggcccctaggtggtactacccaaggattgattggcgcgctgtgcttgttgtgctgaatcgtatttctgccttgggacaggaacgacaggttgcgcgagcgctgtccaccaatttttccaagcctttgaccattgacgccgtgtcccgattgtttgaggttctcgatagatcaattcgtctctttcataaggtagctactacccaagttgagcgaaagagaagggcccgagtgattgctcaggcggcaaagaccctggccgaggagctaagtagtgtctcctgtcaaagcgatctgcgcctggccaggttcttgctttcggaggcggagggtcgaaatcgccggctgcccatcgtggctgcggaaaggtacgaggatctcgcggccgtcgccgataagatgacggaaatccctaaggtcgtgggcagtcctggaagtcccaatgcgcacaagttgtactgtctgagggagctgactgactaccttgcagcgaactacggtcgcccgatgaggtcgctcgtcctagtgctcgcagggctctatttcgacgtgtccgacatgaccacaaatgacctggccaaatacgcgccagtgaagaaagacaccaagcgaggtcgtcttttttcacccctaaatttcaggtga

SEQ ID NO: 514403 - DNA, 1680 bp, Stenotrophomonas maltophilia
atggccaccttctacgattctttcgctcaaggcatgcagaacggtcttgagcgccaaaaggcagtcacgcagcggaacatgctggcggagctgcaggacctgggccccaaggtgatcgccggtgatcgcgcggctacagatcgggcgtttgctctcgatccgcagcgcgcccaagtgtatcaggggcagcaggatcgtaatcgaaacatggtctacaacgcagctcgctacctcaagggtgccttggaccggcagaacccagctgagatttctggggcgtggcgtgccgtccgtccgagcctcatcaacgcaggcattgctactgagcaggacctgtcccccgattggcagccggactacgcgcagaccgtgtatcaggtgctggcaatgggcggcggagggacatcccagactcctactgatgttcgctcttttgagatgatgactcagggtctcaaaccagaagatgtggagcgcgcacgccgcatcaatttgggattggatggccgcgcctccaacgctggttatggattcttcgaattccaaggagcggacggtcttaagcgcatgggccggaataacccgcgtacgggatcgcgtgaggtgtacgacgagtccactggggaatttgtgccgctgggcggcactgctgggatgggtgctgctccgcaagccccgactggtccgcagcctgtagctactccggcagacggcaatcacttcgctgcattcagccaattggcgaccgaattcccagctgtgactatgacgagcggcgtccgatctgccgagcggaatgcccaggttggaggtcagcccaacagccagcatctcaacggcactgccgcagactacgcagtgcccgccaaccagaagcctgcattcatctcccgtgcgcgccagctgggctatcacgccatcgatgagggtgatcacatccacctgcagcttccccgtggcgcgtccaacaatattaatcctgcacttgcagttggtcgcagtcccgaagaccaagctgcgcgtactgcgcaggctacgacgaatgtggagaatgccaacttcccgaacaagctcaatcaggagcgtcagctgcaggatgtgaagactcagggggcgatcactcaggcagccggaacagcagcggcggaagcacaggctaaggacgcagcacagcgtccgaagcgtatccagcagtacaggcaggctctgaccgccgccgcgaacgtggaaacgtcgctggacaaggcgctcggtctagtaagcccatattcgactggcttcgtaggcgctcgctctcgtggcgttgaggggagcccctcctacaacctggctgcagaactggaaaccatcaaggccaacctcggcttcgacaggctgcagcagatgcgcgattcgtcgcccacgggcggtgcgctcggcgccatcgcggtacaggagctggttgcgctgcaatcaacgattgccaacctcgatcccaatcagtctgaggctcagatcagagacaacattgagcgtgtaaagacacactacaagaagtggaggtccgcggtggaacagtccttggcggacgaggagcgggctcagagcgcagcgcccgctgtaggggctggccagcactatggaggcgcagctccttcatcaacgccatcttcttccaactacagcaatctctggaactga

SEQ ID NO: 514404 - DNA, 246 bp, Stenotrophomonas maltophilia
atggaatactcccgatttacctgcaagcaacttgaaacgcagaccttcaacgtctactactacgaagtcacggatacctcatctgagccgaatgagatcttccttggcacagccattgggcttcagcagtgcgggaccgtcgcctggaataccgcgcaggcgagggagaaggacagcgcagacgactggtcgtatatctgctgccttcagactgacgaatcgtcatgcgcagagaagcatcaatga

SEQ ID NO: 514405 - DNA, 678 bp, Stenotrophomonas maltophilia
atggacccaagcatcgccgagctgaagatcacacgccgcccaggccaatcggacgaggagctccatgccgagcaactcgcagatggggttaacagcaacgcgttcctggcccttctgtttgcgcagcattctggctttgccaagggttcggagattggcgagcttgtaggggctactcagcaggcagtggagcgagctaagcggggaggaaccgagcaggcagactcacttctcaccagtcaggccatagctctcaacgcggtgtttctggagatgagtcggcgagcggctctcaacatgggtagccacctgagggcgaccgagacatacatgcggctggccttaaaggcccagtcccagtgccgctctacgctggagtcccttgcggagatccggaaccctagaacggtggccttcgtgaagcaggccaacatcgccaatgggcaccagcaggtaaacaacggcccggaaagtccggggcaagcctcggaaaggtcgggtcaggcccggccgcgcgggagagaaaacgtgcagaacgtactattggaggagaaagcgaatggccaatggttggacccccgaacgtcgacagcgccaggcgcaggcaatccggacttggcgtccgtgggagcactcgacaggaccaaggaccgaggctgggaagggggtgacgagtag

SEQ ID NO: 514406 - DNA, 753 bp, Stenotrophomonas maltophilia
atggagaggaagcccctacgcctcatagttgaagatgagatcgacggacagccgatctccctccaacgtgtcccgattcatttgatccgtgagtttgcaaaggaggccgagcagttcctccgagggtcaggcagagactgcgtcgacgaagacctgctagtgaaggtcgaatcgggctcgctagcggtcgaggaggtgtgccccagccttgagagtgcctaccgagatctagcgttgctggaggcctcaagtgatgtcgcaaacatcgaccaagttcgcgcaagcgtggttctgaagtggcagcggaagtcacaagccagcaatagccgaaggtacggtattacggacggcgcacgggctatttggatcagccacaacacatctttctttgcgagcgaccacagcatgtggctgccggtcactaggaaaatcgttggtgagattcaggatatgggcggcgccaagaaggcgaacatccatatcgcaacgagtgatggtgttctcatcgtggccgcagatcagaagatcctcgctgaagagaaagacaatcgcctttacaaaaaggttctcatctccatcgcagccgagcagaacactgctacgagagagcttaggcatcctagattgatcaggttcgagacgtactcgcctatgattcaatccgaatcgatggagaggatgaggcaagttggtgctgacgtttggagtgacgtcgatgcggttgattgggttcggaggaatcgcgaaggatga

SEQ ID NO: 514407 - DNA, 1590 bp, Stenotrophomonas maltophilia
atgccgaccacttccactcacgacgatctcagaaatttctgcgaacgctcgattacaaagatgagcgacgccgatgcccttttgcatatcggacagctgatcgacaggtcgttcgacgcattctatggtcgcggtgccaagcgtgcactgaacttgctcgacaccttctccaaacgccagttgaccgaggcgcaaggcgcgctggtcgagtacttccgtgccaatgcgagagctgccctatcaaagatcgccgggcttcgtgaattggtttcctgggagtcgcaggaacggcaggatgaaatgctagcgctctcacgtgctgttagccacgacggattttcgtccctcgagaagattcgccagtgtcagattctgacgaactatgccaaccttctgagcgcagtgggcaggactatagacgctcttcccttttgggacgccgcactcagaatcgcacctcgatttgcgatggcccaaggcaaccgtggctgcggtctattccgatatttctggctgatggagaacccacgcgaccgcgccattcttgcactgcacgcctttgacggcctccaagccgcttgcagcgcagatgcaatccatgaatccgaggacccactagcgccgatagcatacttctccaaacaggcgaagataattcaaggcggagtcgatatcgagtcggtacgcgcccgtcagaacctcgcacaaggcttcgaaggcagatcaaaaatcgaacgaagttatcggcgctggtgcctagagaaccgtctcttcctatccccgttgaacgatcttgggccacatctggccgcagctatcgacgatctgatgctgccatcaatgatcgagagtattgatgaccgccccggcggccacctgcctccaccgacccttggctacttcagtcaaatgaagcaagagtatgtctcagctcgtttcatgctcttcgaaggcgctagcagtactcagacccatttttctgatcgcagcgttgtacttactgacacgctggactacccgctatactcgctctccggcgaaaggatccgctcggctttcaggatcgcctactccctacttgataaggttgcattccttgtagatcactactggaagctaaacaaagatccgagccgtattagctttaagagtgtctggatggaggaaggcaaaaagatcatccatccgcaactccggcatcgaaacaacctgccattgctaggcctatactggctatccaaagaactgttcgaccccgagctgaaacagacgacagccatggatgcaagggacctgcacagcattcgcaatgcactggagcacagctatctgcgggtcattcagggttgggccaagccatttctaatcaaaggaagtgatgatcgtgggctggggatcacaatcggtagcgaccaactcgaatcaaaggcgctccgcgtaatgaagatagctcgatcagcgcttttctatgtctcgcttgccatcggcgtagaagaacgcgagaagcggcggaatcttcccggtcaatccatcggcacaatgccactgtacatcctggataggcaacgaaagcgacgtgacccacattag

SEQ ID NO: 514408 - DNA, 612 bp, Stenotrophomonas maltophilia
atggtcggcgagcccgatcgggagcctttcctgtatcttgcccttgaagaggtcaacatcgttccggtggacctcctgttccatcccgtgccagtagacataggtccaggccatattgtccatgatgcctacggtatggatgaggaaggcttgaagatttatggtggcattcttcaaagcatctcgcgtaactctggtgttgcttggcgggatgagagaaaagactgcgttggtcgcctcaagcatggttgtcagtcgtcttccgataccttggcccatttgctcttgcgcttttggtggggcagttccagccatcgtcataagacggaggagaatgtcggtgactcgcggagtcagcttgcgctggctttcgatcagatgctgcgccgccttcagttcgtagcgggacgagtttggctgccgattggacatagggtgaaatataccctcgatgcagtcggtgaccgactccaagtgcaggatccaataaaggcctcggcaaggccgcgtagagcgcagctgaggcgactgggccggctccgtaagttgtacagcgtggctttttcagctgaggtcagggcgccggaacgatctctggcgacaggcgagtga

SEQ ID NO: 514409 - DNA, 216 bp, Stenotrophomonas maltophilia
atgaacaacacttcccagcaccagaacgacagtcgcaactcggatgccgataagaagccgccgggtcagcagggtcaagcagacgggaaggacctcggcggtgaggatttggccggaaagcaagggcagcaacagcagccgaacagcactgagtctggtcagccaagccttggccagtccccaaaggtcggtgtcgatcgcgacaatcgtcgttga

SEQ ID NO: 514410 - DNA, 501 bp, Stenotrophomonas maltophilia
atgattccctcgcacggctaccaaggcttccgcaccgctcccgttccctctggctgggtccagctgagggatacctgggtgctgtggtggagtggtcggcagatcgctcaggtttcgccggcgaaggggcgcggggggcgtgtgcacctcgatgcccgaaagatgtgggaatcgaaggatgttccggcggcgagcatcgcccagggcaagcgctacgccgaacgctggtgtgccgccaggctctacccggagatgcgccttcgcgctgccgtggcccggctgctggacactacgccgagcgagccgctcgaaccgctccctggcctgccgccgacccgcgagcagcagcaacaggcccggcgcctagctgaggccggggtcagggaggtggcgcggatcaaggaagcgctggagccgcgcaggccgccggtcgctaagcccatggcgaagggcccgataaaagcatgggcaagggcggggagggagcggctctcccgataa

SEQ ID NO: 514411 - DNA, 285 bp, Stenotrophomonas maltophilia
atggctgggcaggaggaggcagaggttaatcaggcgctggccgtgttgcagaagtgtgcggacgtattgaccgtggctcagcgccgccggatggtccaattggacggtgacgaatccaccgtgtcggcaccgacccggcgcgacaagcgcctgcatccgaacaagggcaaggtgctggatacgcaggcgcccaagtaccgcctgccatctggccagacatggtccggccgtgggcatacgccgcgaaccattatttattgcgtggacagcgcgcgccgacggtaa

SEQ ID NO: 514412 - DNA, 210 bp, Stenotrophomonas maltophilia
atgctgattgccttggccaaggtgctgcaccgggcaggtgtgaactatcaggacgcgttgcacgtgaccgggaccgatatcgacctgcggtgtgtgcacataacctatgtgcaggccgcgctgctgcacattctggccgaaatccggcacagtgattcgattcgattcgattcgattcgattcgaggtctggtctggagtcgctagatga

SEQ ID NO: 514413 - DNA, 405 bp, Stenotrophomonas maltophilia
atgcgaggaaggtcttcgaaggctccacgcgcgccgagtgccgcgtgtgcggagcttcagcatctcatcgaacgactgtcacgccggatcgtcgtcgatccggtctccgccgactttgtcgagctgtccagcatcgccctcagcaatgcctttgaccgtacgcagttcgcactgcgtgaagcgcggtaccaccagattcgaaaagactatccgaccaacgagtttgagcagtttcccaagatgctcggcttgctgacgtcggcgatggacgcggcaggctccgaagacctgttgaggtggctgtacatggggggcgggctcagagaggcccggcgcggacagttcttcacgccatattcgctatcgcagctgatggctgccgtgaccgttgggcaagcgccatag

SEQ ID NO: 514414 - DNA, 4062 bp, Stenotrophomonas maltophilia
atggatgtttccactaacgacagccggctgagcccgcgcaccctcagaaccgcccgagcgcttctcgcatggtcgcatgaggatcttgaaaaggcatcggggatttcgaagcgagtcatcgcagcgtttgagcgtgcccgacccgacgtcgaggcaggggcggaagaggcggtacttcgaggcgctctggaacaatctggggttgagtttcattccgatgggagcgtctctgggccgtccatcgcgatccctccttcgagcccgcgcgctgggtgtccaagccgatgggtcaccggccacgatctgaacgtctgggctgacagtctggatggcgccgccagcctccccatgctcatgagccatctggtccgggccgaacttggttcagccgttcaagtccggttcccttccgctgaaggtacccggttgccgggatgggacggacagaccgatgcagagaccgcgggttgcaatgttccgagtgggaaagcggcgtgggaactgggggcgcaacgcagcaacatcacgcagaaggcaaacgcggactatctcaagcgcacatcgtgccccggaacactgaactgcaaggacacgacgttcgtctttgtcacgccccgcggttggggacagaaggatgcgtgggtcgaggagaagagggcggaaggggtctggcgcgatgtcagggcgtttgacggggaggatctcgtccactggatcgagcaggtgccggccgtcggggcatggctcgcaggcaagctgaataagcgccccgcgggcacgcgcgaggttgagcagctgtgggaggagtggtcgcacgcctcgcgcccgccgctctcggaggagcttgtcctggtggaccgggatgaggacgccgccaagctgctgcgctggctgcgcgctgagccggatgtcttgcacatccaagcatccagtagcgatgaggtggtggcgttctatcacgccgtactgaacgaacttccggacggcacgaacaaagcttaccgcgcacgcacgctggtggcggcgacaagcgaagcggcacgcaccttcatccactcaacctccccgcttattgtcattttaacggctgcggatctgggcatcgctcgtcgccttgcggatcgccagcaccacgttctgctcgttggtcaatcggacgttgcgcgccgcgatgagatagcgagcctggcgcacccttcacgcgagggcatcacttgggccttgatggcctcggggtttcgggagtcgcaggcgcgtgcgttggcccgtgactgtgctagggacatgacggttctgcgtcgcctgctccccggggccgcagagcgggtgcccgcatgggcagccccagcgccaccgcgggccttgctgatggcgatgctggcgggcgggtgggatgaagccaacccacgcgagactcgctgtttgtcagagctggccggcatggcgtacgacacgttcgtcgtccagttgacaccgtacgtcaatcagcccgacagccccctgcagaagatcggtacgacctggcgaatggcatcaccgctggatgcgtggatgctgttgggcagactcctgacctctgcggacctcggtcgctttgagcacatggcacttgaggtgttgcaggtcgtcgatccgagattcgacctcccagccagcgagcggtggctagcgcccattcgtggcatcaaccctccttactcgcaacttcttcgaaatggtgtcggacagaatctgatcctgctgggattgtggggttcgaaggcggccttggtgcccggcgctgaacggacggccgatcgcgttgtcgcggctctccttgaccaagccgatccgcgccgctggtggagcctgtctggtgacttcttcttgctcgccgagtcgtcccccacggcatttctcggcgctatcgaacgcagcttaaggcttcccgaaccgcccattgcggtcctgctggctcgcgcgggcgacccgttgcacacggcggaacggctgcatgatctcatgtcggccttggaggcacttgcatggagtcccaagcttctgccacgcgttgcactggtactcgcgcgcctggccacgatggaccgtagagatcagaaggccggcgtcgctcctgccatcacgctcaggaagatgtatcaacctgggtgcccccaaacccacgcaacactggaggagcggttcagggcgctggatctactcagaaagcacgaaccagaggtcgcctggaaccttttactggccgttctccccggtcgccatagcacgctttcgctttcgcgctcaccacgctggcgtgacttcagtgctgaatgtgaggaagtgccctcctgggctctgctcgagacggcagccgaggggatcagtgatcggctcctccaggacgcgggacgcgatgccgatcgatgggttgcgctcttggaccgcatcaaaacccttcgacctgcgtccgaggctgtgctcgatgcgctggaagccatcgagccctccttatcggatcctccgtcccggactgcattgtggggtcacctgcggtgcgtcctgcatcgcaaccgactatgtgtcggagccgattggaatcttgaagaacatcttcttgctcgcatcgagcacctgtatgagcgcttcacgcccgtggatccactcgagcagatcagctggctgtttgcacccggcgttgatccgcccgtgctaggcgacgacggatatcacgccgttgatcaacgggtccacgcgctgcaagtggaagcggttcgctcttgccactcgcgcttcggcgatgccgggatcattgagttgtgcaaacggtgcgaaacaccgcggcttcttggcgaggccgtcgccgaaagtggattggagcctcccgtagtcgatgacctggtgcataagacgattggcagtgaggcgccgaaagaacagctgttcgcagttgggcttctacagcgcttggtacgcacccgaggtgctcaatggggaagcagccacttttcgaggggctgtgcggagggatggagtatccgtgccctcatgggcgtgttgcgcgcactccccaggcatcaggcaacgtgggatgcggcaagctctgcgggtgcagatgttgaagcgctttactggaaggagctgggatcgatcgggatccccggcagcgatgccgagacgatctatgcacttggcaagctcactgagcatggacgcgcctatcacgcactgagcctgacgcctgtccaccttttcaaacgacttccgacggagcttctgatcgagcttctggaccgagcgctggatgatccgctatgccattcggcccagggcaatgactttgtcgcatgccagtgcggcgcgaagaccatcctcgatgaactcgacgggcggggtgactgcagcgacgctcagctcagcatcctcgaatggaagtcctttggccttctagaacacagcgaccgtgaacccaaagcatggcatcaatggctctctgcggatccggagatattcgtccaacttgtcagtgcattcactgaaccatcggccgaatctggcgtcgtggaggcctcgcctgcgaaccctcaactggcgcaggcggtcgctgggcgagcctattgcctcttagcgagctggcggagcattccgggcagccgagcgacggggacgcttgaactggaaacccttaaatcatggatagaccgagctctttctgccgctaaagtgcgaggccgaagggccgttgcaagttggtacatcggccgggctctggcgggctgtgctactggctcagacggcgcttggccagccgaagcggtgcgcgatatattggaggagggcgatgaagacctgctagagggcttctctagcggttgccgaaaaaatgaaggcatcacgggccgtccagcacaggaaggtggtgaccaagagcgaaggtccgccatccgctatcgccactgggccgagatcatcggctacggctatccgcagacctgtcgtgtgctcgaagagatggcccaggggtacgacgatcatgcgcgctggcaagacgagcgggtcgcccgccatgactgggagggctag

SEQ ID NO: 514415 - DNA, 1014 bp, Stenotrophomonas maltophilia
gtgagtacccatccaagtgaatcggcgcacgtcagtagcatccccaagaatctccagctttcgttgctgggctttccggagagtcacgcgttcactccggcctttgccgaacgaatgagcgccaccttgattgaatgcggccggaagctggatcttgagcgcttggccggtgtcacagtcggctttgatttcgacgcggcgctcgcgtcggtcgatctgggttacgaatccgatcgggcgcgtcagtacaccaacaatggtgaagtgatctgcgtcgccaagaccctgagggtcctcagggaggacaaggtcatgtgccatgtcgtctataacgcaaatatgatagccgagctggtggatgatcaggatgagcaccatccgagggcaatgcacatcatctggcacgaacttggccacgtcgccgagctcaaatggcaagatcaggcaatgcctggcgtacttcttcaaccctggtcgggcaactgggtggacggcatgatcacagaagccgccacaacggtctgggaggagtatgccgcgtgccgcatgaccgggtgggtcggcgatccggaggcactgaagcgctcctatgcgaaggaatttgagcgctcgtcggtgcattcccgtgagcggtccaacgaggtcatcaaagcgtatcgtgtacacggcgatgtcgaccgcctcttgatcgaggcaggcgagccgatcgtgatgcccctgaagttagccggctatctgctcggtcacctggacgccaatgaggatgtcagcgatctgaaggcgatgtgtccggcctatacggacactcgcctgtccaccttgatcccccaggtttgggagacgcttcgttggatatgggacagacgcgacgcaggccttgggcggagcatctttgctgagctcgttgaacaactgaagcaggcctaccgcgatgccggcatcgtattgaggccgcaaggagagggctattacgtccatgttccgtctacccccgagaccctgcccaacggatga

SEQ ID NO: 514416 - DNA, 2301 bp, Stenotrophomonas maltophilia
gtgcttgagaacatcagtatcgccggcgtagccacgtatcgagacccccagccactggcgggccttcaaaggatcaattttctatttggcaccaatggctcgggcaagacgaccatttcacgggtcattgccgaccccgccgggcacgcgtcatgcacagtaaggtggcaggccggccggccactggaaacgctggtctataacagcgactttgtcgaacgcaatttcagctcgaatttgcgcggtatcttcacgctcggggaggttgaggcggacacccttgagaaaatcgagcaggtgcgggccaaggtcgtcgaaattgaaggtcagattgacaatctgcaagcgacgcttggggctccggacaactcgaccggaaaacgcgccgaactgcgtttcctgcgagatgcttttgaaaagacctgttgggatatcaaggtcaagcacgatcctgacttccaagtcgcgtttaagggttcgcgaaattcgctcacgaagttctgcgacagggtactcgaggaggccgaaggcaatagcgccgctcttcaccccctcgatgatcttagaacccgcgcccgaacggtgtttgctgaaggagtggatcgactgcctctcgtacccatggtggatgggcaacgactgctcgaccttgagcaagagccactgctactcaagaaggtggtaggcaaggaggatatcgatgtcggagccctcattcgccgtctcggaaatagcgactgggtacaacaagggctgccctatgtcgaagggccgcaggcgccatgccccttctgtcaaaagccgctagagcaggacctgctggacaagctgaacgccttctttgacgaaacctaccgcaccgacattgagagaatcaggcaaacggaggaagcctatcgtgcatttgccgaaacgctcctaagcaccgttaattccgtcctcacctttgccagcccgcatctcaatgtggacatcctgcgcccgctctgcgaccaggtgcgcacactgatcaccctcaaccaaggctatctggaacgcaagcggagggagcccagcacgccggtggcgctggagtcacttgccgacgccctaggcgccgtggttgacgtcatcaagcacgccaataacgcgatcaggcagcacaataccctagtcgacaatcttaccgatgagcgtggaacgctcaccgatgagatctggaaatgcgtgaccgaggagaagaaggacgtcatccaacagtatcagggctccaaggcagggctcacgaaggccattaccaacctttccgcaagcatcaccaccaaggccgaggcgcttgcagtcgagaaggccaccttggccgagcttgagaagaaggtcaccagcgtccaacccacggtgacagagatcaacgccacgttggagtccttcggttttgtcagcttccggctcgctacagccggtgcgcagcaggagtcctacaccatcatacgggccgatggtagcgatgctcgaaacacactcagcgaaggtgagcggagcttcatcactttcctctacttctatcacctgattcgagggagcaattccgcgagcggcatgaacgctgatcgcgtcatcgtgttcgacgatcccgtgtcgagcctcgacagtgatgttctctttatcatcagtgcattgatcaagcgcgtcttggccgaggccatcgaagggaatgggcgcgtgaagcaggtcttcgtcctgacccacaacatctatttctacaaggaggtgaccttcgacccgaagcgaccgcaaggtgcaagccgagctcatgaaacgttctgggttgtccgcaaggccgggacggccacggttgtcgaaggccacccgcacaatcccattcgcacatcctacgaactgctttgggccgaggttaaaaatccccagcgatccaacgtgacgatccagaacgtgctgcgtcgaatcttggagcactacttcacgattctcggcaacatggataaggataccatcatcgcgacgttcgacggccgcgatcagcagatctgcgcgtcgcttttttcttggatcaacgatggttcacacaattttgcagacgatctctatgttatcgccgacgacgcaacagtcagccgctatctctcggtcttcaagcgaatcttcgattcgacccatcacggagcccactatcggatgatgatggggcccgaagacgctgcccctgctgcctgcgaagatcccatccccgcaacggccgggacgtcgacgaaagcggcaaccagcgaaccgcaaacggaatcggcaagcacgcccgcttga

SEQ ID NO: 514417 - DNA, 498 bp, Stenotrophomonas maltophilia
atgaagatgcagggcgtggccgctgcggtggtgtgcatcgcagtgatcggcgcagtatgggcagcgtggcccgagcccgtgggcgatcaggtgtgggcctaccagaagctgcaaccggccgattaccggttgctgcacagcgatgcgctcggcttcgttaccgtgaaagcggatgagggctttgaactgcacacacgcttttccggcgccacatccttcgagatccggtgcaaggatgttgtggtgctggacgtggagaacgcgccctcgcgtgtgctgatccgaatgcctacggatgcactgcggcgtgcgcctgacatcgcacacttgcacgccaactttcgccgtttgttgggccaggccccgaaccgcgcacggttactgttggcatctgacgagccgtcttggcttggggcaaggttgcattgcgccttaggacgcgtgtcccgcaagcagccgtgcgggctcgacgctactgttgacccgcaccgctcgtaa

SEQ ID NO: 514418 - DNA, 1248 bp, Stenotrophomonas maltophilia
atgaattcgatgacccaggcgcaacggcctgatgtaagaagcccgatctgcctgatggagatcgcagacacgtcagaatgcatggagtcggtcgtcgagggcatcctgtggtcaagactccgcaggatgagagcgcgacttcaggaagtgcttgctgaccagaaatacggagtcatgactcgtgccatgcaccagatttaccagtcactcgggcccgatcgccaagcccgtgtgctgctcagttccgaattctgcgagcaatatctgtgcctggagtctgcgcggaagggcagggtggagtcaggagccgacgagcaggagagggcagaggaacaggcccgcgcgcttggcgcgctgcacgatatcatcgctcgggagaagtcgatcgccgagctggcacagggacggaccgacaggtacttgagagaggcacggcagtggcagctctacagtcccgttggagactgcgttgcggaaaaggatgccacgggcgtgtggacccttcggcagttgccgaagctgggtgactgtatcgcgctcgatcttgagagcccaccggcgcggcaccatgagccacgctctggagtgctgagccaaccgtgcctaccgctgaccgatgcggagcgcgagcatgtctcgcgaaagctggcagaggcgctggcagcgatcgaccggtcagaacccatgtacggccttctcatccgaaacttcgtccggcggatcaccgtgcgcaagtcggcagaggttacgtccgatgaagccggccgctacggctccgagcatgtgccgaggcagccaggttctattcgactgctgaacacgcataacccggaacttctggttgaggcgtgcatggaaagcatcatgcatgaaagcacccacaactatctggccgcatgggagcttgccaacgggttctccgttgccaatgactaccggcaccgtgtcgtgtctccgtggtccggcaatcccattcccgactcctcctatatccacgcggtcttcgtctactacgtgtgtcaccgcctgctcaagcgtcatctcgagatttctccggacctgggtgaagccgccaagcgccacgtccagcgcagattggccgtctgcgccgccggcttcctgatcgagcagaatctcagcggtcggttgatgagcaaggatgccatccatggtgaggtcgggcagatgattgatcagatgcaggcagagatgaagcgagagtatcgctatggggagtggcagcaatga

SEQ ID NO: 514419 - DNA, 2124 bp, Stenotrophomonas maltophilia
atgaatcaaccggtcacttcagcagcgcaggacgcccgggaactgctcaaggggttgcccggctggtactccagcctgaccatgctccgccgcctgcaagggctgatgatgctggtcgcgggtctgttgctgctgatcctgctgatcgtgccgtacaaccgccaggtgctggtcattgacctggagagcgcacagcctgggcggctgcaggtctatttcgacatgggacagggcctctccgagtccctgtccatgatcaagcgctatcaggccggccagaccgaactgcgctacgagctgccacgcggcacgctgcatggcgtccggatagatcctgatcccggcgcagcgcccatcgtgttcacgcatatcggcgcggttggcttcggcgggcgcgagcgacagacgctcgcagacccgctgcagctggaaggtgtgcagatggcacgcgacaccagccccggcctggaacacgcacggttcgtgatcgccgccgatgccaccgatccacagctggcgatcccgctcgcggtgccgatgaaaagcaactccggcgtagcaccggctacgtggaacctgctgtggtgggcattctggttgagcctgctggtagccatcagcctccagttcctgcgccggcccatgccgctcctggcattggcactgatcgtgctcgggctgtgcaccgcgctgtcgatgttctccccgacctcggggcgttcggtgcaccccgatgagctgctgcacgacgcggatgcggggtatttccagcaccattgggcgccgccgcgcatggatgcagcggacctggcgaccagcttcaccagcagtccgtatggcgtgacctatctttccgaatggaacgttgtctacctgttcgccgcaaagacctcacggatctttggcgagctgggcctggacgtgatgctgtcctatcgcgcgttcaatctggcattgtttgcgctgatgctcgttggcctggtggtgatccgcgcgccgcggggcagctacatcccgctgctgatcacgccacagctctggtacgtgttctcctatttcaatggcgatgcaatgcccttcgcgctgggcatgctggccgccacgatcgcactgatgcccgagggcccactgcagcgcttcctgcagcgccgcgggcccttagacgccgccacactggggcatctgctggtgttctgcacctgcctgggcctgttgcttctttcgaagaagaactactggccggtcgcagcgttcatcgcgttgtcgatgtcggtcgtcgcgctgcgactgcgcgccctgctggcgtcgtccctggtcgtgctgctgctggccggcgttgccgccaacggcgccggcacggggctggccgctgcggcgggctcctccctgctcaccgtggtgggcatcatggccggcctgtcgctgctctactgcttctatgcagcctgggtcctgctgcgcgaatcccacagccgcgcagcgatcggtcgcatttgtctgaccctcgcactgtcggcagcggtggccctgccgtggatcgcggccgatgcctacaagcaccgcggcggcccgggcaagaccgcactgatcgagcagcagcgtgagcggttcgccgagcccgcattcaagccctcggtgacccgcacgctgtccgcagaggtctccgggttcaagctccaggagaagggcgtgcagatcgggcaactgctcgacgcaccgaaggagtggcacgtgggaacgttccgcagcttctttggcgtctatggctatatggagtacttcgacaccgagagcgcctatcggttcgtcggctggtgcgtgctcggggtcctgttgctcgcgcttgcctggggactgggcacccgcacgctctcccctgccctggccatcaccagtgtcggctgcgggctggcactggtgctggcctcgttcctgcacagctggacctatgatttccagccgcaggggcgctatgtgatgggcctggtggtgatgatggtgccgctgttcatgcgcaccggcgagtcgcagtggggacgcgtcctgttcaccgccgtggcgctgctgctgttcgtactgtcagccgcttcattcacccatatcgcgctgccgcacctggtctga

SEQ ID NO: 514420 - DNA, 1041 bp, Stenotrophomonas maltophilia
atgaccgctgctctctcgcccgacgctccccaggccgctccctgcgtaccgcgcatcgcggtgatcatcccgtgctacaaggtcacccgccatatacgcggtgtgctggcagcgatcggccccgaggtgacggccgtctactgcgtggacgatgcgtgccccgaggcgtcgggtgatttcatcgaatctgatacggatgacgcccgggtgcgggtgttgcgccatgcccggaacaagggcgtgggcggtgcggtcgtgaccggctatcgggctgccattgccgacggcatggagatcctggtcaaagtggacggcgacgggcagatggatccgcgactgctgccgttgttcgtgactccgatcgcgcgcgggcaggccgactatgccaagggcaaccgtttctgggatctgggccagatcagccgcatgccctggctccgtcgcctgggtaatctggggctttccttcctggccaaagcatccaccggctactgggatctgttcgatcccaccaatggatacaccgccatccacgccgcggtcgccgcacgcttgccgctggcaaaactcagcgagcggtacttcttcgaaaccgacctgctgttccggctcaacgccgtgcgtgccgtggtggtggacgtgccgatggacgcgcactacggcgaagaggtcagcaacctcagcgtaggcaaggtgctgggcgagttcgccctgaagcacgcgcgcaacttcgccaagcgcatcagctacaactatttcctgcgcgacctgtcagtggcatcgctgcagctggtggccggtgtcgtgctgttgctcggaggcggtgcctacggcgctgttcgctggttcgaactgtccgtggcggggttggcagcaccggtgggtacggtggtgctgcctgccatggccattctcagtgggctccagctgatcctggccttcctcaactacgacattgcgcttcgcccgcgtgatgtcctgcacacccggctgccgccgctggtgtcagaccaggtgcggcagcgcgatatgggtgaatga

SEQ ID NO: 514421 - DNA, 2277 bp, Stenotrophomonas maltophilia
atggtcgccagtgctggaaacgggccaagccatggcgtgctggggcgcaaccgcggcaggtgggtggccgccggcgtcctgatcttcatcctgctctgctcgcgcagtgtttcccagttccagttcgtcattctgctggcggtctccctgttgtccatgggatggttcggtcatcgggtactggcatggctggggctggcaagcacagcgcagggacctggcctcttcctgaaggcctggctgggccagtttgcactgctgctggtctggcttgtctcggctccgctggcctgggcctggacgagctgggccgacctgccgctggccctgccgtttatggtgatggcggcactgtcgatcagtctgctgctgcatcgaacgcaggcacgcgggtttgcgcgcagccttgtgccctcatgcagcggttcttcgctgccgagcctgctgggcctgttcgcactggtcgccaccgccgcgctgtactcgcggcgtgccggcgcgctggggcttgatacccatcagcatattgccttcacaacggcaatgtacgaagcgggctatccgctgctgaccgccggcggcaccgcctggctggagaagtacccgaagctgctgcatgtgctggcctcgctgtgggcctggcccggcatgggccatcacctggggccgttcctgaaggtgcaaccggccctgcaggcgacgctggccgtggtggggctcaccgagctggtatgggggcgcctgcgctcacgggggctgtcgccggcgctgttgatggccggcggcgcactgctgcttgcgggcctgggtgcgctcatgctgcgcggaaccacgtacttctatcccgtggcagacctcaacagcaccgggcgcctgagtgcgctggcagtgctgctgctgcccgccctggcggccaccctgcacggcatggcgcggaaccggcgcagcgccgcgttctgctgggccgcgctgccctttgccggggcaatggcggtcaagctcaatccttcactggcagtggcctacgccggtttctccgtgccgctgttcctctgcgtggcggtgttcccgtggttgcacacgcgtggactgtcccttcgcctgctgatgccgctgctggggctgttcaccggaacggcggccggcgttgtgttgctgctggccgatccttactacctccagcttgtggcagaagccgtgccagaggtgcgggcggggctgcagcagttcctggggctccgcctgtacacgccaccctccgttgctctggtcgagggttcactgccggaggcgcttcgtgcggcggtgatgtgggagctctggcacgggcctcagccggcgccctggacgcagtggatgcccgattccagccagttcctgtggcgcgccatccatccgctgggacacgctctggcgcttgccagcattgtggcaggcctggcagcgctgctctggcgccgctgggccgcggaaagccggcgtctgctggtgtcgattctggggtggcagattggattgctgctctcggtgctgtgtgcgcagcggcttgccaacatcgtcctgctcgccctcggccacagttcgctggaagcgagcctgctgagcacctactcgcagcgttacatcgacctgctgggcatgtatgcgctgctcatccagtcgatgctggcactggcgtcgctgctgctgctgctggacgcggtgggtgcaggccgccacctccgcgccctgcccaaggccagcctgcgccgcgccaccgccatcgtggtcgcccttggggccctggcctttgcagtggtgccaccgcctgcaccgcgggccaggaccatgggatggccctatccagtggacgaaaagcaggtgcgggcgttccagcaggccgaggcgcgtttgccggcggatgcggtggtgctggtaccggcctattcggtcatgctcaatgggcgcgaggactgggtgctgccctctgccagcgtcgcgccctatcttccgttcggacagcgtgactatctgttcaatgtacgactgggggccggctatccattcacagcacgcgatcttcgacagctgctctgcagcaacaagcccgccgcagcgcgccagcagctgcgaaggctgggggtgacccatgtgttgattgatcgttccgaccgtgcaaccgatcgtgacatgctggaaacacgcctgtgcatgaccgagctgggcaggctgggcctgagcgtgcaggatgcgattgccgcaccgggcggcctcttcttctatcctctgcaaccatga

SEQ ID NO: 514422 - DNA, 1254 bp, Stenotrophomonas maltophilia
atgagccgcctgggtaacctgttgcggcgcgtcgccgcgcgcctggatgcaagcgctcccggtgcgcccacgcccaatacccacgttgccgagatcactccctgtaccccccggcacgacccctgggagggccggcggctgaacctggtgctgccgtcgatcaacaagcaacattacttcggcggcatccataccgctgtgctgatctaccgcgagctgtgccggttcttccctgcatcgcggatcatcctggtcgacagttcaccggatgaagaagcgctttcgcgcttctccgaccacgtactggtgcctgcagaccagacctccacggcgatgcggcagatcgtgccgttcagcgatcgctaccagaagaccctgccggtggccggcgaggacatctgggtggccaccgcctggtggacggcgtatgcagcgcagcgcatgtcgcaatggcagggcgacaacggcggtattgatcgcccgatgatctacctcatccaggacttcgagccggggttctatgcctggtcgagccagtacgcgctgtcgctgagcacgtaccgccctgcgcgcgacatcggcatcttcaacacggccctgcttgccggattcttcgagcagcatggcctgcgctacgagaagcactcggtgttcgaaccggttctgcatgacgggctgcgcccggcgctgcagcaggtccgtgatgctgctgttccccgccagcgccgcatcgttgtctacgcgcgcccgggcacgccgcgcaatgcattcgagctgatctgcgagggcctgcgcctgtggggctggaaggacccgcgcgcgaggcagtgggaggtggcggcaccgggtgaactgcaggccgacctggatctgggcccgttcgcgttgaaggcgctcggcaagctggatatcgatgcgtatgcccggctgttgtcgacgtcggcgatcggcctgtcgttgatggtctcaccgcaccccagttatccgccgctggaaatggccgcgttcggcatggaggtgctgaccaaccgctacgacaacaagcggctggaccagaccgtggccaacgtgcattcgctcgacagcatgacccccgaggcgatctgtgcggggcttgtggcgctggtggatgcatttgaacagcgcggcatgatgcagagtgccgttgccggaagcgatcatgccctgctcggccagggcgaattcgcccgtattgccagcgacgtgcacagccgcgtgctggcagacggctga

SEQ ID NO: 514423 - DNA, 1833 bp, Stenotrophomonas maltophilia
atgtccaagatgggtaatctgcttcgcggaatctactggagcattcgtcgcgcacaggggcagggtgtctctgtcggcaccatcctctctgcgctggcccgcgccgcacgcagggggccgaagcatctggcccgggcgattctggcctatgccaatggatcgcacacggcagcagcgaccacgccgccggacgtctacgccgaatggctgcgccagcaggcgccggccgcaattccggcggacgctggcctgatcagcatcgtgatgcctgtctgcaacacgccggaagtgttcctgcgcgaggccgtggccagcgtcgaagcacagacgtacctgaactgggaactgtgcatccacgacgatgcgtccgatcaaccgcatgtggcacgcgtgctggaagaactggcgcggcggttgccgaacctgcgtgtttcgcgctcaagtgagcggcagggcattgcggccaccaccaacgccgcggtcgcactggccaaggggcgctggatcaccttcctggaccatgacgacctgctggagccggatgcactggctgcggtggttgcctgtcatgtggccacctcggcaggggtcgtgtacaccgaccacgatgtgctgggcgaagacggccgcctccgccatccgtacttcaagcccgactggaatctggacctgttcctgtcgcagatgtacctgggtcacctggtcagcttcgatgctgcgctggtggcgcagctgggggggctgcgcagcgactgcgatggctcgcaggactacgatctggtgcttcgctgtgccgccgccggcgccaccatcgcgcatgtgcccaaggtgctctaccactggcgcgcgcacgccggttccaccgcggccaatgccggctccaagccctacgcgcatcacgccggtcgtcgcgcgctgcagcagcatgtgcaggcaacccaccccggggcgcaggtggacgacggcgagcagctgttctgctacgacgtacgctacccatacgcggacaagggccccttggccagcatcatcattcccacccgcgatggcctggacctgctgcggacctgtgttgaatcgctgtacgccaagaccgactaccgtgcattcgagatcatcgtcgtcgacaacggttcaacccaggccgagacgctgcagtggctggaggcgatgtcccgccgcgaaaacttccgggtgatccgtgccgatgtgccgttcaactggtcggcactgaacaacctggctgcgcggcaagcgcgtggcgaggtgctggtgttcctcaacaacgacaccgagatcatcgatgggcagtggctgcaacggcttgccgagaacgcgctgcggccggacgtgggcgtgtgcggcccgttgctgctgtacggcgatcgcaccatccagcacgccggcgtggtgatcggcatgggcggctgggccgaccatgtattcaagggtgaagcgccggtgcacaaccagaacctgttcgtttccccggtgctgcagcgccaggtgctggccgtgacgggcgcctgcatggtggtggcacgtgacacgttcgagtcgctgggcgggttcgatgaatccttcattgtctgcggcagcgatgtggagctgtgcctgcgtgcgcatgcacgcggccttgccaccgtttacgtcgcacgtgcagtgatgatccatcacgagtccaagacgcgtgatccgcgtgcaatccccgagagcgacttcgtgcgctcggccgaagcgtactcgccgtatcgcgaagagggcgatccgttcttcagcccgaacctggactacatggcttcatcgccccgtctgcgcggggccgtgcaatga

SEQ ID NO: 514424 - DNA, 1278 bp, Stenotrophomonas maltophilia
atgaccccgacgctgcttgaaattccctttgaccattaccagcgctacgctgcggcgacgcatctgctgcaggcgctcgatctgcccgcgccgcgggtgctggaagtaggggccaaccgtcagcgtctgctcgggcagttcctgccacaggcaacgttcctgtacaccgacctgcatgccgaaggggacgagaaggacttcgtggtggctgacgccaccgcgctgccgttccccgagcagggcttcgacgcggtggtctcgctggatgtgctcgagcatattcccgcgcccctgcgtgccaaggccgcggccgaaatggcgcgtgtcgccagccgtgcggtcatcgtcggcttcccgccggatcagccgtgggtgcgtgacgctgaagtcgatgcgaatgggcgctggcatgagctgttcggcgaggactatgtctggctgcaggagcacaaggaattcggcctggtggacaccgccgagatcgtggccgcgtttgaaagcgccggcatgacggtgctgcgtttcgggcagggcaatgccgcattgtggtccagcctgatgggtgcgcatttcatcaaggtgaagttccccgagctggagccgctggtcagcgccgccgaccgtctctacaacagccgggtgttcgccggcgatcacagcgaccagccctatcgcgagtactgcgtggcggtgcgcctgcccagcgacgcggcgcgcctgcaggccaacccgccgttccgtgccgatctcgatgcggaggcgactgcgctgctgagcggtctcgccggcggcctgcgtgagctggcggtgcgtaccgccaactccgagaaggaatggaaatccacggcgcggctgctggacgcctacatcgccgatcttgccgtggccaagcgcgagtggggcgccaccgccgcctatgcgcagcagctgcagcaggccaaggacgaggccgatgccgggtggctgcgaaggcgcgaccagtggcagcaggccgagctggattggcagcagcgcgagcaggagctgaaggcgcgtgtggccgatgagctgcagcagttgcagagcgcccaggcacgcatggctgaactggtggaggccgcggaggccgcggaggccgcccgcttgcaggcactggatgtggagcgcgagctcgagcagcgcctgcagcagcgcgcggcggactaccagcgctcgcgccgcaagtggcaagccgcaatggtggggttgacgctgggcggcctggtcattggcgcgctggtgggttggggcgtgtcttga

SEQ ID NO: 514425 - DNA, 1233 bp, Stenotrophomonas maltophilia
atgaacaacccccagaccaccacgttgcaggcctcagctgacgcggccatcgaagtgctgggcgtgaccaaggactatccggtctacgccaacccgcgcgaccgcctgctgtcgctgctcaagccttccggcgaccgggccagccgcaccttccgcgcgttggacggcatcaacctggtcgtgccgaagggcgagaccgtcggcatcataggccgtaacggcgccggcaagtcgaccctgctgcagatcctgtgcggcacggtgcgcccgacctccggctcggtcagcatccgcgggcgctttgccgcgctgctagaactgggggccggtttcaatccggatttctccggccgcgacaacgtgtacctgagcgcctcgttgctgggcctgagccgcaaggaagtggacgacaagctgcagtcgatcatcgacttcgccgatatcggcgatttcttcgaccggccggtcaagacctattccagcggcatgtacgtgcgcctggcgttctcggtggccatccacaccgaaccggatgtgctgatcatcgacgaagcactgtcggtgggtgacatccgcttccagatgaaatgccttgcgcgcatcgaacagatccgtgcacgcggcgccaccatcctgttcgtgtcgcattcgctcgagcaggtcaagcgcttctgccagaccgcgctgtggctggaaggtggcaaggtcaagctgcacggtgaagccagcttcgtggccgaccgtttccgcgactacgaactgggcaaggacctggccgtggcgcaggatgccgaagtgcgccaggcacccgccccgggcagcatccccgcgcatcttgaaacggttgcactgagcaccgacatgctggccccgttcgagccgctgacggtggacatcagttataccgtcggcgatgaggtggtcgatggcctgctgctcggcgtagcgatcaagggcatggacggcctgcatatctttggccccaacacctatcttgagcgggtggtgattcccacctcccgcggctcgcaccgcgtcagctactgcatcccgtcgatgaccctgctgaccggcagctaccgcgttgatgtgggactgttcaccgacaagggcttggtctgcctggattatctgtccgaagccagtgtcttcaccgtggctgcgccctacttcagtgagggcgtggtctatatcccgcatgagtggaaggtccatgaccccgacgctgcttga

SEQ ID NO: 514426 - DNA, 783 bp, Stenotrophomonas maltophilia
atgcagaagcacgccaatctcctgttcctgttccgccagctgctggggcgtgagttggcagcgcggtaccgcaccactacgttgggtgttctctggctggtcctgcagccgttgctgatgctgtgtgtctacacgctggtgttcagtggcgtgttcaaggcgcgatgggcgggggccgaatccaccggcgacttcgcgctgatgctgtttgcgggcctggtaccgttcacgttgctgtcggaagtactgatcacggcccctgggatcatcgctgggcaacccaacttcgtgaagaaggtggtattcccgttgccggtcctgtcgatggtaaaggtggccgcagcgctgaccaccgccggcatcggcctgaccatcctgctggtcgcgcagacctggcagtcggggctgccgtcggcatgggcgctggcctcgccgctgatcctgctggaaatgacccccatgctgcttgcgattgcatggtcgctgtcggcgctgggggtctatctgcgcgacatcggccagttcgtcggcatcctcagcagcgtgctgctgttcctcagcccgatcttcttcccggcgcatgcaatgcccgaggcggcgcggggcctggtgcttttcaacccgctggtcacgcccatcgaacagctgcgcgcggtgacggtgcagaattcggcgcctgatctggccgcgctgctgccccacttcctgctttcggtagtggcggcgatgctggcctacgcgctcttccgtcgcctctcgcgcggcttctcggacgtcctatga

SEQ ID NO: 514427 - DNA, 180 bp, Stenotrophomonas maltophilia
atgtcccgacgcccccccgccgtgaccgatgacccaatgccggaagtggctgaggcgggccacgatcgcaccgtcatcaacctcaagagcgaatggttggacacttggctcaaccccgaccctgaacatatggatgagctgcaaatggcgatggacgatccccagcgcccctactactaa

SEQ ID NO: 514428 - DNA, 336 bp, Stenotrophomonas maltophilia
atggccgctcctacctctccttctgctgccggcgctgcgccggccaagcgcgtggcgcgcggtaacggtcatggcctgctgtgggcgcgcggtctgctggcgctgctgggcggttacgccgtggctgcctgctgggccgccgcactggcgcgtctgctgccgggcgccaaggccgatgccaccctggtggcgaccatggccgcgttcgtggtctacgcactggccgccatctgggcctacgccgcgcgcagcaccctgcgtgccgctgtgggcctgctggccgcgggcgccctcgctgcactgatcgcctggctgctgcgcgggaactacgcatga

SEQ ID NO: 514429 - DNA, 1590 bp, Stenotrophomonas maltophilia
atgagcagcgccgacaacctgggcggcatccgccaatcgcaatcggtgctgcacacctggtcgggcctggtggtcggctgggtgctgttcctgattttcattgccggtaccgcatcgtactggaaggaagaactgacccgctggatgcagccggaaatcggcctgcccgccgaggccacgaccgccgtcacccaggcccagcagttcctggcccgcactgcaccggacgcgcagcgctggagcatcgaactgcccgattcgcgcagcagtgccaccaccgtcagttggcaggcgaagggcgaaaaggaacgccggcgtggccagcgcaatcccaaccaagccaccctggatgccaacggcaccccggtgcaggtgcgcgagacacgcggtggcaacttcttctatcgcctgcatttcgatctgcactacgtaccggtgttgtgggcgcgctggttcatcagtgcctgttccatgctgatgctggtggcgatcatcagcggggtcatcacccacaagaagatcttcaccgacttcttcaccttccgccgcggcaagggccaacgcacctggctggacggccacaacgcgctggcggtgctgtcgctgccgttccacctgatgatcacctacaccggcctgatcaccctgatgacgctgtacatgccgtgggcggtggacgcgaactaccccggtggacgcgatgcgttcttcgccgacctgttcccgcgcgcggaaaaggtcgaacccagtggcgtagccgctgcgccgcccgcactggcccaggtcctgcgccgtgcggaattgcagtggggcggtggccatgccgcgtcgctgcagatcgaccagccaggcgatgcgtcgatgcgcattgccgtgcgccgccagcaggccgaccagattgccggggccaacgacaccctcaccttcgacgcgcgcggcgaactgctcgatgctgccccgccgcgctcggccgccgtggtcacccgcgacggcatgatcggactccacgcggcacgtttcgcgcccaccacgatgcgctggctgttcttcctgtccggcgtggccggcacgctgatggtcgccaccgggctggtgttgtggacggtgaagcgccgcacccagttgcccgaccccgcgcgtccgcatctgggtttccgcatcgtggaacgcctgaacatcggcttcgtcagcggcctgccggtcgccatgctggccttcctgtggggcaaccgcctgctgccggtggagctggccaaccgcagcgatgccgaagtgaaggtgttcttctacgcgtgggcggcctgcctgctgcacgcgctattccgtccggcccgtggcggctgggtggaacaactggcattggccggcgtgttggcgctgggcctgccgctgtacaacctggcggcctggcaggggggcgcggtcactgcactggccaacggtgatggcgcccgggccggcatcgacatcggcctgctgctgatcggcgccagcctgttgtgggcagcgcgcaaggtgcatcgtttcgtgccggcgcaacgcaagccacgtgccgcacgcgccgccccggctgccgaggccagcgcatga

SEQ ID NO: 514430 - DNA, 300 bp, Stenotrophomonas maltophilia
atgagcgcgctcgccctgctgctggcgaccgtcggcttcgtatgtctggcgttggcgatggaacgccaccatcgcgacgtcaccggtcatgcccccgccgcgccgcgccgccgcctgctgcgcctgctgggcgcggcggcgctggcggccagcctggcaccgagcatcgcggcttggggcgttgcccagggcttcgtgggctggtgtggcgtgctcgccgcaggcgccggggccatggtgctctggctcagtttccgcagcccggccaagccggcgccacgcccgtcttcccgttcctga

SEQ ID NO: 514431 - DNA, 2208 bp, Stenotrophomonas maltophilia
atgaagcacacgcactctggcgccctgcgccggaacgccctcgccttgtcgctcgcctgcgccgccgcgccggtatttgcccaggacagtgcgccgaccaccaccgaactggaccgggtgatggtgacccagcgcaccgagggctaccaggtctatggcaccaacaccgccaccaagctgccgctgaccctgcgcgagaccccgcagtcgctgaccgtgttcacccgccagcgcatcgaggatttcaacctcatcacgatctccgaggtgctgcagcagacgcccggcgtggccatccagtcgtatgacagcaaccgcacgctgttcaatgcgcgcggctttgccatcaacaacttcatgttcgatggcattcccaccaactacaccaccggtgccggcggcaactcgatcctcagcgacacctccatctacgagcgcattgaagtggtgcgcggtgccagcggcctggtcaccggctcgggtaacccgtcggccacggtgaacatggtgcgcaagcgcccgaccgaaaccttccaggccagcaccagcctcagcgccggttcgtgggattacaagcgtgccgaagtggatgtgtccggcccgctcagcaagagtggccgcgtacgcgggcgtttcgtcggcgcctacaccgacaaggaaagctgggtacgtttccagcatgacaagtcgcccagcctgtacggggtgatcgaagccgacctgaccgacagcacccgcctgcgtgctggcatcgattacctgaagaccggttccgatggcggcgcctggagcgcctcgccgctgtacttccgcgatggcagccgcgcgcacatgccgcgttcctacagcgccgcagcgcgctggaacgagtggaaccgcgaaagcaccaactacttcgccaccctggaacagcagttcggcgacggctggagtggccgcctggcgtacaaccaccgcgccaccgataccgattcgctgctgctggccggctccaacaccggcaactgggccgacccggtcaccggtctgggcctgcgcattgccgatacctattcggtgtcggaaacccgcgaggatgccttcgacctgtacgcgtccggtccgttccagctgttcgaccgttcgcacgagctggtggtgggcatcaaccactacgaccgtgacctggacaccatccgcgccggcatcacctcgcgcccgtacaacgtggccgccttccccagcatcttcagctgggacggcaacatcggcaagccgaccacgtacaactacggcattccgtccagcacggtgaacaccaccgagaccggctactacgccgccgtgcgcctgaacccgatcgatccgctgaagatcatcgccggcgcgcgctattccgattaccgcaccaccaccgacaactacaacaccgacggcgtgttcaccagccgcagcgcgcgcaccaccgcccatgagctgaccccatacgtgggcgtgctgtatgatctgagcagcaccatcaccgcctttgccagctattcggacgtgttccaggccaccgcgcggcgcgacatcaacaaccagctgctggcccccaccaccggtggcaactacgagtacggcctgaaggccgacttcttcggcggccgcctgtacgcggcgttgaacggcttctacatgaagcaggacaacgtggccgagctggacccgaacggtggcgagatcaagctgcccgatggcagttcgccgtacatcgccagccgtggcattaccacccagggcggtgagttcgaagtctccggttcgatcaacgaccactggagcatgactggcggctacacctacagctacagcagcaaccccgatggcagccgcttcgccagcaccagcccgatgcacctggcccgcttcaataccacctggacccatggcccgtggacgctgggcggcggtgtcagcgtgcagagcgagatctaccagatgcagcccattcccaccggccgcttcaccgccagcggtgcgccggtcacggccaccggtcggatgagccagggcggctacgtgctgttcgatctgatgggccgctaccgcatcaacgacaacctgagcgtgggcgtgacggtcaccaacttgtttgacaaggtctactaccgaaacgtcggcttcttcaactccggctattggggcgaaccgcgccgcgtgctgttcaacctgcgcgcgaagttctga

SEQ ID NO: 514432 - DNA, 1635 bp, Stenotrophomonas maltophilia
gtgaaggagagattcttcaaagtggtgccgccgggcactcgcttggatgcgagcaaggctgcggactgggtgctagctcaagataattggaacgactactcctttcagacgctctatcatctctcccacttcacaaggaaggacggaaagcgagaggagagcgtcattggtccggtcaagatcctcaggcggggacagtcccaaagtgacagtattctagttcaggacgacttcaatagactcgacgacgacttctgctccgtgggcgactcgctggattactacgagcgacttcgcgctctgggggagctaggcgatgagattatggagcgcctgcgggacgtgatccatatgcccgagctgatagaggattttcaatcggaactggggtggcgtaagtcgctatttcgtgatcagacggatggcgggtccagctatcgaagtttggcatcagggattgtaggaaggcactacagttctccaccgaaggaccagcagccattcgaatttgaggtcaaagggtggtcatgccgcctgaagatcgataccaaatcgcagggggcagcctccggcaagggtatgctcccggagcggatgaatgtcctggtagggagaaacggctccggaaagagcaccttgctctcccgcttggcgcgggtcgcctttgcgtccactaccgagcgcgcagcgccatctttaaccagtctaggaaccctgcttcccgcaggggtgggcttcccgcgcttggtcgttgttgcttttagcccgtttgacaacttcaagctgcccggtgcagatgcacgcaatcgcgcccagatcgccaaggaaatgcaaagtggagcggggcgatatgctttcgtaggacttcgcgacttcgcagcagaggccgcgatcacgatctcagacttgccgagtactaggcttggagagggtgagacggacgctgaccgagtcagtgagacgagactgaaatcactcaacgatctggccgccgattttgataggtatcgcgccaagatcagcgatgatcgtcggcgcgagaaaacccttgatagcgcgctggaggctctcaaatcagggctgatctcggacgaatggctggacagtaacagcagcggcatcgaccaggaagcagcggagtggttcaagaggctcagtactggccacaagatcgcggtgctttccatctatggcttggtcgcgtttcttgaggatcgatccctggtgttgatggacgagccagaaacacatcttcatccgcccttgctgtcggcaatgatgcatgcgttccggcgtgtgttggcacggttcgagtcgtcagcgctggtggcgacccattcaccggtcgtcgtgcaggagtgcttggcgcagcatgtccacgtggtccgtcgtgagggcgatcgcttctcgattcggtcgctgcgtgctgagacatttggcgagagcatcggactcattacggcccaagtatttggcatgcagtcggatgcgaccgacttccacagcgtgctagatcgactggtggacagatatgaatctcgggaggagatcgaggcgctgttcctcggtggcgtaatgagcgatcaagccagggcctatgtaatgtccaagctggcggaggattcgttcgagtga

SEQ ID NO: 514433 - DNA, 840 bp, Stenotrophomonas maltophilia
atgtggaatttgacgcccctccaggacttcaatcctcgagagcatttggatgtggcttttgctgatggcgaagtgacggaggctgagaaggacttcttgatcgagctctatgggaagtaccaggccgccttggggcgcccttccgatacgctacgtgctagcggacagcgcgcagatttgtatcggctactgcacagcgcgtacgcgctcgtgcaggacgatcgtaggcttagcgaattgcgagctgatctcaagctcttggccgactattgcccctactgcgggttcgctccaatctcggagctggatcatcacttgccgaaatcgcgtttccaactgttgagcatcttcgctcttaatctggtcccatgctgcggtccctgcaaccgaggaaagcggcggctgccgtctatcgatcccgaagaacatcagctccacacctacctggaatccgtggcgcagttcgattttctcagagcgtcggccagcattgattcagagacaggggcgctgtcggtcgtgtattccatcgatcagtgtgaggggatgtccgacgagcttttcgctcgattagagtgccatctggacgagttcgagttgcacacgaagtacgcaatgcaggtcaacattcatcttgcagagcagatcgttggattcagaacgaccttccaagtcgggccagagctgcttcagcggtttctggtccagaccgcagaggcccgcaaggagcgcttcggaaccaacgactggcgcacagcgctctttcggggtctggcagagtgcgagcccttctggagtggtggattcgagcgggcattggggaatcgggcgatggactga

SEQ ID NO: 514434 - DNA, 591 bp, Stenotrophomonas maltophilia
atgtctagcaagaagagcaatctcccgttcagtggaacgggcgagtgcgcgcagctactgcaacgccttcagcgtctgtcgcgacggcggggttcggatcgggtgttctctgactttgtcgagctgtccagcgtggcattcagcaacgtggttgaccggccacagcgcgaggagcgcgaagcgcgctatcacacgattcgacggagctattcggctacggaattcgagcagttcccgattctgctggcgctgctgacgcaagcgatggagcagcagggattcggcgatgtgctggggccgatctatgcgcacttgcagatggccgatgcacgccgaggacagttcttcaccccgtacgaaatctcccggtacatggcctcgctggtcctggggagtccgccggtggaggccaaggccgaggcattgcgcgaggcgtgcccggtcgtccagatcgtgcaggtgaacgacgggttcatccccttgtcgcagcagccaatgagccactgttcctcgatcaggccgaactgcagatcagtgcgagcttgggcatcgcgctgtacccggatgatgctgcgaacgagcgggagctga

SEQ ID NO: 514435 - DNA, 612 bp, Stenotrophomonas maltophilia
atgaccggcagctacaacgtcaccttggttgccatttcgctgattgttgccgtcctggcgccctataccgccctggacgtggccggttgcgtctccacggcgaagggcgcgatggccctctggtggctggccggcggagcgacggccatgggcctgggcatctggtcgatgcacttcatcggcatgctcgccttcgatctccccattccgatcggctacgacctcacgattaccctgtactcgctggcgacctccgtcggcgcttcagcctttgctctatggctggtgtcccgaccgagcttgttctggccccaactgaccctcggggccgtgcttatggggctgggtattacgaccatgcattatctcggcatggccgcgatgcagatgtcgcctgtcattgaatatgacttggattggctgctgctctcgatcctagtagccattgatgccgcaggtaccgccccctggatcgccttccacctgcgccgtgagcgccgacataccgttcgcctggccgcgtcagcatgcgccatcagctcccgctcgttcgcagcatcatccgggtacagcgcgatgcccaagctcgcactgatctgcagttcggcctga

SEQ ID NO: 514436 - DNA, 1581 bp, Stenotrophomonas maltophilia
atgcttgaggaagtcagtgtcgccggcgtggcgacctacgcggaaatccagcggatggcggggcttcgtcggatcaattttctatacggaagcaatggttctggaaagacaacgatctccagagtgattgccgaccctgccggatattccttatgtgctttgcgttggcgcggagctcgccctttggaagcgctggtctacaacagtgattttgttgaacggaacttcaaggcagatttgcgcggaatattcacactcggagaggtggaggtcgacacccttgagaagattgagctggcccgtgccaaggtggtcgaaatagaggctcagatcggcaatctacaaacagcgctgggagctgaggacgactcaagcggcaagcgggccgagcgccatgcgttgaggaaagccttcgagcagcaatgctggagcgtcaagggcaactacgatcccaccttccgtgaggcgttcaagggctctcgaaattcggctgccaacttctgcgacaagatgcttgaggagtctaaagacaaccatgcagcggttcacccctttgatgaccttaaaggtcgcgcccgaacggtttttgctgaaggggttacccgattgcctctcgtgccgacggtggatgggcaaaggctactggacattgagcacgagccgcttcttcagaaacaggtggtgggtaaagagcagatcgacatcggggccctgattcgtcgcctcggaaatagcgattgggtccggcaggggctgccctacgtcgaaggcccccaggcaccgtgcccgttctgccaaaagccgctggagaaggaactgctggacaagctgaatgccttctttgatgagtcgtatctcgccgacattgcggagctggcacgagttgaagagacctatcgtacgtttgctgaggcagtcttggaaacgctcgactctgtgctggccatgggaagcccgcatgtcgatgtggaggcgctgcgaccttggtgcgatcaggtgcgtacgctggttaccctcaatacgcgcgctctggagcgcaaacggagcgcacccagtgtcccggtgacgctggagcctctggccgagcctctcggtgcagtgataggtgccatcgacaaggcgaacggcgaaatcaggaagcacaataccctggtcgacaatctgggcgccgaacgaaagaatctgaccggtcagatctggaagttcgtgaccgaggaggccaaagcgtccatcgagaaattcaaaaacgacaaggcaaacatcgatagggccattgctgggatttcctcgagcatcgacacaaaaacgcaagcactggtagcggcgaaagccgtcttggcggaccttgagaagaaggtcacgagcgtccagccgacagtgaaggagatcaacgcaacgctcgcctcattcgggttcgtcagcttcaaactggccaccgccggtgagcaggaggaatcctatgccatcatccgcgcggacggcagcgatgcccgaaagaccttgagcgaagggagcgaagcttcgtcacctttctctatttttaccatctcatccgcggtagcaattccgcgagtggtgtga

SEQ ID NO: 514437 - DNA, 696 bp, Stenotrophomonas maltophilia
gtgaacgccgatcgtatcgtggtgtttgacgaccctgtatcgagccttgacagtgacgtgctcttcatcatcagtacgctgatcaagcgtgtgctggtcgaagccgtggacggcaacggtcgcgtgaagcaggtgtttgtactgacgcacaacatctacttccacaaggaggtttccttcgatccaaagcggtcacaaggcgattgccgagcgcacgaaacgttctgggtggtgcgtaaagtcggcacgcggacgctggtcgaagggcatccgcgcaatccgattcgaacgtcctacgagctgctgtgggccgaggtgaagaatccacaacggtctcatgtgacgattcagaatgtgctgcgccggatcctggagcactacttcacgattctcgggaatatggacaaggatgccatcgtcgcgaaatttgaagggcgcgaccagcagatctgcgcatcgctgttctcatggatcaacaatgggtcgcacaatttcagcgatgacctctacgttgtggcggacgaagcaacggtggggcgctacctgtcggtgttcaagcggattttcgaagagacccagcacggggcgcactaccagatgatgatgggtccagaggactccggggcggcactcgatgaggatcccgccgcagtaggcgccggcgctggtgagactggccgcggtgcgcgcccctga

SEQ ID NO: 514438 - DNA, 420 bp, Stenotrophomonas maltophilia
atgaacaagcagaccggtttcacgttgattgagttgatgatcgtcgtggccgttatagccgttctttcggcaatcgcgattccgcaatacaacgactacaccgctcgcactcaattgtccgaggctgtagtcctgttgggcgggcttaaaacacccgtcggcgaacaatttgcgaacaacaatggcgcaaattcctgcgttctgcctgacagcgcggtcctggcgggcaaatatgttgaaggcatagcggtggcaggtggcgtcccatgcgtgattactgcgaccatgaaggctgcaggagttaacagcaaggtggaatcagcgacggtgaccatcgtctacgccgctgacaccggtacttgggcttgtacgaccagcgcgccagtcgaggttgcaccgaaaggctgcccgcatggttga

SEQ ID NO: 514439 - DNA, 426 bp, Stenotrophomonas maltophilia
atgaaaaaccagaagggcttcacccttatcgaactgatgatcgtcgttgcgatcatcgccattttggcggccattgcgattccgcagtacaacgattacacggcgcgcgcccagatgtcggaggcgtataccttggccagcggtcttaagactccgattgccgaagctttcgctcaggattccgatccggctacctcttgtgtggttccggcgaacgctgtggaaaccggcaagtatgttgcttcggtggaagctggtggtgacagcccgtgcactatcgtcgctaccatgaaggaagaaggcgtcaacgcgaaggctgccggcaagactgtcaccctgactttcactccggatactggcgcttgggcgtgctctaccaatgccgcctctgaagtgcagcctaaggcttgcgtcactgctccgtaa

SEQ ID NO: 514440 - DNA, 195 bp, Stenotrophomonas maltophilia
atggtatccgaggcgggtgccgacaggtcactgcatactggacggcgcctgtacaccggccccaatacctacgtgcagtcgagcggcgggacctactgcgccagtctctacattgtcagggcctgcaacgccggtggctgttcggcatggtccgcagacttccccgtcacccgcggcgtattgaatttggactaa

SEQ ID NO: 514441 - DNA, 975 bp, Stenotrophomonas maltophilia
atggtccgcagacttccccgtcacccgcggcgtattgaatttggactaagccatgaatggactctgttcgctgtgattcgggcggtactcgcggtggtggtgctggcgccctgtgtggctccggcggtcgcacaggaagtcgtcgagtacatccacactgatgcactgggttcaccggtggcgatcaccgatgccagcggaaatgtcatcgagcgtacggtgtatgagccgtatggggcggtggtcaaccggccgttgaaggatgggccgggatatacggggcatgtgacggactccgggaccgggctgagttacatgcagcagcggtattatgatccggctattggatctttcataagtgcggatccggttgaggccaatgggcatacgtcatccaacttcaatcgctataaatatgcccttggaaatccctacggtcatgtagaccctgacggccgttgtgagagcgtatccacatgccagatgatgagagatgatctggctgtcataaacggcgagatggggttggatgagcgccggtctcgccaggaggcaagagcggccggagccgttgcgggtgtttcagttctagctgccagtcgtattccggcagcgactgcagctgtcatcggtggtgcgaagaatgcatttatcaatattgccagtcgcgttgcgtcgctcactcgatctcagcagcaggcaattaagaaaataaataacattgttgacaataatgcaaagcctcacgactttgacggagttgctaaagagcttcgcggaattgagaccggctttgatcatgtgacagagatgcaaaattcactgaaggggctgagctctgccgcaaaaagtttgagggggagcttgaacaatccgagtctttctagagggcagcgtgttaggatccagcgaacgcttgacaaggcggatgaaaacatagcgaagatgaaggaggcgcttggtggtggaagatag

SEQ ID NO: 514442 - DNA, 171 bp, Stenotrophomonas maltophilia
atgaagccgtccggcgatcggatcaacaaggttgacgtcgaagagctgaccattgggatatttgactacgacaacccgagcttcctcaaggaaatttcactgaacgagggttcgcacgttcgactcggaggaatggtctttgctgctgcctttctaggccaaagttcgtaa

SEQ ID NO: 514443 - DNA, 741 bp, Stenotrophomonas maltophilia
atgagtacgtccattccggcggaacgtcggcaagcactcaacaccggccgcgtcgccgccacccatctggccgaatgcctggcagtggatttcgccgcgctgctgcaggtggtagcgcctgcgcttgcaccggaagcgctgcaacgcatgcaggatgcttcaggcaagggcatcacactgcgcatggccttggctgcgcaactgctgcgtgaggcggggcagggcgatcccgtgcaatggcaggaccatgcgtccgacaccgtgcgcggctgggcctgctacctgatcggcagtgacgccggcacgcccctggcagggaagctgcaggcgatacgaacgctggccgatgacccgcacttcggcgtgcgcgaatgggcctggctggcactgcgcgcggacatcgttgctgcaccgctgcaggcgcttgggtacctgcaaccgtggacgcaggaagtatcgccgtacctgcgccgtttcgcctgcgaggcgctgcgtccccggggcgtctgggctacgcatatcgcgctgttcaagcagcagccccaacacgcagtgccgttgctggacgcgttggccgacgaccccgagcgctatgtgcaggactccgtcggcaattggctcaacgatgccggcaagacgcagccgcaatggctgcgtgggctgtgcgcacgttggcaacgcgagcaccacagcgatgccaacgcctacatccgcaaacgcgccatgcgatcactgcggtaa

SEQ ID NO: 514444 - DNA, 339 bp, Stenotrophomonas maltophilia
atgccccacaccttcatcgagctctacaccgccacccccgcctggacggcgctctcgcccggacaacgcaccgccttcttcgcccgcatcggtgagggcatgcagcgtttcgacccggaatgcatcaggccggtggccatgggccgcatcgctacggacgtgccgcgtggcagcggcgagcagttctatgcggtctggcactgcgccagccgcgaagcggccgacacgctggtggccgggatcgccgctaccggctggcatgagtacttcaccaccacccatgcggtgggcgcgatggacagcatggcccagcacttggccgacctggccgccttgtag

SEQ ID NO: 514445 - DNA, 309 bp, Stenotrophomonas maltophilia
atgatccactccgaccagggctggcagtaccagcatgaaaactaccggaacatgctggaaaaacattcgttgaagcaaagcatgtcccggcgtggcaactgcctggacaatgcggcgatggagagcttctttgggacgctgaagtcggagttcttttacctgaacagctttgacagcatcgagagtctggaggctgggctggtggaatacatccagtactacaaccaggagcgcatcaaattgaaattgaagggcctgagcccggtacagtaccgggagcaggcccaacaggcccaatcggccgcctga

SEQ ID NO: 514446 - DNA, 126 bp, Stenotrophomonas maltophilia
atggctccgctctacagaaagcactgcaggaccaaacaaaaaggacgcggcgaaggccgcgtcctttttgttttccttcagttcgtcagtaatccactgctcctgcccaccgtcaccgggaaatga

SEQ ID NO: 514447 - DNA, 192 bp, Stenotrophomonas maltophilia
atggagagcttctttgggacgctgaagtcggagttcttttacctgaacagctttgacagcatcgagagtctggaggcggggctggtggaatacatccagtactacaaccaagagcgaatcaaattgaaattgaagggcctgagcccggtacagtaccgggagcaggcccaacaggcccaatcggccgcctga

SEQ ID NO: 514448 - DNA, 2292 bp, Stenotrophomonas maltophilia
atgcctaccgtgaatgtcgccggcctcccggcagccattgctgtcatggccagcctgctgctgcctgccacggcctccgccacgggctgcaggacaccgctgcgcattgcctggccttccgaccgcgcacccttgtcgtccagcgaacagggtgaggcacgggggctcggcgcggtgtacctggagctgctgggccggcaacggccgctgcagctgctgcccgtgccggccgccagcgtggaacgggatgagctgccggccagcacccaggcgctgctgggatggccacgctcgcagctgcccgccgggtgggtggccagcacgccctacctgcagctgccacaggtgatcgtgcgccgggagggtacgccgccggtgctgggcctggaagatctgcgtgagcgaaccgtagccagccccagccggatgccgctgcaggggctgctggccgagcaggcaacgggtgcgcagctgctgccaccggcagcgctggacgatgcgctcccgctgctgggcaccggcctgatcgatgccgtggttgccaacctcggcgaagtcgaggccgcgttgcgccgctaccagggcgatgcactgctgatcgctgcgccggccggtttcgatgatgccctggtgctggcgaccacgcccgcctgcgccgatgtcatcgccggcttcgagcaggcgctgtcgcagctgaccgatcccgagcgcgatcagatccgcgcggcctggctgccggaccggccgcgcaattggccgtcatcgtcacccctgcgctggctggtgccggcctcgttgatcctgctcgcactggcgctggtacatgcctacggttactggcgggtgcatcgcgaaagcgtgcggcgccgagtcgtggagcagcgcctgcaggaggtgactgcgaacctgccggcggtggtctaccaggcgcgccgttcggcgtgcggtcactacagctttccgcagatcgccggcgacgtgcagtccctgttcggaatcagcgtggagagcgcgcgcatcgatcaccagtggctgctggccgcggtccaccccgaggaccgcagcagggtgatggcctctatcgagacagccgcattggcgcgtggcccgatcgatgtcactttccgtacccgttcaccacagggctggcgatgggtgcgttcgcatgggcgaccgttgtcctgcgacgatagctacgtcgagtggagcggctactggatcgacgtcagcgaggtgcagtcacgtacccgcgcgctggccgacgcgcgccgcgaggccgagcaggtggcacaggccaaggcgcacttcctggccacgatgagccatgagatccgcacgccgatgagcacgctgctgggcatgctcgaacggctggcgggcagcaggctggagccacgccagcagcaggtgctggccacggtggatgatgcggcgcggatgctgcggcagatcctcgacgatgtactgcacagccagcgcctgcagggcgcaccgctgcagttgcggcccaccgatctggcggcactggtgcgcgcggtgcagcagctgctgatgccggtggccgccagccgcagcctgcacctgcaggtcgtgcttgatccggagatgcagccgggatcgctggccgatggcctgcgcctgcgccagatcctgttcaacctggccggtaacgcactgaagttcacccggcacggccacgtggaactgcggttgcaggtactgcagcagcatgcccgcgggcagcggctgcgcctgcaggtaagcgacagcggcgtgggcatcagcgaggaacgacagcaggcggtgttcgccgcctatgcccaggcggagcgctcgaccacgcggcgcttcggcggcagtgggctgggcctggcgatctgccgcgagctggcaacctcgatgggggcggagctgcagctgcgcagctcccctgggcagggcaccacggtatggatggatctggacctggaggcctgcgaggcacccatagccgcaccttcggcggcatcagcggatgagcatccattgccggcggcgtgcgtactggtggttgaagaccatcctaccaacctgcagctgctggagcagcgcctgtgcgcgctagggctgcgggtccacgcctgtaccgatgggcagtcggcgcttgaagcatggcaggcgcagccgttcgagctggtgatcactgactgccacatgccgggcatggacggcttcgcactggcgcgggcgatccgcgctgatcctgcccggcacgtgcgcaggtgccgatcatcgcgctcacggccagcgtga

SEQ ID NO: 514449 - DNA, 384 bp, Stenotrophomonas maltophilia
atggtcactggcattgctgtttgcgaatgcagaaccggcccggtcatacaccacttcactggcgcgctgtaccgcaccggtcgccaggaagtacaggcccatgcggtcaccctccacttcacgcacggcggccacgcccacgccatgccgccgcagctcggccacggcatgctggcccagcgcgttaccgggtaccgtgctgaccatctgcacatcgtggccgaggcatgccagcgagaccgctacgttggcctcggcgccccccacgtgaacctgcagctgcggcgtctgcagcagcagttcacgaccgggcgcgcccaggcgcagcagcaactcaccgtaacaaacgacgtggctcatcggttctctctcactcgggggtag

SEQ ID NO: 514450 - DNA, 756 bp, Stenotrophomonas maltophilia
gtgcgccgcaccgagctacgggtcgcagatggcaggcagacagccgtcgccgacagcgtgcggctgagctaccagcagaacgtgttctcggcagtgatggtgcagcgtgatgatcgtccccaggtgatcgtggcgctgggcgattccatcacggaaggcgccaccgcacgtcgcggcaccttcaaccagtggccggagcgattggcgcagcgcctgcagcaggcctgcccgaaccggttcgtggtactcaaccagggcatcagcggcaacaaactgcttgaccatggccgcagccacagcgccctgtcacgattggatcgcgatgtgatcgccgtggccgatgccgatcaggtgatcctgttcgaaggcatcaatgacatccgccacggcggtggcgcgcagccgctgcctggacgcagtgcggcggacatgctgctgggctatcaacaggtcgcggcgcggctgcatgcgcacggcatccgcgcttggctgggtacgttgaccccgttcggcggttccgagcgctacgagcccgtgtccgccgccacccgcatcacgatcaaccagtgggcacgcggcggcaacagcggcttcgacggcatcatcgatttcgatgccgcgctgcgtgacccgaaggcagccgaatcgctgcccgacgagatcacccgcgaccatctgcaccccaacgacgaaggctaccggcgcatggccgatgccatcgatctgcgcatgctgggctgcactacccccgagtga

SEQ ID NO: 514451 - DNA, 309 bp, Stenotrophomonas maltophilia
atgatccactccgaccagggctggcagtaccagcatgaaaactaccggaacatgctggaaaaacattcgttgaagcaaagcatgtcccggcgtggcaactgcctggacaatgcagcgatggagagcttctttgggacgctgaagtcggagttcttctacctgaacagctttgacagcatcgagagtctggaggcggggctagtggaatacatccagtactacaaccaagagcgaatcaaattgaaattgaagggcctgagcccggtacagtaccgggagcaggcccaacaggcccaatcggccgcctga

SEQ ID NO: 514452 - DNA, 378 bp, Stenotrophomonas maltophilia
atgaacgaatcggacttcccgcatctgcacgcctaccgcagcaccgcccgcgacgacggctcgccacagactgcgcctgcggtggacaggaacaccttcattgccaacctcaaccgcatcggctccggtgcagcagccgacggacaaccctggccggagcggcatcaactgcccggccgctgcctggccctcgccgatgccgattgcgcgttgaacgggttgcgggtggtgctggaaatgctgctggcggcggaacgcacccggcagaacggcgagccggaagagtacgtgggcgaccgggtgatggaggggttggtcatggcctgccagtcgttgtgcgcgcaggcggtggggcgcttgcaggtgggtgagcagtag

SEQ ID NO: 514453 - DNA, 540 bp, Stenotrophomonas maltophilia
atggcgcgtacggccgctgtgggcatggcggctgctgagggcgcgccactgttcgaggtcgccgacctgtccaccctgtgggtggacctgcacatctttggggccgacgtccagcacatcggtgccggcgtaccggtgacggtcacccgcttgagcgatggcgtcaccgcgcagaccaccttggagcgcgtcctgcccggcaccgccacggccagccaaagcaccattgcgcgcgccaccgtggccaacaccgatggcctgtggcggccgggttcggcggtcaaggcgcgggtcaccgtggatcgccagtcggcggcactggtggtgccgatcaccgcgctgcagaccgcagaagaccaggacgtggtctacgtgcagcagggagagacctaccacacccggtcggtcaagctggggcgccgcgacgctgagcgcgccgaagtgctggaagggctcaaggccggtgaacaggtggtggtggcccagagcttcctgatcaaggccgacatcgaaaaatccaccgtcgaagaagaccattga

SEQ ID NO: 514454 - DNA, 207 bp, Stenotrophomonas maltophilia
atgaacgacgtcgagggctacaggtacgcatccagcaccaacttgaagggctgcgagcgatatggatacgggtcaagtatcggagtgaaaggcttcaagcgatacgggtacatgctcggcgcagaagcgaccgttccattgaggctgctttcctgcgagcagcaaatccagctcaagatgttcagtgaggcctgtgcgcgaatctag

SEQ ID NO: 514455 - DNA, 987 bp, Stenotrophomonas maltophilia
atgaaagtaataagggcaatcgcacatcagttgcataagacgcctaaggtcgctggcgcaatagcagatccgacaggcgtcgagctcactcattccgctgagttgggggagctggtatcggaattacttgagacattcaatacgaagaccgctcaaagaaccggcatatttgaagcggaagaggatttctacccattcattcctgggctgagaaactatctggcaggaaagttggacttcgtgaaatttaccacaatagcccttaagcaactcgcaattcttatgaatgatgtgcatcctgccggtggtggacacatcttctttgcgcattacaaggtggttgctggtgatttctttgtcgttgcgaagctgagtgatagcaatggcaagacattcagcgaggatcgtacgcaggttgtcaagaatttccacttgtccttagaccgtttgcatcatgtcgggcgggtgaatatttcgggctggggtaaggcggctgccaagtacctgacgtttgttaatgctcgtgaaaatggaaaatcatcggattattttgtaaaattccttggttgttccacggctactaagcctcgggctgagactgggaagctggtggcggtaatcgaagcgtactgtgagcaggaaaatatgagtgtttctgctgagattgtttttaagcaggccgtttttgatcacgcgaagtccctgccaagggggcaggccgtgtctctcgctgtgcttgccaacgcggtggttccggatgagcctgaaaagttaattgccttcatcaataactatgccgatgcgccgagtgatgacttccatgtggatggccccacgttgaagtcattgattggctatagagtgaatgttcccggtctcaggatgtggatgactgcagactttaagcagaagcataaggttagatttaataagaataacgagcttattatcagtgacgcatcttcgcttcgcggtgatttggagtaa

SEQ ID NO: 514456 - DNA, 1206 bp, Stenotrophomonas maltophilia
gtgtcggtccagctccagcgtatagttgaggttgtcaggaaaggacgcgaaccggtggttcgtggggactcgctatacgtgtttgttcgggccacgcctcggatcaaggagttgcttgcagatattcacgagggaaacgctgttcgcgtgtttgctggtgatgttgagcagtatgaggactttgctgacctggacgatcaggttgattttcgggtctccatcgcaaagatccaaggcacagccttccatgtggcgcaagattttgtgagttttttgaattaccaagaggggcgatttcttgtagagccccccgcagcttggtacttaattaaatcgaattatttgagtggagaggatgcggagtcggaggatgttagggggtatttgcgtctgccgcattttctcgagcttctggaggaggtttcagatttttcctccgtcaagggtgtcactaggttctacgtgttcttagcagatgagcggttcgatctgccaattgtttgtgaacctggttccctcagaaaggttccatccgttgaggtcatagaaacgctccgggaggatgtgtttgtcaggccgcggcaacctgcaaaaagagaattgctgaagagatccatagttcgtcatatgcgttctatggtggaacggtctaggtttcccttgctgttgcgatcatttccgtctgtcgttgcttcctatgaggctgcgcgggacaacttcgtttcggagtttgagtttgaaaagttgaatgagaagtttgagcggaagagggaggagtacatgctgaagatcgactcagtctgcagcgatcttctcacaaaggttttggcccttcccgtcgctcaagctattgtagttagccagtacaaggatggtgcattactcgcaaacttggctcttgtcttcggttcagccatagtctcgctgctgggtgtggcatttatatcgaatcagattcatgcaattcgagaaatccgaaagagcgctaagcgggagagggatgaagttgcggagagatacccggatctctacaaaagaattgagaattcctacaagcaagtcatctggcgtctagcgttttatgcccgactcctgccggctatggtcggtctgctgctcttggtaagttttctgttctcggtatcgggatacgatcaagcggccccatgcgcaggctgcgtagctagggtgctactcggacactag

SEQ ID NO: 514457 - DNA, 474 bp, Stenotrophomonas maltophilia
atgaagcacctagccatcgcagcagcaaacgagttcatccgcctggggcggcgtgacgacgtgctggtgaccaacatgaagttgcagaagctcctgtacttcctgcagggacatggcttagctctggcaggtgagaacttgctcgatgagcaaccggaggcttggcagtatggcccggtgtaccggagcgtgtaccacgagttcaaggaacatggagctgcgcccattctgaaggaggtgccgtgtccgtttgacgacgacggcgagccctggcgtatgagcactgaggaagcccgagatcagaagattctcgaggctgtatggcgtgcgtataaggatatgtccgcgaccaaactgtcgcagatgacccatgtgcccggggggccgtgggaaagggcgtataagcagggacgttcggttgatatctccgaagaggccatgcgggagtacttctcagccgtcggcggtaagtga

SEQ ID NO: 514458 - DNA, 270 bp, Stenotrophomonas maltophilia
atgacgctgcagctgatcactgaattgcggtccgccgctgccacccttcgccggcctggtggcacgaccaccgaccggatcagcgccgagttgctcgaacgggctgcgcagaccatcgccgtgctgcagcgcgcgccgctgccggcgaccgccgtaactgaccttctgccaatgatgcaggacggctggacgctggaggactatggaatctgggcgatccgtgcggccgagcgcgcccacggcataggggacccgcatggccgcaactga

SEQ ID NO: 514459 - DNA, 261 bp, Stenotrophomonas maltophilia
atgagccacttggccagcctggaaaagaccaaggaaatcgcaatccccggatcgccccttatggtggtattcgggcaggacctggacgtcgcgctgagcaaggccaggcttctcatcgatcacgtgcaagctctcctgtggcaaggcatgcgagatgcagacggcaaggacgtctctttcggatacgacgaggtcgtgacgatggattttcttctcgatatcgcgaccgtcttgtatcgagccgcaggagccgaagcatga

SEQ ID NO: 514460 - DNA, 384 bp, Stenotrophomonas maltophilia
atggcgaatagcagtgtacccccggcagagccggccgcagcctcccgcctcgcaatcagcgagcactacctgagctcgatgtggagggacaaccctctttccgactgtctgaccaaccgcctggtcaaggtcgaccagaacacgaaggcggccatcgctatcctggacgtcatccgacgcgacttcacgtccaagcaggatctgcgggatacctgcgacgatgaggaacgggtgctgtacgccccgctgagtgagcatgcggtggactgcctcatgctgggtatggagagcctcctctccgagtccgaggacttgcttacctacgtacgtgacaatgagcgggacgtctgccaccagccgctgaaggggtcccgccgtgtctga

SEQ ID NO: 514461 - DNA, 741 bp, Stenotrophomonas maltophilia
gtgacagacctcgtaaccctcagcggcaacaccgccgtaaccagcacccagaccatcgccgggtacaccgacaacgatcactccagcgtcatcaagctggtgcggacctacctttcagatcttgaggagttcggcttggtccgatttgaaatccgaccaagatcccagggccaacatggcggcggagacaccgagtacgccgagctcaatgaacaccaggccaccctgctactgacgtacatgcggaacagcccaatcgtgcgctctttcaagaagtccctggtgagggccttctttgatatggcccagaaggtcaagatgcgggcctccgacccgatggccgtcttgaacgatcccactgcgatgcgtggcctgcttctgacctacaccgagaaagtgatcagcctggaacagacggtcgccgagcaggcaccgcaggtggccacgctgaatcggataaccgcagccgatggctcactgtgcatgcgagacgcggccaaggttctgcaggtccgcccggtagatctgcggcgctggctggtggctcatggctgggtctaccaacgtccgcgccacagcggttggctggcctatcaggagaggatccagcagggtgtcatgtgccacaaggtcacgactgtccagcgcgaagacggaaccgacaaggtcgttgagcaagccaggatcacaccaaagggcatcgctcgcattggcaccgaactggcaaaggcagcggcatga

SEQ ID NO: 514462 - DNA, 171 bp, Stenotrophomonas maltophilia
gtgaagaacacgagaaccaagaccagcgataccaatccgttcggcctgcgtatggacccttacgtaaggagtggggtcgagaagaaggccatagagacggagcgcagcctcaattggacaatcaatgaccttcttaagcaggccttgggcctcaaggagccaactccgtga

SEQ ID NO: 514463 - DNA, 321 bp, Stenotrophomonas maltophilia
atgactaggaagaccttcagcattctgctcatcgtgtttgttgtgctggccatcgccgtctacacgcaactcaccatcttcgtcatccagcccatcggtgctatccccgagggcaaaacgctggtcatccttcggctcaacaagaccgaattcatcgacagcgccgatgccatgtgcgagcgagaaatgggcggcgtgtcgctgctgtgccgcatggggatgatggctggggtcgcgaacaacagcaaagtcctgctccgcttgccgtacagccgggcgctctacgacatttccacgggcggcaagaactacgaccgctga

SEQ ID NO: 514464 - DNA, 321 bp, Stenotrophomonas maltophilia
atgaccaacattaaggaagggccatgggcaaagtccgggcccattgaatcgggcggagaaccccctcaaaatgggggtatggaagccagagttgccaaactcgagtcaaccttggagtacgtccagcgggacgtggccgagattcgcgccgacctccgaaaaatggccgatcagctcaatgaatttggcaaggatgtgaacggcgagtttcgggcggttagagcagaagccaggactgacttccgagtgctctttggcgccctgatcaccgttgcgctggggctggctggattgatggccaagggttttggctggctctag

SEQ ID NO: 514465 - DNA, 459 bp, Stenotrophomonas maltophilia
atgccacacgattccgaacaggaacaactccccagtcgttcgccgcgccatattggcgaagtggtagaggaagcgcttgcgcgccttcagaaacggcgcgcacaccccttggtgaagatgcttgagcgactgccagatggccgtgtcgcgttcgagttctatgatcgcacccgcgagcatgagtcgccgatgtatgacttctactgctccggtccgctgcaggcagtggagtggatccgtcaggtagcgccgaagacctggatcacgaaggagcacatcaccgttttctccagcctgatcttggaggcgttccctcagcccgccgctgtgcagcacggtgagatcatcgaagcagacatcgaggctgacacggtaacggtacagcttgacccgggctacgaggtccgcagcggacgtgtggcgctgctctgggcgaaggctggtgcaagccatggctga

SEQ ID NO: 514466 - DNA, 1437 bp, Stenotrophomonas maltophilia
atgatccgccacgacgaggacgctcagacgttcaacctcgatgccgagatggcggtgctggccggcctgctgctggacaacgacgagctggccaacgtgcaggactggctggcgcccactgacttctacagccccgaccacgcccggatctacgaatgcgtgctggagctgtgcggcgaaaacaagcgagccgatgcgatcaccgcaggtgagtggctgctggacaagggcggggaagacggccggcaccttcaggcgttggcatacgagatctccggcagtgcctatacccgttccaacgtggtgccctacgcggaggtggtggttgagcattcacggatgcgaagcttcatcgccacctgcgagcgcgcgctgcaggcggcgaagagccgtcgcggttactccgccgagcagctggcctcacatctgtcgacgcagatggctgacattgctcccgtgcgggcggtagggccgcggccgtaccgtgaagtcgtcaagaagttcgcagcccagctgcgcgaccggcatttgaacggcacaccaatcggcttgccgacgccatgggctgacatcaacaaggccatcggaggattgcgggacggtcaggtgatcgtgattgctgcccggtccaacatgggcaagtccctgatgggtttccagctggccaggttcaccggcctccgcggggatcatgtggtcgagttctctatggagatggttgacacggacgtggtggcgcgagacgtggccgccatcggcgaaatccccttgcagtggctggtcggcaacggcgacgaggtgtcagcggatgattccgacctgtactggggtaaggctgtaccgacgatgcaaagccttatggaggcgacggtcctggtcgatgacgacccgcagctgagcgcgccccagatcgttgcccgcgccaaacgcgcgcatcgccgcaagcctctccggctggtggtggtggaccacctccatgagatggcattgccgggcaagcaggacgaagcgctcgagcgaggacaagccctgcgcgacctcaaggggctggcgaagttcttgaactgcccggtggtggtgctggcccagctcaaccgagcgggtgccaaaggcgaccgtccgaaggtgaccgacattcgcggttccggtggcatcgaggaagtggccgacgtgatcctgttcgttcaccgaccggacgcgtacaagccggaagacaggccgggcctggtcgaagtgatcgttggcaaggggcgcaacatccagaccgggactgtcgtggccctgagaaacgagttccagtatcagcgcgcagttgactgggacggtccggcctacgaattcgctgccgagccagagcaaacgaaaaagcgcaaagcgcaactcgctcccagactggggatccgcggacgcaactcacagggggcagacaatgagtaa

SEQ ID NO: 514467 - DNA, 435 bp, Stenotrophomonas maltophilia
atgaggctggcaagcactgtcaattctcacgtaatccaggcggcggttgacgcggtattcctgcgggtcgtctgttcggcgaatgggcgggtccgcgttgggatcagtcgggagccgcttgagggcctgcgtaagctagcagggcaggaagcgatagcagcgcaatgggcctggattgggagcgcggcgaaagggaaggccgcagaaaggtcgctgcgcaggcgctgggcgaaccgctaccgggccggcgagggcttcgggttcgactatggcactgagggaagactgttccgcgacgagttggacgctaccttcagggaagtcgtcggcgttgtgccccagtggcgcaaggtggggccggtagaaatggcggaaatcatcggcggtatgcggaaggaacgacgccggcccgcactcccagtcaaaaggaattga

SEQ ID NO: 514468 - DNA, 966 bp, Stenotrophomonas maltophilia
atgaagtcgagtagcagtcgcgtaatgcgtttccttgagatcaagatctcgcacggaaccggtgcaaagacacgggaagcgtgggatttggccgcaatgctgaggacggccgcgggtaacggcttttatcagcgagctgtcagggatggcgcaaagaaggttgtgcgcatcaagcactgtgagttctttgaggagaatggccggccctacgcggctgttctctttgtcatggctgacgctggatatatcgatgccagctacgagaacatgcagacgggggcagcgcgtacgtttgccaaggacgatggggagggataccgcaccgaagcgcatctcgtcatcgacctttcctacactctccagggtactacccaagtgtatccctgcgcgctcgaggaatcgccgggacttggtccgtcagtcgttctcagtcgacttaaccatccattgcacaaggctggcgagcgggaacttaaggaaggcaatgacacgcataactggttcccggttgtttcgctcgacggccttctgagcaggagcttgatcgaggagattgagaagggcgagctgatgtctttcgacctcgtgaaggaagagttgcaagaccaaggcttggacgagccagaggagttggttcgtcgtaggcagatcctatgcctcgacgtccggcaagatcccgaagaggggcgagtctccgccgtcattgcccgggcgcgccagatcgcgttcggcgagaactatgagcaagtgcgaattcactataaggaagaggggacgggtaagcataagcaagctgtgcttgacgttcccgaggatgcggtagatccgggcgaagagctcgagaagcttgtatccaggtcctgcaagattgagctgcccgaagcgatgaactgggatcacactgaggttgtgttgactttcgcaaagcagatggcaaataaactcgctgaggaaaaaggcgactag

SEQ ID NO: 514469 - DNA, 543 bp, Stenotrophomonas maltophilia
atgtggaaagcgctacgtcagttgatcacaccgcttgcctatctgcgcattagcgccgaaggctggggcaaagtcatgatcgattggcttctgcccggcttgctggctgcgggcgtaaccaccatttggtggaactggccctcgctcgtaccgctgggcggaggtagtggcctccttgttggtgttggtgctgtgatgcagatcttggttggcttctatgtggccgcgttagcagcaattgccactttccccactctgtcgcttgagaatgacgttcaccgcatgacgttggacggagggaagataaaaagacgaaagctcctcggctatctttttgggtacttggccgtgttgagcatggcgatgcttgtcgcgatgctcttccgcaatctcccccaggaagcagtgaagttggccagtcctgaggtggctcgctggctaaaggcgcttggatacttcgtttaccagttcgtcctctggcagatgatctccatcacgctatttggcattcattacctcgcggatcggatacaccgatcatag

SEQ ID NO: 514470 - DNA, 192 bp, Stenotrophomonas maltophilia
gtgatcaagctgacagacattcatggtcgcgcgctgctgctgagcccgggccagatcgccatgatccagcaggcaggcccgagtcagcgctggcacggtgtgtcggcgaacgtgcagatggccgtggacggcaagtggatagaggtacgcgagagcgttgccgatatcgagcagcagctcggggcccagtga

SEQ ID NO: 514471 - DNA, 168 bp, Stenotrophomonas maltophilia
atgactgcgacattgcgtgcgtcgatccgcatgcggtggtggctgcggtggtatctagctgccgtggtgtggtttgccagggccacgggaatggagccggactggaagcgggttgagtggtggatccgccgcggcctggtggttcgcggcacgggagcggacaagtga

SEQ ID NO: 514472 - DNA, 357 bp, Stenotrophomonas maltophilia
atgactgattggccgacatacgcggaggtcctgcttgccggatacggtgaagagattgacccggccgttgagaggaccgaaatggaacgcggtgtgcctaagcagcgcctgctcaacacgcaggtgctacgcacgctgatgatctccgttcttttcaggcgggcggctgacgcggcgcagtttgagcgttggtacttcgatgacctcaagagaatcgcttggttcagcatgcgacatccgaggacaggcgaaaccatcacggcgcggttccagaacggaagcattggaagactcaccccgctgaagcccgccttcggcttgtctcaacgagacatggtcgtggaatacctgaggtga

SEQ ID NO: 514473 - DNA, 684 bp, Stenotrophomonas maltophilia
atgcgacgcctaggaagatgccgcatcggcgcgctttgcgcattcgaatacgtgtgcttcgtcctgctggaccctgcggaacgactccagccagccgaacgctgcgccacgattgtgaatcgtttcgccaagcctcccggtcaggcaccgtgcgcactccatcccgccaggactgggcgcatcgcagcaacggcattgcgccatcgtcgtcgttctctccgggcggcactggtacatgatcttggtcatcaggctgatcgcctggctttgcgaggacatgcgcgctccctgtctgctgcgcggcagcagccgcgcggcgcgcggctcctcctgttcttcagcgacgcgtatcaccgccgggaccgcctttcttttggtccgttggattcgagtcgctacgatccttcttgtcctgctgctgttgttcaccttgccggccaggctcctctgcgccgggctcgcccccctcgacctgcccctgctgcacgggctgcgctgcttcagcggaagcgttggagcggtcattcctgttctgttcggggacgctgttcatttcgattctccgtcgcagcaagtgtgctgccgattgactgtgggcctgttgccgttacgggaacgtgccggcaagcgcgttgtatgaacggttgtgatgaacaggctcccggcagcaagcgtgtacagtga

SEQ ID NO: 514474 - DNA, 531 bp, Stenotrophomonas maltophilia
atgaagacccccacccgtacccttctggccagcgtgctgctgtgcgccccgctgattgccagcgctgcaccggcccaactggcacccgagcaggccttcgacctgtatgcgcgcgtgctgctggaggacgatgccaccgccacgcgcacgctcaacgacgcactgaagccggcgttcgaggaccaggacgcggtgacccccaacccgggggcgctggccaaggcgctgcgtgattcgaagtgccgcgcgaccaagagcgtgatcgaagacaacgaatacgttgaagaccagaagctggcgcggatcacctacagctgccagctgcccgacctgggcaaggtccgcccgctgttcgccgccagccttgcctccgacgccagcccggcttcgcgcaagcagttcaccgacgcttacagccaggcgctgcagagtggcgcgcgcgtgccggtcagcgcaccttcaccctgtacccggccaaggacaacggctactggtacagcggcaacttcgatgacctggtgggcaccgtag

SEQ ID NO: 514475 - DNA, 882 bp, Stenotrophomonas maltophilia
atgaggccggcatggagaggcaaagtaaagctgggagcgttctggtctagggcaaagctcgtgtctacgcagcggctggtacctgcccgagcagcctggagcatgaacgagaatccctatgcgactgaagtgggcaagcgcttgcttgcgatagagaaagttgcagcgaaggacatactacggttcactgagtgcgctcgcgaattcgcggggcctgatgaagttgatgcagtaggcacgttgaataccgcggctgtgcatgatttggttgcagggtgtgagcttgcaagactaggttttatgaagcaggcgtatacgctttggcgttcttggttcgaacaggccatgtttgccctctatttcatcgagtcgccaattcaccgccaagcgtggaaggtaagcgagtctataaagattggcgataagcccgctcatcgtctaatgcttcatcagttgcttcaggaaggctcagaaaaacatccgttcatccaggtctacgttgatcgatatgaggcgctgacagcttctttgaagatttccaatatcccaaagaataagaaaattgccaaaagagctgagctggtcctgaccgtactaagccaaggtgttcacggcacatttcgaccactatcgcccgggaaaataagtgctgcggattcagcgatagaaaagtatgggttggacgtacttcaagaggctattgacgttgttgcagttttttggatctgctacttggtttcactaatgggtatagatgattcagctattgcagaattgaaggttggagctttgaatactcttgatcctagtctgtttgggatcaatggcgcagataaagttgtcgcgcttaatgaatcattttcacgaatttttgggggctga

SEQ ID NO: 514476 - DNA, 1827 bp, Stenotrophomonas maltophilia
atggcgcagataaagttgtcgcgcttaatgaatcattttcacgaatttttgggggctgagatggctgactactctttgcagctacaggctgacaatcttccaatcgacacgatcgaaaaattgcttgtcgagggcccctgggctgcaacgctgcagcgtatgtacaccggcgagaacatcctcttagaaggttgtcgaggcgctggcaagaccatgctcatgcgaaccgctgcgcaccgattgaaggaagagtaccttggaggagagtcgacgttcggggttcatgccacctttaagcggtacctggctacaatcccgcctgcgaatggtgaggatggaggagatgcgcattcccttgataatttcaaggcgtggattaatgcaaagatactcagcgccgttcgtgatgccgtcttggaggcaaagggcgaggcgttttggaagtcgatgggtgaaatcggctcggttgactggtcgttagttgttgggatactggagacaacatatagagatccagtaaaagtaatttctcacttgtccgatgccggactttccgccaatgttgtcgctggattgcgaggctatacgttcactctggaaaagttgcgtcaggtgagggctgcgcttggagttgatttgcttgtactatttctggatgacgccgcgcacgcactagacactcgtgctcaaggtgctttctttacttcgatcaaatcactttatgatccggggctgtcattcaagatctccgtatatcccgcggtgacgcgctatgggttggacttcagttacgggcacgatgcggtcgtagtcccacttggtgatctcccaagatcgggcaatttgcctgcgtttcaagatatgttggcacgtcgtggttcgattgcagagggagggagtaaacagttctttgatgcgctgctagccaacgctgcctggattggggtcttattctactgcgccaacggaaatcccaggggcttgcttaagcttgtagctcaggtgcagacgcaacttggaccgcgtgatatatctacgctgcgcttcgaggacatcagggctgcgatcaataccgtaactgataaacatctggataatatggttccgggtgtaatcaaggaccttgatcctcgccttctcaaggcggcagagctgctgctctacgagctgagatataaaattagtgactcgcccgggccatacgaatcaggtaagcccagagggtacttggcgcttactaactccatgcaggttccatacctttgtcaggcagcgactaagttgttggtcgctgcgaatgtaatagttcctgaagggcctgcaaggctaagtaagcgagagggtgggacgctttatctcttacaccctggattcatatttagagacaatgttatctcgtcttctcggcgaaaccccaatccgggtgattggcttgagttctttgaaggtatgacgagtcgagttcatgccgaggctggacgaggagctgagctatggcagagcgtttacgacgaagccatattggagcctagcggagaatgttcaaatgggcatcccatgtctgatcccacaaggcgttgtgatgtgtgtggtgctagcggacatggtaggtctccggtggcggttctgctgaacaagggcatcgacgtgctcgatctaactcaggcgatcaaggcgagattgatggaggctggcttctcaactgttcgtgatttgtttgaggcaacacatgagcagatcgacgctgtttattatgttggtgaggctcgggctgcgataattaagagtgcggttagtgcggcggtagatgagtttgttgcagggtaa

SEQ ID NO: 514477 - DNA, 3288 bp, Stenotrophomonas maltophilia
ttgaaggaccaagagagcatcgtccgttactggcatgccgtcgagttgctgcaaccacagtcggcacccaagctgaaaaaacgtagcggccgatacgaggcgttcatccacgacacacccatccaacgccccgtcgttccgtgggcagcggaaagcgtcgtcagcaaacaggggctgcccaagaagcgcgtatggagccatacgctttttgcccatctgtatgacagtcgcctcgtggccaacaagctcaacgaagtctatggcgccgatcaaggctatcgagagccgcagttccgtgaatcggcgctgttcgcggcaaagttcaccatggacggccggttggtcgatgacagcttcgtgctttccagcgaagcgtggttccttggtcgggtgctgactggaaaggactggacccgaggattcgaggacgatcaaaaggccatcggcgaccacgcgaagacgctgctcgaagaacaggtgtccagcaaagctttgcgcgagctgacccaatggattctccagattatcggggtagctgacttctttggtgacatggatcgccatcgatttcgctttcgctcccagcccgtgaatcccgacaagcccgaatcggaagacgatccgctcaacagtttcctgctcgatgatcttgccgatgtcgccgacaacatcggcaagggcgtgagaagtgagccgttggatcagtatttgcgccggcacgatccccagccgcgtttgcacctggacgatcaccgcgcatcgctgccactgatcgacagactgatgccggatgcctatgccaatagttgctggcccacggagcatcacctgggcctcgtgcattcccagcaactggccgtcaacacgattctgtccaccctggccaatggacaggggctattgggcgtcaacggtccgcctggcaccggaaagacgaccttattgcgcgacttgattgccgccatcatcaccagccgggccgatgtgcttgccaccttgcgccgtgcctccgacgggttcgtgagcaacggacgcgaaaccgccaacgacggtggcaagcagcaggcttgtttcaagctgaacccggcgctgtatggtttcgagatcgtggttgcttcgtccaacaatggtgctgtggagaacgtcacgctcgaattgccccagcgtgacaagatcgacgagagctggctgcccgaagccgagtatttcgccgagttaggggaactggttgccggcaagcccgcttgggggctgatttccggcccattgggcagcaagacgcgacggaccaagttcgtggagcgttacttctatggtcagcgcccctccggcagcgaaggcaaggctgactcggcagccgaagacgataccgatctcgaatctgatacggacatcgacaacattgtggacggcctgttctccgacacttcgacaggggtggagagcgatgacggcagcggcgatcaggacgatggggcgccacccgagccagagaaaggaccaaagggtttcctggggtggctcggtgcgaatgccgaggtcaatgcgacccgttcttcggaggaacgtcaagccttgtggcaacaagccgtctctgattacgaagcggtcaaggcggaggcgcgcaaggcatactccgatgccaaccgcatccgtgagttgatccaggccatttgccaggtcaggaggacgattgccgacaagtccaaagcacttcgcgcactggaacagaagctggcggaagcgatcaatcagctctcgcgcttggatgccgaggaaagccgccccgccaacacggcgctcaagcagtgcctggacgcacttgcgcaacatcaaacccggaagccgggtttctgggcgaacctgttcagcctgtggaggactcagcgcgactggaatacaacgcaggcattgctggaaggccagcgtgatctggccacggccgagtttgcgcggctcgcccggcttaccaagcagctcgacgcatcgagggagagcttggaaaaccggaccgccgatgcgcgccgcgcgcttcagcgatcgaaggacaatgagcaagccttgacgcgagacgccatcggactggcaagtacctgccgggccgatcacctgctcgcgtggttacaaggtggtgtcatcggtcgtggcgatgccattgagttggccgagccttggcgtatcgaaggttggcggcaagtacgtgcgcgcgtcttcatccaagcgctgaagctccatcagacgttcttcgagctggaggcatcccggatgcgttccaacttgtatttcatcaacggcctgttgacaggctcgcgctaccaagggctttcacgagatgccattcgctcggcatgggcttcgctgttcatggtcgtgccggtactgagcagcaccttcgcatcgttcgctcgctcatttggttctttgggcgccagcgagatcggctggctgttagtggacgaggccggccaagctccgccccaggcggcggtgggggcactatggcggtcccgccgtgcgttgctggtgggagaccccctgcaactcaagcccattgtcaccgtatccgatgcggtgctggaacacatgcgcacacgctaccgtgtcgagccacattggctccccaaccaccagtccgctcagacgctggccgacgaagccaccccttgggggcgcatggcgggaccggccgacagcaagacctgggtgggactgccgctggtcgtgcaccgtcgctgtgacaggcccatgcacgagttggccaaccgcatcgcctatgacggagcgatggtgtatggaacgatgacgccgcgcgcggacaaggaaacgcgcgccagtctgccgacaggttggatacaagccagcggtccatccgaaggaaactgggtgcccgccgaaggccaggcgctacgcgagttgctcgcactgttgcatgaagatggtgttaccgccaaggacatttcggtcatcacgcctttcaaggcagtccagcaaaacctcaagcgcatgcttcgcagcaagatggtgtccggcacgatccacaccatgcaaggcaaggaagcgccggtcgtcatcatggtgttgggcggcaatacggaaggatcaggtgctcgcaactgggcggtatcggagcccaacctcctgaacgtcgcggcaacgcgcgccaaacggcgcttctacgtgatcggcgacagaaacgactggaagcaccgcgcattgttctgcgatgtcatggaactgctaccgcctcagaaaatcccggcacgcgaacaagttccgctgccccaatag

SEQ ID NO: 514478 - DNA, 921 bp, Stenotrophomonas maltophilia
atggatcgcatacagcagctcaactacgaaaaggactttcgcatcgcgttcttggaatccaagggggacgggtttcaacgcctgttcgagaagctgatgtcgaaggcacatcccaacgacttcatggcttgccgaccctggggcaatgctggagaccggaagaacgacgggtatctgccttctgcgcgaatcctgttccagagctacgcgccgaatgaaatgagcgccgccgaggccaccaagaagatcaacgaggacttcgagggggccaaagaacactgggaagaatatttcgatgagtggatcttcgtccacaacgcacctgatgggcgtctgggcccccacatcatcgaagccctggccaaactcaggcaagacaatccgaagatcagaatcggacattgtggatacgaggaaatgctggcgaagttccgtcagttgagccttcaggatcttgaatcctggtttggtccctcgctgacgatggaagcgaacgtcaatctgggtttcagcgacctggccgctgtgctcacccatatcagcatcacgcccgcacccacgacgagcgaggtgaaggacgtgtcgcgcggaaagatagaggccaacctcctgtctcaggctgttgccgacttcctgaagatcggcatgcagaagtcgccgctcgttgcacagttcttcaatagctggaagaaccctacctacggcgagcagatcgcacaggcgttcaagagcgaatacgagagactgcgagatggtattcctcagctccatcctgatgagatattcggacgcctcgaagtatgggccggaggcacggcgaacaccacgcccgcgcacaaggcagccgtgttggccgtgatggcctatctgttcgacaagtgcgagatctttgaagacgctcaagcggtggtgacggcatga

SEQ ID NO: 514479 - DNA, 249 bp, Stenotrophomonas maltophilia
atgatcctgccatccaagcatctgccgcaggatcgagcgctactgaccgtcggcgcgcatgttttgacgttcctcgcgcaccccaagactgtctcggcactttgggaagaattgaacaggcatgacgccggcctggcggcgacgccccggcgcattacctatgactggttcctgctcgccctcgatctcctgtacgcccttggaactatcgaactcgaaagcggccttgttgcacggagggcagcgtga

SEQ ID NO: 514480 - DNA, 1722 bp, Stenotrophomonas maltophilia
gtgattcatcacatctttagcacgctgcctagcttcaagaagcttggagatctgaagcccggcttgaatgtgctgctcgcccaaaaaaccgagggggcaacgaccaagcaaacccgcaatcgcgctggcaagaccagtttcgttgagttggtgcattttctgcttggcgccgacgccggaccggactcgattttccgcaccccggaactggctgaatacaccttcggcatggacttcgatctgaagtcagaacggacggtggtcgagcgcagcggtagctccaaagccaaaatcttcgccaccgtcccgcctgccgcgaaggtcaagttctcggccaccgagtggtgtacgttcctcggcgaacaaatgttcggcctgagcagccttgaagctgcaggcagcaagccgccttcgttccggtcactgtttgcctactttgtgcgccgacaggcgagtggtgcgttcatgacaccggagaagcaggccacgatgcaaggcaccggcgacatgcaaatggcactgatgttcctgctcggtttagactggcagatcgcccgagattggcaagcggtccgtgatcgtgaaaagaccctggaagagctgaagaaggcggccgggaacggcgcgttcggttcaatcatcggcaaggccgccgacttgcgcactgagctgaccattcaagaagctcgtctcaagaagctccatgcggaaattgagactttccaggtcttgccggaataccgggaactggaagtcgaaagcgccacgttgactcggcagctcaacgagttggccaacgccaacactatcgacatctcagccattcgtgatctggaaagcgcactcgcctccgaggttcctccagaccatgaagaccttcaggcggtctatcgagaagcaggcgtcgtgctacctggcttggtcaagcgccgctacgaggacgtaaagagctttcacgaatcggtggttcgtaatcgcaaggactatctgtccagcgaactcgaagctgccaagctgcgtatcgagctgcgtgatagcaagaaagcacaactcgaccatcggcgcgttgaaatcctgggcattctcaaaagccatggagcgctcgaacagttcctcaagctacaaggcgaactggggcggcttgagtccgaagtggaatcattgcggcaacgctttgaagccgccgagcagctcgaaggcaccaagaacgagttggagatcgagcgcaaccgcctcacgattcgcctacggcgtgatttcaccgagcagaaggatcgactggcggaggccatcgtcgccttcgaggaaacctcgcaacgcttgtatgaatcggccggcagtatgacggtcgacgaaacctccaacggaccgatcttcaagtttccgatgcagggtgaacgcagcaagggcatcaaaaacatgcagatcttctgcttcgacatgatgcttatgcgcttgtgcacgaagcggaagatggggccaggattcttgatccatgacagccacctcttcgatggcgttgacgggcgccaagtcatcagtgcgttgcgccttggctcggagatcgcgcaggagcttggctttcagtacatcgtgacgatgaatgaggacgacgccttcaaggaaactattgaaggattcgatctaaacgactacgtgcttcccacgcgcttgaccgatgccacggaggacggtgggttgtttggcatcagatttggatag

SEQ ID NO: 514481 - DNA, 777 bp, Stenotrophomonas maltophilia
atgatcggacaaagaacccgccattcgttcgcccagttcctggagctgcaggagccgatgacttcgatcgtgcttctgagcaagtacggcgtgcagcatctgtcgttgtcgcatgggcaactgctgtacggtctactgaatacgctgcgcgatctggatgaccgcacactcatgctggcgctggctgaggtcgttgcaactgcgggcgatctgcgggcgagagtcaatccgaagtatcggttcgacgagcgccagcatgatctggcgcaatgcctcctgctggacggctacgtcatccagggcaagaagctgatccagaccgatccgtcgatctccgatgcgactcccttggaggacgacctgatcacggcgctacaaaactctggggcccctcgtgcgcaggagataatcaccaagatcaacgattcggccggcgcgttccgggcaactccgcccgactacaacgcatcgcttgtgaacgcccgcgtggcgctggaaaccttagccggcgacatagccgcccatgttgcctcgctgcggcagacgcccgctgcctacaacccatcgaagtggggcgaggtgcttgcattcatgcgcggcagcggcgagatcaccacagaggaagaaaaaggcctggctggagtcttcggctttctcagtcctggcgctcaccgcccggtcggaatccctgaagatcagatgactcggcttggtcgttctttcgcgctaaatatgtgctggttcctgctcaagaaccatctcgcgcgaactccatag

SEQ ID NO: 514482 - DNA, 1560 bp, Stenotrophomonas maltophilia
atgtcatcaatgttggataggttctacgagcggtccgctaatctgaatgccttgctaaatagcaaccctgccgaggcggtgaaacaggcccgggagatcaatctcaatcttgatacagatgagcgattcaacctgatgggcctgcgcgccgccatcctggtagatggcggcgcattgactcaacagcaggatgcgattgaagaagggatcacgctgtttcgtgaactacacagcctatttccaactgcgcacatcacctacaacctagccaacgggctgaccgcagcgacaggctacccaccgcgtgatgcaaattggttggatcatcaggagttcaccagagaccagcgcgccgaagcacgacgatgcttctggaaagtcgctcaggacgtggacgccgatccaacgctgcgaactcaagcttggacgaacctcgccaaccagttcagcagtagctaccgactcggtgaagcccatgatggatggcttgccgcgctagaaattgatccagagaatggcgttgctgcaagctcagcggcccgtagtttgctctggctctatgagcaaggcggctgctcagaacttacgcgtatcgaggcgatcatgttggccaagattgcggatcggcatcgggaccgagttatcaaatacgccggcgcgcaggccgccaaagagatcgctgcgttcgcaggtgagttgggagatccgccacgacgatcaccgcaccaagatccattcatcaggtgggtcgaacgtgaacgcctgacgcttgcgccagtcgtcgaactcatcgaccctaccatgggcaagctggactggctcatgcttcccgggattctggagcgagagtcggttgcagtcgggatgcccccacccgtgttcgccatgttcaacatgctgaagagcgacttcatcctcgcgcgtgacttgttatggcgggctggcgatgaaagcgcatggcctgcgacgggacggtttggggacactcttgactatgctacctatggaccagatgcgtcggcgcttatcttggcgcaccgcacagctctcgacctgcttgacaagatcgcggtaacggcaaaccactacttcgagtttgggctgccgccggataaggtctacttcggcaagctgtggcggggaagccctgacaaggcgactggcgcgcgtccacttaccgaaaaggtggagcaggcgattcgtgggagcgccagtgccctctatggccttgtagagcttgccgaggactatgacagcagcgcgggcatcctgcgttctcaaaaggacctccgcaacgcaggcacgcaccgattcgtggtactgcataacattggcgacccagcgaacagcaggcaaacgcctgaaatcgaacatcaccgaagggaaccgtttactcaggaagtattgcgcgctttgcgtgttgccaggtcggccatccagatgcttgcgctttcgatttcgcagcacgaacaaggtttggcacagcggacagacggccttgttgggtcactgatcgtccccgaccacgactggattcgtggacgcgacgacgaaacttga

SEQ ID NO: 514483 - DNA, 939 bp, Stenotrophomonas maltophilia
atggcgacgatcacggtttcaccgattcatttcgaggactacagcggcatccagtttgagcgccttgtttttgcataccacgtgcgcgctggctggcgtgacttgatctggcatggccaatcgggaggcgaccaagggcgggatatcgtgggtatcgagccattcgacgaccagccggcacgcaagaccatcattcaatgcgcgaaccgggatacgctgaccctcgcgaaggcaaagggcgatatgtccaaggcggtcaaagccgttggtggggcgccgaatgctttcaagttcgtctctcgtgggcctgtttcggacgccagccgaacccggattgagcaagccgctgcatccctcggggttgcgcatgtgacgatatggtcaggcgtggaattcgaggagaacctgcggcttcgcgcggagtacctcctgcatcgtttcgtccatggcatcgagtttcccgacgcagagaaggagatccgaaaattcgtggacgacttccccgatctctcggatgccggcgcgctgcaattgatggcggctgtgttcaatcggccagcctttcgcacaccgtttcagcaggaaagctccctgcctgactttcaacaggcgatcgaagacaccattggcgcactcaacactggcgtttggcggacgcgcgagggagacgagatcaggcgcatcccctcgatccatcatcttcgagatcaacgcatccaggcagtgcttgcaaaggtggctcgtcaggtcgatgagctgcgccgcatctttgtgacccgtctcaaggaaggggcgatcaggcactgcggatgcggtcagccgaattgccccacgtacatgctcacacatcgcgttgccgacgaactggacgaagccagacgcaaaattctgacgacgttccgatcggtgcatgcgtcctttgacgtcagtcttcagtag

SEQ ID NO: 514484 - DNA, 384 bp, Stenotrophomonas maltophilia
atggagaataacccgacaggcaaaataggccgagtcaacagcgccgagatgcgctcgccgtccgcgctccccctgcctggctcgaacgcctacgacgatcttccacagttcccgaagcgcggcgttctgccatttcgacgcaccatccgccgccacgagctgcggcaaatcgtccccttggccgaaacgacaatttacgaaatggagcgccgcggtgacttcccgcgtcgcttcagcctgacaccccgctgcgtcgtgtgggacttggccgaagtggaagcgtgggtcgagcagcgcaagcaagctcctcgcagcgacgtctcgaagcccgatgtccacctacggaaagcccgccctgtccgggcaggttcgagtgaggaataa

SEQ ID NO: 514485 - DNA, 285 bp, Stenotrophomonas maltophilia
atgcccggccagattgcttgtggtgccggttatctccttgacatccctataaagcacataccggccaccaagcagaactattcgccatttcagcttgaataccgctccggattcctgatgtacgacagcaagttcctgccattcattgggaaacctgaagtaggcgtggctgcgttctggagcatccagcgtgaattcaccgtacttcaacccgagaggcacttcgatgctgccattgacacctcggctctggcaccagccaggctggcttctgcagatgcctga

SEQ ID NO: 514486 - DNA, 615 bp, Stenotrophomonas maltophilia
atggaggcgccgaatcctctggaaatgccaagcgggacttataccgcctcggcattctatgggatcggctcgggaatggagtttgattttggcgacaatgcttccaccgaagtggaccatgtcagcatcaactttacactcactgtgcagcattcattcgatgtccagttccccgcaactgtaccgcgcgtcacgctgactccagatggaggctggtcgcaatggatcgatcatggccgtccgcccacgcgcctgcgccaggagctgccattccatctaacgacgtcgatggatttcagcatgaagctgcgctgcgagtacgagactgatggccgctgtggtatccgcaatgccctcggcgagaccgtggttccggtggaggtggatgtaaccattcccggaatgaacaatgtgcgcgacggtcgtccggcacaggatgcccctctgctgccggatgacgtacgggcaccgcgcttcacgccggatggctatctgatacggcgacgttcgaccctgcgcttcacggctggcggtgaagcagtggcggaaatgctgaagtcgcccggctcgtattggcaagggaacatgacggtggtgttcgacgccaatccgtga

SEQ ID NO: 514487 - DNA, 324 bp, Stenotrophomonas maltophilia
atgatggatgagtgcagcgcaaccggacattgtccgatggaaacgcaggatgagggcgctacggtggaagcatcgattgccgacctgcgtggagtcgccgtgcccccactacttgatgcccgccttgcgtcgctgatgtggagtttcgcccagctgaccccgcatgggcagaagcgcttcatggagctgctcaacgattacctgtatgcctcgcccgcacagcgccggcagatgagaggcgactgggaggtggcgctggccgaggcctgcgcatgtggtctcgagcaggagcaggttctgctgcaggcacgccgcaaggcttga

SEQ ID NO: 514488 - DNA, 918 bp, Stenotrophomonas maltophilia
atgaagaccacccatcgcaataccctgctggccgccctgctggtgtgcctggcgccggctgccgcctcggccaccgaagcctatctgaccccgagcaagaacggcggtagcggcgccatgccgtcgggctacagcaagctgtacttcgagctggcctccaacgactgggtcaaccacatgcagctgccggccaatccgcagggggccgacttcgttgtgctcagctcgctggccgacggcagcagccgcctggatgccgccaagaccgccttcgctgacctggtctacctgccggtcgacacctttgccaatgtggagctgcgttggagcaaggccaaccagcgctgggacatctgggacggcttgagtgcccgccgcgtgatcgcgcgtggcgacatcgccgtgccgcaatcggagcatgccatcactcaggtctacattggcagccagctcagcccggtgtcgatgtatctgccgaccgctgcgccgaagggtgccgtgttggccgtggccaatgacagcgcccatgcggtaggtgttgcgcacaacggtgcgggtggcgagacattcgtgtgcccggctacccgtgcctgcgccttcgtgttcaacagtggcgatggcaagtggcacgcccgtcatggccgtgaccatatcaagccgaccgagtatcagctgccgatgccggcgcagcgctggaccgatctggtgactggcagcgctgccgaagacgtaaccacgcccatttgcatgcgcatgccgaccagtgccatcgacggcgatatctatcagctgaccgatccgtccaactccaacgccttcaaggttgaaggggcgggctccaagccgctgagtgccacgccggtgacgctgcgttacgacgcttcggaacagcgctgggtgcgccagttcgagcgctga

SEQ ID NO: 514489 - DNA, 684 bp, Stenotrophomonas maltophilia
atgaagtacgtcatgcccgccttgatggcggtcactacctgctgcctgccgcagcaggtcttcgccagtgtcgatgagggccactacatcacggcgcgcgtcatcagtgccgatcaccgcgccagcaacatggatgccagtgcacgtccgggcatcggccgtttcgtcgccggagatgagcgccagcgcttcgtttccggttccgttggccttggctacgcctacgccaatggatggcgtactgagggcgagtacgtgttccgtcgcagtgatacctacaccagcggctccagcatcttcgccaccagcttcaacaaccacgatgtcacctcgcagcgcgtcatgttcaacgcctatcgcgacgttgccatcaacaatgcctggtcggtctacggcagcgctggtgctggccttgcgcagctgaagtccgatggctggcagggcaacgagagtcgccgctatggcgaagccacccgcattggcctggcctggtcggtgggcgtgggcatctccgcagtggcgtcggacaacctgcacatcgatctgggctatcgctacgtcgacatgggcagcaccgagagcggctggaacagcttcggcaatgcgcgcggtctgcaggacgagaagatgcgcctggatctgacgtccagcgagttccacctgggcgcccgctgggcgttctga

SEQ ID NO: 514490 - DNA, 546 bp, Stenotrophomonas maltophilia
atgaacaagctcgcaattgctctgtccgccgcgctgtcgctgggcgctgtggcttcggcctcggctcaggacgctaccatcaactttgtcggcaacatcaccgccacctcgtgcgatatcgcgattggcggtgaagcttcctcaagcaccgtaaccctgcccacgctgggcaaggccgcgctggcgaccccggatgctggtatccgcaagttcagtgtgacgctgggcgacggtactgccaccggttgctcgggcaacaccgcagagctgatcttcgataagtccgatgtggacgagaccactggccgtctgaccaatcagcacgtcggtacaactgaactcccggcggcagagggggtcgatattctgatccgtgatggcgatggcacggcgatcaatctctccacgaagcgtgtaaccgctgacaagaaggacaacaacttcgccttcagtttccaggcgctctaccacgtcgtggataagctcgaggatgtcgaagccggccgattcactgccgctctgccgttcattgtcgagcactactga

SEQ ID NO: 514491 - DNA, 753 bp, Stenotrophomonas maltophilia
atgaatgccatgtatcgcgccgccgtacgcgccggacttgcgttcagcgccctttcgatggcgctcgccgctaacgccggggtccagatcgacggaacccgagtcatattcaatgaaggcatgccggaagcaactatccgtgtcagcaacaagaacgatgtgccggtccttctgcagtcttgggtggacacgctggacgtatccgcaacaccgtcttctacatcggcccccttcctggttctgccgccaatctctcgggtggatgcagggaaggtccaggtgctgagaatgaggttgaccagccagagcttgccgaaggaacaggaaagcgctttctggctcaacatcctggaggttcctgctgtcgcatccgaaagggctgccaatgatggtcagctgcaggtcactgtccggaatcggataaagatcttctatcgacccgagggcttgagtactcaaggtgctggcagggctgcaggcaacgtgcaatggacactttccacgagcgctgatggagcaacactgcatgcaaagaacgatagcccttatcacgtcagcatggtcaaggcatgggtggcggacgggcagaagctgatcgaggcagaggggatgcagatgctggcgccgcatgcagatatctccttcaagctgccgggcatggggcgcctgccatccgatgccacgttgaagatccgctacatcaatgatttcggcggggtggtcaacacaaccatgccgcttgcgatgccctga

SEQ ID NO: 514492 - DNA, 2565 bp, Stenotrophomonas maltophilia
atgaatcaacttcatctgaccactgctccgatgcgctgccgcctggctagcgcggtgctgggcgtgctgttgccgatggcagggttcgccgcacccaacgtcgaattcaataccgaactcctgttgggcggaggtgcgatggacctcagccgctaccagcgggggggcgctttgccgggcacttacattgccgatatccggatcaacgatgtaatcgttggacgtcgcgacattacggtctccgaggacgaacagggcctcggccagatctgctgggaccctgaactgttcgaggtgatcggcatcgacactgagcgcatggcagcagccattgcgggccagtccagcagtgacgattatctggcactcccggaaggacgaacctgcgccgctctggatgcctatgttccttctgcatctgcgtcacttgatgtcggtgagcagatcctcgacatttccgtaccccaggcctatctcgcgcgatcgccgaagggctgggtcgccccgacgtcctgggatcacggcatcaatgccgcgacgctcagctacagtgcaaatcacagccgtcagcaaagtcgtggtaacagccgcagcagcacaagcgtgactctagatgcaggcgtcaacctaggtgcatggcgcttgcgccatagcggctatctgagccgcggcgaacagggaactgactatgcggccagccgcagcttcgtgcagcgggacctgcaatccatcggctcgcagctcaagctgggtgacgcggctaccgacggtgacatgttcgacggcgtgtcctatcgcggtgtgaacatcagcaccgacgcccgcatgttgcctgactcccaacgcctgtatgcgccgatcgtgcgcggcgttgcgcagaccaatgcccgtgtggtgattcgccagcgtggttacgtcgtgcatgaaagcacggttgcgcccggcccatttgaaattgatgacctggatggcagcggaagcagtggtgatcttgaagttgaagtgatcgagacggatggccgtgtcgagcgtttcacgttgcctttcacggcaatgccgcagttgctgcggcaggggcagcagcgtttcagcattactgcgggtcagttgcgcgatccggcgaccggcaatgcgggatttgccgaggtcaccctgcgtcgtggcctcggaaatcagctcaccggttttgccggcgttacagtggcggatggctatcgcgctgccgtactcggcggggctctcaatacccgttttggctccttctcgggggacatcacgctcagtgatgcctggctgccgaaggcaaccgacgttgcagccgaacgccgcagggggcagtcctatcgtcttgcgtacaacaagagcctgttctcatccggcaccaacatcaccatggcggcataccggtattcaacagcggacttcctctcgctgtccgatgccgcacgtctgggccagcagcgcgagcaagggagcgacgccttcgcaccgatgcgccaacgcagccgcctggacctgaccgtcagccagaagctgggggaaaatggcgggaacctgttcgtcaatggcagtacggctgactactgggaccatggcaagcggcagaccaatttctcggtggggtacagcaaccgcattggtcgtgcgtcctacagcctgaccgctcgccgcaccctggaaagctcgctgttcacctcgggccctgcgcggcaaagcaacagcatctatcttggcgtcagcatgccccttggcgttgcgccgtcggcgcctcgtgccacggccaacgtgagccacgacagcgatggccgctcgtcgcgacggctgggcgtgtccggtatgttgggcgccgacgcacagggcaactacaacgcatcggtgagcgatcagggcaatggcacaagcttcaatgccggtctgaactaccagcttccggtggctaccgttggcgcaagctacggccagtcgcagggcaatcggcagctgtcattgtccgccagtggcggcctggtgctgcatgccgagggtatgacgctggcgcaatcgctgggtgagaccatcggaattgttcacgtgcccggcgctgagggcgctggcgtgggcaacatggatcgtgtccggaccgaccgtcgaggctatgcggtggccccgcacctgaatgcctatcgccgcaatgaagtaaatatcgatccggcaggcctgccgctggacatcgagctcagtgcgggctcggtctcggcagttcccactgctggagcggtggtgaagatggtgctgcccaccgcaatcggtcgcaacgcgctgatcgaggcgctgatggaagatggcacgccgctgccgtttggtgccgatgtgttcaatgaggctggcgatgtggtgggtgtggttggccagggcagccgcctgtgggtgcgcggcctggaagagcagggtgtgctgagcgttcgtcacgctgtcgatcagcagtgcagcattccctatgacatcaggagtgttgcgactgacgggctgctggaatctagatgtgctgcaactgcggcgaatgttgcggcagttggcacaaattga

SEQ ID NO: 514493 - DNA, 1035 bp, Stenotrophomonas maltophilia
atgttgaatgatgcagtgggaattctgcggcgggcgctttgtgcactgttgctactggggggaggcttcgtctcggcggatgcgcttgcacaggtttcgacctgtgccttccttggccatcatgagttgacccttccggaccgggttgtcgtggcgaactctttgacaaacggacgccccgcatctccatggttcggctatcaacaggccccggactacgtagcggtgtgcagaggcgcgcaggctttgctcactacgccgcgcgcgggcctgaaggaggtcatgagctatgtggaggcaggtcagacttacagtgtctttgaatcaggcattgacgggctggggatcgttatcgggacgcgcgattccactggtgattacagagatggctattcggcactgaaggccggggctacaacgaataccacgatatatggtccgagggacgatcagtatccaatctatcaagagttcaggttcagattcattcgaacgggtgacgttcctgctggcgtgcattcgaccggtgcaatggtatttgccgactattccgcactcccgaggatccagggttccccgggaagcttcgcactcgggagtgcgacaataaccgttgagaatcgtaacatctgccgccctcagacgaagcttgtaagaatgggctccattccggtcaccgacttttcagggcagtggagtggagctcgcacgcgcgacttcgacgtggagttggattgtgatgacgctgttggcagggtcaattactatcttgaggtttccgatggctcgcctgaaattagtggagatagaggcattgtttccgttgaaggtggcgccgagggcgtcgggttgcagatgctggaagcaggtgctgcggtgcccttggaccgctcgcgctattttggtgagtcactgaggaaagagcggctgcgcaagcggtttcaggccaggtacgtccagactgttcctgatgcggcggatatcaagcttggtacggcaaatgcgtccatccggattgtcatggactatccgtga

SEQ ID NO: 514494 - DNA, 753 bp, Stenotrophomonas maltophilia
atgaagaagttctctccctttaagaagggggctgttggctatgcattagctttgggcttctttctttgggggcaggctgccgctcaagtcgcgttggatggcacccgcctggtctatccggcgtccagcaatgagatcattgcctcagttcgtaatgttggtgatgccccagttttggtacaggtctggattggagaggatgacaagaagcaatctccagaggattcgcgcgcgcctttcgcgctggcgcctccactcttgcggcttgacgcagggaaagatcagaagctgcgggttcgacttgttcgagatcgggcccccggggatgaccgggaacacctgtattggctgaatctggtggtcgtgcctccgcgagcgactgcagagccaggtgagagtaccttgcaattggcgactcgcagtcgcttcaaggtgctgtttcgaccagctgggatcgaaccaatactcccttcgaagttcgctgacagcatgggctatgtcgtgcgcgagggggcatcaggccgtgagctagtgattaacaatccaacggcctatcacttcaatatcggccggatcgcgcttgttcagaatggtacgagtcattctctggaaaacccctatgttgctcccttttccgacagggtgattgcgctgccgggggggggcggggcgggcgatctgcgcttcgagctctcctggctggacgacaatgggcagctgcatgccgagtcaaaagtgctcgcccagccctga

SEQ ID NO: 514495 - DNA, 642 bp, Stenotrophomonas maltophilia
atgctccgcagtgatcgttgcggctgccaaggaatacctcaccgttgccttaactgtcgtagagtcactgtagagggcgctggcaaactcgaacggagccgtctcatgcgtccctgccgtgatctcacccgtgcgaatgaaccgcacgcgcacctgcgggaacatccattgctggcggaactgtatctgcgtcgtccgcccggtccagataggctggaagttaccgccatcatcccgcgagcgcacgccgatgatcattcccagcccttccacaccggttgggtacacgctgtagctggatccaccttccgtgtacgtcccagcctcggagggtgttgcatagaagtaggccacgccgccatccgtgcaacccgcgaagtatcgatcatccgtgtactcggattgccaggaggaaacaggtcggccattgacaacaccgttgaccgtcaaggtggctgcattcacggcactcgtcgagtcgctgaacttgtcacagcgcgcccatgctgggccgcatatgccaaagaccaagaatgcgccagccgtgcccgtcaaccacctgtgaagctcgcacgcaaaggaagctctcatgtccgaatcctggatccagtgatttcgcagacaggcaaacagtttcaatga

SEQ ID NO: 514496 - DNA, 390 bp, Stenotrophomonas maltophilia
atgggcagcgtgcctgtgacggatttcaaggggcagttcagcggagggcgggagcggcccttccagatttttctggattgtgaagctggggtaggggacgtgaacttctacctggagcctacagatacgagccccgcggtggatgtggcgcgcggcatcgttgcggtctcgggcggtgcggtgggggtcggcgtgcaggtgctcgatggtgagagtggaatcacacccgttgcgcttgagaaggtgtatgcctttggtacatcgacaggacccggccgcatcggccgcaagttccgtgctcgctatgtgcagacggccgcctcggagaaggatatccagcccgggacggctgacgcgtcaatccgcatcgtgatggactatccgccgtga

SEQ ID NO: 514497 - DNA, 2538 bp, Stenotrophomonas maltophilia
atgccgcgatcaccaagtcacccgcgcgcttcctgtgcccgcttccccagtctttgccgcctttcccatgcggtgcggattgccaccctcgccctcgccggcctgggaggtgtttccgttgcctttgcccaggccccggccgggagcattgacgggcaaggatccatcgcgttccaggcgcctgcgtccccgctgggtaccgccctgatgcgtttcgctgcggcgtccggggtcaacctcagcctggatccgtcgcagctccaaggtctggaggcgcagggtgtctccggacacttcagcgtcgacgaaggctttgccaccctgctcaggaacacggacttcgaggccgtccggatcgatcggagcagctacgttcttcagcgacgccgcggtgtagacgcccctgcccctgtcgcacgacgagccgcagcgcggtcacccgcgccacgcgtcgcggacctgtctgcggtcaccgtcaccgcgcgcacccgcagtccggtgatggcaccgacccagccggtcacggtgctcgacaggcaaaccatcgaaacgctgcgactggggtcggattcaatcgcaaccctcatcagcaaggcaacccccggcatggcggactccagccataccatgaccgactatgggcaaaccctgcgcggccgcaacatgctggtgctcgtcgacggcatccccttgaacaccgggcgtgattcttcccgcaaccttgcgaacatcaatcctgcagacatcgaggagatcgaaatcctgcgcggaagcagtgcaatctacggaagcggcgcgccaggtggcgtgatctccattcgtacccggcgacccaccggggatctgcggatggagtcgacggccaccttcaacagccccctgtcgaaactctcttcggccggccttgggggcgagctccagcactacttctcgggcgggaatgacctgctggactattcattcagccttggcgggcgccacacggctgcatccttcgatgcccacgggcgcagaatcgcgcctgagcccagccagggcgacctgttcgattccaacacgctcaatggcagcggcaagatcggtttccatctcgatggaaatcaacggctgcagctgtcgctgagttatctgcggtccaagcaggacagcgaccatgcatccgacccctcggtctcacgccttccaccaggttccgtcccggcgcgcgcgattaccgggcttgagctggacaagcagaaccaggtgcagaacaaactcgtcggcatcgactacgagcatcgcgacctcggccgcagcacccttgccgcccagctctactatcgcgatttcagtacacggtttgcaccgttcgatgcgcgcgcggttccggtaagaggtgccaacgtcgatcagaccctgcagcgttccgaggtcgtgggcggccgcttgacgatcaagacaccgctgggcgaaggcacgggaaccctgctgacctggggcagcgacttcaatcgcgagcgcaccgacatgccgatcgatgtgttcgacccgaaggcgtacgatgccagcggcgggctggtgttcagaaagactggacggctcatctacatgccaccggtcaccacccgcaacctggcggcgttcgggcagctgcagcatcggttcaacgagaaattctccgcggaagccggtatccggttcgacaaggcgaacgcgcgattcgatgacttcatcccgctctcgcagtcccgcgtggcagcgccgcaacctgtcaagggaggctcggtggactacacgtcgacgacctacaatgccggcgtgatctacaccccggcacagggccaggaactgtacgcctcgttccgccagggcttcgaactgcccgacatcggcgtcgtcatccgtaacgccacgcccgccttcagcatctcggcatcaagcctgcaggcggtaaagaccgacaccttcgagatcggttggcgcggcgccttcgacctgctcacggcaaacctctccgtgttccagtcacagtcggacctcggtgccgtacagagcttcaacaacggcttgtcattgctgcgcaccaaggagaagatccacggcgtggaagcgggcctggactacttcaaccccaattccccctggtcggccggtgcatccatggcctggctcaaaggtcgcgagcgtccgcaagccgcgaccggctaccaggacatgaccggctatcgaattccgccgctgaaactgtcggcgtacctggagtatcgcccttcggacgcctggcttcacagaatccaggtcacgtcgtactcctccaaggactatcgactggctggcaggactggattcggccgctatgacacccagggctacacgaccgtggacgccatgagtcaatggtcgatcaacgccaacaaccgcgtgtccgcgggtatcgagaatctcttcaatcgctactactaccccctgtacagccagctgctgaggaacaacaacaacaccagccacctgccggcgcctggggcatcattgcgcgtcacctactcccacacctggtaa

SEQ ID NO: 514498 - DNA, 966 bp, Stenotrophomonas maltophilia
atgagccagagcatccagtccatcgatccagccttgatcgacgaggccgcacggtggctcgcacgttccaggtcgcccggcttcagtgagtcggatgcacgggcgctgcagcagtggcgcgcgaccagttcaatccatgagtacatctggagcagggccaaggatctcgatctgcggtttggctcggttccgtccgatgtcggcatgaaggtgctggatcgtccgcgggtggtgaacccacgccgcaatgtgctcaaactgttgggggctctggtggtggctccttcggcgggttggtggatgtaccgctcacccactggccaggccctgcgtgccgacttccgtaccaccgtgggtgaaacgcgcaccgttgtgctcgaaagccgcctccgcgtcgcgctcaacaccgactcggccatcaatgtcgttacagacggtgcaggaacacggatccagctcatcgacggcgagatcctggtggacgcgacgttggccggaacgggcgcctcccgtacctgttcgattgctacaccgcaaggcagcgtgcatggcacgggagcacggctgatggtgcggtgtgatgcccgctccagcgacctcgtagtgctggagggcgaagcgacagcgatatccgaggccgcatcgagcaaacgcacgctctcggcaggccagagggtgaagatcaccgcgcagggcgcgggtgacatcagcgctgcgcctgaaggtgccgatggctgggtgatgggcgtgctgttcgctgaccgcatgcccctgggccagttccttgcggagcttgcgcgctatcgccacggcatcctcaggtgtgaccctgctgtcgccgcgatccgcgtatcgggcaccttccagctgaaggatcccgatgaggtactgcggctgctcgagaggaccgtgccggtgagagtacaggcaaggacccgctactggatcagcgtagttcccgcctag

SEQ ID NO: 514499 - DNA, 681 bp, Stenotrophomonas maltophilia
atgccaaatgcgattcgttatcaattggtgaaatcatgcggcgtatatcgccgcggaagcgccttcctgagctggacgggtcacgcaggcacgatagaatggaagcaattcccattctcattacctcatgcgaatcctcgtggtaggcccgatttgaacactgccattgagacgtcccacggccacggcgtggtggaggcgatgtacctggatcacggacgctggctgaccgcctggctgatgcgcaggatggcagaccgccacgatgcggcggatcttgtgcaggacaccttcgcacgtctctgtgcgcgtgcccccagcctggaggcgctggacgagcccagggcctacctgaccgtggtggccaagcggctgctgatcaatcgctaccagcgccaggcgctggagcaggcctatatccgttcactgcgcgaagctccggcctcccatgcgccgtcggccgaggagcgtgcgctggtgctggaaacgctgctggaactagacaggatgctggatgggcttgccccgaaggtacgccgtgccttcctgctttcgcagctggatggccttggatatacgcagatcgcgcagctgcttcaggtcagtgttcggaccgtcacccgctacatgtccgacgcctacgcacagtgcctgcggttgatgatctgcgccgagcaatga

SEQ ID NO: 514500 - DNA, 798 bp, Stenotrophomonas maltophilia
atgaagaccttgaccctgcttgccactgcggcattggccctggcggcctcgctgcctgcatccgcgcacacgccctatctggtgcccagcgacttcgcgccgcgggcagggcagacgattgccctggacgcctcgttcgcggaaaccttctttgtgccggaaaccgcgttcgacggcagccacttcaatgtggtcgcgcccgatggcactgaatcgccgctggattcgcagccgatgaagacgcgtaccgtggcggaatacacgctgccggccggcaccggcacctaccggctcagtaccggatcacgcctgggggcgctgttccgcacctgggagctcaatggcaagcgcgaaagctcgcgcgatccggcggtaaggattcccggcggcgcgaaggtcatctccgacttccagtcgctgacccaggccgacagctatgtcaccgtcggtagcccggaccgcgctgcgctcaagccgcgcaacaagggaatcgaactggtgccggtcacccatcccaatgatctttacgtgggtgagaccttcgagttcaccgtccagtacgacggcgtgccgcttgccgggcacgcggtcgagatcaccgaggcggtctggagttcggatcgcagtccccaggtgctcagcctgaagaccgatgccaaggggcacgttcgcttcccgctgacggtggcaggcacctggatcgcgctggcccgccatcgcactgcggcgccggccggctcgccggtggccgagctcagcaacagcatcacgctcagctttcgcgtgctcaacccctga

SEQ ID NO: 514501 - DNA, 906 bp, Stenotrophomonas maltophilia
atgaaaaccactgtccttgccagcgcgtgcctcggcacgctgctgctgtcctctgccgtgtccgcgcagagcacgcccggtccgcgcccgctggtgggtggccacggcaacaacgtgctcgccttcatcgccgagcacgacgacaacggcgatggccgggtgacgtggcaggagttcgagaccttccgtcgcacccgtttcgatgccaccgacagcaacaaggatggcacggtggatgaggccgaatacgtggccgaattcgatgcccgcgtggccgcggagatcgaccgcgagcgcgcggcgcaggtcgagcagaccaaggcacgctttgccgcgctggataccgacaaggatggattcgtgtcacgtgccgaattcgacagcgctggggagaaaacctggcaggccgggaagcgggcgctggccagcaagggcgccgggggcaaggccacaacgagcagcgaggcaaggacggccgccggtgcccagcgcttcgacaaccagcgccgcagccggctgggcatgccgaccagccacaccgcagccggcttccttgagctgtacgacgagaatggcaatggcaaggtcgaactggccgagtaccagcgcgtgcgtgatgcgcagttcgcgcgtaccgacagcaacggcgacgggcggctggcgctggacgagtacctggccgagttcgagacccgccttgatcgccgcatcgccgcgctggaccagagcagcgaccgccaggtccatgtgcgcttcggcgtactggatgccgacaaggacggccgcatgaccttcgccgagtaccaggtctccggcaagcgcctgttcgagactgccgaccgcaacaaggatggtgtggtcgatgccgccgacgccaaggtgccggcacccgcgcctcgtcgttga

SEQ ID NO: 514502 - DNA, 1452 bp, Stenotrophomonas maltophilia
atgacacgattctgcacattgctgcgcgttgcctgcgcgatgctgtggtggctgccagccctcaccgcgagcgcggcagtgctgcaccacgacgatgtactgggtacgtcattggacctgcacatcgacgcgccgccagcacaggcagtggcgggcgagcgggccgtgctggcggaaatcgcacgcctggatgcggtgctgagccggtggcgttcggatagcgagctgagtcgtttcaatgccagtagcggaccgcaggaactgtccagcgatctgcgcgcggtgctgacgctgtgtgagcagtggcggctgcgcaccgacgggcttttcagttgccggctgggcagcctggcgcaacgctggcgacaggcgcaggatagtggcgtgccgccaccgcgcgatgagctacgggcgatggccactgccgcggcgtcggcggagttcacgttggatgacggcatacaggtgcatcgtcctgcggacgtggtgttcgatgtggatggcctggccaagggctacatcatcgaccgtgcgctggaggcggcccgtgcggcggcaccggcagcacgcggcatccgcctcgatatcggtggagatgcgcgctactggcaggccgacggggcagggcaggcatggcaggtgggcgtggccgatgcccgcgcaccgcgcgacaacggtctggcactggctacggtggcgctgcgttcgcacgcgatcgccgccagtggccatgccagccggggctatgcgatcggtccacgccgctacagccacattctggacccctggtcgggctggcccatgcagttcgcacccgccgctacggtggtggccgccgatgccagcagtgccgacgcgctggccaccgcgctgtcggtgatgcccatccgcgccgggctggagctggccgatgcgctgccgggcgttgctgcgctggtcctcagtgacaccggtatcgccttcgcttcgcagcgttggccgtcgttgctggcgcccggtgcggccggaaccacggcgccagagcagctggtcgtcgagtaccagattccgcacctggccagcgagcgctatcacgcgccgtatctggcgctgtggatcgcgcgcgacgatggcagcgcggtacggcagttgctggtgctgggcgaacgttcgcgctacctgcgtgatctgccgcaatggtggcgcagctacggccgcgacgacctcccggccatccaggccattgcccggccgacccgcctgccgggccgctattcgattgcatgggatggtcgtgatgaccgcggcctggcgatgcctgcgggccactaccggctgcaggtcgaggtagcacgccagggcggcggccatgaactgttgtcggtgccggtcgacaccgggcagccgatggacctgaagacgcagggctccagcgagatcggcagcctgcaggtgtccagcgcaggcaactag

SEQ ID NO: 514503 - DNA, 2370 bp, Stenotrophomonas maltophilia
atgaaactgaaaccctccctgctggccctggccgtcgccaccagccttgccttgccggcgatttcccatgccgccgcgctcgaagccgacagcacgctcgataccatcaaggtggtcgagacccggaagaaatccgagaaccagaacgtcaccacgctctccgccaaggacctgcagcagcagggtgcccagagcatggaggatgcgatccgttacgtacccggcgtggaaatggtcgacctcggccgcgcaggcttcaacggtttcaacatccgtggcctggaggcggatcgagtgtccatcacacttgatggcctgagcttcccgcagagcatggacccgggttcctatcagccctatgaattcttccgctccggccgtggcagtgtcgatcttgaagcggtgaaggcggtggaaatcatcaagggcgccgatgccatcactgcgggcagtggtgcgctcagtggcgcggtgatgttcacgaccaaggatcctgccgacttcctcaacgcctccggcaacgacagcttcggttcgatcaagtacggctacaccggctccagcggcgagaacatgggctcgctgaccctggccaaccgcaccggccgcttcgagtcactgctggtctacacccggcgcgatggccacgaaaccgaatcctggtacgactccagccctgccaagctggggccgggccgacgcacgcccgatccggttgatcgcgaaagcaacaacctgctggccaaggtcaacttcctggccaccgatacgcagaccctcggcgtggtctacgagcgcgcgcgcgccaccaacaatgtcgacaactggacccgcagcgacggcacaggctcgtatttcttccgcagcgccgaagatcgcagcgaccgtgatcgctacggcctgaagtacacctggcgtgccggcaatgcgctgttcgacaccctggaagccactgccgaccaccagaagaactacatccagggccagaccaacgtcctggtcgccaacggcaccgccccggtctacggcacccgctgctcgaccaccgcgctctgctcgcgccaggaagaccgctgggacacccagaagcgcgaccgctttgcactgtccttcgacaagagcgtggacgtcggcggcatccgccacgacatcatctacggcgccgcctggcagcgggccaggatccattggaattcggtcgattcgcgctggggcagcacgggcacgctctacagccgcgagaccgatccgtcgctctggcccgacacccgcgagaccgacttgactgcctacgtccgcgaccgcgtgcgcctgctcgatgatcgcctgaccctgaccggtggcgtccgctacgacagctacaagtacacgccggaaacatccgccggcggcaacggccagtccggctatgtggacaagggcggcagcgtgggagtctcgaagtttgcctcgcccacctggaacctcggcgcagacttcaagttcaccgacacccagtcgctgtgggtgcagggtggccgcggcttccgcgcaccgggcgtgaatgacatgtatggcacctcgtccactaccgacgtcacccgcgtgtccgacggtgcgaccgtcaccgtgcccgatggcaggagcaacccggacctggatgccgagcgcagcctgaacctggagctgggctggcgctaccaggccgagcggctgcgcgtgggtgtatcgctgttccgtgacaagtacagcaacttcatcgataccgcgcagttcgtggcggacgaaggcacccgatacagcactaccagccgcggcgtgaccacggtaaccaacggctacacctacaccatgccgatcaatcgtggcgaggtggaagtgaagggcgtggaagtggagggcatgtggctgctggccgatgactggctggcccgcgtggcgtactcctataacgagggcaccgacaacgacggtgcgccgctggccagcatcatcccggccaaagcggtcggcggcctgacctacaacgcaccgtcgcggcgctggagcgtcaccgccaacctcacccaccagcagcgcaaggacccgtccgactacggcaagagcgtgaccaacggcagctacggtgtggaagtagttccggtctatgcctacaaggcgcgcgagtacaccttgctggacgtgttcggcagctacgcgatcaccccgaagctgcacctgaccgcaggcgtctacaacgtcttcgacaaggaatactacctgtggaaccgcgtgcgcacggccggcgccggcagcgcgatcttccagggcgcgaccagtgcggagggtatcggccgctggtcgcaaccgggtcgcaatgtgcgcttcacgctgagctacgacttcatgtaa

SEQ ID NO: 514504 - DNA, 375 bp, Stenotrophomonas maltophilia
atggaatcacatctgacgattgatcaagtctccaggagaaccggcctgtcggcctacaccctgcgctactatgaacgcatcggcttgatcgcaccgatcagtcgtgccgtcggagggcggcgctgctatctcacctcggaccttgcgtggattgaattcctgctgcgcctgcggatgacgaacatgcccatcgggaagatgcaggcatttgccaagctgcgtagcgccggagattcgacggtggcggaccgacgcaggttcctggaagaatacctgatagaggtgctgtcaaagatcgaggcgatggaccggtcggtcgaagttctacgcgcgaaaattgactactaccgttcgctcgagacgtccctgatctag

SEQ ID NO: 514505 - DNA, 504 bp, Stenotrophomonas maltophilia
atgaagcgcgtcatgaacatccagaaccgcagggcgccactcggcgtcctgctggtggccatggttttcggtattcccgcttcggcagcagagccggacggacgccgcgaacgcggcgaggccatgttgaacagaatcacagctgatgaaggcaggatggtcgttgaatcgttgagcgacatctctcccgagctgggagactggatcatcgagttcgcctacggcgacgtcttctcgggcactgagctgtcactttgcacgcgagagcttgcgaccgtctcggcactgactgcgctgggcaatgcgcgcccccagctcaaggtccacatcgacggagcgttgaatgttggttgcagtccggatgccattgtggctgtcatcattcagatggcagtgtactcgggctttccaagcgcattgaatggtgtaagcgcggccagggaggtcttcgcggatagaggcgtaggcgccactacggccaattcgaggaccggtgaacgctga

SEQ ID NO: 514506 - DNA, 852 bp, Stenotrophomonas maltophilia
gtgacaacctcgagcatgaggcaacgtggagtcgggccggactatcctgatctcgtcgatagccctgtcatggtgcttggggtcgatcccatcacagatgcctgggagatgccctttcatcagcatcgcaaagcccagcttctggtcgcaacgagcggattgatcacgctggagaccagcgcaggcctatgggtagttccgccgcagggggcgatctggattccgggaggcctgctccatcgcgccagcagcagcggaaagccgcacggcttcgttgtcttcgttgagcccgaggtagttccaggattgccaacacactgcttcgcaatggcgatcacgcccttcatgtatgccctgctcgaacgcacggcacggcttccccagcagtatgaaagcgggagcgccgattcccgcctgatggctgtgcttctcgacgaactcatcgcggcgccgccggagtggctgcacctgcccatgccctccgacccaaggctgcgcaagctggccagtgcgatgctggacgcgccggcggagcgggcaacgcttggggtgtgggcaagccggatcgggatgagtgagcgcaacatgtcgcgcctgttctccggcgaaacgggcctgagtgtcaggcgatggcgcaggcagctgcacgtggtggtcgctttgccgatgcttgccaagggccggacggtacaggccgtggccgatgatctggggtatgacagttcaggtgcattcgtcaccatgttccggaaggcggtcggagcgccccccaagcgcttccttgtcgaacgaggggggcggctacccgcatccggcgcagacattcagccgcctggaggagtgccccggtaa

SEQ ID NO: 514507 - DNA, 390 bp, Stenotrophomonas maltophilia
atgaagattgacagcgcgcactttcccattgtctggatgcgcaacgatcccgcccttgccgagcccctggatcaggtcctttctgacctgtcctctttgctttccctgcagaagccctttgtatgcatcgccatggatgctccacaacgcagcagtagcgggaatgacgttgacgagcggcgtgcactggcggcctgggtgaagcagaacacccacagcatccagcagcagatcagaggccatgtacagatcgtccaggaggcgcaggaacgagaggcgatggaggctttttccgttgcattcttcaagttctggggctacccgatgtacgttgttgcggatgtggatgccgggcttgccaaggcgctttcacttctgactgacgcctga

SEQ ID NO: 514508 - DNA, 918 bp, Stenotrophomonas maltophilia
atgcgcagcagcttcgatctgaacaccgtccgtgtcttcgtggccgtcgtggacgagcagagcttttccggtgcggcccgcctgctggccctgccctcttccaacgtcagccgccacgtcgcctcgctggaacgccgactgggggttcggctgctggaacgcagtacccgtcacctgcgcatgaccgaagccggcaggctgctgtacgcacgctcaaaaccactcctcgacgccctgctcgccacgcaggaagagctcggcgaagcacaacgcgaattgaaggggctgctgcggatgagcatgccgaacgaggcgccccggctgcttggccccatccttgccgagttctgtagtcgccatcccggcatcgagctggagtgcgacacgcgcctgaccggcccggaagtcctgcgggaagacatggatcttgccctcttcttccatcgcgggccgcaggacgacagtgcgttcatcacccgcgagctggcgacgttggcgagcatcgtggtcgccgcgccggcgttgctggccaggaccggggtgccgcgccaggtgcgcgaactgaagtccctgccctgcatcaccaccgccagtgcactgaagggccaaccctggcagtttgtcgacgcggcggggaacatcgtgaaggtgccggtgcgcagccgctatcgggtgaacagcggggagcttgcggtggcgggcgcgcgccaggggctgggcttcgctatcgttgcggcttacccctgccgggaagacctcgccgcgggccggctgcagaaagtacagctggatctgagcccggcgccgctgcagctgctgggtgcgtacagtcaccgccattcggtcaccgcgcgggttcgggcattgctggagttcatccaggctcggctgcagggcgtcggagatagtgccgggtaa

SEQ ID NO: 514509 - DNA, 1215 bp, Stenotrophomonas maltophilia
atggacatcggaatactgggtggcggcatcgcgggcttgagcgcggccctcgccctgcactggcaggggcacagctgccgcgtctatgagcgtcgggccagaccgtcgaccatgggagctggcgtgacactgtggcccaacgctggtttcgtgctgcaggaactcggggttctggaggatgttggggcagccggcggccggccggtatcagtgcaccgcaaagacgccgcaggtaatccgctgggcggcctggacatcacgctgctggaccagatcatgggatacccgacccatacgatcctgcgccgcgacctgcaggcggtgctgctggaccacgtggcacgagcgggaatccaggtgcagttcgcgcatcgcgcggtagcgattgagcttgaggccaacggcaaggccacggcgcggttcgacaacgggcagtgcatccatcccgacctgcttctgggtgcggatgggcgcatggactcggtggcacgcaggttcgtcgcaggggacagcacgccgatctaccagggcttcgtgaactggatcggggtcgcgcagggcagggaactggtaagcgaggtggggatccaggactactggggcgccggcgatcgtttcggctgcgtcgcgatccgaaccgatcgggtgtactgggcggccgcccaggcacgaccactacccgcagcgacacccacagcagacatgcgcgacgaggtgagggatctgtttgcgggatggcccgaacctgtcgcccgcctcatcgcggccacaccggcgcactccgtccagcggattgccgtgcacgacctggaaccgctgcacacgtggagccgcgcaaacgtgttgctcatcggcgacgcagcacatgcgccgctgccgacctcggggcagggagcctgccaggcactggaagacgcctggcatctggcccgctgcctggaagggggcgatggcagcctggatgaggtgctgctgcagttcgccgccctccgcggacccaagaccacgaagctggcagagcaggggcggatgttcgcgcgcgggctcttcgccaacgacccggaaacctgccgcatccgcaatgaacgcgccaaggcgtccgatccggtgcgtgatgcgctggccatggccgcaggctggtcgcagggcctgccgatggccgaccacgttgaaagggcagcggcgaacagcatgggaagcatgtatcgcctttga

SEQ ID NO: 514510 - DNA, 2649 bp, Stenotrophomonas maltophilia
atgtccaacaccccctttggtgagtcgtcatgtgctgccgccgccagcggttgcgtcgaggtgcgtggtgcgcgcgagcacaacctcaagaatgtcgacgtctccattccgcgcaatgcactggtggtgttctccggggtatcaggttccggcaagtcatcgctggccttcggtactgtcttcgctgaggcgcagcggcgctacttcgaatcggttgcgccgtatgccaggcgcctgatcgaccaggcgggcgtgcccgatgtagacgccatcgacgggttgccgccggcagtggccctgcagcagcaacgtggcgccagcaatgcgcggtcctcggtgggcagcgtgaccacgctgtccagcctggtgcgcatgatgtactcgcgtgcgggtgcgtacccggccgaccagcccatgctgtacgccgaggacttctcgcccaacacgccgcagggcgcctgcagcacctgccatggcctggggcatgtctacgaagtgaccgaagcgctgatggttccggacccttcgttgagcatccgcgagcgcgccatcgcctcctggccgccggcatggcatggccagaacctgcgcgacatcctggtcacgctgggctacgacatcgacgtgccgtggaagaagctgccaaagaaggaccgggactggatcctgttcaccgaggaagcgcccagcgtgccggtctatgccgggttcacgcccgcagagacgcgtgccgcgctcaagcggaagcaggagcccagctacatgggcacgtataccggcgcacgccgctacgtgctgcacacctttgccaatacccaaagcgcgctgatgcgcaagcgcgtttcgcgctacatggaaggccggttgtgcccggcctgccacggaaaacgcctgaagccggaggcgctctcggtcacctttgccggcgtggatatcggcgagttcatgcggctgccgctggatcagctggcggcgctgctggagcccatcgcacaaggtgatttcggcgcgcacagcaacggcgcacgtacccgcaggagcgctacaccccgcgatcgcgcccggcgggccgcgagtggccaggcgactcacgagggtgcccccgacgtgcggctgacctccgccctgcccgaagagaagcgtctggcggcacaacgcttggctggtggggtcatggcacgcgtacgccagctgcgcgacctgggtctggggtatctctcgctggatcgcaccacacccacgctgtcggccggggaactgcagcgcctgcggctggccacgcagctcagctcgttgctgtttggcgtgctgtacgtgctcgacgaaccctcggccggcctgcatccggccgacagccaggcgctgtatgacgcgcttgagcgcttgcgcgacggcggaaactcggtgttcgtggttgaacacgatctgcagctgatgcgccgcgcacagtggctggtggatgttggaccggaagcaggcgagcacggtggccaggtcctctacagtggcgagcccgacggcctgcgccacgtccaggagtcgcgcacggcgcagtacctgttcgaccaggtgcctgcgcccgccagccggcagcgcaatgccaacagctggctggagttgaagggcatccaccgccacaacctgcggggcgtggacgcacaggtgccgttggggctgctgacggcagtgaccggcatttccggctcgggcaagtccagcctgatggcgcaggcgctgcccgagctgttgctgctgcacctcgggcatgagcccgcggacgacagcgccgatagcgcgcccaccgacggaccgaccgtgattgaaacgacgcggggcacattggcaggcgatatcgacgccatccagcgggtggtgcaggtcgaccagaagcccatcggccgcacgccacgctccaacctggccacctataccgggttgttcgatcacgtacgcaagctgttcgccgcgacacccgccgcgtgccgccgtcgtttcgatgcgggtcgcttctcgttcaacgtggccaagggtcggtgcgagacctgcgaaggcgagggcttcgtcagtgtcgaactgctgttcatgcccagcgtctatgcgccgtgccccacctgccacggcgcccgttacaacgacgccacgctgaaggtgcagtggaatgaccgcaacatcgccgaggttctgcagatgacggttgaccaggcgcatgcgttcttcagcgaggaagaggccattgcccggccgctgcagttgctgcaggagatcgggctgggctacctgcggctcggccaaccggccaccgagctttccggtggtgaagcgcaacgcatcaagctggccaccgaactgcagcgcagccaacgcgggcgcacgctgtacgtgctggacgaacccactaccggcctgcatgcctcggatgcggacaggctgctggtgcagctgcagcggcttgtggacgcgggcaatacggtggtgatgatcgagcatgacatgcgcgcggtcgcgcaggcggactgggtgattgatgtcgggcctggcgcaggcggggcagggggcaccatcgtggcgaagggaacgccgcagcaggtggcgcgggccaaaggcagcaggacggcaccgttccttgcgaaggagctggcctctctgtag

SEQ ID NO: 514511 - DNA, 408 bp, Stenotrophomonas maltophilia
atggaactggaaaagctggaaaaatggtgccaggatggcatcacaatgttgtcctcccccaacgatatcccacgtctcgttgagttgcggaggaagacggttacgcattttgcacgtagtcgcaagctctatgaggtggcagctgatattgctgatggactgaatgatctccccgaggatgccaggaaaattgcgagggaatatcttctatccacatatgggttcagttttgaattctttatggataggggctcggccaaggttcgtgcaattctcaagcggggacgggttaggaataaggcggagtttcgcgcattatccgacttcctgacggataacgagattgatgagggagtggcgcgggttgcggagaagctgcttgatgactactcgaaagatctgaagtag

SEQ ID NO: 514512 - DNA, 651 bp, Stenotrophomonas maltophilia
atggcgccggctgatggagacccgtggagtgccggcgaacggcatccggaaacccttgctacacaagggctgcgccgtggtggcaattcgggacgtgttgatgaaaaaccaacggcgttcgtccagggcgatggctgggcccgacgccgagccgccagcagcagtcctgccagtaccggggccgaaacgccgccagcgcgtgtgaggcgcctccgtaggggcgctgcccctacaccccggctagaatgcacgcaggacgccttgggggggcatatgaagcgcgagcgaccggagtatctaccaccgatcagtgcgaggcgctggagctttccgtggatggcgttgtgggctgtgctactgctcgggatggctggtgctggaatctggctgcacatccgaaccaatgccgcatggaccgcccgattcaaccagccgccgcgcgcagaaactccgcaggccgcaccacctcaacaagaggccccgtccgacatcgatgcgcggttcgccaagatggccgagattcgtgcacgccgagaacaggcagaacacgaggcgagacgggagcgcgaaggtctacggtgcataggcggcgttgcctttcgccgcattcctgggggctgggagaacgtaccgggcgaaacctgcccgtga

SEQ ID NO: 514513 - DNA, 1272 bp, Stenotrophomonas maltophilia
atgcctatcgaactgtttaccggccagcctggcaacggcaaaaccgctctgatgatggagcgccttgttgcagaggccaaggctgcgggtcggccgatcttcgcagctggcatcaatggcctgagtcctgggctcgctacgattcttgacgatccgacgcgctggaatgagatagacccaactgtcgagggcacttgcgtctgcggaatcgagttcacacctgatggcaccccgattccgcgacctccgcacgcccacacgttggttccggatggctcgctgatcttcgttgatgaagcatggaagtacttcggccatctgcacaacgcgacgaatcagaagacgccaaagcacgttctagcgctgagcgagcatcgtcaccgtggcattgatttcgtgtggacaacgcagcagcccaatcagctttatccgtttattcggggtctgatcggctctcactcgcacgtggttcggcggttcggaaccaagatgatcgacgtgtatcgctggggtgaattgaacgaggaaatcaagtcatctgcgaagcgcgacttggcacagcgcactacgcggctgctgccctcccagatatacggtcagtacaagtctgctgaggtccacacgatcaaggcgcggataccgctcaaggtgctggcgctgccgcttatggcccttgttggccttggtctcgcctattgggcatatacgctgctgcgaccgcccgctgttgctggtgttgcggactcaaaggggacgcaatcggcgtcagccgatgcggcccctgcgcacgctggttccagttcgcgcaaggaagatgcgccgcgctggcccacagccgctgcctacgccaaggatcatttgccccgcatcagcaccatgccctggactgcgccggtcttcgatgatcgtcaggcgcggtcggacccgcagctggtgtgcatgtcgtccatggaggggctggacgctcagggcgtgcgtcaagaggcaagctgtcgctgtctcaccgaacaggggacagcctatgaattgagtcagcccgagtgccgcacgcttgcacgtaatggccctgtatacaacccgtatcgagagcggtcggaggatcgacgcgagcagcgcttcgatggggcaggccagcctcgcgcagcggaatctgtgggactggcgggcagtgtggtccagcacgtcgagcgaactatggggagctttcccgagtctccgccgtttgcatcggacagctacatgaccacggcgccggggccgaacaagctgtga

SEQ ID NO: 514514 - DNA, 1368 bp, Stenotrophomonas maltophilia
atgatttcgggtgtcgttgattcaaagtacgcactcggactgcccgcactgttttttgcgtggctcattgctgggttgctagtgagtttccctgcgcatgctctggacgaacaaggggtggcgtatcagaagtgcatggcgagcttggccaaggctgtgggcggagaatctacgaatcatcgctgcgaggacaggcccatctttggaatgggaaacgtgcgtggaagctttcaggggaagtacgactatcagggtagtacttatctgtggggagtaccttacgactatggttccggctgtcgagacaagggttcttacacgggcgtaggtccatggtccagcgtgggaggcgccgctcggaatggcagcatcggctgtcgtgatggttgcgatggtatgtggagcaagaacgctgatactagctttacgtgggacccaacaggcgatctctgtcccgcagatgagaagaagaactgtgagcagcctgctctggccaatgcagggtactactggaacgtagccctgaatgtatgtgagccgccgaagccgcagtgcgagggcggaaagaacccaaactctctcggccagtgcgcgcccgagccgtgccctgatgggatggcgcagcaggcagatggtacatgcaagaagaaggataacgagtgccctgcaggccaggttaggtcgcctgacggcaagtgtctcccgggggatggtcagtgtgcctctggtgaggttcgtggccctgacggaacctgtaagaaggacagtgacggcgacggaaagcctgatgagccaggtgagaaggattcattctctggcggcgatgattgcagcgcgccgccgtcgtgtagtgggtccccgatcatgtgcggccaggcacgtattcaatggcgtattgactgcaacacgcgcaagaaccgcaacatcgctggcggtctttgcagcgccatgcctgtctgtacgggtgagaagtgcgatgcgatggagtatgccggtctactgatgcagtggcgctcggcctgtgcgttggaaaagatggcccaaggcaatggaaatggcggtggtgataacggggacaccaaggcaatccgtgacgcgcttaccggtagcggcggctctgttacaacggccccggatcgacccagctccgacgtgtggtcaccgcgtagcggcacaccaatcaagcctgatacgggcggctatggctgggggcggggatgtccgcagcccccagctattgaggtcatggggcagaccatcgcgttcgatatcacgcctctgtgtcgatggctcggcttgggtagctatttcgttgtcggcctcgccgcactgttctgtctccggatcatcgccagtagggatgcctaa

SEQ ID NO: 514515 - DNA, 231 bp, Stenotrophomonas maltophilia
atgcagaagatgttgaaggccctgaagggcaagggtgccgctctggcggctgtcggtaccgccgctctggtttcgtccccggcgtttgcgtcgggtggtggtggcgtggatgtgggctcggtggttagcgcgattcagggcgctgccgctcccattgccgccatcggcggtgcagtgctgaccgtgctggtcggcatcaaggtctacaagtgggtgcgccgcgcgatgtaa

SEQ ID NO: 514516 - DNA, 264 bp, Stenotrophomonas maltophilia
atgattgatccgctcgttaccttcgtgctgctggcggccattgcggccgtctccatcggtgccgctcgcatcgtgtcgtggctgctggaccggcgtgaccgtgccgtcgtccagtgcggcaaggaagcggccatcgtcgcccaggcacgcgccgaactggccgctaccggctggagcgatgaggacgaagccgcgttccaagccatccgcgcccagcagggcgtttccctgaagcacatgcgggagtcgatccatggccgctga

SEQ ID NO: 514517 - DNA, 558 bp, Stenotrophomonas maltophilia
atgttggattcttttgttccgaacagcctgagcagcgatatgcgagacattgatctctgtgtcgctgactacaagacgcaacttgagaaaagcagcattaggaaggcgtacggctatttgctgcgatacgtgatgcacctgaaggcgcatttcgcaaacgagctgtcggatagatattctttcggcaatgtatctcccggatacatggacttcacctatttccctttcttcgatgattttttgcgagagcgcaagctgcgcttgggggtcgtgctgaatcatcaggatttgcgcttcgaactgtggctgatgggacagaatgcggctgtccagaaacgctactggagtttgctcaggaaaagcgcatggaatgcagggcgcacagagatgcccaagtacagtgttgtagaggcaatccttgccgaatccccacgcttcgaagatgcaggccagctcacagtacgaatcaaagaggaagcaatgcgcatctcggaggcggtggccgatgccattagagtcgctgaggctcgtgaagcgtcatccgggagttctgtgtaa

SEQ ID NO: 514518 - DNA, 774 bp, Stenotrophomonas maltophilia
atgatcgccaccgctctgattgccgatgacgagccgctgctgcggcaggcactggcggcgcagctggcgcaggcgtggccgcagctgcaggtggtggcgcaggcgcgcaatgggcgcgaggccctgcaggcgttcgagacgctgcagccgcaggtctgcttcctcgatatccacatgccgggcctgtccggcatcgacgttgcagcacgcatcgcgcggcgtgcgcaggtggtgttcgtcactgcctacgatgcgtatgccgtgcaggccttcgcgcagggcgcgctggattacctggtcaagccggtggatgccgagcgcctgcgcgatacggtgcaacgcctgcagcagcgcctgcagcagccaccgcctctgcaggacctgcaacgccaactgcagcagctggccgagcgcctgtcgctgccggcgccgacaccgctgcgctggctgcacgcgcaggtcggtaacgtactgcgggtgattccctgcagcgcggtggacttcctgcgcgccgacagcaagtacacgcaggtcggctggcgcgacgacgatggccgccccggtgaggccgtgatcgcgctgccgttgaaggacctggtgcagcagctcgacccggacagcttcgtgcaggtgcatcgctcagcggtggtcaaccggcatgcggtgaagctgctggtgcgcggtgacaacgagaccgctcaactgcacctgcgcgggcgcgatgaggtgctgccggtcagccgccgctatctgggggcgttccgcgccatgtag

SEQ ID NO: 514519 - DNA, 1062 bp, Stenotrophomonas maltophilia
atgcccgatgtgctgccgccaccgccggtttcgctgctgcgccgaaccctgtggtgcgcaggcatctcgctggcgctcggcgcgctgctggtcatcgactggcatccttggtggacggtgctgccgcgtgcattggcattgggcatggcggcaatgttggtgttcaccgcgctggagcgctggccggcatcgctgccggacgggttgtcgcggtgggttctgcagatcctcgcggtggcggcagtgattccgttggggacgctggcgatctatctggcgggcaccgaggcgggggcgccgccgttctggcaggacgccgatcgctggaccggcttcctgaccctcacggtgctcggcctgctggtggcgccatgggtggcattggccgcattggtgcggcacaaggatgcattggccaggcaccaggcgctggccttcgcgctggagcgcagcgagctggagcggcaggcgctggtggcgcgcgtgcagctgctgcaacggcaggtcgcaccgcatttcctgttcaacacgctggccaacctgcaggcgctggtggacagcggttcaccgcaggcttcggtggtgatgcgccatctggtggcctacctgcgcggcagcgtgccgcgcctgcagcagcccctggtacggatggaagacgagatcgcgctggtgggtgcctatctggaactgatgcacatgcgcatgccggatcgcctgcgtttccggctggatgttgcggacgaaacgcgcgcgctgggctgcccgggcctgtccgtgctgaccctggtggagaatgcgatccgccatggcatcgatccctgcgaagagggcggcgaagtggtggtgcaggtgcggcgcgacgatgcgtgctgcgaagtctgcgtcagtgatgatgggcgtggcttgtccgataccgcaccgggtctgggtaccggcctgcaggcgctgcgccagcgtctgcagctgctgtatggcgatgcggcctcgctccagctgcaggcgggtccgcaacgcggtgtcatcgcacgcttgcagttgccggcccgggagtgggtggcatga

SEQ ID NO: 514520 - DNA, 861 bp, Stenotrophomonas maltophilia
atgtccctgcctgccgttgccatcaccgaagcgcgcgcggcgctcggcgaccggatgtccatagtgcgccgccagcgcctgctgcgtataggcgcactagcctggctgggctgcgccgcacttggtcagctgctgttcgccgtctacatcgtgggcttctacgggcgcagcacgctggcaggccatccgcagcgctggaacgaggtgatgccgcatggctacgtcgccggcgcgacgggcttcaatgcggtgctggcgctgcacctgctgctggcggcgggcatcgtactgggcggatggctgcagctgtggccggggctgcggcgctgggcaccggccgtgcatcgctggaacggccgcatctacttgtccgcggcggtactgctggcgctgggtggcctggcgatggtgtggatacgcggtggcgccgccggtgataccgcccagcatctcggcacttcgctcaatgcggtactgatcctgtggttcgcgggggcagcgtggtggcacgcgcggcggcaacgcaccggcgagcaccgcgcgtgggcactgcgcctgttcctcgcggtgggcggcgtgtggttcttccgcatcggcctgatgctgtggctgctgctcaaccaggggccggcagggttcgatccggagaccttcaccggccccgcgctgacgacactggccttcgcccaggccctgctgccactgacagtgctggaactgtacctgcgtgcgcaacgccagcccggtgcgctgcgcagctggctggtcggcgcggctctgctggttgcagcgctggcgaccctggccggcagcctcgctgcggcggcgctgatgtggtggcctccgcttgcggccgggtga

SEQ ID NO: 514521 - DNA, 819 bp, Stenotrophomonas maltophilia
gtggctaagaagaaaggagctgatcaacgcgtcgaattcgcggatggcgtgaagagggagattgcatttgaagcgcacctgttctgcgttaatccgacttgttgccgcttcacgtcctatggaacgacaacgggcaaagctagagcgatcgctgaagctgcgcatattgttgctgccagttcccaaggaccccgttccgaagtgaggatgacagaggcgaagttgaagtctgcggagaacggaatatggctatgcaagaactgccatggcctcatcgacgatgatcccagtgcgtacccaatacaaatgctgcgggattggaaaaaggcgcatcagacatttgtttcgaagcttgttggtaaggatttcgatatcgttcatttcgaattgtacgcacgaagccgaaacgtcgcccaacgccatagcttcctaggttacatcgaggggcggcgtgttttttttgatgcgctcgatgtagagtatcctgatcaagtcgcgatatcgttggtggagataagggctagaatcactgagttatctggtcacttgtcgagggacgatttcgcatggaagcgtatgcaacggatgaggaattcgatccaaaagttccttacggcgaacccgcatcttgctacgttgaggtgcgatggtggagatcctgtcttcgagaagttctgtcgtgatctcgcctctctgcgggaagaaattatcccattagttatcgagatcgcagaagatcttgaataccagcttggcaatgagctcctagacgcctatcggcatttgcaagcatcccggccgatttcacaaataccttag

SEQ ID NO: 514522 - DNA, 1221 bp, Stenotrophomonas maltophilia
atggggcctaagagggcccgactcgatcttgatcctgagctgatagtgttcctattaagccttgagccgacgtcaattcttgttcacgatagatgtcggttcatcatctggatggtactaacaatggacgttgaggcaagaaatcgtttgttgggcgaaattgcggagaccctgagaggggggcgcgcaccggagccaatatctgtccgcgagctcattggctggtttgatgcgctgcgtcgtggcactaacgttaactggcatgttcgtcgttctctggagcaggctggtctagtcaccgttccggattttgaaagttcccatatagatggacgggttcagtttgcattgccccaggcgctcgaagatcaaccggaagagcggctcgagaacaatgatctggagccagtagtggagcttgctccgcagcaaggggccgcgccagtccagttcgttggcggggccggagtagagcctgcatatcgcgtgagccgtttactagacccaagactgaggctggtcacaattggacctgatgcttcgcttgaggaggcagtgactctcatgcttcgacatgactactcacaacttccagtcatgacaaatgagcgagatgtgcgaggcgttgtaagttgggatagcatcggcccagcaatggcactcgggcatcctatgcctcagtttgttcgagaatgcatgcggccacatgttgaggttaaagagacagattcgctatttcaagtcatcaacaggatcatcgagagctcgtatgttcttgttcgtaatgaacggcgatctattagtggcatcttgaccaccactgatttgagccagcagttccaagacctggctgagccatttctgctaattggcgagattgaaaatcacatccgttcgttgattgatggtcgattcactcaagaggaacttgccgcagttcgtaatgagaatgatccaaatcgagtaattgagtctgttgcggacctcacgatcggagagcatattcggctgatcgaaaaccccgccaactgggccaggctagggttgaaggccgaccgagcagtgtttgtgcgagagcttgacgtcgttcggcaacttagaaacgatgtcatgcacttcgattctgaccggataactgacgttgagcgcggatcattgcgaaattttgttcaattcattcatgaactgaaggatagacaggctccagtcttggatcgatag

SEQ ID NO: 514523 - DNA, 747 bp, Stenotrophomonas maltophilia
atggggccattggacgcaaatcaaatgctcgtggctgcggcgagcgctaaggtgctcacgtgcgcggcgaacagcaattggccatggatacctattgttaccggagttctagctttaataggtgctgtcgcaggtacttggatcaatgggtatcttacacggcgtcgcgaggctgatgcccatgaaagagtccgactggctgacttcctctatctggcggtcaccgtatccgctaccttagattcattcgcttcgctatgtgcggcagtagtgtcagatgatggaacacgtcatggagagcgcgactactcgaacagcccgcaaggtgaactagtcgttcaagtgccctctccgaagctcgatctgtcaggtttggacgttgtgtggaggtcgatgccggtagatctgctcgaccaagtccatagtctgcctatcaagctcgcaaatgctgaagcctatcttgacttcgttgcagagtatgacggctccggtgatcgcagtgattacttctctgaccggcggttgaggtatgcaaaaattggcgtcgccacgattgaggtgattgccgcgctgcgtgctcgcgctggtctaaagccccagattgacgaagatgacaccacgatgccgttccttaggcagcagttgcaagagcggagtatgctcgcggaagaggcgcgtgaaaggcagaatgaatggatgcgtgaatttgctgagaagttagagcctagcagctctcccaatagttaa

SEQ ID NO: 514524 - DNA, 2271 bp, Stenotrophomonas maltophilia
gtgaatcatgacttcttggagtggggtgcgagaatcccggatgaagaggtcgatcctcttcgtgacatccgaatgcgggccttgctcaacgcctgtaacgctcatcctcacttcaatgtcgttgagcttcgtcgcctggatgaaccattcgccgcagagatcattgttgctgatgtaggcgacggcgcggtgtctcccggcaacgacgccggcattgcaagaatcgaacgaattgcgcttctgtatcgagatggtgctcgattcccgttcgaggctcgccccctccgaatgggcttcccggtaacccttcatcagaactcgacgggagatgaggggccgccgtctctttgcattgttgagggcgactgggagctgattgagcacaagttcacgcctcaggcgctactgaaggcaattctagattggttggagaagactgcggacggtacgattcacgcagtggaccgcgctcttgagccgatgttctatagcaggggggaatggctcatgcttcctcccaacattgctgaggtcttgaaggatccaaagaaggagctggccttccttgatgcccatctgtgggaaggaggggtcacttatcgtaccagggttttgaccttcaacggcaatagtgaaattccccgctatcgcttgctggttgtcagtctcgaaccggtggggcatccacctctcagttcaccgccttcgactcttggcgatcttgagtcggtgttcgtggccaatggggttagtttgatgccggcgctcgcggttgcagttcaagacgcataccagcgcttccgcgatgcgaggcttgagcctggcgacagcccactgatactgatccttcaggttcctcggcagcgcgatggagtcatcgagcggaccgacgtcattggcttccgaatggagtgcagccttaggaccttgggcctccaagttgaagcactgggccgattcgggacagatggggaagtcgaatgtacccgccttctgcttggcaatgagcacgagtggccgaacagtgggtggcaggatctaagtgtcgcgcacgtggaggttagtacaagtctggacaggagtgatgctcttcgttggtccggcattgagggtgggcagtttcgaggtgtgatcgcgggggttggatcattgggcagcgcgctgataagcatgtggagccgatccgcctggggctggtgggactacattgatccggacgtcttggctccgcacaacgtcgttcgacacattgggacccgggaccaggttggtgttccgaaggtcgcggtcgttcggcactatgttcgcagcgcgttggggatagatgatccaaatgtagccgcgctgaaggagcgagcgtctgacttggagagtgcggaagtccaaagctgtctccttcgagccgaccttctcatcgatgcatctacaacagttcaggtctcgcgcatctggtcgcaagcagatctgcctcgcggaatgacgacgtttctgaccccttccggtgcgagttgtgtgctgttggcagaggataaggccagaaccacaagaggcggctcgctcgaggctcagtactacagagccatcattcgggaggattggggactgtcacacctccagtcagtcggggcctccatccgtagcggtgcgagctgtcgtgacgtatcgtcggttctcgcctatgaaacggtcctacttcacgcctcgatacttgctggtcagattcgggtgagggcactgggggcggaagcaagcattgacgtgtgggatgcagggggcgatggctgcgtgcgtcacattagcattggcgttagaagaacggtttccaggaagatcgatgactggaacgtgatgtgggacgaaggtctggaagaccaactcatggcggcgagagagcaggcgcttccgcttgagacgggggggatcgtactgggcgtagtcgacttcaagttgaggaccattcacttggttgatggccgaccagcccccgatgacagcataccgacaacgatcgatttccagtgcggaaaggcgggtgttcaggatgatatcgatgaagctcaacgaagaaccatgggcatggtcagctgggtgggggcatggcattcgcatccgcgaggaatcaaggccattcctagtgggcaagatcaaaagctcttgtcgcacctggcacaacgtctaggcactgacggctatcccgcagtgatgcttatagcgggggaggatggggtcgatgtgtttctacgggaaatgagcagcagtggtcctgagtag

SEQ ID NO: 514525 - DNA, 972 bp, Stenotrophomonas maltophilia
atgttgagccacccggatgcggatcattgcctgggcctctcaaggcacttctacctgggtcccattgaggactaccccgacgacaagaaggatgacaaggacaagcgtattgtcattcgtgagatatggtcgtcgcctctgattttccgtcgccgttcaaagaatcatgtcctctgtagcgatgcggtggccttcaactctgaggcaaagcgtcgtgtcagtcagttccgcaagggcctggggaatagggatggtgagcgtgtcctgctgatgggagaggacgtggaggggaagacgaatgacctcagctcaattctcatcaagccaggtgcgcagttcaatcgggtcaacggggttctcaacaactacttccaggcgaggttgattgccccaattctctgcgatgacgcggatgtcgtggaggagctcaagaagaacaactccagtatcgtcatgaatttcgagctggattcgattgagcctgggcgccctcgctgcaagttcctgactggtggagatgctgaggtttacatctgggagctgctctggaaggaatatcaggatgaacctgaagtgctggagtatgaccttctccaagccccgcaccactgctcgtggcactctctttcatgggacagttggtccaagaaggggaagaacgctctggtctcacctgatgcgcgagatgcattgggtcaagcgcgcaggggcgctatggttgtcgccagctccaagcgcattctggacgatgaaaaggacccgccatgcattcgcgctaagcgcgaatacctgagcatcctggagccggttggaggcattttcatgtgtaccggcgaacacccgaactactggaatcaggctcctctggatcttcaagtttcacacggtagtgtgcgggtgaaaaaggcgggagcgggttcgactaccgtcgcagcccttgctgctgcgccccgagcaggttccccaaagtga

SEQ ID NO: 514526 - DNA, 903 bp, Stenotrophomonas maltophilia
atgccttttaaaaacaatgagttggacagcccgcccagcaagaaggagcgatgggggcaagctcgccgcctagagttcatcgatacgcgtctcctctgggccgggaaggtcaatcgatcagatctggtcgagttcttcagaatctcaccagcccaagggacgctagatttcgcggagtacgccaggcgagcgcctgacaacgcagcctacgatcccaaggaaaaggcgtacatcgccctaacaaccttctcaccagtgttcacagaagcatcgagcgctcgatacctggctgagctctatgccctatccactggattgctgagcaacgacttgagcttcttgggattgccgcctccagcagaggtagtgagctttcccacccgccgtgtagatgtttcgcttcttcgggaaacggtggacgcgattaggtcccgggcagcgttggagatcacatatcagacgatgaaacgtccggcaccagagatcaggactatcactcctctctccttgggctacgacggcttccggtggcatgtccgcgctttctgccatctgcgcaaggactaccgcgatttcgtcttcgcccgaatcctgcaggctcgacgcgccggaaacgcacaggccacgatcgaagatgatgagcaatggaaccgtttcatccaagtgatagtcgctccaaatcccgagcttccggaaggcgcccagcgagcgattgagctggactacggaatgtctgaggggaagttgacgctaagatgcaggcaggcaatgggctactaccttcttgcgcgccttggcctaaaggagcaagagaacgaatcagctcgttcgcagcagatcatcctcgccaaccgcgctgagctagccacattccttccagccattgtcagatctacaccctag

SEQ ID NO: 514527 - DNA, 738 bp, Stenotrophomonas maltophilia
gtgcgagaggtggatcgagcttcctgcgttcccgcgatgcataattgcggccaagcaagggactgctcaggtcttgaccatatgaatgactcggggggaggcgtgtctgcgaagaaggggctgatgaagtggcttggcgcgtttgtcgcctttgatatggtgatgctcactttcgcgctgattccggattggcgatgggggccggttgagcctcaagtcattgtcagcgcgctaacgacagtgctctgtccgccggtgctgtatctgatcacatccatccttcctccagagctaaaggcaattcttgtcttctggcggacgaagtacacgttgccaggtcattgggcattctcgagtcacttgtatgcagactccagaatcgatgccgatgcggtgactgctcgtagagggccgcttccttcagagccggaggcgcagcagcgcctctggtacaagatctatcgggagcatcgcaacgatgaatccgtacttgatgccaatcgccgctttcttaccttccgcgaactggcagcagtttcggccttggttactgtcatagctccgatcgcgctatcgatcattggcttcggatttgcgggaggtgctgtcgttgctgtgtttgtcgtccagtacttgggcgcatgcttggctgctcgatcggcgggtgctcgtttgatccgtacggtactggctattgacggcgcagaggcagtagcgattacaccggcctctgcctga

SEQ ID NO: 514528 - DNA, 2403 bp, Stenotrophomonas maltophilia
ttgcacgtttccgatccgctgctgatgcctgttcgcgccgccctcctggcctgcgcggccctgttcccgatgccccctgcgcacgcgttgcaggcggctgactaccaacgcgccgaacgcgtgcatgacagtcatctgcgcggtgcgctgcgcaatgcctcgatcctgcccaactggctggccgacggccgcttctggtacgaacgtgaagacgcgcagggccggcgccaggcggtactggtcgatccagtccaggccacacgccaggtcctgttcgaacccactgcgctggacgctgcggttgcctctctcggtgccagcggaccacgcctgcgcttgaacagcgtgcaggtactggatgaaggcctgcgcctgcagttcaacggcgaggcggcgatcaactgccaatggcccaacgtgcagtgcgtgcgttcgcaggatgcagtgccagcggccgatgcactgccatcgcccggcggtgatgcctggctgcaggtacgcgatcacaacctgtggctgcactcgcccggaacggcagcacgagcgctgaccagcggcggtgaacccaatcatggctatggcgtgctgccggacttcaccctgcgcggcattccacgccgtcagggccggatgccgacgcggccgttcgcggtcggctggtcaccggacggtcgctacgtggccggcatccgctacgacgaacgcgcgctgcaggactacccctatctggaaagcagcccggccaacagcgcgcggccgcgtgtgcatacggtgaagctgggggtgctgggtgacacccagcaggtgcgcgacagcgtgtatgtggtcgacacccgcaacggccagcagcgtgacattcccctgccagaaggctggaacaccctcagcgaagccggcgtactcggctgggacggcaaccggttgtatgccgtgatcgcgcacttcggcgcaccgcgcaggctgcgcctgctggagatcgatgccaacagcggtgcagtgcgcaccgttcttgaagaagccagcgacacccgcctgcagctcaacgtgtattcctacaaccggccagcggtggccatcctgcccggccaggacacggctgtgtggttctcgcagcgcgatggctggggccatctgtaccgggtccgcctgtccgacggcaaggtgctgcgccagctcacccgcggccaatgggcggtgcgcgacctgctgggcgcggacgctgcgggtggctgggcgtacttcagcgccggcggcgtcgacggtggcgacccctacgtacgcggcctgtaccgtgtatcgctgcagggtggaccggtccagcgcctggccgccgatggcaacgaccatctggccgatgccggcaccggcgcgttgttcggcgggcgcgccccccaggcgctgtcgcctggcggtggctatctggtggataccgtttcccgtctcgaccagccaccacgcaccgtgctgcgggccagcgatgacggccgtgaagtgatggtgctggaaacagcggatgacagcgcgatcgctgctgccggctggcgcccaccacggcgcgaacggctgctggccgccgatgggcgaacgccgatcttcgccaccgtctacctgccccgcgactatcgcgacgacggccgctttccggtgatcgacgcgatgtacggtggctccttcgtcagcaatgcgccggtgacctacgccgaggcggtgtccgccttgaatccggtgtcacgcgccagcctggccgaactgggcttcgtggtggtcagcatcgacgcgcgcggcaccggtggccgcgacaaggcgttccatgacagcagcttcctgcacggggcagatgtccagctggatgaccatgtggttgcgctgcgccagctgggcgaacgctaccggggcatcgacctgcagcgggtcggcatctacgggcattcgttcggtggttacagtgcagcgcgcgccctgctgcgctatccggcgttctacaaggtgggcgtggcctcggccggcagccacaatttccagggcatgtacggcggtgcattgcacggcatggaccggctgttcggtggcgtgctgccgccaacacccctggccgatggcgtgccggcgccctttgccggactcgacaatgcagcgttggccggcaacctgcgtgggcatctgatgctggtctatggcgaactggacgagaacgcgccgccggcgctgaccctgcagctggccgccgccctgaacaaggcccagcgcagctacgacctgctgtacctggcccggcaggaccacgaactgttccgcaacgacgccacctacacgcatcgcatgtgggactacttcgtgcgccacctggccggccagcagccaccggagacggtgctggcgccgctgcccggtgggccgagctga

SEQ ID NO: 514529 - DNA, 678 bp, Stenotrophomonas maltophilia
atgaagccggagtatgcgtactgtgcacttatcgacgtccttggatacaagcaacgcttgaaagaagataaggacggagggacgcttacctttaaggacgatcttgaagttgccctgaggtgcttggagtctgttaattctgcagttttctcagtgcaggcaatttccgatactattgtgattacgtgcacgcaacatgcgctgctaattgattttctggatgttctgaagaaagtgttcctgggttttttggagagagggctgtttgtgcggggaggagtggcattctcgaagcattttcaatcccagaggctcacctatagccatgcaatagcacgcgcctatgaattggagtctggcagtgctatttaccccaggattgtcattgataggaatatcatagagatgaatgagggtccgtcgtccgtgaagagtttgcgtgggagtggatatatcttcatgcagaatggggtttattttcttaatgttgtagactctgataatgttgagaatgttcattcttgcggtgagaggttgtatcgccgcgataataattctctgaagggtcaggagggggctttcgggaagcatgtctggttcgagtcgtacgtgcgaacatgcggagtgacttatgggaagaatcttcttgcgtatattgatcctatgacctcttactga

SEQ ID NO: 514530 - DNA, 1029 bp, Stenotrophomonas maltophilia
atgacaaagattgtgacgctgtataacaacaaaggcggggtctcaaaaactacgaccctcttcaatattgcggcctatctttcgacgatagggaagaaggttcttattgttgattgtgatccccaatgcaatgtcacggagttgttctttgcggctagagaggatgttgataatcctgattttgagttgccgggaacatccatatatggcgcgctgctgccaaggtttaagggacagcaagccacaattaaccaagatcagatcgagcttacggagcacaatctgtactctggtctgttcttgttccgcggagacatggaattcgcaagggctgagacatactttgggaccgcctggaatcaggcgattaccgagaatatccatgagaagaatacgtacgttgtctttgacaggctgatgaagtctctcgggaaggagcggaatttcgatttcattctctgcgatgttggtccgagtactggggcaattagtcggacggtaattctgacgtgtgacgagatcgtaattcctctggttcctgatagattctgtttccaagctgtgaagttgcttgggcagatcattaaggagtggattgatcggcacaaggtgattagcgagtcccttgttccattcgaggtcgcgccttttgctggggagcctaggctggcaggaactgtcgttcaaaacttcaaagtccatagtggtgctcgagcgaagcagtcctatataaagtggcaggataaaatcactcagcaaataaatttgtcactaactggtcccggcggaattccaatcaagagtggcttcaatacggcaagcccatacattgcatcaattcgtgatgttgcggtccttgctcctgtggcgcagatgtttggtcgtgcaatatttgatattcaacaagagcacaccaaagaggcgtccaccgacggaagcatgtactacggttctgtatggactccatgggaggataggatgaaatcctacaaggaagagattgctaaaatctgcaaggcaatttcatga

SEQ ID NO: 514531 - DNA, 636 bp, Stenotrophomonas maltophilia
gtgctgaccgcttcacaactggcgcaaatcatgcaatgcccgctcgcccgcgctcagcgctgggtggcaccgctcaatgcggcgatgaagcgtttcgggatcaacacacccgtgcgcgccgcctactttctcgcgcaggtcggccacgagagtctgagcctgtcgcgggtggaagaatcgctcagctatagccgcgagcgcctgctcgaagtgttaggcaagtacgttgaaggcccggaggctgctgcgttcgtccacaagccggcgaaactcggcaaccgcgtctatgccaaccgcaacggcaatggcaacgaggccagcggcgacggctatctgtttcgtggtcgcggcccgatgatgcacaccgggcggggcaactaccgccatatcggccagctgatcggccagccgctggaagagatgcccaccctgctgatcgagccggaaatcggcgccatgggcgcagcagcgtactggcacgacaaggggctcaacgtcttcgctgatcgcagggatgtgctttcggttgggcgcggcatcaatctgaccacggtccactcgcgtcgcacgcccaatggccacgctgatcgtgtggcaaggaccacacgcgccctgtcggtgctgggggtgcgttga

SEQ ID NO: 514532 - DNA, 330 bp, Stenotrophomonas maltophilia
atgaacaccgaatccgacaccaccaccgctgccgacgaaaccaccgacccgaacgtgatcgtgctggaaaccccaatccagcgcggcgagcaggtgatccgctccgtccgcctgcgtaagccgaccgctggtgacctgcgtggcatcaagctgcacgacctggcacagatggatgtgactgcactggtgaccttgctgccgcgtatcacccagccgttgctcacgcagcatgatgcggccaagctcgaaccggccgacctgctcgaagtcgcgcatgtaatgagcgcttttttcgtgccgaaggcgtcgaaggaatccccgtctgcgtag

SEQ ID NO: 514533 - DNA, 138 bp, Stenotrophomonas maltophilia
atggacacactcattttcctcgcctttgcggcgttcctgctgtgtgcagttggcgcgctgctggtgtgggcggtcagcgctgcatgccgcttcctggcggcgctggtagccgatcccacggacaccacgacgccgtaa

SEQ ID NO: 514534 - DNA, 390 bp, Stenotrophomonas maltophilia
atgacccacgacctcacccctgctcctgccaatgctgcccgctccctcgatccgctgcacagcaacgacacagcacacgcctcaaagacccctcttacggcagcgcaggctgccttggtgctatcgctactccagagtaatgacgaatttcgtagcgccttcgccagttcccccagcctggcgctgcgtaatctcggggtagcccccaatgcagatggctcgatgtgcgcgccagtgcaggccctagccagcaaagatgctttcgcagccgtagccaaagcccttgaacagcatctccagtcgcacggcgcgtttgtccttccccacttgttccaagccgacagcatccgggaccaggtcagactctgcgaaatcagccgcgccgcctga

SEQ ID NO: 514535 - DNA, 702 bp, Stenotrophomonas maltophilia
atgcgcatcctgatcgttgaagacgaaccgctggtacgccaacgcctgcagcggctgtgcgccgagctggcaggcacgcgcgcacgcttcgatgccgtggccgatctggaggcagccggcgaccgcctgcagcgcaatgtctacgacggcctgctgctggacctcaaccttgggggtgaggacggtttcgaactgctgcggcgtgcggtagccggccgctaccagtgcgtagtggtgtcggcccaccgtgatcgtgcgctgcaggcatttgaacatggtgtactcgacttcgttcccaagcccttttcgcgcgaacgccttggtcaggcgctggaacgcttgttcgataccggtggtatgcgttcaggccgggcacgctacctgggcatctggcgtgcgcagggaacggcaaccgtcgagctctcggaggtgatgtggatcgcggcagatggcgactacagccaggtgcgcatgcgcgatggccgcagcgagctgcatgacaaatccctgactgcactggcctcagtactgcctcaggatttcgtccgctgccatcgatcgcacctggtcaatctgcggcacgtgcgtacgttgcatgcgggttccggcagccgctactggctggtgctgagcgacggtagcgagctggttgttggccgcgcgcacatcgtggcgctacgcgatgcgctgggactggggtga

SEQ ID NO: 514536 - DNA, 1323 bp, Stenotrophomonas maltophilia
atgagctggggtctcagcttcctcgggctggatgccgccgcagatgagcgcgcgatcaagcgggcctatgcccagcgattgcggctgacccgtccggatgaagatcctgccgggttccagcaactgcatgaagcctaccaggccgcattgacgtggctgaccgcacgcgatgcggatgctcccgccctggcatcgggaccggccacacggcacgcaatcgatccggccgccgtcgccacgcagctggccgcagtggcatgcggggccgacaacgcgcacctcgtgcaggtactgcagcagcggccggaactatggtcgctgcgcgacaagacccgcatcggttacgccctgcttgaacacctggcccaaaccgaaccggccctttcaccggcagcatgggacacgctgtcggcatgcttcggttgggacgacgtggcctttgaccggaatcgggcatcgctggatgcgattgcactccgctgcaaccagcactggtggttgtcaccggccgggctgcccgagctgtcgcagcgctatctgcgcatcaatgacgtgctgttggtacccggcagcgacgtgctgcccagcctgcgtgaacggcgcccgttctggcgcaacctgacgagcacgctgcaaccttcgcgggcgcagcaggcgatcggcctgctgacggccttgggctactggtatgaccggcgcttgcctcctgggctggacggcggccaggtggcgttctgggcgcggttcgcccgcgaaggcgatacgatccatctgctcagcagcgggctgcgtgtactgatcacggccctcgtcatggggctgatatgcagctgggcagtcttttccagctggccaatgccaccatcggaagatggaacgttgagccgcacgcaacgcgccgtactgagcatcgtcattgcagtactgctggtgccgacgctgtggctggcagcagtcgtactgggcgcgttcgtccgctggcaggcgacgcccgaacatctgcccgcggccctgccctggctgcgcaccgccgccattccactgggtgtgctggcctcatatggcgggttgtacttcgccctgcacaacacgaccggggttcctgtcgccgggttggtggcggtcggcctgttcaatgccatgctgctgttcgtggcctggcagcgatacgcacgtcgcaaagaggcagctacggcaacaaagctggggccgctggaggtcgtcagcatcctgttgatcgtgccggccgcattgctggcactggcgtactggctgatcgatctgcggctgcatggtcgaccgccgcgcgcctccgaccgttga

SEQ ID NO: 514537 - DNA, 1689 bp, Stenotrophomonas maltophilia
atgctcgttggtatcgatctgggcaccacccactcgctggtgggcatgtatacgccggaaggtggcaggctgttccccaatgcacatggcgaactgctcactccttcggtgatcagcctggccggtgatgccgtgctggtcgggcaacccgcccgggaccgcctgatcagccatcccgcgcaaagcgtggcgctgttcaagcgctggatgggcacggaccgcacgaccacgctgggcacgcgctcattccgccccgaggaactgtcgtcactggtcctgcgctcgctggtagccgatgccgaagcggcgctggggcagaaggtcgatgaggcggtgatcagcgtgcccgcctacttttccgatgcccagcgcaaggccacgcgagcggccggcgaactggccggcatccgtgtggagcgactgatcaacgagcccaccgccgctgcgctggcctacggcctgcagcaacgcagccaggaaggccgggtgctggtactggacctcggcggaggcaccttcgatgtgtcgatcctggaagtgttcgagggagtggttgaggtccatgccagcgcaggcgacaacttcctgggaggagaggacttttcggccgtcctgctggatgcactggcgaccgagcacgcgatcaacctggaggcactgccgagcagcgaacgtgcgcagctgacacgccaggtggaggcgttcaagcgcggcctcagccaacagcgccccgcggtcctggaactacggatcgaaggtcgggagctgcgctgggagctggatgaaagccgcttcgcagccctgtgcgaaccgcttctgcagcgtatgcgtgttcccatcgagcgtgccatccgtgatgctcgcctgcagccggaaatgttggatgacatcgtgctggtaggcggcgcagtacgcatgccgatgatcagccgccttgtcacacgcatgtttggccggctgccgttgcggcatgtacatcccgaccatgcgatcgcattgggtgccactgtcgccgcaggcctgaaggatcgtcaccaggccctgcgcgaagtagtgctgaccgatgtctgcccgtacaccctgggcacccaggtgacgcgccggagccccgacgggcgtgaacacagcggctatttccatcccatcatccaacgcaacaccgtggtgccggtcagccgcgaggaccgcctgttcccgctgcgtgatcatcagcaggccctgctgatcgacgtgtatcagggtgaatgcccgatggtcgacagcaacatcaagctgggcgaacttcatgttccgctggcccggcccggccccgcacacgagtgcggcgtggcggtccgcttcacctatgacatcaatggcctgctgcaggttgaagccaccgaagaggccagtgggctgcgccatgagctggtcctgcagcagaatcccgggttgctgtctgcggcggagatccagcagcgcctgcaggcgctgcaggggctgaagatccatccacgcgacgcccagcagaacctggccgtgatcgcccatgccgagcgcctgtatcaggagtgcatccatcatcgcgaccagttgcaggcgtggatggcgcagttccgcgatgtgctggatggacaggatctgaagcacatcgatgcgttccggcgcgagctgtccaacgcactggatgagctggagcacaaggcatga

SEQ ID NO: 514538 - DNA, 525 bp, Stenotrophomonas maltophilia
atgacattcacggttatggagacgatcaagaactggggtggtgttcgaaaattcctcatgggccgtaaagatattctcgaggcgttcgccctttacgaaccaagtgaagacgagaaaaagtggactaccagtacaaaagacgccaattggttctatcttgaaggcctggtgcaaaaagaaacgaaaactccgattcacctttcgtgtaactcggttggtggcgactggaaaacgttccacgtcacggaatacgcaaacaatctgcatgtggggtcattcgagattgttgttcggggggatgatgacagctttattgagcccgtggaaagtaattttcgttgcatcagaagtaccaccattctcactgatggcgcttgtagcaacatgaaaatatctgggaaggaattgaaaagaatcgaaaaaattaggcaggaaggagggaaaataagctctcccaagggagacatgaatcacctaatctacgcaatatcgcagtgccaagtgacttgggccccgtcgaagtag

SEQ ID NO: 514539 - DNA, 372 bp, Stenotrophomonas maltophilia
atggacctaatcgcaaattactcccggatgaaggttgtaaggacctacacggcaggcgacccttttgcagggggatcaccgaatggtgctgtagtgggtctggtgtgggcgctgtgcgttggggtccgcaggcacgtcgagttcatggggttggaatatcttcgaagcaatctctttggcgggggcttccgcttgaccacccagcgcattgagccagaacccaagtccatcctcagatccatcacccggcacgtgcgcgatgaaggagcgcgcttgctctgtgacggcaagtgctatcgcggacagcgtagtcatgcgcagaagaatagcttggtgacctccgtggatggctcgccaatcaagcaactctga

SEQ ID NO: 514540 - DNA, 1620 bp, Stenotrophomonas maltophilia
atggatgaaacaaaccgcctcagatcgctgctggctcctttgcagggcctgcgtggctggcggccggcacaggccacgcgtgatgccatcgccggcgtgaccctggcggcgatcaccctgcccgaacagatggcgacggcgcggttgggcggcttcgaaccgcaggtcggcttctacgccttcgtcggcgccacgctcggcttcgtgctgctgggccgcaaccgtcggctgacggtcggtgcggattccaccatcacgccgatcttcgcgctcaccctggctggactggccgcgcagcaggccagcgcactggccggaagtgccgtgctgctggcgctgctggtcggcgtgttcctggcactggcggcactgctgcggattggcgtggtcgccgcgctgctgtcggtaccggtggtgaccggctttctgggcggcatcgccgtgcatatcgcggcctcgcagttgccggtggcactgggcgtcagcctgccgtcgagcgagctgcccgaacgcctgtacgcgctgctgcaggcactgccgcatgcgcagctgctgccggccctgatcagcttcggcgtgctgctggcgatggggctgtgcgaccgcatcaatccgcgcattcccggcgcgctgatcgcggtggccatcgccacgctgctggttgcctggctcggtgccgaacggctgggtgtggcgacgctcggcgcggtgtcaccgtatcctccggcctggcagctgcccgcgctggcgacgctcaccacgctggtgccgctggcgctgctgctgaccctggtgatcatcatgcaggtggccgcggtcgaccgcgcgtttccgggcgaggaagagcctgacgtcaacaaggatttcctcggtgttggtgccggcaacctgctgtcggctgcgttcggggcgttcccggtcaatgccagcccgccgcgcaccgcggtggtggtggaagccggcgcgacatcgcagctgggcgcactgatcgcggcggccctggtgatgctgctggcgttctgcggtggcagcgtgctcggtgccattcccgatgcagcgctggccggcgtgctgctgttcgtagcggtacgcctgttccgcctgcgcgtgctgatcgacatcgcccgccgtgcacgcggcgaagcactgctggcggtgctgaccttcctggcggtggtctgcctgccgatccagtcgggcattgcgatgggtgtgggcctggccctgctgcatggcgtgtggatgatcgcgcacagtccgatgctgacactgacccgcctgccgggcagcacggtctggtggccgggcagccgtggcgagaccgagccgggtgtaaccgtgctggcgttccaggcaccgctgctgttcgccaacgccgacagcttcaagcggcagctgctggccagcatcgatgcgacaccggcgccgggattgatcgtgctggaaggcagcgcgatcgtcgagatcgactacagcgctgcgcagaccctgcgcgaggtgatcagtctatgccagcagcaggggatcgcgttcgtcatcgccgcgttgctggggccggacggaaccacccacagcgtgcaacaggccgttgaccactaccgcacacgaggtacgccatga

SEQ ID NO: 514541 - DNA, 621 bp, Stenotrophomonas maltophilia
atgacccgcattcccgaaccgcggctttcgccggttgccatcctcgagctgcgtccgacgcagatgagcgtgggcctgctggaagtgcagcgcaagcgcgcgcaatggaagcacctgccgaaggagggggaggagcgctacctcgggcgacacatggtgccggtggtgttggggccgtcgaaccggctgtacctgatcgaccaccaccatctggcgctggccctgcacgaggagggcatcgaacacgtgctgaccgtggtccaggccgatctctcgcacctgccgcgaaagctgttctggaccgtgatggagcgctattgctgggcgcatccgttcgatgccgagggcgtacgccagccagcgtcggcgatgccgaagtcgctgctggacctggccgatgacccgcatcgttcgctggccggtgaggtccgccgccggggtggctacgccaaatcagtgcagccgttcgccgagttcctgtgggccgatcatttccgccagcacatgacccgcaagctgatccgccgcgatttccagcaggcggtaaccaccgccaccgaacatgcacggcacagcgacgcgcgctatctgccgggctggtgtggggtcgagcacgactga

SEQ ID NO: 514542 - DNA, 462 bp, Stenotrophomonas maltophilia
atgacgtggcttgaaacccggatcccgccgccgctggtgatgctgtggtgtgcggggatcggatggctggccagccgactgtggccgggtgcggtgctgcccgtgccgatgccggcactgctggccaccggggtggtggccttcggcgtgttgctgaacctgatgccgaagctggccttccgtcgtgcgggcaccacggtcaatcccctgcggccgtcggcggcgagcacgctggtcacgcacggcgtgtaccgctatacgcgcaatccgatgtatctgggccaggccacggtgctggcaggtgccatgttgctcctgcagaacccgggcgcgttgctggccgtgccgctgttcgtgctgtacatcaaccggtggcagatcattccggaggagcgggtgttgtcggcccgctttcccgaggcatacccgctgttccgccagcgtgtgcggcgctggctttag

SEQ ID NO: 514543 - DNA, 483 bp, Stenotrophomonas maltophilia
atgttgaaaggattgaagccgctcgcggcagcagcgctgtgcctgcttggcctgtcagcctttgcccaaggcgcggttgccgcgcaatgggtcgagactgaccgtaccgcctatctcaaaaccagcttcttcggcagtttcgcttatcacacctgtgatgccagtggtgcccagatccagggctatccgggcagctgcaccagcgatggggccagcggttggacggccaattacgcggcgtcgagcggccaggccaacgatcagctgtcggcctgcaaccacaatccattccagcttggctcgcgctgctatggcctcgcgtatgcgatcaacggtcaagtctacgcaggcgggctcccgattgcctgtaacgtcggcacgcgtgcggtggtcacttcgtcgagcatggaaactgtggagatccagtacgaagagctcgatgtggacaccatcgagtcggcgcgcgagtacgtctgccagtaa

SEQ ID NO: 514544 - DNA, 216 bp, Stenotrophomonas maltophilia
atgccgtcgcgcccggcggtgtcctgcgttctgcaggaggtggccgcgttcatcgcgctgcgcgacgccagggccggggaaaacgaaaaagccggaaccccttgtttgacgagggattccggcttttcgtggatccttgcggacccggtattggtggaggtgggcggaattgaaccgccgtccgaaggcactccatccccagcactacatgcttag

SEQ ID NO: 514545 - DNA, 1314 bp, Stenotrophomonas maltophilia
atggaaaattcgagatttcaggagctgcatgtctacggttggcggcagtttcactccgttcacatcccggttcatccgcgtcttacagtaataactggcgccaatggggcaggtaagacaaccctgcttgggattatggcccagcatttcggctgggagcggccgttacttgcaacgcctcaaagatccgaggatggaaccgttagttatctgacaggtgccggttatttgaaaggagcactcagggagctcctggatatgatgggtggacatcccccggtgatgatgtttgggcagataacgccgatcggtaagattatctactcgaatggggtgagtagtgttatcagtgttccctccgctgggggtattcagtacagcattaatattcatgcacagcagtcggtcgctgggctgtacattccgtcgcatagggcgctgtctaagtaccagccggtcggatcgattccgaccgaaggcgtttctgccagtcaggcatatcaaacatataaaaatgaagagtacaaccgttggagtggaggcggttacggagcatcgccgttctttcggttgaaggaagctcttattgctatggctacatttggcgaaggaaacgcctacgtcagggggcggccggatcttttgaggacgtacgtagatttcattgaagtgctgaggaaggtgctccccgaaacgctggggtttgagacgatatcaattagaactccagatgtgatcttggttaccaaaagcggcgaatttttgctggatgccgtttcggggggtattagttccctgattgatctggcttggcaggttcatgtattctctcaggataagaaggcgtttacggtggtgattgatgagccggagaatcatcttcatccatcgatgcagcggcggcttcttccaagttttacagaggcattcccctctgtgcagtttatcgtcgctacacatagcccattcattgtaacttccgtgaaggattcgagcgtcgttgtgctttcctacaaggaggatatggatgcatctgatcagggaatcgcaatggagcggagtgtccggtcgacgtcacttgatcagataaataaggcggggagtgctgacgaaattttgagggatgttttgggtctcgagtctacagtccccctctgggcggctaaagagctaaaaagcgtcgttgatcgctaccggggggtggattttactggcgatagtgtagatcaactgagcgctgagttggatgcgttagggctttcgctgaaacttccagtcgcgatcgaatctatattcagtgagggcaagaaatga

SEQ ID NO: 514546 - DNA, 621 bp, Stenotrophomonas maltophilia
atgattgctctttctaaagtggataagcctgccattcttgaggaaaaggcagcggcatggacggaggagttgagggcgattctcgctgatggaaaggagccaacaaagtatcttctatctcgatactcacatccggacataaaagcatcgcttcttctggagacttccggtaagtgtgcgtattgcgaaagtgtttttcgtcacgtgacctatggggatattgaacatatccttcccaagcatgcccgcccggaacttaggtttgaatgggctaatttgaccatcgcttgcgatgtttgcaatacgggaaagggggaggtcgaagtatttgatccgtatgtagaagatccggtgcgtgcttttttaatcatgggtccgttaatttgggcgatgccggggaatgatgccgcgctcattgcggaggctagacttgatctgaatcgttcggcgcttgtacagcggagaattgaatggttggagtacgtgcggagcttgatcgcttcagcgcgagacaagccccgcgacgtgagagatgcaattattgagaaggtccgaagagaatgcgatgtctcgcggccatactctgcgtttgccaagcagttgctggatcttcctctgtag

SEQ ID NO: 514547 - DNA, 633 bp, Stenotrophomonas maltophilia
atgtctcgcggccatactctgcgtttgccaagcagttgctggatcttcctctgtagtcctttggagcgcacggactgggagcatatgctcccgtcgagtgtttattggatgggagtttcaggcctaacttcccgacaagcccactcaaccagcccccggcaagccagaaacagcccatcaacaaccccctcatccaaatgcctctccgggtccgctgccacccggcagcggtctgccgcgtgtagtagctccagcaccgtcagcgcccccaccatcgcgcgctcgcttctggccaggctcacgcggcggccgggcgacacatcggtttctggccatgggtgcccatcggctccctcgcagctgcgcatgcgcttgaggatgccgagcagagaattcaggtcgggcaggggtgtgtcgtcgttgatgggttcaacaacggtgtacgaggagaaggtgtcggattcgttcatggcgtcggcttccgtggctgtgcttaacagcgccaccgcgaagaggtggcggacggtgcgggttccaaaccgggacagacagttgtcaataaccggcgggtccgaagacccccacacaccgcccgccataaaggccgacggattgcccgccggcaccggttaa

SEQ ID NO: 514548 - DNA, 1308 bp, Stenotrophomonas maltophilia
atgcgctaccttcttttatgtgggtgcgctggtggacggtgcgttttacatcgttttctgccccattatgaaccagctgcgccgttgcatgctaatgatgcgcttgatcaaaaaccgagggcacttgtgaagatttcgctgctgaacaacctctactcgccttatcacgtgggtggtgcagagaggtccgtggagtcgcttgccaatgggcttgttcagcttgggcatgagattaccgtgctgaccctgcatgagggtcgatctatcgacgttgagctcaacaatggaatcaggatatttcgaattccgttgagaaattactattggccatttggtgctaagcatcgtcgagcgtcgtggcagaaggtcgcatggcacgcgagggatctctttaatatagaggctcgcagggatttgttacgcgtcattggggagattcgccccgatgtcgtgcatacgaataatgtttctggtttctcggtatccgcgtggggtgcggcttcaagtttagggatcccggtcgttcatacggcaagggactatcatttgcttcaccccaactccacgttgttcgggggaggcggggcaaaggatgagctttctcttgattcgaggttgtgggtcgcagggaagcggtcattctcgcgcagagtcaattgctttgtggcgataagtgagtacgtgagagaaattcatctccgcgccgggttgtttgagcatgctttggccagcgtaatctataactctgtgtcaacccctgatcgggattatcgtccggccgccctcaaggctgagaagatatatggctttattggtcgtctagatccatcaaagggagttgaaaaggtcattgaggctgcgaggctgctgcctggacgccggtggatcattgccggcgaggggcagtctgattatgtcgattcgctccgccgcctggctccgtcgaatgtcgacttcattggcaaggtccgtccatctgagttcttttccaagataaacgttctgatgatcccgtcgctttgggccgagcccttgggtcgggtagcaatcgaagcctacatgcatggcattccggtcatctcgtccggcctgggtgggcttggtgacatcgttaaggatggtctcaccggattcttcttcgatccgttcaaagtccagagcctactggatgccgtagcgaagctcgatgcggaagattatcagaaattagttttcaactgcaatgaatattcgaggcggttcactgagatttcggttgctggccagtacatcgaggtatatgggaatgcaattgcagggcgtcggtaa

SEQ ID NO: 514549 - DNA, 852 bp, Stenotrophomonas maltophilia
atgttgttcaacaggcgtgccagagttgtatcgcctggattcactgcacctttggtggggctttcgcggtttgttctttccgttcatgaccttaaccatgtagatacagatcataatagtggcttcctcaaaaggctctactaccgagttgttctgcaaagggcgtgcagaaaggctgccgttgttctgaccgtatccgaattctcgaagcgcaggatcctgaactggtccggagcatctagtgaacgagtagtggttgttggtaacggcgtttcggaagtctttctgagtagtgtcaagaatgatgtgacgcgggatgcggggcgcggctacgttctctgcgttggaaaccggaaaatgcacaagaatgagcatgcggcagtacgtgcgctggccgcgctcgaggactatcccgacttgactcttcttttttccggagagccttgtgatgagctggtctcacttgtgctgcagcttggtttgcaggaccgtgttcgcttttttgggtttgccagtgaggcgcagttggctgcgctctatgcaaacgcttcgctgcttctgtttgcttcacactatgaaggatttgggcttccagcggtcgaggccatggcaactggttgtcccgtgattgcatcaaggacaactgcattaggtgaggtgtgtggtgacgcagctgttctggtttccccggagtcagacgaggaaatcgtatcggcagtccgggcagtccttagttcaattgatctgcgaattgaactcaaggaaaagggcttgcgacgctcagcagatttttcttggactgcagtacatctaaggtcagaggtggcagttgacaaggcgttcggtttctga

SEQ ID NO: 514550 - DNA, 1227 bp, Stenotrophomonas maltophilia
atgattaggcttatactaacggcgcttgttttcattacattcgtgttccctaaggctggattcaaggtctcaggatttccactctatgcttcgctattgtccatggcgatttttcaggtcatagggttaagggagtgtttgcgatcaattaaagaggcgctctgggttgcgtcgcttttgagtgcctttttggtattcttggcgttgaatgccaattacattggatcatcctcccttcctctggttcagatctttgggtatgtcattgctctcactgcgatgccagtgttctttggtgcacgctcagttgagttgtattacaggaatgctgaggggatcttgaggttcgcgttctggatcattgtagtttattcatttcttcagaaggtgtttggtgattacgccttggttgtgcctggccttactgcgaactaccaagatgcaaccacgccaaattttctgtctgaaaagaataatatgatttggggcatcggatatcttaaggcaacttcaacatatcagaatggaaatttgtacggagtaaacttgttgcttattgggtttctctacatttcttccctcagaagacaatttaagtcgtttgctattgcactggttgccatgggtttaagctgcattctgacggcttcggcctccgtctatctcggattcgcggcgggcgctttgcaccttgcactcagctacaaaggtggtgctagggctgcgattcttttggtgatagcgactgctctggtgggtgtgcctttggttgccgttatgctgtccggtgacagtattatcttcagtatcctccaagagaggattttgaatcgagatctgacgcaaggtggtggtcgtgtagtcaaggttgttggctacctggatgcactcattgaggatcccttggtgcttttcacgggcatgctcttctacccgagagtcttctctgaaatatatgaaattacctacctctccgcacttcagatgtttggtcttttcgtatctatgagctttgggttgtttgtggcgatcaagtcattcatgcttcgcaagaccgtctatttcacgccaattgttgcgtatctggttgctgcggtttccgatggtgcttcttggctgccgcccacgatgacaaatttcttcttggttcttggtatttgtcacgcgtggaaatcggtggatgattcgcgaatgactcattctttgaaagtcagtgctcgaaaatag

SEQ ID NO: 514551 - DNA, 948 bp, Stenotrophomonas maltophilia
atgaactatagaagcattgatgacctatccctactgatcagcaaaaatctgcacaagattgcgcaggacaccgaactggttgtcgcaatacctagaagtggaatgcttgtagcaagcattattgcactgaagcttaatctgccactcactgatctggcgacctttgtacaaaatggaggcattgtcaaaggcagcagccgcagctataagatgaatcacctaatccggtctggcgatgcacgccgaatcctgctggttgacgatagcacttcttcgggcgccgcaatagcctcagccaaggctcaacttacgaaatacatcgaagacggcggccatgtaaccaccatggcagcttacgttgagccgaagagcagggacctcgtcgatgtttactttgaggtcgtgtcacagcctcgcatgttcgaatggaacataatgcaccacccacgcctgtcagaggcatgcctcgatatcgacggcgttctatgtgtagaccctactcaagaggaaaatgacgacagcttgaagtatctggaatttatccggagcgcaaagccattggtaattccaacgacagcggtcaagcaccttgtaaccagccgactagaaaaataccgtgcagcaactgaggagtggttggagcgaaatggggtcaagtatggaacgcttcacatgctggatgtcgcaactgcagaagaacgcagaagactgaacctacacgctaaattcaaggctagcgtatatgcgagcgatgcctccgccaccttgtttgtagaaagcgagctacaccaggcgattgatattgccaacaccgcgaagaaacctgttttttgcacaacagacaaccgaatgtatatgcccggcgcaagcctcggccgggcaaaagttgcaacgcagcagttcgtttcaagggtaaatcggaagctgcgaaaggtatttctttcgtga

SEQ ID NO: 514552 - DNA, 1479 bp, Stenotrophomonas maltophilia
atgagcctgcgcacacaagcattctccgccggacgatggacgtcttcttcacttctcctgcgtgctgcgttgcagtttgcgcagacaatgattctcgccagactattaactccggcggattttggcgtgatggccatcgcccttgcggcatacggcgtcatttcccttttcgttgatctcggactatcgaatgccctcatccatttcccaaagaggacacctggaatactgtcctccctctactggctaaaccttgccgccgccttggttatgatgctgctactgatggctgcagcgttgcctatagcgaggatctacggccaccccgagttgattccagccatgctcctgatcagcttggctatgccacttagcgctgccggccagcagttccgcgtactggcagagaaggatctaaaattcaactctcttgcaggcatcgaagtcgcttcagctattagcggattcgtctgcgcggtcctggtagcgatgttcggcggcggaatatattcactggttgcaggcattgtcgccacgagcgccattagcagcattctcgcctgggcatacctatcgaagggacttcgaccgggacttcattttaatttgaccgaggtgaagccgcatctgggctttggcacatatcgactcgctgacacattacttataagcgcccaactacaggtggatgtactgattggcagcgcagtcgccgggccagcggccatgggcgcatatacgctacctcgggacctgacccttcgcctcgccaataccgtcgtcaacccggtggtgacccgtgtcggattgcccataatggcaagggtgcaagcggatcgagcagccttaaagtcgatctacctccagacgatgagaatgacctcatcaatcaactttcccatctacgcggcgcttgcgctatgggctgaccttgtagtcgagattttcctaggtccgcagtggcacgatgccgcgaacttcatgcggattttcgcgatctggggacttctacgctcgacctcaaaccccgtcggcagcctactgaacgccacaggcaacgtgcgccgcgcattctggtgggaccttgcattactggctttggtgcccggactaatgtatctgggccttctaacatcggaattgcgtgggttggcgatttcgctggtatttatacagtgtgcaaccttctatccgcactaccgtttcctggtaagtcctgcctgtggggcaaccttcggcgagtatgcctcggccatgactcctccactaatctgcacctcgatcgctgttgcggcagcgtggatggcaatgcaactactacccattgaacaaagtcagctcacgaccgcaggcggcatcgcagttggcatatgcacctatctcttcagcagcactctaatcaacaaagcttggcttaaggcgatgatggaactgctcgctccattgcttcgatcagtgaccgcccctaaggtcccatag

SEQ ID NO: 514553 - DNA, 1107 bp, Stenotrophomonas maltophilia
atgcgtgtagcaatcatccacgactggcttacagtcaatgcaggtgccgagaaggtactgaagcagatgctactgctgtacccccaggcagagatattcactcgggtggatttccttcctgaggaagatcgctctttccttggcagccacaaggttcacaccagtttcatccagaaactgccacgtgcacgcaaaagctatcggagttaccttccgctcatgccgcttgccatcgagcagtttgatctcagcggcttcgaccttgttctatcaagcagctacgccgtagccaaaggcgtactcactggcccagatcaagtgcatgtttgctactgccactccccgattcgatatgcctgggaccttcaaccgcagtatctgcgcgaatctggactggatcggggcctgaaaagtgtcatcgcacggatcattctctcctatattcgcatgtgggacgttcggaccgccaatggtgtggaccatttcatcgccaactcgacgttcattgctcggcgtattcgtaaggtctacgggcgcgaatctgttgtgatcccgccaccagttgatatcccggagactctccccagccctatccgccaagactactacgtcaccgcttcccggctggtgccctacaagcgcatcgacctgatcatcgaagcgttcaatcaaatgcctgatcgcaagcttgttgttattggcagcggcccaatgctggatcagatgaagcggctcgccaagcacaacgtgagcgttctcgggtaccagccccaggaagtgctcgagaagcatcttgccgaggcacgcgccttcgtgtttgcggctgaagaagactttggtattgcgccggtggaagcgcaagcgtttggaacgccagtgattgcgtttggaaaggggggcattttggatagcgtagttgaaggaaaaactggcgtgtttttcgctgagcagaccgctgactcgattaaagcggcggtcataaactttgaacagacttcaaagaattgggaccataggcgtatagcaaaccatgcgctggagttccgcccggacgcattccgcatgaagttgatgcagaaaattgaatcggcattgaagtcccaatga

SEQ ID NO: 514554 - DNA, 294 bp, Stenotrophomonas maltophilia
atgcgggccgcggcaggagggctgatcgtcctcctgctggccggctgccagagcgacccggcgctgcacagtgcacggatcggtccggcgcagtatcggctggtggttgatcgctgccatgcgatcgaccgcgcacagctggaggacgatctgcaggccctggcctcgcggacgtgccgggcgggagcgggggcgttgcagaacatccagtccctgccgagccggcagggcagcctgttcggtgaatgcctgcggcgcggggcgctgcaggccgaggtgcactgtctgccctga

SEQ ID NO: 514555 - DNA, 783 bp, Stenotrophomonas maltophilia
atgcccagggaaaggcacagtaccctcttcgccatcgcaacagtacttgccgccactctggcgtcagccacggcctttgccgccgatgactatgacttccagcaatgggcggcaccgggcagctgcccaatgccacattcggcattgtcgcaaccgaacaccctgttcgacgtacgcgacccgcaggatgtctccgacagggtggtgaacctgctgttgtctttgcaaggcaagccaaccgatctgcacgcgctgcgattgccggcgctctgcgacggcctgcgactgcacctgaaccagtcgccgatgccacagccgcacgccgagccctggaaccccgacccggcgccggaacgtgcattgcaggtctccgcaatgaaccttcccaaaggaaaccagttcagccagcacctcgacgtcacctactaccccgcagcggtctacctgagctatacggtgatgaagatcagaccactgggcgaggagcggccccgtgacaacccactcgtgtacgaggatgttggcgcgcattgccccctgcgtgccggtgcactgcaacaacgcctgcttcaggccggctacgcacaggagattattggggaagagccgccgccagcgcagtacgcgttcattgaggccgggctctcctacgtgttcacccgggacgaccgcagcattcgcgtccagttgcagggggacgttgtcgaacaacggcgcgagccagcgtcgaagtgcgtggccctgatcaaggtcagcatcgaacccgagcaggaaggtcgataa

SEQ ID NO: 514556 - DNA, 999 bp, Stenotrophomonas maltophilia
atgccctccctggtgctacgccttggcctcctctccgctgccttggcggccgcccctacctacgccgcctgccccccgccaccggctgggcaccccgacatccgcgccctgggctactacaccgacaaggctggatcggtgatcgacccggtactgcaacagcagaacaaggacgccactgcgccgctggaccgctatgccgccgacgtggcgcgcatgagcgatgactacctgcgcaccggtgacccggcagcggcacagtgcacgctgagctggctgggtgcgtgggccgacgatggcgccatgctcgggcagatgatccgggtcaacaacgatcagtcgttctacatgcggcagtggatgctcgatgcggtagccatggcttacctgaaggtgcatgaccaggccaacccgcagcagcgcgcgcatatcgatccgtggctgcagaagctggcacgggccaacctggcgtactgggacaacccgaaacggcgccgcaacaaccactactactggggtgccctgggcgtactggccaccggcctggccaccgacgacgaggccttgtgggaggccggccacgccgccttccagaagggcatcgatgacatccagtacgatggcagcctgccgctggagatggcgcgcgggcaacgtgccctgcactaccacgactacgcattggcgccgctggtgatgatggctgagctggcacggctgcacggccaggacgggtacgccagcggggatcacgccatcgaccgccttgcccgccgcgtcatcgaaggcagcaaggaccctgcatggttcaacgaacacaccggcgttgcacagctgcccctgcaggccagcggctgggtcgagttctaccggttgcgatcaccggatggcggcctgtttgatgccgcgcatgcacgcggcccgttccactcgccacggctgggcggcgaccttacgctgatggccacgcatggcatcgtgcgcgcgccgctgcgttag

SEQ ID NO: 514557 - DNA, 3216 bp, Stenotrophomonas maltophilia
atgacccacccactccggatgtccaagcttacccttggtctcgtggccgcactcgccgccgctcccgccttcgcccagagcacctctgccggtgtcggcggccaggtgatgtccgccgcaggccagccggtcgccggcgctgaagtcaccatcacccacaccgagtcgggcactgtttcgcgtgccaccaccgatgcgtcgggtcgatacaacgcgcgcggcctgcgcgtgggtggtccgtacaccatcaccatcaccaagtccggtgaaggcaccaagaccgaagagggtgtcttcctgaacctgaaccaggtcaacacggtcaacgccaacctgggcggtgatctggctgcaacgaacctggatgccgtgaacgttgttgccactgccggttcgagcgtcttcagctcggaaaacaagggcgtgggtacctcggttgacggccgcaagctggagctggcgccgaagggcaatcgttcgttggatgacgtcgctcgtctggatccgcgcatcagcgtgactgaccaggccaccggcgcaatctcggtcgcgggtatcaacaaccgctacaacaaaatctcggtcgacggcctgtctcagggtgacccgttcggcctcaacgccaacggcatgccgtacaccggctcgccgatttcggtggacacgattgctgcctacgacatcaaagtcagcgactatgacgtgtctcaggacgtggtcggcgccgcgatcaatgcggtcaccaagtctggtaccaatgagttccacggctcggcgtactacgtgtacaagaaggccgacagcatggtgggcaagcgcaacggcgaggactacgatgctttcggcaaggacaccaccaagggcttcaccctgggcggtccgatcctgaaggatcgcctgttcttctttgggtcgtatgaagaacaggaaatcaccgatttcggtggcgcggcgtcttccgacggtctgagcactggtgcggtgacccgcgcggagatcgaccgggtcatcgacatttccaagaacaagtacgggatcgacccgggtacctatggtgcagccggtggcgtgaatctgaccaacaagcgctatctgggcaaaatcgactggaacatcaacgactcacatcgcgccagcctgacctaccagcagactgaggagtcgctgccgcagccgtacgacagcaacgcaaattctgtgattcttaccagtcgttggttcaccaagaccagcgagaccaagaacactgcactgcagctgttcagtgattggaccgacaacttcaccacggaggccaagttcagctaccagaagttcgaacaggtctcgggagcttcgcagaacctgccgaccatcaatgtgggtgtggccagcacccagtctggctcgagcaacggtgtgcgcctgggtgaagatcgcaaccgacacgagaatgcgatcaacaccaagaagaagaccgcctcgatctttggtacctactacgcaggcgatcacactatcaagggtggtttcgactatgaagataccgacgcgttgaatctgtatggccgagatctgcacggcgtgtatacctttgacagcatcgctgacttcgaagcaggcaagtactaccgctacgatgtgcgccgcccgatcggcgggtactccgaagccgacactgcagctgcgattggtttcaccatgttcagcccgtacctgcaggatacttggcaggtaaataacaacctgtcgatcacctatggtgtgcgcgccaatatcccgaaggccgacaaggcgccgccgcgcaagccgggcttcgaggaaaccttcggcttccgaaatgactacaagctcggcagcagcaataaggtgatcatgccgcgcttctcgttcaactacaccttcgataccgagcgctactcgcagctgcgcggcggcgtgggcctgttccagtcggtcccgccgttcgtctggcttgccaatccgtaccagaacaacggcatgacctcggcctcgttctgcgcctacggcaacaccgtggttcgcggctgtgtcccgaacaatggccagtacgcgttcagtccggatgcattcaatcagccgttcccgagcggtgccgccgcgccgaccaacgcgcagatggattccattgatccggacttcaagctgccgaccgtctggaaggctagcctgggctacgatcatgagctgccgtggatgggcctggtgggcaccgtcgaagtgcagtacctgaagaacaaggatgcggtgttctacaacgctctgaacattggtacgccgaatggccagctgttcgatggtcgtgacagctactgggtcactccgggcggcgtgaagaacaatggcagcaagccgggttacaccaccaactcgacctacctgaccaactccgacaagggtagctccactgcagtcaccttctcgctcgacaagccgatggcgaatggttggtacggcaacctgtcctacacctacaccaaggcaacggaggtgggttcggacaccagttcacaggcctggtcgagctaccagttcgtttcgcgcctgaacccgaacgaggagtatgccggcaccgccactcgcgagatccgcaatcagatcaagctgtcgttgggttgggagcacgcgttcttcggtgactacaaaaccagcattaccggcttctacactggtcgcaacggcctgccttacacgtggctggttgatggtgacatgaacggtgacggcattttccaggatcccgcgtacatcccgctgctgaatgacgccaaggtttcgtacgtgaagggcaatcgcgccgcaaccgccgacgagatcgccgagttccagcgccgcattgacgaaaatccgtacctggcagcgcgtcgcggttcggtcgccgagcgcaatggtgcccgcaacccgtgggtcaatcagctggatgtggccatccagcaggaactcccgggcttcttcaaggagcacaagtcgatcctgcgcctggatatctacaatttcctgaacatgctggacaagagctggggtcggacccgcaacgcgtctgacttcgatactcgctacctgaccactggcaaggtcaaggccgacggttcgtacgagtacgatctgggtcgcaactcgccgcaggaactgcgtgagtacgatttcagctcgggctacccgtcacgcgtcgtttcgcgttggtctgcaatgctgaccctgcgttacgagttctga

SEQ ID NO: 514558 - DNA, 333 bp, Stenotrophomonas maltophilia
atggcgccaatcgttcggctgtatgcgctgctgttgacagtcaacatcattcatccgttcgaggatggaaatggtcgattgatgcgagcgattgcgttcgtcttttcgatccactatcactgtgatttctttgctttcctggcgatctatataaaggtcatgcaaagagaatttgttcacgcgatcgaactggccgctgatggtgcgccaggtgccctggaggagttcaattgtgctgcgctcgaactcttcgagcggttgagcgtgaatccgggcgggttggaggagtgggggcgcggagtcctgcttggaaggattctggccgagccgtga

SEQ ID NO: 514559 - DNA, 1209 bp, Stenotrophomonas maltophilia
atggcccgtctgccctcccctgcgatgctgatgcgcgcgccgcaccggctgctgttcttcatcggcgccagcaacctgctgctggcaatgctgtggtggacgttgtggctgggcgctctgcgcggactgtggacgccgcagccatcgccgctgcctccggcctggctgcacgcgctgctgatgcagtacctggtgctgcccagtttcatcttcggcttcctgctcaccgtgttcccgcgctggatggcacagccggagctgccacgcagccgttacgcgccggtcggcatcggcctgtttggtgggcaggcgctgctgattgccgccgcctgcgggtggacacccgggctgtggcccggcctgctgctggcactggccggctggagcgccggactgatcgtgctgggacgcgtgctcaaggccgccggtcccaaccgcaactggcatgcgcgcgcctgctatgccgcactgctgctgggctgcctggggctgctgctgttcatggcagtggtgcgcggccacgccaccctgatgccggtcacggtggcactcggcaccttcggcctgctgctgccggtctacctcaccgtcgcgcaccggatgatcccgttcttcgccaacaacgtggtggacggctacgtgccgtggcgaccgctgcgctggttggccgcgatgtgggcgctgctgatgctgcgcctgctgttgagcgcgttgcagatcgaccacctgctgtggctggccgatgcgccgctgctgatgttgtcgctgcaggcgctatggcactggtggccacgcgggccgatgccgggcctgctcgcggccctgttcctggcgctggcgtggctgccgatcagcttcgcgttgtatctgctgcaggacatcggccagatgctgggccatctgcaactgctcggccgcgcgccgctgcatgccctcgccgtgggcctgttcggcagcctgctggtggcgatggtgacccgggtcacccaggggcattccgggcgaccgctggtgatgccggcagtggcctggtttgcgttcgtcgcgctgcaggcggtggcgatcatgcgcatcgtcgccgaactgatgcccgacgcctatgcgtggcatttcgccgcagccatcggctggttgctggcgcttgcaccatgggtggcgcgtctgggctggatctacctgagcccacgtcgcgacggcaagccgggctga

SEQ ID NO: 514560 - DNA, 1041 bp, Stenotrophomonas maltophilia
atgccgcttgatttccgtgtgatggccgctttactgggcgccctgttctgcagcagcgcacaggctgccgccccggccgtcatcgacctgccgacagcacaggcgcaggcccagttgctggacatgctggagaaggagtcgctgtaccgcgaccgcgtggactggccggccatccgtacgcgcctgaaggcggcgcagaacgatccggtccagacccgcgcgttgctgcaggaggccaccggccgcagttccggcgggcatggcgagtggatcagcgccaagcagctgcaggcgaaggcagagcgtctggcacgcgccaatggcgcagtgacgccggcgccgagtgcagcgattgcttcggtcgaagcgctggacccgcgcatcggccgggtcgaaatcggcggctacagcgtcatgcagggccccaccgcgcaccagcagatgaaggaacgtgcgcagcgctggcaggcgatcatccaggaccaggacggccgccatcgttgcggctggatcgttgatctgcgtggcaacaccggcggcaacatgtggccgatgctgctgggcgcagcgccactgctgcgcgccacgcccaccgccgacgaggacgtggggtccttcgccgccgcggatggtcccacgcgctggcagctgacaccgtccagcgtgcgtcttggcgagcgcgtgcgggtcgatctcggcggggccggttatctgctgaaacacccaggcgcgcctgtggcggtgctgaccgggccgcgcaccgccagttccggcgaggcgaccgtgcttgccttccgcggccgcccgcagacgcgcagtttcggccaacccacctcggggctgtccactgccaacgtgatgcggccgctggtcgatggcagcgcactgctgctgaccaccagcgtaatgcaggatcgcaatggccagggggatgggctgaagatcgaaccggaccagcgcacggacggtgatgccgccacgctggctgcggcgcagcagtggttgctgcagcagcccgcctgcggggcgcgcgggccatga

SEQ ID NO: 514561 - DNA, 921 bp, Stenotrophomonas maltophilia
gtgaactcagctttcaaggcggctgccgatatcgttgcgatattgggttctgagcagtgcaacctggtaaacgcgctcatcaaaacgcgcatcctcgccagccagattgatcaggacaagctcaatgaatgggttggctgggagctgaccgggtatccggcagatgtcgagctgccaccgtatcggcgggtgaagttgacgccgagggcaaacctgttcaatggcgtgtacagcctcaataatcagactctgcccacgctcaatctgtccgataagcagagggagcgcatcctgttctcaaacctgcgtcagtcggtcgttgccattgagcgctggaccggggagagggcctcggcgacgtacccgccagaatttgcagcgttcttccggggtgctctcgatcctgcctgggagatcgtgagtctttggggtgagcctggtgtgggtgcatatgatcaggttcttgtggaaattcgaacgcgactcttaggctacattcttgaccttcaaaagacactgccgcaaggcgacgacaccggcgaacctgagccaaattcgatgaaggacaagcgcgacagcatgttccagggtgctgtatttggccctaacacgacgatccaaatcggcaatgccaacattgcaaacgtgaccaatactgtggttcagggagatctctcctcgctcatggagcatctgcgcagtaaggggctgcccgaagaggatctgcgggcgttggaagttgcggtgaaggctgacggagacgagcccaagaagagcaagaagctcggctctgccgttgtgtcctggatgggggctgctgtctcgaaggcggcgtccggcgcttgggatatcacagtctcagctgctggtaccctcgtcgcgggagcgctgtcgggctattacggattccctatcgggtag

SEQ ID NO: 514562 - DNA, 243 bp, Stenotrophomonas maltophilia
atgagccgagaggtgaccgagcgcgacctgcgccacccgaaatacgccgagggcgagccgtctgactacgagttccgcgcggacgggaagatcgtccgaaaggaccgctgggaaatggctatccattccattcgctatcacctcggcgactgccgacgcgagtttgaagtgggcgacatcgtgggagccgtcaaggcaatggtcgcgagcttcccagaccgagaggatgaagccgatggctga

SEQ ID NO: 514563 - DNA, 492 bp, Stenotrophomonas maltophilia
atgatccgcaccctggtcgtcgccatcctcctgctgctgggcgtcatcgtctggcagcgcggctcggtgtccatcgcgcaccgtgcggccgaccaggccgcgtccagccgtgacgccatggaaatcgagcgtgatgccgctcgcgctgaggccgatgccgcagccaaaaccctgaaggcagagcgtggcagcgccgccgccgcgaacaacctggcgtccaagtacgaaaaggaaaagaacgatgcacagaaggcatctgatcgcctcatcgctgatcttcgcgctggcaaccagcgcctgcaccagcgttggcaagcgtccatcgccaccgcagagctgtccgcggccgccgctgccgccagccagtctgatggtcgagccgacgaccgaatcgaaagtgcgggacgagttgttggcgccgccgcccagtgcgacgcccaagtgagggggcttcaggcctatgcgctcctgtgttcgggaggtgagcggtga

SEQ ID NO: 514564 - DNA, 177 bp, Stenotrophomonas maltophilia
atgattctcgaccggcgtacgttcgatgtggttgcaacgacgcgatcaaaggccgatggaacgtggcgggtcgaccgcctcacgctcgacatgaagttcttggttgtgggcgtggatgaccgtgggaacgtcaacgcggctgtacaggactgggtcgcaccggccccgatggagtag

SEQ ID NO: 514565 - DNA, 813 bp, Stenotrophomonas maltophilia
atgacagaagaagagctcgcagggatggcagccctgctttcagcagagaggctttctgcttttgttcagctaaccggcaccgagcgtgatgcgcttacagtgcacgattcgacgatccaggtggcgtcggccttggtgccggtcatgtgcttggtagaaatcgcggtcaggaactctgtcagcgaacgccttagatcggttttcggaacgcatgattggctcatgcagccaccagcgcctttcgtgtggaagccatccgaacgaggcaagatagacgacgctaggcggcaggctcagcgcgctgcatacacgaagttgactgatagcgcgagaagatcgctagacgacgccgcataccccaatggtgtccctaaggctatcaaatacgaaagacgggtaaaaaagcggcaggggactatcgcaatcccccaaggtcagcttattgcacagctaaccatgttcttttggaagcgactgttctcatccgactatgaagactcgctctggaagcgcgggctaaaagatcttttccctaggaagtccataaagcgcggtgacgttggtaaacacctggaaatcgtttacgaagcgcgaaaccggatagctcatcacgagccgatacatggacagcgcttgcaacagttgatgcagtccttggatttcctggtgttcaatcttggcaataaatctggagatgagaactctcctttagcaaagctgaccaaaaaccaccggtcaggccttttgaaagtagcggcggaaaacgacgccctattttctagctttgtagttcaacccaacactcacccatga

SEQ ID NO: 514566 - DNA, 306 bp, Stenotrophomonas maltophilia
atgaacgatgcccatcccccagtcaccgtgatgaccccacaagctcgtttcaccctctgcttttgcatcgcggtcctgctgaccggcccctttgggctggtcatcggtcccgtgctgtcacgcctgcttcgtcggaaggcggagcggcttcatccaggagcggctcatgccgccgccaagcgcaatgcggggcattttaatgctggccaactctgggccatcacgatctgcggcatctttggagtcatcggcctggtgaccctaatcccgaccgtggtcctcatcgcactgagcctagtcagctaa

SEQ ID NO: 514567 - DNA, 759 bp, Stenotrophomonas maltophilia
atgagttctcctgtgactacccgcttcaccctggccgtttgcgccgcaacgctgttgctcttgccttccacctcaatggctcaggagccggaaagaaagccggggtttttccgtcaactcggcggcagcctgaaggacgccggccagcgcatggtgggcctgaaaggcgcaacggccagcgccaccgcaaccgcaaccggggcgatttacacgcccatcggtgggttcggaaaaatcggggggctctacaagtcggacaaccaccagcaagcccagttgggcaagctcgattggccgcgaaccgccctcaccttcaccgagtggggcacgtccttgccatgctggaccgtggaagcgcgcatctggaccagtcctactaactcgaccacggagacgttccggacgtgtgcggacgctgctgtaaccgagaccgatgacctgggcgagacggccgagctcaaccgaagtgcgctgtggaaaggccgcgacaccctcaacggcatccgtgtgccgcccagcaggcccaacaccggttcgagtcgctccactgggcccaacccacccagccagccgttcgtggtcaacgtcagccgtcctggcgtatcggagcgcgccgtggacgtggcctttcgcgtggcctgggtcagcggcttcctccagaccgccgaccttcaccctggcccctcaggccttctgacaccgttcaaggacacccggatgtggattgccgggttcaaggccgacggcaaccgggactga

SEQ ID NO: 514568 - DNA, 588 bp, Stenotrophomonas maltophilia
atgaatacttcaaacctatccaagttcatcctcgacaactacgaggtccacgagtggcgtcacgcttcggccgtgctagcgaatgacttccccaacgaattggctgatattcacgccactttagaagggtttcgcctccaccgcagtcagatcctggccccgggtgggcgcaagtctgacatcgctggttggctcgacggtcagttggaacagcgtggctggcgagaaaagaagttttcgacccaaatcagagtcgacgagcggaccatggacgctcccactcacaaggtcgattgcttcaagaacggcgtcgccctggaaattgaatggaataacaaagacccgttctacgaccgagacctgaacaacttccgcctactcttcgaccttcgcgcaatcagcgtaggggtcatcattacccgatgcagcgagctgcaaaacatcttcaacactctcggcaaaggatcttcctacggcaacagcaccactcatatggccaaactgctgccgcgcattgaaggcggcagcggaggcggttgccccatcttggtatttggtatcagcgagcgactttacgtcgaggactga

SEQ ID NO: 514569 - DNA, 1134 bp, Stenotrophomonas maltophilia
atggccatgttggacggctacgagcccccggccccccatccggcaccggcaccggcaccggcgcgtatggcttctccgcccagcccggtggcggaagccatttccgtagccaaggcgcgcgacgcatggttgaaaagccttgagggatccaccacgcccaagaccctcaccatcaaaggcacagccatcaacatgctggtggactacatcggcagcagccgtcaggtgcacaccatcggccggccggacatggctcgtttttatcaacacctgcgcgacaagggcaacagcaccccctccgtctacaacaaacagtcctacctcggcggcatgggcggcttctttgactgggccaccaagtccggccactacccagccatggacaaccccgccaaaggccacgtgcgttacacggcgaaggaaaaacgccagcggaaaaaactgggcttccgggcattcaccgtgccccagatccaggcgcttttcgcccgcgagcagttcgcccggctttcccccggcacacgctgggctgcgctgctgggcctctacaccggcggcagagccggtgaagttgggcaactgctgctgacggacgtggcgcaggccgacggcgtgcccgtcctccacgtgaccgacgaaggcgagaaccagcgagttaaaagcgaggtttccaaacgggtggtgccgatccatgccgacctgctgacgctgggcttcctcgactacgtgcagcggctgcgggaccgtggcgatacccgcctgttcccgcaagcagccaccaacgccaagaacggacccggaaactggatttccaaagcgttcggttattacctgggcaagctttcggccgattggccaaaagccaaacgcggcttccacagccttcgcaagagcgttatccaggagatgcagaccgctggcgtcgcctcggaaatgcgtgcccaaatcgtcggccacgaactggacgacgaacaccatgcgacttacagccgggagttcaccgccaccgagaagctacacggcgccggcaaatcccccggcctttcggtgctggcctatgggctcagcctggacgccttgcgccccttgttgaccgaactgcccgacagcaagcccagcaaccgagccaaatag

SEQ ID NO: 514570 - DNA, 318 bp, Stenotrophomonas maltophilia
gtggggcgggccttcctgaaacgctcgctcggcatggaactgctgcccgctcgggtagcagcgctggccctatccgcccgctatgctgcggctttcaccgccatgcaggaaatggggatgagcaaggaagacgtagaggcgctggttgcacgactgcgcaagggccgattgccagaactgacgttggagcgcacgcagctcgccgacggcaccgtcgtcgagcgctggcaaatggacaatgacgatgacgtccagctttatcgtcaggccaccgccccacgcggtcggcaggccgagttggcggcgctgtatggataa

SEQ ID NO: 514571 - DNA, 1494 bp, Stenotrophomonas maltophilia
atggcacagatcatcaacaccaacaccatgtcgctgaacgctcagcgcaacctgtccaccagcagcagctcgctggccacctcgatccagcgcctgtcctcgggcatgcgcatcaacagtgcaaaggacgacgccgccggtctggcgatctccgagcggttcaccacccagatccgtggcatcaaccaggccgcgcgcaacgccaacgacggcatctcgctggcacagaccgctgaaggcgcactgggcgaagtcggcaacaatctgcagcgcatccgcgaactggccgttcaggcccgcagcgcaaccaactccgcctcggaccgccaggcgctgaacgccgaggtgcagctactgaagcaggaaatccagcgcgttgcggagcagaccaacttcaacggcaccagcctgctggacggcagcttcaccaaccaggcgttccagatcggcgccgaccagggccagaccatcaacatctcgcagatcaccaatgcgaatgtgcacatgctgggcagctggaccagtgcttcgactgatggctcgctgaccggtgcggtgccgaataccggcaacgtcgcctctacgggagcatttggcgcatttaccccgacaaccagcactgcagccttcaccattgacgtgggcggcatcaatatcgtcaacgtcgccgacgcgtctggtgtgacggaaacgaatcttcaggccgcgatcgatggcaaagcagcggcgctcacggcagctggtatttccgtctcaggcgatgtcgccaccggcgaccttacgttcaccaagtccgatggacagaccctccaggtgaacatgagcaccgctgcggcggcaaccttcggcaacagcgacaaggtcaagggtccgcataccgccggcgggtacagcccgaccagcttccagctttcaggttccaagggttcggtaaccatcgatctggatccggcaaagaacgccagtgatcgtgccactcagatggtcaacgcggtgaacgcaaagacccacgccaccggcgtgagcgcggcactggtggatggcaagctgcaactgaccgacaaggaaggcaatgtcactgtaggcttggccggcaccacggacgcgcctgcacttctgaaggaaactggcctcgcccctggcagctccacgacctacgctgccggcaaggcaaccgttggattcgctgatctggatatttcgtcacaggccaacgccgacaacgccatccttgcgatggatgccgcgctgcagtccgtcaattcggcgcgtgccgacctcggtgcaatccagaaccgcttcacctcgaccatcgccaacctgaacaccaattcggagaacctgtccgcagcacgcagccgcatccgcgacgttgactacgcacaggaaaccgccgagctgacccgtggccagatcctgcagcaggctggcacggccatgctggcccaggccaaccaggtgccgcagaacgtactgcggctgctgcagtcgtaa

SEQ ID NO: 514572 - DNA, 1524 bp, Stenotrophomonas maltophilia
atggcacaagtcatcaacaccaacaccatgtcgctgaacgcccagcgcaacctgggcaccagcggcgccaatctggccaccaccattcagcgcctgtcctcgggcatgcgcatcaacagcgccaaggacgatgccgccggcctggcgatctccgagcgcttcaccacccagatccgcggcgccaaccaggccgcccgcaacgccaacgacggcatctcgctggcccagaccgccgaaggcgcactgggtgagatcggcaacaacctgcagcgcgtccgcgagctggccgtgcagtcgcgcagcgccaccaattccgattccgaccgtcaggccctgaacgccgaagtgcagctgctgaagcaggaaatccagcgcgtcgccgaacagaccaacttcaacggcaccaacctgctggacggcaccttcaccaaccaggccttccagatcggcgccaaccagggccagacgatcaacatctcgcaggtcaccaacgccaatatcagcaagctgggcagctggaccagcgcaacgaaagacgcatcgtccacgggcgttgttgccaacggtggcgcgaaagatgcaaagccgaccgaggccacgcaaacggctgccttcacgaccgttaccgccggcactgcctacaagctgagcgtcaatggcatctcgatcatcgaccaggcagccggtggtgcaaaccctgtagacgccgccgcgattgataccgccctgaaggacaccacgctcaccaagaagctggcagatgcaggtatcacgttcaccggcacggcagccggcgacgaccttgccttcaccaaggccgacggcacgaaaatcacgatcgcagagaccgcagccggcttcggcaccggctttgccaagacccatgctactggcaccgaggccgttgccgcttcgtttggcaagaccagcttcaccatcgccggcaccgtcgacggaaagcttggctcggctgtcaccattgatctggaagccgccaagaccgctggcgaccgtgcgacacagttggtaaatgcggtcaatgcaaagactcatgaaaccggcgtgagcgcggccctggtcgaaggcaaggtgcagctgacgggcaaggagggcgacttcactatcgcatcggctgacagtgacgcgttgcttgaagcaaccggcctgaccactggcaccaccgcaaactactccgctggcggcgccaagaccggctttgccgatctggacatctcgtcgaagggcggtgccgacaacgccatcctggcgatggacgcggccctgaactcgatcaactccgcccgcgccgacctgggtgcaatccagaaccgcttcacctcggtggttgcgaacctgaacacctcgtcggaaaacatgtcggctgcccgcagccgcatccgcgacgtggactacgcttcggaaaccgccgagctgacccgcaaccagatcctgcagcaggccggtaccgccatgctggcccaggccaaccagtccagccagaacgtgctgagcctgctgcgctga

SEQ ID NO: 514573 - DNA, 315 bp, Stenotrophomonas maltophilia
atggcgcacgtggagttggccatcgatttttcggaactttccgcgcgcgacagcgaggttgtaggaattccgctttcaaagctcaagtggaatccagagattcatatccctgtatccttgtcgtggagagactctgtgcactgggacgatctggagctgtctccgcggagctattggaggatcaacctaatgaggcttcgagacttcaattgttctgaaggagtgttcaccattccgtttcccggtgacaggaattatgaattgaaaatggatgagctggcacggatcgagagcgctggaatcctgaaaaggtga

SEQ ID NO: 514574 - DNA, 501 bp, Stenotrophomonas maltophilia
atgaaggttttgtactctggttttttgaaatttcttgtggcgaaaggctggagtttggttggcaggagtgatcgcgatggggtgtcgccgagtagcgacaacttggtgaattccgacatccctgcctactacttggaatttctcttgaacttcctgtcgcttgcgaacgaggatgagtcaagatggtttgtgtcaatcgaggagtttgcgggtgtctcggatagcgcgttctcctgggatgagtttgagaagatgagcattgacgctgcaatgacggatgctgatggcgaagatgttcgaaagttctgggtagagtatttgccgatatttatagcggtcgacagagactatcagttcgttgggctggaccggagctccggggtggttgttcacggcgttgagcccgattttgaaagtgttactaggctcgccgagacattcgacgaatttctcgttgcggcaatgaatggccagtacgacgagctattctttgggcgctag

SEQ ID NO: 514575 - DNA, 600 bp, Stenotrophomonas maltophilia
atggtggctgcgtcaaaattgattcaacaatgtgtttttatgactgccctcgatgaggtgaattttgccggtgcgttattggctgcgcatccatcgaccaggtttgtgagcatggatgagcagtcgcatacgggtcggccgaagttcaggagtcgaattgatgaatgtaagggtgctcatgtaactgtggtggattcaactatagtttctgaggatgatttccacgcgcgttacgtcaggcctcatccgtccggaaaggggtggatctatgcattggttggctcaggtcttgtaagtcttttgagggcaagaaatgcagacttcatgccgagttccctgctcaatggggagctgagggcttcaattcctgccggtgaccagcgcaccgagaacttcgtggagatggtattgcgtgaggtgaaggcccatgcagaaaaggtggtggcagttgacgctgaaactggccagcgcagtacaagagttgatcgcaagtttattgcctggccagatgcggcgcggagatttaacggtgagatgggggcctatctggcgaacggattgcatgcgttatttgtggcaaggattgcagcgaaaaaatag

SEQ ID NO: 514576 - DNA, 4644 bp, Stenotrophomonas maltophilia
gtgaacatcgccgccaagcatttcgatccgcagctgggcatcgacatccacatgtacgcggtgccgccgtgcccgctgccgacgccgcatatcggcctggtgctggatccgttcgactacattccgttcatcggctcgaccatcaaggtcaacggtgtgcatcgcggtactgccggtaccggcggcctggacatccacattccactgggcgtgtgggggccgccgctggccgcgccgatgggtccgcagttcgacggcgaagaaatcttcatgggcagccgcaccgtgtctgccgacggcgaaccgttctcgcggctggccatgccggtgctggactgcaacctggccgggatgatcaacccgttccgggtgaagaagccgaagaagccgctgcgtgcgatgtcactgccgaccggcctgaacgtggccattcccaccagcgtcaaggtgggaggaccgccgacggtgtcatggaccgcgctggcgttccgcgccgcattcgccggactgggcaagctgcgcaagagtgcgttcttccgcaagaagatggatgcgtttgccaactggcggcgcggcaagtggggccatctgccctccggcttcctgaagtgcaaggtgctgcgtgccgagccggtggatatccgcgatggcagcgtggtggtcagccaccaggacttcgacattccggggcggctgtctttcgcatggcagcgcagttatggctcgcgcagggcgggcgagcccggccaatgcggtgctggctggcagacgccggccgacatccgcctggagctgctggacgacggcagcgtgtggctgtccgggccggaccaggtcgccttctttcctgagctgccgccggccgatggcgacgccggagcgatcctcgatttcgtcgatggcgcgcgcctgctgcgtcggcgcgggcagtggcaggtgcgcttcaagagtggcctgaagtatgtgttcggcggcgaactgccggcaggcgtgagcgcgctgccgaatccacagtcctggccgatcgagcgcatcgaggacgcgcacggcaaccactggcggttcgagcgtcgcgacggccatctggtgcgcatcgtcgagagtggcatcggtgacctgcagggccgtttcatcgaggtggaggcgcgccacggccgcatcgaccgcatggcgctgcatgacccggccaccggcctggtgcatccgctggtgagctaccgctacagtggcgagggtgatctgttggcggccgtcgatgcgctgggcgcgccgcgcaccttcgcctacgagcagcaccgcatggtgcggcacaccgaccgcgttggcctgtccttccattacgcgttcgacgcgcagggcagggtggtgcactcatggggcgacggcggcctgtacgactaccacttcgagtacgacgcgctgctgcgcgaggcccgggtaaccgactcgctgggccacctgagcgtggtcaagtttgacgagaaccagctgccgctgtgcgagatcgatccgctcgatggcgtgacgctgttcgagtacgacgatttcgggcggaccgtggcggtgaccgacccggaggggctgcgcacggcgtttgcctatgatgcgcatggcaacctgatctgcctgacccgcgccgatggcacgtcgatccagatggagtacgacctggacgatcacatggtgtcgttgcgtacgccggatggtgtcgactggcagcaggcatacaatggtcagggcctgctggtcagccagaccgatccactgggtgcaaccacccgcttcgactacgacgcacagggccagttgcaggcgcagaccaacgcacggcaggcggtcacgcaactgcgctatgatcgtcatggactggtggccgcggttatcgatgcgctgggccatcagagccggtttgagcatgatccactcggcaacctgctgcgccaggtcgacccgctggggcaggtcagccgctacgagtacgacgcaaagggtcgcctgctgggcacgattggcccggacggcagcggcgtgcgctgcgagtacgatgccgaagatcagctggtgcgacataccaatgaggtgggcgcacagacccggctgcagtacgtcggcatcggccagatcggcaagcgcctgcaggccgatggccagagcgtggagtaccgttacgacaccgaggagcagctgatcgcggtcatcaaccagcgcggcgagacctaccagctggtgcgcgatgcgctgggacgcatcgtcgaagaggtggactactggggccaatcgcggcgctacacctatgacggggccggacgattgacggccaccctggatccgctgggccagcgcatcgccttcaccaccgacaagctcgggcgcatcacccgcaagacgctgcccgatgtgcgccatcctggtcagcaggtacaggaacacttcgtctacgacgtgcagggacagattgtcgagctgcgcaatgcggcgcgtacggtgaagcgccggtacgacccgctggggcaattgctggaggaactgcaggatggcttccgcgtgggctatggctacgatgaagtgggaaatgaggtcctgcgtgagacctcggcgggtaaccgggttgcgtttggctacgacctgcgggaccagacggtctcggtggcgatcaatgacgagccgccgatctccattgagcgcgacgcgttgggtcgcacgacacgcgagcagctgagcccgcacttgcagcgcgagttcacctacgacagccgcaacctgctgacctcgcaatcggtactgaaggacgctgcgccgctgttcgagacccgctacgactatgaccggagtggcaacctgactcgccgcagcgacagcgcacaaggcgtggacgagtaccgctacgacgctatcgggcgcctgctgcagcacatcgacccgaagggaagggtcgagcgctacttcaacgacccggccggcgaccggctgcgcaccgaggtgaagcaggtgcaggcgcgcaaggtgatgggcggcgacgatgatgacctgaccacctggacgcgcgaaggcacctatcagggcgtgcactacgtgttcgaccgggcgggcgatctggtgcgcaagggtgcgccgcaaggggatgcgccggatgacctgacgctgatctgggatgccaaccatcgcttggcggagagccgccgcaacgggcaatcaacgtactacggctatgacccgctgggacggcgggtgttcaagcgcaacccgacgcagacgacgtggttcttctgggatggcgatgcgttgctgggtgaggtgcagcaggccaacgacgccgaagaggcggcaccggtgtgggtggggaatgtgggcagcctggtggagatgaggcggcggcagcgacggttggaaaagctgcatgagcgggcgcgggagtatgtgtactacccggggacgtttgtgccgttggcgttggtggaggcgaggtgggggaggtgggattcgagtgattgcctaagagaaggctctcagggcgtactggcacacggaggagcacccagtacccctaccgaggtcttgacggagatgtcaacggtcgagggatcaatgcgaagtccaccgaaagaggcgaaggctgtatcgtctgtgaagcataaggaaattgttagctttggtggacttggcgctgcggcattaggagtgaagcccagcctcaatccgcaagcatccggccagagccggtcggtttcatcattgcttggctcggagaagctgggaactctcggtctgggcatggttccagaaaaatccagcgaatctcctgtccatggaaagtccgtacctgcatcagctgaatacaatgggccagtcggcaagcccgaagatgcggcatcacgaagtggtcagattcagaggcgagagccacctgggcaggacgacattggaatgcaggtgtattacttccacctagcgcttaatggatgtccatggcaaatcctgagtgccgatggagttgttgcatggcatgggcgattggccgcatggggcaatttctatgtagatgcgggtgccagtattgagagcaacgtgcgactgcaggggcaatacttcgatggcgaaacaggcttaaactacaacaggaacaggtactacgacccgcaggtagggtgttacgcgtccaaagatccgctggggatttttccgtccgagaatctctacgattatgcgccgaacgtcctgggctggattgatccactggggctcgctcgtcgtggaaatcttgcgacccagacgcatatggatcaggtgagagatgcattcattcgagacaatccgacttttgatcttgtcgctggcggtcgtgatccggtaacaggcttggatattccggaggagttcatcaagcccatgacgccggggagacgaggaggtacctatcccgacatgaccttcattgatcggacatctggaaggacggtgcggatacagactgttgataaggggggcttcttcggagggatgtcccgccgcgagctgacgaacgccggaagactttcaaatcaaagaataggggacaccatacttacggtcgtcaagggtgccgggctgaagcttgggtcgctcgatgtaagtaatcttggtgcgggtatacactgcaggacttga

SEQ ID NO: 514577 - DNA, 762 bp, Stenotrophomonas maltophilia
atgcagatcagcgaacagctggtgcttgtcaccggtgccggccgcggccttggccagcacatcgcccgcgcgttcgcggcgcagggcgcgcgcgtcatcgtcaactatcaccgcagcgaaggcgccgcacgtgcgctggccgccgagctgggcggacaggcgatcgcgctgccggccgacgtcaccgaccgcggccaggtcgatgcgatgctgcagcaggcgctggggcacttcggccagggcgtcaccacggtggtcaacaacgcgctggccgccttctcgttcaatggtgatgcccgcgacggcgccgccgatatcggctggccggccttccaggcgcagttcgagggcagcgtgcgcggcgcgctgaacaccgtgcaggccgccctgcccggcatgcaggcacgtcgcttcggccgggtgatcaacatcggcaccaacctgttccagaacccggtcgtgccctaccacgactacaccgccgccaaggccgcgctgctgtcgctgacccgcaccctggccggcgacctcggcccgcatggcatcaccgtgaacatgctgtccggtggcctgctgcgcactaccgatgccagcgccgccacgcccgaagcggtgttcgactacatcgccgcaaacacgccactgcgcagcgtcaccaccccggccgagttcgccgacgccgcgctgttcttcgccagcccgtggtcacgcgcggtgaccgggcagaacctggtggtcgatggcggtctggtgcgggactga

SEQ ID NO: 514578 - DNA, 630 bp, Stenotrophomonas maltophilia
atgggcaaggcgtgcgaaccaaggttcgcacccaccgggatggcccatgcacttgtagcaccgagccacgctcggctgacgtttcaggtgtcgcattcgcccattgaagacaatgggctgcgactcgaaactatgcgccgttattcgatcgagaaagtcctcgtggtcatcagatccgcgaccatcttcggcagatgcgcaaggcgggcggggtttgcgggtactacgacaacccgctatcgacagttgggtgacatctcgctagtcgcaaatcaccaggggtcccgccttggccggggtttctatgtgaatctcggcgtgtacttctcagccatcctggatcaaccgctttctccactggaaatggagggcgccctgaaagaacgctccaccactccatacccgcatgtgctttggcggatagagaacacaccaggcctccgtcgaccattcatgcaggaagatctcgacgcgttgctcaaggcaggggacgctgtgggaatagaagatctactgaatagcgcccttgcggacacactgaagttcgtttccacccaggtgacccgcgaatcggtacggcacctttctcgggaatgcaggttttccgccatcatcctcaaagaggtctag

SEQ ID NO: 514579 - DNA, 288 bp, Stenotrophomonas maltophilia
atgagcgactcccttgagcgcggccgtatcgagcgtgtcgagtgtttggaacctgacgacgatgagaacctggattccaagctggatggagtcgatgcatggttgcaatcaactttgacgtggaattggggccgccgtcgcttgatgctctacggggcggacatcgacggcattctgccttcacacaaaggcgtattgtccgatggcgtggggtatctcttcctccaggaccaacccgatttttctctcgacgggcgcgcgggagcgttcttcctccaattgggctga

SEQ ID NO: 514580 - DNA, 1239 bp, Stenotrophomonas maltophilia
atgcccaaagaccttctctctgacgccaagatcaggacagccaagcccgcagccaaccgatacaaactcggcgatggcggcgggctttttctctccgtcgaaaagacgggtagcaagctctggcgctggaagttccgactcgacgggaaagagaacctttttgccattggctcctaccccgaagtaagccttgctgaagccagagcggcccgagatgcagcccgcgaactcgtcaagcaaggaatcaatccctctcagcaccggaaagatgaacggcagcggaacatcaaagccgcagcagcgcgaaagcatgcagaggcactggctcaggagttgtccttcgccaaggtgtcagcagcctatctggccaaggtgaagcccgactacacccccggctcctatcggtcgaaggaatcacggatcagaaagtacctgtcccccaagctcgacacgctcccgatcaccgagatcggtcccaaggaaatccgcccgatcttagaagcgtgcgaagaccacggggcgtgggcaggcatccacgtcaaaggcgacctatcggctattttccagtatgcggttatccgcggattggtcgattccaacccgattccgggacttcgcggcctgctgaaaattccggtcagcaaaagcaaagccgtactgaccgctgatcaaatccgcgccttctaccgcgctcttcgcgcctatcgcggctatcccgagaccgctatatgcctgcgcctgatcgcattcacagcttgccgccccggagaagctgcagatgccgagtggagcgagttcgacatcgaggcaaagctatggcggcggcctgcggcgaagatgaaagcacgccgcgaccacgtgtcaccgctgtcagagcaggctttggaactactggaaaccctacgaccaatcacaggagcaggtcagtatcttttccctcaccgaagcggagaagggttcacgacgccgaatcggctcacgtacgccatgcgcgacatgaagcttggagaacgcacaacacctcactgctggcgcaccactttctcgacgtgggccaacgagcaggggttcaggccggatgccatcgaacgccagctcgcccacgtcgaaagcaacaaggtccgggccacttacaacaaggccctgctgctgaatgagcggcgcgagatcatgcaggcatgggccgattatctgagtgctgctgatggcatcaagagcgcagacgatgacgggaaatga

SEQ ID NO: 514581 - DNA, 789 bp, Stenotrophomonas maltophilia
atgacgggaaatgacgatgcgcggttccttgagggcttgcgctatgggcaggccctattgaacgaaggccgtagccgactgcacaaaagcgtaccaggagcgctggttgccgaagttcttcgacatatcgagaattcgatggcgggaacttctcagtatgagttggagcgaatgttgctcgggagcgaccacgcaggtgcagaatggcgcgcttacgtggctcaccgacatcgcagcgtcacggagaaaaggctgtggcgaacatggtacggaagacatggaaagaaagacaccatccctctaagaccggtagaagatgctttcggcattcagactccgccgctgccaccgacggaagccgcgccagcaatgccgcctccatccgagccaaatcgaccgttgatgaaggcgctgccccatgatggccgagccatgagctttggattattgcgggaaatagtaaagcgctggtctgcgatactcattcaaaagacgcttgaagacgcagcaagaatcaatgacgagcagaatcgtggccgacaactagtcagggccttgctaagacatgaaatggtcttgatgccgctttggtcgcaggtcaacgcgtgggaggctttctgtgaggttttgccgtctgggaagtgctttgccttgctcgatgcagccaaacagagcttcttctctgcactggaagcaattgagcagcgtgaacatgcgaagttgatggcttcatacgccaccctgagaaagcgctacccagagctggaaatcagccttgggcaggcgtaa

SEQ ID NO: 514582 - DNA, 1071 bp, Stenotrophomonas maltophilia
ttggctgcgcgagaagaccagcctccgctcgattgtcgttcggggttgagttgtttccgtatgccgaacccatcctccaacagtgctcgtcttgcgctggcagagctacgacggattgttgatccgaatcccagtggtcaagtagcgaggattgtgccttctggatgcagcaaggagtgcgtcctctcgattcgtgaccgcaagctgcttgactctgccgccgacattgctctcggctcaacgtctgagaacgcggtgttcatgcacactgttctctgccaagttggcttgccgcgccgtgctgttgatggcacttcatttgagcggcgatctggaggggcggcactccttatcgaggctgggaaactgtgggatggcgaagaatttgtgcagcagccggttccgtatggcgcaaaaccccggctcatacttgcctacttgaatacctatgcagttcgccatcgaacgagggaaatcgatgtggggaaaagtgcgtcggcatttctcaagatgcttggagttcaagcaaatgggggaaaaagaggcagctacaccgagttcaagaagcagatgactgcgctggctgcctgcaagatgactctgggattcaatgcggggaatactcctactacacgctatgcgaaaccgataaatgagtttcaggcgtgggcatcgaatgatggctgccaaaacaggttatggccaaaaaaaatcatcctatcgccagaatactttgacgctctggtaactgatcagcacgccgtccctatcgacattcgagcttttcacgcgctgtcaggctccgcgctagcgatggatatctatgtcatgctcgcggaaaggctgcacagaatatcaggaggcagacccgtgaggttgaattgggcaaatttgcgtgagcagttcgggcaggaatatgcggccgacgccaatggaaagaagaacttcaagacgaagtttttgaaggcgcttgtttctgttttggctgtctatcccaaggcgagaatcagtcaggttacgggcgggattctgctgtttccttcgccgcctccgatccccaagctggtataa

SEQ ID NO: 514583 - DNA, 240 bp, Stenotrophomonas maltophilia
atggcccttgatccccgactacgcttcggcctgaagctgatagaaatcagaaagaccagagggtggtcgcaagaacgcctggcactggaaagtggcttggcgcgcagctatctggggggtgttgagcgtgggcaacgcaacatcgccttactcaacatcttcaagctggccgaggcgctgggggtggagccttcagtgctgctggaggcaccggcggctggacaggaacctgcaccctaa

SEQ ID NO: 514584 - DNA, 657 bp, Stenotrophomonas maltophilia
atggcaagcgtctggaagactgctgggatgggagcggctgcggggctggctgttccggtggctgggctttcagggctcgctgccgctggttttgcactgattcttgtactggcgatgttcggcgtggggcctgcgcgcctgtcacagccatcgctgtgggggctgttgaccggtgagttgatgctctatctgctgatttcgctggcgatcttcacgctgtccttccgctttctggcacgtttgcaggctcgctgtcaggcccttgtcgccaaaatcaacgcccagcagggcctgtcattcgatgctggacaactcttgggctaccccgcgccggcctttctggtgtttgaccggcagcatcgcaaactggctgtctgttcaatcgtggatgaaacctggcgaatccacgacttctcctggctgcttggttggcggatgacctggcgcgaggtcgagagcatggagatgaacggcggcagccgtcaggtcaacgccagcggcatgagcgtgccgaccttcgagcgcacggtacgcgccaaaaacttcgccatcgagctgcaaaccgccgatccgcaacgaccagtgctcagtttccccatgagccgtcgggcggcggaaacctggtgcgcccggctcaatgccctctttaacggataa

SEQ ID NO: 514585 - DNA, 645 bp, Stenotrophomonas maltophilia
atgaaacactaccggagcttgctgcttctgccttttgtattgacaggttgtgccacacccgacatgcaaggcgcactggattccatgaacggcttgggaaaatcgattgggagcagcctttcgcaagcggctacgcccgcaagcgcagcaaatcgcaacagcttgcttggcactccactgcataacgccttgcgccagaatctgtctaccgacggtcgcgccccggagtggcccaaggtggtgatcagcaatctgcaaattccggctgatcagatgaccctgacccgtagcctcacgctcaaagccagcgattgcattcactttgacgcagtgctctggcacgacgccaagcgctccgagcgcttcagcaatctgtcgctttgcgcgccggagctgccgaaacagtcaaacaacttcgtgctgacctggaagagcttttccatctccggcaagaccagcggtcaggttcgcagcgacgggccaaccccaccgtacagcaagctgcccagcgacccggcgatggagcgctggctgatgaatcagttcggcctttactatgtcggttcactgctgacgctggtcggctatgaccccaacttcacggtcgatgatcgccgcttctggatcaggaatatcaagggatga

SEQ ID NO: 514586 - DNA, 417 bp, Stenotrophomonas maltophilia
atgaacgcactgctactggccgccatgccggtggtgctgatggatggcacagccccagaccccgaccactggttgcggatcgagccagccatcgtcgccgccgtggaatgccgtcaagccttgccgttgcacgtactggacggcattgcgcccaatgctcccggcagttggtcgctgacaccggcacgcagcttcacagtgttcgggttgccggtgacgcgtatcgagctgttcatcgacccggatggtgaattgggtgcgagctatacatccgtcattgaaaaacgcagcctggaacaggtgcgcaagcaactgaagcttgccagccagcgcgggcgcatcggccagctctcggcagatcagcccagcgcagaggttcaagtgacttgcacggtcgccgcaacggagcaagggtga

SEQ ID NO: 514587 - DNA, 477 bp, Stenotrophomonas maltophilia
gtgagcattcagcgcatcctctccggcggccagaccggcgtagaccgggcggcgcttgatttcgccattgcccggcagattccgcacggcggctggtgcccggcaggccgacgggccgctgatggcgtactggatgctcgctaccagttgatggagaccgaatccagcggttatcgccagcgcaccaaacgcaatgtgctggacgctgatgccacactgatcatttaccgggacaggatcgaaggtggcagcctgctcactcgcgatctggcgacgggacacggcaagccgctactgctgtgcgatttgcatgaccctgcagaagagctgttggcggcatggcaagactggttgcttagccatcccgtcgctattctcaacattgctggcccgagtgaagcacgcaaccccggtatttacctgcaggcgagcgcgctactggatcttttctggagcaaggaacatgagccgatctga

SEQ ID NO: 514588 - DNA, 270 bp, Stenotrophomonas maltophilia
atgagccgatctgatgcccgctgcgcgacaccctatatctactcgggtgagttgcagatgcgccccgaagtggatgccgcgctggctgcgctgaaagacaaaccttacaccgccatccccagctggaaaaacgatggaacctgggagctgtggacggtggaaggcgacggcgaaacccagccctgcatcatcagcggcccatcgaccacttaccccagcgaggccgatgcactggccgccggtgcggcctggctatccggacaacgctga

SEQ ID NO: 514589 - DNA, 1575 bp, Stenotrophomonas maltophilia
atgcgcaagccaaagcaagcccgtccgttgcgcctgcgggaatacgaagcagccattgctgcgctcaagaagcagcatccctggcttgcccggcaaatcgtcgaacccgcgccggggcatttggccgtggtggcacatctgtttgcccaagtggaatacctgctgccacccgcagtggtcgcacgaaagggctcactgtcggtgagttgcaaccgggatcgcttggccattcattaccagccgccgcgacgccacagcgaacgtgcagcagcagtgttcgatctgattgcccagaccaagcacctttcgctgcaaaaatgccccgtttgcggtgtacaggttgtcggggacggcatccgtccgcaacgctgtccgcaacacgacggcatccaaggattgtttgccgaagaagtgcgccgcagccgccagctcatcgtcgaacagggggtacagcaggtggtgcacgatctgggcaaggtgacgactgaagatgtacgcgccgccatggctgttgaggatgagcccgtcccgagtgaagccaaaccggagcaggttcaggagcagccgacagaaaccgctaaatcaatgcccttgccgagcatcgtctttctcgatgaagccgggctggaggcgttcgtggatcgccaccgaccaaaaggcgacgacaagttcaagcgcgcacaggcgatggcagagcggatcaagcgggcgggccatggcagccgccaactgggcctgctacccccggactggaaagccctgctggatgagttcgcgctggcttttccaaacttccatgaactggccgagctgctgcgtgaccactttgccctctctagcctgggcgatggccgcgtgtcctggcctgccgtgttgctggtcggcccggcgggcattggtaaaaccgaggcggcacgctggcttgccgatcagctcgtgctaccgttccgggtcttcgacatagcgagtacgcaatcaagttcgccgctcgccggttccgaatcattttggagcaattccgagccaggccagctctttgagctgttggcctaccagccactggccaacccggtggtggtactcgatgaactggacaaagccagtaacggcagaccgcaatacgatccgctggcaacactctataccttgctggaaccgcgcagtgcgcgggatttcagcgacttgtcgatccgcgactttgccattgacgccagtcatgtcaattggatggcgaccgcgaatgagctggaggcgattccggggccgctacgctcacggctgacggtgttgcacattcaaccgcccaggccggagaaggtcagaagcatcgcgcagtcgatttacaaccgactccgcgacgagtcgagctggggcacggcctttgccgagcgactggatgatgatgtcctgtcccgcctgcaagccttgccaccgcgcagtgtgcgtctggttctgcagcgggccttgggttcggcagctcgtgatgaccgaggaatcgtccaggtgcaagacatcagaccgctggtcgagatcagccgccgtggcgttggctttgtcagcgagggatggaattga

SEQ ID NO: 514590 - DNA, 738 bp, Stenotrophomonas maltophilia
atgccaacccttgccaacgaacaattgccaggctttgccgccgccttgatacgactgcgcggggaaacgctggggcggatcgctgaagccaccggtatccgcactgccaacctctcggtctggctgcgtggcaaggaacaggtgatctccgccaaacgtttgatcggcctgttacatcatctcggtatggaaggcggtcgcctgcgtaccgacgtgttacaccagtggcaggatcgtggggcactggatgacagcatgctcgtgctaagcctgctgcaggccaacaaccagccgatgtggttgtttcaggatgagcagccggggcttatcaagacgcgctttctgttggctggcgatgtgctgatccgcatgaagatcgagccgggcgtcgatcaggcccttgatctggcgacagtcgccagggtggatcgtgtcatcactacgcctacggcattggccggggtgccaatcgactcgttggcatctgcgcgcaacgtcctcttggcactagcggagcagaccgcatcggacgtgggtgacgaagagctgctggaagggctgatgttccgtctgaccgaaacggttggcagcaatgtcgcgtcatcacgggggtggcagcagctggaacaagcgctgtgccttgcgctcaagacaggagcccagcctgccgacatcgccaagctggttgatagccatttccgcagcagcggaaaagcggacatgccgccaactgagtaa

SEQ ID NO: 514591 - DNA, 495 bp, Stenotrophomonas maltophilia
atgagcggaaatcgatgggaccagccgggcgtgccccacaaaggatggcactgcgtcgatgtggtcgatctgcgggccgacggcgagtcggctgacgaaaccgattacgcgacctgccagatgtgcggcaacgagaagatccgctacgtccacatcatggaacatccggacctggacgagaacttcgacgtcggctgcgtctgcgccgagaagatgagcggcgactacgaggggccgaaacggcgtgaggccaagttgcgcaaccgggcagcacgcaggactcgatggctgcagcgcaagtggcgggtgtccgccaaggggaacagctttctgagtctcgaaggctataaccttgtcgtgtacccgacaaagaccggtcgctggggctacaagattggcgatcgttttgggcctcgaacatacccgacaaacaacgacccctgggcagtcatctgcatgatgcaggcacgttcttctgcgcaaagttggtggtag

SEQ ID NO: 514592 - DNA, 789 bp, Stenotrophomonas maltophilia
atggtgcgcgaacatggaatttcggtgcgcttggcttgcgaggtggtctgcatcagtcagacctgctatcggtacgttgccaaggcgcgtgccgagaacgaggagatcgccgactggctgctacgcctgacggacaatcatcggacgtggggattcggtctttgctttctgtacctgcgcaatgtccggggattcggctggaaccacaagcgcgtgtaccggatctaccgtgagctcgagctgaacttgcggatcaagccacgtaaaagactggtccgacacgcacccgagcctttggcggtgccgaccaacgtgaaccaggtttggtcgatggacttcatgcatgaccagcttgccgacggacgcagcattcgggtattgaacgtgatcgacgacttcaaccgcgaggcgctgggcatcgaggtggacttctcactaccgtccgagcgagtgatccgcacgctcaagcagatcatcggctggcgcggcacaccgtcggccatccggtgcgacaacgggccggagtacctgagtacggccattgtcgattgggcgcgcacatggggcatcaagctcgaatacattcagccaggcaagccacagcaaaacgcctacgtcgagcgatttaaccggactgtgcgttacgaatggctatcccagtatcactggtatgacttggaacacgtccagctcgccgctacgcaatggatgtggtcctacaattatgaacgcccgaacatggccttgggcggcataacccccaagcagcggctggccatggccgcatag

SEQ ID NO: 514593 - DNA, 267 bp, Stenotrophomonas maltophilia
atgaagaggtcaagattcacggacagccagatcatggatgcgctcaagcgggctgaggccgggctggcggtgccggaactgtgccgggagctgggcatcagctcggccacgttttacaagtggcgttcgaagtacggcggcatggacgtgtcgatgatgtcgcgcatgaaggaactggaggccgagaacgcccggctgcgcaagatgtacgtcgaggaaaagctcaaggccgaactccgagccgaggcactcgaaaaaaagtggtga

SEQ ID NO: 514594 - DNA, 1587 bp, Stenotrophomonas maltophilia
atgctaaatttcgcagagcttcacctcaagccagagacactggcgcgttacgggttgccggatatcccgtaccccatcccagcggccgatctgaagtcggccttgctcgacaacggggatcttccgctggccgcgatgctgcacggcctgcagcggcgcagccgggatggggaggccgaatggcatcaggtcgaacccgcaatggatcggcttgccgagctattggcgcccgacgatgcccgcgatgtcgtttcagccgctggtgaccactggtggctcgaggtcgggcccgtggacctcggcggcaaactggtcaccatccaacgtggcgatgctctgatcgctgccatcaccgcccgggacgacggacgcttgcgggtggcggtgtttcgcccgttggacgccaagagcgcggaatacctgattgggctggggcaagtgcctcaccctgagcacggtgtctgcatgcgcgagaacaactgggagtacgcgctcgactgctccgccggcaacggcaactactacgctgccgaccggggcgaggcctacctgtcctactgggagaaaggcctgggcatcagttgggacggctccgatgtgcccgagtggcgcaagcagctggacctcgtcgcccgacccgtcgcccgcgtagtcgcagagttgggcgtctactacaccttgtccggcaatgaggacgaggagccggtggccgatgcgggcgcggcggaagaattcgagacaccgacaccacctgcctggcgcagcaagcgccagcaaaagcgcacggtccaggggcggtttctgggctgcctactcggtggcgcagtcggcgatgcgctgggcgcaccggttgagttcatgaagcggaccgagattctccgtcgcttcggcccgaagggaatcacccagtacgcactggcttatggcggcatggggacgatcaccgacgacacgcagatgaccttgttcaccgccgaggggttgatccgaggctgggtgcgcggctgcttcaaaggcatcacgacctattccggggtaacggcccacgcctatttgcgctggctgcaaacccaaggcgaacgcccgacatgcgacatcgacttcggcaccgatgagcctggctggctgtttcagcagcgtcaactgcacagccgtcgcgcaccgggcaacacctgcctatcggccctgcgggcgatgaactcgctcggggagccggcccgcaacgacagcaagggctgcggcggcgtcatgcgggttgcgccggtcggtctgttcgcctggcgcctgcggcagtacgaatatccccaagacgccttccgactgggtaccgagttggctgcgctgacccatggccacccgaccggagccctgaccggcggtgtgctggcggtgctgatcctggcgctgaccgatggtgcgtcgctgcacgaagcattagccgccgccaaatcccttctgggagccgagccaggccacgaagaggcgctgcgggctatcgagatggctgaggagttagccgattccggtctgccccatggtaatccccccgcaaaagcggtgcggtcagaagtagaattttctcactga

SEQ ID NO: 514595 - DNA, 714 bp, Stenotrophomonas maltophilia
atgctcgccgagctgcgcgccctgctgtcctttgtggacgtagccgacgcgaccagggccgactacctggaggccatccagactgccaattgcctgggcaagcgctccggcaaaacgcggacgctgacctttcggcacctggctgacctctacgcgctcgatcccagcctgttggtgttccgcgctctacgtttcttttggcagcgggatgtagatgggcagccgctgttggccgctttgtgcgcctacgcgcgcgaccccatgcttcgagccaccgcacccttcattctgggattccaggaaggggccaccatcactcgtgagtcgatggaagatctcatcgacgcgcaagagccaggacgtttcagcaaggccacgctcaagtccaccgcgcagaacatcaactcgtcctggactcaatcggggcaccttgcaggacgtgtgcgcaaagtgcgggcccgtgctgtggcgacgccgggcacggtctcgttggcactgcttctgggctacgtgagcggtctgcgcggcgagtcgctgttcaagagtgactacacaaagatgctcgactgcaccttcgaaaaaacgatcgagttggccgaggacgcctcgcgcaggggctggatctcgctcaaacgcgtcgggcaggtggtcgaagtgcttttcccgaacctgatcactgcgcaggaaatggagtggttacgtgagccgaattaa

SEQ ID NO: 514596 - DNA, 552 bp, Stenotrophomonas maltophilia
gtgagccgaattaaacgactgactcagtcttacagcaaatacgtctctgtgccatggcgtgacgacgcagccgctgcccagcgcgtcattttctgtgtgtaccacgaaacggaagagctgcgcttgcgtgccaaggtcgatgagttcgagatcgccactcgcgcggcgggctatgactgggctgtgttcgacctgaccgactctttcccgaactggcttgcgtcccagcgctacgccaagagctatttccaaaagcccaatcttctgtcgacgctgttgcccaagtacctcggctacatcgaggccgagttcgatgccttcttgcaagacaaaaatatcagcgacgacttcgtcgtggcgctgcagggtgtcggttcgctgttcggtttcctgaaggtcaaggaagttgtggacaagctcgcccccaaggtaaagggccgcttgctggtgtttttccccggcagctacgaagacaacaactaccgcttgctggatgggtacgacggctggaactacctcgccgtgccgatcaccgccgacaaagaattctga

SEQ ID NO: 514597 - DNA, 3453 bp, Stenotrophomonas maltophilia
atgacaacaagcatgctcaatcgcgacatctaccaaaaggacccgtcgacccgtaagctggtcaacgagggcgtggccagcgtcaacgacgaaaagaccaatcaggcgctgtccgtcctgcggtacgagcttgagacctttgtctgcgatggccagtacgaaaagggcctggaacacatcctcgacgtctacctgaagaacatcgagcaggccgagcagcctgccgtgtgggtgagcggcttctacggctcgggtaaatcgcacttggtcaagatgttgcgggccctttgggtagatagccagtttgacgatggcgccaccgcacggggtatcgcaaacctgccgcagggcgtcagcgactacctgaaagaactcagcacccaggcgaagcgccacggcggcttgcacgccgcgtctggcacattgggctccagctcgcgcgacaagtccgtccgcatggctctacttggcatcctcttcaagtccgttggcctgcccgagcagtatccggtggcgcgctttgtcatgtggcttcagcatgaaggcatctacgaagccgttcgcagccatgttgaaaagagcggcttcgactggaacgaagaacttgacaacttctacgtggccgagggcctgcacgaggccctggtcaaggccaagcccaacctgtttacgtcgccagcgtcttgcgtcgagaccctgaacaacctgtacccctatgtgcaggatgtctccagcggcgacatgctcaaggccattcgccaagcgctgacccgcgacggcaagttccctctcaccctggtggtgctcgacgaggtgcagcagtacatcggcgaagacagccaacgctccattgacgtgcaggaagtagtcgaggcctgctgcaaaaacatcggcgccaagatgctgttcatcggcaccggccagacggctgtcaccggcacatccaacctcaaaaagctcgagggccgattcaccgtccgcgttgagctctccgacgctgacgtcgatgccgtgatccgtcaggtcatcctggccaagaagcccgaggccaaagcgccggtcgaaaaggtgatgcagaccaacctgggcgaaatctctcgccacctggccggcaccaccattggccaccgaggtgatgacattcaattcttcccgcaggactacccgatcctgccggtgcgccgtcgcttttgggagaacacccttcgcgtgctggatcagaccggcaccgacagccagctgcgcaaccaactctccatgatccacaaggtcatccagaccaatgtggacgctccggtcggcagcgtggtgccagcggactacctgtacttcgacgccgccgacaagctgctgcagtcccgcatcctgccgcgcaaggtgcatgagaagaccatggtctgggccaagggcaccgatgaccaacgtctgatggcacggtcctgcggcctggtgtttctcattaacaagctggccagcagcaatcacgaaatcggcattcgcgccactgtcgacaccctggctgacttgctggtagaagacctcacccaaggctccagcgcgctgcgcagcaagctcccgagcgtgctcgacaagtgcgagctgctgatgaaggtgggtgacgagtaccgcatccagaccgaagaaagcgccgcttggaacgacgagttcctcagccaacgcaacagcctagccaacgaagcccaccgcgtggacgcggagcgcgacgatcgcatccggcgccgcttcggcgagatggtgcgcaagctgtcgctgacccaaggcacatccaaggtcacacgcgacatcttcccggtgttcgacgcccaactgcccggcgacgctgccgagaaggtctgcgtctgggtgcgcgatggctggagcatcgacgagaactcggtgcgcgccgacgctcgccaggcgggcaaccagtcgcccaccgtgttcgtgttcattcccaagcgctcggccgatgacctgcggcattacctgattgacttcaaagccgccagtgccacgctggacaagcggggcgttcccaacaccgccgagggcaccgaggcccgctcggccatggagaccaccaagcagaccgctgaaggcaagatccgcgaactgctgcaagaggccttctcgggcgcccgcgtgttccaaggcggcggcaatgagatcctgggcaccgacctgcaggcaatgacactggaggccgccaccaacgctttgcagcggctctacccgcagttccatattgccgaccatgctggttgggaaaacgttttgaagaaagcccaaaacggcgcgccagatgccctaaagagcgtgggcgacgacggcgagcccgccaagaacccggtgtgcaaagccatcctggccttcattgctggcggcaagaagggcatcgatatccgcaagaacttcgagggcgcaacctacggctggccgggtgacgcggtggacggtggcttgcaggtactgctggtggccgggctgatccgcgcccaggacgaaaaggggcagaccatcgatccgaaagacctggaacgcaaggtcatcggcaagaccatgttcaaggtcgagtcggccactgtttcggcagcgcagcgcatccagattcgcaaggtgctgcagaaggtcggcctcaccgccaagcaaggcgaagagctggcctacgtgccgcagttcctggtcagcgcgcaagagctggccaaccgcgccgggggcgaggctccacgtccggtgcgccctgaaacgaaggcactggaagaaatccgcctcacagccggcaacgagcagctattggctctctacaaccagcgcgacgaactcagtgctgccatcgacacctggacggatctggccgagcgcatcgacaagcgcctgcctgcctggaacacactcaagcgtctgttggctcaggccaacgggatgtcgggggctgaggttttggtggcgcaagtcacgcacctagagcagcagcgccagttgttggaggaacctgatcctgtcacgccgctggtggccagcctcacccagttgctgcgcgacgagctgaaccgcctgcacaccgattaccagacccgccacaagaacggcatggcgcgcctggacgccgacaccaactggcagcagttggaacccgaacaacgcaacagtctgctcgccgcccaaaagctcactctcaccgatgcacccaaggtgcaagtggccaacaccgacgaagtgctagccacggttgatcggctgtcgctgtcgtcgttcgccgaccgcgtggctgccatcgactcgcgctttgacgctgtgttggtggccgccgccgagttgatggagcccaaggcgcagttcgtcaagctgcccagccgcaccatcaagaccgacgaagacattgacgcctggctgctggacgccaagcaaaccatcgcgctggccctgaaacagggcccggtcatccttcactga

SEQ ID NO: 514598 - DNA, 3396 bp, Stenotrophomonas maltophilia
atgatgcaagcactcgacaaagacctgcgcagcgcgctggaaaaaaccgtcaaagcggcccgcacggtcgctgaaactgccgcacaagcggcggtggagcaactgggcgttggtcacgacaagcctgaagcttttctgagtgatgacgagaaggcgttgcgcaaccgcctgcgcacccacggcaagcagctcggcgacgcccgcgactcgaagagcaccaacccgacctacggcaagcaagaggtgcagcacctagtgcaagaagtggcctaccagcactggcaccgcatgctattcgcccgcttcctggcagacaacaacttgctgatgtacgacggcgtggccgtcaccatcgaagagtgcgatgagttggcccccgacgaaggggccaagagcggctgggagctggccggcaagctggccgcccgcatgctgccgcaggtgttcaagcccggctcgccagtgtttgagttgacctttgcgcccgagcaccagagcgagctggaacgcctgcttaaggacctgcccgacgccgtattcagggccagtgacagcctgggctgggtctaccagttctggcaggccgagcagaaggacgccatcaacaagtccgaggtgaagatcggcgccgaacagctgcccgccgtcacccagctgttcaccgagccttacatggtggccttcctgctgcacaactcgctgggcgcatggtggagcacccgccatcccgacacgccctgtccggtgaccctggagtacctgcgcaccctggaagacggcacgcctgctgccggcagcttcgacggctggcccgagtcactggccgatttcaagctgctggatccgtgctgcggctcgggccatttcctcgtcgcggccttcctcatgctggtgccgatgcgcatggcggcggaaggcttgagcgcgcgcgaggccgtggatcgcgtgctggagcagaacctgcacggcctggagctggatgcccgctgcgtggagatcgcggtgtttgcggtggcgctggaagcctggcgctatccggacgaacgcggccagccgctgggtgtgcgcgagatccccagtccgcatatcgcctgctgcgggttgaaagtggcgggcaaggtcgaggactggcaggcactggtgccggacgatgctgcgaatgccaatgccttgcgcgaaggtctggcgcggctgcatcagcagttcgcgcaggcgccgctgctgggcagcctgctctcgcccagccggcacaagggcgacctattcaactcggactacgcgcagctggaaccgctgctgctggcggcgttgaagcaggagggcagcggcgaggaggccggtggccggcgcgaatcggcgctcagtgcgctcggcctgctggatgcggcgcgcctgctggaagcgcgctatcaactggtgatcaccaatgtgccgtatctggcccgaggcaagcagagcgaagcgctgagggattactgcgaaacccattacccggccgccaagaacgacctggccaatgtgttcctggagcgttgcctggaactaagtggcgacggcggcgtggtgcagatcgtgatgccgcagaactggttgtttcttggtagctacagaaatcagcgcgagtcactgctcaagcgtgttgagtggaacttgctttcaaggcttgggccgggagcgttcgagaccattagcggcgagatcgtacaggctgtcttgctcacacaatcacgtgctactccatccgagacgtttcagttgcgtggggtggatgcaagtgccccaaagacggcgcaggagaaggcgacgctattgcgcgatggtgaattgatgtccgcgagtcaggcagaacagttgagaaatcctgatgcgcggattgcgtttggtaaagggaaggccctgccactactgagcacaagggcgtcgggattggtgggtatccagacggcagatgaccccaagtacatgcgcacagtatgggagttgccgaagctcccgggttgggagttcatgctggcgtcgcctgaagacttgcaaagcgactttgtcggactttcttggttcttgaagtgggatggcgggcagggagagctttctaatcagtacaacgcatgcattcgtggcgttgacttcgttggccagccagcagtcgcgatccatcgaatgcaaaagcttggtgccttccgctatgtgggcggcttcttccatcagaatccggcagtcatcttccccaaagacaaggcgcatctccccgccatctggtgcttctgctcctcgcccgagtacaacgaagccgttcgccagatcgaccaagcgttgaaggtcaccaacgccaccctggtcaaggtgccattcgaccttgagcgctggcagcaagtagccagcgaacgctatccccacggcctgcccaagccctattccgacgatcccacccaatggatcttccacggccatccctgcggctcggtggtctgggacgaagacagcaagcgcaccgccgatggcccgctgcgcgtcgaggccaacgtgctgcagattgccgtggcccgtctgctcggctaccgctggccggcggaaaccgacgccgaaatggaactggccgacgaacagcgcgcatgggtcaaacgctgcgaaacgctggccgcccatgccgacaaggacggcatcgtctgcctgccgccggtgggccgggaaaagcctgccgccgatcgcctgctgaacctgcttgccgccgcttacggcccggcctggaacaacgacgtgctggcccggttgctggcctcggctgatcacgccggcaagtcgctggaaagctggctgcgcgagaagtttttcgcccagcactgcgagctgttccaccagcgtcccttcgtctggcatatctgggacggcctgcgcgacggctttgccgcgctggtcaactaccatcgcctcgacaccaagaccctggaagcgctgatctacacccatctgggcgactggatcacccgccagtcccaggacctggccgccggcgtggacggcgcgcaggaaaagttgcacgccgcccaggcgctgaagcagaagctggagctgatcctcaaaggcgagcagccgcacgacatcttcgtgcgctggaaaccgctggcccaacagcccatcggctgggacccggacctcaacgacggcgtgcgcctgaacatccgccccttcctgtcggtaccagatgtcgggaaaaaaggcgcgggcgtgttacgtgacaagcccaaggtcaaatgggataaagaccgtggcagcgatgtgccctctgcaccttggtatgaactaggcctgcaatacggtggcaaggttggcgaccgaatcaatgaccaccacttgagcttggccgacaagcgcaaggcgcgggagaaggccaaatga

SEQ ID NO: 514599 - DNA, 1833 bp, Stenotrophomonas maltophilia
atgatcaagtcggtcaacaactacccggtctcgcagctcttcgacatcgaagcaggtgtcgtctatgcgatcccgcgctatcagcgcgaatacacctggaagatggagcagtgggagtcgctcttcgatgacgtcgaagagaacgaccccgggtacttcctgggttcgatcatctgcatcaaccagaccactgacaccctggcggtgcagcggctggaggttgtggacggccagcagcggttgacgacgctgtcgctgctcttcgctgcgctgtaccagtcgctaaagcggcatgagcaagatctggatgacgatcagcgcgtggagcttgtcaacctcaagcgcaagctggtgctgaagaagggtgacgaccagttgcgcgtcatcccgcaaattcagaacaacaaccagaacgactaccgcgccgtcttgtccgacgtgggcgtgatcagtccgtttgatacgccggcctacgcaggcaaccgcaagatcttccgcgccttccggtacttccaggctcgcatcgaagaaatggtggacggcgagaacgatcgcctggcgtcgatcatggccttcctcgacaaggtgagccaggcctgcctggtgaagatcgaagtggccagccacgctgatgcctacacgttgttcgagtcgctcaacaaccggggcatgccgctcacggccatcgacctgatcaagaacaagctgctggcacggctggagaccaccgagcccggcaaggtggaccactacttcgacgtctggaacaagctgctggggtatttgggcgacgactacagcgtgcaggagcgcttcttccggcactactacaacgcgttcaaggacccactgaacgtgccgttccgcaaggacgaggacaagaagaaggaccccttggggccggtggccacaaggtccaacctgatccagatctatgagaagctgatcaaccaggacgccaagcaccacctgcaggccatccgttccgctggccagctgtatgcactgatgctggcccggaacacggacgaggcctgggctcctctggacaagccgctgaaggacctggaccgcattcagggcgccccgtcttacctattgatgctgtacctgttggtgcgacgtgaggcgctgggcatcgacgtagcgcagctggaagagatcgcgcggctgctggtctgcttctttgttcgacgcaatctcaccgatacgccgcccacccgtgacctgacgcgcctgttcatggccaccatcaacaaggtggcagagctttcgggtgccgccgtggtgacgacgattcgcgacgagctgctggcagtgtcggccagcgatgcgagtttccgcagcaagcttgaaggcgccatctacgaggagaacgccggggtcacccggtttgtgctgtgcgccttggccgagcagagcatgaccaaggagacctgggtcgatctgtggaaatatgaaggcaagctcttcgtgtggaccattgagcacatcttcccgcagggcgacaacatcccagcgtcgtgggtgacgatgatcgcgggcggagacgagaagaaggcaaaagccattcaggaaacgcatgtccacaagctgggcaacttgacgatctccggcttcaacagcgcgctgggtaacaagagcttcaaagagaagcgcgaccgcaccgacagcaagggccttgaggtgggctacaagaacgggctcaagctcaacgccgaattggcaacggccgaggcgtggagcgtggcgcagatcgatgcgcggacgaccaagctggtgggccaggtgatggggctcttcgccatgacggagggccagccatgcgcgtga

SEQ ID NO: 514600 - DNA, 2343 bp, Stenotrophomonas maltophilia
atgcgcgtgatcgaacatctggtcaagaccctgcgcgactcggcgatcttcaaccccgaggttcaagttgcgccttcgtgcatcttgtggcccgacaaggatcgccaatgggaagcggtgattcctcgcctgcaaagcgagctggcagaactgctggtgctgggcgaatacgcgcccgagaaccgtacggggccggccatctggctgcgctgcgtgattgcgggcaaggcacctgatgtcactttgccggccgaccgcgtgccggtgttctacctgcctggcgtcagccgccaggacctgcgggcgatcgaagactgcccggacctcttgaagcccttggctgaattgcagtaccggggcgtgatctggtcgcaggcgaacgctaaggactggaccatcatggccttcctgaagtccgaccaaggcggcatgggtctggacgtggcccaggacaacgacgccaagaacgccatgcaactggcgctttaccgactgctggatgaagagcttgaactgctcaagggcaagcggctggacaaagactacttcaacaccctgctgaccggcggcgacccggtgcgcgacctgctgcagtggctggatctgggcgacgtgttccaggccacgcgcggcgccaacgagtggaaggcctttgtcgaggtctgcaagtcacagctggcgttcaacccccaggccgacggcgttctggcgggtgccagcaagctggcgacacgcgaggggccttggcattcggtgtgggaacgctacagcgaagcgccaaagcgttaccccaacatcccgagtcgaatccgccagtgcaagccaccgatttttgatctcttcgtcacgactgagtctgctggtggctggccacaatggaacgaggaacaggaacaagcgctccagcgtgacttgctcgccttaagccatatgccggcgcacgaagcgaggaagcgggtgctggaattggagaaggtccattcgccgcgccgtgagctggtgtgggctgagttgggtgaatcgccgctggcgctggccgccaagcacctagcattggttgcggaagtaaccaagacgacgttggcggccggctcagttgcggacttgcaggccggttatgccacgcagggctggcgcgccgacgatgcgattctgtcggcgatagcgtgcgcagacaaagtggcggatgttgatgcggtgacggctgcagtgcgggcgatctatctgccctggctggaggagtcagcacgctacttgcagaaactggtcgatgggtcgagctaccccggagggacgatcgccagtgccaaggccttcgccaccgcaaagagtgagtgtgtgcttttcgtggatggcctgcgctttgacgcggcccgccgtctctcggcgaccctggaggcgcgcggctgcctggtggcggagaacatcggctggacggcattgcccagcgtgaccgcgacaggcaaagcggctgcttcgccagtaaggaccaagatcagcggcaccgacgactgcgacgactttgagccttgcgtcgccgccactggccagtcgctcaagggcggctaccacttgaagaagctgctgaacgataaccactggaaagtgctggaccgcactgagaatggtgacggccagggtaacgcgtggtgcgaatttggcgacatcgacaacgagggacatgcgcggggctggaaacttgccaagcacatagacgcgcttctcgcagaaattgcagaacgcatcgctaccttgttggctgcaggctggaacagcgttagggtggtgactgaccacggctggctacttatgccgggcaagttacccacgatccaaatgtccaaggacctcactgacaacaaatggggacgctgcgcctcaatcaagcctggcgcttccaccagtgagcgtttgtacccttggttttggaaccccaatcagcagttcgcgctggcggacggtgttagctgctatggcaaatcggtggattacaaccacggcggattgagtttgcaggagtgtctgacgctggagttgatggtgacccgaagcgggagcgcttcaggcaagcaggtagtcgaggtcaccgacatcgcctggaagggtttgcgctgcacggtagctgtggatggccagtacgcgaatttgtccctggatattcgcacccaggctggcgacccggcgtccagcgttgtcgtgagcgtgaagtcgctcaaggacaacggcaccgcatcggtggttgttgagaacgaagaactgcaaggccgcgcggcgtttttggtcctgctcagcgcatcgggcgaactggtggccgaggcaaacaccgtgattggtggaggatga

SEQ ID NO: 514601 - DNA, 2049 bp, Stenotrophomonas maltophilia
atgattgaattggatcagatagacaagaaagccgcctcggtactcgacgggtatctggtccggaaagacttggtccgcacctttagtcggcaatttccggtacccacatacgtggtcgagttcatgctcgggaggtattgcgccagcacggatcaggaagagattgacgaagggctagaaattgttcaacgccagctcaagtcccgcacggtgcgggccggcgaggaggaactgttcaaggccaaggctctggagactggcgaggtaaagatcattgacctcgtgacggcgcgcgtcgacaacaagggcgagtacgttgcaagtttgccgagcctgcggctgacggatgtgcggatcagcagcgagctggtgaaccaacacgaacgcatgctgacggggggcttctatgccgagctgggcgtgacgtttgatgtggcaatcgcgcaggaagccaaggggcgtccgtttgggatcacctccctgcgggagattcagctatcgaaacgcgacgtgctggagacactgtccaaggcacgcgccgaattcacgagcgaggagtggaagtcgttgctgctccgatccattgggattgaacccgctggtttgaacgagcggcagaagaatgcgctgctgctgcgcatggtgccgttcgtcgagcgcaactacaacctggttgaactcgggcctcgcggcaccggtaagagccatctgttccagcaggtctcgccctacgctcaccttgtatcaggcggcaaagctaccgttgccaagatgtttgtggagaacacggccagaggtcgtaggggcttggtttgccaatacgacgtggtctgcttcgatgaggtgtcgggcatctccttcgaccagaaggatggcgtgaacatcatgaagggctacatggagtccggtgagttcagtcgaggcaaagagagcattcgcgccgatggcagcattgtgatggtgggcaatttcgacgtcgatgtagagcaccagcagcgcatcggccacctctttgggccgatgccgccagaaatgcgggacgacaccgcattcatggaccgcatccacgcattcctaccgggttgggacgtgcccaagatcaacaaggacttggtgaccaaccacttcggcttggtcagcgactttctgtccgagtgctggagccagcttcgcaatcagagccgcgtgagcgaattgcaaaaccgcgtgttctttggcggtgccttgtctggccgcgatacgaatgcgatcaacaagaccgtcagcggtttgctcaaactgctgtacccgagcgcagatgtccctgtgcccgaagaagatctggagtgggccgttcgcatcgcgatggaggttcggcgccgcgtaaaagagcagcaaaagcgtgtgggcgctgccgagtttcgcaatacgcacttcagctacatcatgggcgcagacggggtcgaaaagttcgtctctacgccggagctgcaaagcgaaaacagcatcggcagcgatccgctggagccaggtcaggtctggaccatcagcccgggcggcggtgaggaaggctccggcctctaccgcatcgaggtcaacgaaggtcctgggtccggtgtgaaggtgctcaacaagcccatcccacctgcgttccgcgagagcattggttttgccgagcagaacctgtacgccagatccatgcaattggtcggcgacaaagatccaagacagcacgagttcacagtccagctgagggcttttgatgcagcaaagtccggggcgaagctgggcgtggcatctctggttgccttgtgcacgtcgctcttgaagcgaagcgtgcggggcggcttgatcatcgtcggcgagataaacctgggaggatcaattgaacctgtccacaacgcggtcacgattgccgagattgcggttgagaaaggtgcgacatcgctgctaatgccggtggcgtgtcggcgtcagttggtcgacttgtcggatgacatggcaaccaagatcgacatccagtttttttccgactcccgagatgcgctgttgaaggccatggccgagtga

SEQ ID NO: 514602 - DNA, 942 bp, Stenotrophomonas maltophilia
atggcgcttaaccttggcaaagcagtcgttgactacttaaccgcccacccagatgagaaattctccgcgcggcagatcgccgagtgggtcttcacgaccttcccggacgagtgcaacgccaagaaggctagcagtcaggcgttggaaaccgacgcagacctgttacagcagttggtggcggagatcggctcgcagcgcccacgtctgcagaagaagcatcccaacctgaagacgacggaaggccgtcctcgcaaatactacttctccgagaaatcggacagcgctgaagttgcggctgtggagagcgttggcgtcgcggctccggttggcaaggacgacgcaaagctcggggagcacagcctgtacccgttgctgagcagctatctctgggccgagttcggcgtgtactcgaaacgaatcgatgagaagcgctcgtcgaacaagcgtgggcccaacggcaaccgctggctctatccggatctggtcggcatggaggacctgggggccgactggcaccaagaggtcaaggattgcgtcaatcagtattcggacaagcgcaccaagctgtggtcattcgaagtgaagctgctgatcaaccggtcgaatgtccgtgagtgcttcttccagtctgtttcgaattcctcgtggtccagcttcggttacctggtggctgccgagatcgagggccaggacacattgaaagagctgcgcatgctgtttgcggctcacggcattggcctgatcaaactggatgttgagaatccatctgagagtcaggttctcattcctgccagggaacgcggggagattgattgggataccgccaaccggctggcgacggagaacaaggactttttggagtacgtgaaactggtcaagcagttctatcagaccggcgaggcacggcccgcagattgggacgtaccaaagacagaagactga

SEQ ID NO: 514603 - DNA, 666 bp, Stenotrophomonas maltophilia
atgaatgatattttcagagaaattcatttcaaactactgcagaatcaagcaacactggccgacgcacttgaggcactaaaggaggcccttagtgcatcccaccaactcaccccgaactggcatgcgctcggctttattcattgcaaactattcgagtcagaagcaggcacattgagattacacatatggcccccaaatgagagaagccccctagaacagaaaagtaaaattcatgaccacatattcgacttgaagagcctagttctttgcggacagataacaaacgtcctacacacagaaagcgatagaatcgaaaccccctcaaaagctttcgaattacactacgtggagtacaacaggcaaggatcgagattgatcgcaagcggcaaagaagttttcgccgcagagaaaattagatcagaaattaaaaaagggaatacatatcaaatacaaaagggaatgcttcacgactcacaggtatctatcgacgaactcacagcaacgatcgttgcaacgtacggacatgtccaagaaagaccaaggatgctagggacgcctggagaaacccctccgaaaaaaagagagttggtcgcattcccgaccattgattgggaaaatctgatacagaaagtgattgacgaactgcgaaaagagagcggcgcttaa

SEQ ID NO: 514604 - DNA, 918 bp, Stenotrophomonas maltophilia
atggatagcatattcacaaaggcctatgcaagaaaggccttctttgggctagttggactcctcagcgcaatcgcgctaattgtacgctatggagtactacctttcgcttcagactcggtcaaagtaaatcccgcagtccttgcggcgaattttctagatagttttgttatctcccttatcgttagcacgttaataggcgcattcattttcttcatcacaccaacaatcattagaaaatctcaaattgaaacagtagagcctcgtgaactccgcgaccatttcgaacgctcattccaatctgctgatttttggtggtacaaggggggctgcggaaggtattttagaacaagaacccttcccaagatggccgaatgggccagggccaaaagcctctctcgcgaagttcgagtagtagtccttgatccattaaacgattcactctgtgatgcccacgctcgattcagacaaagcacagcatcaggaaaattatcacccccatggacaccccaaaaagtaaaagacgagatctacgcaacaatcgtagcagtattggttactcaatccaatgaacccatgctcagaataaatttaagcttagccgcccattattctgcatttcgaattgacctctccaacaacatcgcaatagttacaaaagaagaccgacaggcgccggccatcatttgccaaccagacaattattattacaaatcttacaaagacgagataactctaacggaaagccaaagcaggcgcgtcacacaggttaacctggagaacttggaacttaaatcattaagccccgagcaagtaaaaagcgcactatctcaggcgcaccttgccggggagagcatgacaactgacgatttccaaagaatcgcaacaatctgcaaggaagcgaaaaacccgtatgaatga

SEQ ID NO: 514605 - DNA, 660 bp, Stenotrophomonas maltophilia
atggacggacagctaataacaattgaaggcattgacggaagcggcaaaggaacgcaagcaaagctacttgccgatgagttgagcgcaagaggcatagccaccaaactttacagcttccccagctataacagcacgttttttgggagggaagtgggcgcatatttgcgcggagagtttggaactattgacgaggtacatccaaagctagcctcagttctttttgccggtgaccgctttgaaaaaaaggaacaaatagaaagagatctcgcaaatggcagaatagtgatctgcgacagatacacaaactcaaacatagcgcaccaatgcgcgaagatgaatagaacgaatcaccccgaattcatcaattggattcagacccttgaatatgaggtactcggcctgccacgcccagacagaattttctttttagatatccctccagaaatcgcacgaaccctcgtactcaagaaaagcgaaagggactacaccgcatcaaaagaagacatccatgaagaatcctacagctacattgagaaagtgcacgaagcgtatagaaatctgagccatctcgaagactggactgtgatcgagtgcatgaggatgggtgaagttctcagcatcaatgagataaacagaaaactaatatccttctttatttaa

SEQ ID NO: 514606 - DNA, 423 bp, Stenotrophomonas maltophilia
atgaacgccaccgaaaaccacgcgacaacaaaagaaataatccgctcgggagagcacaaggatatacattcagcactttcatccaacaaggataaagccatcgatataatttccgacttgatctcatcaaatggctttacatacatcgaaaccaatgaatcaaacgaatcgattgaattccgagcaggccatgaaaatccgccgaataacaccatcatcactttcgaaaaggccgattgcacgatacatggcacatcaatcgataccattgaaaaaacatatttgatcgcattcgcaatcgagaattatttagatgatgcaatctacctaccacacgagctgcgccaagcgcgaataaaggcggtcatagctgactgtggcgttgatgtgcaattttattcaaacgtactgagaaactggtaa

SEQ ID NO: 514607 - DNA, 450 bp, Stenotrophomonas maltophilia
atggcggctgggactggggtacgctcgccgttcatcaccaaggatccggcaatgatgcgttcccctttgtttctcgctctcgcgctggccgtaggtgccggcaccccgttgcttgctggcgaggccagtgcacagaccgcgcgtgcggtgcgtgccaccgcggaaatgagcatggtgctgtccggccatatcgagatcacgcctgagggtgaggtcagctcgctggtactggaccagaaatcggccttgactccgagcatcgcctccttcgtggaaggcacgatcggcggctggcgcttcgaacccacgctgcgcgatggcaaggcagtggctgcacgcgccccgatgcgggtgcggctgagggggacgcagatggccgatggtggctaccaggtcagcatgaccagtgtcatttcagtgaatatgatccgaaggctaccgattcggtga

SEQ ID NO: 514608 - DNA, 660 bp, Stenotrophomonas maltophilia
atggcgggctggcatggagaaagggagataagaggagtggtaatgattcctgtatcgttctcgagtgctacccgatacggggccgattctcggacgcggagcggttccatacgtgctgctgtatgcgtcgccctcgctgtttggcttggtctggtaggcccggtgagtgcgagtagcgacgacggtgatggtcacaggatcgaggctggttctgcttcgacctcggccattcgccaagtgaggggatgcgatcttgatgttggtcacgtggatgtggaccggcatgtcgtccagcgggttcgcgagctgaaagcacagccgaatgcggatcaaagggccctggccatgagagccttgcttgaatgtctgtcgagtctcgggaaacgacagcttgatgtagccagtccttccggcgtgcaagagatcgcctctctgctgaaggtggatggagatgtgggccggttctacgcctccaggatgctggcgatcctggggtgtcgatctcgtccagtgctgcctcttctgcatgatgcgctggacaagacggcgcccattgaatccaatctcggcccgatggtcctgtcgccagcagtgagtcctcgcgaagaagtcgcaagggcgatcagagcgattgaaactgcgcacccgtgtagaacgtag

SEQ ID NO: 514609 - DNA, 630 bp, Stenotrophomonas maltophilia
atgacgcacaaagaaaaaatttcaaactattcgaggtatcgcggagtactgcaggttgaacctgcaccatggaacacggcagagcccaagaagaagaattcctgcgtggaggggtggaagcagttcctatccgaactcagccaagactcatacctgtggaccttgtcattcatgcgtccctattccgactcccaatgcatcaaggccctctgggaagcaacgaagtacatcaacagagagatgtggggacctagatggtcgaagaagagggctggcatgcatgctacggtcgtcgcggaaaggcaccaactcagccaggaactgagaggcaggctccatttccacgtgctggtgcatgacttggaggacgtatgcgaggaacgtcttaggtccgcagtgattcgcacagcagaatggcttcgtgacgaacacggacagactatgtctgcggcggagagaacggatgtccggaaggtgagcgacagcgacggtcttgcgtcctatttggctaaggacattggttcatggccgaacgaacggggtaacagcgtgttcttcattcgcccgtcgggcctcgaaggtgtcgtagtcgagaacatgacgtcaaagcagcttcagcgccttcactaa

SEQ ID NO: 514610 - DNA, 957 bp, Stenotrophomonas maltophilia
atgagccgagtgcccccccctagctacccgcatgggagtatccaaagcctcgcggcgctgtctcgcacgctcggcgtgccagccgacaaactactgcagatagccaaagatgccgacaatagctacagattggcaaagccaatcgtaaaagctgatggctctgtgagacgtcctgtcgatgccagggtgaagctgaaaggcgtccaagtccggattaaagagcggattttggaccaagtcaggttcccggactacctcaccggaagtctcaaagggaaggacgcagttgcaaatgctcgtctgcacgttggagcgtcggtggtcgtgtgtgaggacgtagccggcttctttccggccaccagttcaccggccgtgcttggcatctggcgaggattcttcggcttctctactgaggtgagcgaactgctgactcagctgactacgctgaacggggcattgcctgagggggccgtaacgagttcccatctcgcaaatctggccttttggcgcgaagagcatgctctgtatgaggagctgcatcgtgagggcattcgctattcccgatatgttgacgacgtatcggtgtcgtctgtgaatcagcttagtagacaggagcttgctgcttgcatctctcgcgtctatacgatgatggggcggaacggatatcgccccaaaagagcaaagcagcagattcagtgggctaatggtcctgttctagtgacaaaacttcagactaatacacgcgtcgcccttacgaaaaaggaacgacacgcgatacggggggctgtgcatggcctggaacggatggctctagccgggccttctgatgagctgctgaggcgcctgagcagtgtgtcggggcaagttgctcgcctgcgacgacttcatccaaatgagggtcaaatgctgaagagtaggcttgatgcgctcagaagactgctgacagcagcagtctag

SEQ ID NO: 514611 - DNA, 294 bp, Stenotrophomonas maltophilia
atgaacatcgggagcgcgatacgcatgtgtcgcattcgtcgtcagctcagccaagcggaactggcgcagcgcgcaggatgttcggtttcatatctctcgcttctggagaactccaagagagaccccacgctatctactgtgtcttctatagccagtgcgttgggtatcccgacagagattctgttcttcttgggtgccgagaagggcgagcttgccggtctcaatgccgagctggccggtcagttggccatggtggcattggacttgctgaatgagccgagtgcccccccctag

SEQ ID NO: 514612 - DNA, 456 bp, Stenotrophomonas maltophilia
atgagctatagctttgatacgagtgcactcatagagccttggactcgccgatatcccccggacctgttccagcccatttgggggtggctggagaacctggtcgaccaggggcacgttgctgctattgacgaagtcaggcatgaactccaccgacaggaagacgagctatcggcttggacgaaaagccaggaaaagctctttgtacctgccagcgcagatgtgcagaccgcactgagggatgttctcatcgctttcccgaacttggcagaccatgagcgagacaggtccggtgcggacccgtgggtggtcgcttacgctctttcggcggggagaagcgtcgtcacctacgaaacgatggggaaggcttcaaagcctaagattcccaatgcttgcgcccacttcggcattgggtgcctatcgttggttgacgtgcttcgccagactggctatcgctag

SEQ ID NO: 514613 - DNA, 1047 bp, Stenotrophomonas maltophilia
atggctcagctgcgcgacatcgcggacaggctgaaaaggccaactgcaacgttcttccttcctgagcctccgcccgagaaaggacggcgacaagtcgacttcagaactcttccggagactagtgaatcgggaatgggtgtcgcattggagctagagctccgactggccgagcttaagcgtcaggatgcgttggacttggctgaggagcttgaggtcccattgcctgagttcacctttagggcatctcttaaggatgaccctgaagttgttggttccaagctcaggcgctggctggatgtcccgactcccggcaaccgactttggcgcgacaagtacacggcgttgaagacttggcgggaggcgattgaacgagtgggtgttctcatcatgcaagcctccggtattccggtgagcgtgatgaggggatgcgcgttggcgtctttcccgctgccagtcgtcattgtcaacgggggcgacgcaccggcaggtcgcacctttaccctgcttcatgagctcggccaccttgcactgggacaagacagtctctgtgaccttgtggatggaactggaacgcgttcgcccttgaaggagagcattgaggtcttctgcaaccacattgccggcgccgcattggtccccatggatgccctcctgagctcacggaccgtcgttgagggactgcggcggaacacagaaggtgagtgggacgattcctccttaattgaactatcaaggcacttcggtacctcttcagaggttgtgcttcgtcgtctagtgattgggcgtgccgcatcccctgacttctatggacattggcgagctcaacaacagcgggcaatggaaggggcctcgagcgacgacggagggttcgttgagtacttccggcgtgtggtgaatcacaacgggagagtattcacccgcttggtggttgatgcgtaccagcgtgagctcattacagggactgaactctctcgcatgttagggaccaagcttttgcatctgccaaaaattcaggcggaggtagggatgccggagacacttcgatga

SEQ ID NO: 514614 - DNA, 258 bp, Stenotrophomonas maltophilia
atgttcaatctcttgggtgcgtttgcggagttcgaggctgatatacgcgccgaacgccaacgcgatggcattgcactcgctcagaagaacggtacaaagtttggacgaaagaaggcactcactgaagctcaggaggcgcgcattaggaagatgcggctggaagaaggcttcagcattgaccagttagctgaaagatttgcaattggccgcagtagcgtctatcgagccttgaaagctgctcgcgagcaggatagctag

SEQ ID NO: 514615 - DNA, 702 bp, Stenotrophomonas maltophilia
gtgaagattcagattcgctgcgtcgatgaacatggcaactacgttcgtactctgacggcagaggcgctgccgctccaccctcgcctagcggcacctgtggactaccaagttgccctggctgatgaagatttcaatcggttaaagcgtgcgttcctgcgttttacgcgctctattgaggcgcgccaggccgtcggtgacattggcctggcgttcaacaacgggcaactattggcctcgaaaaagcccaagcactctgacgttaaggtgcttgctatggagatgcggcccttctttcttgagaaagaccctctctgcttcacaaagcttctttcgctgcgctcgctcggggctgcggaggacttgcggccttgcttgagacaacatcgcctgcgatgggagaacagcgctttcgagggcaggatgtcgatggctgttgatggcgcgaacttgaacacgtctgccgtagtgagagcatggttcaatgacgacttctttcactcggagtctgagagagccaatgagctttcactagcccagctcgtttcgaaggcaggcggggaggaccaggctatgtcgcttctaactcatcatatgattgagtcgctcagggtggtggctgagttcttccaggacatctacaacgtgtccgctgagtttagagcatggtcggccaccgttccgggatggactaagaagcgctag

SEQ ID NO: 514616 - DNA, 603 bp, Stenotrophomonas maltophilia
atgaaccaacctctgaaccgttcggcccctgggcaaccgaagcgcatatcaattggcatggtcattctgtctgtggctctcgtcaacgtagcagcttgcgcgcgtgactcagggtcacattcactagatgagattgccactgatttgcccagctacctcgcacgctaccccggagttcaaagagggcagacgagctcctgcattgagctgaaagtcgacttagtgcaggccgtcaggaacggaagtatcgatgcatccagcggtctcattgaccgcacgacagaccctagccgcctcagaaacggtcaagtcgtctacttcgaagggctcgccaagaatgtaatcgtcccaatcaagactgccaacgagacgctattctcagggacgctacagaccgctggctcaactgatggactgctcttccgttcgtccgcgcaagcaaccaatgcaagagtgaatgagggctctctgatgaagggaggagcttcctcaccgatgatggacaatcgcggcgcatacgtctgtgggtttggagtggcagttgtcagcggccgcctgaatggaatagcagttaccgatgccatcgagttcacgccacggtga

SEQ ID NO: 514617 - DNA, 1656 bp, Stenotrophomonas maltophilia
atgacgcgagcttacacgtacatccgcttctctacacccgagcaaagtgaagggaatagcctggaaagacagcaagcagctatcgatgcgtttgtacgcgagaaaaatctgaccctcacggagagcagtgcattccaagacttgggcgtctccagctatcgaggcgccaacctgcgcaacggcttggggaagttcattgcagaggtagacgctggcagagtgccaaagggctcgtacctcttggttgagtcgctggacagactatcccgtcagaaggtaatggatgcgctgtctttgcttgtgtctctgatagacaaaggcatcaagattgtcccgctcaatgatgacggggcgcaggtgctggataaggcgtcagggctcgggccactggtcattgcgctgagtgtcatgcatcgcgccaatgaagagtctgaaacaaagtccaggcgagtgaaggcagcgtggcaggcgaagcgtaggaatgctgcgaacaagcctgttagtcgtagagccccggagtggctggagttcgatgaagcgaccggctcgttcaagcccattccggagcgcgtcgacgcagtcagaaaaatttacgagctggccgatgccggtcttgggcgcgggcgcatcgtgaagtatctcaactccaatggctttgccagcttccggaatcccaatgagggctggcaaacctcatccgtctcaaagattcttagaaaccgctctctcataggcttctatcagccgcaccgcatgtactacgactcggcgacgggcgtaaagaagcgagtacctgacggcgacgaggtaccgggctactacccgaaggtgcttgaagaagacctcttccttcgagtgaacgcgaggcagtacgctccgattgcttcactcgttggtcggcagggggagacgctgacgaaccttttcactggatttgtgtactgccactggtgcggcgctccaatgtccatggctaacaagggtccaggacgtaagggcggccgctaccttgtctgctccaaggggcgccgtggcaaggactgcaagtacaggtcatggaactacgatgacgtggagatgtatgtgctctacgcgcttcgccagcttgacttggcagcggtgcttgctggtgttgacaccaatcagcgtcggcaggatatccgcactgaactcgcgcgagtttcgttggagctagctgactcagagcgtagactcgcgagcctgtcagcggaactcgtctcgcaggccccggcaaacgtcagaacccttgtcagtgtggtggccacgctcgaaggggtggcggatgagcagaggaggcgctgcgatgagctccaagcggaggacgcggctctaggaatggccgttgacgaccctggtacctttgctcagaacctcttgcgcctgtatgaccagatggcatcagtggagaagcagcagctctatcttctccgagtccgacttagacagaacatttcgcgtcttctgagtcggattgatgtcatggcggtagggagaggggagccgcatgtcaccaagaacggaaacaactctcccaagctcttcctcaccttcaaagacgggcggcgaagaatggtgttgccaatcggaaagaatagtgtccacctatcggaccttccgcctattggcaaaggatag

SEQ ID NO: 514618 - DNA, 5274 bp, Stenotrophomonas maltophilia
atgcggagcgaggggaatggtgtgagtcgattttctgcttggcggtgccgcacagctgcggcactggtgctgtgcgtgagtgcgggaacggtttcggcagtcgagccctaccaggaataccgcaagctcattgagtccgctcagaacctgacggcgctgaaggatgatcttttcggcgagagcgtcagcctctacaacggcaagactgagttttccgtcaccgatgtcagcctgccaggcaacaacgcgttgccggtgcagatgcggcgccggttcagtgtcgagatggacctggtcgggagtggcagcttcaacgccagtctcgatggtgtgggcggctgggaggtcgacacgccgtatatcaccggcatgttcccaggcgcgagcgcctggctgaacaatcgttgcagtggcgacatggtacctcagtggcccatttccttccggctcaacgaagtctggcagggcaacatgatccatgtcccgggcggcggtgatcgcaccatgctgggggcctggaacaacacgccgatgccgacagacggcgttgcacgcaagtggagcacctcgcatcgcgatgccatcgactgtattccgatgaagtcgggtctggctggcgagggctatcgggtcaggaccacctcgggtgagtcctatttcttcgataccgcattcatgcgttttggtggcacgttggagcggtccggtggagaaggggaccggaccaagatcgctcgcacacgtatttatctgatggccagtcgggtagaggaccggtcgggcaactgggtacagtatcagtacaacgaaaacggtcatccaactcgcatctggtccagcgacggccgagagatcacgcttgcctacaatggcgcggcgctgatgtcggtgactgccgcaggtcgtacttggagctatggttatggccaggtcgaaggacagagccggctgacggtcgtcacgcaaccggatggaagcacttggtcctatgcctactccagcgcgctgcgtgcctgggagaaggtgaactgggatggaagcagcaacgagacctgtcaggaacaaccccctgaacgcctcggcgcgctggtcatgaccatcaagcatccgtctggtgcaatgggggaattccagttctcgaacggacgtcagtatcgcagtggtatccacgccagcgagtgcattcgacgcatagcgaactcacagtattattacgagctagccacgcccttcttctacgatgtggtctcgttgggtatcaagaagatctgggggccagggctgcccaagcctctgcagtggagctacgcctacgggagcgggtatgagccgctgtggggcggttcaaatggcgcggcggtctacccctgcacctcatgtaagaaggaaaagcaggtaacggtttccaatccggatgggacgcgcacggtttaccgttacggatcgcagtacgccttgaatgaagggcggctgttgggtagcagcattctggacgccacaggcaaggctgtccgtacaaatacctcgatctatatgaccgaggacgaggtgaaatcccagccttttgctcctctctatggaatgatctacagcggcgatgagcctagctccgcccaggtacgcccagtagtggccgaagccacccagcaggatggtgttacctaccagaccagtatgctctccttcgacgatctggctcgtccactgcgggtcaatagttccagtccgttgggcaatcgcaccgacgccacccagtatgcggatgatcgcaatagatggattctgggtgcgacgtccaaggtcaccaacgaaaacaccggggtggtggtcgaacagacgtcgtttgatgctctgatgcgtccaaccgaagtgcgctcgtatgggctgctgaagcaggtgctgacttacaacgctgacggcaccgtggctatggtggctgatggccgcggcaaccgcactaccctttccagctggaagcgcggaacgccacagcagatccagtttgctgatggcgccgtgcagtcggcagtggtggacgacaatggctgggtcagcagcatcaccgatgagaacggtgcaaccacccagtacggctacgacgcgatgggacgagtctccacgatcgattggccggcgagcgacagcgtggcttgggcgcgcacgacgcagagtttcactgctatcaatggcgatgaatacggtatcggagcaggtcattggcggcagaccgtcgcaaccggcaattcgcgtcgaaacgtctatttcgatgctttctggcgcccattgctgactgaagagttcgacgagtctttgcgcggcactacccagcgctatcagcggttcgcatatgacgaggcagggcgccaggtatttgcctcgcaccttggtgagtctgccgcgctggatgcgggtacctggaccggctacgacgcgctgggacgacagacctcggtgtcggtcgatagcgaggcgggactgttgacgtcgctgaccagctacctggccggtggcagcctgaaggtggtcgaccccaaaggcaatatcacggtgaccacgttccaagcgttcggcaggccgtcgacagaggcacctgtgtcgatcattcatcccactggggcattcacggagatcgcgcgcgatgtcatgggcaagccccgctcgatcgttcgccgtaaccaggacagcagtgcaaagatcacccgcagctatgtgtatgacggctaccagcagctctgcaagagcgtggagccggagactggcgctactgtgatgggctacgacgcagcgggcaatctggcttggagcgcggctggtgtggatctgcccagcacaacggcctgcgatgctggctcaaccgccattgctgcccgcaagattgtccgtggttacgattctcgcaaccgtctgtcgacgttggcgttcccggatgggaatggcaatcaaagctggacgtacaccaaggacggcaagcccgccacggtgaccacggcaaacgatgcgggaacgacccgggcgatcaatacctacacctacagcaagcgcgggttgttgacggccgaaacttccagcgacagtacgcttggcatccagtccctgggctatgcctacgatgctaatggcacgctgtccgctctgacctatcccagtggccgccttgttgactacgcgcccaatgcgctgggccagccgaccaaggccggcagctacgtgtcgaacgtcagctactacgccaacggtggcatgaagcagttcacctacggcaatggcatcgtgcacacgatgacgcagaaccagcgacagctgcccacgcgagtcaccgacaacaaaggcgcgattgacaatacatacgagtatgacgccaacggaaatgttgcccgtatcgtcgacaatctagatgccaagcgcacccgcaccatggcttacgatggcttggaccgcctgatccaggcttcctcttcctcgttcggtggtgatggcgtttatcgctatacctacgatgccgtggacaatctgcgttctgccaagttggccggcgtgaaggaccacgtgtactggtacgacgcgcgcaatcgtctgaccaacgtgcagaacagcggtggtgccaccaccctggggttgagctatgacgttcagggcaacttgtccagccgtaacggcgtcgcttacagcttcgactttggcaaccgcctgcgcagcgtggccagcgcagagcggtaccgctacgacgcccagggccgccgcatcctgtctgcaggtgccactgacgggaccaccattcgttcgctgtacggcaacgatggggtgctgcgccgccaggagaatgctcgtgagggccgcaataccgagtacatccacctcaacggcagcctggtggcacaggctatccaggtcgttgccccggttacgccggtcctgactgctcctgcgttcagcaacaacggcgcatacatccttcagtggacgacagtgacttacgccagccgctatgagttgagggagcaaacgggcgcgggcgcttggactacgatctacaacggtgccgaacgcagctggaatacgtccgcgaaggcggaagggtcgtttggttatgctgtccgcgcctgccagcagaacagctgcagcggctggtcggctacgtccagcgtggtggtgcagcgaccgcctacggtgaaggcggtcgtgaccgcgccgaaaacggcgttcaatggcagctatagcattgcttggacgcaagcggcgggagcagcaacctatcgcctgcaggagcaggtgggggctggggcctggcagacggtgcaggagacctcggcgcgcagtctcgccgtttccgggaagcccgcgggcacctacggctaccgcgtctatgggtgtaatccggcgggctgcggtcccgcatcggatgtcgtttcaaccagcgtgatctatccgcccacgggggcgccttcgatcaacgtgccggggcagagccttgatggaaactacaccatcgcgtggactggcctcggcggtgcattgcgttacgcgcttgaggagagcttcaacaatggtgcctgggcacaggttgcctcgttggccagtaccagtcaggcatttggtggcaagggaacgggcaactatgcctatcgcgtccgggccggcaacgacgcggggtggggcgcctactccgctgcgggtgttgtctcggtgatccggccgccggccgtgccgagcctcagtgcccctgcgggaacctcttcgggcagtgtcactgtcagctggaacggcgttgccatggcaacgagctacctgttggatgagagcgtcaatggtggaacctggatcgcggtccagaacgatggctcgacccagtcgcagcgcactggtctggtgttcggcaactacgcctaccgcgtgagggcgtgcaacgtctcaggctgtagtggtttttcactgacgatcaatgtgaagtcgactccgccaccagcgactccgcagattacgaaatctctcaaaactacgtggcgtatcaatcgtctgaccaagctgcgctgtgaagtgaaatggacttcgaccgccggtgcaacgagctatcaactgcaggtgccggggggggcgcttcaatacgacggacctgatacatcactgtcgtccacttatgggcacttctgcgctcctagccatgtgattcgtgcttgcaatgcaagtggttgctcaccttggtccagcccgccaacactgcagaaggttgacgacctgggcgatctggatgaggacggtggtggggtgccgcggtga

SEQ ID NO: 514619 - DNA, 960 bp, Stenotrophomonas maltophilia
atgaagatctttactccgatcctgatggtgctggggctgatttttggtgggcaggcttgcgcgcaagagatcatccagtacgttcataccgatgcgctgggctccccggttgccctttccgatgccaacggcgcgatcatcgagcgcacggtgtatgaaccctatggtgcggttgtaggtgaggtaaagggagatcggccgggcttcacggggcatgtgtcggactcggcgacgggtctgacgtacatgcagcagcggtactacgatcctgagactggaacatttctctcctcggatccgattgcggcgctgggaaatccaccagaaatgtttaatagattctggtatgcggctggaaatccgtatttcaatttggatcccgatggccgtgctccccggccggggcgaaaggagatggtcacggggagtaatattccaggaagcgccactgcgcgtgctgccatggctacaagtgccatgagtgtgaagcccacggctattcccgccgcaggtgagggtgcttctccctcagcgcaatcttcaagatgggactgggatgacgttctgagccgggtgggcctgaagggtgatctaacaaagaacgggaacattttcgacgttggtgctcttttccatgatgtttactatccattcatggactccccgggtggtgcaggatacaaggctgccggtgcgggacttgttgcaattgctcttcgtacagaaggtaggattgcgttcaaaacagaacactatgcgggcaggcttgaagctgccggattgaatgtagcgcgcacagagctcgtggttggtagggaggtggcaagaattcagccaaatctcgcagctggagccaacgctacggggcgaatgcgcatcaatggcgtcttggttgagtacaggctacgcactctccaaaatggtgtggttaatgttggaactatatttccggtgaagtaa

SEQ ID NO: 514620 - DNA, 240 bp, Stenotrophomonas maltophilia
atgagtgctaccgccgatcgctcattggtgagattcgttctgaatggctacgaaaggccggtctacgagggtcagcactcttatcccgtggaaattcgcctttttgatgaggacggaagcgagctcacggcgattctttatgcggattccaatgatagacttctggagttggaggttattcgatgggatggtggagagttgatctctccaaaagtcgagagtgtcgagtactacaaatag

SEQ ID NO: 514621 - DNA, 456 bp, Stenotrophomonas maltophilia
atgtcaggcggggtctgcgtagtctctgcgatcgagctgttctccacgtccgatgcgtttgaagggcgtaccatctccgtggcgctcttctatcctggaaatggcgccaaggttctattcgcaacccacgattccgcagaaatcaacgatctggcttcggccatagtgttctccaagattgccgaccagcaagatccgttgattgaagcgggctactatcgtatccaggctaccttccagcgctcgccgcagatcgtagtgggtgatggcgtcgtaccctcgcaggtgctgggaggacgctttgcggagctgaagacagtggagcgactgcggacgctcacaggcatgcgcggtttctgcgcggagtacgatgactgcgctatcgtttactccgagggcatccttccgattccccaggtcggcccggtgagcgaattgccagcagttcgcgagtag

SEQ ID NO: 514622 - DNA, 3771 bp, Stenotrophomonas maltophilia
gtgcgcgacctagcgcagaaggccacccatcgtattgacgcggccgcaccggcgctgggcaggggcgcgattgcagaaacgggtgcctacggtgccagcgctgcgcttggcgatgccgccaaggcctacaacagtggcagcgtagccttgggggccaacgcgttggcgggtgtggacgtggacgggaagaagattgtcgggtcgaactcaggtgtctccctgggcgccaacagccgaagtggcaatgggggcgtcgctgcgggcttcagggccgactccactggcgcctggagcgtggcgatgggggccgatgccaaggcccaggccgatcatagtaccgctgtcggctatcagagcaaggcgactgctggccagagcactgcattgggtcgcagcagcgaagcaactgcgctgtataccagtgcattcggaaacctttcgaaagcaactgcggtcagcgcggtcgcgctgggcgatcgtgcccaggccaagcatgagaacgcggtggcactgggagccgggtccgtcacctactctgccaactcggtctcggtgggtaacgcctcggtcaggcgaaagatccagtacgttgcagacggcagtatcagcaagagcagtacggatgctgttaccggcagccagctgttcgatacccagcaatctgtagccaaagctcagacggcagctgacagcgcactgacgaaggctgacgctctctctgggcttctgaacgagaccggtgcctcgggcaatgtccgcctgggcgcaaccaacagcggtaccgtactggacttgcggaacagcgccaatgcaagccgcaagatcaccggtgttgccgatgcagcattgtccaccaccagcaccgatgcggtgacgggcaggcagctcgctgccaccaatacccatgtcagtaccgcgcagagtgacgccaacgcggccaagaccgctgcgaactccgccctgacccaggtgggagcgctaaacgggctgctaagccaggccaatgccagcggtaacgtccgggtcggtgagaagaacagcggcaccgtgctggatgtgcgcaacagcgcgagcgcgaatcggaagctgaccggcttggctgatggagtggttagcgccagcagctacgaggccgtcaacggtaggcagctcaacgcgaccaatgacaaggtggcggcggtggagggcattgctaggtctgcgggcactgaggctgccgcggcaaagacagatgccgccaaggcgctggctgagacagcagcgctgggcgggctggtggcgcaggtctctgcgtctggcaatgtgcgcctgggtgagaagaacagcggaaccaccttggacgtgcgcaatagcgccaatgccgaacggactatcagaggcgttgcggatggagccatcgatgctgccagcacagaagccgtgtcgggccgtcaactctacgcgacgaacagccgaatttcggatttggaaagcaccaatcagtatctgagcgtgggtgttgactcattcagtgagcgcgcggaagcggcattgcttggcgttgctcttggtgattcagcgaaggccggagctgagggtgggactgcattgggcgccttcgcaagagcgctgggagagaattcagtggcagttggccgcggagccggggtctctggagaagcatctggtggttttgcgatgggagtcggtgctcgagtacatgcagtcagcggcatcgcaattggagccggtgctgttgtcgaagagtcagcccccgattcattggcattgggtgcgggctcccttgcagatgaaggggataccgcatcctttggtaatgccacagttcagcgtcgcctcaccaacattgcccgtggcaccgccgaccacaacgccaccacagtcgcccagctcagtgattccctcgccaccctcggcggcggcgcaggcattgattccagtggcaacatcatcgccccaacctacgcggtgcagggcggaacgcagaacactgtcgaagatgcgctgatggcactcgatggtgccgtcttcaccgccggccgtcgcgcggacaaggtggaagctcagctcggctcgatcttccaggattcaccttcggcccgtgccgacggcatgagtcagatcgcgctgagtggcgtgaatggcatggtgttgaccaatcttgccgatggccgagtggccccaggaagccgtgatgccgtaacgggcaaccagctgtacgccgcagagcagaagatctcgcagaatcggaatgatctggaggcgatgcgcaaggagcgggagatgggacagcaggcaatgcgagggttggatgcaaacggcccgatcgacttcggtggtgcacgtttgactggcgtggccgaggcgaagctttcggctgatagctcggacgttgtgcgcggcagtcagctctatgagaccaatagccgtgtgtcggccttggaaggcatcagtcaatacgtcagcgtgggcacggctccagaatatggtcaggctcaggctggtccggctggtctcgccattggaaacttggcaaagacgggcattgagggtagcacggcgattggaacattcgccgaagcaatgggtagaaattcaattgccctcggacgagcatctactgtctacgaaggctcagattccagctttgccatcgggaccggagctgaggttggtagggctggtgagccgggtgcaatcggagccattgcgttcggcgttggatcaagggtcgaacccggagcccgcgattctatcgcgttcggaaccagctctcatgcgacagaggcaggagttgtatcttttggcaatgttggaatgaagcgccgcttggttaacatcgccaacggcaccgccaaccacaacgccgccaccgtcggccagctgcgtggtgcactctccgccctcggcggcgaggtggatgccaatggcaacatcgttggcccgagcttcaacgtcctgggccagacgcagtccaccttgaatggcgcactggaggcgctggatggcgcggtcgtcaccaacacctcgcgcgtggacaaggtcgaaacccagctccgctccgtgttccaggacacgccctcggtccgcgccgacggcgtcaaccagctcaccctcgccggcgccaatggcatggtcatttccaacgtggccaacggcctgatcgcggccggcagccgtgatgcggtcaacggtggccagctgcattcgatgcagcagcagctcaacggccgcatggacggtctggagcagcgcatcgacgacgccccggcaccgcgtgcactggcgtcgacctcggtgccggagccgcaggccgaggaaactcctgtggtgccggaaggcaaggactcccaacaggtcgcctcggtaggcgagggcgacaagcccacaccacagccgaaggccaacaaggacgactcacccaagccgcaggtggacaccgccgaactggagaagatgctggcccgcgccaacgagtacaccgatggtgcgatcagcaacttcgaacgccgcctggacaagatggacaagcgcttcaaccgcatggcggcgatgagcagcgcgcagacggcgatggcgatgaacaccgccggcctggccacctacaaccgccttggtgcgggcgtcggttacagcgagggtgagtcggcgatggcggtgggctaccagcgcgtgctcaatgagaagggctcggccaccttcagcctcaatggtgcgttcaccaacagcggtgagcgcagcatgggcgtcggtgtgggcatcggctggtaa

SEQ ID NO: 514623 - DNA, 192 bp, Stenotrophomonas maltophilia
atgggcgactttgtccccgtgcacaacgaagacaagctgccctactgcggtgcaatgaatgatgacgtcctccggaggatcacgctggacggcttctcgagcatggcccacaaagtgtcgattgaggattttgatgccttcacagacgctgctggccgatcgtggggtgcgcacgtcgaaaatcgacgctga

SEQ ID NO: 514624 - DNA, 1032 bp, Stenotrophomonas maltophilia
atgtctgaaagttcatcgaagaaccgcgaagtcaaactcgtccgtcatgtacgaggagaaattcaccccgaggatttcaccgtctcggaaactgcgattcctacgccagggtcgcatgaagtagtggtccgcaatcgttggttccgtgtctccatctcgacacgactaatggctcaggaggatgcaacggctgctgagggaattccgttcccgcctctcaaccccggcgatactctggctgatggcgcgatcggggaggtgatccaagccggatcggcctgcggcatccctgttggcagccttctcatgcatccgtttggttggcgggaatatgccgtcgtccgcgagcaagactgcaggctcatcgactgcaccgaacctgatccagttgcttatcttggtcatggctggacggcgtatgccgcgctgacccggggcgttcaggtgaaggaaggtgacacagtgttcgtttccagcggagcgggcgcgatcggctcgatggcggggcagatagctcggctcctcggcgcgacacgcgtggtcggcagcactagtagcttcaacaaggctcgctggatgcaagacgaactgggctacgatgccgtcgtcacccgcgacggcgggccgatgatagagcaactagcgaaagccgcgcccgaaggcatcgatgtcatcgtagacatggtcggcggcgaacagcttgcggcggccgtcaagttggcgagggacggtgcccgtggcgttctactcggtgcgctgacagccgagctgaacgtggaaaaggcctctttgcaggctccggttacattggacagctttcacatcatcttcaaggatatgacactgcgcggattcagcgcggatcattcacccggtgcatttgattcctggttgcgtgatctgaagatctggaagcgtgacgggcgcattgatcttccatcgacgacctttaagggaatcgaaagtgcgacatctgctttgcaggaagcatgtgctggccgtctcaggggcgtggttctgatcgagctgtag

SEQ ID NO: 514625 - DNA, 243 bp, Stenotrophomonas maltophilia
atggtccggcctcgtgtcgtccagcggggcggctgcccggatgagggcttcgtagcgagcgtgatattcacgctcaaaactctcatagaactctctaggtgcgagcggaacttcatccataagaatgcgatgcagattctgatttgttgcgtgaagcgcgacgatcccgtcaatcaatcggacaataaaatgttcgagcggaatcatttcatcctgtttatcaatatcagggagcaatcgtaa

SEQ ID NO: 514626 - DNA, 717 bp, Stenotrophomonas maltophilia
atgtggcgcgcgcggtggccggcggcgcagttcggcaacgtttccgggtggctgatatgttcctgggtcatggcttgttgcacatcctcgatgtgggcttcgaacttttcgatcaggaaagttgccaccgttgctcgtcggcgccgctcatgcgtgctgaccggcgcagggccggtgtcgcgtatccacttgagcggctcaaggaaccagctcggctctaccgggagccgggtgcgtgggtcgactttctggatcagcagctcacaatccggcccggcccaatcctcgctgtcgccgcaacggacgcacgcgctccggaactcgtgcagcttctccggctggattacgcgcggtgtctcgaatagggcgcggacaacgagtccgcgctggcgcggcgacaaagaacccgcaacagcgtcgaaatcgcaagatgcccaagggccgaaagctatcggcgcaccctgcaaaggggtgaccaaagagcaggtcgccgtgtggaaagaacaggtcgagaacatgccctggcttcacgacgggtaccggctcctgctccggcaggtgtgcactctcgccgcgcgtatggcgaccgatcctgagattggtgtgtcggcgatgcacgccctcggctcgttgctgtcaaagctcggcgcgcccccggtggataagacgaaagtgaatcatggctcaggtgaagacccgggcgacaagcacttctaa

SEQ ID NO: 514627 - DNA, 531 bp, Stenotrophomonas maltophilia
atgaaactctccgaaatctgcagccaactgctgtccggcgaagcctgcgacgacatcgacagtttccatctcgaaatcgacgacttcgaggaggtagaacttgtctcgcgcttgagtcggatcgatggagtgctggagcgccttgggcctcgatggacctcggcctatctgctcagtctctgcaatcacgtgctttcaacagtccgcatttccggtcgtgcacgcgattcagccgatgcgaagatgttcctcgcattgagcttcaccgacttcgagctgcacgcgcaagagggcatcctgcttccaagcgtcttctattatccaggccccgaaggggttgcgttcgggagccaccgtcggcacgaatccgacagggcggcttcggctgaaatcgacatcgtgcgctccgtgttcgaagatgctggcatgctcgccggctttcgcttctgcgagagccgcactgatggtcccccaggtcacgacgtggttcgtgtctttgcgattccattggtcgaaaatgaggttcgctga

SEQ ID NO: 514628 - DNA, 390 bp, Stenotrophomonas maltophilia
atgctcgtggaagagcgccaggtgttcgaaacctacctgtccgatccgcaagtccatgatcgtctcgaacagcatttcctcgacgcgttcacggccggcatccaggcggccaatctgcgtgctgaagacttccgcagcccgcattacaacgtgttcttcgtcgatggtacgaaagaccgcgaagccaaccccattttctccgccaagcatctgatcagcggcaacatcgtccgtatcatcattttcgaaaggcctccggactacaccgaagtccacaaccgggtaggggatgacaatgccaaggacgagctctgcgtgttcataacgctttcgggaatgcagcgtgcgatggattcgaccgtggcttgggcgaagcagcaggcgttgtga

SEQ ID NO: 514629 - DNA, 2898 bp, Stenotrophomonas maltophilia
atgaaactcaagtccagccagctgcgtgatgcagttgtgatcgcgcttgtcgccggtgccaccaccgcgacggcccacgcccaggaagccaccaaccttgatcgcatcgaggtcaccggttcgcgcatccgccaggtcgacaccgaaaccgcccagccagtactgagcatcagccgcgctgcgatcgagaagagcggcttcaagagcgttgccgatgttctgcagaacatctcggccgcaggtagcccggccatcagccgctcccagccgctatcgtccggtgaagccgtcggcggcttctacatcgatctgcgcaacctcggcgcccagcgcaccctggtcctggttgatggcaagcgtctcggcgccagcgtcagcggcctgcaggacgtttcccagatcccgtcggccatcgtcgagcgcatcgacgtcctgaaggacggcgcgtcctcgatctatggttccgacgcaatggcgggcgtgatcaacatcatcacccgcaagaacttcgaaggcctggaagccaacgcctacatcggccagtacggtgaaggcgatggccagaagtccagctatgatttcgtggcgggtttcaagggtgaccgcggttcgatcaccatcggcgccgagtacgcagaggagaaggaagtctgggcccgcgatcgctggttcagcaagtacggcaagacctccttccacccggacgatccttcgaactggaccccggtgagccagtggggccaggtctttgacgcgagcaagtcgaaatcgccgaagctgaccctcaaccgaggcggcgatccgcgcaacatcaacgattaccacccgaccgacctgactccgatcaccggtgacgtgagcaattccaacgaacagatgcacctgctcacgccgaccaagcgccgcagcgtgttcgcaaatgttcagtacgacctgactgacaacgtccgcttcgtctccgacctgctgtacacccgtcgcgaatccgtggcacaggtcgctggctatccgctccagtccacggactatgccgacctcggcgcaacctggtcgaaggacagctactacaacccgttcggcaaggacatggcctatatccgccgtggctgggaagtgccgcgcgtatccaacaacaagctcaccacgttccgcttcagcggtgcgttgcagggttcgttccagttcaatgacaagtacttcgactgggaagccggttacctgtaccagaactcggagaacaaccagagccagaccggcaactacaatgtgctggcggcgactgcagcaaccggcgagtcgttcttcaacccggccagcggccgcgttgaatgcgggtctgctgccggcctgactgccggtaccaacccggcctacggccctggcccgggcggttgcgtgccgtggaacccggccatcccgtacggtcgctccggcgacggcggcctgaccggcaacccggaactgcagcagttcctgttcccgaccacgcacaacaccggcgaaacgacgatgacgtcctactacgcgaacatcgcgggtagcctgttcaccctgcccgccggcgacctgggcttcgcgttgggttacgagtaccgcgaacagaagggcaactttaatccggacgcgctttcgcagtcgggctattcgaccgacctggcggctggcccgaccaagggcaagtacgacgtcaacgaagtctatctggagctgaacgttccggtcctggctgacctgccgggcgccaaggaactcagcttcaatgcagccacgcgctattcgaagtacagcaccttcggcaacaccaccaacagcaagttcggcctgaagtggaagccgatcgacgaactgctggtgcgtgcaacctgggctgaaggcttccgcgcgccgaccatcgccgatctgtacggcggttcgtcgcagtcgttcgaaggcttcactgacccgtgcgacaccaacttcggctcggcggccagcaacccggccaccgctgcccgttgcgcgcaggacatcgccaacgcagccaccttccgccagctgcgccagggctatgtcccggccggcggcccgggtgagcagagcccggtgccgttcgtgtcgggttcgaatccgaacctgaccccggaaacctcgacctcgaagacggtcggcctggtctggagcccgtccttcgtcagcggcctgaacatgagcctggactggtggagcatcaagatcgagaacacgatcgtcgacgatgagccggatgaccagctcaatgactgctacgtgctgggtatcgccgagcgctgcaacaccttcacccgcgacaaggtgggtggctacatcaacaagctgagctacggcagtcgcaacgccggttacgtcgaaaccgaaggttacgatttcgacgtggcttaccgtttcgaaaccagcgcgtggggcacgttcaacatgaacctgcagaacacctacgtcaccaagaacgtgctgaagaccaccaacgacgattcgccgctgcagatctacaacggcttcgcgtccaagaaccaggccaacttccgcctgcgttcgaacctgaccgttggctgggagtacgccgattggggtgtgacctggggtacgcgctactactccagcctgaaggaacgctgctacttcgataacgagtgctcgatcccggatttcggctcgccggacaccgtgcacgacttccggatgaacaagcgtggctcgaccatgttccacgacgtccaggtttcctggaacgccccgtggaacgcgaccatcgccgtcggcgcgcgtaacgtgttcgatcactacggtccgcagatgtactcgacgccgaagtcgcagtactcctactacggcggctacgacatcggtcgtttcgtgtacatgcagtacaagcagaagttctga

SEQ ID NO: 514630 - DNA, 624 bp, Stenotrophomonas maltophilia
ttgtctctcaggaaacatgcgctggctgtcagtgcgctcacccttgtcctcgctgcgtgtggcagcgccaaggatcccagcaagagcaacttcagcaaggccatccagacctacttggatacgaacaagggactgtgcgcagcagttcctgcccgcgagattcccttcaccttggctgacgacgaccgcctgggagaacagaaccgcaagcgggccgcagctttggtcgatgccggactgctcattcgccgtgacaccgaggtcaaatcaatgtttgggacctcgatgcgacccgcaggggaataccagatcaccgatacaggcaagaagttccttgtcgccaatgctgccgatacagtggctgcgcaggacgcattctgcacgggcaggttcgcaatggttggagtggataccttcaccgagcccagcgacatgatgggagtaaagctgtctcaggtgaacttccggtacaaggttgatggggcggacaactgggcaaagtctgaagcggtgaaggccagctaccggaactttgccgagcaggtggaaggcgatatcccaggcaaggcaacactcgttctgacgaacgacggttggatgcacgaacgtcttttcaagcgctga

SEQ ID NO: 514631 - DNA, 435 bp, Stenotrophomonas maltophilia
atgaagaatcagaagggctttacccttatcgaactgatgatcgttgttgcgatcgtcgcaatcctgactgccattgcgctgccggcctatcaggactacagcgttcggtcccgtacgacggaagcactggcgcgtgcctcggccgccaaggtgctggtctccgagaatgcagcttctggcgctccgctggcacagggctgggttgcgaccgctgaggccaccaagaacgtcgctgccgacggtgtcgccgttagcgacgtgggtgcgattgtcgtgacgctcacggatgcggcgggcggcggtaccttgaccctgaccccgaccacgaacaaaaaggcgctggtcgccggcactcctccgactggcccgatcatctggacttgtactggctccaacgccaacaagtcgcgcctgccttctgaatgccgcggctaa

SEQ ID NO: 514632 - DNA, 534 bp, Stenotrophomonas maltophilia
gtggaggctcgctccattcacgaatgcatcgtcgttccgcaggccacggtcgtcactgacatgccggccggcctggacgagttcgaacagcgtctgtgggtggcaaatacaggtcagagggtgcgcaagggcacggacaccctccttctactgcgcctgttctcggagtctccgggcgtgatcgattcccagcaatacaccaagatcaccggcagcctgaagggggacacgccttcgccggaagggacgccagaggtagtggatgcacgtctcacaagtggcggcgcgggcttcgcgcataagggcgactactggctgtccgattcagcggaagttgaactacatcagccgcacaagggcgatagtcggattgaagtcaaagtgacggctgttgggtggaacagctatcgaaaagaagaccgttccttctatctccagttcacctgtcaactcaaggaagtccctgtcgagaagctcaatgcctggcaaggaggcaacgacaatctctggggatcctttggacccgccagatag

SEQ ID NO: 514633 - DNA, 2805 bp, Stenotrophomonas maltophilia
atgcgtcaccagatccgggaggctgccgctgcagcccctcatgcgaagcgtttgtcccgtgccgtgcacgccgtgctgatcggcggcctggccgtgctgcccgtcgatgccatggccgaagccgaagaggccgacggcgatacccgtgaacagctgcaacagctggacaccgtgaccgtcagtggcagctacgcgaagagcctggagcgcgcggtcgatctgaagcgcgccaacatcggcttctccgattcgatcgtcgccaccgacgtcgccgatttccccgaacagaacctggccgaggcgctgcagcgcatgcccggcgtcaccatcgaacgcaacaaggggctgggcagcaaggtcagcgtgcgcggcctgcccagcgagttcaccctggtctcgatcaacaacctggccaccgcctcgggcagcggcgggcgtgatgtgcagttcgacatcttcgcctccgacgtcgtgcagaccgtcacggtgcagaagtcgccgaccgctgcggacgaagagggtggcatcgccggttcggtctacatcgaaaccgccaagccgttcgactacgccgagccgaagttcagcgcctcggccgaggcctcgcacaactcgatcaacggcaaggtcgatccgaagatctcgttcctggccagcgatacctggggcgactggggcggcctggtgtcgttctccaaggccaagcgcagcaaccgcaccgattccaattccggcatcaacttccgcccgatgggccgcttcctcgaagcatctggctcgcgttcgtcgcaggccgcggccgtgctggcgcgcgatgccggcatcgtggtgaagaaccgcatggacaaggacgagaccagccgcatcatcttccaggacaaggttggtgatcgtgtctatctcaacgagcaggaccagtggggcgcgactgcatcgctgcagttcaagcccagcgaaacgttctcgctgagtttcgacgcgatgctcggcggctacgacacccatgaggacgaatacgatgcggcggcctactcggcctccagccgcagcacgctggaccgcatctacgactacgaccgcaccacgctggacgaccatggcatcaccgtgctcaaggacgtggcctacaccgccacccagcacgagatcctcagcaaggatcgcaacgccaacaccgactatcgccagttcagcagcaagctggactggaaagtgggcggctgggacatcgatgcgctggtcggctactccggtgcacgcagggattcggactacgccaacctcaagcacgtcgcctatgcgccatcgcgtacgcgctggaccagcaacggcggtgaaacggtgccgagcagcaccggcggtttcgacatgtacaacgccgcagacaagtacctgttcgaggcgtacgaaaccgaagtggagaaggtgaaggacgacaagtacgccgcacagctcgacctgcgcaggcagatgaatctggcgttcttcccggcattgagcgcagtgcagttcggtgcgcgctacaccgacaagaccaagcagcgcgagttcggcagcggcaagatccagggcccttctgccggcagtgcagcgtgggtgaacaagcgcacgctggcggacagcaatccgatgtggatcagccagctggcaccgggtggtgcctaccgcccgagcgatctggactggcagcagatctccaatgcctacgcacgcgccaccttccgctatcccggttatgcgacaccgctggacccgggccagtattacgaggtcaaggagaagacgctggcgctgtatgccatggctgatttctacttcgacatcggccgcgtaccggtgtacgccaatctcggcgtgcggtcgatcgatactgacgtcgactcctccggtttccatccggtacagaagcccgatggcagcagcggcttcaccgctacgccgatctccagcagcggcgactacagcaagctgctgccgagcttcaacatgaccgccgagatcgccgacggactggtgctgcgcggtgcggcgtcggaaacgctgatgcgtccgtcgctgaccgacatcgcctaccggcgcacggtcagctggagcagcttccgcttcatggatggcaatccggcgctgaggccgaccacggcgaagcagtgggaagtcggcctggagaagtacctgcagaacggtggcctgctggcggcgtcctacttttccaagaagatcgacggcgtggtgcggcagtcgctgaccggcatcgtgccgaacgtcgagaagctcaacgccaacggttcgctggatggctactacgacttcgaggtgtaccagccagtcaatgccgatggttcgtacaaggtcagcggcgtggaactggtcgcgcagctgccgctgtcgatgctgcacccggcgctggaagggtggggtatcaatgccaactacacgcagctggacaattcgctgaccggcgcatcggatctctcgatcccgacaccgccggagggactggccgaaaaggcgtacaacttcaccctgtactacgagaacgaccgcttcagcgcgcgcgcctcgtacaactacaaggacaagtacgtcgagtacatccatctcaacatgtacccggtctaccgtgatgcctacggccagctggatgcatcgctcggcttccgcctcaacgacacctggaagctgaacctggaagcgatcaacctgctggatgaaaagaccagcggctatacgatcgacaaggcgttcccgacccagtacgagttctccgggcgccgcgttaccttcggcatccgcgcggacttctga

SEQ ID NO: 514634 - DNA, 321 bp, Stenotrophomonas maltophilia
atgtcaatgactgcactcgcacttgccaccgctctttccggcttgcctgacactggctgggagcgcgaacgcgccgaggacgcccaccagctgatgctctgccagatccatcgcgatgagttgatgcaggccgagggaaaggacgacgcctaccagcgcgcagaagcgatctgcgacctgctggcacgggactacaagaacacgtgggatttcgacgcacaggatgcactggcggcgtcggctgtggatctggatgagctgatccggcgtggggacgtggttgaggtaccccctgcaaagcgggaccgtgcctacgactga

SEQ ID NO: 514635 - DNA, 3969 bp, Stenotrophomonas maltophilia
atggggagtgacagcacatccgccactcggcaccgattaacaaaggacgatctcaaggccattcttcataaggctggagcaatgctggttgctcccatggatcttgccgaggtacggctgtcgttttccggaacctccgctattggcagatcatggcggagagatattgcggggcagcggatttccagcccggccgtgaacgagctactcaccgcaatcgacgcgaagaagcaagccattttactcactggactgcccggctcaggaaaaacctgcgtgatgcttgagctgcaagatgctttggagcaactagctgaagcccgttcaggcattgcgccacttttcattcagtcgcgtgagttcgccgacctagttacgacgcaagatcgacaatcacaaggtttgcccgaacaatgggttgaaaaggcagcccgtctggctgaaaccacgcatgtcgttgtggtcatggactcgctggatgtgctttccattgctcgcgaccatcgtgtactgacctactttttggcgcagatagatcgtttgttgttagttccaaatgtcacggtggttactgcttgccgagattttgacagacattacgaccgtcgaattgccgaaaggaaatgggattgcgaattgaagtgccagcatttggactggaatactgaaattgcgccactgcttgataagcttggaattgcaacgagctccatcgattcagtcactcgcgaactcataaagaatccacgcgaactcgcgctgttcgtcgagcttgcacaacgcgatggcagcttcaatgtggtgaccagtcaggccttggcgcaacgctatctcgatactattgtgcgggccaacaacgcactgggtgatgtggcaattcaagcgatagaagccattgcctcggatatgctgagttcacgcagcctcgctgtgccgcatcaacgcttcggcgcatcgcaggaaattctccggacgctttgcagtctcaatgtcatacaagaaaatcaggatgggaaactgacgttcgggcaccaaaccttgctggacgtattggtcattagtggagcggcccgcaatggcgtcacgctaaatgggtttcttcaggggctgccgccggtccctttcgtgcgccctagcatccgcagttttgttggccaactagcactgggcgagcgtcgcgaattcaggaagcagatgcgtgccgtattaacaggcagcagcgcagcctttcacatcaagcgcttggttgcggaatcattctcagagcagaagccgcaggacgatgactggccgttaatacgcgacttgcgcgaaaagcaccgtgacgtttttcaggtgatctatggcgccggggcaattgagtggcaccacttctggttaaggcacctggttcccgacttgagggatgcacgggatgccgaaggcatgacaaggcatattcatcgaatagcgcgatggggaaattcagatgctaccggcgttctggcgctatggacggaggcgctatccctggattggctggacagcaatggtattgcagagcaacttggatttcatctatccgaaatcaagtctgacaatactacgctggttgttccgctgcttgagcggctactcgatctgccacactctgagcacaattcccttggcagagccgtcgcgcgctgtgtggcggcaggcgcagcggatgactccctactttggcattatatcgcagatggcgttagcgacgatgacctgcttgatttcaggtttgataacaaattgcgttgcaaacctcatgaattcggagactgggaggagaacttcatccgtcaacgcatgaaacagtcgaccgcgttactggacttagccttggaatcgattgagcactggagcagtgttcgcacatcgcgctatggcgaaacccgtatcggttaccgatatggatttttgagcgaaacatcatacgatgatgcgcacaaccagaaagatatgcgacatgcaggcagcatggatgtcttgcttgacgcgcttgaggcggccattgttcaccatgcgaaaataaattctgactggtggataaataaccgtgaacgcctacactccaatcgcgaaggggcattaatttacttcgccatcctcgcttgcactgcatcgcctgaagccaacatcgatctagcaggccgcatgttgtgcgacaagaatttgctggagtttgagctttcctacgaattgggaacgctggttcagtcggcattccccctgctcgacactcaagtgcaagatgatgtgatggcgaacatcttgaccctgtggggtgaagagccttccgatgagcctagccgtttctggacactagaaaagcgagctgaacttatcgtcgcgatcccctgctaccaacgctcgtcggaagcacaggcaatgttggaggcatatgagaagagggctggcacgctgattcggcggccgtatatacgctcacgtggaggcatagtaacggcgccgttttcatatgatgtcttcctcaattcaggcaacaccgcagtgtcgtgtctattgtcacattactccggatatgaaagtcgtttcgatgaatttcttgttggcggtgaacgcgaagtcggctggcaattgcgagaagcctcgtcccgccaccccacgcgattccttgaatttttgaatagctattggatagatattccagagaaatttcgggatgacatcctagacggcgttgccgcttatctcgctcatcgttatggaaacctgcaagccaatagcacatgggagcctattgatgagccagatgcctctttcttggcaggactgattcttgatgagctggaaaggcaccccgcgcattggaggcacaaacgctccgcagcccaagcgctggaagcctgttcgaacgtcatatacgatcccaaaagcgctgagcggttgatctttcttgccataggatttggagaccttcatgaagaagatccgatcaagggagataacattggactgatctccataggaatcaatatggtgaagggggatgttgccgaagccttgatgatcctggcgaataatttagttgagcgcgacattgaattccctagactactgatccctgccttgcgccgttttgccagtgacaaacaccctgcgattcgctcgctgatcttgaaccgcttaccatacttgcagagcaaagattttgatctgggctgggatttgttttacctagccatgaaagattcggaggggctctgggaagtcgcggagccctgcctttattacgcctaccacagtcactttgaagtggttaggcctttgctggcgcgtctccgtgatgagggcagtgaaaaggacctagaaacatggggacgcatttcagcgttggcgaccatggatcaaaagatggatcttgccgacctgctggaaggactgaacgcactggataaaacggaggcttggcagggagtggccactgtttggacaaaccttgaaaacatccagcagcaccggaaacagtgccttttagggttagatgcgggcttaaattctggcaccactcatgccgaagcggttgcggaacagctggggcatattttcgacaagtcggggacgatctctgttccgatagagattattcgacgttgttttgatttattcagcagcgataacgacaagaataaaaagcaccatcgcctcttcgggcttcacgaatggctgaatgcgacatcgcaacgtgatcccgaacaagccttggctgcagctgaaatttatttatcgtatgtcagccattgcaagccatatctatatgaccatgaggatagtcttacccagctaatgacccgtctctttgctgaagcagaagaacgagaagaatctgacggtggtgagatgctgcaacgtgtggttatcgtacaagacacactacttttgctgggagtcaacggcgtggccgattggttgaaggctgccgagcgaccataa

SEQ ID NO: 514636 - DNA, 339 bp, Stenotrophomonas maltophilia
atgagtatcgcgggaatacgctccaaccgaggtgatggttatcagacaattgtggcatttgattgggcattaacaatcctatctgatccagagtatctgtggcttgagatcgactcgataagttattcagtggacgatgtagtggtcggcaaagccgacggcactctgattgcctgccagtgcaagaagaatcaggccgatttcaaggcttggtctatagccgaccttgcggacgagctagacaaagcagccaacttgctagggaccgtccagcattgcgaggtgcttttctattctcgcaacaaactttggcgacctcgccaaattgagagaacatag

SEQ ID NO: 514637 - DNA, 696 bp, Stenotrophomonas maltophilia
atgcctctcaccgataccgccatccgcaaggcaaagcctaccgacaagccgcagaagctgcgcgatggccacggactgtacctattgccacgaccggatggcgcacgctggtggcgctacgactaccgacgccccatcacgggcaagcgcactacgatttcattcggcacctaccgggaagggagcctcgcagacgcacgcgagaggcttgcagaagcacgccgccagcttgcggccaacattgaccccggcgaacagaggaaggccgtcaaggccgctggcgaggccgcagccgcagccgcagccgcagccgcagccgcagccgcagccgcagccgcaaacagcttcgaggtcgtcgccctcgaatggttcaccaagcagcagaaagaatggagcacccagtatgcggataagatcatccgccgcctggaaagtgacatcttcccttggatcgataatcgtccggtcgaggtcatcacgactcccgagctattgaaacacatcgaatcggcgctgatccaaaaaatgctcggggtgcacagagtctacaaccaagcgcagtatctggaggagcaccgcaggatgatgcaggaatgggcggactacttgagcacattgaagacctccactgcgagcaagattctttctttcgagcgaagaactacgcagcggcaggccctcggagtcagcaaatga

SEQ ID NO: 514638 - DNA, 2148 bp, Stenotrophomonas maltophilia
atggggggaggcagcaccccggccagcctgccgccgctgcccgctttcacgatcaagcctgatccgggccgcaccttcgaaagcacgttcgcctacgaccagctgcgcagcatcgccgagcagtccacaccggtcgagttcgtcatgatgatggcgccgaccttcggcttcgatgttccggcgcggacctacatgaagctgcaggacgcgctgaagaatggcagcctgcaggcgcccgaacacaaggtgatggccggcgcgccctacccggccgactacgacaacagcaagcgcatcatccgcgtgaacagcatggcggcagaccgcgcggcgacgaccatcgaggcgtcacgcgaactgctggcggtgctgctgcatgagttcgggcaccacgtcgacaacgtgctgcgcaatgatctggcggagaaggatgcgaacggcaagccgaccctcgctgccgacagcggcaaggaagaaggcactgcactcgcttatcgcctggcgttcttcgacctggaaggcacgcacgaaaccgagtatgcgcagtacacctcgcccgagttcaacggtgcgttgaaggtgaactatgcggaagtacaggctgcactgaagcaacaggggcccgtggcccaggaaaccaacaagagcgaggatgggcgctacgaggggttcagtgcgggtgatggccagaaccatgacaagcgacccagcgagtcgtttgggcatcgatcgattgaggcggtgcttcaggacgcccgattcttgccaattgagcgccaagcaatctattttggcaactggctcagggactactcccagctcctcgaccccaagattgtgcgtcctccgggcctcccgaaggacctcgggaagtacctttcccgagctgcactcacccagattgtcgatgtcctggcaggcagtgagttccacgaccttcgataccagaaccgcgctgagtttggcgtaacacctgcccgcctcggggtatacaagccaagcgagcatatcgacaacccaaaaaacatcaaacccgagccagcagacccgaaaaccatcgacaaggacttcgagccttgggtcacgcccggaagtgctcttcttcagatagacccgaaaacctcgatgaagcgctacatcatgcgctccagagacttcatgtcttccgaactgaacacggcaatctcaatgggcaagacacccgatggcatgcgccattttggctctgccctgcatgttcttgaggactacttcgcacactccaatttctgcgaactcagcttgagaaagctcggacacagcaccgtgctgccttggacatcgactgccaattgcactcatcgataccctgtggtgactgggatgtttggctcgaccgacgtcatcgcaagcctggccgaacccattgctcacaagctcttcggcgtagaaagctgggagttcaaggcgagcaagcctggcgaccgttccgacggcgagaagatcatgctggtccttctttccgagcacagcgatcagcgttactacaaagcgttccaggatttcctcaaacttcgagaccgcattgcacgaatccctggacatgaatatctggaacgggctggctggatcgccagcgcgccaatgcgcgcggtactcaactgctacaacttcgtctatcaacaactcctgctgctcgtaggcaacagtgtggacgacgcgcagacgatgttcgattccgacccaaacaaaagtgggtcaaccgaccccagccattcccagctggcaaaggaccacgacgtccatccgctgcatacattggctgctcagctggcgcgacaggccgtcctccaggttgggcaagcaatggcagggcgatggcggggcgatgcatcacgtgatccggtcaagatcgcacagtcctatctggtccaccccaatgatacgaactggcaggatgcgactgttgccgcttgggccaaagggcacgctgcggcgatacggcgcgcctcgtccgccaccgaacttgagcacctgcacgaggaacatggaaagcacgcactggagaacatccgtcgcgtgggtcgctatggttcagacagctgggactacatcactcgcttctatgaagacctctttggcgagaagaatcaggtcaagaccaaatga

SEQ ID NO: 514639 - DNA, 600 bp, Stenotrophomonas maltophilia
atgatcaagagacatatactctcaaccgttctcttcttcctgatttcaggctgcgatgctgcgccacatgattccggcacaatccggcagccaagagtggagtttgacaagggctcgttctccatcaacggcaagaatgcaagaattggtgccaccactgcagagtggatttccgcgctgggaacgaattacagatacgccgacccgaaatctgctgacatgatgatctgggacgacctaggcatatttgtctataccgatctaccaaggaaggatcaagtcagcagcgttgcttttgctttccacaaaaatcccaccgcggatcttgccttacccggcaccggacaggccatcagacccaaacgaatgttcaacggcgaggtcgtcatcggcagcggacggttcaacgctgacatgaagattggcgacatcccggccgcgagcaacatgacctttgaggttcactgcagcagtggcattgctacatgcaccacgaaccgggttgatggctcttcccgtggctactcgatctacttcactgttgatgagaagcggtatgacagcgttccatacactatagaaataagccgcgcactgtag

SEQ ID NO: 514640 - DNA, 735 bp, Stenotrophomonas maltophilia
atgtcacttctttggatcgcctcacggctgccaacggaattgcttcgttcgcacctcagattgagtgccttcatgaagaacgcggaagtcacgcactggagaacatgcgacaaatatgaagtcaagatgaaatccagactcctttccacgataacgctttcattgctcttcgctgcatgcggctccgcacctcaggatgagggcaaagtgcataagccagcggccgttttcgagaacggctcgatcctcatcggctcgcagcgcgttgaacttggcgcccccgccgatgcatggattgccgcccttggtagcgactatcgctttgccgatcctgaattaccgatcatgatgatctgggatgaactggggatcgctgcctatacgggcccaacgaaagaacgacgcatcaactccgtctcattcgtcctccgtgtccctcccgggtcatctggcggcgatgacccaccaggcaaaggaactcagccacgcaggactttttcgggtgcagtctcgctcttgggaacacccgtgagcgagacgacacaggtagatgacataccccgactgagcgagggtgtactcgaagtgcattgcagccacggaattgctctctgtagcgccaacagggccgatcaggccaagctggattactctttctacttcgccgtggacgatcaacgctacagcagctacatatacaaactgaacatcgagaaagacagcgctccagattaa

SEQ ID NO: 514641 - DNA, 624 bp, Stenotrophomonas maltophilia
atgaatgaatccggccaacaaggaatgatcaaggcaatcgctctctccgcccttcttcttgttattgctggctgccacgccgcctcacccgactcaggcaatccgcgacagccgagtgtcgaattcgacaacggagatttcttgatcaatggtggtcacgcaagaattggggcaactaccaaagagtggatctcccttctgggcgaaaactatagatatgccaatccgggctccccaagcatgatgatatgggacgaactgggcatctttgcctataccgatctcccgatgaaggaccgtgtcgatactgtagcctttgccttcaacacagatctggatgaaggccctggatcatcagacgcgccagcaaccatcagacccagaaagccattcacagggcaggtcgtcgtcagtagcacacgaatcaacggcgacatgaagatcagtgacattccagccgccagcaacatggcgcttgaggttcactgcagcaagggcatcgcgacatgcaccacgaatcgggttgatggcacatcccgtggctactcgatctacttcacggttgatgaaaagcggtatgaaagtctgccgtacaccattgaaatcagccgtgcacttgaatga

SEQ ID NO: 514642 - DNA, 279 bp, Stenotrophomonas maltophilia
atgcggacaacgccgatttcggccggaacgccggtacgtgcgctgcttgccgctgcagatgaccgctggattctcagctgcaccaaaggcgtttcagcctgcattgcgctgcgcacggaccagccctccgagcaactgtcaaagagcttcgccgtcgacggcagcttcgaagacagccctctctacactttggaactgcacagaaattcctggcagctgctttccgggcgccgggaagacctgttcttcgagaagaatgggatcaagagcacggaatga

SEQ ID NO: 514643 - DNA, 624 bp, Stenotrophomonas maltophilia
atgatcacaagaaatctcctactttttgcccttgcccttggactgggagcctgtgactccggacatcccataaacacaggcgcggacgccacccaggccgcagctcccctggctttccaggatgactacgtcaagtacaacggccagcggctggacttcacgcaggacctgtccgcctggatcaacgtgcttggccccgatcatcggaccgcgtttcccgacgaccctggcattgtggtctgggacgatctgggcatccgtgcctacaccaactatcccaagacccaacgtgtggtgacagcatcagtcacccttcacggagaaccagaggattcgctgtcctatctcccgcccggcgaaggtgttcgacctcgccaggactatgcctactccgttctggtcaacggtgtccacgtaaacaagggcactcgcgtaggcgacatcgcacacctgagcggaggacagctacgcattgattgcagccgcggcataagcatctgtggcgcaagcaggaacgatgaaaagttcatccagatgaagatgtatttcggagtggatgaccgacggtacgacagcaccccctatgtcatcgaattcggccctggcagcaacccggctcattga

SEQ ID NO: 514644 - DNA, 1005 bp, Stenotrophomonas maltophilia
atgttcatcatgcttgaaaggcgtgcagagatcgcgcgcgcccaggaactgcttgaactgacgctggaacaacaatgcgacggtaacgtggttcgtgatatcggttatcccggtggtcgacgcccgggcgaaacgatcaagaccttcggcaagtactggtattggcccggcgcgctgaaggcgggctccaccacgaccccgcgccggttgaactggtttggtctctattctgacaatgatggtgtcagcatcaccgtcgaggtcaatgtcgtagaagaaggccgcaatgaccgagtaggcggattcttcgcccgcgattcggacactggccggatctacctttttcactctgcgcggatcggtggtggccggacaggtgtgggcaaagaagcatttcttgcctggagcaacgaacccctgcgccaagtgatggactcggagggcgcctatcgtgagggcgtgctgatgggaccggtggggggcaagggtgctgcgcgcacgttgctgcgctacgtaggcatagttgcagcgttcaaggatgctgtacgcgaaggcgaagtggactcacccgaattccagcgccgattggcgcaattgcgggagtactacgccgagcccatgggtccccgttccggccatcgcggccgcgtgctggattacatatcgcggcacggcgaggtggtcgatgcactgagcgcgtggcttcaggaggcgggcctcaagcgagggcgacggctggtgaagaacgtgctgattgacttgggtgtcgccaagggcgatcaacttgaggacgtctttgaggtaaaaacatcgaccgatcggtcgagcgtctatgctggaatcgggcagttaatggtgcacggcgtgcgagccggtcgccgtgtgctcgtcctgccggaagaaggaatattgccggcaggtattgaggaagcgctggaagagcttggaatagagctgctgcgttttcgtcttacacccaatgacgtcatgctacccatggcgtaa

SEQ ID NO: 514645 - DNA, 249 bp, Stenotrophomonas maltophilia
atggactggggctacaaagagctgggaaaggcgtggcgcaagatcagcgacgcatctggcgcaggcgagaccacgaaagcctgtgcatcgtttgcgggcgatctgttgtggaatgcagggcggtatgtggtgaccgaagggcctggcgttatggccaaagcggtagagaagcaactgaatgagagcaaggatctgacgcccgagaggcgtgagcagatgcaggaatttgtggaaaaatacaagaagtag

SEQ ID NO: 514646 - DNA, 180 bp, Stenotrophomonas maltophilia
atgggcaagtatcaggttttctttgacgtacgaaagggcagcaattcgacgggcgttaacactgtcgtcgaggcagagtcggactacatggcggcaaagcttgccgaggcaaagctgcgcaggtcctggcccagctatagcgactacacctggtctgctacgaagatcgtgaagcgctaa

SEQ ID NO: 514647 - DNA, 225 bp, Stenotrophomonas maltophilia
atgtggaagccccaaggaggcatcagctatttcgcggcccgccagcctactcataaccaaggggtggccaatggcattgttgccatcctggttattcagataggcaatctctacaaggctgtgggcattgaggcccagcggcccggtttggatgtcgcaaaggcatgggacaacaagcttgctgcgccgaattattcgcgatttcacagccagctcaggaagtaa

SEQ ID NO: 514648 - DNA, 216 bp, Stenotrophomonas maltophilia
atggccaagatcgacgccgagtggctggaggactttgacgaggcccttctgggcctgtttgccgtcggccacagcgatgcaggcatggatgagtacctgctcaactgctacgcgaatctgcaaccgcgtgaggcggcgatggcctttggcaacgactacgatctgccccgcacgccgttcctgtggccgatgcctggattggcgctgcagagttaa

SEQ ID NO: 514649 - DNA, 441 bp, Stenotrophomonas maltophilia
atgtatacctatctcatcgttgactgtgccgttagatcagatgccgctcgcacgttgcgcttctatgcccaggatctcctgcaccgttccttgttccatggccaaccggaggccaagcacgctgatgtaggcccatggctggtcaagctggacggagtaacaacactggatggctggcttaacgccctggaggggactggggattgtgtgccgtgtgttagccatctaaagagcaatcgtgattttgaaacagtcttcgcgcaccttcagtcgttcctggacctgcatctatccgatggctcgcatgcgctatttcgcttttgggatcccagggtgttcacgcgcttgcagtgcgttctgacccgcgaacagctccagggtctcatggcgccattttccgaatggtgcaccgccaaaggaatattgaagaatgcctattga

SEQ ID NO: 514650 - DNA, 354 bp, Stenotrophomonas maltophilia
atgcctattgagctgaccgcagagcaggaagccctgctgcgcttgccagagcctgaatcgtttaccggacgcattgctgcggaactccgacgcgacatgcctgaagatatccaccatacgtcggatcagcagttgtcgagtgcggtgcgcgagtcgtatgactttgcgacctacgaattgcatattactcgcgtgccgactctggtgcgctgggtgcgagcagacacgacccacaatggattgttgcggcgagaacccgccgtggtcctgaagatgaaggttgctgccaaccccaatctaacagcggaggatctgttgtcgatcttccgtgcacagacaaattggaggaactga

SEQ ID NO: 514651 - DNA, 720 bp, Stenotrophomonas maltophilia
atggccagtgcgctgccaattggagggcgagctatcggcgaagtcattcggcgttctgcatcgttggagcggttgcggcgtgccattggtgtcataccaattgagcaagcaaaggagggggattgcacaaaccaaagcagctcaaccgaatgcaatcagtgcaagctggatcaaggtgtgttggtgcctgccgtgccgcgtcgagcggttcgccgcgagaacaaggtcaattgggactgccagttacagatcgccaacatgaatgctgggcccgaaaggttcagctattgtgacaagaacactggcttgccgatcactgatttcgacacatcccttgccgggcgagcatggtccgcactcaagggcgaatctcaaccaaacgccgagcaattgaacctcttggaatggctgtatggcggcgtctacttcgatggcttctggagggcccaatgtaccgtggtggatgcgaagggccgttacgcgcaattcctctcccgggacgacggggcgcccaagctggggttcccaagtcgattcgtattcccgggcatgattgaggaggctggtcggcagattgcggtcatcaacaccgcttcgccgcaaggaaagctgcaatggcatttcatggagatagaggtctatagatgggcctcatccagcattccgccacccgttgtctgtgtccacaccccatacattcagcaggttgtccacgcatga

SEQ ID NO: 514652 - DNA, 702 bp, Stenotrophomonas maltophilia
atgatattcgcgatccttcgtttcgacatcggtcagcgagtcgagaccgactttcgtggcgcctaccgtcaactgttggcaacgctacggcgcatccctggtaacaacgaatggttctgcggggagaacacacctaagcagaagctcattccctttgaggatgaggacgccgttgtggagaggttgcgggaacgcgccgatcgaatggggtcaacgtcattcagtgcgtccgtggtcaacgacaacggaaccaagcggcggccagggctgatcgaaatagactacatcccggcaatggggtacatgacggtctccctgtatcggccagatcagttgcacgccaacccgagccgtttggttgcagagaccttgctttcattgcttgagggagagccgggaaccacgtttgcctttgctgacatctacgacaaggtggatggtgaatttcagttctataagaccaagtacgctaccttcccgcatcggcagtgcgtgggctggatggcgtacgtacgccaggcggtcagtccacagcagctccctctggccgcagacgtgctgcccgctccaggcggctccatcgtggtgtccattgatcaggcatttgatctgtcgaacaaggaacacatccaacgcgccaacgaagtcgaaatggaaatgaacgacctgggcctgcttgccgtcacagatccaacgttctag

SEQ ID NO: 514653 - DNA, 1221 bp, Stenotrophomonas maltophilia
gtgctcgatcggtggatcgtctcgccgcccgacaccgtacggcgcgttcccatcgcgcttacgcctttcggcacacttctttactaccgaaagctgacggaatctgacgaggatgtggtctacatcgatcccgtgtcaaaaaggacgggtgacctggcgtggagtctcgatgacttcttcaacgagctcctgtgtgagcaggaagcgctcgaatcgctcatttcaccagcgttggttcgcaccgcaagagaagagtgcgaagcactggcccccggcgaagtctacgaagtcgatcagatgctgctttccatgcagatgctacggatcgcaagggtcgatgggctcgacatgcatcgccgccttcgcgatgccgttgattcgcccaagccgaaggccggcaagccgacgacagtagcccacgcgctgccggtcggacatctgtccatgttcgagggtattgcaacaggcccgggactcgctggtctgtatctgtcctcttacatcgactggcatcggctgctggcgctattgccgagcggacagtaccgtctgctcttctggcgtattcatcacgagacgttcgagcgaacggagatacgtgtttacagcgactgctacgaaatctccggtaactccgcgggagatgacatcgtttcgctggacgtcaccctgcgcagctattcgctaggcagtgacgccaatgatgatgaactggtggcgatgcatgcagatgaaacgaccttcctgctgcgtaccaatgagttggaggacatggcaaccgccatcggcggtcgcgacgtgatggggcgaagtgaacactatttccgtcgcgttacgctggacgacccattcgtagaagagcctagcgatggccgcgcagcatcatcattcacgaatttgccacatgcgctacgagctttgatacatgtcgccccccttctggcgaccattactcatgtcggcgatccagaccccgacgaagagtgtgaaggcgaaggcaccgtcatgtgcacgctcaatctaggcgaggatgacgggttgcgcatgaacatgccgctctattcgcctggcaatgccagtcgtcagctcaagggatgggtttgggacatggcaccgcgtgcttgcaaggccggcatcacatatcggcgcggggacgatggtgtcattgaatgtgggcctatggtcggagacgtgttgacgacccgggctccggataggtga

SEQ ID NO: 514654 - DNA, 1662 bp, Stenotrophomonas maltophilia
atgccgttcaagcgtccgttcgagaatccgatgagcactgaatacagcacaccgccgtcccagtccgccaccgtcaacccgatgcggctgcccaatacccttcatctcaccctggggttgttcgcactggtgctgggcctggtgctgctgctcggtgtcagcaacgccgaacaggcgcgcgccatgggcctgggcctggtaggccgcgcagccaccggcctgacgctgttgctgctgggcggcgtgcatgtgggtgtggcgatgcgctacttccgcttcaccgtcatgcccggcgaagcgggcaagatcgccgcgccggatggcgtttcggtcagcaatcacctggtggggctgatcaacgacggcatcacggtgcgccagcgcccggatgatccgctgttgtccatgctgtacggcctcgttccgcatctgatccatgcaccgtcggccatccgctggcatgctgaagtgcagctgcgccgcgcggtctacctggccgcggtgttgatcagtttcacgctggcctgggtattcgcccagcccgccgcatttgcatggatggcaggcctctacttcgcacttgcagtggtgctgctgaagccgttcgccacgctggcagccatccgtcgcggcgcgatggaagccgcacctgacgccgtgccgcccccgcgctggggcgccatggttgtcctgctgctgctctccattgctggtccgctggcgattacgttgtcgccagtgcaggtgcccgctccaccgttcgcggtcagtaccgtggtgctaccaacgattgccgtgctgggcagcgcgctgatcgccagtgcattgttcaccgtttcgctcatcgcacagaccggcagctacagcgcttctgccgcacgccatatcgtgcgtgaggatctgcagatgcccgatctgaccggtggcctgctggagcgcctgaagacgcgcatgccctaccccagcgagtaccacgccgagtatcacaacgtcagcgacgacgcctacgatggtcacctgctgctggaaaccgagccggtggtacgcgccgagcagagcacgtcgcggctgggtgatgccttcgcggccgcgtggaactctgacacgcagcgcccactgctggcgctgggcctgttcgggctggtgctgggcctggccggcgtggtgttcgccttcgtctacgcacgcagcagcggcgctgcaatgatgggcctgatcgccctgggcttcatttcttcggcgcagttcgcgttggcgtctgcccacaagctgtggaaccgcgtggacttccagtcgaccgtgtaccgcgtgagctatcgcggcaccttccaccgcgccaagcgcgtggcgggaaacgcgtacgccggcaatggcacgctggccgaaggcgcggtgcgcttcgggccgctgcgcgtggccgtatgcgtggccgagatcacttcagtggcgttcgcacgtggcggccgacggcacgtgaccgcgctggacctgctgcccaacgaatcgcaggcattgttcgatgtactgcaggactatacccgtgatgcacaggagcgcgccgggcagttctatcagcaggaacatcaggtgcgcgaggcgatgagccacggcggacggccaccggaattgccgcaggcacagcagccggtcgtacctgtttga

SEQ ID NO: 514655 - DNA, 915 bp, Stenotrophomonas maltophilia
atggcgtactggtgggtgaaccagaagaagacctttgaagcctcggcaaagggaggctttctgtggtcgccaaagaaaaagaccgacggccatcgcagcgccttctacgagaacatgaccttggtacggccaggcgacgtggtcttcgcctttgccgacaagcagatcagggctcttgccatcgtgagtggagcgcacgccgaaatggcgcgtcccgagagcttcaagactgccgacagcgactggaacaacgacggctggatggtgccggtgcaataccagctggtcgaagtcccgcttgaagtgcgcaatcacatggacctgctgggacagcatctgccctacaaatacgcccccatcaaggcgagcggaaaggccaatgaggcgtatctgtgcccggtgccagaggggatggcggaagaccttcttgatctgttgaatactgaccgcgaggagcttcgtcagtggcgcgaggaggtgccgatctctagtgcaattcgttcgattcagaacgatgaaacgctctcgacgacgcagaagaagcagttgatcaacgcgcgcgttggacagggcaagttccgcagtagcgtgtgcgagatcgaaccgatgtgtcgtgtaaccggaacgacgaacccaaatttccttattgccagtcacatcaagcgctgggccgatagcgataaccacgaacgcctcgacggcaacaatgggctgatgcttgcaccccacatcgatcgactgttcgaccgttggctcatttctttcactgacgatggtgtgatgatcttcagtgaggcgctgccggatggaattcgcgctcagtggggattggagcagaagatcgcgccgaaaccgtttaacgcagagcaattgcgttacttacaaggacatagggaaaggttggtttctatctaa

SEQ ID NO: 514656 - DNA, 855 bp, Stenotrophomonas maltophilia
atgagcgagcagatcgttcgcatcacgccagccggccgcagtgcacgtgaccgactgctgacggggccgttctctgcgctgggcgtacaccgctcgctgacgcgggaaatgaccctgcgtgatatccgcggtcgctaccgtggggccagcttcggtctgctgtggtcgctgatcagccccttcatgatgctgtgcgtctacacactggccttcggttacatactgaagagccgttggcccggcgcatccggcaatatgggcgagttcgcgatgatcctgttcgccggcctcatcgtgcatggtttcttcgccgaggtgctgacccgcagccctaacctcatcgtcggtaacagcaacctggtcaagcggatcattttccctctgcatctgctgccttggacagcggtcctttcggcgttgttccatctggcggcaaacacggtcgtgtacttggtcatcagtacgctgcttctgcgcgatccacattggacggtcgtcctgctgccgttggtgatgttgccgttggtgatgctggctgtgggagtgagctggatcctgtcggcgctgggtgtctacctacgtgacgtcggccaggtcatgggggtcgtttccaccgcgatgctgttcctgtcttcggccatcattccggtatccaccctgccggcgcagttccagttcgtgttcaggatcaacccgcttacgttcatcatcgaccaggtgcgcgaagtggcgttctgggggcgcctgcctgactggagcggcttgggactgtatgcgttgatggcgctggctgtgatgtatctgggttttgcgttcttcgagaaagcccgtcgaggatttgctgatgtcctttga

SEQ ID NO: 514657 - DNA, 1341 bp, Stenotrophomonas maltophilia
atgtcctttgagatgaacgacgacgcggtcatccaggtcagcggtattggcaagtgttaccaggtttacgacaagccgtttcatcggctgatgcagggcctggtcggcggtggcaagcgctactaccgcgaattctgggcgctgcgtgacgtcgccttcgaggtcaagcgtggcgagaccctgggcatcgtcggccgcaatggctcggggaagtcgacattgctgcaactgatcgcgggtacccttaccccgaccaatggcgagatcgcagtacgtgggcgcgtggctgcgctgcttgaactgggcagtggcttcaatcccgatttcaccgggcgcgagaacgtgtacctcaatgcctcgatcctcggcctgagcaaggagcagatcgaccagcgtttcgaccagattgccgagttcgccgctattggcgagttcattgaacagcccatccgcaattattccagcggcatggtgatgcgcctggcattctcggtgatcgcacatgtcgacgccgatatcctgatcatcgacgaagcactgtctgtgggcgatgcattcttcacgcagaagtgcatgcgattcctgcgtgagttcaaacagcgcggcacgctgctgttcgtcagccatgatggtggttcggtcacggcattgtgcgatcgggcgatctggctcgaccagggcaatctgcgccagtcgggcgaacccaaggaagtgatggacgcctatcttgaggccttcatcgctgaccgcgaaggccgtaccggcagtgcacgccccgagcccacgtcgcgtacgccagttgccagtcgcgtgcgtgacaagcggctggatctgattgatcgcagccagctccgcaacgacatcacggtggttgagttcgcgccggttgatggcttcggcgagggaaaggcgaagatcgaggatgtctgcctgtgcgatatcgaaggccgacaactgccgacgatcgtgggtggcgagacggtccgcctggagatcgttgcgtatgccagtgaggacctgccgcatgccatcgtcggcttctacttcaaggaccggcttgggcagctgctgttcggtgacaacaccgagaccgcacgcatcgagggtgacctggcggtccgcgcgggcgagcgtttccgtgcgactttcgtgttccagatgccgcgcctgcagcagggcgattacttcatcaccgccggcgtggcttccggttcccagcatgagcacgtgatccagcactggatccacgaagcacttgcgttgcgttcccttggacaagggctgccggtcggcatcatcggtatcccgatgcatcagattgaattggagagagtgtcgtga

SEQ ID NO: 514658 - DNA, 1413 bp, Stenotrophomonas maltophilia
gtgacaaccgaatttcgcttgcaggatcatccggtgatcttcctgaagccgcatatcacccatccttacgcctgggtgggacacattcccttcatgtatgtccttgcggacctgctgcgtccgcgcagcttcgtggaactgggtaccgattcgggcaactcgttcctggccttctgccaggcagtgaaggcgcttggcctgcagtcgcagacgcgttgctacgccgtcgattgctggaagggcgacgagcatgcccgtttctacggcgaccacgtctaccgcacgctttctgcgtaccagaagccgcgctatggcgaattctccacgctggtcaaagcctacttcgacgaggcgctggaccagttcgaggacggcagtatcgacctgctgcacatcgacggcctgcacacctacgaagccgtcaagcatgacttcgagacctggctgcctaaactcagctcttcggcggtggtgatcttccacgatagcgccgtgcatgatcgcaatttcggtgtgcacaccttcatgggcgagctgcgcgcgacttacgaagtgttcgaattcaaccacagcaacggcctgggcgtggtgccggtcggcgccgacgtgcccgaggcgttcaaggccttcatgcgcgaggcgctgtcacgccccgaggcgacgcgcgcgatctttgaagccgctgcggccgctctgctggatccggaaaccggcatgccttccggtggtgccgatgcggtggagcattccatcgaatgcctcatgtactaccgcaacgacggccagattttcgaagagacgcgttcgctgtcgatcatccatgcgggggggacggatgctactttcgaattcgagttcccggcaggccagcgcccgcaacacgtccgcgtggatccggcaagcctgccgggtacctatcgcctggtgacggtggggctgcgcgcgggtggggcgaccatgaatctgttcgccgaaccgggtgcgccgcgcttcgtcgtcaacggcgacgtgctgcccagtgccatccaggaaggcatccgcttcgtcagcctgcacaacgacccttacgtggaagtcgacctgcgcggtgtgtgggagcagcttggcaatgatgaccaggccggcaccgttgtggtcggcgtggcctatgaggatgtggtgacctccccggcactgcaggccgtagccgtacgggctgcccaggcgatccagcagctgaaggacacgctgcagcgcaagcgcgaggagaggccgttggcacaactctccagcacgatgcgcgcccagcacgccgcgctcgagcagcagctggcggcgctggtgcagtcgcagtccaatcttgaacagcgactggctgaattggcaggtagatcacagccaaccgatccgaatggcgacacgttgcacacctag

SEQ ID NO: 514659 - DNA, 2268 bp, Stenotrophomonas maltophilia
atgattgaacttcagttgcaaccgatcagcggcgtaacattgggtgcggtcgattcaaacgggatggttgagctgaatgcgttcggcgacgacccgcagtgccgtctgatcgctgtggacggcaaccaagttgaagggggctggtatgagctcagcttcgtcgttgaggcggttggggcacggatggtggatcccgtgctgtacgtcaactgtggtgcaggaatgaccgaggcggggcgtgtacctgtgcacgctgcggcccacgccgacggcgtgtcacgcactctggtgccactggccgggcggcttgtcgaactccgtttcgacccgtccatcggcccctgcacgatccgcatcggtcgcttcgcgatgcgtcgggtcggccaggcacacgtggcccgtaccatgttcaccgaagtactgaacagccagcgtggacgccgcgcgaagctgcgcttcgccctggacagcctgcgctcgctcttcaccacgggccgctcgggcctgggcggcttccttcgcttgcgctacagcgccatcgccctgcacggcgcattcgattacgacgcctgggtggcactgtacggtaggctgcatgcccctgagcagggtgaaatcgaagcgtgggatacgcagccgacgttctcgatcgtggttcctacctacaacacgcccgagaagtggctacgccgatgcgtgcagacggtgatcaaccagagctacccgcactgggaactttgcgtggcggacgatgcgtcgcccaagccacacgtggtggccgtattgaaggagcttgctgcagcagacccgcgcatcaagttcgtggtgcgcgagcagaatggtcatatctccgcgtcctccaacgacgccctgaagctggcgaccggcgactacatcgtgctgctcgaccatgacgacgagctgcacccgcatgcgctatatgagatggccaaggccttccgggccaatccttcgtggcagatggcgtttagcgacgaagacaagatcgatgagaagggtcgccgtttcgacccttacttcaaggctgactggaactacgatctgttcctctcccataactgcatcagtcatcttggcgtgtacgcccgtgggttggtggaaaaggtcggcggcttccgccttggctacgaaggcagccaggattgggatctggcgctgcgctgcatcgagacgctcgatgacagccagatcggtcacgtgccgcacgtgctttaccactggcgagccattccgggatccaccgcgcttggccccggcgaaaagacttacgcgcactacgcagcgatgaagagcatccagtcgcaccttgatcgtattggtcgtgatgccgaggtgctggatatcccgaacttctcgggcaactatcgcgtccgcaatcggctaccgacgcctgcgccgcgggtttcgctgatcatccccacgcgtgatcgcgccgacctgctgcgcatggcggtgacctccatcctggaaaagacggattatccggattacgagatcatcatcgtcaacaaccagtcggtcgagcccgacgcactggaactgttgcggaccctgcagcaggacccgcgggtaagcgtgatcgactacgacgcacccttcaactattcggccatcaacaacctgggtgtctccaaggctacgggcggcatcgtgggcctgctgaacaatgacatcgaggtcatctccagcgattggttgaccgagatggccagccaggccgtccgtccggaggttggagcggtgggggccatgctgtatttccccaatgacagcattcagcatgctggcgtgattctcggtttcaacggggtgggcgtgcatgcctatgccgaccggccccgggggtgggtggggatgatgcttcgcgcccgcctgctgcagaacttctcggcagtgaccgccgcctgcctgctggtgcgaaagtccgtctatgagcgggtaggggggctggataccgccctgcaggtggcctacaacgatctggacttctgcctgcgcgtgcgcggggccggttatcgcaacctgtggacgccttatgccgaactctaccaccatgagtcagccagccgcggcagtgacatggagggcgccaagcgtgagcgcttcgaccgggaagtggcgctggtgatgtcgcgctggtcttcggtgatcgacgccgacccggcctacaacctcaacctggcggccaccgggcatacgtttgatctggcatttccgccgcggcacgggcatattggcccacgctag

SEQ ID NO: 514660 - DNA, 936 bp, Stenotrophomonas maltophilia
atggcaagtcgtggcgactggatgcaggcgggactggatgagaacgggctggcgctggagatcgcgcccctggacaagccggttctgacgcgggcgaactggaacgtacgttacgccgaccacctggatacggcgggcttgatgcacaagtacgccagccatgaaaccgtggacaaagaggcgattcagaccgtcaactacgtcgttggcgcagaggggcttgctgccgccgtgggtgccgaccgtttcagcgcggtgatctcttcgcacgtgcttgagcacgtgcccaacccgatacgctggctactggatatccataccatttgcacggatggcggcgccgccgtgttcgcggttcccgatcgtctgcgctgtttcgacagccttcgccggccgtcggtagttgctgattggctgggggcttatctggaagatgcctggcgcccttctccacgtaatgtcatcgacgcgctgctgggcgaatgctcgtggcaagggcagttcacctgggaaggagaaccttcgtccgaggcgctccgccacaaccggcaaccggcgctcgcgctcgaaatggcccggcaggcagtggcgtcaagcgattactacgacgtgcactgctgggtgttccaacctggcgaactgttcgacatattccattcgctggcggtcctggatctcttccccttcacgtttggcggcttccgcggtaccgaaggcaacgagttcctgttccgtctggtgcgcgacgacgccagttcctgggaagagcggctgggaagcctgccgctttccagggccggccgcgccgctgcactcccggaagactttagcgttgccgcctatctggcaaacaacccggacctggtagcggcccgggtcgatcccattacccattggctggagtatggccgccacgaagggcgacgccacgcctga

SEQ ID NO: 514661 - DNA, 1383 bp, Stenotrophomonas maltophilia
atgaccacttccatgaacgtggaacgccgtagcgccccctcggccgccaccatcgccgtcggcgtggcgttgctggccctggtggccaggctgctgtacatccagttctatgccgtgccgatgccctactgggaccagtgggatggcgaagcagccttcctgctcaagccttggattgacggcaccctgcaatgggcagacttgatccgtacccataacgagcatcgcatcctgccaacgcgcctggtcacgttgggcagctatctggtgaccggccagtggaacaacatgtacgaggcacgcgtcagcgcactggtgtactgcttcattccgggcctgctggtctggcacgcgctgcgcgatgaacgccggtcgcgcctcaactggcttctggtggtgatggcactggcaacggccgcgctgcctttcgcttgggagaacatcctggtcggtttccagagccaattctatttcctgatccttgccagcctattggcagtgggcttggccgcccgccaacacgagaacatcattgcaatcgccggcgcggtgaccctgagcatcttcgccgcattgacgatggcatcgggcatgctcacccccgtcgccgtcggcgccacctacgtgctggcctgcatctgcctgcccggccgccgctggcccgcgctgagcgccgtgatcctgctcgccgccatcgcggtagccgcctacctggccatcccggtcattcccgagcaccgcacgctgcaggcgcagggcgcgctggaattcatcgatgctatcagccacgtgctgggttggccggtgtcccggttccacctggccgtggtagcgctatggctgccgtcggtcctagtgatctcgcgcatgctgctgcgccgtcacgctacccatagcgaactggtgatggctggcctatgcatctggtctgcgctgcagggcgcagccattgcctatggtcgtggccatggcatggaaacgcccacctcgcgctacaccgaactgttcattcccggcctgttcggcaacgcttggtttgccatccaactgttgcggacagcgactcgcccctcggtggtgcgcaccggtgccgtgctggtggctggcgcgttcgccattaccttcacggggggcatgttgcgacacatgcccgcagacatggccacggtcagggaacgcgcagccctcgggcagattcagcagcgcaatgtcctgcattacctgaccagcaacgacccatccgccctgcaggtggaattccagcacatcccttatcccaatgcggagcggctcaagaccctgctggatgacccggccctgcgtggtgcgctgtttgtgaaggcggggcccgcccaagcccaggaacctgcgccggtccactga

SEQ ID NO: 514662 - DNA, 402 bp, Stenotrophomonas maltophilia
atgatcagtccgcagttcctgcggtttatcgtcgcaggcggcatcgccgccgcggcgaacttcggatcgcggatcctgctgagccaggtcatgccatatgcggccgcaatcatcgttgcgtactgcatcggcatggtgaccgctttcctgttgaaccgccgcttcgtgttcgaggcgtccagcaatccgttgcaccaccaggcggcatggttcgttgcgatcaacctgctggcggtcctgcaaacgctggcggtcagcctcgtgctcgcgcgctggctcttccccgctgttggcatgaccttccagccggaaaccctggcacatgccgtgggtgtggccgtgccggtattcaccagttatgtgggtcacaaagcgctcactttccgcgagaagcatccatga

SEQ ID NO: 514663 - DNA, 531 bp, Stenotrophomonas maltophilia
gtgagcccctctgcgcctgacaagaatcgctcaccttcgccgccgcccgcagacggatgctccactgacaggccgaatgaagcaccgggcggcggtctcctgcgcgactttttcagtcgccgctacctgctgttcctcgtctccggcggctcctcagcggttctcggcgttactttgcgccttctgtttgcacagttcatgggctacaccgcctcagtcattgtgtcgtacttcttcagcacgcttgcggcctatgcactgaacaaacgcttggtgttccggggccaggcgcgtagcacggagctgggcaagttctttgtcgtgaacgtgatcggcctgctgcagactgcgctgctgagcaacgcgtttttcaagctcatagagtgggcaacgcgattgcccgttcctgtcgccgagacgatgggacatgccgtcgccctctccaccctggcggtgaccagtttcatcatccacaagtactggaccttctccgaatcgaagctcgacggaaaggccagccgcccggattga

SEQ ID NO: 514664 - DNA, 2124 bp, Stenotrophomonas maltophilia
atgcgcatcattaccatcgtggccgcgatcatctgcatcgcgttggcactctgttggaaattgctgccggcacagggcgcagcggaatccgcagcggttttcgacggggggtgtctgccatcatcgtcgccgtacctgcaggccaacgcgagcgtgaagggagccattacctactgcgagatcggtgacgccgccacgggcacgcttgtcatgcgcattcccgctggcacgctggacagctttgacctcgtggttgccggctatgtggacggcaaaaacgtcagtcttgccctgcaaccggtcgacggcagcagcccggccatccacctgcagcaggctccagccgagcaatggactgcggcagcgctgcagatccccgagccatggaagagcattgacttgaccgctacgctccaggaccgcggcaatcagcatgcacagtgggggggtgttgggctggttccgataagaccggctgcacacgcacaccgcagcgtggcggtagcgctgctgtgccttgcacttgcattggctctgctggcacgccatgcaggcgcggcttccaacccgtcaagcaccatcaaccgggtttccgtagccacagccctgcttgcgacggtgctgatcggcggacacctttaccggggcgacatcgctggtatctgggtccatcctgacgagtccatcccggtaaaggtcatggaagggatgcacgagcgcggcgatcttgacacggatttcgccaaggctgatctccccatcttcgccgacttccgctacaacttctccggatacatccttgccgcctacgccagtgccgaggtgttttcgccagagtccttcagcagtgaacctgcgttgctcaagcatctgctggacctgtcgcgttggagcgcggcagcaaccctggctttgtgcctgctgctactcctgcgtaataccaatgcgctgtacgccgccattggtacggcgttgatcgccattgtcccccagctctaccaggacgcccactacgcgcgccttgaatcactgagtacgctgctggcgacgctggtcttcgcactggccacactcaaacccgttcgggaacgacaccgccatctgctcatggccggcatcggcctacttgctggcgtactgaccacgatcaagttcacctatgtgatcttcctgctgttctgcatcgcatccgccatccccatgcttccccgctctggtggcgttgcgatgcgtatcaaggcgctgttggtacatggcctgtggtcggcgctcggttttaccgctggattctgcattgcatcaccgtcaatcgttgtcgatctcggagggttcatcgcaggcatccaggcattgaacaaccaatacggcggcggccaccccccgcacggcttcccatcgccttcggtgggaaagcagatcggcctgattgccggctactactctgcaacgatcgggctgccgctgctcgtactgcacttggcaggctatgcacgtgggttgcttgcaccagcaaagtacgcgctcgggggggtcgcaggcatcacgttgctggccttccttttccaggatgtgttcttcgagcgcaacttcagcccgttcctgccctgcttcatcctgatttcagtagccggcatggcgaacatcgagcactggatgctgcgtatcctgcccgagcgcaactggatacccgcagcgctgagactgctcctggctgcagttctggccttctgcgggtggaccgcgctgtcggtgacaagccgtcttgctccgcacttctctgcggagagcctgtcgaccatggaccgtgaccatgcccgcaagctggatggctatgtgcgtgatttcggcgcgactggagtaagacagatcggcttccctgacatcctgggatctgccttcccacagcccgctggggagtgcgtgctctatcaaggcattcactacaacgacggttggtccgaaagttactatcaccaactcgaacagcgaggcttccgcttggtcgcgcgcatggcgtcagatttcgacgaggttcccgtaagcacgctcaacgtgtatcacagtccgaccatgctgctgtattactcccccgccgactgcccccgtgaaggagcactgcagtga

SEQ ID NO: 514665 - DNA, 984 bp, Stenotrophomonas maltophilia
atggccaaccgtcgccctccagtgtcggttcagccggcacccggagggcgtgcgggcatctgggtcgccgccattgcagtgatctatctggcctcattgtggtacctcgatcgcgacaggaacatcctgtcgcaattggcccgaatggcagctccgctgtcggcctgcgccgttctcgtcctgcttggttatatctgccggtaccagcgctggcgcggagtactcgcggcacagggccatcctgtgcatgcctggtggcagggcctagtcgcctatctagctggcttcgcgttcacggcatcaccgggcaaggccggtgaactgctgcgtatccgctacttcaactggcagggcattccgccccgggccacgttgacgacgttcatcttcgaacgagcctgcgacctgctggtgatcaccctgctgtcgatcggagcggccactctggttccggcgttcggcctgctggcgctgatcattcttgtgctcttgctggcgctacttgcccttggctgctggccgcccttggcgcggttcgcgcgcggactggccacgcggctgcccggcgcgccgatacggagggcggcaggcttcctgatcgacggtgggaccgcgctgggcgccctgcttcggatccgtctgctgctgggtagcctgggctggggcagcgtagcgtggttgctcacagcggttgcgttcgcatggttgtgccacagctcgggcattaccgtgccgtctccgctgctgctgggcatctatccgttggcgatgctgatcggtgccctgtccttcgtgcccggtggcgtcggaaccaccgaagcggccatcgtgctgatgctggtagcctgcggcgtcggcccggacgcggcactagccatggccatcggcatccgactggtcagtctgtggctggcggtgctggtgggcatgctggccatggccacgctggaatcccgcgccttggcggctgcgaccgggcgctga

SEQ ID NO: 514666 - DNA, 180 bp, Stenotrophomonas maltophilia
atgctcgacttgccgtcggtcctgcaccacttcctgctagacagccttacccaggaagtggcgttcaaattccgcgagtgcactggcggcatctatccgcagttgctcgtgttggagcacctctcctgcgcgacgcgcccgttcgatcatcatgccgatacaggtcgccatatctgctga

SEQ ID NO: 514667 - DNA, 195 bp, Stenotrophomonas maltophilia
gtgctgaacatcgacccgcaacacctgcgctatgaagcacgtaccgtgaccggccgtctttacgatgccttcgaactgcgccgtgatgccaagggtggcaagcagcgcacggagctgaccgaaggccgcatcacgccacgcgactgcccgcgcgcgcagaccgccaagggtcgcgccgaccgttgctgggaatga

SEQ ID NO: 514668 - DNA, 537 bp, Stenotrophomonas maltophilia
atgccttcgattgccctgcctttccacccccggttgctggcctgcgccgcagtactgctgacgctgtcggcaccggcgctggcccagcgcgtggtggaaggcgacctgcagcagcagatgtcgccggccgagttcaaggctgcgggcctggacaagctcaacgccaccgagttggccgcgctcaaccgctggttgcagggcaaggtcgaggcagccaccacccaggccgtcgccgccgttcgtgaggaagcgcgtgaagaaggtcgccaggaagtgatcaagaagaaccgtggcttcttcgacttcggcagcagcgagcccatcgaaagcgccctgcagggtgagttccgtggcttcggccagggccgccactacgtgctgcagaatggccaggagtgggagcaggtcgatgccacccactactccggggggcgcaaggagtcccccaaggtcagcatgcgcccggggctgatgggcgtgtggtacatgaaggtggacggcgtgaacgtgcagccgaaggtgcgccgcgccaagtaa

SEQ ID NO: 514669 - DNA, 297 bp, Stenotrophomonas maltophilia
atgcctggggagtccacgcccgctggcatcgttccgctaccgaagcagctcgcgacgcgcttgaagtatcgcgggaagcttcgggtggtggatgcgcagcagcgggcgcggcccagtacgtactacaagattgtcaccgctgctggcgaggtgttggctcagggctttaccgatgacagtgggcgcagcatcacggtgggaactgaatccggcgacgcgcttacggcctacatcggcaatggaggctggaccatcgaaacatcgatcgatggacaggaagacgcatgcgactgctga

SEQ ID NO: 514670 - DNA, 360 bp, Stenotrophomonas maltophilia
gtgcacgaattctctaatgcctgttcaacaggctcgacgcagcttcacttcgcgaccagcttcggcgaaccgctggacagagtcacataccgactgagagatggtcgagggaatagctatgttggccgcacctcaacagatggccggggtgtcaggctgtcttcccaccacgacggcggcccggtggagcagaaaggaacgtggcggctgcccggctctggccatgtgcagatcgatatacgccgcgacgatgactcctggaagcacattggaagcttctgccatcacgctcaccagcgcagcaacgtagtgatcacggccaacgctaccgccttccccttccaggtggaaatcgcatga

SEQ ID NO: 514671 - DNA, 1344 bp, Stenotrophomonas maltophilia
atgcggcatcggaatcagccacccgccgcggccatcgtgatccgtgatcgcgacaacgtggccatgaacgtctaccacgttccagtcacgcaccatgtcgagatcaccttcacgatgagaggcggaaatgacgggaagactactcagctgaccaagggactgccctacgtcgtcgtacatgcgcgccccgaggatcccagccactggcgcgtgctggagcgcccagggcgcgcttccggaaagacgtcctcgcagggaaaagcacaggtactgctccaaggagcggggaagtacaggatctacatcaatgagcccacggagcagtttcttccgcggagcacctttcgtatacagcagcatgcacttgccgacggtcgaagcagcggtcgtgacgtgcagccactggtcgagctggacgtgatcgaagcagccgacctgagcctatctgtccgcactacccaccccaatggcctgctgcgcactcgtggcgtggcagctgactccatcgcagcggacggcgcggttctacaactgacgaaccatcaagaggccggcagcaagagggtcaagcccttggatcttgggcgccaccttatctccttccaggcgtgggctgatgcctctcgcacctatggcagtgagcaccctctcatcgaggccagcgactatcgcgaacaactacgcatcatctacggcgagcgattgacgatgaacagcgcacgggacgctcacttgcacgaccgggtgcttgagcatggcgacaaacggatcgagttcaaccaccagtcaactaccggcggacgcgggcggctctccttccgcgaagacaacggccatgccggaaaccgcatgactgcagatgagagcctgcgcagaacacatcctgcagccatggagttcctcttgaggatgatgcatgacctggacatctcgcacattcgatctaccggtgcgtggcgaccgcacttcggctcggttctgcatcgctatgcttctgcgctggatattaccgaagcaacgtccacaattgtgtcgaacgacgagcaacggcatgaggttacgatccggcttcatcgaaccaactcacccaactcgcatccactgcagatagcggcgacagaaacgccagctcgggtacgcatgcgagagctctcatgcagactgcattcctatctggcgcagggtcaagcaaatggcgaactgggctggctgggaggtccatgggaactgagctacgcgcagctggggatccatgacgccgagaacccaacaaaagtttcgataagaacagacaccacccacattcatcacatacacatcagtctgggcgacacacagccatga

SEQ ID NO: 514672 - DNA, 834 bp, Stenotrophomonas maltophilia
atgacggaattcttcatccccatactgatgatatcgcaggtaattgctgcggtatcagcccccattgagggcacgctctgccccgccccgtcagtcaccgtgaagtcctcagagggccgcgtctatctctgccaacagcgcaatggaacgattgttccggtagacgtaaccccgcccgatgacgaggcacactggcgactcggcttcggactttcagccaaacgtcccaacggctccgggtcctaccatcccgtacaggattggcccttccgctcgctatatgcaacgcagacgcttcttctaaacagcaatgagtacttttacatcttcgatcgcgatgggcgaatcattgaatccagcgaagccgacgccgttggtcagcgcatgatggagatccggatttccggccttcgaatctggcccaccgcgaatgtgtactaccgtcttccggattcagataaatggggcgaccacctgatcatggaaaccggagacacatcaatcggcacgatgaagtatgccgtagtggtcgatggcaggatgctgtgccccgcgctggatgacagtggatattccgagtggaagaatgatgatcgctatcgctcgaccggcggcttcaacatcaatggtcattgcaaggatgcgagaaaacaccaaacatctccacttgaacctgatcaggaaactcagttcttgtacacctatccggggcattctgccgaccgacagccgtttgagtggagcttccagcgccacgatgagccagaacgccctgttcgcaacaagcagggcgaatgcatcgcgctctgcatgccgctaggcgatgtgctttag

SEQ ID NO: 514673 - DNA, 870 bp, Stenotrophomonas maltophilia
atgaacgcacgatgcaagtcatcccattctggtccagcaatgaagcgcctttcaccgctccccctgttgctgttcgccgcatccattcacgccacggacgtttccgagaaaatggcggcaccctcgttcgagtgcccgccagctccggcgacgatccatgtcgtcgccgacggcaggatgctgcgctgcgcgggacctggtcatgacgcataccggcaccttcctttccctgatgacgcgtcacattggcaacatctgctcggcttgaacggcttttctgagccggacctgctcagctacgcccctccccaagcttggccgttcagggctatcgttgtttccaagcatcctggcgcgcgagacgaggatcgctacttcgtgtttgaccaacatggcactgtgattgattccaatgatatcagcgccatcggcgaacagatgatggagattcgattgtcaggcgtacttctgtggccacgatcgcgcgtctactatcgcgtgccagcgacttctgcgttgcgcgcggagaaggacttcaacctcgacgcgcgtgttgctgctacatcgcagtacgcaatggtcattgagggagacacactttgcccggtgctctacagccgcctacatgacgactggcagcatcccagtgctcctcaggatgtttcagccgcctacatcaacggacactgcgcgcaggcgttccatacgacttctgcgttgattccagattcgcaagggcaatggctcgcctacccggggtcttcgatcgatggcctcaacatgatctggagcgtgcagcgccttgactcgcctgtacgaccgatcatgggccgagatggaacgtgtctggcgcagtgcaatgccgactag

SEQ ID NO: 514674 - DNA, 150 bp, Stenotrophomonas maltophilia
atggatgccgcggccaagcccccatggatgggtttacggcgtctcccgcaaccggacccaccccgccattcctcagcaaacctgctgctgctccggctgttgttgtcgctctggcctctgcgggtgcagggcgccgccctgccgaactaa

SEQ ID NO: 514675 - DNA, 609 bp, Stenotrophomonas maltophilia
atgcccctcggggtggtcgcggaaggcgcgtggctactgagggttggccgggagggtgggctgcgcaggggccgccgtgaatacgtccttgtaggctcgggcgcgccatccatggcgcttacgcccctgcgcaacccaccctcccggccacggacactttccgtgcgcatccaccccggattgaagaaagaagagcaagagcaacagcaacagccacaccgcttccggggtcagatccgttttccgaaggaaaacggatctaacccctctttccacttggaaacccaacgctcttgccgtccgacaccgaaatgccgagaaggctgggccggggtgggtaggcaggaccgttggcgccatggatggcgccatcgagcccccaaggacgggtttacggcgtgtcctgcctgcccaccccgacccggccaacccgtagcaacccatcgccatgaccggccgttgctgttgctgttgccgtcgcttcaaaagcctgccgcaggcagcgccgcagccgccgctgcaaggaaacctgaatacgttcgaacaccgcacctcaatcccccgcccgcgcggccgataacggggttgtcaccgcttgtcccgctgtga

SEQ ID NO: 514676 - DNA, 774 bp, Stenotrophomonas maltophilia
atgtccgcattgctgctggacagggtcagtgaaccaccgctgcgcaggtcaccgcccagccgcacgccatcgcggcctgtcagcgtgacgttgttgccggccagcagcgcattggcctgcaacaccccgccatcggcgagcagggtcaggttgccggtaccggcatcgatggcagaggtgggcagttgcaggcctccgcccgcatgcaggcgtacatcggattgcccggcgttgttcagacgatcaatctgcagatcgcccgcggcgcgcagatcgacaccctttccgtcgagtccgaccgcgcctgtgaaccggttgtcagcacgatccagcgcgatggcgccctgcgtgcggatgtcgctgcggccgccgacctggactgccgcctgctgggaaacaccggcgctgccagcgcgtgcatccagattgccgctggcggacaccctgtccagcagcagaccgccgctggtggtgacagccacgttgccaccgtccagtcccacgctgccgtcgaaacgattaccggcctggtccagggtgatgtccgaacccgcctggaagcggctgttgcccgccacctgcagcgcagcagactgggtgatcgctccggtgctgttcacctgcagtgttccctgcacggaggtggtcccgagccgcacgccgttacccgccagcacggcatcgcgcgcagcctgcagctgctggacgtccagtgccgtgctgctggacagggcgatgtcacggccctgtacctgcagtgcgctgcccagttga

SEQ ID NO: 514677 - DNA, 165 bp, Stenotrophomonas maltophilia
atggatgcgaccgttctaggcatcgtggggatgtgcttgatcgcggtgatcgtgggcgcggcccggatcacggcttggtggttggaccggcgtgagtacgccgctggtcagggggcgcgccaagccatcgccattgcccaggcacgcgccgaggttcgccgatga

SEQ ID NO: 514678 - DNA, 978 bp, Stenotrophomonas maltophilia
atgagcggcggaaactgcaagttctgcgggaatatcagcgtctacctgttcaagggtggcctctgctacgagtgcagcgaaagcgatgtgcgcgtacctgtatcggcgacgccagttgatcgccgctcccccgagcttgctgcattcgacgtcgcaaacgcgcgcgcctacggcgcccagcgtcgtgccgaactgttcaacgagaagaacgccgcgcacggattctcggcggcggccggaggccgacgccttgggcttgtccattcttcaacaagtgacacgcgccgcgtgtcactcactctcgatccgaatcacattcgcggactgcgactgaagaagtcgctgattaccggagcaaggcttcatgaccaagaggcgaaacaaggctcgttccgtggcgcgtggtacatgctcaccacgacttaccgaaacggaagtgacgctggccctcgtgacattagcgagacacttaagcgcatccggggcttcttcaatcgagctgtccgattgcgctaccggggataccgtccgcgtttccgttacctctggtgcggtgaactcactaaggccggggttccccattaccacgtcttgatctacatcccgcgcggcatcttcttgccgaaagcagacagggcagggtggtggcctcacggccataccaagatcgagaaagcccgcaatgcggtgggctatctggcgaagtacgccagcaagttttcccccgacatgctcgcgtcgttcccgaagggattccgcactcacgctatcggcgggctcaacactgaatcaaagcgtgaactgcgctggtggaaagcacctaaggcagcacgcgacgcactcggcgtacttgccgacatccgcaaagccctgggcggctacgtggacaaaatcaccggcgatttctggccctcgccgtggaaagtgatcaccgacaggggccggatcatcgtatggaaattggagatacccgcatga

SEQ ID NO: 514679 - DNA, 297 bp, Stenotrophomonas maltophilia
atgagcaagatcatcatccgcactgccaccgtcaccccgcgccaggtcaagcggaaggatggcagcaccatggttttccgcgagcagtccgccgcgatcatgaaagatggggaggacttcccgcatccgttccggcttggactggatgattcgcaggctccgtatccgccgggcgactacgtggtggacgcatcgagcttcaatgtcggccagtacggcgacttgatcgtgggccgccgtctcatgctggttccggtcgcacctgctgcgactgcgaccgtttccgccaaggcttaa

SEQ ID NO: 514680 - DNA, 399 bp, Stenotrophomonas maltophilia
atgaaagaacagatcagcgtggcgttcaacatccgccaggatggcagcatcgttgtcgagggtgaccatgcaccaggcactagctctggaatcaggttcggcattctcggcatcgcatgcgagcgcatcggagtcggcgaataccgcgttgcgggcgcggggattcagatccccgatggctggcgcgccagcatcttccgtgacgagaacgacgagcgcaccatacgcttggccatccagcaaggcgacgggttcatcgactacctgtgcacagacccccacagtcaggagccgaaggatatcgtcaacatgctgacggtgagggttctggtggaggttgatgacacagaagcgtctgcgcgcgcagctggtggtgaggcgctggagggtgctcaatga

SEQ ID NO: 514681 - DNA, 552 bp, Stenotrophomonas maltophilia
atggcacttcagccaatcaatatcgatacagtccagccgaacggcaagaagggcgatccagccaggatcgccttcgggaaggtcaacgacaacgacgcgtacctcgatggtcggatcagtaccgtcgccacagctgcggcgaacgcggacacgaaggcaacgaatgccgcaagcgtagccgctgccgctgtgccaaaggctggcggcgaggcgggtgcaatgaccggaaatctggtcttccggggcgccggcagcgcggtccgccgcatgagcctctttcacaatgcgaattcgtcggctgactacggtgcaaccttcaatttggaatacagcgccagcaccaccccgctggccgggttgctccttcttcctgtcggcgcgaacggctatgtgtgcaacgcggaaatctggttgaaggatggagacttctacaactcgccctatgccgtgatgttccgtgtgagtactaccggaatcagctaccgcggcaatgcggtctggcatgcgggcaatacgactgttgacgccaacaacttcatcaagcgggcttga

SEQ ID NO: 514682 - DNA, 195 bp, Stenotrophomonas maltophilia
atggatgcgctcgatcagatccggttgcgctgcccgaagtgccgcaaggaggcggaggacctgcggcgggacaccgattaccccgagacgcacacggtggagatcatctgccaggactgcgacgacggcgacttccacagcgaggaccactacgacgcggccgggactttcatcctaccgggggaggcgaagtga

SEQ ID NO: 514683 - DNA, 1479 bp, Stenotrophomonas maltophilia
atgaatgaaaccatagtacgcgcgtccttggcggacgtgcagtccggtgggagggtgaggctgggggatgccctgccgccgctgccgaaggctggctacgtcaccggtggggacttcggtcacgaggcgcacaacgcctttacccccgagcagatgcgggactacgcgctcgccgccctctccgcccagccctccccgggtggtcaggatgggccggcctacgaagggcacacatgggtcagcgactacgtgcttgcgggtctccgggagcgggccgcgatgccgctgcagctgcgcaatggcgaggtttggcattggcagggtgacgggcacgacttccctgagtcgcttgtctgcccggtgatcatgagcgcggagacgctgcgcgcactgctcgccgcccgccggccggtgggggagccggtggctattccggaaggctgggcgctggtcgatttggccgagtacacggttcttccgcagattcctaccacggccatgatggatgccgggtggcctataggcgagcagataacggatcgattcgacgtaaagggagcctacgcagacattatcgctgagcatgatgcgaagggccaaggaatcatccacggcccgagccagcagcccgcgcaggccgtggacctgccctactcgctcgatgctgacccggcaggcatccgcgcccgcgtgtgcgacgtgatcaccggcacgctgatggttggagcgcagggccacacgccgccaccggctgggcactgggccgagccgttctggcaggcggcacgagccgatgcgaaagcgcatgccgtggacctggggcagaccttccaggctggcgtggccgagtggatgggccagtgcttcctgccatcgctctacagcaacatgaccgagcgcggcgaccgcctgctggaagaggtgctggagctactgcaggcccacggctacgacaaggcgcgcgtgcccacgctggtcgactacgtgttcggtcgtccggtcggcgatcctgcgcaggaagtcggcggcgtcatggtcaccctggccggctattgctgggtggccggcttggacatgcacgctgcgggagacgcggagttggctcgcatcaaccagcccgacgtgagggcgaagatccgggccaagcaggaggcaaagaatgccctgcacttcgactcgccgctgccaggcaatgctggcgccgccgttgaggagtggccacgtgagggtgatctggttcgatacggcacgggcgcgtccgcgctcgctatccgactcggacctcatgcagagggctggcacggctatcagtgctgcggtggctacgtcttcttcaccaaggcgtacaggcccacccgcgccgatatggatacgtggctcgattgcgccaagtaccgagacgagcgcacgaaggtggcagacaaccgcatcgcgcacgagatgtacctgctcgacagcgaggaggcaggcaatggctga

SEQ ID NO: 514684 - DNA, 510 bp, Stenotrophomonas maltophilia; identical to SEQ ID NO: 351500

SEQ ID NO: 514685 - DNA, 1101 bp, Stenotrophomonas maltophilia; identical to SEQ ID NO: 351499

SEQ ID NO: 514686 - DNA, 393 bp, Stenotrophomonas maltophilia; identical to SEQ ID NO: 351535

SEQ ID NO: 514687 - DNA, 315 bp, Stenotrophomonas maltophilia; identical to SEQ ID NO: 351539

SEQ ID NO: 514688 - DNA, 471 bp, Stenotrophomonas maltophilia; identical to SEQ ID NO: 351538

SEQ ID NO: 514689 - DNA, 1479 bp, Stenotrophomonas maltophilia
atgatgaaatccttgcgccaggactggctatccaatgtccggcacgacttactagcgggcatcgtcgtcgcgctggccctaatccccgaagcgattgccttctcgatcattgcaggcgttgaccccaaggtcggcctgtatgcctctttctgtatcgccaccgtgatcgccttcacaggcgggcggcccggcatgatctcggccgccaccggcgcgatggcgctgcttatggtagtgctggtcaaggaacacggcctgcaatacctgctggctgccacggtgctgactggcgtgcttcagatcattgccggctggctcaagctcggcgcgttgatgcgctttgtctcgcgctcggtcatcaccggcttcgtcaacgcgctggcgatcctgatcttcatggcgcaactgcccgagttgaccaacgtcacttggcacgtctatgccatgacggcggctggccttgggatcatctaccttttcccctacgttaccaaagcggtgccttcgcctttggttgccatcgtagtgctgacgattgttgccattgtcctgggcatcgacattcggactgtcggtgacatgggccagttgcccgatagcctaccgatcttcctgctgcccgatgtgccgctgaacctggaaaccctcgggatcatcttcccggtgtcggcgacccttgcggtcgtcggcctgctcgaatccatgatgacggcttccatcgtcgatgacctgaccgactccaacagcaacaagaaccgcgagtgcgtgggccaaggtgtggccaacatcgcctcgggcttcctgggcggcatggcgggttgcgccatgatcggccagtcggtcatcaacgtgaagtccgggggccgaggccgcctctccacgctggccgctggcgtattcctcttgttgatggtcgtgttcatcggcgattgggtttcccgcatcccaatggctgcattggtcgccgtgatgatcatggtatccatcggcaccttcaattgggcctcgatccgcgacctgcggaagaaccccaaaagctccagcgtcgtcatgctggcgacggtcgccgtgacggtcggcacacatgacctggcgcaaggcgtgctggtcggcgtgttgctctcgggcttcttcttcgcccacaaggtcggccagattctccgcgtgacctcgcgcaccgaggacgaggggcgaacccgcacttacaccgttacaggacaggtgttctttgcttcggcagaacgcttcgtcaatgccttcgattacaaggaagtcatcgagaaggtgcgcattgatgtgagccgcgcccacttctgggacatcaccgccgtcagcgccttggacaaagtggtcatcaagttccggcgcgaagccaccgaggtggaagtcatcggtctgaacgaggccagcaccacgatggtggacaagttcgccgtgcatgacaaagacggtgccgacgacatgctgatgggccactga

SEQ ID NO: 514690 - DNA, 864 bp, Stenotrophomonas maltophilia; identical to SEQ ID NO: 351531

SEQ ID NO: 514691 - DNA, 894 bp, Stenotrophomonas maltophilia
atggaattgcgtcacctacgttgcttcctagccgtttctgaggagcttcactttgcccgtgctgccgagaaactacacatcgaacagtcgccgctttcgcgtgccatcaaggaactggaagaggatcttggtgtgcaattgttcgttcgcaccagtcgcagcacgcggctgacccgcgcgggaaagttattccaagagcatgtattgcgtatcttcgccgctttggagcaagcccgagaaagcatgaaatcggcggccaacgggtttcacgggcagttgcgtattgctttgtccgacggcattacaccgtcccgcttgccggccctattggcacgctgtcgcgaagaagatccagagatagaaatccgactgtttgaggtgtctctggcccagcagctcaagggcttgcacgatgacctgtatgacgcgggcttctcaatggccgacgaagtgggcgacggtattattgttgaaccgtcctgggaagatgagctgatggtggcggtgcccgctcgccatcccgcgctggcccataagagaattccactggaagaagttctgcgctatccccttgtcctgggcgatccggcaatctgtgaaggccatgcgcgacaagtggaccgcgtactgcgtaggcaggacagagagccattaatcgtgcagcgtgtagccacgttcgacgtgatgatgacgttggtgtcggcaggcctagccttgggacttgccgggtctgcacacatcgcctccagtcgtgaaccaggcgtcgtaggccgttcactagcggggcgtccacccatgttgaccacttatttgctgcgtcgggatgcggaaccgtcgcaggcgttggctcgcttcatcgagcggctggcatccctagggatagacgatgcctag

SEQ ID NO: 514692 - DNA, 261 bp, Stenotrophomonas maltophilia; identical to SEQ ID NO: 351530

SEQ ID NO: 514693 - DNA, 1071 bp, Stenotrophomonas maltophilia
atgagcgccgctccgcaatttccgcccgcgccgcgttcttccgctgcggcctcgctcgaccgccgcatccagatgctgcgcacggcgatggggccgctgatcgccgccgcgctcgaagacccggacgtggtggaaatcatgctcaaccccgatcgcaccctttgggtggatcgcctgtcctcgggtcgtgcgccgatgggcgttgagatgcccgaggccgatggcgagcgaatcatccgcctggtcgcggcccacgtcggcgcggaagtccatcgcggccagccgcttttgtcggcggaactacccgagacgggcgaacgcttcgagggcatcttgccgcccgccgctccggggccggccttcgcgttgcgcaagcgcgccgtgggcgtgattccgctgtcgcgctacatcgaagacggaatgatgaccgccgagcaggcgggctttctggtgcaggccgtgcgcgagcgccagaacgtgctgatcgccggcgccaccagcagcggcaagaccacgctcgccaatgccttgctcgctgaaattgccgccaccggcgaccgcgtgctggtgctcgaagacacggtggagctgcaatgcgcggctcgcgaccacgttccgctgcgcacgcgcgccggcgtggtgtccatgaccgagctggtgcgctcgtccatgcgcctgcggcctgatcgcgtcgtcgtcggcgaggtgcgcggcgccgaggcgctggatctcgtcaaggtgtggggcacgggccaccccggcggcatcgccacgatccatgccggctccgcgctcggcgcgctgctgcgcctggagcaactgattctcgaagtggcggtgaacccgccgcgtgcgctgatcgccgaggcggtcaacgtcgtcatccacatcgccgggcgcgggcgcaagcgccgcattgagagcatcgctcgcgtcgtcggctttgacggcgtgggctaccaactggcggacgcgatggagacaccgtttcccgcgctgccgccgatccccgatgccgcacccgctgcggcgactttcccgtcccctgaccaacctggagaactgccatga

SEQ ID NO: 514694 - DNA, 1665 bp, Stenotrophomonas maltophilia
gtgggcggcaggcagtggcggtatggaacaggagcggtgctggccgtcctgatggtgtggttggcgttgccgtggccgcttcaggctgcagaggccgtgtcgggccatgattatctcctggtcggcggcgctaccgacgagccgacgccgcaccgcgcatgcacgccgcagatgctgtccggcgcccgccagcaggtgctggtaccggctccgccgcagggctggtcagggcaaccgcaggcgctggacgtgttcaacgtctttgccggtgaagtgcgcgtccagcatggcgaccgcgagatctgcggcaacatgcacgacgcgcgcacccgcgattcacgtttccgggctggcatcggcctggtagcggtaccgccggccggcagccatgagccgttcctggtctcctggcagacaccgctgaaggcacgttgggtaccgaccctgcggctgggcgcgcccagcccggtgcagcagaacgacaccgcccgcctgctggtgcgcgcggcctgcatcgcggtggcgatcgcgctggcgctgtcggcgttgatggccttcctgaccacccgggaccgcagtttcctggtctacatcgccggcaccaccgtgatggtgctgtggcaggccatcctcggcgggctgagcggctatccggaaccctggctgccggtgggcgagcacggcgcctggtggctgctggcgctgaccgctgcgacccaggcactggtgctgccggcgctgtggcggctgaacggaggcgaccgcgtgctgcctcgatcgcgcccggcccagctggcggtgttgtgggccctgatggcgctggcagtgctggtgccgtggctgcgctgggagcatctggcctgggtcgcgaagggcttgcaggtgtcctatctgtccggatgtggcctggcactgatggtcggcgtctgggcacgctggcgcggcgaccgttgggcgcaggcgggtctggccgcgctggcaccgatgctggtactgatcatcgccgatgcctgtggtgcggcgtggctgctggaataccgggtggaggcgctgcagctggcggtgacctggctgttgatgatggccgcgtatgcgttgaaccagcggctgggccggctgcgccagcagcgtgatgaacttcgccagctggccgagaccgacggcctgaccgggctgcccaaccgtcgcgccggactgcagcagctggcccgccatctggaacgggtggaccgtgagcgcggcccgttggtgatcggcttcctcgacatcgacctgttcaaggacatcaacgaccgtcacggccacgcagtgggcgaccaggtgctggtggcggtggcgcgtgccctgcgcgcggcggtgcgcagccaggacgaagtggtgcggatgggcggcgaagagttcctgctgctgatgcccggcatgccgcgcgaggcggcgtcggcgcggctggaccgcctgcgccagcgcatcaccgaggctggccaggccctgcaggtgccggggctggaggtgaccgccagcatcggcctggcgcagtggcgaccgggcgaggacgatctggccgggctgctgcggcgcgccgaccatgccatgtacgtggcaaagcgggcaggccgcaaccgggtcttcgacggtgaggagctcgatccgcccgccctggcatga

SEQ ID NO: 514695 - DNA, 765 bp, Stenotrophomonas maltophilia
atgatcttcggtggcattaccgggttgccggccagcggcgggcactaccgtgtttcgatcgtcggcggctcgccatggaaccgccgcagccgcgcgttcccgcccgtccgccgggcatcgcttggcgcaacaacgcagggtgttccggtagtgccggccgctggccggcaacctcatgatcttcggtggcattgccagggtgccggccagcggccggcactaccgtgtttcgatattcggcggctcgccgtagaaccgctgcagctgcgcgttcccgtccgccgggcatcgcctgacgcaacagcgtgtggtgttccggtagtgccggccgctggccggcaccctcatgatcttcggtggcattgccaggttgccggccagcggccggcactaccgtgtttcgatattcggcggctcgccgtagaaccgctgcagctgcgcgttcccgtccgccgggcatcgcctgacgcaacagcgtgtggtgttccggtagtgccggccgctggccggcaccctcatgatcttcggtggcattgccaggttgccggccagcggccggcactaccgtgtttggatctttggcggctcgccatggaaccgccgcagccacgcgttcccgtccgccgggcatcgcctgacgcaacagcgcgtggtattccggtagtgccggccgctggccggcacctcatgatcttcggtggcattgccaggttgccggcgagcggccggcactaccgtgtttggatctttggcggctcgccgtag

SEQ ID NO: 514696 - DNA, 1167 bp, Stenotrophomonas maltophilia
atgccggcgctgacccagttcgctgccagtggtgatggcccggtgtggaagggcggcatgttcccgttcctgttcatcaccatcgcctgcggtgcggtctccggcttccacgcgttgatttcctccggcaccacgccgaagctgctggccaatgaagcgcacatgcgctacatcggctacggcggcatgctgatggaatcgttcgtggcggtgatggcgctggtggcggcctcgatcatcgatccgggcatctacttcgcgatgaacagcccggcggcggtgatcggtgccgatgcggcctcggcggcgcactacatcaccaacacctggggcttcaccatcacgcccgagcagctgaccgcgaccgcagcggccattggtgaaccgaccatcctgcatcgcgcaggtggcgcaccgacactggcggtgggcatcgcgcagatcctgcacgaagcgattcccagtggcagcgacgcgatgatggcgttctggtaccacttcgcgatcctgttcgaagcgttgttcatcctcacggcagtcgacgctggcacccgtgccggtcgcttcatgctgcaggacctgctgggcaatttcgtgccggccctgaagaagaccgaatcgtggaccgccaacatcatcggtaccgccggttgcgtggcgctgtggggctacctgctctacaccggcgtggtcgatccgttcggtggcatccagacgctgtggccgctgttcggcatctccaaccagatgctggcgggtatcgcactgatgctgggcacggtggtgctgttcaagatgaagcgtgaccgctatgcgtgggtgacggccgtgccggccatctggctgctgatctgcaccacctacgccggcttcatcaagatcttcgacagcaatccggcgcagggcttcctggcccaggcacacaagttccaggccgccctcgccagcgacaccatcacggcaccggccaaatcggtggcgcagatgaagcagatcgtggtcaacgcctacgtcaacaccggcctgaccgcgctgttcctgctggtggtgggcgcagtgctggtgtattcgatcaagaccatcctggcggcccgccgcaatccgcagcgcagcgaccgcgagaccccgtacgtggcgctgaagccacatgaaatggtggatctgtga

SEQ ID NO: 514697 - DNA, 816 bp, Stenotrophomonas maltophilia
atgaaagggttttccaaaataggctgggcggtactcgccctgctcggcgccttctgtctgggcaccgtggccttgcgccgcggcgaacacatcaatgccctgtggatcgtcgtcgccgccgtttcgctgtacctggtggcctaccgcttctacagcctgttcatcgccaacaaggtgatgcagctggatccgacccgggccaccccggcggtgatcaacaacgatggcctggactacgtgccgaccaacaagcacgtgctgttcggtcaccatttcgccgccattgccggtgccggcccgctggtgggaccggtgctggccgcacagatgggctacctgcccggcctgctgtggctggtggtgggcgtggtgctggccggcgcggtgcaggacttcatggtcctgttcctgtccagccgccgcaacggccgctccctgggcgatcttgtgcgggaagagatgggccaggtgcccggcaccatcgcgctgttcggtgcgttcctgatcatgatcatcatcctggcggtgctggcgatggtggtggtcaaggcgctggccgaaagcccgtggggcatgttcacggtgatcgcgacgatgcccatcgcgatcctgatgggcgtgtacatgcgctacatccgccccggcaggatcggcgagatttcggtggtcggcctgatcctgctgctggccgcgatctggtacggcggcaaggtcgccgccgatccggtctggggcccggccttcaccttcaccggcacccagatcacctggatgctgatcggttacggcttcgtcgcctcggtgctgccggtgtga

SEQ ID NO: 514698 - DNA, 753 bp, Stenotrophomonas maltophilia
ttggcctcactggtcgcgtcccttggaccgtactactcgtgcctgtggtgtgcactcgaagactctgttacaagaaatgccccggtcgcctcagatgacgggcctgtgtggagtttgctgcgaaacctccaggcggcgggagtactgctgaccgagaccagcgattcaccatccactcgaaggtccctttaccaccctttcgcctggacatactctccggcgtggcaggctctcccaaaccttcgcaatgcgctggcagttgcactaaatggctggcaagggccggcccatacagaagctcgcgtcgctctgtgggggcggcttgtcaacgacgagatatccgcatacttggcgaaccttcttcgacggcaccgaataagtcctgagcgagcaaacggagtcatcgcaatgcaggagagcccgtggttcaacctcagctcgggcagacggcgatatgtcgcatggtcggggatgcgtgtggcagctagtgtcatgttgcagactgagatgaacgaagaggccgccatgcaagcactttgtaaagagatgcagatcagatcgcgatggcttcagcgacgggagcaagaagcaagactcggcccgagggagttctccttcttgcccaacgccgactggcgcagacctatagctattgaggtcgcgctagggagcctcttgggatcggacagtgactactggacgctttgcccttccgcgatacgtcttacacatgccgcaagttctcgtcgctaa

SEQ ID NO: 514699 - DNA, 732 bp, Stenotrophomonas maltophilia
atggacgcccgtaccgccctccccctgcctgacacctgcgataccgcaccgcgtgccgaattcctgcgcggcctgcgcgccgccgtgccggtgatgatcggcttcattcccttcgccttggtgctcggcgcgcaggcagcccagaaaggcctgagcgcactggaagtgccgctgatgaccggcctcaacttcgctggcggctcggagttcgccgccgtcgaactgtggacctcgccaccgcacattgcactgatcgtggccatcaccgcgctggtcaacagccgtcacctgctgatgggcgccagcttggccccgctgctgcagcacctgccgcgccgccgggtgctgccggcgctgttcttcatgtgcgacgaaagctgggcgatgggcgtggccgatgcgcgcagacgcgcgcttggcttcagcctggcctactacctgggcgtatcggcaggcctgtacacggtctgggtggcctgcaccgcgctcggcgcgatcattggcccgatgctgggcaacatccacgcctacggcttcgacatggccttccccgccgtgttcctggtgctgctgcgtggcatgtggcagggcatgaaggccgcgcggccgtggctggtcagcctggctgtagccgctgctacctacctgctggtgccaggtgcgtggtacgtggccagcggcgcactggccggcctggccgcagcctggctgctggcggaggacgcagcatga

SEQ ID NO: 514700 - DNA, 1428 bp, Stenotrophomonas maltophilia
atgggtatcggtgatcgcgtccgttccttcttcactcgcagcagcaccaacctcgcctctgtgccgaccaccaccagcaacggctggcagcagatccgggaggctttctctggcgcgtggcagcgcaacatcacccagctgaaggaccgcgacattcggacctacagcacggtctacgcctgcatggctcgcatctcttcggacatcggcaagctgcccttccagttcaagcggatcgacgagcaagggctgtggagggatgccgtgcacccgacggtgtcggccctcctgcgccgccccaactcctaccagacgcccgcacagttccgcgaggcatggatcctgtcgaagctgcaggcgggcaacgtctacgtgctgaaggggcgcgggtcggaccgcgctgtgaccgacctgtgggttctcgaccctgccagcgtgcagccgaagatcgcggacagcggggacgtctactacgagctgagctacggctcgccgaacaacctgctgcccatgcagttcggcggcgagaccatcactgtgccggccactgagatcatccacgaccgggaaatggcgatctatcaccagctggtcggcgtctcgcccttggccgcggcctatctggctgctgtcaagaacgtgcgaatccagaactcggcggctgagttcttcgccaatgatgctcagcccagcggcctgctgaccgctccggccggcatgaccgacgaggatgcgcaggacgtcaagacgttctgggagaccaactacagcggccagaaccgtggccgtgtggctgtcatcggcgcggacatgaaatacacgccgtttgccttcaacgcgtccgactcccagatggtcgagcagctgcgctactccgacgagcaggtgtgccatgcgttcggcattcccccgttcaaggtgggcatcggctctatcccggctggcatgaaggtcgacgacctgaaccagatgtactacgccgacgcactgcaggcgcgcatcgaagccatggaggactgcctggaccgtggccttcgcctggacgatacgatgggcgtggagctcaacctggagccgctgctgcgcatggacgcccagaagatggcaacggtagagggcgaactggtcagcaggggcatcaaggcaccgaacgaggcccgccgccgctttggcctggccccgctcaccggtggcgacagcgtgtacctgcagcagcagaactacagcatggaggcgctggccaagcgtgacagctcccctgatccgttcggcaagggagccgcagagggccagcgccacgcatcaccgcggctgacacgtgacatggccactgcccccaagcggcgagccagatacaaccacgacggcacgtgggacatcgagctcgaccccggcaactggctgcgaggggtcaagcgggccgtgtaa

SEQ ID NO: 514701 - DNA, 339 bp, Stenotrophomonas maltophilia
atggccggccctcagaagatgggaaccgcctatcaggaggctctgaaggcccttgcagagcaggtggcgtgcgcctaccgcgaggactgctgcggcttcctggtgtcggccggcctgatccagggcaacacgctgatcgctgtcaccgcggtgttcgacctcactggcaccgagtgctgggttccgctggaactgggagccgagggttggagtgaagagcgccgcgtccgcatcgagcaggatgctcgggccgtgctgactcagcgcctggccatcgaggtcaccgttgccgatgtcgtcgaacgtcgcatgagggaggtgctgtatgggtatcggtga

SEQ ID NO: 514702 - DNA, 990 bp, Stenotrophomonas maltophilia
atggatcacatgcagttcgccgccctttcccgcgcccgcaccgcgctcgacgtgatggtggccggcgaaagcgacgccagcaaggccaaggccttcaccgacatggcattcgccatgatggtgaccaacaaggcgaacatcggcaacgcgctgagaaaccatgcctcgccgctggtgcagaaagccgctgcccacgccctcagcgacgacgtgtggaccaatgctgacgccgccgccctggctgccgcctacatcggctcgatcgccgagggctcgctgctggagcagatcgtgcgctacggcaacaggctgccgctcaacctgccccacgtgatggtcgccagcggtttcagcgccaacgtgatcgccgagggtgatccgaaggtggtcaagcacatgaacctgggcctctccgatgtgagcacccagaaggccgccgccatcatcgtgctcaccaacgagctgatccgcgccgccggtggccgcacgctgttcgagacggagctgcgcaaggcagtcaccagggccatcaacgcgtccgtgctggaccagctgaccgacagcgacaccatcagcatcccgggcagcggtgatgcgctggccgacctgcgcgccggcctgtacatggcggtcccatctgcaggctatgtcgtggccatgcctgccgccgacgtgttggacctttccctgcgcctggagaaccgcgggggaatgggtgtacgcggcggcaccttcgtacccggcgtggagatcgttgcaatggatgagatcactgacatccacgtgatccccgcatcccaggtctcggtgttggatggcggcctgcaggtgcgcggtgcagagcacgccaccgtcaccatggccgattcgcccaccagtccgtcggagctggtcagcctgtggcagaccaacagcaccggcctgctggccgagcgcaacttcttcatgtcgcacgctgcgccaatcgtcatcgtccaagggggcagctga

SEQ ID NO: 514703 - DNA, 381 bp, Stenotrophomonas maltophilia
gtggtgctgggcatcccgaagggaacgctgcgccgctggctgcggcagggctgcccggtggtggtgcacggtcggcgtggtcgcggccaggcggcgctggtggaccctgagcaggtgctgcagtggagacaggccggtgagcagcagcgcatttacctggagctggccggcgcggtgccgctggtgctggcgcgcgcgacctgcgactcggtgcgcatgacccagggcatcgacaaacggcgccttgccggcgtgcaggcggcgacctggtacgtggccaccaatgcggtgttggatcacctgcgcgagcggtgcccggcggtgccggagctggcagaagtgccggacgaaatcgagcaactgcggaaaatcgcacgctag

SEQ ID NO: 514704 - DNA, 192 bp, Stenotrophomonas maltophilia
atggtcatcgatcgaacgaattggaccgcccgcagtgcagatgccctcaaagcggtggatcaggagctggagagcaccacccaaagcaacagcagcgtgcgcctttccggctaccgcctggtagtagttatctgtgtactcgccctgagtacgcttttggccccaaagtcggctcaaccgtactcgccttga

SEQ ID NO: 514705 - DNA, 531 bp, Stenotrophomonas maltophilia
atggcgcggatgactgagcgagaggcccgcaaggacgagaggcggcgtcagcggcttaccggtcgcggcagccgcatctacgtccccgtggacccgcacgtccggctgtacgcgtgggagatggattgcccggcgtacaggaccctgagtccggacgcgcgtgcgctgctggtggagctgcgggcgctctacaagcccagcaacgggaaagagatcttcctgagcgtgcgggaagcgcgaaaacgcctggccggcatcggacaggccaaggtgcaggccgccttcacagcactgatggaacgaggctggatcgaagaggcgagcagcgggagcttcgaccagaagactggaacaggccgagcgagatccttcctcctgaccaacatcggaccagccggcgatgaggttggcgcgaagaaaacctacatgcgatggaggccttccgaagatccatacgcggccgaatgccaaaaaaacacggtactcaaggcgagtacggtccgtactcagggtgagtacggtcatgtgtga

SEQ ID NO: 514706 - DNA, 162 bp, Stenotrophomonas maltophilia
atgaactgcgtcgtgatcccattcccggccggccgcatcgtccgcctgcccagtgaccgaggcgaccagcatcggccgtccaccggtatttccgaggaacgtctgcgggtgctcgctgctcgcatggtagaggcaatgcgggtacaggagagccgtgcatga

SEQ ID NO: 514707 - DNA, 333 bp, Stenotrophomonas maltophilia
atgcgaaatactctacaccaatccgtcgtcggatccatcgggcattcccccgacgcccattcagatgactttggcccgggcaagttctgggacggtgagggcgactacctgatcgccccgaccacgacctgccgggctgcgctcggcgacctgcgctggctgctggccggcacagagcaggttctcctgctgatgctggaagacgcacgcgaaggcgacctgtacctctacagcctgctcctgcagcaggtgcagatggggcgcaacctggtgcgcgaggccgaacggctgcaggacctgcaggacagcgttcctcagcaggtggcggcatga

SEQ ID NO: 514708 - DNA, 846 bp, Stenotrophomonas maltophilia
atggacacgcgcccggcagctgccggcgcaggcacagcggccgacggggacctgagcgtggcggtgaatttcgattacgaacaggccggtgaactgaagatcggccaggtgggcatcgccaaccttcgcatccgtacccttgatgtcgaacgcctcgtgcaggaaatgcgcgagcgcgtgacccgtgcgccgaagctgttcggccgcgcggcggtgatcctcgatttcggcggcctgagccaggttccggacgtggccaccgcgcaggcgctggtcgatggcctgcgcagcgccggcgtgctgccggtggcgctggcttatggcaccagcgcggtcgacctgctctcacagcagctcggcctgccgctgctggccaagttccgcgcccagtacgaacgtgccgaggccgaagcggctccgccgccgcccgcaccggaaccgcgccgcgccgcgcgcgccgaaccgaagccagccccggccgcaccggtagccaagatcgccgatgcagccgcgccgcagccgggccgcatgcagctgggcaacgtgcgttcgggccagcagctgtacgcggagaactgcgacctgaccgtgatggccaccgtcggcgccggcgccgaggtcatcgccgatggcagcatccatatctacggcaccctgcgcggccgcgcgctggcaggggcccagggcaacaccgcggcacgcatcttctgccgtgatttccatgcggaactggtggccattgcaggccactacaaggtactggacgatgttccggacaacctgcgcggcaaggccgtgcaggtgtggctggaacaggaccagatcaagatcgctgcgctggactga

SEQ ID NO: 514709 - DNA, 633 bp, Stenotrophomonas maltophilia
gtggtgagcattagcgatgaggctattcagcaaatgttgaatggagaggtgggtatatgttttttcgttcatcgctccgtcttttactgggttatcgatgatagggcaaactttagtcttgatgcggaaaaggattacagggcctatcttgataaaggtcatataaccgaaagtcagtatgatgcagcctgtcgagagtttcgtggtggaattctgaagctcgacgaaagcaattttcttgaatacctaagctccgctgggggtgggaatgccacagatgaaatggtgatgatgttcaaaaccaacgatggcgacgtgggtaacctacttgaattgcatgcgagggtggagcgattcaatttaacgggctctggtcttctgaaaggggattttatggcagctagtcgccttgcctctcgccttcctgatttctatgttaattttgatcggaagattttcttgcacatggagtcagatcgcttccacgagaacctggcctacccggattgggaggctggatatggggacttctgccatcttgtacctgacgaagcgcgctactggtccggtcgagcagatttctggaaggttcgattcattcatggctgggacacgatgctgccggcgctctga

SEQ ID NO: 514710 - DNA, 237 bp, Stenotrophomonas maltophilia
atgttcttcgcattcggccagcaaggtggacacttccgcttccagactattgtcgatcgcgtccacgcgctggctatcgctgccgtcgagctggtaggcctgcaggatctccttgagctggccgatgaggaagtcggcgcgtttggcatgttcgagctgataggccagcagcttctgctgcgcggtgttctccagcccgcgcacctgcttgatgaacaactctgccgcatcgtctaa

SEQ ID NO: 514711 - DNA, 891 bp, Stenotrophomonas maltophilia
atgaccgttcttgtttccggagccaccagccagatcggccggttcctgctgccgcgcctggtgcaggcgcatgggcgggtacaggcggtgagccggcaaccgcaaccggcacaggacggcgtgcagtggctgtgcggggacctggcggctgcgctggacagcgtgccgtctccggactggcaggcgattgccagcttcggcccccttgaagcattggcgcagtggttgtcgcggcagacggcggcccccgcgcggcaggtcatcgccaccagttcgatgagcgtgctgagcaagcagaattccgagcaggccgacgagcaggacgtcgtggcgatgctgcagcggggcgaagcgggcctgatcgcgcaggccgagcgtcttggcatgggctggacgatcctgcggccgaccctgatctatggggccggcatcgaccgcagcatcaccccgatcgtgcagcgtgcgctgcgtctgcgcctgtttccgattccgctggtgggaggcctgcgccaaccggtgcatgccgacgatatcgcccgcgccgtggtggcctgcatcgccaccggtgcagcgtcggcacgggtgctggaaatcggcggtggcgagcgcctgccctatcacgcgatgttccgccgcgtgcacgccagcctggcacagccgacattggcgctgccgttgccgggcgcggcactgcggggcctggccgcggtgctgccgcgggcgcgtggcccggtgtcacgcctgcagcaggatctgattgcggacaatggcccactgcaggcgctgctggacgtacatccgcggccgttccagcccgacgcggacacgtggcgaccgatgagcgcggcccaggccgtgcagcggatcgctgcgtatcccggcaacggctag

SEQ ID NO: 514712 - DNA, 138 bp, Stenotrophomonas maltophilia
atgccggccagcggccggcactacctggcatcagccctgcgcttcggctacggcgcggaagaccagctgcatctgctgcggctggaacaggcggtggacgccctgccacgcttcccctgggaaactgccgaacggtag

SEQ ID NO: 514713 - DNA, 138 bp, Stenotrophomonas maltophilia; identical to SEQ ID NO: 514712

SEQ ID NO: 514714 - DNA, 1020 bp, Stenotrophomonas maltophilia
atgtggggcgcgccggcctgcttccaggccgccggcgcccctcgcaccacacggaagaagaagaacaagaacatgctgaaagtcattttcgataccgacccgggcgtcgacgacgccttggccctgctgtacctgcacaagcacgcccagatcgatctgatcggtgtcaccaccaccttcggcaatgcctcggtggagtcgaccacgcacaatgcgctgtacctgaagcaggcctggggctttgccgccccggtcgcgcgcggcgccggtggcccgctgcagccggaagccacccccgaagcctggccggtccacatccatggccacaacggcctgggcaaccacccggtgccggccgaactggacgtggccgccgacacgcgccccgcccaccagctgatcatcgacctggtccgcgcccatccgggcgaagtgaccctggtcgcggtcggccgcatgaccaacctcgcgctggccctgcagcaggcgccggatatcgccggcctggtacgcggcgtggtgatcatgggtggcgccttccacgtcaacggcaacatcaccccggctgcggaggccaatatctggggcgatgccgaagcggccgacgtggtgttcaccgccagctggccggtgaccgccatcggcttggacgtcaccacccgcgtggaaatggaccgtgacggcctggacacgctggccgccatcggcggtgccgacgccgagctggtccgtgcactgtcacaggactacgtcgacttctacctgcaggccggccacaagggcatggtcgtgcacgactgctgcgcctgcatcgcgctgacccgccctgagctgttccagttcgagcgcgccagcgtgcgcgtggccaccgacggcgttgcccgcggcatgaccattcccaagccggaaggcctggccttcggcccgagcgtgtgggacggccacgtggtgcagtcgattgccatcggcgtggatgcggccgcggtgctggccgacatcgagcagaccctgaaggtctga

SEQ ID NO: 514715 - DNA, 783 bp, Stenotrophomonas maltophilia
atgtctgcagccaaccctttcagttccaaccagacgatattggtagttcgcgggctatcttcggcgaccgagaactttaagccgcgtgaaatcttcgtcccaagcaggatttgcagcttctgcgatctgcgccaaatgcagcaagctggttgccattccagcgatctcggcttttacgtctttgtcgctcgcggacaggtaggcattgaactctcgcctagccctccacatagtggcctcgacctcaccaagcagcgcagcgagatcagcacccggcgcgcccgagccaggtgctcgaaagctcactttcgcgaacagcgagtgcatcgtttcaatgtctgctatgcagagtccaaccgcattgctcagcttgctcggcagaacgtcgaaatagggaataagctcggaaaacggcttcgaatcgcagtgctccgcgttaagccgtgcaacattgtggtcgcttgcggttctggcatttttagccaacacacaacttgctccaatgtgcaagagctgaataccaagacgaatgttcgctatgcgagcaacagcctttgcgtgttgcctgcgtgcgagaaggggcgcaaggccaagagcgacagcagccaatgtcgcgcagatcgtaccgatcgccgcccaagcatcccaccacacaacgcaaccgctctcacctggcggccagcaggtattgaaagcattccaccagctcattccctgatccccctgtggactgggcagcattctgacatgccgctgcagcgggcggagaacgcccatggctga

SEQ ID NO: 514716 - DNA, 279 bp, Stenotrophomonas maltophilia
atgagcgcccctgtcgatctgctgcagctgctccaacagcatgccaaaggtattggcggcggagcggaaggcccggacggcctgagcctgtcagcgcgcgcgtgtaagaacgtcgccagcgaactgcagttgatccacgacgcgtttgccggcctggtcaaggctactcaggagacgcgcacatcgctgcagcacatgcgaggccccgaggtattgatccactcccgcacggaggatctcgatgccgctctggctcgcgtcaaaggcgatgcggcatga

SEQ ID NO: 514717 - DNA, 453 bp, Stenotrophomonas maltophilia
atggaaaaagtaccttgggtagggaagcacagcttccacgagcggcttgaccggggcaaagctgtgatcactgcatggcttgatggcggcacggtgacggagaaggcaaagggtcggctggactacgcgctagaccagcttgctcaactgcctcaacagatgtggtgcaagcccaacccagccagttcgctgggaaatcacacatatgtgatacgattcaaggagaacggtggtggtcagcttaggatcttcgggcacttcagcgccttccattcagcctttgtgatgaccttcaacggattcgaaaaagacaatgtttaccatccccacgactacgaagaacgagcggtttctcacaaggacaaatgcgaggcggacgcttcgaagtcctccattgcgtttcgggatcgctgcgaaccatgccgggagggagttcagtccgtccgtagctga

SEQ ID NO: 514718 - DNA, 345 bp, Stenotrophomonas maltophilia
atggctaaacgttccgaggcaaaacgccctaaagctgcgcctctgatgcacggggatgctcctacattttatgccgaccaacccgccggcatggcattcagtccccaagtaacgaagatcacctttggcgttgacgacaacgacagcgccaatgaatttccacgcccagttgtgaccattgttctgcccaccgacgctgtgctgaacatggtcagggacatggtcgacattcttgggagtgacgaatttaaggcggagatgctgagcaaaaccgccaagttgacagacatgtttacggagggcgtcagtgctggccctaccgggaaaattatccatttcacctga

SEQ ID NO: 514719 - DNA, 219 bp, Stenotrophomonas maltophilia
atgagtaagcgcgcgctgcgcgccaagctcggtatggacagcgataagcacctggccaccctgctgcagcttcccgtggaagaggtagaggcgtggccggaagagggcgccctgccggccattccgcagatccagcgcctgctgggcaccgaagagttcaaagggcctcgaactcaggatcccgacgacggacgaatcatccgtatggaggtcgcatga

SEQ ID NO: 514720 - DNA, 489 bp, Stenotrophomonas maltophilia
atggatatggcctcaatcggcaccgcgttttcggcaatcgatctgatccgcaaaggattggtcgcagccgtcgaggttcgagatttcaacaaggcggctaccgagctcgcgaaactcaacgaggcactgatcagcgcgcaagctgctcttctggctcagaacagcgccttgttcgatcttcagcgcgagaagttcgagagcgcagagaagttgcgaaaactggaggaagccttggcggagcgtggacgctactccttggtcgagctggccgacggctacttcgcctactcggcaaacgtcaccccaaagcagagcggaaccttgcagccaggcggcaaggagccggagcactacatctgccagccctgcttcgacggtgggaagaaagtcgtccttcagcgctacgcaagatacggctccgttcatctccgctgccccgtttgcaccaacgaggtggacaccggcgagcgatacaacatgggcttctga

SEQ ID NO: 514721 - DNA, 465 bp, Stenotrophomonas maltophilia
atgaaggcgaagatcattggtagcagcgccgccgccgtcatcgctctggctgcggcggcgctggtaaagccatgggagggctactcggcgactccatatgtcgacatggtaggcgttgccacctactgctacggcgataccagccgcccggaaaaggcggtctacaccgagcaggagtgcgccgagaggttgaacagccggcttgggcaatacctgaccggcatccaggcatgcatccgcgtcccactgcagccccaccaggcggcggcgctgcttagctggacctacaacgtgggcgtgggcgctgcttgccgctcaacactggtggggcgtatcaacgctggccagcccgccgcgagctggtgcccggagctggaccgctgggtctacgccggcggcaagcgcgtgcaaggattggtgaaccgccgcgcggcagaacgggccatgtgcgagggcaagtcatga

SEQ ID NO: 514722 - DNA, 183 bp, Stenotrophomonas maltophilia
atgactgcgacattgcgcgcgtcgatacgcatgcggtggtggctgcgctgctacctcgccgcagtgatgtggttcgcccgggcaacggggatggagccggactgggaccgggtcgaccggtggatacgccgtggcctggtgctgcaaacaacgaggattgctgatgaacgctgcacggattga

SEQ ID NO: 514723 - DNA, 3705 bp, Stenotrophomonas maltophilia
atgagcctctataccctcactgttgatctactcgccaagaccggctcctttgaaaaggggatgaccaaggcagaacacgttgcggcacagcgctctgccgcgatccagcggaccttgtccgaagtgggcaccgcattgggaaccgcgctgggcaccgcggctgccgcagccggcacagctgtagtcatgtggacgcgtcaggttggcgacttggccacacagtacgagcgtttcggtcagctgtcgggcaccacctcccagcagttccagcgcatggctgcaggcgccaacacagtggggatcagccacgagaagctggccgatatcctcaaggacgtgcaggacaagattggcgactacatccagacgggtggcggcgccatggccgacttcttcaacaacatcgccaagggcgccggcgtcactgccgagcagatgcgcaagctatccggcccggacgcactcgggctctactttaagagcctggagcgggccaacctgtcgcagacggagctgacgttctacatggaggccatcgccagcgactcggcgatgctgatcccgttgctgcgcaacaacagcgccgggttcaagcagtggggccaggctgctgaggcagctggggccatcatcagcaacgacacggccaaggcgatgaacgatctgcgccgggtcacccaggaggcagacctcgccttcctgggcgtcaaggttcaggtggctgagggcgtgatcccgaccctgaccgagctgaacaagctgctgcacgatcccaaggcgcaggaggccatgcacacggccaccaatggcgttatcgcgttcggccaagccgctctggatgccgccgcaggtttcgggcaattggcggtcagctacaccggctggctcaaatcgaagggtttcatgcccgtcagcaacactgattcgctggagagcctccaggctcggcgcgtcgcgctgggcgacagcctgaagaactggaagggcatcttcagcgatgacgccaagaagaaggtgcagggcgagctggcagaggtggacgcgctaatcgccgcgttccccttccggggcgtgaccgccacagtcgacaccaccgccggcatcccgggccagcctaagccctacgagccgccaaagctggggcgcgatagcaagacgagcggcgccaccgtcgaccgccaggcagaattgctgcggcggtacgccgccgaggcggacatggccgccgccacgatggccggcccgctggccgaggccgagcagaagcacaagcagcgcctggccgagctgaacaaggaactggccgctggcaacatcacgcgcgctgccttcaacatcctggagaaggagtcagcggcgcagctggccaccaccaccgccgagctggacaagcgcaagcgggcgccgcaggctctactcgacaccatgagcggcgagctggacatgatgcgcctcattgggccagcgcgggagcgcgcacgccgtgagatgcagaaccagcgcgacatgcaggaagccatcaacgaggcgaacgcggccggcgcaggcatcaccgccaacctcagtgattcgctcatggcgcaagcgcgcgctgcggctcaggccagcatcgacgcggacaagtatgccgccagcctgcagcagtgggcggatgtggggacgtacctggtcagcgacaccgccgacgctatggccaacttcgtcgcgggcggcctgcgcgattggtccggcatgtgggacgacatgaaggacattgccaggcaggggttgcgcgacattgcacgccagctgctggagcaaaagctggtgctcccgattcagacgcgcatcatggacagcatcaatggactcggcagcggcaacgggttgagtctcaacagcatcctggggatcttcggcggcaacggtactgctgcaggcggccagaacgccgccaacattgcgagcctgttgtcgaagggccagagcgctatcgggttcactcccggcgccgcagccgcggcgggtggcttcggcccgaacaccctaatgggcttcggcaacaacgtggctgcactgacgggaggcggctcggccgctgccggtggggccggcgctgcgggagcagctacgggcgcgctgggagccgtcgcggcctttgcaccctatgcggctctgatcgcgatgggtatgcagatggccggcagcgcctacaaggaaggcttcgggctggagaaccaggacaagtttgacctgctgaaacgtggccacttcgcctccggtggactgctgacgccggtcatgctcgacagcatgtcgctggacgtgatcgggcgcgcgctgggcatgaaccgcaagacggcggcgatcttctcgggcagctcgctgctgggcaaggcgttcgggcgcagtgcgcccaagatcaccggtcagggcatcactggcgattatgggttcggtggactggacggccagagctacgccgacgtgaagcagaagggcggctggttccgctccgacaagaagtggacccaatacggggcactcgaccccggtatcgatcgcacgttcgacatggcggctcggcagattcgcggcgctgccacggacctggccaagcaattgggcattgacatgtcgcagaagctggctggggtcaaggtgagcctgggcaaactgtcgttgtcggcggattcggcggaggcccagcagcagctggagtcttacctcgctggtatgcaggaccgcctctataccgaggcggtcaaggcagcgggcttcggtgggcagctagatggctacttcgactcggcggacgtgttcgcggcgctgggagcatccatcgagctggcggtgggcaatgccgacgagctgggccgggcactcaacggcctggagatcgacaaggtgaacaaggccgtggactacttccaggacctggccggcgttgccggtacggacttggccacgcagatcaacaaggtgtcgggcctgctgggcaactactccaccctgatggccgatgtgtcgacacagctcctgacgggcgacctgaccgcctaccagcagcaggccctgagcatcgagcgcacctaccgccaacaggtgaagtccgccaacgactacgctaaggcgctgggcctgtcgggcgcgcgcgctgaggacctggctaagatcgaggcattgcgcgccaccaacatgggcaagctgcaagcgcagatcgacacggacaagaaagccattagctatggcctatctgtgagcgacctgtcgccgctgaccgatcaggagaagctacagcagaccatgcaggagctggagcgggcagtgtcgggcggggacagcagcgcagcgcaggcggccgcacaggcggcgctgggcttcggtcggaacctctacgccagcggtcaggactacaacagcctgtatggccgggtcaccggcctcatcgatggcatgaaggtcggagatctcaatcagcctgacggaaccagcatgggtgcgctggccgacgccatcgaggcgttgccggacaacttcagccgggccgtgttcgacctggtcgtgaacaacgacgctcagacgcagaccaccgccgccatacagcagagcaacgctctgctcgccgaacagaaccagctgctccgccagctcgtgtctaccactacccagggcgtacgcaacgccagcagttcagcgctgcgcgaagcactcaacgcgaggtaa

SEQ ID NO: 514724 - DNA, 288 bp, Stenotrophomonas maltophilia
atggaagaatcgccgaagcggcagaagaagcccagccgcaaagacgggttcccttggaagagcaccattgccgtcgtggttatcctaggcattgttcttgccgtatttgaaatgggacgagtcgaacgcgcgtaccgcgcgcaagccaaccggcaggcccttgaagccatgcacgctgtgcttcagcaggaagagatcgttggccgtccggctgcggacaccatccctgcaagcgatacagatcaggacgagcacgaagccgtgggctccccgaccgaacggaaatga

SEQ ID NO: 514725 - DNA, 921 bp, Stenotrophomonas maltophilia
atgaatacaggggtggttcatgaaaaattcacaccgtgtacaattcgtgtggacaaggaactggaccgtcaaattatggatctcactactctctgggatggcttgaaaaagtgggtcctggacaacggcgtgttgctcgttgccgctctttccttcttcgtgggcgctgtgacgactgtggtgggatgggggatagttcgtcgctggtccgacatagctctgataaaaaacgagtacaccgtcacggaacttgcggcggcaattcaagctattgccatcaccgcaggcttggcctccatctggctgatgtggcgccagagtagggaaaacaatcggtggaacaagctagtcatttaccaccaacatttcgacgatttgcctagtggagatcttgcccggcaaacgcacgaagtggtgaggcatttcatggctgggctgataccctcaccgccagtgtttatcgcaaatcatccagacttggatcactcggcgaacatgtcgctgactgaagaccagcgcgcaaagctggctgcgtcttactttgtcggcgcaggaactcaaattgatgccacaatctgcgcaaacatcttggcacacccaccgtcggcaagggttgtccgtcagtttcttgacaaattcgagttgctgtgcggggcggtcaactgcggtgttctgaacgatgcctacgcccgtgaacttgagttcacgcgggtttgccgctcctatgcgatgttcgagctgctcatcaaacaagttcgagaggggggcaatacgcaggcgtatgttgaacttgaggctgtcgccgagcgttggcaggaattcaagaaaaagcagtatgataggactaagaagaagagcgagtcactgaaagctcgccagaagaaggttgcaaggtccgtgggcgtaccccgcgagttctga

SEQ ID NO: 514726 - DNA, 408 bp, Stenotrophomonas maltophilia
atgcccgaacgtcttcccgaccatccccgcctgcatgcgctgctgggcgccgccgtgcgcgatcttcccgctgcgttggccgaaacgctggaggacgcgctcggcgagtccgccgagttcgtcacgccatcggctttctttgcacacctggcaggccacggcaggaacctgcgcgctgatggcgaggcctggagtgaaatgtgcctgagccccggccgcgccttcgacatggccttggcgacccgcagcatttcgggcatcacggcgttgacggcggtactgcacgctgcgcatgtggcgcgggagagcgacgatcccgcctgctgtccctccgcagccgtgatcgagggcctgttcaacgcctgccaggtgctgtcactgcaggtggagcgctgcctgattccatga

SEQ ID NO: 514727 - DNA, 756 bp, Stenotrophomonas maltophilia
atgtccggcgccccacagaccggccgcacgatcaacggccacacctataccgatgcgcccgtggacgtgaagctcgggccgaacactttccgcattccggccaactacctggacagccagatcgcaccgtggccgggcgagggcgtgacgctggtcatcgagtggccggacatgacgccgacaccgccgggtgcgcgggcgagtacgcgtacgaatgattttcggaaggagattcccatccggatcaactacgttgatcgcgttcccgttgaaacactgctttcaaggctgtcgtcaaatgaagccatcacggaggagggctctgtggaaagggaggatcccagggaccgtctcgatcaacgcgttgcacagccggagaccttgggcctgacgccctatgcaatcgatgaagcgaagatggtggtgtacgcgaagaagtatgaggcgcggtacggaaagccgcctgtgcgcaatcccgcctacgaaagagactggtacatcgcacgccaggccgacggccggatcagctcattcatcaaatgtgacggcgaggaattccgacgcgacggcgtgcggctggaggggcgcgaggtgatcagtgagcctggggaagtagcagctggctgcgttcattacttcgtggacatcgacaacaagctatccgtcagcctggactacaagagagcgtttctgaaggactggaagcgcatggaagaggccgtcagggacgtcatcgcgcgcacccggtccaagtga

SEQ ID NO: 514728 - DNA, 471 bp, Stenotrophomonas maltophilia
atgagcgagacctttgaaagctccatgcaggaaatactggaatccatgctcagcgtttgtctggagtacagcgatgacagagccaatggggtctatctttattgctccgcagaacaagggctgctcgctgctgatgtcttctacgagatcggtggtggcttctgtgagaagcacttgctgaacaagtccgtttgcacggcagaagcagctgtcttcaatacatccgaggagcagcagtctgcgcttctggattgtcttctgagcgatctcaaacagttgatcgcccttcacgtgcgccaccatcgagagtcacccaccgagcttaaagcccggtatgacgtcgtgcggcacagcctcacggtggactacagctatgccctgaagtactccaaccacgacaccttgatggccaacgacatattcgaagcgtggttcgaagaactaaggtggcagcgaccacgcgcggattga

SEQ ID NO: 514729 - DNA, 1320 bp, Stenotrophomonas maltophilia
atgctagttttcaacgagggcgtgccgcgtgcgggcaagagctatgacgcggtcaagaatcacatcctgcccacgctcaagaaggggcgccgggtatttgcccgcctcaatggcctgcaccacgagcgcatcgccgaatacctgaacatgcccgtggatgaggtccacaagctactgacgctggtggagaccaaggacgtagcaaccacgttcgtctgttccaggcatccggagaccggtcagtggtgcatccccgatgagttcaaagatgcgctggtggtcatcgatgaggtgcatgagttctacgttgcacagcgcaaccagctgccggaagaggtggagaacttcttcgcgctgatcggtcagaacggtggcgacgtgctgatcatgacgcagtggatcaaccgcgtgcatcaggcggtcagggcgcgtatcgagcgcaagaacgttttccagaagctcacggccgtgggcctcaaaacgcgctaccgggtcacgtattaccacaccaccagccccggcaagttcgaggtcattggcggcaagacgatgaaatacgacccggccatctatccgctgtaccacggctatgcggttggcgccgagaatgcagaggtctatgaggaaggtggtaccaacatctggaagcagcttgcccccaagatcgctatcgctgcggtgggccttgtggttggcatctgggcgttcggcggctacttcatcaggatgatgggagacgatgagccggaagctgctgtagaagccccggcaggcgcaaaggcatcgcaggggcagggcgcccacaagcccatcagcaccggcgctgtgccggccgcggccgttcccgttcctgtggccgatccgctggccgggatgaccgtcgaacagcgctacgtggccgcaatgacgcaggcgaatcggattcggctggcctttaccgctcagttcggagagcggtcggtgggcatggtcgagtgggtcgacggctcgggaaacacggtggatcagttgacgttcgacgcgctgatagcgatgggctaccggctcagggttgccgtgtacggagttcgcctcacggcgggttcgtttgagacggttgcaacggcgtggccgagggaagcgccccggcgcgaagaagagccaacgttgtaccgcctggacagtgaccgtgctgccgctgattctgcgagcgtagcgagtggaagcggcggcggcgcgggcgcggtcatggcggcgagcagtggaggcacaatcgtgcgcgtaggagagcgccccatgggcacgttcccggaatccaagccctacccgccgagcttctga

SEQ ID NO: 514730 - DNA, 348 bp, Stenotrophomonas maltophilia
atgatcaacctaatcgcattcgtgacgatgcaagccgggtggctcaatgacctgaccgagtacatccgtaggcaggtggagcggctgtggaccgccattgtcgagttcttccgtgacctcgtgctgtacgcgatcgagcaagtcctggacttggccgcacacgcattggaaaagctgccggtgccggagttcatgaccgagtacaagctcggcaccctgtttgccaacgcggggccgaccatcgcgtggttcgtcaacatcttcaagattcccgagtgcatgaccgtggtgtcgctcgggatcgtgttcttcatcacccggaaaattctgaccttggggaagtggtga

SEQ ID NO: 514731 - DNA, 906 bp, Stenotrophomonas maltophilia
atgtttcagggcatcaccgaagcttgggttgctacgaatcccagcgcgaaggtgaaggacgcctgcacagtcgagcccgagcttggcggaattagtggattcaggggaagcatgtacacgtacatgacgtttcctttccgcaatgcggcgtcgctggtttacgcatatcccgccgcaaagaaatgcaccgcacgccctgaggagtttggctgggagggtggggaaacggcggcgagcgtcaacgcatgtcacaacggctgcatgtacaccagctcactcgacccgaatggaaccgtaggtgtgtcgttcgcaccaacaggtggcacgtgcaccgaaagcgacgcgcctgcacccactccggccggggacggtggtgatcccggtggcagtgatggcggcggtacggatccgggtggcggcgatggcggtggcgacaacggcggaggcgatggcggaggcggcaccgatccgggaggcggtgatggtggcggcggcaccggcccgggcgacggcgatggtggcggcgacgatgggggaggggacggtggtggcggcactggtcccggtccggggccaggtcccggcgacggtgatggcgatggccccggacaaccgggcagcgatggtgatgcgctgtatgagtcggagggtaagaccgtcgagaagctctatgacgacttcgccgaccgggtgagcaaggccccgatcattgacgccaccaagagcttctttgagatcagtgtcagcgcttcctgtccggtgtttacgttcccggccaccccctactgggacgccatgacgttcgatttcctgtgcaagcccgagatcgtcgccattcttcaactgctgggctggctgctgctcgcgttcgccgccttccacgcaatcaagatcgcgctcacatga

SEQ ID NO: 514732 - DNA, 150 bp, Stenotrophomonas maltophilia
atggactatcagatgatcattggcggcctccaggtcggcatggtggttcttgcggtactgggcggctgtgccgtcattgcgcaattgaagttcggcttgtgggcaggcccgaaggtggcacggctgttcctgatgcggggtgtcaaatga

SEQ ID NO: 514733 - DNA, 141 bp, Stenotrophomonas maltophilia
atggatttcgaatcgattctgaccggcctgtcggtcgctgccgcgctgaccgcaatcggtggtggtctggccctgatcgccgtggtcggcttctccctgtggggcggccgcaaggtggcgggtctgttcggtaagtcgtaa

SEQ ID NO: 514734 - DNA, 252 bp, Stenotrophomonas maltophilia
atgagcctctgcgttgctttaggggaaaacggaacgctgatcccaaccggtcagcccgtcgatcagtgcacggggtatgtgctgatgagcagcgcagaggcttcctccgtcgccatgttcgccgaggcgttcaaggtgccggacaaagacgtactcgcgggatgggcgtcggggccgttcattctgatcatgaccttgtatttggctgcgcacattggtggccgtgttgcagctttgttcgacaaatcgtag

SEQ ID NO: 514735 - DNA, 195 bp, Stenotrophomonas maltophilia
gtgcgtaagttcgattggtgggtggttcccttcgtcattttcatggtctgcggggcagggcttggtttctggatcggcaccgcgttcgcggctgactggaatgcggtcatggccgagcgcggcgaaatgcgcaacgcctgcatcgccggtaacgaccgcgcttgccgcatgtacgaggtcgaatatggccgttga

SEQ ID NO: 514736 - DNA, 231 bp, Stenotrophomonas maltophilia
atgacggcccccgtgttggcattcgctctgatgggggcaattgcggccatctccatcggtgctgcccgcatcgtttcgtggctgctcgaccggcgtgatcagaccgcctcgcagcaggcccgcgaagcccaggtcatcgctctcgcgaaggccgagattgccgccaccaagcgcggcgatctgctggccgcagcggcctttgccgaagagcaggaggcccgccgtgcgtaa

SEQ ID NO: 514737 - DNA, 693 bp, Stenotrophomonas maltophilia
atgagcatcctgagcaagtctcgccaaaagcgcttcctccaagtgctttgcaagagcctcggcatcccgagcgacccaagatgccgcttgaaccatgtgctggaagtgatagctctcggtcacatccgcgaccacctcttcagcatgatgggcttggaagttctcaataagcgtagtgagagcgagcatgtttctctccagctcactgatcaagtcgacgccatcttcctcgacgtcaaagagggccagatcgaagtttgcagccttgcagcgcacgtaagctgcctgggcaactgccttagcgtttcccagcgagggcttctcggacgaggcgctcattgcgtctaccttgagcgcgaactcgcggcacgatttagccaacgcgatcattcggcgcgcatttttgcgccggtcaatcagtcgcgcactcttttgctcgcgatcagccctgtcttcgcgcaagttattctggcgagccagcacgcaggctgctgcaccgatgacccaagtgccggctgctgcaacccaatcggctctactgcccggctcagctccgatcagcgtccaagcacatacggcgccagcgacgaaaacacccgaagcgccaagggccagtccctttttggttttccatacgccgttatccatttcccctcccgtagcaccatgtcgaccgtggagattctggcatga

SEQ ID NO: 514738 - DNA, 1860 bp, Stenotrophomonas maltophilia
atgacgtcgggtccaaatcttgattccctttccccgcgcgagcgggtgagctgtgcacatgccgtttggacgcggcgacaggcgctgttcgtgttgccgcagcatgtggacgcgctgctggcctcaaaactctatctagcgccgggaggtcgcatctcgcttcacactgatgcagagggcgaggcgattgatgcgattcaagatgcgctaaacgagctcagtcccgtctcacttttcatgacaattaaggacacggttccggagggtgttttcattccatccgaccgcagtcctgtcgatgaggcgtggtgcgtcgacgagcccatgccgcttgggcaactcaatcagcttttgagtctggtcgacgcaacgctcactgacggaaatttggactggagagaagatcttggtttttgtttcatatcgcccggactgcttagtcgagagcaggttgaacaagtgcgtgatgcggcccgggcgattggcatcgtcgttgacgccttcgttctcgacaactcccccgctgcagtcccagtagggacgttggtcacaaggcggcaggcgaaacaattccccgcatccctccgcgcgagccttgagcaagatgaggcgacgtggcatcgatatgtcgaagggcggtgtgcgaatcagccggaaccattgctcgcgattccggctagtgcatgcctcatcgatggcggcgctcagggcgacgtcaccttaagcgaactgctgtgcctctacgacgttgttaacgtcgtagtgcctaggcaacaaaatgactggttgacttccaatcgcctggtggatggcgacgtagcggagctgtgcggcactggacgcgtccggctggtgctgcctcacgggctacaggaatacccgatcagtctgctggccgacgttgcggagcagttgcccggcgcgctcgtattgtcacgcgagctcgctgtgcggacgatggaatcaaatatgcgtaaggatcctctgacgtacggccgcttgcccagcgaattcaaagcggctctacgaggcgcactgtaccagctgctccccgaagtcgcccccatgctagccggtccgatcaagcgttcgcctatggctagcctcgatttcgcattggcaacttcaggtgcaatggggttgcttgccgttggtcccggcgcccgcctagccgatcaattggagtcgcgcggcacacccggtccgtcgctggagctgatgcttgcgagtgcgggggttgagtgggcccttggcttgggggcagcttgggtcccccgcgtcttggccgactatgacgagacggccgccgcgcgtgccgtaggaagcttctggagccgcagttcgcttgtcggcggcgatctcatggcggaccgaatgcacacagtcgttgatgggcttctggccgtagcggacgttccacccatcgaagtcgcacgttcgctttcacaggctgatcgatcgcgcttcgccacggtggcaaagaaattgttctccgccgacgtcccgcatgaggagctgcgagaggcagtcgatgcgctcaacaggcaaacgaagaacttcgagcgcaagattgaacggctgcgcaggtgggatctgtacgcgctcgccggcggcgtagccgctaagccccttgccgatgcaatcgatgcgggaacaggggtctactatgcgagcgttgccgcaggctggctctacaacttgctcaagcggcggctccctcgctacctgaacaatgagttcgagacgctagccgctacgatggtagggctttgtactgccccatcgatcgatccggtcatcgtgagccgcgcccgggcgcaactttcatcaactcgaccgtctagtgtcaaccctcgttag

SEQ ID NO: 514739 - DNA, 4158 bp, Stenotrophomonas maltophilia
ttgaaccacatctatcgtcgtatctggagtaccgccaagcgctgttggattgttgccagcgaactggcagcaccgcgtgggaagcaagcctgttcgggcgcgcgcaggctgggcactcttgttgctgcctctggcgcgctgctgctggcaggtgcggcccatgctgtggtctataccggttgcagtagcagcgcatcgggattcgtgaactgcctgccattcgctggaaccagctcggacagcatgttcaggccctacgcaacatttggcagcaacaataccaattcgctgatggttggagctggagcgcatttgaatgggaacaactcgttcgggtttggccatggcgcgagagtagaaggaaacaacaatgtagtttttggctatatggcaagaacgtatggtgtggacagcgttgccttcggatacaacgcaagcgccaacggtgggcatgccatcgcattgggcgcaaattcctttaccggggctctgggggccaccgcggtgggcaacgattcttcggcgacccgcgtgaatgccattgcgataggaagcggggcggtctctcagagcgagaattccgtggctctgggggccaactcctgggccaatgagtcgaacaccgtctcggtgggagacagctccctgaggcgccggattgtgaacgtagccgatggacgcctgagcgcgaccagcacagatgcggtcactggaaagcaactctacaagaccaatcaggacgtaggaaacgtcaagtccttggctgatgccgctcagagtacggcaaacaccgcacggaccacggccaacaccgccaagacgactgcggacactgccttggcagcagctacatcaggtggctacgccgtcgccagcggaacgacgatgacatccgccaatcgtgcccaggctgccggcaccaacgcgctggccgctggcgcaggcgccaatgccagtggcggtggtgcagtggcactgggcggtggtgcgaaggtctccacgggggctggtgtatccggcattgccatcggctcgggtgctcaggcagggtccccaggaattaccggggcagttgccattggtggaggtgcctcggcgctgcactacagcactgcgctgggttacggggcctctgcgacggtcagtggctcggttgcacttggcttgcgctccgtcgcatctgaggtcaatacggtttcggtgggtagctcaacacagaagcgacgcgtggtgaacgtggaagatgcccgcctgaacagcgccagttctgatgcggtgaccggccggcagctcaacacgaccaacagcaatgtcagcaccgcgatgagcgatgccagttccgccaagactgcagcgaataccgcgctgacccaggtgggcacgctcaacggactgctgaatcaggtcagtgccagcggcaatgttcgcgtgggtgagaagaacagcggcaccgtactggatgtgcgcaatagcgcgaatgcgaaccggaagctgaccggcgtggccgatggtgtggtcagcgccagtagctacgaggctgtcaacggcgggcagctcaatgccaccaatgacaaggtgacgaaggtggagggggtggccaggtctgcgggcgaagacgctgccgtggcgaagaccgatgcagccaaagcgttgaccgagacggcggcgctgggcgggctggtggcgcaggtttctgcaactggcaatatgcgccttggtgagaagaacagtggtgccacgttggacgtgcgcaacagcgccaatgccaatcggaagatcagtggtgttgcggatggaaccttgagcgccagcagtgccgaagctgtatcgggtcggcagctgcacgcgacgaacagtcgaatctctgatctggagaatgccgatctgtatgtgagtgtgggcactgattcgttcagtgagcgggcagatgcggccttgcttggggtggcaattggagattcagcgaaggccggggctgagggggctacagccctcggtggttttgcgagggcgctgagcaagaactcggtagcagtcggccgtggtgctggggtatctggtggtgcctctgatggctttgcaatgggggcgggtgcccaggtgcatgcaatcagtggcgtcgcaatcggagcgggtgctgttgtcgaagactcagctgttggctctttggcgttgggtgcggactccggtgcagacgaggccggaatcgcctcttttggcaatgccacaactcaacgtcgactcactaacgtcgcccgaggcaccgccgaccacaacgccaccaccgtctctcagctcaaggattcgctcgccaccctcggcggcagtgcgggtatggacgccagcggcaacatcgtcgcgccgacctacgcagtgcagggcggaacgcagaacaccgtcgagggcgcgctgatggcacttgatggcgctgtgatcaccgcaggtcgtcgcgcggacaaggtggaaggccagctgagttcgatcttccaggaatcaccctcggctcgtgccgacggcatgaaccagatcgcgctgaatggcgtgaatggcatggtgctgaccaacctggctgacgggcgtgtggcgccaggaagccgtgatgccgtaaccggcaatcagttgtacgccgccgagcagaagatttcgcagaatcggaatgatctggagacgatgcgcaaggagcgggagatgggcgagcaggcaatgcgtggattggatgcgagcggcccgatcgatttcggcggtgcgcgtttgactggcgtggccgacggctcaattactgcggatagcaatgacgcgatcaccggtcgtcagctctttggcgtcagcgatagggtatccaagattgagtcgcagggtcgtttcctgaaaatcaacacagatgagctgagcgaagatgcctttgctggcttcttgggcgtggcaatcggtgattctgcaacgactggggtcgatgggggcacagcgttgggagcttattctgctgcgcttggcatcaattcagtggcgcttggaagaggctcatatgttgaagaaggcgcagttggcggatttgcggtgggcgcgggctctcaggtcagtgcacagcacggaatcgctattggctctggtgcaaagctggaagctggtgcggattggtcgttagcactcggtgcgggatctcaggccaccgaggcgaacacggtatcgtttggtagtgcgagcgtcggacgccggctggtgaacatcgccaacggcactgccgaccacgacgccgcaaccatcggccaactgcgcggcgcactctccgccctcggcagcgaggtcgatgccaacggcaacatcgttggccccagcttcaacgtgcagggccagtcccaatccacggtcaatgctgcattggaagcgctcgatggcgcagtcgtcagcaccacctcgcgcgtgaaccaggtcgaatcccaactccgctccgtgttccaggaaaccccctcggtccgcgcagacggcaccccccagctcaccctggccggcgccaacggcatggtcatctccaacgtggccaacggcctgatcgcggccggcagccgcgatgcggtcaacggcggccagctgcattcgatgcagcagcagctcaatggccgcatggatgggctggagcagcgcatcgacgatcagccgcaggcccgcgccatggcggctgcgtccacgccgtcgccttccactgaagagatcgcgccgacgccggagaccggcggctcgccgcagatcgcctctaccggtgaaggtgacaagccggccccgcagccaaagtcgaagcagggcgacacgcccaagccgcaggtcgacaccgccgacctggagaagatgctggcccgtgccaacgagtacaccgacggtgcgatcagcactttcgagcgtcgcctggacaagatggacaagcgcttcaatcgcatggcggcgatgagcagcgcgcagagcgcgatggcgatgaacaccgccggcctggccacgtacaaccgcctgggtgcgggcgtgggttacagcgagggcgagtcggcgatggccgtgggctaccagcgcgtgctcaacgagaagggctcggccaccttcagcctcaatggggcgttcaccaacagcggtgagcgcagcatgggcgtcggcgtgggcatcggctggtaa

SEQ ID NO: 514740 - DNA, 483 bp, Stenotrophomonas maltophilia
atggcaaccaagaaagctgcgaagaaaaagcccgccgccaagaaagcggtgaagaaggtcgcgaagaaggccgctgccaagaaggcagtgaagaaggtcgcgaagaaggcgactgccaagaaggcggtgaagaaggctgcgaagaaggtcgccaagaaggccactgcgaagaaggcagtgaagaaggcggcgaagaaggtcgccaagaagtccactgccaagaaggtagccaagaaggccaccaagaagactgccaagaaggcaacggcccgcaagccggccaagaaggtcgcgaagaaggcaactgccaagaaggccgtcaagaagaccgccaagaaggcagtgaagaagaccgcgaagaaggccaccaagaaggctgccccgaagaaggcagcgaagaaggttgccaagcgcaagccggccgcccgcaagaagaaggccgctccggtcgctctgccggcaaccccggcaccgctgatctaa

SEQ ID NO: 514741 - DNA, 645 bp, Stenotrophomonas maltophilia
atggattcgtcaaagcctaatcagcctgtgcccggcgagttctatctgctcatgcctgacacgacccgaaggggaagagggcatggcgttgagatcgagaacgaggacgcactgctgacgcctcccaggctgatcatccgccccgaagaaggcggtttccctcatctggcgcagagaccgcgcctggttctcgatccaaagctgggggatccaccgcaggacctcgaaggaggaatgagtggctactggttggtatcagagcgcctcaagaaggcattcaccgaaatagatcccgttgcctttgagttcgtggagtgtgactacgtgcttccggacggcacagagggcccaacgtactacctgtgcgaggttgctcgcgaactggatgccgtcgacgaggaagcgtcgaagttccgggtcatcgttgatgagggctatccgggcggaaagttctacgaccttcgtggcggagcaagcctggcattcaagagggatgtaatcgcggacagtcacgtcttccgcactccatattctggtgaccttgtctactgtgaccgcatgttccgagatgccatacgggctgctggaatcggaagtgacggtgaaacacgcggccttaggttcaaggacgcattcgatatctga

SEQ ID NO: 514742 - DNA, 447 bp, Stenotrophomonas maltophilia
atgacgtctctgacgtacgccgttctctacgtggcagtgcttttaggtactgcgctgacccaccgctatctgcccaaaggtgagctggagctgaggacctatcccaaggtctctgccactgatttcgcagtgatgcgcgaggacgctttgcgtctagccgcaggaagtgcggaggtggatgtgggactttctaggaacagctacttcgagttcaactgtcgtagggagcccactctattggtggataactcctcgtcgcagtggctcattattggtctcacaagtcgggcccacgagacactttgcgctcagacccttctcctccgctggagcagccgcctcgtgccagaccagtgcgtcggtccaagcggaagaaagtgctgctcggcgagctccaaccgctacttcgaccggaatcaaccaatcaggtttggtcctcgtttctga

SEQ ID NO: 514743 - DNA, 168 bp, Stenotrophomonas maltophilia
atgagtacgtccacgctctccacgccaacgcccgacaagggttcctccgcgatgccgcgcattgccgtggtgattccctgctaccccgtgcggacgcatgtcgtgcaggtcattgccggcatcggcgccgaagtgggctggatcatcgccgtggcagcggcgcgatga

SEQ ID NO: 514744 - DNA, 513 bp, Stenotrophomonas maltophilia
atggtggccggcatgctggaagcaaaacacaccgctctgctcaaggaagctgcgcgccgcggcgaggtaaacctgccccagctgcgcctgtgcttccaactgctgtcactgtctgccgccatcgaccacgactgcgccgcacggctggcaccgcatggcctcagcgaaggccgcttcatcgtgttgttcctgctgcacggggccggtggctcgctgccgccgcatgagctggccgagcgtgccggcgtgacccgcgccaccatcagtggcctgctcgacggcctgcagcgcgaaggcctgctgcagcgccacagcgatgccgaagatggccgccgcctgcggatcgtgttgaccgcacaggggacacgcctcgccgaggcgctgttcgagcagcacacgcagtggatcgggggcctgttcaacgggttggaggccgacgaacagcagcagctctcacggttgctgcacaaggtctggcggcacaccgatgccgggcgggaatccgctgcatga

SEQ ID NO: 514745 - DNA, 264 bp, Stenotrophomonas maltophilia
gtgctgcagagcaaccagctgccgatgcgcggccgcagcgcgatcgaggccgtgtatgccggccggggtggcagtccgttgcggctgcgtgcgttgccgtattcgatggagggcagcacgggctacatcattggtgcgtacagctacggcagcaacgtgagggataccggcaagttcacgctcatgctgaagcgcgagggggatgggccgtggttgattttatcggacatggacaacagcaacgcgcggccgcgcgcgcggtga

SEQ ID NO: 514746 - DNA, 3288 bp, Stenotrophomonas maltophilia
atgattgcgatggatgcgattgtggatgcggtgagtgtgaccattcctgctgtcactgtgatcacgaaggaggcgtggttcgagaaagtagtgatggcacgaaataaattttcaatcgaggcagatgtctacgtttgcgctcaacgaaacgataaagtcacatcagtcaggcttgagcatggggaattttctgttgttgtctgtctagttagggaatatagatcttcgggggctttgcatgagattcatgcaccaggcgctgtgatcataggccgtgaactaatccttggagatgatgcggagtggatgtcccatcctgcgctaatcgaagtcgaaggaatctcatacgctagggccgtgattcgtagttggcgggatagcctgaggtttcgaaaggaagctgtaaacgacgtcggtgaggtgactgagcggggctttcggcttcctcagctaggcgcattgcatgcaattgcagcacattggagcgtaaagacctcgcacgcgaaggtagtgctacctactggaacagggaagacagatgtcatgattgccgcatctctgatgaaaccggcgaataggacgttacttctggttcccagtgatgcgctgagatcacaggtttcatcgagattctccaatctgggcatcctgagattaatagatgcagtacctgactcagttttgaatcccgtggtgggaagagttacaaagacaccgtcgtctctttgtgacctttcaattctgcattctgctaatgttgtggtgtcgactacgcagatgctgcttggcgcttccgatgatgatctccgagagtttctctcattgtttgaccttgctctcttcgatgaggcgcaccatctgccctccgcgtcatggactcggatctctaagttgtttgggagtgacactcggatattatcagtcaccgccacgccttacagaaatgaccggcgtagagtgcctggagagatgatctatcaatttccacttagaatggctcagcaattgggatactttacgagcatgtcagtcgtaaaggtcgatgaacgtgatcctgattctgcagacaccgcaattgcggttgcggccgtggatgcacttaggcgggatgaagtgcaacgggggttcaggcatttgataatggcgcgagcccgtacgagagagcatgcggaggctcttttctcgctctactccagtcgctactcagaactagagccggtgcttcttcactacagaataggtgctgcagatcggaagcgcgcgattgaaggaataactgctctaaggcaccgggttatagtctgcgttgatatgctcggggaggggattgacataccatccctgaaaattgccgcgcttcatgattctcacaagagtcttccggtgacgctccagttcattggtcgctttactcggtcgtcgacctcgactggtggcgcaacagttgtggttaatatcgcagacccgatggtagactcggccgtggctgaattattcgcggaggatgcagattggaatgaaatagtccccgaactcagcgcaaaggctgtagggggggaggaggcttctgcggcgtttatcgcaatgatgcaatccttggtaaatccagaggaaaagaagtttgatctgagtctgatatctgctaaggcgaatgtaacgttctatacggctcagcggtttgatgtggggagagtggaaagcgcattgccaaaaacttcccgacttcaccaaagttggttgagtgaagatcgtactctgatggttatgattacccaggatctaaaatatccaggttggtcaagctcgcgggatgcgatgagctttgattggaacctgacaatcattgctttcaatgaagatagccatttgatctccatgaatactacgtacggtgcatcaaggtcttcaaatatcgctcgcgcggttggcggctcggactcggctttgataagtggcgagagaatgtttagggtcttcgatggtctacatcgatcagtactatataatgttggactttacagaagagggcagctccgctttcaaatgctagccggaaaggacatcggtgagcacgtgtcgaccgcgatacaggcaggtagcacaaaatccaatctattcgctatcggttacgaagaaggttctaaggtgaacatcggtgcctctttcaagggccgtgtgtggtccatggggtcgctttccattgaggagtggaaatcgtggtgttttggtgttgccaggaagataagagacgagtccattgcaaccgacagcttcttgcgatttaccttaattcctcgcgaaataactgtcacacctgatacgccggtatttgcttgcattctgcctgatgagcttctcgttgacctgaacgattctggtcgacgcatatctgttgatggttgctcggaggcgtacaatcagctggacctttcatttggccgggtgatgaggtccgattctgagattcgagtggaagtgtttctgggtcaagatcatgtgtctgaggttgggctccagtggggttcctcattctgtgtattacatcgatcgggcgctcgcttctttatttcgtctgatggggatgttgttccattggaagagtttcttaccgctcatccgccagccttgcttcttcgagatggatcagaggtgttagggaagtatcacttcaaatatccagaacatttgccctacaccttcagtcccgaaagcatactttcgcttgactggacgggtgttccaataacgatcgaatcaaagtggaggaacggcgagctgcgttccacttcagtgcaagggcatatgatctcgttgctaatcgggcaagccaacacgatcgtcttcgatgatgatgatacaggcgaggcggctgatatcatcgtcattacggagaaccaagaaggactcgaggtcgagctcgccctctatcactgtaagtatgcttctggacgagagccgggcgcgagggtcaaggatctctacgaagtttgtggtcaagcggtcaaaagttcgcgcttgctacaacgtccggaaatgctgttgaatcacatgatacgtcgtgaacgtcgactcggtggtcggcggacgcgattcgaaaaaggtgctatgtcagacctgtattccattcttcgtaagctctccaagtaccgtattaagatgagcatatgtgtggttcaacctgggcttgcggcatctgcgcttacaccggagctctctagcatactggcttcagccgatggttttatcttcgagttcacgggtcgaagactcagggtgtacgggagctag

SEQ ID NO: 514747 - DNA, 276 bp, Stenotrophomonas maltophilia
atgaacgacgcggtgacggccgggccgatggtggtgggtctcctggtgctggtggcaggcctggtgtcgatcaacctgctggtggggatcgttctgtggtggcgccactcaggcctggccgaccgcgtcacaaaactggaggtgcactaccagcaccacctttcccgccaagaagtccagcgagtgttcgagcgcctggcgacgctggaggttcagctcgaagccacgaacgaaatgctgatgaccgtccaaacccatctgttggagaacgattga

SEQ ID NO: 514748 - DNA, 402 bp, Stenotrophomonas maltophilia
atgctcgatcatcttggtttgaccagcgccgacctggcgcgcagcaaggccttcttcctgcaggcactggcgccactgcagatcggcgtggtgatggaggtgagcgccgaactgaccggcgaccacgaccacgtcggcttcggcagcgacggcaagccgttcttctggctcggcaatggcggcaccgccagccacggcgtgcacgtggccttcgcctgcgccagccgcgcgcaggtggacgccttccacgccgccgccctcaccgccggtggccgcgacaacggcgcgccgggcctgcgcccgtggtaccacccggattactacgccgccttcgtgctcgacccggacggcaacaacatcgaagtggtctgccatcgccccgtcggcgaggtggctgcatga

SEQ ID NO: 514749 - DNA, 801 bp, Stenotrophomonas maltophilia
atgaagctgctgagcgcattgctgtggtcgtcactgctggccacgatggccccgtctgcgtgggcgcaggccaatacgattccctcgcagccgcacctgctggtgaagggcagtgccacccgcaccgtcatgccggaccgcttcaccgtgaaggtggcgctggcgtcggtcgacatgcagaccagcgttgcccgccagcgcgtgcagggaaataccgaacgggtgctgcagctcttcgagaagcatggcgccctcaaggacagcgtgcgtgcggacaacctgagcatcacgccatcgacgcgttaccgcgatgatgaagaagtgttcaacggaatcgaggcaagccgcagcctgacggcatcgtttgccagtgccgaagcactgaaggacttcctgggtgatctgaaggccagtcgcgaagtgcaggtgagcacggccgtgcccacctatgccaacgcggcgcgtctgcgcgccgaactgaaggccgaggccgctgccgagacccgcgcatcggcgaaggggctggccggtgcttatggcgcgaagatcaccggcctctacagcatctccgatgtggcccccagtttcgcctacggcgtgcaggcaggcagttggccgactgcaagccgggccgcaggcgcagacggctatgcagacggcgatagcaccgccctggagcggattcaggtcactggcggccgcgcggcgccggcgccggctgctggcgaactgctggtggccgcgcccatcacctacaccgaaaacgtgtacgccattttcctgataagcgacggaacctga

SEQ ID NO: 514750 - DNA, 273 bp, Stenotrophomonas maltophilia
atgacgttctactgctggcacgacatgctggtgcgccagctgcgcctgagcctggtgtcatccgagcacggtcgtctgccatttggctgtcacctcattgaaacgacggatatccgcagtgttgtacaggccatcgtggtcgacgattggaacaactctcgatacatgtgcgttgaagaggaccatgccgatgacgaaatcgacgccgacacagaggagccgatgtacacggaagaacgtcccctcagggttgggatcgttgcgcttggctga

SEQ ID NO: 514751 - DNA, 255 bp, Stenotrophomonas maltophilia
atggcctgcgatctgcgcagaccggtgcgcggcaaccctgtgaaggaaggcaaccacctgttcgacatccaaagtcacttccgctggcggagagaatgcgcagagatttccgcgcgcctcagcgttgatgtgctccagatccatcaccagcgcatcttctgttgcaaactgaaaccacgattcaagcaggtcggcgacatcattcttcatctgcgcacattagtgcgcctgtgccagtcccgacagggcgattaa

SEQ ID NO: 514752 - DNA, 1257 bp, Stenotrophomonas maltophilia
atggcgttctggcgcgagaccctcgaaaagatggccagcgccgatccagtagaaagcatcggcctgcttcctgagcattttctgctcaagcagcaggaggcgcatgcgaagagggaggcgacaggtcgttcggttggactgtcactgtctaaggccatcgaaaaccacctgacggatttgaccaacgcgaagttgcagccaaagacggttctggagagccgtcacacgttgcggttgtttgctggcgtggtaggggaagatctgcctgtgtccgagctttcgcaagatcacgtgcgcgagttcttcagcgcaattcgatggtggccttcgaatgcatccaagcggcctgcttaccgaggaatgccggtgctggaggtgatggccctggcaaagaccaacgatgagcccgagccggccgcctggaccatcaaaaagcaccgccagcgtctgtcggtgttctttatctccttggtcgaggccaagcgagtggaggtcaatccattggcaggcgttcgagcggtggcgaccccggacgaagaagacaggggatctcccttcaccgacagcgagttgggcgccatttttggaagcgcgtttgttccctgggcgtcgaagtatccgcatcggtggtttggtccgatgctcgggctctacagcggtgcacgggtcaacgaagtggctcagttgcaagtggatgacatcgcaacggtcgatggcgttcccggattctacgtccgggtggtggccaggggccaacggatcaagggcaagcattcgcgccgttttattcccttggcgcaacccgtgctggaggccgggttcctggactacgtgcaggaggccaaggccgcaggccatgtgcagttgttccccaatctcccgaacagcaccggtctgggatttggcaggcagctgtcgcgccagttctccacctacatcaagcggcaaggcgtcgaggaaaaggggcagggctttcacggttttcgccacaccttggccgatcgccttgacgccgcgggtgcgtcggcagcggccataggcgcggtcaccggccatgctgcggggcagacggttttggagaagcactacattcaccgctccactctgccggaccgcgtggcgacgttgggcaagttctcgccgccggttgtgttgccgcgctatcaaccggggcagtttgacttggcgttgcgctcggccgagcagaagctgcgggaagttggtcggcgtggaggaaagaaaaaggcccccagctga

SEQ ID NO: 514753 - DNA, 237 bp, Stenotrophomonas maltophilia
atgagcagtgaagagcagagagagcaagtcgtccactacgttcttggcaacactttccctcccctcaaagacgtagcacgcagcgacataacgttcctcgacggcacccgtcgttacaacgcggacagccgcttgtggggatggaacttccaagcgaacggaaaagaatacattgccctcatcgattgcgacggcagcgttgagctctccatagcaaaggaagccctttctccgtag

SEQ ID NO: 514754 - DNA, 894 bp, Stenotrophomonas maltophilia
gtgtcaaacattcctacccttccgaccgttcccgtgtttgcgcccccgcagccagacccttattacggctttggcggcatccaatacgagatcgccttaagctccccaattttgcaggaaggcactcccccgcccatcatcatccgagcacacttcgccaactccgatggaatctgggcaaccgaaggcacggatcagttgaacgagctctgcaaggtgatgagcaaccggccgggagacttcgtgcgggcgcagattttccgctacggtgcctactgtggatggcttggcgaaaacagagaatgggcattgcctggctctactcccacgtcgcagaacggcgttcccctccttgatcccgttcaggcgtgggtagaggacgggatgcgctggcctccggcttggcgcggcaacctctttgacacgcaatttcttgccgtccaaggcgtagcgcactggatcttcggtaagggggagccaatgaccgtgtctcttgagaaccttggcctgttcaatcaagtcacggatttctcaccgatcatggatatcctgcgtgatcacagcaagggcgacggaacttatcaattcagtgaggcgccctttatatacaacacctttgaccacgtcacgaacaatgtccatgcagcaggcttgattggtcgggtttcaggaacactaacgggaacgctgaccatcaacggcgggtcctacacgttcgatggaaactacggcctcaacccagatacctacgacgcaaacccagcaaatcgcccgcattaccaggaagcactcacctcgttcctgcaagccatcagcaatgtgattggcacgaccaactatcagatcaacttcacgggtcgcaataccgtgcacttccaaggcatccgaccgtga

SEQ ID NO: 514755 - DNA, 384 bp, Stenotrophomonas maltophilia
atgaagaaccagaagggcttcacccttatcgaactgatgatcgttgttgcgatcattgcgatcctggccgccatcgcgctgccgcagtaccgcaactataccgccaaggcgaagatcacccaggctgttgcaagcgtcgccggtgaaaagatcaaggttgctgagaaccatgcggcggaagttgccgacgtctgcaccggggttgccacctcggctcagtgcgcggacggtacgctgaccggtacctccaatgacgggaccgcagttatcagtttggtgccggatttcggtgatggtaccgacaacgtgatctgggcttgttccgtgacgacttcgagtgtcaccggttatcagggtgatgcatgcgataacttggctccgtaa

SEQ ID NO: 514756 - DNA, 585 bp, Stenotrophomonas maltophilia
atgtccgacgtctggcgaaccctctccgccctcggcgacagccgctggctgctgccgatggccctggtgctgctgatcaccctgccccgcccagacgcacgcctgaaatggcgatggttgctggccatcgccgtcaccgccggcatcacgcttgcctcaaagctggccttcatggggtgggggattggcatcaagagcgcgcacttcaccggtttctctgggcacgccgcgatgtcgagtgtcatctatccggtcgttggcgcgctgctcgcggggaccggcaagcgcccccggacgatcggcctggtcatcggcgcgctgctggccgccgccattgcctggtcacgaatcccgctgcatgcgcacagcctttcggaggtcgttgccgggctggcacttgggctgggcagcggcgcatgggcactttccactacaactccgcgcgagcaccccagcgcgaggatcctggcctctgctgtgctcatcggcctcatccttccactctgccttccagatctacgcacacatcagctcgtcacagcgcttgccgaagccttggagggccacatcgggaccagccactga

SEQ ID NO: 514757 - DNA, 879 bp, Stenotrophomonas maltophilia
atgaatgactcgacctggaaacggttgctccacgcgggcgccatcgccaccccgatgctggtcacgatgctgacggcgttccacgtgtcggcggcacctgcctgtgcgttcgatatgccgatcgtcgatccgcagccgatcccgacgcctcagccgggaacgcgctggacctactcggcgggggccttgcatccacccctcacattgcagctgcaggcggtggaaccgcagcagctggcgctagggatcgccggcacctccgtgcggcgtgaatggcgcgggacctatgcagatgtgaatccgctacgaaaaggcgagaaggttctgctgcgctttccgttatccgtcggagcgcagtggcaggatgccttcgaagagccgggcgagatccgcgcgccctttggtcgatatcgctatgactatcaagagtggggcagcagccgcgtggtggcaatcgaaacgatccggactgcgctgggtgacgtaaatgcctaccggatcgagcgcgatgcgcactggcgcaagtcaaaaccgcattcggatgacatgaaggggatgcgcctggcagtcgatggcgtggtggaaggtctggaacgtagcatcagctggtatgcacccagcgttggccgggtggtgctgcggcggagcatcacggctcatcctggctatgccgcctatctgtctgccgataacgacagccccaacctgattgtgaccgagctgattggcttcgggcagaccgacggctgccgggtggaggcatctcccacgcaggcgcgcgccccccgggatgtactgcctctgcactacggccccatgttcaacgacacctgggaattccggatggtgcgtgatccgcatgtgcccgcggaccgttag

SEQ ID NO: 514758 - DNA, 663 bp, Stenotrophomonas maltophilia
atgaacggacctgtcgaagtttttgacgccatagagcattcagtcgcgaatggtcagggattgtgtgctgctagtctaagtgcgctttcgctgagtgatgcggttgtccaagttcaccctttgggatttcttgctctgatatggaggatcgatcaatatagggtggttcggttgcactattggaaaaaatccttcgactggcatcagtcagatggtttggatatccatgatcacgtattttcgtttatcagcgttctcctgtttgggcgggttgttaacaaggaatatgatatcgttcctggcgccattggggctgagtgtatttatcgaacggagtatttcgcgggggggtcgaagctcgttcgcggaagcgcaaatgtgtcccttcgcttggttgcagagcagagatactctgctccggatgtatacgcgatgaaatcggggatactgcatcgaactgagctcaactccgaggaggcggtaaccctactcgctgtcagatacatatcttataacagagatggtgctcgagtagttggtcctgatatggggcgacagatagatttttcacgggaggtggctagctttaaaaagcgcgaagagctattgatgcagcttaaacttctgttgactaattgtggatttgcgatccctcgcgattaa

SEQ ID NO: 514759 - DNA, 1035 bp, Stenotrophomonas maltophilia
ttgcacttttcgagaaatgctggatgctcaatatatttcggggtctatatgtcgtttgatgatgggctgccagtcgggcttcggcgtacgctgtatgttgcgttttgcatactgatactggtgctcgtgctgactttattttctcagtacttgaagggtgcggaatttccgttttccggcctcgtatctgcggtaaatgagaatgtaatcgccggtttaattgctgcatttggtcttgcggttctatatcgagcggttggtcaatgggttgatcctcgtgatcgagtattagaggtcaattctgatgcgatcactaatcggctgttgaggaatgcgagtaaaacgcgcagctacacctttgttgggaatactgctacttttgttgcatcttcaataataccgctgctttgtgctgtttccagaaaaacaggtcgctcccagataataaggatttttgtcattaacccgttgatggacgaagttgttgacgcgtacgttctcggaaaaggccgtgagatggtggcggggtctcgaggtgtgagcgaagagactgcgtcatgggttaggcctctccctagccctaaggtgagcgagacgcctgtcattgcaaaagcaaagatagtttcttgtatatatttatgtgcatatgctgccaagcattctggtattagtgttgagctttatttgaggagtgcgtttaccccctttcgggccgatatcacggatcgagaggtgattcttacgcaggaatccgcttccgagccagcggtggctttttcggcggaaggtgttttttatggatggtatcagaaagaagttgaatccctagttggtcaatgcttaagagttgatcttatggggaatagggatatagcgagcgttgtcgtggctcatccaacatctgatgcaaaaattgtcaaaggggcgctcgagaagttgcttgaaagaatttttccggggcgcacattctcttctgaagtgattgatgaggctgtaaaaaaaatcacattccccagtcactcttaccagcgatga

SEQ ID NO: 514760 - DNA, 705 bp, Stenotrophomonas maltophilia
atggcaaggcggccggaacgccgcaggagttcgaggtcaagtaagtccagccgactctctcccggcagggctcacgatggacgcagccgcgaggctgcgtccttttttattgggcgatgtccgctttggggcctagcgggatacgctgaacggaccacggacaggtcgggggacaggatgctcagctggattgcgctcacactcgcaatgggacctgcgaatctctggagctacagttgcgaccacttcctatacggtgcctgtgtgcgcgtgccggcaggcatgtctgtgacctacgaggcacctgttgactctggtctgcaccttatcaggcacgatagtaaggaagtcgccctgatctacgagggcgatgcccccgaaaagcctgcaggaagcacgccggatctgcgcttcacggacggcggatatgtcgtgtcggggtatgcaagggcggaaggaccttccacccggtacgacgtctacgttcgacccggatcatctggcgccggctcgctgcacatccgaggctctgcagcgacagcagatgaactcgccagcctggccgccgtcgttgggggattccgaatctgcaacttccagcaaagcaagcgctcgcagacattgatctgtccaaggcgtgccgagtgggggcagcgattatcggagtgggtcatgcgtgcctccacgagcgggaactcgaactag

SEQ ID NO: 514761 - DNA, 165 bp, Stenotrophomonas maltophilia
atgccaacgcccgccctgccctcgctccccgagatcccgaccgcacggctgcgtccacctcacgcggatgacacgacgcccaggtcgcgctgcttctcactgccgggcgtggccaagcgcggctgcaccctggaccgcgtggggacacccgtgccttctggatga

SEQ ID NO: 514762 - DNA, 735 bp, Stenotrophomonas maltophilia
atgttggccaaccaccgctgcatccaccgcttcctcgcgcgcctgtgcatattcacgcaccgacaggcgcagcagcgggtggaagaagaacaggtgctgggccagtgcaggcagcaggccccattgcaggtcacgccgctgcaggtgctgcagttcgtgggtcagggccaggtccagcgcatcgccctgcagggcattgtcgccggccggcagcagcagcaccgggcggaacggcccgaccagctgcggtgcgtccacctgcgtgctcatccacaaccgcggcgcaggacgcacgccgtgcgcatcggaggccagctgcagcgcctgtaccagcgcctcgtcctcgcagggataggccgcagccagcagtgcgcggcagcggcgccactcacccaaggtgcgcagcgccatcagcagcacgccggatgcccacagcgcagccagtgcaacggcccaccacgccactgccggcacgtccgctgcaggcatcggcatcgcggccagcaactgtgccgaggcctccggggccagcgggtagaccatgtcagcggccacgtcggttgcggtcatcgccaccgcctgcggggccggcagccagggcaactgcaacggctggctccagaacaggccgagcacggcctgcaacgagaccagccaccacaggcggcagcgggtggccgccgacagcgacggcagcacgcggcacaggccgtacaccagcgccaccagcagtag

SEQ ID NO: 514763 - DNA, 771 bp, Stenotrophomonas maltophilia
atgctggcgcgccacatgcgggtcctcgaagaagatcgcacgctggcaacgcccctccagtacccggtcggcaatctgcgcatcaccgcccatcgggccgctctggtagcgcgtcacccacggcgtatcacgcggccagccccggctccaggccagttcgttcaaacgctggccggtggtgccggtcgccacccgctcgccgaaccgggccagcacaccgaaatgctcatcggcgaaggccagcatcgccggcttcatcgcatcatgcgcgatcagtgccagcgtctggctttcgaacgcatgcaggtcgtcagcgccgcggtctgccggcagcccggcgtggacgcgctccacttcgacccagtcgcgtgcggtggccacggtcgaaatgaacggcttgccgtgaatcacgcactgccgtttcagcgccgtggcttctggaaacaccgaggatgggtcgaccggatcgatcaggtagatcgcgccatccagtgtccgatccggacccatgccgacgacttcggcgaccagcttcatcaggccgccctcgcgtccgtacgggtaacggtgcaggcccgcgtacccggtcaggaagccctgtcgttcgatcgcgtcatgggtgcgaccgaccgcatgcagcgacacgcccagctcgcgcaggccgggctcgctgctgcgcagccaacggaacagcgcggcgcgcgcgtcgtggtgatgaagacggttggcagccaggccgatgcgcatcgaacgctccgcagttacgggtga

SEQ ID NO: 514764 - DNA, 846 bp, Stenotrophomonas maltophilia
gtgtatgagccgtatggggcggtggtgaatcggccgttgaaggatgggccgggatatacggggcatgtgacggactcggggaccgggctgagttatatgcagcagcggtactatgattcgacgacttcatcgttcctgagcgttgatccggtttcggctttccagagctcggtgaatgcttttggccggtatcggtatgcaaatgcaaacccatatagcctaatcgacccggatggacggcgagcgtgcgggaaggactgggactgcagaatgaccgagcatgcaggcggaaaaagtctatctcgcgggcagctggcggcaatcaagagggatccgcaagcgtacattgacagggcgaacagtattcccaaccgacaaagttcggaggcgggatctgccagatatttttcggaagttgcccggcctgtcacgattgcgaccaatttggaagtaggggctgatatcgcgcaactttctgatcagtcttacacagcagtcaattttgctttgggcgatgcgactgcgggcgctggagcaggtagcgtcgttcaagggcaaaacaactacgcaggcccaggtgtcagggtagccattgctcatacacacccagtgaatacagcgttcagctactggaagggatcctgtttctgcggtggtcgatgggaggggagtctctatcgaggtgatctggagagagcaagatctgcaggtgttaacagctatgtggccactcctagcggttccgtcatgggattcgacttcaggggtatgaatggagcggtcaatgctagaacgaaccctggcgcgtacatcgcggccgaagactacttctttaaggtgaaatga

SEQ ID NO: 514765 - DNA, 492 bp, Stenotrophomonas maltophilia
atgaatcgcgcacgcctacgccttggccgccattcccggatcgggcaatcctacatcctgaccaccgtcacccagggccgtcgacactacttcgacgacgccactgcggcgcaggtggtgatggaggtgatccgtcgtcttgatgctgacggtctgacgcactcgattgcctatgtggtcatgccggatcatgtccattggcttgtggagctccgcgcgttctcgctggactacgtcatgcaacgcttcaaatcgagcagtgcattgcggaccaaccgcatgctgggtagatcagggcgattctggcaatcgagctatcacgatcacgccattcgttccgatgaatcgctgttccggcacgcgatgtacatcgtcgccaacccgatccgggcgaacttggcgagctgtcttggggagtacccgcatgcgtggtgccgatgggagattgatgggcagttcaatgcagaggaacagcctggatcggagagatag

SEQ ID NO: 514766 - DNA, 393 bp, Stenotrophomonas maltophilia
atgaccattctcctacagattgaaggcgccgccatcaatgacatcgccagcctgtacgcggagatcaaccgtgtgttcatggccggcgaagactggcagctggcgcccagcctggatgggttggatgacctgctgtacggcgggtacggcgccctggccggacggtccacccgcaccatcatctggcgcgatatcgaacacagccgcgcagcattgggcgtggctgccacacgcagctggatgcaggccaaactggcccatcccggtgcattcaacaccgcagccatcgagcagcagctggcggcattggagtgcggtgaggggcagacctacttcgagatcgtaatggagatcttcgcagcccatccggacatcaccctggtgcagacctga

SEQ ID NO: 514767 - DNA, 720 bp, Stenotrophomonas maltophilia
atgaagcagccgccctcgacccggctggtgttctccgtggtgctgctggtgctggccggcgttgccgtggcaggggatgcgctgcagacgctgggcgaaacgctgggccattcggtgcaggccgatcggttgccgccattcgtttcgtcgcaggctccgcgcgaacagcccgcatcgcttgcgcccggcgtcactgtggctgccggaccccagcctgcgccgattcccgcgcgcagcaatcgcctgttcgatgccgaccatctgctggcggctcgccaggcactcgaagaactgccggcactggccgggcatcgattgacggtgttccacagcatccacttctacgatgacggccgcatcaacctggacctggtcgatccgcagcacccctcgcgcgtggacagctaccacttcgagcgcgggcagtggcgcaggggcgacccggtcgatccgcaacgcttcgccccgaccatcaccctgcgccgcagcagcacggcgctggccaacatcgatttcgaggcggtgccacgcgtcgcccaggcgctgcaggcacagcgcaacgccttgatgggcacaccgggtgaagtcggtcacgtctatgtgatcgtgcgcaaggggggcactctggtctggctgccggacgaggtcgccggtgatcgccagtccgcacgcctctccttcgacgcacagggtgccctgcgcagcacaagccaccgatag

SEQ ID NO: 514768 - DNA, 786 bp, Stenotrophomonas maltophilia
atggctgagtcgctggccaccctgcaacggcgttgggccgaccatgtgcgcgacccatcaatggccgcgcccgatggcgtcgaggcgcgccgactggcggtgtaccgccgcctgtgcatcgacagcctggacaccctgctggctggcaccctgccacgcctgcaacaccagttgggcacgccgcgctggcgcgacaccgtggagcactactacgccagccacacctgccgcaccccgttgttcccacagatcgctggcgaattcgcggcctggctggcgatgcaggacgcgctggcactgccggcctgggcagcggaactggcgcactacgagagcacgcagcagtcgctgcacattgaagcgcgcgccgccgggcgttcgctgcaccgcgttccggtggacagtgatgtgctggcggtctcgccgctggtgcgggtgcttggctaccagtggccggtccatgtggacgaggtgctggagccggtgctggatgcagctcctgtgctgctgatgatgcgccgcatgcctgaattcagcctgcaggtcgaggaactgtcaccgctggcctacgcgctgctttcggtcttcggtgacgacggcgcgcctgtggatgaggcactgcaggcgctgtccgaaacacatgacgtggcaccggacgcattgcgtgcggcctgcattcccgtgctgcgcgaactctgcacggccggcgttctggttgcgtcgaccgatcccggggaatgccggccagcggccggcactaccccttctccattcttcgaggcctga

SEQ ID NO: 514769 - DNA, 648 bp, Stenotrophomonas maltophilia
atgaactccagctgccgccgcgtgcggtgtattgcgcccgacgcagctgaccgttttctccggtggcggtacttgcggggacggggccgaagcgccccgtcccttttttgtgggtgggcttccggcgaaaggcatccacgcatggcgtggatctacgggttggggcggcgctgggtagatccacgccatgcgtggatgggcattcgtgcaaaagaaaacccgctgcctgcgcagcgggtttccggtcctgctccccttgtgttgccggccagcggccggtactaccgagtccgtgttgccggccagcggccggtactaccgagtccgtgttgccggccagcggccggtactaccgagtccgtgttgccggccagcggccggtactaccgagtccgtgttgccggccagcggccggtactaccgagtccgtgttgccggccagcggccggcgttaccgggcccgggttgccgggcacggccgggcacaacctcagaacttgtagttcacgcccagcatgtaggtgcggccccactcgatgtactccagcgggcggtccttgctgccggcgtaggtgcggtacggctcgttggtcaggttgctgccctgcagcagcagggtcaggccgcgcagggcgctgctgtcgctga

SEQ ID NO: 514770 - DNA, 651 bp, Stenotrophomonas maltophilia
atgacgatgctggatgcctcctccctggccgcgcagctgcggcagccccatggcgacgccgcactggcggtggccgattcaatgaatcgcagcaacggcgcgctcaaccgcgcggcgatcggcctgctggcggtgtcggcaggcgaacgcatcctggagatcggtcccggcaacgccgccttcgcgcccgcgcttctgcacgccgccgacagccagtacctggggatcgaactgtcccctgccatggtcgaggccggcaaccagcgcctggacgccgccaggctgggcgaccgtgccacgatgcgcctcggcgacgcccatgccctgccagtcagcgatgcctcgatggatgcggcgctggcggtcaataccctgtacttctggccaaacctggccccggtgctggacgagctggcgcgggtgctgcgccggggcggccgcctgtgcctggcctttggcgatgccgccttcatgcgcagcctgccgttcgccgccgacttccagctgcatgaactggacgcggtggagctggccctgcgggtagccggcttccgcgtctcggcctggcgcagccaccgcgaaaccgcaagcggcaatgacggccagacccgcgaaaagcacttccacctgctgctggcacagcggcgctga

SEQ ID NO: 514771 - DNA, 612 bp, Stenotrophomonas maltophilia
atgcgacaaagattgcggaaactggccagcgagctgctcatcctggtagatagtgatttcaggtgtatttggagagttaacgtgaagcgcattgtgatctccctcttttggatttgctctgctttgttcttgcttgtgacagcagatgcccaagcggaggggcgctgcccgcccggacaatatccgattggcggacagggggttggtggatgtgcgccaataccgggctctagtggaggcgatgcagggtcgagtggtccggtcgcgacaggccgctggatcaaaacctggggagctattgcaaccgcagtaagtacaggcgatatgggggcatcggtcggaaggcgttcaaagcaggaagctgtgtccgaggcgctttcccgttgcgcaagccatggcgccagggattgcaaagtcggaactacctacaagaaccagtgtgttgcatatgctgatcccgagagggggagtaaggggcgcgtctcatattcggttgcaggctccaaggaggaggctacaaatcgagttctgtcccattgcgcggatatcggtggcggccagtgcaaagttctttatacagattgtgctgagccgatctttgagtcgttctag

SEQ ID NO: 514772 - DNA, 1530 bp, Stenotrophomonas maltophilia
atgctgtacgacgtcgtcattgccggggccggcccggtgggtctgttcctgtcctgcgagctggcccaggccggctgttcggtcatggtgctggagcaggcagcatctcccgagacaccgttgaagcgcctgccctttggcctgcgcggcttgaacgcgcccaccctggaggcactggatcgacgcggcctgctggacgcggtggcctcgctccaggtgctgaagccggacaagggcgcaccgccgccgggcaccgcccattggctggcgcaaccgcgaccgctgggcggtcacttcgccggcattcctttcgccctggacaacgtggacagtgcacgctggcgccatcgcctgccgacgccggtgcccatccagatggcggtggaactgcaggcgctggaagccgtgttggtcgagcgtgcgatcgcactgggtgtgcgcatcgagcgcggctgtgcggtacaggcggtccaccccggtgaaatggaggtggccgtcgagactgcgggagcaacggttcgaggacgctggctggtgggctgcgacggcggccgcagcaccgtgcgcaagcagtgcggtttcagcttcgtcggcactgcccctgaattcaccgggcactcgttgttggtcgagctggacgatccgacgatgctgacgccaggtcggcaatacaccgatcaaggcatgtgcaatttcaatccaccgggcgtggtggcactggccgacttcgacggtggcgcgggccatcgcacgccactcgaccaggaggccgcacaggcgctgttgcggcgcgtctctggtcgcgacgtagcgatcaccgcgctgcagctgtcgagcacctggaccgatggcgcgcgtcaggcggagacctatcgcatcggccgcgtgatgctggccggggatgcggcgcatgtgcactcgccgctgggcggccagggactcaatcttggcatcggcgatgcgatgaatcttggctggaaactggcggcggtggtgcgcggtaccgccgatgatggactgcttgacagctacacggccgagcggcacccgatcggtgcgaaagtgctggactggtcgcgtgcacaggttgcgttgatgcggccgggcgccggctcgcgcgcattggcggcggtgatcgccgaactggccgacacccctgacggcgccacgtatctggccgagcgggtctggggcgttgtgcagcaggtggacctgggcggcatccatccactggtcgggcgcagcacgcccgacgtccggctggccgatggtcgtcgcgtgggtgaagcactgcggacggggcagggcgtgttgctgcagttcggcccggccgcttcctcgggtgccgtcaccgaaggctggcgacggtgcgttgccagcgtaatggcggccgaagacagtccgttgggcctggctgcaatgctggtgcgcccggatggcatcgtcgcctgggcctgcaatgccggtgacaccgaggccgggctgcgtgaagccctgcagcgatggttcggtccggcggccgcgggttga

SEQ ID NO: 514773 - DNA, 711 bp, Stenotrophomonas maltophilia
ttgaatctggatctttcgaagtggtcgcttctggaaaagttgagcgacttcccatttgtgctcaggatgagcgcgttcgccttggcttcggacttcgcgtcagcgatgatttggcacaagagcattgttgagatttcactgcgcgagctgacggagcgccccggtcttgccctcgttttgattgtggtcttcgggcttgcattatctgtcggtgcagtgatggtgcagatagtggtccagttcggcctcattcctatcgctcttgcgatccaagagcggcttccggtcgacgagcgggatgattcgtcgccgcccatgggatacgtcacgcaatttcaggcaatgaagcacctcatggtacatccggaccatcaatggttagccagacttgaggcctgcttggcaaagcaccgggaggaagagcgagcttggttggtgacggtgcgaaatagcattgcatgcatggcactgagtgctgcgagttggtgttgggcggaccaatcactactctcagtgtgggctgaccgttggatttggacttatctggttgtcctcttgctcctggggacgcccctgatgctattcatctggaggggctttgacagcgagccactcatgtactggcctgatctctatgacgtcttgcgagcgaagcgagaggaaaacacaagaaagccggcttttgtgagtcgtgcttcatcacgaagatag

SEQ ID NO: 514774 - DNA, 510 bp, Stenotrophomonas maltophilia
atgtcgcctccatggccggaacgtctcgcgcgtttcatgctgccagtactgcctgcattgctgttcaccaccggtttgctggctgccgaaagtccagcacaggcactggcggagtgggaggcgcacggccgtgccgacggcctggcccgacctgacatggtctgccaggacttcctgcaggcaatggggcggaaaccagcgggactggaatacatcggctgcagccaggacgatgcgtcctacatcaagccgatggaagcccactatcgggttgcgggtgccggggcagcgaaggtcgaagccttcctgcacgcaacgttcggcctgccagcgttgcgttacgtctgctgtggctggagcagcggtgaaccctattactggcgcgaaggtccggacgcagtgaggtaccagatcggcatgggcgtggaatccctgccgcacgcgcggagcgaatggcatcgcatcgaggcattcaatgtaacggttgaggtatttcggcagagtccctag

SEQ ID NO: 514775 - DNA, 1062 bp, Stenotrophomonas maltophilia
atgcccggctttcctcgcagtcagcggctcgccgcctgcctcctgcttgcagctgccatcacctcaccatcgcccgcccgtgcgggtggcgtcgtgccctgcagcccctgcgccgacccgcgctcggccgcactccagtccggagtgggcctgacggtcgtggtcgacccggaccagcgtcggctcaatggctacaccgtggaatatgaccgcgagctgcggcgctatcgtgccgttcccacagcggtcccggcggaagtgaccgcgacgttcaagcggatccttgcactgccgcagggccacattgcatccgggacacagttcgtcccgcaggccttcggcagcggcgccgtcgtccccatccatcccgacgacccacagagcgcgaacgggatcaccttcccgccagcaatgaaagacctcaacgcctatgacgtggtccattcggcaacctaccgcagccaactggaactcgccgttggccaggccttcagcggcgccaacagcgaacacgcggcgtggaactcgctggccaccaccctctcttcgatcgtcctgagctggatcagcaagctgttcggggtgcagacggtgacctatgtcatcacctggcgcgatggctcccggaccaggctggtgatctcaccggactccgtcgatagagcccgatacgtttccggcgaaagtgtggacgccagcggcaaccgcattcccgatggcgcggcatccaatgccgaaaccggcgaaggctactctggcgcctatcacttcaatgacgaacagagctaccagaattggctggattcagcgcagctgtatggcgtgcagatcatcgtcaatccgggcgcagcgccgtccggccccatctgccgctgggatggcaggcagctccagtgcgatgtgccgcgctcactcgctgccggtgggatgtcgtcatccctgcatggcagggggccgcgccgcccttgcggcggcgcggccatgcaactcagcgcagcccggtctcgttgcgggcgatcaccaggcgctggatctccgaggtgccctcgtagatctcggtga

SEQ ID NO: 514776 - DNA, 1059 bp, Stenotrophomonas maltophilia
atgccggtcagaccgttgctagggaagtacgagatgacaacggcagttcgcaccggcctggccgacctggtcgctgacgcgcagcgctacctgcgcagggtcctgccggggcttgcctcggcggtgcatccggtcacggtggcacacgccattccgcgcgcgatggcgtcgcgctaccacatcgccgagctgaccctgtacggtgaaacccctgccatgctcgccgtggcccgcgagccgggcgagtccagcagccgcgtcatccaggacgtacgcagcctgcgctcggcagcaaacgcattggtgctgtatgtctcgccctacctcaccccgacacagcgacgcttcctggtcgagaaccacatcgacttcgtggtgccgcacgcacagctgttcgcaccgagcctggccatcgagttccgcgacgcgcccgaccacgagaagaaggcgatctcgctgctgccttcggcgcaggccgtgctgatccacgtactgttgtccgggcagccgcgctggtggtcgccccgcgagatcagcgccaccgcaggctatacctcgatgaccgcatcgcggttgtccgccgagctggtcgggcgcggcctggccgaacgctccacgggcggccgcgaacgtttcctgcgcctggcaggcgatcgccgtgatgtctgggccagggcgcaacccttcctgcgctcaccggtactgaaagaagtcgatgtctgctgggacctggtaggtaccctgctggccgatgcgggccaacccgcgccgcgtgcaggtcgggatgcactggacgcggacggatcgccagcggtggtgaccacccgtgcactgcatatcgatgcctggcgcgcgcttgctgcgcagccggcggtcgcccccggttgcgcgcagcaggtgcggttgcagatatgggcctatccaccggcgttcaccggcgtcggcgcggtgatcgacccgctgtcgctgtacctcagcctgcagggcaagcgcggccacgacagcgataccctggaattgcggatcgaacaggcactggcgaccgcgcagcacgcctga

SEQ ID NO: 514777 - DNA, 291 bp, Stenotrophomonas maltophilia
atgcgcggtcattcccgtttaccacccttctggatgctggcctcggcgcaactgctgatcgcggtgatcctggcctcatcgtggttctacgtgaatgcgaaggctgtcctggcgggtccgccgaaccccgatcagtacgtgaacacctgggactttcagattgcggtgttcctgttctactggctacccgcagtgcttctgttcatgggcattctgctgggcatcgaacggttggcgctggcgcctcggtatgcacgccagaaggccgctgccaggcaggatgccaactga

SEQ ID NO: 514778 - DNA, 333 bp, Stenotrophomonas maltophilia
atggccggggttaccggtgtcctgctgcacgacggagatcgattcgtgcagtacttcgaagggcctgaagacggcgttgcgagtgtctacgagcgtgtgatgcagtcgacgagtcacaccggcatcgttgagctggcgcgaggtcgtgtgtcttcgcgacagttcccctattgggcgatgcatcggctgcccgcagatcaactgctggtggggaagctggcgagggcggattggtcgcgcttcaagaagagcgggccagacgacatcgccggctcaatgcggggaatcgacgtgctggccgttgcagtagcaccgtacgttgaggccgcgtag

SEQ ID NO: 514779 - DNA, 246 bp, Stenotrophomonas maltophilia
atgcgtgacatcggacagttctacgtaatcagcgtcgagggagtgacgcgggcggacggcaccctgctgcaggtcacccggatcgattgctcctgcatcaagtgttcctggcaattcagggccattcccaaccatggcctggtcgatctcgacggtgcggcggccctcagctgccccacctgcggcaatcaccagtcagtcagccgcgcacggcttgaagagctcaaccgacgcaacgacgaatag

SEQ ID NO: 514780 - DNA, 216 bp, Stenotrophomonas maltophilia
atgggcgcaatgaagggaatgctcagagagaacggactggccactttgccgatcgtcaaatgggcctcggatccagcgtcgcatggtgtgggctgcccggatgtgcggaagctcgccggcggtgggctgaagttccgctacagatacaccaaggccaacggtcaacgcgatcgcgtcgcggccgcaccagaagtgagggcgcaaccttcgcgatga

SEQ ID NO: 514781 - DNA, 783 bp, Stenotrophomonas maltophilia
atgttcggcacaggagccttcaggactgacctgccgacgcccacgctcctagaatgcctagagcgcgccaaggccgaaatcgaggtcgtattctcagtacgcggcgtcatcttcaatcccggcgtcacgttcgctgatgaatgggattggatacgcagcgaaggcgaggaacgtcctgactacgcatcggaatttgatgattgggtcgagctcttccgcgcgaagggaaccctacctgaggtctatttcatccttcgagcttcgatgagcctctggttcgaggctgaaagcgcatacctctcaggcgaccgggaccgcgcctggacggcactcgtccggtgcaacttctttctcggcatgtgctgttcacacgaatcccaccgcgaacggtctagccgcgcaggtcgcaattctgccaagcgcacgcttccacttcgggagatggtcttggagatgctatccgccatgcccgacaagtcacgagccaccaagcaggaaatatgggatgaaatcgtccccgccatgagttctttcgttcctcctggagatgttcaggagggcccactcgattgggtgcgcaaattgggccgccacccgaaagagcagtaccgagaatcattccatcgacgcggaaagggagagaagagcaggcacgggagaagcgctgacccggcgaagctcctacggacttggaccaacaacaacgaagaaatacgtcagcagttcttccgtgtggtcgcaggcccattgaccactaggagaaagagaagcagcaaagcgtag

SEQ ID NO: 514782 - DNA, 972 bp, Stenotrophomonas maltophilia
gtgggaccatggcgcagctacccgcagcagatcatcgaggtggatcaagcgatgcgggggttggtccggactaagggggagctgttcgcgcatgcagttgtgggtcgccgcgctgccctgcgtatccatccggtcgtcaagcgaattcgcatgctcgagaatctggactattgggcaatcgaggagttctacgccagtcacaagctcagcccatactttgagatcatgtctcgcgaattcagggaattcagagcggacgtgattaccgggggctatgtcgatgccgctgctgccaatcagtgggtggacaggattcgtcaggaggccttgcatagttccttcactgccgcgctgagtgctcaggagagaagcgctaggaagaatgcccggtcggccttggactacgtggactcgctctataggcgctactctcgcctctgtgtggtacgagtggatctggcctacagtgcggagtatcggcagacgcctgaagggaagtccattgcgcccgagcgggttaagcgggatctgacggcctggcttcgagcacttcgcctgaagttcccctctctagtcgggtatatctggaagcttgagtacgggccttcgaagtcctatcacgtgcatgtgatggcgctcttcaacgggcacgagattcggcaagatgttgccatcgggaaagtgcttggagagtactggcgtgaagtgatcactaagggggaggggggctactggaactgcaatgccaataaggcctactacgaacgcttcaacggtgttggcatcggcatggttgctcacgatgacgtggagaagagggcccgactgaaacacgcgattctctatcttgctaaggccgactactacgccagattgaacgagccagggatcgggcgaatctttggcaaggggcagctcccggttgactatcgaccaggtcgcccacgcgcctctgacagacctgcagagtag

SEQ ID NO: 514783 - DNA, 240 bp, Stenotrophomonas maltophilia
atgaattcccccagccacgaccgccttcttgagcgcttcatcaggaggcaggaagtcgaacgcaggaccggcttcggtcgttcgacgatctacgcggccatcaagccgggttcgaagaggtatgacccgaccttcccccggcccgtgcgtttgagtcccggcacgattgcttgggttgagagtgaagtggacggatggatccaagccaggatcgctgagcgtgttgctcctattacgtag

SEQ ID NO: 514784 - DNA, 1053 bp, Stenotrophomonas maltophilia
atgtatggacttcggggagtcggtaagaccgtcctactcaacaaggttcgcacggatgcccaagcttcggacatctacgccgtaacggtagaggctccagagaatcgttccctaccagcagcgctggcgcctgctcttcgcgcaaccctgttgcgtctgtcgcgcctcgaagctgctaaggattcggctgcgcgtgccctccgtgcgctcggtggcttcatcggcgccctcaagcttaagtatcaggatatcgagctgggtcttgatcttccgacagagcagggtcttgctgatagtggggatttagaccacgacttgaccgaactgatgctcgctgtaggtgaggcagctaagacccagcgcactgcgttagtgttgtttgtcgatgagattcagcacgtggctgaagagcagctggcgtctttgatcatggctcttcacgcgtgttcccaggcgcagcttcctatcactatggtgggggcgggcctaccccagctgcttgggcaaatgggcgatgcaaaatcctacgcggaacgactgtttgagttcgtacatgtagataagctggatagcgaaagcgcggcagcagctgtggaagttcccgcgtccagagagtcagtgggattcgaggatgcagctattgctgagattgtgtctaagactgctggatatccatactttcttcaggaatgggggaagcatgcctgggatattgctgacgcttctccgattaccgaaaatgatgcacaggaggcgacggtcagggctttggccgagctggatgcttcatttttcagggtgcgcctggatcgcctaacgggggcggagaaaaattacattcgggcaatggcggagcttggtcccggcccccaccgttccggagacattgctggctgccttgggcgaaaggtggagtctgtcgctccgaccagaagcagcctgatcaagaaaggtatgatctacgcccccaaccacggggatacggcgttcaccgttccgcttttcgatgaatacatgcgtcgcgccatgcctgaatttcagaggcacaactag

SEQ ID NO: 514785 - DNA, 477 bp, Stenotrophomonas maltophilia
atgcacgaaaagtcagagttggaaagggcggtaagcgtagttgatgccaaattctgtaagacggcattgcctgagctcagcagggaacgcttatcgctggataagctacgtgcgaggctgctgcaggcgtcgaaggaaaatgcagatctagcaaggcaagtcatcgacagtgctaagaagatctgtgaggatgaggaagaagctcggaagcgtgacctagttctgaataaatggttccttgcggctgcagtctgtatagccgttccgctattcggggtggctatctacgcgacggttaaggacgttgcggcaccctggatgctgttctggatgggtagcagcgtggtggcgggccagatgatcattgatctccgacagtgggcttctcctgtcagaaagggctggtactctagcgtctaccgcgggctcgctttggtgacggctttggtcggcgtgctggcgagtgggaaaatttag

SEQ ID NO: 514786 - DNA, 1173 bp, Stenotrophomonas maltophilia
atggagacggtaaccaccctcgcgggccggggtgacactggccacctcgcgcccgttccaccaaaggccccagcggtcacccatctggacccagcccgatgggatgggagtagtacggaagccttggtagccgtgcgagggaagcatggggtaaggatacgacccgggggtcgcaagggctgcgacagtactcgcccaggcacctttgagtgtctggaggccatttgcatcaacctaatgacaaaaccttactgctccatcaaagtagggagcagggataggagatttgtattggtccggacgccgcgcaaaactaagcttggacactttgccgattggcaacagcagctggagaaccttcgtgtccatcgaaaatgcgaaggtccgaacttcttcatgccttaccattttgcgacgatggctctagtcgtcaaggaaatgggacccggcaagctcatccttccagacgacataacggagtacgcagccaagttgcggctgtgggaggcgattgggcaaaacagccctctgattgtagagaggcgaccagcgagcactcgctatcacgatctgacgccccttcgttctactgccgacgtagacaatgccgcgagcgcgatcgcccagatgctgactagtcatagcgactcttgcacatcggaaacgcgtaatgacctctacgttatgctcgctgagctcctagggaactgttacgcccacgctcggactcaagatggcctgcacgggcttgcttgcgctcagacttggtacaaggagtcgcgtgcgcagttcgctattgctgatagcgggatcggcatacgaaagagcctggaagagaatgctgatttgctccacaggcttgcggagatgaatgcctgtactctggcatgcgaactaggcgtgtcgagcaagctaggtaagggccaccagggttacggtctcaccgttgcttgcgacatggcgagacgcactcccggatcgatactcttcgttcagtcttgtgatgaggccatctttgtcgagaatggggtagttcaggagatctcatctttccgacacggcttttcgggtacgctggttgtgttcgagtgggacatggatacgaagttggacttggccgaggtctacgcgaactggccacaatcacagggtgatggcgatgaatttttctaa

SEQ ID NO: 514787 - DNA, 210 bp, Stenotrophomonas maltophilia
atgagcatcgaaaatcaggtcgaccagagcttggtcgcgcaaatctatgcggcggcggcggcgcatgcgatctcccggcaggaggggccctctttcgaggagatcctgggtcagtctatagaggctgcaagggtcttcaagcatgagatggcggggcggtacagcaagcagttcgacaactggcttggatccgtgcccagcatgaagtga

SEQ ID NO: 514788 - DNA, 1425 bp, Stenotrophomonas maltophilia
atggccaccttctatgattctttcgctcaaggcatgcagaacggtcttgagcgccaaaaggcagtcacgcagcgcaacatgctggcagagttgcagcagctggcacccaaggtcatcgcaggagatttgcccgcgaccgatcgggcgtttgcccttgatcctaagaccgcgcagtcctatcaggccgaaggaaatcgacagcaagaaaagctcgttggattggcgaagtcgctcaccaagttcgctggcaatccgcagatgcaagctggtatctaccgcagcgccgttccgtacttgaagcgcaattttggcgctgagatccctgacgacttcgacgcggcaacggtcatgccgattgtcgatcaggtactggccatcgccgctggtcaaccaacagcccagggcgagcagttcaccctttcgccgggctccaagcgcttcgatgcaacgggtaaggtgttggctgaagtgccgtttgcgccggccaacgccaacatggtcgatatgcccgatggaatgggcggcagcatgaagatgatctgggaccctcgcgagcgaaagctgagcgatctccctggctcggggcagcagcctgttatgccgcccactggagtaggcccggcaggcaatcgctacagtctcgggtcggatttgaatccggacgagctcgccgctgcacaggccgatattgccgctggcggaacgttggacaatgtcattttgcctgacaggcaagtgaccgccgccgggaggatggggtacacccctcccaggcagcgtgaggcgccacaagggtacgtctatcagggagatgcgttagtacccatccccggaggtccggccgacaactcatccccgcaggccatcgctgcgggagagcagagtctccggaaagaggtgacccagaacctcaaggaggatcagggtgtcctgtccatgtatcgaaacgtccaggcggcggccggcaagccgagtgcagccggcgacctgagcctgatcttcgcgttcatgaagatgctggacccgggctcagtagtacgcgagcaggaatttgccaatgcgcagaacgctgcgggtgttccggatcaggtgcgtaatgcctacaacaaggccatcagtggccagcgactgaatcccacacagcgccaggacttcctcaaccaagccgctcagctcgcgaccaacgcagaagggcggatcaccgggacaacccgaaagtaccaggagatcgcacgccagtatgggtacgacccggtacgcggcacgggcatggctgatttctccggggtcactggcagcgtcagtagcggtcccgagcagcctgttggccctgcgcgccctcagacggatgcggacttcaaggctcttcccagcggctctctctacatcgacccggacgatggtcgaacctaccgaaagaggtaa

SEQ ID NO: 514789 - DNA, 1467 bp, Stenotrophomonas maltophilia
atgtcgcttgaccagttctacctgcctgcaggcgtgcggattgccgcacttctgctgacgcccccgcgcctgtggccgtatctactactaggcgaatatgcctacttcgcgcagattcgcgtgccgatggcgacaactcatgggctggcctgggtcattctgggctcgattggcctgatgcccgtggcaatgctgatcgtgcatttccatcgcaggcatatccctaccgcgggcggactatggctgctctccctgtcgttctccgcaggcattgcagtcagtctgctgaacatgggacttgcgcgtctgctgtggccaggcccagacccggaaatgatgctcgagcgggtgggacgtactctgctaggccaaaccaccggcatccttacgcttgccccactggcactgctctggctgcgacgtcactccgaaccagcatggagcacccgcttcgttgctttcaccgccacagccatcgcactgatcatggcgcttggattggcaatgaagctgacaccggctgcggccaacaccacccgcgagcaactcgtcctgatggcttcgctcccggcaatctcacttgccttcctgcatggttggcgcggcgcggcaatcgcagtgccgctactgaatctgatcgtgctcgcatctacaccaagcactggactacccgcttcgtttgatctgggagccttctccacgcagcagagcctttgcgtaataagcgtcgcgctgctcgcattgggatctggtatcagccactaccaacgcaagtaccaggagcatgaagatagtggccggaacacggtagaactggcgcgcgcctcacacctggccggtgagcaggcgctgcgttcacgggcactggagctgaaatcaatcggcgacggcatggatatgtcggtgcaaggtgtcgttgactggctcaagacgcatggtcaccacgatatcgccgcagatctggttcagacatctgcaacgcattcatggcaattccgccaacaggccagcatggtctacccaactgcaattgagcagatcgggctttacctcagcttgcaagccagcggcgtacgggacggttgggactccaccggccgcatgagtcgaccacaattctccggcgacccctgccagttgagcgtgggcctgcaactatcagcctttcgcctgctgatcgatgcagtgccggtgatgctgagtcatgagccggggcagatgcacctccaggcgcgttgcggcaggctccgccagcgtcgcggcatcatgttgaacatcgcactgttggatcgcggccgtccattggcgtcggccaccgaagctgcactgattgatcggctcagcggtcgcctgattgcctacgacggcgtgctgcaatgtcgtcgccatcgaatcacggtcatactcagcgaatccctgccgtccctgcccgtgggtgacagcgcgcgacgctccgagttcgcctag

SEQ ID NO: 514790 - DNA, 480 bp, Stenotrophomonas maltophilia
atgcagtacttcaatccaaccatggagatgcctgtgagattttcccgattttccgttgcggcgactactgcagtcctgttgtccctgcctatgctggcttcagcctcctgctgcacgaccggaggcaatggtgttcagacggcaaacgccggcctgggcgaaagccagcctgttgctgtcaattcgagtttggatccggcctggttcgtctatgccttccagcgcgatggtgtgacgtactaccaggtcaatgattccgtgggccaggtggtcctgatcatcggcaatatcgattccacgttctggaccctgcctgcaggaaatgcggcggtccgcgtctcgttgccgtcgcagcggttggcggtgccggcgacggcgcgcaggcgtctggtattccaggcatcggacttctcgttggccgtccatggggaaggtcagggggcaatctggtccgtagagcctgccgccagcggaaagtga

SEQ ID NO: 514791 - DNA, 1638 bp, Stenotrophomonas maltophilia
gtgtcgccgggactgcgatggcgcgggacgagcaagggaggcttgagtttgagttggttgaagagtggatttgaactgagcttccgtatccgaccggtcggcctcgctcttgctgtgctgtatgccgtcgcctgctggggggcgcgtcacttctccgtcgatcagttctttctgcctgccggcatccgtgtggccgctctgctgctgtgtccgccacggctgtggccataccttatcctgggtgagtacgcgtacttcgcacagttgcgctatcccatgatcgatgagtacgggatgagctgggtgatcctcggctcggcatgcctgatgccggctgtcgctttgatcgtccatctccaccgcaaggcgatgggatccaccagcgagagctggctgctctccgtcgcggcgtcggctgcactgatcgccagcgccctcaagctcggcctttcccacgcgctttggccggtcccgccgtccatgccgttctacaccaatgcagcactctttgtgctgggtgactacatcgccatcttgaccgtggcaccccttgccttgctgtggatccgtcgtcatgccggctacgactggtcagcctggcggatgcggcccacgatagtggcgctctgcgcattgtgtgcgctcagcatcctcatcgccacggtcggcgcgcgcgatgactctgcacgggcgatcctgcagttgctgatgacattgcccgtgattgcactgacatgccttcatggctggcgcggtgcggctgtaggcgtaccactgatgaacatgattctcagcgtgaccatgcccagcaccggcctgccggggtcgttcgaccagacgaccttcttcacgcaacagatcatcgcgatcacgggcactaccctgctggccctaggttcccgtatcacccatcagtaccatcagttcacaccagcccaggtgcaggagccgcagacgaccatgctctcgcgttcggctcatcttgccagtgaaatggacctgcgcgagcgggccctcggcctgcgcagggttgccgacgagattgaagcagccctcgacgaaacgctgaagctgctcaggactcacggccaggaagggccggcaatcgacctgctgcggacattttcctcacgctcgcgcaagttccgcgagctgaccagcatggtctatcccaccgagctcgaacacgcggggctctatgttgcccttcgggcaggaggcttgagcgaagcctgggaagacagccatcgcgtggtccgcccggtacttcagggcgacccctgccagctgggcataggactgcaacttgcggcctatcgtgtcctggccgaatccgtgtctctgctgctcaaggaagaacggggccagatccagctccgagcccgctgcggacgctcgggacgacacaaggggatcctgatcacggtggcgatgctcgaccgcaggagcacattggcgtccgcaaccgtcagtctggcaattgaccgtctatctgcacgtacacaggcctactcaggctcagtcgactgcctgggcaaccggatccggatagtcatgcgggatgctccccgggagatgctgggcgacagcgtgcagccacaggcagttgcgccgattgatatgccggccaagtactga

SEQ ID NO: 514792 - DNA, 129 bp, Stenotrophomonas maltophilia
atgtatgccgtcggcatcttctcgatcctgacgccactgctgttccaggtagcgctgggtgccgatgcgcccccgcgcatggcctggctggcgccggcgatgtcgctgatgggcatggcctgcctgtag

SEQ ID NO: 514793 - DNA, 522 bp, Stenotrophomonas maltophilia
atgatcatccggctactgaccgaagacgatgcggacatgctctgggaggcccgcctgcaggcgctgcgcgagtcgcccgctgcattcctgtccacgctggccgaggcggccggcgattcctcgcaggtgatgcgggcgcagcttgatgaccctcatacccgttacttcggtgccttcgaccaggcggcactgattggcttcctgcgctacgtgcgcccggtgcggttggcgcggcggcacacggcggagatccacagcgtccatgttggcgcagcccatcgtggtcatggcatcgcccgtcaactgttccttgcggcattcgcggcggcacgcatggacagcatcgagtcgctcacgctgacggtgctggcggacaacgctgctgcgcgtggactgtacgaatcgctgggattcaccgaatccggcgtcgagccgcgcgcggtgaagcgcgacggccgctatgtggacatggtgtcgtactggatttcagtgaccggccacccatcatcgccgacaccttga

SEQ ID NO: 514794 - DNA, 705 bp, Stenotrophomonas maltophilia
atggtccacacctccggttcccttgtcagtgtcggtgccctggtcggtgaccaggcacgcgccgccatgttgctgcaactgatggatggccgcgcgtacaccgcgatggaactggcgcgggtggccggggtgacgccgcagacggcgagcacgcacctgcggcgcctgattgaaggcgatctgctggtggtcatcccgcagggccgccatcgctaccatcggctggcgtcgaccgaggtcgcggacatgctggagggcatcctgcgtgtggccgagcgcacgccctcatgcaccgccgccgcgtcacgcagcctgccggccttgcgcgaggcgcgctcgtgctatcgccacctggccggcgtgcatgcggtggccatcaccgatcacctgctgcaggccgggcacgtgctgcagcgcgacggctattggcaggtgagcgcagagggggcggcgttcctgcgggagctcggccagccgttggccgaggtactgcagcagccggtgacgaccaggcccgcgcgctattgccggggatgcctggactgcaccgagcggcgcccgcatctggccgggctggtcggcgaggcgatgctggacagcttcgtgaacaacgattggctgcggcgtgttgaaggccgtcgcgaactgcggctgaccccgccggggcgcgaggcgttgtggaagtggttcggcctggcgacctga

SEQ ID NO: 514795 - DNA, 330 bp, Stenotrophomonas maltophilia
atgaatacgagcacgtcagcgcgcggctggccctggggcctgatcgcgctggggctgtccgtgctcgcctggacgtccctgctgctgggtgtaatggccttcgcggccagcttcggctcaccgggtgacggcaaccacggcatgcgggccatgcagtactggattctggctgctctggtcatgctgggtctgtcgttcttcggcagcctggtggcgatcgtgctggcctggcgacgcaggcggggagcggtctgcgccaccattgcaggcgcattgctgacgctgctggtgtcgatggtcctgatcgtgatcgggtccagctggggctga

SEQ ID NO: 514796 - DNA, 489 bp, Stenotrophomonas maltophilia
atgttccgcgttgcttccgctctcgcgttgctcatcgtcgcgccgctggccattgcagccagcgatccgcgtggcgtggtcacccgtctctacgacgcagtccaggcaccggcgtcgaacgaaacggccattccttcgctgctgggcgatgccctgcgctcagccgtcgacgcgcagcgcacttacgagcgggcctgcgctgcgctggctgcgcacgacgagaagccgcacatgcttgaccagagcccctatctgctggcgccggaccggccggagacgataacggtgggaacgcccggatcgagccgtgacgccacctgggtccgcgtcgacatggcggtgggcggctatcgctggaccgaccgggtcctgctgcagcggcagggcccggactggaaggtcatggatatccgctgggggcagggcggcagcctgatcggacggctgcaacagttttcggccttccgctgcacaccttcgggcggctag

SEQ ID NO: 514797 - DNA, 369 bp, Stenotrophomonas maltophilia
atggctgagatcactcgattgcaccgcacgctgtgggttcccttcgcgttgatggcactggcggcctgcacgccgggcaatgatcccgcgcagaccgtcgagcgcgatgcgagcgcggagagcattccggcgcgcccggtcggtgacgccatgcagatgcagccggcccagcctgcggaaggggaggtcctgcccgacgcggtggacatgcagcgcaatgcggacggttcggtggatgtgcgcaaggctgcgccggagtcggtggccctgcgtcgtaccgacgatgggggcgtggaggtccggaaggtggatgcgaccgtcgaccctggcacaggcgcggcgccggcccgcgctgtgccgcagcagtag

SEQ ID NO: 514798 - DNA, 390 bp, Stenotrophomonas maltophilia
gtgagtggtaccggccagcccgcagacgcggcgctggctgccgaactggaggcgctggagcgtgcactgcatgcgccaaccgtgcgggccggccgcgagcaactggcggcattgctggatgaggaattcagcgagatcggcagctccggccggtgctatgaccgcgcggccgcgctggaggagattccgctggagcgtgcgcaggtgcagatcgaatcggagcagtacgcgatctggctgctgtcgcaggacctggcccaggtgcgctatcgcagtcgctatcacctcgatggccaggcgcaacgctgggtgctgcgcagttcgctgtggcgccggcacggggagggatggcgcatggtgttccaccagggcacgccagaggcagggtag

SEQ ID NO: 514799 - DNA, 1152 bp, Stenotrophomonas maltophilia
atggcaagaaagatcatcgacctcgattccgttcaaccgaacggaaagcggggtgaaacacagcgcccggcgttcaccaagatcaacgagaatttcgccgaggtctacgacgccttgaccgatgtcgcgaagattccggagaccgtggggaatgccatcaccgagcgcgttccgggaaggaatctgcttatcaatggtggccttcagttctggcaacgccggacctccggccgtgtcggtagcgggtctggcaccctgggggcagagacgttctttgccgatcgcttcaccaactcggcattgatctgcaaccatgacgtccagcgcgtggcctacgaggggcagagtggctacccggaagacacgcggtcgatcctggtatgtaccgtgtccggtgccgctgccagcagtggcgcctggatgggacagaagatcgagggggtgcgcagcgcgagcggcgacatcaccatctctgtgtgggcaaacagcgatgcaccgaaccgcaaggtcggcgtgcgcgtcatccagaacttcggcacgggcggctcgcccgcgccggaggtggtgatcgaagcaggtgtgctcacactgggcacctcggccacacaccacagcgtcaccgtcactttaccgagcaccaagggcaaggtgctgggcacccatggcaacgaccatctctacgtggtgttcgacctgtgcggcaccggccagaagggtgagttggtggcgcagaacggctcgtttggcttcacacaattccaggtcgagccgggacgtgtggccacgcgcttcgactggcgcccgctgggcatggagttcgcgttgtgccagcggtactacgagaagagctacaacctcgacatcctacccaacacggcaaacaacgaagggcgagaggcgttctcggtcaactcgccgggaatggcgcattaccagagtgtgcgattccagacggcaaagcgtgcccatccctacgtgatgatcatctcggccgataccacccagcagaacggacacatcgccgaggatgacgtgtcccgcgtgccctgcctcgtcaactatgcatcaccctcctgctacgaagtgagctggaccaacaatccaggtcgctggggcgggtggtggcattggtgggccgaagccgagctgtga

SEQ ID NO: 514800 - DNA, 1149 bp, Stenotrophomonas maltophilia
atggccgacacaacgctcggagcgacggctgctgctgttgagatcaacgccaggctggactccgccgtccaggccgcgacgcgcagcatggccgagttcaatgcactgacgcagcttcagcagcagtatgcgcagaagagcacggtgcttcagtccgcactcaacggtgtacttcaaagcagcatctccctcgccgataccatggttcagaagctggctggaacgctggcagtcgtacaagctgcgctggagcaggcgcagagttctgcagaggacgcccggcgtgatggcaggacacccggagaagtcgcatctgatgctaccgcgcgcaacctggacagactgtccaccgatggtgaacgtcgcagcggcttcctcgctgatgcgcggcgttcggccaggggtacgtacctgaacatcgcgaagcccgagaagacgggcgcgaaaaaggacgagaaggaagacgattcgcggaagatcaagacgggcatgaagggtatcgagaacggattccaggatgcgttcgaggcctataccgcgaaggcacaggatgccgcgacgaacacgcagactgtcttcaccaaggcatttgatgccgccggaacggcgctctacaacttcgtaaccaccggcaaatccaaccatcatgaactgaccaaggcactgatcgcggatctgaagaagattgcgatccagcaggccatcgtctggggcgtgaagatgctcttcggtggcagtgtggggcccgtgcagaaggaatcaattccgatctccggctttgcaaagggaggcaccttcagatcgcccggcctctccgtctactccggcggtgtctatgacaccccgcagctgttcgccttcgccaagggtgccggcgtattcggcgaagcgggaccggaagcgatcatgccgctgcagcgcgggccggacggccgtctcggcgtggccgcgcatggcggtggaggcagtggcggtggcgtgggtgtgagcatccgcatcgacaacaacggtggcaaggaagtcaccaccaacgaaagcatgctgcagcagttcggcaacgagatcggccagttcgtggaacgcaagtaccgcgaactgcagagtcgtgacctgaaggcaggtggtgtgctcagcaggagtgccatgtaa

SEQ ID NO: 514801 - DNA, 258 bp, Stenotrophomonas maltophilia
atgcagcttggattgaaggcaaagcactttccaccgccgcaggtcgagctgtggccggagtgtgtgcttcccatcgaggttttctcacgggtttccacccagtggcgcgttggcgcaggtggcccgatcgggctggactacaacgtggtctatcaggagctgcagcgcgaagcgcttgtgccggagcggcacgctgaagtgatggcgggcatccgcgtcatcgagcatgcggccctgaagcacatgcagcacgaataa

SEQ ID NO: 514802 - DNA, 852 bp, Stenotrophomonas maltophilia
atgattggtcgcatgctgctttggtgtttgctgctgcccacaagtacgtgggcagcaactccagtagacgctcaactgcgtgaaatggaccgggagatgttggccgctggcgcttcagaccgagtcgagaagctggtggatggctattcgtcatgggagtcttccagatcatcaggggatggttgcggcagtttgagcgatctggatcttgaggccgcgttccgcgccagcttctacatctcaatgtacgttggagacgagaaatggcttggcaaggtccgatgcattcatgcagaactggggcggagaggtattgccacagagacaacgcaccggaaaatgcacgcggttctggtgcaggttcgacattttgctgaggccaatgcgctgcgtgagatggcgtcattgcgtgtagatgaacttcccgagatagagcggaacgcgcctggccagcagggcgttctccaccctcttgcgagtggaaagctggaatggcgggggtggacgtacagggagggattggaggtggtcgcctatgtcagtccggcatgcgctccctcgcgacgcgcgatgcacgtgatcatgaacgaaccagaatggacatggattcgatccagcgtgcgctttgtcgtgcgtcgatctcctgcatggccgcagccgggtgtcagcgagtggaacagaagcaatccctctcatcccatgttgctccaagcggggcccgcgggctggaaagaactggatgtccatgaaactccggtattccatgttttcaggaatgggcagcgcctgcgcaccctgacaggatgggcagaggccagtgctcacctgatgagcctgaaggagagtttctga

SEQ ID NO: 514803 - DNA, 501 bp, Stenotrophomonas maltophilia
atgaaacccatgatgctggttgttctgctctcggctttctcactgcctctatcaatgcctgccgtcgcaggtgatgacgtggcgagtgtcaccggggcggagaatgtctcgctcatgcacgcccctgtgaactcgcgggggcggcttgatcttcacatgatcgagctctctcccgaatccccactgatgttgctttcaccccttgcgcgcaagcagtttgtcgattcgctggtgtttggagatcggggactggccagcttcagctacgagcccatcgtctccgaactgagtgcaggtgaagcctatcggctcctgtcactcttcggggcacagcgcgcaattgtgcacatcccgggattgcggcaggagtcggaagcggatcatgtggtcgtgcagtcggccaatccaaacccggtattcgaagattatccgggctacgcctgttcagggcgtgcgacctgttcaacctccatgagcagcatctgcatgtcgagttgctga

SEQ ID NO: 514804 - DNA, 294 bp, Stenotrophomonas maltophilia
atggtcaccattaccgccgaacaggcgcgcgccaacgccgatgccgctacgcgtcccatcgaccagtactaccgcgatctcgacacgtcgatccgggccggctcggagaatggtcgccgctacatcgtgttcggcttcagccaggcactggccagcgagcggctcgtcgagggcgtcgtcgcgcagttgctgaacaatggcttcgaggtcaaacaactgcccagcgacgccgagcagcattacatccgcatcagctgggaagggacccagccggccccactcaacgccggctga

SEQ ID NO: 514805 - DNA, 336 bp, Stenotrophomonas maltophilia
atgaccctgcttcgatccatcatggttggcgtcgtgctggcgctggccggctgcagcaccccggcatcgtacgaaggtgcggattttcccgcgtcctcgcagtgccgaatgcagtgccaggcaggctaccgcagttgcatggcacagggcagtaccggcaacagtgccttcagctgcgagcagcaggtggtgccggcaccagacaagcgctgcaaggatgttgccaaccccgagctgcgccgcgcctgcgagctgaaggcgcatgactgcacaatgcgcgcgccgatgatgtcctgtggcgaacgccgcgatacctgcatgagcagctgcggctga

SEQ ID NO: 514806 - DNA, 1209 bp, Stenotrophomonas maltophilia
atgtcgccggcgctggcgttggtcctggtgttcctgctggccccgatggtgctgatcgcccgtgccgaatgggcgtcgcgccgcaggcgggcctttgccgagctgcgccggcagccaccttgccgcgtgctcagcgacaacgaagacgcagccctggccgtggtgcgcgcactgaccggctgcgcccacgaccatcaggtccgcgtggtatccggggcattcggcaatgcctcgttgttcggcgcgcgcgcgatcaatcatgccgacctgggggagatcccggtcctgctgcccttcgatgcctggcgccacatcgccaccgacaatcacgccgaggtggtactggccgatggcatggccgtggtcgtgcgtctgaacggcttccatatcgtcggcgcacagcggcgagccgaccgcgcagctgcggtcgaggaggcccctttcgaacccctggtcctgcggccccggcgacaccgggtgcattcgctggcacccagtgaagtacttggcatgcgaatggagaatgctgcggaagtccgtcttcgccgccaccgccccccacgctggacagggttgctggtggcattgctggccctcggagcagcggccgccctgcatgacgactcgccgttctggttgcagctgctgctgtgcagtccgctgctcgcgatcgccgcgcttgcgctctggttgtcgcggccgcgacgacgcgggccggcggtgccgcagcgtgtcctgcaggtccgcggcaggctcgccgacttcgcgctgcacccacagcatccgccgttgtggctgatcggcagtgaccgccgcattgaactgccggcggagtggctggacagcgggcacttcgtcagcggcagatgcgtgcggctggacgtgcgcgagagcgacggcgtcgtactgggtgcgggaccgcattggtcccgcgtggaggaccaccaccactatccgccgagcggcgcgctgtggccactggcctggctggggatgatgctggtggtgctgttgttcggcgggacaagcccggacctgatcagcgatgcgggcgccgcgcgtgcggacgcgtggcggctgtggtggctgctggccctggccatcacgctgtggcagcccatcgggttcctgcgcaggacacggcatgcgctgcgtcggacggcccggtacaccgccgcactggccaatcggccgccgccagcgcactga

SEQ ID NO: 514807 - DNA, 519 bp, Stenotrophomonas maltophilia
atggctgtggcacgacgtggaacgcagggagcactcctggccggcctgctgctggcgggtctcgcgcaggcgcagcaggccgcaccggcagcggcgcgtgatcccgcgcccgttccccccgcagatgcgccggctgcaaccaccgcaccggtctccaccgccttgccgcaggacaacgtcaccacccttggcgaagtgcgtgcgctcaagcccgatgacgagccgctggacctgtaccgcttcaagaacccggtgaagttcggcgacaaccgtttcagccgcgactggagcgagccaccgtcacccgagcaggtcagcatgggcggcggctacatcatgatgggcgtggtcaagggcgtgctggcggcgggccgggggttgaacaagctcaccggcggccccgaccagatccagtccgccattgcccggccaccgccggagctcagtgccgaacagcagcagcgtgcgctgcgtttctgccagcagcaggacggctgcgatccgccgccggtgaagtag

SEQ ID NO: 514808 - DNA, 291 bp, Stenotrophomonas maltophilia
atgtcgcactactatgtccacaatggctactgcggctgggcctacggcacgccaagcgatcctcagctgatctcgcccgaggatgctgccaggctgatgcagaccgcgggactcagctccatgcaggtttcatccatcctgccaccggccgagtacgccgaaactggaagccgcctctttgaagtgacgggcggcaatcgattcctgttcctgggagaccactccgactgctcggatgtcgattcggggaaggtctcctcgcctctcgtcatcgactggacggcggtctga

SEQ ID NO: 514809 - DNA, 180 bp, Stenotrophomonas maltophilia
atggcgctcacgcccccgcaaccggacccaccccgccttcgacagttggccgcgatctgttggaacctgctgctgctgatgatggtgatggtgatggtgatggtgatggtgatggtgatggtgggtgccgaccgttggtcggcacggggtcggatcccgttgctgtgcaacgggctctga

SEQ ID NO: 514810 - DNA, 228 bp, Stenotrophomonas maltophilia
atgaccctgatccgtgccctgccctccctcgccgacaccgaccgcccgcgcaacgcgagcgtgcgtgagcagctgcagcatgagcagctgcagcagctggaagaggtggcacgcgaggagatccgtgagctgcagcagctggcggatgcgcggcctggcccgtcgcgggcggatgaggcgctgctgggactggcgtgggacctggggctggacggcaactccctgtag

SEQ ID NO: 514811 - DNA, 1269 bp, Stenotrophomonas maltophilia
atgagcgacccgatctcagccatcctcgacctgcatgacaccccgcgcacgcgcaacgacagccagggcatgctgctgtcgctggccgccgagcatccgcgccaactgggtgagttgatgctgcaggccgtggcgcgacgctcgcccggctcggccttcctcgacatggcgctggacctgttgccggacgaggcggtgcccgcggtcgctgccgatgcatggcggcgctatcgggatggcgagcgcggagaactgctggccagcgtgatcgaattcgccagctaccaggcgccgcaggtgctgcaggacgactgggaggcattgctggcgctggccactgaagacgagttgcagctggcctcgcaggtatggcgggacctgccagccgaggtggccgcgcagtgggtgcaggccctggccgaggccggggacgatcgtgagatggcgcgggccagggtactgctgctcgccacacagccggacagctacccggtggcccgcggatacctcgccgactgggggcagctggaccccgaggtctgggcgcattgggccggcgtggccaacggtgcgcggccgcgccacctgcatgaccagaagccgctgcacatccgcttcggtcgagcgcagcatcgcgcacagcaggccgacgagccgagctggcgcaaacgcatctggcgcctgcatccgacctggaatggtgggcaggtacagcacgccggccacatgggtggaccactggaagcgctgtgtggcagctgccatgcgccgctgcagcgcctgctgcagaccgacgctgccgcgctgcagccgggtgcagcgggcgagatcacgctgggcctgtgcctggactgctgcggctgggaggagccgccggtgcgcttctatcgccacgacggcgagggcctgcccggctgccatcccagccagtaccgcgaggtgccgaacacgcccaccgacagcggcgacctgatgcaggccgaggtgggacttgtggcgctggaaagcgtgcgctggcagcaacaggactggggccagtccaatcatcggcagaacctgtcacgcgtgggcggtgcgcccagctgggtgcagagtgcctggtacccggcgtgcatcgattgcggcgaggagatgcccttcgtgatgcagcttgattcgacgctgccgaccacgcgtgagggcacgctgctgtggggcagtggcggcatgctctacacgttctggtgcgcgacgtgccgggtgagtgggcacttctggcagtgcacctga

SEQ ID NO: 514812 - DNA, 750 bp, Stenotrophomonas maltophilia
atgatctgtaatgtttcgcgtggcgtgctgctggccctgatggtcgcctccgcaggcgccgccaatgcggcatcgacttcgccggtgtcgctgatgagcgcggccgagcaggcttctctgatcgaaacccggtactcggccggtgatggcgcgccggtcgccgcgatgaccacccgctactttgccaatgatgagctgtcggtcagctgggatgaccagcaggtgctggtgctgtgcaaggaagcggcgtacctgaagattcccgccgccaagctgaaggccggtgcgttgaccaccgagcagcggcagatgattacctaccaggcggtgatgtcggggctgggggcgatcgcagccgtggccgaagcggccggtgatgcggtgatggtggccgacgatggcagcgagctgcgccgcacgggtgaaagcaattgggcctacggtgtggagcggtatgacgtcaccacccagcgcatggctgacggcgcgctgcgggtgcgggcgcgcaagaccgaaaccgtgaacaacgccaagcccgcttcgccggatgatacgttcagcacggaggatgatcaggcggctcgcctgtccgagctggcaccggtggggagctggaccgaggcgttgatccgcggcggcccccgccaggcgcaggtggacccggcgatgtcgctgaagggctggatctcgatgggagacgaccaggctgcgacggtgggtgaggcgcgcacgctgcacgagtgcaagtga

SEQ ID NO: 514813 - DNA, 3480 bp, Stenotrophomonas maltophilia
ttgaaggaagaacgacgcaacacgttgcaggccaggcaccgcgcgatcctcagcttctggcacagggttgagttcttcataccctacgatctgcagggccaggtccttgagtcgaaagacgcggattggagcgtacggctgctgtccagggatcagctggagcgactggacccgcaggatctgtggtccccacccgtgccatccgggcgcaggctgagtggattcgatgtctacctcggcattttcgacaaggtccagctggccgacatcacccagcgggtactggccgatacgccgagcgatgacgaatcgctggagcaggacgaacgggccgaactggaaggcctgacctgcgcggccagcctgcgggccaacaccgacggcgtgatgcagctgggtgaaatctcggtgtcgaccgttccgtgggcactgggcacgatctccaggcatggcttgcagggcctggactttgacgccttccaggcaagccttgaagcactcaagcgcgacgtggcaacgttccgcagcaccactgccacccccgccgcacaggatgagggcccgatgccctgcagccccgccgacctgctgcgcctgctcgacatcctgcacacctggtcgggtcatgacccgtccgcgggcgacgcatccgctcccctgctggtcatccgggcgaaaagcgttgaagacaagccgaagccggaacaggtaccaaaggccgcacccccgggatccgataatgcgtcaacgccggaagcggacgacgccgaggacgatgaggcccaatccgaagaggacgcggagatcagcatcctcaacagcttcttcgtcgaggatatcgcgcgcgccatcggcgcactggaccagggcactgccagtgccccgctgcgcgcctacctgagcccattgccggaaagccggcgcgaagacctgtacacaccgaaagggcagacgctgatttccgagcggctgcggccgcggcacatcaatcggggccactggcccggtgatcctgcgcacacgatgagcctgatgcagcagttcgctgtgaacagcatcttcgagcaggtgcgcgactcaggcattttctcggtcaatggcccacccgggaccggcaagaccacgctgctgcgtgaaatcttcgctgaaaacatcgtgcgccgtgcacgcgcattgtcacagtgcgcaacgcccgccgctgcgttcgatgcaacccgcgaagtgaacttcgaaggtgagaagccgtgcaggatctccctgctgaagaccgacctgaccggcttcgagatggtggttgcatcgtcgaacaacgccgccgtggagaacatttcgcgtgacctgccgaagagccgctcactgggcaagcccggaagttcgtgttggcgtagtagcacaggggacgtgacctttgactacctgcggccgctggcccgcaacctgctcgattggaatggcaggggcgcctatgagcgaccggcaacagatagcgatgcctgggggctgatcagctgcgcactgggcaggaaagccaaccgcgaggcgcttgtgcgggcgatcagcgtggccggcccgaggaagggcgaaacgacctcaccgaaggggtacgacccgacccgccaccagtcgctctggcaatggcgcagcagcccggcagccatgagcttccaggaggcccggcaggcgttcgaccaggcggatgcgatggtcaacggactggtcgaaaagcttgatcggctcgcctcgctcagccgtgaaatcagcgacaacgatcaggagagcttctgccggtatacggcttcacagcttcgcgatgcacagcgcgcgcatgagcaagccgtacaggcattcattgcgctcgacagccagcgccgcaggaccgatgaagagctcgcgctgctcaaggcgcaacgcaccctgctgaaggaagagaagcctggctggtgggcccgcatctttgatcggcaacgtgcgaacagccatgcggccacaatggcgcagaacgcagatcatcagcagcaatggaccctgcgccgcctcgaactcgggccgcaatgtgattcagcgcaacggcacctggaccgcaccgcgagcgccctggccgaggcatcggccgccgcgcaggtacgggcgcagcagtggactgcaatggcggaacagctggaacagctgaaagccgaactcggcaacgcatcccatcccgccaccgcggccgaactggagaatcaggactggcagatcaagggcgtctggaacagcgaacaactcaacgagcagcgtgccaacctcttcgtggcggcactgcagcttcaccaggcctggctgcacgaagtcctgcagacaggcggcggcttcgcccagaacgtcattgcgctatgccacctgctgggcggcaagcggctgcaggagccgcgcgatgcgctggccatctggcagagcctgttcatgatcgtgccggttgtctccagcacgttcgcttccgtcgcacgccagttccgccatctgggaccggactcgatcggctggctgttcatcgatgaggccggccaggccgtgccgcaggcggcagtcggtgcactgctgcgctcgaggcgcgcaatcgtggtgggtgatccgctgcagatcgagccggtgttcaccgtgccggtcaagctgttgcaggcgctgggccaaaccagcgcactgcccgcagacatgaacgtctcgcccgacaagacctccgtacaggtactggccgacgaggccaacccgctcggtgcccgcatggagtcagggggctcgccgctctggatcggcagccccctgcgtgtgcatcgtcgctgcgtcgaaccgatgttttccattgccaacacgattgcctacgaggggaagatgatcttctccaacccctgggagccaagcgcagcgcggccacccgctgacagcctggacatcggcggcagcgcctgggtacacgcccccggccgcaccagcgacaagcaggtcgtgccgtgccagatcgacctggtgcagcaggcgttggcggcgctctatcacagcaccggaaccctgcccccggtctatatcatttcgcccttcaaacgcatcaagaacgccctgctcgagcggctgcggaaccaggctgcctggcttggcgcggatgccccgcccggcacgcaggcgccacgcaccgccgagctgcgcacgtggtgcagggagcgcgtcggcaccgtgcacaccttccagggcaaggaagagagcattgtctggatggtgctggggtgtgacacggacacggtgggcgcggcgcattgggcctccagcaagcccaatctgctcaacgtcgccgtcacccgcgcccagcaccgctgcttcctgatcggagacaccgcgctctggggcggtctgcgccacttctcggccgcccatgccgaacagttgccccgcatcacgccggcgcaattcctggatcgcatgtcgatcccccgcgtacagactcgatag

SEQ ID NO: 514814 - DNA, 768 bp, Stenotrophomonas maltophilia
atgcgcattgcctggctgctgctgtgcctgccccatgccgcgctggcggcgccctggctgcaaagcgagggcgtggcgaccaccggccagggcgccgtcctctaccgtgaagtgcactggcggcgcgaggcagcggagggcgccgagcgatgggtgttgtaccaatgcccggacggccagccattcgcccgcaagcatctgccggcaagcacccggccactggcacggggctactcgctcgaggaccgtcgcagcggccagaaggccgaggtggaggccgccggcgattcggtgtcgatctcctggcgggaagatggcacaagcccgctgcggcagggcgagcttgcgttgccgacggatgcggtgatcgatgcgggattcgacgcggcggtgcgcctgcactggccggcgctgctgcggggcgagcgcatcacgctaccgttcctggtaccggcgcgccagcgctacttcccggtacaggtgcggcgcaccggtcctgttcgctggcagggtatcgacgcccaggccatcgaggtcagccttgatacctggtacggcggcatcgcgccgcgcctggccctggtctacgccactgccgaccgccgcctgctggagttccgcggcaccagcaacctgcgcgatgcgcgcggcagctacccgcaggtgacggtgcgcttccgctcgccaccggccgagcaaccggcaagcgactggcaacaggcgtgggcgcaacccctggtggagcgttgcatcgtgacgcccaggtga

SEQ ID NO: 514815 - DNA, 1332 bp, Stenotrophomonas maltophilia
atgactgcggcgaccagattccagttcctcgcaccatcggcgcaacgcacgctcgtgacaggcatcctggcgctcaccttggtggcctgggtgtgtaccgccgccgtccttgccatcggcggtcggcctgatccatccaggctccgcgatgtggcacccctgattgacgggccatggaaatttcatgtcggtgacgatccgcgctgggcgagtgtctcagtggatgattcgtcctgggaaacactcgacctgagcgcgccggccagcagcatcgacggcgacgtggggctgcccaactatgtcggcggatggatggcacacggtcacgccgggtaccagggatatgcctggtaccggcgctcgcttgtgattccagagggcgaccgcgcgtgggacatcctcgggcctaccgccgtggaggatggctacgagctgtactggaacggcaagcgccttggcggctcaggcaggctaggggagccgcctcgtgtcgtgggtacgcggccgatgatctattcgctgcccaccgatgccgcaggcacgcagggcgtgatcgccataagagtattcatgcagcccggcagtgcttccggctctgcaagcggaggcattcacgtggcaccgacacttgccccgcagccggaaagccgtgagctgcatcgcgtgcaatggtggcgtaccgtcgcgggctacattgttgaagtggtcgagccgcttgcgatggccatggtgatcgtgttggcgctgtcgctgaggccgctcagcagccaccagtcgttcatcgccttcgtttgcgtcgcgcttctgctctctgccgtgaagcggctcgacaacgcgatcgtctcctggacagatctgctcagcctgccggcctacacctggttgaacaatgtgctgtggatgccgctcagtctggcggcatgggcgctggcgtggaatcgctgggtgctgccaccttcgcgggcgatcgatgctggcgcccttgttctggcggcgctgggggttgctggaggcgttatgggggctgcctgggccactcaggtctttcgcctcggcacactcgcgctgctcgtgcttgtcgccgcgcggatagcccgcaatgggccaatgcgcggcatggcgctgaccgtgatgttggtgattaccgtatcgcagtacacgggtgaactcggttcgctgggggttccaacgatctggttcccgttcgggattggcgtgacgctgacccagtatgtgtatggaatcgcgatcccgttgctggcggtgttgatcgtgcggacggtcacggcggctaaacgccggttgcagcggccagcagtgtggccacattga

SEQ ID NO: 514816 - DNA, 273 bp, Stenotrophomonas maltophilia
atggatccgccgtcgtcccattaccgctaccccgcatggcagcttggggaagatggccagcccgtcagtcagttgcacgacatcctgacggtcttgcgagagaaagggccgtttacgccggacgatcaggggcgcacgaccggctggggtgaggttgagtggtttatgagttgcaacgctttactggacggcgcgtcccctgaggaggttcttagggccgatcctgccgcggtcttgcgtgcggcgctcatcgaattcaatgaggaagaatag

SEQ ID NO: 514817 - DNA, 1851 bp, Stenotrophomonas maltophilia
atgaccagtgaggccgccgcagtccccaacgacgaactcgatcgtcatgtggacgaggagatcatacactgcctcgatcctcaggctcccagaagcttcttcctgttcgccggagctggctcgggtaagactcgctcgctggtgagggccctagactacctccgcgacacggccggcgcacgcctgagaatccgtgggcagaaggtcgcggtcgtcacctacaccaaggcagcgcgtgatgagattatccggcgcacgcagtttgatcccatcatcgccgtgtccacgatccacagttttgcctggaccttgattgaaggattcaaccacgacatccgggagtggctccgggtttcactcaaggctgacattgaggacctgcaagccaaggaagccaaggggcgcgcaggcacgaaagcttccgcggagcggatcgccgacatcgcgtccaagacacggcgactagcgcgactcgacacgaccaaggccttcgtctacacccctgacggtgacaaccggggcaaggactcgctcaatcacgccgaagtgctccatctggcgggagatttcttgaagtccaagcccgtgctccggcacatcctgcgcgatggctatccctacatactggttgacgaaagccaagatacaaaccgtcatatcgtggaagccttgttcaccttccaggccgcgcacaaggacgaagttgtggtcggcctcttcggcgacatgatgcagcgcatctacggcgatggtcagccgggcttgggcgagaacctgcccgatgactgggccacaccaaccaagcgactgaacttccggtgcccgcggcgagtgatcgagctcattaacaagatccgtgagtccactgatcatcagacacagatccccagtagcactgcgatcgaagggcatgtgaggatgtatgtgcttccctccgaagggatcgataagattgtcgcagagaaagccatctgtgctcacatggccggtcttactgccgatcaggagtggctggatgaggatgcggtcaaagtgctcatcctagagcatcgcatggcggctcttcggatggggtttgatgatttgctcgcagcgctctatccaataacacagtttcggacgtcgttgctggatggctcactgcttgcagtcaatttcttttcgaacctgatcttgccgctctgggaagccaaggacgacaagtttgccaccgcacgaatcatgcgggcagcttcacccttgctgagtccatctgcgctgaagcaagcttcggatcagtttgagcagttgggcagggcgcaagcggccgtggatgcgctggttacactactcgatggtaatccgtccgtgacgtttggtgaggttctaggtaacgtagccgagactggccttttcgcaatccccgacacgctcaatgttgccttggctgccgctgctgctactgaagcgagcgacgctgaggacgagcaggagcgcaacgatcgagacaaggccatcgccaagttcttggcgaccccctttctgcaggtacgggcctacgccaagtacgtcagcggcaaggcgcgctttgatacgcatcagggcgtgaaaggactcgagttcccccgcgtcatggtcgtcatggacgatcacgaggcacgcggctttctattcaagtacgagaagctcttcgggggcggcgctgacgacagtcaaaccgcgtcgacccgtaggttgttctatgttacctgcagccgcgcggaacgctcacttgcattggtcgcttacgccgctaatccggcacggattgcggatcagctcctggccacgggctggttcacgcctgaagaggttttgatcggcccgccatga

SEQ ID NO: 514818 - DNA, 2268 bp, Stenotrophomonas maltophilia
gtgctgataacgatggtcgagattgggaactaccggaagctgttggccgcgcgaattgctttcgctcccgataaaacggtgctggtgggcgccaacaatagtggcaagacctccgccatgaccgcgttgcgtcgtttccttgtcgatacgcgtgggttttccatcaacgatttgtcgcttgcgcattggcaggccctgaatgcgcaagggggggcttgggaggcggcgatagccgcggacacagaattgcctccgccccgcattctggagttcctgccacagctggatgtgtggctccaagtcaagaagggcgagatgcattacgtgcagaagctgcttccgacgctggattggaagaccgcccctcttggggtccggtttcgctttgagcccgaagacgccgtcaagttccagcaggagtacatcgccgcgagaaggaaggcggccgaaatcacggccgctgcggcccaagctgccgaagggaaggaagatccgccccagttggagctctggccgctcaatctgatcgactttctggagcgtcgcctgcggaccttctttaaagtgaaggcatatttgttggacccggcgaaagtcgaggaacccactgatggcgttgcccgcatgcaggctctatccgatgacgccgagcccattgagggcaatccactcgacggcctcatccagatcgatgaaatcagcgcgcagcgaggtttcggggccgccagtaaccgtacgcagcgcgaggatgcaggcgcagatgcacgcagtgcaggtcggctctccacgcagcttcgctcttactatgacaggcacctggactggcgtgataccccggaactgaccgatatcaaggccatggaggcactggagaaggcgcgcaaggccttcgatgacaggctatcggaagctttcgacaaagcactgatcgaactgcagaagcttggctatccgggcatatccgacccgaagctgaagattgctaccaagctcaagctgcaggacggattgagccatgagtccgccattcagtacgaaatccccgcggcggcgggtgagcatatgcaccgcttgccggaagactccaacggccttggttaccagaacttggtctcaatggtcttcaacctgatgagctatcgcgatgcatggatgcgggtgggaaaagccggaacaggacacgatgtaaagcccaccccgccgctgcacctgatgttggtcgaagagcccgaggcgtatctccatgcccaggtacaacaggtgttcatcaggcacgcctatgacgtgctacgcaatgatcctgcccttggaaagtcgcctgatttcagcacgcaacttgtcgtgagcacccattccagccacatcgcccacgcctgcgattttgcggcgcttcgctacttccggcggcttccgccttccgcagggcgcaagacccccaccgcctgcgtggtcaatctctcatcagtcttcggcaaaccgaaccagacggaaaagtttgtggcgcgctacctcaaggcgacgcattgcgacctattcttcgccgacgccgctattttcatcgaaggcagcgccgagcgcatccttgttccccatttcgtcgaacaggccgatgtattcgaatatctgcggacccgctatataacctggttggaggtgggtggcagccatgcgcaccggttcaagggtctggtggacaccttgggcctgacgacattgatcatcaccgacctcgacgcgaaggatccggcttccaacaaagccaggacgccggcgctaggcaagggacttgaagcgcgcaatgaaacgctgcgctcttgggcacccaagaagaccgatgtcgatatcctcatgaagctggaggaggaggagaaagccatcgttcatcccaatggatatgccgtgcgctccgcatatcagacgggagagaaactgaagctcgggggagtcgatgtggagatccacgccaacacgttcgaagacgccttgctctacaggaattttgattttttcaagacccgcaaagccactggcctggcgggcaagttccggtccatcgccgatgccgcccaagacggcaatcagctggcagccgatgtggccgaggcgatcaaggaaggggataaggctgagttcgccctcgagctcttgttcagcgacgacattgagcaactgcaggtgccggcctatattgagcatggattgctgtggctagccgagcagctgaagtgcaaggaggccgatcttgctcccaaggccggtgcagcatga

SEQ ID NO: 514819 - DNA, 2631 bp, Stenotrophomonas maltophilia
atgaaacttcatcgtcttcgcatcgacggcttcaagcgcttccgtgatcctctggagttgggcgatcttgtagagggtctcaacttattcgttgcgcctaatgaatcaggaaaatccaccgttgctgaagcaatccgcgcggcgttcttcgagcgacacaagtccagttcggtcgtcggactgcgaccttggaatgaccactcagcaacgcccacggtggagattgactttgatattgccggaaagcctgcccgtctgaccaaagcatttcttggcaagaagcgctgcaacctggtcatcgacggtcggcagctcgacggacttgcggcagaagaccatctgggcggcctgctcggcttcagctttgccggcaaaggggccagcacgcccgagcatatgggtattccgggcctgctttggatcaagcagggttcctcgcatgacattgccaaaccggtgagatttgccagcgactaccttcggaatgcgttgggcgatgcgctgggagaactggccgccagcgagggcgacgagatcattcgcgttgttgaggaggagcgcaacgagctgttgacgccgtcgacaggcaccccacgcggaacgtaccaggaagcgctaaagcgctcgtcggcaatcgaggcggaactggccatcttgcaggcggacatccaagcctatcggggcggggttgatcgactggcaaaccttcggctcgcgcatgaccgagaggcggctgagcgcccttggcttgtcctgcaaacccaacttgcccaagcccaggcgcagctggccgatgcacaaagtctagcccaacgaaaagcagcacaggacctcgtcctcacccaggcaacagcacacgtcaacgccctgcgtgatcagcttcaggctatggagcgcgaacaggacgctctgagcgtacgccaagcgaacctgaaggctgccgaagactttctgcatcaagccctaggtcaactacacgcctgggagccacgttacgctgctgccgtggaaaccagccaacgggcacgcgaacagctgcggctggcacgcttggccgccgagcgccaggggcagcaaagaactgtcacggacctgaccgcggttgtcgccaacctgcaacacaatcaccacgaagcacagatccagcagaacaaactgaccaacctgcgggccgatgcgctcgcggtagccgtgccgtcggatcagctcgatcgactgagagcctgctctgaagaccttcgtaccgcgcaggccaggttggacgcgatctcgaccacccttgagttcaagctggatgccaccgcgaaggtaaagattggacaggcgccactaagcgaaaccaatcgcctggccatcgcggcccgcaccgatatagacattgacggtgtcggccggatcacggtcgtgccaggcggtgaagacctggaggttctcattgcagcacgtaatcgccaacaggatgagctaaccacgctgctccaatcgatcggggttggcagcctggcggtggctgaagagcgtgcgcgacgccatgtccagcgtgtggccgaggccgaagcctccgcggcggtgctggcggcccatgcgcccgagggactcgctgcattggctgcggagttggcggcgcaaaccgccaaactcgccgatgcccggtccgtcctggatacgttggccgaagacactacctcgtcggcgctcacggtatccaacgccgagtccgaagacctcgccgcccgcgacgccttggaggatgcttcgacggagctcaatgaggccaagttcgccgtcggcgaggcaagtgcacaggccaaggcagcggcagaggaactcgccgctctacaaacaacattggatgatcccctcaggacggccaagaagaccgaagtcagtcaagcgctgaccgatgcgcgggcacaacagagcaccgctcagagccaggctagcgagctggcccagcaactccagacaatcaacctgttagtgctgcagcaggacgttgagcgcctggatcgtagcgccaagcaaacagtggctgcgcacactcaacggaatacggatatcacccgcctggaagctgagttggaagcaaagggtgcgttaggccaagaggaagccgcagcagagaagatgcgcgagcttgaacagttacgccggcggtgtgaggagctcgggcgccgcgcaaaggcgctcgatcacctcctcaaactgctcagtgagaagcgatctgcactggcgcgacgactgcgtgctccgttgcagaagcatctcaatcactatctccagatattatttcctggtgctcacgtcgaggttggcgaagacttgtctccaggggccgtcacccgcgcgggcgcaaatggtgccgaaactggcgaattcctggagctaagtttcggggcccgggaacaactgggcgtggtggcgcgactggcctatgccgacttgctcaaggaggcgggcaagcccacgctcatcatccttgacgatgccctggtacacaccgaccaagagcgcctcgggcatatgaagcgggttctctatgatgcggcgaaccgtcatcagatcctgatcttcagctgccacgccgaggcctggcgagacttgggcgtagccgcacgaagcctatcttag

SEQ ID NO: 514820 - DNA, 1125 bp, Stenotrophomonas maltophilia
atgattactatcctccacacggccgactggcagatcggacgggtgttttcgcagtttgagcccgacgacgcggccgcgttgttcgaggcgcgcttcctggcagtggagcgactggcgagcctggcgactcaacaccacgttgatgccattctcgtcgccggcgacgtgttcgaagcacaaacggtcacggaaaagacgatccgccgtctgttcaatgcgatggcgggctttactggaccttgggtactgattccgggcaaccacgatgcggcgctgacagaatcggtatggacccaggcccagcgcctacacgcggtgccctccaatgtcctgctatgcctggaacccaagccggtggtggtggcggagaaatttaccgtattgcctgcgccattgacacaacgcaatacctacaatgatctgacccactggtttagcgccgccccgaggcaggacaacttactgcggatcggcctcgcgcacggctccgtgcagggcatcctctctgaggacatcgactcggcgaatccgatcgccgctggtagagcagaagaggccgacctggcttacttggcactaggtgattggcatggggccaagcgtattgatgacaggacctggtacgccggcacgccggaaaccgatcgcttcaaagacaatgactcaggtcaggtgttgctggtgtcccttgccggccaaggggcccctgccacagtcacacaggtgccgatcggtaggtatacctggcgccagatagactggcacgcggcggtagacgcggaaatcgatgtactgatcgaaaagcttgaacggattgcaagcgaagacgtcctccaggtccgtgtcgctggcacctgcagcttgaccgggcatcgcaggttggccgatgcactcgctgccacgagcgcaagggcccgtgctgttatctgggacacctcaggattgcggctcgaaccgactgaggaagacatgcaggcgcttcacgccgatggtttcgtgggtgaggtgctgcaagaacttcgcgcagagcagactggtcaggacagcgaactggcacgtgatgccatcctcgccctggccagggtcctggacggccgccgccctcacgcaggagccggcgcatga

SEQ ID NO: 514821 - DNA, 276 bp, Stenotrophomonas maltophilia
atgtcgccaccctctgggcgcgacacactgagctgggcacacgcacgtcgcgtgcagcttcgcctgatccagcccgacaagccgaaccagaacgtctatgtggaatcgttcaacggtcgtctgcgtgacgaatgcctcaacgagcactggcgcccgacgctgctgcacgcccgcacagagatcgagcaatggcgccgagaatacaacgaggaaggccccaaggccgcctacgccaaacatctcgccaacatcgatatcatcaaccccggcctctaa

SEQ ID NO: 514822 - DNA, 945 bp, Stenotrophomonas maltophilia
atgcaaacccataggatgctcggcttggacccctgccgtttctgcaactggagggtagtgcaaatgaatcgagccagcgtagccgcccttcacttgatctcgctgatgctgatctgcggggcgctcagcccaaatgtgtacgcacagacgatagtcacgtacgtgcacaccgatgctttgggaacccccgtggcagagtcggacgcatctggaaatctgatggctgaatcattctatgatccatatggatccgtgctcgtcgcaggtagcgatgatcagccgggcttcaccggtcaagtgtctgatgcgcagacagggctcaactacatgcagcagcgctactatgaacctgcactaggaatttttctcagtgttgacccagtcactgcgtacgacaatccagcatcacagttcaataggtacaggtacgcgaacaataacccctacaagttcgttgacccggacggcagaattgtaagctacgcctacataaatggagtaaaccagcacgctggaaggatgcatatggcagcagtggcaatgtcgcccctggcgcgcgatgaactaaggcgacttgaagaatctccccatctgtacactatagttatctctggaaccgggcttccgtcctataaccagaacaataggacagtttacctgaatcctaatattgcgctacttacaaaagagaagggtgtattgcaaccttcaccagtcaatagtagccacgaaatatcacatgccgcacagcatgatcggacaggaagcataaggctgacgcaggatctgcgtcagctggaagcaaatggggtctctcgcgaagagaatcgtgccaattcgtttgaaaagaaggtgggagaggaactcgaagttcccactcgagagaactatggggacgttaatagggttatcgattgcaagaagacaccgatgacaggttgttga

SEQ ID NO: 514823 - DNA, 615 bp, Stenotrophomonas maltophilia
atgagcatcctcaacgttctgctcactcgtgaccaccttgtcgtcgccgtggataccttggcagaggatgcccgaacaggggagcattccgcgggggcgaagctgcttctgatccctcagcacaacctggcgctggccactcgtggctccacgcagttcttccttcgcatctacgaacttgccctgcaagctagcttccgtgcggacttcacgatggagcagctttccgccgagttggggttggtggtggatcaattatggccgaactaccagaaggcggcggccgaggcaggcctgccgctagagcagctcgggaccgagttagtgctgggcggctggtcgccgaagaaggggcgaatgatggccacggcgtatgccaagagcgacagtcagcgcccgacccgagtccagccgatcggcgggcagctggcatcgcccggcgaaccgctccaggcggtgatgccgagcatgtcccagaccgatttaatggcccatgcgcgcctccagtccagctacctcaatgagcagatgggccggcaggtggcgggtggtcggctgctggctgggttcctgcaaaacgggcaggccgtggtcaaggatctaggggcgatctga

SEQ ID NO: 514824 - DNA, 219 bp, Stenotrophomonas maltophilia
atgaacaacacttcccagcaacagaacgacaatcgcaactcggatgccgataagaagcacccgggtcagcagggccaaacagacgggaaggacctcggcggtgaggatttggccggaaagcaagggcagcaacagcagcagccgaacagcactgagcctgctcagccaagccccggccaggccccaaatgtcggtgtcgatcgcgacaatcgtcgttga

SEQ ID NO: 514825 - DNA, 336 bp, Stenotrophomonas maltophilia
atgaacgtgtacccgcaatccatgcctacaccgaacgctgaactgctcacattaagcaaccagctcgattttgaaactgccgacctaggctgggtcatagagcccgcatgcgtcgcgtccgattctcccaaactcgaaccccccgccccgatggagacgcgtgggccgcaggtgttgtgcgccttcggccggctgtaccgcttggatgtgaatagcgaccaagcctcccgacggatccccaggtgctcccgaactcctttgctactggctgattcgcgtctaccgcatcgcagcattcccctggcgcgccctccgtgcgcaccccgcgtcgcgtga

SEQ ID NO: 514826 - DNA, 726 bp, Stenotrophomonas maltophilia
atgaccgccggtactgccgccacccgcgacgagttcaggcccaagtcgcacgccatcaaccccctcctgccatacgagccgcgcaagctcactcgcagcgaacgcaaccgtcgagaaattttcgtattcccttcgccgcgcaacgcacgcattgtgaccgtggccgaattcctaaacctgacccttgccttgcagttcgagttcgattcgagcctgcagtgctacatcgaacgcccgcgtcgcattgccttgtcgtctcgccaggagatcgacatctcgttctggacccggagtaaacagggcgaggaacgctactacttggcgatccccacttcgggaactatcggaagcaccagcggcacagtctccatccgcgaccgtgatgtgctcgacgcttcggcagagcgccacggcctccggttgacttacatcactgagcgagaactcatatcgtcaatcgccgactgtgccgtccgctttgagctgctccatcacgtgtggacctatcaacgcctggtgtcgcgctcaatcatccaggaacagatcctggcgctgctgaccgatcgcccgcgtcttaccctatcgagcttgatccagcacctggcatttgatgccgatagcgtgcgtgctgtggtggcgggcatggtgcatgccggtagcttgcgcctagtggactacgccgccggtggcgtgcaggcgatggtggaggtctgccatgcgaactga

SEQ ID NO: 514827 - DNA, 1866 bp, Stenotrophomonas maltophilia
atgcgaactgaccgcaccgagctcttcgatgccgagcaactaaagagctggtttaagcccgacgcgtccaccgttaagcctgaattcgttgaccgcttccagcgccgctgcgccgcattgaccgccgtgcttaccggggaaatgagtttgagtcgcgccgccgagtccaatgggctttgccggaggcgtctaaagcgcatgaccaagctcgccccgaggctcgcccgggacggccatccgttcggctatcgcgtgtgtgtgccgtggggcgtctacgaagggagtgacgacaccgacgacgtgcaaatgccatctatcgccgaacctcacgccatgcgtaatctgctacgcgcgcaaccgactatcgcggcctgggtcgaaggctttaccgcgaagttgccgcctgggcggcccccaaaggcctttgaacgtttgctcgccaagatcgtcgccgagctcaaacgcctagatcagcacgcgttctatccgctcaatcagccagaccagggccggagggcgctgcttcgatacttgcgcaaggcgcgcattgatgacatgacgattccgactttggacgaaatgggcccagctctgagcgtgctcgtcgatgcgtttcgtggacatgcctacgatcggtccgagttcgatgcgcactcgtgcgatattgaagctgaacttggagtggcgctacccaatggtggagtggtcaagcgtaggatcactaaactctggttcctgtgcgaggtggaaaccgaatctcgtgcgatcctggcctggaccttgcgagtcggtcgcgcctacaacaacctggatgtagcaagctgcgttgcgcgggccctgcacccatggacgcgtcgtgagctgacgataccgggcctggagtacgcccccggagccggaatgcctagcggcctggctggcgatcgcggtcgtcgacgcgcccggtgtatcgcgatggataatgctaaggcccaccattcgatcagcttcgaagacgcgatgagacgtgcacacggggcgattctccactttgggcgcgcccatgagccgcgttcgcgaccggtggtcgagcagctgtactcgcgtttggaacgtggcatattccgagatctgccgggcggattcgagccggccacccggttgggcgaacgcaagttgcgcatcagcaatttcgccccaggtgctcacccgatacaactgcatctgttcgaagaactgctcgacgtcctggtggccaactacaacgcgaccccgcatccggcacttggaagtttgagtccactgcaattcctacagatgcaacagctacgcgcattcgagttgtcgatgcccgatccagagaaggacgctcgggagatgggcagcgtgctggtgcccttggtcgtgcatggaaaccgcaagaccggcgagctgccgcatgtgaatcacttgtacgtgcgctatcgaagttccgaactggaccagcaatgggagctggttggcaggaccgtattggcacgcatctgccgccacgacttgcgcacgctactgctaatgcgcagcgccacggtgccaattggcttcgtacgtgctatgcctccgtgggatcgcacacctcacgatgagacgacccgcgccctagcaatgcaatggaccaaacagaagggtggactctcgtttgtcggctgcgagtgcgctgtggaggcatacacagatcatctgcgaaagctggcatcccactcccagaaggcggtggaccaactggcgcgtatgcagcaggcgtcaggcgcgaagccgcctcaatccgcgccgctgccggcggttgacctgaccgtacctaccccgcggcgcggctggatcagcttcgacggctcacgggaccactga

SEQ ID NO: 514828 - DNA, 993 bp, Stenotrophomonas maltophilia
atgtcttcggaacagcacccaatcttcgtcccgaacgggtttcacatctcaactcggcccatcgaggcgttcgccaactacgtgcttagcaacgttgagctcgaccaccacggcgcccctgcttacggcggtggtggcttgggaaagaccagtgctcaagagtatcttactcagaatgtgtcgcgatggctggttgatcgggataacaggccaatcggagtggctagtcgtttgatcatgccaagtgggcagcggcgtagcgacggcgccttctacactgcgctcaatactcgactgaacctaacaacatccgatcgtctcacgccacagcgcggcagagaccggatcgtaaacttcgtcaaaacacgatgcggccaggccgacttgccgttgatggtaatgttcatcgacaacgctcagcgcatcacgcgtgccgagtacgactatctcgccgatatcgacgagcaggtgacggatgcaaggttgcgcctgttcatcgtcttcgttcgtcagaacgatgccactggcgtcaacgcgcaggatgactgggcagcgtacccctcccacctgctgcggcggtggttcatgtcgacccacgccttccagcctctaatgggattggcggagatcgcgcacgccctggaccgttacgaccattctgcgacgtggcctaccccggatatgccgttctccaggttcttcgcccgcggagcgtacgacaatggctggcgcctagcggcacaggcggagctgattctcgatggcgtgatcgcgctacgggccgagaacaagttgccgaccagtgatgcctggccaatggctacgttcgcgctaactgttcgccatttgcttgccagtgccgctgaggagcggggtttcgacgagctcacgccaccacacgtgcgcgccgctctgctggcgagtggctatctgcgcctggagtacgtacgggccaacctgatctccagtgatgaggcggcgtaccatgcatga

SEQ ID NO: 514829 - DNA, 1449 bp, Stenotrophomonas maltophilia
atgcatgaagctttgccaagcaggcctgcgcgactcgatttgcttggggccgacttcggcatttacccctacctttccggctatgggctactgcttcgcgtgtgccgcctaatggcattggagccgcgcgagttggtgtcctcccttggtctccggctgaggaaggacctcgatctgctgatgcaggttcaacgcccaggtcgtgtccagatggcgctatgcgctgccgcaggcgtcgacccagcatacgccagaacgtattggctcccggagagttggtcgcctctgcagacctccggtagtcttgatctccccgccccggttagacagtgcccggagtgcgcgcggcatggataccacacagcagctttccagctgccatccatggtcgcctgtccatggcacgagcaggagctagtcgaatcctgcccgcgctgccagcgtccactgttcccactgcttgacggacccgagcggctgggcgcctgtccatgcggttctgacctgttcgatgtggatgtcgcgtcggcgcagatgcggaaattcccctcagcgcatgcgcgaggttggttggaagcatacttgcgttgggccaaggagcagcgtcttactcggtatctggttgcccctgattgcgattatcgatggcgcaagcactaccgcatccaagcgggactacccgatgctccgccgtcgcgcacccccgattttgagatcgaagagttcaattcgaaggggcacgccgagctgaacgagcgtgagtgctgggcgtggtgccacctgggctcggagcgcccaatgacctacgttccgcttccggctcgcgtgctcaccatgctgagcaaggtgagcatagaagtcgttcgcagccttccagggagtgttcaaatcccgctggagttggttcccctccatggcttggactcgaagttggccttgcgcgacaacgttcacacccgtcccgattgtttcatcacgccacacagcccagttcagggcagtgagatgtggctgaatctgtcggcaatagagcccgagattctgcaactgtgtggccgtctcatcgaccgagtgatcatcgcctgtggcattgagctggacgaccgcgccagatcactgcaagcggcgcgggcccacgctttggagcagcttgccgggcgagactgtctactacacgcacttgaaggcctgattcgacgagcctatgcccaaggcctggatgcagttctccgcaggcatattcaaaaccatgtgcggagcggtgtggactggtggttgccatcgatcgaggttcgggctcgaccgcgacatctcgaccagatccgaatcacttggttgcgggtgccatcgcccgaaagacgtcgaatcgtagacgatccactcaccataacaacaggcaagaagccgagcgcgcgaccgtcgatgccatcgtacccaaccgcttcgtag

SEQ ID NO: 514830 - DNA, 1230 bp, Stenotrophomonas maltophilia
atgggccctattgctctgttcgacaaatcattcctccacggtttgaacgttgacgaggccgtgctttttgatcacttctttctgtcggttatctgcccgatcttctttgtcgagacgctggctgacttgggaaaagaaatgaaaaaaggtcgaacagcagagcaagtggtcggatcaattgcgttccgtacaccggagatgcatgggacgctcaacgtctaccatggaaccttggttggccagaacttgctgggtgcaaaggtacccatgaccgggcagatcgtccctcccggtcctatccctgtttctatcaatggcgaacacagtgtccgctatgacccgtcgcctgaggcccaggcgatgcagcgctggcaggattccaattttgaagctgcggagcgagagtacgcgagggtgtggcgtgcccaactcggcaagactgatctgaaagaggtggctaagcgggcgctcgcctatggaattgatttctcaaaggtgaagagtttggctgatgcaaagaatgccgctgactctatgatcttatccttgccggaggcagctcaattgtccttggcgatcgagaaattcaacctcagtgagacgatagttccacacgtgtggcgaaggtggcacgcaacggggcagcgtgcgttggcgagctttgcgccgtacgcggcgttcgtcctgagtgttgacgttttttttgaaattgcattggctactgggaagatatcggcagatcgcgcttcgaacatcaatgacgttgcgtatctctactacctgcccttctgcatgctgtttgtatcatcagacaggcttcatcgagaatgcgcacctctttttatgaggaagaatcaggagtttgtatggggcatcgacctgaaggcggatctgggggcgaatgacgccagcttaaagagttcgttgtctaacgatcaacagatgcggggtcttatggcgttagatgtcgccccccttgatggcggactaacatctgaactctatcggcggcacttgcgtccgcccaagcaacacaattcgatgcctgctcccatgctggatgatgacgcgtcgaagaagttgctggagaaagtagagcgcatatcgtctgcaccgccgtcagccgcagccatgcggattgacgaagagaatatttcatcgatgattctagaacgaatgatcagccgtaggcgtggatcgtggctgcaagttccggattccaaggattag

SEQ ID NO: 514831 - DNA, 207 bp, Stenotrophomonas maltophilia
atgaatatcgataagaatgtggcccaggtcttcaatggctttcttcgtctcgacgagagccagaaaatgaagttcattggaatgcttaaggattatcagtctggtagccagccggcgctcgagtcacttcgagagagtgtcaacgcctctattaccaagatgcagaccggcccctatcgagaatcgtgcgcctgctgcggaaagtga

SEQ ID NO: 514832 - DNA, 804 bp, Stenotrophomonas maltophilia
atgagaaatttgactattgatggccgcgcactaaggctcgatcctagcgtagctcacacgctctgctatgcctatctgcaacgtttttatgtgtctagttgcgataaagattcgccccatctaagatcaaaccaaattatggaaatcccgacacccggcgcgctgaagatggggcgaaaggtcgggctcatggacccaccaatgggcagtctaaatagagagggaactgtgcggatggcggccaatcagagggcgcaacaatgctgggatcgagcatgtgattgcttcgcaactgcaaagatttttgagcgtcgagcaagggcgtaccgttccaagctggatttgctctcctatttgggaattggggttccagcagtattcggggcaatggttgctgcgtggggaaaggatgtcctaactaatcgtccccttatgttcttagtcgcctctctcggtgtggtacaggtagcgataagtgtggcatcaatcatccgaaagtggccggaagaatatgcatacgccaataggtctgccgccacaaactatcagctagcagacgccttcaagacgctggcgccgaatgtcatcattgcatcgccagagatgaacaatgaactgcaaaatttgatcgcacgggaccaggcgcaaactcagaatgacaccgagaagcatgtatcagaatcggaaaaatcttgggggcatagacacgccctgagacagtttcagcgcagttgcgccaattgcaacacagtccctacagacatcaaaccatctagctgcagtcaatgcggagcatttaaatga

SEQ ID NO: 514833 - DNA, 642 bp, Stenotrophomonas maltophilia
atggctggcctcgccacagtcgattcaaatgaaggggtagccgatgcacctccggcgcacagcagcaatgaaacaagacctacgatctttgcattcactatgaattccatccaatgggcgcaggcatcttgcctgccattgcgatgctatcaatacattttctttgtcacggaattcacggcatatttcgaatttttctcaaagccgaacacgactattctccgcaacgttaatcttctattgctatcgctgcagccgcttaccaggacaattttgtttcgccggggtttacaggggacgctcccgcttgtgcgcggtcgtttgggcttggcttcagaggaagcaatcgacgttgccgcaggccagctgcgccccccatccaacgaacttgcaagggggcagactagctccgcaacaacctcgaatgacctcatcgagcccctggtgatgaggacgccctgctgcagaggcaggatttcacagcgcccgaacccatggccgccaacggcagggccggaccgcaaacgtggttcaaaacgtgtcccaggcagctccctgcgccatcaccccgggacatcaggcaggcgccgcttctgcccccgcatgaccgcaatggcgtcacacgttaaactcccgccgtga

SEQ ID NO: 514834 - DNA, 696 bp, Stenotrophomonas maltophilia
atgcgcgcgctgctgaccctgctggcactgctgctggcactgcccgccgcggcgctggagctgttgccgaccaccctgcagctgccggcccagggcggccgcgccgagctgtggctgcacaaccccgggcccggccgctggcagggccaggtgcaggtgctggcctgggatcagcagctggatgccgaacggctgcagccaagcgaccggatccgggtcagcccggcgcgcctggacctcgcccccggcagtacccagcgcgtctggctgctgccagccgagccggcggcggtcggtgaacaggcctatcggatcgtattggcgccgtcgctggcagggctgccgcgctattccctgccactgttccgcggcccagcggcaacaccgctgcatgcccgcctgcagggccgcgtcgaggcccaggcgtcgcagcccgcactgcgactcagcaataccggtaccctgcacggccgcctgcacgatctgcgcttcatcacggcggacggccagtcaacgctgctgacggctggcctggccggctacatcctggctggccatgaacgccgctggcccctgcctgcccgcgccgatggctatgctggaggccgcttccaggcacgcctgcaggacggccgcgaggtcgatctggccactgctgaccctgcaattgcagcaagcgccaccagcgggctataa

SEQ ID NO: 514835 - DNA, 204 bp, Stenotrophomonas maltophilia
atgccggtgccgttctatatgtcggtgatggtgcaggcgggtgcagcggccgcgcattccgcagcgatgccgcgtcatccgcacgaaaccagggaggcgggcgaaggcggtgtggcggcctgctggcgtatcggcgcggatacagcacgccatatgccgcaagggatcgacaagcatgtgcccgcaaatgagtcgtacgcatga

SEQ ID NO: 514836 - DNA, 1536 bp, Stenotrophomonas maltophilia
gtgagctgggcgctgcaggtcctggaactggacgcatcggccgacgagcgcgcgatcaagcgcgcctatgcgaagcgactgcgggtgactcggcccgacggcgatccggaggccttccagcaactgcacgaggcctaccaggccgcgttgcaatgggcgcgtgagcgtgcacattgtggtgacgatgcgctgggcggcctggacgacgccatcgcggtggacagctccgctcaggcggctccgctcctgcaggcccacttcccgcctccatcgccggaatcgccggaatcgccggacatggacatggatatggccaggctcgacgcgctgctgccgttcgaaggtcgacctgctcccagccacgggccagtgcacaccagtgcccccatgccgatcgaggccacgccgaacgacgcggcggagcccgcactggacctgcatcgtttcgcacgtctggtagtggacaccgcgactgacagcgaccccgacagcttcgaacgctggttggcgacgcggcaggagctgtggtcactgaccgacaagcagcggatcggcgacaccgtgctgcagatcctgctgcgtcagggagcaccagtgtgtgcggagaacttcgacctgctggacctgtgcttctgctggaatgaaatcggcagtgacatcgatcccttcgagatccatctgcggcgcgaacagctgcaccactactggcggctgcagccgcacaatcatgccgcactggtcgcctgcctggatcgcccggaagcccctgtgtctgcgcgggaagcccgcgtccgcatggagcgactcacccgaccctggcaccggctggaagccctgtggaccgcctgcatgcccggtcgcgtggaaaccatgcggcgcactcttgaactgctgggcgtgcactacgcccaggatgtgttgccaccgttgaatccagaccaggtagcgttctggcagatcctgtcgcagccgaggaaggtcacgccgctgaagatgcagcttggtgtgctgcgcagcatcctgtgcgccctgatactgctgctggtcctgggggcgctggccctggcggacgacccgtcgcgaccgcgcaaccacggcatggccagcatcggccaggttgccctgtacggtggactggccgtgctcatcggtggctccctgctgctgcccctgggcgggttgatgcagtggcaatgcgcgcctgagcatccacgccagcacggatggctgcctaggctgctgctggtcccactgctggcgatcggggcactgctgctgatgcaggtggccgacgcacgtctggtcggcggcatcctggcctgggcgacgttgctgctggccgcgatacgtctgtgggcacgcagcagcttcgagttcgaacttcgaccatggatggcgttgctcgccatccccatggtgaagatcggggccttggccctgatgatcggtgaagtcgctgcggtcctggccatggccgtgtggacaatcgacgccgtcatccatgcccggccgaagccagaaccgcgcgggtactga

SEQ ID NO: 514837 - DNA, 738 bp, Stenotrophomonas maltophilia
atggacttttccaacatccagattcccatgatcaccaaggatgacctgttaacgacgttcggagaggtggccgaagtccacggctgctacttcagcaagtatgtagtcgcgacgtacgtgctctattgctgcataaggaacgccaaggggcatgacctcgcgattgcgtccaggaatctcgatgatccggaattcgctgccagcgttgtgctgaacgcgccaccccgtctttcacatgatgggccgacgatcttcaaaattccttccaacgcctatgggttcactcatgcgatggcggttcccagcacctatcacgggcttctgaatcggatcgagaagcgcacgggtctgttcctgtgcctgccgatcttccagtgtgagttcaacggcaacgaatcagcagaggatttcaagtggtccacacatcacatcgttgacgtcaacaactggcaaaggaccaggcagccgaagataagcgtgtacttcgacaatccccgcactggcggcggaacggagaaggacggcgccatcgtgagcctggagacactaatagccgagatcaacaaccttggcggagtgagcaatggtttcatcgagatcaccaactatcgcaacgaggtgatcgagatgttgtcgccggaggaagggcgctacgcgctgatccgtaaccgtcaggatgaagagctgatggaccgcgcgagcgtgattgcggcggtggagaaattcgccaccgagtga

SEQ ID NO: 514838 - DNA, 387 bp, Stenotrophomonas maltophilia
atgggtgcaccgcttctcattcgctatagatcgcagctcacccgtaatgtagatctatccaatcatccgcatctcatcatcgcccaatggagctactccgagcacccgagcggcatgccatcaccggatgaattgatagccatgaacaacttcgaggccgccttggtcgatgaggtggagcgcgacgtcctcggcgtgcttgttgcagtcatcacaaacgccggtgttcggaagtgggtcttctatgcgaagaatgccgaacagtttgaccagcgcttcaacactattgccatcaagcatccaagtgagacatccgcaccggagatctggttcgatcctgggtggagccacttctttcaggacatcgttccggaggatggcctctaa

SEQ ID NO: 514839 - DNA, 630 bp, Stenotrophomonas maltophilia
atgaagtcgatcattggcctttcgttgctgctgctcctcaccggctgcggcatccgcacggaagtggtccgagtaaacgtgcccgacatccgggtcaatcccgagcagggcaccacggtcgtggtcgcccccgtacgcgacaatcgtcggtcggaattcctttcgcttgtccccgcatcggaaagggccaggaatgtgggcggagagatccgccagggcaatggcttcaacctcgtactggaatccaccacggcgtctgaaaagacccgcgagatcatcatccaggcgctgcgcaacatgggctatcgcaccgccgaccagtgcgatgcgcaatgccttcgcctggaagcatcgatgaacgagtttgcggtccgggcacccttcaacttctggcgcgccgcagggtgggcgcagcagatggtcgcggatctgtccgtcgaggtgaccacccacgacggagaccgcacccgctcgttcaccgccaagggccatggcaccaacgtgttccaggtggtttcgccggagaactgggagaaagcgctggagcgtgccgtcactgatttcacggcgagcttcaagcagaacatgtccgcgcaggatgcggcagccgcctccaaggcgcaggactga

SEQ ID NO: 514840 - DNA, 1521 bp, Stenotrophomonas maltophilia
atgcctgtcgctgtttccttccgtccccgcgctgcgggctggcgctccctgctgttgcttgcactggcctcagccgcgctgccggcagcggcgcagtcaatggcctgtggtacctacaccaacagcagcggcaccaccacgctgaccctcgagagcgagggccacggatacctgtccggtccctaccaggccaccgaagaactgcgcgtggcccgcgagcaggacgtgctcggcaccggcaacctgagcaccggccgcctggaaaactggttcttcgagaacgacgaccgcaacatcgtcacgccctatggcgagttcacccgccagcgctccgcggcctgcaaggcgatgccggaaccgatcgagggcggctgcgtgatgaatacctccgactgcctggaggcgttgcccgaggccgcgccgccgaagctgcacgcctggtgcgccgaaggcgtgggcgcggcctgcgtgcagttgctggaaacctaccagcagcaggccaaggacgcggccccgaaggccgcgcgggcagagccaccgatgcctgaactctgcaaggaagattccccatcgttcgacgcagaaggatgcgaagcgatggcctcagtggtggcctgggagcagatgggcaagctggtgttcgggctggaacacgcgatggcgccactgctgccggccgcgcagctcgatgaattgtctgcgctgtgccggcagcagcacggtgagacgttctgcagcaaggtagccgatgtactgtggagcgccgggcgcacgctgcaggcccgcgacgcggtgcagctggcctgcgcacagcgcgcggaggcgtccgagtgcgagaccgccagacgtctcgcggtgctggacacggtgccggccacggcgctggcaccggtgccggccatcaccctgccctgcggccgctacgaagccgagcacagcgtgctctcgcagctgaacttcctcgacggcggcgtggtcgatgtcgagggccgcagccagcgcctgcgcgccagcctggaaggcggacgcatcctgatccgccgcgacgtcggcagcgactttgtgctgcaggcgctgcagaacggcaacctgatcggaatcgacagcggcaaccgcttcgcctactaccagcgcaagccgggctcaggcaatgccagctgcgcaccgccggtggccttcgtggagatcccgctgccgctggactgcccgagtctgggccgcaaggacggcgccaaggcctgctgcaccgatggcaagctgctgggctgcaaggttgccggcgaggcactgttcaacgacgagcaatgggccgcatcgctgccctacttccagacgctgtgcagtgcgggcgtacgcgaaggttgcctggcactggccgcggtgtatgcgcacacggcggacccgaaggtgccgcaggccatggcggcgatctgcgcgaaggacggcaagggcacccacgtcgcctgcgatgtggacgcgacgcgcaactggccggcgctgaaggctgaagccgctccctga

SEQ ID NO: 514841 - DNA, 465 bp, Stenotrophomonas maltophilia
atggatgagcgccgcctcaagtacctgtacaccgcgctggcggtgctgtttggcctgcccagcctgttcttcggcggcgcgggcgcctgcatcgccctggtcatgggcgtgatcggactgatctccctggacgcggacaaactctggtttgctgccggcatgttcgcgtggggcgtgtccgcgattaccggtctggtggcctgggttgcactcagcatcttctggctgcgcgatggggcacggggcctgcgcatggcatcgcgccgttggtggtggctgctgggcatgggtgtgctggcggccctgccgttgctggcgatggcgctgtactacttcaccgagcttggtccatccgtgctgagcgggctgttcgccgggccgtccctgtgggtgcctgctggcatgctgatgcttctgtgtctgcgtgggcggcgctctgtccaggagtcctctcaccgtggatga

SEQ ID NO: 514842 - DNA, 429 bp, Stenotrophomonas maltophilia
gtggatgaagccgtgcacaagcgccgggtcgggctgtccctgctgctgggcatcccgatcatcgccgccgcaggcacgttggcggtgcttgggctggtggtggctcccgactgcctgaccgccatcgagctgctgtgggcaggcgctgggctcatcgggctgcttgcctggggggtgttggctggcctgttcctgtggcgcggtcaggccgcgctgtgcgcggcaccctggcccctttggggaggcctcgggctgggcgtgctggccgccgtggggatggtcgccgtcgcggtgcatcgggtgtttaccgatccggacctgattgtgctggcctatctcttcctcggcccgccgttgctgctgccggcggcacatctggcgtggctgcgctgggcacgcgcggccacgctgccgcccgcacctggttga

SEQ ID NO: 514843 - DNA, 639 bp, Stenotrophomonas maltophilia
atggttccgctgaaacacctggggctggccgcactgctgctggctcccggcagcgcgctggccggtaccggggcggcatcgccggcgcagctgttcgatctgcatgcacaagtgatcctgcatggcgatgccgctgcgcaaagggcgctggccgcgcagctggagacggatgacgcaaaggccttcgttgccgcgttgacggctgcaagccaactggatgaagcacccgagctcgcggaatggcccgctgctgcgcaggcgctgcgcaagcggcaggcctcggcgcagtgcaaggccgtggcggtgcgttggccacagggccacgacggcgacgttgccgaagtggcttaccgctgccatttgccggatctgtcgggcctgctaccgctgtatcgccagcatcgtgtgcccttcaatgggccgcatccgccgcagatgtccgcgcccctggcggccgcttacacgacggcgatgcacaacgcacccgaccgcgtacgcagcggcacgctgatcttccagcgcaatggcgatcaccgcgcatggcgcgtgcgcgatccgggcccgctgatggcgctggtggccgacgccttcctgccgttcttcgaatggaacgagcacctgccggacgattccgggtag

SEQ ID NO: 514844 - DNA, 636 bp, Stenotrophomonas maltophilia
atgcgcaagatcctgatcgtggccgccctgctggccgccgccccgttcgcggcttcggccgacgccctgagctacacctacgttgaaggcggctggacgcagctgcagctggacaatggtggtggctcgaagcccaggctggacggcggctacattcgtggttcggtagccattgccgagcaggtgcacgtgtttggcggctacaccgctgtcaccaagacctacaaccacaactattacgacattgcggtgcgcatcaagcagaaggtgcagtcgccggaactgggcatcggctatcacatgccctggaccgatcgcgtggatttcaccgctgatgctgcctgggtgcgtctggacgaagagttcaagatgtcgttcgacggccgccaggtggatcgcctgaaggatcacaccaacgtgggccgcgtcaccatgggtatccgcggcaagccgtcgcgcatgaccgaagcctgggccaaggccggctacatggatggcggcaacaacttcaagggcacctgggtcggcaccgtcggcggccagatcaacttcaccaagacctggggtctggtgggcgagatctcgggctaccgcgacgtcacccagtactcggccggcgtgcgcgccagcttctga

SEQ ID NO: 514845 - DNA, 636 bp, Stenotrophomonas maltophilia
atggctatctgggcaaggatggtcctggtgttgctggcgggcacgttgcccgccacccctgtactggcagcgaagccatctgtcgacattgcatgctcgtcgttggcagccgttcccgcgctgcgcgatgcggaggtgaccgcattgtcgatgcagcccgagggcggtcgttgcgtggtggaggtggaggcggccaacggcaaggcgttgcttcggcagcagcggatgctggaggtgctcacgcaacacgcctgcgcggcgccggcggaggtgagcgtggacgacacgcggctttccctgcagttgcgcctgccgaagcactgcgcggcgcgcggcagccgcgatctgttcgcgggtgagggtgttgcgtggaagccggcacgcggcgtgtcgccgcactatccgccggcggccgtgcagcagggactttccgggcgcagcctgctgaaggcactgattgatgcgcaggggacggttgccgccgtgatcgtggagacatccagcggccatgcgctgctggatgaagcggcggtggacgagctgcgtggctggcctttcgtccgtgccgaagcagagagcacagtgccggagttgaccatcgtgcgggtgccgatgcggtacgcgctggtggagtga

SEQ ID NO: 514846 - DNA, 486 bp, Stenotrophomonas maltophilia
atgagacacggcttctgcctgcgcgcgcttctcgtcggcgtgccgctggtgttggcgatgctgcccgcatgtgcccgtactgcggtgggccatgtcctggacccggtgcaggccttcgtgctggaaacggtactggccgatgagatgcgcgccttccatgagggccgccagacctatctggttccggccgatgcagcgcacgcgggtggcgatgccgaggtgctggccgacctgcgcgcggagttcgaccggttctaccaggggcaaccaacgccgagaaaggaagtggcgcacatggcgatcctggtcgcgcagaccgcgctgctgctgcccgacccgcaggcgtgcagcacggaccgcgtgcgctgcagcgacgccatcatgggcgtccgtatgcgcgatgacgaggcgagcctgcaggccacgctgcgtacgttccagaacgccgggctggacctcaccacgctgggtggaccggcgtcctga

SEQ ID NO: 514847 - DNA, 354 bp, Stenotrophomonas maltophilia
atgcccggcacgtcgttcgccgcttacctctacccggtgttgctgctgctcggcagcaacatcttcatgaccttcgcctggtacggccacctgaagtacaagagcgcgccgctgatgatggtcatcctggtcagctggggcatcgccttcttcgagtactgcctgcaggtgcccggcaaccggctgggcagcgcggtgtattcggcgccgcagctgaagggcatgcaggaggtgatcacgctgctggtgttcgcggtgttctccgcgttctacctgggccagccgctgaagtggaaccactacgccgcgttcgggctgatcgtggtggcggcgtttctgatgttcaaggaatag

SEQ ID NO: 514848 - DNA, 759 bp, Stenotrophomonas maltophilia
atgcgaagcagatcgtccggcgtcagttctcccccctgctgctccccacagggtgcggccatactccggcacccaggcggtctgcaggcgcccggccagcacgcgcgccagcgtggtcttgccgctggactcgccaccgatgaaggccacgcgctgcacatggtcggcatacacctgcggtgcgaggccatggcgatgcgcatgcggatcggtgcgcagctgggtgccacaggcctgcgcgacgtccagcgcgcgctccagccgctcatggcgcaccggtgtgccgaagtgcgtggccaacgcctgcgcgaagccgtctccatagtcctcaccggtgtacaccgcctgcaccggcccaccgaacaggttcaggcacagccaggcggtgaagtcgcgctgcacctgttcgtcatcactgtcctgcggcagcgtgcgcacgggcaaaccgtgctgcgtgcacaatgccgccagtcgcgagtcatccaacaccgccaccgtcgcctgcgggaaacgcgcacgcagccaacgctcgcggcgctcggcactgtagccggcaaagcccggctgcgaccagccgatcaccagcaactgctggcagcgcgtggcggcgaagtcgatcaatcgttcatggccgaggtgcagcgggcagaacttgcccaccaccagcccccgcgcagcacgctcaggcagcggcatcggccgccctggcctcgttgcgcatcaggtgccgccaatggcgcagggccaccagcgcgttga

SEQ ID NO: 514849 - DNA, 1338 bp, Stenotrophomonas maltophilia
atgcgagaggtccaacagaagaagggcgctaggtggaatgtgaaaacgtcacggttggtaaggaagaaagctcagaggcgcacggttgattctgagccaaagactttttcaggcttcatcagcggtaattacgctgccgcccgcaagtcgtttacctttctgagcttatttagtggggcaggaattggcgatcttggtttcacgttagctggcggtaggtgcattggcgcttgtgaggttgatgagaataggcgtgccgtgcatatcgaaaatcacggcgtgccagtatgggctgatattcgacaagaatcagcagcgataatttcggcattcataacttcgaggcctgatgtaatcgtggcgacgccaccttgtcagagctttagtaccgcaaattccgggcgtggtatgcgtcttgatcctgttcatgcgctgaaggatcgccgcaatacactcttcttcgacgcgctccgcgtaatcaatgctcttaagcccaaagttgctgttttcgagaacgttccaaacttccttgagagattagttgcaggtgagcagggggaggtagcgaagccagttaagcagtggcttaaggaggctctctctgattatcatgaatcatcaactgttgggtgtttctctgtcctcggagttccacagcgtaggaagcgtgcgatatgtgtctttgtgaggaaagatctagcagaaatcgacgattgcgcacctatctccgattggtcgagatggcctggaaagttagttagatctccaaggaccgtgcgaagtgcgctgcggggtttgcgcgttcttgatgggcggtctttagaaacatcaactgacagaattgattaccttcacgcggtccctacttacaacgatgtccattattcatggatctcaagtattccaccatttagcggtggaagtgcttgggagaattcctgtgaaagctgtggatcagagtcatgccccgttggtcaagtgcaatgcgatcattgtggcgccagcctgctgaatcggccgcatgttgtcgattcggatggtgtacgcccgattcgaggcttcaaaactagctataggcgtatgttgcctgatgaagtggcgccgacgatcactacctcaagtggccactttagtagtgatataaaaattcacttctcggaaaatagggttctaagtccccgggaatgcgctcgtctgcaaacgatcccagattcgttcagctggccaattgcgcagcgctacaaaaagaattacttggtaagggaaatgattggtgaggcggtgccgccactggtcttctataggctaggcatggcaattggaaaaatcctgaaatag

SEQ ID NO: 514850 - DNA, 2049 bp, Stenotrophomonas maltophilia
atggatacagaacttgtccttagatatagccataacgtcgtcgaacatcttggcttgaagctatatcagaatcagcctacccgcgtaatagctgagctagtctcaaattcttgggacgctgactcaacgctgaccctgataaattcaagaatgcagggaggggatcgttgggttgctgtcgcagataacgggattggcatgagcttggatgtgctcagagatgcctatttggttatcggatatccgaagagaaagacgcctgagcaacgttcaccatcgggccggcctctcatgggtagaaagggaattggaaagcttgcggcatttggcattgcgcgaacagtcgatcttgttactgcgagtgatgggaaggttacctggcttcaatttgatagagatgatttgttggccggggggagtggcgcggttgcatatcaccctaagataattgccgaggaattatcgatagataacctttcattcactgatgaccaaacaggacaggtgaagaattggctgtccataattgatggaagcggtacactggtgctgatgacgcgtctatctatcgttaagtccattggagatcaaagcctgatttcatccttgggcagtagatttacgctctccacctcgagagaaatgtgcgttaaagtcaacggtgagcaggtgcgaagcgagaactcgcttcccaaatttgacaagagaattccggaagatggagttgtcgagtacacccttccgatcagcggaaaaacaataaaacactgggtcgggtttgttaaaaatgctgactggcctcaggacgaagctggggttggcgtctatgcacatggaaagattgcccaagatcgtccgttcgtatttggcgtaaaaggcaatgaaattttcacgcgatatatgcttggttttgttgaagcagattggctggacgagttgaatgctgatattatttctaccgaccgcacaaccataaactgggatgcccccgaagttcgtgagttgttcgattatggtcagaagttggtgaggaaatggactgccgagtttcatgattggagaaaatccaatgtaaggcaagagaataagcaaatacttgatgaaatcgtcaaggttgggcgtgcgtctcaggttacagaggaagaagagagggagattattgacctggtctctgaaattactcctggcctcggaaaagggccggaggcggacgctgcgaaggcgagggttatcggcgccgtctctgatgcgtgggttcaaaagcctatgcgaaagctcgtagtcgatctatggtcatcttttggaaaaaattccaacgctccaccggaagcatttgctgagattgtcgagcgtctttcggctcattcgataccagaatcgctaaatcttgcggtggtttttgctcagcgggcttttgctctatcaaaactttatgactatgttcataatgcaattgagacggacttgcagaagctgattgagcagtttccgtggatcgtggagcctgatacggcggttctaaccgccaatcaagggttgcgaacggttataaggaaggccgaggagaacgggcaaattcctactgggcgccgcagtgcggtcgctggcgtaccaattgcaaataggcccgattttgtctttctttcaagtcccgaggataggcattttgtaattgttgagctgaaaagtcctcaggaagacttaagcatagataactatgcgcagcttaccgactacatgaacttcatgagggcgcactatccggatgctgacattaggggtttccttattggtagatctcctgcttctctcaagtcctacgatgagaaagtgaaaattgttccttggacggatgttcttcgcaaatctcgagcgagaaatattgaacttctttcggcgatgctgatacgttctggaggcaaggccgatgaaagaacggacgaagctcttgacttaattgggccagaggcaaggcaacaaatcgatcagcttgcggagcatcatgaggaattgcgtgccctgatgaatgcatttacaaagaacgagtga

SEQ ID NO: 514851 - DNA, 1098 bp, Stenotrophomonas maltophilia
atggacaagccgcgctacaccgtagaaatcgtcattgccgcacctggtacgccgttggtggacgagagaggtgtacagaaagttgtggacggggttccgcagacatccgggcccgggcacatgttctacgtgctccatgggccggacaagaccacgcggagtttcggcttcgcgccttccgagcatggaagcatgaacgggccgggcgaggtcatgaagaccgacgcggccgagtacaggaacccccattacagccgcacgctcgagatcagcgagcaacagtacaaaaagcttgaggcgttcggcgcgcacccggacaagtacggcttcgatctgcaatacaaggacgtgcgccacaactgcgtggacttcacctgggaagcactgaatcacgccggcatcgaacggaaaagaagtatcgacgtgaacgggctggtcggtcctgccgcgcagcttcttccggatgtgcgcattcccctgggcatgaagggcgaaggcaaggacgcttatcgtccgctgcgcaacatccacggcgtcgaaagcatcgatccgccgttccccgacagcgagctcaaccgtacgaaaaccaacccgatgcccgatcgcacgtggaagcagcacctgctgagcgagaacgacgacatgggtgagcgcagcggtgagcgattggccaacgacgcacgtgcgccgggtgatgcgttgcatccgctggaccagcgtgtgcgtgcggcgctgggggaggccgccgatcggcaggggctgccgccgggacagcagcccgaactgctggcgggccacctgacgcgcttggcggtgcagggcggctacaccgagcgcgacaccttgcaggtggccttcagcagtggcggtgcggcggattcgccgggctatgtctttctgcaacgcacgggcgagaccgcatcaccggacccggcggcgaaccgccagcgcctttcgctggccgatacccagcagggcacggttgaagaggtgtaccagctcgccagcgtgcagcatcagggccgcgaggccagccgcgtcgcgcaggacgatcagctgcagcagcagacgcagcacgcccagccgcgaatgggctga

SEQ ID NO: 514852 - DNA, 723 bp, Stenotrophomonas maltophilia
atggcacggttgtttggatccgaaatttccctggtaatcctgatggtgatgctgtatctggtcgtgcggacgctgctgccactgctggcgttcgtgctcgcgtggtggctgctgtcgcgcctgatcaaggcccgcgtcgcccggctgccacgcgtcccgttgaacctgcccgagcacagcagcagcccccgcaggaaggatcgccgcatctacgcacgcaaactgcggcgcaagccaggcctgcgcacggcgagccgcgcggccaccgcaccccgcagctggcacttcgcttcggctgtcctctcgctgatggtgctgatcgccaccgtgatcgccgtgcccgatggcgcacgcttccaggtaatggtgggcaatctcatcggttatgcgggaaccgtcgtcgaggtgcaggttcccgtagccgcacagtccgtcgtgctgcaggcatggcaacccgcgctcgcacagctggggcggcccacggcgatgcgctacccgatcgctcgcaccggcggcgagcatgaagcccatgcggtcgtttccgtgcaggtacggctgcagggtgatcgcatgcaggtggccatcgcgcgaccggtggacgctgaaatgctgcgtgcagagctggcacggctggcagggttgccggtcgaggcaatcaacgtgcagcagcgcgacatagcgccgtggagggaggcaggctggcagccactgtctcgcctgtag

SEQ ID NO: 514853 - DNA, 546 bp, Stenotrophomonas maltophilia
atgagtacggatacttcacacaagcaggccagcaagttcatgagcctggtgttgcgccacgaaccagagaagatcggcctgcagctggatgcgcagggctgggccgatgtcgatgatctgctgcagcggatggccgatcatggcgtggcgctggaccggcacaccctgcaggcggtggtcgagaccaatgacaagcagcgcttcgcgctgagcgacgacggtctgcgcatccgcgccagccaggggcattcgatccaggtggatctgggcctggaggcgctgcagccgccggcatggctgtaccacggcacggtggctcgcttcgtcggtgccatccgtgagcagggcctgcggcctggcgagcgccagcacgtgcacctgtcgctggatcgccagaccgcgcagcaggtgggcgcacgccgcggtgcgccggtcatcctcagcgtgaatgccgggcgcatgcatgccgatggtcatgtgttccaccgttcggccaatggcgtgtggctgaccgcgcacgtgccgccgcagtacatcgccggctga

SEQ ID NO: 514854 - DNA, 3096 bp, Stenotrophomonas maltophilia
gtgggttacggaagcgcgataagtaccagcggtgaatacaatactgcggttggctacaatgccgtgataggcaatggctacagtacagcgattggtgctcgggcccagacgagcgggatcggcgctactgcgctgggtaacaacgcactcgccatgcaaaccaattcagtggcgattggcagcggctcctacgctagttcgtccaattcgattgctatcggtgccaattctgttgccgatagtagctataccgtctcggtggggaacagcactacaaagcgaaagatcgtgaatgtcgccgcaggcaatacttcatatggaagctctgatgcggtaaccggtgggcagctatacgaaaccaatcaagccgttagctcggtgaggaatactgcgaattcggcctactcaaccgcaagtacggcccagactacggccaattcggccaggaccaatgccgatagcgcgctgagcaaggcgaacacgctgggtggattgctgagccaaacatctgtgtctgggaatgtccgcctgggcggcggcaacagcggtgccgttctggacgtccgcaacagcgctaacgccaaccgcaagatcaccggcgtggctgatgccacgctcagcgccacaagcactgaggccgtttcgggcaagcagctcaacgccaccaacagcaacctcacggccgcacgatccgtcgctgactccgcgaaggtcaacgcggatagtgcgttgtcgaaagccaacacgctcactgggctgctgagtcaggcgtccgcctcgggcaacgtccgtgtgggtgcaagcaatagcggcaccgtactggacgtccgcaacaatgcaaacgccagccgcaagattacgggcgtggcagatgccgtgctcagtgccacaagcactgaggccgtatctggcaagcagctcaatgctaccaacagcaatgtcacgaccgcccgatccgttgctgacaccgcgaagaccaatgcagacagtgcgctgaccaaagccaacactctctccgggcttctgagccagacctctgcctcgggcaatgtccggctgggcgagaaaaacagcggcaccgtactggacgtgcggaacagcgccaatgcgagccgcaagatcaccggtgttgtcgatgctgcgttgtccagcaccagcaccgatgcggtgacgggccggcagctcaatgccaccaacagcaacgtcagcaccgcactgagtgacgccagcgcagccaagactactgcgaacaccgctctgacccaggtgggaacactcaacgggctgctcagccagggcagtgccagcggtaatgtccggatcggtgagaagaacagcggcaccgttctggatgtgcgcaacagcgcaagcgtgaatcggaagctgactggcgtggctgatggagtggtcagcgccagcagctatgaggccgtcaatggtaggcagctcaatgccaccaatgacaaggtggcgatggtggagggcattgccaagtctgcgggagcggaagctgccgcggcaaagacggatgcagccaaggcgctggccgagacagcagtgctgggcgggctggtggcgcaggtgtctgcgtctggcagcgtgcgtctgggtgagaagaacagcggtacgacgttggatgtgcgcaacagcgtcaatgccaataggaagattagtggtgtggcggatggattgttgaacgcaagcagcaatgaagctgtgtctgggaagcagctgtactcaaccaattcgcgagtattggctctggagggcgtaagtcaatttgtgagtattggtgtggccccctccagcgaacgtgctgatgccgggccagttggcgttgccttaggtaattcggctaaaacggggagcgaaggtgggaccgcagtgggaacgcacgcgaagtcactgggcaggaattcggtggcagttgggcgtgcttcaaccgtgcatgaaggttccgaaaatggcttcgccctcggggttggggccgaggttggcattgcggaaggtggtgcgaggggaggggttgcgattggcgctggagccaaggttgggaaaggggcagatggctcactggcgattggtgaaggctcgcaagccaatgaggctggagttgcatcatttggaagtgcaactgcttatcgccgcctagtgaacgttgctcgaggcaccgccgaccacaatgccaccactgtctcccagctcaaggattccctcgccacccttggcggcggtgccggtctggacggcaacggaagcatcatcgccccgacctacgcggtgcagggcggaacgcagaacactgtcgaagatgcgctgatggcactcgatggcgccgtcatcaccgccggccgccgtgcagacaaggtagaaagtcagctcagctcgatcttccaggattcaccctcggcccgtgccgacggcatgagccagatcgcgctgaatggcgtgaacggcatggtgctgaccaatcttgccgacggccgagtggcgccaggaagccgtgatgcggtcaacggtggccagctgcattcgatgcagcagcagctcaacggccgcatggatgggctggagcagcgcatcgacgatgccccgccgccgcgtgcactggcgtcgtcctcggtaccgaagccacaggccgaagacacccctgtggtaccggaaggcaaggactcccagcaggtcgcctcggtaggcgagggtgacaagcccacaccgcagccgaaggccaacaaggacgactcgccgaagccgcaggtcgacaccgctgagctggagaagatgctggcccgcgccaacgagtacaccgatggggcgatcagcaacttcgagcgccgcctggacaagatggacaagcgcttcaaccgcatggcggcgatgagcagtgcacagacggcgatggcgatgaacactgccggcctggccacctacaaccgcctcggtgcgggcgtgggctacagcgagggtgagtcggccatggcggtgggctaccagcgtgtgctcaacgagaagggctcggccaccttcagcctcaatggtgcgttcaccaacagcggtgagcgcagcatgggcgtgggtgtgggcatcggctggtaa

SEQ ID NO: 514855 - DNA, 1242 bp, Stenotrophomonas maltophilia
atgactgagctgctcgacggactgtggcaggccagcctgtggctggcagtgggggtggtcctgctggcgatgctgcggccattgctggtgcggatggggggcgctgggttggcctaccgcagctggtggctgctgccgatgctgctggtggcactgatgctgccgttgccacaggttgcgttgttgcagcaggtacccacgctgccgctgaaagtgatgccgggggccaccgacggtggagcgggtgggtcggtgcctggggctggactgttgctgctggcctgggcgctgggcatgggcctctgcctgctgcgcgacctgcgcgcacagcgtcgtttcgaacgatgcatgggcccactgaagccgcgcaccgatggcagctggcaggccagcggcgatcctggcctgcccgcgctggttggcctgtggcgcccacggatcgtggtcggtcccgacttcgaccagcagttcactgcgcaggaacagggcctgatcctgcagcacgagcacagccaccggcgcaatggcgatcactgggccaatggggcgctgctgctggtgcgcgcggtgttctggttccacccgctcctgccgtgggctgcgggccgcttcctgcgcgaccaggaactggcctgcgacgcccgcaccatggccccgcagccggcgctgcgcggcctctacgccagcacgctgctgaaggcgcagctggtccatccggttgcgcccgcggtctgccattggcgcagccaacccgtgttgaaggagcgtgttgccatgttgaagcagtccaagcggaaggcattgccgtgggtgtccggacaggtgctggtggtcgggttgtgcgtgggcatgggagcggtggcgtgggcgagccagggcggcacggccgggagtccgaggatcggtgtcgagccgtacgcgactgcggaagaagatgcggccaaggctggactggatcgtccgatccaggtcgacaagatgccaccgccgtcctatccgaagtctgcggtcgagcagcgccaggtgggcgtggtgaacctgcgcgtggaagtggacgccaagggccatcccactgacgtccaggtgctcagtgctaccaatccgggtgtgtttgatgcggtctcgattgctgcggcgcgcagctggacctatcggccggcgatcaagcatggccagccggttgcaggggcggtgaagattccgatcaccttcgccatggacgacgctgaggacgcgaagtga

SEQ ID NO: 514856 - DNA, 558 bp, Stenotrophomonas maltophilia
ttgaacacccccaccccgcgcatgggcgcactcgccatacccctgctactgtctgcctgcatgtgcgtggccggcaccgcgcaggcgcgcgatatctctgtcaccgatggcaagggccattacctgccctacaagccggggatggcactgcccaagggcgtagccgcgccgctggacggctacagccacgccgacctgctgctggcggccgcgcagccgatcgaggcacagatgaaagcgcgcggcctcgatccgacgctgacccgcgagtctctgtttgcaatggccggcgtgctgaacgaggcgctggaagccaagagtgccgagtaccagatcgccaccgatctgcagaaggccggcgattcgccaaaggcccgccatgaagcagtgactgcgctggcgaagcgctttgggctgctgacagtcgatgccacctacgattcgctgaagggttcgccactgttgtcgctcgacaagcagttcctgaacgactacatcaacaacgccggcaacggtgtggccagctacatcatgaagctagataccgcagccaggtaa

SEQ ID NO: 514857 - DNA, 597 bp, Stenotrophomonas maltophilia
atgagcagacccccagcaagcccccctgccccgcgcggactgaagctgaccccggaccagctgggcgccatggcgtcttcgccgcggttggcgatcctgcagcgcctggatgtcgacggccaggccaccgcgcgcgagctgagcgagcgcctggggcgcccgatcaccgcgctctatcaccacttggagcggctggaagcggcgggcctggtgcaggtggttgaacggcgcagcaccggccgccggcccgaagcggtctatgccgtggtatcgcggcagctgtcttcggccgacgcgctgcgcacgccgggtgggcgcaggaacctgatcaaggtggccagcagcgtggtgggcgccagcctgcgcgcgttcgcggcggccgccacgcaggcggcggcgtgcttcgagggaagccagcgcaactgcaccgtgcgccatctcgctttccgtgccgacgctgcccagttggcgcgcgtcaacgcgctgataggcgaactcgaacaggccaccctggaaggcagtgaagcggccggggatggccaacccctgctgttgacggtggtgctggcctcggtgccggataagcgcaagagctga

SEQ ID NO: 514858 - DNA, 1338 bp, Stenotrophomonas maltophilia
atggcacggcgcatcgatgccgatatgcagcaggtcatgcagcgcttccaggtgcctggtgcggccatcgcggtgaccgttgacggcaagcctgtctattccagcgcctacggcctgcgcgatcgcgagcgcgcgctgccggcgcgtaccgatacaccgttcgagatcggctcgatcaccaaacagttcaccgccgcagccatcgtgcagctgcaggaagcgggcaagctgcagctggacgacccgctggcacgctatctgccgcatgcgccgcacgccagcgaggtgaccctgcgccagttgttgacccataccagcgggctgcacgactacttcgacgggccggatgcggaagtcgacgctctggtgacccaacccatcgacttcgaccacctgatcgcgcgcattgccgaccagccgctggactttgcgccgggcacgcgctggtcgtactccaataccggctacgcactgctcggcaaggtgatcgaaaccgtatcgggcgagcgctaccgtgactacctgcagcagcacctgctcgcgccgctgggaatgacgcacacctttaccctggccgacaccgaccgcctggccggcatggccgttggctaccggcatgagcaaggcacgctgcagcgcgcgccgtacttccacccggactggagcggcgcggccggcttcctggtcagtaccctggacgacctggcgcgctgggacgctggcctgggcagtggcaaggtggtgtccgcagccggctacgtgcagatgaagacctccttcgccaccgccgatggcaagcccgtgggctacggcctcggcctgttcgtggattcggtgtacgggcaggcgcgggtcggacacaccggcggcacgcagggcttcaccaccgccgatatgtacttcccggatcttggcctgcgcatcgtggccttcagcaatctgggcgacaagaaacccgaggccggcatcaccatgaccaacctggtgttcgccgcactgcatcccgacatcgtcgcggcctgggaacggcctgttgccggcgaggttgccgccattggcgaaagcgcgaaggcatcgttccgccagctgcaggacggcaccgattacagcgccttcagcgacgacctgcgtggcaagctggtggccggcatcggtgccggcatgatgcgttccctgggcccctacggcgcaccgaccgccatggtgttcaagggaacacgccagggcgaaaaaggaacgatgtacagctatgtggccgagttcggcccgggggcgttcatcggttacacggtacggctggacgagaaaggccgtgttgcgggattcgcgatcgaatga

SEQ ID NO: 514859 - DNA, 855 bp, Stenotrophomonas maltophilia
atgcgtgtcacccggcaattcctccttggccggcaacgtgaccgcagctgtcgcccgggcctggccctgaccttcgatgtgatggccagccaccgccagatgcgcgtcggtgttgccgtcgacagaggtcttcagggacgaaccactgaggcccgccaacgccttggcacctgcatcgatcgaagcgacctggcggccggcgatgccgaccttggccttggcgcgtgcatcggcgccgacacccagcggcgcctgcgcgccgggcgcaacattcgctgccagcgacgcatccacctgtgctgccttgcccgcagcgttgcccaggccgacagtggcgcggacatcggccgccagcgccggcacggccacctgcttcggcgtggtgtccgctgccagcttcacctgcacggtggccggcagtacgtcacgcaccaccggcagcgacgtggtgttcaactgcaggcccaggcgagcgtccgcactgatcgcagggctgctctgcgcctgccgtgcagcggcagccagggccacttcggcgtcgaccttgaccggcatcggctgcgcatacttcgccgcaagcgcttgcaggtcacgcaacgattgattgctttccgatgcccctgcgtggccgctggccagcgcgcacagcagtgccagggccagggcggtgggcatcagcaggaaggcgcgcggatcgcgtgcggcgctgccgccgctgtcgccggtggccagttccgaggccacaaccagagcattgagctggcggttccatacacgccggtagatgcggttcatgagcatttcccccgtaggcgaacaactggaatgtcagtggacttgccgttaggcaggtga

SEQ ID NO: 514860 - DNA, 447 bp, Stenotrophomonas maltophilia
atgactagccccgccggaatagccaggcgcgcgatcgtcgtgacattctgtagcgtgctcagcgcctgcggactggtgatggacagttcgttcgacacccagcagcaggccatcgacgccgacatggtgaacaagggatggattcccagctgggtgccccacgaggcaaccgacctgcgcgaggtgcacgacctcgactcaaacaccagcgcgctggcctttaccaagccccctgcgataccactgcagctgcctgcggattgccaggcaaccacattcaacaacagcgatcctgttgcgttcgatcgatactggtggcctggcaacgcgacgctcagcgcgtcgtaccgcgtctttcactgcgcgcccgaatccggaaaatcagtcttcgtcgccatcaacaggaccgaagaccacgtgcttttctggcgaacttacgcgcggtga

SEQ ID NO: 514861 - DNA, 318 bp, Stenotrophomonas maltophilia
atgcgcatccatcgacctttcatcttcatcgcaagcctggccctgatggcgttgtgcgggctgatgggcgcactggtgctcatctatggcttcaacgaacagggcctgcgctgcggcaggctgtgctcgctggagatctccatccgcctgctctttggtgatcgcggattcgaaatgctggtggcgatggggctctttgctgcggcgttgatgtgcgggagtatcgcactgcggcccggcatgaatgccgggccgcctcgcaagcaggtgcggcgccgtgggcgcaagcaccgacgatcgggtcggccccggtcgtaa

SEQ ID NO: 514862 - DNA, 390 bp, Stenotrophomonas maltophilia
atgaatgaagatttcaacgcgctcgaatggtgtgacgccaccttgctggccatcaacatcgacagaagcaatcctggcgtatgtgatgaggtaaaggtgcaggtgcgctggccggatggccggcaggcaaccgtttgcttcccggaagcctacgggtgctcggcgctcatgaacttcggcgtgctgggtgaggagggaatagagttcgccagggtcgacgatgacgagccgggactcgccgatcttcttgatcgttggaaggcggtcggctatccgctgtccggcctgaagtgtttccgtatcgagaccagctcgaccggaagcgtcattctcatctacgccaggacatggcggatcgagcatctgccgatggtggatgcagtgccctga

SEQ ID NO: 514863 - DNA, 369 bp, Stenotrophomonas maltophilia
atgaacggattgattcgaaagtgttgtggcctggctgtggcgatcggactcggagtggcgctgttcccgcctgttgtggttggatcggaagcaattcagacctcagagtcgactgtgatttctgccttctccagggcctgtcaggactttagccagaagctgaaggcacaagtacatggcactactgggctggatcgccacttggcggatattgataactacaaggcaatcgtctacctggagggctcaagagtggttgtgcagctcatgccgcttccctatggcaactccagtgttcgcggaggcggcgggaagtacatcgtcgagggcggtcccgatggcgaaatgactttcgagccttaccgctag

SEQ ID NO: 514864 - DNA, 732 bp, Stenotrophomonas maltophilia
atggatatgcaggcagagggcggattcgattcgccagacaggacgaagcaacaggaactgaccttccactggctctaccagcgggtgcaagggctggttgaacatagcatctaccgtaaggcgggcagggtggagacctggtcgtttcgcatcggcatgggtgcggcgatcatcggcatacttactgctcagcttccggatcggtggttgcctactggcgcggtactccaggtggttattgcctgccttgcaatcgaaatcgggggcttcgttgttggaggcgccttggccgcccgcagaggcatccaccaattcagtcagccacggctgtcgcacgccaaggagatggacggtgacttcgcccactggcaagcggtggttaccgagcttcgccgtttccctcgcattgagcgcgagcgccgcctcaagtatgtcagtcagctgcgcaacaacatgatcgagcgcatgggcctgatgtacggcgggctgcaacgccttgggccattcccgctgctcatagcgttttatttgcagttccggggatggaaatggggcgactgggcaggcgccttcgacgtcagcctggtcggcgggttgttgatcctcgccatggtggttctgtacctgttgggctggatgctgatcagcatgcgcatccgcctggacacctacgtcgccttgctcgaaggctccatccacgaacctgagccgccgcagcccgcgcctctgtag

SEQ ID NO: 514865 - DNA, 531 bp, Stenotrophomonas maltophilia
atgcacggcgagcgccggatggagatcgtgccagcgggcagctcgcatgggcgctttcagacggtgactctcgcacccgtcctgctgatgccagaggtggccgcaacgctgggcccgggcattggcgagcgcctcaaggctgccgtaagcagtcagctgcagcggcagatcgacaggcgcctgggccggagcctgaccggggcagggcagccgggaacagggctgttgctgcttgcaaggatcacctcggtgaaggaggcctctgctggcctgaacattgccacatcggtccttgtggggccggtaagcaaggggcggctttccctcgagatcgaggcgatcgacgctagcactggcaggcaggtagcactcctgctgctggccgacgaggcggacatgagagacatccgaaaaagctacacaccggatggccatgccaaggcgcttgccggtcggcttgcgattgatgtggtggaattcattgcgccgatggtgagaccacgccagcctgtttcaccatcggccggatga

SEQ ID NO: 514866 - DNA, 1530 bp, Stenotrophomonas maltophilia
atgtctattggaaatcgagttgcctgcctgtcgattgctgtgctcgtggcgctgtcttctggctgcgcctctgtggcccccaggaccgagatccctgacgctgcagcccggcatcatgtgggccaggcccccacgccggcggcgctggacgcggatgtcctgcccgggacgcccaacaggcaatggtggaaggacttctccgaccccaacctggatgcactggtgagcttggccatgcgtgggaatcatgacctgaagtctgcccttgccgccgtggtggaagcgcgggcgctggcaggcgcggcgcgcaaggactatctgccgagcggtgcgctgcaggccaaggccgaagccatgcagtccgcccagatcgaagcggatccctatcgccaggatcttccccgccccccttcccagagactgctgtccgccggacagatgttctcctgggaactggatctgttcgggcgcattggcaccgccgcagccatggccgatcgcaaggccgatgcggcggcggctgacgcgaggtcggctgccgcagtgctccaggccgagattgcgaagaactacttcctgctcaggatggaccagatcaacctgtcctctcttgagcgcgaggttgagctgagcaaggcccgcgttgtgcgcgtgaaggcgcggtatgcggccgggctggtcgatcgcagggaggcgcttgcggtcgaatccgaacatgccgagctggtggcgcaggaggcggcaaccgttacccggctgcaggcggacagggccgcattggcggttcttgcgggccgctcgccgaccgcgcgggacgacacctgggaggcgttgctggccccggctcctctgccggccccgccgggtcttgcatcgcttgcgcagccgaccgacctcctggcgaggcggcctgacgtcgccaaggccgatgcactgctgcgagcaagccttggcaacgtcgtactcgccgagcgcgcgcaccttccgcgcctcacgctgaatgtcttcggcggcatccttgcaccgttcggttcgctgggcgattccagtgcaaagcgcttctctgccggcccggagcttcagtgggagtggctgagctttggccggaaaaaggccagggaggaagccgctcgcgccggcagcgatcagagctggcatgcgttcgagcagaccgtgctgactgcgctgaaggagagtgaggactccctgcatgcgtggacgagttccaacgtcaggatgcaacaggcggtgaatgccgaggcactcagcagcagatcttcggcctatgcttcttcccgcgtggacgccggaatcgaaccgaaggatgccggcctgcagcagcaggcgctgcacgagaaggcgcgcagagagcttgcggcggcacaggccgggctgctgatggcccacgtgcaggtgcaactggcactgggggcatggcagcccgagaaggcggacccggagattgaattcggcaggcccatcgcttcccggaagagcgccgaaagcgaagcatccgcggcgcatcactga

SEQ ID NO: 514867 - DNA, 2511 bp, Stenotrophomonas maltophilia
ttgcagcccttgactacccctgcccccgtcagccgggaactgatccgcctggatgcgcgtgcgctcgacaaggccgacgccatcgcccaggtggcgcagatgcttgtcgccgccggctgcgttgcgccgggttacgaggcgagcatgggccggcgcgaggcgctggcgaataccttcctcggccatggcgtggccattccgcacgggctgggtgaggaccgtcacctggtgcgccgcgatggcattgccgtgctgcagttcccgcaaggcgtggagtggaacccgggccaggtcacccgccttgtggtcggcattgccgcgcagtccgatacccacatcaccctgctgcggcggctgacccggctgatccaggatgacgcgaccctgcagcgcctgttcaccacggccgatgcgagcgagatcatcaacgcgttggctggcgatgtttcgaccacggctcccactgcgccggtgacggacctggccgagcgtttcgactggaccatcgcctaccccagcgggctgcacgcgcgcccggccacgcgctgggccgagacggcgcgcggcttcgcggcccgcgtacaggttcgcgcgggcgatcaggctgccgatgccaaaagcctggtggcgctgctgcagctcggcttgcgtcatggcgacgcggtcagcgtgtctgccgagggcgccgatgccccagccctgctggccgccctgcgcaaggtcatggacgggctggtggcacaggaaaaggccgatgccgagcgcgcagcgcagcgcaaggccgcgcccgttgcgggctggaatccgcccgacgcacaggcggcgatcgtcggcatcggcgccagccctggcctggcgatcggcctggtgcatgtgctggccagcacgcaggctgaggtcgccgaccgccccacccctctcggcgaaggcggcgcacacctgcaggacgcgctcagccgcacccgccaacaactggccgcgctgcaggatgacaccgagcgccggctaggcgcttcggatgcggcaatcttcaaggcgcaggccgcgctgctcgacgacaccgatctgattacccgcacctgccagctgatggtcgaaggccatggcgttgcgtggtcctggcaccaggccatcgagcagatcgcctccggcctggcggcactgggcaacccggtgttggccgcgcgcgccgccgacctgcgtgacgtgggccggcgcgtactggcgcagcttgatccgtctgcggcgggtggcggccttgccgacctgcctgcacatccttgcatcctgctcgctgctgatctgtcgccgtccgacacggccaacctcgacaccggccgcgtgctcggcctcgtcaccgcgctgggcgggccgacctcgcacaccgcgattctctcgcgcacgctcggcttgccagcgctggttgccgctggcgcggagctgctggcgatcagcgcgggccgcgaggcgatcatcgatggcaacagcgggcggctctacctgtctccgtccgaggcagatctcgcctcggcccgtgcgtggatcgccgaacagcagcagatccgcgagcgtgaagcggcgcaacgcgcgcagccggcacagaccccagacggccaccgcatcgacatcggcgccaacgtcaacctgcccgagcaggtgccactggcgctggagcaaggcgcggaaggtgtcggcctgatgcgcaccgagttcctgttcctcgaacgtggcagtacgcccagcgaggatgagcagtacgccacgtacgtggcgatggccaaggcactcgacggccgcccgctgatcgtgcgcgcgctcgatatcggtggcgacaagcaggttgctcacctggagttgccgcgcgaggaaaacccgttcctcggcgtgcgtggcgcgcgcctgctgctgcgccgccccgacctgctggaaccgcagctgcgtgcgttgtatcgcgcggcgaaggacggcgcacgcctgtccatcatgttcccgatgatcacctcggtgcccgagctgatcgcactgcgcgccatctgcgaacggctgcgcgccgcgctcgaggcacccgaagtaccgatcgggatcatgatcgaagtcccggccgccgccgcccagagcgatgtgctggcccgccatgccgacttcttctcgatcggcaccaacgacctgacccagtacgtgctggcgatcgaccgccagaacccggaactcgccgccgaggccgacagcctgcacccggccgtgctgcgtgcgatccgcgccacggtggaaggcgcacgcctgcatggacgctgggttggcgtctgcggtggcctggcgggcgatcccttcggcgcaatgctgctggccggcctgggcgtggacgaactgtcgatgaccccaaacgacatcccggccgtgaaggcacgcctgcgtggcaacgcgctggccgatctgcaagcgctggccactaccgcgctggactgcgaaaccgcggagcaggtgcgtgcccttgatggaacgcacgcatga

SEQ ID NO: 514868 - DNA, 930 bp, Stenotrophomonas maltophilia
atgtcttccccgaatgattcccgctcgatcctggtgctgggtgccggcgagctcggaatgcccgtcattcgcaaccttgcacgattggctgggatgcatgatgcacgcatcagcgtgatgctgagagaagcctcgatagaatccgtgcttccggagaagcgcgctgtaattgatgaaatacgctctttgggagtgaccatcgagccaggcgacctggtggcttccacgatcgaccaactggccgtgctcttctccaggtatgacaccgtgatcggttgcaccggctacgccgctggccgcgacacacccatgaaggtagcgcgcgccgccgtgaagtcaggtatcggcaggtacttcccttggcagttcggggtcgactttgacgccattggacgcggtggaccgcaggatctgttcgatgcccagctcgacgtacgcgactatctgcgctcgcagtccgcaatggactgggtcgtcatttccaccggcatgttcaccagctacctcttcgagccggagttcggggtcatcgatcttcccggcagaagggtcaatgcactgggtacagcctccaatgcggtcacgctgacgacacctgaggacattggagcgatgactgcacagatcgtcttccacttgcccccacttcggaacgagatcgtctatctggcgggagacacggtccgctatgaggaactgcctgccatcctggaaggctatttcggcgcccacttcgagcttgccgtctggggggttcctcagttgatgaaggagttggccgatgatccgacgaacatgatcaagaagtaccgcgccgccttcgcccagggcaggggcgtgtcctggggcatggatggaacgttcaatgccaacgttggcgtgaaactggcgggtgtgaacgactggctgaaggccaatatagaggcctga

SEQ ID NO: 514869 - DNA, 663 bp, Stenotrophomonas maltophilia
gtgcttcagcgctacgccacccgcctgcccatggtcgagatcaactcctcgttctatcgcctgcacgtggccggcacgtacgcacggtgggctgcaagcgtgccagaatacttccgttttgcagtgaagatgccgcgctcgatcagccatgaacaacggcttcgcgatgcaatgcagccgctggagcagttcctcgctggcgtgcgggcgctgggcaagaagcttgggccgctgttgctccagttgccccccagcctggcatacgaccgggcgacgacggagcgctttctgcagggcctgcgtgcacgtagcgagctcgatgtggcctgtgagccacgccatcccagttggttcactacggaagtggatgctctgctgagcgcccatcgtgtcgcacgggttgcggcggatccagcgcgggtgccgggcgctgcgattccaggcggagaccgcacgtggagctattggcgctggcacgggcagccgcagatctatcgcagcgcctacagtgaacaggtcctggcaggcctggcccgggagctgcagctcgaatcggatgcgcgacgatcagtctggttcgtgctggacaacaccgcgctggggcacgccgcccgcaacgccctgcgcctgcaggccctgctgcagcagggcctgcaggcctga

SEQ ID NO: 514870 - DNA, 612 bp, Stenotrophomonas maltophilia
gtgtgtgccgtgccacatcaatgccgtgagtgcggagcgtcagcccggcgcgaagccactgacgtgccgtcaacgctgtcgatggatcgtggagagcgcccgggattccttgacagcattttggcggggagcatggatactgccgccatcttcggcactggagcttctgtcatgcatcgacctggaaccgatcctgctttaccgcgtgtgctccgtgtcgaatgcatgcccctggactgtggtggggccgccgtcgtggtagagctggatcgcacgcctgaacgcgcgtggatgaagtcgctgaagcgggcgttgcactctgatgagatgctggatggcgtgcaggtcaagttcgatggccgttttgtctatgtcgtgggggttgaggtcggcctgcaccgggcgcagcaccgggtgatgcggtgcctcctgggccttgaaacagtggccagcacggtctgttcacagccgcggatggccggtagttccagcttcgcgatcgatccaggccgaggccggatgcagcgccctgcggcggtggatgtgcagcgggtcgacgcagcggcttcccgggaaggtcgcgacctcccaatggacgggctctgtgcgtaa

SEQ ID NO: 514871 - DNA, 393 bp, Stenotrophomonas maltophilia
atgcaacgcgatatgagccagcgcagatgcaacctgctgctggtggaggaccaattcgaccttgccgccctcatggagcgcgcgctcgaagacgaaggtggccaggtgacccacgcctacagtgtgtttgatgcgatggccctactggaaagacaatcgttcgatggcgccgtgctggatgtggagcttcgcgatggcgttgtctttccggttgccgatcgcttggccgaactcggcatcccttatctcttcgtttctgcggtgtatgaccagctggtgccgcagcgccaccggcgcgcggctttcgtagccaagccgtttcacatcgaccagttgcaacgagcggttaaacgggcgatagaaggcgtttgcccttcttcgaccggacactga

SEQ ID NO: 514872 - DNA, 1194 bp, Stenotrophomonas maltophilia
atgaacgcatgggttctcggcgccattctcatctgcttgccgttgcgagcactcgctgtccccaacgcagccgaagcgccgctgacgcgtgtaatcgtgttgggggtcgatcatgcgtcccagctggtttcgcccaatgacagcccagcgacactggctgcctttctggatcgtacgaagcccgccgccatctgtgtcgagcgatcgccggaagcttttgcccggcacagctattacgagttcacttacgagatccaggatgtgatcgttcctttcgcgcgcgcgaggggcatagccttgtgtcctgtggactgggcgccgccagcagaagacgccagacttggatttggcctggacctggaatccattcccgaagtgcgccctgacaagggattccaggccttcctcgcgttcccgaagccagtccagctgaccagggacatcttccacgcagatactccatccaatcttgccaacatccacgagtgggcaaccactgccgcaaagcgggctggagacgacctcccacgacggctgtacctttatcgcacctacctgcaggccaagcgcctggttgcggcagccagggcgcacgccgggcagaccgttgtcctggttgtaggcgagtttcacaagcgcgatatcgaggccatcctctcggacgacgccagtattgaaatcgtacaacccagcgcgataggcaggccaacaaagacacaggaaacgaaggcgaacagcaatgcctatcggcatgcaattgccagcttcaatcttctgggcgtgcaggcagaaaccggcaatattgactacgcattcgtggaggaatcggtgtctgggctggtcggttccgcaccgcgtgctgaaaccgaattgtatcggacgcgactggatctgcttcgcaagcgtatcagccctgaagaagccatcctgcggtatcaacgtattgcagcttccgccgaagacgcgcgattcagttggacgggggtgcaggaccacgaccgcgtcgactcctactttgaccccttcggaaaccttaccgtgcgacaacgagcgctgctggaaagtgcgcgcgaatgcggagcggtcggtcgcaaggacgaggttgacagggtcttcgacaccatttccagcgagctccccccggcaaaggcccgtcagttcggcgcgtacttctctcgatacatccgcgcttga

SEQ ID NO: 514873 - DNA, 312 bp, Stenotrophomonas maltophilia
atgttctccgcaacggcatgggaccccgcctccgtccagatggaagcctctgaagtgcggacgttcagtcatcccgaaaagcagttgaagaaggcgttctgtgccacttgcggtgaggttgtgttgggtaccaatcggctgggcatgcatgtagttcccaatgcgatgctacaccgcgtcggcgaagagggttcccattccaggtgggctcccacaatgcacctgtactatcgccagcgggtggttgatgttctggatgagctgccgaagtaccttgacggctgggatggcgcgctctactcaccggaatga

SEQ ID NO: 514874 - DNA, 879 bp, Stenotrophomonas maltophilia
atgacgcagtcttaccaagatctgtactggaacagcactgatggcctgcgcctgcatgcgcgcgaccatgcaccaagggcaggacaggcgtcgcgcgggaccgtggtgtgcattcccggcctgacccgcaatggcgctgatttcgacgcgctggccgacgtgcttgccggcgtgggctggcgcgtgatcgccgtcgacctgcgcggccgtgccggttcggaacgcgcgcaggatccttccagctacaacccgcgcacctatgccgatgacatggtggcgctgctgcgctcgcagcacatcgactcggcggtattcgtcggcacgtcgctgggtgtgcttgtcaccatcaccctggcctcgcgtgccccgcagaccattgcagcggcggtactgaacgatgccggccccaaggtgccgcgcgaggcgctggcacggatcggcaagtacgccggcaagcccgtgccgccgatggatctgcagcaggccgcggcctacatgggcaccatcggcaaggcggcattcccgcgctacaccgtggaggactggcgggccatggccctgcgcacgttccgccagcgcgaagacggcatgctggaactggactacgacccggcggtgatccgcaccacccgaccgtgggtgctgtggctgctgcgccccgtgctgtggcgtgcggttcgcgggttgaccgcacgcgtgccggtgctggtggtgcgtggcgccctgtccgacatcctgccagccgatgttgcccggcagatggccgcgacatcgccccgcgcacgcctggttgaagtgccggacgtgggccatgcgccgatgttgaacgagccggaggcacgcgatgccatcctggccctgctggacgacgtgcggtga

SEQ ID NO: 514875 - DNA, 486 bp, Stenotrophomonas maltophilia
gtgagcaccgccgcatccaccgaggcattgccggccgccctgcgccctctccagcaatgggcggccggcgagcggctgggcagcatcacccacgtttcgcaggcgcggatcactgccttcgccgacgccaccggtgaccacaactggatccacgtcgacccggtgcgtgcacaggcgcagctgccgggtgggcgcaccatcgcccacggcttcctgctgctgtcattgacggtggaagaggatgtggccgccctggccggatttcccggcatcgcgcatgtgctcaattacggcctgaacaaggtgcgcttcctggcgccggtgcccagcggctcggacgtacgggtacgttcgcagctggtctccctgcagccgcggcagcaggggcagtggctgctgacccagcgcaagaccgtggagctcgctgacgatggcgaggttgcagtgatcgccgagcagttgtcactgatcgtggtgtccgcctag

SEQ ID NO: 514876 - DNA, 1641 bp, Stenotrophomonas maltophilia
atgccatgccctcccgctgccgatacctgcccgctgctgatcaagcagctgttgctcacgccgctggcgacacgtcccgggcaggagatcgtgtacggcgacaaggtccgcttcgactaccgcacgctgcaggcgcgcatcggccagctggcgggactgctggcatcgctgggcgtccgccagggcgataccgtggcggtgatggattgggacagcaatcgctacctggaggcctacttcgccgtgccgatgatcggtgcggtattgatgatggtgaacatccgcctggcgccggagcagattgcctacaccctgaaccacagcggcgcgcgggtgatcctggccaaccgcgagttcctgccgttgctggagggtctggaagatcagctgcccgacctgcatacgcgggtgctgctggacgactcggaagggccactgccaccgggcttcgtgacggaatatgaagccggactgcgcacggcaacgccgatcgacgacttcccggacttcgatgagaacacccgtgccacggtgttctatacgaccggcaccaccggcctgcccaaaggcgtgtacttcagccaccggcagctggtgctgcactcgctggcggcaatgggcgcgctgggcagcgcaccgagccaagggcggctgcaccgcggcgatgtctacatgccgatcacgccgatgttccatgtgcatgcctggggcgtgccctacgtggccacgctgctcggcatcaagcaggtctatcccggccgctacctgcccggaaacctgctggcgctgatcgcccgcgagcaggtgaccttctcgcactgcgtgccgaccatcctgcacatgctgctcgaccaccccgacgccgcgcagaccgacctgcacaactggaaagtgatcatcggcggcgcggccctgccacgggcgctggcgcagcgtgcacttgcacgtggcatcgacatcttcggtggctacggcatgtccgagacctgcccgctgctcacccttgcacagattgatgccgatgcattggccgggccggatgaggcgctgtcactgcggaccaaggccggcattccggtgccgctggtggacctgcgcattgtcgacccggagatgagggatgtcgcccacgacggggtggctaccggcgaggtggtggtgcgcgcgccctggctcacccagggctacctgcacgatccggacgcttcggcgacgctgtgggcgggcgactacctgcacaccggggacatcggcaacatcgatgcagacggctatctgcgggtgaccgaccgcatcaaggacgtgatcaagaccggtggcgaatggatctcctcgctggcgctggaagacatcatcgccctgcatcctgcggtgaacgaagtcgcggtgatcggcatcgccgatgcaaaatggggcgagcggccgctgcctctggtggtcaggcggcccggtagtgacgtgaccgaggccgagatcatcgcgttggtggcggcgcgcagccgctcaggagatatctcacgctatgcgattccggagcgcgtccgcttcgtcgatgctatcgagcgcaccagcgtcggcaagatcaacaagaagaagctgcgtggactgcatgacccggagtcagctgccggcagccgctga

SEQ ID NO: 514877 - DNA, 1422 bp, Stenotrophomonas maltophilia
atgaagcacatccgcgacggcgtgcgtgatttcgctgcacgctatatcgcgatcttccgcggcgcgtggcgggtccggcacgcgatggatccacccgcgcgcgcggcggacgaactcgccttccttcccgcccatctggaactgatcgaaactccgtcctctcccaccgcccgctggacgatgcgcatcatcattgcgctgttctgcgtggcattgctctgggccgcgatcggcaagctggatattgtcgccgtggcgcccggcaagaccgtcgtggactcgcgcaccaaggtggtgcagccggcggagaccggcgtcgtacggcggatcctggtacgcgacgggcaggtggtgagggcagggcaggtactgattgagctggatgcgactgccaccggggctgatgttgccaaatcaggcgatgcgctgctcaatgcccggatgaccgctatccggctgcgggcgctgggtgaggcgttgcagcgcggcattgccccagtgatccgcgccgagcctgacatgcccgctggccgcgtccaagccgagcaggcgctggcacgaagccaatacgatgcgctgcaggccaagcgccacaatctacaggcgctgatctcgcaacgtcgcgccgaactggaaaccacgcaggcctcggtcaagccactggaagaatcggcgcggatctccaagctgcgtgccgatgattaccgaagcctgttggaaggcaattatgtgggtcgtcacgactatcttctgcgtgagcaggagcgtattgccggcgagcgggatctggcggcccagcgcaaccgggtgcaggagatccgatccgcccagttggctgcggaggaagagttgagcgtcctggtggcggatttcagacagcagaccctggacggcctgcgcaccgcacaggagcagatcggtcaaatgacacctgaagtctcgcgcactggccagcgcgatcaccagatgacattgcgggcgccggtcgatggtaccgttcagcagttgggcatacataccgtgggtggcgtcgtgaccccggcacagccattgctggccgtggtgccgagcgaggaggcgctggaagtggaagcaagcattcttaacaaggacatcggcttcatccgcaacggccagccggtgaccgtgaaggtggagagcttcccctacacacgctatgggtatctgacaggcaaggtaatcagcgtctcccacgacgcgatgctggacgagaagctgggcccggtctttccgattcgcgtgaagctcgacaaggccaccctgcagattgacggggtcaccgtgcgcctgacggccggcatgagcttgagcgcagagatcaagaccgggaaacggcgggttatcgactatctgctgagtccgctgcgccaacataccggcgaggcgatgcgggagcgctag

SEQ ID NO: 514878 - DNA, 2163 bp, Stenotrophomonas maltophilia
atgccacaaggggatacggcgccgtcggtgccgggggaagagcgcgcgcaggatgtacaggatctggcgctgcgcggcttggtgctgctggctcagttccacggtattccggcggacgccagccagctggcgcatgacgccgggttgggcagcgactgtatggatgaaacggcattggtgctggccgcgcgcaagctcgggttgaaggctaaggtcgtaccgatgccgcccgcacgcttggcaatggccacacttcccgcccttgcgttgggtgacaacggtgatgcattcatcatcgctcgcatcagcgacgagcaggtgctgatccacgatctggcgcagaaacgcccgcagagcattgacatgaccatgctccagcagcgctatcgcggacgcctcctgcaggtggcctcgcgagcatccgtacttggcgagctggcgcgatttgatttcagctggttcattcctgcggtgatcaagtaccggaagatgttgctcgaagtcttcgtggtctctttcttcatccagctgtttgcgcttgtcacgcccctgttctaccaggtcgtcatggacaaggtgctggtacatcgaggactgaccacgctggacgtgattgcgatcggcctggtttcgattgccgtgttcgatatcgtcctcagcggcctgaggacgtatgtttttgcgcataccaccagcaagatcgacgtcgaactaggcgcgcgtctgttccgccacgttctggcattgccgctggcctacttcgagtcgcgccgtgtgggcgacaccattgctcgcgtacgtgagctggagaacattcgcaacttcctgacaggacaagctctcacctcggtgctcgatctgctgttcaccgtggtttttcttgcggtgatgttctactacagcggctggctgaccttaatcgtgttgatctcgctgcctgtgtatgcactcatttctgcaggcgtcacgccgttgctgcgcaagcgcctggatgaaaagttcgcacgcggcgctgacaatcagtctttcctcgtcgagacgatcagtggcattggtacggtcaaagccaatgcggtcgatccccgtgtcacacgcacatgggacaaccagctggccggctatgtgaatgctggcttcggagtcaccaaggtcgctaccgtcggccagcagagcgtacaactggtacagaagctggtcagcatcgcgatcctgttctggggcgccaagctggttattgatggcaagctttcactgggtcagctgatcgcgttcaacatgttgtccggacaggtggctgcaccgatcatccgattggcacagctatggcaggatttccagcaggtcggcatatccgtccaacgcctgggtgacattctcaacacccgcactgagctgccagggagccgaatggcgttgccccccatccaaggtgatatcaccttcgagcaggtcggtttccgctatcgtccggatacgcccgaaatccttgcaggcatcgatctgcacattcccgccgggcaggtcatcgggatagtcggacgctctgggtcgggcaagagtacattgaccaagctggtccagcggctctacaccccggagcggggtcgggtaatggtcgatggtcatgatctcgccctggccgacccggcctggctgcggcgccagctgggcgtggtactgcaggagaacttcctgttcaaccggagtgtccgcgagaacatcgccctgagcgatcccgggatctcgctggaccgggtaatcaaggcggcgacactggccggcgcccacgaattcatctccaccttgcctgaaggttacgacaccaaagtgggcgagcatggcgccggactttccggtggccagcggcagcgcgtggccattgcccgtgcgctgatcaccgacccgcgcatactgatcctggacgaggctaccagtgcgctcgactatgaatctgagcatgcggtgatgtccaacatgcgcgagatatgcaagggccgtacggtcatcatcatcgcccatcggctgtccaccgtgcgcagggcgaaccgtatcgtcgtcgtggaccgcggccgcattgtcgaaagtggaacgcacgatgagctgctggcccagtccgacgggcactatgcccagctgcaccggttgcagcagggggtcgcatga

SEQ ID NO: 514879 - DNA, 1002 bp, Stenotrophomonas maltophilia
atgaaccaggtatacgtcgcagtctgggatggagcccactatctggttgtccgcaaacgtgtgttcaacagctggtggggcagcaattccgttgtcgtgctttctgccgaagcgatggctgcggtgctggccatccacaatgcgtccggcggcggcaccgagcagaactgggacgtggtgagaaacctgctttccggtgcctggcgcgccgcgggatcagtcgcctatcgcggtgaatgtacgctaccccgcaccaagcacgcgctggaccgagcgcttgatagcgccgaacgcacgcatccgcaagccgatgacgtcgccatggaggtgctggccgctttgcagaccctgttcggtgaagacgccagaacccctccctcgaccagcgctgcgcgtgcaaccctgcgagagctcgcaaacgcgttgccgccgtcctcccggggcaccccgaactggaccggtgcgttggtgctcgcacaacgtctcgtggccgaagtcggtgcgtggtcggacggtctgcccacgacgctggtgaaccaggcgggtcaatgcgccctacccggcggcggccggctgaacaacgaacgcaaggagcgtgccgcgcggcgcgagttcgaggaagagcttggcatctggcttgcgcagggacgcgccgcttgcgatctgcgtgctcggctgttcccggatgggggtggcagcttctccctcgttcgcttccgcacaactgccgaggagcttctgctgatggcccagacggccgagaacaatgtccaggccagtgccatcaaccctgcgcgcccccagtcctgcctggtgaccgactgggaggtggcgagcgtcggacgggtggccgttgccaatctgcgtaacgtcctgggggtaagggtggaggttccgggcacaggaacactggaggtcgacgaggccctggccaccgccaggcccggcagtcaggagatcggctggtaccgggagatcgccgccctgctgtcacccgcttga

SEQ ID NO: 514880 - DNA, 531 bp, Stenotrophomonas maltophilia
atggacggcaccaccctgtttcgcggcctggccgcagcactggcagtgaccctgctggcgatcggcgcggacgccgctgcatccggcgcccgccagggcgtgaaggcacaaccgggcgagattgtcctgttgcgggacgtgtctgcacggccggcctatcgcatggcgccccctggcatggcgctgatcgccgacccgaaaccacagcgcgagattgccagcgcgttgggcaccggtggcgcctcgaccggcatggacgaactgagcgatgaggactatgccggcatgggggccggccaggcggccaccgccgcgtcgccgcgtggcacgacggttgaacgggttacccagcaggccctgggcggcacgctgggccgcagcagtgacggcatggtcggcagcagcctcggtggcgccctgggtggcccgctcggcgcggtcggcaacagcacccgcggcatcggcgataccgtgcgcggcgcgctcgctcagttcccgttgcagggcccggccccggcaggtggcaagtga

SEQ ID NO: 514881 - DNA, 1095 bp, Stenotrophomonas maltophilia
atgaccacgctgtacattgatggctctggcgctcccgaagccatcaaggcgtcattacgggagctttccaggaatattcagtttcaccgggaagattcgaaagccgcaaacggctacgtgttctttggtaccaatcgcgttactggggcgaatgtaacgctgaaatattactattggggcggcaagacgcaataccacgctgagccgcgacagttggctcagctcgatgctgagaacgtcttgaagattttagatgcaggactaatagatgcaacctgggcgtactttgtgaccccgacttgcactggaggagatattgactccgtgctagaggtcagtcctctaggtctccgcgcagcaatcgactatgtctaccaggctctcgcgggattaagtcatttgcatggatctagatacctccatagggatctaaagcctgcaaatttgtacttaaccgaaaccgggagggttgtaattggtgattttggatcggtaaagcgtcttccggaagctcagagcacgattcccgcctcaagccattcgcttatatatcgtcctcccgagacaattcttacgaatgtatatggcgttaccggtgatgtttatcagtgcggcgtgatcctctatcagctaatgggtggatcgttgccgtatgacggtctagcttggcttaacaagcgggagcaagggcaactcgctcaattggctacggcacaagacaaagacgccttcgtagatagctgcataaaatcgaaaatcacaggtggacgcgcggtggatctttcgagcctccctccatgggtgcctagttcggtccgaaggattgtcagtaaagcgtgccatcgggatcctcagcagcgctaccagactgcgtctgcttttatggcgaagctacatgagttgcgccccagaacaccggattggcgagtcatcgatggcattccaactcgtcttggaaacccgagttatcggattctggaggtcagtggatcctatttcgctcagaagaacgccggaaatggttggcgcaacgacaacacgatcatgggtgcgtctcttgtagacttggtggcagcagtcgcaagtaggacctag

SEQ ID NO: 514882 - DNA, 270 bp, Stenotrophomonas maltophilia
atggatgacaggataactgcaagctttgacgaacttttgcgccaagcctcaatgacagctgaaacgtacatgttcagcgcgatccgtgagattgatgctgctttcggcgcgggatacgctaaagccaacccggccttggtggctgcattcatgcatactgcaaactcagagtttgtcgcagcaagtaacgcgaaagtctacggatccgcattggatcgcatcgccgacagtcttgatgggctcgctcacaccctgcgggacaaagattaa

SEQ ID NO: 514883 - DNA, 1020 bp, Stenotrophomonas maltophilia
atgcaagtacacgcgcaacgcatgactgatgtcatatcggagcagacaagagcattgcttatagcctccttcatgagggggataggcaaggcaacgctttggtctattgcttcggacccgctcttctatcgtatcgagccgcagcatctgggggatgttcacccggccttggctgattttgggactaagggagaccgcttccagagggctaagagcagggcggattccgaggttgagaaggcacagtcgctgggggttcgcatcattgggtactcggattcagagtacccagtatctatgcggcgcgccccttcagcgcctgcgctgttctggtacaagggggacaccgctgccttgcagatgccaaacgtagcggtcattggaaccaggcaaccaacgcgagctggtgaagttatggccgaacggattgcttccgcaatctgtgagtcagggttctgtgtggcgagcggactggcgctgggcgtcgactcaattgctcatcaggcagccgttgcgctcagaaggccaaccgtcgcaattctggccgggggattggattcgattcatcccaagagaaatgctgcattggcggaggacatcgtcttccatgggggcggcctgctttcggaatttgcgattggggcgccatcgatgccaaccaactttgtagttagagatgcaactcaggccgccattgccgcatgcgttgtcctcgttcagagtgacacggttgggggaagccttcatgcatctagagcgtgcgtaaagttgggtagaacgctctacgtcgtgcgaccgatagcgaatgacttggcaagtttggagcgcaaggtgcaggccaatgcagagcttcttgcgggacggcatcacgcgatgaacttcccggcggactcgtccttgcacatcgtcccgctctcaagccgagaggactacccagcattcttcgagtccgttaagagtacgtgggcttcgttcgatagtagacgcttaaggagagagcatctcggctccgccagctag

SEQ ID NO: 514884 - DNA, 1443 bp, Stenotrophomonas maltophilia
atgcctgcaatcgaagctgtgatttttgattttgacaatacactggtcaataccgacaagcttaaggaatatcgcgaaaggaagctctttagtgaaatcactgaagaaatggtcgcggaaacaaaaaagtatttgcctgtggctaggatgctgcaactgctgcaggacaagggagtgaaactcgggattgttacgaattcaccaggtcgctacgttaggcgtctcttgacgcatcatgaacttcttcaatttttcgataccattgtgtcctacacggaggttggcgcccttggtggcgcgaagccgtctccaatggggataaaaaaggctctcgaggaaatgaatgttcaagacccaagtagggctgcgtatgtaggggatgattataaggatgtcgtggctgcttacagagccggggtgcttccaattgtcccgagctgggcgtcaagagattcagtatcgacgccgccttcaattgaagttagctccgctggtttggttgagctggtagagaatactgccgagtacaggctcttcgctgagcgctgcgcagactcaaaaagcacggacttcaatcgtttccaggctaggttcttgccactcgatgagaactgcgatgtggcaaccattcgaacgaagctgaaagcattctgtctggggcgatattttagccagacgggtgcgaccacggcgcttctccatgacaaccatccgctgtccctcgaaatcacagcgaaggacaaggtgccgtatgaacccccggcttggatggcggacatgcttttacgagtgtgccgggcggcaggtgacttcctattccaggatggtcgaaaagtagaccttgttaccgtgattcctagcaagcctgggaaagcgaagcgcttggagttgatgcttgaggagatgaagcgattggcgccagatggagatgggatagagttcgtagacaatctcctctactttaaagatggctgcgcaagcacgcttagggtgcttaaggcaagggaccggcacgcggagcaggagcggtcgctactcgcagtgcctcgcaatcttgctggtcgaaacatcattgtcatcgatgatgtcataacgacaggcgccacaatgaaccgggcaatcgcgcttctcgaggcgcagggggcagcctccgtctacggggtaggaatcgccaaaacggtcagtattcaggatgaagttaaatcttgccctgagtgcggcagggacatgcgcctgcagaagaacaaggccactggggagaggttctggtcctgcaatggttacttcgcggacaaggcatgcgagcactcggagtcgttccttagatgtcctctctgtgaccgcgaccttcggctccggacgaaccgtaaggacaattccaagttctacggctgcaccggatacaatgccgagccaacatgcaagtacacgcgcaacgcatga

SEQ ID NO: 514885 - DNA, 1080 bp, Stenotrophomonas maltophilia
atgcgcatgaaagccactgtgatgggaatgatgctgatggcctccgcggggggcgccagcgctggcgagccttggaaagcaggcgaacgccaaggcaccaccacggtggccagcgccgtggtgcgcgatgcgcaacaccgcgacgccctgcgctacacggtctggtatccggcgcccgctggcagcagggaaaccgccctgacaatcggtccgcccgatgcaccgctgttcgacgtcggccgcgcggcactggatgcgccggtcgcgggtgcacgcctgccaacgctgctgctctcccacggcaacggcggcagcgcgcgcatgatgggttggctgggtacggcattggcacacgccgggtacctggtgatcgcggtcgatcatcccggcaacaacggcgtggaggagatgaccctgcccggtagcatgctgagctggttgcgtgcggatgatctgcgcgccgcgctggcggcggtgcaggccgatcccgtgctcggtccacacgtcgatcgcgaacggctgggtgtggccgggttctccgccggtggctacaccgcactgctcgccgccggtgcacgccccgatctgcagcggcttctggccttctgccaagcgcatccggatgacggcgtctgccggccccagcgggaagccgtcacgcacacgatgggggctcgtattgccgctgcaagctcgccggaactgtcgccatggatctcccacgccaatgaatcgcgcgcgatccccggcgtgcgcgcggtattcctgctggcgccagcaatcgtgcaggcattcgcgccggaacagctgtcctcgctgaggcagccggtgtcgatcgtactgggcgaggctgacacggttgcgccaccacagagcaatggcgaggccgcacaggcactgattgcgggcgccgcgctgcagcgtctgccggatgtcggtcactacgacttcctggcgggctgtacagcagttggtttgcagaggctgcccgagctctgcagcagttcagttccgaaggcgggcacccacgcgcaggcagtggatgtcgcggtgcgcttcttcgccgaagcactgcggtag

SEQ ID NO: 514886 - DNA, 450 bp, Stenotrophomonas maltophilia
atgaagcgcttgactgccttttgcctcgtggttgcactgacatcctgtgcggcgcatccgaaccgcaccacgaagtgtccgccggcccgtttcacctatgttggcaccgagagagtcgacgggttgacctacgggcgcttccagatcacccacaacgctgatcagccacttcggctgtgggtggatgaaagacgcaggttgaactcaaggaccgctcgcgcagagatgaggcgcacaggcgaggatgcctggcggccttacaacgtgatccttgaggaaatcacaccgggagcgatcgggctgtcgatcgggcagggtgaacagcagagcgttttgttcgatggtgatggcgtattcctgcccggccaatccagcgcggacacggagtactccatcgtggtacgggatgcagccggttgcgagcgtcgctcggcatcgttcattctctga

SEQ ID NO: 514887 - DNA, 444 bp, Stenotrophomonas maltophilia
atggtccgaatcctgagctgtgcgttgatggtctcgctttcgatgagtgcccatgcggtgccgaacgcgatggtgcaatcgaactttccagtgatcgcgctgggtgaaacggcagaactgaatctgcagctggcaccgcatcctggtgggctggtgacctattcaattcacaccaacgtctatgccagcgaggagagcagcggctaccgggtgctggatgtgcgctgcccgccgggcttcctctcaaacgtctaccagggaaacgccggtgcggtgtgctatcgcatcgaggacacgccgcatccggccggcgagatgtcggtgacagtgttcaacgaggatgcgccggatgggcatcttgagtgggaggaaggcctatggtcgttggataccagtggccccgcagtgaaaacgtcgtggcatctgtttggcgtgcggccatga

SEQ ID NO: 514888 - DNA, 249 bp, Stenotrophomonas maltophilia
atgatcttctgggcggcctcagaaaagcggtttgcgttggcggcactgaatcgattcgatgatgagaacgccgcgattgtccaggcgatcaatgtggcgaagaacacggcggcaagagcggcctgccaggtctccggagtgagcaatgatccggcgatgaccggtcgggacgtggcgcgccaccagtcggtgaggagcgtaaggcagcccaccgagatcatcgcaatcatcgcgaacttctcgacgtga

SEQ ID NO: 514889 - DNA, 831 bp, Stenotrophomonas maltophilia
atggaaaatccgtcgccggaacctcccgacgcactgcattgggcacgcttcttcattgaacgccagacctccgaccttgcacagatcagggagcccgtaacgttccggagcgagtcctacaaaagtgtcgaaaaggaactgcagttcattggcagattgatcgcccagcttccggagacgccgcctccatcgacaggacgatgggagccggcaatcggctatatcgaagccatggcgttctcactgatcgagtcagccgcagagatgaaggccccgcaggcttcgaccacaaaaattcagttctcgctcatctgggaacacctgttctcgcactccattcgtgcgtcggcagcaggaaggcagttccaggagcgcatcgccgcacgcatgctcgcaaagatccgcgaatgcccgagcctggatgctgtccacctgctcagcttctgcatcaacgctctgggcctttcggcaaccactgccgaatcacgctatggagagccctggcgcgccttccacatggatctcctggcgtggatgaagacccacctcgggcccttgctggaacgctatccacgcatgtccgaggccttcgttgaaggcatcgagtacgacgccccaaaccacaccttgatccgctggtacgtaaagaggggccagcgccagccgcacccgcaaaccctcctgctgacgcaccgggaatcgatacgtcagccgtccgactccgatcagaagccaaggggcgcatcaaactccctcgcctggatactgcgcgcagcggaatcagcggcacagcggattctcgaactcgcgcgacgaaccaacaatccctaa

SEQ ID NO: 514890 - DNA, 1821 bp, Stenotrophomonas maltophilia
atggaattggacaagaaccggcataacgccgatgtagccccccgcgcttcgcaaagcgcgctgtcggttttgctcaggcgcttctggcgggatttcatcgggcaccggaaggcatccgtaacgctggcggccagcctgatggtcctgtcggtgctgctccagttgcccgttccgctgctgacgatgcacatcatcgatgttgttgtcgaaaagcgcgctttcagcatcgtcaaccagctgggaatggcactggttgcgctcatcctgcttcgccacgcgttctcctacatcaatgaaagcgtaacgctgacgctgaaggagtcgatcatcgtcgacgcgcaatcgacgctgttccggcacctgcagtcactcccgctcaagttcttcaccaacaagcactcgacctacctgcagtcccgcctcatgaacgatgcgcgcgccgtcgaaggcgcgctggtcaggaacttcgtgaccatcgcggtcaatgccctgaccttcgtcgtcggcgccgcgatcatcctttacctgcagccccgaatgggcgcggtgctgctgctcaccatcatcccattcggctgcattcgtcttttcaccaaccagcgcatgcgctcgctcagcgcggacatgcaggaacaacaggcggccacatccgcagcgatcagcgagcgcctggccggtgtggccaccatcaaatcgctcggccaggagaacagccaggccgaactgatgacgcagcgactggaaacactcaaaggcgtctacgtgcggaccaactggttcggcgtcgtcagcggcatcggcaccagcctggtcacctcgctcagcacagctttcgtgctgtggtacggactgcacctggtaacacagggtgagatgtcgctcggccaggtcgtcggcattctttcgctgatgaacttcctgtatgccccggtcaacgcgttggttgccgccaacatcggcatccagcaggcggcctctgcggtgcagcggatctatgaattcctcgacgaagaacccgagcacgctcatggagagaccttcaggctctcccagggacgggtcgaattccgcgccatcgacttcgcctacaaacccgaatccaaggtattccaggatttcagcctgaccatcgctgggcgcgaaacggtcgccctggtcggccattcgggcgcggggaaaagctcgctggtccgcctgctgccaagactcaatgagatccaggcaggacagatactgatcgatggatccgacatccgcagtgtcgcgcttccagatctccgggcggccatcggtattgtcgagcagcaagcgttcctgttcaccggaagcatcctggacaacatccgcctcggacggccgatggcaacgcaggaagaagtggtcgccgctgcccgcaatgccaatgcccaccacttcatcagcagcctccctcaaggttacgagacatgcgtaggtgagcgtgggctcactctgtcgggcggcgagtgccagcggatcgcactcgcccgcatgttcctgcgtgacccccggatcctcatcctcgatgaggcggtatcggcgctggattcgcagtcggaggaagccatccagcgaagcctgcagtcgctatgccggggcaggacaaccatcatcatcgcccatcgcctgtcgaccctgatgctggccgacaggatcgtcctcatcgagaagggcgtgctggtcgaagaggggacccacgaagagctcatcgcctcgcagggggcatacgctcgcttgttcctgcaacagttccagtcgcagcacgtccacgggaaagaccccatcggaatggaaacgacctga

SEQ ID NO: 514891 - DNA, 1404 bp, Stenotrophomonas maltophilia
atgaacatggtgatgctccccccccgcgtccgcatgtggaatcgggatggctggtacctctacttcgacccgcacaacttcaaatgggtgcgggtgaacgattccggccacttcatcctgacccggttgcagctgtaccggaccaccgaggacatcgtcagcgaaatcgtcgagcgcttcggcatgaccgaggacattgcgcgcacggcagtgcatcagttcgttgacgatctttccagcgtcggcttcctgcaccacgacgagtacgacgaaggcgaacgcccgacctttggtcctcgtgccttcgcacacacggtgtacatgcacctcaccaacaactgcaacctcaagtgcccgtactgctacaacaagagtgatcgggagtacaagatcaagatggagaagcagggcaggatcgcttcgatcctgaccaccgacgagagcaaggcgctgataacccgactggtcgagaacggcgtcaagcacctggtcttcaccggtggcgagccactgatgagaccagacgcgctggaactgttcgagcacgcccgatccctgagcagcacgctcaagatcgaggtgctgaccaatggcatcctgatcaaggatgcggtcgccgagaagctctgcgagttcgtcaacatggtgaccatcagcctggatgggcatgaacggcacatgcatgagcgctaccggggacgcaacacgttcgcaccaacgatccgcggcatccgcaagctggttgaggttcgcaagcggcgcggcaagcccggcccacgcatctcgctggtgcccgcgctgactgacaagaacatcgggttcatgaaggagatctacgagttcgcgctcgatgatctcggtgttgacggcctcgctccgatcctgttccaggccggcgatcaccaggagctgagcatccagcagatccccaccctggccgaatggggactcgcccagaaccgtacccgggactatctgcgaggccgtacgccgcaaccggtgaagaccgcgcccccatcccccgtcgtgccgcgcaaccactgtggcgtgggcgaaggtgagttcagtgttgatccggcgggattcgtatacccgtgccagacgatgcatttcgaccagttcatctgcggaaacgtcagggaactggatatcaaggagatctatgacacatcgcccgtcatgcgtcgcgtcaggacggcggttgtcgacaatctggatgtctgcaggcattgcgacgtcaagtacttctgcaacggcggatgcaggtctaccgccttcaatgtctatggtgagttcgaaaagcacaacgaactctactgcaggcatctcgagaagcttgccgtcgaccgcatgtgggcaaactgcgagttgccgcttcacgccacggaaggtgtctgtgcgtag

SEQ ID NO: 514892 - DNA, 138 bp, Stenotrophomonas maltophilia
atgttcaatcctcaggtgtttaccggtacgcaggacctgcaggcagctgcaggcgcatgtggttgcggctgtgcatgcagcggcggcggtgcgggtggtggcagcggcagcggcgatgactcgatgcagcagctgtaa

SEQ ID NO: 514893 - DNA, 465 bp, Stenotrophomonas maltophilia
atgaaacgccatgttcacctgatgggaatcgtctttgccgtggcagccatgagtgcctcggcagcgccccattcaacattcacgccctcggccggattctcgatcaccgatggcacgctctatcgtggcaacgccgcgatcgccagccatttttccatctccagaaccgagatcgggtacctctttgtctatgtcccgcagttcggcctgatcacgctttcgaccagtacgttccccggggcccaggcgcacgggcgtattgagaaccagacgcttcgattcaatgccgacggtgaggcttttgtcctgaccagccagtcccccctgctggcttccggggaaagcgtggcgtgggtcagcgtggacaggacgttcgccctgcgtggaaagcgtgccgtagtcgcctatggcgacaaccccggcatgccgtacgactggcccatgcgagaggttgcacgcaagtag

SEQ ID NO: 514894 - DNA, 1431 bp, Stenotrophomonas maltophilia
atgggatcgaatgcacttgaaagcatgagcagtcactcgacgcaggacatcatcgtcgaaggaccgctgctgggcgaactgcgtggaagcggccgcgggggcctcgccggctacctcagcgtcggcggctacgataccctggcccaggcaatgcgagggggcgctgcagatgcattggcacgcctggctgcgtccggcctgcgcggacgggcgggcggtggctttcccaccgcagtgaagtggaagcaggtccgtgacaacagcgcagcagcgcgcttcttcgtctgcaatgccaataccggccaactgggcggcggcaaggaatccgcactgatcaggctgaatccgcacgccgtcatcgaggctgttgcacttgcagcaagtatcgtgggcgcgcaggtcgccttcatccacctcgggcagtcgcttgagcatgagcagcaactactggaggctgctgtgcaggaggcgcgcatgcagaagctcctggaccctgcagcctgtgacatccgaatcgagcggtctgaaagtggctatctggcgggggaagaaaccgcactgctggaactgcttgagggccgaccaggccgtccacgtggcaagccagcgatgccgacccgcagcggtttccagaagcaacccacggtagtgaacaatctcgagaccgttctgcaggccctgctggccatccggctcggtcccgagcagttccgtgcagtcggcagccggtacgccagtggaaccaccatcttcagtgttgtcggggatgtggcccgcccgggactatatgagcttccgctgggcactgcgctcggctccctcatccatgaacacgccggtggcatctccgggaacgggtccctgaaggcagcacttgttggcggcacgagtggaaccgcggtcggagcggaacacgcggacctgcaactggactatgacagcctggccggcatcggcggcagcctgggcagcggggtcatcatcgtactgtccgatagaacctcgatggtgggtgtcgcacgcgacctcgccaggttctatcaccagaactcctgcggcaagtgtgctccctgcaaggatggaacgcggcgcgcctatcacatgctggacaaccttgatcgggttgatgagagcgcgaccgactggcaactttcggtggaacccaccagctcccggaagatcccgatgctactggtcaacgccgcaccgcccaaacgtgcaagcatcagctataccgattcagggatcgggctggagaagatccgactgatctgcacctggtactccacccggggtgattgccatcacccaacggagtcctcgcgcatgctgcagagcctgctggatggattcaccgacgagtttgaaagggaacgcgcagcaccggcaatggaccaagatgcgatgctctcgacgatgccggcaagctga

SEQ ID NO: 514895 - DNA, 1311 bp, Stenotrophomonas maltophilia
gtgcttgcctactatgtgaatctggccctacgcagcttcaagcgtaacaagggcctgacgatgttgatgattgcggccatcggagtgggtatcggcggctcgatgacggcgctgacggtcttctccgccctgtcgggaaaccccattcccgccaaaagcgagcgcctgttctatccacagctcgatcctcgcccaaagagcgatcaggccgctgatggggagccggccgaacaattgacccggttcgatgcagaagccctactccgcgatcgcaaggctgaccgccaggcggtgatggttggcggcagtgtggccgttgaaccggaggcatcccatatccggccattcattgtcgacgcacggtacacctcggcagacttcttccccatgttcgaggcacccttccgatatggcgggggctggagcgccaccgaagaccagggccgggcgcaggttgcggtcatctcgaaggcgctgaacgaaaaactgttcagcggttccgacagcaccggcaagagccttctggttgccggtcgccggttccagatcatcggcgttcttgaccaatggcggccgatgccgaagttctacgacatgaccaacgatcgcttcagcgacgtggaacaggtcttcgtgccgttctggaccgcgctttcgctgaaactgggcatccagggcagcatgaactgctggggcgacgtcagcgcggatccagaaggcgcgcaggccctcaatgcgccatgttcctggctccagtactgggtcgagcttccgaccgttgagcgcgcacaggcctatcaaaggtacctgcagagctactccgagcaacaacgggcggccgggcgattccagcgccccagcaacgtcaggttgcacaacgtcatggactggctggaccagcgcggtgcggtgcctgccgatgtgcggctgcagctctgggtggccctgggcttcctgctcgtatgcctgctcaacacggtgggcctgctgatggcgatgttcatgcgacgcgcgcctgaaatcggcgtccgccgtgcactgggcgcttctcgtcgggacatattccggcaattcctggtcgaggccgggaccatcggtctggttggcggtggcgtcgggctgctgctcgccaacatcggcctgtgggcggttcgccatcagtcccacagctatgcatcggaagtgcacatgggcatgtcgatgctgcttgcaacgttcgtactttcggtttctgccagcctggccgcaggcatttttcccgcatggcgagcaatgcaggtaagtccttcggtgcaggcaaagctgcaatag

SEQ ID NO: 514896 - DNA, 1224 bp, Stenotrophomonas maltophilia
atgagtatcggccccatcctctccagtctcaaacgcaacaagatccaagcggttctgatcattctcgagatcgcgctcagctgtgcgatcgtctccaatgcgaccttcatgatcagccagcggttggagcgcatggagcgggcgaccggcttggccgacgaccaggtcgtgaggatcaacgtcgcgggtattggcgagagtgagaaccccggagcgcaggtgcggcaggatctggcggagttgcgctcgatcgccggcgtcaaggccgccaccagcctgaatcatgttccgttcgacaattccgcctggaatggatcggttcggctggatcgaaaccagcgcggccccagcctcaacgtcgccatgtacctgggcaaggatctgctcgatacccttggactcacgctggtggaaggacgggatttctctccctccgaatacgtcgactgggaacagttcaatagcggtggcccggcgctgcgggtgccatcggccatcatcacccgggacgtggcggagaggctgtttccggggcagagtgccattggcaaggaaatctacgcgtggaaccctgacaattctccacaccgcattgtcggcgtggtcgaacgcctgatccggccaaacgacaatggcggcatcgagaacgccggcttctcgctgttgctaccgatgaaggatctgacgatgggccggttcgcgctccggaccgatccgtcacagcgtgaggcggtcgagaaggccgcgatcgcagcgctcgaacgcagcagcaaccgtcgcgtcatcatggagcacgccgccttcaccgacgtgatgcggcagtactaccagaaggatcgtgacatggcgtggctgctggccatactcatgatggggctgttggcgatcaccgcgctggggctgtttggaatcgccagtttctgggtctcgcaacggacccgcagcatcggcatccggcgcgcgctcggtgcaacccgcagacagatcctgcgctacttccagctggaaaatttcctgttggtgagcatcggcatcgcgctgggcatgattggcgcctacggaatcaaccaggtgctgatgagccactacgagctggatcgcctgcccgcgctctatcttcccgtcggcgcggcgctgctgctgcttatcggccagctggcggtatggtcgcccgcgcgacgcgcatcctcggtagcacccgccgttgccactggcggcttctga

SEQ ID NO: 514897 - DNA, 576 bp, Stenotrophomonas maltophilia
atggaattgacaccacaaccggcggtcgacggccgcctcatcatcaccccgcacccggtgctgctggatggccagcgcaacgtgccggtcgacctgcgcccgggtgaaagcctgtacgcgttcctcatgcgccatgtggacgggctcgatggccgcgcatggcaggtctgcgtggacgggctggaggtgccgcgcgagcagtggatgcaggtacgaccgcgccatggccagcttattgaagtgcgcagcgtggtgggcaaggcagtgattccgctggtggcgatgatcgcgctgacctatttcaccttcggcatcggcacgctggtggccggttccgcctggggcgcgggcgccgtcgcggggctcagcgccacctacggtactgcgctggcgtcggcggtctacgtggccggcagcgtgctgatcaacaaggtgctgggcccgaagcctccccgtgcaggggggggggcggtgtcgccgacactgcgtactccctggcagcgccgcgcaaccgtgtgcgcgcctatgaaccgctgggcctgctgttcggttccactcgcctcgcgccggacctga

SEQ ID NO: 514898 - DNA, 816 bp, Stenotrophomonas maltophilia
ttgcgcttcaaccagatactgattgtcgactccatacccgccggagagcgcaacacggctcgcgagctatatcaggacgtgggacttcgtgccgaggtattcgcgcccgcgccggaagtcaggtatcggcgcgttgaaggccgagccgaattcttgacgttgctccccgagctcgctgccgcggcatcggcctctggagacattcccgtgctccacatcgagtgccatgggagcgatgatggcttgaaattttcggacggctccttcgtcacgtgggccgatctaaaaggaccgttgacttccctaaacattgcgacggcaatgaacttactcgtggttgttgctgcgtgcgatggaagcgcactcacgtcgacgctcggactggttgatcgtgcaccggttcacggtctcatcggaccgacgcgcgcggtcacgccggtggaattgacgcgtgcgtatcttgagctctatgaaacgctcatgcgtactagatcggcgcggcaggcagtagaagcgatgcttcgtgccacgcctaacaccttcgtctatcgcgcagcgcaatggctgtttcagtatgtgtgggatcactatcaggcagtacatgaaacaccagaggctcgtctggggcgtggcataaagatggcggcgaatcctcccgtcgactatgtcggtccacctgtccagccagaaatatttgcccaactcttggcggaacgcaatcgggaattcttcgacgcctttcgtcggaatttttttctatgtgatctatttccagaacatgagacgcgtttccccattcgatacgatgccctttga

SEQ ID NO: 514899 - DNA, 4497 bp, Stenotrophomonas maltophilia
atggtcagcttctccactattcgccctcatcatgggtcccagaacaacggctttgaggaacttgttgtccagctggcgcgtcgtcgccctccgccggatgccaaggagttcaggcgaatcgagggggctggcggcgatgccggtgtcgaggctctgtggcttaagagggacggttcgtccatcggcattcaagcaaagtactttctgcgcgtgcgcgacatagattgggcgcagatcgacgagagcgtagcaaccactctgaagcatcgtccggatgtcaacgtctatcagattgcgattgcctgtgacctgaccgacaaggggggagcaaagggactgggccggacaggatggtccatgtgggatgagcgtgtgaagcgctggcaggaaaatgcactagccatggggcgccaggtttcgttcgagccaattacctcctcagatctgatcgactggctggcgcagccgagtgcgtctggcttgtctaggtattggttcgggaccgatgtgctcaatctttcttggttctctggccaggttcggattgcaaataccgatcttggcgagcgatacactcctggtcagcacgtcaatgtcgcggcctctctcgcctttgatggtctggcgcggactgcagcccttcgtgctaggttgcttcgggccgtagagtcaacttggaagcatcgaattgattcttcctctgcgcacctcacagatagcgtacgcgatgccgttgagcgtgctgccgatgcgctgacacaggtgcatgctatggccgatgcggtcgaagatcccgcaaccaagcagtgggaagtgaagcagtggctctcggacgtgcaagcagccgaaaggctcttggatcgtttgggagaggagcttcacaagcagcggcattcagctaacgggaacgaggcgaggtcaacgctcagcggcgatcattcgaactacattgagcatagcgttcgcgaggttgggcgggcaattggtgagctttcccatctattgaggtccgttgctttccgtacggatgcgagccgtgtgctactcgtcacaggtgaggctgggaccgggaagtctcatttgctcgcctccgaagccaaccgctcactgacggaggagagaccggcacttcttttcctgggtcaacagttcgctaagggaaatccatgggatcaatgcgaacaatcactaggcttgtctggatggcctcgggaggaacttctcggtgcgttagatgcggcgggcgaggcgtccggttctagaacgctgatactaatcgatgccgtcaatgaaggcgctggagctaatctttggcgaagctatctggctggcttcattgagagtctttcgccatatccgaacgtcgcggtcgttattgcatgcaggactgagtacgtgccatttgcgattcccaagtcggttttggagggctatccaaaagtcgagcttcatggctttgccacgttcggggagcaggaagctgcagcagtccagtatctggaccgcagaggaattgttcggccggctggtccattacttgctccggaattctcacatcctctcttcctgaaggcggcttcggatgctcttatccaaaaaggggattttgtctttcctcgtggcttgcggggagcactgaacatcctggggttctatctcgatagcgtcggcggcaatctgctgccggcatcggttgaaccgactgatctctcgactgagttgaggcgagcgctgcaggggctcgctcaagagatggcgcgaagaaagctcgactacgtcccgcggagccaagccgatgtgatcgttagccaggcgttcgcacctcggacaccgccgtccggtacgacatggcttgaagtacttctgcgcaatgggatcgtgcggcttgatcccgatccaacggcccaaaaagacggttcatttgtggctccggaagatgtggcgagaatggcgttccagcgttttcaggatcatctttttgttcaggcatcgcttgctggcgcggaagatgctgcgagcatattcagcgcaggcgggccgctggaatggcttacatgtaactcgcagcgctataaatgggcagggctattcgaagccctgtcgatccagattcctgaggccttcgacatggagctggttgatgcactgccaggtgggcaagggcgttggtggagccagtggggtatccaagagagtttcaagcagagcgtccgatggcgagctataaagtcgagggctggtcacctcacatttacaccccgttcgctcgtacttctcaattcgattgaccaatcgacggacgattcaatcgggctcctattggaagtagctgctgtgccagggcatccatggaacgcgaatatgttgcacaagaacctttggcactggggcctgaatcggcgcgatctgcaatggtcgcgcgttatcgctttcgcgacggaagatgatgagcatccggtccatcgccttctgagctgggccaatggcggaaagctcgataacgcagagcccgagatgctgcaattggtctcaatcgccctgacttggctttgctcgtctaccagccgctatatccgagattcagcaacaagaggtctatgccgactcatcaagaggctgcccgcgatacatcaccaattgatctcaatgatggtggaagtggacgacctctatgtactggagcgcttgctagcagcatcctacggcgcggcttgccagctcggagatgacccctccctcgagacgatggcggcgacgacatttgacctgatcttcagcaatcgaaggccccctcagcacctgcttgcgcgtgactacgcgctgggggttcttgaagtagcgcaggctcgcggactactacctgctgcggtcgatatgacgaaggcccgccccccgtttccggccaaggcgcttcgcgcacccagccaagccgtcttagagaagcgaaaggagaagctcggggaccatagcattctttcgagctgcggcgcgcatggagactttggaaattacgaaatccggcccgctatcagttacttctcagcgacaaagcttgataagccggccccgctatctaagcgtaaccgattcgatttgttcgttactgaggtggccggccttactccagagcgaatgacggctttcgagatgcttgagcgcgccagtcgagaagtctgggacatcagatttgatatcgtcaaggatgattttaagcccacgagaatccgctcagacgtagcagcggaagcggcctctgaacgggagatggtgtttctgtctttgctcaacagtgaggagcgaagtcgctatgcgagcgatgtctacggttacctctttgacaaggatggcgatcgtgaaccagcaaccttcgatcaagaatgggcacggcgatgggttgcttcccgagcctacagtctgggatggaatggggcggaatttggtgatgacagcacaccttcagactacggtcgaagccgggcaaaggtcgaacgagtcggtaagaagtatcagtggattgcgctgtatgagctgctggcatggctaagtgacacgcattggctcaaaggcagctggagtgggcaaccaaggcgctactcctacccgactgatacggcattccaacgagacttggaccccactctggctacagatgctgacatacaagcttcgccaagcggtgagtggtggaagctcgattttagtatgcgctcaatctcagatgatcagctcgcaagttgggtggcacagaacgattcttggcactctgcgaaggatgccatctttcgcactgactctgacgataaaaaatgggtcactcttcattcctttcagaaggcgacggagcgattttctgatcggaaatatattcgtcgcgagattgggctccggcgcgaagggtttcagttggtcaattgccttattgtggcaggaaaggaccttcagtccacatatcgggcattagtgagggggcgtgaacgcgatacgcgtggttgggagccttttgagtatactgacggaccctactttggtgagtatggttggcgagagacatggcctggatctgaatggtcctccgataatgggctgcctggagaagtcctttcgattcaaccagtggtggaatatttctgggagggccacctagacgcgtcgcatccagatggcttgcatatgcggatgccaagtcatgctctccttggcttgttggatctagctccgccgagctccttttctccagataggatattagataaggcaggcgaggccgtcattgttcaccacagaggagagaatggtggctactcactcacaattcgaagagaagtgcttgatcgattacttgtcgagaagaaactcggctgcctatggtttgtctcggcagaacgtagcgcttggccaataggtgcgcacgacgggtcccaacgccgttggttcgcgagcttggttgcttctgacggcactaaaatcaatagttttgactgggaagcgccgtggtaa

SEQ ID NO: 514900 - DNA, 501 bp, Stenotrophomonas maltophilia
atggcacatcccctttccctgctcggagcgacccataccgccatcagcctggcgccgatcctggccggcctgtacggcttcatccgccaccgggcaatcgatcccggcacgcgctcgggcaagatttatctgattggcctggtgctgtcggtggcgacctcgttcacagtctccagcacaggcgggctcaatccaggccatgccttcggcgtgatcgtgctgctggtggcgttcggcggtgttctggcggcacgcctacgctggctgggacgctcggcgcgctatctgtcgacgttcgcgctgtccttcagtttcctgctgtcgctggtgccgggtgtgaacgaaacgctgacccgcttgccggtgggccaccctgttgccgccgcaccgctggcacccgtgatacagcagacgctgctggggtgtgcggtggtgtttgcgatcggctttctggcgcagtgctggatgattcatgagcgcagcatacgcgcgcgaggttga

SEQ ID NO: 514901 - DNA, 1245 bp, Stenotrophomonas maltophilia
atgaccaacagctcgtaccggaattaccgcgttggcatcggcgtgtcgctgctgctggccgcgctgatcgccacgctctcgctgatcgcggtggctacccccaacctgggctggggcgtcgtggcgctggccaccgtcgcgatctgggtcggcctcccgctgctgctggtcctgctgctggtgtggctgcgctacatggtgcggcagcgcgggcgcatgcccggccgtgtacacgcgttgatgttcgcgccgaccaccgcggccctgctcatcgtccccgtgtggctctccctgcaacgcagttgggacagcgttgccggtggctcgcgtgcgcccatcgcggagatgcatatcaacctcagcgggcaccccctgtggctggacacctcaccgtacgcgtccaccggctccggcgctggtccggatctacccatgcagggcgacacgcccgagcgtttcatggccttccaccgctaccccaacacgcagtccgacgcagaccgcgcgttcccgtacgaagacgcacgcctgaagcgctccgttgaccactaccgctacgccacgccgtccggagatcgcgccgtcaccgatgtgccactggtccgccaggcgtatccggacaccacgccgttcaacgccggatggcgccgcacgggcacaccagagctcgtgcacctctattaccactacagcgatcatgtggaggtcgcgcccacgctggcacgcctcagcggtctcaccgccgacgagctggagcgcagccgcttcgaaggcctggtgctgttcaagatccacaactacggcagcgcgccgatcgtgcggatggaagtcaatggcaacgcactggatatcggcgacagggccattgcgatcatcccggtcgcgcccgtcgattgcaccgcctacggctttcctgccggtgtcgggctgatgtcgctcgacctgccgctgcaggtgcgctggcagaccgtcgctgcgcccacgcgatggcacaacgcgcgcgtgcaggtgcccaccttccggcaaccgcagccactgcagggtcaatcaaccttgcagcgcgtcctgctgtacgtgctgcccgatgatgcgctggccgcagagcgctacgccgaggtgtttgacggcgattcgcggcgcggcatcaaagccaccggcctgccggccagtgctgcggcccacgcgcgatgtggcagcgcccgcgccacctacggcgaaggcgccgacaccgtgctggctgactga

SEQ ID NO: 514902 - DNA, 474 bp, Stenotrophomonas maltophilia
atgccggctggcctggacgagttcgaacagcgtttgtggacagcaaatgcgggtcaggtggtgagcaagggcaccgacacccttcttctgcttcgcctgttctcggaatcaccgggcgtgatggattcccaagagttcaccaaggtcaccggtatcctgaagggatacactccgtccgctgaagggattccggaggtgctcgacgcacgcatgaccagtggtggcgcgggcttcgcgcacaagggagactactggttgtccgattcggcggatatcgagctacatcgaccgcacaagcgcgatagtccgatggaagtcaaagtgacgtctgtcggatggaacagctatcgaaaagaagaccgttccttctatctccagttcacctgtcaacccagggaaatccccgtcgagaagctcagtgcctggcaaggtggcaacggcaatctctggcggtcttttggaccgaccaagtag

SEQ ID NO: 514903 - DNA, 615 bp, Stenotrophomonas maltophilia
atgaagcaccttccgattgccggtcttttgctgctgtcgctcaccgcctgcaaccgcagtgccgaggccccgtcgccgaccatcgctggccccagtacgggcgccgcagccacgcctgcaccgatggccccggccgccgcgcagggcccggcgcgcctggatggattcgctggcgcaacgctgggcgctggcatcgcagaggtccgcagtggttttggcacaccgctgcagggtctgggcaccgacgccagtggcaagccgttgccggctgacgacggtaacgacggctgttatttcctgcgcccgcaggatgccgaagacccccgcctgatgatcgaaggccgcaagctggtgcgctacgacgtgcgcagcgccgccatcgccgcaccgggcggcggcaaggtcggcatgaccctgggcgagctgcaggtgctgtaccccgagcgcggtgacgtcggccctgacaagtacgacgagaaggcccagcacctgcgcgtgcgtccggtgcaggagggtggggcggtgatcgacttcgcgctcggtgccgatggtcgggtcaatgcctggcgcgtcgggcagaccccgcaggtcgattatgtggaaggctgtggctga

SEQ ID NO: 514904 - DNA, 549 bp, Stenotrophomonas maltophilia
atgcaaccgcgcaagaccgatctcgcccgaaccgcgctgcaggcccaccgcgcgccgctggacatgcgccagcgccggttgctgatcctgtgcgacggccagcgcagcattgccgacctgaccagcctgctcggccaggacgcgccggccatggtcatccagctggtgcaggccggctacctgagcaccggtaccgccgccgcggccccaccgccgtcgccggcacccgcggcagcgccggttccgcccacaccaccagccgcagcacctgcggcaactccgcccaccgcagtggagcgccgccgctcgctggtagctgcgcgcatctacgtgctgggcatcctggaaatgcagcgccatccgcaggcggcggcgctgttccgcgacctgcagcaggcacgcgccgaaggtgaagtactgcaggtgctgcactcggcgatgcagatgctgcccgggctgacctcggagggctattgccagcgcgtgcgccaacgcctgctggaagcgctgccgctggagcattgcgacgcgttcgcggaagcggcgtaa

SEQ ID NO: 514905 - DNA, 636 bp, Stenotrophomonas maltophilia
atgcgcgtgatgttgctgggggcgaccgggctggtcggcgggctggccctgccgatgctgctggacgacccgcgctgccgtgccgtggtggccccgacccgacgggcgctgaccctggcccacccgaagctgtacgccccgctgctgcagttcgacgccctgccggaggcgcccgactgggcgcaggtcgatacggtgatctgcgcgctgggcagcacgatggcccaggcggggagccgtgaggccttccatcgcatcgaccatgactacccgctcgcatttgcgcggctggcacgcggccagggtgcgcgcgccttcgtactgaattcggcagcaggggccaatgcaggctccgcgatcttctacaaccgggtgaagggtgaactggagcgcgatctgcgcgcgctcgagtttgcttcgctcactctggtgcggcccggcctgattggcgggcagcggcagcaggtgcgccgtggcgaacacttcgccctgcgggtgctgggcgtgttggggccggtgttgccgcgggcgtggcggatcaatccggccgaacggattgccagggcactggtggatgccgcgctggctccgccgccgggcgagcacgtggtgacttccagcgcactggtcggttga

SEQ ID NO: 514906 - DNA, 909 bp, Stenotrophomonas maltophilia
atgcccctgcccgacctcaacctgctgctggccctggatgtcctgctggacgagggcagcgttgccggagcggcccggcgcatgaatctgagcgcgccggccatgagccgcacgctggggcggatccgcgacgcgttgggcgacccggtgctggtacgcgccggtcgcggcctggcgccgacgccgcgcgcgctggaactgcgcgagcaggtacgcgatgtgatcgagcaggcccaccgggtgttcaacgatggacgtgaggtggacatccagactctggaacataccttcagcatccgcgccaacgacgtgttcatcggcagctacggcggccgcctgcgggaagtgttccgccagcaggcgccaggctgcacgttgcggttcatgccagaaggcgataccgacgacgacgcgatggtgcagggccggattgatctgtatatcagcactgccggcaagcatacgcaggaaaccaaggtgcagaacctgttcaccacggcactgctgggcgctgcgcgaaaggatcatccgctgttcgacggcgatatcaccgccgagcggtttgccgcctgtgaccacatcgccgtctcgcggcgcggcatcgcgcatgggccgatcgacgacgaactggcacagctgggcctgcagcggcgggtggcgatggtcatccccaccttccatggcgcgatcttcgctgcagccgcctcggacctggtgctgccgcagatgcccagcgtgatgctcgatcgcatcgcctacatggggctgccactgcgcatgttcccattgccggtgccagtacgcacggtggcgctggtgcaggcctggcacccgcgcatggacaacgacccggcgcaccgctggctgcgccgtgcgatcaagagcatgtgcgacgccgacgctgtgtaa

SEQ ID NO: 514907 - DNA, 1515 bp, Stenotrophomonas maltophilia
atgagcgcgatcaccgtgccacaggccccggccgccccacttgcccctgcgttcgatcgccgcatcgtggtcggactgtgcggcgtgctgctggtggtgctgctgtcgggcttcaacgagaacgtcaccaaggtcgcgctggccgacatccgcggtgggatgggattcagtgccgatgacggcaactggatcaccggcatctacagcgccatgtcggtcagcgcgatggccttcgctccctggtgtgcggccaccttttcgctgcgccgcttcggcctggtgatgatcgccgccttcatggtgctgggcgtgctgtgcccgctggcgccgaacctgccgaccttcctgctgctgcgcgcattgcagggcctggccggtggtgcgttgccgccgctactgatgagcgtggcgctgcgcttcctgccgccgggcatcaagttgtatggcctggcgggctacgcgctcaccgcaacattcgggccgagcatgggcacgccgctggccgcgctatgggtcgagcacgcgggttggcagttcgcgttctggcagatcgtgccgttctgcatggccggtatggtgatggtcggctggggcctgccgcaggacccgatgcgcctggagcgctttgcccagttcaacggcgtgggcctggccctggggctgccggcgctggtgatgctggtgctgggcctgacccagggcgcacgcctgaactggttcgactcaccgctgatcgcggtgctgctgggcggcggcaccggcctgctggcgttgttcttcatcaacgagtggttccacccgctgccgttcttcaagctgcaactgttggcccatcgcaatctgagctattcgctggtcacctgcgtgggcgtgttgttcgtactgctggcggtcatcgccatcccctccggcttcctggccggcgtgcagggctaccgcccgctgcagaccgcgccgatgttgttgtgggtggcgctgccgcaggcgattgcgttgccgctggtggctgcgctgatgaaccagcatgcggtggattgccgctgggtgcaggcggccgggctggtgctgctggcggcggcatgcttcatgggggcacatctggatgtgcagtggaaccgcgacaccttcctgtgggtgcaactgctgcaggtcgtggcgcagccgatggcggtattgccgttgctgctgttggcgaccaccggcctggcgccgcaggacggtccttatgcctcggcctggttcaacaccgtgaaaggcttttcggcggtgtttgccggtggcgtgcttgatgcggtcggacagtcacggcgccacctccattccaccgcgctggtcgaccacctgggcaaccagccgtggttgtcagccagcgccgatctgcccgcgcgcctgcacgcccaggtacaggcgctcacctcggcggatctgtactggctggtcgcgctggtgtccctcggctgcctgccgctgctgccgtgggccacccgtgtccatccgccacgtgccgtggcctga

SEQ ID NO: 514908 - DNA, 570 bp, Stenotrophomonas maltophilia
atgtccgcatccccttcccgttcgcgccgcaaggcgcccgacagcgtgcgccagtcattgctgcaggccaccatcacagtgatcggccagcatggactggcggcactgaccgtacaggatgtcgcgcgcgcggccggggtcagcaaaggcgcgttgttccaccatttcagcagcaagcaggtgctggtcgatgaagccatcgccacactcatcgccgacttcgaagcgcaggtgcgcggcctgatggaaggcagcccccgccatggctgcttcagccgcgcctacgtacgagccaacttcgatcacctgctgcagcaggagcgggacaacgacatcggcctgaccctgggcaacatgctcgaacccgccctgcttgcccagtggggcgcatggctgcgacgcatgctggctgaattccctgatgaagcctccgacccgcgcctgtatgcagcgcgctgcgtggccgacggctactgggccaccgcctacggtcgtccgctggatgaagaagaacgcctcaatgcactggccatggccgagcaggccctcaagctgtgcgacccgcagtga

SEQ ID NO: 514909 - DNA, 258 bp, Stenotrophomonas maltophilia
atggtcattaccgtcaagtgcagtgccgcgcagtggtccctgttggaccccgctgcgggcctggccgaagcattcaacaccggcgccgcagcgttcgacgccgcggttggccgggccagcgcccaccatcgccggaccggccagcgcagcacggtgcgcgtggaggcgctgggcagcagcgtggatgccgtgcacttcgaggcgttggcgattgcctccgggccggctatcgggctgaatcctgcgccggtggcgtaa

SEQ ID NO: 514910 - DNA, 483 bp, Stenotrophomonas maltophilia
atgaaaaagaaaatatcaaaggctggctgcggatcgaatcacgcacaccaccagcgcggattctctctgatcgaactcatggtggtcctggccatcatcatgattctctcgctgatcgcagtcccgcaatacaagaagttctctacccgatccaagctggcggcggccctggccgaactggccggcgggaaggcgggagtagaggcgtggctggccgaacggggtgatctctatggctcagacaaccgcaagctgggactaccggagagcagtgagcgctgtgaaaccatcgcaacacgtattcgtgcggatggcggcctcgagatcgattgcctgctgcgattcgacactggctacaacgtggggacatggcgaaacaacctggtgctgatcagggactcgggcagccatgaatggcgctgctggactgccatcccctattacgacctcctgcccaaaggctgtggccccgacaatccgtag

SEQ ID NO: 514911 - DNA, 456 bp, Stenotrophomonas maltophilia
atgaataccgtacccggcccgacaccccgcgcaggcacaggcccatcccggcagaagggtttttcccttgttgagctcatggtggtggtggcgatcatcgggattctcgcgatgattgccctgccgcagtatcagcggttctcggccaaggcaaagctggctggcgcgctcgcggaggtcgccggcgggaaagttggcgtcgaatccctattggctgagggcagcgatatcacaacgcctgcatcgattggcctgcccgagaccagttcccgctgcgatgcgattgcggtaacgaccgatgtcaccaacggagctacgagcatcaactgcgagctcaagaacgacgctgcaatcggcagtggcaacctgaccttggatcgagactcggagggcgtctggctctgcaggagcgacatctcggaccagagcctgcttccccagggctgccaggcctga

SEQ ID NO: 514912 - DNA, 447 bp, Stenotrophomonas maltophilia
atgcgccctcgatcaaccacccaggcgacacatcacccgcggcactaccgacgatggactttggtcagcatcgtcgccggactgacagccatctacgcactactgctgtgtgcgccccgcctggatgacgatgccagccgaacccggcttcgcgatgcggccaacgtgctgggcggcgccatcgccgccgtggaaaacagctacgccgaaggtgatctcaccgtgaccgacccgcacctcggcctgcctgccagcgccgcacactgcgcgcgcctgcgtgcatcgctgcccgataccggccgcgcagtgctgacctgtgatctacaccaggagggcagcgtgcgatggcggcgaacccctgcgggcgaatggagatgcactgcaagcacggccgatgtgcatgcagtgccgacgccgtgccccacggagctacggcgcactttctga

SEQ ID NO: 514913 - DNA, 810 bp, Stenotrophomonas maltophilia
atgagcgcatttgaccgtggagacggggacagcatggcgtcgcgcgtgccgaaaggtatccagggttggcgcgtggagcgcgttgccaccgatgctggcgacctttggtttccagtggaagatcaggtgatgcgcgagcatgcccgcaacagcgggcactgggacgccgaggttggcaaggtgctgcttgacgcagcaaggaaccgcgccgagggcgtgttcatcgatgtcggcgcaaatgtgggctatttctcctgcctgctgtcgaagcggtatcccgccttgcgcaccctggcgttcgagccgcagccgaggatgagtgatctgcttcggctcaacgtctggccgcacggtgatcgcgtccgcgtgcatgcctgtgcgctgggtgaggcacgcggtgtcatcgggctgcgcagctcgcccaacaacctgggcgatacccgtggcgtggatgacgatgccgtggacatgctggtgccctgcatcagcctggatgccctgtatccggagttgcaggccgacgtcgtcaagatcgacgtgcaggggtacgagctgcaggtgctgcgtggcatgaccggcgtgatcgcgcgatcgccgggcatacgcatcgtcgtggaattcagcccggcgctgctgcgtgccgagcacatcgaccccctgcaggcgctggatgcctatcgcgcgttcggcctgcgcctgctggtgataggggatggctcgctgcaggaattgaacaacggcgagattcttcgccactgcgcaactgccggcccgtcgggccaggtagatctgttgctatcccgcgactga

SEQ ID NO: 514914 - DNA, 1077 bp, Stenotrophomonas maltophilia
atgcagaaagcagtaatcgtcacaggcggcgcaggtttcatcgggtgcgcactctccgcgcacctcaagcagtttggattgccgatcgttgcggtggacaacctgcatccgcagattcacgcagaatcccgtcgcccggatgctcttgaccccagcgccgaactttacattggcgatgtgacagaaatgcagacgtgggagcaggtgttggaccgttggcatccgtccatcgtggttcaccttgcggcagaaaccggcactgggcagtcattgaccgaggcgtcgcgtcacgcgcacgtcaatgtcgtgggaaccacggcaatgatcgatgcgttctcggcccgcaatctggtgcctgaccatgtgctgctggcctccagtcgcgcggtgtatggcgaaggcgcatggctggatgccgatggcacgacgttctatccgccgccgcgttcgcatgccgtgttggcacgggcacagtgggacgcggtctccccttcggccaccggtccggcgcagcccctgccgcatcgcgcagacgctgtgttcccggccccgaccagcgtgtatggcggcacgaagctggcgcaggagcacatccttgcagcctggtgtggtgcgatgcaggtgccgctgtcggtcttccgcctgcagaacgtgtatgggccgggccagtcacccttcaatgcctataccggcatcatcacgctgttccaccgtctggcgcgcaaggggcaggcgctggatatctatgaagatggattgatcgggcgtgatttcgtctacatcgacgacgtggtggctgccttgatcgcaggcctgcgcagtccgccgtcgagtgtacgtactcttgacgttggcagcggcgtggtcaccaccattgccgatgccgcccgggcgatcgcagccatgcacgacgctccggccccggtggtctgcggaaagttccgcgatggcgacgtgcgctgggcggttgccgatgcggcgccgctggcagcctctctggatgtgcatgcccaggtgtccttcgacgaaggcgcgcgccgcgttggccagtggctgatcgagcgggggtacgcatga

SEQ ID NO: 514915 - DNA, 1956 bp, Stenotrophomonas maltophilia
atgagccagtctgcgtccatggacgagccctgcgctgtcgtcaccctggcggcgatcacgggctcaccgagggactggctggattcggtacgttcgctggagaacttgcatgacagcgacggctgcttcattgctgcctgggacaacgtaaacgcagagcgctgcttcaagggtgccaaggcacagctcatgccgacgtggacgttgtcggcgggcatggccgttgtgctcgaacagcatcctggcctcgaagcggtgctcgtggccggctctccggtggcggtgccgcccgcattgctgcagcgggcgcttgcctggatgcgcgacgatccgcgtatcgcatcggtatcgttcctgtccaatgctgctggaacgctgagcttcccctaccgtaactcgcccacgccctatggaatcggtggtatggatgaagcggcagtgtgcgagcgcctccggcagaccttgccggacagtgggccggtgtcgctgcaggttccggtggggccggtcgtgctggtcaacgcgtctgttctgcgtgcgttggggggattggacgaccagcgcgacaatctggtttcgctgtcactggctgagttcggtctgcgcagtgcgcgccgcggcttccgccatgtgcttgacgctggcagctatgtgaccgcgcagtggacgggtacgggtgctcccgtggaagcgaccgaagatccggcgtcgcgcgcgtcgttgcatgctgcggatgccagtttcccagccttgcatgacgagcttcgtgcatcggcgaaatcgccgttggcaatcgccctggacgttgccaggtcgaaggtgcaggggctgcgcattctgatcgatggctcctgtctggggccgatggagatgggaacccaggtgcaaacgttggcgctggtgcgcgctttgctgcgccgcgaagatgtcagtcgggtgatcctggccgtgccgcacggtcatctcccagtatatgccgccgacctgatgctgcagccgaaggtcaacctctgcaatgcggcgaaccttcgcttcgagggtgctgacgaagtggacatactgcatcgccccttccagcccgacagcctgatcccgtgggatcgttggcgccaactcgccaagcgcacggtggtgaccctgcaggacctgattgcctatcgcatcggcagttaccacgacagcggcgagcgttggctgcagtaccgaggcaacatcgagactgcttcgcgcaacgctgatgcgatcatcgccatttctgccgacacccgcgattccctcgttgaagagcggctgccgatcgacctccagcgtatccacattgcgaagaatggcggcgatcacctggcggataccgatgtggaacagattccggcggagctggtggctcgtggcatggccgcgatgcccttcctgctcgtgcttggcgccagctactcgcacaagaatcgtgacctggccatccgtgcctggaacaccctgcgcaagcgtgggcatgccatcgggctggtattggcaggtgccgtcgttgccaagggatcgtcccgacaggaagaggctctggcaaggcggacgtcggacgaagatgcgctgctggtactgccggacgtcagcagtgccacgcgtaactggctgctgcgccatgcggccatcgtgctgtatccaacatccgccgagggattcggcctggtgccctttgaggccgcagccatgggcacgcccacggcccatgtgaacttcgggccgttgcgtgagctgattgactcaccggaactgccgcgcgactgggacccggagcacatggccgactactgccagcagttgctggaagatccgcagcagggcgcacgcaacatccgtcacatccttgcaagtggtgccccgctgacctgggacgcaaccgccactgacctggtccacgcctaccgccagatcctggctggcgcaccgcgccattaa

SEQ ID NO: 514916 - DNA, 303 bp, Stenotrophomonas maltophilia
atgaataccactgacctagatggaatttccctggagcaggcgctgatcgacttcgaagtcgccaacgcccgtgtaatggacctgacctcgcgcttgacgtcgatgagccgtgaactgatcagcgcacgttccgaactggagcgcatcaaggtggagcaggccacacatcgggttgcaccggtggttccgccagctctcgttgccgagcatgctgaactgcaggagcggttcgagcgcgtgcggtcgtcgcgcgcggtgcagattgcggcgatcttcagtggcaagctgcggcggttcctctga

SEQ ID NO: 514917 - DNA, 1155 bp, Stenotrophomonas maltophilia
atggcgcggccacgcattctccattgcatcaccgtctacaacggacgggcctttgtgcccgcagccatcgaaagtgcgattcgcatggaccagacgcacgcacagatcgacgtactggtgctggacgatgccagccctgagccgggctggagcgaggaactggctgagttctgtcgtgagcgcgacgttatgtactaccggacgccgcgcaacctgggcattccgcgcaacgtgagccttggcatgctgactgcggtcaagcgtggctatgactacgtggtgatcagcaattcggacgtgctgtatccgcgcgacctgatggggcagatgctggaggtttcccggcagccaggcgtcggttcggtcactgcctggtccaacaacgtttcgatctattcgttgccgaatgaagatcccaaccgcttcctgcatgaccagggtgtggtggattgggtgcatgcgggtctggcgggtcatttcggcaacgcagcgatggatattccggcaggtatttccttctgcatcctgatctcaaccgatgtcgtgcgcgaggtcgggatcatggatccttgttttggtcgtggttactgcgaagaaacggactggagcctgcgaagcctggcggctgggtaccgcgttgcactggcgccggggacctatgtgttccaccacggacgtggttccaatctggacgcgggcatcgtgtcgcttaatgcgaccacggtacctgggaatgaggcgatcatcgatctgcgctatccgttgttccgccagcaggtggacgcgttcgtacagtccggtgtcctttccagggcgcacgaggatgcgattcgcaagttggtgatcagcgcgggccggcagttcggctacgggattgatgtaggctgggtggcgcgcgatcgcagtgacgagagccaggtcattgttcagttctcacccgacgcagtgcagggcgaggtagtggcatcgttccgcggcttccgtctgcccatgaagctgacatccggaggcttgggggcgcagatccgctccgtgtttggcgcggagccctctgtattgaacctgttcgaccgcgggagcgtggcggagtccctgtcggccgaattcgcttcggtggctcgccccggctttggaaactatccggcgacgatctga

SEQ ID NO: 514918 - DNA, 1293 bp, Stenotrophomonas maltophilia
atggcccttgctgaaaagctgctacctaatccggacaagaacattcccttcctcgacgcggtgcgcggaatcgccgtgctcttcgttctggtgcgtcatgcatggggcctttcatggtcgccatcggcaagcatcgcaggcgtcgagctgtcacgcatcatcgtaatgatgtcctcgggtgtggacctgttcttcgtcctcagcggcgtcctgctctccacccgcttccttcgcgctgatgcaaatggcaagccggcgcccgaatacctaccctacatcaaagcacgcatccttcggatcggcccgccctactggctggtgctgttcctcgtggtcctgttctataccccggtgttcattccacaggagaaggtctggagcacggccggcgcagccatattcatcagccacctggcattcggccaatcgctgttcctgttctccttcggcgcttacagcgtagggacgcccttctggacgctgaccattgagatgctcttctatctcgtgctgccactggtggtccgtgccttctaccgcggccgatggtggcagggcattcttgctgccttcctgctcagcagcgtgtggctatacctgtgccgctaccacctcgatggcttggttgatttcctccagcggcatacctttggcctcggttggtcgagcgagggcgtccgcttcttcctcagccaccagatcctgggctatctacctcacttcgcgatcggcatcggcatcagtgcgctgctgctgaagccacgcacgcatcccttgctgaccgaaaccgccggcctgctttatgcactgcttggggctgcgctgctgcttgcgctcatgttcaagcttggtggcctgtctctggcctacggattccaggatcccacggcctacttccgagcagacgatcgggctgcacggctgttctactactttgaatcaatgccatttgccgtcgcgtacggcctcatcatcctgggcctttcgcttggcagcagcatgctcaagcgcagcttcgccagtattccaggactggcattgttcggcgtgctggggtactcgatctacctgattcacatgccgctgctgtacaccatgaacaaccactactggatcgctgcggaaacgcatccctggtggcatttggcgaagttcctgaccgcgggaaccggcgtgatcctgctgctttcgctgatcctgttcctgaccgtcgaaaagccttcgatgatatggtccgcacgcgccagccaacgcgtgcggacgcccccacggcccagtgccacagggcattga

SEQ ID NO: 514919 - DNA, 2946 bp, Stenotrophomonas maltophilia
atgaccacgatcaacgggcgccatggcgtcttcgaaacccttccgggcgactctgtcgtcgctgattcgctccgctggtatggcgaatgggctgaaacagagctggaccttctgcgtcgttttgtcccgacgggcggcgtggtggccgatgtgggctcctttatcggcacccacgccgtcgcactggcgcgcgcaactggcacgttggggcaggtgctggcgttcgaaccccgccgcaatacgttcgcggtgcttggccgcaacatccatcgcaatgtcctggatgctgtcatcaaggcccggaatgtgggggtatccgaccagccgggcacgattcacctccttgatccggaggaaggcagtcagaacctgggcagcttggctctggtagatcagggtggcggctacgaggttgaactgataaccctcgacatgcttgaactgccgcgactggacctgatcaagatcgacgtcgaaggcatggaggcaaatgtcatccgcggcgcgcgacaaacactcgagcgctgccggccagtggtgttcgccgaatgcaactcggtcagcggcgctgcgtcaacgctggctgcatcggaaaacttgggctatcgcgcattcggatcgatctatcccgcgtacaaccctgacaatatcaacggctgcccggataacttctttggtagcaacgccgaatgcgcgctgttcctggtgccaaaggagcgcgtggatgacctgcccctgcaggacatgcgcgtgatcaacactctggaggacgtggtggctctgctgctcgaaaagccgcagtacctgccagagatgctcccggatgccccggaggtggaagccgtgcaccggcaggcaccgcacgccgtcgacgcagaggcgcaggttcacccgccactgcacgtggtggtccccttctatcgcaacgaacagctcgtcgcaccgctgatgcgtggactgcgcagcgtctccggagagctgatcgccgcacgcgcatcagtctggttctacaacgacagccctggccacgagggcctggcgcttgccctggatgaagcactgcaggccggcctggagggcgtaccgctcgagggcatcgccaacgaggacaaccttggcttcatcggtacctgcaaccgcgcgtttgcccgcgcgatcgaagagggggccgacgtacttctgctcaattccgataccgaagtgatgcccggtgcaatcgccgaaatgctggccgtcgccgggttagatcccatgttcggtttcgtctgccctcgcagcaacaatgccaccctggccagcctgccccactcgttcgagcacaaggatgtcaccgccgacgaagccttcgcccgctttgcgccgctggcacgaaggctgccacgctgcaccctggcaccgactgccatcggcttcgcgctctggatccgtggcacgttgctctccgagttcggcgtattcgacacagcgtatggcaagggctacaacgaagagaacgacctgatcatgcgcgccaatcgcgcaggctatcgggcggtgctggccaaccatgccttcgtatggcaccaaggcgagcagtccttcgccaccacccagcagcagcgaagcgagcgtgacgcacacaacggagcgttgctgcgcgcgcgttatccggaatacccgaagctggtcgaacgctactatcattcacccgagtaccgtgccgagacgctgcttgaggcgctcgaaccaacggattcgccgcgaacgatcgcgttcgatttttcctcgttcggcgccttccacaacggcacgttcgagtcgggggtgaagctcgtcgctgcggcactacgctcctggcccgacgaagtgcgcatcggcgtgatcatgactctggaggcatgggacttccacggcatgccgcgtctaactggcctgacccggcttgagcccggacagagcaatgggcaggcggcagccgtcgtgcgcatcggccagccctaccaggtggacgtactcacccggctgttcagcacggctccagtagtgggcattttcatgctcgacaccatctccagcgactgcggatatcttgcgctggacatggatgaagacatctggcgcttcgcgctggagaacatgagcgtgctgttcaccaattctgcgttcacgctggatcgcatccgccagcgctactcgatcgccccccacgtgatgcagagcgtgtcgcgccattcactggatccggctgattatgccgagcacgagccgggtgcggcagctggcaaccatatcctggtgatcggtaaccactacgcacacaagttcgtgaaggaaacggcagacgcattggccgatgccctaccgggccgcaggatcatcgccatcggttacccgcaggatgtggagcgatcaaaggacatcgaagcattccaagccggccatatcgatgaccagacgttccgtgcgttctatcgcgatgccgagctggtggtgttcccgagccactatgagggcttcggtttcccggtcctgcacgcactggcgcaccaccgcccggtgttcgtgcgcgataccgggctgaaccgggagctggccgggcagatagccacgtcagccaacatccaccgctatgaaaccacccgcgaactggtcacacgcctcagcgccggcatcccggcctggagcaaccaacgacggccaggcgaagcggatggatggcggcgttcagctctcgaggtctacgccactctcaacgaggcaatgcgtcgcgtcgatgcgaagcaggtcgccacagccctgcgtcgactggatggactggccgcgacattgcctcctccgtcgctacgtaccaccggccagcgtaccggcgtccgcttgggtcgcatgattgacaggctgttgcgtgttccgggaatgtccaagctggcgcgcggacttgctcgggtgtatcgcggcacacgtggctga

SEQ ID NO: 514920 - DNA, 1317 bp, Stenotrophomonas maltophilia
atgtgctctgacatcgcgatccaggtgcgtgacctgggaaagtgcttcaacatctacgaaaaacccgctcaccgcttgatgcagatgctctggcgtggccatcggcagtactaccgcgagttctgggcactccgcgaagtgggcttcacgatccgtcgcggcgagacggtcggcatcattggccgcaacggcgccggcaagtccacgttgctacagatgatctgcggcaccctcaccccgaccgagggcgagatcaccgtcaatggccgggtcgcggcgctgctggaactcggggccggcttcaatccggagttttccggccgcgagaacgtctacctggccgcttcgctgtatggcgtcgatcgcgagacggtgtccaagcgcttcgacgccatcgcggcgtttgccgatattggcgccttcatcgaacagccagtaaaaacctactccagcggcatgtacgtccggctggcgttcgcggtaatcgcgcacgtggacgccgacatcctcatcatcgatgaggcgttgagcgtgggtgatgcctacttccagcagaagtgcatgcgtttcctggccggcttccagcgccagggcggcaccctgctgttcgtcagccatgacatgggtgcggtcaacgcgctgtgcgcgtccgccgtgctgcttcgccgtcaggcagggcactacctctgcgatgtaggcagcgcccgtgaaatctccgctatctacctccgggacctttacgctgaccgcatggaggctcctgaagccgtgggcccgcaatcagcgcgaccgggcaactatcaagcagccaacgtgcaggccacccgcttccatgctggcagcttccgcaccgaggccgatggattcggagcaggcggcgcggtgatcgagcacgctgtgttcaccgatgtggatggaaatgcgctgaccgagttcacctccaacgatgacgttcacctctccatcactgcacgcgcaggcaagacgcttgcctatccggcaatcggcttcatgctgaaggatcgcaaagggcagttcgtcgttgcggagagctcggacagctacctgcgggaggaggccatctcagtcgaggccggcagcacattcacggtcgccttccagatgcgcctgccgcggctcgtccgtggcgagtacagcctggatgtagccttagccgaaggccccggcgatgatcacgtccagcatcattggctgcacgacgtaatcgtgctgacggccctcaattcccagcttgttcacggcatttccggtgcgcagccgctggatgtctcgttccgaacgtcgcacagcacatga

SEQ ID NO: 514921 - DNA, 819 bp, Stenotrophomonas maltophilia
atggaagcctaccccagttccccgctgcatctactgcgcagcctgcgccataatcgcggcttggtcgtagccttggccgcccgagaaattgcagcccgctaccgggggtccctgctgggactggcttgggcgctggtgcagccaattttcatgctggccatctacaccttcgtgttcagcgaggtcttcaaggcgcgttggcccggtggcagcggctcgcgcaccgagttcgccctggtcctgttcagtggcctgctggtgttcaacctgttctcggaagtattcaaccgcgctcccaccctcatcgtgggcaacgcgaactacgtgaaaaaggtcgtcttcccgctcgaagtgctgccatgggtgagcgtgctcacggccatgttcagcctggccgtgaacctggtggtgtggctgctgttctatctggtctcgacgggcctgccgccggtgaccgccctgctcgccccggtggtcatgctgccgatggtcctgttcatgaccggcgtcgcctggctgctgtcggcactgggcgtgttcctgcgcgacaccgcacagatcacggcgatcatcaccaccgcggtgatgttcctgacccccatcttctatccgatcgacgcgatcccggcctcgctgcggccgttcctcaacatcaatccactggcgccgatcgtcgctcagatgcgagatgtcctgatctggggcaagggcctggacccggtgctgtaccccgtctgcctactggtttcagcattggttttcatcgccggcttcgccttcttccaacgcacgcgcagggggtttgccgatgtgctctga

SEQ ID NO: 514922 - DNA, 402 bp, Stenotrophomonas maltophilia
atgagtcgccagttcctcctgtttgttatttgtggtggcactgcggcggcggtcaatgtcggtagccgcgtcctgttcagccttgctttccctttcgaggtggcggtctgccttgcctatgggctgggcatgctgacggctttcatcctcaatcgagtcctggtgttcaagggttcgaaccggcctatcgcacagcaggtcgcctggttcgtcggcatcaacgcaatcagcctgctgcagaccttgggcatcagcatcgttctcaagcgctgggccctgcctgcactgtcgtggccattggatatcccactgagcgcccatctggtcggcgtagccgtcccgatcgtaacggcttatctcggtcacaaacacttcacattcgcacgccgcggggtcgattga

SEQ ID NO: 514923 - DNA, 1887 bp, Stenotrophomonas maltophilia
atgacccccagatcaggtgccgtgcgtacccgattgttgcagtggttccatccgcagcacccggtgttcctactggccatcctgctggtcccgatgatggccgtgcgcgcctatctggtgctccgtttcggcagcagcagtccgttctgggaccaatgggatgccgagctcgacaacctgttgttgccttatctgcggggcgagctccacttcagccagttgttcgcggcacacaatgaacaccgcattcttttcacacggcttgtttcactcggcttgtttgcagccaatgggaaccagttcgatgccaaggtggaaatgctgttcaacatcgtcccgtacgcggccgcgttgggcactatggcttgggtcggcatgcgtacgctggtgcccgctgcccgtccgttcctcatcctgggcatttttgcgttggcctctgcgcctttcggctgggaaaatctgatcgctgggttccagaaccagttcttcatcctggcacttctgtcattgatcaccatctggctggcatcggctgaggtactggatcgcaggcgcctgctggccattctgatctgctcggtactcgccctgttcaccatggccagcggtatctttgccgctgcggcagcggcgggtctgctcgtttatcgcctgctcgtcgctgatgttgaccgccgtaggggcggtcttgccctgttgctgatgctggcggtcaccgtcgtgggtcttgtgacccttcccgcaccaccacatggcgacaccttccatgctcgttccatcggccagttcctggaggccttgcgcaatacccttgcctggccgttgcgaccgcgctggatcagcgtagcggtgctttggctgccgacggtcgctcttaccctcgcaatgctgcgccgcacgctgacccgacagagcatttcgcggggagagcgtttcgctttcgcagtcgcaggttgggtgctggtgcaggccgtagccatggcctactcgcggggcacagaggtgcacaacgtggtgacctcgcgctacaccgacctgctggccatcggtgtgatcaacaacctgtggctggtactgcacgcttgcttcggcaatggatcgcggctcccttcatggggtcgcaccacagtacctgcggtattcatcggctggatcgcgctttcctcgttcccgaccttcgtcgccgccaagggcagcatgcaggagcgctcgattgctggcgccatgcaggaaaagatactggcgacctacctgcgcgatggtgatctcgacgcgctgcgcgacacccccggtcgcttcccctatccagacgccgaacgcatcgatcacgtcctgagccgctcagacgcagcttccatcatgcccatcgagattcgccggccattggcgttcccgacggaccactgcagcggactggagcaccccggcgccttcgcggggttgcccaaccgtccacaggccatcggtacttatcttgtcgatggcggcgacgccaacatcatcgactgcagcagtgcgccggtgctggtgaagggcggcaggatgctgtacttccagggtggctacgggccaccaggggtggccgccaccctggtcggcaagcaacacaccatagaattggtgacccaaggcgtagccggcgatcgttggaggccgcgtctgctggatctgcctgcggatgagtaccaattgcatatcgtggacaacgatccccacggctgggtcgcggtaacaccgccgatcgaagcgggccgtcttacccagtttcgcgtcgtagcagaagaacgttgcggccccggcctgtacatcgccctggtgctgaccctcatgatgctgatcgccgccgtatccggcgcagccaatcgccaccgagagacgcaggcatga

SEQ ID NO: 514924 - DNA, 1302 bp, Stenotrophomonas maltophilia
atgacccagaagcgatttgccatcatcggcgcaggccccatgggcctgatggccgccgtgaaactcctcgaccagggccactcggtcacgatctacgagcgtgacgatcgcattggcggcatgtcggccaacttcgatttcgacggcctgtcgatcgagcgctattaccacttcatctgcaagaccgactatccgctcttcgcgctgctggagcgctacggcctgtccaaggcgctgcgctggaccgacaccaagatgggctatttctacaagggaaagctctacaagtggggcaacccgtttgcactgctcgccttcccccaccttgggccgatcagcaagttccgctatgcgctgcacgtgatgtacaccaagggcatcaaggactggacggcgctggacaaggaagaggccggcgcatggatccggcgctgggtcggccagaaggcctatgacgtgatgtggaaggatgccttccgcctgaagttcttcgagttcaaggacaacctgtcggccagctggatcggcacgcgcatcaagcgcgtggcactgtcccgccgcaacctgatgaacgagagcatgggctacctggaagggggctcgatgacgctgctggaacgcatggtgcaggacatccaggcgcgcggcggccgtatcgagctgtcgcagggcatcgatgaagtagtgtccgagaacggcaaggtcaccggtgtatcggtgggcggcgaattcaccgcttacgacggcgtgatctccaccgcacccatccagtacgtgccggcgctggtgccggggctgccggaggacttccgcgccaaggtcgcggcggtgcagaacattcccgtcgcctgcgtgatcctcaagctcaagcacgcggtgagcgaaaacttctggatgaacatcagcgatccgggcatcgagatcccgggcgtgatcgagtacagcaacctcaacccgggccacgacccgggccagaagatcctgtacgcaccgtactacatgcccaagacccacccgaagtggcagcagtccaacgccgagctgatcgaggaagtgctgggctacctggcacggatcaacccggccttcaagcgtgactgggtgctggcctcgcactgccatcgctatgagttcgcgcagacgatctgcccgccgggcttccaggacatgctgccgtcgatgcgcacgccggtgcagggcttcttcatggccgacactgcgtattactaccctgaagatcgctcgatcaacgagagcatcaacacggccgaggccctggtgaacgaggcgctgcgcgcatga

SEQ ID NO: 514925 - DNA, 2058 bp, Stenotrophomonas maltophilia
atgggcgctacagcccccaagggtggctgcccgtcgtcggcatcgtcgttcctgcgtgccgatccggacatccaccatgccgccatcacctactgcgcaaacggcgacgaagcgcgtggcacgatcgaactgcgactgcctgccaaccacgccatgcgcccacgactggcggtggccggctacatcgatggacacgcagtacgcctgcgcatcgccttggaggatgatgaggaatcactgtatgtgatccagcgtgcgggcgagcaatggcagccgttgaacatccgggtgccgcagagttgggcgggacggcccctgcgcgtggtcctggatgaccaagggactggattccagcagtgggcgggcattggcatgctgcccgagcctgggcgtctgggcattccgatcatgtcactgctgttggccagcatcctgctgagtgcgctcgctctgccgcccccacggagcgaaggcgtgcctacacctcccaggaaaacacctgtccgccgcaccgtttcactggttcttctggctgcatcggtagcactgctggccgcgaagctctaccagggcgacgtcgctggtgtctggcatcatcctgaccaatccattccggtgaaagtcatggtcgccatgcatgaacatggcgatctgaataccgattgggctcgcgctgaccttcctgagttccatgcattccgctacaacttctccgggtacattcaagcggtctacctgaccatcaaggcgattgcaccagcggcattcaaaagcgaattcgacctgctgcactacctgctcgaattctcgcgctggtccgccgccctcaccttggcagtctgcctcctgctgctcgtacgtacgttgggtgttggttatgcgctggtcggggtgcttctggtcgcgaccaccccccaattcctgcaggacgcgcattacgcccggccagaggcatggagcacgctgctctcaacgctggcgttcgcgctcgcatgcctgaagcctcagcaacgctgggcccagttcggcctcctggcccttctgggcatgttggctggcgtgctgacgaccataaagttcacctatgccgttttcagcctgtactgcgtcgctgccgcatggcagcctgtacgccagttaccgggattgacgcggaagctccagcatcttggcatgttcggcggcgcatcgctggcaggtgttgtcttcggcatctgcgtcggttcaccggccatcgtggctgaccttcccggattcctggcgggcatccaggcgctggaccaccagtacggcgggggccatcccccgtttgggccgatgacgcacgggctggttccgcaatggcattggatcaccggttactacctggccaccctcggcttgcccttggtggtgctgcatgtgatgggctacttccgcacctcgctggcaccagccaaggccggcttcctggcggtcttcgccattacgtttggcgccttcctggtccagtcggtgttcttcgaacgcaatctgaccgcattgataccagccttcatgatggttgccgtggctggcgctgccaacatcgagcggttcgccgcggcccgcctcgcgctgcagcgccccttggcccgcaggctgctgcacctggcctgcatggggctgctggtactggcaggcgcttggggcatgtcggtcagcgcccgactggccccctatttcgaccgcatccacctgcagcagatactggatgaacgcaccgaccgactgcagggcatcgccgcggaagtgggcgccgtacgcaccgaggtcatcacttacccccaggtattgggcatggacctcccgccaccatcgacggactgtgtgctgttcatcggcacctcgttcaacgacgactggtcaaggcgctattattcccagatggatcagtcatttatccgcattggcagaatcgcctcggatttcaacgacgtcccgaccggtaccctgcacatctaccacagcccggcgtacgaattgttcgccacgcgcccggggtgccgtctcacggcgctccccacttccttccattga

SEQ ID NO: 514926 - DNA, 981 bp, Stenotrophomonas maltophilia
atgacggactgctcgtccccggcgccggtaaagccggtgcgccgggggcgcgcaggctcatgggtcgtcgccattgcggctgcatatctcgctgcactgtggtacatcgaccgcgagcgcaacatcctcgcgcagctgagcaacctcaacggcactctagccctttgcgccgggctggtactggtcagctatgccttccgctaccagcgctggcgatcggcgctctccgcgcaggggctgcgactgcaaggctggcgccttggcgccttggcctacctcgccggcttcgccttcaccgcttcgcctggcaaggcaggtgaactgctccgtatccgttacttcggctggcaaggcgtaccggctggtgccaccttggcgacattcatcttcgagcgcgcactggatctgctggtgatcaccgtactggctatcggtgcggcccacatgatccctgcgttcggcgtgctggccaccatcattctgggagtccttctgatcctcggtttgctggcctgctggccacctctggctcgcggcgcgcatcgtctcatcgagtaccttccgggctcgccggtacgccgacttggccatttcctgatcgctggcacccgcgcgctcgacccactgctgtgctggcgcctgctgcttcgctccgccctgcagggcggagcggcgtggctgctgactgccctggcctttaccttgctatgtcaggccatgggcatcagtctgccctggctgctgatgctgagcatctatccgctggccatgctgatcggcgcactgtccctcgtccccggtggcgtagggaccaccgaggcggccatcgtgctgatgctcggtgcttccggggtcgaggtggatgctgcattgaccgtggccatcggcatccgactggtcagcctgtggctggcggtcattgtcggcatgctggccatggcacgcctggagctggcggccagaccacatcccgcgccctga

SEQ ID NO: 514927 - DNA, 1389 bp, Stenotrophomonas maltophilia
atgaatctgcctgctttgcacgcccgcgcatcgcgaaagtggtctccactcatgctggcactgggtgtcggtgcgctggcgctgctggcacgactgctgtacgtacagttcttcgctacgccgatgccctacatggatcaatgggatggggagtgggcctctgcgctcaaaccatggctggaaggaacattgcagtggcagatgttgctcgcgccgcacaatgagcatcgcatcctgcccacgcgcctggtcaccctgctgtcgtatgccgtcaccgggcagtggaacaacgtctacgaagcacgggtcgcggcggtcgtgttctgcttcatccccgcattgctggtctggcacgcgtttcgcgacgcgggcgctgctgtgggtcgctggatgctgctgctgttggcgattctgctgtcagtcctgccgttcgcgtgggagaacttcctcgttggcttccagtcgcagttctacttcctgatcctgtccagcatcgtggccatcgcactggtggccaggcaccatcagaatattgtggcattgcctgctgcgatcgcactgagcgtgtttgcgagtgtcaccatggcatcgggcctgctgaccgcagtggcaacagctgcgacctgtgtcctggcctgcatctgccttcccggccgacgagtgccggcgttgtgcgcaacagcagtgctggcggccgtcgcgatggtcgcctacgctcaggttcccgtgatcgaggtcaatacggtcttgcgtgcgcagagcgcaggcgagttcatctacgccgcgtctcgggttctggcgtggcccatgcggtcaggtgggttcgcactggtcatctggctgcctgccaccgtgatggtcgtgcgcatggtgatccgccggcaagcatcgcccaccgacctgctgatggcaggactctgcatctggtctgcgcttcaggcattggccatcgcctatggccgcggccatgacatgagggcgccgatgtcccgctatacggaactgtttgtgcctggcttgtttgccaacgcgtggtttgccatccaattgtggggcctggcttcgaagggcccgcgactgcgcacggcaaggcgtacggcggtgctcctgttcgcgcttgtcgttgcatatccactgctgggccggatcggaaaggatgttgccaagctccagcatttcagcgcggcagcgcggctgcaacaggacaatgtccggcgctaccttgcgggcgctgacctccgtgcgccgcaggcgggcgagttcgagctgccgtatcccgacacgaaccgcctcaagtcctatctggatgatccggtcctgcgccggatccttcctgtagaccgtgccggatcggcgcccctggagggcgccggagctcagcggcgctga

SEQ ID NO: 514928 - DNA, 963 bp, Stenotrophomonas maltophilia
atgcccgcatccgtctccatcgccgtctgcacgtacaacggtgagcgcttcctgcaggagcagctcgacagcctgctggcacagacacgccgaccggaccagatcgtgatccgcgacgacgtgtcctccgatggcacgttggtgctgctgcgggccttcgtgccacgcgccgaggctgcgggtatctcggttgacctgcaggtcaatccacagaacgtgggttatcggcgcaatttcgatggcgcactgcgcgcctgcaccggcacgctcattttcctgtgtgaccaggacgatgtctggcatcccgacaaggtcgcacgcttctgcaccgagttcgatgcacgccctggcctgcgcgtcctgcactgcgacgctcgcttgatcgatgatgcaggtcagcccatgccgcagaccctgttcaccgcgctgcactacggcaccgcgcaacaggcacggatgcatgccggcgacgggttccgattgatgctcaagcgcaagctgatgaccggtgccgcaatggccttgcaccggtcggtcctggccgacgcacttccgctgccggcatcggactgggtacacgacgcctggatcggcacactggctgccatgcgcggggagatcgacagcctttccgagacgctcattgattaccgcctgcacagcaacaatcagttgggccttggtggcaacgatgccacgccacgcgcggtacgacgcaagcgccagctggaaagcgagcgggtggaatgcggccagctgctggagcgcgcgcgcgcgcgcggcctgcccgctacccagctggcctggatcgaacgcaagcgacgtcatatcgccgtgcgcgccagtctgccgagctcgcgcctgcggcgtatcccgacagtgttcggtgaactgctacgcggcaactatggccacttcggccgcggcgtgctgtctgccggcatcgatctgctgcgcgcctga

SEQ ID NO: 514929 - DNA, 951 bp, Stenotrophomonas maltophilia
gtggctgcgacgtccgaccgcaacattctggccggtggcatcggcaacgatacgttgatcggtagcctcaagagcgacacgtacctgttcaacaagggcgatggccacgacacgatcgtggaaactggccagtacgccagcgactcggttgatacgctggtgctgggcgaaggcctgtccgccaccgatgtgcgtgtcctgcgcgaagggcgtgatgtggtgctgagctttggcggcggcagtgacacggtccgactgaaggattggctgaccagttcgctgggcgagaatacgtcggcaagcatcgagaagctggtgtttgccgacggtacccagtggacggcggccaacatccgggcgcagctgaccacgctgggcacctccggggatgacaagatcgtgggctggaacggcaacgacctgattctgggcggagaaggtgacgatgtcattgagggtgggctgggcagcaacgagctgtacggtggcgccggcaatgacacgctgagtgtggctgcgacgtccgaccgcaacattctggccggtggcatcggcaacgatacgttgatcggtagcatcaagagcgatacgtacctgttcaacaagggcgatggtcacgacacgatcgtggaaactggccagtacgccagcgactcgattgatacgctggtgttgggcgagggtctgcaatcaggcgaggcacgcttcctcaggcagggtaatgatcttcagctgagcttcgctgaagagactgactcggttactttcagggggtggttcggatccaccggtgcacagatcgaggtcctgagttttgcagatggccggaatgtaggtaacgtcgagttgaatagtctgattgcggcaatggcgcagagtgggtccgccgcagcactcacgccattgactattgagcaaacgcagagcgtgaatctgattgcgtcgatgtga

SEQ ID NO: 514930 - DNA, 450 bp, Stenotrophomonas maltophilia
atgaagaaccagaagggcttcacccttatcgaactgatgatcgtcgttgcgatcatcgccatcctggccgccattgctctgccggcctatcaggattatgtcgtcaagtcgcgcgtttctgaagcgatggtgctggccgatggcctgaaggctgtcgttgctgacaatgccgcgcagggcgaatctgatctgggcaagggtgccactcttaccaaggctgctgacggttcgccgaacgtgacgtcgaccgcaattgatgcgacttcgggcgcgattactgttaccacgaccagcaaggctggtaatggcgacgtcatcctgactccgaaggctggtggcgcagcactggccgctggtaccccgccggagggcaccatcgtctggacctgcacctctaccaagatcaagcagaagtacctgccggctacctgcaccagctcggccaagtaa

SEQ ID NO: 514931 - DNA, 246 bp, Stenotrophomonas maltophilia
atgcagttccgggtcaagctgatcgaccccagtggcgttgctaccgacatcaccggatcgaacaagctgacgtacatgccgaagggctgcctcaccttcacacaagacggcaaggccaccgtgtcgaagacctcaactccaccctggtcctgcaacaaaggtgacccggtgatgctgacaatcatctacgcagataacggtacgaagcagacagcagtcaatatgtacctactcacgattgaatga

SEQ ID NO: 514932 - DNA, 618 bp, Stenotrophomonas maltophilia
atgcacggacctgcgatgttccgcttcacttcgatctgcctgccgcttgctgcgctggcgctgtccagtttgacggcggtggctgcgccggccgcgtccaagcgggtggtggcgccacccagccttgtacaggcctaccgggccgccgaagccagtctgcggcgtattcccggtgacgatatcgaatcggacttccgcccggtgtggacgggtgttgccgatctcgatggtgatggtcgctccgaagttgtgtacttctacacgtcgacctacaccggtggcagcttcgcgcaaagcaatgtggtggcggtgatgacggcgctgacggcgaacgatccacgcggccaggagaacccgaagagcctgtcgcgggtggatgccgaggatttcgcggccatccgggaatcaggttatggcgatgatgccggcatccagattccgggcgcggtgcagtcgatccgaatcgatggcaaccggatcatcgttgctttcaccgttaccgcgggcgcaacggtctgcgaaattccccatgatttccgccacgtctgtccgccggacggaaactacacctggacgctgcgttggacgccggggacgctggcccgcatcaggaagtag

SEQ ID NO: 514933 - DNA, 885 bp, Stenotrophomonas maltophilia
gtggccgagctctcgccgtacgcgctgcggctggcgttgtacctggtgctgatgctgctgttcgggcggatcctgttcgcccggcctgcgctgccccgtcccatcctgttggcactcgtcctgatcgcgttgctggtgggggtcaccgatgccgtgacccggttgtccagcgtgctcggtctgtcgccggccgacatcgacctcgacatggcgcgctggttccttaccggtacgccggtgggtgaagcgggcctgctgcgcctcctggcgctactggcgatgctgccgctgctggcattcgccgcgccgctgcggggcctgcgccgtgtagccctgctggtgctttccggcacggccctggccagcctgtcctggaatgggcatgccgctgcgggcgatgggttagccggtaccttgcgactggtggccggcgtcgtgcatctgctggccgccggtgcttgggtcggcgcaatcgccgccatcctgcagctggcgctgcgtccgcagggcctgcgcctgcgcgaacgcacccatgaactgtggcaggccgcgcaccgcttcgccctgcccggcacgatcatcgtcgccacgctggcgatgaccggcacctatacctatgtcgatctcggcggctccctgcagaccctgaccggcaccgcgcatggacgatggttgctgatcaagctggcgctggtgggtggcatgctggggctggcggcactgcatcgctggcggctggtgccggcgctggccacctccatccgcggcggctggcaaccgcggccgctgcgctcgctgcgccacagcctggcctgcgagtcggtgctggcgctgctggtgctggcctgcgtggcggtactcggcacattggatcccctgacatga

SEQ ID NO: 514934 - DNA, 852 bp, Stenotrophomonas maltophilia
atgagccgcacgcccgccccttccgaaccgccaccgccatccacctccacctccaccgagcagatgctggagcagcaccgcgatgccttgaagcaacgcttcccgctgcccagccctgaagcactgcagcgtcggcgcagcgttggccccgccaaggccgcgctggcgctgctgctggtggccggcggtaccctgctggcggccgacccggcctggcaggtacgcgattaccagaccgccgtcggcgaacgccgcaacgtcaccctgcccgacggcagccaggtgctgctcgatgccggtacccacctgcaggtgcgccgccatctgcgctcgcggcaggtgctgctggtgcgcggccaggcgcgcttcgaggtgcagcactcggcctggcgccgcttccaggtcgatgccggtccggtgcatgttcgcaactacggcaccgtgttcgacgtgggccgccagggtgatctgagcgaggtgaccctgtggcgcggcgaggtgggcgtgcgcatcgacggcagcgaggccgagcaacggctgaagccgggccagcgcctgctggcccaggcaggatcgctgtcgccccccgaagcggtcagcccggaccgggccgactggacccacgggcggctgcagttcgatcggctgccgctgtcggaggtgctgcgcatcctgcagcgctaccacgaccgcccgatcgtgctggatgacccggtgctgggcccgctgctggtctcgggcgtgttcgatgccgatcgcgccgagaccgccgtggcactgctgccggacatcctgccggtgcagctgcagaccgccgccgacggcagcctgcacctgcgcgcccgcgattga

SEQ ID NO: 514935 - DNA, 1221 bp, Stenotrophomonas maltophilia
atgaagatctatcttgtcggcggcgccgtacgcgaccgcctgctgcagcgccctgccggcgaccgtgactgggtggtggttggcgccacgcccgcgcagatggaagcgcagggctacaccgccgtcggccgcgatttcccggtgttcctgcacccgaagaccggcgaggaatacgcgctggcgcgcaccgagcgcaaatccggccgtggctatcgcggcttcgtggtcgatgccgatccggcggtgacgctggaagaagacctgcagcgccgcgacttcaccatcaacgcgattgcctgtgacgaagacagcggcacgctggtcgatccttacggtggcgttcgcgatcttgagcagcgcgtgctgcgccacgtcggccctgcgttcgtggaagatccactgcgcgtgctgcgcgcggcgcgcttcatggcgcgcttcgcgccactgggcttcaccgtcgccgaagagaccatggcgctgatgcgcgaggtcgctgccagtggcgagctggacgcgctggtgccggaacgcgtctggcaggaactgcgcaaggcgctggtcagtgaacggccctccgccttcctgcgcacgctgcacgatgcgcaggcactgggcccgatcctgcccgagctggaagcgctgtatggcgtgccgcagcgtgccgaattccacccggaagtcgacaccggcatccatcaggaaatggtcagcgacatggccgcgaaactggcaccgggtgatgacctggtcggcttcgctgccctcacacacgacctcggcaagggcctgaccccgccggaggaatggccgcgccacatcatgcacgagcagcgcggcatcaaaccgctgaaggtattgtgcgcgcggttgaagattcccaccgagcaccagcagctggccgaagcggtctgccgcgagcacttgaacgtgcaccgcatcgacgaactacgcgatgccaccgtgctggaactgctgggccgctgcgatgcattgcgcaggccagaacgcgtggcccgcatcgcgctgtgctgcgaggccgacaagcgcggccggctcggcttcgaggatgccgactacccacagggcgaaacgctcaagcgcctgcatcaggcggcgctgtcagtgcaggcgcgggatctggataccacgcatctgaaaggtccggccatcggtgaggcactggccaaggcgcgggtgaaagccatcgccgccgcccgctga

SEQ ID NO: 514936 - DNA, 450 bp, Stenotrophomonas maltophilia
atgcgtaccggtacgaaactcggtctctcgctcacggcactgctcctgtcgctgcccctgatgatcatcacgggcaatggctatttcatcctgctgctgttggtcggactacctgccgcgatcctgttctggttcgacctcggccgggaactgcgggccctccccacacccagccgcgctgagcgggcgctgggtctggcaatgggcgttccgcaggtgctgttcgggctgtcgtgcgcgggaatcggcctgatcctggtgatctggatcctgtacaacctgttgatcgaatcccggccgcacttccgcgttccgtcactgccagggttcgcagtcgggccgatgatgatcgtgattgggctgggttgggcccgcaccgcgtttcgccgcgtggcgccccagcatgacagtgtcgaacaggaggctccggaccaggacattccggattga

SEQ ID NO: 514937 - DNA, 729 bp, Stenotrophomonas maltophilia
atggatgatgcgtttgccccgatgatcgatgccagctggcggcgcatctgcgcgggtgagcgcatgctgcaggacgatcccctgctgtacctggcctgcagcgatgatttcgacgagggtgaggacggcatgctgctgcaaccgcttgctggtcctgcgcgcgcggtgctgcgcccagtcctggcggaacgcctgcaactgcacgcacgcgcgcattggacactcgcacagctgcagcagcggctgatcgacgtcggccagcgcacgcatggcgccgaccgcctcttctatttccctgctgcagaacttgcggcactggccgagcaccctgcaccgccccacatccgccgcctcgctccagccgacgctgctgtgttcaacgcgttccaggccagcgccagcaaggaggatctcgatgcggcctgggtcgagctcgaccactggcaggtgttcggtgccttcgacggcgagcagctggtcgcggccggcagcctgtacccgtggggcctggatccggcactcgccgacatgggcgtgctgacactgcgcgaagcccgtggtcgtggtcatgcacgccggctcgtgcagacgatggccgtatccgcccaggcctccgggttgcagccgcagtaccgctgccagctcgacaacacggcctccatcaccactgccgaacgcagcggcctgcgcgcgttcggcgactgggacctcatcctggcggcctactga

SEQ ID NO: 514938 - DNA, 177 bp, Stenotrophomonas maltophilia
atggacgaacggccacgcgccgtccacattgtcgccgactgccacgggccctgctgcgtgctgtccaacgatgcggtggcgatgctggacgaggccggactggcggcgcagcagctcgctgccggctaccccgaatggaaggcgtccggcctgcaggtggatctgccccggcactga

SEQ ID NO: 514939 - DNA, 123 bp, Stenotrophomonas maltophilia
atggccggagtgctgttgcgtcaagtacagatcctggccgggcacgcgatttacgccaccgcagagaagttctacgtccatctgacgcccaagcgcgacgacggcgcccagggggcgggctaa

SEQ ID NO: 514940 - DNA, 351 bp, Stenotrophomonas maltophilia
atgatgtcaatcctgagtgttcttgcgcttggcgtgatggtgctatgcatctgcctccccttcgccgcgacggcgatacagctgttccgcctcgtctggttcctgacgggcgagaagaaagaacgcggcaagcggccgcgctttaccggcctcgtgctggcgatgcttttcagctcactcgctgcgactgaaatcctggacgtcgagccattcctgtcgttgcgctacctcaatccagtgccgcccgagcacagggacgcgttcgtgatcggcatgcttgtgcttgcgctggtggcttggatagcgggcggattgctatggaagattgcgcgccggcagcccggagcctga

SEQ ID NO: 514941 - DNA, 453 bp, Stenotrophomonas maltophilia
atgcgcgccggcggcgccagcgccgatgcgatcaccgccgccgaacagctgtccaccggcggcgagctggcctatgtgaccgcctggcacgagaacggtggcctgggcgtggccacggtcgaatacccgttccgcgccaacaccaacgagggcacccgcctgatcgatgccagcggcaagcgcatcgacgtggatgccgtgcagttggacgacaccctgcgtgccgaccccaccgtgcaggaactgctgaaggccaacccgcaggccacgccgttcgcaccggcgcagtcggccggagccacgccgctggagaacggcggcatccgcctgctgtaccgcacgccactgcgcgactgccacgcctgcccggatgtgggccagctgcagatcgcctacgacttcgatgccaagcgcaacttcatcggccagcaggtggtgccggcaacgccgtaa

SEQ ID NO: 514942 - DNA, 306 bp, Stenotrophomonas maltophilia
atggcgacacggacgatacgggtgctggcctggtgcagcgtgttcctggctgcatgcgtggccgttctttcgctggcaccgttcacgccggcgatcatcctggccttgcccttgctgttgttcgcggccttctgcatctggcgtggctcgtggctgcccggcgtactctgcgcgtggctggcctcgttcgccttcatcggcagcccgctgagcctcttcgatggctgggaccggccgatctacgcctgttggatgatcgccgtcgtgctgcttgtcgtccggtggctgaggcgggcgcggccgtag

SEQ ID NO: 514943 - DNA, 699 bp, Stenotrophomonas maltophilia
atggacattcgagagatccgcagccgcaactttcgccacctgatcgatgcccttgaaatgaagggcatcaaggggcgccgggatcaaggagcccagttgggcggcttcctgtctgcgtcgtacgtgtcccagctactcggtgggaagtacatcggcgacgatgtggccaagaagatcagcagcgccttgggaaaggaccacggctggatggatcggccccagtggagtgaagatggagaggtatccgtctcaccaatcccggagaatgagacgccgcccggctatgttcgcttcgacttgtttgaagggggtgcagggatgggcgcagggatggtcaaccaggactaccccgaggtagtgaagaccatcgaggtcgcagagtgggaagtccgcaggaagctcggttacctacccgagccaggcaggatccagatcatcactggccgcgggccgtcgatgcgccccaagctcgaagacggcgacattgtctggatcgacaccagctgcaactacttcgacggcgacgactactacctcatcaacatcggtggcgagacgcagatcaagatgctgcagaaacgcggcgacggtctctacgtcgtaagcgtcaacaccgacttcccggcctaccgtccggatccgggcgacgtgagcatcctagggaaggcgttgattcacgcagggcttcgtaagttctaa

SEQ ID NO: 514944 - DNA, 294 bp, Stenotrophomonas maltophilia
atgagggagtcgccgttgataaagacgtatgcagacaaggacacggaaggaatagccaagggcaagaaaatcaaagccttggctcagatcgaacggcagattaaacgaaagctggtttacctcaacgctgcggtcgcactgcaggacttgaaggccccacccggcaacaggcttgaggtactgaaaggcgacagggcgggacagtacagcatccgtatcaatgatcagtaccgaatctgctttagatggaaagatggcgacgtttacgacgtggaagtcacggactaccactga

SEQ ID NO: 514945 - DNA, 270 bp, Stenotrophomonas maltophilia
atgcctgatggtctctcgtttggaatttggaccggcatcggtgccgtcggtggcatcgccgttgcgttcattggggcgggcctacgccggttcgtcggcttcatgaacgcggaggaggtcaaaccgcgcccgctcatggcttggtgcatcatgttggctatcgtcggtgctgcagcaggcacgttgtggcagagcgtcgggttcaccgagtgccgcgaagcgggctacaaggtggccgagtgcctgctcccagtgctgcgccagaactga

SEQ ID NO: 514946 - DNA, 678 bp, Stenotrophomonas maltophilia
atgacagttaccgatcagctccctaccccggttgtccgggtgtcatccaccggcagcgccttcaccaccagcacggacgtggccgcgttctttgacaagcgccacagccatgtactgcgggcgatagagggcctgttgtacgacttgagagagcacattcagtggccggaccgagcggacgcggatgaccaaggtgacgctggggaccatcagcccaaaattgggctgatggtccccgaggatctcttcgaggcggcggacgtggaggtcagcatcggaagtggcgccgtccggcgcgacccgatctacaacctcagccgtgacggattcgccctgttggcgatgggcttcacaggcaatcaggctctcgcgttcaagctggcctacatatcggcgttcaacgcgatggaggccaagctccggcagccctacgtgggccccttgcctgaggatctggagttcgcacggagcctgcgcgtcaaagacaagctcatgctccacgagcaggcctacaaggcctcccgtgcattgaacaccgccaccaacgaggacgaacgccgccaggcttattggcagctgtatcaggtcaacacaaccctcggaattcccatgcccaccatggaagcgctgggagttgagccgttggccaccggcaaccgcttgcctcaaccgcgctga

SEQ ID NO: 514947 - DNA, 879 bp, Stenotrophomonas maltophilia
atgaaattaacaaagatagcggtgttggcaattatcgctgggggtttggcgtcagctatagctctggcgcttcgggaagacgaagcccctcctcccttgtcggcaacagcaagctcaccagatgtggtgcgaggcaagacaaccgcagacggcactactgcaccaccaccctttacacgaagagaactgggccgctccttcgtcttcgcgcgcggaccggagctgagaccaccaggcgacccgcgcgcgtggatcgactcgctcaggcccgcagctgaggccggcgatgcaaacgcttcctacagcatctatctgaccctagtggactgtgagatgtacttgaaggcaagcgcatcggaagagcttgcagaatcgagagcaattggcgcttcgcccgagtatgaaaagaaggtactgagaaagctcatcgagtgcggatcactcccaccttcccaaacggaggaaattgggcaatggctttcaaaggctgcaagccagggatcaatcgaagccttggtcgcatatgcggcgaggccgaacgcgattctcgggccaaagccagatgtgaattcagatgagttcaaggattggcaaagcaacgccgtttcttatctcaacgaggcgatgctgaaggggagcatcgacgcacttgcacagctgtcgaacgcatacatggctggttacgcacttccgcgtgatccggagaaggcatatgccacgcaacttgcgttaggtgaaatcaatcaaaactactcaagcgaagcatacagaaacagtatcgccaaagagctgacgccgcagcaacttattcaggcccgagaagatagcaagaaatttcttcagattgttactcatgcgaaggggatggaacctcaatga

SEQ ID NO: 514948 - DNA, 3219 bp, Stenotrophomonas maltophilia
atgctcgggttggtcaggaccgcgctcaacaagccttacaccttcgtggtgatggccattttcatctgcatcatcggtccgctcagcgcgctgcgcacccccactgacgtgtttcccgatatcggcatcccggttgtcgccgtggtctggcagtacaccggcctgtcgcccgatgcgatggccgggcgggtgatctcgccatacgagcgtgcgctcagcaccaccgtcaacgacatcgcgcacatcgaatcgcagtcgctggccggcatgggcgtggtgaaggtgttcttccagcccggcgtggacatccgcaccgccaatgcgcagatcaccgcgatctcgcagaccatggtcaagcagatgccggccggcatgacgccgcctctgatcctcaactacagcgcctccaccgtgccggtgctgcagatggcgttctccagcccgacgctgggtgagtcgcagatccgcgatcttgcgcagaacacggtgcgcccgccattgacctcgattccgggcctggccattcccgccccctacggcggcaagcagcgccagatcaccctcgacctggacccgcaggcgatggccgccaagggcttgtcggcccaggacgtgggcaacgccctggcggcgcagaaccagatcaccccggtcggcaccgccaagctgggcagcaacgaattcaccgtgctgctcaacaacagccccaacgagatcgaagcgctcaatgacctgccgatccgcaccgtcaatggtgcggtggtcaccatcggccaggtcgcccacgtgcgcgacggctcgccgccgcagaccaacatcgtgcgggtcaacggcggccattcggtgctgatggccgcgttgaagaatggtgatgcatccacgctcacgctcgtcagccgcatccgcgcgatgctgccgcagatcggggagtcgctgccgccgtcgctgaagatctcgttgctgggcgatgcgtccaccttcgtgcgcgaatcgatcagcagcgtcgcccgcgagggcatcatcgccgcgctgctgaccagtgtgatgatcctggtgttccttggcagctggcgttcgaccgtcatcattgccgcctcgatcccgctggcggtgctgtcggccatcgcgctgctgtcggccgccgggcagaccctcaacgtgatgacgctgggcggcctggcgctggccgtgggcatcctggtcgacgatgccacggtcaccatcgagaacgtcaactggcacctggagcagggcaagggcgtgcgcgagtcgatcctcgatggcgccgcgcagatcgtcggcccggcattcgtatcgctgctgtgcatctgcatcgtgttcgtgccgatgttcctgcttgatggcatcgccggttacctgttccggccgatggcgctggcggtcatcttcgccatgggcagctccttcgtgctctctcgcaccctggtgccgaccatggcgctgtacctgctgcggccgcaccgggtagagggcggggtcgggcaccatcccgaggacgcgttcctcaaccatcacgagggtgatcatccgcggccgcgccgtgcacgcctgacggccacgctggtgcgctggcagcagcgtttcgaggccggcttctccgccacccgtgaccgctaccacgcactgctcggtctggcgctggcacatcgcggccgtttcctgatcggcttcatggcctgcgtgctggtgtccttcgcgctgctgccggcactgggccaggacttcttcccggccaccgaagccagcgcgttgtcgctgcacgtacgcctgccgctgggcacccgcatcgaggaaaccgcagcggcgttcgatcgcatcgaatcgcgcatccgccaggaagtgccggcgcatgagatcgacgccatcgtcgacaacctgggcctgccaatgaccggcatcaacatggcctacagcgccagcggcaccatcggcccgcaggatggcgacatccaggtgtcactgaagccgggccacggcgatgcggccgagtacgcgcggcgcctgcgggaggtgttgccggccgccttcccgggcgtcagctttgcgttcctgcccgccgataccagcagccagatcctcaacttcggttcgccggcgccgctggacgtacgcattgccgggccggatgtcgccggcaaccgtgcctatgcccaggagctgcagcgtcgcctgcgccacgtgccgggcctggtcgacctgcgcctgcagcagcctgatggctatccgaccctgaaggtggatgttgaccgcctgcgcgccaatggcctgggcatcacggaacgcgatgtcaccaacagcatggtggcgtcgctggccggcagcggccaggttgctccgacgttctggctgagcccgaagaatggcatttcctacagcgtggtggcggcgacgccgcagtaccgcatggacagcctggccgcgctgcaggcgctgccggtgaccggcagcagcggcacgccgcaggtgctgggcggcctggctgacatccagcgcggctcgagttcggcggtggtcacccactacaacgtgcagcccacgctggatctgtacgccagcgtgcaggatcgggacctcggcgcggtggcggccgacgtgcagaaggtcatcgatggcatggccggccggcgcccccggggtaccgaggtcggcctgcatgggcagatcgatgcgctgcatgtggcgttcaccggcctcggttacggcctgctggcggcgatcgtgctgatctacctgctgatcgtcatcaatttccagtcctggaccgatccgttcgtcatcatcaccgcattgccggcgggcctggccggtgtggtctggatgctgttcctgacccacaccacgttgtcggtgcccgcgttgaccggcgccatcctgtgcatgggcgtggccacggccaattcgatcctggtagtcagcttctgccgcgagcgcctggacgagcatggtgacgcggccaaggccgcgcttgaagcaggtttcacccggttccgtccggtctgcatgaccgcgctggcgatgatcctgggcatgctgccgaccgcactgtccaccgaacagaacgcgccactgggccgcgcggtgatcggcggcctgctgctggcgacctgcgccacgttgttgttcgttccggtggtgttcgcattggcccactcccgtaaaacccgtactgctcctgccggagaacccctgcatgtctga

SEQ ID NO: 514949 - DNA, 1164 bp, Stenotrophomonas maltophilia
atgtctgagtcttcgctgccgcagcgttcgctgcgccgtcccttgctcctggccgcggctgttgcgctcgtcctggtggccggtggccttgccctgcgcgcacagcaggcacacgccgtggtcgagtggaccgagcgccaggcggtcccgtccgtgcaggtggtcatcgctggcgggcagggcgctgcaggaaccatgaccctgccggcacacctgagtgcctggaccgaggcgccgatccatgcccgcgtgggcggctacctgaaatcgtggagtgccgacatcggccaggcggtcaaggccgggcaggtactggcggtgatcgacagcccggaactggaccagcagatcgcccaggcccacgcccacctgctgcaggtacaggcagacgcagcgttggccaaggtcagcgccgagcgctggcagggcatgcttggcagccattcggtgtcgcgccaggaagccgacgagaagcaggcgaatgcggtggccgcacaggccagcgtggaagcggcccaggccgactacgcacggctgcaggagctcggccgctaccgtacgttgcgcgcgcccttcgatggcaccgttacttcgcgccagaccgacgtcggccagctgatccgcgccgatgacagcggccgcgagctgttcaacattgctgacacccgccgcttgcgcctgatggtgccggtgccgcagaacagcgcggccagcatccgctccgggctgcaagccacgctgcaggtgccaggccaggaagggcgccatttcaccgccacgctgcagggggattccagtgcgatcgatcgcagctcgggcaccctgctggcgcagttcgtcgtcgacaacgccgacggcgcactgctgcccggcagctatgcggaagtgaccctgccgctgcaggacggcggtgccggcgtgagcgtgccggccgaggtgctgatcttccgtgccaagggtacgcaggcggcagtggtcgacgcccaggacatcgtgcatctgcgcgacatccatatcgtcagtgatctgggcagcacgttgcgcattgaccgcggcttgaaggcgggcgaccgggtcattcccaatccgcccgatgcgttgcgcgaaggtgaccatgtgcgtgtggtggccggtgagcaggagcccgcgcatgcccgcggctga

SEQ ID NO: 514950 - DNA, 1395 bp, Stenotrophomonas maltophilia
atgcccgcggctgagcgtgtcgctgcgcttgcgctggcgacgctgctgctgggcggctgttcgctggcgccggcctaccaggtgccgtcggtggcgatgccggcgacctacgagcaggtcgaggcggcggtggccactgcaccgatggcaccggcgtggtggcaggcctttgatgacccggtgctggaccagctgcagcaacagctggagcaggccaatccgacgctggcactggccgtggcgcactacgatgctgcacgcgccgctgcgggcgaagtggcatctgcgcgcgcaccgcagatcggcttcagcacgggcccggtgcgccagcgccagtccgatgacaagccgctgcgcagcgcgacccagccggccatctatgacagcaatagcgccacgttttcgctgtcgttcgatcttgacctgtgggggcggctgcgcaacgcggcggccgccggcagggcgcgcgccgatgcgagtggcgatgacctggccgccgcgcggctgagcctgtcgcagcagctggccgggctctacctgcagctgaggggcgccgaggcacagcagctgatcctgcgcgcgagcatcgaggactaccagcaggcgctggcgctgaccgaagaccgattccgtggcgagatcgcttcggagctggatgtgtcccgtgcacggcatcagctggcgagcgcacaggccgatctggatgcgctcgatgcgcgccacgacctgctgcggcatgccattgccgagctggtcggtgcccccgccacaggcttcgtcgtcgccactgcaggcctgccggcattgccgacggtgccggccgatctgcccagcaacctgctgcagcgacggccggacatcgctgccgccgagcggcgggtattcgccgccaatgccggcatcggtgtggcgcgcgccgcgtggttcccgcagctcagcctgaccgggttgctgggtggccagacctcgggtggcagcgccctgctggatacgggcaaccgttattgggcactcggcccgttggctgcactgccggtgttcgatggcggccgccgcaaggctgccaaggccggggccgaggccgaattcgatgctgcgtcggcgcagtaccgggccaccgtgctggcggcgatccgccaggtggaggaccagctgaccctgctgcgccagctcgatgcccagcgtggccacgagcaggaggccgtgcaggccgcgcggcgtgcggagcagatcgcgcatgaccgctacaccggcggtgcggtgagctatctggacgtggtcagcgcgcagaccgatgcccgccaggcgcaactcggcctgcaggacatccagagccggcagctgcaggcgagtgcggcgctgatggcggcgctcggcggcggatggtcgcagtag

SEQ ID NO: 514951 - DNA, 243 bp, Stenotrophomonas maltophilia
atgatggcctggaatcgaaacgccgtggccgcctatgcgccggccatggtcggctggtgcctggcgctggccagctggttgcgcctggaacaactgcgtgacgacctgcatgcgaaggcgttgctgccggtgctgcacggcggcgcggtgacgctggtggtgctgacgctggcctgcacgttggcagcaagcgcggtgctgtggcgtgcccgccggccaccgcgccggacccccgctggatga

SEQ ID NO: 514952 - DNA, 291 bp, Stenotrophomonas maltophilia
atgctgaaggtgatcgccgaagacttcattcacccggaggcgctggccaccgtccttccgctgtaccgcgagctggtcgcctgcacgcagcgcgagccactgtgcatcagctacgaactgttcgtcgacgagaaggatcccgggcacctcgtcttcatcgagctatggcccgaccacgccgcactcgacgcccactgcgccagcgagcacttccagcgtctggtgccgcagatcaatgcctaccaacgcgcaccctgccggttcgtactgatgaaggccgctgcgctgtag

SEQ ID NO: 514953 - DNA, 567 bp, Stenotrophomonas maltophilia
atgacagcaacgacgcgcgacatgtcccccgacgactggaccatcgacagccggcggctgcagctccggcccttcacgccggaggacgccggcgaggcgtttgccgcgatcacgccggggctgacccgctacatggcgtttgatccccctgcgtcggagcaggctttcgccgctgtctggtcgacgtggttgcccaccatcgccgatggcaccgaccttacgttcgtgatccgccgacacgcggatggtgcgttcctcggcctggccggcctgcatcgcaccgccgatgcggaacccgaactcggcatctggatcgccgaggcgatgcacgggcatggctatggccgtgaagccgtggcggcggtgcgtgcgctcgcatcccggcggctggaccgggccgcattctgctacccggtggccgagcagaacctgcccagccggcgcctggcggaatcgctcggcggcatccccgtcgcgcgtgagcagaatgtgaagtacaccgcgattgtctaccgcatccctgcagcagcatctgaagttgcgacgggcgtcgcggaatccggctaa

SEQ ID NO: 514954 - DNA, 543 bp, Stenotrophomonas maltophilia
atgcccgagcatgctcctcccacgcttgccgacaccctgcccgcgcggttgcgccctctgcgggcgtccgatgccgccgcctggtcccactacctctcgctgccaggcgtaatcgagcacaccagctggggcgacgtttccgaacgggcgctggcgcagcagatcacccgctatctggctgatgcatccgatcagcgctgggcgatggtggacgccgacgaccagctgatcggcactgttggcctgaacggcgtcgacccgtggcatggccgcggcgaactcgcctatgacctcgatccgcgctggcagggacagggcctggccacgcatgcagcgcgagccgtgcttgactgggcacatggcacctgtgggctggtccgcatccaggccaccgttctggacagcaatgcccgttcgatcgccctgctggaacgcctcggcatgcagcgcgaggggcggctgcgcgcctatcgccacgtgcggggacagccccgcgacttctggatgtacgcccacatcaacggcgtcgtgtcaccccgctga

SEQ ID NO: 514955 - DNA, 453 bp, Stenotrophomonas maltophilia
atgtgggtcgcgccgcatccagtactgccattgctggcgggcttcggggccgccgcgctggtggggttccgcagtgatgggcccggccgcacccgccgcgccggatccctcgcagcgctggcgctgatcggcctggcggtctgggcgacaacgcacccggcggccaacgtgaccctgcatctgctgcttgcccttgccaccgccgtggtcgccatcctgctggcagtgcgcctgcgcaccctcgtgggcatggcctcgcggctgcaggcccgggtgaacgccactcccatggcctcgcgctggagcaagctgccgacggcggcgtccaccctgatgctgcagcagctgcgcggcgcgggtgcgctggaacccagcctgcagcgcacgctggtgctggccaccctggcctgggctgccaatgaagaggcgcaggaaatggaataccgacgatga

SEQ ID NO: 514956 - DNA, 885 bp, Stenotrophomonas maltophilia
atgccattgggattcatcggcctgggcgtgatgggcacgccgatggcgggccacctcgcgcgggccgggcacaccgtgctgggctggtcccgctccggtcgcaaccacgaagcggcacgcatcgccggcgtacagcccgtcacgcaactgcaggatgtgttctctgcatgccgcaccctcgttctcatgctggccaacgacgaggccatcgacagcgtgctggggcggaacacggcgaccttccctgcccgcgttcacggccgcctggtgatcaacatgggcaccagctcggcggcgtattcgcaggcgctgggcgaacagatccgcgtggcgggtggacgttacgtggaggcaccggtctccggctcgcgggtgcaggcggaatcggcgcaactggtcatcatgctggccggcgaggatgccgacgttgcggaggcctcgcccctgcttgcgccgctgggccggcaatgcattgcgtgcggccaggtgccagcggcgttgcgcatgaaactggcggtcaacctgtacctgatcacgctggtcaccgcactgggcgaggccgtgcacttcgctgagatccacggcatttccctggcgcgcttcgccgaagtgctcaacgccgggccgatggccagcgaggtatcgcggatcaagctcgacaagatgatcggcgaggacttcgccgtccaggcctcgatcaccgatgtcctgaagaacagcggcctggtagccgatgccgcgcgggaggcgggcatgcacgcccccctgatcgaggccagcgatgcactgttcgcgcgggcgcagcagatggggctgggcgggctggacatggcggctgtactgcaggcgatccggggctgcccgccggccaccggcggggcctga

SEQ ID NO: 514957 - DNA, 1497 bp, Stenotrophomonas maltophilia
atgcacaggcaagtcagtgagatgttgcagcgcgcctatcgaccccaccggtccttgcccgacctgttgggcgcgttcgtgaaggagttttcgcaacaccatgcagtgcgaggcggccgcgtccatctgcgcggttccggtgcaggccatccggacgggaccccggtggcggacgcggaccaaggaaccggcgccagccagcgtctgccgatccgctatgccggtgaagtgctgggcgagctgcagctggaaacgcaggcggggcggctggacagcagtgcgctggcactgggtgaagcattcgcgcatcgctgcgcgcacctgatcaagcgatacgaagcacaggcgtgggccgagcaggcgctgagccggccgttgctgctggtgggtacctgcgatgcgctgaagcggctggaggaattcatcgagcgcgctgccgccagttcactgccggtgctgctgcgcggcgagttcggtaccgagaagatggaactggccgccgcactgcacagcggcagtccgctgcggcgggggcccttcatcgaggtgaactgcgcccatccccaggaggaaccctcggactggttccgtcacgcgcgtggcggcaccctgtacttccacgaagtcgacgagttgccggtggcgctgcaggggcagctctcgcattgcatccgtggcctgcagcctgcatcgggcgaagcgggtgcggcacaggccatccgggtgatcgcgtccaccagcgccgatctggagcagcgcgtgcgcgaccggttgttctcgcgggcgctgctggctggcctcgagttcctgacagtggatgttccgccgctgcgcgagcgaaccgaggacatcggcgcactggttgcgcgctcgctgcagatgcacggcttcaatccgcaggtaatcagcgaggacgtactgcagacgctgcgcagccatgattggccgggcaacctcctggagatggagcgtgtggtggttcgcctggcagtgatgaccggcggccggagcatccgccgtgaggatgtgctgcggcatgcccccgggttgatggccgccgatgattccttctacgctgacgaaggggccgaggccggcatggacacgctggaaacgcacgacgccgggcgcgatgtcaccactgcggcggcggcagtggcacatgaaggcctgcatgacggcctgaaacgcgccctggcctatctgaaggaccatgctgcggagccgctcaccctgggcgacctcgctcgccaggcccatgtgagccagtcgcacctcggcttcctgttccgcagcgagctgggcacgaccttcaagctgctgctgcagcaactgcgcatcgagcatgccaagcggctgctgcgcgatgggcaacgcctgcgcattaccgatgtcgcactgcaggttggcttcggtgacctgagccacttcgaaaagagcttccggcgtgcggtgggggtcagcccgcgcagctaccggcgaacggcggaccagtaa

SEQ ID NO: 514958 - DNA, 1080 bp, Stenotrophomonas maltophilia
atgagcgttttcattgccggtcgttccatcccccaggccaacctgatcagtcaatcctgcaggcatgtccttcagttcatcgacggcggcgagcactggctgaagtgggccatggaatcacatgagcaccgttacgccttcgccgacgagggcgcgatgcttgatggtgtgcagcagggcctgcatggttcacgcatgacctggttgccgcgcatcggcctgcagatcggcccgatcaagctgctcagcctcggtagcagcgatctcagtgctttgcgccacatggagtttgacgaagagacacgcctgtcgcacagcgaggcacagggcgtactggcaaggcaccggctgctgaccaataccgaactcggtgcgttccggcccttcctggcctcgatcggcgcagccgatgcgcccctgctgcagcagctggatttccgtgaatcggtggcgctccaccacctggccggtgaggtgggaatgtccagcgcagggcgcgatgatctggccgacgccgcccgcttcgcgctgctgcacgcgcgccggcccatcgagttcgccgactatttccgtttctaccagcacgtgagcgcaggaggcggaagcagcgagcaacgaatgagtcgtgccacccgcgcgttgcaacagctgctgcctatgctgttcgacttcctggacgggccgcagctgccacagctgccgtcgccggagcaggtgcgcgaggcgattgccgcaagcctggccgcgagtcggcagatcggttatgcacgcatctcactggccgcccagcagatggcattgtgcttcgacaacagccccgacctgctgcgggatgaccacggcctgcgcgaagccgcgcagtggcagctgcgcgatgcgcaggaattcctcaacgaacacccggtctcccgtggccagctagggcaggatggtgccagcgtgcagttcgcggtcgatggctccagagggcaggcgctgatacaggtggaggacaatgtgatcaccctgcaggactaccgccgctcccgtcactacctgggcgatgaagcgcaggtgggctaccgggcgggtacggtgtga

SEQ ID NO: 514959 - DNA, 717 bp, Stenotrophomonas maltophilia
atgcgcccgtatgctctcgccacactgctgaccaccctgcccttcgccgcccacgccttggacctgccgccggtgcggtatccgacgctgccggcacaggcggccaatgccgccggtttcgtaccccagggctggacgcttgaatcgagtgtcgaaggcgatctcgaccaggatggccgcgcggacctggtgctggtgctgcgccagcaggagccgcgcaacgtcatcgagcacgatggattcggaccctcgccgtacgacagcaacccgcgcattctcgccgtggcgtggtcgcgcccctccggctatgtgctggcggtgcaggaccaccagctgataccgcgcccggacaatccggtgatgagcgacccgctcgaagacggcagcgtcagcatccagcgcggcaccctgaaggtcgcgctgttttcattcgccagcgcgggaagctggtcaatgggcacgaccgccttcaccttccgctggcaggacgatgcctttgcgctgatcggctacgaccagaattcggtgatgcgcaattccgggcagaccgaatcggtgagcgtgaacttctccacccgcaaggtaaagcggagcgaaggcagcatcgagaacgacaaggacagcgtgcgctgggagcccctgcacagccgtcgccgctggacactgcagaccatcggtgatggctgggcattcgatccgctggcgggcagcgactga

SEQ ID NO: 514960 - DNA, 252 bp, Stenotrophomonas maltophilia
atgatccgacgcatcctcgccgccgcgctcagcctgggcctggccagtgctgcccaggcagccgagttcagctgcttcgccagggtcggcccgcccagcgccggccagaacagcagcatcctgatgggcagcgtcagcgccggcggcctgcaggcggccgaggccgagtaccaccggcgcacctcgaccagcaagccggtcagcgcgggcaggtgggtgatccacgagctgtactgcatgccgcgctcatga

SEQ ID NO: 514961 - DNA, 678 bp, Stenotrophomonas maltophilia
atgagtaccgtccgcgaagactttgaaagaagcttttggatgcttgtcgaagacagtctgcttttgattgaagcctcagagctgaacccgggtacggagcttgcaaattcgcttgcacgcgcagctcttttgaatactttggtactcccagaggtggtcgccaattgctgtatagacgacctccgtctggagagctccgtatacaaggaggttgatcgtctgtcggtcatcgccaagttcgatttctacctgagaacgaagtttcggaacaagtccatctctcgtggcgataggcacgtgcagtctattggcgaattgaagaagctaagagatgactacgtgcatccaaaatcaagacgagtgcggtggatcggagatcctgatggcgagcaaacagctgagcgtccactaacaccgattctgggtatcgcgaagaatcctagagactggtggcatgaggacgcggtactcgcaatgcgtgccacccacggtttccttgcccacttctttaaggagcgctgccgttacagccgagttgcggtggcaagcattgttgcttgtgagtgtgagtctccagtgaggggggactactacgtgccctacttgcctcgccgattgaaatcaaaccttgaacattgggaaatcaatctggattacgtaaaacacggctggctctag

SEQ ID NO: 514962 - DNA, 342 bp, Stenotrophomonas maltophilia
atgagcatcaacaagctgctggtcgcgatgtccctggctctggccctggccgcctgctcgaagcaggaagctgcccaggacgccgctgcttcggccaacgaagccgccaccgaagcccaggctgctgccgaccaggccgccgctgccggcgcccagaccgccgacgctgcccagcaggctgccaacaccgccgccaccgctgctgacgctgcgaccgacgctgctgccaacaccgctgctgctgccaccgacgctgctgccggcgctgctgccgacgctgccaaggctgccgaaggcaccgccgagaaggccaaggacgctgctgaagaagccaagaagtaa

SEQ ID NO: 514963 - DNA, 228 bp, Stenotrophomonas maltophilia
atggatcgcgcgacaagcgtcatatgcggtgcatccacgcagggcgtggatctactgacatctggattccgccacacaatcctctatgccttcgagatcgagcgtcgcgcgatggcactgaccgcactgctggaaccgaccatgatcctggtgatgggtggcgtggtgctgacgatcgtgctggccgtgctgatgccgatcatggaaatgaaccagctggtgcagtag

SEQ ID NO: 514964 - DNA, 645 bp, Stenotrophomonas maltophilia
atgaattgcatggcctggcgcggccggcgcttccatcgtgccgggatgatcatccgtacccacgacacccacctcaccccgttgcgaccagtcctgcgccgccacctgctgcaactgcaggccgcgccggtcaccctccgctcgttccagcgcaccgacctgccgcgctggcgcgccttcgacgatcgccgccaacgcggccagcggcatccccccggcgtcgatgaggaggcgcggttcctcgccagtattcatcgctcgcgcctgcaggaggacaacgaccagctggtgctcggtgtattcgacgatacccagggcgccctgctggaccagttgcacatccgcctgcagtccctgcattcgcgctgtgccgagctgcggtcactgcagcaccagcatgttcacccgcaggctgccctgcaggcgttgtgtcccttcctgttcgacgatgtcggcctgcaccgcatctacgtgctgctgccgccgggctgcaccactccgttcgccaaagcactgcaggcgcacggtttcacccgcgaaggcatcctgcgcgaccaccatctggatgcggagggatggcatgaccgccagctgctggcgctgaccgcgccggcctggcgcagctgccagcagcgggtcggctag

SEQ ID NO: 514965 - DNA, 387 bp, Stenotrophomonas maltophilia
atggataccaccgcagaacatgaaatccaccacctgcacgacaaactgcaggcctggttccgtgccgacgtcagcaccgacgcgctgcaggacctgatggcgcatttctgcgcggacttcagcatggtcggcatcgccgggcgccggttggatcggcaggctgtgcaggtgctgttcgagggcggccatggcgcgcgtccgggcctgatgatttccatcgaggccgtgcaggcggtggcggcgccgttgccgctggcggtgctgcgctatcgcgaagggcattcggtgggcgaagggacggttgcctggcgggaatcgttggccgtgctgcggcaggaagagggccgttggcgctggctggcgctgcatgaagtagcggcagcctga

SEQ ID NO: 514966 - DNA, 672 bp, Stenotrophomonas maltophilia
atgatcgaactgctggaccttcaacagactctgtgcgcctttgcggcctgcaacgatgacgatgcggtgtacgcctccttcggttgggtgcacgccaccgggggcgatctgctgcaggcgcgtttctggttgccggcggatgaagacgcggcgttcgacgacggcggtgatgtccccgccgaagcgcgcgcgctgggcctgtccacctttcttgaaccggcgactttcgccgacgtgctcgacgtgcagaagcggcagcggccgctgtccacgctggccgaccatgcacgggcgctggcgtactacgccgagtacgatgccttccagcaggttgaaggtatcgacgaggcactgggcgaagcgggtgttggggaacaggcggcggcacgcgaggccggcattggtgcgggcatcttcgcgtcgtttgatctggtgctggtcgcgtgtccggaggcgcaggtcaaggcagtggcccagcgcgtggcgcgcctgctggagattccggtgggcgacgcgctgccgcgctgtcgtgggttgccgctgatgctgggagaagcactggaccgcaagcgtgcgcaggcgatcaaggatgacttcgcggccattgacgcaacgctgcaggtgcgcggtttcaagccgttcccgtggatggatgttcccgtattgcgttga

SEQ ID NO: 514967 - DNA, 291 bp, Stenotrophomonas maltophilia
atgccagcattatcagagttctcaaatgtaacgagcactgcaatcaatgtagtgattaaaaaggggtatcgggtatggttcatgaaagagaccgagacctattgcgccgagaaggatggctgggatttcatggccgactcaccctgttctttgctcggcatcatcagcatctacgagttcaagaacccaagcagatacgaggagtactggtggctcgaggaaggcatttcagaatcccagctaagctctgcaccgcctcggtacacctcggttgtggatcggcaaccatag

SEQ ID NO: 514968 - DNA, 180 bp, Stenotrophomonas maltophilia
atgtccagcccatcctgcgccgccctgctggtgatcgccgcctgtgtcgtgctgcaggcgctgggcctgtcgctgcacctgcaccccgacaacggccgcgcctgcctgcagcagcatcgccaggagctggtctgcctggcctgggtaccggcggtcgaaaccggatcacacgccgggtaa

SEQ ID NO: 514969 - DNA, 735 bp, Stenotrophomonas maltophilia
atgacccgcgcctgccaggccatcgttgccttagcgctggcactgctggcgcccgggtacgccgccgccagcgcctgcacgcccgacccggtcgcgtcgattccgtcggcattgctgaccgagggtttcctgcaggcccatcccgacctgtactggcgcgacctgggccagctgtcgtggcgacgtggcaagcctgcacaggcgcggctgcgcttccagcgcgccagcctgtacgccgacaagttctcgcagtcactggttgcccgcatgtaccaggaaggcatcggcatcgacgccgatccggtattggcctacatctggatggacctggccgccgagcgcggctaccgcgacctgctggttgaacgcgagcgctactggcaacggctggatgcggggcagcgccaacgggtgctggccgaaggccctgcgctgtacgcgcagtacggcgatgccgtggccaagccgcgcatggaaaccgcgctgcggaccgcccgcaatgcgatgaccggcagccgcaccggcttcgtcaacccgggcctgcgcatggcgctgggcgaggggccggaggccaaccggccggtcaccggcgatgactactaccgcgatgccttctgggaaccggcggcctactggtgcctgcaggaacagatctggcagaacacccggctgcggcccagcatcgagatcggtgcaccgcggcagatccgcgacggcgggccgggtggcgactag

SEQ ID NO: 514970 - DNA, 1380 bp, Stenotrophomonas maltophilia
atgtcctcagcgaaactgtctgacggctggcgctcgtccagcagtcgcctgctgggcttgtacagcctgctgttcgtggcctggtcgtgcgtgctgctgggggtgctgtactggagggtgtcgctgtacctggacgagctggcacagtcagcggtgctgcaacgtgcgcatctgtttgagcacttcaccggtgatggcctgaccgcagcactgcgcgaaaaccgccgctatgacctgcatggcatcgatgcctacgggttgttcacccccgagggccagccgattgccggcatgctgaagtcgttgccggcgcagctgccgctcgatggcagcgcgcatccggtgtccggcctgccgattgccgatgtgaacgcacgtggcaagcgcggcttcggcctggcgatgccgacccgcgacggccgcatcctggtgctggtgcgctacagcgggccattgaacgaggtcaatcacctgatcctcgacgccctgctgtggggtgtgtcgttgaccctgctgccggggctgcttggctggcacctgctgcggcggcggccgctgcgccgcatccaggccatcgagcaggccactgcgcggatcgttgcaggcgacctgggccagcgcctgccgttggccaaccgccgcgacgaactggacatgctggcgtccatcgtcaacgccatgctcgaccgcatcgagcagttgatgaccgaggtcaaaggggtatgcgacaacatcgcccacgatctgcgcacgccactgacgcgcgtgcgtgcgcagctgtaccgcatgcggcagcaggtacaggacggtgatccgcaggcgctgccactggagcaggtgctggaagaaaccgacacactgatggtgcgtttccgcgcgctgctgcggatctccgagctggaggaccaccagcgccgctccgggttcgacacgctggcgccggaagcgttgctgcaggagatccacgcgttctacgcgccgctggcggaggagaagggccagtggctgcagctggaactggccgctggcctgtcgggcgtggtgggcgaccgcggcctgctgttcgaggcgatcggcaacctgctcgacaacgcgatccggttcgcaccggagggcggccgcgtacagctgtcggcacaggtggaggagggagctaccagcatcgtggtggaggattcgggcccgggcataccgcacgccgaacgcagcctggtgttccagcgtttccatcgcgcggaggccagcaagggcggaggattcggcctgggcctgtcgatcgtggcagccatcgccggcctgcacgggttccgcctgcaggtggcgcagtccacgctgggcggcgcccgcttcagcctgctgtgccgaccgcagctgctgtag

SEQ ID NO: 514971 - DNA, 684 bp, Stenotrophomonas maltophilia
atgtcgcgcgtattgaccatcgaggatgacgccatcacggcccaggaaattgtggcggagctgggcagccatggcctgcaggtggactgggtggccgacggccgcgaaggcctggtgcgcgcggccagtggcgactacgacgcaatcacgctggatcgcatgctgcccgggctggatggcctggccatcgtcaccacccttcgccggatcggcatcgatacgccggtgctgatgctcagtgcgctgtcggatgtcgatgagcgggtgcgcggcctgcgtgccggcggcgatgactacctgaccaagccgttcgcctccgacgagatggccgcgcgggtggaggtgctgctgcgtcgccgccagcgcccggcgggcaacgagaccctgctgtgcgtgggggatctgcagctggacctgctggcgcgtaccgcccaccgcggcgggcgcagcctgagcctgctgccgaccgagttcaagctgctggaatacctgatgcgcaacgccggccaggtactgacccggatgatgctgttcgaggaagtgtggggctatcacttcgacccgggcaccaacctgatcgacgtgcacatcggccgcctgcggcgcaagctggaccaggccgacgcgccgtcgctgatccgtaccgtgcgtggcagcggctatgtcctcagcgaaactgtctga

SEQ ID NO: 514972 - DNA, 285 bp, Stenotrophomonas maltophilia
ttgtcggccgcccggtcgcgcggcacctggacgctggaagtcacgcggctgtgcaccgacggcacacccagcgcctgcagcaagctctacggcgcggcctggcaggcggcaagggcgctgggctacatacgcctgctcacctacaccatgcccgacgaaggtggcgccagcctgcgcgccgccggctggcggctgatcggcgcgcgcggtggcggcgcctggagccgtcccggccgtccgcgcgccgatacccccgagcacctgcgcggcgccaagtgcctgtga

SEQ ID NO: 514973 - DNA, 306 bp, Stenotrophomonas maltophilia; identical to SEQ ID NO: 332913

SEQ ID NO: 514974 - DNA, 1785 bp, Stenotrophomonas maltophilia; identical to SEQ ID NO: 332916

SEQ ID NO: 514975 - DNA, 651 bp, Stenotrophomonas maltophilia; identical to SEQ ID NO: 332918

SEQ ID NO: 514976 - DNA, 549 bp, Stenotrophomonas maltophilia; identical to SEQ ID NO: 332921

SEQ ID NO: 514977 - DNA, 2625 bp, Stenotrophomonas maltophilia; identical to SEQ ID NO: 332924

SEQ ID NO: 514978 - DNA, 1053 bp, Stenotrophomonas maltophilia; identical to SEQ ID NO: 332925

SEQ ID NO: 514979 - DNA, 675 bp, Stenotrophomonas maltophilia; identical to SEQ ID NO: 332926

SEQ ID NO: 514980 - DNA, 903 bp, Stenotrophomonas maltophilia; identical to SEQ ID NO: 332927

SEQ ID NO: 514981 - DNA, 765 bp, Stenotrophomonas maltophilia; identical to SEQ ID NO: 332937

SEQ ID NO: 514982 - DNA, 495 bp, Stenotrophomonas maltophilia; identical to SEQ ID NO: 332938

SEQ ID NO: 514983 - DNA, 447 bp, Stenotrophomonas maltophilia; identical to SEQ ID NO: 332939

SEQ ID NO: 514984 - DNA, 360 bp, Stenotrophomonas maltophilia; identical to SEQ ID NO: 332942

SEQ ID NO: 514985 - DNA, 378 bp, Stenotrophomonas maltophilia; identical to SEQ ID NO: 332944

SEQ ID NO: 514986 - DNA, 1272 bp, Stenotrophomonas maltophilia; identical to SEQ ID NO: 337686

SEQ ID NO: 514987 - DNA, 1215 bp, Stenotrophomonas maltophilia; identical to SEQ ID NO: 428619

SEQ ID NO: 514988 - DNA, 279 bp, Stenotrophomonas maltophilia; identical to SEQ ID NO: 337736

SEQ ID NO: 514989 - DNA, 3720 bp, Stenotrophomonas maltophilia
atggcgccttttggggactctgtggtcgatctactaaagcatgggcacgtttggattcaggagccgccgagtgggcccgagcctggggcgccagttgagacgcgtacgcagagtctccccttgggcgaattgtcttggcaaaacttcgaacggcttgtgctcaggatcgttcgcagagaaagtcaagtaattgattgctctatttatggcgcgccgggtcaatctcaaggcggaatcgatattattgcggtgcgttctggggcttcttcttcgaaagtgtgctaccagtgcaagaaggtcaatgatttcgatgcttctgatgtggcctccgcagtggataaatttatttccggacactgggcaaaggaagtggcggaattcgtattgtgcgtatcctcgtcgcttgagaaaactcagctgcagaacgcactggataagcagcgaaaaaagctggcggctttgggtataggattttcggtgtgggatggtgctgcggcaggcgggatatgcgagcgcttaaaagctcactgcgatatcgtcgacgacttctttgggcgctcttgggtttctagttttaacgggaaagacgctgcggatagtctcggtgatcgactgaatggttatgaattcgggatgcttcgatctaagcttgcgaatctatactcagttttgttctcacagcacgatcctggctttaggacggatcgcaatgaaaatatggactatcgtgatcgatacgtggtgcccgatattatcgagcgcactcagattgatacgggtctattcaatcagtccgcgatgaggggtttgagtcaagaggaagatgctcttgggatctctagaggtcaggaagtggtcgggcctctgaatgccaactctacaatgtatgagatcaggaagcctgtctttgaatggctgcgtgatcggggaaggtgtgttgttcttggtgagcccggttacgggaagagcgcactgctcagatacttggccttgtcaattttgaggccagataagctgcaattcgatgttttgaactttggttacttctcacgcttgcctatatggatatcgttctcccggctctcggcctccattggtcgcgagtcaggtgttagcgttgacgcattctttagagagtggcttcagcagtatggtttcggtgatgtatacccgctcttcaggcgagctgtgaagggagggcaggttctgctccttgtcgacggtttggatgagtcaaccgaagaatacactggtcgtgaggcgcttgatcgtgttgtgaccttcctggaggctagcgattcatcaatcatctgcaccggtcggcctcaaagctacggtagcctcggcataccgccttcttgggcaacggctacgcttgcaccattaagtgaaaagaagatagaagagttagctactcgttggtttgaatttctggagtcggatccagaggcatcgttgcaagctgcctgtgaaaatgaagatttcggccggcgtcgggcacaagcattcctgcgcgaggcaagtagtagctcaaggactctggagctggctcgcaatccgctactttgcatgtcgttgattcagttgtttagattctcccatcagcttcctgaggctcgtgtggaagcatataaacaaattgtagatctgttgctatcaaagcatcctgctgcacgagcacaagcgagtggcaccactttgccgatcagttctctggggctgaagtctgcagatcttagagaaatgcttattcgattggctagggagatgcaatcgcaaccgacgcgatctctctcggaagagcggtgcgagcaagtgtgtacagattttctgatggacgacatgtatggattaggcgagcctgtggcgagggcaaggagaattgccgcggaggcggttattcaattgaatgaccagtatggagtgcttgttgagcgatctcccaaggagcttagccttcttcatttgagtattcaggagtacttggctgctgaatcggtcgcgcgcgagtcacatgaagatcagattgcatggatgactgatatctggattagtcctgcatggcgagaaactctgattgcctggttcggtattctgggggcgcgtggagaaatggtgctctctggtcgtgcatcacaacgattggaagatctgggggagggcaatgaatggcttcgtgcccaatctatcgagcttcgcatggaaatagcaatatcggacttgggacttccgattggcgaagcacgtcgaatcgttgagcttgccgtcagtgaggtggaaaactctcccatcgtagagttgcgtgtgtccctggccaagaacattgcaataggcgcactgggaacacgtgtgcgttcagagtgtcgatctgccatccggcgttggctacctggtcagccgagttataagcggagaatgctcattgcgtcctttaaggattgggcaccatctactgatctgtggtccactctagttcgtgcccttagagacgaagatgtcatgtgtcgacgcgccgctgccgagaccattgcgcacgtcttcatgaatactgatgaggcgttggcggccttggagagaatggcaatcgttgatgtgcggcctgaagtgagggccgctgcgctgtatggattgaccgccagatcggagtggcggacgcaagctattggatgtgcaggtgccaacagaagaacagccaacgttgatctgtttctggggacggtgcgaactcgtgtcaagcaagggctacaaaccgccgaagacatcaatcggatattgatgctgtgggatgctgattctctggaatttcaagagcgacgtgatgctgttggattactgtgcgaagggtggccgcaggatctaagactacgcagacttctgttggaccgattgaacgaacatggggctggatttgaagtcgaactgccacttcaatatttggtccgctgttgtccgggtgatactgaggtggcggagacggttgcggcgatggttaggcggtttggtcgaatgctaacgcttggtgataatcaagtgtgggaagacctttcttcgggatttcgtggtaatgccaacctgtcctcggcgattagagattcattgagtgcggatcgggagaggtacaagaagactctatgggatcctcggaccgcccatgcaatggttataattggcgatgacgcagctaagcgtgagctcttggagtcttatgagttggcggacatccgagggcgatattggatcgcgttcgctcttcagcgaggatggggagatgacagtgctgtgcgagagaggcttcagtactgggcagatggaagtattgagatggctgcacccttggggtcattggcgcgagtccttttctctgaatcaaccaaacgactcaagtggcttcgcagaatcgcgcgcgcttccgctgtgactagagaggtcggagccgctatggctctcctggaggaatgccctgatgaagaaactaaggagttagtaagagatctgttggataaccccggggtatggtattaccatagaacggacctccaggcgcggtttgccagcgcatacccggacgaccctaagagcttggagataattgaggattcactatctaatatcgatggtcccaatttcggaagaattactgcgatgttcgagaacgttccagacctgcggtctcgacttctcgacttctcgacgccgcagcgccggcgccatctgatgtaa

SEQ ID NO: 514990 - DNA, 1254 bp, Stenotrophomonas maltophilia
atggagttgcagtacgacgcggattggcttgctgtcgatatgggccgaccgctgtccttgtcgctgccgttcaacctgcagaacctgccggtcaagggcgagaaggtcgccaactacttcgacaacctgctgccggacagcgacgcgatccgccgccgcgtggccgagcgcttcaggacgggttcgaccgagccgttcgacttgctgaaggccatcgggcgcgattgcgtgggcgccgtccaaatcctggatgaggaggaggtgcccacggactttgatcgcatcgagggcgtgcccctatctgaagaggatatcgagcggcacctgatcgaaaccgtttcgccgcaggccttcgctgcgggccgagacccggatgcggacttccgcatctcgctggccggtgcgcaggagaagaccgccttcctgtggtgggacgggcaatggctggcgccgcgtggcgccacgccgacgagccacatcttcaagcttccgctcggtctgatgggcgggcggcgggcggacttcagcacgtccgtcgacaacgaatggctgtgcttgcggctgctgaaagcctacggcttgcccgtggctgatgcgcgcatcgcgaccttcggccggcagcgtgtgctggtggtggaacgtttcgaccggcgcgtcgcacccaatgggcagtggctcatgcgtctgccacaggaagacttttgccaggtcgagggctgctcgccattgcgcaagtacgagaatgagggcggtccagggctcaaggccttgttcggtacgctgcggcaatcggtgaacgccgaggccgacatgaaggcgctgatggcggcgcaggtgctgttctggttgctgcgagcgcccgacggccatgccaagaacttcagcatccagcttctgccacgcggccgttttcagttgaccccgctgtatgacgtgatgtcggtctacccggtgttgggcgatggccccaaccagtggtcgccgtatgaaatcaagctggccatggccctgctcggcaagaaccggcactacgagatgcacagcatccagcgcaggcacttcaacagcaccgcgcagaaagttgggtacgcatcgaccgtcgagtcgatcatcgaagaactcctggctcgtacgccagcggccattgccgaagtgcaagccgaattgccacaagacttctcaccgcgtgtccgcgatgccatcctgggcgggcttgagcaggcggccagaacactcggtgggatgccaccgtaa

SEQ ID NO: 514991 - DNA, 261 bp, Stenotrophomonas maltophilia
atgccgccgacgtcacatccactggtcactaccggccaactcggctcgatgctgcaggccgcgcgcaaggcccaagggctgacccagtcggcgctggctacccgtatcggcttgagccagtcgcgtgtctctcatctcgaactccacgcccacgagctgagcgtggagcaactccttgcatggtgtgcggcgctgggcctggagttggcattgggggcgcggggcagggcggcggtgtcgacgccgaccacggattggtga

SEQ ID NO: 514992 - DNA, 6642 bp, Stenotrophomonas maltophilia
atggacgagacaccaccggaaggttcgaccatcgcggccgaactgaagatcgacgttaccctgatcgccaaactgaacttggcggattttcagaatgctgtcccgctggtccgggatctctccctgatcaacgagaccgatcagacgcatgagcaggtcgagttgatcctgacttccgatccgccctttttgaagccgcgccgttggcggatcgatgcgctggcggcccgttcgcgttatccaatccgcgacctggatctgaacctggacggcggattgctggcacggctgaccgaagccgagacggccacggtgacgctggcattgcgcgccgcaggctcggatgcctccaccactgccctgacgcaacgcgatgtccatctggacttgctgccacgcaaccaatggggcggtatctcgcatttgcccgacttggtcgccgcgttcgttcagcccaacgacccggcggtggatcggctgctcaagcgcacagccgaggttctacgtcagcacggtcgcaaccctgcgctcgacggctatgccggtggtgccaagcgcgcctgggagctggcctctgccctctggggggccacggctggtatgcagctggactatgcattgccgcccgccagtttcgagcagtctggccagaaggtgcggagccccggccaaatcgaaagctcaggccttggaacctgcttcgacctcgcgctgctgttctgcgctgcactcgagcaagcaggattgaacccgctgctgatcttcaccgaaggccatgcttttgccggcgtctggcttcaatccgaggaattctccacaacggtcgtcgacgacgtgacggcgttgcgcaagcgcctcaggctcaaggaactggttctgttcgagaccaccctgatcacacagcgccccaccgtccccttcagctacgctaccgaacgcggcgctcagcaggtggacgaatctcaggatgcgggattccgcttagccgtggacattcgccgggcacggctgcagcgcatcaagccattggccagtgcggaagcggcagttgccgccgtgtcggaaaccgaagtgtcaccgtccacgcctgccctgccaaagttcgaagacgcgcctgaccttcccgacagcgcgccggccaatgcggaagatgccagccagctcgatcccaaggaccgactgcttcgctggcaacgcaagctgctggacctttcgcttcgcaacaatctgctgaacttcaagggcggcaagaaagcgatcaagctggaggcgccagaccccggcgcgctggaagacctgttggccagcggccagcccctgaagctgcgaccgcgcccggacctgatggacggagccgatccgcgcgatcaggccatctacgaagcccgcgaacgtgaaaacgtgcgtcgggcgcacgcgctcgaagccttgcagaaacgtgagatttttgtcggtgttccagaaaccgaactcgatgcacgactgaccgagctgttccgcagcgcccgcacgactttgcaggaaggcggcgccaacacgctttatctcgccctgggcttcctgtcctggacacgcgaagaccgtgacggtcagcgctatcgcgcccccttgatcctggtaccggtcagcctgcagcgcaagagcgcccgctcgggcttcacgctcagcttgcacgacgatgagccccgcttcaatccgaccctgatcgagatgctgcgccaggacttcgagctgagcctgggcagcctcgaaggcgaactgccgcgagacgagaccggcctggacgtcgctgcggtctggaaggccgtcggccacgccatcaaggacatcaagggctgggaagtgaccgaggacgtggtgttgtccatgttttcgttcgccaaatatctgatgtggaaagacctggccgagcgcagcgagcagttgcgcgagaacccggtcgtgcgccacctgctggacactccgcgcgatgcctatccaccgggcgctccgttcccgcaggtgcgcgaactggacaaacacttcgaccccaaggaggtgttctgccccttgccggcggattcctcgcagttgtcggccgtgctggcagcctcgcagggcaaggacttcgtcctgatcggtccacctgggaccggcaagagccagaccatcgccaacctgatcgcccaatccctggcgcagggccggcgcgtgctctttgtgtccgaaaagattgcagcgctggacgtcgtataccggcgcctgcgcgaaatcggcctgggtgagttctgcctggagctgcactcgagcaaggcccgcaagctcgacgtgctggcccagctgcagtccgcctggtccagcagcagtcaagccgacgccgagcagtggcgagcagaagccgacaagctcaaacgtctgcgcgatgcgctgaacatctatgtcgaacgtctgcatcagcgccgccgcaacggtctgagcctattcgacgcgatcggcactgtcagcgcgggacacgatatcccgacgcttgaagtggcctggcccacggccgatcaacacgatcttgcgggcatcgagcagttgcgccatgccgtggaccggctggaggtcaatgcgcaagccatcggccatgccacgctggcacaacaccccttggccctcattggccagggagactggtcacccacttggcagcaacaattgatcaccgcggcacgcagcgtccttcccgccgcccaggcgacgatcgaatccgcagaggcatttgtccaggccatcgggctgccttcgcccgcgttgacgcccgacacctgcgaagcactgctgatcctggcccaacgcctgccgtcggcagcagggcacgattggcgcttcgtcctgcgccccgacgcacgcactctaagccaacgcctgcaggaaggcgcagcactggtgcgccgccacgccgaactgaatgcgcagctctctgaaccatggcccgcttccgtcgtgaccgcctgcaccgacagcctcgcagcgctcaccgaacaccggcagatccacgcacagctcggcgagccttggacacctcgcacggtcgtgcaactgaaccagggactcggtctgctgacccagatcgcgcaacaccacgcagcgctgtcggccccttatggcgaatcgattgaacagctcgacgtcgccgagttgcagcggagatgggaacaggccgaccaggcgttctggcccaagtcctggctgggcaagcgcaaggttgcggcgcaactggctggcgccatcaagggaggatcacagcctgacgtcagcaacgatttacagcattggaatgccatccgtgccttacgccaacaggtccaagccattacgcccgcgcaggaatgtgcgtccacctgggcaggactggacaccaaagaggacaaggtgcgcacggccctgcgctggcagatcgccctggccgctgtgcgcgaaggccgggcgtgggaagacgacggcttcgacgtcatcgcggacggccaatgcggggccgctctgcaggccgatttgcagagggcacgccgactgcgccagttggaccaggacatcgccgcccatgcctcgctggaaacgacaaccgttggcttgtgggctggccacgccacccaagtcgaccgcctgcgcgctgcgttggatttcttgagcgatcggcagaggcgtctccaacaaggtcctctggatgcgacccacaccttggtcgaggaaggtgcttgcggccccacgctcgcgcgcgatcaccagacgctgcgccagcgagccgaaaccgagcaagcgctggctgccttggacgacttgcgtgagtccatcaccggcctgtggaaaggactggccacccctctggatgagctcgcacaggcctgcaagcttcgcgaggatctggctaccgtgctggcgcgtctggctaccacgcccgaacagatttcagcctgcaaggcaccactgcatgccttgttgggcgatgccaatgcattgctggagccgggtggccgcatcgccgtggccggcgctcgatatgtggagaaacgggaacagctgcttccccggcaggagacgctcgcggcaatcgggtgcctcgccgaggtcgcccagacgcagtggcattccctgtcactcgacgggcttatcgagcaaagccaatccatcgtgcgcgcagaacacagcctgcgcagttggtgcgcctggcgccaggctcgcggtgaagcacttgcactcgggttgaccacgctggtgcagggtatcgaacaaggccatgtcggaccaagccaggcccgccgaacgttcgaaaccaactacgcacgttggtggctcaacgccgtggtcgatcacgagccggtcatccgcgggttcgtcagcgccgaacacgaacagcgcatccgcgacttccaggagcttgacgaacgcttcaccgccctgacccgggactggctgcgtgcccgcctgtgcgccgacctaccctcgcaggacaacgtcagccgcaactccgaatggggcgtgttgcggcacgagatgggcaagaagcgtgcgcatctgcctttgcgggagttgatggcccagattcccgaggcactgaccaggctcacgccctgcttgctgatgagcccgctgtccatcgcgcagtacctccaggcagggaccaacgccttcgatctggtgatcttcgacgaagcgtcacagattccagtctgggacgcgatcggcgccatcgcccgcggtcgtcaggtcgtgatggtcggcgatcccaaacagttgccgcccacctcgttcttcgatcgcgccgagtccggtcttgacgacgaggatgtcgaggctgacctggagagcatcctcgacgagtgcatcggcgcgaacctgccgacccgcgacctgaactggcactaccgcagccgccatgaaagcctgatcgcgttctccaaccacgcctattacaagggtgaactggtcaccttcccctcccctgtcaccaacgaccgcgcggtcagcctgcagatgatctcgggcgcctaccagaagggcggtacgcggaccaatcctgccgaagccaaggcactcgttgccgatgtcgtggcccgcctgacagcgtcaggtttccgagaaagcgggctcacgatcggggtggtcacgttcaacgccgaacagcaaaaactgatcgaggaccttctcgatgaagcccgacgaaaagacccgcgactggagccctacttcgccgagagcgaactggagccactgttcgtcaagaacctggaaagcgtgcaaggcgacgagcgcgatctcatctacttctccattacgtatggcccggaccccgcaggccaactggccatgaacttcggcccgctcaaccgccaaggcggcgagcgccggctcaacgtggccattacccgtgcacgtcacgaactgcgcgtgttcgccagcttccgggccgagcagatggacttggcgcgcacccaagccatcggcgtgcgcgacctcaagcacttcctggaattcgccgaacgcggcgctcgcgcgctggcggaagcaagcaaaggcagccttggcggcttcgacagtccctttgaacaggccgtagccactgcccttacccagcgtggctggcaagtccagccgcagattggagcctcttcgttccgcgtcgacctcggcatcgtcgatcccgacgcacctggccgttacctggccggcgtggaatgcgacggcgccacctaccaccgcagcgccactgcacgcgatcgcgacaagctgcgcgagcaggtcctgcgcggcctaggatgggaaatcgtgcgggtctggtccaccgactggtggattgattccgctggcacgctcgataggctggatgcccggctgcaagccgttctcaaagcccagcgcgagcggcgtattgaagaggcagagcgcgaagccgaggccgagcgcttggcgcaagcggccatcgcgcaagccatggcgtcggtgacgaagccagacgaagaaacggcggccccattccaggatgcggacccgatcgcacctgaagccccggcgacggttccaccgcagcaaatcgaagaagtctttgctcgtcaggcctcttcagcgccagcccatgccgataccgccgaaacagcgccatcggaggtctcgctctaccaggtcacgaaccccgctgaagctgtcgatggcgccaatcccgatcgattcttcgacggggattacaacgacaccttgtcggccatgatcgctcacgtcatcgaacatgaaggccccgtgctcgacgccctactggcccgccgcattgcccgggcccacggctggctacgtaccggcgggcgcatccgagagcgcgttttccaaatcgcgctcgcccgctatcggacgaccgatgaagaggtcggcacgttctattggcccgagcatctcgatcccgcggcagagcctcccttccgcgggcccgccgacgaggacagcgtgcgggcagctgacgagatcagtcttacagaactggcttcactggctcgcgccgtcatcgcacagggcagtgaaggcgaagggatctatcaagcaatggcgcgcaggctcgggctccaacaactacgcgcagccagccgggcacgttttgaaaatgccgtgagctctgtgcgtgcagagccatga

SEQ ID NO: 514993 - DNA, 1668 bp, Stenotrophomonas maltophilia
atgccaaaaagcaagcaactcggacaaaaaaatgcggccattacgacgacgctctcactgcgcctgctgcgagccgataaaacagtcaagcaagcgatcagagataccagcgctgtgacagaggttgagtctgattctggtcgcctgtttacagcacaggctcccggaactccccctacttggctcagggtcgtaaaccaattttccaaacaaggggacttgaaactcgagaacaagagctgcgcagccgtcttgtttctggatattcagccagatgacaaaagattgaaacctcgcacctttgcgcttacgttcggcagcgggcaccatgcacttgatcccgatgcatttgtccgaaacttcggcctgaaggtcacgctcaactctgttgcgcgcggcgcactaaagaatcttgatattgccacgcttgacagcacgaccattcagaaacgcatccaagcaagtaggaaggccgatctacagggcttcgggatcgatctacagaacgatctgttacgtcttgcaggaggagtgcccaccgacacagcatttgcaaatgcgctcgccggcagagatgcactcaccttaacgagcaagctctcagcgactgaaattcctgaaaaatgcaaaacagcgcttaggctattcgacgccaacgactacaagaaagactactcattcattgatcaaataattcctgttcaagacaagaaaatacttcgagatcttgatgaggttgtttttaaagaaataaaaacactgctggccggaaagccgtctgacttgcacataactctaccggagattattgacccggaagagtctggtgacttcggatatttcggcataggcttcaattcagggtcgaagaaatcttttggcgagcttgccatcgaagactatatctctgaattacaggcgggtcggccacacgaaatatctggcatagcagacctaaaggccagtcatgagatccgaattgtgattgacgggcaaggagatcgtcagaggcggagaagagtctatgattgttttatatacgaggtaagctataaaaagaagacctacgtgcttttctctggagaatggtactgcatcgatagcaagttctttgacgctgtggaaagagactatcaggctctattgggagtttcgttccatgcgtctaccacagccaaaaatgagcaagagctaatctcggaactcgataagaatgccgaccttctcaacttagataaagtgaaagcctcgccatcgggggcaaagggtgccaatctggaaccttgtgattttctatctcgccgcaaagaattcattcacttaaaagacggccacggctccgccccaattagccatctatggaatcagggactcgtctccgcggagagctttgtccgcgatgcagtttttcggaaatccatgcgcgattcggcaatcaagcggcaaaagactgcaaaaaagtcaaaatttgaactgttgctacctgatggtcgttcgaaagtaactcctgccgattacaaagtggtgttcggcataatgcgacatccgtaccagcggagcaagcagcttggcctcccgtttttcagcaaagtaagtctacgcgccgtcgcaagccgcattcaactaatgggctatgccgtggaagtacatcttattgaaaagacgtaa

SEQ ID NO: 514994 - DNA, 912 bp, Stenotrophomonas maltophilia
atgagagccctccgaacccttctgttcgcagcgatggtgctggccaccaccgcgtgcgccagcaacgccatcaaagatcaggccgcgtcccctgatgtcgaaatgccgccggcgtcggctacagtgaccgtctcccaacccaatgtcccgccagcgccagtacttgcgatgccgacctcccacgaggcggaaagaagcacagtcaggcctgctgccgaagccggtgacgtcgcggcggacgaagaccccagccaaaccgaactggatgccgaagacatctacgcagaggacctcgtccgcgatccctgggagggcttcaaccgcaagatgcacggcttcaacaacgcggccgacaaagtcgtcctgcggcccttggcggtcgggtacaagaagatcacgcccgagcctgtccaggcaggggtatctcgcttctttgccaacttgggcatgcctgtaacggtggtgaaccaagccttgcaggggcggctaggcgatgcggccagatcgctggggcgattcgccgtcaacacgacggtcggcatcgtcggtgtgttcgatccggcgtcccactttggtatgcccagccgcgacgacgaagacttcggccagacgctggcgacctggggctggcgcgaatcacgctacttggtgatcccgctgcttggtccgcgcacggtgcgtgatgcgctcggcatcgtggctgatcaaccgctgtcgcccatcgcccagatccaggacagtggagtagccagcggattgcaggcactggagatagtcgatgtgcgaacgaaattgctgcccatggatagttttcgtcgcgacgcgctcgatgactacctccttgtgcgcgacgcctggattcaacggcgcaatcaccagattcaacaggatcttcgaagcaaccgtgactga

SEQ ID NO: 514995 - DNA, 195 bp, Stenotrophomonas maltophilia
atgggctccgtcgaggtacagccgatatccggcggggtagcgagcaaggcagcctccatgctccgcgccaacctcttactgaacacttaccgtgaacgccacagcggctccgttggcaacatgttccgcccagcggtcgcctcgccggaatcgaccggcggaaatggggaatcgccccggtccgtcaaggtatga

SEQ ID NO: 514996 - DNA, 987 bp, Stenotrophomonas maltophilia
atgagcatgaactttagcgttcttgccatcgccgcggtggccgtgtactccgctgcctgcattgcgtacgtctaccgttggcgcggccgcgcccgctacgccagcttttcccagtacctgcgcaagagctggcccatcttcgcgcccttgaattgcctgatgtacgcggccacatgcgcatcggcccgcagacccgtactggctgccgactacctgaagaacatcgggctgattcgcacccattggcggaccatccgcgacgaggcgctggcgcttcaatcggccggggcgtttgacgcaaccacggcgccgggttcggtcggctactacgacgtggggttccgcacgttctacaagcgcggctggagcaagttctacctgaagtggtacggcacgaaccacaactccgcacgaaggctgtgcccgaagacgatggcattgttggatcaggtgcccgagattcgcggtgccatgttttctatcctgccaccgggcgcagagctcacgctgcactccgatcctatggcctgttccttccggtatcacttggggctcgctacacccaactcggagcagtgccacatcaccgtcgacggccagccctgcgtctggcacgacggcgaggactttgtgttcgacgaaacctatccacacttcgcgcgcaacgataccggcgaggtgcggctgatcctcatgtgcgacgttgatcgcccgatgaacgccctcggtcgcctgatcaaccggggatatcgcctcatcgcaagaggaacggtcgtcccgaacaccgcggaggacgagcgcggcgtcttcagcgcgctgttccgtgccctcgcgccagtgcgggcgtggagcctgcgcctgcgggccgagcgcaggcggacctacaagacgctcaagttccttctcaacgcgacattgctcaccgtgggtatgggcatcctgttcacggctctcacggtcgtggaaggcttcatgttcataccttga

SEQ ID NO: 514997 - DNA, 1188 bp, Stenotrophomonas maltophilia
atgaaagtacctgacaagctcttgttgcccgcgatgggcgtcaccctcgttgcagccgtcgccgccatcgtgctcgcatgggaggtgccagacgccacagcgcaggaagccaagacgcctgttgccgggcaggcttcattgaccgtggtggttgcaagcctgcaacccaccacacttccccagcgggtctcggccaacggcaacatcatggcatggcaggaagccagcattggcaccgaggccaacggcttgcgcctgaccgacgtcaaggtcaacgtgggcgacaaggtgcgccgtggtcagccgctggcgaacttcgacgctgacacggtggaagccgagttggcacaaacccgcgcggcggtcgccgaagccgacgtggcgctggccgaagcggccgccaatgccgaacgcgcccgagtgctgcaggaaagcggcgcattatctgctcagcagattcaccagtatctcagtgcagagcgcacggcgcgggcacggctcgatgcagccagggctgttgagaaaacgcagcggcttcgtctggccaaaacccggatcaccgccccggatgatggtgtcatttcggcgcgtgtagccacggtcggcgccgtgctgcccgcgggccaggagttgttccgcctgattcgtggcggcaggctcgaatggcgcgcagaggtggcagccacggacctcgccaggctcaaaccaggccagaaggtcaggatcacgcccaccggaggagaagcgatcgaaggccggctgcggatgctggcgcccgtgatcgacattcagacccgcaatgctctggtctatgtggacctgcctgccagcgacacggcgcgtgccgggatgtttgcacgtggcgagttcgagatcggcgccagcgaggcaatgacgctgcctcaaggcgcggtgcagttgcgcgaaggcttcagctacgtgatgcgcgtcgggccggattcccgcgtcatccaaaccaaggtcacgccgggccgccgttcaggtgaccgcgtcgagatcatcggtggcatcgacaaggaagatcgcgtcgtcgtttccggcgcggcgttcctgagcgacggcgacctcgtgcgcgtagcggatggaccgacgaaggctgcgccaccagcggcatcgccatcgacgtcgcagcgactgacgttgaccagcagcgggaacgcgcgatga

SEQ ID NO: 514998 - DNA, 642 bp, Stenotrophomonas maltophilia
atgggtatgccgcacaaatgggcgctcaccgccctccaggttttcgccgtgctcgccatcctggcgtgtggtgtggacgccgctgtgatccggttcgtccaccgcagtctgacaccgacgttggatgacttcttcgacaccctcagcgaaattgccaacgccacgattctgtcgatcgccacgctttgcgcctatggcgccagccgaattgcgcaggcgtggccgccagtgcgtcgctggctcccgtcgtgggagcatgtcaagcagggcagcctgctcatgttgctcacgctgctgatgggcggactcatcacgctggcgctcaagcatgtcgtggcacgagcccgcccgagcttgctcatcgaatctggtcactacgggcttggcgcaccgtttgcgggattccccttcaactcgtttccgtccagtcatgccttcactgcgttcgctgcggcctgcgtgctggcctgcgttctgcccgcatggcgcacaccgctgttcgtgttcgcggccatcgcaggcttctgccgcgtgctgacgctggagcacttcccgagcgacgtgctggcttctgcattcattgccaccgggtgcgtgcgcttcttggcgccacgccttcgaggccccctatcttggacctga

SEQ ID NO: 514999 - DNA, 1245 bp, Stenotrophomonas maltophilia
atggccgacgccagggcgtcgagtgtgaccagcggcgcggcattgttgccttccctggatatcaccgcgagcgccacgagggggcgctcggagttgggggcacccgtgggcaaggtctcgtcgttgggtctacagactgtatgggagctggacgtcttcggagccaatcgcgccggcctcgctgctgccgaagcaaggctttcgtctagccaggctggctggcatgacgcccgggtctcggtcgccgccgacgtggtgaggaactacgtcgagttgcgggcctgtgaggcgcacgctgagcaatcccggatcgacgcaacctcccgcgcgcagacctctcgcgtcaccgggttggctgccgcggccggcgttcggtcgcctgcgacggcagctctggcgcgagccagtgcggcccagggtgaagtagcgctggaggaacgcggggcgcaatgcgatctactggtcaaggcactcgtggccttgaccgcccaggacgagcccaccctgcggcgcaaactcgccgagaatacggcccaactgcctcagccgaccgagttcggtgtgaacgcggtgccggccgaggtgcttgcacaacgccctgacattcatgcggccgcgcggaacgtcgtcgccgccatcgccgattcgacgcaagcgcacgcgcaacgctggccccgcatcacgctggccggcagcattggctccacgcgcgtctccagtctcggcgtcagcaccgatggaacggtctggagcgtcggccccatcgccatcacgtttccgctgttcgacgggggcatacgacgagccaacgcacaggcggcaaaagtccgctatgaatccgccaccacggcctatgcggcgcggctgcgcgcggccatccaggaggtggaaagcgtgctggtcacgctggagagcacgacgcagcgtagcgagagcgccagcgttgccgtggacgggttcgaacgctcgtaccgggctacggcaacgagttatgacgtgggttcggccagcctgttcgatctggaagatgcacgccgcagcttgatttccgcgcagagcaccttgattgacctgcgccgcgagcgcctgctggcgtgggtttccctgtatcgcgcgatggggggcggctgggcaccccaggcgggcgagcatctgaccggccgtcttacgccggctgccgcatccatgccgggcagcccacccagctccggcgaatccgctgggtcgcagcatgcgaggcgatga

SEQ ID NO: 515000 - DNA, 1383 bp, Stenotrophomonas maltophilia
atgcgctccgtgaagatgattcggctgaatagccttagtcttaaggtattgctggcctttttggccggaacagtacttagcatcgcgctgctcgtgatcggggcgatagtgacgcttcaaggcgatacgctggcccgaatggacttggcgggtctcgcagaggacatggcggcaaagatcagctttgacgaaaatggcaggcccgttgggctgaattcagacgaagacgatttggcgtgggtgtaccagagcatgggaggtgagaccgcatatcgcgtcctggacgaagctggaaacgtggctctcctgtcaagttcgggagagatgttctcggcagttggcgagggcgctcttcagttaccacgtgggcgcttcgaattcgagcacgatggcgtcaccatgcacggtgccaccgaaccgattgaacacggtgggagaacctggtatttccaagtcgcagtaagcacgaggctgatgacccttctccaccgagttgcattgccgcttgtcggtaccggaatagtggttttcagtctcgtgctccttttcgcctttggcctgtgtgcttacatcacattgcgttacaccctcaagccactgcgggatgtatcagattccgctgcttccatatctccacattccattcatgcccgcctgaatactgaagcggttcctttagagattgcccctctggtcgacagcttcaatcgagttttggaacgtctcgaaaagggctatcgcgtgcagaaagagtttcttgctactgcagcgcatgagttgaagacgcccctggcgctgattcgttcgcagattgagttggcagaggttggcacgcatgaccgtgacgcgctgttgagcgatgtcgagtacatgacacgtcaggtgcatcagcttctgcttctggctgaagccagcgaggttcaaaactatgactttgaaatcgtccaggtacaagaagttgccgaggaggttgcctcctatttgcagcgcatggcggaagcggccagcgtgcgcttgacggtatccgcgacagccgaaaacgtggaatggagggccgatcgtggagccttgttcacgctattgaagaatctgttggagaacgccatccagcacgcgcccgcgaagaccacagtcgaggttgaggtccaaggcgatgagatatcggtgcgagattggggggcgggccatgatgctgctcagttcccgctgttgttcaagcgattctggcgtgcggcgcatcgacgtgaccacggagcaggactaggtttgtccatttgccaagaagtcgcgttggcgcatggatggagtctgacagtcgagcgggctgaaccagggctgcggttcaggctgacgaatgcccagggaagccgtgtatcacgatag

SEQ ID NO: 515001 - DNA, 600 bp, Stenotrophomonas maltophilia
atgacgacccaatccaacaccacatgcacgcccgatgccgcgccgcagcctcgctcgcgccgacgcgctcgcctcgtgctggcgggctgtgccgccgtcggcctcgctgcgctggcctgggcggcgttcgtgcagccgctgccgcgcctgatctacaacccgtccgacagcgtggcggtcggctggtatcgcgttgatccgatccagcgccggctcggctcgctgccacgtccgttgtccgtgggcagcatcgtgctggtgccgctgcccgacagggccgccatgctggctgcgcagcgcggctacctgccgacccgcgtgccgctgctcaaacgtgtgggcgcggtcgcgccgcaacacgtttgcatcgtcgccgggcaggtacgcatcgacggtgtgccggtggctaccgcgctgcctgccgaccggctgggccgcctgctgccatccttgcagctttgccgccgcctcgaaccgggcgagctgttcctgttgagcgtaagcaatctggcgtcgttcgacagccgctatttcggcccggtcagcgcatccgccgtgatcggcgtcgcgcatccggtctggctggagacacgcccatga

SEQ ID NO: 515002 - DNA, 294 bp, Stenotrophomonas maltophilia
gtggcagcgaaacactcattggcgacggcaatacggacggtcaggaaagcgcgcggcttgagccaggaagcgttctccgacgtgtccagccgtacctacatgagttcgctggagcgcgacttgaaaagcccgaccatgcaaaagctgaccgagctgtgcgaggtcatgaacgtgcatccgctcacgctgctgaccctggcctacgcgggcgatagcccgcacaaggtcgacgaactactcgcgcaggtgcgccgcgaactggggacgatgacaaagaaaagcgacgtgcaataa

SEQ ID NO: 515003 - DNA, 501 bp, Stenotrophomonas maltophilia
atggcataccgaaataagacctacatcgcctttgacggtgacaatgacatgcactactaccgtctcatgacggcatggaaggcaaacgacgggttttcgctcaactttcataacgcccatgacctgaacacggcgcgggattccagccaggaagagagcatcaagcgtcaactccgcgagcgcttcgccaattccaagctgctcgtggtgctcatcggggccaacaccaagtacctgacgaagtttgtcaagtgggagatggaggtggctttgcgcctcgggttgcccatcatcggcgtgaacttgaacggaagccggcagatggatgaccgctgcccgcccactatccgagatcaactcgtggtctacacctcgttcaaccacaacatcattgaacacgcgatggaccactggcccgccgagtttcattcgttgcgcagcgctggtaccaccggcggtcgttactacaacgatgacgtgtacaggcggttcggcctgtga

SEQ ID NO: 515004 - DNA, 879 bp, Stenotrophomonas maltophilia
gtgaggtacttcttcgagtcaattaggacgcgggcttactggcgctacgcgctgttttcgggggaggccattggcaagttcttcgccgtcatgggcatcttgtacctgtgcgttgacttggcagacgcctttaacatctacaagaaggaccagtacagttattacggactgatcatcttggtcgtgcttgcactgctgtacgtgctgtccacgcgacggccgctctcgcgtatcagctacaagattccgcagaaggacttcgccgtagaagttttgatcggcgacctcttcaagattcccggtgaggtcatcatcagcaccagctcgacctttgacaccgacatgtcgtcaggactgatcgctgcgtcgagcttgcaaggtcagttggcgacgaactacttcaacggccagaccaccgagattgatcggcagatcgacgtttcgcttgaaagagagcagttcaccatcaatgagaaaaggccgggcaagaagaaggaatacccaatcggcactgttgcccgtgtgagcgcgcacaacaaaaacttctatctcgtggcgatgtcgcacatggaagagaacaagaacgcccgatccgacttgaagatgatcgacgaggcgcttgagaagctatgggtgaacctggcggccaaggccgaggtgggcgacatcgtaatgccgttgatgggcacggggcgcggacgggttccctatcccagaaagaagatgatcgagcgcattgctcaatccttcgcagacgctgcgagtgaacgggcattctccaacaaactcatcatcgttgtacgtcccgaagatgcctcgatgttctcgttaaatctgtttcaagttcgggattacttgggacagagccttcacacctag

SEQ ID NO: 515005 - DNA, 1119 bp, Stenotrophomonas maltophilia
atgcctttaactgcatattccatctcggaacagaaggaacttgatgttgagcaagtactgcgagtgctagctcgaaagaacgggaatcaagaccgtaatgcaatcgatcagatagcggagtcgtggcgagaaatcttgcgtactgatctcgaatgcccgtgctgctttgtgacaggcgcggatgtcgtcaaggaagcgatctctaaaacctcgaaaaaagcaatacgacaggcgtgctttcgttttgtatcgccaggccatcgcccacagtgcgactatgcctcaaacgagtcagcaggcttcacacccgaaaatttgattgaattcggagctaccaactcgaatttgacgaaggctgtccgcgaactcgtttgcagctcaatacacatgggcgtgctcaaccagaagacgatccgcgatatgcgcgagtggttttttgaggagaaggtcaagacgtcatttcaggtaacacttaacccccaagtacctaaatggcttgacacgctatggcgcgtagccagcccctcgctgggcccactgccgcaaggagtccccctcacgcgcgaaatagcggcgattcccggtttcgattggtcaatagagtcagcccgcgcccttggggagcgttataaaacaaccctagatattcttcgcgagaagcgcctatggctacaccaggtagttgatcgtatcgagtcgctgacgaagcgctatcacggtgaaaccgtgtttgatccgacgatccttcaacccaaatacgagcaaagccttgcccttgcgcgatttatttccgagaactacggcccgatcaaaaaggccaacagaagtaggtatggggatgtggcaacctctgtgctggcgctagcggcacttcttctgttcgtgaacaactggaatctcggtcaagcaaccgccaccttcgctcgcatttcggcttcagtgggtcaggccgatcaaagtcttggtaatgtgatgggcctcaatccgttccatgactacgaagcgtggagcaaactcaggcagatccaagatttggggatcacgctacccgcgactactgatctgcaagcagaacgacagcaaatcgaagcggatctgagggcgcgctttcaaaaatag

SEQ ID NO: 515006 - DNA, 1428 bp, Stenotrophomonas maltophilia
atgagctatacggactggcgagcctatcaagaggcgacagcagaagtatttcgacggctagggtgtaatgcgcaggttgactttcgcgtcgccggcgctcgtgcaacgcatgacatcgacgtctacgcgacctttttacgatcaggcattctttgtacttgggtgattgagtgcaaattatggaagactcgcgttaccaaggaaaaggtgctcgcactcaagagcctcatcgatgatcttggtgccgaccggggaatcattgtcagcgaggtgggctttcaacctggcgcacaagatgcggcgcgagggacaaatattacgcttgtgacgtcattggaagagttcgccagcactgcgctggctgcaacatcagagattccacttacacgacacagcggcgaggatggtgagtccatctaccagtttccgagccgagctgagccgcatgatctgctcttgtataacgacgttatcattactgcaaactggtttggatgcagtatctccgttatcaaccccatttccaaggcgatcatccgcaacatcgacctagataagtatgaagtggtctccccgcagaatgggactagagaaattcgcagtcatccgcccggcagcttggctattgcagacggacgtttgttcgtcggtcaggtgttctcggacgttatattggttattgaccttgctacgcatgccatcgtcaagaggatagcgataccaggtggaggcgacggccaactggcggtgtcgcatgatgagaaggaagtctattttgcgagcaaccgtgtcaaccagttctatgtcatcgacagcgccacatacgccgtcgcggtagtgccatatcccgaaggtgggcgaggttgcatgtcgctgctgcggcatccaacccggccgcttctctacattggtgttcagcgtggtggtcgcatcaatgggcagcgttatccgcacgctaactcatatttggcgatctacgatctaagccgtcaggcttatgtggctgacgctcagctcgccgaagtgaacaacggtcgtgcagacgatgccactccagcgtgtttgacctacgacgaagttcacaaccgcatatatgtcggcatgttccagtcccaccggggtatctgcgtgctggaagcggaatctggaaggccggttgaggatattagatttgagtccaattcgtggagcaaaccattttcatgggtggaccccctatcgcaagcactcaccgcaagctcgctgctgtctgtcaatcgcaacaatcgtgaacttgtagtgcttgatcgcgcgtcgctccatctcaaagaagtaatatttcttggtgatgccccgaatggtcctagggcagtattggtgtggcgcgaccaagcagttgttagctatccaggacgaaatggattgatctttgtcccgcttgaggtctaa

SEQ ID NO: 515007 - DNA, 384 bp, Stenotrophomonas maltophilia
atggagaataacccgacaggaaacataggccgagtcaacggtaccgaggtgcgctcgccgtccgccctccccctgcccggctcgatcgcctatggcgatctcccccagttcccgaagcacggcgtgctgccatttcggcgcaccatccgccgtcatgagttgcgccagatcgtccccttagctgaaacgacgatctacgaaatggagcgccgcggtgaattcccccggcgcttcaatctgacaccgcgctgcgtggtgtgggacctgaccgaggtggaggcctggatcgaggagcgcaagcaagcccctcgcatcagcgccgccaagccggatgtctacctgcgaaaaactcgccctgttcgggcgggttcgagcgaagaatga

SEQ ID NO: 515008 - DNA, 525 bp, Stenotrophomonas maltophilia
atggaatacacctttaccttgaagtaccagctttccgacgacgaccgcgagccggacgtgctggtcgagcggctgggtgaagccggctgcgacgatgccttggtcggcatcggccagccgggacggctggcgctggagttcacccgcgaggcggtcggagcggaggctgcagtgcgtagtgcgttggctgccgtgcgcagtgctataccggcggccaagctgatcgaagtcgcacccgatctggtcgggctgaccgacgtggccgacatcgtgggtgtttcccggcagaacatgcgcaagctcatgttggcgcatccgggcagctttcctgcgccggtgcacgagggtaatgcgtcgatttggcacctggccgacgtcctgtcctggttgcaggccaagggcaactattcgctggccaaggatgtgctggacgtggcgcgggtggccctacaggtcaacgtggcgaaggagagtcagcggttgccacgatcggcgtccaaggaactgcaggcactggtcggatga

SEQ ID NO: 515009 - DNA, 4926 bp, Stenotrophomonas maltophilia
atgaccacgccactgcagggactgctggaatcactgcgccagtcttcccagaccgagcgcgagaaaggaacctacttcgaagagctgatcgtggcctacctgcgccatgaagccagctaccgcgacctttacagcaatgtctggccgtgggcgcaatgggctttggccaatggcttcagcggcaaggacgatggcatcgacctggtggccgaagtggcaggcacaggcgaaatccacgccatccagtgcaagttctacgcgccggactacaagctgcagaagaaggacatcgacagctttttcaccgcgtccgggcgcaagccgttcgcccgccgcatcatcgtggccaccaccgaccactggagcgacaacgccgaaaatgcgctggtggaccagcaaccgccggtcagcaagatcaccctgcgcgacctggaagccagccagattgactggagccgctttcagcccagcgcccccgtggtgctgaagcagaagaaggcgttgcgcccccatcaggaaaatgcgctcaaggccacgatggtcggtctggccgaagctgatcgcggcaagctgatcatggcctgtggcaccggcaagaccttcaccagcctcaaaatcgccgaagcgatggccggcaacggcaaacgcgtactgttcctggtgcccagcctgtccctgctatcgcaaaccctgaccgaatggacgcaggaaagcgccatcccgctgcacagcttcgcggtgtgttctgacagcgacgtgggcaaaaagaaaggccgcaaggacgatgatgctgtccagaccttcgcccatgaactgcgctaccccgccaccaccgatgccaagcggttggcgcaaggggtagcggcccgccatgacgccgagcacatgacagtggtgttcagcacctatcattccatcgaagtgctgcacgacgcccagcacgcgcacggcctggacgatttcgacctgatcgtctgcgacgaggcccaccgtactaccggtgccaccttcgagggggacgatgaaagcgccttcgtccgcgtgcacgatgccgcctacctgcgcgcggccaaacgtctgtacatgaccgccaccccgcgcatctacggcaacgaggccaaggccatcgccgagcgtgacaacgccaccctttattcgatggacaacgaagactggtatggcaaacagttgtttgtcatcaccttctccgaggcggtcaagcgcggtttgttggtggactacaaggtcatcgtgctggcggtggaggaagctcacgtcaaccgccgcctgcaggcactgctgaaggacgagaacaacacactgaaggtagacgacgcagccaagatcgtcggctgctggaaggccttggccaagctgggcttgcacgaagatggtagcgacactcccgaaccgatgaagcgtgcggtggcgttttgccaggtcatcgagccagtcaagggcagcaagacccataaggtcagctccaaggagatcgccgacatgttccaggctgtggtcgaggcctatcaagatgccgaggacattgaagacggcgcccgcctgacctgcgaggccaagcatgttgacggcggcatgaatgctggcgagaaggaggccaaactcgattggctcaaggcaccgacgccggaggatacctgccgcatcctctccaacgtgcgctgcctgtccgaaggcgtggacgtgccggcactggacgcggtgctattcctcactccgcgcaactcgcaggtggacgtggtgcagtccgtgggcagggtgatgcgtaacgcacctgggaaaaagcgcggctatgtggtgctgccggtggtgatcccggccggtgtggagccgcacgaggcgctcaacgacaacaagacctatgccgtggtctggcaggtgctgcaagcgctgcgctcccacgatgaccgcttcgatgcgatggtcaacaagctggatctggtcggcccggaccgcagcaagatggaagtggtggccattgccgataccgtgcagcgcaagaccgcgcggctggtggacagtagtgccaaggcggccaaggccaagggccagtacgccatcggcgagaaggccgagcgctatggtccggccccggaccagatcggtttcgagttcgaggtcggccagatcgagcgagcgctgtacgccaaggtggtggagaagtgcggcaaccgccaccactgggaggactgggccaacgacatcgccaagatcgcccagacccatatcgaccgcatcaaggcggtgctggaggacgccaaccagcccaaagcgcgcgaggccttcgacgcctttgcccatgagctgcgcgatgacctcaacgacaaggtcagtgatggcgaaatcatcgagatgcttgcccagcatctgatcaccaagccggtgttcgatgcgctgtttgccgattacagctttgccagccacaaccccatgtccaaggccatgcaggccgtgctggatgtgttgcacgaacagaatctcggcaaggaggccgacaccctgcaggcgttctacgacagcgtgaagctgcgcgccgagggcatcgacagcgcgcagggcaagcagaagatcatcgtcgagctttacgacaagttcttccgcaacgccttcccgaagatgaccgagcggctgggcatcgtctacacgccggtggaggtggtggatttcatcctgcacagtgtcaaccacctgctgcagaaagaattcgggcaaacgctgggcagcaagggcgtgcatatcctggacccgttcaccggcaccggaaccttcatcacccggctgctgcaatccggcctgatcaagccgggagagcttgcacacaagtacaagcacgaaatccacgccaacgaaattgtgttgctggcctactatattgccgcgatcaatatcgaagccacttatcacgggctgatcgggggcgattacgtgccgttcgagggaatcctgctgaccgataccttccagatgtacgagaaggacgatttagttgatgcactactggtggacaacagcgcgcggcgcaaacggcagaagaagctggatatccgggtgattgtgggcaacccgccgtattccgtcggccagcgaagcgagaatgacaataacgacaacgtcgagtacccggtactggatgcgcgcatccgttccacttacgcagcacgctccgaagccactttggcaaaggggctgtacgacagctatgtccgtgccatccgatgggccagcgatcgaattggggatgccggcataattggttatgtcagcaatagcggcttcttagaaaaagctgcgatggatggcgtccgaaaatgcctgactgcggaattctctagcttgcatgttctcaaccttcggggagatattcgcaagaacatgctgagcaaggggcgggccatggaagggcagaacatcttcggcagcggcagtatggccggaatagccatatcactattgataaagaatccgcaggccggccaacacggccagatctacttccacgacattggcgacaacctgagccgcagtgaaaagctcgacaagctcgccagttgcgtaagcgtagctggcatcccggagtggcaatccatcactcccgatgtccacggcgactggttgaagcagcgggacgacagcttcagacggttcattgtcctaggggacaaaaaaggtgacgctccaaaattgtttcacaatttctcgcaaggtgtattgaccgcgcgtgatgcgtgggcctacaacgcaagtagcgataagctgaaagtcagcatggctgccatggttgacttctacaacgccgaattggcgcgcttcaacgcgacccacccggggttggaagccaaggcgcggcaggaacgggtagacggcttcattgactctaatccagcgagtattagttggacgcgagccttgaagcaggatctcggcaagaatcgcagttatgcgtttgaaccggactgcataatgacttgcttgtaccgtccattcacgaagcgatggctctatttcaaccgccgattcaacgaaatggtgtatcagattccacgcatcttcccttccgcaatggcagataacttggtgatttgtgtatcaggcagtggcgcgcgaagtggtttctcattatgcatttccaatcgcgctgtcgatttccaaacgatcgataatgggcaagtgttcccactctatctgtacgacgaggccgcgcaggaagccgatgctggtctgttctcagatcagccaactaacggcccgcgtcgtcgtgacgccattactgatgctggactgtcgcatttcaccagcgcctatccgggcgaaacgatcagcaaggaagacctcttctatttcatctacggcatcctgcattcgcctgactaccgcgaacgctatgccgacaacctgagcaaggagctgccgcgcattccgcgtgtgcgcaccgccgccgacttctggcatttcagcaaggccggccgcgatctggccgcgctgcacctgaattacgagacggtggacaagtacccgctgaccatcgacagcaaggggtcactgaccgacgcagactaccgcgtcgagaagatgaaattcgctaagaagaaggacccggacaccggcaagtcggtcaatgaccgcagcatcgtgatctacaacagcaagatcaccctgcgcggcattcccgaagcggcgtggggatacgtggtcaacggcaaggctgcattggactgggtgatggagcgccaggccgtgcgcgtggacaaggccagcggaatcgttaatgacgccaacgactgggccaccgagaccatgggcaatgcgaagtacccgctagagctgtttcagcgcgtggtcaccgtcagcctggaaactcagaggatcgtcgcttccctgccaatcctggatatccatccagagggatga

SEQ ID NO: 515010 - DNA, 426 bp, Stenotrophomonas maltophilia
atgtcacaaaaaaaggaagactcgggcgcacttaagattgatttttatgtgacacctgaggaatacgaggacattgccattaagcaaaaggagcatgtgagagccatcgctgacaaggttttaatcgatggccccttggacctatctccaagtgatcggcgctgcattgctgcgattctcaggttctgggctgacgaactatcgacaaaaagaaaggggaagcagggccaccccccgcgcttttgtcatggcagtgcagcgttggaatacgccatggagcgctgggagggccatcgacatggcgaagcattggagcgaatggctgaacgatacgaggtgtcaacagtctcgattaacaatgcgataaagccctatcgtgcagcggccttcgcgatgattggagagactgaccccggcaaccaataa

SEQ ID NO: 515011 - DNA, 378 bp, Stenotrophomonas maltophilia
atgatccagaaacgacgaagccccggcgggaaccggggccatgcacacgctggcaggctgggtgcacggcaagtttacggtaagaatggcctgaacagcacgcgcctgcctgaaaactggcgggagcggctgcctgatcccagaagttactaccgcaaacgtgttgccaaattgggcaaggcacaaggcgatggctgggcgcaggggcagtgccccttccaccaagatcgcaatgcctccctgactgtgaatctgtcacacggcggttggatgtgctttgccggctgcgattcgggcgatctggtgagtttccatatgcgcctgaccggtcttccgttcaaggttgccgtgcgcgcgctgctggggcttcggtcatga

SEQ ID NO: 515012 - DNA, 2079 bp, Stenotrophomonas maltophilia
atggagacaccccagactgctgcgcgtcggctggccaccagtgcaattcgccagggcatgcgacctgacggtttacatatctacacgcaacccaatggtgagccgatgttctggcgcatccgttgcaagcatcctgaaacgggcgaaaagtggattcggccgatgcactggactggcaacgggtatgccatcggagagcccccggctccggccacgggaaagctgctgtatcgcctgcatgagttggaaggtgcagccgatggctcgatggtgtacgtggtcgagggcgaagcctgcgccgatgccctggccgagctgggcctgctggccacgaccagtggcggcgcatcaagtgctgacggtgccgattggtcgccgctggcggggcgatgtgtccgcctgtggcccgaccgcgacgaacaaggcaccaagtacgctgccgacgtggaagaccgcctgcgcgcgctgggtagcattgtcgagcgcctcaacgtggatgccctggggcttcccgccaagggcgattgcgtggattggttggcggtgcacccaggtgctgatgcggtcgcggtgaatgccttgccactggcagatgcagcgcgcgcggccagtcatgcggagcaacccaccccggagccgctacccgatccgctgccagcagtcccggtattcaatccggccctgctacccgactgcgtgcgcacctggtgcaccgacgcggccgacagcctgcaagtgccgctggactttacggcagtaccggcgatggtgggcctggctgcagcgctgggtgggcggcaacttgctgtgcggctcaaaacccatgggcattggtacgaaaggcccatcctgtggggttgtgtggtcgggcggccgagtagcggcaaaagccccgctttgtcgccagcgcgccgcctgctggagagcgtcgtcggcccagagcgcgaagaatacgaaagggctcgcaaggtgcacgagggcaaggcgatcctggctgatgcacgcaaagcgcacgctaaggatgaggcccgtaaggccatcaaaaaagggatacccatcgaccccgaggccttgggcgaatccgcccgtttcgatcatgacgcgcccacagaaccccgcctggtggtcaacgatgcaacggtggaaaagctgggcgaattgttgaacgagaatccgcgtgggctgattcagttccgcgatgagctggccgggtggctggcatccctggaccgggagggacgcgagcaggaccgcgcgttctggctggagtgctggaatggcactggcccgtatacgtgtgaccgcattggccggggaactgttcgcattgaggcgtgtgcggtgtcgatcctgggcggcatgcagccgggcaagctggccgagtacgtacgcggcgcggtgcgcggtggattttccgacgatggcctgatgcaacgtttccagttagctgtttatcctgacctgccggcatcctggcgctacaccgacaggccgctggaccgggaagctgaggaacgcgcccgtgctgcgttcaaccggcttcgcgcgctgatccctgcggacgtgggggcagagaccaccgaggcctgcgacgtgccattcctgcacctgtccgaggatgcccaagcgctgttcgttgaatggcagaccgagctgatgcaacggctgcgcgctggcagcgagccgcccttcatggaatcgcacctggccaagtatcccgccctggcgggccggctggcactggtgctgcatctggccgacaacggcaccgggccagtctccgccgatgccgtgctcaaggctttgggctggtgcgagcatctggaaagacatgcgcgccgcatctatgcccctgccaccgataacggactgaccgccgcccacctactattgcgcaaacgtgacagcctcgccgatgggttcagcgcccgcgacgtgtatcgcaagtgctgggccggcttgaatgatccggacaccgtgaccgaggcgctggcggtgctgtccgaccactaccatgtgatcgaggtggccgagacaaccggcggccgcccgttcacatcctaccggtgggtggcatga

SEQ ID NO: 515013 - DNA, 1449 bp, Stenotrophomonas maltophilia
atgaccgcattagttatcggcaacgctgcctacgacggcgacggaaagcttgccaacccggtgaacgacgccaccgacatcgccaagaagctcggcgattacggcttcgacgttgaaacggtcaccgacgccaactataaggacatggacaaagccctgacgagatttagggcagctctcgccaccagcgaagtcggcctgttcttcttcgccggccatggcatgcagatcgatggagtgaattacctgctggccatcgatacgccgatggacgacgagaccgatgccaaacacggatctctgtctctagacaaagtgatcgagacgctggagaggtccaaagtcgccaccaagatcatcatgctggacgcgtgccgcaacaatccttggaaacgcgagtggcagcggtccgcctccactcttggcttggcccccgtgtatgcgccaagaggaaccatcatcgggttcgcaacgtcccccggccagtatgcgctagatggcaagggtcgcaatggaacctacaccggagccatcctccagcacatcgatgaggctgactgcttgatcgagaccatgttcaagcaagtccgcaatacggtgtcggcggagagtaagggaaaacagattacttgggagcacacctcgctgtcaggcaatttcgccttcaaccagagcctgagcaagctcatcaccgattacggtcccgaagcgttggccgatgcacttttcgtgatcgatcctgccaagaagtctcacaaggttatcgccggccttaagagccacaactggtactcgcagaacgacgcattggcgctgataactgcaggatctttgaccaaggcgtcgaacgacaacctgtttgtaatgggacgaaacatctatcaagcagcatgcggcggctctcgcgcagccgaggccttcattagcaacttcattgatagaacagcccatttccctgcagagaagcgcaaggccatcttggacggcatgttgttcgaggtgttcttcgaccccgatggtcaacctcggactgcgatcaaggccaaccatttcagcgaagtttttgccttgaaaaagcacaagaacttgcaatcgagttttgatttcatcggatcagcactggctgcctccaacgctaaactctacgcgatcccaggcggtccgcttgatgtttctgtaacgatcactgcaaaagctatcgcaaacggcttccgtattgaaggagtctacgtcgatggcgtgaacatactcaggctggaggatgaagcagaagcgtcggacgacgaggggaacccaatttacgtacgaacttctgtcagccagtttgaaaaaacgttgtctgcccaaatgaagctcccgccctctcaactgaaattgacctattcgccgccggaagcagacgaagcaggttcgctcagagtgcgggcgggctttacagttagcaagtag

SEQ ID NO: 515014 - DNA, 624 bp, Stenotrophomonas maltophilia
atgccggccaatctattccagcaaaccccgttggacgggacgttcggtgacctagtggtcggcgcggactggtgtctggccttggagttcaagcgagaggaagggaccatcgactcggagaaagagaaatggagcaaggaagcgctccaggcctttgagagcgacacgctgctgaaagtcgcctcccgcagggcccacatgctgtgtttcagccggcccacctccgatggaatcggtctgttcgctatgacctacgcatcggcgttggcactgggcacgtccacgactgagattgactgccattggctgatccagggtctcgtgcggctggtcggcgaccaatctccagaaggcaagaagaagattggcctgccgccggatgaacttgaggcgtacctgcgcaagctcgcctcttatcgcaagcagggcggaggcggcaaggatgcaacctggctggccgtggccaaaagcggtgatagcctcaagatccggacgagctcttcgcttgagcaacttctcgaagctcttcaagaacgtgtccgatctcctgctcagcagcaagatcacagtttctggcgcggaccaacgcttggaagtcgagacgatgacgagcacgaacggtga

SEQ ID NO: 515015 - DNA, 270 bp, Stenotrophomonas maltophilia
atgaaacagattcacaaacctggaaacgcagtagcggcagcagcagccatcaaacaattgagcgcaacctgcttcaggcaggacaccgtactggttgaatgcaaggacgcctcagagcatcaaacgcttctcgcgcttgccctgcaagccttgcagaacgggcatgtccgcgagattacggaccaccagaagtccggatgccttgacatccgcattgagttccgtcgacctcccattccaatggaggacgtgacgctgcgcaacgcatga

SEQ ID NO: 515016 - DNA, 552 bp, Stenotrophomonas maltophilia
atgacgtcatcaaaggcattccagacgttcaatcacatcatccaggatgcggtcgacctactggggcattttgatgccatcaatgctcagccccctccggagaacgcagaagtacttaagcgtgcgagcctggtgatggcactggccgcattggagacctacatcgaggaccggatcaccgaggcggtgggccaagtcgtgggcaaagatggcacccacggtcggcttagaaccttttatctgagctctttagagaacgacctgaaatactttcacaccccgacctcggacagagtcgccaagatcttcgaaaagtaccttcaaatcgatgtctgtgctggctggtcgtggaacaactatgatcctgccagggcaaaggcccagctcaacctgatcgcaaaaaagcgtggtgacattgcccatcgatcactcaggcctgctgcaggccagccgaaggcccatgccgtgaatcgcgaggacctgcgaaagcacattcgcttcatctgcgatctcgttgcggcaaccgacagctacctcgacgcgaaattgtga

SEQ ID NO: 515017 - DNA, 387 bp, Stenotrophomonas maltophilia
atgtccgatccggcagtccccaacgacctccacggacctgctatacgcgcattcttcaacctggctgcggcttggcagttgacagagcaggaacggtactcgcttcttggcgagcccgatacgaccgattacgaaacttggcgacttgggttgccagagcgggtaacgccggaagtggtctatcgagtgagctacatgctgggcatctacagggcactccatacaatttttccagacgccggccaagcagacggctggctgaagcgccccaataaggacaagatgtttggagggcgaagcgcgcttgacgtcatgatcgccgatggcccagctggaatgatgcgggtccgtgattacctagacaccgcagcagaagcacagggttag

SEQ ID NO: 515018 - DNA, 240 bp, Stenotrophomonas maltophilia
atgcaggaaaaactgaagcttgcgcacggtgagactgtggctttcgtgagttcgagatcacgaggcttcgccggcgaggaagacgtctcggactacaacgttctagacgccgatgggaaggtggtgggaactgtggtgttcaccgagcacaccgcggtgagagggtttcgcgtgaccaacacggtgatacagaaggatgtccagggaaacgtgttggtatccgagacttggaacccatag

SEQ ID NO: 515019 - DNA, 801 bp, Stenotrophomonas maltophilia
atgatcgagctggctcgaaacgccttgcgaatcggcggacgacgcaatgtgattccacagccgcttaagggcccttacgtcgtccctggtcccatcggggaatctacgatcaagctggacatcgacttcaagcctcgcgtcacgcctcaggtcgaagacgtggtgattaccgaggatggagcaatctcgataaccatggtcattgattcgcaggaccgcgataagattccaggtatcgtccggtcaaagttcgagcgattcttcaagtccgagcgtgggatgaccctggcatggagcgagaaagagcaagagcacgcgatcacctcaaccatcgacaagtacatgcgggcgcctgacaacgaaacccccgtgggggtcttgactggtcaaatgacgatggacctgggcacgctgttccttgaggccgcaaaggcggcgtttgagatggcagcgatcgaggatggcgaagcatttgtcgattcccccgaggctgcaaacttccgagaacttcttgcgcgagtgataaagggaaggatcgaggatcttttcgggttcgtggacatgcttaaggcattccgagctactccactgcccgccgattcgcaggtcgcgctcgggatccagtggctcaccgatggcaaggcgattgagcaccatgtcgcgatattgaatggacgccatgtggtgatctcaatgtttggcgacggctacatcttctccaaccttcgtcccgcttcgggtcagagagccatctacgtgaacaacgcggtcaccggaagtatccgctgcatacgagactga

SEQ ID NO: 515020 - DNA, 1314 bp, Stenotrophomonas maltophilia
atggagttggctcctcagtccgcccagagtcaccccgacctgtgcgtctccttcgatgaatggacccgcggaaggaagatccagtccattggatccaacgccggggccgagcggcttccctttcaggggtggcaccacttcaaagaggccttcgcgcccgaagtgattgcccgggccgtcaatgaaagtcagcgtgaagtgcgctcgtgcctggacccgttcggcggatcgggcaccaccgctctggcgtgccagttcctgggcgtggaaccgaccaccattgaggtcaacccctacctggccgacctcattgaggccaagctctccagttacgatgctgacgatctggcgctggatctctcacgagtggttcggacgaccaatgcacgtcgccggggctccctttcccgctttaaacacctgccacctacgttcatcgagtcggccgaccaggaacgctgggtcttcaaccgtaacgtggctgaacgcatcgcctgccatatggacgccatcgatgagctggcacgccctgcccacaggcggctcttcaaggccatgctgggcggcatgctgatctccgtgagcaatgtcctgatcaatggcaagggacggcgctaccgcagcaactggcaggacagggaagtctatccccgctcggtcgatcagctcttcgaggagcggtcacgtcaagctatcgacgagattcacgcccatcgcatgcgccgccatcgcggcttcaacgttctgcgcggcaattgcatcgatcagctcgccaacagctcgaaagtggacctctcggtcttctcgccgccctacccgaactccttcgattacaccgacgtgtacaacgtcgagctctggatgctaggtcacctgggtggatgggatgccaaccgcgatctgcggatgtccacgctctgctcccacgtccagatcaagcgtcagtttgcccccgcccccaagggctctcaccgcttgaacctggtcatgggccagctgcggagggtgaagggagaactgtggtcaccgtggattccggagatggtgggcggctacttccacgacatgaatcaggtcatggccggcttgcacggacgcctcaatgagcacggcgagatctgggccgtggtgggcgacagccgctatgccggcgtccgcatccaggtggccaacatcctggcagacctcgctgcgcccttggggtttgatgtcgtcaaggtcgagccattccgatcaatgcgggcatcggcgcagcagggtggccagcgagagctcgacgaaacactgcttgtgcttcgcaagaactctcgctga

SEQ ID NO: 515021 - DNA, 1056 bp, Stenotrophomonas maltophilia
atggtcgctaatgcaggtgggttgtgggcggccgatttgttgaaggagaccgtcagttcctacgtcggctctggctacaaccaggatgtcccaccatttcgacagttctgccacgcagctgccaagatcatccagcgccgtagggccaagagcaccaacacgctgtctgatgggccggtgatctttgtctttgaggcctcgccgactgtctccggcgtttcgttagaggtgcgcccgcgctttgactgcggggaggcaagtatcgaaggccgggtctggatgggggcgtcccgcttgggtagggcgaccggcattgcgttgccagatggtggggatgctgatcgcttcaactacgtcatcgagaagctcggcatgggctcaaggcctgccatttactatgacgccagccaggacgacagcgtaatgcgtgcctatccgcacggtttggctgatccggataccttcgatgacctctcgctcaatgcatcagagctttcgttggagcacatcaagaagatgctggatggggcgcacagcaggctgctgatcaccccgacagcgtcagacctggctcgtgatctctgggaggataaaggtaagagcatcccgattggtttggcagagaagggcgttcaaaagattctccacgcggtcctttcctcgagcctggggttcgggtctatcgttgtaaggcaggagggaacctccgagatggggaggtacgacttcttccttgaggaacaggatcctgtccatccctccgtgtggactcaccacgcggttcttgagttgaaggtcctcaagagctttaccgagagcggcaatccggtacctgccgcaagcaacgtcgatgcagtgaccgatggtctcgatcaggcagacaagtaccgtaaagaccattcttgccgaatggcagcgctgtgttgctatgacatgcgcaaagcgcctgatgtctcaggcgctattgcgcacgagctggatcgggccaaagcactggacgtggcaatttgggcctggccgctttactcaacggcacagcaagctcgccgtgcctga

SEQ ID NO: 515022 - DNA, 654 bp, Stenotrophomonas maltophilia
atgagccgcccaaacgtgaaggttgcccggccactgcgtcgtcagaccgttctgattgggctgtttgacgcgttggagcggtccggagtgcggcccgtcgaatccaagcagctgcataccctatggtatctgaccaacgcactggcaccggcctggggtcttcctccctttgactcggcactgctcaagaccgaccagcagccgtactttcccagtgttcaaagtgacattgatgcgctggtgggcatgggcatgctggtagtggtggatctgacgccggtgaacgacggcgggcgcctgcaaggccgctttgccctcaatcgggactttgctgaccgggtgctacaggtcatggagaccgtcaaggaggatgccgaactgctgaacttcctggacgatgtcgtgcaagctgctaatcgactcacggatctggagcagcagattgcgctgtctcaggatgcaacctatggcgatcctggcatcgatgccggcaatgtgatcgacctgggccagtggctcagccgcgatgccaccacgcccaccgagttcatcttgaaccggctgaagtcagtggcagggcgcgaccttcgacccgccgagctcatggagctctacgttgatcatctgggttggaggctgcgcaatggtcgctaa

SEQ ID NO: 515023 - DNA, 2004 bp, Stenotrophomonas maltophilia
atgcataacgctatccatttcccaatcgtccagcacctgtctgtgaacgactatgggctttatcccggtacgcgttccaagcctggcctggagctcagcttcagtccaggactaacgctggtagtgggtaccaacggtctgggcaaaactacgttggcgactttgctctttcgcatgctcagtggtccctttgaccttagtggcaatacgctgtcctccgccgagcttggtggtgcctcgctggatgcgattcagttgagctcccgcgcacggtcgatgttcgctgaccgggtcagcgatcgcgctgccaatgcagttgcggtgttggacgttgagctcggcgggaagacgctgcagatcagccgcagcatgaagacgctaacgctgtcccgcttgacggttgatggtgctgatattgcgcccaacgaggctgacctgcacagcatcttggtcgggctttctggactgtcctcatacggggactggctgatgttccttaggcagttggttttctactttgaggatcgtcgctcgttggtttgggatgcgtccgcccagcaccaagtgtttcgcatgctattcctcccgccggcggagtccaaagagctctacgaggaagagcgccgcattctggagatggacagccggatccgaaacgaccgcgccgctttgacccgactacaggatcgcgtggccaaggacgatgaaaagcagtcccagggtgaggaactgagtggcagggtccagtcactggagccactccagttgcgagacgaggcgaagagggcccagctcatcaaggacattgatgaggtcgacgagcagcgcagatcccttcgtcgacagctgttggaggcagaagatcactccagccgtctgcaagagcaactggaggatgtcaggcttcggatcatccacgaccagttccccagcaaagccgagacggcaaagtacctgctctctttgctcatgctcgatggcaagtgtgcggtttgctcctcagggcatcccggccttgccgaggcattggacgagcgcatttcccacgctcaatgcgtactttgtggaagtccgtccaatgatgatcatctggagcagataccagcggccgatgtggagagccttgattcgattcgtgatgcgctcgagcgctcccgtgtacgcgtcgagcagcttcagattgagctcactgctgcgtctggtagctatgaggtccagagcaaccacctcatccagttgactgatcagatcaagagtcgtgatcagttgttgagcacgctccgtcaggcactgcccgagaaggaagacaagcagcttcaggcaaagaatgaactcggtgccctccaatcgaaaattgaccaggacaggatcgagttggacgtgttgacgggagcgttcatccggcgaacccaggtgttcaacgagcgggtacaggccagggtttccgagatcaagcgtgcctttggtacatacgcccaaggatttctgtacgaaacggtcgccctgaagtggacgccgcggatgcgacgcctgggtcagctgcagaagattgattctgcgtccttcgagttggacatgggcgggaccgacttcgaggcggttcatcgtcgcgaggggcctggagcggtatcagagagccagcgggagttcattgacctggcgtttcggatggcgctcattgaggtggccggtcagggggctggcggcaccttggtcatcgatgcccctgagtcctcgttggatgcggtcttcgtcgagcgtgccgcggcagttctgtgccgattcgggcgcgcaggaggtccaaaccgcctgatgattgcctccaacctggtcgatggcaggcttcttcctgagctgatccggttaggggtgcccgaggcggagcaggaccagcgtctgctgaacctgttggacgtagccgttccgaccgccgcggtgcgtgtcgaggaaggtaagtaccgggcagagtgggctgacatcctcaagcaggggttcaacggatga

SEQ ID NO: 515024 - DNA, 1227 bp, Stenotrophomonas maltophilia
atgagcgcggacatggatcaacaggccatttctggtgctgagctggatgagctcaagaccgtagatccatccacctcaggtaccgaagagcagcgcttcttgcaggagtgctcagggtggtaccaggagtggttgcatgccaatgagccacagttgcaggccaacgccatccctgacacgcaggtcctggttatcgtcttcagtgaatcgcctgacgtcgaaagaactcgtctgaaggcgatgggcgagggtgagaaccgggtcttccgcggcgccctggatgccgggctgcaaggcactctgctggcaacgcagaacctgcgccgcatccttcagattcgggagacgttctcgtctttgaatgatgccatggccgtttgctgcgataccctcgaagactccgatacctttgtcatcattcctctgacgcagcgtcgtgtgctgatccatccacgagatgtgtcgattgaggactgggtgcacaaccccacgtcgattccggtcaggtcacagaccctccagatttcggccaagcagattgacaaggatatctacgagttctatgacgaaggactccgtcttgccaagagctcgctctctcaaatgatctggaaggggaagcagcacccctaccagttcatccaggaccccgaacaacggattcagtcctatctgctgatcacgctgaagcagggctacgcccacctgatgggcgtggtgaatgaggagactgtcggtaagggcgggcgatgcgacatcaccgttcagtggccaaccccgctcggtgcgtacccctacaccaacgtcaagatcgagctgaaagttcttactcatgctcgaggtcctacctcaaacgttgcttgggcgcgaagtggcatcaagcaggccaacgactaccgccttgccaattcagaggcagtgtttgcctgcctcttcgacggacggaaagatcagaccgaccagatgccccatctggatgccgaagcggccgcgctcaacgtggagctgcgccgctacctgatggaagcacctattgcatcgccaaaggcggccgcgcccggcaagggagccgcgacggcggcggggacaaaaggcactaagaagaaggccgtaggcaagaaggctgcagcgaagaaggcggcgtccaagaagacagcgtccaagaagacagcgtccaagaaggtatcgcccacgaaggcgaagagtacgaagaaggcgacatcgtga

SEQ ID NO: 515025 - DNA, 693 bp, Stenotrophomonas maltophilia
gtggctaagtctaagatcgttgcagcagccgaccacgatcggctcttcttcattcgatggatgctcttgctgatcgtggctaatgatgcggccggcctgcccgccgcttcacgtcagcgattgcattcgttgcttttcgtctccttcgcctcgtcacgcttctacggcattgaaccgctgcgccaacgtgcgcgaaggaccgagcaggggccttactaccggatggcccacgtggcattgggccatctggtcatgggtgggcaccttgaggtcagcgacttccatgcccatccggctccgcgggatctgcagtttgagggtattttccgaccgacgttggcgggactgagcgcggccgatttccttcgcaagaccgctaccggcgatcagctctatcgattccttctggatatttgcttggcctcggcagaggcgatcgggcccgtggctggcgacctggaggcgatcagcctggagaggacgctggacgaggatctcacctatcagcgggccgttcgaaagcatggagaaatcctggagctccaagaccccgccgaagtcgatacgccgacggtgcgtggtctcaatagcattgatgaacgtctgagggcgcggggcttcttcaaccggcgagatgtggtcgccgcctatcagtcgctgatggttcggcgatcggccagggccagcgtatga

SEQ ID NO: 515026 - DNA, 2016 bp, Stenotrophomonas maltophilia
atgcgctcaccgattcatctgccggtagtggaccggcttcaggtatcgaactacccgttgtaccccggcatctccaagcagggactcaacctggtattcagtcctggcgtgaccgtcatcgccggcgtcaatgggattggtaagacgaccctgctcaatctgatcctgaggatgctgctaggcgcgagcaatcccagcaaggcggccacccgggatatcggcaaggccagccgacgaagcctggtaaacaccaagaagttcaagttcttcgtcgatcgtgtgccggacctgcccgcgacggcctcggcgacgctcaccttcatgatcggcacctccaaggtcgtcataaagcggagcctggttgacctcagcattctgaagctgaccattggcaaggagtccatcaaggacatcgacaacgccaagttcctgtcgaggatgtcggagctggcgggtctgagctctgcctacgactaccacatggtcgttcgatacgttcagttcttcactgaagagcgacttcccttgttgtggtccgctaccgcccaggttgagctgttcaaaatgctcttcgccgagtctcagacgatggacaatctgaacgcgctctacaaagacatccagaagatcgacagtgactaccgaaacaggaagtaccagctcaacgatcgcctaaaggcccacaagcaggttgttgcggccattggattggatactactggtgttgaagatgtacgacgaaagctcgagcaatccaaggccgagttggagaacgtccagaaggctttgctgacggctaacgaggaggtgaactccatcgtcgtcggacaggacaaggctcgaaaagagattgaagatcttcagaacaagctggatatcgagatccacgcgttccaccagctggacgctgcctacatcgcgcagatcctacctggccagaacgacaagcgcgatctgttgatgcaagggcttggctcgaatcttggatgcttcgtctgcggaaaagccggcaggaaggaaatggctgagatcaaccggcggctcaaaggccatcattgcttcgtatgcaatggcaggcttccagatagcaagggaagcgaggcgccggcttctgctgacagccttgcccttgccgaatcccggattgacgagctcgtcagccagatcgatgcacgaaaatcctcccagaatgagggcgataggctctattccgctgctctggctgcggtccgtccattagccgttcgcaggaacgagctggtccacgagcttgaggcgatggccgttcagtggccaaatgaggtcatggctaccaatggcagcgtgcctggagagctggctagcgaagagttggccctccagctgctcagcgaggagcgctccaagaagaaccagcagtacaaggcgcagatcgccgatctgagctcgcagatggccaagtacgagaatgatctgggccagcgtctgacaaagtatgccgaagaattcctccacgagactgtgcaggtggagttctcccgcaacgcgtccgtcaagattgtcaccggtgcggtaccgatcaaggtcccaacgttccgcatttcgatgacctccagcactcacttggctacgcacgagcgggccacgcccaccagcgtctctgagtcccagaaggaatttctcgatctagcattccgaatgacattgctggacatgatcgccgcagatgccggaacgatgctggtcatggagacgcccgaagccagcctggactcgtggttcatggctcgcgcggcacagatgattcggcgattcgctccggaagacggcaagagcaagctcattgcaacctccaacgtcaacggaactaccatgattccggatctgctgggaatcaagcagggagcgaagctggcccagagcgatcgccatcgcctgatcaacctgatggaacttgctgcagaaccgggtgtgctcaagcagaagaaggccaaggccgagctgaccgccgagctgagaggttacgccggtggctaa

SEQ ID NO: 515027 - DNA, 633 bp, Stenotrophomonas maltophilia
atgtcattggaccaggcagacgaagctgtacgtgcaacgcagaagctctacgaagacctgtctccctcagtttttccgggaaagcgctatgccgctggattctgggcaaagctgatcggaaacagcaaagtcgtggtcatcctggcaactgccggatacgcgtcccaggcggcagctgtccatcgcatctccatcgagcatttcgcttacatgtactcgctgctgaagggcggtctgaccgaggcccaggtggagcagcagatggactacgacgttgctcaggtagcaaaggcgcttcaaaaatcaggtgagcaggacgctcgcatgggcagggaggtggtgacgccagacacgaaggcgtcgctggatcagtatctggccaatccagaggtcaccaacaggacgtcgccgggaatcagtatctacaaccttctggacggtcaggacctcaagttccttcatgaccagtaccgtctgctgtcccttcatgcggcccatgcaaacctgctttcctccgtatgggagccttctgtctcagagctcgagcagatcacgctggacgtctgcgccctgatggacatttctcgtgccgcctggttggaagatggagtccagtccctgacgtccgcctga

SEQ ID NO: 515028 - DNA, 330 bp, Stenotrophomonas maltophilia
atggctgacatccggagaaggattagcgacattgccttcaagttgaaggggatcacacacaagtttagtgatccacttaacggtcggctcaaggctttgttcgaggcgctgacagtgctagtcgcagcgattgattccggcaacatctcagctgtccatgcaaatgaaattctcgataagctccttgccgcgcttgatgagctgtggattgccatggacagtgccaccgatgccgcatcaacagtccatatcactgatcacctgaccaatattgaaagcattttgaacgcccttggcgtggatcagcccgagcctccaggtctcaagtga

SEQ ID NO: 515029 - DNA, 1317 bp, Stenotrophomonas maltophilia
atgtcagtgaaagaagttctagagcgtctagacaaccacacttcatcgcgtgtcgcacgggcggtggtcgtctcgttcaaagctgctcgcaccaaaggttcgacgaaggcacattgccagttgcttgaggagctccttgaacgtgtggaagacgaggccatcgccgaggccaagtatgccgctgaagggatcgcatatgaggaagcggcagacgcgctttcaggacggttggggaatgtacttcccgccctcgctcgggccgcgccgacacgtttgcgcgatccacgtcgcaccgtccaattgcgagccgagctcaaggttctgatcgatttgatcgagatgttaagggttgcccgcaatcaggctggccaacctgcaagctccactttcgcccacgactgggcccgtaccatccttgtgaacctgcccgggaacgttgcactggcgcgttggcagatcgctactttgtccattgcgctctatctccttgaagctgcagtgacggcggagaagcatcctgcgcgtcatacggatatcgaagagcggctttgggcattgcgtcacctcatgaacctgattgatgccactcaggatcccgacggtgccgaggatgatgaggatgacggcaaagttggggtgccttacgagaaccagctccttggagcattcgtgtatgcgcttggctacgtaagcggacagaggtcaacgaccgtcccggtgaacctgttccagcagacccctctggatggcacattcggagacctggtggcaggctcggagcgctgccttgccttggagttcaagcgagagaagggaaccgttgaatcagagaaggccaagtgggccgagggcagccttgaacggtttgcaaacgacccagacatgattgcagcctctgaaagggcacatctgctgtgctatggccaaccagcgttcggcggcactgatatttcagcaatgctctatgtccacgcgcttggcctcaccaagcgcgccgaagagcttccggctgcagagatcattgagggactgttagcgcttgccgactcgccagacccgagcaagggcatgggactgcccccagacagcctggagcgctatcttcgcaagctcgcctcgatccgcaagaaagggggaggtggcaagcgatcgacgtggctcgctgccgtgtacgttgatggtggcttgaagattcgcaccgccacatcattgtccatgctgcttgggccagatcctgcgccagggcggaacctcacacacacaaattcggcttcttcccagctggaatcgagaaaacgccgggcaccggggcgctag

SEQ ID NO: 515030 - DNA, 777 bp, Stenotrophomonas maltophilia
atgatcagcctacgcacccgctactctctagcgcagctcctggcgctgcaggcccctcatgtttcggccgtgctgtttaccaagtacggggccgaccacgtcatggtacttccggcgcaaccgttggttgggctgacagcgctcatcaaccaggccgatgacgccctgctgatgtcggtgatcaaggaagtcgtggccacagccggggatcttcgcgctccgatctcgccgaagcaccgctttgacgagcgctggcatgacttcacgcagtgcctgctgatcgacggctacatcgtcgaaggcaggaacatgacacaagcagatccatccatcgccgatgcctcccccatggaggacgacctgatcactgccctgaagagcgcagcgcttccgcgtcgcgatgccatcgtgtccaggatcaatgactcggctgaggcgtttcgccgcagcacgcctgactacaatgctgccctgaccaacgcacgcgtggcgattgaaacgctggccggtgatgtggcatctgctgttgctggcgagcaaccccattggggtccttacgacgcgtccagctggggccaggtcatctcttttctgcgcagaagtggtgagatcaccacggaggaggagaagggcttggcgggggttttcggattcctgagcgcaggcgcgcaccgcccgatgggggtcccggagaatcaaatggcccgtctgggtcgatcctttgccctcaacatgtgctggttcctccttcagaaccggttggcacgtggctcataa

SEQ ID NO: 515031 - DNA, 471 bp, Stenotrophomonas maltophilia
atgaagcccaccatcttggctctggaccttgaggggacgctcatctccaatgccatcagccagattcctaggcctgggctctaccagttcctggaggctgtccaagcgaacttcgaccagttgatgatgttcacgacagttcccgaaaatcgctttcgcagtatcgctacgctgctggtaggcgaaggaaatgcacctgcctggttcgccgaactgcactacatcaagtgggagggaaaaaccaaagacctgctccaggcatcgccgcgtctgggagaggcgctattgcttgatgatcacgatccctacgttcaccctgggcaggaacatctctgggttccgattcctctgtttgggtccccctatccgccagatgatgacggactcagcgtcgccttggaacgcctgctcgaacgtgtgggtggtgcgcatcagcacaagcagacgacgcgcaagattagaagtatctag

SEQ ID NO: 515032 - DNA, 1848 bp, Stenotrophomonas maltophilia
atgaccgacctcacgcaccaccccagcgattcgcgcctctggtttattcggtggatggatcggttcaacaagccgcacaaggcctcaacgtccaccgcaatctgctgcttcctggcaccgcttcctgaacagacggtggacccggccgcgttgagcccagatgaggtggccggtcttttcgcgcaagacaccgagctgtttgaggcgcatatccaagtaggcgcgatgccgaacttccgggtgggacaggtcttccgtcagggcaggcgcatcggcgtactgcccgcggtagacctggatctgggtgaagcaatcgcgcagggggagatgtctgccaagtacggcgcggacctgacactggactcggtgatcatgaggtcatccggctttcctatcaaagccgttcccacccgtcagctccatctggggcaccgtacccgcgccggcagccaggtcctggtcgtggaggacaagggtattgagttcatcatcccgcgtgccctgatctttcgtagcttctacgctcgctccacgttcctggcttccgtcttcacctcgtcgaactggaacactgccaagcaccgggcgcttcttctggacaaggagtttgccggccataggacagagcggaacgatgagctcaataccttcaacgtcgttatgcaacgcggcatgcgcctggaagatgctcaccagatggcgttgctgcacttctatgactacgctcaagcgcaggccaacgcgctgttcaatcccatgatcaaggccttccaggatacccggcccggcaaggaaaccagctggttcgccaacgccagactgccactagatcctgcacttggaccttacaacggcaaggtcgctggctacttcctcaagcctcataccgaccatcgccggacactgcgcacgttcctggtgacatcactggtcgggacgtcactgcccaatgacttccggcagcctggacgcatcttggtcaatgacggaacactgaaaggagacgtgcaagtcaccggcggaccacgcccatacggtggcagtcctggcaatggtggtcgccgcccagatgacatgcctattgccgataccaataatggctcgaccaaccacgaatcctacgaggctcccggtgactcgtttgaatggatccaagcccctgaagcgatagaccttgagaagcggcacagcaagaagtaccagggcgatcggaacaggaacagtcctccggacacggagaacggatcgcaaggcgaccgtgacggatctgagggatcggacacgcctgtcaatggccacgtggcaagccgccgggatgaagagcacttcaatgagttggttcgtgcgatggaggcgatgattagccaaggcgtcctacggaattacaaggagctctacccggacgactcaaccagggtcgcctccatcggtgcccggtcttgctggaacttccttgacaagctacagcgtgacacagcgccggcaaaacgtctgcgaagaggatggcagttccttcacccaccaggtaagaagtctggcggcctcgaacgagcagccttggtcctcgtaatcacattgctcgatggcaggaaggccttttggattgagattcagacccgccaaggcgcgatgtcaccgttactgatcgacgatggctcccaccctcaggaacaagtgggtaccgcattgaacatcattgctggtgctcgtggtgcaaatctggagagagaattcgaccggccaggtgccgcgcacttcttcactcatcgatacgtagcaaatggagaaggaccttgggacctcagctggctgaagaagttctttacggacatcagaccacccaggtag

SEQ ID NO: 515033 - DNA, 1494 bp, Stenotrophomonas maltophilia
atggttactgatagtcagggcagaaggacatgcgattgctgtgagcgggtcattgccaaagcgcatcgcatctacaagggcactgaatactgccaatcctgctatgagaagcactttgtgcctggtcgctgcccaacctgtggttccggcacgcgttatcaccgtgccgaacgtgagcagccagaatgcgaggaatgcctgcgcgacaagcgccaatgcggtcgttgtcaccgtcctactccgcgggcggccttgatcgttcaggtccaggttcccgtgggcaccgacggcaggcttagccccgcccagtccatagcggtctgcccaagctgcgtgccttacttccgtgagcctgagccctgcgggatctgcgaggtgctgagtactcgccttagtagagcagctcatctcccggcggatgttcgagcgtgtccggtctgtgtaaggaagcagaggcatgccacctgctcaagatgccgaaagcaccgaaaaattgagtcggaggatggcggccgtccgctgtgtaaggcctgttcgggggcatcgcctgtctcgcactcctgtccagagtgcggggctgccgttcctggtgcgggtggacacatgtgcgattcctgcagcatcgcaacgcgattgaccagagaggttgagctgcgccttccgcacttccaacaacagtgggtcgccgacctcttcaccggcttcgctcagtggagtcggatgcgccgcccccgcgatcctcgccttcctgccaatgttgtgcgctccctggattttttcctgcagttggatagggacatgactgcacagccgccgttgcaggcagatgatctcctacgagtattcgactcaaaggctctgcgcgcaaacctgaacgcatcaacgttcctgcagcagcagtacggattcctggtgagtgccgaggcgagggttgcggagcggaaaagatcacttactgcatcaaagctggtcgacgcgcagggggagccttgggagctttaccttcagggctatgctcagagcctgtcgggccgcgcaccacgtactgttgcccagtacgtgaccaccgcagaggcgttctgccggcgattccagatctctggctcatttggccaagctgagttggtcgcattcctcagtgacaagcccggggctcggacgaacatcgggccgtgggtttcttacgtgcagaaggaactaggctggccagtgacgttgcctccaaaggcaccgggaccagttgccttgaagcaggattccaggcgattggatcggttactcaagcagcttgaaagacagggcgaaccggaccggacgctcttgacccaagcggttgcactcgcttttggcttcagcgaacctgaattggcccgagaagtcatcggtctttcagagtcaggtgacttggtcacgacaaacggaccggtggaggtgccacctgcactacgcttggttgtcagccactgggccagggcgtgcggtctactagactag

SEQ ID NO: 515034 - DNA, 1032 bp, Stenotrophomonas maltophilia
atgcgagccggatggccacctctggagcctgatgagctactcagttcctacttggcgcgttcggcacagattcgcggcttaagcgcgcagagtcttgtcgcgctgaattttcctggttcggacgtatggaaccgagacatagatgccaacccacccgagtctcttctgctgcgacttgcgcaagcaacggactgtgagctgaccgctgtcagagaaatgacgctgatgggtatgggcggaccaactgagacattgggaggaagtggtgtgtgcaggtgggtcaatgcgatcggtatctaccatcggtcgaggacgcgctacggcctgtgttactgccctgtttgcctggatcagacgcgatacttcgacaggcactggcgactgtcctattggactgtttgccctgttcacggccttctgcttcgtgatgcctgtccgcactgcaatgcgcctttggcaccccaccggcaacagctggatatctgcaggtgtgtcaattgccatcagctgctgaccagcagtccattccgtgctgcgattccaacagactctcagggcgcaatcaccgcggcgatgcaactgcctgctctccaccgctatcaaccttgcctatcggcaaccggccaggagtacggggcgggtatgcacctcctgctttcagccttcttggatgcaagagtgcggtgttgggacgcagttggacacgcgagagaccgaatcgagcttcggcggattcatcagcgacacctggacctccaacttctggatgagattgtctgccgatggccgtactcgatgctgtccatggctcaacggtttcacctcacccagcgtagctttcgccagccttgccctgactgggtggctcaacaggttcggcagcttccccttggccggatgaacggtctgggctctcccagtctgacccgactgcgacaggcgagggttgcccaactggcgagaagtttgggttggcgtaccattcgcgctcagattctcattgatattgcaggaaagcgggatggttactga

SEQ ID NO: 515035 - DNA, 888 bp, Stenotrophomonas maltophilia
atgagcgcgtatccgcatctgcttgagaaggtggccggatacatggaggcctcgataccagagcgcgtggagttcacccgtagtgatcgatggatcgcttacccggtcgcaaaagatgttctggacgatctggatcagatcatcacctacccaacgatccagcggccgccgtgcaggctgatcgtgggtcgcggcgacaacgggaagacggcagtcctccggcagtttcattctcggcatcccatcttgctgagggaggatggcacgaccaatgcgccggtggtgatcattggtatgccagccaccccggacctgtctcagctgtggtcggagattctggagtcctgtgctgtgactcatcggcgcagcgacacggcgtcgtcaaagtacgctcaggtgctggctatccttcgataccttaaggccagggtgctggccattgacgagttcaacaatgtggtcaatgcccgaaagggtgccgcagacgtgttggccgggattcgaaagctcagcaacgacttgaacttgagcattgttgccgctggaacagaggctgcaatcaacgcactgtcctttgatgcccagatgcgatcgcgattcaagccgcttgcgcttgccaggtggcagtacgaccggtcctaccgtggctttctcaatacttacgaaaaattgctgcctctggccaagccttcggagcttgccagcgagcagttggcaccgctgatcttcaaggcaggcggtgttgccatcggcgggacggtgtacttgatcaaggaggctgcggtaatggccattcgctccggcgaagagaggattaccgctgagatcgtgctgaaggcggaagagcgcctgaagcagaattatcagggtgtggtcgcggccacatga

SEQ ID NO: 515036 - DNA, 1902 bp, Stenotrophomonas maltophilia
atgtccctctccaacttcttcaaagtggaacccggcgctgaagtcttcgtggggcctcgcaggtatcgggtcacccacatgctttccatcgacagtgtcctggcagaggatctggacacaggcgtgagtgcaaagctgcggattgagacactctcgaccatcgttgccgccgagtcggctgctgacgccggcggctttcctatccatcagtactcaaaggaagagtggtctgtcgcgcagaagcggtttgaagcgctgcgcccaatgattgaccacccggttagaacgcgtattgaggtagcaaagctcgccgctgcagcgggcgtccacgtagccacctattacaagtggcttgccgcttaccacgatgcaggtcatgtagcggccttggtgccgcgcaagcgtggagctgtgaagggccagaagcaccttgctgctgatcaggagctggtgatcagcagcgctgtggaggacatttatctaaagaagcagcgccactcgccaaaggaagtggtcgaggaggtcttgcgtcgttgcaaggtggcaaagatcagtccgccggcaccgagcactatcaggcgcagacttaaggagatctcacccgccatggctctgcgtcgccgcggccaccgcgacaaggcgcgtgacaactacgagccaatccgcggttcttttccgggcgcagacttcccctgggccgttgtacagatcgatcacacgccgctagatgttatggtggtggatagtgtctaccgtcaacccttgggtaggccctggctgactctggccattgacgtatacagccgtatggtcgtcggtctctacgtgaccatggacaagccgtccgctacctcggtggccatgtgcatttctcatgcgatgacgcccaagacggactacctggcttccttggaggttcagggcgattggcctgtctggggccagatcggaacgctgcatgccgacaacgccaaggagttcaagtgtaaggcggtgacccgcggctgtcaggcaaacagcatagacatgcagtggcgcccggttaagaagccgcactacggggggcacatcgagcgctacatgggtgtagttgccacagagctcaagaaggtacctggtgctacgttctcgaacacccagcagcggaaaggctacgactccgaagccgaggcgacgctgaccatgagggaggtcgagcagtaccttgtggagttcatcgtcaacaactaccaccagcgaccccatagccagctcaacgatgcttcaccctccaaggtctggcgagagggtgtgcttggaagtgcgggaaaacctggcatcggctacccgcctatgattcaggatgttgatcgactgcgcatggattttctgccgtactacaacatcacggtccaacgatcgggcgtacggcttgagaacgtcttctactacgacccggtactggatccctacatcggggcgaccatgcccgacaatcctggtcagaagcgcaagttcctgttcgcccgagatccgcgcgacatcagccagatctacttcctggaccctgctgcagagcgatacacgccgattccttataggacgctttcccatccagcgatcagtgcatccgagcttcgagaggcaacccggctgatcaaggagcagaacaagggggaggtcgacgaggagcggatcttcagcagcattcaacgcaaccgagaacgcattgatgcttcggcagctagcacgaaagcagctcggcgtcaggtggctaagcggcccagtaagaagcccggtaaggccgatgatgcaggtcaatctccagctaatcttccagctgcggcgcctattgcgatggcaccagatgcaaacctttttgatcccgaggtggacgtgtttgaagtgggagaactgagctga

SEQ ID NO: 515037 - DNA, 663 bp, Stenotrophomonas maltophilia
atgacgcgactgaactccaacattcccgctcgacctttgaaaaacagccgccgcgcccttaccggaaggctgaatctggccaatggaggcatggcgggcttcgagtcatcgcttgagcgagactggctgcgcgtactggatttcaacccactggtgcaggcaattcgcgagcaaccgttcacgatctactacgactcccaggacggaaggcggcgttacacgcccgatgtcctggtagagctgcgggaggaaaagcgggtccgaacctgcgtctacgagatcaagccgctcgagcagcttcgagcggaatggcaggagcttcgcccgagattcaaggcggcggtggcgcactgcaagcgccagggctggcagttcaagatcgtcacagagacccacatccggactccgacgctggccaacatcaacttccttcgtcgctaccgctcgatggaaccgctgctggtccggcaggcgcaactgaagtacaccgcctctgtccttgggccaacgacgcctcaggccctgcttgcggctgcttactggtcagccgaagagcaggccatggctatcccggccctctggcagttgatcgagcgcggcgagctcatcgctgatctgaacaagccgctgacgatgtctactcccattcgactgggcgcctga

SEQ ID NO: 515038 - DNA, 939 bp, Stenotrophomonas maltophilia
atgaacgctcgaaacaacatcgttgaactgaacattccgcatgccgtgtccggccgcttcaagatcgaggcgttcaaggtcgacgcacagggggaagagatccagggctcgcgccgactggctgccgactggttcgacaacttggtcgtcaacgccggcctggaccgcatgggcagcaatagcgactacctcagcacctgcattgtggggtctggcagcgctgccccagcggaaggggacactcagctgcaatcccgcgtagccagcacgaccacgatcaactcggacaccaacggcatggtggtgtccccgcgctacggttggaagcgcaagacgttccggtttgcggccggcgctgcagcgggcaacctgtccgaggttggcatcggctggtcctcgacggcggtgttcagccgagcgctgatcctcgacggtggtggcaatccgaccaccatcacggtgctgagcgacgaagtgcttgacgtcacctacgagctgcgcgcctacgtgaacgaggcggacgtgagtttcaatgtcgtcatcagtggcgtcacctatgcgtgtgtcttgcgcccggccaacatcggcggcaatcagggcctgcagctcggcgacgccatcaccatcaacacggcgaaccgcgcttccggcgcgcgtagtacggagagcaacgttctcggttcggtcaccagcatgcccggcggcacgtcgaactccatggactacacgaacgagccctatgtgaacggcacgtactaccgcagccacgtcctcacggcacagttgaacaacagcaacttcgccaccggcctgggggctgtggtggtgtcgaacaccttcagcgacttccagacctcgttcaccccgaagatcccgaaggacgcgaccaaggtcctgacgctgcaggtccgcagcacctgggggcgtcatgttccctga

SEQ ID NO: 515039 - DNA, 321 bp, Stenotrophomonas maltophilia
atggcggaagacaccgcaccctggtggctggccggcggcgccgtagcgctctgggttgtccgcgagacttggggatcgatcctgtcccggcgcaaggagcgcaccgagaccgacgccaatgtcgacctgctcaatggcctggtggagcgggtcaagtcgctggaggcatcccaggtggccaccagcaatcagctggccgacgagatccggctgcgcatggcagcgcaggaggaatcgcaccgcctgcgcctgcgcgtcatgtccctggaagacgcaatgcgccgcgttggcgcggtgattcccccggagcctacgcaatga

SEQ ID NO: 515040 - DNA, 876 bp, Stenotrophomonas maltophilia
atgtcgaaggatgttgaaagcgcgccagcgcagcctgcgcggaatctagagccaaccgggccgtggaaaaggttctggcggttggttactgagccgtggactctgatcctactgctggcctcaatagcgctgtttgctatcgggcagcagaagcttgagcccagcgtgacggccctgattcaaattcttctggcggtatcgtccggtgtgcttggcgccagggtgaccaaccttctggagacagcctcaggcaagagcattcttgaagcgcgcggaaaagtcgcggtgcggggtttgaaactgatgttggtgcagaccgccgcattccaacggcgcatccagcgcttcatagacaatcgaaagcacatcgagacgaatcctgatttaaccgtgcggaactatgaggaggcgatcgagttttgcagacgaattcaagaggaagcggcaagcgctatggagacttggggggacgtggttcccacagccgacctgagctctatcatcggtagaatcacggaggcagaggagcagcgagatgctggcaagctagagctggagcaagctcgagcagagctggaagcagcggccggcaatgccgaagacgcggagcggatgcgcgagaggattggctttcttgaagagcggtctgagcaatctgaacgtcgtgtacggtcactaacaaaggccttgaacgaggccgccaccgtacgcataagcgacaatgcgccaaggaacgccttggctgacctgatgccgaggtcttcgtggagcgccgagactttggccagggcctacctcgcaggcgcgagccagcaggcgagtgacctcctcggaagcggagttcgctcgtcaagtgagcctccgcctaagccttga

SEQ ID NO: 515041 - DNA, 645 bp, Stenotrophomonas maltophilia
gtgacccgtcatacctcagttccgttggagttcgccaacatctgccatcacttgggagatcgcttggtgatacataccaaacacagctgcctgggcgtcactgggctgtgctccgatcttgaccagaggccttactccttcggcatgctcaagaatgcccatgcagtgaaactgagcttccactttgtgctgcagaagcacagccgatgggacatcggcagctggataggaatccagagttctcagttggatttcaagatcgcggagcagcccctcgaagatactcttatggatatttccggtggcaatccggttagagagagccgcagccggagtcagcacatttccaagaagcacaagaagtacgtcagatctccggttcttctccgactccgcgatgttcttgggaaccaccactgccgcatagccaaccacagcagcaacaacgacctgtgcccaagcagaccagttgacatcaacaaaccactcgcggactggcttgtcactcatgactccgccggtgagaacaactcccgccatgaatgtcagcacggccaccaccgcccaatctcgatcagtccgtccagacttcatacgtttccccccttgttggcacagattctaccgtcccgggtggccccgtga

SEQ ID NO: 515042 - DNA, 216 bp, Stenotrophomonas maltophilia
atgcgagaagcccaattcacccgcgccgcagagcgcgcccagcgagaacgccaagaggtgcagcagcagctggccgagatcgaacagttgttcatcggcgcccccacgcagccagagctgctggaggaacttcgccgggttgccaagaacggatcgccggcagaggcgaggcaactgctcgcaacagtgcagcgcgtgcttgcgcccctgcagtag

SEQ ID NO: 515043 - DNA, 246 bp, Stenotrophomonas maltophilia
atgaacacaatcgccaccgcaattgagagacatggggctgggcaggccggtatcgcacggttgctcggcgtgacgccgcaggcggtaagccagtgggtaaacggcagtaggccggttcccccgaagcatgccctcgcaatcgaggctgctactggcgtgtcccgccatgagctccggcccgacgtgttcggtccggcgccgctcgaagtggagcagcagaccccggaaaccggggctgccgcctga

SEQ ID NO: 515044 - DNA, 273 bp, Stenotrophomonas maltophilia
atggccaagcgggatggtactgcgttctacgcaggcccctcgatcccaatgatggcggtgtggctgtccccgatccttgccaccgtgctgttcatagcgggcttctggtgggttgcctggtactgggttctccttctatcgctggccgccaccgttgtcggcggcattctgggctcggtgttcggcctgacgcgagctggccccgctttttcggtcgttgcgctgctcgcggcgatcggctgcggctactggatggtccacccgccggcctaa

SEQ ID NO: 515045 - DNA, 231 bp, Stenotrophomonas maltophilia
atgagcagtaacgcgtggccgaactatcgagaaatgaccgccgagcagatgctggcgtggggcctggaggaatccgaagcacgacaggcagacctgcgggttcgcaccgctgaaggacttgcggcggcgcaggcgaatgccgaagcgcgacggaagctgatcggagcgagccgcagcgccgccgcctcaatggtgatcgacgcgaatcgccacgcgcgcaggagccgctaa

SEQ ID NO: 515046 - DNA, 279 bp, Stenotrophomonas maltophilia
atggctgatcccaagtacatcgccagtggcgacctgcacgaagcgaacgcagcgctctgcgagttcgccgggcgctggaacatggacggcgactacatccgttgccgcgagtgcgaccgtgcccagctgaccaactacgcacacttccagttccagcacgcgcgagactgcgccgtagcgtcaacctccgacccgcatccgtgggtgacgttcgtgcgtctggtgacgccgatcatcgaagccgtcgagaaggcggagaaggcggtccccaatggctga

SEQ ID NO: 515047 - DNA, 213 bp, Stenotrophomonas maltophilia
atggccgacagcccctacctgtcccgtgacgatatcaaggcgctttgccgcacaccgcggcggaagggccaggccgagtttctgcgcaacaacgggatccggcactatctggacgcccacgggtggccagtggtgctgtggtccgcgatcgagggcaagccggagccgaagacgccgccggcgaccgattggaaaccgaacaaggccgcatga

SEQ ID NO: 515048 - DNA, 372 bp, Stenotrophomonas maltophilia
atgaaggtgatcgtcgcgtctggatggctcatggcctccatgcttcccggcatcgtccttgccgaggacgcaggttggcgtactgtccaaggcaaggatctgcagtcacttttctccgatcatgagcttagcgacggcgtgcattacaccaatcagttccgtcgcgacggatcggtcatcggcgtggatatgggcgaaaggttcaatggcacatggaaggtcaagggcccttgcctgtgctacgcatgggtacgtcccgccggccagaacgagtgcttcggagtcaagcgacgaggcaacgaagtccggatgttccagaacggcattgaaatcttttcgggcactgtgacacgcattcgttccccactgtga

SEQ ID NO: 515049 - DNA, 207 bp, Stenotrophomonas maltophilia
atgctgaagcaacgttgcgacctggaagatatccgagctaagttcgccgacttggactccaaccgcgatgggtacctcaggccggaggaattgcctatggaacactcgctgagccagcacttcgcaggcgtggatttcaatggtgacgagcggctctcgctggcggaagtcgcggagcacgacgcagagacgaatccagtcgagtga

SEQ ID NO: 515050 - DNA, 1263 bp, Stenotrophomonas maltophilia
atgagcacagtcaccaaccctgtggccgcgagcgagaccaacgacgcgcccacctacgtggtaccgcaagaaccgtggctgcggctgttcctgcggttcctacgcttcggcgcattagcctggggtggcccggtcgcccagatcggcatgatccggcatgaattggtggagcaagagcgctggatcagcagcgcccagttcaaccgggtgctggccgtctatcagatcctgccgggcccagaggcgcacgagttgtgcgtgtatttcgggatgctgtcgcgcggccgctggggcggtgtgctggcgggcttgggcttcatgctcccggggttcgtgctgatgttcgcgctatcgtgggcgtacgtgcgcttcgggttgaaggccgacggcgtgctggccatcttcgcggcggtccaggtggcggtggcggcgctgatcgtgcgcgccgtgtttcgcatcggcggccacgtcgtcaccgatcgctggctctgggcgatcgcgatcctggcgacaggtgcgcagttggccggtgtgcacttcgcgctgatcctcgctgtgggcgggatcatctacctgatggcacgccaccgcctcggcatcgccgcgctgggcgtgatcggagtggcggccgccgggaccgtcgtgttcgcagtgcgcaacggcggcctggccggactagacgcgctgagtcatgtgggcgcagagagcaccgccgtcgtgcaggcgacggtaccgctgctgctgctgttctggtccgggttgaaggccggcctgttgacgttcggtggcgcctataccgtcattccattcctgcagcgcgatgccgtaacccagggcgcgtggatgagcaatgcgcagttccttgacggcctggctttgtcgggattgctgccggcgccgctgatcatcttttcgaccttcgtgggctacctcggcggcgggccgtggggcgcagtggtgatgaccgtgggcatcttcctgccggccttcgccttcacgcttttgggtcacgatgccttggaacgcatagtgcatcagccacgcgtgcggctttttttggagggcgtgaccgcaggcgtggtcggcctgattgcgggaacgacgctggcccttctgcgcgtaagcctgacgggcctggaggctctgatcctatttgcgatcgtcctgagcatcttattcgccagcaaggcgcggctggtgattccggcggtgattgcaggcgccgcactgtggggctgggtgtcgcaggcacttggccactga

SEQ ID NO: 515051 - DNA, 918 bp, Stenotrophomonas maltophilia
atgaacgccatcgctcatcgtgccctgcgggccctcacgctgtcgctgctttggggctgggccagcgttcacgcggccgagatcgactccgcccggattggcgaggccagcggcgcagtcgcgaaggtgcaaccggacggggtggttcgcatcgggtggagccgcgacgacgtggcggtgaccgtggacggcatgcggctgccgccgcccgcagggctcggctcgtgggccgcgttcatgccggcggacgagaacgcgatgctgatgggtgacaccgtcgtcttcgaggatgaggtcgatgcggcgatggacgcagcgttcaaggccggcctcgatgtgaccgggctccacaaccatttcttcttcgattctccgaaggtgtacttcatgcacatcggcggtcacggcgatccggtgcgattggccggcagcgtcaaagaggtgtgggacgccatcaaggccgtgcgcgcgcagcgcccgcagccggccactggcttcggcggtcccgtgcccacaccgggaaagattgatgccgctgccatctccaaggccatcgggcatccaccggaaatcactggcgacgtggtgaaggtgacgatcggccgggagggacgcatgcacggccggccggtaggcggatcgatgggcctgacgacctgggcggccttcaccgggtcggatcggcttgctgccgtcaccggcgacgtgatcatgaccgccgacgaagtccagccggtgctgcgtgcactgcgccaggcagacttccacgtcgtggcgctgcacaaccacatggtgggcgagcagccggcgttctatttcgtccacttctggggcaaggggcctgcggccgggctggcccaagggtttcgccgtgtgctggatgcccaaagtgcccaagtcaaatccgcggcgcggtga

SEQ ID NO: 515052 - DNA, 633 bp, Stenotrophomonas maltophilia
atgtccacctccacacttgcacccgtcagcacccccacgctcaagccgctgccgttcgacccgtccaaactgaaaggattgtccgaacgcctgatccgctcgcattgggagaacaactacggcggctcggtcaaggcgctggccgtgacgaagaagcaccttgccgaggcgctcgccgcaccggacatgccgccgtacctctacaacgaactcaagcgggagcacctgctgcgcaccggctcggtggtgctgcacgagtactacttcgacaacctgggcggcagcggccaggccgatgccggcagtcgcaaggccctggccgaagccttcggcagcttcgatgcatgggaaaccgaattccgccggatgggcaccgggctgggcggcggctcgggctgggtggtactcggcttcaacacccacacccgccagctcgagaactactggatggccgatcacgctcacggcccggcggccacgctgcccatcctggtgatggacatgtacgagcactcctaccagatggactacggcgccgcggccgccaagtacgtggatgcgttcttccagaacatccaatgggacaccgtggcgcagcgactggaggcttgctgcaggccttccgctgcctga

SEQ ID NO: 515053 - DNA, 939 bp, Stenotrophomonas maltophilia
atgaattggctcatcatggttctttccttgcccaccgagaatgccacggtgcgccagcgggcttggcgctcgctcaaggcggcgggtgctgcggccctgcgggacggtgtttacgtgctgccagcggcggcggagcaccgtgccgtgctcgaagcggtggcggtcgatgtgaccgggggtggcggtgctacccatctgctgaccgcccaggccaccgacgaggcgccctacgtagccctgttcgaccgcagccgggactacaccgagctgctggccgatgccacgcggcttcgtgaaagccttcccgacactacgccgtcagaggcgttgaagcactcgcgcaagttgcgcaggaccttcgagtcgatcactgcgatcgacttcttcccgggcgaagcgcggcggcaggtcgaggacacgctggccgagctggaaatggcctgtgcccgcctgcaggcgccagacgagccgcgctttgtggccggtacgatccagcggctgcgcaccgccgattaccaaggccgcctgtgggccacgcggcgacgtccgtgggtggatcggctggccagcgcttggttgatccgccgcttcatcgatcccgaggcccgcattctgtggctcacccacccggctgactgtccgccggaggcgttgggcttcgacttcgacggcgccaccttcagccacgtcgcccaccgcgtcaccttcgaggtgctcgccgccagcttcggcctggaacaaggcccgatcgcacgcgtgggcctgctggtgcattacctcgacgtgggcggcgcaccgccgccggaagcgtcgggcgtggaaagcgttctggcgggattgcgcgacaccgtggccgatgacgaccagttgctggaacgcgcctgcgccgtgttcgacgggctgctggccagtttccgcagcaacgggagcaccgcgtga

SEQ ID NO: 515054 - DNA, 960 bp, Stenotrophomonas maltophilia
atgacagtggagcgctatctggaggccgccaaccgcgaaaacacgcagcgcagctatgcttcggcactgcgacatttcgaggtcgaatggggcgggcacctgccggccacgccggacagcgtggcccgctatctggctgatcacgcgggcgaactttccaccaacacgcttcggcaccggcttgcggccctggcaggctggcaccacgaacacggctttgtcgatccgacccgggctccgctggtgcgcaaggtgctcaaaggcatacagaccctgcatccgtcggtagaaaagcaggccgagccgctgcaactgacccgactggcacaggtggacgattggcttggcgccgcgatcgccgccgcacgcgagcgcggcgatcatgcggacgaactgcgtcatcgccgcgatcgctcgctgatccttctgggcttctggcgcggcttccgtggcgacgagttgatccgggtgcaggtcgagcacctgcgcctggtcaccggtgaggggatgacctgttttctcccgcgcagcaagggcgaccggcaggcacagggcaacacgtacaaggtgccggcgctgtcgcggctgtgccccgtgacgaccacgtgggagtggatcgacgccgccgggctgaccgaggggccactgttccgtgctgttgatcgctggggccacgttgcggacgaggcgctacaccccaacagcctgattccgctgctgcgccggttgctgacgtgcgctgggctgcctgatgccgacgagtacagcagccactcgttgcgccgcggcttcgccggctgggccaatgccaacggctgggacgtgaaggcattgatggaatacgtcggctggcgcgatgtgcactcggcgatgcgctacatcgatggcggcgatccgttcgcccgccagcggatcgaagcgagcttgccgggaacgccaacgctgcttgggcctacctga

SEQ ID NO: 515055 - DNA, 2961 bp, Stenotrophomonas maltophilia
atggcgtcgattgaacggaccgcatacccgcaattcaagcgcaaccccgtcgtacgcgaactggttgcggcctacacgccgaccgacgccgaactggcctttgttgccgagagtacccggcagcccgcgcaccgcctgacattggcgatcctgatcaagaccttccaacggctgggatatttccctgcgttggacgaagtgccgccggcagtggtccgccatatccgcggcgcgctgaaactgagggtgcaggtcaagccggcggtcctcgccaacgcctcgcgctatcgctattaccgccggatccgccagttcctgcaagtccgggcttacagcgatggcggcctgaagatcgcggcacgggcggtatacgaagccgccgcagtcatggacaacccggcggacctcatcaacgtggctatcgaacagctcgtgcgcgatcgcgtcgagctgccggcgttttccaccctagaccgcttgacgcggcgcattcgcacgctggtcaacggtcgctatttcgcccagatcgaagcgcggctgaccgtcgacgaaaagcagcgccttgaaggtctcctgcaggtcgaagaggggcgcaagaagagcccgctgcacgcgatcaagcgcctgcccaagcgcgcttcgctgcagcacttccaggaactgatcgaccacatcgccgaactgggcgagttggtcggcagcgagttgcacctcgctggcattccggaaatcaagcgcagacacttcgccgcagaggcacgggcgctggatgcctccgagttgcgcaagtttcgtcccgccaagcgctacgccgtactggtgtgcctgatccaccgggcccgcgtccagacccgtgacgatctcgcggagatgttcatcaaacgcatgggcaatatccacaatcgcggccgcgaggagcttgagcggttgcgggcacgctaccgcgagaagaccgaagcgatcgtggcgacgatgtcggacgtggttcgcgtccttgaccatcatcccggcgacactgaggcgggccgggaaatccggcgcctggtcaacgcccacggcggcgtgcagaccctccaggccgactgcaatgccatcgcggcgcacagtggtgacaaccatttgccgctgctgtggccgttctacaagagccatcgtgccaccatcctgcggatggtgcgcatgctggatctggcctcgaccacggaggatcgctcgctcatcgatgcgatcgagctgatcctgacgcaggaacgggcccgcggcgattggctggatgaaccggtcgatctggcgttcactacccaactctggcgcaagagcatcgtccatcgcaccgaacagggcgaggagcgcatccaccggcgcctgttcgaggtctgcgtgttctcgtcgctggccaacgaactgaaatcgggcgacgtggccgtgcgcggatcggaaacctacgccgactaccgcgagcagttgctgccgtgggagcaatgcgagcccatgctggaggactactgcggccaggtcggcctgccggcaacggccgtgggcttcgtcaatgcgctgcaatcacgcctgatgcaggtcgccgagctgaccgatcagggctatctggagaacggccaggtcgtcatcggcgaggacggtatccctgtgctcaagcgcagcaaggccaaggagatgagcagcggcgcccgtgccctggagaccgcgattctcgaccgcctgcgcgaacgcagcgtcatcgaaatcctgtgcgacgtggctcactggacacgctggacccgacacttcgggccgttgtccggctcggacaccaagatcgaacagccaaccgaacgctacgtcctcaccgccttcacctacggctgcaacctcgggccggcccaggccgcccggcacctgcgcggcgccgtctcggcacacatgctgtcgttcgtcaaccgccggcacgtggacgccaacaagctggcggcggcctgccgcgacatcatcaacagctacgctggcctgcagctccccaaattctggggcgacggcaagagcgccgccgccgacggcaccaagtacgacctctacgaccagaacttgctggcgtcgtaccacatccgctatggcggttacggcggcatcgcttaccaccacgtctccgacacctacgtggcgttgttcagccacttcatcccgtgcggcgtctgggaggcggtctacatcatcgacggcctactgaagaacacctccgacatccagcccgacaccgtccatgccgacacgcaggggcagtcgctgccggtgttcgggctctcgcacctgctgggcatccagctgatgccgcgcatccgcaactggcgcgagtacaagttcttccgcccggacgaggacatccgctacgagcacatcgagccgttgttccgcgacacggtcgactgggacctgatcgagacccactggaaggacctgatgcaggtcgtgctctcgatcaagaccggcaagatcgcggcctcgacgctgctgcgcaaactgggcaactacagccgcaagaaccgtctgtaccaggccttcaaggcgctcggtgcggccgtgcgcaccttgttcctgttgcagtacatctccaaccgcgagctgcgcgagcagatcaccgcctcgaccaacaaggtggaggcctacaacggcttcgcgaagtatttcttcttcggcggggaaggggtgattgccgacaacgaccctgtcgagcaggagaaggccgtcaaatacaacgatctggtctccaatgctgtcatcttctacaacgtggtcgagcagacccggatcatgaagtcgctgatacgacaggggtggaagatcacccgggaggacgtggcttcgctcagcccgtacgtgaccagccacgtgaagcggttcggcgactacctgatcgatgtagaggcgattccggaaccgtatgagatcgaactggcgttggcggcatag

SEQ ID NO: 515056 - DNA, 3336 bp, Stenotrophomonas maltophilia
ttgtttctggatcagctggatcaccgccatcggatcgatgttcggcttggactcgaacacgatgcggccgccgttctcgcccaggtcgagcttgcggatgcccagcgtattggctttcagcttcagctcggcgatggcgaacaggtgcttggctgcatccggcagcaggccgaagcggtcgatcatctccacctgcagttcgcgcagcgcatcgctgtcgcgcgcgctggaaatacgcttgtacagggtcaggcgggtgtgcacgtccggcaggtagtcttccgggatcagcgccggcacatgcagctcgacctcggcgccgcgcacttcctcaccggcatccaggtcaggcagcttgccctgcttgatgctgcgtaccgcgcgttccagcagctcggtatacaggctgaagccgacctcggccatctgcccgctctggtcctcgccaagcagttcaccggcgccgcggatttccagatcgtgggtggccagggtgaagccggcgcccagctcgtccatcgaggcgatcgcttccaggcgcttctcggcgtcgggagtgatcgcgcggcggtcgggggtgatcaggtaggcgtaggcacggtggtgcgaacggccgacgcggccacgcagctggtgcagctgggccaggccgaaacggtcggcacggttgatgatgatggtgttggcgttggggatgtcgatgcccgattcgatgatcgtggtcgacagcagcacgttgaagcgctgcttctggaaatccagcatcaccttttccagttcgcgctcgggcatctgcccgtgggcgatgccgatgcgtgcctccggcaccagctcggacagctcgcgctgcatgcggccgatgctctccacgtcgttgtgcaggaagtacagctggccaccgcgcgccagttcgcgctggaaggcttcgcgcagcagcgcgttgtcccactgggtgatgaaggtctgcaccgccagccggttcggcggtggcgtggcgatgatcgacaggtcacgcaggcaggccatggccatgttcaaggtgcgcgggatcggcgtggcggtcagggtcagcaggtgcacattggcgcgcagcgccttcagcgcttccttctggcgcacgccgaatcgctgctcctcgtcgacgatgaccatgcccaggtccttgaacttcacgtccggctgcagcaggcgatgggtgccgacgatgacgtcgatggtgccagcggccaccttctccagttcggccttgatttccttgctggtcttgaagcgcgacagcacttcgaccttcagcgggtaatcggcgaaacggtcgcggaagttgcggtaatgctgctcggccagcagcgtggtcggcaccagcaccgccacctgcttgccggcactggccgcagcaaatgcagcgcgcaccgccacctcggtcttgccgaagccgacgtcgccgcagaccacgcggtccatcggctggctgctggccaggtcgcgcagggtggcatcgatcgcggccagctggtcgggggtttcctcgaacgggaatccggcggcgaacggctcgtacatcgcgcggtcgacctgcagtgccaggccggcacgcgcctggcggcgggcctggatctccagcagttcggcggccacatcgcgcaccttctcggcggccttgcgcttggccttgctccattgctcgccaccgagcgaatgcagcggtgcggtttccgccgaagcgccggagtagcggctgatcaggtgcagctgggcgaccggtacatacaggcggtcgcccttcgcatattcgatctcgaggaactcgccgggcatgccgccgacgtccatcgcgatcaggccacggtagcggccgacgccatgatcctcgtgcacgatcggcgcaccctcggtcagctcgccgaggtcgcggatgatcgcctccggctcgcggccggcacggcgcgtgcggcgggtgctgccggcgcgctcggggaacagctggcgctcggtcagcaccgcgatgcgcggatcgtccagcgcgaagccatcttccagcggcgccaccgcgatcgcgaagcgcgcatcgctagcgaggaaactgggcaggtcggccaccaccggcggcttcagctcggcggcctgcagcacttccagcagtgcctcgcggcggccgggcgaatcggcggcgatcagtacccggcccggataatggccgaggaaggatttcagcgcatcgccggcgggggcttcgcgtgcggccaccggcagcgggggcagcggctggtcgcccagcgcgtgcgcgtctgcgatgcgtgcgtggtcggcggcccatacctcgatgcgcggggcgtcattcaggcgctcgcgcagcagctccggcgacaggtacagcgccgacggcggcagcagcggccgttccacatcgtggcggcgctgctcataacgctcgccggtctgcgcccagaacgcctcggcggcttcgccggcaccggcacagaccactggcaggctgccgctgggcaggtagtcgaacagggttgcggtgcgctcgaagaacagcggcaggtagtactcgacgccggccggcgccagcccggatttcagatcctggtacagcgcgctgcgccgggtatcgacatcgaagcgctcgcgcagcgtggccagcacgcgggcgatgctggcctcgtccatgggcacttcgcggcccggcagcatgtgcacggcctcgaccttgtccagcgaacgctggctttccggatcgaaggcacggatcgaatcgatgtcctcgtccagcagttccacccgcagcggctcgccggcgcccatcgggaacacgtcgagcaggccaccgcgcacggcgaagtcacccgggtccatcacctgcggcacgttgcggtagccggcgctttccaggcggcgcttctcggcttccagatccaggcgctggccgaccttcaggtcgaagctgccaccaatgacgtagctgcgcggggccagctgctgcagcagggtctgcaccggcacgatcaccaggccacgcttcagcgtgggcaggcggtgcagggcagccaggcgctgcgagatgatgtccggatgcgggctgaagcggtcgtagggcagggtttcccagtccgggaaggcgaccaccggcagggccgggtcaccaccgagcagggtctgcaggtcggcttcgagctggttggcgccgtggttgtcacgggcgatcaccagcagcggagcgtcgtgcacgcgcgctgcctgggccaggtaccaggccagtgcggtgggcgaggcgggggcgcgccaccaggcgcggagctggccggcgcgcggcagcggcggggcggggtatga

SEQ ID NO: 515057 - DNA, 519 bp, Stenotrophomonas maltophilia
atggcaaccaagaaagctgcgaagaagaagcccgccgccaagaaagcggtgaagaaggtcgcgaagaaggccgctgccaagaaggcagtgaagaaggtcgcgaagaaggcgactgccaagaaggcagtgaagaaggcggcgaagaaggtcgccaagaagaccacggcgaagaaggcagtgaagaaggcggcgaagaaggtcgccaagaagtccactgccaagaaggccgtcaagaagaccgcgaagaaggcggccaagaaggccaccaagaaggccaccaagaagactgccaagaaggctacggcccgcaagccggccaagaaggtcgcaaagaaggcgactgccaagaaggccgtcaagaagaccgccaagaaggcagtaaagaagaccgcgaagaaggctaccaagaaggctgccccgaagaaggcagcgaagaaggttgccaagcgcaagccggccgcccgcaagaagaaggccgctccggtcgctctgccggcaaccccggcgccgctgatctaa

SEQ ID NO: 515058 - DNA, 525 bp, Stenotrophomonas maltophilia
atgcgcgagaaggatttagcggacctacagagctttctgacagagcttcaggcggagactgatcgtggcctcgcgctggtgggcctggcgctcctagacgagaaactgctggaaacgctgcaagccttcttcgtggatggcaagtcctctacgcggatgcttaccgaccctaacgcacctctcggaacgctatctgctcggatcgaggcatgcgccgcgctcgggctaataactcccgatgagcatcaggagattggcctgctacgtcgcattcggaatgaatttgcccacaagaggcatggcttggacttgaactctcccaaagttgcgggtctttgtacgagcctcaaatccgatctccctatggacgatgcgaggtttgcgagcaacagatttcgcttcatcaattccacggtgcttctcacgcttagcctgttctatcgggccgaatgggtagctaaagaggaaagggcaccgaagatttggggtgatcccgagatgagtgagtggcggagtaacaactag

SEQ ID NO: 515059 - DNA, 687 bp, Stenotrophomonas maltophilia
atgagaccagtgagacgaggcgcagcaccgaaggtatacgcgagataccaggacgctatcggcgatctagaagactgttttgggagctactgtagctactgcgagcgccgcttcccagcgctattggctgtggagcatgtttcaccaaagcgtttggatgcagcacgcgaaacagactggacaaatttcctccttggttgcgtcaattgcaactcaacaaagggtagcacccctacaaatgattgcgactttttgtggccggacaaggacaacaccttaaaagccattgagtataaagccggaggcatggtagttccatcgcccgcgctgagtccgcatgtccatgccaagacctcagccttaattgaactggtaggacttgaccgacacccgggccaaacccctgacaagcgccctagcgatagggacaagcgcttcgagcagcgggagagggtgtggcagctcgccatacgcatgcaagcaatgcttgcgcgcaacgacaatagtgactttcgcgaaacaatcgctgagttggcggtggggcatggattcttcagtgtgtggatctctgtatttcttgccgacgccgacatgtgctcacgattgtttaatgcccacgtcggaactgaaagagactgcttcgaaagtgactggacactcagaaataggcctggcggccatatctag

SEQ ID NO: 515060 - DNA, 1476 bp, Stenotrophomonas maltophilia
atgcacctggacagcttgacactgatcggcgttcgtcaattcaaacgccagaccttctattttcgaccggggtttaatctgctcgttggcgaaaacggggctggaaagaccaccattctgcgtggattgcttgctgccatggcaagttcgaggcagcgcgggtcaagtttcaacctccaagatagtgatattggatttggtgcgcgccgcgcggaagttagcgccgttgtgcgtagtggcaacgaattcaaggagttcagtttctacaaggagttatggaaacccgccgagcgcaccaaagatcgaaagagcgccccgctcgtccttctgtactcatcgagcgaatccatatgctccgcgcttaaggcgaagcgagggcggctagttcgggagctcgtcaacgacccatcgcgaggtagtgaagagtttctttatgccgccgaggaaagggttcgccagagaacggcagtagataggtccaagaaatttggaaacagtcggtcggtgagggactttgttggaaaagtactctcaactttttcccccggcatgggtgacttctactggcgctttgaaccctatgactgttcacttgtagccaatgaaggctctgggaagcgcccgcgctttgaggccgaagtgcgaactctcgcgcgcgatattgcgatgcgttattttcagcagcgattaatacgaagggggcggaactacagttggcccgaccaaccgaaaatagttctcgcgccagatttccatgagctcgacctcggtcaacgaggcatacccagcttgaaatcgatatggcagaacgctgatatgccgtcggaggccgctcgacggtacttgatgagttgctccctggaagtgaagctcgctccaagaataatgattagacgaagaattggagcacttccattgagtcagctttccgacggggagcagaggcttttctcgttgttcgttgacatcgcccggcagttatctatcaggaacgaaggatctccgcttggcgagggcgaagggatcgtgcttatcgacgaaatagatgttcaccttcacccgaagtggcagcgtaagattgtgccggcactagaagatctattttccggctgccagttcatcgcaactacacattcaccattcgtaattcaagcgacccagcgcaatcaggtgacatctattgaccctgcatctgccggaatattcttgcacggtggcgagagcatcgaagatattgctgaaaatattcagggaatcgatcagcctcagcgcagcgcccgatcagagacactaagcaaagcggccgagaagtacttttcgcttcttcagatacacgcagtcacaccgacacaagtgagaatggaggatctacagttagccgagctgcgataccgggaagccagcgagccatttacgtcggacccagctgtcagcgcccttcttaaggtgatgaagctcgagaggcaagcgccatga

SEQ ID NO: 515061 - DNA, 12537 bp, Stenotrophomonas maltophilia
atgccatcgatcaacaacgagcttgaagccgttctgcagagcctccgtcagaagggagggcagttctccaaggccgagcagaccattaggcggacaatcgagagttcacccgaactcatgattcgcttgaacgtatccgccaagaatggaacgctgaagggaatcgaactgcttccctccggtgcgacagagggagggcactacagcgccgggtccggagtcatccgtataagtcgcgatcggttcgttgctggaggtgaagctgcgttggacgcgctggcattcgtgctcggccatgaaaccgcgcatagcatctatcaagtcgagaacgccaaagcgctcgaaactttccgccagcaggtatacgcactctcggtcgtgaagggtgtcagagactacacgcccatcctggctgcctacctcaaggctactcgcgaaaacgaagcggttgcgatgatcggcggatggaacgcagtctggggacgagccgtactcaattccagcaatggcattgaccagcagtcgttcttggccaggatgtatcaggcgatgccaccgggatgcgtcatcaaggagcccaatggtagttacaagctcgcacagggcatcaccatgcgcggcaactactccattgagtccagcaggaattcgccgaacatcgagggattcggaatctgctactacgacggtaccggtgcggggctcggccaatccggggggctcgattaccggaactactacttgggtccccaattggagtacatcatcgaagccgagctgcagatgcagcggctgatgccggcgggaaaccagcctggcgacgttcggattgatcttgaggcgataggtggcaacgaggcggtccttgaagcagacggcctgtacttcagcggaagagatagccagttcatattctctgatggccgagggccattgcgggtcttcaatagaaagggtgatgcttcgcagaagccgcgaagcccttcacagatacagctccccgttgacagtgaaaccttgcaacgaatcaccatgtctgggggtttgggcggggccattggcggggcaatagcctctgcgctgaagatcaacgatccactgtggaaggtgctcgcttcagccacgttgaagacggtaggcaaaaatctgggcgagattgcagccgccggtggaacgaaggtcgtgacccgggcgggcgtcttggatctgctctctgatgttccggacgaatttcgagtaagccttcagggcgccgctgctggcacggtttctgcctatttgacggctgagctgatcagctcgcttggcatcaagggcacgctgggagaggtcggacagagcgttgccgcaagctcactcagccagatcattgagaatgcgatcaagattgctgatggcgccacgatcggcatcacagatggcttgtcaaaggggcaggtctttaccgcgatcggtgggtacatcggcgcgcgcctgggcgccagcctcgtccagttcgaaacagtgggtggacagttgggcgctcagatcggctctgctgtgggcgcctatgttggtgccacgatggcacagacgtggagtgccttgctgcaggccgttggcacgacctatgccggacccatcggcgcggctattggcgcgttggttgggtacatattcggaggattgatcggaagtttgttctccagtgggaagccgcgctcctgggcatctgtcacctgggacgaggcgaactcgaccttcaccgtttctggcgttcgtgcccgctcgggcggcgtgagtatcggagcgacgctactggccaatcaggtcgctggcaccatgaatgcggtactggaggtgtcggggagccgggtggcaacgggtgcgacggtggatggcggtacctatggaacgtacggcaagaagtatcgctattggtcggagccttcattcaccacctccaaggccgaggatgtaatttcctacggtacggtgcgggcgttgtccaatctactcgatcggatgattggtggagacatctacatcaagcgtgccatcggaaagaatcttgtcagcctagatgcgccgacaggtttcagtgcgaccaatctgtttggcgacatagccgttgcttccgactacgctcgatatgttgcgtctccatgggaaatcaatactctgattgcgggagcgcctgagagtgggttcgccgcacagtgggccattacgctcgtccgtgtcgaagagctcggactcaaccgccgtgcagcgtctgattggacggggggatttgctgcatggcttgatcaactggcagacggcgctgtagacggtgtcggtctggtcgcctccaacatgacgttggcgctcgatcctgatggaggacgaaagcgtaccttggtcagctggaccggagacgaagttcactcgttgggcgacaccatcgtcaccgcagataaagacaggatcctcggcggaaccggcagcgacagcatcatcgtcaatggtgcattgctgtccagcaccaccggcctgctggtcaacggcaacgcaccttcggccacgcatcgcatcgaaatcgcggctgtcatcgatgccggtgcaggtgacgatctggtccggggtggagacctcggcaacgatctgctcggcggcagcggcaacgataccctggtgggcggcctgctcgatgactggctgtttggcggggacggcaatgacgtgctgttcgccggcaatgtcaccaatgtgaacttcgccatcggtgatgccagcgcacaggcgctggcgatcgctgcgcgtggtggcaacggcaactacctcgacggcggtgccggcgatgatcgcctgtatggcagcaccggttcggactggctggaaggtggcgctggcaacgacctgctggtgggtggcgaagggggggacatcatcgccggtggcgctggcgatgatcggggtgccaatggcgaagcacgcctgttcggtgggggcggcgcggaccagtacctgttccggcttggtgacggccgcgatgtggtctacgacgaagagggcgcagacgccatccgtggcagcggcgacagcttgaatgaccgcctcgcaaagatcgccaatggacagttggcgcgcaactgggccggtggtggcgagtacgaggtcaacggctcggtgaagggtggtgaggacgcgatcgtgttcggcaccggcctgtcgctgcagaacatccagatgcgccgctcctcggccagcggcgccggcaacgacctgatcattgccttggtcagctatgacgccgccggcaacgcgacccacaccggcgatgagctgaccatcaaggactggttcgaatcctcgcatcgcgtggagtggctgcggtttgccgatggcgaggacatccgcatcggcgacatgacctcgtacatcatcggcaccggtggctcggatgtgatcctgggcacctacggcgctgacttcctgtatggcggcgccggcaatgacgagatccgaggcctggccggcaatgacttcggcaatggtggctcgggcgacgatttcgttgctggcgatggcgaccaggactgggtgatgggcggctccggcaacgaccaggtgctgggcggcgcaggcaatgacacggtgtttggcgatgatggcaatgaccgtgtgtatggcggtacgggttcggacctggtggtcggcggccgtggcaacgacgaagtggtgggcggtgaaggcgatgacgtcttccgctaccagcgcggcgatggcgacgacattgtcatggacgactatgtcgacaactgggatctggtctgggagaagggcgcctacgtcaatggctatgtacgcaatgccgatggcaccgtcagcaaggacggcgtggtctatttcgacggttccacctggatcagccacaacgactggaacgacgaggcgcaggtgctgcgccggcacaagggagcgctcaatggcctgattgcgcgcaatgcgggtgttgattcgctggagtttggcgtcggcatcgacatccaggatgtgatgctgcagcgagatggcaatgacctgcgcctggtgatcggccgcgatggcgagaaggagcgcctctcggcgtccagtgaccggatcacgatcaaggactggtacgcactcggtggatcgatcgagaacatggtgtttgccgcgaccggccgccatgcgctcaccgacatgaccctgctcgggggcggcgatggcaatgacacgattgctggaacggctggcaaggactggttgaccggcaacggtggcgatgacgtcatcgacggcggcgcgggcaatgacctgctgatgggcaacgaaggcgacgatacgctgcgtggcggtgcgggtgacgacatcctgtacggcggccagggtgacgatctgctgcacggcggtgccggcgcggacaccctgttcggtggcggtggcgtggacatcgcgtcctacgcgggcagcgcggcggtgcgcgtctacctggaaggcacgttcgccaataccggcgatgccaagggcgatgcctacagcagcatcgaaggcatcgagggcggcgccggcgccgaccgtctcggcggcagtatcggtgcggatgtgctgcgtggtggaggtggtgcggatgcgctgtacggcggtgagggcgacgatgcctatgagtacaacatcggcgacggtagtgatgtcatctatgaaggcgctttctatctggatgaggtgatgtccagctcagggacgttgggatcagcctacacggcgtcctgggagtatctgggccttggcgagacaactgcgggcaacaagcatcagtatcggttgacggtcaaggagatcgcatccggcactgttgtctaccagagcgtggacaaggtggacttcctgtttgacgccccagtggcgaacgcgccagcctccaccacgtggccatcggcgcaggggcagttccgttcgtcgacctggcgaaacgggccaaatgggcaacagatcgtgcgcgaagtgttccaggccaccgacgggggccaggatacgctagtactgggagcagggctaagcctctccaatcttcggttggcgctgagcgggacgacgctccaggtggatgtcttcgccgcacagaacggtacgattaagctcgccaatcacacgaatgcccagcgtcgcgtcgagttcatgcagttgaaggacggactggtgctggatctgcgccagttccgccagctttcccaaggcggcagcgcgagtgacgatgtattgttcgggtccgatggcgcggacacgcttacgggtcttgcaggtcacgacgtgctggcgggtggagatggcaatgacacgctgcggggcggcgacggcgacgacacgctggagggcggtgccggtgccgatatcctcgacggtggcagcgaccgcatcagcctcggccaggcggcggtggcgggtgaagcctatggcgataccgtccgctatgtgacgtccaccgcgtcgctggtgctggacctcgccgcaggcacgctgtcgggcgggcatgccgatggcgataccctggttgcagtcaacggcgtcagcacgttggagaacgtggtgggcagcgacggcttcgccgataccgtcagtggtgattcgcgggccaatcgcctgatcgggctgggcggcaacgactggctggatgggcgtgggggcgatgacgtgctcatcggtggtgacggcaacgacaccctgatgggcggcgacggcaacgatgcgttgtccggcgatgccggcgatgaccgacttgaaggtggcgcgggcaacgatgtgctggccggtggcgcgggtgctgacgagctttacggtgggctgggcgacgaccagatcagcggcgatgtaggcaacgacaaggcctggggcggcgaaggtaatgacaccctggggggccaggacggagacgatcagctctacggcgaggccggcaacgataccctggtgggcggcgcaggcgacgacctgctggatggcgggaccggcaacgacaccctggccggtgaggcaggcaacgacctgctgcggggcggggatggcaatgacacctacctgttcgatcgggagggtggcaacgaccgcatcgaagacgcgctgggcgtcaatcgcatcgtgctgcagaacgtggccaaccacgaggtctggctgcagaaggtgggcaatgatctgctggtcagcgtgatcggaggcagcacccggatcaccatcgcgggctactacaccggcgccagccggatcaccgaaatcgcgaccggtgcaggctcgctgttcctcgcccacgccgagccgctgcttgcggcaatggcggcagagtcggggtccgtgccggctgggatgtcctcaagcttgcagggcctgctcggcagctactggcagaactcgagcaagccggcaccgctggtcgaaacgcagtacctggccaccgatgaggacgtaccgctcagtggcagcgtcaatgccgtcgaccatgatgggaacatcaccggatacacggtaatcactgcacccggcatggggaccgtcgcgctcaatgcagccaccggcgcctgggtctacacgccggcggcggaccgccacggcaacgatcgtttcgtggtccgggtcaccgatgccgacggcaataccgccgaccagatcgtcgatctggtggtgcgctcggtcaacgacgcgcccagcgacatcctcgcacccggaccgctggccgtggacgagaacgctgccaacaacctgtcgctgggccgcttcggccatgtcgatcgcgacggcgcggaagatacggccactttcaccctgatcaatgatggcggcgggcgcttcaagatcaccgccgatggcacgctgagcgttcgtgatggcaccaagcttgactatgaaagcgccaccgcgcacaccatccgggtgcgcgtgaccgacggtgccggcgcgtggttcgagaaggacttcaagatcgacgtgcgcaacgtcaacgaggcgccgttcacgccgacgcggccaccgaacaccgcgcccgtactggccggtgaaaagacgggcgccggtacggtggtgggcaccttcgtgatcggggaccccgacaagagcacgccgaccctgcagctggtgaccaacccgggcggtctgctggaggtggtgggtaaccaggtacgcgtgcgtgcgggcgttgcgatcgacttcgagacgctggccgccgcccagggcgcaaccttggtcgatctggatggcgacggcatcaaggaggtgttgctgaccgccagcgtgagggcgtacgacggcagccttgcatctgcatcgacgctcagcttcacctatgccatcgaagacgagaatgaagcgccgacagcggtggtgttcgtggccaccaccaccagcttcagcgaaaccgatcgggttcccaccggaactgcgctgccggcgatcctgctcggtacgctgtcggccaccgatccagacaccacggcaggcagtgatttcgccacgatggtgtacagcgtgtccgacagccgcttcgagatcatcaacggcaaccagctgcgcctgaaggccggtgcgatcgttgactatgaggcgggaagcaacgtcacagtgacggtcaccgcgaccgatcgcggcggcgccgggttgagcgtcagcaagcagctggtcttcaccgtggtcaaccgcgatgactacctgtacggcactgccgctggagaaacgctggtcggccaggccaaccgggacgtgatccaggggctcggcggcaacgacatcatcaacggcggcggtggcaacgacgacctgtacggcggcgatggcgatgacaatctgcgcggtgaggctggcgacgacaaactgtggggcgagctgggtcgcgacacgctgtacggtggcgcaggcgtcgacgaactgcgtggcggtgatggcgatgacaacttgtatggcgaagacggtgatgatcgtctgtacggcgacgccggcaatgacatcctcgatggcggtgccggcaatgacctgctggaagggggcatcggcaatgacacgctgcgcggcggcgtcggcaacgacatcctgcgcggtggtgatggcgacgatatcctcgatggcggtgccggtgccgacaccctgtccggaggcgccggtgtcgatacgttgacctacgccacggcgacggcgggcatcgtgctgaacctggcgacgggaacccatggcggcgcggccgccggcgatgtgctggaagatgcgttcgagcgcgtgatcggcagtgggttcgacgacgtcatcactggtggcgcgggggatgattacatcgagggtggcgcaggcaacgacaagctctacggcggcgctggcaacgacacgctgtatggcggtgatggtgacgacctgctcgatgcgcaggccggcaatgacaccctgtatggcggcgccggtaacgacatcctgattggtggcgatgatagcgacgtctacttgatcgaccgcaactccggtgccgacgaaatccgtaactacgactccagtggcgacgatatcgacgtcatcggctatcgcgacatcagccgcaatgacctgtggttcagccgtaccggcgatgacctggtgatctcggtgatcggcaccagcgtggtgaccacgatcaagggctggtacacgaccaccaatgccaatgatcgcgccaactacaagattgatttcttcctggccggcgagcacgccagcagcacgatcaatgcagaggcactggtcgcgctgatggccggtcgcaccaagccggccacggtcgcggcctatcaggcattgcatgcggacggcacgttcgagaaccagtggcggcactactgggatggcaacggcctgccgtcgatcagcatcgtgccggatcagtcgatcaacgaggatggccaggtcgccctgcagttcaccgtcggtgatgacctgaccccggcatccggggtcaccgtgcgtgccgtggcggtggatgccactgacctcacgacggtggtggcctggatgaatactccgagcatcactgcgggggccaacggcgagcgtacggtgacgctggtgccgaagggcaacgccagcggacgcgttgcgatcaagctgatcgcaaccgatgccggtgggctggtgaccgagcgcgtgttcttcatgaatgtggcgccggtagtggacgcgccggtgattacccgtgccgtgcaggtcggcaagacgctggatggcggaacgctgacgctggacgttcaggctgccctcaccgacaccgacgggtcggaaacgctggagatccgcatctcgaacctgccgaccggactgaccctgaacaagggcacgaacctgggcaacggcgtgtggtcgctgacgccggcgcagctggccggtctggcgctggtcggtccggccacgtggtcggccgacctgaccggcactgcggcgctgacggtgaccgccatcgccaaggagaccgcgacgggcaagaccagcagcaagacgcagaccctgtcggtcaccatcaatgcgcgtccgaccgacatcaccgtggaccgtgcgctgagcacagtcgagtcgacctcggatgcaccggtggccaatggcaccgtgctgggcaacttcgcacgggtggacgcggacaatgacagcttcaccttcagcctgaccaacaacgcaggcggacgctttgcgatttccgcggccggcgtgctgacggtggccaatgccagcctgctcgactacgaggccaacacctcgcaccagatcgtggtgcgggtgaccgactcgggcgggttgacccgcgacaagacgttcaccgtggcggtgaccaacgttgatgaggcgccggctacgccgaccatctccagccaaccggtggcaatcgcggccgagaatgcggcgctgggcggcgttgtgatcgccaaccttgcctccagtggcggcaatggcagctacagctatgtgctggagggcgacgcgcgcggctggttcaccctggtcggcaaccagctgaagttccgcgatggcctggtgctggatttcgaggcgctgaaggccgctggcatgaccctgagcgatgctgacagcgatggccgacaggaggtggtgtactcggtatcggtgaaggctgtgtcgggtgggctgacctcggcgggggcgcgcaccatcaccgtgcgccttgaagacgtcaacgatacgccgcatggcatcaccgtcgatcgcacgctgagcatcgcggaaaacactgccaacggcgccgaggtcggtaagttcagtggccaggaccaggacgtgaccgacggcctgaccttcaccctggtcaacaatgctggcggccgctttgccatcaccgcggctggtgtactgagcgtcgccaatggtgggctactggactacgaggccgccacttcgcatgcaatcacggtgagggtgaccgacacccacggcgcaacccgcgaccaggtgttccaagtgggcgtgtccaacgtcaacgaagcaccacgaacgccggacgtcgtgcagcatgtggcgctcacctccgagaacaccggcgtgtccgggcaggtggtagccacgctgtcgtcgtctgatccggacgggaccgcaccctcgtaccagatcatcaacgatccgtttgcctggttcgccatttccggcaaccagctcaagtacaacgtcagcagcttcgatttcgaagcggttgcaccgtacctgcagttgatcgacggcgatggcgatggccagctggaggcgtattacaacgtcaccgttcgtgcgacggatggagcgctggtgtcgggcaatcgtgaaatcacggtgcgcatcgaagacgtcaacgaagcgccgacaacctggggccagagcgtgacgctggccgaatcggcgccgggcgcggggcagaccgtattccagttcaccaactggtccgacccggacagccagtggtacaaccgcgaccaccggtttgccatcacaggtggtgccagcaatttgttcggcatcaacgccaccacgggccagattgcgctgcacgggcagctggattatgagaccgcgcagagccaccagatacaggtgacggtcaccgatcgtggtggcctttccagcagcacctgggtgacgatcaatgtgcagaacgtcaatgagcggccgacggtcgtccagacgcaggacagcaactacgtgtacgtgctctggggaagtgaccaggaggacatcttcagccgtctggtgatcaccagcgcggtggagctggtgagtactactggccagtactgggacacctataccaacgagacatcgttctttgactatgggaccacgtcgaaggccatttccggtgatggtttcctgaacggttactactacaacggcacgcttgccacgcggatcgtgaatcgtggaaaccggcgtcaggtgaatgacggaaactggggcgatcctcgcggaagcggcgcgggctactaccaggagacctactacgacacctactatgaaatcgtcatccagagcgtggacagcgctggcctctggagtgatccgctgaagtttgtcgtcaacgagttcggcgcacgcctgggcccggtcgtgcttgacctggatggcgacggcgtggagaccgtgggttgggcacagagcgccacgcggttcgacatggacggtgatggcgtgcgtgacttgaccggttgggtcggcccgcatgacggcctgctggtgctcgaccgcaaccgcaacggcacgatcgattccggcgccgaaatctcgttcacgatggatctggagggggcccattccgaccttgaaggtctggctgcctatgacagcaatggtgatcggcgtctggatgccaatgacgcccgcttcggagagttccaggtctggcgtgacgccaaccgcgatggcatcagccaggcgggtgagctgttgacgttgcagcaggccggcgtggcgtcgatcaacctcgatgcgcgccgtaccgggcagatgcccggtgcggcgccggacaacaccacctatgccaacggtcagtacacccgtaccgatggcacccaagcggccctgtcggacatgttcttcgctttcggcgagcgcgatgaggggggcgacggtgacggcctgaacctgaatgctggcgccggcaagggcggacgtgacctgggtagcggtgatgccacctccggccgggtcaaccgccgaggcggggatccacgcttcacgcctgcaactgaactgccgcaggccccggtggcgcaagccgtgacggaactgggggatcgtttcggtggcgttgagcccaccgccgccgagcggatgcagcaatcggctcggtcggaacagcgtgcccccatcgacgaaagcattccgtccggcccggcaacacagcgctcagccttgcatgacaatctggcgctggcacagaagaaacggttccagatgatcgaagcgatgtccacgttcgacgctcagccctatgcccagggcatcagcacggcggcgcgcgatccggccaccatggaactgttgaccgccattcccgactataggatttcccgttcatga

SEQ ID NO: 515062 - DNA, 864 bp, Stenotrophomonas maltophilia
atgcgttacgaagaagtgatgaccgcactggcgcgcaggttactcgtgcggagcatggtcgagaaagggctgagcgagaggcgcgcgttggtggttgcacgcatgagcgccagcgcgctgtgttacgaacccaggccggtccacaacgttgaactgcgcgagcagatcgctgcactggcacaccggcctcgacgttacggcgtgggcatgatccatctgaaattgcgacagaaggggcttattgtgaactacaagcgcgtggagcgcccgtatcaggaagcgggtcggcaggtgcgtcgcaggaagcgcaagaaggtgcctgtcggtcagcgtcagcccttgccgcgcccgtccgccgccaatcaggtgtggtcgatggattttgtgttcgaccgcactccggaaggccgagcaatcaagtgcctgactatcgttgacgatgccccccccaaggccgtggccatcgaggtggaacgggccatttctgggcagggcattgccagagtgctggatagattggccgttcagcgcggcttgccgcgagtgatcaggaccgacaacggcaggaagttttgcggtaaagcgatggtggcatgggctcacgagaagggaatttccctgcgcctgatcgagccgggcaagccgaaccaaaacgcttacgttgagttcttcaacggacggctgcgcgatgaatgtctgaacgagcattggttcccgacgttgctccatgccaggaccagtatcgaaagctggcagcgtgactacaacgacgaaaggcctaaacgagcacttggtggactgacgcccgcccagtacgccgcccagttggctggcaagaaggataagatcagcaccggactctaa

SEQ ID NO: 515063 - DNA, 1233 bp, Stenotrophomonas maltophilia
atgcacctactctcatcacacaatcgctccgaattcctagcatgcccacagctagttcgtttcgagtacgccaagggagacgagaaattcgagcccacctttctcatcaagggcagcactctccttctaaagtacatagtacttggtgtacctatgcagcttgccttcgccatgcacggcgaccgtcttctttatgcattgagggtatgcgacgacggtgacagtggaggcattctttggtcggttatggagcgtaccgaggaattgaatgggattcgtggcttggcacgcggcgagccattggtggcatttctgttcaacgaacttgctgtgaacgttgcttggaaaagtcttcctacacccggcgcgttggatcgtctttcaatgtgggcagatagcgccgaactgggccaggttgaccatgcgatgatgaagtctacgatagaaccgttgatagaccgacttcatcaatctgacctaagcaacggcgagtggctgctgttagagattggcggagaatccggttggaatgccctcgataatcacttcatcactgcggacgctgcatccagcctaattgatctgttcgacgaaaacgaaggaaatcagcaagagcaacttggaatctggcttaccgacaatcttcaccctttgggcatccattatagcccacaaattcccaaggggagcggaacgcgcgaattgacagacatactgtttagccatgaatttggcgcagtcttgatcgaatccaagacgctttccgttttagcacgcgaacgtctaccggacagggcaaagctaaagcgcgatatttccgcccatatcggcaaggcattcgctcaattgcgtggcgccatacgggcacttaaatccggcgtcccggcgacaagcccgaaaggcgatacgctgacgatcgagagagagaaacctgctcacgctatcgtcctcatccccgatttggaactagtcgcggatcacccagcctacggcatcgagttcatacgcgatttcatgggcgccacgggggccattccgcacctactggatatttcagagttgcttcgcgttgtgcaagctgccgaaataatcgccaagcgaggcaccacaaccaccccaatgatggcgttcgactactatcttatggagagagctaacatggcacttgctgctggcacactttgtatcgaagtgttgttgcgcctcaccgacgacgaaggggcaccagaatga

SEQ ID NO: 515064 - DNA, 1359 bp, Stenotrophomonas maltophilia
atgtatccccgtgtaaactcggattacatgggagaaacgcagactcaactgggggaaggaatgcatcaggcgctaacaacaatcaagcagcacttggagaaggtcattgcccaagtgcaatctgtcgttccgaacgatgaaccgtttgggaatgcgcataacaactggagctttcccggtctcacacgagccgagctaattgaagagacccaatccattgttgacctgatcgaggatcaaggcggcgacgaagttggtgaccacgaagcacggctacaggactacgctcgccgacttcaacacctccagcaacatactgtggcccagctttggggaaacgctgggcaagccgtgccagcgtatcttttcacccttcaagggcttcgcaaggcactgacgcctgtactgaccaatgacggtcatgccgacgctgtggtcaagttgaagaagttggccagccagcttcgcagcatggaggcacgactcaatgggctggagcctcgtaccgcttcgctcaatacaatggtcgaacgtatcgagcaggcgtacaacgcggcggatcaactgcctacagacctagagtcattgtctgaggcaaggcagaaaatcgctgacctcgccaaggatgcgacgagggatcaaggtgatgtatcccgtatccgcgaagcggccaatgagcttgataaacaactgaaaaagagcgctgacgacgcgaaggcagtgcttgagcgttgcgaaactgcttactccgctgcaaccagcgttggactcgctgcggcgttcagtgagcggtcaaacgcgctatcaaaatccatgtggttctgggttgccggactagtcggggccttggctgctggcagctatttcggctcaggtcaactgcataccctttcagaactcttcaaggttccgagtgcatccacttctgtgatcgttctcaacctgctgctatctgtgttgtcggtagccgctcccgtgtggtttgcgtggctcgcaactaagcagatcgggcagcgttttcggcttgccgaagactacgcattcaaagcatcaatctcgcgcgcctatgaagggttccgccgtgaggcggcgcgattcgacaaggacatggaggccaagctgcttacgtccgcactgacacggcttgacgaactgccactccgtttggtggagacagatagtcacggaagcccttggcatgaattggcctcatcggatgtggtaaagcaggctatgaaagccgtgcccggcttcgcggagcaggtgaaggacttggcaagcaaggcaattgttgctgtcactcctgcaaaagctcaatcgaagtccaagccaaaggtagatcctgagcaggacgagtaa

SEQ ID NO: 515065 - DNA, 831 bp, Stenotrophomonas maltophilia
atgtaccgttttgatccaaacaaaaatccgtttgtggaagacctgctgtacctgctgggcccgccggtgcgccgactcccctattggtggcacccttcaggtccagtggagggccgattctctcctggccagttccgtgcgcttgcacggattttcctgtcgcgcttgtactgcgtggatcagggcggctacctggaaaacccgcatgtacggggtaacggccccgtgcgctgcagtgtccgtgtggtgctggatggcgaagacggtgtgctgcggcagatgctcgggtcgatacgccgtgaacagaggtctgatcgtgtgccggatgatgcgcgagtgattctggtgcatgtgggcttcaacggcgtgaccgagctcttcaacggccggcgagaggtgcttgtccgcggcgtcagtgagttgtttggcgacaacgatcccgatggtgacgttgatcccggaccgtacctgtggcccctcggtgcgtggatgcacggtgcaatggattcaatcgtggacccagaaggacgtgttcctccgctcgatggccctgcggcgaggcgcgcctattgggacgatgccgacgctcgggagggcggcgccttgtcgccctattcgtatgatcctccgcgaaccaacgcagatggccggcgcgaccgcggagattccggtggcggttccggaggcgggggagacggtgaaggaccagatggccctgatgatcgcgatggaccagggccggggcgtggtggcgtgatggaagtgcttgatcacccggttctgttttcagccgatccgcagttgttggccgatatcctggagaacctgtga

SEQ ID NO: 515066 - DNA, 1074 bp, Stenotrophomonas maltophilia
gtgttagacacctcgagcatcatagagttcgtcaaaagaaataagctaagtcccgaagactacgctgaagacaactccttaatatcgacatttcaaatatctattgccgagttcatttcaggcggatattttaacggattcgacgaagaagccaccaccggcggccttctcggagcgtttggagccacggccccttggtgcagcgccctttacggaatcaatccgaacttcggatggatacgatatcccaagtcaggaagccccaccatatcggagtcagccacaggctcggatttcgcgataatcttgaaatcgaatgatacaactgccaggctagccgtattccaagccaaaagagttgatgagtcgaaaaacacttttcagatccaccagatctccccctccggcgctgacgaagaaagcattccagagccgcaatttcttaggctcagagactacgggcgagaaatccttgatacgctagggaggaacgatatcaccctaccaaaaatggattggattcactaccttgcatatcgaaacagctcaatcaactgcgtccccatttctgatttaccagacatagatttgatatatcaatcaagacgcctggatgctgctaaagcctacagaatcgcatacgaagaggaagcaaaagcaatccgtaagacgaaaggcgatccatcaaaacttctgaacagcgcatttcggacatccctaatgcgccgtcaatggtcagaccatggaattaaggggatttcaacaacagagaacaccgtgcatctcgcgaccctaatgacaatcggtgccagcagaaaggtgtcagaacccgctgggtggctcgaggtctccgcatccgaggaggccagaacgatagttaaagcaattcgggcccagatggatgtctacgaatcgattggcgtcgctggccccacgcccactcttgaggatgcgttcacgaactggtcgaacgccagggatagtagaaggaccagtttgaaagccgacgttgtgtcgcaagtaacgtctgagcttgcaaattctaataattcatcccggcgactgcgaccttga

SEQ ID NO: 515067 - DNA, 462 bp, Stenotrophomonas maltophilia
atgaccacgcgttctttcgcccatgttggttgcgctacggtcctgctgggaggcgtcggcctgttgttcgtgggcggcggcctagaggcacgccagcagggcgccccgttgggctggctcgccatcgcgggcggcttggccacctgggccgtgttggggtttctctactggatcaacgcccgggcctaccggcgccaggaggaggccaaacggcaaccgtatgccccgtccttgcccaagcggggtgggttctggaagggcttcttcgtcacttggtcaatcgtggtggctgcccatctggcttcttttctgggcatgggcttcgctgacctactgccacatcctgagcaaagccgagcgatcttcagtctgctcgtcttggcgcttgtgccggcgcacgtggtggtgcctgtcctgggcggggccgtctatggcctggtccggtcaccggcattgcggtaa

SEQ ID NO: 515068 - DNA, 1011 bp, Stenotrophomonas maltophilia
atgtttatctatgtcgatgagtccggcacgttcgctcactcgacgaagagcgacagctggtgcatcgccgcgggctacgttgttccggagattgccaggaaggctgtggaggagacgctaagtctgctcaaacggcaactagggcggggtttccaagatgaggtcaaactgaaagacctgtccgaagcgaacctaaagcgttttttgggggagcttggtcaggttgagggttcgctctttgtctctgcaatcgacttgggtagtcaagacgcagcagcggtgcttgcccatcagagaaaacaggtccaaagcgtcagagccaacaggcaaaaaatgctctacgaagagggtcgtgcttcgatagacgatttgtcgggtagactggagcacttgtcaccacagctatacacgcagatggtgacccagatcgacctgttggatcaggtttttcggatggccacgctctactatgtacaacgcattcccgcaacgctggggagcttcaagtggcgaatggatgagaagaactccgcccgtccattgttcgagcaaacgctgacccacatggcgcctggcctcattcaggccaagtctttgcgggagcccggaatctttgtgaagggcttcgactattctcactttgagaaacgcttcagaaccgcgcccgaagatatccctgcctaccttcaagaggccgctggccacaccatcaagtcagcggtgaacttgggagcgatcatgcgagactctaagtttgtccgatcgcatgacgttcccggtgtgcaagtcgccgatctcttggcgtcagcatggcgtaggttgctgagaggggggttcgaggacaacgacggtgtcgcgcaccttctgggccgtctgacggttcagcggccgagaccgaacccatccattcacttgatgtctctaggcgctgggcgtttggccgaaggggcggtttatcgtgccgccttgattgctggaaagagcgcaaagccaatgctgcgcggactctga

SEQ ID NO: 515069 - DNA, 171 bp, Stenotrophomonas maltophilia
atgatcacaccggcctcctcattgagcccgtttcaggcccacgtcgcccaggccgaacttgagcgtggactcctcgcccagagcgcgacagacaagtgcctgctcatgggcgaagaagtgggaggtctgttcaaggccatgcggaaaagttcgagagtgtcacctgcttag

SEQ ID NO: 515070 - DNA, 315 bp, Stenotrophomonas maltophilia
atgcggaccaatcacttccatgacaggatccagcgcgctacgcagcagctcgcacagctccaagcgcgcgagctgttagcaacccagcgccgcgaatcaaaagccaaagaacaagccaaacgcgatgaagccagacggcgcgctcgcatcggcgagctggcgttcctggcgagggcagaagcgcttgaagatgcagagctggtgggggcacttcggatgcatcttcagaatcgaaacaaactccgggaacaagcatctgacttgggggcagcctggctgctagccatctcattgggcactgaagcttccacttga

SEQ ID NO: 515071 - DNA, 618 bp, Stenotrophomonas maltophilia
atgcagaggtatggctgccatggatacgccaggaacaatcggcgcatcccatgcaacggagaatccactggaaatacccaccccaaaacaagaatttttcaaaccactgaattcaaccctccgcttccgcggattcaagaacttcaccttgtcatcacaaatcgagccaccagaaccctaaaagcccaggcccgcaccacggcgaacaaatcgcaccaaaaatttgcccaacaacaatcaatccagaatttaatttttaaaatcacatccaaattattatcaataataatgcgatcgatcaaacctgacacctgtcgcaaccacgtcacccgactcaaagaagacagatgtatccatcccatgcagcatcactgcatagcccttgacgacgccatcttcctcctgacttatccccagcacaccaccacgtcgaccaacgtatacagaccggggatcaacgacctccacctccatgtagaaatcaatagcttcattcatttgtgcgtaatccgtccatcaagcgaaatattaagatgcgacccgtcgcgtgtcgcccagcccaactgcgcctttccagttctggacaattgcacatcccactcgaaagcctgcccctga

SEQ ID NO: 515072 - DNA, 1062 bp, Stenotrophomonas maltophilia
ttgaagaagactcgtcaatggaaggcaatccgccgcttgaggcggttagaagctaggagggctagggagtctatcgctgagcgccgattggcaatcaacgagagtcatcgttcgcgcggccttgaagagctcgatttcgtcgcgaaagaccagcttgtagcgccgcaaaagttcagtctcaaagatgatgatcagcatcgtcgactgatagatttccttcagcagttgcgaactgccgtcggaagcggcggaccagtccgagttgattttcgtaagacggagatgatgtactcggatggaacactgctgttcttctccgaacttagcaggctcaaggagatgttcccgcaggtacgtctttcttgcatcccatccaagatcaatcgtgtgaaccaggtgctacagcacctccgcatctttgagctattcggttacgagagcgcagtagtaccttcccggccggacgttgtagcttggcgaacgatttcgtctgctgtctacgattccgacgcggtgggggagctcattgaaaagtatggttcgttgaaagaacggtcctggtacttgttccggagtgccactgaagcaatgggcaatgctgtaaggcacgcatatcttgaggatcggagggatggtctacccgaaccgacaagcaagaaatggtggatgtttgtccgcgaagctgaaggtgagctaactgttgctctctgtgatctcgggattgggatccctcggtcgcttcccatcaagtacccgacggagctcattcacactgccttggctacagttgctggcgtactacgagcgtctacacgtgttggtaaggctgacgcaaatatgatcttagccgcaatggagataaacagaacacgtactggcgtcgccgggcgtggaaaggggcttactgatctacgtaggatcgtggacgaagtttctggaggcagtctggttcttattagtaatcgcggtaggattgtatattcaaatggagttttttcaaaacgcgggttcgagcgttctattaagggaacgcttgtgcattggacaattcctttgagttaa

SEQ ID NO: 515073 - DNA, 327 bp, Stenotrophomonas maltophilia
atgaccgttcccgttgcccgtctttccagcttctacctgttctattacgcggcgctgggcgcgttcactccgtactggagcctgttcctcactgcacgcgggatgagcgtgaccgccatcagcgtgatgatggggctgtggtatgccacacgcgtggttgcacccagtgcctggacctcgctggcagccacctcaccgcggccgatccgactgttgcgcatcggctgcgtactgaccctgatcagcttcgccgcattcctgctgcctctgccgcagccatggatgtatccggcgatgatcgtgtctgcttcttctacaacgcggtga

SEQ ID NO: 515074 - DNA, 621 bp, Stenotrophomonas maltophilia
atgcggggcgtgtccgccgctatgttcaacgcttccaggcagacccggccctgttgctgctgcacagcgacgcatggctggtggacgcgcagggtgcgccgcttggccagcggctgctggaggtactggtggtccatccggccgaggtcgagctggaacgctcgggccttgcgatcgacgcgatcctgctgcgcaacttcatcaccggtgccacctgcgcgctgcgccgcgggctgctggccggatcgctgccggtcccgccgggctggagccacgacgaatggctggcggtccacgcatcgctgcgtggaggattggacatgctggccgaaccgaccatcgactaccggcagcatggcaacaaccagatcggtgccagtcgccgcggtttcctgcaacgcctgcgccatctcgatctgttcgattcacaggcgcgccagcgcacggccgggcgcctgctggccctggccgatctgctggggcagcgcggcgtggtggtggcgccggagcgcttccagggacttcacgcgctcgcctggcgcatggcctggtcgcgactgcagctgtatcgccgcgtggatgtgccggcaggctggatcgcccatgatgcgccgcggttga

SEQ ID NO: 515075 - DNA, 363 bp, Stenotrophomonas maltophilia; identical to SEQ ID NO: 498918

SEQ ID NO: 515076 - DNA, 717 bp, Stenotrophomonas maltophilia
atggcgaggaagctccggtgccgccatcacaagcgcgcactcctggacctgcgcaaccgcacgcagcagcggcattggatcgcggaagggatagaagcgcccggtatagaccaggcgcagcacattgtcttcgactcgttcctcatcagccgcgccgggttgcggatcgaaaccctgcgggatgacgtgcagttctgcggtagcgccatgccgctcctcgaaaagccttgcagtcgcggccgatgtcaaaaccactgcagcggattgctggcacaactcgcgctcaagacgcaaggcgcgcgcgtgccaacgccgcgtggtgtaggtagcaagaatcggatcccccaactcagagaccaatgccaccccggtttcgccggcaaatcgcatcgctgccattaccccagccgccggctcatgcgatccgatgatcagatccggcacgcccgcacgcgcgacaagcgcgcgcgcgcgccgcaacgcgcccttcacccaaagcgatcgcgaatccgggaacagcaacagatcggtcattctccggatggaatggatgcacttccccttccagttcagccccttgtgtgcacgaaccggagcactcgcctgcgggctggcgatctgctctgcccgcccctgcttcaaccggacgacgagaccgtcgatgccaccaggattgacccggtgtactgcaacaccatcaagcagttcgaatggtag

SEQ ID NO: 515077 - DNA, 156 bp, Stenotrophomonas maltophilia
atgaccagcgacaatagaattttcatgtcaaagcatgagacgttctcgcaaaatctcatcaccaacaccttcccggtcggcggcgtgactatgggccctcagagggccacgatcttcatcgtggacctgacagaggtgccgctggggttcggctga

SEQ ID NO: 515078 - DNA, 750 bp, Stenotrophomonas maltophilia
atgatccaggtcaaagcactcaatgagcagggtatcgagcgattccgtgcttggctgtcagcaccagctgggcctgctccgtcagaaattctcaaggacgatgcgctgtgtagagaggcgcccggcgagtggtatgtcgacaactcgctgcggtttggtacaacgtacgaaattggcgtctacctggcgagtagtgtgtttggagctgacgccgatcgttttgcaattagagccgatagagggctctgggcgtggctgtctctggcgctgcttccgaatttgctgaagcggggtcgcgggaaggatgggaagccatttgatgttccgcattacattgagactgacgcgcgtcgagcctatcgactgatcgttcgcacggcatgggaactggtccatcttcatggaacgaaagctcgagttgcgctgagctcaccgcggacagcctggggtgatgtggcagaacagatcacggcgcgtcaggagatctacgcccatcctggattctgggaggtggcagagactatgtacttgaagtcagacggaacaccaaaggctggtgttgcaaccatcagaaagaaggaacatcgaaaggacccaaagagcagggtcggattgggcgcggccaggcgactggtaagcagctttggtcagttcgaacgaacctacctgcttcgtgaaatgaatgctgcggagatcttggcgatccttcctgcggagtacgcaggatggagcgccccttctggtgcttga

SEQ ID NO: 515079 - DNA, 783 bp, Stenotrophomonas maltophilia
atgaagcagatatcgcgcagaactaatcctaccggcctcaatgaaatcgatcgccggcacttctcgctaaggctcagcgatgacggcaagtctgatcggaacttctggcttgaacgattcgacttcaaggcggccggcattgcgcccgaagtgctgatcaactgcatcgctacgtcaggatcgtccgagcagtattttgcgctggggacggcatcgaacttcagcagaaccgcccggcccatcaacgaactcgttcgcaacaagccggttcgtttcaggtttgtatttcatatgcctggtgagaaaaggctcatcggctttgcggacggtgtgcggcccatcgatgagtcagggaatctggggggaagccttgttgatattttcccaacggatcttgacggaccagtatgggagctggatcttccttcggccaatgccgaagcctctgccaagccgtgcattctcgttgagcgcagcatctttccagttgcgcaggctgcggtgaaccatcactggtttgtctcgcttgtgatgccggaagtgatgcggagggtggcgctgcgtatcggtgaggatgccggatcgcttgacaatgatgacacctggacagggacatggaaggcttacattgaacagctcgatgtagggccacctccggaagatgaggacgatctcgtggaggagtgggctgcatctgttgtccgcaggtttgcgtccactggacaccttcgccttcagatcgatcgcttgatcagtgaaatgcatggggatgtgaccgaatga

SEQ ID NO: 515080 - DNA, 1908 bp, Stenotrophomonas maltophilia
atggcagcttggcaatttaggactcttaatccaaatgaaaattcgggttcaagcatctcagacgacaatttctcgattgaagagcgcacgaacgttgaaatccttgtccgcgaaacgcttcagaatccgttggacgcccgatcatcggtagacgaccaagtgaaggtcagctaccgcattgttgaagttgaccttgcaggcggtaagctagcgagtgatctgttctctgatctttggttggagcatgcgaaggctgggcagcttctgcagagggcattgccaaggaaagcacgctttctgctgattgaagactttggaacgacaggtctcgaaggagcctacacagattcgtcagtggatggctcgagcgagaactggaatgcattctggttcagagagggcgaaggcgcgaagcacgcgcgcgccaatggtggtgcagggcaagggaagatcacgctatacctcgcaagcgaggtgcgaaccgtcattgcactgaccaagcggaagtcagacggaaaggagctcttgtttggttgcagtcgattcctgcgcaactaccgcttggttggcaagacagagcgttgggcaaaggaagctcgatggggaagcgaggcgaatcccgacaagcaaggcgctccgatcgtcgatagatcgctgatcgaggcgctcaagcatgagctgggactttcccgtcgaagcgaggctggaacaagcttcatcgttcccctgccgcaggagaacctcacagaggacggaattcgtaccgccgtcatcaatgagttcttttttgccatcagtcgcggccgtcttgaagtcaccgtgggtgaagctgttctcaatgagagttcaatagcggaggcttcggccggacttgccgaagccagtcggcagagcacttcgttcagagaatttctaaggatggcggctggaaaaagcaaacggcctgccttggcaactgctaagcctggctggcacaaaggtttcgacgagtcctcatttgaacccacggatctgaccaacctcaaagatgccttcgagctgggggctcccatcgttgtcgatctccccttgtcgatcaagacgaagagaggcgtcgttcaaccgacgacgttccgtgtatttctccagtctgacgaagaactggagcggagtgaggaactattcatcaggcaggatcttgctattgatggcgagaagaagttgaagtcagtccgcgcaacacaacctgtactggcacttaccttcatcgatgaccagaacctgtctgagttcctcgtgtgtgcggaggagccgacacatcgaacctggaatgcccagcgtccgaaggtgaagaatgcctacatgacgcctaacgtcttccttgctgccgtcagaaacgcagctgcgaagctggtgcagctggttgcgcctgttggacagcgagatcagacagcactagccgtctacttcgcggatcctgcgcaggctgtcaaagtcaaaaaggggccaagtggcgacgctggtagcaaggaaaggccgggcgatgtcgagcttgttgaaatcccagctcccaagccaaagcctgtcagcttcaagccggggaaggacggatttacagttcgcgcgcatgcactgccggactcagcctttgtcccgttggaatgccgcgtggaaaccggctatgcaacggtccacggcgatcctttcagactctgggatgcagcagatttctggcttgatgacagcaaaaggttcaggatcgatgctagtggaattgctgacttgactgtcgatggcaacgagctcagattccggatggaaaaggatgatgcatcaattgctgtgcgcgggtttgatgagaatcgacagctcgaagtgcgactgaagtacaaggaggttgctgatgaagcagatatcgcgcagaactaa

SEQ ID NO: 515081 - DNA, 1548 bp, Stenotrophomonas maltophilia
atgttgaagctgttcgatagcgtccttaagggatatcccatcggctctcttctcatttggcaaacagatagaaagagaattactagcttcgatcatatcgggccaaagaaaattgagggtaaagggcctcaatttaaatcttatgtggttgatgggcatcagcgattggctacgcttttcggcgtactgacgcttgaagaaggttatccatcagaccgccaggaacattggcgctggcttattgcatatgatcttaagggaaagtgtttccttcacatgaggccagggctgaaggctgaaattcatcacctgccgctgagaagcattctaagaacttccgactttgctaggcgcactcgagctatcgcctcagatccgaacctcagtgaccgtgttgtcaatgaactcttggatcaagctgattttgtgcagcgtgcgattagagagtacagaattccgatgacaattatgaagtcgggttcaattgatgatgccgtgacaatctttgcgcgggttaatcagcgcggccaggagatgactgccgatcagatgatttccgctcttacttatcaagaggatgagttcggagctttcgatcttgccgagaatattgatgagctgttaggtgggttgcggcgctatgaattcggggatctgccgcgacgagttgtactgcaagttattttggcgatgggagggatggatttcactaggccgtcgtacgataaagttgtcgaaaagacatcgtcgagagaaatgaagcgagcagtgaggaaggctggattcgcggctcgagatgtggcgcgttttatgagaaggaccattggtcttcgcacctccaagttgctaccttactccggtatatttgtgattctcgcagtcttctttgcagctgcaagagcgcatagagtagatgtgagtgaacatcaggtggaagttcttaagcgttggttctgggcaacctctttcaatggttggtttgccggggctaccacgactgatattaggcttgccgcagacgcgatggagagcttcgctgtatctggtaatgaccgagcattgcgtagaatgtcctccggtgtcgtaagaaggattccggcgacctttgatagaagatcggcacgtgtgagggcttcgctattgatgcagattgtagtccatcagccacgacacccaacaacaggtgaaataatagatggtgcttctgttttctctagtgaggaggcagcgaatattccatatttcttcccgaaagaagggcgtccccatttatctagtccagtgaatcgcgttattcttcctcagggattttcgcgaaatgcaagagtttattttgctgatgtgccgcgcgaaattcgtgctcgtgtgatgaggtcgcacctcatttcgccgtcggcttatagagctcttatcgatgaggatgcgaagagttttctcaggctgcgggaggcttctcttgttgaggctgaagcgtcattcttggctggaatggggattcagtttgacgaatcgtcggatccttcggtcgaagagattgacgcggaatag

SEQ ID NO: 515082 - DNA, 1032 bp, Stenotrophomonas maltophilia
atgaatgtcatgatcgatgcggacgttgtagcaaatcggcgttggtccccgattattgaattgattatggagttggctgcaggtgggcggcatgatcttgactatgaaactttagataatctgcgcgaatctggctgggttaaggacggctctagcgatattgttgagctgttagggcacattgaaaaggtccagtctttaaggggattgtctgtcgcaaaagtcatgatccgagcaggagtagtcgattccggcctcattggagctgacggcgagacggtagtctcacccctgagggcgttggagtttctatataccccattccagatcgttttggagaatgaagagttcgatggcgcatttcttctatggatggcgagagcgctgaaacgagatgattttttgagagcgtatcgcctctcaaaggtcgatttccgtcatgcggggggcaagggttcgatagatagatctatccgcctgctgagttctagggtctggggtcgtgcagatcgaaagtactcgcgagaaatgtcgaagtgggcagctgtcatcatcgatagcgattcaaagcatccaggtcatcatcccaatttgtctataatagacaagattagagatagggttgccttctcccatcttttgtctaaaagagctattgaaagttatctgccaaagagttttattattaaaaagtttccggcgctgcggccaaaggtcgaatcgctattttcaatgacctcagaacagcgaaagcactaccatatgaagaatggtatgaaagtggatggggtggttttgagtaaggccgattatcagataagtatgaagccatcccctcaggagaaggcgctattctttagtataaacgaggatcattgggaccttttggcgccgggttttggagcttctttggcggatatttatgtgagtgaagattgtcgcccggataactcaggaattagatctatgattgatcctgatgacgctatggagatggatgaattgtttacatctattatgagggcttgctga

SEQ ID NO: 515083 - DNA, 1269 bp, Stenotrophomonas maltophilia
atgaagttgaccggtatccgttgttcacggtttaagaaattcaaagagccgatcgcactgccaattgcacctctgaccataattattggcaagaacggtagcggaaaaagcgttgtatctcgtcttcctatgcttattgcagggtctgtttcgactactgctggaggacctgtggatttaaatgccggcggaatatggcatgcgagatctctccctgacctagtgttcgagcggactggtcgcccgttcgggctaggtgcaacggtggcgaataacgagcgctccatctcatttgatgttgaactgctttatgtaagcgagacaaaaagcatcgccatcgtcgacctttccttgagcattgatgacgtccaaatcttaaatgtcactctcgaaagctatgaaaatatctatgacgagagcagggtctacgatgtcaatattggcggtaatgcgtatcgaggtgtcataaaatggcagggtttacttcccgatcttagttgcgcggctttcattgaagctgataaagccgaagtcattggagtgattgctcaaattcggggagctattaggcctccttcgtatcttgggccattccgagcggaaatcgctggtcgaggtcgatacccacatcagcggatcctcggtttagggccgaagggtgaaagcacaatcgacttcttggccgatgacaaacttaggaattctggaaaagtttgtgatgcggtggagtcatggtttaaggggacgctcggtggcggtatcgacaccgatgtctcaggtgatgctcccatggtccaggttgcgccagtcgccggcggcataaggctggatttctctgacactggagcgggatattcgcagtctcttcctgtcgtggttcagaatttagcagttcagaacgggtcgctcgactcttcaatgttgatcgtggagcagccagagctccaccttcaccccgcggctcatggtgcgattgctgacctgtacatcgagtctgcgctccacggcggagtttgtttcgtcgaaacgcactcagagcaatttattagcagagtgcgtaggcgaatcgctgagggaaagatatccgaggacagtgtccagcttgtatcaatcgatcacgtggatgatgaaggccttccagcagaaccagtcagaacaattacttttgacaaaagaggtcagccatcatcttggccctacggcgtcttcgaggaagcgttggatgacattagacaattgcgcgctgctgcaagagagcgtggactatga

SEQ ID NO: 515084 - DNA, 1212 bp, Stenotrophomonas maltophilia
atgtccagctatctcttcacctccgagtcggtctccgaaggccatccggacaaggttgccgaccagatctccgatgcggtgctggacgcgatcctgacccaggaccagcgcgcccgcgtggcctgcgagaccatggtcaagaccggcgttgccatcgtggccggtgaaatcaccaccagcgcctggatcgacctggaagccctgacccgcaaggtcatcacggacatcggctatgacagctccgacgtcggcttcgacggcgccacctgcggcgtgctgaacctgatcggcaagcagtcgccgcacatcgcccagggcgtggatcgcaagaagccggaagaaatgggcgctggcgaccagggcctgatgttcggctatgccaccaacgagaccgacagctacatgccggccgcgatccacctgtcgcaccgcctggtcgagcagcaggccaagatccgcaagaagaagaactcgccgctgtcgtggctgcgtccggacgccaagagccaggtcaccctgcgctatgaaaacggcgtggtctcggccatcgacgccgtggtgctgtcgacccagcatgccccgggcatcaagcagaaggacctcatcgaggccgtccgcgaagagatcatcaagccggtgctgccggccaagtggctgcacaagggcaccaagttccacatcaacccgaccggcaagttcgagatcggcggcccggtgggcgactgcggcctgaccggccgcaagatcatcgtcgacacctacggcggctgggcccgtcacggtggtggcgccttctccggcaaggatccgtccaaggtcgatcgttcggcggcctacgcggcccgctacgtcgccaagaacgtggttgccgccggcctggccgaccgttgcgaagtgcaggtctcctacgccatcggcgtggctgagccgacctcgatctcggtcaccaccttcggcaccggcaagatcagcgacgacaagatcgagaagctgatccgcaagcacttcgacctgcgcccgtacggcatcatcaagatgctggacctgatccacccgatgtaccagcagaccgcggcctatggccacttcggccgcaagccgaaggagttcagctacctcaacggcgaaggcgagaccgtcaacgccacggccttctcctgggagaagaccgaccgcgccgccgccctgcgcgccgatgcgaagctgaagtaa

SEQ ID NO: 515085 - DNA, 1263 bp, Stenotrophomonas maltophilia
atgcccgatcccgcactgacgcagcgtctggaaaccctctggcggatggaatcgccggtgttgatcgcgcgcctggcgcggctgctcgggggcgatgtcggccgtgccgaggagctggcccaggacacctggctggccgcgctggagcgctggccggaacagggcatcccggacaaccccggagcctggctgatgaccactgcgcgcaaccgtgccatcgatgtgctgcgccaacaccagcgggtggcgcagcagcatgcgcagtggggcgaggaactgcacccagcggcgctgccggcaccggatgacagccaggcgctggaggatgacctgggtgacgatctgctgcggttgatgttcgtggcctgccatccggtgctgccggccgatgcgcgggtggcactgaccctgcgcctgctcggtggcctgaccaccgtcgagatcgcacgtgcgttcctgcagcccgagccgaccatcgcccagcgcatcgtgcgcgccaagcgcaccttggcgcagaagcaggtgccctatgaggtgccgcgcgcggacgcgatgcccgagcgactggcttcggtgctggaggcgatctacctggtcttcaatgaaggttacgcggccagcgccggcgatgactggatgcgtccggcgctgtgcgaggaggcactgcggctcgcacgcatcctggcgcaccggctgccggtgccgccggtgctgggcctgctggcactgatggaactgcaggcatcgcgtgctgcggcacggaccgacgcgcagggcgcgccggtgctgctggaccagcagaaccgcgcgcgctgggactggctgcagatcgaacgcgggcagcaggtgctggcccgcgcgctggccgccggtggtgctgatgatccctatgtattgcaggcgcgcatcgccgcctgccatgcggctgcgcgtcgggctgaagccaccgactggccacgtatcgcttcgctctatacccagttgctgcgggtgatgccttcgccggttgtcgctttgaatcgggtcgtggcggtgctgcgcagcgagggcgcgttcgctgcgtgggcacaactgcagccgctgctggtggatgcacgcctgcgcgagtacgcgcccctgcaggtggtgcgcgcggagatactacaggcgctggggcgcgacctcgacgcgcgtcaggcttttgccgaagccgccagactcagccagaaccaggcggagcggggcctgctgcgccaacgggccggactgccgccccaggagtga

SEQ ID NO: 515086 - DNA, 1362 bp, Stenotrophomonas maltophilia
atggtgggcggggctctgggtggaagcacgggcgccaacattgccgtgaccggggatcggttcaatcggcagctgcatccggatgaggtgaagtggatccgcttccatgcagaggaattcgcccgcgagcagaagatctcgaaggaagaggcctatcgcatccttcttgtggaagcggctgcgtacgttgactcgaaaatacagtccgacctgagtggagtagaaaacaacactgacgcaattgatttcctgcgcaagaaccagaacaagtacgactggggtaccgcgttcgacagcagcgatcgggacaacttctctaagttcagcgaagagcttgggcgcgaaaccggctatttcaaagacgtctacactgccatctcgggaactgcttacgccgccggatcaaccaaggactggcgctttgagttccaggagccactgcgctactacggcgacgcctcgcgctctcagaagggcgttgccatggtccaggctggcgcagccgctcttggcatcggtgcggcggcggccgttgaattcggtggctggtgcatcctcaatccatacagctgtggcagggctgccagcggggcgatcgatgcggtgatgggtgactacgtgggtggtcactcgcttgcaccagtgctgccagcgttggttgcggcaaaggccgctaccactgcggaacaaacgcttcgactgtcgagcggcgcggtgggtgctgagatcgcggggaatgctgcaaagaagggggggctgcaatccgagcaggtgctgaagccgatgcaggctgccggtgcggatgtggcagaggcaggcgcgaaggccggggcaagcgaacaatcttctctggcaaatctgaatcgtctgagtccgcaggaagaggctgagctactaaagcgacaactgatccaggccgagcggcatgatccatggatcggtacaacgcttccgggggccgaggcgccagtgacggttacggcagaagcaaccgtcggcgggcgaatgctcaaagacaccaatcagaccgcccgacctaccaagctcgctgatgcagaccacccgacgctggtggccgatctccttccgcctggtgcgccaaattccagtatgaagtccgctcatgcggaaattgcggtcatccagcgagcctatgagcaaggacttacaaatgcgcagaaaatgctcattgtggttcgcggtgagggagtttgcagctactgtcaacggagtgacaatttgatcgcagctgcgcaacgctctggtcttagtaagctcgaaataattgacgttgagaggaatacgaagatggtgtggaatagaggtgagaaatccttcttcgaggtgactttgcatgaataa

SEQ ID NO: 515087 - DNA, 915 bp, Stenotrophomonas maltophilia; identical to SEQ ID NO: 498397

SEQ ID NO: 515088 - DNA, 177 bp, Stenotrophomonas maltophilia
atgagcaggtatccctcattcgccgagctggcggagttcgatatgggcctcgcggcactcgttgtgttcgtgtcgctcgtcgtgggcggagccatcgtctccatcgtgattgagcaggcatggctggggcttcgccgcctgtggaagcttcggaaggatcgctccaatggccggtga

SEQ ID NO: 515089 - DNA, 486 bp, Stenotrophomonas maltophilia
atggagcgcgaacgaccggaatacctgccgcctatcgagcgccgccgctggtacttcccatggctgattacaggctttctgaccgtggtgagccttgccaccattggtgtgctgacgcttggccgcactaacagtgcctggagcgagcgctttgaaggcttgcggcgcgctgccgaaaccgtagaacgtccagcggcaacgtccaagcctgcacatgcaccagtcacgcccggacgtgaggcgaccgctgcgcccgctgcgcccgctgtgacggctgcccgtgcacgacccgagcagatggaccgaaacgtgcgctgcatcaacggaatgctgttccgtcgaatcgaaggcggctgggagaatctgccgggttcgcgctgcggggaacagccgaccagcaatgtccagtgcttcgctggaaagccctacagacagatggccgctgacggtggctgggtgctttctccgaacgaccgctgcccgtga

SEQ ID NO: 515090 - DNA, 798 bp, Stenotrophomonas maltophilia
atgttcgaggacttcatcaagggcgtcagggaatacatcaacgacaggttcatgagcccgctcggagcttcgctgaccgtgtcttggtgcgcttggaactacaaggctctgttgattgtcttttccggcgaatccgccattcgaaagatccatctaattcatctggtctatcaggatgccgggtactcatggctccacttggtagccggcccgttaatcactgccgcgttctacatcctcgcatttccgtacccatcaaattgggtctacagctactcgctgcgcagaagaaaggaagcgctcagtctgaagcgcagcattgaagatcaaaccgtacttacccaggaagagtctcgatcaattcgagcgcgctttgaggaaatcgaacgcgaacacacgtcggaggcgcttcgactcaatgggcgtatcgatagtttgaaagatcaactgaaacaggcggcttcggagaacgacgaccttcttagaaggcttgctgagaccggggccaattccacatcggcggaatcgagtcaagaagacggtgacttgaatcaaatcgagctgggcaaagttcaatggcgcgtactggatgcattgggcaggcacggcacagccgtctcgattcgcacgctgtccaccgagctcagattggcggaagcagtcatctggctcgttgcaggcgagctgcaggacattggtctcgtccagcgggaggatgaagacagcgatgctagtgtctccaggcatgcctggcttacatatgatgggctccgcgttttcatgaagagacttgagtaa

SEQ ID NO: 515091 - DNA, 1095 bp, Stenotrophomonas maltophilia
atggacaaaattacgctagagctgaagcagaaagtcgtctatacatttcaacagttggacgccatgtacctcttccgaaacgaagtggttcgggaccatgccaagcgcgcgatcctacgattcttctttatccaagtcgataatctactgaaaataattggtcagctgaagaatcgtcttgtcaaagagggtttattgaaggtagaggcaaagcgcgaactcgaagacgccatcgcggcgctgcgagcgacctacgacaactcgtttgatgtgattcgagacaagttcaccgcgcatgctcagctgttagatcttggccgggccgtcgactggtgggccgcgatcgactattcgacgatcgaaatcctctatgatgaggtcaaggccatcgaagcggccgtaaaggcatctaaggacatgcgctttgtgccgatcggtgcggactaccggccactcaccatcccgtccgcaaacgtgatgtcccccgatgcccagaagtttcatttagatgccggccgattcgggttggttaaccctggcgcggcaggcgggatcttcggcactccagaacaagaaaaggcgcagctggccgtttcgacgctcgacatgcttcggttcgattttgcgctcacttgtctcgtggagaattatgattcgcggtacaaagcatatctgttcgacgccgcttggctcctagcagttattgatgcgtgtgcgttgattgacaccctgttcgagcaaagcacccacgacggtccctcgctactggatcattgggggggcgatgacttccgtggctacatcctgctgaatgagctaaatgccgacagagatgtcgccttcgagaccgatcttcgtgcgatgcgcaacaagatcgccgctcatttggatgcaaacacgccgttcaatgagcttcacaaggacttcgtcgactttgacctgcgaaagttggtcgactatgtgcattggctggcgaacgggtttctcaatgcgtgccgccaggatatcagaaccaagatattcgcggcgcacgggatgccattggagggtgtccttggcctggtccatacgccgcctgccttcgacgacgcatga

SEQ ID NO: 515092 - DNA, 552 bp, Stenotrophomonas maltophilia
gtgggctggcgctgggcggccaccgcgctatgcctcgtagcggccgtggcggcgcccgtcctttggctatcgccggccgtgcccgagcggctggcattccagagcatcgcggatgatcgcttttcgcagctgcgccggcaggcgatggcgttcgtggaggcccggcaaaggcagggcttgcagtttgtcgagacgcagcggggtgcgtcgttgcagattcactgcaaaggcgttccggtgctgtggctggagcggcggccgccgcatctgacgatgcgggtatcgctggatgcggtgcagcgggcgcccgacgttctggcgttgcgggcattgctgcagcggcagttggagcccttggactacatggaacaggtgctggttggcgtgccggaacctgttctgatggatcgggtgttgttggcgatggcgggtgatgtggctgggggtgcgcgatgtgaggggttggtcgtagtcgatcaagctcgactctacggggcggtgggcggcgtgggctcgggttcgtgggtggagccttccagcagggcgacgtag

SEQ ID NO: 515093 - DNA, 732 bp, Stenotrophomonas maltophilia
atggacatgcaggcagggggcggagtcgattcgccggaccagacgaagcagcaggaactgaccttccattggctttaccagcgggtacaagggctggctgagcacagcatctaccccaaggccggccggctggagaggtggtcgttgcgcgtgggcgccctggcggccgccatcggcattctcggcagccagctgcctgatcgatggcttccgcttacggccgcgctgcttctggtcagggtgtgcctggcggtggagatcggaggctttgtcatcggcggatttctcgcggcccgtcgcggaatccgccagttcgtgcagccacggctgtcgcacgcgcaggaaatggacggcgagtttacccagtggcaagcggtgatcgccgagcttcgaggattccccagggtcgagcgtgagcgccgcctcaagtacgtcacccacctgcgcacaagcatgatcgagcgcatggggctgatctacggcggcctgcaacgactcggtccatttccgctgctgatcgctctctacctgcagttccggcagtggaaatggggcgactggagcagcgcctttgacgtcggccagctgggcgcattcctcatctatgcgctcgtactgctctacatcacaggatggctgttgaccgggttgcgcacgcgcctggacacctacgtcgccctgctggaaggctccacccacgaacccgagcccacgccgcccaccgccccgtag

SEQ ID NO: 515094 - DNA, 951 bp, Stenotrophomonas maltophilia
atgagggccttcagttacgaacgcgcgaaatccccggcggaggccgccagggccgtcgccggcaccgagggcgcgaagttcctggcgggaggaaccaacctgctcgacctgatgaagctggaagtcgagacgcccgcgcacctggtcgacgtgcaggacatcggcctggacaggatcgaacctacagacgacggcggcctgcgcatcggcacgctcgtcaccaataccgcgctggcctcgcatgagcgcgtgcgccgcgactacggtgtgctgacccgggcgatcgtggcaggcgcgtccgggcagctgcgcaacaaggccaccaccggcggcaacctgctgcagcgcacccgctgcccgtacttctacgacccccatctgccctgcaacaagcgcctgcccggatcaggctgcggtgcgctcgaagggttctcccggcagatgggcgtgatcggaacctcggacagctgcatcgcgacctatccgggtgacatggcggtggcgctgcgcgtgctggacgcctcgatccagaccgtcaagggcgatggcagcacgcgcagcattccgattgccgagttccatcgttccccgggcgacacgccacagcaggacaacgtgctgcagcgcggtgagctgatcacccacgtcacgctgccggaaccgctgggcggccggcacgtgtaccacaaggtacgtgaccgcgcgtcctatgcgttcgcactggtctcggtcgccgcggtcgtgcagcgtgacggctcggcgcggttcgccttcggtggagtcgcgccgaagccgtggcgcatcgaggcagccgaacccctgctgcgcgacggcgtgaaggcggcaacccggcaggtgttcgccggcgcccgtccgacgcgggagaacgcgttcaagatcgcgctcgccgagcgcaccctcgccgccgtgctggcggaaggagagcgctga

SEQ ID NO: 515095 - DNA, 339 bp, Stenotrophomonas maltophilia
atgtggatgaccatcggcgaacgccgcttcgccatcaccttggccgacaacgaaaccgcaaggactttcgccacgcgatgcccattaacgctggacatggccgagctcaacggcaacgaaaagcacgctgaactctcgcaagcgcttccggccgatgccagtcgccccgggacgatccacagcggcgacctgatgctctatggatcgagtacggtcgtcgtcttctacagaaccttccgctcgtcttacgcctacaccccgctggcgcgcgtggatgatcctgttggcctgggtcaggagctcggtcaaggcagtgtacaggtgactttttcgcaatga

SEQ ID NO: 515096 - DNA, 1215 bp, Stenotrophomonas maltophilia
atgagcatgccggtggatatgccggcggtcgtcgaccaaggcgggggggcggcgcaacctgcacattggggcggggtcttcgccatgaccctgtgcgtgttcgcgctgatcgcgtccgagttcatgcccgtgagcctactgacgccgatggccgccgaccttcgcgtcagcgaaggttgggcgggttacggcattgccatttccggggcgttcgccgtgctcacgagcctgtccatctccacgctggccggcagcatgaaccgcaagaccgtgctgctggcactgaccggcctgatggcattgtcaggcaccgtggtcgcgctggcgacgaactattttgtctatatggccggacgtgcgctgatcggcgtggtgatcggcggcttctggtcgatgtcggcggccaccgcgatgcgcctggtgccgccggaccaggtgccgcgcgccttggccatcttcaatggcggcaacgccctggccacggtcattgccgcgcccttgggcagctacctgggttcggtcatcggctggcgcggggccttcttctgcctggtgccggtggcggcgatggcgctcgtctggcagtggatcagcgtgccagacatggacgtggagccggcaagcaagccggcgaacgtgttccgtctgttcaagcgccgatcggtcgcattgggcatggctgcctgtggtgcgttcttcctggggcagttcgccttgttcacctatgtgcgaccgttcctggaaacagtggtgcgcgtgaacgtatccacgctgtcgctcatcctgctcgggattggtgtggccggcgtcatcggcaccgcaatcatcgggacattcctcaaacaaggtctgtatcgaaccctgattgtcattcccgtcctgatggcggccatcgccctggccctgatccccttcggtaccgggctcggcacctcggccgccctcctggcaatgtggggcctgctcgctacggcggcgcccgtaggttggtggagctggatcgcgcaggccctgccgggggatgccgaggccggcggtggattgatggtggcggtgatccagttggcgattgccttgggctccaccattggcgggatgctgttcgacggcagcggctatcaaggcaccttcgtggtgagtgcagccgtcctccttttgggtgccttcctgaccctgctggcatcgcgctcacaagcgccgcggggcgttgcatga

SEQ ID NO: 515097 - DNA, 963 bp, Stenotrophomonas maltophilia
atgacactgacgcagacctgggacaaggtgttcccgaaaagcgacaaggtcgatcaccgcaaggtgatgttcaagaaccgctatggcatcaccttggcggccgacctgtatcggccgaaaaatgccagtggcaaattggcggcgatcgccgtcggcggcccgttcggcgcggtgaaggaacagtcgtccggcctgtatgcgcaaacgatggccgagcgcggtttcgtcactctggcgttcgacccgtcctatacaggcgaaagcggtggcgagccgcgcaatgtcgcctcgccagacatcaataccgaggatttcagcgccgccgtcgatttcctcggcctgcaacccaacgtcgatcgcgagcgcatcggcatcatcggcatctgcggctggggcggaatggccttgaatgccaccgccgttgacaagcgggtcaaggccgtcgtggccagcaccatgtacgacatgacgcgcgtcatgtccaagggctacaacgaccgcgtgacgccgcagcagcgcacgcagacgctggagcaactgagtcggcagcgctggaaggatgcggaggccggcaagcccgcctaccagccaccctacaacgaactgaagggtggcgaggcgcagttcctggtcgagtaccacgactactaccgcacgaagcgcgggtatcacgcacgctcggtcaattccggcaacgcctggacgatcacgacgccgctgtccttcatgaacatgccgatcctgacctacatcaaggagatttcgccgcgcccgatcctgttcatccacggtgaaaacgcccactcccgctacttcagcgaaaccgcgtacgccgctgcggcgcagccgaaggaactggtgatcgtaccgggcgccaaccacgtcgacctgtacgaccagatggacaagattccgttcgacaggatggcggacttcttcaatcagaacctggcggcgaaatga

SEQ ID NO: 515098 - DNA, 1371 bp, Stenotrophomonas maltophilia
atgatgtcgaacagtgattccgcagagcgccgcatccagtactacgcgttgttcgaacccacagaagtgcttgaggatgggcggtggaacccggaggcgcaggttcttgtcgacgcgattccagtgccaactgctgaagctctggcgggggtggaagggatgccgagatccattgactttctgttgggtagcgtgcctgccggtagtgtcccggtgcagtggcaaagtgatgcggcatggcatctcatcacgctcactggcacgccgaccgaagatgcgattccgatgtccacggctgtcctcggtccgaacgctgaagggcaagatctgaccttattcctgacgatccagaacatgtcctcgcacgacgtttccatcaccggaaagatcggaacgtttcttgctggaaaagaagcagcacctggcaccatcgaagaactgcttgatcggatcgacgcagagtcaattcatggtgttgcgatttacgacgtggggcaggcaagcttcagtgcactagtcgatgagctggagcacccgcacctgttttttgacatcggtcgtccactcggattcaacgcatatacaagaccgatgcttccagcattcgacccgctggtattcgctcccagtgatacatatccgcaaccaatcatcctttcccatctggaccaggatcattggctgttcgctgtacagtccggagctgctgtttgggatccggcagcaggatactggaagacgactccaatctatcgccaagcggctcttgaacgcgtatgggttgtaaggcttccgcttggaattctctacggaggcagccatattcatttcctgctggagctgcacagcctcggcattctgctcgtctggccggaagcatgcgcatccattcaatcgggcgacatttccatctggcagtgcactccttcagttggcgcgccggccacacagcgatacatgaaaaacaacacgtcgctggcactcagggttgattctgcgcattccgccgccgtgctgtgtggtgatgcggactacggctcattcgccccaggagttttcgttggtgtaactgctgtagtcgctccacaccacggcggatgcatccagttcggagcgacaccaaatgtgcggggcccaggtcgcatggtcctctcgacatatgagaatgcctacccgagcgtgccccatgaccaaaccatcgccgatgcgatgaacaacggatggttcgtaactcgcacggatgcaagacatagctgtggccgatgcggcgaggttcatggccacaagtacattccactcgctggaacccagccagaatgtggatgtggagttgtcacttctgcgcagatctgcctgccgcacgtgcaatag

SEQ ID NO: 515099 - DNA, 255 bp, Stenotrophomonas maltophilia
atgaatcacaaattttcctggtccgccctcctcagtctgttgctctgcgccagcgtcgcgcggatctccaacaccctcctgctcgctgcgggtggcaaatttttcgtagcggcaagcgcaggcccgatcgcaagctggggacgccctggatacgggctgctgatcgtcatcgggttcctcgcgctggcgacctggtacttcggcgagcgcgcgaaggccgtgcataaggctctgcccgcccgtttcttcatctga

SEQ ID NO: 515100 - DNA, 1590 bp, Stenotrophomonas maltophilia
atggacagggtgtatcttccctcggaactcaggttcctggacatcgtcaacaatgcaaccgccagcgaaaagacgctggagattcatggccccatctggagagttcccggccaaccgttcaagctggctgccggtcgttccgttatattttcttcgcgcacgggcgacgggctcacgtctcccgcgaagaacgagacgacgttcagtgccaacgtgccgcgatggcagattccatccagcagcgagctgatttccctcattgtgctggctgatgggaagcatgccgctgaactgaccctgccccctgatggcaaggcattcgactcgatcaccgtcattaacgaagcaacgttgccgacccaggtactgggagcaaatacgccattccccggtcagcgcatggatgttgagccgtgggaatcggtccgcgtcgaattcgatcccgtcgcccgtcaatggatgtgggtacatgcgccctacaaaaagaaacccgtaaaagaccacgacctccgcattgcgtcccgtactgtcgtggagctccaggatggtgattgggcgtctccattggtccccccgcgcaagccctatgaccgggaccggatcattctgcgctcgaacgcaacctgggactcgaagaccagggtcaacaacgaggatctccccctgcggcgtggcgacgagtacgagtatgttttcgttgccgagaaggaccgttggcatcaactgcgtcaacccgttcgcaaggttgatacaacctaccagagggaagtccggctgcaggatgagggctatggcgtgatcgaagtgaccgcgccggtgagcggcacgatcacgcccagggtcatccttcccaagccgcggcaggggcttcgggtgattgccgtgggtcatcctgtgaacacgatgaacatcatcgccgatagcctcaatgtctccgtgctcagcaacgagaagattgcgttccgcgtgaacgatcgcggcctttgggagcgtgaaaccacgaccatcgacctggtgcgtgtactcgatatgagctccggggaagtcccgcgcagatgggatgcgttgatgctcatggacgagaacatccggctggccaacgaggcactggagaactcaggcgccacgttccggtacaggctggtcggcaacccgatcgaaggcttcacataccccggcgtggacctcaagcgggtaccggccgatctggctcgcgattccaacgtgcaggcgctggtcaagaaacatcgtgcagacggtatctactatggcggcagcaaccgctggaataccgaggtttgcgattggagccattcttcgtacaccgagaagagcttcgtcattgccacggcgctcacgtgtcccacatctgcgttccgccgccgggcaggcttcgaactgggcgttcccaacaatacgacgccgaagcccgtgcaggtcattggctccggagaccagttcccgttctacccgacaccgcaccggatgctgccggacggccgctgggccttcaatccagggcaggagaaggtgctcgagaacatgaactcaagggcggagtacattggccggttctctgataaatggtga

SEQ ID NO: 515101 - DNA, 1020 bp, Stenotrophomonas maltophilia
atgcgcggtcatcgtgagagctgggtacggcttcctccagtgtcgatcattgccatcctggccggatgcttcctgtcagtgccaaccatggcggcttgctttcgcgatgcctatggacggtccgagttccagatcagggggcctgtacggttggcgccgcggggaatcgcagtgggggctgcgctgtcgccatggctggatacggaccgcatctattcgccagtgtccgacctggtgtgcgacagcgcgagcgacaacgtcgagttcggagtggagggccaggctggcgcggtgggatcctacagcgaagccggtattccctacagcgtctactccaccggcgcggcaggagtggggattgtgatccgcgctcgcccgatttcccatgcaggccgatcgggtggattcgagtctggaagtcttcagtcgctgctggttggaactggcatcaccggaaatctgctgacggtggtgcaggtgaaatttgtacggcttgctggttcgctgtctggtggccagttgatgagattccagatcggccgcttctacgccaggtactcaggcacgcgattcgcctataagcccgcctttcttgagcaggcgtcgctggccatccaggatgagccggcgtgctacgtgaacagccagtcggtctatatgggcgagatctcggtcgggcgattcaagggtctgggttcatcgttgcctccggttccctacacggtgactctgaactgtgacgcaagcgttggccgggtggactatcagatcagctccgtcacgccggtgatggacgaagcagaaggcatcgcagaggtgtccggaggcgcgttgggggttggtatccagttcctcgatgataaaagtgcaccgatgtccttctatcgaacgcacacttttggagacgcgcgacttggcgagaccagccgaatgtttcaggcgcgataccgccagacaggggggcacgtggaagctggcgaagccaatgcaatgctgacgtttgtctttacctatccctga

SEQ ID NO: 515102 - DNA, 777 bp, Stenotrophomonas maltophilia
atgaagagcagattgttccgagaactgagtacattgcctttcaattcgggcattcggcggatctgtgcctgcgctctattgatcggcgcttccattgcgggaattgccaccgtgcaggcgcagattgccattccctcaacgcgcgtggtctatgctgccccgcagaaagaagtggtcgttccgatcagaaatatgggcgacgctccagtgctggtgcaggcctggatttcggatggcgatccagaccagccgccggaagcgtcgaaggccccgtttgtgcttgcgccacctgtagtgcgtcttgacgcaggaaaggacaaccaccttcgcatccgtggcattgaaggcgttgcccccaacgacaacgtcgagcacctctactggttgaacattctggccattccgcctcgcgtagcagatgcaacacagggcgttctggaactggcgattcgcagccgctacaaagtgctgtatcgacccaagggccttccggcgcccgggttggaccggacgggggagtgggacttcagcctgaagtctgacggggagggtcgacgattacatattgccaatcgctctgcgtacgtagcgaaccttggtacgttgacagtagtgcacgatgggcgcagcatggaattggataatccccacgtgctgccgatggcaggtgttgacgttgaactgccttcccgcgttgaaccgccattggaggtccagttccactggatcgacgatgaaggtcggcttcacccaggcgcccggtctattgggcgctga

SEQ ID NO: 515103 - DNA, 960 bp, Stenotrophomonas maltophilia
atgtgcttcgctggcaccgcccatgcggtgtgcactaactatggctcggccttcagtttcaccatccccgatgtgcgattggtagggaactcagcggacgtcgatgagacgatctcgccctggttctattccaaccgagccaataccatgatctgcggaaccatgggttcgtatgctcagtcgaattcctatacagggcttccggctgaagttgggacgcataccatcgggtcgtcaacctatggggtattcgcgacatccattccgggcgttgccttcatcctggcggcggatgttcaaactggaggcgtaagccattttgttccagtacgaggagggtctgaatcagggctgcagtacttgacggacaatgaatcggttggtggtgcgatagcgatccgcttcataaaggtaggtgatacccaggagggctcctactccgtggcggggttcccggcatttaccctcaagcactatcagccggcgtcgaacaagcgattcgagcagcagcatttgctggagccgttcaatattgaggtggtgcatgtgccgctgtgtcacgtacagagcaagaccgtctatatgggactggcgaaccttgaccagttcaagactcagggggccgcggctccgagccgtccctattctgttgagatcaactgtgaggctggggccggtcgggtgaattactatctggaaccgagctctgtggaggtgtacgaccgtactcgcggaattctggcggttgaggggggagcaaagggcatcggcctgcagctgttggacgaacatgacgttccagtagcaatcgggcctgcgtacccatttggtagcagcacagcggacggagtgcgcagtgagacattccgcgcacgctacattcgtaccgccagcggaccggccgatcttgaaactgggccggccaacgccaggattcgctaccgcattgattatccgtga

SEQ ID NO: 515104 - DNA, 2547 bp, Stenotrophomonas maltophilia
atgaatcgacatcgcctgcatctagctccttgccgcgcccctctggcggtggcagtcgtggctgcgctgctgcccatgtctgcagtggctgcgcccaaggttgagttcaatgccgatatgctgtttggcgggagtgcagggttggatctggctcgtttcgaacgaggcgacctgctgcctggcacgtacaacgctgacatcatgatcaatggtgctcttgttgggcgtcaggatctggtggcccgattgaatgagctcgatgaggtccgcatttgccttgatcccgcattgttcgagcagatggggctgaaccgagcccgcctggatgccttgcgggagtccggtgccgccgaagggggcaccctgcttccgttgccggaagaggctacgtgccgtccgctttcggcttatgtgccgggtgcgagcagcgagttcgacgtggccgagcagaccctgcggctgaccatcccgcaactgtacctgagccgcaatccgcgcggctgggtcgacccagcgttgtgggaacaaggaatcaccgccgcaacactgggttacagcatcagccacagccgccagcaaagcggtggccaggagcgcgtgcacaccagcatgaccgtggatgccggtctgaacatgggccagtggcgccttcgtcacagtggctacctgcagcataccgccgagggaacgaactactcggccggcaatacctatctgcagcgcaacctgccgaagctgggggcccagctgcgcctgggcgattcgtctacccagggcgacatgctgcagtcggtcaactatcgcggcatcaacattagttcggatgcgcgcatgctgccggaatcgcagcgcgagtttgcgccggttgtgcgtggcgtggcgcagacaaatgcgcgagttacggtccgtcagcgtgaccatgtcatctatgaaaccaccgttgcgccggggcccttcgagattgacgatctctatggcaccggctccagtggcgatctggaagtggagatcactgaggctgacggccgcgtggagcgattcatcgtcccgtacacggcaatgccgcagctgctgcggcccggccagctgcgctacagcctgacggctggccagctgcgcgacgaggcctttggcgacgatccgggcttcgtcgaggccacgctgcgccggggtctgagcaatcagttcaccggctatgccggtggcacggcggcgccaggctacagcgcattggtgctgggcggcgcctggaacacgccggtcggttcactctcgggtgacgtcaccttcagcgatgcccgactgcctggcaacgattcggtttcgagcgaacgccgacgtggccagtcgtaccgcgttgccttcaacaaggcgctgtttggtgacagcaccaacatcacgctggcggcttaccgctactcgaccagcgagtacctgtcgctgaatgatgcgatgcgcctgcgtgcgcagccgcgcactgaagactatgacctgaccggccggcagcgaagccgcctggatctgacggtgaaccagcgcctgagcgagggcaggggcagcctgtacttcaacggcagcaccacggattactggagcgacaaccgccgccagaccaactactcgctggggtatagcaaccggcttggtcgtggcagctattccatcagtgccaggcgcacgctggagtcgtccttgttctcaacgggtaaggcaaaggccagcaacagtgtgtatctcagcttcagcatgccgctgggaacgccgccggctgcgccacgggtgagcgccagcctgagtcgcgacagcgatggccgcagcggccaacgcctgggtgtgacgggggcgattggtgaccagtggcaaggcagctacaacgcctcgttggccagggatgatggtcgcaccagtttcggtatcggagcgaactaccagttgccgacggtgaatctgaccgggtcctacaaccggaccacgtcgtccagccagctggcccttggcgcgtctggcggcctgatgttgcacagcggcggcttgaccctggcccagcgcatgggcgagaccatggggctggtacatgtccccgatgcagccggggtaggcgtcggacagatgaccaacgtaaagaccaactcgcgtggctatgcggtggtgccctatctgagtccgttccgtcgcaatgagttgagtgtcgacccgaccggcctttcgatggatgtagaactgagtgccgcgtcggtttcggcgattccgaatgcaggtgccatcgtgaagatggtgctgccgaccgagagtggccgcaacgctttgattgaagcattgctgccggatggcgcaccgctgccgtttggtacagacgtgaccacggccgacggcaggatcgttggtgtggttgggcaggggagccggttgtgggtgcgtggcatcgatgagcagggtgagctgtttgtccgttacggaatggaggacggacagcagtgccgcatcaactatgacctcacagccacggcgcccggggatgtgctcaacagcatgtgcgcgacgcagtaa

SEQ ID NO: 515105 - DNA, 753 bp, Stenotrophomonas maltophilia
atgaacatgatcgctcgcaatgctctatggctcgcgctgtgtacctcggcggccatcgtctcgccgcaggcagacgcacgaatcgctatcgagtcgacacgcgtgatctaccctgaaggagcaaaggaggccagcgttcgaattgagaatgcgggcagtacgccttcgctggttcaggcctgggtggatgagtacggggccaagggaaatccggctacctcgaaggcccccttcgtgctgcttccgccggtggtccgtgtggatgccgggaagcagcaggtgttgcgcatccgttttacaggtgccggccttccgcaggatcgcgagagtgtttattccctgaacgtattggacgttccggcgcgtggtgatgcagcacgcgagggcggatcgatgctgaacatcgcggtccgcaatcgaatcaagctgttctataggccgcaggcgataagcaagatcaacccaacgacggcggtcgacagcctgcattggagcatcgcccgcagtggcaacgcttgggtgctgcgggcccgcaacgaaagtccgttccacatcagtgcggtggcggccaccgtcgttgcaggtgatcgcagcgtcgaggttgcggacatcagcatgattgcgccgaagtccagcaaagatttccctcttgctggcggctctttgcagcatcacggcgcactggtcaagttcaagttcatctccgagtacggctcggtcatcgagcgcaccgcagatctccaggtcgattaa

SEQ ID NO: 515106 - DNA, 546 bp, Stenotrophomonas maltophilia
atgaacaagcttgcaattgctctgtccgccgcgctgtcgctgggcgctgctgcttcggccaatgccgcggatggcaccatcactttcactggccgtatcgttgccgctacttgcgccattgactactcagcaggcaacacgattgctctgggccagatcagttcgggcaacctcgacagcaacgcagatgctggtaatcgcacctttgacgtgaccctgaaggccggtgcgagcggttccagcgcaacgtgctcgaaggataacgccaagctgcacatcgataccgccgccagtgatctggattcgaacgggtacatcgcgaatacggacagcggtggtgcatccatcgctgtggcgctgtaccgcactgatggtggctccgaaaagctgctgaacctcggcagcatcaccgatgagctggaccaatccaagagcagtggtgagttcaagtactcgttcctcgcccgctataagaagaccaagactactgatttcgttgaaggtgacttcgcaggcaagctggtcttcgacgtcgagaactactga

SEQ ID NO: 515107 - DNA, 684 bp, Stenotrophomonas maltophilia
atgaaaattcgcctgttgacccttccggtcatggcggcctgctgcctgccgcagttggccaatgccgaaacccccaacggttactacgccactgcccgcatcatcgatgccgaccaccgtgccaacaacatggatgccagcgcccgcccgggcatcggccgctttgttgcgggcgacgagcaccagcgtttcgtcaccggcgccatcggcttcggtcatgcgcatggcaatggctggcgcaccgaaggcgaatacacgctgcgccgcaacgatacctataccagcggctccagcctgttcgccaccagcttcaacaaccatgaagtcagctcgcagcggctgatgctcaatgcgtatcgcgatttcgccatcaacgatgcgtggtcggtatacggcagcgccggtgccggcctggcccagctgaagtccggtggctggcagggcaataccagccgccgctacgacaccaccacccgcactgggttggcgtggtcggtcggcgccggtgtttcggtggccgcctccgaccgcatgacggtcgacctgggctaccgctacgtggacatgggcacgaccgaaagcgggtggaacaccttcggcaatgcccgtggcctgcaggacgaaaagatgcgcctggacctgacctccagcgagttccacctgggcgctcgcctggctttctga

SEQ ID NO: 515108 - DNA, 903 bp, Stenotrophomonas maltophilia
atgaagaattcgcgtcgcaataacctgctcgccgccctgctggtgtgcctggccccggccgccgcatcggccgcggaaggctacctgaccccgtccaccaacaacggcagcggtaacatgccgtcgggctacacgaagctgtacttcgagctggcctcgaatgacttcgctgccgaactggcgctgccagccaatccccgtgaccatgacagggtcatcctcagcaccctggccgatcgcaatagccgtctgaatgccaagggtacgtcggtggaagaccttgtctacatcccggtcgactcgctcagcaacttcgaactgatcaagaccacctacgccggatggggcgcggcgggtggcctgagcgccggccgcgtggtcctcacgagtggtgagcacggcgttgcaccgatgacggaaaagctcatgaccgacatcaatgtgggcggcaacgtaaagactgtccagctgccggcctcggcaccggcaggcgcggtggccggcgtgcatagcttcaacggccaggacgtcaccatcactggcctggccggcggcgcttcggtctgcctgcagtccacgacctgtggctttgtgttcgacgctgcggatggccgctggcacgctcgccgcggccgaacacattaccagccgaccacttcgcaactgccgaagatggagcagcgctggaccgacatcgtcaccggcagcccggccgaggatgtcacgacgccgcagcacatggtgctgccgacctcggctgtcgagggagacatcatccagctgaccgatccgtccaattcgcggttctataccgtcaataatgcgacatcctatctgagctcgcagccgcggacctaccgctacagctcccaggccggtcgctggatttaccagaagccctga

SEQ ID NO: 515109 - DNA, 624 bp, Stenotrophomonas maltophilia
atgcaggcggggccaggaacaaccccgcctgcgcgcgccaacgcccctacttcggctgaagcatccagactttcctgcgggcatcgaaatggaaggcgtggattccgctgctcactcgcggcaccgccgacgacccgccgcgtcactgccgtctcgaagctcgatgtcgttgcgctgggtgccgccgggggaaggctgtgcgccggcgggtgcctgcaccggcaacctgagcaccgtgtgcgcccaccccttgtcgtgcagctgggtgagggtgaggccgcgcgcctggacggtcgcgtcaccctcgtcgggtgccggcgccagcgggcgcgaggtcatttcctccagcgccgggaacgttgtgtccgcggcatccagacgcgccggtgcgggcgcacgggaggcgccactgccgtcccagctcgcaggcgtcagatggacgtctgcagtccaggccagccctgggggcaggcttgccagcaacgcgacagccaggccagtgcaacacgttcttttcgtcaagacggctccatcgaggggatgccggccgccagacgccacgacgtgcctgtgctgccaccggcatcgccaacgtgcgcggactcatccaatgaagctatctga

SEQ ID NO: 515110 - DNA, 324 bp, Stenotrophomonas maltophilia
atgatggatgagcacctcgcaacccgacattgtccgatggaatcgcaggatgagggcgctacggtggacgcatcgattgccgacctgcgtggagtcgccgtgccgtcactacttgatgcccatatcgcgtcgctgatgtggagctttgcccagctgactccgagcaggcagaagcgcttcatggagcttctcaacgattatctgtatgcctcgccgctgaagcgcaggcagatgcggggagaatgggaaaccgaactggcggcgccgtgtagctgtgggcatgaaccacacccgatgccattgcacgcgcggcgcaaggcgtga

SEQ ID NO: 515111 - DNA, 654 bp, Stenotrophomonas maltophilia
atgaactcgctggccattcgcgttgccgttgctgacgatcacccggtgatccgcctgggagtgcggaggacccttgaggaagcgccggccatccaatgcatcggtgcggtggccgactcgaccgagttggtggcattgcttgaacgtgagccctgcgatgtgctggtgaccgactacgcgatgcccggcggtgcgttcggcgatgggctggaactgctgggctacctgacgctgcacttcccttccctgcgcattgtggtgatgaccgggttggatcaacccgggttgatccaccggcttgatgacagcggtgtggctggcatcctcagcaagtccgacgacccctctcagataaaggcagcggtgatggcggcctatgcgcatcgccgctattactccccgtccgtggtggacatgatgcggcacagggagcagcgccgggtaaccacgctttcgccgaaggaactggaggttgtggccttgttcctggacggaatgaccgtcaccgagatcgcgcaacgcctgaaacgcaagaagcagaccgtcagcacgcagaaagtcaatgccatgcgcaagctcggcatcgtgaaggattctgagatcttctcgttcgctgccgatcttggattgaaggagacggacccgaagcgctga

SEQ ID NO: 515112 - DNA, 3384 bp, Stenotrophomonas maltophilia
atggcaggtactgaagccgcgcagcgccctggcggtccggcggttgccgcgcgcctggacgacctgcggcggttgcgccgccgcctgctgttcggcggcggtgccctgatcacggtgctggtactgttggccgccatcgtcagttccattgccgatgtggaagagttccatgcccgcgaacggcagtccttcctggaagcccgcgcggcgctggactacttcctctaccagcgcgaccgcgcctacgccacctcggtcaatggcaacgacgtgctgtggcgcgaccagcgccccgcgctgaccgcggtcggaacccccttggccgagcgcttccacgcccagggcgcggaggtggtggtgcgggccgaagggcgtaccgccgtgccatggctggtgctgggcgcccgtgacaatccattgccgcccgaggagctgaaggcctacctcggcatgatcgacatctactcggcctacaccgccgattcgatcacttcgcaggatgcgcccgggccggtggccatgttcgcctacgagccgcaggggcggctgctggccgtgtccaacatccgcgacgaggcccagctgctgcagacgctgggcgtggccacccgccagcaggccttcgcgcggttgctgcgtgacgagcccgaggtacgcaagctgctgccacgcccgggcccgatccgctcggcctcccgcgaggggcggttgctgtcgcgctttgcagtcaacccgctcaacggccagcggtcgctggtcggcgtggtgaccatggccgagggcaccacgccgtacttccggcgcgtggtgttcgagtcgatcgacaccatcaaggcccggctggaggcgcgcgaagaagggcgctacctggtgatggccggcaaccggcaagtggtgctcagcagtggcggcttgacgctccaggagcaggcgctgctgttgggggcgctgcccggcgcagcggcgaccaagcccgcacgacagcatgcgcaggggcgcttcatcctcagttgcagcctgccgggcgtggactggacgctcagccacgtttacgactggtcggacatctggaaagcgcagggtccttatcttctggcgcgcagcctcagtgccctggtgatcatcggcctgctgtggtggctgctgctgcgcatcgaccgccgcgtgttcaagcccgcccttgccgacgcatcacgtgtgtatgagagcgaggcgctgagccgcgccatcatcggcaccgcgccgatcgggctggcgctgattgcccgcgacacaggcatgccgctgctgcagaacgaaactgcacggcagctggtgggcgaccaggccgatgaagacggcaacgcaatcgcaacgctgtatgcgcggttggccgagctggggcgcagcagccacggcgaggaggcgttggaactgcagtggtcacccgaggaagagggcgcaggcacccagctgcagatcagcatggcgctggctacctaccaccaccaggccgtatgggtctgtgccctgcgcgacgtcaccgctcaggtggagctggaagacacgctgcgccgtgcccgcgaggatgccgaggctgctcgccaggccgccgaagcggccacgcgtgccaagtccgccttcgtcgccacgatgagccatgagatccgtaccccgctcaacggcgtgctgggccacctggaactgctggcccgttcgcccctgcagccgggccagcgcgaacggctggaccgcatccgcttctccgccgacgcactgatgcggatcatcagcgacgtgctggatttctccaagatcgaagccgggcagctggatgtggagccggcaccgttcgccctgcgcccgctgatcgaaggcgtcgcactgctgtatgcgcccgatgccctgcgcaagggcgtgcgcctgttctttgcggtggacgcgccggccgggcaggactgcattggcgacgcacaccgcatccgccagatcctcaacaacctggtcagcaacgcggtcaagttcaccgaatccggtcgcatcatcctgcgggccgaagtgcagaatgtggacggcaagggcacgctgctgcgcgtgcaggtggtggactccggcatcggcatgagcccgcaacaggccgggcagctgttccagccgttccagcaggccgatgccagcgtctcgcgccgctacggcggcagcggcctgggcctggcgttgtgccagcagctggcgcaggcgatgggcgggcaggtggcggtggaaagtaccgagggcgtgggcagcagcttcagcctgctgttgccggtgcgcctgcagcccgccgcaaacccggcgtcgcagccgctgcgtgggcagcgcatcaccgtgctgtcgtccacgccggagtggcgcaatgagatcgggcggctgctgacggagtggggcaccgagcctgtgctgctggacgccccgcaggccgacgcgacgggcgacgtgctgctgatcgtgggcgaccaccggccgtggacccgcgaggaggaacagcacctgtccgcgtcccatcgccacgtggtgttcgcccatgcacaggggccgttgacccccgaagtgcgcggcgaccgtaccgaagtgacctgctatgccagcgacgccttgctggccgccatcggcacggaaccgcacagtgcatcctcgctcccgccagtcgagcaggcgccagcaccacgctcgcgcgggcgcgtgctgctggtggaagacaacgccgtcaatcgcgaactgatccagcagcagctggaagaactcggctacgacgtggatgctgccgaagacggggccgccgcactggcggtgtggcgcaacgacgcctacgtggcggtcctcaccgatatcaacatgccggtgatggacggctatgcgctggcgcgcgcgctgcgccagcgcgggcagtcgctgccgatcctggccatcaccgccaccgcactggccagcgaacgtgagcgctgcctggcggcgggcattgacgacctgctgctgaaaccgctcaatctggatcggctggaagccgggctgggcaaggccagcaaggcggcggttgcgccggtttcccccgcgccaacgcgtagcgcacccagcagggtatcggcggccatccgccaactattcgtggaaaccggcgacaaggatctgcaggcgatgatcgaagcgcgtgccggcaacgacatgcaacgcctgctcgatcgcgtgcacgccttcaaaggggtactgcagatgctgggtgagcaggtgctgggcgaacactgcggcgaggtggaacaggcgctgcgcgacggcctggcagtaccgccatcgcagctggatgcattgcaggcggcgttgcaggcatgcctggatgactaccggcacgaactggagcaggagtcgtga

SEQ ID NO: 515113 - DNA, 2670 bp, Stenotrophomonas maltophilia
atgccctctgcgtcgccgtcccctgcagattccctgcgccgcctgcacacccgtgcagggccgggcgccgtggacgccggtgagctgcaggcgctgaagcagtatccgcgccggctgatgctggcctgcggcgcggtgttgagcctgctgtcgctgagcgtgctgatcaccctcatcgtggtccaggtcaatgggtacgaggcccggcgcattgccgaattccgccgcgcccacactgcgctgcagatccagctggcgcgccaggacgccagctacgcccgcctggcgaacatggccgagtacgcctgggaccgcaacatccagctcggtgacgccagcgccgccgatctgcgccgtgcctatctgcagggtgggcaacggctggtggtggtggccgatgacagcagccgcccgcagatggcgctgggcctggacaccgcccaatggcgcccccgggagctggagcgctacctgcagctcaccacggcggtgtcactcatccagcgcctgaccgccaccagtggcgaaggtgagccagccagcgcctcctatttcttcgatcccagcggccagtacctctcgctggacaagggcctgaccgagcgcagcctgatcagcgcgctggcggccacttcgcgccgcgaagtgttcgagcacctgcgtgcacccgcccagctgctggctccggcctccgggcacgaccaggtgcccctgctggagagtgtcgaacgcagcgacagcccgcgcagaaccttcggccgccacccgatcaccggcgagccgtcgctggtgtcggtgttccaggccagcgttgctgctgcgcccatcgcaaccttcgtggcctacgaaccgatggcccgcctgcaggcgctgctgcgccggaacagccagggccatatcgcgctgctggatcgcgatgggctgcgggtgctggcctccgatgacgtgggcggcgcgcctggccatcgggcggatactgactgggtgctgctgggcgatgccacccgtgcgcgcttccacaacggtcgtttcaccctggcgttgccggtcaccggtacgccgtggacgctggtggagacctaccgctggggcgacatcctgcgtgacatcgcgtcgatgctgcttaccggcgtcgcctgcctggtggccgcgctggcactgctgtggttcctgctgctggggctgcaccggcgcatgtataccccggcgttccgccaggtgaaagccatctacgcccgcgaccgccgactgcgcctgctgctggagcatgtgccggtgggcgtggcgctgctggaggcgggtaccggccatgtgcaggattggaatggaccgctgcagcgcatggaccgggccgccggtgggcggctgatgccgcagctgcgtgaggcgatgatgcaggccgacgtccgccacggtgcggtgaaggtggagggcgagctgccgctggccaacgatccgcagcaacggctgtcgcaccgcacgcacatccactccggaggggacgcctggccgggtggcgtgctgctgatggtagaggacatcagccacgacaggcgtgagctgcacgcggagcagaagcggaccgcagaagcagaagcctgcagccgcgccaaatcgaatttcgtggcggcgatgagccatgagatccgcacgccgctgcacggcatcatcggccacctggagctgcttgcacgcagcccgttgcaggccgagcccgccgaacgcgtgctgcgcctgcgccagtctgccgattcgctgatggacgtcatcaccgacgtgcttgatctatcgcgtatcgagtcgggccagtggacgctcacgcctgagcgcttctcgccatcggcgctggtggagcgcgtcgccgtgctgtacgccccggtggcacaggccaagggcctgcagctggattgcgtggtggatgccgatgtacccgctgccgcggtcgcaccgatggcggccatcgagcgggttctgcgcaacctggccagcaacgcgctgaagttcaccgcctccgggcgggtacagcttcgcgtgtcccaccagcagagcgggcaaggccagtatctctgccttgaggccaccgattccggtatcggcctgagcgccgccgagcgggagcggttgttccagcccttcgtgcaggccgggccggatatcgtgtcgcgcttcggcggctccggcctggggttggcgctgtgccagcagctgtgccagcgcatgggcgggcggatctgggtggaaagcacggcaggggtgggcagccggttcgtggtcgaggtgccgttgttgacgtcgattgccattccggtgccgctgccgctggccgggcagcggatcaatctgctggccgcgcccgggccatggcgtggggagctggaaaggcggctgcgcagctggggcgcgtacgtgcatcccatacacagcccagcggcggatgcggcgcccgcggcggcgtgggtgctgttcgaggcgccggacgaagacgcccgctgggtgtggcgcagcgggcagccctgggtccgggtctgccgcgaggggcccttgcgcccgcagccagcgcacggtggctggacggtgtcctgctatgccagtgaagccctgcgccaggcactgctgcaggcgctgcgccgaaacgagtcagatacgccagctactgacgcaatcggataa

SEQ ID NO: 515114 - DNA, 855 bp, Stenotrophomonas maltophilia
atgaagtctgcatggagccgcgaacgcctttgggcagtgcgcctgatggctggccatgcctgtcaccgtgcaagcctgcgggtgggcgcggccctgcttccctgcctgccaccgcggatgcagaaccgcatggcggaagaggccttcgcttggatcgggccccgattgcaaccgcatcgccacactcgcgccctcggtgcgctgcagcagctgggccacaaatcctccgcagcaacccggctggccgcgcgtttcctggccaccagctggatccgccaggccaggttccatcgcctgcggcatctgccgttccctgcccagcaggacgtgctgcgtgcgatgaggtggcacgacccgctcgcgctgtgggccgccgccggccggcgacgggtcatctgcatactgcccagcggcgacatggaactggccatggcggcgctgctggatcgcccgggcgcgccgtcacactacttcatcagcacctaccaccggcaggggtcacctcgccatcgcgtgctggcggcgctgcagcggcagggccaccgcctggatatcgggcaatcagggcagtccggccaggcctggcgccatcttcgacgcggcgcctcggtggtgaccaaactcgacccctggagcggagatggccgcgagcctgggccattgcggcttgcccgcctggcgcaggtgcccgtgttgctgctgggccaccgctgtgatgacagcgaggccgggacactgcacgtgctgggcgaattcggcgccgagtcgatggccgacggcgccgcctcgctccgggctgcggcgcttgcctttcttgccactgccccgcatgactgggctgacctggacaggtag

SEQ ID NO: 515115 - DNA, 1212 bp, Stenotrophomonas maltophilia
atgtccatgattgaacgcttcatttccgctttgtcaccgtgtggtctgcttgtgcgggcgagtgggctcctggtcgtgctgatggcctcggcgggagccgccgagttacagatcagggcggagtttcgtccaagcgccttggacccttcgcacaatcggttcgttaacactacgccccagtctggctactgcgcacagcattcgagctactgcagagttggcgacttcacgatcgacaccgggatgaacgtgagccagcggcgcctgtttggcggtggcgaggatccgcgcgaaaaatggtacctgtcagttgacggaaactggcgtgatgtagtcgtgcacaacgcgaacaaccacgagctgagggcccggctacgtctgttcctgatcggcatgaaatggggcttgccatctgatggcaccgcgcccggtgcatacggagcagccactggcggctgccgtggtcgactgggtgttggtggtggttcatggtatcggtatgcgtggggtattccggaaggcaatcctgtctgtgtgaggagcccaagggcaaccaccgatcgagttgcgaactatctgaacttctcgattggctatcaccttgaagcgcccaacccgcttcaggcccaggacggtcagtacaccggaagcgtgacttacacggttggcaatgggcagcagatcgatcttggtcagggtgactactcggattcagagctgacactgaagctgcagctgaacgtatcccacgatttccacgtccgattctctagcgaatcccccagcgtgaaactggcgccagatggaggttggaaaaaatggatggaccaaggccttccaccggcacgcctgcgtcaggaactgacgttccgccttaccacgtcaaggaacctgagcttgaagctacgctgcgagcatgaggccgacgatcgttgcggaatccgcaatctgcgcgacgacatggtggtgccggtggatgtggacgtgaccattcccggcatgagcaatgtgggtgacgggcgtccggcacaggacacgccgttgctgccggatgatggacgagcgccacgcttcacgcctgatggctacttgatagagcggcgttctacgctgcgcttcaccgccggtcgtgatgcggtgatggagatgctgaagtcacctggttcgcactgggcaggcaacatgaccgtggtgtttgatgccaatccgtga

SEQ ID NO: 515116 - DNA, 615 bp, Stenotrophomonas maltophilia
atgcacggacctgcaatgctccgctcgaccccgatccgtctggcgattgccgcgctggcgctgtcctgcctgccggcgatggccgcgtcgcccgccgccaagcgaccatcgccgcccagcctggtacaggcctaccacgctgccgaagccaacctgcggctgattcccggtgacgatatcgaatcggacttccgcccggtgtggacgggggttgccgatctcgatggcgatggccgttccgaaattgtgtacttctacacgtccacttacaccggtggcagcttcgcgcagagcaatgtggtggcggtgatgacagcgctgacagcgaacgatccgcgtggccaggagaacccgaagagcttgtcgcggacggaggcggaggatttcgcggccatccgggaatcaggttatggcgatgatgccggcatccagattcctggcgcggtgcggtcaatccgaatcgagggcaaccggatcatcgttgccttcactgttaccgcaggcgcaacggtctgcgaaattccccgcgatttccgccacgtctgtccgccggacggaaactacacctggacgctgcgttggaggccggggaagctgacccgcatcaagaaatag

SEQ ID NO: 515117 - DNA, 4713 bp, Stenotrophomonas maltophilia
atgttggaacgactgaagaccctctcgcgtgccgtgctggcgatggttgccctcggctgcttcgcctctgcagtggcacaggcgcaggaaagcaagattacctggcgcatttcgcagcccggcggcgatgcgacgcaatacaagacccaacaggcggcggtggctgccatcaagaacctgcccgcacccagcccgttcccaccggagttccagttcggctggcaatctgtcgacaagatcaagtcgaaagtcgtggacttgaacggaaacacgtcgatcacctactggatggggaagacgcagccctccgacccggactggtcctacatcgggcgtgacatattcccgacggaagaggcgatggtggccgattttcttgcggaccaacaagccagcaatcccgtgtgccccggggcggcggtcactccgtctggcgattggtttgcggcttcgcccgatcaggaaggtgtcatcgagtcacgctactacgatctgacttcaatggctggcaacaatacggctgaatcgccgtgcaccccgtataccgggacggttgcggtcgcgcgtacccggcgcttgaactgcccggttccgctcacgcagtggtccaacaagcacagcgcctgcgtcagcgaagagttcgttgcgaccatcacctcgaagtcgcagaagtgcgacaaggatggcggcaacggcagctgcccgatgtcccgtaacgatacagctacgaacatgagtccgcttcccgacaaggacccggcctccaacggcggtacctgcgacggcaatgtcggcaatccgtgtgacgtcaaaacgggcgagaagtacgagatcgcgccggacttcgatctgggctggatcgcgctgacgcgcttctatcactccggcatctccacctcatccggtggcttcggctatggctggacccactcgctgggcgcccacctggcactggatggcgttgacagtgtgggcatcattgaaagtaccggtttccaaagggcattcaagaaaatcggccaggcctatgaggcggacgacgacagtggcgatcgtctggtccagaacggcaactggaccctgtactcggcggattccatctcgatcttcggcccggacgggcgtctggtcgccaagcgcttcccggatggcacgtcgctgacctatatctacgatgacagcgatcgccttgcggccgtcacccacagcagtggccgcacgctggagttcgtttaccagtccaacgactacgaggcgctgatcagttcggtgctagtcgaaggcattccgctggccacctatacctacacgcctcagaaccaggtcgccacggtgacctatgcgggtggcggggtgcgcacgtatcactacgagaaccaggacttcccccagcacctgaccggcatcaccgccgaggacggtcggcgctacagcacctttacctatgattccatcggccgtgttatctccagtcagcacgctggcggtgccgatggcgtgacgctcgcctacagccccaacggcggtgcagtcgtgactgacgcgcttgggcggcagaccgactacaccctgacacccggcggcgacaccgcgccgtcgcgcaaggtaaccggcctgagtgattcgcagggaaccgtcagccggacctactacgaccagagtgtcgacttccgccgccgtctggatacctacaccgatcaccgcggcatccagaccaagcacacctatgcgcagggcaccgacccggtgagcggtcgtgccgtcagcatccataccgtgaccgaagcggtcggcctgcccgaacagcgggcggtgaccaccgcgcgcgacgtcgaaaccaatgcggtactgaccacccgcatcggcaatcgtgaaacccgaacgtccttcaatacccggcgccagccgacaaccaacacggtgaccgacatcgcttccggtcaggcgcgcatcaccagctacacgtattgcgaagctgcggacgtggctgcggcagggagctgccctgtggaagggctgctgaagagcgtggatggtccgcgcacggatgtggtcgatgccgttacctacgcctactacccggcggatgatgcgggatgcgcggccaatggcgcctgcagctatcgcaagggcgacctgcgcagcgtgaccaatgcgctgggccagacggtcgagaccttggcctacgacgcgttcgggcggccgttgtcggtcaaggacgccaacggcgtggtcaccgattacacgtaccatgctcgcggctggccgacctcgatcaccgtacgcggcgcgaccactgccgaggatcgggtcacccagctgagctattggccgacgggccaggtgcagaagatctccgagccggatggcagcagcgtttcctacgtctacgatgctgcgctgcgcttgaccgacatcgaggacaacgcaggcaacacgatccactacacgctggacaatgccggcaaccgcctcaaggaagacacgctggatgctggcggcaccctgcgtcgtaccctggcaaggacgttcaacacgctcggccagctgaccgcgctgaaggatgcaggtaatcacgccaccggctttgcctatgatgccaatggcaacccgcagacggtgaccgacgccctgcagcgggtgaccagccagcagttcgatccgctgaaccgtctggcgcagaccctgcggaacgtcggcggcgtggcggcggagatgcgcagccagtacaacgcgctggaccaggtcacccagatcaccgacccgaagggactgcacaccacctacgcctacaacgagttcggtgacctgaccggccaggtcagcccggacagtggcgccagcagcttcaccgtggatgcggtcggcaatcgcaagacggccaccgatgcgcgtggcgtcaccgccacctatcactacgatgcactcaaccgcctgatcggcgtcgcctatccggaccccaatctggatgtgggctacagctatgacgtggcgccggctgcctgcgccgcagacgagcgctttgccaagtggcgcctggggcaggtgctgcatgccaatggcagcacccagtactgccatgaccgcttcggccaggtcacccgtaaagtgcagacgatcaatggtgtcgccagcacgctgcgctacgtctacagcaagtcgggtcgcctgactgcgttgacctaccccgacggcagcgtggccgactacgtgcgcgatatccagggccgcatcagccagatcggcatgacccggcccggccaggcccgccagatcgtggtgaaccacgtgacctacgcggccttcggcccggcgaccggttggacctatggcaatggtcgccagctgcagcgtccgctggatctggactaccgcccccaggcggtgcatgacccggccgcaggcggcctgtcgctgggctatggctatgatccggtgggttcgatcaccgaactgaagaacggcacaggctcgacggtgctggccaagtacgcttacgacgcgctgggtcgcctgacccagacccaggacggtacgaccggcacaccgatcgaaacctatgcgtatgacgccaccggtaatcgcaccgcgctgaccacctcggcaggtaccgccagctacacctatcccgcaaccagccaccgcctgactgcggtggatggcgaggcgcgcacctatgacgcagcgggcaacaccaccagcatcggcagcaagacgttcaactataacgacgccaatcgcatgaacgcggtgaagcagggtaacgccacactggagagctacggctacaaccatcgtggcgagcgcgtgctgcgtaccccggccggtggcgcagcgcagatcaccctgtatgacgaggcagggcagtggctgggcaactactcggccacgggccaggcgcagcaacaggccatctggctggataattacctggtggcgctgatcaatgtgccgggtaccggcgtgccggagctggcctacgtccaaccagatcatctgggcacgccgcgcgtggtgattgatccggtgcggaatgtcgcgatctgggagtggagcaacaagagcgaggtgttcggcaaccagataccaagtgccgacccggatgccgatggtgtggtgttcgagctggctctgcgtttcccagggcagcaggcaacggatgcgagtgggctgttctacaactaccagcgcgagtatgacccggcagcggggcggtactcgcagagcgacccccttggattgaacgcggggatggcaacttacgcatacgtgtcgtcaggtccgcttggtgctgctgatccgtttggtctgtgcgaggatgatcacgtctatcgtattgatcgattcagtctctgctctccgcagtcagcattcagagctgcaaaggtggtaagtgccccaggtgcgccgccggccagagagggattcacccctgacgttgagcttgtcgggaacggcggacgaaaccacatttcgcaatgggtggactcaaagagcatgacaatcgtgaattcaacgcgtcccggccatcagttccatccaggcacggtatcgtggaaggtggcgcctgggccgctgggaatcgggtcgcagatcacaatcgtgggcgaaggatccgggcccaatccgatactcaacgatgcgcttggtttcctgatttttggtccggcggcgacattggccgcaacgctttgcatcgttgggccacgatga

SEQ ID NO: 515118 - DNA, 654 bp, Stenotrophomonas maltophilia
atgagcaaacagcgatacagactcaacgaccggcaattgcgcgcgctcaacatcaatcagcgcccagccatggatccgcagggcaagacggtcattgaacagaacccggatcccaagccgtaccgctttatggacggaacaccgggagctcccaccggctttggtgtgtacgtagggaagagcggcaattcatttgaagtacgcaagcgggcgggggaccgtcttgtgcgcgtgtctcttggctctgtagccgacatgacgatcatccaggcgcacgaaaaggcccgtgcgcaattggcgtacatcgttgaaacaggaggggagagtcccaagcgtcgtgatgagctagaacgccgcgccaatgacatccgcaacattacagtgcgaacgtgcatggagcgctacattgaaaagatgcaggcgcaagtggacgcaggtaagcgcaaagcaatcagcgccaaagccgttcaaaacagtctggcccgattggagcggcccgaggtgaatttggcggatgtgcaggtccgtgatctgaccattgatcaaatcaccaacggatggagcgcattgcggacatcggccatgctcaaatccaatcgcattcccgagcagacaaaggcgaacttggaaaaaaaaccaaatggtgggccttga

SEQ ID NO: 515119 - DNA, 1209 bp, Stenotrophomonas maltophilia
ttgacggcggaggagtacgcggaactgggtttgagtggcaagtacattcagcgcacaaagtcggcaggaattgaggccgttgaacacacttttgctgacttgaatcgctcaattgaactggtgttgcgtcaagagcgcttggacgcattgcgcgaaaaccgcgcccccatcatgcagcacaaccccttgcaaatgctctttgaaatggacctgtggcgtggtgccaaggagaagcgggaacactaccggaaagcccaggtgcgcaacccgttggctaaagacgatgggtcgttgccgaacgtactcaagaccttggtgtttcggcgcaatttgcaaaataagcacaacgccgtggcggtcgattatttgcttctgactttgctgtggggtgctcggcgaaatgaagcggcaaagctgcagtggtatgtcaaagcaagcaaggaggacattgccaacgaaagtgtgtcgtgggtgtggctggcaaaaacacccagcgaaatcaatcccaccacgaagcgtccaggatcccaagtgttctttcacgacaccaagggcggcgaagttcgctttctgccggtggcgtactttgctggacgtgttttgatgcagcgctggcaggacgcaatggacgtagaagcgcatcttcccatcgaaatgcaaaaagccacgcaagcgctattggagacaaaaaagagttcgggggacttcatggtgattgccaaggcccagcgcgaaatctaccgcgttgagcagaaggccgagcgatgcaaatgggtatttccggcccgctcctcgcgcttaaaagaaggacactacagcgacagtaaatccatcattaaaaacgtgcgtgtggatgcaggaatgttggatctgcgcaaggacattgatgtcggcctgactccgcatgatttgcgccgcaatctgggtcgatttgccgaagcgcttttgtcgggacgtattgtctccgatatgctcaatcacaaagtgtccaatggttcggcaagtgtcaccgatctttacaacgagcaggagtgggggaaattgcgggaggcgtttgctaaggttgaggaagtcatgatttcgaccagtccccgcgtgtggaacgtgctaaaaggaacggacaagccattttgggatgagtccaacgacgaagcgccgaccattcattctggtatgcgcgcgcggaagggtacggacgaggatgagtaa

SEQ ID NO: 515120 - DNA, 414 bp, Stenotrophomonas maltophilia
atgagcgatggaatgctattcgttgacgcgcgaaccgaagcgcggcatgttcgggaacacacggttgaagagcttcgggatctgtacagggaggtgcggggtttcatgcgcttggttgaaattgccaagcgtatggatcagcggacggccgatacgacgtacactcagtacgggcactctcgatttcaagaactcagtcgcatgtttcgtccaatcaatcggaaattgaaatacattgatagcgaagccatgcgccgctcgcgaaattggatattggagagtttcagcaacgctctgaccgtcaagcgcaaggcgagcctcgtggctaagatgagcattgttgtatccaatctgcacgccatcatggaagacatccagggcattggcgtagatattcagatcaaggagatatga

SEQ ID NO: 515121 - DNA, 531 bp, Stenotrophomonas maltophilia
atgaagatgacgccggagctcgcacaggatcttgtgcggctgcgaccaatgatggacaaggccaatgagcctggggcggatcaacagaccgtagcggctgcgtttgccgcaagtcaggtggttgtgcgaacgcacaaccaagagtttgccgagtattttgcacgtcgtttaagcggcgtggcgcttacattcaatcggggcgagttcaactattcgttcaatgacgcggcagacgctgcccaggcgttcacgatgttgtccatgcagcaagtcaatgatgtaaggtccaaggcaatatcgggggctgtggtcaacttgttgctcaaagatatgcagtacaaatccagctttgacagcgaccaggcgtacttgacggcgatcctgatgattgcgcattcgatgtacgcatttcgtagggccacattcaatcagtttgtcgttaagagacgcagtagacaaagcgcatcgttttggcgctactttttgatcggtgcggtcgttgtcggtgtcgcctatctcatcttgggctaa

SEQ ID NO: 515122 - DNA, 288 bp, Stenotrophomonas maltophilia
atgacgcagctgttgcagcagaccgaagatggaacgttggtttggagtgatggtgaatatgactcctacgtttgcgatcacaaacaatataccttgatcattcgtcggcacttcgatgaagagcgcgagagggattacgttgcttttcgctttatttccagcggcaagaacacgccgttcagtgtcagcgacagtgatgaagactatcccaagatgctgagaatttacgacgcggtgatcgccaatgccaatactgtgtccgatgacttggaaaacttcttcgattga

SEQ ID NO: 515123 - DNA, 162 bp, Stenotrophomonas maltophilia
atgaaggctttggacgcggccagccacaagttcgggcgcggcagtctgtcgtttgcgtcgcccagtgcgagcccgagcggtgccgccaaacgggccatgcggcaggggcatctgtcgctttcctttatcacccgctgggatgagatacttgtcgccaagtag

SEQ ID NO: 515124 - DNA, 1122 bp, Stenotrophomonas maltophilia
atgagatcaattggcttatgttccgatacaatgaaaccgattctcgcgcttgtcagcatttcaattttgggagcttgcgatcagtcggcgccacctccagcgtctcccatcccgccgcctgccgtgacagaatctgcccctgtagaagtggagccagcggaaaagcctgcgcacgaggcggcagcttctgttggcgtgtccgacttgtccgaggtggttcaggatctgtaccagcaaatgaaagacaagaaggcgctgcaagataagttgtgggccgccgcagtcgcaatcaatgactacaaccatgtaggaacatactacaacgagtatcacattcccgagcattcatgttacgtacttgggcggctgttaaagcaggataaatatattgctggaaccgtgatgacgtacgatccagattacgtcacccccacgactgagaacgcccaagacctgcgcgttatggctgtctcgttgagcaactttaacagtgtggcaaacggcatcattgggcaggctcaccatgagcgcgtgatcgaatggaatttggactgtgtgggtcgatttggcatcccgagagatgcgtcaatcgagcaagtaggacagtcgtcgttctacgtgattaaagctgagggccgagtactgcaagttttaggggatatcgaaaaaggcttcgcacaaaaagtaattgatgcaattgaagccaatccaacggttgagcaggttgctttggggagcggaggtgggtatgtgctcgaagcaatcgcggccggtcggtacatccgcagcaagggattggagacatcgttgtggaacaactgctattccgcatgcccattggtgtttatgggaggcgtggagcgagtcaactggtctccatacggggacctgggctttcaccaagtcgcagatgaaaacgggacggctgtgccggtggaacatcccatatatcaggcaatcttcgactacgcatcacagatgggcgttgattcaacatatgttctcaagcgcatgtggagttcgccgccgtctggtatgacgatggttgaagggcaggaagatgaactgtgtgatgcactgattatcacctgggtccagcggggctgttctaagcctaattga

SEQ ID NO: 515125 - DNA, 354 bp, Stenotrophomonas maltophilia
atgtcagcccatgtcgatacgaagttgatccccgccgtcaaaagcaaaagcgacatgcaatgggtattgaaagttgctggcacgtccaatgtcatgttggcggggctggcgacgcgcagtgaggaattgcgtgccatattagatgagcggtccgaggtctatcttgaagtcatcaatggacggatgggggcggatgagtttgaacgcagaatggccctgatcaatttgaaaatcgaaaaggctaccgcccacgtcacgccacagcaaatcgcccaggtccgcagccagtaccgcagcagattgcacgatactgaaacagctttgattgcatttgctaaactgagtgcaaagtaa

SEQ ID NO: 515126 - DNA, 297 bp, Stenotrophomonas maltophilia
atggcaaagaaagttcacgatattgatagcaggaccgcactgtctattgcgcgcatcgttgaagagatggagaacggttccagtggggaactgatagctgcaaattgcggaaagggccgactcgacggcgatttcttccgcgacttgcgcctcttccactccgcgagcaagaccaaaccggcctttacgaaaaaggctcaaagaacggtccgccgcattaccgacgaaatcgctgcggaagtggatgccgaacttccggccaagcccaagcgtaaggagcatgaaaccaactcctaa

SEQ ID NO: 515127 - DNA, 387 bp, Stenotrophomonas maltophilia
atgagcctaatttcgaccgttttgattttggctgcagctggaaatcccgatgtcccgcttgctgtggagtcttcggcgctggtgacggcgtacgagcgcgacgccgacgctgccgacaagcgctacaagggcgtgaggcttagggtcactggggtggtcgctgaggagcccgccctgtaccggcgctcccccctcctggctcttgagggcacagggatccacgaccggcccgtggccgtgttggacccggcccgcaaggacgagctggccggtttgcgcagcgggcagtctgtaacgctcgattgcctgggcaatgggcatgtctccggcactccgatgctcaaaaactgcaccatggttcagcaagcccacgaccacagccgctag

SEQ ID NO: 515128 - DNA, 1566 bp, Stenotrophomonas maltophilia
atgacccgtgaacagatgttcgccctagccgaccaaatatcgattcgggcagcggaaggccaaatcacatccagccatgtggaacaactcggtgcgctcattgatgcggccaatgactccaacgaccttgagttgatgcagaaatgcattgaggtgattggcaattgcggggaattggcggacaagcggcacgggtgcgtgctgcactactttcacgccaatgccttgggctggctgtacacgcaccgtcgtaccgatgagaacgcgctgtcgtggatccagccagacaacaccgcacagatttatcagttgcgctcagccatcgcgcatgaggggttcgggaagcaccctgatgaatttcgcgcaaagattcactccaacttgggcaacgcgttcaataagacgggccgcgtacatgatgcgttggagcactggcgcaaagcgttagaactcgatcccatgcttgcgatggcgcaaggcaatatggcgggtgcattgttcttctacgcgcgcaacctgtatgacgtggggcaccgggaatggatcaacatcgaaggccgcgagcaactgcgtaaggcggttgccatcggcgctcacggtgcgacgttcgttgaagccgcagagcgctttcggctcatgctggaagccgtagaacttggtttggatcggtacggtgttgagagcaacccggaccttacctggatggacacgttcgcattgggccgcagcgcccaggagaagcgctaccgccgctggtgtttggacaacaggctcttcctcagtcccatgaacgatgcgtacacccaaccggtggccgcaacggactcgctttctctaccaacacaccgggccgacggagtagggatctcgtacttggccgcattcaatcaactcaagcaggagtacatctacgcgcggtggtgcatgtttgttggtctggatgatcagaagatcaacatggccgaccgtgaggttcttttgtcgtccaacgccgatagtgcgcgatacagcattgccattgaacaggtcaaaacagcctatcgcgcggcgtattcactgctggataaggtcgcgtactttgtgtgcgaccgttgggacatcaatgccaaacgcaaatctgcggatttcgcacgactgtggcggactgaacccaagaagggcgtcgagacaaccattcgcccagagtttgaaggcagtgagaacatctggttgcatgcgttgtacagcttgtccgaagacatcttcaatgaggacgtaaggcaaagcgcctcaccagactcccaacaattgcatcttgtgcgtaatgctttggaacatcgatttttcaagatcgtttgggcccgctccgattgcgacgaaacatcaatgctccacgaccgactgtcggaacagatgaccttagacgacttccagcgcaaagctctgcgtgtgctgctcatggcgcgatccgcgatcatgtacctttgccttgcaatgcaccgcgctgagcagcaacgtcatgaaaaagaagaagggctgtctgtgtcgtacggggttgcgtttatacccgacaaactgaaagggtag

SEQ ID NO: 515129 - DNA, 801 bp, Stenotrophomonas maltophilia
atggcgttcaaattggtcgatgtggaagacctcgtggcgcatgccaaggcatctggtgtgagcaagatcagcgttgatgtcccattgctcgcgtcatacagccaagaggcatgcgtgtcgcaaacccagtggatgacgggtccgcatttcaacaagaactatacgtggttgcacgtggacgcagatggagtgccgttctacgctgggtacggtcgaggggcgtttgcttggcagaagaacggaggaattgcctgggaatggttcgtccgagaacgattgggcggcgagtaccgcgtggttgtgctggcggtcggaatgtccgatgcgcacgcccagagcatctttgaacagatgctagagatgtacaacaaaaggctgctcaatcaaacaagcttccatcgtgggatggactacgccgcgcttaaagaagagaacgacaagaagacggctattcgcccgtactacgttgtggtccgcagcaaaaagccagctgcagtcatctttaaagccgctttgacggctcaaaaaatgcaatacgacctcaacccctaccgcacggaaacgggccgatttggtgaagtgctgcgggacatggacgcgtaccagccaatcaacacatcgttcattacgtacattgtggagtggtacatggggcaggaagacattgaggcggcacgggaggcactggccgaattcaagcggcgtgcgccccggcacaacagccacgaaagaattacgcggttggataagcttgtcgaacgcgggcgcttctaccggcgtccaggctggcttgaccagtaa

SEQ ID NO: 515130 - DNA, 513 bp, Stenotrophomonas maltophilia
atgagctacatcaaacaaactggcgacgtaattgtttcaagcggcgccgacactcaaaacctgcttgcagatgaagtccaacgcagcgcgggcgtaaccgctgtgatgatgatcaagaacgatcagcaggacgaaaagctcaagaggctgaaggctcgaaacgacctggacaacatccagagattgcaagaagcccagcgcgaaatcgccaaccttcggtcacagctggtgcaaatgcaagctcgtcatgacgtgatgcgtgacttggcggcggacatcttggttgaccgctcgtgctgcaccgccgctgcacgtcagttgggacagaagtggaccggaactggtgaaagtcaagatattgagcgcgactttgaacagttcagagcaaatgaaaagaacgcaatcaactccgacctagagcgccagaagaaggcttaccgaattgtggatgaggtggcaagtggctggctgcatcctgagtccactcgccggcgccgtccgcccatggaatga

SEQ ID NO: 515131 - DNA, 864 bp, Stenotrophomonas maltophilia
atggagtgcaggtacaaaagccatacagtgctttgcatgaggcaaatcttgcgctccaatgcgccacccgctcaaactaatgaagtccttttccgctacaccaataagaacacgtcgtacgccgctgacgacttgagcgcgtgcgaatgctcgccaacaattcaagcacaaacactggcgtgccccgaaaacaaaagcggatcaatcacacaacgcagaaatggcgcctgcaccacatcagcctgccccacccggcaatggacatcatgggtaacgacaagcaacacctgctccacaaatgcgaaaccgataccaccggtttccgtgatcgccccaggaactgcatgcatccccgaaacggaacaacgagtcgccaactgccccagtggtcaaattggatttgtgattgaaagcagaacaaaaacatgccccagccaacagtggggttcctggatcactgcaacacaatcctgcgccgcccctgctcccgcatccactccttgcacatacgaccccaggacggacaaagaagtacgcacaacctcctgtgaagcgggccaaggagagaccatcacccaagaacgttaccgcagttgcaacgcggaaagttggagcgactggaaaaccttaaacaacacttgcagcgccagctgcgttacgacgggcacttgctgcacacccggacgcatgcaacgcgcaacaagtgtgggtgtccaatcaacacatacggccagcgcaatggaattgaagaacaattctcccgttgtgcctcggccaccactactcccgtttggagcggcatatggactgcaaaaggctcatccgtcactggaagctgcaacgcttgtccggcaaataccgtag

SEQ ID NO: 515132 - DNA, 1410 bp, Stenotrophomonas maltophilia
atgaagttggcttggctaacaatcgcgttccttctaggagctccgacggcgcatgccactggcgttgcagatggaacgttcgcaatgatgtctggaggatcctgcgatgactttgcccaggactgctatctggacaatcccgccatcgcggagaaagtagtcgatcaacttgcggcaatcggcgtcacgcgttttctcgtaccatcggcaacgttgagtcagctgcgtaccattgcgaccccgatcagcacgcgagggcttgagttctttacgtatgaacgttggacgttcgaatctgcaacccaagccgggaagttcaactgccagacttacactcaggaacggattgatccagttctagtcaaactccgtgccgagtttggcaagagctttgctggtcttcatttcaaggatgaaccaccagaaaaagacatttctccactcgcagagatgaaccgatgcgtcaaaggcgaccaccgtctcgcaggcatgaaggtgttcatcaacctgttcccattgcatgccaacgcgggctcctatgcgggcactgaacatgccggcgccatgtcacccactgactatggtgtggattgcatggaagcgagtatttcgcaacctgaaagaaccgcacagatggtggcacgctactcgacgtttgcgcgccgggtatctgacgaggtgcgccctgactacctcgccttcgacatttatccatttaccccgtcattcaggaagtgtccaacggcgaaggaccttctgatgtccgagaacatgtcgatcatttcgaatctcgccagatccagggggcaaactgccgtcgcttacctccagaatgtgcaatccgcacatccctcgctggcccaggaccctttcgagtacgccaacttccatgatctgcgttggttcgccggatggtcttttgcattcggcatcaacggcttcgcgaacttcattacccacgatgtcagcaatgccgccagtgttccgaatgggaatgacatgctcggactgctcgacaaacgcaacaaccttcgcaatctggcttcggatcagcaaagcactttcggtgtaacgagacaggtccagtccgcactggcaaacgtcaactacctgggttttgccgacaacaatctcggcgttccatcggcccaggtctcaggctggctgtcgaattcatcattccttgtgggcgagtacggcagcgacgatcgttccctggtctatctcgtcgttactgctcgtgccccccggcaatcggcatccgggatcattggcctcaacaagtggtggcgggaggtggagaaactgaactttgacacgggcaaatggcagcgcgttggcaacgtgaccaacaaagtcgacgtcgaaataaccacaatacctctcgagctctatcgactaacgcactga

SEQ ID NO: 515133 - DNA, 5457 bp, Stenotrophomonas maltophilia
atgaatcgaatctatcgacgtatctggagcgtggccaagcagtgctgggtggtgggcagcgagttgagcagtccacgcgggaaatcctcccggaccaagccgcggttgctggtactggcggctgttgcatcggtcgggatgtctgcatcagcccaagagcgcccgaaggatgagtatgagaacggagagcctcaggaagaggtgaccaggttcctggccagctctcccatgatctcttcgctgttcgctgcgcaaccgcgcaagatcgtggtgcaaggcgccatcgtcaatgatgcctactacaaagactcaaccctcaacggtgacatgcagatgattctgggctcgagatccagcatcagcggttggggttcggtggccgtcggcaccgcgtcggcgctgtcagggaaggggagcgtactcctcggaaatgaggcgattgcaaagggtgacaggaacgtggtggttgggtacaagtcggaagccacaagcggctactcgacggtgctgggtgcgagttcggttgcgtcgggcgtcggcaccactgctatcggtcacgatgctcgcgcctacgctcagaactccatagcagtaggtagtggcgcccgcacagttgaaagcacggcgggtgtgtcccgcatcgcgatcggagggaatgcatttgcgggaaccgctggctactcgggagcaatcgccttgggcggaaactcgcgtgcagagttcagcggcgttgcgctcggtcatcatgcgaaggcactggctgatggatcggccgccatcggcgccaactctgaagcgaccgaggcgaactcggtctccgttggcaacgcgtcgaccaagcgacgaatcgtcaacgtggctgatgcgcgcttgagtgcgacaagcacggatgccgttaccggcaagcagctgtttgcaacccaaacccttgcgcaatcggtcaacaatcgggtggatgcgacagcactggcgcttggcaagggggcattggcagagtcgaataccacctatggcgcaagcacggcagtcggcaacaacgccaaaggctacaacggcgcgagcgttgcgctaggcgatgacgcgcgcgccggcgtcgatgtggcgggaaacaaggtcaatggcagggcgggcggcgtctcggtggggtccggtacccggagtgcgcacggtgccgtggccatgggtcacaaggccgttgcgggtggcaatttctctgttgcgatcggctccgatgccgtcgccaatgaggagttgagtaccgcctttggaaaaaccagtgtcgcaggtgcccagcagacgacggccttggggagagggacacaggcaacggcgaagttcgccaccgcagtcggcaatcttgccagggcaacgggcatcaattcgctggcacttggaaacagtgcacatgcaggtcacgaggacgctgttgcgattggcgccgggtcggtgaccgcatcggccagctccgtctcggtcggcagcgccagcaggaagcggaagatccagtacatcgccgatggtgtggtgggtgccggcagcaccgatgccatcactggaaaccagttgttccagacaaatacccggctcacggccgtggaaaagatcgcaggcgatgtcacgggtgagctggccgcagtgaaatcagttgcgcaggccgccacgaaccgcatagatgcgacgaccttggctttgggcaggggggccaccgcagagaacggcagcttcggtatcagtacagcactcggcaacaatgccaaggcctacaatggccgtagcgtagcgctgggcgacgatgcgcgcgctggtgttgatgcggacggcaacaaggtggccaaccagaacgcaggcgtctcggtcggcgccggaacccgtagcgccaacggcgcggttgcaaccggcttccgtgcaaacgcaagcggcaacttctctattgccgtaggcggtgacgccaaggccgaggcagagcacgctacggcgattggttatctgagcaaggccagtgccagccaggccaccgcactggggcgtggcagtgaggcgacggcgcagtttgccagcgcgctgggcaatctggccaaggctaccaacaccagctccgtggcgctgggtgaccgcgctcaggccacgcatgagaatgccgttgccttgggtgcaggtgcagtgaccgcctcggccaattcggtttcggttggcagcgccagcagaaagcggaagatccagtacattgccgatggtgcggtgggtgccggcagcacggatgccatcaccggcaaccagcttcatgccaccaaccaggccgtgaccaaggcccagacagcagctgacggcgcgacgaccaccgccaatgccgcaaaggtggaatcgggcaaggcactggccgagacagtggtgctgggtggcctggtcaaccagtccgctgccaatggcagtgttcgtctgggtgagaggaacagtggcacgcagctgaatgtgcgcaacagcgccaatgcgaaccgcaggattctgggcgttgccgacggggccatcagcgcgaccagcaacgaggccgtcaccggcaagcagctccatgaaaccaacgcgaacgtgactgcggcccagacggcagccagcgcggcgaaggtcagcgcggacacggcactggctgatactggagtgctgaagggtcttgtcggtcaagtcactgccaacggcaacgttcgtgttggcgagaagaacagcggcaccgtgctcgatgtacgcaacagcgcgaatgcgaatcggaagctgaccggcgtagccgatggtgcggtcagcgccagcagctatgaggccgtcaacggcaggcagctcaacgcgaccaatgacaaggtggcgacggtggagggcattgccaggtctgcgggcacggaagctgccgtggcgaagggggatgcagccaaggcgctggtcgagacagcagcgctgggagggttggtggcggaggtatccgcgactggcaatgtgcgcttgggtgagaagagcagtggtacgacgttggatgtgcgtaacagtaccaatgctaatcggaagatcagtggtgtggcggatggggtattgagcgccagcagtgccgaagctgtgtctggtaggcagctgtattcaaccaattcacggatctcagatcttgagggtgtcgcgcagtttgtgagtatcgggtcagctcccatcagtgaacgcgcacaagcgggtatggcaggcgttgcggtcggaaattcagcaaagacgggcctggagggaggaaccgcggtgggtactcttgcagaagcgatgggcaggaactccactgcgattggtcgaggggcaactgtgtccgttggctccgagaatggatttgcaatgggagccggcgcagaagttggcggagccgctggcggcgcgagtggtggcgtcgcgatcggtgctggcgcaagagttgaaagcggggctcacggctcgctggcacttggaagtagctctcaggcgaatgaagaaggtgttgcgtcatttgggaatgcaggcatgcagcgccggcttgtaaacattgcccgaggcaccgccgatcacaatgccaccaccgtctcccagctcaaggattccctcgccaccctcggcggcggcgcagacatggatgccagcggcaacatcatcgccccgacctacgcggtgcagggcggaacgcagaacaccgtcgaggatgcactgatggcactcgatggtgccgtcatcaccgccggccgtcgcgcagacaaggtggaaggtcagctcagctcgatcttccaggattcaccttcggcccgtgctgacggcacgagccagatcgcgctgaatggcgtgaatggcatggtgctgaccaatcttgccgatggccgggtggcgccaggaagccgtgatgccgtaacgggcaaccagctgtacgccgcagagcagaagatctcgcagaatcggaatgatctggaggcgatgcgcaaggagcgggagatggggcagcaggcaatgcgtgggttggatgcaagcgtcatcgactacggtggcgcgcgtttgactggcgtggccgaggcgaagctgtcggctgacagttcggacgttgtgcgcggtagtcagctgtatgagaccaatggccgtatttcggaacttgagggtgctgcgcagtttgtgagtatcgggtcagccccctttagtgaacgcgcagaagcgggtgtggcaggggttgcggtcggaaattcagcaaagacgggactggacgggggaactgcggtaggcacgtttgcagaggcgatggggaagaactccactgctatcggtagaggctcaactgtctctgtggattccgagagtggattcgcaatgggagccggcgcacttgtcggcggggacgctggcggtgcgcgtggaggtgtggcgatcggtgcggccgccagggtggaagctggtgcggatcggtcgctggcactcggtacgggttcttacgcaaacgaggcggaagttgcatcatttggtggtgctggaatgaagcgccgcctcgtaaacatcgccaacggcaccgccaaccacaacgccgccaccgtcggtcagctgcgcggtgcgctttccgccctcggcggcgaagtggatgccaacggcaacatcgttggcccgagcttcaacgtgcagggccacgtgcagtccacgttgaatggtgcactggaggcgctggatggtgcggtcgtcaccagcacctcgcgcgtggacaaggtcgaaacccagctccgctccgtcttccagggcaccccctcggtccgcgccgacggtgtcaaccagctcaccctcgccggtgccaacggcatggtcatcgccaacgtggccaacggcctgatcgcggccggcagccgtgacgcggtcaacggtggccagctgcattcgatgcagcagcagctcaacggccgcatggatggtctggagcagcgcatcgacgatgccccggcgtcgcgtgcactggcgtcgtcctcggtgccgaagccgcagaccgaagacacccccttggtgccgcaaggcaaggactcccagcaggtcgcctcggtaggcgagggtgacaagcccgcaccgcagccgaaggccaacaaggacgactcgccgaagccgcaggtcgacaccgctgagctggagaagatgctggcccgcgccaacgagtacaccgatggtgcgatcagcaacttcgaacgccgcctggacaagatggacaagcgcttcaaccgcatggcggcgatgagcagcgcgcagacggcgatggcgatgaacaccgccggcctggccacctacaaccgcctcggtgcgggcgtgggttacagcgagggtgagtcggccatggcggtgggttaccagcgcgtgctcaacgagaagggctcagccaccttcagcctcaatggggcgttcaccaacagcggtgagcgcagcatgggcgtcggtgtgggcatcggctggtaa

SEQ ID NO: 515134 - DNA, 624 bp, Stenotrophomonas maltophilia
atggctcggctccacatcatcgccactagcaagacccttcactcgaattcgcaagaatcgtccgcgacgtccaccggctcttcgaggccggccatccgcacatcgtgcttgtttccaccagaacccttcattgccacctcaggcatagcagaccaagctttcaattcgaggagatatcagctcggcaccgtcccagcggatgatttccagctccagcagacggtcgtttgcgtccgcatgaagaatcggcgtgagttcagcaccatctgcgtcctgcatctgcagctcgacgggatacgcgtgctggccttggtacggaggacgctcatatccggaaatgacgaatcccacccgagctccaccaagacccatttccacggccgctgcgagagcaaggtcggcgtgaagctgcgaggcagaggcctcaggcagatgagatgccacagcctcgatcaactgcctttcaaagcaggaaacagcacgcgtcggattgctcatcgcatcgttgatctcagggttgctcccgtaccgactcaccgcgccccccggccctgcttacatcgcgttggactggtgctggagtgtcgcatgcagaatccacgtttcagtgacacttggcaatga

SEQ ID NO: 515135 - DNA, 273 bp, Stenotrophomonas maltophilia
gtgaagactgtcagattcgttcgttcagtggtgttcagcagtgtgttgagcctttcggcaacggcgatggctgcgccatctgcccaggaagatccgtccttcatcgatacgctgatcgcgaaattgaccagcgtgctcgacctggacaatcccgcattcaatccgcccgtcgcacgccctgcagtgaaccttccaggctatccgggtcttccggtggatggtggcgtgtgtgatcgcaagagcagggaatggatcgtgtgccgtccgcgttga

SEQ ID NO: 515136 - DNA, 132 bp, Stenotrophomonas maltophilia
atgccacagcacgtggcgcaaccgctgccggtgaccctgttgcagccgcatcggcagcaccgcgcgcaacgcgtgcaggtgttcattgaatggctgctgccagcgctgcggagcggcctgcagctgcagtaa

SEQ ID NO: 515137 - DNA, 516 bp, Stenotrophomonas maltophilia
atgtctttgcgccggcaaaacggctttacattgatcgagttgatggtcacgttgaccgtcttcgtgatcttggcgtcgatcgcctatcccagtttccgcggaatgatccgctcgaaccgcctggcaaccgccaacaatgaactgattgccctgacaggcctggcgagaggcgaaggcatccgcaacagccgtggtggtggtgtctgtggcagtaccgatggcaccggttgcgatggcgaatggtccaagggtgtcctggcctggtcggatctcgatggagatggccagttggggggcaccgataccgtgttgcggttttcgcagggcaacccgcagttgagtgtggtggggcccgcgggtgcgaccatcgcgttcgacggtcgcggccgtcgcagggcggctgcggaccagacgctggtgctgtcgccggatacctgcaagaccggtgagcccaagagtacattgacgatcaaccagtccggtcaggtccgggcgaccaaggggacctgctcatga

SEQ ID NO: 515138 - DNA, 498 bp, Stenotrophomonas maltophilia
atgagccgacgcaagcttgccggcccgcgttcttcgcagggtggtttcagcctgatcgaggtgatggtggccatgctgatcctggcgttcggcctgctgggcttcgccttgctgcagaccaccaatgtccgctttgtgcagagcgcgaattatcgtacccaggccaccaatctggccaatgacctgatcgaactgatgcgtgcccagcgcaccgataccctggccggaggtgcttactccgccgcttcgttctcggccggctcggtgaccgcgaagggcgcgtgcgcctggccaaccggtgccgcggtgacaccgaagaccaatgtcgcgcgatggcagtgcgaggtcgtcaaaacgcttggcgaaaaggccagcgcggaggtgaagttcacccagagtaccggtcaggtaagcgtcgcgatcacgtggggagaccagcgctgggaccccgagaaacccgacagcctgaccacctttggcttgaccactttcctgtga

SEQ ID NO: 515139 - DNA, 522 bp, Stenotrophomonas maltophilia
atgcgaccaatcactcgcttttcgcgccgccccttttctggtcctgcccgcgagcgtggtgcggtgctgtacatttcgctgatcctgttgattctgctggccctgctgggagtgataggcatgcaggtggcaggcatgcaggagcgcatggcatcgggctaccgcgctggtagcttggcgttccagaacgccgagggggctgcgcgtggggcggaaaatgcagtcgagaaaatcgccaaccgacagtcagcgggtgacaacccgatggtcagttccgccgacatcgatcaacgctgcgacgatggtttcgatccgtccgactgggtggccaagaccaagctgggcagcaagccggcggtgaaggtccggcagatccagggctgcatccagggagagggggcgctggacatgggaaagccgctggagacagcaacgccggtttaccagatcacgacgtatgccagtgatacgacttccgacgcgacgtcgcgttcggcggtcgataccgtattcaagctgtga

SEQ ID NO: 515140 - DNA, 3759 bp, Stenotrophomonas maltophilia
atgaacacgcgcaatcgcagaatcctggcaggcgttggccttgccgtcctggccgccggcggctatctggtgcatacgctgatggcggcacaggcgcagggggtgttggcccaggagccgatgaacgttcaggtgcagacgccgccggcgttcatcatggcggtagacgactccaactcgatgacctttgagcgcatgtttccagggggcgatgggcgtctgatcttcaactcgtcaacgggcagcttcttcaacaatgatggcagcttctacagtgttggccgtgattgcacgagcagctcggtcgattgctatctttatctgtatccacattccgattacaacgaacgctattcgtacggccgtgcgattccgccattggacatcttcgggttcgcacgttcgcacgtctacaatgcgagctattacaaccctgctgtcacctataagccatggataaaggctgacgggacacgctgggccgacgcagtccttgacaaggtgcgcgttgaccctcgcgccggatttgcgggcaatcttcagttgtacaacatgctggcgacccgtgagtcgagttcagagggtttccagttcgttgacggaatgcggattccgaatctcgccggcaccggtaacgagtattaccggagcggcagctggcgtacggctgcgcgggatatcagttcggcggttcagtatggtgtgaagtacttcccggcgacgttctatcttccggagaatgcgcccgctccctatggctacaagagcgacgatgccaatcgcccggtgatcgcaggtgcttgtggtccaaagtgcaatctacgtcgttaccagatcaagagcgaaaactacaatatcgacggggcctacggtcttgcgatccagaacttcgccaactggttccagtatcaccgcaatcgcacgctcgccatcatcggtgcatcgacggaggctctgtatggcgtcgacaacatgcgcgtgggctacttcacgatcaatgtcctgaaagacgtgaagatgcatgatctggtgaccaatcgaagcgatctgtacgagcagatatacggcctgaagccgatcagcggcacgcccaaccgtcgcgcggtggagtacctggcagaacagttccgacgtactgatgatggcgcgccggtgatgcgggcgtgccagcgcaatggtggcatgttgttcactgacggctacaccaactccggcaatgtgccgaatggatcgtttggcaatgccgatggggtcaataccaccgatcttcccagcgttccattcgcggatggttacagcaataccatggcggacatcacggcggcctattattccggtagcaagactccgctgcgttcgggtaccggattcgcaaagggccaggtgccggtggatgagcgctgcgcgtcactggacaagagcagtgcagactggaagcggctggattgccagactgacctgcatatgaacttctacggcgtgaccctgggcgcgcaagggcgcatctatggtgtcaatcccgctgcgactgcggaccctttcaagaatcctcctgattggaacagcaatccggatcctgcaaaggttgacgatggcacggttgtcgacgaaatctggcacgccgcgctgaacagccgcggtgagttcatcaatgcgcagacgcccaatgatgtgacggttgcaatgcgccgggtgctggaatcaatcactgccggcaagtcaccgtctggaacattggggatgaccggcgcccgcattggtgcaggctcgctgtcggttacgcccagctacgacatccgcaatggtgcgaccgattggtcgagcaagctcaaggcttcgaccgtcaggatcactggcgaacaggtcgctgtgttgagtgaggcctgggaggcgtccgccaagctgtcctcgagtggtcgtcgcattgtcgccaacaaggcgggcaccgtcgtcgactttggggcgggtacgatcagcctgaccgacttgtgcagtaagccggatggcaagtacgccacgatgctggtgtgcagccaggataagttgaaggacattgatgctgacctgagctcggccatccgctatctgaaggcggatgcatcgatggagaagcgcaacggtggcaagtaccgtgaccgcgcgacgccgctgggtgacattgtcacatccgcgcccgtggtgagttcgccgattgacgactatggctatcgccagcttggtggaagctatgcggtcagctacgccaagtatctcgataccaaggcgaagggccgtcgctacatggtgtacgtgggcgcgaacgacggcatgttgcatgccttcgacggtggtatgggtgcctcgggtgagatggacagcagcggtggcaccgagagcttcgcctatattcccgcaactgcgctgggccacatggcaaacctgttgttccccttcaagccggacagcaaggaccagaccttccgtcatcgctattacgtcgatggaccgatcacggtctccgacattttgaatggaagcacgtggcagacagcgctggtcggcaccgccggtgcgggcggtcgctcagtgttcggattggatgtgagtgctccgggttccttcggaaccggcgaagtgttgtgggaaatcaatgacatcaatgcgtcgttgcccgagaacgtgcgcaacaacatcgggtttgtgctgggcaagccagtaatcgttcctgtaaaggaaggcaacggcattgcctggaaggcgatcttcggcaacggctacaacagtttcagtcgcaaggcagtgctgttcgtggtcgacatggccactggcagtgcacggatgatcgaggcggctgaaggaactgctgcaaacggtatcagtggtgacaatggcctgggcaacgttgtggtggtggatcgttggcgaggcgataaccagaacgtgcgtggccgggatgggctggcggacaccgtctatgcagccgaccagcgaggtgcggtctggaagttcgatctgaccgacggcaaggacaccgcgttgtcgactcccgtgtttaccacccaggtcagccaggatgcgggcgggcgcaattatcgccagcccatcaccggcggcatgacggcagcgaccgggccgtctggtggcgtgatgctgtacttcggtacgggcagcttctcgttctactcggacaaggacgacaagacacagcaggcgctgtatgcggtcaacgaccttgctggaaagagcgttgcgacgacgttgacggcttccaatctcgtcccctacacggccgccacaccagcaaccggcgcggaggcgcgcaagatcgttgcaggtactgcgcctgccaatgcgcgtggctggatggtcagtcttcccacaaccaatggagagcggttcgtcggcaacccattgctcgtcagcggcatcatgttcctgcctacgtatgtccccaatctggaatccgtgggttgctcgacgagtggttcgaactggctgtttggtctctcgtcgctgaccggcgcggccgcgctggagaatgtccgggccggatcgcccaagggtgaaaagccagcagcgggcacggcaggtattctgctgaagagcgagggcactgccccgatcagggacgtatcgctgtcagtgttgccgcgtcttggcaccggcaaggagggcccgcccgggggcagctcgtgctggatggtggtgggcgccgccggcagccaatcgctgtatctgccctatccctgcggtcgccagtcctggcgccagctgcaatga

SEQ ID NO: 515141 - DNA, 408 bp, Stenotrophomonas maltophilia
atgtttgctgtctcctcgcctcgtcgtgcggccggcttcacgctgatcgagctgatgatcgtggtgatcgtcatcggcatcctggcggcaatcgcgattccctcctatcagagctacgtgaggcgatcgcatcgagcagttgtaaaggcggacatggccgagtatgcgcagcgtgccgagcgctaccactcaagcaacaattcctattccggatttgcgctgcccagcaaggtctcgccacgcgaaggtggtacggcccgctacaacctggcgtacaagggggacggcacaaccttcacgatcaccgccacgccgcagggcacgcagaccaaggacagctgcggcaagctgagcctggaccaggccaaccgcaagacagccgaagcggccctttcggactgttggtaa

SEQ ID NO: 515142 - DNA, 537 bp, Stenotrophomonas maltophilia
atgcgccacctccccttccccagccctaccgcaccgcgaggcatgcatctggtcgaactgttggcggtcgtggcggtgatggccgtgctactggcggccggctggccctccctgcagtccctgctgctgcggcagcgcgccgatgccctgcagttgagcctgcatgcgggtctttccagtgctcgcagcgaagccctgaggcggcgcgagctgatcggcgtgtgcgccagcgacgatggactgcactgcatcagcgactggagcatcggctggatcgtctaccggagcggcacccgccgaggatcgccgtcatcatccgacatggtattgacacaccagcgcgggcgttccgacgtcctgatcctggcccaggcgagcagtggccgcccgcaactgtttttccaggccgatgggcggagccctggtgccaatctgaccctgcgcatctgcgccggcagccgcctgcatggcaagctgattgtcaacaatggcgggcgcacacgcagtgaacgcacggaccgcaacatgccctgctga

SEQ ID NO: 515143 - DNA, 360 bp, Stenotrophomonas maltophilia
atgagcgcaatgcgcatgacctggcgctccttgcgctggctgttcagccggcgcgcggcgaaagcactgctgtgggcggtggtgatcgtcgccgctgcggtgggggccaacgtcgccggcatctacctggtcgggagcgtggccggctgggagcggtggctcgcggccgcatcgggctacttcttcgtgtggcggttgtgcctgtacggggcgacggcctatggctgggtctggatgcggcgccggctgctggtacgtgaggacgacgcccaggcgcggcgccgcctggtgcgcaccgaggtcgcgggcgtcgtcgccatcgtggcgctggaagccagcctgctgatgcaggccggttga

SEQ ID NO: 515144 - DNA, 366 bp, Stenotrophomonas maltophilia
atgagaaattcttcgatcgaccgaaactccggccgtcccattgaagaaatcactgatacgttgggacttgaagacgcggccaaaatgatgcggcttggcctggaagccatgaaagacctggtggacaagggcgatgtgccagccgtgcgcctgaatcaaaagcacacggtaatgctccgcgaggatctgatcgacttcctgcgctcggaagggcgtagacaggctgcggagcgcaagaagtcagcaatcggcaaccggcccgctgcaaacgctcccttgggcgctacaactaaacgcaagggtaaggcacgccgcatcagcccgcctgacctgcgcgcgtacgagcaggccgatcaccagagctga

SEQ ID NO: 515145 - DNA, 678 bp, Stenotrophomonas maltophilia
atgaccggctacctaacggattcggttaagaatggacattcgtgtaacagcgaccacgcaactcttagtcgcgtggctcagcacagcatgtccattgtccagattttgatgaaaagcgtcgcagaacttaacccaatcgccatcttcaacgtcgctccgatcaaaattaagcatacgcgccaacgtcgatatgtacttagcaaaatagacagagcgggaaacgtctgcagcgagcacggtcccaacgtccggaaatttgctcagatccacttcgatagcgcatgtcgaggccagtgctcccacgagcgcatctgcggccttagtgaattcaaggtcattcttcagcgcaatacgactatcggccgttcctgcaggtggcggtgcaagagagtacgcaaccctaaaatccctaactgcagtctccgccgcctcaagctcagtgacgtgagcggctgcaaagatcgcacttactcggcggctagcaaagaaccgcttgattgcaggtaccgagagcgcagtgataacacccgctacagtaccgatactggcccaagcatcccagttcactacacatgcctcgctgagccaccagcactcacttatcccgtcgaaaaagctcatttaatgaatccccctgatttctggcctgaattctgccacgggtcagtagccaaatga

SEQ ID NO: 515146 - DNA, 2082 bp, Stenotrophomonas maltophilia
atggctgacggttcttgctccttcaacttcccgccgccacaggtctcccgcctgcgccccggtgagatcgtcgtggatctgttcgccggcggtggcggcgcatcggaagggcttaagcaggccatcggtatcgatcccgccctggcctacaaccacgacgagctggccatcggcatgcacgccgccaaccaccccctgacccagcaccaccgcgaggatatctggcacgcagacccacgcgtggacgtggccggccggcccatcggctggttccatgcctcgccggactgcacgcacttcagccaggccaagggcggccagccgcgcagccgcaagacccgcgcattgtcgtgggtggtgctgaagtgggttggccagctgctgcgtgctgatcggctgcacgggaccaacaccgcgccgcgcatcatctccatggagaacgtgtggcagatcctgacctggggtccgctggtggcaaagcgctgctccaggaccggccgggtgatcaccctagacttggtccaggccgtgcatccggagtcgggaaagccgctgttccggcgtggcaagccggtcatggtcaaccgagtcgccgacaagggcgagcgggtacccgtcgagcgccaggctcttgtcccccataagcgctacagcggccgcacttggcggcagttcgtcgcagcactgcgggcgctgggctacgcggtggagtggcgcaggctggtggccagcgattacggcgccggcaccagccgcgaacgcctgttcctgctcggccgccgcgatggccagcccatcgtgtggcctgagccgacccatggcacagccccgggacagaagccgcgcgtgactgctgctgattgcctggacttctcgattccctgcccgtccatctttactcgggaccggccgctggccgacgccaccatgtgccgcatcgccaagggcgtcatgcggcacgtcatcaactcggccgatcccttcatcgtccctgcaacgcaccagggcggcgatcgcgtgcatagcgtgcgcgaccccatgcgcaccatcaccgccgccaatcgcggcgagctgatgctggtggcgcccgagctggcgccgctcctcaccgagcatgccaacgcaagccgtcagcggacgatggcagcggacgagccacttcctaccgtctgcgccggggtgaagggcggccacttctccgtggtgtccccgacgcttgtccagaccggctacggcgagcgcgagggccaggccccgcgtgcgctggacctgcagcggccgctgggcacgattgtcgcgggcggtgtgaagcacgctgtggccgcgccgcacctggtgaagttccggggcgacagcatcggcacggccgccaccgagccggtgccgacgatcacttctggtgctggtgccgcgcgcccggccggtgccgcgcacgccctcggcgtagccgctgcctcgctggtgaccctgcgtaggaacatggtcggcgccgatacgcgcacgccgctcaccacagtagccgctcaggcggaacaccacgcggtatccagtgccttcatggtccaggccgcacacggcgaaggtcgaacgggcggcgtccaacgctggggaactggcagcaaggatgctcgctcgccggtcggcaccgtcactgccagtggcaacggcgggcatgccgttgcggaggcggagctggcgcacctttcacctgagcaagaggcaggcgccctgcgcgtggcagcgtttctggttaagtactacggcagcggcatcgccgtggatctgcacgacccagtggacacggtgactaccaaggatcgcttggcgctggtcaccgtggtcatcaagggcacgccctacgtcatcgtggatatcggcctgcgcatgctcaagccgcatgagctgttccgcgcgcagggcttcccggtgacctacatcatcaaccgcatcgccgacggcaccgtactgaagaccacggcccaggtgcgcatgtgcggcaatagcgtcagcccaccgccgttgcgagctttggctgaggcgaatctggaccgtgtacccgtcgcaactacggtggctgcatga

SEQ ID NO: 515147 - DNA, 150 bp, Stenotrophomonas maltophilia
atgagccgccgcctccgcatcacctggctggcagttgcgcttctggctgccgttgtcgtgccgctgcgcatcgccgagatccacggcgcccacgccgaccgcaatgcggccaaggcccgctgggcgaccagcagttcggtgaggggctga

SEQ ID NO: 515148 - DNA, 366 bp, Stenotrophomonas maltophilia
atgacgcgctgcgcatttgtgggcgaacgggaacaggtacacgaagtacacatgaccggctcgtgcaccctgacgatcacatatgaccagggcgagcgtcagttcgcgctggtcctccgccgcaatgcgaccgcccgccagaaggcgcgcggcgttgacggcgccacattgacccagctcacccttctaccggaccgcctgatgggcattcggagggacaaccgcggccgtctactgcttaaagcggagagcaccattttctgggtgcccgagaaggaagccgagagcctcaacaagtggctcaacctgttgaaccgcctgctcctcgcatcttctcagtccagcaccgacggagcaacgcaatga

SEQ ID NO: 515149 - DNA, 204 bp, Stenotrophomonas maltophilia
atgcacagaaagcgtctgatcgcctcgtcgctgatcttcgcgctggcaaccagcgcctgcaccagcgctggcaagcgaccgtcgccaccgccgagctgtccgcagccgccgctgctgccagccagcctgatggtcgagccgacgaccgaattgagagtgcgggccgagctgttggcgccgcagcccagtgcgacgcacaagtga

SEQ ID NO: 515150 - DNA, 1035 bp, Stenotrophomonas maltophilia
atgagcttgactcctaccgtctatcgcagcactgaccccggcgcgcccgttctgaacgggcaggccggatcattgatcgcgctgttgcatgcggtgctggtgactggctatggcaccggacagacctcaaaggcaggtgctggttggactcgtccttactcaaatgctggcgtgcatgtctaccggaacagcaccgtcaatgggtcgggagcctacctgcgcattcgtgacgatgcctctttggccacgttgaacaccgggcgtctagcgcaggcgtgggcctacagctcgatgagtgacatcgacaccggggcagatcagacgccaaacccgggcgttcaggcgcgtggctcgctgatcgccaagtcgccggacaccacggcgggcgcgcgtggatggatggttgtggccaccgagatcggcttctatcttttcactgcctggggtcaatggaacaatgctatgggcgcctactattacggcgacatcatcagctcggtttccggcgatgtctatccgttcgccacattcggatctagcaatctcagctcctttaatggcgggtggagtgatgaggtatgcagtctcttcttcgcttccccgctcgaatttgttgtcgatgggtcgagtcagcgaacccaatcctacattccgggcggcttcgttatgcgcagctacagcgatggacggggcgcctcaggccgtgtcgcgacgtgtggggtcagtccatttttggggagcaacacgaataggtcctatggttctggcgcctatcgcgttgggccagatccggcccatggtggcttcaactacatcgaggccatggtgcgtgaggcgccgcatgcgattcgggggaaaatgcccggtgtcctggtgccgctgcatgctcgtccgcacccagtcaacggaattgtttcttacattgacggcattggcttgggccagtggctggtcgtcaactacaacgtggcagagccagacacggctgatcgcgatgggcaggttctcttccgactggacgcgccctggaaatga

SEQ ID NO: 515151 - DNA, 318 bp, Stenotrophomonas maltophilia
atgatctacggcacccttttccgagactgggcattgcgcggcggcgatggctacctaggtggtaactcaccatccggtgatgacgacggccgcaccaagatccgcaacgtacccaagcgcgtgttggtgcaggtctacaccatgcatgatgcagtcaatgtggtttacctggggtcggtgcttagtggacaggacggcacatggcgattggccgggatagaccgttccaaacgctatcgggtcatcggtgttgatctggccggcaccgttaactcagctatccaagattggatagcgccggcacaactggagtcgtga

SEQ ID NO: 515152 - DNA, 933 bp, Stenotrophomonas maltophilia
atgttggggatattctttgctttctatgcagggttaattccattgcatggcagcaacctaagtgagcacggacaatttggtgatagcttcggcgtcctaaactctctttttactggactgggcttcggcggacttgtagtaactctcatccttcagcaaaatcagatccgccagcaagagaggcagatcgaggcccagcagaagagcgaggcaacgagacacttcgaagagtcgctctataatcttctcgatatctaccaagtgactctggatgagatcagcaatccgaaaggcaccctccgcagacgagatctcctcaaggcctcaacgaatcgcacccacaaggcgatgaaggatgaaggggtacacttgattccacaccccatacaggaccgctatcacgcgggaaagctcacaccccaggatctaaaacagctcgactacctctacttcagaaacttcaagatcctgacggtagagattgatcgccagcgccgacttagtgagacactgaaatcgctgctctcacaccttgtagaccgactaccaggccatctggaccccacaccctatcgagccctcgtttgcgctcagattacgcacattgaggtttcgtacttctatctgcttgccctcgcctttgaagatgagggcgacctgcgtcgactactcttcgattcggggctctttgcacgcgcggcccttaccagacgatggcgagtgcacgaccacatgtatcaggaattctggggatacaacgtgagggacttcaaacgcacctccggcatacccatgtcggacgagagagtctcggacgcaatcaaggcgcatatcaccagtggcggaaatcgcctgaaaaaccccctgacgtacacatcacccagaatcactcccccaaagcccagaaaccaccgacaaaacccctccgcatag

SEQ ID NO: 515153 - DNA, 1041 bp, Stenotrophomonas maltophilia
atggatatcaaaggtgcagttgttcacaagctgggcaaggagcagcattcgtcgggaccgggaagcgtcgaagttcatctgcgcgacaaaccgcttccgttggacgacacgctcgcgtcggtctgctctcagactctgaatctgttccagcgcaaaggaaataacacgggaacattcggcgttgatgaagatatccacagatttcctgtgcgcgttggagagttcgtaaaatctcagctgacatttagcgaattcactgcgcatgttgtcaagattattggcgacaaaatggaacaagctccgctttcaaatggtgggcacgccttcttcgttaactacacttcgggcggtgatgaattcctactgatcgccatgctcaagctgcgcgaaggtgcaggcattgacgaggttagtctggatttgatgcctactttggtcattgataccgataagctccatgaggccgcgaggctgaatgtcaccagatggcagtttggggacgaaccctaccttacctttattaaaggacgtggggccgatgaagtcactgcttacttccgggaagccctttcgtgtgtcgtctacacaagcagcaagcaccacacgtcgcagatgattgcggcggccaacgcatatgtggccgatctgccgttgcttgaccaagaggcgaagaagaaggtgtggaccgaggtgagagagcgtcttttcgaatgcttttcatccaataaggaagaggtggtcctagctgctatcgcggtggcggtcgatccgctgcagccccatctatttgaggaatacgtcacgatcggagtgggcgccagtaagtatcaggtcagccaccaattcaagcctgatcggacgacttatagcagtctgcgtcgtattcgtgggaaaatggggacggtcgccgtagctttcgaggtcgaggatgtgcggcaggggcgcgtggcgtacgacgacaatagcgacgctctcctgatattcggaccctctgcggatttgaagaaggaaatcgaggacaatgtctcacctggtgcctga

SEQ ID NO: 515154 - DNA, 1197 bp, Stenotrophomonas maltophilia
atgtctcacctggtgcctgataatgcccagtctgcggcgatatggcttctggaagagctggaggaggtgcaaccctcggctttggatgatggtgtgcttcaggggcgcctttccaaaggccacgacttcttcggtgtggtcgagcgcttaggccacgtcgcgccgcgcctgatatcgggtagtgacgagcgaacgcgactgattaccttcagccccgagaatgcaggcgtgtacgcgtcgctgtcggaatttctgcgcgccagcgttagtcatcgaaggagtgtgcccagccgcttttttctgcgtgatagtcagtactcgggatccggagtgcgagagggtgctccggacgatgtggcaagctattacgacatgatttgcttggctgaaatcgtcaggggtctaggagactatccttcagcagcggacaggtttgttaattttgttgtaaggcctgacgcaaaatttcgtgtcgagatggatttctcggtggaggatttggtagcgatagatggggttgaggaattctcttcaagcttccttcgttctgattttcatgtcgaggagaagcgagagattgtgcgggattgcctggcggacttggcaaagggtacggctacgatcccacttgcctcggtggctcgcggatttgatgtggtcatgaaaaattcgcgggcatcctatgcattgctgctttcaaaattctcggccgcatctgttcaaaaggaagtggataagcagaatctggaagacaccctgcgcctaaacaagacgttctccgagatacagaatcagcttttggcgttgcctgcggctattcttgtcgcgggtgcggcgtttgaggcgggcaaggtttataagaatgttgctatttttctcggcgtggccgtttttgtagccctgatgttcctattgattaggaatcaaagaaattccgtggctgctatcagtgctgaaatcgcgctccggagaagcaatctggaagggcagccggatgcggttgcagcgatgtacatccccgctttttcagcattggagaagcgggtcgacacgcagcagaggacgctgaccgtcgtactcgtcctttcgatagttgttttctgctttgccgcatacgcttctctggacagcgcattgggcggccgcgtcagcgcgggcggactggccctggtgaagcttgcgttctgtctgcactga

SEQ ID NO: 515155 - DNA, 672 bp, Stenotrophomonas maltophilia
atggcggggtgggtccggttgcgggggccgctgcaagtacgtccatgtaagctcggtcgccgcttgctcgtgtgcgcagtcctgcgcacacggcaagaccggggttgggcgtcgtgcccaacccgcccgaggcatgcctcgggcccatgcggcttacgcccccgcaaccggacccaccccgccttcgacagattctcgcaatctgttcgctcttctgtagagccgagccatgctcggctcaaatcgttccgatatcgaaatattcgattccgatggagattcatccacgcatgcgtggatctaccgtgtcgaccaaggtcgacaactaccaacagcctccggaatctgtcagaggcggggcggtgtggttgtgcgggaccgttggcgccatggatggcgccatcgagcccccatggatgggtttacggcgtgtcctgcacagccacaccgccccgccatcccacggaataccagctttggctgttgcttcggctgttgctgttgcttgaacgcttctgcaggtgcagggcgcagccctgccgaacacccctttacttgacctgcacctcgatcacgccgtcgccaacgcgggcctgcagggcgtcacccggctgcacctggtcgacgtgccgcaccaaggcaccatcatcgctgcgggtcaggatgctgtag

SEQ ID NO: 515156 - DNA, 732 bp, Stenotrophomonas maltophilia
atgggaactcccaaagaacccccctaccttcaatactgccgaagcgcaatcaactcccttgtcgctcagtacgagatgagcaaggtgatcgggcactctgccactgcaggaaccgtccgcgagagactaattcatgactttctcgaatcccacatccctgaaatgaccagtgctgtgagcggcgtcattattgactcacagggaaggcggtcacgccagcaagacatcgttttgatgctgaagtccatgccgaggcttcgctttaacagcggtcacgacatgatttttcacgagggcgtcgttgcgacgatcgaagtgaaaacaaatatctccaagtccgttctacttgaaatatccaagaacatttctagcgtcaagcgcctggatcccacaagcctcgggggggtccagctgggtgagctggactggcctatgcatcgaattttgcattgtattgtgggttacggtggatcaggccttcacgatatatccaatgtcctcagcgctttccctgaaggagagaagccagacatctatctcgaccttaccaaaggagcacttctccgaaatgaaggaatcttctcagataaactccttggaaccgactatctaatctatgacgatcccggcgaaggtctcgctcgattcctgtcagccctcacgatcgttacatcttcatattcagttcgaaatgtaaagtgggagaagtacattcaaccgcgttccgattga

SEQ ID NO: 515157 - DNA, 870 bp, Stenotrophomonas maltophilia
atgcgctcggatctggtcggttttctgcagcgtgccacgcaggctgagcagaacgcctacctgaagcagttgcgccgcaggaagccaccaaagcccggtgagcccgttgctggtccggaaccggtgtacgaaatccaggtcaataccgtctacgagaacgcgacgaaaccgaatcgcctgatcagaaagtactgggtgaactgctcacagaacaccgtggccaccaggacgagtctgatccagtggcgcgatcggccaatggagaacgtcccgccggataagtttgaaccgcgaaccgaggcgactgctccctggcaggtgcaactggtgcagtttgcctgtctcgtggggcctgatcccaaggccaaggtgccagcggaaatgatgaagcgtggcttcctttccattggtgacgtcgggcaatcacctgtagatgtcatctggggcgacctgtggaaggacggcaagcgcccagcattcacctatcggccaaccgacgctgaaaaggacagcactgtgcgtagcctcgaagcgactgtggcgcgcgcccagaatgaaaccagcagggccttggatgagtcgcgtcgagcagccaatcgcgtgggtcgcaacaatctcatggatatgtggatcggcaagacagagcaggaattcgtgcggacgtggggcccaccggatcgtgtggagaatggggccgatggttcgcgcacgttgtacttgcaccgtggcgagcgtgtgcaggggttgaatgcttatgggtatgtcgtcagtgacgtgaacaatcgatgcgatatcacggtgctgacgatgggcggctacgtccctgactacgccacgcagggggccacctgcgcacagcagttgcgctga

SEQ ID NO: 515158 - DNA, 657 bp, Stenotrophomonas maltophilia
atgggagtagcgctccctgaaaggaaaaggcagccgctgctggcgttgctcgcccttatcccactggccgcatgctcgccctatgctgatgccgagcgcgacgtcgccgctggtgggcgcggcctggccaaactcaacccatcaccgcagcaaggctacgagctggtgctgacactgaaggatgcccccggtcccttcgcggtggtcgagggcgttgcccagtacgacgcacgcaactatgcagcatgtgggcggatcgtacctgcaacgggcactgcgggccgcatcaccagtcaggaacctatcgcactgcgccaggtgggcgagaacgaataccgcggcacgttctacctcgaccgcatgcaggacgaggattactacgggcgtggtgtctgccattgggcgctgacgggagtcggtgcgatgttgcgcgctacgaccggcgaggcggatacgcgattcctgacgttcatcgacaaggagcgcatggacgcggggagccgggtgacgcggcactacccacgcgccgactacccccgaatcgaagagatcaccggatacggagcgagcggcgaggaagatccttccagctatcgcgccgatctgcgcaatgcgttgttctcaaccaccaccactgtgcagaagctcatgccatga

SEQ ID NO: 515159 - DNA, 726 bp, Stenotrophomonas maltophilia
atgaccattgaagtagacgacgtcagcccgggcggcagcccgatcctcgtgcacagccgcgagaaggacttcacgccggcgcacggcgaagaacacatcgaggcgatcagcgcgcatatcgagcgccatctggggcccgtctccggggtcttccacgaaatcatctccgacatcgtgcatatcgatgtgcacgtggtgccggccaccgaagcccatccttatctgcgcctggtgacctcgggcatgagcgatctgccgatgaccctgcccgaaggtgcacccggctcggcgtacatggagttgatggtgaccctgccggccgactggccgatcagcgatggcgccttcgaggatgagcgcaactactggccggtgcgcctgctgaagacgctggcgcggctgccgcacgagtacgacacctggctgggcttcggccacaccattcccaacggccatccgtccgagccgtatgccgatggcgtggggttcgacggggccatcgtgctgccgccggtcaccaccccggatgacttcggcacgctggagctggacgatggcaagatcatccagttcatggccatcgtgccgctgtatccgcaggagatggacctgaagctgaagaaggacgccgagaccctgctggaccgtttcgatgccaaggacatcaaggatgtgatcgagcctggccgcgtcaacgtggcgaagaagcgtttcggtttgttctga

SEQ ID NO: 515160 - DNA, 2505 bp, Stenotrophomonas maltophilia
atgaacgccccgctcttccctatttccccgctgctgccgcagatccagcagcacctcgccgcacagccgcggctggtgctggaggcgccgcccggcgccggcaagaccacccaggtgccgctggcgctgctcgatgcaccgtggctgcaggggcggaagatcatcctgctggaaccgcgccgggtcgccgcacgcagcgccgcgctgttcatggcgcggcagctgtgcgaggaggtgggcggcacggtcggctaccgcatccgcttcgagaacaaggtttcggcacgcacccgcattgacgtcgtcaccgaaggcatcctgacccgcatgttgcaggacgacccgatgctggaagaggtcggtgcgatcctgttcgacgaattccacgagcgccatctcagcggtgatctcggcctggcactggcgctggatgtgcaggcacagctgcgcgatgacctgcgcctggtggtgatgtcggcaacgctggatggcgaacggctggcacgcttcctcgatgcgccgcggctgagcagcgagggccgcagctacccggtgacggtcagccatttcccggcgcgccgcgatgaggcgctggaactgcaggttcgccgcgcggtgcagcaggccctggctgaacatcccggtgacctgctggtgttcctgcccggccaacgcgagatcgcgcgggtgcaggccgggctgcaggaatcgctggatgccggcgtcgaagtgctggccctgcacggtgaacttccggtggagcagcaggcgcgggtcctgcaggcggccagtgatggtcgtcggcgtgtggtgctggccaccaacgtggccgagtcctcggtgacgctgccgggcgtgcgcgtggtgatcgacagcggccaggcgcgcgagccgcgctacgaccccaacagtggcttcacccggctggacgtggtggccatcgcccaagcgtcggccgaccagcgcgcaggccgtgccggccgcgttgccgaaggcgtggcatggcggctgtggccccagtcgcagcggctggaaccgcagcgccgcgccgagatcgatcaggtcgagctggccggactggcgctggaactggccgcctggggcagcagcgacctgcgcttcctcgatccgccaccggccggcccgatgggtgccgcccgcgaactgctgcagcggctcggcgcgctgtccagcagcggtgcgatcaccgcacttggccgccgtgtgctggcgctgggcacgcatccgcggatggcggcgatgctgctggccgcgcccgatgcccgcgcacaggcgctggccgccgatctggccgccctgctggaggcgcgcgatccgttgcgtcagggaggtgatgcgctggccgcgcgttggcgtgcgctggcggcattccgcaatggccgcgcaccgggcgacgccaaccgcagcggcttggccgcgatcgatgccgccgccaagcagtggcgtcgccgcctgcgttgcgaggccgcaccaccggccagcattgaggcgcacgaactgggcgacctgctcgcgcacgccttccccgaccgcatcggtgtccagcatcccagcgatccgctgcgctacctgctggccaacggtcgcagcgcacgcctgcacgatctgagcgacctgcgtggcgagccgtggctggtagccagtgaactgcgcttcgaggcacgcgacgcgctgctgctgcgtgccgcaccggtggacgagggccagctgcgcaaggcgtggccggagcgcttcgtgaccgaggacgtggtgcgctgggacagcgagcgtcgcgccctggtggcactccgcgagacccgtttcgaccgcatcgtgctggacagccgctcggccggccgggttgatccgcagcacgccgcacaggcgctgaccgacgcggtggccgaactcggcctgcaggcgctgccgtggaccgaaggcctgcgccaatggcaggcacgcgtggagtcgctgcggcgctggatgcccgaactcggcctgcccgactgcagcgacgacgccctgctggccacacgtgcgcaatggctgcagcccgcgttcgccggcaagagccgcctggatgcgctggacgagtccagcttcggcgaagcgctgaagtcgcctctggagtggtcacagcgtcagctggtcgagcgtcatgcgccgacccgcatcaccgtgccgtccgggctggagcggccgatcacctatgcgctggacagcgagagcggcgaaccgctgccgccggtgctggcggtgaagctgcaggaactgttcggcctggctgacaccccgcgcatcgccgacggccgcgtcccgctgaccctgcacctgctctcgcccggtggccgcccgctgcaggtcacccaggacctgcgcaatttctgggaaaacacctacacggaagtgaaaaaggaaatgaagggccgctacccgcgccatccgtggccggatgacccgtggacggcgacggccacccatcgggccaagccgcgcgggacctga

SEQ ID NO: 515161 - DNA, 1770 bp, Stenotrophomonas maltophilia
atgctgctgctgcgcgcttcaggccagcagttctttaatgcgtcatcgctcaatctcagcactctatctgatacgcagaccgcagccgatctgatgagctatgtgcaagccttcagcagggatgcacgtgagatcttcgagcacttccattttgaagatttcgttcagcagctggaaactgccaacctgctttatcaagtggtacagcgtttcgcagctgcggatctgagcccggagcgcatcagcaacttcggcatgggcatcatctttgaagagctgatccgcaagtttgcggagagctctaacgaaaccgccggtgagcacttcacgccgcgcgatatcgtgcacctcaccacctccttggtgatcaccaatcaggaccacaagctcgcgcccaacagcatcgtcaccatctatgatccaaccgccggcaccggcggctttctgtccgagggtgatgagtacatccagtccatcagcgaaaaggtcagcgtgtcgctgcacggccaggagctcaaccccgagtcctacgctatctgcaaggcggacatgctgatcaagggccaggacgtggccagcatcaagctcggcaataccctatccaacgacctgctggccgataagcgcttcgacttcatgctcagcaatccgccgtttggcgtggaatggaagaaggtgcaaaagcagatcaccgacgagcacagccacaaaggtttcgacggccgcttcggccctggtctgcctcgggtgtccgacggttcgctgctgtttcttctccacttggtcagcaagatgcgtgacccgcgcgacggtggctcgcgcatcggcatcatcctcaatggctcgccattgtttaccggcggtgcaggttcgggtgagtcggagatacgccgctacctgctgcagaacgatctcgtcgaagccatcgtcgcgttgcccaccgacatgttctacaacaccggcatcgccacctatgtgtggatactcagcaaccacaagaccgctgctcgccagggcaaggtgcagttgatcgacggcacccagcactacgccaaaatgcgcaagtcgctgggcagtaagcgccagtacatcaccgaggatcaaatcagcgagcttgtgcgcctgtatggcagcttcgagcaatccacgctgagcaaaatcttccccatcgacgccttcggctaccgccgcatcaccgtcgaacgcccgctgcgcctgaacttccaagccagcgccgagcgcatcgctagagtgctggaagaaagagtcctgcagaaactcgacagcgccgtccaacagcaactgatagtcgccctgcgaacgatggacgcctgtgtgttgcaccgcaaccgcgagaagtttagcaaactgctgaaaaaagccctcgccgtgcacggcgttagtctcagcacaccggaggtaaaagccctgatgagcgctctaagcgagcgcgaccccgaggcggatatctgcatgaccaaaggccagccggaagccgacgccggcctgcgcgataacgagaacgtgccgttgggcgaatctgtgcatgagtactttgcgcgcgaagtcatgccccatgtgccggatgcctggatcgacgaaagcaaatccgatgcgcaggacggcgaagtcggcattgtcggcttcgagatcccctttaaccgccacttctatgtattccagccgccgcgcccattggtcgagatcgaccgtgacctaaaagtctgcaccgaccgtatcaagcagatgattgaggggctgtcggcatga

SEQ ID NO: 515162 - DNA, 1293 bp, Stenotrophomonas maltophilia
atgacgtttcagaaatacccggaatacaagaattctgacgtcgaatggttgggagaggtgccggcgcactggatcagaggctcactgaaaaatctggcttggatacgtaatggcaaagactacaaggacgttgaaagcactgatggtgagtatccggtcattggctctgggggcatgttctccaaagccagtcagtatctgcatgatggtgagtccgtcctgctggggcggaaaggtactattaataagcctctctatataaatggtcgattttggaccgtggatactatgttctacacggaggtcgccaagggaacttctgcgaaatttctttactactacgctcttacaataccctttgagttttactcgacgagcactgctctgccgagtatgacgcaagaaggtttattaaatcatcccgcagcaattccatctaattttgaacaaacccaaatcgcccgcttcctcgaccacgaaaccgcccgcatcgacgcgctgatcgaagagcagcagcgcctgatcgaactgcttaaggaaaagcgccaagccgtaatttcccatgccgtcaccaaaggcctcgaccccacggtgccgatgaaagattccggcgtggaatggttgggggaggtgccggtgcattggaacgtaagtcggctaaaattcgtttctacaattatcgactgtaaaaatagaacgccggaatatgtagacgatggtgaatatttggtcgtcagaacatcaaatgttaaaaatcaagctcttagtcttgatgggggtctttatacggatgaggccaactttagaatatggacgcagcgcggtgttcctccggctggctcgattctgttcacccgggaggctccggcgggtgaggtgtgtttagtgcccgaggcggttcctttatgtcttggtcagagaatgatgaacattattccgcacgacttgggctgcgcgacctttctgtttgattttcttacctcagattgccttgcccgatacatcgaaagcgttgcgcatggaagtacagtttcgcatctgcgtgtagaacaaatttatgacattccagttgctatccctccagtgagcgagcaggtgcagatcgatgaactagtatccgagttgaagcgaaaatattcaggcctcataagcgaaacaaatcaggccgtattattactgcacgagcgccgctccgccctaatttccgccgccgtcacaggcaaaatcgacgtgcgcgactggcagcctccggtcagcgtgcaagtccccacgatagaagtagaggccgtataa

SEQ ID NO: 515163 - DNA, 3189 bp, Stenotrophomonas maltophilia
atggcgggcagcaaggaagctcagtttcaacgcgacattatcgacgccctggctgcccaaggctggctggtgggtactgctagcagctatgaccggcgcacggcgttgtataccgaagatgtgctgggctacttcaaggacgcctggcccgagcgctgggacaagctcgccaaggccaaccctaatgcgccggaagaggtgctggtgcaaaagctggtgcgcgagctggagcagagcggcactctggatgtgttgcgccatggctttaagctgccggcggtgaaggtggagctgtgcagcttccagcccgaccacggcatgaacccggataccctcaagcgctaccagtgcaaccgcttgcgcgtggtgccggaggtgtcctattcgccgcatgcgcgtgaggcgggcagcagcgggcaaagctacaacccacggctggatctggtgctgttcgtcaacggtatccccacggccacgctggagctgaaaagcgagttcaagcagtcggtggaaaacgccaagcgccaataccgttacgaccgcccggtaaaagacccgctgacgcgcaagccggagccgttgctgaccttcaagcgcggtgcgctggtgcactttgccgtcggccagaacgaggtggcgatgaccacccaactggcgggtaaggacaccttcttcctgccgttcaaccttggcagcgaagaaggcggagcgggcaacccaacgcctgcagacgacagccagtacgcgaccagctacctgtggcaacgtctgatgcaaccggatgcctggctcaaggtgctggggcgctttctgcacctggacaagaaaaccagcgaaagctttgacggcacgccggtaaccaaggagatgatgattttcccgcgttaccaccagtgggaagtggtcaacaagttgatcaacaccacccgtgccgaagggccgggcaagcgctacttgatccagcacagcgccggctcgggcaagtccaactccatcgcctggaccgcccatcaactggcctcgctgtatgactatgccggccaacggctgttcgactcggtgatcgtggtcaccgaccgtacggttctggacagccagctgcagaacaccatctaccagttcgagcacgctcagggtgtagtcaaaccgatcagccgtgatgtcggcaaccagagcaaatccgaacaactggccgaggcgttggccgaacagacgcgcatcatcatcgtcaccattcagactttcccggcgctgttcgacgccctggacaaataccccaagctggccagcgggcgctatgcggtaatcgccgacgaggcgcattcctcgcagaccggctcatcggccagcaagctgaaacagattcttggtagcgatgctttggaggccgaggaagccagcgccgaagagctgctcgacgccgccgtgcaggcgcgccaaccgaatgagcgcatcagctactacgcctttaccgctacgcccaaggccaagaccctggagctgttcggtcgcccagccgatccgacgttgccgcccagttccaccaacaagccggaggcgtttcacctgtactccatgcgccaggccatcgaggaaggttttatcctcgacgtgctgcgcaactacaccacctacagcaccgcctggaagatcgcccatccggatggcgatgatgacgaggtggacagcaagaaggcgcgcatcaagctggcccgttgggtgcgtctgcacccttacaacatcagccagaaggtcgaggtaatcgtcgagcacttccgcgccaatatccgtggcctgctgggtggccaggccaaggccatggtggtaaccagcagccgccaggaggctgtgcgttaccagttggcggtaaaggcctatgtgcagcagatgagttacagcgatgtgcacccgctggtggcgttctccggcagcgtgttatcggatgaggtgattcccgaagaggtgacggaaagcagcagtctactcaacgccggcctgaatggccgtgacctggcggacgccttcgatacccaggacttcaatgtgatgatcgcggccaacaagtaccagaccggcttcgatcaacccaagctctgcgccatgtacgtggacaagaagctgcaaggcgtggactgcgtgcagaccctgtcgcgactgaaccgcacctttggggatagcaaggaaaccttcatcctcgacttcttcaacgaaccgcaggatattctcgacgccttcttgccgtactacgccaaggccgagctgaccgatgtgaccgacccgcagatcatttatgacctgcagaagaagttggatgctgaggggatctatcactggcaggaggtcgaggcgttcgccatggccttcttcgaccccaaggcggcggccagcaagctcagctactactgcacaccggccaaggagcgctttgccaagcgttatgccttctccgtggagtcccgccaacaagcgctggattacaagcgcacggccgaagccaatggcgacagcgccggcctgaagaaagccgagcacgcactgaaagaggccggcgagcaggtggaccagctcgacctgttccgcaagaacctgcagagctttgtgcgcctgtacgagttcctctcgcagattgtgccctacgaggaccgggaactggagcagctctgcgtgtacgccaagcacctccatccgttactgcgcgtggaccgtctgcaacaagacgatgtggacgtgggcgagctgcaattgagtcattaccgtctaagcaagcgcgctgagcactgcctgcgcttgagtgaggaggagggcgaatacaccctaaagcccggtagtgacgtgggcagcggcaacccacatgaccctgaaaagaagcgcctatcggaaatcatcgaagcgctgaacgatatcttcggtgcggaagttagtgatgacgatcagctgcagttcctcactggcatcgctcagcgcattagccgtcaggaagatgtaatggcccaggtaaacaaccactcggtggagcaggtgatgcatgggctgttccccaagcgcgttctcgacaccgttctcgacgccatgactgaccacgagaagctgtcgctggaagtgctggatagcgaaagcaagagccgtgcattcgcgctggtgattctgaagatgctcaagacggccgttggtactcgcaagcttgagtag

SEQ ID NO: 515164 - DNA, 828 bp, Stenotrophomonas maltophilia
atgttgggtatccgtttcgttgccaccgaatatgctacggggaaaactcacggcggccgtatcgactcactgggcctggacgagaacaatagtcctgtgattcttgagtacaagcgttccctcggcgagaacgtaatcaaccagggtctctactacctgaactggttgatggaccaccaagcggagttcaagctccaagtgatggacactcttggcatggatgtggctgcacagattgactggagttcaccgcgagttctttgtatcgcctctgatttcacaaagttcgatgcgcatgccgttcagcagatcaatcaaggcgtggagctgatccggtatcgccgttttggtgctgatcttctgctctttgagcaggtcaacactgtcggcggcccgcgatccaagccgaggccgcggatccaagaggttgaggcccagtctgcgagtgggactcgaccagttggagctactggcgaccgtagctatgcagaatggatgggcttgtttgggccggatatgaaagagttggtcagctcactggatgacttcatcggatcgcttggtgatgacgttcagcgaaaagagctgaagttgtacatggccttcaagcgtctgaagaacttcgcaacggttgttcctcagaagagccgtctgcttctatttttacacgtggacccagattctctcatgccacttgcacccaatatgcgtgatgcgagggcatttggtcactggggaacgggtgatctggaggttgcaatctccagttttgaagaactcgagcaagcgaagccgttcatcgtgcaggcatacgcgggcagggcatag

SEQ ID NO: 515165 - DNA, 798 bp, Stenotrophomonas maltophilia
atgccaaaagattggtttgaatttcaggagcgaataaaggatcactttgtgtcgctcggtgccgaagcccaaacaaatgttcgcgtgcaaggcgttaggacatgccatgacatagatgtgtttgttcgaaccaggttccttggagaggatttaatatggctggtcgaggccaaattctggaaggctaaggttacgaaggctcaggtgttagcgctcagggcaattgctgaggacgttggtgctgaccgtggcttcatagtttcaacaaatggttttcaggaaggggcttttgaggctgccgagaaaaccaacattaagctaaaaacctttgaagagttggttattgacactaggggatatgcggaattcgagattctgaaaacgtatcttgatagggtgaatttgctagaggatagatactggtcgcactcgaagtctgcgagaattgagtatggcctgcggcatgatattcttgataatgtgttcactttcacgggtcaagagcttctgaggaccgctagaagtgcaatcatggcggcagaagatcgcaattatcctatcgacctggaaatggttctgacggtgcgcaaaggcgaggctgttgctgacaattttcagcaactttgcaactggctgaatttgaacttgaaccatttggacgagcgtcttcttaacgcggagtggcgcatgtataaggacggaaagtacaatccgcgtacggatcggactaaagcacgagaggcctacactacagaaattatggctcgggcgatcatgcgcaagccggaggttgggtag

SEQ ID NO: 515166 - DNA, 843 bp, Stenotrophomonas maltophilia
atggaaaaggaaatcatacagaggtcggtcagtcggcttgccaacacgatgcgcatctatgcggagcgacatcttctgtacaagggattggtggcagtagacagagaagaggcaatcgagaatctggatagagcatgggaagcaatacttgaggcttttcacactttatacgacgtctccaagaatgagttcgactactttgcgaccgcagatacgtcattgctgatctcattgcgcaatgcgctgcaccatcgcgatcattcattgttctctagtttacttccggaattgtggctgtgcgaatcccctgagctgcgagaaggtgcggcatacttgttggcgagtcataattctctgcggggccggaagtccccaatgcatcactttatcaagctagaggacatatactctcgcctagaccctagcaagaaatcccctgagcttgtacgaatcgggaagattcctgaactccagcagagattcaatctaattgcgcaagaccttggacttgaaattgtcatagcggaggcgaaggccgagcgatatcctgagaaacaagtttatattgacatcgtgccaatacttatatccggcgtgcgcagggcattcaggaatctcaaagaactgggggttgagttcaaaggatacgacgcaaaaacctacgagaattgtttcgtcgaagagttggagattgacctcacatcctttgagttcaaaatgctcagaatgaacatgattcagctccacctcggcccggccttgacaattaatgaggcagcaatctcatatgatcgcaaagagcgctccaacaaagttagcattgaccccttaatcacgcagtaa

SEQ ID NO: 515167 - DNA, 225 bp, Stenotrophomonas maltophilia
atgccgttcgatgacgcaatctgggccttggaaggggtgctcggggcgttcatcatggaagctagcgatgagcttgaggctgcggagacgtcgggcaatccaaaggcaatagctgaggccaatgagaaaaaacgactgatgtcgttcgccaggtccaaaaacattggcatggctgaaattgacgatttgtgggagtactttcaagtcaacttcagagggacctga

SEQ ID NO: 515168 - DNA, 1155 bp, Stenotrophomonas maltophilia
gtgaacaagaaagttctgagaattctgggaataagaggtgttcccgccgcgcacggtggctttgaaaccttcgccgagtaccttgctcttcaccttgtgtcccggggatggcaagtgattgtctactgccaagaggacggcaagggtgacaggtgggaggacgaatggaatggagtcagacggattcacattcccgtggcagttccgggcgccgcaggcacaatcctgtttgactggaagtcgaattgtgatgcttccgttgctggcgatctttgcctgaccttgggctacaacactgcaatcttctcaggtcttctacgggcgagggatgtcaccaatgtcatcaatatggatggcattgaatgggcacgtgcgaaatggggacccgtcgccaagctttggttctggatcaatgaacgtcttggttgctggctgggcgatcatcttgttgcagatcatccccgcatcaaggaccacctggcgacgcgggtgaggcgtgcaaagattacaaccatcgcgtatggcgctgagtgtgtgaagtcggctgattgctccctggttgagcgatatgggctgacgcctcgccagtaccttaccgtcattgcgcggccggagcccgagaactccttgctggagattgtgcaaggcttctcggctcgccctcgcagccagaagctagcgattctggggaggtatgagcgtagcaatgcgtatcatcggaaagtaatcgaggcggcgagtgatgatgttgtcttccttgggccgatctatgacaaggctgcggtgaaggcgcttcgattgcacagccttgcatacgtacatggccatcaggtgggggggaccaatccttcgcttgtcgaagctcttggcgctgccaatccagtcatcgcgcatgacaatccgttcaacaggtgggtggcaggggattcggcacgctacttcacagacgccgattcgtttgcctctttgatggacggattcggggcgcgcgaaggcgagctgcagtcactgtcctgcgcggccgcatcgcgtcatgcggaggcctttacctgggagcgggtacttgcacagtacgagcagcttctgtctgcgttctcgcatgggcgtgaacatggcgatgatgcggctcggaagatggatctggatctgcgatga

SEQ ID NO: 515169 - DNA, 825 bp, Stenotrophomonas maltophilia
atgagctcagcagccaccctcgtcatcctggtcgtgctctatcggatggatccagctagctcgcccacattacagtctctgagcgaagcgctgcgcaggccgggtggattcggcggccgtgtggtggtctgggacaacagtcctgtgtccttcggtgctgattcaattgcgggcctggatctgtcagggttcgatcggagctacgttccttgtccggagaatgccggcctggctacggtctacaactcggtcagtgcgaccatgaagggtgatcttcttctgattcttgatcaggactcaaagctgccggctggatttctggagacgctgagcctggaggtttcagccaatccagcaagcaacctgtttctacccgttgtggaatccaatggcagatgtgttagcccggggcgtcttcgggtgttcaagggaaagcacgtgagcgctccagcaatggggcgccagtctcccaggaacgtcctggccatctccagcggaatggtgatccgttccggatatctgcagcagccccgatttgatgagcgcctgactctgtatggaattgatacgcgcttcatgatcgactttgccgagtctgagcggcaggtggtggtcatgcccgtggtgattggccacgatacggcgctctggtcggatatggccgcagatggcatgttgtggcggatccgctcgctggtacattcctggcccattgtgttcgagcagcggccgattgcgcgcacgctctcttggctgtacgcgcgctatgttctggtcaagcttgcggtgaagtaccgtgatcccagattcctctcggtcttctga

SEQ ID NO: 515170 - DNA, 894 bp, Stenotrophomonas maltophilia
atgacccaaaactactctagggcggcatcaggtcgtggctccagcgagcgtgctcagcggctgcttaacttgcgagctaccttcgacggactaggcattggtgccggctttgccagtgtagtcgcagcaatcctattttcagatgttctcggccttccgcggcctgtaatgatcagcgtgtcggcaatcattgccgggctatgtaccgccgacattgtcagcctctacctccgtgggaaaatcaccctgggaactactgctacggtgaccatcacgtcgagaggggccgacagtctgacggaagagcaagttaccgatctgcgcaatctgctgagcgacttgggagataggtcccgtgagtcagagcaggacgaaagtgcaggggcagaccggctactacggcattcgcgtgcagtcattgacgaagcgagaaagcgtttgctcgacaatgcttctcagatcaataagcgatctcaagttagtctggtaaccggaagcggcatcgcggtgggagcagttcttattctccttgcgtttgcgttcccacccattcccatgtattcgcttaggtgggagcaaatgttgtgggcgtatctgccgaaactgggcgtaattgtgatgttggaagtgttcgcgttcttcttcttgaggctttatagagcgtcgctagttgagtcgcgtgccgttcatgctgatttgaatgctttggccttgaaggaagctgcgttagttgccggctgggctgaatcagatcagcaacgtttgcagctcgcaacgactgtcattgaacctgtgcctgaaggctatcgtcctgccgatgtttccagtcaaggcttggatcctaaattggttgcggatctggtggcgtcaatttccaagttggtacgcggatga

SEQ ID NO: 515171 - DNA, 504 bp, Stenotrophomonas maltophilia
gtgcggcgtgtcgatcccgccggcggtgcggttgccgccaaccaggtgcgcgcgtgggccgacaccctgatgaccgcgctctacaccgcgcagcctgtccgctgggagtatcgcaacaagaaggacgtgagcccgggttgctgggtccaagccgacgctgggcacgtctacgccgcccaccagcgtgggctcgttgtccgcgccctgttcgaaaccccgcgcgtgatccaaccggagaagctgcacgaattccgggggcgcgtgtacgtccgctgcggcgacagcgaggattggggcgggccggattgtgagccgctgacccagaaagtcgacccgcgcacccggctcccagtcgaggcgagctggttccttgagccgctcaagtggatccgcgacgcgggaccggcaccgatcggcacccacgaacgccgccgcagggccaccgaagccaccttcctcatcgaaaagctcgaagcccacatcgaggagtgcaacaagccatga

SEQ ID NO: 515172 - DNA, 879 bp, Stenotrophomonas maltophilia
gtgaaaggcaagctcagcctcgcggcgatcatggagcgcatcgatgacggacagcctgcggcacacacggagatcgacgtgtctggctatgggaacacgcctttcgtgttccggatcagtgactttggtcgtgcgctgaagattaccagcaccacggaagcgggttcgtccatcgcggtctccggaagcgccgcagcggttctgttcggagaggtgacggcctatcccggcgtccagaacctcccgggatatgtccatgggtcgttcgacatctctggtacagcggttgggcccagcagcaacctgctgatcacctcgctcggtaagcgactgggtgactgcacctccgtgagcaaggttttgcaggtagttgtgaacggcggcgcgccgctggtgatcccgttcacgctgaactacacggacatcagcaacgcgacgattctggcggcgatcaactcggtgctcggcagcaatgcggtggccactgagtacgccctgggcaaccgctaccggccgcgattcagcgatgaagaacagacgctggaaaatgcatctggcgtgggcatcccgatggggaccgtgctggcctttgactcggcctataagcgcgtgagggcaatgacttccgctgacccggccagcctgtttgccggcgtcgcctgggaggacatttaccctggggcatggggacgggtgaagacgtccggctacttaccgatcaatgacgtgcgccggacggggagtgcttcgctggccttcggttctacgatgagcgttggcgccacacctggcgtagttgcgcctggcggtagccaaggacttctttccgccattcgtagtgacgcagtgagggtgggggggaagagggccgccatctga

SEQ ID NO: 515173 - DNA, 1008 bp, Stenotrophomonas maltophilia
atgattgctggtatccactatatgcggggtatcgctgccctgatggtggttgtgtttcatgccattagctttctcgtaatttatcgaggctatgattctccgatcgctcaccatgtgctggccactggtgtcgacatattcttcgtgatcagtgggttcttgatggtgagaaccactcgtcgctttgacggaggccgtctggactggcgccaatttttgaagaaacgcctagttcgaattgctccgttgtattgggctctgacacttgctctggcagctcttttgctttttaagccggacctcgctgagcgccaaatctacctttcgttcctgcttaagagcctggcgttcctaccgacggaggtccccgggagtgatgttcaatcgaccatcattccagtcggctggactctggtgtacgagatgttcttctacgccgtgttcgcatttgcgaccgctctgagttatcgaggaggtctgacaggcgtggctgcattctttgtgctgattgcgtccttgcacgggtatttctccaactactacctgtccctgtacagcaatccgatcattctggaattcgttttcggtatggcgattgccaggttgcgagcgccatccttgcgaatgggctgggtctttgtcgcagtagggttcgtggcccttgtagcgggcgcatacgtcgctggtgagaagctcgagtaccgcccatttaccgtaggcattggtgccgctctaatcatctacggggcatccggaatatctgtcgagcgtgcattgatcgggctgacggtactcggcgatatgtcctacagcttgtacctgacgcatggatacgtcattaagctcggatcgaagttcgtgcctccatcggcagcttcggttggcgtattgactgtggcgagtattgtcgctgcttacatcgtctacaggcttgtcgagttgcccgtacagaatttcctgtcgtctaagtcgaactccgcacctggattggctgccgagcgagcttga

SEQ ID NO: 515174 - DNA, 132 bp, Stenotrophomonas maltophilia
atgtctgagcgcagcgagttcggcgccgtccccagattcaccgagaagcgcagggcaccgatgcgcagcatcggctcgcgaccggcggagcgtttcttttggttacttttctttgcgcacaaagaaaagtaa

SEQ ID NO: 515175 - DNA, 2229 bp, Stenotrophomonas maltophilia
atgcacggaatgcagtacgcatcggccccgagcatcggcgccacggatgcagcccgttcccgatgggctcggcctgaaacgctgtgggtggcaagctggctgctgctgtgcctgccgtggctgatcggtaccaaggtcattccgtacgacgccgtgcagcagttcttcccggcggtcagtttcagtgccgagcagcttcggaacctccaggccccttggtggaatccctacctgttcggtggctatccgcagatcgccgatccgcagatgatgacgctgcaaccgaccatggtcctgccgatgctgctggcgccggcgtcgttgcatctgttcaccgtggtggtgctgctgcatgtgctggcgggtggcttcggcgcactgcgcctggcgcgttcattcggtctttctgcacccgcacagtggttctttgcgatggtgctgatgttcggtgcagtggcagcctctcgcctgcagcacacgccgatgatcgtcagctacagcctgcttccctggctgtggctgggattgtcgactgttcggaaccggggccgcacgcgtgacgtgctgctggcgggacttgcaggcggcctgtgcgcgctgcagctgacccaggtgacctatttcatcatcctggcgtgtgccgtgtacgccgcaggcgcagtgctgtcggcaacaggcaagcgcttccgcttcgcattgcagctgtccgcggtcgccctgatcgccgccgccgtgagcgccccccagtggctttccacgttggcctggctgggtgacaccaatcgtgatggcatgaccctggagatggcgctggccggtgcgatgcactggcaggggctggcaacactgctatcgggaaatgtgttctcgcaggtacgtggggtcagctggtccttcggcgatatcaccacggactacctctatttcggcgcggtgccactggcgctctggctggcctggggcggccgcgttgtgcacaggcagcgacgggccacctgtctggcgctcggtgtactgctgttgacgacactggtcgcgctgggtgacgtcactccgctgttcgcatggctcttcagcgggttgcccggtcttgatctgttccgacggccctctgacgcgctgttccttgcggtaccggcagcggcctggctgggtgcacaggcgttgcaggttgcgttggaaaagcgcgcactgcgcccgcaccgggtgtcgttggtggtagtcgttgtcctggtgtgcgttgcctcctggctggccgcgagccacgggcatctggaagcctttgcgtggctggcagtcagtgccggcatcggcactgccgcggtgcagctgctgcgccggcatccggctccggtgcgctggctgatcgcactggtcgtgttcgacatgctgctgttcaacgtgggaacacgcttcaatacatcgggcgcccgtccgccggtaatgacggccgagcgcaatggcgccacgcagcgcgcctatacgctgctcgccgccgaacggcgcactggcctgcccgagcgcgccatcgtcttcggcatcggcgtgctgaccaatggcgcggctgtgcatgcgattccactggccaatggctacaacccgctgctgtccagtgattaccaggacatggtcggcatgccgacggagcccgtggctgctttccagcagaaggcgacgaccccttgggctcccgacatggacgcccccgtgtacgacctgctgggtgtccgctggctgctgtcaccggagccgtttgcagggtccgatgaccaaggcagcgacgtgcagctggcgctacgcggaagtgtgctgccgcgcacgctcaacccgcaacgggtgcagcggcacagtgaacgcctgccaccggccactgagttcaaccagacggacttcagccaggtggtctggctgcccaccgggcagcagacggactgccctgaacgtgaggcgggccggctgaaggtgctctcgcaggcctatcagcccggaaggatcgcccttgacgtggacgccgagcatccggcgtggctggtgatcaatgaggtgaccgcccagggctggcaggcccggctggatggcggagcgtcgttgccgctaatgcgtgccaacgggctcttccacgcggtgtgtgtgcccgcggggcggcatcgtgtggaacttgggtacagcccgctgcagctgtggcgggatgggctgccgaagcgattcgccgcgggtggagcaggctga

SEQ ID NO: 515176 - DNA, 132 bp, Stenotrophomonas maltophilia
atgaaaacaggcttttcgctccagtcgctgaacaagggaaactattttttaacgtgcgtcggattcgattcatgttggggcgactacggtgtgctcgccccgcaaccgggggcccaaaacaagaaacattag

SEQ ID NO: 515177 - DNA, 270 bp, Stenotrophomonas maltophilia
atgagcgccgccattcgcaagaccgctagcttcggagtgccgtgggagtcggcctacgggtacgtgcaggccgtccgcgtcaacaacacgatcttcgtgtccggccagctgtcgcatacggcggaggggcagttggtagcgccggcggagctgggggcgagcggcaagcccgccaatttcgacaccatggaagctcagatgaggcgcacctacgagaatgcccaggcgctgctagcggagctgggcgggccaccaacccagttcgcatga

SEQ ID NO: 515178 - DNA, 903 bp, Stenotrophomonas maltophilia
atgaacctgaaaaagacctcacttgcagcgttagtcctgtcactcatcgcgataggggcatttctagcaattaacgcgcatcacaaggatgctccccaatctgaattggacgtacagcagggggcagacgcaagagcggcagatgccagcagcaatcaagcagggtcgctctcggctctgatcaaacagaagaagcttgaccctcgctacgtacaaccccagggaacgaaggcattcgcgatttcccgaaccggagaatttcgtcctgaaggtaatgccaaggactatataacctcattgctaagtgcctcggacgctggtgatagcaccgcgacattcaacatataccttgccgctcttgactgcaggaatgccggctctccaagcgagatccagtctgccacacgcttgccggacgagcgaacgcagcatgcagcgcttgaatcgtcggatcgtcggctcggtgaatgcgagtccctgcttatagacccagcactctctgcatctggtaagtggcttctccgggcggcccagcaagggtcgatagaagccatgcttctctacacaactgacaccgaatcggcgttcggaggatcagcaaacgccattcgtgatcctgacttggtcgcggattggaaaaggaactccgttctattcctcgacaccgctgttcggaatggaagtgtcgacgcactagtcaagctcgccaccgccaacaacaacggaatcatcgttgaaagaaacccaactgaggcctatgcctactacctcgctgcccacagggcaatgccccaagcgacctcagagaaattgctcggcagatacagagaagaactgaattcatctcagcagcaggatgcgatcagaagggccgacgcaatctacaaaaactgctgccaataa

SEQ ID NO: 515179 - DNA, 753 bp, Stenotrophomonas maltophilia
atgagctcggctgaagcactggccctttgcctgtctgagaatcacctgcggcaccttcttccccctgatgtcatggcgctgctcgggccgcacttctcggatgcacactctcgtatcaatggccagatatcgggtggtcacggtcgctgggcccagcgagtgcgcagcatacccaatggcaaggcgctgctgcccgcggtggtggatggaaccgtctggaacacggtagccgaggcactgctgcatcaacgccagctacaagtagattatctcagtcgcacaaaaggcgagagcaaacgcatgacccttcatcccaagggtctcgtttcgcgcggaccagcgagctatctgatagcaagcgtgtccggctatcaggatgtacgccactttgcactgcatcgcatcgctcaggcgtcgcttctggatattcgctccgatgatgatgggttcgagatggaccactatctgcctggtgcagcgttcacgccgcggcaaggctcgggaaacatcgaactgattgccgacatccatcctcagcttgcttggacgctccgggaaacaccactgtgcgaagaccagcatcttgaagcgctggaggctacggactgggtccgtatccacgcacacctgccagacgaccaggagaatttctggtggctgtacagcctgggggacaacatccgggtccttcagcccagtgggcttcgcgaagccattcttgaccgcaaccaacgcgtcatttccctttactga

SEQ ID NO: 515180 - DNA, 1329 bp, Stenotrophomonas maltophilia
atgatccaccagatcgatcagagcaccatgctcatgcaacgaattgcttcgactgcccagaataaagcgatcaaaggcggatttgcggccgaagcgtggcatgccgaaacgttcaatcttgatgcgatcctgaaagacaaggatgtccgtgcgttcaccgacacgttcagcaacagcccactatcacgcaatcacacgacccacgatatcgttgtgatgaaaggggatgagcagctgctgggtgcgcagctcaagtacttcaaagatgctgatgcaacccagaaagccttccgctcaagcaaggacggcattcatcgttaccaagacagcgatctgttcgtagggccgtccgaccagattgagggtatccgtcagtccgcccagcgcgacgtgttgaagaaccagcagaagcgtcccgccgtgtccgaggctgcggccaaggtccgcgacaaagctgcagacagcatagaggtcgatggagccgcctcaactccactcagcaaacgcgatgccgaacagcttggcacgggtagcgcagaggggaaagccgctcacaaacagatgcaggatggctacctgaacagggcgacgctgcagcagagcatgcgtgccgctggctccgccgcactggttacctcggtgatcgccggcagcatcaacaccttccagcacctgcagcatgtccgcgatggaaagatcactaccgaacaagccgtacaccggatcctgcagaacaccgtcatagccgctggcgatgcggcgctcaaagccggcacggcgaccgcaagcgttgcactggccacccgcaccatgccggccctgtttgcaggtgctggcttcaccagcgtccttgcccgcggtggtgtcgccggcgcggccgtgtgcgccgtcgacttggtccagtgcctggtgatggtcggggttggtcgcatgacgtttgcagagctggagacacggaccggcaccaacatcctgcagaccagcgcgggcgtcctgggctcctccatcggcgcgacgctgggcatggtgggcggaccaccgggtgcccttgtcggcggcatcatcggcggcatcattacctcgatggcaatgaccatcgccgtggacaaccacgtcgaaaaagcattccgcttgacgctggaaggaacccgcgaggtcgttgagaacgggctgtcactgcagcaatcccttgagctgctgcaggaatcccaactgttctatgccgatttccacaagggactggtgctctctgaaaagcacttttcagggcagatagcgaccctgaaagcccaaagtcgtcaacttcgcgaaaaactcaaccgtctgtaa

SEQ ID NO: 515181 - DNA, 3204 bp, Stenotrophomonas maltophilia
atgaacagcatcatcgaagacacatccatggacgttttccattcgtcgctcgacgcggatgaacagcgagcagtcgcagatcttgttgaacgtcaccgcggcaatgcggccatgacccagcgattggcgctcgacgcgtcccgactgctgaccagcagccaggaccggcttcagaagcaggccggtgccggcttctgcaaacgtctgctcggcgccatcagcggctcgacccgcaacaatgcgcttgccaaccaacatgacacgctgaagatccagaagattgcctggtactatctccaacagcttcagcagcagaacctgatcaacgctcaggccatcgccgtcatccgcaacaatctcgggacgatgaatgagttcatcatcgaaacccgctgtttcctcgacgaggcaatcgacaggattggcaaccggcttcgcccccttgaaaacaatgtccggctcaacaagtggtcgctgaacatcgaggcaaacaagcggcgctatcgctcactcccgcgctcgcttcttgtcgtacagctcgcttatgacttcatgctcaagcaccaggatatcgagctgacgctggaggacatcaatcacctggtggtgacgcttgagaatcttggcgtcaactgtgatgacgaggcccgcctgcttgacttcatcatcgacctcatcgaccagatggatgttactggcatcgatctttaccgacgcaacatccaaatcgtcaccgaagacattgagatcgagtccgcgttcatccagtccaatgtttccggcatcggattcaatgcgctctactatctgtccgaccagcacagcaggatcatggcgctgatcagcgacgatgagctgtgcaattcagatgccgcgcgtgagaaaatcatctcccgcatctttggtgacgagttcgacggcctggcaacgacgtacacgttgcgtgacctggtcgcggagatcgtgggtgggggcctgctggccatcgccatttaccgcgacatcaatgggcttgacgtccaggccgacgtatttccgccccctgaagagcagcaagagcagatctcgctggtttcccggctaccggacatcaagcagcacagcttccttgatgcagccgaggacgcagaccagcggcgcacctacatcgagttgctgtcgctctgcctgccggatgcttcggagtgcggaccactcggccgcgacttcatcaaccacctggccgccaaggctgatacgcctacggcagtgtcgcgcttcctctcgagggacacccgcggccacatgcaggctgaacagctggaagagctgcgcgtgctgctgaccgatgacaatcgcgtgtactgctggctgttggatgcattcttcctgctctccattgaaggacgaaaaattgagagtccgcaggtaatgcgcatcctcggagtgctcaagccagcacagttcaaggagcagcttgcagccatccagtcggtactcgcggatgaggatcacgaacgtgtgctgcaggcaggcgcgcggctgtcgcggctgactgctggctggtccaacgttctgcgctatcgtgaattcagcctcgttgacaccttcactgatgccaggcgagagctccacgcagcaagcctggcggccatcaacctctccggtgacctgagcaaggccggcatgaaggccatcgattacagctacttccttggcgcctctccctttgatgaggggattttcagcaaattcaccaacgcggtgggatctacggccttctcggtgggtcgaaagtcctgtgccaatacgctgaaccagatgcgcggcaaggtggttgatctgctcgccacccacgccggtgccttgtcttcagccaatgcgctggtaagtcggttcggactccccagattcgacttcgagaacgattccggatacgcggactttgatctcgacaactctgcagaaaatgagcagtggagcgatcagttcgagcactatcagcggcgtttggagaaaacactggatagcttctcgagcgcctgcgacgatgccgactgccagctgggactgttcgcagaaggagacttctccacacctgtactcgaacggcgcttgcgtgaacgggagcttgcactccagaagcagcgcgagaagaacctggccagccgttcggctacggtggagaaggacggtcaggtgctgcttgtcagcatcgattgggaagatatcacctccccaccctgcgacccggagcagatccgggatatgaagaccaacggtgaccgctggctggttgccacgcaagaaggccgctactacctcagtgatgaccgcgtgcagtgggaggaggtccacccctttggcgtggaaaccacttcgaccaagaatatcctcgtggtcagcggcacctggattctcaccgggtacagcgatggctttgcatactcgtccgacggccgtcactggaatcgaacgtcgtatcccatcaacgaaggggattattcctgttcgcctacagatgacatcgtacagttcgaaggcatctggatctggcgattcctctgcgactgtagttacaagtacaccaagaaggggttggtgttcgattcagaggagactggcagctatcgcgagacggtgctgtttgccactcagtcgttggacagcccttggtcccgctgggaaggcacacccaacttgccagagggtatggaggttgacgccctgcgtgcacttccgggccatcactcattgctgatcttctgcacctacaattggatctacggcaatgacaagaagaagactgaactcgagcccgctgtaaagtacttcgtgcccggcaaaggatggcgcaattgcacgtgggagggacggatgaaccatggttccggtgtattggtcacgcggatggccgatcatctgctgtgctttggatccaacgagttgttccgtgctaccaaagcctacgaatggagccgggacaaggacagtatttccgtacgagacgccttccacttggagaacatgagcgtcttctggcacacaagccacagcaagctcctgctcagccaggatggccggacgttcgcggatctgacccttgaagacggctgttggaactacctgtgcgccaacgaccagggacttctgagcgtgtactcacccaattcgcatgagacctggctgcgtactggacgctggcgcgtccagccgcagcactga

SEQ ID NO: 515182 - DNA, 369 bp, Stenotrophomonas maltophilia
gtggaagaactatcgccgctgttgatcgccttcaatctgctcatcctgctgccgttggaagtgtacgcccttatccggggtatcaatgtccagcgctacaatctcggtatagcaaagggccgccgctacgccgatggattctggtggcgtcaggccaccgctctggccagatcgcgcgcagccaggggtggcaacttcctcgccacggtcattctcgcgtcgatgggcctggcgatctcactgttttcgggagcctggctggacactgccatctgcagctacgtgctcatcaatgcacttgtagcagcgaacttctttgcggctcaactgccaatcatcgaggctgaacgtggggaggccgatggctga

SEQ ID NO: 515183 - DNA, 495 bp, Stenotrophomonas maltophilia
atgaagatgcacggccttgccgctgcagcggtgtgcatcgcggtgatcggcgcgatgtgggtggagtggcccgagccagcgggcgaccaggtgtgggcctaccagaagctgcagccggccgattgccgccagctgcgcagtgatgcgctcggcttcgttaccgcgaaggcatacgagggctttgaactgcacgcgcgccatgccggagcgacgtccttcgagatccggtgcaagggcgtgctggtgatggacgtggagaatgcgccctcgcgcgtgctgatccggatgtccgcagatgcacttacgcgggcgccggatatcgaacgcctgcgtctcagtttcgagcgatggtgggactaccaccagagccaggtcgggttgctggtggagagtgcaggaacctcgtggatcgaagcgctgtttcgacgcttcaatgagtacgtgcctgatgagcagcgttgtttgttgaggaccgcgggccgcccttggtcgtaa

SEQ ID NO: 515184 - DNA, 339 bp, Stenotrophomonas maltophilia
atgttgagtgtattgatcgccatcaccattgctgccggctcaccgcaggccagcagcattcccgcagcatccgcagcgtatgcggactgcctgctcgcccaccttcaaccgggattgtccgaccgcgcgatcccgctactgcagcaggcctgcgcctcgaagcatccggaaagctacgtcgcatcggcagaactggaacgccgaatcagcgcccagcgccgagccgactttgaggcggctcaagtggaggcggttcgttctgcgaatgcggcagcaacggccgcacaggaggctgccgacgcggcggcggctaaagcgaagaatgcgcggacgaagtag

SEQ ID NO: 515185 - DNA, 1884 bp, Stenotrophomonas maltophilia
atgaagatccaatccgttcgcatccgaaactttcgcacgttgaaagacgtgacgattccgttcgattccgtcacgaccttcattgggccgaacggtgccggcaagtcgacggtgcttcgtgcgctcgactggttcttcaacggcaaacctggggcgctgacggagaaggattgctcttttggggcgactgacgaagacattgaggttcaggtcacctttgcagatctcaccgagaaggatcgcgaggcacttggcaagtacgcaccggaaggagtcgccacgttcaccgcatggaagcgccgatcccctgatggcgccgatgtgctctccgccaatgcaaagggattcccggctttcaatgccatcaaggcggcaggcggtgcgactgcgaagaaagagctgtatgccactctccggcgcgagcgaccggagcttgatcttcctgcggcgaatactggtccagccgttgatcaggcaatgacaacttgggaggcggctcacactgatcaattgctcgatgcgctcgaggctttgcaaaccaatttcttcggtttcaatagtggcggcaagatgagcgggctatttgacttcgtgttggtgacggctgaccttcgggcaagtgaggagtcgatcgatggcaaggcaagcatcatcggccgaatcctggagcgctcgattgaccgaactgctgctgatgaggcgatcgcggaaatcgttgcggagtcacgggcaaagcagcaactggtctatgaggagaagttcaaggggcagcttggaaccatcacgacgcagctcaacgaggttgtcacaacctatgcgccaggccgggcaatcatggtttctccggctgaagtggaactcaaggcacctcgcacgacgttcgacgtggccgtgctcgacggcaccaccgagactgcggtggagcggcagggacacggctttcagcgcacgctgctgatttcggctctgcaactcttggcgcagtcgggcgcagcctcggccgagggagtcatctgcctggcgatcgaggagccagaacttttccagcacccgatccaggcgcagacttttgcgaaggtgctcaggtcgctcgccgaagacgctggcaagcgcatccaggtgacctatgcgacgcatagcccctacttcctggaggctcgacatttccatcaaatcagacggctgacgagatccgctgacgaagtcccggtggtgacggtccactttgccacggttgaggatgtgaaggccaggctgaatagaacagtagatggtgatgtggtcgatcgcaggctcgaccacaacgtggctgaccagcttgcgatagcgctcttcgcgaatcgggcatttcttgtggaggggacaaccgaatctgctgtgttctacggcattggggatagaacttcccccggtgcccttgaagcagcaggaatttcgatcgtttctgtgggcagcaaggcatcgataccactcgcgcatgcgattttgaaatctattggtgtgccagtctacgcactgtttgatgcagacggtggattcgaagcgcgggccaaagccaagaacaaaaagcaagatgacatagatcgtgagctcaacaatcacgcggtagagaaccgcaggttaatgcggtacttcggcttgcctgaagaagattttccatccgccaccatttctgacgtcgcggccatatttgatgaccacctcgaatcattcctttcggaaaactggagggagtggatggtcgcttgcagaagtgttgaggatgctgccgggataagtctctctaagaaccagctagcttatcgatcggcaacgcttcggtcggatggggtagtgccggaaatgcttatgcagatattggctaaggtgaggtgtacagcctag

SEQ ID NO: 515186 - DNA, 342 bp, Stenotrophomonas maltophilia
atgccacccggcacggttaacgaaatggccgcgcagttcaccgcggcgtaccaggcactcaaagacaagaaagacgccgaacggctcctcacgctcatcaagccgatgatcctgtcagcaaagaccgacggcatcagcgacaaggaattgattgacctgatcaattccctggggctccgggagaagttctatccggcgaaactcaaggagctgcgcgggcggctcgcaaaggccgagccggagccgcccaccaatgacggggaggacccggcatcgatcgaaggatccccccacccgctcgcagccgcgcccagcgcccgtctcgatggggccgcggcgtga

SEQ ID NO: 515187 - DNA, 807 bp, Stenotrophomonas maltophilia
atgaccctgccactgaccgacttcatcgaccgtgcccagcgcctgttcgtgctgaccggcgccggctgcagcaccgcctcgggcattcccgattaccgggatgccgacggccagtggaaacgcacgccgccggtgacctaccaggccttcatgggcgaggcggccacccgccagcgctactgggcgcgcagcctgctcggctggccgcgcttcggcctggcccggcccaacggcacccaccaggccctggccgcgctggaaagccgaggcaagctgcaggtgctgctgacccagaacgtggacggcctgcaccagcgtgccggcagccacaacgtgatcgacctgcatggccgcttggatctggtgcgctgcatgggttgcgagcgtcgcagcggccgcgaggatttccagcagcgcctgctggacgccaatcccggctgggacgcgctggaggcaggcatcgcgcccgatggtgatgccgatctggagaccgatttctccgcgttcgtggtgcccgagtgcccgcattgcggcagcgtgttgaagccggatgtggtgttcttcggcgaaaacgtgccgcgggagcgcgtgcaggcggtgcaggagcacctgcagcaggccgacgccgtgctggtggtgggttcatcgctgatggtctattccggcttccgcttcgtgcaggcggcggccagggcagggctgccggtggcggcgttgaaccgtggccgcacccgcgccgacgacctgctgcagttcaaggatgaacgggactgcgccgaggcgctggccgcgtgggcttcgtcctga

SEQ ID NO: 515188 - DNA, 477 bp, Stenotrophomonas maltophilia
atggaacctgcaccgatccccaccgacgtatcacctagcctgattcagctgcatgcagttcgccttgaggcggttgtcgcactcttctctgctcgtagcaaagaggaacgcaacgctctccacgcgcaggcttacctgctctcccagctactcggcctgccggcaccggtgctgccgcccgacagcgtgccagtagcaaacgcaacccttgccctcttctggaccgtggtcgacgaagggctggcggccgggattcttcacgaccactcccacaccgctgaccgcctggccatcaacctacccgaagccaggaacgtagcaattcagctggggcgcccactgcctcacggatcttcattgcaaagcgccttgaaacgctgcccaagggtcatctcagccaatcacaccgtcaacagccgcatacgcgggaatgggaggaaaggcgccgcagttcgatgctgggtgttcaagaagtaa

SEQ ID NO: 515189 - DNA, 1374 bp, Stenotrophomonas maltophilia
atgagacgcaactttcctggcttttacaacccgactgaaacggaactgaccgaactttggggcgaaggcattttcgtccttgactcgagcgtcttgttgaagctctacgaggtgccggaaagaacacggcaggaaacctttgccgccttgcagaagctgggagaccgcctttgggtgccacatcaggccgcgctcgagtatcaacggaacagggtcaggaccatcggcatagcgagaaatcgcgtggcggaagcgctcgatcctatgcagactgcattgcggaactttgttcattccgcgaattcgatcaagctggctgatcggggtcatgaggctgcgagcggtcgtctaaccgaaatgcaagctgcgggcgaagaagtgatagaggccgctcgcgcagctatcgccagccacgtggatatcaatggcgaagacccggttcgcgaccaattgaacacgctgctcgataacagggtgggaccaccaccgagtcaagaggagctaacacgttggaatgcggaagccgagaaacgctatgtgcatcgaatgggccccggacacttggatcagggcaagtcgaagaatccgacctacatggtggatgggcttatctttgacaagagatttgccgatctatacgtgtggaacgagaccatagctcgtgcctcggatgaaaatgttcattcagtcgttatgatcaccaacgacagcaaggcggactggtggaaggttaccgactatggtgtggccggtccattgcctgagctgtgttcggaaattcggtctgaggcgaagctctccaatttttggatgtatgaccttgagagctttctgcgcgaagcggagaagcgattggacgtcaacgtttccggcacgacgttgagcgacgtttcggagaaggcgggaaaggtagatgcgatcccaagcaacgagatgttctggtcgcaccttcatggccagctggatgagctgagatccggtgatatctacaagaagctttccaaatacagcaagaaggcgctacacagtgcccttatctcgcggggctacgccgtacttaggtcagatggggatgccgcagttggctatagggctgacgccggcggtgcactggccgtcgcaatgctggcctatggaaatgaaacagtaatcgatgaggtggccagtgaagttgctccggtagtgactgttggcaatgcgcgaaagttcgagctcttcctggtcgcgcctaatgcgctggcggcaatcgatagcgttcgtgttgctgacagcttcaggagttcgctcaagaaatacgatgtgaccggcgttagtttcgaggcctatgcaggtagctcggaatcgatggtactggtgatggacgcaacgctctaa

SEQ ID NO: 515190 - DNA, 1017 bp, Stenotrophomonas maltophilia
atgcgtaccgaaacccgtcacaagttcgacggctttacccatcagatcgcaaagctgaacaacgtcagcggcgtcgccaacaccttctctgtggaaccggcagtccaacagcggctcgaagcgcgcatgcaggaaagcagtacgttcctgcaggccatcaacatggtgcccgtcaacgaactcaagggcgaaaaggtcggcgtcggcatcagtggaaccatcgccggccgcacggacaccagcggcacgggcgagcgcaaccccaccgatccgaccgcgctggactccaacgtttacgagtgccagaagaccgacttcgacacggcgctgtcatattcccgactcgatgcctgggcacaccgtcccgaattccagacactgatccgcgacacgatcactcatcgccaggcgctggaccgcatcatgattggctggcatggcatcagcatcgccaagaacaccgaccgtgtcgccaacccgatgctgcaggacgtgaataagggttggctgcagaagtaccgcgagcacgccccggagcgcctgatgcgcgaaggcaaggaaggcacggccaagatcaaggtcggtggtactggcgccgactacggcaacatcgacgcgctggtgttcgacctggtctccaacctgatcgacccgtggcatcaggaagatccgagcctggtggtgatctgtggccgtcagctggtccacgacaagtacttcccgatcctcaacgaagacaacaagcccaccgagaaggtggcagccgaactgatcctgggaactcgacgcatcggcggcctacagccggtcatcgtgccgttcttcccggccaagtcgctgatggtgacctcgctcagcaatctgtcgctgtactggcagatcggcggccgccgtcgccacatcatcgagcagccgaacaagaaccgtgtcgccaacttcgagtcgtccaacgatgactacgtggtcgaagactatggcctgggcgccgtggccgagaacatcgagttcgggacctaa

SEQ ID NO: 515191 - DNA, 861 bp, Stenotrophomonas maltophilia
atggccagcgaaaccaagaagcgatccaagttcttccgtgtggccgtcgaaggcgacaccaccgacggccgcaagatcgagcgtcaggacattctcgatatggccgagacgtacagcctggacgtgtatggctcacgcgtttggttggagcactaccgtggcgtgctgccggatggcccgttccgcgcctacggtgacgtgctggccgccaagaccgaggaagtcgagatccaaggcgagaagaggctcgctctgttcgcgcagatcgagccgaccagcgaccttgtcaacatggtcaacgtgctgcggcagaagctgtacaccagcatcgagattgccccgaacttcgccggcaccggcaaggcatacctctacggcctggccgtgactgactcgccggccagcttgggcaccacgatgctcgctttctcggcccagcacccggacgaaagtccgctcaaggaccgcaaacaggcgccggacaacctgttcactgccgctgccgaaaccgtcattgagttcacttcggaagaagatcaggaaagccgcacgggcccgtttgcggcgctcctgtccagccttggcctgaccaagaagcccgcgccggtaatggcaaaggatgacgccgagttcaacgtggccgagttcgccaccaagctgctcggcgcggtgggagagcaggatgccgcagtggacaagctgagtcaggacaaccgcgctctgcgtgagcaggtacagaccctttccactcaggtcgccggcatgcgcaagaagctggacgaaaccccgcaggaattcacccgtcgtccgctggtgcccggcggcaaggacgtggacaccgccaacatcaccgacttctga

SEQ ID NO: 515192 - DNA, 819 bp, Stenotrophomonas maltophilia
atggacccactgcagcaagcgatacgccaggcgatcacacagatgccggccgctaccgtccggcgaccgtcgcaggcgcgtgagtcgctggtcaatctggccgctgacgcacaggctttcattgaggacacgcgctcggctatggcagctggagcgggcgggccaaggactgagcgccgggtagttgctggcgggctattggcctacgccttggacatcgcctggtccatctgtcacctgcttcgtactgagccggtgcgcacccacatcgtggtgctgaccctatggcgccccttgcttgagacgtggctacgtgccgcgttctttgcgctagaggcaacggacgttgaggtagccgtgttccgcactgagggaaagctgcccaagcggggatggcccagccgccccgaaagcaaaacagagatcaccccacgcctgatcgccaagctgatcgccccctcaatctgtcccgaacagccggagctgataggcagccttgccgatgaggtaaaggactggcatggattcgtgcatgggggcgacgtgatcgtcgatctgttcgacggaggggacaccctgcagtcgcaagttggccccgaccacatggcgttcaaggttcagcgggtcgctgtggtcgcgtttctgaccgggatggttggcttgaacctctccgccaatgaacgccggcgcgaagaactggacccgctgggagcgggcctgttggagaagattcgagcgttccaaaggcggtggccgcaccgttcccaggatggcgattccgcgcccgaagtcactctagggacaaccgccaaggactga

SEQ ID NO: 515193 - DNA, 291 bp, Stenotrophomonas maltophilia
atgctgcaaggcttgtcggaaggtttcgcgctgggcatctggactctcgttggcgcagcagccgggcccttggtggtcgctgtcggcttcggcgtccgtaaggtcgccgcctacttcaacggcgttcccacgcctgatcgcccgttcaaggcatggctcgttatgggtgctgtggtgggcgccatcgtaggttcgatgtggcaggcacaagctgatcgcttcgcggagtgccgcacggccggcggcaccactccgcagtgcatcaccctgccgcagagcagcagggaataa

SEQ ID NO: 515194 - DNA, 129 bp, Stenotrophomonas maltophilia
atggggcgtggcatcaccgtcctggcggtcgcgctcgcggcgaccctggccgccggctgcacgccggcgaccggcaacgatccggccgcggcccctacggcagcgaaagccggggggcgcgcacggtga

SEQ ID NO: 515195 - DNA, 624 bp, Stenotrophomonas maltophilia
atgaccctcgccctgcccgccctcgccaccggctatgcgccatcgactgcaggccttaccctgtacgccgtggaagccagcgcactgccaaccgatgaagccttgatgctggcctgggccggtggcgacctgcgcgcgtttgaaagcctgtatgcacgccatcgcaagcgcctgttcggcttcctgctgcggcaactgcgcgacaacgcgctggccgaggagatcttccaggacgtctggcagcgggtgatcagcgcccgtgcggggtggcaaccggacgcggcgttcagcacctggctgttccgcatcgcccacaaccgcctgaacgaccattggcgcgccgcccgccaccggccggctgccccggccgatgccgacctgcgcctggccgcgatcgaggatggacagaccccggaaggcgagctttccgaattcgaacaacgtcgccgcatccagctggcgatggaacaactgccgccggagcagcgcgaagtgctgcaactgcggctggatcaggaactgagcctggaggagatcggccagatcaccggcgtaggccgggaaaccgtgaaatcgcggctgcgctatgcgatggacaagctgcgtgcgggattgaacgcatga

SEQ ID NO: 515196 - DNA, 2856 bp, Stenotrophomonas maltophilia
atgaccatccgcaaggcgctctgtcgccacccgctgagcttcgcgctcaccacggccctgttggccaccggcatcgctcctgccttcgcacaggaagccggcaatgaggcaggcggcaagaacgcaaccaatctcgatcgtgtctcggtggtgggttcgcgcatcaagcgcgctgacgttgaaggcccggcaccggtgacggtgatcacccgtgcggacattgaccgggaaggcttccagtccgtcggcgacatgctgcagaccttgacccagaacaccaccagctctttcactggtgacctgaacgtgggcggctttacgccgaacgcccaggttgtcaacctgcgcaacctgggcccgggctacaccctgaccctgatcaacgggcgtcgtccggcccagtatccgcagccgtacaaccgcgacaacaacgttgtgaacatcaaggccatcccgagctcgatcgtcgagcgcgtggaaatcctgaccggtggcgcctcggcgatctacggctcggacgccgtcgccggtgtggtcaacatcgtgctgcgcaagaattacgatggacagcagatcaagctgaccaccggcaccaccgaagaaggcggcggcgatagcgtcaacgtcgaatacaccggcggcaagacaggtgaccgttggagcgcgacctacgccttccagtaccaggagaacgagccggtgttcgccagccagcgcgacttcctggccgacacccgccagaacgagatcggcttggccgtcaatccgagcctttcgctggctgccatcagcgccggtggacgcaatggccacacccgcaacttcaacgcgctctatgacgcggcggcctgcgatgcgttcggctacaccaccgtgaccaccgcaacccgtggcaagtactgcggcagctacacccagccggcttcgcgctcgatccagaacaagaatcgcaacttcaacggctacgcatacggtacgtttgatttcaccgacactctgcaggccttcggcagcgtcaacttctacaagacagacgccaaggccagcagtggcaccgagttctgggccacctcgaacgaccgcttcacctccaaccgcgcaggtgctgcaacttcggcgtactacgattccaatctgagggatatcatccagctgcagcgcgtgttcaacccgttcgagctgggcggaaatgaagcggccagcacgctgtacgacgagaagagctacgatttcaccctcggcatcaccggcaccatcgccgatcgattcgactgggaagccagcgcgaactatggcaaatacgactacaccgccgatcgcccacgcctgttggccaagccggtccacgactatttcctgggcccactgcagggttacaccaccgacaactacccgatctatgcgctcgaccaggcacgttggaactcgccgatcacgccggaaatctaccgttcgttcgcaacccgcgtaaagaacaaagctgaagccacctcggccaccgtcaacttcaacatcagcggcgacctgttcgaacttccggctggtgccgttggctttgccggtgtcatcgaaggcgtccgccagaccaccgacgtgaacagcgacccgcgcaccaaccagctgcgtccgctcgacggccagaccatctataacctgaccagctcgggcgagacccacggaacgcgtgatcgctatgcgatcggcaccgagttccgcgtgccgatcttcagcaacctttcgatgaacatcgcaggtcgctacgacaagtacgacgacatcacggccgtggacgacgcaaagacctggaacgttggcctggaatggcgtcccttcagcaacctgctggtgcgtggctcctacgccaccagcttccgcgctccggacatgcagctggtctacgccgaaggtgctgcgtcgtactcgaatatcgtcgatgactacagctgccgttcgggtaccggccttggccagccggcaggcacacctggccgcacccgcacgcagtgcaaccgcaccaccgacatcacctattaccaggcgcagtcgctgaccgccggcaacccgcagctgaaggaagaagaaggcaagtcatggggcgtcggcttcgtgtgggacatcgtggacaacatgtcgctgacggtggactactacaagatccgtctggaagatgccgcctcgcagttgagctcgacctacctgctgcagaacgaagccaattgccgactgggcgtccgcccggatggctctcccttcccgttcggcatggactcgaccttctgccagaacctgaccagcctgatcacccgtacaagcgctccgggcaccacgcttgatggtcgcatccagcgtctgaatactgcgtacatcaacaccgcgctgctggaaaccagcggtatcgatgcgtcgtacaagtatcgtctggacaccgatcgccttggcaggttcggcctggacctgggctactcgctgatgctgaccaacaagtatcaggaaaacgatgacgacgaactcatcgattaccgcgatctgcccgatcacgactggagccagcgcagccgcttccgtggcagcctgagctggtcgaaggacgaatggggcgcgacgctgttcagcacccgctacggttcgaactggaatcgcgcgcaaacccagcgcctgggtccgtacagcgtgtacaacctccagctcaccaagaagttcggcccgaacgtgacggctgatttcaccgtcgtcaacctgaccaacaacaccttccgtcgcgacccgaccgataccaactatccgtacttcaatccgctgatcggcgccgatccgttgggtcgtcgctactacgtcagcctgtcctaccgcttctga

SEQ ID NO: 515197 - DNA, 1977 bp, Stenotrophomonas maltophilia
atgaagaagctgcaatcggccgcactggctctttccttcaccttcgccgcccccacatttgccgcatcggcctactcagtcgaagatttcgtcaagcatcccagctatggcaacgtgcgcatttcgcccaatggcgattacctggccatcagcatggaccacggcgaccaggacgtgctgacgatcatgcgtaccagcgacctggcagtgctgaaggtcaatcagctgccggacaagaagagcgtgggttcattccactggatctcgccgaaccggatcatgttcaacgctgtcaagaaaattggcggctatgcgcagccgtttgcaactggcgaatggtttgcggtcaatgccgatgggtcgcaggccgttcccgtgatcttctatggcacccgggatgcaacccagcgcggaaagacggtgggcgccgaatcgttcagcctgcttgacactctcaagggcgatgaccgcaacgtcatcatgcagtcacgctatccacgctctgctgaaggggctggcacccaggtggtacaggtggacaccatcactggtcgccgcagtgtcttggccagggctccgaaggacgactgcagcattgccctcgatgcagccaaggaaccacgctttgccgtgtgctcctccagccgcaacgaggaaggcgagtacgacgagagaaccgagctgtatcggcttgacggtcgcgagtgggtgctggtgaatgcttccaagtccggaggcaagcacctctgggtggagcgcaccaccgcagacggacgcgtgttcgctacccagagcgacgacaaggcaccgggtgcgatcggtacgctggatacagcgaccggagaatttactccactgttccaggacaaggtggcggaggtatcggactacatctggtctacggacgacaaggccctgctcgctgtagtgaccgaagcgggggcacccaaggtcaccctgatcgacgaaaaccaccccgacgccgatctgtatgcctctctggctggatcgttcgagggagaaatggtcgatttctccagccataccgaagacggcaagaggatcatcgtttcggtctacagcgactcgaatccgggtgagctctatctgttcgatcgcgataccggcaaggcccggttcctgatgcagcgcgcgccgcacctggacaagaaactgctggccaacgtcaagccgttcaacttcacctcacgcgacggcatgcagatccacggctatctgaccctgccgcgcgactcggacggcaagaacctgccattgatcgtcaatccgcatggcggtccgatcgggccgcgcgacaactggcgctattcaggcgaaacccagttgcttgccagccgcggctacgccgtactgcagatcaacttccgtggctccggcggttacggcaaggggttccaggatgcgggccacaagcagtgggccgatggcattcagaacgacatcatcgacgctacccaatggaccatcaagaacggctacgccgacaaggaccggatctgcatctacggtggtagcttcggtggctactcgtcgttgatggcgccgatccgcgcgcccggaatgttcaaatgcgcctttggctacgtcggcgtgtacgacgtagacatgctgttcaagaagggcgatatcccgcagcgcgagtccggtctgcgctacctgcgccgcactcacggtaccgatgtcgccgagtggaacaaggcctcccccgcacggcgcgccgcggaagtaaaaattccggttttccttgcagccggtgcgcgcgatgtgcgcgcagtgcccgagcagaccgagctgatggccaaggcccttgccgatgccggtaatccgccggagggcatgatcatccagttcggtgaaatgcacggcttctatggcgtgccggcccgtgtcaacctttacaccaacatgctgaatttcttctcccgccacatcgacggcccggcagagaagaagtga

SEQ ID NO: 515198 - DNA, 822 bp, Stenotrophomonas maltophilia
gtgaaacgttggacactgccactgttgttgccgatgctcgccttggcgcccatgcagagccaagcggcagaaagcaagccgctggccctgcctgccgacccgaccagcgacccgctgatgatcaccgccgggttcctcagcggccatccggacctgcgctttcgccttctgggaatggagaagcgcaatgcaggcgaccaggaggccgctttcaagttcttccagcgtgccgcgttctatgcagacaaaccttcgcaggccatggttgccgaaatgctgtggaatggctcgggcaccccggctgatcgcgcactggcttatgcctggatggatctcgccgccgaacgaggctacgaagggtttgtcgagttgcgggagcgctactgggccgcgctgacggcagagcaacgttcccacgccgtagtcgagggtgaagccatctacgctcgattcggggattccgctgcaaagccacgcatcgccaccgtgctgcgccgtgagcgccgcgcagtaaccgggagccgcaccggatttgccggcaatctacggatcatggtccccggtccggccggtccggaagagatagacggcagcaaattctatgacgatcgctactgggatccggacaagtatcagcaatggcacgatgccatctgggcaaaacccagggttgcccgagttgacgtcggcgcactcagccaagtgaagggcgaacctgaacgcaggacccggatcgcggatgttccacccgatccggatgccaacgaaccgtttactgacgacctgcaaccaacaaagcagcccgtcccggaaaagccctga

SEQ ID NO: 515199 - DNA, 309 bp, Stenotrophomonas maltophilia
atggccttgatcggccttctcgtaagtgtccgtgaaaacgggggtgaacccgtatcgtccagcggctattacgagtggagcaagcgtcctgcgagtgccaggcaggtcgagaatgagcgtttggtggtaaggatgcgtgagttgcatgaagacaaccggggtactctgggagctggccgcatgcgcgaagacttggccgaggaaggccagagcgccagcctgaaccgggtagcgcgcctgatggccgccgacggcctgcagggttggccccggcgtaagcgtcgcggcagcgcgcaagtccggccatga

SEQ ID NO: 515200 - DNA, 549 bp, Stenotrophomonas maltophilia
atgacaccgccgggcgtggtcaacctgcttgaacgcgattttctcgcgctggagccggaaaccaagtgggtcacggacatcaccgagatcaagacccagcagggcaagctgtatctgtgcatcgtgctggatctttacgaccagcgcattgtgggctggtcaatgcacgatcgacaggatcgccagatggtgatccgggcggtgcagatggcggtctggcagcgtcaaggcagcgatgaggtgatcctgcattcggatcgtggcagtcagttccgcagcggtgactaccaaggatatctcgcggctaacgggctgatctgctcaatgagcgccgttggacattgcggcgacaacgccgcctgcgaaggcttttttgggctactcaagcgtgagcgagtctatcgaacgagctacccgacactggatgcagcaagagcggatgtgtttgactacatcgagcgacgccacaacccaaggatgcggcgaagggtcgccaggcaggatcagaaggttgcagctcttttagaaccgtccgtgatatcggggtag

SEQ ID NO: 515201 - DNA, 486 bp, Stenotrophomonas maltophilia
atgttccagacccactggcacctgtggctgcagcagactctcgacagcggctggatgctggcgctgatgcagttcatcagcctgctcggctatgaaatggcctataccgcgctgatcctggtatgtgcattcggggcacgccttcgcgctggcctctgcgtgatgctggcggtgctgctgatggcctgtgccacgcatgcaatcaaacagggcgccgccctgccccgcccgtcggatgtggatgcgcgcgtactggatgaaggggtgccgtcgcaccccttcgtggtcaacggcggcggacaatcgttctggtcactgcccgatgcgcagtccaccgccagctgcgcgcgcagcccgacgccgactatggcttcaacagtggccatgtgggcgtggccaccgctgcctgcgtcggcctgctgctggccttcggcattcgccgacgctggctgcgctggacgttggcgctgggctggccgctgctga

SEQ ID NO: 515202 - DNA, 1158 bp, Stenotrophomonas maltophilia
atggatcaatccgacatcaatatgctggccgccttcattgaatcagaggaggctgcgcttgctgaagaacgtcagggcgacttctatccgagttatcactatcaactcgcggcactcgcaccaagggctggtaacggcctgccccaggatatgctgcaacgcttctacttccattggctgcgagtgggagactggaaggtcgcaggacttccgcagagagactttcccatccttgttgccgcgtaccaggagctcacgaagctccctgtgggctacgacacacgccagccaggcctcagcctcccgcatctcttctgcttcggcttcaatgaacatggcgagctgccaagcggtgtggttaccaatgccgcggatctgaaacagcgcacgcgtctggtggagcactgcaggaagtaccagtcgttccaggcccagcgagagaaggtcgataaatttctgccatatcgcccatttgcgcgaaccattctcgagacagctcggttcctgcaacacgatatcaagggtatgggtcgaatcctctattggggcatggcgctcattgcactgctcgatgaggacacacgcatccagatgacaaacgacctgatagccaggaactggcccgaagacagggaacgcggccatgtgctctccctgcttcatcacaccgccgaggcgacccggccccattgcgcagcggacgccgagttcgacgttctctgcgaacatctggcgcagctgcacgacacccggatcatgacgggcgacgcagtccagttggcgcagcgggagggctggcacgttgacaacatccgtgattggaatgccagcatcaccctctatcacggaggtgagtacagcagcgagccggggcatccccggatcagacttgatctcaacagctggcctgataccccttggtcaatcaatctgagcgtcggcaatggctcctacgtcgcctaccgggacgaacccaccagcaatgatttccaattgccgccaatcatcggcgccacgcttgatcatttccctgaatgggtcaagcagataaacgcacgactaggaatcaatctggttccaggcactggctcagctgcatctgcctacaagaatcgtacgttggctaggcaactcgacgcatggatgcgcgggaaatag

SEQ ID NO: 515203 - DNA, 1560 bp, Stenotrophomonas maltophilia
atgaacatcgaatttctcatgatcctggccgtggccctgctgctggcgacactggtggcactggtcatcctgctgcgccgtggggcaggcgacgcgtcctcgggtgatctgcaccagcagctgatcagtgaacgcgaacagcaccggttggccctggtcgatgccggccagctgcgaggccgtctggacgcgctgactgcggagctggaaagcgagcgtctgcggggactgcaacacgccgaggccattaccacgctgaccacgcaggtcgcgcgtgagactgccgtgtcagccagccgcgaggcacttctggcagaacgcgaatcggccttggctcagacacgcacggcgctgaacgaatgcagcgcggaactgcaacaggcacagcagcgctatcagcagctgcacggcgaacatgcgcgcgcgctggcgaacctgcagcattcggagcaagccagcacggaactgcgaagctatctggagactgcgaaggaaaagctttcgggcgcctttgctgaactggccggcaaggtcttcgaggagcgcggacagcagttcgaaaagaacgtgcgccaggccacggtgcagtcgcgtgcggatatcgaaggtctgctgaagccgttcgccgacaagctgggtgatttccgcatccgggtcgataccctgtatggcgaggaagcccgccagcgggccagcctgctcggcgccgtgggcgaattgaagacgctgaaccaggatatggccgcgcaagcgtccgccctgaccaatgcgctgaagggcagcgccaaggtccgcggcgactggggcgaactgatgctcgacaacgtgctgcgtgggtcgggtctggaagagggcgtgcactatcagcggcagaagcacgccgtggacgatgacggcgcacgtctgcgcccggacgtggtcgtgcagttccctgacgaacgcagcgtagtgatcgatagcaaggtcaatctgatcgcttggcaggaggcgatgaacgctgccactccggaggaatccgaagatgcgctgcgccgccatgccgtcgcgctgcgccagcacgtcaaggatctcggcgaaaagaactaccccaaagcacttggcaccgagacgctggacatcaccatcgccttcgttcccatcgaaggtgcattgtccgccgcgctgggtgccgatggcagcctgcaggcctacgcctttgacaaccgcgtggtgtttgcttcgcccaatacgttgatggccctgctgcgcgtggccgagcgcctgtggacgcgcgacaaggtgcagaaacaggcactgaagatcagtgaggcaggcgggttggtgctggacgcactgacgggcttcctgaaggacttcagtgacatgggcaagaagctggacgatgctggcaaggcctacgccgatgcacgcaaccgtctgatcgattcgccgcagtcggccatcagccgtgcgcgtcgacttgccgaactgggcagcaaggccaagcgcgcgctgccgccggagttgaccccggatccgatgcagcagctgactgccccggagggcggcgaagagacctga

SEQ ID NO: 515204 - DNA, 1701 bp, Stenotrophomonas maltophilia
atggaattaaatgcagagacgcgatccgtcaacgaaattttctcgcccagtaaaaaatatgtagtgccgcgcttccagcgcgagtattcgtggacgcaggaagagatcgacgaattctgggaagacattgttcagcagattactgcgcaaggtagcaagcctgctaaacatgaggagtacttcattggctgcatagtccttgttggcgaagatacgcgcccagactatctcattgtcgacggtcagcagcgacttacaactttaacactcctgctgcgttgcatcgttgccaggcttgatgctctaggagacagcgcagcagcccaggctctatacaacaatgtcatcgaaggaacggacaatgatggcaaaaagtacttcaagctagcgaatgagagccccaagccgttcttccagaacgaacttcaggcaatgacgcccgagaagattagcaccgcgtccactgacgaagagaaaaacctaaaggacgcatttgacaaatttacaaagcgagtatcttcttacaagcttggcacgcttagcgacctagagtcgacaaaatcgctgcgagagcaagttctgaatcatcttaagtttattcttgtcactgcaaagaatgaagacgacgcatatacaatctttgaaacattaaatgcccgcgggctgagcctgacatcggtcgatcttataaagaattggatatttaagaactacaaaacaactcacccaaacgacaatgcaaaggatatatggggatcccttcgccgcgaaatttccaagtttgcagacttggaaacattctttcggcactactggaattccaagtatgcctttgcatcgaatgaccgcctttacaaaagcttcaaggacttactaaagaaaaacaagattgcgccagcaaaagaatttcttcttgagcttcaagcagccgcaaaattttacaaaatgatctgcgctccagatgatcgcaactggccacagcaaaaggagaagccagttgggagagccctaaagttaattaacagctacaaggtcactcaggttcgtccatatcttctctccctgcttgccgcgagggaggcgaaaacagttgcgcagactgattttgtaaattccgttacaaacgtagaatccttccacttcgcgttttcgaacctttgtcaagagcgggcctctggtttagagggaacctacacgcgtgcggccaagaagctctatgctgcgggcaccaacaagacgaaggccaagcaggcaattgttgccctcaacgagagcatcaagaaaaagctacctgcagcgtcgaagataagcgatgcagttcgaaagctctctctcgacaaaaacaatgataacgacaaaaagacaattcagattgtctttaccaagctagaacattatttgcagggcacgaacgaactgaaaattgaaagcatctcaattgagcacgtcaaagatcaaagctccggtgatgactgggccagtggaattggcaacctgatcccacttgacgaaaagttgaacaacgagatgaaaaaaggactttcgttcagaagcaagaaggaaatttacaaaaagtcaaatctaaaaattgtcgccctattcctccagcagaacccgcaagacacctggacaaagaaagattcggaacgctggagcaaagtggtctgcgataatctcgcgacggctcttgcaatcaaataa

SEQ ID NO: 515205 - DNA, 600 bp, Stenotrophomonas maltophilia
atgtgttgggtagatgccgaccttggtcggcacgcgcgcgccaaccaaggttggcgactaccggtaagccccggccacgcatggcgtggctctactgatcttgcgggtgcagtagatccacgccctgcgtggatgtgttgggtagatgccgaccttggtcggcaggcgcacgccaaccaagattggcgactaccggtagccccaagccacgcatggcgtggctctactgatcttgcggatgcagtagattcaggccctgcgtggatatgttgggtagatgccgaccttggtcggcaggtgtgcgccaaccaaggttggcgactaccggtagccccaagccacgcatggcgtggctctactgatcttgcggatgcagtagattcaggccctgcgtggatatgttgggtagatgccgaccttggtcggcaggtgtgcgccaaccaaggttggcgactaccggtagccccaagccacgcatggcgtggctctactgcgttgccacctgcggttcacgcgcggccgcgctccatgcgcgcagcccgaacacggccaggccgaggaagaacacgtacagcgcggcggtcacgtgcagcgacttga

SEQ ID NO: 515206 - DNA, 1332 bp, Stenotrophomonas maltophilia
gtgggcgtccaacagcaattgctcgaccttggtgaactgttcaatttctccgacctgagcaccttcacccagaacattccggtggagtgggtgtccagcgcgctggagctctcgtcgcaggccacaatccgcagacgcagactgcccagcgatcaggtgctttggctggtgctgggtatggccctgttccgcgacgagccggtgcatgaggtggccaggcggctgaacatctgtgcccaaggccttgcgtcgctggatctgcctgcacgcagcggcatcagccaggctcgcgcgcggcttggcgctgatccagtagaggatcttttccgcagatgcggccagcattggggagccgagcgctaccccggcgatgactggcagggtctgcaggttctggccgttgatggtgctctgttgcgcaccgcagatacaccggaactgcgcgcgcattttggctctggcaataccggcaccgaacgccagacgccttatccgctgatgcggctggtagcgctgatgaacgtgcgctcgcacatcatgctcgacgctcggctcagcccttatcgtcgcggcgaaatgcgcttggcccaggacttcgtcgagaagattccagatcgctcaattaccttgttggacaagggtttctggggtgcggatctgctgttggggttggcgcgcactggcaatcagcggcactggctcatgccctcgcgtagccatctggcatctgagcaagtggagcgttacaacgcgcatgatcggttgctggaaatgcgcgtctctgcgcaggcgcggaagaaaaatcctgcgctgcccacgcactggcgggtgcgcgaagtgagctatgagcatcagggcaagctgaaaacggtgctgacctcgctaccggcagaaacatacagcacaaaggccgtagccgagctctatcaggagcgctgggaaatcgagctcggtttcagggaccttaaaagctcaatgcagcgcaatgccatcaccctgcgcagcaagaccgtcgagctggtgtatcaggaagtctggggcctgcttttggcgtacaacatcatccgccgggaggccagtcaagcagcggttgcctacgggcgcgcaccctcggagatacgtttcaaacctgcctgccactacatcgccgcgcagctgatcgtgatggcggcggcacaacccgcttcggctaccggaaggcgtttatcccagctgcgatccggcgtcgccagcctattcctggagcaccgtccccggccaacaacgccgaggacggtgaagatctccaaaacccgttatcccgtcgatcgcaaggctgcaccgcttaagtga

SEQ ID NO: 515207 - DNA, 792 bp, Stenotrophomonas maltophilia
atgccgaagccctggaaaacgacgaccactgagtcgtcacttccgggttctggaacggccaccttcgggtggccgtttttgttttggcgagtgcgtcggactcatgacggcgggttcgctctgcaccctcggcgtggcatcagccgacagacgaacggtgccgatcagcgtgcgcagttttgcgcaaatccgcgtttccgccccgcgccgaagcgatcgaatgtgaaaacttttcgcccccgttgcggccccgttgtgctggcgttggcgacggtgccggtgaccaccggcgatgcacgcgcgctgttgtccggaacatgtgcctatctgcgcagagtgcttatttcaagtgttttttgttcagagagcgcatcgacttcgtcgtatgcggcgcgcgtgcgcgccgcttcaatggtcgttgcagggcgcgcacggcggtggcgagggcggcgtccgggatggcgcggatgtgaaaatttttcgcgggggttgttgacagtaaaaaaaaccgtgattaggtttcgcctcagcagaccttgcctgcccaaccgagtgcgcagaatcaatcgtccgatgcgaagcagccccttcaagaccaccgcgaccctgatgacggtggacatggccccgcttcccccggagaaatgcaaggcaactcccgttccgatgtccgctccgccgatcgaggcgggcattgccgcatccgtaacggcgcgcctgacgcgccggcggtccccgcacgcagcatccgcgggtttgatccacctgggcgtttcaactccctatcactga

SEQ ID NO: 515208 - DNA, 138 bp, Stenotrophomonas maltophilia
atgatcctcctgggacacctgcggttgccggccagcggccggcactaccggtccccggtttccctggagatgcgtggctggtattggccgctgccgatgcagcaggtcttccgcgcggtggccgaagcgctgggctga

SEQ ID NO: 515209 - DNA, 315 bp, Stenotrophomonas maltophilia
atgtccgcaaagtccccgatgaccactgtcaatgccggtcggctgctcgacctgctgtgttctgacgacgccttccgcgcagagttcacagccgatgccggcgctgcgatggcgcggcatgggctgcaggcacagtccggcacaagcccctgcgccatccacaacgtcctggccagcaaggaaaagttccaacaggtgcgccagcagatcgccgcgctcctggcccagcgcgccgcattcaatgtccccttcatgttcgaatccgggcatctgcagggaagcgtgcaccactccgccgtactgcaggccgcttga

SEQ ID NO: 515210 - DNA, 342 bp, Stenotrophomonas maltophilia
atgctgccgttcactcgtgccccgttctccagcgaacacaccaccaccgagtcgccgcgctttgagccgcaaaccgccattgccctgctcgatcgcttgtgcagcgacgacgtgttccgtgcgcagttcagcaggaatccgctgccggcctgccgacagatcggcctggcattcgactcgatggcgcaggtgccgccttgcctgagcaccggcaagctggccagcaaggaagagctgagccaggcccgcgatgccctggtgaactatctctccagccaccgcgcagccatgaccgtggtcttcaccttcgaagccggtcacgtccaccgcatcatccagtaa

SEQ ID NO: 515211 - DNA, 1179 bp, Stenotrophomonas maltophilia
atgacctcttcgcggtaccgccgatgccacgcgctggctgttgttcccgatgaacaaccatcgttctccctgaacagcctgctggctggtggaaccggtgtggagttcgtgcagcagttgcaggtgcgtgctgcccatctcgatcagcctgtgacgctcgatgccgacgcttgtgcgttgctgttgcagaccagcgcggagcgctggcaggtcttgccggatgacctgcagaaccgcgcccgagtcgcatcgctgctggaggcggggttgctcatcgccgaggagggcgcgcccgaggcggcgcgacaggccgaccagcgtgttcgcgacgggcactggtgggccttgtcagccatccatcatcgccattcccgctgggcgggcgtagacagtgccggcgatatggagaagcaccggatggtgaccgcacaggacctggtgcagcagctcggcaagccaccgaccgaagccccggagcggcagccgggtgccatcgctctgccggtcgcggcacccgatgccgtggcgcagctgttggctgcacgtaccacctgccgcaactacgccgaggacaagccgctatcgctggagatgctggccggcatgatgcagcacgtgctgatggcgcaggcacaggtggaaaccgaacccggcgtgcgcttcctgaagaagaatgtaccgtccgcgggtagcctgcatccgctggaagcgtacgtgattgcgcgcaaggtcgatggcctgcagcctgggttgtatcactaccatgccgtggctcacgagctggcacggcaacaggcacagcccgcccagctggacgatttctgcctgcgcctgttgtcgggccagcactggttcgcttcggcccacgccatggtggtgctggtctgccgtttcggtcgcaacttctggaagtaccgcaaccacgccaaggcctatcgcgccgtgagcctggatgtcggccatgtgtcgcaggcactgtatacagcggccacggccaatggcttgggcggcttcgtcaccgcggcgatcaatgagacggagatcgagtcgctgctcgggttcgacccgatggtcgacggcgcaatggcggtgtgcggattcggttggcgtgcgcagagcatgaccacggcggagctggaccctgcggggcatgtctggaagcgcgaggcccgcgattga

SEQ ID NO: 515212 - DNA, 291 bp, Stenotrophomonas maltophilia
atgaccaaccgcaaatccccactgtccctcgctgacgccaccacgctgcttgatctgctcaccaccgacgcagacttccgcacagcattcaagcaggacccggcaacagccctgcagcagatcagtgtcgaggcgggtgccgccgcgcagggctgcatgctgtccgccgacctggcctccaatgaagatctggccgctgcacgcgacaatctggtgcagcagctgaccgagcgcgcggtgttcagccatccgcattgcttcatcgacggttcgcaggcgccgacgccctga

SEQ ID NO: 515213 - DNA, 2505 bp, Stenotrophomonas maltophilia
atgaatggcgacaacggaacgtcgacgccgcacaaccagcaactacgtgcgctgctgttcaccgatctgtgtgattcgctgctgctggtcgaacgcatcggcgatgttgctgccgccgagctgttccaggaacacgaccgcttggtgctggcgctgcagcagcgctggcacggccagctgatcgaccgctccgacggattgttcatgctcttcgagcgcccgattgatgcgctcggattcgccctggattaccagcgtggcctgcagccgctggggcaggcgcgtgatctccgactgcaggcgcgggccgggttgcacgtgggtgaggtcatcctgtggaacaacagctcggaatcgatcgcgcttggagccaaggctgtggaggtggagggcctggccaagccgatggccgcgcgcctgatgcagttggctccccccggacaactgctgatgtcggcggctgctgaatcggtggtgcgccgtgcagcgacggagctgggtgaactgggcggtcgcctgcagtggaggtcattcggtcgctggcgctttcgcggtgtggcgcaaccgatggaagtgctgggcgtggcggtggcggggaagggcatgctttcccggccgcgtgccagcgacaaggcacgccctgatgttccggtctggcggcgtccgctggcgatggccgcgcaggcggccctgattgtctctgtcgggctgggcctgtggctgctggcccggccacagccggcgattgccttcgccgaacgcgactgggtggtgatggccgatgcgcgcaacctgaccgataacccggtcctggacgacgccctgaaccaggcgttgcgcatcgggcttgagcagtcgcgttacgtaaacgtgatcagcgacatgaaggcgcgcgacaccatggcgcgcatgttgatgccagaaaacaccgagatcgatcgtgccgccgctgtccagatcgcaatgcgcgatggcgcgcgcgcggtactcgatccctcgatccgtgaggtacacggccagctgcgtgtggccgtcgatgtcgtcaatcctgccactggcgagaccgtctactcggtttattccgatggcaaaggcctgccttccgcgctgacctccagtgaccaagtggtggtgcaattgcgatcgcggttgggcgaagcgatggcgcagatcggcaagacatcggcaccgttgccgcaggtggcaacagccaacctcgacgcactgcatgcctacgcgcgcggacagcttgcctatggccgtggacagaccgagtcgtcgttgaaatttttccagatcgcaacgcgcattgatcctgacttcgccatggcctatgtcgggcagatgcgatcgatgttcagccagggccagctggaggacgcgcgcggtttgctgaccaaggtcaggacgctgcgtcatcggctgagcacgcgtgagggcctgtatctggatgcatggcaggtggagctggagtccggttctgaatccgccgctggcgaggcctggaaggtactggccgatctgtatccggatcatcacggggccagcgtcaaccatggtctggccgagttcgtgctgggccactacgaaaaggcggagcaggccgttgcccatgccaacgtggagcagaacccgttgcgcagcgtgacgctggagctgctcgggcgcatccagttggcacggggaaaggtcgatgaggcggtagcaacgctgcatcgtgccatgcagctcgccgaaggtcgcccgaaccggcagctggttgcggcgctggccgtgtccgggcgaaatgcagaggccagtgcagtgctggcgcggttgccggagaacgggccgggacggtggctggaagggacttcactggccattgatgaggggcgattcgaggaggcattggcagcctcggtcgcgtccgcaggccggtgcaatggcggtcccttcgtatgtgatctgctgggcacggtcaatttggctgttcacgccgcggcggctcgatgcgtagcgccacgcgacttcgcaacgcaggccagcgcgctgctgcggaatgcggcacgccccgaaaacggtgaacgcggacagtatctgtatttcgctgcggccagcttgtatgcggcacagcgcttgggcctgcaatcctcgatcggccggcaggtggccgagcttgacgtattggcggccgacgccgtcgacccacgtgcgcgccagttggcggcggtggtcaaggccaatgcgttgcatctgtccggtgacagcgcgcaggcaatcaagatgctgcaggcgatggttgatggcagcgagctgttccaggtccacagcgtgctggcagcggcctacgccgcacagggcgcgatacaggagcagcagtcgcagctggactggatgcgtcggcaccgtgggcgcgcctataccgaattcgcaggctcgtccgtgttgcaggcattgaatgtaggcgacagccagcgtgggccatcacgcccgggatgcgccctctcaccggacgcatcctga

SEQ ID NO: 515214 - DNA, 1008 bp, Stenotrophomonas maltophilia
atgttcaacacgcacgaagatgaaatcgaaatggacctcaattggctcaagaagcaggattcctgcccactcgcagttgaactgacagccaagattgaggcaatcgatctagaaaagctcgagctacccaggcgccgccttctggttggttttgtccatgtcctcgctgatgaagtgaaggcgatgttggatctgagcgcgaaagactatgactcaaacgagatagcgcgaatgaccgacgtcataggaggaactacactagctcgtgcgtgccaggcaccgatcaccaagaggcagcctggcgaggacctcagggataaaattgcagaggaaaccagtaaggtgacgctcgccagtgaacagactggcgctggtcacactgcacgacttatggccaagtgggcaaagagcgccgctagcgatatctctaagaatgagtccttcggctcgtggcacctcctactgctctgctacgcccattttctgatctgcatggagtcaaggtgctcgcgcaagtcatcttctccaccaactgccgacctcagagcccgattgaatgcctgtctggaccttatgcgtcagctgcacagaaagtccgacgcgatagaggccgatgaagcttcaatcgaagcagagctggcctacgaaaaccagatgctgggtgggttcgtctttcaacttgggtacgcatcgggcgcagccggcactccagtccctgtcaacatgttccagcagacgcccaacgatggttgcttcggtgacttggtagcaggaaatgcacgctgcttagccattgagttcaaaagagaagccaagtcgattcagacagaggcggagaagtggacctctgaggcgcttgcaagcctaatcaatgaaaccaatctcgtgagcctgtcactgaaatgccatttgctctgttatggcaacgcagatgggcagactatgagcttctcttgggttcacccccgttttcacggacacttacgagaaggccgatcaaggccatga

SEQ ID NO: 515215 - DNA, 321 bp, Stenotrophomonas maltophilia
atgtctggatctggtggtggtagttttggtggcggtggggttcaggagattgcctgtgaccgtctctcttttgagacgcagttgagttcccccaagccttcggtcgtggctggaatcaacgtcggcgatgtcttgttcgtggccatcgagcagcaattggctgcgcaggtagtggtgatcaagcacggcaatcaggtggccggaggtattacttcacccaagatgtcccgcttgctcgagtgtatgcggcagggaacccagtaccaggccacggtactgagcaaggccggcggccaggtaaccatacgcatctcgccttga

SEQ ID NO: 515216 - DNA, 1206 bp, Stenotrophomonas maltophilia
atgttgactatcgtcggtggtatctaccgcgaggtgtgtttgcgcccgcagtgggacgaagtgtatggatcggccggacgtgcggcgtcagcggtgtcgcgtctgggtggacaggtgacgttgtacggctatcttgatgctggcctccagccgatcctggagtgtcgtgcagcagatgaaggctttggcctatcgattgcgccgttgccacggtctgcctcttttcgctacagccacggattgtcggtaccgtggatccagcagccagagcggcaatcgccgctcagcgtgaaggccgatcacgtgcttcgctttggcatgctggagagcacggccatagtcgacgccgagtacgccgtattcgatccacagaacgttacggggactgaagcttttggcgctaacggctcgaaggcccagcacctggcgcttgtgctgaatctgactgaggcaaggagcttgctccaacgattcgatttgacgcccgagcagatggctgccgagctggcttcgcagcacggcgcagaagtggtggtgttgaagatggggccgaagggggccttggtgcaccacgagggcggcactgaatgtgttccggcctatgccacctctcgggtatggaagatcggtagcggggatcagtttgcggccaactttgcatacgcctggatggaagagcgccgctcgccctttgaggctgcagaccgagcatcgcgctcggctgccttctatgctcagcatcgcaggtatcctgatgttggggagctagatgccttcgctccggtgccgctgaggctatcggacacctacctgcaggggcgggcgcctaccgtttacttggccgggcccttcttcacccttgggcagctttgggttgtcgagcaggctcgcaactgcctcctcgacatgggcctggacgtgttttccccctaccacgacgtgggccctggcccagcagagatggtggtggggaaggacattgagggcatccaccggagccaggtcatgctcgccatcgctgatgggctggactcaggcacggtcttcgaggtgggctacgcgcgatctcgggggatcccggtggtgatgtatgccgagaacgtgtcgcctgaggacttgaagatgatggagggtaccgactgcttcctgcgcgacgacttcgtcagtgccatctatcagaccgcttggaatggtgtttgcgtatga

SEQ ID NO: 515217 - DNA, 606 bp, Stenotrophomonas maltophilia
atgaagagtgccctcctactgtctggcgggatggactcgatcgctctggcctggtggaagcgtccggatatggcgttcaccgtggactatgggcaacttgccgcggctgcggaagtggtggcggccagagccgtgagcgagcgactgcagatcccgcattacatcattcggtttgacggtcgtgagcttggttctggggacatggcagggtccaccccggacgtccacgcgcctgccagtgactggtggccctaccgaaaccagctgctgcttactctggttggtatgaaggcgatctccctgggcgcgcagagcctttggctcggtaccgttgcttcagatggtagccatcaggatggcacgccgcgtttcgtcgacctgatcagcaagctgatgcaaagtcaggagggcggcatggtggttgaggccccggcgatccaactgcaaaccagcgatctggtacgcacctcggggatacctcgtgatctgctgtcttgggctcacagctgccacaaagcgtctgtcgcctgcggtaactgccgcggctgcaacaagtacttccaggtttggcacgagctcgaaggatatgtgggcgacgctgggtaa

SEQ ID NO: 515218 - DNA, 672 bp, Stenotrophomonas maltophilia
atgtgggcgacgctgggtaatccggtccctcgtcaggaccctgaagcctatgcgccttggcagtggccggtagtgcgctcgatcgcgctgccggccgcctcggacgtagtgggtcaatggtcagaggcactcctgcagcgccgaagtcgtagagactttgcgcccattgatatgcacgcgctgagcacgctgctatggcacaccgtgtgttgccagcgcactgccgagtcgccaatggggttctccctgcagcagcggccagtcccttctgcaggcgctatccatccggtgcacctgctggtgcagcttccgcttgagggtggccaatgggcacgctacaactccatgacccatgccctggatgtcttgggccatgcgtccaccgtcctgcacgggctgtgcgaagaggcaggtcaggtgattcggaccgagccaggctcgctgctcttgttcgtggcggagccggcaatgtccgctgccaagtatgagaatccctgcagtctggtatggcgcgatgcgggtgtcatgcaaggggctctggccattgccgcggaggccttggcgttgaactactgccttcttgggatcactggtgacccgtgggtggggcggctatccaagcagtgccatctggttggagtggggctggcggcgctgggagcgcggccgtga

SEQ ID NO: 515219 - DNA, 846 bp, Stenotrophomonas maltophilia
atgcagcgcgcctgcgtaatgctcgaatccatgacggtgaacgttgaactaccctccgcagagtcggaagtagttgccggggtgccgtggggcgccgtcgaagcgttccccactccggcgtactgggcataccaggtcatggccaggcgcatcgaggcgcgctcgatcaagtacaagctgggtaagacgcttcgcgaggaagtgggcgcatgccttctgggcggtcacgggattcctgcgagcattggattgctggcttacaaccacctcaagtcgaagggcgcctttgaggctgttgcgccggacgagcaggatctgcttcagtggctttccgagccgatggagcatgaaggccgcttggtgcggtatcgctttgccggccagaaggcacgctatctggcagcagcaatgcgcaagctctcccaagagccctctccggatcagtcaggtcgcgcgctacgcgactggctgacctctgttccagggatcggatacaagaccgcctcctggattgcgcgcaactggctggatgcagacgatgtcgcgatcctcgatatccatatcctgcgcgccggcgttcttgccgggttcctggatccagagctgtcagtggagcggaactacctccagctcgaggaccagttcctgaagttcagcgttggcttgggcgtgagggcgtccgaactcgatgccgtcatttggcgggacatgatggcctcccccctgaccgtcggcgccacactcagcgcgctgccggaaagcaagttcaaggccaagcacgcgccctcacggccgcgctcccagcgccgccagccccactccaaccagatggcactgcttggatag

SEQ ID NO: 515220 - DNA, 300 bp, Stenotrophomonas maltophilia
atgatcgtgcttggacacagtcaagtggaggtttcagcgttcaccggtgtcccgcagccgcagatcagtcgcgcactgcagggcgcacgaaagcgccttacgccggacatggaaaagctatgtcgttatgcgcttttgagtgcggaagaaccggaggttgtgggtgatccggctctagaggtcaccttgctaatgcgtcagctgattggggacagcacgctggcagcagcgcacatgaaggccgtgcttcgcagtctggctccattgatggccgactatcggcagcggacctcgccgtag

SEQ ID NO: 515221 - DNA, 555 bp, Stenotrophomonas maltophilia
atggcacaagcgatcaaggtggccccagcgcccaacaccttgtggggcatggaccctgtcagtgacgcgctgttcgatggacgtcgcttccggttgctaccggtgctggatcacttcacgcacgagttcctgaagatcgttgtggatcattcgttgcgtgcagacgatgtggccgaagcggtggcgcggctggtcgctggacggggcaggccggacgcgatcaaggtggacaacggcagtgaatttgccggcaaggtgatggaccgctggacttatgagaacggcttggagctggatttctcccggcgtcgtacgccgacggacaatgcgatggtgggaagctccaacggcaaactgcggcaggagtgcctgaacggccattggttcttgtcgctggccgatgcaaggagcaaaatcgaagcgtgggggcgcttctatatcgaggagcgcctccacagtgcattggcaaggaaagcccctgcggaactcgcccgagaacacaggcctcaagcaaattctctggcgccaaaagcgggtgaaatctctaccggctga

SEQ ID NO: 515222 - DNA, 921 bp, Stenotrophomonas maltophilia
atgctcaaactcagtctcgatgccctgcagatcctggacgccatcgaccgccgcggctcgttcgccggcgccggcaaggctctgcacaaagtgccttcgaccatctcctacaccgtggccaagctggaggaggacctgggcgtacagctgttcgaccgggtcggcccgcgcgccgagccgactgaggctggccgcgcgctgctggacgaaggccgccacctgctgcgcgcagcccgggagctggaactgcgggtgcgccgggttgcgtcgggctgggagaccgaactgaccctggcggtggactcggtgttcccgacctggctgctcggcccggacatcgccgcatttcgtgaggccgaggcaccgacccggctgcgattgatcggcgaggccctgtccggtacctgggaggccttgctggatcgccgtgccgacctgctggtcggcgcgccgggcgaggggcccagtggtggcggttacgtggtcgagccgctgggtacggtggagttcgtgttcgcggtcgcccccggtcatccgttggctgcagtgccgggcgtgctcggacgcgagcagctggtcgagcactgcgcgatcgcggtctccgattcggcgcggcggctgctgccgcgcacggtcggtctgttgatggggcaggagatgctgacggtgccggacatggccagcaagctgaagctgcagtgcgaaggcgtgggcttcggtttcctgcccgaaccgtgtgcgcgcgctgcggtggcgcgcggccagctggtgatccgcgaggtggaggaacacaagccggaagagaccttctggctggcctggcgcaccggcgaggatggtgcagcactgcgctggtggcgcgagcgcctgcgcaggccggagctgttgtcgcagtggtggcaggcaatggccaaagggtag

SEQ ID NO: 515223 - DNA, 828 bp, Stenotrophomonas maltophilia
atgactctgaggcccgggctagtgattggccatgatgcacagtctgcgcccagcgccgcagttgtgcctgatgatgcccttcagatcgtttacatcgtccgaggatttcaccggttgctctacgtgcctccaccccagtggccgggatgtcacttcgagcagggcgagaatctcgacgtcaccctgcgtattgcccagaccgaagtggcgcccggtacggatttagacaccctcatcgcactcactgatgctcgcatgcagcagcttgtgttggcgtgggagctgagtttggggcaacggctgcagcttcggcggctccatgtttccctaccaaggttgcctgtgatgaaggggggcgccacatcccaagatggggtctcgttctcggatcgctgtgaggccacgatcattcatgcggcggcgcctgtgcaaatgccgcagattccccttgccgcagagcgctgggtgcgcacgctcgcggaggctggtgatttcggaggctacgtagaggagcagctgcggcggcacttcctgatcatcgaggagctttgggaaacttatgcatcacgattcgacaatgccgaccaggcgaagtgcaaagagatccgatgcgttcgaaacttcgtctcccattacgattgcactcgcgagccagtactaggcttcatcatcatcaacctacctagcgcggaggtgcagcgaagcagtcatcgggcggtgcgctttgaccggaccagtcaagagcaccgaaccttcgtagcaagatttgcagtcgactccgagcgaattgcacgaaggctcgttgagctggcgatcgttgacctttga

SEQ ID NO: 515224 - DNA, 1203 bp, Stenotrophomonas maltophilia
gtgagcgtagcttatctttcagactccaaagccgactacaagcttctcgagcaactcattgaaagcggagaattcgggcgcatacaaaaagcgactctccctgcagagcctgaggacgaattctgggacaaagtcctgagccgagtgcacgatactaatcgtgaattcatgtcaaccatagactccgatcaagtggcagaccttaagagctatcgaaagaacgtcactcttccaacgcgcttcgattcctgggcttcatactggatagtaagtgaactcgtaaaagatgtaaaagccgcctccgacaaacttggcataacttcggacaacttccctgagttcgcgacaatcccaacgaagactgtcaatgcgctggcagtcaagccaaaagggtcggcgcagtcctttctcctatttgatggcgaaattctcacgttctgccatttgatttccaaaatattctctcaagcatttccggtcaccaatatggatgacaggaattccttcacactcgatacctcctcaatagagcatcacatcaaggcatccccccacctcttgcagcgcctctcagcggtcctcgatgcattcatcaagactggctacgttggatgcacccctccgttccccgtcgaccccctttccgcgcccttgatgcagtgccttcgcaagggcatggagctcttcgttgtagctcacgagtttggccacgtccactctgggcatttaggggatctgcttccgagcctggaagtcataagcaagaggtcgccgcccagccgcgcacatgagatggaatttgaggcagatcacattggcctgatccttacaattttggcacaacgtgactcagggcttgatgttgcaatgtcaatcgcaggaataaaattgcttttcctggccctcgatctatcggatgcctatgagacagcgataaaatttggcgggaagagaaaattcgcaagcattcaatccgaatcgcatccatccaatcaacaacgatgggattatatcgaggcagcacttccgtccattggcatctcacccgaggaagtaagtgaatctcgtgatctagcagccaaactggacgtagtctcaggcatttttctccagctcatgcttcatgccaagactacacccgggaggaacgatccatgcacatgcggctcgaataagaagtacaagaagtgctgcatgccttga

SEQ ID NO: 515225 - DNA, 648 bp, Stenotrophomonas maltophilia
atgaccggagagcatggccacgatcagccctacgacgcctgccaggccactggccagcagcgtggacgtgaacaggaacgccgccagcgccgcaccggcaccgccgagcaggcctcgcaacggtcgcggcacgcgcgagaacacgccgcgcaggatgctgccggcgaacacaccgatgaacagcgccaggaaccaggtatcgccaccaccgctgggctcacgcccgcgatggccgctgaccggtgccggcagcgtttcgccgtcgatcagcttgaccagcaccgccgtggcgtcggtgatgccaccggcgtagtcgccgctgcggaagcgcggcaccaggtattcctggatgacccggttggcgatggcatcgggaatggcgccttccagaccgtagcccggctcgatgcgcacgcgccggtcgtccttggccaccaccagcagcaccccgtcatccacgcccttgcggccgatctgccactggtcgaagacccgcgtggtgtactgcgcgatgtcctccggctgggtggtcggcaccaccagcacctgcagctggctgcccttgcgctgctgcagttcgatcgcctgctgcaccagcgcctgcttctgcgtggcgtccagcgtgccggtggtatcgaccaccggtga

SEQ ID NO: 515226 - DNA, 1827 bp, Stenotrophomonas maltophilia
atgctcattccaggcttcacggcaggcgcgcaggcgccggccgagctgcatacccgttggtcgccgtggcgtgcgctgcttggcgtgctggcgccgcagcaacgcaccagcacagaggcggcgatgaccgaccgcaccgagctggaagcgcaggtggccgcgctgcatcgcgtgcaggccgtcatcgagttcgcgctcgacggcaccatcctgcgggccaatgacaatttcctgcaggcgatgggttaccggctggaggagatccagggcaagcatcactccctgttcgtcgaccccgagcaggcgcgcagcgcggaataccgcgacttctgggtgcgcctggggcgtggcgaatatgacgccggacagtaccgccgcttcggcaaaggtctgcgcgagatctggatccaggcttcgtacaacccggtgctggaccgccaggggcggccgtacaaggtggtcaagttcgcgactgacatcaccgcgcagaagctgcaggcggccgactcggcggggcaactggccgcgatcgccaaatcgcaggcggtgatcgagttcagcatggatggccgcatcctgtcggccaatgacaatttcctggccgctaccggctacagcctggacgaagtgcgcgggcagcaccattcgttgtttgtcgagcctgagcatcgcagcagcgtcgagtatcgccagttctgggagaagctcgggcgcggcgaatatgacgccggccagtatcggcgcctgggcaagggcgggcgcgaggtctggatccaggcatcctacaacccgatcctggacctcaatggcaagccgtccaaggtcgtcaagtacgccaccgacatcaccgcgcaggtgcacgagaaccaggccatgcagcgcgccgtggcgcagacccgcgaggtggtggctgccgccaagcagggcgatctgacccagcgcgtggccaccgccgacaagaacgggtcgatcgccgaactgtgcgaaggcgtgaattcgctggtcgaggcgatggccgcgatcatcggccagatcaagttcgccgcggacaccatcgcagtcggcgcgaccgaaatcgcacagggcaacagcgacctctcgcagcgtaccgagcagcaggcggcctcgctggaggaaaccgctgtgtcgatgaaaggcctggccgagaccgtgcagcgcacggccaccaacgcgcgccaggccagccagctggccggcggagcggccgacgtcgccgcacgaggcggcactgtggtgcatgaggtggtcgagacgatggcggtgatcaatgcctcgtcgcggcgcatcgtcgacatcatcggagtgatcgacggcatcgccttccagaccaacattctcgcgctgaacgcagcggtggaggctgcgcgtgccggtgaacatggccgcggctttgccgtggttgccactgagatccgcgagctgtcgcagcgttcggccagcgcagccaaggagatcaagcacctgatcgatgagtcggttgccaatgtgggcgccggcacggcgcaggttgagagcgcgggccgtaccatggatgaaatcgtgaccaacgtgcgccgggtcagtgacctgatgactgaaatcagcacggcctcgcagcagcagagcgacgatatccagcagatgaatcatgcggtcgacctgatcgatcagggcacccagcagaacgcggccctggtcgaggaggcgtcggcggcggcgcgcagcatggaagagcagtcggcgcagctgctgcagaccgtggccagtttccgcgtgcagggcggggccgggcaccggcaccgaacagcggggctgcacgcggtctag

SEQ ID NO: 515227 - DNA, 1332 bp, Stenotrophomonas maltophilia; identical to SEQ ID NO: 515206

SEQ ID NO: 515228 - DNA, 963 bp, Stenotrophomonas maltophilia
atgtctgattctctcgatattggcgtggacgtggactccaaggagttcgtaccggcagtggccgaccgcaaggccggcgacaggatcgccaacacccgggccggcatagcccagtggctcaacaccttgccccagcgatgccggattggcatggaggcgacggggcggtactacgagttgttggctcggatggctggccaggcaggccacgttgtctatgtgatcaatccacgtctgatcaagcactacggccgggcgacgggctcgcgtggcaagacggacgccatggacgccgaagcgatcgcccggtacgtgaagaaggagagcgatcgcctgcgtgaatacgtaccgcgtaccgatgagcagcagcaaatgcacgatttgctgcgcaagcggcagacgctggtaaagacacgcgcgcgcctggagcaatccttcggggtaagcaaaagtgcccccggggagctgtcagatctgttctgcgctctggctgggacgctgtccgagctggaaagcgaactgcagcgcttgggtcgcgatggagagcatggcgcgctctacaagcgcctgttgaccatccctggtatcggccctgccgtcgccgctcacctgatttactacatgacgcgctggccgttggccaacgccaacgcgtggatcgcctgcacgggcctggatccccggcccaacgagtctggcggcagaacgggacggcgtcggctgtccaaacagggcgcgccagtgctgcgccagatgctctacatggccgccatggggctcaagcggtgtcgtcgggggcaaccgctctacgacgagctgtcaaaacgcggtcaccccagcaccgccgtcttcaacatcctggccagaaagctggccaggatcgcctggggtgtcttcaaaagcggccgggacttcgatccggccatgctgaaggtgggtcaagcctgcttccagcaggcttga

SEQ ID NO: 515229 - DNA, 1092 bp, Stenotrophomonas maltophilia
atggcgaatcccaagctgaagacagttcctgttaaggatctagcctttgatcctgacaatcctcgcttgcccgagaagtacaagcaccagaatgacgaaaaggttctggagtatctgttgctcgaatgcaatctgatcgagctaatgatgtcgatcggcgagaaggactacttcgcgggcgagccgctaatggtggtcccggagcccgagtggggtggcttcttggtggtcgagggcaatcgacggcttggagcactcaagcttcttggcagtgatgaagatccgccagtacttgccggacaggttgctcagatcaggaagacggctaagttccgaccgaaaagcgtgccggtgcttgagttcggggcacgcgacgacatcctgacgtacttgggctaccgccacatcaccggaattaaagagtgggacgcccttgcaaaggcccgttacttggttcaactgcgggccatgcatgcgacggaccacgaaacggcgcacaaggccctggcgaaagagattggtagcaagtccacctatgtcgcgagactcttgacagggcacgcattgctaaagagagcgggtgatctaggtgttctggcgagactaaagctggaagaggacgatatcccgttctctctgcttactaccggcatcggctgggagaacatcgcgcacttcataggattggagggtgttgctgacgtcgagcttgaaaacgtgaagccccacgagctggaagagtttttcacgtgggtttttgacaaatcaaagcgacccttcaccgtacttggtgagtcccggaacttcgctaagcttgcccgtgtcgtggccaatgacgccgcgcttggggctttgcgccggggcgataccttggaaaatgctgacctgctaacctccggtccgctcgaggccgttcgccagcacatcaccatcgcggagaactcgatcaagctggctcaggagacgctgagcgtgactgaggggatgctgccggacgacttggcgcaggctgagcgcctccgaaagtccgccatgattttgcattccagcatcaaatcactggtcgaggtttctggcgatgttgaagattga

SEQ ID NO: 515230 - DNA, 897 bp, Stenotrophomonas maltophilia
atgttgaagattgaagttccccgcgactctgatattcataccgtcgctgattttgcagagcttctttgtttggtcaccgaagatcgtgtatcaagtgcggatacgctgcaggatcatgtcagggacaacagggggcagattagtcagaacgagcttgacgattgctacggacacctgcgatggaggcaggctgcctttggtggggattacccattcaagatcgatcccgtgcgcagtgttatggagggggtcgagcagctaacggacggacaaaagttctatgtctttatgctgcttgcagccaatctgccgatgctgaagcaggggaagtacaagcagttgaccgatggatttgaacgggcagcactcactgcactacgctcgatgtggtcactcaaaggtatttccaaggcatttgggaagaatgaaacggattacgtaggagctaagtgggagcggctaaataaacttggtcttgatattggcggtcgcccgcagctttcggataagacattcagagagcgggatacgggcgatggtggagtcgacctggtttcttggctgcaaatggataattttgagaccgagaatatcttgtctcttcttggtcaatgcgcttgctctagggaagagtggtcgcaaaagcagacggagatttctagagcccgacttggtcatcatcttgttccgacgcacccctgggctgaggcgatcttcattccaatttgttttcgaaacaaccacgggcgctgggcatttgccggggatgttgcaagctcagtggtagtggaccgattgaggatggccaagttttacgatgcaagcgttgaactggctgggctccccgtcccggctgttgtacaagaggtcttggactaccggcgagacttggtgtag

SEQ ID NO: 515231 - DNA, 936 bp, Stenotrophomonas maltophilia
atgcccacagcagtatccctcttctctggctgcggcggttccgacactggactcgtggccgctggcttcgacgtggtcatggcgaacgacctgctgggctatgcccgcgacgtgtacctggccaatctgccagaaaccgactatcagctgcgcaaaatcgaagaggtccgcgccttcccggcagccgatctgctggtcggttgttacccatgccaaggctacagtcaaggcggtgctcgcgaatccagcagggacatcaactatctttttcgcgagtttggtcgcgcactccgccaggtcaagcccaaagcgttcattgtcgaaaacgtgtccggcttaataaggcaggacaacaaggcgcttttcgagactcagcttaggaacttccgtgcggccggttacagagttagctggcagatcctaaacgccgccgattacggtgttgcacaggagcgcatgcgggtcatcatcgtcggcatccgctcagacatcggcgaaacgtacacatttccagcacccacacacgggcccgacgcagcccgcccttatgtaaccatcgccgacgccctcacggggatgccgctttggcctgaaggcgagttcaacgatgagccgttccactggtattacatgtcacgcaaccgtcgacgagactggagcgaactctccaagacaatagttagtcgtgcgaggcacatgcctctacaccctgtgagtcccaatcttgtatgggtcaagagcgactcgtatcggttcgaagacgatcgacctgcgcggcgattcagcttccgcgaagcggcggtcctgcaagcattcagagcagaccttgtcttcccggataactgcggactccacaaccgctacaaggtgatcggcaatgctgtcccgccacttctcttcgaagccgtggcgagcgcactccctgatatctggtag

SEQ ID NO: 515232 - DNA, 177 bp, Stenotrophomonas maltophilia
atggctaagaagagaggtctcatggcgcgacttttcaatctcgatcagccttcgcgcaaggagaaggctttggtcaagctgcctgtattcagcgaaaaacgagctaggcaggtcaccactccatctgaaatcaagaaaagtcgcatctacgcaaatgtcccgctcgggatggaataa

SEQ ID NO: 515233 - DNA, 633 bp, Stenotrophomonas maltophilia
ttgaacgccactgagatatcgagcgtagtgaaggacggagatttgatcgcgattgccgtgctggtcgggctggccgcagtgcccatgatcaaagggatatttgcgctcagcgcaacgcgccgccaacgccggaaggagtttctggaactctggaaggccgacagtttggatagttccggtctctggctagaggaggtgatcctgcaccgatatggcgcggccatccctgcagaactaatttgtcatgtttcccgattgagctggccttcaaagaagctgcgtcgactggcaatgagcgcaggctttctgcgaatggatgaaatgggacaggccgtgacgtggtcaaagacgcaccgcacgagagcattctggctggagctggaaatggtagcgagtgttgttgcttatgtggtgcttgctgcactaggcactgccctactcattacaggggtcagacagggcttggcggagggattcgcggctttggcttctggggggcttatcgctagtgcgggctgcgcctccttcatgcacttcatttcacttaatgaggcgcgttcttcgctgagcgtcatcaatggcattccccacgaggggctttgggctcgcctcaaaagcaagcggagcagatga

SEQ ID NO: 515234 - DNA, 261 bp, Stenotrophomonas maltophilia; identical to SEQ ID NO: 333146

SEQ ID NO: 515235 - DNA, 171 bp, Stenotrophomonas maltophilia
atgaaggaccgcaagaccaagaccagcgacaccaacccgttcgggctccgtatggaacccgcggtgcgggaaagcgtccaggcaaaagccgacgagcttgaacgcagcctcaactggaccatcaatcgcctgttgaaacaggccctaggcctcaaggagccatctccgtga

SEQ ID NO: 515236 - DNA, 414 bp, Stenotrophomonas maltophilia
atggcaaagaagactgagaccaggccggccacggccaccatcaatcccttcgggctgcggatgcagcaggagttgcgagagcggctggaggcagccgcgagtgattcgggtcgttccttgaacgccgagatcgtcagtcggctggagcgcagctttagcgtcagcgacatgggcatgaaaggcgatgcactcgacttggtcgggttcctgagcctttccctgtcgctgatgctcaacgaaagcctccctccggaacaactggatgagatcaagatgttggccagccaagtcacgaagcaactggggagccggcttgtgatcgcaaaaggggacgatggccactccttcgttgcagaggcttccgcgaaaaccccttccagcaagaagcccactaagaagggcccggcaaaatag

SEQ ID NO: 515237 - DNA, 462 bp, Stenotrophomonas maltophilia
atgataccgaccgtaccgttcatgagttctgacgagctcctgcggcattcccaatcgatatgcgacggcatgagcgcggacgacgacggccttcggcgtgaggttcttgcgcacgctggcagccgctggtcgcttggcatcattcatgccttgggcgtgtacggaacactgcgtcacgccgatgttgcgcggaggatgaagggaatcacccagcgcatgctgacacgcaccctccgccagctggaaagggatgggttgatctaccgacatgatttccaagaagttccccctcgcgtggaatacagcatcactccgctgggcaaagaccttcttgttctgatgattcccatgtggacttgggtcgtgcagcacgccgaggagttccgacactgccgcgagatctacgacagcaaccacacctcctttgcacctgactcgcctcgagacaacgagtctcaatag

SEQ ID NO: 515238 - DNA, 933 bp, Stenotrophomonas maltophilia
atgtctaccccgatccaatcccgcgcgatcctggtcctgggtgccggtgagctcggaatgccagttattcggaatctcgcccgtctaggaaaggagcacggcgcaagcatcagcgtgatgctccgatccgcttccattgcttcggacttgcctgagaagcgcgttgtggttgatgaaatccgctcgctgggtgtggccattgtttctggcgacctggtggctgccactgtggacgagttggcggccattttctccaagtacgataccgtgattggctgcacgggttacgcggctggccgcgacacgccgatgaaggttgcgcgtgctgcagtgaagtcgggtatcccgaggtacttcccttggcagttcggtgtggacttcgacgcaatcgggcgaggtggtccgcaggatctgttcgatgcccagcttgatgtgcgcgactatctgcgttctcagtccgccatggactgggttgtcatttccaccgggatgttcacgagctatcttttcgagcccgaatttggtgtcatcgatctcaaggggaagagggtgaatgccctgggttcgccgactaacgctgtgacgctcaccacgcccgatgacattggcgcaatgaccgctcagatcgtcttccatacgcccgcgatccgcaacgagatcgtctatcttgcgggtgacacgattcggtatgaagcgctgccggccatgttggaagaacaatttggtagccccttcgacttcgcagtgtgggacgttccgcgattgatgcgggagctggcagacgacccctcgaatatgatcaagaagtaccgcgctgccttcgctcagggcaggggcgtatcttggggaatggaaaagaccttcaatgcgaagaccggagcgaagctggaaagcgtcagggactggatgagggccaacctcactacctcgtag

SEQ ID NO: 515239 - DNA, 1278 bp, Stenotrophomonas maltophilia
atggcctataaatgggcaaacaagttggatccgtcacccgttctgcgctcattctatgtaagagcggaggtcgtcggagactcgctgcatatcagagatgtgagagcttacgccgatgctgcagttctaagctcgatgcttgaaggcgacgaaagagtgagcgcctcaggaagattcgacctagtgtgggatgccttaaccggtgcccatggccaatccaaagacgacctactcagagaagtcaacaggattgaagcgagcagaagaaggaaaggcaagaagactttcacactagtgaccacgctatctgtagatgccgggaaaattcctagttccctacagatcattgaactaacggcacacttctccaatacgatctcaccgactctcaaagctgccagagacggaatcgccgaagattatataaagcgcggggcaattcatgccgacgaccctggttactgctacgtcacgattgaagtcatcgccagtgacgccagcgatgccttcaacaagtgcagcagtgaactcaacgtccttcgcggccttctttgcatcttctgcaatccgggctttgagaaaaagataaccggatcggaccatcaggctatcaacgtcatccagatgggaagcttccatacgatccaccatgctgatggacaggtcgacgatcaagtaatctggtatgagccaagctatgaaagcaagcctgtagcgagctttcggaacgccaacgctgtgattgacgcgacgactagaagcctcgaagcgctcagacgtcggccctacaacaataggttggctctagccctttcaaagtttgcctccgcattcgatgaagtcgacccggataacgcatttgtaaaatcgtggtcggcactagagtccatccttacggataaccaggccgactactcacagctcatacggcgctgcgcgtttctatatcaagaccgggaataccacaccgctgtactgaaacagctagcggagcaccgtaatgccagtgttcaccgagtagccgatgcaagcctatcaagaacattctgctatttactgcaaagttacttcggcaaggctctatcattccacatattccactaccagcacttcgaagactaccccgaagcactcgctttcctttcgggcccattcactgctaaagcgctcgacagagccgcagcacgagtcgatctcgctagacgttttctcaggttgccccccgctggggacacttccaaggcggccgaagataaagggacagatcaacctgactga

SEQ ID NO: 515240 - DNA, 201 bp, Stenotrophomonas maltophilia
gtgaagaccttccgccgcttcgtcgaaagctggtacgaaggcggtttccagaagatcatctaccacccgcagcagcagcccgaagtgcgcgacatgatcagctccatcctggccggttacgcctgggacaccaacaacccgtacgtggccgatgacagtggccgccggatgcgcgtgctggagcagctgtgcggcgcctga

SEQ ID NO: 515241 - DNA, 429 bp, Stenotrophomonas maltophilia
atgttcgcccataacggactctgtcgccgtcccgacctgttgttgcaacgcggctccgcgtacaccgtggtcgatttcaagtactaccccatcgcacccgactggcatcagcgaagccgtcgcgacgaagacgagaaggcgccctccttgaaggagaaagcgcagaaggatctggacaacattgagttatatggacttctgctgcaccgtcaccttgctgcggtggagcaggtatcggcaacgatcaccctggagttctggctccccggaggcgaagcgcagcggattcacatccgcagctcgcctgcctggaacccaccactagaggtagtgactcttcctctgccggacatgatcaggcgctacggagagcgacatgccttcagcatgcgcggcaaccacgcgcatgcagtcgccaaagctgcgtga

SEQ ID NO: 515242 - DNA, 474 bp, Stenotrophomonas maltophilia
gtggtgctgttcgatcgcaacgtgatggaccagctggccttcgtcgccggcgcgcgcgccttcagcgatgccatgcagccgcatctgtccactcgcttcgcgcatgtggtgcgcgccgatggcggtgggcacaccgtggtcgaaggcgggcagggcagcgcgccagcgctgcacctgcagtggcaggcgactccgggctgggacgatgccgggtgggcggcggccttcggcggccatcaggccctgctgcgcttcctgacctgccaggaccaggccatcgcccggacctgtgatcaccgctgggccagcacccgcatcgcgctgccggtggaaatcgcccacctgcaaccgttgcggctggacggcgagccgcagtgcccgcggctgcaggccatgggcgtggcgttgcacgaggggctggccttccggctgccgcaggtgccgttccgggtcgtgtccgagcgcctgttgtga

SEQ ID NO: 515243 - DNA, 1167 bp, Stenotrophomonas maltophilia
gtgcgcttccagcacgcggtaccccagcaggcgcagcgcatcgaccgtatgcgcacggacatcgtcgttgtcctcggccaccagcacggtttcctcgcgtggcgagtagccggccaggcccgtctgcgggacgcgagcctcgctaggcagcgccaacggcgagcgcgggaacatcatggtgatgctggtaccgccgccttccaccgaatcgatcagcacgtggccgccggactgcttgacgaagccgtgcaccatcgacaggccgagcccggtgccgcggccgacctgcttggtggtgaagaacggctcgaacacgcgcgccagggtggccgcgtccatgccgtggccgttgtcgcgcacccgcagcatcacgtactcgccgggggacgcatccgggaacaatgcggcgtagtcgtggtcgaggtggctgttgtcgacttcgatcaccaggcggccgccgtgcggcatcgcgtcgcgcgcattgaccgccaggttcagcaccgaggcctccagttggctgatgtcgatctccacgcaccagatgtcctcggcggtgcggatgtccagttgcaccagttcgcccagtgcccgctgcagcatgtcctgcatgtccagcaggcactcgttgaggttggctgcctggctgcgcagcggctggcgccgggcaaaggcgagcaggcgctgggtgaggctggcggcacggccaacccccttcagggcattgtccaaggcgcggctggccattgcgcccggctcgccggcccgttcactgagcagcatggcgtgctcgatgttgccggagatcaccgtcaggatgttgttgaaatcatgtgcgatcccgccggtgagctggccgaccgcctcgatcttctgcgactggcgaagcgcatgctcggcctgccgccgcgcagtggtttccaccgcctccgatacgacggcggtggccacgccgtcggcgtccagcagcgggcgcagcgagacatcgaagctgcgccggccggtgggcagctccagctcaagggaatgcagcgagctgcgaccctgtgccgctgcggcgacggcctggtcaaccaccgcgccgacgccgtctgtgctggcgaaccacagggattcgccgaagcgctggccgacaatctccctcttgtccgccagcacggcggccaatga

SEQ ID NO: 515244 - DNA, 726 bp, Stenotrophomonas maltophilia
atgcacgagctcgacctggaagctggtgcgctcgccctgcaacacgcgttccaggctggggagggcatgttcgaaggcgctgatgccactgacatcgcgggcaaagcggcccagcagttcggcctggctcacgccatgccaatccaggaacgccttgttcgcgaagcggtagcggtggtccttgtcgagccgggcgatcagtgccggaacggcgtcggtcacctgctgcagctgcgcctggctttcattcagcgcagcctgcgcctgcaccagctggttgcgctcgtgggcctcctgccgcgcgcgacggatggcatccggcaagcgctgcaggcgctgcttcaccacatagtcgcgtgcgccgcgggtcaaggcctgcacggccagctcttcggtcagggtgccggagacgaagatgaaaggcgtgtgcgggatgcgctcgcgcgccagcgcaagggcagcatcgccatcgaatccgggcagcacgtggtcggccaggatgatgtcgaaggggcgattgtcgatcgcctcgatgaacgcattgcgggtccacagccgctcggcctcgaagtcgaggcctgcacgctgcagttgtgcgctgatcagctccgcgtcaagcgcgctgtcctccagcatgaggatgcgcaggcgctcgctgcggcgcgatccatcacgcatggtgctgccccgaaccgttgggccggtgcggcggtggctggttggtga

SEQ ID NO: 515245 - DNA, 351 bp, Stenotrophomonas maltophilia
atgctccgcgtggtccagatggaccacacccgccagtcgctccccaagaccgctggcgggtcctcttggggcttggggcaggggatagggatgatcgatccgctcattaccttcgtgttgctggcggccatcgcggtcgtctccatcggtgccgctcgcatcgtgtcgtggctgttggaccggcgtgaccatgccgccgcccagcaggccaaggaagcggccatcgtcgcccacgcacgcgccgaactgaccgccaccggctggagtgctgaagacgaagccgcgttccaagccgtccgcgcccagcagggcgtttccctgaagtacctacaggagccgcgccgtgcgtga

SEQ ID NO: 515246 - DNA, 321 bp, Stenotrophomonas maltophilia
atgcgcaccccaatgaagttcagcggaaagccacagtcgtacgtcaaacagctggaagcccgtatcgcagcgctcgaatcagcggtaacagcgctggtgatggtcaacagatcgccggaatttgcgaaggcgctgggcgcgtccgcagactggagccaggggttcatgagcgcccccgaaacgcgtgcaacgccggagtttgtgcgcgactggcgaacagcactgatgcaccttctgaccgagcccccagcagcggaggcccactcacctgacgccaatcgcggcgaatccggcgatccgcaggcgagttcgacagactga

SEQ ID NO: 515247 - DNA, 210 bp, Stenotrophomonas maltophilia
atggataagaagccggacttcatcatctgcgacccggaaccctgtgcgtaccaacgccgcgacgaattccccgcagacactggcggccttagcaactggcatgagattagccgggatttctatatggaacttgagcggttgcagaaggaggccccgggtgttgtgcgggggatccaactgcgaaagctctatgcggcaaaggaggactga

SEQ ID NO: 515248 - DNA, 597 bp, Stenotrophomonas maltophilia
atgaacgatatcgaccagaccgcgctggaaatcgcgcgagcattcatcccggtggacgtggtgggccagcagcgcgccaacctgcaggtggccatcatcgaggccatcaagaagcacgcgaacccgaagaccctggcggacgtgcagcccggtgggagggtgaggctgtgggatgccaacatcgcatccggccttcgcaacatgctcagcgacattgagagccttggcgctgcaccgatgacggttgacacgtcccttattcgagaggccatttcagctctctctgcaaagccgcagtacatcaccgatgcctacgagctggggatgcgagacggccaagccctctccgcccagccctccccgggtggtcagggggaagcgctggcggccctgtcggcagcatgggtcgcacgtgccgacaagcacgacgagaacgcgcgcgaagccgacagcatcggggatatgacggctaccgtccaacacctcgaaacgaaagcagaggtattgcgtcaggttgcggccgagttgggagctaccctcgccgcccgccagccggttcgcatctacggatgctgcgcccagccggaggtgaagtga

SEQ ID NO: 515249 - DNA, 849 bp, Stenotrophomonas maltophilia
atgaatgcacttgtgcagcagcccagcgctctcaccgcgcagccgcgccagcagttcgacctcagcccgcagacgttcgagcaggccctgacgttctgcgattacctcgccgacagcgacctggtcccgaaggacttcaagggcaagccagccaactgcctgatcgccatccagtggggcgccgagctgggcctgaagccgctgcaggcgctgcagaacctggccatcatcaacggccgccctgccctatggggcgacgcggtcatcgccttggtgcgcagctcaccgctttgcgagtacatcaccgaggcggacgacgggagcacggccgtttgccgcgtgaagcgccgcggagaatccgaagaggtgcgcaccttcagcatggacgatgccaaggtggccggcctgctgggcaagagcggcccctggacccagtacccgaagcgcatgcgccagatgcgcgctcgcgccttcgccctgcgtgacgtgttccccgacgtcctgcgcggcatgcccatcgctgaagaaatcatggacatcccccaggccggcgcggcgagcaacgagcagccgcgcaccgccatcgagggccaggccgacaagcagctgccgctgtactcggaagccgacttcgcggccaaccttccgaagtggtgggacatcatcgccagcggcaagaagtccgctgaggacctgatcgccatgctgcagacgaaggctcgcttcaccgctgaccagctgcaggagatccggaacccgccgaaggacgaagcggagggtgaaggcgagccgcagagcggtgtcgccgcggctgccggcggcctgacccagactgctgtggagggctga

SEQ ID NO: 515250 - DNA, 393 bp, Stenotrophomonas maltophilia
atgaacacgatcaaagtgcttgtagcactgggaatggctatcgcagcatcaatggcatcagcgcagaacgtgggcgatctgacgggagagttccgctcttgcattgccggcactgatagccagatcgatacgagcaattgcatgtcacaggagctaaaacgacaggacgcattggtggatgctgaacttcgcatggcgcgcgagaacgcgcgaccagagatcgcaacgcgcatggatcaggtccaagcggcttggctcagcttccgtaagcaggaatgccaaaccaagcaggctgcagttgttggcagcggtgcgaccgtgcagtacctcgagtgcatgatccaccacgcagtccttcgcaaatcgcagctcgcaaactactggtccctgtag

SEQ ID NO: 515251 - DNA, 702 bp, Stenotrophomonas maltophilia
atgacgaaatccgaccgccgccgccagcttctgcgggccctgatcgatgacaagttcgagggcgttgccgcccgattcgccaacgcggtggggatcaccccctcctacgtgacgcgcatgctctatccaacgggcaagcctggcgccaaaggcattggcgaggattccatcgaaaagatcgaggaagcgctgcgcattcccggctacttttccggcaaggaagaggctcccaaccgtgttgctgaatcggttccggtctacggatctgcgactgacatcccatatgttcgcgttcagcaactggacgcggaggcaggtatgggaggcgaggcggtgaacgaggactacccggaagtgatccgagccatggacttcaccccaacgtacatccgttcggtggtggggtttgtgccaccccctggccggctggtgctggtcacggggcgcggggattcaatgattccgatcatccagccaggcgagaccctgctggtggactctggcgtccagaccttcgacggggacgggatctatctgatcaacacgggcaacgggcaccaggtgaagggactccaggatcgcggcgatgccatctatatcgtgagcgccaacgcgacgctctaccctgccttcgcgatgccacggagcacagtgatcgggggcaaggtatacctgcgaaatcgaatcgacaggttcaactaa

SEQ ID NO: 515252 - DNA, 240 bp, Stenotrophomonas maltophilia
atggacaccctacgcgcttacctcacgacactctcgaccgcggaccaggccgattacgccctgcgctgcgggacctccatcggctacctgcgcaaggcgatcagcaaggggcagcggttcgacggcgggctggttcgccagctccatgtgcagagccaaggtgctgtatccctgacggagctgcggcccgacatctggccggcggacgagcagaccccggaagccggggctgccgcctga

SEQ ID NO: 515253 - DNA, 216 bp, Stenotrophomonas maltophilia
atgcgagaagcccaatcgacccgcgccgtagagcgcgcccagcgggaacgccaagagctgcagcagcaactggccgagatcgagcggcagttcatcggagcccccatgcagccggggctgctggtggagcttcgccgtgtgaccaagaacggttcgccggccgaggcgaggcaactgctcgcatcagtgcagcgcgtgcttgcgcctctgcagtag

SEQ ID NO: 515254 - DNA, 3141 bp, Stenotrophomonas maltophilia
atggcacgcatgctgcaaccgagcatgtccggcaaggaagccgccggcgagcccgtgccggagcagctgcagggcctgaagctggaccgcgcggtgctggcggcgacctacggcgatggcctgctggacaagatgggccgggtctacgcgcgcaagggcggaacccatcccgaagaggtggcagccatgctgggcttcacctccgccgacgagctggtgcagggcctgtggacggtacggcagaccctggccggcgtgaacgcggaggccgatgcgcggatgcaggcccgccacggcgacccgatgaccgacggaacgctgccgcagcgggccctggatgcggtgcacggcagccgcaagatccagctgctggagcgggagctgggtgtgctggcagacctggccaaggagccccggccgaaccggcgcgagctgaaggccgttgcgcaggcgctcctggctgagaagaccgcgcgccagatccgaccgaacgaatacctggtagccgagcgaaaggctgcccgcgcggcggcgcaggcggcggccaaggggaagtttgccgatgccctgcaggcgaagcggcagcaggccctgaacgccgttctgttcgccgaatcccgtgctgtgcagcaggaggtcgagtcgaaggtcggctacatccgccggcaaatgaccccgcaggcccgcgagcggctgggcaaggcgggcgccgattacctggaagcgatggacaccatcgccgacacctacgagttccgcgacgtgtccggccgggccgttgcgcgccgccagagcctgcggcagtgggtggaagcccgccaggccgaggacgacctgaccgccgtaagcgatgcgctgctggcccgtgtcgaggcggagagcgtgacgaactacgcggacctgccgattaccgagttccgcgagctgcacgacgcagtgaccaacatcgcgcggctggccaagctgaagaacaagctgctgagcaacaaggaccagcgcgactgggagagcgcgcaggcagagctggccggcgcgatccgtggggcgatcgccgaggggaagccgctgccgctttccgatgcagacctgaccgcgatgcagaaggtgggtgcgacctacaccggcttgatggactgggtgctgcgtccggagacggtcgtcgagtggttggatggcggcgagaccgggccgtggcacgacttcctgtggaaccaggccgaggcggcgcagcagcagcggatcgagctgcgcaatcgggtgggcggcatgctggagcggaccatgaaggccctgacaccggcgcagcgagcggacctcaaccgcctggtgtacgtgccgagcctgggccggtcgctgtcgaaaaacacgatcgtggcggcggcgctgaacatgggcaacgccggcaaccgcgacaagctgatgcgtggcggctacatcggccagaacgccgaggtcgtccagttcacgccccagaacatcgcggaaatgcttggccacctcacgccggccgacgcgcagatggtgcagggcatctgggatgcggtgaacagcctgtggccggacatcgtggagcaacagcgccgcctttcgggcgttgcgccagaacaggtcgagccgatgccgctgatcttcaccgcggccgatggttcgacagtcagcctgcgcggcgggtactacccggcggtgtacgacccgagggcaggcgccggcggggtcaagcaggcgcgcgcggccgaggaacagataatgggcggcaccttcagccgcgcaatgaccagcaagggccacaccaaggagcgcagcgagtatgcggcgccgatgctgctggactaccaccgcgtgctgtcgcgtcacctcaatgacgtgatcaccgacgtgtcgcaccgcggctacgtgaagcaggcgctgcgggtgctggaagaccaggagctgaagaacctgatccagcagcggctgtcggagggcgcctatcacgcgctctacggcagcgtgaagaacgcggttcgcggcgcgtcggtttccgagccggggtccagcatgatggagaaaattggcgacgccgctatgaccaacacggcggttgcggcactgggcttccgtatcccgttggtcatcgccaatacactggtggcgcccatccaggcggctgcacgcgtggatccgaagtatctggccaccggctacacagcgtactaccgcagtccggtcaagatgacggagatgatccactccctgtcgcccttcatggcggagcgtgccaactctctggattcttcctatcaggtagttctgggtaagttgtcggggaagcgtggcatccgcgcggcggccatgaaaatggcgatggaggtgcatcgttggaccgtaccgctggcggagcgtgccatctggttgggccgctaccagcaggcgcaggcgcagggcgtcggtatcgacgaggcggtgcgcttggccgacaagtcgatccgcaccacccagcaggccggcgcgccgaaggacctcagcgctgccgagcgtgacccacgctacaagtgggtgcgcatgttcatcggcccgatgatcatcatgaacaaccgcctgcaggaatcgggcctgcgtggcttgtacctggggcgcgtgcagtccccggcccgggcgctgggcacttggttgtcggccggcgtgctgtcaaacgcagtgttcgaattgctgatgggacggggcccgggggatgaggacgacgatggggacgtggacgccgcagattgggcgatgtggctggcgcgcaaaacgctactgttccccttccagacgttcccgctgcttcgggacgtcgcgggagccatcgacgcgacgctcgacggcaaagccgtcatgtcgcggcccaatcctttcgtcgattccggcgtcgctctcgcgcgattcggcttcaccgccttgaaggagggccgtgactggatcgccgacgatgacgagcccgacgcggaaaagctgatcaagaccggcgtgcgcgctgccggcccgctgaccggcatccccagcaatcagatgctgaccaccggcgaatacctctacgacgtcggtaccggccagtacaccccggacaatccagcggaggcggccgcatacctcatgtaccgccgacccaaggacgagcagtaa

SEQ ID NO: 515255 - DNA, 1530 bp, Stenotrophomonas maltophilia
atgaccatctccgccaacgaccgccgcaagacctacgtgggcaacggcgtcgctaccgcgttccccgggccgcgcgcattcctggcctcgcatattcaggtgttcaccggcacgcatccggtctacaccctggtgccgccttcgcagtacaccgtgaccggactgcgggcaaataccagcacggtcaccttcaacgccgcgcctgcattgaatcgcgacgtcctgatcctgcgcactgttccgctcgatcagccggccgacatcaccaaccagggcgcgttcctgccggaaatccatgaggacgcattcgactaccgcgtgatgcagctgcagcagctgctcgacaatggcatgcagctaatccaagaccccgccaccggcgaattcgtatgggacgcgaagaattcgcggatcatcaatgtgggagacgcggtcggaaacacggacgccgtcaacctgcagtcccttctgcggctgattgaagagatccagaatggcggcggcagcgtcggcatcaccccgaagttctggaccttcgaaggcgacggcgaggtaaccgacttcccactacccggcgccgacgtgttcgacgccctgttctacgacaccgcgctggaaggtacggccggcgtaggcgactaccttgtgtccaagccgggcgacttccagattctggaaggggtcgacggggcggacccggtgatccgcttctctgtggcgccaggcgatgaggtgcgcggcttcacgactctgcgcggctacgcgcgcccgtggatcgggcagaccccgatctacaccgtggcgccgcgcatcgtgagcgtaaccaccgacaccaccctggatgggggttcgcacaacaccctgatcctggccaactcggccacgccgatcaccctgaccatccgcgccaacaccggcggtagcgccgactggaaggccggccagttcttctcggtgatgcaggtcggggcagggcaggtaaccctggccatcgagggcggcggcgggcagctgaacgtgccggccagcttcgaggccaagacccgcgcgcagcgcagcatcatcagcgcaacgaacatcgcccccgacgccgatgcttgggcggctgcaggcgacatgctgcgggtagcctcggtgcctgatctgcagtgcttcgagctgatcgaccgcatggtgctgctggacaccaacatcgcgacgggcactggcagggacagcctggtcctgccctacggcctgctgctggacacggtggccaacggcggcatctacgccaccctgtccaccgcgcaggcatcgggtacgccgctgacggtcgacgtgaaccgcaacggcaccagcatcctggccacgaagctgaccttcgacagcaacgagcgcagcaccaccaccgcggcaactccgccggtgctggtggccggcggcgaggtgctggccaagggtgatgaaatcaccatcgacgtggaccaggtcggcaccgccggagcgcgaggcctgcgggtgtacctggtcggccagaggtccacctga

SEQ ID NO: 515256 - DNA, 1407 bp, Stenotrophomonas maltophilia
atgagcgcccgcatctatgaccggcccgacctggaccagcgcactgcccagctcgcgctctacattaccggggcgttcccgaacgccaagcctggcctggcctatgagggtcgcctgcaggtgcacaacggcatcggtggtatgaccgtcgaccaaatcgacggcgacaccctccccaatggcaccagcctgtacatggccggttcggagattgttctggcctggccggactactccgagactgccgcagctattccaaaccccgggtatgaggacggcgacacgggatgggccaaggggcaggggtggagcatcggcaccgagaaccccatcgccggcttgcgctccgcccgctacggcgaaaatcagggcagttcgctgatagagagcgccgctcgctaccccgtcaaccctggcttgccaatcacggccacctgtcaggtgcgacagggagccagtgccgagggcaatgccggcgccgccgtgcagctgcagtggcgccgtgcagatggttcgctgctgggcacgtccgagggcaacgccgtcatgtcggcgtcgaagaatcgcgtttacccgtcgaccgtggttgccgcccccccggagggcgcggcgctggtgaacgtggcgtcgcgcggcatccgcacccgcgagaacaaggcgctgttcattgacagcttcgtgtgggatcaccaacagctgacgggcgtgaacgtaacccgcacctacgatctgacgctacgggtgcgggattccgctgggcgaagcgccctgtggcgcggtacggtcaaggtcgagttgatccaggcaccgacctggagcccgaccgcccatggcgacaacttcaccatcattgatgggcttgtggcgactgcggcgaatggcgacacctttggcttcagcagcacggcggcactgtcgacctcggcgaagtcggccggaaagtggtacgtagaaatccagtgcacggcggggtctgccgggaacgtgacattccgcgccggtgttgcccgctcaacccatccactgcaggggccaacggtcgccgacgcaggcttgggcgccagctctgacagctggtgcatgctggctgcaaacggtgagtgctacttcaacggcaacttcctgtacttcggcagcgtggacctgtcgattgggtcccccacggaccgctggggcatcgcctacgacgctggaaccggacggctgtggcttcggaaagttggggttggcgcctggcgaggcggcggtgatcccgccagcaacaccaccccgtcctacgtcgcggagccggggctgcactttgcggcatccctgtcttcgttgggcggaagcccggaaggcgaattcaccattgttgacgccgcccaagcgaccatcccggcaggtttcacatactggacggactga

SEQ ID NO: 515257 - DNA, 345 bp, Stenotrophomonas maltophilia
atggcgctcccccctgacttctattggaccagcagctcaccgaacaggccggatcagccggccacggtgattgcctgcgatggggtatgggtggtggccatggcccagcgtgtggacgatcagacctgggtggccacgctggaccggcaccggtacgggcctggcgggcgctggcggcgctgcagcagctacgagagcggcagggccggcgccgagctgtgggtgaccaggcaccaggtaaggctgcgcgaggacgtggccaagatcagcggataccgggaggccatcgcggccaaccggctgctgaagggcgtgctgaagccgccgttcggctggatggggtag

SEQ ID NO: 515258 - DNA, 1818 bp, Stenotrophomonas maltophilia; identical to SEQ ID NO: 495227

SEQ ID NO: 515259 - DNA, 636 bp, Stenotrophomonas maltophilia
atgatgtcggtcacgcgctgcaccgaggcgacgatctcgcccatggtcgcgccggccttgtgcaccagcgccgagccgtcgttgaccttgccgaccgagtcgtcgatcaggcccttgatctccttggcggccgcggccgagcgctgggcgagggtacgcacttcgctggcgaccacggcgaaaccgcggccctgttcaccggcacgcgcggcttccactgcggcgttcagcgccaggatgttggtctggaaggcaatgccgtcgatgacgctgatgatctcggcgatcttcttcgacgaggcttcgatggccgacatggtggtgaccacctggccgaccacttcaccgccctgcgaggcgacgccgtgcgcgccgatggccagctggttggcctggcgggcgtgctcggcgttctggcgcacggtggaggtcagttcctccatcgaggcggcggtttcttccaggttggcggcctgctgctcggtacggcgcgacaggtcgctgttgcccgaggcaatttcaccggcggcggagctgatcgcgcggctggactgcttgatgcgggtgacgatctcgctgagctgtgcggcggtggcgttggcgtcgtcgcgcatccgtgcgaacacgccctggtaa

SEQ ID NO: 515260 - DNA, 1053 bp, Stenotrophomonas maltophilia
atgctcgccgccatcgaatcggcgcggtacagcgtcgccctggcctcgtacatcttcgacagccaaggcatcggggcgcagttcgtcgatgcgctgcgccgggctcatgagcgcggcgtgcaagtgcgggtgctgatcgacgacgtctctgcccgctggacgcaccgcagcgcctaccgcgccttgcaacgcgccggcgttccggcggcgacgttcaacccgacgttgattcccgcgcgcctgcatgccgcgcatctgcgcaatcaccgcaagctgctggtgatcgatggcgagacaggtttcaccggtggcatgaacatctgcagcacgtattggcggcccgatgcgccgggccaggcctgtcacgatttgcactttcgtctgcgcgggccagtggttgcgcatctgatggggtgcttcaccgatgattggtgcgataccacgggcgagcggctcagcgagggtttctggggcgaatcgcccgcaacggctgatgaacaaggaaactcttgggcgcgcggcatcgaggccggtcccgatgacgccctggaccggatgcgctggaccttcatgggcgctttgagcgccgcgaagcattcggtgcgcatctggacaccttacttcgtccccgatcagccgatgatcgcggcgctgagcacggccgcgatgcgcggcgtgcgtgtcgaggtgctgacacccgcgagctgcgaccatcctacggtgcagtgggctgcgcgcgcccactactggcaggtgatggagcacggtgtacgcatcttcgagcggcagggccccttcgatcacaccaagctgatgctggtcgatggccgatggtgttgcctgggttcggccaactgggacgcgcgcagcctgcgcctcaacttcgagttcaatgtcgaggtctacgacgccacgctgtgcacacagctggaggcgctcttcgatgccgcccttcatgagtccgacgaagtatcagtggtggcactgcgctcccgctcgctggccatccgtttgcgtgacggcgcggcccgtctgttcacccccgttctttag

SEQ ID NO: 515261 - DNA, 486 bp, Stenotrophomonas maltophilia
gtgcagcgcaatgacctgtcggtggcgggtgggcccgtcagtcccattctgcaattgcatcgcgagatcgaccgcctgtttgacgacgcgtttcgaggattcggtttcccgacgctggccatgccacgctggccgtcggagtggccgggcatgctgaagccggcgctggacatccaggaaacggacaagcagtacacgatcgccctggaagtacccggcgtcgaggaaaaggacattcgaatcacgctcgataacgatgtgttgctggtgcgcggtgaaaagcgtcaggagcaggaaaccaaagacggtggtttccaccgggtggagcgctcctacggcagctttcagcgcgctctgaacctgccggccgatgccaaccaggacacgatcaaggccgctttcaagaacggcgtgctcacgataacgatggacaagcgcgaggccagtacgcccacgcaggggcgctcgatcccgatcaatggctga

SEQ ID NO: 515262 - DNA, 282 bp, Stenotrophomonas maltophilia
gtgcatccgctgcccgccctgcgcgccaggctgctcctgaagcgcgccgagaccctggtagaagatggtcagcggagcgaagcgtccaatgagcgcctggagacattattgaacgaagcgcggcagcagttggaaatggcagaactgctgggctatggaaagaagaaggactttgagcccctgtatgctgaactcaagaaagtcaagcaaaagacggctgggagaggcggcggaaaaggctggctcgatgaaatcaaggcaaagctgtccaagttgttctga

SEQ ID NO: 515263 - DNA, 282 bp, Stenotrophomonas maltophilia; identical to SEQ ID NO: 507089

SEQ ID NO: 515264 - DNA, 5625 bp, Stenotrophomonas maltophilia
atgaaccggaaagtattgctcgttgaaatcggtggccagggcctgcctgcagtcacgcctgtgacccggcagccctccaactgggtggcgtcggccaagccggctgttgtggttcctccagccgagggcgtggagaccaagccggcagcggatagcgtgactattacctggaacgcttcgccgctggctggtgctgtctatgtcctctggcgcgcggccgacgcaggcggtaaaccgggcgaatggaagtacgtcaccaaaacctcagacacgcgctacacctataccgaggccagtggcgttgtgagctggtggaaggtcactgtccaggtaaacggcgtgtcgtctgcagactccacgcccaaggctcaggcccctgtggtcccgccgaccacggcggacctggtccagctgcagggcaaggtggaccagggcctgcgcgacctggcactggcagacgctgccgaggcacagcagcgaatggcggacttccaggctgcacaggcgcagatcctggtagagagtcagaagagtgcggccgccgtgggcgaagtggccaagcgtgccgaggatctggccaccaaccttgccaatgaggagcgtgcccgaatccagagcgtgctcaacgaaaagaccgagcgcaccgcagacatcagtgccgtcaacacgaaagtccagaacggcctggattcgatggcgcgctcattggccgaggtcgccgcaggtagcggcacccagttcgactctgccggcatctggcacttcaacgccgggctggaaggctggacgggcgtgtatggaaccccgactatcgccgacggcatgctgcggccgatcaacaccgccaacaactccggcatccagtctccggcgccgctcaacatcgacggtgccgcctatcgcttcatcaagctgcgcatgcgcaaggtaggcaatcccgcctggatggggttgattcgctggatcaccgccgccgaccaggagtggaacgaagcgaagtcgctttccatccctgtgccggcattcgacaccaacggcatcgccgtcctggacgttgatcgtctgccctggaacggaccctcaccactgcgtgccattcgtctggcactgacgggtgcgcagaccgccagcgcctacatcgaatacgactggattgccgtgggccgcccatcgcctggcgcatccgtcgccatggtccagcaggagagcgaggcgcgcaccgccgccctggccgctgaggctggccagcgcaacacgctggccgtgcagatgcgcggcgactaccccggcaacgatccggcgaagctgacgggcggcctggcctacaacgaaatgagggcgcgtgtcggcgcggacgaagcgcttagccagcgccagtcggccgtggaggttcgcctgcctgcaggaacaggtgcgctcgcgtctgaggccaaggtcaattccgtcgagcaggcaagcgtcacccgcgaccaagcaattggacaacgcattgaccaggtgaacgccacgctgccggtgattgctgcccagggcgccaacatggtgctcaacggtggatggcaatccggccgggacgtggcctggacctacaaccatgcgtcactcggcgtggcggccaccgagggccgcgcaggtggtgcgtgcctacgggtagacggcggaaccactgttgtgcgtggcgcaaccgccaacggcggcgtgcctatccctgtcgcgcctggaaagaagtaccgctatggctgctggtacaagacaacggcggactataacgggagcgcgaacaacggaaagctccgtctggccacgcaggacaatgcgctgattggtggcgccacctacttctctgcgaaccagggaacgtggacctacctgggcgcggtttatgccatcccagaaaacacgtccatcactggcctcaagctcaacatcaacgtggatcacacagcgggcacgttgtgggtggacgacgtcgctattgaggaggtcacagagatcctggccgtcgccgatggcctcagctccctgagcggaaccgtcacccagcaggctggcctcatcaatgcacagtctggcctcatcagcgccctgcgcactgacgtggatggcaaggcaaccaacggcgccctccaggcactgcagtcccaggtaacgcttcaggggaacacgatcaccagccagggtggagcgctcaccagcgtccaggccgccatcaacaacctgggcggagacaatcgcctgcgcaacagcagctttgaggttctgttgcccaacggcgttcctcagtattgggcgccctcatcgtcatccaccgacgctgcgaacaagaccactcgcaagctggtggactctgtgctgcctggtagcaccaaggcctggcgctgggaaatggcgggcatccctgccaccgcctatgcagagtgctactcgtcggtgtaccgcatcgatccccagcagcccgtcacggtgtcctgcaacgtgcgtggcaaaccgggggcgcgcttcttcttccagctcgggctgaaggatgcggccggtgcatctgtcggctggcctggcgggccagctgctggcgcgggcatggtcgtcacggaagcctgggagcgtaagtcctacacgttcccggcgtcgcagatcctcgccagcgctgtcggcgcggcgctctacctccgtgtgtacggcgacggatcggcagaccagtgggttgagatcgacaatgcgcagctgcagaccggtgccgccgccacgggctacgcgccctccctggaggagacagccgcgcagtccaatgcaaacgccgaggcgaacagcgccctcaacacgcgcgtcaccaacgcggagggacagctgctgtcccagggcacggcactcactgccgttcgtgctggcattggcaacgccacggtctacgaagtcaccgccaacgcaatcatcaccagtcagcccactggaggcccgcgctcgtccggaacacgaaatgcagcgggcggagccatgggtggtgccggacgcggcctcaatgtccaggtggtcaacgccgacagcaatttggggccccgacagacgtttgatacctacggcaacggcgcatcggcatgcgccagcttcaacgattggtacgacaacgccctggccgaaaatcagtatttcattctgtttaccagcgatcacactggaccgctaagcaatggcgtcagcccagacatcgcgggggccagggaccgcctcgttgatgccggggcctcgcgtcgcaacgtggaggccctggatggcatccgcatgttcgtcctgatcggacgcaagcgcgctggtgaagcggccggccttcagcgtctgtcgccccgaccctccaccgcccgcgccgaccaatgggttgagctcatcgtggaattcgtcaacgggcgcccgcagggcagcctggacgtatccgcgttggagcgggccacccaggcaaacgcggctgcaacgtcgagcctggaagcgcgcaccctggccaacgagaacagcgttacctcgttgggccagtcgctcaccagcgtcaatgctcggatcgacggcatcggcggtgacaatctggcacccaacagcagctatgagacctcgccgaacgacacctcagaccccaccggatgggtgcgcgaaacgaacatggccaacgtcgtgctcaagtacattccatcgccgttgtctggcggaggtcgcgcgatccgtttggaagcgaacgcaaccgcagtgggccagtatctgggcctcgctgctcgcaatgacaacgggtggctcccagttcggccccgaaccccttacgtcttgagcagctacgtccgcgccaccgctggaaccggcctgcgcatgtacgttcagtggcgcaacgctgccggtgtcatcaaggcaacgagcaccatgcccaacgtcgttgcgactgctcagtggcagcggctggtgtttcaggtagacaccatggttgacgatgtcgtagaggctcggttgttcgtaggtcgaatgcacgcgacggccgtccagggcgttgccattgagctggataacgcgttgttccaggaaggcaccgcagcaaccggctgggtgcccagcgggaaggaaacagcagcggcggcagcggcaaactctgcggcgacagccggccttacgtccaccgtgacccagcaggggcagcagctcaccgcattgggtcaatccgtgacaggcgtccaggctgagattgcaggaaaggccagctcctctgccgtccagacgcttgaggcaaaagttcggaaccagggcaacggtggaaatctactcatcaactccacgttcccgaagtggcagcgaaacggctggggttgggggcacaacaacggggcttgggctgaactaggaaacccaactggtgatgacagttggagccctcgtggcatctccggtatcggatcacgtcgcggcggagtggttggagctgccgacgtgtcgtggtgggggactgagtacgacatcccggtaacaccggaagcgttctattgccagtccgcgtggatcaactcgcaccgctgcaataccaatctggaggtgacgtggttcaagtctgacggtggctatgcagggcaaagcaacacaccatggcttccggcccccaatgctggtgccacgagcctcgcgcagcttccgcgtcctttccagatcgtgaaggcgccacctggcgctgcagtggcgcgattccgggtgatcgttgtaggaactggcgagtccgatccgaacttctggatgttccggccaatgttcagcaaggttgatccaggtgctacggcgcctcccgaatgggaatccggaggaaacgagagcagcgcgaaatggggcatctcgcttaactccgatggcaatctctctggcattgaaatggaggcaaccggagcgcggagcgagctgcgcatcctgtcgagcattctgcgcatcatcagccccggcacgcctgacggcatggagcttcaggacggatacctgcgcgtctggcgcggcaacgtccagcgcatcatcggcaacggtttcgggcccgatggattgattgactactttggcccgaacgtcggcgccgccggtgcgaccaagcgaaacgcaaccgtgtggatggacgtgaatggtggcgcgtactggggcggcgcgattgcggcaggcatccgtcgtaatgcggcacagtcaacaaccacgcagaccattggtgtctctatcgtcgttggcccgttcagcaccagcggccgaaacaagaacgtcgttgtcagctatcagcgaagagtagttcgaaccaacagccgaatggaccgccagggcttcgtcgcaggcggaaacaggaacgcctgtgcggtgaatgtctacaggaagctgggcaacaacgcagagcagttctggacgagttttgaagccagtggcggcgtgtctattacgaacgagtttgatggccccgatatggcgatttcgttctggtctggatcggtgacgttgaacgatagcgaaggcacgcaggaccgcacctaccgtgcagagatcgtcgggttcagcgaacaggacgttagccatcagactggaagtttcaccggcctagacatcaccgccagcctttccatcgtctccattgaggagtga

SEQ ID NO: 515265 - DNA, 450 bp, Stenotrophomonas maltophilia
atggccaagcctgaaaccaagcaccccagccgagaggagtggcaacgattcgatgaagccttggcaagcccctgggcaggtggcgttgaggttctcgcagatgggcatcgcctccagatcgccgtcaggcagatcaagccgctcaagtttgcagtgttggtctacgttgatggccagatcaagcaagagttctgcaatgtaggcaatgccataggactcaagttctaccggccaagaaccgtgtgcggctacacgcgagcggaccaggcaagaatgcaaaaggattggggtaaacgctggaccaaagctcaggtgaagaaggcgacagtcgtggtcaacgacccgcgctggggctcgccatccgcactgcgccgacacctggtgaaaacctgcactgaaatccacctggtacgcattgggtggcctgagaaggccgaggcggcggaatga

SEQ ID NO: 515266 - DNA, 453 bp, Stenotrophomonas maltophilia
atgacgaagcatgttccgtttcccaagtcgatgcagcagctgctgcagcgaatcctggacgcaatagaccaggcaggcggctgcatgacgcgcgtccagctggccaccaccctgcacgatgcgcgtccgctggacatcgacgacaccctggaggagctgatcgaccgcaaccaggtcgaacgccaaggcaatgatccgcagatgctctggctggtccgtggcttcacgggcaccgagtttgttgccgtgccggagcccacccccgccgagtgcgagcgcccgccgcaaagaacgcgtgcgttcgacgtggagcgacgtctggaagccattgcccaggatgtcctggacgccgcactggatgcccgcgcggccggcctgccagcgccgttggttcggctgctgatgcagtgcgatggcgcgctcaccgaagctcgtagccacctcaccccctga

SEQ ID NO: 515267 - DNA, 342 bp, Stenotrophomonas maltophilia
atggccaagagcggtttgggcgaatcgttgccgctcgcggcagacctgagcctcaatccgaactggcgtgtctacggattcgaacgcgaggggatcaactactatcaggtcaatgacctctctggtcaggttgtgctcattgtcgccaatgttgaggccacattctggacattgcccgccggaaagcgcccagccaaggtatcgttgccagcgcaccggttgaccctcccagcgaaggcactccggcacgtagtgttccgcaatgcggagttttcgttggtggtgcatggtggtggcgcggacgcgatttgggttatcgaatctgcgggtacgcctcgctga

SEQ ID NO: 515268 - DNA, 1581 bp, Stenotrophomonas maltophilia
ttgaattggtggaaaaaaggaattgatctgagttttcgggtacggccgcatggactggccatcgctgcgctttatgccgtgatgtgctggggagcccgacagatctctctggaccagttctacttgcctgcgggcatccgggtagcggcgctgctgctatgcccccctcgcctctggccctacttgctccttggcgagtatgcgtacttcgctcagttgcgatacccgctaatagaaaaatacggactggcttgggtaatcctggggtcggccttcctgatgcctgccgtcgccctggtagttggagcacaccgcaaggccagaacagcggcttcggaaggatggctgctatcgatcgccgtatctgccgcactggtcgccacagcattgaaactggggctcgctcatctgctgtcggaaagcccttccagtattccattggccacaagggcaatgcgatttgtcctgggtgactacatagcaattctcacagtggcgccgatcaccctgttgtggacaaggcggaacctagcttccgagtcgcgattctggcgctcttcaccgacacttacgtccctcgcattgatgcttggtcttgggctgttcacagcgcttgcccctggcctatccgacaccagcaagacaaccctgcagctggcgatgaccttgccggcaatcgtgctgacctgcgttcacggctggcagggcgcggcaatcgccgttccgttcctgaacattctcatcgcaatgacgactccaacatcgggacttcccggctcattcgatgaacgaaccttcatgacacaacaactggttgccgtcgcgggaacggcactattggcactgggatcccggatctcacagcactatcaccagcgtgtgcggagggatctgcacggcagccagaccgccaagctctcccgcactgcacacatggccggagagatggatctcagggagcgcgctttggatctcagaaggattgccaacggcatcgaggcttccctcaatcagactgccaatctgctgaaaatgcacggacatgactcgcctgccatggaccttctgactacgtccaatgcgcattcacgccagttccgcgaactgaccagcttggtgtatccaactgaagtcgagcaggttgggctgtatctggcccttcaggtcagtggcatccgtgaaagctgggatcagacgcatcgcatcgtgcctccgcgtctagccggagatccctgtcagttgagcattgcgctgcagctcgcagcctaccgtacgcttacagaggccgtggctctgctcctcaaaaatgaacaggggcaaattcagattagcgcgcgttctggcaggctgcgcgaccagcagggaatcctgctcagcattgccctgcttgatcgcgaccgtcaattgatgctcgaaacaacaaagctggcggtagagcgcttgagctcgcgtgcagttgcctatggaggtcgcgtggattgctctggaaatcgagttcgtgtactgctgctggagcctgccaccggtatttcacatggcagcactcacgccgtttggatcgcccgcactgacattgcatag

SEQ ID NO: 515269 - DNA, 270 bp, Stenotrophomonas maltophilia
atggaatttaatgaggttacggcgagcgatctcattacgggcctctacaaacggcgcttcgacgtcggcctttctctgaagcaggtgagcgattcttcgctgaagagtctttctatttggttcgaggcgacagctcttgccacgccgctgcgatacccactgctccggcagcagtcaatcagaatagacgaacttaaggagcactccgtgtttcgatggaaggccgaatatgttggcgcgcacttaaaactgacccaggctgcgcgttga

SEQ ID NO: 515270 - DNA, 1374 bp, Stenotrophomonas maltophilia
gtgaacgaatcacccatgaacctgtcgtcagcgccgctggatgagggcgagcccacgccagaagcgaccactcgcttcggccgcctgcgcgagcgcaccgacgagctcgaactgttcatttccggcctgctggcattcgcgctgctcgccgtgccgggatacctgttcgatgcctgggcacgcagcagcctgcatactgagggcatgtacttccacgtgctgtggttcggtttcagcaccagcgtcggcatgtgctacgtgctggcggtggcgctgatcgcgcatctgaccgtacgcggttactggatcggcctgatcgggctgaaatcgcactttcccaagggcattgactgggaacggctgccgatggggccggtatcgcgggcgttcctgaaggcccgtgatggtgggttggacagcgtcatcgagcgcactgaccgcttggcgacgatgctgttctcgaccacgttgctggcggtgcagacgctggccggaacgctggtggtggcggtgatcattctcggcgcggccatgggtgtcggcgcgctgctcggtggctctgaccgggttacgctgtccatcgtggctgcaatgctgatcggcctgctgatgctcgcgctggtgccggtgttgctggagaggagcattgcccggcgcagcgcgcgtgacctgtcgagtgagggccggcaacggctgctgcagcggctgctggctgggatgcagcgggtgccgatgctgcgtttgatgcagacgatgcaactgaccatgcagagcaacctgcgctcgcgctcgttcatggccgcgtatctgctggcggtcatggtggcgatggtgctgggggcggtacaggtactgggttcggtgaagttctcgctgttcaaccgctaccaggtgatgaccgacgaagcggtcgagcacggcatgttgagcgcgcactacgaatcgatgcgctcggcgcatgaccagctgctgccttatccgatgatcccgtccgacaccatcagtggttcgcgcctgcgcctgttcattccgcatcgcccgcagcgtgacaacccgctggcacgccagcactgcgcggcgctgccggaggggcgcaacgaggcatccgggcagctggcggccgatgcggcggtggtgtgcctgtccagtttgtggcgggtgcagctggatggtgccctggtcgacctgcatgactttgtgccgatggagcgtcgcgatgtcgacatgcgcggcctggtgggatacctgcccacgacgggactggcacccggacggcatgacctcaacctggtctggaacgccgaaggcgccgagcagggtgcagagcgccggcgcgcgttccgcatcccattctggtacgccccggatccctga

SEQ ID NO: 515271 - DNA, 450 bp, Stenotrophomonas maltophilia
atgaaggatgtccctattccttgctatagcttgattgaaacctccattggcagcgatccggctatcgtggtggtcaattccacattgctgacctttactggccatgatgcctttccctggcacttgaggattggagtaaattgcaaatttcaaggtgtgaatggcatgccgaccaaggaggaggtcgaagcacttgcccgtctggaggaaagaattgcgcccgcgcttgaggttgaccacaacgctgtttttctcgcccgaattacggcttgtggagaacgcgtactcctatttcgagtgcatgaccccgaaaaggctaacgagacattgcaacttctgatttccacgccagattctgtgcgcgagtgggaatatcaattggagtacgacctcggctggatgttggcgaaaccggagctggacctattacagccttctaactttaactag

SEQ ID NO: 515272 - DNA, 186 bp, Stenotrophomonas maltophilia
atgcgcttccggcgactccggagcgacatgcttcccattgatatccaaacgttggccactagcatcattcacatgacaatgggagccgcaggccgcgttgggatgtaccagtaccctttgattgccattcactggatctacgtaggccccttttccagcagaggggtccgggcccttgggctgtag

SEQ ID NO: 515273 - DNA, 735 bp, Stenotrophomonas maltophilia
atggacgttgctagcggtcataggatcatcgaccttcgaggcagggtagtctccaattttgacgccgggaattgggaggagattggcttactgacaggtgcttcgccgatcatcaaagggcactcacgacttctacgcagcctggcgtggggagacgaagactatgcgggaaacgcgttagtggttctttcggctatagcccatcagaacccagcggcacttagcatcattgaggattacttggaaacgagatttccaggcgagtcagtattcatttccgccaaaccctcggagcgtaagatcacattcgccccaagtgtattcacagtacctcaggctggagttgagtcagacctcgttactgcaatgatgccgttcggcgctgcgttttcacccgtgcacgatgccatatccgctgcctgccaagaaacaggtcgtcgatgcctgagggcggatgacatttgggaagagagcaccatcattcaagatgtattcaacctgatctttcgcgcccacgtcgttgttgtcgacttcagcggaaagaacccgaacgtcatgtatgaaacaggaattgcccatacgctcgggaagcacgtcattccgatttcacagtctctcgatgacgtgccgttcgatatcaagcatcaccgcgttttgaagtatttgccaaactcggaagggatgcttgctctcaagtcttcacttgctgcgaagctcagacaagtgtccccctaa

SEQ ID NO: 515274 - DNA, 273 bp, Stenotrophomonas maltophilia
atgcgtaggctggcccactactcagcggaccacccggcggccatcgcgctcgcaggcatagtgtctgccctgcgcaccggccgagatgtcctcgaatccttggccgagcgggccgaggcggtgggggtgcggccttattccgagtactttgacgacgcggcccgcctggcaggtgttccgtactgccgcgcgctggacctgtacgtggaccgcgagaccaagcgccgggccgatcggctgggatacgggcaggcgcatctcgcgctctgctga

SEQ ID NO: 515275 - DNA, 726 bp, Stenotrophomonas maltophilia
atgaagatcaccctcagcgacaccccgctactcagtccccagcagatcggcgagctcgcctcgcagctggacgtgcttcacaagcgcgccctcgccacgatcgagcgactgaacaaggacgtcgcggcccgtaagcagcagatcgccgcacgctggaagagcgcgccgggcctctcctccggcgacctcgctcgcttcgcccagaatgagaccctcgccaccgtccgcgagatccgcgacaactccaagaccgagatcgacaagatcctcaaggacgccggcgcaccgcacgcgcagctcgtcggccagcgagagttttacgactccccggccaaggtgctggcgcgcgccgcgctgggcgacccgaagcgcactgagtacctccagcagctccagcacgcgggtcccgctgagctcgggcacatggcccaggtcgccgtcggcacggccaacgtggcactcgcgtccgccgtactctccctgatcgacaggctgcccacgaaggaccggcctgtcggccccgccgagttcgcgggggccatgaggcaggacgaccacctaaaggtgcgggagtacatcaagctgggcgacgctcgcctccagggtatcctggtggccatccgcgcctggaccgccggcaaggcgaacccgctcagcacggtctcgctggccatgcgcgagcagcagatcgagcgcgcactaatcgggggcgacggcgatgcgtag

SEQ ID NO: 515276 - DNA, 474 bp, Stenotrophomonas maltophilia
atgggacttcctaggactttcgtcggctttagcagcaccgatattcgctactaccgcctgatgctcgcatggaaggagaacgagcacatagacttcaactttaccaactgtcagctttcccaagagattaactccgagaacgaggcttacatcaagagcaagtgccgcgagcgtatccagatggcgagcaccttcgccgttctgatcggacaggacacgcgcagtaagcacaagtacgttcggtgggagatggaggttgctcttgagaaggagtgccgcatcatcggcatcaaccttgacggctctcggcagatggttacggcaacctgcccaccaatcattcgtgatattggcgccatctttgtccctttctctcccaaaatcgttgcctatgcccttgagaacttcaagatgcacgacaagggcaacagatactatccggacgatgtctacacgaagcttggttacaagtaa

SEQ ID NO: 515277 - DNA, 864 bp, Stenotrophomonas maltophilia
gtgcaagagcaggactttcccgccctttaccgatcggcagacgacctgtccctaacatctcagcgccatttcttccgggcgctgagggtgcacctgataacgctggtagttgcagcggtcttgtcgctcgtcagcattccgcactggtccgtcgcggcactccagctcctcgcactgcttggtgccctcggctgctcgatctacttgtttgcgatgcgcccggatcgattctggtacgcgggacgggcagtggccgagtcgatcaagaccattacgtggcggtatgtctgccgggctgagcctttccaacgcgacgatgcgaccgcccgcagcgatttccgccagactctcaagcagatcgtcgagcagaacaaggaagtctgccagtcgttgaccgagtatctcgacgaggcgcaattcacctcggtgatggaacagatgcgcgctcgatcactggacgaacgccgggcgacctacgcgaactgtcgaatcaaggaccagctcacctggtacgcgaagaaggcggccttcaatcgacgcatgtcccgctacttcttctgggcgctgatcgcagtgaacgccatcgccgttgtctgtgcggtgttgcgcatggtctacgtggcgcaaccattctggcccacggacgtgttcgtggcgatggcggccagcatcttgagttggatgcaggccaaaaggttctctgagcttgcagcctcctatgcgctcgcggcgcacgagatcggcctaatcagggagcagtccctgctccctgagacggatgagaagttctcgctgttcgtcggcgatgccgagaatgctttctcgcgggaacatacccagtgggtggcacgaaaggacgtttag

SEQ ID NO: 515278 - DNA, 510 bp, Stenotrophomonas maltophilia
atgaatgacgttgaaagaagacaagatgggttggacaatgctaatgctctcgcagaagcggcgggtagacgcagacagttgatggaacaagaagtgaggctgttacgcgaaaagccgtctgtgattccgtcagagcgagcgaagcaggaagaagcgttaaaagaagtgcatgcaaaacaggttgaaggtcagcggaggtatgaaaaagaggtgtcttcgtttcagagcccgcaggacgttgagcaagccatgagatctcagtttggtcgcactgaacctcgcgaggttcaagtcgttgagatcgatgctttgcaaaagctgaaagaacgtcgtattcgtaaaggcattgcaatcgatgaaagagcgccaaaacaagttaccaccaatcgttgggcggctttccaggaggctgagattgagcgttatgaagagcgtcagaaagaacagagggcgttggacaagaaatacgacgggccagggcgcggggacaaaggttcatcgttctcctaa

SEQ ID NO: 515279 - DNA, 444 bp, Stenotrophomonas maltophilia
gtgagcaagtggatgttgattgccgcgcttgtcgctgcgcctttggccgcgcattcggcagagcccgaccctctgtcttgcgaagctttgaccgcaggcaagagcaagagcgacgaagaaaagatcgagactttcgcgcgcatcattccgaacggcgcggccaaacaccttgctgatgtctatcgtaaggagctggtgaaaaaaggggcgaataactactctgcgttcagcgcttcgctcgactactacgcgaaaatagctctgccccttgctgatgaagtgaccgctcagttcggtcttattgcgcagaaggaagggtcttacgtcaacgcggtaaaggtctactgcaaagacaagaagatcaacatctctgagtttttcaaccgcgcgtttgatgcagcgctaatggacaaagtgaaagacttgcctgacgatgacgattga

SEQ ID NO: 515280 - DNA, 1641 bp, Stenotrophomonas maltophilia
atgaacttacagaacaaaaataacattgatttcagtgatgtcaacttctttgatgaaggagatccgcttgccgacgaatgcggtccatcgagcacggttgcttctgctttgccggtgattcaagttgaaaagccaggccaagtcgctttggtcgaagaagaggttgcgccggtcgcagaagtggttgagttatcgacagaggagagttccgaagaggcaaagggtgaggagaattcttctaagaaaagaaagcccccaagtgtccctttacgctttgcgaaccatcttctttctcaaagaaacgggggcgcgtggggaggtcgggttgaagaaggaggcacgctgatccataaatggaacggcagccactatgcttatatttcagactctgacggcatgactatggctaataaatggctgaccgagcacgccccagatcaagccacaaaaaaagccgaagagcaagcgtggaagttcttagagagtcatctccgctggcgctgtcccattcctgcatctgaccctgacagagttgtgattccctgccgcaattcctacattcatatgaatgatgagggagatatctcagtccgttctcccagccccgcttttgggttgacgcattcgctgaacatcgaattgggtaagccggggcaggcataccgacctgtttcttttaaagagaattcaaagtttaaggcgttcattaatgatgctgtcagttccgctgcaatgcatgattttctacaagagcagtgcgctatgttgctgcttccccaaaactatcaaatggctgtttggtggtggggggaaggaggcaccggtaaatcgacgctcgctgaattgatgtgtctgtatcaatctaacccggcccgacctgatctgcacttactggataagagcttcggtaaagaagtgattctcggagcatcgcttctagtgacaagtgaagtgacatctggaaagtggtgcgaagagacctggaaaaagattgttgcgcaagacggcatcagtgttgagcgaaagaacatcagcacgatcaagacgtatcgaaatcgagccaaatggctgatttgctcaaacgatgccccgtttgttgtagataagacgaacggcgtttggcggcgaatgacgattctaaaatggacgaacgttgttccagaagagcaaaggaaaaaggactattacatcgagatgtttaaggaagagggggatgctattttatgttggatcttagagggggcgcagcgtctcgtaaaaagagggcgattcttgcctgagagtcagtggccagcagaagccatcgctatgaaggaagaagtcaagacggtctccaacaacatcaaaatgtggatgaaagaggaaaaggtcagcaagagtgaaggctttcaggacaaagcggtcatctatcaacgctatctcgatttctgtcagctctttcaaaccattccggttgatacatctattttttggcgaagcatgagcagctacatcgcaggctttgagcaaaagagagttcggatgaaagtcggaggtgtgaataagccgacgtatgttgcaaacattcaatggtgcacaaaagaagagggtgagcaaatggacctttcatcccacgatgattttaatgaggttccgttctaa

SEQ ID NO: 515281 - DNA, 438 bp, Stenotrophomonas maltophilia
atgttcgaatggttcaagaagaaagacccgttccaaatcaacgattcgagagcgggagatgttgcgaaggatgcagcaacgctgctctacatgcctctcatgatgtgtaagagctacgacaactttcatgagcgcctgcaagatccagaggtaagagggtatatggttggcttctttgacgccgcctcccaggcaactcagcttcaattgccggatgactcgcagttcatcacgttcattgctctgtgccaccgaattctgctggatggtctagtcactgacccaggctcttacgctttggactctgccatgcttcaaggaacccctgcttttgagaggggtcagaagctcggcggtagcgaatatttcgagttcatccgatccagacggcctccaatgggtcttggacgactgattggtcaacacgaccaggaataa

SEQ ID NO: 515282 - DNA, 1671 bp, Stenotrophomonas maltophilia
atggcgcttgaacattgtgtggggccggtgtgcttctttcacctcgacccggcttctccaaagattttcggtttcgctgagctgttggcgggcctggctctgatcgtcgtcgcctggacaatcgccgacttccgcttcaagttccgcattgccacagcgccgattcctgtcgcgaggatctcatcagtcgttgtgatgagtgtctctgccctagcgcttttgacagatctatggcgagcagagggttggttggtcccaagcggcggacccttaacggcctcttcttggcaatttgtgctcgctgcactgttccttctgagcttcttcctatgggtgtggtatgcggtcatagctccgcccgccctgtcttcacgaactgggaagaagatagagcgccagatctttgagaccatttcaaacggttcgccgcatgaactggcgattgttgcggatgaggtccgtcgttacgcaaaaacgcttgctacccaagcgaccaactacgacgagctataccttgccgtgtcgcctgaggatcgttcacatccgtcgctggttgaggcaagcgctaataacatctatgcaattctttcagatcgcaggatgtgtcgggcaatcgtaaaaaacgctccgggcgctgctgtggatatttttgaggcgataagattcagtggccgctacaacgtcatggccggaaccttaggcctcaatctggtcgaggaaggaatcgctgacaaagactctgttctttactctgagggttccgggttggttggcggtctcatggtctttgagcgctcgctccttcgcaccatgtttagtgactacttcatgttgtgtggtcaatcacaactcttgaaagttgatatcgataaggctgcactgtggtctgccgtagagctaggggcttatacacgagtcgttctggctgcctatactggatttgcaatgaggcacctggatgtgcgaccaagggtgtttgagcactcttttgccatcattggcggggctgtaaaggatctttcaacagttccagtagaggaggacctttttcgacacgaatcgattgccaaactgcgcgtcgtgatggcctttatcgaaagcggtgttgggctgctatcagcgcagccaaaagataatttgagatacgttagaaaaaggagcgggaaccacactcagcctgatcttctcgatgattgggtgacaatcattgtgttgcagattcttcaagttgcctcagtcagtcggtcgcagtggttagaccatgaggtgatgcagatagttaatcaacaaaccttcacgtctcaccgtttctcttccagagccggtagaagaattcttcacagggtgcgccgtaggctgcttgatatgcttcaagttcaatcggggatggcagctatgcgtgtcgcaaacgttctgcgtttctgtttgacttccttttcccacgacagcagcgccagctatcactcaaagcaatccaggccattgtttcttgctgtccgaggctggttggctgaaaactttttggcgtggtatcgcattgccccagatgttgctaacgcttcactgcctgaggggtgccagttcgatcaagcaaactccaagattattctcaatacgcttggatgggttcagggcgaaggttcaacggatcacatcatcgatcttcgctga

SEQ ID NO: 515283 - DNA, 984 bp, Stenotrophomonas maltophilia
atggtcacaaacgcccaaagatactttaaagaagtgatgacgaagatcgaagccgaaagaaagcttcgagttgctcccaatgaggcgttcgtcagcttggacacccacgaggtgaacgaagactggttgaagagcagcagcacaacggacgctcatcgaaagaacgccatagaccgttggttcatggctcgtttctgtcttcctgctcaggctggatgcgacttcgtagaaggcaaaggctacgtgtttcaagatactggtccgcacgacgctcaaaaggttctgcatgaacgttttgacggcctagttgactcagctctgatagatagcgtggcagaggacatcaccgatgactggggcatgctatgggtcaagacaccgctcgcgctttacatcgccgagaatgacgccgaagttggcatggaagccgacgtgttatctgtattggataagcggcttggacgcttgcacagcattgctcaaatgaagggtgacggcgttagcgaaattgcagcgcgcaatctcgtgtatgcctcgatgatttcagcttacgagtcatttttgtgggagacgctattgttctgggtgaggaacgatctgcggacggtgaaacgacttttgaccaggcacgctgatttcaaagacgccaagattccatatcaccaacttttagaggtctctgacccgattgaaactgctcgcgtgttaattaagacgtttctccaaaacgtggtgtggcatcagcggaaaaaagttgcggaactttatgaaaaggcgttctatattaaaatgccggacacgagtgttttggatgttccgttgaagattcgacatgatatcgttcatcgaagcgggcgaaaggtgggcggcggtcagcatgcggtgacggaaaaagctatattgcaattgacgttggatatttacgccattgcgagcctaatccagaccgctgttggcaaagcgttggtcaagccgggggaatga

SEQ ID NO: 515284 - DNA, 789 bp, Stenotrophomonas maltophilia
atgaccatgcaagtgctagacactttaatcttgaacggtcaacccaagggcatgttgacctccccaccgctccccatcgacagaccccatgctttggaagaggttgaagcagacgctgttgaggacggcatctggaacagcaccgcctgttggagaggctacgtcgcaacctgggagttggacggcgacgaactctacttgaagcaagttcaaggcaagtatagaacggttggaccagggttgatccttgctcactggttcacgggcacagtcgctgtcaacgatggcgaggtgcttcgaaacgcgggcttcgcgatggtctacgagcgagaaattcacctgtctttcgagcaaggcttcttgatagacacacgagttgtggacaatcgagagaagaatcagcttcctctcagtcagcctattgctgctgagcctccctcaacgacacgccctggttggcagtgggcggcaggaacagcaacagtgatgcttctgtgtccggcattgttctttgcctggatgccctggacgtggtggggaatcgctcttaaagccgtagcagtaatcttctggctctcagcctgcgtcaatctgcttcgttcgacatccatgaagtttcgggcttatggcaactccggacctggattcgttcttacgtccatctttatctgcatcgcgttctccatagcaggcgggttttggcgcacgtctctccttgttgttgcaggcttcttgtatctgtctgctctaatgctgattcgaaagcctgagcctattgacaatcactga

SEQ ID NO: 515285 - DNA, 768 bp, Stenotrophomonas maltophilia
atgcggctcacgcccctgcgcagcctacccacccggcccctgacagtctccggaggcgatcagccacgtggaagaaagaagaagagcaaaagcgcttggccggccgctctttgtagagccgagcccacgctcggctgcatttcgatcagatatcgaatagtcgattccgatacagattcatccacgcatggcgtggatctaccgtgtcgaccaaggtcgacacctaccagcagcagcgtcgaaccgtcagaggtggggcggtgtgggttggcaggaccgttggcgccatgggcccgaggcatgcctcgggcggtttgcgcaggacagcgcacacgagcaaggcgccatcgagcccccatgggtgagggcgctttgcctgcgaggcatgcctcgcaagcgcccgaacgcacagccgccagcggctgggccggaccccggaggggggtttacggcgtgtcctgccagcccacaccgccccgacatcccacggattgcccgctgttgctgttgctgttgctttggcagttgcctctgcgggtgccgggtgcaacccggccgaaccgcttccctcagggccaggcaggcggtgcggccgcccaggcctgctgcacctcggccagcgacgcgcgctcatcctcgcgccattgcggcagcaactgcgcatggtgggcactggtgctccactgcgtcggctcggtacgcaccgcagccgcgtaccactgcaccgcctcctgcttctgtcccagccgccacagcgccaatgcataa

SEQ ID NO: 515286 - DNA, 414 bp, Stenotrophomonas maltophilia
atgctcgtgcttcgcattctgagcctggcgctgctggccgcaccttcgcttgcacaggcctgcgacggcggccgctgcagcgaagtgggcaatggccaactgcaatgggatgcgtcactgcgcgtgcgcggcctgtactacgacccgacccggttcgggattggcggcgcagaggatggctatggcctgctgcgcgcgctggcctcggccacctatgtggaagacacctggcaggcgaagctgcagctgggtgtgcatggggagaatggcaaggccggcggccctggccgtaccgaccgcagcgcgctggatgtgcagcaggcgtattggcgctggcagcagggcgcgttccatctgcagctggggccggcaggagggcggctatggcagttcacggctgctgtcggtgcgtga

SEQ ID NO: 515287 - DNA, 1128 bp, Stenotrophomonas maltophilia
atgaaacgaaagcttctggcggtgttgtacatgggcgcggcgctctgtggaactgccagtgcacaggtcaaggttctgcccatcaagggcgcaggatcggccgtgcctgcaaagctctatgcggaatcggcagacaggatcctgcccaccaatgtgacctatcgcgccgtgggtgatgaactcgcacggcgggccttccttgagaatgtgcccgagacttccggtgaggcccggccgccgcatttcatcgcgaccgaatcggtgctgaccggcgctgagatcctggcgtacaacacgaatcatgcgaagcagtttggcgcgctcatccaggtgccagtggccggcctggcgattgcgttgccgttcaacaagcctggcggtaccctggacttgagcgtgccgcaactgtgccgcctgttctcgggcaagatcgagtactggggtgacctcgatcctgcccgttccggggtggtcagggtggtctatcgtgccgagaaaagcggaacgaccgaactgctgacccgcttcctgtccacggcgtgctcatcgttggacaccgccggttccaatttggtgggaggctcgttcaagaccacccgcgattttgcttcgctgttctcggcattgcccaccaacttcgtggctgcaaccagtgagcaggcgcagtatgaccgggtgatggccaccggtggtgccattggatacagcggcccggacatcgccgtacctctgtccgatccaacacgcgttgcgaaggtgcgcggctactcgcccgatgacgccagcgtgcgcgcgacgctggactcgatcgctcctccgaccggttccgcggcggagcgaccggacaactgggtgccgactttcagcagcccccctgtgggctatcccatcgtcggcaccaccaacctgattttcagccagtgctatgccgagctttgggaagcgatgtcgctgcgggtgtttctgattccgcattacgccaggaggaatgatgcggcagtcagcgcacatcggttcgttccactggcccccgcctgggccgaagccatccgcagccggttcgccgtggcaggtgtgccgacaggcttgaacaatcccagtacctgtgcgggtatcggtcgtccgtga

SEQ ID NO: 515288 - DNA, 549 bp, Stenotrophomonas maltophilia
gtggggaatggtgaggagatcgatctcggccagggggactacaccgactccgagttgaatctggaactgctattggatgtggtccatgacttcaaggttcgattccctgacgagatgcccagcgtgaagctggctccagaggaaggctggtcgcagtggattgaccatggtcggccacccaaacgattgagtcaggaactgccgttccatctgaccacgtcgatggacttcagtatgaagcttcgttgcgagtacgacgcgggtgatcgctgtgggatacgcaactcccgcgacgacgtgatagcgccagtggaggttgatgtgacgattcccggtatgagcactgtgcgcgatggacggcctgcgcagaacacagcgctgctgccggatgatgcgcgggcgccacgcttcaccccggatggctatctgatgcagcggcgttcgacgctgcgcttcaccgcgggccgcgaggcggtgacggagatgctgaagtcgcctggctctcattggcagggcaacatgacggtggtgtttgacgccaatccgtga

SEQ ID NO: 515289 - DNA, 666 bp, Stenotrophomonas maltophilia
atgaaaatccgtatcgtcatcgccgacgaccaccccgtcatcctggccggggtgcgtgagtcgctcgcggccgagccgggcatcgaaatcgtggcgaccgccggcgattctacggcattggtcgaggcgctcagcaagcacgcggtggacgtaggcgtcactgacttctcgatgccgggtggcgactatggtgacggcgtggccatgcttggcttcctgcgtcgtcgcttccccaagctgccgttggtggtgctcaccagcatctccggcgcgcaggtgctggccggcatcgggcgcaccggcgtgaactgcatcgtcggcaagatcgaccccattgccgagttgacccacgccatccaggccgcccatcgccacgatggctacttgtccggcagcatcgtgcagcagctggaaaaaactcaggacgttgccctgaccaagcgagaaattgaagtgctgcggatgatcgcgcagggcatgagccagaaggagatcgccgaacagctcaagcgcagccggcagaccgtcagcacgcagaagcactcggccatgcgcaagctgggcctggaacgcaccagtgaaatcttcgattacgccttggagcagggcctggtatcggcgtcgcaagtagcgcgcggtgtccctgacggaggccatggtggatga

SEQ ID NO: 515290 - DNA, 927 bp, Stenotrophomonas maltophilia
atgaagaattcgcgtcgcaattccctgctggccgcgctgctggtgtgcctggcccctgccgctgcgtcggccgccgaaggctatttgaccccgtacaagaacggcggcagtggcgccatgccgtccggctacagcaagctctattttgaagttatcgatggtgactgggtaggggagctgaagcttccggtcaatccccgtgccgacgacgttgtggtgctgagctccatggcgacctggggctcccgcctggatcttgttggtaccgccatggctgaccaggtctacctgccgattgagacgctgaccaatgtcgaactgcgctggaatgaccaggccaagcagtgggatgtggcaggtggcctttcggcgcgtgcgctgcagggtagcaacgttccgaccgagaccattgccgtttccgacgagctgatgacccagctggttctgagcgatggtcgccatgcgggcagggttgaattgcctcacagtgcgccggcaggtgcacagctggtcgtttcgaaccgtgccacctggggtaccacgatcagtggcacggcgctggctgggggcgattcgcaagtctgcgcccctgggtcggactgcggctacgttttcaatgccgatggaaagtggcatgcccgcaatggccgtgagcactatcagccgaccacgtcccagctacccaagcctgccgctcgctggaccgatgtaatcgcgcgcggcccggctgatgatgtgtttacccctccgcagatgacgctgcctgtgcaggcggtggaaggcgatatctatcgcatggcggacatgtcgaactcaggcttctactccatcaatggagtgaccttgacggcaaagccgctgatttacgtgtatcgggccggtcagggtacctgggtgccgcaggacacctggatgcaccagccgtaa

SEQ ID NO: 515291 - DNA, 687 bp, Stenotrophomonas maltophilia
atgcataccctctccctggcattcgcgacagttgccgcgctctgccttgcctctccctcggcatacgccgaaacctcctccggccactacgccaccgcccgcctcatcagcgctgaccaccgcgccaacaacatggatgcgagcgctcgcccgggcattgggcgtttcgttaccggtgacgagcgccaacgctttgtcaccggagcggttggcttcggctatgcgcacggcaacggctggcgtaccgaaggcgaatacaccctgcgccgcagcgatacctacaccagcggatccagcatcttcgccaccagcttcaacaatcacgatgtcagctcgcagcggctgatgctcaacgtctaccgcgacctgaccctggcccagggctggaccgtgtacggcagcgccggtgctggtctggcccgcctcacgtcgggcggctggcagggcaacgaaagccgccggtacgacagcgccacccgcacgggcctggcgtggtcgctgggcgcgggtgtttcgtatgccgccagccagcagatgacgctggacctgggctaccgctatgtggacatgggcggcaccgaaagcggctggaatgccttcggcaatgcacgcggcctgcaggacgaaaagatgcgcctggacctggcgtccagcgagatccacctgggcgcccgctgggcgttctga

SEQ ID NO: 515292 - DNA, 531 bp, Stenotrophomonas maltophilia
atgaacaagctcgcaattgctctgtccgccgcgctctcgctgggtgctgctgcttcggccaacgccgccgaagcgaccatcaacttcactggcaccatctccagtgtgacctgcccgatcgctgcgggcggagcgtctggtactgcggtcacgctgatgccgaccagcatttcgaccatcacgaacggtagtgatgcggcacgtgaaacggcgttcaacctgacgctgggaaacagcggcaccaagtgccctggagaaactgccacgatcgaattcgagaagaccaatgttgagaccaatggccgtctgaagaacaccgcctcgaccggcgccgctgcgaacgtggagctggcgctgatctacgaagatgctgaggtgaatctccaaaccagtacgggcatcgaagccgacgaagtgggcgacaacacctatctgttccccttgaaggcccgctacgaaaagctggcagccggcgatgtgaccgagggcagcttcaccagcgcgctgggcatcaacgtcagttatcgctga

SEQ ID NO: 515293 - DNA, 753 bp, Stenotrophomonas maltophilia
atgaatctcgacaatcgttctcgcacgaagtccctcctgctggggctggggttggggctggtagccagcgctccggcaagtgcagcggtagtgatggagggtacacgcgtagtttttcctggcgacagacgggaagtaagcgtccgtgtcgagaatcagtcggatactccctcgctggtgcaggcctggctggatgatggagatccgcatgcaacgcctgccagtgccaaggccccctttgttgttcgtccgcccatctttcgtattgataccggcagacgacaggttctaaggcttcagcaggtcggggaagcaccgccacaggatcgcgaaagtctgtactggttcaatcttagagaagtcccagcgaccggcagcagtgaacagtcaagcgatgacgcgagtcttcacctgatcgtccggacccgcgtcaaggtcttctaccgcccgaagggtttgaaagcgggcgacgccgcaaaggcgccgcaccagcttcaatggagcgtctcctcgaacaacggcggcggggcgctgactgctttcaaccctactccctatcacgtcaatctgaacaggattgatgcgaagcaaggggcactgaccatcggtgacggcattgtaagcccgttctcgtcggcccagtttccactgacacattcgcaaatggcagacatccagcagcacgtcagctttgagtacatcaacgatcacggcggaagagtgacgttgaagacgccgatcgagccacgctga
